United States Patent Application Publication US 2005/0244851 A1 - sequence listing, part 104

SEQ ID NO: 4054553 - DNA, 25 bp, Homo sapien
tactccctactctcctgaggcagaa

SEQ ID NO: 4054554 - DNA, 25 bp, Homo sapien
taaaaatgcgggttgcctgtggcat

SEQ ID NO: 4054555 - DNA, 25 bp, Homo sapien
ttgggatgagccgacatcgggccat

SEQ ID NO: 4054556 - DNA, 25 bp, Homo sapien
acctgacttagatgcacttccctga

SEQ ID NO: 4054557 - DNA, 25 bp, Homo sapien
gcttaaccaaagaatgagccccagg

SEQ ID NO: 4054558 - DNA, 25 bp, Homo sapien
gaattggaaagaacgacactcgagc

SEQ ID NO: 4054559 - DNA, 25 bp, Homo sapien
tgaggcctagctctctaaaacggtg

SEQ ID NO: 4054560 - DNA, 25 bp, Homo sapien
aaagaatctgcggtttggccaccca

SEQ ID NO: 4054561 - DNA, 25 bp, Homo sapien
cagttgccccggtagacttcgatct

SEQ ID NO: 4054562 - DNA, 25 bp, Homo sapien
cagtcttccggaactcgcccgcgta

SEQ ID NO: 4054563 - DNA, 25 bp, Homo sapien
atgatgtgggcctcgaagtccgcgt

SEQ ID NO: 4054564 - DNA, 25 bp, Homo sapien
agtccgcgtcgtgcacgccagtctt

SEQ ID NO: 4054565 - DNA, 25 bp, Homo sapien
aagattacaggcgtgccccaacacg

SEQ ID NO: 4054566 - DNA, 25 bp, Homo sapien
cttttagtagagatggggcttcacc

SEQ ID NO: 4054567 - DNA, 25 bp, Homo sapien
taatccgcccgcctcagcttcccaa

SEQ ID NO: 4054568 - DNA, 25 bp, Homo sapien
acacgcctggctaattttttgtact

SEQ ID NO: 4054569 - DNA, 25 bp, Homo sapien
cgtggatatacttgaagaaggctgg

SEQ ID NO: 4054570 - DNA, 25 bp, Homo sapien
ccagcatccccgtggaagggtaccg

SEQ ID NO: 4054571 - DNA, 25 bp, Homo sapien
agggtaccgcccgtgatgctctgtc

SEQ ID NO: 4054572 - DNA, 25 bp, Homo sapien
gtgatgctctgtccacctgtcgtgg

SEQ ID NO: 4054573 - DNA, 25 bp, Homo sapien
tatccactcgaaggaaggacttcac

SEQ ID NO: 4054574 - DNA, 25 bp, Homo sapien
cactcgaaggaaggacttcactggg

SEQ ID NO: 4054575 - DNA, 25 bp, Homo sapien
tttatccactcgaaggaaggacttc

SEQ ID NO: 4054576 - DNA, 25 bp, Homo sapien
ttctttatccactcgaaggaaggac

SEQ ID NO: 4054577 - DNA, 25 bp, Homo sapien
ttttttgaggcagagccctgctttg

SEQ ID NO: 4054578 - DNA, 25 bp, Homo sapien
ctcccacctcatccttgagtggcta

SEQ ID NO: 4054579 - DNA, 25 bp, Homo sapien
ttttgaggcagagccctgctttgtt

SEQ ID NO: 4054580 - DNA, 25 bp, Homo sapien
acctcatccttgagtggctaggact

SEQ ID NO: 4054581 - DNA, 25 bp, Homo sapien
cagaaggtccaggaccttgaagggc

SEQ ID NO: 4054582 - DNA, 25 bp, Homo sapien
aggcgctggcgatccacagaaggtc

SEQ ID NO: 4054583 - DNA, 25 bp, Homo sapien
atcctgctcaaagcccacggttggc

SEQ ID NO: 4054584 - DNA, 25 bp, Homo sapien
gcaggttcttggcactctcagggta

SEQ ID NO: 4054585 - DNA, 25 bp, Homo sapien
tgggcacctaagagcattgtcctgg

SEQ ID NO: 4054586 - DNA, 25 bp, Homo sapien
gacagtaccggccagatgacttaga

SEQ ID NO: 4054587 - DNA, 25 bp, Homo sapien
gacttagaggcagtccttttggacc

SEQ ID NO: 4054588 - DNA, 25 bp, Homo sapien
gaagtgacagatgcctcaattccca

SEQ ID NO: 4054589 - DNA, 25 bp, Homo sapien
gctccggggtcctggacagggtcca

SEQ ID NO: 4054590 - DNA, 25 bp, Homo sapien
caaacaatcagccaggaatctaatg

SEQ ID NO: 4054591 - DNA, 25 bp, Homo sapien
accggtagctggcagcatgcaccct

SEQ ID NO: 4054592 - DNA, 25 bp, Homo sapien
caagcaaagcttagatttgggattc

SEQ ID NO: 4054593 - DNA, 25 bp, Homo sapien
tgcaccctgccagacaaggcagagg

SEQ ID NO: 4054594 - DNA, 25 bp, Homo sapien
catgatgaagttgtgcccgtccacg

SEQ ID NO: 4054595 - DNA, 25 bp, Homo sapien
ccaggcactatctggaacagcttct

SEQ ID NO: 4054596 - DNA, 25 bp, Homo sapien
gggttctcgccaggcactatctgga

SEQ ID NO: 4054597 - DNA, 25 bp, Homo sapien
gttgcccgagttccccaccacggca

SEQ ID NO: 4054598 - DNA, 25 bp, Homo sapien
tggctgtcaaaccagtcggaggcac

SEQ ID NO: 4054599 - DNA, 25 bp, Homo sapien
aatgttaccgtcaaagtggctgtca

SEQ ID NO: 4054600 - DNA, 25 bp, Homo sapien
aagagcagggacatgatgaacacca

SEQ ID NO: 4054601 - DNA, 25 bp, Homo sapien
cacctctggacgtccggtggaagat

SEQ ID NO: 4054602 - DNA, 25 bp, Homo sapien
ttttcccagcccgctgaggggccag

SEQ ID NO: 4054603 - DNA, 25 bp, Homo sapien
cactcttttcccagcccgctgaggg

SEQ ID NO: 4054604 - DNA, 25 bp, Homo sapien
gcaggcgggtgacggtcaccgtggc

SEQ ID NO: 4054605 - DNA, 25 bp, Homo sapien
gccggcaggcgggtgacggtcaccg

SEQ ID NO: 4054606 - DNA, 25 bp, Homo sapien
gagatcgagatcctttccgcagtag

SEQ ID NO: 4054607 - DNA, 25 bp, Homo sapien
catgtagggagaacacacgttggca

SEQ ID NO: 4054608 - DNA, 25 bp, Homo sapien
tcatgagcagacaatgaggcggccc

SEQ ID NO: 4054609 - DNA, 25 bp, Homo sapien
tgtgagctcacagtaatcccctggc

SEQ ID NO: 4054610 - DNA, 25 bp, Homo sapien
tcagatccatgccaagcgtgaggga

SEQ ID NO: 4054611 - DNA, 25 bp, Homo sapien
gacaaagtgaatgccagcgtccctg

SEQ ID NO: 4054612 - DNA, 25 bp, Homo sapien
tccaaatctgcctagcggtgctgct

SEQ ID NO: 4054613 - DNA, 25 bp, Homo sapien
tgttcaagaaacgtagctgcccctc

SEQ ID NO: 4054614 - DNA, 25 bp, Homo sapien
ggctcaaaggtgcttcttccaatgt

SEQ ID NO: 4054615 - DNA, 25 bp, Homo sapien
ttctcagggtcgaaagtgaagcccc

SEQ ID NO: 4054616 - DNA, 25 bp, Homo sapien
catttagcagatcccactctaggca

SEQ ID NO: 4054617 - DNA, 25 bp, Homo sapien
aactacccacggctcaagggtgaga

SEQ ID NO: 4054618 - DNA, 25 bp, Homo sapien
caggtgtgcactacttttgttgttt

SEQ ID NO: 4054619 - DNA, 25 bp, Homo sapien
taatccatttcacttggagttatgt

SEQ ID NO: 4054620 - DNA, 25 bp, Homo sapien
ggagttatgttactatcttattcag

SEQ ID NO: 4054621 - DNA, 25 bp, Homo sapien
gagccaccttgctcagtcctcagac

SEQ ID NO: 4054622 - DNA, 25 bp, Homo sapien
tcttccttggtaatgtggtcaacaa

SEQ ID NO: 4054623 - DNA, 25 bp, Homo sapien
gatttgtttgggcagctaaggaccc

SEQ ID NO: 4054624 - DNA, 25 bp, Homo sapien
ggcagatgatgcaagactggccaaa

SEQ ID NO: 4054625 - DNA, 25 bp, Homo sapien
tttgaggatggaccagctcaggtca

SEQ ID NO: 4054626 - DNA, 25 bp, Homo sapien
ttcactgacccaggtaacacgggcc

SEQ ID NO: 4054627 - DNA, 25 bp, Homo sapien
tacaaacacccctgatggaaggccc

SEQ ID NO: 4054628 - DNA, 25 bp, Homo sapien
caaacgggatctttcagatgtggcc

SEQ ID NO: 4054629 - DNA, 25 bp, Homo sapien
gaactctagccaacacaatgagggc

SEQ ID NO: 4054630 - DNA, 25 bp, Homo sapien
gcctccaggaaggttgcggtttcag

SEQ ID NO: 4054631 - DNA, 25 bp, Homo sapien
gacggtgcgcgtccatcctatggga

SEQ ID NO: 4054632 - DNA, 25 bp, Homo sapien
taaggagtttctctgcaaggccaaa

SEQ ID NO: 4054633 - DNA, 25 bp, Homo sapien
cagggccagccctaccttggttgat

SEQ ID NO: 4054634 - DNA, 25 bp, Homo sapien
tactcgtctgcatgtctggagaatg

SEQ ID NO: 4054635 - DNA, 25 bp, Homo sapien
tgcacagttattgatcgacaccagg

SEQ ID NO: 4054636 - DNA, 25 bp, Homo sapien
gatgtataataaggagccactgagg

SEQ ID NO: 4054637 - DNA, 25 bp, Homo sapien
cacaagatgcgtgtgttctgcacag

SEQ ID NO: 4054638 - DNA, 25 bp, Homo sapien
gccccgctcggcgagcaggaccacg

SEQ ID NO: 4054639 - DNA, 25 bp, Homo sapien
cccgctcggcgagcaggaccacgct

SEQ ID NO: 4054640 - DNA, 25 bp, Homo sapien
ccgctcggcgagcaggaccacgctc

SEQ ID NO: 4054641 - DNA, 25 bp, Homo sapien
agccccgctcggcgagcaggaccac

SEQ ID NO: 4054642 - DNA, 25 bp, Homo sapien
gaagagaggtcattgtgagcccacg

SEQ ID NO: 4054643 - DNA, 25 bp, Homo sapien
gattcctggtggcatgggtcctaca

SEQ ID NO: 4054644 - DNA, 25 bp, Homo sapien
gatgacatgctgtgacctactcagg

SEQ ID NO: 4054645 - DNA, 25 bp, Homo sapien
taaaaggtccagtcacataggtgcc

SEQ ID NO: 4054646 - DNA, 25 bp, Homo sapien
tactgacgttcagggattcctggca

SEQ ID NO: 4054647 - DNA, 25 bp, Homo sapien
aactgcccagacgtgcggatggtga

SEQ ID NO: 4054648 - DNA, 25 bp, Homo sapien
ttgataaatcgacccagctcagagg

SEQ ID NO: 4054649 - DNA, 25 bp, Homo sapien
ggaggccctgactgcatggccttct

SEQ ID NO: 4054650 - DNA, 25 bp, Homo sapien
tctaaggaagtaccagtgttggccc

SEQ ID NO: 4054651 - DNA, 25 bp, Homo sapien
cagcattagtggcagggtatgccca

SEQ ID NO: 4054652 - DNA, 25 bp, Homo sapien
tgggcactgccacttgagatgaaaa

SEQ ID NO: 4054653 - DNA, 25 bp, Homo sapien
tggatccagggaaatactaagccct

SEQ ID NO: 4054654 - DNA, 25 bp, Homo sapien
tcagggcagccagcaggcatccctc

SEQ ID NO: 4054655 - DNA, 25 bp, Homo sapien
cagggcagccagcaggcatccctcc

SEQ ID NO: 4054656 - DNA, 25 bp, Homo sapien
cccgcccacacgagggagcccggcg

SEQ ID NO: 4054657 - DNA, 25 bp, Homo sapien
tgccgggctggaacgggccggtctg

SEQ ID NO: 4054658 - DNA, 25 bp, Homo sapien
ccgcccacacgagggagcccggcgc

SEQ ID NO: 4054659 - DNA, 25 bp, Homo sapien
tccggacccgttagctcgcagctct

SEQ ID NO: 4054660 - DNA, 25 bp, Homo sapien
gtcgtccggacccgttagctcgcag

SEQ ID NO: 4054661 - DNA, 25 bp, Homo sapien
gacccgttagctcgcagctctctcg

SEQ ID NO: 4054662 - DNA, 25 bp, Homo sapien
gttagctcgcagctctctcgtccgc

SEQ ID NO: 4054663 - DNA, 25 bp, Homo sapien
gccgccgcctcagcccggcccctcc

SEQ ID NO: 4054664 - DNA, 25 bp, Homo sapien
cctgcccggcttgaagggaagggtg

SEQ ID NO: 4054665 - DNA, 25 bp, Homo sapien
cacccctgcccggcttgaagggaag

SEQ ID NO: 4054666 - DNA, 25 bp, Homo sapien
ccttgcgcaggggtcatactaatct

SEQ ID NO: 4054667 - DNA, 25 bp, Homo sapien
gcgcaggggtcatactaatcttctc

SEQ ID NO: 4054668 - DNA, 25 bp, Homo sapien
ttgcgcaggggtcatactaatcttc

SEQ ID NO: 4054669 - DNA, 25 bp, Homo sapien
tagtatggaacgcttcatgaatttg

SEQ ID NO: 4054670 - DNA, 25 bp, Homo sapien
atccacctggttgaagtggacactc

SEQ ID NO: 4054671 - DNA, 25 bp, Homo sapien
ccacctggttgaagtggacactcag

SEQ ID NO: 4054672 - DNA, 25 bp, Homo sapien
agcatccacctggttgaagtggaca

SEQ ID NO: 4054673 - DNA, 25 bp, Homo sapien
acctggttgaagtggacactcaggg

SEQ ID NO: 4054674 - DNA, 25 bp, Homo sapien
ccccttagggaacaggcctgcaagt

SEQ ID NO: 4054675 - DNA, 25 bp, Homo sapien
tgaccatccatgcagaaagctggcc

SEQ ID NO: 4054676 - DNA, 25 bp, Homo sapien
ttaggagcccgcttctctcggtggg

SEQ ID NO: 4054677 - DNA, 25 bp, Homo sapien
tacccaagttgtctaggactggcag

SEQ ID NO: 4054678 - DNA, 25 bp, Homo sapien
gcgccacgtcaatgggccggaattg

SEQ ID NO: 4054679 - DNA, 25 bp, Homo sapien
aattgggtccccagtaatcgaggat

SEQ ID NO: 4054680 - DNA, 25 bp, Homo sapien
acaggcgcagcctcttgatatcttc

SEQ ID NO: 4054681 - DNA, 25 bp, Homo sapien
gcggaagtctatccgcagggccagc

SEQ ID NO: 4054682 - DNA, 25 bp, Homo sapien
tggtcaccgtggtaaggtaggcaat

SEQ ID NO: 4054683 - DNA, 25 bp, Homo sapien
tggccatctgggagagccgggcaaa

SEQ ID NO: 4054684 - DNA, 25 bp, Homo sapien
cgggcaaacttgtctcggatggtcc

SEQ ID NO: 4054685 - DNA, 25 bp, Homo sapien
caatgagcgacctcagctccttgtc

SEQ ID NO: 4054686 - DNA, 25 bp, Homo sapien
tttctccaactcgacggcaacaagg

SEQ ID NO: 4054687 - DNA, 25 bp, Homo sapien
tcatgaggccggttaggctgtcgta

SEQ ID NO: 4054688 - DNA, 25 bp, Homo sapien
gccggttaggctgtcgtagatgacc

SEQ ID NO: 4054689 - DNA, 25 bp, Homo sapien
caacaaggctagtcatgaggccggt

SEQ ID NO: 4054690 - DNA, 25 bp, Homo sapien
ggttaaggatgaactgttgtaccca

SEQ ID NO: 4054691 - DNA, 25 bp, Homo sapien
ttgtacccaagggtcgttggcctca

SEQ ID NO: 4054692 - DNA, 25 bp, Homo sapien
gatgaactgttgtacccaagggtcg

SEQ ID NO: 4054693 - DNA, 25 bp, Homo sapien
ccaagggtcgttggcctcatagtca

SEQ ID NO: 4054694 - DNA, 25 bp, Homo sapien
gaatgaaatcactacgccaggagga

SEQ ID NO: 4054695 - DNA, 25 bp, Homo sapien
cgcttctaagtctatcataggcggg

SEQ ID NO: 4054696 - DNA, 25 bp, Homo sapien
tgactagggacaaactgtttcctgg

SEQ ID NO: 4054697 - DNA, 25 bp, Homo sapien
gaacctagtcttcatgggtcagggt

SEQ ID NO: 4054698 - DNA, 25 bp, Homo sapien
gaaaaagctgttgatccaaggctgc

SEQ ID NO: 4054699 - DNA, 25 bp, Homo sapien
tgttgtgggagacggagaaaaagct

SEQ ID NO: 4054700 - DNA, 25 bp, Homo sapien
tcctcgatgttgtgggagacggaga

SEQ ID NO: 4054701 - DNA, 25 bp, Homo sapien
tgctgttgagctccgtcagcccttc

SEQ ID NO: 4054702 - DNA, 25 bp, Homo sapien
gcagctgtcaaacttggcctgggcc

SEQ ID NO: 4054703 - DNA, 25 bp, Homo sapien
ctgcaagaggtctcggaatttgttg

SEQ ID NO: 4054704 - DNA, 25 bp, Homo sapien
tggacacggcggccaagtcagaaag

SEQ ID NO: 4054705 - DNA, 25 bp, Homo sapien
tcggaatttgttggacacggcggcc

SEQ ID NO: 4054706 - DNA, 25 bp, Homo sapien
ggagctatgcatctcatttcgtaga

SEQ ID NO: 4054707 - DNA, 25 bp, Homo sapien
cattaggctacccaagaaacacaag

SEQ ID NO: 4054708 - DNA, 25 bp, Homo sapien
gtccaaggtcacacgccaactatgt

SEQ ID NO: 4054709 - DNA, 25 bp, Homo sapien
tttcgtagatgagaggactgaggct

SEQ ID NO: 4054710 - DNA, 25 bp, Homo sapien
gagcttttctccctggtccaaggat

SEQ ID NO: 4054711 - DNA, 25 bp, Homo sapien
tagggctctatctcaacatgggaaa

SEQ ID NO: 4054712 - DNA, 25 bp, Homo sapien
caaagaatcccctcaagtgtggctc

SEQ ID NO: 4054713 - DNA, 25 bp, Homo sapien
caaggatgccttgctatcatgtcag

SEQ ID NO: 4054714 - DNA, 25 bp, Homo sapien
tcactgcagacttccacgttgttca

SEQ ID NO: 4054715 - DNA, 25 bp, Homo sapien
agacttccacgttgttcagagtcac

SEQ ID NO: 4054716 - DNA, 25 bp, Homo sapien
tggagatgttttcactgcagacttc

SEQ ID NO: 4054717 - DNA, 25 bp, Homo sapien
cagagtggagatgttttcactgcag

SEQ ID NO: 4054718 - DNA, 25 bp, Homo sapien
gaaggacatcttcgcctcgtcagta

SEQ ID NO: 4054719 - DNA, 25 bp, Homo sapien
agtactctcgatgccttttgtgtca

SEQ ID NO: 4054720 - DNA, 25 bp, Homo sapien
gcatgatgttcacggcacttgtcac

SEQ ID NO: 4054721 - DNA, 25 bp, Homo sapien
gtggtggcaggaaagcccatccgca

SEQ ID NO: 4054722 - DNA, 25 bp, Homo sapien
catgctggatgtcagctggcccttc

SEQ ID NO: 4054723 - DNA, 25 bp, Homo sapien
cgaggttgatcatggcacagagaca

SEQ ID NO: 4054724 - DNA, 25 bp, Homo sapien
ccttctcataggtgtccagagccac

SEQ ID NO: 4054725 - DNA, 25 bp, Homo sapien
agagcccgcccaatgcacttcttaa

SEQ ID NO: 4054726 - DNA, 25 bp, Homo sapien
tcaaaaggcagttattgaggagttt

SEQ ID NO: 4054727 - DNA, 25 bp, Homo sapien
gaggagtttgtccagacacttctgg

SEQ ID NO: 4054728 - DNA, 25 bp, Homo sapien
tcctccatggtaacatataagccaa

SEQ ID NO: 4054729 - DNA, 25 bp, Homo sapien
tataagccaattagctcctgcatgg

SEQ ID NO: 4054730 - DNA, 25 bp, Homo sapien
gaatggctacgtattgggcagcaca

SEQ ID NO: 4054731 - DNA, 25 bp, Homo sapien
ggcagcacagctctgaatagtgata

SEQ ID NO: 4054732 - DNA, 25 bp, Homo sapien
gacaagcgaactccaaatgagcaca

SEQ ID NO: 4054733 - DNA, 25 bp, Homo sapien
cagatgctgggtgggtctcaagtcc

SEQ ID NO: 4054734 - DNA, 25 bp, Homo sapien
gatgagaggattcctgtacattata

SEQ ID NO: 4054735 - DNA, 25 bp, Homo sapien
cagccccctttcttatcaatgtcaa

SEQ ID NO: 4054736 - DNA, 25 bp, Homo sapien
gagaggattcctgtacattatatac

SEQ ID NO: 4054737 - DNA, 25 bp, Homo sapien
cccctttcttatcaatgtcaattat

SEQ ID NO: 4054738 - DNA, 25 bp, Homo sapien
tacctggcctatgtactctttaaaa

SEQ ID NO: 4054739 - DNA, 25 bp, Homo sapien
tctgtaaagtgattagatggcctca

SEQ ID NO: 4054740 - DNA, 25 bp, Homo sapien
ttagatggcctcaaagatctagtcc

SEQ ID NO: 4054741 - DNA, 25 bp, Homo sapien
tgcaggtgtattgcaccacgctcag

SEQ ID NO: 4054742 - DNA, 25 bp, Homo sapien
cctcagtcaggatggggtccagttc

SEQ ID NO: 4054743 - DNA, 25 bp, Homo sapien
actgcgggcattcatcagggtgacc

SEQ ID NO: 4054744 - DNA, 25 bp, Homo sapien
tcttgaggaagcgtaagtatagctc

SEQ ID NO: 4054745 - DNA, 25 bp, Homo sapien
tgctttacttcctctgaggccatgg

SEQ ID NO: 4054746 - DNA, 25 bp, Homo sapien
ctgctggcccaattagaatcagaga

SEQ ID NO: 4054747 - DNA, 25 bp, Homo sapien
gacaatggattaccttagacacaag

SEQ ID NO: 4054748 - DNA, 25 bp, Homo sapien
ctctgctggcccaattagaatcaga

SEQ ID NO: 4054749 - DNA, 25 bp, Homo sapien
gcagaaggaataggacgacaatgga

SEQ ID NO: 4054750 - DNA, 25 bp, Homo sapien
gtctcatgtgaaagaaaactctcca

SEQ ID NO: 4054751 - DNA, 25 bp, Homo sapien
ctccaatctctaatttagccctggc

SEQ ID NO: 4054752 - DNA, 25 bp, Homo sapien
gaaaactctccaatctctaatttag

SEQ ID NO: 4054753 - DNA, 25 bp, Homo sapien
aactctccaatctctaatttagccc

SEQ ID NO: 4054754 - DNA, 25 bp, Homo sapien
cttggttcgattttttctgttgtag

SEQ ID NO: 4054755 - DNA, 25 bp, Homo sapien
tggttcgattttttctgttgtagaa

SEQ ID NO: 4054756 - DNA, 25 bp, Homo sapien
ttggttcgattttttctgttgtaga

SEQ ID NO: 4054757 - DNA, 25 bp, Homo sapien
tctcatcaggttgttctgaacatgc

SEQ ID NO: 4054758 - DNA, 25 bp, Homo sapien
cttttggcatacaagaacatttaga

SEQ ID NO: 4054759 - DNA, 25 bp, Homo sapien
cccacatctattggcctcttgctgg

SEQ ID NO: 4054760 - DNA, 25 bp, Homo sapien
gctggtcactccaaacttttggcat

SEQ ID NO: 4054761 - DNA, 25 bp, Homo sapien
tgggttggatgctaataatactcac

SEQ ID NO: 4054762 - DNA, 25 bp, Homo sapien
tgaggccactcctatttctatgtcg

SEQ ID NO: 4054763 - DNA, 25 bp, Homo sapien
tgtgcttaaaagtcatgctaatggt

SEQ ID NO: 4054764 - DNA, 25 bp, Homo sapien
tgctaatggtgttccaatagactac

SEQ ID NO: 4054765 - DNA, 25 bp, Homo sapien
tcctagtctggagttctagaaatac

SEQ ID NO: 4054766 - DNA, 25 bp, Homo sapien
caagatgcaggccagtgtgcgctta

SEQ ID NO: 4054767 - DNA, 25 bp, Homo sapien
tacttggacacttaataggacctca

SEQ ID NO: 4054768 - DNA, 25 bp, Homo sapien
caaagtaagctgtcaatgggcaaga

SEQ ID NO: 4054769 - DNA, 25 bp, Homo sapien
ggtcttgaactgaggccatcatcat

SEQ ID NO: 4054770 - DNA, 25 bp, Homo sapien
taataggtctccactattggctggt

SEQ ID NO: 4054771 - DNA, 25 bp, Homo sapien
tgtctgtcacattccacctgcagat

SEQ ID NO: 4054772 - DNA, 25 bp, Homo sapien
tatttgatcagggtatagagtctcc

SEQ ID NO: 4054773 - DNA, 25 bp, Homo sapien
tgggtctccacaatgcgggcaatcc

SEQ ID NO: 4054774 - DNA, 25 bp, Homo sapien
agcaccatgagcagattctcctcag

SEQ ID NO: 4054775 - DNA, 25 bp, Homo sapien
agctctccgatcactcatgtctgtc

SEQ ID NO: 4054776 - DNA, 25 bp, Homo sapien
gatgactgcagctctccgatcactc

SEQ ID NO: 4054777 - DNA, 25 bp, Homo sapien
aagtgtatctgcaaagatgactgca

SEQ ID NO: 4054778 - DNA, 25 bp, Homo sapien
tgagctttaagagtgattcagactg

SEQ ID NO: 4054779 - DNA, 25 bp, Homo sapien
ggattgcttgagctttaagagtgat

SEQ ID NO: 4054780 - DNA, 25 bp, Homo sapien
tgcttgagctttaagagtgattcag

SEQ ID NO: 4054781 - DNA, 25 bp, Homo sapien
cttgagctttaagagtgattcagac

SEQ ID NO: 4054782 - DNA, 25 bp, Homo sapien
agaactttcttaatccctcctcatg

SEQ ID NO: 4054783 - DNA, 25 bp, Homo sapien
tgcttgcaaaggtactccgagaact

SEQ ID NO: 4054784 - DNA, 25 bp, Homo sapien
gatcttgaagaagcgctccacctgg

SEQ ID NO: 4054785 - DNA, 25 bp, Homo sapien
tgccacaatggctttgagacgttgc

SEQ ID NO: 4054786 - DNA, 25 bp, Homo sapien
gcagcaatttcaggttggcatcaat

SEQ ID NO: 4054787 - DNA, 25 bp, Homo sapien
tgcagcaatttcaggttggcatcaa

SEQ ID NO: 4054788 - DNA, 25 bp, Homo sapien
ctgcagcaatttcaggttggcatca

SEQ ID NO: 4054789 - DNA, 25 bp, Homo sapien
tctttgccctgtcggctgagctcaa

SEQ ID NO: 4054790 - DNA, 25 bp, Homo sapien
cctgtcggctgagctcaatgaccga

SEQ ID NO: 4054791 - DNA, 25 bp, Homo sapien
tgccctgtcggctgagctcaatgac

SEQ ID NO: 4054792 - DNA, 25 bp, Homo sapien
ctctttgccctgtcggctgagctca

SEQ ID NO: 4054793 - DNA, 25 bp, Homo sapien
acaagtagcgatgagtatgtgctgc

SEQ ID NO: 4054794 - DNA, 25 bp, Homo sapien
caagtagcgatgagtatgtgctgca

SEQ ID NO: 4054795 - DNA, 25 bp, Homo sapien
aggcacaagtagcgatgagtatgtg

SEQ ID NO: 4054796 - DNA, 25 bp, Homo sapien
gcacaagtagcgatgagtatgtgct

SEQ ID NO: 4054797 - DNA, 25 bp, Homo sapien
tctctgaatggcctgatagaggcgg

SEQ ID NO: 4054798 - DNA, 25 bp, Homo sapien
gcagtctgaactccatccatgcaga

SEQ ID NO: 4054799 - DNA, 25 bp, Homo sapien
tctgaatggcctgatagaggcggtt

SEQ ID NO: 4054800 - DNA, 25 bp, Homo sapien
ccatgcagaacttcaggtccaagat

SEQ ID NO: 4054801 - DNA, 25 bp, Homo sapien
cctggccagctgtggtttttcacag

SEQ ID NO: 4054802 - DNA, 25 bp, Homo sapien
ggctgagaagttcccctctattcca

SEQ ID NO: 4054803 - DNA, 25 bp, Homo sapien
tgtgttccaaggtttggtctccaac

SEQ ID NO: 4054804 - DNA, 25 bp, Homo sapien
acagatgctctttatcaggctgaga

SEQ ID NO: 4054805 - DNA, 25 bp, Homo sapien
gctgacgaactttgctggacacatt

SEQ ID NO: 4054806 - DNA, 25 bp, Homo sapien
ggccaggtcaagctgacgaactttg

SEQ ID NO: 4054807 - DNA, 25 bp, Homo sapien
gatcattccagccagctgctttgca

SEQ ID NO: 4054808 - DNA, 25 bp, Homo sapien
caggttgcaggtaaaggtgatcatt

SEQ ID NO: 4054809 - DNA, 25 bp, Homo sapien
tttcaatggtgttttgctgttccaa

SEQ ID NO: 4054810 - DNA, 25 bp, Homo sapien
ttcaatggtgttttgctgttccaaa

SEQ ID NO: 4054811 - DNA, 25 bp, Homo sapien
gagactaacatggtttcgccacgtt

SEQ ID NO: 4054812 - DNA, 25 bp, Homo sapien
cagtcatggaatacaaatacagtac

SEQ ID NO: 4054813 - DNA, 25 bp, Homo sapien
gatttccataattttccacccaaca

SEQ ID NO: 4054814 - DNA, 25 bp, Homo sapien
gaaaacgtcctcttgacagtcatgg

SEQ ID NO: 4054815 - DNA, 25 bp, Homo sapien
gaggctgcagatcgcccaggtatca

SEQ ID NO: 4054816 - DNA, 25 bp, Homo sapien
gatcatggatcagggaaatcaacgg

SEQ ID NO: 4054817 - DNA, 25 bp, Homo sapien
cagatcgcccaggtatcagggaaga

SEQ ID NO: 4054818 - DNA, 25 bp, Homo sapien
tttactcccgtggagaaactggtga

SEQ ID NO: 4054819 - DNA, 25 bp, Homo sapien
tgctgcacccctgacagcttcggag

SEQ ID NO: 4054820 - DNA, 25 bp, Homo sapien
agcttcggaggcgaatcaaggtccg

SEQ ID NO: 4054821 - DNA, 25 bp, Homo sapien
gagccgttcgtatacagcctccagc

SEQ ID NO: 4054822 - DNA, 25 bp, Homo sapien
ctctgtcagggagcgaatgagctca

SEQ ID NO: 4054823 - DNA, 25 bp, Homo sapien
tggtccccattcggcacttccggtc

SEQ ID NO: 4054824 - DNA, 25 bp, Homo sapien
cttggtccccattcggcacttccgg

SEQ ID NO: 4054825 - DNA, 25 bp, Homo sapien
tctgatataattactacatagggag

SEQ ID NO: 4054826 - DNA, 25 bp, Homo sapien
catagggagtgatgtataagtgata

SEQ ID NO: 4054827 - DNA, 25 bp, Homo sapien
atagtctgtcccatagtttgtttcc

SEQ ID NO: 4054828 - DNA, 25 bp, Homo sapien
tgttggccattctcgtcccaaactc

SEQ ID NO: 4054829 - DNA, 25 bp, Homo sapien
gcagagcttactcggtgggagaaat

SEQ ID NO: 4054830 - DNA, 25 bp, Homo sapien
tcaaagtcatacctaaggaggtgcc

SEQ ID NO: 4054831 - DNA, 25 bp, Homo sapien
tcttgttaagggataggaagtcact

SEQ ID NO: 4054832 - DNA, 25 bp, Homo sapien
gtgatgtgcctctgatccccagcta

SEQ ID NO: 4054833 - DNA, 25 bp, Homo sapien
tgaaatgtgccttagggagcactgc

SEQ ID NO: 4054834 - DNA, 25 bp, Homo sapien
gcatgttttatgaggcattaagctt

SEQ ID NO: 4054835 - DNA, 25 bp, Homo sapien
gggtatacgagacctcactgtgttg

SEQ ID NO: 4054836 - DNA, 25 bp, Homo sapien
cccacgttggcctctataataattt

SEQ ID NO: 4054837 - DNA, 25 bp, Homo sapien
gctgtgctgatgaaacatgacctca

SEQ ID NO: 4054838 - DNA, 25 bp, Homo sapien
tacatgatacatgaccccaggttcc

SEQ ID NO: 4054839 - DNA, 25 bp, Homo sapien
cagataccgacttggacttgcggca

SEQ ID NO: 4054840 - DNA, 25 bp, Homo sapien
agaaactcgaggatatccggacccg

SEQ ID NO: 4054841 - DNA, 25 bp, Homo sapien
actagaagaggctgctacgctcatt

SEQ ID NO: 4054842 - DNA, 25 bp, Homo sapien
ggctgctacgctcatttcttccaca

SEQ ID NO: 4054843 - DNA, 25 bp, Homo sapien
ctgggcacctaccatgaaccaccac

SEQ ID NO: 4054844 - DNA, 25 bp, Homo sapien
gaagaggctgctacgctcatttctt

SEQ ID NO: 4054845 - DNA, 25 bp, Homo sapien
tgtgatggacaatgaacattgctgc

SEQ ID NO: 4054846 - DNA, 25 bp, Homo sapien
gtctgcttcacagtccagtgttatg

SEQ ID NO: 4054847 - DNA, 25 bp, Homo sapien
cattgctgcttgttcaaaatgaaga

SEQ ID NO: 4054848 - DNA, 25 bp, Homo sapien
ttcagatttggaaaaggagctgggc

SEQ ID NO: 4054849 - DNA, 25 bp, Homo sapien
gtggcgtcatctcaggtcactgcat

SEQ ID NO: 4054850 - DNA, 25 bp, Homo sapien
tcctctgcctcctgggttcaagcga

SEQ ID NO: 4054851 - DNA, 25 bp, Homo sapien
gtcatctcaggtcactgcatcctct

SEQ ID NO: 4054852 - DNA, 25 bp, Homo sapien
ggcgtcatctcaggtcactgcatcc

SEQ ID NO: 4054853 - DNA, 25 bp, Homo sapien
ggtcccacacagatgggacgcggct

SEQ ID NO: 4054854 - DNA, 25 bp, Homo sapien
ggggtcccacacagatgggacgcgg

SEQ ID NO: 4054855 - DNA, 25 bp, Homo sapien
tcccacacagatgggacgcggctta

SEQ ID NO: 4054856 - DNA, 25 bp, Homo sapien
cccacacagatgggacgcggcttag

SEQ ID NO: 4054857 - DNA, 25 bp, Homo sapien
tgggctgccatgggacttgcggcca

SEQ ID NO: 4054858 - DNA, 25 bp, Homo sapien
tacttgtagcagtgactatatttaa

SEQ ID NO: 4054859 - DNA, 25 bp, Homo sapien
tcacagtgcatctgttacttgtagc

SEQ ID NO: 4054860 - DNA, 25 bp, Homo sapien
tacagtacacctttattaatactgg

SEQ ID NO: 4054861 - DNA, 25 bp, Homo sapien
ctatatttaaatcggggaggatggt

SEQ ID NO: 4054862 - DNA, 25 bp, Homo sapien
ttttggctacgctcgagacactgga

SEQ ID NO: 4054863 - DNA, 25 bp, Homo sapien
agagaacagtagcttccaccgggct

SEQ ID NO: 4054864 - DNA, 25 bp, Homo sapien
gaagtggacatctgaaaacggtgcc

SEQ ID NO: 4054865 - DNA, 25 bp, Homo sapien
tatgaggtggttgctaagtcgacgc

SEQ ID NO: 4054866 - DNA, 25 bp, Homo sapien
tgggcctttgctctgagtgcctgcg

SEQ ID NO: 4054867 - DNA, 25 bp, Homo sapien
cacctgctcgcactggggcctgaga

SEQ ID NO: 4054868 - DNA, 25 bp, Homo sapien
ccaagtgaggtgtctttccataaag

SEQ ID NO: 4054869 - DNA, 25 bp, Homo sapien
agtgcctgcggctcacagaccaggc

SEQ ID NO: 4054870 - DNA, 25 bp, Homo sapien
ttggtgacggtcctgcggagccgga

SEQ ID NO: 4054871 - DNA, 25 bp, Homo sapien
ttctccaccaggctgtgccggttgg

SEQ ID NO: 4054872 - DNA, 25 bp, Homo sapien
aggcggtctcgtcggtatagaagac

SEQ ID NO: 4054873 - DNA, 25 bp, Homo sapien
ggcgccgacctgtcgttggtgacgg

SEQ ID NO: 4054874 - DNA, 25 bp, Homo sapien
gcttggtggagggtgtgcggcggat

SEQ ID NO: 4054875 - DNA, 25 bp, Homo sapien
ttggtctggatcaggcggcggtagt

SEQ ID NO: 4054876 - DNA, 25 bp, Homo sapien
ctgttgcgcgggatggtggatgact

SEQ ID NO: 4054877 - DNA, 25 bp, Homo sapien
atgacttgtcaaactcgggcgggcc

SEQ ID NO: 4054878 - DNA, 25 bp, Homo sapien
tgtccgcatccccattcacggagta

SEQ ID NO: 4054879 - DNA, 25 bp, Homo sapien
gcatccccattcacggagtagcagt

SEQ ID NO: 4054880 - DNA, 25 bp, Homo sapien
tcacggagtagcagtcgtagtcgga

SEQ ID NO: 4054881 - DNA, 25 bp, Homo sapien
cattcacggagtagcagtcgtagtc

SEQ ID NO: 4054882 - DNA, 25 bp, Homo sapien
agcccaccagggtgagcacagaggg

SEQ ID NO: 4054883 - DNA, 25 bp, Homo sapien
gcccaggtggccccttgcccccagc

SEQ ID NO: 4054884 - DNA, 25 bp, Homo sapien
ccccagcccaccagggtgagcacag

SEQ ID NO: 4054885 - DNA, 25 bp, Homo sapien
agggtgagcacagagggggaaggac

SEQ ID NO: 4054886 - DNA, 25 bp, Homo sapien
cctggatggctaagtcccagctgtc

SEQ ID NO: 4054887 - DNA, 25 bp, Homo sapien
gggccctcctggatggctaagtccc

SEQ ID NO: 4054888 - DNA, 25 bp, Homo sapien
gccctcctggatggctaagtcccag

SEQ ID NO: 4054889 - DNA, 25 bp, Homo sapien
ctcctggatggctaagtcccagctg

SEQ ID NO: 4054890 - DNA, 25 bp, Homo sapien
ctgcgtgctgtagccgctggagtac

SEQ ID NO: 4054891 - DNA, 25 bp, Homo sapien
tggtctgcgtgctgtagccgctgga

SEQ ID NO: 4054892 - DNA, 25 bp, Homo sapien
gagggcgtggtggtctgcgtgctgt

SEQ ID NO: 4054893 - DNA, 25 bp, Homo sapien
gcgtggtggtctgcgtgctgtagcc

SEQ ID NO: 4054894 - DNA, 25 bp, Homo sapien
gtcactggcggcgggggacacctcc

SEQ ID NO: 4054895 - DNA, 25 bp, Homo sapien
caccatggccaggtcactggcggcg

SEQ ID NO: 4054896 - DNA, 25 bp, Homo sapien
aggtcactggcggcgggggacacct

SEQ ID NO: 4054897 - DNA, 25 bp, Homo sapien
agcaccatggccaggtcactggcgg

SEQ ID NO: 4054898 - DNA, 25 bp, Homo sapien
tgggcgtgaaggggggccctggcca

SEQ ID NO: 4054899 - DNA, 25 bp, Homo sapien
ctcctgggactgacctgggcgtgaa

SEQ ID NO: 4054900 - DNA, 25 bp, Homo sapien
caggctgaagccttgcgcccccaat

SEQ ID NO: 4054901 - DNA, 25 bp, Homo sapien
tgccaggtggttggagccggccctg

SEQ ID NO: 4054902 - DNA, 25 bp, Homo sapien
ggcgcctgagggctgctcatgggag

SEQ ID NO: 4054903 - DNA, 25 bp, Homo sapien
ctcatgggagccgaccttggaccag

SEQ ID NO: 4054904 - DNA, 25 bp, Homo sapien
gtgtctcgcaggagctccactcggt

SEQ ID NO: 4054905 - DNA, 25 bp, Homo sapien
gtcgcggtgcctcttccccgctggg

SEQ ID NO: 4054906 - DNA, 25 bp, Homo sapien
tttccgaggcctcggaagatgcaga

SEQ ID NO: 4054907 - DNA, 25 bp, Homo sapien
gcaggtttccgaggcctcggaagat

SEQ ID NO: 4054908 - DNA, 25 bp, Homo sapien
ggtttccgaggcctcggaagatgca

SEQ ID NO: 4054909 - DNA, 25 bp, Homo sapien
ccgaggcctcggaagatgcagagct

SEQ ID NO: 4054910 - DNA, 25 bp, Homo sapien
agcaggcggttgcagacagaggggc

SEQ ID NO: 4054911 - DNA, 25 bp, Homo sapien
gccagcaggcggttgcagacagagg

SEQ ID NO: 4054912 - DNA, 25 bp, Homo sapien
ggccagcaggcggttgcagacagag

SEQ ID NO: 4054913 - DNA, 25 bp, Homo sapien
ccagcaggcggttgcagacagaggg

SEQ ID NO: 4054914 - DNA, 25 bp, Homo sapien
tgcagttagacaagattcaagggcc

SEQ ID NO: 4054915 - DNA, 25 bp, Homo sapien
ctggactaggtgttctgcgaggccc

SEQ ID NO: 4054916 - DNA, 25 bp, Homo sapien
tatgaaagggacacacctgctctgg

SEQ ID NO: 4054917 - DNA, 25 bp, Homo sapien
gaaatcctgagcatgtgtgaccggc

SEQ ID NO: 4054918 - DNA, 25 bp, Homo sapien
aaatcaacaagtaggacagagtgcc

SEQ ID NO: 4054919 - DNA, 25 bp, Homo sapien
aaaggtagctgggttcaatggcaca

SEQ ID NO: 4054920 - DNA, 25 bp, Homo sapien
cccaatagaaggagagaagatatcc

SEQ ID NO: 4054921 - DNA, 25 bp, Homo sapien
cagagtgccaagtccagaaatagcc

SEQ ID NO: 4054922 - DNA, 25 bp, Homo sapien
cccttgggtgtgtagtgacttaaca

SEQ ID NO: 4054923 - DNA, 25 bp, Homo sapien
gattaggagtgatccaacatggcaa

SEQ ID NO: 4054924 - DNA, 25 bp, Homo sapien
caggagtggtggttatcctgcttac

SEQ ID NO: 4054925 - DNA, 25 bp, Homo sapien
tcaggatagcagttacccttgggtg

SEQ ID NO: 4054926 - DNA, 25 bp, Homo sapien
cccgggaacattatgtagggtcctg

SEQ ID NO: 4054927 - DNA, 25 bp, Homo sapien
tacataaagtaagatgtcaacactg

SEQ ID NO: 4054928 - DNA, 25 bp, Homo sapien
aaatagaagactgtacgttacttag

SEQ ID NO: 4054929 - DNA, 25 bp, Homo sapien
tacgttacttagtattataccagtg

SEQ ID NO: 4054930 - DNA, 25 bp, Homo sapien
cagctgaccttccaaccaatggtgg

SEQ ID NO: 4054931 - DNA, 25 bp, Homo sapien
gaaagacatgaataccaacaaggag

SEQ ID NO: 4054932 - DNA, 25 bp, Homo sapien
cctaaaagtgcccagagagagactc

SEQ ID NO: 4054933 - DNA, 25 bp, Homo sapien
tccacattgtagacacgctgtagca

SEQ ID NO: 4054934 - DNA, 25 bp, Homo sapien
taggtggcgtcctgggagacgaagc

SEQ ID NO: 4054935 - DNA, 25 bp, Homo sapien
cctgggagacgaagccagagtcatg

SEQ ID NO: 4054936 - DNA, 25 bp, Homo sapien
gcttggagtaggtggcgtcctggga

SEQ ID NO: 4054937 - DNA, 25 bp, Homo sapien
tcatgggaggaaacgctggagaggc

SEQ ID NO: 4054938 - DNA, 25 bp, Homo sapien
tggaactgggtgagtatgtttgggc

SEQ ID NO: 4054939 - DNA, 25 bp, Homo sapien
ctgggtgagtatgtttgggcacccc

SEQ ID NO: 4054940 - DNA, 25 bp, Homo sapien
atggggctccgccacccttggcact

SEQ ID NO: 4054941 - DNA, 25 bp, Homo sapien
ctgcggtagcgacaggtggaactgg

SEQ ID NO: 4054942 - DNA, 25 bp, Homo sapien
ctgcacatgctggacttccgggagc

SEQ ID NO: 4054943 - DNA, 25 bp, Homo sapien
tgcacatgctggacttccgggagct

SEQ ID NO: 4054944 - DNA, 25 bp, Homo sapien
cacatgctggacttccgggagctgg

SEQ ID NO: 4054945 - DNA, 25 bp, Homo sapien
acatgctggacttccgggagctgga

SEQ ID NO: 4054946 - DNA, 25 bp, Homo sapien
ctgtagtccgagccctttaggtctt

SEQ ID NO: 4054947 - DNA, 25 bp, Homo sapien
gctgtagtccgagccctttaggtct

SEQ ID NO: 4054948 - DNA, 25 bp, Homo sapien
cagctgtagtccgagccctttaggt

SEQ ID NO: 4054949 - DNA, 25 bp, Homo sapien
tagtccgagccctttaggtctttga

SEQ ID NO: 4054950 - DNA, 25 bp, Homo sapien
gcgggaggcagtttgtggggttctg

SEQ ID NO: 4054951 - DNA, 25 bp, Homo sapien
agcaccaccaagtcgtcgatgatgc

SEQ ID NO: 4054952 - DNA, 25 bp, Homo sapien
tcagcaccaccaagtcgtcgatgat

SEQ ID NO: 4054953 - DNA, 25 bp, Homo sapien
gctggcgggaggcagtttgtggggt

SEQ ID NO: 4054954 - DNA, 25 bp, Homo sapien
agcaggtacatgtcgttgacgtcct

SEQ ID NO: 4054955 - DNA, 25 bp, Homo sapien
aagcggccccgctcctcgatcagcg

SEQ ID NO: 4054956 - DNA, 25 bp, Homo sapien
gtgatgaaggtgcagaagcggcccc

SEQ ID NO: 4054957 - DNA, 25 bp, Homo sapien
catgtcgttgacgtcctgcagggca

SEQ ID NO: 4054958 - DNA, 25 bp, Homo sapien
ggagaggccttgctggggatgccag

SEQ ID NO: 4054959 - DNA, 25 bp, Homo sapien
gaggagaggccttgctggggatgcc

SEQ ID NO: 4054960 - DNA, 25 bp, Homo sapien
gagaggccttgctggggatgccagc

SEQ ID NO: 4054961 - DNA, 25 bp, Homo sapien
ggggaggagaggccttgctggggat

SEQ ID NO: 4054962 - DNA, 25 bp, Homo sapien
gttggagggtcctgtgtcggggaca

SEQ ID NO: 4054963 - DNA, 25 bp, Homo sapien
ttggagggtcctgtgtcggggacag

SEQ ID NO: 4054964 - DNA, 25 bp, Homo sapien
gtcggggacagcgcccctctggctg

SEQ ID NO: 4054965 - DNA, 25 bp, Homo sapien
ggggacagcgcccctctggctggga

SEQ ID NO: 4054966 - DNA, 25 bp, Homo sapien
gcttcagcgtgtccgacgacttctt

SEQ ID NO: 4054967 - DNA, 25 bp, Homo sapien
tttttgatctcatgccgggctcgtt

SEQ ID NO: 4054968 - DNA, 25 bp, Homo sapien
cagcttcagcgtgtccgacgacttc

SEQ ID NO: 4054969 - DNA, 25 bp, Homo sapien
tctttttgatctcatgccgggctcg

SEQ ID NO: 4054970 - DNA, 25 bp, Homo sapien
gtccagctggttggccgccttcttc

SEQ ID NO: 4054971 - DNA, 25 bp, Homo sapien
tccagtcctcgatgcgctcctgcag

SEQ ID NO: 4054972 - DNA, 25 bp, Homo sapien
tccttgtccagctggttggccgcct

SEQ ID NO: 4054973 - DNA, 25 bp, Homo sapien
gtcctcgatgcgctcctgcagcggg

SEQ ID NO: 4054974 - DNA, 25 bp, Homo sapien
gtgtgagcgccgagccgatgtccct

SEQ ID NO: 4054975 - DNA, 25 bp, Homo sapien
atgctgcggtggcgcatgcacatgc

SEQ ID NO: 4054976 - DNA, 25 bp, Homo sapien
gcatgcacatgcgtgtgagcgccga

SEQ ID NO: 4054977 - DNA, 25 bp, Homo sapien
agcgccgagccgatgtccctcgtgg

SEQ ID NO: 4054978 - DNA, 25 bp, Homo sapien
ctcgggtgttggtagccatgtcagc

SEQ ID NO: 4054979 - DNA, 25 bp, Homo sapien
gaagtcctcccagatagggtaggag

SEQ ID NO: 4054980 - DNA, 25 bp, Homo sapien
agtcctcccagatagggtaggagct

SEQ ID NO: 4054981 - DNA, 25 bp, Homo sapien
gccttggagttgaagtcctcccaga

SEQ ID NO: 4054982 - DNA, 25 bp, Homo sapien
tggagttgaagtcctcccagatagg

SEQ ID NO: 4054983 - DNA, 25 bp, Homo sapien
tatggcctggaagagcccgcccagg

SEQ ID NO: 4054984 - DNA, 25 bp, Homo sapien
ctatggcctggaagagcccgcccag

SEQ ID NO: 4054985 - DNA, 25 bp, Homo sapien
catgtcgttgactatggcctggaag

SEQ ID NO: 4054986 - DNA, 25 bp, Homo sapien
cttcatgtcgttgactatggcctgg

SEQ ID NO: 4054987 - DNA, 25 bp, Homo sapien
gcggcggctaggcgcacggagcgcg

SEQ ID NO: 4054988 - DNA, 25 bp, Homo sapien
cggcggcggctaggcgcacggagcg

SEQ ID NO: 4054989 - DNA, 25 bp, Homo sapien
cgggccatgtcgcagcggggctggc

SEQ ID NO: 4054990 - DNA, 25 bp, Homo sapien
ggcggctaggcgcacggagcgcggg

SEQ ID NO: 4054991 - DNA, 25 bp, Homo sapien
tgtttcatgggaccactcggtgggc

SEQ ID NO: 4054992 - DNA, 25 bp, Homo sapien
tggtgcctacgtgcatacaagtaca

SEQ ID NO: 4054993 - DNA, 25 bp, Homo sapien
gagtggtctctgaggctatagcccc

SEQ ID NO: 4054994 - DNA, 25 bp, Homo sapien
cagccagctctgtgagaatgccagg

SEQ ID NO: 4054995 - DNA, 25 bp, Homo sapien
gccgcacttccaggtgcttgttctg

SEQ ID NO: 4054996 - DNA, 25 bp, Homo sapien
cagctctgcgtagtcgatgctaggg

SEQ ID NO: 4054997 - DNA, 25 bp, Homo sapien
cgctggtgccgcacttccaggtgct

SEQ ID NO: 4054998 - DNA, 25 bp, Homo sapien
agaggacaaccctccggtccaggtg

SEQ ID NO: 4054999 - DNA, 25 bp, Homo sapien
aactcttccgtcatggcgggcccca

SEQ ID NO: 4055000 - DNA, 25 bp, Homo sapien
gatcagctcacaggggggttactgc

SEQ ID NO: 4055001 - DNA, 25 bp, Homo sapien
cttccgcagttggtgggaacagcta

SEQ ID NO: 4055002 - DNA, 25 bp, Homo sapien
cctgtgggcgtctgtctcaggcctg

SEQ ID NO: 4055003 - DNA, 25 bp, Homo sapien
ctgtttacgagtggctccctttggg

SEQ ID NO: 4055004 - DNA, 25 bp, Homo sapien
ttggctattgccctcggcctgtggg

SEQ ID NO: 4055005 - DNA, 25 bp, Homo sapien
cagagcaggcatcgcattgggaagc

SEQ ID NO: 4055006 - DNA, 25 bp, Homo sapien
gcatttcctgtttacgagtggctcc

SEQ ID NO: 4055007 - DNA, 25 bp, Homo sapien
tcttggacatgtctacggctgcggc

SEQ ID NO: 4055008 - DNA, 25 bp, Homo sapien
ttatgaaaagatgccaatcggcggg

SEQ ID NO: 4055009 - DNA, 25 bp, Homo sapien
taaccttgggaaccaggtgccactg

SEQ ID NO: 4055010 - DNA, 25 bp, Homo sapien
cctataatggtgcaatgcggtagcc

SEQ ID NO: 4055011 - DNA, 25 bp, Homo sapien
caagacgaggagatcagcactcgga

SEQ ID NO: 4055012 - DNA, 25 bp, Homo sapien
cgaggagatcagcactcggagaccc

SEQ ID NO: 4055013 - DNA, 25 bp, Homo sapien
tgctcccctcccaagacgaggagat

SEQ ID NO: 4055014 - DNA, 25 bp, Homo sapien
tcccaagacgaggagatcagcactc

SEQ ID NO: 4055015 - DNA, 25 bp, Homo sapien
gaaattttccatctcggatgccaaa

SEQ ID NO: 4055016 - DNA, 25 bp, Homo sapien
ggcgacctgacaagtgaaattttcc

SEQ ID NO: 4055017 - DNA, 25 bp, Homo sapien
tgggcgcgctccattcagcgtaaat

SEQ ID NO: 4055018 - DNA, 25 bp, Homo sapien
ggtttccatggcgacctgacaagtg

SEQ ID NO: 4055019 - DNA, 25 bp, Homo sapien
tggagccggtgcgagagcagctgga

SEQ ID NO: 4055020 - DNA, 25 bp, Homo sapien
agcaggccgtagagggccttgatca

SEQ ID NO: 4055021 - DNA, 25 bp, Homo sapien
taggggttgttcttcacgtccagca

SEQ ID NO: 4055022 - DNA, 25 bp, Homo sapien
cggtctgcagcagctcagggttggg

SEQ ID NO: 4055023 - DNA, 25 bp, Homo sapien
tctgcgaggaagtccacggtgacct

SEQ ID NO: 4055024 - DNA, 25 bp, Homo sapien
acctctgcgaggaagtccacggtga

SEQ ID NO: 4055025 - DNA, 25 bp, Homo sapien
ttgtccacctctgcgaggaagtcca

SEQ ID NO: 4055026 - DNA, 25 bp, Homo sapien
aggaagtccacggtgacctccaggt

SEQ ID NO: 4055027 - DNA, 25 bp, Homo sapien
agccgcagctcacagcaccacacgc

SEQ ID NO: 4055028 - DNA, 25 bp, Homo sapien
tgtctgctgggccagcacagccgca

SEQ ID NO: 4055029 - DNA, 25 bp, Homo sapien
acagccgcagctcacagcaccacac

SEQ ID NO: 4055030 - DNA, 25 bp, Homo sapien
gcacagccgcagctcacagcaccac

SEQ ID NO: 4055031 - DNA, 25 bp, Homo sapien
gagaggctcttatcacagcgctgca

SEQ ID NO: 4055032 - DNA, 25 bp, Homo sapien
tccaggttccactctagcagctgtc

SEQ ID NO: 4055033 - DNA, 25 bp, Homo sapien
gcctttctgtcctaaatggaactcc

SEQ ID NO: 4055034 - DNA, 25 bp, Homo sapien
caggatttggcgcacaaaggacacc

SEQ ID NO: 4055035 - DNA, 25 bp, Homo sapien
caaatccaggttgtagaagggaagc

SEQ ID NO: 4055036 - DNA, 25 bp, Homo sapien
agggccacacctagccctccactga

SEQ ID NO: 4055037 - DNA, 25 bp, Homo sapien
gaggagcaaatccaggttgtagaag

SEQ ID NO: 4055038 - DNA, 25 bp, Homo sapien
cacacctagccctccactgaggcac

SEQ ID NO: 4055039 - DNA, 25 bp, Homo sapien
accgtggtgactgggttgtggcacc

SEQ ID NO: 4055040 - DNA, 25 bp, Homo sapien
cataggcgtgccggtagttctgggt

SEQ ID NO: 4055041 - DNA, 25 bp, Homo sapien
actgggttgtggcaccaggagcggt

SEQ ID NO: 4055042 - DNA, 25 bp, Homo sapien
aagcagagggacaccgtggtgactg

SEQ ID NO: 4055043 - DNA, 25 bp, Homo sapien
gcagtccacttcgaacacttggaaa

SEQ ID NO: 4055044 - DNA, 25 bp, Homo sapien
tccacttcgaacacttggaaaccac

SEQ ID NO: 4055045 - DNA, 25 bp, Homo sapien
ctctgcagtccacttcgaacacttg

SEQ ID NO: 4055046 - DNA, 25 bp, Homo sapien
gaaaattcttaaggcctctgcgaat

SEQ ID NO: 4055047 - DNA, 25 bp, Homo sapien
cgtggaccatggtcgaggcgaactt

SEQ ID NO: 4055048 - DNA, 25 bp, Homo sapien
tctccgcattcagcaggaggcacag

SEQ ID NO: 4055049 - DNA, 25 bp, Homo sapien
tcgaggcgaacttgaggtcctcctc

SEQ ID NO: 4055050 - DNA, 25 bp, Homo sapien
gatgtctgccattgagtggaagatg

SEQ ID NO: 4055051 - DNA, 25 bp, Homo sapien
cgttcagggctaaggatcggacttt

SEQ ID NO: 4055052 - DNA, 25 bp, Homo sapien
gaggagcctccctgttatacaaaag

SEQ ID NO: 4055053 - DNA, 25 bp, Homo sapien
gatttgcactgttcgggctgtaccc

SEQ ID NO: 4055054 - DNA, 25 bp, Homo sapien
cagagtcacttacggccagagtcac

SEQ ID NO: 4055055 - DNA, 25 bp, Homo sapien
cacggcgtcggaggccccgaggtct

SEQ ID NO: 4055056 - DNA, 25 bp, Homo sapien
tttcttggtgggaggcctgaaacac

SEQ ID NO: 4055057 - DNA, 25 bp, Homo sapien
cacagttccaacacggcgtcggagg

SEQ ID NO: 4055058 - DNA, 25 bp, Homo sapien
ttgggtgctcagtgacgtgagccac

SEQ ID NO: 4055059 - DNA, 25 bp, Homo sapien
ctccgctccgcatgacctgggccca

SEQ ID NO: 4055060 - DNA, 25 bp, Homo sapien
tggactcagcctccgctccgcatga

SEQ ID NO: 4055061 - DNA, 25 bp, Homo sapien
ctcctcctaggtcgctggactcagc

SEQ ID NO: 4055062 - DNA, 25 bp, Homo sapien
aaatgcccctgaacgccagccatgg

SEQ ID NO: 4055063 - DNA, 25 bp, Homo sapien
taatgcagtcgatgtgtctggtaca

SEQ ID NO: 4055064 - DNA, 25 bp, Homo sapien
tcatcgttgtttaatgcagtcgatg

SEQ ID NO: 4055065 - DNA, 25 bp, Homo sapien
tgtgtctggtacacttaaaagtttc

SEQ ID NO: 4055066 - DNA, 25 bp, Homo sapien
cagtcgatgtgtctggtacacttaa

SEQ ID NO: 4055067 - DNA, 25 bp, Homo sapien
gtggctccggggcagcatatctgta

SEQ ID NO: 4055068 - DNA, 25 bp, Homo sapien
gggcagcatatctgtagccagctcc

SEQ ID NO: 4055069 - DNA, 25 bp, Homo sapien
tcactggggccttctggtgtggact

SEQ ID NO: 4055070 - DNA, 25 bp, Homo sapien
ggaagacagtttggacctcctgagc

SEQ ID NO: 4055071 - DNA, 25 bp, Homo sapien
cggagaaagtccacggggctgactc

SEQ ID NO: 4055072 - DNA, 25 bp, Homo sapien
gggctgactccaacagcaggttccc

SEQ ID NO: 4055073 - DNA, 25 bp, Homo sapien
ccggaaaccagttgggagcagcagc

SEQ ID NO: 4055074 - DNA, 25 bp, Homo sapien
caacagcaggttcccggaaaccagt

SEQ ID NO: 4055075 - DNA, 25 bp, Homo sapien
cctctaagcaggatttcctcctgag

SEQ ID NO: 4055076 - DNA, 25 bp, Homo sapien
ccctctaagcaggatttcctcctga

SEQ ID NO: 4055077 - DNA, 25 bp, Homo sapien
accctctaagcaggatttcctcctg

SEQ ID NO: 4055078 - DNA, 25 bp, Homo sapien
ctgcagctgtaacctttctctccct

SEQ ID NO: 4055079 - DNA, 25 bp, Homo sapien
agggtcctcggagattgagtctgtc

SEQ ID NO: 4055080 - DNA, 25 bp, Homo sapien
tctgtcttgggacgggtaatggaaa

SEQ ID NO: 4055081 - DNA, 25 bp, Homo sapien
tgagtctgtcttgggacgggtaatg

SEQ ID NO: 4055082 - DNA, 25 bp, Homo sapien
gggtcctcggagattgagtctgtct

SEQ ID NO: 4055083 - DNA, 25 bp, Homo sapien
caggcctgatcgcttcaggcatggc

SEQ ID NO: 4055084 - DNA, 25 bp, Homo sapien
tcaccaggcctgatcgcttcaggca

SEQ ID NO: 4055085 - DNA, 25 bp, Homo sapien
gatctgtactctcaacaagcttccg

SEQ ID NO: 4055086 - DNA, 25 bp, Homo sapien
tccaggaggtccacgatctgtactc

SEQ ID NO: 4055087 - DNA, 25 bp, Homo sapien
cagcaccccaagaggaagcacagct

SEQ ID NO: 4055088 - DNA, 25 bp, Homo sapien
agctgctgccctgggcacgggccat

SEQ ID NO: 4055089 - DNA, 25 bp, Homo sapien
tgcatagccccagcaccccaagagg

SEQ ID NO: 4055090 - DNA, 25 bp, Homo sapien
accccaagaggaagcacagctcaca

SEQ ID NO: 4055091 - DNA, 25 bp, Homo sapien
cagaccgagcctcatgctgataaat

SEQ ID NO: 4055092 - DNA, 25 bp, Homo sapien
agcaccagaccgagcctcatgctga

SEQ ID NO: 4055093 - DNA, 25 bp, Homo sapien
tctccgagtccagagaccactgctg

SEQ ID NO: 4055094 - DNA, 25 bp, Homo sapien
ctgcagagctctccgagtccagaga

SEQ ID NO: 4055095 - DNA, 25 bp, Homo sapien
gtttcgggctgcctttccagacgtc

SEQ ID NO: 4055096 - DNA, 25 bp, Homo sapien
tttcgggctgcctttccagacgtcc

SEQ ID NO: 4055097 - DNA, 25 bp, Homo sapien
cgggctgcctttccagacgtccttc

SEQ ID NO: 4055098 - DNA, 25 bp, Homo sapien
ttcgggctgcctttccagacgtcct

SEQ ID NO: 4055099 - DNA, 25 bp, Homo sapien
tgcagatacaaatctctgcagctgc

SEQ ID NO: 4055100 - DNA, 25 bp, Homo sapien
ctccaggagcggtaactgcagatac

SEQ ID NO: 4055101 - DNA, 25 bp, Homo sapien
acaaaaatgaaacggaggctgtgac

SEQ ID NO: 4055102 - DNA, 25 bp, Homo sapien
ctcctagaaacccattagctggctg

SEQ ID NO: 4055103 - DNA, 25 bp, Homo sapien
gcaattttgctctctattttaggca

SEQ ID NO: 4055104 - DNA, 25 bp, Homo sapien
gaggtggcaattttgctctctattt

SEQ ID NO: 4055105 - DNA, 25 bp, Homo sapien
gcagagaggtggcaattttgctctc

SEQ ID NO: 4055106 - DNA, 25 bp, Homo sapien
tcctgggggcctgcgaccttgggct

SEQ ID NO: 4055107 - DNA, 25 bp, Homo sapien
cagaaggaactggaccgggacagcc

SEQ ID NO: 4055108 - DNA, 25 bp, Homo sapien
cacgcagctgaagatctgagaaacc

SEQ ID NO: 4055109 - DNA, 25 bp, Homo sapien
gagaaaccaattactatgctactgg

SEQ ID NO: 4055110 - DNA, 25 bp, Homo sapien
tcatagatgggtcttcccgcgaggg

SEQ ID NO: 4055111 - DNA, 25 bp, Homo sapien
attcttggcatagcttcagcggagc

SEQ ID NO: 4055112 - DNA, 25 bp, Homo sapien
aacaaggtcacaaatgcgctggctc

SEQ ID NO: 4055113 - DNA, 25 bp, Homo sapien
ttaaaagccaattcttggcatagct

SEQ ID NO: 4055114 - DNA, 25 bp, Homo sapien
ttcaacaaggtcacaaatgcgctgg

SEQ ID NO: 4055115 - DNA, 25 bp, Homo sapien
ggagtgagtgaatctttgacccctg

SEQ ID NO: 4055116 - DNA, 25 bp, Homo sapien
tcagagcatggatcacaagaccagg

SEQ ID NO: 4055117 - DNA, 25 bp, Homo sapien
ctcaggaatatttgcggaatgcccc

SEQ ID NO: 4055118 - DNA, 25 bp, Homo sapien
tgaaataccttctccccggtctgtg

SEQ ID NO: 4055119 - DNA, 25 bp, Homo sapien
gatgtccatggccttggattctggt

SEQ ID NO: 4055120 - DNA, 25 bp, Homo sapien
ggcaatcagcaccagcgcactctgg

SEQ ID NO: 4055121 - DNA, 25 bp, Homo sapien
ggttccagaaccatgacggcccatg

SEQ ID NO: 4055122 - DNA, 25 bp, Homo sapien
acccgacccttttcagggcaatcag

SEQ ID NO: 4055123 - DNA, 25 bp, Homo sapien
tatgccggctacagaccagaagtgg

SEQ ID NO: 4055124 - DNA, 25 bp, Homo sapien
ctgggagagtatgccggctacagac

SEQ ID NO: 4055125 - DNA, 25 bp, Homo sapien
gttcaccgtcaaagtgccagggagc

SEQ ID NO: 4055126 - DNA, 25 bp, Homo sapien
cagaagtgggccagaataagggaca

SEQ ID NO: 4055127 - DNA, 25 bp, Homo sapien
ccgctgattcagtgggagcatggct

SEQ ID NO: 4055128 - DNA, 25 bp, Homo sapien
agccctgctggttgcctgagctatg

SEQ ID NO: 4055129 - DNA, 25 bp, Homo sapien
gggagctttcccaccaatctgctgc

SEQ ID NO: 4055130 - DNA, 25 bp, Homo sapien
tgcttttagtgaaagactggcaagg

SEQ ID NO: 4055131 - DNA, 25 bp, Homo sapien
ttaactgggccggttcggatcaggc

SEQ ID NO: 4055132 - DNA, 25 bp, Homo sapien
aaatgcccgcctcatcttaggagtg

SEQ ID NO: 4055133 - DNA, 25 bp, Homo sapien
caaatggactcgagattcggcagct

SEQ ID NO: 4055134 - DNA, 25 bp, Homo sapien
aagtccagtttctagcggctgcccg

SEQ ID NO: 4055135 - DNA, 25 bp, Homo sapien
gctgtgtggacaccgacaggaagtc

SEQ ID NO: 4055136 - DNA, 25 bp, Homo sapien
ccgttatgtccaccagaaaaggagg

SEQ ID NO: 4055137 - DNA, 25 bp, Homo sapien
tggagcttgggtaccccgttctcac

SEQ ID NO: 4055138 - DNA, 25 bp, Homo sapien
actccgacatggaggtgcggcctgg

SEQ ID NO: 4055139 - DNA, 25 bp, Homo sapien
gggttcaggcgatttgtgtgtctca

SEQ ID NO: 4055140 - DNA, 25 bp, Homo sapien
gcctctccagtgatctaacctgcag

SEQ ID NO: 4055141 - DNA, 25 bp, Homo sapien
taaagcctctccagtgatctaacct

SEQ ID NO: 4055142 - DNA, 25 bp, Homo sapien
ccagtgatctaacctgcagggctga

SEQ ID NO: 4055143 - DNA, 25 bp, Homo sapien
tagggccatacggactactctagaa

SEQ ID NO: 4055144 - DNA, 25 bp, Homo sapien
gctttcaccaggttgagggtgacac

SEQ ID NO: 4055145 - DNA, 25 bp, Homo sapien
tacggactactctagaaatctcctc

SEQ ID NO: 4055146 - DNA, 25 bp, Homo sapien
ggaggaatttgtgccctgctctagc

SEQ ID NO: 4055147 - DNA, 25 bp, Homo sapien
gctgctggtgatgacagttctagat

SEQ ID NO: 4055148 - DNA, 25 bp, Homo sapien
agttggaggcaaaagaccagcccca

SEQ ID NO: 4055149 - DNA, 25 bp, Homo sapien
ttggaggcaaaagaccagccccagc

SEQ ID NO: 4055150 - DNA, 25 bp, Homo sapien
ctgagttggaggcaaaagaccagcc

SEQ ID NO: 4055151 - DNA, 25 bp, Homo sapien
gcatcagcaaccagtatgaaggggc

SEQ ID NO: 4055152 - DNA, 25 bp, Homo sapien
gacctgtctgtttcatgtcagaagc

SEQ ID NO: 4055153 - DNA, 25 bp, Homo sapien
tatgaaggggcaaccttcttcattt

SEQ ID NO: 4055154 - DNA, 25 bp, Homo sapien
gcaaccagtatgaaggggcaacctt

SEQ ID NO: 4055155 - DNA, 25 bp, Homo sapien
gaagaggagaaagcgcgccgccaag

SEQ ID NO: 4055156 - DNA, 25 bp, Homo sapien
tgacacttgaatggcgtgaaagtga

SEQ ID NO: 4055157 - DNA, 25 bp, Homo sapien
gaaagagaaggtggctgctttgaca

SEQ ID NO: 4055158 - DNA, 25 bp, Homo sapien
tggctgctttgacacttgaatggcg

SEQ ID NO: 4055159 - DNA, 25 bp, Homo sapien
ctgaatctcttgagaaggttgatca

SEQ ID NO: 4055160 - DNA, 25 bp, Homo sapien
tataaaagtaagaattcatggtggg

SEQ ID NO: 4055161 - DNA, 25 bp, Homo sapien
ccaggagcttccgttcgctgctgaa

SEQ ID NO: 4055162 - DNA, 25 bp, Homo sapien
ggagaacattctaagcctttggtac

SEQ ID NO: 4055163 - DNA, 25 bp, Homo sapien
gacatttggctacaatacactgtcc

SEQ ID NO: 4055164 - DNA, 25 bp, Homo sapien
tttggctacaatacactgtcctggg

SEQ ID NO: 4055165 - DNA, 25 bp, Homo sapien
ccatgatgattgttgccgtgattac

SEQ ID NO: 4055166 - DNA, 25 bp, Homo sapien
gctggcagccatgatgattgttgcc

SEQ ID NO: 4055167 - DNA, 25 bp, Homo sapien
gggcaaacgtcagtcctagggtgac

SEQ ID NO: 4055168 - DNA, 25 bp, Homo sapien
cctagggtgacctttggcctcagac

SEQ ID NO: 4055169 - DNA, 25 bp, Homo sapien
ggcctcagactgacacattactgtg

SEQ ID NO: 4055170 - DNA, 25 bp, Homo sapien
gcatggctaaggatcctaaaggctg

SEQ ID NO: 4055171 - DNA, 25 bp, Homo sapien
tgcacaggctcagggtacggcgggc

SEQ ID NO: 4055172 - DNA, 25 bp, Homo sapien
gtacggcgggcccacaggcctgtct

SEQ ID NO: 4055173 - DNA, 25 bp, Homo sapien
tctctggcagcatagatgtccaggc

SEQ ID NO: 4055174 - DNA, 25 bp, Homo sapien
aaggcatgtctctgacaaagggctc

SEQ ID NO: 4055175 - DNA, 25 bp, Homo sapien
caggcatgtgatggactcgcttctc

SEQ ID NO: 4055176 - DNA, 25 bp, Homo sapien
tgtggtgcattaggccaacacggca

SEQ ID NO: 4055177 - DNA, 25 bp, Homo sapien
gatgtttatgcaaggccaggcgaga

SEQ ID NO: 4055178 - DNA, 25 bp, Homo sapien
agaaagagccccttgcatgcctgag

SEQ ID NO: 4055179 - DNA, 25 bp, Homo sapien
gggaggaagcgatttctgccagcac

SEQ ID NO: 4055180 - DNA, 25 bp, Homo sapien
cagaggtgttcagtaggccggctct

SEQ ID NO: 4055181 - DNA, 25 bp, Homo sapien
atcgagggggcctgggtcatccgtc

SEQ ID NO: 4055182 - DNA, 25 bp, Homo sapien
cctgggtcatccgtctggcctgcgg

SEQ ID NO: 4055183 - DNA, 25 bp, Homo sapien
ctggggagagaagcggggcaggagg

SEQ ID NO: 4055184 - DNA, 25 bp, Homo sapien
agaagcggggcaggagggatgagct

SEQ ID NO: 4055185 - DNA, 25 bp, Homo sapien
gagaagcggggcaggagggatgagc

SEQ ID NO: 4055186 - DNA, 25 bp, Homo sapien
ggagagaagcggggcaggagggatg

SEQ ID NO: 4055187 - DNA, 25 bp, Homo sapien
cattgggccacagaacagctgcttc

SEQ ID NO: 4055188 - DNA, 25 bp, Homo sapien
ctgattcatgctgggtatccggcag

SEQ ID NO: 4055189 - DNA, 25 bp, Homo sapien
tgaggagaaagtgtgatccagcggg

SEQ ID NO: 4055190 - DNA, 25 bp, Homo sapien
actcggcaagatccctgtgccatgg

SEQ ID NO: 4055191 - DNA, 25 bp, Homo sapien
gggccaggccagcactcggcaagat

SEQ ID NO: 4055192 - DNA, 25 bp, Homo sapien
caggaaatggaagatggatggctct

SEQ ID NO: 4055193 - DNA, 25 bp, Homo sapien
aagattcccgaacataaagtcccag

SEQ ID NO: 4055194 - DNA, 25 bp, Homo sapien
gtctcaactgaataaatacttgctg

SEQ ID NO: 4055195 - DNA, 25 bp, Homo sapien
cctgcagcgttggacaggaaatgga

SEQ ID NO: 4055196 - DNA, 25 bp, Homo sapien
gcatggaagaaggcattggcaccag

SEQ ID NO: 4055197 - DNA, 25 bp, Homo sapien
agagcatggaagaaggcattggcac

SEQ ID NO: 4055198 - DNA, 25 bp, Homo sapien
gagcatggaagaaggcattggcacc

SEQ ID NO: 4055199 - DNA, 25 bp, Homo sapien
tgagagcatggaagaaggcattggc

SEQ ID NO: 4055200 - DNA, 25 bp, Homo sapien
cggcctcagcgcttctgggagaagg

SEQ ID NO: 4055201 - DNA, 25 bp, Homo sapien
gataaggtaagggagtacatctgtg

SEQ ID NO: 4055202 - DNA, 25 bp, Homo sapien
tacatctgtggaccggatggcatga

SEQ ID NO: 4055203 - DNA, 25 bp, Homo sapien
ctgaccacggtgacaaggactgctt

SEQ ID NO: 4055204 - DNA, 25 bp, Homo sapien
gacaaggactgcttgggaaggataa

SEQ ID NO: 4055205 - DNA, 25 bp, Homo sapien
ccagctcttgcatcaccaacacctg

SEQ ID NO: 4055206 - DNA, 25 bp, Homo sapien
gaggctctgctgcgccagctcttgc

SEQ ID NO: 4055207 - DNA, 25 bp, Homo sapien
ggagcatgtgggtttatcacaacca

SEQ ID NO: 4055208 - DNA, 25 bp, Homo sapien
tctgctgcgccagctcttgcatcac

SEQ ID NO: 4055209 - DNA, 25 bp, Homo sapien
gattcatccgataacgtctgcagta

SEQ ID NO: 4055210 - DNA, 25 bp, Homo sapien
gaaagaggctgtccgtgtgccggaa

SEQ ID NO: 4055211 - DNA, 25 bp, Homo sapien
tcatccgattcatccgataacgtct

SEQ ID NO: 4055212 - DNA, 25 bp, Homo sapien
taacgtctgcagtaggatgggaaag

SEQ ID NO: 4055213 - DNA, 25 bp, Homo sapien
cgaggagttttgatgtagaggtggt

SEQ ID NO: 4055214 - DNA, 25 bp, Homo sapien
gagttttgatgtagaggtggtagag

SEQ ID NO: 4055215 - DNA, 25 bp, Homo sapien
ttccgaggagttttgatgtagaggt

SEQ ID NO: 4055216 - DNA, 25 bp, Homo sapien
cttccgaggagttttgatgtagagg

SEQ ID NO: 4055217 - DNA, 25 bp, Homo sapien
cagtttaggacctgcacgatcccgt

SEQ ID NO: 4055218 - DNA, 25 bp, Homo sapien
tcccaatggccgtgtcactgaggtg

SEQ ID NO: 4055219 - DNA, 25 bp, Homo sapien
cacgatcccgtcgaggtgaagggtc

SEQ ID NO: 4055220 - DNA, 25 bp, Homo sapien
tcctggtcatcatcccaatggccgt

SEQ ID NO: 4055221 - DNA, 25 bp, Homo sapien
gatccttggaactgctctggagctg

SEQ ID NO: 4055222 - DNA, 25 bp, Homo sapien
caggatcagtggtgtgtctgagccc

SEQ ID NO: 4055223 - DNA, 25 bp, Homo sapien
ggggggaataacagctctgataaca

SEQ ID NO: 4055224 - DNA, 25 bp, Homo sapien
ggcggtgccgtgaccaggtccccta

SEQ ID NO: 4055225 - DNA, 25 bp, Homo sapien
cactgtgtcaatacccgctgtggga

SEQ ID NO: 4055226 - DNA, 25 bp, Homo sapien
gatacacaagtcctcgcatgtctgt

SEQ ID NO: 4055227 - DNA, 25 bp, Homo sapien
gggtcaatggccactcagaggcaca

SEQ ID NO: 4055228 - DNA, 25 bp, Homo sapien
gaaactggtggcctcacgtggtgcc

SEQ ID NO: 4055229 - DNA, 25 bp, Homo sapien
tacatttcataaacggctgcacctg

SEQ ID NO: 4055230 - DNA, 25 bp, Homo sapien
tagtggtacatttcataaacggctg

SEQ ID NO: 4055231 - DNA, 25 bp, Homo sapien
taaacggctgcacctgcgtgcttgg

SEQ ID NO: 4055232 - DNA, 25 bp, Homo sapien
acctgcgtgcttggaaaacatgctc

SEQ ID NO: 4055233 - DNA, 25 bp, Homo sapien
gtggcttctaatccgccctatctat

SEQ ID NO: 4055234 - DNA, 25 bp, Homo sapien
taatccgccctatctatccatcaag

SEQ ID NO: 4055235 - DNA, 25 bp, Homo sapien
tctatccatcaagcctgggtggggt

SEQ ID NO: 4055236 - DNA, 25 bp, Homo sapien
ccagtggcttctaatccgccctatc

SEQ ID NO: 4055237 - DNA, 25 bp, Homo sapien
gcatccaggaaagatctaggccgct

SEQ ID NO: 4055238 - DNA, 25 bp, Homo sapien
tgtacgagggtgtcccaaaagcagc

SEQ ID NO: 4055239 - DNA, 25 bp, Homo sapien
cagccgcgagtagaatttgccttgg

SEQ ID NO: 4055240 - DNA, 25 bp, Homo sapien
attgctgtagtctcccgcatccagg

SEQ ID NO: 4055241 - DNA, 25 bp, Homo sapien
gaagacactgatgccgctactgaag

SEQ ID NO: 4055242 - DNA, 25 bp, Homo sapien
ctggctgcagtgaagacactgatgc

SEQ ID NO: 4055243 - DNA, 25 bp, Homo sapien
cagtgaagacactgatgccgctact

SEQ ID NO: 4055244 - DNA, 25 bp, Homo sapien
gtgaagacactgatgccgctactga

SEQ ID NO: 4055245 - DNA, 25 bp, Homo sapien
ctggagtcacaggaaccatctggac

SEQ ID NO: 4055246 - DNA, 25 bp, Homo sapien
tggagtcacaggaaccatctggacc

SEQ ID NO: 4055247 - DNA, 25 bp, Homo sapien
ggagtcacaggaaccatctggacct

SEQ ID NO: 4055248 - DNA, 25 bp, Homo sapien
gagtcacaggaaccatctggacctc

SEQ ID NO: 4055249 - DNA, 25 bp, Homo sapien
tagttcaatgatcaaacccagaagg

SEQ ID NO: 4055250 - DNA, 25 bp, Homo sapien
ggatgtcacggaagtgctgcgcctc

SEQ ID NO: 4055251 - DNA, 25 bp, Homo sapien
ttttctcacgagtagggagttgcgc

SEQ ID NO: 4055252 - DNA, 25 bp, Homo sapien
ttttgaagcgctggtcactctgcag

SEQ ID NO: 4055253 - DNA, 25 bp, Homo sapien
ttgttacataaaggattaatggccc

SEQ ID NO: 4055254 - DNA, 25 bp, Homo sapien
taaaggattaatggccctgtcatgg

SEQ ID NO: 4055255 - DNA, 25 bp, Homo sapien
ggcccatttgttacataaaggatta

SEQ ID NO: 4055256 - DNA, 25 bp, Homo sapien
ctggcccatttgttacataaaggat

SEQ ID NO: 4055257 - DNA, 25 bp, Homo sapien
gaattctaccactgaaccaccaatg

SEQ ID NO: 4055258 - DNA, 25 bp, Homo sapien
ctgcactggccgggaatcaaacccg

SEQ ID NO: 4055259 - DNA, 25 bp, Homo sapien
tcaaacccgggcctcccgcgtggca

SEQ ID NO: 4055260 - DNA, 25 bp, Homo sapien
cgcgtggcaggcgagaattctacca

SEQ ID NO: 4055261 - DNA, 25 bp, Homo sapien
tgtaagcagtcagtcccaattctcc

SEQ ID NO: 4055262 - DNA, 25 bp, Homo sapien
aagaaaccgggcatctgtaagcagt

SEQ ID NO: 4055263 - DNA, 25 bp, Homo sapien
tttgaaggcccgcactagcttatcc

SEQ ID NO: 4055264 - DNA, 25 bp, Homo sapien
gaggtcacaaaatatgtatccccga

SEQ ID NO: 4055265 - DNA, 25 bp, Homo sapien
gaattctaccactgaaccaccaatg

SEQ ID NO: 4055266 - DNA, 25 bp, Homo sapien
cgaacccgggcctcccgcgtggcag

SEQ ID NO: 4055267 - DNA, 25 bp, Homo sapien
tcgaacccgggcctcccgcgtggca

SEQ ID NO: 4055268 - DNA, 25 bp, Homo sapien
cgcgtggcaggcgagaattctacca

SEQ ID NO: 4055269 - DNA, 25 bp, Homo sapien
ctgagatgggtccagcatggacagc

SEQ ID NO: 4055270 - DNA, 25 bp, Homo sapien
atgggtccagcatggacagctgctg

SEQ ID NO: 4055271 - DNA, 25 bp, Homo sapien
ggtccagcatggacagctgctggat

SEQ ID NO: 4055272 - DNA, 25 bp, Homo sapien
cagcatggacagctgctggatttta

SEQ ID NO: 4055273 - DNA, 25 bp, Homo sapien
cccgcttcagcttcctgaggagctg

SEQ ID NO: 4055274 - DNA, 25 bp, Homo sapien
tgcctaggttggaatacagtggtgt

SEQ ID NO: 4055275 - DNA, 25 bp, Homo sapien
tcctcccgcttcagcttcctgagga

SEQ ID NO: 4055276 - DNA, 25 bp, Homo sapien
tgcctcctgggctcctgggctcaag

SEQ ID NO: 4055277 - DNA, 25 bp, Homo sapien
cccagcccggccataaatgtggttt

SEQ ID NO: 4055278 - DNA, 25 bp, Homo sapien
ccctgagaatgacccgcatggtaaa

SEQ ID NO: 4055279 - DNA, 25 bp, Homo sapien
tctacggccaagaatcaagtgcccc

SEQ ID NO: 4055280 - DNA, 25 bp, Homo sapien
tcttggtggctggacgtctacggcc

SEQ ID NO: 4055281 - DNA, 25 bp, Homo sapien
cactgcgctgggttgctgctacaat

SEQ ID NO: 4055282 - DNA, 25 bp, Homo sapien
caaggcaactcctatgacatctggc

SEQ ID NO: 4055283 - DNA, 25 bp, Homo sapien
gctacaattgtgtgagtgacataca

SEQ ID NO: 4055284 - DNA, 25 bp, Homo sapien
ggttccagtcttcactagctgcgag

SEQ ID NO: 4055285 - DNA, 25 bp, Homo sapien
ctcctgctttggcagggcatcgtca

SEQ ID NO: 4055286 - DNA, 25 bp, Homo sapien
tggttgcacacgttggccacttctt

SEQ ID NO: 4055287 - DNA, 25 bp, Homo sapien
agcttcatcaggctctggttgcaca

SEQ ID NO: 4055288 - DNA, 25 bp, Homo sapien
tcaggctctggttgcacacgttggc

SEQ ID NO: 4055289 - DNA, 25 bp, Homo sapien
aagcagggcaagacagcagtcagga

SEQ ID NO: 4055290 - DNA, 25 bp, Homo sapien
agtaaggcagcatgacgcggcccgc

SEQ ID NO: 4055291 - DNA, 25 bp, Homo sapien
cgcatccagcacatggctgtcagct

SEQ ID NO: 4055292 - DNA, 25 bp, Homo sapien
ttgcggtcatcgtaggccaagcagg

SEQ ID NO: 4055293 - DNA, 25 bp, Homo sapien
ctgttgtctggcagtggatcaccag

SEQ ID NO: 4055294 - DNA, 25 bp, Homo sapien
ctcagcaaacttcacactggagggg

SEQ ID NO: 4055295 - DNA, 25 bp, Homo sapien
cacactggaggggttcttcttaatt

SEQ ID NO: 4055296 - DNA, 25 bp, Homo sapien
gcaaacttcacactggaggggttct

SEQ ID NO: 4055297 - DNA, 25 bp, Homo sapien
aacttcacactggaggggttcttct

SEQ ID NO: 4055298 - DNA, 25 bp, Homo sapien
ggatctccggcaggtaatccagcag

SEQ ID NO: 4055299 - DNA, 25 bp, Homo sapien
gcgaatctctttgccattgtcaccc

SEQ ID NO: 4055300 - DNA, 25 bp, Homo sapien
tccatccaggatctccggcaggtaa

SEQ ID NO: 4055301 - DNA, 25 bp, Homo sapien
aggttaatgtctggcaccgactcca

SEQ ID NO: 4055302 - DNA, 25 bp, Homo sapien
agtaaatcctctctcgcaacaaggg

SEQ ID NO: 4055303 - DNA, 25 bp, Homo sapien
aggtcaaacttgttgctctcagtca

SEQ ID NO: 4055304 - DNA, 25 bp, Homo sapien
gggatgaagctcaccaggtcaaact

SEQ ID NO: 4055305 - DNA, 25 bp, Homo sapien
ccaggagatgatgaactgccgggca

SEQ ID NO: 4055306 - DNA, 25 bp, Homo sapien
gctcagatccgcttttcacattggg

SEQ ID NO: 4055307 - DNA, 25 bp, Homo sapien
ggtctaggagctcagatccgctttt

SEQ ID NO: 4055308 - DNA, 25 bp, Homo sapien
ctttaaaaggcggtctaggagctca

SEQ ID NO: 4055309 - DNA, 25 bp, Homo sapien
aaaggcggtctaggagctcagatcc

SEQ ID NO: 4055310 - DNA, 25 bp, Homo sapien
caggtcagcactggctcgatcagct

SEQ ID NO: 4055311 - DNA, 25 bp, Homo sapien
tagagggcctcgcaggcatagtagc

SEQ ID NO: 4055312 - DNA, 25 bp, Homo sapien
caccttgacgatgttgtagagggcc

SEQ ID NO: 4055313 - DNA, 25 bp, Homo sapien
ccgtcaaagagcacgttgaagtggg

SEQ ID NO: 4055314 - DNA, 25 bp, Homo sapien
atgaggccccctttccggctgtggg

SEQ ID NO: 4055315 - DNA, 25 bp, Homo sapien
ttgttctgggccacgaactcccgga

SEQ ID NO: 4055316 - DNA, 25 bp, Homo sapien
gcacggtattgttctgggccacgaa

SEQ ID NO: 4055317 - DNA, 25 bp, Homo sapien
tcacatgcttgatttgcacggtatt

SEQ ID NO: 4055318 - DNA, 25 bp, Homo sapien
ctgctggtggtaactggggaatctc

SEQ ID NO: 4055319 - DNA, 25 bp, Homo sapien
gagaacagtacagcagcgggatggg

SEQ ID NO: 4055320 - DNA, 25 bp, Homo sapien
gggaatctccagttagaagaataga

SEQ ID NO: 4055321 - DNA, 25 bp, Homo sapien
agaagaatagatttcatgtaccagg

SEQ ID NO: 4055322 - DNA, 25 bp, Homo sapien
tgaaagactgtcttaaggagcctgg

SEQ ID NO: 4055323 - DNA, 25 bp, Homo sapien
catatgaaagactgtcttaaggagc

SEQ ID NO: 4055324 - DNA, 25 bp, Homo sapien
agactgtcttaaggagcctggagat

SEQ ID NO: 4055325 - DNA, 25 bp, Homo sapien
aaagactgtcttaaggagcctggag

SEQ ID NO: 4055326 - DNA, 25 bp, Homo sapien
tgaggacaggaagcgtgagggatga

SEQ ID NO: 4055327 - DNA, 25 bp, Homo sapien
tgtgaaatgaggacaggaagcgtga

SEQ ID NO: 4055328 - DNA, 25 bp, Homo sapien
caggaagcgtgagggatgacactgg

SEQ ID NO: 4055329 - DNA, 25 bp, Homo sapien
gacaggaagcgtgagggatgacact

SEQ ID NO: 4055330 - DNA, 25 bp, Homo sapien
tccacaaatggggtctcaagttgac

SEQ ID NO: 4055331 - DNA, 25 bp, Homo sapien
ctgttccacaaatggggtctcaagt

SEQ ID NO: 4055332 - DNA, 25 bp, Homo sapien
ggtctcaagttgacttgaagaattt

SEQ ID NO: 4055333 - DNA, 25 bp, Homo sapien
caaatggggtctcaagttgacttga

SEQ ID NO: 4055334 - DNA, 25 bp, Homo sapien
cttaaggggactcctgttgtgctgt

SEQ ID NO: 4055335 - DNA, 25 bp, Homo sapien
ttggccagtcttccgcaggaagctg

SEQ ID NO: 4055336 - DNA, 25 bp, Homo sapien
aaggggactcctgttgtgctgtcct

SEQ ID NO: 4055337 - DNA, 25 bp, Homo sapien
cttggccagtcttccgcaggaagct

SEQ ID NO: 4055338 - DNA, 25 bp, Homo sapien
tttgaagagtacgaggaaagtggct

SEQ ID NO: 4055339 - DNA, 25 bp, Homo sapien
agaagaccatgagctcgcacgtgat

SEQ ID NO: 4055340 - DNA, 25 bp, Homo sapien
catttagccccggtggatgtgagga

SEQ ID NO: 4055341 - DNA, 25 bp, Homo sapien
gaactttaggaagggcagtctgccc

SEQ ID NO: 4055342 - DNA, 25 bp, Homo sapien
tagtccaggttagcaggagcaaagg

SEQ ID NO: 4055343 - DNA, 25 bp, Homo sapien
tcttatagtccaggttagcaggagc

SEQ ID NO: 4055344 - DNA, 25 bp, Homo sapien
tactcttatagtccaggttagcagg

SEQ ID NO: 4055345 - DNA, 25 bp, Homo sapien
cctctactcttatagtccaggttag

SEQ ID NO: 4055346 - DNA, 25 bp, Homo sapien
taggttggacctaggaatgaactga

SEQ ID NO: 4055347 - DNA, 25 bp, Homo sapien
catacagtggatccaaccagtggaa

SEQ ID NO: 4055348 - DNA, 25 bp, Homo sapien
gagcagatatgacgtaggaatgagc

SEQ ID NO: 4055349 - DNA, 25 bp, Homo sapien
tgtactgagcatacagtggatccaa

SEQ ID NO: 4055350 - DNA, 25 bp, Homo sapien
gtgagcggcgcgaaatccttctcgg

SEQ ID NO: 4055351 - DNA, 25 bp, Homo sapien
agcttgtcattgagggcgcgcacga

SEQ ID NO: 4055352 - DNA, 25 bp, Homo sapien
ggcgcgcacgatgttaggcgtgagc

SEQ ID NO: 4055353 - DNA, 25 bp, Homo sapien
accttccgcttttcgtacagcttgt

SEQ ID NO: 4055354 - DNA, 25 bp, Homo sapien
ggcgcatggaccacgccgctctagg

SEQ ID NO: 4055355 - DNA, 25 bp, Homo sapien
acacctgaccctggccgcttaacaa

SEQ ID NO: 4055356 - DNA, 25 bp, Homo sapien
ggcactagcgggactcacgagacag

SEQ ID NO: 4055357 - DNA, 25 bp, Homo sapien
ctgggggaacctcgcgactccttag

SEQ ID NO: 4055358 - DNA, 25 bp, Homo sapien
gggctctcaacccatggaaactgtg

SEQ ID NO: 4055359 - DNA, 25 bp, Homo sapien
caaaggctaatccaaaactcggcaa

SEQ ID NO: 4055360 - DNA, 25 bp, Homo sapien
tatgccctctttcagcgtgaacaag

SEQ ID NO: 4055361 - DNA, 25 bp, Homo sapien
gagattaacttgagtcggcctgacc

SEQ ID NO: 4055362 - DNA, 25 bp, Homo sapien
ctctattctttttcaggctaagaca

SEQ ID NO: 4055363 - DNA, 25 bp, Homo sapien
gaaataactgccctataattgtatg

SEQ ID NO: 4055364 - DNA, 25 bp, Homo sapien
caatgcatagcttttggttgataca

SEQ ID NO: 4055365 - DNA, 25 bp, Homo sapien
taatagggaaataactgccctataa

SEQ ID NO: 4055366 - DNA, 25 bp, Homo sapien
ggatgatatactctccacctgcgag

SEQ ID NO: 4055367 - DNA, 25 bp, Homo sapien
gccagatgggtttccttcaaaggag

SEQ ID NO: 4055368 - DNA, 25 bp, Homo sapien
tgttgatcttcttgggccgcacaga

SEQ ID NO: 4055369 - DNA, 25 bp, Homo sapien
gatgattatgctgtacccggctcgg

SEQ ID NO: 4055370 - DNA, 25 bp, Homo sapien
cttttccggaagtgctggcgtggct

SEQ ID NO: 4055371 - DNA, 25 bp, Homo sapien
gctgaaattcaaatgagaacgtgcc

SEQ ID NO: 4055372 - DNA, 25 bp, Homo sapien
tagtaacccaagtcagtgttgtgca

SEQ ID NO: 4055373 - DNA, 25 bp, Homo sapien
cctctgccgtgtgtaattgatgaac

SEQ ID NO: 4055374 - DNA, 25 bp, Homo sapien
aggaggaggccttgattgtaggagt

SEQ ID NO: 4055375 - DNA, 25 bp, Homo sapien
aggaggccttgattgtaggagttta

SEQ ID NO: 4055376 - DNA, 25 bp, Homo sapien
gaggccttgattgtaggagtttaag

SEQ ID NO: 4055377 - DNA, 25 bp, Homo sapien
gccttgattgtaggagtttaaggct

SEQ ID NO: 4055378 - DNA, 25 bp, Homo sapien
tatcatagaaaagctagaacagacc

SEQ ID NO: 4055379 - DNA, 25 bp, Homo sapien
ttatttcataaacggccctgcagag

SEQ ID NO: 4055380 - DNA, 25 bp, Homo sapien
gaatagctaagatactccagcagaa

SEQ ID NO: 4055381 - DNA, 25 bp, Homo sapien
gaacagacccatgcatagatgaact

SEQ ID NO: 4055382 - DNA, 25 bp, Homo sapien
cctatgcgcattgggaggatacatg

SEQ ID NO: 4055383 - DNA, 25 bp, Homo sapien
tccacgaggagttagcagtttatca

SEQ ID NO: 4055384 - DNA, 25 bp, Homo sapien
tacatgtaccaggagatccatggcc

SEQ ID NO: 4055385 - DNA, 25 bp, Homo sapien
tgtggaacaacgtatgcctatgcgc

SEQ ID NO: 4055386 - DNA, 25 bp, Homo sapien
ccgagtagggcagagggttctccaa

SEQ ID NO: 4055387 - DNA, 25 bp, Homo sapien
tccggcattccgtggagaaggtcac

SEQ ID NO: 4055388 - DNA, 25 bp, Homo sapien
gaagggatgaccctgaaactcacat

SEQ ID NO: 4055389 - DNA, 25 bp, Homo sapien
ccaacttgatggaggctgacgcaac

SEQ ID NO: 4055390 - DNA, 25 bp, Homo sapien
catagtgatgcttaggtccggcttc

SEQ ID NO: 4055391 - DNA, 25 bp, Homo sapien
tacatcaatgtaatcaaggcccttc

SEQ ID NO: 4055392 - DNA, 25 bp, Homo sapien
cttagagccagacagtacatcaatg

SEQ ID NO: 4055393 - DNA, 25 bp, Homo sapien
gcagcgtacgttccctccttgtggg

SEQ ID NO: 4055394 - DNA, 25 bp, Homo sapien
gatagatattggctacagctttggg

SEQ ID NO: 4055395 - DNA, 25 bp, Homo sapien
ggtcttacatggcacttcacgatag

SEQ ID NO: 4055396 - DNA, 25 bp, Homo sapien
tggggagctcagaagtcccatgcag

SEQ ID NO: 4055397 - DNA, 25 bp, Homo sapien
catgcagagcatacagccagccggt

SEQ ID NO: 4055398 - DNA, 25 bp, Homo sapien
ccaagttcatggtgcggggcctgta

SEQ ID NO: 4055399 - DNA, 25 bp, Homo sapien
ggtgatctcatagggcttgttttgc

SEQ ID NO: 4055400 - DNA, 25 bp, Homo sapien
ttggagcgcacctggcacgtgaaat

SEQ ID NO: 4055401 - DNA, 25 bp, Homo sapien
cccagtgctcgccctcaaagatggg

SEQ ID NO: 4055402 - DNA, 25 bp, Homo sapien
cacttccccctggtccgtctccagg

SEQ ID NO: 4055403 - DNA, 25 bp, Homo sapien
ctccagggccagaagtacagaatgt

SEQ ID NO: 4055404 - DNA, 25 bp, Homo sapien
atcttccatggcacttccccctggt

SEQ ID NO: 4055405 - DNA, 25 bp, Homo sapien
cagggccagaagtacagaatgtgcg

SEQ ID NO: 4055406 - DNA, 25 bp, Homo sapien
gactgcctccctggatgtagcagag

SEQ ID NO: 4055407 - DNA, 25 bp, Homo sapien
ttttaccgcaggtggtcccacgcag

SEQ ID NO: 4055408 - DNA, 25 bp, Homo sapien
cacgcagactccagacagggttaga

SEQ ID NO: 4055409 - DNA, 25 bp, Homo sapien
cacctcggtgggatggtaggtcact

SEQ ID NO: 4055410 - DNA, 25 bp, Homo sapien
gaaatgaggctcaaattttttgatg

SEQ ID NO: 4055411 - DNA, 25 bp, Homo sapien
tgaggctcaaattttttgatgtccc

SEQ ID NO: 4055412 - DNA, 25 bp, Homo sapien
aatgaggctcaaattttttgatgtc

SEQ ID NO: 4055413 - DNA, 25 bp, Homo sapien
gagaaatgaggctcaaattttttga

SEQ ID NO: 4055414 - DNA, 25 bp, Homo sapien
gttcctggtccagtgagatctccag

SEQ ID NO: 4055415 - DNA, 25 bp, Homo sapien
catcatgaggatgcgacgtgtggct

SEQ ID NO: 4055416 - DNA, 25 bp, Homo sapien
caccacgggtccaaagggaatatgt

SEQ ID NO: 4055417 - DNA, 25 bp, Homo sapien
gatgacttccagtttacagacttct

SEQ ID NO: 4055418 - DNA, 25 bp, Homo sapien
tcttttcacaacctgccctggtagg

SEQ ID NO: 4055419 - DNA, 25 bp, Homo sapien
ctggaattgtgaacagaatggactg

SEQ ID NO: 4055420 - DNA, 25 bp, Homo sapien
cacaacctgccctggtaggacagct

SEQ ID NO: 4055421 - DNA, 25 bp, Homo sapien
cacaatcctgttggctggatctagg

SEQ ID NO: 4055422 - DNA, 25 bp, Homo sapien
tggctttaccacatcaacacgggag

SEQ ID NO: 4055423 - DNA, 25 bp, Homo sapien
ggaatgagttcttgatagttgatac

SEQ ID NO: 4055424 - DNA, 25 bp, Homo sapien
tttcgactgtttgttgtgagagccc

SEQ ID NO: 4055425 - DNA, 25 bp, Homo sapien
ggtgttggtgtacagacaatctatg

SEQ ID NO: 4055426 - DNA, 25 bp, Homo sapien
cacataaatgttggaccatggctga

SEQ ID NO: 4055427 - DNA, 25 bp, Homo sapien
agcaggtcccaaagttgtagctggt

SEQ ID NO: 4055428 - DNA, 25 bp, Homo sapien
ggtttgtttgtatgggggcatccca

SEQ ID NO: 4055429 - DNA, 25 bp, Homo sapien
ggagaaatggatagccgggctcaca

SEQ ID NO: 4055430 - DNA, 25 bp, Homo sapien
taaagttgaattcacactggacaca

SEQ ID NO: 4055431 - DNA, 25 bp, Homo sapien
ttccaggtctgtcaagacacacttc

SEQ ID NO: 4055432 - DNA, 25 bp, Homo sapien
tacactctgtcctacatccacagtg

SEQ ID NO: 4055433 - DNA, 25 bp, Homo sapien
cagtgctgtcgatgggtgaaaattc

SEQ ID NO: 4055434 - DNA, 25 bp, Homo sapien
ccttcctgctttggtgtgaagaaaa

SEQ ID NO: 4055435 - DNA, 25 bp, Homo sapien
cattgcagatcaaattaaagttcac

SEQ ID NO: 4055436 - DNA, 25 bp, Homo sapien
tctggttgggagtcaacagagtgat

SEQ ID NO: 4055437 - DNA, 25 bp, Homo sapien
cattcatagtgtagccctcggcctt

SEQ ID NO: 4055438 - DNA, 25 bp, Homo sapien
gacatacaagcaggctgttgctgaa

SEQ ID NO: 4055439 - DNA, 25 bp, Homo sapien
aaccttcagaatagcgggagttgtc

SEQ ID NO: 4055440 - DNA, 25 bp, Homo sapien
cttccatgggacatacaagcaggct

SEQ ID NO: 4055441 - DNA, 25 bp, Homo sapien
tgatctgcacagtctccctggcttc

SEQ ID NO: 4055442 - DNA, 25 bp, Homo sapien
ctcagtgatgcccagatggaaaggt

SEQ ID NO: 4055443 - DNA, 25 bp, Homo sapien
gctcgggaattaggaaggtccatga

SEQ ID NO: 4055444 - DNA, 25 bp, Homo sapien
tgaggtgtgacttgttcagagagat

SEQ ID NO: 4055445 - DNA, 25 bp, Homo sapien
gactgtgatgttgtgctcgggaatt

SEQ ID NO: 4055446 - DNA, 25 bp, Homo sapien
gcccttttctgtaaggcatgtgaat

SEQ ID NO: 4055447 - DNA, 25 bp, Homo sapien
gagtaggtgctattggttgggttta

SEQ ID NO: 4055448 - DNA, 25 bp, Homo sapien
taggtgctattggttgggtttagga

SEQ ID NO: 4055449 - DNA, 25 bp, Homo sapien
ggttctggagactttcaatttcttc

SEQ ID NO: 4055450 - DNA, 25 bp, Homo sapien
aatcacccgggtgtttggatccaga

SEQ ID NO: 4055451 - DNA, 25 bp, Homo sapien
tatgtagtccgagtctttcagatca

SEQ ID NO: 4055452 - DNA, 25 bp, Homo sapien
ggttgcgctgatggccacttatgta

SEQ ID NO: 4055453 - DNA, 25 bp, Homo sapien
ttttgctaccaggaccggaccttgc

SEQ ID NO: 4055454 - DNA, 25 bp, Homo sapien
ggtgctgcctgtatgcatcgtgccc

SEQ ID NO: 4055455 - DNA, 25 bp, Homo sapien
acgattcccgaagagggctccacag

SEQ ID NO: 4055456 - DNA, 25 bp, Homo sapien
catcgtgccctgactaagctgatct

SEQ ID NO: 4055457 - DNA, 25 bp, Homo sapien
gaaaaggttgctctcgaagtctcca

SEQ ID NO: 4055458 - DNA, 25 bp, Homo sapien
gacacgtcctgaattaatcacatcg

SEQ ID NO: 4055459 - DNA, 25 bp, Homo sapien
gctggacacgtcctgaattaatcac

SEQ ID NO: 4055460 - DNA, 25 bp, Homo sapien
tggacacgtcctgaattaatcacat

SEQ ID NO: 4055461 - DNA, 25 bp, Homo sapien
cacgtcctgaattaatcacatcgaa

SEQ ID NO: 4055462 - DNA, 25 bp, Homo sapien
tctcacttctttacttggttacctc

SEQ ID NO: 4055463 - DNA, 25 bp, Homo sapien
tatctgtcctctaaagttcagctgg

SEQ ID NO: 4055464 - DNA, 25 bp, Homo sapien
gatctgctttaaatacccctttgct

SEQ ID NO: 4055465 - DNA, 25 bp, Homo sapien
gagagagcccttcattctcgcttct

SEQ ID NO: 4055466 - DNA, 25 bp, Homo sapien
tcaaacactcgggtctggtaaacca

SEQ ID NO: 4055467 - DNA, 25 bp, Homo sapien
ccaaggtttccttaaagcgcacatc

SEQ ID NO: 4055468 - DNA, 25 bp, Homo sapien
tgaagcgaaatccacattggcactg

SEQ ID NO: 4055469 - DNA, 25 bp, Homo sapien
tctcttgcttggcaatggtatgaag

SEQ ID NO: 4055470 - DNA, 25 bp, Homo sapien
taatcctggagagcttgcacctgat

SEQ ID NO: 4055471 - DNA, 25 bp, Homo sapien
gactgtgtgcatgcggtcatcccag

SEQ ID NO: 4055472 - DNA, 25 bp, Homo sapien
caggcatgtttctgggtacgtccac

SEQ ID NO: 4055473 - DNA, 25 bp, Homo sapien
cgttttgtagtgaaagtcccaggca

SEQ ID NO: 4055474 - DNA, 25 bp, Homo sapien
ggcacacccagggtggaggtggccc

SEQ ID NO: 4055475 - DNA, 25 bp, Homo sapien
cacacccagggtggaggtggcccat

SEQ ID NO: 4055476 - DNA, 25 bp, Homo sapien
ttggcacacccagggtggaggtggc

SEQ ID NO: 4055477 - DNA, 25 bp, Homo sapien
cttggcacacccagggtggaggtgg

SEQ ID NO: 4055478 - DNA, 25 bp, Homo sapien
aaagcaattgtagctgaaacaggcc

SEQ ID NO: 4055479 - DNA, 25 bp, Homo sapien
tgtgatttgtgactgtgaagctcgc

SEQ ID NO: 4055480 - DNA, 25 bp, Homo sapien
cccaaattggatgtggtccaccaga

SEQ ID NO: 4055481 - DNA, 25 bp, Homo sapien
gaaacaggccattcaaaccgtatca

SEQ ID NO: 4055482 - DNA, 25 bp, Homo sapien
gagatacttatgtcttcctggctgg

SEQ ID NO: 4055483 - DNA, 25 bp, Homo sapien
ccttctgggagtggaaaacgacatc

SEQ ID NO: 4055484 - DNA, 25 bp, Homo sapien
tcctcatattggttgttgatcactg

SEQ ID NO: 4055485 - DNA, 25 bp, Homo sapien
caccatgtggatggaggtctcctca

SEQ ID NO: 4055486 - DNA, 25 bp, Homo sapien
gggagaagactcctagctcatcctg

SEQ ID NO: 4055487 - DNA, 25 bp, Homo sapien
tggtgggcctccctttcagggagaa

SEQ ID NO: 4055488 - DNA, 25 bp, Homo sapien
tagctcatcctgcaggtcaacatgc

SEQ ID NO: 4055489 - DNA, 25 bp, Homo sapien
ctgtgatgtagatatacgcggtggt

SEQ ID NO: 4055490 - DNA, 25 bp, Homo sapien
cagcttctctgaatgaccaaggaga

SEQ ID NO: 4055491 - DNA, 25 bp, Homo sapien
aggttcccctcaccagcgatgtcaa

SEQ ID NO: 4055492 - DNA, 25 bp, Homo sapien
cgatgtcaaacacgaggcctcggct

SEQ ID NO: 4055493 - DNA, 25 bp, Homo sapien
tattggttatgaagaactggccgca

SEQ ID NO: 4055494 - DNA, 25 bp, Homo sapien
tgaaggacaccgtggcaaaggcatg

SEQ ID NO: 4055495 - DNA, 25 bp, Homo sapien
cactggtagttctgcatgatctgcg

SEQ ID NO: 4055496 - DNA, 25 bp, Homo sapien
ccaaggtagcctcaaagatgcactg

SEQ ID NO: 4055497 - DNA, 25 bp, Homo sapien
caaaaatgtcgacgatgcgggcaaa

SEQ ID NO: 4055498 - DNA, 25 bp, Homo sapien
gctggaggtaggcctgtctggagct

SEQ ID NO: 4055499 - DNA, 25 bp, Homo sapien
tggaggtaggcctgtctggagctgg

SEQ ID NO: 4055500 - DNA, 25 bp, Homo sapien
ctggaggtaggcctgtctggagctg

SEQ ID NO: 4055501 - DNA, 25 bp, Homo sapien
tatcacaaaggtacccggaggagac

SEQ ID NO: 4055502 - DNA, 25 bp, Homo sapien
tattttaggcacatagtgagcattc

SEQ ID NO: 4055503 - DNA, 25 bp, Homo sapien
tgagcattcaatggaggaatgcggt

SEQ ID NO: 4055504 - DNA, 25 bp, Homo sapien
aatgcggtttgctcgtccatgcgta

SEQ ID NO: 4055505 - DNA, 25 bp, Homo sapien
tctctatggtctgcaggatgtggtg

SEQ ID NO: 4055506 - DNA, 25 bp, Homo sapien
tcaaggcattgttttcggtcacgaa

SEQ ID NO: 4055507 - DNA, 25 bp, Homo sapien
gataggcctgactacaatgttgaca

SEQ ID NO: 4055508 - DNA, 25 bp, Homo sapien
tgatcttgaaacgagccttggcttg

SEQ ID NO: 4055509 - DNA, 25 bp, Homo sapien
acaaaggagaattgtggaggacaca

SEQ ID NO: 4055510 - DNA, 25 bp, Homo sapien
ggattcccactctgtgattcctaat

SEQ ID NO: 4055511 - DNA, 25 bp, Homo sapien
acacataggcgaagtcatgcaaggg

SEQ ID NO: 4055512 - DNA, 25 bp, Homo sapien
gctggttgccacactccagtgagca

SEQ ID NO: 4055513 - DNA, 25 bp, Homo sapien
tctcggccggagatatcgatggcta

SEQ ID NO: 4055514 - DNA, 25 bp, Homo sapien
tacacggtgaacatgccatgggcga

SEQ ID NO: 4055515 - DNA, 25 bp, Homo sapien
tttcccatggcgtcagccacacagt

SEQ ID NO: 4055516 - DNA, 25 bp, Homo sapien
caaagtgtaaagaatgccggcaggg

SEQ ID NO: 4055517 - DNA, 25 bp, Homo sapien
ccagactatgggggctgttagatgg

SEQ ID NO: 4055518 - DNA, 25 bp, Homo sapien
gccagactatgggggctgttagatg

SEQ ID NO: 4055519 - DNA, 25 bp, Homo sapien
cagactatgggggctgttagatggt

SEQ ID NO: 4055520 - DNA, 25 bp, Homo sapien
agggataggaggcttggaggcagag

SEQ ID NO: 4055521 - DNA, 25 bp, Homo sapien
tttgtagaagctctcactttctcgg

SEQ ID NO: 4055522 - DNA, 25 bp, Homo sapien
actttctcgggatcttgcatgtctg

SEQ ID NO: 4055523 - DNA, 25 bp, Homo sapien
ttctttctgaatcgtgtcagagaac

SEQ ID NO: 4055524 - DNA, 25 bp, Homo sapien
tcttgcatgtctgacgtggctggct

SEQ ID NO: 4055525 - DNA, 25 bp, Homo sapien
gcattcgcggaaaacttaattggga

SEQ ID NO: 4055526 - DNA, 25 bp, Homo sapien
tataaagggcgaacttgaagtcagt

SEQ ID NO: 4055527 - DNA, 25 bp, Homo sapien
ggtgcttttacgagtgccacagatc

SEQ ID NO: 4055528 - DNA, 25 bp, Homo sapien
gggctctcccctgtcagcttataaa

SEQ ID NO: 4055529 - DNA, 25 bp, Homo sapien
gaatttatattaggtgttgaaatcc

SEQ ID NO: 4055530 - DNA, 25 bp, Homo sapien
tgacagcgcagaacaggctggtgct

SEQ ID NO: 4055531 - DNA, 25 bp, Homo sapien
aatccctacagagtccacggaaaag

SEQ ID NO: 4055532 - DNA, 25 bp, Homo sapien
tttttgggttggactgagatcatgg

SEQ ID NO: 4055533 - DNA, 25 bp, Homo sapien
tgatcgcctctccttagccaggatt

SEQ ID NO: 4055534 - DNA, 25 bp, Homo sapien
cactgtgctttgtacatcgtgatcg

SEQ ID NO: 4055535 - DNA, 25 bp, Homo sapien
gctttgtacatcgtgatcgcctctc

SEQ ID NO: 4055536 - DNA, 25 bp, Homo sapien
gtacatcgtgatcgcctctccttag

SEQ ID NO: 4055537 - DNA, 25 bp, Homo sapien
gcaggagatctctgtccaacaggga

SEQ ID NO: 4055538 - DNA, 25 bp, Homo sapien
tctatcccatggtcaagagaggcca

SEQ ID NO: 4055539 - DNA, 25 bp, Homo sapien
catgcagagcgaacagtgacacaga

SEQ ID NO: 4055540 - DNA, 25 bp, Homo sapien
tgcttacggcaaagacagccatact

SEQ ID NO: 4055541 - DNA, 25 bp, Homo sapien
ggcaagattccacttagcactaatt

SEQ ID NO: 4055542 - DNA, 25 bp, Homo sapien
caacaggcaagattccacttagcac

SEQ ID NO: 4055543 - DNA, 25 bp, Homo sapien
caggcaagattccacttagcactaa

SEQ ID NO: 4055544 - DNA, 25 bp, Homo sapien
caagattccacttagcactaattcc

SEQ ID NO: 4055545 - DNA, 25 bp, Homo sapien
ccattcttttgaagccaagggaggc

SEQ ID NO: 4055546 - DNA, 25 bp, Homo sapien
ttgacggccgcaaaccctatcggat

SEQ ID NO: 4055547 - DNA, 25 bp, Homo sapien
tattccccacggtggacttgacggc

SEQ ID NO: 4055548 - DNA, 25 bp, Homo sapien
gactacaagtgatatgaccaccacg

SEQ ID NO: 4055549 - DNA, 25 bp, Homo sapien
ccacggttcttcaattgcaggggct

SEQ ID NO: 4055550 - DNA, 25 bp, Homo sapien
tcccacggttcttcaattgcagggg

SEQ ID NO: 4055551 - DNA, 25 bp, Homo sapien
ttcccacggttcttcaattgcaggg

SEQ ID NO: 4055552 - DNA, 25 bp, Homo sapien
cccacggttcttcaattgcaggggc

SEQ ID NO: 4055553 - DNA, 25 bp, Homo sapien
ggtgatgtccaaggcgatgtcgtat

SEQ ID NO: 4055554 - DNA, 25 bp, Homo sapien
caaggcgatgtcgtatgcctctgca

SEQ ID NO: 4055555 - DNA, 25 bp, Homo sapien
gtcgtatgcctctgcaaagaccatg

SEQ ID NO: 4055556 - DNA, 25 bp, Homo sapien
gcctctgcaaagaccatgatatttt

SEQ ID NO: 4055557 - DNA, 25 bp, Homo sapien
caagacctataggtgcttggagcct

SEQ ID NO: 4055558 - DNA, 25 bp, Homo sapien
gtgcttggagcctgaaacatgtaat

SEQ ID NO: 4055559 - DNA, 25 bp, Homo sapien
aaaagcaagacctataggtgcttgg

SEQ ID NO: 4055560 - DNA, 25 bp, Homo sapien
cttggagcctgaaacatgtaatatc

SEQ ID NO: 4055561 - DNA, 25 bp, Homo sapien
ctgaaagtacaggtgcaggccgtac

SEQ ID NO: 4055562 - DNA, 25 bp, Homo sapien
ccacaggcaggagcgtgacattgcg

SEQ ID NO: 4055563 - DNA, 25 bp, Homo sapien
ggagaagaactaccctggattcctg

SEQ ID NO: 4055564 - DNA, 25 bp, Homo sapien
cctgcatcagggatacagtgaaatc

SEQ ID NO: 4055565 - DNA, 25 bp, Homo sapien
tccagctctagttccgggcggatcc

SEQ ID NO: 4055566 - DNA, 25 bp, Homo sapien
ccaactgaagtagggtaggcccata

SEQ ID NO: 4055567 - DNA, 25 bp, Homo sapien
ctgtgcagcaagagccggtcaaaat

SEQ ID NO: 4055568 - DNA, 25 bp, Homo sapien
tgtcattgatgcagcagacaatgct

SEQ ID NO: 4055569 - DNA, 25 bp, Homo sapien
ccatggtgttgggttccaggaagta

SEQ ID NO: 4055570 - DNA, 25 bp, Homo sapien
gattgttagcgtctccatgttgcct

SEQ ID NO: 4055571 - DNA, 25 bp, Homo sapien
catgttgcctgggaataaggatgac

SEQ ID NO: 4055572 - DNA, 25 bp, Homo sapien
tgcctccaccaccattaaggaagtg

SEQ ID NO: 4055573 - DNA, 25 bp, Homo sapien
catcttccgctgaggaaataccact

SEQ ID NO: 4055574 - DNA, 25 bp, Homo sapien
tacttcttaaagatgacctcatttg

SEQ ID NO: 4055575 - DNA, 25 bp, Homo sapien
gtagtggcccaaagtagtacgtctc

SEQ ID NO: 4055576 - DNA, 25 bp, Homo sapien
gtctccgtgctcataacatacttct

SEQ ID NO: 4055577 - DNA, 25 bp, Homo sapien
tactggcagcaagttcctaggatct

SEQ ID NO: 4055578 - DNA, 25 bp, Homo sapien
aagtgcacctgcaacgttacctcgc

SEQ ID NO: 4055579 - DNA, 25 bp, Homo sapien
gatgcctcggcagtagagctggtac

SEQ ID NO: 4055580 - DNA, 25 bp, Homo sapien
gctggcacgatccaccggaagtgat

SEQ ID NO: 4055581 - DNA, 25 bp, Homo sapien
cagctgggaaatggttccagcaggt

SEQ ID NO: 4055582 - DNA, 25 bp, Homo sapien
taaggccatgtgacgcttgtctttc

SEQ ID NO: 4055583 - DNA, 25 bp, Homo sapien
tgcccgttgaagttgtccaggtctg

SEQ ID NO: 4055584 - DNA, 25 bp, Homo sapien
aaggaccttcctgtttaaggccatg

SEQ ID NO: 4055585 - DNA, 25 bp, Homo sapien
tcaggtagctgtgaatgccgttaat

SEQ ID NO: 4055586 - DNA, 25 bp, Homo sapien
aatagtctccgatatcattcaggta

SEQ ID NO: 4055587 - DNA, 25 bp, Homo sapien
tacatgagtaagttttctggtggcg

SEQ ID NO: 4055588 - DNA, 25 bp, Homo sapien
ccatagcttggctaccacatatcag

SEQ ID NO: 4055589 - DNA, 25 bp, Homo sapien
tcttatattcttacacactatgcga

SEQ ID NO: 4055590 - DNA, 25 bp, Homo sapien
gaatcaccttagcttcaaaacacat

SEQ ID NO: 4055591 - DNA, 25 bp, Homo sapien
ggcgcatgtccccttaacttgtgtg

SEQ ID NO: 4055592 - DNA, 25 bp, Homo sapien
tgactttaccccaaacatccaatct

SEQ ID NO: 4055593 - DNA, 25 bp, Homo sapien
gcaaaggttgttaggtgagaatcaa

SEQ ID NO: 4055594 - DNA, 25 bp, Homo sapien
gagaatcaatcattatccgtttcct

SEQ ID NO: 4055595 - DNA, 25 bp, Homo sapien
tgcagggtaacttgacaagttccct

SEQ ID NO: 4055596 - DNA, 25 bp, Homo sapien
cctccaatggggactgcaaaggttg

SEQ ID NO: 4055597 - DNA, 25 bp, Homo sapien
atatatcttcggatggtgggatcac

SEQ ID NO: 4055598 - DNA, 25 bp, Homo sapien
tttttcatccagagatatatcttcg

SEQ ID NO: 4055599 - DNA, 25 bp, Homo sapien
tccagagatatatcttcggatggtg

SEQ ID NO: 4055600 - DNA, 25 bp, Homo sapien
tagtgtttgtggtggccaaaaagtc

SEQ ID NO: 4055601 - DNA, 25 bp, Homo sapien
gcttcaccgggtaggagacgattga

SEQ ID NO: 4055602 - DNA, 25 bp, Homo sapien
atggtcaaaggtggccgcttcaccg

SEQ ID NO: 4055603 - DNA, 25 bp, Homo sapien
gaggcacccagacccaagatgtcta

SEQ ID NO: 4055604 - DNA, 25 bp, Homo sapien
aaaatgctccaggtcgtctgtcatg

SEQ ID NO: 4055605 - DNA, 25 bp, Homo sapien
tgcttccagctcaagccttcaaagt

SEQ ID NO: 4055606 - DNA, 25 bp, Homo sapien
aagcttgtcgctctctagggcctgc

SEQ ID NO: 4055607 - DNA, 25 bp, Homo sapien
ctgcttccagctcaagccttcaaag

SEQ ID NO: 4055608 - DNA, 25 bp, Homo sapien
ttgggaagcttgtcgctctctaggg

SEQ ID NO: 4055609 - DNA, 25 bp, Homo sapien
cggtccttgcggcccctgcgcccac

SEQ ID NO: 4055610 - DNA, 25 bp, Homo sapien
ccggtccttgcggcccctgcgccca

SEQ ID NO: 4055611 - DNA, 25 bp, Homo sapien
ccaggcgctctctctcccggtcctt

SEQ ID NO: 4055612 - DNA, 25 bp, Homo sapien
ggcgctctctctcccggtccttgcg

SEQ ID NO: 4055613 - DNA, 25 bp, Homo sapien
tcataggtcttaaacttcggggcca

SEQ ID NO: 4055614 - DNA, 25 bp, Homo sapien
tccttgcttccggtcccagtacatg

SEQ ID NO: 4055615 - DNA, 25 bp, Homo sapien
gtacatgaggatgttctggacatcc

SEQ ID NO: 4055616 - DNA, 25 bp, Homo sapien
acctggcgctggtcgtcgggctcat

SEQ ID NO: 4055617 - DNA, 25 bp, Homo sapien
gaagcccatgcatgctgacatcgcc

SEQ ID NO: 4055618 - DNA, 25 bp, Homo sapien
ctggacaagaggaagcccatgcatg

SEQ ID NO: 4055619 - DNA, 25 bp, Homo sapien
tgacatcgcccatgttccttttctt

SEQ ID NO: 4055620 - DNA, 25 bp, Homo sapien
tgcatgctgacatcgcccatgttcc

SEQ ID NO: 4055621 - DNA, 25 bp, Homo sapien
gacatgaacgaccaggggctggctt

SEQ ID NO: 4055622 - DNA, 25 bp, Homo sapien
tctctaagttcaggccagcatcagg

SEQ ID NO: 4055623 - DNA, 25 bp, Homo sapien
tctcctcctctctaagttcaggcca

SEQ ID NO: 4055624 - DNA, 25 bp, Homo sapien
ggcttggagacatgaacgaccaggg

SEQ ID NO: 4055625 - DNA, 25 bp, Homo sapien
gtgaaggtgcagaagtgacagggtc

SEQ ID NO: 4055626 - DNA, 25 bp, Homo sapien
gcagcatagatgatgagcttggtgt

SEQ ID NO: 4055627 - DNA, 25 bp, Homo sapien
tgagttaccagtgtccgagggacaa

SEQ ID NO: 4055628 - DNA, 25 bp, Homo sapien
tgggccgtgttgagttaccagtgtc

SEQ ID NO: 4055629 - DNA, 25 bp, Homo sapien
atatctccctcagcgggtgttgtgg

SEQ ID NO: 4055630 - DNA, 25 bp, Homo sapien
gtgatgatcatatctccctcagcgg

SEQ ID NO: 4055631 - DNA, 25 bp, Homo sapien
gcagggagtgtcacatagcaggaat

SEQ ID NO: 4055632 - DNA, 25 bp, Homo sapien
agggagtgtcacatagcaggaattc

SEQ ID NO: 4055633 - DNA, 25 bp, Homo sapien
taagctcaagtgatacacaagcctg

SEQ ID NO: 4055634 - DNA, 25 bp, Homo sapien
cttgagaacatcttcaaagcctgtg

SEQ ID NO: 4055635 - DNA, 25 bp, Homo sapien
tagtccaagagtctcaagaagtccc

SEQ ID NO: 4055636 - DNA, 25 bp, Homo sapien
gtgttttcagaccaggcaaccgcat

SEQ ID NO: 4055637 - DNA, 25 bp, Homo sapien
ctggagactggttatagcttcaccc

SEQ ID NO: 4055638 - DNA, 25 bp, Homo sapien
agctggtcacaaccttcagccagga

SEQ ID NO: 4055639 - DNA, 25 bp, Homo sapien
gctggtcacaaccttcagccaggat

SEQ ID NO: 4055640 - DNA, 25 bp, Homo sapien
gcttcaccctcaggactcgtggctg

SEQ ID NO: 4055641 - DNA, 25 bp, Homo sapien
cctgctgtagcttcttttcttgcat

SEQ ID NO: 4055642 - DNA, 25 bp, Homo sapien
catcctcttccttttgtcgctccag

SEQ ID NO: 4055643 - DNA, 25 bp, Homo sapien
gtttgctgcttgagatttcttcatg

SEQ ID NO: 4055644 - DNA, 25 bp, Homo sapien
tcatcctcttccttttgtcgctcca

SEQ ID NO: 4055645 - DNA, 25 bp, Homo sapien
ttccgctcgcggagcgcctgctgaa

SEQ ID NO: 4055646 - DNA, 25 bp, Homo sapien
gctgaatcccccgatcgaatgtgag

SEQ ID NO: 4055647 - DNA, 25 bp, Homo sapien
cctcatccatgttttggagacgctc

SEQ ID NO: 4055648 - DNA, 25 bp, Homo sapien
cccgatcgaatgtgagtttctcctc

SEQ ID NO: 4055649 - DNA, 25 bp, Homo sapien
ctgccctacggattccaggtctagg

SEQ ID NO: 4055650 - DNA, 25 bp, Homo sapien
caggtctaggcatgtgattcacact

SEQ ID NO: 4055651 - DNA, 25 bp, Homo sapien
ctgccctgccctacggattccaggt

SEQ ID NO: 4055652 - DNA, 25 bp, Homo sapien
gattcacacttaggacaaaggcacc

SEQ ID NO: 4055653 - DNA, 25 bp, Homo sapien
tcctcgcaagtttgagctgtggact

SEQ ID NO: 4055654 - DNA, 25 bp, Homo sapien
catcctcgcaagtttgagctgtgga

SEQ ID NO: 4055655 - DNA, 25 bp, Homo sapien
atcctcgcaagtttgagctgtggac

SEQ ID NO: 4055656 - DNA, 25 bp, Homo sapien
tggctgtaattgcagaaaggatgga

SEQ ID NO: 4055657 - DNA, 25 bp, Homo sapien
ggctgtaattgcagaaaggatggag

SEQ ID NO: 4055658 - DNA, 25 bp, Homo sapien
gctgtaattgcagaaaggatggagg

SEQ ID NO: 4055659 - DNA, 25 bp, Homo sapien
ttcatcatagaacttcccagccggc

SEQ ID NO: 4055660 - DNA, 25 bp, Homo sapien
aagcgttcatcatagaacttcccag

SEQ ID NO: 4055661 - DNA, 25 bp, Homo sapien
cagccggccactcgcgtcccagttc

SEQ ID NO: 4055662 - DNA, 25 bp, Homo sapien
gtcagcaaagcgttcatcatagaac

SEQ ID NO: 4055663 - DNA, 25 bp, Homo sapien
tggccaccttacagggcagaggtga

SEQ ID NO: 4055664 - DNA, 25 bp, Homo sapien
tacaactcctggccaccttacaggg

SEQ ID NO: 4055665 - DNA, 25 bp, Homo sapien
aggtgaggcgccaacggaatagcaa

SEQ ID NO: 4055666 - DNA, 25 bp, Homo sapien
aggcgccaacggaatagcaaatgtc

SEQ ID NO: 4055667 - DNA, 25 bp, Homo sapien
taagcccaatggaaaggtaggaggc

SEQ ID NO: 4055668 - DNA, 25 bp, Homo sapien
ggcggctgcagcattctgagcaaag

SEQ ID NO: 4055669 - DNA, 25 bp, Homo sapien
ccggctgccaatggccttcagcagg

SEQ ID NO: 4055670 - DNA, 25 bp, Homo sapien
gctgcgtaatcctgggccatgttga

SEQ ID NO: 4055671 - DNA, 25 bp, Homo sapien
gaatgtatatatgctcccggctgcc

SEQ ID NO: 4055672 - DNA, 25 bp, Homo sapien
aggatctgcacgagaagttcatccg

SEQ ID NO: 4055673 - DNA, 25 bp, Homo sapien
tgcacgagaagttcatccgggagca

SEQ ID NO: 4055674 - DNA, 25 bp, Homo sapien
tgccaggatctgcacgagaagttca

SEQ ID NO: 4055675 - DNA, 25 bp, Homo sapien
gatctgcacgagaagttcatccggg

SEQ ID NO: 4055676 - DNA, 25 bp, Homo sapien
cagcccggtctcgcctccgacactg

SEQ ID NO: 4055677 - DNA, 25 bp, Homo sapien
ctcgcctccgacactgggactaaca

SEQ ID NO: 4055678 - DNA, 25 bp, Homo sapien
cggtctcgcctccgacactgggact

SEQ ID NO: 4055679 - DNA, 25 bp, Homo sapien
gtctcgcctccgacactgggactaa

SEQ ID NO: 4055680 - DNA, 25 bp, Homo sapien
ctgagccagcggtggatgggccccg

SEQ ID NO: 4055681 - DNA, 25 bp, Homo sapien
gagccagcggtggatgggccccggg

SEQ ID NO: 4055682 - DNA, 25 bp, Homo sapien
tgagccagcggtggatgggccccgg

SEQ ID NO: 4055683 - DNA, 25 bp, Homo sapien
agccagcggtggatgggccccgggg

SEQ ID NO: 4055684 - DNA, 25 bp, Homo sapien
tttcacttctccacctacaactcac

SEQ ID NO: 4055685 - DNA, 25 bp, Homo sapien
taaaagcctacactcacttgatttc

SEQ ID NO: 4055686 - DNA, 25 bp, Homo sapien
acttgatttcacttctccacctaca

SEQ ID NO: 4055687 - DNA, 25 bp, Homo sapien
ttgatttcacttctccacctacaac

SEQ ID NO: 4055688 - DNA, 25 bp, Homo sapien
tcccacaacttagattaatggtttc

SEQ ID NO: 4055689 - DNA, 25 bp, Homo sapien
ccttggcgcattgctcaaatgctgc

SEQ ID NO: 4055690 - DNA, 25 bp, Homo sapien
ttcagcagcaccggccagttggctg

SEQ ID NO: 4055691 - DNA, 25 bp, Homo sapien
gctgagactgctaagttccttggcg

SEQ ID NO: 4055692 - DNA, 25 bp, Homo sapien
ggctcagcctaattcccttttcaca

SEQ ID NO: 4055693 - DNA, 25 bp, Homo sapien
ctttagaatttaggttgagccatag

SEQ ID NO: 4055694 - DNA, 25 bp, Homo sapien
ggaaattgctgttatggagttctaa

SEQ ID NO: 4055695 - DNA, 25 bp, Homo sapien
ttgtaactaatttcactttattgca

SEQ ID NO: 4055696 - DNA, 25 bp, Homo sapien
gcccttctgcggtagagccctgatt

SEQ ID NO: 4055697 - DNA, 25 bp, Homo sapien
cagctgggtgaatgcccctttcaga

SEQ ID NO: 4055698 - DNA, 25 bp, Homo sapien
ctggcgagaacactgcagggatgaa

SEQ ID NO: 4055699 - DNA, 25 bp, Homo sapien
cagggatgaagagcactgatctggc

SEQ ID NO: 4055700 - DNA, 25 bp, Homo sapien
ttttggtgatcaccacgctcccacg

SEQ ID NO: 4055701 - DNA, 25 bp, Homo sapien
cttgcttttggtgatcaccacgctc

SEQ ID NO: 4055702 - DNA, 25 bp, Homo sapien
ctgtggtgtttcagactggtgtgag

SEQ ID NO: 4055703 - DNA, 25 bp, Homo sapien
actggtgtgagtgatgctgcttctg

SEQ ID NO: 4055704 - DNA, 25 bp, Homo sapien
tatgacgttttgacccacagctgcc

SEQ ID NO: 4055705 - DNA, 25 bp, Homo sapien
caaggtgtcagtgctcagtcgtcct

SEQ ID NO: 4055706 - DNA, 25 bp, Homo sapien
agtgctcagtcgtccttgccctatg

SEQ ID NO: 4055707 - DNA, 25 bp, Homo sapien
gagtcatctcggaggctaacttgcc

SEQ ID NO: 4055708 - DNA, 25 bp, Homo sapien
gtagtacttggccacgctaacggca

SEQ ID NO: 4055709 - DNA, 25 bp, Homo sapien
caatggagtcgatgctcaggcaggc

SEQ ID NO: 4055710 - DNA, 25 bp, Homo sapien
ggactgctctatggcagccctgatg

SEQ ID NO: 4055711 - DNA, 25 bp, Homo sapien
cacgctaacggcattggctgacttt

SEQ ID NO: 4055712 - DNA, 25 bp, Homo sapien
tgaatagcattgcatcataccatat

SEQ ID NO: 4055713 - DNA, 25 bp, Homo sapien
gaatagcattgcatcataccatatt

SEQ ID NO: 4055714 - DNA, 25 bp, Homo sapien
aatagcattgcatcataccatattt

SEQ ID NO: 4055715 - DNA, 25 bp, Homo sapien
tgcagtgaacattcaagcagttcat

SEQ ID NO: 4055716 - DNA, 25 bp, Homo sapien
gaatgttgtaattgctcccgagttt

SEQ ID NO: 4055717 - DNA, 25 bp, Homo sapien
tgtggcctgattaaccagttcccca

SEQ ID NO: 4055718 - DNA, 25 bp, Homo sapien
cccgagtttctattacagcatacag

SEQ ID NO: 4055719 - DNA, 25 bp, Homo sapien
gaagccgcagagtttacagagaaga

SEQ ID NO: 4055720 - DNA, 25 bp, Homo sapien
aatgtatattcactaccctatgcag

SEQ ID NO: 4055721 - DNA, 25 bp, Homo sapien
tagtatttgccatgaccacacagct

SEQ ID NO: 4055722 - DNA, 25 bp, Homo sapien
tggtcttaacctcccctcagaactg

SEQ ID NO: 4055723 - DNA, 25 bp, Homo sapien
gatgcctttccggttcttggccagg

SEQ ID NO: 4055724 - DNA, 25 bp, Homo sapien
cagaaatgtcaatgcccaggtggcg

SEQ ID NO: 4055725 - DNA, 25 bp, Homo sapien
tggccaggcggccttctgcagaaat

SEQ ID NO: 4055726 - DNA, 25 bp, Homo sapien
caagggtgtcccatgaatgataatg

SEQ ID NO: 4055727 - DNA, 25 bp, Homo sapien
tctaggtaggttttggactcgacca

SEQ ID NO: 4055728 - DNA, 25 bp, Homo sapien
gaccaacagggcgtgccattcttcc

SEQ ID NO: 4055729 - DNA, 25 bp, Homo sapien
tgtgctattggaggttccctgatct

SEQ ID NO: 4055730 - DNA, 25 bp, Homo sapien
gatgtgacagagatccctcggctca

SEQ ID NO: 4055731 - DNA, 25 bp, Homo sapien
tttgaagtactcgtacagttctggg

SEQ ID NO: 4055732 - DNA, 25 bp, Homo sapien
ctctttgaagtactcgtacagttct

SEQ ID NO: 4055733 - DNA, 25 bp, Homo sapien
gcagggtgttgtaggaatcatagcc

SEQ ID NO: 4055734 - DNA, 25 bp, Homo sapien
gtaggaatcatagcccttcagcttc

SEQ ID NO: 4055735 - DNA, 25 bp, Homo sapien
ggtgcacaaagtagcagtggcccca

SEQ ID NO: 4055736 - DNA, 25 bp, Homo sapien
gagcactctgggcaatctgaaacac

SEQ ID NO: 4055737 - DNA, 25 bp, Homo sapien
ttccaggcgtggctctagaccttgc

SEQ ID NO: 4055738 - DNA, 25 bp, Homo sapien
cacgtgccaggagggtaagcttttg

SEQ ID NO: 4055739 - DNA, 25 bp, Homo sapien
catgaatttcacttgcacgttggac

SEQ ID NO: 4055740 - DNA, 25 bp, Homo sapien
aaatgggctggatttcgaagatccg

SEQ ID NO: 4055741 - DNA, 25 bp, Homo sapien
tctttggctttaattcagcgcgtag

SEQ ID NO: 4055742 - DNA, 25 bp, Homo sapien
tcttaagtacttcggcatgtgtttc

SEQ ID NO: 4055743 - DNA, 25 bp, Homo sapien
tgtcaacaggcttttggctctggac

SEQ ID NO: 4055744 - DNA, 25 bp, Homo sapien
cttgtcaacaggcttttggctctgg

SEQ ID NO: 4055745 - DNA, 25 bp, Homo sapien
tcaacaggcttttggctctggacga

SEQ ID NO: 4055746 - DNA, 25 bp, Homo sapien
aacaggcttttggctctggacgaac

SEQ ID NO: 4055747 - DNA, 25 bp, Homo sapien
caaagtccacttttccacgagagag

SEQ ID NO: 4055748 - DNA, 25 bp, Homo sapien
catggttggaatggtcaccttggct

SEQ ID NO: 4055749 - DNA, 25 bp, Homo sapien
atgtgaactgttggccctccaacca

SEQ ID NO: 4055750 - DNA, 25 bp, Homo sapien
gacttggagatgattggaaagctga

SEQ ID NO: 4055751 - DNA, 25 bp, Homo sapien
gattggccccctgtgggtcaaatct

SEQ ID NO: 4055752 - DNA, 25 bp, Homo sapien
ttccgtttcacaatgaggtagattc

SEQ ID NO: 4055753 - DNA, 25 bp, Homo sapien
cttccaacaggaagattggccccct

SEQ ID NO: 4055754 - DNA, 25 bp, Homo sapien
gattctttacacgatctagctcagt

SEQ ID NO: 4055755 - DNA, 25 bp, Homo sapien
gaaggacacgcttgtctgcatggaa

SEQ ID NO: 4055756 - DNA, 25 bp, Homo sapien
tctcatgaaggacacgcttgtctgc

SEQ ID NO: 4055757 - DNA, 25 bp, Homo sapien
tcatgaaggacacgcttgtctgcat

SEQ ID NO: 4055758 - DNA, 25 bp, Homo sapien
ctgtctcatgaaggacacgcttgtc

SEQ ID NO: 4055759 - DNA, 25 bp, Homo sapien
tgggttcggacttcgccaaggatga

SEQ ID NO: 4055760 - DNA, 25 bp, Homo sapien
gatgatgtagccaaagtccaggatg

SEQ ID NO: 4055761 - DNA, 25 bp, Homo sapien
gacttcgccaaggatgatgtagcca

SEQ ID NO: 4055762 - DNA, 25 bp, Homo sapien
tgatcttgatgatgtgggttcggac

SEQ ID NO: 4055763 - DNA, 25 bp, Homo sapien
gctttggactataagtctttctacc

SEQ ID NO: 4055764 - DNA, 25 bp, Homo sapien
tgttctaggacatagctttggacta

SEQ ID NO: 4055765 - DNA, 25 bp, Homo sapien
tgcggcgactccgatggctgaagca

SEQ ID NO: 4055766 - DNA, 25 bp, Homo sapien
gctgaagcaggggtcatccatagga

SEQ ID NO: 4055767 - DNA, 25 bp, Homo sapien
tgtttttcctggcttgattcaagaa

SEQ ID NO: 4055768 - DNA, 25 bp, Homo sapien
tattatgtcaaagtgatcgagcatt

SEQ ID NO: 4055769 - DNA, 25 bp, Homo sapien
cacatttgttatactctttgtctgt

SEQ ID NO: 4055770 - DNA, 25 bp, Homo sapien
ggcttgattcaagaacatttcatac

SEQ ID NO: 4055771 - DNA, 25 bp, Homo sapien
tatgaatgatgtcgcaaacacagac

SEQ ID NO: 4055772 - DNA, 25 bp, Homo sapien
aaaatatgaatgatgtcgcaaacac

SEQ ID NO: 4055773 - DNA, 25 bp, Homo sapien
atgtcgcaaacacagaccctcagct

SEQ ID NO: 4055774 - DNA, 25 bp, Homo sapien
aatgatgtcgcaaacacagaccctc

SEQ ID NO: 4055775 - DNA, 25 bp, Homo sapien
ttttggatactttgtctgccccgct

SEQ ID NO: 4055776 - DNA, 25 bp, Homo sapien
ggatactttgtctgccccgctttcc

SEQ ID NO: 4055777 - DNA, 25 bp, Homo sapien
tttggatactttgtctgccccgctt

SEQ ID NO: 4055778 - DNA, 25 bp, Homo sapien
acttttggatactttgtctgccccg

SEQ ID NO: 4055779 - DNA, 25 bp, Homo sapien
cagtggcatctaggagaatgtcaca

SEQ ID NO: 4055780 - DNA, 25 bp, Homo sapien
cttcccagtggcatctaggagaatg

SEQ ID NO: 4055781 - DNA, 25 bp, Homo sapien
ggcatctaggagaatgtcacaggga

SEQ ID NO: 4055782 - DNA, 25 bp, Homo sapien
cccagtggcatctaggagaatgtca

SEQ ID NO: 4055783 - DNA, 25 bp, Homo sapien
ggcgatctgtatctggaaactcctt

SEQ ID NO: 4055784 - DNA, 25 bp, Homo sapien
aaacttttaatacctgctcttgatg

SEQ ID NO: 4055785 - DNA, 25 bp, Homo sapien
tccgctcagagtgatattttctggg

SEQ ID NO: 4055786 - DNA, 25 bp, Homo sapien
gctcttgatgtgaactgataaagcc

SEQ ID NO: 4055787 - DNA, 25 bp, Homo sapien
tgaaaccagtttggctcagcgcagt

SEQ ID NO: 4055788 - DNA, 25 bp, Homo sapien
tacaagggcagcgtgaagacatcgg

SEQ ID NO: 4055789 - DNA, 25 bp, Homo sapien
aaaaatccatgggttgcatctgtct

SEQ ID NO: 4055790 - DNA, 25 bp, Homo sapien
gagaggaagccctcgggaattacaa

SEQ ID NO: 4055791 - DNA, 25 bp, Homo sapien
cacacttgtaatcctggtcgtgaat

SEQ ID NO: 4055792 - DNA, 25 bp, Homo sapien
tgtaatcctggtcgtgaatactcac

SEQ ID NO: 4055793 - DNA, 25 bp, Homo sapien
cacttgtaatcctggtcgtgaatac

SEQ ID NO: 4055794 - DNA, 25 bp, Homo sapien
cttgtaatcctggtcgtgaatactc

SEQ ID NO: 4055795 - DNA, 25 bp, Homo sapien
tgcttcggagtggggctcgtaggtt

SEQ ID NO: 4055796 - DNA, 25 bp, Homo sapien
cggagtggggctcgtaggtttgaat

SEQ ID NO: 4055797 - DNA, 25 bp, Homo sapien
agtggggctcgtaggtttgaattcg

SEQ ID NO: 4055798 - DNA, 25 bp, Homo sapien
ttcggagtggggctcgtaggtttga

SEQ ID NO: 4055799 - DNA, 25 bp, Homo sapien
ttcgtcagcgtgatttccctctctg

SEQ ID NO: 4055800 - DNA, 25 bp, Homo sapien
ggtcagtcagaaccttgaactcaaa

SEQ ID NO: 4055801 - DNA, 25 bp, Homo sapien
tgtctggagaagactggtggtcagt

SEQ ID NO: 4055802 - DNA, 25 bp, Homo sapien
caactttccccatgttcgtcagcgt

SEQ ID NO: 4055803 - DNA, 25 bp, Homo sapien
tgaacgatatttggtggctactgtg

SEQ ID NO: 4055804 - DNA, 25 bp, Homo sapien
cttgtgcaatgatgttagcgtgtcc

SEQ ID NO: 4055805 - DNA, 25 bp, Homo sapien
caaaggaatagttgaccagggacgc

SEQ ID NO: 4055806 - DNA, 25 bp, Homo sapien
tagcgtgtccatagaaggtgaacga

SEQ ID NO: 4055807 - DNA, 25 bp, Homo sapien
attctgttcacaggtctgtagggat

SEQ ID NO: 4055808 - DNA, 25 bp, Homo sapien
gttcacaggtctgtagggattcctg

SEQ ID NO: 4055809 - DNA, 25 bp, Homo sapien
ctggctctggcttgagtatattctt

SEQ ID NO: 4055810 - DNA, 25 bp, Homo sapien
tctttctatttcagtagagctaatt

SEQ ID NO: 4055811 - DNA, 25 bp, Homo sapien
gcctaccctccccatggaaaggaca

SEQ ID NO: 4055812 - DNA, 25 bp, Homo sapien
tgcctaccctccccatggaaaggac

SEQ ID NO: 4055813 - DNA, 25 bp, Homo sapien
ctgcctaccctccccatggaaagga

SEQ ID NO: 4055814 - DNA, 25 bp, Homo sapien
aggcctggcatcttcatccacaagg

SEQ ID NO: 4055815 - DNA, 25 bp, Homo sapien
atcacactggaagctttcgtttttc

SEQ ID NO: 4055816 - DNA, 25 bp, Homo sapien
tcacactggaagctttcgtttttct

SEQ ID NO: 4055817 - DNA, 25 bp, Homo sapien
tgaggttgctgggatggactccatc

SEQ ID NO: 4055818 - DNA, 25 bp, Homo sapien
tactgtaactaggattgctggtggg

SEQ ID NO: 4055819 - DNA, 25 bp, Homo sapien
ttaaatccatctcgggggactctac

SEQ ID NO: 4055820 - DNA, 25 bp, Homo sapien
tgtagggcttcttcggcaatgtcac

SEQ ID NO: 4055821 - DNA, 25 bp, Homo sapien
aatatggtgtctaatccagtgcctg

SEQ ID NO: 4055822 - DNA, 25 bp, Homo sapien
tgttagatgtggactcgctgaggac

SEQ ID NO: 4055823 - DNA, 25 bp, Homo sapien
cacttatttttaccatccctgttag

SEQ ID NO: 4055824 - DNA, 25 bp, Homo sapien
tgagtgtccatagccccctgggctt

SEQ ID NO: 4055825 - DNA, 25 bp, Homo sapien
tcaacctgggataaagagtggcgat

SEQ ID NO: 4055826 - DNA, 25 bp, Homo sapien
gaccagatgtctctagctgacttta

SEQ ID NO: 4055827 - DNA, 25 bp, Homo sapien
tctgcaccttgtctgtcaacctggg

SEQ ID NO: 4055828 - DNA, 25 bp, Homo sapien
catggagaattcacagagtatggaa

SEQ ID NO: 4055829 - DNA, 25 bp, Homo sapien
tggctgaaaccactccattaggggc

SEQ ID NO: 4055830 - DNA, 25 bp, Homo sapien
ctgaaaccactccattaggggcaga

SEQ ID NO: 4055831 - DNA, 25 bp, Homo sapien
ctggctgaaaccactccattagggg

SEQ ID NO: 4055832 - DNA, 25 bp, Homo sapien
ggctgaaaccactccattaggggca

SEQ ID NO: 4055833 - DNA, 25 bp, Homo sapien
attgaatctctggaagtctgatgcc

SEQ ID NO: 4055834 - DNA, 25 bp, Homo sapien
cactgatactggaaacatcgggaaa

SEQ ID NO: 4055835 - DNA, 25 bp, Homo sapien
aatctctggaagtctgatgccctcc

SEQ ID NO: 4055836 - DNA, 25 bp, Homo sapien
gatactggaaacatcgggaaaatgc

SEQ ID NO: 4055837 - DNA, 25 bp, Homo sapien
tcatgcctgtaagcaatcccagaac

SEQ ID NO: 4055838 - DNA, 25 bp, Homo sapien
acctgaagtcagcagtttgagacca

SEQ ID NO: 4055839 - DNA, 25 bp, Homo sapien
tttgggaggctgaggtgggtggatc

SEQ ID NO: 4055840 - DNA, 25 bp, Homo sapien
cagaaatgcaattgaggttgggtgt

SEQ ID NO: 4055841 - DNA, 25 bp, Homo sapien
caggtgcccttatatgagggaggca

SEQ ID NO: 4055842 - DNA, 25 bp, Homo sapien
gacagcctcaagatgtccatgtttg

SEQ ID NO: 4055843 - DNA, 25 bp, Homo sapien
gagtcagcccagtgatctaaccaca

SEQ ID NO: 4055844 - DNA, 25 bp, Homo sapien
tgaataggttggataagggacagcc

SEQ ID NO: 4055845 - DNA, 25 bp, Homo sapien
tcctagctcagacacagtagggaga

SEQ ID NO: 4055846 - DNA, 25 bp, Homo sapien
ctgtccataccttggttctggccca

SEQ ID NO: 4055847 - DNA, 25 bp, Homo sapien
tgtggtgacctgttacagcagccac

SEQ ID NO: 4055848 - DNA, 25 bp, Homo sapien
ttccaatacccccagcttgtggtga

SEQ ID NO: 4055849 - DNA, 25 bp, Homo sapien
tctaatggtcttatcactagactca

SEQ ID NO: 4055850 - DNA, 25 bp, Homo sapien
cactagactcaaaattaaagtgggc

SEQ ID NO: 4055851 - DNA, 25 bp, Homo sapien
tggtgattgggactttcaaagatgt

SEQ ID NO: 4055852 - DNA, 25 bp, Homo sapien
tattgctttgttaattcggtggtga

SEQ ID NO: 4055853 - DNA, 25 bp, Homo sapien
ggaaatcgaggatggatcgtgattt

SEQ ID NO: 4055854 - DNA, 25 bp, Homo sapien
gatggatcgtgattttaagctcctt

SEQ ID NO: 4055855 - DNA, 25 bp, Homo sapien
tgttaattctgtcaataattagtgg

SEQ ID NO: 4055856 - DNA, 25 bp, Homo sapien
taagctccttgttaattctgtcaat

SEQ ID NO: 4055857 - DNA, 25 bp, Homo sapien
tggaatacagaaaaccccatgaaaa

SEQ ID NO: 4055858 - DNA, 25 bp, Homo sapien
catgaatggccagtacatggaatac

SEQ ID NO: 4055859 - DNA, 25 bp, Homo sapien
gtacatggaatacagaaaaccccat

SEQ ID NO: 4055860 - DNA, 25 bp, Homo sapien
aaatattcatgaatggccagtacat

SEQ ID NO: 4055861 - DNA, 25 bp, Homo sapien
agagttctgtgagagttctgtgctg

SEQ ID NO: 4055862 - DNA, 25 bp, Homo sapien
tgaaaagcagagttctgtgagagtt

SEQ ID NO: 4055863 - DNA, 25 bp, Homo sapien
gaaaagcagagttctgtgagagttc

SEQ ID NO: 4055864 - DNA, 25 bp, Homo sapien
aaagcagagttctgtgagagttctg

SEQ ID NO: 4055865 - DNA, 25 bp, Homo sapien
gggtaatgcacttctccgcgcaggt

SEQ ID NO: 4055866 - DNA, 25 bp, Homo sapien
caggtccaggctgtctatctgaggg

SEQ ID NO: 4055867 - DNA, 25 bp, Homo sapien
cagtatcgttcaggatgcagccaaa

SEQ ID NO: 4055868 - DNA, 25 bp, Homo sapien
gcgaaacttcacaaccaacggactg

SEQ ID NO: 4055869 - DNA, 25 bp, Homo sapien
ttttcttcatcaatttccagtttaa

SEQ ID NO: 4055870 - DNA, 25 bp, Homo sapien
cttcatcaatttccagtttaatagg

SEQ ID NO: 4055871 - DNA, 25 bp, Homo sapien
ttcttcatcaatttccagtttaata

SEQ ID NO: 4055872 - DNA, 25 bp, Homo sapien
cttgatcagcaggtttttttcttca

SEQ ID NO: 4055873 - DNA, 25 bp, Homo sapien
ttgccagaacagacccctattaagg

SEQ ID NO: 4055874 - DNA, 25 bp, Homo sapien
tgggcaaaatactgggcctcagttt

SEQ ID NO: 4055875 - DNA, 25 bp, Homo sapien
ctctggagccagagtagttaggtcc

SEQ ID NO: 4055876 - DNA, 25 bp, Homo sapien
ttcctaagattaaaggctctggagc

SEQ ID NO: 4055877 - DNA, 25 bp, Homo sapien
gagttgccggcagcagggatttatc

SEQ ID NO: 4055878 - DNA, 25 bp, Homo sapien
agatgttgacagcaacaagttcacg

SEQ ID NO: 4055879 - DNA, 25 bp, Homo sapien
cagcagggatttatcagtctcacat

SEQ ID NO: 4055880 - DNA, 25 bp, Homo sapien
gacagcaacaagttcacgggcaggg

SEQ ID NO: 4055881 - DNA, 25 bp, Homo sapien
gtaatcaggtttcaggatactgtta

SEQ ID NO: 4055882 - DNA, 25 bp, Homo sapien
ctggtaatcaggtttcaggatactg

SEQ ID NO: 4055883 - DNA, 25 bp, Homo sapien
aatcaggtttcaggatactgttagg

SEQ ID NO: 4055884 - DNA, 25 bp, Homo sapien
tcaggtttcaggatactgttaggtt

SEQ ID NO: 4055885 - DNA, 25 bp, Homo sapien
gaatctcgagttgagagtttctggc

SEQ ID NO: 4055886 - DNA, 25 bp, Homo sapien
aaagagggttctttagtatcatcag

SEQ ID NO: 4055887 - DNA, 25 bp, Homo sapien
ctagaaagagggttctttagtatca

SEQ ID NO: 4055888 - DNA, 25 bp, Homo sapien
aaggcatcagaaatgaatctcgagt

SEQ ID NO: 4055889 - DNA, 25 bp, Homo sapien
tctaatatggggtagcatggaagcg

SEQ ID NO: 4055890 - DNA, 25 bp, Homo sapien
tccctccctctaatatggggtagca

SEQ ID NO: 4055891 - DNA, 25 bp, Homo sapien
tccctctaatatggggtagcatgga

SEQ ID NO: 4055892 - DNA, 25 bp, Homo sapien
tggggtagcatggaagcggactcac

SEQ ID NO: 4055893 - DNA, 25 bp, Homo sapien
gaagcagtactctgggccctactaa

SEQ ID NO: 4055894 - DNA, 25 bp, Homo sapien
aagcagtactctgggccctactaag

SEQ ID NO: 4055895 - DNA, 25 bp, Homo sapien
ctctgggccctactaaggctgcatg

SEQ ID NO: 4055896 - DNA, 25 bp, Homo sapien
gtactctgggccctactaaggctgc

SEQ ID NO: 4055897 - DNA, 25 bp, Homo sapien
gttttggcaagaggccatttagagg

SEQ ID NO: 4055898 - DNA, 25 bp, Homo sapien
cagatggctttgaagtacagaagcc

SEQ ID NO: 4055899 - DNA, 25 bp, Homo sapien
agatggctttgaagtacagaagcca

SEQ ID NO: 4055900 - DNA, 25 bp, Homo sapien
gagttgttcgtctctccaaatatca

SEQ ID NO: 4055901 - DNA, 25 bp, Homo sapien
tcatgaagaaaagtggctgctagtt

SEQ ID NO: 4055902 - DNA, 25 bp, Homo sapien
gctgctagtttcaattgaccttttc

SEQ ID NO: 4055903 - DNA, 25 bp, Homo sapien
tactgatgagaaggagtcaagcaca

SEQ ID NO: 4055904 - DNA, 25 bp, Homo sapien
ctggatgagaggtgcgacgaactca

SEQ ID NO: 4055905 - DNA, 25 bp, Homo sapien
tctgtgccccgatgatggcgtggca

SEQ ID NO: 4055906 - DNA, 25 bp, Homo sapien
tccagtcggtagatgagctgcttgg

SEQ ID NO: 4055907 - DNA, 25 bp, Homo sapien
aactcacaggtgatgttcacagcca

SEQ ID NO: 4055908 - DNA, 25 bp, Homo sapien
gattgggttcacagtagctacagaa

SEQ ID NO: 4055909 - DNA, 25 bp, Homo sapien
ggcagcccagagtgtcgatataaac

SEQ ID NO: 4055910 - DNA, 25 bp, Homo sapien
ggatgtcccaatacctgaataggag

SEQ ID NO: 4055911 - DNA, 25 bp, Homo sapien
ggaccctgggcatgagaacctcctt

SEQ ID NO: 4055912 - DNA, 25 bp, Homo sapien
gagtatcacatcaattgcctggcct

SEQ ID NO: 4055913 - DNA, 25 bp, Homo sapien
tagcagaatagccttcgagtatcac

SEQ ID NO: 4055914 - DNA, 25 bp, Homo sapien
gaacaactgttggatccgacgtccc

SEQ ID NO: 4055915 - DNA, 25 bp, Homo sapien
gggtcggaagctatcattcatccag

SEQ ID NO: 4055916 - DNA, 25 bp, Homo sapien
taacacagcgttggcatcaccaggt

SEQ ID NO: 4055917 - DNA, 25 bp, Homo sapien
gactgagtggaatgtcccataacaa

SEQ ID NO: 4055918 - DNA, 25 bp, Homo sapien
atgggccagaacaccaccgggattg

SEQ ID NO: 4055919 - DNA, 25 bp, Homo sapien
cacagttcatgtgaaaagcaatccc

SEQ ID NO: 4055920 - DNA, 25 bp, Homo sapien
tatgtgatatctataaaaactggtc

SEQ ID NO: 4055921 - DNA, 25 bp, Homo sapien
aaccatattcttctcggatgtagag

SEQ ID NO: 4055922 - DNA, 25 bp, Homo sapien
ggacacggattagagaatgcaacca

SEQ ID NO: 4055923 - DNA, 25 bp, Homo sapien
caagttatggctagaaaatgtcttc

SEQ ID NO: 4055924 - DNA, 25 bp, Homo sapien
tgtcattcaggttggcggtcagtgc

SEQ ID NO: 4055925 - DNA, 25 bp, Homo sapien
gaacaggaatccgataggtactgct

SEQ ID NO: 4055926 - DNA, 25 bp, Homo sapien
ggcttatctgaaacaatagtggaac

SEQ ID NO: 4055927 - DNA, 25 bp, Homo sapien
gaaccagttccggaagcctgaacag

SEQ ID NO: 4055928 - DNA, 25 bp, Homo sapien
cattgggttcaatcgtccaaaggga

SEQ ID NO: 4055929 - DNA, 25 bp, Homo sapien
gccttcattgggttcaatcgtccaa

SEQ ID NO: 4055930 - DNA, 25 bp, Homo sapien
attgggttcaatcgtccaaagggat

SEQ ID NO: 4055931 - DNA, 25 bp, Homo sapien
ttcattgggttcaatcgtccaaagg

SEQ ID NO: 4055932 - DNA, 25 bp, Homo sapien
taacacagtagtatttgtatttctc

SEQ ID NO: 4055933 - DNA, 25 bp, Homo sapien
tgtatttctcaacctgtctctgttt

SEQ ID NO: 4055934 - DNA, 25 bp, Homo sapien
gagcgagacagtggagtctactaca

SEQ ID NO: 4055935 - DNA, 25 bp, Homo sapien
ggctgaaaacccgtgcagcatgttt

SEQ ID NO: 4055936 - DNA, 25 bp, Homo sapien
atcctttgcttttagggagggcttg

SEQ ID NO: 4055937 - DNA, 25 bp, Homo sapien
tggtggttgacttttagggctatcc

SEQ ID NO: 4055938 - DNA, 25 bp, Homo sapien
acgagtcagcctcgaaactactcta

SEQ ID NO: 4055939 - DNA, 25 bp, Homo sapien
gaaactactctatcatccttgtgtc

SEQ ID NO: 4055940 - DNA, 25 bp, Homo sapien
ttcataagacttagggccccactgc

SEQ ID NO: 4055941 - DNA, 25 bp, Homo sapien
gagcttctggtctggaggatctact

SEQ ID NO: 4055942 - DNA, 25 bp, Homo sapien
tcttcataagacttagggccccact

SEQ ID NO: 4055943 - DNA, 25 bp, Homo sapien
tctggaggatctactcccaaatctt

SEQ ID NO: 4055944 - DNA, 25 bp, Homo sapien
aatactattattactggtatcactg

SEQ ID NO: 4055945 - DNA, 25 bp, Homo sapien
atcctctttggcactaaacgggtca

SEQ ID NO: 4055946 - DNA, 25 bp, Homo sapien
taaacgggtcacttcagatggctca

SEQ ID NO: 4055947 - DNA, 25 bp, Homo sapien
gtcacttcagatggctcaggaagaa

SEQ ID NO: 4055948 - DNA, 25 bp, Homo sapien
ctatggaggtaggcttcggcttccc

SEQ ID NO: 4055949 - DNA, 25 bp, Homo sapien
cacatgaggctgagtgtgacagatg

SEQ ID NO: 4055950 - DNA, 25 bp, Homo sapien
gatggctgacggtgagtgccacatc

SEQ ID NO: 4055951 - DNA, 25 bp, Homo sapien
aacagctgtttcttgcgaagggtaa

SEQ ID NO: 4055952 - DNA, 25 bp, Homo sapien
aatctaatcacagtggtgctgtgct

SEQ ID NO: 4055953 - DNA, 25 bp, Homo sapien
agacatcctcacaaactaccttaaa

SEQ ID NO: 4055954 - DNA, 25 bp, Homo sapien
taggacgtagatattcccgaagtcc

SEQ ID NO: 4055955 - DNA, 25 bp, Homo sapien
aaaaatgcgggaatgaaggactggt

SEQ ID NO: 4055956 - DNA, 25 bp, Homo sapien
ggatggacgtagataactgggcctt

SEQ ID NO: 4055957 - DNA, 25 bp, Homo sapien
gactggttgcataggttgagaatcc

SEQ ID NO: 4055958 - DNA, 25 bp, Homo sapien
accgtggatctgtgttctccagtga

SEQ ID NO: 4055959 - DNA, 25 bp, Homo sapien
ggctcccaaagattgagatgtaaac

SEQ ID NO: 4055960 - DNA, 25 bp, Homo sapien
gatgtaaaccgtggatctgtgttct

SEQ ID NO: 4055961 - DNA, 25 bp, Homo sapien
ccaggaccagtggtatgtggatggt

SEQ ID NO: 4055962 - DNA, 25 bp, Homo sapien
gaaaacagcacagtaggcacctcct

SEQ ID NO: 4055963 - DNA, 25 bp, Homo sapien
tggaaaacagcacagtaggcacctc

SEQ ID NO: 4055964 - DNA, 25 bp, Homo sapien
ctggaaaacagcacagtaggcacct

SEQ ID NO: 4055965 - DNA, 25 bp, Homo sapien
aaacagcacagtaggcacctcctca

SEQ ID NO: 4055966 - DNA, 25 bp, Homo sapien
tgtgctccatcaatagaggctgctg

SEQ ID NO: 4055967 - DNA, 25 bp, Homo sapien
gcatctcccgctgacaacttcttag

SEQ ID NO: 4055968 - DNA, 25 bp, Homo sapien
tctcttcctcaagggccctagggtg

SEQ ID NO: 4055969 - DNA, 25 bp, Homo sapien
gcgtgaggcccaaaattcaaagtgc

SEQ ID NO: 4055970 - DNA, 25 bp, Homo sapien
cctgggaggtcatcttgattggcaa

SEQ ID NO: 4055971 - DNA, 25 bp, Homo sapien
ggctggacctcatagaatcctggga

SEQ ID NO: 4055972 - DNA, 25 bp, Homo sapien
caagctggagtgttttctcatacgg

SEQ ID NO: 4055973 - DNA, 25 bp, Homo sapien
tctcatacgggtacttcaggaagca

SEQ ID NO: 4055974 - DNA, 25 bp, Homo sapien
ggcaaatctgggcatagaaaggacc

SEQ ID NO: 4055975 - DNA, 25 bp, Homo sapien
gactgtagcttggtcaaaaggacac

SEQ ID NO: 4055976 - DNA, 25 bp, Homo sapien
tactaagtaggtcacagtgggaacc

SEQ ID NO: 4055977 - DNA, 25 bp, Homo sapien
ccaagcccaagacacgtgaaatagt

SEQ ID NO: 4055978 - DNA, 25 bp, Homo sapien
gacctcttggctctatggatcttcc

SEQ ID NO: 4055979 - DNA, 25 bp, Homo sapien
tcaccttcctattgcataactctgg

SEQ ID NO: 4055980 - DNA, 25 bp, Homo sapien
gggcccactcctagcctgaaattca

SEQ ID NO: 4055981 - DNA, 25 bp, Homo sapien
tcaagtcacagcaacagtgtcccgg

SEQ ID NO: 4055982 - DNA, 25 bp, Homo sapien
gctgctttgtcatttgaatgtcaga

SEQ ID NO: 4055983 - DNA, 25 bp, Homo sapien
caaactcagtgtgcttgggttggca

SEQ ID NO: 4055984 - DNA, 25 bp, Homo sapien
taaaaatgagcagctcttcacctct

SEQ ID NO: 4055985 - DNA, 25 bp, Homo sapien
tcaaacccgttagagagggtctgac

SEQ ID NO: 4055986 - DNA, 25 bp, Homo sapien
agaagagcaagctggggagcaatac

SEQ ID NO: 4055987 - DNA, 25 bp, Homo sapien
cgggggcgactcaggagaagagcaa

SEQ ID NO: 4055988 - DNA, 25 bp, Homo sapien
gctcgggggcgactcaggagaagag

SEQ ID NO: 4055989 - DNA, 25 bp, Homo sapien
aggagaagagcaagctggggagcaa

SEQ ID NO: 4055990 - DNA, 25 bp, Homo sapien
ctgtaattaagagcgccagcacctc

SEQ ID NO: 4055991 - DNA, 25 bp, Homo sapien
gtccaccacgagtgccagctcgtat

SEQ ID NO: 4055992 - DNA, 25 bp, Homo sapien
gcacagtgttggagcataatgtcac

SEQ ID NO: 4055993 - DNA, 25 bp, Homo sapien
gagtgccagctcgtatttctgcaca

SEQ ID NO: 4055994 - DNA, 25 bp, Homo sapien
cctgatagcagcaaatccctggggg

SEQ ID NO: 4055995 - DNA, 25 bp, Homo sapien
cagcaaatccctgggggcgaatggt

SEQ ID NO: 4055996 - DNA, 25 bp, Homo sapien
atccctgggggcgaatggtgccaca

SEQ ID NO: 4055997 - DNA, 25 bp, Homo sapien
gcgaatggtgccacagtcaggagag

SEQ ID NO: 4055998 - DNA, 25 bp, Homo sapien
gaacatatcaaggtatgaggaaacc

SEQ ID NO: 4055999 - DNA, 25 bp, Homo sapien
catccccagggatacgcagtttgta

SEQ ID NO: 4056000 - DNA, 25 bp, Homo sapien
ggtcttttgtagtccacatgctgct

SEQ ID NO: 4056001 - DNA, 25 bp, Homo sapien
tgaaatgcttttatggccaaggcca

SEQ ID NO: 4056002 - DNA, 25 bp, Homo sapien
ttagacgatctgtgaatgtggagcg

SEQ ID NO: 4056003 - DNA, 25 bp, Homo sapien
taaagagtcacgtggtcttccaaac

SEQ ID NO: 4056004 - DNA, 25 bp, Homo sapien
gctacatgtgactttcctggactta

SEQ ID NO: 4056005 - DNA, 25 bp, Homo sapien
ggaaactgtagatggcttagcctta

SEQ ID NO: 4056006 - DNA, 25 bp, Homo sapien
gatcgccttagatttcctgttggca

SEQ ID NO: 4056007 - DNA, 25 bp, Homo sapien
tgttggcaagcccaaaagggatgtt

SEQ ID NO: 4056008 - DNA, 25 bp, Homo sapien
gttttgaaaaccagatcgccttaga

SEQ ID NO: 4056009 - DNA, 25 bp, Homo sapien
cccaaaagggatgttattgctgaca

SEQ ID NO: 4056010 - DNA, 25 bp, Homo sapien
tacttgaggatctctcagttcctgt

SEQ ID NO: 4056011 - DNA, 25 bp, Homo sapien
aaagggaatcagtacttgaggatct

SEQ ID NO: 4056012 - DNA, 25 bp, Homo sapien
gctgaaagggaatcagtacttgagg

SEQ ID NO: 4056013 - DNA, 25 bp, Homo sapien
aatcagtacttgaggatctctcagt

SEQ ID NO: 4056014 - DNA, 25 bp, Homo sapien
tgtgctcagtagcttcatgggggaa

SEQ ID NO: 4056015 - DNA, 25 bp, Homo sapien
tcagtgtgctcagtagcttcatggg

SEQ ID NO: 4056016 - DNA, 25 bp, Homo sapien
acatctcagtgtgctcagtagcttc

SEQ ID NO: 4056017 - DNA, 25 bp, Homo sapien
gctcagtagcttcatgggggaagca

SEQ ID NO: 4056018 - DNA, 25 bp, Homo sapien
ttaaaatggaaggtaggtccaatga

SEQ ID NO: 4056019 - DNA, 25 bp, Homo sapien
ggaaggtaggtccaatgacacagcc

SEQ ID NO: 4056020 - DNA, 25 bp, Homo sapien
gaaggtaggtccaatgacacagcct

SEQ ID NO: 4056021 - DNA, 25 bp, Homo sapien
gattggtgccttagtgatacttccg

SEQ ID NO: 4056022 - DNA, 25 bp, Homo sapien
tctccatgatccatgtaaagacatg

SEQ ID NO: 4056023 - DNA, 25 bp, Homo sapien
gatacttccggttgcttcagctctg

SEQ ID NO: 4056024 - DNA, 25 bp, Homo sapien
gactataatgtgatgagaggttgtt

SEQ ID NO: 4056025 - DNA, 25 bp, Homo sapien
tgacccattgacattgaccaggaac

SEQ ID NO: 4056026 - DNA, 25 bp, Homo sapien
catgttgaagagagcatcgatgctg

SEQ ID NO: 4056027 - DNA, 25 bp, Homo sapien
caatgatgccttccttgggactgaa

SEQ ID NO: 4056028 - DNA, 25 bp, Homo sapien
gagatctggatagcttggactccac

SEQ ID NO: 4056029 - DNA, 25 bp, Homo sapien
agagagcttggtaactaagggaatg

SEQ ID NO: 4056030 - DNA, 25 bp, Homo sapien
agagaagagagcttggtaactaagg

SEQ ID NO: 4056031 - DNA, 25 bp, Homo sapien
gaagagagcttggtaactaagggaa

SEQ ID NO: 4056032 - DNA, 25 bp, Homo sapien
agaagagagcttggtaactaaggga

SEQ ID NO: 4056033 - DNA, 25 bp, Homo sapien
ctccaaactgtccaatctgatgcat

SEQ ID NO: 4056034 - DNA, 25 bp, Homo sapien
cgtgtccttctctgccactgcacag

SEQ ID NO: 4056035 - DNA, 25 bp, Homo sapien
gctctccaaactgtccaatctgatg

SEQ ID NO: 4056036 - DNA, 25 bp, Homo sapien
tgcacagctctccaaactgtccaat

SEQ ID NO: 4056037 - DNA, 25 bp, Homo sapien
caatgtgcagatccagtgaaaactt

SEQ ID NO: 4056038 - DNA, 25 bp, Homo sapien
caaagttgaagtgaatcttaggtcc

SEQ ID NO: 4056039 - DNA, 25 bp, Homo sapien
tgaatcttaggtcccatgccttccc

SEQ ID NO: 4056040 - DNA, 25 bp, Homo sapien
ccaatatccagcaattcaaagttga

SEQ ID NO: 4056041 - DNA, 25 bp, Homo sapien
tacagtatctttacatgctacaaac

SEQ ID NO: 4056042 - DNA, 25 bp, Homo sapien
tgctacaaaccaatacacccattta

SEQ ID NO: 4056043 - DNA, 25 bp, Homo sapien
gttacaagaatggaatatgggttgc

SEQ ID NO: 4056044 - DNA, 25 bp, Homo sapien
tattaaatgccttgtgttatacagg

SEQ ID NO: 4056045 - DNA, 25 bp, Homo sapien
gagctaaaacagctggaaatccaca

SEQ ID NO: 4056046 - DNA, 25 bp, Homo sapien
cacatgagatctatggcaggctgaa

SEQ ID NO: 4056047 - DNA, 25 bp, Homo sapien
gggaccaggactgtcacaacctaga

SEQ ID NO: 4056048 - DNA, 25 bp, Homo sapien
aatcttggattaagaagccccacag

SEQ ID NO: 4056049 - DNA, 25 bp, Homo sapien
gaagatgcccggaaaccactgtggc

SEQ ID NO: 4056050 - DNA, 25 bp, Homo sapien
caaaatggaagatgcccggaaacca

SEQ ID NO: 4056051 - DNA, 25 bp, Homo sapien
atggaagatgcccggaaaccactgt

SEQ ID NO: 4056052 - DNA, 25 bp, Homo sapien
tccaaaatggaagatgcccggaaac

SEQ ID NO: 4056053 - DNA, 25 bp, Homo sapien
gaaaggtttccagagtaatacaaga

SEQ ID NO: 4056054 - DNA, 25 bp, Homo sapien
cctggaacagttcttcgggatttct

SEQ ID NO: 4056055 - DNA, 25 bp, Homo sapien
caggatcacattctgcacccaatta

SEQ ID NO: 4056056 - DNA, 25 bp, Homo sapien
gtcctttatagcaaagggcccaatc

SEQ ID NO: 4056057 - DNA, 25 bp, Homo sapien
ggattatagccggaagtcaccgtgc

SEQ ID NO: 4056058 - DNA, 25 bp, Homo sapien
gcccggccgtcatgaccttgatatt

SEQ ID NO: 4056059 - DNA, 25 bp, Homo sapien
tatagccggaagtcaccgtgcccgg

SEQ ID NO: 4056060 - DNA, 25 bp, Homo sapien
cgtgcccggccgtcatgaccttgat

SEQ ID NO: 4056061 - DNA, 25 bp, Homo sapien
gctctgggtgcctggtaacctgagt

SEQ ID NO: 4056062 - DNA, 25 bp, Homo sapien
ctgggtgcctggtaacctgagttta

SEQ ID NO: 4056063 - DNA, 25 bp, Homo sapien
tgggtgcctggtaacctgagtttac

SEQ ID NO: 4056064 - DNA, 25 bp, Homo sapien
tctgggtgcctggtaacctgagttt

SEQ ID NO: 4056065 - DNA, 25 bp, Homo sapien
aagtacacggtgatttcagctgatg

SEQ ID NO: 4056066 - DNA, 25 bp, Homo sapien
gatgagttgggccagacatcacctt

SEQ ID NO: 4056067 - DNA, 25 bp, Homo sapien
tagagcttggcttctagtgggttaa

SEQ ID NO: 4056068 - DNA, 25 bp, Homo sapien
aatgtcgcagtaaatggtctgttga

SEQ ID NO: 4056069 - DNA, 25 bp, Homo sapien
taatgtccgtaccaatctacagtcc

SEQ ID NO: 4056070 - DNA, 25 bp, Homo sapien
ttcggttgcttccacagcttggcca

SEQ ID NO: 4056071 - DNA, 25 bp, Homo sapien
cagatgagggattgtgggatcacat

SEQ ID NO: 4056072 - DNA, 25 bp, Homo sapien
agtgtacaagggttcaattccagga

SEQ ID NO: 4056073 - DNA, 25 bp, Homo sapien
tgccccatgctcagtcagaactcag

SEQ ID NO: 4056074 - DNA, 25 bp, Homo sapien
taactatgtaatctgcggcctcttc

SEQ ID NO: 4056075 - DNA, 25 bp, Homo sapien
gggttcctaaggtctgacaaagtca

SEQ ID NO: 4056076 - DNA, 25 bp, Homo sapien
tttttgtaaatagggccaagtgagc

SEQ ID NO: 4056077 - DNA, 25 bp, Homo sapien
ttcatccagaacctcaaaagtcaca

SEQ ID NO: 4056078 - DNA, 25 bp, Homo sapien
catccagaacctcaaaagtcacaca

SEQ ID NO: 4056079 - DNA, 25 bp, Homo sapien
atccagaacctcaaaagtcacacaa

SEQ ID NO: 4056080 - DNA, 25 bp, Homo sapien
tcttcatccagaacctcaaaagtca

SEQ ID NO: 4056081 - DNA, 25 bp, Homo sapien
ttctgtcagaggaagcttcacaaaa

SEQ ID NO: 4056082 - DNA, 25 bp, Homo sapien
aaaggagtattctatcttgatctca

SEQ ID NO: 4056083 - DNA, 25 bp, Homo sapien
aaggagtattctatcttgatctcac

SEQ ID NO: 4056084 - DNA, 25 bp, Homo sapien
cagaggaagcttcacaaaaggagta

SEQ ID NO: 4056085 - DNA, 25 bp, Homo sapien
ggttctccaatacaacagcgaatgt

SEQ ID NO: 4056086 - DNA, 25 bp, Homo sapien
aactgtgtcttgtctagcagggaag

SEQ ID NO: 4056087 - DNA, 25 bp, Homo sapien
taagttatttaatgagccccgagga

SEQ ID NO: 4056088 - DNA, 25 bp, Homo sapien
cacagaggttctatagagcggaggt

SEQ ID NO: 4056089 - DNA, 25 bp, Homo sapien
tccgaaaggatgatcctgataaaca

SEQ ID NO: 4056090 - DNA, 25 bp, Homo sapien
caaggatccgaaaggatgatcctga

SEQ ID NO: 4056091 - DNA, 25 bp, Homo sapien
ctgagcacaaggatccgaaaggatg

SEQ ID NO: 4056092 - DNA, 25 bp, Homo sapien
aaaggatgatcctgataaacaaagg

SEQ ID NO: 4056093 - DNA, 25 bp, Homo sapien
gagaagctgtgacttgtcaaggcca

SEQ ID NO: 4056094 - DNA, 25 bp, Homo sapien
gaagctgtgacttgtcaaggccagt

SEQ ID NO: 4056095 - DNA, 25 bp, Homo sapien
tggagaagctgtgacttgtcaaggc

SEQ ID NO: 4056096 - DNA, 25 bp, Homo sapien
tgatggagaagctgtgacttgtcaa

SEQ ID NO: 4056097 - DNA, 25 bp, Homo sapien
tccacagaacatggaccccagtgga

SEQ ID NO: 4056098 - DNA, 25 bp, Homo sapien
gtctgtgtccacattccacagaaca

SEQ ID NO: 4056099 - DNA, 25 bp, Homo sapien
acagaacatggaccccagtggatgc

SEQ ID NO: 4056100 - DNA, 25 bp, Homo sapien
attccacagaacatggaccccagtg

SEQ ID NO: 4056101 - DNA, 25 bp, Homo sapien
ggtcacagggaaatgctgcttgcac

SEQ ID NO: 4056102 - DNA, 25 bp, Homo sapien
ttgcaaggaacgcacatgaccaccc

SEQ ID NO: 4056103 - DNA, 25 bp, Homo sapien
tctcttgaaccagtatttcttaagc

SEQ ID NO: 4056104 - DNA, 25 bp, Homo sapien
tccattgcttggagagtcaccttct

SEQ ID NO: 4056105 - DNA, 25 bp, Homo sapien
aaaaagcacccttggcttgcatttg

SEQ ID NO: 4056106 - DNA, 25 bp, Homo sapien
cagtaaaaagcacccttggcttgca

SEQ ID NO: 4056107 - DNA, 25 bp, Homo sapien
atttcaacagtaaaaagcacccttg

SEQ ID NO: 4056108 - DNA, 25 bp, Homo sapien
ttcaacagtaaaaagcacccttggc

SEQ ID NO: 4056109 - DNA, 25 bp, Homo sapien
tgcccaacagagcatatttggcggt

SEQ ID NO: 4056110 - DNA, 25 bp, Homo sapien
cctgatacaggccatgcagtcaatg

SEQ ID NO: 4056111 - DNA, 25 bp, Homo sapien
gaagaactgcataatccctaggaag

SEQ ID NO: 4056112 - DNA, 25 bp, Homo sapien
cctaggaagtggttaacacagtgac

SEQ ID NO: 4056113 - DNA, 25 bp, Homo sapien
tcctctgattcgcaaaggttcggga

SEQ ID NO: 4056114 - DNA, 25 bp, Homo sapien
gggctccacagtgaaaacgttattg

SEQ ID NO: 4056115 - DNA, 25 bp, Homo sapien
cagaacagaaagatgttctcggagt

SEQ ID NO: 4056116 - DNA, 25 bp, Homo sapien
aagaacagcttgctgtctccctgca

SEQ ID NO: 4056117 - DNA, 25 bp, Homo sapien
aaactcatcagtctcatccttctcc

SEQ ID NO: 4056118 - DNA, 25 bp, Homo sapien
ctctttgatcagatcatcacaggcc

SEQ ID NO: 4056119 - DNA, 25 bp, Homo sapien
tcaaaaaactcatcagtctcatcct

SEQ ID NO: 4056120 - DNA, 25 bp, Homo sapien
atccttctcctctttgatcagatca

SEQ ID NO: 4056121 - DNA, 25 bp, Homo sapien
tattgggtacctgtcaaactttgca

SEQ ID NO: 4056122 - DNA, 25 bp, Homo sapien
cactggttgaacagaaatgggaatc

SEQ ID NO: 4056123 - DNA, 25 bp, Homo sapien
cacatagctgaaagatagcctggac

SEQ ID NO: 4056124 - DNA, 25 bp, Homo sapien
cactcataactaccagaagggtcat

SEQ ID NO: 4056125 - DNA, 25 bp, Homo sapien
ggagtatgagaaatgcaatccctgt

SEQ ID NO: 4056126 - DNA, 25 bp, Homo sapien
gagagagggtactggattcttcctc

SEQ ID NO: 4056127 - DNA, 25 bp, Homo sapien
cccatgctgttgaaactccaaaaca

SEQ ID NO: 4056128 - DNA, 25 bp, Homo sapien
tcgaaaacgctggtcttctcccatg

SEQ ID NO: 4056129 - DNA, 25 bp, Homo sapien
acaaattcgaaaacgctggtcttct

SEQ ID NO: 4056130 - DNA, 25 bp, Homo sapien
caagaggtgccaactgaatgctgag

SEQ ID NO: 4056131 - DNA, 25 bp, Homo sapien
caacaagggcttccatagatctcag

SEQ ID NO: 4056132 - DNA, 25 bp, Homo sapien
tgaggagacctttcatcagacagca

SEQ ID NO: 4056133 - DNA, 25 bp, Homo sapien
taaggaggaggtgtatagccacaac

SEQ ID NO: 4056134 - DNA, 25 bp, Homo sapien
ctgcatataggtgatttttgttaca

SEQ ID NO: 4056135 - DNA, 25 bp, Homo sapien
tgcatataggtgatttttgttacag

SEQ ID NO: 4056136 - DNA, 25 bp, Homo sapien
gcatataggtgatttttgttacaga

SEQ ID NO: 4056137 - DNA, 25 bp, Homo sapien
catataggtgatttttgttacagac

SEQ ID NO: 4056138 - DNA, 25 bp, Homo sapien
ctctgtcctcttcttgctgggtagc

SEQ ID NO: 4056139 - DNA, 25 bp, Homo sapien
tgtcctcttcttgctgggtagcaaa

SEQ ID NO: 4056140 - DNA, 25 bp, Homo sapien
cctcttcttgctgggtagcaaatac

SEQ ID NO: 4056141 - DNA, 25 bp, Homo sapien
tctctgtcctcttcttgctgggtag

SEQ ID NO: 4056142 - DNA, 25 bp, Homo sapien
ggtcaaggaattcttatccagcctt

SEQ ID NO: 4056143 - DNA, 25 bp, Homo sapien
gctccatagagagatacaaacacct

SEQ ID NO: 4056144 - DNA, 25 bp, Homo sapien
tgtaggttttctcgatggtcaagga

SEQ ID NO: 4056145 - DNA, 25 bp, Homo sapien
aatggttatagttcgctgattggcc

SEQ ID NO: 4056146 - DNA, 25 bp, Homo sapien
gaaataacatgactctctaaaacaa

SEQ ID NO: 4056147 - DNA, 25 bp, Homo sapien
ctgataaacccctaacaatatagtt

SEQ ID NO: 4056148 - DNA, 25 bp, Homo sapien
gatatcaccaaggatcctatagcaa

SEQ ID NO: 4056149 - DNA, 25 bp, Homo sapien
tgttttgttctgacaagggcattac

SEQ ID NO: 4056150 - DNA, 25 bp, Homo sapien
ttcttaatatgtagaacttttaaca

SEQ ID NO: 4056151 - DNA, 25 bp, Homo sapien
tgtcataacacacgataagtcttcc

SEQ ID NO: 4056152 - DNA, 25 bp, Homo sapien
ctccacttccagttgcatggactct

SEQ ID NO: 4056153 - DNA, 25 bp, Homo sapien
ggactctcccacattaagagttcca

SEQ ID NO: 4056154 - DNA, 25 bp, Homo sapien
actgtgatcgcccacactctgtggc

SEQ ID NO: 4056155 - DNA, 25 bp, Homo sapien
tgtccccatacctgtagcactgatc

SEQ ID NO: 4056156 - DNA, 25 bp, Homo sapien
tcccatgaataagtggatctcctct

SEQ ID NO: 4056157 - DNA, 25 bp, Homo sapien
cactgtgaagtaatcccatcatgga

SEQ ID NO: 4056158 - DNA, 25 bp, Homo sapien
cagtgaaccccaggcattgctgcag

SEQ ID NO: 4056159 - DNA, 25 bp, Homo sapien
cacaggtcaacgtatgggcgtaatc

SEQ ID NO: 4056160 - DNA, 25 bp, Homo sapien
tgccaatgtttcgtaccagcagaat

SEQ ID NO: 4056161 - DNA, 25 bp, Homo sapien
tgtcaggaaaatcgagaatggctcg

SEQ ID NO: 4056162 - DNA, 25 bp, Homo sapien
tcgtgcccctctagctttgatgggt

SEQ ID NO: 4056163 - DNA, 25 bp, Homo sapien
aggtcagtggaaggccaggcccatt

SEQ ID NO: 4056164 - DNA, 25 bp, Homo sapien
caagaaaagggtcgatgagaggcat

SEQ ID NO: 4056165 - DNA, 25 bp, Homo sapien
tctcctgtagatccaagaagattca

SEQ ID NO: 4056166 - DNA, 25 bp, Homo sapien
cctacagctggtagagaagctatgc

SEQ ID NO: 4056167 - DNA, 25 bp, Homo sapien
ctttgtggccaatatctttggggct

SEQ ID NO: 4056168 - DNA, 25 bp, Homo sapien
tcctctggagtaaagaggattcgga

SEQ ID NO: 4056169 - DNA, 25 bp, Homo sapien
gaggattcggaatatggaaggcact

SEQ ID NO: 4056170 - DNA, 25 bp, Homo sapien
aatatggaaggcactccaggagcca

SEQ ID NO: 4056171 - DNA, 25 bp, Homo sapien
cacatgatgatgaacatcgtgcatg

SEQ ID NO: 4056172 - DNA, 25 bp, Homo sapien
tgaccttggtcaggtctgaacttca

SEQ ID NO: 4056173 - DNA, 25 bp, Homo sapien
catcaactacttactagacgtgtga

SEQ ID NO: 4056174 - DNA, 25 bp, Homo sapien
tgatgatgaacatcgtgcatgtgaa

SEQ ID NO: 4056175 - DNA, 25 bp, Homo sapien
tataatttctgatggaaagggctgg

SEQ ID NO: 4056176 - DNA, 25 bp, Homo sapien
cctcaaaatcagtggaacttcatag

SEQ ID NO: 4056177 - DNA, 25 bp, Homo sapien
cacagggagtgtagttctgaaatat

SEQ ID NO: 4056178 - DNA, 25 bp, Homo sapien
ggaacttcatagacttcacagggag

SEQ ID NO: 4056179 - DNA, 25 bp, Homo sapien
aaattattgttatagtcacacattg

SEQ ID NO: 4056180 - DNA, 25 bp, Homo sapien
tatagtcacacattgacaaaaatga

SEQ ID NO: 4056181 - DNA, 25 bp, Homo sapien
cttcagttgaaagagtaaattattg

SEQ ID NO: 4056182 - DNA, 25 bp, Homo sapien
tattgttatagtcacacattgacaa

SEQ ID NO: 4056183 - DNA, 25 bp, Homo sapien
agtctctgctcggtggtcagggaca

SEQ ID NO: 4056184 - DNA, 25 bp, Homo sapien
aaacgtgtttttgccagtctctgct

SEQ ID NO: 4056185 - DNA, 25 bp, Homo sapien
tgtggtcggcacatcaaacgtgttt

SEQ ID NO: 4056186 - DNA, 25 bp, Homo sapien
ccccatatctaagagttcgatgatc

SEQ ID NO: 4056187 - DNA, 25 bp, Homo sapien
ttcttctgtaaccacctttggactc

SEQ ID NO: 4056188 - DNA, 25 bp, Homo sapien
gctttgaaatcctttgaacatattg

SEQ ID NO: 4056189 - DNA, 25 bp, Homo sapien
gactcaggggtggcaaaaccttgct

SEQ ID NO: 4056190 - DNA, 25 bp, Homo sapien
gaacatattgaccaatcccatctga

SEQ ID NO: 4056191 - DNA, 25 bp, Homo sapien
atgtctttgcagaggctcatatggg

SEQ ID NO: 4056192 - DNA, 25 bp, Homo sapien
catatgggtccaaagaattccagtc

SEQ ID NO: 4056193 - DNA, 25 bp, Homo sapien
gaatgtgtgagtccagaacagataa

SEQ ID NO: 4056194 - DNA, 25 bp, Homo sapien
gaattccagtcatccagaatgtgtg

SEQ ID NO: 4056195 - DNA, 25 bp, Homo sapien
tgaatgcaggggacgattccttggc

SEQ ID NO: 4056196 - DNA, 25 bp, Homo sapien
gaatgcaggggacgattccttggca

SEQ ID NO: 4056197 - DNA, 25 bp, Homo sapien
aatgcaggggacgattccttggcac

SEQ ID NO: 4056198 - DNA, 25 bp, Homo sapien
gacaatccagcttggctcaggcaga

SEQ ID NO: 4056199 - DNA, 25 bp, Homo sapien
aaaggtatctaggttgctgcccaca

SEQ ID NO: 4056200 - DNA, 25 bp, Homo sapien
gaaattggccctcttggtcttaagc

SEQ ID NO: 4056201 - DNA, 25 bp, Homo sapien
tcttagaaaactgacgctcgggcct

SEQ ID NO: 4056202 - DNA, 25 bp, Homo sapien
tgcactccgggtcccacgtttattc

SEQ ID NO: 4056203 - DNA, 25 bp, Homo sapien
cttggtgcactccgggtcccacgtt

SEQ ID NO: 4056204 - DNA, 25 bp, Homo sapien
tggtgcactccgggtcccacgttta

SEQ ID NO: 4056205 - DNA, 25 bp, Homo sapien
ccgccaagaccccgcgtccaactca

SEQ ID NO: 4056206 - DNA, 25 bp, Homo sapien
cgcgtccaactcacagaccccgccg

SEQ ID NO: 4056207 - DNA, 25 bp, Homo sapien
gtccaactcacagaccccgccgccg

SEQ ID NO: 4056208 - DNA, 25 bp, Homo sapien
aagaccccgcgtccaactcacagac

SEQ ID NO: 4056209 - DNA, 25 bp, Homo sapien
agcttgaagccgcccgcactctcca

SEQ ID NO: 4056210 - DNA, 25 bp, Homo sapien
gcttgaagccgcccgcactctccat

SEQ ID NO: 4056211 - DNA, 25 bp, Homo sapien
gagatcatttgctgtgtcacttaga

SEQ ID NO: 4056212 - DNA, 25 bp, Homo sapien
cgtatggaacatttactgggtagct

SEQ ID NO: 4056213 - DNA, 25 bp, Homo sapien
tactatatgctcaggactcaacaga

SEQ ID NO: 4056214 - DNA, 25 bp, Homo sapien
ggttaaccttatgccctgaggctag

SEQ ID NO: 4056215 - DNA, 25 bp, Homo sapien
gggctcacccatggtgaagatgaca

SEQ ID NO: 4056216 - DNA, 25 bp, Homo sapien
ggagagtgtgacatatctgtaagca

SEQ ID NO: 4056217 - DNA, 25 bp, Homo sapien
agcagctcatcagggctcacccatg

SEQ ID NO: 4056218 - DNA, 25 bp, Homo sapien
aaggggtgaggctttcagatttgca

SEQ ID NO: 4056219 - DNA, 25 bp, Homo sapien
gaaatgcccagacaagatgacctag

SEQ ID NO: 4056220 - DNA, 25 bp, Homo sapien
agtggttgagacatatctgcttcac

SEQ ID NO: 4056221 - DNA, 25 bp, Homo sapien
gagtgatgggctactgctttgagtc

SEQ ID NO: 4056222 - DNA, 25 bp, Homo sapien
tgacctagacgagaagaaggaaatg

SEQ ID NO: 4056223 - DNA, 25 bp, Homo sapien
tagagaggaagatgcgagaactcgt

SEQ ID NO: 4056224 - DNA, 25 bp, Homo sapien
tccttcattcatgtgagcaaacatc

SEQ ID NO: 4056225 - DNA, 25 bp, Homo sapien
gagcaaacatccccagatactgggc

SEQ ID NO: 4056226 - DNA, 25 bp, Homo sapien
tactgggcattcaaggccatatcag

SEQ ID NO: 4056227 - DNA, 25 bp, Homo sapien
gaaaatcctcagttatgtattatcc

SEQ ID NO: 4056228 - DNA, 25 bp, Homo sapien
aatcctcagttatgtattatccagc

SEQ ID NO: 4056229 - DNA, 25 bp, Homo sapien
gaggaaaatcctcagttatgtatta

SEQ ID NO: 4056230 - DNA, 25 bp, Homo sapien
ctcagttatgtattatccagctaga

SEQ ID NO: 4056231 - DNA, 25 bp, Homo sapien
atagctgtcatcataaagtaggtca

SEQ ID NO: 4056232 - DNA, 25 bp, Homo sapien
taaagtaggtcatccttacaactca

SEQ ID NO: 4056233 - DNA, 25 bp, Homo sapien
gatctgaagggggacagtctctata

SEQ ID NO: 4056234 - DNA, 25 bp, Homo sapien
gacagtctctataatagcaccttgg

SEQ ID NO: 4056235 - DNA, 25 bp, Homo sapien
aacaggcacactgtgggttctggtc

SEQ ID NO: 4056236 - DNA, 25 bp, Homo sapien
ggcacactgtgggttctggtccgtc

SEQ ID NO: 4056237 - DNA, 25 bp, Homo sapien
caggcacactgtgggttctggtccg

SEQ ID NO: 4056238 - DNA, 25 bp, Homo sapien
tcctgcacaaacaggcacactgtgg

SEQ ID NO: 4056239 - DNA, 25 bp, Homo sapien
gagagatatgcatccccagtgaggt

SEQ ID NO: 4056240 - DNA, 25 bp, Homo sapien
gatacaaacgatgcagcaagtgggc

SEQ ID NO: 4056241 - DNA, 25 bp, Homo sapien
caccctttgggccatgggtacctgg

SEQ ID NO: 4056242 - DNA, 25 bp, Homo sapien
tctacacattgtacacgcatgtgca

SEQ ID NO: 4056243 - DNA, 25 bp, Homo sapien
aaagctacagtttcttgtactgatg

SEQ ID NO: 4056244 - DNA, 25 bp, Homo sapien
gatggccgaaagcaactcgttgcct

SEQ ID NO: 4056245 - DNA, 25 bp, Homo sapien
actgatgttgaaatggccagaaggg

SEQ ID NO: 4056246 - DNA, 25 bp, Homo sapien
tcgttgccttgcgtaaaagctacag

SEQ ID NO: 4056247 - DNA, 25 bp, Homo sapien
gtaataatgctagaatctggaccca

SEQ ID NO: 4056248 - DNA, 25 bp, Homo sapien
tattccagtacagattagtgtcaac

SEQ ID NO: 4056249 - DNA, 25 bp, Homo sapien
tatattgaatcccacttagcaaggc

SEQ ID NO: 4056250 - DNA, 25 bp, Homo sapien
caagtcatgtctaacctctaaagca

SEQ ID NO: 4056251 - DNA, 25 bp, Homo sapien
actttattcatgaatctataatgga

SEQ ID NO: 4056252 - DNA, 25 bp, Homo sapien
ctttattcatgaatctataatggaa

SEQ ID NO: 4056253 - DNA, 25 bp, Homo sapien
gactttattcatgaatctataatgg

SEQ ID NO: 4056254 - DNA, 25 bp, Homo sapien
aatacaggcgtgtattagatacaac

SEQ ID NO: 4056255 - DNA, 25 bp, Homo sapien
tgaaccatcattctgaaagtctgaa

SEQ ID NO: 4056256 - DNA, 25 bp, Homo sapien
tgtgttcccaacatgagactaaaca

SEQ ID NO: 4056257 - DNA, 25 bp, Homo sapien
aaaattgcttaatacactttgccac

SEQ ID NO: 4056258 - DNA, 25 bp, Homo sapien
caagaatctggcgagatgaattccc

SEQ ID NO: 4056259 - DNA, 25 bp, Homo sapien
tcattgcatagattccaccacgtgg

SEQ ID NO: 4056260 - DNA, 25 bp, Homo sapien
gccactaagaggaaatcggctggaa

SEQ ID NO: 4056261 - DNA, 25 bp, Homo sapien
tcacctaagggcaatgaatggcatg

SEQ ID NO: 4056262 - DNA, 25 bp, Homo sapien
tattacggagagtcgaaaagcccac

SEQ ID NO: 4056263 - DNA, 25 bp, Homo sapien
tgattgctgggtactacaacctgct

SEQ ID NO: 4056264 - DNA, 25 bp, Homo sapien
tcctgtatgaagctcccgcaatgaa

SEQ ID NO: 4056265 - DNA, 25 bp, Homo sapien
taaccaacacatagcaggactgcgc

SEQ ID NO: 4056266 - DNA, 25 bp, Homo sapien
gcacaatcccttaaattattcagct

SEQ ID NO: 4056267 - DNA, 25 bp, Homo sapien
gctgatatttatgaaagaacacaca

SEQ ID NO: 4056268 - DNA, 25 bp, Homo sapien
tttgtactacaaccaatactagatt

SEQ ID NO: 4056269 - DNA, 25 bp, Homo sapien
tcaaatagacgaatgttttcagaaa

SEQ ID NO: 4056270 - DNA, 25 bp, Homo sapien
gacgcgggacttgctagctgctgaa

SEQ ID NO: 4056271 - DNA, 25 bp, Homo sapien
tgaccaagtgaacagtagccatgct

SEQ ID NO: 4056272 - DNA, 25 bp, Homo sapien
ggaggcaaaccacatagacttcgga

SEQ ID NO: 4056273 - DNA, 25 bp, Homo sapien
aatatctgggctgaatgacgcggga

SEQ ID NO: 4056274 - DNA, 25 bp, Homo sapien
tcatgacaaactccataaaatggga

SEQ ID NO: 4056275 - DNA, 25 bp, Homo sapien
gagcagcaaatacgatcacactcat

SEQ ID NO: 4056276 - DNA, 25 bp, Homo sapien
caaatttattagtgagcgaaatctc

SEQ ID NO: 4056277 - DNA, 25 bp, Homo sapien
gagcgaaatctcatgagcagcaaat

SEQ ID NO: 4056278 - DNA, 25 bp, Homo sapien
cagatttcattctctaagacaggca

SEQ ID NO: 4056279 - DNA, 25 bp, Homo sapien
gcttgatgctgaaagtgaccaactg

SEQ ID NO: 4056280 - DNA, 25 bp, Homo sapien
tcataattctgctaagtgggtcgct

SEQ ID NO: 4056281 - DNA, 25 bp, Homo sapien
tcagtgaagcctacctaagattgca

SEQ ID NO: 4056282 - DNA, 25 bp, Homo sapien
ataaaggagttccaagtgcttccgc

SEQ ID NO: 4056283 - DNA, 25 bp, Homo sapien
aaggagttccaagtgcttccgccaa

SEQ ID NO: 4056284 - DNA, 25 bp, Homo sapien
ttccgccaactcctcctaccagcaa

SEQ ID NO: 4056285 - DNA, 25 bp, Homo sapien
ggagttccaagtgcttccgccaact

SEQ ID NO: 4056286 - DNA, 25 bp, Homo sapien
ttgggccgggcaccccatatctcat

SEQ ID NO: 4056287 - DNA, 25 bp, Homo sapien
tcatctagtgaagtaagtcccaaac

SEQ ID NO: 4056288 - DNA, 25 bp, Homo sapien
ctgtgaaaacaacggccagtgagta

SEQ ID NO: 4056289 - DNA, 25 bp, Homo sapien
ccagtgagtatccagggctgacttt

SEQ ID NO: 4056290 - DNA, 25 bp, Homo sapien
ggaatcgtacccaggcctggattac

SEQ ID NO: 4056291 - DNA, 25 bp, Homo sapien
gcccggaatcgtacccaggcctgga

SEQ ID NO: 4056292 - DNA, 25 bp, Homo sapien
cgctgggaagtcgaaggagggcccg

SEQ ID NO: 4056293 - DNA, 25 bp, Homo sapien
cggaatcgtacccaggcctggatta

SEQ ID NO: 4056294 - DNA, 25 bp, Homo sapien
aaggctgtccggacccgccctcgcg

SEQ ID NO: 4056295 - DNA, 25 bp, Homo sapien
ggcagggagatggtgcgccggactg

SEQ ID NO: 4056296 - DNA, 25 bp, Homo sapien
ggaagccattctgcacttccgctct

SEQ ID NO: 4056297 - DNA, 25 bp, Homo sapien
gctgcactttactctctcgaggaag

SEQ ID NO: 4056298 - DNA, 25 bp, Homo sapien
taggcctcagctccctaggttttgc

SEQ ID NO: 4056299 - DNA, 25 bp, Homo sapien
taggttttgcttcgcggagtacaga

SEQ ID NO: 4056300 - DNA, 25 bp, Homo sapien
gccggagtcacgtgcgccaacgtta

SEQ ID NO: 4056301 - DNA, 25 bp, Homo sapien
cggccactatggcaacggaagcggc

SEQ ID NO: 4056302 - DNA, 25 bp, Homo sapien
caaaggaaagcgctcccaatggtca

SEQ ID NO: 4056303 - DNA, 25 bp, Homo sapien
tatgcagatactccaccaccaagga

SEQ ID NO: 4056304 - DNA, 25 bp, Homo sapien
ccaccaaggaggtagagtatctaca

SEQ ID NO: 4056305 - DNA, 25 bp, Homo sapien
tacattccttaagtgtaggctgttc

SEQ ID NO: 4056306 - DNA, 25 bp, Homo sapien
gggattcccactgacgtgctcggga

SEQ ID NO: 4056307 - DNA, 25 bp, Homo sapien
gtatcagaccatcggcaatgacggc

SEQ ID NO: 4056308 - DNA, 25 bp, Homo sapien
agtttggcttcttccgagctcggcc

SEQ ID NO: 4056309 - DNA, 25 bp, Homo sapien
taggcttctggctctcgtatcagac

SEQ ID NO: 4056310 - DNA, 25 bp, Homo sapien
cggtgcgtgcaaggggtcatttcta

SEQ ID NO: 4056311 - DNA, 25 bp, Homo sapien
aaacatccttttccactcctgtgat

SEQ ID NO: 4056312 - DNA, 25 bp, Homo sapien
tcgactctatacacagaaacatcct

SEQ ID NO: 4056313 - DNA, 25 bp, Homo sapien
aggagctgagctgtcccggtgcgtg

SEQ ID NO: 4056314 - DNA, 25 bp, Homo sapien
cacccactcgtcccactgatctccc

SEQ ID NO: 4056315 - DNA, 25 bp, Homo sapien
gcacccactcgtcccactgatctcc

SEQ ID NO: 4056316 - DNA, 25 bp, Homo sapien
atgcacccactcgtcccactgatct

SEQ ID NO: 4056317 - DNA, 25 bp, Homo sapien
tgcacccactcgtcccactgatctc

SEQ ID NO: 4056318 - DNA, 25 bp, Homo sapien
catccttagtaaaggagtccaaatt

SEQ ID NO: 4056319 - DNA, 25 bp, Homo sapien
cactgtccctctagggacatttttc

SEQ ID NO: 4056320 - DNA, 25 bp, Homo sapien
gcactgtccctctagggacattttt

SEQ ID NO: 4056321 - DNA, 25 bp, Homo sapien
ttcccatccttagtaaaggagtcca

SEQ ID NO: 4056322 - DNA, 25 bp, Homo sapien
cagctctccagcactccggtagcca

SEQ ID NO: 4056323 - DNA, 25 bp, Homo sapien
tcctgcatccctttcatcctccttt

SEQ ID NO: 4056324 - DNA, 25 bp, Homo sapien
caccacctcagtccgtttccatgga

SEQ ID NO: 4056325 - DNA, 25 bp, Homo sapien
acctcagtccgtttccatggaaact

SEQ ID NO: 4056326 - DNA, 25 bp, Homo sapien
aaatgttccgtctttaccgtcactg

SEQ ID NO: 4056327 - DNA, 25 bp, Homo sapien
ctgctttaaaatacgctcatcgaac

SEQ ID NO: 4056328 - DNA, 25 bp, Homo sapien
tccgtctttaccgtcactgctttaa

SEQ ID NO: 4056329 - DNA, 25 bp, Homo sapien
aatgtgctcataaatgttccgtctt

SEQ ID NO: 4056330 - DNA, 25 bp, Homo sapien
gatttcttatctgagtccatgtttc

SEQ ID NO: 4056331 - DNA, 25 bp, Homo sapien
agtctcttctccaatgcaaagctct

SEQ ID NO: 4056332 - DNA, 25 bp, Homo sapien
cttggaccagtccagctaagactcc

SEQ ID NO: 4056333 - DNA, 25 bp, Homo sapien
cctcacacatttggttattgaaact

SEQ ID NO: 4056334 - DNA, 25 bp, Homo sapien
tctctggtcgcttgcaggttgtaag

SEQ ID NO: 4056335 - DNA, 25 bp, Homo sapien
tacctctctggtcgcttgcaggttg

SEQ ID NO: 4056336 - DNA, 25 bp, Homo sapien
ttcctacctctctggtcgcttgcag

SEQ ID NO: 4056337 - DNA, 25 bp, Homo sapien
tggtcgcttgcaggttgtaagagca

SEQ ID NO: 4056338 - DNA, 25 bp, Homo sapien
ctgaaatcccccacaacctgaaggg

SEQ ID NO: 4056339 - DNA, 25 bp, Homo sapien
gacttcaggacagccacaaatgctg

SEQ ID NO: 4056340 - DNA, 25 bp, Homo sapien
gttcctccaacaaaacttgacttca

SEQ ID NO: 4056341 - DNA, 25 bp, Homo sapien
agccaggtgacatctccagttcctc

SEQ ID NO: 4056342 - DNA, 25 bp, Homo sapien
cgaggcaagactgtcccagtagaca

SEQ ID NO: 4056343 - DNA, 25 bp, Homo sapien
actgtgcatctgaaatgaacgaggc

SEQ ID NO: 4056344 - DNA, 25 bp, Homo sapien
acagtttaaaggtcactgtggccac

SEQ ID NO: 4056345 - DNA, 25 bp, Homo sapien
ccaggaatgggcctcccagaaacag

SEQ ID NO: 4056346 - DNA, 25 bp, Homo sapien
caggtgtacgtttgccctcaggagg

SEQ ID NO: 4056347 - DNA, 25 bp, Homo sapien
tatggaagcactttgacgcagacgg

SEQ ID NO: 4056348 - DNA, 25 bp, Homo sapien
cgcagacggtcagtaaagctcccaa

SEQ ID NO: 4056349 - DNA, 25 bp, Homo sapien
gtttgggagacatccggctgctctg

SEQ ID NO: 4056350 - DNA, 25 bp, Homo sapien
tatcaaaacgattgggtcttggccc

SEQ ID NO: 4056351 - DNA, 25 bp, Homo sapien
gatgtcaggatatgaggctctcagg

SEQ ID NO: 4056352 - DNA, 25 bp, Homo sapien
ttaaaatcaacagggtccgacactg

SEQ ID NO: 4056353 - DNA, 25 bp, Homo sapien
tgaaccctgttagtgaacctctggg

SEQ ID NO: 4056354 - DNA, 25 bp, Homo sapien
gctcagcttgtatattcccctccag

SEQ ID NO: 4056355 - DNA, 25 bp, Homo sapien
ctgccctgctcagcttgtatattcc

SEQ ID NO: 4056356 - DNA, 25 bp, Homo sapien
agcttgtatattcccctccagactt

SEQ ID NO: 4056357 - DNA, 25 bp, Homo sapien
gacttcagcagctttaccagccaag

SEQ ID NO: 4056358 - DNA, 25 bp, Homo sapien
attgatgctcttgggaaatgggccc

SEQ ID NO: 4056359 - DNA, 25 bp, Homo sapien
catcctagaagggtgtgcaccagcc

SEQ ID NO: 4056360 - DNA, 25 bp, Homo sapien
ccatccacaatcgagggctgggtgt

SEQ ID NO: 4056361 - DNA, 25 bp, Homo sapien
taccccagcctctagtgataagggc

SEQ ID NO: 4056362 - DNA, 25 bp, Homo sapien
ttacttctttgggttcagagcgttc

SEQ ID NO: 4056363 - DNA, 25 bp, Homo sapien
gggctccgtgctagccttgcctgct

SEQ ID NO: 4056364 - DNA, 25 bp, Homo sapien
atgggcgggaagcacaaacagcagc

SEQ ID NO: 4056365 - DNA, 25 bp, Homo sapien
tctttccaacctgaagaaagcagcc

SEQ ID NO: 4056366 - DNA, 25 bp, Homo sapien
catgcctcttggtgtagggccagct

SEQ ID NO: 4056367 - DNA, 25 bp, Homo sapien
gaagctctagaccaccagaacttaa

SEQ ID NO: 4056368 - DNA, 25 bp, Homo sapien
gcctttgggttcacagagctcttag

SEQ ID NO: 4056369 - DNA, 25 bp, Homo sapien
tcctcctcaaagtgcaagttaccca

SEQ ID NO: 4056370 - DNA, 25 bp, Homo sapien
tctgtgcatggggatatccttgacc

SEQ ID NO: 4056371 - DNA, 25 bp, Homo sapien
catggggatatccttgaccctgcac

SEQ ID NO: 4056372 - DNA, 25 bp, Homo sapien
gcagcatcagaaccttcatactcct

SEQ ID NO: 4056373 - DNA, 25 bp, Homo sapien
ccactgacggcaggctctgtgcatg

SEQ ID NO: 4056374 - DNA, 25 bp, Homo sapien
cttgagtcacgtactagaaccatct

SEQ ID NO: 4056375 - DNA, 25 bp, Homo sapien
catgcaatagtccaaagtgaacagc

SEQ ID NO: 4056376 - DNA, 25 bp, Homo sapien
catcatttgccttgagctggtagaa

SEQ ID NO: 4056377 - DNA, 25 bp, Homo sapien
ctggagggaacagtcctacttcttt

SEQ ID NO: 4056378 - DNA, 25 bp, Homo sapien
tgaacagcttatctcgatgtctgac

SEQ ID NO: 4056379 - DNA, 25 bp, Homo sapien
tgagctttaagattccaaaaattcc

SEQ ID NO: 4056380 - DNA, 25 bp, Homo sapien
ttgagctttaagattccaaaaattc

SEQ ID NO: 4056381 - DNA, 25 bp, Homo sapien
atgaccagatactggttgtcagagg

SEQ ID NO: 4056382 - DNA, 25 bp, Homo sapien
tgaccagatactggttgtcagagga

SEQ ID NO: 4056383 - DNA, 25 bp, Homo sapien
catgaccagatactggttgtcagag

SEQ ID NO: 4056384 - DNA, 25 bp, Homo sapien
acagcacaggatacctgaagactcc

SEQ ID NO: 4056385 - DNA, 25 bp, Homo sapien
tcacagcacaggatacctgaagact

SEQ ID NO: 4056386 - DNA, 25 bp, Homo sapien
cagcacaggatacctgaagactcct

SEQ ID NO: 4056387 - DNA, 25 bp, Homo sapien
cacagcacaggatacctgaagactc

SEQ ID NO: 4056388 - DNA, 25 bp, Homo sapien
ctgtggtggcgggtgtattttttca

SEQ ID NO: 4056389 - DNA, 25 bp, Homo sapien
taaactgctcattccgacgagtgtg

SEQ ID NO: 4056390 - DNA, 25 bp, Homo sapien
tcttcaccggggtcgtgggtaatgc

SEQ ID NO: 4056391 - DNA, 25 bp, Homo sapien
acgatatcactcgttctcaggcccg

SEQ ID NO: 4056392 - DNA, 25 bp, Homo sapien
gatgtccacacatcgggacccgtat

SEQ ID NO: 4056393 - DNA, 25 bp, Homo sapien
taagttgtgttggtgcagcctctgg

SEQ ID NO: 4056394 - DNA, 25 bp, Homo sapien
cctcctgtccagaatatattgccgg

SEQ ID NO: 4056395 - DNA, 25 bp, Homo sapien
ggaatacaggatggtgtcttcacct

SEQ ID NO: 4056396 - DNA, 25 bp, Homo sapien
ctgagtggctctggagagaggtcat

SEQ ID NO: 4056397 - DNA, 25 bp, Homo sapien
gagtggctctggagagaggtcatac

SEQ ID NO: 4056398 - DNA, 25 bp, Homo sapien
tgagtggctctggagagaggtcata

SEQ ID NO: 4056399 - DNA, 25 bp, Homo sapien
gagacagccagagaatagcacgtgg

SEQ ID NO: 4056400 - DNA, 25 bp, Homo sapien
tcaacaaatccatggaaacaagcca

SEQ ID NO: 4056401 - DNA, 25 bp, Homo sapien
gatatgggcatcagaggagacagcc

SEQ ID NO: 4056402 - DNA, 25 bp, Homo sapien
cccgtcgaggtcagctgtgccctga

SEQ ID NO: 4056403 - DNA, 25 bp, Homo sapien
gagagtcacggcctgggacgcaccc

SEQ ID NO: 4056404 - DNA, 25 bp, Homo sapien
atcaggctccgctcatcagggaaca

SEQ ID NO: 4056405 - DNA, 25 bp, Homo sapien
gccaagtcccagagagtcacggcct

SEQ ID NO: 4056406 - DNA, 25 bp, Homo sapien
gggacgcaccccctgtgatcaggct

SEQ ID NO: 4056407 - DNA, 25 bp, Homo sapien
ggccacagcgtagactctctttcca

SEQ ID NO: 4056408 - DNA, 25 bp, Homo sapien
gttgagccgctgatggccacagcgt

SEQ ID NO: 4056409 - DNA, 25 bp, Homo sapien
cataccctgatgtagccagagccac

SEQ ID NO: 4056410 - DNA, 25 bp, Homo sapien
ccagagccacacgtgtacacgtggt

SEQ ID NO: 4056411 - DNA, 25 bp, Homo sapien
ccactgagtcaggttcaagcaagac

SEQ ID NO: 4056412 - DNA, 25 bp, Homo sapien
cccactgagtcaggttcaagcaaga

SEQ ID NO: 4056413 - DNA, 25 bp, Homo sapien
ccccactgagtcaggttcaagcaag

SEQ ID NO: 4056414 - DNA, 25 bp, Homo sapien
cactgctgctgggtcaccgtgcttg

SEQ ID NO: 4056415 - DNA, 25 bp, Homo sapien
ggaaacgccagagctttccagcaca

SEQ ID NO: 4056416 - DNA, 25 bp, Homo sapien
gaaacgccagagctttccagcacat

SEQ ID NO: 4056417 - DNA, 25 bp, Homo sapien
gtcaccgtgcttgtctcttgatcag

SEQ ID NO: 4056418 - DNA, 25 bp, Homo sapien
cataagccccgaacattctgagcga

SEQ ID NO: 4056419 - DNA, 25 bp, Homo sapien
gccccgaacattctgagcgatgcct

SEQ ID NO: 4056420 - DNA, 25 bp, Homo sapien
taagccccgaacattctgagcgatg

SEQ ID NO: 4056421 - DNA, 25 bp, Homo sapien
cgaacattctgagcgatgcctcttc

SEQ ID NO: 4056422 - DNA, 25 bp, Homo sapien
tggtcaacccctggcctgtggaagg

SEQ ID NO: 4056423 - DNA, 25 bp, Homo sapien
ccatgtaggattccccagcaggtgg

SEQ ID NO: 4056424 - DNA, 25 bp, Homo sapien
tgcggcgttccccaggagaaggcca

SEQ ID NO: 4056425 - DNA, 25 bp, Homo sapien
gggtctctgggcctgcgagctaggg

SEQ ID NO: 4056426 - DNA, 25 bp, Homo sapien
acaagctttcggacaggaatggctc

SEQ ID NO: 4056427 - DNA, 25 bp, Homo sapien
gatggcatccctaggacactctacc

SEQ ID NO: 4056428 - DNA, 25 bp, Homo sapien
aaggtcccgtgccacgtgacaagct

SEQ ID NO: 4056429 - DNA, 25 bp, Homo sapien
ttgcaatactcaaggcagcactcct

SEQ ID NO: 4056430 - DNA, 25 bp, Homo sapien
tcatctaatacttagaaaggttttc

SEQ ID NO: 4056431 - DNA, 25 bp, Homo sapien
atttatcagtacataccctgtggat

SEQ ID NO: 4056432 - DNA, 25 bp, Homo sapien
acataccctgtggatagtttctagc

SEQ ID NO: 4056433 - DNA, 25 bp, Homo sapien
tctagctttcatctaatacttagaa

SEQ ID NO: 4056434 - DNA, 25 bp, Homo sapien
ggccctcagtgaagacttaaatttc

SEQ ID NO: 4056435 - DNA, 25 bp, Homo sapien
tgtaggtagagtatctttagtacgg

SEQ ID NO: 4056436 - DNA, 25 bp, Homo sapien
ttttcctatccaacaacaaggcttc

SEQ ID NO: 4056437 - DNA, 25 bp, Homo sapien
tcttgatgctgctgggaacgaaatc

SEQ ID NO: 4056438 - DNA, 25 bp, Homo sapien
ctcttggaggtttttcaatggatga

SEQ ID NO: 4056439 - DNA, 25 bp, Homo sapien
attcatgccctcttggaggtttttc

SEQ ID NO: 4056440 - DNA, 25 bp, Homo sapien
gaatctgatgatacttgatccattt

SEQ ID NO: 4056441 - DNA, 25 bp, Homo sapien
atgaatctgatgatacttgatccat

SEQ ID NO: 4056442 - DNA, 25 bp, Homo sapien
cttaagagttttctatatctttctc

SEQ ID NO: 4056443 - DNA, 25 bp, Homo sapien
ttaagagttttctatatctttctca

SEQ ID NO: 4056444 - DNA, 25 bp, Homo sapien
taagagttttctatatctttctcat

SEQ ID NO: 4056445 - DNA, 25 bp, Homo sapien
agagttttctatatctttctcatta

SEQ ID NO: 4056446 - DNA, 25 bp, Homo sapien
attttccttcactatggacactctg

SEQ ID NO: 4056447 - DNA, 25 bp, Homo sapien
tttccttcactatggacactctgat

SEQ ID NO: 4056448 - DNA, 25 bp, Homo sapien
ttttccttcactatggacactctga

SEQ ID NO: 4056449 - DNA, 25 bp, Homo sapien
gattttccttcactatggacactct

SEQ ID NO: 4056450 - DNA, 25 bp, Homo sapien
ctgatgtataatgtagtcagaacta

SEQ ID NO: 4056451 - DNA, 25 bp, Homo sapien
tataatgtagtcagaactaaagctg

SEQ ID NO: 4056452 - DNA, 25 bp, Homo sapien
tgtataatgtagtcagaactaaagc

SEQ ID NO: 4056453 - DNA, 25 bp, Homo sapien
gatgtataatgtagtcagaactaaa

SEQ ID NO: 4056454 - DNA, 25 bp, Homo sapien
gccgaattaaatgggcattaacatg

SEQ ID NO: 4056455 - DNA, 25 bp, Homo sapien
aatgggcattaacatggaaggcttt

SEQ ID NO: 4056456 - DNA, 25 bp, Homo sapien
ctctgatgccgaattaaatgggcat

SEQ ID NO: 4056457 - DNA, 25 bp, Homo sapien
ttaaatgggcattaacatggaaggc

SEQ ID NO: 4056458 - DNA, 25 bp, Homo sapien
tagttagaactacagctgaatgctt

SEQ ID NO: 4056459 - DNA, 25 bp, Homo sapien
ctctggtgcacaatatagttagaac

SEQ ID NO: 4056460 - DNA, 25 bp, Homo sapien
gcacaatatagttagaactacagct

SEQ ID NO: 4056461 - DNA, 25 bp, Homo sapien
gaactacagctgaatgctttctcac

SEQ ID NO: 4056462 - DNA, 25 bp, Homo sapien
tgatgctgcctaagctgggagctgc

SEQ ID NO: 4056463 - DNA, 25 bp, Homo sapien
tagtttcccattaacgctgaaggcc

SEQ ID NO: 4056464 - DNA, 25 bp, Homo sapien
cagatgctgccgaaattgggagtta

SEQ ID NO: 4056465 - DNA, 25 bp, Homo sapien
tatatgcagaactacagctgaagcc

SEQ ID NO: 4056466 - DNA, 25 bp, Homo sapien
aagttgagagtcacacctaaagggc

SEQ ID NO: 4056467 - DNA, 25 bp, Homo sapien
catgcttcacgagttttgtatcaaa

SEQ ID NO: 4056468 - DNA, 25 bp, Homo sapien
tcctgtacacccagagggctgctct

SEQ ID NO: 4056469 - DNA, 25 bp, Homo sapien
tatatttcctgctgagtggacttcc

SEQ ID NO: 4056470 - DNA, 25 bp, Homo sapien
cattcccactgtgcctaatacaagg

SEQ ID NO: 4056471 - DNA, 25 bp, Homo sapien
ggctccttaaaatcaccagactagg

SEQ ID NO: 4056472 - DNA, 25 bp, Homo sapien
tatatgctgacgtaaaaagacatcc

SEQ ID NO: 4056473 - DNA, 25 bp, Homo sapien
gaagagaactgtgctataaaagacc

SEQ ID NO: 4056474 - DNA, 25 bp, Homo sapien
tttgggcgacagagcgagactccat

SEQ ID NO: 4056475 - DNA, 25 bp, Homo sapien
gggaaacggaagttgcggtgagcca

SEQ ID NO: 4056476 - DNA, 25 bp, Homo sapien
ctccagtttgggcgacagagcgaga

SEQ ID NO: 4056477 - DNA, 25 bp, Homo sapien
ggtgagccaagttcttgccactgca

SEQ ID NO: 4056478 - DNA, 25 bp, Homo sapien
tatcaccagctaggatcatgatggg

SEQ ID NO: 4056479 - DNA, 25 bp, Homo sapien
tactctgctggcaccaattggagcc

SEQ ID NO: 4056480 - DNA, 25 bp, Homo sapien
gacagctgtctattagccgggaagc

SEQ ID NO: 4056481 - DNA, 25 bp, Homo sapien
gatggccatttgacacagttacagc

SEQ ID NO: 4056482 - DNA, 25 bp, Homo sapien
ttcctccctccagttgtgagatcac

SEQ ID NO: 4056483 - DNA, 25 bp, Homo sapien
tccagttgtgagatcacagcaggtt

SEQ ID NO: 4056484 - DNA, 25 bp, Homo sapien
gttgtgagatcacagcaggtttgag

SEQ ID NO: 4056485 - DNA, 25 bp, Homo sapien
tccctccagttgtgagatcacagca

SEQ ID NO: 4056486 - DNA, 25 bp, Homo sapien
catagctttcatgggttggatcaac

SEQ ID NO: 4056487 - DNA, 25 bp, Homo sapien
cctaggagacctcatgcagggcaag

SEQ ID NO: 4056488 - DNA, 25 bp, Homo sapien
tcaggactacgggaaagtactgtgg

SEQ ID NO: 4056489 - DNA, 25 bp, Homo sapien
gagattctgcccaaagggataccac

SEQ ID NO: 4056490 - DNA, 25 bp, Homo sapien
tgtaagggagaagcaagccaggaac

SEQ ID NO: 4056491 - DNA, 25 bp, Homo sapien
caggttcccagggtagagaggtctt

SEQ ID NO: 4056492 - DNA, 25 bp, Homo sapien
tccaggttcccagggtagagaggtc

SEQ ID NO: 4056493 - DNA, 25 bp, Homo sapien
ggaaccccaattggcagattccagg

SEQ ID NO: 4056494 - DNA, 25 bp, Homo sapien
ccagggaggccacattcccataatt

SEQ ID NO: 4056495 - DNA, 25 bp, Homo sapien
ggaggccacattcccataattctcc

SEQ ID NO: 4056496 - DNA, 25 bp, Homo sapien
aggccacattcccataattctccag

SEQ ID NO: 4056497 - DNA, 25 bp, Homo sapien
agggaggccacattcccataattct

SEQ ID NO: 4056498 - DNA, 25 bp, Homo sapien
caggccatcccattccgcctgggtg

SEQ ID NO: 4056499 - DNA, 25 bp, Homo sapien
ggccatcccattccgcctgggtgaa

SEQ ID NO: 4056500 - DNA, 25 bp, Homo sapien
gggacaggccatcccattccgcctg

SEQ ID NO: 4056501 - DNA, 25 bp, Homo sapien
gcaggggacaggccatcccattccg

SEQ ID NO: 4056502 - DNA, 25 bp, Homo sapien
ctagggccaattccatagctcaggc

SEQ ID NO: 4056503 - DNA, 25 bp, Homo sapien
tagggccaattccatagctcaggcc

SEQ ID NO: 4056504 - DNA, 25 bp, Homo sapien
ccctgttctgctgcccacccatcgc

SEQ ID NO: 4056505 - DNA, 25 bp, Homo sapien
cagccctgttctgctgcccacccat

SEQ ID NO: 4056506 - DNA, 25 bp, Homo sapien
tctgctgcccacccatcgccctcat

SEQ ID NO: 4056507 - DNA, 25 bp, Homo sapien
ctcagccctgttctgctgcccaccc

SEQ ID NO: 4056508 - DNA, 25 bp, Homo sapien
gagcttcaggggatccgtgaagtcc

SEQ ID NO: 4056509 - DNA, 25 bp, Homo sapien
cctggtccccgtctcagagaagggc

SEQ ID NO: 4056510 - DNA, 25 bp, Homo sapien
cccctggtccccgtctcagagaagg

SEQ ID NO: 4056511 - DNA, 25 bp, Homo sapien
ctggtccccgtctcagagaagggct

SEQ ID NO: 4056512 - DNA, 25 bp, Homo sapien
catcccctggtccccgtctcagaga

SEQ ID NO: 4056513 - DNA, 25 bp, Homo sapien
gaaactctcatatgtaggaagtacg

SEQ ID NO: 4056514 - DNA, 25 bp, Homo sapien
catcatgagtaagtaggattatccc

SEQ ID NO: 4056515 - DNA, 25 bp, Homo sapien
taaacacactgtccatctcaacaga

SEQ ID NO: 4056516 - DNA, 25 bp, Homo sapien
tcaaggaatagactccaatagttca

SEQ ID NO: 4056517 - DNA, 25 bp, Homo sapien
ttgaattatgcgagtcccagatgac

SEQ ID NO: 4056518 - DNA, 25 bp, Homo sapien
caatggaacattacccagaagctac

SEQ ID NO: 4056519 - DNA, 25 bp, Homo sapien
gatgacttatacacacaatggtgcc

SEQ ID NO: 4056520 - DNA, 25 bp, Homo sapien
agtacattgcttacagatacatgca

SEQ ID NO: 4056521 - DNA, 25 bp, Homo sapien
tgtcaaccctgagccgagagaagca

SEQ ID NO: 4056522 - DNA, 25 bp, Homo sapien
ttctgagactactaaatatattcta

SEQ ID NO: 4056523 - DNA, 25 bp, Homo sapien
taaaactgagtgaattcgtaattac

SEQ ID NO: 4056524 - DNA, 25 bp, Homo sapien
aggtcactgtcaaccctgagccgag

SEQ ID NO: 4056525 - DNA, 25 bp, Homo sapien
ggagcacacggtccatactcgggat

SEQ ID NO: 4056526 - DNA, 25 bp, Homo sapien
tttgggactgacactgctccaggag

SEQ ID NO: 4056527 - DNA, 25 bp, Homo sapien
catgaccctatgtcaggagcctggg

SEQ ID NO: 4056528 - DNA, 25 bp, Homo sapien
aaaagacttgtggtatcacctcggg

SEQ ID NO: 4056529 - DNA, 25 bp, Homo sapien
aagaccaaagctggagtcgaggagc

SEQ ID NO: 4056530 - DNA, 25 bp, Homo sapien
aatgggcgcaagctattgagccaca

SEQ ID NO: 4056531 - DNA, 25 bp, Homo sapien
ccacaaagaccaaagctggagtcga

SEQ ID NO: 4056532 - DNA, 25 bp, Homo sapien
ggctgggacagcaacgtgcgtttcc

SEQ ID NO: 4056533 - DNA, 25 bp, Homo sapien
gagtgcgtctcaaccggacccagag

SEQ ID NO: 4056534 - DNA, 25 bp, Homo sapien
gggagtgcgtctcaaccggacccag

SEQ ID NO: 4056535 - DNA, 25 bp, Homo sapien
ccagggtgggagtgcgtctcaaccg

SEQ ID NO: 4056536 - DNA, 25 bp, Homo sapien
gtgggagtgcgtctcaaccggaccc

SEQ ID NO: 4056537 - DNA, 25 bp, Homo sapien
ctccgtagcggactgctccccggcg

SEQ ID NO: 4056538 - DNA, 25 bp, Homo sapien
ggagcaaggtcgctgcgcctcggtg

SEQ ID NO: 4056539 - DNA, 25 bp, Homo sapien
tgcgcctcggtggtggtcacgcccg

SEQ ID NO: 4056540 - DNA, 25 bp, Homo sapien
aggtcgctgcgcctcggtggtggtc

SEQ ID NO: 4056541 - DNA, 25 bp, Homo sapien
cggtggtggtcacgcccggccagct

SEQ ID NO: 4056542 - DNA, 25 bp, Homo sapien
tgtcggctagctcgggtctggccca

SEQ ID NO: 4056543 - DNA, 25 bp, Homo sapien
ctagctcgggtctggcccacggtga

SEQ ID NO: 4056544 - DNA, 25 bp, Homo sapien
gggtctggcccacggtgactgttac

SEQ ID NO: 4056545 - DNA, 25 bp, Homo sapien
ccctgtcggctagctcgggtctggc

SEQ ID NO: 4056546 - DNA, 25 bp, Homo sapien
actgtatctatcttgttcaacatca

SEQ ID NO: 4056547 - DNA, 25 bp, Homo sapien
gacactgtatctatcttgttcaaca

SEQ ID NO: 4056548 - DNA, 25 bp, Homo sapien
cactgtatctatcttgttcaacatc

SEQ ID NO: 4056549 - DNA, 25 bp, Homo sapien
ctgtatctatcttgttcaacatcat

SEQ ID NO: 4056550 - DNA, 25 bp, Homo sapien
gtttcctcctgctcagctctaaggc

SEQ ID NO: 4056551 - DNA, 25 bp, Homo sapien
atttccaagcccatagcctaactaa

SEQ ID NO: 4056552 - DNA, 25 bp, Homo sapien
gcctaactaatacccctagaaatga

SEQ ID NO: 4056553 - DNA, 25 bp, Homo sapien
tgcagccatgtagtgtcagtttcct

SEQ ID NO: 4056554 - DNA, 25 bp, Homo sapien
taaatgtacaggactgagaagtcct

SEQ ID NO: 4056555 - DNA, 25 bp, Homo sapien
cctaagctttgaagtggtagtagaa

SEQ ID NO: 4056556 - DNA, 25 bp, Homo sapien
tacttggaccagtaattcataatcc

SEQ ID NO: 4056557 - DNA, 25 bp, Homo sapien
taacggcagattagacattacagaa

SEQ ID NO: 4056558 - DNA, 25 bp, Homo sapien
gaagtcattagagctttgcaggcca

SEQ ID NO: 4056559 - DNA, 25 bp, Homo sapien
tctgggcacataatcaaggagacag

SEQ ID NO: 4056560 - DNA, 25 bp, Homo sapien
gatcttgatcttgggctgagacctg

SEQ ID NO: 4056561 - DNA, 25 bp, Homo sapien
gaatagcatgtgtaggcccttcagt

SEQ ID NO: 4056562 - DNA, 25 bp, Homo sapien
tacacctcaaggctgaagttggggg

SEQ ID NO: 4056563 - DNA, 25 bp, Homo sapien
cacctcaaggctgaagttggggggc

SEQ ID NO: 4056564 - DNA, 25 bp, Homo sapien
ctcaaggctgaagttggggggcctt

SEQ ID NO: 4056565 - DNA, 25 bp, Homo sapien
ctacacctcaaggctgaagttgggg

SEQ ID NO: 4056566 - DNA, 25 bp, Homo sapien
tacatgatatgaagacacccatttt

SEQ ID NO: 4056567 - DNA, 25 bp, Homo sapien
acatgatatgaagacacccattttc

SEQ ID NO: 4056568 - DNA, 25 bp, Homo sapien
gtacatgatatgaagacacccattt

SEQ ID NO: 4056569 - DNA, 25 bp, Homo sapien
cattggtcaacccaagcacatgata

SEQ ID NO: 4056570 - DNA, 25 bp, Homo sapien
tgatacaactgctcattcatctgct

SEQ ID NO: 4056571 - DNA, 25 bp, Homo sapien
gtgtttactcaattccccaagtcta

SEQ ID NO: 4056572 - DNA, 25 bp, Homo sapien
cccaagtctatcattcattggtcaa

SEQ ID NO: 4056573 - DNA, 25 bp, Homo sapien
tgtcttatgaccaagaaccatggca

SEQ ID NO: 4056574 - DNA, 25 bp, Homo sapien
gacgcagtaagcaattaagtctgga

SEQ ID NO: 4056575 - DNA, 25 bp, Homo sapien
gggtagggagattccaacactggct

SEQ ID NO: 4056576 - DNA, 25 bp, Homo sapien
cagcggaaggacacgtgggagaaaa

SEQ ID NO: 4056577 - DNA, 25 bp, Homo sapien
taaggcctagagtagcatccattcc

SEQ ID NO: 4056578 - DNA, 25 bp, Homo sapien
aaagcgggcgtgctgtcctaggaat

SEQ ID NO: 4056579 - DNA, 25 bp, Homo sapien
gaggagctgccatgactataactaa

SEQ ID NO: 4056580 - DNA, 25 bp, Homo sapien
cctaactcaggtgtgccaaagccaa

SEQ ID NO: 4056581 - DNA, 25 bp, Homo sapien
gggactctaattgaaccatctttgg

SEQ ID NO: 4056582 - DNA, 25 bp, Homo sapien
ttagctcttgcaatcctgggactct

SEQ ID NO: 4056583 - DNA, 25 bp, Homo sapien
cattccattcctgagtagaagacgg

SEQ ID NO: 4056584 - DNA, 25 bp, Homo sapien
tggctgctgcaattcaaaaacccgt

SEQ ID NO: 4056585 - DNA, 25 bp, Homo sapien
tgggaggccaaaacgacaaatgtcc

SEQ ID NO: 4056586 - DNA, 25 bp, Homo sapien
aacgacaaatgtccagcacaggctt

SEQ ID NO: 4056587 - DNA, 25 bp, Homo sapien
attctgggaggccaaaacgacaaat

SEQ ID NO: 4056588 - DNA, 25 bp, Homo sapien
tctgggaggccaaaacgacaaatgt

SEQ ID NO: 4056589 - DNA, 25 bp, Homo sapien
ctagctgggaagaagtcccaaaggc

SEQ ID NO: 4056590 - DNA, 25 bp, Homo sapien
taatagggtctgtccccactgtgga

SEQ ID NO: 4056591 - DNA, 25 bp, Homo sapien
tcctctggtgccgaattaacgaaga

SEQ ID NO: 4056592 - DNA, 25 bp, Homo sapien
cacattacgtgtttctgggaagtca

SEQ ID NO: 4056593 - DNA, 25 bp, Homo sapien
taacaaactcggaactactcgtgaa

SEQ ID NO: 4056594 - DNA, 25 bp, Homo sapien
cacaaataatgccacctgagaacta

SEQ ID NO: 4056595 - DNA, 25 bp, Homo sapien
aaacacaaataatgccacctgagaa

SEQ ID NO: 4056596 - DNA, 25 bp, Homo sapien
ctgacataagagatagaaaacacaa

SEQ ID NO: 4056597 - DNA, 25 bp, Homo sapien
caaataatgccacctgagaactata

SEQ ID NO: 4056598 - DNA, 25 bp, Homo sapien
tggttaatcaagttcatcctatgag

SEQ ID NO: 4056599 - DNA, 25 bp, Homo sapien
ttcatcctatgagtgtgagttaaag

SEQ ID NO: 4056600 - DNA, 25 bp, Homo sapien
tccgaaggagaatgttcagaggaga

SEQ ID NO: 4056601 - DNA, 25 bp, Homo sapien
gactcatgtgatggttaatcaagtt

SEQ ID NO: 4056602 - DNA, 25 bp, Homo sapien
gagattgaagtaaacaaggtaacca

SEQ ID NO: 4056603 - DNA, 25 bp, Homo sapien
tgagattgaagtaaacaaggtaacc

SEQ ID NO: 4056604 - DNA, 25 bp, Homo sapien
ctgagattgaagtaaacaaggtaac

SEQ ID NO: 4056605 - DNA, 25 bp, Homo sapien
aacttcttaaacaacgttcagcaca

SEQ ID NO: 4056606 - DNA, 25 bp, Homo sapien
gaataaatccatcccaaccaaggag

SEQ ID NO: 4056607 - DNA, 25 bp, Homo sapien
caaaaactgctcctgaataaatcca

SEQ ID NO: 4056608 - DNA, 25 bp, Homo sapien
acgttcagcacatggcaagttgctc

SEQ ID NO: 4056609 - DNA, 25 bp, Homo sapien
tcaaggattgcagatgagacgtact

SEQ ID NO: 4056610 - DNA, 25 bp, Homo sapien
caattgttggttctaaatctgcctc

SEQ ID NO: 4056611 - DNA, 25 bp, Homo sapien
gagacgtactgagtgattacatgtt

SEQ ID NO: 4056612 - DNA, 25 bp, Homo sapien
tcagaaaggaacaatggattcaagg

SEQ ID NO: 4056613 - DNA, 25 bp, Homo sapien
tacagacgtttttggtcctctctgc

SEQ ID NO: 4056614 - DNA, 25 bp, Homo sapien
gggatcatcctgtgcttccaggccc

SEQ ID NO: 4056615 - DNA, 25 bp, Homo sapien
cctctctccaaaagtgagatcagtg

SEQ ID NO: 4056616 - DNA, 25 bp, Homo sapien
agtgagatcagtgcaggtttgggaa

SEQ ID NO: 4056617 - DNA, 25 bp, Homo sapien
ccattctgtcttggtgaagtgcaca

SEQ ID NO: 4056618 - DNA, 25 bp, Homo sapien
taaaacaacaggttcctgctgcccc

SEQ ID NO: 4056619 - DNA, 25 bp, Homo sapien
ctgctgccccagagccaatcctctg

SEQ ID NO: 4056620 - DNA, 25 bp, Homo sapien
ctccgggccagagtgtggggcagag

SEQ ID NO: 4056621 - DNA, 25 bp, Homo sapien
caatcctctggctccgggccagagt

SEQ ID NO: 4056622 - DNA, 25 bp, Homo sapien
ggtattgagctttcagaggcatggc

SEQ ID NO: 4056623 - DNA, 25 bp, Homo sapien
ctggtattgagctttcagaggcatg

SEQ ID NO: 4056624 - DNA, 25 bp, Homo sapien
gagctttcagaggcatggctgccat

SEQ ID NO: 4056625 - DNA, 25 bp, Homo sapien
attgagctttcagaggcatggctgc

SEQ ID NO: 4056626 - DNA, 25 bp, Homo sapien
ctggtctccctcttagcaggcaaag

SEQ ID NO: 4056627 - DNA, 25 bp, Homo sapien
tggtctccctcttagcaggcaaagg

SEQ ID NO: 4056628 - DNA, 25 bp, Homo sapien
cctggtctccctcttagcaggcaaa

SEQ ID NO: 4056629 - DNA, 25 bp, Homo sapien
aacagaaagcggtgcgtgaacggaa

SEQ ID NO: 4056630 - DNA, 25 bp, Homo sapien
gaacggaagtgcgtcactactttgg

SEQ ID NO: 4056631 - DNA, 25 bp, Homo sapien
tactttggccttgcacccaggctca

SEQ ID NO: 4056632 - DNA, 25 bp, Homo sapien
tcacacgcgtactctctaggatgcc

SEQ ID NO: 4056633 - DNA, 25 bp, Homo sapien
gcttgcagctgtacagcctccaaga

SEQ ID NO: 4056634 - DNA, 25 bp, Homo sapien
tccagttcgtgagcggcaaagcttg

SEQ ID NO: 4056635 - DNA, 25 bp, Homo sapien
tcccacccggccacaattgtatagt

SEQ ID NO: 4056636 - DNA, 25 bp, Homo sapien
caactgtgggtccttgcactttggc

SEQ ID NO: 4056637 - DNA, 25 bp, Homo sapien
ggactcaaaacaggccagaagcgca

SEQ ID NO: 4056638 - DNA, 25 bp, Homo sapien
gcgcggactcaaaacaggccagaag

SEQ ID NO: 4056639 - DNA, 25 bp, Homo sapien
ctttgagcgcggactcaaaacaggc

SEQ ID NO: 4056640 - DNA, 25 bp, Homo sapien
tgagcgcggactcaaaacaggccag

SEQ ID NO: 4056641 - DNA, 25 bp, Homo sapien
tagcgagaacggttaggaggccgga

SEQ ID NO: 4056642 - DNA, 25 bp, Homo sapien
cgcttggaggccagaagtgcgtcat

SEQ ID NO: 4056643 - DNA, 25 bp, Homo sapien
ggtgcaacttttccgcatctcggtg

SEQ ID NO: 4056644 - DNA, 25 bp, Homo sapien
cacggctgctctttctacggtgcaa

SEQ ID NO: 4056645 - DNA, 25 bp, Homo sapien
acatcatatcatttctactgtcagt

SEQ ID NO: 4056646 - DNA, 25 bp, Homo sapien
tactgtcagtacttcactgtgtttc

SEQ ID NO: 4056647 - DNA, 25 bp, Homo sapien
ctggagttgaactcagacatcatat

SEQ ID NO: 4056648 - DNA, 25 bp, Homo sapien
tgctggagttgaactcagacatcat

SEQ ID NO: 4056649 - DNA, 25 bp, Homo sapien
cttgttcgctgtaaaggttctctgt

SEQ ID NO: 4056650 - DNA, 25 bp, Homo sapien
ggctcatcaaggtgttcacagcctg

SEQ ID NO: 4056651 - DNA, 25 bp, Homo sapien
tcgctgtaaaggttctctgtctact

SEQ ID NO: 4056652 - DNA, 25 bp, Homo sapien
gctcatcaaggtgttcacagcctgt

SEQ ID NO: 4056653 - DNA, 25 bp, Homo sapien
ctagtgaccagaggatgcctttctt

SEQ ID NO: 4056654 - DNA, 25 bp, Homo sapien
caccgtatactagtgaccagaggat

SEQ ID NO: 4056655 - DNA, 25 bp, Homo sapien
cgtatactagtgaccagaggatgcc

SEQ ID NO: 4056656 - DNA, 25 bp, Homo sapien
tactagtgaccagaggatgcctttc

SEQ ID NO: 4056657 - DNA, 25 bp, Homo sapien
cctaaatgggtccaaaagagcccag

SEQ ID NO: 4056658 - DNA, 25 bp, Homo sapien
cagagagcagatcaggctgttctga

SEQ ID NO: 4056659 - DNA, 25 bp, Homo sapien
tattttgtagatggtcccctggtgc

SEQ ID NO: 4056660 - DNA, 25 bp, Homo sapien
ccctggtgccaactgactcgttcag

SEQ ID NO: 4056661 - DNA, 25 bp, Homo sapien
ctcttcagtctttgcggggagggag

SEQ ID NO: 4056662 - DNA, 25 bp, Homo sapien
tcttcagtctttgcggggagggagg

SEQ ID NO: 4056663 - DNA, 25 bp, Homo sapien
cttcagtctttgcggggagggagga

SEQ ID NO: 4056664 - DNA, 25 bp, Homo sapien
ttcagtctttgcggggagggaggac

SEQ ID NO: 4056665 - DNA, 25 bp, Homo sapien
cattcctcatcttccgaccacattt

SEQ ID NO: 4056666 - DNA, 25 bp, Homo sapien
tcactttatggaccacctcattcct

SEQ ID NO: 4056667 - DNA, 25 bp, Homo sapien
ttatggaccacctcattcctcatct

SEQ ID NO: 4056668 - DNA, 25 bp, Homo sapien
tcttccgaccacatttcttctcctc

SEQ ID NO: 4056669 - DNA, 25 bp, Homo sapien
cctctgggattcattggttcttaaa

SEQ ID NO: 4056670 - DNA, 25 bp, Homo sapien
tactgaagcacggttaagatggtgt

SEQ ID NO: 4056671 - DNA, 25 bp, Homo sapien
aaaagaaggtggtagttaatgcaga

SEQ ID NO: 4056672 - DNA, 25 bp, Homo sapien
aatttggcccatgggaacctctggg

SEQ ID NO: 4056673 - DNA, 25 bp, Homo sapien
ttctctagtgctgaagaatggctca

SEQ ID NO: 4056674 - DNA, 25 bp, Homo sapien
cttctctagtgctgaagaatggctc

SEQ ID NO: 4056675 - DNA, 25 bp, Homo sapien
tctctagtgctgaagaatggctcat

SEQ ID NO: 4056676 - DNA, 25 bp, Homo sapien
caatttggcctatagagagcatctg

SEQ ID NO: 4056677 - DNA, 25 bp, Homo sapien
cagcatctgtaggaggataaaagcc

SEQ ID NO: 4056678 - DNA, 25 bp, Homo sapien
taacagttcaaggtagcatctctag

SEQ ID NO: 4056679 - DNA, 25 bp, Homo sapien
tgtggactaggcctcaacagacttg

SEQ ID NO: 4056680 - DNA, 25 bp, Homo sapien
cttacataggcacagtataatctgg

SEQ ID NO: 4056681 - DNA, 25 bp, Homo sapien
caaatgataactgattccctcaggg

SEQ ID NO: 4056682 - DNA, 25 bp, Homo sapien
taagaattctgtaatgctgggtaga

SEQ ID NO: 4056683 - DNA, 25 bp, Homo sapien
cagcggtggcatacgggaaactgaa

SEQ ID NO: 4056684 - DNA, 25 bp, Homo sapien
ccttgacatggtgcatttgaggccc

SEQ ID NO: 4056685 - DNA, 25 bp, Homo sapien
gagtcactctagcagcgcagagcaa

SEQ ID NO: 4056686 - DNA, 25 bp, Homo sapien
ctagtccagccttccctagatggga

SEQ ID NO: 4056687 - DNA, 25 bp, Homo sapien
tgcttgctctagtacaggcgtgctc

SEQ ID NO: 4056688 - DNA, 25 bp, Homo sapien
ggctgccttcagcacaatggtagtg

SEQ ID NO: 4056689 - DNA, 25 bp, Homo sapien
ctatttatcacactcctcctggctg

SEQ ID NO: 4056690 - DNA, 25 bp, Homo sapien
gaccactcggatgaaattcgggtac

SEQ ID NO: 4056691 - DNA, 25 bp, Homo sapien
ggatccggctgcacgcctccagcat

SEQ ID NO: 4056692 - DNA, 25 bp, Homo sapien
ggaaatgttccatctcaattccaac

SEQ ID NO: 4056693 - DNA, 25 bp, Homo sapien
gtggacagactgctcagcaactaac

SEQ ID NO: 4056694 - DNA, 25 bp, Homo sapien
gctcagcaactaaccgctccgtgaa

SEQ ID NO: 4056695 - DNA, 25 bp, Homo sapien
cgtgaactccacatcgttctcaaat

SEQ ID NO: 4056696 - DNA, 25 bp, Homo sapien
ggccaacttatcagaaggagggaga

SEQ ID NO: 4056697 - DNA, 25 bp, Homo sapien
gaggccaacttatcagaaggaggga

SEQ ID NO: 4056698 - DNA, 25 bp, Homo sapien
aggccaacttatcagaaggagggag

SEQ ID NO: 4056699 - DNA, 25 bp, Homo sapien
ggaaccagtatcactcccagttgag

SEQ ID NO: 4056700 - DNA, 25 bp, Homo sapien
aagagacactactggcattagggcc

SEQ ID NO: 4056701 - DNA, 25 bp, Homo sapien
tttatggcatgagactagcccaccc

SEQ ID NO: 4056702 - DNA, 25 bp, Homo sapien
tagggccaggcaactctttatggca

SEQ ID NO: 4056703 - DNA, 25 bp, Homo sapien
gccaacgccccataacagagatcag

SEQ ID NO: 4056704 - DNA, 25 bp, Homo sapien
agggatggcagccaacgccccataa

SEQ ID NO: 4056705 - DNA, 25 bp, Homo sapien
ggtacatagccccagaagggcggac

SEQ ID NO: 4056706 - DNA, 25 bp, Homo sapien
atagccccagaagggcggactggcc

SEQ ID NO: 4056707 - DNA, 25 bp, Homo sapien
tgcgacataggatgcttttcagagc

SEQ ID NO: 4056708 - DNA, 25 bp, Homo sapien
gggtcccaaaatgcgctgactcagc

SEQ ID NO: 4056709 - DNA, 25 bp, Homo sapien
agagtgttgtggtaaaactctcccg

SEQ ID NO: 4056710 - DNA, 25 bp, Homo sapien
agagctccctggacaatggtacagg

SEQ ID NO: 4056711 - DNA, 25 bp, Homo sapien
tcggtcatgaatgaggatccagccc

SEQ ID NO: 4056712 - DNA, 25 bp, Homo sapien
ggttcatatttgcaatccgaaaaca

SEQ ID NO: 4056713 - DNA, 25 bp, Homo sapien
aatgtctcttcggtcatgaatgagg

SEQ ID NO: 4056714 - DNA, 25 bp, Homo sapien
gacatcggtgctgagggtggccagt

SEQ ID NO: 4056715 - DNA, 25 bp, Homo sapien
atcaggtcaaatcaggttttgtaac

SEQ ID NO: 4056716 - DNA, 25 bp, Homo sapien
gctgtaatgaaacgattaggagttg

SEQ ID NO: 4056717 - DNA, 25 bp, Homo sapien
tttcagaaaactggctaaggagttg

SEQ ID NO: 4056718 - DNA, 25 bp, Homo sapien
aaaaagtgcagggatgctgatttgc

SEQ ID NO: 4056719 - DNA, 25 bp, Homo sapien
atggggacacactgccgtgcagcca

SEQ ID NO: 4056720 - DNA, 25 bp, Homo sapien
tcatcagctaagatggggacacact

SEQ ID NO: 4056721 - DNA, 25 bp, Homo sapien
tgtctccatagatctcatcagctaa

SEQ ID NO: 4056722 - DNA, 25 bp, Homo sapien
catgtctccatagatctcatcagct

SEQ ID NO: 4056723 - DNA, 25 bp, Homo sapien
tctcctgggagtgatgaagagacaa

SEQ ID NO: 4056724 - DNA, 25 bp, Homo sapien
taacatactcttccagagtgcagag

SEQ ID NO: 4056725 - DNA, 25 bp, Homo sapien
gaccctatcttcaacgtgatgggag

SEQ ID NO: 4056726 - DNA, 25 bp, Homo sapien
taagtaactagatatttcagaccct

SEQ ID NO: 4056727 - DNA, 25 bp, Homo sapien
tccagttgtttcaggtcaatttccc

SEQ ID NO: 4056728 - DNA, 25 bp, Homo sapien
gaagatgacgtttgctgaacactga

SEQ ID NO: 4056729 - DNA, 25 bp, Homo sapien
gattattgacaatgagacaagctgt

SEQ ID NO: 4056730 - DNA, 25 bp, Homo sapien
tcatcaattagatattccagttgtt

SEQ ID NO: 4056731 - DNA, 25 bp, Homo sapien
gagagaaaccaggtcttggaaccag

SEQ ID NO: 4056732 - DNA, 25 bp, Homo sapien
tgggttggccaacacagctaaacaa

SEQ ID NO: 4056733 - DNA, 25 bp, Homo sapien
aaaggtcaatagcttggctgcagcc

SEQ ID NO: 4056734 - DNA, 25 bp, Homo sapien
tcagccagagtcttgtagagagaga

SEQ ID NO: 4056735 - DNA, 25 bp, Homo sapien
gcctcaggacagtggtaataagaag

SEQ ID NO: 4056736 - DNA, 25 bp, Homo sapien
aagcaatctcctcccgactggatag

SEQ ID NO: 4056737 - DNA, 25 bp, Homo sapien
ataagaagcaatctcctcccgactg

SEQ ID NO: 4056738 - DNA, 25 bp, Homo sapien
caatctcctcccgactggataggaa

SEQ ID NO: 4056739 - DNA, 25 bp, Homo sapien
ttgtatttaagcatcccgagacccg

SEQ ID NO: 4056740 - DNA, 25 bp, Homo sapien
gaaaataggccttcaatacatagag

SEQ ID NO: 4056741 - DNA, 25 bp, Homo sapien
gataggataggagctttacttgaca

SEQ ID NO: 4056742 - DNA, 25 bp, Homo sapien
catttaggacctagaggctcagcaa

SEQ ID NO: 4056743 - DNA, 25 bp, Homo sapien
gccattatatttgcccgagtccagg

SEQ ID NO: 4056744 - DNA, 25 bp, Homo sapien
gggcatagccattatatttgcccga

SEQ ID NO: 4056745 - DNA, 25 bp, Homo sapien
gagtccagggcatctttcattgcct

SEQ ID NO: 4056746 - DNA, 25 bp, Homo sapien
tatatttgcccgagtccagggcatc

SEQ ID NO: 4056747 - DNA, 25 bp, Homo sapien
tgtaggcaggtttccaaacacagta

SEQ ID NO: 4056748 - DNA, 25 bp, Homo sapien
ggtctgtaggcaggtttccaaacac

SEQ ID NO: 4056749 - DNA, 25 bp, Homo sapien
gcaggtttccaaacacagtagggtc

SEQ ID NO: 4056750 - DNA, 25 bp, Homo sapien
taggcaggtttccaaacacagtagg

SEQ ID NO: 4056751 - DNA, 25 bp, Homo sapien
tcccatgttcagtactcagactcac

SEQ ID NO: 4056752 - DNA, 25 bp, Homo sapien
gagccaagaggttattctcccatgt

SEQ ID NO: 4056753 - DNA, 25 bp, Homo sapien
tattctcccatgttcagtactcaga

SEQ ID NO: 4056754 - DNA, 25 bp, Homo sapien
acaaaaggagccaagaggttattct

SEQ ID NO: 4056755 - DNA, 25 bp, Homo sapien
cccaactgccatcttctccaaccag

SEQ ID NO: 4056756 - DNA, 25 bp, Homo sapien
ccaactgccatcttctccaaccagc

SEQ ID NO: 4056757 - DNA, 25 bp, Homo sapien
ccccaactgccatcttctccaacca

SEQ ID NO: 4056758 - DNA, 25 bp, Homo sapien
agtagaggaggacaatgacagcccc

SEQ ID NO: 4056759 - DNA, 25 bp, Homo sapien
ggaggacaatgacagcccctcagta

SEQ ID NO: 4056760 - DNA, 25 bp, Homo sapien
aatgacagcccctcagtagtgtccc

SEQ ID NO: 4056761 - DNA, 25 bp, Homo sapien
aggacaatgacagcccctcagtagt

SEQ ID NO: 4056762 - DNA, 25 bp, Homo sapien
agagcttctcccaccaacgttgaca

SEQ ID NO: 4056763 - DNA, 25 bp, Homo sapien
tgacatgcacgtccagaattgaggg

SEQ ID NO: 4056764 - DNA, 25 bp, Homo sapien
catttttcccggcacagagcttctc

SEQ ID NO: 4056765 - DNA, 25 bp, Homo sapien
cacaatggctcggatggggttgaaa

SEQ ID NO: 4056766 - DNA, 25 bp, Homo sapien
ttctttgacaggttacaggggcaat

SEQ ID NO: 4056767 - DNA, 25 bp, Homo sapien
ttagctcttctttgacaggttacag

SEQ ID NO: 4056768 - DNA, 25 bp, Homo sapien
agctcttctttgacaggttacaggg

SEQ ID NO: 4056769 - DNA, 25 bp, Homo sapien
caaccccgaaagctcccttagctct

SEQ ID NO: 4056770 - DNA, 25 bp, Homo sapien
tacagatcaaaaaacagcaagcagc

SEQ ID NO: 4056771 - DNA, 25 bp, Homo sapien
tagtgccgctgacgcagaatctgca

SEQ ID NO: 4056772 - DNA, 25 bp, Homo sapien
gagctgctgtaccagaaggtcatca

SEQ ID NO: 4056773 - DNA, 25 bp, Homo sapien
tcgcctcggctttggcagttgacaa

SEQ ID NO: 4056774 - DNA, 25 bp, Homo sapien
atatattttgttcccaaaggatagt

SEQ ID NO: 4056775 - DNA, 25 bp, Homo sapien
gatactgaatatattttgttcccaa

SEQ ID NO: 4056776 - DNA, 25 bp, Homo sapien
ctgctgtcctcctgatactgaatat

SEQ ID NO: 4056777 - DNA, 25 bp, Homo sapien
cctcctgatactgaatatattttgt

SEQ ID NO: 4056778 - DNA, 25 bp, Homo sapien
agagttccagagttccaccctcctt

SEQ ID NO: 4056779 - DNA, 25 bp, Homo sapien
ttcatccaccttccttgggagattg

SEQ ID NO: 4056780 - DNA, 25 bp, Homo sapien
tccaccttccttgggagattgtgaa

SEQ ID NO: 4056781 - DNA, 25 bp, Homo sapien
ccctccttggtcctagcctgcttct

SEQ ID NO: 4056782 - DNA, 25 bp, Homo sapien
gatagggcacacagcgaacatcagt

SEQ ID NO: 4056783 - DNA, 25 bp, Homo sapien
tcagtgtgcagaaggtcgcccaggc

SEQ ID NO: 4056784 - DNA, 25 bp, Homo sapien
acaccaaggtacgattgggagaggc

SEQ ID NO: 4056785 - DNA, 25 bp, Homo sapien
ccttggcaaggactgtccatgtgtc

SEQ ID NO: 4056786 - DNA, 25 bp, Homo sapien
gaaggtcctagaatttggccccatc

SEQ ID NO: 4056787 - DNA, 25 bp, Homo sapien
tatgctgttccacaaaccatcctgt

SEQ ID NO: 4056788 - DNA, 25 bp, Homo sapien
tgtctgcttgtttaccaggcttcct

SEQ ID NO: 4056789 - DNA, 25 bp, Homo sapien
tctgcagaagtcaagagcgaaggtc

SEQ ID NO: 4056790 - DNA, 25 bp, Homo sapien
ggggcgctgcgacctccgcgccggg

SEQ ID NO: 4056791 - DNA, 25 bp, Homo sapien
ggcgctgcgacctccgcgccgggga

SEQ ID NO: 4056792 - DNA, 25 bp, Homo sapien
gctgcgacctccgcgccggggacac

SEQ ID NO: 4056793 - DNA, 25 bp, Homo sapien
gaagggagaccccgggcgccgcaga

SEQ ID NO: 4056794 - DNA, 25 bp, Homo sapien
tccatacaatgaagtcgaaggccac

SEQ ID NO: 4056795 - DNA, 25 bp, Homo sapien
tctcccagaaggacacctaagaagg

SEQ ID NO: 4056796 - DNA, 25 bp, Homo sapien
taaaagctgacctcggacaagaaga

SEQ ID NO: 4056797 - DNA, 25 bp, Homo sapien
tccctgtgggtgaagattggcagac

SEQ ID NO: 4056798 - DNA, 25 bp, Homo sapien
cactgagctagagcaggttcggcag

SEQ ID NO: 4056799 - DNA, 25 bp, Homo sapien
cagcccggaagttacagtgatgcac

SEQ ID NO: 4056800 - DNA, 25 bp, Homo sapien
tcgtgatcatgtacggcgccagcgt

SEQ ID NO: 4056801 - DNA, 25 bp, Homo sapien
tccaaggagccaagagtcgaacaat

SEQ ID NO: 4056802 - DNA, 25 bp, Homo sapien
agggaatgtggtttcatgtgtttgt

SEQ ID NO: 4056803 - DNA, 25 bp, Homo sapien
cagggaatgtggtttcatgtgtttg

SEQ ID NO: 4056804 - DNA, 25 bp, Homo sapien
tgtcagggaatgtggtttcatgtgt

SEQ ID NO: 4056805 - DNA, 25 bp, Homo sapien
tcagggaatgtggtttcatgtgttt

SEQ ID NO: 4056806 - DNA, 25 bp, Homo sapien
tcatgattgggagtcggaaagcctc

SEQ ID NO: 4056807 - DNA, 25 bp, Homo sapien
ttaaggtcacgtggatgcaagcagt

SEQ ID NO: 4056808 - DNA, 25 bp, Homo sapien
caagtaccggcttttgctgaaggtc

SEQ ID NO: 4056809 - DNA, 25 bp, Homo sapien
caaaaccgtaagatatgagcccact

SEQ ID NO: 4056810 - DNA, 25 bp, Homo sapien
ggtcatgaggcacaacaaactggtc

SEQ ID NO: 4056811 - DNA, 25 bp, Homo sapien
atagtgctgtgtcgaactcctccgg

SEQ ID NO: 4056812 - DNA, 25 bp, Homo sapien
ccagcatccgggtacagcaggttac

SEQ ID NO: 4056813 - DNA, 25 bp, Homo sapien
tcaacgggctggtcatcatcactgt

SEQ ID NO: 4056814 - DNA, 25 bp, Homo sapien
agtcaagctaaagctacttgctgga

SEQ ID NO: 4056815 - DNA, 25 bp, Homo sapien
tgatggctttttggtccttcaccct

SEQ ID NO: 4056816 - DNA, 25 bp, Homo sapien
tacttgctggatcggcagtgtcagg

SEQ ID NO: 4056817 - DNA, 25 bp, Homo sapien
acaggactgcttggcacgtgccaac

SEQ ID NO: 4056818 - DNA, 25 bp, Homo sapien
tgcaaagtctctagctcaattatac

SEQ ID NO: 4056819 - DNA, 25 bp, Homo sapien
tacttgctacaattcctggcttgag

SEQ ID NO: 4056820 - DNA, 25 bp, Homo sapien
gccattttctggctacagacactca

SEQ ID NO: 4056821 - DNA, 25 bp, Homo sapien
tgttaacgaggaacagacactagca

SEQ ID NO: 4056822 - DNA, 25 bp, Homo sapien
ggcgcgggagctcctcatttcggtc

SEQ ID NO: 4056823 - DNA, 25 bp, Homo sapien
ggtgttagccatgaaaactgtgtca

SEQ ID NO: 4056824 - DNA, 25 bp, Homo sapien
gccatcgtacactgcagcaggcgcg

SEQ ID NO: 4056825 - DNA, 25 bp, Homo sapien
tctaaaagcacatctgccatcgtac

SEQ ID NO: 4056826 - DNA, 25 bp, Homo sapien
gctccagaaggttgacgtaactgta

SEQ ID NO: 4056827 - DNA, 25 bp, Homo sapien
tctcagccagtccatggctccagaa

SEQ ID NO: 4056828 - DNA, 25 bp, Homo sapien
ttctgatcaattttcagggttgtga

SEQ ID NO: 4056829 - DNA, 25 bp, Homo sapien
taactgtagaatctgtggttggcaa

SEQ ID NO: 4056830 - DNA, 25 bp, Homo sapien
cttgtaatgtagcaggcaaagcctc

SEQ ID NO: 4056831 - DNA, 25 bp, Homo sapien
ttccagtcaggtcaaggtcttgtaa

SEQ ID NO: 4056832 - DNA, 25 bp, Homo sapien
caagtcgttgcaacttaggtctaca

SEQ ID NO: 4056833 - DNA, 25 bp, Homo sapien
gcctctggaatcaggatttctgtca

SEQ ID NO: 4056834 - DNA, 25 bp, Homo sapien
aagcttgttgccacttaggttcagt

SEQ ID NO: 4056835 - DNA, 25 bp, Homo sapien
taggttcagttcctccaattgctcc

SEQ ID NO: 4056836 - DNA, 25 bp, Homo sapien
tgtgcaacaagggtgtgcagccttt

SEQ ID NO: 4056837 - DNA, 25 bp, Homo sapien
tctgaggcaactgcagtatttctgg

SEQ ID NO: 4056838 - DNA, 25 bp, Homo sapien
aatttctatacttacccattcatga

SEQ ID NO: 4056839 - DNA, 25 bp, Homo sapien
cattcatgacattaactcatctcca

SEQ ID NO: 4056840 - DNA, 25 bp, Homo sapien
ttatcaagttcttattatacacaca

SEQ ID NO: 4056841 - DNA, 25 bp, Homo sapien
acccggcccatcactaagattcttt

SEQ ID NO: 4056842 - DNA, 25 bp, Homo sapien
actgctgttaacatggagagaaagt

SEQ ID NO: 4056843 - DNA, 25 bp, Homo sapien
aaataataaactgctgttaacatgg

SEQ ID NO: 4056844 - DNA, 25 bp, Homo sapien
taaactgctgttaacatggagagaa

SEQ ID NO: 4056845 - DNA, 25 bp, Homo sapien
aaactgaaaaatagagacaaacagg

SEQ ID NO: 4056846 - DNA, 25 bp, Homo sapien
cagtgcaggcggatggtaaagactc

SEQ ID NO: 4056847 - DNA, 25 bp, Homo sapien
caaggtgcaagattcgcaggtgcag

SEQ ID NO: 4056848 - DNA, 25 bp, Homo sapien
ggtgccctaccaggacaggtatgca

SEQ ID NO: 4056849 - DNA, 25 bp, Homo sapien
gactccagactatttgcagatgcat

SEQ ID NO: 4056850 - DNA, 25 bp, Homo sapien
tgtctggcagcctcgtgagtgcatt

SEQ ID NO: 4056851 - DNA, 25 bp, Homo sapien
taccagtgttggaaggttttgcaca

SEQ ID NO: 4056852 - DNA, 25 bp, Homo sapien
tgctgaagatccagcacctcgaggg

SEQ ID NO: 4056853 - DNA, 25 bp, Homo sapien
gcacatgattgtgtcccagcatcag

SEQ ID NO: 4056854 - DNA, 25 bp, Homo sapien
gctcacatctaatacttctatcttc

SEQ ID NO: 4056855 - DNA, 25 bp, Homo sapien
aacctctgtgagaagattatagctc

SEQ ID NO: 4056856 - DNA, 25 bp, Homo sapien
gagaagattatagctcacatctaat

SEQ ID NO: 4056857 - DNA, 25 bp, Homo sapien
acgggaacctctgtgagaagattat

SEQ ID NO: 4056858 - DNA, 25 bp, Homo sapien
acaggcccagtcagggacacactct

SEQ ID NO: 4056859 - DNA, 25 bp, Homo sapien
cagtcagggacacactctagcaggt

SEQ ID NO: 4056860 - DNA, 25 bp, Homo sapien
ggcccagtcagggacacactctagc

SEQ ID NO: 4056861 - DNA, 25 bp, Homo sapien
tcacaggcccagtcagggacacact

SEQ ID NO: 4056862 - DNA, 25 bp, Homo sapien
tactggatagacgttcactgctgtc

SEQ ID NO: 4056863 - DNA, 25 bp, Homo sapien
ctgggtactggatagacgttcactg

SEQ ID NO: 4056864 - DNA, 25 bp, Homo sapien
ggatagacgttcactgctgtcagcc

SEQ ID NO: 4056865 - DNA, 25 bp, Homo sapien
ggtactggatagacgttcactgctg

SEQ ID NO: 4056866 - DNA, 25 bp, Homo sapien
ctaagatccaagtcagtcagtcggt

SEQ ID NO: 4056867 - DNA, 25 bp, Homo sapien
ttggaactggcatagagggtccgaa

SEQ ID NO: 4056868 - DNA, 25 bp, Homo sapien
gtcagtcggttgtcccgcagatcca

SEQ ID NO: 4056869 - DNA, 25 bp, Homo sapien
gctgttccaagctgcataaggagct

SEQ ID NO: 4056870 - DNA, 25 bp, Homo sapien
gaggccatatctacgaacagttaaa

SEQ ID NO: 4056871 - DNA, 25 bp, Homo sapien
tgggcactaagtaggacaaaggaac

SEQ ID NO: 4056872 - DNA, 25 bp, Homo sapien
tgagtcagtgagtagcaaagcagtc

SEQ ID NO: 4056873 - DNA, 25 bp, Homo sapien
cctaataatgtcaggtgggcactaa

SEQ ID NO: 4056874 - DNA, 25 bp, Homo sapien
gaaatgctaaaatccaatactgaca

SEQ ID NO: 4056875 - DNA, 25 bp, Homo sapien
tctatcacatggtacaactacctga

SEQ ID NO: 4056876 - DNA, 25 bp, Homo sapien
gtaaataacagaacatccagtaggt

SEQ ID NO: 4056877 - DNA, 25 bp, Homo sapien
tccagtaggtgtctttttaccagct

SEQ ID NO: 4056878 - DNA, 25 bp, Homo sapien
tcagcacccctaagttcaggacttc

SEQ ID NO: 4056879 - DNA, 25 bp, Homo sapien
cctcaggaatttgactaaagttgtt

SEQ ID NO: 4056880 - DNA, 25 bp, Homo sapien
tgttgaaggaaattcccaaggagga

SEQ ID NO: 4056881 - DNA, 25 bp, Homo sapien
gatatggttcatcctattcagcacc

SEQ ID NO: 4056882 - DNA, 25 bp, Homo sapien
taaagtagtcagaaagttgccatca

SEQ ID NO: 4056883 - DNA, 25 bp, Homo sapien
tcaggtaaagtagtcagaaagttgc

SEQ ID NO: 4056884 - DNA, 25 bp, Homo sapien
gaaagttgccatcaagacagagggt

SEQ ID NO: 4056885 - DNA, 25 bp, Homo sapien
agtcagaaagttgccatcaagacag

SEQ ID NO: 4056886 - DNA, 25 bp, Homo sapien
ttagcagattgccaatttgacttgg

SEQ ID NO: 4056887 - DNA, 25 bp, Homo sapien
gaaaggttgagctcagtcagggtag

SEQ ID NO: 4056888 - DNA, 25 bp, Homo sapien
cttggtaggtcatgaaatccattac

SEQ ID NO: 4056889 - DNA, 25 bp, Homo sapien
tagagatctcgcataacaatatagg

SEQ ID NO: 4056890 - DNA, 25 bp, Homo sapien
ccataagatactgattatgagttgg

SEQ ID NO: 4056891 - DNA, 25 bp, Homo sapien
caatggtagcaggtagaagccataa

SEQ ID NO: 4056892 - DNA, 25 bp, Homo sapien
tagaatatacatacaatggtagcag

SEQ ID NO: 4056893 - DNA, 25 bp, Homo sapien
gtagaagccataagatactgattat

SEQ ID NO: 4056894 - DNA, 25 bp, Homo sapien
ttgtagagtgtatcgaggcctccgg

SEQ ID NO: 4056895 - DNA, 25 bp, Homo sapien
gatccacggtactgattcgctggga

SEQ ID NO: 4056896 - DNA, 25 bp, Homo sapien
ggctgtaacacgagagatccacggt

SEQ ID NO: 4056897 - DNA, 25 bp, Homo sapien
gagatgctcaggaacctcctcgagg

SEQ ID NO: 4056898 - DNA, 25 bp, Homo sapien
gcttgccgttgccatcgctggtact

SEQ ID NO: 4056899 - DNA, 25 bp, Homo sapien
tggatgcttgccgttgccatcgctg

SEQ ID NO: 4056900 - DNA, 25 bp, Homo sapien
gatgcttgccgttgccatcgctggt

SEQ ID NO: 4056901 - DNA, 25 bp, Homo sapien
tgccgttgccatcgctggtactcgg

SEQ ID NO: 4056902 - DNA, 25 bp, Homo sapien
ctgctgagctgaaagcaagggagta

SEQ ID NO: 4056903 - DNA, 25 bp, Homo sapien
caaagtctcgaagctgacatgatag

SEQ ID NO: 4056904 - DNA, 25 bp, Homo sapien
tattgccgtcgcttcacttcttcta

SEQ ID NO: 4056905 - DNA, 25 bp, Homo sapien
cgaagctgacatgataggtctgagc

SEQ ID NO: 4056906 - DNA, 25 bp, Homo sapien
cagccattctagtggtgtgccgtat

SEQ ID NO: 4056907 - DNA, 25 bp, Homo sapien
tacaagtcctttgttgcacataaac

SEQ ID NO: 4056908 - DNA, 25 bp, Homo sapien
gcaaagtaacttcattcctaccatg

SEQ ID NO: 4056909 - DNA, 25 bp, Homo sapien
ccagttgctccgcatctttgccaaa

SEQ ID NO: 4056910 - DNA, 25 bp, Homo sapien
ccccatggttgatactggagttaca

SEQ ID NO: 4056911 - DNA, 25 bp, Homo sapien
tggtttcagtcagtgcttaatggca

SEQ ID NO: 4056912 - DNA, 25 bp, Homo sapien
ctggtcaaaggccatgtaactggat

SEQ ID NO: 4056913 - DNA, 25 bp, Homo sapien
catactgacagtggtgggctcctgc

SEQ ID NO: 4056914 - DNA, 25 bp, Homo sapien
gatggaagaaatggcatggctccct

SEQ ID NO: 4056915 - DNA, 25 bp, Homo sapien
gatgcctgatccaaagtgtgaattc

SEQ ID NO: 4056916 - DNA, 25 bp, Homo sapien
tgagccccagaatctaatgcctagc

SEQ ID NO: 4056917 - DNA, 25 bp, Homo sapien
ggcataatagcctctgaacctctga

SEQ ID NO: 4056918 - DNA, 25 bp, Homo sapien
gcaggtaccacagaggacaactagg

SEQ ID NO: 4056919 - DNA, 25 bp, Homo sapien
ccttcactgaggaaacgataaggca

SEQ ID NO: 4056920 - DNA, 25 bp, Homo sapien
acagaggacaactaggcgctcagcc

SEQ ID NO: 4056921 - DNA, 25 bp, Homo sapien
ggcgctcagcccacttatgcagctg

SEQ ID NO: 4056922 - DNA, 25 bp, Homo sapien
agtaggatttattggtgagcattaa

SEQ ID NO: 4056923 - DNA, 25 bp, Homo sapien
tggtgagcattaagagggggcagca

SEQ ID NO: 4056924 - DNA, 25 bp, Homo sapien
taggatttattggtgagcattaaga

SEQ ID NO: 4056925 - DNA, 25 bp, Homo sapien
attggtgagcattaagagggggcag

SEQ ID NO: 4056926 - DNA, 25 bp, Homo sapien
taactgaccccgcagccatctggga

SEQ ID NO: 4056927 - DNA, 25 bp, Homo sapien
ccactactggggatgtaactgaccc

SEQ ID NO: 4056928 - DNA, 25 bp, Homo sapien
gggatgtaactgaccccgcagccat

SEQ ID NO: 4056929 - DNA, 25 bp, Homo sapien
actgaccccgcagccatctgggatg

SEQ ID NO: 4056930 - DNA, 25 bp, Homo sapien
gcattgaacttggtaaagccccact

SEQ ID NO: 4056931 - DNA, 25 bp, Homo sapien
ctgcattgaacttggtaaagcccca

SEQ ID NO: 4056932 - DNA, 25 bp, Homo sapien
tgcattgaacttggtaaagccccac

SEQ ID NO: 4056933 - DNA, 25 bp, Homo sapien
cattgaacttggtaaagccccactt

SEQ ID NO: 4056934 - DNA, 25 bp, Homo sapien
caatcatgtgctccttgttatgcag

SEQ ID NO: 4056935 - DNA, 25 bp, Homo sapien
ggcctcaatcatgtgctccttgtta

SEQ ID NO: 4056936 - DNA, 25 bp, Homo sapien
ctcggccacagtgccctgcggcttt

SEQ ID NO: 4056937 - DNA, 25 bp, Homo sapien
tgtgctccttgttatgcagcttggt

SEQ ID NO: 4056938 - DNA, 25 bp, Homo sapien
gggatagcacaaagtcagagacatg

SEQ ID NO: 4056939 - DNA, 25 bp, Homo sapien
ctggggatagcacaaagtcagagac

SEQ ID NO: 4056940 - DNA, 25 bp, Homo sapien
atagcacaaagtcagagacatgaac

SEQ ID NO: 4056941 - DNA, 25 bp, Homo sapien
ggatagcacaaagtcagagacatga

SEQ ID NO: 4056942 - DNA, 25 bp, Homo sapien
ccatacaagaaacaggctgagtacg

SEQ ID NO: 4056943 - DNA, 25 bp, Homo sapien
caagaaacaggctgagtacgctacc

SEQ ID NO: 4056944 - DNA, 25 bp, Homo sapien
atacaagaaacaggctgagtacgct

SEQ ID NO: 4056945 - DNA, 25 bp, Homo sapien
acaagaaacaggctgagtacgctac

SEQ ID NO: 4056946 - DNA, 25 bp, Homo sapien
aaggaactcagttggcttaactgtc

SEQ ID NO: 4056947 - DNA, 25 bp, Homo sapien
tgtacactgggcctccctgaggaaa

SEQ ID NO: 4056948 - DNA, 25 bp, Homo sapien
actcagttggcttaactgtctgcag

SEQ ID NO: 4056949 - DNA, 25 bp, Homo sapien
tgggcctccctgaggaaaggaactc

SEQ ID NO: 4056950 - DNA, 25 bp, Homo sapien
ccagcaagactgataactggcattt

SEQ ID NO: 4056951 - DNA, 25 bp, Homo sapien
tctccagcaagactgataactggca

SEQ ID NO: 4056952 - DNA, 25 bp, Homo sapien
caagactgataactggcatttgcat

SEQ ID NO: 4056953 - DNA, 25 bp, Homo sapien
tccctctccagcaagactgataact

SEQ ID NO: 4056954 - DNA, 25 bp, Homo sapien
aaagtagttaacatacaaagccact

SEQ ID NO: 4056955 - DNA, 25 bp, Homo sapien
aagtagttaacatacaaagccactg

SEQ ID NO: 4056956 - DNA, 25 bp, Homo sapien
agaggtcgttcagtaggttccagtc

SEQ ID NO: 4056957 - DNA, 25 bp, Homo sapien
gatctgaagaggtcgttcagtaggt

SEQ ID NO: 4056958 - DNA, 25 bp, Homo sapien
caccataaaatcgaatcatacagcc

SEQ ID NO: 4056959 - DNA, 25 bp, Homo sapien
tcgaatcatacagccgaggtcagga

SEQ ID NO: 4056960 - DNA, 25 bp, Homo sapien
tacacaattcaaaaaaatatatata

SEQ ID NO: 4056961 - DNA, 25 bp, Homo sapien
gattacacaattcaaaaaaatatat

SEQ ID NO: 4056962 - DNA, 25 bp, Homo sapien
caaaaaaatatatatatttggtaag

SEQ ID NO: 4056963 - DNA, 25 bp, Homo sapien
tatatatatttggtaagtaataaaa

SEQ ID NO: 4056964 - DNA, 25 bp, Homo sapien
gattataccgcttagccaagagtag

SEQ ID NO: 4056965 - DNA, 25 bp, Homo sapien
gccaacggacatagcaatgctgtta

SEQ ID NO: 4056966 - DNA, 25 bp, Homo sapien
caaatgcttgtgagacctactatag

SEQ ID NO: 4056967 - DNA, 25 bp, Homo sapien
tatactgcaaaacaggtgtgagaga

SEQ ID NO: 4056968 - DNA, 25 bp, Homo sapien
gcacatatttctgatgctggtgtct

SEQ ID NO: 4056969 - DNA, 25 bp, Homo sapien
ccctctccagcacatatttctgatg

SEQ ID NO: 4056970 - DNA, 25 bp, Homo sapien
ccagcacatatttctgatgctggtg

SEQ ID NO: 4056971 - DNA, 25 bp, Homo sapien
cctctccagcacatatttctgatgc

SEQ ID NO: 4056972 - DNA, 25 bp, Homo sapien
acagtgcaaaggacgagatgtaagt

SEQ ID NO: 4056973 - DNA, 25 bp, Homo sapien
tacagtgcaaaggacgagatgtaag

SEQ ID NO: 4056974 - DNA, 25 bp, Homo sapien
ctacagtgcaaaggacgagatgtaa

SEQ ID NO: 4056975 - DNA, 25 bp, Homo sapien
tagtgtctgctccataaaggtaaac

SEQ ID NO: 4056976 - DNA, 25 bp, Homo sapien
gccagtctctttctcgagaaccaaa

SEQ ID NO: 4056977 - DNA, 25 bp, Homo sapien
tgctcccattgcgtttcatatttct

SEQ ID NO: 4056978 - DNA, 25 bp, Homo sapien
caaacaatttctgctcccattgcgt

SEQ ID NO: 4056979 - DNA, 25 bp, Homo sapien
tcttctataagctatgggcctgggt

SEQ ID NO: 4056980 - DNA, 25 bp, Homo sapien
aaaagaatctcatgacacacaccga

SEQ ID NO: 4056981 - DNA, 25 bp, Homo sapien
ttctagaaggcaaaagtcttgaggg

SEQ ID NO: 4056982 - DNA, 25 bp, Homo sapien
taagccatgaattaaatacccactg

SEQ ID NO: 4056983 - DNA, 25 bp, Homo sapien
ccctcttgcctacatctgttttcat

SEQ ID NO: 4056984 - DNA, 25 bp, Homo sapien
gggagcaggaatgcccctttcggcc

SEQ ID NO: 4056985 - DNA, 25 bp, Homo sapien
aagaagccccgctagctgcctgttg

SEQ ID NO: 4056986 - DNA, 25 bp, Homo sapien
tctctctccaagctgggcgggtcgt

SEQ ID NO: 4056987 - DNA, 25 bp, Homo sapien
gctacccgcagcccaaaggcgtggg

SEQ ID NO: 4056988 - DNA, 25 bp, Homo sapien
agaggagccggctccacccggcctg

SEQ ID NO: 4056989 - DNA, 25 bp, Homo sapien
aaagccctgcgtacttccagccccg

SEQ ID NO: 4056990 - DNA, 25 bp, Homo sapien
tgatgtcttcaggtgtccgggaggg

SEQ ID NO: 4056991 - DNA, 25 bp, Homo sapien
atccctcccggccggcggctcgcgg

SEQ ID NO: 4056992 - DNA, 25 bp, Homo sapien
ggctcgcgggcgcttcgggcggctc

SEQ ID NO: 4056993 - DNA, 25 bp, Homo sapien
ggcggctcgcgggcgcttcgggcgg

SEQ ID NO: 4056994 - DNA, 25 bp, Homo sapien
gccggcggctcgcgggcgcttcggg

SEQ ID NO: 4056995 - DNA, 25 bp, Homo sapien
caatgggccaaatttggagtcagcc

SEQ ID NO: 4056996 - DNA, 25 bp, Homo sapien
cagtaatatggcctgtgacccggtt

SEQ ID NO: 4056997 - DNA, 25 bp, Homo sapien
tagtagttttgttgccaatgggcca

SEQ ID NO: 4056998 - DNA, 25 bp, Homo sapien
gagatgcgtgcgaccttcttaagca

SEQ ID NO: 4056999 - DNA, 25 bp, Homo sapien
caatgcctgtgaagtcgtaaatcca

SEQ ID NO: 4057000 - DNA, 25 bp, Homo sapien
gaaccttgaaagcagtactccctaa

SEQ ID NO: 4057001 - DNA, 25 bp, Homo sapien
tatgatcacccaaggaaatgctctg

SEQ ID NO: 4057002 - DNA, 25 bp, Homo sapien
tgtcagcagagtagacccttcccag

SEQ ID NO: 4057003 - DNA, 25 bp, Homo sapien
gacatggcgcctgaatacttgaaca

SEQ ID NO: 4057004 - DNA, 25 bp, Homo sapien
gagaccaatttctcagactgaggaa

SEQ ID NO: 4057005 - DNA, 25 bp, Homo sapien
tgtgtaccacagagagagtcacctc

SEQ ID NO: 4057006 - DNA, 25 bp, Homo sapien
tatggtgtccgtaagacctcctctg

SEQ ID NO: 4057007 - DNA, 25 bp, Homo sapien
tctttatttcagtgccagtgttaca

SEQ ID NO: 4057008 - DNA, 25 bp, Homo sapien
gtctttatttcagtgccagtgttac

SEQ ID NO: 4057009 - DNA, 25 bp, Homo sapien
cgtgtggtctttatttcagtgccag

SEQ ID NO: 4057010 - DNA, 25 bp, Homo sapien
taaccgtgtggtctttatttcagtg

SEQ ID NO: 4057011 - DNA, 25 bp, Homo sapien
tcctcatgcccgtggtacagttggg

SEQ ID NO: 4057012 - DNA, 25 bp, Homo sapien
gttttttcgccatggattgcagtcc

SEQ ID NO: 4057013 - DNA, 25 bp, Homo sapien
aagatggtaacccagctagtgagga

SEQ ID NO: 4057014 - DNA, 25 bp, Homo sapien
caaataaactcgcaaggtctgacca

SEQ ID NO: 4057015 - DNA, 25 bp, Homo sapien
caggactgagggggaaagttgttca

SEQ ID NO: 4057016 - DNA, 25 bp, Homo sapien
cattgccaggactgagggggaaagt

SEQ ID NO: 4057017 - DNA, 25 bp, Homo sapien
tgccaggactgagggggaaagttgt

SEQ ID NO: 4057018 - DNA, 25 bp, Homo sapien
tcattgccaggactgagggggaaag

SEQ ID NO: 4057019 - DNA, 25 bp, Homo sapien
gatcttgcattgctgagcccttgtg

SEQ ID NO: 4057020 - DNA, 25 bp, Homo sapien
gattatatgtaagcttgatccgcat

SEQ ID NO: 4057021 - DNA, 25 bp, Homo sapien
gctgagcccttgtgattatatgtaa

SEQ ID NO: 4057022 - DNA, 25 bp, Homo sapien
gcttgatccgcattcgcagctgttg

SEQ ID NO: 4057023 - DNA, 25 bp, Homo sapien
tagaggccgatgctcaaaatatagt

SEQ ID NO: 4057024 - DNA, 25 bp, Homo sapien
taagccacctgatgtctctgggttc

SEQ ID NO: 4057025 - DNA, 25 bp, Homo sapien
tacttatgagcaactagtagagctc

SEQ ID NO: 4057026 - DNA, 25 bp, Homo sapien
caaaagagcaaggaagttagaccag

SEQ ID NO: 4057027 - DNA, 25 bp, Homo sapien
ttcggctcagatattggctacaaat

SEQ ID NO: 4057028 - DNA, 25 bp, Homo sapien
cttcggctcagatattggctacaaa

SEQ ID NO: 4057029 - DNA, 25 bp, Homo sapien
acttcggctcagatattggctacaa

SEQ ID NO: 4057030 - DNA, 25 bp, Homo sapien
tcggctcagatattggctacaaatg

SEQ ID NO: 4057031 - DNA, 25 bp, Homo sapien
tgatggtccccgtgttaaatgctgg

SEQ ID NO: 4057032 - DNA, 25 bp, Homo sapien
tgctaggagacaagagctgcagctg

SEQ ID NO: 4057033 - DNA, 25 bp, Homo sapien
tctgagggttcagaactttaatgac

SEQ ID NO: 4057034 - DNA, 25 bp, Homo sapien
aatgctgggacaatgctgctgctag

SEQ ID NO: 4057035 - DNA, 25 bp, Homo sapien
gatatgcttccatgaaccataagct

SEQ ID NO: 4057036 - DNA, 25 bp, Homo sapien
taactgatcacctcgtagaattctg

SEQ ID NO: 4057037 - DNA, 25 bp, Homo sapien
gaattctgctctcactactattaga

SEQ ID NO: 4057038 - DNA, 25 bp, Homo sapien
taaagcctaacctatcctcaatgcc

SEQ ID NO: 4057039 - DNA, 25 bp, Homo sapien
tgttggaggcctgtatcgttatcac

SEQ ID NO: 4057040 - DNA, 25 bp, Homo sapien
ggtgaattctatcttcaagccattc

SEQ ID NO: 4057041 - DNA, 25 bp, Homo sapien
gtccgtcatatctagctctgtgctg

SEQ ID NO: 4057042 - DNA, 25 bp, Homo sapien
tatttgaccgttcaaaggtgaattc

SEQ ID NO: 4057043 - DNA, 25 bp, Homo sapien
catgtaatgatggtaacaacagtca

SEQ ID NO: 4057044 - DNA, 25 bp, Homo sapien
taatgatggtaacaacagtcatcgt

SEQ ID NO: 4057045 - DNA, 25 bp, Homo sapien
atgatggtaacaacagtcatcgtac

SEQ ID NO: 4057046 - DNA, 25 bp, Homo sapien
ctccatgtaatgatggtaacaacag

SEQ ID NO: 4057047 - DNA, 25 bp, Homo sapien
ggctgtgatgaaagcccatccaaca

SEQ ID NO: 4057048 - DNA, 25 bp, Homo sapien
gctgtgatgaaagcccatccaacaa

SEQ ID NO: 4057049 - DNA, 25 bp, Homo sapien
ctgtgatgaaagcccatccaacaag

SEQ ID NO: 4057050 - DNA, 25 bp, Homo sapien
gaaagttaaccttaggcagcatgac

SEQ ID NO: 4057051 - DNA, 25 bp, Homo sapien
tcggtctcaggttaaggaaagattc

SEQ ID NO: 4057052 - DNA, 25 bp, Homo sapien
ggaaagattccttaaacaagatgca

SEQ ID NO: 4057053 - DNA, 25 bp, Homo sapien
gcagcatgacaaagcttaccaagaa

SEQ ID NO: 4057054 - DNA, 25 bp, Homo sapien
cagcaaatcaagaagttctccacca

SEQ ID NO: 4057055 - DNA, 25 bp, Homo sapien
cagaagatggtttgcttgtaggcgc

SEQ ID NO: 4057056 - DNA, 25 bp, Homo sapien
gcttgtaggcgcagttggaataaca

SEQ ID NO: 4057057 - DNA, 25 bp, Homo sapien
ggaataacaggtgttatgtcatttc

SEQ ID NO: 4057058 - DNA, 25 bp, Homo sapien
tcagtagggccatttgtggtcactt

SEQ ID NO: 4057059 - DNA, 25 bp, Homo sapien
cactttttccatgacaggcattctc

SEQ ID NO: 4057060 - DNA, 25 bp, Homo sapien
cagagggtggcggtttggtctctag

SEQ ID NO: 4057061 - DNA, 25 bp, Homo sapien
tccatttgtctgcacaatctcagta

SEQ ID NO: 4057062 - DNA, 25 bp, Homo sapien
tgaaaagtgcattatattctactgc

SEQ ID NO: 4057063 - DNA, 25 bp, Homo sapien
aaaagtgcattatattctactgccc

SEQ ID NO: 4057064 - DNA, 25 bp, Homo sapien
gtgcattatattctactgccctctg

SEQ ID NO: 4057065 - DNA, 25 bp, Homo sapien
tcttgaaaagtgcattatattctac

SEQ ID NO: 4057066 - DNA, 25 bp, Homo sapien
cttccgtagatggaaaccactttct

SEQ ID NO: 4057067 - DNA, 25 bp, Homo sapien
tccgtagatggaaaccactttctta

SEQ ID NO: 4057068 - DNA, 25 bp, Homo sapien
agatggaaaccactttcttaattcg

SEQ ID NO: 4057069 - DNA, 25 bp, Homo sapien
cgtagatggaaaccactttcttaat

SEQ ID NO: 4057070 - DNA, 25 bp, Homo sapien
gcaacaatgatggtgtggaaaaaac

SEQ ID NO: 4057071 - DNA, 25 bp, Homo sapien
aaatgttgaccccaaattcttccag

SEQ ID NO: 4057072 - DNA, 25 bp, Homo sapien
gactacaagaactacgttggcctta

SEQ ID NO: 4057073 - DNA, 25 bp, Homo sapien
taaaagggtcagagcctcaaaatgt

SEQ ID NO: 4057074 - DNA, 25 bp, Homo sapien
gtgagggcataacctcgtgtcacag

SEQ ID NO: 4057075 - DNA, 25 bp, Homo sapien
cgtgtcacagaggtggacatattag

SEQ ID NO: 4057076 - DNA, 25 bp, Homo sapien
aagcttcataatggcagtgagggca

SEQ ID NO: 4057077 - DNA, 25 bp, Homo sapien
cagtacaagtgaatcgagtggaaag

SEQ ID NO: 4057078 - DNA, 25 bp, Homo sapien
tgccagggtaactgtccaagctgtt

SEQ ID NO: 4057079 - DNA, 25 bp, Homo sapien
tttgccagggtaactgtccaagctg

SEQ ID NO: 4057080 - DNA, 25 bp, Homo sapien
gctttgccagggtaactgtccaagc

SEQ ID NO: 4057081 - DNA, 25 bp, Homo sapien
ttgccagggtaactgtccaagctgt

SEQ ID NO: 4057082 - DNA, 25 bp, Homo sapien
cactggccagatacaagaagatcac

SEQ ID NO: 4057083 - DNA, 25 bp, Homo sapien
gaagatcaccatattcacctataca

SEQ ID NO: 4057084 - DNA, 25 bp, Homo sapien
acctatacaccatgcagccacttgt

SEQ ID NO: 4057085 - DNA, 25 bp, Homo sapien
catgcagccacttgtaccaaaggtt

SEQ ID NO: 4057086 - DNA, 25 bp, Homo sapien
ccaagaattgctttgtacaggcgct

SEQ ID NO: 4057087 - DNA, 25 bp, Homo sapien
cgctggacagtataggcatgcatct

SEQ ID NO: 4057088 - DNA, 25 bp, Homo sapien
gggactgcatcatcacgaacataac

SEQ ID NO: 4057089 - DNA, 25 bp, Homo sapien
gcatcatcacgaacataacttcctg

SEQ ID NO: 4057090 - DNA, 25 bp, Homo sapien
ccagcacttcgtatatgctgtctga

SEQ ID NO: 4057091 - DNA, 25 bp, Homo sapien
gataacatcagtatatcccagcact

SEQ ID NO: 4057092 - DNA, 25 bp, Homo sapien
ctaactctaatctaaaacacttggc

SEQ ID NO: 4057093 - DNA, 25 bp, Homo sapien
ggcatttattcctaactgacattaa

SEQ ID NO: 4057094 - DNA, 25 bp, Homo sapien
cgttgtcaaaacacgcataattgtg

SEQ ID NO: 4057095 - DNA, 25 bp, Homo sapien
tgtctatatgccatcgtttggaagg

SEQ ID NO: 4057096 - DNA, 25 bp, Homo sapien
atgccatcgtttggaaggtgcatac

SEQ ID NO: 4057097 - DNA, 25 bp, Homo sapien
cacgcataattgtgtctatatgcca

SEQ ID NO: 4057098 - DNA, 25 bp, Homo sapien
ttctgcagcaagaaagattccagat

SEQ ID NO: 4057099 - DNA, 25 bp, Homo sapien
tttaaattctggctcacacgaatcc

SEQ ID NO: 4057100 - DNA, 25 bp, Homo sapien
catcatgcctcggatattattccca

SEQ ID NO: 4057101 - DNA, 25 bp, Homo sapien
aaagtaattctttcatcatgcctcg

SEQ ID NO: 4057102 - DNA, 25 bp, Homo sapien
ttgagacatccaaatctttaagaca

SEQ ID NO: 4057103 - DNA, 25 bp, Homo sapien
gcattatgatctgtctgtacagtct

SEQ ID NO: 4057104 - DNA, 25 bp, Homo sapien
ttctgtgcctctgtactgcattatg

SEQ ID NO: 4057105 - DNA, 25 bp, Homo sapien
tattgagacatccaaatctttaaga

SEQ ID NO: 4057106 - DNA, 25 bp, Homo sapien
gggtctctctgtgtcacctagactg

SEQ ID NO: 4057107 - DNA, 25 bp, Homo sapien
ggtctctctgtgtcacctagactgg

SEQ ID NO: 4057108 - DNA, 25 bp, Homo sapien
tgggctgattacctaaggttaggag

SEQ ID NO: 4057109 - DNA, 25 bp, Homo sapien
caaggtgggctgattacctaaggtt

SEQ ID NO: 4057110 - DNA, 25 bp, Homo sapien
gttcaataagaaacgacccaggata

SEQ ID NO: 4057111 - DNA, 25 bp, Homo sapien
tgttcaataagaaacgacccaggat

SEQ ID NO: 4057112 - DNA, 25 bp, Homo sapien
ttgttcaataagaaacgacccagga

SEQ ID NO: 4057113 - DNA, 25 bp, Homo sapien
taactgcaaatgataggagataccc

SEQ ID NO: 4057114 - DNA, 25 bp, Homo sapien
taattatactatggcacacccatgc

SEQ ID NO: 4057115 - DNA, 25 bp, Homo sapien
tgcaatatggaatgtcacgcagcca

SEQ ID NO: 4057116 - DNA, 25 bp, Homo sapien
tcatattctaaaggtaagtgctgga

SEQ ID NO: 4057117 - DNA, 25 bp, Homo sapien
tcgcaatccactctctgacttaata

SEQ ID NO: 4057118 - DNA, 25 bp, Homo sapien
tatccatgatagtcaaaaccgtttc

SEQ ID NO: 4057119 - DNA, 25 bp, Homo sapien
caaaaccgtttcataaagaatagca

SEQ ID NO: 4057120 - DNA, 25 bp, Homo sapien
tactagtctcagtattagtggcaac

SEQ ID NO: 4057121 - DNA, 25 bp, Homo sapien
tcatttcgtcctaaaattcttaata

SEQ ID NO: 4057122 - DNA, 25 bp, Homo sapien
tgaatcatcatcatttcgtcctaaa

SEQ ID NO: 4057123 - DNA, 25 bp, Homo sapien
gaatcatcatcatttcgtcctaaaa

SEQ ID NO: 4057124 - DNA, 25 bp, Homo sapien
tcatcatttcgtcctaaaattctta

SEQ ID NO: 4057125 - DNA, 25 bp, Homo sapien
tccggacatgatgaggttctttaaa

SEQ ID NO: 4057126 - DNA, 25 bp, Homo sapien
taaaatacgaactaattggggcaca

SEQ ID NO: 4057127 - DNA, 25 bp, Homo sapien
catgttctggtgaatatccggacat

SEQ ID NO: 4057128 - DNA, 25 bp, Homo sapien
aaaggggtcactgataccagaaaca

SEQ ID NO: 4057129 - DNA, 25 bp, Homo sapien
catcttaagagacatcaaggccatg

SEQ ID NO: 4057130 - DNA, 25 bp, Homo sapien
caacagggaataccaaagctgacaa

SEQ ID NO: 4057131 - DNA, 25 bp, Homo sapien
tactgccaagccgaagatgttttaa

SEQ ID NO: 4057132 - DNA, 25 bp, Homo sapien
taagagtcctaacacatagtaaagg

SEQ ID NO: 4057133 - DNA, 25 bp, Homo sapien
tcaattacttgatattaaaacaaaa

SEQ ID NO: 4057134 - DNA, 25 bp, Homo sapien
atcaattacttgatattaaaacaaa

SEQ ID NO: 4057135 - DNA, 25 bp, Homo sapien
agcatgtctgggcttcgctcacaca

SEQ ID NO: 4057136 - DNA, 25 bp, Homo sapien
gggcttcgctcacacatttctgtga

SEQ ID NO: 4057137 - DNA, 25 bp, Homo sapien
cgcaagcatgtctgggcttcgctca

SEQ ID NO: 4057138 - DNA, 25 bp, Homo sapien
ttctgaaatgcgcaagcatgtctgg

SEQ ID NO: 4057139 - DNA, 25 bp, Homo sapien
aacatctccataagttcaggaactt

SEQ ID NO: 4057140 - DNA, 25 bp, Homo sapien
aaaaacatctccataagttcaggaa

SEQ ID NO: 4057141 - DNA, 25 bp, Homo sapien
catctccataagttcaggaactttc

SEQ ID NO: 4057142 - DNA, 25 bp, Homo sapien
aaaacatctccataagttcaggaac

SEQ ID NO: 4057143 - DNA, 25 bp, Homo sapien
ttggaggttttcaggagcttctcta

SEQ ID NO: 4057144 - DNA, 25 bp, Homo sapien
tggaggttttcaggagcttctctac

SEQ ID NO: 4057145 - DNA, 25 bp, Homo sapien
cagccgagggtacaaagtgctaacc

SEQ ID NO: 4057146 - DNA, 25 bp, Homo sapien
tacgaattgcgtgctatgattaaga

SEQ ID NO: 4057147 - DNA, 25 bp, Homo sapien
ggagcccatgcagccgagggtacaa

SEQ ID NO: 4057148 - DNA, 25 bp, Homo sapien
tgctaacccctgtacgaattgcgtg

SEQ ID NO: 4057149 - DNA, 25 bp, Homo sapien
cagcttcacaatttcaaactagttc

SEQ ID NO: 4057150 - DNA, 25 bp, Homo sapien
cacaatttcaaactagttcaggatg

SEQ ID NO: 4057151 - DNA, 25 bp, Homo sapien
caggatgactcaagatttctccaat

SEQ ID NO: 4057152 - DNA, 25 bp, Homo sapien
atttcaaactagttcaggatgactc

SEQ ID NO: 4057153 - DNA, 25 bp, Homo sapien
caaagtagttaacagttgttagaag

SEQ ID NO: 4057154 - DNA, 25 bp, Homo sapien
tagttaacagttgttagaagaaaga

SEQ ID NO: 4057155 - DNA, 25 bp, Homo sapien
tgcccctaaatagccaatgcgtttg

SEQ ID NO: 4057156 - DNA, 25 bp, Homo sapien
gaggcaataagcttgaggcactcca

SEQ ID NO: 4057157 - DNA, 25 bp, Homo sapien
catctaacagcagcattgcccctaa

SEQ ID NO: 4057158 - DNA, 25 bp, Homo sapien
cagttggtcatgagaagatggacat

SEQ ID NO: 4057159 - DNA, 25 bp, Homo sapien
taccactatgtaggcctgacaacat

SEQ ID NO: 4057160 - DNA, 25 bp, Homo sapien
ttcttactacacatggagagacagg

SEQ ID NO: 4057161 - DNA, 25 bp, Homo sapien
aagtcttctgtgtactgggcctcaa

SEQ ID NO: 4057162 - DNA, 25 bp, Homo sapien
aaccctaaactgctgctcatgactg

SEQ ID NO: 4057163 - DNA, 25 bp, Homo sapien
gaagtgcagtcctatgctacacaga

SEQ ID NO: 4057164 - DNA, 25 bp, Homo sapien
tgcttaacctacacacgcaaaaggt

SEQ ID NO: 4057165 - DNA, 25 bp, Homo sapien
acaggtaattgggtatggcaagcaa

SEQ ID NO: 4057166 - DNA, 25 bp, Homo sapien
tgtggaagaatttggccccgagcca

SEQ ID NO: 4057167 - DNA, 25 bp, Homo sapien
gctggtagtttatgccatctcaaat

SEQ ID NO: 4057168 - DNA, 25 bp, Homo sapien
gatgctggtagtttatgccatctca

SEQ ID NO: 4057169 - DNA, 25 bp, Homo sapien
gcaaggcagggctaagatatttttt

SEQ ID NO: 4057170 - DNA, 25 bp, Homo sapien
cagcaaggcagggctaagatatttt

SEQ ID NO: 4057171 - DNA, 25 bp, Homo sapien
taagcaagctagctgccaccatcaa

SEQ ID NO: 4057172 - DNA, 25 bp, Homo sapien
tggcagaaccaccacataatcctgg

SEQ ID NO: 4057173 - DNA, 25 bp, Homo sapien
ccgtataatgagactcccagtggaa

SEQ ID NO: 4057174 - DNA, 25 bp, Homo sapien
gttccacaatgatcagactacaagg

SEQ ID NO: 4057175 - DNA, 25 bp, Homo sapien
taattttgccacattccgacatcgg

SEQ ID NO: 4057176 - DNA, 25 bp, Homo sapien
tgtccggatggtccggatcagctcc

SEQ ID NO: 4057177 - DNA, 25 bp, Homo sapien
gtccaaagtgagcagggtagcccag

SEQ ID NO: 4057178 - DNA, 25 bp, Homo sapien
cggattgcagcacattctttctgga

SEQ ID NO: 4057179 - DNA, 25 bp, Homo sapien
ggccaacactaaactcttatacaag

SEQ ID NO: 4057180 - DNA, 25 bp, Homo sapien
acgccaggccaacactaaactctta

SEQ ID NO: 4057181 - DNA, 25 bp, Homo sapien
taaactcttatacaagggatggctg

SEQ ID NO: 4057182 - DNA, 25 bp, Homo sapien
cactaaactcttatacaagggatgg

SEQ ID NO: 4057183 - DNA, 25 bp, Homo sapien
cagttaagctatgtcccttttggca

SEQ ID NO: 4057184 - DNA, 25 bp, Homo sapien
tcggagtcaataaactagagacgtg

SEQ ID NO: 4057185 - DNA, 25 bp, Homo sapien
tggcaggttgaaagaccgtgccctc

SEQ ID NO: 4057186 - DNA, 25 bp, Homo sapien
caggcaggtcaaaaaagccaccagt

SEQ ID NO: 4057187 - DNA, 25 bp, Homo sapien
acagtgaataaacggaaaagaccag

SEQ ID NO: 4057188 - DNA, 25 bp, Homo sapien
ctagcctagctggttttctcactgc

SEQ ID NO: 4057189 - DNA, 25 bp, Homo sapien
aaagaccagagttagaacttcactg

SEQ ID NO: 4057190 - DNA, 25 bp, Homo sapien
tgtaagttaacatcaggcaaaaccc

SEQ ID NO: 4057191 - DNA, 25 bp, Homo sapien
atgagtgagcattacataggtgttc

SEQ ID NO: 4057192 - DNA, 25 bp, Homo sapien
gagtgagcattacataggtgttcag

SEQ ID NO: 4057193 - DNA, 25 bp, Homo sapien
cattacataggtgttcagtgtttga

SEQ ID NO: 4057194 - DNA, 25 bp, Homo sapien
agcattacataggtgttcagtgttt

SEQ ID NO: 4057195 - DNA, 25 bp, Homo sapien
ttgacagctcttgcctcccaaaagc

SEQ ID NO: 4057196 - DNA, 25 bp, Homo sapien
ggacagatttccgtgctcagggata

SEQ ID NO: 4057197 - DNA, 25 bp, Homo sapien
gtcagtaagcaccaaaaagctaagt

SEQ ID NO: 4057198 - DNA, 25 bp, Homo sapien
gctaagtattcagcacagggaggga

SEQ ID NO: 4057199 - DNA, 25 bp, Homo sapien
taaacattaccctgagcgagtggtt

SEQ ID NO: 4057200 - DNA, 25 bp, Homo sapien
taccctgagcgagtggttcgatgga

SEQ ID NO: 4057201 - DNA, 25 bp, Homo sapien
tgagcgagtggttcgatggatctcc

SEQ ID NO: 4057202 - DNA, 25 bp, Homo sapien
gagtggttcgatggatctcctacac

SEQ ID NO: 4057203 - DNA, 25 bp, Homo sapien
aattattagacgctgacgtccgcag

SEQ ID NO: 4057204 - DNA, 25 bp, Homo sapien
tctttcaggcaatcaggaagaccgg

SEQ ID NO: 4057205 - DNA, 25 bp, Homo sapien
gaaccgtcccgactctttcaggcaa

SEQ ID NO: 4057206 - DNA, 25 bp, Homo sapien
gaagaccgggagaattattagacgc

SEQ ID NO: 4057207 - DNA, 25 bp, Homo sapien
taaacagtatactcgcaggtaggtt

SEQ ID NO: 4057208 - DNA, 25 bp, Homo sapien
tatactcgcaggtaggttgaaaaaa

SEQ ID NO: 4057209 - DNA, 25 bp, Homo sapien
gaaaagggtaaacagtatactcgca

SEQ ID NO: 4057210 - DNA, 25 bp, Homo sapien
ctgagaaaagggtaaacagtatact

SEQ ID NO: 4057211 - DNA, 25 bp, Homo sapien
cgatgtccggttccgagaggacggc

SEQ ID NO: 4057212 - DNA, 25 bp, Homo sapien
agaggcgaggccgatgtccggttcc

SEQ ID NO: 4057213 - DNA, 25 bp, Homo sapien
cgaggccgatgtccggttccgagag

SEQ ID NO: 4057214 - DNA, 25 bp, Homo sapien
ggccgatgtccggttccgagaggac

SEQ ID NO: 4057215 - DNA, 25 bp, Homo sapien
cacaacacggaacgccgcggcgcgc

SEQ ID NO: 4057216 - DNA, 25 bp, Homo sapien
aacgccacaacacggaacgccgcgg

SEQ ID NO: 4057217 - DNA, 25 bp, Homo sapien
cggcggggcaacgccacaacacgga

SEQ ID NO: 4057218 - DNA, 25 bp, Homo sapien
ggggcaacgccacaacacggaacgc

SEQ ID NO: 4057219 - DNA, 25 bp, Homo sapien
aggaagcttccggtcgagcgcccgc

SEQ ID NO: 4057220 - DNA, 25 bp, Homo sapien
tgctctcagcgccgggagtgacact

SEQ ID NO: 4057221 - DNA, 25 bp, Homo sapien
ctgaaaggaagcttccggtcgagcg

SEQ ID NO: 4057222 - DNA, 25 bp, Homo sapien
atgctctcagcgccgggagtgacac

SEQ ID NO: 4057223 - DNA, 25 bp, Homo sapien
ctcgaatgaaaccagcagctccggg

SEQ ID NO: 4057224 - DNA, 25 bp, Homo sapien
gaaacctcgaatgaaaccagcagct

SEQ ID NO: 4057225 - DNA, 25 bp, Homo sapien
gcccgaaacctcgaatgaaaccagc

SEQ ID NO: 4057226 - DNA, 25 bp, Homo sapien
aacctcgaatgaaaccagcagctcc

SEQ ID NO: 4057227 - DNA, 25 bp, Homo sapien
tgtcactgatgacgcgagacgctgc

SEQ ID NO: 4057228 - DNA, 25 bp, Homo sapien
gaattatccaagaactcggaccctg

SEQ ID NO: 4057229 - DNA, 25 bp, Homo sapien
gaccctgccgaggactatttgccaa

SEQ ID NO: 4057230 - DNA, 25 bp, Homo sapien
tcctggcagagcgacgcaaacgtag

SEQ ID NO: 4057231 - DNA, 25 bp, Homo sapien
gagcgagaaagatccggcctacccc

SEQ ID NO: 4057232 - DNA, 25 bp, Homo sapien
agcgagaaagatccggcctaccccg

SEQ ID NO: 4057233 - DNA, 25 bp, Homo sapien
tgagcgagaaagatccggcctaccc

SEQ ID NO: 4057234 - DNA, 25 bp, Homo sapien
ctgagcgagaaagatccggcctacc

SEQ ID NO: 4057235 - DNA, 25 bp, Homo sapien
gtaagaaatacaatgacgtgagtca

SEQ ID NO: 4057236 - DNA, 25 bp, Homo sapien
gcacagccgtgtaagaaatacaatg

SEQ ID NO: 4057237 - DNA, 25 bp, Homo sapien
caatgacgtgagtcaaagaggcggc

SEQ ID NO: 4057238 - DNA, 25 bp, Homo sapien
cactggcctgttttgttatcctttg

SEQ ID NO: 4057239 - DNA, 25 bp, Homo sapien
tccaatattgaccaggtctgctggg

SEQ ID NO: 4057240 - DNA, 25 bp, Homo sapien
gacatcatcagtaaatccaatattg

SEQ ID NO: 4057241 - DNA, 25 bp, Homo sapien
tctgccacggccatctttcttgaca

SEQ ID NO: 4057242 - DNA, 25 bp, Homo sapien
tcttgacatcatcagtaaatccaat

SEQ ID NO: 4057243 - DNA, 25 bp, Homo sapien
ggcacgggaatttgccatattggtc

SEQ ID NO: 4057244 - DNA, 25 bp, Homo sapien
taggcacgggaatttgccatattgg

SEQ ID NO: 4057245 - DNA, 25 bp, Homo sapien
ttagtaggcacgggaatttgccata

SEQ ID NO: 4057246 - DNA, 25 bp, Homo sapien
tagtaggcacgggaatttgccatat

SEQ ID NO: 4057247 - DNA, 25 bp, Homo sapien
tcaagtatacaaacaggaagacatg

SEQ ID NO: 4057248 - DNA, 25 bp, Homo sapien
gaagacatgacagtatgaaagacgc

SEQ ID NO: 4057249 - DNA, 25 bp, Homo sapien
gacgccacctactcctcttgttatg

SEQ ID NO: 4057250 - DNA, 25 bp, Homo sapien
tatgacacgcatggtttcccaagtt

SEQ ID NO: 4057251 - DNA, 25 bp, Homo sapien
ccccagaaggggctgcacaagtcag

SEQ ID NO: 4057252 - DNA, 25 bp, Homo sapien
ccgaagttccccagaaggggctgca

SEQ ID NO: 4057253 - DNA, 25 bp, Homo sapien
caagtcaggacaagaagtccaggaa

SEQ ID NO: 4057254 - DNA, 25 bp, Homo sapien
gggctgcacaagtcaggacaagaag

SEQ ID NO: 4057255 - DNA, 25 bp, Homo sapien
gacgcgaaggcagtgtggcaccctc

SEQ ID NO: 4057256 - DNA, 25 bp, Homo sapien
ggagtcctgggcgttgctctcccac

SEQ ID NO: 4057257 - DNA, 25 bp, Homo sapien
agggaacgcccgacgcgaaggcagt

SEQ ID NO: 4057258 - DNA, 25 bp, Homo sapien
aacgcccgacgcgaaggcagtgtgg

SEQ ID NO: 4057259 - DNA, 25 bp, Homo sapien
tgacgcaatctctccgcgccggggg

SEQ ID NO: 4057260 - DNA, 25 bp, Homo sapien
ggcgggacgagcttgacgccatctc

SEQ ID NO: 4057261 - DNA, 25 bp, Homo sapien
gagtgagtggatcctgggaagcgct

SEQ ID NO: 4057262 - DNA, 25 bp, Homo sapien
cggttgcggcggctccgggacgagt

SEQ ID NO: 4057263 - DNA, 25 bp, Homo sapien
tttgcgttgtgggaacctggcgcac

SEQ ID NO: 4057264 - DNA, 25 bp, Homo sapien
tgaacagcctgttagctcggttggg

SEQ ID NO: 4057265 - DNA, 25 bp, Homo sapien
ctaacttctcggtgacctggaggca

SEQ ID NO: 4057266 - DNA, 25 bp, Homo sapien
tctgctagcagcgttggcaactctc

SEQ ID NO: 4057267 - DNA, 25 bp, Homo sapien
gacgggaaagtgaagcccttgactc

SEQ ID NO: 4057268 - DNA, 25 bp, Homo sapien
ggacagagaccacgagagcgaaatt

SEQ ID NO: 4057269 - DNA, 25 bp, Homo sapien
gacagttgttttcaggttctcagac

SEQ ID NO: 4057270 - DNA, 25 bp, Homo sapien
tcattcaagtactcagccgctggac

SEQ ID NO: 4057271 - DNA, 25 bp, Homo sapien
tgagagatgcgcactttaaagggtg

SEQ ID NO: 4057272 - DNA, 25 bp, Homo sapien
cacccagaacccttcttgtgagaga

SEQ ID NO: 4057273 - DNA, 25 bp, Homo sapien
tccagatgtctatggctgggtgtgt

SEQ ID NO: 4057274 - DNA, 25 bp, Homo sapien
gaggagcactctcatctgcaggact

SEQ ID NO: 4057275 - DNA, 25 bp, Homo sapien
caaatgtctgactatcttgagggag

SEQ ID NO: 4057276 - DNA, 25 bp, Homo sapien
tccaaagggataaggcttcagtgct

SEQ ID NO: 4057277 - DNA, 25 bp, Homo sapien
gcatcccagtgaagttcgtccagct

SEQ ID NO: 4057278 - DNA, 25 bp, Homo sapien
ccatgtagattaagtgtaggcgtcc

SEQ ID NO: 4057279 - DNA, 25 bp, Homo sapien
cttaggcgagggaagaatatacgga

SEQ ID NO: 4057280 - DNA, 25 bp, Homo sapien
agggaagaatatacggatagggaat

SEQ ID NO: 4057281 - DNA, 25 bp, Homo sapien
agtcacacaggatccctgtagccaa

SEQ ID NO: 4057282 - DNA, 25 bp, Homo sapien
aggctgtcccctacaaccttcttag

SEQ ID NO: 4057283 - DNA, 25 bp, Homo sapien
ttgacttcacaacttcatgggccac

SEQ ID NO: 4057284 - DNA, 25 bp, Homo sapien
gacttcacaacttcatgggccacac

SEQ ID NO: 4057285 - DNA, 25 bp, Homo sapien
cttcacaacttcatgggccacacag

SEQ ID NO: 4057286 - DNA, 25 bp, Homo sapien
tgacttcacaacttcatgggccaca

SEQ ID NO: 4057287 - DNA, 25 bp, Homo sapien
tcaggtccacctgcaataaacccag

SEQ ID NO: 4057288 - DNA, 25 bp, Homo sapien
agcactggtcctcgtggctgtgggt

SEQ ID NO: 4057289 - DNA, 25 bp, Homo sapien
catcatcctgttcccatatgcaagg

SEQ ID NO: 4057290 - DNA, 25 bp, Homo sapien
ccacagtcctagaagcacagcctgt

SEQ ID NO: 4057291 - DNA, 25 bp, Homo sapien
ccagaagctggctgtccaactccac

SEQ ID NO: 4057292 - DNA, 25 bp, Homo sapien
cccagaagctggctgtccaactcca

SEQ ID NO: 4057293 - DNA, 25 bp, Homo sapien
cagaagctggctgtccaactccacc

SEQ ID NO: 4057294 - DNA, 25 bp, Homo sapien
tccaaaggctcattctgtcgacgta

SEQ ID NO: 4057295 - DNA, 25 bp, Homo sapien
ggcttccagcagtttacggtaggca

SEQ ID NO: 4057296 - DNA, 25 bp, Homo sapien
tgtcgacgtagagcccacttgcgta

SEQ ID NO: 4057297 - DNA, 25 bp, Homo sapien
cacttgcgtacactgggagtctggg

SEQ ID NO: 4057298 - DNA, 25 bp, Homo sapien
cattttggatggttagtgtttcctt

SEQ ID NO: 4057299 - DNA, 25 bp, Homo sapien
gtttccttctagcaagagtcgggac

SEQ ID NO: 4057300 - DNA, 25 bp, Homo sapien
tgtttccttctagcaagagtcggga

SEQ ID NO: 4057301 - DNA, 25 bp, Homo sapien
acattttggatggttagtgtttcct

SEQ ID NO: 4057302 - DNA, 25 bp, Homo sapien
ttagatcgctggtcctccgagtgga

SEQ ID NO: 4057303 - DNA, 25 bp, Homo sapien
atggctggtgaaccgggctccacac

SEQ ID NO: 4057304 - DNA, 25 bp, Homo sapien
ttaagaggtggcgacccaatgaccc

SEQ ID NO: 4057305 - DNA, 25 bp, Homo sapien
gacacatgtagctcttggcgctcac

SEQ ID NO: 4057306 - DNA, 25 bp, Homo sapien
gatctgtcagtcttgcgctacctcc

SEQ ID NO: 4057307 - DNA, 25 bp, Homo sapien
gagccttgatctgtcagtcttgcgc

SEQ ID NO: 4057308 - DNA, 25 bp, Homo sapien
tctgtcagtcttgcgctacctccag

SEQ ID NO: 4057309 - DNA, 25 bp, Homo sapien
ccttgatctgtcagtcttgcgctac

SEQ ID NO: 4057310 - DNA, 25 bp, Homo sapien
tgtgtctgcccggaaacccagaatg

SEQ ID NO: 4057311 - DNA, 25 bp, Homo sapien
tgacaacccaagactccttcaggag

SEQ ID NO: 4057312 - DNA, 25 bp, Homo sapien
tcaccctagctgaagcatgatcact

SEQ ID NO: 4057313 - DNA, 25 bp, Homo sapien
agagacaaaggccaaaccaggatct

SEQ ID NO: 4057314 - DNA, 25 bp, Homo sapien
ttcaagcaaggggtcagaattcaaa

SEQ ID NO: 4057315 - DNA, 25 bp, Homo sapien
gggacactggcagagttcaagcaag

SEQ ID NO: 4057316 - DNA, 25 bp, Homo sapien
ctggtacacgtgagcaatcaactgc

SEQ ID NO: 4057317 - DNA, 25 bp, Homo sapien
ctcccgcagtctagctggcagaggg

SEQ ID NO: 4057318 - DNA, 25 bp, Homo sapien
tcagaggcaagactgtgccacaggg

SEQ ID NO: 4057319 - DNA, 25 bp, Homo sapien
ggcagaagggtagggcattgctgga

SEQ ID NO: 4057320 - DNA, 25 bp, Homo sapien
gggcaggcagaagggtagggcattg

SEQ ID NO: 4057321 - DNA, 25 bp, Homo sapien
tgtgccacaggggtgagcagcatca

SEQ ID NO: 4057322 - DNA, 25 bp, Homo sapien
tcgtgctctaccacttcgttcccac

SEQ ID NO: 4057323 - DNA, 25 bp, Homo sapien
ctcgtgctctaccacttcgttccca

SEQ ID NO: 4057324 - DNA, 25 bp, Homo sapien
gagacttcatcttgtgtcgtctcct

SEQ ID NO: 4057325 - DNA, 25 bp, Homo sapien
agacttcatcttgtgtcgtctcctc

SEQ ID NO: 4057326 - DNA, 25 bp, Homo sapien
ctggaacacacaaactggtcacttg

SEQ ID NO: 4057327 - DNA, 25 bp, Homo sapien
tggaacacacaaactggtcacttgt

SEQ ID NO: 4057328 - DNA, 25 bp, Homo sapien
ttttgcatgaatacatcctgagctg

SEQ ID NO: 4057329 - DNA, 25 bp, Homo sapien
ttgcatgaatacatcctgagctgct

SEQ ID NO: 4057330 - DNA, 25 bp, Homo sapien
ctgatttttgcatgaatacatcctg

SEQ ID NO: 4057331 - DNA, 25 bp, Homo sapien
atttttgcatgaatacatcctgagc

SEQ ID NO: 4057332 - DNA, 25 bp, Homo sapien
tcctagaaggttgcagagtcctctc

SEQ ID NO: 4057333 - DNA, 25 bp, Homo sapien
taacagctactgtcgtaaccacagg

SEQ ID NO: 4057334 - DNA, 25 bp, Homo sapien
tgtttgttcagacaggtcacaggac

SEQ ID NO: 4057335 - DNA, 25 bp, Homo sapien
taacccagggactgcttgagcacta

SEQ ID NO: 4057336 - DNA, 25 bp, Homo sapien
tgttggatagcttgtcgctgactgc

SEQ ID NO: 4057337 - DNA, 25 bp, Homo sapien
gtcgctgactgccaaggtctccagg

SEQ ID NO: 4057338 - DNA, 25 bp, Homo sapien
cctgatctcttagttgttggatagc

SEQ ID NO: 4057339 - DNA, 25 bp, Homo sapien
ggagtcctgatctcttagttgttgg

SEQ ID NO: 4057340 - DNA, 25 bp, Homo sapien
gcgggcttgctcttctagcccagca

SEQ ID NO: 4057341 - DNA, 25 bp, Homo sapien
gggcttgctcttctagcccagcaaa

SEQ ID NO: 4057342 - DNA, 25 bp, Homo sapien
tctagcccagcaaatacttgatccc

SEQ ID NO: 4057343 - DNA, 25 bp, Homo sapien
ctggcgggcttgctcttctagccca

SEQ ID NO: 4057344 - DNA, 25 bp, Homo sapien
taagtgcccttttatttccaggaga

SEQ ID NO: 4057345 - DNA, 25 bp, Homo sapien
tgaactctgcttgggatccatgagg

SEQ ID NO: 4057346 - DNA, 25 bp, Homo sapien
gaaatgtctgacaatagccaggccc

SEQ ID NO: 4057347 - DNA, 25 bp, Homo sapien
ctcattcaccagacagcaagaggga

SEQ ID NO: 4057348 - DNA, 25 bp, Homo sapien
cagggccagtatatgatcaaaagac

SEQ ID NO: 4057349 - DNA, 25 bp, Homo sapien
tgggcagacatagcactaaggaaca

SEQ ID NO: 4057350 - DNA, 25 bp, Homo sapien
cagacctaggagctatgggcagaca

SEQ ID NO: 4057351 - DNA, 25 bp, Homo sapien
gggaagacctttctcatcagtgata

SEQ ID NO: 4057352 - DNA, 25 bp, Homo sapien
ctcttgggtccttggtgcagttaaa

SEQ ID NO: 4057353 - DNA, 25 bp, Homo sapien
ccttggtgcagttaaacaaatgtaa

SEQ ID NO: 4057354 - DNA, 25 bp, Homo sapien
ggttaaggtttttcagaccagatga

SEQ ID NO: 4057355 - DNA, 25 bp, Homo sapien
gaccagatgagaacaaggccatgta

SEQ ID NO: 4057356 - DNA, 25 bp, Homo sapien
gatccgccggcctcgccctcccgaa

SEQ ID NO: 4057357 - DNA, 25 bp, Homo sapien
atccgccggcctcgccctcccgaag

SEQ ID NO: 4057358 - DNA, 25 bp, Homo sapien
ccacgcctggcgctaatttttatat

SEQ ID NO: 4057359 - DNA, 25 bp, Homo sapien
caccatgttgtccagggtggtctca

SEQ ID NO: 4057360 - DNA, 25 bp, Homo sapien
tagagccctgacatctagcacaagg

SEQ ID NO: 4057361 - DNA, 25 bp, Homo sapien
gcattcagccttccacgtgtagagt

SEQ ID NO: 4057362 - DNA, 25 bp, Homo sapien
caaggatctgcagagagtaggtatc

SEQ ID NO: 4057363 - DNA, 25 bp, Homo sapien
tctaaggcccagttcaggcgcatgg

SEQ ID NO: 4057364 - DNA, 25 bp, Homo sapien
gatttgtctgtttccgacgggacat

SEQ ID NO: 4057365 - DNA, 25 bp, Homo sapien
tctttcccagtttcacgactggata

SEQ ID NO: 4057366 - DNA, 25 bp, Homo sapien
tatgttactacctccttgcaagatg

SEQ ID NO: 4057367 - DNA, 25 bp, Homo sapien
gatgcaagagctctggtctttccca

SEQ ID NO: 4057368 - DNA, 25 bp, Homo sapien
ctgatgcaagagctctggtctttcc

SEQ ID NO: 4057369 - DNA, 25 bp, Homo sapien
atgtcacatgcccactggaagtcaa

SEQ ID NO: 4057370 - DNA, 25 bp, Homo sapien
tgtcacatgcccactggaagtcaag

SEQ ID NO: 4057371 - DNA, 25 bp, Homo sapien
aagaataaagaaaccgcaaatggca

SEQ ID NO: 4057372 - DNA, 25 bp, Homo sapien
caggcagtcttctagcatatctgca

SEQ ID NO: 4057373 - DNA, 25 bp, Homo sapien
tagcatatctgcatatcaaacacag

SEQ ID NO: 4057374 - DNA, 25 bp, Homo sapien
caaatggcaaagacaggcctccaca

SEQ ID NO: 4057375 - DNA, 25 bp, Homo sapien
gtgcagttcccacggagcaaagcaa

SEQ ID NO: 4057376 - DNA, 25 bp, Homo sapien
tggtgcagttcccacggagcaaagc

SEQ ID NO: 4057377 - DNA, 25 bp, Homo sapien
cggagcaaagcaaactcgactgaat

SEQ ID NO: 4057378 - DNA, 25 bp, Homo sapien
caaactcgactgaatccaagtgatc

SEQ ID NO: 4057379 - DNA, 25 bp, Homo sapien
gcatgagcccaggtaaattcccagg

SEQ ID NO: 4057380 - DNA, 25 bp, Homo sapien
gggcgtgtctaatcagccgagatgg

SEQ ID NO: 4057381 - DNA, 25 bp, Homo sapien
gcttcttcaagcatgagcccaggta

SEQ ID NO: 4057382 - DNA, 25 bp, Homo sapien
acaagaaagctggtcacttagccgc

SEQ ID NO: 4057383 - DNA, 25 bp, Homo sapien
gaggcggctcagacaaacccttaga

SEQ ID NO: 4057384 - DNA, 25 bp, Homo sapien
gacaacacaatctccgaaatctaaa

SEQ ID NO: 4057385 - DNA, 25 bp, Homo sapien
tagaagcttttctgcgagacccaga

SEQ ID NO: 4057386 - DNA, 25 bp, Homo sapien
caagagcctgacaagagccggaggt

SEQ ID NO: 4057387 - DNA, 25 bp, Homo sapien
aatggacccgggaccgcagcccaag

SEQ ID NO: 4057388 - DNA, 25 bp, Homo sapien
gcgctgcagacggacaaagccaaca

SEQ ID NO: 4057389 - DNA, 25 bp, Homo sapien
tgcagacggacaaagccaacagcag

SEQ ID NO: 4057390 - DNA, 25 bp, Homo sapien
gacagacggaccgccggacaatgga

SEQ ID NO: 4057391 - DNA, 25 bp, Homo sapien
cggctcactgtaactcgagaatcaa

SEQ ID NO: 4057392 - DNA, 25 bp, Homo sapien
tgtcatatgactgccccggtacaag

SEQ ID NO: 4057393 - DNA, 25 bp, Homo sapien
catcttatgataagggctagctcct

SEQ ID NO: 4057394 - DNA, 25 bp, Homo sapien
ggtacaagcattagatgcagcctcc

SEQ ID NO: 4057395 - DNA, 25 bp, Homo sapien
gaattataccacacagaccggagcg

SEQ ID NO: 4057396 - DNA, 25 bp, Homo sapien
agagtcagggatacgcaggcttcga

SEQ ID NO: 4057397 - DNA, 25 bp, Homo sapien
gcagcagatcttagggagcaactcc

SEQ ID NO: 4057398 - DNA, 25 bp, Homo sapien
tactggcagccggttatggaagaat

SEQ ID NO: 4057399 - DNA, 25 bp, Homo sapien
gcgtggctatatcggccccgtggat

SEQ ID NO: 4057400 - DNA, 25 bp, Homo sapien
tcggatccctgcgtgtgtagtgaga

SEQ ID NO: 4057401 - DNA, 25 bp, Homo sapien
cgccattttggatggtgaaccctga

SEQ ID NO: 4057402 - DNA, 25 bp, Homo sapien
tttctggcccggagagacttcggga

SEQ ID NO: 4057403 - DNA, 25 bp, Homo sapien
gagactacaggcgagtgccactgcg

SEQ ID NO: 4057404 - DNA, 25 bp, Homo sapien
cccagctgattttttgtgtttttag

SEQ ID NO: 4057405 - DNA, 25 bp, Homo sapien
tgagactacaggcgagtgccactgc

SEQ ID NO: 4057406 - DNA, 25 bp, Homo sapien
ctgagactacaggcgagtgccactg

SEQ ID NO: 4057407 - DNA, 25 bp, Homo sapien
gccaatttacgtttccagcaggagt

SEQ ID NO: 4057408 - DNA, 25 bp, Homo sapien
accttgagaggtggtgccaatttac

SEQ ID NO: 4057409 - DNA, 25 bp, Homo sapien
ggtggtgccaatttacgtttccagc

SEQ ID NO: 4057410 - DNA, 25 bp, Homo sapien
gagaggtggtgccaatttacgtttc

SEQ ID NO: 4057411 - DNA, 25 bp, Homo sapien
cactctggtccaatgctactgtcgt

SEQ ID NO: 4057412 - DNA, 25 bp, Homo sapien
tacatggtcctgcattgtctggctc

SEQ ID NO: 4057413 - DNA, 25 bp, Homo sapien
ggttttgtccaaaacacagctccga

SEQ ID NO: 4057414 - DNA, 25 bp, Homo sapien
tgcaggcttgagaactgaccatgtt

SEQ ID NO: 4057415 - DNA, 25 bp, Homo sapien
taccaggcagaacaacctttgtaga

SEQ ID NO: 4057416 - DNA, 25 bp, Homo sapien
ggtcattggtagtaagaaagtctcg

SEQ ID NO: 4057417 - DNA, 25 bp, Homo sapien
taaaccaccaattattaccaggcag

SEQ ID NO: 4057418 - DNA, 25 bp, Homo sapien
caaaccttcgagattgcaaactgga

SEQ ID NO: 4057419 - DNA, 25 bp, Homo sapien
ttgggaggcttaggcaggcgttcga

SEQ ID NO: 4057420 - DNA, 25 bp, Homo sapien
gggaggcttaggcaggcgttcgaga

SEQ ID NO: 4057421 - DNA, 25 bp, Homo sapien
gaggcttaggcaggcgttcgagacc

SEQ ID NO: 4057422 - DNA, 25 bp, Homo sapien
caggcatagtgctgcatgcctgtgg

SEQ ID NO: 4057423 - DNA, 25 bp, Homo sapien
caagaggcgttcttagcccaggagt

SEQ ID NO: 4057424 - DNA, 25 bp, Homo sapien
aaaaaacccatctgagcttggtggt

SEQ ID NO: 4057425 - DNA, 25 bp, Homo sapien
cactctctgatcaaggtatacaaca

SEQ ID NO: 4057426 - DNA, 25 bp, Homo sapien
tataaaatactagatggaagactgg

SEQ ID NO: 4057427 - DNA, 25 bp, Homo sapien
cataggtctcttaaaccaggcaact

SEQ ID NO: 4057428 - DNA, 25 bp, Homo sapien
tgccctaattaggtcctggacccaa

SEQ ID NO: 4057429 - DNA, 25 bp, Homo sapien
gagtcatttctctggtatttgtaac

SEQ ID NO: 4057430 - DNA, 25 bp, Homo sapien
tgtaacgttgtgctccttgccctaa

SEQ ID NO: 4057431 - DNA, 25 bp, Homo sapien
tatacagtactcctcgctgcagggc

SEQ ID NO: 4057432 - DNA, 25 bp, Homo sapien
caccgggatccagttgcaaagtttg

SEQ ID NO: 4057433 - DNA, 25 bp, Homo sapien
gagagcacgttgtgaagcatcccag

SEQ ID NO: 4057434 - DNA, 25 bp, Homo sapien
tgtactggattctcagggagccctc

SEQ ID NO: 4057435 - DNA, 25 bp, Homo sapien
gacaaggtgccattcaagtcctagg

SEQ ID NO: 4057436 - DNA, 25 bp, Homo sapien
tacatacttgtttcaggcagccttt

SEQ ID NO: 4057437 - DNA, 25 bp, Homo sapien
tttggcccatagctaaggtcatcct

SEQ ID NO: 4057438 - DNA, 25 bp, Homo sapien
gaaaaatttttggtgcccatgcagc

SEQ ID NO: 4057439 - DNA, 25 bp, Homo sapien
taacaaatttgagagcttctgtagc

SEQ ID NO: 4057440 - DNA, 25 bp, Homo sapien
cagtgtatctattagtgcagcttct

SEQ ID NO: 4057441 - DNA, 25 bp, Homo sapien
ggccaactgattcctaacaaatttg

SEQ ID NO: 4057442 - DNA, 25 bp, Homo sapien
tctaaaacttcagtgtcactgccca

SEQ ID NO: 4057443 - DNA, 25 bp, Homo sapien
gccatgagaatggccgaaacgaaaa

SEQ ID NO: 4057444 - DNA, 25 bp, Homo sapien
tgagaatggccgaaacgaaaagatt

SEQ ID NO: 4057445 - DNA, 25 bp, Homo sapien
taccacaagtaccatcaagatgaca

SEQ ID NO: 4057446 - DNA, 25 bp, Homo sapien
gatgacactggtgaggatcagaaag

SEQ ID NO: 4057447 - DNA, 25 bp, Homo sapien
gctgaaaaatgtccggtagtcagag

SEQ ID NO: 4057448 - DNA, 25 bp, Homo sapien
ctgagctgaaaaatgtccggtagtc

SEQ ID NO: 4057449 - DNA, 25 bp, Homo sapien
aaatgtccggtagtcagagatgctg

SEQ ID NO: 4057450 - DNA, 25 bp, Homo sapien
cactgctgagctgaaaaatgtccgg

SEQ ID NO: 4057451 - DNA, 25 bp, Homo sapien
taggatgatcagcagaaagcccacc

SEQ ID NO: 4057452 - DNA, 25 bp, Homo sapien
ggaagcccacaaggtgagtcgcagc

SEQ ID NO: 4057453 - DNA, 25 bp, Homo sapien
tatgacgcagcaggttccataactg

SEQ ID NO: 4057454 - DNA, 25 bp, Homo sapien
gagtcgcagcagagttcacttttac

SEQ ID NO: 4057455 - DNA, 25 bp, Homo sapien
ggagctgtgccgaagaagccttaaa

SEQ ID NO: 4057456 - DNA, 25 bp, Homo sapien
gatatgggagtaacagaaggccaca

SEQ ID NO: 4057457 - DNA, 25 bp, Homo sapien
gagattaactcagcccagagagagg

SEQ ID NO: 4057458 - DNA, 25 bp, Homo sapien
caggttacttggaaggagccccaca

SEQ ID NO: 4057459 - DNA, 25 bp, Homo sapien
ggaggatgaagctaatgaggattat

SEQ ID NO: 4057460 - DNA, 25 bp, Homo sapien
gaggattatacttgtgtccagaatg

SEQ ID NO: 4057461 - DNA, 25 bp, Homo sapien
tgtcctggtcatcgcggtatcgtgc

SEQ ID NO: 4057462 - DNA, 25 bp, Homo sapien
ccagtgaagaacctccacttctgct

SEQ ID NO: 4057463 - DNA, 25 bp, Homo sapien
tagatgacttgtgagatgatagacc

SEQ ID NO: 4057464 - DNA, 25 bp, Homo sapien
gtgaagctttccagtctcaaagagg

SEQ ID NO: 4057465 - DNA, 25 bp, Homo sapien
ctgtatgaaggcatagtaacagacc

SEQ ID NO: 4057466 - DNA, 25 bp, Homo sapien
cagaccagtagataatagatgactt

SEQ ID NO: 4057467 - DNA, 25 bp, Homo sapien
gttatcacaaaacgccagctgacct

SEQ ID NO: 4057468 - DNA, 25 bp, Homo sapien
gcccacaggtatggccgttatcaca

SEQ ID NO: 4057469 - DNA, 25 bp, Homo sapien
gaacctccttagatgaagtccaggg

SEQ ID NO: 4057470 - DNA, 25 bp, Homo sapien
gggaataggctcttgggacgcccac

SEQ ID NO: 4057471 - DNA, 25 bp, Homo sapien
cccacatttgcaatgactgggctcc

SEQ ID NO: 4057472 - DNA, 25 bp, Homo sapien
aaattaattgtaccccacatttgca

SEQ ID NO: 4057473 - DNA, 25 bp, Homo sapien
cacatttgcaatgactgggctccag

SEQ ID NO: 4057474 - DNA, 25 bp, Homo sapien
ctgggctccaggactgcattcttac

SEQ ID NO: 4057475 - DNA, 25 bp, Homo sapien
aaatctattggagttctttgcagag

SEQ ID NO: 4057476 - DNA, 25 bp, Homo sapien
gagaactggtgcgaaaatgtcttcc

SEQ ID NO: 4057477 - DNA, 25 bp, Homo sapien
tgcagtcatcaacagggtaaggaag

SEQ ID NO: 4057478 - DNA, 25 bp, Homo sapien
ggcccaggggtagaaatcctgaaga

SEQ ID NO: 4057479 - DNA, 25 bp, Homo sapien
tcttgaacctggtactgacgaagaa

SEQ ID NO: 4057480 - DNA, 25 bp, Homo sapien
gaacctggtactgacgaagaacatt

SEQ ID NO: 4057481 - DNA, 25 bp, Homo sapien
catagacggggttgttcttatctct

SEQ ID NO: 4057482 - DNA, 25 bp, Homo sapien
cctggtactgacgaagaacattttg

SEQ ID NO: 4057483 - DNA, 25 bp, Homo sapien
cattctctttgttaagccgtggcat

SEQ ID NO: 4057484 - DNA, 25 bp, Homo sapien
tctctttgttaagccgtggcatcct

SEQ ID NO: 4057485 - DNA, 25 bp, Homo sapien
tcatcatcagtgagtataagaatgt

SEQ ID NO: 4057486 - DNA, 25 bp, Homo sapien
cagtgagtataagaatgtgaagaag

SEQ ID NO: 4057487 - DNA, 25 bp, Homo sapien
gattgacacccagggacctcagttc

SEQ ID NO: 4057488 - DNA, 25 bp, Homo sapien
cttggattgacacccagggacctca

SEQ ID NO: 4057489 - DNA, 25 bp, Homo sapien
cagttcccctaacttctgcaactcc

SEQ ID NO: 4057490 - DNA, 25 bp, Homo sapien
tgcaactccaatggttcttcccatc

SEQ ID NO: 4057491 - DNA, 25 bp, Homo sapien
caattccaagctataaagtgctgta

SEQ ID NO: 4057492 - DNA, 25 bp, Homo sapien
tccaagctataaagtgctgtaaaaa

SEQ ID NO: 4057493 - DNA, 25 bp, Homo sapien
tctgaagcactgataaaataattga

SEQ ID NO: 4057494 - DNA, 25 bp, Homo sapien
tgctcaattccaagctataaagtgc

SEQ ID NO: 4057495 - DNA, 25 bp, Homo sapien
gcagactgaagtcaaccatttggac

SEQ ID NO: 4057496 - DNA, 25 bp, Homo sapien
gagccagcagactgaagtcaaccat

SEQ ID NO: 4057497 - DNA, 25 bp, Homo sapien
gaagtcaaccatttggacaggccat

SEQ ID NO: 4057498 - DNA, 25 bp, Homo sapien
agaggagccagcagactgaagtcaa

SEQ ID NO: 4057499 - DNA, 25 bp, Homo sapien
ctaggaagtcacaggactggtgacc

SEQ ID NO: 4057500 - DNA, 25 bp, Homo sapien
cttgctccgtgggaagaatatgtgt

SEQ ID NO: 4057501 - DNA, 25 bp, Homo sapien
gctccgtgggaagaatatgtgtttc

SEQ ID NO: 4057502 - DNA, 25 bp, Homo sapien
agtttttgaagttggctggctgcat

SEQ ID NO: 4057503 - DNA, 25 bp, Homo sapien
agtgagatttcagcctctgcagaac

SEQ ID NO: 4057504 - DNA, 25 bp, Homo sapien
tgggtgagacccagcgtgcctaagt

SEQ ID NO: 4057505 - DNA, 25 bp, Homo sapien
tctgcagaactctatgcaggtaaca

SEQ ID NO: 4057506 - DNA, 25 bp, Homo sapien
gaactctatgcaggtaacagcagaa

SEQ ID NO: 4057507 - DNA, 25 bp, Homo sapien
tgacagccttgaccctccaagtgag

SEQ ID NO: 4057508 - DNA, 25 bp, Homo sapien
catggcggctgctcacacttggaga

SEQ ID NO: 4057509 - DNA, 25 bp, Homo sapien
agtaatgtcccaagaactccatggc

SEQ ID NO: 4057510 - DNA, 25 bp, Homo sapien
gatgatacgaggctggataaaagtt

SEQ ID NO: 4057511 - DNA, 25 bp, Homo sapien
tctcctgtggctcaatcaacgggaa

SEQ ID NO: 4057512 - DNA, 25 bp, Homo sapien
gcagtatggatgctgaccagcagtt

SEQ ID NO: 4057513 - DNA, 25 bp, Homo sapien
cgccctatgacaagattgattggga

SEQ ID NO: 4057514 - DNA, 25 bp, Homo sapien
tcaactaccattgtggcagagagag

SEQ ID NO: 4057515 - DNA, 25 bp, Homo sapien
tctcttggcagtggtgctgtttatc

SEQ ID NO: 4057516 - DNA, 25 bp, Homo sapien
ctcttggcagtggtgctgtttatct

SEQ ID NO: 4057517 - DNA, 25 bp, Homo sapien
taatcctgggtgaacttttccacaa

SEQ ID NO: 4057518 - DNA, 25 bp, Homo sapien
gatgccgagttgcaattgaaagcca

SEQ ID NO: 4057519 - DNA, 25 bp, Homo sapien
gcaagacagccgttggacccttgta

SEQ ID NO: 4057520 - DNA, 25 bp, Homo sapien
tagcagtgtcatgcagcaagacagc

SEQ ID NO: 4057521 - DNA, 25 bp, Homo sapien
gactttgctgggcttaaacacaaaa

SEQ ID NO: 4057522 - DNA, 25 bp, Homo sapien
tactccaaatatggaggaactataa

SEQ ID NO: 4057523 - DNA, 25 bp, Homo sapien
tggtaaattcatactctgagcactt

SEQ ID NO: 4057524 - DNA, 25 bp, Homo sapien
gaggataatttatatgctatgcgag

SEQ ID NO: 4057525 - DNA, 25 bp, Homo sapien
cacacataacagaatatcatttagt

SEQ ID NO: 4057526 - DNA, 25 bp, Homo sapien
cacacacacataacagaatatcatt

SEQ ID NO: 4057527 - DNA, 25 bp, Homo sapien
ccacctcagtggtgtgcaggtgcac

SEQ ID NO: 4057528 - DNA, 25 bp, Homo sapien
cccacctcagtggtgtgcaggtgca

SEQ ID NO: 4057529 - DNA, 25 bp, Homo sapien
tcttaactgccatgtcacagacaat

SEQ ID NO: 4057530 - DNA, 25 bp, Homo sapien
cagcaattgcacaggaaatgccact

SEQ ID NO: 4057531 - DNA, 25 bp, Homo sapien
cacagacaattacctggctgacata

SEQ ID NO: 4057532 - DNA, 25 bp, Homo sapien
ctttgaaactgggatgaagacccgg

SEQ ID NO: 4057533 - DNA, 25 bp, Homo sapien
caacagccaacaggatataagtact

SEQ ID NO: 4057534 - DNA, 25 bp, Homo sapien
acagccaacaggatataagtactca

SEQ ID NO: 4057535 - DNA, 25 bp, Homo sapien
agcaacagccaacaggatataagta

SEQ ID NO: 4057536 - DNA, 25 bp, Homo sapien
cagccaacaggatataagtactcac

SEQ ID NO: 4057537 - DNA, 25 bp, Homo sapien
ccagaattgtcatgccagagccgaa

SEQ ID NO: 4057538 - DNA, 25 bp, Homo sapien
gactgacgccagaattgtcatgcca

SEQ ID NO: 4057539 - DNA, 25 bp, Homo sapien
aattgtcatgccagagccgaaggct

SEQ ID NO: 4057540 - DNA, 25 bp, Homo sapien
agggactgacgccagaattgtcatg

SEQ ID NO: 4057541 - DNA, 25 bp, Homo sapien
cgtccctctgatccatagagggtga

SEQ ID NO: 4057542 - DNA, 25 bp, Homo sapien
ctgatccatagagggtgatgacaac

SEQ ID NO: 4057543 - DNA, 25 bp, Homo sapien
actccgtccctctgatccatagagg

SEQ ID NO: 4057544 - DNA, 25 bp, Homo sapien
gaggtgatggggctcactccgtccc

SEQ ID NO: 4057545 - DNA, 25 bp, Homo sapien
cgcttcttcgatatccggtgtagac

SEQ ID NO: 4057546 - DNA, 25 bp, Homo sapien
cttagctgttgtagcagcgcttctt

SEQ ID NO: 4057547 - DNA, 25 bp, Homo sapien
tgtagcagcgcttcttcgatatccg

SEQ ID NO: 4057548 - DNA, 25 bp, Homo sapien
tagctgttgtagcagcgcttcttcg

SEQ ID NO: 4057549 - DNA, 25 bp, Homo sapien
ttgagcgctggggtcattatcagcc

SEQ ID NO: 4057550 - DNA, 25 bp, Homo sapien
gggtcattatcagccaggacagtga

SEQ ID NO: 4057551 - DNA, 25 bp, Homo sapien
aataaggtagtgaaattgagcgctg

SEQ ID NO: 4057552 - DNA, 25 bp, Homo sapien
ataaggtagtgaaattgagcgctgg

SEQ ID NO: 4057553 - DNA, 25 bp, Homo sapien
aggaggatgaactccggcaggtgtc

SEQ ID NO: 4057554 - DNA, 25 bp, Homo sapien
gatgaactccggcaggtgtctggca

SEQ ID NO: 4057555 - DNA, 25 bp, Homo sapien
taggcctccacttggtatagttcct

SEQ ID NO: 4057556 - DNA, 25 bp, Homo sapien
ccacttggtatagttcctgcctcct

SEQ ID NO: 4057557 - DNA, 25 bp, Homo sapien
aacaggattgttggtcacgcgaagg

SEQ ID NO: 4057558 - DNA, 25 bp, Homo sapien
cctgggcacgacaaagaagtcgctg

SEQ ID NO: 4057559 - DNA, 25 bp, Homo sapien
tgtcttcaacattcacggtcctggg

SEQ ID NO: 4057560 - DNA, 25 bp, Homo sapien
aatcctaaaaggctggccagcagtg

SEQ ID NO: 4057561 - DNA, 25 bp, Homo sapien
gatgctctggattcagcacccacgt

SEQ ID NO: 4057562 - DNA, 25 bp, Homo sapien
tggatctcccagtagtaacactgag

SEQ ID NO: 4057563 - DNA, 25 bp, Homo sapien
tgaccgagaccaagctgggtgtctg

SEQ ID NO: 4057564 - DNA, 25 bp, Homo sapien
tatatagtaggtgccaatcccgtgc

SEQ ID NO: 4057565 - DNA, 25 bp, Homo sapien
gcctggtagtgagcattgctgcctc

SEQ ID NO: 4057566 - DNA, 25 bp, Homo sapien
cacagattctgtagtgggcagcctg

SEQ ID NO: 4057567 - DNA, 25 bp, Homo sapien
ttccacagattctgtagtgggcagc

SEQ ID NO: 4057568 - DNA, 25 bp, Homo sapien
ctggtagtgagcattgctgcctcgg

SEQ ID NO: 4057569 - DNA, 25 bp, Homo sapien
agcaagaacttagaagtgattgttc

SEQ ID NO: 4057570 - DNA, 25 bp, Homo sapien
tgccacaccttatcctttggaaggg

SEQ ID NO: 4057571 - DNA, 25 bp, Homo sapien
gttaggctgatactggaaccccagg

SEQ ID NO: 4057572 - DNA, 25 bp, Homo sapien
gggactgtcaggatctatgctcact

SEQ ID NO: 4057573 - DNA, 25 bp, Homo sapien
gaaccccaggtagagtgtcattaaa

SEQ ID NO: 4057574 - DNA, 25 bp, Homo sapien
gagcaatttacgattagcgcttagt

SEQ ID NO: 4057575 - DNA, 25 bp, Homo sapien
aagggattgaaagctagtcctgtta

SEQ ID NO: 4057576 - DNA, 25 bp, Homo sapien
ttaaatcatggacttggagcaattt

SEQ ID NO: 4057577 - DNA, 25 bp, Homo sapien
gacttggagcaatttacgattagcg

SEQ ID NO: 4057578 - DNA, 25 bp, Homo sapien
tggacattaactcctggatgtttat

SEQ ID NO: 4057579 - DNA, 25 bp, Homo sapien
ctaaagccgacggaaagcctagcct

SEQ ID NO: 4057580 - DNA, 25 bp, Homo sapien
tcaagagctccttcaaagctaaagc

SEQ ID NO: 4057581 - DNA, 25 bp, Homo sapien
cccagagtgtaagagctcagcggta

SEQ ID NO: 4057582 - DNA, 25 bp, Homo sapien
gcagagtagcattggcagaggtcaa

SEQ ID NO: 4057583 - DNA, 25 bp, Homo sapien
agtagcattggcagaggtcaaagtc

SEQ ID NO: 4057584 - DNA, 25 bp, Homo sapien
ctggttctgctctagaaatgcttcc

SEQ ID NO: 4057585 - DNA, 25 bp, Homo sapien
gtcactgaagactcgggagactggt

SEQ ID NO: 4057586 - DNA, 25 bp, Homo sapien
taaaccatgctgctacaaacttgag

SEQ ID NO: 4057587 - DNA, 25 bp, Homo sapien
tagatcatagatgtgtgggttatct

SEQ ID NO: 4057588 - DNA, 25 bp, Homo sapien
tacttagccatccattagatcatag

SEQ ID NO: 4057589 - DNA, 25 bp, Homo sapien
tgctaggttacatggcgattctatt

SEQ ID NO: 4057590 - DNA, 25 bp, Homo sapien
ctcagtatgacgcttggattccagc

SEQ ID NO: 4057591 - DNA, 25 bp, Homo sapien
ctgagtaactcctcactcaggtaaa

SEQ ID NO: 4057592 - DNA, 25 bp, Homo sapien
tgacgcttggattccagccaacttc

SEQ ID NO: 4057593 - DNA, 25 bp, Homo sapien
aaataagggaattgatgagattaac

SEQ ID NO: 4057594 - DNA, 25 bp, Homo sapien
tcctgtagtttgttaagagcttgca

SEQ ID NO: 4057595 - DNA, 25 bp, Homo sapien
agcttgcaaaccatgaactgctctg

SEQ ID NO: 4057596 - DNA, 25 bp, Homo sapien
ctggaggaactcacaagcttcctgt

SEQ ID NO: 4057597 - DNA, 25 bp, Homo sapien
ctgagctggcttagaaaatcttggg

SEQ ID NO: 4057598 - DNA, 25 bp, Homo sapien
tttctgccagagattgcccagcatg

SEQ ID NO: 4057599 - DNA, 25 bp, Homo sapien
gacacttgtagataagaggtgaagg

SEQ ID NO: 4057600 - DNA, 25 bp, Homo sapien
gaaggtattcggatgaccttcttcc

SEQ ID NO: 4057601 - DNA, 25 bp, Homo sapien
cagcatgcgtgacagacacgggcat

SEQ ID NO: 4057602 - DNA, 25 bp, Homo sapien
gctgatgttacctgtgatgtgatac

SEQ ID NO: 4057603 - DNA, 25 bp, Homo sapien
ggtgagctgtgttatcacagggaga

SEQ ID NO: 4057604 - DNA, 25 bp, Homo sapien
gctgctgggttcagatgcggctgat

SEQ ID NO: 4057605 - DNA, 25 bp, Homo sapien
cttgatagtactgaaggaaactggc

SEQ ID NO: 4057606 - DNA, 25 bp, Homo sapien
gagcaggaagaggatagtgacatgt

SEQ ID NO: 4057607 - DNA, 25 bp, Homo sapien
caggaagaggatagtgacatgtggt

SEQ ID NO: 4057608 - DNA, 25 bp, Homo sapien
aagaggatagtgacatgtggttgga

SEQ ID NO: 4057609 - DNA, 25 bp, Homo sapien
ggatagtgacatgtggttggaagat

SEQ ID NO: 4057610 - DNA, 25 bp, Homo sapien
atgcctgttctccagtgtctcctct

SEQ ID NO: 4057611 - DNA, 25 bp, Homo sapien
ctgttctccagtgtctcctcttgga

SEQ ID NO: 4057612 - DNA, 25 bp, Homo sapien
gcctgttctccagtgtctcctcttg

SEQ ID NO: 4057613 - DNA, 25 bp, Homo sapien
ccagtgtctcctcttggagttgtac

SEQ ID NO: 4057614 - DNA, 25 bp, Homo sapien
gattttatcaccggtttcatccgaa

SEQ ID NO: 4057615 - DNA, 25 bp, Homo sapien
ctgattttatcaccggtttcatccg

SEQ ID NO: 4057616 - DNA, 25 bp, Homo sapien
ttatcaccggtttcatccgaatcca

SEQ ID NO: 4057617 - DNA, 25 bp, Homo sapien
ttttatcaccggtttcatccgaatc

SEQ ID NO: 4057618 - DNA, 25 bp, Homo sapien
tcttgctattgcaactcctcttttt

SEQ ID NO: 4057619 - DNA, 25 bp, Homo sapien
tttcataatgggcatctccgtccaa

SEQ ID NO: 4057620 - DNA, 25 bp, Homo sapien
tctctggtacaaatgggaattattt

SEQ ID NO: 4057621 - DNA, 25 bp, Homo sapien
tgggcatctccgtccaaaaagtcac

SEQ ID NO: 4057622 - DNA, 25 bp, Homo sapien
cccctttggatgagatccgaatgaa

SEQ ID NO: 4057623 - DNA, 25 bp, Homo sapien
agtaagcacttgtcccctttggatg

SEQ ID NO: 4057624 - DNA, 25 bp, Homo sapien
gatccgaatgaagtttctggacagg

SEQ ID NO: 4057625 - DNA, 25 bp, Homo sapien
cttgtcccctttggatgagatccga

SEQ ID NO: 4057626 - DNA, 25 bp, Homo sapien
gcattacattttgcccaatccacca

SEQ ID NO: 4057627 - DNA, 25 bp, Homo sapien
tccttcttccagatagtcccggatg

SEQ ID NO: 4057628 - DNA, 25 bp, Homo sapien
gagatcttgaacttccttgttccaa

SEQ ID NO: 4057629 - DNA, 25 bp, Homo sapien
gatagtcccggatgagatcttgaac

SEQ ID NO: 4057630 - DNA, 25 bp, Homo sapien
ctgcacatgacagtaatgctgtgct

SEQ ID NO: 4057631 - DNA, 25 bp, Homo sapien
cctcaaagctgcattgaaatctgtt

SEQ ID NO: 4057632 - DNA, 25 bp, Homo sapien
gcacatgacagtaatgctgtgcttc

SEQ ID NO: 4057633 - DNA, 25 bp, Homo sapien
caaagctgcattgaaatctgttaag

SEQ ID NO: 4057634 - DNA, 25 bp, Homo sapien
tgttctgatgtataaccaaagccag

SEQ ID NO: 4057635 - DNA, 25 bp, Homo sapien
tggtgctgggctgtttagctcactt

SEQ ID NO: 4057636 - DNA, 25 bp, Homo sapien
tgggctgtttagctcacttcctaga

SEQ ID NO: 4057637 - DNA, 25 bp, Homo sapien
acttcctagaataatacttgttctg

SEQ ID NO: 4057638 - DNA, 25 bp, Homo sapien
tttctaatcggttcaggatctcatt

SEQ ID NO: 4057639 - DNA, 25 bp, Homo sapien
tttttctaatcggttcaggatctca

SEQ ID NO: 4057640 - DNA, 25 bp, Homo sapien
tctaatcggttcaggatctcattta

SEQ ID NO: 4057641 - DNA, 25 bp, Homo sapien
ttttttctaatcggttcaggatctc

SEQ ID NO: 4057642 - DNA, 25 bp, Homo sapien
tcttctccattgtcacaatttttac

SEQ ID NO: 4057643 - DNA, 25 bp, Homo sapien
tttcttctccattgtcacaattttt

SEQ ID NO: 4057644 - DNA, 25 bp, Homo sapien
ttcttctccattgtcacaattttta

SEQ ID NO: 4057645 - DNA, 25 bp, Homo sapien
taacgttgttcttgcagccttgagt

SEQ ID NO: 4057646 - DNA, 25 bp, Homo sapien
cagccttgagtgctattggccttca

SEQ ID NO: 4057647 - DNA, 25 bp, Homo sapien
gttagaccgtggagtatttaccaca

SEQ ID NO: 4057648 - DNA, 25 bp, Homo sapien
tgggcgcagtctgtcagcacttcct

SEQ ID NO: 4057649 - DNA, 25 bp, Homo sapien
tgaaggtatacatgagccaaagaga

SEQ ID NO: 4057650 - DNA, 25 bp, Homo sapien
atgcaattgaaggtatacatgagcc

SEQ ID NO: 4057651 - DNA, 25 bp, Homo sapien
cttatgcaattgaaggtatacatga

SEQ ID NO: 4057652 - DNA, 25 bp, Homo sapien
aaggtatacatgagccaaagagagt

SEQ ID NO: 4057653 - DNA, 25 bp, Homo sapien
tccgcacgaaaccagatatattcag

SEQ ID NO: 4057654 - DNA, 25 bp, Homo sapien
ctgtccgcacgaaaccagatatatt

SEQ ID NO: 4057655 - DNA, 25 bp, Homo sapien
cgaaaccagatatattcaggccagc

SEQ ID NO: 4057656 - DNA, 25 bp, Homo sapien
cacgaaaccagatatattcaggcca

SEQ ID NO: 4057657 - DNA, 25 bp, Homo sapien
tgcccaacagggcttagcgctggct

SEQ ID NO: 4057658 - DNA, 25 bp, Homo sapien
cattatggaaacttttttatgtgat

SEQ ID NO: 4057659 - DNA, 25 bp, Homo sapien
tacaactccatcagctttgcatctg

SEQ ID NO: 4057660 - DNA, 25 bp, Homo sapien
tagcgctggctgacaacatgagaca

SEQ ID NO: 4057661 - DNA, 25 bp, Homo sapien
ccacttgttgttcagtaaccatggg

SEQ ID NO: 4057662 - DNA, 25 bp, Homo sapien
gttagacgcacaccgcgactcaata

SEQ ID NO: 4057663 - DNA, 25 bp, Homo sapien
gagcattgaggtcagaaccaaactg

SEQ ID NO: 4057664 - DNA, 25 bp, Homo sapien
tcaatagttgttgagtgggagcatt

SEQ ID NO: 4057665 - DNA, 25 bp, Homo sapien
gcacaccgcgactcaatagttgttg

SEQ ID NO: 4057666 - DNA, 25 bp, Homo sapien
ggtacctgccgcctgcttcatagtc

SEQ ID NO: 4057667 - DNA, 25 bp, Homo sapien
ggcagagcggatatctttgtagaac

SEQ ID NO: 4057668 - DNA, 25 bp, Homo sapien
aatgttaatggcagagcggatatct

SEQ ID NO: 4057669 - DNA, 25 bp, Homo sapien
acagacagacccaatgttaatggca

SEQ ID NO: 4057670 - DNA, 25 bp, Homo sapien
gggcagcagatccaacacaagacac

SEQ ID NO: 4057671 - DNA, 25 bp, Homo sapien
gatgatcaaagtatatttgccatcg

SEQ ID NO: 4057672 - DNA, 25 bp, Homo sapien
acatctgacagtaagcgacagcctg

SEQ ID NO: 4057673 - DNA, 25 bp, Homo sapien
gacagtaagcgacagcctgtttgga

SEQ ID NO: 4057674 - DNA, 25 bp, Homo sapien
agtatatttgccatcgtctctaaaa

SEQ ID NO: 4057675 - DNA, 25 bp, Homo sapien
tcttcagatctatcattgaaatgtt

SEQ ID NO: 4057676 - DNA, 25 bp, Homo sapien
tctttcgaccaatagcaacatagat

SEQ ID NO: 4057677 - DNA, 25 bp, Homo sapien
tttcgaccaatagcaacatagatac

SEQ ID NO: 4057678 - DNA, 25 bp, Homo sapien
cgaccaatagcaacatagatacagt

SEQ ID NO: 4057679 - DNA, 25 bp, Homo sapien
cggtcaccaataatgagctcatgct

SEQ ID NO: 4057680 - DNA, 25 bp, Homo sapien
ccttcggtcaccaataatgagctca

SEQ ID NO: 4057681 - DNA, 25 bp, Homo sapien
cagtccttcggtcaccaataatgag

SEQ ID NO: 4057682 - DNA, 25 bp, Homo sapien
tttcccagtccttcggtcaccaata

SEQ ID NO: 4057683 - DNA, 25 bp, Homo sapien
gctatccacagccttaatgccagtc

SEQ ID NO: 4057684 - DNA, 25 bp, Homo sapien
gaccaattggcaccaagctatccac

SEQ ID NO: 4057685 - DNA, 25 bp, Homo sapien
tatccacagccttaatgccagtcgg

SEQ ID NO: 4057686 - DNA, 25 bp, Homo sapien
ccacagccttaatgccagtcggcat

SEQ ID NO: 4057687 - DNA, 25 bp, Homo sapien
tatgggtcttggaacccattggacc

SEQ ID NO: 4057688 - DNA, 25 bp, Homo sapien
ttatgggtcttggaacccattggac

SEQ ID NO: 4057689 - DNA, 25 bp, Homo sapien
ctttccatcaatagcattaccaagg

SEQ ID NO: 4057690 - DNA, 25 bp, Homo sapien
ccatcaatagcattaccaagggcat

SEQ ID NO: 4057691 - DNA, 25 bp, Homo sapien
gaacgtccacaatggttcctgtcct

SEQ ID NO: 4057692 - DNA, 25 bp, Homo sapien
tggaacgtccacaatggttcctgtc

SEQ ID NO: 4057693 - DNA, 25 bp, Homo sapien
gactggaacgtccacaatggttcct

SEQ ID NO: 4057694 - DNA, 25 bp, Homo sapien
caccgactggaacgtccacaatggt

SEQ ID NO: 4057695 - DNA, 25 bp, Homo sapien
cactatacctccttccttactttat

SEQ ID NO: 4057696 - DNA, 25 bp, Homo sapien
tcactatacctccttccttacttta

SEQ ID NO: 4057697 - DNA, 25 bp, Homo sapien
cttcactatacctccttccttactt

SEQ ID NO: 4057698 - DNA, 25 bp, Homo sapien
gtttcgaagttcaaggacatatcct

SEQ ID NO: 4057699 - DNA, 25 bp, Homo sapien
gttcaaggacatatcctttaagcct

SEQ ID NO: 4057700 - DNA, 25 bp, Homo sapien
tcagtttcgaagttcaaggacatat

SEQ ID NO: 4057701 - DNA, 25 bp, Homo sapien
aagttcaaggacatatcctttaagc

SEQ ID NO: 4057702 - DNA, 25 bp, Homo sapien
gaacattcctcagcccatgtacatg

SEQ ID NO: 4057703 - DNA, 25 bp, Homo sapien
cattcctcagcccatgtacatggac

SEQ ID NO: 4057704 - DNA, 25 bp, Homo sapien
cttggaacattcctcagcccatgta

SEQ ID NO: 4057705 - DNA, 25 bp, Homo sapien
ctcagcccatgtacatggacaatac

SEQ ID NO: 4057706 - DNA, 25 bp, Homo sapien
aacatgctctttaagaatagaggac

SEQ ID NO: 4057707 - DNA, 25 bp, Homo sapien
gtcctgcccaccgagtgaggtcacg

SEQ ID NO: 4057708 - DNA, 25 bp, Homo sapien
tcacgggctacggccgcggagacac

SEQ ID NO: 4057709 - DNA, 25 bp, Homo sapien
ctacggccgcggagacacacacaga

SEQ ID NO: 4057710 - DNA, 25 bp, Homo sapien
ctttgcagtttctccacaggtggta

SEQ ID NO: 4057711 - DNA, 25 bp, Homo sapien
gtttctccacaggtggtacctccac

SEQ ID NO: 4057712 - DNA, 25 bp, Homo sapien
ttctccacaggtggtacctccacag

SEQ ID NO: 4057713 - DNA, 25 bp, Homo sapien
cagtttctccacaggtggtacctcc

SEQ ID NO: 4057714 - DNA, 25 bp, Homo sapien
gacacctgaaagtgagtcccgcgag

SEQ ID NO: 4057715 - DNA, 25 bp, Homo sapien
gcctagcgttgtgtgccggatccaa

SEQ ID NO: 4057716 - DNA, 25 bp, Homo sapien
catttgcacgtggactcggtcaggc

SEQ ID NO: 4057717 - DNA, 25 bp, Homo sapien
tagtgaacacatgaccgcctagcgt

SEQ ID NO: 4057718 - DNA, 25 bp, Homo sapien
caaacccaaaaggtgaagaagtgct

SEQ ID NO: 4057719 - DNA, 25 bp, Homo sapien
catgcacagctgctcttagtaagag

SEQ ID NO: 4057720 - DNA, 25 bp, Homo sapien
ccctgggcaatttttactacagcaa

SEQ ID NO: 4057721 - DNA, 25 bp, Homo sapien
ccagcaggcttgtattggctagcac

SEQ ID NO: 4057722 - DNA, 25 bp, Homo sapien
gcaggccaagctcacagaaggtaaa

SEQ ID NO: 4057723 - DNA, 25 bp, Homo sapien
cacgggctttcagtggtggaacaca

SEQ ID NO: 4057724 - DNA, 25 bp, Homo sapien
caatgatcacacaggcaatgagggc

SEQ ID NO: 4057725 - DNA, 25 bp, Homo sapien
tgttaccgtaactagggaggcctga

SEQ ID NO: 4057726 - DNA, 25 bp, Homo sapien
cctggccacaacatgcatttttgaa

SEQ ID NO: 4057727 - DNA, 25 bp, Homo sapien
atgcatttttgaagacgcctccggc

SEQ ID NO: 4057728 - DNA, 25 bp, Homo sapien
tttgaagacgcctccggcgatgcgg

SEQ ID NO: 4057729 - DNA, 25 bp, Homo sapien
gcgatgcgggtgttctctgtggcct

SEQ ID NO: 4057730 - DNA, 25 bp, Homo sapien
cagggtaccctcagttattatatga

SEQ ID NO: 4057731 - DNA, 25 bp, Homo sapien
gttgtccagggagcacctaagatac

SEQ ID NO: 4057732 - DNA, 25 bp, Homo sapien
ttttaagtaagctgacctaattgct

SEQ ID NO: 4057733 - DNA, 25 bp, Homo sapien
taaactgagaccctcttgagagtaa

SEQ ID NO: 4057734 - DNA, 25 bp, Homo sapien
ctgctcccggctgagttttcaatta

SEQ ID NO: 4057735 - DNA, 25 bp, Homo sapien
cgcgatcacggttcattggagcctc

SEQ ID NO: 4057736 - DNA, 25 bp, Homo sapien
tcccggctgagttttcaattataga

SEQ ID NO: 4057737 - DNA, 25 bp, Homo sapien
gcgatcacggttcattggagcctca

SEQ ID NO: 4057738 - DNA, 25 bp, Homo sapien
ccatcttttgccccacaagtatttg

SEQ ID NO: 4057739 - DNA, 25 bp, Homo sapien
atgcagcaaaacatcctcgtagctg

SEQ ID NO: 4057740 - DNA, 25 bp, Homo sapien
catcttttgccccacaagtatttgc

SEQ ID NO: 4057741 - DNA, 25 bp, Homo sapien
aatgcagcaaaacatcctcgtagct

SEQ ID NO: 4057742 - DNA, 25 bp, Homo sapien
ttgtggaaacccactgacctgcagc

SEQ ID NO: 4057743 - DNA, 25 bp, Homo sapien
tttgatcgctattgtggaaacccac

SEQ ID NO: 4057744 - DNA, 25 bp, Homo sapien
tgtttctgctttagtttgatcgcta

SEQ ID NO: 4057745 - DNA, 25 bp, Homo sapien
gctttagtttgatcgctattgtgga

SEQ ID NO: 4057746 - DNA, 25 bp, Homo sapien
ggtgccagcgcacatactctggaca

SEQ ID NO: 4057747 - DNA, 25 bp, Homo sapien
tgggctccgacatgccacgtcaggt

SEQ ID NO: 4057748 - DNA, 25 bp, Homo sapien
tccggattcgttccttactccagga

SEQ ID NO: 4057749 - DNA, 25 bp, Homo sapien
gctgctctaaaagccggctcattgc

SEQ ID NO: 4057750 - DNA, 25 bp, Homo sapien
gggtgtgctattgaccccagactca

SEQ ID NO: 4057751 - DNA, 25 bp, Homo sapien
ttagtaatgtccatgaacgaggagc

SEQ ID NO: 4057752 - DNA, 25 bp, Homo sapien
caccgggggtgtgctattgacccca

SEQ ID NO: 4057753 - DNA, 25 bp, Homo sapien
agaggacttaggggtatatcaggaa

SEQ ID NO: 4057754 - DNA, 25 bp, Homo sapien
tggctgagaccatgggcttcaaccc

SEQ ID NO: 4057755 - DNA, 25 bp, Homo sapien
gatgggatttgtggatcctcgcagc

SEQ ID NO: 4057756 - DNA, 25 bp, Homo sapien
gaggaacagtcagcccaaatagata

SEQ ID NO: 4057757 - DNA, 25 bp, Homo sapien
gccatcggcctcacatgagaaagct

SEQ ID NO: 4057758 - DNA, 25 bp, Homo sapien
catggcggcagactgagaagtgcag

SEQ ID NO: 4057759 - DNA, 25 bp, Homo sapien
gcatgaggataactgccccctgatt

SEQ ID NO: 4057760 - DNA, 25 bp, Homo sapien
aaccatatcaatggttccatgttct

SEQ ID NO: 4057761 - DNA, 25 bp, Homo sapien
agacatttcctgatttccagtatag

SEQ ID NO: 4057762 - DNA, 25 bp, Homo sapien
tgaaggtcacttggctgctgcacca

SEQ ID NO: 4057763 - DNA, 25 bp, Homo sapien
ttctcctgagtagtaaccttggcac

SEQ ID NO: 4057764 - DNA, 25 bp, Homo sapien
gaatttgtgaaatacctgggcagca

SEQ ID NO: 4057765 - DNA, 25 bp, Homo sapien
ctgggcagcaatacaaggacgaggc

SEQ ID NO: 4057766 - DNA, 25 bp, Homo sapien
ttttccagcatctctcagtctctca

SEQ ID NO: 4057767 - DNA, 25 bp, Homo sapien
cattcactgagatgctgagttttcc

SEQ ID NO: 4057768 - DNA, 25 bp, Homo sapien
agtcattcactgagatgctgagttt

SEQ ID NO: 4057769 - DNA, 25 bp, Homo sapien
ttcactgagatgctgagttttccag

SEQ ID NO: 4057770 - DNA, 25 bp, Homo sapien
ctgccagcatccagtgggtcacatc

SEQ ID NO: 4057771 - DNA, 25 bp, Homo sapien
gcttggcaagtttatgcaagtccct

SEQ ID NO: 4057772 - DNA, 25 bp, Homo sapien
tatgcaagtccctgatttcttgcac

SEQ ID NO: 4057773 - DNA, 25 bp, Homo sapien
tcttcagtggaaggggatttgcttt

SEQ ID NO: 4057774 - DNA, 25 bp, Homo sapien
gggatttgctttgcggcttggcaag

SEQ ID NO: 4057775 - DNA, 25 bp, Homo sapien
tccacatggtttcagactgctccag

SEQ ID NO: 4057776 - DNA, 25 bp, Homo sapien
atggtccacatggtttcagactgct

SEQ ID NO: 4057777 - DNA, 25 bp, Homo sapien
catggtccacatggtttcagactgc

SEQ ID NO: 4057778 - DNA, 25 bp, Homo sapien
tggtccacatggtttcagactgctc

SEQ ID NO: 4057779 - DNA, 25 bp, Homo sapien
gctggttctgcggacagcttttatg

SEQ ID NO: 4057780 - DNA, 25 bp, Homo sapien
ctgcggacagcttttatgcttctga

SEQ ID NO: 4057781 - DNA, 25 bp, Homo sapien
gttctgcggacagcttttatgcttc

SEQ ID NO: 4057782 - DNA, 25 bp, Homo sapien
tggttctgcggacagcttttatgct

SEQ ID NO: 4057783 - DNA, 25 bp, Homo sapien
gacacctggtatgcgactgggatct

SEQ ID NO: 4057784 - DNA, 25 bp, Homo sapien
ggctgaccaagaccaatgcataagg

SEQ ID NO: 4057785 - DNA, 25 bp, Homo sapien
gctgatcaatgaacaatggctgctg

SEQ ID NO: 4057786 - DNA, 25 bp, Homo sapien
agaagacaccgaagagccctgtagg

SEQ ID NO: 4057787 - DNA, 25 bp, Homo sapien
cagctttttgcactgtactcaggca

SEQ ID NO: 4057788 - DNA, 25 bp, Homo sapien
tttcaggactgccaagaacattggg

SEQ ID NO: 4057789 - DNA, 25 bp, Homo sapien
gcaatgatgtcacggatatttcagg

SEQ ID NO: 4057790 - DNA, 25 bp, Homo sapien
ggtaggagcatgcatccctggcact

SEQ ID NO: 4057791 - DNA, 25 bp, Homo sapien
gaactactacagactgcgcacagaa

SEQ ID NO: 4057792 - DNA, 25 bp, Homo sapien
ggtgatgccatgcagcctacctcat

SEQ ID NO: 4057793 - DNA, 25 bp, Homo sapien
gataagcgttttgtcgccagtagcc

SEQ ID NO: 4057794 - DNA, 25 bp, Homo sapien
cagaaagttcgttgctctccttgga

SEQ ID NO: 4057795 - DNA, 25 bp, Homo sapien
ctaatgcaaggctggccggaagccc

SEQ ID NO: 4057796 - DNA, 25 bp, Homo sapien
gaagaccatagctgagaactaatgc

SEQ ID NO: 4057797 - DNA, 25 bp, Homo sapien
agcaagatttcagcctggaagaggg

SEQ ID NO: 4057798 - DNA, 25 bp, Homo sapien
ccggaagcccttgcctgaaagcaag

SEQ ID NO: 4057799 - DNA, 25 bp, Homo sapien
catgcaggagctcaataacatcaga

SEQ ID NO: 4057800 - DNA, 25 bp, Homo sapien
atcagcagggatacaagcagtgcct

SEQ ID NO: 4057801 - DNA, 25 bp, Homo sapien
ggctgttgtagctccatgcatcatg

SEQ ID NO: 4057802 - DNA, 25 bp, Homo sapien
gagtgactccctcctcttatcagca

SEQ ID NO: 4057803 - DNA, 25 bp, Homo sapien
gatgtatgagtcgaggaaccggcaa

SEQ ID NO: 4057804 - DNA, 25 bp, Homo sapien
tcagcggctgctaggcaggtcacaa

SEQ ID NO: 4057805 - DNA, 25 bp, Homo sapien
aaaaatctgctcctgctaaggtggc

SEQ ID NO: 4057806 - DNA, 25 bp, Homo sapien
ccaccacgaggtttaaagaggagca

SEQ ID NO: 4057807 - DNA, 25 bp, Homo sapien
cattgctcctcgatagattacttca

SEQ ID NO: 4057808 - DNA, 25 bp, Homo sapien
gaatattcttgggatcaataggact

SEQ ID NO: 4057809 - DNA, 25 bp, Homo sapien
taggactttggacaataagcttccc

SEQ ID NO: 4057810 - DNA, 25 bp, Homo sapien
ctaaatgtcttgatagagaaggtca

SEQ ID NO: 4057811 - DNA, 25 bp, Homo sapien
tcatgttacttattcttgacaggct

SEQ ID NO: 4057812 - DNA, 25 bp, Homo sapien
ttaaaattcaatggcgaaaagcagg

SEQ ID NO: 4057813 - DNA, 25 bp, Homo sapien
gaaactttgcaagagagaagcacat

SEQ ID NO: 4057814 - DNA, 25 bp, Homo sapien
gacttatggatggtagtgctttgcc

SEQ ID NO: 4057815 - DNA, 25 bp, Homo sapien
gctgcccattgaagaaaaagacagt

SEQ ID NO: 4057816 - DNA, 25 bp, Homo sapien
tgtcaaaatactgtgtataaactgc

SEQ ID NO: 4057817 - DNA, 25 bp, Homo sapien
gcagtttggtccacatctaccaggt

SEQ ID NO: 4057818 - DNA, 25 bp, Homo sapien
tctaccaggtatatagcagccattt

SEQ ID NO: 4057819 - DNA, 25 bp, Homo sapien
tagaaatggcggtaagaggtcttag

SEQ ID NO: 4057820 - DNA, 25 bp, Homo sapien
tgcatcaggcacatactggaggcag

SEQ ID NO: 4057821 - DNA, 25 bp, Homo sapien
cagtagaaatggcggtaagaggtct

SEQ ID NO: 4057822 - DNA, 25 bp, Homo sapien
tcttagttctgggttaggtctctct

SEQ ID NO: 4057823 - DNA, 25 bp, Homo sapien
tttttgctagtcagcttgggcagta

SEQ ID NO: 4057824 - DNA, 25 bp, Homo sapien
tcagcttgggcagtaggaagctcat

SEQ ID NO: 4057825 - DNA, 25 bp, Homo sapien
ctttttatcgcctggtctacttcct

SEQ ID NO: 4057826 - DNA, 25 bp, Homo sapien
tcagcagtactttttatcgcctggt

SEQ ID NO: 4057827 - DNA, 25 bp, Homo sapien
acccaaatgtgaatcctcactgtca

SEQ ID NO: 4057828 - DNA, 25 bp, Homo sapien
cccaaatgtgaatcctcactgtcac

SEQ ID NO: 4057829 - DNA, 25 bp, Homo sapien
ctttgaccaataactccactgcttt

SEQ ID NO: 4057830 - DNA, 25 bp, Homo sapien
tctttgaccaataactccactgctt

SEQ ID NO: 4057831 - DNA, 25 bp, Homo sapien
gggcgcggacagctcctttcatcag

SEQ ID NO: 4057832 - DNA, 25 bp, Homo sapien
agcaaccacttctcggaagagcccg

SEQ ID NO: 4057833 - DNA, 25 bp, Homo sapien
aggaccctaagaccaagtcacccag

SEQ ID NO: 4057834 - DNA, 25 bp, Homo sapien
cgctagcgggaaggaaaccgaacag

SEQ ID NO: 4057835 - DNA, 25 bp, Homo sapien
gctttcaaggtgtggattttggctc

SEQ ID NO: 4057836 - DNA, 25 bp, Homo sapien
aagggtcccaagagtcgcgcttggt

SEQ ID NO: 4057837 - DNA, 25 bp, Homo sapien
gcgccccagaatccgggacagaagg

SEQ ID NO: 4057838 - DNA, 25 bp, Homo sapien
ttaagggacaataatggccgctttc

SEQ ID NO: 4057839 - DNA, 25 bp, Homo sapien
agggatgctgcatccgtcctggccg

SEQ ID NO: 4057840 - DNA, 25 bp, Homo sapien
tctctcacagtgtcatttataccag

SEQ ID NO: 4057841 - DNA, 25 bp, Homo sapien
agactgtcaccgagcccgagtagga

SEQ ID NO: 4057842 - DNA, 25 bp, Homo sapien
agcggcctcgctgagatccagggat

SEQ ID NO: 4057843 - DNA, 25 bp, Homo sapien
tcaactgcgtagaatggcagtccag

SEQ ID NO: 4057844 - DNA, 25 bp, Homo sapien
tggatttcctcacatgcgcacagat

SEQ ID NO: 4057845 - DNA, 25 bp, Homo sapien
cagatgtcaccaatatgcagctttc

SEQ ID NO: 4057846 - DNA, 25 bp, Homo sapien
taaacaattctggattctggtggca

SEQ ID NO: 4057847 - DNA, 25 bp, Homo sapien
tgagattgctgaggcattgagtcag

SEQ ID NO: 4057848 - DNA, 25 bp, Homo sapien
actctcgtcttcagtgagattgctg

SEQ ID NO: 4057849 - DNA, 25 bp, Homo sapien
tcttgggatagttggttctgagtca

SEQ ID NO: 4057850 - DNA, 25 bp, Homo sapien
gaattcccgattctaccatgaacat

SEQ ID NO: 4057851 - DNA, 25 bp, Homo sapien
ctcctcaaggcgctcacagtgggaa

SEQ ID NO: 4057852 - DNA, 25 bp, Homo sapien
tcaaggcgctcacagtgggaatcgc

SEQ ID NO: 4057853 - DNA, 25 bp, Homo sapien
ggcgctcacagtgggaatcgccctc

SEQ ID NO: 4057854 - DNA, 25 bp, Homo sapien
gaagaggacagtggctatggctcct

SEQ ID NO: 4057855 - DNA, 25 bp, Homo sapien
tatcaagtccttaggcccgacagct

SEQ ID NO: 4057856 - DNA, 25 bp, Homo sapien
gttaggagtcccctctatcaagtcc

SEQ ID NO: 4057857 - DNA, 25 bp, Homo sapien
gaagtctgctctcccgtgggattga

SEQ ID NO: 4057858 - DNA, 25 bp, Homo sapien
tccattgctcgcagtcatgtggcag

SEQ ID NO: 4057859 - DNA, 25 bp, Homo sapien
tttagtcccttagatttgagttcac

SEQ ID NO: 4057860 - DNA, 25 bp, Homo sapien
gactcttaggatacctctctgcatc

SEQ ID NO: 4057861 - DNA, 25 bp, Homo sapien
ggatcagacccaggccgtctcacat

SEQ ID NO: 4057862 - DNA, 25 bp, Homo sapien
tatcttattggccagtgacttctct

SEQ ID NO: 4057863 - DNA, 25 bp, Homo sapien
catgattctagtcccaggcccattg

SEQ ID NO: 4057864 - DNA, 25 bp, Homo sapien
cctccctgtgggatttcatctgtac

SEQ ID NO: 4057865 - DNA, 25 bp, Homo sapien
gctccagaagaagggctaaattggc

SEQ ID NO: 4057866 - DNA, 25 bp, Homo sapien
gaataggtggaagtcagtgattcac

SEQ ID NO: 4057867 - DNA, 25 bp, Homo sapien
tgcatgtggcactgtgaacctcctc

SEQ ID NO: 4057868 - DNA, 25 bp, Homo sapien
attagatcccggctgagctgcgtgt

SEQ ID NO: 4057869 - DNA, 25 bp, Homo sapien
ttagcgtctgttgatggccattgcc

SEQ ID NO: 4057870 - DNA, 25 bp, Homo sapien
taagctggcgatgagtccaaccgct

SEQ ID NO: 4057871 - DNA, 25 bp, Homo sapien
agttcttccatgcaggagcacggca

SEQ ID NO: 4057872 - DNA, 25 bp, Homo sapien
gattacatcgccagtcgaacatggg

SEQ ID NO: 4057873 - DNA, 25 bp, Homo sapien
gaagatctacactccaggccggaaa

SEQ ID NO: 4057874 - DNA, 25 bp, Homo sapien
ggtggctggacccatcgcatctaaa

SEQ ID NO: 4057875 - DNA, 25 bp, Homo sapien
cctgaatttgccacggtactggagc

SEQ ID NO: 4057876 - DNA, 25 bp, Homo sapien
taatcttggccctaggttggaggac

SEQ ID NO: 4057877 - DNA, 25 bp, Homo sapien
tggccccgttgtggactcctgagtc

SEQ ID NO: 4057878 - DNA, 25 bp, Homo sapien
actagaagttggctgatgtgtgacc

SEQ ID NO: 4057879 - DNA, 25 bp, Homo sapien
gtatggatcccatcaccgaggtagt

SEQ ID NO: 4057880 - DNA, 25 bp, Homo sapien
tctatagctgtgtagtaccccatgg

SEQ ID NO: 4057881 - DNA, 25 bp, Homo sapien
aatagtgcagcgatgaacatgcgag

SEQ ID NO: 4057882 - DNA, 25 bp, Homo sapien
tatacgcccactcatgggattgctg

SEQ ID NO: 4057883 - DNA, 25 bp, Homo sapien
atggaatttcacttgtattgaggtg

SEQ ID NO: 4057884 - DNA, 25 bp, Homo sapien
taatggaatttcacttgtattgagg

SEQ ID NO: 4057885 - DNA, 25 bp, Homo sapien
aatggaatttcacttgtattgaggt

SEQ ID NO: 4057886 - DNA, 25 bp, Homo sapien
tggaatttcacttgtattgaggtgg

SEQ ID NO: 4057887 - DNA, 25 bp, Homo sapien
gaaacacccgtggaaatgctgctca

SEQ ID NO: 4057888 - DNA, 25 bp, Homo sapien
ggttctaaagctcactccatggcag

SEQ ID NO: 4057889 - DNA, 25 bp, Homo sapien
tggcaggaagtggacaaaactcaac

SEQ ID NO: 4057890 - DNA, 25 bp, Homo sapien
taggctgggaccgtgatatactcct

SEQ ID NO: 4057891 - DNA, 25 bp, Homo sapien
taacatggagtttacaggtggcagg

SEQ ID NO: 4057892 - DNA, 25 bp, Homo sapien
aaaatgacttgaggccacaaaaggc

SEQ ID NO: 4057893 - DNA, 25 bp, Homo sapien
ttggtccaaagtcgctaagaaaatg

SEQ ID NO: 4057894 - DNA, 25 bp, Homo sapien
tgtgaggcacttgggtatgcttcag

SEQ ID NO: 4057895 - DNA, 25 bp, Homo sapien
atttttttgacaaatggcagacgta

SEQ ID NO: 4057896 - DNA, 25 bp, Homo sapien
tttttttgacaaatggcagacgtac

SEQ ID NO: 4057897 - DNA, 25 bp, Homo sapien
tatttttttgacaaatggcagacgt

SEQ ID NO: 4057898 - DNA, 25 bp, Homo sapien
ggtgaggtccattctttgacccata

SEQ ID NO: 4057899 - DNA, 25 bp, Homo sapien
ccgatgtacttggtgaggtccattc

SEQ ID NO: 4057900 - DNA, 25 bp, Homo sapien
atcccgatgtacttggtgaggtcca

SEQ ID NO: 4057901 - DNA, 25 bp, Homo sapien
gtgaggtccattctttgacccatat

SEQ ID NO: 4057902 - DNA, 25 bp, Homo sapien
cgttctgctcgggcctagggctttg

SEQ ID NO: 4057903 - DNA, 25 bp, Homo sapien
gactccgttctgctcgggcctaggg

SEQ ID NO: 4057904 - DNA, 25 bp, Homo sapien
ctccgttctgctcgggcctagggct

SEQ ID NO: 4057905 - DNA, 25 bp, Homo sapien
caaggtgccgcacactttctccctc

SEQ ID NO: 4057906 - DNA, 25 bp, Homo sapien
tgtgttctcggctttcatcttcttc

SEQ ID NO: 4057907 - DNA, 25 bp, Homo sapien
cttgtgttctcggctttcatcttct

SEQ ID NO: 4057908 - DNA, 25 bp, Homo sapien
tctcttctatctccttcttcagctt

SEQ ID NO: 4057909 - DNA, 25 bp, Homo sapien
cttctcttctatctccttcttcagc

SEQ ID NO: 4057910 - DNA, 25 bp, Homo sapien
tgcaagtggaccattacactgtgga

SEQ ID NO: 4057911 - DNA, 25 bp, Homo sapien
agtggaccattacactgtggaggtg

SEQ ID NO: 4057912 - DNA, 25 bp, Homo sapien
caagtggaccattacactgtggagg

SEQ ID NO: 4057913 - DNA, 25 bp, Homo sapien
gctgcaagtggaccattacactgtg

SEQ ID NO: 4057914 - DNA, 25 bp, Homo sapien
aaggacgggttgtgttggggctgct

SEQ ID NO: 4057915 - DNA, 25 bp, Homo sapien
tccttttcgccactcagcttggcaa

SEQ ID NO: 4057916 - DNA, 25 bp, Homo sapien
ttcgccactcagcttggcaatgtat

SEQ ID NO: 4057917 - DNA, 25 bp, Homo sapien
tcgccactcagcttggcaatgtatt

SEQ ID NO: 4057918 - DNA, 25 bp, Homo sapien
ttttcgccactcagcttggcaatgt

SEQ ID NO: 4057919 - DNA, 25 bp, Homo sapien
gtttcctagtttctcattggcgacc

SEQ ID NO: 4057920 - DNA, 25 bp, Homo sapien
aatctgatcattccctcggtagagc

SEQ ID NO: 4057921 - DNA, 25 bp, Homo sapien
gctccaagttggtcataatctgatc

SEQ ID NO: 4057922 - DNA, 25 bp, Homo sapien
gctgttttgcccattgctccaagtt

SEQ ID NO: 4057923 - DNA, 25 bp, Homo sapien
ggtcataatctgatcattccctcgg

SEQ ID NO: 4057924 - DNA, 25 bp, Homo sapien
ttgggcacagaccactggggcaggc

SEQ ID NO: 4057925 - DNA, 25 bp, Homo sapien
gggccttcgctctgctcagtatcta

SEQ ID NO: 4057926 - DNA, 25 bp, Homo sapien
catttgggtggtcataggatgtgcc

SEQ ID NO: 4057927 - DNA, 25 bp, Homo sapien
aacacaggtgggttgaaccagcagc

SEQ ID NO: 4057928 - DNA, 25 bp, Homo sapien
tatcaacaaagccacaagaacacag

SEQ ID NO: 4057929 - DNA, 25 bp, Homo sapien
cttgaggtcattctggtgttgcttc

SEQ ID NO: 4057930 - DNA, 25 bp, Homo sapien
tccttatcgtcctcaaggaggttct

SEQ ID NO: 4057931 - DNA, 25 bp, Homo sapien
gctgccagcatcttgaggtcattct

SEQ ID NO: 4057932 - DNA, 25 bp, Homo sapien
cttatcgtcctcaaggaggttctct

SEQ ID NO: 4057933 - DNA, 25 bp, Homo sapien
ctagcttcttgtcaaaggcgtgcac

SEQ ID NO: 4057934 - DNA, 25 bp, Homo sapien
cctctagcttcttgtcaaaggcgtg

SEQ ID NO: 4057935 - DNA, 25 bp, Homo sapien
ctcctctagcttcttgtcaaaggcg

SEQ ID NO: 4057936 - DNA, 25 bp, Homo sapien
tctagcttcttgtcaaaggcgtgca

SEQ ID NO: 4057937 - DNA, 25 bp, Homo sapien
tgggtctgtgtcaagctttgctgca

SEQ ID NO: 4057938 - DNA, 25 bp, Homo sapien
aattccgtattgagctttttcatcc

SEQ ID NO: 4057939 - DNA, 25 bp, Homo sapien
catcctttcctcataagcaatgatt

SEQ ID NO: 4057940 - DNA, 25 bp, Homo sapien
ttgtctctgaggtcacgtgattgag

SEQ ID NO: 4057941 - DNA, 25 bp, Homo sapien
cgaatggctgtcagagactttgacc

SEQ ID NO: 4057942 - DNA, 25 bp, Homo sapien
aaagacaaagaggacgaatggctgt

SEQ ID NO: 4057943 - DNA, 25 bp, Homo sapien
cagagactttgaccctctctgctga

SEQ ID NO: 4057944 - DNA, 25 bp, Homo sapien
ctgagtcctgaatggaggagggttc

SEQ ID NO: 4057945 - DNA, 25 bp, Homo sapien
gacacggacggtcaccttgcctagt

SEQ ID NO: 4057946 - DNA, 25 bp, Homo sapien
ctgcccagggtgacacggacggtca

SEQ ID NO: 4057947 - DNA, 25 bp, Homo sapien
gggtgacacggacggtcaccttgcc

SEQ ID NO: 4057948 - DNA, 25 bp, Homo sapien
tgcccagggtgacacggacggtcac

SEQ ID NO: 4057949 - DNA, 25 bp, Homo sapien
ctttggtgatggtagtctggagata

SEQ ID NO: 4057950 - DNA, 25 bp, Homo sapien
taatgcatcataggcttctttggtg

SEQ ID NO: 4057951 - DNA, 25 bp, Homo sapien
gctgacttccgggataatgcatcat

SEQ ID NO: 4057952 - DNA, 25 bp, Homo sapien
cctggcaggcggctgacttccggga

SEQ ID NO: 4057953 - DNA, 25 bp, Homo sapien
caggctcattaaggactccttctga

SEQ ID NO: 4057954 - DNA, 25 bp, Homo sapien
gcaggctcattaaggactccttctg

SEQ ID NO: 4057955 - DNA, 25 bp, Homo sapien
aggctcattaaggactccttctgaa

SEQ ID NO: 4057956 - DNA, 25 bp, Homo sapien
ggaagacttgatgccaaagcccaaa

SEQ ID NO: 4057957 - DNA, 25 bp, Homo sapien
gagggaagtagagctgtaggtggcc

SEQ ID NO: 4057958 - DNA, 25 bp, Homo sapien
tcagcaaccaggtgccaatggggag

SEQ ID NO: 4057959 - DNA, 25 bp, Homo sapien
tgagatgagaccttccacatatgga

SEQ ID NO: 4057960 - DNA, 25 bp, Homo sapien
tagctctgctcggagattctcattt

SEQ ID NO: 4057961 - DNA, 25 bp, Homo sapien
ctggctggtgttgtatttgttgaga

SEQ ID NO: 4057962 - DNA, 25 bp, Homo sapien
cttgctggctggtgttgtatttgtt

SEQ ID NO: 4057963 - DNA, 25 bp, Homo sapien
ttccagttgtgtagaacaacactgt

SEQ ID NO: 4057964 - DNA, 25 bp, Homo sapien
gccgcaaagcttcaagttctccctc

SEQ ID NO: 4057965 - DNA, 25 bp, Homo sapien
tgccgcaaagcttcaagttctccct

SEQ ID NO: 4057966 - DNA, 25 bp, Homo sapien
ctccagaagctttgtggcctcctga

SEQ ID NO: 4057967 - DNA, 25 bp, Homo sapien
aacttgcatttgatggagccttgct

SEQ ID NO: 4057968 - DNA, 25 bp, Homo sapien
acttgcatttgatggagccttgctc

SEQ ID NO: 4057969 - DNA, 25 bp, Homo sapien
agggcttcagagagttctaatgaca

SEQ ID NO: 4057970 - DNA, 25 bp, Homo sapien
gggcttcagagagttctaatgacag

SEQ ID NO: 4057971 - DNA, 25 bp, Homo sapien
gcttcagagagttctaatgacagct

SEQ ID NO: 4057972 - DNA, 25 bp, Homo sapien
ggcttcagagagttctaatgacagc

SEQ ID NO: 4057973 - DNA, 25 bp, Homo sapien
ccttctcagccatcgaggactcctt

SEQ ID NO: 4057974 - DNA, 25 bp, Homo sapien
tctctgtagttcctggatggtgtct

SEQ ID NO: 4057975 - DNA, 25 bp, Homo sapien
tccttctcagccatcgaggactcct

SEQ ID NO: 4057976 - DNA, 25 bp, Homo sapien
gatggtgtctgccttctgcttgtcc

SEQ ID NO: 4057977 - DNA, 25 bp, Homo sapien
tcttctttgcactgggctgcttgct

SEQ ID NO: 4057978 - DNA, 25 bp, Homo sapien
tgcttggcctcttcgagactgttct

SEQ ID NO: 4057979 - DNA, 25 bp, Homo sapien
tgcttagcctccttgactgtcattt

SEQ ID NO: 4057980 - DNA, 25 bp, Homo sapien
tgcagggccttgcactccgcctcct

SEQ ID NO: 4057981 - DNA, 25 bp, Homo sapien
ctccttggacttgtcctgcttagcc

SEQ ID NO: 4057982 - DNA, 25 bp, Homo sapien
caggatggtgatgtccttatccttc

SEQ ID NO: 4057983 - DNA, 25 bp, Homo sapien
tcccgcagtccgtgcaggtccagct

SEQ ID NO: 4057984 - DNA, 25 bp, Homo sapien
ttcaaagtgagcttttgggtctcgg

SEQ ID NO: 4057985 - DNA, 25 bp, Homo sapien
tgcagccggcactgcaggatggtga

SEQ ID NO: 4057986 - DNA, 25 bp, Homo sapien
acggcctctagttccacgcgcagat

SEQ ID NO: 4057987 - DNA, 25 bp, Homo sapien
tctgttccgacacggcctctagttc

SEQ ID NO: 4057988 - DNA, 25 bp, Homo sapien
cacgcgcagatccttcaccaggttc

SEQ ID NO: 4057989 - DNA, 25 bp, Homo sapien
tttctcttctgttccgacacggcct

SEQ ID NO: 4057990 - DNA, 25 bp, Homo sapien
tatcaaagccttttcacgctccaga

SEQ ID NO: 4057991 - DNA, 25 bp, Homo sapien
tctgaggagctaggagggtatctgt

SEQ ID NO: 4057992 - DNA, 25 bp, Homo sapien
caggaagcaaaatcggcttgtagtt

SEQ ID NO: 4057993 - DNA, 25 bp, Homo sapien
gctaggagggtatctgtgggtggct

SEQ ID NO: 4057994 - DNA, 25 bp, Homo sapien
gaaggttcttcaggggctgtgatgg

SEQ ID NO: 4057995 - DNA, 25 bp, Homo sapien
atgaggcagaagaaggttcttcagg

SEQ ID NO: 4057996 - DNA, 25 bp, Homo sapien
catcctgttgagagaccttttgcca

SEQ ID NO: 4057997 - DNA, 25 bp, Homo sapien
tcatgcaaggagaagtgtatatccg

SEQ ID NO: 4057998 - DNA, 25 bp, Homo sapien
tatccgtacctttgaatgatcaccc

SEQ ID NO: 4057999 - DNA, 25 bp, Homo sapien
tactgcaggccagcttatttcgaag

SEQ ID NO: 4058000 - DNA, 25 bp, Homo sapien
taactcgatgttgctcagggaagac

SEQ ID NO: 4058001 - DNA, 25 bp, Homo sapien
ctctagagaggcgatcttgtccccg

SEQ ID NO: 4058002 - DNA, 25 bp, Homo sapien
gcgagttgctcctgcgccaaatgga

SEQ ID NO: 4058003 - DNA, 25 bp, Homo sapien
ttgtccccggccaaggcgagttgct

SEQ ID NO: 4058004 - DNA, 25 bp, Homo sapien
gactcctcgaatgctaatgcctgtg

SEQ ID NO: 4058005 - DNA, 25 bp, Homo sapien
gaagtctgcaactcctctgtgtgaa

SEQ ID NO: 4058006 - DNA, 25 bp, Homo sapien
tctaggatggactgatactggcgga

SEQ ID NO: 4058007 - DNA, 25 bp, Homo sapien
gatgacactgtttactggacccaaa

SEQ ID NO: 4058008 - DNA, 25 bp, Homo sapien
gacgctgctccccttgtatcactat

SEQ ID NO: 4058009 - DNA, 25 bp, Homo sapien
tgtctgagatccatagcagacgctg

SEQ ID NO: 4058010 - DNA, 25 bp, Homo sapien
ccccttgtatcactatgatctgata

SEQ ID NO: 4058011 - DNA, 25 bp, Homo sapien
tcatggttgacttagaagtttgtct

SEQ ID NO: 4058012 - DNA, 25 bp, Homo sapien
gcagagctgattgtcctgcaaggtc

SEQ ID NO: 4058013 - DNA, 25 bp, Homo sapien
gtctcttgcagacatcgtgcagatt

SEQ ID NO: 4058014 - DNA, 25 bp, Homo sapien
gcagacatcgtgcagattcttgatg

SEQ ID NO: 4058015 - DNA, 25 bp, Homo sapien
taacagcttgctgttcaggctgctc

SEQ ID NO: 4058016 - DNA, 25 bp, Homo sapien
agtggatgtcaactgccccaagcat

SEQ ID NO: 4058017 - DNA, 25 bp, Homo sapien
aacagtggatgtcaactgccccaag

SEQ ID NO: 4058018 - DNA, 25 bp, Homo sapien
aataacagtggatgtcaactgcccc

SEQ ID NO: 4058019 - DNA, 25 bp, Homo sapien
cagtggatgtcaactgccccaagca

SEQ ID NO: 4058020 - DNA, 25 bp, Homo sapien
ttggcagctctcaattctcctttaa

SEQ ID NO: 4058021 - DNA, 25 bp, Homo sapien
gctctcaattctcctttaaccttta

SEQ ID NO: 4058022 - DNA, 25 bp, Homo sapien
ggcagctctcaattctcctttaacc

SEQ ID NO: 4058023 - DNA, 25 bp, Homo sapien
ctctcaattctcctttaacctttag

SEQ ID NO: 4058024 - DNA, 25 bp, Homo sapien
tttgtaacaaaccacatcccctatc

SEQ ID NO: 4058025 - DNA, 25 bp, Homo sapien
ggaatgagaagctatcaaaatactc

SEQ ID NO: 4058026 - DNA, 25 bp, Homo sapien
atcccctatccctaatataagccaa

SEQ ID NO: 4058027 - DNA, 25 bp, Homo sapien
cctatccctaatataagccaagagg

SEQ ID NO: 4058028 - DNA, 25 bp, Homo sapien
gggctctgctccacattgtcctcaa

SEQ ID NO: 4058029 - DNA, 25 bp, Homo sapien
aagtctcagtggcttacgaccgtga

SEQ ID NO: 4058030 - DNA, 25 bp, Homo sapien
caggctaggtgatggtgtagtaaca

SEQ ID NO: 4058031 - DNA, 25 bp, Homo sapien
tacatgtcctttatgagtcagctgg

SEQ ID NO: 4058032 - DNA, 25 bp, Homo sapien
tagcacctccactagttgcttatac

SEQ ID NO: 4058033 - DNA, 25 bp, Homo sapien
gttgcttatactctacattttggaa

SEQ ID NO: 4058034 - DNA, 25 bp, Homo sapien
gcttatactctacattttggaaccc

SEQ ID NO: 4058035 - DNA, 25 bp, Homo sapien
tccactagttgcttatactctacat

SEQ ID NO: 4058036 - DNA, 25 bp, Homo sapien
cttccctttctcgacttgccttggt

SEQ ID NO: 4058037 - DNA, 25 bp, Homo sapien
cacagatatgtttctcaaatgcccc

SEQ ID NO: 4058038 - DNA, 25 bp, Homo sapien
ttcagcgattccacagatatgtttc

SEQ ID NO: 4058039 - DNA, 25 bp, Homo sapien
cccttccctttctcgacttgccttg

SEQ ID NO: 4058040 - DNA, 25 bp, Homo sapien
tcagtttcatacactctaaatccaa

SEQ ID NO: 4058041 - DNA, 25 bp, Homo sapien
ttcagtttcatacactctaaatcca

SEQ ID NO: 4058042 - DNA, 25 bp, Homo sapien
cagtttcatacactctaaatccaac

SEQ ID NO: 4058043 - DNA, 25 bp, Homo sapien
taacaggaacaagttgtcggaaatg

SEQ ID NO: 4058044 - DNA, 25 bp, Homo sapien
gaaatttcaattcatccacgccctt

SEQ ID NO: 4058045 - DNA, 25 bp, Homo sapien
gcagcaatgtgtttctccccaacca

SEQ ID NO: 4058046 - DNA, 25 bp, Homo sapien
tatcgaccacattgactgaagccgc

SEQ ID NO: 4058047 - DNA, 25 bp, Homo sapien
tctggtgctttgtaactaagaccac

SEQ ID NO: 4058048 - DNA, 25 bp, Homo sapien
gcagcagcagtctggtgctttgtaa

SEQ ID NO: 4058049 - DNA, 25 bp, Homo sapien
taaccaggagccttcaaagggaatg

SEQ ID NO: 4058050 - DNA, 25 bp, Homo sapien
caactgcacaagtggcaatgaggga

SEQ ID NO: 4058051 - DNA, 25 bp, Homo sapien
ccttttactccctctggtgtggatg

SEQ ID NO: 4058052 - DNA, 25 bp, Homo sapien
tgatgaacagtcatttcctcccact

SEQ ID NO: 4058053 - DNA, 25 bp, Homo sapien
taatagagttgctaatgctaccggg

SEQ ID NO: 4058054 - DNA, 25 bp, Homo sapien
ccgaagggtgttgataatgagcaaa

SEQ ID NO: 4058055 - DNA, 25 bp, Homo sapien
taagttatatttggggagtagccaa

SEQ ID NO: 4058056 - DNA, 25 bp, Homo sapien
tatttggggagtagccaatcagaca

SEQ ID NO: 4058057 - DNA, 25 bp, Homo sapien
ttaagttatatttggggagtagcca

SEQ ID NO: 4058058 - DNA, 25 bp, Homo sapien
gtaattgggcacctatggtcattgc

SEQ ID NO: 4058059 - DNA, 25 bp, Homo sapien
gaagcttctgatagagaaagcactg

SEQ ID NO: 4058060 - DNA, 25 bp, Homo sapien
gcagccacctggaagcttctgatag

SEQ ID NO: 4058061 - DNA, 25 bp, Homo sapien
ctatggtcattgcagccacctggaa

SEQ ID NO: 4058062 - DNA, 25 bp, Homo sapien
gttctgggaggacatctaatctgca

SEQ ID NO: 4058063 - DNA, 25 bp, Homo sapien
tcccgcacacagaggtacatttctg

SEQ ID NO: 4058064 - DNA, 25 bp, Homo sapien
gatcttcttaccagagctgtttagg

SEQ ID NO: 4058065 - DNA, 25 bp, Homo sapien
tctggagaccagtgagcctcatagc

SEQ ID NO: 4058066 - DNA, 25 bp, Homo sapien
gggcccttcaaagaactcatgccag

SEQ ID NO: 4058067 - DNA, 25 bp, Homo sapien
ggtacacgatgacattcctgaacga

SEQ ID NO: 4058068 - DNA, 25 bp, Homo sapien
tggcaggtcctgagtatgtcaaccc

SEQ ID NO: 4058069 - DNA, 25 bp, Homo sapien
tatcccctgaaccaaatgggcagtc

SEQ ID NO: 4058070 - DNA, 25 bp, Homo sapien
tcttgcactccaaagcgctgaagcg

SEQ ID NO: 4058071 - DNA, 25 bp, Homo sapien
gaccagggccttacagtgcaggaga

SEQ ID NO: 4058072 - DNA, 25 bp, Homo sapien
tagccacgggtgactattgagcatt

SEQ ID NO: 4058073 - DNA, 25 bp, Homo sapien
taactactcattctgccatggacag

SEQ ID NO: 4058074 - DNA, 25 bp, Homo sapien
gatgtttcctgtcagcgtcttgacc

SEQ ID NO: 4058075 - DNA, 25 bp, Homo sapien
tctgtgtgattcgtggcttttcaac

SEQ ID NO: 4058076 - DNA, 25 bp, Homo sapien
tcagcgtcttgaccgccttagtgtt

SEQ ID NO: 4058077 - DNA, 25 bp, Homo sapien
ggcttttcaacattggtgcagaaga

SEQ ID NO: 4058078 - DNA, 25 bp, Homo sapien
ggctagccagcttgtcatgacacac

SEQ ID NO: 4058079 - DNA, 25 bp, Homo sapien
ctcttaaaggagcagtaggaattca

SEQ ID NO: 4058080 - DNA, 25 bp, Homo sapien
catgaatatgctaccccaggctgtg

SEQ ID NO: 4058081 - DNA, 25 bp, Homo sapien
catcctgcacaaggaagaaaggtta

SEQ ID NO: 4058082 - DNA, 25 bp, Homo sapien
agacacgaccctggtctgcagaaga

SEQ ID NO: 4058083 - DNA, 25 bp, Homo sapien
tgaagtaaacagacacgaccctggt

SEQ ID NO: 4058084 - DNA, 25 bp, Homo sapien
acagatttgacactggaaatgaagt

SEQ ID NO: 4058085 - DNA, 25 bp, Homo sapien
taaacagacacgaccctggtctgca

SEQ ID NO: 4058086 - DNA, 25 bp, Homo sapien
actccaccctagtttggctctttct

SEQ ID NO: 4058087 - DNA, 25 bp, Homo sapien
catagatgaaaccacgtgacttctg

SEQ ID NO: 4058088 - DNA, 25 bp, Homo sapien
gacttctgtgccccaagactttgat

SEQ ID NO: 4058089 - DNA, 25 bp, Homo sapien
tctttcttgtctgagctcttgcgag

SEQ ID NO: 4058090 - DNA, 25 bp, Homo sapien
tacacctcaattggttgcaatacgt

SEQ ID NO: 4058091 - DNA, 25 bp, Homo sapien
gcaatacgtgcactggtctgtcacc

SEQ ID NO: 4058092 - DNA, 25 bp, Homo sapien
gactgaatcaacttgctcatagcaa

SEQ ID NO: 4058093 - DNA, 25 bp, Homo sapien
tgcttttagagttcacacagtgcct

SEQ ID NO: 4058094 - DNA, 25 bp, Homo sapien
tctttgctccaccatactttatcca

SEQ ID NO: 4058095 - DNA, 25 bp, Homo sapien
acacagtggtggagctaaggcgacc

SEQ ID NO: 4058096 - DNA, 25 bp, Homo sapien
gaatttaacggtgagacacagtggt

SEQ ID NO: 4058097 - DNA, 25 bp, Homo sapien
ctcaaagaactagaacacttcagaa

SEQ ID NO: 4058098 - DNA, 25 bp, Homo sapien
gaaagaagagcctatcagagaagca

SEQ ID NO: 4058099 - DNA, 25 bp, Homo sapien
aaatgatgcacagaaggcacatcca

SEQ ID NO: 4058100 - DNA, 25 bp, Homo sapien
gaagcaatgtctgagcaggagaaac

SEQ ID NO: 4058101 - DNA, 25 bp, Homo sapien
cccacaccccaaatgatgcacagaa

SEQ ID NO: 4058102 - DNA, 25 bp, Homo sapien
gagaacaaatcatccgacagtgcac

SEQ ID NO: 4058103 - DNA, 25 bp, Homo sapien
tgtcttattctcgagcagcctgcta

SEQ ID NO: 4058104 - DNA, 25 bp, Homo sapien
gaaactcaggattagtgtccccgag

SEQ ID NO: 4058105 - DNA, 25 bp, Homo sapien
tacacagcacgtacagcaactggca

SEQ ID NO: 4058106 - DNA, 25 bp, Homo sapien
cccgcagtgactgtctggcagaagg

SEQ ID NO: 4058107 - DNA, 25 bp, Homo sapien
aaagtgactcatcccgcagtgactg

SEQ ID NO: 4058108 - DNA, 25 bp, Homo sapien
cagacagcaagacaatgaggggact

SEQ ID NO: 4058109 - DNA, 25 bp, Homo sapien
gactcatcccgcagtgactgtctgg

SEQ ID NO: 4058110 - DNA, 25 bp, Homo sapien
aagatccaatcatttactagttgtg

SEQ ID NO: 4058111 - DNA, 25 bp, Homo sapien
agatccaatcatttactagttgtgt

SEQ ID NO: 4058112 - DNA, 25 bp, Homo sapien
gatccaatcatttactagttgtgtt

SEQ ID NO: 4058113 - DNA, 25 bp, Homo sapien
ctgtccgatgaagaggtacacaatt

SEQ ID NO: 4058114 - DNA, 25 bp, Homo sapien
atttccccaggatagaaggaatgcc

SEQ ID NO: 4058115 - DNA, 25 bp, Homo sapien
tgaagaggtacacaatttccccagg

SEQ ID NO: 4058116 - DNA, 25 bp, Homo sapien
gatgaagaggtacacaatttcccca

SEQ ID NO: 4058117 - DNA, 25 bp, Homo sapien
tcagctacaattatcacaaagagca

SEQ ID NO: 4058118 - DNA, 25 bp, Homo sapien
aaaagctgagtgtacaacttgcaaa

SEQ ID NO: 4058119 - DNA, 25 bp, Homo sapien
taacttatccttgtgactacagaac

SEQ ID NO: 4058120 - DNA, 25 bp, Homo sapien
cttcagtgataacacaagcttcagc

SEQ ID NO: 4058121 - DNA, 25 bp, Homo sapien
agtgtccatgctggccagcaccagg

SEQ ID NO: 4058122 - DNA, 25 bp, Homo sapien
ttcccctgcagctccagtgtccatg

SEQ ID NO: 4058123 - DNA, 25 bp, Homo sapien
gaagacaggggaggaatgagctcct

SEQ ID NO: 4058124 - DNA, 25 bp, Homo sapien
ggaggaatgagctccttgccttccc

SEQ ID NO: 4058125 - DNA, 25 bp, Homo sapien
ggaggaacaccctgaagctgtgctt

SEQ ID NO: 4058126 - DNA, 25 bp, Homo sapien
tttagaggcagtgatccagttggca

SEQ ID NO: 4058127 - DNA, 25 bp, Homo sapien
ttccttgaagaagggatttagaggc

SEQ ID NO: 4058128 - DNA, 25 bp, Homo sapien
gctgtgcttgcatagcaattatgta

SEQ ID NO: 4058129 - DNA, 25 bp, Homo sapien
gtagactggagcactatgattgcat

SEQ ID NO: 4058130 - DNA, 25 bp, Homo sapien
gatctgtgtttgtaagtctctccaa

SEQ ID NO: 4058131 - DNA, 25 bp, Homo sapien
ttttagttctgccacagcagtgaga

SEQ ID NO: 4058132 - DNA, 25 bp, Homo sapien
cttttgatgcataaaacctgtagac

SEQ ID NO: 4058133 - DNA, 25 bp, Homo sapien
tcccagggcatagtaaaggctaggt

SEQ ID NO: 4058134 - DNA, 25 bp, Homo sapien
gaaaggcttcttgggtgaatgtcaa

SEQ ID NO: 4058135 - DNA, 25 bp, Homo sapien
gaatgtcaattccttgtccttcaaa

SEQ ID NO: 4058136 - DNA, 25 bp, Homo sapien
gctcataatacaagggatcccaggg

SEQ ID NO: 4058137 - DNA, 25 bp, Homo sapien
tgttcaagtgatgccaaggaaatcc

SEQ ID NO: 4058138 - DNA, 25 bp, Homo sapien
gcagctcgatctgtcacatcttctg

SEQ ID NO: 4058139 - DNA, 25 bp, Homo sapien
ggagatgcagctcgatctgtcacat

SEQ ID NO: 4058140 - DNA, 25 bp, Homo sapien
aaggaaatccgaggagatgcagctc

SEQ ID NO: 4058141 - DNA, 25 bp, Homo sapien
tcaagaataggcacaggggaagcag

SEQ ID NO: 4058142 - DNA, 25 bp, Homo sapien
gacccatcccctacattaagcaaag

SEQ ID NO: 4058143 - DNA, 25 bp, Homo sapien
ttttgggagaggttcaagaataggc

SEQ ID NO: 4058144 - DNA, 25 bp, Homo sapien
gcaaagcagtcaagcgctttagcat

SEQ ID NO: 4058145 - DNA, 25 bp, Homo sapien
gagcagttccggaggtacttggaga

SEQ ID NO: 4058146 - DNA, 25 bp, Homo sapien
tggaaactatgaccaagtcaattac

SEQ ID NO: 4058147 - DNA, 25 bp, Homo sapien
gttggaaactatgaccaagtcaatt

SEQ ID NO: 4058148 - DNA, 25 bp, Homo sapien
aactatgaccaagtcaattacaagg

SEQ ID NO: 4058149 - DNA, 25 bp, Homo sapien
tgaccaagtcaattacaagggcatt

SEQ ID NO: 4058150 - DNA, 25 bp, Homo sapien
tttctgaagctgacaataaaggtcc

SEQ ID NO: 4058151 - DNA, 25 bp, Homo sapien
taaggatcgtctaagagcaaccaac

SEQ ID NO: 4058152 - DNA, 25 bp, Homo sapien
caggttgtgctgtgataaaagccca

SEQ ID NO: 4058153 - DNA, 25 bp, Homo sapien
tgaaggtcaagaacccctgaatggg

SEQ ID NO: 4058154 - DNA, 25 bp, Homo sapien
gcaaagcattgatcagtggtctcag

SEQ ID NO: 4058155 - DNA, 25 bp, Homo sapien
taaggttgtcctttcagtgggcaaa

SEQ ID NO: 4058156 - DNA, 25 bp, Homo sapien
gaccgcagcggtccctaaagaccat

SEQ ID NO: 4058157 - DNA, 25 bp, Homo sapien
gcccttcaagttgtactcccagatg

SEQ ID NO: 4058158 - DNA, 25 bp, Homo sapien
tttggttagcccttgtctataccgc

SEQ ID NO: 4058159 - DNA, 25 bp, Homo sapien
tgaaatcggcccagatactgctgac

SEQ ID NO: 4058160 - DNA, 25 bp, Homo sapien
ttttgatctttagctcactcactga

SEQ ID NO: 4058161 - DNA, 25 bp, Homo sapien
ggttagcccttgtctataccgcaag

SEQ ID NO: 4058162 - DNA, 25 bp, Homo sapien
caaggattgagtcagagtcgatttc

SEQ ID NO: 4058163 - DNA, 25 bp, Homo sapien
tcgatttcctgcttcacggcccggg

SEQ ID NO: 4058164 - DNA, 25 bp, Homo sapien
gagtcagagtcgatttcctgcttca

SEQ ID NO: 4058165 - DNA, 25 bp, Homo sapien
gacctcaaggattgagtcagagtcg

SEQ ID NO: 4058166 - DNA, 25 bp, Homo sapien
actgtcggagcaattggagctggct

SEQ ID NO: 4058167 - DNA, 25 bp, Homo sapien
tgttccaggtttgcctgcgtctccc

SEQ ID NO: 4058168 - DNA, 25 bp, Homo sapien
agctggctgggttactgttccaggt

SEQ ID NO: 4058169 - DNA, 25 bp, Homo sapien
agcaattggagctggctgggttact

SEQ ID NO: 4058170 - DNA, 25 bp, Homo sapien
tgggattcttgcatctcgctattcc

SEQ ID NO: 4058171 - DNA, 25 bp, Homo sapien
gggattcttgcatctcgctattcca

SEQ ID NO: 4058172 - DNA, 25 bp, Homo sapien
cttgggattcttgcatctcgctatt

SEQ ID NO: 4058173 - DNA, 25 bp, Homo sapien
ggattcttgcatctcgctattccag

SEQ ID NO: 4058174 - DNA, 25 bp, Homo sapien
agtattgatcccctaaagctccctg

SEQ ID NO: 4058175 - DNA, 25 bp, Homo sapien
cccagaggtagagcggctcccttgt

SEQ ID NO: 4058176 - DNA, 25 bp, Homo sapien
ctgtagccccagaggtagagcggct

SEQ ID NO: 4058177 - DNA, 25 bp, Homo sapien
aggtagagcggctcccttgtcacta

SEQ ID NO: 4058178 - DNA, 25 bp, Homo sapien
cagctatcagagtagtctccatccc

SEQ ID NO: 4058179 - DNA, 25 bp, Homo sapien
atctgcagctatcagagtagtctcc

SEQ ID NO: 4058180 - DNA, 25 bp, Homo sapien
tgcatttcggaagcctgtattgtag

SEQ ID NO: 4058181 - DNA, 25 bp, Homo sapien
caggggagtatggcaccttcaggct

SEQ ID NO: 4058182 - DNA, 25 bp, Homo sapien
tctactttttcccctatccatccca

SEQ ID NO: 4058183 - DNA, 25 bp, Homo sapien
ctactttttcccctatccatcccat

SEQ ID NO: 4058184 - DNA, 25 bp, Homo sapien
cttttgaacagtagatctcaatgac

SEQ ID NO: 4058185 - DNA, 25 bp, Homo sapien
gaccaagcacagtgccaagcacaag

SEQ ID NO: 4058186 - DNA, 25 bp, Homo sapien
tgacatccatgacttctgagacaga

SEQ ID NO: 4058187 - DNA, 25 bp, Homo sapien
tctcaatgaccaagcacagtgccaa

SEQ ID NO: 4058188 - DNA, 25 bp, Homo sapien
ttctggtggctcccgaaattcttgg

SEQ ID NO: 4058189 - DNA, 25 bp, Homo sapien
aaggatatcagcagtcagatctagg

SEQ ID NO: 4058190 - DNA, 25 bp, Homo sapien
ggtggctcccgaaattcttggcatt

SEQ ID NO: 4058191 - DNA, 25 bp, Homo sapien
tgtagtctccgcgtgtcctttcttc

SEQ ID NO: 4058192 - DNA, 25 bp, Homo sapien
catgtgttaaaacttagcagcgcta

SEQ ID NO: 4058193 - DNA, 25 bp, Homo sapien
ggaaacatgcctttaccagacactg

SEQ ID NO: 4058194 - DNA, 25 bp, Homo sapien
tcatgagggcagaacgctcacagat

SEQ ID NO: 4058195 - DNA, 25 bp, Homo sapien
acaacctcaagatgaagtgttcggg

SEQ ID NO: 4058196 - DNA, 25 bp, Homo sapien
gaattacaccgtgagcttctgcatc

SEQ ID NO: 4058197 - DNA, 25 bp, Homo sapien
taaactgattcgaccctctggctca

SEQ ID NO: 4058198 - DNA, 25 bp, Homo sapien
aaatgaggccactcttgggtcaggc

SEQ ID NO: 4058199 - DNA, 25 bp, Homo sapien
tgtgtcacacaagcaggttaaactg

SEQ ID NO: 4058200 - DNA, 25 bp, Homo sapien
ggtctggcctccaaaatcagaaaca

SEQ ID NO: 4058201 - DNA, 25 bp, Homo sapien
tgagtgccagcaacactctccgtgc

SEQ ID NO: 4058202 - DNA, 25 bp, Homo sapien
tatgtcaccaaagatagagtcctgt

SEQ ID NO: 4058203 - DNA, 25 bp, Homo sapien
tgtagactctatcccagcagcaact

SEQ ID NO: 4058204 - DNA, 25 bp, Homo sapien
aagggaagacaccagaaagtaggag

SEQ ID NO: 4058205 - DNA, 25 bp, Homo sapien
gctcagttcctctccaaacgcatta

SEQ ID NO: 4058206 - DNA, 25 bp, Homo sapien
gggctaagatgggaatgctcagttc

SEQ ID NO: 4058207 - DNA, 25 bp, Homo sapien
ttcctctccaaacgcattaactggg

SEQ ID NO: 4058208 - DNA, 25 bp, Homo sapien
tgcatcccagggatacagcctgctc

SEQ ID NO: 4058209 - DNA, 25 bp, Homo sapien
gctagaaagcgtttgatcattcagt

SEQ ID NO: 4058210 - DNA, 25 bp, Homo sapien
tatcgagtcacctcccaatcgagta

SEQ ID NO: 4058211 - DNA, 25 bp, Homo sapien
tacagcctgctcgatcatggtggat

SEQ ID NO: 4058212 - DNA, 25 bp, Homo sapien
tcatggactgtgtcctgtaactcct

SEQ ID NO: 4058213 - DNA, 25 bp, Homo sapien
ggtgttcccaatctgctggtcatta

SEQ ID NO: 4058214 - DNA, 25 bp, Homo sapien
tgtagtatagggtgggttcagtcaa

SEQ ID NO: 4058215 - DNA, 25 bp, Homo sapien
ggtgctggccaaagcactttatcaa

SEQ ID NO: 4058216 - DNA, 25 bp, Homo sapien
ggtgtccatgagcacattcgcattg

SEQ ID NO: 4058217 - DNA, 25 bp, Homo sapien
tgtccatgagcacattcgcattggt

SEQ ID NO: 4058218 - DNA, 25 bp, Homo sapien
tccatgagcacattcgcattggtgg

SEQ ID NO: 4058219 - DNA, 25 bp, Homo sapien
ccatgagcacattcgcattggtggt

SEQ ID NO: 4058220 - DNA, 25 bp, Homo sapien
ttctttatggagtttaatgcttttg

SEQ ID NO: 4058221 - DNA, 25 bp, Homo sapien
agcacctgtctggaactgtatcttg

SEQ ID NO: 4058222 - DNA, 25 bp, Homo sapien
accttgataccttttgaataagaag

SEQ ID NO: 4058223 - DNA, 25 bp, Homo sapien
gaacatataagaacaagaccttgat

SEQ ID NO: 4058224 - DNA, 25 bp, Homo sapien
tccagcactgatctgaacatataag

SEQ ID NO: 4058225 - DNA, 25 bp, Homo sapien
gaatatctatgatagtctcctgtgc

SEQ ID NO: 4058226 - DNA, 25 bp, Homo sapien
ctatgatagtctcctgtgccttcaa

SEQ ID NO: 4058227 - DNA, 25 bp, Homo sapien
gagatgccgttgtgaatatctatga

SEQ ID NO: 4058228 - DNA, 25 bp, Homo sapien
tcctttagggagatgccgttgtgaa

SEQ ID NO: 4058229 - DNA, 25 bp, Homo sapien
ctgccaccttggcactggtccccat

SEQ ID NO: 4058230 - DNA, 25 bp, Homo sapien
ttctgccaccttggcactggtcccc

SEQ ID NO: 4058231 - DNA, 25 bp, Homo sapien
tattacttctgccaccttggcactg

SEQ ID NO: 4058232 - DNA, 25 bp, Homo sapien
gttattacttctgccaccttggcac

SEQ ID NO: 4058233 - DNA, 25 bp, Homo sapien
ttctgctaccttttgcctaatcttc

SEQ ID NO: 4058234 - DNA, 25 bp, Homo sapien
tgttctgctaccttttgcctaatct

SEQ ID NO: 4058235 - DNA, 25 bp, Homo sapien
cctgttctgctaccttttgcctaat

SEQ ID NO: 4058236 - DNA, 25 bp, Homo sapien
ccctgttctgctaccttttgcctaa

SEQ ID NO: 4058237 - DNA, 25 bp, Homo sapien
gatgaaaactccgagaccacactgg

SEQ ID NO: 4058238 - DNA, 25 bp, Homo sapien
tatgtatgcctattatcctcacgga

SEQ ID NO: 4058239 - DNA, 25 bp, Homo sapien
tcagggagctgagccataacgtctc

SEQ ID NO: 4058240 - DNA, 25 bp, Homo sapien
tgtatgactcagtagagcacaggca

SEQ ID NO: 4058241 - DNA, 25 bp, Homo sapien
catccaaatattaggtgacatctgc

SEQ ID NO: 4058242 - DNA, 25 bp, Homo sapien
cagaagtggtacacatcctgccaac

SEQ ID NO: 4058243 - DNA, 25 bp, Homo sapien
ttaagttactcatgaaagcacaggc

SEQ ID NO: 4058244 - DNA, 25 bp, Homo sapien
gatttctcaaaagaccagcccagaa

SEQ ID NO: 4058245 - DNA, 25 bp, Homo sapien
ccaaatccatcaggtgctttaaaat

SEQ ID NO: 4058246 - DNA, 25 bp, Homo sapien
tccaaatccatcaggtgctttaaaa

SEQ ID NO: 4058247 - DNA, 25 bp, Homo sapien
taagttccagtccgtaggagaagca

SEQ ID NO: 4058248 - DNA, 25 bp, Homo sapien
gtaagttccagtccgtaggagaagc

SEQ ID NO: 4058249 - DNA, 25 bp, Homo sapien
cagtgggtaagttccagtccgtagg

SEQ ID NO: 4058250 - DNA, 25 bp, Homo sapien
tgggtaagttccagtccgtaggaga

SEQ ID NO: 4058251 - DNA, 25 bp, Homo sapien
cgaaagagtaacgtacgaattctgc

SEQ ID NO: 4058252 - DNA, 25 bp, Homo sapien
ccgaaagagtaacgtacgaattctg

SEQ ID NO: 4058253 - DNA, 25 bp, Homo sapien
gaaagagtaacgtacgaattctgcc

SEQ ID NO: 4058254 - DNA, 25 bp, Homo sapien
tcccagctataaccgactttttcag

SEQ ID NO: 4058255 - DNA, 25 bp, Homo sapien
tgcccaattacaagtcccaatggta

SEQ ID NO: 4058256 - DNA, 25 bp, Homo sapien
gaaaggcacctactacaaacattag

SEQ ID NO: 4058257 - DNA, 25 bp, Homo sapien
cagaatgttggaagcttcaaatgcc

SEQ ID NO: 4058258 - DNA, 25 bp, Homo sapien
tgcctagcccaacgtcacaaaactt

SEQ ID NO: 4058259 - DNA, 25 bp, Homo sapien
tacgaagctaatgtgagtcctctaa

SEQ ID NO: 4058260 - DNA, 25 bp, Homo sapien
gagtgggtcaagtctctcattcaca

SEQ ID NO: 4058261 - DNA, 25 bp, Homo sapien
catggttccagcactgtgtattaaa

SEQ ID NO: 4058262 - DNA, 25 bp, Homo sapien
tatatagcgctttcctggcaatgga

SEQ ID NO: 4058263 - DNA, 25 bp, Homo sapien
gatattatgagggatcacttacaga

SEQ ID NO: 4058264 - DNA, 25 bp, Homo sapien
tgaaacactcttagacagacactgg

SEQ ID NO: 4058265 - DNA, 25 bp, Homo sapien
caatggaatcggaagagctgccttc

SEQ ID NO: 4058266 - DNA, 25 bp, Homo sapien
tacattcactgctatcaccagggag

SEQ ID NO: 4058267 - DNA, 25 bp, Homo sapien
caagatccactatgggagtgaagga

SEQ ID NO: 4058268 - DNA, 25 bp, Homo sapien
catgcacaaacttgaaggcagagcg

SEQ ID NO: 4058269 - DNA, 25 bp, Homo sapien
cagcaagcaggcagccagagattta

SEQ ID NO: 4058270 - DNA, 25 bp, Homo sapien
aaaggtgttctgttggcaccgggcg

SEQ ID NO: 4058271 - DNA, 25 bp, Homo sapien
atcctgaaaggtgttctgttggcac

SEQ ID NO: 4058272 - DNA, 25 bp, Homo sapien
aaggtgttctgttggcaccgggcgc

SEQ ID NO: 4058273 - DNA, 25 bp, Homo sapien
ctgaaaggtgttctgttggcaccgg

SEQ ID NO: 4058274 - DNA, 25 bp, Homo sapien
tgaggcctgatgtgattacactgta

SEQ ID NO: 4058275 - DNA, 25 bp, Homo sapien
aggcctgatgtgattacactgtaca

SEQ ID NO: 4058276 - DNA, 25 bp, Homo sapien
cctatccatggtggtgtcaggggct

SEQ ID NO: 4058277 - DNA, 25 bp, Homo sapien
ctcctatccatggtggtgtcagggg

SEQ ID NO: 4058278 - DNA, 25 bp, Homo sapien
gctcagagcgactacagcattttgc

SEQ ID NO: 4058279 - DNA, 25 bp, Homo sapien
gaagctcctcactacagctcttggg

SEQ ID NO: 4058280 - DNA, 25 bp, Homo sapien
cagctcttgggacaaacaggttcat

SEQ ID NO: 4058281 - DNA, 25 bp, Homo sapien
gatggatccaatctgcgaaatttgc

SEQ ID NO: 4058282 - DNA, 25 bp, Homo sapien
tgacaacattttccctacagtacga

SEQ ID NO: 4058283 - DNA, 25 bp, Homo sapien
aattaccagctgaccctaacaagag

SEQ ID NO: 4058284 - DNA, 25 bp, Homo sapien
ggctattaaagtcgcagatggcatc

SEQ ID NO: 4058285 - DNA, 25 bp, Homo sapien
tttggcacggtaagtgagcactggc

SEQ ID NO: 4058286 - DNA, 25 bp, Homo sapien
gccaaaagctttcagtgaacaaaaa

SEQ ID NO: 4058287 - DNA, 25 bp, Homo sapien
ttctctttgattcgtccacctccat

SEQ ID NO: 4058288 - DNA, 25 bp, Homo sapien
ctagctgatgtatatgccaaaagct

SEQ ID NO: 4058289 - DNA, 25 bp, Homo sapien
aaaagtacacttctctttgattcgt

SEQ ID NO: 4058290 - DNA, 25 bp, Homo sapien
tagatatactcagaagtgagatggc

SEQ ID NO: 4058291 - DNA, 25 bp, Homo sapien
tgaagacggaagtgcaaatatctct

SEQ ID NO: 4058292 - DNA, 25 bp, Homo sapien
tgtgaatcatgctgcaatgaagacg

SEQ ID NO: 4058293 - DNA, 25 bp, Homo sapien
attctcactaacagtatacaaggat

SEQ ID NO: 4058294 - DNA, 25 bp, Homo sapien
tatgctcttcttgctgtcatctaga

SEQ ID NO: 4058295 - DNA, 25 bp, Homo sapien
gggaatatttatgctcttcttgctg

SEQ ID NO: 4058296 - DNA, 25 bp, Homo sapien
tcttcttgctgtcatctagacctac

SEQ ID NO: 4058297 - DNA, 25 bp, Homo sapien
tgtagggggaatatttatgctcttc

SEQ ID NO: 4058298 - DNA, 25 bp, Homo sapien
ctggtgtagcgctgatttagcattt

SEQ ID NO: 4058299 - DNA, 25 bp, Homo sapien
caattctggtgtagcgctgatttag

SEQ ID NO: 4058300 - DNA, 25 bp, Homo sapien
attctggtgtagcgctgatttagca

SEQ ID NO: 4058301 - DNA, 25 bp, Homo sapien
tctggtgtagcgctgatttagcatt

SEQ ID NO: 4058302 - DNA, 25 bp, Homo sapien
ttcaagaccagggcaacaaagccag

SEQ ID NO: 4058303 - DNA, 25 bp, Homo sapien
agaccagggcaacaaagccagaccc

SEQ ID NO: 4058304 - DNA, 25 bp, Homo sapien
agttcaagaccagggcaacaaagcc

SEQ ID NO: 4058305 - DNA, 25 bp, Homo sapien
caagaccagggcaacaaagccagac

SEQ ID NO: 4058306 - DNA, 25 bp, Homo sapien
gatcattctagattatccatccagg

SEQ ID NO: 4058307 - DNA, 25 bp, Homo sapien
tacaactgtccttatagcacacagg

SEQ ID NO: 4058308 - DNA, 25 bp, Homo sapien
caggtgtgccctaaatacaactgtc

SEQ ID NO: 4058309 - DNA, 25 bp, Homo sapien
gaggcagagtctagagtcacaacaa

SEQ ID NO: 4058310 - DNA, 25 bp, Homo sapien
cattatctcctacattctgagaagt

SEQ ID NO: 4058311 - DNA, 25 bp, Homo sapien
tatctcctacattctgagaagtccc

SEQ ID NO: 4058312 - DNA, 25 bp, Homo sapien
gtcattatctcctacattctgagaa

SEQ ID NO: 4058313 - DNA, 25 bp, Homo sapien
tccctgtcattatctcctacattct

SEQ ID NO: 4058314 - DNA, 25 bp, Homo sapien
tgcttacattccgttaccctggcaa

SEQ ID NO: 4058315 - DNA, 25 bp, Homo sapien
agtttcagatttatgctattgtcca

SEQ ID NO: 4058316 - DNA, 25 bp, Homo sapien
tagtgcagggaaaatacgagttgtt

SEQ ID NO: 4058317 - DNA, 25 bp, Homo sapien
gagatttgcctttgtgatctgcaag

SEQ ID NO: 4058318 - DNA, 25 bp, Homo sapien
gatctattaaacgagcttagcaaag

SEQ ID NO: 4058319 - DNA, 25 bp, Homo sapien
tttcaggcaaaaggcaataagctat

SEQ ID NO: 4058320 - DNA, 25 bp, Homo sapien
ggctgggtaacatggctagattcca

SEQ ID NO: 4058321 - DNA, 25 bp, Homo sapien
tgaaaaagcctaacaacgacttcca

SEQ ID NO: 4058322 - DNA, 25 bp, Homo sapien
catcttgtacctgacctttctgaaa

SEQ ID NO: 4058323 - DNA, 25 bp, Homo sapien
gataaatcccactcggttatagtga

SEQ ID NO: 4058324 - DNA, 25 bp, Homo sapien
tttcagatgtcaaagcaaacttcca

SEQ ID NO: 4058325 - DNA, 25 bp, Homo sapien
caatgaaggtatttgggcctaggct

SEQ ID NO: 4058326 - DNA, 25 bp, Homo sapien
cacaatctaatcaactcccagggaa

SEQ ID NO: 4058327 - DNA, 25 bp, Homo sapien
ggcacaatctaatcaactcccaggg

SEQ ID NO: 4058328 - DNA, 25 bp, Homo sapien
caatctaatcaactcccagggaata

SEQ ID NO: 4058329 - DNA, 25 bp, Homo sapien
gcacaatctaatcaactcccaggga

SEQ ID NO: 4058330 - DNA, 25 bp, Homo sapien
gaaagaggcgttatgtctgcaactt

SEQ ID NO: 4058331 - DNA, 25 bp, Homo sapien
tatctgtcagcgatacacagtgaaa

SEQ ID NO: 4058332 - DNA, 25 bp, Homo sapien
tgaggacgatacaaagcaaatatgg

SEQ ID NO: 4058333 - DNA, 25 bp, Homo sapien
tcatacatagagacagactgtgagg

SEQ ID NO: 4058334 - DNA, 25 bp, Homo sapien
tagtgctcgctaggctgctactcac

SEQ ID NO: 4058335 - DNA, 25 bp, Homo sapien
ttctgtcattttgtaccagtgcagg

SEQ ID NO: 4058336 - DNA, 25 bp, Homo sapien
cgtgtgttccatggtttattcaacc

SEQ ID NO: 4058337 - DNA, 25 bp, Homo sapien
ccagtgcaggtttacctacagcagt

SEQ ID NO: 4058338 - DNA, 25 bp, Homo sapien
catggcccaggggtaggagaccctt

SEQ ID NO: 4058339 - DNA, 25 bp, Homo sapien
gtcacagactggtattgatccatgg

SEQ ID NO: 4058340 - DNA, 25 bp, Homo sapien
tcctgctaccggttcctaacaggtc

SEQ ID NO: 4058341 - DNA, 25 bp, Homo sapien
taacaggtcacagactggtattgat

SEQ ID NO: 4058342 - DNA, 25 bp, Homo sapien
tgtacttcaggcgcccaacttctgc

SEQ ID NO: 4058343 - DNA, 25 bp, Homo sapien
ctgccatagcctaaggcttcagtct

SEQ ID NO: 4058344 - DNA, 25 bp, Homo sapien
tgttcagttggcatatttccacgtg

SEQ ID NO: 4058345 - DNA, 25 bp, Homo sapien
gccatagcctaaggcttcagtcttc

SEQ ID NO: 4058346 - DNA, 25 bp, Homo sapien
cactgcgcctagtctaaacgtttca

SEQ ID NO: 4058347 - DNA, 25 bp, Homo sapien
gcaaggtaggcacacagttttatct

SEQ ID NO: 4058348 - DNA, 25 bp, Homo sapien
tgtagcaacatcctgtgaataagtc

SEQ ID NO: 4058349 - DNA, 25 bp, Homo sapien
taatggcccaacctgatctgtagca

SEQ ID NO: 4058350 - DNA, 25 bp, Homo sapien
gttgcagaaagcttctctgttgatg

SEQ ID NO: 4058351 - DNA, 25 bp, Homo sapien
ctttggttgcagaaagcttctctgt

SEQ ID NO: 4058352 - DNA, 25 bp, Homo sapien
tggttgcagaaagcttctctgttga

SEQ ID NO: 4058353 - DNA, 25 bp, Homo sapien
gcagaaagcttctctgttgatgatt

SEQ ID NO: 4058354 - DNA, 25 bp, Homo sapien
agtttaagctcttcttgtttctttg

SEQ ID NO: 4058355 - DNA, 25 bp, Homo sapien
gccattcttgtaagttttagaatca

SEQ ID NO: 4058356 - DNA, 25 bp, Homo sapien
tctttgccattcttgtaagttttag

SEQ ID NO: 4058357 - DNA, 25 bp, Homo sapien
cattcttgtaagttttagaatcagc

SEQ ID NO: 4058358 - DNA, 25 bp, Homo sapien
ggttcaggtatactcctccatttga

SEQ ID NO: 4058359 - DNA, 25 bp, Homo sapien
taggttcaggtatactcctccattt

SEQ ID NO: 4058360 - DNA, 25 bp, Homo sapien
gattaggttcaggtatactcctcca

SEQ ID NO: 4058361 - DNA, 25 bp, Homo sapien
tgattaggttcaggtatactcctcc

SEQ ID NO: 4058362 - DNA, 25 bp, Homo sapien
gtgtaagaatgaaaattctgggcag

SEQ ID NO: 4058363 - DNA, 25 bp, Homo sapien
aaaattctgggcaggcaaggtggct

SEQ ID NO: 4058364 - DNA, 25 bp, Homo sapien
gaatgaaaattctgggcaggcaagg

SEQ ID NO: 4058365 - DNA, 25 bp, Homo sapien
taagaatgaaaattctgggcaggca

SEQ ID NO: 4058366 - DNA, 25 bp, Homo sapien
ccaggtggagcacattcctaaatgt

SEQ ID NO: 4058367 - DNA, 25 bp, Homo sapien
tttcacaccaaatcactgccaggtg

SEQ ID NO: 4058368 - DNA, 25 bp, Homo sapien
ttttataatacgacagcaggaaagg

SEQ ID NO: 4058369 - DNA, 25 bp, Homo sapien
gtagtacagcaactgagaaccaaga

SEQ ID NO: 4058370 - DNA, 25 bp, Homo sapien
ctagtatgtgtttggatggctgggt

SEQ ID NO: 4058371 - DNA, 25 bp, Homo sapien
tctcttgtcttacatgagtataaga

SEQ ID NO: 4058372 - DNA, 25 bp, Homo sapien
gaacatttccattgatctcttgtct

SEQ ID NO: 4058373 - DNA, 25 bp, Homo sapien
ccattgatctcttgtcttacatgag

SEQ ID NO: 4058374 - DNA, 25 bp, Homo sapien
cagagttccctgtagggtgagtcca

SEQ ID NO: 4058375 - DNA, 25 bp, Homo sapien
tatgataggcccttctacaatggcc

SEQ ID NO: 4058376 - DNA, 25 bp, Homo sapien
tctatgaagccaatcaagccccaga

SEQ ID NO: 4058377 - DNA, 25 bp, Homo sapien
gaatataaaggcttgaccccttgcc

SEQ ID NO: 4058378 - DNA, 25 bp, Homo sapien
ccaagtaagtacatttgagagtaat

SEQ ID NO: 4058379 - DNA, 25 bp, Homo sapien
aattcttgtgaacctacaccaagta

SEQ ID NO: 4058380 - DNA, 25 bp, Homo sapien
gcccggccgtttgatgctcttttaa

SEQ ID NO: 4058381 - DNA, 25 bp, Homo sapien
ttaaaattcttgtgaacctacacca

SEQ ID NO: 4058382 - DNA, 25 bp, Homo sapien
gcaggaagaaatctaggtgtattca

SEQ ID NO: 4058383 - DNA, 25 bp, Homo sapien
aggaagaaatctaggtgtattcatc

SEQ ID NO: 4058384 - DNA, 25 bp, Homo sapien
cgcaggaagaaatctaggtgtattc

SEQ ID NO: 4058385 - DNA, 25 bp, Homo sapien
caggaagaaatctaggtgtattcat

SEQ ID NO: 4058386 - DNA, 25 bp, Homo sapien
gaaggggctagaggacaatctactt

SEQ ID NO: 4058387 - DNA, 25 bp, Homo sapien
aaggggctagaggacaatctacttc

SEQ ID NO: 4058388 - DNA, 25 bp, Homo sapien
cagcaataatcagttgagtccttct

SEQ ID NO: 4058389 - DNA, 25 bp, Homo sapien
tcaggatagcactcagaaaacagtc

SEQ ID NO: 4058390 - DNA, 25 bp, Homo sapien
tggcagcatgcacgataattgcacc

SEQ ID NO: 4058391 - DNA, 25 bp, Homo sapien
gtaatcccagaagctcaaaacagag

SEQ ID NO: 4058392 - DNA, 25 bp, Homo sapien
aatttagctaggtggatagagcccg

SEQ ID NO: 4058393 - DNA, 25 bp, Homo sapien
caggccggtctaaaactcctcaagt

SEQ ID NO: 4058394 - DNA, 25 bp, Homo sapien
tactacatggaattaatggcgcaag

SEQ ID NO: 4058395 - DNA, 25 bp, Homo sapien
tataggccaagtgttgtactacatg

SEQ ID NO: 4058396 - DNA, 25 bp, Homo sapien
gctgaaacaaatagtagctggctac

SEQ ID NO: 4058397 - DNA, 25 bp, Homo sapien
actgtgccctgctaatttttgtatt

SEQ ID NO: 4058398 - DNA, 25 bp, Homo sapien
gggaacacaggtacaagccactgtg

SEQ ID NO: 4058399 - DNA, 25 bp, Homo sapien
tgggaacacaggtacaagccactgt

SEQ ID NO: 4058400 - DNA, 25 bp, Homo sapien
agctgggaacacaggtacaagccac

SEQ ID NO: 4058401 - DNA, 25 bp, Homo sapien
cactggactcttaaggaccccaaga

SEQ ID NO: 4058402 - DNA, 25 bp, Homo sapien
ttaagaggtctaactgcaggcatct

SEQ ID NO: 4058403 - DNA, 25 bp, Homo sapien
tatatgactttaaaacccaagcctc

SEQ ID NO: 4058404 - DNA, 25 bp, Homo sapien
caagcctcttgaacagtgagaccta

SEQ ID NO: 4058405 - DNA, 25 bp, Homo sapien
taatatccttaaatcagagctcatg

SEQ ID NO: 4058406 - DNA, 25 bp, Homo sapien
tggaccgccacacttagaaatgact

SEQ ID NO: 4058407 - DNA, 25 bp, Homo sapien
acactgtttcgctgcttatttctac

SEQ ID NO: 4058408 - DNA, 25 bp, Homo sapien
cagccattcggtagaagttaaaaca

SEQ ID NO: 4058409 - DNA, 25 bp, Homo sapien
agcttcattcggcaactcgcggaca

SEQ ID NO: 4058410 - DNA, 25 bp, Homo sapien
caaatacgagatctagagacgctgg

SEQ ID NO: 4058411 - DNA, 25 bp, Homo sapien
cctggttccactgagacgctcagct

SEQ ID NO: 4058412 - DNA, 25 bp, Homo sapien
caagcgccacaaattcaaatacgag

SEQ ID NO: 4058413 - DNA, 25 bp, Homo sapien
gattacttgagacagatcaaaaacg

SEQ ID NO: 4058414 - DNA, 25 bp, Homo sapien
gcaccaagatgacaaccaattataa

SEQ ID NO: 4058415 - DNA, 25 bp, Homo sapien
tctatctggattagctagtctatga

SEQ ID NO: 4058416 - DNA, 25 bp, Homo sapien
gcaaactagctactttcttaaggtg

SEQ ID NO: 4058417 - DNA, 25 bp, Homo sapien
caaagatgaagatcctgcaaggatg

SEQ ID NO: 4058418 - DNA, 25 bp, Homo sapien
gaagatcctgcaaggatgaatagca

SEQ ID NO: 4058419 - DNA, 25 bp, Homo sapien
gatgaagatcctgcaaggatgaata

SEQ ID NO: 4058420 - DNA, 25 bp, Homo sapien
accaaagatgaagatcctgcaagga

SEQ ID NO: 4058421 - DNA, 25 bp, Homo sapien
cagagatcaaggctcgcaaggaaga

SEQ ID NO: 4058422 - DNA, 25 bp, Homo sapien
tcaacctggaggatgagatcgccac

SEQ ID NO: 4058423 - DNA, 25 bp, Homo sapien
cagattgacagtgcccgtcttgcag

SEQ ID NO: 4058424 - DNA, 25 bp, Homo sapien
tcaacgggatcctgctttacctgga

SEQ ID NO: 4058425 - DNA, 25 bp, Homo sapien
ccttggctgacaccagacgatagtg

SEQ ID NO: 4058426 - DNA, 25 bp, Homo sapien
gctgacaccagacgatagtgtggct

SEQ ID NO: 4058427 - DNA, 25 bp, Homo sapien
ctccttggctgacaccagacgatag

SEQ ID NO: 4058428 - DNA, 25 bp, Homo sapien
tggctgacaccagacgatagtgtgg

SEQ ID NO: 4058429 - DNA, 25 bp, Homo sapien
atcactaatttctgaacaagtattt

SEQ ID NO: 4058430 - DNA, 25 bp, Homo sapien
caatcactaatttctgaacaagtat

SEQ ID NO: 4058431 - DNA, 25 bp, Homo sapien
tcaatcactaatttctgaacaagta

SEQ ID NO: 4058432 - DNA, 25 bp, Homo sapien
aatcactaatttctgaacaagtatt

SEQ ID NO: 4058433 - DNA, 25 bp, Homo sapien
ctccaaagtggccaaaggtagaggc

SEQ ID NO: 4058434 - DNA, 25 bp, Homo sapien
tctggggtatccctgattattgtca

SEQ ID NO: 4058435 - DNA, 25 bp, Homo sapien
caaaggtagaggcaaagtgggttct

SEQ ID NO: 4058436 - DNA, 25 bp, Homo sapien
gtgggttctggggtatccctgatta

SEQ ID NO: 4058437 - DNA, 25 bp, Homo sapien
aagaggaacaaaggacattgggtca

SEQ ID NO: 4058438 - DNA, 25 bp, Homo sapien
atagcacaatatgaaccaaactgat

SEQ ID NO: 4058439 - DNA, 25 bp, Homo sapien
tgagcattagggcatatataatagc

SEQ ID NO: 4058440 - DNA, 25 bp, Homo sapien
ggacattgggtcacagtttctaaaa

SEQ ID NO: 4058441 - DNA, 25 bp, Homo sapien
gcagcagtggatagcctcgcataat

SEQ ID NO: 4058442 - DNA, 25 bp, Homo sapien
cctttctaagtgaaacattccatgc

SEQ ID NO: 4058443 - DNA, 25 bp, Homo sapien
tgccaaaacacactacctttctaag

SEQ ID NO: 4058444 - DNA, 25 bp, Homo sapien
aagaaaccagctttgccaaaacaca

SEQ ID NO: 4058445 - DNA, 25 bp, Homo sapien
gacaggatactctgtccatgaatgc

SEQ ID NO: 4058446 - DNA, 25 bp, Homo sapien
gatgtgccgcgttcaccagtaaact

SEQ ID NO: 4058447 - DNA, 25 bp, Homo sapien
tccaagttcttgtgatgtgccgcgt

SEQ ID NO: 4058448 - DNA, 25 bp, Homo sapien
gagacaggatactctgtccatgaat

SEQ ID NO: 4058449 - DNA, 25 bp, Homo sapien
ttcacagtgggcagtatctcagcgc

SEQ ID NO: 4058450 - DNA, 25 bp, Homo sapien
cagagaagacctagcagaatttgac

SEQ ID NO: 4058451 - DNA, 25 bp, Homo sapien
tcttttgcaaagtcgatgagtggct

SEQ ID NO: 4058452 - DNA, 25 bp, Homo sapien
ggaaagcattaagggtgcaacccac

SEQ ID NO: 4058453 - DNA, 25 bp, Homo sapien
taatctgtgaggatcctaatgaccc

SEQ ID NO: 4058454 - DNA, 25 bp, Homo sapien
gctttgttggctgcgctctggatca

SEQ ID NO: 4058455 - DNA, 25 bp, Homo sapien
cctctaagaaatgaaggcagctacc

SEQ ID NO: 4058456 - DNA, 25 bp, Homo sapien
gaagaagcacataacaacctgggaa

SEQ ID NO: 4058457 - DNA, 25 bp, Homo sapien
catacagtgcatgccgggctcctct

SEQ ID NO: 4058458 - DNA, 25 bp, Homo sapien
ggctcctctgtgctatcagcgtggg

SEQ ID NO: 4058459 - DNA, 25 bp, Homo sapien
agacattagggaggccctgcggact

SEQ ID NO: 4058460 - DNA, 25 bp, Homo sapien
ttaaaactgtaacaaggtggactgc

SEQ ID NO: 4058461 - DNA, 25 bp, Homo sapien
agctttggaattgcagttagtctat

SEQ ID NO: 4058462 - DNA, 25 bp, Homo sapien
tagataggtatatgggaaaacaacc

SEQ ID NO: 4058463 - DNA, 25 bp, Homo sapien
gaattgcagttagtctatttttgaa

SEQ ID NO: 4058464 - DNA, 25 bp, Homo sapien
aaaatcaccggcatagataggtata

SEQ ID NO: 4058465 - DNA, 25 bp, Homo sapien
tcctccgaatagtcgtctgttggca

SEQ ID NO: 4058466 - DNA, 25 bp, Homo sapien
tgttggcatcgagggctgaacccct

SEQ ID NO: 4058467 - DNA, 25 bp, Homo sapien
gggagaccacttgcggccaagactt

SEQ ID NO: 4058468 - DNA, 25 bp, Homo sapien
ggtccgtcggacttttggctgagat

SEQ ID NO: 4058469 - DNA, 25 bp, Homo sapien
gaggggggctgtcgtttgagtgagc

SEQ ID NO: 4058470 - DNA, 25 bp, Homo sapien
tcgtttgagtgagcggcagactgcg

SEQ ID NO: 4058471 - DNA, 25 bp, Homo sapien
gctgtcgtttgagtgagcggcagac

SEQ ID NO: 4058472 - DNA, 25 bp, Homo sapien
tgagtgagcggcagactgcgaggta

SEQ ID NO: 4058473 - DNA, 25 bp, Homo sapien
gccgactcgagatgttgactcagag

SEQ ID NO: 4058474 - DNA, 25 bp, Homo sapien
tgctgctctcgtgattgttctgtgt

SEQ ID NO: 4058475 - DNA, 25 bp, Homo sapien
ttggcgtttcttgctgctctcgtga

SEQ ID NO: 4058476 - DNA, 25 bp, Homo sapien
taataaactagggtgctctttggcg

SEQ ID NO: 4058477 - DNA, 25 bp, Homo sapien
cacgccaggcagtggtacgagccgc

SEQ ID NO: 4058478 - DNA, 25 bp, Homo sapien
acgccaggcagtggtacgagccgcc

SEQ ID NO: 4058479 - DNA, 25 bp, Homo sapien
cgcacgccaggcagtggtacgagcc

SEQ ID NO: 4058480 - DNA, 25 bp, Homo sapien
ctcgcacgccaggcagtggtacgag

SEQ ID NO: 4058481 - DNA, 25 bp, Homo sapien
cacagactggccgaagaagcagagg

SEQ ID NO: 4058482 - DNA, 25 bp, Homo sapien
tggcacttgcggcagaccaacttgt

SEQ ID NO: 4058483 - DNA, 25 bp, Homo sapien
gagggacttcaggtggctcctcgct

SEQ ID NO: 4058484 - DNA, 25 bp, Homo sapien
aagcccgcctggcacttgcggcaga

SEQ ID NO: 4058485 - DNA, 25 bp, Homo sapien
caatgaaggggtcgtagagggagtc

SEQ ID NO: 4058486 - DNA, 25 bp, Homo sapien
gaaggggtcgtagagggagtccgca

SEQ ID NO: 4058487 - DNA, 25 bp, Homo sapien
ttggaacaatgaaggggtcgtagag

SEQ ID NO: 4058488 - DNA, 25 bp, Homo sapien
aacaatgaaggggtcgtagagggag

SEQ ID NO: 4058489 - DNA, 25 bp, Homo sapien
tggctcttcagggagtttcggcagg

SEQ ID NO: 4058490 - DNA, 25 bp, Homo sapien
tctggctcttcagggagtttcggca

SEQ ID NO: 4058491 - DNA, 25 bp, Homo sapien
ggctcttcagggagtttcggcagga

SEQ ID NO: 4058492 - DNA, 25 bp, Homo sapien
cttctggctcttcagggagtttcgg

SEQ ID NO: 4058493 - DNA, 25 bp, Homo sapien
gctgctgctgaattgcctcctgcag

SEQ ID NO: 4058494 - DNA, 25 bp, Homo sapien
tgctgctgaattgcctcctgcagac

SEQ ID NO: 4058495 - DNA, 25 bp, Homo sapien
gctgctgctgctgaattgcctcctg

SEQ ID NO: 4058496 - DNA, 25 bp, Homo sapien
tgctgctgctgaattgcctcctgca

SEQ ID NO: 4058497 - DNA, 25 bp, Homo sapien
gagcataataaggagaaaagcctgg

SEQ ID NO: 4058498 - DNA, 25 bp, Homo sapien
atacataggctgcaggtacccgctc

SEQ ID NO: 4058499 - DNA, 25 bp, Homo sapien
ggtctaccgcatactccatggtggg

SEQ ID NO: 4058500 - DNA, 25 bp, Homo sapien
gtccgaagtcaacgcggcctgcagg

SEQ ID NO: 4058501 - DNA, 25 bp, Homo sapien
tgtggtgtgggtggcggctgggctg

SEQ ID NO: 4058502 - DNA, 25 bp, Homo sapien
ctgtggtgtgggtggcggctgggct

SEQ ID NO: 4058503 - DNA, 25 bp, Homo sapien
tgggggggttgctgagggcccatcg

SEQ ID NO: 4058504 - DNA, 25 bp, Homo sapien
ctgggggggttgctgagggcccatc

SEQ ID NO: 4058505 - DNA, 25 bp, Homo sapien
ggggttgctgagggcccatcgccat

SEQ ID NO: 4058506 - DNA, 25 bp, Homo sapien
ggggggttgctgagggcccatcgcc

SEQ ID NO: 4058507 - DNA, 25 bp, Homo sapien
ggaacagttgtgctgggcagaccca

SEQ ID NO: 4058508 - DNA, 25 bp, Homo sapien
cagacccatcaagttcggcttagga

SEQ ID NO: 4058509 - DNA, 25 bp, Homo sapien
cggtttatttggtaatccagaagtg

SEQ ID NO: 4058510 - DNA, 25 bp, Homo sapien
tcagcgacgctgaggacggtttatt

SEQ ID NO: 4058511 - DNA, 25 bp, Homo sapien
caaaacaggctctacaggtgttcct

SEQ ID NO: 4058512 - DNA, 25 bp, Homo sapien
tgcaattagtctagaggccccaaag

SEQ ID NO: 4058513 - DNA, 25 bp, Homo sapien
aagaaagctagcacggccacatgaa

SEQ ID NO: 4058514 - DNA, 25 bp, Homo sapien
caaaaatagtatggccacgaggtcc

SEQ ID NO: 4058515 - DNA, 25 bp, Homo sapien
tggggaaggagttccataacatgac

SEQ ID NO: 4058516 - DNA, 25 bp, Homo sapien
ggggaaggagttccataacatgaca

SEQ ID NO: 4058517 - DNA, 25 bp, Homo sapien
catcaactgacgtacggtggctggg

SEQ ID NO: 4058518 - DNA, 25 bp, Homo sapien
gatatggtcacgtacagacagccga

SEQ ID NO: 4058519 - DNA, 25 bp, Homo sapien
taagcattggcatcgaagaagtcct

SEQ ID NO: 4058520 - DNA, 25 bp, Homo sapien
tcaaagatgcgctgaaacaccaggc

SEQ ID NO: 4058521 - DNA, 25 bp, Homo sapien
tgctgtgggacctgaacctgagcct

SEQ ID NO: 4058522 - DNA, 25 bp, Homo sapien
tgcggcaagatctgctgatggctct

SEQ ID NO: 4058523 - DNA, 25 bp, Homo sapien
tgctgcggcaagatctgctgatggc

SEQ ID NO: 4058524 - DNA, 25 bp, Homo sapien
ctgctgtgggacctgaacctgagcc

SEQ ID NO: 4058525 - DNA, 25 bp, Homo sapien
cctgctgcaggtgagcttgaacttg

SEQ ID NO: 4058526 - DNA, 25 bp, Homo sapien
ttaaacagctgagactggatcaggg

SEQ ID NO: 4058527 - DNA, 25 bp, Homo sapien
tgctgctgtagttgcagcagggtct

SEQ ID NO: 4058528 - DNA, 25 bp, Homo sapien
tgcagcagggtctcagttgtcatgg

SEQ ID NO: 4058529 - DNA, 25 bp, Homo sapien
tttcttccgattggcctctttgggc

SEQ ID NO: 4058530 - DNA, 25 bp, Homo sapien
tgccagtttcttccgattggcctct

SEQ ID NO: 4058531 - DNA, 25 bp, Homo sapien
gcctggatgcaatcatatctgccag

SEQ ID NO: 4058532 - DNA, 25 bp, Homo sapien
gatgcaatcatatctgccagtttct

SEQ ID NO: 4058533 - DNA, 25 bp, Homo sapien
caataggattccccaggggtggcat

SEQ ID NO: 4058534 - DNA, 25 bp, Homo sapien
aataggattccccaggggtggcatc

SEQ ID NO: 4058535 - DNA, 25 bp, Homo sapien
ataggattccccaggggtggcatcc

SEQ ID NO: 4058536 - DNA, 25 bp, Homo sapien
taggattccccaggggtggcatccc

SEQ ID NO: 4058537 - DNA, 25 bp, Homo sapien
taaaggtgttactgccactggtgct

SEQ ID NO: 4058538 - DNA, 25 bp, Homo sapien
tgtacacatggcgatctgacaccgg

SEQ ID NO: 4058539 - DNA, 25 bp, Homo sapien
cattaaaatgcgtctgaagggcagc

SEQ ID NO: 4058540 - DNA, 25 bp, Homo sapien
gaaagttcggaaactgcgctgacaa

SEQ ID NO: 4058541 - DNA, 25 bp, Homo sapien
tcccatctcgatctggaacagctgc

SEQ ID NO: 4058542 - DNA, 25 bp, Homo sapien
tggaattcccatctcgatctggaac

SEQ ID NO: 4058543 - DNA, 25 bp, Homo sapien
gaattcccatctcgatctggaacag

SEQ ID NO: 4058544 - DNA, 25 bp, Homo sapien
gcctcttccaaattggaattcccat

SEQ ID NO: 4058545 - DNA, 25 bp, Homo sapien
gttacaggaccagaaactacagtca

SEQ ID NO: 4058546 - DNA, 25 bp, Homo sapien
actaacctttctacgtggcacccag

SEQ ID NO: 4058547 - DNA, 25 bp, Homo sapien
caaacacaaccgtactgcacagaca

SEQ ID NO: 4058548 - DNA, 25 bp, Homo sapien
aatggactgacctagaagttacagg

SEQ ID NO: 4058549 - DNA, 25 bp, Homo sapien
accatggctcgctacaggctcaaac

SEQ ID NO: 4058550 - DNA, 25 bp, Homo sapien
catggctcgctacaggctcaaactg

SEQ ID NO: 4058551 - DNA, 25 bp, Homo sapien
tggctcgctacaggctcaaactgct

SEQ ID NO: 4058552 - DNA, 25 bp, Homo sapien
aaccatggctcgctacaggctcaaa

SEQ ID NO: 4058553 - DNA, 25 bp, Homo sapien
tcattcaggggacagaaacatgggc

SEQ ID NO: 4058554 - DNA, 25 bp, Homo sapien
ttcaggggacagaaacatgggcccc

SEQ ID NO: 4058555 - DNA, 25 bp, Homo sapien
gggacagaaacatgggccccatgcc

SEQ ID NO: 4058556 - DNA, 25 bp, Homo sapien
gccccatgccttccacccttctttc

SEQ ID NO: 4058557 - DNA, 25 bp, Homo sapien
gaggatgaaatgagacataatgaag

SEQ ID NO: 4058558 - DNA, 25 bp, Homo sapien
ctgcagcgcagtggcctaatcatag

SEQ ID NO: 4058559 - DNA, 25 bp, Homo sapien
aacagagtttgttatgaggatgaaa

SEQ ID NO: 4058560 - DNA, 25 bp, Homo sapien
tgtgagctagtgtgcctggctccct

SEQ ID NO: 4058561 - DNA, 25 bp, Homo sapien
tttgaccctggagaaagaccacagg

SEQ ID NO: 4058562 - DNA, 25 bp, Homo sapien
agaaagaccacagggtgctgctcct

SEQ ID NO: 4058563 - DNA, 25 bp, Homo sapien
ctttgaccctggagaaagaccacag

SEQ ID NO: 4058564 - DNA, 25 bp, Homo sapien
tggagaaagaccacagggtgctgct

SEQ ID NO: 4058565 - DNA, 25 bp, Homo sapien
agcttctccacgcagtcaggtgcca

SEQ ID NO: 4058566 - DNA, 25 bp, Homo sapien
ggttgacatcggcattactgtactt

SEQ ID NO: 4058567 - DNA, 25 bp, Homo sapien
ttgcaccgagtgctgcgtcatggca

SEQ ID NO: 4058568 - DNA, 25 bp, Homo sapien
tactgtacttgcagtagggacactg

SEQ ID NO: 4058569 - DNA, 25 bp, Homo sapien
ggagatgcgtttggaggttgcagga

SEQ ID NO: 4058570 - DNA, 25 bp, Homo sapien
ctcagctgtttttggtcgcttcgaa

SEQ ID NO: 4058571 - DNA, 25 bp, Homo sapien
tgagctacctgggaaggagatgcgt

SEQ ID NO: 4058572 - DNA, 25 bp, Homo sapien
tgtttttggtcgcttcgaagagagg

SEQ ID NO: 4058573 - DNA, 25 bp, Homo sapien
attgctttgccagcctcagtaccag

SEQ ID NO: 4058574 - DNA, 25 bp, Homo sapien
ctttgccagcctcagtaccagacat

SEQ ID NO: 4058575 - DNA, 25 bp, Homo sapien
caattgctttgccagcctcagtacc

SEQ ID NO: 4058576 - DNA, 25 bp, Homo sapien
tgctttgccagcctcagtaccagac

SEQ ID NO: 4058577 - DNA, 25 bp, Homo sapien
aaaagtacaaggacgagcatattac

SEQ ID NO: 4058578 - DNA, 25 bp, Homo sapien
gacgagcatattacacacagatcct

SEQ ID NO: 4058579 - DNA, 25 bp, Homo sapien
tggtaacctggtctacataagtttg

SEQ ID NO: 4058580 - DNA, 25 bp, Homo sapien
tgtctcgaatcgacttcaaacccat

SEQ ID NO: 4058581 - DNA, 25 bp, Homo sapien
tctctgaacagcttcaaaagggcca

SEQ ID NO: 4058582 - DNA, 25 bp, Homo sapien
taatagatttgcaccaggatgtgcc

SEQ ID NO: 4058583 - DNA, 25 bp, Homo sapien
tcaggtcacgcaggtgaacttagtg

SEQ ID NO: 4058584 - DNA, 25 bp, Homo sapien
tatatttcaggcactaagttcccca

SEQ ID NO: 4058585 - DNA, 25 bp, Homo sapien
ttaggccttgaacccagggcttctg

SEQ ID NO: 4058586 - DNA, 25 bp, Homo sapien
ttcccctcaacatagaaagcttatc

SEQ ID NO: 4058587 - DNA, 25 bp, Homo sapien
tttgggtaagatgtccccctgcctg

SEQ ID NO: 4058588 - DNA, 25 bp, Homo sapien
catagaaagcttatcatcttgagaa

SEQ ID NO: 4058589 - DNA, 25 bp, Homo sapien
gaaatggccgttctccttctctcaa

SEQ ID NO: 4058590 - DNA, 25 bp, Homo sapien
tgtccacttgccctggtctttctca

SEQ ID NO: 4058591 - DNA, 25 bp, Homo sapien
gtccacttgccctggtctttctcac

SEQ ID NO: 4058592 - DNA, 25 bp, Homo sapien
ctgtccacttgccctggtctttctc

SEQ ID NO: 4058593 - DNA, 25 bp, Homo sapien
tagcaagctcctctggatcagcagc

SEQ ID NO: 4058594 - DNA, 25 bp, Homo sapien
tggtccttagcaagctcctctggat

SEQ ID NO: 4058595 - DNA, 25 bp, Homo sapien
ctcttggtccttagcaagctcctct

SEQ ID NO: 4058596 - DNA, 25 bp, Homo sapien
tccttagcaagctcctctggatcag

SEQ ID NO: 4058597 - DNA, 25 bp, Homo sapien
aggacctacaggtgtcgccctccgc

SEQ ID NO: 4058598 - DNA, 25 bp, Homo sapien
caggacctacaggtgtcgccctccg

SEQ ID NO: 4058599 - DNA, 25 bp, Homo sapien
gacctacaggtgtcgccctccgcat

SEQ ID NO: 4058600 - DNA, 25 bp, Homo sapien
ggacctacaggtgtcgccctccgca

SEQ ID NO: 4058601 - DNA, 25 bp, Homo sapien
ggcgaggcccggaagggcagctggc

SEQ ID NO: 4058602 - DNA, 25 bp, Homo sapien
ggcagaggagtctggaccgcctaac

SEQ ID NO: 4058603 - DNA, 25 bp, Homo sapien
cgaggcccggaagggcagctggctg

SEQ ID NO: 4058604 - DNA, 25 bp, Homo sapien
gaggcagaggagtctggaccgccta

SEQ ID NO: 4058605 - DNA, 25 bp, Homo sapien
ggtaaaggtgactgcacaattcccc

SEQ ID NO: 4058606 - DNA, 25 bp, Homo sapien
tacttagcatcttggtaaaggtgac

SEQ ID NO: 4058607 - DNA, 25 bp, Homo sapien
ccccatcggtggtgaaatctgctcc

SEQ ID NO: 4058608 - DNA, 25 bp, Homo sapien
gcagccccatgggaatttgcaccaa

SEQ ID NO: 4058609 - DNA, 25 bp, Homo sapien
tctggacagcttgaaaggtggtgga

SEQ ID NO: 4058610 - DNA, 25 bp, Homo sapien
taccactagatggtcatttaccaaa

SEQ ID NO: 4058611 - DNA, 25 bp, Homo sapien
tcaacactctgaaagcaactctggg

SEQ ID NO: 4058612 - DNA, 25 bp, Homo sapien
actatgcctggacctacaaactctt

SEQ ID NO: 4058613 - DNA, 25 bp, Homo sapien
tgaagtgaaaaatgctgccgttgtg

SEQ ID NO: 4058614 - DNA, 25 bp, Homo sapien
gtgggaacagcacagaacgccagag

SEQ ID NO: 4058615 - DNA, 25 bp, Homo sapien
gagagagcctgttacgagtccaaag

SEQ ID NO: 4058616 - DNA, 25 bp, Homo sapien
ccaacttgagcattgacaggagaga

SEQ ID NO: 4058617 - DNA, 25 bp, Homo sapien
catttatgggaaataatcgcaggcc

SEQ ID NO: 4058618 - DNA, 25 bp, Homo sapien
ctctgggagctcagcggatttgcag

SEQ ID NO: 4058619 - DNA, 25 bp, Homo sapien
tacacttcaatgtcagcgcgacgac

SEQ ID NO: 4058620 - DNA, 25 bp, Homo sapien
aaattccccgagcatgtctgtagca

SEQ ID NO: 4058621 - DNA, 25 bp, Homo sapien
tgccttttacagtagcttcccagaa

SEQ ID NO: 4058622 - DNA, 25 bp, Homo sapien
tccacattgatctgaagcccgaggg

SEQ ID NO: 4058623 - DNA, 25 bp, Homo sapien
aactgtaaaaacacaggtcgccagc

SEQ ID NO: 4058624 - DNA, 25 bp, Homo sapien
gattggagcctgaacttagctgctg

SEQ ID NO: 4058625 - DNA, 25 bp, Homo sapien
tgtctaatcttcctagcacatggaa

SEQ ID NO: 4058626 - DNA, 25 bp, Homo sapien
gggcctggcttataaatacagacag

SEQ ID NO: 4058627 - DNA, 25 bp, Homo sapien
cagacagaggtacgtgtaggtccaa

SEQ ID NO: 4058628 - DNA, 25 bp, Homo sapien
ggtggccaccttctactaaaccatg

SEQ ID NO: 4058629 - DNA, 25 bp, Homo sapien
gatcagttgatcacatactggcaca

SEQ ID NO: 4058630 - DNA, 25 bp, Homo sapien
gccacccatgttatcgatcagttga

SEQ ID NO: 4058631 - DNA, 25 bp, Homo sapien
tactggcacatcaggaccaccaatt

SEQ ID NO: 4058632 - DNA, 25 bp, Homo sapien
catggacagagcagcagttgacctc

SEQ ID NO: 4058633 - DNA, 25 bp, Homo sapien
gagttttgaagatgatgcctagcgc

SEQ ID NO: 4058634 - DNA, 25 bp, Homo sapien
tgagactgtcctgtaatcctggagg

SEQ ID NO: 4058635 - DNA, 25 bp, Homo sapien
aatttatgagccgtgatgatgccac

SEQ ID NO: 4058636 - DNA, 25 bp, Homo sapien
tccagccaggatagcccaaatgggt

SEQ ID NO: 4058637 - DNA, 25 bp, Homo sapien
tcatcacaaatgagggcttccacca

SEQ ID NO: 4058638 - DNA, 25 bp, Homo sapien
gaaacgccatgctgaagattccaca

SEQ ID NO: 4058639 - DNA, 25 bp, Homo sapien
gctcctttgaggcatgaactctgga

SEQ ID NO: 4058640 - DNA, 25 bp, Homo sapien
gaatgaacttggatcttgtccccac

SEQ ID NO: 4058641 - DNA, 25 bp, Homo sapien
ggacatttacaagcccctttcacta

SEQ ID NO: 4058642 - DNA, 25 bp, Homo sapien
cagaaaagctgggatctaaactcct

SEQ ID NO: 4058643 - DNA, 25 bp, Homo sapien
cagaggttcttcaaagccatggcac

SEQ ID NO: 4058644 - DNA, 25 bp, Homo sapien
gcttctgcaaccagatctgatctga

SEQ ID NO: 4058645 - DNA, 25 bp, Homo sapien
acggagcttgcttccatatccttaa

SEQ ID NO: 4058646 - DNA, 25 bp, Homo sapien
tcttaatggctacacagatttccac

SEQ ID NO: 4058647 - DNA, 25 bp, Homo sapien
taagcatacttccttgctaacagaa

SEQ ID NO: 4058648 - DNA, 25 bp, Homo sapien
tccaccacataatcgtaacacagtt

SEQ ID NO: 4058649 - DNA, 25 bp, Homo sapien
ctggaggagccatctttagaccatg

SEQ ID NO: 4058650 - DNA, 25 bp, Homo sapien
gatcattgctcacacggctaagttg

SEQ ID NO: 4058651 - DNA, 25 bp, Homo sapien
tcaggtgatgcaacaacctgcccgg

SEQ ID NO: 4058652 - DNA, 25 bp, Homo sapien
gctcactgaatacggcagatacctg

SEQ ID NO: 4058653 - DNA, 25 bp, Homo sapien
tgaactgccacgttaagtcaggtgt

SEQ ID NO: 4058654 - DNA, 25 bp, Homo sapien
cctggctggtccaatctggaagaaa

SEQ ID NO: 4058655 - DNA, 25 bp, Homo sapien
tggctacgattcagcgcagtcaccg

SEQ ID NO: 4058656 - DNA, 25 bp, Homo sapien
ggaactggacaggaagcttgcaaga

SEQ ID NO: 4058657 - DNA, 25 bp, Homo sapien
aattaaatttgtcctcacacacggc

SEQ ID NO: 4058658 - DNA, 25 bp, Homo sapien
gcctggagcccttgaccaagaacaa

SEQ ID NO: 4058659 - DNA, 25 bp, Homo sapien
tacagctggtgccacgtgtcatatg

SEQ ID NO: 4058660 - DNA, 25 bp, Homo sapien
gaacaacactaaccagaagggcagt

SEQ ID NO: 4058661 - DNA, 25 bp, Homo sapien
tgagtggccacagtatcaatgcttc

SEQ ID NO: 4058662 - DNA, 25 bp, Homo sapien
taactgctgaaaaggtgcaagtcct

SEQ ID NO: 4058663 - DNA, 25 bp, Homo sapien
gacgtaatttccctgactctggctt

SEQ ID NO: 4058664 - DNA, 25 bp, Homo sapien
actgcggccaggtctagataactgc

SEQ ID NO: 4058665 - DNA, 25 bp, Homo sapien
gatttcttgcctggtatcgacgtaa

SEQ ID NO: 4058666 - DNA, 25 bp, Homo sapien
gaagcaatagcgtctccaagatggc

SEQ ID NO: 4058667 - DNA, 25 bp, Homo sapien
tctgtaaactgagtccgggtccaat

SEQ ID NO: 4058668 - DNA, 25 bp, Homo sapien
tgggcagtcgctacaaaggtttctt

SEQ ID NO: 4058669 - DNA, 25 bp, Homo sapien
taaattctgaatgatcgtgcaccct

SEQ ID NO: 4058670 - DNA, 25 bp, Homo sapien
tttttcaagagcttctggtaaacca

SEQ ID NO: 4058671 - DNA, 25 bp, Homo sapien
gccagtgatgacgagtggtttctac

SEQ ID NO: 4058672 - DNA, 25 bp, Homo sapien
tggtaaaccagggaagcaaatggca

SEQ ID NO: 4058673 - DNA, 25 bp, Homo sapien
ggcccagtgcattggccagtgatga

SEQ ID NO: 4058674 - DNA, 25 bp, Homo sapien
caatgaagtccctatggaaggcgga

SEQ ID NO: 4058675 - DNA, 25 bp, Homo sapien
caggtctcgacgcattgaagcagca

SEQ ID NO: 4058676 - DNA, 25 bp, Homo sapien
ttacagaccagactttgaggccaca

SEQ ID NO: 4058677 - DNA, 25 bp, Homo sapien
gaggtagaaacgaggcaagctccca

SEQ ID NO: 4058678 - DNA, 25 bp, Homo sapien
ccttggtggagtagttgcacagaac

SEQ ID NO: 4058679 - DNA, 25 bp, Homo sapien
tcatggagcgcacatgctggatgag

SEQ ID NO: 4058680 - DNA, 25 bp, Homo sapien
gatggtgaagatctgccccaggtcc

SEQ ID NO: 4058681 - DNA, 25 bp, Homo sapien
tctcgcttcgctggtgcttcatgga

SEQ ID NO: 4058682 - DNA, 25 bp, Homo sapien
ctgtcgctggcagcgtggctcttga

SEQ ID NO: 4058683 - DNA, 25 bp, Homo sapien
ggcctgctccagatacttcataaaa

SEQ ID NO: 4058684 - DNA, 25 bp, Homo sapien
gctgagtgcacctgcccagatgtct

SEQ ID NO: 4058685 - DNA, 25 bp, Homo sapien
ctgcactcgaaaatttcccagggct

SEQ ID NO: 4058686 - DNA, 25 bp, Homo sapien
caggataaccagagagggctctatg

SEQ ID NO: 4058687 - DNA, 25 bp, Homo sapien
catttgttcctgctgcgagagttcg

SEQ ID NO: 4058688 - DNA, 25 bp, Homo sapien
ggtcgttgagaaaggcccatgctaa

SEQ ID NO: 4058689 - DNA, 25 bp, Homo sapien
aggtcccgccaagaatccagcagtt

SEQ ID NO: 4058690 - DNA, 25 bp, Homo sapien
cacacatcacacgtacaactttatt

SEQ ID NO: 4058691 - DNA, 25 bp, Homo sapien
cctcctaatctaactgttgccaggg

SEQ ID NO: 4058692 - DNA, 25 bp, Homo sapien
ccacgtggttaaggctctcaccttc

SEQ ID NO: 4058693 - DNA, 25 bp, Homo sapien
gatccccaagtcatataacccacgt

SEQ ID NO: 4058694 - DNA, 25 bp, Homo sapien
caaactctgggatctccagccttct

SEQ ID NO: 4058695 - DNA, 25 bp, Homo sapien
aactctgggatctccagccttctga

SEQ ID NO: 4058696 - DNA, 25 bp, Homo sapien
ctgggatctccagccttctgactgg

SEQ ID NO: 4058697 - DNA, 25 bp, Homo sapien
tctgggatctccagccttctgactg

SEQ ID NO: 4058698 - DNA, 25 bp, Homo sapien
gggacatccaagcaattcgatccaa

SEQ ID NO: 4058699 - DNA, 25 bp, Homo sapien
gctctccagctcctagtggaatgag

SEQ ID NO: 4058700 - DNA, 25 bp, Homo sapien
gataagatccctcccgggacatcca

SEQ ID NO: 4058701 - DNA, 25 bp, Homo sapien
tgccgcctcctggttggtcagctct

SEQ ID NO: 4058702 - DNA, 25 bp, Homo sapien
gaagaagccgtggtcgatgatcgca

SEQ ID NO: 4058703 - DNA, 25 bp, Homo sapien
cctgcttacactcagtaagttcact

SEQ ID NO: 4058704 - DNA, 25 bp, Homo sapien
aaaacatcccctgcttacactcagt

SEQ ID NO: 4058705 - DNA, 25 bp, Homo sapien
tcactgtactgcaggcccaagaaac

SEQ ID NO: 4058706 - DNA, 25 bp, Homo sapien
ttcagtggcaggtggcaggatctcg

SEQ ID NO: 4058707 - DNA, 25 bp, Homo sapien
actgctacctctgagtcccaggctc

SEQ ID NO: 4058708 - DNA, 25 bp, Homo sapien
tggagttcagtggcaggtggcagga

SEQ ID NO: 4058709 - DNA, 25 bp, Homo sapien
gagttcagtggcaggtggcaggatc

SEQ ID NO: 4058710 - DNA, 25 bp, Homo sapien
cagcacggctatgggcactgctgcc

SEQ ID NO: 4058711 - DNA, 25 bp, Homo sapien
ctctcagcacggctatgggcactgc

SEQ ID NO: 4058712 - DNA, 25 bp, Homo sapien
cagctttatgtatgtggcacacccc

SEQ ID NO: 4058713 - DNA, 25 bp, Homo sapien
tgccctgagtgctggtaatcagctt

SEQ ID NO: 4058714 - DNA, 25 bp, Homo sapien
ctctgggtgtcagtcccgctggtgc

SEQ ID NO: 4058715 - DNA, 25 bp, Homo sapien
tgtcagtcccgctggtgccagctgc

SEQ ID NO: 4058716 - DNA, 25 bp, Homo sapien
ggaagaacctgttaggaggactggc

SEQ ID NO: 4058717 - DNA, 25 bp, Homo sapien
ctgggtgtcagtcccgctggtgcca

SEQ ID NO: 4058718 - DNA, 25 bp, Homo sapien
tcaagcccggtaatgtagacgctgt

SEQ ID NO: 4058719 - DNA, 25 bp, Homo sapien
tcagctagtttaatttcaagcccgg

SEQ ID NO: 4058720 - DNA, 25 bp, Homo sapien
tgtaactccggactctctcagctag

SEQ ID NO: 4058721 - DNA, 25 bp, Homo sapien
gagacgtcacactgccactttagaa

SEQ ID NO: 4058722 - DNA, 25 bp, Homo sapien
gacacccagtgtccgggatcagcgt

SEQ ID NO: 4058723 - DNA, 25 bp, Homo sapien
catttcaacgtttcacttcagccag

SEQ ID NO: 4058724 - DNA, 25 bp, Homo sapien
tgtccacccaactagatctcaagag

SEQ ID NO: 4058725 - DNA, 25 bp, Homo sapien
gcacagttccaacgcccattctaag

SEQ ID NO: 4058726 - DNA, 25 bp, Homo sapien
ctgttgccagggctggagtgcagtg

SEQ ID NO: 4058727 - DNA, 25 bp, Homo sapien
acagagttcttcactctgttgccag

SEQ ID NO: 4058728 - DNA, 25 bp, Homo sapien
attacaggcacccggtactatgccc

SEQ ID NO: 4058729 - DNA, 25 bp, Homo sapien
aggcacccggtactatgcccagcta

SEQ ID NO: 4058730 - DNA, 25 bp, Homo sapien
aatgatcactgcatgtacagaaggg

SEQ ID NO: 4058731 - DNA, 25 bp, Homo sapien
tgatgaaagcaccttaacagtacgg

SEQ ID NO: 4058732 - DNA, 25 bp, Homo sapien
ccccaatgcttcgtgcagcaaatga

SEQ ID NO: 4058733 - DNA, 25 bp, Homo sapien
gagacagttggcgtggcctcgcctt

SEQ ID NO: 4058734 - DNA, 25 bp, Homo sapien
tctgttgcacatacttcgcacatcg

SEQ ID NO: 4058735 - DNA, 25 bp, Homo sapien
tcaaatcaagaagggaggcatttcc

SEQ ID NO: 4058736 - DNA, 25 bp, Homo sapien
catcgtttcagatgttaaagacggt

SEQ ID NO: 4058737 - DNA, 25 bp, Homo sapien
agacggtttcgcattaagttctcct

SEQ ID NO: 4058738 - DNA, 25 bp, Homo sapien
ctaattttggtcacataagggaaat

SEQ ID NO: 4058739 - DNA, 25 bp, Homo sapien
cttcactagatcactttttgctcca

SEQ ID NO: 4058740 - DNA, 25 bp, Homo sapien
ttctaattttcctgagtacttcact

SEQ ID NO: 4058741 - DNA, 25 bp, Homo sapien
ggggtggagcaagccatagccacaa

SEQ ID NO: 4058742 - DNA, 25 bp, Homo sapien
gcagctggacttgaatcactttcta

SEQ ID NO: 4058743 - DNA, 25 bp, Homo sapien
tatcctgcgcatagcgggtgctcaa

SEQ ID NO: 4058744 - DNA, 25 bp, Homo sapien
gaaagcatcagaatgtagcacctgc

SEQ ID NO: 4058745 - DNA, 25 bp, Homo sapien
cctgggctaagagtcgctggattac

SEQ ID NO: 4058746 - DNA, 25 bp, Homo sapien
taaccagttgggtgtggctgctccc

SEQ ID NO: 4058747 - DNA, 25 bp, Homo sapien
gccagcagcacgtgggaattttcaa

SEQ ID NO: 4058748 - DNA, 25 bp, Homo sapien
ggccagcagcacgtgggaattttca

SEQ ID NO: 4058749 - DNA, 25 bp, Homo sapien
ccagcagcacgtgggaattttcaaa

SEQ ID NO: 4058750 - DNA, 25 bp, Homo sapien
gtggccagcagcacgtgggaatttt

SEQ ID NO: 4058751 - DNA, 25 bp, Homo sapien
tggtgaaaccacctagcacatgacg

SEQ ID NO: 4058752 - DNA, 25 bp, Homo sapien
ggcaatccaggtcctcaagaggttt

SEQ ID NO: 4058753 - DNA, 25 bp, Homo sapien
cacatgacgcagagaccagcgtggt

SEQ ID NO: 4058754 - DNA, 25 bp, Homo sapien
cagcgtggtgccaaacagtgtgaca

SEQ ID NO: 4058755 - DNA, 25 bp, Homo sapien
tcctgggcctgcgacaatgagcagt

SEQ ID NO: 4058756 - DNA, 25 bp, Homo sapien
caaaaacatccgatgctgctcagag

SEQ ID NO: 4058757 - DNA, 25 bp, Homo sapien
cgacaatgagcagttcgtaaagaat

SEQ ID NO: 4058758 - DNA, 25 bp, Homo sapien
atctcgaggcacagagtaccctcca

SEQ ID NO: 4058759 - DNA, 25 bp, Homo sapien
caacatctggccaagttgctggtga

SEQ ID NO: 4058760 - DNA, 25 bp, Homo sapien
tataagtaaccagtgcaggaggaga

SEQ ID NO: 4058761 - DNA, 25 bp, Homo sapien
ttgctggtgaccgaaccaggcctcc

SEQ ID NO: 4058762 - DNA, 25 bp, Homo sapien
gaccaagaaggcctggagtgaacca

SEQ ID NO: 4058763 - DNA, 25 bp, Homo sapien
gcttgtgcctaaagccatcggctga

SEQ ID NO: 4058764 - DNA, 25 bp, Homo sapien
gaacttggtcctagcacaagccctg

SEQ ID NO: 4058765 - DNA, 25 bp, Homo sapien
catacgttcccacagcagtgatgga

SEQ ID NO: 4058766 - DNA, 25 bp, Homo sapien
gaagttaactggtggccacaagagc

SEQ ID NO: 4058767 - DNA, 25 bp, Homo sapien
aaggtggcagaagtatgtacttaaa

SEQ ID NO: 4058768 - DNA, 25 bp, Homo sapien
gggcatgcaggcgaaatctgctaaa

SEQ ID NO: 4058769 - DNA, 25 bp, Homo sapien
gaatcccgacgcaaaccatatgaca

SEQ ID NO: 4058770 - DNA, 25 bp, Homo sapien
catatgacactttcaccggagcttc

SEQ ID NO: 4058771 - DNA, 25 bp, Homo sapien
gccgccctggctgatcatgaataat

SEQ ID NO: 4058772 - DNA, 25 bp, Homo sapien
agagcagctttggagagccgccctg

SEQ ID NO: 4058773 - DNA, 25 bp, Homo sapien
ataatttgccagggaaccgggacag

SEQ ID NO: 4058774 - DNA, 25 bp, Homo sapien
ttgtgtgtgagaagcccggtcagct

SEQ ID NO: 4058775 - DNA, 25 bp, Homo sapien
ctccttcaggtgctgggtccacgtt

SEQ ID NO: 4058776 - DNA, 25 bp, Homo sapien
tccttcaggtgctgggtccacgttc

SEQ ID NO: 4058777 - DNA, 25 bp, Homo sapien
ccttcaggtgctgggtccacgttct

SEQ ID NO: 4058778 - DNA, 25 bp, Homo sapien
ttcaggtgctgggtccacgttctac

SEQ ID NO: 4058779 - DNA, 25 bp, Homo sapien
tctacccacgccatctttttgagca

SEQ ID NO: 4058780 - DNA, 25 bp, Homo sapien
cctgcatcccaacgctcaggaccct

SEQ ID NO: 4058781 - DNA, 25 bp, Homo sapien
aggacccttctacccacgccatctt

SEQ ID NO: 4058782 - DNA, 25 bp, Homo sapien
atcccaacgctcaggacccttctac

SEQ ID NO: 4058783 - DNA, 25 bp, Homo sapien
agtgctccctaactccccggtgcgc

SEQ ID NO: 4058784 - DNA, 25 bp, Homo sapien
ggccatgccagagactgtccgactc

SEQ ID NO: 4058785 - DNA, 25 bp, Homo sapien
tgaacctgtcacgtttccacctggt

SEQ ID NO: 4058786 - DNA, 25 bp, Homo sapien
tgacaaagtggacaccgccgactct

SEQ ID NO: 4058787 - DNA, 25 bp, Homo sapien
ccaggctgttggtgtagtagtcaca

SEQ ID NO: 4058788 - DNA, 25 bp, Homo sapien
tgaacttgttgcagacggcgcactg

SEQ ID NO: 4058789 - DNA, 25 bp, Homo sapien
gttgccgatggccacacacttgagc

SEQ ID NO: 4058790 - DNA, 25 bp, Homo sapien
gcatgtccaggttgtccgtcgtgaa

SEQ ID NO: 4058791 - DNA, 25 bp, Homo sapien
gaaggagagagtcagacaccaggct

SEQ ID NO: 4058792 - DNA, 25 bp, Homo sapien
ggagagagtcagacaccaggctcat

SEQ ID NO: 4058793 - DNA, 25 bp, Homo sapien
gagaaggagagagtcagacaccagg

SEQ ID NO: 4058794 - DNA, 25 bp, Homo sapien
aaggagagagtcagacaccaggctc

SEQ ID NO: 4058795 - DNA, 25 bp, Homo sapien
cctcaggaaggtgcatggattcaaa

SEQ ID NO: 4058796 - DNA, 25 bp, Homo sapien
gctaaaccttgtgcaggtgtccagg

SEQ ID NO: 4058797 - DNA, 25 bp, Homo sapien
ggagacgaagggagctgctaaacct

SEQ ID NO: 4058798 - DNA, 25 bp, Homo sapien
gattcaaaggcacactctggaatga

SEQ ID NO: 4058799 - DNA, 25 bp, Homo sapien
ctattcaccattctccctggttaaa

SEQ ID NO: 4058800 - DNA, 25 bp, Homo sapien
tggttaaactcctatcatgaaaaca

SEQ ID NO: 4058801 - DNA, 25 bp, Homo sapien
cctggttaaactcctatcatgaaaa

SEQ ID NO: 4058802 - DNA, 25 bp, Homo sapien
cagacaaacacgtagtcatcctcac

SEQ ID NO: 4058803 - DNA, 25 bp, Homo sapien
gccacgttggtctcataatcacaca

SEQ ID NO: 4058804 - DNA, 25 bp, Homo sapien
gctggaatccgctcatcatgaactg

SEQ ID NO: 4058805 - DNA, 25 bp, Homo sapien
catgtgaatgcggaggttcctggcc

SEQ ID NO: 4058806 - DNA, 25 bp, Homo sapien
caggtagtattggtagagctcggcc

SEQ ID NO: 4058807 - DNA, 25 bp, Homo sapien
gggccccgcaggagctactgatatt

SEQ ID NO: 4058808 - DNA, 25 bp, Homo sapien
gagctactgatattggctgccgccg

SEQ ID NO: 4058809 - DNA, 25 bp, Homo sapien
ccgccgccccggcagtgtggctgaa

SEQ ID NO: 4058810 - DNA, 25 bp, Homo sapien
cccgcaggagctactgatattggct

SEQ ID NO: 4058811 - DNA, 25 bp, Homo sapien
tttggtagttgtggagtagttacac

SEQ ID NO: 4058812 - DNA, 25 bp, Homo sapien
ttggtagttgtggagtagttacaca

SEQ ID NO: 4058813 - DNA, 25 bp, Homo sapien
gaactagtagaagctgtgcccctcg

SEQ ID NO: 4058814 - DNA, 25 bp, Homo sapien
tcgcagcggaaaggcttgtaaccac

SEQ ID NO: 4058815 - DNA, 25 bp, Homo sapien
ctttattggcactttcgtcagcgaa

SEQ ID NO: 4058816 - DNA, 25 bp, Homo sapien
tgtaaccacacgtgtagctctcgcc

SEQ ID NO: 4058817 - DNA, 25 bp, Homo sapien
cctttttgctgctactacctgctgc

SEQ ID NO: 4058818 - DNA, 25 bp, Homo sapien
gtttgagagagcaaggtcctttttg

SEQ ID NO: 4058819 - DNA, 25 bp, Homo sapien
tcatccaactcgcttggaaagagtc

SEQ ID NO: 4058820 - DNA, 25 bp, Homo sapien
gaaatgctttggtttgagagagcaa

SEQ ID NO: 4058821 - DNA, 25 bp, Homo sapien
ctttgcaaccctcgtcttcctcctc

SEQ ID NO: 4058822 - DNA, 25 bp, Homo sapien
tgcaaccctcgtcttcctcctcctc

SEQ ID NO: 4058823 - DNA, 25 bp, Homo sapien
caaccctcgtcttcctcctcctctt

SEQ ID NO: 4058824 - DNA, 25 bp, Homo sapien
tttgcaaccctcgtcttcctcctcc

SEQ ID NO: 4058825 - DNA, 25 bp, Homo sapien
ccgcctcctcttcggctggctctac

SEQ ID NO: 4058826 - DNA, 25 bp, Homo sapien
tgaggatttggtaggactggaagcc

SEQ ID NO: 4058827 - DNA, 25 bp, Homo sapien
ccgccaaggttcaacagggtgctgg

SEQ ID NO: 4058828 - DNA, 25 bp, Homo sapien
taatgggggtcttcagtaccgagct

SEQ ID NO: 4058829 - DNA, 25 bp, Homo sapien
gaagcaatccccgtcgcccacttcc

SEQ ID NO: 4058830 - DNA, 25 bp, Homo sapien
cctccccttccattcgaatgccact

SEQ ID NO: 4058831 - DNA, 25 bp, Homo sapien
ttccattcgaatgccactaaattta

SEQ ID NO: 4058832 - DNA, 25 bp, Homo sapien
ccttccattcgaatgccactaaatt

SEQ ID NO: 4058833 - DNA, 25 bp, Homo sapien
tccccttccattcgaatgccactaa

SEQ ID NO: 4058834 - DNA, 25 bp, Homo sapien
tgtgtcgcacgtcaaacacgcggaa

SEQ ID NO: 4058835 - DNA, 25 bp, Homo sapien
cattcgatggtcatgcaccgcgtgg

SEQ ID NO: 4058836 - DNA, 25 bp, Homo sapien
aattttccgctcgtcttcgctcagg

SEQ ID NO: 4058837 - DNA, 25 bp, Homo sapien
tacgcaggagcttttggcagaaccg

SEQ ID NO: 4058838 - DNA, 25 bp, Homo sapien
gccgaacattcgttgcaggtgacct

SEQ ID NO: 4058839 - DNA, 25 bp, Homo sapien
cattgctggtgctgagggataccgc

SEQ ID NO: 4058840 - DNA, 25 bp, Homo sapien
ggactgctccatgctactgggtttg

SEQ ID NO: 4058841 - DNA, 25 bp, Homo sapien
tgctctccgcgaggcgctcattgaa

SEQ ID NO: 4058842 - DNA, 25 bp, Homo sapien
tttcattgcacccagtacggaggct

SEQ ID NO: 4058843 - DNA, 25 bp, Homo sapien
gctttcattgcacccagtacggagg

SEQ ID NO: 4058844 - DNA, 25 bp, Homo sapien
tcattgcacccagtacggaggctcg

SEQ ID NO: 4058845 - DNA, 25 bp, Homo sapien
ttgcacccagtacggaggctcggac

SEQ ID NO: 4058846 - DNA, 25 bp, Homo sapien
gcaggtttaccagaagtctcaggga

SEQ ID NO: 4058847 - DNA, 25 bp, Homo sapien
actgcagggcggctcttcttaggga

SEQ ID NO: 4058848 - DNA, 25 bp, Homo sapien
aatgggacttcctcgcaaggctgag

SEQ ID NO: 4058849 - DNA, 25 bp, Homo sapien
caaagttccatgagccttagaaagg

SEQ ID NO: 4058850 - DNA, 25 bp, Homo sapien
cataaatgcttggtaagttacagga

SEQ ID NO: 4058851 - DNA, 25 bp, Homo sapien
tgcaccagggacttgtttatcgaca

SEQ ID NO: 4058852 - DNA, 25 bp, Homo sapien
taacagcccgattgtaaaatcaatg

SEQ ID NO: 4058853 - DNA, 25 bp, Homo sapien
gggccacgattgataaagcagaaca

SEQ ID NO: 4058854 - DNA, 25 bp, Homo sapien
tgtggtggtgacactagagcccacc

SEQ ID NO: 4058855 - DNA, 25 bp, Homo sapien
accctgtggtggtgacactagagcc

SEQ ID NO: 4058856 - DNA, 25 bp, Homo sapien
ggtgacactagagcccacccattca

SEQ ID NO: 4058857 - DNA, 25 bp, Homo sapien
gagcccacccattcacggggagcag

SEQ ID NO: 4058858 - DNA, 25 bp, Homo sapien
ttccccgtgacactcatgatcctga

SEQ ID NO: 4058859 - DNA, 25 bp, Homo sapien
aatactgagccgtttccccgtgaca

SEQ ID NO: 4058860 - DNA, 25 bp, Homo sapien
tgtgggctgatttccctagttccct

SEQ ID NO: 4058861 - DNA, 25 bp, Homo sapien
cttgggcagaacttcacgtaataca

SEQ ID NO: 4058862 - DNA, 25 bp, Homo sapien
tgagtacgtaagtctctaccctgag

SEQ ID NO: 4058863 - DNA, 25 bp, Homo sapien
taccctgagtcacgtggaggccttt

SEQ ID NO: 4058864 - DNA, 25 bp, Homo sapien
taaaccggacaccttctgacactaa

SEQ ID NO: 4058865 - DNA, 25 bp, Homo sapien
taattaccatagagcacggatcccc

SEQ ID NO: 4058866 - DNA, 25 bp, Homo sapien
tactgtccacctggttgaatcaagc

SEQ ID NO: 4058867 - DNA, 25 bp, Homo sapien
ttacctacctcggatcacgctgctg

SEQ ID NO: 4058868 - DNA, 25 bp, Homo sapien
gatatgtacaaaaagactcagcagc

SEQ ID NO: 4058869 - DNA, 25 bp, Homo sapien
ctgctgtttatgtaggccgcccttt

SEQ ID NO: 4058870 - DNA, 25 bp, Homo sapien
cttttctgagtgagtaatgaaaggg

SEQ ID NO: 4058871 - DNA, 25 bp, Homo sapien
ccggccttgcctgttatttctatgg

SEQ ID NO: 4058872 - DNA, 25 bp, Homo sapien
cagaatttgactggtgatccctccc

SEQ ID NO: 4058873 - DNA, 25 bp, Homo sapien
caggtgtgtgttgtccttttctgag

SEQ ID NO: 4058874 - DNA, 25 bp, Homo sapien
attatgataattgcagggtccctgc

SEQ ID NO: 4058875 - DNA, 25 bp, Homo sapien
gatactaaagcagtgtaagccacaa

SEQ ID NO: 4058876 - DNA, 25 bp, Homo sapien
gggttaatggaagctgaccgcagca

SEQ ID NO: 4058877 - DNA, 25 bp, Homo sapien
gattgccaagcagatgataaaactg

SEQ ID NO: 4058878 - DNA, 25 bp, Homo sapien
gccagtcgagcctgcataagtgcta

SEQ ID NO: 4058879 - DNA, 25 bp, Homo sapien
agggccagtcgagcctgcataagtg

SEQ ID NO: 4058880 - DNA, 25 bp, Homo sapien
gtcgagcctgcataagtgctaagaa

SEQ ID NO: 4058881 - DNA, 25 bp, Homo sapien
ccaacagggccagtcgagcctgcat

SEQ ID NO: 4058882 - DNA, 25 bp, Homo sapien
cagccccgacgacagatttctcaga

SEQ ID NO: 4058883 - DNA, 25 bp, Homo sapien
cagcagccgagtgcactaattcacc

SEQ ID NO: 4058884 - DNA, 25 bp, Homo sapien
gagactctctgggttgaatccagtt

SEQ ID NO: 4058885 - DNA, 25 bp, Homo sapien
tatacttaataactccagccccgac

SEQ ID NO: 4058886 - DNA, 25 bp, Homo sapien
gcacggacttaatgagctcttggaa

SEQ ID NO: 4058887 - DNA, 25 bp, Homo sapien
tcagcacggacttaatgagctcttg

SEQ ID NO: 4058888 - DNA, 25 bp, Homo sapien
acggacttaatgagctcttggaagg

SEQ ID NO: 4058889 - DNA, 25 bp, Homo sapien
cagcacggacttaatgagctcttgg

SEQ ID NO: 4058890 - DNA, 25 bp, Homo sapien
tccgatcacaactacaactacagcg

SEQ ID NO: 4058891 - DNA, 25 bp, Homo sapien
caactacagcggtcatattgctctc

SEQ ID NO: 4058892 - DNA, 25 bp, Homo sapien
ttctttgtccctccgatcacaacta

SEQ ID NO: 4058893 - DNA, 25 bp, Homo sapien
agcggtcatattgctctccccaaga

SEQ ID NO: 4058894 - DNA, 25 bp, Homo sapien
cacctgccctatctggtggagtgga

SEQ ID NO: 4058895 - DNA, 25 bp, Homo sapien
acctgccctatctggtggagtggag

SEQ ID NO: 4058896 - DNA, 25 bp, Homo sapien
tgcacctgccctatctggtggagtg

SEQ ID NO: 4058897 - DNA, 25 bp, Homo sapien
gctgcacctgccctatctggtggag

SEQ ID NO: 4058898 - DNA, 25 bp, Homo sapien
tccgaacctagaaatgcagagagct

SEQ ID NO: 4058899 - DNA, 25 bp, Homo sapien
tttgaaggaaagactggaatgggct

SEQ ID NO: 4058900 - DNA, 25 bp, Homo sapien
agtatcccgggcagaagaacagagc

SEQ ID NO: 4058901 - DNA, 25 bp, Homo sapien
tggagggcccacccgagtaagtatc

SEQ ID NO: 4058902 - DNA, 25 bp, Homo sapien
agcccacattccggtccatagacca

SEQ ID NO: 4058903 - DNA, 25 bp, Homo sapien
cacattccggtccatagaccagaaa

SEQ ID NO: 4058904 - DNA, 25 bp, Homo sapien
tcaagcccacattccggtccataga

SEQ ID NO: 4058905 - DNA, 25 bp, Homo sapien
ccacattccggtccatagaccagaa

SEQ ID NO: 4058906 - DNA, 25 bp, Homo sapien
ttttgtgattagtgaccagcatgca

SEQ ID NO: 4058907 - DNA, 25 bp, Homo sapien
caactcacctggaatggatggtaac

SEQ ID NO: 4058908 - DNA, 25 bp, Homo sapien
ttcttccccacaaggcttaggccta

SEQ ID NO: 4058909 - DNA, 25 bp, Homo sapien
tataatacgagaggcagtgaagtgc

SEQ ID NO: 4058910 - DNA, 25 bp, Homo sapien
aaaggctgtcgagtccacaggtcct

SEQ ID NO: 4058911 - DNA, 25 bp, Homo sapien
tacatgttgagtaaagacccaattt

SEQ ID NO: 4058912 - DNA, 25 bp, Homo sapien
tgcagaacgggtgactatgaaggcc

SEQ ID NO: 4058913 - DNA, 25 bp, Homo sapien
gatttgcagttgctggaatctacaa

SEQ ID NO: 4058914 - DNA, 25 bp, Homo sapien
tataatgaaggatgccggtaaacag

SEQ ID NO: 4058915 - DNA, 25 bp, Homo sapien
tgccggtaaacagaaatccacacgc

SEQ ID NO: 4058916 - DNA, 25 bp, Homo sapien
ggatgccggtaaacagaaatccaca

SEQ ID NO: 4058917 - DNA, 25 bp, Homo sapien
tatgttaccatataatgaaggatgc

SEQ ID NO: 4058918 - DNA, 25 bp, Homo sapien
tagaggtacccaaaaaggcagtcag

SEQ ID NO: 4058919 - DNA, 25 bp, Homo sapien
ggatggagccatgtttctagaacca

SEQ ID NO: 4058920 - DNA, 25 bp, Homo sapien
gcagtcagtcttctcagcagggctt

SEQ ID NO: 4058921 - DNA, 25 bp, Homo sapien
taggtacaactaacgggcagacagc

SEQ ID NO: 4058922 - DNA, 25 bp, Homo sapien
ggagaggccaccaaatttcatctcg

SEQ ID NO: 4058923 - DNA, 25 bp, Homo sapien
tgcagatgcgatcaagtgaaggatc

SEQ ID NO: 4058924 - DNA, 25 bp, Homo sapien
gaagacgcccacatcctaatatccg

SEQ ID NO: 4058925 - DNA, 25 bp, Homo sapien
tccacaggaccgtgcagtagctgaa

SEQ ID NO: 4058926 - DNA, 25 bp, Homo sapien
gttttacacaccatacgggcactgg

SEQ ID NO: 4058927 - DNA, 25 bp, Homo sapien
gaagcctcgctgtgatgccaggcag

SEQ ID NO: 4058928 - DNA, 25 bp, Homo sapien
ggcaccttgaagaatggcccacgca

SEQ ID NO: 4058929 - DNA, 25 bp, Homo sapien
taccaccgtgcacagctagcttttg

SEQ ID NO: 4058930 - DNA, 25 bp, Homo sapien
gcaatcctcccgccttagcctcttg

SEQ ID NO: 4058931 - DNA, 25 bp, Homo sapien
cctcaatttcccaggctcaagcaat

SEQ ID NO: 4058932 - DNA, 25 bp, Homo sapien
caatcctcccgccttagcctcttga

SEQ ID NO: 4058933 - DNA, 25 bp, Homo sapien
caatttcccaggctcaagcaatcct

SEQ ID NO: 4058934 - DNA, 25 bp, Homo sapien
tcctaaccaacccagaaagaactca

SEQ ID NO: 4058935 - DNA, 25 bp, Homo sapien
taagactctgacctcgcttctaagg

SEQ ID NO: 4058936 - DNA, 25 bp, Homo sapien
aaggactgaagctagcctctgtata

SEQ ID NO: 4058937 - DNA, 25 bp, Homo sapien
tcaagcttccggttccgctaagact

SEQ ID NO: 4058938 - DNA, 25 bp, Homo sapien
catcccagccagagtattgtcaggg

SEQ ID NO: 4058939 - DNA, 25 bp, Homo sapien
agtcagagacctacaggaaaaggcc

SEQ ID NO: 4058940 - DNA, 25 bp, Homo sapien
tgtcagggcccaaccgaaaaagata

SEQ ID NO: 4058941 - DNA, 25 bp, Homo sapien
agccaacatgaacatcccagccaga

SEQ ID NO: 4058942 - DNA, 25 bp, Homo sapien
aacccacaggctaaggatgcatcag

SEQ ID NO: 4058943 - DNA, 25 bp, Homo sapien
caataacctcaaccgctcggaggga

SEQ ID NO: 4058944 - DNA, 25 bp, Homo sapien
gacgattgttagaactcaagacaca

SEQ ID NO: 4058945 - DNA, 25 bp, Homo sapien
ctcggagggattctcaagctctgcc

SEQ ID NO: 4058946 - DNA, 25 bp, Homo sapien
ctgggttcgccatcaccttcagcct

SEQ ID NO: 4058947 - DNA, 25 bp, Homo sapien
tgagaaacgctccttggtcacaggg

SEQ ID NO: 4058948 - DNA, 25 bp, Homo sapien
aggaaaatgagaaacgctccttggt

SEQ ID NO: 4058949 - DNA, 25 bp, Homo sapien
aatgagaaacgctccttggtcacag

SEQ ID NO: 4058950 - DNA, 25 bp, Homo sapien
tcgccagactgggttgagtgtcaag

SEQ ID NO: 4058951 - DNA, 25 bp, Homo sapien
tcaaagcaacataaggcaggctccc

SEQ ID NO: 4058952 - DNA, 25 bp, Homo sapien
caagagtaggcctctaacagagagt

SEQ ID NO: 4058953 - DNA, 25 bp, Homo sapien
aaactataatcgctttgtcgccaga

SEQ ID NO: 4058954 - DNA, 25 bp, Homo sapien
ggtttgacacaaccgtagcttctgt

SEQ ID NO: 4058955 - DNA, 25 bp, Homo sapien
tgtgctcctttctcaatctgagtgg

SEQ ID NO: 4058956 - DNA, 25 bp, Homo sapien
tagagaaaagccctctgacagttgt

SEQ ID NO: 4058957 - DNA, 25 bp, Homo sapien
acatgttcaaagagatcaatctggc

SEQ ID NO: 4058958 - DNA, 25 bp, Homo sapien
tatccagaaaccacagccattaact

SEQ ID NO: 4058959 - DNA, 25 bp, Homo sapien
agatttgacacctcctgaattcagg

SEQ ID NO: 4058960 - DNA, 25 bp, Homo sapien
tcctggaactcgtgattttcagggt

SEQ ID NO: 4058961 - DNA, 25 bp, Homo sapien
gccattaactgaacgtgaagatttg

SEQ ID NO: 4058962 - DNA, 25 bp, Homo sapien
cgcccgcccggaatcgctttatgta

SEQ ID NO: 4058963 - DNA, 25 bp, Homo sapien
gccgccatgcgcaacaacgggaaat

SEQ ID NO: 4058964 - DNA, 25 bp, Homo sapien
agcccaactcgcagtttgcagcgcg

SEQ ID NO: 4058965 - DNA, 25 bp, Homo sapien
caggactcggaggtggctctggtca

SEQ ID NO: 4058966 - DNA, 25 bp, Homo sapien
cggctccccgggcaaagcctgacat

SEQ ID NO: 4058967 - DNA, 25 bp, Homo sapien
gcaacaaagcggaaggttaatttga

SEQ ID NO: 4058968 - DNA, 25 bp, Homo sapien
taatttgaaactcacagccccgctg

SEQ ID NO: 4058969 - DNA, 25 bp, Homo sapien
ttcggggatccacattacacagcaa

SEQ ID NO: 4058970 - DNA, 25 bp, Homo sapien
ccgggttgctcggcggcgaccgcgc

SEQ ID NO: 4058971 - DNA, 25 bp, Homo sapien
gcccgcagggacccggggacgcaca

SEQ ID NO: 4058972 - DNA, 25 bp, Homo sapien
ctacagtcgtgccgggcgcaggccg

SEQ ID NO: 4058973 - DNA, 25 bp, Homo sapien
cgcagggacccggggacgcacaggg

SEQ ID NO: 4058974 - DNA, 25 bp, Homo sapien
tgaagaattcattgaggtttgcagt

SEQ ID NO: 4058975 - DNA, 25 bp, Homo sapien
cccctattaagcttctaaggatggg

SEQ ID NO: 4058976 - DNA, 25 bp, Homo sapien
ggaagatagacaaaagatgaccttt

SEQ ID NO: 4058977 - DNA, 25 bp, Homo sapien
ggtttgcagttctcccctattaagc

SEQ ID NO: 4058978 - DNA, 25 bp, Homo sapien
ggatttctattgaggctgttccaat

SEQ ID NO: 4058979 - DNA, 25 bp, Homo sapien
caatcgccagtgaggcctacggtaa

SEQ ID NO: 4058980 - DNA, 25 bp, Homo sapien
catgctgtttcgtttgtctctctgc

SEQ ID NO: 4058981 - DNA, 25 bp, Homo sapien
ctccaagtcagccagtgttttagaa

SEQ ID NO: 4058982 - DNA, 25 bp, Homo sapien
aagaatggatgaaaaaaagaagtct

SEQ ID NO: 4058983 - DNA, 25 bp, Homo sapien
tgaaatttaaagaatggatgaaaaa

SEQ ID NO: 4058984 - DNA, 25 bp, Homo sapien
tgtgaaatttaaagaatggatgaaa

SEQ ID NO: 4058985 - DNA, 25 bp, Homo sapien
ctgtgaaatttaaagaatggatgaa

SEQ ID NO: 4058986 - DNA, 25 bp, Homo sapien
aagctgagatgaatcactgcgtgcc

SEQ ID NO: 4058987 - DNA, 25 bp, Homo sapien
aagtctccgagtcgtcattacaagg

SEQ ID NO: 4058988 - DNA, 25 bp, Homo sapien
gaggtccactaatgccagcttcaga

SEQ ID NO: 4058989 - DNA, 25 bp, Homo sapien
tgcgtgccatgaaaataccagggcg

SEQ ID NO: 4058990 - DNA, 25 bp, Homo sapien
gaagaggtggcgaagagacaataca

SEQ ID NO: 4058991 - DNA, 25 bp, Homo sapien
gctgccgcactcagtttacattggt

SEQ ID NO: 4058992 - DNA, 25 bp, Homo sapien
gaacctatacagcagacgaattgga

SEQ ID NO: 4058993 - DNA, 25 bp, Homo sapien
gagggaatagatgtctgccgaccat

SEQ ID NO: 4058994 - DNA, 25 bp, Homo sapien
cacaatttgtacaatggcaggagga

SEQ ID NO: 4058995 - DNA, 25 bp, Homo sapien
gctttgtaaccggatctagagaccc

SEQ ID NO: 4058996 - DNA, 25 bp, Homo sapien
caggaggagcctaaaatatacacca

SEQ ID NO: 4058997 - DNA, 25 bp, Homo sapien
tgctgggagcctatgtctatgcagg

SEQ ID NO: 4058998 - DNA, 25 bp, Homo sapien
cttttatttccccattgcaggattc

SEQ ID NO: 4058999 - DNA, 25 bp, Homo sapien
tcttttatttccccattgcaggatt

SEQ ID NO: 4059000 - DNA, 25 bp, Homo sapien
taagtgcatatgcatccagactccc

SEQ ID NO: 4059001 - DNA, 25 bp, Homo sapien
tgggggaagtaagtgcatatgcatc

SEQ ID NO: 4059002 - DNA, 25 bp, Homo sapien
gaagtaagtgcatatgcatccagac

SEQ ID NO: 4059003 - DNA, 25 bp, Homo sapien
agactcccccagtgaagacacccac

SEQ ID NO: 4059004 - DNA, 25 bp, Homo sapien
gctctaggctgtaattgggatgcaa

SEQ ID NO: 4059005 - DNA, 25 bp, Homo sapien
gcttcattacccaggcacgacggga

SEQ ID NO: 4059006 - DNA, 25 bp, Homo sapien
gagctggcggcgcttttaatcccga

SEQ ID NO: 4059007 - DNA, 25 bp, Homo sapien
taatcccgaaaagaggcgctcgggc

SEQ ID NO: 4059008 - DNA, 25 bp, Homo sapien
tgttctgaaataagacgcaatcggt

SEQ ID NO: 4059009 - DNA, 25 bp, Homo sapien
gcagagacttcgaatagagaccact

SEQ ID NO: 4059010 - DNA, 25 bp, Homo sapien
cacacacaccgagaagtggaatgca

SEQ ID NO: 4059011 - DNA, 25 bp, Homo sapien
tgcataggagcaacaataggaacct

SEQ ID NO: 4059012 - DNA, 25 bp, Homo sapien
taggagcggtacatcccactagagc

SEQ ID NO: 4059013 - DNA, 25 bp, Homo sapien
taaagactaggagcggtacatccca

SEQ ID NO: 4059014 - DNA, 25 bp, Homo sapien
agcggtacatcccactagagcccaa

SEQ ID NO: 4059015 - DNA, 25 bp, Homo sapien
agataaagactaggagcggtacatc

SEQ ID NO: 4059016 - DNA, 25 bp, Homo sapien
cagtccaaagggcaggtcagtgtaa

SEQ ID NO: 4059017 - DNA, 25 bp, Homo sapien
ggaaaattgttcagaccctcaggaa

SEQ ID NO: 4059018 - DNA, 25 bp, Homo sapien
ctgactgaaggaagactggtaaatt

SEQ ID NO: 4059019 - DNA, 25 bp, Homo sapien
tatataaaacggtgcggaggaagtc

SEQ ID NO: 4059020 - DNA, 25 bp, Homo sapien
tctctagctctcactcaaatggata

SEQ ID NO: 4059021 - DNA, 25 bp, Homo sapien
ggctaaagaggcaatgggccatctt

SEQ ID NO: 4059022 - DNA, 25 bp, Homo sapien
gggtcttaggagatctcacttggaa

SEQ ID NO: 4059023 - DNA, 25 bp, Homo sapien
tggaaaaagcctagctctgggccct

SEQ ID NO: 4059024 - DNA, 25 bp, Homo sapien
tcttcgttccgctaactccggctct

SEQ ID NO: 4059025 - DNA, 25 bp, Homo sapien
cggcagcctcgtccttttgtggtct

SEQ ID NO: 4059026 - DNA, 25 bp, Homo sapien
cgtgccccaggcttgcagcgcccgg

SEQ ID NO: 4059027 - DNA, 25 bp, Homo sapien
ttcttcgggctcctcggcagcgctc

SEQ ID NO: 4059028 - DNA, 25 bp, Homo sapien
tccatgcgcactgcgggtactgacc

SEQ ID NO: 4059029 - DNA, 25 bp, Homo sapien
cacttgcaggccctaaggtagggaa

SEQ ID NO: 4059030 - DNA, 25 bp, Homo sapien
ccaatattgaggtttggccacctga

SEQ ID NO: 4059031 - DNA, 25 bp, Homo sapien
ccacagctcccttgaaacaaagatg

SEQ ID NO: 4059032 - DNA, 25 bp, Homo sapien
tgaaaacctgcttgccgaggacgca

SEQ ID NO: 4059033 - DNA, 25 bp, Homo sapien
ggtgaagcgggattcgtctcccgcc

SEQ ID NO: 4059034 - DNA, 25 bp, Homo sapien
ccttgacttgtaagaatgcaattcc

SEQ ID NO: 4059035 - DNA, 25 bp, Homo sapien
gagaccaccttgtcgcagacgtgaa

SEQ ID NO: 4059036 - DNA, 25 bp, Homo sapien
ctgagttatgagcttactgctaatg

SEQ ID NO: 4059037 - DNA, 25 bp, Homo sapien
taatgagacctcttgtgatggcaca

SEQ ID NO: 4059038 - DNA, 25 bp, Homo sapien
caaagtgtgtcggtaggatgtgaca

SEQ ID NO: 4059039 - DNA, 25 bp, Homo sapien
tagagccatctaagtcagcataaca

SEQ ID NO: 4059040 - DNA, 25 bp, Homo sapien
gaagcctagaatataagaaaccacc

SEQ ID NO: 4059041 - DNA, 25 bp, Homo sapien
gaaaccacctaaatgaattctatct

SEQ ID NO: 4059042 - DNA, 25 bp, Homo sapien
cctctgcacggctgggatcacagct

SEQ ID NO: 4059043 - DNA, 25 bp, Homo sapien
cctgtacttaccatctccatgattg

SEQ ID NO: 4059044 - DNA, 25 bp, Homo sapien
ctgtgctggcgacacttctgcagag

SEQ ID NO: 4059045 - DNA, 25 bp, Homo sapien
aaggccagcacacactcctgtgctg

SEQ ID NO: 4059046 - DNA, 25 bp, Homo sapien
tcctgtgctggcgacacttctgcag

SEQ ID NO: 4059047 - DNA, 25 bp, Homo sapien
cctgtgctggcgacacttctgcaga

SEQ ID NO: 4059048 - DNA, 25 bp, Homo sapien
accttgcactgaaaggagcctgtca

SEQ ID NO: 4059049 - DNA, 25 bp, Homo sapien
caggaagtgacctcgtgagacaact

SEQ ID NO: 4059050 - DNA, 25 bp, Homo sapien
tccatccaaaccttgcactgaaagg

SEQ ID NO: 4059051 - DNA, 25 bp, Homo sapien
gaaaacggagtattgtttccatcca

SEQ ID NO: 4059052 - DNA, 25 bp, Homo sapien
ctctgtgtgcccttcctggaggtga

SEQ ID NO: 4059053 - DNA, 25 bp, Homo sapien
ccttttgctatttgacccctcccag

SEQ ID NO: 4059054 - DNA, 25 bp, Homo sapien
catcctttcaaacatctctctaaca

SEQ ID NO: 4059055 - DNA, 25 bp, Homo sapien
tatcccttcgtttatgctctgtgtg

SEQ ID NO: 4059056 - DNA, 25 bp, Homo sapien
gtctgaaagccacaggggacgaccc

SEQ ID NO: 4059057 - DNA, 25 bp, Homo sapien
gaaaaagtctggcagatgcagaacc

SEQ ID NO: 4059058 - DNA, 25 bp, Homo sapien
gacgaccctgaaaaagtctggcaga

SEQ ID NO: 4059059 - DNA, 25 bp, Homo sapien
caggggacgaccctgaaaaagtctg

SEQ ID NO: 4059060 - DNA, 25 bp, Homo sapien
cttttgggggttccagggctctcag

SEQ ID NO: 4059061 - DNA, 25 bp, Homo sapien
gagggcccctttcgctcagctcttt

SEQ ID NO: 4059062 - DNA, 25 bp, Homo sapien
gcccctttcgctcagctcttttggg

SEQ ID NO: 4059063 - DNA, 25 bp, Homo sapien
tccgtttgagggcccctttcgctca

SEQ ID NO: 4059064 - DNA, 25 bp, Homo sapien
ctcctgcaaacagacagcacggaga

SEQ ID NO: 4059065 - DNA, 25 bp, Homo sapien
aggatgagtgaactcggcctctccc

SEQ ID NO: 4059066 - DNA, 25 bp, Homo sapien
tctccccacagaatacagttcgcca

SEQ ID NO: 4059067 - DNA, 25 bp, Homo sapien
cagcacggagaaggatgagtgaact

SEQ ID NO: 4059068 - DNA, 25 bp, Homo sapien
atgttgcccacagcggcccaagtgc

SEQ ID NO: 4059069 - DNA, 25 bp, Homo sapien
tcgacaactggcatgttgcccacag

SEQ ID NO: 4059070 - DNA, 25 bp, Homo sapien
taatttaatgtattgctgctgaaac

SEQ ID NO: 4059071 - DNA, 25 bp, Homo sapien
tgctgaaacattaacctttcgacaa

SEQ ID NO: 4059072 - DNA, 25 bp, Homo sapien
gtttaacacacagagggtgccttga

SEQ ID NO: 4059073 - DNA, 25 bp, Homo sapien
tttaacacacagagggtgccttgaa

SEQ ID NO: 4059074 - DNA, 25 bp, Homo sapien
tcacattttttttttcatctgatct

SEQ ID NO: 4059075 - DNA, 25 bp, Homo sapien
cacattttttttttcatctgatcta

SEQ ID NO: 4059076 - DNA, 25 bp, Homo sapien
acattttttttttcatctgatctac

SEQ ID NO: 4059077 - DNA, 25 bp, Homo sapien
caccccctacattggacttgataaa

SEQ ID NO: 4059078 - DNA, 25 bp, Homo sapien
agcgtgggcacacgtggcaaagcca

SEQ ID NO: 4059079 - DNA, 25 bp, Homo sapien
ttggatgctctgtttgctagcttgg

SEQ ID NO: 4059080 - DNA, 25 bp, Homo sapien
tgcagtcatcctctggcattgccac

SEQ ID NO: 4059081 - DNA, 25 bp, Homo sapien
ggccttctcagtggaatccctttcc

SEQ ID NO: 4059082 - DNA, 25 bp, Homo sapien
ccttctcagtggaatccctttcctg

SEQ ID NO: 4059083 - DNA, 25 bp, Homo sapien
gggccttctcagtggaatccctttc

SEQ ID NO: 4059084 - DNA, 25 bp, Homo sapien
gccttctcagtggaatccctttcct

SEQ ID NO: 4059085 - DNA, 25 bp, Homo sapien
gcttcactttcgattcctctccaac

SEQ ID NO: 4059086 - DNA, 25 bp, Homo sapien
ctctgagtcccgcttgccttcttct

SEQ ID NO: 4059087 - DNA, 25 bp, Homo sapien
tctgatacaatctcctctgcttcac

SEQ ID NO: 4059088 - DNA, 25 bp, Homo sapien
cttggacaatctgatacaatctcct

SEQ ID NO: 4059089 - DNA, 25 bp, Homo sapien
ctcgagatgccaaatgctgccactt

SEQ ID NO: 4059090 - DNA, 25 bp, Homo sapien
ccagtatggaaatccagggtacaca

SEQ ID NO: 4059091 - DNA, 25 bp, Homo sapien
gccaaatgctgccacttccagtatg

SEQ ID NO: 4059092 - DNA, 25 bp, Homo sapien
tgctgccacttccagtatggaaatc

SEQ ID NO: 4059093 - DNA, 25 bp, Homo sapien
cctccttttctagaggtgctctaga

SEQ ID NO: 4059094 - DNA, 25 bp, Homo sapien
gagaacaggtttgcagttgtagaat

SEQ ID NO: 4059095 - DNA, 25 bp, Homo sapien
cgtcctctaccaagaatcgctttag

SEQ ID NO: 4059096 - DNA, 25 bp, Homo sapien
tagaatcttacactggtgggtctag

SEQ ID NO: 4059097 - DNA, 25 bp, Homo sapien
ggactgaagtactggatgtgtcaag

SEQ ID NO: 4059098 - DNA, 25 bp, Homo sapien
aagagacaagggcattgcgctgcta

SEQ ID NO: 4059099 - DNA, 25 bp, Homo sapien
aagcacaacaggacttggggactga

SEQ ID NO: 4059100 - DNA, 25 bp, Homo sapien
agagacaagggcattgcgctgctag

SEQ ID NO: 4059101 - DNA, 25 bp, Homo sapien
cagagggatggatggccgacacatt

SEQ ID NO: 4059102 - DNA, 25 bp, Homo sapien
tgcagtgcgtggatcttgactctcc

SEQ ID NO: 4059103 - DNA, 25 bp, Homo sapien
gcattttcaacgtcctgagtcctgg

SEQ ID NO: 4059104 - DNA, 25 bp, Homo sapien
gaaaggtctcctaggatctcaagca

SEQ ID NO: 4059105 - DNA, 25 bp, Homo sapien
taaaggctgccgataggaatgtgga

SEQ ID NO: 4059106 - DNA, 25 bp, Homo sapien
gaagaagggtctgatcgatgcaaac

SEQ ID NO: 4059107 - DNA, 25 bp, Homo sapien
gcagtcgtgcgtgagctgttacaca

SEQ ID NO: 4059108 - DNA, 25 bp, Homo sapien
tacacagcggttagtatcgatcaga

SEQ ID NO: 4059109 - DNA, 25 bp, Homo sapien
aaggaaacagccttcgctggtggca

SEQ ID NO: 4059110 - DNA, 25 bp, Homo sapien
tggtggcagccgtacagaggaaagc

SEQ ID NO: 4059111 - DNA, 25 bp, Homo sapien
gccgtacagaggaaagccgataaaa

SEQ ID NO: 4059112 - DNA, 25 bp, Homo sapien
ggaaacagccttcgctggtggcagc

SEQ ID NO: 4059113 - DNA, 25 bp, Homo sapien
ttccggaactgagacatcaagcgag

SEQ ID NO: 4059114 - DNA, 25 bp, Homo sapien
ttgaggacagccactgaccacggag

SEQ ID NO: 4059115 - DNA, 25 bp, Homo sapien
cagagccttcccaggtagtagctgg

SEQ ID NO: 4059116 - DNA, 25 bp, Homo sapien
agagccgggcatcgacaggcaagat

SEQ ID NO: 4059117 - DNA, 25 bp, Homo sapien
tgacactggcgtggagccagagact

SEQ ID NO: 4059118 - DNA, 25 bp, Homo sapien
caatgtctagctttgcactgaggca

SEQ ID NO: 4059119 - DNA, 25 bp, Homo sapien
catacactcttctccgagagggtct

SEQ ID NO: 4059120 - DNA, 25 bp, Homo sapien
gaggcagtaggcaacttgaggacaa

SEQ ID NO: 4059121 - DNA, 25 bp, Homo sapien
tggtggcgctggttctggagttaga

SEQ ID NO: 4059122 - DNA, 25 bp, Homo sapien
gagttagaccccctgggctccaatc

SEQ ID NO: 4059123 - DNA, 25 bp, Homo sapien
gcaactgccgctttgtgcctgagct

SEQ ID NO: 4059124 - DNA, 25 bp, Homo sapien
ctctatgcaactgccgctttgtgcc

SEQ ID NO: 4059125 - DNA, 25 bp, Homo sapien
cctttctttttctgcaccagattca

SEQ ID NO: 4059126 - DNA, 25 bp, Homo sapien
ccctttctttttctgcaccagattc

SEQ ID NO: 4059127 - DNA, 25 bp, Homo sapien
ctttctttttctgcaccagattcat

SEQ ID NO: 4059128 - DNA, 25 bp, Homo sapien
ctctctaattccggcaaagctggac

SEQ ID NO: 4059129 - DNA, 25 bp, Homo sapien
taattccggcaaagctggacaccat

SEQ ID NO: 4059130 - DNA, 25 bp, Homo sapien
tctaattccggcaaagctggacacc

SEQ ID NO: 4059131 - DNA, 25 bp, Homo sapien
ctctaattccggcaaagctggacac

SEQ ID NO: 4059132 - DNA, 25 bp, Homo sapien
ctaggctagacttctgggggttgta

SEQ ID NO: 4059133 - DNA, 25 bp, Homo sapien
cttctgggggttgtaacttatatct

SEQ ID NO: 4059134 - DNA, 25 bp, Homo sapien
ccaatagcgctaggctagacttctg

SEQ ID NO: 4059135 - DNA, 25 bp, Homo sapien
tctgggggttgtaacttatatcttc

SEQ ID NO: 4059136 - DNA, 25 bp, Homo sapien
tgggtagctgcggtgagttggctgc

SEQ ID NO: 4059137 - DNA, 25 bp, Homo sapien
tgccgagatgtagccctgaacctat

SEQ ID NO: 4059138 - DNA, 25 bp, Homo sapien
gagatgtagccctgaacctatccat

SEQ ID NO: 4059139 - DNA, 25 bp, Homo sapien
gagttggctgccgagatgtagccct

SEQ ID NO: 4059140 - DNA, 25 bp, Homo sapien
tgtattttgtaagccatattttgac

SEQ ID NO: 4059141 - DNA, 25 bp, Homo sapien
tattttgtaagccatattttgacac

SEQ ID NO: 4059142 - DNA, 25 bp, Homo sapien
tttgtattttgtaagccatattttg

SEQ ID NO: 4059143 - DNA, 25 bp, Homo sapien
tattttgtattttgtaagccatatt

SEQ ID NO: 4059144 - DNA, 25 bp, Homo sapien
tgacaacggctatccctgtgctgaa

SEQ ID NO: 4059145 - DNA, 25 bp, Homo sapien
ggctgctgatggacacgcttctgaa

SEQ ID NO: 4059146 - DNA, 25 bp, Homo sapien
agcagaactgtctggtgacaacggc

SEQ ID NO: 4059147 - DNA, 25 bp, Homo sapien
tttgccatcttaggttcaactcggg

SEQ ID NO: 4059148 - DNA, 25 bp, Homo sapien
tcctacgtgttgaggtctgacgaag

SEQ ID NO: 4059149 - DNA, 25 bp, Homo sapien
cacatttaggtctgtcctacgtgtt

SEQ ID NO: 4059150 - DNA, 25 bp, Homo sapien
tggagatctaatctgaattcctcta

SEQ ID NO: 4059151 - DNA, 25 bp, Homo sapien
tctgacgaagtagagttggagatct

SEQ ID NO: 4059152 - DNA, 25 bp, Homo sapien
gctctcaactttggatgtaagaatc

SEQ ID NO: 4059153 - DNA, 25 bp, Homo sapien
agggaacatggaagcctggatgttc

SEQ ID NO: 4059154 - DNA, 25 bp, Homo sapien
ctctcaactttggatgtaagaatca

SEQ ID NO: 4059155 - DNA, 25 bp, Homo sapien
aaaccacttgccaaaccagtgaaga

SEQ ID NO: 4059156 - DNA, 25 bp, Homo sapien
ctagttactctgatgcaggttattg

SEQ ID NO: 4059157 - DNA, 25 bp, Homo sapien
gaaatagtttgggtgttcactggcc

SEQ ID NO: 4059158 - DNA, 25 bp, Homo sapien
actctgatgcaggttattgttgaaa

SEQ ID NO: 4059159 - DNA, 25 bp, Homo sapien
cagctgggaagaagcggacagaaac

SEQ ID NO: 4059160 - DNA, 25 bp, Homo sapien
actcttgtgccttggatagtgcttg

SEQ ID NO: 4059161 - DNA, 25 bp, Homo sapien
ctcttgtgccttggatagtgcttgg

SEQ ID NO: 4059162 - DNA, 25 bp, Homo sapien
tcaggcaccgatcaaatgcatccac

SEQ ID NO: 4059163 - DNA, 25 bp, Homo sapien
tgtagggtcaggcaccgatcaaatg

SEQ ID NO: 4059164 - DNA, 25 bp, Homo sapien
ctgtgggcagtctcttcaggccttt

SEQ ID NO: 4059165 - DNA, 25 bp, Homo sapien
ggtgtgtgaggatggcgtaggccgt

SEQ ID NO: 4059166 - DNA, 25 bp, Homo sapien
tggcgtaggccgtgttcaagatggt

SEQ ID NO: 4059167 - DNA, 25 bp, Homo sapien
ctcctgtgggcagtctcttcaggcc

SEQ ID NO: 4059168 - DNA, 25 bp, Homo sapien
gggatcccggccaaaacacatatca

SEQ ID NO: 4059169 - DNA, 25 bp, Homo sapien
gaacaagaccggctgtatgccaagc

SEQ ID NO: 4059170 - DNA, 25 bp, Homo sapien
tgtggcctggcggtgtcaaatgtca

SEQ ID NO: 4059171 - DNA, 25 bp, Homo sapien
gaggtttctgtaagtagcccggaca

SEQ ID NO: 4059172 - DNA, 25 bp, Homo sapien
cgattttgcgagtccgaaggccaca

SEQ ID NO: 4059173 - DNA, 25 bp, Homo sapien
tttctgagatcttccgtgggcgacg

SEQ ID NO: 4059174 - DNA, 25 bp, Homo sapien
tgtatccatgcaactcagaggcggt

SEQ ID NO: 4059175 - DNA, 25 bp, Homo sapien
tctgcttgtgcctgaacgtgatgaa

SEQ ID NO: 4059176 - DNA, 25 bp, Homo sapien
tttcttctgctaataccagagccat

SEQ ID NO: 4059177 - DNA, 25 bp, Homo sapien
ctttcttctgctaataccagagcca

SEQ ID NO: 4059178 - DNA, 25 bp, Homo sapien
atggtgaatttgacttgcttcctct

SEQ ID NO: 4059179 - DNA, 25 bp, Homo sapien
ctgagatggtgaatttgacttgctt

SEQ ID NO: 4059180 - DNA, 25 bp, Homo sapien
gagatggtgaatttgacttgcttcc

SEQ ID NO: 4059181 - DNA, 25 bp, Homo sapien
gatggtgaatttgacttgcttcctc

SEQ ID NO: 4059182 - DNA, 25 bp, Homo sapien
tatttccgctattttgctactgttg

SEQ ID NO: 4059183 - DNA, 25 bp, Homo sapien
acttggtcctgcatgttgtagaata

SEQ ID NO: 4059184 - DNA, 25 bp, Homo sapien
aaagccctggcatctctgaaaatat

SEQ ID NO: 4059185 - DNA, 25 bp, Homo sapien
gtggctttgttgactggtgaccaaa

SEQ ID NO: 4059186 - DNA, 25 bp, Homo sapien
ctggtgaattcattttggaagtggc

SEQ ID NO: 4059187 - DNA, 25 bp, Homo sapien
taatggtgtgacttcgtattacaca

SEQ ID NO: 4059188 - DNA, 25 bp, Homo sapien
gcaggaagctgctgacatgtgtaat

SEQ ID NO: 4059189 - DNA, 25 bp, Homo sapien
tcgtattacacagctggtgaattca

SEQ ID NO: 4059190 - DNA, 25 bp, Homo sapien
ttcagagacaatacagagctgtatt

SEQ ID NO: 4059191 - DNA, 25 bp, Homo sapien
tctcacccacggctctttcagagac

SEQ ID NO: 4059192 - DNA, 25 bp, Homo sapien
ggtctggggtcaggtacctgcactg

SEQ ID NO: 4059193 - DNA, 25 bp, Homo sapien
cagtaagtctgatctctctctggtc

SEQ ID NO: 4059194 - DNA, 25 bp, Homo sapien
ccttctctctggaacgaccacctcc

SEQ ID NO: 4059195 - DNA, 25 bp, Homo sapien
tcatgtgatgcacttttcacatctc

SEQ ID NO: 4059196 - DNA, 25 bp, Homo sapien
tctggaacgaccacctcctttgctc

SEQ ID NO: 4059197 - DNA, 25 bp, Homo sapien
actccactgctcgttggccttcttt

SEQ ID NO: 4059198 - DNA, 25 bp, Homo sapien
cagccacaaatggttggttgatgag

SEQ ID NO: 4059199 - DNA, 25 bp, Homo sapien
agccacaaatggttggttgatgagg

SEQ ID NO: 4059200 - DNA, 25 bp, Homo sapien
catgaccgtccgatttgagttcaga

SEQ ID NO: 4059201 - DNA, 25 bp, Homo sapien
cctggagaagtggaacatgaccgtc

SEQ ID NO: 4059202 - DNA, 25 bp, Homo sapien
cgtatgcctcagcaacacctggaga

SEQ ID NO: 4059203 - DNA, 25 bp, Homo sapien
ttcaccaactcattaccagctgctg

SEQ ID NO: 4059204 - DNA, 25 bp, Homo sapien
taaggcaagttcgtgttcattgtcc

SEQ ID NO: 4059205 - DNA, 25 bp, Homo sapien
gcagctgagagggaacgctctatct

SEQ ID NO: 4059206 - DNA, 25 bp, Homo sapien
gttcattgtcctgcataccttttcc

SEQ ID NO: 4059207 - DNA, 25 bp, Homo sapien
tggaaaaccatcagcgcatagcagc

SEQ ID NO: 4059208 - DNA, 25 bp, Homo sapien
gtgctggcccgcagccaagacatgg

SEQ ID NO: 4059209 - DNA, 25 bp, Homo sapien
cctgtatttatgcaaattgcaaagt

SEQ ID NO: 4059210 - DNA, 25 bp, Homo sapien
aagacatggcgctgacgggagctcc

SEQ ID NO: 4059211 - DNA, 25 bp, Homo sapien
caaagtagcgtgtgataatgaaaac

SEQ ID NO: 4059212 - DNA, 25 bp, Homo sapien
gctcttgattcttcggggaaagcag

SEQ ID NO: 4059213 - DNA, 25 bp, Homo sapien
tggctcttgattcttcggggaaagc

SEQ ID NO: 4059214 - DNA, 25 bp, Homo sapien
ggctcttgattcttcggggaaagca

SEQ ID NO: 4059215 - DNA, 25 bp, Homo sapien
aatgagaatacaggaccccctcctc

SEQ ID NO: 4059216 - DNA, 25 bp, Homo sapien
gatccaaatgcggttctgcctcctc

SEQ ID NO: 4059217 - DNA, 25 bp, Homo sapien
ctccggccgtggagcactgcagtgt

SEQ ID NO: 4059218 - DNA, 25 bp, Homo sapien
acctcggagccagcgagacctggga

SEQ ID NO: 4059219 - DNA, 25 bp, Homo sapien
tggttcgcacgcattccggtacccg

SEQ ID NO: 4059220 - DNA, 25 bp, Homo sapien
gctctgggagtgcaaagtgactcac

SEQ ID NO: 4059221 - DNA, 25 bp, Homo sapien
gtgcaggacgcaatggactttgctc

SEQ ID NO: 4059222 - DNA, 25 bp, Homo sapien
actttgctctgggagtgcaaagtga

SEQ ID NO: 4059223 - DNA, 25 bp, Homo sapien
tgcaggacgcaatggactttgctct

SEQ ID NO: 4059224 - DNA, 25 bp, Homo sapien
cagtgaggtaaaacacgattacttc

SEQ ID NO: 4059225 - DNA, 25 bp, Homo sapien
gtatctcctacgtaagagctttggg

SEQ ID NO: 4059226 - DNA, 25 bp, Homo sapien
aagacagcggcagcagtgaggtaaa

SEQ ID NO: 4059227 - DNA, 25 bp, Homo sapien
acttccaactgccttgcggaggagg

SEQ ID NO: 4059228 - DNA, 25 bp, Homo sapien
tggcaaacgtgccaggcgatcgtct

SEQ ID NO: 4059229 - DNA, 25 bp, Homo sapien
ctgaaagacgctggaaaaaggaggt

SEQ ID NO: 4059230 - DNA, 25 bp, Homo sapien
gctgattctctgtttgtctgcagaa

SEQ ID NO: 4059231 - DNA, 25 bp, Homo sapien
cgatcgtctgccatttggacagcca

SEQ ID NO: 4059232 - DNA, 25 bp, Homo sapien
caggggtcataactcggaaatctcc

SEQ ID NO: 4059233 - DNA, 25 bp, Homo sapien
accaggggtcataactcggaaatct

SEQ ID NO: 4059234 - DNA, 25 bp, Homo sapien
tcataactcggaaatctccagggac

SEQ ID NO: 4059235 - DNA, 25 bp, Homo sapien
gggtcataactcggaaatctccagg

SEQ ID NO: 4059236 - DNA, 25 bp, Homo sapien
ttagtgactggaacctgtgatatca

SEQ ID NO: 4059237 - DNA, 25 bp, Homo sapien
gcctttgcacggacagcaaccagga

SEQ ID NO: 4059238 - DNA, 25 bp, Homo sapien
tatcaccaactatggcagcagggag

SEQ ID NO: 4059239 - DNA, 25 bp, Homo sapien
aggagagactgcctttgcacggaca

SEQ ID NO: 4059240 - DNA, 25 bp, Homo sapien
tgttgattccaagccgcagagttgt

SEQ ID NO: 4059241 - DNA, 25 bp, Homo sapien
ttcactagatgacagggcagttaca

SEQ ID NO: 4059242 - DNA, 25 bp, Homo sapien
caacaagggtggcactttggccaga

SEQ ID NO: 4059243 - DNA, 25 bp, Homo sapien
acatgtctgttgattccaagccgca

SEQ ID NO: 4059244 - DNA, 25 bp, Homo sapien
gctgactgcgctcctaaacagccag

SEQ ID NO: 4059245 - DNA, 25 bp, Homo sapien
caggtttggagctatgaacacaaga

SEQ ID NO: 4059246 - DNA, 25 bp, Homo sapien
caagactcaggatcagaagtctgtg

SEQ ID NO: 4059247 - DNA, 25 bp, Homo sapien
cagctgggtcatcgccagccatcga

SEQ ID NO: 4059248 - DNA, 25 bp, Homo sapien
atgaagatagcaaggactcaaagtt

SEQ ID NO: 4059249 - DNA, 25 bp, Homo sapien
taacaagcacaacgtctgggttccc

SEQ ID NO: 4059250 - DNA, 25 bp, Homo sapien
ctgttaacaagcacaacgtctgggt

SEQ ID NO: 4059251 - DNA, 25 bp, Homo sapien
tctccaaatcgagggtgaagatgaa

SEQ ID NO: 4059252 - DNA, 25 bp, Homo sapien
ttacactttcgtgacagcctcaggg

SEQ ID NO: 4059253 - DNA, 25 bp, Homo sapien
tatgatggaacagctaggtttcagc

SEQ ID NO: 4059254 - DNA, 25 bp, Homo sapien
gatacgtttgcctgggattagcgga

SEQ ID NO: 4059255 - DNA, 25 bp, Homo sapien
tcccttgggcctgtggaatacacat

SEQ ID NO: 4059256 - DNA, 25 bp, Homo sapien
tccttggtcagggataaccatggag

SEQ ID NO: 4059257 - DNA, 25 bp, Homo sapien
cagggataaccatggagacccaggg

SEQ ID NO: 4059258 - DNA, 25 bp, Homo sapien
ggtgcaacccgaaacactgcattct

SEQ ID NO: 4059259 - DNA, 25 bp, Homo sapien
gggttggtgcaacccgaaacactgc

SEQ ID NO: 4059260 - DNA, 25 bp, Homo sapien
gccacattgctgatggggcattgtc

SEQ ID NO: 4059261 - DNA, 25 bp, Homo sapien
cacattgctgatggggcattgtctc

SEQ ID NO: 4059262 - DNA, 25 bp, Homo sapien
ccctccaccgaactgccttccttct

SEQ ID NO: 4059263 - DNA, 25 bp, Homo sapien
ggtccaccctatgccatgcttcctg

SEQ ID NO: 4059264 - DNA, 25 bp, Homo sapien
tgggctaagtcaaactgtgacgtcc

SEQ ID NO: 4059265 - DNA, 25 bp, Homo sapien
tgaggcaaacattccatcatatggg

SEQ ID NO: 4059266 - DNA, 25 bp, Homo sapien
gctttcatattctcacaagggaacc

SEQ ID NO: 4059267 - DNA, 25 bp, Homo sapien
tctccccattagaacaggtcagaca

SEQ ID NO: 4059268 - DNA, 25 bp, Homo sapien
tgaaggatcatgtaaatcccacatt

SEQ ID NO: 4059269 - DNA, 25 bp, Homo sapien
tacgtgtgaaggatcatgtaaatcc

SEQ ID NO: 4059270 - DNA, 25 bp, Homo sapien
ctccagagatacgtgtgaaggatca

SEQ ID NO: 4059271 - DNA, 25 bp, Homo sapien
ttatacgccagtcctccagagatac

SEQ ID NO: 4059272 - DNA, 25 bp, Homo sapien
ctggaaaagttattctcgctgtaaa

SEQ ID NO: 4059273 - DNA, 25 bp, Homo sapien
cacaaagctcagtattgaaactctg

SEQ ID NO: 4059274 - DNA, 25 bp, Homo sapien
tccttggctttctaagtcaatatgc

SEQ ID NO: 4059275 - DNA, 25 bp, Homo sapien
gattcaacgctcactagaaaacctt

SEQ ID NO: 4059276 - DNA, 25 bp, Homo sapien
ttaaaatccctgacagggcccaaca

SEQ ID NO: 4059277 - DNA, 25 bp, Homo sapien
aaatccctgacagggcccaacactg

SEQ ID NO: 4059278 - DNA, 25 bp, Homo sapien
gaagcaggggttaaccactgagata

SEQ ID NO: 4059279 - DNA, 25 bp, Homo sapien
ggaagcaggggttaaccactgagat

SEQ ID NO: 4059280 - DNA, 25 bp, Homo sapien
tgagtctctggaaaagtaatgatca

SEQ ID NO: 4059281 - DNA, 25 bp, Homo sapien
taaatcttgatgaggggcaggcctg

SEQ ID NO: 4059282 - DNA, 25 bp, Homo sapien
aagtaatgatcatgaggaagaggca

SEQ ID NO: 4059283 - DNA, 25 bp, Homo sapien
tcacctaatgaatgtggcgatataa

SEQ ID NO: 4059284 - DNA, 25 bp, Homo sapien
gataagatcggcctgcattgctgtg

SEQ ID NO: 4059285 - DNA, 25 bp, Homo sapien
gaaggagactgatgttggagagctg

SEQ ID NO: 4059286 - DNA, 25 bp, Homo sapien
ctgttccgaaagctgtgacattggg

SEQ ID NO: 4059287 - DNA, 25 bp, Homo sapien
gctgtgtcagatgggtggaccctcc

SEQ ID NO: 4059288 - DNA, 25 bp, Homo sapien
tcttacggcttcaatctgatccggc

SEQ ID NO: 4059289 - DNA, 25 bp, Homo sapien
agcccctacctctgcaaagaagcgg

SEQ ID NO: 4059290 - DNA, 25 bp, Homo sapien
cagtgtgcataagcctttcttacgg

SEQ ID NO: 4059291 - DNA, 25 bp, Homo sapien
tcattccaggtagtgttgaccagga

SEQ ID NO: 4059292 - DNA, 25 bp, Homo sapien
aatactgcggcttccaccagtcacg

SEQ ID NO: 4059293 - DNA, 25 bp, Homo sapien
ccctaacaggtttatgaactagaga

SEQ ID NO: 4059294 - DNA, 25 bp, Homo sapien
tcatgactccgaataccctaacagg

SEQ ID NO: 4059295 - DNA, 25 bp, Homo sapien
cagtcacgctgagggattagttgtc

SEQ ID NO: 4059296 - DNA, 25 bp, Homo sapien
tggaagagaggaattcagtgccctt

SEQ ID NO: 4059297 - DNA, 25 bp, Homo sapien
tggtcctgcatagatgtcactgatt

SEQ ID NO: 4059298 - DNA, 25 bp, Homo sapien
tgtgagtcggaatttgtgcctccaa

SEQ ID NO: 4059299 - DNA, 25 bp, Homo sapien
gtctcagcctcacggagcttgcaga

SEQ ID NO: 4059300 - DNA, 25 bp, Homo sapien
catcattatgaaggagagcaacaga

SEQ ID NO: 4059301 - DNA, 25 bp, Homo sapien
gtcattgccctggtaagataccggg

SEQ ID NO: 4059302 - DNA, 25 bp, Homo sapien
aacatcagttaggtggtcattgccc

SEQ ID NO: 4059303 - DNA, 25 bp, Homo sapien
gacggtggattcagaaatagcccag

SEQ ID NO: 4059304 - DNA, 25 bp, Homo sapien
tttctaacttgccagctatatccat

SEQ ID NO: 4059305 - DNA, 25 bp, Homo sapien
catttctaacttgccagctatatcc

SEQ ID NO: 4059306 - DNA, 25 bp, Homo sapien
atttctaacttgccagctatatcca

SEQ ID NO: 4059307 - DNA, 25 bp, Homo sapien
gcatttctaacttgccagctatatc

SEQ ID NO: 4059308 - DNA, 25 bp, Homo sapien
cacttcagactccatagcggtatta

SEQ ID NO: 4059309 - DNA, 25 bp, Homo sapien
cacagcagacctaggaggtagtatg

SEQ ID NO: 4059310 - DNA, 25 bp, Homo sapien
acttcagtcagccacggtagctcac

SEQ ID NO: 4059311 - DNA, 25 bp, Homo sapien
tacacagcccacactatgtgtcagg

SEQ ID NO: 4059312 - DNA, 25 bp, Homo sapien
tttcttccagccattctcggcccga

SEQ ID NO: 4059313 - DNA, 25 bp, Homo sapien
acctttaatctcacgacacagcttc

SEQ ID NO: 4059314 - DNA, 25 bp, Homo sapien
tgtccaggtacagaattagagtcac

SEQ ID NO: 4059315 - DNA, 25 bp, Homo sapien
tagagtcacctttaatctcacgaca

SEQ ID NO: 4059316 - DNA, 25 bp, Homo sapien
gagtgaactcggttgcattaaggaa

SEQ ID NO: 4059317 - DNA, 25 bp, Homo sapien
actggcatccagtacaaatgaggga

SEQ ID NO: 4059318 - DNA, 25 bp, Homo sapien
gctaaagcgagtctttatctccaga

SEQ ID NO: 4059319 - DNA, 25 bp, Homo sapien
gagagctggacagagactggcatcc

SEQ ID NO: 4059320 - DNA, 25 bp, Homo sapien
gatgtctgaggccccgaaatcccca

SEQ ID NO: 4059321 - DNA, 25 bp, Homo sapien
agcaagcactgctgtggcacacatg

SEQ ID NO: 4059322 - DNA, 25 bp, Homo sapien
tcatcccattgaaggctcccagtgg

SEQ ID NO: 4059323 - DNA, 25 bp, Homo sapien
taaaccatctgtgggatgtctgagg

SEQ ID NO: 4059324 - DNA, 25 bp, Homo sapien
gatgagcttgggactgtgatagttt

SEQ ID NO: 4059325 - DNA, 25 bp, Homo sapien
cttcacaccggcaaatgtctcttga

SEQ ID NO: 4059326 - DNA, 25 bp, Homo sapien
gaagatgagcttgggactgtgatag

SEQ ID NO: 4059327 - DNA, 25 bp, Homo sapien
gtgaagccttcacaccggcaaatgt

SEQ ID NO: 4059328 - DNA, 25 bp, Homo sapien
ccttctttgtgccaatgctgcagat

SEQ ID NO: 4059329 - DNA, 25 bp, Homo sapien
tgtctggtgccaacagagggatctg

SEQ ID NO: 4059330 - DNA, 25 bp, Homo sapien
ttctttgtgccaatgctgcagatgt

SEQ ID NO: 4059331 - DNA, 25 bp, Homo sapien
ggtgccaacagagggatctgacccc

SEQ ID NO: 4059332 - DNA, 25 bp, Homo sapien
cccagaggcagatgaaatcagccag

SEQ ID NO: 4059333 - DNA, 25 bp, Homo sapien
ctgcataatgaaggcatgggggcgt

SEQ ID NO: 4059334 - DNA, 25 bp, Homo sapien
cagaggcagatgaaatcagccagaa

SEQ ID NO: 4059335 - DNA, 25 bp, Homo sapien
gaggcagatgaaatcagccagaaag

SEQ ID NO: 4059336 - DNA, 25 bp, Homo sapien
cgagtgtatggtagaggccatggga

SEQ ID NO: 4059337 - DNA, 25 bp, Homo sapien
tgtatggtagaggccatgggattat

SEQ ID NO: 4059338 - DNA, 25 bp, Homo sapien
gcccgagtgtatggtagaggccatg

SEQ ID NO: 4059339 - DNA, 25 bp, Homo sapien
cttgggcccgagtgtatggtagagg

SEQ ID NO: 4059340 - DNA, 25 bp, Homo sapien
ccatattatgacatcttagatagct

SEQ ID NO: 4059341 - DNA, 25 bp, Homo sapien
tgccaaacgcatcaaagtccatatt

SEQ ID NO: 4059342 - DNA, 25 bp, Homo sapien
tagctctccacacatatttgtggtt

SEQ ID NO: 4059343 - DNA, 25 bp, Homo sapien
tggaggcgatgccatcgatttcttt

SEQ ID NO: 4059344 - DNA, 25 bp, Homo sapien
ttttaactatgctggcttctactgc

SEQ ID NO: 4059345 - DNA, 25 bp, Homo sapien
cctcttatgcacgtagaacagggag

SEQ ID NO: 4059346 - DNA, 25 bp, Homo sapien
aacagggagaagcaatctatggcat

SEQ ID NO: 4059347 - DNA, 25 bp, Homo sapien
gctctacattcctcttatgcacgta

SEQ ID NO: 4059348 - DNA, 25 bp, Homo sapien
atgtccagatgcctcgaccggcgga

SEQ ID NO: 4059349 - DNA, 25 bp, Homo sapien
cagatgcctcgaccggcggagccag

SEQ ID NO: 4059350 - DNA, 25 bp, Homo sapien
agccagatcctcattggcatgccag

SEQ ID NO: 4059351 - DNA, 25 bp, Homo sapien
tcgaccggcggagccagatcctcat

SEQ ID NO: 4059352 - DNA, 25 bp, Homo sapien
gcccaggagttaacgtgagccatga

SEQ ID NO: 4059353 - DNA, 25 bp, Homo sapien
caaataagaagtgcccatggatgct

SEQ ID NO: 4059354 - DNA, 25 bp, Homo sapien
gaaagggctcctgttgtccaactct

SEQ ID NO: 4059355 - DNA, 25 bp, Homo sapien
caactctgggacaatttgggtatca

SEQ ID NO: 4059356 - DNA, 25 bp, Homo sapien
caatatgacgttgatctgtgagtga

SEQ ID NO: 4059357 - DNA, 25 bp, Homo sapien
tcaatatgacgttgatctgtgagtg

SEQ ID NO: 4059358 - DNA, 25 bp, Homo sapien
tgcttggtggtgctcggtgacacca

SEQ ID NO: 4059359 - DNA, 25 bp, Homo sapien
tggtgcttggtggtgctcggtgaca

SEQ ID NO: 4059360 - DNA, 25 bp, Homo sapien
ggtggtgctcggtgacaccagccca

SEQ ID NO: 4059361 - DNA, 25 bp, Homo sapien
ctgtggtgcttggtggtgctcggtg

SEQ ID NO: 4059362 - DNA, 25 bp, Homo sapien
cagctttgttgggatacccagtcgt

SEQ ID NO: 4059363 - DNA, 25 bp, Homo sapien
taacaggtattcctgcagcccacaa

SEQ ID NO: 4059364 - DNA, 25 bp, Homo sapien
tgttcctcacccataacctccttgc

SEQ ID NO: 4059365 - DNA, 25 bp, Homo sapien
cctggatgccccgtaacaggtattc

SEQ ID NO: 4059366 - DNA, 25 bp, Homo sapien
cacccggagagctttgtcgttgact

SEQ ID NO: 4059367 - DNA, 25 bp, Homo sapien
tccacgggcgtttctactgatgggc

SEQ ID NO: 4059368 - DNA, 25 bp, Homo sapien
gatggactgatcttcgcaggtgtta

SEQ ID NO: 4059369 - DNA, 25 bp, Homo sapien
gactctggcgttcagaggatggact

SEQ ID NO: 4059370 - DNA, 25 bp, Homo sapien
ggtgtagaggcaaattcagcctgcc

SEQ ID NO: 4059371 - DNA, 25 bp, Homo sapien
aagataggtgtagaggcaaattcag

SEQ ID NO: 4059372 - DNA, 25 bp, Homo sapien
gataggtgtagaggcaaattcagcc

SEQ ID NO: 4059373 - DNA, 25 bp, Homo sapien
tagaggcaaattcagcctgccagaa

SEQ ID NO: 4059374 - DNA, 25 bp, Homo sapien
tcagctgtcaaagcaaatggatatg

SEQ ID NO: 4059375 - DNA, 25 bp, Homo sapien
gcctcattagaaaatgcggccgctc

SEQ ID NO: 4059376 - DNA, 25 bp, Homo sapien
tcttgcagtctaattggctgacagg

SEQ ID NO: 4059377 - DNA, 25 bp, Homo sapien
acggccctacttttatcacagtgaa

SEQ ID NO: 4059378 - DNA, 25 bp, Homo sapien
tggaggtgtcagcatccgatgacct

SEQ ID NO: 4059379 - DNA, 25 bp, Homo sapien
ttccccgcataagaaagggaagtga

SEQ ID NO: 4059380 - DNA, 25 bp, Homo sapien
tgacttgaaaaatggaggtgtcagc

SEQ ID NO: 4059381 - DNA, 25 bp, Homo sapien
ggaagtgacactggtggcatttggc

SEQ ID NO: 4059382 - DNA, 25 bp, Homo sapien
ggctttccgaacaaacacactggtc

SEQ ID NO: 4059383 - DNA, 25 bp, Homo sapien
tgattttcaacaggccgtattggtc

SEQ ID NO: 4059384 - DNA, 25 bp, Homo sapien
gcctgctgcctaatatactcctgaa

SEQ ID NO: 4059385 - DNA, 25 bp, Homo sapien
aagtgtcaaccccaatccgggagag

SEQ ID NO: 4059386 - DNA, 25 bp, Homo sapien
atggcctctggaccacgtgcatttg

SEQ ID NO: 4059387 - DNA, 25 bp, Homo sapien
tggaccacgtgcatttgacctcctc

SEQ ID NO: 4059388 - DNA, 25 bp, Homo sapien
ttcccgctttcagtgtgcacagctg

SEQ ID NO: 4059389 - DNA, 25 bp, Homo sapien
gaggccaagaattttcccgctttca

SEQ ID NO: 4059390 - DNA, 25 bp, Homo sapien
gagacagcgacctcatccacccttc

SEQ ID NO: 4059391 - DNA, 25 bp, Homo sapien
ggcagccagagacagcgacctcatc

SEQ ID NO: 4059392 - DNA, 25 bp, Homo sapien
cagccagagacagcgacctcatcca

SEQ ID NO: 4059393 - DNA, 25 bp, Homo sapien
cagagacagcgacctcatccaccct

SEQ ID NO: 4059394 - DNA, 25 bp, Homo sapien
tagggtcaggttctggctgcgtttt

SEQ ID NO: 4059395 - DNA, 25 bp, Homo sapien
agggtcaggttctggctgcgttttt

SEQ ID NO: 4059396 - DNA, 25 bp, Homo sapien
gaatagggtcaggttctggctgcgt

SEQ ID NO: 4059397 - DNA, 25 bp, Homo sapien
aatagggtcaggttctggctgcgtt

SEQ ID NO: 4059398 - DNA, 25 bp, Homo sapien
tgaatagggacactaaagagcaggg

SEQ ID NO: 4059399 - DNA, 25 bp, Homo sapien
catcgtcatgtacaggaaatgactc

SEQ ID NO: 4059400 - DNA, 25 bp, Homo sapien
ggtctgcttcatccaatcctcaaca

SEQ ID NO: 4059401 - DNA, 25 bp, Homo sapien
caggagctgggatggtctgcttcat

SEQ ID NO: 4059402 - DNA, 25 bp, Homo sapien
tcttccgggtcactctgtcagactc

SEQ ID NO: 4059403 - DNA, 25 bp, Homo sapien
gcaggaatttttagggcgtgagaat

SEQ ID NO: 4059404 - DNA, 25 bp, Homo sapien
aatttgaaccgtggcctgtgtcggg

SEQ ID NO: 4059405 - DNA, 25 bp, Homo sapien
tagtttgagtggattcctcttccgg

SEQ ID NO: 4059406 - DNA, 25 bp, Homo sapien
aggattggggaactctgtggctaac

SEQ ID NO: 4059407 - DNA, 25 bp, Homo sapien
gctaactcagtatttgcgaaaagtg

SEQ ID NO: 4059408 - DNA, 25 bp, Homo sapien
tgtggctaactcagtatttgcgaaa

SEQ ID NO: 4059409 - DNA, 25 bp, Homo sapien
attggggaactctgtggctaactca

SEQ ID NO: 4059410 - DNA, 25 bp, Homo sapien
actgagacgatgtttgtgaagtgcc

SEQ ID NO: 4059411 - DNA, 25 bp, Homo sapien
ccacatgtttcgagaagagaggcat

SEQ ID NO: 4059412 - DNA, 25 bp, Homo sapien
ctctgtggagagacctccggtactt

SEQ ID NO: 4059413 - DNA, 25 bp, Homo sapien
tgtgatgattactgagcctctgtgg

SEQ ID NO: 4059414 - DNA, 25 bp, Homo sapien
tttctctttttccagtcatctcaga

SEQ ID NO: 4059415 - DNA, 25 bp, Homo sapien
gccacaggtctgtccttcactttct

SEQ ID NO: 4059416 - DNA, 25 bp, Homo sapien
tctctttttccagtcatctcagaca

SEQ ID NO: 4059417 - DNA, 25 bp, Homo sapien
tggccacaggtctgtccttcacttt

SEQ ID NO: 4059418 - DNA, 25 bp, Homo sapien
tggcccatgattttgaggaaggaca

SEQ ID NO: 4059419 - DNA, 25 bp, Homo sapien
caggaccttggatgattccggtgac

SEQ ID NO: 4059420 - DNA, 25 bp, Homo sapien
gacaacttgctcctctaggtaaaag

SEQ ID NO: 4059421 - DNA, 25 bp, Homo sapien
gctcagaataaccatggccaagatg

SEQ ID NO: 4059422 - DNA, 25 bp, Homo sapien
aacggggatggaatgcagcatgcac

SEQ ID NO: 4059423 - DNA, 25 bp, Homo sapien
gcacggggtaaactgggatgcggca

SEQ ID NO: 4059424 - DNA, 25 bp, Homo sapien
tgcactcttgggatgagaacgggga

SEQ ID NO: 4059425 - DNA, 25 bp, Homo sapien
cagatttgccagatcctccagccct

SEQ ID NO: 4059426 - DNA, 25 bp, Homo sapien
gatggaatgtggcagtcgtgaggag

SEQ ID NO: 4059427 - DNA, 25 bp, Homo sapien
gttgagaggcggatggaatgtggca

SEQ ID NO: 4059428 - DNA, 25 bp, Homo sapien
catcttctgtgtcaatggacgacat

SEQ ID NO: 4059429 - DNA, 25 bp, Homo sapien
tttccaggaggcgtggttgagaggc

SEQ ID NO: 4059430 - DNA, 25 bp, Homo sapien
ttgaccaacttggtctgctctctgt

SEQ ID NO: 4059431 - DNA, 25 bp, Homo sapien
gaccaacttggtctgctctctgttc

SEQ ID NO: 4059432 - DNA, 25 bp, Homo sapien
cttccaccataaccctcgtccttga

SEQ ID NO: 4059433 - DNA, 25 bp, Homo sapien
caccataaccctcgtccttgaccaa

SEQ ID NO: 4059434 - DNA, 25 bp, Homo sapien
cagagcctccgctttttcaaatgta

SEQ ID NO: 4059435 - DNA, 25 bp, Homo sapien
aaaaatgaaagaacgcacacagacg

SEQ ID NO: 4059436 - DNA, 25 bp, Homo sapien
cgtgcagagcctccgctttttcaaa

SEQ ID NO: 4059437 - DNA, 25 bp, Homo sapien
acgcacacagacgagagctgccggg

SEQ ID NO: 4059438 - DNA, 25 bp, Homo sapien
gaggcctctctgtttcccgaaatcc

SEQ ID NO: 4059439 - DNA, 25 bp, Homo sapien
agctcttgcggctcatctttgtgga

SEQ ID NO: 4059440 - DNA, 25 bp, Homo sapien
cgaaatcccttgtggagcaagcaca

SEQ ID NO: 4059441 - DNA, 25 bp, Homo sapien
agagggaccccgcatccagcaacag

SEQ ID NO: 4059442 - DNA, 25 bp, Homo sapien
tgataggagcctagcagcatacaca

SEQ ID NO: 4059443 - DNA, 25 bp, Homo sapien
agagactggaacattcctgtttagt

SEQ ID NO: 4059444 - DNA, 25 bp, Homo sapien
gcatacacagcatacaccaaggaag

SEQ ID NO: 4059445 - DNA, 25 bp, Homo sapien
gataggagcctagcagcatacacag

SEQ ID NO: 4059446 - DNA, 25 bp, Homo sapien
aggagcatgaataaacggctgcctg

SEQ ID NO: 4059447 - DNA, 25 bp, Homo sapien
tgtggctgagcaattagggccatga

SEQ ID NO: 4059448 - DNA, 25 bp, Homo sapien
gcaattagggccatgaacactcctg

SEQ ID NO: 4059449 - DNA, 25 bp, Homo sapien
gagcatgaataaacggctgcctgtc

SEQ ID NO: 4059450 - DNA, 25 bp, Homo sapien
tgctatcacttataggccctggcag

SEQ ID NO: 4059451 - DNA, 25 bp, Homo sapien
ttgaccatcaccaaggctgctatca

SEQ ID NO: 4059452 - DNA, 25 bp, Homo sapien
tgtcaaaacagtcccgcagtttcaa

SEQ ID NO: 4059453 - DNA, 25 bp, Homo sapien
aaccagctcatgtcaaaacagtccc

SEQ ID NO: 4059454 - DNA, 25 bp, Homo sapien
tgcacttgagaagcaatgcggcagg

SEQ ID NO: 4059455 - DNA, 25 bp, Homo sapien
tgcggcaggctattcttgccctctc

SEQ ID NO: 4059456 - DNA, 25 bp, Homo sapien
tctatgtgtatccaggcctgtgtgg

SEQ ID NO: 4059457 - DNA, 25 bp, Homo sapien
acaggtcttcttggatgcttgagga

SEQ ID NO: 4059458 - DNA, 25 bp, Homo sapien
ccacgggtaagttgccaggggattg

SEQ ID NO: 4059459 - DNA, 25 bp, Homo sapien
gttgccaggggattggaggctccat

SEQ ID NO: 4059460 - DNA, 25 bp, Homo sapien
aagttgccaggggattggaggctcc

SEQ ID NO: 4059461 - DNA, 25 bp, Homo sapien
ggtaagttgccaggggattggaggc

SEQ ID NO: 4059462 - DNA, 25 bp, Homo sapien
tccgatgcaccaatctgagtaactg

SEQ ID NO: 4059463 - DNA, 25 bp, Homo sapien
tcctcctgagagtcgaagacttcct

SEQ ID NO: 4059464 - DNA, 25 bp, Homo sapien
tggttgcatcagacaccaatctggc

SEQ ID NO: 4059465 - DNA, 25 bp, Homo sapien
tctgtgacaaccagccaatccgatg

SEQ ID NO: 4059466 - DNA, 25 bp, Homo sapien
ctggcccgcacagactatggccacg

SEQ ID NO: 4059467 - DNA, 25 bp, Homo sapien
tatggccacggcgtcttagaggttt

SEQ ID NO: 4059468 - DNA, 25 bp, Homo sapien
tacatcacgacgacagaaagctggc

SEQ ID NO: 4059469 - DNA, 25 bp, Homo sapien
tctgcaggcgtccagtgctctgttt

SEQ ID NO: 4059470 - DNA, 25 bp, Homo sapien
ctttccccctcgagtccctgttgtg

SEQ ID NO: 4059471 - DNA, 25 bp, Homo sapien
tccccctcgagtccctgttgtgctt

SEQ ID NO: 4059472 - DNA, 25 bp, Homo sapien
tgcggtgttagcatagcctttcccc

SEQ ID NO: 4059473 - DNA, 25 bp, Homo sapien
gtgcggtgttagcatagcctttccc

SEQ ID NO: 4059474 - DNA, 25 bp, Homo sapien
cttcgccgtcttccaatcttgcata

SEQ ID NO: 4059475 - DNA, 25 bp, Homo sapien
tcatcttcgccgtcttccaatcttg

SEQ ID NO: 4059476 - DNA, 25 bp, Homo sapien
tgcaagatggaatgggactcccccg

SEQ ID NO: 4059477 - DNA, 25 bp, Homo sapien
gcatcccgggctacattttcatctt

SEQ ID NO: 4059478 - DNA, 25 bp, Homo sapien
ctaagaaacccgtaaggagctgcag

SEQ ID NO: 4059479 - DNA, 25 bp, Homo sapien
tgcctgtgtccctggttaggggcaa

SEQ ID NO: 4059480 - DNA, 25 bp, Homo sapien
taaaaaagggataacgctgaggagc

SEQ ID NO: 4059481 - DNA, 25 bp, Homo sapien
ccgggttggtggctcttggtcatct

SEQ ID NO: 4059482 - DNA, 25 bp, Homo sapien
ggagctggcggttcacctttgctct

SEQ ID NO: 4059483 - DNA, 25 bp, Homo sapien
cttgtgttcttccgcagagggcaca

SEQ ID NO: 4059484 - DNA, 25 bp, Homo sapien
ttcttccgcagagggcacactgtct

SEQ ID NO: 4059485 - DNA, 25 bp, Homo sapien
cttccgcagagggcacactgtcttt

SEQ ID NO: 4059486 - DNA, 25 bp, Homo sapien
tgtgttcttccgcagagggcacact

SEQ ID NO: 4059487 - DNA, 25 bp, Homo sapien
ctgccccggaagccatccccgtcac

SEQ ID NO: 4059488 - DNA, 25 bp, Homo sapien
tccgagtaattctgggtcacttcca

SEQ ID NO: 4059489 - DNA, 25 bp, Homo sapien
ggtctgtctggctccggtacaggaa

SEQ ID NO: 4059490 - DNA, 25 bp, Homo sapien
ctccgagtaattctgggtcacttcc

SEQ ID NO: 4059491 - DNA, 25 bp, Homo sapien
ctgtctggctccggtacaggaaggc

SEQ ID NO: 4059492 - DNA, 25 bp, Homo sapien
ttttgcataaaattccgtccccagc

SEQ ID NO: 4059493 - DNA, 25 bp, Homo sapien
ccatcatctatctttccctgggaat

SEQ ID NO: 4059494 - DNA, 25 bp, Homo sapien
aatgtcggtggccattctgagctgg

SEQ ID NO: 4059495 - DNA, 25 bp, Homo sapien
tccgtccccagccacctaatgagaa

SEQ ID NO: 4059496 - DNA, 25 bp, Homo sapien
ggttcgttaagtgactggccctcca

SEQ ID NO: 4059497 - DNA, 25 bp, Homo sapien
gagtgaaacaccgagggctgcgatt

SEQ ID NO: 4059498 - DNA, 25 bp, Homo sapien
gggtccaatttatatccgttgcagt

SEQ ID NO: 4059499 - DNA, 25 bp, Homo sapien
ctggctgattggaactgagtaagga

SEQ ID NO: 4059500 - DNA, 25 bp, Homo sapien
cacagtgtgcacctttagggcctgc

SEQ ID NO: 4059501 - DNA, 25 bp, Homo sapien
gctccaggctcaacaattcgtatgg

SEQ ID NO: 4059502 - DNA, 25 bp, Homo sapien
caacaattcgtatggaatgctataa

SEQ ID NO: 4059503 - DNA, 25 bp, Homo sapien
ccattttggcagatactgacagctt

SEQ ID NO: 4059504 - DNA, 25 bp, Homo sapien
aacttggaatcccaacagctggaag

SEQ ID NO: 4059505 - DNA, 25 bp, Homo sapien
gcaacttggaatcccaacagctgga

SEQ ID NO: 4059506 - DNA, 25 bp, Homo sapien
tccatatgtgtcaattgtctggaag

SEQ ID NO: 4059507 - DNA, 25 bp, Homo sapien
agctggaagtgctgcagttccatat

SEQ ID NO: 4059508 - DNA, 25 bp, Homo sapien
caggacagcggtggcctggacattt

SEQ ID NO: 4059509 - DNA, 25 bp, Homo sapien
gccctctaggcttgaagtcaggaca

SEQ ID NO: 4059510 - DNA, 25 bp, Homo sapien
tcattggccagatgctgctgtgtgc

SEQ ID NO: 4059511 - DNA, 25 bp, Homo sapien
tggaaatccgttcccagctagctga

SEQ ID NO: 4059512 - DNA, 25 bp, Homo sapien
cagatggtggaaacacacactatgg

SEQ ID NO: 4059513 - DNA, 25 bp, Homo sapien
gacttcatcccaaatggagctgctt

SEQ ID NO: 4059514 - DNA, 25 bp, Homo sapien
cacactatggattcttcaatctggg

SEQ ID NO: 4059515 - DNA, 25 bp, Homo sapien
ggccaggcaaagataaaagacttca

SEQ ID NO: 4059516 - DNA, 25 bp, Homo sapien
tattaatgtcagtatccccagtgct

SEQ ID NO: 4059517 - DNA, 25 bp, Homo sapien
agtattattaatgtcagtatcccca

SEQ ID NO: 4059518 - DNA, 25 bp, Homo sapien
attattaatgtcagtatccccagtg

SEQ ID NO: 4059519 - DNA, 25 bp, Homo sapien
cttagcattccctccaatgtatttc

SEQ ID NO: 4059520 - DNA, 25 bp, Homo sapien
gtttggtgacgccagttgcagattc

SEQ ID NO: 4059521 - DNA, 25 bp, Homo sapien
tgaattcccctgtctgtcccgtcac

SEQ ID NO: 4059522 - DNA, 25 bp, Homo sapien
gtcaccgccccatgttcgttcatct

SEQ ID NO: 4059523 - DNA, 25 bp, Homo sapien
ttcatctcactgttgggcagtttgg

SEQ ID NO: 4059524 - DNA, 25 bp, Homo sapien
tgccactgagtattactatcactcc

SEQ ID NO: 4059525 - DNA, 25 bp, Homo sapien
tccgtggagtagagcatctaggcag

SEQ ID NO: 4059526 - DNA, 25 bp, Homo sapien
agctcaaggtcctccgtggagtaga

SEQ ID NO: 4059527 - DNA, 25 bp, Homo sapien
tatcactccagacagcggcatgtcc

SEQ ID NO: 4059528 - DNA, 25 bp, Homo sapien
tatatgcacgcagcctgtacactgg

SEQ ID NO: 4059529 - DNA, 25 bp, Homo sapien
tcttgcaggtagacaatagataccg

SEQ ID NO: 4059530 - DNA, 25 bp, Homo sapien
gcccaatgaggcagaccagatgaca

SEQ ID NO: 4059531 - DNA, 25 bp, Homo sapien
cattagtcacttgcttgagggctgc

SEQ ID NO: 4059532 - DNA, 25 bp, Homo sapien
tgcgacatcgtgtgcggatgagaat

SEQ ID NO: 4059533 - DNA, 25 bp, Homo sapien
tgaaaatggtggaatgcgacatcgt

SEQ ID NO: 4059534 - DNA, 25 bp, Homo sapien
caacagttagtgtcttgggattcac

SEQ ID NO: 4059535 - DNA, 25 bp, Homo sapien
tcttaacaggactccaggtctctcc

SEQ ID NO: 4059536 - DNA, 25 bp, Homo sapien
ttggatgttggttttgacagccttg

SEQ ID NO: 4059537 - DNA, 25 bp, Homo sapien
ggcctgctagaaccctgaaagaaaa

SEQ ID NO: 4059538 - DNA, 25 bp, Homo sapien
gagttggtcaaactgaagggcctgc

SEQ ID NO: 4059539 - DNA, 25 bp, Homo sapien
tctttatccacaagcagtcgccaat

SEQ ID NO: 4059540 - DNA, 25 bp, Homo sapien
tctgccattagcaaattggaaatcc

SEQ ID NO: 4059541 - DNA, 25 bp, Homo sapien
gcagattaacagcttctgccattag

SEQ ID NO: 4059542 - DNA, 25 bp, Homo sapien
cattagcaaattggaaatcccttcc

SEQ ID NO: 4059543 - DNA, 25 bp, Homo sapien
caatgcctgcatgcatttgcagatt

SEQ ID NO: 4059544 - DNA, 25 bp, Homo sapien
tctctcatatgttcatctccctgag

SEQ ID NO: 4059545 - DNA, 25 bp, Homo sapien
gagaacttgacagggtcgtgagaca

SEQ ID NO: 4059546 - DNA, 25 bp, Homo sapien
tcgtgagacagggatattttatact

SEQ ID NO: 4059547 - DNA, 25 bp, Homo sapien
tctcctcttgcaaggatgtcccgca

SEQ ID NO: 4059548 - DNA, 25 bp, Homo sapien
gcgtaagaacaagggcaagccctgg

SEQ ID NO: 4059549 - DNA, 25 bp, Homo sapien
gattcgctggccctcatatcatgaa

SEQ ID NO: 4059550 - DNA, 25 bp, Homo sapien
tcatatcatgaagcaccagcgtaag

SEQ ID NO: 4059551 - DNA, 25 bp, Homo sapien
tgttcttccagattcgctggccctc

SEQ ID NO: 4059552 - DNA, 25 bp, Homo sapien
catcacctacagcatcgtccacact

SEQ ID NO: 4059553 - DNA, 25 bp, Homo sapien
tacagcatcgtccacactctctagc

SEQ ID NO: 4059554 - DNA, 25 bp, Homo sapien
caaggctctgcaggtaagctgccct

SEQ ID NO: 4059555 - DNA, 25 bp, Homo sapien
gcattcaaggctctgcaggtaagct

SEQ ID NO: 4059556 - DNA, 25 bp, Homo sapien
agaaatcctagacaagggatctcac

SEQ ID NO: 4059557 - DNA, 25 bp, Homo sapien
agcccctcgaccttgatagataatc

SEQ ID NO: 4059558 - DNA, 25 bp, Homo sapien
gccaagaaatcctagacaagggatc

SEQ ID NO: 4059559 - DNA, 25 bp, Homo sapien
gataatctgaaccttggaaaggaca

SEQ ID NO: 4059560 - DNA, 25 bp, Homo sapien
ccctcagattaaaagtctgatgctc

SEQ ID NO: 4059561 - DNA, 25 bp, Homo sapien
gcctgaacagggacttgaaccctgg

SEQ ID NO: 4059562 - DNA, 25 bp, Homo sapien
atgcctgaacagggacttgaaccct

SEQ ID NO: 4059563 - DNA, 25 bp, Homo sapien
agattaaaagtctgatgctctacca

SEQ ID NO: 4059564 - DNA, 25 bp, Homo sapien
ctctgggaggaggatacctgattgg

SEQ ID NO: 4059565 - DNA, 25 bp, Homo sapien
cctctgggaggaggatacctgattg

SEQ ID NO: 4059566 - DNA, 25 bp, Homo sapien
tctgggaggaggatacctgattggc

SEQ ID NO: 4059567 - DNA, 25 bp, Homo sapien
aaataggccacgtagctccgcgttc

SEQ ID NO: 4059568 - DNA, 25 bp, Homo sapien
caaatggcagttccgtcagcctcga

SEQ ID NO: 4059569 - DNA, 25 bp, Homo sapien
ttcttgtctctgcaaatccgtcagc

SEQ ID NO: 4059570 - DNA, 25 bp, Homo sapien
agctgcctacaagggcctaccagac

SEQ ID NO: 4059571 - DNA, 25 bp, Homo sapien
gctattgtggatccggagggtaacc

SEQ ID NO: 4059572 - DNA, 25 bp, Homo sapien
ggaggtgctgttcccattaggagtc

SEQ ID NO: 4059573 - DNA, 25 bp, Homo sapien
caaaggctcgacacagtttcgctat

SEQ ID NO: 4059574 - DNA, 25 bp, Homo sapien
tgacccataattgccatgatagtgg

SEQ ID NO: 4059575 - DNA, 25 bp, Homo sapien
gtaggtgcagttggcacgactgcaa

SEQ ID NO: 4059576 - DNA, 25 bp, Homo sapien
aaagagtcgcttcccggtaggtgca

SEQ ID NO: 4059577 - DNA, 25 bp, Homo sapien
ctggcaggcaaagagtcgcttcccg

SEQ ID NO: 4059578 - DNA, 25 bp, Homo sapien
cgactgcaagtgtacttaaactttg

SEQ ID NO: 4059579 - DNA, 25 bp, Homo sapien
gagggggcagcctccagcattctct

SEQ ID NO: 4059580 - DNA, 25 bp, Homo sapien
agcattctctctgctaatgaagata

SEQ ID NO: 4059581 - DNA, 25 bp, Homo sapien
tccagcattctctctgctaatgaag

SEQ ID NO: 4059582 - DNA, 25 bp, Homo sapien
agcctccagcattctctctgctaat

SEQ ID NO: 4059583 - DNA, 25 bp, Homo sapien
cttttgtatcaatcgtttctgcatt

SEQ ID NO: 4059584 - DNA, 25 bp, Homo sapien
tctcttttgtatcaatcgtttctgc

SEQ ID NO: 4059585 - DNA, 25 bp, Homo sapien
tgtatcaatcgtttctgcatttgcc

SEQ ID NO: 4059586 - DNA, 25 bp, Homo sapien
tttgtatcaatcgtttctgcatttg

SEQ ID NO: 4059587 - DNA, 25 bp, Homo sapien
ctcacctcaacacgctggtccctaa

SEQ ID NO: 4059588 - DNA, 25 bp, Homo sapien
aatctcacctcaacacgctggtccc

SEQ ID NO: 4059589 - DNA, 25 bp, Homo sapien
ctcaacacgctggtccctaacatcc

SEQ ID NO: 4059590 - DNA, 25 bp, Homo sapien
acctcaacacgctggtccctaacat

SEQ ID NO: 4059591 - DNA, 25 bp, Homo sapien
ggtgggtaacaagctgccgctctgc

SEQ ID NO: 4059592 - DNA, 25 bp, Homo sapien
gccgctctgcatttggtggttcctt

SEQ ID NO: 4059593 - DNA, 25 bp, Homo sapien
ttctctgaagtggagaaggacatct

SEQ ID NO: 4059594 - DNA, 25 bp, Homo sapien
aacaggtggcaactgactgacgggc

SEQ ID NO: 4059595 - DNA, 25 bp, Homo sapien
taaacaggaatacaagtctctttcg

SEQ ID NO: 4059596 - DNA, 25 bp, Homo sapien
tctttcgaaggatccattacacggg

SEQ ID NO: 4059597 - DNA, 25 bp, Homo sapien
ttattgagaacatcttagagcagga

SEQ ID NO: 4059598 - DNA, 25 bp, Homo sapien
tacacgggaagaattccgctgaaga

SEQ ID NO: 4059599 - DNA, 25 bp, Homo sapien
tatcagccgctgaaagagtgagaag

SEQ ID NO: 4059600 - DNA, 25 bp, Homo sapien
gaagatgacctggtatccccatgca

SEQ ID NO: 4059601 - DNA, 25 bp, Homo sapien
tctttctgatccctagctgtgtgca

SEQ ID NO: 4059602 - DNA, 25 bp, Homo sapien
gatctctcggacacccagtcttgga

SEQ ID NO: 4059603 - DNA, 25 bp, Homo sapien
ggagattgacagctgcacatccatt

SEQ ID NO: 4059604 - DNA, 25 bp, Homo sapien
gaggagattgacagctgcacatcca

SEQ ID NO: 4059605 - DNA, 25 bp, Homo sapien
gtgttttttgatttacctggaggca

SEQ ID NO: 4059606 - DNA, 25 bp, Homo sapien
cctggaggagattgacagctgcaca

SEQ ID NO: 4059607 - DNA, 25 bp, Homo sapien
gctctcagccaatcgcctgggtctg

SEQ ID NO: 4059608 - DNA, 25 bp, Homo sapien
atcggaccagcaaggcgctctcagc

SEQ ID NO: 4059609 - DNA, 25 bp, Homo sapien
ctggagagcacatcggaccagcaag

SEQ ID NO: 4059610 - DNA, 25 bp, Homo sapien
aaggcgctctcagccaatcgcctgg

SEQ ID NO: 4059611 - DNA, 25 bp, Homo sapien
tttcctgtcattccgtggagattgg

SEQ ID NO: 4059612 - DNA, 25 bp, Homo sapien
gtttcctgtcattccgtggagattg

SEQ ID NO: 4059613 - DNA, 25 bp, Homo sapien
gaaagctatcaggatcttcccacgt

SEQ ID NO: 4059614 - DNA, 25 bp, Homo sapien
gctatcaggatcttcccacgtttcc

SEQ ID NO: 4059615 - DNA, 25 bp, Homo sapien
tgataaagtatgagcagaaggtgga

SEQ ID NO: 4059616 - DNA, 25 bp, Homo sapien
tggaaagtgataaagtatgagcaga

SEQ ID NO: 4059617 - DNA, 25 bp, Homo sapien
gagcagaaggtggactatgaaattc

SEQ ID NO: 4059618 - DNA, 25 bp, Homo sapien
cagaaggtggactatgaaattctgt

SEQ ID NO: 4059619 - DNA, 25 bp, Homo sapien
aacatgagccaggttcccgtaagat

SEQ ID NO: 4059620 - DNA, 25 bp, Homo sapien
atgagccaggttcccgtaagatcat

SEQ ID NO: 4059621 - DNA, 25 bp, Homo sapien
catgagccaggttcccgtaagatca

SEQ ID NO: 4059622 - DNA, 25 bp, Homo sapien
ccaacatgagccaggttcccgtaag

SEQ ID NO: 4059623 - DNA, 25 bp, Homo sapien
tggtgccaatgtggtagggcttaaa

SEQ ID NO: 4059624 - DNA, 25 bp, Homo sapien
aagggatcccttagtcacaaagatg

SEQ ID NO: 4059625 - DNA, 25 bp, Homo sapien
gttaaggatgaccaagtcaaatatg

SEQ ID NO: 4059626 - DNA, 25 bp, Homo sapien
caggatgtactggttaaggatgacc

SEQ ID NO: 4059627 - DNA, 25 bp, Homo sapien
ttttaagaataccattccatgagct

SEQ ID NO: 4059628 - DNA, 25 bp, Homo sapien
gaataccattccatgagctatacaa

SEQ ID NO: 4059629 - DNA, 25 bp, Homo sapien
ccatgggttcttttaagaataccat

SEQ ID NO: 4059630 - DNA, 25 bp, Homo sapien
cattccatgagctatacaaatgcat

SEQ ID NO: 4059631 - DNA, 25 bp, Homo sapien
tgtccggcacacaatccattcttgg

SEQ ID NO: 4059632 - DNA, 25 bp, Homo sapien
tcttggtggccttaatgacaaagct

SEQ ID NO: 4059633 - DNA, 25 bp, Homo sapien
aatgattgccgcacaatggccagcg

SEQ ID NO: 4059634 - DNA, 25 bp, Homo sapien
ggaagccagcttggtccctgtccgg

SEQ ID NO: 4059635 - DNA, 25 bp, Homo sapien
ccaaggctagaagggtcgcttgatt

SEQ ID NO: 4059636 - DNA, 25 bp, Homo sapien
tattctttcaaggtcattacccaag

SEQ ID NO: 4059637 - DNA, 25 bp, Homo sapien
tcgcttgattaacgagtgacaggcc

SEQ ID NO: 4059638 - DNA, 25 bp, Homo sapien
ttaacgagtgacaggcccaatgagg

SEQ ID NO: 4059639 - DNA, 25 bp, Homo sapien
aaagagagacggctcttccaccgcc

SEQ ID NO: 4059640 - DNA, 25 bp, Homo sapien
gcctgcccgtgtaggtccgggccat

SEQ ID NO: 4059641 - DNA, 25 bp, Homo sapien
ttgatgctgttcagtaaagagagac

SEQ ID NO: 4059642 - DNA, 25 bp, Homo sapien
tccgggccatcggtgtgtgaagagg

SEQ ID NO: 4059643 - DNA, 25 bp, Homo sapien
ctgaatcaccacgtgaggaggaggc

SEQ ID NO: 4059644 - DNA, 25 bp, Homo sapien
tgaatcaccacgtgaggaggaggct

SEQ ID NO: 4059645 - DNA, 25 bp, Homo sapien
gaagggttgcacaggcgatcctgaa

SEQ ID NO: 4059646 - DNA, 25 bp, Homo sapien
agaagggttgcacaggcgatcctga

SEQ ID NO: 4059647 - DNA, 25 bp, Homo sapien
tcctctgctgaggtttatgacttca

SEQ ID NO: 4059648 - DNA, 25 bp, Homo sapien
cctctgctgaggtttatgacttcat

SEQ ID NO: 4059649 - DNA, 25 bp, Homo sapien
cctccacgggtttggccgctgtctg

SEQ ID NO: 4059650 - DNA, 25 bp, Homo sapien
tggctggctgtaaacccaaactcgt

SEQ ID NO: 4059651 - DNA, 25 bp, Homo sapien
caagcaggaactctttgggaagggt

SEQ ID NO: 4059652 - DNA, 25 bp, Homo sapien
aattcaggaggtcagcgacagccaa

SEQ ID NO: 4059653 - DNA, 25 bp, Homo sapien
caaggggatgttgacgatccagcca

SEQ ID NO: 4059654 - DNA, 25 bp, Homo sapien
tgcaaggggatgttgacgatccagc

SEQ ID NO: 4059655 - DNA, 25 bp, Homo sapien
gggatgttgacgatccagccaaggg

SEQ ID NO: 4059656 - DNA, 25 bp, Homo sapien
tgtgcaaggggatgttgacgatcca

SEQ ID NO: 4059657 - DNA, 25 bp, Homo sapien
ttccccggccgtggacatgacttct

SEQ ID NO: 4059658 - DNA, 25 bp, Homo sapien
ggttttcgggttgcagaagaatgcc

SEQ ID NO: 4059659 - DNA, 25 bp, Homo sapien
tgggaaggagggtttcggcaatcca

SEQ ID NO: 4059660 - DNA, 25 bp, Homo sapien
gaccaaagatgcttgtgggaaggag

SEQ ID NO: 4059661 - DNA, 25 bp, Homo sapien
cccctgtgcatccaataggtttctg

SEQ ID NO: 4059662 - DNA, 25 bp, Homo sapien
ccccgggcagctagggtttcagtgt

SEQ ID NO: 4059663 - DNA, 25 bp, Homo sapien
tgtaggaccgggtatgagaaatccc

SEQ ID NO: 4059664 - DNA, 25 bp, Homo sapien
ttcagtgtgatgctggaggtagttt

SEQ ID NO: 4059665 - DNA, 25 bp, Homo sapien
tataaacacacgagtctggtttttc

SEQ ID NO: 4059666 - DNA, 25 bp, Homo sapien
tcatggctaaagtgcacacggaatc

SEQ ID NO: 4059667 - DNA, 25 bp, Homo sapien
gccagaggaaaagatcctaaatcag

SEQ ID NO: 4059668 - DNA, 25 bp, Homo sapien
ttctgtttagctccatccctccttg

SEQ ID NO: 4059669 - DNA, 25 bp, Homo sapien
tgattgtttcacttgttgtcagagg

SEQ ID NO: 4059670 - DNA, 25 bp, Homo sapien
gccgtgtcagggcaaagctgtattg

SEQ ID NO: 4059671 - DNA, 25 bp, Homo sapien
ttttcaagctgttcagacgggcgag

SEQ ID NO: 4059672 - DNA, 25 bp, Homo sapien
tgtcagagggcattgatcagccctg

SEQ ID NO: 4059673 - DNA, 25 bp, Homo sapien
agattccacagtttcaacactgtca

SEQ ID NO: 4059674 - DNA, 25 bp, Homo sapien
caccaatgtgtgacagaaaacgatc

SEQ ID NO: 4059675 - DNA, 25 bp, Homo sapien
aacactgtcatcagggactctagcc

SEQ ID NO: 4059676 - DNA, 25 bp, Homo sapien
gacagaaaacgatctcccttctcca

SEQ ID NO: 4059677 - DNA, 25 bp, Homo sapien
tcagcccgttggtggtcatattttc

SEQ ID NO: 4059678 - DNA, 25 bp, Homo sapien
tcttcagcccgttggtggtcatatt

SEQ ID NO: 4059679 - DNA, 25 bp, Homo sapien
tcatcttcagcccgttggtggtcat

SEQ ID NO: 4059680 - DNA, 25 bp, Homo sapien
gaatgggaaggactgagtttcatct

SEQ ID NO: 4059681 - DNA, 25 bp, Homo sapien
taccctgctggtacgggtatgagtt

SEQ ID NO: 4059682 - DNA, 25 bp, Homo sapien
tgtctctgtacctggaaataccctg

SEQ ID NO: 4059683 - DNA, 25 bp, Homo sapien
tagctagacgactatcacggccaac

SEQ ID NO: 4059684 - DNA, 25 bp, Homo sapien
tacgggtatgagttagctagacgac

SEQ ID NO: 4059685 - DNA, 25 bp, Homo sapien
tcctgcgctgttctgggttagagta

SEQ ID NO: 4059686 - DNA, 25 bp, Homo sapien
tgcaggttctgcaccaacagaaacc

SEQ ID NO: 4059687 - DNA, 25 bp, Homo sapien
aggttctgcaccaacagaaaccaca

SEQ ID NO: 4059688 - DNA, 25 bp, Homo sapien
tcaaatgtcatttctcctgcgctgt

SEQ ID NO: 4059689 - DNA, 25 bp, Homo sapien
gatttctacggcaggtcttcatcac

SEQ ID NO: 4059690 - DNA, 25 bp, Homo sapien
cctctgcatggatttctacggcagg

SEQ ID NO: 4059691 - DNA, 25 bp, Homo sapien
tgggtgaagggattcctaacacagg

SEQ ID NO: 4059692 - DNA, 25 bp, Homo sapien
tacagcggcagtgacaatgggtgaa

SEQ ID NO: 4059693 - DNA, 25 bp, Homo sapien
gccacctccttgaactatctttctg

SEQ ID NO: 4059694 - DNA, 25 bp, Homo sapien
tctgcatcttagtctgagagtcaag

SEQ ID NO: 4059695 - DNA, 25 bp, Homo sapien
gagtcaaggtcctcggtcaagagcc

SEQ ID NO: 4059696 - DNA, 25 bp, Homo sapien
aagagccacctccttgaactatctt

SEQ ID NO: 4059697 - DNA, 25 bp, Homo sapien
tggtcaaatatttaccccgggcaca

SEQ ID NO: 4059698 - DNA, 25 bp, Homo sapien
cagctaattaatgcgaggtcactcg

SEQ ID NO: 4059699 - DNA, 25 bp, Homo sapien
cactcgagggctgtgcaatggtagc

SEQ ID NO: 4059700 - DNA, 25 bp, Homo sapien
tagataatgcacctatggctgcagc

SEQ ID NO: 4059701 - DNA, 25 bp, Homo sapien
tccactctcttcttccgggtcagca

SEQ ID NO: 4059702 - DNA, 25 bp, Homo sapien
cactctcttcttccgggtcagcaca

SEQ ID NO: 4059703 - DNA, 25 bp, Homo sapien
actctcttcttccgggtcagcacat

SEQ ID NO: 4059704 - DNA, 25 bp, Homo sapien
ccactctcttcttccgggtcagcac

SEQ ID NO: 4059705 - DNA, 25 bp, Homo sapien
tctatatgtaaaggctctgaaacta

SEQ ID NO: 4059706 - DNA, 25 bp, Homo sapien
atatgtaaaggctctgaaactaaca

SEQ ID NO: 4059707 - DNA, 25 bp, Homo sapien
tatatgtaaaggctctgaaactaac

SEQ ID NO: 4059708 - DNA, 25 bp, Homo sapien
tatgtaaaggctctgaaactaacat

SEQ ID NO: 4059709 - DNA, 25 bp, Homo sapien
tggtcctgtctgaatctgcaagtac

SEQ ID NO: 4059710 - DNA, 25 bp, Homo sapien
gcaagtaccagtttccctgctcaga

SEQ ID NO: 4059711 - DNA, 25 bp, Homo sapien
ccttactgagttgcactgagagtca

SEQ ID NO: 4059712 - DNA, 25 bp, Homo sapien
tacagtagccccataaggttcaata

SEQ ID NO: 4059713 - DNA, 25 bp, Homo sapien
ctgcacacatcacaatctttaattt

SEQ ID NO: 4059714 - DNA, 25 bp, Homo sapien
atttcctgcacacatcacaatcttt

SEQ ID NO: 4059715 - DNA, 25 bp, Homo sapien
tcatttcctgcacacatcacaatct

SEQ ID NO: 4059716 - DNA, 25 bp, Homo sapien
tcctgcacacatcacaatctttaat

SEQ ID NO: 4059717 - DNA, 25 bp, Homo sapien
caataacttttaagcgacctgagtg

SEQ ID NO: 4059718 - DNA, 25 bp, Homo sapien
ctggagagtttgatcggatatggaa

SEQ ID NO: 4059719 - DNA, 25 bp, Homo sapien
tataaagccagtagatccatcactc

SEQ ID NO: 4059720 - DNA, 25 bp, Homo sapien
ttaaaggatttaaatctccatgtcc

SEQ ID NO: 4059721 - DNA, 25 bp, Homo sapien
ggtagccttgcttgacttgcaccat

SEQ ID NO: 4059722 - DNA, 25 bp, Homo sapien
aagttttgccattattggacggtag

SEQ ID NO: 4059723 - DNA, 25 bp, Homo sapien
tttgccattattggacggtagcctt

SEQ ID NO: 4059724 - DNA, 25 bp, Homo sapien
tattggacggtagccttgcttgact

SEQ ID NO: 4059725 - DNA, 25 bp, Homo sapien
tcccttgtccaaatcgcaggtttcc

SEQ ID NO: 4059726 - DNA, 25 bp, Homo sapien
ctgaagaaccagttcaagtgccacc

SEQ ID NO: 4059727 - DNA, 25 bp, Homo sapien
ttgtccaaatcgcaggtttcctgaa

SEQ ID NO: 4059728 - DNA, 25 bp, Homo sapien
tcctgaagaaccagttcaagtgcca

SEQ ID NO: 4059729 - DNA, 25 bp, Homo sapien
cagtgcagatctatgtgtgccagac

SEQ ID NO: 4059730 - DNA, 25 bp, Homo sapien
tactagccattgtaagtatccagga

SEQ ID NO: 4059731 - DNA, 25 bp, Homo sapien
gccagactatttttcggcacaagtg

SEQ ID NO: 4059732 - DNA, 25 bp, Homo sapien
taaatgcacatacctcaagctgctg

SEQ ID NO: 4059733 - DNA, 25 bp, Homo sapien
tcatatctttagtcttccctgagac

SEQ ID NO: 4059734 - DNA, 25 bp, Homo sapien
cagcagatttgtgaccctggtaagt

SEQ ID NO: 4059735 - DNA, 25 bp, Homo sapien
tgaccctggtaagtggcagtctgat

SEQ ID NO: 4059736 - DNA, 25 bp, Homo sapien
gtggcagtctgatttattctctagc

SEQ ID NO: 4059737 - DNA, 25 bp, Homo sapien
gattataaggtaggacttcagtgga

SEQ ID NO: 4059738 - DNA, 25 bp, Homo sapien
ttatcggcccctccacaatgagctg

SEQ ID NO: 4059739 - DNA, 25 bp, Homo sapien
ggcctgaaaagatgagacagcgcag

SEQ ID NO: 4059740 - DNA, 25 bp, Homo sapien
gattcctcgttatatgtggcctgaa

SEQ ID NO: 4059741 - DNA, 25 bp, Homo sapien
caactgagtccttagctagacatgc

SEQ ID NO: 4059742 - DNA, 25 bp, Homo sapien
ctgagtccttagctagacatgcatt

SEQ ID NO: 4059743 - DNA, 25 bp, Homo sapien
catgcatttcctccacgtttattaa

SEQ ID NO: 4059744 - DNA, 25 bp, Homo sapien
gtccttagctagacatgcatttcct

SEQ ID NO: 4059745 - DNA, 25 bp, Homo sapien
agcctggtaatgggctgatctccag

SEQ ID NO: 4059746 - DNA, 25 bp, Homo sapien
gaacctggagtggaattagacacca

SEQ ID NO: 4059747 - DNA, 25 bp, Homo sapien
tggaattagacaccagccaccccat

SEQ ID NO: 4059748 - DNA, 25 bp, Homo sapien
cctggagtggaattagacaccagcc

SEQ ID NO: 4059749 - DNA, 25 bp, Homo sapien
tcctgttcataattgaaccggtccg

SEQ ID NO: 4059750 - DNA, 25 bp, Homo sapien
tccgagcgtgcagggccttcacaca

SEQ ID NO: 4059751 - DNA, 25 bp, Homo sapien
cagagtgatggcttcccctgtcttc

SEQ ID NO: 4059752 - DNA, 25 bp, Homo sapien
cctgtcttctgcatttgttcggctc

SEQ ID NO: 4059753 - DNA, 25 bp, Homo sapien
cagatattgtctttagtgtggaata

SEQ ID NO: 4059754 - DNA, 25 bp, Homo sapien
tattctgaacgcagttatacctggg

SEQ ID NO: 4059755 - DNA, 25 bp, Homo sapien
atgcacctgcagatattgtctttag

SEQ ID NO: 4059756 - DNA, 25 bp, Homo sapien
cctgggctctagcttgctgtcactt

SEQ ID NO: 4059757 - DNA, 25 bp, Homo sapien
ctccgaggagggttggagcttactc

SEQ ID NO: 4059758 - DNA, 25 bp, Homo sapien
caagcaggttgctaggctccgagga

SEQ ID NO: 4059759 - DNA, 25 bp, Homo sapien
cgaggagggttggagcttactctcc

SEQ ID NO: 4059760 - DNA, 25 bp, Homo sapien
gctcttcaagcaggttgctaggctc

SEQ ID NO: 4059761 - DNA, 25 bp, Homo sapien
catggctttccattagaccttgctg

SEQ ID NO: 4059762 - DNA, 25 bp, Homo sapien
caagcagcaagatcactgcgactaa

SEQ ID NO: 4059763 - DNA, 25 bp, Homo sapien
gatcatgtttgccacagacatagcc

SEQ ID NO: 4059764 - DNA, 25 bp, Homo sapien
taaaatgagctgaagcctgacactg

SEQ ID NO: 4059765 - DNA, 25 bp, Homo sapien
tgttcctgcttccatgcctggtgag

SEQ ID NO: 4059766 - DNA, 25 bp, Homo sapien
ccagggaatgaagggactgtgatca

SEQ ID NO: 4059767 - DNA, 25 bp, Homo sapien
ttccatgcctggtgagtcagtgcca

SEQ ID NO: 4059768 - DNA, 25 bp, Homo sapien
gactcttctgtctattgactatcag

SEQ ID NO: 4059769 - DNA, 25 bp, Homo sapien
gaagggcacaaagttactgccggca

SEQ ID NO: 4059770 - DNA, 25 bp, Homo sapien
atcagcacagcatgccagcccggtt

SEQ ID NO: 4059771 - DNA, 25 bp, Homo sapien
agttactgccggcaccatcagcaca

SEQ ID NO: 4059772 - DNA, 25 bp, Homo sapien
tttcattcaggaagggcacaaagtt

SEQ ID NO: 4059773 - DNA, 25 bp, Homo sapien
tgagtgatacagttgctgcagtgtc

SEQ ID NO: 4059774 - DNA, 25 bp, Homo sapien
taagctattgtggaagtaattcctg

SEQ ID NO: 4059775 - DNA, 25 bp, Homo sapien
ccaaaaaagcaataatgtccatacc

SEQ ID NO: 4059776 - DNA, 25 bp, Homo sapien
tgacaacctctcagaaatgagtgat

SEQ ID NO: 4059777 - DNA, 25 bp, Homo sapien
ttcagtgtctcctgaacaatggtga

SEQ ID NO: 4059778 - DNA, 25 bp, Homo sapien
tgctgggtgtcagcctagtagttgt

SEQ ID NO: 4059779 - DNA, 25 bp, Homo sapien
gtgtcagcctagtagttgtttcata

SEQ ID NO: 4059780 - DNA, 25 bp, Homo sapien
tcagtgtctcctgaacaatggtgac

SEQ ID NO: 4059781 - DNA, 25 bp, Homo sapien
taggggaggatttgtcagattcata

SEQ ID NO: 4059782 - DNA, 25 bp, Homo sapien
ggatttgtcagattcataaattgtt

SEQ ID NO: 4059783 - DNA, 25 bp, Homo sapien
aggggaggatttgtcagattcataa

SEQ ID NO: 4059784 - DNA, 25 bp, Homo sapien
gatttgtcagattcataaattgttc

SEQ ID NO: 4059785 - DNA, 25 bp, Homo sapien
ctctgcaccagaatattgtttgtag

SEQ ID NO: 4059786 - DNA, 25 bp, Homo sapien
ttgggccgaccttgcagccccagct

SEQ ID NO: 4059787 - DNA, 25 bp, Homo sapien
tccaccgtccttgggccgaccttgc

SEQ ID NO: 4059788 - DNA, 25 bp, Homo sapien
ccccgagaatcatggcatacaccag

SEQ ID NO: 4059789 - DNA, 25 bp, Homo sapien
tacatcccactctgggtgctcacaa

SEQ ID NO: 4059790 - DNA, 25 bp, Homo sapien
tttcagacctttacttccgactagc

SEQ ID NO: 4059791 - DNA, 25 bp, Homo sapien
tccgactagccttggatttatgaat

SEQ ID NO: 4059792 - DNA, 25 bp, Homo sapien
tgggtgctcacaagaggctactttg

SEQ ID NO: 4059793 - DNA, 25 bp, Homo sapien
tttacgttggatataacgacatata

SEQ ID NO: 4059794 - DNA, 25 bp, Homo sapien
ctgtttacgttggatataacgacat

SEQ ID NO: 4059795 - DNA, 25 bp, Homo sapien
gtttacgttggatataacgacatat

SEQ ID NO: 4059796 - DNA, 25 bp, Homo sapien
tgtttacgttggatataacgacata

SEQ ID NO: 4059797 - DNA, 25 bp, Homo sapien
gctgtgggaatctgaaacggtgagg

SEQ ID NO: 4059798 - DNA, 25 bp, Homo sapien
ctgaaagccagtaatgggaaaagat

SEQ ID NO: 4059799 - DNA, 25 bp, Homo sapien
gaatctgaaacggtgaggggcaggg

SEQ ID NO: 4059800 - DNA, 25 bp, Homo sapien
tgggaatctgaaacggtgaggggca

SEQ ID NO: 4059801 - DNA, 25 bp, Homo sapien
cagagctaactgatatttgggattg

SEQ ID NO: 4059802 - DNA, 25 bp, Homo sapien
gagctaactgatatttgggattgtc

SEQ ID NO: 4059803 - DNA, 25 bp, Homo sapien
agagctaactgatatttgggattgt

SEQ ID NO: 4059804 - DNA, 25 bp, Homo sapien
ccttctcaaagttgctaaaaggcca

SEQ ID NO: 4059805 - DNA, 25 bp, Homo sapien
ctttcgtttccttctcaaagttgct

SEQ ID NO: 4059806 - DNA, 25 bp, Homo sapien
tcatttcccttaaatcctagccttg

SEQ ID NO: 4059807 - DNA, 25 bp, Homo sapien
ttcctcttccccgaaatgtctgcct

SEQ ID NO: 4059808 - DNA, 25 bp, Homo sapien
cttgtttcttctgcgaaataaatgg

SEQ ID NO: 4059809 - DNA, 25 bp, Homo sapien
ggcctgttgactccttgtatcacaa

SEQ ID NO: 4059810 - DNA, 25 bp, Homo sapien
ggcccaggtatatcgccagggtgac

SEQ ID NO: 4059811 - DNA, 25 bp, Homo sapien
aaataaatggcccaggtatatcgcc

SEQ ID NO: 4059812 - DNA, 25 bp, Homo sapien
ctctcttgggtcttttaggacatac

SEQ ID NO: 4059813 - DNA, 25 bp, Homo sapien
tacatctctcttgggtcttttagga

SEQ ID NO: 4059814 - DNA, 25 bp, Homo sapien
catctctcttgggtcttttaggaca

SEQ ID NO: 4059815 - DNA, 25 bp, Homo sapien
ctatacatctctcttgggtctttta

SEQ ID NO: 4059816 - DNA, 25 bp, Homo sapien
catccaagaataagggacagcagca

SEQ ID NO: 4059817 - DNA, 25 bp, Homo sapien
tctccatccaagaataagggacagc

SEQ ID NO: 4059818 - DNA, 25 bp, Homo sapien
gctttgccaatatcacttgtgcatc

SEQ ID NO: 4059819 - DNA, 25 bp, Homo sapien
ttgccaatatcacttgtgcatctgg

SEQ ID NO: 4059820 - DNA, 25 bp, Homo sapien
tccttctcaggtttagcacagtccc

SEQ ID NO: 4059821 - DNA, 25 bp, Homo sapien
tcaaccctgcttcgactgcaaagag

SEQ ID NO: 4059822 - DNA, 25 bp, Homo sapien
tatgactgagaggtctccgcttttc

SEQ ID NO: 4059823 - DNA, 25 bp, Homo sapien
ggaaagcgccgttgagaatatcctt

SEQ ID NO: 4059824 - DNA, 25 bp, Homo sapien
ctcttttggaggcaatgctatttcc

SEQ ID NO: 4059825 - DNA, 25 bp, Homo sapien
gcacgataattcttaccctagggcc

SEQ ID NO: 4059826 - DNA, 25 bp, Homo sapien
tcagacggactaatccaaacctctt

SEQ ID NO: 4059827 - DNA, 25 bp, Homo sapien
taaatctatcctctatcagctgcag

SEQ ID NO: 4059828 - DNA, 25 bp, Homo sapien
gaggaaatagttttcagatagagcc

SEQ ID NO: 4059829 - DNA, 25 bp, Homo sapien
aatagttttcagatagagccttaga

SEQ ID NO: 4059830 - DNA, 25 bp, Homo sapien
cattttttaataaggcaggtgtagg

SEQ ID NO: 4059831 - DNA, 25 bp, Homo sapien
taccccagaggaaatagttttcaga

SEQ ID NO: 4059832 - DNA, 25 bp, Homo sapien
tttcatgttgcaaatcgcgttgtgc

SEQ ID NO: 4059833 - DNA, 25 bp, Homo sapien
gaaggcgactttctttgcacagcat

SEQ ID NO: 4059834 - DNA, 25 bp, Homo sapien
cagcagggatgccaaaatcgctttc

SEQ ID NO: 4059835 - DNA, 25 bp, Homo sapien
tgcaaatcgcgttgtgcttcctcca

SEQ ID NO: 4059836 - DNA, 25 bp, Homo sapien
gaatggctctttataaaagctatca

SEQ ID NO: 4059837 - DNA, 25 bp, Homo sapien
tgaatggctctttataaaagctatc

SEQ ID NO: 4059838 - DNA, 25 bp, Homo sapien
gaactgaatggctctttataaaagc

SEQ ID NO: 4059839 - DNA, 25 bp, Homo sapien
ctctgaactgaatggctctttataa

SEQ ID NO: 4059840 - DNA, 25 bp, Homo sapien
taatttgggagctctcaaggaagtc

SEQ ID NO: 4059841 - DNA, 25 bp, Homo sapien
gcctcattacctgagcaagagagca

SEQ ID NO: 4059842 - DNA, 25 bp, Homo sapien
cgatgcttttttccgtgagatccat

SEQ ID NO: 4059843 - DNA, 25 bp, Homo sapien
gagagcaagcaacgtagctgtataa

SEQ ID NO: 4059844 - DNA, 25 bp, Homo sapien
tttgttacagagagcaggtcaccct

SEQ ID NO: 4059845 - DNA, 25 bp, Homo sapien
tatgacatgtagtttggcccttgac

SEQ ID NO: 4059846 - DNA, 25 bp, Homo sapien
cacaagcggcattatctgagaaaga

SEQ ID NO: 4059847 - DNA, 25 bp, Homo sapien
gttgttcgaaaaggctggcggctca

SEQ ID NO: 4059848 - DNA, 25 bp, Homo sapien
tgcaccgggcaaatgcagcatacgg

SEQ ID NO: 4059849 - DNA, 25 bp, Homo sapien
agcatcatcaaagctgtaatgcaag

SEQ ID NO: 4059850 - DNA, 25 bp, Homo sapien
taatgcaagtcagctgcaccgggca

SEQ ID NO: 4059851 - DNA, 25 bp, Homo sapien
agcatacggtgacactgtaacctcc

SEQ ID NO: 4059852 - DNA, 25 bp, Homo sapien
gctttgcttggtagcagttcaaggg

SEQ ID NO: 4059853 - DNA, 25 bp, Homo sapien
ttttcttgcactccacacattgcgg

SEQ ID NO: 4059854 - DNA, 25 bp, Homo sapien
cacattgcggtgtctaactcctcag

SEQ ID NO: 4059855 - DNA, 25 bp, Homo sapien
tatgctgacattgtattgctttgct

SEQ ID NO: 4059856 - DNA, 25 bp, Homo sapien
agacagccgtagctcttgcaccaag

SEQ ID NO: 4059857 - DNA, 25 bp, Homo sapien
agacattttcccactcgtagtagga

SEQ ID NO: 4059858 - DNA, 25 bp, Homo sapien
tcccactcgtagtaggattttacca

SEQ ID NO: 4059859 - DNA, 25 bp, Homo sapien
cactcatcagacagccgtagctctt

SEQ ID NO: 4059860 - DNA, 25 bp, Homo sapien
gccgtgccaatggtcattagcataa

SEQ ID NO: 4059861 - DNA, 25 bp, Homo sapien
ccgtgccaatggtcattagcataac

SEQ ID NO: 4059862 - DNA, 25 bp, Homo sapien
tagccgtgccaatggtcattagcat

SEQ ID NO: 4059863 - DNA, 25 bp, Homo sapien
ctagccgtgccaatggtcattagca

SEQ ID NO: 4059864 - DNA, 25 bp, Homo sapien
tcaagaactccttcccggagcggag

SEQ ID NO: 4059865 - DNA, 25 bp, Homo sapien
ctcagacccagtaggtcctccgata

SEQ ID NO: 4059866 - DNA, 25 bp, Homo sapien
taggtcctccgatactcaagaactc

SEQ ID NO: 4059867 - DNA, 25 bp, Homo sapien
cacagatcatggctatcagatgggt

SEQ ID NO: 4059868 - DNA, 25 bp, Homo sapien
gaaggagtaattagggcttgcttag

SEQ ID NO: 4059869 - DNA, 25 bp, Homo sapien
aaggagtaattagggcttgcttagg

SEQ ID NO: 4059870 - DNA, 25 bp, Homo sapien
gagaaggagtaattagggcttgctt

SEQ ID NO: 4059871 - DNA, 25 bp, Homo sapien
gagtaattagggcttgcttagggct

SEQ ID NO: 4059872 - DNA, 25 bp, Homo sapien
cagtgaaatgtgtgcctgaaagttt

SEQ ID NO: 4059873 - DNA, 25 bp, Homo sapien
gcagccacgtgcattagtgcatacg

SEQ ID NO: 4059874 - DNA, 25 bp, Homo sapien
ccacttcacatgcagccacgtgcat

SEQ ID NO: 4059875 - DNA, 25 bp, Homo sapien
tacgatttcttgagctgacagtgaa

SEQ ID NO: 4059876 - DNA, 25 bp, Homo sapien
cggtctgcaaagcagttcgaatagc

SEQ ID NO: 4059877 - DNA, 25 bp, Homo sapien
tcctctgttatgaggctctcctcct

SEQ ID NO: 4059878 - DNA, 25 bp, Homo sapien
tggtgcccatgactcctctgttatg

SEQ ID NO: 4059879 - DNA, 25 bp, Homo sapien
tcgaatagctttaggaacatctact

SEQ ID NO: 4059880 - DNA, 25 bp, Homo sapien
tgggctgacctttgtaaaggcacca

SEQ ID NO: 4059881 - DNA, 25 bp, Homo sapien
tgttagaacggtcacaacccaaaga

SEQ ID NO: 4059882 - DNA, 25 bp, Homo sapien
tcacatgctcctgagattcccatat

SEQ ID NO: 4059883 - DNA, 25 bp, Homo sapien
tcccatatagcctaacagcatgtta

SEQ ID NO: 4059884 - DNA, 25 bp, Homo sapien
ttctcaaggctaaagggatttgaaa

SEQ ID NO: 4059885 - DNA, 25 bp, Homo sapien
attctcaaggctaaagggatttgaa

SEQ ID NO: 4059886 - DNA, 25 bp, Homo sapien
aaatcacataattgatggcaagcat

SEQ ID NO: 4059887 - DNA, 25 bp, Homo sapien
aaaatcacataattgatggcaagca

SEQ ID NO: 4059888 - DNA, 25 bp, Homo sapien
aaatgaagataacatccgacgaagt

SEQ ID NO: 4059889 - DNA, 25 bp, Homo sapien
tccgacgaagtaaaagcatcccact

SEQ ID NO: 4059890 - DNA, 25 bp, Homo sapien
gataacatccgacgaagtaaaagca

SEQ ID NO: 4059891 - DNA, 25 bp, Homo sapien
tgtctttttcatgcagcaggggcgg

SEQ ID NO: 4059892 - DNA, 25 bp, Homo sapien
aacaagacaaatgcccgtcactccc

SEQ ID NO: 4059893 - DNA, 25 bp, Homo sapien
aaacaagacaaatgcccgtcactcc

SEQ ID NO: 4059894 - DNA, 25 bp, Homo sapien
gtatttatctgtccggaatagattt

SEQ ID NO: 4059895 - DNA, 25 bp, Homo sapien
aatgtatttatctgtccggaataga

SEQ ID NO: 4059896 - DNA, 25 bp, Homo sapien
ctgtgaaattagctaaaattatgac

SEQ ID NO: 4059897 - DNA, 25 bp, Homo sapien
attatacgggcaaaatttgggtctg

SEQ ID NO: 4059898 - DNA, 25 bp, Homo sapien
ttgcactgtgaaattagctaaaatt

SEQ ID NO: 4059899 - DNA, 25 bp, Homo sapien
gaaattagctaaaattatgacaact

SEQ ID NO: 4059900 - DNA, 25 bp, Homo sapien
agtctgctgctgaaaggattgaaaa

SEQ ID NO: 4059901 - DNA, 25 bp, Homo sapien
gattgaaaatctggaaagagtttgg

SEQ ID NO: 4059902 - DNA, 25 bp, Homo sapien
cagatgtttacaatctagcaccttt

SEQ ID NO: 4059903 - DNA, 25 bp, Homo sapien
tcttttctgaaaactgaagtctgct

SEQ ID NO: 4059904 - DNA, 25 bp, Homo sapien
tgagtaaaactaggttagaagttga

SEQ ID NO: 4059905 - DNA, 25 bp, Homo sapien
cgaggcctggcaatggacaggtatt

SEQ ID NO: 4059906 - DNA, 25 bp, Homo sapien
gtatttgtactgaataatgctcacg

SEQ ID NO: 4059907 - DNA, 25 bp, Homo sapien
gaataatgctcacgtcaggaatgag

SEQ ID NO: 4059908 - DNA, 25 bp, Homo sapien
aagaccattcagtggttgctcctac

SEQ ID NO: 4059909 - DNA, 25 bp, Homo sapien
ttaagaccattcagtggttgctcct

SEQ ID NO: 4059910 - DNA, 25 bp, Homo sapien
taagaccattcagtggttgctccta

SEQ ID NO: 4059911 - DNA, 25 bp, Homo sapien
cttccgtggcagggtgagtgctcca

SEQ ID NO: 4059912 - DNA, 25 bp, Homo sapien
gtcttccgtggcagggtgagtgctc

SEQ ID NO: 4059913 - DNA, 25 bp, Homo sapien
tccgtggcagggtgagtgctccagt

SEQ ID NO: 4059914 - DNA, 25 bp, Homo sapien
cgtggcagggtgagtgctccagtct

SEQ ID NO: 4059915 - DNA, 25 bp, Homo sapien
ctctgtagaagcagagctgaggcat

SEQ ID NO: 4059916 - DNA, 25 bp, Homo sapien
gatctctgtagaagcagagctgagg

SEQ ID NO: 4059917 - DNA, 25 bp, Homo sapien
tctctgtagaagcagagctgaggca

SEQ ID NO: 4059918 - DNA, 25 bp, Homo sapien
ggatctctgtagaagcagagctgag

SEQ ID NO: 4059919 - DNA, 25 bp, Homo sapien
gacctcccaggggtgttcatgggaa

SEQ ID NO: 4059920 - DNA, 25 bp, Homo sapien
tgcgcaaaacttcccgagccggcat

SEQ ID NO: 4059921 - DNA, 25 bp, Homo sapien
aggggtgttcatgggaaatggtgtc

SEQ ID NO: 4059922 - DNA, 25 bp, Homo sapien
gtcacgcatgcgcaaaacttcccga

SEQ ID NO: 4059923 - DNA, 25 bp, Homo sapien
ttcagtaagcacaagaagcggtggc

SEQ ID NO: 4059924 - DNA, 25 bp, Homo sapien
ggttcagtaagcacaagaagcggtg

SEQ ID NO: 4059925 - DNA, 25 bp, Homo sapien
taagcacaagaagcggtggctccgg

SEQ ID NO: 4059926 - DNA, 25 bp, Homo sapien
ctgggttcagtaagcacaagaagcg

SEQ ID NO: 4059927 - DNA, 25 bp, Homo sapien
tgaaggttccaggagtaaagcggtc

SEQ ID NO: 4059928 - DNA, 25 bp, Homo sapien
gttccaggagtaaagcggtcagcaa

SEQ ID NO: 4059929 - DNA, 25 bp, Homo sapien
ggttccaggagtaaagcggtcagca

SEQ ID NO: 4059930 - DNA, 25 bp, Homo sapien
aaggttccaggagtaaagcggtcag

SEQ ID NO: 4059931 - DNA, 25 bp, Homo sapien
tggcacgagctgccaacggaagctt

SEQ ID NO: 4059932 - DNA, 25 bp, Homo sapien
caatggcacgagctgccaacggaag

SEQ ID NO: 4059933 - DNA, 25 bp, Homo sapien
aacaatggcacgagctgccaacgga

SEQ ID NO: 4059934 - DNA, 25 bp, Homo sapien
aatggcacgagctgccaacggaagc

SEQ ID NO: 4059935 - DNA, 25 bp, Homo sapien
gcctgttaaaagttggacgattcca

SEQ ID NO: 4059936 - DNA, 25 bp, Homo sapien
tgagggcattcaatacctacaggca

SEQ ID NO: 4059937 - DNA, 25 bp, Homo sapien
tcaggatcctccgaaaagctgggaa

SEQ ID NO: 4059938 - DNA, 25 bp, Homo sapien
ggtatcgtaccaaaaatgatggcag

SEQ ID NO: 4059939 - DNA, 25 bp, Homo sapien
tgaatacgtttaaatttgagaagca

SEQ ID NO: 4059940 - DNA, 25 bp, Homo sapien
gagaagcactgacttgcttcactcc

SEQ ID NO: 4059941 - DNA, 25 bp, Homo sapien
aatgggtatcggccgggtacagtga

SEQ ID NO: 4059942 - DNA, 25 bp, Homo sapien
gcatttcatgaatacgtttaaattt

SEQ ID NO: 4059943 - DNA, 25 bp, Homo sapien
agcctgatcccaatgaaaacagctt

SEQ ID NO: 4059944 - DNA, 25 bp, Homo sapien
gccgttcaacccactgcctttggag

SEQ ID NO: 4059945 - DNA, 25 bp, Homo sapien
gaacaacttgcagactagtagcttg

SEQ ID NO: 4059946 - DNA, 25 bp, Homo sapien
tttggagaaacaaccaagcctgatc

SEQ ID NO: 4059947 - DNA, 25 bp, Homo sapien
gcatgctttcatggctgtcaggcaa

SEQ ID NO: 4059948 - DNA, 25 bp, Homo sapien
caagggacgctacagagcattcaca

SEQ ID NO: 4059949 - DNA, 25 bp, Homo sapien
cagatgaggacttcatgcagctagc

SEQ ID NO: 4059950 - DNA, 25 bp, Homo sapien
cattccttccctcggaaaggataag

SEQ ID NO: 4059951 - DNA, 25 bp, Homo sapien
actacttgttgcctctaggttggga

SEQ ID NO: 4059952 - DNA, 25 bp, Homo sapien
gtgtctgccatccagtagtcacagg

SEQ ID NO: 4059953 - DNA, 25 bp, Homo sapien
tggacagcccgccatgctagtgtct

SEQ ID NO: 4059954 - DNA, 25 bp, Homo sapien
ggcagcacatcctgtctttggacag

SEQ ID NO: 4059955 - DNA, 25 bp, Homo sapien
ttcatccacgggaagcagaacagag

SEQ ID NO: 4059956 - DNA, 25 bp, Homo sapien
attgaggatccccacatccacggtg

SEQ ID NO: 4059957 - DNA, 25 bp, Homo sapien
tgggaggaaccagtgtgcacttcca

SEQ ID NO: 4059958 - DNA, 25 bp, Homo sapien
aaccctaagtgacggctgaccagaa

SEQ ID NO: 4059959 - DNA, 25 bp, Homo sapien
tgtcaaaatactgacccgtgaccat

SEQ ID NO: 4059960 - DNA, 25 bp, Homo sapien
ctttatcaagatgtcaaaatactga

SEQ ID NO: 4059961 - DNA, 25 bp, Homo sapien
catctttatcaagatgtcaaaatac

SEQ ID NO: 4059962 - DNA, 25 bp, Homo sapien
agatgtcaaaatactgacccgtgac

SEQ ID NO: 4059963 - DNA, 25 bp, Homo sapien
gggactgaaacgtgtctacatatca

SEQ ID NO: 4059964 - DNA, 25 bp, Homo sapien
tacatatcaaacagcagttggcttc

SEQ ID NO: 4059965 - DNA, 25 bp, Homo sapien
gatgtccaggcctggttgtaaagcc

SEQ ID NO: 4059966 - DNA, 25 bp, Homo sapien
aatgctgcgcacagctgggatgtcc

SEQ ID NO: 4059967 - DNA, 25 bp, Homo sapien
gtatccgctttttatctgcttggca

SEQ ID NO: 4059968 - DNA, 25 bp, Homo sapien
ttggcttcccttgggtcaattgttc

SEQ ID NO: 4059969 - DNA, 25 bp, Homo sapien
caattgttctggtatccgcttttta

SEQ ID NO: 4059970 - DNA, 25 bp, Homo sapien
tctgcttggcatttcacatagatct

SEQ ID NO: 4059971 - DNA, 25 bp, Homo sapien
aggtcaggttttcaacaggactgtc

SEQ ID NO: 4059972 - DNA, 25 bp, Homo sapien
catccatattgaaaagtttacatgc

SEQ ID NO: 4059973 - DNA, 25 bp, Homo sapien
cagaggtcaggttttcaacaggact

SEQ ID NO: 4059974 - DNA, 25 bp, Homo sapien
atccatattgaaaagtttacatgca

SEQ ID NO: 4059975 - DNA, 25 bp, Homo sapien
tgaggagtaaattatcagcaaatca

SEQ ID NO: 4059976 - DNA, 25 bp, Homo sapien
gaggagtaaattatcagcaaatcag

SEQ ID NO: 4059977 - DNA, 25 bp, Homo sapien
atttattctctaaatgaagcaattt

SEQ ID NO: 4059978 - DNA, 25 bp, Homo sapien
tattctctaaatgaagcaatttcat

SEQ ID NO: 4059979 - DNA, 25 bp, Homo sapien
tcaacaccacgacagagggaggtga

SEQ ID NO: 4059980 - DNA, 25 bp, Homo sapien
aacaccacgacagagggaggtgatg

SEQ ID NO: 4059981 - DNA, 25 bp, Homo sapien
agcttcaacaccacgacagagggag

SEQ ID NO: 4059982 - DNA, 25 bp, Homo sapien
cttcaacaccacgacagagggaggt

SEQ ID NO: 4059983 - DNA, 25 bp, Homo sapien
cagcagcatccaatatgcgcctgca

SEQ ID NO: 4059984 - DNA, 25 bp, Homo sapien
tccaatatgcgcctgcagtcatcag

SEQ ID NO: 4059985 - DNA, 25 bp, Homo sapien
agcatccaatatgcgcctgcagtca

SEQ ID NO: 4059986 - DNA, 25 bp, Homo sapien
caatatgcgcctgcagtcatcaggc

SEQ ID NO: 4059987 - DNA, 25 bp, Homo sapien
gagctaataaaaagcgccaagcatg

SEQ ID NO: 4059988 - DNA, 25 bp, Homo sapien
agctaataaaaagcgccaagcatga

SEQ ID NO: 4059989 - DNA, 25 bp, Homo sapien
aataaaaagcgccaagcatgagtac

SEQ ID NO: 4059990 - DNA, 25 bp, Homo sapien
aaaaagcgccaagcatgagtacaga

SEQ ID NO: 4059991 - DNA, 25 bp, Homo sapien
ctttggttctgtttgcgcaatcgta

SEQ ID NO: 4059992 - DNA, 25 bp, Homo sapien
cagcctttgagagtctttaattcat

SEQ ID NO: 4059993 - DNA, 25 bp, Homo sapien
cattccacctggtgcacagcctttg

SEQ ID NO: 4059994 - DNA, 25 bp, Homo sapien
cgcaatcgtactaaaattgatagca

SEQ ID NO: 4059995 - DNA, 25 bp, Homo sapien
tgagttttggtcttaacaaatagga

SEQ ID NO: 4059996 - DNA, 25 bp, Homo sapien
ataggattttgttattctctgtcat

SEQ ID NO: 4059997 - DNA, 25 bp, Homo sapien
ctgagttttggtcttaacaaatagg

SEQ ID NO: 4059998 - DNA, 25 bp, Homo sapien
acaaataggattttgttattctctg

SEQ ID NO: 4059999 - DNA, 25 bp, Homo sapien
cagtcttacgtgtctttacgggtga

SEQ ID NO: 4060000 - DNA, 25 bp, Homo sapien
ggtctacactgcagtttaagtctga

SEQ ID NO: 4060001 - DNA, 25 bp, Homo sapien
tatccagtgctcaaagtagggtgca

SEQ ID NO: 4060002 - DNA, 25 bp, Homo sapien
tagggtgcagtaaccaactacaaat

SEQ ID NO: 4060003 - DNA, 25 bp, Homo sapien
catgatatattatggtcctgaaatg

SEQ ID NO: 4060004 - DNA, 25 bp, Homo sapien
cactgggtcatcacctatatgcaaa

SEQ ID NO: 4060005 - DNA, 25 bp, Homo sapien
gcattctggtatcagacatttttgc

SEQ ID NO: 4060006 - DNA, 25 bp, Homo sapien
gtcctgaaatgcacgtgcattctgg

SEQ ID NO: 4060007 - DNA, 25 bp, Homo sapien
tgacctaccactaactaatcagttc

SEQ ID NO: 4060008 - DNA, 25 bp, Homo sapien
aatcaccccatatggttcccacaag

SEQ ID NO: 4060009 - DNA, 25 bp, Homo sapien
tgttcaactgacctaccactaacta

SEQ ID NO: 4060010 - DNA, 25 bp, Homo sapien
tattgaaagatcctagtaaagtgac

SEQ ID NO: 4060011 - DNA, 25 bp, Homo sapien
aattttctctttttctgtatcttca

SEQ ID NO: 4060012 - DNA, 25 bp, Homo sapien
attttctctttttctgtatcttcat

SEQ ID NO: 4060013 - DNA, 25 bp, Homo sapien
tcagtagttcttttcaattttctct

SEQ ID NO: 4060014 - DNA, 25 bp, Homo sapien
ttgcttttcagtagttcttttcaat

SEQ ID NO: 4060015 - DNA, 25 bp, Homo sapien
gaagtgaattcaactcaaaggatgg

SEQ ID NO: 4060016 - DNA, 25 bp, Homo sapien
gctatttcatactatctccaaaaca

SEQ ID NO: 4060017 - DNA, 25 bp, Homo sapien
ggatgggatgggcatagttttggtg

SEQ ID NO: 4060018 - DNA, 25 bp, Homo sapien
tgggatgggcatagttttggtgaaa

SEQ ID NO: 4060019 - DNA, 25 bp, Homo sapien
actttgttgtacgtaattccagaca

SEQ ID NO: 4060020 - DNA, 25 bp, Homo sapien
ctttgttgtacgtaattccagacat

SEQ ID NO: 4060021 - DNA, 25 bp, Homo sapien
gaagcggatagtccacagtcgtgcc

SEQ ID NO: 4060022 - DNA, 25 bp, Homo sapien
catataatgcactaccctcttccaa

SEQ ID NO: 4060023 - DNA, 25 bp, Homo sapien
cgtgcctgggcccaccatataatgc

SEQ ID NO: 4060024 - DNA, 25 bp, Homo sapien
tcttccaacccgtggctcagacttg

SEQ ID NO: 4060025 - DNA, 25 bp, Homo sapien
tctgctacaacgtcagaggttacca

SEQ ID NO: 4060026 - DNA, 25 bp, Homo sapien
tttctctgctacaacgtcagaggtt

SEQ ID NO: 4060027 - DNA, 25 bp, Homo sapien
gagttcaggctgtgaactgcctttc

SEQ ID NO: 4060028 - DNA, 25 bp, Homo sapien
ctacaacgtcagaggttaccaaagt

SEQ ID NO: 4060029 - DNA, 25 bp, Homo sapien
ctggggactgggtgtattttataga

SEQ ID NO: 4060030 - DNA, 25 bp, Homo sapien
ttctctacgctcaaatgctgctggg

SEQ ID NO: 4060031 - DNA, 25 bp, Homo sapien
tgctggggactgggtgtattttata

SEQ ID NO: 4060032 - DNA, 25 bp, Homo sapien
ttgttctctacgctcaaatgctgct

SEQ ID NO: 4060033 - DNA, 25 bp, Homo sapien
tgctgtcttgttccagacaacagct

SEQ ID NO: 4060034 - DNA, 25 bp, Homo sapien
tgtggtccccctcaatacgaagcac

SEQ ID NO: 4060035 - DNA, 25 bp, Homo sapien
ctgggatgctgtcttgttccagaca

SEQ ID NO: 4060036 - DNA, 25 bp, Homo sapien
tgtaagcctgtggtccccctcaata

SEQ ID NO: 4060037 - DNA, 25 bp, Homo sapien
taaaggcattctagaacccaagctc

SEQ ID NO: 4060038 - DNA, 25 bp, Homo sapien
caagcgcaggcctgttggtagtcat

SEQ ID NO: 4060039 - DNA, 25 bp, Homo sapien
gactatgtcttggtccctatcggga

SEQ ID NO: 4060040 - DNA, 25 bp, Homo sapien
caatgtacctagcatacggtgggca

SEQ ID NO: 4060041 - DNA, 25 bp, Homo sapien
ttagagggtgacatcagccataatt

SEQ ID NO: 4060042 - DNA, 25 bp, Homo sapien
tccaatctggtgctgaagatgggct

SEQ ID NO: 4060043 - DNA, 25 bp, Homo sapien
ggtgacatcagccataattacattt

SEQ ID NO: 4060044 - DNA, 25 bp, Homo sapien
cttggcatctactttgccaaaatca

SEQ ID NO: 4060045 - DNA, 25 bp, Homo sapien
tttctccccattgatatgtcttttt

SEQ ID NO: 4060046 - DNA, 25 bp, Homo sapien
ttctccccattgatatgtctttttc

SEQ ID NO: 4060047 - DNA, 25 bp, Homo sapien
gaaacttgatggtcagactaaaggg

SEQ ID NO: 4060048 - DNA, 25 bp, Homo sapien
ctccggcaaggtccctaagcctagg

SEQ ID NO: 4060049 - DNA, 25 bp, Homo sapien
taaagggtgagctgccatcaatatc

SEQ ID NO: 4060050 - DNA, 25 bp, Homo sapien
ggtagcaacttctatccagcagctt

SEQ ID NO: 4060051 - DNA, 25 bp, Homo sapien
aagacaaggaggtaacgctcttctt

SEQ ID NO: 4060052 - DNA, 25 bp, Homo sapien
gacaaggaggtaacgctcttcttcc

SEQ ID NO: 4060053 - DNA, 25 bp, Homo sapien
caaggaggtaacgctcttcttcctc

SEQ ID NO: 4060054 - DNA, 25 bp, Homo sapien
agacaaggaggtaacgctcttcttc

SEQ ID NO: 4060055 - DNA, 25 bp, Homo sapien
ccattttagggagaaagcggctgca

SEQ ID NO: 4060056 - DNA, 25 bp, Homo sapien
cagaatatccaggaggaattgttac

SEQ ID NO: 4060057 - DNA, 25 bp, Homo sapien
tacattataacacccaagcatattt

SEQ ID NO: 4060058 - DNA, 25 bp, Homo sapien
ccagtaataggatcacatacttcca

SEQ ID NO: 4060059 - DNA, 25 bp, Homo sapien
gagaggcactaataagagactggaa

SEQ ID NO: 4060060 - DNA, 25 bp, Homo sapien
ctcctgttgggtctgccagtgagag

SEQ ID NO: 4060061 - DNA, 25 bp, Homo sapien
ggaagcctgcaattacacttcccag

SEQ ID NO: 4060062 - DNA, 25 bp, Homo sapien
tgttctttctaatgccaggactgga

SEQ ID NO: 4060063 - DNA, 25 bp, Homo sapien
cagtggcatcccaaaagcacataaa

SEQ ID NO: 4060064 - DNA, 25 bp, Homo sapien
tggctgtgactctggcagtgatggc

SEQ ID NO: 4060065 - DNA, 25 bp, Homo sapien
cagcaaaggcatgacagtggcatcc

SEQ ID NO: 4060066 - DNA, 25 bp, Homo sapien
tagcagcaaaggcatgacagtggca

SEQ ID NO: 4060067 - DNA, 25 bp, Homo sapien
tggaaaataatcaccgacaccatcg

SEQ ID NO: 4060068 - DNA, 25 bp, Homo sapien
aaatgaagaacaacagtaagaaatc

SEQ ID NO: 4060069 - DNA, 25 bp, Homo sapien
gacaccatcggcttcaaaaatgaag

SEQ ID NO: 4060070 - DNA, 25 bp, Homo sapien
aacagtaagaaatctacgtaagcca

SEQ ID NO: 4060071 - DNA, 25 bp, Homo sapien
gactgtgaagtagctgatcatgctt

SEQ ID NO: 4060072 - DNA, 25 bp, Homo sapien
gaaatggcagataagctccttcctg

SEQ ID NO: 4060073 - DNA, 25 bp, Homo sapien
tcgttaggctagttggctgagccat

SEQ ID NO: 4060074 - DNA, 25 bp, Homo sapien
ctgagccattgtatgcggaggcaga

SEQ ID NO: 4060075 - DNA, 25 bp, Homo sapien
agtgggtgctttttcagggtgcata

SEQ ID NO: 4060076 - DNA, 25 bp, Homo sapien
tacaagtgggtgctttttcagggtg

SEQ ID NO: 4060077 - DNA, 25 bp, Homo sapien
ggtgctttttcagggtgcataccca

SEQ ID NO: 4060078 - DNA, 25 bp, Homo sapien
tgggtgctttttcagggtgcatacc

SEQ ID NO: 4060079 - DNA, 25 bp, Homo sapien
gaattagggaacactgaaccatgga

SEQ ID NO: 4060080 - DNA, 25 bp, Homo sapien
tcaataccaagcttcggaggaggga

SEQ ID NO: 4060081 - DNA, 25 bp, Homo sapien
gaaatacagtgttgggttcctgcaa

SEQ ID NO: 4060082 - DNA, 25 bp, Homo sapien
ccttctgcttaggaatactggacac

SEQ ID NO: 4060083 - DNA, 25 bp, Homo sapien
agctgtgctggcgaccctgtgttcg

SEQ ID NO: 4060084 - DNA, 25 bp, Homo sapien
gaatatatattagcaccaggtgctc

SEQ ID NO: 4060085 - DNA, 25 bp, Homo sapien
ctgtgttcggcctctcaggagcacg

SEQ ID NO: 4060086 - DNA, 25 bp, Homo sapien
ccagatggtcggcattgccatagac

SEQ ID NO: 4060087 - DNA, 25 bp, Homo sapien
ggcccatggcaaattcaacatattg

SEQ ID NO: 4060088 - DNA, 25 bp, Homo sapien
ggtccagtctctttaaaatttcatg

SEQ ID NO: 4060089 - DNA, 25 bp, Homo sapien
tcacaacattgaagctttaaaggcc

SEQ ID NO: 4060090 - DNA, 25 bp, Homo sapien
ttttcactattacttcagaaatgtt

SEQ ID NO: 4060091 - DNA, 25 bp, Homo sapien
gatgcagggaggcattgattcactg

SEQ ID NO: 4060092 - DNA, 25 bp, Homo sapien
tcatgttacaaaggggtgtggatgc

SEQ ID NO: 4060093 - DNA, 25 bp, Homo sapien
tggatgcagggaggcattgattcac

SEQ ID NO: 4060094 - DNA, 25 bp, Homo sapien
ggaagagcaacaatatcatgttaca

SEQ ID NO: 4060095 - DNA, 25 bp, Homo sapien
ctcttgcgactgttggagtcctggg

SEQ ID NO: 4060096 - DNA, 25 bp, Homo sapien
acctgctgaagtcctcacctggtgg

SEQ ID NO: 4060097 - DNA, 25 bp, Homo sapien
cctgctgaagtcctcacctggtgga

SEQ ID NO: 4060098 - DNA, 25 bp, Homo sapien
tggtctgttctcttgcgactgttgg

SEQ ID NO: 4060099 - DNA, 25 bp, Homo sapien
cgcaggaaggcccaaatggacaaaa

SEQ ID NO: 4060100 - DNA, 25 bp, Homo sapien
aaggaccaatcacatgcaagggccc

SEQ ID NO: 4060101 - DNA, 25 bp, Homo sapien
tgagtcctgctttacatcacaaggt

SEQ ID NO: 4060102 - DNA, 25 bp, Homo sapien
gggagacgaggcctatgcaacagct

SEQ ID NO: 4060103 - DNA, 25 bp, Homo sapien
aatgaagggaaagcacactccaggt

SEQ ID NO: 4060104 - DNA, 25 bp, Homo sapien
cactccaggttaagagagaagcttt

SEQ ID NO: 4060105 - DNA, 25 bp, Homo sapien
ccagtgctgtgctagtacaagaaat

SEQ ID NO: 4060106 - DNA, 25 bp, Homo sapien
aacctcatagcccaagaatctgtac

SEQ ID NO: 4060107 - DNA, 25 bp, Homo sapien
gatcaggctatgagggctccttcct

SEQ ID NO: 4060108 - DNA, 25 bp, Homo sapien
taaggtaaaagactccaggtgaatg

SEQ ID NO: 4060109 - DNA, 25 bp, Homo sapien
ccaccttctgccataggaggatgca

SEQ ID NO: 4060110 - DNA, 25 bp, Homo sapien
ccatcttggtgctagttggagtcac

SEQ ID NO: 4060111 - DNA, 25 bp, Homo sapien
tctagaccaggaggaatgaggtcac

SEQ ID NO: 4060112 - DNA, 25 bp, Homo sapien
ctaaggatctagaccaggaggaatg

SEQ ID NO: 4060113 - DNA, 25 bp, Homo sapien
atctagaccaggaggaatgaggtca

SEQ ID NO: 4060114 - DNA, 25 bp, Homo sapien
aggatctagaccaggaggaatgagg

SEQ ID NO: 4060115 - DNA, 25 bp, Homo sapien
cctccagatcttagctcaaccacca

SEQ ID NO: 4060116 - DNA, 25 bp, Homo sapien
ttccctccagatcttagctcaacca

SEQ ID NO: 4060117 - DNA, 25 bp, Homo sapien
tccctccagatcttagctcaaccac

SEQ ID NO: 4060118 - DNA, 25 bp, Homo sapien
tttccctccagatcttagctcaacc

SEQ ID NO: 4060119 - DNA, 25 bp, Homo sapien
accaggcgtagtcacaatggtctgc

SEQ ID NO: 4060120 - DNA, 25 bp, Homo sapien
tcacaatggtctgcgactgcactgg

SEQ ID NO: 4060121 - DNA, 25 bp, Homo sapien
caagttcagtggaggacttccttag

SEQ ID NO: 4060122 - DNA, 25 bp, Homo sapien
cagtggaggacttccttagaacaac

SEQ ID NO: 4060123 - DNA, 25 bp, Homo sapien
gggactagcctcagctgcagacaag

SEQ ID NO: 4060124 - DNA, 25 bp, Homo sapien
ggtcctgctggaaccctttgaggca

SEQ ID NO: 4060125 - DNA, 25 bp, Homo sapien
cagatcctgagaaaaggctgcgggt

SEQ ID NO: 4060126 - DNA, 25 bp, Homo sapien
tcagcctagctcctagagggaaatg

SEQ ID NO: 4060127 - DNA, 25 bp, Homo sapien
gaattttgagtacacagattgccct

SEQ ID NO: 4060128 - DNA, 25 bp, Homo sapien
gaaattggtgaattttgagtacaca

SEQ ID NO: 4060129 - DNA, 25 bp, Homo sapien
ggtgagatcaacattgaaattggtg

SEQ ID NO: 4060130 - DNA, 25 bp, Homo sapien
tttctgtaaggctgtttttggtgag

SEQ ID NO: 4060131 - DNA, 25 bp, Homo sapien
ccccaggggcgaagaagaaatatgg

SEQ ID NO: 4060132 - DNA, 25 bp, Homo sapien
gagtatgacataaacccttcttcca

SEQ ID NO: 4060133 - DNA, 25 bp, Homo sapien
tatttgccttggagtatgacataaa

SEQ ID NO: 4060134 - DNA, 25 bp, Homo sapien
gaagggatttctgtagttatttgcc

SEQ ID NO: 4060135 - DNA, 25 bp, Homo sapien
tcaaatcctcgtgggcccagggcat

SEQ ID NO: 4060136 - DNA, 25 bp, Homo sapien
ccagaggacggcggaaagttgattt

SEQ ID NO: 4060137 - DNA, 25 bp, Homo sapien
tataagtgaacctgactttgtactc

SEQ ID NO: 4060138 - DNA, 25 bp, Homo sapien
gcataaactgagtgtgatgatgttg

SEQ ID NO: 4060139 - DNA, 25 bp, Homo sapien
taagcagtatgatggcagcaaaacc

SEQ ID NO: 4060140 - DNA, 25 bp, Homo sapien
tatgaaagtaacaagcagttgcttg

SEQ ID NO: 4060141 - DNA, 25 bp, Homo sapien
caagcagttgcttgttaagcagtat

SEQ ID NO: 4060142 - DNA, 25 bp, Homo sapien
gcaaaacctgaccaatacactttca

SEQ ID NO: 4060143 - DNA, 25 bp, Homo sapien
acactttctgctgcctattaggcat

SEQ ID NO: 4060144 - DNA, 25 bp, Homo sapien
gccacactttctgctgcctattagg

SEQ ID NO: 4060145 - DNA, 25 bp, Homo sapien
ttcctgaactccaaagccacacttt

SEQ ID NO: 4060146 - DNA, 25 bp, Homo sapien
aaagccacactttctgctgcctatt

SEQ ID NO: 4060147 - DNA, 25 bp, Homo sapien
gactaacttgagtactgaactgcct

SEQ ID NO: 4060148 - DNA, 25 bp, Homo sapien
gagtccatcatcttaacaactgtgg

SEQ ID NO: 4060149 - DNA, 25 bp, Homo sapien
caactgtggcctcgagagacaagca

SEQ ID NO: 4060150 - DNA, 25 bp, Homo sapien
gcaagacagatccattggaggaaaa

SEQ ID NO: 4060151 - DNA, 25 bp, Homo sapien
cagcttcctataactcgtggcttct

SEQ ID NO: 4060152 - DNA, 25 bp, Homo sapien
tgggacagcatgagttccctgccac

SEQ ID NO: 4060153 - DNA, 25 bp, Homo sapien
cctataactcgtggcttctgttcca

SEQ ID NO: 4060154 - DNA, 25 bp, Homo sapien
taactcgtggcttctgttccacctc

SEQ ID NO: 4060155 - DNA, 25 bp, Homo sapien
cagtagctgtatatacgtcaagaca

SEQ ID NO: 4060156 - DNA, 25 bp, Homo sapien
ttgtggaaaactacagattagctga

SEQ ID NO: 4060157 - DNA, 25 bp, Homo sapien
aatgcatgggccttaaatattttaa

SEQ ID NO: 4060158 - DNA, 25 bp, Homo sapien
gaggtggtaacagtctctaagatcc

SEQ ID NO: 4060159 - DNA, 25 bp, Homo sapien
ccctctgctgagatggccaatctga

SEQ ID NO: 4060160 - DNA, 25 bp, Homo sapien
gagacagacgtgtggttacttcccc

SEQ ID NO: 4060161 - DNA, 25 bp, Homo sapien
gccaatctgaacaggttgctccgga

SEQ ID NO: 4060162 - DNA, 25 bp, Homo sapien
tgtcgcagtcagcatcacagaactt

SEQ ID NO: 4060163 - DNA, 25 bp, Homo sapien
caatcaggataggatctgccaagga

SEQ ID NO: 4060164 - DNA, 25 bp, Homo sapien
accagccaatcaggataggatctgc

SEQ ID NO: 4060165 - DNA, 25 bp, Homo sapien
ggccagagaacacaaccagccaatc

SEQ ID NO: 4060166 - DNA, 25 bp, Homo sapien
gccaatcaggataggatctgccaag

SEQ ID NO: 4060167 - DNA, 25 bp, Homo sapien
gaagaagagcagcttgaacactgaa

SEQ ID NO: 4060168 - DNA, 25 bp, Homo sapien
tcagaatatgacctggactggtcat

SEQ ID NO: 4060169 - DNA, 25 bp, Homo sapien
cactgaatgaaggtcagaatatgac

SEQ ID NO: 4060170 - DNA, 25 bp, Homo sapien
gaagagcagcttgaacactgaatga

SEQ ID NO: 4060171 - DNA, 25 bp, Homo sapien
aaccaaagtaactcccaaggctgag

SEQ ID NO: 4060172 - DNA, 25 bp, Homo sapien
aagtgtcgtgttttaatctcagcag

SEQ ID NO: 4060173 - DNA, 25 bp, Homo sapien
caaaataaaggtcttatgaggctca

SEQ ID NO: 4060174 - DNA, 25 bp, Homo sapien
ttcctgtaccaatcttaaagtgtcg

SEQ ID NO: 4060175 - DNA, 25 bp, Homo sapien
gggatcacagtacctaccgacatag

SEQ ID NO: 4060176 - DNA, 25 bp, Homo sapien
gccaccacatgctgattacatagga

SEQ ID NO: 4060177 - DNA, 25 bp, Homo sapien
gaaagcgcagagtttgggatcacag

SEQ ID NO: 4060178 - DNA, 25 bp, Homo sapien
taacctgacgttcaaatgggcaggg

SEQ ID NO: 4060179 - DNA, 25 bp, Homo sapien
tgcaatgtctcctatggcctggtca

SEQ ID NO: 4060180 - DNA, 25 bp, Homo sapien
tatacctgtgactccagttcgggcc

SEQ ID NO: 4060181 - DNA, 25 bp, Homo sapien
caatgtctgatggtctctgatgcaa

SEQ ID NO: 4060182 - DNA, 25 bp, Homo sapien
caaagtctgttcatggctggtgcac

SEQ ID NO: 4060183 - DNA, 25 bp, Homo sapien
tccaaaaactgagggtgcgtttctg

SEQ ID NO: 4060184 - DNA, 25 bp, Homo sapien
tgagtggcagattcatactatccca

SEQ ID NO: 4060185 - DNA, 25 bp, Homo sapien
ggctttctggactcagatataaggg

SEQ ID NO: 4060186 - DNA, 25 bp, Homo sapien
tactatcccacgaatcactactttc

SEQ ID NO: 4060187 - DNA, 25 bp, Homo sapien
cccagccagggaactttgaagtaat

SEQ ID NO: 4060188 - DNA, 25 bp, Homo sapien
cagccagggaactttgaagtaattt

SEQ ID NO: 4060189 - DNA, 25 bp, Homo sapien
ctaacagagctttcctgattccttg

SEQ ID NO: 4060190 - DNA, 25 bp, Homo sapien
cctaacagagctttcctgattcctt

SEQ ID NO: 4060191 - DNA, 25 bp, Homo sapien
taagtccagggaaacgcacggcgag

SEQ ID NO: 4060192 - DNA, 25 bp, Homo sapien
gaggtcaagtcgccggtgtcccttc

SEQ ID NO: 4060193 - DNA, 25 bp, Homo sapien
cacggcgagggacgaggggcgattc

SEQ ID NO: 4060194 - DNA, 25 bp, Homo sapien
gtcaagtcgccggtgtcccttcggc

SEQ ID NO: 4060195 - DNA, 25 bp, Homo sapien
ttgccgaaatctggataaagccagg

SEQ ID NO: 4060196 - DNA, 25 bp, Homo sapien
gaccccagggtcgtatcttcatttg

SEQ ID NO: 4060197 - DNA, 25 bp, Homo sapien
tacttgttcacgagtccagaccagc

SEQ ID NO: 4060198 - DNA, 25 bp, Homo sapien
gctagctttagttggccctgacccc

SEQ ID NO: 4060199 - DNA, 25 bp, Homo sapien
gatactgtcctaattccgtaagtgg

SEQ ID NO: 4060200 - DNA, 25 bp, Homo sapien
tcctagccagggaaagaatagttgg

SEQ ID NO: 4060201 - DNA, 25 bp, Homo sapien
aatagttggctggtaccacacaggc

SEQ ID NO: 4060202 - DNA, 25 bp, Homo sapien
catcctgggaagaatttgagtagca

SEQ ID NO: 4060203 - DNA, 25 bp, Homo sapien
tatcaaagacacgacggtgggcact

SEQ ID NO: 4060204 - DNA, 25 bp, Homo sapien
cagcttcagtacaaggttacccaga

SEQ ID NO: 4060205 - DNA, 25 bp, Homo sapien
gaacttgcctgataacatggtaccc

SEQ ID NO: 4060206 - DNA, 25 bp, Homo sapien
gaaaaagtcgccacaggcaagctgc

SEQ ID NO: 4060207 - DNA, 25 bp, Homo sapien
ggtagtgtacttggcctcgctgatc

SEQ ID NO: 4060208 - DNA, 25 bp, Homo sapien
tgtacttggcctcgctgatccgttc

SEQ ID NO: 4060209 - DNA, 25 bp, Homo sapien
tggtggtagtgtacttggcctcgct

SEQ ID NO: 4060210 - DNA, 25 bp, Homo sapien
tggcctcgctgatccgttccgtggt

SEQ ID NO: 4060211 - DNA, 25 bp, Homo sapien
caagattgccaaccgggatgcagag

SEQ ID NO: 4060212 - DNA, 25 bp, Homo sapien
tcaacaacaagattgccaaccggga

SEQ ID NO: 4060213 - DNA, 25 bp, Homo sapien
ctcatcaacaacaagattgccaacc

SEQ ID NO: 4060214 - DNA, 25 bp, Homo sapien
caacaagattgccaaccgggatgca

SEQ ID NO: 4060215 - DNA, 25 bp, Homo sapien
cactcttgctgtggtgctacgtgga

SEQ ID NO: 4060216 - DNA, 25 bp, Homo sapien
gaaagctgacccaacaagagctctc

SEQ ID NO: 4060217 - DNA, 25 bp, Homo sapien
aaatcagtgtgctgctagagggttc

SEQ ID NO: 4060218 - DNA, 25 bp, Homo sapien
ggacccatagctctggcatcctcag

SEQ ID NO: 4060219 - DNA, 25 bp, Homo sapien
ttgcacttggtatcatttatgaaag

SEQ ID NO: 4060220 - DNA, 25 bp, Homo sapien
cttcgattggagctgccttaagttc

SEQ ID NO: 4060221 - DNA, 25 bp, Homo sapien
aagctgtgttctagtcgtttttgac

SEQ ID NO: 4060222 - DNA, 25 bp, Homo sapien
tcgggagtagtgatctgtagtttcc

SEQ ID NO: 4060223 - DNA, 25 bp, Homo sapien
caaaccatgggagcgttgaagaagc

SEQ ID NO: 4060224 - DNA, 25 bp, Homo sapien
caaatagcggctgacttgactgcaa

SEQ ID NO: 4060225 - DNA, 25 bp, Homo sapien
tgacaccgcacaggattcaggtctg

SEQ ID NO: 4060226 - DNA, 25 bp, Homo sapien
gaggctctaagcaagggaacgcaac

SEQ ID NO: 4060227 - DNA, 25 bp, Homo sapien
gactgggttaagcatccacacctcc

SEQ ID NO: 4060228 - DNA, 25 bp, Homo sapien
gaaaaatttgattcccagttgggca

SEQ ID NO: 4060229 - DNA, 25 bp, Homo sapien
cagatagtatgtgcttcgatttccc

SEQ ID NO: 4060230 - DNA, 25 bp, Homo sapien
gctatgggtgcaaaaagactgggtt

SEQ ID NO: 4060231 - DNA, 25 bp, Homo sapien
gtataaatacttccacggtgcctgg

SEQ ID NO: 4060232 - DNA, 25 bp, Homo sapien
gccaccgtgtgcagcctaattactt

SEQ ID NO: 4060233 - DNA, 25 bp, Homo sapien
taattactttaaggaccatggtcag

SEQ ID NO: 4060234 - DNA, 25 bp, Homo sapien
ggagcacacctgatagtaaaatgta

SEQ ID NO: 4060235 - DNA, 25 bp, Homo sapien
cagctggccgttctctagcagttat

SEQ ID NO: 4060236 - DNA, 25 bp, Homo sapien
cacagtgaaagccagtatctaccaa

SEQ ID NO: 4060237 - DNA, 25 bp, Homo sapien
tctcacttactaggacctcagctgg

SEQ ID NO: 4060238 - DNA, 25 bp, Homo sapien
gacctactgtgttacaatctctggg

SEQ ID NO: 4060239 - DNA, 25 bp, Homo sapien
gaagccattaattcaagaggattgg

SEQ ID NO: 4060240 - DNA, 25 bp, Homo sapien
agccattaattcaagaggattgggt

SEQ ID NO: 4060241 - DNA, 25 bp, Homo sapien
gccattaattcaagaggattgggtt

SEQ ID NO: 4060242 - DNA, 25 bp, Homo sapien
aagccattaattcaagaggattggg

SEQ ID NO: 4060243 - DNA, 25 bp, Homo sapien
ttctcttttgatcattttccctcac

SEQ ID NO: 4060244 - DNA, 25 bp, Homo sapien
ccttctcttttgatcattttccctc

SEQ ID NO: 4060245 - DNA, 25 bp, Homo sapien
cgtgcctggccgtttccttctcttt

SEQ ID NO: 4060246 - DNA, 25 bp, Homo sapien
accgtgcctggccgtttccttctct

SEQ ID NO: 4060247 - DNA, 25 bp, Homo sapien
cccagctcttggagtgcttggtatg

SEQ ID NO: 4060248 - DNA, 25 bp, Homo sapien
cagctcttggagtgcttggtatgct

SEQ ID NO: 4060249 - DNA, 25 bp, Homo sapien
cttggtatgctccatacacacacat

SEQ ID NO: 4060250 - DNA, 25 bp, Homo sapien
gctcttggagtgcttggtatgctcc

SEQ ID NO: 4060251 - DNA, 25 bp, Homo sapien
cttttgccttggtaacatccgtggg

SEQ ID NO: 4060252 - DNA, 25 bp, Homo sapien
tccatgtgttctaaaaggcctgaga

SEQ ID NO: 4060253 - DNA, 25 bp, Homo sapien
gggcatctcttgacgtctataacat

SEQ ID NO: 4060254 - DNA, 25 bp, Homo sapien
cttttgccttggtaacatctgtggg

SEQ ID NO: 4060255 - DNA, 25 bp, Homo sapien
tgtggtgacggcagttctagttgaa

SEQ ID NO: 4060256 - DNA, 25 bp, Homo sapien
tgacggcagttctagttgaaaggac

SEQ ID NO: 4060257 - DNA, 25 bp, Homo sapien
acggcagttctagttgaaaggactc

SEQ ID NO: 4060258 - DNA, 25 bp, Homo sapien
tggtgacggcagttctagttgaaag

SEQ ID NO: 4060259 - DNA, 25 bp, Homo sapien
aaaataaccagctaggatccttggt

SEQ ID NO: 4060260 - DNA, 25 bp, Homo sapien
cagtgttaacatcatttgagtcatc

SEQ ID NO: 4060261 - DNA, 25 bp, Homo sapien
gctctcgtgctaaagtctgatcagt

SEQ ID NO: 4060262 - DNA, 25 bp, Homo sapien
tggtagattttggtgcagacaaatc

SEQ ID NO: 4060263 - DNA, 25 bp, Homo sapien
tcagcccccgtgtctggcctcttcc

SEQ ID NO: 4060264 - DNA, 25 bp, Homo sapien
gtcagcccccgtgtctggcctcttc

SEQ ID NO: 4060265 - DNA, 25 bp, Homo sapien
tgtcagcccccgtgtctggcctctt

SEQ ID NO: 4060266 - DNA, 25 bp, Homo sapien
cgtgagctactgcacctggcctctc

SEQ ID NO: 4060267 - DNA, 25 bp, Homo sapien
tccagtgacatgtaggaattgcagg

SEQ ID NO: 4060268 - DNA, 25 bp, Homo sapien
gggtccctccagtgacatgtaggaa

SEQ ID NO: 4060269 - DNA, 25 bp, Homo sapien
tccctccagtgacatgtaggaattg

SEQ ID NO: 4060270 - DNA, 25 bp, Homo sapien
tgggtccctccagtgacatgtagga

SEQ ID NO: 4060271 - DNA, 25 bp, Homo sapien
catagcttgtaactgctggtggcag

SEQ ID NO: 4060272 - DNA, 25 bp, Homo sapien
gaaggccacgagatgagttctggac

SEQ ID NO: 4060273 - DNA, 25 bp, Homo sapien
gtggcagcaacagtactatgtgttc

SEQ ID NO: 4060274 - DNA, 25 bp, Homo sapien
gacatactgcagactacacttgcca

SEQ ID NO: 4060275 - DNA, 25 bp, Homo sapien
ttctgttgtccctcaagtccccaag

SEQ ID NO: 4060276 - DNA, 25 bp, Homo sapien
ccctatggttagtgctttgtgaatc

SEQ ID NO: 4060277 - DNA, 25 bp, Homo sapien
tatctgccgattttcagctctgcac

SEQ ID NO: 4060278 - DNA, 25 bp, Homo sapien
tgtgtggcaactctcttcagtcagt

SEQ ID NO: 4060279 - DNA, 25 bp, Homo sapien
ggtcattaggctgaaacacctcttt

SEQ ID NO: 4060280 - DNA, 25 bp, Homo sapien
tttaaccagtgtggaccaatgacag

SEQ ID NO: 4060281 - DNA, 25 bp, Homo sapien
aatatttatcaagaggcatcctgtg

SEQ ID NO: 4060282 - DNA, 25 bp, Homo sapien
ccaatgacagagagtcagcagacct

SEQ ID NO: 4060283 - DNA, 25 bp, Homo sapien
tacattcgcatactaaaagacactt

SEQ ID NO: 4060284 - DNA, 25 bp, Homo sapien
gaccttacatgatagaaaagaaggg

SEQ ID NO: 4060285 - DNA, 25 bp, Homo sapien
ctcacatgagatccgagaaccctct

SEQ ID NO: 4060286 - DNA, 25 bp, Homo sapien
ttctaccagcatgtgacagcttaca

SEQ ID NO: 4060287 - DNA, 25 bp, Homo sapien
cccttcagggcctctatgcacaggc

SEQ ID NO: 4060288 - DNA, 25 bp, Homo sapien
tttgttctcgaagccatagcccagg

SEQ ID NO: 4060289 - DNA, 25 bp, Homo sapien
gaatggcagtttgggactctggcct

SEQ ID NO: 4060290 - DNA, 25 bp, Homo sapien
tacggtctgatcttcgaatggcagt

SEQ ID NO: 4060291 - DNA, 25 bp, Homo sapien
gggcatccacacttctacggtctga

SEQ ID NO: 4060292 - DNA, 25 bp, Homo sapien
gatgcccaacatcgctagagaaatg

SEQ ID NO: 4060293 - DNA, 25 bp, Homo sapien
caatttttccgcagattgggacggg

SEQ ID NO: 4060294 - DNA, 25 bp, Homo sapien
cacacacgcggaattcacaattggg

SEQ ID NO: 4060295 - DNA, 25 bp, Homo sapien
tactgaggaaaatagcaccggagtc

SEQ ID NO: 4060296 - DNA, 25 bp, Homo sapien
tgccatggaggccacaccaggtgag

SEQ ID NO: 4060297 - DNA, 25 bp, Homo sapien
gtgccatggaggccacaccaggtga

SEQ ID NO: 4060298 - DNA, 25 bp, Homo sapien
catgaacagttgtgtgaatccagga

SEQ ID NO: 4060299 - DNA, 25 bp, Homo sapien
ctactggcctgtgaacaacaacagc

SEQ ID NO: 4060300 - DNA, 25 bp, Homo sapien
tgctaatgggtccccggcactgggt

SEQ ID NO: 4060301 - DNA, 25 bp, Homo sapien
aggaggctcagatcacgtgccacag

SEQ ID NO: 4060302 - DNA, 25 bp, Homo sapien
aacatgttaacctatgagattctca

SEQ ID NO: 4060303 - DNA, 25 bp, Homo sapien
aaacatgttaacctatgagattctc

SEQ ID NO: 4060304 - DNA, 25 bp, Homo sapien
taaacatgttaacctatgagattct

SEQ ID NO: 4060305 - DNA, 25 bp, Homo sapien
gtaaacatgttaacctatgagattc

SEQ ID NO: 4060306 - DNA, 25 bp, Homo sapien
agaatagcagtatgcttccatttct

SEQ ID NO: 4060307 - DNA, 25 bp, Homo sapien
aagaatagcagtatgcttccatttc

SEQ ID NO: 4060308 - DNA, 25 bp, Homo sapien
tgccagtgctggtgaacgcgctgct

SEQ ID NO: 4060309 - DNA, 25 bp, Homo sapien
cttagttaaaaatggtcaaatctct

SEQ ID NO: 4060310 - DNA, 25 bp, Homo sapien
ccaaggcccaatcagatacagctct

SEQ ID NO: 4060311 - DNA, 25 bp, Homo sapien
taaaaatggtcaaatctcttcaatg

SEQ ID NO: 4060312 - DNA, 25 bp, Homo sapien
tcctgtgtgcgtcatgctcatcacc

SEQ ID NO: 4060313 - DNA, 25 bp, Homo sapien
catcacccggatcccatttgcatag

SEQ ID NO: 4060314 - DNA, 25 bp, Homo sapien
gatgtagagcatgaatcctggctct

SEQ ID NO: 4060315 - DNA, 25 bp, Homo sapien
gggatgtagagcatgaatcctggct

SEQ ID NO: 4060316 - DNA, 25 bp, Homo sapien
ttgggaagtggtctggagtcatagg

SEQ ID NO: 4060317 - DNA, 25 bp, Homo sapien
acagctcgagggccaatcagattga

SEQ ID NO: 4060318 - DNA, 25 bp, Homo sapien
agacagcacatccacagctcgaggg

SEQ ID NO: 4060319 - DNA, 25 bp, Homo sapien
gggcataggacaactcagacagcac

SEQ ID NO: 4060320 - DNA, 25 bp, Homo sapien
caggttgctgtctttcggcatgtgt

SEQ ID NO: 4060321 - DNA, 25 bp, Homo sapien
cctgctggtcggttggagagatcat

SEQ ID NO: 4060322 - DNA, 25 bp, Homo sapien
ttccaggtgacgtcctccaggagca

SEQ ID NO: 4060323 - DNA, 25 bp, Homo sapien
gtttcttaagccaggcccaacagtg

SEQ ID NO: 4060324 - DNA, 25 bp, Homo sapien
tccaccctcgttgagcatgccagta

SEQ ID NO: 4060325 - DNA, 25 bp, Homo sapien
ccagtatgcacaatgtggcccacag

SEQ ID NO: 4060326 - DNA, 25 bp, Homo sapien
tcagtcgtgctatgctgcagtcatt

SEQ ID NO: 4060327 - DNA, 25 bp, Homo sapien
gtagaacttctaatgcctgatcccc

SEQ ID NO: 4060328 - DNA, 25 bp, Homo sapien
tgcacccagtcaggaatcagttttg

SEQ ID NO: 4060329 - DNA, 25 bp, Homo sapien
cacccagtcaggaatcagttttgaa

SEQ ID NO: 4060330 - DNA, 25 bp, Homo sapien
tcctaatctattactttggttccca

SEQ ID NO: 4060331 - DNA, 25 bp, Homo sapien
caataaatatgcaaagtttcctaat

SEQ ID NO: 4060332 - DNA, 25 bp, Homo sapien
gactccacgatgtcaaaccaatctg

SEQ ID NO: 4060333 - DNA, 25 bp, Homo sapien
cttgacttcagactccacgatgtca

SEQ ID NO: 4060334 - DNA, 25 bp, Homo sapien
tcagactccacgatgtcaaaccaat

SEQ ID NO: 4060335 - DNA, 25 bp, Homo sapien
gatgtcaaaccaatctggcttatag

SEQ ID NO: 4060336 - DNA, 25 bp, Homo sapien
gagtttagtgtagtccacgtggttc

SEQ ID NO: 4060337 - DNA, 25 bp, Homo sapien
tttcttctgtgaacacattctagcc

SEQ ID NO: 4060338 - DNA, 25 bp, Homo sapien
cctgtagagtttagtgtagtccacg

SEQ ID NO: 4060339 - DNA, 25 bp, Homo sapien
cttctgtgaacacattctagcctat

SEQ ID NO: 4060340 - DNA, 25 bp, Homo sapien
cgtaactgcctaccggtctggaagt

SEQ ID NO: 4060341 - DNA, 25 bp, Homo sapien
gggaacaaagtactttggcctctca

SEQ ID NO: 4060342 - DNA, 25 bp, Homo sapien
catccagccggtcgtagagaggaga

SEQ ID NO: 4060343 - DNA, 25 bp, Homo sapien
gaggagaggtgcgtaactgcctacc

SEQ ID NO: 4060344 - DNA, 25 bp, Homo sapien
tctggagggctccaaaacgtttcag

SEQ ID NO: 4060345 - DNA, 25 bp, Homo sapien
ctctggagggctccaaaacgtttca

SEQ ID NO: 4060346 - DNA, 25 bp, Homo sapien
ccatgacccggtggcgcagaaaggt

SEQ ID NO: 4060347 - DNA, 25 bp, Homo sapien
gcatgacttccatgacccggtggcg

SEQ ID NO: 4060348 - DNA, 25 bp, Homo sapien
ggctcctccaccaaatgaaaggcca

SEQ ID NO: 4060349 - DNA, 25 bp, Homo sapien
ccggctcctccaccaaatgaaaggc

SEQ ID NO: 4060350 - DNA, 25 bp, Homo sapien
cggctcctccaccaaatgaaaggcc

SEQ ID NO: 4060351 - DNA, 25 bp, Homo sapien
tccggctcctccaccaaatgaaagg

SEQ ID NO: 4060352 - DNA, 25 bp, Homo sapien
ctcagaagggaactcaacagaggct

SEQ ID NO: 4060353 - DNA, 25 bp, Homo sapien
gagtctctaattctggcatcctcct

SEQ ID NO: 4060354 - DNA, 25 bp, Homo sapien
tcgcccatgatgcacctcatgtctg

SEQ ID NO: 4060355 - DNA, 25 bp, Homo sapien
aaggtctctgggcagttcaccaact

SEQ ID NO: 4060356 - DNA, 25 bp, Homo sapien
gttgtacctcatggcgatgttataa

SEQ ID NO: 4060357 - DNA, 25 bp, Homo sapien
accactgttgtacctcatggcgatg

SEQ ID NO: 4060358 - DNA, 25 bp, Homo sapien
tacctcatggcgatgttataaacat

SEQ ID NO: 4060359 - DNA, 25 bp, Homo sapien
cactgttgtacctcatggcgatgtt

SEQ ID NO: 4060360 - DNA, 25 bp, Homo sapien
taaggcactactgttataatgcagt

SEQ ID NO: 4060361 - DNA, 25 bp, Homo sapien
tataaggcactactgttataatgca

SEQ ID NO: 4060362 - DNA, 25 bp, Homo sapien
ggcactactgttataatgcagttca

SEQ ID NO: 4060363 - DNA, 25 bp, Homo sapien
acaaatataaggcactactgttata

SEQ ID NO: 4060364 - DNA, 25 bp, Homo sapien
gccagttccgaatataaattcttcc

SEQ ID NO: 4060365 - DNA, 25 bp, Homo sapien
tccagctggttcttgccctcagtga

SEQ ID NO: 4060366 - DNA, 25 bp, Homo sapien
tgccaccctgccagttccgaatata

SEQ ID NO: 4060367 - DNA, 25 bp, Homo sapien
tcttgccctcagtgaaaattggttt

SEQ ID NO: 4060368 - DNA, 25 bp, Homo sapien
ctcgttggacagacccagctcgtat

SEQ ID NO: 4060369 - DNA, 25 bp, Homo sapien
gatactaaccggctcctcgttggac

SEQ ID NO: 4060370 - DNA, 25 bp, Homo sapien
ggcatgtagcgggatactaaccggc

SEQ ID NO: 4060371 - DNA, 25 bp, Homo sapien
aggtagaagtgttcgcaggcatgta

SEQ ID NO: 4060372 - DNA, 25 bp, Homo sapien
tgcctgaccatttgctggccttcct

SEQ ID NO: 4060373 - DNA, 25 bp, Homo sapien
cctgaccatttgctggccttcctga

SEQ ID NO: 4060374 - DNA, 25 bp, Homo sapien
gtcaatgcctgaccatttgctggcc

SEQ ID NO: 4060375 - DNA, 25 bp, Homo sapien
aatgcctgaccatttgctggccttc

SEQ ID NO: 4060376 - DNA, 25 bp, Homo sapien
tatttgcagactaagtgtaggtttc

SEQ ID NO: 4060377 - DNA, 25 bp, Homo sapien
caggatagcacccatcaacccagtg

SEQ ID NO: 4060378 - DNA, 25 bp, Homo sapien
gtgtaggtttctgatttagaatacc

SEQ ID NO: 4060379 - DNA, 25 bp, Homo sapien
gcttctatttgcagactaagtgtag

SEQ ID NO: 4060380 - DNA, 25 bp, Homo sapien
gaagaacagatgtccggtcatagat

SEQ ID NO: 4060381 - DNA, 25 bp, Homo sapien
tgtcctttatcggtctccactccag

SEQ ID NO: 4060382 - DNA, 25 bp, Homo sapien
tctccactccagtaacttgaccttt

SEQ ID NO: 4060383 - DNA, 25 bp, Homo sapien
tgaagaacagatgtccggtcataga

SEQ ID NO: 4060384 - DNA, 25 bp, Homo sapien
caccaggtcgtgcacgttgaggaga

SEQ ID NO: 4060385 - DNA, 25 bp, Homo sapien
cggccactttcttgggggagatgat

SEQ ID NO: 4060386 - DNA, 25 bp, Homo sapien
gtcagcggaagacaccactgcatcc

SEQ ID NO: 4060387 - DNA, 25 bp, Homo sapien
aagagccacgtcagcggaagacacc

SEQ ID NO: 4060388 - DNA, 25 bp, Homo sapien
ggacacgcttctagactcttacgta

SEQ ID NO: 4060389 - DNA, 25 bp, Homo sapien
gaacacaagggacaatgacattcac

SEQ ID NO: 4060390 - DNA, 25 bp, Homo sapien
tgccacagaacacaagggacaatga

SEQ ID NO: 4060391 - DNA, 25 bp, Homo sapien
gtcaggacacgcttctagactctta

SEQ ID NO: 4060392 - DNA, 25 bp, Homo sapien
tcggtcctgagtttgggccagaaag

SEQ ID NO: 4060393 - DNA, 25 bp, Homo sapien
cagggagatcagtcggtcctgagtt

SEQ ID NO: 4060394 - DNA, 25 bp, Homo sapien
tcagccctgcgttgatgcgcttcag

SEQ ID NO: 4060395 - DNA, 25 bp, Homo sapien
aagattgagcctgtccttgtgtaac

SEQ ID NO: 4060396 - DNA, 25 bp, Homo sapien
gctcaatggtcaagtgcctggcagt

SEQ ID NO: 4060397 - DNA, 25 bp, Homo sapien
ttctgctcaatggtcaagtgcctgg

SEQ ID NO: 4060398 - DNA, 25 bp, Homo sapien
tctgctcaatggtcaagtgcctggc

SEQ ID NO: 4060399 - DNA, 25 bp, Homo sapien
atcttctgctcaatggtcaagtgcc

SEQ ID NO: 4060400 - DNA, 25 bp, Homo sapien
ctgagattaacagatgcgcataacc

SEQ ID NO: 4060401 - DNA, 25 bp, Homo sapien
ttaacagatgcgcataaccactccc

SEQ ID NO: 4060402 - DNA, 25 bp, Homo sapien
tgcgcataaccactcccggttaatt

SEQ ID NO: 4060403 - DNA, 25 bp, Homo sapien
cagatgcgcataaccactcccggtt

SEQ ID NO: 4060404 - DNA, 25 bp, Homo sapien
aggacaatatccttccaccccattt

SEQ ID NO: 4060405 - DNA, 25 bp, Homo sapien
cacagaagtgcccgtgattccacct

SEQ ID NO: 4060406 - DNA, 25 bp, Homo sapien
agaagtgcccgtgattccacctcca

SEQ ID NO: 4060407 - DNA, 25 bp, Homo sapien
aaaggacaatatccttccaccccat

SEQ ID NO: 4060408 - DNA, 25 bp, Homo sapien
ggctggctctttgtcttccaacaat

SEQ ID NO: 4060409 - DNA, 25 bp, Homo sapien
tgtcttccaacaatcgacagcaacc

SEQ ID NO: 4060410 - DNA, 25 bp, Homo sapien
cagggccatggaacgcgcctcggca

SEQ ID NO: 4060411 - DNA, 25 bp, Homo sapien
tctttgtcttccaacaatcgacagc

SEQ ID NO: 4060412 - DNA, 25 bp, Homo sapien
tcaccaactagatctcaggaactca

SEQ ID NO: 4060413 - DNA, 25 bp, Homo sapien
tgtctctcaccaactagatctcagg

SEQ ID NO: 4060414 - DNA, 25 bp, Homo sapien
catgtctctcaccaactagatctca

SEQ ID NO: 4060415 - DNA, 25 bp, Homo sapien
tctcaccaactagatctcaggaact

SEQ ID NO: 4060416 - DNA, 25 bp, Homo sapien
tggagagcggatggtagaattataa

SEQ ID NO: 4060417 - DNA, 25 bp, Homo sapien
aaaaacagagtcgacttcctaggct

SEQ ID NO: 4060418 - DNA, 25 bp, Homo sapien
attataaaaacagagtcgacttcct

SEQ ID NO: 4060419 - DNA, 25 bp, Homo sapien
tggtggagagcggatggtagaatta

SEQ ID NO: 4060420 - DNA, 25 bp, Homo sapien
acccacttacatctgcaaccatctc

SEQ ID NO: 4060421 - DNA, 25 bp, Homo sapien
gacccacttacatctgcaaccatct

SEQ ID NO: 4060422 - DNA, 25 bp, Homo sapien
ccacttacatctgcaaccatctctt

SEQ ID NO: 4060423 - DNA, 25 bp, Homo sapien
cccacttacatctgcaaccatctct

SEQ ID NO: 4060424 - DNA, 25 bp, Homo sapien
tcctgaactcctgaggtaggaggat

SEQ ID NO: 4060425 - DNA, 25 bp, Homo sapien
gtgcttggcgccaaaaaagggatct

SEQ ID NO: 4060426 - DNA, 25 bp, Homo sapien
tgcagtgcgcagagtcgcgccactg

SEQ ID NO: 4060427 - DNA, 25 bp, Homo sapien
tcaaaaaagcccagggtgcttggcg

SEQ ID NO: 4060428 - DNA, 25 bp, Homo sapien
tctgtatggctgcagcgttgcgcac

SEQ ID NO: 4060429 - DNA, 25 bp, Homo sapien
tggactgccggtcacaaggaagact

SEQ ID NO: 4060430 - DNA, 25 bp, Homo sapien
actagttctgaaagcacaagcggac

SEQ ID NO: 4060431 - DNA, 25 bp, Homo sapien
tattccaacaagaccaaggtgctag

SEQ ID NO: 4060432 - DNA, 25 bp, Homo sapien
gtagccgaggacacaagccaaggca

SEQ ID NO: 4060433 - DNA, 25 bp, Homo sapien
ggctagacaagctggagttggctct

SEQ ID NO: 4060434 - DNA, 25 bp, Homo sapien
caagcccaagactggggagcccgag

SEQ ID NO: 4060435 - DNA, 25 bp, Homo sapien
agggatggaggaccgggctagacaa

SEQ ID NO: 4060436 - DNA, 25 bp, Homo sapien
gcggggcgaagcgagcaaaaagttc

SEQ ID NO: 4060437 - DNA, 25 bp, Homo sapien
cccacgggctccgcgctcagctaca

SEQ ID NO: 4060438 - DNA, 25 bp, Homo sapien
gcgggagcaatgcggcagccacaac

SEQ ID NO: 4060439 - DNA, 25 bp, Homo sapien
cagcccggcgggagcaatgcggcag

SEQ ID NO: 4060440 - DNA, 25 bp, Homo sapien
cctgccacctccgatggatccactg

SEQ ID NO: 4060441 - DNA, 25 bp, Homo sapien
cagtggataactcagcatcccagcc

SEQ ID NO: 4060442 - DNA, 25 bp, Homo sapien
tgctccagtggataactcagcatcc

SEQ ID NO: 4060443 - DNA, 25 bp, Homo sapien
tccagtggataactcagcatcccag

SEQ ID NO: 4060444 - DNA, 25 bp, Homo sapien
ggccttccgtcatcagccgtaaatg

SEQ ID NO: 4060445 - DNA, 25 bp, Homo sapien
cttccgtcatcagccgtaaatgatg

SEQ ID NO: 4060446 - DNA, 25 bp, Homo sapien
taaatgatgatttactgctgttacc

SEQ ID NO: 4060447 - DNA, 25 bp, Homo sapien
ctggccttccgtcatcagccgtaaa

SEQ ID NO: 4060448 - DNA, 25 bp, Homo sapien
ttgttgcttaggatatgaatggctg

SEQ ID NO: 4060449 - DNA, 25 bp, Homo sapien
gttgcttaggatatgaatggctgag

SEQ ID NO: 4060450 - DNA, 25 bp, Homo sapien
cttaggatatgaatggctgagcgga

SEQ ID NO: 4060451 - DNA, 25 bp, Homo sapien
ttttgttgcttaggatatgaatggc

SEQ ID NO: 4060452 - DNA, 25 bp, Homo sapien
caaagattcatataatccaagagag

SEQ ID NO: 4060453 - DNA, 25 bp, Homo sapien
gatatataataaatgcatccaatgt

SEQ ID NO: 4060454 - DNA, 25 bp, Homo sapien
tatttagagggattcttttaccatg

SEQ ID NO: 4060455 - DNA, 25 bp, Homo sapien
aagaaaagataactactggccaggt

SEQ ID NO: 4060456 - DNA, 25 bp, Homo sapien
ctggacatcatgatccacatacctc

SEQ ID NO: 4060457 - DNA, 25 bp, Homo sapien
tggacatcatgatccacatacctcg

SEQ ID NO: 4060458 - DNA, 25 bp, Homo sapien
tctggacatcatgatccacatacct

SEQ ID NO: 4060459 - DNA, 25 bp, Homo sapien
ggacatcatgatccacatacctcgg

SEQ ID NO: 4060460 - DNA, 25 bp, Homo sapien
ttatcttgctgcagaagagatggga

SEQ ID NO: 4060461 - DNA, 25 bp, Homo sapien
ccctcaaactctgtgaactgaacct

SEQ ID NO: 4060462 - DNA, 25 bp, Homo sapien
ctgccctcaaactctgtgaactgaa

SEQ ID NO: 4060463 - DNA, 25 bp, Homo sapien
caaactctgtgaactgaaccttgtt

SEQ ID NO: 4060464 - DNA, 25 bp, Homo sapien
ctcaaactctgtgaactgaaccttg

SEQ ID NO: 4060465 - DNA, 25 bp, Homo sapien
gcaatcctctgcttccgatggagtt

SEQ ID NO: 4060466 - DNA, 25 bp, Homo sapien
cttccgatggagttagttgtgatga

SEQ ID NO: 4060467 - DNA, 25 bp, Homo sapien
tgaactgcggggttaatgacaccat

SEQ ID NO: 4060468 - DNA, 25 bp, Homo sapien
aaggatctctctatggctgatggtc

SEQ ID NO: 4060469 - DNA, 25 bp, Homo sapien
ctgccaggtcaggacatggatacat

SEQ ID NO: 4060470 - DNA, 25 bp, Homo sapien
gccaggtcaggacatggatacattt

SEQ ID NO: 4060471 - DNA, 25 bp, Homo sapien
ccaggtcaggacatggatacatttt

SEQ ID NO: 4060472 - DNA, 25 bp, Homo sapien
tgccaggtcaggacatggatacatt

SEQ ID NO: 4060473 - DNA, 25 bp, Homo sapien
tgattgacgcactgccaggagtagc

SEQ ID NO: 4060474 - DNA, 25 bp, Homo sapien
aggacgctctgattgacgcactgcc

SEQ ID NO: 4060475 - DNA, 25 bp, Homo sapien
tctgattgacgcactgccaggagta

SEQ ID NO: 4060476 - DNA, 25 bp, Homo sapien
cgctctgattgacgcactgccagga

SEQ ID NO: 4060477 - DNA, 25 bp, Homo sapien
ctgcggatgtcacatgggcaggaca

SEQ ID NO: 4060478 - DNA, 25 bp, Homo sapien
gtgggagctactgtacgcctggcct

SEQ ID NO: 4060479 - DNA, 25 bp, Homo sapien
ccaagtatgctactacaggaacaca

SEQ ID NO: 4060480 - DNA, 25 bp, Homo sapien
tatctaagctgtttccctgaaaatg

SEQ ID NO: 4060481 - DNA, 25 bp, Homo sapien
caacctcccaagtatgctactacag

SEQ ID NO: 4060482 - DNA, 25 bp, Homo sapien
agagacagggtttagtagagaccat

SEQ ID NO: 4060483 - DNA, 25 bp, Homo sapien
ccaggccagagtgcatgattttggg

SEQ ID NO: 4060484 - DNA, 25 bp, Homo sapien
gtgcatgattttgggtcactgccac

SEQ ID NO: 4060485 - DNA, 25 bp, Homo sapien
tgggcaaaagcgagaccccaggcca

SEQ ID NO: 4060486 - DNA, 25 bp, Homo sapien
gctgggcatggtagtgcacacctgt

SEQ ID NO: 4060487 - DNA, 25 bp, Homo sapien
cccatctctacaaaaaacagctggg

SEQ ID NO: 4060488 - DNA, 25 bp, Homo sapien
atctctacaaaaaacagctgggcat

SEQ ID NO: 4060489 - DNA, 25 bp, Homo sapien
agctgggcatggtagtgcacacctg

SEQ ID NO: 4060490 - DNA, 25 bp, Homo sapien
gaacacaacgggattcccagggcag

SEQ ID NO: 4060491 - DNA, 25 bp, Homo sapien
tagagacactctatcaccctcctgt

SEQ ID NO: 4060492 - DNA, 25 bp, Homo sapien
cagttcctagtgcatagtctggctg

SEQ ID NO: 4060493 - DNA, 25 bp, Homo sapien
taatatagagacactctatcaccct

SEQ ID NO: 4060494 - DNA, 25 bp, Homo sapien
tggcagagtccctccaacgattggg

SEQ ID NO: 4060495 - DNA, 25 bp, Homo sapien
cccagattcttttgtgacctgaagg

SEQ ID NO: 4060496 - DNA, 25 bp, Homo sapien
ggagcctctgaagcaatctttagag

SEQ ID NO: 4060497 - DNA, 25 bp, Homo sapien
ggtcattggaactggcagagtccct

SEQ ID NO: 4060498 - DNA, 25 bp, Homo sapien
ccttttgagatgctcaggacaggca

SEQ ID NO: 4060499 - DNA, 25 bp, Homo sapien
tatagaaagccaagtgcaaacgctg

SEQ ID NO: 4060500 - DNA, 25 bp, Homo sapien
ccaggcttggaacctcgatggccat

SEQ ID NO: 4060501 - DNA, 25 bp, Homo sapien
tccaagacggcgttctgggtgctct

SEQ ID NO: 4060502 - DNA, 25 bp, Homo sapien
gcacgtactgaactgtttgtggaac

SEQ ID NO: 4060503 - DNA, 25 bp, Homo sapien
gaactgtttgtggaaccatctatgc

SEQ ID NO: 4060504 - DNA, 25 bp, Homo sapien
tttgtggaaccatctatgccacctc

SEQ ID NO: 4060505 - DNA, 25 bp, Homo sapien
tactgaactgtttgtggaaccatct

SEQ ID NO: 4060506 - DNA, 25 bp, Homo sapien
aggaccagcgctgcttcggcttcgc

SEQ ID NO: 4060507 - DNA, 25 bp, Homo sapien
cgctgcttcggcttcgcagcctcca

SEQ ID NO: 4060508 - DNA, 25 bp, Homo sapien
gaccagcgctgcttcggcttcgcag

SEQ ID NO: 4060509 - DNA, 25 bp, Homo sapien
agagcaggaaaatcagactccaggc

SEQ ID NO: 4060510 - DNA, 25 bp, Homo sapien
gggagggcaatgagtccaaacgcct

SEQ ID NO: 4060511 - DNA, 25 bp, Homo sapien
gagggcaatgagtccaaacgccttc

SEQ ID NO: 4060512 - DNA, 25 bp, Homo sapien
gcaatgagtccaaacgccttcccct

SEQ ID NO: 4060513 - DNA, 25 bp, Homo sapien
gggcaatgagtccaaacgccttccc

SEQ ID NO: 4060514 - DNA, 25 bp, Homo sapien
aagatgccagagcaagggcttttca

SEQ ID NO: 4060515 - DNA, 25 bp, Homo sapien
caagatgccagagcaagggcttttc

SEQ ID NO: 4060516 - DNA, 25 bp, Homo sapien
agatgccagagcaagggcttttcat

SEQ ID NO: 4060517 - DNA, 25 bp, Homo sapien
gtgttctatgtagctgaggtatggc

SEQ ID NO: 4060518 - DNA, 25 bp, Homo sapien
tgtcactgaagatcctagtagcagg

SEQ ID NO: 4060519 - DNA, 25 bp, Homo sapien
cgggcagttaggtgttctatgtagc

SEQ ID NO: 4060520 - DNA, 25 bp, Homo sapien
gcaggaactcccttgcgggcagtta

SEQ ID NO: 4060521 - DNA, 25 bp, Homo sapien
taagaagccatgtgctaaagatgtc

SEQ ID NO: 4060522 - DNA, 25 bp, Homo sapien
gatgccctgggtgacctaagaagcc

SEQ ID NO: 4060523 - DNA, 25 bp, Homo sapien
gatgtaagcacgagaaagaggaact

SEQ ID NO: 4060524 - DNA, 25 bp, Homo sapien
caagctggtaacctggatgccctgg

SEQ ID NO: 4060525 - DNA, 25 bp, Homo sapien
tgaaacgccacagataacaggcata

SEQ ID NO: 4060526 - DNA, 25 bp, Homo sapien
taagtcaggctttgtacgttttcca

SEQ ID NO: 4060527 - DNA, 25 bp, Homo sapien
atgaaacgccacagataacaggcat

SEQ ID NO: 4060528 - DNA, 25 bp, Homo sapien
tgtaagtcaggctttgtacgttttc

SEQ ID NO: 4060529 - DNA, 25 bp, Homo sapien
tgtcatggtccgtgtttttctccgg

SEQ ID NO: 4060530 - DNA, 25 bp, Homo sapien
cagggatcccctttgaggtgcagaa

SEQ ID NO: 4060531 - DNA, 25 bp, Homo sapien
ttttctccggatcgttgggcatgcg

SEQ ID NO: 4060532 - DNA, 25 bp, Homo sapien
gccaaggccttttgatgtcatggtc

SEQ ID NO: 4060533 - DNA, 25 bp, Homo sapien
atctgtgtgaccaccccgcgtaggt

SEQ ID NO: 4060534 - DNA, 25 bp, Homo sapien
gctcgcaggcgaccttgcgccagtg

SEQ ID NO: 4060535 - DNA, 25 bp, Homo sapien
ttcgcgggaggtagagagagctggg

SEQ ID NO: 4060536 - DNA, 25 bp, Homo sapien
ggtccgcgctgagccaggacacagg

SEQ ID NO: 4060537 - DNA, 25 bp, Homo sapien
ttccctttgaaatgagcatgcacag

SEQ ID NO: 4060538 - DNA, 25 bp, Homo sapien
taccattggccctggtgcgatgaca

SEQ ID NO: 4060539 - DNA, 25 bp, Homo sapien
gggagacccagaacttccagagagt

SEQ ID NO: 4060540 - DNA, 25 bp, Homo sapien
tggaggccgctgcagtgaagcctca

SEQ ID NO: 4060541 - DNA, 25 bp, Homo sapien
gctgattcataatttaataccccgt

SEQ ID NO: 4060542 - DNA, 25 bp, Homo sapien
tgattcataatttaataccccgtgg

SEQ ID NO: 4060543 - DNA, 25 bp, Homo sapien
aataccccgtggggttcatgccaca

SEQ ID NO: 4060544 - DNA, 25 bp, Homo sapien
ttaataccccgtggggttcatgcca

SEQ ID NO: 4060545 - DNA, 25 bp, Homo sapien
agagcagcctttttggaccactggc

SEQ ID NO: 4060546 - DNA, 25 bp, Homo sapien
acttctggcattgtgcaaggtctga

SEQ ID NO: 4060547 - DNA, 25 bp, Homo sapien
gacaggtaagcagagccggtgctcc

SEQ ID NO: 4060548 - DNA, 25 bp, Homo sapien
ggcgaagggccccagcttcttctaa

SEQ ID NO: 4060549 - DNA, 25 bp, Homo sapien
actggcagatgtaacggtttcgggt

SEQ ID NO: 4060550 - DNA, 25 bp, Homo sapien
ctggcagatgtaacggtttcgggtt

SEQ ID NO: 4060551 - DNA, 25 bp, Homo sapien
aactggcagatgtaacggtttcggg

SEQ ID NO: 4060552 - DNA, 25 bp, Homo sapien
gcccacttgagaggtacacctggga

SEQ ID NO: 4060553 - DNA, 25 bp, Homo sapien
gaatagacagcccacttgagaggta

SEQ ID NO: 4060554 - DNA, 25 bp, Homo sapien
tggctgaaatcgctggagcccttgg

SEQ ID NO: 4060555 - DNA, 25 bp, Homo sapien
gcccagacttcctccaggcaagagg

SEQ ID NO: 4060556 - DNA, 25 bp, Homo sapien
agagggttcttgctacaggatggct

SEQ ID NO: 4060557 - DNA, 25 bp, Homo sapien
agagcagggtggggccacgtgacca

SEQ ID NO: 4060558 - DNA, 25 bp, Homo sapien
ggccacgtgaccagagggttcttgc

SEQ ID NO: 4060559 - DNA, 25 bp, Homo sapien
tgaccagagggttcttgctacagga

SEQ ID NO: 4060560 - DNA, 25 bp, Homo sapien
ttgtattgtgaatgagtgcaggtgg

SEQ ID NO: 4060561 - DNA, 25 bp, Homo sapien
tgtattgtgaatgagtgcaggtggg

SEQ ID NO: 4060562 - DNA, 25 bp, Homo sapien
gttgtattgtgaatgagtgcaggtg

SEQ ID NO: 4060563 - DNA, 25 bp, Homo sapien
ctaaggaatgctggcatcagtgtaa

SEQ ID NO: 4060564 - DNA, 25 bp, Homo sapien
gtgacgtgccttccggcttgcatct

SEQ ID NO: 4060565 - DNA, 25 bp, Homo sapien
acgtgccttccggcttgcatctccc

SEQ ID NO: 4060566 - DNA, 25 bp, Homo sapien
gccttccggcttgcatctccctcac

SEQ ID NO: 4060567 - DNA, 25 bp, Homo sapien
gtgccttccggcttgcatctccctc

SEQ ID NO: 4060568 - DNA, 25 bp, Homo sapien
agctgtgcccacaactctctggcac

SEQ ID NO: 4060569 - DNA, 25 bp, Homo sapien
ccaccaccggcccacaccagctgtg

SEQ ID NO: 4060570 - DNA, 25 bp, Homo sapien
ccagctgtgcccacaactctctggc

SEQ ID NO: 4060571 - DNA, 25 bp, Homo sapien
accaccggcccacaccagctgtgcc

SEQ ID NO: 4060572 - DNA, 25 bp, Homo sapien
agcggaaggagtccttggcggtctt

SEQ ID NO: 4060573 - DNA, 25 bp, Homo sapien
gagtccttggcggtcttgtaggtga

SEQ ID NO: 4060574 - DNA, 25 bp, Homo sapien
gaaggagtccttggcggtcttgtag

SEQ ID NO: 4060575 - DNA, 25 bp, Homo sapien
tccttggcggtcttgtaggtgagcc

SEQ ID NO: 4060576 - DNA, 25 bp, Homo sapien
gggtagtcaaggttggcccactcag

SEQ ID NO: 4060577 - DNA, 25 bp, Homo sapien
ggggtagtcaaggttggcccactca

SEQ ID NO: 4060578 - DNA, 25 bp, Homo sapien
gtagtcaaggttggcccactcagac

SEQ ID NO: 4060579 - DNA, 25 bp, Homo sapien
ggtagtcaaggttggcccactcaga

SEQ ID NO: 4060580 - DNA, 25 bp, Homo sapien
tggcagccgccatggcccagggttc

SEQ ID NO: 4060581 - DNA, 25 bp, Homo sapien
ctggcagccgccatggcccagggtt

SEQ ID NO: 4060582 - DNA, 25 bp, Homo sapien
gctccaggccctcaacacacccttg

SEQ ID NO: 4060583 - DNA, 25 bp, Homo sapien
ctcaacacacccttgccatctgctg

SEQ ID NO: 4060584 - DNA, 25 bp, Homo sapien
gcagggtggggcatcacaacccctt

SEQ ID NO: 4060585 - DNA, 25 bp, Homo sapien
agcagggtggggcatcacaacccct

SEQ ID NO: 4060586 - DNA, 25 bp, Homo sapien
ctgcagcagggtggggcatcacaac

SEQ ID NO: 4060587 - DNA, 25 bp, Homo sapien
gcagcagggtggggcatcacaaccc

SEQ ID NO: 4060588 - DNA, 25 bp, Homo sapien
atacccccaatcagctgggcactca

SEQ ID NO: 4060589 - DNA, 25 bp, Homo sapien
catacccccaatcagctgggcactc

SEQ ID NO: 4060590 - DNA, 25 bp, Homo sapien
ccatacccccaatcagctgggcact

SEQ ID NO: 4060591 - DNA, 25 bp, Homo sapien
tacccccaatcagctgggcactcac

SEQ ID NO: 4060592 - DNA, 25 bp, Homo sapien
gcccagatagaaggcgaggatgtcc

SEQ ID NO: 4060593 - DNA, 25 bp, Homo sapien
tcaatcacctcgttggtggtctcca

SEQ ID NO: 4060594 - DNA, 25 bp, Homo sapien
tagaaggcgaggatgtcctgcactt

SEQ ID NO: 4060595 - DNA, 25 bp, Homo sapien
gaagttcctggtctcgaagtcactg

SEQ ID NO: 4060596 - DNA, 25 bp, Homo sapien
ggctctgtaataggtgtctgcctct

SEQ ID NO: 4060597 - DNA, 25 bp, Homo sapien
acatttcatcctggctctgtaatag

SEQ ID NO: 4060598 - DNA, 25 bp, Homo sapien
accatgaagcagtctccgtcgatcc

SEQ ID NO: 4060599 - DNA, 25 bp, Homo sapien
gacaccatgaagcagtctccgtcga

SEQ ID NO: 4060600 - DNA, 25 bp, Homo sapien
cccgtagccgatgtcacagacgcac

SEQ ID NO: 4060601 - DNA, 25 bp, Homo sapien
tgggctcccccgtagccgatgtcac

SEQ ID NO: 4060602 - DNA, 25 bp, Homo sapien
tcccccgtagccgatgtcacagacg

SEQ ID NO: 4060603 - DNA, 25 bp, Homo sapien
ggctcccccgtagccgatgtcacag

SEQ ID NO: 4060604 - DNA, 25 bp, Homo sapien
tgcacacactgcaggctgcacctca

SEQ ID NO: 4060605 - DNA, 25 bp, Homo sapien
ctcctcccggaaccggccgtgcaca

SEQ ID NO: 4060606 - DNA, 25 bp, Homo sapien
gccgtgcacacactgcaggctgcac

SEQ ID NO: 4060607 - DNA, 25 bp, Homo sapien
gagcactcctcctcccggaaccggc

SEQ ID NO: 4060608 - DNA, 25 bp, Homo sapien
agctcatgcgacaaggattcctggg

SEQ ID NO: 4060609 - DNA, 25 bp, Homo sapien
ctggcagctcatgcgacaaggattc

SEQ ID NO: 4060610 - DNA, 25 bp, Homo sapien
tgctgatgttgagacgtccatggtt

SEQ ID NO: 4060611 - DNA, 25 bp, Homo sapien
ttggcagtatctgcccgtgtagcca

SEQ ID NO: 4060612 - DNA, 25 bp, Homo sapien
atggtcccaggctttgaagcagcct

SEQ ID NO: 4060613 - DNA, 25 bp, Homo sapien
tgtcttcccgttgacctcccagttg

SEQ ID NO: 4060614 - DNA, 25 bp, Homo sapien
gctgtgcagagcgaacaccaggcac

SEQ ID NO: 4060615 - DNA, 25 bp, Homo sapien
gattgtcttcccgttgacctcccag

SEQ ID NO: 4060616 - DNA, 25 bp, Homo sapien
ggcacagacaaaggcttctatcgct

SEQ ID NO: 4060617 - DNA, 25 bp, Homo sapien
gcaggtggcgttgcgagcacactct

SEQ ID NO: 4060618 - DNA, 25 bp, Homo sapien
cacttgcagggtgcgccacaggccg

SEQ ID NO: 4060619 - DNA, 25 bp, Homo sapien
gcagctgcatgttccagcccacttg

SEQ ID NO: 4060620 - DNA, 25 bp, Homo sapien
tgcgtgtagtgggtgcaggtggcgt

SEQ ID NO: 4060621 - DNA, 25 bp, Homo sapien
gcaggagtacccaaccacggaggtc

SEQ ID NO: 4060622 - DNA, 25 bp, Homo sapien
gctgccagccaacgaccaccgcagc

SEQ ID NO: 4060623 - DNA, 25 bp, Homo sapien
ctggagccctagaggcccggagggt

SEQ ID NO: 4060624 - DNA, 25 bp, Homo sapien
agctgggagcacccctggttgccca

SEQ ID NO: 4060625 - DNA, 25 bp, Homo sapien
gagcccagctgggtcgggtactcac

SEQ ID NO: 4060626 - DNA, 25 bp, Homo sapien
gccctctggggtccgcgcctccggc

SEQ ID NO: 4060627 - DNA, 25 bp, Homo sapien
cctggtcaagtggaagggcacctgg

SEQ ID NO: 4060628 - DNA, 25 bp, Homo sapien
cgcctccggccacccccctggcaga

SEQ ID NO: 4060629 - DNA, 25 bp, Homo sapien
cctccgcatgtcagccgcagggggc

SEQ ID NO: 4060630 - DNA, 25 bp, Homo sapien
ctgcgcaggcggttgtgcagggaga

SEQ ID NO: 4060631 - DNA, 25 bp, Homo sapien
ctccgcatgtcagccgcagggggct

SEQ ID NO: 4060632 - DNA, 25 bp, Homo sapien
cccagctgcgcaggcggttgtgcag

SEQ ID NO: 4060633 - DNA, 25 bp, Homo sapien
agaaggtcaggcagcccgaggatgg

SEQ ID NO: 4060634 - DNA, 25 bp, Homo sapien
cacggcagaataagcatgtgtccct

SEQ ID NO: 4060635 - DNA, 25 bp, Homo sapien
tgtccctgcccttggaaaacaagat

SEQ ID NO: 4060636 - DNA, 25 bp, Homo sapien
gcatagcaatggagcgaggctgaga

SEQ ID NO: 4060637 - DNA, 25 bp, Homo sapien
ctccggccatcggagcctgctcctg

SEQ ID NO: 4060638 - DNA, 25 bp, Homo sapien
ggctgggctggtggacaaaagaggg

SEQ ID NO: 4060639 - DNA, 25 bp, Homo sapien
ggatggagctattcacaatctccag

SEQ ID NO: 4060640 - DNA, 25 bp, Homo sapien
tggatggagctattcacaatctcca

SEQ ID NO: 4060641 - DNA, 25 bp, Homo sapien
agtgtcctccgagcccactgatggc

SEQ ID NO: 4060642 - DNA, 25 bp, Homo sapien
gctgcagattagtgaccgatggccg

SEQ ID NO: 4060643 - DNA, 25 bp, Homo sapien
gattagtgaccgatggccgtgtcct

SEQ ID NO: 4060644 - DNA, 25 bp, Homo sapien
gcagattagtgaccgatggccgtgt

SEQ ID NO: 4060645 - DNA, 25 bp, Homo sapien
caccagtggaatgtggctatcgtca

SEQ ID NO: 4060646 - DNA, 25 bp, Homo sapien
aggacagccttgcaaaccaactacg

SEQ ID NO: 4060647 - DNA, 25 bp, Homo sapien
ccatgaaggcggtctggaactgcat

SEQ ID NO: 4060648 - DNA, 25 bp, Homo sapien
gccaggcatacaggccatgaaggcg

SEQ ID NO: 4060649 - DNA, 25 bp, Homo sapien
cctttcttcaaagccttgaaatctt

SEQ ID NO: 4060650 - DNA, 25 bp, Homo sapien
ctgaagcagctcctttcttcaaagc

SEQ ID NO: 4060651 - DNA, 25 bp, Homo sapien
gcagctcctttcttcaaagccttga

SEQ ID NO: 4060652 - DNA, 25 bp, Homo sapien
tcaaagccttgaaatcttgttgatg

SEQ ID NO: 4060653 - DNA, 25 bp, Homo sapien
cagccactacctgacagcttttaag

SEQ ID NO: 4060654 - DNA, 25 bp, Homo sapien
tgacagcttttaagccaaagcttag

SEQ ID NO: 4060655 - DNA, 25 bp, Homo sapien
gcacccagccactacctgacagctt

SEQ ID NO: 4060656 - DNA, 25 bp, Homo sapien
agcttttaagccaaagcttagtgga

SEQ ID NO: 4060657 - DNA, 25 bp, Homo sapien
tcaattctgttttactagtaagctc

SEQ ID NO: 4060658 - DNA, 25 bp, Homo sapien
caattaagtcataaggttggagccc

SEQ ID NO: 4060659 - DNA, 25 bp, Homo sapien
gcattgatacttaatggacaatgtg

SEQ ID NO: 4060660 - DNA, 25 bp, Homo sapien
tagtaagctcattgctctggtttta

SEQ ID NO: 4060661 - DNA, 25 bp, Homo sapien
ttagcacagatggggtttcaccatg

SEQ ID NO: 4060662 - DNA, 25 bp, Homo sapien
ttataggtacgcgccaccacgtctg

SEQ ID NO: 4060663 - DNA, 25 bp, Homo sapien
tagcacagatggggtttcaccatgt

SEQ ID NO: 4060664 - DNA, 25 bp, Homo sapien
ggattataggtacgcgccaccacgt

SEQ ID NO: 4060665 - DNA, 25 bp, Homo sapien
gacaccacacatcagtttgggaaga

SEQ ID NO: 4060666 - DNA, 25 bp, Homo sapien
aaaggccagaagctcggtgtttttg

SEQ ID NO: 4060667 - DNA, 25 bp, Homo sapien
gacatgaatctaacgctctgcacct

SEQ ID NO: 4060668 - DNA, 25 bp, Homo sapien
tattctgttccactagtccatctgt

SEQ ID NO: 4060669 - DNA, 25 bp, Homo sapien
tctccaagacgctcacggacaggct

SEQ ID NO: 4060670 - DNA, 25 bp, Homo sapien
aaatctcccttgtagggtgcactgg

SEQ ID NO: 4060671 - DNA, 25 bp, Homo sapien
tgcactggtgacaaggagcctgaac

SEQ ID NO: 4060672 - DNA, 25 bp, Homo sapien
gactattaaggcttcagctgggcag

SEQ ID NO: 4060673 - DNA, 25 bp, Homo sapien
cctgcaaactctttattaaattctc

SEQ ID NO: 4060674 - DNA, 25 bp, Homo sapien
tctttattaaattctcccatttcat

SEQ ID NO: 4060675 - DNA, 25 bp, Homo sapien
ctctttattaaattctcccatttca

SEQ ID NO: 4060676 - DNA, 25 bp, Homo sapien
caaactctttattaaattctcccat

SEQ ID NO: 4060677 - DNA, 25 bp, Homo sapien
aaatgcacattatgttcagaacata

SEQ ID NO: 4060678 - DNA, 25 bp, Homo sapien
aacatctcaaaattacacagcatga

SEQ ID NO: 4060679 - DNA, 25 bp, Homo sapien
tcagaacatatctcagtaacatctc

SEQ ID NO: 4060680 - DNA, 25 bp, Homo sapien
cattatgttcagaacatatctcagt

SEQ ID NO: 4060681 - DNA, 25 bp, Homo sapien
ggctttccggaggtctctgcccagt

SEQ ID NO: 4060682 - DNA, 25 bp, Homo sapien
ctgttttccggatggactggtttgg

SEQ ID NO: 4060683 - DNA, 25 bp, Homo sapien
acagcatttgctgtacagactgttt

SEQ ID NO: 4060684 - DNA, 25 bp, Homo sapien
agcgctcccgctgccggctttccgg

SEQ ID NO: 4060685 - DNA, 25 bp, Homo sapien
gcacacagcacagtgtcctatacat

SEQ ID NO: 4060686 - DNA, 25 bp, Homo sapien
tagcatgtctgacagaaagccctgc

SEQ ID NO: 4060687 - DNA, 25 bp, Homo sapien
ggcaaaacacaatctagaggcactg

SEQ ID NO: 4060688 - DNA, 25 bp, Homo sapien
tgtcaactctacattggaggaggca

SEQ ID NO: 4060689 - DNA, 25 bp, Homo sapien
gctttgaaggatgcactaacacaga

SEQ ID NO: 4060690 - DNA, 25 bp, Homo sapien
taaggacagcatgagacagccaaag

SEQ ID NO: 4060691 - DNA, 25 bp, Homo sapien
tgttcccaagaagagtaaggacagc

SEQ ID NO: 4060692 - DNA, 25 bp, Homo sapien
gactcactatagtaggaacttcggg

SEQ ID NO: 4060693 - DNA, 25 bp, Homo sapien
gctataactgttagcaagtacctga

SEQ ID NO: 4060694 - DNA, 25 bp, Homo sapien
gacactggcatgaactggtaagtcc

SEQ ID NO: 4060695 - DNA, 25 bp, Homo sapien
gtacctgaagccttagccttggcaa

SEQ ID NO: 4060696 - DNA, 25 bp, Homo sapien
cagctgctataactgttagcaagta

SEQ ID NO: 4060697 - DNA, 25 bp, Homo sapien
ctctacttctattactgttggtggg

SEQ ID NO: 4060698 - DNA, 25 bp, Homo sapien
cctctacttctattactgttggtgg

SEQ ID NO: 4060699 - DNA, 25 bp, Homo sapien
cagttgactgacctataaggccagg

SEQ ID NO: 4060700 - DNA, 25 bp, Homo sapien
tacacatcaggagagtagacacagg

SEQ ID NO: 4060701 - DNA, 25 bp, Homo sapien
tgagtgcggccagttcagactttgc

SEQ ID NO: 4060702 - DNA, 25 bp, Homo sapien
caaatgagggacttaatgagtgcgg

SEQ ID NO: 4060703 - DNA, 25 bp, Homo sapien
aagtaattgaagatactggcagagc

SEQ ID NO: 4060704 - DNA, 25 bp, Homo sapien
gaaaatgctccaagtaagatgatga

SEQ ID NO: 4060705 - DNA, 25 bp, Homo sapien
tccaaatctgcagacaacgaatggg

SEQ ID NO: 4060706 - DNA, 25 bp, Homo sapien
taagggtgtttacgcatactgggaa

SEQ ID NO: 4060707 - DNA, 25 bp, Homo sapien
ctcttgatattaggcctcagcggcc

SEQ ID NO: 4060708 - DNA, 25 bp, Homo sapien
ggcacgtccgtaggcacctccatgt

SEQ ID NO: 4060709 - DNA, 25 bp, Homo sapien
catgtacatgacattcctggctctt

SEQ ID NO: 4060710 - DNA, 25 bp, Homo sapien
tgcagagactctcgggccgctcact

SEQ ID NO: 4060711 - DNA, 25 bp, Homo sapien
actgaagcatcccagacagctgttg

SEQ ID NO: 4060712 - DNA, 25 bp, Homo sapien
ttaggagactgaagcatcccagaca

SEQ ID NO: 4060713 - DNA, 25 bp, Homo sapien
acagctgttgacaatcaggaagacc

SEQ ID NO: 4060714 - DNA, 25 bp, Homo sapien
cctgcgtttccagttttaggagact

SEQ ID NO: 4060715 - DNA, 25 bp, Homo sapien
caggaccgaggggactaagcagctt

SEQ ID NO: 4060716 - DNA, 25 bp, Homo sapien
gcagggggacaatcagttggcttct

SEQ ID NO: 4060717 - DNA, 25 bp, Homo sapien
gggactaagcagcttagcagcttcc

SEQ ID NO: 4060718 - DNA, 25 bp, Homo sapien
ttagcagcttcccttggtgacttgg

SEQ ID NO: 4060719 - DNA, 25 bp, Homo sapien
tggatcaactgatccacaaactgac

SEQ ID NO: 4060720 - DNA, 25 bp, Homo sapien
ttggatcaactgatccacaaactga

SEQ ID NO: 4060721 - DNA, 25 bp, Homo sapien
cccttcagggaagacatgtgtcgct

SEQ ID NO: 4060722 - DNA, 25 bp, Homo sapien
ttgtactgaacacccttcagggaag

SEQ ID NO: 4060723 - DNA, 25 bp, Homo sapien
tcgctccggtcctgcagtgcacgtg

SEQ ID NO: 4060724 - DNA, 25 bp, Homo sapien
gaagacatgtgtcgctccggtcctg

SEQ ID NO: 4060725 - DNA, 25 bp, Homo sapien
tctgcaaaggttgatgaatcgccaa

SEQ ID NO: 4060726 - DNA, 25 bp, Homo sapien
caatgcctactagagtgggtacacg

SEQ ID NO: 4060727 - DNA, 25 bp, Homo sapien
tacatggacagttttaggcacgtga

SEQ ID NO: 4060728 - DNA, 25 bp, Homo sapien
tgggtacacgcagcaaatggacaga

SEQ ID NO: 4060729 - DNA, 25 bp, Homo sapien
tccatcttttaatgtgataactttc

SEQ ID NO: 4060730 - DNA, 25 bp, Homo sapien
aagtttgtctggagtgtgcagaaag

SEQ ID NO: 4060731 - DNA, 25 bp, Homo sapien
atcttttaatgtgataactttccac

SEQ ID NO: 4060732 - DNA, 25 bp, Homo sapien
gaagtttgtctggagtgtgcagaaa

SEQ ID NO: 4060733 - DNA, 25 bp, Homo sapien
tcaggctggactgcctgtcacatcc

SEQ ID NO: 4060734 - DNA, 25 bp, Homo sapien
tgtcacatcctgagaccacactaaa

SEQ ID NO: 4060735 - DNA, 25 bp, Homo sapien
cattgtctctgacctgtattgtagc

SEQ ID NO: 4060736 - DNA, 25 bp, Homo sapien
cactaaacctttataagccattgtc

SEQ ID NO: 4060737 - DNA, 25 bp, Homo sapien
gatggatggactgttcaacttcaca

SEQ ID NO: 4060738 - DNA, 25 bp, Homo sapien
caaagtgagtcaaacctctggctcc

SEQ ID NO: 4060739 - DNA, 25 bp, Homo sapien
cttcaatgaagcgaggagaccacag

SEQ ID NO: 4060740 - DNA, 25 bp, Homo sapien
aagcgcagagcttccagagtgactg

SEQ ID NO: 4060741 - DNA, 25 bp, Homo sapien
gctgcccacccacgcctcggtgaag

SEQ ID NO: 4060742 - DNA, 25 bp, Homo sapien
gtggaaactggaaagcgtcactgtc

SEQ ID NO: 4060743 - DNA, 25 bp, Homo sapien
aagcgtcactgtctcagcagaagaa

SEQ ID NO: 4060744 - DNA, 25 bp, Homo sapien
tggaaagcgtcactgtctcagcaga

SEQ ID NO: 4060745 - DNA, 25 bp, Homo sapien
tgagttggttctggaagtaccggaa

SEQ ID NO: 4060746 - DNA, 25 bp, Homo sapien
caagcctggaggagatgcgttacta

SEQ ID NO: 4060747 - DNA, 25 bp, Homo sapien
gatgaacgagacacctcagtcatgg

SEQ ID NO: 4060748 - DNA, 25 bp, Homo sapien
gacttgtctacaggcaggtaaaccc

SEQ ID NO: 4060749 - DNA, 25 bp, Homo sapien
gggatgctatacaagagggctgtac

SEQ ID NO: 4060750 - DNA, 25 bp, Homo sapien
ctggatgggacaacgcagtggacat

SEQ ID NO: 4060751 - DNA, 25 bp, Homo sapien
gacaccatggacacgagtggaggct

SEQ ID NO: 4060752 - DNA, 25 bp, Homo sapien
gacatctgctaatgctctaacacgg

SEQ ID NO: 4060753 - DNA, 25 bp, Homo sapien
gagacgtcattacttgcatggcaag

SEQ ID NO: 4060754 - DNA, 25 bp, Homo sapien
cagatgctcccactgatcacagaga

SEQ ID NO: 4060755 - DNA, 25 bp, Homo sapien
ttggtgatccgtccacacatcaggc

SEQ ID NO: 4060756 - DNA, 25 bp, Homo sapien
tgagctctcgtgtcactcgcttggt

SEQ ID NO: 4060757 - DNA, 25 bp, Homo sapien
cattcatgagtgtcctacagtcttt

SEQ ID NO: 4060758 - DNA, 25 bp, Homo sapien
gttccagaccagatgagtactggcc

SEQ ID NO: 4060759 - DNA, 25 bp, Homo sapien
catgagtgtcctacagtctttcttc

SEQ ID NO: 4060760 - DNA, 25 bp, Homo sapien
tgagtactggcctcaaatatgtatt

SEQ ID NO: 4060761 - DNA, 25 bp, Homo sapien
ggcgctttttgcactcgggctgtaa

SEQ ID NO: 4060762 - DNA, 25 bp, Homo sapien
tgcgtaactccacatctcaatccgg

SEQ ID NO: 4060763 - DNA, 25 bp, Homo sapien
caatccggtcattgaggcgcttttt

SEQ ID NO: 4060764 - DNA, 25 bp, Homo sapien
cagtgcttccatgagacaggacatt

SEQ ID NO: 4060765 - DNA, 25 bp, Homo sapien
tttccttcagcatgtttagcacttc

SEQ ID NO: 4060766 - DNA, 25 bp, Homo sapien
gctgcgcagtggtgtttaatgtcca

SEQ ID NO: 4060767 - DNA, 25 bp, Homo sapien
caagcagtatgaagtaccgggtcaa

SEQ ID NO: 4060768 - DNA, 25 bp, Homo sapien
gtaccgggtcaacaaagatgtctgc

SEQ ID NO: 4060769 - DNA, 25 bp, Homo sapien
gcttttgaaggggaaatgcatcaga

SEQ ID NO: 4060770 - DNA, 25 bp, Homo sapien
catcagatctgttgtctgtaaatac

SEQ ID NO: 4060771 - DNA, 25 bp, Homo sapien
aagggagggtcattgcagacagagc

SEQ ID NO: 4060772 - DNA, 25 bp, Homo sapien
cagacagagcttttgaaggggaaat

SEQ ID NO: 4060773 - DNA, 25 bp, Homo sapien
aactatgggaggtaaagataggcca

SEQ ID NO: 4060774 - DNA, 25 bp, Homo sapien
tcaacatgatggaactgaaatcaac

SEQ ID NO: 4060775 - DNA, 25 bp, Homo sapien
aaagttagtatgctccagacaagac

SEQ ID NO: 4060776 - DNA, 25 bp, Homo sapien
gactctagtccctataaaacaacag

SEQ ID NO: 4060777 - DNA, 25 bp, Homo sapien
cacattataggagatgagcagtcaa

SEQ ID NO: 4060778 - DNA, 25 bp, Homo sapien
gctgggcagaaggttgagatttttg

SEQ ID NO: 4060779 - DNA, 25 bp, Homo sapien
ttcacattataggagatgagcagtc

SEQ ID NO: 4060780 - DNA, 25 bp, Homo sapien
atattcacattataggagatgagca

SEQ ID NO: 4060781 - DNA, 25 bp, Homo sapien
tttgatcttgagcaggttgaccttg

SEQ ID NO: 4060782 - DNA, 25 bp, Homo sapien
tccacctgacctgtctgctcttggg

SEQ ID NO: 4060783 - DNA, 25 bp, Homo sapien
agcaggttgaccttgaggcactcct

SEQ ID NO: 4060784 - DNA, 25 bp, Homo sapien
tcttgagcaggttgaccttgaggca

SEQ ID NO: 4060785 - DNA, 25 bp, Homo sapien
ttcaggagacacaaaaaacaaagct

SEQ ID NO: 4060786 - DNA, 25 bp, Homo sapien
caaaaaacaaagctaccccactgag

SEQ ID NO: 4060787 - DNA, 25 bp, Homo sapien
cacaaaaaacaaagctaccccactg

SEQ ID NO: 4060788 - DNA, 25 bp, Homo sapien
ctgttcaggagacacaaaaaacaaa

SEQ ID NO: 4060789 - DNA, 25 bp, Homo sapien
tcaacttgaaagtgtgcacacgcgc

SEQ ID NO: 4060790 - DNA, 25 bp, Homo sapien
cacatacacaggagttgagaaacac

SEQ ID NO: 4060791 - DNA, 25 bp, Homo sapien
tctttggacagttttatgagtgagc

SEQ ID NO: 4060792 - DNA, 25 bp, Homo sapien
aagcaaacgcttgacattcacatag

SEQ ID NO: 4060793 - DNA, 25 bp, Homo sapien
ctaagtgatgggattacaggggtga

SEQ ID NO: 4060794 - DNA, 25 bp, Homo sapien
ggactacaggtatacgccaccgggc

SEQ ID NO: 4060795 - DNA, 25 bp, Homo sapien
cctaagtgatgggattacaggggtg

SEQ ID NO: 4060796 - DNA, 25 bp, Homo sapien
caggtatacgccaccgggccgggct

SEQ ID NO: 4060797 - DNA, 25 bp, Homo sapien
gaaagaacacccttgttcaacagag

SEQ ID NO: 4060798 - DNA, 25 bp, Homo sapien
ggtcttgggtttaccatccagaata

SEQ ID NO: 4060799 - DNA, 25 bp, Homo sapien
tgcagaccatggagagcctagaaga

SEQ ID NO: 4060800 - DNA, 25 bp, Homo sapien
gaacaacgctttagagtgtcaggac

SEQ ID NO: 4060801 - DNA, 25 bp, Homo sapien
taaccagttttgcacgcaaatccca

SEQ ID NO: 4060802 - DNA, 25 bp, Homo sapien
cagctctgtgcgtaaccagttttgc

SEQ ID NO: 4060803 - DNA, 25 bp, Homo sapien
tgagcagctctgtgcgtaaccagtt

SEQ ID NO: 4060804 - DNA, 25 bp, Homo sapien
gtaaccagttttgcacgcaaatccc

SEQ ID NO: 4060805 - DNA, 25 bp, Homo sapien
ataatgattcggatctggtcttcac

SEQ ID NO: 4060806 - DNA, 25 bp, Homo sapien
tccaggcggtagtccagggcggact

SEQ ID NO: 4060807 - DNA, 25 bp, Homo sapien
gctgaggatccaggcggtagtccag

SEQ ID NO: 4060808 - DNA, 25 bp, Homo sapien
agggcggactcctggataatgattc

SEQ ID NO: 4060809 - DNA, 25 bp, Homo sapien
caggataccgtgacagaatttagga

SEQ ID NO: 4060810 - DNA, 25 bp, Homo sapien
tccttggccttagtcaggataccgt

SEQ ID NO: 4060811 - DNA, 25 bp, Homo sapien
gcatatctcagcttcaggcaagaga

SEQ ID NO: 4060812 - DNA, 25 bp, Homo sapien
taggaatgtcagctttacaggcttt

SEQ ID NO: 4060813 - DNA, 25 bp, Homo sapien
taacttacgaggtcttccaactcag

SEQ ID NO: 4060814 - DNA, 25 bp, Homo sapien
tgtgcagactccaatactctaagga

SEQ ID NO: 4060815 - DNA, 25 bp, Homo sapien
gacttgttaacgagtacttctggag

SEQ ID NO: 4060816 - DNA, 25 bp, Homo sapien
gattacccgtacattctcctggcac

SEQ ID NO: 4060817 - DNA, 25 bp, Homo sapien
cactgcaacatggttttagaatctg

SEQ ID NO: 4060818 - DNA, 25 bp, Homo sapien
tctgggtgatctggcgcttggttat

SEQ ID NO: 4060819 - DNA, 25 bp, Homo sapien
ggcgcttggttatcatctgtttgca

SEQ ID NO: 4060820 - DNA, 25 bp, Homo sapien
tagaatctgcttccggacagaacct

SEQ ID NO: 4060821 - DNA, 25 bp, Homo sapien
tgaagcaacaggaatgtagaagaac

SEQ ID NO: 4060822 - DNA, 25 bp, Homo sapien
aacaggaatgtagaagaacaaataa

SEQ ID NO: 4060823 - DNA, 25 bp, Homo sapien
gaagcaacaggaatgtagaagaaca

SEQ ID NO: 4060824 - DNA, 25 bp, Homo sapien
gcaacaggaatgtagaagaacaaat

SEQ ID NO: 4060825 - DNA, 25 bp, Homo sapien
tctaggtactcaggtcagccctgct

SEQ ID NO: 4060826 - DNA, 25 bp, Homo sapien
tctgaatgtgccagatggatgatca

SEQ ID NO: 4060827 - DNA, 25 bp, Homo sapien
tgtgccagatggatgatcaggacat

SEQ ID NO: 4060828 - DNA, 25 bp, Homo sapien
tgtatgtgtggcgagatcagggaac

SEQ ID NO: 4060829 - DNA, 25 bp, Homo sapien
cttaaatactttttggtggcagcgg

SEQ ID NO: 4060830 - DNA, 25 bp, Homo sapien
tggcagcgggtgcttagctgcttct

SEQ ID NO: 4060831 - DNA, 25 bp, Homo sapien
tagtctagctctgggtccatcatct

SEQ ID NO: 4060832 - DNA, 25 bp, Homo sapien
gcagaccctcatgagggtgtagtct

SEQ ID NO: 4060833 - DNA, 25 bp, Homo sapien
gccttccagagctgctccttgtcca

SEQ ID NO: 4060834 - DNA, 25 bp, Homo sapien
gcattttcccagagcaacagctccg

SEQ ID NO: 4060835 - DNA, 25 bp, Homo sapien
tttggagataggctctctgcatttt

SEQ ID NO: 4060836 - DNA, 25 bp, Homo sapien
tctgcattttcccagagcaacagct

SEQ ID NO: 4060837 - DNA, 25 bp, Homo sapien
taggcagacaaggtagggaaggatg

SEQ ID NO: 4060838 - DNA, 25 bp, Homo sapien
gacaaggtagggaaggatgaggtaa

SEQ ID NO: 4060839 - DNA, 25 bp, Homo sapien
ggcagacaaggtagggaaggatgag

SEQ ID NO: 4060840 - DNA, 25 bp, Homo sapien
gcagacaaggtagggaaggatgagg

SEQ ID NO: 4060841 - DNA, 25 bp, Homo sapien
tagatctggctccaagcggatgtcc

SEQ ID NO: 4060842 - DNA, 25 bp, Homo sapien
gtcactcttgcaggcttcgtataga

SEQ ID NO: 4060843 - DNA, 25 bp, Homo sapien
tgagcgttgccatattgcacagcgg

SEQ ID NO: 4060844 - DNA, 25 bp, Homo sapien
cagcggaacagaagtttttgatgtc

SEQ ID NO: 4060845 - DNA, 25 bp, Homo sapien
gggagccagcatggaaaggtgagct

SEQ ID NO: 4060846 - DNA, 25 bp, Homo sapien
aatgaaagagctaggctcaaagtta

SEQ ID NO: 4060847 - DNA, 25 bp, Homo sapien
gaaagagctaggctcaaagttaggg

SEQ ID NO: 4060848 - DNA, 25 bp, Homo sapien
gagctaggctcaaagttagggaacc

SEQ ID NO: 4060849 - DNA, 25 bp, Homo sapien
gctaggctcaaagttagggaaccaa

SEQ ID NO: 4060850 - DNA, 25 bp, Homo sapien
catgcttagttagagcctgtcttac

SEQ ID NO: 4060851 - DNA, 25 bp, Homo sapien
acctcgctggcctaagtctctttta

SEQ ID NO: 4060852 - DNA, 25 bp, Homo sapien
ctcaagtgatttgaccgcatttgcc

SEQ ID NO: 4060853 - DNA, 25 bp, Homo sapien
tgacacaggaagctaatggtcgtat

SEQ ID NO: 4060854 - DNA, 25 bp, Homo sapien
gcacggtcgtgctcaggcagatcac

SEQ ID NO: 4060855 - DNA, 25 bp, Homo sapien
acttcagggacaccctgtgctcctt

SEQ ID NO: 4060856 - DNA, 25 bp, Homo sapien
gcttcctgcagagtgtcattgcgca

SEQ ID NO: 4060857 - DNA, 25 bp, Homo sapien
ctcctccacacggagctgcctgcgg

SEQ ID NO: 4060858 - DNA, 25 bp, Homo sapien
tgtgaaactcactcctgaaaggtag

SEQ ID NO: 4060859 - DNA, 25 bp, Homo sapien
tgtgagaactaccatcgccagatgc

SEQ ID NO: 4060860 - DNA, 25 bp, Homo sapien
gacagtccgagtgtttgccacgcta

SEQ ID NO: 4060861 - DNA, 25 bp, Homo sapien
tgagatgacataacgggacgacgca

SEQ ID NO: 4060862 - DNA, 25 bp, Homo sapien
agcttcaacacgtcctccttgcagg

SEQ ID NO: 4060863 - DNA, 25 bp, Homo sapien
cacgtcctccttgcaggccatttta

SEQ ID NO: 4060864 - DNA, 25 bp, Homo sapien
aaagcttcaacacgtcctccttgca

SEQ ID NO: 4060865 - DNA, 25 bp, Homo sapien
ccttgcaggccattttaaacttgta

SEQ ID NO: 4060866 - DNA, 25 bp, Homo sapien
tgaaaggtaaagagaaagaaagtca

SEQ ID NO: 4060867 - DNA, 25 bp, Homo sapien
aagagaaagaaagtcagaagttttg

SEQ ID NO: 4060868 - DNA, 25 bp, Homo sapien
agaaagaaagtcagaagttttgtgg

SEQ ID NO: 4060869 - DNA, 25 bp, Homo sapien
aggtaaagagaaagaaagtcagaag

SEQ ID NO: 4060870 - DNA, 25 bp, Homo sapien
gggatattggcagccaggtgtcact

SEQ ID NO: 4060871 - DNA, 25 bp, Homo sapien
aggcagctatgatgggatattggca

SEQ ID NO: 4060872 - DNA, 25 bp, Homo sapien
tatgatgggatattggcagccaggt

SEQ ID NO: 4060873 - DNA, 25 bp, Homo sapien
cagctatgatgggatattggcagcc

SEQ ID NO: 4060874 - DNA, 25 bp, Homo sapien
gatggcacacttctcgttcatgtcc

SEQ ID NO: 4060875 - DNA, 25 bp, Homo sapien
tttgttctgtatcagacactccatc

SEQ ID NO: 4060876 - DNA, 25 bp, Homo sapien
gaagtgggtaactccgatggcacac

SEQ ID NO: 4060877 - DNA, 25 bp, Homo sapien
ccatcaggtccccagagtctatctg

SEQ ID NO: 4060878 - DNA, 25 bp, Homo sapien
tggggaagacagcatgcatttacac

SEQ ID NO: 4060879 - DNA, 25 bp, Homo sapien
ctggggaagacagcatgcatttaca

SEQ ID NO: 4060880 - DNA, 25 bp, Homo sapien
taacactcaagagtaatacatgctg

SEQ ID NO: 4060881 - DNA, 25 bp, Homo sapien
gtaatacatgctgcagacagaggtg

SEQ ID NO: 4060882 - DNA, 25 bp, Homo sapien
gctaacactcaagagtaatacatgc

SEQ ID NO: 4060883 - DNA, 25 bp, Homo sapien
aacactcaagagtaatacatgctgc

SEQ ID NO: 4060884 - DNA, 25 bp, Homo sapien
gttctgaattatgggctcacaggct

SEQ ID NO: 4060885 - DNA, 25 bp, Homo sapien
caggctctcatcagcaaggcttcta

SEQ ID NO: 4060886 - DNA, 25 bp, Homo sapien
tgggctcacaggctctcatcagcaa

SEQ ID NO: 4060887 - DNA, 25 bp, Homo sapien
tcagcaaggcttctatttgaatatc

SEQ ID NO: 4060888 - DNA, 25 bp, Homo sapien
atatctgatgggcaaataatctaat

SEQ ID NO: 4060889 - DNA, 25 bp, Homo sapien
tctgatgggcaaataatctaataca

SEQ ID NO: 4060890 - DNA, 25 bp, Homo sapien
atctgatgggcaaataatctaatac

SEQ ID NO: 4060891 - DNA, 25 bp, Homo sapien
ctgatgggcaaataatctaatacat

SEQ ID NO: 4060892 - DNA, 25 bp, Homo sapien
ttgaagtagatagccccagaataaa

SEQ ID NO: 4060893 - DNA, 25 bp, Homo sapien
tagaactgctcctccgttatacttt

SEQ ID NO: 4060894 - DNA, 25 bp, Homo sapien
tggaaacgattctagtatttgaagt

SEQ ID NO: 4060895 - DNA, 25 bp, Homo sapien
ctgctcctccgttatactttgaaag

SEQ ID NO: 4060896 - DNA, 25 bp, Homo sapien
gcaacactagctcctgaaaaaacac

SEQ ID NO: 4060897 - DNA, 25 bp, Homo sapien
caataacattagagtatgcaaagcc

SEQ ID NO: 4060898 - DNA, 25 bp, Homo sapien
tgcctttaaagagagaaacccgtgc

SEQ ID NO: 4060899 - DNA, 25 bp, Homo sapien
tcccaaaatgctaagtagttcaaaa

SEQ ID NO: 4060900 - DNA, 25 bp, Homo sapien
cctggcactacaggcatgttttacc

SEQ ID NO: 4060901 - DNA, 25 bp, Homo sapien
tggcactacaggcatgttttaccac

SEQ ID NO: 4060902 - DNA, 25 bp, Homo sapien
ggcactacaggcatgttttaccacg

SEQ ID NO: 4060903 - DNA, 25 bp, Homo sapien
tacctggcactacaggcatgtttta

SEQ ID NO: 4060904 - DNA, 25 bp, Homo sapien
gactgtgatgtgaagtactgctgct

SEQ ID NO: 4060905 - DNA, 25 bp, Homo sapien
tattcaatcttccatgcttagctgg

SEQ ID NO: 4060906 - DNA, 25 bp, Homo sapien
tgacctaactaaaagagcgagggat

SEQ ID NO: 4060907 - DNA, 25 bp, Homo sapien
tcctccaatgagtaagctgcatacc

SEQ ID NO: 4060908 - DNA, 25 bp, Homo sapien
atccagatggtcctgaaggcactcc

SEQ ID NO: 4060909 - DNA, 25 bp, Homo sapien
tatatctctacactccaccaccaag

SEQ ID NO: 4060910 - DNA, 25 bp, Homo sapien
aactcagtgaggttgccaactatat

SEQ ID NO: 4060911 - DNA, 25 bp, Homo sapien
gaggttgccaactatatctctacac

SEQ ID NO: 4060912 - DNA, 25 bp, Homo sapien
tcccagatcaatcaggcacttatcc

SEQ ID NO: 4060913 - DNA, 25 bp, Homo sapien
ggtgtaggatcctttggacttcagc

SEQ ID NO: 4060914 - DNA, 25 bp, Homo sapien
gcttgacatccatggcacgctggtg

SEQ ID NO: 4060915 - DNA, 25 bp, Homo sapien
gagggcaggatccagcttgacatcc

SEQ ID NO: 4060916 - DNA, 25 bp, Homo sapien
ctgttcctcagtgcggtaggcgtgt

SEQ ID NO: 4060917 - DNA, 25 bp, Homo sapien
cctgttcctcagtgcggtaggcgtg

SEQ ID NO: 4060918 - DNA, 25 bp, Homo sapien
cctgaggcataaattcactggtctc

SEQ ID NO: 4060919 - DNA, 25 bp, Homo sapien
ggtctcattccaaccgtgggtgtgg

SEQ ID NO: 4060920 - DNA, 25 bp, Homo sapien
tctccctggcacttgcggtacagga

SEQ ID NO: 4060921 - DNA, 25 bp, Homo sapien
gcaaagacgagaagcgtctccctgg

SEQ ID NO: 4060922 - DNA, 25 bp, Homo sapien
ccaccgcgcccggttcaagtgaatc

SEQ ID NO: 4060923 - DNA, 25 bp, Homo sapien
aatgttccatcaggcacgacaagat

SEQ ID NO: 4060924 - DNA, 25 bp, Homo sapien
gcagctctaagagacggtgttcaca

SEQ ID NO: 4060925 - DNA, 25 bp, Homo sapien
ctgtgtataaatgttccatcaggca

SEQ ID NO: 4060926 - DNA, 25 bp, Homo sapien
tccaatcccgggagatgaaatactg

SEQ ID NO: 4060927 - DNA, 25 bp, Homo sapien
gtccgtaaacaccatcacaatattg

SEQ ID NO: 4060928 - DNA, 25 bp, Homo sapien
tatataggtccatatatgctcagtc

SEQ ID NO: 4060929 - DNA, 25 bp, Homo sapien
gattaccaggtagtcaatgtataca

SEQ ID NO: 4060930 - DNA, 25 bp, Homo sapien
tacagagtgccaaagtatgtaccac

SEQ ID NO: 4060931 - DNA, 25 bp, Homo sapien
tcaatgcggtaatctgcaccagggt

SEQ ID NO: 4060932 - DNA, 25 bp, Homo sapien
tatatgtttgcaggctgtctggatt

SEQ ID NO: 4060933 - DNA, 25 bp, Homo sapien
attcaaagctcgatcaatgcggtaa

SEQ ID NO: 4060934 - DNA, 25 bp, Homo sapien
tctccagatcttatatgtttgcagg

SEQ ID NO: 4060935 - DNA, 25 bp, Homo sapien
cacttagagacctaattgggtcata

SEQ ID NO: 4060936 - DNA, 25 bp, Homo sapien
ggtgctcccggcaaagccagattta

SEQ ID NO: 4060937 - DNA, 25 bp, Homo sapien
ccctggaggtctttacaacatgaat

SEQ ID NO: 4060938 - DNA, 25 bp, Homo sapien
taatcagattactaaacctggtgct

SEQ ID NO: 4060939 - DNA, 25 bp, Homo sapien
gcttactacctgctgagaaatcact

SEQ ID NO: 4060940 - DNA, 25 bp, Homo sapien
cagggaaaactaatggtcaaccaca

SEQ ID NO: 4060941 - DNA, 25 bp, Homo sapien
aaatcaatcaccaagcagagaacag

SEQ ID NO: 4060942 - DNA, 25 bp, Homo sapien
catgattatggtgcatttgggagag

SEQ ID NO: 4060943 - DNA, 25 bp, Homo sapien
cccgacagcttaggatgatctcagg

SEQ ID NO: 4060944 - DNA, 25 bp, Homo sapien
gcccttttcgatgtaatccggaaca

SEQ ID NO: 4060945 - DNA, 25 bp, Homo sapien
aaagtcttccatcaacatgcgtcgg

SEQ ID NO: 4060946 - DNA, 25 bp, Homo sapien
tcatcagacagtgtagggtccgccc

SEQ ID NO: 4060947 - DNA, 25 bp, Homo sapien
agtcacttttacaggatttggccaa

SEQ ID NO: 4060948 - DNA, 25 bp, Homo sapien
cctgggcaatcagcttttggcgggt

SEQ ID NO: 4060949 - DNA, 25 bp, Homo sapien
cacgcgatcgcggaaggttttccac

SEQ ID NO: 4060950 - DNA, 25 bp, Homo sapien
gactccaggcacattaacaagtagg

SEQ ID NO: 4060951 - DNA, 25 bp, Homo sapien
aaagaggcacttatacactctgccc

SEQ ID NO: 4060952 - DNA, 25 bp, Homo sapien
aaaaacgctcccgatcatctcggca

SEQ ID NO: 4060953 - DNA, 25 bp, Homo sapien
gaaagtcatccgatgacagctcagc

SEQ ID NO: 4060954 - DNA, 25 bp, Homo sapien
taaatgccggtctaagtgaaagtca

SEQ ID NO: 4060955 - DNA, 25 bp, Homo sapien
ggcctttctccaagcatgataccac

SEQ ID NO: 4060956 - DNA, 25 bp, Homo sapien
tttgcagtcatccatgaagccacag

SEQ ID NO: 4060957 - DNA, 25 bp, Homo sapien
gatactcagtgatgttgcctcggtg

SEQ ID NO: 4060958 - DNA, 25 bp, Homo sapien
gatggccgtcatcttggtaatgtac

SEQ ID NO: 4060959 - DNA, 25 bp, Homo sapien
caagccgaatactgccacatttcag

SEQ ID NO: 4060960 - DNA, 25 bp, Homo sapien
tgcaaacctctctggccacagattc

SEQ ID NO: 4060961 - DNA, 25 bp, Homo sapien
ctctggccacagattcaaatttggg

SEQ ID NO: 4060962 - DNA, 25 bp, Homo sapien
gttatagtagatttgcaaacctctc

SEQ ID NO: 4060963 - DNA, 25 bp, Homo sapien
tctgttatagtagatttgcaaacct

SEQ ID NO: 4060964 - DNA, 25 bp, Homo sapien
ggctggttatactactctgttgaga

SEQ ID NO: 4060965 - DNA, 25 bp, Homo sapien
gagtccagttattgaggttcatcca

SEQ ID NO: 4060966 - DNA, 25 bp, Homo sapien
cttccagagcacaactcagaggtta

SEQ ID NO: 4060967 - DNA, 25 bp, Homo sapien
cattgtaaaattcgcccttccagag

SEQ ID NO: 4060968 - DNA, 25 bp, Homo sapien
cgtgagccacaaaacctggccattt

SEQ ID NO: 4060969 - DNA, 25 bp, Homo sapien
gagccacaaaacctggccatttttg

SEQ ID NO: 4060970 - DNA, 25 bp, Homo sapien
agtgatctgcctgctgggtttacag

SEQ ID NO: 4060971 - DNA, 25 bp, Homo sapien
acctagtgatctgcctgctgggttt

SEQ ID NO: 4060972 - DNA, 25 bp, Homo sapien
ggtgtggactactgcgcccggctgg

SEQ ID NO: 4060973 - DNA, 25 bp, Homo sapien
ctgtcagattcagtctattgatgga

SEQ ID NO: 4060974 - DNA, 25 bp, Homo sapien
tagtagactggatttggcctaagtg

SEQ ID NO: 4060975 - DNA, 25 bp, Homo sapien
tacaggtgcgaacccatttatcaaa

SEQ ID NO: 4060976 - DNA, 25 bp, Homo sapien
gcttgaacagggttcagccaacttc

SEQ ID NO: 4060977 - DNA, 25 bp, Homo sapien
caactttgccatcctagtgtgaaaa

SEQ ID NO: 4060978 - DNA, 25 bp, Homo sapien
tgcctcttctaagacccagatcaag

SEQ ID NO: 4060979 - DNA, 25 bp, Homo sapien
cctcttctaagacccagatcaagtg

SEQ ID NO: 4060980 - DNA, 25 bp, Homo sapien
tcttctaagacccagatcaagtgtc

SEQ ID NO: 4060981 - DNA, 25 bp, Homo sapien
gcctcttctaagacccagatcaagt

SEQ ID NO: 4060982 - DNA, 25 bp, Homo sapien
atgattgcagtctgaagaaatttca

SEQ ID NO: 4060983 - DNA, 25 bp, Homo sapien
tatctaatcatcatacaaggctgaa

SEQ ID NO: 4060984 - DNA, 25 bp, Homo sapien
cctatgagatgagtatggcaataaa

SEQ ID NO: 4060985 - DNA, 25 bp, Homo sapien
cagaagctggctctcaagtgcatat

SEQ ID NO: 4060986 - DNA, 25 bp, Homo sapien
tatggcaataaagtcagtcagagaa

SEQ ID NO: 4060987 - DNA, 25 bp, Homo sapien
gagctcatttatccctggttcttaa

SEQ ID NO: 4060988 - DNA, 25 bp, Homo sapien
tcctcaaagccctttaattctaata

SEQ ID NO: 4060989 - DNA, 25 bp, Homo sapien
tagaacagtgagtgggctatgttga

SEQ ID NO: 4060990 - DNA, 25 bp, Homo sapien
gctatgttgacgttaaaacttgtct

SEQ ID NO: 4060991 - DNA, 25 bp, Homo sapien
cttcaggagagtactgggaaatcta

SEQ ID NO: 4060992 - DNA, 25 bp, Homo sapien
caggagagtactgggaaatctaatg

SEQ ID NO: 4060993 - DNA, 25 bp, Homo sapien
tcaggagagtactgggaaatctaat

SEQ ID NO: 4060994 - DNA, 25 bp, Homo sapien
ttcttcaggagagtactgggaaatc

SEQ ID NO: 4060995 - DNA, 25 bp, Homo sapien
caatattgtcttctacgggatggat

SEQ ID NO: 4060996 - DNA, 25 bp, Homo sapien
cttctacgggatggattagcatctc

SEQ ID NO: 4060997 - DNA, 25 bp, Homo sapien
tgtcttctacgggatggattagcat

SEQ ID NO: 4060998 - DNA, 25 bp, Homo sapien
tacgggatggattagcatctcttcc

SEQ ID NO: 4060999 - DNA, 25 bp, Homo sapien
ctgttaagttgcaggtctctccagc

SEQ ID NO: 4061000 - DNA, 25 bp, Homo sapien
ctctgttaagttgcaggtctctcca

SEQ ID NO: 4061001 - DNA, 25 bp, Homo sapien
gcgatctctgttaagttgcaggtct

SEQ ID NO: 4061002 - DNA, 25 bp, Homo sapien
aagatgcgatctctgttaagttgca

SEQ ID NO: 4061003 - DNA, 25 bp, Homo sapien
cttcctaagtacccagacctggcag

SEQ ID NO: 4061004 - DNA, 25 bp, Homo sapien
gaaggatgtccaccttcctaagtac

SEQ ID NO: 4061005 - DNA, 25 bp, Homo sapien
catgaaggaacggtttgtctggaga

SEQ ID NO: 4061006 - DNA, 25 bp, Homo sapien
gtctctcaagtcttaaggctacatg

SEQ ID NO: 4061007 - DNA, 25 bp, Homo sapien
ggtctttagatagcaaaataggcaa

SEQ ID NO: 4061008 - DNA, 25 bp, Homo sapien
tgctgaagtaaagctgtgagactca

SEQ ID NO: 4061009 - DNA, 25 bp, Homo sapien
acccaggacctttgataaaacagct

SEQ ID NO: 4061010 - DNA, 25 bp, Homo sapien
caatcattgtataaagagctaagta

SEQ ID NO: 4061011 - DNA, 25 bp, Homo sapien
caggagctcttgagactgagcaggt

SEQ ID NO: 4061012 - DNA, 25 bp, Homo sapien
tgaaagaagtctggtgcagctatct

SEQ ID NO: 4061013 - DNA, 25 bp, Homo sapien
aagaagtctggtgcagctatctgga

SEQ ID NO: 4061014 - DNA, 25 bp, Homo sapien
ctgagtcaggagctcttgagactga

SEQ ID NO: 4061015 - DNA, 25 bp, Homo sapien
gaaaaggggtcttatggtgcaccaa

SEQ ID NO: 4061016 - DNA, 25 bp, Homo sapien
aagatgacagtccaatgtgggttag

SEQ ID NO: 4061017 - DNA, 25 bp, Homo sapien
aacttttacagccaaccttatccat

SEQ ID NO: 4061018 - DNA, 25 bp, Homo sapien
taggcagcattatgtcttaatggat

SEQ ID NO: 4061019 - DNA, 25 bp, Homo sapien
tcttgctaaaggtctactggataac

SEQ ID NO: 4061020 - DNA, 25 bp, Homo sapien
cctactggctaatcagggaagtatc

SEQ ID NO: 4061021 - DNA, 25 bp, Homo sapien
gaattgctcaaggttgcctactggc

SEQ ID NO: 4061022 - DNA, 25 bp, Homo sapien
gatatgctccatagcagattctact

SEQ ID NO: 4061023 - DNA, 25 bp, Homo sapien
aatacctatctaagcctgaagcctg

SEQ ID NO: 4061024 - DNA, 25 bp, Homo sapien
tgcaataatgctgggacacatggag

SEQ ID NO: 4061025 - DNA, 25 bp, Homo sapien
tcctgacacagatagagcaaatgag

SEQ ID NO: 4061026 - DNA, 25 bp, Homo sapien
gatggtaagagaagtcagtcctgct

SEQ ID NO: 4061027 - DNA, 25 bp, Homo sapien
gaacaattatgttaaaccatatgaa

SEQ ID NO: 4061028 - DNA, 25 bp, Homo sapien
cctaaagcagacctagctggcaggg

SEQ ID NO: 4061029 - DNA, 25 bp, Homo sapien
tcttatagttcattcaatctaacaa

SEQ ID NO: 4061030 - DNA, 25 bp, Homo sapien
agaaaacaatgcctaaagcagacct

SEQ ID NO: 4061031 - DNA, 25 bp, Homo sapien
tggggcagcaagatgtgtatggagc

SEQ ID NO: 4061032 - DNA, 25 bp, Homo sapien
gccagtgcgaagcagaggcaagcag

SEQ ID NO: 4061033 - DNA, 25 bp, Homo sapien
tacactatttatttgcgggtgtggg

SEQ ID NO: 4061034 - DNA, 25 bp, Homo sapien
gatgtgtatggagccagtgcgaagc

SEQ ID NO: 4061035 - DNA, 25 bp, Homo sapien
tatttttatctgaggtagggataaa

SEQ ID NO: 4061036 - DNA, 25 bp, Homo sapien
ccatttctggactttacttggagaa

SEQ ID NO: 4061037 - DNA, 25 bp, Homo sapien
ctgaggtagggataaaaacatccca

SEQ ID NO: 4061038 - DNA, 25 bp, Homo sapien
ttatctgaggtagggataaaaacat

SEQ ID NO: 4061039 - DNA, 25 bp, Homo sapien
agaattacttgcaaaagaaagatta

SEQ ID NO: 4061040 - DNA, 25 bp, Homo sapien
tagtggacccatgatatacttggcc

SEQ ID NO: 4061041 - DNA, 25 bp, Homo sapien
ggactactaacacaccattactggc

SEQ ID NO: 4061042 - DNA, 25 bp, Homo sapien
taaaagcatgactcatccgagagcg

SEQ ID NO: 4061043 - DNA, 25 bp, Homo sapien
taattatacacacacaactaggact

SEQ ID NO: 4061044 - DNA, 25 bp, Homo sapien
ttctgtctcctgcttatgtatgtct

SEQ ID NO: 4061045 - DNA, 25 bp, Homo sapien
tcctgcttatgtatgtcttttcctc

SEQ ID NO: 4061046 - DNA, 25 bp, Homo sapien
tgcttatgtatgtcttttcctctat

SEQ ID NO: 4061047 - DNA, 25 bp, Homo sapien
gtctcctgcttatgtatgtcttttc

SEQ ID NO: 4061048 - DNA, 25 bp, Homo sapien
ggcactcgagcaccgccaggttgtt

SEQ ID NO: 4061049 - DNA, 25 bp, Homo sapien
cgagcaccgccaggttgttgctcca

SEQ ID NO: 4061050 - DNA, 25 bp, Homo sapien
ctcgagcaccgccaggttgttgctc

SEQ ID NO: 4061051 - DNA, 25 bp, Homo sapien
gcaggcactcgagcaccgccaggtt

SEQ ID NO: 4061052 - DNA, 25 bp, Homo sapien
cttagggcacacgcgggtcacgtcc

SEQ ID NO: 4061053 - DNA, 25 bp, Homo sapien
tagggcacacgcgggtcacgtcctc

SEQ ID NO: 4061054 - DNA, 25 bp, Homo sapien
gcacacgcgggtcacgtcctccctg

SEQ ID NO: 4061055 - DNA, 25 bp, Homo sapien
tcttcctccgccagcttccagcccc

SEQ ID NO: 4061056 - DNA, 25 bp, Homo sapien
cacccgccgggaaaggcggctgcgg

SEQ ID NO: 4061057 - DNA, 25 bp, Homo sapien
cggctgcggcggctgaggctgctgt

SEQ ID NO: 4061058 - DNA, 25 bp, Homo sapien
ctgcggcggctgaggctgctgttgc

SEQ ID NO: 4061059 - DNA, 25 bp, Homo sapien
ccacccgccgggaaaggcggctgcg

SEQ ID NO: 4061060 - DNA, 25 bp, Homo sapien
tgctgctgaagctgcgatgactgag

SEQ ID NO: 4061061 - DNA, 25 bp, Homo sapien
tgaagctgcgatgactgaggcagct

SEQ ID NO: 4061062 - DNA, 25 bp, Homo sapien
tgctgaagctgcgatgactgaggca

SEQ ID NO: 4061063 - DNA, 25 bp, Homo sapien
ttgctgctgaagctgcgatgactga

SEQ ID NO: 4061064 - DNA, 25 bp, Homo sapien
tccggcctgccctacgaaggacaca

SEQ ID NO: 4061065 - DNA, 25 bp, Homo sapien
cctggctgtggacgccctggccggg

SEQ ID NO: 4061066 - DNA, 25 bp, Homo sapien
gcagcagatgcagcgccgccgacaa

SEQ ID NO: 4061067 - DNA, 25 bp, Homo sapien
gccccggccgcgaatagcagcagca

SEQ ID NO: 4061068 - DNA, 25 bp, Homo sapien
actcgccggcgccgcgtatttaaat

SEQ ID NO: 4061069 - DNA, 25 bp, Homo sapien
gcactcgccggcgccgcgtatttaa

SEQ ID NO: 4061070 - DNA, 25 bp, Homo sapien
cgccggcgccgcgtatttaaatgag

SEQ ID NO: 4061071 - DNA, 25 bp, Homo sapien
gacgcactcgccggcgccgcgtatt

SEQ ID NO: 4061072 - DNA, 25 bp, Homo sapien
ttttgtgattagttatcatgagctt

SEQ ID NO: 4061073 - DNA, 25 bp, Homo sapien
ttgtgattagttatcatgagcttat

SEQ ID NO: 4061074 - DNA, 25 bp, Homo sapien
tttgtgattagttatcatgagctta

SEQ ID NO: 4061075 - DNA, 25 bp, Homo sapien
gctgccattttcaatagtgtcttat

SEQ ID NO: 4061076 - DNA, 25 bp, Homo sapien
ctgccattttcaatagtgtcttatt

SEQ ID NO: 4061077 - DNA, 25 bp, Homo sapien
tgctgccattttcaatagtgtctta

SEQ ID NO: 4061078 - DNA, 25 bp, Homo sapien
tcagtctacatactttccaagaatg

SEQ ID NO: 4061079 - DNA, 25 bp, Homo sapien
cagtctacatactttccaagaatgt

SEQ ID NO: 4061080 - DNA, 25 bp, Homo sapien
tctacatactttccaagaatgtcac

SEQ ID NO: 4061081 - DNA, 25 bp, Homo sapien
gtctacatactttccaagaatgtca

SEQ ID NO: 4061082 - DNA, 25 bp, Homo sapien
tagaattactttggtgcctccatgt

SEQ ID NO: 4061083 - DNA, 25 bp, Homo sapien
gatccaacagcgactactattgctt

SEQ ID NO: 4061084 - DNA, 25 bp, Homo sapien
acccgatccaacagcgactactatt

SEQ ID NO: 4061085 - DNA, 25 bp, Homo sapien
cagcgactactattgcttgcaatac

SEQ ID NO: 4061086 - DNA, 25 bp, Homo sapien
agcgctcctttcaaccagtactcgc

SEQ ID NO: 4061087 - DNA, 25 bp, Homo sapien
tcagcagcgctcctttcaaccagta

SEQ ID NO: 4061088 - DNA, 25 bp, Homo sapien
gctcctttcaaccagtactcgctca

SEQ ID NO: 4061089 - DNA, 25 bp, Homo sapien
tttcagcagcgctcctttcaaccag

SEQ ID NO: 4061090 - DNA, 25 bp, Homo sapien
caccttcctcctctcttcagctgac

SEQ ID NO: 4061091 - DNA, 25 bp, Homo sapien
ctagagcaagcccaacagctcctcc

SEQ ID NO: 4061092 - DNA, 25 bp, Homo sapien
ctccaccttcctcctctcttcagct

SEQ ID NO: 4061093 - DNA, 25 bp, Homo sapien
tagagcaagcccaacagctcctcca

SEQ ID NO: 4061094 - DNA, 25 bp, Homo sapien
ttctagcccatgtgtcatagcctct

SEQ ID NO: 4061095 - DNA, 25 bp, Homo sapien
tagcccatgtgtcatagcctcttct

SEQ ID NO: 4061096 - DNA, 25 bp, Homo sapien
catagcctcttctatgaacccgttt

SEQ ID NO: 4061097 - DNA, 25 bp, Homo sapien
accactgctgggcagttctagccca

SEQ ID NO: 4061098 - DNA, 25 bp, Homo sapien
aaactacttgaagactgtagtgcca

SEQ ID NO: 4061099 - DNA, 25 bp, Homo sapien
aaaactacttgaagactgtagtgcc

SEQ ID NO: 4061100 - DNA, 25 bp, Homo sapien
aactacttgaagactgtagtgccac

SEQ ID NO: 4061101 - DNA, 25 bp, Homo sapien
gaaagtcaaatcctaagcctgccca

SEQ ID NO: 4061102 - DNA, 25 bp, Homo sapien
cccttgccggagagaaagatcctag

SEQ ID NO: 4061103 - DNA, 25 bp, Homo sapien
tatcctcttggtggcaatctgctga

SEQ ID NO: 4061104 - DNA, 25 bp, Homo sapien
caatcctgagatcctaagctggcta

SEQ ID NO: 4061105 - DNA, 25 bp, Homo sapien
tagccaagtagctgttacggttcac

SEQ ID NO: 4061106 - DNA, 25 bp, Homo sapien
catcttctctgttaaggtagccaag

SEQ ID NO: 4061107 - DNA, 25 bp, Homo sapien
atagatgtggaccatcttctctgtt

SEQ ID NO: 4061108 - DNA, 25 bp, Homo sapien
cactcccacttatagatgtggacca

SEQ ID NO: 4061109 - DNA, 25 bp, Homo sapien
ctgatcggtctgtaggtcctggagc

SEQ ID NO: 4061110 - DNA, 25 bp, Homo sapien
acaggctgatcggtctgtaggtcct

SEQ ID NO: 4061111 - DNA, 25 bp, Homo sapien
ccaacacaggctgatcggtctgtag

SEQ ID NO: 4061112 - DNA, 25 bp, Homo sapien
ctgtaggtcctggagcaacgagcca

SEQ ID NO: 4061113 - DNA, 25 bp, Homo sapien
tccagtgtcatccagtcggtaggac

SEQ ID NO: 4061114 - DNA, 25 bp, Homo sapien
catcagcacacttcgtatggtggtg

SEQ ID NO: 4061115 - DNA, 25 bp, Homo sapien
ggatgttgccatcattctctgggct

SEQ ID NO: 4061116 - DNA, 25 bp, Homo sapien
tcaatagtttgcaagtaggtcctcc

SEQ ID NO: 4061117 - DNA, 25 bp, Homo sapien
cagcaccccaccatatggaaatgca

SEQ ID NO: 4061118 - DNA, 25 bp, Homo sapien
tctgttcccagaatgaagcatcctc

SEQ ID NO: 4061119 - DNA, 25 bp, Homo sapien
agcacatgaggccaatgagaaaagt

SEQ ID NO: 4061120 - DNA, 25 bp, Homo sapien
gtctgaaagtctatgcagccccctg

SEQ ID NO: 4061121 - DNA, 25 bp, Homo sapien
atgtatgacagggagaccagtgggc

SEQ ID NO: 4061122 - DNA, 25 bp, Homo sapien
gtgtttcgcacgtcatataccagaa

SEQ ID NO: 4061123 - DNA, 25 bp, Homo sapien
taactcctgcacatgactgctcgtg

SEQ ID NO: 4061124 - DNA, 25 bp, Homo sapien
gtagttagcctcatcaagacaccag

SEQ ID NO: 4061125 - DNA, 25 bp, Homo sapien
cagtccagcatagatgtagttagcc

SEQ ID NO: 4061126 - DNA, 25 bp, Homo sapien
ctggaccacggtatttgtctccagg

SEQ ID NO: 4061127 - DNA, 25 bp, Homo sapien
cagataaaacgctgtgactaagggt

SEQ ID NO: 4061128 - DNA, 25 bp, Homo sapien
gagcatgtgacagataaaacgctgt

SEQ ID NO: 4061129 - DNA, 25 bp, Homo sapien
ctaagggtataaaagaagtcatcat

SEQ ID NO: 4061130 - DNA, 25 bp, Homo sapien
catggtactcaagggcagtgagtgc

SEQ ID NO: 4061131 - DNA, 25 bp, Homo sapien
tgaggtaactgctaaacgccagtcc

SEQ ID NO: 4061132 - DNA, 25 bp, Homo sapien
catgcatcggaatgtactgactgct

SEQ ID NO: 4061133 - DNA, 25 bp, Homo sapien
cagtccacggatctgtttgccatgc

SEQ ID NO: 4061134 - DNA, 25 bp, Homo sapien
taatagtgttgtctagggaagcaga

SEQ ID NO: 4061135 - DNA, 25 bp, Homo sapien
gccatgatccggcagtttcctgcct

SEQ ID NO: 4061136 - DNA, 25 bp, Homo sapien
cagagcatcacagtatgccatgatc

SEQ ID NO: 4061137 - DNA, 25 bp, Homo sapien
gcatcacagtatgccatgatccggc

SEQ ID NO: 4061138 - DNA, 25 bp, Homo sapien
agctcagagcatcacagtatgccat

SEQ ID NO: 4061139 - DNA, 25 bp, Homo sapien
cagctcaggacccatgcttgggagc

SEQ ID NO: 4061140 - DNA, 25 bp, Homo sapien
aattctgactttgatgtgacgtaag

SEQ ID NO: 4061141 - DNA, 25 bp, Homo sapien
gatgtgacgtaagtttttgcaagtc

SEQ ID NO: 4061142 - DNA, 25 bp, Homo sapien
ccctgggttgctgtaaattctgact

SEQ ID NO: 4061143 - DNA, 25 bp, Homo sapien
cattcctattccaaaagttctttgg

SEQ ID NO: 4061144 - DNA, 25 bp, Homo sapien
tattccaaaagttctttggattaga

SEQ ID NO: 4061145 - DNA, 25 bp, Homo sapien
tagcttcctcttccattcctattcc

SEQ ID NO: 4061146 - DNA, 25 bp, Homo sapien
attagcttcctcttccattcctatt

SEQ ID NO: 4061147 - DNA, 25 bp, Homo sapien
cctgcagttggagtcggcactgtgc

SEQ ID NO: 4061148 - DNA, 25 bp, Homo sapien
gcctttgaagcctagtgcacttatc

SEQ ID NO: 4061149 - DNA, 25 bp, Homo sapien
aggacctgcagttggagtcggcact

SEQ ID NO: 4061150 - DNA, 25 bp, Homo sapien
gtgcacttatcagtgaggacctgca

SEQ ID NO: 4061151 - DNA, 25 bp, Homo sapien
gtttccttagcatctgttccttcag

SEQ ID NO: 4061152 - DNA, 25 bp, Homo sapien
tgtttccttagcatctgttccttca

SEQ ID NO: 4061153 - DNA, 25 bp, Homo sapien
ctgtttccttagcatctgttccttc

SEQ ID NO: 4061154 - DNA, 25 bp, Homo sapien
tttccttagcatctgttccttcagt

SEQ ID NO: 4061155 - DNA, 25 bp, Homo sapien
tactacacccagtgcgctaagccat

SEQ ID NO: 4061156 - DNA, 25 bp, Homo sapien
ccaaaggtcattatgcagcacgtga

SEQ ID NO: 4061157 - DNA, 25 bp, Homo sapien
tgactgtaaagtaaaaggctaggca

SEQ ID NO: 4061158 - DNA, 25 bp, Homo sapien
caatctgtcattgacccaaaggtca

SEQ ID NO: 4061159 - DNA, 25 bp, Homo sapien
cagagatcccaagtcacaggtcaag

SEQ ID NO: 4061160 - DNA, 25 bp, Homo sapien
tctacataaggcaaacgatgcagac

SEQ ID NO: 4061161 - DNA, 25 bp, Homo sapien
gtcaagtaaaacctcactacgagtg

SEQ ID NO: 4061162 - DNA, 25 bp, Homo sapien
caacagaagtaatgtgccagatcct

SEQ ID NO: 4061163 - DNA, 25 bp, Homo sapien
taaaggacgacaatgtcactgtgcc

SEQ ID NO: 4061164 - DNA, 25 bp, Homo sapien
ccaaagctctcagggttcgggcata

SEQ ID NO: 4061165 - DNA, 25 bp, Homo sapien
cagggttcgggcataaaggacgaca

SEQ ID NO: 4061166 - DNA, 25 bp, Homo sapien
gcgctcctgttcactagtgtccaaa

SEQ ID NO: 4061167 - DNA, 25 bp, Homo sapien
tggaaatgcacctatacccaaagag

SEQ ID NO: 4061168 - DNA, 25 bp, Homo sapien
cagcattggtccactgttccagaca

SEQ ID NO: 4061169 - DNA, 25 bp, Homo sapien
caaagagatgcccacagcgtaatgc

SEQ ID NO: 4061170 - DNA, 25 bp, Homo sapien
cgtacttgtcctttaagccacgtgg

SEQ ID NO: 4061171 - DNA, 25 bp, Homo sapien
agaaggtagcagaggctcagacttc

SEQ ID NO: 4061172 - DNA, 25 bp, Homo sapien
tagagcgcagtgacgctatttgggc

SEQ ID NO: 4061173 - DNA, 25 bp, Homo sapien
agcgcagtgacgctatttgggctca

SEQ ID NO: 4061174 - DNA, 25 bp, Homo sapien
gcgcagtgacgctatttgggctcac

SEQ ID NO: 4061175 - DNA, 25 bp, Homo sapien
agctagagcgcagtgacgctatttg

SEQ ID NO: 4061176 - DNA, 25 bp, Homo sapien
tacatgtaacttcttgctctgctga

SEQ ID NO: 4061177 - DNA, 25 bp, Homo sapien
catcgatacatgtaacttcttgctc

SEQ ID NO: 4061178 - DNA, 25 bp, Homo sapien
gggtcttgcctccatcgatacatgt

SEQ ID NO: 4061179 - DNA, 25 bp, Homo sapien
gatacatgtaacttcttgctctgct

SEQ ID NO: 4061180 - DNA, 25 bp, Homo sapien
cagtatagttaagccacaagtaccc

SEQ ID NO: 4061181 - DNA, 25 bp, Homo sapien
cacaagtacccatcactcaatttaa

SEQ ID NO: 4061182 - DNA, 25 bp, Homo sapien
taacaaaccttaaaatgtcattata

SEQ ID NO: 4061183 - DNA, 25 bp, Homo sapien
acacagaacagtatagttaagccac

SEQ ID NO: 4061184 - DNA, 25 bp, Homo sapien
aacaacccctccatactctgcagag

SEQ ID NO: 4061185 - DNA, 25 bp, Homo sapien
tagctggcaagtcaggctgggtcct

SEQ ID NO: 4061186 - DNA, 25 bp, Homo sapien
tctgaatcataagtggtagctggca

SEQ ID NO: 4061187 - DNA, 25 bp, Homo sapien
gatacaggattcctagtctctgaat

SEQ ID NO: 4061188 - DNA, 25 bp, Homo sapien
gaaagtaagcatccaatggtgctct

SEQ ID NO: 4061189 - DNA, 25 bp, Homo sapien
gtaagcatccaatggtgctctcaac

SEQ ID NO: 4061190 - DNA, 25 bp, Homo sapien
ctgaaagtaagcatccaatggtgct

SEQ ID NO: 4061191 - DNA, 25 bp, Homo sapien
aagtaagcatccaatggtgctctca

SEQ ID NO: 4061192 - DNA, 25 bp, Homo sapien
aagactgaggacttgcaagaggcct

SEQ ID NO: 4061193 - DNA, 25 bp, Homo sapien
tacaagtcactgtgcttgaccaaga

SEQ ID NO: 4061194 - DNA, 25 bp, Homo sapien
tctgtttggctctctagtggttctg

SEQ ID NO: 4061195 - DNA, 25 bp, Homo sapien
ttttctcactagagtttggcttctg

SEQ ID NO: 4061196 - DNA, 25 bp, Homo sapien
agaactaggcatctgtcatccttga

SEQ ID NO: 4061197 - DNA, 25 bp, Homo sapien
catgggtaatagatgacctagctac

SEQ ID NO: 4061198 - DNA, 25 bp, Homo sapien
tccagatacagaaggcacaattcca

SEQ ID NO: 4061199 - DNA, 25 bp, Homo sapien
cttgatgggcactacagacactgga

SEQ ID NO: 4061200 - DNA, 25 bp, Homo sapien
taccacctagttttcaaggcacaac

SEQ ID NO: 4061201 - DNA, 25 bp, Homo sapien
tctagtacagcaatgatcacagact

SEQ ID NO: 4061202 - DNA, 25 bp, Homo sapien
ttatttccacctatgaggaactggg

SEQ ID NO: 4061203 - DNA, 25 bp, Homo sapien
tacagagattgccaacaaactacca

SEQ ID NO: 4061204 - DNA, 25 bp, Homo sapien
ggaattccagcatgccatgaagtct

SEQ ID NO: 4061205 - DNA, 25 bp, Homo sapien
tcttgccctccgtgaagcagatacc

SEQ ID NO: 4061206 - DNA, 25 bp, Homo sapien
cctctgagaccctccggctcttgcc

SEQ ID NO: 4061207 - DNA, 25 bp, Homo sapien
tcattggccctacactgtggtttga

SEQ ID NO: 4061208 - DNA, 25 bp, Homo sapien
gtggtgtcgcttggctgctgatcac

SEQ ID NO: 4061209 - DNA, 25 bp, Homo sapien
gtgtgattaccatcagatccctgcc

SEQ ID NO: 4061210 - DNA, 25 bp, Homo sapien
cattgaatgcaacgaagatgctggg

SEQ ID NO: 4061211 - DNA, 25 bp, Homo sapien
tcaacagacagttgcggagcaggct

SEQ ID NO: 4061212 - DNA, 25 bp, Homo sapien
ggcatgatttaactgcacctgaaca

SEQ ID NO: 4061213 - DNA, 25 bp, Homo sapien
taactgcacctgaacatcatattcc

SEQ ID NO: 4061214 - DNA, 25 bp, Homo sapien
gagctggctgttgttcggcatgatt

SEQ ID NO: 4061215 - DNA, 25 bp, Homo sapien
tgttgttcggcatgatttaactgca

SEQ ID NO: 4061216 - DNA, 25 bp, Homo sapien
gcactgtctactcccatatggttat

SEQ ID NO: 4061217 - DNA, 25 bp, Homo sapien
agagcagaatctagggggccgcact

SEQ ID NO: 4061218 - DNA, 25 bp, Homo sapien
gggccgcactgtctactcccatatg

SEQ ID NO: 4061219 - DNA, 25 bp, Homo sapien
aaaatcaaattcggccaggagctgt

SEQ ID NO: 4061220 - DNA, 25 bp, Homo sapien
gcactccagaccgggagagagagta

SEQ ID NO: 4061221 - DNA, 25 bp, Homo sapien
acccggagagtggaggttacattga

SEQ ID NO: 4061222 - DNA, 25 bp, Homo sapien
aacccggagagtggaggttacattg

SEQ ID NO: 4061223 - DNA, 25 bp, Homo sapien
cagaccgggagagagagtaagactc

SEQ ID NO: 4061224 - DNA, 25 bp, Homo sapien
cagggataatacaagtctttactcc

SEQ ID NO: 4061225 - DNA, 25 bp, Homo sapien
ctgaggagcccgaggctaggctctc

SEQ ID NO: 4061226 - DNA, 25 bp, Homo sapien
caggcaacgccgctgaggagcccga

SEQ ID NO: 4061227 - DNA, 25 bp, Homo sapien
taaagtgatgaagtaatcggcgctc

SEQ ID NO: 4061228 - DNA, 25 bp, Homo sapien
cggccgcactccgaatgcacctacg

SEQ ID NO: 4061229 - DNA, 25 bp, Homo sapien
atgcacctacgccaactgccacttc

SEQ ID NO: 4061230 - DNA, 25 bp, Homo sapien
actcggtagttacctcggccgcact

SEQ ID NO: 4061231 - DNA, 25 bp, Homo sapien
cgcgagcccgccgaagactcggtag

SEQ ID NO: 4061232 - DNA, 25 bp, Homo sapien
ataactgggactgaatggacaagtg

SEQ ID NO: 4061233 - DNA, 25 bp, Homo sapien
aataactgggactgaatggacaagt

SEQ ID NO: 4061234 - DNA, 25 bp, Homo sapien
gaataactgggactgaatggacaag

SEQ ID NO: 4061235 - DNA, 25 bp, Homo sapien
ggaataactgggactgaatggacaa

SEQ ID NO: 4061236 - DNA, 25 bp, Homo sapien
gcaaaagggtgcacgcttcagaata

SEQ ID NO: 4061237 - DNA, 25 bp, Homo sapien
aatagggtgactggaaatttcaagc

SEQ ID NO: 4061238 - DNA, 25 bp, Homo sapien
taatttcagcgagtactcccatagc

SEQ ID NO: 4061239 - DNA, 25 bp, Homo sapien
taactagggaatctacaagagggtc

SEQ ID NO: 4061240 - DNA, 25 bp, Homo sapien
tatttgtaacagagaagcgtgccca

SEQ ID NO: 4061241 - DNA, 25 bp, Homo sapien
tagtatgacttcagctaggaaagca

SEQ ID NO: 4061242 - DNA, 25 bp, Homo sapien
cattgccaagaggtgtggataccca

SEQ ID NO: 4061243 - DNA, 25 bp, Homo sapien
ggcctcttgaaacctaggcttggaa

SEQ ID NO: 4061244 - DNA, 25 bp, Homo sapien
tcagaacacatcattaagtctgcgc

SEQ ID NO: 4061245 - DNA, 25 bp, Homo sapien
acatcattaagtctgcgcttctgct

SEQ ID NO: 4061246 - DNA, 25 bp, Homo sapien
gaacacatcattaagtctgcgcttc

SEQ ID NO: 4061247 - DNA, 25 bp, Homo sapien
acacatcattaagtctgcgcttctg

SEQ ID NO: 4061248 - DNA, 25 bp, Homo sapien
tggggctcacgctctttacaccaga

SEQ ID NO: 4061249 - DNA, 25 bp, Homo sapien
ataatgatggggctcacgctcttta

SEQ ID NO: 4061250 - DNA, 25 bp, Homo sapien
tgatggggctcacgctctttacacc

SEQ ID NO: 4061251 - DNA, 25 bp, Homo sapien
ggctcacgctctttacaccagaaag

SEQ ID NO: 4061252 - DNA, 25 bp, Homo sapien
cgcacagagggatcatgggcccggc

SEQ ID NO: 4061253 - DNA, 25 bp, Homo sapien
cagagggatcatgggcccggcactc

SEQ ID NO: 4061254 - DNA, 25 bp, Homo sapien
ggatcatgggcccggcactcatcaa

SEQ ID NO: 4061255 - DNA, 25 bp, Homo sapien
catccacagagggccgcacagaggg

SEQ ID NO: 4061256 - DNA, 25 bp, Homo sapien
tgctgccgcttcacagccaccagct

SEQ ID NO: 4061257 - DNA, 25 bp, Homo sapien
agcttgcggatcttctcagaattac

SEQ ID NO: 4061258 - DNA, 25 bp, Homo sapien
accagcttgcggatcttctcagaat

SEQ ID NO: 4061259 - DNA, 25 bp, Homo sapien
agccaccagcttgcggatcttctca

SEQ ID NO: 4061260 - DNA, 25 bp, Homo sapien
ctggaaatgatagcatgagagcctc

SEQ ID NO: 4061261 - DNA, 25 bp, Homo sapien
ggaaatgatagcatgagagcctcaa

SEQ ID NO: 4061262 - DNA, 25 bp, Homo sapien
gcatgagagcctcaaaaaattgctc

SEQ ID NO: 4061263 - DNA, 25 bp, Homo sapien
caaaaaattgctccgctactcgtac

SEQ ID NO: 4061264 - DNA, 25 bp, Homo sapien
ctgagtatggaaacaacaagaactt

SEQ ID NO: 4061265 - DNA, 25 bp, Homo sapien
aacaagaacttccaacgattccact

SEQ ID NO: 4061266 - DNA, 25 bp, Homo sapien
gagtatggaaacaacaagaacttcc

SEQ ID NO: 4061267 - DNA, 25 bp, Homo sapien
aacttccaacgattccactgaccag

SEQ ID NO: 4061268 - DNA, 25 bp, Homo sapien
cactggctgagccagtcttcacatt

SEQ ID NO: 4061269 - DNA, 25 bp, Homo sapien
ggctgagccagtcttcacattcttc

SEQ ID NO: 4061270 - DNA, 25 bp, Homo sapien
ctgagccagtcttcacattcttcac

SEQ ID NO: 4061271 - DNA, 25 bp, Homo sapien
ctggctgagccagtcttcacattct

SEQ ID NO: 4061272 - DNA, 25 bp, Homo sapien
acgggatatctccagtggcgatttc

SEQ ID NO: 4061273 - DNA, 25 bp, Homo sapien
cttgaaacgggatatctccagtggc

SEQ ID NO: 4061274 - DNA, 25 bp, Homo sapien
cgatttcccagaggacgattccaaa

SEQ ID NO: 4061275 - DNA, 25 bp, Homo sapien
tggcgatttcccagaggacgattcc

SEQ ID NO: 4061276 - DNA, 25 bp, Homo sapien
aatctgtaccagaacgtgagtgtac

SEQ ID NO: 4061277 - DNA, 25 bp, Homo sapien
tgaacaaccataactagtctcccct

SEQ ID NO: 4061278 - DNA, 25 bp, Homo sapien
cagagttgagtttaggtggtccttg

SEQ ID NO: 4061279 - DNA, 25 bp, Homo sapien
gggttttcctattatgcacatctga

SEQ ID NO: 4061280 - DNA, 25 bp, Homo sapien
ctcgtagttcccaaactcatggaag

SEQ ID NO: 4061281 - DNA, 25 bp, Homo sapien
ttttcctcaactcaaatcctgcaag

SEQ ID NO: 4061282 - DNA, 25 bp, Homo sapien
tcctgaggtgagagatatgctgtag

SEQ ID NO: 4061283 - DNA, 25 bp, Homo sapien
tatgctgtagatttgactctgtctg

SEQ ID NO: 4061284 - DNA, 25 bp, Homo sapien
gttataaagcaccagtaagacctgc

SEQ ID NO: 4061285 - DNA, 25 bp, Homo sapien
tgttgctacacacaattgccaggga

SEQ ID NO: 4061286 - DNA, 25 bp, Homo sapien
gatcctttggctttggcgtgacgag

SEQ ID NO: 4061287 - DNA, 25 bp, Homo sapien
gggttcaacttatcacagtgcagtg

SEQ ID NO: 4061288 - DNA, 25 bp, Homo sapien
cagcatatgttcttgtcccatgcac

SEQ ID NO: 4061289 - DNA, 25 bp, Homo sapien
ttaaagaaactgtagcacaatcatg

SEQ ID NO: 4061290 - DNA, 25 bp, Homo sapien
gcatatgttcttgtcccatgcacac

SEQ ID NO: 4061291 - DNA, 25 bp, Homo sapien
tcttaaagaaactgtagcacaatca

SEQ ID NO: 4061292 - DNA, 25 bp, Homo sapien
agccccaaactcagccaggtaccca

SEQ ID NO: 4061293 - DNA, 25 bp, Homo sapien
cccaaactcagccaggtacccaaat

SEQ ID NO: 4061294 - DNA, 25 bp, Homo sapien
ctgccattgacaccattggtgtgct

SEQ ID NO: 4061295 - DNA, 25 bp, Homo sapien
caccattggtgtgctgaaggctgcc

SEQ ID NO: 4061296 - DNA, 25 bp, Homo sapien
tcattcatttgctcacacgtttcct

SEQ ID NO: 4061297 - DNA, 25 bp, Homo sapien
acttagatggctcatccccctttca

SEQ ID NO: 4061298 - DNA, 25 bp, Homo sapien
acgtttcctgagcactgacattctc

SEQ ID NO: 4061299 - DNA, 25 bp, Homo sapien
gaaaagggataaggcacttagatgg

SEQ ID NO: 4061300 - DNA, 25 bp, Homo sapien
gtacttatatcaccatcgcagaggg

SEQ ID NO: 4061301 - DNA, 25 bp, Homo sapien
tgaagagcgtgagagtagtagaaac

SEQ ID NO: 4061302 - DNA, 25 bp, Homo sapien
tatagtcaggctgcatgaagagcgt

SEQ ID NO: 4061303 - DNA, 25 bp, Homo sapien
tctagcgccgtatgggataccaggg

SEQ ID NO: 4061304 - DNA, 25 bp, Homo sapien
aaggcctgtctgctattatttgagg

SEQ ID NO: 4061305 - DNA, 25 bp, Homo sapien
cctgtctgctattatttgagggctg

SEQ ID NO: 4061306 - DNA, 25 bp, Homo sapien
ggcctgtctgctattatttgagggc

SEQ ID NO: 4061307 - DNA, 25 bp, Homo sapien
tgtctgctattatttgagggctgtc

SEQ ID NO: 4061308 - DNA, 25 bp, Homo sapien
atacagtggcgtaaacatagctccc

SEQ ID NO: 4061309 - DNA, 25 bp, Homo sapien
cctgcaggtcatgggcttctaagcc

SEQ ID NO: 4061310 - DNA, 25 bp, Homo sapien
tctcctggatgactgcgaggactca

SEQ ID NO: 4061311 - DNA, 25 bp, Homo sapien
cagctgatgggaatgctttgtagca

SEQ ID NO: 4061312 - DNA, 25 bp, Homo sapien
tgaatgacaagtgtggcctagacct

SEQ ID NO: 4061313 - DNA, 25 bp, Homo sapien
ccccattgtatgttgtagggacata

SEQ ID NO: 4061314 - DNA, 25 bp, Homo sapien
ggtttggcgctgctgacatccttct

SEQ ID NO: 4061315 - DNA, 25 bp, Homo sapien
gcctagacctgtcctgtgagtctga

SEQ ID NO: 4061316 - DNA, 25 bp, Homo sapien
gcagtgagggaaggcagtcatcaga

SEQ ID NO: 4061317 - DNA, 25 bp, Homo sapien
ctaaatgggcagtgagggaaggcag

SEQ ID NO: 4061318 - DNA, 25 bp, Homo sapien
tgggcagtgagggaaggcagtcatc

SEQ ID NO: 4061319 - DNA, 25 bp, Homo sapien
cagtgagggaaggcagtcatcagaa

SEQ ID NO: 4061320 - DNA, 25 bp, Homo sapien
atgcaggtttgacccaaagcgcccc

SEQ ID NO: 4061321 - DNA, 25 bp, Homo sapien
cagtcatgcaggtttgacccaaagc

SEQ ID NO: 4061322 - DNA, 25 bp, Homo sapien
aaagcgcccccgcaaggcacactca

SEQ ID NO: 4061323 - DNA, 25 bp, Homo sapien
tcatgcaggtttgacccaaagcgcc

SEQ ID NO: 4061324 - DNA, 25 bp, Homo sapien
cttcacttggtagccttgagttacc

SEQ ID NO: 4061325 - DNA, 25 bp, Homo sapien
tggtagccttgagttaccaggaagt

SEQ ID NO: 4061326 - DNA, 25 bp, Homo sapien
cacttggtagccttgagttaccagg

SEQ ID NO: 4061327 - DNA, 25 bp, Homo sapien
ccttgagttaccaggaagtttgagc

SEQ ID NO: 4061328 - DNA, 25 bp, Homo sapien
gatttttccgtggagttcaggtgct

SEQ ID NO: 4061329 - DNA, 25 bp, Homo sapien
tgatttttccgtggagttcaggtgc

SEQ ID NO: 4061330 - DNA, 25 bp, Homo sapien
atttttccgtggagttcaggtgctt

SEQ ID NO: 4061331 - DNA, 25 bp, Homo sapien
tttgggggactgacaatcataactg

SEQ ID NO: 4061332 - DNA, 25 bp, Homo sapien
gcggggagcataagtacctttgccc

SEQ ID NO: 4061333 - DNA, 25 bp, Homo sapien
aaggcggggagcataagtacctttg

SEQ ID NO: 4061334 - DNA, 25 bp, Homo sapien
caaaggcggggagcataagtacctt

SEQ ID NO: 4061335 - DNA, 25 bp, Homo sapien
cctcagggtcccgagttcacagtac

SEQ ID NO: 4061336 - DNA, 25 bp, Homo sapien
ccccaggactaggaccatgcgcttg

SEQ ID NO: 4061337 - DNA, 25 bp, Homo sapien
ggtctttttccctatccaacagctc

SEQ ID NO: 4061338 - DNA, 25 bp, Homo sapien
tgcgcttgccaagtgtgaggtcttt

SEQ ID NO: 4061339 - DNA, 25 bp, Homo sapien
ttgggagattcgaatttcttcatgg

SEQ ID NO: 4061340 - DNA, 25 bp, Homo sapien
caggatgttgggagattcgaatttc

SEQ ID NO: 4061341 - DNA, 25 bp, Homo sapien
aatcccaaatatacgcaggatgttg

SEQ ID NO: 4061342 - DNA, 25 bp, Homo sapien
aatgcaaatcccaaatatacgcagg

SEQ ID NO: 4061343 - DNA, 25 bp, Homo sapien
cagtggagagcacataatttaaccc

SEQ ID NO: 4061344 - DNA, 25 bp, Homo sapien
gactctgctccttaacagtggagag

SEQ ID NO: 4061345 - DNA, 25 bp, Homo sapien
tacacacgagagaaccacacaaaac

SEQ ID NO: 4061346 - DNA, 25 bp, Homo sapien
tagagtaagtattggtacacacgag

SEQ ID NO: 4061347 - DNA, 25 bp, Homo sapien
ttttgaatacttttatggccactgg

SEQ ID NO: 4061348 - DNA, 25 bp, Homo sapien
actggagctctgtggtattctcctt

SEQ ID NO: 4061349 - DNA, 25 bp, Homo sapien
agctctgtggtattctcctttataa

SEQ ID NO: 4061350 - DNA, 25 bp, Homo sapien
tgccagcctggagttttttgaatac

SEQ ID NO: 4061351 - DNA, 25 bp, Homo sapien
ccttgatttgctcttgcgggatctc

SEQ ID NO: 4061352 - DNA, 25 bp, Homo sapien
ctgacctcacccccgagaggaaaga

SEQ ID NO: 4061353 - DNA, 25 bp, Homo sapien
gagtcaatgagcagaggaaggggtc

SEQ ID NO: 4061354 - DNA, 25 bp, Homo sapien
ggaaagaagacaaaagagtcaatga

SEQ ID NO: 4061355 - DNA, 25 bp, Homo sapien
tcacccccgagaggaaagaagacaa

SEQ ID NO: 4061356 - DNA, 25 bp, Homo sapien
tctgagtgaccagtagagacacagc

SEQ ID NO: 4061357 - DNA, 25 bp, Homo sapien
gggaagctctactacatgaaccaga

SEQ ID NO: 4061358 - DNA, 25 bp, Homo sapien
gccatgaatggatccccaaacctgt

SEQ ID NO: 4061359 - DNA, 25 bp, Homo sapien
tagtagttagggacatagttcaagc

SEQ ID NO: 4061360 - DNA, 25 bp, Homo sapien
tctaatcgtctcagtgaagcttcta

SEQ ID NO: 4061361 - DNA, 25 bp, Homo sapien
gttgatttctaatcgtctcagtgaa

SEQ ID NO: 4061362 - DNA, 25 bp, Homo sapien
gatttctaatcgtctcagtgaagct

SEQ ID NO: 4061363 - DNA, 25 bp, Homo sapien
taatcgtctcagtgaagcttctatt

SEQ ID NO: 4061364 - DNA, 25 bp, Homo sapien
gatattaaaatcacacgccaatcaa

SEQ ID NO: 4061365 - DNA, 25 bp, Homo sapien
ggcagtatatgctcaaaatagatat

SEQ ID NO: 4061366 - DNA, 25 bp, Homo sapien
tgctaattaaaactgttgagatatc

SEQ ID NO: 4061367 - DNA, 25 bp, Homo sapien
aatcacacgccaatcaaaactaaaa

SEQ ID NO: 4061368 - DNA, 25 bp, Homo sapien
agttttagtactgaaggtctcatgt

SEQ ID NO: 4061369 - DNA, 25 bp, Homo sapien
tagtactgaaggtctcatgtcctca

SEQ ID NO: 4061370 - DNA, 25 bp, Homo sapien
actgaaggtctcatgtcctcagaaa

SEQ ID NO: 4061371 - DNA, 25 bp, Homo sapien
ttttagtactgaaggtctcatgtcc

SEQ ID NO: 4061372 - DNA, 25 bp, Homo sapien
agctatgattgtgccgccgtcctct

SEQ ID NO: 4061373 - DNA, 25 bp, Homo sapien
tatatctgggccaaaggatgttagg

SEQ ID NO: 4061374 - DNA, 25 bp, Homo sapien
cgccgtcctctagcccgtgcaacag

SEQ ID NO: 4061375 - DNA, 25 bp, Homo sapien
ctcttcaacgctggcttgcccaaat

SEQ ID NO: 4061376 - DNA, 25 bp, Homo sapien
aaatgcattcaactgcactcccact

SEQ ID NO: 4061377 - DNA, 25 bp, Homo sapien
aatgcattcaactgcactcccactc

SEQ ID NO: 4061378 - DNA, 25 bp, Homo sapien
agcatctggaaagctcgcctgtctt

SEQ ID NO: 4061379 - DNA, 25 bp, Homo sapien
ggaaagctcgcctgtcttcgtctgc

SEQ ID NO: 4061380 - DNA, 25 bp, Homo sapien
gtgaaacaggcatgcgttgctcaac

SEQ ID NO: 4061381 - DNA, 25 bp, Homo sapien
ggtgaaacaggcatgcgttgctcaa

SEQ ID NO: 4061382 - DNA, 25 bp, Homo sapien
aagtaacagcgagagctccttccag

SEQ ID NO: 4061383 - DNA, 25 bp, Homo sapien
cctggcttgctgttagaaacctgca

SEQ ID NO: 4061384 - DNA, 25 bp, Homo sapien
gttaacttctcagagggcacgctcc

SEQ ID NO: 4061385 - DNA, 25 bp, Homo sapien
cagggcagccttgaagcggttcatg

SEQ ID NO: 4061386 - DNA, 25 bp, Homo sapien
tcacaccgtttgtggatgacctggc

SEQ ID NO: 4061387 - DNA, 25 bp, Homo sapien
tgacctggccaagggtgataatatg

SEQ ID NO: 4061388 - DNA, 25 bp, Homo sapien
ccaagggtgataatatgcttcaaat

SEQ ID NO: 4061389 - DNA, 25 bp, Homo sapien
ctcttcacaccgtttgtggatgacc

SEQ ID NO: 4061390 - DNA, 25 bp, Homo sapien
ttttctgagaagacatcaggtaact

SEQ ID NO: 4061391 - DNA, 25 bp, Homo sapien
tctgagaagacatcaggtaacttgt

SEQ ID NO: 4061392 - DNA, 25 bp, Homo sapien
tttctgagaagacatcaggtaactt

SEQ ID NO: 4061393 - DNA, 25 bp, Homo sapien
ttctgagaagacatcaggtaacttg

SEQ ID NO: 4061394 - DNA, 25 bp, Homo sapien
tactgggcgtctcgctttggcggaa

SEQ ID NO: 4061395 - DNA, 25 bp, Homo sapien
gtagtgcgagatccgagcaggcagc

SEQ ID NO: 4061396 - DNA, 25 bp, Homo sapien
tttggcggaaggtagtgcgagatcc

SEQ ID NO: 4061397 - DNA, 25 bp, Homo sapien
ctactgggcgtctcgctttggcgga

SEQ ID NO: 4061398 - DNA, 25 bp, Homo sapien
cacccctggttcttcccatcaccgt

SEQ ID NO: 4061399 - DNA, 25 bp, Homo sapien
aggaaatgaaaccaactcggtcctg

SEQ ID NO: 4061400 - DNA, 25 bp, Homo sapien
gaaatgaaaccaactcggtcctgag

SEQ ID NO: 4061401 - DNA, 25 bp, Homo sapien
aaccaactcggtcctgagttccagg

SEQ ID NO: 4061402 - DNA, 25 bp, Homo sapien
cagttccaaaaagctcgctcttcca

SEQ ID NO: 4061403 - DNA, 25 bp, Homo sapien
cacagttccaaaaagctcgctcttc

SEQ ID NO: 4061404 - DNA, 25 bp, Homo sapien
cgaggggtgtgcgtccaatctgtcc

SEQ ID NO: 4061405 - DNA, 25 bp, Homo sapien
gcgtccaatctgtcccgtgcacagt

SEQ ID NO: 4061406 - DNA, 25 bp, Homo sapien
caggcgagaagtttgcaaacgcgag

SEQ ID NO: 4061407 - DNA, 25 bp, Homo sapien
gcgagaagtttgcaaacgcgaggcc

SEQ ID NO: 4061408 - DNA, 25 bp, Homo sapien
ctgcccaggcgagaagtttgcaaac

SEQ ID NO: 4061409 - DNA, 25 bp, Homo sapien
gaagtttgcaaacgcgaggcccgcg

SEQ ID NO: 4061410 - DNA, 25 bp, Homo sapien
ctgcactctgctgactgtaccggac

SEQ ID NO: 4061411 - DNA, 25 bp, Homo sapien
tgtaccggacgccacacgtggctgg

SEQ ID NO: 4061412 - DNA, 25 bp, Homo sapien
ggcgacaaggcgccccgatccctac

SEQ ID NO: 4061413 - DNA, 25 bp, Homo sapien
acgtggctggcggcgacaaggcgcc

SEQ ID NO: 4061414 - DNA, 25 bp, Homo sapien
actgcagctgcacttgagcagggtc

SEQ ID NO: 4061415 - DNA, 25 bp, Homo sapien
ccactcagccacttggatggctgtt

SEQ ID NO: 4061416 - DNA, 25 bp, Homo sapien
tccactcagccacttggatggctgt

SEQ ID NO: 4061417 - DNA, 25 bp, Homo sapien
tttctaggcagctcggagccacggc

SEQ ID NO: 4061418 - DNA, 25 bp, Homo sapien
gcagagaatgctgcgacacttcccc

SEQ ID NO: 4061419 - DNA, 25 bp, Homo sapien
tccctggagccgctttctaggcagc

SEQ ID NO: 4061420 - DNA, 25 bp, Homo sapien
ctgcagagaatgctgcgacacttcc

SEQ ID NO: 4061421 - DNA, 25 bp, Homo sapien
ttgtccaaggacttttgccaaagcc

SEQ ID NO: 4061422 - DNA, 25 bp, Homo sapien
aaggacttttgccaaagccagcatc

SEQ ID NO: 4061423 - DNA, 25 bp, Homo sapien
ccaaggacttttgccaaagccagca

SEQ ID NO: 4061424 - DNA, 25 bp, Homo sapien
tttgtccaaggacttttgccaaagc

SEQ ID NO: 4061425 - DNA, 25 bp, Homo sapien
cagtccccgcgagggcagtaataat

SEQ ID NO: 4061426 - DNA, 25 bp, Homo sapien
cagtaataatggagtagggctgcat

SEQ ID NO: 4061427 - DNA, 25 bp, Homo sapien
gcagtaataatggagtagggctgca

SEQ ID NO: 4061428 - DNA, 25 bp, Homo sapien
ccaaaacagtccccgcgagggcagt

SEQ ID NO: 4061429 - DNA, 25 bp, Homo sapien
tctgggaccagactaagaacatgta

SEQ ID NO: 4061430 - DNA, 25 bp, Homo sapien
ttagaaagggccgtctgaccagctc

SEQ ID NO: 4061431 - DNA, 25 bp, Homo sapien
tgtgggaggcatcacgctgtctctt

SEQ ID NO: 4061432 - DNA, 25 bp, Homo sapien
tctgactgtgaaagcgagctgtgcc

SEQ ID NO: 4061433 - DNA, 25 bp, Homo sapien
gctctaggcagggacgctccaggaa

SEQ ID NO: 4061434 - DNA, 25 bp, Homo sapien
tgagctctaggcagggacgctccag

SEQ ID NO: 4061435 - DNA, 25 bp, Homo sapien
gggctgagctctaggcagggacgct

SEQ ID NO: 4061436 - DNA, 25 bp, Homo sapien
tctaggcagggacgctccaggaaga

SEQ ID NO: 4061437 - DNA, 25 bp, Homo sapien
taatggggtctgaatggcgggtggg

SEQ ID NO: 4061438 - DNA, 25 bp, Homo sapien
agcaccttccactaggctgcagggc

SEQ ID NO: 4061439 - DNA, 25 bp, Homo sapien
tctgaatggcgggtgggggtcggga

SEQ ID NO: 4061440 - DNA, 25 bp, Homo sapien
tcagcaccttccactaggctgcagg

SEQ ID NO: 4061441 - DNA, 25 bp, Homo sapien
cactgcgtcttcaggtggggtttct

SEQ ID NO: 4061442 - DNA, 25 bp, Homo sapien
aaacagtaatcccacaatttagtgc

SEQ ID NO: 4061443 - DNA, 25 bp, Homo sapien
cacaatttagtgctgataccaaatc

SEQ ID NO: 4061444 - DNA, 25 bp, Homo sapien
gagggtgtggaaacagtaatcccac

SEQ ID NO: 4061445 - DNA, 25 bp, Homo sapien
gctgcatgcacaagtagaagacgcc

SEQ ID NO: 4061446 - DNA, 25 bp, Homo sapien
ggtcatgtcatagaggacgtagccc

SEQ ID NO: 4061447 - DNA, 25 bp, Homo sapien
ttcaggctgtacaggtaggagccct

SEQ ID NO: 4061448 - DNA, 25 bp, Homo sapien
ccttgtgcggcgagccaaagtgcag

SEQ ID NO: 4061449 - DNA, 25 bp, Homo sapien
ggcagctggccaaaccctggccact

SEQ ID NO: 4061450 - DNA, 25 bp, Homo sapien
cagctggccaaaccctggccactcc

SEQ ID NO: 4061451 - DNA, 25 bp, Homo sapien
ccggcagctggccaaaccctggcca

SEQ ID NO: 4061452 - DNA, 25 bp, Homo sapien
gccccggcagctggccaaaccctgg

SEQ ID NO: 4061453 - DNA, 25 bp, Homo sapien
cattccactgcgtaggcttggcacc

SEQ ID NO: 4061454 - DNA, 25 bp, Homo sapien
gacaggggcacagcggcccagacat

SEQ ID NO: 4061455 - DNA, 25 bp, Homo sapien
cactgcgtaggcttggcacctttgg

SEQ ID NO: 4061456 - DNA, 25 bp, Homo sapien
ccagacattccactgcgtaggcttg

SEQ ID NO: 4061457 - DNA, 25 bp, Homo sapien
tcaggtgctagacaggtatcccatc

SEQ ID NO: 4061458 - DNA, 25 bp, Homo sapien
catttgtgagccaggaagggacctg

SEQ ID NO: 4061459 - DNA, 25 bp, Homo sapien
ccatcttatagaggccactgtgact

SEQ ID NO: 4061460 - DNA, 25 bp, Homo sapien
ggccaccacgtctggaagatctgga

SEQ ID NO: 4061461 - DNA, 25 bp, Homo sapien
ggaagtgtctcaaaagagggagcct

SEQ ID NO: 4061462 - DNA, 25 bp, Homo sapien
tcatgtggaacaggaagcggtggat

SEQ ID NO: 4061463 - DNA, 25 bp, Homo sapien
aagtgcagcatgatgaggtaatagc

SEQ ID NO: 4061464 - DNA, 25 bp, Homo sapien
tgaggtactcgatgaggctccagag

SEQ ID NO: 4061465 - DNA, 25 bp, Homo sapien
tgctggccgtgcatgacgaagtgca

SEQ ID NO: 4061466 - DNA, 25 bp, Homo sapien
cggacagtgggtgattcagcgagca

SEQ ID NO: 4061467 - DNA, 25 bp, Homo sapien
ccggagctggtactgagtggcatct

SEQ ID NO: 4061468 - DNA, 25 bp, Homo sapien
agcgagcaggccttctgagcaacaa

SEQ ID NO: 4061469 - DNA, 25 bp, Homo sapien
catctctggaggaatccggcggagg

SEQ ID NO: 4061470 - DNA, 25 bp, Homo sapien
gaacttcctgcagctcgctcaccag

SEQ ID NO: 4061471 - DNA, 25 bp, Homo sapien
ggggaacttcctgcagctcgctcac

SEQ ID NO: 4061472 - DNA, 25 bp, Homo sapien
ggaacttcctgcagctcgctcacca

SEQ ID NO: 4061473 - DNA, 25 bp, Homo sapien
aacttcctgcagctcgctcaccaga

SEQ ID NO: 4061474 - DNA, 25 bp, Homo sapien
agtcatcctaaaccccagtctcata

SEQ ID NO: 4061475 - DNA, 25 bp, Homo sapien
gtcccagcggctatacttaaaccca

SEQ ID NO: 4061476 - DNA, 25 bp, Homo sapien
taaaccccagtctcataggctcttt

SEQ ID NO: 4061477 - DNA, 25 bp, Homo sapien
gaggcccaaggtaggcaagatgctt

SEQ ID NO: 4061478 - DNA, 25 bp, Homo sapien
tattgctatgccacccgatgattcc

SEQ ID NO: 4061479 - DNA, 25 bp, Homo sapien
ggtagatgggagtcagacaaaattc

SEQ ID NO: 4061480 - DNA, 25 bp, Homo sapien
acagagaggcttcaccaaaaatgtc

SEQ ID NO: 4061481 - DNA, 25 bp, Homo sapien
ttggaagactatttctacagagagg

SEQ ID NO: 4061482 - DNA, 25 bp, Homo sapien
tcagggcaagtcaggaaagaaactg

SEQ ID NO: 4061483 - DNA, 25 bp, Homo sapien
aagtcaggaaagaaactggcattac

SEQ ID NO: 4061484 - DNA, 25 bp, Homo sapien
gcaagtcaggaaagaaactggcatt

SEQ ID NO: 4061485 - DNA, 25 bp, Homo sapien
gggcaagtcaggaaagaaactggca

SEQ ID NO: 4061486 - DNA, 25 bp, Homo sapien
agagtcggacgttgccctgggcaaa

SEQ ID NO: 4061487 - DNA, 25 bp, Homo sapien
caaaggttcggtagtaggaccagct

SEQ ID NO: 4061488 - DNA, 25 bp, Homo sapien
ctgttgtaaatgacgtgaagagtcg

SEQ ID NO: 4061489 - DNA, 25 bp, Homo sapien
tagtaggaccagctgagatacagca

SEQ ID NO: 4061490 - DNA, 25 bp, Homo sapien
cagacagtcttagagaggccctcaa

SEQ ID NO: 4061491 - DNA, 25 bp, Homo sapien
tggtcaccggctggtgaacccactc

SEQ ID NO: 4061492 - DNA, 25 bp, Homo sapien
cacaggagaggctttcgccagtcca

SEQ ID NO: 4061493 - DNA, 25 bp, Homo sapien
ggtgaacccactcatcgtacttctc

SEQ ID NO: 4061494 - DNA, 25 bp, Homo sapien
agagatgaagccaagtggacgtttg

SEQ ID NO: 4061495 - DNA, 25 bp, Homo sapien
caagtggacgtttgatattcacgtc

SEQ ID NO: 4061496 - DNA, 25 bp, Homo sapien
gaagccaagtggacgtttgatattc

SEQ ID NO: 4061497 - DNA, 25 bp, Homo sapien
gacgtttgatattcacgtcttccca

SEQ ID NO: 4061498 - DNA, 25 bp, Homo sapien
ttctccaggcctgttgtctccaagg

SEQ ID NO: 4061499 - DNA, 25 bp, Homo sapien
catccaggagttgcttattctccag

SEQ ID NO: 4061500 - DNA, 25 bp, Homo sapien
tccaggagttgcttattctccaggc

SEQ ID NO: 4061501 - DNA, 25 bp, Homo sapien
ctgttgtctccaaggcaaggatgta

SEQ ID NO: 4061502 - DNA, 25 bp, Homo sapien
catttaatgttggagtaggtctcct

SEQ ID NO: 4061503 - DNA, 25 bp, Homo sapien
tggagtaggtctcctctggttttct

SEQ ID NO: 4061504 - DNA, 25 bp, Homo sapien
tttacatttaatgttggagtaggtc

SEQ ID NO: 4061505 - DNA, 25 bp, Homo sapien
taatgttggagtaggtctcctctgg

SEQ ID NO: 4061506 - DNA, 25 bp, Homo sapien
gaccaaacaattgccttagctcatt

SEQ ID NO: 4061507 - DNA, 25 bp, Homo sapien
aattgccttagctcattgccatggg

SEQ ID NO: 4061508 - DNA, 25 bp, Homo sapien
aaacaattgccttagctcattgcca

SEQ ID NO: 4061509 - DNA, 25 bp, Homo sapien
gggtgggcagcgctgctgacactga

SEQ ID NO: 4061510 - DNA, 25 bp, Homo sapien
cagcttgagcgctggcagaaagcag

SEQ ID NO: 4061511 - DNA, 25 bp, Homo sapien
gagagatgaaagacagcttgagcgc

SEQ ID NO: 4061512 - DNA, 25 bp, Homo sapien
agagtggatagggagcaaaaatgcc

SEQ ID NO: 4061513 - DNA, 25 bp, Homo sapien
cccacgaggattcaggcagcggaga

SEQ ID NO: 4061514 - DNA, 25 bp, Homo sapien
tattttttgagcaccgctgagctcc

SEQ ID NO: 4061515 - DNA, 25 bp, Homo sapien
gggtattttttgagcaccgctgagc

SEQ ID NO: 4061516 - DNA, 25 bp, Homo sapien
ttctgccttggggtattttttgagc

SEQ ID NO: 4061517 - DNA, 25 bp, Homo sapien
gcaccgctgagctcctctgaagagg

SEQ ID NO: 4061518 - DNA, 25 bp, Homo sapien
gatctccccctgttccagactgagg

SEQ ID NO: 4061519 - DNA, 25 bp, Homo sapien
ttccagactgaggtcctgaccctgc

SEQ ID NO: 4061520 - DNA, 25 bp, Homo sapien
ccggctgcatggccgggcagccttt

SEQ ID NO: 4061521 - DNA, 25 bp, Homo sapien
agctcgccggctgcatggccgggca

SEQ ID NO: 4061522 - DNA, 25 bp, Homo sapien
ctgagtttcctcaagggctacaggc

SEQ ID NO: 4061523 - DNA, 25 bp, Homo sapien
tcaagggctacaggctcgttctcca

SEQ ID NO: 4061524 - DNA, 25 bp, Homo sapien
ccaatccaccactttgaaccgtggt

SEQ ID NO: 4061525 - DNA, 25 bp, Homo sapien
ctttgaaccgtggttccatagcagg

SEQ ID NO: 4061526 - DNA, 25 bp, Homo sapien
tcaggactgatatgcttctggcaaa

SEQ ID NO: 4061527 - DNA, 25 bp, Homo sapien
gatgggacacacctccaacatggga

SEQ ID NO: 4061528 - DNA, 25 bp, Homo sapien
cgtcacgcggtgtcagtagcaggaa

SEQ ID NO: 4061529 - DNA, 25 bp, Homo sapien
gaatactcctaggtacagggacacg

SEQ ID NO: 4061530 - DNA, 25 bp, Homo sapien
tctagaaaggtgataaaattagcca

SEQ ID NO: 4061531 - DNA, 25 bp, Homo sapien
ggttctcctccccttatgtctagaa

SEQ ID NO: 4061532 - DNA, 25 bp, Homo sapien
tctgatgaagggcaacctcaggtgg

SEQ ID NO: 4061533 - DNA, 25 bp, Homo sapien
accagagggaccagagtcccagcaa

SEQ ID NO: 4061534 - DNA, 25 bp, Homo sapien
cctaggtcttactgctgagatgggc

SEQ ID NO: 4061535 - DNA, 25 bp, Homo sapien
gccactgccgtagagaaggtctgat

SEQ ID NO: 4061536 - DNA, 25 bp, Homo sapien
tatgaggtagcaacatgccatcggc

SEQ ID NO: 4061537 - DNA, 25 bp, Homo sapien
tctgatgtggaaggccctaggtctt

SEQ ID NO: 4061538 - DNA, 25 bp, Homo sapien
caagtgttctttatctgagttcctg

SEQ ID NO: 4061539 - DNA, 25 bp, Homo sapien
cagggatcatcgttatccaagtgtt

SEQ ID NO: 4061540 - DNA, 25 bp, Homo sapien
gagaattgcttgtccactcccctgg

SEQ ID NO: 4061541 - DNA, 25 bp, Homo sapien
tgtgatggtacagatgaaatccctc

SEQ ID NO: 4061542 - DNA, 25 bp, Homo sapien
caggtgagactcgactggcaccaca

SEQ ID NO: 4061543 - DNA, 25 bp, Homo sapien
ctccaggtgagactcgactggcacc

SEQ ID NO: 4061544 - DNA, 25 bp, Homo sapien
tcactgaattgtggggtgacaccag

SEQ ID NO: 4061545 - DNA, 25 bp, Homo sapien
ggtgagactcgactggcaccacagc

SEQ ID NO: 4061546 - DNA, 25 bp, Homo sapien
tcgctcaaggtgggcagcttggctt

SEQ ID NO: 4061547 - DNA, 25 bp, Homo sapien
cactcgctcaaggtgggcagcttgg

SEQ ID NO: 4061548 - DNA, 25 bp, Homo sapien
ctcaaggtgggcagcttggcttcac

SEQ ID NO: 4061549 - DNA, 25 bp, Homo sapien
tcactcgctcaaggtgggcagcttg

SEQ ID NO: 4061550 - DNA, 25 bp, Homo sapien
gcagcatgttggctcaaacaagttg

SEQ ID NO: 4061551 - DNA, 25 bp, Homo sapien
catgttggctcaaacaagttggact

SEQ ID NO: 4061552 - DNA, 25 bp, Homo sapien
gttggacttgttttgtgaatgtgcc

SEQ ID NO: 4061553 - DNA, 25 bp, Homo sapien
gaatgtgccttcgtgtgagtgtgaa

SEQ ID NO: 4061554 - DNA, 25 bp, Homo sapien
tgtgcctctttgaagcagaagtgag

SEQ ID NO: 4061555 - DNA, 25 bp, Homo sapien
taggacaagaatataagggaaggtc

SEQ ID NO: 4061556 - DNA, 25 bp, Homo sapien
tgagaagagttactgatctgtgcct

SEQ ID NO: 4061557 - DNA, 25 bp, Homo sapien
ccaggaaacccaagctagtgagaag

SEQ ID NO: 4061558 - DNA, 25 bp, Homo sapien
ttatccaaacagaaacggagagtgg

SEQ ID NO: 4061559 - DNA, 25 bp, Homo sapien
caaacagaaacggagagtggttgca

SEQ ID NO: 4061560 - DNA, 25 bp, Homo sapien
ggaatccaggttgtcggagggcagg

SEQ ID NO: 4061561 - DNA, 25 bp, Homo sapien
aagaggaaggaaagccgaggcgtat

SEQ ID NO: 4061562 - DNA, 25 bp, Homo sapien
ccttgggtcctgctagagggcaagt

SEQ ID NO: 4061563 - DNA, 25 bp, Homo sapien
aagagcaagttcctggagagaggaa

SEQ ID NO: 4061564 - DNA, 25 bp, Homo sapien
gagtggaaggctgacggaggcctgg

SEQ ID NO: 4061565 - DNA, 25 bp, Homo sapien
gaaatgggagagctggcacggaggc

SEQ ID NO: 4061566 - DNA, 25 bp, Homo sapien
cggagctctcccacgtagtactgct

SEQ ID NO: 4061567 - DNA, 25 bp, Homo sapien
aagctggagaggtcgtagaggcggg

SEQ ID NO: 4061568 - DNA, 25 bp, Homo sapien
cgctggacctcggagggcgagaagg

SEQ ID NO: 4061569 - DNA, 25 bp, Homo sapien
aggtcggcgctgatgtcctggcccg

SEQ ID NO: 4061570 - DNA, 25 bp, Homo sapien
cagcccggcgtctgctctgctgcca

SEQ ID NO: 4061571 - DNA, 25 bp, Homo sapien
tctgctgccaccctgagcgcctcta

SEQ ID NO: 4061572 - DNA, 25 bp, Homo sapien
ctgccaccctgagcgcctctaacat

SEQ ID NO: 4061573 - DNA, 25 bp, Homo sapien
tgctgccaccctgagcgcctctaac

SEQ ID NO: 4061574 - DNA, 25 bp, Homo sapien
tcagatgtagatccttaacgttacc

SEQ ID NO: 4061575 - DNA, 25 bp, Homo sapien
gtagatccttaacgttaccatagac

SEQ ID NO: 4061576 - DNA, 25 bp, Homo sapien
cagatgtagatccttaacgttacca

SEQ ID NO: 4061577 - DNA, 25 bp, Homo sapien
gatgtagatccttaacgttaccata

SEQ ID NO: 4061578 - DNA, 25 bp, Homo sapien
tgatcctggccatgtatgcctgaac

SEQ ID NO: 4061579 - DNA, 25 bp, Homo sapien
gaacccgaagagagttgcaaaggag

SEQ ID NO: 4061580 - DNA, 25 bp, Homo sapien
gctcccagtatgagcggcgctgacc

SEQ ID NO: 4061581 - DNA, 25 bp, Homo sapien
caccactaggtggtggacgtacgct

SEQ ID NO: 4061582 - DNA, 25 bp, Homo sapien
cccaagctgcatagccactgagtga

SEQ ID NO: 4061583 - DNA, 25 bp, Homo sapien
gatactcactttccccatgaagaca

SEQ ID NO: 4061584 - DNA, 25 bp, Homo sapien
tatgcatgcattttggccaagtgaa

SEQ ID NO: 4061585 - DNA, 25 bp, Homo sapien
tgaggtagccaagccagaaagcctt

SEQ ID NO: 4061586 - DNA, 25 bp, Homo sapien
gggtcgtaccaggacgccaacattc

SEQ ID NO: 4061587 - DNA, 25 bp, Homo sapien
tgaccgcggcctacgggtcgtacca

SEQ ID NO: 4061588 - DNA, 25 bp, Homo sapien
gttctgtagagcaggtgggtctctt

SEQ ID NO: 4061589 - DNA, 25 bp, Homo sapien
ttactgacatttgcacgggtgaccg

SEQ ID NO: 4061590 - DNA, 25 bp, Homo sapien
accactgacaaggtcactgtgtctg

SEQ ID NO: 4061591 - DNA, 25 bp, Homo sapien
gggacccttcatccaccatgaactc

SEQ ID NO: 4061592 - DNA, 25 bp, Homo sapien
caaggtcactgtgtctggcagattt

SEQ ID NO: 4061593 - DNA, 25 bp, Homo sapien
tgaactccagtcctcttctgtcact

SEQ ID NO: 4061594 - DNA, 25 bp, Homo sapien
ccaccttggcaaatttttcactccg

SEQ ID NO: 4061595 - DNA, 25 bp, Homo sapien
ttcactccgtgagtcctggactttc

SEQ ID NO: 4061596 - DNA, 25 bp, Homo sapien
ggctaatggtcgtcgagggtaatta

SEQ ID NO: 4061597 - DNA, 25 bp, Homo sapien
cgtcgagggtaattatggcaccaaa

SEQ ID NO: 4061598 - DNA, 25 bp, Homo sapien
ctgagagaatatcggccatggcccg

SEQ ID NO: 4061599 - DNA, 25 bp, Homo sapien
gacagatagggacaggtttttacac

SEQ ID NO: 4061600 - DNA, 25 bp, Homo sapien
tgtgtatgcaaattcccggctgggc

SEQ ID NO: 4061601 - DNA, 25 bp, Homo sapien
gaacaggaaaagattgctctctgca

SEQ ID NO: 4061602 - DNA, 25 bp, Homo sapien
agaattttattagccaagggatagc

SEQ ID NO: 4061603 - DNA, 25 bp, Homo sapien
aattttattagccaagggatagcag

SEQ ID NO: 4061604 - DNA, 25 bp, Homo sapien
actagaattttattagccaagggat

SEQ ID NO: 4061605 - DNA, 25 bp, Homo sapien
caaattactagaattttattagcca

SEQ ID NO: 4061606 - DNA, 25 bp, Homo sapien
taagaatccttaagtacagtgcata

SEQ ID NO: 4061607 - DNA, 25 bp, Homo sapien
tccttaagtacagtgcatatttaca

SEQ ID NO: 4061608 - DNA, 25 bp, Homo sapien
gaatccttaagtacagtgcatattt

SEQ ID NO: 4061609 - DNA, 25 bp, Homo sapien
aagaatccttaagtacagtgcatat

SEQ ID NO: 4061610 - DNA, 25 bp, Homo sapien
attttagaaggccactgtccatcag

SEQ ID NO: 4061611 - DNA, 25 bp, Homo sapien
tctaaagccatgatgccataggtcc

SEQ ID NO: 4061612 - DNA, 25 bp, Homo sapien
tcagctcagtaaatgtaccagcttc

SEQ ID NO: 4061613 - DNA, 25 bp, Homo sapien
gccataggtccatttgttgatgaaa

SEQ ID NO: 4061614 - DNA, 25 bp, Homo sapien
gacagcttgtcaccggcacttatgg

SEQ ID NO: 4061615 - DNA, 25 bp, Homo sapien
tatgggtcctctgggatttcagaca

SEQ ID NO: 4061616 - DNA, 25 bp, Homo sapien
ggtagctcagccgacatagacaaca

SEQ ID NO: 4061617 - DNA, 25 bp, Homo sapien
caagagctgatgctgcgcagtcctt

SEQ ID NO: 4061618 - DNA, 25 bp, Homo sapien
tcagaaagtgctttcaagcaggcag

SEQ ID NO: 4061619 - DNA, 25 bp, Homo sapien
agaaagtgctttcaagcaggcagtg

SEQ ID NO: 4061620 - DNA, 25 bp, Homo sapien
cagaaagtgctttcaagcaggcagt

SEQ ID NO: 4061621 - DNA, 25 bp, Homo sapien
gatggcacactggaacgtgaagcct

SEQ ID NO: 4061622 - DNA, 25 bp, Homo sapien
tgaagcctttgcagatggcacactg

SEQ ID NO: 4061623 - DNA, 25 bp, Homo sapien
gggtccgaaaccactccatcatgtg

SEQ ID NO: 4061624 - DNA, 25 bp, Homo sapien
cagtggctgcagtacacgccgaact

SEQ ID NO: 4061625 - DNA, 25 bp, Homo sapien
gacaatccactaatcgtgccggtcg

SEQ ID NO: 4061626 - DNA, 25 bp, Homo sapien
tggaatatccctgacaatccactaa

SEQ ID NO: 4061627 - DNA, 25 bp, Homo sapien
ggctgcctttggaatatccctgaca

SEQ ID NO: 4061628 - DNA, 25 bp, Homo sapien
cgtgccggtcgctaatggttccagg

SEQ ID NO: 4061629 - DNA, 25 bp, Homo sapien
aacttcaacacttcagctcgcttct

SEQ ID NO: 4061630 - DNA, 25 bp, Homo sapien
aattgctgggtattggcggggtcca

SEQ ID NO: 4061631 - DNA, 25 bp, Homo sapien
aggatttccccatagcatttcttaa

SEQ ID NO: 4061632 - DNA, 25 bp, Homo sapien
tctcagaccccaacggtagaggatt

SEQ ID NO: 4061633 - DNA, 25 bp, Homo sapien
ccaaggggaggacaagtgctctgcc

SEQ ID NO: 4061634 - DNA, 25 bp, Homo sapien
cccaaagcggagctcttctggtgag

SEQ ID NO: 4061635 - DNA, 25 bp, Homo sapien
tcgctcacggggatcactgtaggtc

SEQ ID NO: 4061636 - DNA, 25 bp, Homo sapien
tttatcatgctggtcgcgttctcgc

SEQ ID NO: 4061637 - DNA, 25 bp, Homo sapien
tgggaagggaagatggcaatcagag

SEQ ID NO: 4061638 - DNA, 25 bp, Homo sapien
gaagatggcaatcagagaaggcatg

SEQ ID NO: 4061639 - DNA, 25 bp, Homo sapien
gggaagatggcaatcagagaaggca

SEQ ID NO: 4061640 - DNA, 25 bp, Homo sapien
agatggcaatcagagaaggcatgga

SEQ ID NO: 4061641 - DNA, 25 bp, Homo sapien
ttccagccgccagtgttgagccctg

SEQ ID NO: 4061642 - DNA, 25 bp, Homo sapien
tgttccagccgccagtgttgagccc

SEQ ID NO: 4061643 - DNA, 25 bp, Homo sapien
cctgggtctgacatactggagcagg

SEQ ID NO: 4061644 - DNA, 25 bp, Homo sapien
gacatactggagcaggaaccagaag

SEQ ID NO: 4061645 - DNA, 25 bp, Homo sapien
gcaacaaagtaaaactccgtctcaa

SEQ ID NO: 4061646 - DNA, 25 bp, Homo sapien
aatcagacaaaaccagaaaaggaca

SEQ ID NO: 4061647 - DNA, 25 bp, Homo sapien
tccagcctgggcaacaaagtaaaac

SEQ ID NO: 4061648 - DNA, 25 bp, Homo sapien
cagcctgggcaacaaagtaaaactc

SEQ ID NO: 4061649 - DNA, 25 bp, Homo sapien
ccctgaggccgagactgggcttcaa

SEQ ID NO: 4061650 - DNA, 25 bp, Homo sapien
cacgctacagagcatcgccagtgtc

SEQ ID NO: 4061651 - DNA, 25 bp, Homo sapien
tcccggagccggcaatagtgagcca

SEQ ID NO: 4061652 - DNA, 25 bp, Homo sapien
tatcgactatgggacaccacaagat

SEQ ID NO: 4061653 - DNA, 25 bp, Homo sapien
gaacgcatctcaaagcctctggcta

SEQ ID NO: 4061654 - DNA, 25 bp, Homo sapien
gatccggcagtttgacctactttga

SEQ ID NO: 4061655 - DNA, 25 bp, Homo sapien
ttgaggaggaaagcggtcacagtca

SEQ ID NO: 4061656 - DNA, 25 bp, Homo sapien
cacagtcatggcgtgttactgccac

SEQ ID NO: 4061657 - DNA, 25 bp, Homo sapien
gcgagccaatacatgctctgtcttc

SEQ ID NO: 4061658 - DNA, 25 bp, Homo sapien
gccaatacatgctctgtcttcccag

SEQ ID NO: 4061659 - DNA, 25 bp, Homo sapien
tctgagcgagccaatacatgctctg

SEQ ID NO: 4061660 - DNA, 25 bp, Homo sapien
tgacatctgagcgagccaatacatg

SEQ ID NO: 4061661 - DNA, 25 bp, Homo sapien
agctgccgcccaaatggatgtcgag

SEQ ID NO: 4061662 - DNA, 25 bp, Homo sapien
ggcaaagatctgtagctaccgtagc

SEQ ID NO: 4061663 - DNA, 25 bp, Homo sapien
cagggtgtttccaaatctgggtcag

SEQ ID NO: 4061664 - DNA, 25 bp, Homo sapien
tcagatttcggaccaaggcaaagat

SEQ ID NO: 4061665 - DNA, 25 bp, Homo sapien
attgtcgaaaaggagaaacttgaag

SEQ ID NO: 4061666 - DNA, 25 bp, Homo sapien
gtattgtcgaaaaggagaaacttga

SEQ ID NO: 4061667 - DNA, 25 bp, Homo sapien
tcgaaaaggagaaacttgaagttca

SEQ ID NO: 4061668 - DNA, 25 bp, Homo sapien
aaaggagaaacttgaagttcacatt

SEQ ID NO: 4061669 - DNA, 25 bp, Homo sapien
ctggacaagatcctttcttccaacg

SEQ ID NO: 4061670 - DNA, 25 bp, Homo sapien
gcagaggcggcattcttctgacatg

SEQ ID NO: 4061671 - DNA, 25 bp, Homo sapien
ttcttccaacgagcaaggcagaggc

SEQ ID NO: 4061672 - DNA, 25 bp, Homo sapien
aagatcctttcttccaacgagcaag

SEQ ID NO: 4061673 - DNA, 25 bp, Homo sapien
gccagagtctgatccctcacgctta

SEQ ID NO: 4061674 - DNA, 25 bp, Homo sapien
cacgcttacttttccatcgtcttga

SEQ ID NO: 4061675 - DNA, 25 bp, Homo sapien
ccagcagccttgatctgtcgattgc

SEQ ID NO: 4061676 - DNA, 25 bp, Homo sapien
ccagcgatttgtgaacaggcaggag

SEQ ID NO: 4061677 - DNA, 25 bp, Homo sapien
gaaatttatacaaagcctcacggct

SEQ ID NO: 4061678 - DNA, 25 bp, Homo sapien
tgacaaggctataggatgattcccc

SEQ ID NO: 4061679 - DNA, 25 bp, Homo sapien
ccaactggttttctatgacaaggct

SEQ ID NO: 4061680 - DNA, 25 bp, Homo sapien
gccttgcacagcgtgaggtcacctt

SEQ ID NO: 4061681 - DNA, 25 bp, Homo sapien
tattcttgggcctcgggtagagaca

SEQ ID NO: 4061682 - DNA, 25 bp, Homo sapien
gtcatttcaggttcctcaaagccag

SEQ ID NO: 4061683 - DNA, 25 bp, Homo sapien
tggtcctgaaaacagctcgcctgtc

SEQ ID NO: 4061684 - DNA, 25 bp, Homo sapien
gagagcatttgcacagcgcacagta

SEQ ID NO: 4061685 - DNA, 25 bp, Homo sapien
cgggaagtcgttaattgcttgtatg

SEQ ID NO: 4061686 - DNA, 25 bp, Homo sapien
aattgcttgtatggaccaacgccgc

SEQ ID NO: 4061687 - DNA, 25 bp, Homo sapien
ttgtatggaccaacgccgccgggca

SEQ ID NO: 4061688 - DNA, 25 bp, Homo sapien
tcgttaattgcttgtatggaccaac

SEQ ID NO: 4061689 - DNA, 25 bp, Homo sapien
attacgaaagtgaaaggctacaggg

SEQ ID NO: 4061690 - DNA, 25 bp, Homo sapien
gaatcaaaggctacggctctggcac

SEQ ID NO: 4061691 - DNA, 25 bp, Homo sapien
ggctacagggtgattactaatctag

SEQ ID NO: 4061692 - DNA, 25 bp, Homo sapien
gagtaaagattacggaccataagaa

SEQ ID NO: 4061693 - DNA, 25 bp, Homo sapien
gtggggctcccactgtataaacgaa

SEQ ID NO: 4061694 - DNA, 25 bp, Homo sapien
tgggcgcgatcaagccagtgtgata

SEQ ID NO: 4061695 - DNA, 25 bp, Homo sapien
cagtgtgataagcagacaaggctga

SEQ ID NO: 4061696 - DNA, 25 bp, Homo sapien
gacctgctctttctcgctgcgagtg

SEQ ID NO: 4061697 - DNA, 25 bp, Homo sapien
aatgataattatccacactggctgc

SEQ ID NO: 4061698 - DNA, 25 bp, Homo sapien
ggctgcagtcctgtcatatttccaa

SEQ ID NO: 4061699 - DNA, 25 bp, Homo sapien
gctattcttagcacttgataccaaa

SEQ ID NO: 4061700 - DNA, 25 bp, Homo sapien
tgaaaaatgctttatctgcacaagc

SEQ ID NO: 4061701 - DNA, 25 bp, Homo sapien
caaactcagtggtccttcccaggtc

SEQ ID NO: 4061702 - DNA, 25 bp, Homo sapien
tataatgggagtttactgaagaact

SEQ ID NO: 4061703 - DNA, 25 bp, Homo sapien
gaaatgcactgtccaaaagcaaact

SEQ ID NO: 4061704 - DNA, 25 bp, Homo sapien
aacgtagagcggcttctgcatctcc

SEQ ID NO: 4061705 - DNA, 25 bp, Homo sapien
ggccttgtgaaatataccaggtaac

SEQ ID NO: 4061706 - DNA, 25 bp, Homo sapien
cgatgcattgtcatgggccttgtga

SEQ ID NO: 4061707 - DNA, 25 bp, Homo sapien
gagacaccgcccgatgcattgtcat

SEQ ID NO: 4061708 - DNA, 25 bp, Homo sapien
gctctgtgggagacaccgcccgatg

SEQ ID NO: 4061709 - DNA, 25 bp, Homo sapien
caaaggtcagcgctccaggatccag

SEQ ID NO: 4061710 - DNA, 25 bp, Homo sapien
aaaggtcagcgctccaggatccagg

SEQ ID NO: 4061711 - DNA, 25 bp, Homo sapien
cagagtcatcagcaggactctaagc

SEQ ID NO: 4061712 - DNA, 25 bp, Homo sapien
gtcatcagcaggactctaagcctcc

SEQ ID NO: 4061713 - DNA, 25 bp, Homo sapien
ctgctccgcagaacctggccccaga

SEQ ID NO: 4061714 - DNA, 25 bp, Homo sapien
tgctccgcagaacctggccccagaa

SEQ ID NO: 4061715 - DNA, 25 bp, Homo sapien
ctccgcagaacctggccccagaagt

SEQ ID NO: 4061716 - DNA, 25 bp, Homo sapien
tccgcagaacctggccccagaagtc

SEQ ID NO: 4061717 - DNA, 25 bp, Homo sapien
tgttggcgtcctggtacgacccgta

SEQ ID NO: 4061718 - DNA, 25 bp, Homo sapien
ggaatgttggcgtcctggtacgacc

SEQ ID NO: 4061719 - DNA, 25 bp, Homo sapien
aatgttggcgtcctggtacgacccg

SEQ ID NO: 4061720 - DNA, 25 bp, Homo sapien
gaaagggaatgttggcgtcctggta

SEQ ID NO: 4061721 - DNA, 25 bp, Homo sapien
aaaaccacaacctgtcttaaagctg

SEQ ID NO: 4061722 - DNA, 25 bp, Homo sapien
aagcctaagttggtatgacagtttc

SEQ ID NO: 4061723 - DNA, 25 bp, Homo sapien
ccacaacctgtcttaaagctgaact

SEQ ID NO: 4061724 - DNA, 25 bp, Homo sapien
ccagaaaacccatgattttagggag

SEQ ID NO: 4061725 - DNA, 25 bp, Homo sapien
ggcagctctggccacgcttcacttt

SEQ ID NO: 4061726 - DNA, 25 bp, Homo sapien
ctctggccacgcttcactttctgca

SEQ ID NO: 4061727 - DNA, 25 bp, Homo sapien
tctgcagggctgtgtccttcaggat

SEQ ID NO: 4061728 - DNA, 25 bp, Homo sapien
caaaggactcaaggcaggagacgag

SEQ ID NO: 4061729 - DNA, 25 bp, Homo sapien
tgctccatgagaaacgtcagtacct

SEQ ID NO: 4061730 - DNA, 25 bp, Homo sapien
ccttaatcaaggcagcacacgtgga

SEQ ID NO: 4061731 - DNA, 25 bp, Homo sapien
gaaattgctctcagtgacaagaggc

SEQ ID NO: 4061732 - DNA, 25 bp, Homo sapien
ttagaagtaatactcactggcctgg

SEQ ID NO: 4061733 - DNA, 25 bp, Homo sapien
tgtatgtccaaactaggcaacggca

SEQ ID NO: 4061734 - DNA, 25 bp, Homo sapien
gggctcctaacctgggctgctaaat

SEQ ID NO: 4061735 - DNA, 25 bp, Homo sapien
tgtgacactgctcagactgaacggg

SEQ ID NO: 4061736 - DNA, 25 bp, Homo sapien
tcctaaccggagatgaatgcatagt

SEQ ID NO: 4061737 - DNA, 25 bp, Homo sapien
ttcaccagcatcttgacacgatggt

SEQ ID NO: 4061738 - DNA, 25 bp, Homo sapien
gtttgggtactgtgcagggaacttc

SEQ ID NO: 4061739 - DNA, 25 bp, Homo sapien
cacgatggttgctgcagtgcacaga

SEQ ID NO: 4061740 - DNA, 25 bp, Homo sapien
gcagcttagctttcatggtggatgt

SEQ ID NO: 4061741 - DNA, 25 bp, Homo sapien
ccacaattgctgtagaaacaaacca

SEQ ID NO: 4061742 - DNA, 25 bp, Homo sapien
taactgaacgctccatgttcctggt

SEQ ID NO: 4061743 - DNA, 25 bp, Homo sapien
gagtctacaaagacaaatgtgtgtg

SEQ ID NO: 4061744 - DNA, 25 bp, Homo sapien
agcgtctttcgatgcaagcacattt

SEQ ID NO: 4061745 - DNA, 25 bp, Homo sapien
tgtggggtagactgaaacttgttat

SEQ ID NO: 4061746 - DNA, 25 bp, Homo sapien
catgagccaccacgaagttcaaagt

SEQ ID NO: 4061747 - DNA, 25 bp, Homo sapien
gaagttaaataccagactcaactta

SEQ ID NO: 4061748 - DNA, 25 bp, Homo sapien
ccacgaagttcaaagtattctgact

SEQ ID NO: 4061749 - DNA, 25 bp, Homo sapien
caaactcctggcttcctggtttcaa

SEQ ID NO: 4061750 - DNA, 25 bp, Homo sapien
agtagttggaattacaggctaattt

SEQ ID NO: 4061751 - DNA, 25 bp, Homo sapien
actcctggcttcctggtttcaagtg

SEQ ID NO: 4061752 - DNA, 25 bp, Homo sapien
gagtagttggaattacaggctaatt

SEQ ID NO: 4061753 - DNA, 25 bp, Homo sapien
gctgaaatggttccctctcccacaa

SEQ ID NO: 4061754 - DNA, 25 bp, Homo sapien
gctgcaaagctatttgctaactgaa

SEQ ID NO: 4061755 - DNA, 25 bp, Homo sapien
tgccatcagcaaacatgagatacag

SEQ ID NO: 4061756 - DNA, 25 bp, Homo sapien
gagagttctgttaaagctgcaaagc

SEQ ID NO: 4061757 - DNA, 25 bp, Homo sapien
tccggatttgcacattgatcaggga

SEQ ID NO: 4061758 - DNA, 25 bp, Homo sapien
tccacattgacattccggatttgca

SEQ ID NO: 4061759 - DNA, 25 bp, Homo sapien
cttccaggagatttctagggggatc

SEQ ID NO: 4061760 - DNA, 25 bp, Homo sapien
cagggagaattcctgctgcaaggtc

SEQ ID NO: 4061761 - DNA, 25 bp, Homo sapien
gagaacaggtctggggtatctgcca

SEQ ID NO: 4061762 - DNA, 25 bp, Homo sapien
gagaagttcaatgttggaaagcatt

SEQ ID NO: 4061763 - DNA, 25 bp, Homo sapien
cacaactctgcaatgcgtagagtgg

SEQ ID NO: 4061764 - DNA, 25 bp, Homo sapien
tgcaatgcgtagagtggcaccttac

SEQ ID NO: 4061765 - DNA, 25 bp, Homo sapien
ctgagacatcagtttgacaaattac

SEQ ID NO: 4061766 - DNA, 25 bp, Homo sapien
tgatctgtatcttcagtgtgcaggg

SEQ ID NO: 4061767 - DNA, 25 bp, Homo sapien
gaagggaaatactctcaatgaactc

SEQ ID NO: 4061768 - DNA, 25 bp, Homo sapien
tcttctcaggttccggcagaaggga

SEQ ID NO: 4061769 - DNA, 25 bp, Homo sapien
caccatctaatatgtcatttgcaca

SEQ ID NO: 4061770 - DNA, 25 bp, Homo sapien
tgcaacaaagggtagaagatgtagt

SEQ ID NO: 4061771 - DNA, 25 bp, Homo sapien
gcaacaaagggtagaagatgtagtt

SEQ ID NO: 4061772 - DNA, 25 bp, Homo sapien
acccgccacattctcaaggtctgat

SEQ ID NO: 4061773 - DNA, 25 bp, Homo sapien
tgcatctgggaatccacccgccaca

SEQ ID NO: 4061774 - DNA, 25 bp, Homo sapien
gtcaccagttgatagtccttggacc

SEQ ID NO: 4061775 - DNA, 25 bp, Homo sapien
tcaaggtctgatcccgggaccacgt

SEQ ID NO: 4061776 - DNA, 25 bp, Homo sapien
ctctgcaaatgttcgtccttttaca

SEQ ID NO: 4061777 - DNA, 25 bp, Homo sapien
tgttcgtccttttacatgctctcga

SEQ ID NO: 4061778 - DNA, 25 bp, Homo sapien
cgtccttttacatgctctcgaagag

SEQ ID NO: 4061779 - DNA, 25 bp, Homo sapien
caaatgttcgtccttttacatgctc

SEQ ID NO: 4061780 - DNA, 25 bp, Homo sapien
gagagactacgctgacaattgtgga

SEQ ID NO: 4061781 - DNA, 25 bp, Homo sapien
tactggactccatggcaacactgac

SEQ ID NO: 4061782 - DNA, 25 bp, Homo sapien
ctatgacgaaaggtggcaacagccc

SEQ ID NO: 4061783 - DNA, 25 bp, Homo sapien
tgggtctccctcatcaacagagtgg

SEQ ID NO: 4061784 - DNA, 25 bp, Homo sapien
aggaccacatcatcatgccccacga

SEQ ID NO: 4061785 - DNA, 25 bp, Homo sapien
ctggggtgttcaagtcaaagacatt

SEQ ID NO: 4061786 - DNA, 25 bp, Homo sapien
ttccacaggagaaggctgttttccc

SEQ ID NO: 4061787 - DNA, 25 bp, Homo sapien
cagctggggaaccatcacagtcacc

SEQ ID NO: 4061788 - DNA, 25 bp, Homo sapien
aaagcaggtgattagattatttcag

SEQ ID NO: 4061789 - DNA, 25 bp, Homo sapien
gaaaagcaggtgattagattatttc

SEQ ID NO: 4061790 - DNA, 25 bp, Homo sapien
caggtgattagattatttcagggag

SEQ ID NO: 4061791 - DNA, 25 bp, Homo sapien
gcaggtgattagattatttcaggga

SEQ ID NO: 4061792 - DNA, 25 bp, Homo sapien
tattgaggtatttccgaggctggcg

SEQ ID NO: 4061793 - DNA, 25 bp, Homo sapien
tggccttccagacaggcacctggca

SEQ ID NO: 4061794 - DNA, 25 bp, Homo sapien
tggcaaggaagaatattgaggtatt

SEQ ID NO: 4061795 - DNA, 25 bp, Homo sapien
tccgaggctggcggtaatcccagaa

SEQ ID NO: 4061796 - DNA, 25 bp, Homo sapien
ttgtcttgactggaggtagcaagaa

SEQ ID NO: 4061797 - DNA, 25 bp, Homo sapien
ggcggctagatattccactgctgta

SEQ ID NO: 4061798 - DNA, 25 bp, Homo sapien
ggctagatattccactgctgtactg

SEQ ID NO: 4061799 - DNA, 25 bp, Homo sapien
agaggtgggcggctagatattccac

SEQ ID NO: 4061800 - DNA, 25 bp, Homo sapien
tcttatcccatatccgcacatcgcc

SEQ ID NO: 4061801 - DNA, 25 bp, Homo sapien
atatccgcacatcgccgtcatggct

SEQ ID NO: 4061802 - DNA, 25 bp, Homo sapien
ccgcacatcgccgtcatggctggtg

SEQ ID NO: 4061803 - DNA, 25 bp, Homo sapien
catcgccgtcatggctggtggcaag

SEQ ID NO: 4061804 - DNA, 25 bp, Homo sapien
ccacactgataagggaaagggaaca

SEQ ID NO: 4061805 - DNA, 25 bp, Homo sapien
ggcagtatgtgacctcagtcctttt

SEQ ID NO: 4061806 - DNA, 25 bp, Homo sapien
tatgtcagccgtggccactggcacc

SEQ ID NO: 4061807 - DNA, 25 bp, Homo sapien
tcagctatgtcagccgtggccactg

SEQ ID NO: 4061808 - DNA, 25 bp, Homo sapien
ccactcggggtatgctagatccagc

SEQ ID NO: 4061809 - DNA, 25 bp, Homo sapien
ttatcaaggtccacaagcctctcac

SEQ ID NO: 4061810 - DNA, 25 bp, Homo sapien
tagatccagcagcttatcaaggtcc

SEQ ID NO: 4061811 - DNA, 25 bp, Homo sapien
cagtacccgaggctgtaccactcgg

SEQ ID NO: 4061812 - DNA, 25 bp, Homo sapien
tagatctgcaccactgagaaacctc

SEQ ID NO: 4061813 - DNA, 25 bp, Homo sapien
gagaaacctcactgagtacaaagga

SEQ ID NO: 4061814 - DNA, 25 bp, Homo sapien
tcttttcccccagggtagatctgca

SEQ ID NO: 4061815 - DNA, 25 bp, Homo sapien
ctgagtacaaaggaaagaagtcttc

SEQ ID NO: 4061816 - DNA, 25 bp, Homo sapien
aaaagcaatgagaacaggcaggcta

SEQ ID NO: 4061817 - DNA, 25 bp, Homo sapien
gcaatgagaacaggcaggctaaaaa

SEQ ID NO: 4061818 - DNA, 25 bp, Homo sapien
ctaaaaaaagaaccactttcagctg

SEQ ID NO: 4061819 - DNA, 25 bp, Homo sapien
ccgaggcaggtaggccacaaagtca

SEQ ID NO: 4061820 - DNA, 25 bp, Homo sapien
acagcagacagtgcaacagtaggtt

SEQ ID NO: 4061821 - DNA, 25 bp, Homo sapien
cagacagtgcaacagtaggtttcct

SEQ ID NO: 4061822 - DNA, 25 bp, Homo sapien
gcagacagtgcaacagtaggtttcc

SEQ ID NO: 4061823 - DNA, 25 bp, Homo sapien
cagcagacagtgcaacagtaggttt

SEQ ID NO: 4061824 - DNA, 25 bp, Homo sapien
taaccaggaggtcaggctcaaacac

SEQ ID NO: 4061825 - DNA, 25 bp, Homo sapien
tccacagagctggtaaccaggaggt

SEQ ID NO: 4061826 - DNA, 25 bp, Homo sapien
gctggtaaccaggaggtcaggctca

SEQ ID NO: 4061827 - DNA, 25 bp, Homo sapien
aggtcaggctcaaacaccgcccagt

SEQ ID NO: 4061828 - DNA, 25 bp, Homo sapien
cacgagtgtggccttgtaaggttgt

SEQ ID NO: 4061829 - DNA, 25 bp, Homo sapien
tgacacgagtgtggccttgtaaggt

SEQ ID NO: 4061830 - DNA, 25 bp, Homo sapien
tgtggccttgtaaggttgtgccaac

SEQ ID NO: 4061831 - DNA, 25 bp, Homo sapien
ctgatgacacgagtgtggccttgta

SEQ ID NO: 4061832 - DNA, 25 bp, Homo sapien
tccccactgccgtctttccacttgt

SEQ ID NO: 4061833 - DNA, 25 bp, Homo sapien
ccccactgccgtctttccacttgta

SEQ ID NO: 4061834 - DNA, 25 bp, Homo sapien
aaatagtgtgcaaagctgtcatgag

SEQ ID NO: 4061835 - DNA, 25 bp, Homo sapien
ggtgaccttcgaaaggggcatctag

SEQ ID NO: 4061836 - DNA, 25 bp, Homo sapien
cgaaaggggcatctagattgacgat

SEQ ID NO: 4061837 - DNA, 25 bp, Homo sapien
aagctgtcatgaggattccactgca

SEQ ID NO: 4061838 - DNA, 25 bp, Homo sapien
tcatccctgctcagaagagccagga

SEQ ID NO: 4061839 - DNA, 25 bp, Homo sapien
gattctttgctagagaccactccaa

SEQ ID NO: 4061840 - DNA, 25 bp, Homo sapien
tacaaaactctaggtggtagcagaa

SEQ ID NO: 4061841 - DNA, 25 bp, Homo sapien
cagggaggttctgcattcacctatt

SEQ ID NO: 4061842 - DNA, 25 bp, Homo sapien
gccttcatggttggaagcagcagct

SEQ ID NO: 4061843 - DNA, 25 bp, Homo sapien
caccgtctacccacttaaagagaga

SEQ ID NO: 4061844 - DNA, 25 bp, Homo sapien
gcattagcagccaacgatctcagtc

SEQ ID NO: 4061845 - DNA, 25 bp, Homo sapien
gatagggactaatgcaacagaaagg

SEQ ID NO: 4061846 - DNA, 25 bp, Homo sapien
gaaggcaaaactgacgaggccagaa

SEQ ID NO: 4061847 - DNA, 25 bp, Homo sapien
gatatccaacattgactactagtag

SEQ ID NO: 4061848 - DNA, 25 bp, Homo sapien
aaaatgaggtcaggtacgtggttca

SEQ ID NO: 4061849 - DNA, 25 bp, Homo sapien
gaagcaaagtcatacaagatatcca

SEQ ID NO: 4061850 - DNA, 25 bp, Homo sapien
ttctaggtctttcaagaattaccac

SEQ ID NO: 4061851 - DNA, 25 bp, Homo sapien
ggtctttcaagaattaccacactgt

SEQ ID NO: 4061852 - DNA, 25 bp, Homo sapien
gttctaggtctttcaagaattacca

SEQ ID NO: 4061853 - DNA, 25 bp, Homo sapien
atgctgcccaagacagtccacagac

SEQ ID NO: 4061854 - DNA, 25 bp, Homo sapien
catgctgcccaagacagtccacaga

SEQ ID NO: 4061855 - DNA, 25 bp, Homo sapien
ctgcatgctgcccaagacagtccac

SEQ ID NO: 4061856 - DNA, 25 bp, Homo sapien
tgcatgctgcccaagacagtccaca

SEQ ID NO: 4061857 - DNA, 25 bp, Homo sapien
ccaagacacccgtgactttccaaag

SEQ ID NO: 4061858 - DNA, 25 bp, Homo sapien
caagacacccgtgactttccaaagg

SEQ ID NO: 4061859 - DNA, 25 bp, Homo sapien
caaaagacagcacatagctgggagt

SEQ ID NO: 4061860 - DNA, 25 bp, Homo sapien
tgtgaataggcactccagccacagt

SEQ ID NO: 4061861 - DNA, 25 bp, Homo sapien
taacagcgagatcgcatctcaaaaa

SEQ ID NO: 4061862 - DNA, 25 bp, Homo sapien
ggaggcagtgcaccatgatcgtgac

SEQ ID NO: 4061863 - DNA, 25 bp, Homo sapien
aacagggttacgtccacgcagctga

SEQ ID NO: 4061864 - DNA, 25 bp, Homo sapien
tcgctccgtaccctgattgtgggaa

SEQ ID NO: 4061865 - DNA, 25 bp, Homo sapien
tgagacttagaaaagtcccgcgact

SEQ ID NO: 4061866 - DNA, 25 bp, Homo sapien
tcagcactcacgatgcgcagtctct

SEQ ID NO: 4061867 - DNA, 25 bp, Homo sapien
attgcccccgatggtcgtcttccct

SEQ ID NO: 4061868 - DNA, 25 bp, Homo sapien
tccgtccatgctcgccccgattgcc

SEQ ID NO: 4061869 - DNA, 25 bp, Homo sapien
ccgattgcccccgatggtcgtcttc

SEQ ID NO: 4061870 - DNA, 25 bp, Homo sapien
agggagccccgaaactccgtccatg

SEQ ID NO: 4061871 - DNA, 25 bp, Homo sapien
tacaaccacgttttcgctgctccat

SEQ ID NO: 4061872 - DNA, 25 bp, Homo sapien
gaactctacaaccacgttttcgctg

SEQ ID NO: 4061873 - DNA, 25 bp, Homo sapien
actctacaaccacgttttcgctgct

SEQ ID NO: 4061874 - DNA, 25 bp, Homo sapien
tctacaaccacgttttcgctgctcc

SEQ ID NO: 4061875 - DNA, 25 bp, Homo sapien
agccagagaatcagccccgacacgc

SEQ ID NO: 4061876 - DNA, 25 bp, Homo sapien
acacagccagagaatcagccccgac

SEQ ID NO: 4061877 - DNA, 25 bp, Homo sapien
atcccgggaccgtgcgccccacaca

SEQ ID NO: 4061878 - DNA, 25 bp, Homo sapien
tccccagtatcccgggaccgtgcgc

SEQ ID NO: 4061879 - DNA, 25 bp, Homo sapien
cggtgagccgaggttacgccacacc

SEQ ID NO: 4061880 - DNA, 25 bp, Homo sapien
gagccgaggttacgccacaccactc

SEQ ID NO: 4061881 - DNA, 25 bp, Homo sapien
ggtgagccgaggttacgccacacca

SEQ ID NO: 4061882 - DNA, 25 bp, Homo sapien
catttcgggcactaccggacgggcg

SEQ ID NO: 4061883 - DNA, 25 bp, Homo sapien
atgcccatggcaatggttaccagga

SEQ ID NO: 4061884 - DNA, 25 bp, Homo sapien
gggtctgcgtccgactccacctatg

SEQ ID NO: 4061885 - DNA, 25 bp, Homo sapien
ggtctccaccgatgacagcgccgtg

SEQ ID NO: 4061886 - DNA, 25 bp, Homo sapien
gaatttcactcttaagctgtgaaac

SEQ ID NO: 4061887 - DNA, 25 bp, Homo sapien
ttcatccgatcatggtgagggtagg

SEQ ID NO: 4061888 - DNA, 25 bp, Homo sapien
tatgagcttgtagttggattccaga

SEQ ID NO: 4061889 - DNA, 25 bp, Homo sapien
gctacagttatgagcttgtagttgg

SEQ ID NO: 4061890 - DNA, 25 bp, Homo sapien
gaaacagaccatgggatcttccagg

SEQ ID NO: 4061891 - DNA, 25 bp, Homo sapien
ctgaaacagaccatgggatcttcca

SEQ ID NO: 4061892 - DNA, 25 bp, Homo sapien
tgaaacagaccatgggatcttccag

SEQ ID NO: 4061893 - DNA, 25 bp, Homo sapien
tttggagcctttgagtaaggtctaa

SEQ ID NO: 4061894 - DNA, 25 bp, Homo sapien
ggagcctttgagtaaggtctaagca

SEQ ID NO: 4061895 - DNA, 25 bp, Homo sapien
tggagcctttgagtaaggtctaagc

SEQ ID NO: 4061896 - DNA, 25 bp, Homo sapien
ttggagcctttgagtaaggtctaag

SEQ ID NO: 4061897 - DNA, 25 bp, Homo sapien
gagcccttgggattccaacctaaca

SEQ ID NO: 4061898 - DNA, 25 bp, Homo sapien
aaagtataacagcatttaagtcagc

SEQ ID NO: 4061899 - DNA, 25 bp, Homo sapien
cctacaaggatttgagggagccctt

SEQ ID NO: 4061900 - DNA, 25 bp, Homo sapien
gtaaatgatctaaatggtgtaacca

SEQ ID NO: 4061901 - DNA, 25 bp, Homo sapien
tgccccccttttccatatggtcagc

SEQ ID NO: 4061902 - DNA, 25 bp, Homo sapien
gtgccccccttttccatatggtcag

SEQ ID NO: 4061903 - DNA, 25 bp, Homo sapien
ttttccatatggtcagcttggtgct

SEQ ID NO: 4061904 - DNA, 25 bp, Homo sapien
cccttttccatatggtcagcttggt

SEQ ID NO: 4061905 - DNA, 25 bp, Homo sapien
tggattcatataaggtcgtctgtgc

SEQ ID NO: 4061906 - DNA, 25 bp, Homo sapien
caaaaagtggattcatataaggtcg

SEQ ID NO: 4061907 - DNA, 25 bp, Homo sapien
taaggtcgtctgtgctcttctaaga

SEQ ID NO: 4061908 - DNA, 25 bp, Homo sapien
cactttacaaaaagtggattcatat

SEQ ID NO: 4061909 - DNA, 25 bp, Homo sapien
tgtatgtaccctggcttattcccat

SEQ ID NO: 4061910 - DNA, 25 bp, Homo sapien
taggcattcaagaaagataatatgc

SEQ ID NO: 4061911 - DNA, 25 bp, Homo sapien
aactaaaacattacaggtataattg

SEQ ID NO: 4061912 - DNA, 25 bp, Homo sapien
gataatatgctcacctaccaagcag

SEQ ID NO: 4061913 - DNA, 25 bp, Homo sapien
gaatccagatagaataaacacagtg

SEQ ID NO: 4061914 - DNA, 25 bp, Homo sapien
taggtcttgctacatggaagggcaa

SEQ ID NO: 4061915 - DNA, 25 bp, Homo sapien
ggcaaaactgtgttggctaactgaa

SEQ ID NO: 4061916 - DNA, 25 bp, Homo sapien
aaactggttagctatttttggcact

SEQ ID NO: 4061917 - DNA, 25 bp, Homo sapien
aatgtttatagcgttcccctgagct

SEQ ID NO: 4061918 - DNA, 25 bp, Homo sapien
tcaatgtttatagcgttcccctgag

SEQ ID NO: 4061919 - DNA, 25 bp, Homo sapien
tttggatgacgtgtcatttccttca

SEQ ID NO: 4061920 - DNA, 25 bp, Homo sapien
gagcccttttggatgacgtgtcatt

SEQ ID NO: 4061921 - DNA, 25 bp, Homo sapien
cagccataagagttgccccctgtga

SEQ ID NO: 4061922 - DNA, 25 bp, Homo sapien
tcagccataagagttgccccctgtg

SEQ ID NO: 4061923 - DNA, 25 bp, Homo sapien
gccataagagttgccccctgtgact

SEQ ID NO: 4061924 - DNA, 25 bp, Homo sapien
tgtcagccataagagttgccccctg

SEQ ID NO: 4061925 - DNA, 25 bp, Homo sapien
aaccaggctcgtcttgaacgcctga

SEQ ID NO: 4061926 - DNA, 25 bp, Homo sapien
taaccaggctcgtcttgaacgcctg

SEQ ID NO: 4061927 - DNA, 25 bp, Homo sapien
gcacgatcttggctctccgcaatct

SEQ ID NO: 4061928 - DNA, 25 bp, Homo sapien
cctgggttcaagtcattctcctgcc

SEQ ID NO: 4061929 - DNA, 25 bp, Homo sapien
ccgcctcctgggttcaagtcattct

SEQ ID NO: 4061930 - DNA, 25 bp, Homo sapien
gcgtgcaccaccaaacccaactaat

SEQ ID NO: 4061931 - DNA, 25 bp, Homo sapien
gaaattgggtagtgtacagtctcca

SEQ ID NO: 4061932 - DNA, 25 bp, Homo sapien
gatcagcctgttgatttctgcagaa

SEQ ID NO: 4061933 - DNA, 25 bp, Homo sapien
taagcgaaggcctgctgtacaccaa

SEQ ID NO: 4061934 - DNA, 25 bp, Homo sapien
gaaatgggctcactgctctttagag

SEQ ID NO: 4061935 - DNA, 25 bp, Homo sapien
ccagctccgggacggtaaagatgac

SEQ ID NO: 4061936 - DNA, 25 bp, Homo sapien
taaagatgacccttgagtgcttccc

SEQ ID NO: 4061937 - DNA, 25 bp, Homo sapien
gtctcactggtagttggcactccaa

SEQ ID NO: 4061938 - DNA, 25 bp, Homo sapien
tttaacagctagtgggaacgcaggc

SEQ ID NO: 4061939 - DNA, 25 bp, Homo sapien
ggtgatctgtagctgccaactctga

SEQ ID NO: 4061940 - DNA, 25 bp, Homo sapien
aaatggtgcgcagatctcgtttccc

SEQ ID NO: 4061941 - DNA, 25 bp, Homo sapien
gatgtcagtctgtccgtggcttggt

SEQ ID NO: 4061942 - DNA, 25 bp, Homo sapien
tctctactaggcaaaggtgatctgt

SEQ ID NO: 4061943 - DNA, 25 bp, Homo sapien
cattttaagtacatgttcactgggt

SEQ ID NO: 4061944 - DNA, 25 bp, Homo sapien
ggttttgacaagtacatgcatcagc

SEQ ID NO: 4061945 - DNA, 25 bp, Homo sapien
tcaagatagagaatgtgcccgggcg

SEQ ID NO: 4061946 - DNA, 25 bp, Homo sapien
ctcttggtggaaagtttacatacaa

SEQ ID NO: 4061947 - DNA, 25 bp, Homo sapien
ctgcctcacattgtgagtcagtaga

SEQ ID NO: 4061948 - DNA, 25 bp, Homo sapien
tagttgggtccaaacataagatgtt

SEQ ID NO: 4061949 - DNA, 25 bp, Homo sapien
cctcacattgtgagtcagtagactc

SEQ ID NO: 4061950 - DNA, 25 bp, Homo sapien
agtcagtagactcatagttgggtcc

SEQ ID NO: 4061951 - DNA, 25 bp, Homo sapien
taaagcaaggctggcaacccatgtg

SEQ ID NO: 4061952 - DNA, 25 bp, Homo sapien
tgaatcggcgccctctgacttagct

SEQ ID NO: 4061953 - DNA, 25 bp, Homo sapien
ggacatgatgtgaatcggcgccctc

SEQ ID NO: 4061954 - DNA, 25 bp, Homo sapien
aggagaatctgagccttttcatttg

SEQ ID NO: 4061955 - DNA, 25 bp, Homo sapien
tgttgactttggtggctcaagggac

SEQ ID NO: 4061956 - DNA, 25 bp, Homo sapien
tgattctctgggcagatttctccat

SEQ ID NO: 4061957 - DNA, 25 bp, Homo sapien
ctctgggcagatttctccatagggt

SEQ ID NO: 4061958 - DNA, 25 bp, Homo sapien
ttctctgggcagatttctccatagg

SEQ ID NO: 4061959 - DNA, 25 bp, Homo sapien
ctattcacgtggagcgtggcttctc

SEQ ID NO: 4061960 - DNA, 25 bp, Homo sapien
cgtggagcgtggcttctctaggaat

SEQ ID NO: 4061961 - DNA, 25 bp, Homo sapien
ttcacgtggagcgtggcttctctag

SEQ ID NO: 4061962 - DNA, 25 bp, Homo sapien
catggcaatggtgctttggccttca

SEQ ID NO: 4061963 - DNA, 25 bp, Homo sapien
cagtactgctcataagttctagtgg

SEQ ID NO: 4061964 - DNA, 25 bp, Homo sapien
cagaggccctgaaagggttgagtat

SEQ ID NO: 4061965 - DNA, 25 bp, Homo sapien
attcagcccagcgtgtaagcctagt

SEQ ID NO: 4061966 - DNA, 25 bp, Homo sapien
gcgtgtaagcctagtgactgtgtgt

SEQ ID NO: 4061967 - DNA, 25 bp, Homo sapien
tggttgacaaatctggtattggtcc

SEQ ID NO: 4061968 - DNA, 25 bp, Homo sapien
tcttggttgacaaatctggtattgg

SEQ ID NO: 4061969 - DNA, 25 bp, Homo sapien
gacaaatctggtattggtcctctga

SEQ ID NO: 4061970 - DNA, 25 bp, Homo sapien
gttgacaaatctggtattggtcctc

SEQ ID NO: 4061971 - DNA, 25 bp, Homo sapien
ggatattaggagcttctctcagttg

SEQ ID NO: 4061972 - DNA, 25 bp, Homo sapien
ccaggatattaggagcttctctcag

SEQ ID NO: 4061973 - DNA, 25 bp, Homo sapien
tttggtacagcccaggatattagga

SEQ ID NO: 4061974 - DNA, 25 bp, Homo sapien
tacagcccaggatattaggagcttc

SEQ ID NO: 4061975 - DNA, 25 bp, Homo sapien
tgaggcgagtctcactctcttgccc

SEQ ID NO: 4061976 - DNA, 25 bp, Homo sapien
tgacgttgtgatccgcccatcttgc

SEQ ID NO: 4061977 - DNA, 25 bp, Homo sapien
tcaccacacctggctaatttttgta

SEQ ID NO: 4061978 - DNA, 25 bp, Homo sapien
ggaactacaggcgcgcatcaccaca

SEQ ID NO: 4061979 - DNA, 25 bp, Homo sapien
caagagcatgtcagaagggaatgcc

SEQ ID NO: 4061980 - DNA, 25 bp, Homo sapien
gcttagaaccttctgcgttcaagag

SEQ ID NO: 4061981 - DNA, 25 bp, Homo sapien
aagggaatgcctggtcgttgtctcc

SEQ ID NO: 4061982 - DNA, 25 bp, Homo sapien
catttgtaataacatgcttagaacc

SEQ ID NO: 4061983 - DNA, 25 bp, Homo sapien
gcagaggcccgtgaccatcaagcac

SEQ ID NO: 4061984 - DNA, 25 bp, Homo sapien
agaggcccgtgaccatcaagcacca

SEQ ID NO: 4061985 - DNA, 25 bp, Homo sapien
agcagaggcccgtgaccatcaagca

SEQ ID NO: 4061986 - DNA, 25 bp, Homo sapien
cagcagaggcccgtgaccatcaagc

SEQ ID NO: 4061987 - DNA, 25 bp, Homo sapien
gagaagtttccatcgacagtggctc

SEQ ID NO: 4061988 - DNA, 25 bp, Homo sapien
gaagtttccatcgacagtggctcat

SEQ ID NO: 4061989 - DNA, 25 bp, Homo sapien
gcagctgagaagtttccatcgacag

SEQ ID NO: 4061990 - DNA, 25 bp, Homo sapien
ctgagaagtttccatcgacagtggc

SEQ ID NO: 4061991 - DNA, 25 bp, Homo sapien
ccctttgtcatctatgtgtgtagca

SEQ ID NO: 4061992 - DNA, 25 bp, Homo sapien
tgtgtagcaggatcacccgggagga

SEQ ID NO: 4061993 - DNA, 25 bp, Homo sapien
cccgagctccctttgtcatctatgt

SEQ ID NO: 4061994 - DNA, 25 bp, Homo sapien
agggacgcccccttatcaggcttct

SEQ ID NO: 4061995 - DNA, 25 bp, Homo sapien
ctgggcgctcacagccggactctgg

SEQ ID NO: 4061996 - DNA, 25 bp, Homo sapien
ctccccacatagccccgcttcccca

SEQ ID NO: 4061997 - DNA, 25 bp, Homo sapien
gctgggcgctcacagccggactctg

SEQ ID NO: 4061998 - DNA, 25 bp, Homo sapien
cagccggactctggaaagccccagg

SEQ ID NO: 4061999 - DNA, 25 bp, Homo sapien
gtgtttgccgtggataggtgtgcat

SEQ ID NO: 4062000 - DNA, 25 bp, Homo sapien
cagtgtttgccgtggataggtgtgc

SEQ ID NO: 4062001 - DNA, 25 bp, Homo sapien
cattcagtgtttgccgtggataggt

SEQ ID NO: 4062002 - DNA, 25 bp, Homo sapien
ctgcattcagtgtttgccgtggata

SEQ ID NO: 4062003 - DNA, 25 bp, Homo sapien
gaccaggcagcccttgtaaagcatg

SEQ ID NO: 4062004 - DNA, 25 bp, Homo sapien
cacctgttgggagggctcctctgga

SEQ ID NO: 4062005 - DNA, 25 bp, Homo sapien
ggacttggccaagcacctaggaagg

SEQ ID NO: 4062006 - DNA, 25 bp, Homo sapien
gaaagtcctgtatgtggaagccgct

SEQ ID NO: 4062007 - DNA, 25 bp, Homo sapien
gaccgttgctagacctcctgtatgg

SEQ ID NO: 4062008 - DNA, 25 bp, Homo sapien
tccgcgtgcatgtgtaaaacgagcc

SEQ ID NO: 4062009 - DNA, 25 bp, Homo sapien
gaatgattgaaactcgtgctgctcc

SEQ ID NO: 4062010 - DNA, 25 bp, Homo sapien
catatgccagcatgtagcacagagc

SEQ ID NO: 4062011 - DNA, 25 bp, Homo sapien
tgactggtagaaggtagcctctgct

SEQ ID NO: 4062012 - DNA, 25 bp, Homo sapien
ctttccggttgtacagctgggcctt

SEQ ID NO: 4062013 - DNA, 25 bp, Homo sapien
cagttactggaaccttgactggtag

SEQ ID NO: 4062014 - DNA, 25 bp, Homo sapien
cctcgctgtggtatggcagttactg

SEQ ID NO: 4062015 - DNA, 25 bp, Homo sapien
tcattggaccatcatgtcccggtcc

SEQ ID NO: 4062016 - DNA, 25 bp, Homo sapien
attggaccatcatgtcccggtccct

SEQ ID NO: 4062017 - DNA, 25 bp, Homo sapien
ttggaccatcatgtcccggtccctg

SEQ ID NO: 4062018 - DNA, 25 bp, Homo sapien
ggtcattggaccatcatgtcccggt

SEQ ID NO: 4062019 - DNA, 25 bp, Homo sapien
tccttttgttcctagctgtagatag

SEQ ID NO: 4062020 - DNA, 25 bp, Homo sapien
cctagctgtagatagatgtcttcac

SEQ ID NO: 4062021 - DNA, 25 bp, Homo sapien
gggtttgatgtcttcacgctcacct

SEQ ID NO: 4062022 - DNA, 25 bp, Homo sapien
gggtgggtttgatgtcttcacgctc

SEQ ID NO: 4062023 - DNA, 25 bp, Homo sapien
tcttctggctgtgtaaacagtgagc

SEQ ID NO: 4062024 - DNA, 25 bp, Homo sapien
cacttgttgaaagacaggaagcagc

SEQ ID NO: 4062025 - DNA, 25 bp, Homo sapien
tggactctggctgatccaactctct

SEQ ID NO: 4062026 - DNA, 25 bp, Homo sapien
tggctgatccaactctctgctcagc

SEQ ID NO: 4062027 - DNA, 25 bp, Homo sapien
ggaagtggagggatcctgtaggcgc

SEQ ID NO: 4062028 - DNA, 25 bp, Homo sapien
agtggagggatcctgtaggcgcatt

SEQ ID NO: 4062029 - DNA, 25 bp, Homo sapien
taggcgcatttgcttggcagaaccc

SEQ ID NO: 4062030 - DNA, 25 bp, Homo sapien
gagggatcctgtaggcgcatttgct

SEQ ID NO: 4062031 - DNA, 25 bp, Homo sapien
gggtgattaaggacacattccccac

SEQ ID NO: 4062032 - DNA, 25 bp, Homo sapien
tcctcatctgaacatactggcagaa

SEQ ID NO: 4062033 - DNA, 25 bp, Homo sapien
tgaaccagtatcaggcttggccagc

SEQ ID NO: 4062034 - DNA, 25 bp, Homo sapien
caatgctctgtcattcgttccttcc

SEQ ID NO: 4062035 - DNA, 25 bp, Homo sapien
tctcagaggcttagggagtgtcctg

SEQ ID NO: 4062036 - DNA, 25 bp, Homo sapien
tctccgaggaagtttgacaaaatca

SEQ ID NO: 4062037 - DNA, 25 bp, Homo sapien
caaactttcggcagacacagcccat

SEQ ID NO: 4062038 - DNA, 25 bp, Homo sapien
gtcctgtagatgtctcctgaagcat

SEQ ID NO: 4062039 - DNA, 25 bp, Homo sapien
tgtatgaggagcgaaagcgactagg

SEQ ID NO: 4062040 - DNA, 25 bp, Homo sapien
gttgctgaccggctgcactgactgc

SEQ ID NO: 4062041 - DNA, 25 bp, Homo sapien
cctgcaaggccctaacacaagtggg

SEQ ID NO: 4062042 - DNA, 25 bp, Homo sapien
ccagactggccgctgctgggtgtat

SEQ ID NO: 4062043 - DNA, 25 bp, Homo sapien
gagaggcatgttcctgtgctcagct

SEQ ID NO: 4062044 - DNA, 25 bp, Homo sapien
ttcatggccaccaggcacaagtgga

SEQ ID NO: 4062045 - DNA, 25 bp, Homo sapien
ctcggagctgcacgggctttccctc

SEQ ID NO: 4062046 - DNA, 25 bp, Homo sapien
ccagaactctgcagaatactcgagc

SEQ ID NO: 4062047 - DNA, 25 bp, Homo sapien
tgggtaattaacatgtgatgtccac

SEQ ID NO: 4062048 - DNA, 25 bp, Homo sapien
tctccacggtgaaagtcttaaggtc

SEQ ID NO: 4062049 - DNA, 25 bp, Homo sapien
gatgtccacgcattatctccacggt

SEQ ID NO: 4062050 - DNA, 25 bp, Homo sapien
agtcttaaggtcaacgtccctcttg

SEQ ID NO: 4062051 - DNA, 25 bp, Homo sapien
ctgctgcagggggacacgatagcca

SEQ ID NO: 4062052 - DNA, 25 bp, Homo sapien
ccttgcttgccccatgccacctgtc

SEQ ID NO: 4062053 - DNA, 25 bp, Homo sapien
tgtgctgactaaagacgcgggtgag

SEQ ID NO: 4062054 - DNA, 25 bp, Homo sapien
tgtccactggtgactaaccctcctg

SEQ ID NO: 4062055 - DNA, 25 bp, Homo sapien
cactgggaaggttggttctccgtct

SEQ ID NO: 4062056 - DNA, 25 bp, Homo sapien
acaggttggaggagcttcggatccc

SEQ ID NO: 4062057 - DNA, 25 bp, Homo sapien
gacccgtagagcctcacaggttgga

SEQ ID NO: 4062058 - DNA, 25 bp, Homo sapien
ggaaggtgcgagcatcccaagtgca

SEQ ID NO: 4062059 - DNA, 25 bp, Homo sapien
tgctgcacagggtgacaaccgggca

SEQ ID NO: 4062060 - DNA, 25 bp, Homo sapien
ccagagcttcttcctgacactcagg

SEQ ID NO: 4062061 - DNA, 25 bp, Homo sapien
tcaaagcctgactctcagggccact

SEQ ID NO: 4062062 - DNA, 25 bp, Homo sapien
tgttgaatcctcgagcccagagctt

SEQ ID NO: 4062063 - DNA, 25 bp, Homo sapien
agatccccctgagccggtactgctg

SEQ ID NO: 4062064 - DNA, 25 bp, Homo sapien
ttcttcgtgcttcagaaagtaggga

SEQ ID NO: 4062065 - DNA, 25 bp, Homo sapien
ggtgttcacccttcttcgtgcttca

SEQ ID NO: 4062066 - DNA, 25 bp, Homo sapien
caagactagtcttggtgttcaccct

SEQ ID NO: 4062067 - DNA, 25 bp, Homo sapien
ggggacatgactgtgtttccctggg

SEQ ID NO: 4062068 - DNA, 25 bp, Homo sapien
ggacatgactgtgtttccctggggt

SEQ ID NO: 4062069 - DNA, 25 bp, Homo sapien
ctggggacatgactgtgtttccctg

SEQ ID NO: 4062070 - DNA, 25 bp, Homo sapien
gacatgactgtgtttccctggggtc

SEQ ID NO: 4062071 - DNA, 25 bp, Homo sapien
gttgccataaggacattgcacttac

SEQ ID NO: 4062072 - DNA, 25 bp, Homo sapien
ccctgttgccataaggacattgcac

SEQ ID NO: 4062073 - DNA, 25 bp, Homo sapien
ctgagtctccgcctcttctatggta

SEQ ID NO: 4062074 - DNA, 25 bp, Homo sapien
cttctatggtaacggggataatctc

SEQ ID NO: 4062075 - DNA, 25 bp, Homo sapien
catgccgcttccagatgaatctgag

SEQ ID NO: 4062076 - DNA, 25 bp, Homo sapien
cctgcaaagtgctggtcagcgatca

SEQ ID NO: 4062077 - DNA, 25 bp, Homo sapien
cctggcttaccgctgggtctggcct

SEQ ID NO: 4062078 - DNA, 25 bp, Homo sapien
tcagcgatcatttgaccactgcttc

SEQ ID NO: 4062079 - DNA, 25 bp, Homo sapien
tgagcttgggacaccagcgggaaca

SEQ ID NO: 4062080 - DNA, 25 bp, Homo sapien
agagctgagcttgggacaccagcgg

SEQ ID NO: 4062081 - DNA, 25 bp, Homo sapien
agcgggaacagggcaccccttctgc

SEQ ID NO: 4062082 - DNA, 25 bp, Homo sapien
ggacaccagcgggaacagggcaccc

SEQ ID NO: 4062083 - DNA, 25 bp, Homo sapien
tcacaagtgtcctgcaaaaatgcct

SEQ ID NO: 4062084 - DNA, 25 bp, Homo sapien
ccggtcagttcagaggatttaacaa

SEQ ID NO: 4062085 - DNA, 25 bp, Homo sapien
tgacagacgaacacagctaaggcct

SEQ ID NO: 4062086 - DNA, 25 bp, Homo sapien
tcagcccatgcaagataggtttctg

SEQ ID NO: 4062087 - DNA, 25 bp, Homo sapien
cacaaaagttggcaaaatgcgggct

SEQ ID NO: 4062088 - DNA, 25 bp, Homo sapien
gaaagctctagagggagacgactcc

SEQ ID NO: 4062089 - DNA, 25 bp, Homo sapien
ccctggacctggaaatggaggcttc

SEQ ID NO: 4062090 - DNA, 25 bp, Homo sapien
ggaacgtgggctctagactgtgcat

SEQ ID NO: 4062091 - DNA, 25 bp, Homo sapien
ttgtgatcctctatctggacagctc

SEQ ID NO: 4062092 - DNA, 25 bp, Homo sapien
ccctctgccggctgtggtgtcctct

SEQ ID NO: 4062093 - DNA, 25 bp, Homo sapien
ggagctcatgtttgtgatcctctat

SEQ ID NO: 4062094 - DNA, 25 bp, Homo sapien
gtttcccaggtggagctcatgtttg

SEQ ID NO: 4062095 - DNA, 25 bp, Homo sapien
taagggcctagcacactttgatgag

SEQ ID NO: 4062096 - DNA, 25 bp, Homo sapien
taatagccatttaacggtactgcag

SEQ ID NO: 4062097 - DNA, 25 bp, Homo sapien
gatgaggttcctggacgtgagaccc

SEQ ID NO: 4062098 - DNA, 25 bp, Homo sapien
tactgcagttcatgggaaaatgtcc

SEQ ID NO: 4062099 - DNA, 25 bp, Homo sapien
cctcctagttgccaggcactggagg

SEQ ID NO: 4062100 - DNA, 25 bp, Homo sapien
gcagtggctggtatttcagtgaaca

SEQ ID NO: 4062101 - DNA, 25 bp, Homo sapien
cactggagggcgcatcaaagaagag

SEQ ID NO: 4062102 - DNA, 25 bp, Homo sapien
tggtcatttgctgagcgcctcctag

SEQ ID NO: 4062103 - DNA, 25 bp, Homo sapien
agggctgtctcggtgatgagcacac

SEQ ID NO: 4062104 - DNA, 25 bp, Homo sapien
tgctgcaggattctcgcctggaaga

SEQ ID NO: 4062105 - DNA, 25 bp, Homo sapien
gattctcgcctggaagagtgggtgg

SEQ ID NO: 4062106 - DNA, 25 bp, Homo sapien
tgtctcggtgatgagcacacgcgtg

SEQ ID NO: 4062107 - DNA, 25 bp, Homo sapien
cagtgagcccttggcacggtctctg

SEQ ID NO: 4062108 - DNA, 25 bp, Homo sapien
accagtgagcccttggcacggtctc

SEQ ID NO: 4062109 - DNA, 25 bp, Homo sapien
tgagatttgtcaccagtgagccctt

SEQ ID NO: 4062110 - DNA, 25 bp, Homo sapien
ttgtcaccagtgagcccttggcacg

SEQ ID NO: 4062111 - DNA, 25 bp, Homo sapien
aggttggtgtaactgctgtcggctg

SEQ ID NO: 4062112 - DNA, 25 bp, Homo sapien
tggagcccagtattagcacggagga

SEQ ID NO: 4062113 - DNA, 25 bp, Homo sapien
aactgctgtcggctggagcccagta

SEQ ID NO: 4062114 - DNA, 25 bp, Homo sapien
tcggctggagcccagtattagcacg

SEQ ID NO: 4062115 - DNA, 25 bp, Homo sapien
cagatgccgcgtggtatctgagctt

SEQ ID NO: 4062116 - DNA, 25 bp, Homo sapien
cagaggagtcgtgagctgcagatgc

SEQ ID NO: 4062117 - DNA, 25 bp, Homo sapien
gggcagaggagtcgtgagctgcaga

SEQ ID NO: 4062118 - DNA, 25 bp, Homo sapien
tgagctgcagatgccgcgtggtatc

SEQ ID NO: 4062119 - DNA, 25 bp, Homo sapien
caaaacagctggtggtacgatacat

SEQ ID NO: 4062120 - DNA, 25 bp, Homo sapien
aacaactgccaaggtctcaagacgg

SEQ ID NO: 4062121 - DNA, 25 bp, Homo sapien
tgtttctagagacgtggcagctgct

SEQ ID NO: 4062122 - DNA, 25 bp, Homo sapien
ttcagtgtgttcagaggcccggttc

SEQ ID NO: 4062123 - DNA, 25 bp, Homo sapien
aacttgtgggctaagtgctcagacc

SEQ ID NO: 4062124 - DNA, 25 bp, Homo sapien
ttcccgccaggacaggatgcgtagg

SEQ ID NO: 4062125 - DNA, 25 bp, Homo sapien
tatcatcatgtcacgggagctcacg

SEQ ID NO: 4062126 - DNA, 25 bp, Homo sapien
tccagaaccggctccgtagtcaggg

SEQ ID NO: 4062127 - DNA, 25 bp, Homo sapien
cccgtgcacgttccgtggagagcca

SEQ ID NO: 4062128 - DNA, 25 bp, Homo sapien
cgcttgcccattccgatgccatgct

SEQ ID NO: 4062129 - DNA, 25 bp, Homo sapien
cagcactttgcctggattcatgagg

SEQ ID NO: 4062130 - DNA, 25 bp, Homo sapien
ccttgggggtctagcacggccttga

SEQ ID NO: 4062131 - DNA, 25 bp, Homo sapien
aggaaggagacatcctcagggggct

SEQ ID NO: 4062132 - DNA, 25 bp, Homo sapien
caggaaggagacatcctcagggggc

SEQ ID NO: 4062133 - DNA, 25 bp, Homo sapien
cagctgttctgcaaaagccttgacc

SEQ ID NO: 4062134 - DNA, 25 bp, Homo sapien
tggaagttgccgtcacccacatgcc

SEQ ID NO: 4062135 - DNA, 25 bp, Homo sapien
tcctcggcgtcatcagggttgacca

SEQ ID NO: 4062136 - DNA, 25 bp, Homo sapien
tgcccagttcctcggcgtcatcagg

SEQ ID NO: 4062137 - DNA, 25 bp, Homo sapien
gcccagaggacagaactattctcca

SEQ ID NO: 4062138 - DNA, 25 bp, Homo sapien
gccccaggctctgatcagccctgac

SEQ ID NO: 4062139 - DNA, 25 bp, Homo sapien
cccaggctctgatcagccctgacac

SEQ ID NO: 4062140 - DNA, 25 bp, Homo sapien
caggctctgatcagccctgacacct

SEQ ID NO: 4062141 - DNA, 25 bp, Homo sapien
ctccccagcagcagggtgggcagaa

SEQ ID NO: 4062142 - DNA, 25 bp, Homo sapien
tccccagcagcagggtgggcagaac

SEQ ID NO: 4062143 - DNA, 25 bp, Homo sapien
ctctccccagcagcagggtgggcag

SEQ ID NO: 4062144 - DNA, 25 bp, Homo sapien
tctccccagcagcagggtgggcaga

SEQ ID NO: 4062145 - DNA, 25 bp, Homo sapien
gagtcctgaggcattcagatcctcc

SEQ ID NO: 4062146 - DNA, 25 bp, Homo sapien
gcacacacacatccgtggagtagcc

SEQ ID NO: 4062147 - DNA, 25 bp, Homo sapien
ggcacacacacatccgtggagtagc

SEQ ID NO: 4062148 - DNA, 25 bp, Homo sapien
ctggtcagagggaagcctatgagtt

SEQ ID NO: 4062149 - DNA, 25 bp, Homo sapien
ggtcagagggaagcctatgagttac

SEQ ID NO: 4062150 - DNA, 25 bp, Homo sapien
cagagggaagcctatgagttacccc

SEQ ID NO: 4062151 - DNA, 25 bp, Homo sapien
agggaagcctatgagttacccctgc

SEQ ID NO: 4062152 - DNA, 25 bp, Homo sapien
tggccgcgtggccagggctgcgtac

SEQ ID NO: 4062153 - DNA, 25 bp, Homo sapien
gaggctccgttctgctggactatct

SEQ ID NO: 4062154 - DNA, 25 bp, Homo sapien
taccaggcattgtgccgtgctgtcc

SEQ ID NO: 4062155 - DNA, 25 bp, Homo sapien
gccgtgctgtccaaagccggctgcg

SEQ ID NO: 4062156 - DNA, 25 bp, Homo sapien
taagcaattcagcttgctgtacctg

SEQ ID NO: 4062157 - DNA, 25 bp, Homo sapien
gagtgtgggcgccactaagcaattc

SEQ ID NO: 4062158 - DNA, 25 bp, Homo sapien
tgtgggcgccactaagcaattcagc

SEQ ID NO: 4062159 - DNA, 25 bp, Homo sapien
tgctgtacctgttgcaggcatccat

SEQ ID NO: 4062160 - DNA, 25 bp, Homo sapien
tggccttcccagggggcctcttcca

SEQ ID NO: 4062161 - DNA, 25 bp, Homo sapien
tgaggcctggccttcccagggggcc

SEQ ID NO: 4062162 - DNA, 25 bp, Homo sapien
gatggcaggccaggtgaggcctggc

SEQ ID NO: 4062163 - DNA, 25 bp, Homo sapien
cagggagatggcaggccaggtgagg

SEQ ID NO: 4062164 - DNA, 25 bp, Homo sapien
gaacgcacacgtggcggccactgtg

SEQ ID NO: 4062165 - DNA, 25 bp, Homo sapien
cgtgaggttgtagccggctgcactc

SEQ ID NO: 4062166 - DNA, 25 bp, Homo sapien
ccccgtgaggttgtagccggctgca

SEQ ID NO: 4062167 - DNA, 25 bp, Homo sapien
caatgcgggctacgggcactgcagc

SEQ ID NO: 4062168 - DNA, 25 bp, Homo sapien
gacacacaaggtgagtaccaggctg

SEQ ID NO: 4062169 - DNA, 25 bp, Homo sapien
tgagggatttctggccagaagccga

SEQ ID NO: 4062170 - DNA, 25 bp, Homo sapien
atgagggatttctggccagaagccg

SEQ ID NO: 4062171 - DNA, 25 bp, Homo sapien
cagggacacacaaggtgagtaccag

SEQ ID NO: 4062172 - DNA, 25 bp, Homo sapien
tttggcccagctgacagggcttcag

SEQ ID NO: 4062173 - DNA, 25 bp, Homo sapien
caggcagggagagcaaaccctggtc

SEQ ID NO: 4062174 - DNA, 25 bp, Homo sapien
ggaagcctagcctgccaaaccaggg

SEQ ID NO: 4062175 - DNA, 25 bp, Homo sapien
cacaaagccagtcggcctcaggcag

SEQ ID NO: 4062176 - DNA, 25 bp, Homo sapien
cgggccccccgcagagggcgctcac

SEQ ID NO: 4062177 - DNA, 25 bp, Homo sapien
agcagccgcccgtcgggcagcacca

SEQ ID NO: 4062178 - DNA, 25 bp, Homo sapien
cggaaatgccggcctcggcccgccg

SEQ ID NO: 4062179 - DNA, 25 bp, Homo sapien
gtgtgcagcagccgcccgtcgggca

SEQ ID NO: 4062180 - DNA, 25 bp, Homo sapien
cctcggcccgccgtgtgcagcagcc

SEQ ID NO: 4062181 - DNA, 25 bp, Homo sapien
ctccaggttgagcacgttgtcccgc

SEQ ID NO: 4062182 - DNA, 25 bp, Homo sapien
ggttgagcacgttgtcccgcatggt

SEQ ID NO: 4062183 - DNA, 25 bp, Homo sapien
ttgtcccgcatggtgccgtagcgga

SEQ ID NO: 4062184 - DNA, 25 bp, Homo sapien
tgccgtagcggaccgcgttggtccc

SEQ ID NO: 4062185 - DNA, 25 bp, Homo sapien
gcagcctcagggaccggaggtcctt

SEQ ID NO: 4062186 - DNA, 25 bp, Homo sapien
cagcctcagggaccggaggtccttt

SEQ ID NO: 4062187 - DNA, 25 bp, Homo sapien
ggcggcgtacagaaggcagcctcag

SEQ ID NO: 4062188 - DNA, 25 bp, Homo sapien
tcccaggaaaggttcgcgagtccta

SEQ ID NO: 4062189 - DNA, 25 bp, Homo sapien
cctggttcagctccaggattcggtc

SEQ ID NO: 4062190 - DNA, 25 bp, Homo sapien
gcgttgagggctttgcgggtgacac

SEQ ID NO: 4062191 - DNA, 25 bp, Homo sapien
gctttgcgggtgacacctggctcca

SEQ ID NO: 4062192 - DNA, 25 bp, Homo sapien
tgcgtcaggttaacgcagacgccgc

SEQ ID NO: 4062193 - DNA, 25 bp, Homo sapien
gagcagacccaaggtgccgtgtgtg

SEQ ID NO: 4062194 - DNA, 25 bp, Homo sapien
ctgggtctctgacctggccacgtcc

SEQ ID NO: 4062195 - DNA, 25 bp, Homo sapien
gtgctgggaccatcctcgggccggg

SEQ ID NO: 4062196 - DNA, 25 bp, Homo sapien
ggtgctaagaccactgcagacctgg

SEQ ID NO: 4062197 - DNA, 25 bp, Homo sapien
ccggtgccggtgccgaatgggatga

SEQ ID NO: 4062198 - DNA, 25 bp, Homo sapien
tgccggtgccgaatgggatgatggg

SEQ ID NO: 4062199 - DNA, 25 bp, Homo sapien
ggtgccggtgccgaatgggatgatg

SEQ ID NO: 4062200 - DNA, 25 bp, Homo sapien
cgccaccctcaagcccggtgccggt

SEQ ID NO: 4062201 - DNA, 25 bp, Homo sapien
cttggcgatagcacagggctgccag

SEQ ID NO: 4062202 - DNA, 25 bp, Homo sapien
caccacagcatcaggaggttcgcac

SEQ ID NO: 4062203 - DNA, 25 bp, Homo sapien
tggggccacaccacagcatcaggag

SEQ ID NO: 4062204 - DNA, 25 bp, Homo sapien
cggctgacctgctccacgttctggg

SEQ ID NO: 4062205 - DNA, 25 bp, Homo sapien
tcatcgcgcccgtgctgctctcgga

SEQ ID NO: 4062206 - DNA, 25 bp, Homo sapien
cacggccttcagagcctctacgaag

SEQ ID NO: 4062207 - DNA, 25 bp, Homo sapien
gctctcggaccaccgcggcagtgga

SEQ ID NO: 4062208 - DNA, 25 bp, Homo sapien
gagcctctacgaagtccctgcagag

SEQ ID NO: 4062209 - DNA, 25 bp, Homo sapien
tcatccctccagaggacttctcttc

SEQ ID NO: 4062210 - DNA, 25 bp, Homo sapien
tccagaggacttctcttctctcccg

SEQ ID NO: 4062211 - DNA, 25 bp, Homo sapien
cagaggacttctcttctctcccggt

SEQ ID NO: 4062212 - DNA, 25 bp, Homo sapien
gaggacttctcttctctcccggtac

SEQ ID NO: 4062213 - DNA, 25 bp, Homo sapien
aggttgcagacctgagcagtcgggc

SEQ ID NO: 4062214 - DNA, 25 bp, Homo sapien
ctcccaggttgcagacctgagcagt

SEQ ID NO: 4062215 - DNA, 25 bp, Homo sapien
ccaggttgcagacctgagcagtcgg

SEQ ID NO: 4062216 - DNA, 25 bp, Homo sapien
cccaggttgcagacctgagcagtcg

SEQ ID NO: 4062217 - DNA, 25 bp, Homo sapien
ctgctgtcagcccattggctaggcc

SEQ ID NO: 4062218 - DNA, 25 bp, Homo sapien
gagggtgtgagcactgggtggcagg

SEQ ID NO: 4062219 - DNA, 25 bp, Homo sapien
gtcagctactgtggcagcagctact

SEQ ID NO: 4062220 - DNA, 25 bp, Homo sapien
gcactggccagagggtgtgagcact

SEQ ID NO: 4062221 - DNA, 25 bp, Homo sapien
tctagccaggcttgctcttgacaca

SEQ ID NO: 4062222 - DNA, 25 bp, Homo sapien
tagccaggcttgctcttgacacacg

SEQ ID NO: 4062223 - DNA, 25 bp, Homo sapien
acacgctgtgccctcggtctggcat

SEQ ID NO: 4062224 - DNA, 25 bp, Homo sapien
tcttgacacacgctgtgccctcggt

SEQ ID NO: 4062225 - DNA, 25 bp, Homo sapien
aatgtagtcccgaacgtggatggtc

SEQ ID NO: 4062226 - DNA, 25 bp, Homo sapien
gcgcccctgtttctgcgcatgtgca

SEQ ID NO: 4062227 - DNA, 25 bp, Homo sapien
ccaccagcggcgagtgggtgacaga

SEQ ID NO: 4062228 - DNA, 25 bp, Homo sapien
gcctaacaaggcgaagactttcctg

SEQ ID NO: 4062229 - DNA, 25 bp, Homo sapien
tgcttgggctttgttgttctgtgcc

SEQ ID NO: 4062230 - DNA, 25 bp, Homo sapien
cttgggctttgttgttctgtgccat

SEQ ID NO: 4062231 - DNA, 25 bp, Homo sapien
ttctgcttgggctttgttgttctgt

SEQ ID NO: 4062232 - DNA, 25 bp, Homo sapien
tctgcttgggctttgttgttctgtg

SEQ ID NO: 4062233 - DNA, 25 bp, Homo sapien
gaaagtaacttcagtatggtgcagc

SEQ ID NO: 4062234 - DNA, 25 bp, Homo sapien
gttgaaagtaacttcagtatggtgc

SEQ ID NO: 4062235 - DNA, 25 bp, Homo sapien
aacagttgaaagtaacttcagtatg

SEQ ID NO: 4062236 - DNA, 25 bp, Homo sapien
aacttcagtatggtgcagcttttga

SEQ ID NO: 4062237 - DNA, 25 bp, Homo sapien
catgagtcaccaggcgttggattcc

SEQ ID NO: 4062238 - DNA, 25 bp, Homo sapien
tggtcacaccaacatgacggaggct

SEQ ID NO: 4062239 - DNA, 25 bp, Homo sapien
caggatctgggtagtggatagttcc

SEQ ID NO: 4062240 - DNA, 25 bp, Homo sapien
aaagagagagatacgctgctactgc

SEQ ID NO: 4062241 - DNA, 25 bp, Homo sapien
gcaacacagcccttgggtcacagac

SEQ ID NO: 4062242 - DNA, 25 bp, Homo sapien
ctgtaacgcgatcaacagcaacaca

SEQ ID NO: 4062243 - DNA, 25 bp, Homo sapien
aacagcaacacagcccttgggtcac

SEQ ID NO: 4062244 - DNA, 25 bp, Homo sapien
aacacagcccttgggtcacagacca

SEQ ID NO: 4062245 - DNA, 25 bp, Homo sapien
gccatcaattttaatgaagcattgc

SEQ ID NO: 4062246 - DNA, 25 bp, Homo sapien
catatctcctttacgtcatctccgg

SEQ ID NO: 4062247 - DNA, 25 bp, Homo sapien
gaagcattgcatacatatctccttt

SEQ ID NO: 4062248 - DNA, 25 bp, Homo sapien
cctttacgtcatctccggtcaatgc

SEQ ID NO: 4062249 - DNA, 25 bp, Homo sapien
gacgaggtgcaaatataccctttag

SEQ ID NO: 4062250 - DNA, 25 bp, Homo sapien
gatggacgaggtgcaaatataccct

SEQ ID NO: 4062251 - DNA, 25 bp, Homo sapien
caaatataccctttagtttgtcgag

SEQ ID NO: 4062252 - DNA, 25 bp, Homo sapien
atataccctttagtttgtcgagcat

SEQ ID NO: 4062253 - DNA, 25 bp, Homo sapien
actgcagcacgcttcaagtgctcct

SEQ ID NO: 4062254 - DNA, 25 bp, Homo sapien
gcttcaagtgctccttagggcccca

SEQ ID NO: 4062255 - DNA, 25 bp, Homo sapien
aagtgctccttagggccccaggcca

SEQ ID NO: 4062256 - DNA, 25 bp, Homo sapien
gcacgcttcaagtgctccttagggc

SEQ ID NO: 4062257 - DNA, 25 bp, Homo sapien
ctgcgacggaagatcagcgctcttt

SEQ ID NO: 4062258 - DNA, 25 bp, Homo sapien
cttttgaagtgccttgtaatcctca

SEQ ID NO: 4062259 - DNA, 25 bp, Homo sapien
gtaatcctcataaaccacagtgctt

SEQ ID NO: 4062260 - DNA, 25 bp, Homo sapien
gaagatcagcgctcttttgaagtgc

SEQ ID NO: 4062261 - DNA, 25 bp, Homo sapien
taaagccatcactgcgagtgagaag

SEQ ID NO: 4062262 - DNA, 25 bp, Homo sapien
gccatcactgcgagtgagaagaatg

SEQ ID NO: 4062263 - DNA, 25 bp, Homo sapien
gattgctaaagccatcactgcgagt

SEQ ID NO: 4062264 - DNA, 25 bp, Homo sapien
tcactgcgagtgagaagaatgggca

SEQ ID NO: 4062265 - DNA, 25 bp, Homo sapien
gtgaacagatgagtccaactgggag

SEQ ID NO: 4062266 - DNA, 25 bp, Homo sapien
catcgagcttgaagactgtcgggtg

SEQ ID NO: 4062267 - DNA, 25 bp, Homo sapien
gactgtcgggtgaacagatgagtcc

SEQ ID NO: 4062268 - DNA, 25 bp, Homo sapien
gcttgaagactgtcgggtgaacaga

SEQ ID NO: 4062269 - DNA, 25 bp, Homo sapien
cagcagcctgttccatagcagcatc

SEQ ID NO: 4062270 - DNA, 25 bp, Homo sapien
cctgttccatagcagcatctcccac

SEQ ID NO: 4062271 - DNA, 25 bp, Homo sapien
ccagcagcctgttccatagcagcat

SEQ ID NO: 4062272 - DNA, 25 bp, Homo sapien
tgcccagcagcctgttccatagcag

SEQ ID NO: 4062273 - DNA, 25 bp, Homo sapien
tcacattcctgctttcgtagacgaa

SEQ ID NO: 4062274 - DNA, 25 bp, Homo sapien
gagcaccccatgagcttagctgtgc

SEQ ID NO: 4062275 - DNA, 25 bp, Homo sapien
tcaccagcatggtcacattcctgct

SEQ ID NO: 4062276 - DNA, 25 bp, Homo sapien
gacgaatgaatcttccgggccttcc

SEQ ID NO: 4062277 - DNA, 25 bp, Homo sapien
tgcatttaatgggaaatcttaaggc

SEQ ID NO: 4062278 - DNA, 25 bp, Homo sapien
aacagatgcatttaatgggaaatct

SEQ ID NO: 4062279 - DNA, 25 bp, Homo sapien
cagatgcatttaatgggaaatctta

SEQ ID NO: 4062280 - DNA, 25 bp, Homo sapien
gatgcatttaatgggaaatcttaag

SEQ ID NO: 4062281 - DNA, 25 bp, Homo sapien
tacacagcgggcgtggtggtagagc

SEQ ID NO: 4062282 - DNA, 25 bp, Homo sapien
ggcgacacgggcgtacacagcgggc

SEQ ID NO: 4062283 - DNA, 25 bp, Homo sapien
cgggcgtacacagcgggcgtggtgg

SEQ ID NO: 4062284 - DNA, 25 bp, Homo sapien
acagcgggcgtggtggtagagcagg

SEQ ID NO: 4062285 - DNA, 25 bp, Homo sapien
agggcctgggcagggccagcctcac

SEQ ID NO: 4062286 - DNA, 25 bp, Homo sapien
ctggccagggcctgggcagggccag

SEQ ID NO: 4062287 - DNA, 25 bp, Homo sapien
gccagggcctgggcagggccagcct

SEQ ID NO: 4062288 - DNA, 25 bp, Homo sapien
tggccagggcctgggcagggccagc

SEQ ID NO: 4062289 - DNA, 25 bp, Homo sapien
aggacttcttgcattcggcattgga

SEQ ID NO: 4062290 - DNA, 25 bp, Homo sapien
atcatcacgtcggtgatcctcctgc

SEQ ID NO: 4062291 - DNA, 25 bp, Homo sapien
cccggcacagatcatcacgtcggtg

SEQ ID NO: 4062292 - DNA, 25 bp, Homo sapien
cttgcattcggcattggacaggagg

SEQ ID NO: 4062293 - DNA, 25 bp, Homo sapien
gcccctgggctcactcagccaagag

SEQ ID NO: 4062294 - DNA, 25 bp, Homo sapien
gagagacccggggccgacacgcctg

SEQ ID NO: 4062295 - DNA, 25 bp, Homo sapien
tgggctcactcagccaagagtggag

SEQ ID NO: 4062296 - DNA, 25 bp, Homo sapien
cctgggctcactcagccaagagtgg

SEQ ID NO: 4062297 - DNA, 25 bp, Homo sapien
caccatcaccacgatgttgggtacg

SEQ ID NO: 4062298 - DNA, 25 bp, Homo sapien
cacgatgttgggtacggcccctgga

SEQ ID NO: 4062299 - DNA, 25 bp, Homo sapien
ctgcaccatcaccacgatgttgggt

SEQ ID NO: 4062300 - DNA, 25 bp, Homo sapien
catcaccacgatgttgggtacggcc

SEQ ID NO: 4062301 - DNA, 25 bp, Homo sapien
cacgctgcgactccaggcaggtcag

SEQ ID NO: 4062302 - DNA, 25 bp, Homo sapien
gggagccccacgctgcgactccagg

SEQ ID NO: 4062303 - DNA, 25 bp, Homo sapien
gatccgacctggattttatttgcat

SEQ ID NO: 4062304 - DNA, 25 bp, Homo sapien
ctcatgatccgacctggattttatt

SEQ ID NO: 4062305 - DNA, 25 bp, Homo sapien
gcagttaggagcgtgttggaattta

SEQ ID NO: 4062306 - DNA, 25 bp, Homo sapien
agcgtgttggaatttagagccaaac

SEQ ID NO: 4062307 - DNA, 25 bp, Homo sapien
ttaggagcgtgttggaatttagagc

SEQ ID NO: 4062308 - DNA, 25 bp, Homo sapien
taggagcgtgttggaatttagagcc

SEQ ID NO: 4062309 - DNA, 25 bp, Homo sapien
tcacggtcagaatgctgaacttggg

SEQ ID NO: 4062310 - DNA, 25 bp, Homo sapien
gcacacggcggacactgtctgggag

SEQ ID NO: 4062311 - DNA, 25 bp, Homo sapien
tgtcattgttcacggtcagaatgct

SEQ ID NO: 4062312 - DNA, 25 bp, Homo sapien
tggcacacagtgtccccgcggggaa

SEQ ID NO: 4062313 - DNA, 25 bp, Homo sapien
acctgcaggcttcgaggacagactc

SEQ ID NO: 4062314 - DNA, 25 bp, Homo sapien
tccctggtgcccgttaaggagcagt

SEQ ID NO: 4062315 - DNA, 25 bp, Homo sapien
ccgttaaggagcagtccatccccag

SEQ ID NO: 4062316 - DNA, 25 bp, Homo sapien
ccatccccagggccggaatgggaat

SEQ ID NO: 4062317 - DNA, 25 bp, Homo sapien
cttcaggacctggatgttctcctcg

SEQ ID NO: 4062318 - DNA, 25 bp, Homo sapien
ttcaggacctggatgttctcctcgt

SEQ ID NO: 4062319 - DNA, 25 bp, Homo sapien
tcaggacctggatgttctcctcgtc

SEQ ID NO: 4062320 - DNA, 25 bp, Homo sapien
ttgtgggtgagagaacatgccctgc

SEQ ID NO: 4062321 - DNA, 25 bp, Homo sapien
ctgggcagagcgttgtgggtgagag

SEQ ID NO: 4062322 - DNA, 25 bp, Homo sapien
ccggtgctggaagcggagcccaagg

SEQ ID NO: 4062323 - DNA, 25 bp, Homo sapien
ccacccgaccggtgctggaagcgga

SEQ ID NO: 4062324 - DNA, 25 bp, Homo sapien
gcggtgaccacccagtcctcgctga

SEQ ID NO: 4062325 - DNA, 25 bp, Homo sapien
cagcggtgaccacccagtcctcgct

SEQ ID NO: 4062326 - DNA, 25 bp, Homo sapien
ggtgaccacccagtcctcgctgatg

SEQ ID NO: 4062327 - DNA, 25 bp, Homo sapien
ggcagcggtgaccacccagtcctcg

SEQ ID NO: 4062328 - DNA, 25 bp, Homo sapien
cacgatcctggacaggccgctgagc

SEQ ID NO: 4062329 - DNA, 25 bp, Homo sapien
cattcacgatcctggacaggccgct

SEQ ID NO: 4062330 - DNA, 25 bp, Homo sapien
ttcacgatcctggacaggccgctga

SEQ ID NO: 4062331 - DNA, 25 bp, Homo sapien
ccccattcacgatcctggacaggcc

SEQ ID NO: 4062332 - DNA, 25 bp, Homo sapien
gaaaggtttggactgaacggtgcca

SEQ ID NO: 4062333 - DNA, 25 bp, Homo sapien
gtgttggccccacctcagttcggag

SEQ ID NO: 4062334 - DNA, 25 bp, Homo sapien
ctgagtccaatgaactgggctgtgg

SEQ ID NO: 4062335 - DNA, 25 bp, Homo sapien
cagttcggagaagtcacacaggtgg

SEQ ID NO: 4062336 - DNA, 25 bp, Homo sapien
gaaggggagcgggactccccatctc

SEQ ID NO: 4062337 - DNA, 25 bp, Homo sapien
actgcggtgcacagctgaactggga

SEQ ID NO: 4062338 - DNA, 25 bp, Homo sapien
cacggcagagatggagccggtgact

SEQ ID NO: 4062339 - DNA, 25 bp, Homo sapien
atggagccggtgactcgcccaggcc

SEQ ID NO: 4062340 - DNA, 25 bp, Homo sapien
ccacactgcggtgcacagctgaact

SEQ ID NO: 4062341 - DNA, 25 bp, Homo sapien
tgagaggagaaaacccttcggcctc

SEQ ID NO: 4062342 - DNA, 25 bp, Homo sapien
aggtggtacccaggagggcccagca

SEQ ID NO: 4062343 - DNA, 25 bp, Homo sapien
caggagaggagccagaggaaagcca

SEQ ID NO: 4062344 - DNA, 25 bp, Homo sapien
agcaggagaggagccagaggaaagc

SEQ ID NO: 4062345 - DNA, 25 bp, Homo sapien
ccagcaggagaggagccagaggaaa

SEQ ID NO: 4062346 - DNA, 25 bp, Homo sapien
ctgtgtgcctgctgttatctggaga

SEQ ID NO: 4062347 - DNA, 25 bp, Homo sapien
tctggagaccttggggcgataatcc

SEQ ID NO: 4062348 - DNA, 25 bp, Homo sapien
gtgtaggacgcctgtctgccggtcc

SEQ ID NO: 4062349 - DNA, 25 bp, Homo sapien
gtccccgttatagccctgtgtgcct

SEQ ID NO: 4062350 - DNA, 25 bp, Homo sapien
agtgggcaagatgtgtcggtgcagg

SEQ ID NO: 4062351 - DNA, 25 bp, Homo sapien
gtgggcaagatgtgtcggtgcaggg

SEQ ID NO: 4062352 - DNA, 25 bp, Homo sapien
tgggcaagatgtgtcggtgcagggc

SEQ ID NO: 4062353 - DNA, 25 bp, Homo sapien
tgcacatgggctcttcctgccagcc

SEQ ID NO: 4062354 - DNA, 25 bp, Homo sapien
gcatgcacatgggctcttcctgcca

SEQ ID NO: 4062355 - DNA, 25 bp, Homo sapien
catgcacatgggctcttcctgccag

SEQ ID NO: 4062356 - DNA, 25 bp, Homo sapien
gtggcagctgacagccgggaggagg

SEQ ID NO: 4062357 - DNA, 25 bp, Homo sapien
gcaggacccaaagaggtctgcgtcc

SEQ ID NO: 4062358 - DNA, 25 bp, Homo sapien
tggggtcgcaggacccaaagaggtc

SEQ ID NO: 4062359 - DNA, 25 bp, Homo sapien
ggtcgcaggacccaaagaggtctgc

SEQ ID NO: 4062360 - DNA, 25 bp, Homo sapien
tcgcaggacccaaagaggtctgcgt

SEQ ID NO: 4062361 - DNA, 25 bp, Homo sapien
ggccaccaccctggttatcactgag

SEQ ID NO: 4062362 - DNA, 25 bp, Homo sapien
agaattggcattctcttgtgaggcc

SEQ ID NO: 4062363 - DNA, 25 bp, Homo sapien
ctctgatggagagacaggtcggctc

SEQ ID NO: 4062364 - DNA, 25 bp, Homo sapien
ggccatttctcagttgacggcagga

SEQ ID NO: 4062365 - DNA, 25 bp, Homo sapien
ctgattgtcagccacgctctaggct

SEQ ID NO: 4062366 - DNA, 25 bp, Homo sapien
cacgctctaggctgaatattccctt

SEQ ID NO: 4062367 - DNA, 25 bp, Homo sapien
tcctcagccacgtctgtcctgtggc

SEQ ID NO: 4062368 - DNA, 25 bp, Homo sapien
tccaacgccttctgattgtcagcca

SEQ ID NO: 4062369 - DNA, 25 bp, Homo sapien
cttctgactccataatacttaacag

SEQ ID NO: 4062370 - DNA, 25 bp, Homo sapien
caccagcgggttggtccttgtcacc

SEQ ID NO: 4062371 - DNA, 25 bp, Homo sapien
ggcttggcttcactggtgacttgca

SEQ ID NO: 4062372 - DNA, 25 bp, Homo sapien
gagaatccacgatgccctgagtcac

SEQ ID NO: 4062373 - DNA, 25 bp, Homo sapien
tgcagtgacactctggagaatccac

SEQ ID NO: 4062374 - DNA, 25 bp, Homo sapien
tcccggagacctggttccatgacag

SEQ ID NO: 4062375 - DNA, 25 bp, Homo sapien
tctcctggcagggatactgcagctc

SEQ ID NO: 4062376 - DNA, 25 bp, Homo sapien
actgagagcctgagttcccggagac

SEQ ID NO: 4062377 - DNA, 25 bp, Homo sapien
tgtccccaaggctgaccggtgatgt

SEQ ID NO: 4062378 - DNA, 25 bp, Homo sapien
tccacttattgcccaaggtccctgg

SEQ ID NO: 4062379 - DNA, 25 bp, Homo sapien
ctgtctccacttattgcccaaggtc

SEQ ID NO: 4062380 - DNA, 25 bp, Homo sapien
cacttattgcccaaggtccctgggt

SEQ ID NO: 4062381 - DNA, 25 bp, Homo sapien
cagggactggggttgtctggtagag

SEQ ID NO: 4062382 - DNA, 25 bp, Homo sapien
tgaggcagcggcatggcttccctct

SEQ ID NO: 4062383 - DNA, 25 bp, Homo sapien
ctggtgcccgaggggtctgtcctga

SEQ ID NO: 4062384 - DNA, 25 bp, Homo sapien
ttctgaggcagcggcatggcttccc

SEQ ID NO: 4062385 - DNA, 25 bp, Homo sapien
ctgaggcagcggcatggcttccctc

SEQ ID NO: 4062386 - DNA, 25 bp, Homo sapien
gagtgggaaggacgatgctggtctc

SEQ ID NO: 4062387 - DNA, 25 bp, Homo sapien
ggaaggacgatgctggtctctgcca

SEQ ID NO: 4062388 - DNA, 25 bp, Homo sapien
ccaggagtgggaaggacgatgctgg

SEQ ID NO: 4062389 - DNA, 25 bp, Homo sapien
tcaggagagggtgcattctggggct

SEQ ID NO: 4062390 - DNA, 25 bp, Homo sapien
tgggtctcactatgcggcccgactg

SEQ ID NO: 4062391 - DNA, 25 bp, Homo sapien
actatgcggcccgactggccttgaa

SEQ ID NO: 4062392 - DNA, 25 bp, Homo sapien
tgctaggattacacagccctcgccc

SEQ ID NO: 4062393 - DNA, 25 bp, Homo sapien
tgcggcccgactggccttgaagttt

SEQ ID NO: 4062394 - DNA, 25 bp, Homo sapien
taagcagagctctggatgcagcccc

SEQ ID NO: 4062395 - DNA, 25 bp, Homo sapien
gatgccaggtccaggtataattcca

SEQ ID NO: 4062396 - DNA, 25 bp, Homo sapien
agatcaggagggcttgcgaatcacc

SEQ ID NO: 4062397 - DNA, 25 bp, Homo sapien
tcatatgcagaacggtcagggctgg

SEQ ID NO: 4062398 - DNA, 25 bp, Homo sapien
taaatggagactcttagtcaaatga

SEQ ID NO: 4062399 - DNA, 25 bp, Homo sapien
ggacacggcaccctcgtgggaccag

SEQ ID NO: 4062400 - DNA, 25 bp, Homo sapien
ctggtaaggcggaggacacaccaaa

SEQ ID NO: 4062401 - DNA, 25 bp, Homo sapien
acacaccaaactgcactggccctgt

SEQ ID NO: 4062402 - DNA, 25 bp, Homo sapien
agcgactcttgacatgggagccagg

SEQ ID NO: 4062403 - DNA, 25 bp, Homo sapien
accctgcccggccataaatatatac

SEQ ID NO: 4062404 - DNA, 25 bp, Homo sapien
gtggcacagcgactcttgacatggg

SEQ ID NO: 4062405 - DNA, 25 bp, Homo sapien
tcctgtccctaagcctgtggcacag

SEQ ID NO: 4062406 - DNA, 25 bp, Homo sapien
gatgacgaacttgctgtgcgccaca

SEQ ID NO: 4062407 - DNA, 25 bp, Homo sapien
cacaaagatcttgggcggctggttg

SEQ ID NO: 4062408 - DNA, 25 bp, Homo sapien
tgtccccgatgaacaccagcttgtg

SEQ ID NO: 4062409 - DNA, 25 bp, Homo sapien
cagcaggttgctgtagtgggtcacc

SEQ ID NO: 4062410 - DNA, 25 bp, Homo sapien
gccctgccgcgtgatgctgcccttt

SEQ ID NO: 4062411 - DNA, 25 bp, Homo sapien
ctcttgccctgccgcgtgatgctgc

SEQ ID NO: 4062412 - DNA, 25 bp, Homo sapien
ccctgccgcgtgatgctgccctttt

SEQ ID NO: 4062413 - DNA, 25 bp, Homo sapien
ttgccctgccgcgtgatgctgccct

SEQ ID NO: 4062414 - DNA, 25 bp, Homo sapien
cagagacaggggctgcgctgaggcc

SEQ ID NO: 4062415 - DNA, 25 bp, Homo sapien
ccagttttctgagccagaagcacag

SEQ ID NO: 4062416 - DNA, 25 bp, Homo sapien
tctgagccagaagcacaggccagcc

SEQ ID NO: 4062417 - DNA, 25 bp, Homo sapien
ggctgcgctgaggccagttttctga

SEQ ID NO: 4062418 - DNA, 25 bp, Homo sapien
atgtgggacacagcccccccaggct

SEQ ID NO: 4062419 - DNA, 25 bp, Homo sapien
cccccaggctggcacatgcggggac

SEQ ID NO: 4062420 - DNA, 25 bp, Homo sapien
tatgtgggacacagcccccccaggc

SEQ ID NO: 4062421 - DNA, 25 bp, Homo sapien
tctgaagagcagtgaggcattgccg

SEQ ID NO: 4062422 - DNA, 25 bp, Homo sapien
tgctcaccgatggaggaacgtcgta

SEQ ID NO: 4062423 - DNA, 25 bp, Homo sapien
tactgcccatctggcgagtcctggg

SEQ ID NO: 4062424 - DNA, 25 bp, Homo sapien
ggcaaactccaacagctcgtggacg

SEQ ID NO: 4062425 - DNA, 25 bp, Homo sapien
gagcttcctcccaaagaattgcatg

SEQ ID NO: 4062426 - DNA, 25 bp, Homo sapien
catacaaatgcagaggcacgcacac

SEQ ID NO: 4062427 - DNA, 25 bp, Homo sapien
tccatgacagctctgggacgagccg

SEQ ID NO: 4062428 - DNA, 25 bp, Homo sapien
caagcggtggtcaagactgtccatc

SEQ ID NO: 4062429 - DNA, 25 bp, Homo sapien
ccctggcattgccctggcatttgct

SEQ ID NO: 4062430 - DNA, 25 bp, Homo sapien
tggcattgccctggcatttgctcac

SEQ ID NO: 4062431 - DNA, 25 bp, Homo sapien
ctggccctggcattgccctggcatt

SEQ ID NO: 4062432 - DNA, 25 bp, Homo sapien
ggccctggcattgccctggcatttg

SEQ ID NO: 4062433 - DNA, 25 bp, Homo sapien
agcaacgggtctcggccattgggac

SEQ ID NO: 4062434 - DNA, 25 bp, Homo sapien
acgtcatacacctccagcaacgggt

SEQ ID NO: 4062435 - DNA, 25 bp, Homo sapien
cattgggacccttgacagccatggg

SEQ ID NO: 4062436 - DNA, 25 bp, Homo sapien
cgtggtggttggacggtggcaggcc

SEQ ID NO: 4062437 - DNA, 25 bp, Homo sapien
tgtcgcgggatgtcgtactcgtcct

SEQ ID NO: 4062438 - DNA, 25 bp, Homo sapien
cggctgggcggcctcgtatacatag

SEQ ID NO: 4062439 - DNA, 25 bp, Homo sapien
atcatagatgtcctgtggccccggg

SEQ ID NO: 4062440 - DNA, 25 bp, Homo sapien
ccgaaccgggggcacatcatagatg

SEQ ID NO: 4062441 - DNA, 25 bp, Homo sapien
ctcaaaccagcccttagggaggctc

SEQ ID NO: 4062442 - DNA, 25 bp, Homo sapien
ctgggggcagagagccgacttcact

SEQ ID NO: 4062443 - DNA, 25 bp, Homo sapien
agcccttagggaggctccactcaca

SEQ ID NO: 4062444 - DNA, 25 bp, Homo sapien
agggaggctccactcacacctggga

SEQ ID NO: 4062445 - DNA, 25 bp, Homo sapien
caggtacggcaagaactctgggttt

SEQ ID NO: 4062446 - DNA, 25 bp, Homo sapien
tttattcagagctgcctcgtcctgg

SEQ ID NO: 4062447 - DNA, 25 bp, Homo sapien
aggacaccaacgtctctacagcctg

SEQ ID NO: 4062448 - DNA, 25 bp, Homo sapien
gaccttcctctagcagaacgcagtg

SEQ ID NO: 4062449 - DNA, 25 bp, Homo sapien
ctgatgacaccggtggggtgagggg

SEQ ID NO: 4062450 - DNA, 25 bp, Homo sapien
aagaggcaggcagcacaatggcctg

SEQ ID NO: 4062451 - DNA, 25 bp, Homo sapien
ccaaggcccgcacagtgggtgaaga

SEQ ID NO: 4062452 - DNA, 25 bp, Homo sapien
aggcagcacaatggcctgcccaggg

SEQ ID NO: 4062453 - DNA, 25 bp, Homo sapien
cagggaagccaaggcccgcacagtg

SEQ ID NO: 4062454 - DNA, 25 bp, Homo sapien
gccatgccaggcagcctccttccct

SEQ ID NO: 4062455 - DNA, 25 bp, Homo sapien
ctgaagcgggtaggggccatgccag

SEQ ID NO: 4062456 - DNA, 25 bp, Homo sapien
agcctccttccctgaaggtctccct

SEQ ID NO: 4062457 - DNA, 25 bp, Homo sapien
ggcagcctccttccctgaaggtctc

SEQ ID NO: 4062458 - DNA, 25 bp, Homo sapien
ctccactgaaagaccttttgttcct

SEQ ID NO: 4062459 - DNA, 25 bp, Homo sapien
ctctccactgaaagaccttttgttc

SEQ ID NO: 4062460 - DNA, 25 bp, Homo sapien
gcgcccacacgcctccaccaccagg

SEQ ID NO: 4062461 - DNA, 25 bp, Homo sapien
ccccgggcacactgcgcccacacgc

SEQ ID NO: 4062462 - DNA, 25 bp, Homo sapien
agggcctccccgcacatcccccagg

SEQ ID NO: 4062463 - DNA, 25 bp, Homo sapien
tgcccctgaacccctagaggccctc

SEQ ID NO: 4062464 - DNA, 25 bp, Homo sapien
aacccctagaggccctcccaatgca

SEQ ID NO: 4062465 - DNA, 25 bp, Homo sapien
acccctagaggccctcccaatgcag

SEQ ID NO: 4062466 - DNA, 25 bp, Homo sapien
agccccccgcagcgcagcagaactg

SEQ ID NO: 4062467 - DNA, 25 bp, Homo sapien
ccccgcagcgcagcagaactgggcc

SEQ ID NO: 4062468 - DNA, 25 bp, Homo sapien
ccccccgcagcgcagcagaactggg

SEQ ID NO: 4062469 - DNA, 25 bp, Homo sapien
cgcagcgcagcagaactgggcccac

SEQ ID NO: 4062470 - DNA, 25 bp, Homo sapien
cccttccagtgcgtctgggagtgga

SEQ ID NO: 4062471 - DNA, 25 bp, Homo sapien
acgcctggtagcagagtcccggctg

SEQ ID NO: 4062472 - DNA, 25 bp, Homo sapien
tccagcacgcctggtagcagagtcc

SEQ ID NO: 4062473 - DNA, 25 bp, Homo sapien
gtctgggagtggatttggcggctgc

SEQ ID NO: 4062474 - DNA, 25 bp, Homo sapien
tccttgggaaatggagcaccacagg

SEQ ID NO: 4062475 - DNA, 25 bp, Homo sapien
ctccttgggaaatggagcaccacag

SEQ ID NO: 4062476 - DNA, 25 bp, Homo sapien
ctgggttggctcccggctctggcac

SEQ ID NO: 4062477 - DNA, 25 bp, Homo sapien
tcccaggcatttgaggggcaggcct

SEQ ID NO: 4062478 - DNA, 25 bp, Homo sapien
taccctggaactgggagactcagtt

SEQ ID NO: 4062479 - DNA, 25 bp, Homo sapien
aagtcctggcaagggctccttctca

SEQ ID NO: 4062480 - DNA, 25 bp, Homo sapien
agtgtccctcccgcccacgtgaagt

SEQ ID NO: 4062481 - DNA, 25 bp, Homo sapien
gcccctagcatgttccataagtgga

SEQ ID NO: 4062482 - DNA, 25 bp, Homo sapien
tggcccctagcatgttccataagtg

SEQ ID NO: 4062483 - DNA, 25 bp, Homo sapien
cgctggcccctagcatgttccataa

SEQ ID NO: 4062484 - DNA, 25 bp, Homo sapien
cctagcatgttccataagtggagag

SEQ ID NO: 4062485 - DNA, 25 bp, Homo sapien
tcccagctgcgtgtgtccatggacg

SEQ ID NO: 4062486 - DNA, 25 bp, Homo sapien
ccgggacttggtagaggccttgctg

SEQ ID NO: 4062487 - DNA, 25 bp, Homo sapien
tggtagatgtcatgccccatcccgg

SEQ ID NO: 4062488 - DNA, 25 bp, Homo sapien
tctgcttcgagaaggtggatgtctg

SEQ ID NO: 4062489 - DNA, 25 bp, Homo sapien
aggtgttggggagcatgggcgtgta

SEQ ID NO: 4062490 - DNA, 25 bp, Homo sapien
gccggaggcgctggggcatggaggc

SEQ ID NO: 4062491 - DNA, 25 bp, Homo sapien
ctgctggcttcttatcatacatgcc

SEQ ID NO: 4062492 - DNA, 25 bp, Homo sapien
ctggcttcttatcatacatgcccac

SEQ ID NO: 4062493 - DNA, 25 bp, Homo sapien
aggccggaggcgctggggcatggag

SEQ ID NO: 4062494 - DNA, 25 bp, Homo sapien
ctggcgcccatgcagcgagcagagc

SEQ ID NO: 4062495 - DNA, 25 bp, Homo sapien
catgatgtcacccttgcggaaggag

SEQ ID NO: 4062496 - DNA, 25 bp, Homo sapien
cacattgtcatagagcgctttggcc

SEQ ID NO: 4062497 - DNA, 25 bp, Homo sapien
cttgaggcggttcccaggcacgatg

SEQ ID NO: 4062498 - DNA, 25 bp, Homo sapien
agtctcctggcgtcttagatgtgca

SEQ ID NO: 4062499 - DNA, 25 bp, Homo sapien
ctgactcggaaatgggacctgggtt

SEQ ID NO: 4062500 - DNA, 25 bp, Homo sapien
tctggccagccagtagctgtgtgac

SEQ ID NO: 4062501 - DNA, 25 bp, Homo sapien
tgtgcagcctggtcgagactctgac

SEQ ID NO: 4062502 - DNA, 25 bp, Homo sapien
ctaggagggtggcccaggaaaggct

SEQ ID NO: 4062503 - DNA, 25 bp, Homo sapien
gcagaggccccatcaggcagggcca

SEQ ID NO: 4062504 - DNA, 25 bp, Homo sapien
aaaggctggcagaggccccatcagg

SEQ ID NO: 4062505 - DNA, 25 bp, Homo sapien
ctcctaggagggtggcccaggaaag

SEQ ID NO: 4062506 - DNA, 25 bp, Homo sapien
ttgcatacagggtcagagacggcct

SEQ ID NO: 4062507 - DNA, 25 bp, Homo sapien
tattgcccagtagcgcgatcatggc

SEQ ID NO: 4062508 - DNA, 25 bp, Homo sapien
cagagatagcgcaggcctagtggac

SEQ ID NO: 4062509 - DNA, 25 bp, Homo sapien
gaaccgggcctatactgtagtggga

SEQ ID NO: 4062510 - DNA, 25 bp, Homo sapien
tcagtgaacgtcatccgcacaacca

SEQ ID NO: 4062511 - DNA, 25 bp, Homo sapien
cagataagcccagacgagcaaagca

SEQ ID NO: 4062512 - DNA, 25 bp, Homo sapien
atggatgatgcgtgcacagctcagt

SEQ ID NO: 4062513 - DNA, 25 bp, Homo sapien
ataagcccagacgagcaaagcacac

SEQ ID NO: 4062514 - DNA, 25 bp, Homo sapien
tgctggactatcatcccctccagga

SEQ ID NO: 4062515 - DNA, 25 bp, Homo sapien
tatcttgacatagcccaattcacac

SEQ ID NO: 4062516 - DNA, 25 bp, Homo sapien
cagtactgcccagcatatcttgaca

SEQ ID NO: 4062517 - DNA, 25 bp, Homo sapien
gttttcaagggacacaactgtgacc

SEQ ID NO: 4062518 - DNA, 25 bp, Homo sapien
acataggactgacaggactgcccca

SEQ ID NO: 4062519 - DNA, 25 bp, Homo sapien
tttgggggcttgctcatcccaaagg

SEQ ID NO: 4062520 - DNA, 25 bp, Homo sapien
agcactccctaaacaatatcccagc

SEQ ID NO: 4062521 - DNA, 25 bp, Homo sapien
ctccagggcacgtgcaccagaggaa

SEQ ID NO: 4062522 - DNA, 25 bp, Homo sapien
gggaccagggctgcgggtgacacac

SEQ ID NO: 4062523 - DNA, 25 bp, Homo sapien
caggccctgagaagcacagcggctg

SEQ ID NO: 4062524 - DNA, 25 bp, Homo sapien
gcaggccctgagaagcacagcggct

SEQ ID NO: 4062525 - DNA, 25 bp, Homo sapien
ggccctgagaagcacagcggctggg

SEQ ID NO: 4062526 - DNA, 25 bp, Homo sapien
cagccgtcggatgggtgttggggtc

SEQ ID NO: 4062527 - DNA, 25 bp, Homo sapien
ggcggaagctggtgtcggcgagtgg

SEQ ID NO: 4062528 - DNA, 25 bp, Homo sapien
ggaagctggtgtcggcgagtggtaa

SEQ ID NO: 4062529 - DNA, 25 bp, Homo sapien
tcggcgagtggtaaggggagatgct

SEQ ID NO: 4062530 - DNA, 25 bp, Homo sapien
tgacgcctgggttcgtggaaaccac

SEQ ID NO: 4062531 - DNA, 25 bp, Homo sapien
gatgcaggcccaataagcatgcgcc

SEQ ID NO: 4062532 - DNA, 25 bp, Homo sapien
ttgcttgtcccaaagagcctccgtg

SEQ ID NO: 4062533 - DNA, 25 bp, Homo sapien
aagggacaacccaggagttctcagg

SEQ ID NO: 4062534 - DNA, 25 bp, Homo sapien
tggaggggtcctgatcaccccactt

SEQ ID NO: 4062535 - DNA, 25 bp, Homo sapien
gggtcctgatcaccccacttggtcc

SEQ ID NO: 4062536 - DNA, 25 bp, Homo sapien
cagccttagtggcaacttcccctaa

SEQ ID NO: 4062537 - DNA, 25 bp, Homo sapien
tcccctaatactcccacaacaacag

SEQ ID NO: 4062538 - DNA, 25 bp, Homo sapien
tatcctgccagccttaggagggcgt

SEQ ID NO: 4062539 - DNA, 25 bp, Homo sapien
caggcaggatcagcggtgttcactc

SEQ ID NO: 4062540 - DNA, 25 bp, Homo sapien
gcagactacatagcctgtgcacggg

SEQ ID NO: 4062541 - DNA, 25 bp, Homo sapien
acagcagatgcctttatgcccaggg

SEQ ID NO: 4062542 - DNA, 25 bp, Homo sapien
catgcttgtgatccggggttttggc

SEQ ID NO: 4062543 - DNA, 25 bp, Homo sapien
gtcatcaaggaggctagacccaccc

SEQ ID NO: 4062544 - DNA, 25 bp, Homo sapien
atcaaggaggctagacccacccctc

SEQ ID NO: 4062545 - DNA, 25 bp, Homo sapien
agctcggtgtgaggctgacccctga

SEQ ID NO: 4062546 - DNA, 25 bp, Homo sapien
gaaggagttgtccaggctcagaaga

SEQ ID NO: 4062547 - DNA, 25 bp, Homo sapien
tagctgaccagttggtttagccggc

SEQ ID NO: 4062548 - DNA, 25 bp, Homo sapien
caaaggcacagcgttggaaccagag

SEQ ID NO: 4062549 - DNA, 25 bp, Homo sapien
actccaaaagagcatggtggtcccc

SEQ ID NO: 4062550 - DNA, 25 bp, Homo sapien
aggccccgcaggtccggcaggaaat

SEQ ID NO: 4062551 - DNA, 25 bp, Homo sapien
aggaaatgccgctcgcttaacccct

SEQ ID NO: 4062552 - DNA, 25 bp, Homo sapien
ccggcaggaaatgccgctcgcttaa

SEQ ID NO: 4062553 - DNA, 25 bp, Homo sapien
cgcaggtccggcaggaaatgccgct

SEQ ID NO: 4062554 - DNA, 25 bp, Homo sapien
cgggcctggggccccggctctcgcg

SEQ ID NO: 4062555 - DNA, 25 bp, Homo sapien
gcgggcctggggccccggctctcgc

SEQ ID NO: 4062556 - DNA, 25 bp, Homo sapien
gggccccggctctcgcgggggcgca

SEQ ID NO: 4062557 - DNA, 25 bp, Homo sapien
ccccggctctcgcgggggcgcacac

SEQ ID NO: 4062558 - DNA, 25 bp, Homo sapien
cctcggccacccagagccggtccag

SEQ ID NO: 4062559 - DNA, 25 bp, Homo sapien
cggccacccagagccggtccagccg

SEQ ID NO: 4062560 - DNA, 25 bp, Homo sapien
cgcctcggccacccagagccggtcc

SEQ ID NO: 4062561 - DNA, 25 bp, Homo sapien
ctcggccacccagagccggtccagc

SEQ ID NO: 4062562 - DNA, 25 bp, Homo sapien
gccgccgctctccatgcaaataagc

SEQ ID NO: 4062563 - DNA, 25 bp, Homo sapien
gcccggccgcgcgcgcccattggcc

SEQ ID NO: 4062564 - DNA, 25 bp, Homo sapien
ccgccgccgctctccatgcaaataa

SEQ ID NO: 4062565 - DNA, 25 bp, Homo sapien
gccgctctccatgcaaataagccgc

SEQ ID NO: 4062566 - DNA, 25 bp, Homo sapien
agaacgcaccgaaggcctacgcaaa

SEQ ID NO: 4062567 - DNA, 25 bp, Homo sapien
aggcttccagcctagggcgcaggac

SEQ ID NO: 4062568 - DNA, 25 bp, Homo sapien
aggacaccgctctccaacaaatgca

SEQ ID NO: 4062569 - DNA, 25 bp, Homo sapien
tacgcaaactcctccacttctggga

SEQ ID NO: 4062570 - DNA, 25 bp, Homo sapien
gagttgccccttgctcggttgcagg

SEQ ID NO: 4062571 - DNA, 25 bp, Homo sapien
gaaaccgagtggagacaaccttggc

SEQ ID NO: 4062572 - DNA, 25 bp, Homo sapien
ttgctcggttgcaggtcagtgactg

SEQ ID NO: 4062573 - DNA, 25 bp, Homo sapien
ttggctctcctgagttgccccttgc

SEQ ID NO: 4062574 - DNA, 25 bp, Homo sapien
gcaggtctgaaccagcgggaccctc

SEQ ID NO: 4062575 - DNA, 25 bp, Homo sapien
agcaggtctgaaccagcgggaccct

SEQ ID NO: 4062576 - DNA, 25 bp, Homo sapien
gagcaggtctgaaccagcgggaccc

SEQ ID NO: 4062577 - DNA, 25 bp, Homo sapien
tgccctgggaccaggacggaacgac

SEQ ID NO: 4062578 - DNA, 25 bp, Homo sapien
cactgctgccctgggaccaggacgg

SEQ ID NO: 4062579 - DNA, 25 bp, Homo sapien
ctgggaccaggacggaacgacggct

SEQ ID NO: 4062580 - DNA, 25 bp, Homo sapien
tgctgccctgggaccaggacggaac

SEQ ID NO: 4062581 - DNA, 25 bp, Homo sapien
agggccctcccagacaggtcctcct

SEQ ID NO: 4062582 - DNA, 25 bp, Homo sapien
cagcggcacccctgtgtgcagtgag

SEQ ID NO: 4062583 - DNA, 25 bp, Homo sapien
gtcctcctggaccagcggcacccct

SEQ ID NO: 4062584 - DNA, 25 bp, Homo sapien
gggccatgtgcactctgccccgctg

SEQ ID NO: 4062585 - DNA, 25 bp, Homo sapien
tgaatctgcgccctatggcagaggc

SEQ ID NO: 4062586 - DNA, 25 bp, Homo sapien
tcctgaatctgcgccctatggcaga

SEQ ID NO: 4062587 - DNA, 25 bp, Homo sapien
tcctcctgaatctgcgccctatggc

SEQ ID NO: 4062588 - DNA, 25 bp, Homo sapien
tctgcgccctatggcagaggcagcc

SEQ ID NO: 4062589 - DNA, 25 bp, Homo sapien
agatccacccgccaacactggaggc

SEQ ID NO: 4062590 - DNA, 25 bp, Homo sapien
cctgaaaccttgtctgagagactgg

SEQ ID NO: 4062591 - DNA, 25 bp, Homo sapien
aaaatctttccttggagttctgctg

SEQ ID NO: 4062592 - DNA, 25 bp, Homo sapien
gcaggcagggtctcctcttggactg

SEQ ID NO: 4062593 - DNA, 25 bp, Homo sapien
agaacaggcaaacttaagccagggt

SEQ ID NO: 4062594 - DNA, 25 bp, Homo sapien
caggcaaacttaagccagggtgata

SEQ ID NO: 4062595 - DNA, 25 bp, Homo sapien
cagaccccaaagtgcatctactgta

SEQ ID NO: 4062596 - DNA, 25 bp, Homo sapien
tctactgtaggcttccagttgcaga

SEQ ID NO: 4062597 - DNA, 25 bp, Homo sapien
taaacccaccatgctactctttttg

SEQ ID NO: 4062598 - DNA, 25 bp, Homo sapien
tctgcacatttcacgacatgtaaaa

SEQ ID NO: 4062599 - DNA, 25 bp, Homo sapien
ctcaataagagtttcgactggtaaa

SEQ ID NO: 4062600 - DNA, 25 bp, Homo sapien
tagatactgcaagcctaaacccacc

SEQ ID NO: 4062601 - DNA, 25 bp, Homo sapien
cagagcaagcatcccttccacactt

SEQ ID NO: 4062602 - DNA, 25 bp, Homo sapien
cacttctgccgaggtccccaacctg

SEQ ID NO: 4062603 - DNA, 25 bp, Homo sapien
cacacttctgccgaggtccccaacc

SEQ ID NO: 4062604 - DNA, 25 bp, Homo sapien
cttccacacttctgccgaggtcccc

SEQ ID NO: 4062605 - DNA, 25 bp, Homo sapien
cacggcctgcaatgccgcctcattc

SEQ ID NO: 4062606 - DNA, 25 bp, Homo sapien
gccagctggttgccccaatgcaggt

SEQ ID NO: 4062607 - DNA, 25 bp, Homo sapien
ctgcatagatgcgatggggccagct

SEQ ID NO: 4062608 - DNA, 25 bp, Homo sapien
tggttgccccaatgcaggtcactct

SEQ ID NO: 4062609 - DNA, 25 bp, Homo sapien
gacctgaccatccaaggctcaagag

SEQ ID NO: 4062610 - DNA, 25 bp, Homo sapien
agacaaggacctgaccatccaaggc

SEQ ID NO: 4062611 - DNA, 25 bp, Homo sapien
gtgaagacaaggacctgaccatcca

SEQ ID NO: 4062612 - DNA, 25 bp, Homo sapien
aaggacctgaccatccaaggctcaa

SEQ ID NO: 4062613 - DNA, 25 bp, Homo sapien
ctgcaggccatgcccgggcagggga

SEQ ID NO: 4062614 - DNA, 25 bp, Homo sapien
ccgggcaggggagaggccagggtca

SEQ ID NO: 4062615 - DNA, 25 bp, Homo sapien
cgggcaggggagaggccagggtcat

SEQ ID NO: 4062616 - DNA, 25 bp, Homo sapien
caggccatgcccgggcaggggagag

SEQ ID NO: 4062617 - DNA, 25 bp, Homo sapien
cactgaccataaagaaagggccaca

SEQ ID NO: 4062618 - DNA, 25 bp, Homo sapien
accaccaaggccttggcagaaacca

SEQ ID NO: 4062619 - DNA, 25 bp, Homo sapien
gcagaaaccacactgaccataaaga

SEQ ID NO: 4062620 - DNA, 25 bp, Homo sapien
accacactgaccataaagaaagggc

SEQ ID NO: 4062621 - DNA, 25 bp, Homo sapien
ggagagtggctgagatcccaggctc

SEQ ID NO: 4062622 - DNA, 25 bp, Homo sapien
tctgcacggggatacagccactggc

SEQ ID NO: 4062623 - DNA, 25 bp, Homo sapien
tccaggaacccctttcagcctcaag

SEQ ID NO: 4062624 - DNA, 25 bp, Homo sapien
tccacggtactcctggggccacata

SEQ ID NO: 4062625 - DNA, 25 bp, Homo sapien
aatgacctggtgaacgaggcagctg

SEQ ID NO: 4062626 - DNA, 25 bp, Homo sapien
tcctatggatgatggcgcagagctt

SEQ ID NO: 4062627 - DNA, 25 bp, Homo sapien
cgcagagcttgaggtgaatgggaat

SEQ ID NO: 4062628 - DNA, 25 bp, Homo sapien
acaatggcagacggcgccgggaagg

SEQ ID NO: 4062629 - DNA, 25 bp, Homo sapien
ctaaacatggactcccaagccaatg

SEQ ID NO: 4062630 - DNA, 25 bp, Homo sapien
cctaaacatggactcccaagccaat

SEQ ID NO: 4062631 - DNA, 25 bp, Homo sapien
cacccctaaacatggactcccaagc

SEQ ID NO: 4062632 - DNA, 25 bp, Homo sapien
cccctaaacatggactcccaagcca

SEQ ID NO: 4062633 - DNA, 25 bp, Homo sapien
gctgcgtcagcccatctaggaaaag

SEQ ID NO: 4062634 - DNA, 25 bp, Homo sapien
tatgctctgaaccagaacggatggc

SEQ ID NO: 4062635 - DNA, 25 bp, Homo sapien
ttaccacttctggaggcgagcagga

SEQ ID NO: 4062636 - DNA, 25 bp, Homo sapien
tataatttctgtgggccaaagtgcc

SEQ ID NO: 4062637 - DNA, 25 bp, Homo sapien
cctccgggtgaggagcagttccaga

SEQ ID NO: 4062638 - DNA, 25 bp, Homo sapien
tgaagaggccacttgccagaaagcc

SEQ ID NO: 4062639 - DNA, 25 bp, Homo sapien
cccactgcctgcttcacggaaagga

SEQ ID NO: 4062640 - DNA, 25 bp, Homo sapien
ctgcctgcttcacggaaaggatggg

SEQ ID NO: 4062641 - DNA, 25 bp, Homo sapien
ggttccgcagcgagaggaaaacttc

SEQ ID NO: 4062642 - DNA, 25 bp, Homo sapien
cacttgctgttctcaggaggtgaga

SEQ ID NO: 4062643 - DNA, 25 bp, Homo sapien
cagagatgccagtgcccaagtgtgg

SEQ ID NO: 4062644 - DNA, 25 bp, Homo sapien
cctaactaggcagggaaacgatggc

SEQ ID NO: 4062645 - DNA, 25 bp, Homo sapien
tccggctcctgagcgttcccggacg

SEQ ID NO: 4062646 - DNA, 25 bp, Homo sapien
ctcctccggctcctgagcgttcccg

SEQ ID NO: 4062647 - DNA, 25 bp, Homo sapien
gcgccgctcagaggccccgcgaggg

SEQ ID NO: 4062648 - DNA, 25 bp, Homo sapien
acgccggactgtccggccgctccag

SEQ ID NO: 4062649 - DNA, 25 bp, Homo sapien
ctttttctgtcggcccaacgcggcg

SEQ ID NO: 4062650 - DNA, 25 bp, Homo sapien
gccagggacgcgttaaaggtgagga

SEQ ID NO: 4062651 - DNA, 25 bp, Homo sapien
accagctctgggtcgcccaaccagt

SEQ ID NO: 4062652 - DNA, 25 bp, Homo sapien
caacactacactgccctgtggccct

SEQ ID NO: 4062653 - DNA, 25 bp, Homo sapien
tcacccactcaaaggaaggaccagg

SEQ ID NO: 4062654 - DNA, 25 bp, Homo sapien
tgagatccctcacccactcaaagga

SEQ ID NO: 4062655 - DNA, 25 bp, Homo sapien
caggcactgagatccctcacccact

SEQ ID NO: 4062656 - DNA, 25 bp, Homo sapien
gatccctcacccactcaaaggaagg

SEQ ID NO: 4062657 - DNA, 25 bp, Homo sapien
agggatgctgtgccaggaggccacg

SEQ ID NO: 4062658 - DNA, 25 bp, Homo sapien
tgcccatgtggggggcgggcccttc

SEQ ID NO: 4062659 - DNA, 25 bp, Homo sapien
ggaggccacggtggctggatggagg

SEQ ID NO: 4062660 - DNA, 25 bp, Homo sapien
ctagggaatctctgtgtgggtgccc

SEQ ID NO: 4062661 - DNA, 25 bp, Homo sapien
cccaaaagcccccagtagcaggtca

SEQ ID NO: 4062662 - DNA, 25 bp, Homo sapien
ccagctcccaaaagcccccagtagc

SEQ ID NO: 4062663 - DNA, 25 bp, Homo sapien
gctcccaaaagcccccagtagcagg

SEQ ID NO: 4062664 - DNA, 25 bp, Homo sapien
cagctcccaaaagcccccagtagca

SEQ ID NO: 4062665 - DNA, 25 bp, Homo sapien
tcttttctccaggagtgtcccggtg

SEQ ID NO: 4062666 - DNA, 25 bp, Homo sapien
agtgtcccggtgaggatcccaagag

SEQ ID NO: 4062667 - DNA, 25 bp, Homo sapien
ggaaatccaggcctcccacgagaga

SEQ ID NO: 4062668 - DNA, 25 bp, Homo sapien
ccttccctgctccagtagagtatgg

SEQ ID NO: 4062669 - DNA, 25 bp, Homo sapien
cagcaaggcattgttggaggggcca

SEQ ID NO: 4062670 - DNA, 25 bp, Homo sapien
cctcctcaaagggcgctctgtgcat

SEQ ID NO: 4062671 - DNA, 25 bp, Homo sapien
aactgtgcacatcagcgtccgcagc

SEQ ID NO: 4062672 - DNA, 25 bp, Homo sapien
ttcccaactgtgcacatcagcgtcc

SEQ ID NO: 4062673 - DNA, 25 bp, Homo sapien
tgcttattctctgtaccttggataa

SEQ ID NO: 4062674 - DNA, 25 bp, Homo sapien
ccttggataagtgcaatcatatatt

SEQ ID NO: 4062675 - DNA, 25 bp, Homo sapien
ggaaggcagtggtgtcatagcacac

SEQ ID NO: 4062676 - DNA, 25 bp, Homo sapien
aacctcaactccgatgagctcaagc

SEQ ID NO: 4062677 - DNA, 25 bp, Homo sapien
taggatgttcgcaaacacccagaga

SEQ ID NO: 4062678 - DNA, 25 bp, Homo sapien
tgaacccagagatgaaactgcccgc

SEQ ID NO: 4062679 - DNA, 25 bp, Homo sapien
ccagggcattgtgtttctgaaccca

SEQ ID NO: 4062680 - DNA, 25 bp, Homo sapien
tgttacccgagagtgagaccgatcc

SEQ ID NO: 4062681 - DNA, 25 bp, Homo sapien
gtcgccattgacctccagtggcagg

SEQ ID NO: 4062682 - DNA, 25 bp, Homo sapien
tcctgtcgccattgacctccagtgg

SEQ ID NO: 4062683 - DNA, 25 bp, Homo sapien
ctgtcgccattgacctccagtggca

SEQ ID NO: 4062684 - DNA, 25 bp, Homo sapien
tgtcgccattgacctccagtggcag

SEQ ID NO: 4062685 - DNA, 25 bp, Homo sapien
tcctgaagcaatggagcgatgctca

SEQ ID NO: 4062686 - DNA, 25 bp, Homo sapien
cctgaagcaatggagcgatgctcac

SEQ ID NO: 4062687 - DNA, 25 bp, Homo sapien
ctcctgaagcaatggagcgatgctc

SEQ ID NO: 4062688 - DNA, 25 bp, Homo sapien
tcctgatccgtctgggaaacatctc

SEQ ID NO: 4062689 - DNA, 25 bp, Homo sapien
aagtcaggataaagcccggatatgc

SEQ ID NO: 4062690 - DNA, 25 bp, Homo sapien
gaccgactccgacagagtagccgga

SEQ ID NO: 4062691 - DNA, 25 bp, Homo sapien
tatgcggagatcgactccgaccgac

SEQ ID NO: 4062692 - DNA, 25 bp, Homo sapien
tcacagccatgttttgggaggaggc

SEQ ID NO: 4062693 - DNA, 25 bp, Homo sapien
tctaacaagtcgaggcctgtgcagc

SEQ ID NO: 4062694 - DNA, 25 bp, Homo sapien
caggacaccgggcagtttgaagaca

SEQ ID NO: 4062695 - DNA, 25 bp, Homo sapien
agtttcgcatcgtcagctggcaggg

SEQ ID NO: 4062696 - DNA, 25 bp, Homo sapien
tcctctgagcatgaggtaggaagag

SEQ ID NO: 4062697 - DNA, 25 bp, Homo sapien
gacaggtagcaatgctggctgagaa

SEQ ID NO: 4062698 - DNA, 25 bp, Homo sapien
gaggatgggacaggtagcaatgctg

SEQ ID NO: 4062699 - DNA, 25 bp, Homo sapien
cactgagaaaggctaggcatttgct

SEQ ID NO: 4062700 - DNA, 25 bp, Homo sapien
tgggtcactggctggtgccaaaggc

SEQ ID NO: 4062701 - DNA, 25 bp, Homo sapien
gcctgggtcactggctggtgccaaa

SEQ ID NO: 4062702 - DNA, 25 bp, Homo sapien
actggctggtgccaaaggcctgctc

SEQ ID NO: 4062703 - DNA, 25 bp, Homo sapien
ttggtcctctgcctgggtcactggc

SEQ ID NO: 4062704 - DNA, 25 bp, Homo sapien
cacccaggttggtcagctatcttca

SEQ ID NO: 4062705 - DNA, 25 bp, Homo sapien
tctgccagcctggacagacctggaa

SEQ ID NO: 4062706 - DNA, 25 bp, Homo sapien
gatcagaagagaagcccgagtggaa

SEQ ID NO: 4062707 - DNA, 25 bp, Homo sapien
tattttcagccttacatgccatcag

SEQ ID NO: 4062708 - DNA, 25 bp, Homo sapien
gattaagatacatagacagaacttc

SEQ ID NO: 4062709 - DNA, 25 bp, Homo sapien
cacagacgcacaaaaagctcacatt

SEQ ID NO: 4062710 - DNA, 25 bp, Homo sapien
gctgctcttgatttagcccgtaaca

SEQ ID NO: 4062711 - DNA, 25 bp, Homo sapien
tgtaaacaggattaagctgctcttg

SEQ ID NO: 4062712 - DNA, 25 bp, Homo sapien
tttgctcagcctgagatctcgctca

SEQ ID NO: 4062713 - DNA, 25 bp, Homo sapien
tgcctgtgatccactcggtcaagga

SEQ ID NO: 4062714 - DNA, 25 bp, Homo sapien
caaggaaggctttccgttcaatgta

SEQ ID NO: 4062715 - DNA, 25 bp, Homo sapien
cagcctgagatctcgctcaatttca

SEQ ID NO: 4062716 - DNA, 25 bp, Homo sapien
tgtttgtcagtagaatccagtagga

SEQ ID NO: 4062717 - DNA, 25 bp, Homo sapien
taaactaagttacagtaaatggtgc

SEQ ID NO: 4062718 - DNA, 25 bp, Homo sapien
aatggtgccgagagtgaccacccat

SEQ ID NO: 4062719 - DNA, 25 bp, Homo sapien
tacagtaaatggtgccgagagtgac

SEQ ID NO: 4062720 - DNA, 25 bp, Homo sapien
tctaacaagactttaagggcagaag

SEQ ID NO: 4062721 - DNA, 25 bp, Homo sapien
accggtttacacaagcatgggttca

SEQ ID NO: 4062722 - DNA, 25 bp, Homo sapien
ggaaggcaacagcttatcaatgaga

SEQ ID NO: 4062723 - DNA, 25 bp, Homo sapien
gctcactgattagctgggcaaagga

SEQ ID NO: 4062724 - DNA, 25 bp, Homo sapien
ctgggcggaggagatctctgctgct

SEQ ID NO: 4062725 - DNA, 25 bp, Homo sapien
gaggagatctctgctgctaattaat

SEQ ID NO: 4062726 - DNA, 25 bp, Homo sapien
ggcggaggagatctctgctgctaat

SEQ ID NO: 4062727 - DNA, 25 bp, Homo sapien
gctgcgatttgcctgggcggaggag

SEQ ID NO: 4062728 - DNA, 25 bp, Homo sapien
cagaggcacgttcactacaactggt

SEQ ID NO: 4062729 - DNA, 25 bp, Homo sapien
cccactaagagacccgtgattcttg

SEQ ID NO: 4062730 - DNA, 25 bp, Homo sapien
acctcccactaagagacccgtgatt

SEQ ID NO: 4062731 - DNA, 25 bp, Homo sapien
gggctgctaaccaaaatggtctcag

SEQ ID NO: 4062732 - DNA, 25 bp, Homo sapien
caaatgactgtctccggtacaggca

SEQ ID NO: 4062733 - DNA, 25 bp, Homo sapien
taatgggttacaggactgcagggct

SEQ ID NO: 4062734 - DNA, 25 bp, Homo sapien
gaaatgactcctggatggaaacatc

SEQ ID NO: 4062735 - DNA, 25 bp, Homo sapien
gatcctggaatgctgtactgggccc

SEQ ID NO: 4062736 - DNA, 25 bp, Homo sapien
aaagatgcagatatttgtgacctac

SEQ ID NO: 4062737 - DNA, 25 bp, Homo sapien
aacctgtggtctagtgattctcaac

SEQ ID NO: 4062738 - DNA, 25 bp, Homo sapien
cactgtacctgtcttatgcctctag

SEQ ID NO: 4062739 - DNA, 25 bp, Homo sapien
tgcctctagaattttgaacctgtgg

SEQ ID NO: 4062740 - DNA, 25 bp, Homo sapien
tgttctagactcttgattcagcagc

SEQ ID NO: 4062741 - DNA, 25 bp, Homo sapien
tgtcaccagaggattctcatgctca

SEQ ID NO: 4062742 - DNA, 25 bp, Homo sapien
gtgaagaacagagctccagtccctt

SEQ ID NO: 4062743 - DNA, 25 bp, Homo sapien
ggtcacctgaactttggaaaatgtc

SEQ ID NO: 4062744 - DNA, 25 bp, Homo sapien
cctgaaaagttctcactaggcagat

SEQ ID NO: 4062745 - DNA, 25 bp, Homo sapien
gcacagagccagtagatctgcactg

SEQ ID NO: 4062746 - DNA, 25 bp, Homo sapien
ggaaacatgcagtcacatctgtgga

SEQ ID NO: 4062747 - DNA, 25 bp, Homo sapien
gaaaagcagagcataaaggaggatg

SEQ ID NO: 4062748 - DNA, 25 bp, Homo sapien
cacacgctgatagttcctctgctgt

SEQ ID NO: 4062749 - DNA, 25 bp, Homo sapien
gaagcaataatgtgtagcacacgct

SEQ ID NO: 4062750 - DNA, 25 bp, Homo sapien
taagacctctattaactcaagcaga

SEQ ID NO: 4062751 - DNA, 25 bp, Homo sapien
caactcatataatcaatattcagag

SEQ ID NO: 4062752 - DNA, 25 bp, Homo sapien
ccctcgattatggatggccagttct

SEQ ID NO: 4062753 - DNA, 25 bp, Homo sapien
tttggacttctcaagggtgctcatt

SEQ ID NO: 4062754 - DNA, 25 bp, Homo sapien
aaaaggctgctcatgccacttgatc

SEQ ID NO: 4062755 - DNA, 25 bp, Homo sapien
tcccagtccagtttggacttctcaa

SEQ ID NO: 4062756 - DNA, 25 bp, Homo sapien
gatgcaaatgggaatcccctagatt

SEQ ID NO: 4062757 - DNA, 25 bp, Homo sapien
tctcctgagctacgaacaggaaatc

SEQ ID NO: 4062758 - DNA, 25 bp, Homo sapien
taagtaaactggaattctaatgtgc

SEQ ID NO: 4062759 - DNA, 25 bp, Homo sapien
ctggtgtggagagcactgtaagtaa

SEQ ID NO: 4062760 - DNA, 25 bp, Homo sapien
cgaaagctcacacggggaatgtaca

SEQ ID NO: 4062761 - DNA, 25 bp, Homo sapien
tccgaaagctcacacggggaatgta

SEQ ID NO: 4062762 - DNA, 25 bp, Homo sapien
aaagctcacacggggaatgtacagc

SEQ ID NO: 4062763 - DNA, 25 bp, Homo sapien
agctcacacggggaatgtacagcct

SEQ ID NO: 4062764 - DNA, 25 bp, Homo sapien
ccgcaaagcagcgtgaacgactact

SEQ ID NO: 4062765 - DNA, 25 bp, Homo sapien
tgccgcaaagcagcgtgaacgacta

SEQ ID NO: 4062766 - DNA, 25 bp, Homo sapien
ccctgccgcaaagcagcgtgaacga

SEQ ID NO: 4062767 - DNA, 25 bp, Homo sapien
caaagcagcgtgaacgactactcac

SEQ ID NO: 4062768 - DNA, 25 bp, Homo sapien
tgtttgggtcacaccccagtacatg

SEQ ID NO: 4062769 - DNA, 25 bp, Homo sapien
tccacactgaacaccagactgctgg

SEQ ID NO: 4062770 - DNA, 25 bp, Homo sapien
ggactgaacaatgaccctgaacatt

SEQ ID NO: 4062771 - DNA, 25 bp, Homo sapien
gagaggatgtcaacttccctgtttg

SEQ ID NO: 4062772 - DNA, 25 bp, Homo sapien
cagttcttttcatatgggaacactg

SEQ ID NO: 4062773 - DNA, 25 bp, Homo sapien
cttttctttagatgcttgtgaactc

SEQ ID NO: 4062774 - DNA, 25 bp, Homo sapien
atcttttctttagatgcttgtgaac

SEQ ID NO: 4062775 - DNA, 25 bp, Homo sapien
cttttcatatgggaacactgatctt

SEQ ID NO: 4062776 - DNA, 25 bp, Homo sapien
cacaagtactgcctggacaggtggt

SEQ ID NO: 4062777 - DNA, 25 bp, Homo sapien
tgcctgcatgccacaagtactgcct

SEQ ID NO: 4062778 - DNA, 25 bp, Homo sapien
tctgagcctgcctgcatgccacaag

SEQ ID NO: 4062779 - DNA, 25 bp, Homo sapien
gacaggtggtggagctcaagccatt

SEQ ID NO: 4062780 - DNA, 25 bp, Homo sapien
gcagggggcgctgaccctattctga

SEQ ID NO: 4062781 - DNA, 25 bp, Homo sapien
acaaaggtacatgaaccaggctttc

SEQ ID NO: 4062782 - DNA, 25 bp, Homo sapien
tgaccctattctgagaaagaacaca

SEQ ID NO: 4062783 - DNA, 25 bp, Homo sapien
aggtacatgaaccaggctttcagga

SEQ ID NO: 4062784 - DNA, 25 bp, Homo sapien
ctccgagaactatggctagcagggg

SEQ ID NO: 4062785 - DNA, 25 bp, Homo sapien
cgagaactatggctagcaggggaca

SEQ ID NO: 4062786 - DNA, 25 bp, Homo sapien
tccgagaactatggctagcagggga

SEQ ID NO: 4062787 - DNA, 25 bp, Homo sapien
gggacaaatcagcactggctctcca

SEQ ID NO: 4062788 - DNA, 25 bp, Homo sapien
ttacatcccaaatgttacgctgagg

SEQ ID NO: 4062789 - DNA, 25 bp, Homo sapien
cagattacatcccaaatgttacgct

SEQ ID NO: 4062790 - DNA, 25 bp, Homo sapien
tacatcccaaatgttacgctgaggc

SEQ ID NO: 4062791 - DNA, 25 bp, Homo sapien
gattacatcccaaatgttacgctga

SEQ ID NO: 4062792 - DNA, 25 bp, Homo sapien
tgtgaaggatggtagaagatctttc

SEQ ID NO: 4062793 - DNA, 25 bp, Homo sapien
ctttcccggagatctttaaaatcat

SEQ ID NO: 4062794 - DNA, 25 bp, Homo sapien
ggtagaagatctttcccggagatct

SEQ ID NO: 4062795 - DNA, 25 bp, Homo sapien
aaggatggtagaagatctttcccgg

SEQ ID NO: 4062796 - DNA, 25 bp, Homo sapien
ccactgatggcatattagggagcta

SEQ ID NO: 4062797 - DNA, 25 bp, Homo sapien
aaagtacaactcaaatccctgggca

SEQ ID NO: 4062798 - DNA, 25 bp, Homo sapien
tgggcaaatttcactactcacctgt

SEQ ID NO: 4062799 - DNA, 25 bp, Homo sapien
tagacccctcaaggaaatggactgg

SEQ ID NO: 4062800 - DNA, 25 bp, Homo sapien
tttcgaggctaagtcatctttggca

SEQ ID NO: 4062801 - DNA, 25 bp, Homo sapien
gatggcatatgggagtcttctagca

SEQ ID NO: 4062802 - DNA, 25 bp, Homo sapien
ggcctgctctttggaattgtctgat

SEQ ID NO: 4062803 - DNA, 25 bp, Homo sapien
ttcaagccaagaaacgttggtctcc

SEQ ID NO: 4062804 - DNA, 25 bp, Homo sapien
ctcagtctctggaatagctaggatt

SEQ ID NO: 4062805 - DNA, 25 bp, Homo sapien
acagggccctgccaccatgcccggc

SEQ ID NO: 4062806 - DNA, 25 bp, Homo sapien
agtacagtggcgcgatcccagctca

SEQ ID NO: 4062807 - DNA, 25 bp, Homo sapien
gcctcagtctctggaatagctagga

SEQ ID NO: 4062808 - DNA, 25 bp, Homo sapien
tcttaatgacatctttcgatgggca

SEQ ID NO: 4062809 - DNA, 25 bp, Homo sapien
cttaatgacatctttcgatgggcag

SEQ ID NO: 4062810 - DNA, 25 bp, Homo sapien
ttcttaatgacatctttcgatgggc

SEQ ID NO: 4062811 - DNA, 25 bp, Homo sapien
aagccatcagctggaggcagcgcag

SEQ ID NO: 4062812 - DNA, 25 bp, Homo sapien
cagaagccatcagctggaggcagcg

SEQ ID NO: 4062813 - DNA, 25 bp, Homo sapien
agcagaagccatcagctggaggcag

SEQ ID NO: 4062814 - DNA, 25 bp, Homo sapien
gagctaagcagaagccatcagctgg

SEQ ID NO: 4062815 - DNA, 25 bp, Homo sapien
catacccaatgaaactgctgcaact

SEQ ID NO: 4062816 - DNA, 25 bp, Homo sapien
gaccaacgacttcagcacttgggag

SEQ ID NO: 4062817 - DNA, 25 bp, Homo sapien
cacttattcacacggcattctctca

SEQ ID NO: 4062818 - DNA, 25 bp, Homo sapien
cagatgatccaaacctggcctcaat

SEQ ID NO: 4062819 - DNA, 25 bp, Homo sapien
ggaccgcaatgctcctacgatgatc

SEQ ID NO: 4062820 - DNA, 25 bp, Homo sapien
tccaggaccgcaatgctcctacgat

SEQ ID NO: 4062821 - DNA, 25 bp, Homo sapien
tttccaggaccgcaatgctcctacg

SEQ ID NO: 4062822 - DNA, 25 bp, Homo sapien
caggaccgcaatgctcctacgatga

SEQ ID NO: 4062823 - DNA, 25 bp, Homo sapien
ctgctgcatggaggatggcagtctc

SEQ ID NO: 4062824 - DNA, 25 bp, Homo sapien
tggaggatggcagtctccctggtaa

SEQ ID NO: 4062825 - DNA, 25 bp, Homo sapien
tccctggtaaggcactctgagctcc

SEQ ID NO: 4062826 - DNA, 25 bp, Homo sapien
tctccctggtaaggcactctgagct

SEQ ID NO: 4062827 - DNA, 25 bp, Homo sapien
taatttgcacatcataagatacagc

SEQ ID NO: 4062828 - DNA, 25 bp, Homo sapien
ttgtgcacatctattgtcaaagtta

SEQ ID NO: 4062829 - DNA, 25 bp, Homo sapien
ttaagtgaatcatgtctgtgttgcc

SEQ ID NO: 4062830 - DNA, 25 bp, Homo sapien
actgcagtaattatttactgcaagc

SEQ ID NO: 4062831 - DNA, 25 bp, Homo sapien
tagaggtcactgtagggttactaac

SEQ ID NO: 4062832 - DNA, 25 bp, Homo sapien
aaggattactgattgcacaccgcca

SEQ ID NO: 4062833 - DNA, 25 bp, Homo sapien
cacgggtagatatgctcaactcaaa

SEQ ID NO: 4062834 - DNA, 25 bp, Homo sapien
tgccatcagatgaggcatgcctaca

SEQ ID NO: 4062835 - DNA, 25 bp, Homo sapien
cctattctgctacggcatgagctga

SEQ ID NO: 4062836 - DNA, 25 bp, Homo sapien
taataagtcagacgggacagtcctg

SEQ ID NO: 4062837 - DNA, 25 bp, Homo sapien
catgtctgccctacaggcttcaagg

SEQ ID NO: 4062838 - DNA, 25 bp, Homo sapien
catgagctgaaagcgtggcctcagg

SEQ ID NO: 4062839 - DNA, 25 bp, Homo sapien
atggctgcagcagaagttccagctg

SEQ ID NO: 4062840 - DNA, 25 bp, Homo sapien
tgaaatccagatacttgtcttctga

SEQ ID NO: 4062841 - DNA, 25 bp, Homo sapien
tatggcagtggcagatcttatggca

SEQ ID NO: 4062842 - DNA, 25 bp, Homo sapien
ggctctgaaatccagatacttgtct

SEQ ID NO: 4062843 - DNA, 25 bp, Homo sapien
tttttaaggagtctgatacttacac

SEQ ID NO: 4062844 - DNA, 25 bp, Homo sapien
cattgtgggtatcagtactttcctt

SEQ ID NO: 4062845 - DNA, 25 bp, Homo sapien
aggagtctgatacttacacattttc

SEQ ID NO: 4062846 - DNA, 25 bp, Homo sapien
ttttcattgtgggtatcagtacttt

SEQ ID NO: 4062847 - DNA, 25 bp, Homo sapien
gaccagattattctctagtgctcag

SEQ ID NO: 4062848 - DNA, 25 bp, Homo sapien
tcaacagcaggttaaggaaccagag

SEQ ID NO: 4062849 - DNA, 25 bp, Homo sapien
tatgtgtccacacttgtttcttctg

SEQ ID NO: 4062850 - DNA, 25 bp, Homo sapien
gcaatttgcaaatctgtctaccaga

SEQ ID NO: 4062851 - DNA, 25 bp, Homo sapien
tgggaaattcctgttctgctaattc

SEQ ID NO: 4062852 - DNA, 25 bp, Homo sapien
aaattcctgttctgctaattcaggc

SEQ ID NO: 4062853 - DNA, 25 bp, Homo sapien
agttgggaaattcctgttctgctaa

SEQ ID NO: 4062854 - DNA, 25 bp, Homo sapien
ttgtagttgggaaattcctgttctg

SEQ ID NO: 4062855 - DNA, 25 bp, Homo sapien
gtgctgaccagcctcaataaaatgt

SEQ ID NO: 4062856 - DNA, 25 bp, Homo sapien
gacagagaactaagaatccccaaat

SEQ ID NO: 4062857 - DNA, 25 bp, Homo sapien
catgaataactcaacaatgggcagc

SEQ ID NO: 4062858 - DNA, 25 bp, Homo sapien
cacaatttcaagactctggccagga

SEQ ID NO: 4062859 - DNA, 25 bp, Homo sapien
tattctagctgtacctcaatccagg

SEQ ID NO: 4062860 - DNA, 25 bp, Homo sapien
agtgagttattctagctgtacctca

SEQ ID NO: 4062861 - DNA, 25 bp, Homo sapien
tagctgtacctcaatccagggttta

SEQ ID NO: 4062862 - DNA, 25 bp, Homo sapien
acagaaaacctaagtgagttattct

SEQ ID NO: 4062863 - DNA, 25 bp, Homo sapien
atcttggatagtggctatgaagtag

SEQ ID NO: 4062864 - DNA, 25 bp, Homo sapien
cttatcttggatagtggctatgaag

SEQ ID NO: 4062865 - DNA, 25 bp, Homo sapien
ggctatgaagtagtaggcaggacag

SEQ ID NO: 4062866 - DNA, 25 bp, Homo sapien
ctatgaagtagtaggcaggacagga

SEQ ID NO: 4062867 - DNA, 25 bp, Homo sapien
aattagacaggcgtgcaggtactca

SEQ ID NO: 4062868 - DNA, 25 bp, Homo sapien
ttagacaggcgtgcaggtactcatt

SEQ ID NO: 4062869 - DNA, 25 bp, Homo sapien
tgcaggtactcatttgtagtcccag

SEQ ID NO: 4062870 - DNA, 25 bp, Homo sapien
cgtgcaggtactcatttgtagtccc

SEQ ID NO: 4062871 - DNA, 25 bp, Homo sapien
ccttaatttattcattccgtaacat

SEQ ID NO: 4062872 - DNA, 25 bp, Homo sapien
tttattcattccgtaacatttgaca

SEQ ID NO: 4062873 - DNA, 25 bp, Homo sapien
ttattcattccgtaacatttgacaa

SEQ ID NO: 4062874 - DNA, 25 bp, Homo sapien
tattcattccgtaacatttgacaaa

SEQ ID NO: 4062875 - DNA, 25 bp, Homo sapien
tgttcatcaataagagaaggtgcac

SEQ ID NO: 4062876 - DNA, 25 bp, Homo sapien
tactacaatgatcgtggagaaatgc

SEQ ID NO: 4062877 - DNA, 25 bp, Homo sapien
ggaaactggtcttctcacataatac

SEQ ID NO: 4062878 - DNA, 25 bp, Homo sapien
aagatgcacatacccaatgacccag

SEQ ID NO: 4062879 - DNA, 25 bp, Homo sapien
gacaatttggcacaaccaagggtat

SEQ ID NO: 4062880 - DNA, 25 bp, Homo sapien
catttttcacaccaggacaatttgg

SEQ ID NO: 4062881 - DNA, 25 bp, Homo sapien
tactaagtaaactgtatgactacca

SEQ ID NO: 4062882 - DNA, 25 bp, Homo sapien
cttcattcctagagtatcataatca

SEQ ID NO: 4062883 - DNA, 25 bp, Homo sapien
aagaggcagctaaacagtaggccct

SEQ ID NO: 4062884 - DNA, 25 bp, Homo sapien
aaacaagtcaatgcgtaagggtagg

SEQ ID NO: 4062885 - DNA, 25 bp, Homo sapien
aatggtggcccgctgttggaataaa

SEQ ID NO: 4062886 - DNA, 25 bp, Homo sapien
cattctcaatctataaagaggcagc

SEQ ID NO: 4062887 - DNA, 25 bp, Homo sapien
gatcaagagcatggaatgacaagac

SEQ ID NO: 4062888 - DNA, 25 bp, Homo sapien
cattaagctttgtactttactacca

SEQ ID NO: 4062889 - DNA, 25 bp, Homo sapien
agtgagggaagaggcggatcaagag

SEQ ID NO: 4062890 - DNA, 25 bp, Homo sapien
ggaatgacaagaccatgagaattta

SEQ ID NO: 4062891 - DNA, 25 bp, Homo sapien
tcctgctctggttttcctgtattgc

SEQ ID NO: 4062892 - DNA, 25 bp, Homo sapien
tctcctgctctggttttcctgtatt

SEQ ID NO: 4062893 - DNA, 25 bp, Homo sapien
ttactctcctgctctggttttcctg

SEQ ID NO: 4062894 - DNA, 25 bp, Homo sapien
tctggttttcctgtattgcttaaat

SEQ ID NO: 4062895 - DNA, 25 bp, Homo sapien
gacttttactcaggcacttggcaga

SEQ ID NO: 4062896 - DNA, 25 bp, Homo sapien
taagtcagtgtagagagaatcccct

SEQ ID NO: 4062897 - DNA, 25 bp, Homo sapien
tatagctcccaaggtagctcctggt

SEQ ID NO: 4062898 - DNA, 25 bp, Homo sapien
tgaggacagcctgatgaagactctc

SEQ ID NO: 4062899 - DNA, 25 bp, Homo sapien
tccccagagatagtcttgagaccca

SEQ ID NO: 4062900 - DNA, 25 bp, Homo sapien
cagggaggccacaccaatatttgta

SEQ ID NO: 4062901 - DNA, 25 bp, Homo sapien
caatggagtaccctaagaggctgca

SEQ ID NO: 4062902 - DNA, 25 bp, Homo sapien
gagtctcattattaccagccccagg

SEQ ID NO: 4062903 - DNA, 25 bp, Homo sapien
ggcaactcttaatcacctgctgaag

SEQ ID NO: 4062904 - DNA, 25 bp, Homo sapien
taattccatacgttgtctagagcag

SEQ ID NO: 4062905 - DNA, 25 bp, Homo sapien
tcaggttgcagttgattgtgaaatc

SEQ ID NO: 4062906 - DNA, 25 bp, Homo sapien
tcaattcagcaggtcataacagttt

SEQ ID NO: 4062907 - DNA, 25 bp, Homo sapien
ttctctctctcaggcaaggagtctg

SEQ ID NO: 4062908 - DNA, 25 bp, Homo sapien
gagtctgatctgcagcgaaagtagg

SEQ ID NO: 4062909 - DNA, 25 bp, Homo sapien
gaaagtaggtatttgcactgaaagc

SEQ ID NO: 4062910 - DNA, 25 bp, Homo sapien
ccaacgtgccaagtacatcagggag

SEQ ID NO: 4062911 - DNA, 25 bp, Homo sapien
ctgcttgaagaaggatttggcctct

SEQ ID NO: 4062912 - DNA, 25 bp, Homo sapien
ctctttagatgtagcatccacttcc

SEQ ID NO: 4062913 - DNA, 25 bp, Homo sapien
tgacccggcagggagtgatggcaga

SEQ ID NO: 4062914 - DNA, 25 bp, Homo sapien
ggatttggcctctttagatgtagca

SEQ ID NO: 4062915 - DNA, 25 bp, Homo sapien
atcaaacaccttggtgattttaact

SEQ ID NO: 4062916 - DNA, 25 bp, Homo sapien
accaacaatttacttgaacttgtct

SEQ ID NO: 4062917 - DNA, 25 bp, Homo sapien
gctcttctgcttttaccaacaattt

SEQ ID NO: 4062918 - DNA, 25 bp, Homo sapien
tagctcttctgcttttaccaacaat

SEQ ID NO: 4062919 - DNA, 25 bp, Homo sapien
tcctgctctgcagcgtcatcttcct

SEQ ID NO: 4062920 - DNA, 25 bp, Homo sapien
aagctggcccagagttcgtcctcct

SEQ ID NO: 4062921 - DNA, 25 bp, Homo sapien
tcactactgcttccctcagattctg

SEQ ID NO: 4062922 - DNA, 25 bp, Homo sapien
gattttggtcccacatcattgagga

SEQ ID NO: 4062923 - DNA, 25 bp, Homo sapien
tggctggaatgctctgggcctttct

SEQ ID NO: 4062924 - DNA, 25 bp, Homo sapien
cccttgggttttctgtgtctgctct

SEQ ID NO: 4062925 - DNA, 25 bp, Homo sapien
tacatcatcttcactatactctcca

SEQ ID NO: 4062926 - DNA, 25 bp, Homo sapien
tcatcttccttcactaattcattta

SEQ ID NO: 4062927 - DNA, 25 bp, Homo sapien
aaaggatacaagatccagcctgaaa

SEQ ID NO: 4062928 - DNA, 25 bp, Homo sapien
tcaaattaaaaggatacaagatcca

SEQ ID NO: 4062929 - DNA, 25 bp, Homo sapien
aagcaggacgccgactcataaaaaa

SEQ ID NO: 4062930 - DNA, 25 bp, Homo sapien
aggctacagtaagcaggacgccgac

SEQ ID NO: 4062931 - DNA, 25 bp, Homo sapien
attcaaggtctcataagaatgttcc

SEQ ID NO: 4062932 - DNA, 25 bp, Homo sapien
gcatggttacttttaggcattcaag

SEQ ID NO: 4062933 - DNA, 25 bp, Homo sapien
taggcattcaaggtctcataagaat

SEQ ID NO: 4062934 - DNA, 25 bp, Homo sapien
tacttttaggcattcaaggtctcat

SEQ ID NO: 4062935 - DNA, 25 bp, Homo sapien
cgacttctgaagcagcggtgtcgtt

SEQ ID NO: 4062936 - DNA, 25 bp, Homo sapien
aaacctccaaggctcggactgccgc

SEQ ID NO: 4062937 - DNA, 25 bp, Homo sapien
aaggctcggactgccgccccgactt

SEQ ID NO: 4062938 - DNA, 25 bp, Homo sapien
acttctgaagcagcggtgtcgttcg

SEQ ID NO: 4062939 - DNA, 25 bp, Homo sapien
ggccgtgtccatgtgccggttcccg

SEQ ID NO: 4062940 - DNA, 25 bp, Homo sapien
gccggagctgcccaacgggagggga

SEQ ID NO: 4062941 - DNA, 25 bp, Homo sapien
cgacgagcgtccctagcgacaaggg

SEQ ID NO: 4062942 - DNA, 25 bp, Homo sapien
acagaaccgccacgcgcacacgcct

SEQ ID NO: 4062943 - DNA, 25 bp, Homo sapien
gggagcggacgctcgagaacaggag

SEQ ID NO: 4062944 - DNA, 25 bp, Homo sapien
agcggacgctcgagaacaggagccc

SEQ ID NO: 4062945 - DNA, 25 bp, Homo sapien
gcggacgctcgagaacaggagcccc

SEQ ID NO: 4062946 - DNA, 25 bp, Homo sapien
ctgagggagcggacgctcgagaaca

SEQ ID NO: 4062947 - DNA, 25 bp, Homo sapien
cgtcctcctccgacgtagagaagtc

SEQ ID NO: 4062948 - DNA, 25 bp, Homo sapien
aagtcttcggagtcgaattcctcca

SEQ ID NO: 4062949 - DNA, 25 bp, Homo sapien
tcctccgacgtagagaagtcttcgg

SEQ ID NO: 4062950 - DNA, 25 bp, Homo sapien
gacgtagagaagtcttcggagtcga

SEQ ID NO: 4062951 - DNA, 25 bp, Homo sapien
acgctggtcaaactcacaagaccgc

SEQ ID NO: 4062952 - DNA, 25 bp, Homo sapien
gtcaaactcacaagaccgcagcagc

SEQ ID NO: 4062953 - DNA, 25 bp, Homo sapien
gcagcagccgcctccaacggcaaag

SEQ ID NO: 4062954 - DNA, 25 bp, Homo sapien
tggtcaaactcacaagaccgcagca

SEQ ID NO: 4062955 - DNA, 25 bp, Homo sapien
tttgcacatgcgcagagagtactac

SEQ ID NO: 4062956 - DNA, 25 bp, Homo sapien
cgctttgcacatgcgcagagagtac

SEQ ID NO: 4062957 - DNA, 25 bp, Homo sapien
cagcgctttgcacatgcgcagagag

SEQ ID NO: 4062958 - DNA, 25 bp, Homo sapien
gacagcgctttgcacatgcgcagag

SEQ ID NO: 4062959 - DNA, 25 bp, Homo sapien
ccgaacccgcccggacgcggtgcat

SEQ ID NO: 4062960 - DNA, 25 bp, Homo sapien
acttccggccgatgcctccgggctg

SEQ ID NO: 4062961 - DNA, 25 bp, Homo sapien
gtggttgccctacgacacttccggc

SEQ ID NO: 4062962 - DNA, 25 bp, Homo sapien
tgcctccgggctggcgtccctgaag

SEQ ID NO: 4062963 - DNA, 25 bp, Homo sapien
tattgtgcgccaatgccaagagcga

SEQ ID NO: 4062964 - DNA, 25 bp, Homo sapien
ctccggatagtgctgaagtgacctc

SEQ ID NO: 4062965 - DNA, 25 bp, Homo sapien
tgatgtgccttacggagaaagtccg

SEQ ID NO: 4062966 - DNA, 25 bp, Homo sapien
tgttcctaagcgaaagaagaccgtg

SEQ ID NO: 4062967 - DNA, 25 bp, Homo sapien
tcctaagtgggattgcgtgatcata

SEQ ID NO: 4062968 - DNA, 25 bp, Homo sapien
ttaggtatatcctaagtgggattgc

SEQ ID NO: 4062969 - DNA, 25 bp, Homo sapien
ttctcttaggtatatcctaagtggg

SEQ ID NO: 4062970 - DNA, 25 bp, Homo sapien
gggattgcgtgatcatataataact

SEQ ID NO: 4062971 - DNA, 25 bp, Homo sapien
ctgttgctcacgctgtagtagtgcc

SEQ ID NO: 4062972 - DNA, 25 bp, Homo sapien
ttgctcacgctgtagtagtgccatc

SEQ ID NO: 4062973 - DNA, 25 bp, Homo sapien
tctcactgttgctcacgctgtagta

SEQ ID NO: 4062974 - DNA, 25 bp, Homo sapien
ttgttttgaaatgggttctcactgt

SEQ ID NO: 4062975 - DNA, 25 bp, Homo sapien
gattaaactcattagccaccaaaaa

SEQ ID NO: 4062976 - DNA, 25 bp, Homo sapien
tttaatcacaactttgaacaagaat

SEQ ID NO: 4062977 - DNA, 25 bp, Homo sapien
aagttacacatgctagatattaagt

SEQ ID NO: 4062978 - DNA, 25 bp, Homo sapien
acatgttaagtacggtttaatcaca

SEQ ID NO: 4062979 - DNA, 25 bp, Homo sapien
ggaaggttgatatgtgctgcagcat

SEQ ID NO: 4062980 - DNA, 25 bp, Homo sapien
gaaaggatactggaggcaaaagcca

SEQ ID NO: 4062981 - DNA, 25 bp, Homo sapien
caaccagccttatagagtgcacaaa

SEQ ID NO: 4062982 - DNA, 25 bp, Homo sapien
tctgctaatggcaccgatgcttcac

SEQ ID NO: 4062983 - DNA, 25 bp, Homo sapien
tgaaaacatttcaagctacaccgct

SEQ ID NO: 4062984 - DNA, 25 bp, Homo sapien
gagaatacttcacctactgggatgg

SEQ ID NO: 4062985 - DNA, 25 bp, Homo sapien
tctgcccgtgtatatgtcactatag

SEQ ID NO: 4062986 - DNA, 25 bp, Homo sapien
tattcttccatctgagtgaccaccc

SEQ ID NO: 4062987 - DNA, 25 bp, Homo sapien
cataagtggtctaattagtcaaaag

SEQ ID NO: 4062988 - DNA, 25 bp, Homo sapien
gccataagtggtctaattagtcaaa

SEQ ID NO: 4062989 - DNA, 25 bp, Homo sapien
cagccataagtggtctaattagtca

SEQ ID NO: 4062990 - DNA, 25 bp, Homo sapien
cccagccataagtggtctaattagt

SEQ ID NO: 4062991 - DNA, 25 bp, Homo sapien
atatgacctcatgggctgttaagcc

SEQ ID NO: 4062992 - DNA, 25 bp, Homo sapien
gttaagccttaatctcacaatgaaa

SEQ ID NO: 4062993 - DNA, 25 bp, Homo sapien
aagatgtcagatttatggccaggcg

SEQ ID NO: 4062994 - DNA, 25 bp, Homo sapien
cagagactctcctcctggctatttt

SEQ ID NO: 4062995 - DNA, 25 bp, Homo sapien
tccaactcaagccatttaatagggt

SEQ ID NO: 4062996 - DNA, 25 bp, Homo sapien
cctaaagtatcttatgtgtgcctca

SEQ ID NO: 4062997 - DNA, 25 bp, Homo sapien
cattaaactttaggcactttctggg

SEQ ID NO: 4062998 - DNA, 25 bp, Homo sapien
tgggctgaagagttaccactaggta

SEQ ID NO: 4062999 - DNA, 25 bp, Homo sapien
acagtggaaccaaagccactacttg

SEQ ID NO: 4063000 - DNA, 25 bp, Homo sapien
aaagccactacttgagttatactta

SEQ ID NO: 4063001 - DNA, 25 bp, Homo sapien
tatttataaacagtggaaccaaagc

SEQ ID NO: 4063002 - DNA, 25 bp, Homo sapien
gccactacttgagttatacttaaat

SEQ ID NO: 4063003 - DNA, 25 bp, Homo sapien
taagattttaatacaacatactctg

SEQ ID NO: 4063004 - DNA, 25 bp, Homo sapien
cagagacactgttgacttggcttgg

SEQ ID NO: 4063005 - DNA, 25 bp, Homo sapien
tcatgttcctgttcatccaagttgc

SEQ ID NO: 4063006 - DNA, 25 bp, Homo sapien
aaatttcagtgcaaaggatgccacc

SEQ ID NO: 4063007 - DNA, 25 bp, Homo sapien
ggttgagaacaataggagtccacat

SEQ ID NO: 4063008 - DNA, 25 bp, Homo sapien
gagggcttcaaatggtatcatttcc

SEQ ID NO: 4063009 - DNA, 25 bp, Homo sapien
ctgctgctcggtaaactccagcaat

SEQ ID NO: 4063010 - DNA, 25 bp, Homo sapien
cagtgtgagggcttcaaatggtatc

SEQ ID NO: 4063011 - DNA, 25 bp, Homo sapien
ttccctgctgctcggtaaactccag

SEQ ID NO: 4063012 - DNA, 25 bp, Homo sapien
tcccttcaagaaatggacggaggag

SEQ ID NO: 4063013 - DNA, 25 bp, Homo sapien
gaagacaggaggactctaagccata

SEQ ID NO: 4063014 - DNA, 25 bp, Homo sapien
tctgtggactactctacactttgag

SEQ ID NO: 4063015 - DNA, 25 bp, Homo sapien
gcatggcttgcaagatcacttttag

SEQ ID NO: 4063016 - DNA, 25 bp, Homo sapien
gatgtgaaggtatattaacatattt

SEQ ID NO: 4063017 - DNA, 25 bp, Homo sapien
tcacaaatgtgatgtgaaggtatat

SEQ ID NO: 4063018 - DNA, 25 bp, Homo sapien
tttcacaaatgtgatgtgaaggtat

SEQ ID NO: 4063019 - DNA, 25 bp, Homo sapien
aatgtgatgtgaaggtatattaaca

SEQ ID NO: 4063020 - DNA, 25 bp, Homo sapien
ctcaatttcctaggcttcagcaagc

SEQ ID NO: 4063021 - DNA, 25 bp, Homo sapien
atttcctaggcttcagcaagcctcc

SEQ ID NO: 4063022 - DNA, 25 bp, Homo sapien
caatttcctaggcttcagcaagcct

SEQ ID NO: 4063023 - DNA, 25 bp, Homo sapien
tagtctcaatttcctaggcttcagc

SEQ ID NO: 4063024 - DNA, 25 bp, Homo sapien
ctggacttgcagttaaaaggcactc

SEQ ID NO: 4063025 - DNA, 25 bp, Homo sapien
cagatatgttttctagaataggtcc

SEQ ID NO: 4063026 - DNA, 25 bp, Homo sapien
tggacttgcagttaaaaggcactct

SEQ ID NO: 4063027 - DNA, 25 bp, Homo sapien
taggtcctgaaattgactagtcata

SEQ ID NO: 4063028 - DNA, 25 bp, Homo sapien
atttttgactggtattttaatgtct

SEQ ID NO: 4063029 - DNA, 25 bp, Homo sapien
tgactggtattttaatgtctaacat

SEQ ID NO: 4063030 - DNA, 25 bp, Homo sapien
actggtattttaatgtctaacatac

SEQ ID NO: 4063031 - DNA, 25 bp, Homo sapien
tttgactggtattttaatgtctaac

SEQ ID NO: 4063032 - DNA, 25 bp, Homo sapien
cgatgcccatcaacaggatgcttac

SEQ ID NO: 4063033 - DNA, 25 bp, Homo sapien
ccagcagtaattggtcccacgatgc

SEQ ID NO: 4063034 - DNA, 25 bp, Homo sapien
tcccacgatgcccatcaacaggatg

SEQ ID NO: 4063035 - DNA, 25 bp, Homo sapien
taattggtcccacgatgcccatcaa

SEQ ID NO: 4063036 - DNA, 25 bp, Homo sapien
aagagggccagtaatccagcaggga

SEQ ID NO: 4063037 - DNA, 25 bp, Homo sapien
cagtaatccagcagggacatgaaag

SEQ ID NO: 4063038 - DNA, 25 bp, Homo sapien
ggtgaagagggccagtaatccagca

SEQ ID NO: 4063039 - DNA, 25 bp, Homo sapien
gacaccagtgcccacaggaatacac

SEQ ID NO: 4063040 - DNA, 25 bp, Homo sapien
gcagtgggagtttcgccaggctggt

SEQ ID NO: 4063041 - DNA, 25 bp, Homo sapien
gtgcagtgggagtttcgccaggctg

SEQ ID NO: 4063042 - DNA, 25 bp, Homo sapien
tgcagtgggagtttcgccaggctgg

SEQ ID NO: 4063043 - DNA, 25 bp, Homo sapien
agtgcagtgggagtttcgccaggct

SEQ ID NO: 4063044 - DNA, 25 bp, Homo sapien
gcaaagtagggttcatcagtcaaat

SEQ ID NO: 4063045 - DNA, 25 bp, Homo sapien
gtgttcaacaaattactgcctacag

SEQ ID NO: 4063046 - DNA, 25 bp, Homo sapien
gacacagaccacatgacccataaag

SEQ ID NO: 4063047 - DNA, 25 bp, Homo sapien
gggcaaagctgataacagtgacaca

SEQ ID NO: 4063048 - DNA, 25 bp, Homo sapien
tggcagcaactccagagggagcagt

SEQ ID NO: 4063049 - DNA, 25 bp, Homo sapien
gctggcagcaactccagagggagca

SEQ ID NO: 4063050 - DNA, 25 bp, Homo sapien
ctggctggcagcaactccagaggga

SEQ ID NO: 4063051 - DNA, 25 bp, Homo sapien
tccctggctggcagcaactccagag

SEQ ID NO: 4063052 - DNA, 25 bp, Homo sapien
caagcatcagggaatgtacgtggcc

SEQ ID NO: 4063053 - DNA, 25 bp, Homo sapien
tgtgaacagattaacccacatggga

SEQ ID NO: 4063054 - DNA, 25 bp, Homo sapien
tcccaaaggtgttcgcatctccatc

SEQ ID NO: 4063055 - DNA, 25 bp, Homo sapien
agaagaagagcaggccaagcatcag

SEQ ID NO: 4063056 - DNA, 25 bp, Homo sapien
gggctatcttgatactaatcaccca

SEQ ID NO: 4063057 - DNA, 25 bp, Homo sapien
tccatgctgaagttgggctatcttg

SEQ ID NO: 4063058 - DNA, 25 bp, Homo sapien
gctgaagttgggctatcttgatact

SEQ ID NO: 4063059 - DNA, 25 bp, Homo sapien
atactaatcacccatcagcctgcag

SEQ ID NO: 4063060 - DNA, 25 bp, Homo sapien
cagtagagagttctgatagacatca

SEQ ID NO: 4063061 - DNA, 25 bp, Homo sapien
gatgcaggaacccttacagtagaga

SEQ ID NO: 4063062 - DNA, 25 bp, Homo sapien
tgacgtttaattaacagaggatgca

SEQ ID NO: 4063063 - DNA, 25 bp, Homo sapien
tagtaaagagaggatgcagataccc

SEQ ID NO: 4063064 - DNA, 25 bp, Homo sapien
tgagtggacgtcacctaggtaggta

SEQ ID NO: 4063065 - DNA, 25 bp, Homo sapien
caatgtgtgaaccttagatcatgga

SEQ ID NO: 4063066 - DNA, 25 bp, Homo sapien
taggtaggtagcgttctgaccaaaa

SEQ ID NO: 4063067 - DNA, 25 bp, Homo sapien
gggaaatgtaaacaaggcccacaca

SEQ ID NO: 4063068 - DNA, 25 bp, Homo sapien
caaagatctcgaaggcttagtggga

SEQ ID NO: 4063069 - DNA, 25 bp, Homo sapien
agctttcagggcacggagcgctctt

SEQ ID NO: 4063070 - DNA, 25 bp, Homo sapien
tgggagacccagcaacaggtggcac

SEQ ID NO: 4063071 - DNA, 25 bp, Homo sapien
tgtgccaaagatctcgaaggcttag

SEQ ID NO: 4063072 - DNA, 25 bp, Homo sapien
tcagggaccgccgaagaagtgatgg

SEQ ID NO: 4063073 - DNA, 25 bp, Homo sapien
cctcagggaccgccgaagaagtgat

SEQ ID NO: 4063074 - DNA, 25 bp, Homo sapien
cagggaccgccgaagaagtgatggg

SEQ ID NO: 4063075 - DNA, 25 bp, Homo sapien
ggaccgccgaagaagtgatggggaa

SEQ ID NO: 4063076 - DNA, 25 bp, Homo sapien
gcccagactcggggcgcccacagca

SEQ ID NO: 4063077 - DNA, 25 bp, Homo sapien
ggcgacggcggggcgcgcagtgcgc

SEQ ID NO: 4063078 - DNA, 25 bp, Homo sapien
cccgcccagactcggggcgcccaca

SEQ ID NO: 4063079 - DNA, 25 bp, Homo sapien
ccagactcggggcgcccacagcacg

SEQ ID NO: 4063080 - DNA, 25 bp, Homo sapien
tggggcacagggtcccgttgcccac

SEQ ID NO: 4063081 - DNA, 25 bp, Homo sapien
ggaagtagagttggggcacagggtc

SEQ ID NO: 4063082 - DNA, 25 bp, Homo sapien
cggcacaaccttcaggctcaggatc

SEQ ID NO: 4063083 - DNA, 25 bp, Homo sapien
ggcacaaccttcaggctcaggatct

SEQ ID NO: 4063084 - DNA, 25 bp, Homo sapien
gcggcacaaccttcaggctcaggat

SEQ ID NO: 4063085 - DNA, 25 bp, Homo sapien
ccgcggcacaaccttcaggctcagg

SEQ ID NO: 4063086 - DNA, 25 bp, Homo sapien
gagcgcccgaagtgcggtagcggcc

SEQ ID NO: 4063087 - DNA, 25 bp, Homo sapien
cgaagtgcggtagcggccggcgccg

SEQ ID NO: 4063088 - DNA, 25 bp, Homo sapien
caatcccaacggcgctgccaagtga

SEQ ID NO: 4063089 - DNA, 25 bp, Homo sapien
ggcgctgccaagtgaccgttgcctc

SEQ ID NO: 4063090 - DNA, 25 bp, Homo sapien
tcagctgccccaggaattaaagaag

SEQ ID NO: 4063091 - DNA, 25 bp, Homo sapien
gcaggacaaagtcgtttcaacaaga

SEQ ID NO: 4063092 - DNA, 25 bp, Homo sapien
caaaagaggctgtggtaagtcaaca

SEQ ID NO: 4063093 - DNA, 25 bp, Homo sapien
taagtcaacagcaacatgggcacag

SEQ ID NO: 4063094 - DNA, 25 bp, Homo sapien
cctttggccagtagaaggtagccga

SEQ ID NO: 4063095 - DNA, 25 bp, Homo sapien
caaaggagcagcacgcaggttctct

SEQ ID NO: 4063096 - DNA, 25 bp, Homo sapien
tggacacaacccttgactcagaggt

SEQ ID NO: 4063097 - DNA, 25 bp, Homo sapien
tactcttctcaagtggtggactcag

SEQ ID NO: 4063098 - DNA, 25 bp, Homo sapien
attaaaaagtctctcttaatctgtt

SEQ ID NO: 4063099 - DNA, 25 bp, Homo sapien
aaaaagtctctcttaatctgttttg

SEQ ID NO: 4063100 - DNA, 25 bp, Homo sapien
tgtcacagcattgggcagtccccag

SEQ ID NO: 4063101 - DNA, 25 bp, Homo sapien
tgttgggactgcactctcacagaga

SEQ ID NO: 4063102 - DNA, 25 bp, Homo sapien
tgtcctgaaagctgacctgggttca

SEQ ID NO: 4063103 - DNA, 25 bp, Homo sapien
tgtactgcccatgcgcagagagcaa

SEQ ID NO: 4063104 - DNA, 25 bp, Homo sapien
acaggtatgtgcgaccatgcctcgc

SEQ ID NO: 4063105 - DNA, 25 bp, Homo sapien
ttagtagaggaggggcttcgccatg

SEQ ID NO: 4063106 - DNA, 25 bp, Homo sapien
aggtatgtgcgaccatgcctcgcta

SEQ ID NO: 4063107 - DNA, 25 bp, Homo sapien
agtagaggaggggcttcgccatgtt

SEQ ID NO: 4063108 - DNA, 25 bp, Homo sapien
catgtactgggcacttataggctct

SEQ ID NO: 4063109 - DNA, 25 bp, Homo sapien
taggagccaagtcatctgaacgcac

SEQ ID NO: 4063110 - DNA, 25 bp, Homo sapien
ggctcacaggcagggatcatcctct

SEQ ID NO: 4063111 - DNA, 25 bp, Homo sapien
tgaggatcagaagctagtgaccacc

SEQ ID NO: 4063112 - DNA, 25 bp, Homo sapien
gggcctagcgcctgctacaactgtg

SEQ ID NO: 4063113 - DNA, 25 bp, Homo sapien
gaaacgtgcagtccttgcctacttg

SEQ ID NO: 4063114 - DNA, 25 bp, Homo sapien
cacaaactccttggtcaatataggg

SEQ ID NO: 4063115 - DNA, 25 bp, Homo sapien
atatagggacctgcttctccgtgcg

SEQ ID NO: 4063116 - DNA, 25 bp, Homo sapien
cgggggtgcgaggcggtggatgatg

SEQ ID NO: 4063117 - DNA, 25 bp, Homo sapien
ctaatttcgggggtgcgaggcggtg

SEQ ID NO: 4063118 - DNA, 25 bp, Homo sapien
tttcgggggtgcgaggcggtggatg

SEQ ID NO: 4063119 - DNA, 25 bp, Homo sapien
atttcgggggtgcgaggcggtggat

SEQ ID NO: 4063120 - DNA, 25 bp, Homo sapien
tccatgtcgcacaggaagacggagc

SEQ ID NO: 4063121 - DNA, 25 bp, Homo sapien
cccactggaagaggtcggacaggtt

SEQ ID NO: 4063122 - DNA, 25 bp, Homo sapien
aagtcttgaaggcttcgcggcgcgc

SEQ ID NO: 4063123 - DNA, 25 bp, Homo sapien
tagagcgcacggatttctgccagcg

SEQ ID NO: 4063124 - DNA, 25 bp, Homo sapien
ctggccgggaaaccagaaagaggag

SEQ ID NO: 4063125 - DNA, 25 bp, Homo sapien
tgctggagacgcgcggcagccacat

SEQ ID NO: 4063126 - DNA, 25 bp, Homo sapien
gaggagcgcggtcactgctgtgctg

SEQ ID NO: 4063127 - DNA, 25 bp, Homo sapien
aggaggaggaaggtctgcgccagga

SEQ ID NO: 4063128 - DNA, 25 bp, Homo sapien
ctgatcacaaatccatgggagatga

SEQ ID NO: 4063129 - DNA, 25 bp, Homo sapien
tccatgggagatgattagaggttcc

SEQ ID NO: 4063130 - DNA, 25 bp, Homo sapien
tcacaaatccatgggagatgattag

SEQ ID NO: 4063131 - DNA, 25 bp, Homo sapien
ggagatgattagaggttcctcagca

SEQ ID NO: 4063132 - DNA, 25 bp, Homo sapien
tgcacatgatcaacgctcctccagt

SEQ ID NO: 4063133 - DNA, 25 bp, Homo sapien
gcccatttccctcatcaggaggcaa

SEQ ID NO: 4063134 - DNA, 25 bp, Homo sapien
taacttgtgagcagatctcctctct

SEQ ID NO: 4063135 - DNA, 25 bp, Homo sapien
gaagacagggagagtagccactcat

SEQ ID NO: 4063136 - DNA, 25 bp, Homo sapien
gctctgtggtgggtgtcgcagtcct

SEQ ID NO: 4063137 - DNA, 25 bp, Homo sapien
gggtgtcgcagtcctgagcctttgt

SEQ ID NO: 4063138 - DNA, 25 bp, Homo sapien
aatacatcgaagaaccagactctca

SEQ ID NO: 4063139 - DNA, 25 bp, Homo sapien
ataaatacatcgaagaaccagactc

SEQ ID NO: 4063140 - DNA, 25 bp, Homo sapien
cactcctgggtacacaccctagaga

SEQ ID NO: 4063141 - DNA, 25 bp, Homo sapien
gggatgtcagatggtgcatttcctg

SEQ ID NO: 4063142 - DNA, 25 bp, Homo sapien
gtggtttctcgaaaggttgaataga

SEQ ID NO: 4063143 - DNA, 25 bp, Homo sapien
atgatacagcagatccactcctggg

SEQ ID NO: 4063144 - DNA, 25 bp, Homo sapien
tattaagcgacacccggtgaggccg

SEQ ID NO: 4063145 - DNA, 25 bp, Homo sapien
tctctccctggactcagcaaaggct

SEQ ID NO: 4063146 - DNA, 25 bp, Homo sapien
gaagctcctggagactcgaggtaga

SEQ ID NO: 4063147 - DNA, 25 bp, Homo sapien
gagagttggcggtgaccaagccact

SEQ ID NO: 4063148 - DNA, 25 bp, Homo sapien
actggcccatgcctatattcctggc

SEQ ID NO: 4063149 - DNA, 25 bp, Homo sapien
agtctcaagagacggggcacactgg

SEQ ID NO: 4063150 - DNA, 25 bp, Homo sapien
cgtatctttagccatcttcccatgt

SEQ ID NO: 4063151 - DNA, 25 bp, Homo sapien
aacataatggattctttatacaagt

SEQ ID NO: 4063152 - DNA, 25 bp, Homo sapien
gccacagtcgggcagggatccaggg

SEQ ID NO: 4063153 - DNA, 25 bp, Homo sapien
ccagccacagtcgggcagggatcca

SEQ ID NO: 4063154 - DNA, 25 bp, Homo sapien
agtcgggcagggatccagggctgct

SEQ ID NO: 4063155 - DNA, 25 bp, Homo sapien
gtcgggcagggatccagggctgctc

SEQ ID NO: 4063156 - DNA, 25 bp, Homo sapien
caggcgaactttaccatcgcccaga

SEQ ID NO: 4063157 - DNA, 25 bp, Homo sapien
aggcgaactttaccatcgcccagaa

SEQ ID NO: 4063158 - DNA, 25 bp, Homo sapien
ccaggcgaactttaccatcgcccag

SEQ ID NO: 4063159 - DNA, 25 bp, Homo sapien
ttggggtcattcaggatggtggcaa

SEQ ID NO: 4063160 - DNA, 25 bp, Homo sapien
ccagatgaagttggggtcattcagg

SEQ ID NO: 4063161 - DNA, 25 bp, Homo sapien
cagccagatgaagttggggtcattc

SEQ ID NO: 4063162 - DNA, 25 bp, Homo sapien
tgaagttggggtcattcaggatggt

SEQ ID NO: 4063163 - DNA, 25 bp, Homo sapien
cttctggcaggaaacaggggcactc

SEQ ID NO: 4063164 - DNA, 25 bp, Homo sapien
gagctctgtaaggaatgagcacact

SEQ ID NO: 4063165 - DNA, 25 bp, Homo sapien
tcctgctggactgctaatgtgggga

SEQ ID NO: 4063166 - DNA, 25 bp, Homo sapien
aacaggggcactcctgttctcctgc

SEQ ID NO: 4063167 - DNA, 25 bp, Homo sapien
gtctttggcatctgttataggtgtg

SEQ ID NO: 4063168 - DNA, 25 bp, Homo sapien
cgggtggtcccgggtctgaagatca

SEQ ID NO: 4063169 - DNA, 25 bp, Homo sapien
accatcactagcctgctggaccacg

SEQ ID NO: 4063170 - DNA, 25 bp, Homo sapien
tgaatgggctctacctgtgacccac

SEQ ID NO: 4063171 - DNA, 25 bp, Homo sapien
ggctgaatgggctctacctgtgacc

SEQ ID NO: 4063172 - DNA, 25 bp, Homo sapien
gggtgaggtcgtagtcataggcaaa

SEQ ID NO: 4063173 - DNA, 25 bp, Homo sapien
ctggtaggcagcaacaatatgggtg

SEQ ID NO: 4063174 - DNA, 25 bp, Homo sapien
tgaggtcgtagtcataggcaaaggg

SEQ ID NO: 4063175 - DNA, 25 bp, Homo sapien
cctggtaggcagcaacaatatgggt

SEQ ID NO: 4063176 - DNA, 25 bp, Homo sapien
cagagcaccctcttgttcttggtgg

SEQ ID NO: 4063177 - DNA, 25 bp, Homo sapien
acagagcaccctcttgttcttggtg

SEQ ID NO: 4063178 - DNA, 25 bp, Homo sapien
agagcaccctcttgttcttggtggc

SEQ ID NO: 4063179 - DNA, 25 bp, Homo sapien
tgcttggcgatatctgaacagggac

SEQ ID NO: 4063180 - DNA, 25 bp, Homo sapien
gcttaccaagtgataggcagtgtgc

SEQ ID NO: 4063181 - DNA, 25 bp, Homo sapien
tagtgtatgagatgccactgctgtc

SEQ ID NO: 4063182 - DNA, 25 bp, Homo sapien
caaacacatatcctgagtaggccag

SEQ ID NO: 4063183 - DNA, 25 bp, Homo sapien
gaaaggaggactggagaaacgccat

SEQ ID NO: 4063184 - DNA, 25 bp, Homo sapien
cagcctcaggtctccgttcacgtat

SEQ ID NO: 4063185 - DNA, 25 bp, Homo sapien
tggagaaacgccatgctctgcatca

SEQ ID NO: 4063186 - DNA, 25 bp, Homo sapien
tataactgggatcccgggacaggaa

SEQ ID NO: 4063187 - DNA, 25 bp, Homo sapien
ataggagaaagtcaggatgagctgc

SEQ ID NO: 4063188 - DNA, 25 bp, Homo sapien
taggagaaagtcaggatgagctgca

SEQ ID NO: 4063189 - DNA, 25 bp, Homo sapien
gagaaagtcaggatgagctgcacac

SEQ ID NO: 4063190 - DNA, 25 bp, Homo sapien
ggagaaagtcaggatgagctgcaca

SEQ ID NO: 4063191 - DNA, 25 bp, Homo sapien
aatgtaacatgtccgtcttcccatc

SEQ ID NO: 4063192 - DNA, 25 bp, Homo sapien
aaatgtaacatgtccgtcttcccat

SEQ ID NO: 4063193 - DNA, 25 bp, Homo sapien
taaaatgtaacatgtccgtcttccc

SEQ ID NO: 4063194 - DNA, 25 bp, Homo sapien
aaaatgtaacatgtccgtcttccca

SEQ ID NO: 4063195 - DNA, 25 bp, Homo sapien
aatccacatcacttctgtacataca

SEQ ID NO: 4063196 - DNA, 25 bp, Homo sapien
ggaggaatccacatcacttctgtac

SEQ ID NO: 4063197 - DNA, 25 bp, Homo sapien
ggaatccacatcacttctgtacata

SEQ ID NO: 4063198 - DNA, 25 bp, Homo sapien
gaggaatccacatcacttctgtaca

SEQ ID NO: 4063199 - DNA, 25 bp, Homo sapien
gaggcacaaagtgcatggcccctga

SEQ ID NO: 4063200 - DNA, 25 bp, Homo sapien
tgaagtggcgataacaagacaagaa

SEQ ID NO: 4063201 - DNA, 25 bp, Homo sapien
acttgaagtggcgataacaagacaa

SEQ ID NO: 4063202 - DNA, 25 bp, Homo sapien
ggaaagaggcacaaagtgcatggcc

SEQ ID NO: 4063203 - DNA, 25 bp, Homo sapien
acaaacccatatcctcttgcagctt

SEQ ID NO: 4063204 - DNA, 25 bp, Homo sapien
caaacccatatcctcttgcagcttc

SEQ ID NO: 4063205 - DNA, 25 bp, Homo sapien
cctgacactcacgaccagctgttcc

SEQ ID NO: 4063206 - DNA, 25 bp, Homo sapien
tgttccagcccacaggttggttgtt

SEQ ID NO: 4063207 - DNA, 25 bp, Homo sapien
cagcccacaggttggttgttttctc

SEQ ID NO: 4063208 - DNA, 25 bp, Homo sapien
tgacactcacgaccagctgttccag

SEQ ID NO: 4063209 - DNA, 25 bp, Homo sapien
gccgaggtggctgggtcacttgaga

SEQ ID NO: 4063210 - DNA, 25 bp, Homo sapien
gaggtggctgggtcacttgagatca

SEQ ID NO: 4063211 - DNA, 25 bp, Homo sapien
ttgaaaggccgaggtggctgggtca

SEQ ID NO: 4063212 - DNA, 25 bp, Homo sapien
actttgaaaggccgaggtggctggg

SEQ ID NO: 4063213 - DNA, 25 bp, Homo sapien
aaaatccctgggcacataacactgc

SEQ ID NO: 4063214 - DNA, 25 bp, Homo sapien
tgggcacataacactgcaagtccca

SEQ ID NO: 4063215 - DNA, 25 bp, Homo sapien
caatcccgtccaggaaaatccctgg

SEQ ID NO: 4063216 - DNA, 25 bp, Homo sapien
gctacttcacaatcccgtccaggaa

SEQ ID NO: 4063217 - DNA, 25 bp, Homo sapien
actccctgcgcccagaagaggtagg

SEQ ID NO: 4063218 - DNA, 25 bp, Homo sapien
cgtgcagtccttgcctacttcaggg

SEQ ID NO: 4063219 - DNA, 25 bp, Homo sapien
actcccggttgatagtagggacctg

SEQ ID NO: 4063220 - DNA, 25 bp, Homo sapien
tggcgaccacagttcggggcctgct

SEQ ID NO: 4063221 - DNA, 25 bp, Homo sapien
tctgtggcatgtaggcatcaaacac

SEQ ID NO: 4063222 - DNA, 25 bp, Homo sapien
accagatccagggtgaggtcacgct

SEQ ID NO: 4063223 - DNA, 25 bp, Homo sapien
gcgcggctcgttgcccagttgaaaa

SEQ ID NO: 4063224 - DNA, 25 bp, Homo sapien
tcctagacgaagtatggaaggcctc

SEQ ID NO: 4063225 - DNA, 25 bp, Homo sapien
tcttgctggagaaccgtggcagcca

SEQ ID NO: 4063226 - DNA, 25 bp, Homo sapien
caggtggtctgtgccaggaggagca

SEQ ID NO: 4063227 - DNA, 25 bp, Homo sapien
ctgtgccaggaggagcactgtcact

SEQ ID NO: 4063228 - DNA, 25 bp, Homo sapien
tgctggagaaccgtggcagccacat

SEQ ID NO: 4063229 - DNA, 25 bp, Homo sapien
cttcgggtggagtgggcaactttag

SEQ ID NO: 4063230 - DNA, 25 bp, Homo sapien
agcaactgttgtcatcactggtggg

SEQ ID NO: 4063231 - DNA, 25 bp, Homo sapien
tcacagcagaagtccagttgcagaa

SEQ ID NO: 4063232 - DNA, 25 bp, Homo sapien
gataattccggtacctggctcacag

SEQ ID NO: 4063233 - DNA, 25 bp, Homo sapien
ggtctcagtcgagcactttcccagg

SEQ ID NO: 4063234 - DNA, 25 bp, Homo sapien
ctgatcacaaatccatgggagatgt

SEQ ID NO: 4063235 - DNA, 25 bp, Homo sapien
gcaggaaggagaggagatcagagcc

SEQ ID NO: 4063236 - DNA, 25 bp, Homo sapien
caaagcaggaaggagaggagatcag

SEQ ID NO: 4063237 - DNA, 25 bp, Homo sapien
agcaggaaggagaggagatcagagc

SEQ ID NO: 4063238 - DNA, 25 bp, Homo sapien
ctggcaaagcaggaaggagaggaga

SEQ ID NO: 4063239 - DNA, 25 bp, Homo sapien
cacagaggagacacccacaggccac

SEQ ID NO: 4063240 - DNA, 25 bp, Homo sapien
aggccacctacccttccaatccctg

SEQ ID NO: 4063241 - DNA, 25 bp, Homo sapien
cctggtgagtctccccacagaggag

SEQ ID NO: 4063242 - DNA, 25 bp, Homo sapien
caggccatcctctggcgtccaacca

SEQ ID NO: 4063243 - DNA, 25 bp, Homo sapien
tgagcggaggatgcccaacacctct

SEQ ID NO: 4063244 - DNA, 25 bp, Homo sapien
tgctccttcgcctcaatgcggggac

SEQ ID NO: 4063245 - DNA, 25 bp, Homo sapien
ggggacaggagtgagcggaggatgc

SEQ ID NO: 4063246 - DNA, 25 bp, Homo sapien
gctgactcccgagctgccttctgga

SEQ ID NO: 4063247 - DNA, 25 bp, Homo sapien
tccagaagaccagttcctcactggg

SEQ ID NO: 4063248 - DNA, 25 bp, Homo sapien
ttcttaaggtggttgaatcactcta

SEQ ID NO: 4063249 - DNA, 25 bp, Homo sapien
gaaagccagaggtcttcttaaggtg

SEQ ID NO: 4063250 - DNA, 25 bp, Homo sapien
ggtggttgaatcactctatgccaca

SEQ ID NO: 4063251 - DNA, 25 bp, Homo sapien
agcagccagagggacgcctctcccc

SEQ ID NO: 4063252 - DNA, 25 bp, Homo sapien
ctcaaagcttggcgtgtctgccaga

SEQ ID NO: 4063253 - DNA, 25 bp, Homo sapien
aagcttggcgtgtctgccagagctg

SEQ ID NO: 4063254 - DNA, 25 bp, Homo sapien
caaagcttggcgtgtctgccagagc

SEQ ID NO: 4063255 - DNA, 25 bp, Homo sapien
caatcttcagcgctgcctggtgagg

SEQ ID NO: 4063256 - DNA, 25 bp, Homo sapien
tcgaggcagagcgaatctgggaaca

SEQ ID NO: 4063257 - DNA, 25 bp, Homo sapien
tggaagctcctggagactcgaggca

SEQ ID NO: 4063258 - DNA, 25 bp, Homo sapien
agctttcagacgtggctgcggtccc

SEQ ID NO: 4063259 - DNA, 25 bp, Homo sapien
gaagtcgaatcttaatcttggccct

SEQ ID NO: 4063260 - DNA, 25 bp, Homo sapien
ttaatcttggccctcctcgctcttg

SEQ ID NO: 4063261 - DNA, 25 bp, Homo sapien
gacaaaggccctagtgaaggaagtc

SEQ ID NO: 4063262 - DNA, 25 bp, Homo sapien
aatcgccagagaacctgggagctcc

SEQ ID NO: 4063263 - DNA, 25 bp, Homo sapien
gatgacaggcacgtgtcgccacacc

SEQ ID NO: 4063264 - DNA, 25 bp, Homo sapien
agcctactaaatagttgggatgaca

SEQ ID NO: 4063265 - DNA, 25 bp, Homo sapien
gggatgacaggcacgtgtcgccaca

SEQ ID NO: 4063266 - DNA, 25 bp, Homo sapien
tcagcctactaaatagttgggatga

SEQ ID NO: 4063267 - DNA, 25 bp, Homo sapien
ttgagattacaggaatgaaccacca

SEQ ID NO: 4063268 - DNA, 25 bp, Homo sapien
tatttattttaacagatagggtctc

SEQ ID NO: 4063269 - DNA, 25 bp, Homo sapien
ctgtcacccaggctacagtacagtg

SEQ ID NO: 4063270 - DNA, 25 bp, Homo sapien
ttattttaacagatagggtctcact

SEQ ID NO: 4063271 - DNA, 25 bp, Homo sapien
gcttagccacgagggtaatccactg

SEQ ID NO: 4063272 - DNA, 25 bp, Homo sapien
gaacaagccatcttccgtgtgcaga

SEQ ID NO: 4063273 - DNA, 25 bp, Homo sapien
tgagaatgaaacagcccctctgact

SEQ ID NO: 4063274 - DNA, 25 bp, Homo sapien
gtcacagtacggcaaagatccaggg

SEQ ID NO: 4063275 - DNA, 25 bp, Homo sapien
ctccctgattgcctgtgctaatgcg

SEQ ID NO: 4063276 - DNA, 25 bp, Homo sapien
ctccagttaaaggcctcagctctgg

SEQ ID NO: 4063277 - DNA, 25 bp, Homo sapien
gctaatgcggcccttgcccttgggc

SEQ ID NO: 4063278 - DNA, 25 bp, Homo sapien
gacggtccaagtgtccttcagcggc

SEQ ID NO: 4063279 - DNA, 25 bp, Homo sapien
caggtgtccgctgggctctttcaaa

SEQ ID NO: 4063280 - DNA, 25 bp, Homo sapien
cccagaagatgacaatgaggcagcc

SEQ ID NO: 4063281 - DNA, 25 bp, Homo sapien
tgtttgtcacaagagagccctgaaa

SEQ ID NO: 4063282 - DNA, 25 bp, Homo sapien
gaaagaaccgttgtctctgagggaa

SEQ ID NO: 4063283 - DNA, 25 bp, Homo sapien
tgacatactgcacccaggcgaactt

SEQ ID NO: 4063284 - DNA, 25 bp, Homo sapien
ccagaggaagataagcaggatgctg

SEQ ID NO: 4063285 - DNA, 25 bp, Homo sapien
gattctgaaacacgaagatcttgat

SEQ ID NO: 4063286 - DNA, 25 bp, Homo sapien
ggtggtcaccacctgattctgaaac

SEQ ID NO: 4063287 - DNA, 25 bp, Homo sapien
ctgcagtgttggtgttggtttcatt

SEQ ID NO: 4063288 - DNA, 25 bp, Homo sapien
tctctgcagtgttggtgttggtttc

SEQ ID NO: 4063289 - DNA, 25 bp, Homo sapien
cagtgttggtgttggtttcattttc

SEQ ID NO: 4063290 - DNA, 25 bp, Homo sapien
tgtttgcttctctgcagtgttggtg

SEQ ID NO: 4063291 - DNA, 25 bp, Homo sapien
ttccacagggtatcggatgatagca

SEQ ID NO: 4063292 - DNA, 25 bp, Homo sapien
gcattaatcacaaatggagcatctg

SEQ ID NO: 4063293 - DNA, 25 bp, Homo sapien
gtatcggatgatagcattaatcaca

SEQ ID NO: 4063294 - DNA, 25 bp, Homo sapien
ttgggatcattcaggacggtggtaa

SEQ ID NO: 4063295 - DNA, 25 bp, Homo sapien
atcattaaccattaaccacgatggc

SEQ ID NO: 4063296 - DNA, 25 bp, Homo sapien
tcattaaccattaaccacgatggct

SEQ ID NO: 4063297 - DNA, 25 bp, Homo sapien
attaaccattaaccacgatggctgt

SEQ ID NO: 4063298 - DNA, 25 bp, Homo sapien
cattaaccattaaccacgatggctg

SEQ ID NO: 4063299 - DNA, 25 bp, Homo sapien
caataatgccactagtatatgccat

SEQ ID NO: 4063300 - DNA, 25 bp, Homo sapien
gaaggaatactatactgccactaaa

SEQ ID NO: 4063301 - DNA, 25 bp, Homo sapien
tctgcagaaggctaaagaatgaaag

SEQ ID NO: 4063302 - DNA, 25 bp, Homo sapien
tctacatgtgctgaatggctaactg

SEQ ID NO: 4063303 - DNA, 25 bp, Homo sapien
tcactagcctgctggaccatgggat

SEQ ID NO: 4063304 - DNA, 25 bp, Homo sapien
accatcactagcctgctggaccatg

SEQ ID NO: 4063305 - DNA, 25 bp, Homo sapien
catcactagcctgctggaccatggg

SEQ ID NO: 4063306 - DNA, 25 bp, Homo sapien
actagcctgctggaccatgggatgc

SEQ ID NO: 4063307 - DNA, 25 bp, Homo sapien
ctgaatgggctctacctgtgactca

SEQ ID NO: 4063308 - DNA, 25 bp, Homo sapien
gctgaatgggctctacctgtgactc

SEQ ID NO: 4063309 - DNA, 25 bp, Homo sapien
tgaatgggctctacctgtgactcac

SEQ ID NO: 4063310 - DNA, 25 bp, Homo sapien
ggctgaatgggctctacctgtgact

SEQ ID NO: 4063311 - DNA, 25 bp, Homo sapien
gggtgaggtcgtagtcataggcaaa

SEQ ID NO: 4063312 - DNA, 25 bp, Homo sapien
ctggtaggcagcaacaatatgggtg

SEQ ID NO: 4063313 - DNA, 25 bp, Homo sapien
tgaggtcgtagtcataggcaaaggg

SEQ ID NO: 4063314 - DNA, 25 bp, Homo sapien
cctggtaggcagcaacaatatgggt

SEQ ID NO: 4063315 - DNA, 25 bp, Homo sapien
gcctactgcagtatcaataatcttt

SEQ ID NO: 4063316 - DNA, 25 bp, Homo sapien
tgcaacaatttaagcccatttactc

SEQ ID NO: 4063317 - DNA, 25 bp, Homo sapien
gcctactgcagtatcaataatcttc

SEQ ID NO: 4063318 - DNA, 25 bp, Homo sapien
tactgcagtatcaataatcttttct

SEQ ID NO: 4063319 - DNA, 25 bp, Homo sapien
taacagaccgtattttcgccaggtg

SEQ ID NO: 4063320 - DNA, 25 bp, Homo sapien
aaaatacccctctttatctcagcgg

SEQ ID NO: 4063321 - DNA, 25 bp, Homo sapien
ccatgagttcaaggccgtagtcaat

SEQ ID NO: 4063322 - DNA, 25 bp, Homo sapien
ggccgtagtcaatgatgatcatgcc

SEQ ID NO: 4063323 - DNA, 25 bp, Homo sapien
cagcctcaggtctccgttcacgtat

SEQ ID NO: 4063324 - DNA, 25 bp, Homo sapien
tgtatcgggcatctaggccaccaca

SEQ ID NO: 4063325 - DNA, 25 bp, Homo sapien
tggagaaacgccatgctctgcatca

SEQ ID NO: 4063326 - DNA, 25 bp, Homo sapien
tataactgggatcccgggacaggaa

SEQ ID NO: 4063327 - DNA, 25 bp, Homo sapien
taggagaaagtcaggatgagctgca

SEQ ID NO: 4063328 - DNA, 25 bp, Homo sapien
gagaaagtcaggatgagctgcacac

SEQ ID NO: 4063329 - DNA, 25 bp, Homo sapien
ggagaaagtcaggatgagctgcaca

SEQ ID NO: 4063330 - DNA, 25 bp, Homo sapien
ataggagaaagtcaggatgagctgc

SEQ ID NO: 4063331 - DNA, 25 bp, Homo sapien
gcaggggaagctccagcttaaaatg

SEQ ID NO: 4063332 - DNA, 25 bp, Homo sapien
cgagaacgtgctccgtggactgcag

SEQ ID NO: 4063333 - DNA, 25 bp, Homo sapien
caggggaagctccagcttaaaatgt

SEQ ID NO: 4063334 - DNA, 25 bp, Homo sapien
ccatcctggttcctgtcttcttctc

SEQ ID NO: 4063335 - DNA, 25 bp, Homo sapien
cctggttcctgtcttcttctctagt

SEQ ID NO: 4063336 - DNA, 25 bp, Homo sapien
atcctggttcctgtcttcttctcta

SEQ ID NO: 4063337 - DNA, 25 bp, Homo sapien
gtccgtcttcccatcctggttcctg

SEQ ID NO: 4063338 - DNA, 25 bp, Homo sapien
ttgctgtacacaacaggcattatct

SEQ ID NO: 4063339 - DNA, 25 bp, Homo sapien
tacacaatgacccactgtcttgctg

SEQ ID NO: 4063340 - DNA, 25 bp, Homo sapien
cactgtcttgctgtacacaacaggc

SEQ ID NO: 4063341 - DNA, 25 bp, Homo sapien
gtcttgctgtacacaacaggcatta

SEQ ID NO: 4063342 - DNA, 25 bp, Homo sapien
taaattacagattcctctcagcgct

SEQ ID NO: 4063343 - DNA, 25 bp, Homo sapien
ggaagcattcgcttatctcaaagca

SEQ ID NO: 4063344 - DNA, 25 bp, Homo sapien
ttctcctcagctatacaaggttggc

SEQ ID NO: 4063345 - DNA, 25 bp, Homo sapien
caaggttggcttgtagggcaatcat

SEQ ID NO: 4063346 - DNA, 25 bp, Homo sapien
acacaggctgcccccacacttctgg

SEQ ID NO: 4063347 - DNA, 25 bp, Homo sapien
agggcgcacacgctgacagcatggc

SEQ ID NO: 4063348 - DNA, 25 bp, Homo sapien
cacctggtgttggaagcgcacggtc

SEQ ID NO: 4063349 - DNA, 25 bp, Homo sapien
aggcgatccccttgcagccggttga

SEQ ID NO: 4063350 - DNA, 25 bp, Homo sapien
cggtcggctgctcctcgtagctgct

SEQ ID NO: 4063351 - DNA, 25 bp, Homo sapien
ctccaggcgaggaacccgtcgcttt

SEQ ID NO: 4063352 - DNA, 25 bp, Homo sapien
ctgagttaaagagggcggtagggag

SEQ ID NO: 4063353 - DNA, 25 bp, Homo sapien
agcgcgcccggggagcctcgtggca

SEQ ID NO: 4063354 - DNA, 25 bp, Homo sapien
gggagcctcgtggcacagcggccgg

SEQ ID NO: 4063355 - DNA, 25 bp, Homo sapien
cctcgtggcacagcggccggggcag

SEQ ID NO: 4063356 - DNA, 25 bp, Homo sapien
acagcgcggctttggagcagagccc

SEQ ID NO: 4063357 - DNA, 25 bp, Homo sapien
ggcgggatgtacgtgagcgcagcgg

SEQ ID NO: 4063358 - DNA, 25 bp, Homo sapien
ctcgaccgggtgagagaagagctca

SEQ ID NO: 4063359 - DNA, 25 bp, Homo sapien
agcagagccccgcgcggtaactgcg

SEQ ID NO: 4063360 - DNA, 25 bp, Homo sapien
cactccgcgagccgggggaccaagt

SEQ ID NO: 4063361 - DNA, 25 bp, Homo sapien
gcaccgctcgcaggcactccgcgag

SEQ ID NO: 4063362 - DNA, 25 bp, Homo sapien
cgctcgcaggcactccgcgagccgg

SEQ ID NO: 4063363 - DNA, 25 bp, Homo sapien
gagcaccgctcgcaggcactccgcg

SEQ ID NO: 4063364 - DNA, 25 bp, Homo sapien
cgcgtggactccaaagcagatgggt

SEQ ID NO: 4063365 - DNA, 25 bp, Homo sapien
caattcatgagtcggtgtagacccc

SEQ ID NO: 4063366 - DNA, 25 bp, Homo sapien
gattgacagtagtggtcactgccct

SEQ ID NO: 4063367 - DNA, 25 bp, Homo sapien
gattgggcatccatacagttctagg

SEQ ID NO: 4063368 - DNA, 25 bp, Homo sapien
tcttaagttcttacgcactgaggca

SEQ ID NO: 4063369 - DNA, 25 bp, Homo sapien
tcagcattgagcattcagttaccaa

SEQ ID NO: 4063370 - DNA, 25 bp, Homo sapien
cctgactataaggacacagtgctac

SEQ ID NO: 4063371 - DNA, 25 bp, Homo sapien
cagtgctactgccaactaagtttcc

SEQ ID NO: 4063372 - DNA, 25 bp, Homo sapien
gggttactctctgggcattctcaac

SEQ ID NO: 4063373 - DNA, 25 bp, Homo sapien
gacacttggacaaatggggtaaaga

SEQ ID NO: 4063374 - DNA, 25 bp, Homo sapien
ggcttgtcactctacttcctaatca

SEQ ID NO: 4063375 - DNA, 25 bp, Homo sapien
ggcattctcaaccaccagggtaaaa

SEQ ID NO: 4063376 - DNA, 25 bp, Homo sapien
aatccttagcagtcagaacacttgc

SEQ ID NO: 4063377 - DNA, 25 bp, Homo sapien
gaacacttgcttcactagaatatgc

SEQ ID NO: 4063378 - DNA, 25 bp, Homo sapien
ttctatatcgaagtgaggtaggtgc

SEQ ID NO: 4063379 - DNA, 25 bp, Homo sapien
caactgccaatcatgttggactgag

SEQ ID NO: 4063380 - DNA, 25 bp, Homo sapien
aagagggcttgtggaggtcatggcc

SEQ ID NO: 4063381 - DNA, 25 bp, Homo sapien
ttattcacccgcatttggatgggcc

SEQ ID NO: 4063382 - DNA, 25 bp, Homo sapien
cttgtggaggtcatggccgcacatc

SEQ ID NO: 4063383 - DNA, 25 bp, Homo sapien
agggcttgtggaggtcatggccgca

SEQ ID NO: 4063384 - DNA, 25 bp, Homo sapien
ggtatgtcccaccagtctaagaaca

SEQ ID NO: 4063385 - DNA, 25 bp, Homo sapien
tggtggctagagcactacacagaca

SEQ ID NO: 4063386 - DNA, 25 bp, Homo sapien
tgtaggcttgctaggacacaaatac

SEQ ID NO: 4063387 - DNA, 25 bp, Homo sapien
tcagttgggatcagaggaaacattc

SEQ ID NO: 4063388 - DNA, 25 bp, Homo sapien
tttcacaaccacaaacccacaaatg

SEQ ID NO: 4063389 - DNA, 25 bp, Homo sapien
acaaacccacaaatgcaaacgagaa

SEQ ID NO: 4063390 - DNA, 25 bp, Homo sapien
tctgtttcacaaccacaaacccaca

SEQ ID NO: 4063391 - DNA, 25 bp, Homo sapien
ccacaaatgcaaacgagaaaaaaca

SEQ ID NO: 4063392 - DNA, 25 bp, Homo sapien
tccgtctggcggtaaaccaacatgt

SEQ ID NO: 4063393 - DNA, 25 bp, Homo sapien
aacagaggcgggagtagctatcagc

SEQ ID NO: 4063394 - DNA, 25 bp, Homo sapien
tactagggcacaaatacgaacaaag

SEQ ID NO: 4063395 - DNA, 25 bp, Homo sapien
gattaaccatgctgcatactagggc

SEQ ID NO: 4063396 - DNA, 25 bp, Homo sapien
tcaaacgacccttgcaccttggctt

SEQ ID NO: 4063397 - DNA, 25 bp, Homo sapien
agaataggaattaggtccttctcaa

SEQ ID NO: 4063398 - DNA, 25 bp, Homo sapien
gataggcaagcttctacccctccac

SEQ ID NO: 4063399 - DNA, 25 bp, Homo sapien
gccccagagtttgctaggcttacca

SEQ ID NO: 4063400 - DNA, 25 bp, Homo sapien
gagaatttggaaggaggcaatataa

SEQ ID NO: 4063401 - DNA, 25 bp, Homo sapien
ctggaactgagagcctacttaacaa

SEQ ID NO: 4063402 - DNA, 25 bp, Homo sapien
gacaggcttgtgcaatcccaaaggt

SEQ ID NO: 4063403 - DNA, 25 bp, Homo sapien
gccagaggatctctttcaaggagaa

SEQ ID NO: 4063404 - DNA, 25 bp, Homo sapien
cctaaaaccaatcctggtggctgac

SEQ ID NO: 4063405 - DNA, 25 bp, Homo sapien
aaagccacagtttggtcggaggatc

SEQ ID NO: 4063406 - DNA, 25 bp, Homo sapien
ttggtcggaggatccacatacacct

SEQ ID NO: 4063407 - DNA, 25 bp, Homo sapien
catacacctctgtgatcgacagctt

SEQ ID NO: 4063408 - DNA, 25 bp, Homo sapien
gagcggtgcaaacacatgtgcagac

SEQ ID NO: 4063409 - DNA, 25 bp, Homo sapien
aaacatctgcccaataggcttctcc

SEQ ID NO: 4063410 - DNA, 25 bp, Homo sapien
tctcctgaggacagtcatgtttatt

SEQ ID NO: 4063411 - DNA, 25 bp, Homo sapien
tggtgtgcagcatgacactctacaa

SEQ ID NO: 4063412 - DNA, 25 bp, Homo sapien
gactgggtttgtgaccatcgcacca

SEQ ID NO: 4063413 - DNA, 25 bp, Homo sapien
caaaatcgaattcagagcaaacggg

SEQ ID NO: 4063414 - DNA, 25 bp, Homo sapien
gattacaggattaacttgcccagct

SEQ ID NO: 4063415 - DNA, 25 bp, Homo sapien
tcaaaaaggttcacaagaggcagca

SEQ ID NO: 4063416 - DNA, 25 bp, Homo sapien
acactgcttagtttcaatgtgcttt

SEQ ID NO: 4063417 - DNA, 25 bp, Homo sapien
agggcttgcatttcttccgaccaga

SEQ ID NO: 4063418 - DNA, 25 bp, Homo sapien
caattgcttgagtatctaggcccag

SEQ ID NO: 4063419 - DNA, 25 bp, Homo sapien
caatagcttttctgctgcggtggga

SEQ ID NO: 4063420 - DNA, 25 bp, Homo sapien
cagagcccaggttagtcgattgaga

SEQ ID NO: 4063421 - DNA, 25 bp, Homo sapien
ggtttcttgtaagtcgattcagaga

SEQ ID NO: 4063422 - DNA, 25 bp, Homo sapien
tattcagtaaaaagtctccctccca

SEQ ID NO: 4063423 - DNA, 25 bp, Homo sapien
tagtatatacaagctaaacagttac

SEQ ID NO: 4063424 - DNA, 25 bp, Homo sapien
tttttcctgttcgatgactggtttc

SEQ ID NO: 4063425 - DNA, 25 bp, Homo sapien
catgcgacgttagcagcatccaagg

SEQ ID NO: 4063426 - DNA, 25 bp, Homo sapien
gattaagtgctgtctgtgcgacacc

SEQ ID NO: 4063427 - DNA, 25 bp, Homo sapien
cagttgtcctgtgcatcatgcgacg

SEQ ID NO: 4063428 - DNA, 25 bp, Homo sapien
gctcagcgagcttctataattggca

SEQ ID NO: 4063429 - DNA, 25 bp, Homo sapien
gattagggcaggtggatatcccaga

SEQ ID NO: 4063430 - DNA, 25 bp, Homo sapien
ggtgactgccattgacaagaaagct

SEQ ID NO: 4063431 - DNA, 25 bp, Homo sapien
caagtatggtgagggcaatagatca

SEQ ID NO: 4063432 - DNA, 25 bp, Homo sapien
taagagccttgtgatctccatggga

SEQ ID NO: 4063433 - DNA, 25 bp, Homo sapien
gggacgaggcaatagatcaaacaag

SEQ ID NO: 4063434 - DNA, 25 bp, Homo sapien
gcaataaagctgacgtttgctaagt

SEQ ID NO: 4063435 - DNA, 25 bp, Homo sapien
gcagttatcagccaaatataggtta

SEQ ID NO: 4063436 - DNA, 25 bp, Homo sapien
tctgttgggtgaaatacgatggtta

SEQ ID NO: 4063437 - DNA, 25 bp, Homo sapien
gagagacgcatcatcctttagataa

SEQ ID NO: 4063438 - DNA, 25 bp, Homo sapien
taagatctcataagagagagacgca

SEQ ID NO: 4063439 - DNA, 25 bp, Homo sapien
ctttagataaaagctcccgacagcc

SEQ ID NO: 4063440 - DNA, 25 bp, Homo sapien
aagcagaatactggagatcctggcc

SEQ ID NO: 4063441 - DNA, 25 bp, Homo sapien
gaaagagtcttcttcagagcagcag

SEQ ID NO: 4063442 - DNA, 25 bp, Homo sapien
aaagtagattactgattgccctggg

SEQ ID NO: 4063443 - DNA, 25 bp, Homo sapien
tataagtaggccatggaaagacaca

SEQ ID NO: 4063444 - DNA, 25 bp, Homo sapien
tctgcaatgggttgagtggtgtccc

SEQ ID NO: 4063445 - DNA, 25 bp, Homo sapien
gatgaagggtcctgctaccagagca

SEQ ID NO: 4063446 - DNA, 25 bp, Homo sapien
gattatgtgacccttacagctccag

SEQ ID NO: 4063447 - DNA, 25 bp, Homo sapien
tgatacctctgagaacaagtccagg

SEQ ID NO: 4063448 - DNA, 25 bp, Homo sapien
taggaacccataaaacagagctgct

SEQ ID NO: 4063449 - DNA, 25 bp, Homo sapien
taatccggtgggtttctgatccagg

SEQ ID NO: 4063450 - DNA, 25 bp, Homo sapien
cagcctccttgtactcctggtaggt

SEQ ID NO: 4063451 - DNA, 25 bp, Homo sapien
ttgaactggtgataatccggtgggt

SEQ ID NO: 4063452 - DNA, 25 bp, Homo sapien
gcctccttgtactcctggtaggtat

SEQ ID NO: 4063453 - DNA, 25 bp, Homo sapien
tcattgaatagcccaccccaggggc

SEQ ID NO: 4063454 - DNA, 25 bp, Homo sapien
ttctcattgaatagcccaccccagg

SEQ ID NO: 4063455 - DNA, 25 bp, Homo sapien
aaatacacaggttctcattgaatag

SEQ ID NO: 4063456 - DNA, 25 bp, Homo sapien
tctcattgaatagcccaccccaggg

SEQ ID NO: 4063457 - DNA, 25 bp, Homo sapien
tagaagtatctcctcacctaaattc

SEQ ID NO: 4063458 - DNA, 25 bp, Homo sapien
gacatatagaatatatggaaaccca

SEQ ID NO: 4063459 - DNA, 25 bp, Homo sapien
ctctgccttagaagtatctcctcac

SEQ ID NO: 4063460 - DNA, 25 bp, Homo sapien
gatttgacatatagaatatatggaa

SEQ ID NO: 4063461 - DNA, 25 bp, Homo sapien
taaccaggtgactcatggtgggccc

SEQ ID NO: 4063462 - DNA, 25 bp, Homo sapien
ttcaggatgataccggccatgccag

SEQ ID NO: 4063463 - DNA, 25 bp, Homo sapien
tcccgggagcctctaagctttggag

SEQ ID NO: 4063464 - DNA, 25 bp, Homo sapien
gtctttgtcaccagttcccgggagc

SEQ ID NO: 4063465 - DNA, 25 bp, Homo sapien
gagttccactttgctgatttgggat

SEQ ID NO: 4063466 - DNA, 25 bp, Homo sapien
tgcaattctgcttagcagcttctgg

SEQ ID NO: 4063467 - DNA, 25 bp, Homo sapien
aagagttccactttgctgatttggg

SEQ ID NO: 4063468 - DNA, 25 bp, Homo sapien
gagtgtggccacttgtcccttgcaa

SEQ ID NO: 4063469 - DNA, 25 bp, Homo sapien
tctcctcctgccccaatatgctgta

SEQ ID NO: 4063470 - DNA, 25 bp, Homo sapien
ctcctcctgccccaatatgctgtac

SEQ ID NO: 4063471 - DNA, 25 bp, Homo sapien
atctcctcctgccccaatatgctgt

SEQ ID NO: 4063472 - DNA, 25 bp, Homo sapien
catctcctcctgccccaatatgctg

SEQ ID NO: 4063473 - DNA, 25 bp, Homo sapien
gcctgaaggcttccaattgttttct

SEQ ID NO: 4063474 - DNA, 25 bp, Homo sapien
tgcctgaaggcttccaattgttttc

SEQ ID NO: 4063475 - DNA, 25 bp, Homo sapien
ttgcctgaaggcttccaattgtttt

SEQ ID NO: 4063476 - DNA, 25 bp, Homo sapien
ctgaaggcttccaattgttttcttt

SEQ ID NO: 4063477 - DNA, 25 bp, Homo sapien
tggaaagccattggcagtaacatcc

SEQ ID NO: 4063478 - DNA, 25 bp, Homo sapien
aaggctgctcaggaactgcactcca

SEQ ID NO: 4063479 - DNA, 25 bp, Homo sapien
aacatccaaaggctgctcaggaact

SEQ ID NO: 4063480 - DNA, 25 bp, Homo sapien
ctgtggaaagccattggcagtaaca

SEQ ID NO: 4063481 - DNA, 25 bp, Homo sapien
cgcactgcggctctgttcaaatagt

SEQ ID NO: 4063482 - DNA, 25 bp, Homo sapien
ggaacaagtcgacctgggctatcag

SEQ ID NO: 4063483 - DNA, 25 bp, Homo sapien
gggctatcagccctttttgcctgca

SEQ ID NO: 4063484 - DNA, 25 bp, Homo sapien
tgccccacaaggaacaagtcgacct

SEQ ID NO: 4063485 - DNA, 25 bp, Homo sapien
tcttgaactccgaagccttttggta

SEQ ID NO: 4063486 - DNA, 25 bp, Homo sapien
attcttgaactccgaagccttttgg

SEQ ID NO: 4063487 - DNA, 25 bp, Homo sapien
aattcttgaactccgaagccttttg

SEQ ID NO: 4063488 - DNA, 25 bp, Homo sapien
aaatgcattcagtttaggtgcatgc

SEQ ID NO: 4063489 - DNA, 25 bp, Homo sapien
ctaaatacaagggaaaatgcattca

SEQ ID NO: 4063490 - DNA, 25 bp, Homo sapien
gggaaaatgcattcagtttaggtgc

SEQ ID NO: 4063491 - DNA, 25 bp, Homo sapien
ggaaaatgcattcagtttaggtgca

SEQ ID NO: 4063492 - DNA, 25 bp, Homo sapien
cacagctgacaggtagatgggctct

SEQ ID NO: 4063493 - DNA, 25 bp, Homo sapien
catcgggccatcttgtcactacagg

SEQ ID NO: 4063494 - DNA, 25 bp, Homo sapien
aacagtgccccttggcatccgagga

SEQ ID NO: 4063495 - DNA, 25 bp, Homo sapien
cactacaggacatggagcgtgttct

SEQ ID NO: 4063496 - DNA, 25 bp, Homo sapien
tactggcttctactgatgagttgtg

SEQ ID NO: 4063497 - DNA, 25 bp, Homo sapien
ggagcttccaggttactactggctt

SEQ ID NO: 4063498 - DNA, 25 bp, Homo sapien
ccaaaactctgatggtgagctgctc

SEQ ID NO: 4063499 - DNA, 25 bp, Homo sapien
tattctggtgacagtagccagtccc

SEQ ID NO: 4063500 - DNA, 25 bp, Homo sapien
caagcatcggaatgatggaggcatc

SEQ ID NO: 4063501 - DNA, 25 bp, Homo sapien
acagcaaggctgatcttcaaactca

SEQ ID NO: 4063502 - DNA, 25 bp, Homo sapien
atcggaatgatggaggcatccccac

SEQ ID NO: 4063503 - DNA, 25 bp, Homo sapien
agcaaggctgatcttcaaactcaag

SEQ ID NO: 4063504 - DNA, 25 bp, Homo sapien
tgaggtctcgtctaagtttccacac

SEQ ID NO: 4063505 - DNA, 25 bp, Homo sapien
aacacaaaaatgaggtctcgtctaa

SEQ ID NO: 4063506 - DNA, 25 bp, Homo sapien
gttcctgggacaaagatgctatcct

SEQ ID NO: 4063507 - DNA, 25 bp, Homo sapien
gggacaaagatgctatcctctttca

SEQ ID NO: 4063508 - DNA, 25 bp, Homo sapien
tgacctcagcatggctatcattgag

SEQ ID NO: 4063509 - DNA, 25 bp, Homo sapien
cctcagcatggctatcattgaggat

SEQ ID NO: 4063510 - DNA, 25 bp, Homo sapien
tatgacctcagcatggctatcattg

SEQ ID NO: 4063511 - DNA, 25 bp, Homo sapien
tggctatgacctcagcatggctatc

SEQ ID NO: 4063512 - DNA, 25 bp, Homo sapien
aggacaccaggtgaagacatatgga

SEQ ID NO: 4063513 - DNA, 25 bp, Homo sapien
gaagacatatggaagctggagaggg

SEQ ID NO: 4063514 - DNA, 25 bp, Homo sapien
ctgcggcaaagataggacaccaggt

SEQ ID NO: 4063515 - DNA, 25 bp, Homo sapien
tgcggcaaagataggacaccaggtg

SEQ ID NO: 4063516 - DNA, 25 bp, Homo sapien
tgttcccattgacacaacttccttt

SEQ ID NO: 4063517 - DNA, 25 bp, Homo sapien
ttcccattgacacaacttcctttgt

SEQ ID NO: 4063518 - DNA, 25 bp, Homo sapien
gcattttgttcctgttcccattgac

SEQ ID NO: 4063519 - DNA, 25 bp, Homo sapien
tgcattttgttcctgttcccattga

SEQ ID NO: 4063520 - DNA, 25 bp, Homo sapien
gctgagcaatctcatccgcggtcca

SEQ ID NO: 4063521 - DNA, 25 bp, Homo sapien
gggcagcctgatcccatagtgttca

SEQ ID NO: 4063522 - DNA, 25 bp, Homo sapien
tccactcatggtttggctcaggctt

SEQ ID NO: 4063523 - DNA, 25 bp, Homo sapien
ggagattgtatcttcaccaccgctg

SEQ ID NO: 4063524 - DNA, 25 bp, Homo sapien
ggcatcacaaggcagtatagtttat

SEQ ID NO: 4063525 - DNA, 25 bp, Homo sapien
ctcatttctagggaggcatcacaag

SEQ ID NO: 4063526 - DNA, 25 bp, Homo sapien
ggcagtatagtttatgaagaccacc

SEQ ID NO: 4063527 - DNA, 25 bp, Homo sapien
ctctcatttctagggaggcatcaca

SEQ ID NO: 4063528 - DNA, 25 bp, Homo sapien
gaagggactctggtttacgctggct

SEQ ID NO: 4063529 - DNA, 25 bp, Homo sapien
cagcgtgagcgcctgatccattggg

SEQ ID NO: 4063530 - DNA, 25 bp, Homo sapien
taaatgttttgctacactgggtcca

SEQ ID NO: 4063531 - DNA, 25 bp, Homo sapien
cacgtgaaacgcgtcccggaagata

SEQ ID NO: 4063532 - DNA, 25 bp, Homo sapien
ttcaggaaacgcgcctagaagaaag

SEQ ID NO: 4063533 - DNA, 25 bp, Homo sapien
tcaggaaacgcgcctagaagaaagc

SEQ ID NO: 4063534 - DNA, 25 bp, Homo sapien
cttcaggaaacgcgcctagaagaaa

SEQ ID NO: 4063535 - DNA, 25 bp, Homo sapien
cttctagggttctttatctcaggga

SEQ ID NO: 4063536 - DNA, 25 bp, Homo sapien
gggcctttgtcacccagtaactgaa

SEQ ID NO: 4063537 - DNA, 25 bp, Homo sapien
ggctgccgagtctcaatattttaaa

SEQ ID NO: 4063538 - DNA, 25 bp, Homo sapien
tctctagttcaaaggaaatgggaca

SEQ ID NO: 4063539 - DNA, 25 bp, Homo sapien
ttatagcttctcaacaccccgtgga

SEQ ID NO: 4063540 - DNA, 25 bp, Homo sapien
tgttgccataccacggaaagccttc

SEQ ID NO: 4063541 - DNA, 25 bp, Homo sapien
caaagcagttagcaaattgtgagcc

SEQ ID NO: 4063542 - DNA, 25 bp, Homo sapien
aaaaatcccatagtagtgctcacag

SEQ ID NO: 4063543 - DNA, 25 bp, Homo sapien
ggattttaccatcttattcatttaa

SEQ ID NO: 4063544 - DNA, 25 bp, Homo sapien
ttctaagagattggggacacagcag

SEQ ID NO: 4063545 - DNA, 25 bp, Homo sapien
tattctaagagattggggacacagc

SEQ ID NO: 4063546 - DNA, 25 bp, Homo sapien
ccccagacttctggcctaatgaatg

SEQ ID NO: 4063547 - DNA, 25 bp, Homo sapien
gtttaggattttaccatcttattca

SEQ ID NO: 4063548 - DNA, 25 bp, Homo sapien
tttccccagacttctggcctaatga

SEQ ID NO: 4063549 - DNA, 25 bp, Homo sapien
cattcattaggccagaagtctgggg

SEQ ID NO: 4063550 - DNA, 25 bp, Homo sapien
gctgtgtccccaatctcttagaata

SEQ ID NO: 4063551 - DNA, 25 bp, Homo sapien
gaataagatggtaaaatcctaaaca

SEQ ID NO: 4063552 - DNA, 25 bp, Homo sapien
tgctgtgtccccaatctcttagaat

SEQ ID NO: 4063553 - DNA, 25 bp, Homo sapien
ctgctgtgtccccaatctcttagaa

SEQ ID NO: 4063554 - DNA, 25 bp, Homo sapien
ttaaatgaataagatggtaaaatcc

SEQ ID NO: 4063555 - DNA, 25 bp, Homo sapien
cgtctttgcatttctgcgaaagatc

SEQ ID NO: 4063556 - DNA, 25 bp, Homo sapien
tttgacaccgcagttctgttcagcc

SEQ ID NO: 4063557 - DNA, 25 bp, Homo sapien
ttgcaagttgtataactcaggcgtc

SEQ ID NO: 4063558 - DNA, 25 bp, Homo sapien
gttgtataactcaggcgtctttgca

SEQ ID NO: 4063559 - DNA, 25 bp, Homo sapien
tttccatttgacaccgcagttctgt

SEQ ID NO: 4063560 - DNA, 25 bp, Homo sapien
caggcgtctttgcatttctgcgaaa

SEQ ID NO: 4063561 - DNA, 25 bp, Homo sapien
ggctgaacagaactgcggtgtcaaa

SEQ ID NO: 4063562 - DNA, 25 bp, Homo sapien
gacgcctgagttatacaacttgcaa

SEQ ID NO: 4063563 - DNA, 25 bp, Homo sapien
tttcgcagaaatgcaaagacgcctg

SEQ ID NO: 4063564 - DNA, 25 bp, Homo sapien
gatctttcgcagaaatgcaaagacg

SEQ ID NO: 4063565 - DNA, 25 bp, Homo sapien
acagaactgcggtgtcaaatggaaa

SEQ ID NO: 4063566 - DNA, 25 bp, Homo sapien
gcaaagacgcctgagttatacaact

SEQ ID NO: 4063567 - DNA, 25 bp, Homo sapien
gccatgaaacccgaagacaagaagg

SEQ ID NO: 4063568 - DNA, 25 bp, Homo sapien
tgccatgaaacccgaagacaagaag

SEQ ID NO: 4063569 - DNA, 25 bp, Homo sapien
cttcttgtcttcgggtttcatggca

SEQ ID NO: 4063570 - DNA, 25 bp, Homo sapien
ccttcttgtcttcgggtttcatggc

SEQ ID NO: 4063571 - DNA, 25 bp, Homo sapien
gatacactggaaagcacaacagttg

SEQ ID NO: 4063572 - DNA, 25 bp, Homo sapien
tgtagcaaccactgatacactggaa

SEQ ID NO: 4063573 - DNA, 25 bp, Homo sapien
ccgaagacaagaaggagaatgtagc

SEQ ID NO: 4063574 - DNA, 25 bp, Homo sapien
gccatgaaacccgaagacaagaagg

SEQ ID NO: 4063575 - DNA, 25 bp, Homo sapien
gaaagcacaacagttggcacttctg

SEQ ID NO: 4063576 - DNA, 25 bp, Homo sapien
gaagtacttctgtttcctgccatga

SEQ ID NO: 4063577 - DNA, 25 bp, Homo sapien
gtatcagtggttgctacattctcct

SEQ ID NO: 4063578 - DNA, 25 bp, Homo sapien
gaagtgccaactgttgtgctttcca

SEQ ID NO: 4063579 - DNA, 25 bp, Homo sapien
tgtcttcgggtttcatggcaggaaa

SEQ ID NO: 4063580 - DNA, 25 bp, Homo sapien
gttgtgctttccagtgtatcagtgg

SEQ ID NO: 4063581 - DNA, 25 bp, Homo sapien
ccttcttgtcttcgggtttcatggc

SEQ ID NO: 4063582 - DNA, 25 bp, Homo sapien
tcatggcaggaaacagaagtacttc

SEQ ID NO: 4063583 - DNA, 25 bp, Homo sapien
ctgcattgtgttggagccagggcat

SEQ ID NO: 4063584 - DNA, 25 bp, Homo sapien
atgccctggctccaacacaatgcag

SEQ ID NO: 4063585 - DNA, 25 bp, Homo sapien
gccatgtttctcacggactccaaca

SEQ ID NO: 4063586 - DNA, 25 bp, Homo sapien
tgggcattgatcgagtcgccatgtt

SEQ ID NO: 4063587 - DNA, 25 bp, Homo sapien
tcgagtcgccatgtttctcacggac

SEQ ID NO: 4063588 - DNA, 25 bp, Homo sapien
tcgccatgtttctcacggactccaa

SEQ ID NO: 4063589 - DNA, 25 bp, Homo sapien
cattgatcgagtcgccatgtttctc

SEQ ID NO: 4063590 - DNA, 25 bp, Homo sapien
gatcgagtcgccatgtttctcacgg

SEQ ID NO: 4063591 - DNA, 25 bp, Homo sapien
cgtgagaaacatggcgactcgatca

SEQ ID NO: 4063592 - DNA, 25 bp, Homo sapien
gtccgtgagaaacatggcgactcga

SEQ ID NO: 4063593 - DNA, 25 bp, Homo sapien
tgttggagtccgtgagaaacatggc

SEQ ID NO: 4063594 - DNA, 25 bp, Homo sapien
aacatggcgactcgatcaatgccca

SEQ ID NO: 4063595 - DNA, 25 bp, Homo sapien
tggagtccgtgagaaacatggcgac

SEQ ID NO: 4063596 - DNA, 25 bp, Homo sapien
gaaacatggcgactcgatcaatgcc

SEQ ID NO: 4063597 - DNA, 25 bp, Homo sapien
ccaggtctttgaaagaaacggctgc

SEQ ID NO: 4063598 - DNA, 25 bp, Homo sapien
cctgagtgtcaggagcatctctgga

SEQ ID NO: 4063599 - DNA, 25 bp, Homo sapien
caagcagcagaagggttttctttca

SEQ ID NO: 4063600 - DNA, 25 bp, Homo sapien
ggaatgatggtactcccacctcgga

SEQ ID NO: 4063601 - DNA, 25 bp, Homo sapien
cctcggagcctggtaacatgttcac

SEQ ID NO: 4063602 - DNA, 25 bp, Homo sapien
gaaatgaattcccagcaagtcctga

SEQ ID NO: 4063603 - DNA, 25 bp, Homo sapien
gaacatgttaccaggctccgaggtg

SEQ ID NO: 4063604 - DNA, 25 bp, Homo sapien
tccagagatgctcctgacactcagg

SEQ ID NO: 4063605 - DNA, 25 bp, Homo sapien
tcaggacttgctgggaattcatttc

SEQ ID NO: 4063606 - DNA, 25 bp, Homo sapien
tccgaggtgggagtaccatcattcc

SEQ ID NO: 4063607 - DNA, 25 bp, Homo sapien
caggactgatgaaatcgacctcaga

SEQ ID NO: 4063608 - DNA, 25 bp, Homo sapien
gaaagaaaacccttctgctgcttgg

SEQ ID NO: 4063609 - DNA, 25 bp, Homo sapien
gatatgcaatgcgtatactgagctg

SEQ ID NO: 4063610 - DNA, 25 bp, Homo sapien
caccgctctaaagagggtctgactg

SEQ ID NO: 4063611 - DNA, 25 bp, Homo sapien
gactgagcgctttgagctgtttgtc

SEQ ID NO: 4063612 - DNA, 25 bp, Homo sapien
tgaatgatcccatgcggcagcggca

SEQ ID NO: 4063613 - DNA, 25 bp, Homo sapien
tgcgtatactgagctgaatgatccc

SEQ ID NO: 4063614 - DNA, 25 bp, Homo sapien
aaagagggtctgactgagcgctttg

SEQ ID NO: 4063615 - DNA, 25 bp, Homo sapien
cagctcagtatacgcattgcatatc

SEQ ID NO: 4063616 - DNA, 25 bp, Homo sapien
tgccgctgccgcatgggatcattca

SEQ ID NO: 4063617 - DNA, 25 bp, Homo sapien
gggatcattcagctcagtatacgca

SEQ ID NO: 4063618 - DNA, 25 bp, Homo sapien
caaagcgctcagtcagaccctcttt

SEQ ID NO: 4063619 - DNA, 25 bp, Homo sapien
cagtcagaccctctttagagcggtg

SEQ ID NO: 4063620 - DNA, 25 bp, Homo sapien
gacaaacagctcaaagcgctcagtc

SEQ ID NO: 4063621 - DNA, 25 bp, Homo sapien
agataatgagccctttggctaaatg

SEQ ID NO: 4063622 - DNA, 25 bp, Homo sapien
catttagccaaagggctcattatct

SEQ ID NO: 4063623 - DNA, 25 bp, Homo sapien
tacattcatctgtgatcacccacag

SEQ ID NO: 4063624 - DNA, 25 bp, Homo sapien
gatcacccacagataatgagccctt

SEQ ID NO: 4063625 - DNA, 25 bp, Homo sapien
cacagataatgagccctttggctaa

SEQ ID NO: 4063626 - DNA, 25 bp, Homo sapien
cctggaagtgacttgcatcaatcct

SEQ ID NO: 4063627 - DNA, 25 bp, Homo sapien
gaagtgacttgcatcaatcctacat

SEQ ID NO: 4063628 - DNA, 25 bp, Homo sapien
gacttgcatcaatcctacattcatc

SEQ ID NO: 4063629 - DNA, 25 bp, Homo sapien
taggattgatgcaagtcacttccag

SEQ ID NO: 4063630 - DNA, 25 bp, Homo sapien
tagccaaagggctcattatctgtgg

SEQ ID NO: 4063631 - DNA, 25 bp, Homo sapien
catttagccaaagggctcattatct

SEQ ID NO: 4063632 - DNA, 25 bp, Homo sapien
cagatgaatgtaggattgatgcaag

SEQ ID NO: 4063633 - DNA, 25 bp, Homo sapien
ctgtgggtgatcacagatgaatgta

SEQ ID NO: 4063634 - DNA, 25 bp, Homo sapien
caaagggctcattatctgtgggtga

SEQ ID NO: 4063635 - DNA, 25 bp, Homo sapien
gatgatatctgtgtggcaaaagctg

SEQ ID NO: 4063636 - DNA, 25 bp, Homo sapien
aactcgcaaaattcttgatgatatc

SEQ ID NO: 4063637 - DNA, 25 bp, Homo sapien
cgcaaaattcttgatgatatctgtg

SEQ ID NO: 4063638 - DNA, 25 bp, Homo sapien
aagctgttgaatgccctccacctcg

SEQ ID NO: 4063639 - DNA, 25 bp, Homo sapien
ggaccacagccaggctccttgacaa

SEQ ID NO: 4063640 - DNA, 25 bp, Homo sapien
gcaaaagctgttgaatgccctccac

SEQ ID NO: 4063641 - DNA, 25 bp, Homo sapien
cagatatcatcaagaattttgcgag

SEQ ID NO: 4063642 - DNA, 25 bp, Homo sapien
cgaggtggagggcattcaacagctt

SEQ ID NO: 4063643 - DNA, 25 bp, Homo sapien
ggtggagggcattcaacagcttttg

SEQ ID NO: 4063644 - DNA, 25 bp, Homo sapien
cagcttttgccacacagatatcatc

SEQ ID NO: 4063645 - DNA, 25 bp, Homo sapien
ttgtcaaggagcctggctgtggtcc

SEQ ID NO: 4063646 - DNA, 25 bp, Homo sapien
cacagatatcatcaagaattttgcg

SEQ ID NO: 4063647 - DNA, 25 bp, Homo sapien
ctgccagaaacgaacctctttgaaa

SEQ ID NO: 4063648 - DNA, 25 bp, Homo sapien
tgccagaaacgaacctctttgaaac

SEQ ID NO: 4063649 - DNA, 25 bp, Homo sapien
cagaaacgaacctctttgaaactga

SEQ ID NO: 4063650 - DNA, 25 bp, Homo sapien
ccagaaacgaacctctttgaaactg

SEQ ID NO: 4063651 - DNA, 25 bp, Homo sapien
cagtttcaaagaggttcgtttctgg

SEQ ID NO: 4063652 - DNA, 25 bp, Homo sapien
tttcaaagaggttcgtttctggcag

SEQ ID NO: 4063653 - DNA, 25 bp, Homo sapien
tcagtttcaaagaggttcgtttctg

SEQ ID NO: 4063654 - DNA, 25 bp, Homo sapien
gtttcaaagaggttcgtttctggca

SEQ ID NO: 4063655 - DNA, 25 bp, Homo sapien
ccttccggcgaatcaacatggtaga

SEQ ID NO: 4063656 - DNA, 25 bp, Homo sapien
cgaatcaacatggtagaagagcttg

SEQ ID NO: 4063657 - DNA, 25 bp, Homo sapien
tccggcgaatcaacatggtagaaga

SEQ ID NO: 4063658 - DNA, 25 bp, Homo sapien
agcctacgatgttgacttcacccca

SEQ ID NO: 4063659 - DNA, 25 bp, Homo sapien
gccaagcctacgatgttgacttcac

SEQ ID NO: 4063660 - DNA, 25 bp, Homo sapien
cacccttccggcgaatcaacatggt

SEQ ID NO: 4063661 - DNA, 25 bp, Homo sapien
catattacaggcagttacaaggtca

SEQ ID NO: 4063662 - DNA, 25 bp, Homo sapien
tgaccttgtaactgcctgtaatatg

SEQ ID NO: 4063663 - DNA, 25 bp, Homo sapien
gtgaagtcaacatcgtaggcttggc

SEQ ID NO: 4063664 - DNA, 25 bp, Homo sapien
accatgttgattcgccggaagggtg

SEQ ID NO: 4063665 - DNA, 25 bp, Homo sapien
gggtgaagtcaacatcgtaggcttg

SEQ ID NO: 4063666 - DNA, 25 bp, Homo sapien
tctaccatgttgattcgccggaagg

SEQ ID NO: 4063667 - DNA, 25 bp, Homo sapien
caagctcttctaccatgttgattcg

SEQ ID NO: 4063668 - DNA, 25 bp, Homo sapien
tcttctaccatgttgattcgccgga

SEQ ID NO: 4063669 - DNA, 25 bp, Homo sapien
catcgaccgggtttatgaaattgga

SEQ ID NO: 4063670 - DNA, 25 bp, Homo sapien
attggacgccagttccggaatgagg

SEQ ID NO: 4063671 - DNA, 25 bp, Homo sapien
tatgaaattggacgccagttccgga

SEQ ID NO: 4063672 - DNA, 25 bp, Homo sapien
gactatcacgatctcatggaaatca

SEQ ID NO: 4063673 - DNA, 25 bp, Homo sapien
ttggtggcatcgaccgggtttatga

SEQ ID NO: 4063674 - DNA, 25 bp, Homo sapien
atgcttgtggttggtggcatcgacc

SEQ ID NO: 4063675 - DNA, 25 bp, Homo sapien
ccggaactggcgtccaatttcataa

SEQ ID NO: 4063676 - DNA, 25 bp, Homo sapien
tccaatttcataaacccggtcgatg

SEQ ID NO: 4063677 - DNA, 25 bp, Homo sapien
tgatttccatgagatcgtgatagtc

SEQ ID NO: 4063678 - DNA, 25 bp, Homo sapien
aatcccctcattccggaactggcgt

SEQ ID NO: 4063679 - DNA, 25 bp, Homo sapien
ttcataaacccggtcgatgccacca

SEQ ID NO: 4063680 - DNA, 25 bp, Homo sapien
ggtcgatgccaccaaccacaagcat

SEQ ID NO: 4063681 - DNA, 25 bp, Homo sapien
tcttacgtggattagatctgattta

SEQ ID NO: 4063682 - DNA, 25 bp, Homo sapien
gaagaaagagcctaatctgtctgtg

SEQ ID NO: 4063683 - DNA, 25 bp, Homo sapien
ctgtctgtggaagttggaaataagc

SEQ ID NO: 4063684 - DNA, 25 bp, Homo sapien
agaaagagcctaatctgtctgtgga

SEQ ID NO: 4063685 - DNA, 25 bp, Homo sapien
tacgtggattagatctgatttaagt

SEQ ID NO: 4063686 - DNA, 25 bp, Homo sapien
aaagtcttacgtggattagatctga

SEQ ID NO: 4063687 - DNA, 25 bp, Homo sapien
tccacagacagattaggctctttct

SEQ ID NO: 4063688 - DNA, 25 bp, Homo sapien
cacagacagattaggctctttcttc

SEQ ID NO: 4063689 - DNA, 25 bp, Homo sapien
taaatcagatctaatccacgtaaga

SEQ ID NO: 4063690 - DNA, 25 bp, Homo sapien
tcagatctaatccacgtaagacttt

SEQ ID NO: 4063691 - DNA, 25 bp, Homo sapien
gcttatttccaacttccacagacag

SEQ ID NO: 4063692 - DNA, 25 bp, Homo sapien
acttaaatcagatctaatccacgta

SEQ ID NO: 4063693 - DNA, 25 bp, Homo sapien
gcctttcatcacttatcacaacgag

SEQ ID NO: 4063694 - DNA, 25 bp, Homo sapien
tcacttatcacaacgagctggacat

SEQ ID NO: 4063695 - DNA, 25 bp, Homo sapien
tgaacttatatatgagaattgctcc

SEQ ID NO: 4063696 - DNA, 25 bp, Homo sapien
gctggacatgaacttatatatgaga

SEQ ID NO: 4063697 - DNA, 25 bp, Homo sapien
aacgagctggacatgaacttatata

SEQ ID NO: 4063698 - DNA, 25 bp, Homo sapien
tcatcacttatcacaacgagctgga

SEQ ID NO: 4063699 - DNA, 25 bp, Homo sapien
tcgttgtgataagtgatgaaaggct

SEQ ID NO: 4063700 - DNA, 25 bp, Homo sapien
ccagctcgttgtgataagtgatgaa

SEQ ID NO: 4063701 - DNA, 25 bp, Homo sapien
tctcatatataagttcatgtccagc

SEQ ID NO: 4063702 - DNA, 25 bp, Homo sapien
atgtccagctcgttgtgataagtga

SEQ ID NO: 4063703 - DNA, 25 bp, Homo sapien
tatataagttcatgtccagctcgtt

SEQ ID NO: 4063704 - DNA, 25 bp, Homo sapien
ggagcaattctcatatataagttca

SEQ ID NO: 4063705 - DNA, 25 bp, Homo sapien
tagggccatccacatgctaatgatg

SEQ ID NO: 4063706 - DNA, 25 bp, Homo sapien
taatggacaaggtatagggccatcc

SEQ ID NO: 4063707 - DNA, 25 bp, Homo sapien
agagttccttgcctgacgtgatgag

SEQ ID NO: 4063708 - DNA, 25 bp, Homo sapien
gacgtgatgagctgccttgcaatgc

SEQ ID NO: 4063709 - DNA, 25 bp, Homo sapien
tatgagaaaggcaaacacacgtacc

SEQ ID NO: 4063710 - DNA, 25 bp, Homo sapien
tttccaaagcgtatcctgtgtcagg

SEQ ID NO: 4063711 - DNA, 25 bp, Homo sapien
tcctaatcaggacaaggtagaacag

SEQ ID NO: 4063712 - DNA, 25 bp, Homo sapien
ctcatcacgtcaggcaaggaactct

SEQ ID NO: 4063713 - DNA, 25 bp, Homo sapien
cctgacacaggatacgctttggaaa

SEQ ID NO: 4063714 - DNA, 25 bp, Homo sapien
catcattagcatgtggatggcccta

SEQ ID NO: 4063715 - DNA, 25 bp, Homo sapien
cattgcaaggcagctcatcacgtca

SEQ ID NO: 4063716 - DNA, 25 bp, Homo sapien
gaacagagacgatggcaagaaaagg

SEQ ID NO: 4063717 - DNA, 25 bp, Homo sapien
cttagatgagctgggattcctagag

SEQ ID NO: 4063718 - DNA, 25 bp, Homo sapien
caaggtatcgccagagatacttgga

SEQ ID NO: 4063719 - DNA, 25 bp, Homo sapien
gaaacaaggtatcgccagagatact

SEQ ID NO: 4063720 - DNA, 25 bp, Homo sapien
acaaggtatcgccagagatacttgg

SEQ ID NO: 4063721 - DNA, 25 bp, Homo sapien
ttcttagatgagctgggattcctag

SEQ ID NO: 4063722 - DNA, 25 bp, Homo sapien
tcttagatgagctgggattcctaga

SEQ ID NO: 4063723 - DNA, 25 bp, Homo sapien
tctaggaatcccagctcatctaaga

SEQ ID NO: 4063724 - DNA, 25 bp, Homo sapien
tccaagtatctctggcgataccttg

SEQ ID NO: 4063725 - DNA, 25 bp, Homo sapien
ccaagtatctctggcgataccttgt

SEQ ID NO: 4063726 - DNA, 25 bp, Homo sapien
ctaggaatcccagctcatctaagaa

SEQ ID NO: 4063727 - DNA, 25 bp, Homo sapien
agtatctctggcgataccttgtttc

SEQ ID NO: 4063728 - DNA, 25 bp, Homo sapien
ctctaggaatcccagctcatctaag

SEQ ID NO: 4063729 - DNA, 25 bp, Homo sapien
taacaaactgcgtcggggagacata

SEQ ID NO: 4063730 - DNA, 25 bp, Homo sapien
tcatattaataacaaactgcgtcgg

SEQ ID NO: 4063731 - DNA, 25 bp, Homo sapien
tattaataacaaactgcgtcgggga

SEQ ID NO: 4063732 - DNA, 25 bp, Homo sapien
taataacaaactgcgtcggggagac

SEQ ID NO: 4063733 - DNA, 25 bp, Homo sapien
catattaataacaaactgcgtcggg

SEQ ID NO: 4063734 - DNA, 25 bp, Homo sapien
actgcgtcggggagacataattgga

SEQ ID NO: 4063735 - DNA, 25 bp, Homo sapien
ggagacataattggagttcagggga

SEQ ID NO: 4063736 - DNA, 25 bp, Homo sapien
tcccctgaactccaattatgtctcc

SEQ ID NO: 4063737 - DNA, 25 bp, Homo sapien
ttatgtctccccgacgcagtttgtt

SEQ ID NO: 4063738 - DNA, 25 bp, Homo sapien
tccccgacgcagtttgttattaata

SEQ ID NO: 4063739 - DNA, 25 bp, Homo sapien
tatgtctccccgacgcagtttgtta

SEQ ID NO: 4063740 - DNA, 25 bp, Homo sapien
tccaattatgtctccccgacgcagt

SEQ ID NO: 4063741 - DNA, 25 bp, Homo sapien
tctccccgacgcagtttgttattaa

SEQ ID NO: 4063742 - DNA, 25 bp, Homo sapien
ccgacgcagtttgttattaatatga

SEQ ID NO: 4063743 - DNA, 25 bp, Homo sapien
aatacccagttatagacctttcttg

SEQ ID NO: 4063744 - DNA, 25 bp, Homo sapien
atacccagttatagacctttcttgg

SEQ ID NO: 4063745 - DNA, 25 bp, Homo sapien
gcctagagcaacacagcaataggct

SEQ ID NO: 4063746 - DNA, 25 bp, Homo sapien
ggtcttactggtatttgaagttaga

SEQ ID NO: 4063747 - DNA, 25 bp, Homo sapien
gtggtcttactggtatttgaagtta

SEQ ID NO: 4063748 - DNA, 25 bp, Homo sapien
tgtggtcttactggtatttgaagtt

SEQ ID NO: 4063749 - DNA, 25 bp, Homo sapien
tggtcttactggtatttgaagttag

SEQ ID NO: 4063750 - DNA, 25 bp, Homo sapien
aacttcaaataccagtaagaccaca

SEQ ID NO: 4063751 - DNA, 25 bp, Homo sapien
tctaacttcaaataccagtaagacc

SEQ ID NO: 4063752 - DNA, 25 bp, Homo sapien
taacttcaaataccagtaagaccac

SEQ ID NO: 4063753 - DNA, 25 bp, Homo sapien
ctaacttcaaataccagtaagacca

SEQ ID NO: 4063754 - DNA, 25 bp, Homo sapien
agcctattgctgtgttgctctaggc

SEQ ID NO: 4063755 - DNA, 25 bp, Homo sapien
caagaaaggtctataactgggtatt

SEQ ID NO: 4063756 - DNA, 25 bp, Homo sapien
ccaagaaaggtctataactgggtat

SEQ ID NO: 4063757 - DNA, 25 bp, Homo sapien
gctcatcttctatgatcttcgagga

SEQ ID NO: 4063758 - DNA, 25 bp, Homo sapien
aagctcatcttctatgatcttcgag

SEQ ID NO: 4063759 - DNA, 25 bp, Homo sapien
agttgcaagtcatggccaattccag

SEQ ID NO: 4063760 - DNA, 25 bp, Homo sapien
gaaagctcatcttctatgatcttcg

SEQ ID NO: 4063761 - DNA, 25 bp, Homo sapien
ctcatcttctatgatcttcgaggag

SEQ ID NO: 4063762 - DNA, 25 bp, Homo sapien
tatgatcttcgaggagagggggtga

SEQ ID NO: 4063763 - DNA, 25 bp, Homo sapien
ctcctcgaagatcatagaagatgag

SEQ ID NO: 4063764 - DNA, 25 bp, Homo sapien
ctggaattggccatgacttgcaact

SEQ ID NO: 4063765 - DNA, 25 bp, Homo sapien
cctcgaagatcatagaagatgagct

SEQ ID NO: 4063766 - DNA, 25 bp, Homo sapien
tcctcgaagatcatagaagatgagc

SEQ ID NO: 4063767 - DNA, 25 bp, Homo sapien
agatcatagaagatgagctttcccc

SEQ ID NO: 4063768 - DNA, 25 bp, Homo sapien
cgaagatcatagaagatgagctttc

SEQ ID NO: 4063769 - DNA, 25 bp, Homo sapien
ttttcgcttcgcctctctagctgtg

SEQ ID NO: 4063770 - DNA, 25 bp, Homo sapien
tttttcgcttcgcctctctagctgt

SEQ ID NO: 4063771 - DNA, 25 bp, Homo sapien
atttttcgcttcgcctctctagctg

SEQ ID NO: 4063772 - DNA, 25 bp, Homo sapien
ttcgcttcgcctctctagctgtgct

SEQ ID NO: 4063773 - DNA, 25 bp, Homo sapien
tttcgcttcgcctctctagctgtgc

SEQ ID NO: 4063774 - DNA, 25 bp, Homo sapien
cttaatcttgaaagctagatcctga

SEQ ID NO: 4063775 - DNA, 25 bp, Homo sapien
atcttctaggcatccagtgacttaa

SEQ ID NO: 4063776 - DNA, 25 bp, Homo sapien
gggattaaacctcaagctaaaatca

SEQ ID NO: 4063777 - DNA, 25 bp, Homo sapien
aaagcatgtctttaactggtttgaa

SEQ ID NO: 4063778 - DNA, 25 bp, Homo sapien
tcctgaaagcatgtctttaactggt

SEQ ID NO: 4063779 - DNA, 25 bp, Homo sapien
tctaggcatccagtgacttaatctt

SEQ ID NO: 4063780 - DNA, 25 bp, Homo sapien
aagattaagtcactggatgcctaga

SEQ ID NO: 4063781 - DNA, 25 bp, Homo sapien
ttaagtcactggatgcctagaagat

SEQ ID NO: 4063782 - DNA, 25 bp, Homo sapien
tttagcttgaggtttaatccccatc

SEQ ID NO: 4063783 - DNA, 25 bp, Homo sapien
tcaggatctagctttcaagattaag

SEQ ID NO: 4063784 - DNA, 25 bp, Homo sapien
attcaaaccagttaaagacatgctt

SEQ ID NO: 4063785 - DNA, 25 bp, Homo sapien
ccagttaaagacatgctttcaggat

SEQ ID NO: 4063786 - DNA, 25 bp, Homo sapien
cacagctagagaggcgaagcgaaaa

SEQ ID NO: 4063787 - DNA, 25 bp, Homo sapien
cagctagagaggcgaagcgaaaaat

SEQ ID NO: 4063788 - DNA, 25 bp, Homo sapien
agcacagctagagaggcgaagcgaa

SEQ ID NO: 4063789 - DNA, 25 bp, Homo sapien
gcacagctagagaggcgaagcgaaa

SEQ ID NO: 4063790 - DNA, 25 bp, Homo sapien
acagctagagaggcgaagcgaaaaa

SEQ ID NO: 4063791 - DNA, 25 bp, Homo sapien
tcagcaagaatcagcggtagaagtc

SEQ ID NO: 4063792 - DNA, 25 bp, Homo sapien
ctaagaatgctttgcactgagacag

SEQ ID NO: 4063793 - DNA, 25 bp, Homo sapien
aaggtctgggttggtcttgttctca

SEQ ID NO: 4063794 - DNA, 25 bp, Homo sapien
cctgcggcttcagtagcacaaggga

SEQ ID NO: 4063795 - DNA, 25 bp, Homo sapien
cttgttctcaagtagcctgtgtctg

SEQ ID NO: 4063796 - DNA, 25 bp, Homo sapien
gaagctactttactaaggacagtgc

SEQ ID NO: 4063797 - DNA, 25 bp, Homo sapien
gacttctaccgctgattcttgctga

SEQ ID NO: 4063798 - DNA, 25 bp, Homo sapien
cagacacaggctacttgagaacaag

SEQ ID NO: 4063799 - DNA, 25 bp, Homo sapien
tcccttgtgctactgaagccgcagg

SEQ ID NO: 4063800 - DNA, 25 bp, Homo sapien
aaagcattcttaggccaaagactgg

SEQ ID NO: 4063801 - DNA, 25 bp, Homo sapien
taggaaaagaagatctcacccaaga

SEQ ID NO: 4063802 - DNA, 25 bp, Homo sapien
tgagaacaagaccaacccagacctt

SEQ ID NO: 4063803 - DNA, 25 bp, Homo sapien
agttccatgtagacatctcactcac

SEQ ID NO: 4063804 - DNA, 25 bp, Homo sapien
gtgagtgagatgtctacatggaact

SEQ ID NO: 4063805 - DNA, 25 bp, Homo sapien
ggaagacccatacccacacaagttc

SEQ ID NO: 4063806 - DNA, 25 bp, Homo sapien
gatcacctgactgacatcaccttaa

SEQ ID NO: 4063807 - DNA, 25 bp, Homo sapien
aaaaatatagtcacctgcagcctgg

SEQ ID NO: 4063808 - DNA, 25 bp, Homo sapien
tgtagacatctcactcactgacttc

SEQ ID NO: 4063809 - DNA, 25 bp, Homo sapien
ctgactgacatcaccttaaaggtgg

SEQ ID NO: 4063810 - DNA, 25 bp, Homo sapien
agttccatgtagacatctcactcac

SEQ ID NO: 4063811 - DNA, 25 bp, Homo sapien
ggtcttccccattgaccttcagctg

SEQ ID NO: 4063812 - DNA, 25 bp, Homo sapien
ggctgcaggtgactatatttttgga

SEQ ID NO: 4063813 - DNA, 25 bp, Homo sapien
gtgagtgagatgtctacatggaact

SEQ ID NO: 4063814 - DNA, 25 bp, Homo sapien
tgtcagtcaggtgatccccaggctg

SEQ ID NO: 4063815 - DNA, 25 bp, Homo sapien
gaacttgtgtgggtatgggtcttcc

SEQ ID NO: 4063816 - DNA, 25 bp, Homo sapien
cacctttaaggtgatgtcagtcagg

SEQ ID NO: 4063817 - DNA, 25 bp, Homo sapien
caaaatccgcagtcaagcaattcat

SEQ ID NO: 4063818 - DNA, 25 bp, Homo sapien
atgaattgcttgactgcggattttg

SEQ ID NO: 4063819 - DNA, 25 bp, Homo sapien
caatactacaaaatccgcagtcaag

SEQ ID NO: 4063820 - DNA, 25 bp, Homo sapien
caaaatccgcagtcaagcaattcat

SEQ ID NO: 4063821 - DNA, 25 bp, Homo sapien
ctacaaaatccgcagtcaagcaatt

SEQ ID NO: 4063822 - DNA, 25 bp, Homo sapien
atactacaaaatccgcagtcaagca

SEQ ID NO: 4063823 - DNA, 25 bp, Homo sapien
aatactacaaaatccgcagtcaagc

SEQ ID NO: 4063824 - DNA, 25 bp, Homo sapien
tacaaaatccgcagtcaagcaattc

SEQ ID NO: 4063825 - DNA, 25 bp, Homo sapien
aattgcttgactgcggattttgtag

SEQ ID NO: 4063826 - DNA, 25 bp, Homo sapien
tgcttgactgcggattttgtagtat

SEQ ID NO: 4063827 - DNA, 25 bp, Homo sapien
atgaattgcttgactgcggattttg

SEQ ID NO: 4063828 - DNA, 25 bp, Homo sapien
cttgactgcggattttgtagtattg

SEQ ID NO: 4063829 - DNA, 25 bp, Homo sapien
gcttgactgcggattttgtagtatt

SEQ ID NO: 4063830 - DNA, 25 bp, Homo sapien
gaattgcttgactgcggattttgta

SEQ ID NO: 4063831 - DNA, 25 bp, Homo sapien
accactgataatggtgtgggtcctg

SEQ ID NO: 4063832 - DNA, 25 bp, Homo sapien
cctgaggaagagagcgtggacccaa

SEQ ID NO: 4063833 - DNA, 25 bp, Homo sapien
ctgaggaagagagcgtggacccaaa

SEQ ID NO: 4063834 - DNA, 25 bp, Homo sapien
caccactgataatggtgtgggtcct

SEQ ID NO: 4063835 - DNA, 25 bp, Homo sapien
tgaggaagagagcgtggacccaaat

SEQ ID NO: 4063836 - DNA, 25 bp, Homo sapien
cacaccactgataatggtgtgggtc

SEQ ID NO: 4063837 - DNA, 25 bp, Homo sapien
ggacccacaccattatcagtggtgt

SEQ ID NO: 4063838 - DNA, 25 bp, Homo sapien
caggacccacaccattatcagtggt

SEQ ID NO: 4063839 - DNA, 25 bp, Homo sapien
aggacccacaccattatcagtggtg

SEQ ID NO: 4063840 - DNA, 25 bp, Homo sapien
ttgggtccacgctctcttcctcagg

SEQ ID NO: 4063841 - DNA, 25 bp, Homo sapien
tttgggtccacgctctcttcctcag

SEQ ID NO: 4063842 - DNA, 25 bp, Homo sapien
gacccacaccattatcagtggtgtg

SEQ ID NO: 4063843 - DNA, 25 bp, Homo sapien
tgaagagacgcctgaaagctgagaa

SEQ ID NO: 4063844 - DNA, 25 bp, Homo sapien
agctgaagagacgcctgaaagctga

SEQ ID NO: 4063845 - DNA, 25 bp, Homo sapien
gaagagacgcctgaaagctgagaag

SEQ ID NO: 4063846 - DNA, 25 bp, Homo sapien
aagagacgcctgaaagctgagaaga

SEQ ID NO: 4063847 - DNA, 25 bp, Homo sapien
cttctcagctttcaggcgtctcttc

SEQ ID NO: 4063848 - DNA, 25 bp, Homo sapien
tcagctttcaggcgtctcttcagct

SEQ ID NO: 4063849 - DNA, 25 bp, Homo sapien
ttctcagctttcaggcgtctcttca

SEQ ID NO: 4063850 - DNA, 25 bp, Homo sapien
tcttctcagctttcaggcgtctctt

SEQ ID NO: 4063851 - DNA, 25 bp, Homo sapien
tgaagagacgcctgaaagctgagaa

SEQ ID NO: 4063852 - DNA, 25 bp, Homo sapien
gagaaggaggccaaacagaaagagc

SEQ ID NO: 4063853 - DNA, 25 bp, Homo sapien
aaggaggccaaacagaaagagctca

SEQ ID NO: 4063854 - DNA, 25 bp, Homo sapien
ctgagaagaaagtagcagagaagga

SEQ ID NO: 4063855 - DNA, 25 bp, Homo sapien
aagagacgcctgaaagctgagaaga

SEQ ID NO: 4063856 - DNA, 25 bp, Homo sapien
cctgaaagctgagaagaaagtagca

SEQ ID NO: 4063857 - DNA, 25 bp, Homo sapien
tcttctcagctttcaggcgtctctt

SEQ ID NO: 4063858 - DNA, 25 bp, Homo sapien
tgagctctttctgtttggcctcctt

SEQ ID NO: 4063859 - DNA, 25 bp, Homo sapien
tactttcttctcagctttcaggcgt

SEQ ID NO: 4063860 - DNA, 25 bp, Homo sapien
ttctcagctttcaggcgtctcttca

SEQ ID NO: 4063861 - DNA, 25 bp, Homo sapien
tccttctctgctactttcttctcag

SEQ ID NO: 4063862 - DNA, 25 bp, Homo sapien
gctctttctgtttggcctccttctc

SEQ ID NO: 4063863 - DNA, 25 bp, Homo sapien
tgtactatactgctttgcacaccgt

SEQ ID NO: 4063864 - DNA, 25 bp, Homo sapien
taggggaggtctccttgagtgctaa

SEQ ID NO: 4063865 - DNA, 25 bp, Homo sapien
ctaatgctgacagccattcttggag

SEQ ID NO: 4063866 - DNA, 25 bp, Homo sapien
tgttgtctaagtcaggctccagtgg

SEQ ID NO: 4063867 - DNA, 25 bp, Homo sapien
tactgctttgcacaccgttctattt

SEQ ID NO: 4063868 - DNA, 25 bp, Homo sapien
cacaccgttctattttgttgtctaa

SEQ ID NO: 4063869 - DNA, 25 bp, Homo sapien
ttagcactcaaggagacctccccta

SEQ ID NO: 4063870 - DNA, 25 bp, Homo sapien
cactggagcctgacttagacaacaa

SEQ ID NO: 4063871 - DNA, 25 bp, Homo sapien
caaaatagaacggtgtgcaaagcag

SEQ ID NO: 4063872 - DNA, 25 bp, Homo sapien
tagacaacaaaatagaacggtgtgc

SEQ ID NO: 4063873 - DNA, 25 bp, Homo sapien
tccaagaatggctgtcagcattagt

SEQ ID NO: 4063874 - DNA, 25 bp, Homo sapien
gtgtgcaaagcagtatagtacaggg

SEQ ID NO: 4063875 - DNA, 25 bp, Homo sapien
ttcactcgtccaagtcacataattg

SEQ ID NO: 4063876 - DNA, 25 bp, Homo sapien
tgagaagttaattcactcgtccaag

SEQ ID NO: 4063877 - DNA, 25 bp, Homo sapien
cacataattgacaagtgtgttggaa

SEQ ID NO: 4063878 - DNA, 25 bp, Homo sapien
tgttggaatttagtcccaggcagcc

SEQ ID NO: 4063879 - DNA, 25 bp, Homo sapien
tcgtccaagtcacataattgacaag

SEQ ID NO: 4063880 - DNA, 25 bp, Homo sapien
gaagttaattcactcgtccaagtca

SEQ ID NO: 4063881 - DNA, 25 bp, Homo sapien
cacttgtcaattatgtgacttggac

SEQ ID NO: 4063882 - DNA, 25 bp, Homo sapien
aattccaacacacttgtcaattatg

SEQ ID NO: 4063883 - DNA, 25 bp, Homo sapien
ggctgcctgggactaaattccaaca

SEQ ID NO: 4063884 - DNA, 25 bp, Homo sapien
caattatgtgacttggacgagtgaa

SEQ ID NO: 4063885 - DNA, 25 bp, Homo sapien
tgacttggacgagtgaattaacttc

SEQ ID NO: 4063886 - DNA, 25 bp, Homo sapien
ttggacgagtgaattaacttctcac

SEQ ID NO: 4063887 - DNA, 25 bp, Homo sapien
caatctgtttagtttctggtttcag

SEQ ID NO: 4063888 - DNA, 25 bp, Homo sapien
gtaaagatatccctccctacaccaa

SEQ ID NO: 4063889 - DNA, 25 bp, Homo sapien
cctacaccaatctgtttagtttctg

SEQ ID NO: 4063890 - DNA, 25 bp, Homo sapien
ggtttcagatagcaaattcagacta

SEQ ID NO: 4063891 - DNA, 25 bp, Homo sapien
tatttgattatgttcagcggtttga

SEQ ID NO: 4063892 - DNA, 25 bp, Homo sapien
gtttgaaagaatgatccataaattg

SEQ ID NO: 4063893 - DNA, 25 bp, Homo sapien
gctcagagttgtccgcattactttg

SEQ ID NO: 4063894 - DNA, 25 bp, Homo sapien
cagctcagagttgtccgcattactt

SEQ ID NO: 4063895 - DNA, 25 bp, Homo sapien
cagagttgtccgcattactttggtt

SEQ ID NO: 4063896 - DNA, 25 bp, Homo sapien
ctcagagttgtccgcattactttgg

SEQ ID NO: 4063897 - DNA, 25 bp, Homo sapien
agctcagagttgtccgcattacttt

SEQ ID NO: 4063898 - DNA, 25 bp, Homo sapien
agagttgtccgcattactttggttt

SEQ ID NO: 4063899 - DNA, 25 bp, Homo sapien
ccaaagtaatgcggacaactctgag

SEQ ID NO: 4063900 - DNA, 25 bp, Homo sapien
aagtaatgcggacaactctgagctg

SEQ ID NO: 4063901 - DNA, 25 bp, Homo sapien
aaaccaaagtaatgcggacaactct

SEQ ID NO: 4063902 - DNA, 25 bp, Homo sapien
caaagtaatgcggacaactctgagc

SEQ ID NO: 4063903 - DNA, 25 bp, Homo sapien
aaccaaagtaatgcggacaactctg

SEQ ID NO: 4063904 - DNA, 25 bp, Homo sapien
aaagtaatgcggacaactctgagct

SEQ ID NO: 4063905 - DNA, 25 bp, Homo sapien
caatttatggatcattctttcaaac

SEQ ID NO: 4063906 - DNA, 25 bp, Homo sapien
tagtctgaatttgctatctgaaacc

SEQ ID NO: 4063907 - DNA, 25 bp, Homo sapien
tgaaaccagaaactaaacagattgg

SEQ ID NO: 4063908 - DNA, 25 bp, Homo sapien
tcaaaccgctgaacataatcaaata

SEQ ID NO: 4063909 - DNA, 25 bp, Homo sapien
ttggtgtagggagggatatctttac

SEQ ID NO: 4063910 - DNA, 25 bp, Homo sapien
gaaactaaacagattggtgtaggga

SEQ ID NO: 4063911 - DNA, 25 bp, Homo sapien
tttcacagcgcctcacaaggacaag

SEQ ID NO: 4063912 - DNA, 25 bp, Homo sapien
tcacagggaactgcgactgggtcaa

SEQ ID NO: 4063913 - DNA, 25 bp, Homo sapien
tgcgcaaaacctcctgggcagagtg

SEQ ID NO: 4063914 - DNA, 25 bp, Homo sapien
tgggtcaacttgctcctttcacagc

SEQ ID NO: 4063915 - DNA, 25 bp, Homo sapien
tgttgacgcaagctgctgtaaggct

SEQ ID NO: 4063916 - DNA, 25 bp, Homo sapien
gcgcctcacaaggacaagtcatttt

SEQ ID NO: 4063917 - DNA, 25 bp, Homo sapien
gctgtgaaaggagcaagttgaccca

SEQ ID NO: 4063918 - DNA, 25 bp, Homo sapien
ttgacccagtcgcagttccctgtga

SEQ ID NO: 4063919 - DNA, 25 bp, Homo sapien
taacaagccttacagcagcttgcgt

SEQ ID NO: 4063920 - DNA, 25 bp, Homo sapien
cactctgcccaggaggttttgcgca

SEQ ID NO: 4063921 - DNA, 25 bp, Homo sapien
aaaatgacttgtccttgtgaggcgc

SEQ ID NO: 4063922 - DNA, 25 bp, Homo sapien
acttgtccttgtgaggcgctgtgaa

SEQ ID NO: 4063923 - DNA, 25 bp, Homo sapien
ggtaatcattagttccagggtgctc

SEQ ID NO: 4063924 - DNA, 25 bp, Homo sapien
gtggtggtaatcattagttccaggg

SEQ ID NO: 4063925 - DNA, 25 bp, Homo sapien
taatcattagttccagggtgctctg

SEQ ID NO: 4063926 - DNA, 25 bp, Homo sapien
ggtggtaatcattagttccagggtg

SEQ ID NO: 4063927 - DNA, 25 bp, Homo sapien
atcattagttccagggtgctctgcc

SEQ ID NO: 4063928 - DNA, 25 bp, Homo sapien
gtaatcattagttccagggtgctct

SEQ ID NO: 4063929 - DNA, 25 bp, Homo sapien
gcagagcaccctggaactaatgatt

SEQ ID NO: 4063930 - DNA, 25 bp, Homo sapien
ccctggaactaatgattaccaccac

SEQ ID NO: 4063931 - DNA, 25 bp, Homo sapien
caccctggaactaatgattaccacc

SEQ ID NO: 4063932 - DNA, 25 bp, Homo sapien
gagcaccctggaactaatgattacc

SEQ ID NO: 4063933 - DNA, 25 bp, Homo sapien
ggcagagcaccctggaactaatgat

SEQ ID NO: 4063934 - DNA, 25 bp, Homo sapien
agagcaccctggaactaatgattac

SEQ ID NO: 4063935 - DNA, 25 bp, Homo sapien
agttgtagcacagagagtgttacag

SEQ ID NO: 4063936 - DNA, 25 bp, Homo sapien
tacagttgtagcacagagagtgtta

SEQ ID NO: 4063937 - DNA, 25 bp, Homo sapien
cagttgtagcacagagagtgttaca

SEQ ID NO: 4063938 - DNA, 25 bp, Homo sapien
cagttacagttgtagcacagagagt

SEQ ID NO: 4063939 - DNA, 25 bp, Homo sapien
tgtcagttacagttgtagcacagag

SEQ ID NO: 4063940 - DNA, 25 bp, Homo sapien
gttacagttgtagcacagagagtgt

SEQ ID NO: 4063941 - DNA, 25 bp, Homo sapien
tgctatcagttaagacagtcttaag

SEQ ID NO: 4063942 - DNA, 25 bp, Homo sapien
gacagtcttaagttaaatgggacta

SEQ ID NO: 4063943 - DNA, 25 bp, Homo sapien
gttgctatcagttaagacagtctta

SEQ ID NO: 4063944 - DNA, 25 bp, Homo sapien
taagacagtcttaagttaaatggga

SEQ ID NO: 4063945 - DNA, 25 bp, Homo sapien
gggttgctatcagttaagacagtct

SEQ ID NO: 4063946 - DNA, 25 bp, Homo sapien
cagggttgctatcagttaagacagt

SEQ ID NO: 4063947 - DNA, 25 bp, Homo sapien
gactgtcttaactgatagcaaccct

SEQ ID NO: 4063948 - DNA, 25 bp, Homo sapien
actgtcttaactgatagcaaccctg

SEQ ID NO: 4063949 - DNA, 25 bp, Homo sapien
cttaagactgtcttaactgatagca

SEQ ID NO: 4063950 - DNA, 25 bp, Homo sapien
tagtcccatttaacttaagactgtc

SEQ ID NO: 4063951 - DNA, 25 bp, Homo sapien
agactgtcttaactgatagcaaccc

SEQ ID NO: 4063952 - DNA, 25 bp, Homo sapien
taagactgtcttaactgatagcaac

SEQ ID NO: 4063953 - DNA, 25 bp, Homo sapien
aacactctctgtgctacaactgtaa

SEQ ID NO: 4063954 - DNA, 25 bp, Homo sapien
ctgtaacactctctgtgctacaact

SEQ ID NO: 4063955 - DNA, 25 bp, Homo sapien
tctctgtgctacaactgtaactgac

SEQ ID NO: 4063956 - DNA, 25 bp, Homo sapien
cactctctgtgctacaactgtaact

SEQ ID NO: 4063957 - DNA, 25 bp, Homo sapien
tctgtgctacaactgtaactgacaa

SEQ ID NO: 4063958 - DNA, 25 bp, Homo sapien
tgtaacactctctgtgctacaactg

SEQ ID NO: 4063959 - DNA, 25 bp, Homo sapien
gggaagcgccgcgaggttcccacca

SEQ ID NO: 4063960 - DNA, 25 bp, Homo sapien
cctttgcggtaggagagtctgggct

SEQ ID NO: 4063961 - DNA, 25 bp, Homo sapien
aaagcctttgcggtaggagagtctg

SEQ ID NO: 4063962 - DNA, 25 bp, Homo sapien
gtgtcgctgcgagtctttaaagcct

SEQ ID NO: 4063963 - DNA, 25 bp, Homo sapien
aagcgccgcgaggttcccaccaagg

SEQ ID NO: 4063964 - DNA, 25 bp, Homo sapien
ctttaaagcctttgcggtaggagag

SEQ ID NO: 4063965 - DNA, 25 bp, Homo sapien
ttggtgggaacctcgcggcgcttcc

SEQ ID NO: 4063966 - DNA, 25 bp, Homo sapien
aaggctttaaagactcgcagcgaca

SEQ ID NO: 4063967 - DNA, 25 bp, Homo sapien
cagactctcctaccgcaaaggcttt

SEQ ID NO: 4063968 - DNA, 25 bp, Homo sapien
agccggcaagaaggccccggcacag

SEQ ID NO: 4063969 - DNA, 25 bp, Homo sapien
ccttggtgggaacctcgcggcgctt

SEQ ID NO: 4063970 - DNA, 25 bp, Homo sapien
tctcctaccgcaaaggctttaaaga

SEQ ID NO: 4063971 - DNA, 25 bp, Homo sapien
ccgtgcaggcggccgaggtgaaagt

SEQ ID NO: 4063972 - DNA, 25 bp, Homo sapien
tgcaggcggccgaggtgaaagtgga

SEQ ID NO: 4063973 - DNA, 25 bp, Homo sapien
gcaggcggccgaggtgaaagtggat

SEQ ID NO: 4063974 - DNA, 25 bp, Homo sapien
gtgcaggcggccgaggtgaaagtgg

SEQ ID NO: 4063975 - DNA, 25 bp, Homo sapien
cgtgcaggcggccgaggtgaaagtg

SEQ ID NO: 4063976 - DNA, 25 bp, Homo sapien
atccactttcacctcggccgcctgc

SEQ ID NO: 4063977 - DNA, 25 bp, Homo sapien
cactttcacctcggccgcctgcacg

SEQ ID NO: 4063978 - DNA, 25 bp, Homo sapien
ccactttcacctcggccgcctgcac

SEQ ID NO: 4063979 - DNA, 25 bp, Homo sapien
actttcacctcggccgcctgcacgg

SEQ ID NO: 4063980 - DNA, 25 bp, Homo sapien
tccactttcacctcggccgcctgca

SEQ ID NO: 4063981 - DNA, 25 bp, Homo sapien
tggcagcgagccgaaactgagcaag

SEQ ID NO: 4063982 - DNA, 25 bp, Homo sapien
gcaggcggccgaggtgaaagtggat

SEQ ID NO: 4063983 - DNA, 25 bp, Homo sapien
aagtggatggcagcgagccgaaact

SEQ ID NO: 4063984 - DNA, 25 bp, Homo sapien
aaagtggatggcagcgagccgaaac

SEQ ID NO: 4063985 - DNA, 25 bp, Homo sapien
gtgcaggcggccgaggtgaaagtgg

SEQ ID NO: 4063986 - DNA, 25 bp, Homo sapien
gcagcgagccgaaactgagcaagaa

SEQ ID NO: 4063987 - DNA, 25 bp, Homo sapien
atccactttcacctcggccgcctgc

SEQ ID NO: 4063988 - DNA, 25 bp, Homo sapien
agtttcggctcgctgccatccactt

SEQ ID NO: 4063989 - DNA, 25 bp, Homo sapien
tcttgctcagtttcggctcgctgcc

SEQ ID NO: 4063990 - DNA, 25 bp, Homo sapien
gtttcggctcgctgccatccacttt

SEQ ID NO: 4063991 - DNA, 25 bp, Homo sapien
cttgctcagtttcggctcgctgcca

SEQ ID NO: 4063992 - DNA, 25 bp, Homo sapien
ttcttgctcagtttcggctcgctgc

SEQ ID NO: 4063993 - DNA, 25 bp, Homo sapien
actctgttcgtgagggacgacggca

SEQ ID NO: 4063994 - DNA, 25 bp, Homo sapien
gaggcctcgggtgatttcatctcca

SEQ ID NO: 4063995 - DNA, 25 bp, Homo sapien
gtacatcctggactgcgtggagcgc

SEQ ID NO: 4063996 - DNA, 25 bp, Homo sapien
tcttctagtagtgctcggcgtcaga

SEQ ID NO: 4063997 - DNA, 25 bp, Homo sapien
ggaggacccggaggccgcggatagc

SEQ ID NO: 4063998 - DNA, 25 bp, Homo sapien
gcctcgcggatatctgcgcgggtgg

SEQ ID NO: 4063999 - DNA, 25 bp, Homo sapien
tcccagaagctcaagcggaaggcgg

SEQ ID NO: 4064000 - DNA, 25 bp, Homo sapien
tggggttgggatctttctcctggct

SEQ ID NO: 4064001 - DNA, 25 bp, Homo sapien
cctgagcctagggtcagtataagct

SEQ ID NO: 4064002 - DNA, 25 bp, Homo sapien
tcagagcaaggagatgttatacttt

SEQ ID NO: 4064003 - DNA, 25 bp, Homo sapien
gaaagtaaatcagaccctgagccta

SEQ ID NO: 4064004 - DNA, 25 bp, Homo sapien
actttgacccatgagacctgtgaga

SEQ ID NO: 4064005 - DNA, 25 bp, Homo sapien
ctaggaatttatcccgtagatatac

SEQ ID NO: 4064006 - DNA, 25 bp, Homo sapien
gaatttatcccgtagatatactcag

SEQ ID NO: 4064007 - DNA, 25 bp, Homo sapien
gatgacatttataacgtatattccc

SEQ ID NO: 4064008 - DNA, 25 bp, Homo sapien
cgtatattcccttaaacatggcagt

SEQ ID NO: 4064009 - DNA, 25 bp, Homo sapien
tggccccagcttggtcagttctgaa

SEQ ID NO: 4064010 - DNA, 25 bp, Homo sapien
aagggccttcctagctccagagttg

SEQ ID NO: 4064011 - DNA, 25 bp, Homo sapien
gggtgaatgagcacgtcctaggctt

SEQ ID NO: 4064012 - DNA, 25 bp, Homo sapien
attgtggtacgtggcccagatctgc

SEQ ID NO: 4064013 - DNA, 25 bp, Homo sapien
tactatagtcaattatacacacata

SEQ ID NO: 4064014 - DNA, 25 bp, Homo sapien
tgtagcttctaatattctattggaa

SEQ ID NO: 4064015 - DNA, 25 bp, Homo sapien
agtccagtgtgattggaatgcagag

SEQ ID NO: 4064016 - DNA, 25 bp, Homo sapien
tatacatacacatctgacatgaata

SEQ ID NO: 4064017 - DNA, 25 bp, Homo sapien
gaggcataggccatttcaggcagca

SEQ ID NO: 4064018 - DNA, 25 bp, Homo sapien
gaatggaacccttgctatagtagtg

SEQ ID NO: 4064019 - DNA, 25 bp, Homo sapien
taaaacgcgcacacaactctagaga

SEQ ID NO: 4064020 - DNA, 25 bp, Homo sapien
tgaggccttgaacacggattatccc

SEQ ID NO: 4064021 - DNA, 25 bp, Homo sapien
gaagtgctatggagttaatgcccct

SEQ ID NO: 4064022 - DNA, 25 bp, Homo sapien
catgtgccactatcaggaatcctgc

SEQ ID NO: 4064023 - DNA, 25 bp, Homo sapien
ggaattcgagggtgcctacccagct

SEQ ID NO: 4064024 - DNA, 25 bp, Homo sapien
taatgcccctgtatgggaattcgag

SEQ ID NO: 4064025 - DNA, 25 bp, Homo sapien
gtcctgagttgcttgaagcccctac

SEQ ID NO: 4064026 - DNA, 25 bp, Homo sapien
ctgcatttgagtcctgagttgcttg

SEQ ID NO: 4064027 - DNA, 25 bp, Homo sapien
tggcaggcccgtgtagacccctcaa

SEQ ID NO: 4064028 - DNA, 25 bp, Homo sapien
gttcctgtggcaggcccgtgtagac

SEQ ID NO: 4064029 - DNA, 25 bp, Homo sapien
tccagagaagagcacatggagccca

SEQ ID NO: 4064030 - DNA, 25 bp, Homo sapien
cctggaggcttaaaaatggacaggc

SEQ ID NO: 4064031 - DNA, 25 bp, Homo sapien
cagtacctgcgaccagataggagca

SEQ ID NO: 4064032 - DNA, 25 bp, Homo sapien
gaagcaattgtagcccatctgttga

SEQ ID NO: 4064033 - DNA, 25 bp, Homo sapien
gtgaaatcaggataaccgttctctc

SEQ ID NO: 4064034 - DNA, 25 bp, Homo sapien
ttatcacgttaaccggacaatcaaa

SEQ ID NO: 4064035 - DNA, 25 bp, Homo sapien
cagtgttttcctagtggtgaaatca

SEQ ID NO: 4064036 - DNA, 25 bp, Homo sapien
gtttatcacgttaaccggacaatca

SEQ ID NO: 4064037 - DNA, 25 bp, Homo sapien
agtgccccgcagctatgtcagtctc

SEQ ID NO: 4064038 - DNA, 25 bp, Homo sapien
aaaacaggctgtgtgcgccggctca

SEQ ID NO: 4064039 - DNA, 25 bp, Homo sapien
tggaggaatctccactcgggctatt

SEQ ID NO: 4064040 - DNA, 25 bp, Homo sapien
gagagatcgctacactctactccag

SEQ ID NO: 4064041 - DNA, 25 bp, Homo sapien
caaagctttgtggtgaacctttcat

SEQ ID NO: 4064042 - DNA, 25 bp, Homo sapien
caagttctggggctactcccaggtc

SEQ ID NO: 4064043 - DNA, 25 bp, Homo sapien
cttcacgccacactccaagttctgg

SEQ ID NO: 4064044 - DNA, 25 bp, Homo sapien
gatagagctcattcctatcaaagct

SEQ ID NO: 4064045 - DNA, 25 bp, Homo sapien
tcgaaactccagtccagggcctttc

SEQ ID NO: 4064046 - DNA, 25 bp, Homo sapien
gaaactccagtccagggcctttcca

SEQ ID NO: 4064047 - DNA, 25 bp, Homo sapien
gcagagcctggcagatctcgtccca

SEQ ID NO: 4064048 - DNA, 25 bp, Homo sapien
caaaatgttcgatatgtcaaactga

SEQ ID NO: 4064049 - DNA, 25 bp, Homo sapien
cctttgcaaaatgttcgatatgtca

SEQ ID NO: 4064050 - DNA, 25 bp, Homo sapien
gggtcccattcagcaagcagagcct

SEQ ID NO: 4064051 - DNA, 25 bp, Homo sapien
gccagaagggagtcggagtatctaa

SEQ ID NO: 4064052 - DNA, 25 bp, Homo sapien
ggctcttgacctgtggtactcccga

SEQ ID NO: 4064053 - DNA, 25 bp, Homo sapien
tactcccgagccagagtgttctttg

SEQ ID NO: 4064054 - DNA, 25 bp, Homo sapien
ggctcacatggaacctgaagggatc

SEQ ID NO: 4064055 - DNA, 25 bp, Homo sapien
tcatgcccgctggaagaatgtgagc

SEQ ID NO: 4064056 - DNA, 25 bp, Homo sapien
gattggatgccacccaacagttgca

SEQ ID NO: 4064057 - DNA, 25 bp, Homo sapien
ctaccaataaattcatgggctccat

SEQ ID NO: 4064058 - DNA, 25 bp, Homo sapien
tgcatctggtctctcatttgggtcg

SEQ ID NO: 4064059 - DNA, 25 bp, Homo sapien
agcaatatcagggaatgggttcctc

SEQ ID NO: 4064060 - DNA, 25 bp, Homo sapien
tttctggtagcaatatcagggaatg

SEQ ID NO: 4064061 - DNA, 25 bp, Homo sapien
gagtccatgtgatgaatgtctgttt

SEQ ID NO: 4064062 - DNA, 25 bp, Homo sapien
ttgagtccatgtgatgaatgtctgt

SEQ ID NO: 4064063 - DNA, 25 bp, Homo sapien
gataatgctggccatatttgttctc

SEQ ID NO: 4064064 - DNA, 25 bp, Homo sapien
cccatgaagataatgctggccatat

SEQ ID NO: 4064065 - DNA, 25 bp, Homo sapien
gaaaaacaaacccatgaagataatg

SEQ ID NO: 4064066 - DNA, 25 bp, Homo sapien
aacaaacccatgaagataatgctgg

SEQ ID NO: 4064067 - DNA, 25 bp, Homo sapien
tgcccctgggtttgatctttttctg

SEQ ID NO: 4064068 - DNA, 25 bp, Homo sapien
agatgctgggactggtcatgcccct

SEQ ID NO: 4064069 - DNA, 25 bp, Homo sapien
tggtcatgcccctgggtttgatctt

SEQ ID NO: 4064070 - DNA, 25 bp, Homo sapien
tgagtcagatgctgggactggtcat

SEQ ID NO: 4064071 - DNA, 25 bp, Homo sapien
acaacacaggcacagtatagcacag

SEQ ID NO: 4064072 - DNA, 25 bp, Homo sapien
cggtccccagctcttgggatgtcac

SEQ ID NO: 4064073 - DNA, 25 bp, Homo sapien
ccagctcttgggatgtcaccgtatt

SEQ ID NO: 4064074 - DNA, 25 bp, Homo sapien
caggcacagtatagcacagaatgcc

SEQ ID NO: 4064075 - DNA, 25 bp, Homo sapien
ttaccatggttctgacaggtaatga

SEQ ID NO: 4064076 - DNA, 25 bp, Homo sapien
agaattggcaaaagcgctgggccta

SEQ ID NO: 4064077 - DNA, 25 bp, Homo sapien
ctttctctttaccatggttctgaca

SEQ ID NO: 4064078 - DNA, 25 bp, Homo sapien
tggcaaaagcgctgggcctagtctt

SEQ ID NO: 4064079 - DNA, 25 bp, Homo sapien
ttgaaaccatgattggaggatatcc

SEQ ID NO: 4064080 - DNA, 25 bp, Homo sapien
tgttctctggcagctttatcaggga

SEQ ID NO: 4064081 - DNA, 25 bp, Homo sapien
gctttatcagggaaagggtcatgtt

SEQ ID NO: 4064082 - DNA, 25 bp, Homo sapien
gaggatatccttttgactctggtta

SEQ ID NO: 4064083 - DNA, 25 bp, Homo sapien
cacctgaagtgccctccaaattcat

SEQ ID NO: 4064084 - DNA, 25 bp, Homo sapien
tcataaaggattatagcctgcaggg

SEQ ID NO: 4064085 - DNA, 25 bp, Homo sapien
aactactggcacctctaatctagaa

SEQ ID NO: 4064086 - DNA, 25 bp, Homo sapien
agtattttactgcagttctcagcca

SEQ ID NO: 4064087 - DNA, 25 bp, Homo sapien
catacaaaatccagtgaatccacag

SEQ ID NO: 4064088 - DNA, 25 bp, Homo sapien
ttttgtcacatagactaccttccat

SEQ ID NO: 4064089 - DNA, 25 bp, Homo sapien
ctaactggctgatatattaattctc

SEQ ID NO: 4064090 - DNA, 25 bp, Homo sapien
tatattaattctctcactgtatgaa

SEQ ID NO: 4064091 - DNA, 25 bp, Homo sapien
tgtaatgcacttgggaattgtctcc

SEQ ID NO: 4064092 - DNA, 25 bp, Homo sapien
aactctgaagccataggaatgtttt

SEQ ID NO: 4064093 - DNA, 25 bp, Homo sapien
caattccgagcacatagagtcctgt

SEQ ID NO: 4064094 - DNA, 25 bp, Homo sapien
tatacagctgttcctggtaagtaaa

SEQ ID NO: 4064095 - DNA, 25 bp, Homo sapien
cacggatatatgatagtctaggcaa

SEQ ID NO: 4064096 - DNA, 25 bp, Homo sapien
gcagcaaaaagtaccacccaggaca

SEQ ID NO: 4064097 - DNA, 25 bp, Homo sapien
ccactgtggtggcagcaaaaagtac

SEQ ID NO: 4064098 - DNA, 25 bp, Homo sapien
gtggtggcagcaaaaagtaccaccc

SEQ ID NO: 4064099 - DNA, 25 bp, Homo sapien
agcaaaaagtaccacccaggacagc

SEQ ID NO: 4064100 - DNA, 25 bp, Homo sapien
tcagtgaaggtccaggcagcaatct

SEQ ID NO: 4064101 - DNA, 25 bp, Homo sapien
ggtcagtgaaggtccaggcagcaat

SEQ ID NO: 4064102 - DNA, 25 bp, Homo sapien
aaggtccaggcagcaatcttagcat

SEQ ID NO: 4064103 - DNA, 25 bp, Homo sapien
agtgaaggtccaggcagcaatctta

SEQ ID NO: 4064104 - DNA, 25 bp, Homo sapien
tgtgcctggctttatgtactgtgtc

SEQ ID NO: 4064105 - DNA, 25 bp, Homo sapien
ggctgatgttgctgcagcacccttc

SEQ ID NO: 4064106 - DNA, 25 bp, Homo sapien
gctgcagcacccttcacaggcagag

SEQ ID NO: 4064107 - DNA, 25 bp, Homo sapien
tgcctttatactgggctgactttga

SEQ ID NO: 4064108 - DNA, 25 bp, Homo sapien
tgcctgtgaccagataggaactctg

SEQ ID NO: 4064109 - DNA, 25 bp, Homo sapien
ggttgctctgaagccctttcctgca

SEQ ID NO: 4064110 - DNA, 25 bp, Homo sapien
cagagaggctctgcttggtggcata

SEQ ID NO: 4064111 - DNA, 25 bp, Homo sapien
ctatttggagagacatgtgctgcag

SEQ ID NO: 4064112 - DNA, 25 bp, Homo sapien
ctatcacatttaccggacaatcaaa

SEQ ID NO: 4064113 - DNA, 25 bp, Homo sapien
agtgttttcctagttgtgtaatcgg

SEQ ID NO: 4064114 - DNA, 25 bp, Homo sapien
taatcgggataacagttctctccaa

SEQ ID NO: 4064115 - DNA, 25 bp, Homo sapien
atctatcacatttaccggacaatca

SEQ ID NO: 4064116 - DNA, 25 bp, Homo sapien
cacctgaagtgccgtccaaattcat

SEQ ID NO: 4064117 - DNA, 25 bp, Homo sapien
ggacttcacggagaccagcaagcaa

SEQ ID NO: 4064118 - DNA, 25 bp, Homo sapien
tggacttcacggagaccagcaagca

SEQ ID NO: 4064119 - DNA, 25 bp, Homo sapien
ctggacttcacggagaccagcaagc

SEQ ID NO: 4064120 - DNA, 25 bp, Homo sapien
tattccagttgttgggaaatagggc

SEQ ID NO: 4064121 - DNA, 25 bp, Homo sapien
gaagatacagatatgaaagagggaa

SEQ ID NO: 4064122 - DNA, 25 bp, Homo sapien
gaagagagcaccagtcccagggtat

SEQ ID NO: 4064123 - DNA, 25 bp, Homo sapien
aaagagggaagagagcaccagtccc

SEQ ID NO: 4064124 - DNA, 25 bp, Homo sapien
gctgagtaaggtccataggagcacc

SEQ ID NO: 4064125 - DNA, 25 bp, Homo sapien
gactagcgggccatcaagaaggaag

SEQ ID NO: 4064126 - DNA, 25 bp, Homo sapien
gttcaaagtgacctctaggctgcag

SEQ ID NO: 4064127 - DNA, 25 bp, Homo sapien
tcgtagcctcgaattggagccaaat

SEQ ID NO: 4064128 - DNA, 25 bp, Homo sapien
tatatgatactcagacggtggtgac

SEQ ID NO: 4064129 - DNA, 25 bp, Homo sapien
tttgagcactcactgggtttcagct

SEQ ID NO: 4064130 - DNA, 25 bp, Homo sapien
gcagcattcccatggccagttgtga

SEQ ID NO: 4064131 - DNA, 25 bp, Homo sapien
tatcaagttcccacaccgagcagtg

SEQ ID NO: 4064132 - DNA, 25 bp, Homo sapien
gccatctggcgttcaagacttcccg

SEQ ID NO: 4064133 - DNA, 25 bp, Homo sapien
tctggcgttcaagacttcccgctga

SEQ ID NO: 4064134 - DNA, 25 bp, Homo sapien
tggggcttggatctgccccttgaaa

SEQ ID NO: 4064135 - DNA, 25 bp, Homo sapien
ggcgttcaagacttcccgctgagcc

SEQ ID NO: 4064136 - DNA, 25 bp, Homo sapien
tttcatcagatgtatttttaaagag

SEQ ID NO: 4064137 - DNA, 25 bp, Homo sapien
atcagatgtatttttaaagaggcac

SEQ ID NO: 4064138 - DNA, 25 bp, Homo sapien
cagtatttcatcagatgtattttta

SEQ ID NO: 4064139 - DNA, 25 bp, Homo sapien
ttacagtatttcatcagatgtattt

SEQ ID NO: 4064140 - DNA, 25 bp, Homo sapien
ctctgtgagaagaacaggtaggcag

SEQ ID NO: 4064141 - DNA, 25 bp, Homo sapien
aacaggtaggcaggccagctttccc

SEQ ID NO: 4064142 - DNA, 25 bp, Homo sapien
ggtaggcaggccagctttcccctgg

SEQ ID NO: 4064143 - DNA, 25 bp, Homo sapien
agaagaacaggtaggcaggccagct

SEQ ID NO: 4064144 - DNA, 25 bp, Homo sapien
cagactctgcaataacaggcccagg

SEQ ID NO: 4064145 - DNA, 25 bp, Homo sapien
cagggtattagcacctcctcgtggc

SEQ ID NO: 4064146 - DNA, 25 bp, Homo sapien
tcactcggtcccctgtgagaggcca

SEQ ID NO: 4064147 - DNA, 25 bp, Homo sapien
gattgtagagcatccttcactcggt

SEQ ID NO: 4064148 - DNA, 25 bp, Homo sapien
taatacacggaagggctgatacaag

SEQ ID NO: 4064149 - DNA, 25 bp, Homo sapien
gaatacaggaatgatgcaaggcagc

SEQ ID NO: 4064150 - DNA, 25 bp, Homo sapien
tctgagccaaagagttgggaagcac

SEQ ID NO: 4064151 - DNA, 25 bp, Homo sapien
cccaggtagttagcatcatgattga

SEQ ID NO: 4064152 - DNA, 25 bp, Homo sapien
gttgctagttcttctgctcgttgga

SEQ ID NO: 4064153 - DNA, 25 bp, Homo sapien
agttcttctgctcgttggatgccca

SEQ ID NO: 4064154 - DNA, 25 bp, Homo sapien
ctgttgccgaatgccgtgttgctag

SEQ ID NO: 4064155 - DNA, 25 bp, Homo sapien
gccgtgttgctagttcttctgctcg

SEQ ID NO: 4064156 - DNA, 25 bp, Homo sapien
tcctgtgctctttgcgtgcaagttt

SEQ ID NO: 4064157 - DNA, 25 bp, Homo sapien
ccacctcgtggatctaggccctttt

SEQ ID NO: 4064158 - DNA, 25 bp, Homo sapien
taggcccttttctgttcgcttctgc

SEQ ID NO: 4064159 - DNA, 25 bp, Homo sapien
cctgtgctctttgcgtgcaagtttc

SEQ ID NO: 4064160 - DNA, 25 bp, Homo sapien
gtagagaaacttaacatcagttacc

SEQ ID NO: 4064161 - DNA, 25 bp, Homo sapien
agagaaacttaacatcagttaccat

SEQ ID NO: 4064162 - DNA, 25 bp, Homo sapien
tagagaaacttaacatcagttacca

SEQ ID NO: 4064163 - DNA, 25 bp, Homo sapien
cgtagagaaacttaacatcagttac

SEQ ID NO: 4064164 - DNA, 25 bp, Homo sapien
taggaccgagataacggagccaggc

SEQ ID NO: 4064165 - DNA, 25 bp, Homo sapien
gaatcctagcttctccacagaaggg

SEQ ID NO: 4064166 - DNA, 25 bp, Homo sapien
cttttaacagctacttaggaccgag

SEQ ID NO: 4064167 - DNA, 25 bp, Homo sapien
taatagaagtcagccaacgaacctg

SEQ ID NO: 4064168 - DNA, 25 bp, Homo sapien
aacaatatgggaacagaacacactg

SEQ ID NO: 4064169 - DNA, 25 bp, Homo sapien
tgcactttgtggttggagagttatc

SEQ ID NO: 4064170 - DNA, 25 bp, Homo sapien
gtaataggcctattgaactgaacaa

SEQ ID NO: 4064171 - DNA, 25 bp, Homo sapien
cgtcttgatttccaagtaataggcc

SEQ ID NO: 4064172 - DNA, 25 bp, Homo sapien
agaggtgacacagcacctcttgcag

SEQ ID NO: 4064173 - DNA, 25 bp, Homo sapien
gaggtgacacagcacctcttgcagc

SEQ ID NO: 4064174 - DNA, 25 bp, Homo sapien
aggtgacacagcacctcttgcagct

SEQ ID NO: 4064175 - DNA, 25 bp, Homo sapien
cagaggtgacacagcacctcttgca

SEQ ID NO: 4064176 - DNA, 25 bp, Homo sapien
ttttatgtgcttgatatggagctca

SEQ ID NO: 4064177 - DNA, 25 bp, Homo sapien
ggagctcagataatgtatctctcag

SEQ ID NO: 4064178 - DNA, 25 bp, Homo sapien
tgtgcttgatatggagctcagataa

SEQ ID NO: 4064179 - DNA, 25 bp, Homo sapien
gatatggagctcagataatgtatct

SEQ ID NO: 4064180 - DNA, 25 bp, Homo sapien
gggttttatgtttgatctctgcatg

SEQ ID NO: 4064181 - DNA, 25 bp, Homo sapien
catataagccctttggtagagaaag

SEQ ID NO: 4064182 - DNA, 25 bp, Homo sapien
caggagaatgatggccatttttatc

SEQ ID NO: 4064183 - DNA, 25 bp, Homo sapien
ggggaaagtcattctagcaggagaa

SEQ ID NO: 4064184 - DNA, 25 bp, Homo sapien
tgtaactagagtgaccaactcatcc

SEQ ID NO: 4064185 - DNA, 25 bp, Homo sapien
aggaagccctacagtcctaggcaac

SEQ ID NO: 4064186 - DNA, 25 bp, Homo sapien
taacactgaatgtcctgtgttccag

SEQ ID NO: 4064187 - DNA, 25 bp, Homo sapien
taggcaaccaggacaattacagatc

SEQ ID NO: 4064188 - DNA, 25 bp, Homo sapien
tttagggcaggtctcctgatgacaa

SEQ ID NO: 4064189 - DNA, 25 bp, Homo sapien
ttttagggcaggtctcctgatgaca

SEQ ID NO: 4064190 - DNA, 25 bp, Homo sapien
ctcctctttctttatgatactttta

SEQ ID NO: 4064191 - DNA, 25 bp, Homo sapien
tgtataaacggagtctgcccagctc

SEQ ID NO: 4064192 - DNA, 25 bp, Homo sapien
ctgtataaacggagtctgcccagct

SEQ ID NO: 4064193 - DNA, 25 bp, Homo sapien
agctcctcccgagcttggtgtgcag

SEQ ID NO: 4064194 - DNA, 25 bp, Homo sapien
caggactaatcagccttgacccctg

SEQ ID NO: 4064195 - DNA, 25 bp, Homo sapien
tagggcatctggtattccaaggtgg

SEQ ID NO: 4064196 - DNA, 25 bp, Homo sapien
gcctagggcatctggtattccaagg

SEQ ID NO: 4064197 - DNA, 25 bp, Homo sapien
ccatcccaggactaatcagccttga

SEQ ID NO: 4064198 - DNA, 25 bp, Homo sapien
ggtggtagctggttgcccagccacc

SEQ ID NO: 4064199 - DNA, 25 bp, Homo sapien
gttgcccagccaccgactgaggatg

SEQ ID NO: 4064200 - DNA, 25 bp, Homo sapien
ggatgtctaaaagcaaccttgttac

SEQ ID NO: 4064201 - DNA, 25 bp, Homo sapien
cgactgaggatgtctaaaagcaacc

SEQ ID NO: 4064202 - DNA, 25 bp, Homo sapien
ggtgctgtatggaaggaacctttcc

SEQ ID NO: 4064203 - DNA, 25 bp, Homo sapien
tgcttccagccacggatgtcgcaga

SEQ ID NO: 4064204 - DNA, 25 bp, Homo sapien
tttctcaggctcactacacaccctg

SEQ ID NO: 4064205 - DNA, 25 bp, Homo sapien
actccctagcgacatcacactcgga

SEQ ID NO: 4064206 - DNA, 25 bp, Homo sapien
gatgtagggtctaccccacactctg

SEQ ID NO: 4064207 - DNA, 25 bp, Homo sapien
tcagatgtagggtctaccccacact

SEQ ID NO: 4064208 - DNA, 25 bp, Homo sapien
tgatggattcagatgtagggtctac

SEQ ID NO: 4064209 - DNA, 25 bp, Homo sapien
gattcagatgtagggtctaccccac

SEQ ID NO: 4064210 - DNA, 25 bp, Homo sapien
atcatctggccatgaggaacctgtg

SEQ ID NO: 4064211 - DNA, 25 bp, Homo sapien
ggccatgaggaacctgtgctcagtc

SEQ ID NO: 4064212 - DNA, 25 bp, Homo sapien
acacaggctgggcaatttcagccac

SEQ ID NO: 4064213 - DNA, 25 bp, Homo sapien
ggctgggcaatttcagccacgtccc

SEQ ID NO: 4064214 - DNA, 25 bp, Homo sapien
tgcagtcggtttggtccatgaggca

SEQ ID NO: 4064215 - DNA, 25 bp, Homo sapien
tccttgcagtcggtttggtccatga

SEQ ID NO: 4064216 - DNA, 25 bp, Homo sapien
actccttgcagtcggtttggtccat

SEQ ID NO: 4064217 - DNA, 25 bp, Homo sapien
cagtcggtttggtccatgaggcaca

SEQ ID NO: 4064218 - DNA, 25 bp, Homo sapien
ttgaaggagcaagagctacattgcc

SEQ ID NO: 4064219 - DNA, 25 bp, Homo sapien
gaaggagcaagagctacattgccac

SEQ ID NO: 4064220 - DNA, 25 bp, Homo sapien
cgtttcatcttttggagaacaggta

SEQ ID NO: 4064221 - DNA, 25 bp, Homo sapien
ccgtttcatcttttggagaacaggt

SEQ ID NO: 4064222 - DNA, 25 bp, Homo sapien
caaggaagtttccttccatccctca

SEQ ID NO: 4064223 - DNA, 25 bp, Homo sapien
tcaaggaagtttccttccatccctc

SEQ ID NO: 4064224 - DNA, 25 bp, Homo sapien
gcaatgtcataaatttgttctgatg

SEQ ID NO: 4064225 - DNA, 25 bp, Homo sapien
ttccgcctctattgcaatgtcataa

SEQ ID NO: 4064226 - DNA, 25 bp, Homo sapien
ttgcaatgtcataaatttgttctga

SEQ ID NO: 4064227 - DNA, 25 bp, Homo sapien
cttccgcctctattgcaatgtcata

SEQ ID NO: 4064228 - DNA, 25 bp, Homo sapien
gatagtgcagcagctaaagtcttgg

SEQ ID NO: 4064229 - DNA, 25 bp, Homo sapien
tggtttcaatgaagatacgtttccc

SEQ ID NO: 4064230 - DNA, 25 bp, Homo sapien
gctgagctgttctctggatagtgca

SEQ ID NO: 4064231 - DNA, 25 bp, Homo sapien
cctctaatgcggtgttggtgaagaa

SEQ ID NO: 4064232 - DNA, 25 bp, Homo sapien
tcactatgtaatgagctacgacaat

SEQ ID NO: 4064233 - DNA, 25 bp, Homo sapien
taagttttattattggctccactaa

SEQ ID NO: 4064234 - DNA, 25 bp, Homo sapien
tcatccttctgtctaaatactggtc

SEQ ID NO: 4064235 - DNA, 25 bp, Homo sapien
actggtcccagtttgaatgctgtct

SEQ ID NO: 4064236 - DNA, 25 bp, Homo sapien
ttctgtctggcggtgcctggatcat

SEQ ID NO: 4064237 - DNA, 25 bp, Homo sapien
agatgtaacgtaagcactcagggac

SEQ ID NO: 4064238 - DNA, 25 bp, Homo sapien
taagcactcagggacattcgttctg

SEQ ID NO: 4064239 - DNA, 25 bp, Homo sapien
tcagggacattcgttctgtctggcg

SEQ ID NO: 4064240 - DNA, 25 bp, Homo sapien
tctgaagcctttattgaagtaggac

SEQ ID NO: 4064241 - DNA, 25 bp, Homo sapien
catcgagctgattttataactgttt

SEQ ID NO: 4064242 - DNA, 25 bp, Homo sapien
tggacatttagtggaaatctctgcc

SEQ ID NO: 4064243 - DNA, 25 bp, Homo sapien
tgtaaagagtgtcgctcacagagcc

SEQ ID NO: 4064244 - DNA, 25 bp, Homo sapien
ttcaatggtccaccaacagcattct

SEQ ID NO: 4064245 - DNA, 25 bp, Homo sapien
taccttcaatggtccaccaacagca

SEQ ID NO: 4064246 - DNA, 25 bp, Homo sapien
ccttcaatggtccaccaacagcatt

SEQ ID NO: 4064247 - DNA, 25 bp, Homo sapien
gtataccttcaatggtccaccaaca

SEQ ID NO: 4064248 - DNA, 25 bp, Homo sapien
ttttcagcagtagaacatagtgaat

SEQ ID NO: 4064249 - DNA, 25 bp, Homo sapien
agaacatagtgaatagagctgattg

SEQ ID NO: 4064250 - DNA, 25 bp, Homo sapien
gaacatagtgaatagagctgattgt

SEQ ID NO: 4064251 - DNA, 25 bp, Homo sapien
caattgtgctaactgcaccttgtgt

SEQ ID NO: 4064252 - DNA, 25 bp, Homo sapien
caacaattgtgctaactgcaccttg

SEQ ID NO: 4064253 - DNA, 25 bp, Homo sapien
tgctaactgcaccttgtgtatacat

SEQ ID NO: 4064254 - DNA, 25 bp, Homo sapien
catgtcaacaattgtgctaactgca

SEQ ID NO: 4064255 - DNA, 25 bp, Homo sapien
tccaccactgatgacctactgtgag

SEQ ID NO: 4064256 - DNA, 25 bp, Homo sapien
ctctgacgttagatgggtgccagga

SEQ ID NO: 4064257 - DNA, 25 bp, Homo sapien
ggtgccaggaccactttggaatgct

SEQ ID NO: 4064258 - DNA, 25 bp, Homo sapien
cccatcttagtgtgtcagacatctc

SEQ ID NO: 4064259 - DNA, 25 bp, Homo sapien
tactagatgtttcatgacgaagaga

SEQ ID NO: 4064260 - DNA, 25 bp, Homo sapien
tgacgaagagatgggttgacacaaa

SEQ ID NO: 4064261 - DNA, 25 bp, Homo sapien
tatactgtactagatgtttcatgac

SEQ ID NO: 4064262 - DNA, 25 bp, Homo sapien
gagatgggttgacacaaacactgag

SEQ ID NO: 4064263 - DNA, 25 bp, Homo sapien
tcttcactcacagtggtttgtaatg

SEQ ID NO: 4064264 - DNA, 25 bp, Homo sapien
tttgtaatgaggtataacttggctg

SEQ ID NO: 4064265 - DNA, 25 bp, Homo sapien
gatctgatccgagtctttgccatat

SEQ ID NO: 4064266 - DNA, 25 bp, Homo sapien
gattttgagggcctgggatctgatc

SEQ ID NO: 4064267 - DNA, 25 bp, Homo sapien
tgggaggtacagtcaccaggacatg

SEQ ID NO: 4064268 - DNA, 25 bp, Homo sapien
tcttgacaacgaacatgaggtttcc

SEQ ID NO: 4064269 - DNA, 25 bp, Homo sapien
atgagtacccacaacacccgaatca

SEQ ID NO: 4064270 - DNA, 25 bp, Homo sapien
aaataccgtgattggcagcttgagc

SEQ ID NO: 4064271 - DNA, 25 bp, Homo sapien
ggaaatcagatgactttttattgtt

SEQ ID NO: 4064272 - DNA, 25 bp, Homo sapien
gaggaaatcagatgactttttattg

SEQ ID NO: 4064273 - DNA, 25 bp, Homo sapien
aggaaatcagatgactttttattgt

SEQ ID NO: 4064274 - DNA, 25 bp, Homo sapien
tgaggaaatcagatgactttttatt

SEQ ID NO: 4064275 - DNA, 25 bp, Homo sapien
tagcccttagatttggtaacctcag

SEQ ID NO: 4064276 - DNA, 25 bp, Homo sapien
tagaatccagaaaagctcaaaggag

SEQ ID NO: 4064277 - DNA, 25 bp, Homo sapien
gaaggaagcccttagtgactgtgca

SEQ ID NO: 4064278 - DNA, 25 bp, Homo sapien
caggttacagttttagggacacaca

SEQ ID NO: 4064279 - DNA, 25 bp, Homo sapien
ccctcttgttatgccttttctgttc

SEQ ID NO: 4064280 - DNA, 25 bp, Homo sapien
cctcttgttatgccttttctgttct

SEQ ID NO: 4064281 - DNA, 25 bp, Homo sapien
tacctttctagagcatgcgtatgcc

SEQ ID NO: 4064282 - DNA, 25 bp, Homo sapien
tgggacattagatccagtggaccac

SEQ ID NO: 4064283 - DNA, 25 bp, Homo sapien
gtatgccgcattgcttcaaagctga

SEQ ID NO: 4064284 - DNA, 25 bp, Homo sapien
tatacccagttcacagtgcagcaac

SEQ ID NO: 4064285 - DNA, 25 bp, Homo sapien
tgctgtccccgtactcctcatggca

SEQ ID NO: 4064286 - DNA, 25 bp, Homo sapien
gagctgtgctgtctgactggttttt

SEQ ID NO: 4064287 - DNA, 25 bp, Homo sapien
ggcagacactttcatctttaaatcc

SEQ ID NO: 4064288 - DNA, 25 bp, Homo sapien
tcctcatggcagacactttcatctt

SEQ ID NO: 4064289 - DNA, 25 bp, Homo sapien
ctggccaggtccaggattgttttgc

SEQ ID NO: 4064290 - DNA, 25 bp, Homo sapien
aatgcagttacacttcaagcttaga

SEQ ID NO: 4064291 - DNA, 25 bp, Homo sapien
tgtggctccctcctcttgagtgtga

SEQ ID NO: 4064292 - DNA, 25 bp, Homo sapien
tctaaggtggcacccctaatctctt

SEQ ID NO: 4064293 - DNA, 25 bp, Homo sapien
ggaagaccgtgtggcaaactctaag

SEQ ID NO: 4064294 - DNA, 25 bp, Homo sapien
tgtctgaatgccttcacccgaacaa

SEQ ID NO: 4064295 - DNA, 25 bp, Homo sapien
catggctagttcaggatatgcctca

SEQ ID NO: 4064296 - DNA, 25 bp, Homo sapien
aatgcattgccctttgaggttaggc

SEQ ID NO: 4064297 - DNA, 25 bp, Homo sapien
gccttcacccgaacaataacaatag

SEQ ID NO: 4064298 - DNA, 25 bp, Homo sapien
agtatgtgtgcggtggtccagcacc

SEQ ID NO: 4064299 - DNA, 25 bp, Homo sapien
cacccatagagacccacttcaggga

SEQ ID NO: 4064300 - DNA, 25 bp, Homo sapien
agtcagctgaaaagtcaggactgag

SEQ ID NO: 4064301 - DNA, 25 bp, Homo sapien
tgaaagtcagctgaaaagtcaggac

SEQ ID NO: 4064302 - DNA, 25 bp, Homo sapien
cattcgctgtcttccaacagcggac

SEQ ID NO: 4064303 - DNA, 25 bp, Homo sapien
attcgctgtcttccaacagcggacc

SEQ ID NO: 4064304 - DNA, 25 bp, Homo sapien
tcacattcgctgtcttccaacagcg

SEQ ID NO: 4064305 - DNA, 25 bp, Homo sapien
acattcgctgtcttccaacagcgga

SEQ ID NO: 4064306 - DNA, 25 bp, Homo sapien
tcacgtagagctgcgtgtatcgtag

SEQ ID NO: 4064307 - DNA, 25 bp, Homo sapien
tcctccacatttggcgcatcacgta

SEQ ID NO: 4064308 - DNA, 25 bp, Homo sapien
tgtatcgtagcaaggcggcagcgtt

SEQ ID NO: 4064309 - DNA, 25 bp, Homo sapien
tacagatctggatactgggtcctcc

SEQ ID NO: 4064310 - DNA, 25 bp, Homo sapien
gactcctgagtcatcttggcagaac

SEQ ID NO: 4064311 - DNA, 25 bp, Homo sapien
tctggaatactgagactcctgagtc

SEQ ID NO: 4064312 - DNA, 25 bp, Homo sapien
ggaaaagcaaggaagatcaaactgt

SEQ ID NO: 4064313 - DNA, 25 bp, Homo sapien
gaaactccacaatcttgtagctgaa

SEQ ID NO: 4064314 - DNA, 25 bp, Homo sapien
cagggttagtttttgtagcctcagc

SEQ ID NO: 4064315 - DNA, 25 bp, Homo sapien
tccagggttagtttttgtagcctca

SEQ ID NO: 4064316 - DNA, 25 bp, Homo sapien
agtttttgtagcctcagctggcccg

SEQ ID NO: 4064317 - DNA, 25 bp, Homo sapien
ttagtttttgtagcctcagctggcc

SEQ ID NO: 4064318 - DNA, 25 bp, Homo sapien
ctttcggcccttgagaggaccggag

SEQ ID NO: 4064319 - DNA, 25 bp, Homo sapien
ctggtcgaaaagtgaggatcttgcc

SEQ ID NO: 4064320 - DNA, 25 bp, Homo sapien
ggtcgaaaagtgaggatcttgcccc

SEQ ID NO: 4064321 - DNA, 25 bp, Homo sapien
tcgaaaagtgaggatcttgccccct

SEQ ID NO: 4064322 - DNA, 25 bp, Homo sapien
gaaaagtgaggatcttgccccctgc

SEQ ID NO: 4064323 - DNA, 25 bp, Homo sapien
ccaggttggtcacactcagcacaca

SEQ ID NO: 4064324 - DNA, 25 bp, Homo sapien
tgaacccgcacgtcatctgttatgc

SEQ ID NO: 4064325 - DNA, 25 bp, Homo sapien
aacccgcacgtcatctgttatgctc

SEQ ID NO: 4064326 - DNA, 25 bp, Homo sapien
ctgcgggccaggttggtcacactca

SEQ ID NO: 4064327 - DNA, 25 bp, Homo sapien
agcttcactcttctggatcatctgg

SEQ ID NO: 4064328 - DNA, 25 bp, Homo sapien
ttttcccggacaggaagcttcactc

SEQ ID NO: 4064329 - DNA, 25 bp, Homo sapien
ttcactcttctggatcatctgggaa

SEQ ID NO: 4064330 - DNA, 25 bp, Homo sapien
tcccggacaggaagcttcactcttc

SEQ ID NO: 4064331 - DNA, 25 bp, Homo sapien
gtcggttcgtctggccagaaaactg

SEQ ID NO: 4064332 - DNA, 25 bp, Homo sapien
ggagtcggttcgtctggccagaaaa

SEQ ID NO: 4064333 - DNA, 25 bp, Homo sapien
gatgtcagctcccatgatggcgtct

SEQ ID NO: 4064334 - DNA, 25 bp, Homo sapien
cggtccttgttgtggcagatgtcag

SEQ ID NO: 4064335 - DNA, 25 bp, Homo sapien
tgtaaacgttatccagaaatgtcag

SEQ ID NO: 4064336 - DNA, 25 bp, Homo sapien
taacagtgagaacgttgaatctgaa

SEQ ID NO: 4064337 - DNA, 25 bp, Homo sapien
tgtgataccaggtaacatttctgga

SEQ ID NO: 4064338 - DNA, 25 bp, Homo sapien
gtggactttgtgttggccagaactc

SEQ ID NO: 4064339 - DNA, 25 bp, Homo sapien
tcatggcaatagaacttgcttgagg

SEQ ID NO: 4064340 - DNA, 25 bp, Homo sapien
catggcaatagaacttgcttgaggg

SEQ ID NO: 4064341 - DNA, 25 bp, Homo sapien
tactcatggcaatagaacttgcttg

SEQ ID NO: 4064342 - DNA, 25 bp, Homo sapien
tggcaatagaacttgcttgagggtt

SEQ ID NO: 4064343 - DNA, 25 bp, Homo sapien
ttaggctccactgtcagattgggct

SEQ ID NO: 4064344 - DNA, 25 bp, Homo sapien
gggcttgtgttacatgctgcatcaa

SEQ ID NO: 4064345 - DNA, 25 bp, Homo sapien
catcaagaggatgccttttgctacc

SEQ ID NO: 4064346 - DNA, 25 bp, Homo sapien
aggaaaaataccatccaacctgctt

SEQ ID NO: 4064347 - DNA, 25 bp, Homo sapien
actggttatttaagaggcacgtatt

SEQ ID NO: 4064348 - DNA, 25 bp, Homo sapien
tttaagaggcacgtattaaagatct

SEQ ID NO: 4064349 - DNA, 25 bp, Homo sapien
tatttaagaggcacgtattaaagat

SEQ ID NO: 4064350 - DNA, 25 bp, Homo sapien
tggttatttaagaggcacgtattaa

SEQ ID NO: 4064351 - DNA, 25 bp, Homo sapien
tctttgcataccaccctatcagtct

SEQ ID NO: 4064352 - DNA, 25 bp, Homo sapien
ccctatcagtctattgtagaacaca

SEQ ID NO: 4064353 - DNA, 25 bp, Homo sapien
agtctattgtagaacacatctgtta

SEQ ID NO: 4064354 - DNA, 25 bp, Homo sapien
ctctgaattctctttgcataccacc

SEQ ID NO: 4064355 - DNA, 25 bp, Homo sapien
aatgtttcaagttggctggtgcagc

SEQ ID NO: 4064356 - DNA, 25 bp, Homo sapien
aaggaattgaaatgttcaaggtcaa

SEQ ID NO: 4064357 - DNA, 25 bp, Homo sapien
tgaatgtttcaagttggctggtgca

SEQ ID NO: 4064358 - DNA, 25 bp, Homo sapien
tcaaggtcaattaactgtgaatgtt

SEQ ID NO: 4064359 - DNA, 25 bp, Homo sapien
gctgcattgctgtcatgtgttcgct

SEQ ID NO: 4064360 - DNA, 25 bp, Homo sapien
tgctgcattgctgtcatgtgttcgc

SEQ ID NO: 4064361 - DNA, 25 bp, Homo sapien
ctgcattgctgtcatgtgttcgctt

SEQ ID NO: 4064362 - DNA, 25 bp, Homo sapien
tcaagatgcttgattagtaccagac

SEQ ID NO: 4064363 - DNA, 25 bp, Homo sapien
atgcttgattagtaccagaccctag

SEQ ID NO: 4064364 - DNA, 25 bp, Homo sapien
gatgcttgattagtaccagacccta

SEQ ID NO: 4064365 - DNA, 25 bp, Homo sapien
aagatgcttgattagtaccagaccc

SEQ ID NO: 4064366 - DNA, 25 bp, Homo sapien
acaatctgctccacatgatgcaaat

SEQ ID NO: 4064367 - DNA, 25 bp, Homo sapien
ggtattataggatgtataccaatta

SEQ ID NO: 4064368 - DNA, 25 bp, Homo sapien
tttgtaggtattataggatgtatac

SEQ ID NO: 4064369 - DNA, 25 bp, Homo sapien
tctgctccacatgatgcaaataagt

SEQ ID NO: 4064370 - DNA, 25 bp, Homo sapien
tttttcaatcttggaagcagttctg

SEQ ID NO: 4064371 - DNA, 25 bp, Homo sapien
cacggctgcgatactgtgtcttaga

SEQ ID NO: 4064372 - DNA, 25 bp, Homo sapien
cattccccaggaggctacattttgc

SEQ ID NO: 4064373 - DNA, 25 bp, Homo sapien
ccccaggaggctacattttgcattt

SEQ ID NO: 4064374 - DNA, 25 bp, Homo sapien
ctttgctccaggaaaagtccttgtg

SEQ ID NO: 4064375 - DNA, 25 bp, Homo sapien
catcagaagtgtagtaaatgtgagt

SEQ ID NO: 4064376 - DNA, 25 bp, Homo sapien
gaaaagtccttgtgaatcattctct

SEQ ID NO: 4064377 - DNA, 25 bp, Homo sapien
caggctcctgcatcagaagtgtagt

SEQ ID NO: 4064378 - DNA, 25 bp, Homo sapien
tacacaggaactgagggcatagaca

SEQ ID NO: 4064379 - DNA, 25 bp, Homo sapien
gtcggagagcccagcgttggccaaa

SEQ ID NO: 4064380 - DNA, 25 bp, Homo sapien
tgtgcagactgtgatatggccttct

SEQ ID NO: 4064381 - DNA, 25 bp, Homo sapien
ttggaaaagtatccccacacagtcg

SEQ ID NO: 4064382 - DNA, 25 bp, Homo sapien
ggagattccgcgctcctctctcagg

SEQ ID NO: 4064383 - DNA, 25 bp, Homo sapien
cttaggagattccgcgctcctctct

SEQ ID NO: 4064384 - DNA, 25 bp, Homo sapien
taggagattccgcgctcctctctca

SEQ ID NO: 4064385 - DNA, 25 bp, Homo sapien
agattccgcgctcctctctcaggaa

SEQ ID NO: 4064386 - DNA, 25 bp, Homo sapien
ctttaatctccgtgcggggctgtcc

SEQ ID NO: 4064387 - DNA, 25 bp, Homo sapien
tttaatctccgtgcggggctgtccc

SEQ ID NO: 4064388 - DNA, 25 bp, Homo sapien
tgagaagaaaccttacccctctgag

SEQ ID NO: 4064389 - DNA, 25 bp, Homo sapien
gaacatggtcattaccctgagaaga

SEQ ID NO: 4064390 - DNA, 25 bp, Homo sapien
tagtgaatgattccttgcttcggca

SEQ ID NO: 4064391 - DNA, 25 bp, Homo sapien
gaaatgttctgcctcttagcgtcag

SEQ ID NO: 4064392 - DNA, 25 bp, Homo sapien
tctcagttgtagcttgtactcatct

SEQ ID NO: 4064393 - DNA, 25 bp, Homo sapien
tcagttgtagcttgtactcatcttt

SEQ ID NO: 4064394 - DNA, 25 bp, Homo sapien
tgcaggtagtctctcagttgtagct

SEQ ID NO: 4064395 - DNA, 25 bp, Homo sapien
ctaccactgcaggtagtctctcagt

SEQ ID NO: 4064396 - DNA, 25 bp, Homo sapien
cggaatgaaacttagacttctccta

SEQ ID NO: 4064397 - DNA, 25 bp, Homo sapien
caactcgagttgcttagtgccttca

SEQ ID NO: 4064398 - DNA, 25 bp, Homo sapien
tctggctgccagctaatccttccct

SEQ ID NO: 4064399 - DNA, 25 bp, Homo sapien
tagacttctcctatggctctggctg

SEQ ID NO: 4064400 - DNA, 25 bp, Homo sapien
ctggctgaagctcaggtcttcctct

SEQ ID NO: 4064401 - DNA, 25 bp, Homo sapien
taattcaccagatacaatgatgatg

SEQ ID NO: 4064402 - DNA, 25 bp, Homo sapien
cttgtttttcatgagcagctgcttc

SEQ ID NO: 4064403 - DNA, 25 bp, Homo sapien
ggtcttcctcttaattcaccagata

SEQ ID NO: 4064404 - DNA, 25 bp, Homo sapien
ggtggaaacctctactcagacacag

SEQ ID NO: 4064405 - DNA, 25 bp, Homo sapien
gacaatcatactcttggtggaaacc

SEQ ID NO: 4064406 - DNA, 25 bp, Homo sapien
tctttctgccctagtgtcagtgaca

SEQ ID NO: 4064407 - DNA, 25 bp, Homo sapien
cacaggatagggtctagctcccaag

SEQ ID NO: 4064408 - DNA, 25 bp, Homo sapien
atctttctgcgactccccattgttg

SEQ ID NO: 4064409 - DNA, 25 bp, Homo sapien
cgactccccattgttggtgtcttcc

SEQ ID NO: 4064410 - DNA, 25 bp, Homo sapien
ttggtgtcttccagcgtttcacatt

SEQ ID NO: 4064411 - DNA, 25 bp, Homo sapien
tgtcttccagcgtttcacatttcat

SEQ ID NO: 4064412 - DNA, 25 bp, Homo sapien
aaactggtagaaacatagatggccc

SEQ ID NO: 4064413 - DNA, 25 bp, Homo sapien
tagaaacatagatggcccttcagtt

SEQ ID NO: 4064414 - DNA, 25 bp, Homo sapien
ctggtagaaacatagatggcccttc

SEQ ID NO: 4064415 - DNA, 25 bp, Homo sapien
ggtagaaacatagatggcccttcag

SEQ ID NO: 4064416 - DNA, 25 bp, Homo sapien
gaggtaagagttgattaggtagaat

SEQ ID NO: 4064417 - DNA, 25 bp, Homo sapien
cagtcctgaaatccagctgatgctg

SEQ ID NO: 4064418 - DNA, 25 bp, Homo sapien
gcagtcctgaaatccagctgatgct

SEQ ID NO: 4064419 - DNA, 25 bp, Homo sapien
cacgcagtcctgaaatccagctgat

SEQ ID NO: 4064420 - DNA, 25 bp, Homo sapien
cttcaaagccagtaacctaattcca

SEQ ID NO: 4064421 - DNA, 25 bp, Homo sapien
gccagtaacctaattccagagagaa

SEQ ID NO: 4064422 - DNA, 25 bp, Homo sapien
caaagccagtaacctaattccagag

SEQ ID NO: 4064423 - DNA, 25 bp, Homo sapien
aagccagtaacctaattccagagag

SEQ ID NO: 4064424 - DNA, 25 bp, Homo sapien
ttatctcacggtcaaatgatgtaca

SEQ ID NO: 4064425 - DNA, 25 bp, Homo sapien
aagtgtgtagggatactccagaaga

SEQ ID NO: 4064426 - DNA, 25 bp, Homo sapien
ggctccagacccgtggcagtgtata

SEQ ID NO: 4064427 - DNA, 25 bp, Homo sapien
tgctactcaaacctctagggtagca

SEQ ID NO: 4064428 - DNA, 25 bp, Homo sapien
ccatcagtcgatatttgcaaagaat

SEQ ID NO: 4064429 - DNA, 25 bp, Homo sapien
attccatcagtcgatatttgcaaag

SEQ ID NO: 4064430 - DNA, 25 bp, Homo sapien
tttgtcttctatgttagtgtattcc

SEQ ID NO: 4064431 - DNA, 25 bp, Homo sapien
tgttagtgtattccatcagtcgata

SEQ ID NO: 4064432 - DNA, 25 bp, Homo sapien
ctggaatgtgtttaatgatgcccat

SEQ ID NO: 4064433 - DNA, 25 bp, Homo sapien
tgttgcctctgagcatcggcttaac

SEQ ID NO: 4064434 - DNA, 25 bp, Homo sapien
ttctgagcagatgtaaggataattt

SEQ ID NO: 4064435 - DNA, 25 bp, Homo sapien
gtaaggataattttgttgcctctga

SEQ ID NO: 4064436 - DNA, 25 bp, Homo sapien
ctgagcatcggcttaacatcattag

SEQ ID NO: 4064437 - DNA, 25 bp, Homo sapien
cagagggaccattggtgttcttaaa

SEQ ID NO: 4064438 - DNA, 25 bp, Homo sapien
tcgtcagcgcaaaagaaactctgtt

SEQ ID NO: 4064439 - DNA, 25 bp, Homo sapien
tcaaggtcgtagcatacaacagaac

SEQ ID NO: 4064440 - DNA, 25 bp, Homo sapien
gagacaaaactggttcagagggacc

SEQ ID NO: 4064441 - DNA, 25 bp, Homo sapien
aaaacaaactaaagcagagagagag

SEQ ID NO: 4064442 - DNA, 25 bp, Homo sapien
gcctggcccctgacttctggtttta

SEQ ID NO: 4064443 - DNA, 25 bp, Homo sapien
ggtgcctgccgccatgaatggctaa

SEQ ID NO: 4064444 - DNA, 25 bp, Homo sapien
tgctcaggcttgtgcagcggtgcaa

SEQ ID NO: 4064445 - DNA, 25 bp, Homo sapien
gaatttcagggaactggccaatcaa

SEQ ID NO: 4064446 - DNA, 25 bp, Homo sapien
tactcaagtgagttccaaagaattt

SEQ ID NO: 4064447 - DNA, 25 bp, Homo sapien
tagattagttacaagagggcagaat

SEQ ID NO: 4064448 - DNA, 25 bp, Homo sapien
tttcataatgactggcttaggccat

SEQ ID NO: 4064449 - DNA, 25 bp, Homo sapien
gaaccctcccaatgagggcaccacc

SEQ ID NO: 4064450 - DNA, 25 bp, Homo sapien
tcatctttgagtgtaagaaccctcc

SEQ ID NO: 4064451 - DNA, 25 bp, Homo sapien
tgtaagaaccctcccaatgagggca

SEQ ID NO: 4064452 - DNA, 25 bp, Homo sapien
taagaaccctcccaatgagggcacc

SEQ ID NO: 4064453 - DNA, 25 bp, Homo sapien
acacacatcattaagatttgccagt

SEQ ID NO: 4064454 - DNA, 25 bp, Homo sapien
ctagagggaccagtgaatgacttca

SEQ ID NO: 4064455 - DNA, 25 bp, Homo sapien
ttgccagtctgtcttcatccagcag

SEQ ID NO: 4064456 - DNA, 25 bp, Homo sapien
gagggaccagtgaatgacttcacac

SEQ ID NO: 4064457 - DNA, 25 bp, Homo sapien
gacatttcgctaaaattttcagaca

SEQ ID NO: 4064458 - DNA, 25 bp, Homo sapien
gtgacatttcgctaaaattttcaga

SEQ ID NO: 4064459 - DNA, 25 bp, Homo sapien
taggatgtatccttgtagtccatca

SEQ ID NO: 4064460 - DNA, 25 bp, Homo sapien
ttcagacagtcctggtaggatgtat

SEQ ID NO: 4064461 - DNA, 25 bp, Homo sapien
taatgcggaagtgaatatgaaggct

SEQ ID NO: 4064462 - DNA, 25 bp, Homo sapien
tcagattcaccgaatttgttacaat

SEQ ID NO: 4064463 - DNA, 25 bp, Homo sapien
aaagtcagcgctgattgcataagct

SEQ ID NO: 4064464 - DNA, 25 bp, Homo sapien
gaggtccccactggaaaagtcagcg

SEQ ID NO: 4064465 - DNA, 25 bp, Homo sapien
cagaaaagtcagatccagaaggctc

SEQ ID NO: 4064466 - DNA, 25 bp, Homo sapien
tcaggaagatgtttagttggcaatg

SEQ ID NO: 4064467 - DNA, 25 bp, Homo sapien
ctactggtggagaattgaacaagga

SEQ ID NO: 4064468 - DNA, 25 bp, Homo sapien
gtttagttggcaatgaaaagcttct

SEQ ID NO: 4064469 - DNA, 25 bp, Homo sapien
agtttctcaggactgagtttctcct

SEQ ID NO: 4064470 - DNA, 25 bp, Homo sapien
gcaggacagcagtggtagaactcag

SEQ ID NO: 4064471 - DNA, 25 bp, Homo sapien
gtcatccgtgtgaagtgcaggacag

SEQ ID NO: 4064472 - DNA, 25 bp, Homo sapien
tcattggatgtgtcatccgtgtgaa

SEQ ID NO: 4064473 - DNA, 25 bp, Homo sapien
tgcctgtcttctctctcctggcttt

SEQ ID NO: 4064474 - DNA, 25 bp, Homo sapien
ggtctgcaggcttgcctgtcttctc

SEQ ID NO: 4064475 - DNA, 25 bp, Homo sapien
cctgtcttctctctcctggcttttt

SEQ ID NO: 4064476 - DNA, 25 bp, Homo sapien
cttgcctgtcttctctctcctggct

SEQ ID NO: 4064477 - DNA, 25 bp, Homo sapien
tcctgggtatggctctgagctggga

SEQ ID NO: 4064478 - DNA, 25 bp, Homo sapien
ctcctgggtatggctctgagctggg

SEQ ID NO: 4064479 - DNA, 25 bp, Homo sapien
gcctcctccaggaggttagttcttc

SEQ ID NO: 4064480 - DNA, 25 bp, Homo sapien
ccaggaggttagttcttctctccat

SEQ ID NO: 4064481 - DNA, 25 bp, Homo sapien
cagagggaatgacctgagattctcc

SEQ ID NO: 4064482 - DNA, 25 bp, Homo sapien
taaaagaacataagggtgaatctcc

SEQ ID NO: 4064483 - DNA, 25 bp, Homo sapien
gactgttcccaaatgcttgtcagca

SEQ ID NO: 4064484 - DNA, 25 bp, Homo sapien
tcacagctgacattgccacacagag

SEQ ID NO: 4064485 - DNA, 25 bp, Homo sapien
tagatatctcagtccgcattctgtc

SEQ ID NO: 4064486 - DNA, 25 bp, Homo sapien
atctcagtccgcattctgtcctcat

SEQ ID NO: 4064487 - DNA, 25 bp, Homo sapien
gatatctcagtccgcattctgtcct

SEQ ID NO: 4064488 - DNA, 25 bp, Homo sapien
tatctcagtccgcattctgtcctca

SEQ ID NO: 4064489 - DNA, 25 bp, Homo sapien
ccatcaactgggaggtcaggttcaa

SEQ ID NO: 4064490 - DNA, 25 bp, Homo sapien
ccaactttgccctggtcagtgaatg

SEQ ID NO: 4064491 - DNA, 25 bp, Homo sapien
caggttcaatgaaactgtgctctcc

SEQ ID NO: 4064492 - DNA, 25 bp, Homo sapien
tgtgctcagttgagagccatcaact

SEQ ID NO: 4064493 - DNA, 25 bp, Homo sapien
gcgtgacttcggctgcagtatcttt

SEQ ID NO: 4064494 - DNA, 25 bp, Homo sapien
aagcaaaactacactctccagtttc

SEQ ID NO: 4064495 - DNA, 25 bp, Homo sapien
catggactcggtgctgcgtgacttc

SEQ ID NO: 4064496 - DNA, 25 bp, Homo sapien
ttcagatcctctttgaccgtcacca

SEQ ID NO: 4064497 - DNA, 25 bp, Homo sapien
caaccttgtgctggggcttcgggat

SEQ ID NO: 4064498 - DNA, 25 bp, Homo sapien
tctgacctgaacgtttgtatagcca

SEQ ID NO: 4064499 - DNA, 25 bp, Homo sapien
tcacacttagggtcaaactgccatc

SEQ ID NO: 4064500 - DNA, 25 bp, Homo sapien
ggcaggcccatggaccaggatacat

SEQ ID NO: 4064501 - DNA, 25 bp, Homo sapien
aaagctttagtgcatgggcaggccc

SEQ ID NO: 4064502 - DNA, 25 bp, Homo sapien
tgagatttctagatctctctggcac

SEQ ID NO: 4064503 - DNA, 25 bp, Homo sapien
gagatttctagatctctctggcaca

SEQ ID NO: 4064504 - DNA, 25 bp, Homo sapien
ttgagatttctagatctctctggca

SEQ ID NO: 4064505 - DNA, 25 bp, Homo sapien
tgatgtttacccaagtggtcttcag

SEQ ID NO: 4064506 - DNA, 25 bp, Homo sapien
gacctgattgattcccatgtgtgat

SEQ ID NO: 4064507 - DNA, 25 bp, Homo sapien
ttgctgttgacctgattgattccca

SEQ ID NO: 4064508 - DNA, 25 bp, Homo sapien
ttctattggatgtttcaagcttaca

SEQ ID NO: 4064509 - DNA, 25 bp, Homo sapien
aacggagattccaagaagacatcca

SEQ ID NO: 4064510 - DNA, 25 bp, Homo sapien
ctaaacggagattccaagaagacat

SEQ ID NO: 4064511 - DNA, 25 bp, Homo sapien
acggagattccaagaagacatccac

SEQ ID NO: 4064512 - DNA, 25 bp, Homo sapien
taaacggagattccaagaagacatc

SEQ ID NO: 4064513 - DNA, 25 bp, Homo sapien
tgaagcaaattaagtcactggtttc

SEQ ID NO: 4064514 - DNA, 25 bp, Homo sapien
aagtcactggtttccacgtcctcca

SEQ ID NO: 4064515 - DNA, 25 bp, Homo sapien
gcaaattaagtcactggtttccacg

SEQ ID NO: 4064516 - DNA, 25 bp, Homo sapien
attaagtcactggtttccacgtcct

SEQ ID NO: 4064517 - DNA, 25 bp, Homo sapien
caacactgttaaataggtccatttc

SEQ ID NO: 4064518 - DNA, 25 bp, Homo sapien
cactgttaaataggtccatttcctt

SEQ ID NO: 4064519 - DNA, 25 bp, Homo sapien
cttcaacactgttaaataggtccat

SEQ ID NO: 4064520 - DNA, 25 bp, Homo sapien
tgttaaataggtccatttccttatg

SEQ ID NO: 4064521 - DNA, 25 bp, Homo sapien
ccctcataggatgtcacagtggcaa

SEQ ID NO: 4064522 - DNA, 25 bp, Homo sapien
tagtcaatatttgactgcctgttca

SEQ ID NO: 4064523 - DNA, 25 bp, Homo sapien
cagtggcaaaagaccgcaggtactc

SEQ ID NO: 4064524 - DNA, 25 bp, Homo sapien
aagaccgcaggtactcccagaattc

SEQ ID NO: 4064525 - DNA, 25 bp, Homo sapien
ctctaaaactccttttcctgatagc

SEQ ID NO: 4064526 - DNA, 25 bp, Homo sapien
tctaaaactccttttcctgatagca

SEQ ID NO: 4064527 - DNA, 25 bp, Homo sapien
ggccagaacaggtcaatgaaggcag

SEQ ID NO: 4064528 - DNA, 25 bp, Homo sapien
cacagtgcaggcaacgtgggaacca

SEQ ID NO: 4064529 - DNA, 25 bp, Homo sapien
gtgcaggcaacgtgggaaccactgt

SEQ ID NO: 4064530 - DNA, 25 bp, Homo sapien
ctggccagaacaggtcaatgaaggc

SEQ ID NO: 4064531 - DNA, 25 bp, Homo sapien
gtaagatggtgtttgctgctgccaa

SEQ ID NO: 4064532 - DNA, 25 bp, Homo sapien
ctcccaggtgagtaagatggtgttt

SEQ ID NO: 4064533 - DNA, 25 bp, Homo sapien
tgagtaagatggtgtttgctgctgc

SEQ ID NO: 4064534 - DNA, 25 bp, Homo sapien
ttgctgctgccaaaccaaatgttca

SEQ ID NO: 4064535 - DNA, 25 bp, Homo sapien
ctccacctgtgcatgattttaattt

SEQ ID NO: 4064536 - DNA, 25 bp, Homo sapien
cctccacctgtgcatgattttaatt

SEQ ID NO: 4064537 - DNA, 25 bp, Homo sapien
tatagagactcaatttctcacactg

SEQ ID NO: 4064538 - DNA, 25 bp, Homo sapien
agtaaagtaggaataactcgagctg

SEQ ID NO: 4064539 - DNA, 25 bp, Homo sapien
aatgaggtaggagtaaagtaggaat

SEQ ID NO: 4064540 - DNA, 25 bp, Homo sapien
taactcgagctgattatagagactc

SEQ ID NO: 4064541 - DNA, 25 bp, Homo sapien
caagttggagaactcagctggttct

SEQ ID NO: 4064542 - DNA, 25 bp, Homo sapien
tccatccatagagcaaaatgtaaat

SEQ ID NO: 4064543 - DNA, 25 bp, Homo sapien
ctttgcaagttggagaactcagctg

SEQ ID NO: 4064544 - DNA, 25 bp, Homo sapien
taattgtaccccaggtggttccatc

SEQ ID NO: 4064545 - DNA, 25 bp, Homo sapien
gaagactccactacattcagcaatt

SEQ ID NO: 4064546 - DNA, 25 bp, Homo sapien
tttgctgctgtagttctacatgttt

SEQ ID NO: 4064547 - DNA, 25 bp, Homo sapien
atgatgaagactccactacattcag

SEQ ID NO: 4064548 - DNA, 25 bp, Homo sapien
cagcaatttgcccatttatgtttgg

SEQ ID NO: 4064549 - DNA, 25 bp, Homo sapien
gtattgattctctgggggctcagac

SEQ ID NO: 4064550 - DNA, 25 bp, Homo sapien
aaggtattcaagtggtgtgtttccg

SEQ ID NO: 4064551 - DNA, 25 bp, Homo sapien
ggtgtgtttccgaagtccttgtcga

SEQ ID NO: 4064552 - DNA, 25 bp, Homo sapien
tgtcgatgtttctaccccgtggaaa

SEQ ID NO: 4064553 - DNA, 25 bp, Homo sapien
ttatttgccagcagtaacatgagta

SEQ ID NO: 4064554 - DNA, 25 bp, Homo sapien
agttctcggggcagacatgtaggca

SEQ ID NO: 4064555 - DNA, 25 bp, Homo sapien
ggcagacatgtaggcactgagagaa

SEQ ID NO: 4064556 - DNA, 25 bp, Homo sapien
tctcggggcagacatgtaggcactg

SEQ ID NO: 4064557 - DNA, 25 bp, Homo sapien
gggcagacatgtaggcactgagaga

SEQ ID NO: 4064558 - DNA, 25 bp, Homo sapien
taacagctctagatggctatcaagt

SEQ ID NO: 4064559 - DNA, 25 bp, Homo sapien
gattaagagaatatggtttcccacc

SEQ ID NO: 4064560 - DNA, 25 bp, Homo sapien
ttattttggcccaactcagttgcag

SEQ ID NO: 4064561 - DNA, 25 bp, Homo sapien
aaaaggatcaattctctaacagctc

SEQ ID NO: 4064562 - DNA, 25 bp, Homo sapien
ctaatcgatgccctctatcagagct

SEQ ID NO: 4064563 - DNA, 25 bp, Homo sapien
tcaatccttttgaacagaggtttgg

SEQ ID NO: 4064564 - DNA, 25 bp, Homo sapien
gctggagcagcatcaatccttttga

SEQ ID NO: 4064565 - DNA, 25 bp, Homo sapien
aatcgatgccctctatcagagcttt

SEQ ID NO: 4064566 - DNA, 25 bp, Homo sapien
ctgatactgtggaatcatcctcaag

SEQ ID NO: 4064567 - DNA, 25 bp, Homo sapien
ggctaatgttgctctttatgggaca

SEQ ID NO: 4064568 - DNA, 25 bp, Homo sapien
tagcatcaggtttattgcagaaggc

SEQ ID NO: 4064569 - DNA, 25 bp, Homo sapien
ttatgggacataaagctgctttagc

SEQ ID NO: 4064570 - DNA, 25 bp, Homo sapien
tccaacatggatcccttccatgtcc

SEQ ID NO: 4064571 - DNA, 25 bp, Homo sapien
aaggataataataaccatcctgctc

SEQ ID NO: 4064572 - DNA, 25 bp, Homo sapien
acaacacatgtgttctacgttggct

SEQ ID NO: 4064573 - DNA, 25 bp, Homo sapien
acatgtgttctacgttggctcttcc

SEQ ID NO: 4064574 - DNA, 25 bp, Homo sapien
tcccagcgtcctcatcaatctctcc

SEQ ID NO: 4064575 - DNA, 25 bp, Homo sapien
gctgctagaacattcggtgcactgg

SEQ ID NO: 4064576 - DNA, 25 bp, Homo sapien
gaacattcggtgcactggatgcaga

SEQ ID NO: 4064577 - DNA, 25 bp, Homo sapien
tggaagattaaggactctccgctcc

SEQ ID NO: 4064578 - DNA, 25 bp, Homo sapien
acaggaggaagtgagctattgttgc

SEQ ID NO: 4064579 - DNA, 25 bp, Homo sapien
gctattgttgctacatacactcatg

SEQ ID NO: 4064580 - DNA, 25 bp, Homo sapien
ctttcttgtcgcagttttataaaca

SEQ ID NO: 4064581 - DNA, 25 bp, Homo sapien
gcattgctttcttgtcgcagtttta

SEQ ID NO: 4064582 - DNA, 25 bp, Homo sapien
gcacactgatgtagagataaccttg

SEQ ID NO: 4064583 - DNA, 25 bp, Homo sapien
taactaacacgtggtggccagaggc

SEQ ID NO: 4064584 - DNA, 25 bp, Homo sapien
gatgatcagtgggtcagcttcacaa

SEQ ID NO: 4064585 - DNA, 25 bp, Homo sapien
gacccagggtagtacactgtgcaca

SEQ ID NO: 4064586 - DNA, 25 bp, Homo sapien
tactgggccctcagcgtctgcctgt

SEQ ID NO: 4064587 - DNA, 25 bp, Homo sapien
aggtactgggccctcagcgtctgcc

SEQ ID NO: 4064588 - DNA, 25 bp, Homo sapien
gttcctccaggtactgggccctcag

SEQ ID NO: 4064589 - DNA, 25 bp, Homo sapien
gtctgcctgtctgtgacacccacac

SEQ ID NO: 4064590 - DNA, 25 bp, Homo sapien
tggcattctcacgaacataatggtt

SEQ ID NO: 4064591 - DNA, 25 bp, Homo sapien
tcaccctttcggaataatttggcat

SEQ ID NO: 4064592 - DNA, 25 bp, Homo sapien
ttctcacgaacataatggttctggt

SEQ ID NO: 4064593 - DNA, 25 bp, Homo sapien
agaggaattgcggttcaccctttcg

SEQ ID NO: 4064594 - DNA, 25 bp, Homo sapien
aaggagatcctaggcaatttgtggc

SEQ ID NO: 4064595 - DNA, 25 bp, Homo sapien
gaaaaggagatcctaggcaatttgt

SEQ ID NO: 4064596 - DNA, 25 bp, Homo sapien
tttgcttacattgagaaaaggagat

SEQ ID NO: 4064597 - DNA, 25 bp, Homo sapien
tcaggaaatgttgataacaagccca

SEQ ID NO: 4064598 - DNA, 25 bp, Homo sapien
tcacattcgagtgggtcacagggac

SEQ ID NO: 4064599 - DNA, 25 bp, Homo sapien
ctggtgatggcctgtgcagtcacat

SEQ ID NO: 4064600 - DNA, 25 bp, Homo sapien
ctgccttatgttggatgcaggtgtc

SEQ ID NO: 4064601 - DNA, 25 bp, Homo sapien
tgggctgctgccttatgttggatgc

SEQ ID NO: 4064602 - DNA, 25 bp, Homo sapien
gtgtttccactacctccagaaacag

SEQ ID NO: 4064603 - DNA, 25 bp, Homo sapien
tccagtgtttccactacctccagaa

SEQ ID NO: 4064604 - DNA, 25 bp, Homo sapien
gtttccactacctccagaaacagtg

SEQ ID NO: 4064605 - DNA, 25 bp, Homo sapien
ttccactacctccagaaacagtgtg

SEQ ID NO: 4064606 - DNA, 25 bp, Homo sapien
tagcttatctccttgtctaggttat

SEQ ID NO: 4064607 - DNA, 25 bp, Homo sapien
tgttttaatacatggctgttgcttt

SEQ ID NO: 4064608 - DNA, 25 bp, Homo sapien
tcatagcttatctccttgtctaggt

SEQ ID NO: 4064609 - DNA, 25 bp, Homo sapien
ctgttttaatacatggctgttgctt

SEQ ID NO: 4064610 - DNA, 25 bp, Homo sapien
aactgcagacctgttcttgacataa

SEQ ID NO: 4064611 - DNA, 25 bp, Homo sapien
catgcactgcagtcttaataaaagc

SEQ ID NO: 4064612 - DNA, 25 bp, Homo sapien
ttttgagtgggctgacatgcactgc

SEQ ID NO: 4064613 - DNA, 25 bp, Homo sapien
aatctggggtgcttaaactgcagac

SEQ ID NO: 4064614 - DNA, 25 bp, Homo sapien
ctatctcctccagcggtgctgtgag

SEQ ID NO: 4064615 - DNA, 25 bp, Homo sapien
caacagaaactgttctgaaaaccca

SEQ ID NO: 4064616 - DNA, 25 bp, Homo sapien
cttctatctcctccagcggtgctgt

SEQ ID NO: 4064617 - DNA, 25 bp, Homo sapien
cggtgctgtgagcaacagaaactgt

SEQ ID NO: 4064618 - DNA, 25 bp, Homo sapien
ctgttaggatacagattggctgctg

SEQ ID NO: 4064619 - DNA, 25 bp, Homo sapien
tgacaacaccatcaaggagatctgg

SEQ ID NO: 4064620 - DNA, 25 bp, Homo sapien
ttcttgctgctctgttaggatacag

SEQ ID NO: 4064621 - DNA, 25 bp, Homo sapien
gacaacaccatcaaggagatctggg

SEQ ID NO: 4064622 - DNA, 25 bp, Homo sapien
tggctcagcacgaagcagccatggg

SEQ ID NO: 4064623 - DNA, 25 bp, Homo sapien
ggctcagcacgaagcagccatgggg

SEQ ID NO: 4064624 - DNA, 25 bp, Homo sapien
caggaaagtatcagctcaatgagca

SEQ ID NO: 4064625 - DNA, 25 bp, Homo sapien
accaggaaagtatcagctcaatgag

SEQ ID NO: 4064626 - DNA, 25 bp, Homo sapien
aggaaagtatcagctcaatgagcac

SEQ ID NO: 4064627 - DNA, 25 bp, Homo sapien
ccaggaaagtatcagctcaatgagc

SEQ ID NO: 4064628 - DNA, 25 bp, Homo sapien
caaagacgatgaatttgctgaaaat

SEQ ID NO: 4064629 - DNA, 25 bp, Homo sapien
cctgagtggccttgacaaagacgat

SEQ ID NO: 4064630 - DNA, 25 bp, Homo sapien
tgatggctgcaccactcgctgcctg

SEQ ID NO: 4064631 - DNA, 25 bp, Homo sapien
gcttctgggcatggccagagagcat

SEQ ID NO: 4064632 - DNA, 25 bp, Homo sapien
cagagagtgtagcactcctcgcata

SEQ ID NO: 4064633 - DNA, 25 bp, Homo sapien
gtgtagcactcctcgcatattatag

SEQ ID NO: 4064634 - DNA, 25 bp, Homo sapien
gcatattatagtttggcccctctga

SEQ ID NO: 4064635 - DNA, 25 bp, Homo sapien
ttcttctgttcagagagtgtagcac

SEQ ID NO: 4064636 - DNA, 25 bp, Homo sapien
ggactgctgatacgactgtgtgttg

SEQ ID NO: 4064637 - DNA, 25 bp, Homo sapien
tgggactgctgatacgactgtgtgt

SEQ ID NO: 4064638 - DNA, 25 bp, Homo sapien
actgctgatacgactgtgtgttggg

SEQ ID NO: 4064639 - DNA, 25 bp, Homo sapien
ttgggactgctgatacgactgtgtg

SEQ ID NO: 4064640 - DNA, 25 bp, Homo sapien
tttgaagagtgatgatactgacggg

SEQ ID NO: 4064641 - DNA, 25 bp, Homo sapien
agagtgatgatactgacgggcttca

SEQ ID NO: 4064642 - DNA, 25 bp, Homo sapien
tgatgatactgacgggcttcattac

SEQ ID NO: 4064643 - DNA, 25 bp, Homo sapien
tactgacgggcttcattacttccac

SEQ ID NO: 4064644 - DNA, 25 bp, Homo sapien
gagcatctggcaagcaacaatagga

SEQ ID NO: 4064645 - DNA, 25 bp, Homo sapien
tgtccatggcaaataaggatgctct

SEQ ID NO: 4064646 - DNA, 25 bp, Homo sapien
catagattgtcaaactgtccatggc

SEQ ID NO: 4064647 - DNA, 25 bp, Homo sapien
gggcttatgatccagcagacccata

SEQ ID NO: 4064648 - DNA, 25 bp, Homo sapien
tttgtatgcacataaatttatccat

SEQ ID NO: 4064649 - DNA, 25 bp, Homo sapien
tatacttctaaatgtattaggtaaa

SEQ ID NO: 4064650 - DNA, 25 bp, Homo sapien
ttatatacttctaaatgtattaggt

SEQ ID NO: 4064651 - DNA, 25 bp, Homo sapien
cttctaaatgtattaggtaaatata

SEQ ID NO: 4064652 - DNA, 25 bp, Homo sapien
tataaagcacatgatgctacactgg

SEQ ID NO: 4064653 - DNA, 25 bp, Homo sapien
tccactcacttcacgtcaagcgatt

SEQ ID NO: 4064654 - DNA, 25 bp, Homo sapien
tatcctaactagtaccaaaggcttc

SEQ ID NO: 4064655 - DNA, 25 bp, Homo sapien
tagcaatcactcgaagtgtgccagc

SEQ ID NO: 4064656 - DNA, 25 bp, Homo sapien
tcacagaaagtgacgacccgttcgc

SEQ ID NO: 4064657 - DNA, 25 bp, Homo sapien
tgctggcgcggcacgctgattagaa

SEQ ID NO: 4064658 - DNA, 25 bp, Homo sapien
gaagcggcgactgcccgtcaagcat

SEQ ID NO: 4064659 - DNA, 25 bp, Homo sapien
aggtcctggtccaagtgagtgcccg

SEQ ID NO: 4064660 - DNA, 25 bp, Homo sapien
agagcccgtttgtgggtccggcaca

SEQ ID NO: 4064661 - DNA, 25 bp, Homo sapien
gaaagtggagttgcctcagttctgg

SEQ ID NO: 4064662 - DNA, 25 bp, Homo sapien
cctcagttctgggagagcccgtttg

SEQ ID NO: 4064663 - DNA, 25 bp, Homo sapien
tcagttctgggagagcccgtttgtg

SEQ ID NO: 4064664 - DNA, 25 bp, Homo sapien
tagtgaccaaactcctgcgctgggt

SEQ ID NO: 4064665 - DNA, 25 bp, Homo sapien
ggcagtgctgggagcaaccaccttt

SEQ ID NO: 4064666 - DNA, 25 bp, Homo sapien
gaggaccggctcttcattcgttacc

SEQ ID NO: 4064667 - DNA, 25 bp, Homo sapien
taatggcttgttcactggactctga

SEQ ID NO: 4064668 - DNA, 25 bp, Homo sapien
tagcacatgcacgtctgtcccagac

SEQ ID NO: 4064669 - DNA, 25 bp, Homo sapien
taaagcaggagagacctccctaggg

SEQ ID NO: 4064670 - DNA, 25 bp, Homo sapien
aatgacccgccctcaatgctggctg

SEQ ID NO: 4064671 - DNA, 25 bp, Homo sapien
gactcgaactattgtgtaccaccac

SEQ ID NO: 4064672 - DNA, 25 bp, Homo sapien
gaacagagactgtttacctctcgct

SEQ ID NO: 4064673 - DNA, 25 bp, Homo sapien
caaagcccatgtgtacctatcagta

SEQ ID NO: 4064674 - DNA, 25 bp, Homo sapien
cacattagactgcatcctgccagac

SEQ ID NO: 4064675 - DNA, 25 bp, Homo sapien
tgtaccaacgtagagaaaatagctt

SEQ ID NO: 4064676 - DNA, 25 bp, Homo sapien
cttccaaaggatgtgaacttcttgg

SEQ ID NO: 4064677 - DNA, 25 bp, Homo sapien
aggatgtgaacttcttggcttttga

SEQ ID NO: 4064678 - DNA, 25 bp, Homo sapien
gaagtgtccagatgatcaatatcag

SEQ ID NO: 4064679 - DNA, 25 bp, Homo sapien
gcctctctgtccttactgcagtggt

SEQ ID NO: 4064680 - DNA, 25 bp, Homo sapien
gtgaagcagcaggaaatcccctcgg

SEQ ID NO: 4064681 - DNA, 25 bp, Homo sapien
tgtgaagcagcaggaaatcccctcg

SEQ ID NO: 4064682 - DNA, 25 bp, Homo sapien
tcccctcggttaaagccagtacatg

SEQ ID NO: 4064683 - DNA, 25 bp, Homo sapien
ttaaagccagtacatgggctttcag

SEQ ID NO: 4064684 - DNA, 25 bp, Homo sapien
ccacagcatcaaggggaaggtcctg

SEQ ID NO: 4064685 - DNA, 25 bp, Homo sapien
tggccatgggtttgcctgacacctt

SEQ ID NO: 4064686 - DNA, 25 bp, Homo sapien
caccttcaataagtcaagttcttga

SEQ ID NO: 4064687 - DNA, 25 bp, Homo sapien
tccttgccgaccacagcatcaaggg

SEQ ID NO: 4064688 - DNA, 25 bp, Homo sapien
tagctttcagtgctgagctacttgg

SEQ ID NO: 4064689 - DNA, 25 bp, Homo sapien
cttagctttcagtgctgagctactt

SEQ ID NO: 4064690 - DNA, 25 bp, Homo sapien
ctttcagtgctgagctacttggctg

SEQ ID NO: 4064691 - DNA, 25 bp, Homo sapien
ttcagtgctgagctacttggctgca

SEQ ID NO: 4064692 - DNA, 25 bp, Homo sapien
tcccaacagtcatgtcgtcaaatgt

SEQ ID NO: 4064693 - DNA, 25 bp, Homo sapien
cagtcatgtcgtcaaatgtaatttt

SEQ ID NO: 4064694 - DNA, 25 bp, Homo sapien
tcattcccaacagtcatgtcgtcaa

SEQ ID NO: 4064695 - DNA, 25 bp, Homo sapien
tgtaattttgctcaattcacttgca

SEQ ID NO: 4064696 - DNA, 25 bp, Homo sapien
gcataagcatcagtcattcgggtat

SEQ ID NO: 4064697 - DNA, 25 bp, Homo sapien
gcatcagtcattcgggtatggtctt

SEQ ID NO: 4064698 - DNA, 25 bp, Homo sapien
tattgcataagcatcagtcattcgg

SEQ ID NO: 4064699 - DNA, 25 bp, Homo sapien
taatgttattgcataagcatcagtc

SEQ ID NO: 4064700 - DNA, 25 bp, Homo sapien
catttttgccacctaaatggagaga

SEQ ID NO: 4064701 - DNA, 25 bp, Homo sapien
atttttgccacctaaatggagagaa

SEQ ID NO: 4064702 - DNA, 25 bp, Homo sapien
ggaaccaaataagactgatggtctg

SEQ ID NO: 4064703 - DNA, 25 bp, Homo sapien
gccctctgagtaggggaaccaaata

SEQ ID NO: 4064704 - DNA, 25 bp, Homo sapien
tggtgacaacctattattttgattg

SEQ ID NO: 4064705 - DNA, 25 bp, Homo sapien
ttgaggattggcaaagggtgctcct

SEQ ID NO: 4064706 - DNA, 25 bp, Homo sapien
tgatgaacttacactccttcttcca

SEQ ID NO: 4064707 - DNA, 25 bp, Homo sapien
caaagggtgctcctgtttctggtga

SEQ ID NO: 4064708 - DNA, 25 bp, Homo sapien
ccttcttcatggactgcttgaggac

SEQ ID NO: 4064709 - DNA, 25 bp, Homo sapien
cacatagcccagtggttgtcaggaa

SEQ ID NO: 4064710 - DNA, 25 bp, Homo sapien
ttatctgaatactcggctgggctgg

SEQ ID NO: 4064711 - DNA, 25 bp, Homo sapien
gcttgaggaccatcacaacatggta

SEQ ID NO: 4064712 - DNA, 25 bp, Homo sapien
taggatatggagagtctgcaggaac

SEQ ID NO: 4064713 - DNA, 25 bp, Homo sapien
gagaagacctcctttctaggaagag

SEQ ID NO: 4064714 - DNA, 25 bp, Homo sapien
tgtctccatgaggaacagcccatgt

SEQ ID NO: 4064715 - DNA, 25 bp, Homo sapien
ctgaagaacagtagagctaggcctt

SEQ ID NO: 4064716 - DNA, 25 bp, Homo sapien
gatccaggggtgactgacgaaaacc

SEQ ID NO: 4064717 - DNA, 25 bp, Homo sapien
tgacgaaaaccgtcttaggtgttga

SEQ ID NO: 4064718 - DNA, 25 bp, Homo sapien
aggtgttgaccctcagcaccagtgg

SEQ ID NO: 4064719 - DNA, 25 bp, Homo sapien
ccctcagcaccagtggagaccatag

SEQ ID NO: 4064720 - DNA, 25 bp, Homo sapien
caaaaagtagagttctaaggcctgc

SEQ ID NO: 4064721 - DNA, 25 bp, Homo sapien
gagtcctgaccccatcactcagtga

SEQ ID NO: 4064722 - DNA, 25 bp, Homo sapien
cagtcacgagaaccccaatggattt

SEQ ID NO: 4064723 - DNA, 25 bp, Homo sapien
tctatcccagggtaacgcaacacag

SEQ ID NO: 4064724 - DNA, 25 bp, Homo sapien
tgtagcattcccaaagagcgggctg

SEQ ID NO: 4064725 - DNA, 25 bp, Homo sapien
tctctagaggttgaaaggtaagccc

SEQ ID NO: 4064726 - DNA, 25 bp, Homo sapien
taccacgtgcttcagggaattgagc

SEQ ID NO: 4064727 - DNA, 25 bp, Homo sapien
gctgttagctcaatcctagggcaaa

SEQ ID NO: 4064728 - DNA, 25 bp, Homo sapien
gcagcattgttttccgtaaaacttg

SEQ ID NO: 4064729 - DNA, 25 bp, Homo sapien
catgctgaggaactaggtgacacca

SEQ ID NO: 4064730 - DNA, 25 bp, Homo sapien
aaacttgtggttgcagacaccatgc

SEQ ID NO: 4064731 - DNA, 25 bp, Homo sapien
caccagttgaagaaatctacgcagg

SEQ ID NO: 4064732 - DNA, 25 bp, Homo sapien
ctcccttgtgcctctatgtggtttt

SEQ ID NO: 4064733 - DNA, 25 bp, Homo sapien
cccttgtgcctctatgtggtttttc

SEQ ID NO: 4064734 - DNA, 25 bp, Homo sapien
gcctctatgtggtttttcccattaa

SEQ ID NO: 4064735 - DNA, 25 bp, Homo sapien
tcccttgtgcctctatgtggttttt

SEQ ID NO: 4064736 - DNA, 25 bp, Homo sapien
taccgctggttctgattgagaaggg

SEQ ID NO: 4064737 - DNA, 25 bp, Homo sapien
agaggggagcattaagggagggtgt

SEQ ID NO: 4064738 - DNA, 25 bp, Homo sapien
ggagcattaagggagggtgtgctgc

SEQ ID NO: 4064739 - DNA, 25 bp, Homo sapien
tgtcagaggggagcattaagggagg

SEQ ID NO: 4064740 - DNA, 25 bp, Homo sapien
aggggagcattaagggagggtgtgc

SEQ ID NO: 4064741 - DNA, 25 bp, Homo sapien
cgtagcaccggaggtttctgatgga

SEQ ID NO: 4064742 - DNA, 25 bp, Homo sapien
ccttgctgaacacagtggactgacc

SEQ ID NO: 4064743 - DNA, 25 bp, Homo sapien
ttgtattacaggctcgtagcaccgg

SEQ ID NO: 4064744 - DNA, 25 bp, Homo sapien
gagctggacagaagtttgtattaca

SEQ ID NO: 4064745 - DNA, 25 bp, Homo sapien
tcacacccaaaccacaggttgcaga

SEQ ID NO: 4064746 - DNA, 25 bp, Homo sapien
taatattacggcatcttcgctctgg

SEQ ID NO: 4064747 - DNA, 25 bp, Homo sapien
gctgccacggcaatgaataccatcc

SEQ ID NO: 4064748 - DNA, 25 bp, Homo sapien
tccagctaccatgttgtacactgga

SEQ ID NO: 4064749 - DNA, 25 bp, Homo sapien
ccagtagatcagactacaggcgcct

SEQ ID NO: 4064750 - DNA, 25 bp, Homo sapien
tccccagtagatcagactacaggcg

SEQ ID NO: 4064751 - DNA, 25 bp, Homo sapien
ctccccagtagatcagactacaggc

SEQ ID NO: 4064752 - DNA, 25 bp, Homo sapien
cccagcagtgacttctaatccatac

SEQ ID NO: 4064753 - DNA, 25 bp, Homo sapien
ctgacccagcagtgacttctaatcc

SEQ ID NO: 4064754 - DNA, 25 bp, Homo sapien
gacccagcagtgacttctaatccat

SEQ ID NO: 4064755 - DNA, 25 bp, Homo sapien
ctcctgacccagcagtgacttctaa

SEQ ID NO: 4064756 - DNA, 25 bp, Homo sapien
tctggggagactggtacactggctc

SEQ ID NO: 4064757 - DNA, 25 bp, Homo sapien
ttggggcatcgtccaagcacacagc

SEQ ID NO: 4064758 - DNA, 25 bp, Homo sapien
gggagggtttctgcggcagagccct

SEQ ID NO: 4064759 - DNA, 25 bp, Homo sapien
acgaagaagcgacccactgtagccg

SEQ ID NO: 4064760 - DNA, 25 bp, Homo sapien
gagagaatgcaacactgcttcctcc

SEQ ID NO: 4064761 - DNA, 25 bp, Homo sapien
ttgcacacactggatctttcggctc

SEQ ID NO: 4064762 - DNA, 25 bp, Homo sapien
cactggatctttcggctctgctggc

SEQ ID NO: 4064763 - DNA, 25 bp, Homo sapien
ttggaagggcttcttttgcacacac

SEQ ID NO: 4064764 - DNA, 25 bp, Homo sapien
tgacttgagtattttgatctcgcaa

SEQ ID NO: 4064765 - DNA, 25 bp, Homo sapien
tctcgcaagcaaatggcctttacat

SEQ ID NO: 4064766 - DNA, 25 bp, Homo sapien
caggagaaagcgttgcagattttgg

SEQ ID NO: 4064767 - DNA, 25 bp, Homo sapien
gctcagttactggcttggtttttgc

SEQ ID NO: 4064768 - DNA, 25 bp, Homo sapien
tccttccttgcaagggttgtctcag

SEQ ID NO: 4064769 - DNA, 25 bp, Homo sapien
cttgcaagggttgtctcagatttaa

SEQ ID NO: 4064770 - DNA, 25 bp, Homo sapien
ttccttgcaagggttgtctcagatt

SEQ ID NO: 4064771 - DNA, 25 bp, Homo sapien
ccagtagatggttgctgttgttcct

SEQ ID NO: 4064772 - DNA, 25 bp, Homo sapien
gtgcatacttccaagctatccctgg

SEQ ID NO: 4064773 - DNA, 25 bp, Homo sapien
caggagacggagcactctgactgca

SEQ ID NO: 4064774 - DNA, 25 bp, Homo sapien
tactccaggtataggcaggtctttt

SEQ ID NO: 4064775 - DNA, 25 bp, Homo sapien
ggagttccattcatgaccttgggaa

SEQ ID NO: 4064776 - DNA, 25 bp, Homo sapien
gcaagaagcactgagaactgaatac

SEQ ID NO: 4064777 - DNA, 25 bp, Homo sapien
tgtagcaagaagcactgagaactga

SEQ ID NO: 4064778 - DNA, 25 bp, Homo sapien
agaagcactgagaactgaatacaca

SEQ ID NO: 4064779 - DNA, 25 bp, Homo sapien
aatgtagcaagaagcactgagaact

SEQ ID NO: 4064780 - DNA, 25 bp, Homo sapien
aagaccagcgtctcatttgtgggcc

SEQ ID NO: 4064781 - DNA, 25 bp, Homo sapien
tattcaaacgtggtcccagcgaagg

SEQ ID NO: 4064782 - DNA, 25 bp, Homo sapien
tggatttcgatgcttcgggcgccag

SEQ ID NO: 4064783 - DNA, 25 bp, Homo sapien
tttgactgaggcttcgaactgcgag

SEQ ID NO: 4064784 - DNA, 25 bp, Homo sapien
tctgaaactgctttagagcctagtt

SEQ ID NO: 4064785 - DNA, 25 bp, Homo sapien
atgctggttgaggtacaggccttta

SEQ ID NO: 4064786 - DNA, 25 bp, Homo sapien
tttgcaaacgccacaagcatctgaa

SEQ ID NO: 4064787 - DNA, 25 bp, Homo sapien
gagcctagttcatgatcacatccca

SEQ ID NO: 4064788 - DNA, 25 bp, Homo sapien
tccatctttcactttgccggacatt

SEQ ID NO: 4064789 - DNA, 25 bp, Homo sapien
cagtacagtttgcatcgatcttcct

SEQ ID NO: 4064790 - DNA, 25 bp, Homo sapien
cttgcagtacagtttgcatcgatct

SEQ ID NO: 4064791 - DNA, 25 bp, Homo sapien
tcactttgccggacattgcaaaaaa

SEQ ID NO: 4064792 - DNA, 25 bp, Homo sapien
aagctattttcattgcaagggttaa

SEQ ID NO: 4064793 - DNA, 25 bp, Homo sapien
tattctgcacactgttgagcccgaa

SEQ ID NO: 4064794 - DNA, 25 bp, Homo sapien
tgataaatacggctagaacctggac

SEQ ID NO: 4064795 - DNA, 25 bp, Homo sapien
gaacctggacagaataagccaccat

SEQ ID NO: 4064796 - DNA, 25 bp, Homo sapien
tcctaatactctcagtatcttccca

SEQ ID NO: 4064797 - DNA, 25 bp, Homo sapien
ttcctaatactctcagtatcttccc

SEQ ID NO: 4064798 - DNA, 25 bp, Homo sapien
tcacagtcccgtagagaatgactcc

SEQ ID NO: 4064799 - DNA, 25 bp, Homo sapien
catcacagtcccgtagagaatgact

SEQ ID NO: 4064800 - DNA, 25 bp, Homo sapien
gatcatcacagtcccgtagagaatg

SEQ ID NO: 4064801 - DNA, 25 bp, Homo sapien
ggatcatcacagtcccgtagagaat

SEQ ID NO: 4064802 - DNA, 25 bp, Homo sapien
cttccctcggtgcacatggacttta

SEQ ID NO: 4064803 - DNA, 25 bp, Homo sapien
aacagtaaaactctggttgattgtt

SEQ ID NO: 4064804 - DNA, 25 bp, Homo sapien
acagtaaaactctggttgattgtta

SEQ ID NO: 4064805 - DNA, 25 bp, Homo sapien
aaactttacgcactggccttgccga

SEQ ID NO: 4064806 - DNA, 25 bp, Homo sapien
accaggcggaccactggccgtggat

SEQ ID NO: 4064807 - DNA, 25 bp, Homo sapien
cacatgtccgggaacattctgacca

SEQ ID NO: 4064808 - DNA, 25 bp, Homo sapien
attctgaccacttcgaccaggcgga

SEQ ID NO: 4064809 - DNA, 25 bp, Homo sapien
tactgtgtggcttggttgctagcgc

SEQ ID NO: 4064810 - DNA, 25 bp, Homo sapien
tctaccgggaatcacgaggactcta

SEQ ID NO: 4064811 - DNA, 25 bp, Homo sapien
ccaaaaatgatgcagagagcttcac

SEQ ID NO: 4064812 - DNA, 25 bp, Homo sapien
taagcatgcatcttttctaccggga

SEQ ID NO: 4064813 - DNA, 25 bp, Homo sapien
gcataaacttggtctcacacctgtg

SEQ ID NO: 4064814 - DNA, 25 bp, Homo sapien
aagccacaaacggtcccttctgctg

SEQ ID NO: 4064815 - DNA, 25 bp, Homo sapien
actcggtggcaccaaagtgatttgc

SEQ ID NO: 4064816 - DNA, 25 bp, Homo sapien
cacacctgtggcctactcggtggca

SEQ ID NO: 4064817 - DNA, 25 bp, Homo sapien
tagaaaggctttcagaactaaattg

SEQ ID NO: 4064818 - DNA, 25 bp, Homo sapien
aaaaagccataacccacacccagtg

SEQ ID NO: 4064819 - DNA, 25 bp, Homo sapien
ccagtgcctatgtggcagccaccaa

SEQ ID NO: 4064820 - DNA, 25 bp, Homo sapien
tgtttttcttcttacagccaggaaa

SEQ ID NO: 4064821 - DNA, 25 bp, Homo sapien
taaaatgtcattcttgaccaagtgt

SEQ ID NO: 4064822 - DNA, 25 bp, Homo sapien
tctcatttctataacctggactttt

SEQ ID NO: 4064823 - DNA, 25 bp, Homo sapien
gaccaagtgtaacaacgtgtctctc

SEQ ID NO: 4064824 - DNA, 25 bp, Homo sapien
catttctataacctggacttttgta

SEQ ID NO: 4064825 - DNA, 25 bp, Homo sapien
aatctgtcctggtagtttgtccgga

SEQ ID NO: 4064826 - DNA, 25 bp, Homo sapien
tccaaattgccatttacactgtgtg

SEQ ID NO: 4064827 - DNA, 25 bp, Homo sapien
tgtccggatatttatactgtcctgc

SEQ ID NO: 4064828 - DNA, 25 bp, Homo sapien
tgtcctgcttgcttgggctcatcca

SEQ ID NO: 4064829 - DNA, 25 bp, Homo sapien
cattgtttccggtcagtgtgggaga

SEQ ID NO: 4064830 - DNA, 25 bp, Homo sapien
gaatttcttgagatactggcggctg

SEQ ID NO: 4064831 - DNA, 25 bp, Homo sapien
aaacactccattgtttccggtcagt

SEQ ID NO: 4064832 - DNA, 25 bp, Homo sapien
gagacatgatattgccttcagcctt

SEQ ID NO: 4064833 - DNA, 25 bp, Homo sapien
atcctgctttgtgaacccatttttt

SEQ ID NO: 4064834 - DNA, 25 bp, Homo sapien
tcctcattgatggtacaacttcggt

SEQ ID NO: 4064835 - DNA, 25 bp, Homo sapien
acttagagcacattccactgatggg

SEQ ID NO: 4064836 - DNA, 25 bp, Homo sapien
tgtgccctgactcatgagcgatggt

SEQ ID NO: 4064837 - DNA, 25 bp, Homo sapien
tgaaggcaaggccaagtcctgtgtc

SEQ ID NO: 4064838 - DNA, 25 bp, Homo sapien
atcctgttagtaagatggcatgatc

SEQ ID NO: 4064839 - DNA, 25 bp, Homo sapien
gagtgtcacatggttcattcttcca

SEQ ID NO: 4064840 - DNA, 25 bp, Homo sapien
agaacaaatatcaaatcctgttagt

SEQ ID NO: 4064841 - DNA, 25 bp, Homo sapien
gggcagactgccattgacaaaaact

SEQ ID NO: 4064842 - DNA, 25 bp, Homo sapien
tcccatctttaaataggccagaaac

SEQ ID NO: 4064843 - DNA, 25 bp, Homo sapien
caaccacgtttatgtcacttccaat

SEQ ID NO: 4064844 - DNA, 25 bp, Homo sapien
tatgtcacttccaatagtcccatct

SEQ ID NO: 4064845 - DNA, 25 bp, Homo sapien
gctcaccacaaccacgtttatgtca

SEQ ID NO: 4064846 - DNA, 25 bp, Homo sapien
cacgagggtttccacattgaggccc

SEQ ID NO: 4064847 - DNA, 25 bp, Homo sapien
tgaggcccttttgtgattttccagc

SEQ ID NO: 4064848 - DNA, 25 bp, Homo sapien
ttcatcaaaccttagataggtgtcc

SEQ ID NO: 4064849 - DNA, 25 bp, Homo sapien
tactgtgagaatgtatgtggtgaca

SEQ ID NO: 4064850 - DNA, 25 bp, Homo sapien
tacgatgaacagaagagcatttgga

SEQ ID NO: 4064851 - DNA, 25 bp, Homo sapien
agagcatttggaagggatattagag

SEQ ID NO: 4064852 - DNA, 25 bp, Homo sapien
ctacgatgaacagaagagcatttgg

SEQ ID NO: 4064853 - DNA, 25 bp, Homo sapien
catttggaagggatattagagaata

SEQ ID NO: 4064854 - DNA, 25 bp, Homo sapien
accaggataattccggccagagccg

SEQ ID NO: 4064855 - DNA, 25 bp, Homo sapien
ggtagccacggtaccgctggatctt

SEQ ID NO: 4064856 - DNA, 25 bp, Homo sapien
ctgcttttgcaaccttcgatggtga

SEQ ID NO: 4064857 - DNA, 25 bp, Homo sapien
gatactctgtctctcgactctgaga

SEQ ID NO: 4064858 - DNA, 25 bp, Homo sapien
cccgcaggggagctgtagttgtgtt

SEQ ID NO: 4064859 - DNA, 25 bp, Homo sapien
tgtacagtacgtgaggatggtgacc

SEQ ID NO: 4064860 - DNA, 25 bp, Homo sapien
cttttgtacagtacgtgaggatggt

SEQ ID NO: 4064861 - DNA, 25 bp, Homo sapien
acagtacgtgaggatggtgacccgc

SEQ ID NO: 4064862 - DNA, 25 bp, Homo sapien
tgaggtaatggcgagatgaggaatt

SEQ ID NO: 4064863 - DNA, 25 bp, Homo sapien
ggtaatggcgagatgaggaattcat

SEQ ID NO: 4064864 - DNA, 25 bp, Homo sapien
aggtaatggcgagatgaggaattca

SEQ ID NO: 4064865 - DNA, 25 bp, Homo sapien
aatggcgagatgaggaattcatttt

SEQ ID NO: 4064866 - DNA, 25 bp, Homo sapien
gtcttttccagaagatacagaaatt

SEQ ID NO: 4064867 - DNA, 25 bp, Homo sapien
cttttccagaagatacagaaattcc

SEQ ID NO: 4064868 - DNA, 25 bp, Homo sapien
ttttgtcttttccagaagatacaga

SEQ ID NO: 4064869 - DNA, 25 bp, Homo sapien
ttgtcttttccagaagatacagaaa

SEQ ID NO: 4064870 - DNA, 25 bp, Homo sapien
aggaagacctctagctgcaccgaca

SEQ ID NO: 4064871 - DNA, 25 bp, Homo sapien
ggaagacctctagctgcaccgacat

SEQ ID NO: 4064872 - DNA, 25 bp, Homo sapien
caggaagacctctagctgcaccgac

SEQ ID NO: 4064873 - DNA, 25 bp, Homo sapien
gagaaggcgtaaatggcatctatta

SEQ ID NO: 4064874 - DNA, 25 bp, Homo sapien
caataaatgagaaggcgtaaatggc

SEQ ID NO: 4064875 - DNA, 25 bp, Homo sapien
gaacttttagacagtatggagagct

SEQ ID NO: 4064876 - DNA, 25 bp, Homo sapien
tagacagtatggagagctcatggta

SEQ ID NO: 4064877 - DNA, 25 bp, Homo sapien
tacaagctccatgggtgagccaact

SEQ ID NO: 4064878 - DNA, 25 bp, Homo sapien
taatgtaggattgccatcattaatt

SEQ ID NO: 4064879 - DNA, 25 bp, Homo sapien
cattaattcatcaggcttgagatgg

SEQ ID NO: 4064880 - DNA, 25 bp, Homo sapien
tttagcatccgtgtttttacaagct

SEQ ID NO: 4064881 - DNA, 25 bp, Homo sapien
ggccagcaatgtctgttatcccgat

SEQ ID NO: 4064882 - DNA, 25 bp, Homo sapien
tcttctggaagcaggcctaggggcc

SEQ ID NO: 4064883 - DNA, 25 bp, Homo sapien
ttatcccgatagtcctggaacaccc

SEQ ID NO: 4064884 - DNA, 25 bp, Homo sapien
tggaacacccttctacgtgtgttag

SEQ ID NO: 4064885 - DNA, 25 bp, Homo sapien
gggagaacagcttgcaatgtccaat

SEQ ID NO: 4064886 - DNA, 25 bp, Homo sapien
gaacagcttgcaatgtccaatcctg

SEQ ID NO: 4064887 - DNA, 25 bp, Homo sapien
tgtccaatcctgcatccaattcagc

SEQ ID NO: 4064888 - DNA, 25 bp, Homo sapien
gcttgcaatgtccaatcctgcatcc

SEQ ID NO: 4064889 - DNA, 25 bp, Homo sapien
ggcagcctgcaattcatggactcaa

SEQ ID NO: 4064890 - DNA, 25 bp, Homo sapien
ctctgtgattgcaagcatgagacac

SEQ ID NO: 4064891 - DNA, 25 bp, Homo sapien
cctggcccttataatgcatttcttt

SEQ ID NO: 4064892 - DNA, 25 bp, Homo sapien
aatgctcccgcctccgtctttgaaa

SEQ ID NO: 4064893 - DNA, 25 bp, Homo sapien
caggtaatgctagtctgtgcattga

SEQ ID NO: 4064894 - DNA, 25 bp, Homo sapien
aggtaatgctagtctgtgcattgac

SEQ ID NO: 4064895 - DNA, 25 bp, Homo sapien
gaggttcaggcagtctcgtttccac

SEQ ID NO: 4064896 - DNA, 25 bp, Homo sapien
aggcagtctcgtttccactgaaggt

SEQ ID NO: 4064897 - DNA, 25 bp, Homo sapien
gtgatgcattccacaaagcaaaaac

SEQ ID NO: 4064898 - DNA, 25 bp, Homo sapien
atggtgtgatgcattccacaaagca

SEQ ID NO: 4064899 - DNA, 25 bp, Homo sapien
agtcccccataggtgaagcttttct

SEQ ID NO: 4064900 - DNA, 25 bp, Homo sapien
cttgaggacaatgactctgagtccc

SEQ ID NO: 4064901 - DNA, 25 bp, Homo sapien
gagtcccccataggtgaagcttttc

SEQ ID NO: 4064902 - DNA, 25 bp, Homo sapien
aatgactctgagtcccccataggtg

SEQ ID NO: 4064903 - DNA, 25 bp, Homo sapien
ttgtaaagactgtttggcaggcagt

SEQ ID NO: 4064904 - DNA, 25 bp, Homo sapien
gcccttttatgaatggaaatcagct

SEQ ID NO: 4064905 - DNA, 25 bp, Homo sapien
gtgaccagcaacagacaactcaatg

SEQ ID NO: 4064906 - DNA, 25 bp, Homo sapien
gacaactcaatgactgagctttctg

SEQ ID NO: 4064907 - DNA, 25 bp, Homo sapien
ggtctcccgggacattacaaagcga

SEQ ID NO: 4064908 - DNA, 25 bp, Homo sapien
tacaaagcgaatggcatccatcaag

SEQ ID NO: 4064909 - DNA, 25 bp, Homo sapien
cagtgctgctgaatgcaatttcgca

SEQ ID NO: 4064910 - DNA, 25 bp, Homo sapien
tcaaagccatgtagacgcatgaagc

SEQ ID NO: 4064911 - DNA, 25 bp, Homo sapien
aagagggagctcaactcagactggg

SEQ ID NO: 4064912 - DNA, 25 bp, Homo sapien
gaatattagaagtatcaaggctgac

SEQ ID NO: 4064913 - DNA, 25 bp, Homo sapien
ctgttcattcaagttacacaaaaca

SEQ ID NO: 4064914 - DNA, 25 bp, Homo sapien
gaagagcatttatattgcagacatc

SEQ ID NO: 4064915 - DNA, 25 bp, Homo sapien
tagacacagcgacagaggaggagct

SEQ ID NO: 4064916 - DNA, 25 bp, Homo sapien
tgactgctcaaaatcgccgagggct

SEQ ID NO: 4064917 - DNA, 25 bp, Homo sapien
gctgagtctacttctactggcgtga

SEQ ID NO: 4064918 - DNA, 25 bp, Homo sapien
tagaagcattgctgcacctcgggtt

SEQ ID NO: 4064919 - DNA, 25 bp, Homo sapien
cagctcggggcgttgattcttttga

SEQ ID NO: 4064920 - DNA, 25 bp, Homo sapien
tgcttttatgtgacttgcagctcgg

SEQ ID NO: 4064921 - DNA, 25 bp, Homo sapien
tttgataagttcagtccttgccaac

SEQ ID NO: 4064922 - DNA, 25 bp, Homo sapien
tgaaggagggagagtatttgctttt

SEQ ID NO: 4064923 - DNA, 25 bp, Homo sapien
ctctccaaacaggaaccatttccaa

SEQ ID NO: 4064924 - DNA, 25 bp, Homo sapien
ctccaaacaggaaccatttccaaga

SEQ ID NO: 4064925 - DNA, 25 bp, Homo sapien
gaaccatttccaagacagcgcacac

SEQ ID NO: 4064926 - DNA, 25 bp, Homo sapien
caggaaccatttccaagacagcgca

SEQ ID NO: 4064927 - DNA, 25 bp, Homo sapien
ctgccaggttagggggtgcgctttt

SEQ ID NO: 4064928 - DNA, 25 bp, Homo sapien
caaagtgctgcgaaaggcccttctt

SEQ ID NO: 4064929 - DNA, 25 bp, Homo sapien
gggtcaaagtgctgcgaaaggccct

SEQ ID NO: 4064930 - DNA, 25 bp, Homo sapien
caggttagggggtgcgcttttccat

SEQ ID NO: 4064931 - DNA, 25 bp, Homo sapien
ctgctgtcactggctaaggccgcgg

SEQ ID NO: 4064932 - DNA, 25 bp, Homo sapien
actggctaaggccgcggcgaccgac

SEQ ID NO: 4064933 - DNA, 25 bp, Homo sapien
tgctgtcactggctaaggccgcggc

SEQ ID NO: 4064934 - DNA, 25 bp, Homo sapien
tgtcactggctaaggccgcggcgac

SEQ ID NO: 4064935 - DNA, 25 bp, Homo sapien
ctctcggagctccgctcggcggcac

SEQ ID NO: 4064936 - DNA, 25 bp, Homo sapien
cgctctcggagctccgctcggcggc

SEQ ID NO: 4064937 - DNA, 25 bp, Homo sapien
gctctcggagctccgctcggcggca

SEQ ID NO: 4064938 - DNA, 25 bp, Homo sapien
ccgggaaggcacacgcgagcaggag

SEQ ID NO: 4064939 - DNA, 25 bp, Homo sapien
cagccgggaaggcacacgcgagcag

SEQ ID NO: 4064940 - DNA, 25 bp, Homo sapien
gccgggaaggcacacgcgagcagga

SEQ ID NO: 4064941 - DNA, 25 bp, Homo sapien
agccgggaaggcacacgcgagcagg

SEQ ID NO: 4064942 - DNA, 25 bp, Homo sapien
gccagacgcggcaggcggagcgcac

SEQ ID NO: 4064943 - DNA, 25 bp, Homo sapien
ctgcgggtggccagacgcggcaggc

SEQ ID NO: 4064944 - DNA, 25 bp, Homo sapien
ggccagacgcggcaggcggagcgca

SEQ ID NO: 4064945 - DNA, 25 bp, Homo sapien
cgggtggccagacgcggcaggcgga

SEQ ID NO: 4064946 - DNA, 25 bp, Homo sapien
tctgtgcgtctgtctgtgtcggtgt

SEQ ID NO: 4064947 - DNA, 25 bp, Homo sapien
ggagactgtcggtgtctgcccgccc

SEQ ID NO: 4064948 - DNA, 25 bp, Homo sapien
cagtttgcggcaccccagagggtac

SEQ ID NO: 4064949 - DNA, 25 bp, Homo sapien
gctccaggtgagagccgccgccgtt

SEQ ID NO: 4064950 - DNA, 25 bp, Homo sapien
tgtccaaagagatagatgtccatag

SEQ ID NO: 4064951 - DNA, 25 bp, Homo sapien
gctcaaagctgcatcaaacagtggg

SEQ ID NO: 4064952 - DNA, 25 bp, Homo sapien
gctgggtcttactgaacgggtgtcc

SEQ ID NO: 4064953 - DNA, 25 bp, Homo sapien
gatgtccatagtcacacatctaaac

SEQ ID NO: 4064954 - DNA, 25 bp, Homo sapien
aaaaggcttggctgtgaaggtgaag

SEQ ID NO: 4064955 - DNA, 25 bp, Homo sapien
aggcttggctgtgaaggtgaagata

SEQ ID NO: 4064956 - DNA, 25 bp, Homo sapien
aaaggcttggctgtgaaggtgaaga

SEQ ID NO: 4064957 - DNA, 25 bp, Homo sapien
aaggcttggctgtgaaggtgaagat

SEQ ID NO: 4064958 - DNA, 25 bp, Homo sapien
tatctattgcacacaagtttctttt

SEQ ID NO: 4064959 - DNA, 25 bp, Homo sapien
tggttggcaaggtgcctctgttgaa

SEQ ID NO: 4064960 - DNA, 25 bp, Homo sapien
ggacagataatctttcctaactgtg

SEQ ID NO: 4064961 - DNA, 25 bp, Homo sapien
gatattctgacttgtcttacagtaa

SEQ ID NO: 4064962 - DNA, 25 bp, Homo sapien
tggcaaggtgcctctgttgaatcac

SEQ ID NO: 4064963 - DNA, 25 bp, Homo sapien
ccttgtcctcgccacaagccacaaa

SEQ ID NO: 4064964 - DNA, 25 bp, Homo sapien
caaagttgccaactgttgttgtctg

SEQ ID NO: 4064965 - DNA, 25 bp, Homo sapien
gccaactgttgttgtctgcactttc

SEQ ID NO: 4064966 - DNA, 25 bp, Homo sapien
actgttgttgtctgcactttctctc

SEQ ID NO: 4064967 - DNA, 25 bp, Homo sapien
aaaatggcctaagccaggtgaagct

SEQ ID NO: 4064968 - DNA, 25 bp, Homo sapien
gggaaaaatggcctaagccaggtga

SEQ ID NO: 4064969 - DNA, 25 bp, Homo sapien
cttgcagggaaaaatggcctaagcc

SEQ ID NO: 4064970 - DNA, 25 bp, Homo sapien
gcagggaaaaatggcctaagccagg

SEQ ID NO: 4064971 - DNA, 25 bp, Homo sapien
cctcctcttgtgagaaaacctggta

SEQ ID NO: 4064972 - DNA, 25 bp, Homo sapien
caaagaccctgcttagaaaacgaga

SEQ ID NO: 4064973 - DNA, 25 bp, Homo sapien
tgttccaataaaggcctgacatcct

SEQ ID NO: 4064974 - DNA, 25 bp, Homo sapien
tgaaatctatcgtaacgtcccctgc

SEQ ID NO: 4064975 - DNA, 25 bp, Homo sapien
tatgctcctcttctgacggagccat

SEQ ID NO: 4064976 - DNA, 25 bp, Homo sapien
ccaagtggagtgaagaaaaagtgcg

SEQ ID NO: 4064977 - DNA, 25 bp, Homo sapien
tgaccaagtttccaatgattcccaa

SEQ ID NO: 4064978 - DNA, 25 bp, Homo sapien
tgggtcttcaaaggctgaccaagtt

SEQ ID NO: 4064979 - DNA, 25 bp, Homo sapien
tggtccttttgaaacgccaagtgga

SEQ ID NO: 4064980 - DNA, 25 bp, Homo sapien
acttgcagcagcctatggtactctc

SEQ ID NO: 4064981 - DNA, 25 bp, Homo sapien
gacttgcagcagcctatggtactct

SEQ ID NO: 4064982 - DNA, 25 bp, Homo sapien
tgcagcagcctatggtactctcttg

SEQ ID NO: 4064983 - DNA, 25 bp, Homo sapien
cttgcagcagcctatggtactctct

SEQ ID NO: 4064984 - DNA, 25 bp, Homo sapien
ttcattgctagagaggagaaccggc

SEQ ID NO: 4064985 - DNA, 25 bp, Homo sapien
gacctgaaacttgtacagatacttc

SEQ ID NO: 4064986 - DNA, 25 bp, Homo sapien
gattcagcagcaaagctcaaaatga

SEQ ID NO: 4064987 - DNA, 25 bp, Homo sapien
tacctctcaacactgacctgaaact

SEQ ID NO: 4064988 - DNA, 25 bp, Homo sapien
tctactgactatcgggaaaagacgg

SEQ ID NO: 4064989 - DNA, 25 bp, Homo sapien
gcagaatgacggatagctcatccag

SEQ ID NO: 4064990 - DNA, 25 bp, Homo sapien
gaaaagacggtcagtgctgaaatcc

SEQ ID NO: 4064991 - DNA, 25 bp, Homo sapien
catgtgatgcatttccattgaaggg

SEQ ID NO: 4064992 - DNA, 25 bp, Homo sapien
tcagctccagacacctagacgtctt

SEQ ID NO: 4064993 - DNA, 25 bp, Homo sapien
caatggtacattgcacgtcagctcc

SEQ ID NO: 4064994 - DNA, 25 bp, Homo sapien
tgatgggagtagcaaccatacaatc

SEQ ID NO: 4064995 - DNA, 25 bp, Homo sapien
cggcagttagaaccagtggcagtga

SEQ ID NO: 4064996 - DNA, 25 bp, Homo sapien
cccatgctgcgtttggtaacctcat

SEQ ID NO: 4064997 - DNA, 25 bp, Homo sapien
ggaaaagccaactctatagcattta

SEQ ID NO: 4064998 - DNA, 25 bp, Homo sapien
tgtttcttgaagaaccttcacattc

SEQ ID NO: 4064999 - DNA, 25 bp, Homo sapien
tgcatttaggcattcccctgtccgc

SEQ ID NO: 4065000 - DNA, 25 bp, Homo sapien
taacctcaccttcttggaaaagcca

SEQ ID NO: 4065001 - DNA, 25 bp, Homo sapien
gacgtttcttactccatagctttga

SEQ ID NO: 4065002 - DNA, 25 bp, Homo sapien
gaggcactgaacaatgaaggtgaag

SEQ ID NO: 4065003 - DNA, 25 bp, Homo sapien
ccatgtgtacattgactgaggcaga

SEQ ID NO: 4065004 - DNA, 25 bp, Homo sapien
ttgaaagaggtctgcccacagtggc

SEQ ID NO: 4065005 - DNA, 25 bp, Homo sapien
ctgaagaattgtcacattttgaata

SEQ ID NO: 4065006 - DNA, 25 bp, Homo sapien
aagaattgtcacattttgaataacc

SEQ ID NO: 4065007 - DNA, 25 bp, Homo sapien
gaattgtcacattttgaataaccct

SEQ ID NO: 4065008 - DNA, 25 bp, Homo sapien
attgtcacattttgaataacccttt

SEQ ID NO: 4065009 - DNA, 25 bp, Homo sapien
cacacaagccatgataagatgacat

SEQ ID NO: 4065010 - DNA, 25 bp, Homo sapien
cattggacacatatctaagacagaa

SEQ ID NO: 4065011 - DNA, 25 bp, Homo sapien
gaatgttcctggacctaacagcctg

SEQ ID NO: 4065012 - DNA, 25 bp, Homo sapien
aaacagcaatgctagagaccctatc

SEQ ID NO: 4065013 - DNA, 25 bp, Homo sapien
tgccgatgacgatgaagtcccctct

SEQ ID NO: 4065014 - DNA, 25 bp, Homo sapien
tccttgccgatgacgatgaagtccc

SEQ ID NO: 4065015 - DNA, 25 bp, Homo sapien
atctccttgccgatgacgatgaagt

SEQ ID NO: 4065016 - DNA, 25 bp, Homo sapien
ccgatgacgatgaagtcccctctgg

SEQ ID NO: 4065017 - DNA, 25 bp, Homo sapien
gcaggagtctgcacactatggcatg

SEQ ID NO: 4065018 - DNA, 25 bp, Homo sapien
tggagccgtcaacctagcagacatt

SEQ ID NO: 4065019 - DNA, 25 bp, Homo sapien
gagctcactctctcggcttgcgtgg

SEQ ID NO: 4065020 - DNA, 25 bp, Homo sapien
ggaagaagctgaaactacccaccta

SEQ ID NO: 4065021 - DNA, 25 bp, Homo sapien
ggagcacattcaaggagaccaaatg

SEQ ID NO: 4065022 - DNA, 25 bp, Homo sapien
tgtccagttctcatgaaggtcccaa

SEQ ID NO: 4065023 - DNA, 25 bp, Homo sapien
tctagccttggcctagctcatgaga

SEQ ID NO: 4065024 - DNA, 25 bp, Homo sapien
ccatctttactctaacttccaagct

SEQ ID NO: 4065025 - DNA, 25 bp, Homo sapien
tcctttttcattgggattaccagag

SEQ ID NO: 4065026 - DNA, 25 bp, Homo sapien
caaggtctgtacactctgtgaaagc

SEQ ID NO: 4065027 - DNA, 25 bp, Homo sapien
gagattttcctcgagcctaagcaaa

SEQ ID NO: 4065028 - DNA, 25 bp, Homo sapien
gaaagcaggaatattgttccatcca

SEQ ID NO: 4065029 - DNA, 25 bp, Homo sapien
caagtatccgggctgtaaggagccc

SEQ ID NO: 4065030 - DNA, 25 bp, Homo sapien
gactgcagctctacgacaaaggcaa

SEQ ID NO: 4065031 - DNA, 25 bp, Homo sapien
ggactaataaggagatgactgcagc

SEQ ID NO: 4065032 - DNA, 25 bp, Homo sapien
tgggccctgagcctgggactaataa

SEQ ID NO: 4065033 - DNA, 25 bp, Homo sapien
cacaagagccctggagagcatcggg

SEQ ID NO: 4065034 - DNA, 25 bp, Homo sapien
actggcctttgctccgtactctgca

SEQ ID NO: 4065035 - DNA, 25 bp, Homo sapien
gagaacaccacaagagccctggaga

SEQ ID NO: 4065036 - DNA, 25 bp, Homo sapien
gagcatcggggacctgcatcactgg

SEQ ID NO: 4065037 - DNA, 25 bp, Homo sapien
aaaggtcttggaattctctgactcc

SEQ ID NO: 4065038 - DNA, 25 bp, Homo sapien
cagagtgtctcttatcgctttccag

SEQ ID NO: 4065039 - DNA, 25 bp, Homo sapien
tggagatacgttcacaagcattgca

SEQ ID NO: 4065040 - DNA, 25 bp, Homo sapien
tagcgtttctgataagaacctctgc

SEQ ID NO: 4065041 - DNA, 25 bp, Homo sapien
ccctcaccctttgtaatcttctgaa

SEQ ID NO: 4065042 - DNA, 25 bp, Homo sapien
gtaatcttctgaaccaaaggcagat

SEQ ID NO: 4065043 - DNA, 25 bp, Homo sapien
aaccctcaccctttgtaatcttctg

SEQ ID NO: 4065044 - DNA, 25 bp, Homo sapien
tcttctgaaccaaaggcagatacat

SEQ ID NO: 4065045 - DNA, 25 bp, Homo sapien
ctgagactctgggaaagagtaattc

SEQ ID NO: 4065046 - DNA, 25 bp, Homo sapien
gagactctgggaaagagtaattctc

SEQ ID NO: 4065047 - DNA, 25 bp, Homo sapien
gactctgggaaagagtaattctcaa

SEQ ID NO: 4065048 - DNA, 25 bp, Homo sapien
actctgggaaagagtaattctcaaa

SEQ ID NO: 4065049 - DNA, 25 bp, Homo sapien
ggaggaactggcatactggcattag

SEQ ID NO: 4065050 - DNA, 25 bp, Homo sapien
atgcagagaaattattccagaccca

SEQ ID NO: 4065051 - DNA, 25 bp, Homo sapien
gaggcaatcatttgactgttgttga

SEQ ID NO: 4065052 - DNA, 25 bp, Homo sapien
tataaacagatacacaactgggtcc

SEQ ID NO: 4065053 - DNA, 25 bp, Homo sapien
tgaaagatttgaagacgcagcactg

SEQ ID NO: 4065054 - DNA, 25 bp, Homo sapien
cgcagcactgagcaatgatgtataa

SEQ ID NO: 4065055 - DNA, 25 bp, Homo sapien
ccttgttttaggctgcggttactca

SEQ ID NO: 4065056 - DNA, 25 bp, Homo sapien
tgtcaggcccgttgccagaaacttc

SEQ ID NO: 4065057 - DNA, 25 bp, Homo sapien
tacttctgaaaggtaggagaaacca

SEQ ID NO: 4065058 - DNA, 25 bp, Homo sapien
gaaacttccctctatcctgttgtct

SEQ ID NO: 4065059 - DNA, 25 bp, Homo sapien
gacaaataaccaaaccatctgactc

SEQ ID NO: 4065060 - DNA, 25 bp, Homo sapien
cacagggaagacaacttgaagaagc

SEQ ID NO: 4065061 - DNA, 25 bp, Homo sapien
tggaccaccagggtaacagtgattt

SEQ ID NO: 4065062 - DNA, 25 bp, Homo sapien
tgttctctcaaactcaggcatgcca

SEQ ID NO: 4065063 - DNA, 25 bp, Homo sapien
gaaatgttgtctacgccatagggca

SEQ ID NO: 4065064 - DNA, 25 bp, Homo sapien
aattgggtcatggagctttacttta

SEQ ID NO: 4065065 - DNA, 25 bp, Homo sapien
gaggtgaggagtagagagaagagta

SEQ ID NO: 4065066 - DNA, 25 bp, Homo sapien
gggtcatggagctttactttatgtt

SEQ ID NO: 4065067 - DNA, 25 bp, Homo sapien
aaaagtgttccatggagaatcttga

SEQ ID NO: 4065068 - DNA, 25 bp, Homo sapien
cactgttactcagtgactcttcggt

SEQ ID NO: 4065069 - DNA, 25 bp, Homo sapien
tcatggcactgttactcagtgactc

SEQ ID NO: 4065070 - DNA, 25 bp, Homo sapien
tgggtcatggcactgttactcagtg

SEQ ID NO: 4065071 - DNA, 25 bp, Homo sapien
tggcactgttactcagtgactcttc

SEQ ID NO: 4065072 - DNA, 25 bp, Homo sapien
ggactgattttgcagctcccgccag

SEQ ID NO: 4065073 - DNA, 25 bp, Homo sapien
cagtccacctgcgagcgccggatgg

SEQ ID NO: 4065074 - DNA, 25 bp, Homo sapien
agggtccccgaacctttgcactgct

SEQ ID NO: 4065075 - DNA, 25 bp, Homo sapien
ccggccttgatcgtagcggaggcca

SEQ ID NO: 4065076 - DNA, 25 bp, Homo sapien
cagcaaagagctggcaaaccccttt

SEQ ID NO: 4065077 - DNA, 25 bp, Homo sapien
tagatccctggtgcccagcaaagag

SEQ ID NO: 4065078 - DNA, 25 bp, Homo sapien
gagatctgtaaaacgcccagcacgg

SEQ ID NO: 4065079 - DNA, 25 bp, Homo sapien
tatgttttcgttatctccttgtccg

SEQ ID NO: 4065080 - DNA, 25 bp, Homo sapien
tagctgctctgcattatcggtcctg

SEQ ID NO: 4065081 - DNA, 25 bp, Homo sapien
tctgcattatcggtcctgctcttct

SEQ ID NO: 4065082 - DNA, 25 bp, Homo sapien
gaattagctgctctgcattatcggt

SEQ ID NO: 4065083 - DNA, 25 bp, Homo sapien
cttgacctcgcatccctcctctgtc

SEQ ID NO: 4065084 - DNA, 25 bp, Homo sapien
catatacatcatatagtaacatgtc

SEQ ID NO: 4065085 - DNA, 25 bp, Homo sapien
gctaattaatttactacctcacatc

SEQ ID NO: 4065086 - DNA, 25 bp, Homo sapien
catagtaacatactacttcacatag

SEQ ID NO: 4065087 - DNA, 25 bp, Homo sapien
ctcacatagtaacatatcaccatat

SEQ ID NO: 4065088 - DNA, 25 bp, Homo sapien
catcctcatggaacaatcttcacag

SEQ ID NO: 4065089 - DNA, 25 bp, Homo sapien
ccatcctcatggaacaatcttcaca

SEQ ID NO: 4065090 - DNA, 25 bp, Homo sapien
ctccatcctcatggaacaatcttca

SEQ ID NO: 4065091 - DNA, 25 bp, Homo sapien
tcctcatggaacaatcttcacagct

SEQ ID NO: 4065092 - DNA, 25 bp, Homo sapien
tctgtgtgtgcttattcgtagaaca

SEQ ID NO: 4065093 - DNA, 25 bp, Homo sapien
cttaccagatcaagggaatgacggc

SEQ ID NO: 4065094 - DNA, 25 bp, Homo sapien
gaatgacggcaaaccttgcagtgtt

SEQ ID NO: 4065095 - DNA, 25 bp, Homo sapien
gacaaagaactattcacgaggattc

SEQ ID NO: 4065096 - DNA, 25 bp, Homo sapien
ccctgtcttctatggtggtagagtt

SEQ ID NO: 4065097 - DNA, 25 bp, Homo sapien
tggtagagtttaagctgggtcccca

SEQ ID NO: 4065098 - DNA, 25 bp, Homo sapien
gactctgggacttactttaggccaa

SEQ ID NO: 4065099 - DNA, 25 bp, Homo sapien
tactccggatcccttgcaattcaag

SEQ ID NO: 4065100 - DNA, 25 bp, Homo sapien
tttgtgttccaccatttgccctggg

SEQ ID NO: 4065101 - DNA, 25 bp, Homo sapien
tgggattagtaccaagcaacagcag

SEQ ID NO: 4065102 - DNA, 25 bp, Homo sapien
tgccctccggaagagagcatatgtg

SEQ ID NO: 4065103 - DNA, 25 bp, Homo sapien
gttaatcagatttagtccctcagta

SEQ ID NO: 4065104 - DNA, 25 bp, Homo sapien
gggatatcagccaggtaaactttga

SEQ ID NO: 4065105 - DNA, 25 bp, Homo sapien
ctttgattgcaacataagagagcca

SEQ ID NO: 4065106 - DNA, 25 bp, Homo sapien
gatgctgtattcctccacatgcttg

SEQ ID NO: 4065107 - DNA, 25 bp, Homo sapien
accaagttgggtatcaggctgatgc

SEQ ID NO: 4065108 - DNA, 25 bp, Homo sapien
acattgagtaggcaactatttctcc

SEQ ID NO: 4065109 - DNA, 25 bp, Homo sapien
gacttgtcgattttgaaaaccttca

SEQ ID NO: 4065110 - DNA, 25 bp, Homo sapien
tcatgggacttgtcgattttgaaaa

SEQ ID NO: 4065111 - DNA, 25 bp, Homo sapien
tgcccacattgagtaggcaactatt

SEQ ID NO: 4065112 - DNA, 25 bp, Homo sapien
tcagataattgttcccatataaaat

SEQ ID NO: 4065113 - DNA, 25 bp, Homo sapien
tcctctgcagttgatcttggatgag

SEQ ID NO: 4065114 - DNA, 25 bp, Homo sapien
atttttcagataattgttcccatat

SEQ ID NO: 4065115 - DNA, 25 bp, Homo sapien
ataaaatttccctcgtcctcctctg

SEQ ID NO: 4065116 - DNA, 25 bp, Homo sapien
ctcgtatgtcaggtcactttgttcc

SEQ ID NO: 4065117 - DNA, 25 bp, Homo sapien
ctgcaggaactctgtggcaaactcg

SEQ ID NO: 4065118 - DNA, 25 bp, Homo sapien
gttccatctgggaccataagtccac

SEQ ID NO: 4065119 - DNA, 25 bp, Homo sapien
taagtccactaactcataaagaaca

SEQ ID NO: 4065120 - DNA, 25 bp, Homo sapien
cagcatagaatgaccgaagccttgt

SEQ ID NO: 4065121 - DNA, 25 bp, Homo sapien
tggtcactttcatcacagcatagaa

SEQ ID NO: 4065122 - DNA, 25 bp, Homo sapien
tagaatgaccgaagccttgtgtaga

SEQ ID NO: 4065123 - DNA, 25 bp, Homo sapien
tcatcacagcatagaatgaccgaag

SEQ ID NO: 4065124 - DNA, 25 bp, Homo sapien
ggctgcatagctggcgatggataaa

SEQ ID NO: 4065125 - DNA, 25 bp, Homo sapien
tgtggctgatgtttggctcttgata

SEQ ID NO: 4065126 - DNA, 25 bp, Homo sapien
catagctggcgatggataaaggatg

SEQ ID NO: 4065127 - DNA, 25 bp, Homo sapien
gctgatgtttggctcttgataccat

SEQ ID NO: 4065128 - DNA, 25 bp, Homo sapien
ctccttgaaggaggatttctctgtt

SEQ ID NO: 4065129 - DNA, 25 bp, Homo sapien
acagcttgagtgcaggtgctttgtg

SEQ ID NO: 4065130 - DNA, 25 bp, Homo sapien
ggctctgcctccttatgagcgtcct

SEQ ID NO: 4065131 - DNA, 25 bp, Homo sapien
ttctctgttgtttccatgcacagct

SEQ ID NO: 4065132 - DNA, 25 bp, Homo sapien
actggaacattcttaaattgctgcc

SEQ ID NO: 4065133 - DNA, 25 bp, Homo sapien
caactggaacattcttaaattgctg

SEQ ID NO: 4065134 - DNA, 25 bp, Homo sapien
aactggaacattcttaaattgctgc

SEQ ID NO: 4065135 - DNA, 25 bp, Homo sapien
ggcatgatttcagctggggtcctag

SEQ ID NO: 4065136 - DNA, 25 bp, Homo sapien
ggggtcctagctgtttctcaacctc

SEQ ID NO: 4065137 - DNA, 25 bp, Homo sapien
gctggggtcctagctgtttctcaac

SEQ ID NO: 4065138 - DNA, 25 bp, Homo sapien
catgatttcagctggggtcctagct

SEQ ID NO: 4065139 - DNA, 25 bp, Homo sapien
gcaaatgagctccaggattgacttt

SEQ ID NO: 4065140 - DNA, 25 bp, Homo sapien
tcaagtgaagagcaaatgagctcca

SEQ ID NO: 4065141 - DNA, 25 bp, Homo sapien
gaagagcaaatgagctccaggattg

SEQ ID NO: 4065142 - DNA, 25 bp, Homo sapien
aatgagctccaggattgactttttg

SEQ ID NO: 4065143 - DNA, 25 bp, Homo sapien
tattaaagtaaatgttgcaaacacc

SEQ ID NO: 4065144 - DNA, 25 bp, Homo sapien
accttgtttcgtggttgttgaatga

SEQ ID NO: 4065145 - DNA, 25 bp, Homo sapien
caaacaccttgtttcgtggttgttg

SEQ ID NO: 4065146 - DNA, 25 bp, Homo sapien
tgttgcaaacaccttgtttcgtggt

SEQ ID NO: 4065147 - DNA, 25 bp, Homo sapien
tcaacgttttgcagccggaatcgac

SEQ ID NO: 4065148 - DNA, 25 bp, Homo sapien
cggaatcgacgatgcatgacgcagc

SEQ ID NO: 4065149 - DNA, 25 bp, Homo sapien
tatccactcagttaaactccctaaa

SEQ ID NO: 4065150 - DNA, 25 bp, Homo sapien
gggacctcataataaactctgactc

SEQ ID NO: 4065151 - DNA, 25 bp, Homo sapien
tgcccggagctggcaaaggctgcca

SEQ ID NO: 4065152 - DNA, 25 bp, Homo sapien
ccttactgcgtctgcttggcacaaa

SEQ ID NO: 4065153 - DNA, 25 bp, Homo sapien
tggcacaaagcctcgcacgaggtct

SEQ ID NO: 4065154 - DNA, 25 bp, Homo sapien
aaatgcaggactggttaaagttccg

SEQ ID NO: 4065155 - DNA, 25 bp, Homo sapien
ttcatgctggatggcgaatgcaggc

SEQ ID NO: 4065156 - DNA, 25 bp, Homo sapien
taagtgtcgaagatgaggccttctc

SEQ ID NO: 4065157 - DNA, 25 bp, Homo sapien
agcccagttgagcagcgtaataagt

SEQ ID NO: 4065158 - DNA, 25 bp, Homo sapien
cccagttcatgctggatggcgaatg

SEQ ID NO: 4065159 - DNA, 25 bp, Homo sapien
tagactatcttggttgctcctggca

SEQ ID NO: 4065160 - DNA, 25 bp, Homo sapien
tataacctggctccctcaaatagtc

SEQ ID NO: 4065161 - DNA, 25 bp, Homo sapien
tagaacagaactggccatggattga

SEQ ID NO: 4065162 - DNA, 25 bp, Homo sapien
actaagtgtgcatagccccttccca

SEQ ID NO: 4065163 - DNA, 25 bp, Homo sapien
catgagccgtcagtcaggatagcct

SEQ ID NO: 4065164 - DNA, 25 bp, Homo sapien
taaaggcacttagcgcagattcagg

SEQ ID NO: 4065165 - DNA, 25 bp, Homo sapien
gatggaaactggctagaacaaagga

SEQ ID NO: 4065166 - DNA, 25 bp, Homo sapien
tgtcttagcaacaccaagaagatgg

SEQ ID NO: 4065167 - DNA, 25 bp, Homo sapien
tagtagatacaaaagcataagggtg

SEQ ID NO: 4065168 - DNA, 25 bp, Homo sapien
tgtctactcagtgccagcacacaag

SEQ ID NO: 4065169 - DNA, 25 bp, Homo sapien
gagatactgacagcaataagaagag

SEQ ID NO: 4065170 - DNA, 25 bp, Homo sapien
ccataaggagttgtcataagaatta

SEQ ID NO: 4065171 - DNA, 25 bp, Homo sapien
caactagcaggcaatgcatgggatc

SEQ ID NO: 4065172 - DNA, 25 bp, Homo sapien
gaagggaattaagacatacactcac

SEQ ID NO: 4065173 - DNA, 25 bp, Homo sapien
tatttgctgaactaaggagagccct

SEQ ID NO: 4065174 - DNA, 25 bp, Homo sapien
tgaggtccccttttcatggcccctg

SEQ ID NO: 4065175 - DNA, 25 bp, Homo sapien
ccagcgatactttggcatttacagc

SEQ ID NO: 4065176 - DNA, 25 bp, Homo sapien
ttagacaatattacccagcgatact

SEQ ID NO: 4065177 - DNA, 25 bp, Homo sapien
tattacccagcgatactttggcatt

SEQ ID NO: 4065178 - DNA, 25 bp, Homo sapien
caatattacccagcgatactttggc

SEQ ID NO: 4065179 - DNA, 25 bp, Homo sapien
gacgtaagtgcctggtctagaggac

SEQ ID NO: 4065180 - DNA, 25 bp, Homo sapien
gaggagtaaaagctgccgcagaaca

SEQ ID NO: 4065181 - DNA, 25 bp, Homo sapien
tctagaggacccaagatgactgtgc

SEQ ID NO: 4065182 - DNA, 25 bp, Homo sapien
cagggactaaactgaggactgatgt

SEQ ID NO: 4065183 - DNA, 25 bp, Homo sapien
ggctgccgtatactgatgaaagaca

SEQ ID NO: 4065184 - DNA, 25 bp, Homo sapien
tgaaagacaggatgccaccttcact

SEQ ID NO: 4065185 - DNA, 25 bp, Homo sapien
gatgccaccttcactactggcaata

SEQ ID NO: 4065186 - DNA, 25 bp, Homo sapien
ttcatactggtagggctgccgtata

SEQ ID NO: 4065187 - DNA, 25 bp, Homo sapien
tttgtcattgataggaaacagcggg

SEQ ID NO: 4065188 - DNA, 25 bp, Homo sapien
cactcgcaaagaaagccagttaact

SEQ ID NO: 4065189 - DNA, 25 bp, Homo sapien
acagcgggacatagagctttgaaaa

SEQ ID NO: 4065190 - DNA, 25 bp, Homo sapien
gctttgaaaagggtcctgtcctaca

SEQ ID NO: 4065191 - DNA, 25 bp, Homo sapien
agaacagaacctcagccgcaggatc

SEQ ID NO: 4065192 - DNA, 25 bp, Homo sapien
caggatctgaagtcacagaaagagt

SEQ ID NO: 4065193 - DNA, 25 bp, Homo sapien
tgggtcctgtcccgcccagaacaga

SEQ ID NO: 4065194 - DNA, 25 bp, Homo sapien
gagtcccgatgtctgatctctgagg

SEQ ID NO: 4065195 - DNA, 25 bp, Homo sapien
gctggagtccaactctcaaacagtg

SEQ ID NO: 4065196 - DNA, 25 bp, Homo sapien
actggacggctccacggttgctgga

SEQ ID NO: 4065197 - DNA, 25 bp, Homo sapien
cggctccacggttgctggagtccaa

SEQ ID NO: 4065198 - DNA, 25 bp, Homo sapien
atctggtggactggacggctccacg

SEQ ID NO: 4065199 - DNA, 25 bp, Homo sapien
gaggcatttgctttgggtcagcatc

SEQ ID NO: 4065200 - DNA, 25 bp, Homo sapien
cgaggaagttcacggttggcaagca

SEQ ID NO: 4065201 - DNA, 25 bp, Homo sapien
gcatcattgacagagcaagggcgag

SEQ ID NO: 4065202 - DNA, 25 bp, Homo sapien
cacggttggcaagcatcaagttcaa

SEQ ID NO: 4065203 - DNA, 25 bp, Homo sapien
ccacatgcaagaagttgatcaaagt

SEQ ID NO: 4065204 - DNA, 25 bp, Homo sapien
tcttccacatgcaagaagttgatca

SEQ ID NO: 4065205 - DNA, 25 bp, Homo sapien
catcttccacatgcaagaagttgat

SEQ ID NO: 4065206 - DNA, 25 bp, Homo sapien
tgggtgaagcagagctaaaggcagg

SEQ ID NO: 4065207 - DNA, 25 bp, Homo sapien
tctggttaggaatgtagaagacaac

SEQ ID NO: 4065208 - DNA, 25 bp, Homo sapien
tacatatgctacctctctggttagg

SEQ ID NO: 4065209 - DNA, 25 bp, Homo sapien
tcgtggctacccctgaagttagaaa

SEQ ID NO: 4065210 - DNA, 25 bp, Homo sapien
cagacatgtcccattccgcttgcag

SEQ ID NO: 4065211 - DNA, 25 bp, Homo sapien
acagcaggccttattgacaaagtca

SEQ ID NO: 4065212 - DNA, 25 bp, Homo sapien
ccttttgtaaagatgaaccagagca

SEQ ID NO: 4065213 - DNA, 25 bp, Homo sapien
tgtttagttcaatcaaagaccccag

SEQ ID NO: 4065214 - DNA, 25 bp, Homo sapien
agccaacatctctctggtcaccagg

SEQ ID NO: 4065215 - DNA, 25 bp, Homo sapien
ctgcagtagaaacagagtgtctggt

SEQ ID NO: 4065216 - DNA, 25 bp, Homo sapien
tgcagtagaaacagagtgtctggtg

SEQ ID NO: 4065217 - DNA, 25 bp, Homo sapien
agtagaaacagagtgtctggtgaaa

SEQ ID NO: 4065218 - DNA, 25 bp, Homo sapien
cagtagaaacagagtgtctggtgaa

SEQ ID NO: 4065219 - DNA, 25 bp, Homo sapien
caattcagcaatccctgagatccac

SEQ ID NO: 4065220 - DNA, 25 bp, Homo sapien
aattcagcaatccctgagatccact

SEQ ID NO: 4065221 - DNA, 25 bp, Homo sapien
attcagcaatccctgagatccactc

SEQ ID NO: 4065222 - DNA, 25 bp, Homo sapien
gctctaacagagtttactcaaccac

SEQ ID NO: 4065223 - DNA, 25 bp, Homo sapien
ccagggcttgccgttttttagacat

SEQ ID NO: 4065224 - DNA, 25 bp, Homo sapien
tttccctcttgtacactcataagca

SEQ ID NO: 4065225 - DNA, 25 bp, Homo sapien
cataatattctaacaaacagctcta

SEQ ID NO: 4065226 - DNA, 25 bp, Homo sapien
caatattactctcagggttatcttc

SEQ ID NO: 4065227 - DNA, 25 bp, Homo sapien
tcagggttatcttcccgaaacacac

SEQ ID NO: 4065228 - DNA, 25 bp, Homo sapien
ttatcttcccgaaacacacttctag

SEQ ID NO: 4065229 - DNA, 25 bp, Homo sapien
tccagggcccactggccaatattac

SEQ ID NO: 4065230 - DNA, 25 bp, Homo sapien
taaactgagtaatttcctccactgg

SEQ ID NO: 4065231 - DNA, 25 bp, Homo sapien
aaactgagtaatttcctccactgga

SEQ ID NO: 4065232 - DNA, 25 bp, Homo sapien
ctaaactgagtaatttcctccactg

SEQ ID NO: 4065233 - DNA, 25 bp, Homo sapien
ttcatagctaggatatagctcctcc

SEQ ID NO: 4065234 - DNA, 25 bp, Homo sapien
tcttcattcatagctaggatatagc

SEQ ID NO: 4065235 - DNA, 25 bp, Homo sapien
gcctcttcattcatagctaggatat

SEQ ID NO: 4065236 - DNA, 25 bp, Homo sapien
tagctaggatatagctcctcccaca

SEQ ID NO: 4065237 - DNA, 25 bp, Homo sapien
accaccactgagattcgtccctgaa

SEQ ID NO: 4065238 - DNA, 25 bp, Homo sapien
tgatacttgcgcagaaccaaagctg

SEQ ID NO: 4065239 - DNA, 25 bp, Homo sapien
ttttgagcggccacatggagacaat

SEQ ID NO: 4065240 - DNA, 25 bp, Homo sapien
catgcactgagcagaaatcaagttg

SEQ ID NO: 4065241 - DNA, 25 bp, Homo sapien
aggacggcttcaatccaggagttca

SEQ ID NO: 4065242 - DNA, 25 bp, Homo sapien
gcaggaggacggcttcaatccagga

SEQ ID NO: 4065243 - DNA, 25 bp, Homo sapien
taatcctataaggaaagaaataggc

SEQ ID NO: 4065244 - DNA, 25 bp, Homo sapien
taaggaaagaaataggccgggagca

SEQ ID NO: 4065245 - DNA, 25 bp, Homo sapien
caacggagaagacaagtctcccacg

SEQ ID NO: 4065246 - DNA, 25 bp, Homo sapien
gacaagtctcccacgtgctactgag

SEQ ID NO: 4065247 - DNA, 25 bp, Homo sapien
ctctggtggtcccaacggagaagac

SEQ ID NO: 4065248 - DNA, 25 bp, Homo sapien
cacgtgctactgagctttctggagc

SEQ ID NO: 4065249 - DNA, 25 bp, Homo sapien
tccgcaagtggtaggaacgaatgca

SEQ ID NO: 4065250 - DNA, 25 bp, Homo sapien
caaatgtggagataccaggagctca

SEQ ID NO: 4065251 - DNA, 25 bp, Homo sapien
ggagctcatttgattcataccccaa

SEQ ID NO: 4065252 - DNA, 25 bp, Homo sapien
ttctccaccaacaagccttagggtg

SEQ ID NO: 4065253 - DNA, 25 bp, Homo sapien
ctcattttaagcaccttctttcctg

SEQ ID NO: 4065254 - DNA, 25 bp, Homo sapien
cgtactctcattttaagcaccttct

SEQ ID NO: 4065255 - DNA, 25 bp, Homo sapien
cattttaagcaccttctttcctgtc

SEQ ID NO: 4065256 - DNA, 25 bp, Homo sapien
taacgtactctcattttaagcacct

SEQ ID NO: 4065257 - DNA, 25 bp, Homo sapien
gtctcatcaacagccttcgttttca

SEQ ID NO: 4065258 - DNA, 25 bp, Homo sapien
ttttgaaactcacatgtctcatcaa

SEQ ID NO: 4065259 - DNA, 25 bp, Homo sapien
catacaagtgtttggtgacatactg

SEQ ID NO: 4065260 - DNA, 25 bp, Homo sapien
tccatacaagtgtttggtgacatac

SEQ ID NO: 4065261 - DNA, 25 bp, Homo sapien
gacacagctgagcatcgccaagtga

SEQ ID NO: 4065262 - DNA, 25 bp, Homo sapien
tatagccaggtctagaggcgcattc

SEQ ID NO: 4065263 - DNA, 25 bp, Homo sapien
tgtttacccttcgtagagtcgtggc

SEQ ID NO: 4065264 - DNA, 25 bp, Homo sapien
tggtggctcaccttaactggacaca

SEQ ID NO: 4065265 - DNA, 25 bp, Homo sapien
cagctcaaggagagcaccagatgac

SEQ ID NO: 4065266 - DNA, 25 bp, Homo sapien
gagaaacagggatcttggacacaat

SEQ ID NO: 4065267 - DNA, 25 bp, Homo sapien
agttccatcactcaatttccgccag

SEQ ID NO: 4065268 - DNA, 25 bp, Homo sapien
gcacagttagagtcagcaagcctct

SEQ ID NO: 4065269 - DNA, 25 bp, Homo sapien
ctgtccgctagggccaggtgctgaa

SEQ ID NO: 4065270 - DNA, 25 bp, Homo sapien
tgctgcttgggacgttccaggcgac

SEQ ID NO: 4065271 - DNA, 25 bp, Homo sapien
tttcgcccgcgtaaagtgtcctcca

SEQ ID NO: 4065272 - DNA, 25 bp, Homo sapien
gctgcgggtggacttggacaacata

SEQ ID NO: 4065273 - DNA, 25 bp, Homo sapien
tcagtgacaaccgatggaatgaccg

SEQ ID NO: 4065274 - DNA, 25 bp, Homo sapien
tgaggaggaacccaagggaactcac

SEQ ID NO: 4065275 - DNA, 25 bp, Homo sapien
cccagtgcagccgatgacaggaact

SEQ ID NO: 4065276 - DNA, 25 bp, Homo sapien
gaaagggaagcggcctggcttccat

SEQ ID NO: 4065277 - DNA, 25 bp, Homo sapien
gccagagataccgatccagcttttt

SEQ ID NO: 4065278 - DNA, 25 bp, Homo sapien
aaagccagagataccgatccagctt

SEQ ID NO: 4065279 - DNA, 25 bp, Homo sapien
gagataccgatccagctttttgcca

SEQ ID NO: 4065280 - DNA, 25 bp, Homo sapien
gataccgatccagctttttgccagg

SEQ ID NO: 4065281 - DNA, 25 bp, Homo sapien
tcccatcacgggtctcaagcttctt

SEQ ID NO: 4065282 - DNA, 25 bp, Homo sapien
agctggagccggcgccagaaccaaa

SEQ ID NO: 4065283 - DNA, 25 bp, Homo sapien
caaccacggccttggtggagctgga

SEQ ID NO: 4065284 - DNA, 25 bp, Homo sapien
agcttcccatcacgggtctcaagct

SEQ ID NO: 4065285 - DNA, 25 bp, Homo sapien
tcgaatggatactcatgttacgcat

SEQ ID NO: 4065286 - DNA, 25 bp, Homo sapien
aatggatactcatgttacgcatccc

SEQ ID NO: 4065287 - DNA, 25 bp, Homo sapien
gtcttcgaatggatactcatgttac

SEQ ID NO: 4065288 - DNA, 25 bp, Homo sapien
cttcgaatggatactcatgttacgc

SEQ ID NO: 4065289 - DNA, 25 bp, Homo sapien
agggccagcttgaagtttatcagcc

SEQ ID NO: 4065290 - DNA, 25 bp, Homo sapien
gggccagcttgaagtttatcagccc

SEQ ID NO: 4065291 - DNA, 25 bp, Homo sapien
tctgtcttcgaacgccacaggtcac

SEQ ID NO: 4065292 - DNA, 25 bp, Homo sapien
tggtacatggtctcacagcctcagc

SEQ ID NO: 4065293 - DNA, 25 bp, Homo sapien
cagagatctgtcttcgaacgccaca

SEQ ID NO: 4065294 - DNA, 25 bp, Homo sapien
ggtacatggtctcacagcctcagcc

SEQ ID NO: 4065295 - DNA, 25 bp, Homo sapien
gcaccacaaacgtgtccgatatctg

SEQ ID NO: 4065296 - DNA, 25 bp, Homo sapien
tcatatagctgactgaagaagttga

SEQ ID NO: 4065297 - DNA, 25 bp, Homo sapien
aggacttccaggcaagactccagct

SEQ ID NO: 4065298 - DNA, 25 bp, Homo sapien
ccacaaacgtgtccgatatctggga

SEQ ID NO: 4065299 - DNA, 25 bp, Homo sapien
ctgccacctaaggttattgatgtag

SEQ ID NO: 4065300 - DNA, 25 bp, Homo sapien
ggttattgatgtagctctcgaacat

SEQ ID NO: 4065301 - DNA, 25 bp, Homo sapien
aaggttattgatgtagctctcgaac

SEQ ID NO: 4065302 - DNA, 25 bp, Homo sapien
ctaaggttattgatgtagctctcga

SEQ ID NO: 4065303 - DNA, 25 bp, Homo sapien
catgttgctccaagccatctgctgc

SEQ ID NO: 4065304 - DNA, 25 bp, Homo sapien
gtttgtccatgttgctccaagccat

SEQ ID NO: 4065305 - DNA, 25 bp, Homo sapien
ggctccacttggtctccaagcatct

SEQ ID NO: 4065306 - DNA, 25 bp, Homo sapien
ccacttggtctccaagcatcttgtt

SEQ ID NO: 4065307 - DNA, 25 bp, Homo sapien
ctcctgggtgtgcacggcctggatg

SEQ ID NO: 4065308 - DNA, 25 bp, Homo sapien
tccaggttaagggggctcagtaggc

SEQ ID NO: 4065309 - DNA, 25 bp, Homo sapien
tccttctcctgggtgtgcacggcct

SEQ ID NO: 4065310 - DNA, 25 bp, Homo sapien
ttgttgagagtcttgacctgctcct

SEQ ID NO: 4065311 - DNA, 25 bp, Homo sapien
tcccattccactggccccagcatag

SEQ ID NO: 4065312 - DNA, 25 bp, Homo sapien
actgtgatgatggtgatgcctccca

SEQ ID NO: 4065313 - DNA, 25 bp, Homo sapien
ggccccagcatagcctccaccctgg

SEQ ID NO: 4065314 - DNA, 25 bp, Homo sapien
atggtgatgcctcccattccactgg

SEQ ID NO: 4065315 - DNA, 25 bp, Homo sapien
caccgggcccacttgtgtaggagag

SEQ ID NO: 4065316 - DNA, 25 bp, Homo sapien
tagagaagctgatgggggcaccggg

SEQ ID NO: 4065317 - DNA, 25 bp, Homo sapien
cgggagaagctagagaagctgatgg

SEQ ID NO: 4065318 - DNA, 25 bp, Homo sapien
gaggctgctgaaggcccaggggtca

SEQ ID NO: 4065319 - DNA, 25 bp, Homo sapien
cagatccagtatcccgtgtgctgac

SEQ ID NO: 4065320 - DNA, 25 bp, Homo sapien
tcagattctcagatccagtatcccg

SEQ ID NO: 4065321 - DNA, 25 bp, Homo sapien
acagaataaggggaagatccctgga

SEQ ID NO: 4065322 - DNA, 25 bp, Homo sapien
tgctgaatcctccaaggggaacaga

SEQ ID NO: 4065323 - DNA, 25 bp, Homo sapien
aagtcgtgaatgaacctgtgggttg

SEQ ID NO: 4065324 - DNA, 25 bp, Homo sapien
atgtttttccccccactcagacgtg

SEQ ID NO: 4065325 - DNA, 25 bp, Homo sapien
tgaagtcgtgaatgaacctgtgggt

SEQ ID NO: 4065326 - DNA, 25 bp, Homo sapien
cagacgtgtatttaataattgtaga

SEQ ID NO: 4065327 - DNA, 25 bp, Homo sapien
aagaatccaaactcccaggctggca

SEQ ID NO: 4065328 - DNA, 25 bp, Homo sapien
ctaagaatccaaactcccaggctgg

SEQ ID NO: 4065329 - DNA, 25 bp, Homo sapien
gcagcagtgctgaggacaagctcac

SEQ ID NO: 4065330 - DNA, 25 bp, Homo sapien
aggcagcagtgctgaggacaagctc

SEQ ID NO: 4065331 - DNA, 25 bp, Homo sapien
ggcattcacactggcgcagagaggc

SEQ ID NO: 4065332 - DNA, 25 bp, Homo sapien
cactggaagatcttgtggtgacgta

SEQ ID NO: 4065333 - DNA, 25 bp, Homo sapien
tgtcatagatggcattcacactggc

SEQ ID NO: 4065334 - DNA, 25 bp, Homo sapien
gagagtcggtctggaagaccccact

SEQ ID NO: 4065335 - DNA, 25 bp, Homo sapien
tacattgcctcttatccaagcaatc

SEQ ID NO: 4065336 - DNA, 25 bp, Homo sapien
tcacatcttgtgacgcctcgtatgc

SEQ ID NO: 4065337 - DNA, 25 bp, Homo sapien
cgtatgcgtgctgcttacattgcct

SEQ ID NO: 4065338 - DNA, 25 bp, Homo sapien
tgcacggccttcacatcttgtgacg

SEQ ID NO: 4065339 - DNA, 25 bp, Homo sapien
ccaggagaggatccagggagttatc

SEQ ID NO: 4065340 - DNA, 25 bp, Homo sapien
ttggccaggagaggatccagggagt

SEQ ID NO: 4065341 - DNA, 25 bp, Homo sapien
cttggccaggagaggatccagggag

SEQ ID NO: 4065342 - DNA, 25 bp, Homo sapien
ggccaggagaggatccagggagtta

SEQ ID NO: 4065343 - DNA, 25 bp, Homo sapien
aggccttgcttccactagtgccgcg

SEQ ID NO: 4065344 - DNA, 25 bp, Homo sapien
gacgacgacctggatcaggattttt

SEQ ID NO: 4065345 - DNA, 25 bp, Homo sapien
cttgcttccactagtgccgcgacga

SEQ ID NO: 4065346 - DNA, 25 bp, Homo sapien
gccgcgacgacgacctggatcagga

SEQ ID NO: 4065347 - DNA, 25 bp, Homo sapien
catggccagacattgggaacaagct

SEQ ID NO: 4065348 - DNA, 25 bp, Homo sapien
agctggcacagtttaagtttgggca

SEQ ID NO: 4065349 - DNA, 25 bp, Homo sapien
aacaagcttgctgacttttctggag

SEQ ID NO: 4065350 - DNA, 25 bp, Homo sapien
tactaggtaatttcgtactgctcag

SEQ ID NO: 4065351 - DNA, 25 bp, Homo sapien
tattagaacagggcaccttgttcat

SEQ ID NO: 4065352 - DNA, 25 bp, Homo sapien
gcatattagaacagggcaccttgtt

SEQ ID NO: 4065353 - DNA, 25 bp, Homo sapien
catattagaacagggcaccttgttc

SEQ ID NO: 4065354 - DNA, 25 bp, Homo sapien
atattagaacagggcaccttgttca

SEQ ID NO: 4065355 - DNA, 25 bp, Homo sapien
actgggaactgggacaaggcagtca

SEQ ID NO: 4065356 - DNA, 25 bp, Homo sapien
gtgggttttgatgaatagacctgtt

SEQ ID NO: 4065357 - DNA, 25 bp, Homo sapien
tcagagccgcatagaaggaacccta

SEQ ID NO: 4065358 - DNA, 25 bp, Homo sapien
gcatagaaggaaccctagaactggg

SEQ ID NO: 4065359 - DNA, 25 bp, Homo sapien
tttatgccatggcaattagcaacca

SEQ ID NO: 4065360 - DNA, 25 bp, Homo sapien
gccatggcaattagcaaccagcatc

SEQ ID NO: 4065361 - DNA, 25 bp, Homo sapien
caaccagcatcacttgaaagagcag

SEQ ID NO: 4065362 - DNA, 25 bp, Homo sapien
catcacttgaaagagcagccgttcc

SEQ ID NO: 4065363 - DNA, 25 bp, Homo sapien
ctgcagacaggaatgaagttggact

SEQ ID NO: 4065364 - DNA, 25 bp, Homo sapien
tcctgcaggattggccagaacaacg

SEQ ID NO: 4065365 - DNA, 25 bp, Homo sapien
gagtcctggcccgaaactggatgcg

SEQ ID NO: 4065366 - DNA, 25 bp, Homo sapien
cgaatgctggcaagccctggaaggt

SEQ ID NO: 4065367 - DNA, 25 bp, Homo sapien
gctttttggtcaggcgccacctgga

SEQ ID NO: 4065368 - DNA, 25 bp, Homo sapien
tgcggagactggatttcagcttcgt

SEQ ID NO: 4065369 - DNA, 25 bp, Homo sapien
atttcagcttcgtggtcggcggagc

SEQ ID NO: 4065370 - DNA, 25 bp, Homo sapien
gcgatattgcggagactggatttca

SEQ ID NO: 4065371 - DNA, 25 bp, Homo sapien
ttgacgccggccgtcgcgatattgc

SEQ ID NO: 4065372 - DNA, 25 bp, Homo sapien
tgcagatgtcatggggcagcttgtt

SEQ ID NO: 4065373 - DNA, 25 bp, Homo sapien
tctgcttcttcgtgcttagccttgg

SEQ ID NO: 4065374 - DNA, 25 bp, Homo sapien
gccttggctgtgtactcctccttgt

SEQ ID NO: 4065375 - DNA, 25 bp, Homo sapien
tcttcgtgcttagccttggctgtgt

SEQ ID NO: 4065376 - DNA, 25 bp, Homo sapien
ttgggagggtcagccgcaggcttct

SEQ ID NO: 4065377 - DNA, 25 bp, Homo sapien
cttgggagggtcagccgcaggcttc

SEQ ID NO: 4065378 - DNA, 25 bp, Homo sapien
taccaggttgccatccgagtggaga

SEQ ID NO: 4065379 - DNA, 25 bp, Homo sapien
tctagcatgattagggaggcacagg

SEQ ID NO: 4065380 - DNA, 25 bp, Homo sapien
gtgttgtacaaggtgtgaaatctac

SEQ ID NO: 4065381 - DNA, 25 bp, Homo sapien
ttaattttgaacaattccttgaagc

SEQ ID NO: 4065382 - DNA, 25 bp, Homo sapien
cgaacctttagaacgctgggctgca

SEQ ID NO: 4065383 - DNA, 25 bp, Homo sapien
tagaatagcctagcttcgttacagt

SEQ ID NO: 4065384 - DNA, 25 bp, Homo sapien
ctttcagtcctaaaccagcagtggc

SEQ ID NO: 4065385 - DNA, 25 bp, Homo sapien
ttttcagagtttggtccagatgaag

SEQ ID NO: 4065386 - DNA, 25 bp, Homo sapien
gatctagtcttcatcatggggcctg

SEQ ID NO: 4065387 - DNA, 25 bp, Homo sapien
ttagaccttactggatctagtcttc

SEQ ID NO: 4065388 - DNA, 25 bp, Homo sapien
tactggatctagtcttcatcatggg

SEQ ID NO: 4065389 - DNA, 25 bp, Homo sapien
agaccttactggatctagtcttcat

SEQ ID NO: 4065390 - DNA, 25 bp, Homo sapien
cagctcccttgagcaggaataagtg

SEQ ID NO: 4065391 - DNA, 25 bp, Homo sapien
ggtcagggatgttaacgcaaatgga

SEQ ID NO: 4065392 - DNA, 25 bp, Homo sapien
taacgcaaatggagatcccttcacc

SEQ ID NO: 4065393 - DNA, 25 bp, Homo sapien
ccttgagcaggaataagtgagtggc

SEQ ID NO: 4065394 - DNA, 25 bp, Homo sapien
gaatgaaagtccgataagaatccat

SEQ ID NO: 4065395 - DNA, 25 bp, Homo sapien
tgtagaccgtaatcaagctttcaag

SEQ ID NO: 4065396 - DNA, 25 bp, Homo sapien
gctttcaagaaccacgtgcagcacg

SEQ ID NO: 4065397 - DNA, 25 bp, Homo sapien
caatcacccaactgctgtagaccgt

SEQ ID NO: 4065398 - DNA, 25 bp, Homo sapien
gcctctgatgcagacaacccgttta

SEQ ID NO: 4065399 - DNA, 25 bp, Homo sapien
catttgcaacgaggcctctgatgca

SEQ ID NO: 4065400 - DNA, 25 bp, Homo sapien
cagacaacccgtttatacctctggg

SEQ ID NO: 4065401 - DNA, 25 bp, Homo sapien
tgtttcttgcaactcctaacatttg

SEQ ID NO: 4065402 - DNA, 25 bp, Homo sapien
gaggagatacctgttacaggcctct

SEQ ID NO: 4065403 - DNA, 25 bp, Homo sapien
tgggaggagatacctgttacaggcc

SEQ ID NO: 4065404 - DNA, 25 bp, Homo sapien
aggactgggaggagatacctgttac

SEQ ID NO: 4065405 - DNA, 25 bp, Homo sapien
gatacctgttacaggcctctctcct

SEQ ID NO: 4065406 - DNA, 25 bp, Homo sapien
tgtctctcttcatccgctgacttaa

SEQ ID NO: 4065407 - DNA, 25 bp, Homo sapien
aagactcagcaagtgtgttgttcca

SEQ ID NO: 4065408 - DNA, 25 bp, Homo sapien
tcttcatccgctgacttaaatgtta

SEQ ID NO: 4065409 - DNA, 25 bp, Homo sapien
ttgactcccacaatcacaagctgag

SEQ ID NO: 4065410 - DNA, 25 bp, Homo sapien
cagtctgtcgtagataatgccgtac

SEQ ID NO: 4065411 - DNA, 25 bp, Homo sapien
aagagcatgtccacttcaaatttga

SEQ ID NO: 4065412 - DNA, 25 bp, Homo sapien
gaaatgtttccttgcatctccgtat

SEQ ID NO: 4065413 - DNA, 25 bp, Homo sapien
tttgatagctatgtcccaactgccc

SEQ ID NO: 4065414 - DNA, 25 bp, Homo sapien
taggcgtggtgtacttcttagaact

SEQ ID NO: 4065415 - DNA, 25 bp, Homo sapien
gcatataggcgtggtgtacttctta

SEQ ID NO: 4065416 - DNA, 25 bp, Homo sapien
gagcatataggcgtggtgtacttct

SEQ ID NO: 4065417 - DNA, 25 bp, Homo sapien
gcgtggtgtacttcttagaacttca

SEQ ID NO: 4065418 - DNA, 25 bp, Homo sapien
tcacaaggccacagtatcttgagcg

SEQ ID NO: 4065419 - DNA, 25 bp, Homo sapien
agctgctcgggataagagggcacct

SEQ ID NO: 4065420 - DNA, 25 bp, Homo sapien
gggcacctcgtccatttctggctgg

SEQ ID NO: 4065421 - DNA, 25 bp, Homo sapien
gccacagtatcttgagcgagtccat

SEQ ID NO: 4065422 - DNA, 25 bp, Homo sapien
tgtgtgaagtcccgggctcccaaat

SEQ ID NO: 4065423 - DNA, 25 bp, Homo sapien
cagttgtgtttggtcactgtgttgc

SEQ ID NO: 4065424 - DNA, 25 bp, Homo sapien
gttgcttgcatatggctgttggcat

SEQ ID NO: 4065425 - DNA, 25 bp, Homo sapien
ctggaaatttcaaagggacccacag

SEQ ID NO: 4065426 - DNA, 25 bp, Homo sapien
agtccttatcgtgggcacaggatct

SEQ ID NO: 4065427 - DNA, 25 bp, Homo sapien
catagagtagagcataaagtcctta

SEQ ID NO: 4065428 - DNA, 25 bp, Homo sapien
gcataaagtccttatcgtgggcaca

SEQ ID NO: 4065429 - DNA, 25 bp, Homo sapien
tagagcataaagtccttatcgtggg

SEQ ID NO: 4065430 - DNA, 25 bp, Homo sapien
gaaggtactgcaacatattggcgcc

SEQ ID NO: 4065431 - DNA, 25 bp, Homo sapien
caaaactaatacacgtggctccaga

SEQ ID NO: 4065432 - DNA, 25 bp, Homo sapien
tgtcatgtgccaaggctccgtgggc

SEQ ID NO: 4065433 - DNA, 25 bp, Homo sapien
gcaccattcataccctgcagagagg

SEQ ID NO: 4065434 - DNA, 25 bp, Homo sapien
gaaaggtgcctatcatgtcttcagt

SEQ ID NO: 4065435 - DNA, 25 bp, Homo sapien
ttcagtgtcagtgccctggtatgga

SEQ ID NO: 4065436 - DNA, 25 bp, Homo sapien
tccatccgtagagggcagaaaggtg

SEQ ID NO: 4065437 - DNA, 25 bp, Homo sapien
ggccttccacaggttctggagttaa

SEQ ID NO: 4065438 - DNA, 25 bp, Homo sapien
gaatacatgtcagtgctagaccaca

SEQ ID NO: 4065439 - DNA, 25 bp, Homo sapien
tagaccacatcctttcatacccgga

SEQ ID NO: 4065440 - DNA, 25 bp, Homo sapien
cctcttatgggtagtgatgggcact

SEQ ID NO: 4065441 - DNA, 25 bp, Homo sapien
actttaggagtaggaatacatgtca

SEQ ID NO: 4065442 - DNA, 25 bp, Homo sapien
gggtaaatccagctgtacacgagag

SEQ ID NO: 4065443 - DNA, 25 bp, Homo sapien
tacatgaatactagtgggtaaatcc

SEQ ID NO: 4065444 - DNA, 25 bp, Homo sapien
gtatatgttagggccagtgggtaaa

SEQ ID NO: 4065445 - DNA, 25 bp, Homo sapien
gcatatgttagggctagcaggtaaa

SEQ ID NO: 4065446 - DNA, 25 bp, Homo sapien
tgcaccccagagcaggtgtatacat

SEQ ID NO: 4065447 - DNA, 25 bp, Homo sapien
ctgcaccccagagcaggtgtataca

SEQ ID NO: 4065448 - DNA, 25 bp, Homo sapien
gtagcgattcgcttggtgttttctc

SEQ ID NO: 4065449 - DNA, 25 bp, Homo sapien
taggcaagggacagactgtagcgat

SEQ ID NO: 4065450 - DNA, 25 bp, Homo sapien
cagccagaggtaggatagggatttt

SEQ ID NO: 4065451 - DNA, 25 bp, Homo sapien
gatgccagagaaaatgacctcatta

SEQ ID NO: 4065452 - DNA, 25 bp, Homo sapien
tttcctgctgtagtcccgccccgag

SEQ ID NO: 4065453 - DNA, 25 bp, Homo sapien
tcttggtagccgtgggcactttggt

SEQ ID NO: 4065454 - DNA, 25 bp, Homo sapien
gcactttggtgctctgatgatgtaa

SEQ ID NO: 4065455 - DNA, 25 bp, Homo sapien
taacatggagattgtccttgtctcc

SEQ ID NO: 4065456 - DNA, 25 bp, Homo sapien
tgtaataatgctggatcatttgtcc

SEQ ID NO: 4065457 - DNA, 25 bp, Homo sapien
gtaataatgctggatcatttgtcca

SEQ ID NO: 4065458 - DNA, 25 bp, Homo sapien
taataatgctggatcatttgtccac

SEQ ID NO: 4065459 - DNA, 25 bp, Homo sapien
tttgtaataatgctggatcatttgt

SEQ ID NO: 4065460 - DNA, 25 bp, Homo sapien
cacccaaacctttcctattgtggca

SEQ ID NO: 4065461 - DNA, 25 bp, Homo sapien
ttatcttgtccagcacatgtgtcca

SEQ ID NO: 4065462 - DNA, 25 bp, Homo sapien
atcttgtccagcacatgtgtccaca

SEQ ID NO: 4065463 - DNA, 25 bp, Homo sapien
tccacacttggtattaatagctcca

SEQ ID NO: 4065464 - DNA, 25 bp, Homo sapien
tgtctccctccagtagaatgtgcgt

SEQ ID NO: 4065465 - DNA, 25 bp, Homo sapien
acagcagtgctgtgtgacgcgatag

SEQ ID NO: 4065466 - DNA, 25 bp, Homo sapien
tagaatgtgcgttctgctatacagc

SEQ ID NO: 4065467 - DNA, 25 bp, Homo sapien
cgcgatagcaggtcctttttaaaca

SEQ ID NO: 4065468 - DNA, 25 bp, Homo sapien
cctactggttagtgggtgatgattg

SEQ ID NO: 4065469 - DNA, 25 bp, Homo sapien
taagtaccgttggtcctgacaccat

SEQ ID NO: 4065470 - DNA, 25 bp, Homo sapien
tgaactcaggtgtcttaagtaccgt

SEQ ID NO: 4065471 - DNA, 25 bp, Homo sapien
gtgatgattggatggcttccgaatg

SEQ ID NO: 4065472 - DNA, 25 bp, Homo sapien
ataaatactgatggagaatgggctc

SEQ ID NO: 4065473 - DNA, 25 bp, Homo sapien
taaatactgatggagaatgggctct

SEQ ID NO: 4065474 - DNA, 25 bp, Homo sapien
tggacatggcggtgtggccactgac

SEQ ID NO: 4065475 - DNA, 25 bp, Homo sapien
tctttgagagccatagcagctggct

SEQ ID NO: 4065476 - DNA, 25 bp, Homo sapien
tactacctgtagcaagagcatgtct

SEQ ID NO: 4065477 - DNA, 25 bp, Homo sapien
gagacgggacagtttgtactacctg

SEQ ID NO: 4065478 - DNA, 25 bp, Homo sapien
ggtaacaggataacagtgcattgct

SEQ ID NO: 4065479 - DNA, 25 bp, Homo sapien
tttaattgagaagcagaacgtattc

SEQ ID NO: 4065480 - DNA, 25 bp, Homo sapien
tgtagcatctgctatatccggtaac

SEQ ID NO: 4065481 - DNA, 25 bp, Homo sapien
tgttaggattaaagtagcttctcat

SEQ ID NO: 4065482 - DNA, 25 bp, Homo sapien
tccatttactgtgtgctgtagccaa

SEQ ID NO: 4065483 - DNA, 25 bp, Homo sapien
gctgtttaggaagctgtgcataaca

SEQ ID NO: 4065484 - DNA, 25 bp, Homo sapien
gttatggaatatgaatacgtggcac

SEQ ID NO: 4065485 - DNA, 25 bp, Homo sapien
gcataaatgcatgcgttcattccta

SEQ ID NO: 4065486 - DNA, 25 bp, Homo sapien
taaagattctgttaagagctaagtg

SEQ ID NO: 4065487 - DNA, 25 bp, Homo sapien
gaggcatttttagaattgtgggcaa

SEQ ID NO: 4065488 - DNA, 25 bp, Homo sapien
tttaagtacatctgggataaagtgg

SEQ ID NO: 4065489 - DNA, 25 bp, Homo sapien
aatccatagtaactggaggcatttt

SEQ ID NO: 4065490 - DNA, 25 bp, Homo sapien
gaataatatccaattaggctaagtg

SEQ ID NO: 4065491 - DNA, 25 bp, Homo sapien
attcggtgcctgagtgacaagccct

SEQ ID NO: 4065492 - DNA, 25 bp, Homo sapien
gaagaaggaataatatccaattagg

SEQ ID NO: 4065493 - DNA, 25 bp, Homo sapien
caattaggctaagtgtattcggtgc

SEQ ID NO: 4065494 - DNA, 25 bp, Homo sapien
aattctgtgtgctgtgcaggccgtg

SEQ ID NO: 4065495 - DNA, 25 bp, Homo sapien
cgtggagactcatcttctgcacagg

SEQ ID NO: 4065496 - DNA, 25 bp, Homo sapien
ataattctgtgtgctgtgcaggccg

SEQ ID NO: 4065497 - DNA, 25 bp, Homo sapien
gcaggccgtggagactcatcttctg

SEQ ID NO: 4065498 - DNA, 25 bp, Homo sapien
taaactgttcgttgtatggagtggc

SEQ ID NO: 4065499 - DNA, 25 bp, Homo sapien
gtggcttagctttcataaaacagaa

SEQ ID NO: 4065500 - DNA, 25 bp, Homo sapien
tcctcagaaggcattgtgagcaaaa

SEQ ID NO: 4065501 - DNA, 25 bp, Homo sapien
tgtattaattcacctgcttggaaag

SEQ ID NO: 4065502 - DNA, 25 bp, Homo sapien
ccagttcatttccaacgcgtatttc

SEQ ID NO: 4065503 - DNA, 25 bp, Homo sapien
cactggtatatggaggatgtttgaa

SEQ ID NO: 4065504 - DNA, 25 bp, Homo sapien
tgaagatggccgctggaaaagaagc

SEQ ID NO: 4065505 - DNA, 25 bp, Homo sapien
gatgtttgaaaaccaccagaaccta

SEQ ID NO: 4065506 - DNA, 25 bp, Homo sapien
ggctggcccattgttacaagaggaa

SEQ ID NO: 4065507 - DNA, 25 bp, Homo sapien
ttgggagctggaagcgtttctccat

SEQ ID NO: 4065508 - DNA, 25 bp, Homo sapien
tagaggtttgcagaggtaaatcttg

SEQ ID NO: 4065509 - DNA, 25 bp, Homo sapien
tcgttccctccccagtagttgtgaa

SEQ ID NO: 4065510 - DNA, 25 bp, Homo sapien
tctttatgctagcttcttccatcag

SEQ ID NO: 4065511 - DNA, 25 bp, Homo sapien
tcttggtagataaggattttatgaa

SEQ ID NO: 4065512 - DNA, 25 bp, Homo sapien
ggtctcatcagccaagggatttaaa

SEQ ID NO: 4065513 - DNA, 25 bp, Homo sapien
gattaaggatataaacccaacttca

SEQ ID NO: 4065514 - DNA, 25 bp, Homo sapien
tattatgcattgaccaccattcact

SEQ ID NO: 4065515 - DNA, 25 bp, Homo sapien
tcaaaaggtaactctcattttatta

SEQ ID NO: 4065516 - DNA, 25 bp, Homo sapien
tgtgtttgtcagtcgtggtttgtgt

SEQ ID NO: 4065517 - DNA, 25 bp, Homo sapien
gtttgtcagtcgtggtttgtgttct

SEQ ID NO: 4065518 - DNA, 25 bp, Homo sapien
gctgtgtttgtcagtcgtggtttgt

SEQ ID NO: 4065519 - DNA, 25 bp, Homo sapien
tggctgtgtttgtcagtcgtggttt

SEQ ID NO: 4065520 - DNA, 25 bp, Homo sapien
cctgccaggccggctcatctgaccc

SEQ ID NO: 4065521 - DNA, 25 bp, Homo sapien
ggagggaaacaagcctgccaggccg

SEQ ID NO: 4065522 - DNA, 25 bp, Homo sapien
ctggtggagggaaacaagcctgcca

SEQ ID NO: 4065523 - DNA, 25 bp, Homo sapien
aaacaagcctgccaggccggctcat

SEQ ID NO: 4065524 - DNA, 25 bp, Homo sapien
ggagatagtttgagatttgaggcct

SEQ ID NO: 4065525 - DNA, 25 bp, Homo sapien
gaggcctctgaagaataggtgtttt

SEQ ID NO: 4065526 - DNA, 25 bp, Homo sapien
tttgacagacacattaagagcttca

SEQ ID NO: 4065527 - DNA, 25 bp, Homo sapien
cattaagagcttcaagggtcatttc

SEQ ID NO: 4065528 - DNA, 25 bp, Homo sapien
gaggcccctggttgacctggaatga

SEQ ID NO: 4065529 - DNA, 25 bp, Homo sapien
caagtagtgtcttgttttaggagca

SEQ ID NO: 4065530 - DNA, 25 bp, Homo sapien
tggaatgacctagaccagcagtcac

SEQ ID NO: 4065531 - DNA, 25 bp, Homo sapien
gcccatggacaaaatacagccggta

SEQ ID NO: 4065532 - DNA, 25 bp, Homo sapien
gcctgcaggctcagaatagttctta

SEQ ID NO: 4065533 - DNA, 25 bp, Homo sapien
cctgcaggctcagaatagttcttac

SEQ ID NO: 4065534 - DNA, 25 bp, Homo sapien
taaggctgccttcgtctagaaagtg

SEQ ID NO: 4065535 - DNA, 25 bp, Homo sapien
atatccatgtacagtcccttttttg

SEQ ID NO: 4065536 - DNA, 25 bp, Homo sapien
ggataaggctgccttcgtctagaaa

SEQ ID NO: 4065537 - DNA, 25 bp, Homo sapien
ggctgccttcgtctagaaagtgcct

SEQ ID NO: 4065538 - DNA, 25 bp, Homo sapien
tctccacttcgtggactcctcgtac

SEQ ID NO: 4065539 - DNA, 25 bp, Homo sapien
ctctccacttcgtggactcctcgta

SEQ ID NO: 4065540 - DNA, 25 bp, Homo sapien
tccaggatgctctaacctggccacg

SEQ ID NO: 4065541 - DNA, 25 bp, Homo sapien
cctgattccaggatgctctaacctg

SEQ ID NO: 4065542 - DNA, 25 bp, Homo sapien
ggatgctctaacctggccacgcatc

SEQ ID NO: 4065543 - DNA, 25 bp, Homo sapien
tcccccgtggattctcagctgttgt

SEQ ID NO: 4065544 - DNA, 25 bp, Homo sapien
cttcctcctgttgctatcagagcct

SEQ ID NO: 4065545 - DNA, 25 bp, Homo sapien
tcctgttgctatcagagcctgcctg

SEQ ID NO: 4065546 - DNA, 25 bp, Homo sapien
cctgttgctatcagagcctgcctgc

SEQ ID NO: 4065547 - DNA, 25 bp, Homo sapien
ttcctcctgttgctatcagagcctg

SEQ ID NO: 4065548 - DNA, 25 bp, Homo sapien
taatagagtcttggtgcaggagctg

SEQ ID NO: 4065549 - DNA, 25 bp, Homo sapien
cataattttggtaactttgtctgct

SEQ ID NO: 4065550 - DNA, 25 bp, Homo sapien
gacttgaagaattgcgacgtcggcc

SEQ ID NO: 4065551 - DNA, 25 bp, Homo sapien
ggctgagaaatggaatgcctgtcat

SEQ ID NO: 4065552 - DNA, 25 bp, Homo sapien
gaactcagaaagtaataaagccctg

SEQ ID NO: 4065553 - DNA, 25 bp, Homo sapien
aaagccctgcagtaatcagagggct

SEQ ID NO: 4065554 - DNA, 25 bp, Homo sapien
tgtgtaacagtagtaatctccaatt

SEQ ID NO: 4065555 - DNA, 25 bp, Homo sapien
tcttaatcattaccttcacctggag

SEQ ID NO: 4065556 - DNA, 25 bp, Homo sapien
tgatggcgggctggatagtacaact

SEQ ID NO: 4065557 - DNA, 25 bp, Homo sapien
tgaaccccgatgctttgggaacaca

SEQ ID NO: 4065558 - DNA, 25 bp, Homo sapien
gaggtgctgtcatgctgaaccccta

SEQ ID NO: 4065559 - DNA, 25 bp, Homo sapien
tatatataagggacaaatctctggg

SEQ ID NO: 4065560 - DNA, 25 bp, Homo sapien
tgaccgtcttctcatgacccatgaa

SEQ ID NO: 4065561 - DNA, 25 bp, Homo sapien
tgggtgttccaaagatatcgtaaat

SEQ ID NO: 4065562 - DNA, 25 bp, Homo sapien
gagtcttagagcagcataaacaaca

SEQ ID NO: 4065563 - DNA, 25 bp, Homo sapien
gccatgatttcacaaacctgttcaa

SEQ ID NO: 4065564 - DNA, 25 bp, Homo sapien
tgggcatccgtcttccattccacag

SEQ ID NO: 4065565 - DNA, 25 bp, Homo sapien
cttcttgggcatccgtcttccattc

SEQ ID NO: 4065566 - DNA, 25 bp, Homo sapien
tcttcttgggcatccgtcttccatt

SEQ ID NO: 4065567 - DNA, 25 bp, Homo sapien
cttgggcatccgtcttccattccac

SEQ ID NO: 4065568 - DNA, 25 bp, Homo sapien
gcagccattctggtttgactgtgct

SEQ ID NO: 4065569 - DNA, 25 bp, Homo sapien
ctggtttgactgtgctcgtgctgcc

SEQ ID NO: 4065570 - DNA, 25 bp, Homo sapien
gcagcagccattctggtttgactgt

SEQ ID NO: 4065571 - DNA, 25 bp, Homo sapien
cattctggtttgactgtgctcgtgc

SEQ ID NO: 4065572 - DNA, 25 bp, Homo sapien
gttcccaggagccaaccacgagagc

SEQ ID NO: 4065573 - DNA, 25 bp, Homo sapien
tcagcattggaatatcactgggaat

SEQ ID NO: 4065574 - DNA, 25 bp, Homo sapien
aaccacgagagcttcacagctcaga

SEQ ID NO: 4065575 - DNA, 25 bp, Homo sapien
tcactgggaatctcaagttcccagg

SEQ ID NO: 4065576 - DNA, 25 bp, Homo sapien
tcaagtaagcatctcttcttcttgt

SEQ ID NO: 4065577 - DNA, 25 bp, Homo sapien
taattcaagtaagcatctcttcttc

SEQ ID NO: 4065578 - DNA, 25 bp, Homo sapien
ctatgtagtaattcaagtaagcatc

SEQ ID NO: 4065579 - DNA, 25 bp, Homo sapien
tgtagtaattcaagtaagcatctct

SEQ ID NO: 4065580 - DNA, 25 bp, Homo sapien
ctgtcccttttctgggtcagtttgc

SEQ ID NO: 4065581 - DNA, 25 bp, Homo sapien
cttttctgggtcagtttgcccttca

SEQ ID NO: 4065582 - DNA, 25 bp, Homo sapien
tgtcccttttctgggtcagtttgcc

SEQ ID NO: 4065583 - DNA, 25 bp, Homo sapien
ttttctgggtcagtttgcccttcat

SEQ ID NO: 4065584 - DNA, 25 bp, Homo sapien
tgtctccttccattctggtgaacac

SEQ ID NO: 4065585 - DNA, 25 bp, Homo sapien
gtgtctccttccattctggtgaaca

SEQ ID NO: 4065586 - DNA, 25 bp, Homo sapien
ggtgaacacatccaatgttcaatgt

SEQ ID NO: 4065587 - DNA, 25 bp, Homo sapien
gggaggcttttatgaactgggccat

SEQ ID NO: 4065588 - DNA, 25 bp, Homo sapien
gcaatttggtgagggacgggggcta

SEQ ID NO: 4065589 - DNA, 25 bp, Homo sapien
ttagggaggcttttatgaactgggc

SEQ ID NO: 4065590 - DNA, 25 bp, Homo sapien
ctggcaatttggtgagggacggggg

SEQ ID NO: 4065591 - DNA, 25 bp, Homo sapien
tatttattcacgtctgagattccgt

SEQ ID NO: 4065592 - DNA, 25 bp, Homo sapien
ccgttgtgtgaaaaggactcatttt

SEQ ID NO: 4065593 - DNA, 25 bp, Homo sapien
tattaatgtgtcactgtgggaaact

SEQ ID NO: 4065594 - DNA, 25 bp, Homo sapien
aacttactctagttcatttgcgaac

SEQ ID NO: 4065595 - DNA, 25 bp, Homo sapien
aaattcggtgtggtcagcagacccg

SEQ ID NO: 4065596 - DNA, 25 bp, Homo sapien
agacccggtgaagttttggatacat

SEQ ID NO: 4065597 - DNA, 25 bp, Homo sapien
gtgtggtcagcagacccggtgaagt

SEQ ID NO: 4065598 - DNA, 25 bp, Homo sapien
cttgttaaattcggtgtggtcagca

SEQ ID NO: 4065599 - DNA, 25 bp, Homo sapien
gttgaatagccgtgtttcctcagca

SEQ ID NO: 4065600 - DNA, 25 bp, Homo sapien
tgtgtaagggatgaacgactctcta

SEQ ID NO: 4065601 - DNA, 25 bp, Homo sapien
tgcccattgccatttctagcattct

SEQ ID NO: 4065602 - DNA, 25 bp, Homo sapien
gagaagctccgattttcttgttgaa

SEQ ID NO: 4065603 - DNA, 25 bp, Homo sapien
aatttggagctcataccgacatcac

SEQ ID NO: 4065604 - DNA, 25 bp, Homo sapien
ctgtgctccggattccagggagttc

SEQ ID NO: 4065605 - DNA, 25 bp, Homo sapien
ggagctcataccgacatcacagaat

SEQ ID NO: 4065606 - DNA, 25 bp, Homo sapien
tgtgctccggattccagggagttct

SEQ ID NO: 4065607 - DNA, 25 bp, Homo sapien
tagagggaatattaacatagcatct

SEQ ID NO: 4065608 - DNA, 25 bp, Homo sapien
agagggaatattaacatagcatctt

SEQ ID NO: 4065609 - DNA, 25 bp, Homo sapien
atagagggaatattaacatagcatc

SEQ ID NO: 4065610 - DNA, 25 bp, Homo sapien
aaatagagggaatattaacatagca

SEQ ID NO: 4065611 - DNA, 25 bp, Homo sapien
aggtgtacagactgacatcaaacct

SEQ ID NO: 4065612 - DNA, 25 bp, Homo sapien
gttgtcatttataatcatctgtcca

SEQ ID NO: 4065613 - DNA, 25 bp, Homo sapien
gatggattgttctctaagcttcact

SEQ ID NO: 4065614 - DNA, 25 bp, Homo sapien
tgaggtgggagcagtaaagttaatt

SEQ ID NO: 4065615 - DNA, 25 bp, Homo sapien
aaagttaattgtggcagctcatttg

SEQ ID NO: 4065616 - DNA, 25 bp, Homo sapien
taaagtatcattactcttttcttgg

SEQ ID NO: 4065617 - DNA, 25 bp, Homo sapien
catctttgaggtgtttgcagatttt

SEQ ID NO: 4065618 - DNA, 25 bp, Homo sapien
tttataaagtatcattactcttttc

SEQ ID NO: 4065619 - DNA, 25 bp, Homo sapien
tataaagtatcattactcttttctt

SEQ ID NO: 4065620 - DNA, 25 bp, Homo sapien
agttcctaaccacctgtccagttga

SEQ ID NO: 4065621 - DNA, 25 bp, Homo sapien
tagagccataaggattctccctgcc

SEQ ID NO: 4065622 - DNA, 25 bp, Homo sapien
ctgggttgctcagatagagccataa

SEQ ID NO: 4065623 - DNA, 25 bp, Homo sapien
gatcccttcgtgtttagcaatttgg

SEQ ID NO: 4065624 - DNA, 25 bp, Homo sapien
gcttctacttgttctataagagcca

SEQ ID NO: 4065625 - DNA, 25 bp, Homo sapien
tggcttctacttgttctataagagc

SEQ ID NO: 4065626 - DNA, 25 bp, Homo sapien
atattgctggcttctacttgttcta

SEQ ID NO: 4065627 - DNA, 25 bp, Homo sapien
tgctggcttctacttgttctataag

SEQ ID NO: 4065628 - DNA, 25 bp, Homo sapien
gcacagggcagtgattaaactcagg

SEQ ID NO: 4065629 - DNA, 25 bp, Homo sapien
tactgataacttggcagcacagggc

SEQ ID NO: 4065630 - DNA, 25 bp, Homo sapien
tgattaaactcaggcactcacccca

SEQ ID NO: 4065631 - DNA, 25 bp, Homo sapien
taaaacatactgataacttggcagc

SEQ ID NO: 4065632 - DNA, 25 bp, Homo sapien
gaactcttccaaatgatggcaggga

SEQ ID NO: 4065633 - DNA, 25 bp, Homo sapien
taaagcccagatcccgtgaactgat

SEQ ID NO: 4065634 - DNA, 25 bp, Homo sapien
tggatgagtcccttggccatttaga

SEQ ID NO: 4065635 - DNA, 25 bp, Homo sapien
caaatgccaagtgagctggtgttct

SEQ ID NO: 4065636 - DNA, 25 bp, Homo sapien
aactgagcaagaccgtgtcatccat

SEQ ID NO: 4065637 - DNA, 25 bp, Homo sapien
cttgaaactgagcaagaccgtgtca

SEQ ID NO: 4065638 - DNA, 25 bp, Homo sapien
tgaaactgagcaagaccgtgtcatc

SEQ ID NO: 4065639 - DNA, 25 bp, Homo sapien
gaaactgagcaagaccgtgtcatcc

SEQ ID NO: 4065640 - DNA, 25 bp, Homo sapien
tcacatgtcctgatacttcctcagc

SEQ ID NO: 4065641 - DNA, 25 bp, Homo sapien
cttccctcacctttgtggtcagcta

SEQ ID NO: 4065642 - DNA, 25 bp, Homo sapien
tcagctagaaggtcagttaacacat

SEQ ID NO: 4065643 - DNA, 25 bp, Homo sapien
gaattcttgccaatgtccttcgtaa

SEQ ID NO: 4065644 - DNA, 25 bp, Homo sapien
gactttttcctgatagctgctgaaa

SEQ ID NO: 4065645 - DNA, 25 bp, Homo sapien
caaagtggtagtgactttttcctga

SEQ ID NO: 4065646 - DNA, 25 bp, Homo sapien
ccacagtatttggaccgctgcctgc

SEQ ID NO: 4065647 - DNA, 25 bp, Homo sapien
cactggctttgcgaatttctttttc

SEQ ID NO: 4065648 - DNA, 25 bp, Homo sapien
cgtagaaattggttctaacaatatc

SEQ ID NO: 4065649 - DNA, 25 bp, Homo sapien
ggagcacaaaagatccaggcgtaga

SEQ ID NO: 4065650 - DNA, 25 bp, Homo sapien
gatccaggcgtagaaattggttcta

SEQ ID NO: 4065651 - DNA, 25 bp, Homo sapien
ctggagcacaaaagatccaggcgta

SEQ ID NO: 4065652 - DNA, 25 bp, Homo sapien
tcaagtatctggatgtttctaacca

SEQ ID NO: 4065653 - DNA, 25 bp, Homo sapien
ccaaagacagcaggctgcacctagg

SEQ ID NO: 4065654 - DNA, 25 bp, Homo sapien
gctttctagaattattcaaccaaag

SEQ ID NO: 4065655 - DNA, 25 bp, Homo sapien
tgcacctaggggaagccaaacatct

SEQ ID NO: 4065656 - DNA, 25 bp, Homo sapien
gagaatactcatactcagtgctgct

SEQ ID NO: 4065657 - DNA, 25 bp, Homo sapien
tgtataggccttaattgaaaatgta

SEQ ID NO: 4065658 - DNA, 25 bp, Homo sapien
tgctgcctgaacaccagagtgtctt

SEQ ID NO: 4065659 - DNA, 25 bp, Homo sapien
ttaaccaatagcctcacagatggca

SEQ ID NO: 4065660 - DNA, 25 bp, Homo sapien
cctgacctcatgatctgtcagcctc

SEQ ID NO: 4065661 - DNA, 25 bp, Homo sapien
ctcatgatctgtcagcctcagcctc

SEQ ID NO: 4065662 - DNA, 25 bp, Homo sapien
ctcactacatctctgcctcccgggt

SEQ ID NO: 4065663 - DNA, 25 bp, Homo sapien
gctcactacatctctgcctcccggg

SEQ ID NO: 4065664 - DNA, 25 bp, Homo sapien
atgggactgtaacctgagtgactgc

SEQ ID NO: 4065665 - DNA, 25 bp, Homo sapien
tccttcttggagattgctgcaaggg

SEQ ID NO: 4065666 - DNA, 25 bp, Homo sapien
tgatatattagccttgcaggcaagg

SEQ ID NO: 4065667 - DNA, 25 bp, Homo sapien
ctgcaaggggcttttgtcaccctgt

SEQ ID NO: 4065668 - DNA, 25 bp, Homo sapien
ctccccagttatgaatctggggcat

SEQ ID NO: 4065669 - DNA, 25 bp, Homo sapien
aacttgatttggaattgtcgtggtc

SEQ ID NO: 4065670 - DNA, 25 bp, Homo sapien
gatttggaattgtcgtggtcttgtt

SEQ ID NO: 4065671 - DNA, 25 bp, Homo sapien
caaaacttgatttggaattgtcgtg

SEQ ID NO: 4065672 - DNA, 25 bp, Homo sapien
tggaattgtcgtggtcttgtttata

SEQ ID NO: 4065673 - DNA, 25 bp, Homo sapien
gcagaaattatcactgagggtgtta

SEQ ID NO: 4065674 - DNA, 25 bp, Homo sapien
ttgtgtctgtaatttggaacggctt

SEQ ID NO: 4065675 - DNA, 25 bp, Homo sapien
ggtccctgaatatgttcgattgagg

SEQ ID NO: 4065676 - DNA, 25 bp, Homo sapien
ttggaacggctttttgttgcaacta

SEQ ID NO: 4065677 - DNA, 25 bp, Homo sapien
cattcgcctaatgtaatgccaaaga

SEQ ID NO: 4065678 - DNA, 25 bp, Homo sapien
tatgctgtgaatacgggctctcacc

SEQ ID NO: 4065679 - DNA, 25 bp, Homo sapien
aaatgataccacatcgctgccacaa

SEQ ID NO: 4065680 - DNA, 25 bp, Homo sapien
gcggctcgtacaaaattcactttag

SEQ ID NO: 4065681 - DNA, 25 bp, Homo sapien
tgtattgaaaacttgtataaactgg

SEQ ID NO: 4065682 - DNA, 25 bp, Homo sapien
tgatgctggtttttgatgatgtatt

SEQ ID NO: 4065683 - DNA, 25 bp, Homo sapien
tttgatgctggtttttgatgatgta

SEQ ID NO: 4065684 - DNA, 25 bp, Homo sapien
aaacttgtataaactggcaattaca

SEQ ID NO: 4065685 - DNA, 25 bp, Homo sapien
ttcagagctagtgaccttgcccttc

SEQ ID NO: 4065686 - DNA, 25 bp, Homo sapien
ttgaaggttccttcagagctagtga

SEQ ID NO: 4065687 - DNA, 25 bp, Homo sapien
gatgtcgctctctatccgtaaccct

SEQ ID NO: 4065688 - DNA, 25 bp, Homo sapien
tgtggatgtcgctctctatccgtaa

SEQ ID NO: 4065689 - DNA, 25 bp, Homo sapien
tgcttctggagatcctctgaaagat

SEQ ID NO: 4065690 - DNA, 25 bp, Homo sapien
gcttctggagatcctctgaaagatt

SEQ ID NO: 4065691 - DNA, 25 bp, Homo sapien
cctctgaaagatttatctctttcga

SEQ ID NO: 4065692 - DNA, 25 bp, Homo sapien
gaaagatttatctctttcgattcat

SEQ ID NO: 4065693 - DNA, 25 bp, Homo sapien
gatactgttacacgtttactgcata

SEQ ID NO: 4065694 - DNA, 25 bp, Homo sapien
tcaagcgtgacgatactgttacacg

SEQ ID NO: 4065695 - DNA, 25 bp, Homo sapien
aagcacatatccgtcacacgcagtg

SEQ ID NO: 4065696 - DNA, 25 bp, Homo sapien
cgtcgtcgtcatttctcaagcgtga

SEQ ID NO: 4065697 - DNA, 25 bp, Homo sapien
taaaatcctttgaaccagaacagac

SEQ ID NO: 4065698 - DNA, 25 bp, Homo sapien
gaggatcattccgatttcccaagtc

SEQ ID NO: 4065699 - DNA, 25 bp, Homo sapien
cactattgacttgcgacttgcggca

SEQ ID NO: 4065700 - DNA, 25 bp, Homo sapien
tccaccgtgtggaatgtaaaatcct

SEQ ID NO: 4065701 - DNA, 25 bp, Homo sapien
tttatcactgacttccccgaagtgg

SEQ ID NO: 4065702 - DNA, 25 bp, Homo sapien
tatcactgacttccccgaagtggga

SEQ ID NO: 4065703 - DNA, 25 bp, Homo sapien
aggaggtggggcactgatttttctt

SEQ ID NO: 4065704 - DNA, 25 bp, Homo sapien
atcgaggaggtggggcactgatttt

SEQ ID NO: 4065705 - DNA, 25 bp, Homo sapien
agtaaattagctgatgtccagtacg

SEQ ID NO: 4065706 - DNA, 25 bp, Homo sapien
cagtacttgcataagatatagggca

SEQ ID NO: 4065707 - DNA, 25 bp, Homo sapien
tattcagaatatacagactgttgct

SEQ ID NO: 4065708 - DNA, 25 bp, Homo sapien
cagtacgttgccttttaagcagatc

SEQ ID NO: 4065709 - DNA, 25 bp, Homo sapien
cttccaacacagcataacaaagagc

SEQ ID NO: 4065710 - DNA, 25 bp, Homo sapien
tatttcacccacatagtgatgatgc

SEQ ID NO: 4065711 - DNA, 25 bp, Homo sapien
gccactgtaccgacgtgttccttta

SEQ ID NO: 4065712 - DNA, 25 bp, Homo sapien
cacatagtgatgatgcttccaacac

SEQ ID NO: 4065713 - DNA, 25 bp, Homo sapien
cactctgacgtactaaagggttggt

SEQ ID NO: 4065714 - DNA, 25 bp, Homo sapien
ttggttttgccaatgaagagagcag

SEQ ID NO: 4065715 - DNA, 25 bp, Homo sapien
tctgactgaacgaggcctgaacttt

SEQ ID NO: 4065716 - DNA, 25 bp, Homo sapien
caggctctgactgaacgaggcctga

SEQ ID NO: 4065717 - DNA, 25 bp, Homo sapien
gatgctggcttataacaggtccaag

SEQ ID NO: 4065718 - DNA, 25 bp, Homo sapien
catcgcagctggtgggtgtacacac

SEQ ID NO: 4065719 - DNA, 25 bp, Homo sapien
aaaacgactattgggcgatgctggc

SEQ ID NO: 4065720 - DNA, 25 bp, Homo sapien
cacactgctgtttaccttggcgagg

SEQ ID NO: 4065721 - DNA, 25 bp, Homo sapien
taagcgcagcctcttcatgaaagtt

SEQ ID NO: 4065722 - DNA, 25 bp, Homo sapien
tttgctcccgatgactgcataagcg

SEQ ID NO: 4065723 - DNA, 25 bp, Homo sapien
gatgactgcataagcgcagcctctt

SEQ ID NO: 4065724 - DNA, 25 bp, Homo sapien
catcactttgctcccgatgactgca

SEQ ID NO: 4065725 - DNA, 25 bp, Homo sapien
ttaaggagctcggttcagtggcatc

SEQ ID NO: 4065726 - DNA, 25 bp, Homo sapien
tcggttcagtggcatcagagagttc

SEQ ID NO: 4065727 - DNA, 25 bp, Homo sapien
ggcatcagagagttcgttttctcct

SEQ ID NO: 4065728 - DNA, 25 bp, Homo sapien
cagtggcatcagagagttcgttttc

SEQ ID NO: 4065729 - DNA, 25 bp, Homo sapien
tctcatttgtgaggaagccgtaggg

SEQ ID NO: 4065730 - DNA, 25 bp, Homo sapien
tgagcagtgccttggtcccgatgat

SEQ ID NO: 4065731 - DNA, 25 bp, Homo sapien
tatgcagtacttcctgccacgatgg

SEQ ID NO: 4065732 - DNA, 25 bp, Homo sapien
tagctcagtgcctttcgcatgggag

SEQ ID NO: 4065733 - DNA, 25 bp, Homo sapien
cacatttctaattgttgctgtaaat

SEQ ID NO: 4065734 - DNA, 25 bp, Homo sapien
ttttacaattggatgttcttgtgca

SEQ ID NO: 4065735 - DNA, 25 bp, Homo sapien
gcccttttacagttacacatttcta

SEQ ID NO: 4065736 - DNA, 25 bp, Homo sapien
ttaaggaatattgttgcagatcagt

SEQ ID NO: 4065737 - DNA, 25 bp, Homo sapien
cagcggcccctactggtaaagccat

SEQ ID NO: 4065738 - DNA, 25 bp, Homo sapien
gcacagcggcccctactggtaaagc

SEQ ID NO: 4065739 - DNA, 25 bp, Homo sapien
tcagcacagcggcccctactggtaa

SEQ ID NO: 4065740 - DNA, 25 bp, Homo sapien
aattctcagcacagcggcccctact

SEQ ID NO: 4065741 - DNA, 25 bp, Homo sapien
gagttttaacggatgtgcagctacc

SEQ ID NO: 4065742 - DNA, 25 bp, Homo sapien
tttcctgtgcccgtgtaaagccagt

SEQ ID NO: 4065743 - DNA, 25 bp, Homo sapien
cagtcatcgtgctgagttttaacgg

SEQ ID NO: 4065744 - DNA, 25 bp, Homo sapien
gaacttctgcgacgatcgggttacg

SEQ ID NO: 4065745 - DNA, 25 bp, Homo sapien
ggaaactagatctgcctttgtgagg

SEQ ID NO: 4065746 - DNA, 25 bp, Homo sapien
taaccaagatttgcaattcccctag

SEQ ID NO: 4065747 - DNA, 25 bp, Homo sapien
ggagaaagtgactatctggccttag

SEQ ID NO: 4065748 - DNA, 25 bp, Homo sapien
tatagtgttttaaatccgcctcggc

SEQ ID NO: 4065749 - DNA, 25 bp, Homo sapien
ggactgataactgggcttattttgc

SEQ ID NO: 4065750 - DNA, 25 bp, Homo sapien
cgtagctggctgtatgtggactgat

SEQ ID NO: 4065751 - DNA, 25 bp, Homo sapien
gtttttgatgagcctagcctttgct

SEQ ID NO: 4065752 - DNA, 25 bp, Homo sapien
tggctgaaatagtcaaatgcgtagc

SEQ ID NO: 4065753 - DNA, 25 bp, Homo sapien
ttctgtttgcatcctttcgtcatcc

SEQ ID NO: 4065754 - DNA, 25 bp, Homo sapien
tgtttgcatcctttcgtcatccttt

SEQ ID NO: 4065755 - DNA, 25 bp, Homo sapien
gcatttattacggataagtttgtct

SEQ ID NO: 4065756 - DNA, 25 bp, Homo sapien
gacctgcctgaagccatagcattta

SEQ ID NO: 4065757 - DNA, 25 bp, Homo sapien
caaatgacagccgccgtgctgagcg

SEQ ID NO: 4065758 - DNA, 25 bp, Homo sapien
tgacagccgccgtgctgagcgctca

SEQ ID NO: 4065759 - DNA, 25 bp, Homo sapien
cagtgtctgcaaatgacagccgccg

SEQ ID NO: 4065760 - DNA, 25 bp, Homo sapien
tctgcaaatgacagccgccgtgctg

SEQ ID NO: 4065761 - DNA, 25 bp, Homo sapien
atcagaggtccgtctccaagtcgcc

SEQ ID NO: 4065762 - DNA, 25 bp, Homo sapien
aagtggaaccgggagatcagaggtc

SEQ ID NO: 4065763 - DNA, 25 bp, Homo sapien
gaaccgggagatcagaggtccgtct

SEQ ID NO: 4065764 - DNA, 25 bp, Homo sapien
cgggagatcagaggtccgtctccaa

SEQ ID NO: 4065765 - DNA, 25 bp, Homo sapien
ttctccaagggaacagaagtcttag

SEQ ID NO: 4065766 - DNA, 25 bp, Homo sapien
tctccaagggaacagaagtcttagg

SEQ ID NO: 4065767 - DNA, 25 bp, Homo sapien
tttctccaagggaacagaagtctta

SEQ ID NO: 4065768 - DNA, 25 bp, Homo sapien
acagaagtcttaggttgttgatctg

SEQ ID NO: 4065769 - DNA, 25 bp, Homo sapien
gacgatccttcaagggatccttgtt

SEQ ID NO: 4065770 - DNA, 25 bp, Homo sapien
aatcttcatgacgatccttcaaggg

SEQ ID NO: 4065771 - DNA, 25 bp, Homo sapien
tcatgacgatccttcaagggatcct

SEQ ID NO: 4065772 - DNA, 25 bp, Homo sapien
ttgaatcttcatgacgatccttcaa

SEQ ID NO: 4065773 - DNA, 25 bp, Homo sapien
atggacccataatctctgaatttaa

SEQ ID NO: 4065774 - DNA, 25 bp, Homo sapien
ttaacatgcttttcaggaatgtgtt

SEQ ID NO: 4065775 - DNA, 25 bp, Homo sapien
taacatgcttttcaggaatgtgttc

SEQ ID NO: 4065776 - DNA, 25 bp, Homo sapien
ccataatctctgaatttaacatgct

SEQ ID NO: 4065777 - DNA, 25 bp, Homo sapien
atttaagaactggtactatgaagac

SEQ ID NO: 4065778 - DNA, 25 bp, Homo sapien
actggtactatgaagacatttccct

SEQ ID NO: 4065779 - DNA, 25 bp, Homo sapien
aaatatttaagaactggtactatga

SEQ ID NO: 4065780 - DNA, 25 bp, Homo sapien
taagaactggtactatgaagacatt

SEQ ID NO: 4065781 - DNA, 25 bp, Homo sapien
tttagaaatcataatgtggacatca

SEQ ID NO: 4065782 - DNA, 25 bp, Homo sapien
cctccttgtgctgttttgggctctc

SEQ ID NO: 4065783 - DNA, 25 bp, Homo sapien
gaaatcataatgtggacatcattga

SEQ ID NO: 4065784 - DNA, 25 bp, Homo sapien
ctctccttgttcacccagattggct

SEQ ID NO: 4065785 - DNA, 25 bp, Homo sapien
gtcctctgatggtcaggaattgtgt

SEQ ID NO: 4065786 - DNA, 25 bp, Homo sapien
caggaattgtgtgcagtatgcagta

SEQ ID NO: 4065787 - DNA, 25 bp, Homo sapien
agtatgcagtacattccaaagtcag

SEQ ID NO: 4065788 - DNA, 25 bp, Homo sapien
tgtgtgcagtatgcagtacattcca

SEQ ID NO: 4065789 - DNA, 25 bp, Homo sapien
gccgcggagccgcttttccaaggat

SEQ ID NO: 4065790 - DNA, 25 bp, Homo sapien
tctgtgttgaaagagcactgcccgc

SEQ ID NO: 4065791 - DNA, 25 bp, Homo sapien
atgaaagaacagattgccgcggagc

SEQ ID NO: 4065792 - DNA, 25 bp, Homo sapien
ggcagcacctttgcttgaacgctgg

SEQ ID NO: 4065793 - DNA, 25 bp, Homo sapien
taagtgtcctcgacagcgagcagac

SEQ ID NO: 4065794 - DNA, 25 bp, Homo sapien
tgccagaagctataacgagatgatt

SEQ ID NO: 4065795 - DNA, 25 bp, Homo sapien
tattaaggacaacagtattttgcca

SEQ ID NO: 4065796 - DNA, 25 bp, Homo sapien
taccctgcttggtacatgccagatg

SEQ ID NO: 4065797 - DNA, 25 bp, Homo sapien
ggtcctcaggtagctgacccgagag

SEQ ID NO: 4065798 - DNA, 25 bp, Homo sapien
ccgtggagctgcttgtgatatacaa

SEQ ID NO: 4065799 - DNA, 25 bp, Homo sapien
ttgtgatatacaatgtcagtgctct

SEQ ID NO: 4065800 - DNA, 25 bp, Homo sapien
tagctgacccgagagaccgtggagc

SEQ ID NO: 4065801 - DNA, 25 bp, Homo sapien
cctttggtgctcgtaattggtgaaa

SEQ ID NO: 4065802 - DNA, 25 bp, Homo sapien
cattgttgtagttcccgcaaatcta

SEQ ID NO: 4065803 - DNA, 25 bp, Homo sapien
cgaacatgcgttgttttcaatgctg

SEQ ID NO: 4065804 - DNA, 25 bp, Homo sapien
tacggttttcacaaggaggtcacga

SEQ ID NO: 4065805 - DNA, 25 bp, Homo sapien
tcactcctgactacttgaaacacga

SEQ ID NO: 4065806 - DNA, 25 bp, Homo sapien
tgcagatgtccttgtcgtgttgacc

SEQ ID NO: 4065807 - DNA, 25 bp, Homo sapien
cagagcatgtagaaagatcactgca

SEQ ID NO: 4065808 - DNA, 25 bp, Homo sapien
agttatagatgagtgccaagttggc

SEQ ID NO: 4065809 - DNA, 25 bp, Homo sapien
cagctggactagcttttcgggaaca

SEQ ID NO: 4065810 - DNA, 25 bp, Homo sapien
catgagaagccatagcaagatgtgc

SEQ ID NO: 4065811 - DNA, 25 bp, Homo sapien
tgctgccgcgttgggttaaccatgg

SEQ ID NO: 4065812 - DNA, 25 bp, Homo sapien
cattgatcagtacagacccagagag

SEQ ID NO: 4065813 - DNA, 25 bp, Homo sapien
tcagtttacccagaaactagaaggc

SEQ ID NO: 4065814 - DNA, 25 bp, Homo sapien
gcattgtggtttgactgtccagtta

SEQ ID NO: 4065815 - DNA, 25 bp, Homo sapien
ctgtccagttaaagagcctgtgttc

SEQ ID NO: 4065816 - DNA, 25 bp, Homo sapien
gcctgcgagtatttctgattccttc

SEQ ID NO: 4065817 - DNA, 25 bp, Homo sapien
atgtttatggcccggtgagaccgca

SEQ ID NO: 4065818 - DNA, 25 bp, Homo sapien
tccctttctatatctgtcccttttc

SEQ ID NO: 4065819 - DNA, 25 bp, Homo sapien
ttatggcccggtgagaccgcatcct

SEQ ID NO: 4065820 - DNA, 25 bp, Homo sapien
accgcatcctccctttctatatctg

SEQ ID NO: 4065821 - DNA, 25 bp, Homo sapien
agtgtagtttatgcgtggccgaaga

SEQ ID NO: 4065822 - DNA, 25 bp, Homo sapien
ccagcctggccttgatgtcggagtg

SEQ ID NO: 4065823 - DNA, 25 bp, Homo sapien
gctgcaagacgtagctaattgctct

SEQ ID NO: 4065824 - DNA, 25 bp, Homo sapien
caacagaagaaacgctggtggtcat

SEQ ID NO: 4065825 - DNA, 25 bp, Homo sapien
cttccgtcaagccttttagcggagt

SEQ ID NO: 4065826 - DNA, 25 bp, Homo sapien
ccttccgtcaagccttttagcggag

SEQ ID NO: 4065827 - DNA, 25 bp, Homo sapien
gaaataatgcacaccagaaacgtcc

SEQ ID NO: 4065828 - DNA, 25 bp, Homo sapien
ctatgaccgttgacgaaggatttga

SEQ ID NO: 4065829 - DNA, 25 bp, Homo sapien
tcacagggatgccttcggtccagac

SEQ ID NO: 4065830 - DNA, 25 bp, Homo sapien
tctgaaataatgcacaccagaaacg

SEQ ID NO: 4065831 - DNA, 25 bp, Homo sapien
taaaatgccacagatagtctgggag

SEQ ID NO: 4065832 - DNA, 25 bp, Homo sapien
gctggactcgatacttctggcagac

SEQ ID NO: 4065833 - DNA, 25 bp, Homo sapien
tcctcagctggactcgatacttctg

SEQ ID NO: 4065834 - DNA, 25 bp, Homo sapien
aattgatttcaggttcatcttgaaa

SEQ ID NO: 4065835 - DNA, 25 bp, Homo sapien
gtgttcagcacttctgcaacagttt

SEQ ID NO: 4065836 - DNA, 25 bp, Homo sapien
ccgttgccctaggtctgcgtgttca

SEQ ID NO: 4065837 - DNA, 25 bp, Homo sapien
gagatggaaagcttccgtcagcttt

SEQ ID NO: 4065838 - DNA, 25 bp, Homo sapien
agactgcgcgttgcccgttgcccta

SEQ ID NO: 4065839 - DNA, 25 bp, Homo sapien
cttaaacagacatctatgccaaatg

SEQ ID NO: 4065840 - DNA, 25 bp, Homo sapien
cagggagggtttgctgttggctttt

SEQ ID NO: 4065841 - DNA, 25 bp, Homo sapien
tggcttttacaagaacactgtcctg

SEQ ID NO: 4065842 - DNA, 25 bp, Homo sapien
gccccgggagtccttcacactcttc

SEQ ID NO: 4065843 - DNA, 25 bp, Homo sapien
ttgggtctgtttcccgagaaatcat

SEQ ID NO: 4065844 - DNA, 25 bp, Homo sapien
gagacttgggtctgtttcccgagaa

SEQ ID NO: 4065845 - DNA, 25 bp, Homo sapien
ttggagacttgggtctgtttcccga

SEQ ID NO: 4065846 - DNA, 25 bp, Homo sapien
cttgggtctgtttcccgagaaatca

SEQ ID NO: 4065847 - DNA, 25 bp, Homo sapien
cctcctccttgaaaatagtgaattt

SEQ ID NO: 4065848 - DNA, 25 bp, Homo sapien
tgatgtccagcacaacgtctgattt

SEQ ID NO: 4065849 - DNA, 25 bp, Homo sapien
gaaagatgctccgttttcccgcata

SEQ ID NO: 4065850 - DNA, 25 bp, Homo sapien
tcatgcttccctgttgaaagatgct

SEQ ID NO: 4065851 - DNA, 25 bp, Homo sapien
tgatttatgagagcatgaccctggg

SEQ ID NO: 4065852 - DNA, 25 bp, Homo sapien
aagtcaaatgggagatacttgtttg

SEQ ID NO: 4065853 - DNA, 25 bp, Homo sapien
aatgggagatacttgtttgcaggaa

SEQ ID NO: 4065854 - DNA, 25 bp, Homo sapien
tacttgtttgcaggaaatagttctt

SEQ ID NO: 4065855 - DNA, 25 bp, Homo sapien
taggctcatgccattgtcctccctc

SEQ ID NO: 4065856 - DNA, 25 bp, Homo sapien
ctgcattttgtaggggacaataaca

SEQ ID NO: 4065857 - DNA, 25 bp, Homo sapien
aaatgtctggtagcatccactgcat

SEQ ID NO: 4065858 - DNA, 25 bp, Homo sapien
ttttccataaggattgagtctcaaa

SEQ ID NO: 4065859 - DNA, 25 bp, Homo sapien
taaggattgagtctcaaaatgtctg

SEQ ID NO: 4065860 - DNA, 25 bp, Homo sapien
cccaggttgtcatgacttgagactc

SEQ ID NO: 4065861 - DNA, 25 bp, Homo sapien
tgtcccatttgtactgactctgacc

SEQ ID NO: 4065862 - DNA, 25 bp, Homo sapien
gaatctaccataagctactagggcc

SEQ ID NO: 4065863 - DNA, 25 bp, Homo sapien
gagcattcaatgaccgagaatctac

SEQ ID NO: 4065864 - DNA, 25 bp, Homo sapien
catgtatcatcctatctgcttctga

SEQ ID NO: 4065865 - DNA, 25 bp, Homo sapien
tctgacacccagtaagcagctctgg

SEQ ID NO: 4065866 - DNA, 25 bp, Homo sapien
tctttttcttctaacgggagatata

SEQ ID NO: 4065867 - DNA, 25 bp, Homo sapien
acattgtattttatggttgcagagc

SEQ ID NO: 4065868 - DNA, 25 bp, Homo sapien
cagtgaacagattcttccaggtctt

SEQ ID NO: 4065869 - DNA, 25 bp, Homo sapien
cagccctggtcatcagtgaacagat

SEQ ID NO: 4065870 - DNA, 25 bp, Homo sapien
atcagtgaacagattcttccaggtc

SEQ ID NO: 4065871 - DNA, 25 bp, Homo sapien
tggtcatcagtgaacagattcttcc

SEQ ID NO: 4065872 - DNA, 25 bp, Homo sapien
ggaagggcttcagtttcaccagtag

SEQ ID NO: 4065873 - DNA, 25 bp, Homo sapien
cccaggtgaggctgtctatgtaata

SEQ ID NO: 4065874 - DNA, 25 bp, Homo sapien
tgttgccgtgctgatgaccttggag

SEQ ID NO: 4065875 - DNA, 25 bp, Homo sapien
gaaagtgagatcagagatcccgagg

SEQ ID NO: 4065876 - DNA, 25 bp, Homo sapien
gatccttgtactcttcgaacagagg

SEQ ID NO: 4065877 - DNA, 25 bp, Homo sapien
tcacaaagctggttttatgtctcct

SEQ ID NO: 4065878 - DNA, 25 bp, Homo sapien
tgagatagcattgcatggagatcct

SEQ ID NO: 4065879 - DNA, 25 bp, Homo sapien
ccctgcattgagatagcattgcatg

SEQ ID NO: 4065880 - DNA, 25 bp, Homo sapien
tagatagatgaagggttaggaagat

SEQ ID NO: 4065881 - DNA, 25 bp, Homo sapien
tcactgactatagatgttgagccca

SEQ ID NO: 4065882 - DNA, 25 bp, Homo sapien
cacgtgtcttctaagcggtggaact

SEQ ID NO: 4065883 - DNA, 25 bp, Homo sapien
gatgtaacttgtcctaaatcacgtg

SEQ ID NO: 4065884 - DNA, 25 bp, Homo sapien
cttgtgtcttataatccgattggtc

SEQ ID NO: 4065885 - DNA, 25 bp, Homo sapien
tcttctcttgtgtcttataatccga

SEQ ID NO: 4065886 - DNA, 25 bp, Homo sapien
tcttataatccgattggtcatgctg

SEQ ID NO: 4065887 - DNA, 25 bp, Homo sapien
tataatccgattggtcatgctgaca

SEQ ID NO: 4065888 - DNA, 25 bp, Homo sapien
catattgtttgccactgggaaccaa

SEQ ID NO: 4065889 - DNA, 25 bp, Homo sapien
accatattgtttgccactgggaacc

SEQ ID NO: 4065890 - DNA, 25 bp, Homo sapien
ccatattgtttgccactgggaacca

SEQ ID NO: 4065891 - DNA, 25 bp, Homo sapien
aaccatattgtttgccactgggaac

SEQ ID NO: 4065892 - DNA, 25 bp, Homo sapien
aaagtcatacagataggctcgaaga

SEQ ID NO: 4065893 - DNA, 25 bp, Homo sapien
tcccagctgccacagttcatgtagg

SEQ ID NO: 4065894 - DNA, 25 bp, Homo sapien
gaagctggatttggcagctggtttt

SEQ ID NO: 4065895 - DNA, 25 bp, Homo sapien
agtgcttccttttgggtgatgagga

SEQ ID NO: 4065896 - DNA, 25 bp, Homo sapien
ggccagaacgatccacccacgtgtt

SEQ ID NO: 4065897 - DNA, 25 bp, Homo sapien
gaacgatccacccacgtgttggtgc

SEQ ID NO: 4065898 - DNA, 25 bp, Homo sapien
ggtgccacccggcagtggaaaagcc

SEQ ID NO: 4065899 - DNA, 25 bp, Homo sapien
gttgtccgcggtgccagtgagagct

SEQ ID NO: 4065900 - DNA, 25 bp, Homo sapien
gcaaaccaagcaatgccctttcaca

SEQ ID NO: 4065901 - DNA, 25 bp, Homo sapien
tccattacctggaatagctgctttg

SEQ ID NO: 4065902 - DNA, 25 bp, Homo sapien
tagctgctttggacggcaaaccaag

SEQ ID NO: 4065903 - DNA, 25 bp, Homo sapien
tttggacggcaaaccaagcaatgcc

SEQ ID NO: 4065904 - DNA, 25 bp, Homo sapien
cataattagtaatgctaatgtcggg

SEQ ID NO: 4065905 - DNA, 25 bp, Homo sapien
gatgcaatagataatctaacaccag

SEQ ID NO: 4065906 - DNA, 25 bp, Homo sapien
aggcagctcataattagtaatgcta

SEQ ID NO: 4065907 - DNA, 25 bp, Homo sapien
gcaatagataatctaacaccagcaa

SEQ ID NO: 4065908 - DNA, 25 bp, Homo sapien
catgttgcgtgtggtagtccagcac

SEQ ID NO: 4065909 - DNA, 25 bp, Homo sapien
gaatcttgatgggattgatctcctg

SEQ ID NO: 4065910 - DNA, 25 bp, Homo sapien
cacattagaattgttgcctgggcct

SEQ ID NO: 4065911 - DNA, 25 bp, Homo sapien
catgggcattactagtactcaggaa

SEQ ID NO: 4065912 - DNA, 25 bp, Homo sapien
taaggtggcagttacaataataccc

SEQ ID NO: 4065913 - DNA, 25 bp, Homo sapien
aaatcccgcctctatcatgaattgg

SEQ ID NO: 4065914 - DNA, 25 bp, Homo sapien
tatgtcaatgggttaggcacagacc

SEQ ID NO: 4065915 - DNA, 25 bp, Homo sapien
gttaatgaacttggccagacagacc

SEQ ID NO: 4065916 - DNA, 25 bp, Homo sapien
cactttcagctttcccgttccaggg

SEQ ID NO: 4065917 - DNA, 25 bp, Homo sapien
tgaatggtgaataccctcggcggga

SEQ ID NO: 4065918 - DNA, 25 bp, Homo sapien
gaatataaaggctgagggcggacct

SEQ ID NO: 4065919 - DNA, 25 bp, Homo sapien
tccagggttaagtgcccaagcaggt

SEQ ID NO: 4065920 - DNA, 25 bp, Homo sapien
tgaggccgtctcactccgtaaactg

SEQ ID NO: 4065921 - DNA, 25 bp, Homo sapien
tgtaatgccgttccgatgaggccgt

SEQ ID NO: 4065922 - DNA, 25 bp, Homo sapien
caggcagtccttacagggacccaga

SEQ ID NO: 4065923 - DNA, 25 bp, Homo sapien
ctttaaaagggaatagcgtgatgct

SEQ ID NO: 4065924 - DNA, 25 bp, Homo sapien
catttgaggaagttcacttctctgc

SEQ ID NO: 4065925 - DNA, 25 bp, Homo sapien
tgggaggtcagatttccgcattcag

SEQ ID NO: 4065926 - DNA, 25 bp, Homo sapien
ccctgaactgagtatccggtgggag

SEQ ID NO: 4065927 - DNA, 25 bp, Homo sapien
agaacgagagctcatacggcatcca

SEQ ID NO: 4065928 - DNA, 25 bp, Homo sapien
tccccagcccgagtagaagaggact

SEQ ID NO: 4065929 - DNA, 25 bp, Homo sapien
atccccagcccgagtagaagaggac

SEQ ID NO: 4065930 - DNA, 25 bp, Homo sapien
gggagaactgtcaagagttttgagc

SEQ ID NO: 4065931 - DNA, 25 bp, Homo sapien
gaactgtcaagagttttgagctgga

SEQ ID NO: 4065932 - DNA, 25 bp, Homo sapien
tcaagagttttgagctggaagctat

SEQ ID NO: 4065933 - DNA, 25 bp, Homo sapien
ctgtcaagagttttgagctggaagc

SEQ ID NO: 4065934 - DNA, 25 bp, Homo sapien
ggtggcagtattggtggtcacagct

SEQ ID NO: 4065935 - DNA, 25 bp, Homo sapien
gaagtcaccgaggtgccaatgagtg

SEQ ID NO: 4065936 - DNA, 25 bp, Homo sapien
gcaaagggaagtgtggctgcccgga

SEQ ID NO: 4065937 - DNA, 25 bp, Homo sapien
aggtgccaatgagtgtggccctgca

SEQ ID NO: 4065938 - DNA, 25 bp, Homo sapien
ttcacaaggagtgcaaaagaagcct

SEQ ID NO: 4065939 - DNA, 25 bp, Homo sapien
tggaagtaagaagcccctgcagttc

SEQ ID NO: 4065940 - DNA, 25 bp, Homo sapien
gctgtacgtctgaagggctttagtc

SEQ ID NO: 4065941 - DNA, 25 bp, Homo sapien
ttgcccacaaatgccagaggaggac

SEQ ID NO: 4065942 - DNA, 25 bp, Homo sapien
gaagtccacattgctccatttggac

SEQ ID NO: 4065943 - DNA, 25 bp, Homo sapien
ggaaggatgattgtgagaagtccac

SEQ ID NO: 4065944 - DNA, 25 bp, Homo sapien
cctttttgtagtgggctattagatt

SEQ ID NO: 4065945 - DNA, 25 bp, Homo sapien
gattgtgagaagtccacattgctcc

SEQ ID NO: 4065946 - DNA, 25 bp, Homo sapien
tcttggctttcagagaggtttgctt

SEQ ID NO: 4065947 - DNA, 25 bp, Homo sapien
ttcttggctttcagagaggtttgct

SEQ ID NO: 4065948 - DNA, 25 bp, Homo sapien
cattcttggctttcagagaggtttg

SEQ ID NO: 4065949 - DNA, 25 bp, Homo sapien
tcattcttggctttcagagaggttt

SEQ ID NO: 4065950 - DNA, 25 bp, Homo sapien
tttcagtgtttttgcccttccgatc

SEQ ID NO: 4065951 - DNA, 25 bp, Homo sapien
ttcagtgtttttgcccttccgatcc

SEQ ID NO: 4065952 - DNA, 25 bp, Homo sapien
aagtggctctttcggaagacttgcc

SEQ ID NO: 4065953 - DNA, 25 bp, Homo sapien
gacttgcctgaatcctagacccctt

SEQ ID NO: 4065954 - DNA, 25 bp, Homo sapien
tgatcaagcttggaaaggcctggcc

SEQ ID NO: 4065955 - DNA, 25 bp, Homo sapien
tgttggttctcataggtctccctga

SEQ ID NO: 4065956 - DNA, 25 bp, Homo sapien
tgctcacactcggtcaatacttgcc

SEQ ID NO: 4065957 - DNA, 25 bp, Homo sapien
cctttgaggccatctgcactcactg

SEQ ID NO: 4065958 - DNA, 25 bp, Homo sapien
catacatagctctttgtcagttgct

SEQ ID NO: 4065959 - DNA, 25 bp, Homo sapien
gagaggcctgtttccatacatagct

SEQ ID NO: 4065960 - DNA, 25 bp, Homo sapien
cacctccaagtactgtcacactggg

SEQ ID NO: 4065961 - DNA, 25 bp, Homo sapien
gggagaggaacacatacatttagtc

SEQ ID NO: 4065962 - DNA, 25 bp, Homo sapien
gatgcctttgtgtgtcctctcatgg

SEQ ID NO: 4065963 - DNA, 25 bp, Homo sapien
tttagtccataacaactatctcact

SEQ ID NO: 4065964 - DNA, 25 bp, Homo sapien
gctttctgagttctgccaaaaacca

SEQ ID NO: 4065965 - DNA, 25 bp, Homo sapien
atcagaaccaggagagggtcctctg

SEQ ID NO: 4065966 - DNA, 25 bp, Homo sapien
tagtagtgggagaacatggtatcag

SEQ ID NO: 4065967 - DNA, 25 bp, Homo sapien
ggcttctcctccctgattgtcgctg

SEQ ID NO: 4065968 - DNA, 25 bp, Homo sapien
tgagcaccgatagagtaccaagaac

SEQ ID NO: 4065969 - DNA, 25 bp, Homo sapien
ggttccaaggaccaactgaggctgt

SEQ ID NO: 4065970 - DNA, 25 bp, Homo sapien
tgtaagtgctcagaggcagccggaa

SEQ ID NO: 4065971 - DNA, 25 bp, Homo sapien
tgaggcatccatgtgaggcacagga

SEQ ID NO: 4065972 - DNA, 25 bp, Homo sapien
cttgaaaccaaaataggtatcagat

SEQ ID NO: 4065973 - DNA, 25 bp, Homo sapien
gaaaccaaaataggtatcagatact

SEQ ID NO: 4065974 - DNA, 25 bp, Homo sapien
ccaaaataggtatcagatacttggc

SEQ ID NO: 4065975 - DNA, 25 bp, Homo sapien
aataggtatcagatacttggctgtt

SEQ ID NO: 4065976 - DNA, 25 bp, Homo sapien
tgcttaagcaagtagtttccggtaa

SEQ ID NO: 4065977 - DNA, 25 bp, Homo sapien
taagttacagtagagaagtggttgc

SEQ ID NO: 4065978 - DNA, 25 bp, Homo sapien
gcctccctaatgaactccttgcaag

SEQ ID NO: 4065979 - DNA, 25 bp, Homo sapien
tgcaagggcccttggttaagttaca

SEQ ID NO: 4065980 - DNA, 25 bp, Homo sapien
tcaggaaggtgtccgatcagaacct

SEQ ID NO: 4065981 - DNA, 25 bp, Homo sapien
aatcacctccaagaatgggtctgcg

SEQ ID NO: 4065982 - DNA, 25 bp, Homo sapien
aagaatgggtctgcgtcttgcacat

SEQ ID NO: 4065983 - DNA, 25 bp, Homo sapien
tccagtcccgggatcaagacagaaa

SEQ ID NO: 4065984 - DNA, 25 bp, Homo sapien
ccccgggagactgggggtgctgaag

SEQ ID NO: 4065985 - DNA, 25 bp, Homo sapien
ggtgctgaagaagagtctcagtctc

SEQ ID NO: 4065986 - DNA, 25 bp, Homo sapien
gtcactatttaaagcattgcctgca

SEQ ID NO: 4065987 - DNA, 25 bp, Homo sapien
ttaaagcattgcctgcaccctcaac

SEQ ID NO: 4065988 - DNA, 25 bp, Homo sapien
gccatccctctgtcactatttaaag

SEQ ID NO: 4065989 - DNA, 25 bp, Homo sapien
cctcaacctcgttcagtttccacat

SEQ ID NO: 4065990 - DNA, 25 bp, Homo sapien
tctataaactgttggagacagattc

SEQ ID NO: 4065991 - DNA, 25 bp, Homo sapien
tgcaaactctgaattctataaactg

SEQ ID NO: 4065992 - DNA, 25 bp, Homo sapien
aagcaagttgcaaactctgaattct

SEQ ID NO: 4065993 - DNA, 25 bp, Homo sapien
actctgaattctataaactgttgga

SEQ ID NO: 4065994 - DNA, 25 bp, Homo sapien
gctgtgtcgcacttggtcatctgga

SEQ ID NO: 4065995 - DNA, 25 bp, Homo sapien
tgttccttgaagtcccgatgcgtga

SEQ ID NO: 4065996 - DNA, 25 bp, Homo sapien
gatgcgtgatttgtccccatgctgt

SEQ ID NO: 4065997 - DNA, 25 bp, Homo sapien
tgagcgtatggaagccccagtgtgt

SEQ ID NO: 4065998 - DNA, 25 bp, Homo sapien
tccctctacaaaacctgcatgcaaa

SEQ ID NO: 4065999 - DNA, 25 bp, Homo sapien
tacaagggacatttatgctttctcc

SEQ ID NO: 4066000 - DNA, 25 bp, Homo sapien
aattatctgatggaattgacccata

SEQ ID NO: 4066001 - DNA, 25 bp, Homo sapien
ctctggcagaatcgctgtcctgcca

SEQ ID NO: 4066002 - DNA, 25 bp, Homo sapien
gaagccacataaagaagcacccacg

SEQ ID NO: 4066003 - DNA, 25 bp, Homo sapien
gaaattgatcgttcattcacaatgc

SEQ ID NO: 4066004 - DNA, 25 bp, Homo sapien
ctttgccgagcacaagtggtggact

SEQ ID NO: 4066005 - DNA, 25 bp, Homo sapien
tgctcagtgcagtgactttgccgag

SEQ ID NO: 4066006 - DNA, 25 bp, Homo sapien
ctctcccctggtaactgatttattt

SEQ ID NO: 4066007 - DNA, 25 bp, Homo sapien
ttccctcttggagttgcttattctt

SEQ ID NO: 4066008 - DNA, 25 bp, Homo sapien
ttttccctcttggagttgcttattc

SEQ ID NO: 4066009 - DNA, 25 bp, Homo sapien
tatttttccctcttggagttgctta

SEQ ID NO: 4066010 - DNA, 25 bp, Homo sapien
tttattgcagaacgacacaatggtg

SEQ ID NO: 4066011 - DNA, 25 bp, Homo sapien
tcatttctatggcaagctgagatgc

SEQ ID NO: 4066012 - DNA, 25 bp, Homo sapien
tggtgaacgagaaggtattattccc

SEQ ID NO: 4066013 - DNA, 25 bp, Homo sapien
tattattccctgtacgatttctggc

SEQ ID NO: 4066014 - DNA, 25 bp, Homo sapien
ggacagctgcagttctgcgtttagg

SEQ ID NO: 4066015 - DNA, 25 bp, Homo sapien
agtccctctgtggttcccctgactg

SEQ ID NO: 4066016 - DNA, 25 bp, Homo sapien
gtggttcccctgactgagctcctca

SEQ ID NO: 4066017 - DNA, 25 bp, Homo sapien
agctgcagttctgcgtttaggctgg

SEQ ID NO: 4066018 - DNA, 25 bp, Homo sapien
cttgagtggacggtttggccaacta

SEQ ID NO: 4066019 - DNA, 25 bp, Homo sapien
gccaactaaggagtaaggcctctcc

SEQ ID NO: 4066020 - DNA, 25 bp, Homo sapien
ttggccaactaaggagtaaggcctc

SEQ ID NO: 4066021 - DNA, 25 bp, Homo sapien
tgagtggacggtttggccaactaag

SEQ ID NO: 4066022 - DNA, 25 bp, Homo sapien
acccaatagaccataactgcagtgt

SEQ ID NO: 4066023 - DNA, 25 bp, Homo sapien
ttttaacccaatagaccataactgc

SEQ ID NO: 4066024 - DNA, 25 bp, Homo sapien
gatgtttccgttctattttatctgc

SEQ ID NO: 4066025 - DNA, 25 bp, Homo sapien
tcaggtcttttatataagtattccc

SEQ ID NO: 4066026 - DNA, 25 bp, Homo sapien
taaacattgctgcaaggcccgcttc

SEQ ID NO: 4066027 - DNA, 25 bp, Homo sapien
ttctgatgagtacgctggcaggcct

SEQ ID NO: 4066028 - DNA, 25 bp, Homo sapien
ctacaaaggtctcctccttttcata

SEQ ID NO: 4066029 - DNA, 25 bp, Homo sapien
gtgctacctcctgcgtgcttttatg

SEQ ID NO: 4066030 - DNA, 25 bp, Homo sapien
cttgcagggtccgtccttcctctga

SEQ ID NO: 4066031 - DNA, 25 bp, Homo sapien
ccttgcagggtccgtccttcctctg

SEQ ID NO: 4066032 - DNA, 25 bp, Homo sapien
tccttgcagggtccgtccttcctct

SEQ ID NO: 4066033 - DNA, 25 bp, Homo sapien
ggatagcagtgccacttgacaccag

SEQ ID NO: 4066034 - DNA, 25 bp, Homo sapien
tgacttttccatggtgccccagcag

SEQ ID NO: 4066035 - DNA, 25 bp, Homo sapien
cacttgacaccagactaatgcttct

SEQ ID NO: 4066036 - DNA, 25 bp, Homo sapien
tctgacttttccatggtgccccagc

SEQ ID NO: 4066037 - DNA, 25 bp, Homo sapien
cgcctgggtcattgaaattaatttc

SEQ ID NO: 4066038 - DNA, 25 bp, Homo sapien
aatttctgctttcaagcttggcaga

SEQ ID NO: 4066039 - DNA, 25 bp, Homo sapien
agagctcccctccactcgcctgggt

SEQ ID NO: 4066040 - DNA, 25 bp, Homo sapien
cctccactcgcctgggtcattgaaa

SEQ ID NO: 4066041 - DNA, 25 bp, Homo sapien
caatgctgcctaggtccacagtcct

SEQ ID NO: 4066042 - DNA, 25 bp, Homo sapien
aatgctgcctaggtccacagtcctc

SEQ ID NO: 4066043 - DNA, 25 bp, Homo sapien
tgctgcctaggtccacagtcctcag

SEQ ID NO: 4066044 - DNA, 25 bp, Homo sapien
tcaatgctgcctaggtccacagtcc

SEQ ID NO: 4066045 - DNA, 25 bp, Homo sapien
tttgttcctgtgattttcgcgccac

SEQ ID NO: 4066046 - DNA, 25 bp, Homo sapien
atttgttcctgtgattttcgcgcca

SEQ ID NO: 4066047 - DNA, 25 bp, Homo sapien
ttccgggcaagttgagtctccatgt

SEQ ID NO: 4066048 - DNA, 25 bp, Homo sapien
tgttggatgagatttccgggcaagt

SEQ ID NO: 4066049 - DNA, 25 bp, Homo sapien
gagatttccgggcaagttgagtctc

SEQ ID NO: 4066050 - DNA, 25 bp, Homo sapien
tgtttttgtcgtgggctactgccag

SEQ ID NO: 4066051 - DNA, 25 bp, Homo sapien
tggatgaagactccctttcatgttt

SEQ ID NO: 4066052 - DNA, 25 bp, Homo sapien
gagatatggatgaagactccctttc

SEQ ID NO: 4066053 - DNA, 25 bp, Homo sapien
ctgagatatggatgaagactccctt

SEQ ID NO: 4066054 - DNA, 25 bp, Homo sapien
gatatggatgaagactccctttcat

SEQ ID NO: 4066055 - DNA, 25 bp, Homo sapien
tttctgctgttggattgatagctcc

SEQ ID NO: 4066056 - DNA, 25 bp, Homo sapien
ttgatagctccttgactgctgaagc

SEQ ID NO: 4066057 - DNA, 25 bp, Homo sapien
ttaggactgatagagatttggcttt

SEQ ID NO: 4066058 - DNA, 25 bp, Homo sapien
ctgctgaagccattgcccatctgtt

SEQ ID NO: 4066059 - DNA, 25 bp, Homo sapien
gtgctccaggtatttctcagcgtgt

SEQ ID NO: 4066060 - DNA, 25 bp, Homo sapien
tgctccaggtatttctcagcgtgtt

SEQ ID NO: 4066061 - DNA, 25 bp, Homo sapien
ctccaggtatttctcagcgtgttcg

SEQ ID NO: 4066062 - DNA, 25 bp, Homo sapien
ccaggtatttctcagcgtgttcggg

SEQ ID NO: 4066063 - DNA, 25 bp, Homo sapien
caaaaggcaaagcagagatccagag

SEQ ID NO: 4066064 - DNA, 25 bp, Homo sapien
taatcacgcgagaggtctgagcaaa

SEQ ID NO: 4066065 - DNA, 25 bp, Homo sapien
tttgggaaccccaactattgcagaa

SEQ ID NO: 4066066 - DNA, 25 bp, Homo sapien
caaggtcgtatccagctttgggaac

SEQ ID NO: 4066067 - DNA, 25 bp, Homo sapien
gttagtctatatttaggtgatgtgg

SEQ ID NO: 4066068 - DNA, 25 bp, Homo sapien
cccagctctgtattcgagcgtggtt

SEQ ID NO: 4066069 - DNA, 25 bp, Homo sapien
ctgtattcgagcgtggttatctttg

SEQ ID NO: 4066070 - DNA, 25 bp, Homo sapien
tagaagttagtctatatttaggtga

SEQ ID NO: 4066071 - DNA, 25 bp, Homo sapien
tagggaaggctgtcgatacaccgct

SEQ ID NO: 4066072 - DNA, 25 bp, Homo sapien
tcatggcgtctggtccatgctcaga

SEQ ID NO: 4066073 - DNA, 25 bp, Homo sapien
cacagaagactggtgagttctagac

SEQ ID NO: 4066074 - DNA, 25 bp, Homo sapien
taggcagattgctctgacacagaag

SEQ ID NO: 4066075 - DNA, 25 bp, Homo sapien
tcatgcaattgcgcaattcacacac

SEQ ID NO: 4066076 - DNA, 25 bp, Homo sapien
tttggcccctgcgtcaccttcacca

SEQ ID NO: 4066077 - DNA, 25 bp, Homo sapien
tgtccattgtcatcatctccaccat

SEQ ID NO: 4066078 - DNA, 25 bp, Homo sapien
tcaccaccacccaatgtgtcctgct

SEQ ID NO: 4066079 - DNA, 25 bp, Homo sapien
cactttggcccctgcgtcaccttca

SEQ ID NO: 4066080 - DNA, 25 bp, Homo sapien
tgagtgaagacgctcttctctggct

SEQ ID NO: 4066081 - DNA, 25 bp, Homo sapien
cttttgttttcattgccacccttgc

SEQ ID NO: 4066082 - DNA, 25 bp, Homo sapien
cctggggtgagtgaagacgctcttc

SEQ ID NO: 4066083 - DNA, 25 bp, Homo sapien
gccacccttgcctggggtgagtgaa

SEQ ID NO: 4066084 - DNA, 25 bp, Homo sapien
ctcaaagcaaacacatcattcacca

SEQ ID NO: 4066085 - DNA, 25 bp, Homo sapien
tcaaagcaaacacatcattcaccat

SEQ ID NO: 4066086 - DNA, 25 bp, Homo sapien
tcctggtcctgcaaaagtgtttact

SEQ ID NO: 4066087 - DNA, 25 bp, Homo sapien
gaagctcaggataaacgtttcagac

SEQ ID NO: 4066088 - DNA, 25 bp, Homo sapien
gattcttccagaaacgttctatgca

SEQ ID NO: 4066089 - DNA, 25 bp, Homo sapien
agacattgatatgcttcctgagagg

SEQ ID NO: 4066090 - DNA, 25 bp, Homo sapien
cattcatcagcctgcatcctgttca

SEQ ID NO: 4066091 - DNA, 25 bp, Homo sapien
tctgtgcagcggctgcattcatcag

SEQ ID NO: 4066092 - DNA, 25 bp, Homo sapien
gttttctgtgcagcggctgcattca

SEQ ID NO: 4066093 - DNA, 25 bp, Homo sapien
tttctgtgcagcggctgcattcatc

SEQ ID NO: 4066094 - DNA, 25 bp, Homo sapien
tgtgatgacgggcaacagatttcca

SEQ ID NO: 4066095 - DNA, 25 bp, Homo sapien
tccgggttcctggagtagggagctg

SEQ ID NO: 4066096 - DNA, 25 bp, Homo sapien
ttgtggaattttctgtggtggtccg

SEQ ID NO: 4066097 - DNA, 25 bp, Homo sapien
tttccaagttggcacgcgggcttct

SEQ ID NO: 4066098 - DNA, 25 bp, Homo sapien
tgagggcaaggaccacaagataaat

SEQ ID NO: 4066099 - DNA, 25 bp, Homo sapien
tgtcgtaaggtaaccaggaatgaca

SEQ ID NO: 4066100 - DNA, 25 bp, Homo sapien
ctttcctttgtatatccactcatca

SEQ ID NO: 4066101 - DNA, 25 bp, Homo sapien
tgacattccaagattccattctttc

SEQ ID NO: 4066102 - DNA, 25 bp, Homo sapien
tggcaaggggcgtgacaaagttacc

SEQ ID NO: 4066103 - DNA, 25 bp, Homo sapien
ttaccaagagaggtaggtgagagac

SEQ ID NO: 4066104 - DNA, 25 bp, Homo sapien
ctgggaacagttgagtaagaacaag

SEQ ID NO: 4066105 - DNA, 25 bp, Homo sapien
aagcaggaacaaacaattagaacat

SEQ ID NO: 4066106 - DNA, 25 bp, Homo sapien
tctacccagggtcatatccttggat

SEQ ID NO: 4066107 - DNA, 25 bp, Homo sapien
cagtgaccctggttcatcccggaaa

SEQ ID NO: 4066108 - DNA, 25 bp, Homo sapien
gcagcgtgtgttgaatgccagccac

SEQ ID NO: 4066109 - DNA, 25 bp, Homo sapien
gcattatgagcattgcagtgccaca

SEQ ID NO: 4066110 - DNA, 25 bp, Homo sapien
gaaacttaccagtggtgtgtgatcg

SEQ ID NO: 4066111 - DNA, 25 bp, Homo sapien
gaactattagggctgatctctgaga

SEQ ID NO: 4066112 - DNA, 25 bp, Homo sapien
gctgcattggtgtgttacgttatga

SEQ ID NO: 4066113 - DNA, 25 bp, Homo sapien
taccagtggtgtgtgatcggaaatc

SEQ ID NO: 4066114 - DNA, 25 bp, Homo sapien
ggctggatgttctgcatatttgcat

SEQ ID NO: 4066115 - DNA, 25 bp, Homo sapien
cactctgctcagtgcaaggttttat

SEQ ID NO: 4066116 - DNA, 25 bp, Homo sapien
atcatcatgtattttcatcaggatg

SEQ ID NO: 4066117 - DNA, 25 bp, Homo sapien
tcatcaggatgaaatatcgggcact

SEQ ID NO: 4066118 - DNA, 25 bp, Homo sapien
ataacatgagaataatgtccaaaca

SEQ ID NO: 4066119 - DNA, 25 bp, Homo sapien
cttctcattgatggctgccaagaga

SEQ ID NO: 4066120 - DNA, 25 bp, Homo sapien
tgtgctgttcactgtaacatcgtcc

SEQ ID NO: 4066121 - DNA, 25 bp, Homo sapien
gcttttcagtctactggtatctcca

SEQ ID NO: 4066122 - DNA, 25 bp, Homo sapien
tgcagcgtgatgtctagtcagagtt

SEQ ID NO: 4066123 - DNA, 25 bp, Homo sapien
tgcaaaattgcatcgtgggcctctt

SEQ ID NO: 4066124 - DNA, 25 bp, Homo sapien
ggcagtgttcttcttttcaaaaggc

SEQ ID NO: 4066125 - DNA, 25 bp, Homo sapien
cagtgttcttcttttcaaaaggcat

SEQ ID NO: 4066126 - DNA, 25 bp, Homo sapien
ccaggaaggcagtgttcttcttttc

SEQ ID NO: 4066127 - DNA, 25 bp, Homo sapien
aggaaggcagtgttcttcttttcaa

SEQ ID NO: 4066128 - DNA, 25 bp, Homo sapien
gtgccctcctcagcggagacaactg

SEQ ID NO: 4066129 - DNA, 25 bp, Homo sapien
ctttacaccccaggacaggtgccct

SEQ ID NO: 4066130 - DNA, 25 bp, Homo sapien
tttacaccccaggacaggtgccctc

SEQ ID NO: 4066131 - DNA, 25 bp, Homo sapien
caggtgccctcctcagcggagacaa

SEQ ID NO: 4066132 - DNA, 25 bp, Homo sapien
ccaaggagagttcagcgggctggat

SEQ ID NO: 4066133 - DNA, 25 bp, Homo sapien
ctgtgaggctatggtctgccaagga

SEQ ID NO: 4066134 - DNA, 25 bp, Homo sapien
aggctatggtctgccaaggagagtt

SEQ ID NO: 4066135 - DNA, 25 bp, Homo sapien
aaggagagttcagcgggctggatca

SEQ ID NO: 4066136 - DNA, 25 bp, Homo sapien
tcatgcagcacggtgtgatggctca

SEQ ID NO: 4066137 - DNA, 25 bp, Homo sapien
catgcagcacggtgtgatggctcac

SEQ ID NO: 4066138 - DNA, 25 bp, Homo sapien
gttcatgcagcacggtgtgatggct

SEQ ID NO: 4066139 - DNA, 25 bp, Homo sapien
aagttcatgcagcacggtgtgatgg

SEQ ID NO: 4066140 - DNA, 25 bp, Homo sapien
ggcgcagctctcagcgtaaagcagt

SEQ ID NO: 4066141 - DNA, 25 bp, Homo sapien
tggcgcagctctcagcgtaaagcag

SEQ ID NO: 4066142 - DNA, 25 bp, Homo sapien
ggacacatcttgagtttctctccat

SEQ ID NO: 4066143 - DNA, 25 bp, Homo sapien
cagtaactcattaggcactgacggg

SEQ ID NO: 4066144 - DNA, 25 bp, Homo sapien
gcagctctccatacagtttacgaaa

SEQ ID NO: 4066145 - DNA, 25 bp, Homo sapien
cactgacgggctgacatgagcaaca

SEQ ID NO: 4066146 - DNA, 25 bp, Homo sapien
gacttagtatctgttgcagctctcc

SEQ ID NO: 4066147 - DNA, 25 bp, Homo sapien
tcaatctgatagacggtgtgcctct

SEQ ID NO: 4066148 - DNA, 25 bp, Homo sapien
cctgttgcaagtaatcgggctctgt

SEQ ID NO: 4066149 - DNA, 25 bp, Homo sapien
ggctgaaggaaagcccgcgattctc

SEQ ID NO: 4066150 - DNA, 25 bp, Homo sapien
gattctcggccattccggttcacag

SEQ ID NO: 4066151 - DNA, 25 bp, Homo sapien
tcttcaagaaatgcggcagctgctt

SEQ ID NO: 4066152 - DNA, 25 bp, Homo sapien
gtagtcttcaagaaatgcggcagct

SEQ ID NO: 4066153 - DNA, 25 bp, Homo sapien
gaaatgcggcagctgcttctagccg

SEQ ID NO: 4066154 - DNA, 25 bp, Homo sapien
gaaagtagtcttcaagaaatgcggc

SEQ ID NO: 4066155 - DNA, 25 bp, Homo sapien
tcattcttctgggatcgtagatggc

SEQ ID NO: 4066156 - DNA, 25 bp, Homo sapien
ttcatccccagctttgtgattctct

SEQ ID NO: 4066157 - DNA, 25 bp, Homo sapien
atcgtagatggccaccacaggttca

SEQ ID NO: 4066158 - DNA, 25 bp, Homo sapien
gattctctaggttattcattcttct

SEQ ID NO: 4066159 - DNA, 25 bp, Homo sapien
taatcattatcatcaagaggaatgt

SEQ ID NO: 4066160 - DNA, 25 bp, Homo sapien
cccagggatgatgcattctgataat

SEQ ID NO: 4066161 - DNA, 25 bp, Homo sapien
ttatggtggtcccagggatgatgca

SEQ ID NO: 4066162 - DNA, 25 bp, Homo sapien
cagggatgatgcattctgataatca

SEQ ID NO: 4066163 - DNA, 25 bp, Homo sapien
ccaggcaagttcgtgtggttctgtg

SEQ ID NO: 4066164 - DNA, 25 bp, Homo sapien
tgtgataacgctcctctcactgtgc

SEQ ID NO: 4066165 - DNA, 25 bp, Homo sapien
tgtgataaccctcatctctataggt

SEQ ID NO: 4066166 - DNA, 25 bp, Homo sapien
tctataggttctgtgataacgctcc

SEQ ID NO: 4066167 - DNA, 25 bp, Homo sapien
tgttcaggatttcagaccaccatat

SEQ ID NO: 4066168 - DNA, 25 bp, Homo sapien
cactataaatttccaccggtctctg

SEQ ID NO: 4066169 - DNA, 25 bp, Homo sapien
tatgattctgcaagcgtggtttaca

SEQ ID NO: 4066170 - DNA, 25 bp, Homo sapien
tttgtcctaggaaacctgccagcat

SEQ ID NO: 4066171 - DNA, 25 bp, Homo sapien
tatgtcccacaattggcaagtgcca

SEQ ID NO: 4066172 - DNA, 25 bp, Homo sapien
gatatgccccatgtctaagaaaaaa

SEQ ID NO: 4066173 - DNA, 25 bp, Homo sapien
ggagagttgcctttcagctggtgaa

SEQ ID NO: 4066174 - DNA, 25 bp, Homo sapien
ggagccaagtggacgctaatcacca

SEQ ID NO: 4066175 - DNA, 25 bp, Homo sapien
tagcgagtcccagtgaaagcagaga

SEQ ID NO: 4066176 - DNA, 25 bp, Homo sapien
cctctggtcctggtgatctgaatac

SEQ ID NO: 4066177 - DNA, 25 bp, Homo sapien
ggtacgtgtttcctagcccatagcg

SEQ ID NO: 4066178 - DNA, 25 bp, Homo sapien
gatctgaatacatcaccacagaact

SEQ ID NO: 4066179 - DNA, 25 bp, Homo sapien
gatgcctggctcaagtactagttct

SEQ ID NO: 4066180 - DNA, 25 bp, Homo sapien
catgggcctgccctgtacatgagga

SEQ ID NO: 4066181 - DNA, 25 bp, Homo sapien
cttgctttaggtggaggatctggtc

SEQ ID NO: 4066182 - DNA, 25 bp, Homo sapien
tcaatgatggtaccaatggactcta

SEQ ID NO: 4066183 - DNA, 25 bp, Homo sapien
ctccgaataggtgggccttcccaat

SEQ ID NO: 4066184 - DNA, 25 bp, Homo sapien
cgtatacccagtgttctctttctct

SEQ ID NO: 4066185 - DNA, 25 bp, Homo sapien
tcttgtctatccagaaaccgtatac

SEQ ID NO: 4066186 - DNA, 25 bp, Homo sapien
tctttctctcacctccgaataggtg

SEQ ID NO: 4066187 - DNA, 25 bp, Homo sapien
tctctcctgaccaccgttggtgtct

SEQ ID NO: 4066188 - DNA, 25 bp, Homo sapien
tcctgaccaccgttggtgtctcaaa

SEQ ID NO: 4066189 - DNA, 25 bp, Homo sapien
ccaccgttggtgtctcaaagtctca

SEQ ID NO: 4066190 - DNA, 25 bp, Homo sapien
ttgctctctcctgaccaccgttggt

SEQ ID NO: 4066191 - DNA, 25 bp, Homo sapien
tatcatcaaattcatgagtatccat

SEQ ID NO: 4066192 - DNA, 25 bp, Homo sapien
atgtgacaacacacatatcatcaaa

SEQ ID NO: 4066193 - DNA, 25 bp, Homo sapien
acacatatcatcaaattcatgagta

SEQ ID NO: 4066194 - DNA, 25 bp, Homo sapien
catatcatcaaattcatgagtatcc

SEQ ID NO: 4066195 - DNA, 25 bp, Homo sapien
attgcctcaggagtcgagccctgtg

SEQ ID NO: 4066196 - DNA, 25 bp, Homo sapien
tgaccacctaactgaccccactgtg

SEQ ID NO: 4066197 - DNA, 25 bp, Homo sapien
tgctgtcaccacatttgaccaccta

SEQ ID NO: 4066198 - DNA, 25 bp, Homo sapien
gaccccactgtggtcacctttgcca

SEQ ID NO: 4066199 - DNA, 25 bp, Homo sapien
cctctcttgaagcacagtaaatgct

SEQ ID NO: 4066200 - DNA, 25 bp, Homo sapien
gctaatagggttggcagcgtccttt

SEQ ID NO: 4066201 - DNA, 25 bp, Homo sapien
acgtgatttgtgaagatggctctgc

SEQ ID NO: 4066202 - DNA, 25 bp, Homo sapien
tcctgagagttaaatcaagcagcct

SEQ ID NO: 4066203 - DNA, 25 bp, Homo sapien
tcttgggaaactttgcgggaattca

SEQ ID NO: 4066204 - DNA, 25 bp, Homo sapien
tgcgggaattcacttgaaattgtcc

SEQ ID NO: 4066205 - DNA, 25 bp, Homo sapien
ggtttatcgtgtgagtttccatcca

SEQ ID NO: 4066206 - DNA, 25 bp, Homo sapien
tttggtttatcgtgtgagtttccat

SEQ ID NO: 4066207 - DNA, 25 bp, Homo sapien
tgtctgccgtgctcatgaacaggaa

SEQ ID NO: 4066208 - DNA, 25 bp, Homo sapien
gaaacatccgtctctctccttggag

SEQ ID NO: 4066209 - DNA, 25 bp, Homo sapien
gaacaggaagtgaacccgatcagcc

SEQ ID NO: 4066210 - DNA, 25 bp, Homo sapien
ctctgtgtgctgcagccgttattga

SEQ ID NO: 4066211 - DNA, 25 bp, Homo sapien
tggtaaacataaaacgttcattgaa

SEQ ID NO: 4066212 - DNA, 25 bp, Homo sapien
gccacaccccctcatagatttcttc

SEQ ID NO: 4066213 - DNA, 25 bp, Homo sapien
cagcacataaattttcatagacatc

SEQ ID NO: 4066214 - DNA, 25 bp, Homo sapien
tgtggatctgtttggaaatgtaaca

SEQ ID NO: 4066215 - DNA, 25 bp, Homo sapien
catttatccattgcaccccgtgtca

SEQ ID NO: 4066216 - DNA, 25 bp, Homo sapien
ccccgtgtcattgccgaattcctga

SEQ ID NO: 4066217 - DNA, 25 bp, Homo sapien
catctgcgccgaagagtattgaact

SEQ ID NO: 4066218 - DNA, 25 bp, Homo sapien
gccagagcacttgggatctgcagaa

SEQ ID NO: 4066219 - DNA, 25 bp, Homo sapien
ttattagggtcttgccccatcttgg

SEQ ID NO: 4066220 - DNA, 25 bp, Homo sapien
caacatgccctaactggttagcaga

SEQ ID NO: 4066221 - DNA, 25 bp, Homo sapien
gcagcaagcctgctttaccattgga

SEQ ID NO: 4066222 - DNA, 25 bp, Homo sapien
tcagctctgattacaatacgtccgt

SEQ ID NO: 4066223 - DNA, 25 bp, Homo sapien
cactgctcggtgatattacatctgc

SEQ ID NO: 4066224 - DNA, 25 bp, Homo sapien
catctgcatgcgtcttgccctctga

SEQ ID NO: 4066225 - DNA, 25 bp, Homo sapien
tctgacacggcaaacacagatgctg

SEQ ID NO: 4066226 - DNA, 25 bp, Homo sapien
tgcacactcggattacactgctcgg

SEQ ID NO: 4066227 - DNA, 25 bp, Homo sapien
ttgatttgcaaagcagcctgacaca

SEQ ID NO: 4066228 - DNA, 25 bp, Homo sapien
gaattgatttgcaaagcagcctgac

SEQ ID NO: 4066229 - DNA, 25 bp, Homo sapien
aagtaggaaggagcatctttgcagg

SEQ ID NO: 4066230 - DNA, 25 bp, Homo sapien
taagtaggaaggagcatctttgcag

SEQ ID NO: 4066231 - DNA, 25 bp, Homo sapien
tgtcctgcactgtccattatctgca

SEQ ID NO: 4066232 - DNA, 25 bp, Homo sapien
tgtgtcctgcactgtccattatctg

SEQ ID NO: 4066233 - DNA, 25 bp, Homo sapien
cctgcactgtccattatctgcaggg

SEQ ID NO: 4066234 - DNA, 25 bp, Homo sapien
tctgcaggggtggtactgctgtccc

SEQ ID NO: 4066235 - DNA, 25 bp, Homo sapien
tgccagagtggctgtatcctggtgt

SEQ ID NO: 4066236 - DNA, 25 bp, Homo sapien
ctgtgtgatttgtcacctggaggaa

SEQ ID NO: 4066237 - DNA, 25 bp, Homo sapien
cacacacccactgggattcctgtgt

SEQ ID NO: 4066238 - DNA, 25 bp, Homo sapien
ttatttagtaaatagccctgcccga

SEQ ID NO: 4066239 - DNA, 25 bp, Homo sapien
tggccctgttgcttaaagtggcaga

SEQ ID NO: 4066240 - DNA, 25 bp, Homo sapien
tccagctggccctgttgcttaaagt

SEQ ID NO: 4066241 - DNA, 25 bp, Homo sapien
cagctggccctgttgcttaaagtgg

SEQ ID NO: 4066242 - DNA, 25 bp, Homo sapien
gctggccctgttgcttaaagtggca

SEQ ID NO: 4066243 - DNA, 25 bp, Homo sapien
ccaagaacaggtacttgcccttgtc

SEQ ID NO: 4066244 - DNA, 25 bp, Homo sapien
gccaagtcctacagtcagcatcaga

SEQ ID NO: 4066245 - DNA, 25 bp, Homo sapien
agcatcagacggcttgtctcaagct

SEQ ID NO: 4066246 - DNA, 25 bp, Homo sapien
gtgtctgtgtctcccctccaagaac

SEQ ID NO: 4066247 - DNA, 25 bp, Homo sapien
tcaccattgtcaccggggagaaatt

SEQ ID NO: 4066248 - DNA, 25 bp, Homo sapien
gtttagtgccctctcggttcccaga

SEQ ID NO: 4066249 - DNA, 25 bp, Homo sapien
accctgatagtttccctgtggtttg

SEQ ID NO: 4066250 - DNA, 25 bp, Homo sapien
ggagaaatttgtgttggctgaaatc

SEQ ID NO: 4066251 - DNA, 25 bp, Homo sapien
aattgtaattcttggctttggattt

SEQ ID NO: 4066252 - DNA, 25 bp, Homo sapien
cgggtaattgtaattcttggctttg

SEQ ID NO: 4066253 - DNA, 25 bp, Homo sapien
ggtaattgtaattcttggctttgga

SEQ ID NO: 4066254 - DNA, 25 bp, Homo sapien
tgtaattcttggctttggattttgt

SEQ ID NO: 4066255 - DNA, 25 bp, Homo sapien
tgtaagcaggaagctgacgctgcgc

SEQ ID NO: 4066256 - DNA, 25 bp, Homo sapien
ttgtggaacgagaaagtgaatattc

SEQ ID NO: 4066257 - DNA, 25 bp, Homo sapien
aaaggagagcatgacccgccaatgc

SEQ ID NO: 4066258 - DNA, 25 bp, Homo sapien
ccaatgccgttgtttgtaagcagga

SEQ ID NO: 4066259 - DNA, 25 bp, Homo sapien
tgcagagcgcagacatttggctccc

SEQ ID NO: 4066260 - DNA, 25 bp, Homo sapien
cccatgggtaagtcattggctgcag

SEQ ID NO: 4066261 - DNA, 25 bp, Homo sapien
cactccctatccctaaggtttcagg

SEQ ID NO: 4066262 - DNA, 25 bp, Homo sapien
tagcttggaatggaccatcctctgg

SEQ ID NO: 4066263 - DNA, 25 bp, Homo sapien
tggaaggcaggtttcacgtaactga

SEQ ID NO: 4066264 - DNA, 25 bp, Homo sapien
gattggtaaccactgatacgccgcc

SEQ ID NO: 4066265 - DNA, 25 bp, Homo sapien
tgtcggacctcagtatgattgatgc

SEQ ID NO: 4066266 - DNA, 25 bp, Homo sapien
cttggtaaaggaacgaggtgacagc

SEQ ID NO: 4066267 - DNA, 25 bp, Homo sapien
gtttgagttcaagggaaggtttgca

SEQ ID NO: 4066268 - DNA, 25 bp, Homo sapien
actcaaaccaaagagcacaccgccg

SEQ ID NO: 4066269 - DNA, 25 bp, Homo sapien
gaaagggaactgtgttcgccagctc

SEQ ID NO: 4066270 - DNA, 25 bp, Homo sapien
tgtgttcgccagctcgtaaagcccc

SEQ ID NO: 4066271 - DNA, 25 bp, Homo sapien
gatccccaagggatactcatggttg

SEQ ID NO: 4066272 - DNA, 25 bp, Homo sapien
catggttgaaggtgtctatgtgttc

SEQ ID NO: 4066273 - DNA, 25 bp, Homo sapien
atgtgtcggtcccaaggatccccaa

SEQ ID NO: 4066274 - DNA, 25 bp, Homo sapien
gaatgcctcttgacaatctgtggtc

SEQ ID NO: 4066275 - DNA, 25 bp, Homo sapien
tgaatgcgtgcaaggctttctgtca

SEQ ID NO: 4066276 - DNA, 25 bp, Homo sapien
ggctttctgtcacaggctctgtgtt

SEQ ID NO: 4066277 - DNA, 25 bp, Homo sapien
gtcacaggctctgtgttaagatatt

SEQ ID NO: 4066278 - DNA, 25 bp, Homo sapien
gaatgcgtgcaaggctttctgtcac

SEQ ID NO: 4066279 - DNA, 25 bp, Homo sapien
aataaattctgagggctgacactgc

SEQ ID NO: 4066280 - DNA, 25 bp, Homo sapien
gctcggcagcgaacaaaattaacag

SEQ ID NO: 4066281 - DNA, 25 bp, Homo sapien
gagccggctggtctttgccctcaat

SEQ ID NO: 4066282 - DNA, 25 bp, Homo sapien
gatgggccattgaaaactcattaca

SEQ ID NO: 4066283 - DNA, 25 bp, Homo sapien
aatgatgctggcagatgtttgcatt

SEQ ID NO: 4066284 - DNA, 25 bp, Homo sapien
ggcagatgtttgcattctgcagctg

SEQ ID NO: 4066285 - DNA, 25 bp, Homo sapien
cagctggggcggctggcgggttggg

SEQ ID NO: 4066286 - DNA, 25 bp, Homo sapien
ttaatgatgctggcagatgtttgca

SEQ ID NO: 4066287 - DNA, 25 bp, Homo sapien
taaatagtggtagataacttctatc

SEQ ID NO: 4066288 - DNA, 25 bp, Homo sapien
gtgttccatcaacatgtccttttta

SEQ ID NO: 4066289 - DNA, 25 bp, Homo sapien
caccagcacggagtgtggcttagga

SEQ ID NO: 4066290 - DNA, 25 bp, Homo sapien
cacccattctgtagtgcagggcaca

SEQ ID NO: 4066291 - DNA, 25 bp, Homo sapien
cagccacgggctatccagggaattg

SEQ ID NO: 4066292 - DNA, 25 bp, Homo sapien
ggacagtctgtaatgtatcttgagc

SEQ ID NO: 4066293 - DNA, 25 bp, Homo sapien
gagcacgcaaatcaaggacattggc

SEQ ID NO: 4066294 - DNA, 25 bp, Homo sapien
ggacattggcaataaaccaggaatg

SEQ ID NO: 4066295 - DNA, 25 bp, Homo sapien
aatggttggcacaggcttcgatgaa

SEQ ID NO: 4066296 - DNA, 25 bp, Homo sapien
gtgaacttgagcctcgatgcctgga

SEQ ID NO: 4066297 - DNA, 25 bp, Homo sapien
tcgatgaagcttgtgtccaccacag

SEQ ID NO: 4066298 - DNA, 25 bp, Homo sapien
gatgtttgcaaagcaccagggtgat

SEQ ID NO: 4066299 - DNA, 25 bp, Homo sapien
aaaaccatagacaggcagtgtcccc

SEQ ID NO: 4066300 - DNA, 25 bp, Homo sapien
cacatttgcttgcagccagtgctca

SEQ ID NO: 4066301 - DNA, 25 bp, Homo sapien
gccttccgaagctgccatcttggtg

SEQ ID NO: 4066302 - DNA, 25 bp, Homo sapien
ctttctttgccttccgaagctgcca

SEQ ID NO: 4066303 - DNA, 25 bp, Homo sapien
caagattgcatgagattaagccgct

SEQ ID NO: 4066304 - DNA, 25 bp, Homo sapien
tgatccctcagataggcccaagagc

SEQ ID NO: 4066305 - DNA, 25 bp, Homo sapien
aacatgcattggaaccaggaaggcc

SEQ ID NO: 4066306 - DNA, 25 bp, Homo sapien
tagtaaggccatcacaggttgccag

SEQ ID NO: 4066307 - DNA, 25 bp, Homo sapien
aatataactgtatggcgatccttca

SEQ ID NO: 4066308 - DNA, 25 bp, Homo sapien
taaaactttggcgacatgacatccc

SEQ ID NO: 4066309 - DNA, 25 bp, Homo sapien
gaggacaggtgcattagaatataac

SEQ ID NO: 4066310 - DNA, 25 bp, Homo sapien
cccacattggacttgtcagagagga

SEQ ID NO: 4066311 - DNA, 25 bp, Homo sapien
catcttgttagactgcggctttcca

SEQ ID NO: 4066312 - DNA, 25 bp, Homo sapien
tatgcccgagtagaaaatctgacac

SEQ ID NO: 4066313 - DNA, 25 bp, Homo sapien
gctgcaacgcttttaccatgggtaa

SEQ ID NO: 4066314 - DNA, 25 bp, Homo sapien
ccatgggtaaaccattaggccggct

SEQ ID NO: 4066315 - DNA, 25 bp, Homo sapien
attgcagggtagtccacggcttcca

SEQ ID NO: 4066316 - DNA, 25 bp, Homo sapien
acggcttccaaagagaactgcataa

SEQ ID NO: 4066317 - DNA, 25 bp, Homo sapien
tgtgcaaaatcaggccacgattgca

SEQ ID NO: 4066318 - DNA, 25 bp, Homo sapien
caaagagaactgcataaatatacat

SEQ ID NO: 4066319 - DNA, 25 bp, Homo sapien
tctgtcaattgcattgctggtgatc

SEQ ID NO: 4066320 - DNA, 25 bp, Homo sapien
caattgcattgctggtgatcaagaa

SEQ ID NO: 4066321 - DNA, 25 bp, Homo sapien
tcacccaaagccactaacacgggat

SEQ ID NO: 4066322 - DNA, 25 bp, Homo sapien
actaacacgggatctgtcaattgca

SEQ ID NO: 4066323 - DNA, 25 bp, Homo sapien
aaaaccagcagggttatatccccag

SEQ ID NO: 4066324 - DNA, 25 bp, Homo sapien
gacaaaaccagcagggttatatccc

SEQ ID NO: 4066325 - DNA, 25 bp, Homo sapien
aaccagcagggttatatccccagca

SEQ ID NO: 4066326 - DNA, 25 bp, Homo sapien
gagacaaaaccagcagggttatatc

SEQ ID NO: 4066327 - DNA, 25 bp, Homo sapien
cagagcaagagaaacctcgaagggt

SEQ ID NO: 4066328 - DNA, 25 bp, Homo sapien
ggttctccctcaagaggtcagacgt

SEQ ID NO: 4066329 - DNA, 25 bp, Homo sapien
cactatccattagcaagagatcaga

SEQ ID NO: 4066330 - DNA, 25 bp, Homo sapien
ttagatgccgtatctttaaaacacc

SEQ ID NO: 4066331 - DNA, 25 bp, Homo sapien
taatatgaggagatccgagacctca

SEQ ID NO: 4066332 - DNA, 25 bp, Homo sapien
ctcctgccagaaaagattttgattt

SEQ ID NO: 4066333 - DNA, 25 bp, Homo sapien
aaagattttgatttcgatcatggca

SEQ ID NO: 4066334 - DNA, 25 bp, Homo sapien
catggcagttgctgtcgctgaggta

SEQ ID NO: 4066335 - DNA, 25 bp, Homo sapien
ttttgcagaaagcagacgtacactt

SEQ ID NO: 4066336 - DNA, 25 bp, Homo sapien
aaagcagacgtacacttctttgctg

SEQ ID NO: 4066337 - DNA, 25 bp, Homo sapien
tggcgaagtcgcagccatttaaaaa

SEQ ID NO: 4066338 - DNA, 25 bp, Homo sapien
gaaattctgagtttgtgtctatggt

SEQ ID NO: 4066339 - DNA, 25 bp, Homo sapien
tggaagctccgtggccattgccaaa

SEQ ID NO: 4066340 - DNA, 25 bp, Homo sapien
aacatttggttctgcggtcgcttgg

SEQ ID NO: 4066341 - DNA, 25 bp, Homo sapien
gattgggcccgtgctataattaatg

SEQ ID NO: 4066342 - DNA, 25 bp, Homo sapien
cctggagacagagcgttagccgttg

SEQ ID NO: 4066343 - DNA, 25 bp, Homo sapien
tcagggatggcccttgataaggcag

SEQ ID NO: 4066344 - DNA, 25 bp, Homo sapien
gagcctttcggctggaaagctcttc

SEQ ID NO: 4066345 - DNA, 25 bp, Homo sapien
taagccggaggataatcgcttgcat

SEQ ID NO: 4066346 - DNA, 25 bp, Homo sapien
ggagtgaggaaacgctctcttcttc

SEQ ID NO: 4066347 - DNA, 25 bp, Homo sapien
ttatacaattggacgaaatgggtga

SEQ ID NO: 4066348 - DNA, 25 bp, Homo sapien
tgctccaaagtagagttggaggaag

SEQ ID NO: 4066349 - DNA, 25 bp, Homo sapien
caatttgctccaaagtagagttgga

SEQ ID NO: 4066350 - DNA, 25 bp, Homo sapien
tgatctaatttggactcaatttgct

SEQ ID NO: 4066351 - DNA, 25 bp, Homo sapien
gcctctctgagaagcccatcagccc

SEQ ID NO: 4066352 - DNA, 25 bp, Homo sapien
ctgcctctctgagaagcccatcagc

SEQ ID NO: 4066353 - DNA, 25 bp, Homo sapien
ctctgagaagcccatcagccctgag

SEQ ID NO: 4066354 - DNA, 25 bp, Homo sapien
ctctctgagaagcccatcagccctg

SEQ ID NO: 4066355 - DNA, 25 bp, Homo sapien
cacagtgtgtggtctgtatggcaca

SEQ ID NO: 4066356 - DNA, 25 bp, Homo sapien
ttgtggcacagtgcatggtctgcat

SEQ ID NO: 4066357 - DNA, 25 bp, Homo sapien
tccttgtggcacagtgcatggtctg

SEQ ID NO: 4066358 - DNA, 25 bp, Homo sapien
gtgcatggtccgcatggcacagcgc

SEQ ID NO: 4066359 - DNA, 25 bp, Homo sapien
aaccttgcaaaatgagatggcagtc

SEQ ID NO: 4066360 - DNA, 25 bp, Homo sapien
ccttgcaaaatgagatggcagtctt

SEQ ID NO: 4066361 - DNA, 25 bp, Homo sapien
tgcaaaatgagatggcagtcttcat

SEQ ID NO: 4066362 - DNA, 25 bp, Homo sapien
caaccttgcaaaatgagatggcagt

SEQ ID NO: 4066363 - DNA, 25 bp, Homo sapien
tataaggtggggttgcggaaatctc

SEQ ID NO: 4066364 - DNA, 25 bp, Homo sapien
gggttgcggaaatctctgccacgtc

SEQ ID NO: 4066365 - DNA, 25 bp, Homo sapien
aatctctgccacgtccgcctttatg

SEQ ID NO: 4066366 - DNA, 25 bp, Homo sapien
tccgcctttatgaaggagtgaaatc

SEQ ID NO: 4066367 - DNA, 25 bp, Homo sapien
cttgtgttgatggaatctcgtaatg

SEQ ID NO: 4066368 - DNA, 25 bp, Homo sapien
aattaagccgctttgcagaagtccg

SEQ ID NO: 4066369 - DNA, 25 bp, Homo sapien
cgctttgcagaagtccgggctgtca

SEQ ID NO: 4066370 - DNA, 25 bp, Homo sapien
tctcgtaatgagtaattaagccgct

SEQ ID NO: 4066371 - DNA, 25 bp, Homo sapien
tctggtgttgggtccgccagctctc

SEQ ID NO: 4066372 - DNA, 25 bp, Homo sapien
tagggcgtaatcttctgagacccac

SEQ ID NO: 4066373 - DNA, 25 bp, Homo sapien
ttggtctctggtgttgggtccgcca

SEQ ID NO: 4066374 - DNA, 25 bp, Homo sapien
ctccacccttcagaatgggatgttt

SEQ ID NO: 4066375 - DNA, 25 bp, Homo sapien
agatcctgttcatttgccttattcg

SEQ ID NO: 4066376 - DNA, 25 bp, Homo sapien
cttttggatcctccagaggcctgag

SEQ ID NO: 4066377 - DNA, 25 bp, Homo sapien
agggaagcagaagtccttttggatc

SEQ ID NO: 4066378 - DNA, 25 bp, Homo sapien
cgttatgaccatagaagtttgtggg

SEQ ID NO: 4066379 - DNA, 25 bp, Homo sapien
agaagggtgcatggagcgtgcaggg

SEQ ID NO: 4066380 - DNA, 25 bp, Homo sapien
gagcgtgcaggggaagaactgattc

SEQ ID NO: 4066381 - DNA, 25 bp, Homo sapien
tcaggtaaggaacgtgtgcagggga

SEQ ID NO: 4066382 - DNA, 25 bp, Homo sapien
acgtgtgcaggggatgtaacagaaa

SEQ ID NO: 4066383 - DNA, 25 bp, Homo sapien
ttcatttgccatgttaagaggatat

SEQ ID NO: 4066384 - DNA, 25 bp, Homo sapien
taatcggctcatcaaggttctggtg

SEQ ID NO: 4066385 - DNA, 25 bp, Homo sapien
gctcatcaaggttctggtgttgaag

SEQ ID NO: 4066386 - DNA, 25 bp, Homo sapien
tcagttaatcggctcatcaaggttc

SEQ ID NO: 4066387 - DNA, 25 bp, Homo sapien
aaaaaaatattggatccttgcccag

SEQ ID NO: 4066388 - DNA, 25 bp, Homo sapien
gtgttgctgagtcccttgccccctc

SEQ ID NO: 4066389 - DNA, 25 bp, Homo sapien
aaaaaatattggatccttgcccagc

SEQ ID NO: 4066390 - DNA, 25 bp, Homo sapien
agtgttgctgagtcccttgccccct

SEQ ID NO: 4066391 - DNA, 25 bp, Homo sapien
catcggcatgcgatttcttccagga

SEQ ID NO: 4066392 - DNA, 25 bp, Homo sapien
gcagaggctgccatgacatcggcat

SEQ ID NO: 4066393 - DNA, 25 bp, Homo sapien
tgaattgcagatggctttagcccca

SEQ ID NO: 4066394 - DNA, 25 bp, Homo sapien
caggacttaactctggagagagctc

SEQ ID NO: 4066395 - DNA, 25 bp, Homo sapien
gatgctgtgtcaaaagttcatggct

SEQ ID NO: 4066396 - DNA, 25 bp, Homo sapien
ctccggaaggagtgtagaagttgca

SEQ ID NO: 4066397 - DNA, 25 bp, Homo sapien
catacaaacaccttgactggccgag

SEQ ID NO: 4066398 - DNA, 25 bp, Homo sapien
attgcaatgctgaccactccggaag

SEQ ID NO: 4066399 - DNA, 25 bp, Homo sapien
tgcaatgcaagcttgtccacgatgg

SEQ ID NO: 4066400 - DNA, 25 bp, Homo sapien
cagggtcagaattttatgcaatgca

SEQ ID NO: 4066401 - DNA, 25 bp, Homo sapien
catgggagcgtgtgggaatgtcaag

SEQ ID NO: 4066402 - DNA, 25 bp, Homo sapien
tccacgatggcatgggagcgtgtgg

SEQ ID NO: 4066403 - DNA, 25 bp, Homo sapien
tgttctctgcacgacctagttctgg

SEQ ID NO: 4066404 - DNA, 25 bp, Homo sapien
cagagtccggagctactaaaggtca

SEQ ID NO: 4066405 - DNA, 25 bp, Homo sapien
ttctgggctagggaatggctgtcta

SEQ ID NO: 4066406 - DNA, 25 bp, Homo sapien
gtgttactgcaaactctgtggcctg

SEQ ID NO: 4066407 - DNA, 25 bp, Homo sapien
gataattgcagagagatactgagtt

SEQ ID NO: 4066408 - DNA, 25 bp, Homo sapien
tactgagttaacttgtagcaatgag

SEQ ID NO: 4066409 - DNA, 25 bp, Homo sapien
tcataggcaatatgtctgataattg

SEQ ID NO: 4066410 - DNA, 25 bp, Homo sapien
taaattaccaatttcataggcaata

SEQ ID NO: 4066411 - DNA, 25 bp, Homo sapien
atgtgtcattaactggggactctgc

SEQ ID NO: 4066412 - DNA, 25 bp, Homo sapien
cgcctctcctctcggacatgacagt

SEQ ID NO: 4066413 - DNA, 25 bp, Homo sapien
tctcctctcggacatgacagtgcgg

SEQ ID NO: 4066414 - DNA, 25 bp, Homo sapien
gtgtcattaactggggactctgcct

SEQ ID NO: 4066415 - DNA, 25 bp, Homo sapien
tcaaaggaggactattacagtgtta

SEQ ID NO: 4066416 - DNA, 25 bp, Homo sapien
tacagtgttatcagctgcgggcctg

SEQ ID NO: 4066417 - DNA, 25 bp, Homo sapien
ctgggtgtacggagcccggaacagg

SEQ ID NO: 4066418 - DNA, 25 bp, Homo sapien
tgcgggcctgggtgtacggagcccg

SEQ ID NO: 4066419 - DNA, 25 bp, Homo sapien
tcggaacctgcaagaagccaagacg

SEQ ID NO: 4066420 - DNA, 25 bp, Homo sapien
ctttcgtgtccgttgggtgcaggca

SEQ ID NO: 4066421 - DNA, 25 bp, Homo sapien
aagacgcctgttctccacggcggag

SEQ ID NO: 4066422 - DNA, 25 bp, Homo sapien
caccggcggctttatgtggctgcca

SEQ ID NO: 4066423 - DNA, 25 bp, Homo sapien
tgtatgtgaccgcttcccccgtggg

SEQ ID NO: 4066424 - DNA, 25 bp, Homo sapien
tatgtgaccgcttcccccgtgggaa

SEQ ID NO: 4066425 - DNA, 25 bp, Homo sapien
atttccagtgtatgtgaccgcttcc

SEQ ID NO: 4066426 - DNA, 25 bp, Homo sapien
ttccagtgtatgtgaccgcttcccc

SEQ ID NO: 4066427 - DNA, 25 bp, Homo sapien
ttgcaggcgcaaactcccaaaccag

SEQ ID NO: 4066428 - DNA, 25 bp, Homo sapien
accgaggcgttgctttgtgcacaga

SEQ ID NO: 4066429 - DNA, 25 bp, Homo sapien
aaatgcaatgcgaatggtcttgttc

SEQ ID NO: 4066430 - DNA, 25 bp, Homo sapien
tgtgcacagataaccttgcaggcgc

SEQ ID NO: 4066431 - DNA, 25 bp, Homo sapien
catttgccgttgcactagggctctt

SEQ ID NO: 4066432 - DNA, 25 bp, Homo sapien
atttgccgttgcactagggctcttt

SEQ ID NO: 4066433 - DNA, 25 bp, Homo sapien
ttgccgttgcactagggctcttttc

SEQ ID NO: 4066434 - DNA, 25 bp, Homo sapien
tttgccgttgcactagggctctttt

SEQ ID NO: 4066435 - DNA, 25 bp, Homo sapien
taggcactgtttatagagccatcgc

SEQ ID NO: 4066436 - DNA, 25 bp, Homo sapien
tagagccatcgcttgcagaacatct

SEQ ID NO: 4066437 - DNA, 25 bp, Homo sapien
tccgacacatgtgccataaatgctg

SEQ ID NO: 4066438 - DNA, 25 bp, Homo sapien
tccctgctccggagaagagcatttt

SEQ ID NO: 4066439 - DNA, 25 bp, Homo sapien
tgatagttgatagtgctgccacaga

SEQ ID NO: 4066440 - DNA, 25 bp, Homo sapien
tgtagacatatgttcgagtggttcg

SEQ ID NO: 4066441 - DNA, 25 bp, Homo sapien
cacagagcggctgtcagattccaaa

SEQ ID NO: 4066442 - DNA, 25 bp, Homo sapien
gattccaaaggcatcataccatctg

SEQ ID NO: 4066443 - DNA, 25 bp, Homo sapien
tttgactgctgctcctttgtccaga

SEQ ID NO: 4066444 - DNA, 25 bp, Homo sapien
catttgactgctgctcctttgtcca

SEQ ID NO: 4066445 - DNA, 25 bp, Homo sapien
tttgtccagacacatttaacaccat

SEQ ID NO: 4066446 - DNA, 25 bp, Homo sapien
actgctgctcctttgtccagacaca

SEQ ID NO: 4066447 - DNA, 25 bp, Homo sapien
gtcgaagtacattttgcccatagag

SEQ ID NO: 4066448 - DNA, 25 bp, Homo sapien
taactcgagtgttctgtgaagccag

SEQ ID NO: 4066449 - DNA, 25 bp, Homo sapien
tgtgcgtgcagcttctgtttaaggc

SEQ ID NO: 4066450 - DNA, 25 bp, Homo sapien
tattggtgccaagctaaatttgtgc

SEQ ID NO: 4066451 - DNA, 25 bp, Homo sapien
gagaccagggggccccgatcaggtg

SEQ ID NO: 4066452 - DNA, 25 bp, Homo sapien
cagccccacaaacgtgcacctgcag

SEQ ID NO: 4066453 - DNA, 25 bp, Homo sapien
cccacaaacgtgcacctgcagccgg

SEQ ID NO: 4066454 - DNA, 25 bp, Homo sapien
cagggggccccgatcaggtggcagg

SEQ ID NO: 4066455 - DNA, 25 bp, Homo sapien
gccacgtgtgtataatgagcagcgc

SEQ ID NO: 4066456 - DNA, 25 bp, Homo sapien
cagcgcacacacacaaaggcgagct

SEQ ID NO: 4066457 - DNA, 25 bp, Homo sapien
cgtgtgtataatgagcagcgcacac

SEQ ID NO: 4066458 - DNA, 25 bp, Homo sapien
cacacaaaggcgagctaaaaatgtc

SEQ ID NO: 4066459 - DNA, 25 bp, Homo sapien
gagctcccggaagcaaagcaattgc

SEQ ID NO: 4066460 - DNA, 25 bp, Homo sapien
cagtgtactgtcttccaccgggaca

SEQ ID NO: 4066461 - DNA, 25 bp, Homo sapien
tggtttccgggtccagcgacaagaa

SEQ ID NO: 4066462 - DNA, 25 bp, Homo sapien
tgaagtcactcaaagctcaggcgtg

SEQ ID NO: 4066463 - DNA, 25 bp, Homo sapien
tcttgggagaaattgccacttggtc

SEQ ID NO: 4066464 - DNA, 25 bp, Homo sapien
tccaaaagcggattattgacctctg

SEQ ID NO: 4066465 - DNA, 25 bp, Homo sapien
ataattgtcagaatcgaggtcatgt

SEQ ID NO: 4066466 - DNA, 25 bp, Homo sapien
gagtgggctgtctgtattgatccaa

SEQ ID NO: 4066467 - DNA, 25 bp, Homo sapien
tgtctctgtgcccttttacagcctt

SEQ ID NO: 4066468 - DNA, 25 bp, Homo sapien
gaggagctgagtcccattatattcc

SEQ ID NO: 4066469 - DNA, 25 bp, Homo sapien
tatattccgaaagcatatgttcccg

SEQ ID NO: 4066470 - DNA, 25 bp, Homo sapien
tgttcccgatgattgctcattctct

SEQ ID NO: 4066471 - DNA, 25 bp, Homo sapien
catgtctctgttgaattcagagtgc

SEQ ID NO: 4066472 - DNA, 25 bp, Homo sapien
atgcattgcatgtctctgttgaatt

SEQ ID NO: 4066473 - DNA, 25 bp, Homo sapien
cagagtgctttatagacctctgatc

SEQ ID NO: 4066474 - DNA, 25 bp, Homo sapien
ttatagacctctgatcagcttccag

SEQ ID NO: 4066475 - DNA, 25 bp, Homo sapien
tgtaccagtatcttctaccctccgg

SEQ ID NO: 4066476 - DNA, 25 bp, Homo sapien
cagtatcttctaccctccggttgtt

SEQ ID NO: 4066477 - DNA, 25 bp, Homo sapien
cgctgcttgtaccagtatcttctac

SEQ ID NO: 4066478 - DNA, 25 bp, Homo sapien
ctaccctccggttgtttgtggccat

SEQ ID NO: 4066479 - DNA, 25 bp, Homo sapien
gactgtgccagtagaaatgccagct

SEQ ID NO: 4066480 - DNA, 25 bp, Homo sapien
cagccaaaggacaggctttccatcc

SEQ ID NO: 4066481 - DNA, 25 bp, Homo sapien
ctctgggtggccgactgtgccagta

SEQ ID NO: 4066482 - DNA, 25 bp, Homo sapien
gagaaaagcactcacactcgcattt

SEQ ID NO: 4066483 - DNA, 25 bp, Homo sapien
cgcatttgcccatcgtaaaggctga

SEQ ID NO: 4066484 - DNA, 25 bp, Homo sapien
taccgtaggcttcttgacccggcac

SEQ ID NO: 4066485 - DNA, 25 bp, Homo sapien
gctgattagaaacagttgggtccca

SEQ ID NO: 4066486 - DNA, 25 bp, Homo sapien
gactgtgtccatggtcgaggtgtcc

SEQ ID NO: 4066487 - DNA, 25 bp, Homo sapien
aagaaaacatgaggaggagcagggt

SEQ ID NO: 4066488 - DNA, 25 bp, Homo sapien
gaaaacatgaggaggagcagggtga

SEQ ID NO: 4066489 - DNA, 25 bp, Homo sapien
cttaagaaaacatgaggaggagcag

SEQ ID NO: 4066490 - DNA, 25 bp, Homo sapien
aaacatgaggaggagcagggtgatg

SEQ ID NO: 4066491 - DNA, 25 bp, Homo sapien
ccatcctggggttctcttgagtaca

SEQ ID NO: 4066492 - DNA, 25 bp, Homo sapien
tccatggactgatacgctgggctcc

SEQ ID NO: 4066493 - DNA, 25 bp, Homo sapien
tctaccagtcaggagttgcttcttc

SEQ ID NO: 4066494 - DNA, 25 bp, Homo sapien
tctgtctgtctgatattcatcatct

SEQ ID NO: 4066495 - DNA, 25 bp, Homo sapien
tgttgcccagccaatttgcccaagg

SEQ ID NO: 4066496 - DNA, 25 bp, Homo sapien
gctttgtccttgtccggagagctcg

SEQ ID NO: 4066497 - DNA, 25 bp, Homo sapien
cctgggttgcaggacgcatccatgg

SEQ ID NO: 4066498 - DNA, 25 bp, Homo sapien
aagtaacttagctagctgttgccca

SEQ ID NO: 4066499 - DNA, 25 bp, Homo sapien
tgatataaggattccacccaccacg

SEQ ID NO: 4066500 - DNA, 25 bp, Homo sapien
ggatcatgctcattaagtccgcaga

SEQ ID NO: 4066501 - DNA, 25 bp, Homo sapien
tgtcctgggcagacataagccctgt

SEQ ID NO: 4066502 - DNA, 25 bp, Homo sapien
taagccctgtgggttccagtttctc

SEQ ID NO: 4066503 - DNA, 25 bp, Homo sapien
agcagggggccaaggagggctgagc

SEQ ID NO: 4066504 - DNA, 25 bp, Homo sapien
gcttagcagggggccaaggagggct

SEQ ID NO: 4066505 - DNA, 25 bp, Homo sapien
ttagcagggggccaaggagggctga

SEQ ID NO: 4066506 - DNA, 25 bp, Homo sapien
ctgcttagcagggggccaaggaggg

SEQ ID NO: 4066507 - DNA, 25 bp, Homo sapien
gaggtgctgactttgcctacttgca

SEQ ID NO: 4066508 - DNA, 25 bp, Homo sapien
tgagaggtgctgactttgcctactt

SEQ ID NO: 4066509 - DNA, 25 bp, Homo sapien
agaggtgctgactttgcctacttgc

SEQ ID NO: 4066510 - DNA, 25 bp, Homo sapien
gagaggtgctgactttgcctacttg

SEQ ID NO: 4066511 - DNA, 25 bp, Homo sapien
cagcactccggctgctgccagtgga

SEQ ID NO: 4066512 - DNA, 25 bp, Homo sapien
gcagacccagcactccggctgctgc

SEQ ID NO: 4066513 - DNA, 25 bp, Homo sapien
aggcaggagcctcgttaccaccttt

SEQ ID NO: 4066514 - DNA, 25 bp, Homo sapien
aaattgtcttgcctgcagcagatgc

SEQ ID NO: 4066515 - DNA, 25 bp, Homo sapien
ggccagtgtgattgcagagtatggg

SEQ ID NO: 4066516 - DNA, 25 bp, Homo sapien
aggccagtgtgattgcagagtatgg

SEQ ID NO: 4066517 - DNA, 25 bp, Homo sapien
cgcctttaggaaacgagatgaattg

SEQ ID NO: 4066518 - DNA, 25 bp, Homo sapien
tcttctgccgcctttaggaaacgag

SEQ ID NO: 4066519 - DNA, 25 bp, Homo sapien
tcttgcactgagctttaccaggtga

SEQ ID NO: 4066520 - DNA, 25 bp, Homo sapien
ggtgagctgacagttatcctctgca

SEQ ID NO: 4066521 - DNA, 25 bp, Homo sapien
tttcaggaatttcaagcttttgtac

SEQ ID NO: 4066522 - DNA, 25 bp, Homo sapien
ctcataatagtcgtggagggacaac

SEQ ID NO: 4066523 - DNA, 25 bp, Homo sapien
aagttgaggacacttcccggtgccg

SEQ ID NO: 4066524 - DNA, 25 bp, Homo sapien
ctgtttgccagggaaccaaggcctt

SEQ ID NO: 4066525 - DNA, 25 bp, Homo sapien
ggtgccgtgcggtgtaaatcacagt

SEQ ID NO: 4066526 - DNA, 25 bp, Homo sapien
ctaggaacgcagatgtggagacacc

SEQ ID NO: 4066527 - DNA, 25 bp, Homo sapien
tgtttctgcggattctcatgtggct

SEQ ID NO: 4066528 - DNA, 25 bp, Homo sapien
catgtggcttatcaagcacaggaaa

SEQ ID NO: 4066529 - DNA, 25 bp, Homo sapien
tcttcaggagctgtttctgcggatt

SEQ ID NO: 4066530 - DNA, 25 bp, Homo sapien
gaaggaatctgccttcgtcaccatt

SEQ ID NO: 4066531 - DNA, 25 bp, Homo sapien
tatcaagtgcgcaattaggctcaca

SEQ ID NO: 4066532 - DNA, 25 bp, Homo sapien
tgacatcattatcaagtgcgcaatt

SEQ ID NO: 4066533 - DNA, 25 bp, Homo sapien
cacccagtgggacatagtagactcc

SEQ ID NO: 4066534 - DNA, 25 bp, Homo sapien
gcagaactgaacaatagagccggat

SEQ ID NO: 4066535 - DNA, 25 bp, Homo sapien
tcaggtgcccacttaattcaatcgg

SEQ ID NO: 4066536 - DNA, 25 bp, Homo sapien
atagagccggattaagcaagcattc

SEQ ID NO: 4066537 - DNA, 25 bp, Homo sapien
ttcaatcggcgaatttgcatttctc

SEQ ID NO: 4066538 - DNA, 25 bp, Homo sapien
aaatgcacctgggtatcctcttgac

SEQ ID NO: 4066539 - DNA, 25 bp, Homo sapien
ggaactccccacgtgtgacatctca

SEQ ID NO: 4066540 - DNA, 25 bp, Homo sapien
taaagcgcagagcagatgaactacc

SEQ ID NO: 4066541 - DNA, 25 bp, Homo sapien
tgcgcttggcgaaggtaaatgcacc

SEQ ID NO: 4066542 - DNA, 25 bp, Homo sapien
tcagcgaaggccgtgtggcttcgca

SEQ ID NO: 4066543 - DNA, 25 bp, Homo sapien
cgattaatgctgtttagagttgcca

SEQ ID NO: 4066544 - DNA, 25 bp, Homo sapien
gagttgccagttctcttacgcactc

SEQ ID NO: 4066545 - DNA, 25 bp, Homo sapien
tcagcatgtagcaagtagttgtgag

SEQ ID NO: 4066546 - DNA, 25 bp, Homo sapien
tatcatgattgtacacagatgagca

SEQ ID NO: 4066547 - DNA, 25 bp, Homo sapien
cagtcaggttcggactggtgcagca

SEQ ID NO: 4066548 - DNA, 25 bp, Homo sapien
catagtctggaagggtggagcgtct

SEQ ID NO: 4066549 - DNA, 25 bp, Homo sapien
ggtggagcgtctgccttctatcatg

SEQ ID NO: 4066550 - DNA, 25 bp, Homo sapien
gatggtctaaactgtaaacatgcag

SEQ ID NO: 4066551 - DNA, 25 bp, Homo sapien
catgcatgcacagagacctgatgtg

SEQ ID NO: 4066552 - DNA, 25 bp, Homo sapien
aaggatgcaattcacagagatggtc

SEQ ID NO: 4066553 - DNA, 25 bp, Homo sapien
gagtggaagctaagtaggagctgaa

SEQ ID NO: 4066554 - DNA, 25 bp, Homo sapien
cactggtgaaagctctaggacataa

SEQ ID NO: 4066555 - DNA, 25 bp, Homo sapien
cataaaacttgggagccgatggcct

SEQ ID NO: 4066556 - DNA, 25 bp, Homo sapien
gttggtttttggcacccatccctga

SEQ ID NO: 4066557 - DNA, 25 bp, Homo sapien
caaggttagtgtgtggttaagcacc

SEQ ID NO: 4066558 - DNA, 25 bp, Homo sapien
ttttgttacttgcaaggcaggcatc

SEQ ID NO: 4066559 - DNA, 25 bp, Homo sapien
gtttggtgacacaactcttccttga

SEQ ID NO: 4066560 - DNA, 25 bp, Homo sapien
tctcatggctcgggaaggagaaagt

SEQ ID NO: 4066561 - DNA, 25 bp, Homo sapien
aggttgacaaattcccctgagtttg

SEQ ID NO: 4066562 - DNA, 25 bp, Homo sapien
gctggagttgagaggagagtccctt

SEQ ID NO: 4066563 - DNA, 25 bp, Homo sapien
tgaatgccacgcaacatttctctct

SEQ ID NO: 4066564 - DNA, 25 bp, Homo sapien
ccttgaatgccacgcaacatttctc

SEQ ID NO: 4066565 - DNA, 25 bp, Homo sapien
tcccttgaatgccacgcaacatttc

SEQ ID NO: 4066566 - DNA, 25 bp, Homo sapien
caaggtttggcttaactgcaaaggg

SEQ ID NO: 4066567 - DNA, 25 bp, Homo sapien
agtgaaaccgtagcaaaacctcaag

SEQ ID NO: 4066568 - DNA, 25 bp, Homo sapien
caaaggggtggttgatatcagattc

SEQ ID NO: 4066569 - DNA, 25 bp, Homo sapien
cagaaccagaagaccactcgtgaga

SEQ ID NO: 4066570 - DNA, 25 bp, Homo sapien
ggagtgtggtttatgtcaaaatcaa

SEQ ID NO: 4066571 - DNA, 25 bp, Homo sapien
gagtgtggtttatgtcaaaatcaat

SEQ ID NO: 4066572 - DNA, 25 bp, Homo sapien
agtgtggtttatgtcaaaatcaatc

SEQ ID NO: 4066573 - DNA, 25 bp, Homo sapien
tggcactcctaccaaagacacagca

SEQ ID NO: 4066574 - DNA, 25 bp, Homo sapien
ggcactcctaccaaagacacagcag

SEQ ID NO: 4066575 - DNA, 25 bp, Homo sapien
ctggcactcctaccaaagacacagc

SEQ ID NO: 4066576 - DNA, 25 bp, Homo sapien
gtggagctccggagttcccatctga

SEQ ID NO: 4066577 - DNA, 25 bp, Homo sapien
taactccttggcaacttttatgtat

SEQ ID NO: 4066578 - DNA, 25 bp, Homo sapien
cccatctgaggtcttgtctaactcc

SEQ ID NO: 4066579 - DNA, 25 bp, Homo sapien
tgtataggagactcttttgccagat

SEQ ID NO: 4066580 - DNA, 25 bp, Homo sapien
gggctgttttggttaaccactcgca

SEQ ID NO: 4066581 - DNA, 25 bp, Homo sapien
ggcagaaccagaccatcgtgaactt

SEQ ID NO: 4066582 - DNA, 25 bp, Homo sapien
cagttttaagtctccacaggcagaa

SEQ ID NO: 4066583 - DNA, 25 bp, Homo sapien
cgatcggagcccacccttgtagttt

SEQ ID NO: 4066584 - DNA, 25 bp, Homo sapien
ccagcttgaagaaagatgtgcatat

SEQ ID NO: 4066585 - DNA, 25 bp, Homo sapien
cagctctcaggcactcttggtgttc

SEQ ID NO: 4066586 - DNA, 25 bp, Homo sapien
cttggtgttcagaaggccagcttga

SEQ ID NO: 4066587 - DNA, 25 bp, Homo sapien
tgttcagaaggccagcttgaagaaa

SEQ ID NO: 4066588 - DNA, 25 bp, Homo sapien
tgtgctagagctgtacaaagagaag

SEQ ID NO: 4066589 - DNA, 25 bp, Homo sapien
ctagagctgtacaaagagaagtaga

SEQ ID NO: 4066590 - DNA, 25 bp, Homo sapien
gactgtgctagagctgtacaaagag

SEQ ID NO: 4066591 - DNA, 25 bp, Homo sapien
actgactgtgctagagctgtacaaa

SEQ ID NO: 4066592 - DNA, 25 bp, Homo sapien
ccctagatcgttgcatttgtggtcc

SEQ ID NO: 4066593 - DNA, 25 bp, Homo sapien
acaccctagatcgttgcatttgtgg

SEQ ID NO: 4066594 - DNA, 25 bp, Homo sapien
ctagatcgttgcatttgtggtcctg

SEQ ID NO: 4066595 - DNA, 25 bp, Homo sapien
ggcaacaccctagatcgttgcattt

SEQ ID NO: 4066596 - DNA, 25 bp, Homo sapien
tgatctgattcatctggcgaaaccc

SEQ ID NO: 4066597 - DNA, 25 bp, Homo sapien
tgcagttcagggaaaaggccagcag

SEQ ID NO: 4066598 - DNA, 25 bp, Homo sapien
gaaatggttctctgagtttcagctg

SEQ ID NO: 4066599 - DNA, 25 bp, Homo sapien
tgtgtaattggtctttagcctgatc

SEQ ID NO: 4066600 - DNA, 25 bp, Homo sapien
ccatttcatagacaagtctacatca

SEQ ID NO: 4066601 - DNA, 25 bp, Homo sapien
cagccatttcatagacaagtctaca

SEQ ID NO: 4066602 - DNA, 25 bp, Homo sapien
agatgctgagctgttggttacgtaa

SEQ ID NO: 4066603 - DNA, 25 bp, Homo sapien
tggttacgtaactgtggtacagcca

SEQ ID NO: 4066604 - DNA, 25 bp, Homo sapien
gcttctgaattcttcgggcacacag

SEQ ID NO: 4066605 - DNA, 25 bp, Homo sapien
atcagcccaaaccagatcagcgtcg

SEQ ID NO: 4066606 - DNA, 25 bp, Homo sapien
gggatttgccaatcgcctggtcagc

SEQ ID NO: 4066607 - DNA, 25 bp, Homo sapien
cagatcagcgtcgtgggcgattttt

SEQ ID NO: 4066608 - DNA, 25 bp, Homo sapien
caggctgtgctttgatggctctgca

SEQ ID NO: 4066609 - DNA, 25 bp, Homo sapien
agcaaacgggcccaaatcttacagg

SEQ ID NO: 4066610 - DNA, 25 bp, Homo sapien
caagacctctgaataccccgttagt

SEQ ID NO: 4066611 - DNA, 25 bp, Homo sapien
gcctcacccgtgtctcttaacaaat

SEQ ID NO: 4066612 - DNA, 25 bp, Homo sapien
tgtattaacaagatgtccactggca

SEQ ID NO: 4066613 - DNA, 25 bp, Homo sapien
attaacaagatgtccactggcaaga

SEQ ID NO: 4066614 - DNA, 25 bp, Homo sapien
tattaacaagatgtccactggcaag

SEQ ID NO: 4066615 - DNA, 25 bp, Homo sapien
atgtattaacaagatgtccactggc

SEQ ID NO: 4066616 - DNA, 25 bp, Homo sapien
cagctggactccgtgtttgaaaggt

SEQ ID NO: 4066617 - DNA, 25 bp, Homo sapien
tattgactgcagtgttgccgaagca

SEQ ID NO: 4066618 - DNA, 25 bp, Homo sapien
tctggcaaaggcaaatattcaccta

SEQ ID NO: 4066619 - DNA, 25 bp, Homo sapien
tattcacctaagtggttaagtctct

SEQ ID NO: 4066620 - DNA, 25 bp, Homo sapien
aaaggtgtccaaacctcgacagaca

SEQ ID NO: 4066621 - DNA, 25 bp, Homo sapien
ttgcaatccccacttgaccaaaggt

SEQ ID NO: 4066622 - DNA, 25 bp, Homo sapien
cctcgacagacagcggccagagaag

SEQ ID NO: 4066623 - DNA, 25 bp, Homo sapien
gaccaaaggtgtccaaacctcgaca

SEQ ID NO: 4066624 - DNA, 25 bp, Homo sapien
tgtagccccagagcctctcgatgag

SEQ ID NO: 4066625 - DNA, 25 bp, Homo sapien
tctttgggtgggtcctgtagcccca

SEQ ID NO: 4066626 - DNA, 25 bp, Homo sapien
tttgggtgggtcctgtagccccaga

SEQ ID NO: 4066627 - DNA, 25 bp, Homo sapien
cctgtagccccagagcctctcgatg

SEQ ID NO: 4066628 - DNA, 25 bp, Homo sapien
ccagcaccccgagtggtgacagtga

SEQ ID NO: 4066629 - DNA, 25 bp, Homo sapien
cagcaccccgagtggtgacagtgac

SEQ ID NO: 4066630 - DNA, 25 bp, Homo sapien
accagcaccccgagtggtgacagtg

SEQ ID NO: 4066631 - DNA, 25 bp, Homo sapien
taatcaagattgagggattctggga

SEQ ID NO: 4066632 - DNA, 25 bp, Homo sapien
tgaatctggggacactttttggtcc

SEQ ID NO: 4066633 - DNA, 25 bp, Homo sapien
tactgacttaatcaagattgaggga

SEQ ID NO: 4066634 - DNA, 25 bp, Homo sapien
gacttaatcaagattgagggattct

SEQ ID NO: 4066635 - DNA, 25 bp, Homo sapien
ttttctccccgacatgcccctgcca

SEQ ID NO: 4066636 - DNA, 25 bp, Homo sapien
caaatactcttctaaaccaacatcc

SEQ ID NO: 4066637 - DNA, 25 bp, Homo sapien
gagcaagacaccagcttttcactga

SEQ ID NO: 4066638 - DNA, 25 bp, Homo sapien
aactgttgccaggaatatccatcca

SEQ ID NO: 4066639 - DNA, 25 bp, Homo sapien
aacatccccggcaaacgggagcaag

SEQ ID NO: 4066640 - DNA, 25 bp, Homo sapien
ttacaagaaaaacacttcacaggat

SEQ ID NO: 4066641 - DNA, 25 bp, Homo sapien
cgtgtagaagtttcaagttacaaga

SEQ ID NO: 4066642 - DNA, 25 bp, Homo sapien
tcacaggatccaaatccttaaagtc

SEQ ID NO: 4066643 - DNA, 25 bp, Homo sapien
ctgcgtgtagaagtttcaagttaca

SEQ ID NO: 4066644 - DNA, 25 bp, Homo sapien
ggatgggtacatagacactcgtcta

SEQ ID NO: 4066645 - DNA, 25 bp, Homo sapien
taaggtccgatgtcggtttgccatg

SEQ ID NO: 4066646 - DNA, 25 bp, Homo sapien
tacttgaacttccagggactcggga

SEQ ID NO: 4066647 - DNA, 25 bp, Homo sapien
acttgggcattggtttctgttcggc

SEQ ID NO: 4066648 - DNA, 25 bp, Homo sapien
agcaactgagggctgttgtactgag

SEQ ID NO: 4066649 - DNA, 25 bp, Homo sapien
ttgtactgaggcttgcaatggccac

SEQ ID NO: 4066650 - DNA, 25 bp, Homo sapien
gcaactgagggctgttgtactgagg

SEQ ID NO: 4066651 - DNA, 25 bp, Homo sapien
aattgcctgactctgtcctcggtgg

SEQ ID NO: 4066652 - DNA, 25 bp, Homo sapien
tctgaggcagcaatgggacccttgc

SEQ ID NO: 4066653 - DNA, 25 bp, Homo sapien
gatgggccttctccgccttcaaaag

SEQ ID NO: 4066654 - DNA, 25 bp, Homo sapien
gaagcaacagagtacccactagtga

SEQ ID NO: 4066655 - DNA, 25 bp, Homo sapien
ctgtcacgttaggactgagttcatt

SEQ ID NO: 4066656 - DNA, 25 bp, Homo sapien
acgttaggactgagttcattcttgt

SEQ ID NO: 4066657 - DNA, 25 bp, Homo sapien
gtcacgttaggactgagttcattct

SEQ ID NO: 4066658 - DNA, 25 bp, Homo sapien
cacgttaggactgagttcattcttg

SEQ ID NO: 4066659 - DNA, 25 bp, Homo sapien
ggaatgttatggatctctgtagcag

SEQ ID NO: 4066660 - DNA, 25 bp, Homo sapien
tagcaggcacatgcaacgtccagtg

SEQ ID NO: 4066661 - DNA, 25 bp, Homo sapien
cctcgatagaccttatagaaatcac

SEQ ID NO: 4066662 - DNA, 25 bp, Homo sapien
catctgccagctaattccggtttca

SEQ ID NO: 4066663 - DNA, 25 bp, Homo sapien
tgtgccagggatgcacctttttaac

SEQ ID NO: 4066664 - DNA, 25 bp, Homo sapien
gccagggatgcacctttttaaccca

SEQ ID NO: 4066665 - DNA, 25 bp, Homo sapien
gtgccagggatgcacctttttaacc

SEQ ID NO: 4066666 - DNA, 25 bp, Homo sapien
tgccagggatgcacctttttaaccc

SEQ ID NO: 4066667 - DNA, 25 bp, Homo sapien
cgtacgtcagtttcacacctctgtt

SEQ ID NO: 4066668 - DNA, 25 bp, Homo sapien
tcaagctgacgtttatacttctgag

SEQ ID NO: 4066669 - DNA, 25 bp, Homo sapien
agtcttcttgtcactcaaacagttt

SEQ ID NO: 4066670 - DNA, 25 bp, Homo sapien
taaacataagctttcaaggtgagtt

SEQ ID NO: 4066671 - DNA, 25 bp, Homo sapien
gaaatagagatggttggacctctga

SEQ ID NO: 4066672 - DNA, 25 bp, Homo sapien
tgaaatagagatggttggacctctg

SEQ ID NO: 4066673 - DNA, 25 bp, Homo sapien
ttgaaatagagatggttggacctct

SEQ ID NO: 4066674 - DNA, 25 bp, Homo sapien
tgtccattaggttgactctccagtg

SEQ ID NO: 4066675 - DNA, 25 bp, Homo sapien
gcttcttggtgttgtgataagcccg

SEQ ID NO: 4066676 - DNA, 25 bp, Homo sapien
ttggggtgaaaacacatgacagttt

SEQ ID NO: 4066677 - DNA, 25 bp, Homo sapien
ggctttgtagaaggtcgagttctcc

SEQ ID NO: 4066678 - DNA, 25 bp, Homo sapien
agggactctcagatgccgatgacca

SEQ ID NO: 4066679 - DNA, 25 bp, Homo sapien
tctcagatgccgatgaccagtaaga

SEQ ID NO: 4066680 - DNA, 25 bp, Homo sapien
ggactctcagatgccgatgaccagt

SEQ ID NO: 4066681 - DNA, 25 bp, Homo sapien
gatgccgatgaccagtaagaccaca

SEQ ID NO: 4066682 - DNA, 25 bp, Homo sapien
tcctgtagagtaaaagatatcgatt

SEQ ID NO: 4066683 - DNA, 25 bp, Homo sapien
tgaggagcgggattcgctgacccat

SEQ ID NO: 4066684 - DNA, 25 bp, Homo sapien
gattttgtttctgtcggcactgcct

SEQ ID NO: 4066685 - DNA, 25 bp, Homo sapien
acccatgctggcagaacgggtgatg

SEQ ID NO: 4066686 - DNA, 25 bp, Homo sapien
gccttttgtcgttatgtctagaccc

SEQ ID NO: 4066687 - DNA, 25 bp, Homo sapien
cgggaatgccttttgtcgttatgtc

SEQ ID NO: 4066688 - DNA, 25 bp, Homo sapien
caagtcatttggtttacatcgggaa

SEQ ID NO: 4066689 - DNA, 25 bp, Homo sapien
tttacatcgggaatgccttttgtcg

SEQ ID NO: 4066690 - DNA, 25 bp, Homo sapien
ggctcagggtagctgatgagtcccc

SEQ ID NO: 4066691 - DNA, 25 bp, Homo sapien
ccgtgtccccttgcaggacaaatct

SEQ ID NO: 4066692 - DNA, 25 bp, Homo sapien
ccttgcaggacaaatcttttcatat

SEQ ID NO: 4066693 - DNA, 25 bp, Homo sapien
cagagattgtctctccccgtgtccc

SEQ ID NO: 4066694 - DNA, 25 bp, Homo sapien
tggaggggtgatctgactcccaacc

SEQ ID NO: 4066695 - DNA, 25 bp, Homo sapien
cctccccaggtgaaagcaccgggat

SEQ ID NO: 4066696 - DNA, 25 bp, Homo sapien
tcttcatttggaggggtgatctgac

SEQ ID NO: 4066697 - DNA, 25 bp, Homo sapien
cccaggtgaaagcaccgggattcat

SEQ ID NO: 4066698 - DNA, 25 bp, Homo sapien
gatgccactggtgttcctctagtag

SEQ ID NO: 4066699 - DNA, 25 bp, Homo sapien
tcctctagtaggcaacattgatggt

SEQ ID NO: 4066700 - DNA, 25 bp, Homo sapien
aacatagaaagtcatggaaggcctc

SEQ ID NO: 4066701 - DNA, 25 bp, Homo sapien
gggcttcttctggattccgtaggta

SEQ ID NO: 4066702 - DNA, 25 bp, Homo sapien
ccctgaagacacagggatacccttg

SEQ ID NO: 4066703 - DNA, 25 bp, Homo sapien
agccctgaagacacagggataccct

SEQ ID NO: 4066704 - DNA, 25 bp, Homo sapien
cacagggatacccttggggcggaga

SEQ ID NO: 4066705 - DNA, 25 bp, Homo sapien
acacagggatacccttggggcggag

SEQ ID NO: 4066706 - DNA, 25 bp, Homo sapien
caagttggggtattgccgaagtcca

SEQ ID NO: 4066707 - DNA, 25 bp, Homo sapien
ttcagacaagttggggtattgccga

SEQ ID NO: 4066708 - DNA, 25 bp, Homo sapien
agtcttcagacaagttggggtattg

SEQ ID NO: 4066709 - DNA, 25 bp, Homo sapien
gacaagttggggtattgccgaagtc

SEQ ID NO: 4066710 - DNA, 25 bp, Homo sapien
aaatgattcccggtagaatgtccta

SEQ ID NO: 4066711 - DNA, 25 bp, Homo sapien
gattttataatgagcgccaaccagc

SEQ ID NO: 4066712 - DNA, 25 bp, Homo sapien
tcctgcagggcattgcaatctttag

SEQ ID NO: 4066713 - DNA, 25 bp, Homo sapien
tctctggaaaagttgctatcatgtc

SEQ ID NO: 4066714 - DNA, 25 bp, Homo sapien
ttcgatatacgcataagcttgggtt

SEQ ID NO: 4066715 - DNA, 25 bp, Homo sapien
tcctgcatttcgatatacgcataag

SEQ ID NO: 4066716 - DNA, 25 bp, Homo sapien
gcatttcgatatacgcataagcttg

SEQ ID NO: 4066717 - DNA, 25 bp, Homo sapien
ggcttcctgcatttcgatatacgca

SEQ ID NO: 4066718 - DNA, 25 bp, Homo sapien
ggcagtttgccatgagtcagacagg

SEQ ID NO: 4066719 - DNA, 25 bp, Homo sapien
tcagatgcagttggcagtttgccat

SEQ ID NO: 4066720 - DNA, 25 bp, Homo sapien
gacaggtcatcctgactctcaggaa

SEQ ID NO: 4066721 - DNA, 25 bp, Homo sapien
tcaggaacacggagctcctgcagaa

SEQ ID NO: 4066722 - DNA, 25 bp, Homo sapien
taccaatggcaaagacaaactgtga

SEQ ID NO: 4066723 - DNA, 25 bp, Homo sapien
tctgggaaagaacctgtggagcctc

SEQ ID NO: 4066724 - DNA, 25 bp, Homo sapien
caaagatccatgatttcagagcagg

SEQ ID NO: 4066725 - DNA, 25 bp, Homo sapien
tatcttggtacctgtagtcccgagc

SEQ ID NO: 4066726 - DNA, 25 bp, Homo sapien
gacgtggcaactgacacatgctgga

SEQ ID NO: 4066727 - DNA, 25 bp, Homo sapien
aaattgaaatggcttcacactcagt

SEQ ID NO: 4066728 - DNA, 25 bp, Homo sapien
cgttgtggccgactgaaaagcgact

SEQ ID NO: 4066729 - DNA, 25 bp, Homo sapien
tatcagccgcgagtgccgttgtggc

SEQ ID NO: 4066730 - DNA, 25 bp, Homo sapien
tgctcgcttcgtttcggaggaaatt

SEQ ID NO: 4066731 - DNA, 25 bp, Homo sapien
cattgctcgcttcgtttcggaggaa

SEQ ID NO: 4066732 - DNA, 25 bp, Homo sapien
gcctggcctcattgctcgcttcgtt

SEQ ID NO: 4066733 - DNA, 25 bp, Homo sapien
tctacaccatttattcctcgcctgg

SEQ ID NO: 4066734 - DNA, 25 bp, Homo sapien
gactcaggcaccattagcatctggg

SEQ ID NO: 4066735 - DNA, 25 bp, Homo sapien
gcatctggggctgtacacgtctttg

SEQ ID NO: 4066736 - DNA, 25 bp, Homo sapien
gcacactgtagggtatccaggattc

SEQ ID NO: 4066737 - DNA, 25 bp, Homo sapien
tgttctttctggtggttcgttttca

SEQ ID NO: 4066738 - DNA, 25 bp, Homo sapien
tatacttagagcttcgagacctgcc

SEQ ID NO: 4066739 - DNA, 25 bp, Homo sapien
agaaaacacgctttggtgtcgtgct

SEQ ID NO: 4066740 - DNA, 25 bp, Homo sapien
gagacctgccactcagatgactcca

SEQ ID NO: 4066741 - DNA, 25 bp, Homo sapien
tgtgactgcatctttataactctcc

SEQ ID NO: 4066742 - DNA, 25 bp, Homo sapien
aatttccacgccttgtatgtttctg

SEQ ID NO: 4066743 - DNA, 25 bp, Homo sapien
ccaatttccacgccttgtatgtttc

SEQ ID NO: 4066744 - DNA, 25 bp, Homo sapien
caccaatttccacgccttgtatgtt

SEQ ID NO: 4066745 - DNA, 25 bp, Homo sapien
accaccaatttccacgccttgtatg

SEQ ID NO: 4066746 - DNA, 25 bp, Homo sapien
gccctgtagtgccagcctgtacctg

SEQ ID NO: 4066747 - DNA, 25 bp, Homo sapien
gtgaagtctcccaccccgtggtgat

SEQ ID NO: 4066748 - DNA, 25 bp, Homo sapien
cctctcctgagggtcaatatggcat

SEQ ID NO: 4066749 - DNA, 25 bp, Homo sapien
ccgtggtgattcatatctgaccctg

SEQ ID NO: 4066750 - DNA, 25 bp, Homo sapien
gcctgtgctaagacatcatagattt

SEQ ID NO: 4066751 - DNA, 25 bp, Homo sapien
tttgtcaaacacctgccgatgagcg

SEQ ID NO: 4066752 - DNA, 25 bp, Homo sapien
tcacggcttgggttgtcaggatgca

SEQ ID NO: 4066753 - DNA, 25 bp, Homo sapien
tcatgtcaaagacaggcgcgtctgt

SEQ ID NO: 4066754 - DNA, 25 bp, Homo sapien
cagttaaatgtttatctagcaattc

SEQ ID NO: 4066755 - DNA, 25 bp, Homo sapien
tgagccatctgttgctaggcaggat

SEQ ID NO: 4066756 - DNA, 25 bp, Homo sapien
ccatctgttgctaggcaggatctgc

SEQ ID NO: 4066757 - DNA, 25 bp, Homo sapien
tcttctgagccatctgttgctaggc

SEQ ID NO: 4066758 - DNA, 25 bp, Homo sapien
tcttagcacaaagtcctgatgttta

SEQ ID NO: 4066759 - DNA, 25 bp, Homo sapien
tttccaagttctcctcgaaatccac

SEQ ID NO: 4066760 - DNA, 25 bp, Homo sapien
ggttgggtcctccaagtctcttagc

SEQ ID NO: 4066761 - DNA, 25 bp, Homo sapien
gtttaaatcctgcaagcgaattgcc

SEQ ID NO: 4066762 - DNA, 25 bp, Homo sapien
acaacggtggggttcagtgtttgct

SEQ ID NO: 4066763 - DNA, 25 bp, Homo sapien
tttcctggggctgctcggttctctc

SEQ ID NO: 4066764 - DNA, 25 bp, Homo sapien
gctgctcggttctctcaccttgcat

SEQ ID NO: 4066765 - DNA, 25 bp, Homo sapien
ctacagacaacggtggggttcagtg

SEQ ID NO: 4066766 - DNA, 25 bp, Homo sapien
tgccccggtggttgctgccagatga

SEQ ID NO: 4066767 - DNA, 25 bp, Homo sapien
gcaactggcttgttgtgagactgcc

SEQ ID NO: 4066768 - DNA, 25 bp, Homo sapien
aggacctcctttgcacgaagagcaa

SEQ ID NO: 4066769 - DNA, 25 bp, Homo sapien
gcagagagttccaattgcaactggc

SEQ ID NO: 4066770 - DNA, 25 bp, Homo sapien
agcattcttcaagggctccagagag

SEQ ID NO: 4066771 - DNA, 25 bp, Homo sapien
gctggctcggttttctaaagaccta

SEQ ID NO: 4066772 - DNA, 25 bp, Homo sapien
gatttgtacacgatgcctgagctgg

SEQ ID NO: 4066773 - DNA, 25 bp, Homo sapien
taactttgcagcattcttcaagggc

SEQ ID NO: 4066774 - DNA, 25 bp, Homo sapien
aaaacatcttcaaacgcaaacgctg

SEQ ID NO: 4066775 - DNA, 25 bp, Homo sapien
ccttcctctcattgaagagtgaatg

SEQ ID NO: 4066776 - DNA, 25 bp, Homo sapien
gatacctgaggtaatagcctccttc

SEQ ID NO: 4066777 - DNA, 25 bp, Homo sapien
cattaaaaagtttatgcgctgcttg

SEQ ID NO: 4066778 - DNA, 25 bp, Homo sapien
ggccagcgtcttggaacctgagaaa

SEQ ID NO: 4066779 - DNA, 25 bp, Homo sapien
attacccatcgaccactgtgaagag

SEQ ID NO: 4066780 - DNA, 25 bp, Homo sapien
taacaaacgagttcaagtacatgcc

SEQ ID NO: 4066781 - DNA, 25 bp, Homo sapien
taaaatgctcactaacaccgaggca

SEQ ID NO: 4066782 - DNA, 25 bp, Homo sapien
cagcttgtttgtggttcgtcctgaa

SEQ ID NO: 4066783 - DNA, 25 bp, Homo sapien
taaaagacgtaattttgcaggcaga

SEQ ID NO: 4066784 - DNA, 25 bp, Homo sapien
cagccagctacttggttttctaaaa

SEQ ID NO: 4066785 - DNA, 25 bp, Homo sapien
catacgtgtaaatgaactgtcaacc

SEQ ID NO: 4066786 - DNA, 25 bp, Homo sapien
gagctcattaattctgcctggcaat

SEQ ID NO: 4066787 - DNA, 25 bp, Homo sapien
tagatggcgaatacagatgcataca

SEQ ID NO: 4066788 - DNA, 25 bp, Homo sapien
catttatacgcagtacacgagctag

SEQ ID NO: 4066789 - DNA, 25 bp, Homo sapien
gaagatattctttgcgctgttagaa

SEQ ID NO: 4066790 - DNA, 25 bp, Homo sapien
aaaatgtttcaaataaacacacact

SEQ ID NO: 4066791 - DNA, 25 bp, Homo sapien
ctataaccataacagaggttaaaga

SEQ ID NO: 4066792 - DNA, 25 bp, Homo sapien
tgtaaaatgtttcaaataaacacac

SEQ ID NO: 4066793 - DNA, 25 bp, Homo sapien
agaagtagagtaaaaatgtaaaatg

SEQ ID NO: 4066794 - DNA, 25 bp, Homo sapien
tttgagcaatgtaggtatcccaggc

SEQ ID NO: 4066795 - DNA, 25 bp, Homo sapien
tctcaggtccggtcagttctagaac

SEQ ID NO: 4066796 - DNA, 25 bp, Homo sapien
gaatgcccagggaattcttccatgg

SEQ ID NO: 4066797 - DNA, 25 bp, Homo sapien
tcttagttctaatgagacagcctct

SEQ ID NO: 4066798 - DNA, 25 bp, Homo sapien
gatcctttggaacatcgatggcaag

SEQ ID NO: 4066799 - DNA, 25 bp, Homo sapien
tacaactcgtcccatttaaggctag

SEQ ID NO: 4066800 - DNA, 25 bp, Homo sapien
gatggctgcaccgtaaacaggaaag

SEQ ID NO: 4066801 - DNA, 25 bp, Homo sapien
cagcaaagcatgtctagggtctcac

SEQ ID NO: 4066802 - DNA, 25 bp, Homo sapien
catgggatgcagaagagccagataa

SEQ ID NO: 4066803 - DNA, 25 bp, Homo sapien
gacttgagccacacaaatcaatggg

SEQ ID NO: 4066804 - DNA, 25 bp, Homo sapien
aattcaggaccagtggaacttgtcc

SEQ ID NO: 4066805 - DNA, 25 bp, Homo sapien
ctagatatcctgacactgaagaagc

SEQ ID NO: 4066806 - DNA, 25 bp, Homo sapien
tgctttgtggctgtccgtgggccaa

SEQ ID NO: 4066807 - DNA, 25 bp, Homo sapien
tcacgcgattagcatgccagcatat

SEQ ID NO: 4066808 - DNA, 25 bp, Homo sapien
tgccaggaaaacacgattcttgttt

SEQ ID NO: 4066809 - DNA, 25 bp, Homo sapien
gcttctaataaagcgcttctcgtag

SEQ ID NO: 4066810 - DNA, 25 bp, Homo sapien
gcaaaagcagccgtcagaactccac

SEQ ID NO: 4066811 - DNA, 25 bp, Homo sapien
ttgcaaaagcagccgtcagaactcc

SEQ ID NO: 4066812 - DNA, 25 bp, Homo sapien
aaaagcagccgtcagaactccactc

SEQ ID NO: 4066813 - DNA, 25 bp, Homo sapien
aaagcagccgtcagaactccactct

SEQ ID NO: 4066814 - DNA, 25 bp, Homo sapien
gatgttcaccaagagcttgtcctgt

SEQ ID NO: 4066815 - DNA, 25 bp, Homo sapien
cctgttactttggaattgtgacaat

SEQ ID NO: 4066816 - DNA, 25 bp, Homo sapien
cctgattttatctgatgttcaccaa

SEQ ID NO: 4066817 - DNA, 25 bp, Homo sapien
tgtgacaatgtctcatctgatgctg

SEQ ID NO: 4066818 - DNA, 25 bp, Homo sapien
agctgcctttccgttgtccgtggaa

SEQ ID NO: 4066819 - DNA, 25 bp, Homo sapien
ttcactgcacatttcgagggaccgc

SEQ ID NO: 4066820 - DNA, 25 bp, Homo sapien
gaggctcctccggaaagcaggcatt

SEQ ID NO: 4066821 - DNA, 25 bp, Homo sapien
aaagagctttccctgttagctagag

SEQ ID NO: 4066822 - DNA, 25 bp, Homo sapien
gggataagtgaagcgcggcgtggag

SEQ ID NO: 4066823 - DNA, 25 bp, Homo sapien
aacagcccgaagatgggctgtgagc

SEQ ID NO: 4066824 - DNA, 25 bp, Homo sapien
tcagaacattatgaacagcccgaag

SEQ ID NO: 4066825 - DNA, 25 bp, Homo sapien
gaggccgttcggtaactccatccat

SEQ ID NO: 4066826 - DNA, 25 bp, Homo sapien
cggggctggctcctcgttgagctat

SEQ ID NO: 4066827 - DNA, 25 bp, Homo sapien
aagccagcaggtgcttgagccacgg

SEQ ID NO: 4066828 - DNA, 25 bp, Homo sapien
ctgggcaagccagcaggtgcttgag

SEQ ID NO: 4066829 - DNA, 25 bp, Homo sapien
gtgcttgagccacggggctggctcc

SEQ ID NO: 4066830 - DNA, 25 bp, Homo sapien
tcgcgttgctggacgcacccttctt

SEQ ID NO: 4066831 - DNA, 25 bp, Homo sapien
ttgctggacgcacccttctttacac

SEQ ID NO: 4066832 - DNA, 25 bp, Homo sapien
tgggataggagcagacccagaagca

SEQ ID NO: 4066833 - DNA, 25 bp, Homo sapien
gggcttgacctgccctcgcgttgct

SEQ ID NO: 4066834 - DNA, 25 bp, Homo sapien
tcctattccacagtcatatcctgtg

SEQ ID NO: 4066835 - DNA, 25 bp, Homo sapien
agcccacgggaatctcagccagagg

SEQ ID NO: 4066836 - DNA, 25 bp, Homo sapien
gaggctgaaaccctgacactcccat

SEQ ID NO: 4066837 - DNA, 25 bp, Homo sapien
actcccatagtccatgctagctgaa

SEQ ID NO: 4066838 - DNA, 25 bp, Homo sapien
gctcctgtacgtcctccaagagcca

SEQ ID NO: 4066839 - DNA, 25 bp, Homo sapien
tcctgtacgtcctccaagagccaca

SEQ ID NO: 4066840 - DNA, 25 bp, Homo sapien
gggagctcctgtacgtcctccaaga

SEQ ID NO: 4066841 - DNA, 25 bp, Homo sapien
gagctcctgtacgtcctccaagagc

SEQ ID NO: 4066842 - DNA, 25 bp, Homo sapien
tagtgctgttgttgccagactgttt

SEQ ID NO: 4066843 - DNA, 25 bp, Homo sapien
ttagtgctgttgttgccagactgtt

SEQ ID NO: 4066844 - DNA, 25 bp, Homo sapien
ttttcactgtcacatctgaagccta

SEQ ID NO: 4066845 - DNA, 25 bp, Homo sapien
cactgtcacatctgaagcctaaagt

SEQ ID NO: 4066846 - DNA, 25 bp, Homo sapien
catcttgttgtcctcaccgtgctgg

SEQ ID NO: 4066847 - DNA, 25 bp, Homo sapien
tccagggagacgcagtctcatcctg

SEQ ID NO: 4066848 - DNA, 25 bp, Homo sapien
cttgacctggacttgtttgctctga

SEQ ID NO: 4066849 - DNA, 25 bp, Homo sapien
tctgatctcatggtggggtaaccac

SEQ ID NO: 4066850 - DNA, 25 bp, Homo sapien
gtagtttgcagctctggccaaggat

SEQ ID NO: 4066851 - DNA, 25 bp, Homo sapien
gtttgcagctctggccaaggatttg

SEQ ID NO: 4066852 - DNA, 25 bp, Homo sapien
gccactcccactgttgtagtttgca

SEQ ID NO: 4066853 - DNA, 25 bp, Homo sapien
ctagatcaggttctcatagccactc

SEQ ID NO: 4066854 - DNA, 25 bp, Homo sapien
tttcctgggccgtgggacagtccac

SEQ ID NO: 4066855 - DNA, 25 bp, Homo sapien
taggctcctagtttgtgcgcagtga

SEQ ID NO: 4066856 - DNA, 25 bp, Homo sapien
catttgcatgggtgccctaggctcc

SEQ ID NO: 4066857 - DNA, 25 bp, Homo sapien
ccacgctgaaactggtaaagtcccg

SEQ ID NO: 4066858 - DNA, 25 bp, Homo sapien
tccacagatggccagattaaccatc

SEQ ID NO: 4066859 - DNA, 25 bp, Homo sapien
cacagatggccagattaaccatcac

SEQ ID NO: 4066860 - DNA, 25 bp, Homo sapien
gggttggatggataaaagtgaattc

SEQ ID NO: 4066861 - DNA, 25 bp, Homo sapien
gatggccagattaaccatcacctcc

SEQ ID NO: 4066862 - DNA, 25 bp, Homo sapien
cagccctgacgcaaggatgcttaga

SEQ ID NO: 4066863 - DNA, 25 bp, Homo sapien
gatgcttagaacttggatcctgggc

SEQ ID NO: 4066864 - DNA, 25 bp, Homo sapien
tcctggaaaccagtgtactgccctt

SEQ ID NO: 4066865 - DNA, 25 bp, Homo sapien
tgacctttgcaaggcacagccctga

SEQ ID NO: 4066866 - DNA, 25 bp, Homo sapien
tgtaatggagctagcctgcagtggc

SEQ ID NO: 4066867 - DNA, 25 bp, Homo sapien
tgtgggcactcaagccatttatccc

SEQ ID NO: 4066868 - DNA, 25 bp, Homo sapien
tctctaagcggacatgggctgacaa

SEQ ID NO: 4066869 - DNA, 25 bp, Homo sapien
gatgggcatttgtgggcactcaagc

SEQ ID NO: 4066870 - DNA, 25 bp, Homo sapien
gctgcaggcgagaagcagtggggtg

SEQ ID NO: 4066871 - DNA, 25 bp, Homo sapien
gcccagaaggtgtcgtggctcccat

SEQ ID NO: 4066872 - DNA, 25 bp, Homo sapien
cctggggtgtaggtcagggtacagg

SEQ ID NO: 4066873 - DNA, 25 bp, Homo sapien
tggctggaccgggagcaggtgagga

SEQ ID NO: 4066874 - DNA, 25 bp, Homo sapien
tcagacttcctttcatgcaaatcgc

SEQ ID NO: 4066875 - DNA, 25 bp, Homo sapien
ctggttttggctcatcttccttctc

SEQ ID NO: 4066876 - DNA, 25 bp, Homo sapien
ggctgtccctgcctctcagacttcc

SEQ ID NO: 4066877 - DNA, 25 bp, Homo sapien
ctgtggcctgtgacttcaaggtcgg

SEQ ID NO: 4066878 - DNA, 25 bp, Homo sapien
tgagcggtgctctctgtgtttgaag

SEQ ID NO: 4066879 - DNA, 25 bp, Homo sapien
ctctgaacgcgctcagagacagagg

SEQ ID NO: 4066880 - DNA, 25 bp, Homo sapien
gatgtggcgtctctggttcctctga

SEQ ID NO: 4066881 - DNA, 25 bp, Homo sapien
tgaaaacgttcagcttgatgtggcg

SEQ ID NO: 4066882 - DNA, 25 bp, Homo sapien
caattcggtaacgagaggagcaccc

SEQ ID NO: 4066883 - DNA, 25 bp, Homo sapien
aattggcttttgcttgattgacccc

SEQ ID NO: 4066884 - DNA, 25 bp, Homo sapien
tgtttgccaactcctaacaattggc

SEQ ID NO: 4066885 - DNA, 25 bp, Homo sapien
tccacgttgacctgattcctttggt

SEQ ID NO: 4066886 - DNA, 25 bp, Homo sapien
ttgtcatccaagaaaggagggttgt

SEQ ID NO: 4066887 - DNA, 25 bp, Homo sapien
gacacgtctccattacacaagctgg

SEQ ID NO: 4066888 - DNA, 25 bp, Homo sapien
tttacccagcgttctgtggccacca

SEQ ID NO: 4066889 - DNA, 25 bp, Homo sapien
tgaaaggagttaatgtttacccagc

SEQ ID NO: 4066890 - DNA, 25 bp, Homo sapien
ctatttcatgctcatttaaattctt

SEQ ID NO: 4066891 - DNA, 25 bp, Homo sapien
catttaaattctttaagagttcctg

SEQ ID NO: 4066892 - DNA, 25 bp, Homo sapien
atgctcatttaaattctttaagagt

SEQ ID NO: 4066893 - DNA, 25 bp, Homo sapien
aattctttaagagttcctgacccat

SEQ ID NO: 4066894 - DNA, 25 bp, Homo sapien
gtccattctgggcactgtttagcca

SEQ ID NO: 4066895 - DNA, 25 bp, Homo sapien
gccttggacctagaattagggcttc

SEQ ID NO: 4066896 - DNA, 25 bp, Homo sapien
ggacgagaatgcctaagctgtacag

SEQ ID NO: 4066897 - DNA, 25 bp, Homo sapien
gctcctttaggattagggacgagaa

SEQ ID NO: 4066898 - DNA, 25 bp, Homo sapien
ctggaaaatagggacagcagttttt

SEQ ID NO: 4066899 - DNA, 25 bp, Homo sapien
tggaaaatagggacagcagtttttc

SEQ ID NO: 4066900 - DNA, 25 bp, Homo sapien
cgtgaccagcgcacactgaggtctg

SEQ ID NO: 4066901 - DNA, 25 bp, Homo sapien
aggtgacttccccaacgtgaccagc

SEQ ID NO: 4066902 - DNA, 25 bp, Homo sapien
aacgtgaccagcgcacactgaggtc

SEQ ID NO: 4066903 - DNA, 25 bp, Homo sapien
gcaggaaggcgggaggtgacttccc

SEQ ID NO: 4066904 - DNA, 25 bp, Homo sapien
gtgtgcctctgcacaaacaccctcg

SEQ ID NO: 4066905 - DNA, 25 bp, Homo sapien
tctgcacaaacaccctcgtagagac

SEQ ID NO: 4066906 - DNA, 25 bp, Homo sapien
ctcgtagagacacaactgcacaaat

SEQ ID NO: 4066907 - DNA, 25 bp, Homo sapien
aaacaccctcgtagagacacaactg

SEQ ID NO: 4066908 - DNA, 25 bp, Homo sapien
gcaaagccagttctacaaacattct

SEQ ID NO: 4066909 - DNA, 25 bp, Homo sapien
gggcaaagccagttctacaaacatt

SEQ ID NO: 4066910 - DNA, 25 bp, Homo sapien
atgggcaaagccagttctacaaaca

SEQ ID NO: 4066911 - DNA, 25 bp, Homo sapien
tgggcaaagccagttctacaaacat

SEQ ID NO: 4066912 - DNA, 25 bp, Homo sapien
taagctagacctgccttaagacagc

SEQ ID NO: 4066913 - DNA, 25 bp, Homo sapien
ctcctgcggtctgtaagctagacct

SEQ ID NO: 4066914 - DNA, 25 bp, Homo sapien
tgcggtctgtaagctagacctgcct

SEQ ID NO: 4066915 - DNA, 25 bp, Homo sapien
ctgccttaagacagccatgggtggg

SEQ ID NO: 4066916 - DNA, 25 bp, Homo sapien
gagttgaggctctaatctggccctg

SEQ ID NO: 4066917 - DNA, 25 bp, Homo sapien
gcaaagtcagtgttccatctaagcc

SEQ ID NO: 4066918 - DNA, 25 bp, Homo sapien
gggtgctcttcaataagccatgata

SEQ ID NO: 4066919 - DNA, 25 bp, Homo sapien
caaaaggctatagcagtgcaaagtc

SEQ ID NO: 4066920 - DNA, 25 bp, Homo sapien
gcatgaaggacggagtgaacgcatc

SEQ ID NO: 4066921 - DNA, 25 bp, Homo sapien
aaagtggtcggcacttctgtgggca

SEQ ID NO: 4066922 - DNA, 25 bp, Homo sapien
catgaaggacggagtgaacgcatcc

SEQ ID NO: 4066923 - DNA, 25 bp, Homo sapien
gcaacaccctgaaagtggtcggcac

SEQ ID NO: 4066924 - DNA, 25 bp, Homo sapien
tggatttcccatctcagcgggtgat

SEQ ID NO: 4066925 - DNA, 25 bp, Homo sapien
taaggataggcgctgcagtcctcat

SEQ ID NO: 4066926 - DNA, 25 bp, Homo sapien
tgtctctttggctcgctggaccaga

SEQ ID NO: 4066927 - DNA, 25 bp, Homo sapien
ctaggtggatgagtcaggaatagcc

SEQ ID NO: 4066928 - DNA, 25 bp, Homo sapien
gagccttgaagctcagtaatgctcc

SEQ ID NO: 4066929 - DNA, 25 bp, Homo sapien
cctccagtgcaaggcggagtaaata

SEQ ID NO: 4066930 - DNA, 25 bp, Homo sapien
gaagctcagtaatgctcctccagtg

SEQ ID NO: 4066931 - DNA, 25 bp, Homo sapien
atgctcctccagtgcaaggcggagt

SEQ ID NO: 4066932 - DNA, 25 bp, Homo sapien
cagggatagatagtggacaggataa

SEQ ID NO: 4066933 - DNA, 25 bp, Homo sapien
tgggacacgtaatgttataaaaagc

SEQ ID NO: 4066934 - DNA, 25 bp, Homo sapien
tctatctcgcaatattgattggcac

SEQ ID NO: 4066935 - DNA, 25 bp, Homo sapien
tataaaaagctaagatgtaacatct

SEQ ID NO: 4066936 - DNA, 25 bp, Homo sapien
tggaaagtgactacattctctgtgg

SEQ ID NO: 4066937 - DNA, 25 bp, Homo sapien
gaggactgcaaagctaaacagtggg

SEQ ID NO: 4066938 - DNA, 25 bp, Homo sapien
tcttggcttgtttatccgaggactg

SEQ ID NO: 4066939 - DNA, 25 bp, Homo sapien
gaaatgctgcttcacgattgagtcc

SEQ ID NO: 4066940 - DNA, 25 bp, Homo sapien
ggggcttcagcaaccagaaagccca

SEQ ID NO: 4066941 - DNA, 25 bp, Homo sapien
ttaagcagtatccaaggccactagt

SEQ ID NO: 4066942 - DNA, 25 bp, Homo sapien
aggccactagtttctggggcttcag

SEQ ID NO: 4066943 - DNA, 25 bp, Homo sapien
agcagtatccaaggccactagtttc

SEQ ID NO: 4066944 - DNA, 25 bp, Homo sapien
tgtttctgtcaatgcaagactcctt

SEQ ID NO: 4066945 - DNA, 25 bp, Homo sapien
ccttagaaataatcacgtattccac

SEQ ID NO: 4066946 - DNA, 25 bp, Homo sapien
gggcacttgggtctccatgttggtc

SEQ ID NO: 4066947 - DNA, 25 bp, Homo sapien
tattccacgtcttctataattatag

SEQ ID NO: 4066948 - DNA, 25 bp, Homo sapien
cacttgatggcatgaagtgtgctac

SEQ ID NO: 4066949 - DNA, 25 bp, Homo sapien
aacgggcactgagagtcgccggtag

SEQ ID NO: 4066950 - DNA, 25 bp, Homo sapien
acataatatgatctccgtatcaggg

SEQ ID NO: 4066951 - DNA, 25 bp, Homo sapien
tagggaggagcgtcatctgcatagc

SEQ ID NO: 4066952 - DNA, 25 bp, Homo sapien
tgaatggccaacttgtgtccagcac

SEQ ID NO: 4066953 - DNA, 25 bp, Homo sapien
caagtacagaacaaccagcattgct

SEQ ID NO: 4066954 - DNA, 25 bp, Homo sapien
ggctaacctgatccgggctgggact

SEQ ID NO: 4066955 - DNA, 25 bp, Homo sapien
ccgtgtgaaggtacttgaatggcca

SEQ ID NO: 4066956 - DNA, 25 bp, Homo sapien
ttccaaggtacatcagtatgacctc

SEQ ID NO: 4066957 - DNA, 25 bp, Homo sapien
ccaccaacagctaaactgtttgctt

SEQ ID NO: 4066958 - DNA, 25 bp, Homo sapien
agagttcctcgaccccagcaggcta

SEQ ID NO: 4066959 - DNA, 25 bp, Homo sapien
tactggcgatgtaatgagagctaag

SEQ ID NO: 4066960 - DNA, 25 bp, Homo sapien
cttctttggtttgaaagactgcagt

SEQ ID NO: 4066961 - DNA, 25 bp, Homo sapien
ctttggtttgaaagactgcagttac

SEQ ID NO: 4066962 - DNA, 25 bp, Homo sapien
tttggtttgaaagactgcagttacc

SEQ ID NO: 4066963 - DNA, 25 bp, Homo sapien
tggtttgaaagactgcagttaccat

SEQ ID NO: 4066964 - DNA, 25 bp, Homo sapien
atccaactggtcaatgagctctgta

SEQ ID NO: 4066965 - DNA, 25 bp, Homo sapien
catccaactggtcaatgagctctgt

SEQ ID NO: 4066966 - DNA, 25 bp, Homo sapien
ccaactggtcaatgagctctgtaga

SEQ ID NO: 4066967 - DNA, 25 bp, Homo sapien
tccaactggtcaatgagctctgtag

SEQ ID NO: 4066968 - DNA, 25 bp, Homo sapien
tataggatcacgctctaaagggctg

SEQ ID NO: 4066969 - DNA, 25 bp, Homo sapien
ccgtaacagaccagatagacaagat

SEQ ID NO: 4066970 - DNA, 25 bp, Homo sapien
tcttactctcagtttataacatggg

SEQ ID NO: 4066971 - DNA, 25 bp, Homo sapien
ttcagaaaacacagtccgtaacaga

SEQ ID NO: 4066972 - DNA, 25 bp, Homo sapien
aatccatcctcaggatcccaacatc

SEQ ID NO: 4066973 - DNA, 25 bp, Homo sapien
ccatcctcaggatcccaacatccac

SEQ ID NO: 4066974 - DNA, 25 bp, Homo sapien
tagctagatggaaatccatcctcag

SEQ ID NO: 4066975 - DNA, 25 bp, Homo sapien
agctagatggaaatccatcctcagg

SEQ ID NO: 4066976 - DNA, 25 bp, Homo sapien
ccaactaagtaatcctaaagccaga

SEQ ID NO: 4066977 - DNA, 25 bp, Homo sapien
tccaagggccgtgattgagactggt

SEQ ID NO: 4066978 - DNA, 25 bp, Homo sapien
ctcctgtccatttcacgggtgggaa

SEQ ID NO: 4066979 - DNA, 25 bp, Homo sapien
gaactcagctagcttgacttgcagt

SEQ ID NO: 4066980 - DNA, 25 bp, Homo sapien
atggctctggcttccgtcacactgc

SEQ ID NO: 4066981 - DNA, 25 bp, Homo sapien
tatttcgggacagaagtgcattgtc

SEQ ID NO: 4066982 - DNA, 25 bp, Homo sapien
tcagccctcaagtgctagatttatt

SEQ ID NO: 4066983 - DNA, 25 bp, Homo sapien
tgcattgtctcgatgatggctctgg

SEQ ID NO: 4066984 - DNA, 25 bp, Homo sapien
tttgagccattagccaaaacaatgc

SEQ ID NO: 4066985 - DNA, 25 bp, Homo sapien
ccacaccgccatgctgagtaggtag

SEQ ID NO: 4066986 - DNA, 25 bp, Homo sapien
ggttttacaaatgaacgaggattca

SEQ ID NO: 4066987 - DNA, 25 bp, Homo sapien
gagtaggtagcccagtaggaccaaa

SEQ ID NO: 4066988 - DNA, 25 bp, Homo sapien
caaggattattccagaaaggtggtc

SEQ ID NO: 4066989 - DNA, 25 bp, Homo sapien
tctgaacttggacattaaagggctg

SEQ ID NO: 4066990 - DNA, 25 bp, Homo sapien
gaggcaaccttgtgacctgggacat

SEQ ID NO: 4066991 - DNA, 25 bp, Homo sapien
cctgggacatcgatgcttggctagc

SEQ ID NO: 4066992 - DNA, 25 bp, Homo sapien
ggccttggccatcatgtttgtgaaa

SEQ ID NO: 4066993 - DNA, 25 bp, Homo sapien
cagcagtcgactttcaaccttttgt

SEQ ID NO: 4066994 - DNA, 25 bp, Homo sapien
tcctggcgcccaagttttggccttg

SEQ ID NO: 4066995 - DNA, 25 bp, Homo sapien
cctgtccaaagtctgagcagctgat

SEQ ID NO: 4066996 - DNA, 25 bp, Homo sapien
ggcatgtcgttcaatgcaccagact

SEQ ID NO: 4066997 - DNA, 25 bp, Homo sapien
cgattttctgtagctaaaagaagcc

SEQ ID NO: 4066998 - DNA, 25 bp, Homo sapien
cccgctaaaatgtatgcccatcaaa

SEQ ID NO: 4066999 - DNA, 25 bp, Homo sapien
agtgtatccatgtttcccgctaaaa

SEQ ID NO: 4067000 - DNA, 25 bp, Homo sapien
ccgatttgtaggagcccttaacatg

SEQ ID NO: 4067001 - DNA, 25 bp, Homo sapien
gatgtccgatttgtaggagccctta

SEQ ID NO: 4067002 - DNA, 25 bp, Homo sapien
gaagatgtccgatttgtaggagccc

SEQ ID NO: 4067003 - DNA, 25 bp, Homo sapien
cagtgaagatgtccgatttgtagga

SEQ ID NO: 4067004 - DNA, 25 bp, Homo sapien
gacactgaatttaggctggcttccg

SEQ ID NO: 4067005 - DNA, 25 bp, Homo sapien
caagacagagtggtctggcacgtcc

SEQ ID NO: 4067006 - DNA, 25 bp, Homo sapien
tctgttcatgggtgtagcaggccag

SEQ ID NO: 4067007 - DNA, 25 bp, Homo sapien
ggcacgtccccaaggagcataggat

SEQ ID NO: 4067008 - DNA, 25 bp, Homo sapien
ttccagcatgtgctaatatgcgagg

SEQ ID NO: 4067009 - DNA, 25 bp, Homo sapien
tgcacagtcctgaacattaaccatc

SEQ ID NO: 4067010 - DNA, 25 bp, Homo sapien
agggtgtcgtctggcagtgctatcc

SEQ ID NO: 4067011 - DNA, 25 bp, Homo sapien
gctaatatgcgaggttggcaccagg

SEQ ID NO: 4067012 - DNA, 25 bp, Homo sapien
ggcagaagatgagagccctgcaggg

SEQ ID NO: 4067013 - DNA, 25 bp, Homo sapien
gacaatgaacattggggaaagccct

SEQ ID NO: 4067014 - DNA, 25 bp, Homo sapien
tcatctaagtctggtgacttttgcc

SEQ ID NO: 4067015 - DNA, 25 bp, Homo sapien
cctgcaggggtctgtttgggcttct

SEQ ID NO: 4067016 - DNA, 25 bp, Homo sapien
cctttgccagcttggtggttgaggg

SEQ ID NO: 4067017 - DNA, 25 bp, Homo sapien
ttaggtcactgcctagtctagtact

SEQ ID NO: 4067018 - DNA, 25 bp, Homo sapien
ggttgagggtgtatacctcatacat

SEQ ID NO: 4067019 - DNA, 25 bp, Homo sapien
tgcctagtctagtactgcctttgcc

SEQ ID NO: 4067020 - DNA, 25 bp, Homo sapien
ggcttcctgcacaggatcatgggaa

SEQ ID NO: 4067021 - DNA, 25 bp, Homo sapien
cttcctgcacaggatcatgggaaag

SEQ ID NO: 4067022 - DNA, 25 bp, Homo sapien
gggctggcggactggtggtcctcaa

SEQ ID NO: 4067023 - DNA, 25 bp, Homo sapien
tgggcttcctgcacaggatcatggg

SEQ ID NO: 4067024 - DNA, 25 bp, Homo sapien
tttccacgataacgcatccgtattt

SEQ ID NO: 4067025 - DNA, 25 bp, Homo sapien
cccgactggcctatgtgtgagtgtt

SEQ ID NO: 4067026 - DNA, 25 bp, Homo sapien
tattttcgcctggaaatgggaattc

SEQ ID NO: 4067027 - DNA, 25 bp, Homo sapien
tcctgcgcgggtctggccttgtgca

SEQ ID NO: 4067028 - DNA, 25 bp, Homo sapien
ttcattgccagcctgaagccggatg

SEQ ID NO: 4067029 - DNA, 25 bp, Homo sapien
cgcggctgggcttgagagaccatct

SEQ ID NO: 4067030 - DNA, 25 bp, Homo sapien
cattgtgtctcgagaacacaggctc

SEQ ID NO: 4067031 - DNA, 25 bp, Homo sapien
gaccatcttctcgtgtctcctttaa

SEQ ID NO: 4067032 - DNA, 25 bp, Homo sapien
tgactcagcacaaatggacagagat

SEQ ID NO: 4067033 - DNA, 25 bp, Homo sapien
gtttgactcagcacaaatggacaga

SEQ ID NO: 4067034 - DNA, 25 bp, Homo sapien
gattgagaaaacaggacacaagagg

SEQ ID NO: 4067035 - DNA, 25 bp, Homo sapien
gaaatcagtgattctgtcctcagtc

SEQ ID NO: 4067036 - DNA, 25 bp, Homo sapien
gcagctaaagatgtaggggggttcc

SEQ ID NO: 4067037 - DNA, 25 bp, Homo sapien
ccctccaatcttgtagatggcattg

SEQ ID NO: 4067038 - DNA, 25 bp, Homo sapien
cctccacctgcagctaaagatgtag

SEQ ID NO: 4067039 - DNA, 25 bp, Homo sapien
agtctcccctccaatcttgtagatg

SEQ ID NO: 4067040 - DNA, 25 bp, Homo sapien
cattgctgttgaagaaaaaacatac

SEQ ID NO: 4067041 - DNA, 25 bp, Homo sapien
tcattgctgttgaagaaaaaacata

SEQ ID NO: 4067042 - DNA, 25 bp, Homo sapien
ggtattttccatgcaacaggtgtca

SEQ ID NO: 4067043 - DNA, 25 bp, Homo sapien
aggttgaaagggactgttctctcca

SEQ ID NO: 4067044 - DNA, 25 bp, Homo sapien
tcctcgtttcatgggagatgtaaaa

SEQ ID NO: 4067045 - DNA, 25 bp, Homo sapien
caggtgtcacttgcaattttcacca

SEQ ID NO: 4067046 - DNA, 25 bp, Homo sapien
aatatgctgacaatagtggagctat

SEQ ID NO: 4067047 - DNA, 25 bp, Homo sapien
tgctgacaatagtggagctatgaaa

SEQ ID NO: 4067048 - DNA, 25 bp, Homo sapien
tgacaatagtggagctatgaaaacc

SEQ ID NO: 4067049 - DNA, 25 bp, Homo sapien
tagtggagctatgaaaaccaatata

SEQ ID NO: 4067050 - DNA, 25 bp, Homo sapien
aatgaggacgcccatccgccctttc

SEQ ID NO: 4067051 - DNA, 25 bp, Homo sapien
aggaagtgggaacttccttgaaatg

SEQ ID NO: 4067052 - DNA, 25 bp, Homo sapien
cctgctcggatccttgccaatgagg

SEQ ID NO: 4067053 - DNA, 25 bp, Homo sapien
catgagcggcggagataggaactct

SEQ ID NO: 4067054 - DNA, 25 bp, Homo sapien
gtactatccccgtgtgtcattccag

SEQ ID NO: 4067055 - DNA, 25 bp, Homo sapien
tataccatcctacgatacctgtgca

SEQ ID NO: 4067056 - DNA, 25 bp, Homo sapien
tataggatcttgtaccatcccagag

SEQ ID NO: 4067057 - DNA, 25 bp, Homo sapien
gggttcattctagtgcaccagtgca

SEQ ID NO: 4067058 - DNA, 25 bp, Homo sapien
tttgcaccacaccagcatacctata

SEQ ID NO: 4067059 - DNA, 25 bp, Homo sapien
tgcaccacaccagcatacctatata

SEQ ID NO: 4067060 - DNA, 25 bp, Homo sapien
cctttgcaccacaccagcataccta

SEQ ID NO: 4067061 - DNA, 25 bp, Homo sapien
cacctttgcaccacaccagcatacc

SEQ ID NO: 4067062 - DNA, 25 bp, Homo sapien
aagtgtggagagcaaagctttggca

SEQ ID NO: 4067063 - DNA, 25 bp, Homo sapien
tccaggagaaggcttaccaccgcct

SEQ ID NO: 4067064 - DNA, 25 bp, Homo sapien
gggagaccacagtcatatgacagtt

SEQ ID NO: 4067065 - DNA, 25 bp, Homo sapien
ttcagttttgagcagaacctatcct

SEQ ID NO: 4067066 - DNA, 25 bp, Homo sapien
actgagggagccacgactggtctct

SEQ ID NO: 4067067 - DNA, 25 bp, Homo sapien
ctgggcctgacggtaaaccagggct

SEQ ID NO: 4067068 - DNA, 25 bp, Homo sapien
caagacaaataaggtgaggcgactg

SEQ ID NO: 4067069 - DNA, 25 bp, Homo sapien
ctgttaagtgttgcccaggtggcca

SEQ ID NO: 4067070 - DNA, 25 bp, Homo sapien
ggcctatttggtgatggccgcagtc

SEQ ID NO: 4067071 - DNA, 25 bp, Homo sapien
tagacttgggtttcatgaaaatctc

SEQ ID NO: 4067072 - DNA, 25 bp, Homo sapien
agacttgggtttcatgaaaatctca

SEQ ID NO: 4067073 - DNA, 25 bp, Homo sapien
ggaaagggcctatttggtgatggcc

SEQ ID NO: 4067074 - DNA, 25 bp, Homo sapien
ctgcagtgtgagaggatggtggatc

SEQ ID NO: 4067075 - DNA, 25 bp, Homo sapien
agagcagagcaggagacatggacgt

SEQ ID NO: 4067076 - DNA, 25 bp, Homo sapien
cagagcaggagacatggacgtgagg

SEQ ID NO: 4067077 - DNA, 25 bp, Homo sapien
tgtgagaggatggtggatcagagca

SEQ ID NO: 4067078 - DNA, 25 bp, Homo sapien
gcatggcattgcctctccctcaatt

SEQ ID NO: 4067079 - DNA, 25 bp, Homo sapien
tcttaggctctgatgagcctcttct

SEQ ID NO: 4067080 - DNA, 25 bp, Homo sapien
ttaggcctggttttgatatcactcc

SEQ ID NO: 4067081 - DNA, 25 bp, Homo sapien
cttggcctgagcgtgtaattcattc

SEQ ID NO: 4067082 - DNA, 25 bp, Homo sapien
tgttttctaactggtcctggaggtg

SEQ ID NO: 4067083 - DNA, 25 bp, Homo sapien
gaatcctctgattgtaaagctgtct

SEQ ID NO: 4067084 - DNA, 25 bp, Homo sapien
aggtgtggtatctccccgcagtctg

SEQ ID NO: 4067085 - DNA, 25 bp, Homo sapien
ttcgagatgttctgggatggagaca

SEQ ID NO: 4067086 - DNA, 25 bp, Homo sapien
gtgtctcctgcagatgatgtatgaa

SEQ ID NO: 4067087 - DNA, 25 bp, Homo sapien
tgtgtctcctgcagatgatgtatga

SEQ ID NO: 4067088 - DNA, 25 bp, Homo sapien
tgcagatgatgtatgaattgcctta

SEQ ID NO: 4067089 - DNA, 25 bp, Homo sapien
tctcctgcagatgatgtatgaattg

SEQ ID NO: 4067090 - DNA, 25 bp, Homo sapien
agaaacctccttctgcccggcagtt

SEQ ID NO: 4067091 - DNA, 25 bp, Homo sapien
tccttctgcccggcagttggggagc

SEQ ID NO: 4067092 - DNA, 25 bp, Homo sapien
gaaacctccttctgcccggcagttg

SEQ ID NO: 4067093 - DNA, 25 bp, Homo sapien
aagaaacctccttctgcccggcagt

SEQ ID NO: 4067094 - DNA, 25 bp, Homo sapien
cactatctggtgtttcccagactgt

SEQ ID NO: 4067095 - DNA, 25 bp, Homo sapien
ccactatctggtgtttcccagactg

SEQ ID NO: 4067096 - DNA, 25 bp, Homo sapien
gactgtgtaccctggagctctagag

SEQ ID NO: 4067097 - DNA, 25 bp, Homo sapien
caagtatcctgcctgtggttttcac

SEQ ID NO: 4067098 - DNA, 25 bp, Homo sapien
cctgtgttcacagcgcaggtagcca

SEQ ID NO: 4067099 - DNA, 25 bp, Homo sapien
gacactgctctcgtatacccaagta

SEQ ID NO: 4067100 - DNA, 25 bp, Homo sapien
ggtaaccatccactggcccttggag

SEQ ID NO: 4067101 - DNA, 25 bp, Homo sapien
tggaccctgttgactgctcgcccat

SEQ ID NO: 4067102 - DNA, 25 bp, Homo sapien
tgctcgcccatcctgccttggccct

SEQ ID NO: 4067103 - DNA, 25 bp, Homo sapien
ctggaccctgttgactgctcgccca

SEQ ID NO: 4067104 - DNA, 25 bp, Homo sapien
ggaccctgttgactgctcgcccatc

SEQ ID NO: 4067105 - DNA, 25 bp, Homo sapien
acaagaccctccttcttctacatag

SEQ ID NO: 4067106 - DNA, 25 bp, Homo sapien
tcctgtggtggacttcggaattcta

SEQ ID NO: 4067107 - DNA, 25 bp, Homo sapien
taatcctcaggacgcatttcgtaca

SEQ ID NO: 4067108 - DNA, 25 bp, Homo sapien
catttcgtacaggatctctgggttc

SEQ ID NO: 4067109 - DNA, 25 bp, Homo sapien
tcgggtcagtttcaacgggagagca

SEQ ID NO: 4067110 - DNA, 25 bp, Homo sapien
gataaaccctctgatccctgttcgg

SEQ ID NO: 4067111 - DNA, 25 bp, Homo sapien
gcaggaggcctggaaagagatctaa

SEQ ID NO: 4067112 - DNA, 25 bp, Homo sapien
catcagcatccctggttgcttttcc

SEQ ID NO: 4067113 - DNA, 25 bp, Homo sapien
tggcaaaacccctgccacttgggta

SEQ ID NO: 4067114 - DNA, 25 bp, Homo sapien
cacattcatgaagaaaaaggccgag

SEQ ID NO: 4067115 - DNA, 25 bp, Homo sapien
gagcagaatcatccaagccaagaaa

SEQ ID NO: 4067116 - DNA, 25 bp, Homo sapien
ggatgcatctagcttctgtgaacca

SEQ ID NO: 4067117 - DNA, 25 bp, Homo sapien
tctttactgaaatccagattcagca

SEQ ID NO: 4067118 - DNA, 25 bp, Homo sapien
ctctctttactgaaatccagattca

SEQ ID NO: 4067119 - DNA, 25 bp, Homo sapien
ggctctctctttactgaaatccaga

SEQ ID NO: 4067120 - DNA, 25 bp, Homo sapien
gctctctctttactgaaatccagat

SEQ ID NO: 4067121 - DNA, 25 bp, Homo sapien
gctttgagatagcacagagtcacac

SEQ ID NO: 4067122 - DNA, 25 bp, Homo sapien
gataaagtgggtcatttggtgaatc

SEQ ID NO: 4067123 - DNA, 25 bp, Homo sapien
ctgttccaacctcgaagtttcctgg

SEQ ID NO: 4067124 - DNA, 25 bp, Homo sapien
agtcacactcgaacatcctgttcca

SEQ ID NO: 4067125 - DNA, 25 bp, Homo sapien
gccaaaaggatccccaagaggtcac

SEQ ID NO: 4067126 - DNA, 25 bp, Homo sapien
gagctgtccctgctaaggggaagaa

SEQ ID NO: 4067127 - DNA, 25 bp, Homo sapien
gaattgagactgcagtggtagagtc

SEQ ID NO: 4067128 - DNA, 25 bp, Homo sapien
aaggatccccaagaggtcaccacag

SEQ ID NO: 4067129 - DNA, 25 bp, Homo sapien
cagctcagacgaagccagctggagg

SEQ ID NO: 4067130 - DNA, 25 bp, Homo sapien
ggaggactgggtccatcacaggggc

SEQ ID NO: 4067131 - DNA, 25 bp, Homo sapien
aggactgggtccatcacaggggctt

SEQ ID NO: 4067132 - DNA, 25 bp, Homo sapien
ccccaccctgctcatggtcaacaat

SEQ ID NO: 4067133 - DNA, 25 bp, Homo sapien
ctgtgggaagccagaccactttgct

SEQ ID NO: 4067134 - DNA, 25 bp, Homo sapien
ccagaccactttgctgggtgtctgc

SEQ ID NO: 4067135 - DNA, 25 bp, Homo sapien
gtgggaagccagaccactttgctgg

SEQ ID NO: 4067136 - DNA, 25 bp, Homo sapien
gaagccagaccactttgctgggtgt

SEQ ID NO: 4067137 - DNA, 25 bp, Homo sapien
caggaacatgagctaatacaagaac

SEQ ID NO: 4067138 - DNA, 25 bp, Homo sapien
tttctgtagcgtaaatgccttcacc

SEQ ID NO: 4067139 - DNA, 25 bp, Homo sapien
cacactaatacaggtcgggtatccc

SEQ ID NO: 4067140 - DNA, 25 bp, Homo sapien
tacagtttgaagtgtcaggaatgca

SEQ ID NO: 4067141 - DNA, 25 bp, Homo sapien
ttcaggcaggatagatctacaggtc

SEQ ID NO: 4067142 - DNA, 25 bp, Homo sapien
caagaactgcatcctgtaggccaaa

SEQ ID NO: 4067143 - DNA, 25 bp, Homo sapien
tctacaggtctacaaggtttccagc

SEQ ID NO: 4067144 - DNA, 25 bp, Homo sapien
gattcacgaaggagctccaactgga

SEQ ID NO: 4067145 - DNA, 25 bp, Homo sapien
aaagcattgatcaaacaggaccagc

SEQ ID NO: 4067146 - DNA, 25 bp, Homo sapien
gaaagcaagaatgcgttttatttgt

SEQ ID NO: 4067147 - DNA, 25 bp, Homo sapien
cttgaaagcaagaatgcgttttatt

SEQ ID NO: 4067148 - DNA, 25 bp, Homo sapien
taactgtcttaatcaataataaatc

SEQ ID NO: 4067149 - DNA, 25 bp, Homo sapien
gctgttgtcatcatagcccatggag

SEQ ID NO: 4067150 - DNA, 25 bp, Homo sapien
tgtccaggagacactcggtgcatgg

SEQ ID NO: 4067151 - DNA, 25 bp, Homo sapien
tctgctccacggaagttgtctctaa

SEQ ID NO: 4067152 - DNA, 25 bp, Homo sapien
agggcttcgggaacatcactgtctt

SEQ ID NO: 4067153 - DNA, 25 bp, Homo sapien
ggtctttcagcgcataacatgcaag

SEQ ID NO: 4067154 - DNA, 25 bp, Homo sapien
tccccacgttctgatcggtctttca

SEQ ID NO: 4067155 - DNA, 25 bp, Homo sapien
caagatagaagacagcctcaaaggg

SEQ ID NO: 4067156 - DNA, 25 bp, Homo sapien
gcaagaacatgttttgaacgccaac

SEQ ID NO: 4067157 - DNA, 25 bp, Homo sapien
ggtaaggaccagtgtgaaccttgcc

SEQ ID NO: 4067158 - DNA, 25 bp, Homo sapien
tctttcccaccagtaaccttatatg

SEQ ID NO: 4067159 - DNA, 25 bp, Homo sapien
ttatatgaaatattaccagggggta

SEQ ID NO: 4067160 - DNA, 25 bp, Homo sapien
gggtaaggaccagtgtgaaccttgc

SEQ ID NO: 4067161 - DNA, 25 bp, Homo sapien
tgccttttacgtgggaagattgccc

SEQ ID NO: 4067162 - DNA, 25 bp, Homo sapien
acagagttgactgatgaagtctgcc

SEQ ID NO: 4067163 - DNA, 25 bp, Homo sapien
tttcagcccaggctctgcgcatgtc

SEQ ID NO: 4067164 - DNA, 25 bp, Homo sapien
tgtctaccaaaggacagagttgact

SEQ ID NO: 4067165 - DNA, 25 bp, Homo sapien
tctgccacttgttggcctgaggaca

SEQ ID NO: 4067166 - DNA, 25 bp, Homo sapien
gaccctctgcatagcgctgtctgtg

SEQ ID NO: 4067167 - DNA, 25 bp, Homo sapien
cggaggtgacttattgggtcccaga

SEQ ID NO: 4067168 - DNA, 25 bp, Homo sapien
cattgcaccaaaagctctggccagc

SEQ ID NO: 4067169 - DNA, 25 bp, Homo sapien
cataaatcgaaaagcaggagtgcgc

SEQ ID NO: 4067170 - DNA, 25 bp, Homo sapien
gagtgcgctttcctaccggtctcta

SEQ ID NO: 4067171 - DNA, 25 bp, Homo sapien
gataaatgcaacaccgtctagggcc

SEQ ID NO: 4067172 - DNA, 25 bp, Homo sapien
gctaattgttgcattccgggaaact

SEQ ID NO: 4067173 - DNA, 25 bp, Homo sapien
agttaactactacatttaatagcct

SEQ ID NO: 4067174 - DNA, 25 bp, Homo sapien
tagttaactactacatttaatagcc

SEQ ID NO: 4067175 - DNA, 25 bp, Homo sapien
ttaactactacatttaatagccttc

SEQ ID NO: 4067176 - DNA, 25 bp, Homo sapien
tccgaacaacagatgtggtcaaaag

SEQ ID NO: 4067177 - DNA, 25 bp, Homo sapien
cttttgaccacatctgttgttcgga

SEQ ID NO: 4067178 - DNA, 25 bp, Homo sapien
aggagactaaacagaagtcaggggt

SEQ ID NO: 4067179 - DNA, 25 bp, Homo sapien
acagaagtcaggggtaggtggttct

SEQ ID NO: 4067180 - DNA, 25 bp, Homo sapien
actaaacagaagtcaggggtaggtg

SEQ ID NO: 4067181 - DNA, 25 bp, Homo sapien
gagactaaacagaagtcaggggtag

SEQ ID NO: 4067182 - DNA, 25 bp, Homo sapien
ttttttaatgtacagctctcacaca

SEQ ID NO: 4067183 - DNA, 25 bp, Homo sapien
ttaatgtacagctctcacacaaatt

SEQ ID NO: 4067184 - DNA, 25 bp, Homo sapien
ttttaatgtacagctctcacacaaa

SEQ ID NO: 4067185 - DNA, 25 bp, Homo sapien
tttttttaatgtacagctctcacac

SEQ ID NO: 4067186 - DNA, 25 bp, Homo sapien
gctccaacttgcgagtgggctcagt

SEQ ID NO: 4067187 - DNA, 25 bp, Homo sapien
cttccaaaatgtggcgtatcccact

SEQ ID NO: 4067188 - DNA, 25 bp, Homo sapien
tggcgtatcccactgatggctccaa

SEQ ID NO: 4067189 - DNA, 25 bp, Homo sapien
tgaacacactggtaagtacacgatg

SEQ ID NO: 4067190 - DNA, 25 bp, Homo sapien
aaaaataggtcagcgcttaggagtc

SEQ ID NO: 4067191 - DNA, 25 bp, Homo sapien
tttagacaaagatcaaacgcagcgt

SEQ ID NO: 4067192 - DNA, 25 bp, Homo sapien
caaaatgtcgaggttacacactgtc

SEQ ID NO: 4067193 - DNA, 25 bp, Homo sapien
ttcaggagcctgtctaaactagcac

SEQ ID NO: 4067194 - DNA, 25 bp, Homo sapien
gaaatcattactagctcatccaggt

SEQ ID NO: 4067195 - DNA, 25 bp, Homo sapien
caactttagtgaaaaggcaagcgct

SEQ ID NO: 4067196 - DNA, 25 bp, Homo sapien
tcaatgcatatgtgcgcaagccacc

SEQ ID NO: 4067197 - DNA, 25 bp, Homo sapien
ccttgctaacaagaaaatctcggtg

SEQ ID NO: 4067198 - DNA, 25 bp, Homo sapien
ctaccaagggcaattatggctcaac

SEQ ID NO: 4067199 - DNA, 25 bp, Homo sapien
accaagggcaattatggctcaactc

SEQ ID NO: 4067200 - DNA, 25 bp, Homo sapien
ccaagggcaattatggctcaactca

SEQ ID NO: 4067201 - DNA, 25 bp, Homo sapien
taccaagggcaattatggctcaact

SEQ ID NO: 4067202 - DNA, 25 bp, Homo sapien
cacgcgtggttagttagtaactcaa

SEQ ID NO: 4067203 - DNA, 25 bp, Homo sapien
tagttagtaactcaagatataaaac

SEQ ID NO: 4067204 - DNA, 25 bp, Homo sapien
gaacaacacgcgtggttagttagta

SEQ ID NO: 4067205 - DNA, 25 bp, Homo sapien
aaaagcacataggaacaacacgcgt

SEQ ID NO: 4067206 - DNA, 25 bp, Homo sapien
gaactcggcacgctgcaagtctata

SEQ ID NO: 4067207 - DNA, 25 bp, Homo sapien
cacttatcagggtggctagctggaa

SEQ ID NO: 4067208 - DNA, 25 bp, Homo sapien
gaagaaggctctacggttgcactgt

SEQ ID NO: 4067209 - DNA, 25 bp, Homo sapien
tcattgaacattgtgcaagtccggg

SEQ ID NO: 4067210 - DNA, 25 bp, Homo sapien
tcgagccgttttctcggaagccgct

SEQ ID NO: 4067211 - DNA, 25 bp, Homo sapien
ttgaggtggtcgacttgctgcagca

SEQ ID NO: 4067212 - DNA, 25 bp, Homo sapien
gcatagccgcggtttttcagggtcc

SEQ ID NO: 4067213 - DNA, 25 bp, Homo sapien
tccgactccaggacgtgtctctgct

SEQ ID NO: 4067214 - DNA, 25 bp, Homo sapien
tcggagaagcggtcgtcgaagtgca

SEQ ID NO: 4067215 - DNA, 25 bp, Homo sapien
gccgcggcgatcacggcggacacca

SEQ ID NO: 4067216 - DNA, 25 bp, Homo sapien
tggtggtggtagtgcgggcccgcgc

SEQ ID NO: 4067217 - DNA, 25 bp, Homo sapien
cggcggcgtggtgcgggtgcagggc

SEQ ID NO: 4067218 - DNA, 25 bp, Homo sapien
gtagccatcgaagccgccctggagc

SEQ ID NO: 4067219 - DNA, 25 bp, Homo sapien
gcgcgtagccatcgaagccgccctg

SEQ ID NO: 4067220 - DNA, 25 bp, Homo sapien
cccgcgcgcgtagccatcgaagccg

SEQ ID NO: 4067221 - DNA, 25 bp, Homo sapien
ctgccgcccaaggaggcgccggcac

SEQ ID NO: 4067222 - DNA, 25 bp, Homo sapien
tgagacggccgcactggctgatgat

SEQ ID NO: 4067223 - DNA, 25 bp, Homo sapien
tagtcttccaggtgcgccttctgct

SEQ ID NO: 4067224 - DNA, 25 bp, Homo sapien
gctgatgatgcggtcggtctccacc

SEQ ID NO: 4067225 - DNA, 25 bp, Homo sapien
gccggtcatccagtagtagtcttcc

SEQ ID NO: 4067226 - DNA, 25 bp, Homo sapien
gtggccagcgggtgagccagcttgc

SEQ ID NO: 4067227 - DNA, 25 bp, Homo sapien
ggccagcgggtgagccagcttgccg

SEQ ID NO: 4067228 - DNA, 25 bp, Homo sapien
ccagcgggtgagccagcttgccggg

SEQ ID NO: 4067229 - DNA, 25 bp, Homo sapien
ggtggccagcgggtgagccagcttg

SEQ ID NO: 4067230 - DNA, 25 bp, Homo sapien
cgcttctagcttgcgcggcggtggc

SEQ ID NO: 4067231 - DNA, 25 bp, Homo sapien
ccctgctcacgccaatgtgctccct

SEQ ID NO: 4067232 - DNA, 25 bp, Homo sapien
ttgctcgctcgcctccttgcgcgcc

SEQ ID NO: 4067233 - DNA, 25 bp, Homo sapien
gtggctggcccgaaacctccgagcg

SEQ ID NO: 4067234 - DNA, 25 bp, Homo sapien
tcaggctcgggaagatcctccgcga

SEQ ID NO: 4067235 - DNA, 25 bp, Homo sapien
aagatcctccgcgagctgcggtggc

SEQ ID NO: 4067236 - DNA, 25 bp, Homo sapien
tcgggaagatcctccgcgagctgcg

SEQ ID NO: 4067237 - DNA, 25 bp, Homo sapien
ggctcgggaagatcctccgcgagct

SEQ ID NO: 4067238 - DNA, 25 bp, Homo sapien
aaaagcaaaatagcgaagtcctggg

SEQ ID NO: 4067239 - DNA, 25 bp, Homo sapien
tctgtgcaaagtgcaaggcagaggt

SEQ ID NO: 4067240 - DNA, 25 bp, Homo sapien
gggagttaacacttcatgcttctcg

SEQ ID NO: 4067241 - DNA, 25 bp, Homo sapien
gcagcccgagctacagctagaagat

SEQ ID NO: 4067242 - DNA, 25 bp, Homo sapien
aactctttgtccgtctctcgggcgc

SEQ ID NO: 4067243 - DNA, 25 bp, Homo sapien
tctttggagcgcgagacaggcctcc

SEQ ID NO: 4067244 - DNA, 25 bp, Homo sapien
caggattgtgaattcgcctcccagc

SEQ ID NO: 4067245 - DNA, 25 bp, Homo sapien
gagctgtcaatcagggcccaatcag

SEQ ID NO: 4067246 - DNA, 25 bp, Homo sapien
gcggggtgattcatagctcctgttc

SEQ ID NO: 4067247 - DNA, 25 bp, Homo sapien
cctggaggcggggtgattcatagct

SEQ ID NO: 4067248 - DNA, 25 bp, Homo sapien
aggcggggtgattcatagctcctgt

SEQ ID NO: 4067249 - DNA, 25 bp, Homo sapien
ggaggcggggtgattcatagctcct

SEQ ID NO: 4067250 - DNA, 25 bp, Homo sapien
gcactgaaaacaccagacatgctcc

SEQ ID NO: 4067251 - DNA, 25 bp, Homo sapien
gtgacatcctcggagcatctcccat

SEQ ID NO: 4067252 - DNA, 25 bp, Homo sapien
tgatgtgtttttctgtgcactgaaa

SEQ ID NO: 4067253 - DNA, 25 bp, Homo sapien
cttagttcttggtggcaacgtgggt

SEQ ID NO: 4067254 - DNA, 25 bp, Homo sapien
taacattgggatgatttggtagtaa

SEQ ID NO: 4067255 - DNA, 25 bp, Homo sapien
tgggatgatttggtagtaatgtaat

SEQ ID NO: 4067256 - DNA, 25 bp, Homo sapien
ctttccaataacattgggatgattt

SEQ ID NO: 4067257 - DNA, 25 bp, Homo sapien
gtaatgtaatagtgatgatgattat

SEQ ID NO: 4067258 - DNA, 25 bp, Homo sapien
cattggtctccctgttgttccatga

SEQ ID NO: 4067259 - DNA, 25 bp, Homo sapien
aaaggtgtatcctgaaccagttggg

SEQ ID NO: 4067260 - DNA, 25 bp, Homo sapien
tgttgttccatgagaaccaactggt

SEQ ID NO: 4067261 - DNA, 25 bp, Homo sapien
gtttgcatggaactgaatactctct

SEQ ID NO: 4067262 - DNA, 25 bp, Homo sapien
aggtgatggacttctttctcatctc

SEQ ID NO: 4067263 - DNA, 25 bp, Homo sapien
gctttgcctctgaagtctatctgat

SEQ ID NO: 4067264 - DNA, 25 bp, Homo sapien
tcaactcatgtctgatccatccaat

SEQ ID NO: 4067265 - DNA, 25 bp, Homo sapien
tcttacccagggaatactgcctctc

SEQ ID NO: 4067266 - DNA, 25 bp, Homo sapien
gttctatgcatagagaagtcaatct

SEQ ID NO: 4067267 - DNA, 25 bp, Homo sapien
agagaagtcaatctcaaggctaaga

SEQ ID NO: 4067268 - DNA, 25 bp, Homo sapien
aatctcaaggctaagatttgccggg

SEQ ID NO: 4067269 - DNA, 25 bp, Homo sapien
ccagttctatgcatagagaagtcaa

SEQ ID NO: 4067270 - DNA, 25 bp, Homo sapien
ggcctacgcatgaccacaagtgagt

SEQ ID NO: 4067271 - DNA, 25 bp, Homo sapien
gagctacacctgacccggaggtttc

SEQ ID NO: 4067272 - DNA, 25 bp, Homo sapien
cggaggtttcaccttcctcacagct

SEQ ID NO: 4067273 - DNA, 25 bp, Homo sapien
gagtcacaagtgaagaatggagaca

SEQ ID NO: 4067274 - DNA, 25 bp, Homo sapien
ttttgggggtcacatagcttcccag

SEQ ID NO: 4067275 - DNA, 25 bp, Homo sapien
tagttttgggggtcacatagcttcc

SEQ ID NO: 4067276 - DNA, 25 bp, Homo sapien
caggccttttagccacgggttagtg

SEQ ID NO: 4067277 - DNA, 25 bp, Homo sapien
taacgcatagcctgtgaatctcgtc

SEQ ID NO: 4067278 - DNA, 25 bp, Homo sapien
aaaggacaggcctggataaggccca

SEQ ID NO: 4067279 - DNA, 25 bp, Homo sapien
tgtgaatctcgtcctaacggctgct

SEQ ID NO: 4067280 - DNA, 25 bp, Homo sapien
gctttgcaagaggattcaggaaagg

SEQ ID NO: 4067281 - DNA, 25 bp, Homo sapien
tgtggtgtgggatgagcgtgcgtct

SEQ ID NO: 4067282 - DNA, 25 bp, Homo sapien
tgatgctgcttggtagactgtggtg

SEQ ID NO: 4067283 - DNA, 25 bp, Homo sapien
ctgcttggtagactgtggtgtggga

SEQ ID NO: 4067284 - DNA, 25 bp, Homo sapien
tgggatgagcgtgcgtctgctctca

SEQ ID NO: 4067285 - DNA, 25 bp, Homo sapien
gaggtggactagttagatatttaat

SEQ ID NO: 4067286 - DNA, 25 bp, Homo sapien
aacaggatagcagcacactcgatac

SEQ ID NO: 4067287 - DNA, 25 bp, Homo sapien
gcagcacactcgatacctgaatgag

SEQ ID NO: 4067288 - DNA, 25 bp, Homo sapien
ccatgaactccctccgaacaggata

SEQ ID NO: 4067289 - DNA, 25 bp, Homo sapien
tgaatgagtttactatcagtgccgt

SEQ ID NO: 4067290 - DNA, 25 bp, Homo sapien
tgtagcacgtcagtgttttgttcct

SEQ ID NO: 4067291 - DNA, 25 bp, Homo sapien
ccgtatgggacctttcgtgcctggc

SEQ ID NO: 4067292 - DNA, 25 bp, Homo sapien
tgctcatagttgatgatcatttggg

SEQ ID NO: 4067293 - DNA, 25 bp, Homo sapien
tcatcttcacgttgtagcacgtcag

SEQ ID NO: 4067294 - DNA, 25 bp, Homo sapien
gtctccacttcgagaataggactga

SEQ ID NO: 4067295 - DNA, 25 bp, Homo sapien
gacaagcatgtggagtctctgtctc

SEQ ID NO: 4067296 - DNA, 25 bp, Homo sapien
gattgccacttgcaacttcagcccc

SEQ ID NO: 4067297 - DNA, 25 bp, Homo sapien
ctgggagcaccttgacaagcatgtg

SEQ ID NO: 4067298 - DNA, 25 bp, Homo sapien
tgatgtgaacggcacttggagaatc

SEQ ID NO: 4067299 - DNA, 25 bp, Homo sapien
gactgacatatgtcctttctgagca

SEQ ID NO: 4067300 - DNA, 25 bp, Homo sapien
ttcaagaaggcacctccaacatgtt

SEQ ID NO: 4067301 - DNA, 25 bp, Homo sapien
gagtgtgcagggattgactgacata

SEQ ID NO: 4067302 - DNA, 25 bp, Homo sapien
tacgatggtcagtggggaagcacgc

SEQ ID NO: 4067303 - DNA, 25 bp, Homo sapien
aagcacgcggcccggaaccggcagt

SEQ ID NO: 4067304 - DNA, 25 bp, Homo sapien
atggtcagtggggaagcacgcggcc

SEQ ID NO: 4067305 - DNA, 25 bp, Homo sapien
gcccggaaccggcagtgacctggct

SEQ ID NO: 4067306 - DNA, 25 bp, Homo sapien
tttcatatgacattggaatgcagcc

SEQ ID NO: 4067307 - DNA, 25 bp, Homo sapien
tgacattggaatgcagcccacagcc

SEQ ID NO: 4067308 - DNA, 25 bp, Homo sapien
gaagcaaatcctgatttcatatgac

SEQ ID NO: 4067309 - DNA, 25 bp, Homo sapien
tcatcctcatgaagcaaatcctgat

SEQ ID NO: 4067310 - DNA, 25 bp, Homo sapien
cggataagcgtgcatctgctctcaa

SEQ ID NO: 4067311 - DNA, 25 bp, Homo sapien
tgatgctgcttagtagactgcagtg

SEQ ID NO: 4067312 - DNA, 25 bp, Homo sapien
tagactgcagtgtcggataagcgtg

SEQ ID NO: 4067313 - DNA, 25 bp, Homo sapien
aaatacacaggtaggtcctctagtt

SEQ ID NO: 4067314 - DNA, 25 bp, Homo sapien
tggaaggaggtggaccagtaagatg

SEQ ID NO: 4067315 - DNA, 25 bp, Homo sapien
aactgtgtaatccagaacaggtctc

SEQ ID NO: 4067316 - DNA, 25 bp, Homo sapien
gggagggacgtagatatgaactgtg

SEQ ID NO: 4067317 - DNA, 25 bp, Homo sapien
ggagggacgtagatatgaactgtgt

SEQ ID NO: 4067318 - DNA, 25 bp, Homo sapien
tgtgtaatccagaacaggtctctga

SEQ ID NO: 4067319 - DNA, 25 bp, Homo sapien
tgttctgtccgctgtggatttgggt

SEQ ID NO: 4067320 - DNA, 25 bp, Homo sapien
tgtttgctgtagaagtaaggtgcct

SEQ ID NO: 4067321 - DNA, 25 bp, Homo sapien
aatcgccacgctctttgttctgtcc

SEQ ID NO: 4067322 - DNA, 25 bp, Homo sapien
gggaaactttcagcattgcctgggc

SEQ ID NO: 4067323 - DNA, 25 bp, Homo sapien
tgaccggcagcttgcagaccaatgg

SEQ ID NO: 4067324 - DNA, 25 bp, Homo sapien
gaccaatgggatctggaatgtgctg

SEQ ID NO: 4067325 - DNA, 25 bp, Homo sapien
gaaggagttcattctcagacgattc

SEQ ID NO: 4067326 - DNA, 25 bp, Homo sapien
actgcatagagtgcccatgccctga

SEQ ID NO: 4067327 - DNA, 25 bp, Homo sapien
tggaggggcccaggttttctcacat

SEQ ID NO: 4067328 - DNA, 25 bp, Homo sapien
aggttttctcacatgccaaggtcca

SEQ ID NO: 4067329 - DNA, 25 bp, Homo sapien
ttttctcacatgccaaggtccagca

SEQ ID NO: 4067330 - DNA, 25 bp, Homo sapien
ggttttctcacatgccaaggtccag

SEQ ID NO: 4067331 - DNA, 25 bp, Homo sapien
tgcacaatcctgagaatgccctccc

SEQ ID NO: 4067332 - DNA, 25 bp, Homo sapien
tgcactgaagttgacttccagtaac

SEQ ID NO: 4067333 - DNA, 25 bp, Homo sapien
gggattttgactccatcacctcttt

SEQ ID NO: 4067334 - DNA, 25 bp, Homo sapien
tccgccccttcgaactgctttgctc

SEQ ID NO: 4067335 - DNA, 25 bp, Homo sapien
tgaccgggctccaaagcagaattgc

SEQ ID NO: 4067336 - DNA, 25 bp, Homo sapien
taaggtacccttaaggatccatgga

SEQ ID NO: 4067337 - DNA, 25 bp, Homo sapien
tgtgccctgaaacagattgaccggg

SEQ ID NO: 4067338 - DNA, 25 bp, Homo sapien
aagagatggccctttgaagcttaca

SEQ ID NO: 4067339 - DNA, 25 bp, Homo sapien
cgctctccggggtatccaagtgaca

SEQ ID NO: 4067340 - DNA, 25 bp, Homo sapien
tgggaggtcaccacgaggagcctgt

SEQ ID NO: 4067341 - DNA, 25 bp, Homo sapien
gccagcaataggatgggaggtcacc

SEQ ID NO: 4067342 - DNA, 25 bp, Homo sapien
tccggggtatccaagtgacatgtgg

SEQ ID NO: 4067343 - DNA, 25 bp, Homo sapien
tttggctgttgtgcaagaagaaccc

SEQ ID NO: 4067344 - DNA, 25 bp, Homo sapien
tggctgttgtgcaagaagaacccgc

SEQ ID NO: 4067345 - DNA, 25 bp, Homo sapien
tgtttggctgttgtgcaagaagaac

SEQ ID NO: 4067346 - DNA, 25 bp, Homo sapien
gctgttgtgcaagaagaacccgcat

SEQ ID NO: 4067347 - DNA, 25 bp, Homo sapien
gaaatgattatagcaaatcccctgt

SEQ ID NO: 4067348 - DNA, 25 bp, Homo sapien
gcaaatcccctgttattgttggttg

SEQ ID NO: 4067349 - DNA, 25 bp, Homo sapien
tttgctcaaagcctatctcaaactt

SEQ ID NO: 4067350 - DNA, 25 bp, Homo sapien
tgctcaaagcctatctcaaacttct

SEQ ID NO: 4067351 - DNA, 25 bp, Homo sapien
tttaacaattaggtctggcacaggc

SEQ ID NO: 4067352 - DNA, 25 bp, Homo sapien
tgttcacataagaagcctacgctgt

SEQ ID NO: 4067353 - DNA, 25 bp, Homo sapien
tgaggcggaccgattgctttgagct

SEQ ID NO: 4067354 - DNA, 25 bp, Homo sapien
tccaagggcaggaggtaaccattaa

SEQ ID NO: 4067355 - DNA, 25 bp, Homo sapien
gaggactcgactgcagcactgtagg

SEQ ID NO: 4067356 - DNA, 25 bp, Homo sapien
tcctgcctatcgatgagaaacactg

SEQ ID NO: 4067357 - DNA, 25 bp, Homo sapien
cactgtagggctgtgcgagcttgct

SEQ ID NO: 4067358 - DNA, 25 bp, Homo sapien
tatttggagccctatcctggcaggg

SEQ ID NO: 4067359 - DNA, 25 bp, Homo sapien
ctggtgcatgctggctttgctggtc

SEQ ID NO: 4067360 - DNA, 25 bp, Homo sapien
tggtgcatgctggctttgctggtca

SEQ ID NO: 4067361 - DNA, 25 bp, Homo sapien
ggtgcatgctggctttgctggtcat

SEQ ID NO: 4067362 - DNA, 25 bp, Homo sapien
tttgtgtttggttgtggtgccggtg

SEQ ID NO: 4067363 - DNA, 25 bp, Homo sapien
ttgtggtgccggtgggggaaatgca

SEQ ID NO: 4067364 - DNA, 25 bp, Homo sapien
gaatgcatggatgcctgtggctcca

SEQ ID NO: 4067365 - DNA, 25 bp, Homo sapien
aaatgcagaatgcatggatgcctgt

SEQ ID NO: 4067366 - DNA, 25 bp, Homo sapien
cagttggcatactcactaagcaaaa

SEQ ID NO: 4067367 - DNA, 25 bp, Homo sapien
tctatcatgggtagtttggattatc

SEQ ID NO: 4067368 - DNA, 25 bp, Homo sapien
tctgtgcactccaatatttatgaga

SEQ ID NO: 4067369 - DNA, 25 bp, Homo sapien
tcttgcttgcaatcatttctcttct

SEQ ID NO: 4067370 - DNA, 25 bp, Homo sapien
ggccattcaaattgcaaaactgtga

SEQ ID NO: 4067371 - DNA, 25 bp, Homo sapien
agtctatgcaatggcccaaaggtct

SEQ ID NO: 4067372 - DNA, 25 bp, Homo sapien
aaggtcttgggccattcaaattgca

SEQ ID NO: 4067373 - DNA, 25 bp, Homo sapien
tcagtctatgcaatggcccaaaggt

SEQ ID NO: 4067374 - DNA, 25 bp, Homo sapien
gacaacttgatgatcccataggaca

SEQ ID NO: 4067375 - DNA, 25 bp, Homo sapien
caatagcatttaggcagagtcccaa

SEQ ID NO: 4067376 - DNA, 25 bp, Homo sapien
tctggacgaagatcatcaatagcat

SEQ ID NO: 4067377 - DNA, 25 bp, Homo sapien
caatactgtgggttaggtgccatct

SEQ ID NO: 4067378 - DNA, 25 bp, Homo sapien
ccagatagatccgaacgaagacgca

SEQ ID NO: 4067379 - DNA, 25 bp, Homo sapien
aataggagcttttcgttgagaccac

SEQ ID NO: 4067380 - DNA, 25 bp, Homo sapien
ttaacttcagtacacatggccgccc

SEQ ID NO: 4067381 - DNA, 25 bp, Homo sapien
gattccacagcgtagacatgggccc

SEQ ID NO: 4067382 - DNA, 25 bp, Homo sapien
ctctgcctctccccgggttcaagtg

SEQ ID NO: 4067383 - DNA, 25 bp, Homo sapien
gtgcgatcctggctcactgcaacct

SEQ ID NO: 4067384 - DNA, 25 bp, Homo sapien
acctctgcctctccccgggttcaag

SEQ ID NO: 4067385 - DNA, 25 bp, Homo sapien
tgttgccaggcctgagtgcagtggt

SEQ ID NO: 4067386 - DNA, 25 bp, Homo sapien
tgtttaaataccagaaaatagccca

SEQ ID NO: 4067387 - DNA, 25 bp, Homo sapien
tagcccatatccaaacaggtgtgcg

SEQ ID NO: 4067388 - DNA, 25 bp, Homo sapien
caggtgtgcgataaaacagtataaa

SEQ ID NO: 4067389 - DNA, 25 bp, Homo sapien
gataaagcaattggcaagaaacggt

SEQ ID NO: 4067390 - DNA, 25 bp, Homo sapien
gcaaatatggccttgagctagaatc

SEQ ID NO: 4067391 - DNA, 25 bp, Homo sapien
tattaagatctcctaagtgcacagg

SEQ ID NO: 4067392 - DNA, 25 bp, Homo sapien
ccacctgggtacttgacttgactta

SEQ ID NO: 4067393 - DNA, 25 bp, Homo sapien
caaaaccttgctagaggaatgacta

SEQ ID NO: 4067394 - DNA, 25 bp, Homo sapien
tctctaagaaactacagcggatcag

SEQ ID NO: 4067395 - DNA, 25 bp, Homo sapien
tctttgtatctgagtagccctggtg

SEQ ID NO: 4067396 - DNA, 25 bp, Homo sapien
taaccatttcagagccagacatcac

SEQ ID NO: 4067397 - DNA, 25 bp, Homo sapien
aatccagcattctacttgggagcag

SEQ ID NO: 4067398 - DNA, 25 bp, Homo sapien
tagacctttgcagtacacccagaga

SEQ ID NO: 4067399 - DNA, 25 bp, Homo sapien
gaatagaatctagctctctccgaag

SEQ ID NO: 4067400 - DNA, 25 bp, Homo sapien
tcctagaattgaagcaaccgggcaa

SEQ ID NO: 4067401 - DNA, 25 bp, Homo sapien
tatttttactgcattcgcgatccgg

SEQ ID NO: 4067402 - DNA, 25 bp, Homo sapien
tgtctgaggattccgatgcctgcag

SEQ ID NO: 4067403 - DNA, 25 bp, Homo sapien
gctggccagtctgaatgtctgagga

SEQ ID NO: 4067404 - DNA, 25 bp, Homo sapien
cagttcagtgcccattgttcccagc

SEQ ID NO: 4067405 - DNA, 25 bp, Homo sapien
gcagcgattagcaggtcgggtcacc

SEQ ID NO: 4067406 - DNA, 25 bp, Homo sapien
gattttcttctagagccacactagg

SEQ ID NO: 4067407 - DNA, 25 bp, Homo sapien
gccaggtctgcatgcctgatgccat

SEQ ID NO: 4067408 - DNA, 25 bp, Homo sapien
gcctgatgccatgattttcttctag

SEQ ID NO: 4067409 - DNA, 25 bp, Homo sapien
agagccacactaggccttttcagca

SEQ ID NO: 4067410 - DNA, 25 bp, Homo sapien
gcaaaagcggtattgaatgctgctg

SEQ ID NO: 4067411 - DNA, 25 bp, Homo sapien
tacgcaaaagcggtattgaatgctg

SEQ ID NO: 4067412 - DNA, 25 bp, Homo sapien
acgcaaaagcggtattgaatgctgc

SEQ ID NO: 4067413 - DNA, 25 bp, Homo sapien
cgcaaaagcggtattgaatgctgct

SEQ ID NO: 4067414 - DNA, 25 bp, Homo sapien
caagcctacacgtggtatgatgact

SEQ ID NO: 4067415 - DNA, 25 bp, Homo sapien
tcaccaagcctacacgtggtatgat

SEQ ID NO: 4067416 - DNA, 25 bp, Homo sapien
tacacgtggtatgatgactcaagtg

SEQ ID NO: 4067417 - DNA, 25 bp, Homo sapien
ttccattcaccaagcctacacgtgg

SEQ ID NO: 4067418 - DNA, 25 bp, Homo sapien
tgagtttggacttgaggacaccccg

SEQ ID NO: 4067419 - DNA, 25 bp, Homo sapien
taaccagccaccctttgagtttgga

SEQ ID NO: 4067420 - DNA, 25 bp, Homo sapien
ttttatgcagttgggctctctggac

SEQ ID NO: 4067421 - DNA, 25 bp, Homo sapien
ggacaccccggatcctctgagagat

SEQ ID NO: 4067422 - DNA, 25 bp, Homo sapien
ggcatgcccttgcacatatattcat

SEQ ID NO: 4067423 - DNA, 25 bp, Homo sapien
tgtagagagcataggttcaaaaatt

SEQ ID NO: 4067424 - DNA, 25 bp, Homo sapien
tacaagatgcgtaaaatactggcat

SEQ ID NO: 4067425 - DNA, 25 bp, Homo sapien
acttttgttcgctttacaagatgcg

SEQ ID NO: 4067426 - DNA, 25 bp, Homo sapien
gcatggcatttgtctggattttgtc

SEQ ID NO: 4067427 - DNA, 25 bp, Homo sapien
agaaacaccgtacacagccgcagtt

SEQ ID NO: 4067428 - DNA, 25 bp, Homo sapien
cttgagagaagaaacaccgtacaca

SEQ ID NO: 4067429 - DNA, 25 bp, Homo sapien
ttacaagagttcgtgatcaaaaagt

SEQ ID NO: 4067430 - DNA, 25 bp, Homo sapien
caaaaggaaggtcgctaacgcctgt

SEQ ID NO: 4067431 - DNA, 25 bp, Homo sapien
tgttgagaactcattgccctttgaa

SEQ ID NO: 4067432 - DNA, 25 bp, Homo sapien
tataacagtgagaacagacttcagg

SEQ ID NO: 4067433 - DNA, 25 bp, Homo sapien
cagtctaatgtcacttgggtaacac

SEQ ID NO: 4067434 - DNA, 25 bp, Homo sapien
ccataggatctccaaggataaggac

SEQ ID NO: 4067435 - DNA, 25 bp, Homo sapien
tcaaggaatgtctgtggagactcca

SEQ ID NO: 4067436 - DNA, 25 bp, Homo sapien
tctgtggagactccataggatctcc

SEQ ID NO: 4067437 - DNA, 25 bp, Homo sapien
ggataaggacctcacgtccttccat

SEQ ID NO: 4067438 - DNA, 25 bp, Homo sapien
ttctgcaattagtagatcaaggtcc

SEQ ID NO: 4067439 - DNA, 25 bp, Homo sapien
gatcaaggtccacctgctttatgct

SEQ ID NO: 4067440 - DNA, 25 bp, Homo sapien
aattagtagatcaaggtccacctgc

SEQ ID NO: 4067441 - DNA, 25 bp, Homo sapien
aggtccacctgctttatgctcttca

SEQ ID NO: 4067442 - DNA, 25 bp, Homo sapien
taaacaataactttatagccacatt

SEQ ID NO: 4067443 - DNA, 25 bp, Homo sapien
ctttatagccacattatgaagatga

SEQ ID NO: 4067444 - DNA, 25 bp, Homo sapien
caataactttatagccacattatga

SEQ ID NO: 4067445 - DNA, 25 bp, Homo sapien
tagccacattatgaagatgaatgca

SEQ ID NO: 4067446 - DNA, 25 bp, Homo sapien
gcgacatcgggttgcaaatgagttt

SEQ ID NO: 4067447 - DNA, 25 bp, Homo sapien
ctaggaaattacctccgaacagcca

SEQ ID NO: 4067448 - DNA, 25 bp, Homo sapien
catggattcagctgtaaactgcttc

SEQ ID NO: 4067449 - DNA, 25 bp, Homo sapien
cgaacagccagaaatacattgtgga

SEQ ID NO: 4067450 - DNA, 25 bp, Homo sapien
gggccatgagcccaggaatccaggt

SEQ ID NO: 4067451 - DNA, 25 bp, Homo sapien
gagcccaggaatccaggtagactcc

SEQ ID NO: 4067452 - DNA, 25 bp, Homo sapien
ggccatgagcccaggaatccaggta

SEQ ID NO: 4067453 - DNA, 25 bp, Homo sapien
catgagcccaggaatccaggtagac

SEQ ID NO: 4067454 - DNA, 25 bp, Homo sapien
gctagacatggcattgggggtatgg

SEQ ID NO: 4067455 - DNA, 25 bp, Homo sapien
ggtgagaatcagatagcaagatggc

SEQ ID NO: 4067456 - DNA, 25 bp, Homo sapien
tgagaatcagatagcaagatggcag

SEQ ID NO: 4067457 - DNA, 25 bp, Homo sapien
agacatggcattgggggtatggtga

SEQ ID NO: 4067458 - DNA, 25 bp, Homo sapien
tctgttcctcgtatttgactggtga

SEQ ID NO: 4067459 - DNA, 25 bp, Homo sapien
gatgcccatgtgttaggtctttgag

SEQ ID NO: 4067460 - DNA, 25 bp, Homo sapien
aaggttttccaaggcattcacaatg

SEQ ID NO: 4067461 - DNA, 25 bp, Homo sapien
aatgcgcactggactaatttcatac

SEQ ID NO: 4067462 - DNA, 25 bp, Homo sapien
agggatagcatgggtatgaaggagc

SEQ ID NO: 4067463 - DNA, 25 bp, Homo sapien
ccagggatagcatgggtatgaagga

SEQ ID NO: 4067464 - DNA, 25 bp, Homo sapien
gccagggatagcatgggtatgaagg

SEQ ID NO: 4067465 - DNA, 25 bp, Homo sapien
gagccagggatagcatgggtatgaa

SEQ ID NO: 4067466 - DNA, 25 bp, Homo sapien
aactttcttggcaagtacttaggat

SEQ ID NO: 4067467 - DNA, 25 bp, Homo sapien
gggcttgatatgaacagcaaggctc

SEQ ID NO: 4067468 - DNA, 25 bp, Homo sapien
tggcaagtacttaggatatgagctg

SEQ ID NO: 4067469 - DNA, 25 bp, Homo sapien
agtacttaggatatgagctgaggcc

SEQ ID NO: 4067470 - DNA, 25 bp, Homo sapien
cagcattgtccagggtccttgggga

SEQ ID NO: 4067471 - DNA, 25 bp, Homo sapien
tggtgcacataggaaaaaccagcat

SEQ ID NO: 4067472 - DNA, 25 bp, Homo sapien
ggtggtgcacataggaaaaaccagc

SEQ ID NO: 4067473 - DNA, 25 bp, Homo sapien
ctttggtggtgcacataggaaaaac

SEQ ID NO: 4067474 - DNA, 25 bp, Homo sapien
cctttcatttacagccccagataca

SEQ ID NO: 4067475 - DNA, 25 bp, Homo sapien
cagccccagatacagtcaaatattc

SEQ ID NO: 4067476 - DNA, 25 bp, Homo sapien
tcctttcatttacagccccagatac

SEQ ID NO: 4067477 - DNA, 25 bp, Homo sapien
agagaaggtttagggcaccgccact

SEQ ID NO: 4067478 - DNA, 25 bp, Homo sapien
gatgccagagaaggtttagggcacc

SEQ ID NO: 4067479 - DNA, 25 bp, Homo sapien
ccagagaaggtttagggcaccgcca

SEQ ID NO: 4067480 - DNA, 25 bp, Homo sapien
ttagggcaccgccactttcgacata

SEQ ID NO: 4067481 - DNA, 25 bp, Homo sapien
tgggcctgaactcctggaaccaagt

SEQ ID NO: 4067482 - DNA, 25 bp, Homo sapien
tcctggaaccaagtaagtttgctgg

SEQ ID NO: 4067483 - DNA, 25 bp, Homo sapien
ggcctgaactcctggaaccaagtaa

SEQ ID NO: 4067484 - DNA, 25 bp, Homo sapien
caagtaagtttgctggggccggcaa

SEQ ID NO: 4067485 - DNA, 25 bp, Homo sapien
ttggcaataagaaccccctctcctc

SEQ ID NO: 4067486 - DNA, 25 bp, Homo sapien
ggcaataagaaccccctctcctcat

SEQ ID NO: 4067487 - DNA, 25 bp, Homo sapien
tggcaataagaaccccctctcctca

SEQ ID NO: 4067488 - DNA, 25 bp, Homo sapien
cttggcaataagaaccccctctcct

SEQ ID NO: 4067489 - DNA, 25 bp, Homo sapien
tgagtgagtcataatctattcctgg

SEQ ID NO: 4067490 - DNA, 25 bp, Homo sapien
cacaccctggagtggaatatctctt

SEQ ID NO: 4067491 - DNA, 25 bp, Homo sapien
ccttcccctacgttttgcttgagtg

SEQ ID NO: 4067492 - DNA, 25 bp, Homo sapien
tgccactttccagtgtgatgctctg

SEQ ID NO: 4067493 - DNA, 25 bp, Homo sapien
tgatccagacgaaaatcctcccatg

SEQ ID NO: 4067494 - DNA, 25 bp, Homo sapien
gatgtccatctggtcaaattgaagg

SEQ ID NO: 4067495 - DNA, 25 bp, Homo sapien
tgcatcgataggacagaggaacctc

SEQ ID NO: 4067496 - DNA, 25 bp, Homo sapien
agagacgggtgtgtctgcatcgata

SEQ ID NO: 4067497 - DNA, 25 bp, Homo sapien
catgccatattgacaaccacaatgg

SEQ ID NO: 4067498 - DNA, 25 bp, Homo sapien
gccatattgacaaccacaatggtga

SEQ ID NO: 4067499 - DNA, 25 bp, Homo sapien
atgccatattgacaaccacaatggt

SEQ ID NO: 4067500 - DNA, 25 bp, Homo sapien
tgccatattgacaaccacaatggtg

SEQ ID NO: 4067501 - DNA, 25 bp, Homo sapien
gtcctgtcccttcaggctgcgcaac

SEQ ID NO: 4067502 - DNA, 25 bp, Homo sapien
gctgcgcaacgctggagggcgatgg

SEQ ID NO: 4067503 - DNA, 25 bp, Homo sapien
tcccttcaggctgcgcaacgctgga

SEQ ID NO: 4067504 - DNA, 25 bp, Homo sapien
tgtcccttcaggctgcgcaacgctg

SEQ ID NO: 4067505 - DNA, 25 bp, Homo sapien
gactgcctatatagactgtctgata

SEQ ID NO: 4067506 - DNA, 25 bp, Homo sapien
gcatatatcttaccatacacaggta

SEQ ID NO: 4067507 - DNA, 25 bp, Homo sapien
caataactggtcttgtactgctaag

SEQ ID NO: 4067508 - DNA, 25 bp, Homo sapien
gcctatttctgttagcaataactgg

SEQ ID NO: 4067509 - DNA, 25 bp, Homo sapien
cgtcagcaaaccaacaggtcgtctt

SEQ ID NO: 4067510 - DNA, 25 bp, Homo sapien
gcaaaccaacaggtcgtcttttcca

SEQ ID NO: 4067511 - DNA, 25 bp, Homo sapien
ctaaaatatcccgtcagcaaaccaa

SEQ ID NO: 4067512 - DNA, 25 bp, Homo sapien
aacaggtcgtcttttccactttgag

SEQ ID NO: 4067513 - DNA, 25 bp, Homo sapien
tgagaggtctcaagatcatcatttg

SEQ ID NO: 4067514 - DNA, 25 bp, Homo sapien
ctgagaggtctcaagatcatcattt

SEQ ID NO: 4067515 - DNA, 25 bp, Homo sapien
agaggtctcaagatcatcatttggg

SEQ ID NO: 4067516 - DNA, 25 bp, Homo sapien
gagaggtctcaagatcatcatttgg

SEQ ID NO: 4067517 - DNA, 25 bp, Homo sapien
tcttgccaaatgacgccaggtagcg

SEQ ID NO: 4067518 - DNA, 25 bp, Homo sapien
tggtaggatttttcttgccaaatga

SEQ ID NO: 4067519 - DNA, 25 bp, Homo sapien
cattctggtgcttggatgatgtcac

SEQ ID NO: 4067520 - DNA, 25 bp, Homo sapien
ccaggtagcgcattatcaaaatgac

SEQ ID NO: 4067521 - DNA, 25 bp, Homo sapien
gagaggagggcaagtagatatatca

SEQ ID NO: 4067522 - DNA, 25 bp, Homo sapien
aggagggcaagtagatatatcaggc

SEQ ID NO: 4067523 - DNA, 25 bp, Homo sapien
caagtagatatatcaggccttgggc

SEQ ID NO: 4067524 - DNA, 25 bp, Homo sapien
gggcaagtagatatatcaggccttg

SEQ ID NO: 4067525 - DNA, 25 bp, Homo sapien
tcaacctgagaaagccgttggccag

SEQ ID NO: 4067526 - DNA, 25 bp, Homo sapien
gattgtcatttagaactagctcagg

SEQ ID NO: 4067527 - DNA, 25 bp, Homo sapien
tgctagtgaatccagagctcccaca

SEQ ID NO: 4067528 - DNA, 25 bp, Homo sapien
tcccacactggctagactggttcca

SEQ ID NO: 4067529 - DNA, 25 bp, Homo sapien
agtctgtctgtcctctctgtaaaac

SEQ ID NO: 4067530 - DNA, 25 bp, Homo sapien
ccagtctgtctgtcctctctgtaaa

SEQ ID NO: 4067531 - DNA, 25 bp, Homo sapien
cagtctgtctgtcctctctgtaaaa

SEQ ID NO: 4067532 - DNA, 25 bp, Homo sapien
cccactgctcagtagacaggtctct

SEQ ID NO: 4067533 - DNA, 25 bp, Homo sapien
ctcccactgctcagtagacaggtct

SEQ ID NO: 4067534 - DNA, 25 bp, Homo sapien
tcccactgctcagtagacaggtctc

SEQ ID NO: 4067535 - DNA, 25 bp, Homo sapien
tggcgtgatctctgcccaccgcagt

SEQ ID NO: 4067536 - DNA, 25 bp, Homo sapien
gatctctgcccaccgcagttccgcc

SEQ ID NO: 4067537 - DNA, 25 bp, Homo sapien
gtgatctctgcccaccgcagttccg

SEQ ID NO: 4067538 - DNA, 25 bp, Homo sapien
acccagaatagagtacagtggcgtg

SEQ ID NO: 4067539 - DNA, 25 bp, Homo sapien
ttatgtagctgtgaagcctctgggc

SEQ ID NO: 4067540 - DNA, 25 bp, Homo sapien
ccttcttgatctagcatgaatccca

SEQ ID NO: 4067541 - DNA, 25 bp, Homo sapien
tagctgtgaagcctctgggctgctt

SEQ ID NO: 4067542 - DNA, 25 bp, Homo sapien
tgaatcccaacctcttggccatgtt

SEQ ID NO: 4067543 - DNA, 25 bp, Homo sapien
tgtttgtttgtactccaccctgaat

SEQ ID NO: 4067544 - DNA, 25 bp, Homo sapien
tgaatatgacccacagtcatttcct

SEQ ID NO: 4067545 - DNA, 25 bp, Homo sapien
cattttgggtaagggcagcttgttt

SEQ ID NO: 4067546 - DNA, 25 bp, Homo sapien
aatgtttgtctttggaatgtgtagc

SEQ ID NO: 4067547 - DNA, 25 bp, Homo sapien
ctccttccttacactcaaaataatt

SEQ ID NO: 4067548 - DNA, 25 bp, Homo sapien
agctcccacagggaacgcccaagcc

SEQ ID NO: 4067549 - DNA, 25 bp, Homo sapien
cagggaacgcccaagccttttatga

SEQ ID NO: 4067550 - DNA, 25 bp, Homo sapien
tccttccttacactcaaaataattc

SEQ ID NO: 4067551 - DNA, 25 bp, Homo sapien
accatttcagcttgagcattctgaa

SEQ ID NO: 4067552 - DNA, 25 bp, Homo sapien
caccatttcagcttgagcattctga

SEQ ID NO: 4067553 - DNA, 25 bp, Homo sapien
ccatttcagcttgagcattctgaat

SEQ ID NO: 4067554 - DNA, 25 bp, Homo sapien
gcttgactttcctccccaacactca

SEQ ID NO: 4067555 - DNA, 25 bp, Homo sapien
tgcttgactttcctccccaacactc

SEQ ID NO: 4067556 - DNA, 25 bp, Homo sapien
cttgactttcctccccaacactcac

SEQ ID NO: 4067557 - DNA, 25 bp, Homo sapien
ctgcttgactttcctccccaacact

SEQ ID NO: 4067558 - DNA, 25 bp, Homo sapien
catttacgaagtacagtctgggttt

SEQ ID NO: 4067559 - DNA, 25 bp, Homo sapien
aattgcctttgctgagttgccagaa

SEQ ID NO: 4067560 - DNA, 25 bp, Homo sapien
acatacacatttacgaagtacagtc

SEQ ID NO: 4067561 - DNA, 25 bp, Homo sapien
ataattgcctttgctgagttgccag

SEQ ID NO: 4067562 - DNA, 25 bp, Homo sapien
ctgtgagtttcagaaactttggcat

SEQ ID NO: 4067563 - DNA, 25 bp, Homo sapien
cctgaggatggagctttctttctgc

SEQ ID NO: 4067564 - DNA, 25 bp, Homo sapien
ttcccttagctgcagctcccttgct

SEQ ID NO: 4067565 - DNA, 25 bp, Homo sapien
tcccttgcttgcctttcctgaggat

SEQ ID NO: 4067566 - DNA, 25 bp, Homo sapien
agctttctttctgctaaaacaattt

SEQ ID NO: 4067567 - DNA, 25 bp, Homo sapien
tatggggttcactttagttttgctg

SEQ ID NO: 4067568 - DNA, 25 bp, Homo sapien
acaagctttatggggttcactttag

SEQ ID NO: 4067569 - DNA, 25 bp, Homo sapien
agaaaacccagaacaagctttatgg

SEQ ID NO: 4067570 - DNA, 25 bp, Homo sapien
gggttcactttagttttgctgtgaa

SEQ ID NO: 4067571 - DNA, 25 bp, Homo sapien
taacagtggcaactccatatggcag

SEQ ID NO: 4067572 - DNA, 25 bp, Homo sapien
tgaaggcacactgagccgaggaagt

SEQ ID NO: 4067573 - DNA, 25 bp, Homo sapien
tggagttgacgcagtgagaacccca

SEQ ID NO: 4067574 - DNA, 25 bp, Homo sapien
gcagtgctctggaacatggctaata

SEQ ID NO: 4067575 - DNA, 25 bp, Homo sapien
tttgcaagtctagggtgagtctcca

SEQ ID NO: 4067576 - DNA, 25 bp, Homo sapien
tgcaagtctagggtgagtctccaag

SEQ ID NO: 4067577 - DNA, 25 bp, Homo sapien
gagtttgcaagtctagggtgagtct

SEQ ID NO: 4067578 - DNA, 25 bp, Homo sapien
agtctagggtgagtctccaaggcca

SEQ ID NO: 4067579 - DNA, 25 bp, Homo sapien
caccgaggagctgcgttgcttgaca

SEQ ID NO: 4067580 - DNA, 25 bp, Homo sapien
gaaggaggtcggatcttgtcacccg

SEQ ID NO: 4067581 - DNA, 25 bp, Homo sapien
gacagttagtacgtgcatttccttt

SEQ ID NO: 4067582 - DNA, 25 bp, Homo sapien
cttgctttgtatccgcaccgaggag

SEQ ID NO: 4067583 - DNA, 25 bp, Homo sapien
catggctgtcgggatcgacagtccc

SEQ ID NO: 4067584 - DNA, 25 bp, Homo sapien
tcttggccctgcgctggcatggctg

SEQ ID NO: 4067585 - DNA, 25 bp, Homo sapien
gggatcgacagtccctcacccgagg

SEQ ID NO: 4067586 - DNA, 25 bp, Homo sapien
agtccctcacccgagggccttgcat

SEQ ID NO: 4067587 - DNA, 25 bp, Homo sapien
gaggcctggcagtggatcaaagagc

SEQ ID NO: 4067588 - DNA, 25 bp, Homo sapien
aggcctggcagtggatcaaagagct

SEQ ID NO: 4067589 - DNA, 25 bp, Homo sapien
ctgtgcatagtccaacttctctgct

SEQ ID NO: 4067590 - DNA, 25 bp, Homo sapien
gtgcatagtccaacttctctgcttc

SEQ ID NO: 4067591 - DNA, 25 bp, Homo sapien
tagtccaacttctctgcttccttcc

SEQ ID NO: 4067592 - DNA, 25 bp, Homo sapien
catagtccaacttctctgcttcctt

SEQ ID NO: 4067593 - DNA, 25 bp, Homo sapien
ctgccccagacctgcccgtgtgggc

SEQ ID NO: 4067594 - DNA, 25 bp, Homo sapien
gcaattgtgcaagaagccccacacg

SEQ ID NO: 4067595 - DNA, 25 bp, Homo sapien
attcacacggttgagctgccccaga

SEQ ID NO: 4067596 - DNA, 25 bp, Homo sapien
gccccacacgtgagcgggcatcagg

SEQ ID NO: 4067597 - DNA, 25 bp, Homo sapien
aaagtggtgtagctttgactgaagc

SEQ ID NO: 4067598 - DNA, 25 bp, Homo sapien
gaaatggaaagtggtgtagctttga

SEQ ID NO: 4067599 - DNA, 25 bp, Homo sapien
aaaagaaaaccgtatctgacagctg

SEQ ID NO: 4067600 - DNA, 25 bp, Homo sapien
caacttttctccacgtgccaaaaga

SEQ ID NO: 4067601 - DNA, 25 bp, Homo sapien
tcatagctgtagagtgtctcccttt

SEQ ID NO: 4067602 - DNA, 25 bp, Homo sapien
caaaatacggactgcagcagatgct

SEQ ID NO: 4067603 - DNA, 25 bp, Homo sapien
cagatgctgaggactatcttagtag

SEQ ID NO: 4067604 - DNA, 25 bp, Homo sapien
taaggagagttacaggcaattggcc

SEQ ID NO: 4067605 - DNA, 25 bp, Homo sapien
cataaggaccttttggatagaaatc

SEQ ID NO: 4067606 - DNA, 25 bp, Homo sapien
cttcccataataagccgtacgtggc

SEQ ID NO: 4067607 - DNA, 25 bp, Homo sapien
caattttttccacgcagtcactcta

SEQ ID NO: 4067608 - DNA, 25 bp, Homo sapien
tggctcttagccttgtaagtgtcat

SEQ ID NO: 4067609 - DNA, 25 bp, Homo sapien
taaacccagatcacagtgaggagag

SEQ ID NO: 4067610 - DNA, 25 bp, Homo sapien
gaaccagatgacagctgacaaccct

SEQ ID NO: 4067611 - DNA, 25 bp, Homo sapien
ccagaccttgtgtgttataaaccca

SEQ ID NO: 4067612 - DNA, 25 bp, Homo sapien
acagtgacttccccagaccttgtgt

SEQ ID NO: 4067613 - DNA, 25 bp, Homo sapien
actgcccagaggctcaagtatccgt

SEQ ID NO: 4067614 - DNA, 25 bp, Homo sapien
gctgccttgcagaaatatgtgtcca

SEQ ID NO: 4067615 - DNA, 25 bp, Homo sapien
tcagagtcaacaatgctgccttgca

SEQ ID NO: 4067616 - DNA, 25 bp, Homo sapien
tcaagtatccgtagtcagagtcaac

SEQ ID NO: 4067617 - DNA, 25 bp, Homo sapien
ttccccgtcgtcctttcacagtcat

SEQ ID NO: 4067618 - DNA, 25 bp, Homo sapien
ccccgtcgtcctttcacagtcattt

SEQ ID NO: 4067619 - DNA, 25 bp, Homo sapien
tttccccgtcgtcctttcacagtca

SEQ ID NO: 4067620 - DNA, 25 bp, Homo sapien
tccccgtcgtcctttcacagtcatt

SEQ ID NO: 4067621 - DNA, 25 bp, Homo sapien
acaggttgcttcacaggtgaatttg

SEQ ID NO: 4067622 - DNA, 25 bp, Homo sapien
agtgcaggtagctccacaggtgatt

SEQ ID NO: 4067623 - DNA, 25 bp, Homo sapien
cacaggttgcttcacaggtgaattt

SEQ ID NO: 4067624 - DNA, 25 bp, Homo sapien
gcacatcctgtcctcaaatggcgag

SEQ ID NO: 4067625 - DNA, 25 bp, Homo sapien
tggacccattccagttggtaattga

SEQ ID NO: 4067626 - DNA, 25 bp, Homo sapien
ggtagtttcggttggcatctgcaca

SEQ ID NO: 4067627 - DNA, 25 bp, Homo sapien
ccaactggtaattatgtgctctggg

SEQ ID NO: 4067628 - DNA, 25 bp, Homo sapien
gctctgggagcataaatccttctag

SEQ ID NO: 4067629 - DNA, 25 bp, Homo sapien
tttttcacggtcagagtccatgcca

SEQ ID NO: 4067630 - DNA, 25 bp, Homo sapien
tgagtgggctgaggaccaatctgct

SEQ ID NO: 4067631 - DNA, 25 bp, Homo sapien
tggactttgttcatccctgtggaca

SEQ ID NO: 4067632 - DNA, 25 bp, Homo sapien
tgggagctacgggtttaacaatctc

SEQ ID NO: 4067633 - DNA, 25 bp, Homo sapien
ggctggcctccacgttttcccagat

SEQ ID NO: 4067634 - DNA, 25 bp, Homo sapien
cagatcctcagggaaatggctgaca

SEQ ID NO: 4067635 - DNA, 25 bp, Homo sapien
cttctgttctcggaaagtgccccag

SEQ ID NO: 4067636 - DNA, 25 bp, Homo sapien
actcctactccgaaaatcattattg

SEQ ID NO: 4067637 - DNA, 25 bp, Homo sapien
catcactcctactccgaaaatcatt

SEQ ID NO: 4067638 - DNA, 25 bp, Homo sapien
aaatcattattgttacagccacatc

SEQ ID NO: 4067639 - DNA, 25 bp, Homo sapien
tgttacagccacatccggtatgcat

SEQ ID NO: 4067640 - DNA, 25 bp, Homo sapien
gtcacacgactattctaacacctta

SEQ ID NO: 4067641 - DNA, 25 bp, Homo sapien
cacctaatgcctggtaaaaggaata

SEQ ID NO: 4067642 - DNA, 25 bp, Homo sapien
tgggaaggtggtcacacgactattc

SEQ ID NO: 4067643 - DNA, 25 bp, Homo sapien
aacaccttactctaaatgtcatatg

SEQ ID NO: 4067644 - DNA, 25 bp, Homo sapien
ctgctcgtacgtgcggcctgggaac

SEQ ID NO: 4067645 - DNA, 25 bp, Homo sapien
caagccatggtattgagaactgatg

SEQ ID NO: 4067646 - DNA, 25 bp, Homo sapien
tgatgtatttcctgctcgtacgtgc

SEQ ID NO: 4067647 - DNA, 25 bp, Homo sapien
actggagtagaggataagtacgttg

SEQ ID NO: 4067648 - DNA, 25 bp, Homo sapien
gccgcagagatacggcatttgatac

SEQ ID NO: 4067649 - DNA, 25 bp, Homo sapien
tccacatgccgcagagatacggcat

SEQ ID NO: 4067650 - DNA, 25 bp, Homo sapien
gagatacggcatttgataccagcat

SEQ ID NO: 4067651 - DNA, 25 bp, Homo sapien
gcccttctccacatgccgcagagat

SEQ ID NO: 4067652 - DNA, 25 bp, Homo sapien
tctctcaaagctagctttattgatc

SEQ ID NO: 4067653 - DNA, 25 bp, Homo sapien
tcctctctcaaagctagctttattg

SEQ ID NO: 4067654 - DNA, 25 bp, Homo sapien
ttcctctctcaaagctagctttatt

SEQ ID NO: 4067655 - DNA, 25 bp, Homo sapien
cctctctcaaagctagctttattga

SEQ ID NO: 4067656 - DNA, 25 bp, Homo sapien
cacgcagagtgtattcagctgtgtg

SEQ ID NO: 4067657 - DNA, 25 bp, Homo sapien
tctcacaattggagtctgagaggcc

SEQ ID NO: 4067658 - DNA, 25 bp, Homo sapien
cacccacgcagagtgtattcagctg

SEQ ID NO: 4067659 - DNA, 25 bp, Homo sapien
tcccacccacgcagagtgtattcag

SEQ ID NO: 4067660 - DNA, 25 bp, Homo sapien
acctactttatcccatgtggcctca

SEQ ID NO: 4067661 - DNA, 25 bp, Homo sapien
ttcacctactttatcccatgtggcc

SEQ ID NO: 4067662 - DNA, 25 bp, Homo sapien
gcttcacctactttatcccatgtgg

SEQ ID NO: 4067663 - DNA, 25 bp, Homo sapien
tcacctactttatcccatgtggcct

SEQ ID NO: 4067664 - DNA, 25 bp, Homo sapien
tatcatcactgtaggtactgcctgg

SEQ ID NO: 4067665 - DNA, 25 bp, Homo sapien
gaggaagatcatgtgcacccaacac

SEQ ID NO: 4067666 - DNA, 25 bp, Homo sapien
caacccctaagtctggtggaggaag

SEQ ID NO: 4067667 - DNA, 25 bp, Homo sapien
ggatatcaacccctaagtctggtgg

SEQ ID NO: 4067668 - DNA, 25 bp, Homo sapien
caagtttcctgtggcacagttctaa

SEQ ID NO: 4067669 - DNA, 25 bp, Homo sapien
cactatagagtacggcttctccaag

SEQ ID NO: 4067670 - DNA, 25 bp, Homo sapien
gcattgctgaaacaagaatccaagt

SEQ ID NO: 4067671 - DNA, 25 bp, Homo sapien
cagttctaagtctctttcactatag

SEQ ID NO: 4067672 - DNA, 25 bp, Homo sapien
gcttgtataatccttatgcagaggt

SEQ ID NO: 4067673 - DNA, 25 bp, Homo sapien
tgtataatccttatgcagaggtctg

SEQ ID NO: 4067674 - DNA, 25 bp, Homo sapien
tataatccttatgcagaggtctgag

SEQ ID NO: 4067675 - DNA, 25 bp, Homo sapien
ataatccttatgcagaggtctgagg

SEQ ID NO: 4067676 - DNA, 25 bp, Homo sapien
gcatcacaattagtcataatgtcca

SEQ ID NO: 4067677 - DNA, 25 bp, Homo sapien
gtcataatgtccagccagccctgaa

SEQ ID NO: 4067678 - DNA, 25 bp, Homo sapien
tgatatcggtttacagtctcaagga

SEQ ID NO: 4067679 - DNA, 25 bp, Homo sapien
tctcaaggatatagactgcatcaca

SEQ ID NO: 4067680 - DNA, 25 bp, Homo sapien
tgggaaccggcttcggaaagctgca

SEQ ID NO: 4067681 - DNA, 25 bp, Homo sapien
attttatgcatgctgtatccggtta

SEQ ID NO: 4067682 - DNA, 25 bp, Homo sapien
tggattcagctgctagctgtggttc

SEQ ID NO: 4067683 - DNA, 25 bp, Homo sapien
tccggttaaccttaaataatgctca

SEQ ID NO: 4067684 - DNA, 25 bp, Homo sapien
tggtctcctttaccgcactgaaacg

SEQ ID NO: 4067685 - DNA, 25 bp, Homo sapien
tctcctttaccgcactgaaacgcaa

SEQ ID NO: 4067686 - DNA, 25 bp, Homo sapien
cttggtctcctttaccgcactgaaa

SEQ ID NO: 4067687 - DNA, 25 bp, Homo sapien
tacttggtctcctttaccgcactga

SEQ ID NO: 4067688 - DNA, 25 bp, Homo sapien
agaggacatgctaccaacagcaggg

SEQ ID NO: 4067689 - DNA, 25 bp, Homo sapien
gggcagaggacatgctaccaacagc

SEQ ID NO: 4067690 - DNA, 25 bp, Homo sapien
gctccaagctcaaatgatttcccca

SEQ ID NO: 4067691 - DNA, 25 bp, Homo sapien
tggggggaatcctcttaatggggca

SEQ ID NO: 4067692 - DNA, 25 bp, Homo sapien
cactgcccaagcctgagtttatcag

SEQ ID NO: 4067693 - DNA, 25 bp, Homo sapien
acaccacgtgagaatggaaaatgac

SEQ ID NO: 4067694 - DNA, 25 bp, Homo sapien
gtttatcaggtgctccatgcaagac

SEQ ID NO: 4067695 - DNA, 25 bp, Homo sapien
tgctccatgcaagacaccacgtgag

SEQ ID NO: 4067696 - DNA, 25 bp, Homo sapien
cttcagcattgtccgtggtgtcttt

SEQ ID NO: 4067697 - DNA, 25 bp, Homo sapien
ttccatgatcttggttgcactatct

SEQ ID NO: 4067698 - DNA, 25 bp, Homo sapien
taaagctcgcctcttctgagaactt

SEQ ID NO: 4067699 - DNA, 25 bp, Homo sapien
atactgcgccttttccacacattca

SEQ ID NO: 4067700 - DNA, 25 bp, Homo sapien
tgaaagttcgctttctaaagttgat

SEQ ID NO: 4067701 - DNA, 25 bp, Homo sapien
tttagtaatgaaagttcgctttcta

SEQ ID NO: 4067702 - DNA, 25 bp, Homo sapien
ttctctctgatatttttagtaatga

SEQ ID NO: 4067703 - DNA, 25 bp, Homo sapien
gctttctaaagttgattataacctg

SEQ ID NO: 4067704 - DNA, 25 bp, Homo sapien
gatgaagggtcccaactctgactgc

SEQ ID NO: 4067705 - DNA, 25 bp, Homo sapien
ctctggtcaagaacatcatgttctg

SEQ ID NO: 4067706 - DNA, 25 bp, Homo sapien
cttgatgaagggtcccaactctgac

SEQ ID NO: 4067707 - DNA, 25 bp, Homo sapien
tcatgttctgatggctttggtttgg

SEQ ID NO: 4067708 - DNA, 25 bp, Homo sapien
cttaagagccttaagctgacaaaag

SEQ ID NO: 4067709 - DNA, 25 bp, Homo sapien
gacaaaagccagagcaaagtctgaa

SEQ ID NO: 4067710 - DNA, 25 bp, Homo sapien
taagagccttaagctgacaaaagcc

SEQ ID NO: 4067711 - DNA, 25 bp, Homo sapien
acaaaagccagagcaaagtctgaaa

SEQ ID NO: 4067712 - DNA, 25 bp, Homo sapien
gttttccacatatgccatgcgaggt

SEQ ID NO: 4067713 - DNA, 25 bp, Homo sapien
taggctctggctcttcgtatagtgt

SEQ ID NO: 4067714 - DNA, 25 bp, Homo sapien
cagtgtgacgcagacacttttccaa

SEQ ID NO: 4067715 - DNA, 25 bp, Homo sapien
cgtatagtgtaacaggattccagca

SEQ ID NO: 4067716 - DNA, 25 bp, Homo sapien
gtgatggggtagatggcttccaaca

SEQ ID NO: 4067717 - DNA, 25 bp, Homo sapien
tgatggggtagatggcttccaacac

SEQ ID NO: 4067718 - DNA, 25 bp, Homo sapien
gatggggtagatggcttccaacact

SEQ ID NO: 4067719 - DNA, 25 bp, Homo sapien
atggggtagatggcttccaacactt

SEQ ID NO: 4067720 - DNA, 25 bp, Homo sapien
aaagccttcaacagaccaagtgaat

SEQ ID NO: 4067721 - DNA, 25 bp, Homo sapien
tgaatgcgggtacagcagtcttctc

SEQ ID NO: 4067722 - DNA, 25 bp, Homo sapien
tactttctgcggttaaccagctgag

SEQ ID NO: 4067723 - DNA, 25 bp, Homo sapien
gctaagctgacaacatgaatgcggg

SEQ ID NO: 4067724 - DNA, 25 bp, Homo sapien
acacagctttagctgtttgacaaag

SEQ ID NO: 4067725 - DNA, 25 bp, Homo sapien
gacacagctttagctgtttgacaaa

SEQ ID NO: 4067726 - DNA, 25 bp, Homo sapien
tgggcttgcggcatgacagcagaga

SEQ ID NO: 4067727 - DNA, 25 bp, Homo sapien
tctgggcttgcggcatgacagcaga

SEQ ID NO: 4067728 - DNA, 25 bp, Homo sapien
ggccacgctgctcacgtcagcagtg

SEQ ID NO: 4067729 - DNA, 25 bp, Homo sapien
tctgtctagctgatgtcctcagctc

SEQ ID NO: 4067730 - DNA, 25 bp, Homo sapien
catgtcctgagtgaatgaaccgaaa

SEQ ID NO: 4067731 - DNA, 25 bp, Homo sapien
ccatgtcctgagtgaatgaaccgaa

SEQ ID NO: 4067732 - DNA, 25 bp, Homo sapien
accgaaagcgatgggtcatttggtc

SEQ ID NO: 4067733 - DNA, 25 bp, Homo sapien
gaatgaaccgaaagcgatgggtcat

SEQ ID NO: 4067734 - DNA, 25 bp, Homo sapien
tttggtctgcccttttgctacatgg

SEQ ID NO: 4067735 - DNA, 25 bp, Homo sapien
cctagacatggcctgttgttttcaa

SEQ ID NO: 4067736 - DNA, 25 bp, Homo sapien
tctcgagtactaatgactgcccctg

SEQ ID NO: 4067737 - DNA, 25 bp, Homo sapien
gcttgtcattgtcaatagtcctggg

SEQ ID NO: 4067738 - DNA, 25 bp, Homo sapien
tctctgtggttggaaagcctaagtc

SEQ ID NO: 4067739 - DNA, 25 bp, Homo sapien
gagtctctggcacatctcaggtgat

SEQ ID NO: 4067740 - DNA, 25 bp, Homo sapien
ggtgatggaacctcggctttctctg

SEQ ID NO: 4067741 - DNA, 25 bp, Homo sapien
tctgtgaaaacgtggtctagaatac

SEQ ID NO: 4067742 - DNA, 25 bp, Homo sapien
gggacaggggagatatggcccaaac

SEQ ID NO: 4067743 - DNA, 25 bp, Homo sapien
ggctgcataaacagggacaggggag

SEQ ID NO: 4067744 - DNA, 25 bp, Homo sapien
gcataaacagggacaggggagatat

SEQ ID NO: 4067745 - DNA, 25 bp, Homo sapien
acaggggagatatggcccaaaccag

SEQ ID NO: 4067746 - DNA, 25 bp, Homo sapien
cacgtctacttgaagaatacctttt

SEQ ID NO: 4067747 - DNA, 25 bp, Homo sapien
tctcaggttagccacgtctacttga

SEQ ID NO: 4067748 - DNA, 25 bp, Homo sapien
caggttagccacgtctacttgaaga

SEQ ID NO: 4067749 - DNA, 25 bp, Homo sapien
tagccacgtctacttgaagaatacc

SEQ ID NO: 4067750 - DNA, 25 bp, Homo sapien
ggaatttcttgctcttgccttcctg

SEQ ID NO: 4067751 - DNA, 25 bp, Homo sapien
ctgttactggaatttcttgctcttg

SEQ ID NO: 4067752 - DNA, 25 bp, Homo sapien
tcttgctcttgccttcctgtttggt

SEQ ID NO: 4067753 - DNA, 25 bp, Homo sapien
tgttactggaatttcttgctcttgc

SEQ ID NO: 4067754 - DNA, 25 bp, Homo sapien
accacttctgatggttttggcaggg

SEQ ID NO: 4067755 - DNA, 25 bp, Homo sapien
caaccacttctgatggttttggcag

SEQ ID NO: 4067756 - DNA, 25 bp, Homo sapien
cttctgatggttttggcaggggcta

SEQ ID NO: 4067757 - DNA, 25 bp, Homo sapien
caggggctaggccctttcgtctttg

SEQ ID NO: 4067758 - DNA, 25 bp, Homo sapien
tagggttctcagattcaaagacttc

SEQ ID NO: 4067759 - DNA, 25 bp, Homo sapien
ggttctcagattcaaagacttctga

SEQ ID NO: 4067760 - DNA, 25 bp, Homo sapien
gggttctcagattcaaagacttctg

SEQ ID NO: 4067761 - DNA, 25 bp, Homo sapien
cctagggttctcagattcaaagact

SEQ ID NO: 4067762 - DNA, 25 bp, Homo sapien
gagctctgctgccattggtaaaagc

SEQ ID NO: 4067763 - DNA, 25 bp, Homo sapien
gctctgctgccattggtaaaagcca

SEQ ID NO: 4067764 - DNA, 25 bp, Homo sapien
atgagctctgctgccattggtaaaa

SEQ ID NO: 4067765 - DNA, 25 bp, Homo sapien
catgagctctgctgccattggtaaa

SEQ ID NO: 4067766 - DNA, 25 bp, Homo sapien
cacagatcacctcaagactttaggg

SEQ ID NO: 4067767 - DNA, 25 bp, Homo sapien
tagggcacagagaagaaggaacccc

SEQ ID NO: 4067768 - DNA, 25 bp, Homo sapien
gaggctcaaagatagctagggcaca

SEQ ID NO: 4067769 - DNA, 25 bp, Homo sapien
gcagcatgacaaacctgagggtaga

SEQ ID NO: 4067770 - DNA, 25 bp, Homo sapien
atgaacagaatccccttcatgcttc

SEQ ID NO: 4067771 - DNA, 25 bp, Homo sapien
catgaacagaatccccttcatgctt

SEQ ID NO: 4067772 - DNA, 25 bp, Homo sapien
tgaacagaatccccttcatgcttct

SEQ ID NO: 4067773 - DNA, 25 bp, Homo sapien
aaatccatgtcgctgacaagtcgca

SEQ ID NO: 4067774 - DNA, 25 bp, Homo sapien
caaacaaatccatgtcgctgacaag

SEQ ID NO: 4067775 - DNA, 25 bp, Homo sapien
tcgctgacaagtcgcagctacaagt

SEQ ID NO: 4067776 - DNA, 25 bp, Homo sapien
caagtcgcagctacaagtttagctt

SEQ ID NO: 4067777 - DNA, 25 bp, Homo sapien
agaggctagacgcacgcagacacac

SEQ ID NO: 4067778 - DNA, 25 bp, Homo sapien
caccttgatatccaaaatgcagtct

SEQ ID NO: 4067779 - DNA, 25 bp, Homo sapien
acacacaccttgatatccaaaatgc

SEQ ID NO: 4067780 - DNA, 25 bp, Homo sapien
ctgttgtagaggctagacgcacgca

SEQ ID NO: 4067781 - DNA, 25 bp, Homo sapien
tgccggttaattgttggctcccaaa

SEQ ID NO: 4067782 - DNA, 25 bp, Homo sapien
catgggaaggtggaacattctctgt

SEQ ID NO: 4067783 - DNA, 25 bp, Homo sapien
ccccgccgttaatttgacaggattg

SEQ ID NO: 4067784 - DNA, 25 bp, Homo sapien
ttgtttttctctcgcagtagcctgc

SEQ ID NO: 4067785 - DNA, 25 bp, Homo sapien
ccttgccggcttcagtctgacagca

SEQ ID NO: 4067786 - DNA, 25 bp, Homo sapien
gcaggatggtcacagcagttcctgg

SEQ ID NO: 4067787 - DNA, 25 bp, Homo sapien
agcaggatggtcacagcagttcctg

SEQ ID NO: 4067788 - DNA, 25 bp, Homo sapien
cctcccttgccggcttcagtctgac

SEQ ID NO: 4067789 - DNA, 25 bp, Homo sapien
gataaagacgaatattcaggagttg

SEQ ID NO: 4067790 - DNA, 25 bp, Homo sapien
ttgtagcagctgattgtggaatgct

SEQ ID NO: 4067791 - DNA, 25 bp, Homo sapien
ttcctccttgtgataaagacgaata

SEQ ID NO: 4067792 - DNA, 25 bp, Homo sapien
tattcaggagttgtagcagctgatt

SEQ ID NO: 4067793 - DNA, 25 bp, Homo sapien
ggacagatctgggtatcattgaaca

SEQ ID NO: 4067794 - DNA, 25 bp, Homo sapien
caattataccgatgtcatgaggcgt

SEQ ID NO: 4067795 - DNA, 25 bp, Homo sapien
gatgtaactatcagatgttcctgca

SEQ ID NO: 4067796 - DNA, 25 bp, Homo sapien
catgaggcgtgtcaatctcagcagg

SEQ ID NO: 4067797 - DNA, 25 bp, Homo sapien
aatatatgtcagaatgtttccccat

SEQ ID NO: 4067798 - DNA, 25 bp, Homo sapien
agaatatatgtcagaatgtttcccc

SEQ ID NO: 4067799 - DNA, 25 bp, Homo sapien
tttattccagaagaatatatgtcag

SEQ ID NO: 4067800 - DNA, 25 bp, Homo sapien
tattccagaagaatatatgtcagaa

SEQ ID NO: 4067801 - DNA, 25 bp, Homo sapien
tgagagctgttcacccatcagtaaa

SEQ ID NO: 4067802 - DNA, 25 bp, Homo sapien
taggtttccacaagccacagtggcc

SEQ ID NO: 4067803 - DNA, 25 bp, Homo sapien
gatcatgggttcatatacatcgaaa

SEQ ID NO: 4067804 - DNA, 25 bp, Homo sapien
gctgagtgggtattaaagtcaccaa

SEQ ID NO: 4067805 - DNA, 25 bp, Homo sapien
gccctggctcaaatgagcttttata

SEQ ID NO: 4067806 - DNA, 25 bp, Homo sapien
ggcaggaccagttaaagcagaacgt

SEQ ID NO: 4067807 - DNA, 25 bp, Homo sapien
gatgcacgggtgtataacagaaatg

SEQ ID NO: 4067808 - DNA, 25 bp, Homo sapien
gatagaaaactgtttggcaggacca

SEQ ID NO: 4067809 - DNA, 25 bp, Homo sapien
gcaacaatataagtggatctcgcct

SEQ ID NO: 4067810 - DNA, 25 bp, Homo sapien
cttcagaattgccttaggaagacgt

SEQ ID NO: 4067811 - DNA, 25 bp, Homo sapien
gggaagtgtgttcttatgttgcttt

SEQ ID NO: 4067812 - DNA, 25 bp, Homo sapien
attgccttaggaagacgttctttca

SEQ ID NO: 4067813 - DNA, 25 bp, Homo sapien
cttaggaagacgttctttcactggg

SEQ ID NO: 4067814 - DNA, 25 bp, Homo sapien
gctgatctgcttgtgccttgatgtt

SEQ ID NO: 4067815 - DNA, 25 bp, Homo sapien
atctgctgatctgcttgtgccttga

SEQ ID NO: 4067816 - DNA, 25 bp, Homo sapien
actgaatctgctgatctgcttgtgc

SEQ ID NO: 4067817 - DNA, 25 bp, Homo sapien
gaatctgctgatctgcttgtgcctt

SEQ ID NO: 4067818 - DNA, 25 bp, Homo sapien
ggttttgacaattgctacaagggaa

SEQ ID NO: 4067819 - DNA, 25 bp, Homo sapien
tggttttgacaattgctacaaggga

SEQ ID NO: 4067820 - DNA, 25 bp, Homo sapien
tttgacaattgctacaagggaataa

SEQ ID NO: 4067821 - DNA, 25 bp, Homo sapien
gttttgacaattgctacaagggaat

SEQ ID NO: 4067822 - DNA, 25 bp, Homo sapien
agtgataagcttgcaacgttctgag

SEQ ID NO: 4067823 - DNA, 25 bp, Homo sapien
tgcttcaatgactcaacctgctttg

SEQ ID NO: 4067824 - DNA, 25 bp, Homo sapien
gaggctaagcttggcgacaccagct

SEQ ID NO: 4067825 - DNA, 25 bp, Homo sapien
tccctcctcatagtggagacaggag

SEQ ID NO: 4067826 - DNA, 25 bp, Homo sapien
ccgccattccggcagtgaaagggat

SEQ ID NO: 4067827 - DNA, 25 bp, Homo sapien
cattccggcagtgaaagggatggat

SEQ ID NO: 4067828 - DNA, 25 bp, Homo sapien
ttatcccgccattccggcagtgaaa

SEQ ID NO: 4067829 - DNA, 25 bp, Homo sapien
tatcccgccattccggcagtgaaag

SEQ ID NO: 4067830 - DNA, 25 bp, Homo sapien
tccctgaagttagcgacttccatag

SEQ ID NO: 4067831 - DNA, 25 bp, Homo sapien
tggcaaagtgttctccctggtccct

SEQ ID NO: 4067832 - DNA, 25 bp, Homo sapien
ttttgaatgcctagctgaggaaggg

SEQ ID NO: 4067833 - DNA, 25 bp, Homo sapien
gcttaaatgtaagtccaactggcca

SEQ ID NO: 4067834 - DNA, 25 bp, Homo sapien
gtttctgtacatagcatgtcccttg

SEQ ID NO: 4067835 - DNA, 25 bp, Homo sapien
catgtcccttgagtagcaatgatac

SEQ ID NO: 4067836 - DNA, 25 bp, Homo sapien
agcaatgatacattctttggatcaa

SEQ ID NO: 4067837 - DNA, 25 bp, Homo sapien
tagtcttgtttctgtacatagcatg

SEQ ID NO: 4067838 - DNA, 25 bp, Homo sapien
agttttgcatgacactgagagaagg

SEQ ID NO: 4067839 - DNA, 25 bp, Homo sapien
ctgcaaagttttgcatgacactgag

SEQ ID NO: 4067840 - DNA, 25 bp, Homo sapien
catgacactgagagaaggagcaacc

SEQ ID NO: 4067841 - DNA, 25 bp, Homo sapien
actgagagaaggagcaaccaaagga

SEQ ID NO: 4067842 - DNA, 25 bp, Homo sapien
tctccaagatgcgagggaactgtag

SEQ ID NO: 4067843 - DNA, 25 bp, Homo sapien
gtcttctccaagatgcgagggaact

SEQ ID NO: 4067844 - DNA, 25 bp, Homo sapien
gatgcgagggaactgtagcagtcca

SEQ ID NO: 4067845 - DNA, 25 bp, Homo sapien
caagatgcgagggaactgtagcagt

SEQ ID NO: 4067846 - DNA, 25 bp, Homo sapien
acagcaaaagcagccttaaggcaga

SEQ ID NO: 4067847 - DNA, 25 bp, Homo sapien
tcaagctgtgtttaggaaactccac

SEQ ID NO: 4067848 - DNA, 25 bp, Homo sapien
gccttaaggcagaatttgccattca

SEQ ID NO: 4067849 - DNA, 25 bp, Homo sapien
gaaactccaccttcatggcatctgc

SEQ ID NO: 4067850 - DNA, 25 bp, Homo sapien
ggacactcatgggtagtcatagcca

SEQ ID NO: 4067851 - DNA, 25 bp, Homo sapien
gcttcacggttgtgtgcacatcaca

SEQ ID NO: 4067852 - DNA, 25 bp, Homo sapien
ttctgaaggtgctttctgatatcac

SEQ ID NO: 4067853 - DNA, 25 bp, Homo sapien
gttccatctcaaattgcttcacggt

SEQ ID NO: 4067854 - DNA, 25 bp, Homo sapien
ttctcagtgccatcaagggacccac

SEQ ID NO: 4067855 - DNA, 25 bp, Homo sapien
cccacaagggctcagaacatcactg

SEQ ID NO: 4067856 - DNA, 25 bp, Homo sapien
tcagtgccatcaagggacccacaag

SEQ ID NO: 4067857 - DNA, 25 bp, Homo sapien
agggacccacaagggctcagaacat

SEQ ID NO: 4067858 - DNA, 25 bp, Homo sapien
gaagaagaggcaatcaacatccagc

SEQ ID NO: 4067859 - DNA, 25 bp, Homo sapien
gaagaggcaatcaacatccagcctt

SEQ ID NO: 4067860 - DNA, 25 bp, Homo sapien
agaggcaatcaacatccagcctttt

SEQ ID NO: 4067861 - DNA, 25 bp, Homo sapien
aggaagaagaggcaatcaacatcca

SEQ ID NO: 4067862 - DNA, 25 bp, Homo sapien
cagcagcccagatattctccggaac

SEQ ID NO: 4067863 - DNA, 25 bp, Homo sapien
cagcccagatattctccggaaccat

SEQ ID NO: 4067864 - DNA, 25 bp, Homo sapien
acagcagcccagatattctccggaa

SEQ ID NO: 4067865 - DNA, 25 bp, Homo sapien
gcagcccagatattctccggaacca

SEQ ID NO: 4067866 - DNA, 25 bp, Homo sapien
tgttcttctttatggtgaccaatgg

SEQ ID NO: 4067867 - DNA, 25 bp, Homo sapien
cccatgaagaggctagatgaagcct

SEQ ID NO: 4067868 - DNA, 25 bp, Homo sapien
gaggctagatgaagcctgataatgc

SEQ ID NO: 4067869 - DNA, 25 bp, Homo sapien
tctttatggtgaccaatggcccatc

SEQ ID NO: 4067870 - DNA, 25 bp, Homo sapien
aaggcagcacggcacttgcaagaag

SEQ ID NO: 4067871 - DNA, 25 bp, Homo sapien
aatgacttgaagcaaggcagcacgg

SEQ ID NO: 4067872 - DNA, 25 bp, Homo sapien
cacttgcaagaagtactttatggcg

SEQ ID NO: 4067873 - DNA, 25 bp, Homo sapien
gtactttatggcgatttctctggca

SEQ ID NO: 4067874 - DNA, 25 bp, Homo sapien
cagtgttgacagatggcttgatggt

SEQ ID NO: 4067875 - DNA, 25 bp, Homo sapien
ctcacttaggaaggcgcaccctgag

SEQ ID NO: 4067876 - DNA, 25 bp, Homo sapien
gagaaacccaacaggccagtgttga

SEQ ID NO: 4067877 - DNA, 25 bp, Homo sapien
ctgcctgtctgagccaatccgctga

SEQ ID NO: 4067878 - DNA, 25 bp, Homo sapien
caggctggcttggaccttcccagtt

SEQ ID NO: 4067879 - DNA, 25 bp, Homo sapien
gttctgatgctggttcctcatcaga

SEQ ID NO: 4067880 - DNA, 25 bp, Homo sapien
gagttctgatgctggttcctcatca

SEQ ID NO: 4067881 - DNA, 25 bp, Homo sapien
tggagttctgatgctggttcctcat

SEQ ID NO: 4067882 - DNA, 25 bp, Homo sapien
ctttcaggaacttcttgtttcatgg

SEQ ID NO: 4067883 - DNA, 25 bp, Homo sapien
tccattcatgtctcttgttcagcaa

SEQ ID NO: 4067884 - DNA, 25 bp, Homo sapien
ttcatggatgacatccattcatgtc

SEQ ID NO: 4067885 - DNA, 25 bp, Homo sapien
tcatgtctcttgttcagcaaatcca

SEQ ID NO: 4067886 - DNA, 25 bp, Homo sapien
ttgggcctccacgtgtaaaaactca

SEQ ID NO: 4067887 - DNA, 25 bp, Homo sapien
gattaatttcatctggatcctttgg

SEQ ID NO: 4067888 - DNA, 25 bp, Homo sapien
caagaagatcttgaaattctgcagc

SEQ ID NO: 4067889 - DNA, 25 bp, Homo sapien
aaggtatacatgtcagaaataacac

SEQ ID NO: 4067890 - DNA, 25 bp, Homo sapien
ttgaaaagtttgtcgtacatcctgt

SEQ ID NO: 4067891 - DNA, 25 bp, Homo sapien
tgaaaagtttgtcgtacatcctgtt

SEQ ID NO: 4067892 - DNA, 25 bp, Homo sapien
gaaaagtttgtcgtacatcctgttc

SEQ ID NO: 4067893 - DNA, 25 bp, Homo sapien
tttgaaaagtttgtcgtacatcctg

SEQ ID NO: 4067894 - DNA, 25 bp, Homo sapien
tgaaagtacttttaagcatgccatt

SEQ ID NO: 4067895 - DNA, 25 bp, Homo sapien
gctactctgatttttgaggcaaaga

SEQ ID NO: 4067896 - DNA, 25 bp, Homo sapien
gaaagtacttttaagcatgccatta

SEQ ID NO: 4067897 - DNA, 25 bp, Homo sapien
tcatagacctctgtgcttttaattg

SEQ ID NO: 4067898 - DNA, 25 bp, Homo sapien
gaacatcagaggcaaaggtgtcagc

SEQ ID NO: 4067899 - DNA, 25 bp, Homo sapien
aacatcagaggcaaaggtgtcagca

SEQ ID NO: 4067900 - DNA, 25 bp, Homo sapien
acatcagaggcaaaggtgtcagcaa

SEQ ID NO: 4067901 - DNA, 25 bp, Homo sapien
atgaacatcagaggcaaaggtgtca

SEQ ID NO: 4067902 - DNA, 25 bp, Homo sapien
catcctgcaaactcttgccgtgcat

SEQ ID NO: 4067903 - DNA, 25 bp, Homo sapien
ctcatcctgcaaactcttgccgtgc

SEQ ID NO: 4067904 - DNA, 25 bp, Homo sapien
ctttctccactatgaccagctcatc

SEQ ID NO: 4067905 - DNA, 25 bp, Homo sapien
cactatgaccagctcatcctgcaaa

SEQ ID NO: 4067906 - DNA, 25 bp, Homo sapien
tcattactccatcaatatctaattt

SEQ ID NO: 4067907 - DNA, 25 bp, Homo sapien
ttactccatcaatatctaatttgca

SEQ ID NO: 4067908 - DNA, 25 bp, Homo sapien
actccatcaatatctaatttgcata

SEQ ID NO: 4067909 - DNA, 25 bp, Homo sapien
cattactccatcaatatctaatttg

SEQ ID NO: 4067910 - DNA, 25 bp, Homo sapien
tagcccatttgtaccagtgctgtct

SEQ ID NO: 4067911 - DNA, 25 bp, Homo sapien
agcccatttgtaccagtgctgtctg

SEQ ID NO: 4067912 - DNA, 25 bp, Homo sapien
cccatttgtaccagtgctgtctggc

SEQ ID NO: 4067913 - DNA, 25 bp, Homo sapien
ttagcccatttgtaccagtgctgtc

SEQ ID NO: 4067914 - DNA, 25 bp, Homo sapien
gacatcacttcctcgaacaagagta

SEQ ID NO: 4067915 - DNA, 25 bp, Homo sapien
cacgaagtggctgctgtgacaccag

SEQ ID NO: 4067916 - DNA, 25 bp, Homo sapien
caagagtattcatgtgacaagtctc

SEQ ID NO: 4067917 - DNA, 25 bp, Homo sapien
caatggtcacattaggcatcagaaa

SEQ ID NO: 4067918 - DNA, 25 bp, Homo sapien
tttccaagaaagggcctggttctgc

SEQ ID NO: 4067919 - DNA, 25 bp, Homo sapien
ctacactctgagattgtggtggggt

SEQ ID NO: 4067920 - DNA, 25 bp, Homo sapien
tggggtgtaggtgaccatcagggta

SEQ ID NO: 4067921 - DNA, 25 bp, Homo sapien
tccattggcaccccctggtcagttt

SEQ ID NO: 4067922 - DNA, 25 bp, Homo sapien
taagcacagttcaaaccagggcaat

SEQ ID NO: 4067923 - DNA, 25 bp, Homo sapien
tcagtagtgatagaaccattgtcgt

SEQ ID NO: 4067924 - DNA, 25 bp, Homo sapien
ccagggcaattacaatgagaacaaa

SEQ ID NO: 4067925 - DNA, 25 bp, Homo sapien
gcaaagatttagcagctgagccatg

SEQ ID NO: 4067926 - DNA, 25 bp, Homo sapien
acagataccaaggacacatattcca

SEQ ID NO: 4067927 - DNA, 25 bp, Homo sapien
aaactctggtgttagcaggaaaact

SEQ ID NO: 4067928 - DNA, 25 bp, Homo sapien
gacgcaccctccttggctgaaactc

SEQ ID NO: 4067929 - DNA, 25 bp, Homo sapien
tattccaaaggtggaatacgtccca

SEQ ID NO: 4067930 - DNA, 25 bp, Homo sapien
gaactggcagcccatcgaagggtca

SEQ ID NO: 4067931 - DNA, 25 bp, Homo sapien
catcgaagggtcatggtaatgcctg

SEQ ID NO: 4067932 - DNA, 25 bp, Homo sapien
cagcccatcgaagggtcatggtaat

SEQ ID NO: 4067933 - DNA, 25 bp, Homo sapien
gggtcatggtaatgcctgtaaaacc

SEQ ID NO: 4067934 - DNA, 25 bp, Homo sapien
tcgagtatgaaatccattgtactgg

SEQ ID NO: 4067935 - DNA, 25 bp, Homo sapien
caatttcctcagttcttcgagtatg

SEQ ID NO: 4067936 - DNA, 25 bp, Homo sapien
taaccttctgctaatattatcctgg

SEQ ID NO: 4067937 - DNA, 25 bp, Homo sapien
tactggttggcttggtgacactcaa

SEQ ID NO: 4067938 - DNA, 25 bp, Homo sapien
tctgggattctgctctggctcaaag

SEQ ID NO: 4067939 - DNA, 25 bp, Homo sapien
tcaacacctgaatccaatgctctca

SEQ ID NO: 4067940 - DNA, 25 bp, Homo sapien
aagtcaacacctgaatccaatgctc

SEQ ID NO: 4067941 - DNA, 25 bp, Homo sapien
aaagtcaacacctgaatccaatgct

SEQ ID NO: 4067942 - DNA, 25 bp, Homo sapien
gcacaggcaacgtcaaaagactgct

SEQ ID NO: 4067943 - DNA, 25 bp, Homo sapien
ccaagcacaggcaacgtcaaaagac

SEQ ID NO: 4067944 - DNA, 25 bp, Homo sapien
caggcaacgtcaaaagactgcttct

SEQ ID NO: 4067945 - DNA, 25 bp, Homo sapien
aacgtcaaaagactgcttctcctcc

SEQ ID NO: 4067946 - DNA, 25 bp, Homo sapien
ccttgtaagtggtgtatgcaatctt

SEQ ID NO: 4067947 - DNA, 25 bp, Homo sapien
agttaaataggctcatctttccctg

SEQ ID NO: 4067948 - DNA, 25 bp, Homo sapien
attgggttctgcattccctcctcca

SEQ ID NO: 4067949 - DNA, 25 bp, Homo sapien
gataacaaccgtctgccatcgaggg

SEQ ID NO: 4067950 - DNA, 25 bp, Homo sapien
tggcctttgcccaccaacaatgggt

SEQ ID NO: 4067951 - DNA, 25 bp, Homo sapien
tgccagcctgtcttacagacctctt

SEQ ID NO: 4067952 - DNA, 25 bp, Homo sapien
tcatgttctaaacaaacgaagtttc

SEQ ID NO: 4067953 - DNA, 25 bp, Homo sapien
cttacagacctcttcaagctctcag

SEQ ID NO: 4067954 - DNA, 25 bp, Homo sapien
aaagtcttcagatacagaggcccat

SEQ ID NO: 4067955 - DNA, 25 bp, Homo sapien
taaacaccgataaagtcttcagata

SEQ ID NO: 4067956 - DNA, 25 bp, Homo sapien
caccgataaagtcttcagatacaga

SEQ ID NO: 4067957 - DNA, 25 bp, Homo sapien
agataaacaccgataaagtcttcag

SEQ ID NO: 4067958 - DNA, 25 bp, Homo sapien
tggtaggcaaaacctggcccagtcc

SEQ ID NO: 4067959 - DNA, 25 bp, Homo sapien
aaccgtgcctttatggacagcatgg

SEQ ID NO: 4067960 - DNA, 25 bp, Homo sapien
agcatggtaggcaaaacctggccca

SEQ ID NO: 4067961 - DNA, 25 bp, Homo sapien
aacagaagtcaaccgtgcctttatg

SEQ ID NO: 4067962 - DNA, 25 bp, Homo sapien
gggaagacccctgtatactcaatgg

SEQ ID NO: 4067963 - DNA, 25 bp, Homo sapien
gaacctactgggcatcacgtcacta

SEQ ID NO: 4067964 - DNA, 25 bp, Homo sapien
cacgtcactaaagcaggtctttggg

SEQ ID NO: 4067965 - DNA, 25 bp, Homo sapien
aagggaagacccctgtatactcaat

SEQ ID NO: 4067966 - DNA, 25 bp, Homo sapien
tttgcttccatggtaatcagtgtcc

SEQ ID NO: 4067967 - DNA, 25 bp, Homo sapien
cttacgaccaagctgtggacacatt

SEQ ID NO: 4067968 - DNA, 25 bp, Homo sapien
ccatggtaatcagtgtccaggaccc

SEQ ID NO: 4067969 - DNA, 25 bp, Homo sapien
tgtggacacatttgcttccatggta

SEQ ID NO: 4067970 - DNA, 25 bp, Homo sapien
gatttcctaacttctgtgagcatgc

SEQ ID NO: 4067971 - DNA, 25 bp, Homo sapien
caggctcgtgggtactgtttacaaa

SEQ ID NO: 4067972 - DNA, 25 bp, Homo sapien
gaatgttggccactctatagctgta

SEQ ID NO: 4067973 - DNA, 25 bp, Homo sapien
ggaccctgccatggataccagactc

SEQ ID NO: 4067974 - DNA, 25 bp, Homo sapien
caagaagttcaatttggccatagct

SEQ ID NO: 4067975 - DNA, 25 bp, Homo sapien
gatctcttgtcaattccttggatgg

SEQ ID NO: 4067976 - DNA, 25 bp, Homo sapien
cattttacaagcgaggacaccgact

SEQ ID NO: 4067977 - DNA, 25 bp, Homo sapien
ccttggatggagtcggtaagacctt

SEQ ID NO: 4067978 - DNA, 25 bp, Homo sapien
gcatgctggcagtaggggacccaaa

SEQ ID NO: 4067979 - DNA, 25 bp, Homo sapien
tgtaaatgtggacatccctgaggaa

SEQ ID NO: 4067980 - DNA, 25 bp, Homo sapien
tcaaccatccctaagcttcctattg

SEQ ID NO: 4067981 - DNA, 25 bp, Homo sapien
agattccagcccattgtacctacag

SEQ ID NO: 4067982 - DNA, 25 bp, Homo sapien
tgagggacttgatcctgcatcacca

SEQ ID NO: 4067983 - DNA, 25 bp, Homo sapien
tagtatcttcggaggaggcacaaac

SEQ ID NO: 4067984 - DNA, 25 bp, Homo sapien
cagctttagagccaggattgtcatc

SEQ ID NO: 4067985 - DNA, 25 bp, Homo sapien
catccttggagaccatgtccttaaa

SEQ ID NO: 4067986 - DNA, 25 bp, Homo sapien
agacaccagggtttgattcttctgg

SEQ ID NO: 4067987 - DNA, 25 bp, Homo sapien
aaagctgggtacttttccactggct

SEQ ID NO: 4067988 - DNA, 25 bp, Homo sapien
ttctgggatctctgaacagtaggta

SEQ ID NO: 4067989 - DNA, 25 bp, Homo sapien
aagctgggtacttttccactggctt

SEQ ID NO: 4067990 - DNA, 25 bp, Homo sapien
ccaaaagtttgcttgtgtacctgtg

SEQ ID NO: 4067991 - DNA, 25 bp, Homo sapien
gtttgcttgtgtacctgtgggccat

SEQ ID NO: 4067992 - DNA, 25 bp, Homo sapien
agaccaaaagtttgcttgtgtacct

SEQ ID NO: 4067993 - DNA, 25 bp, Homo sapien
aaagtttgcttgtgtacctgtgggc

SEQ ID NO: 4067994 - DNA, 25 bp, Homo sapien
tgttcttttaagatccaaagcggtc

SEQ ID NO: 4067995 - DNA, 25 bp, Homo sapien
ttaagatccaaagcggtcagaagaa

SEQ ID NO: 4067996 - DNA, 25 bp, Homo sapien
gatcaagattcaacaagctaagctg

SEQ ID NO: 4067997 - DNA, 25 bp, Homo sapien
tctcctgatggtcaaggcattctct

SEQ ID NO: 4067998 - DNA, 25 bp, Homo sapien
tcaccaacgatagagaacttaacaa

SEQ ID NO: 4067999 - DNA, 25 bp, Homo sapien
gaaaaccacacatagtacaactgca

SEQ ID NO: 4068000 - DNA, 25 bp, Homo sapien
gataggtgaagaattcaacatccct

SEQ ID NO: 4068001 - DNA, 25 bp, Homo sapien
tgtatgcacgaaaagatagagctgc

SEQ ID NO: 4068002 - DNA, 25 bp, Homo sapien
cagtgggccaaatatgtcagtggtc

SEQ ID NO: 4068003 - DNA, 25 bp, Homo sapien
caccggagttgcattaagttcccca

SEQ ID NO: 4068004 - DNA, 25 bp, Homo sapien
aaaactaatgcaatgggcaccggag

SEQ ID NO: 4068005 - DNA, 25 bp, Homo sapien
gtagccagacccctcaagttcaagt

SEQ ID NO: 4068006 - DNA, 25 bp, Homo sapien
tatgccagggactgcccactgaatc

SEQ ID NO: 4068007 - DNA, 25 bp, Homo sapien
tagattctgtgacccctatgccagg

SEQ ID NO: 4068008 - DNA, 25 bp, Homo sapien
aaattgtgtgattggcgtctgggac

SEQ ID NO: 4068009 - DNA, 25 bp, Homo sapien
gaagacaatgcccagtgatgatggg

SEQ ID NO: 4068010 - DNA, 25 bp, Homo sapien
taattttgggggtatgcatatgcat

SEQ ID NO: 4068011 - DNA, 25 bp, Homo sapien
cctttagccaagtctgctgtggaaa

SEQ ID NO: 4068012 - DNA, 25 bp, Homo sapien
ttgttttggcaggaggtgattgatt

SEQ ID NO: 4068013 - DNA, 25 bp, Homo sapien
aaggtcttgtgtacacagatttgtt

SEQ ID NO: 4068014 - DNA, 25 bp, Homo sapien
tcttcaaagtcccactagcacattg

SEQ ID NO: 4068015 - DNA, 25 bp, Homo sapien
ggactccataactgtttactgaatt

SEQ ID NO: 4068016 - DNA, 25 bp, Homo sapien
gcatacatcattacgtaggtcagaa

SEQ ID NO: 4068017 - DNA, 25 bp, Homo sapien
agagaggcttcttgtgcatacatca

SEQ ID NO: 4068018 - DNA, 25 bp, Homo sapien
gagccaggctttacttgagaaggaa

SEQ ID NO: 4068019 - DNA, 25 bp, Homo sapien
gaaagcctttccaggaacctctggc

SEQ ID NO: 4068020 - DNA, 25 bp, Homo sapien
cccatgttcatgtcaggaggaagaa

SEQ ID NO: 4068021 - DNA, 25 bp, Homo sapien
aactagaactcgctccaagtggagg

SEQ ID NO: 4068022 - DNA, 25 bp, Homo sapien
ggacaccctaccatgatggctcagg

SEQ ID NO: 4068023 - DNA, 25 bp, Homo sapien
taaggcagcagtagacctcaggcat

SEQ ID NO: 4068024 - DNA, 25 bp, Homo sapien
caaattcaaggcctctcaggtctgc

SEQ ID NO: 4068025 - DNA, 25 bp, Homo sapien
gtctggtggcaaagtcctatatcaa

SEQ ID NO: 4068026 - DNA, 25 bp, Homo sapien
tatcagatcacatcactttggcaaa

SEQ ID NO: 4068027 - DNA, 25 bp, Homo sapien
tcataaaaccttctatcagatcaca

SEQ ID NO: 4068028 - DNA, 25 bp, Homo sapien
tctgcacagtagacaacgtgggctt

SEQ ID NO: 4068029 - DNA, 25 bp, Homo sapien
actggtctccctacggttcctcttg

SEQ ID NO: 4068030 - DNA, 25 bp, Homo sapien
tacaatttgctctagacagtcagga

SEQ ID NO: 4068031 - DNA, 25 bp, Homo sapien
tcagaacaaatgatggaccagcagc

SEQ ID NO: 4068032 - DNA, 25 bp, Homo sapien
ggatacaggcttgggactacacagt

SEQ ID NO: 4068033 - DNA, 25 bp, Homo sapien
gagtgctgaccttacccagaatgga

SEQ ID NO: 4068034 - DNA, 25 bp, Homo sapien
aaattggcaccaaaccagtatgcta

SEQ ID NO: 4068035 - DNA, 25 bp, Homo sapien
aatttactgatcctaatggtaaggc

SEQ ID NO: 4068036 - DNA, 25 bp, Homo sapien
tcgaaaaaagattaacctgctctcc

SEQ ID NO: 4068037 - DNA, 25 bp, Homo sapien
tacatgcaagacaaccccaaatggt

SEQ ID NO: 4068038 - DNA, 25 bp, Homo sapien
catttgggcaaaagcaggtgtctcc

SEQ ID NO: 4068039 - DNA, 25 bp, Homo sapien
cccataagatgctgagagtgagcca

SEQ ID NO: 4068040 - DNA, 25 bp, Homo sapien
tctggctgaaggagaggtttcccct

SEQ ID NO: 4068041 - DNA, 25 bp, Homo sapien
catctaagggttttggaaagctcac

SEQ ID NO: 4068042 - DNA, 25 bp, Homo sapien
ggaaaagattcagacctccagacag

SEQ ID NO: 4068043 - DNA, 25 bp, Homo sapien
cactgatcacatggaagcaacagac

SEQ ID NO: 4068044 - DNA, 25 bp, Homo sapien
aacagactgcaggatccaagttcag

SEQ ID NO: 4068045 - DNA, 25 bp, Homo sapien
tctctgtagttaatccagggacttg

SEQ ID NO: 4068046 - DNA, 25 bp, Homo sapien
cattgctagaatgcaccaaacggca

SEQ ID NO: 4068047 - DNA, 25 bp, Homo sapien
tcattcaggctaagagggcccttta

SEQ ID NO: 4068048 - DNA, 25 bp, Homo sapien
cgttttacacagaggtgcagcgcta

SEQ ID NO: 4068049 - DNA, 25 bp, Homo sapien
cagtatgctattctcaggtagggcc

SEQ ID NO: 4068050 - DNA, 25 bp, Homo sapien
gagccctgggaagatacagccttgg

SEQ ID NO: 4068051 - DNA, 25 bp, Homo sapien
gatggccaagtctccaagtcagagg

SEQ ID NO: 4068052 - DNA, 25 bp, Homo sapien
cacagatttgcgtcggaaaggagac

SEQ ID NO: 4068053 - DNA, 25 bp, Homo sapien
ggaccgtcatggtgcatttcagcaa

SEQ ID NO: 4068054 - DNA, 25 bp, Homo sapien
tcataaattttgtcctgcaggtagc

SEQ ID NO: 4068055 - DNA, 25 bp, Homo sapien
tctcgttcacgtcttccagcactga

SEQ ID NO: 4068056 - DNA, 25 bp, Homo sapien
cagagctgcttgagcatgaggcatt

SEQ ID NO: 4068057 - DNA, 25 bp, Homo sapien
ggaagctccgcacgaggcatttgga

SEQ ID NO: 4068058 - DNA, 25 bp, Homo sapien
aagacctgcgacaccagccccctgc

SEQ ID NO: 4068059 - DNA, 25 bp, Homo sapien
ggatgccatctccttgacccgcagc

SEQ ID NO: 4068060 - DNA, 25 bp, Homo sapien
ccttgacccgcagcatgacctcctg

SEQ ID NO: 4068061 - DNA, 25 bp, Homo sapien
gacccgcagcatgacctcctggctg

SEQ ID NO: 4068062 - DNA, 25 bp, Homo sapien
tagggcgtctggaaccaggccttct

SEQ ID NO: 4068063 - DNA, 25 bp, Homo sapien
cagccagcaggcgtgaggcggatgg

SEQ ID NO: 4068064 - DNA, 25 bp, Homo sapien
cggcccattgatggccaccacgata

SEQ ID NO: 4068065 - DNA, 25 bp, Homo sapien
ttctcactggcccacacgatgtcac

SEQ ID NO: 4068066 - DNA, 25 bp, Homo sapien
ccccaagtcttatcaaaagttgtgg

SEQ ID NO: 4068067 - DNA, 25 bp, Homo sapien
tatactgggatcagattcaactgcg

SEQ ID NO: 4068068 - DNA, 25 bp, Homo sapien
actgcgagaagtctacttaatgttc

SEQ ID NO: 4068069 - DNA, 25 bp, Homo sapien
caaaagttgtggatatcataatgat

SEQ ID NO: 4068070 - DNA, 25 bp, Homo sapien
tcagctccatcaaccacatgacatc

SEQ ID NO: 4068071 - DNA, 25 bp, Homo sapien
aaccacatgacatccttcaggaatg

SEQ ID NO: 4068072 - DNA, 25 bp, Homo sapien
tggactgcagcccttgtgactttcc

SEQ ID NO: 4068073 - DNA, 25 bp, Homo sapien
gacatccttcaggaatggactgcag

SEQ ID NO: 4068074 - DNA, 25 bp, Homo sapien
gggccctgcagctccgatatctgat

SEQ ID NO: 4068075 - DNA, 25 bp, Homo sapien
gatctctatcactgggagccaagca

SEQ ID NO: 4068076 - DNA, 25 bp, Homo sapien
ccaagcagcaaacaggatattgcat

SEQ ID NO: 4068077 - DNA, 25 bp, Homo sapien
tatctgatccttctgcgatggcggg

SEQ ID NO: 4068078 - DNA, 25 bp, Homo sapien
tggacaaccggccaattaggtagga

SEQ ID NO: 4068079 - DNA, 25 bp, Homo sapien
taggaataatccaggccgctgcaga

SEQ ID NO: 4068080 - DNA, 25 bp, Homo sapien
aatccgagtgctctcctttcgccgg

SEQ ID NO: 4068081 - DNA, 25 bp, Homo sapien
tctgtggctgcgttgcagagcgctc

SEQ ID NO: 4068082 - DNA, 25 bp, Homo sapien
tcaaatgcaaccaccttcaagggag

SEQ ID NO: 4068083 - DNA, 25 bp, Homo sapien
cctcaagagaagactggacctagca

SEQ ID NO: 4068084 - DNA, 25 bp, Homo sapien
aaactcccttgtagaatgtgcacct

SEQ ID NO: 4068085 - DNA, 25 bp, Homo sapien
tggatccggcgtgggtttacaccca

SEQ ID NO: 4068086 - DNA, 25 bp, Homo sapien
gcaaattgcgcgctgcagtcaagtt

SEQ ID NO: 4068087 - DNA, 25 bp, Homo sapien
tatgcacgctagttaccatcctcag

SEQ ID NO: 4068088 - DNA, 25 bp, Homo sapien
caaagtttagctggaaaagcccaag

SEQ ID NO: 4068089 - DNA, 25 bp, Homo sapien
tctgcggccaacaaatatgacatgc

SEQ ID NO: 4068090 - DNA, 25 bp, Homo sapien
caggtgtcagggcattgttatccga

SEQ ID NO: 4068091 - DNA, 25 bp, Homo sapien
tccgaggtctgactggacagcagga

SEQ ID NO: 4068092 - DNA, 25 bp, Homo sapien
caggatgtgcgtgaacccttcttcc

SEQ ID NO: 4068093 - DNA, 25 bp, Homo sapien
gatgtctcgaaaccgacagttgctt

SEQ ID NO: 4068094 - DNA, 25 bp, Homo sapien
aagacgtagtccttctccgcttcca

SEQ ID NO: 4068095 - DNA, 25 bp, Homo sapien
ctggactgtgcaggttcaatccccc

SEQ ID NO: 4068096 - DNA, 25 bp, Homo sapien
agacgtagtccttctccgcttccag

SEQ ID NO: 4068097 - DNA, 25 bp, Homo sapien
tgcaggttcaatcccccgttggtca

SEQ ID NO: 4068098 - DNA, 25 bp, Homo sapien
cttccaaaaccagataaacaatgta

SEQ ID NO: 4068099 - DNA, 25 bp, Homo sapien
ccaaaaccagataaacaatgtaaga

SEQ ID NO: 4068100 - DNA, 25 bp, Homo sapien
tccaaaaccagataaacaatgtaag

SEQ ID NO: 4068101 - DNA, 25 bp, Homo sapien
caaaaccagataaacaatgtaagaa

SEQ ID NO: 4068102 - DNA, 25 bp, Homo sapien
gatttccaatggaaaggtttggatg

SEQ ID NO: 4068103 - DNA, 25 bp, Homo sapien
ccaatggaaaggtttggatgtgctg

SEQ ID NO: 4068104 - DNA, 25 bp, Homo sapien
aggatgtgatcagaggacgttggga

SEQ ID NO: 4068105 - DNA, 25 bp, Homo sapien
gatcagaggacgttgggatttccaa

SEQ ID NO: 4068106 - DNA, 25 bp, Homo sapien
cttctcccctgtgccaccctctgtt

SEQ ID NO: 4068107 - DNA, 25 bp, Homo sapien
accttctcccctgtgccaccctctg

SEQ ID NO: 4068108 - DNA, 25 bp, Homo sapien
ccttctcccctgtgccaccctctgt

SEQ ID NO: 4068109 - DNA, 25 bp, Homo sapien
caccttctcccctgtgccaccctct

SEQ ID NO: 4068110 - DNA, 25 bp, Homo sapien
ggccctgaggccatcttaccaaata

SEQ ID NO: 4068111 - DNA, 25 bp, Homo sapien
tgggctcgcctctccgataaactta

SEQ ID NO: 4068112 - DNA, 25 bp, Homo sapien
aaataagccatgaaactagcagagg

SEQ ID NO: 4068113 - DNA, 25 bp, Homo sapien
ggtctttccattagcgcaacagggt

SEQ ID NO: 4068114 - DNA, 25 bp, Homo sapien
agcagtcctcgaggtccctctcctt

SEQ ID NO: 4068115 - DNA, 25 bp, Homo sapien
agtcctcgaggtccctctccttcag

SEQ ID NO: 4068116 - DNA, 25 bp, Homo sapien
gcttcccgagtgacagcaacaagct

SEQ ID NO: 4068117 - DNA, 25 bp, Homo sapien
tcccgagtgacagcaacaagctggc

SEQ ID NO: 4068118 - DNA, 25 bp, Homo sapien
cgagtgacagcaacaagctggcagg

SEQ ID NO: 4068119 - DNA, 25 bp, Homo sapien
gacagcaacaagctggcagggaaga

SEQ ID NO: 4068120 - DNA, 25 bp, Homo sapien
ctggggtcaataaagtgcccagcac

SEQ ID NO: 4068121 - DNA, 25 bp, Homo sapien
gcacactccaggcacttctccaatg

SEQ ID NO: 4068122 - DNA, 25 bp, Homo sapien
actccaggcacttctccaatgtcag

SEQ ID NO: 4068123 - DNA, 25 bp, Homo sapien
ccagcacactccaggcacttctcca

SEQ ID NO: 4068124 - DNA, 25 bp, Homo sapien
aaaagccagggtgacgtccagtcgg

SEQ ID NO: 4068125 - DNA, 25 bp, Homo sapien
ccaaaagccagggtgacgtccagtc

SEQ ID NO: 4068126 - DNA, 25 bp, Homo sapien
agggctggacaacttgctcgcctgt

SEQ ID NO: 4068127 - DNA, 25 bp, Homo sapien
ggacaacttgctcgcctgttctgtg

SEQ ID NO: 4068128 - DNA, 25 bp, Homo sapien
cgctttattaagagtctactgtggc

SEQ ID NO: 4068129 - DNA, 25 bp, Homo sapien
ctgtggcttcgtgaatataaaggga

SEQ ID NO: 4068130 - DNA, 25 bp, Homo sapien
gggagcctggcgctttattaagagt

SEQ ID NO: 4068131 - DNA, 25 bp, Homo sapien
taagagtctactgtggcttcgtgaa

SEQ ID NO: 4068132 - DNA, 25 bp, Homo sapien
cagccgggggatgccagaattggga

SEQ ID NO: 4068133 - DNA, 25 bp, Homo sapien
ctcagccgggggatgccagaattgg

SEQ ID NO: 4068134 - DNA, 25 bp, Homo sapien
ctggatctccctcagccgggggatg

SEQ ID NO: 4068135 - DNA, 25 bp, Homo sapien
ggatctccctcagccgggggatgcc

SEQ ID NO: 4068136 - DNA, 25 bp, Homo sapien
gggccactgccgatgacagtcagag

SEQ ID NO: 4068137 - DNA, 25 bp, Homo sapien
gtggttcaccagatagtgtggggcc

SEQ ID NO: 4068138 - DNA, 25 bp, Homo sapien
actgccgatgacagtcagagccttc

SEQ ID NO: 4068139 - DNA, 25 bp, Homo sapien
gccactgccgatgacagtcagagcc

SEQ ID NO: 4068140 - DNA, 25 bp, Homo sapien
tgtaagatttctggacattccaagg

SEQ ID NO: 4068141 - DNA, 25 bp, Homo sapien
taagatttctggacattccaaggct

SEQ ID NO: 4068142 - DNA, 25 bp, Homo sapien
ggttgtccacactcctgtaagattt

SEQ ID NO: 4068143 - DNA, 25 bp, Homo sapien
ggccctgccctgttgggcaatggtt

SEQ ID NO: 4068144 - DNA, 25 bp, Homo sapien
cgccagtgtagcgtgattcacgtca

SEQ ID NO: 4068145 - DNA, 25 bp, Homo sapien
tctccgccagtgtagcgtgattcac

SEQ ID NO: 4068146 - DNA, 25 bp, Homo sapien
cgttctccgccagtgtagcgtgatt

SEQ ID NO: 4068147 - DNA, 25 bp, Homo sapien
gagcccgttctccgccagtgtagcg

SEQ ID NO: 4068148 - DNA, 25 bp, Homo sapien
tgggacagtttctcaaccgacgggc

SEQ ID NO: 4068149 - DNA, 25 bp, Homo sapien
cagcttggaggtactggactgcttc

SEQ ID NO: 4068150 - DNA, 25 bp, Homo sapien
tgtccttggacatgtgcaacccatt

SEQ ID NO: 4068151 - DNA, 25 bp, Homo sapien
cctgaagagggcttgcctgaatacc

SEQ ID NO: 4068152 - DNA, 25 bp, Homo sapien
caaacagaacctgaattgtaatttg

SEQ ID NO: 4068153 - DNA, 25 bp, Homo sapien
tcttctcaggagcacctcaaacaga

SEQ ID NO: 4068154 - DNA, 25 bp, Homo sapien
ctcaggacctaatcttctatacatc

SEQ ID NO: 4068155 - DNA, 25 bp, Homo sapien
ctctcaggacctaatcttctataca

SEQ ID NO: 4068156 - DNA, 25 bp, Homo sapien
gtcgtttaggacttgaccttgcata

SEQ ID NO: 4068157 - DNA, 25 bp, Homo sapien
aggacttgaccttgcatatgactgc

SEQ ID NO: 4068158 - DNA, 25 bp, Homo sapien
ccaagtcgtttaggacttgaccttg

SEQ ID NO: 4068159 - DNA, 25 bp, Homo sapien
tttaggacttgaccttgcatatgac

SEQ ID NO: 4068160 - DNA, 25 bp, Homo sapien
taggattaatactgatgacaatcat

SEQ ID NO: 4068161 - DNA, 25 bp, Homo sapien
gtaggattaatactgatgacaatca

SEQ ID NO: 4068162 - DNA, 25 bp, Homo sapien
agtaggattaatactgatgacaatc

SEQ ID NO: 4068163 - DNA, 25 bp, Homo sapien
cagtaggattaatactgatgacaat

SEQ ID NO: 4068164 - DNA, 25 bp, Homo sapien
ttcattggtccaaatggaaacagac

SEQ ID NO: 4068165 - DNA, 25 bp, Homo sapien
cttcattggtccaaatggaaacaga

SEQ ID NO: 4068166 - DNA, 25 bp, Homo sapien
aggcctctacaagaacccactgctt

SEQ ID NO: 4068167 - DNA, 25 bp, Homo sapien
gaagctttagcccagctgtagaagg

SEQ ID NO: 4068168 - DNA, 25 bp, Homo sapien
tgttctagaagctttagcccagctg

SEQ ID NO: 4068169 - DNA, 25 bp, Homo sapien
ctttagcccagctgtagaaggcaca

SEQ ID NO: 4068170 - DNA, 25 bp, Homo sapien
caatgctggacccatccgctcaatg

SEQ ID NO: 4068171 - DNA, 25 bp, Homo sapien
ggcctccaccctataaaaccatgat

SEQ ID NO: 4068172 - DNA, 25 bp, Homo sapien
gaacactgggaatcatgatcacatt

SEQ ID NO: 4068173 - DNA, 25 bp, Homo sapien
caagctctcggaaacaagataaacc

SEQ ID NO: 4068174 - DNA, 25 bp, Homo sapien
tagaaagtactagaagcttattgtg

SEQ ID NO: 4068175 - DNA, 25 bp, Homo sapien
cagttccaaagcatcgagatagagc

SEQ ID NO: 4068176 - DNA, 25 bp, Homo sapien
tattgtgtagttcaggttgttctca

SEQ ID NO: 4068177 - DNA, 25 bp, Homo sapien
ttccaaagcatcgagatagagcaga

SEQ ID NO: 4068178 - DNA, 25 bp, Homo sapien
ggacaaagcagatggccaacaagaa

SEQ ID NO: 4068179 - DNA, 25 bp, Homo sapien
tggacaaagcagatggccaacaaga

SEQ ID NO: 4068180 - DNA, 25 bp, Homo sapien
cagatggccaacaagaagtggggca

SEQ ID NO: 4068181 - DNA, 25 bp, Homo sapien
gcagatggccaacaagaagtggggc

SEQ ID NO: 4068182 - DNA, 25 bp, Homo sapien
aaccctgacaagaaatatctctgca

SEQ ID NO: 4068183 - DNA, 25 bp, Homo sapien
cctggaaccctgacaagaaatatct

SEQ ID NO: 4068184 - DNA, 25 bp, Homo sapien
atcaatgccatcctggaaccctgac

SEQ ID NO: 4068185 - DNA, 25 bp, Homo sapien
tgccatcctggaaccctgacaagaa

SEQ ID NO: 4068186 - DNA, 25 bp, Homo sapien
tgttttcaatttaaagctagaagtc

SEQ ID NO: 4068187 - DNA, 25 bp, Homo sapien
tttcaatttaaagctagaagtcata

SEQ ID NO: 4068188 - DNA, 25 bp, Homo sapien
tcaatttaaagctagaagtcataat

SEQ ID NO: 4068189 - DNA, 25 bp, Homo sapien
tttaaagctagaagtcataatggac

SEQ ID NO: 4068190 - DNA, 25 bp, Homo sapien
gatgctgttgatgcccctccattca

SEQ ID NO: 4068191 - DNA, 25 bp, Homo sapien
ccttcatcaattccatgaaggtgcc

SEQ ID NO: 4068192 - DNA, 25 bp, Homo sapien
tgccaccacgatatggtccaatgac

SEQ ID NO: 4068193 - DNA, 25 bp, Homo sapien
aatccttggtcctcccaggctatga

SEQ ID NO: 4068194 - DNA, 25 bp, Homo sapien
tgtccacggcaggccaattacagcc

SEQ ID NO: 4068195 - DNA, 25 bp, Homo sapien
ggcaggccaattacagcccaattac

SEQ ID NO: 4068196 - DNA, 25 bp, Homo sapien
cacggcaggccaattacagcccaat

SEQ ID NO: 4068197 - DNA, 25 bp, Homo sapien
tccacggcaggccaattacagccca

SEQ ID NO: 4068198 - DNA, 25 bp, Homo sapien
tgatctgggctataccaacaaagca

SEQ ID NO: 4068199 - DNA, 25 bp, Homo sapien
atctgggctataccaacaaagcagc

SEQ ID NO: 4068200 - DNA, 25 bp, Homo sapien
atgctgatctgggctataccaacaa

SEQ ID NO: 4068201 - DNA, 25 bp, Homo sapien
gatctgggctataccaacaaagcag

SEQ ID NO: 4068202 - DNA, 25 bp, Homo sapien
aagctgagtcacgtacattgatgcc

SEQ ID NO: 4068203 - DNA, 25 bp, Homo sapien
agcacaaagctgagtcacgtacatt

SEQ ID NO: 4068204 - DNA, 25 bp, Homo sapien
gctgagtcacgtacattgatgccca

SEQ ID NO: 4068205 - DNA, 25 bp, Homo sapien
gatgaaacgacttgggggcaatgtc

SEQ ID NO: 4068206 - DNA, 25 bp, Homo sapien
gatgcaccaaaaaccagagtggatg

SEQ ID NO: 4068207 - DNA, 25 bp, Homo sapien
ggaagatgcaccaaaaaccagagtg

SEQ ID NO: 4068208 - DNA, 25 bp, Homo sapien
actaaaacttccatcatgtagccca

SEQ ID NO: 4068209 - DNA, 25 bp, Homo sapien
cactaaaacttccatcatgtagccc

SEQ ID NO: 4068210 - DNA, 25 bp, Homo sapien
aagggaacctccctactggagtgag

SEQ ID NO: 4068211 - DNA, 25 bp, Homo sapien
tgtgattctaagtccagagacgcag

SEQ ID NO: 4068212 - DNA, 25 bp, Homo sapien
tggtctccccagaagaaatggtgct

SEQ ID NO: 4068213 - DNA, 25 bp, Homo sapien
aatggtgctgataaagtgcctgaac

SEQ ID NO: 4068214 - DNA, 25 bp, Homo sapien
caaaaatccggaggaaggacttcat

SEQ ID NO: 4068215 - DNA, 25 bp, Homo sapien
caatctattttgtggcttgccaaac

SEQ ID NO: 4068216 - DNA, 25 bp, Homo sapien
ggtaacctgacacttagcattctgg

SEQ ID NO: 4068217 - DNA, 25 bp, Homo sapien
ccttgggttatttgccagctcttga

SEQ ID NO: 4068218 - DNA, 25 bp, Homo sapien
tctattgtgcgaggcaaggcacacc

SEQ ID NO: 4068219 - DNA, 25 bp, Homo sapien
aaagatggtttgctataggactccc

SEQ ID NO: 4068220 - DNA, 25 bp, Homo sapien
gaaagcctcctgttacacacttgag

SEQ ID NO: 4068221 - DNA, 25 bp, Homo sapien
taggactcccttagactagcaggct

SEQ ID NO: 4068222 - DNA, 25 bp, Homo sapien
cagtcttctattgtatgatcacaca

SEQ ID NO: 4068223 - DNA, 25 bp, Homo sapien
tgtatgatcacacatcgcatgattc

SEQ ID NO: 4068224 - DNA, 25 bp, Homo sapien
cacatcgcatgattccatctacatg

SEQ ID NO: 4068225 - DNA, 25 bp, Homo sapien
gaaaccagtcttctattgtatgatc

SEQ ID NO: 4068226 - DNA, 25 bp, Homo sapien
aactgattacgataatggctgcaca

SEQ ID NO: 4068227 - DNA, 25 bp, Homo sapien
atgcactaaaaactaccgaattgca

SEQ ID NO: 4068228 - DNA, 25 bp, Homo sapien
cactaaaaactaccgaattgcatat

SEQ ID NO: 4068229 - DNA, 25 bp, Homo sapien
cacatctcaatacaacttttattga

SEQ ID NO: 4068230 - DNA, 25 bp, Homo sapien
ccgtgcccggcatgtaaaattattt

SEQ ID NO: 4068231 - DNA, 25 bp, Homo sapien
ttaaaactatgtgtcgagtacactc

SEQ ID NO: 4068232 - DNA, 25 bp, Homo sapien
gggagacggaaggagtacactgaga

SEQ ID NO: 4068233 - DNA, 25 bp, Homo sapien
gtcgagtacactcaatatgattatt

SEQ ID NO: 4068234 - DNA, 25 bp, Homo sapien
ccggcccagatgtacaatatcttaa

SEQ ID NO: 4068235 - DNA, 25 bp, Homo sapien
aagaatagcagactaaggatctcca

SEQ ID NO: 4068236 - DNA, 25 bp, Homo sapien
tcctccacaaatgcaatgagaaaac

SEQ ID NO: 4068237 - DNA, 25 bp, Homo sapien
tcaacaacataaggctaatgtcagt

SEQ ID NO: 4068238 - DNA, 25 bp, Homo sapien
agcttatgatacttccttatcacta

SEQ ID NO: 4068239 - DNA, 25 bp, Homo sapien
ttccttatcactacattaacttccg

SEQ ID NO: 4068240 - DNA, 25 bp, Homo sapien
ccttcccgtaacagtctcggcagtc

SEQ ID NO: 4068241 - DNA, 25 bp, Homo sapien
tcactacattaacttccgagaataa

SEQ ID NO: 4068242 - DNA, 25 bp, Homo sapien
tccagacaaggataaatttcaggcc

SEQ ID NO: 4068243 - DNA, 25 bp, Homo sapien
ctccagacaaggataaatttcaggc

SEQ ID NO: 4068244 - DNA, 25 bp, Homo sapien
ccaggataggcctctcctcaaggtc

SEQ ID NO: 4068245 - DNA, 25 bp, Homo sapien
caggcccaggataggcctctcctca

SEQ ID NO: 4068246 - DNA, 25 bp, Homo sapien
cttgaaaataagctgatgcctgccc

SEQ ID NO: 4068247 - DNA, 25 bp, Homo sapien
acttcttagcaattggccaggctgc

SEQ ID NO: 4068248 - DNA, 25 bp, Homo sapien
gattcaagaagctgtaccacagacc

SEQ ID NO: 4068249 - DNA, 25 bp, Homo sapien
catcaggtgtcttctacgtgcccaa

SEQ ID NO: 4068250 - DNA, 25 bp, Homo sapien
ctcgcgccctccgtgcgtgtgcgcg

SEQ ID NO: 4068251 - DNA, 25 bp, Homo sapien
tcgccggtgtgcgcgtctgctcgct

SEQ ID NO: 4068252 - DNA, 25 bp, Homo sapien
tgagtaaactgtgtttttgcagaat

SEQ ID NO: 4068253 - DNA, 25 bp, Homo sapien
tgcggaacttggctcgccggtgtgc

SEQ ID NO: 4068254 - DNA, 25 bp, Homo sapien
gagggtgcatgttctcgttcaagaa

SEQ ID NO: 4068255 - DNA, 25 bp, Homo sapien
tatactggtagctagatttagaggc

SEQ ID NO: 4068256 - DNA, 25 bp, Homo sapien
gattactttgaagcaagtcctagac

SEQ ID NO: 4068257 - DNA, 25 bp, Homo sapien
taacctttaggtacctcatcccagc

SEQ ID NO: 4068258 - DNA, 25 bp, Homo sapien
ttaattccctgagtgtgctgcccct

SEQ ID NO: 4068259 - DNA, 25 bp, Homo sapien
gaggctccatttgtcccatgctggg

SEQ ID NO: 4068260 - DNA, 25 bp, Homo sapien
gaagaactcttccacttactgcaga

SEQ ID NO: 4068261 - DNA, 25 bp, Homo sapien
gagtatacaagctatgggcaagtcc

SEQ ID NO: 4068262 - DNA, 25 bp, Homo sapien
agaataaaatctcaagctcccagga

SEQ ID NO: 4068263 - DNA, 25 bp, Homo sapien
cacgtagttgccacatatgagacag

SEQ ID NO: 4068264 - DNA, 25 bp, Homo sapien
ttccttgagtgtgctgccccacgta

SEQ ID NO: 4068265 - DNA, 25 bp, Homo sapien
cacacagctagcaataagtggaact

SEQ ID NO: 4068266 - DNA, 25 bp, Homo sapien
caccgcacccagatgatatgcacta

SEQ ID NO: 4068267 - DNA, 25 bp, Homo sapien
agtgatggtctaggggcaagatcta

SEQ ID NO: 4068268 - DNA, 25 bp, Homo sapien
caagatctaggggaaagtcaagaga

SEQ ID NO: 4068269 - DNA, 25 bp, Homo sapien
aagaggaaccagctgagtgatggtc

SEQ ID NO: 4068270 - DNA, 25 bp, Homo sapien
tctgcctccctggtaaaatcaattc

SEQ ID NO: 4068271 - DNA, 25 bp, Homo sapien
attacacgcacgcaccaccacagca

SEQ ID NO: 4068272 - DNA, 25 bp, Homo sapien
cacccggcctgtcattatttttaat

SEQ ID NO: 4068273 - DNA, 25 bp, Homo sapien
cctccctggtaaaatcaattctcct

SEQ ID NO: 4068274 - DNA, 25 bp, Homo sapien
gacaaggtctatggagtttccttat

SEQ ID NO: 4068275 - DNA, 25 bp, Homo sapien
gaacgagttccagtggacaaggtct

SEQ ID NO: 4068276 - DNA, 25 bp, Homo sapien
tagatgggaacgagttccagtggac

SEQ ID NO: 4068277 - DNA, 25 bp, Homo sapien
ccttattttcggctcaggaagagcc

SEQ ID NO: 4068278 - DNA, 25 bp, Homo sapien
ggtcccatgacaagcagatctctga

SEQ ID NO: 4068279 - DNA, 25 bp, Homo sapien
gcatctgtgaagctagaagagcaca

SEQ ID NO: 4068280 - DNA, 25 bp, Homo sapien
tctccattgaatagggttgccagaa

SEQ ID NO: 4068281 - DNA, 25 bp, Homo sapien
tatcttctaccagtcagaggtcagc

SEQ ID NO: 4068282 - DNA, 25 bp, Homo sapien
tgacattggcaacgatcacgcattt

SEQ ID NO: 4068283 - DNA, 25 bp, Homo sapien
gaatccgggcagttgtcatttgggc

SEQ ID NO: 4068284 - DNA, 25 bp, Homo sapien
caccggcaggctgtctagaggaaca

SEQ ID NO: 4068285 - DNA, 25 bp, Homo sapien
tcaggcctgggatggtaatgctcca

SEQ ID NO: 4068286 - DNA, 25 bp, Homo sapien
gtatgacgctagagggaagctcttc

SEQ ID NO: 4068287 - DNA, 25 bp, Homo sapien
caggacttgtccacgactatacagt

SEQ ID NO: 4068288 - DNA, 25 bp, Homo sapien
gacttgtccacgactatacagttcc

SEQ ID NO: 4068289 - DNA, 25 bp, Homo sapien
gggttacatgaaaagtatgacgcta

SEQ ID NO: 4068290 - DNA, 25 bp, Homo sapien
gtcaagcatgagcaagccacatctt

SEQ ID NO: 4068291 - DNA, 25 bp, Homo sapien
gcaagccacatcttctacggaaggc

SEQ ID NO: 4068292 - DNA, 25 bp, Homo sapien
ccacatcttctacggaaggcagcaa

SEQ ID NO: 4068293 - DNA, 25 bp, Homo sapien
agtcaagcatgagcaagccacatct

SEQ ID NO: 4068294 - DNA, 25 bp, Homo sapien
caagctaggggaggtaaaggcagag

SEQ ID NO: 4068295 - DNA, 25 bp, Homo sapien
gcccgctgtcgggagcagggcagaa

SEQ ID NO: 4068296 - DNA, 25 bp, Homo sapien
gaagttgcagctttaggaaggtctg

SEQ ID NO: 4068297 - DNA, 25 bp, Homo sapien
aaaattgaccatacagcagcaggcc

SEQ ID NO: 4068298 - DNA, 25 bp, Homo sapien
ttccttgaaaaagatctctccgcac

SEQ ID NO: 4068299 - DNA, 25 bp, Homo sapien
ttgctatcctgcagagcccatgcat

SEQ ID NO: 4068300 - DNA, 25 bp, Homo sapien
cttgctatcctgcagagcccatgca

SEQ ID NO: 4068301 - DNA, 25 bp, Homo sapien
gtggcacttggaagtcacagctccc

SEQ ID NO: 4068302 - DNA, 25 bp, Homo sapien
ggaggcagccggtggcacttggaag

SEQ ID NO: 4068303 - DNA, 25 bp, Homo sapien
ctgttggaggcagccggtggcactt

SEQ ID NO: 4068304 - DNA, 25 bp, Homo sapien
gggggcaaacacctctgttggaggc

SEQ ID NO: 4068305 - DNA, 25 bp, Homo sapien
agttgggaaagctgcgatactgcat

SEQ ID NO: 4068306 - DNA, 25 bp, Homo sapien
actgcattagcctgtcagtcacggg

SEQ ID NO: 4068307 - DNA, 25 bp, Homo sapien
aaagctgcgatactgcattagcctg

SEQ ID NO: 4068308 - DNA, 25 bp, Homo sapien
gcctgtcagtcacggggaagcaatt

SEQ ID NO: 4068309 - DNA, 25 bp, Homo sapien
ggcctcccaaagacagccatgccat

SEQ ID NO: 4068310 - DNA, 25 bp, Homo sapien
ctgaggcctcccaaagacagccatg

SEQ ID NO: 4068311 - DNA, 25 bp, Homo sapien
tgaggcctcccaaagacagccatgc

SEQ ID NO: 4068312 - DNA, 25 bp, Homo sapien
aggcctcccaaagacagccatgcca

SEQ ID NO: 4068313 - DNA, 25 bp, Homo sapien
tgctgcacttggctacgcagtagga

SEQ ID NO: 4068314 - DNA, 25 bp, Homo sapien
ggcagcttctgcgtgaagagcctgt

SEQ ID NO: 4068315 - DNA, 25 bp, Homo sapien
agcctgttcggtgacggcccactct

SEQ ID NO: 4068316 - DNA, 25 bp, Homo sapien
ccactctcatatagctgctgcactt

SEQ ID NO: 4068317 - DNA, 25 bp, Homo sapien
tgttttgctaccatgtaacctttga

SEQ ID NO: 4068318 - DNA, 25 bp, Homo sapien
accatgtaacctttgacagtcagca

SEQ ID NO: 4068319 - DNA, 25 bp, Homo sapien
tttgctaccatgtaacctttgacag

SEQ ID NO: 4068320 - DNA, 25 bp, Homo sapien
aaaggggaacctgcagaaatgattc

SEQ ID NO: 4068321 - DNA, 25 bp, Homo sapien
tattcgtagacatatagagcccgtc

SEQ ID NO: 4068322 - DNA, 25 bp, Homo sapien
aaaatcaacttgacatgtactcgag

SEQ ID NO: 4068323 - DNA, 25 bp, Homo sapien
tgtgttaaccactgtcctaagagct

SEQ ID NO: 4068324 - DNA, 25 bp, Homo sapien
gcccagagagctttcagtctacaca

SEQ ID NO: 4068325 - DNA, 25 bp, Homo sapien
gaaaactgcggctacagttgcaggc

SEQ ID NO: 4068326 - DNA, 25 bp, Homo sapien
agttgcaggctctataaccccacca

SEQ ID NO: 4068327 - DNA, 25 bp, Homo sapien
tcacaaatatgggaaggcacactag

SEQ ID NO: 4068328 - DNA, 25 bp, Homo sapien
aataacttacctgaccattgggagg

SEQ ID NO: 4068329 - DNA, 25 bp, Homo sapien
ttcctctaatgccaaaagaatctaa

SEQ ID NO: 4068330 - DNA, 25 bp, Homo sapien
tctaatgccaaaagaatctaagaga

SEQ ID NO: 4068331 - DNA, 25 bp, Homo sapien
atagttaacactgctgggatttccc

SEQ ID NO: 4068332 - DNA, 25 bp, Homo sapien
acattttcaaatagttaacactgct

SEQ ID NO: 4068333 - DNA, 25 bp, Homo sapien
gggagacagtactaaacgccctgcc

SEQ ID NO: 4068334 - DNA, 25 bp, Homo sapien
caggattctttcaggtatcaaccca

SEQ ID NO: 4068335 - DNA, 25 bp, Homo sapien
catggttcaatctctcacaggtcac

SEQ ID NO: 4068336 - DNA, 25 bp, Homo sapien
cagccaaggcatcgagtgaaaatac

SEQ ID NO: 4068337 - DNA, 25 bp, Homo sapien
tttcgcattgcaatgccatgctccc

SEQ ID NO: 4068338 - DNA, 25 bp, Homo sapien
ttatttttcggattcctctggagga

SEQ ID NO: 4068339 - DNA, 25 bp, Homo sapien
ttaaaaagtttctttcgcattgcaa

SEQ ID NO: 4068340 - DNA, 25 bp, Homo sapien
tatttttcggattcctctggaggat

SEQ ID NO: 4068341 - DNA, 25 bp, Homo sapien
agaaacagcagattatgtcactatt

SEQ ID NO: 4068342 - DNA, 25 bp, Homo sapien
gattatgtcactatttatagcagtt

SEQ ID NO: 4068343 - DNA, 25 bp, Homo sapien
aaagaaacagcagattatgtcacta

SEQ ID NO: 4068344 - DNA, 25 bp, Homo sapien
gtcactatttatagcagtttactat

SEQ ID NO: 4068345 - DNA, 25 bp, Homo sapien
gataatactttgtagcaggccaata

SEQ ID NO: 4068346 - DNA, 25 bp, Homo sapien
agaagataatactttgtagcaggcc

SEQ ID NO: 4068347 - DNA, 25 bp, Homo sapien
ttaatcacgtctactggattgcccc

SEQ ID NO: 4068348 - DNA, 25 bp, Homo sapien
ccagcaatcaggttgagaagggtct

SEQ ID NO: 4068349 - DNA, 25 bp, Homo sapien
tactttcagtagagctgggtttcac

SEQ ID NO: 4068350 - DNA, 25 bp, Homo sapien
ttgtactttcagtagagctgggttt

SEQ ID NO: 4068351 - DNA, 25 bp, Homo sapien
ccggccaatattattttttagagat

SEQ ID NO: 4068352 - DNA, 25 bp, Homo sapien
gcctgtcttggcctctcagaatgct

SEQ ID NO: 4068353 - DNA, 25 bp, Homo sapien
gcttccgtgagttacgatcacccta

SEQ ID NO: 4068354 - DNA, 25 bp, Homo sapien
tgaggcttccgtgagttacgatcac

SEQ ID NO: 4068355 - DNA, 25 bp, Homo sapien
tgagttacgatcaccctactgcact

SEQ ID NO: 4068356 - DNA, 25 bp, Homo sapien
cacttgagtttgaggcttccgtgag

SEQ ID NO: 4068357 - DNA, 25 bp, Homo sapien
tcttcactgagtactccaaaaagtt

SEQ ID NO: 4068358 - DNA, 25 bp, Homo sapien
ttcactgagtactccaaaaagttct

SEQ ID NO: 4068359 - DNA, 25 bp, Homo sapien
cactgagtactccaaaaagttcttc

SEQ ID NO: 4068360 - DNA, 25 bp, Homo sapien
ctcttcactgagtactccaaaaagt

SEQ ID NO: 4068361 - DNA, 25 bp, Homo sapien
gttcaaccatatccatcctttgaca

SEQ ID NO: 4068362 - DNA, 25 bp, Homo sapien
ctgttctattgttcaaccatatcca

SEQ ID NO: 4068363 - DNA, 25 bp, Homo sapien
tctattgttcaaccatatccatcct

SEQ ID NO: 4068364 - DNA, 25 bp, Homo sapien
catatccatcctttgacacttttct

SEQ ID NO: 4068365 - DNA, 25 bp, Homo sapien
ttttctcaactcccgatcaacatca

SEQ ID NO: 4068366 - DNA, 25 bp, Homo sapien
gcattttctcaactcccgatcaaca

SEQ ID NO: 4068367 - DNA, 25 bp, Homo sapien
cattttctcaactcccgatcaacat

SEQ ID NO: 4068368 - DNA, 25 bp, Homo sapien
taaacaagtaatagttaaatcacat

SEQ ID NO: 4068369 - DNA, 25 bp, Homo sapien
taagagaaagatacggcataaatgt

SEQ ID NO: 4068370 - DNA, 25 bp, Homo sapien
cagacatgagtttacagtgtcactt

SEQ ID NO: 4068371 - DNA, 25 bp, Homo sapien
aaatttaaatactgccacagacatg

SEQ ID NO: 4068372 - DNA, 25 bp, Homo sapien
catgggggtcagtgccccgaacttc

SEQ ID NO: 4068373 - DNA, 25 bp, Homo sapien
tgcatgggggtcagtgccccgaact

SEQ ID NO: 4068374 - DNA, 25 bp, Homo sapien
gggtcagtgccccgaacttccaagc

SEQ ID NO: 4068375 - DNA, 25 bp, Homo sapien
tcagtgccccgaacttccaagctgt

SEQ ID NO: 4068376 - DNA, 25 bp, Homo sapien
tagatgccctataaaggtcatataa

SEQ ID NO: 4068377 - DNA, 25 bp, Homo sapien
aaaaaacccactatcattagatgcc

SEQ ID NO: 4068378 - DNA, 25 bp, Homo sapien
ttacaatataaggaaatctgcctga

SEQ ID NO: 4068379 - DNA, 25 bp, Homo sapien
ggtcatataaataagccactaattt

SEQ ID NO: 4068380 - DNA, 25 bp, Homo sapien
atttcagtaggaacataattagtgt

SEQ ID NO: 4068381 - DNA, 25 bp, Homo sapien
ttcagtaggaacataattagtgtgt

SEQ ID NO: 4068382 - DNA, 25 bp, Homo sapien
cacttcacgattttcaagggtgggt

SEQ ID NO: 4068383 - DNA, 25 bp, Homo sapien
tgtttgcacttcacgattttcaagg

SEQ ID NO: 4068384 - DNA, 25 bp, Homo sapien
cctcaatattaactaaggtaaaatg

SEQ ID NO: 4068385 - DNA, 25 bp, Homo sapien
aaatattagacccaagtgccccaga

SEQ ID NO: 4068386 - DNA, 25 bp, Homo sapien
agtcaagtagacttttcaaatgtga

SEQ ID NO: 4068387 - DNA, 25 bp, Homo sapien
tatactcttgtgatgttacatgaaa

SEQ ID NO: 4068388 - DNA, 25 bp, Homo sapien
gattttcgtgaaaaataactatgct

SEQ ID NO: 4068389 - DNA, 25 bp, Homo sapien
aaagtgcagtccagagacaccgagg

SEQ ID NO: 4068390 - DNA, 25 bp, Homo sapien
ggcagacatgagaattcaggtatat

SEQ ID NO: 4068391 - DNA, 25 bp, Homo sapien
tcatcctcccacaagggtatagcgg

SEQ ID NO: 4068392 - DNA, 25 bp, Homo sapien
cgagcttttcttctgaaccgagtaa

SEQ ID NO: 4068393 - DNA, 25 bp, Homo sapien
ttcttctgaaccgagtaagttgcag

SEQ ID NO: 4068394 - DNA, 25 bp, Homo sapien
ctgaaccgagtaagttgcagatatg

SEQ ID NO: 4068395 - DNA, 25 bp, Homo sapien
atatacacccgagcttttcttctga

SEQ ID NO: 4068396 - DNA, 25 bp, Homo sapien
aacttttcacccactagtatgagga

SEQ ID NO: 4068397 - DNA, 25 bp, Homo sapien
tcaggtcgtgactttttggcaggaa

SEQ ID NO: 4068398 - DNA, 25 bp, Homo sapien
tttcttcacaactcgattcaggtcg

SEQ ID NO: 4068399 - DNA, 25 bp, Homo sapien
gatgctctgccccatttttggccag

SEQ ID NO: 4068400 - DNA, 25 bp, Homo sapien
tgcactgccaactgaaagactctca

SEQ ID NO: 4068401 - DNA, 25 bp, Homo sapien
ggcatgtgtcatctagtgacataat

SEQ ID NO: 4068402 - DNA, 25 bp, Homo sapien
caggcatgtgtcatctagtgacata

SEQ ID NO: 4068403 - DNA, 25 bp, Homo sapien
agctgcactgccaactgaaagactc

SEQ ID NO: 4068404 - DNA, 25 bp, Homo sapien
attattcgagcatggtgacgtggcc

SEQ ID NO: 4068405 - DNA, 25 bp, Homo sapien
tattcgagcatggtgacgtggcctg

SEQ ID NO: 4068406 - DNA, 25 bp, Homo sapien
aaaattattcgagcatggtgacgtg

SEQ ID NO: 4068407 - DNA, 25 bp, Homo sapien
ttcgagcatggtgacgtggcctgta

SEQ ID NO: 4068408 - DNA, 25 bp, Homo sapien
catgatcccaatccaattatgagga

SEQ ID NO: 4068409 - DNA, 25 bp, Homo sapien
cattatgcctcaaaccttttcgggt

SEQ ID NO: 4068410 - DNA, 25 bp, Homo sapien
gagcattctaccaaatacctggcca

SEQ ID NO: 4068411 - DNA, 25 bp, Homo sapien
taacaggagcctaaagagtgacaag

SEQ ID NO: 4068412 - DNA, 25 bp, Homo sapien
cgctgaatataactgttctagtgcc

SEQ ID NO: 4068413 - DNA, 25 bp, Homo sapien
taaacacagaatggtagccatcaaa

SEQ ID NO: 4068414 - DNA, 25 bp, Homo sapien
gaagtgtcagcgctgaatataactg

SEQ ID NO: 4068415 - DNA, 25 bp, Homo sapien
tccattataatcagaagtgtcagcg

SEQ ID NO: 4068416 - DNA, 25 bp, Homo sapien
tacagtcgtttttctgaactcttac

SEQ ID NO: 4068417 - DNA, 25 bp, Homo sapien
tcattttggctgtacagtcgttttt

SEQ ID NO: 4068418 - DNA, 25 bp, Homo sapien
gctgtacagtcgtttttctgaactc

SEQ ID NO: 4068419 - DNA, 25 bp, Homo sapien
aagtttcattttggctgtacagtcg

SEQ ID NO: 4068420 - DNA, 25 bp, Homo sapien
gacattccttaagcaagttaatcaa

SEQ ID NO: 4068421 - DNA, 25 bp, Homo sapien
taagcaagttaatcaagacgttgca

SEQ ID NO: 4068422 - DNA, 25 bp, Homo sapien
ttgtgacattccttaagcaagttaa

SEQ ID NO: 4068423 - DNA, 25 bp, Homo sapien
aatcaagacgttgcattcttcagtg

SEQ ID NO: 4068424 - DNA, 25 bp, Homo sapien
agatgaggatggatcacagcagtgc

SEQ ID NO: 4068425 - DNA, 25 bp, Homo sapien
caatcccggaaataagcactaaagc

SEQ ID NO: 4068426 - DNA, 25 bp, Homo sapien
aaagcaggaagcctcaagagaccca

SEQ ID NO: 4068427 - DNA, 25 bp, Homo sapien
ggaaaattagcagccaaggtcaaag

SEQ ID NO: 4068428 - DNA, 25 bp, Homo sapien
gagggttaaagggtcattagtctca

SEQ ID NO: 4068429 - DNA, 25 bp, Homo sapien
aacaggaaccaacccatatccatta

SEQ ID NO: 4068430 - DNA, 25 bp, Homo sapien
tagaaaacaggaaccaacccatatc

SEQ ID NO: 4068431 - DNA, 25 bp, Homo sapien
ggaaccaacccatatccattaggat

SEQ ID NO: 4068432 - DNA, 25 bp, Homo sapien
gaaaacaggaaccaacccatatcca

SEQ ID NO: 4068433 - DNA, 25 bp, Homo sapien
gaaactgaaactcctgcgcactgtg

SEQ ID NO: 4068434 - DNA, 25 bp, Homo sapien
tagccactgtggaaactggtatagc

SEQ ID NO: 4068435 - DNA, 25 bp, Homo sapien
cgcactgtgggcgggcatgtaaact

SEQ ID NO: 4068436 - DNA, 25 bp, Homo sapien
cagaaaataacaaacgctaaagagg

SEQ ID NO: 4068437 - DNA, 25 bp, Homo sapien
cacttccggctatattttcataaga

SEQ ID NO: 4068438 - DNA, 25 bp, Homo sapien
cagacaatggatcagcacaatgtgg

SEQ ID NO: 4068439 - DNA, 25 bp, Homo sapien
catatatatagggttcaacatacgc

SEQ ID NO: 4068440 - DNA, 25 bp, Homo sapien
cccaagagtccaacagacaatggat

SEQ ID NO: 4068441 - DNA, 25 bp, Homo sapien
aagaaacctgcacattacttatatc

SEQ ID NO: 4068442 - DNA, 25 bp, Homo sapien
ccaatgtacccatgtaagaaacctg

SEQ ID NO: 4068443 - DNA, 25 bp, Homo sapien
tcagtgtcatccaatgtacccatgt

SEQ ID NO: 4068444 - DNA, 25 bp, Homo sapien
cctgcacattacttatatccaaaat

SEQ ID NO: 4068445 - DNA, 25 bp, Homo sapien
tctgataccactgaactgtgcattt

SEQ ID NO: 4068446 - DNA, 25 bp, Homo sapien
tattaatgtatctgataccactgaa

SEQ ID NO: 4068447 - DNA, 25 bp, Homo sapien
ttatgttacgtgcatttcaccatgc

SEQ ID NO: 4068448 - DNA, 25 bp, Homo sapien
gcatttcaccatgcgaattttatgg

SEQ ID NO: 4068449 - DNA, 25 bp, Homo sapien
catacactggtataggccagatgcg

SEQ ID NO: 4068450 - DNA, 25 bp, Homo sapien
gccattgcacctagttaagtattca

SEQ ID NO: 4068451 - DNA, 25 bp, Homo sapien
actgactccaagatccttccaatga

SEQ ID NO: 4068452 - DNA, 25 bp, Homo sapien
gaagaccacaaataaagccattgca

SEQ ID NO: 4068453 - DNA, 25 bp, Homo sapien
cttggctttgcctaaatgttggtgc

SEQ ID NO: 4068454 - DNA, 25 bp, Homo sapien
tgttggtgcatacacagatgtactg

SEQ ID NO: 4068455 - DNA, 25 bp, Homo sapien
cacatgtaattaagtgctgatgtct

SEQ ID NO: 4068456 - DNA, 25 bp, Homo sapien
caaactgaagaaacgctaaatacgt

SEQ ID NO: 4068457 - DNA, 25 bp, Homo sapien
gtctaagccacaagccgagcacata

SEQ ID NO: 4068458 - DNA, 25 bp, Homo sapien
tccactactggtgcaaggttgcaca

SEQ ID NO: 4068459 - DNA, 25 bp, Homo sapien
cataagccaggtcctaacggagcct

SEQ ID NO: 4068460 - DNA, 25 bp, Homo sapien
tgcacacttctaagaagagcggcgt

SEQ ID NO: 4068461 - DNA, 25 bp, Homo sapien
ctacgtggtgtactactcccagact

SEQ ID NO: 4068462 - DNA, 25 bp, Homo sapien
tggtgtactactcccagactccgta

SEQ ID NO: 4068463 - DNA, 25 bp, Homo sapien
cgtggtgtactactcccagactccg

SEQ ID NO: 4068464 - DNA, 25 bp, Homo sapien
gtgtactactcccagactccgtacg

SEQ ID NO: 4068465 - DNA, 25 bp, Homo sapien
ctcgtgcccacgagtccaaggctgc

SEQ ID NO: 4068466 - DNA, 25 bp, Homo sapien
tcgtgcccacgagtccaaggctgcc

SEQ ID NO: 4068467 - DNA, 25 bp, Homo sapien
tgagctgcgatcacaagacaaagca

SEQ ID NO: 4068468 - DNA, 25 bp, Homo sapien
gagctgcgatcacaagacaaagcaa

SEQ ID NO: 4068469 - DNA, 25 bp, Homo sapien
cagaacagtcgagttgcaggctcag

SEQ ID NO: 4068470 - DNA, 25 bp, Homo sapien
cctcaaacagaacagtcgagttgca

SEQ ID NO: 4068471 - DNA, 25 bp, Homo sapien
agtgtcctgctcaactcagccaact

SEQ ID NO: 4068472 - DNA, 25 bp, Homo sapien
caactcagccaggatatggctttgg

SEQ ID NO: 4068473 - DNA, 25 bp, Homo sapien
ggctgtctcttctcaattctggaga

SEQ ID NO: 4068474 - DNA, 25 bp, Homo sapien
cctgctaactgtagccgttgtggca

SEQ ID NO: 4068475 - DNA, 25 bp, Homo sapien
tgaaatcaagcatatggcacagcgc

SEQ ID NO: 4068476 - DNA, 25 bp, Homo sapien
gggactgattcattcctccacgata

SEQ ID NO: 4068477 - DNA, 25 bp, Homo sapien
tgaattgggccaaattgcgatgacc

SEQ ID NO: 4068478 - DNA, 25 bp, Homo sapien
caatacaggagcttaccttgaacct

SEQ ID NO: 4068479 - DNA, 25 bp, Homo sapien
gccattctaaaaaggactccctaca

SEQ ID NO: 4068480 - DNA, 25 bp, Homo sapien
acatcactttggttcagagctctaa

SEQ ID NO: 4068481 - DNA, 25 bp, Homo sapien
cgttactgattctggagatggagga

SEQ ID NO: 4068482 - DNA, 25 bp, Homo sapien
ggcaggtgaaatttcgcctcctggc

SEQ ID NO: 4068483 - DNA, 25 bp, Homo sapien
gaaatttcgcctcctggcggcgtca

SEQ ID NO: 4068484 - DNA, 25 bp, Homo sapien
tcctggcggcgtcacctaaagtcct

SEQ ID NO: 4068485 - DNA, 25 bp, Homo sapien
tggcggcgtcacctaaagtcctctc

SEQ ID NO: 4068486 - DNA, 25 bp, Homo sapien
tacacaagtggagggaaaagcggca

SEQ ID NO: 4068487 - DNA, 25 bp, Homo sapien
tggagcatttcacagcctaggaaca

SEQ ID NO: 4068488 - DNA, 25 bp, Homo sapien
aaactggaccgaaattctactgctg

SEQ ID NO: 4068489 - DNA, 25 bp, Homo sapien
tactgctgtccaattgaaggctgcc

SEQ ID NO: 4068490 - DNA, 25 bp, Homo sapien
gcttgggcaacgtaagaagaccgtg

SEQ ID NO: 4068491 - DNA, 25 bp, Homo sapien
aattatcggctagggaagcagcagc

SEQ ID NO: 4068492 - DNA, 25 bp, Homo sapien
agtcgccagcaacaagcacgtagtg

SEQ ID NO: 4068493 - DNA, 25 bp, Homo sapien
taaatgagcgtaggttatccaaacc

SEQ ID NO: 4068494 - DNA, 25 bp, Homo sapien
cagtcaagtaggaatcagtgcagcc

SEQ ID NO: 4068495 - DNA, 25 bp, Homo sapien
ggatattacttgtgccttgaggcta

SEQ ID NO: 4068496 - DNA, 25 bp, Homo sapien
ctaagcttgatagggcaggagtgca

SEQ ID NO: 4068497 - DNA, 25 bp, Homo sapien
cacacgacatgctcctttctgtggc

SEQ ID NO: 4068498 - DNA, 25 bp, Homo sapien
gccaatagagtcatttacagaagaa

SEQ ID NO: 4068499 - DNA, 25 bp, Homo sapien
tgtgacaatgtttgtaaatctagcc

SEQ ID NO: 4068500 - DNA, 25 bp, Homo sapien
tctgtgacaatgtttgtaaatctag

SEQ ID NO: 4068501 - DNA, 25 bp, Homo sapien
gtaaatctagccaatagagtcattt

SEQ ID NO: 4068502 - DNA, 25 bp, Homo sapien
gagacctaaaagagcgagccgatga

SEQ ID NO: 4068503 - DNA, 25 bp, Homo sapien
tcaaccgtgttgctgcttaggactg

SEQ ID NO: 4068504 - DNA, 25 bp, Homo sapien
gccgcttttccatgtcctgggtgaa

SEQ ID NO: 4068505 - DNA, 25 bp, Homo sapien
aaataagaccttgctccaaacgtgg

SEQ ID NO: 4068506 - DNA, 25 bp, Homo sapien
cgtgagcccaccgaaattaagattt

SEQ ID NO: 4068507 - DNA, 25 bp, Homo sapien
ttgggaagtcaaccaaactttggca

SEQ ID NO: 4068508 - DNA, 25 bp, Homo sapien
tccttggtagatgaaactagtctct

SEQ ID NO: 4068509 - DNA, 25 bp, Homo sapien
cagaaaatgtagagcccatgctgca

SEQ ID NO: 4068510 - DNA, 25 bp, Homo sapien
tagtgatcatggttattcttgggca

SEQ ID NO: 4068511 - DNA, 25 bp, Homo sapien
tcatgaatagtaataaggccagtgg

SEQ ID NO: 4068512 - DNA, 25 bp, Homo sapien
gatttatcttcagaggacatgcaga

SEQ ID NO: 4068513 - DNA, 25 bp, Homo sapien
tcatgaggatttcgttgaacagcca

SEQ ID NO: 4068514 - DNA, 25 bp, Homo sapien
gagtaaagacccatcatcaaatatc

SEQ ID NO: 4068515 - DNA, 25 bp, Homo sapien
gatctctgttggagttcaacataca

SEQ ID NO: 4068516 - DNA, 25 bp, Homo sapien
caaggagcaccttagttgacaagtt

SEQ ID NO: 4068517 - DNA, 25 bp, Homo sapien
aggacttccatacaattttaaacag

SEQ ID NO: 4068518 - DNA, 25 bp, Homo sapien
gtccaacctaccttaagcaaattca

SEQ ID NO: 4068519 - DNA, 25 bp, Homo sapien
cagaacggttcatcagaacatgtgt

SEQ ID NO: 4068520 - DNA, 25 bp, Homo sapien
tatattctgtctactccatcgtttg

SEQ ID NO: 4068521 - DNA, 25 bp, Homo sapien
cactatggaagcaggtatttacaaa

SEQ ID NO: 4068522 - DNA, 25 bp, Homo sapien
aacattagatgcaaagtaatgccag

SEQ ID NO: 4068523 - DNA, 25 bp, Homo sapien
gatgcaaagtaatgccagaggaagc

SEQ ID NO: 4068524 - DNA, 25 bp, Homo sapien
aatgtcatttaatttagatagaacg

SEQ ID NO: 4068525 - DNA, 25 bp, Homo sapien
tagatagaacggtgggaatatgagt

SEQ ID NO: 4068526 - DNA, 25 bp, Homo sapien
caatgccttggacgtcctggacaca

SEQ ID NO: 4068527 - DNA, 25 bp, Homo sapien
gcaaatgaggcagcacatagacacc

SEQ ID NO: 4068528 - DNA, 25 bp, Homo sapien
aatcagcaggcagtttggtctaaac

SEQ ID NO: 4068529 - DNA, 25 bp, Homo sapien
cagtatacttagtttgaggcacggg

SEQ ID NO: 4068530 - DNA, 25 bp, Homo sapien
gctgcatctcaaacggtgcttattc

SEQ ID NO: 4068531 - DNA, 25 bp, Homo sapien
gcatctcaaacggtgcttattccca

SEQ ID NO: 4068532 - DNA, 25 bp, Homo sapien
tctcaaacggtgcttattcccaggg

SEQ ID NO: 4068533 - DNA, 25 bp, Homo sapien
tggctgcatctcaaacggtgcttat

SEQ ID NO: 4068534 - DNA, 25 bp, Homo sapien
agacaggaatgataactctgctcac

SEQ ID NO: 4068535 - DNA, 25 bp, Homo sapien
catgctttcgggtgatcacaggaga

SEQ ID NO: 4068536 - DNA, 25 bp, Homo sapien
ggagggcacgccaggtttttctcag

SEQ ID NO: 4068537 - DNA, 25 bp, Homo sapien
gaccatagggtgtttggccagctca

SEQ ID NO: 4068538 - DNA, 25 bp, Homo sapien
tccggatcggtcagcagggatatct

SEQ ID NO: 4068539 - DNA, 25 bp, Homo sapien
gggaaagcagatgtcgctaattgcc

SEQ ID NO: 4068540 - DNA, 25 bp, Homo sapien
ggcccagtctttgttgcaccaaata

SEQ ID NO: 4068541 - DNA, 25 bp, Homo sapien
gaggccttgcccctattagtgccgg

SEQ ID NO: 4068542 - DNA, 25 bp, Homo sapien
tctctgctcgaaagtaggtgggaaa

SEQ ID NO: 4068543 - DNA, 25 bp, Homo sapien
tttttggtatcttcctcggccagat

SEQ ID NO: 4068544 - DNA, 25 bp, Homo sapien
acacacaccaagcagtcgctgcagg

SEQ ID NO: 4068545 - DNA, 25 bp, Homo sapien
tggtatcttcctcggccagatgcag

SEQ ID NO: 4068546 - DNA, 25 bp, Homo sapien
agaggttaacacacaccaagcagtc

SEQ ID NO: 4068547 - DNA, 25 bp, Homo sapien
tggggaacactgttgcttggagagg

SEQ ID NO: 4068548 - DNA, 25 bp, Homo sapien
ctggggaacactgttgcttggagag

SEQ ID NO: 4068549 - DNA, 25 bp, Homo sapien
catctggacaagtataggttggttc

SEQ ID NO: 4068550 - DNA, 25 bp, Homo sapien
tcttcccatccagttccaataataa

SEQ ID NO: 4068551 - DNA, 25 bp, Homo sapien
tcatcttgttcaagcgtaatgtcac

SEQ ID NO: 4068552 - DNA, 25 bp, Homo sapien
taatgtcactgacatcgagaagaca

SEQ ID NO: 4068553 - DNA, 25 bp, Homo sapien
tactgtgatgcttgcttaaagtttt

SEQ ID NO: 4068554 - DNA, 25 bp, Homo sapien
caggcaggatcaacacgctccgcta

SEQ ID NO: 4068555 - DNA, 25 bp, Homo sapien
gatcaccagatgcaccttcggaaca

SEQ ID NO: 4068556 - DNA, 25 bp, Homo sapien
gcaccttcggaacactggtgtactt

SEQ ID NO: 4068557 - DNA, 25 bp, Homo sapien
cacgctccgctactaaaagagaata

SEQ ID NO: 4068558 - DNA, 25 bp, Homo sapien
gaggctgcctgcgtcgttggaaacc

SEQ ID NO: 4068559 - DNA, 25 bp, Homo sapien
ctccaggaggagtaagaagccagat

SEQ ID NO: 4068560 - DNA, 25 bp, Homo sapien
cagacattgcctcactttaaggaga

SEQ ID NO: 4068561 - DNA, 25 bp, Homo sapien
tcacatgtcattagcctggagcaaa

SEQ ID NO: 4068562 - DNA, 25 bp, Homo sapien
gactctgaggggttgttcgtgtaat

SEQ ID NO: 4068563 - DNA, 25 bp, Homo sapien
cgtgtaatgattatacctgatgcaa

SEQ ID NO: 4068564 - DNA, 25 bp, Homo sapien
gggttgttcgtgtaatgattatacc

SEQ ID NO: 4068565 - DNA, 25 bp, Homo sapien
gttcgtgtaatgattatacctgatg

SEQ ID NO: 4068566 - DNA, 25 bp, Homo sapien
tattaaacctgcgtagacagttcgc

SEQ ID NO: 4068567 - DNA, 25 bp, Homo sapien
tctacatcacggataaagacgttga

SEQ ID NO: 4068568 - DNA, 25 bp, Homo sapien
tacttagatgtagactccaaatgca

SEQ ID NO: 4068569 - DNA, 25 bp, Homo sapien
tgggtaaaggataatgccctctggg

SEQ ID NO: 4068570 - DNA, 25 bp, Homo sapien
atcccattcagaaaagcgttctgga

SEQ ID NO: 4068571 - DNA, 25 bp, Homo sapien
aaaagcgttctggattgcccgttcg

SEQ ID NO: 4068572 - DNA, 25 bp, Homo sapien
tctttcaaactatcccattcagaaa

SEQ ID NO: 4068573 - DNA, 25 bp, Homo sapien
tctggattgcccgttcgaattcctc

SEQ ID NO: 4068574 - DNA, 25 bp, Homo sapien
cgcttcctttcgaacgaggcaggga

SEQ ID NO: 4068575 - DNA, 25 bp, Homo sapien
gggtggagaaatggccgctcacacc

SEQ ID NO: 4068576 - DNA, 25 bp, Homo sapien
gaacgaggcagggactctcgctctg

SEQ ID NO: 4068577 - DNA, 25 bp, Homo sapien
tctgtcgcctttggagtggtcccgg

SEQ ID NO: 4068578 - DNA, 25 bp, Homo sapien
caagcggatggaaggccccgagaca

SEQ ID NO: 4068579 - DNA, 25 bp, Homo sapien
gctagtcccggcctactggcaagag

SEQ ID NO: 4068580 - DNA, 25 bp, Homo sapien
aaggccccgagacagctagtcccgg

SEQ ID NO: 4068581 - DNA, 25 bp, Homo sapien
gggccaagcggatggaaggccccga

SEQ ID NO: 4068582 - DNA, 25 bp, Homo sapien
ctactcaggtcgctgccggatgggc

SEQ ID NO: 4068583 - DNA, 25 bp, Homo sapien
ttgccttgggttacgaccacgctgg

SEQ ID NO: 4068584 - DNA, 25 bp, Homo sapien
caaagcctagcactggcgaggcggt

SEQ ID NO: 4068585 - DNA, 25 bp, Homo sapien
gcggcggaagtgacgtagcccaaca

SEQ ID NO: 4068586 - DNA, 25 bp, Homo sapien
cacagctcttaagtgggcagtggca

SEQ ID NO: 4068587 - DNA, 25 bp, Homo sapien
actcgctgaactgctggcccggagc

SEQ ID NO: 4068588 - DNA, 25 bp, Homo sapien
cggagcagcacagctcttaagtggg

SEQ ID NO: 4068589 - DNA, 25 bp, Homo sapien
aggccgacgggcactcgctgaactg

SEQ ID NO: 4068590 - DNA, 25 bp, Homo sapien
tcatagtagtatgcccatgcagagc

SEQ ID NO: 4068591 - DNA, 25 bp, Homo sapien
aggaactgatctgaatggccagcct

SEQ ID NO: 4068592 - DNA, 25 bp, Homo sapien
cagcctcattttcatagtagtatgc

SEQ ID NO: 4068593 - DNA, 25 bp, Homo sapien
tgctgaggaactgatctgaatggcc

SEQ ID NO: 4068594 - DNA, 25 bp, Homo sapien
taacaaatttcttatcctatcacct

SEQ ID NO: 4068595 - DNA, 25 bp, Homo sapien
tgaaaatcattaccacgaccaccca

SEQ ID NO: 4068596 - DNA, 25 bp, Homo sapien
taaaatttgctaagggactgattaa

SEQ ID NO: 4068597 - DNA, 25 bp, Homo sapien
gactgattaagagtagaccaggaaa

SEQ ID NO: 4068598 - DNA, 25 bp, Homo sapien
ctttcttcagacctcgcatgataga

SEQ ID NO: 4068599 - DNA, 25 bp, Homo sapien
tcccatgacttaagtggaaacctga

SEQ ID NO: 4068600 - DNA, 25 bp, Homo sapien
tcagacctcgcatgatagaaaatca

SEQ ID NO: 4068601 - DNA, 25 bp, Homo sapien
caccatgtgctatactgatcaaaac

SEQ ID NO: 4068602 - DNA, 25 bp, Homo sapien
gttaaagttagcactttcacaaata

SEQ ID NO: 4068603 - DNA, 25 bp, Homo sapien
cacaaatactagcagagttactaaa

SEQ ID NO: 4068604 - DNA, 25 bp, Homo sapien
agcactttcacaaatactagcagag

SEQ ID NO: 4068605 - DNA, 25 bp, Homo sapien
tactagcagagttactaaatgaaat

SEQ ID NO: 4068606 - DNA, 25 bp, Homo sapien
ttctaagtcttctatccaccactaa

SEQ ID NO: 4068607 - DNA, 25 bp, Homo sapien
gattttatgtatttctcatatgctt

SEQ ID NO: 4068608 - DNA, 25 bp, Homo sapien
ttatgtatttctcatatgcttcttc

SEQ ID NO: 4068609 - DNA, 25 bp, Homo sapien
gtatttctcatatgcttcttcactc

SEQ ID NO: 4068610 - DNA, 25 bp, Homo sapien
ttcatctagttctgaagggttactc

SEQ ID NO: 4068611 - DNA, 25 bp, Homo sapien
tactgtagtagtaattccttgagaa

SEQ ID NO: 4068612 - DNA, 25 bp, Homo sapien
tagtagtaattccttgagaaatttc

SEQ ID NO: 4068613 - DNA, 25 bp, Homo sapien
agtaattccttgagaaatttctagc

SEQ ID NO: 4068614 - DNA, 25 bp, Homo sapien
ctgtagtagtaattccttgagaaat

SEQ ID NO: 4068615 - DNA, 25 bp, Homo sapien
ctgataaaggagaatagagttcact

SEQ ID NO: 4068616 - DNA, 25 bp, Homo sapien
ctcctgataaaggagaatagagttc

SEQ ID NO: 4068617 - DNA, 25 bp, Homo sapien
gataaaggagaatagagttcactag

SEQ ID NO: 4068618 - DNA, 25 bp, Homo sapien
aaaggagaatagagttcactagcag

SEQ ID NO: 4068619 - DNA, 25 bp, Homo sapien
aaagcactctaattaatccagggta

SEQ ID NO: 4068620 - DNA, 25 bp, Homo sapien
caaaattcatggcatggatcattct

SEQ ID NO: 4068621 - DNA, 25 bp, Homo sapien
catggatcattctaagatcctaaga

SEQ ID NO: 4068622 - DNA, 25 bp, Homo sapien
atccagggtacaaacaaattactat

SEQ ID NO: 4068623 - DNA, 25 bp, Homo sapien
tgtcccaacttcagggagactacaa

SEQ ID NO: 4068624 - DNA, 25 bp, Homo sapien
caacttcagggagactacaataaac

SEQ ID NO: 4068625 - DNA, 25 bp, Homo sapien
cttcagggagactacaataaacaac

SEQ ID NO: 4068626 - DNA, 25 bp, Homo sapien
cagggagactacaataaacaacatc

SEQ ID NO: 4068627 - DNA, 25 bp, Homo sapien
gccaaacactgaatcccctataatg

SEQ ID NO: 4068628 - DNA, 25 bp, Homo sapien
ccctccagtaaacagaataagccaa

SEQ ID NO: 4068629 - DNA, 25 bp, Homo sapien
gaataagccaaacactgaatcccct

SEQ ID NO: 4068630 - DNA, 25 bp, Homo sapien
gaatcccctataatgaagatttagt

SEQ ID NO: 4068631 - DNA, 25 bp, Homo sapien
caagagcacactgggacaaatattt

SEQ ID NO: 4068632 - DNA, 25 bp, Homo sapien
catgcaagagcacactgggacaaat

SEQ ID NO: 4068633 - DNA, 25 bp, Homo sapien
tgcaagagcacactgggacaaatat

SEQ ID NO: 4068634 - DNA, 25 bp, Homo sapien
aatcatgcaagagcacactgggaca

SEQ ID NO: 4068635 - DNA, 25 bp, Homo sapien
tacccattcgtgtttctctgtgaat

SEQ ID NO: 4068636 - DNA, 25 bp, Homo sapien
ctgtgcaaaattgctgattcccact

SEQ ID NO: 4068637 - DNA, 25 bp, Homo sapien
tctgttgttacccattcgtgtttct

SEQ ID NO: 4068638 - DNA, 25 bp, Homo sapien
attttctgttgttacccattcgtgt

SEQ ID NO: 4068639 - DNA, 25 bp, Homo sapien
tacctttaaatagtgcatggctcag

SEQ ID NO: 4068640 - DNA, 25 bp, Homo sapien
cagcagtaccatttaagcaaagatg

SEQ ID NO: 4068641 - DNA, 25 bp, Homo sapien
tagagatgacgcatttaaacagcag

SEQ ID NO: 4068642 - DNA, 25 bp, Homo sapien
tctgtttgacctgttgacactacct

SEQ ID NO: 4068643 - DNA, 25 bp, Homo sapien
tggacaggttcagccctcgacttac

SEQ ID NO: 4068644 - DNA, 25 bp, Homo sapien
ttctctaaagatacggtcaaacgat

SEQ ID NO: 4068645 - DNA, 25 bp, Homo sapien
taaagatacggtcaaacgattcagg

SEQ ID NO: 4068646 - DNA, 25 bp, Homo sapien
cacttctctaaagatacggtcaaac

SEQ ID NO: 4068647 - DNA, 25 bp, Homo sapien
gatacggtcaaacgattcagggaat

SEQ ID NO: 4068648 - DNA, 25 bp, Homo sapien
tctttgaccttgccatcttgcctac

SEQ ID NO: 4068649 - DNA, 25 bp, Homo sapien
ttctttgaccttgccatcttgccta

SEQ ID NO: 4068650 - DNA, 25 bp, Homo sapien
cttctttgaccttgccatcttgcct

SEQ ID NO: 4068651 - DNA, 25 bp, Homo sapien
gggaccgcgcgcagggtgcagagca

SEQ ID NO: 4068652 - DNA, 25 bp, Homo sapien
gagcagagcgggtccagtgcgcagc

SEQ ID NO: 4068653 - DNA, 25 bp, Homo sapien
ggcgggtgacgggaccgcgcgcagg

SEQ ID NO: 4068654 - DNA, 25 bp, Homo sapien
gtgcgcagcgtacggacggcgccca

SEQ ID NO: 4068655 - DNA, 25 bp, Homo sapien
gggtcgcagcgctacgcctcggcca

SEQ ID NO: 4068656 - DNA, 25 bp, Homo sapien
gggggtcgcagcgctacgcctcggc

SEQ ID NO: 4068657 - DNA, 25 bp, Homo sapien
gtcgcagcgctacgcctcggccacc

SEQ ID NO: 4068658 - DNA, 25 bp, Homo sapien
gcgggggtcgcagcgctacgcctcg

SEQ ID NO: 4068659 - DNA, 25 bp, Homo sapien
aaagaagctctcatagtattggcaa

SEQ ID NO: 4068660 - DNA, 25 bp, Homo sapien
tagagtcgctggtaagcgtacgccc

SEQ ID NO: 4068661 - DNA, 25 bp, Homo sapien
tcaatggacatgaaagctatgacct

SEQ ID NO: 4068662 - DNA, 25 bp, Homo sapien
gacctagagagactatagagtcgct

SEQ ID NO: 4068663 - DNA, 25 bp, Homo sapien
aaagcttgtgctggtcgagagtggc

SEQ ID NO: 4068664 - DNA, 25 bp, Homo sapien
ctggtcgagagtggcgagtctggga

SEQ ID NO: 4068665 - DNA, 25 bp, Homo sapien
catcagcagcaaatctacgatctcc

SEQ ID NO: 4068666 - DNA, 25 bp, Homo sapien
tctcttagacttaatgcccaggaaa

SEQ ID NO: 4068667 - DNA, 25 bp, Homo sapien
aggttcagcaccacaaatgtcataa

SEQ ID NO: 4068668 - DNA, 25 bp, Homo sapien
tgcaggatccaatgaggaaggagcc

SEQ ID NO: 4068669 - DNA, 25 bp, Homo sapien
caagcactgggctatagtccaggac

SEQ ID NO: 4068670 - DNA, 25 bp, Homo sapien
aaacaatgcaggatccaatgaggaa

SEQ ID NO: 4068671 - DNA, 25 bp, Homo sapien
cccagctgaaggctgaccatcgtct

SEQ ID NO: 4068672 - DNA, 25 bp, Homo sapien
tgaaggctgaccatcgtctccgccg

SEQ ID NO: 4068673 - DNA, 25 bp, Homo sapien
gtctccgccgcatcaaagagggttt

SEQ ID NO: 4068674 - DNA, 25 bp, Homo sapien
tcgtctccgccgcatcaaagagggt

SEQ ID NO: 4068675 - DNA, 25 bp, Homo sapien
tctgtgcatgcgaggccacacgtgt

SEQ ID NO: 4068676 - DNA, 25 bp, Homo sapien
cagtgttccccagatgcggtgcaaa

SEQ ID NO: 4068677 - DNA, 25 bp, Homo sapien
gacaacaagcactggcatggcctgt

SEQ ID NO: 4068678 - DNA, 25 bp, Homo sapien
ccaggattgtgctaaaggccagaga

SEQ ID NO: 4068679 - DNA, 25 bp, Homo sapien
aaagcctgaaatgtcgccccaggca

SEQ ID NO: 4068680 - DNA, 25 bp, Homo sapien
atggagtaagccaggagcatggtaa

SEQ ID NO: 4068681 - DNA, 25 bp, Homo sapien
cgtagggctgccgtgatcatgttca

SEQ ID NO: 4068682 - DNA, 25 bp, Homo sapien
taaggatgacaatcataaagcctga

SEQ ID NO: 4068683 - DNA, 25 bp, Homo sapien
tccaaggttggactcactcagggca

SEQ ID NO: 4068684 - DNA, 25 bp, Homo sapien
actacttgggtatcgaggtcattcg

SEQ ID NO: 4068685 - DNA, 25 bp, Homo sapien
acaggtctgggaaagagagccatcc

SEQ ID NO: 4068686 - DNA, 25 bp, Homo sapien
gaaaaacttgtgaggcctgccttct

SEQ ID NO: 4068687 - DNA, 25 bp, Homo sapien
agataatttaaaaattacctgagcg

SEQ ID NO: 4068688 - DNA, 25 bp, Homo sapien
aaaattacctgagcggccgggcgca

SEQ ID NO: 4068689 - DNA, 25 bp, Homo sapien
ataaaggagggctggctgggcatgg

SEQ ID NO: 4068690 - DNA, 25 bp, Homo sapien
tacagataatttaaaaattacctga

SEQ ID NO: 4068691 - DNA, 25 bp, Homo sapien
gggtctggtgacactattgaatcca

SEQ ID NO: 4068692 - DNA, 25 bp, Homo sapien
taagccctcttttattaggcatgag

SEQ ID NO: 4068693 - DNA, 25 bp, Homo sapien
agaaaagcggtctagagaggaaaga

SEQ ID NO: 4068694 - DNA, 25 bp, Homo sapien
cctgagcatggtagcgtgagcctgt

SEQ ID NO: 4068695 - DNA, 25 bp, Homo sapien
cataatacttgcaaagggcctcccc

SEQ ID NO: 4068696 - DNA, 25 bp, Homo sapien
aacatcctgcctaccacatagtgga

SEQ ID NO: 4068697 - DNA, 25 bp, Homo sapien
ttggagagcctaagcaggatgcccc

SEQ ID NO: 4068698 - DNA, 25 bp, Homo sapien
tatggtagcagaggtgagcttactg

SEQ ID NO: 4068699 - DNA, 25 bp, Homo sapien
cctcaaacggagctgtaggaagagg

SEQ ID NO: 4068700 - DNA, 25 bp, Homo sapien
ctgggcctcaaacggagctgtagga

SEQ ID NO: 4068701 - DNA, 25 bp, Homo sapien
cctgggcctcaaacggagctgtagg

SEQ ID NO: 4068702 - DNA, 25 bp, Homo sapien
ggcctcaaacggagctgtaggaaga

SEQ ID NO: 4068703 - DNA, 25 bp, Homo sapien
tgctgcagaaatagccccacgtctc

SEQ ID NO: 4068704 - DNA, 25 bp, Homo sapien
cctccctgtggttccggcagcgctg

SEQ ID NO: 4068705 - DNA, 25 bp, Homo sapien
tggaggtccctttcggccaggacag

SEQ ID NO: 4068706 - DNA, 25 bp, Homo sapien
tcttcacaaacaccgccagggcgct

SEQ ID NO: 4068707 - DNA, 25 bp, Homo sapien
ctgcagggccgcgtgcgtaaaaaag

SEQ ID NO: 4068708 - DNA, 25 bp, Homo sapien
ggaagtagatgagctctgccgctac

SEQ ID NO: 4068709 - DNA, 25 bp, Homo sapien
taccacgaaggggtgccagccgtcg

SEQ ID NO: 4068710 - DNA, 25 bp, Homo sapien
tgagctctgccgctaccacgaaggg

SEQ ID NO: 4068711 - DNA, 25 bp, Homo sapien
agcaaagtgcgttctgctcactctg

SEQ ID NO: 4068712 - DNA, 25 bp, Homo sapien
gagcaaagtgcgttctgctcactct

SEQ ID NO: 4068713 - DNA, 25 bp, Homo sapien
ctggggagcaaagtgcgttctgctc

SEQ ID NO: 4068714 - DNA, 25 bp, Homo sapien
gggagcaaagtgcgttctgctcact

SEQ ID NO: 4068715 - DNA, 25 bp, Homo sapien
cccggcctcatggagttaaagtaca

SEQ ID NO: 4068716 - DNA, 25 bp, Homo sapien
taaaacgtactttgtgctgtgcact

SEQ ID NO: 4068717 - DNA, 25 bp, Homo sapien
gactcatggctgcaaggataaccaa

SEQ ID NO: 4068718 - DNA, 25 bp, Homo sapien
ttacgataacttgggcgactaggcc

SEQ ID NO: 4068719 - DNA, 25 bp, Homo sapien
tctctagcgtcagcgtgacaatgca

SEQ ID NO: 4068720 - DNA, 25 bp, Homo sapien
caatgcagaacaggttgacgttggc

SEQ ID NO: 4068721 - DNA, 25 bp, Homo sapien
ggcgttgtagacagtggactccaca

SEQ ID NO: 4068722 - DNA, 25 bp, Homo sapien
ccagagcgctggtctctagcgtcag

SEQ ID NO: 4068723 - DNA, 25 bp, Homo sapien
gccaggtgttgtcaaagagatagcg

SEQ ID NO: 4068724 - DNA, 25 bp, Homo sapien
caggtgttgtcaaagagatagcgga

SEQ ID NO: 4068725 - DNA, 25 bp, Homo sapien
tgttgtcaaagagatagcggagaat

SEQ ID NO: 4068726 - DNA, 25 bp, Homo sapien
cagccaggtgttgtcaaagagatag

SEQ ID NO: 4068727 - DNA, 25 bp, Homo sapien
ctgtgatatggtggcacccctcatc

SEQ ID NO: 4068728 - DNA, 25 bp, Homo sapien
tgtgatatggtggcacccctcatct

SEQ ID NO: 4068729 - DNA, 25 bp, Homo sapien
gctgtgatatggtggcacccctcat

SEQ ID NO: 4068730 - DNA, 25 bp, Homo sapien
gtgatatggtggcacccctcatctc

SEQ ID NO: 4068731 - DNA, 25 bp, Homo sapien
gtgctttggcgatcagtccccaagg

SEQ ID NO: 4068732 - DNA, 25 bp, Homo sapien
gacgtgctttggcgatcagtcccca

SEQ ID NO: 4068733 - DNA, 25 bp, Homo sapien
cgtgctttggcgatcagtccccaag

SEQ ID NO: 4068734 - DNA, 25 bp, Homo sapien
ttgacgtgctttggcgatcagtccc

SEQ ID NO: 4068735 - DNA, 25 bp, Homo sapien
cacagtgagtttgccccagatggga

SEQ ID NO: 4068736 - DNA, 25 bp, Homo sapien
ctccccggtacacagtgagtttgcc

SEQ ID NO: 4068737 - DNA, 25 bp, Homo sapien
ggtacacagtgagtttgccccagat

SEQ ID NO: 4068738 - DNA, 25 bp, Homo sapien
cccggtacacagtgagtttgcccca

SEQ ID NO: 4068739 - DNA, 25 bp, Homo sapien
tggctctggtactgccattactgag

SEQ ID NO: 4068740 - DNA, 25 bp, Homo sapien
tactgccattactgagggtggtggc

SEQ ID NO: 4068741 - DNA, 25 bp, Homo sapien
tctggtactgccattactgagggtg

SEQ ID NO: 4068742 - DNA, 25 bp, Homo sapien
ccttgacgttggtcctggctctggt

SEQ ID NO: 4068743 - DNA, 25 bp, Homo sapien
cacggcatccgttgagatatgcctg

SEQ ID NO: 4068744 - DNA, 25 bp, Homo sapien
tccagggaatatggtgcacggcatc

SEQ ID NO: 4068745 - DNA, 25 bp, Homo sapien
cagcatccagggaatatggtgcacg

SEQ ID NO: 4068746 - DNA, 25 bp, Homo sapien
tatggtgcacggcatccgttgagat

SEQ ID NO: 4068747 - DNA, 25 bp, Homo sapien
ctttcctggaccctcacttgacgaa

SEQ ID NO: 4068748 - DNA, 25 bp, Homo sapien
cctcacttgacgaatctgggcactg

SEQ ID NO: 4068749 - DNA, 25 bp, Homo sapien
tcacttgacgaatctgggcactgcc

SEQ ID NO: 4068750 - DNA, 25 bp, Homo sapien
tggaccctcacttgacgaatctggg

SEQ ID NO: 4068751 - DNA, 25 bp, Homo sapien
tctacaccacagatttatgccatag

SEQ ID NO: 4068752 - DNA, 25 bp, Homo sapien
tgccatagcctcatgtagaaattca

SEQ ID NO: 4068753 - DNA, 25 bp, Homo sapien
tccagagtgatccttctacaccaca

SEQ ID NO: 4068754 - DNA, 25 bp, Homo sapien
tgcttccagagtgatccttctacac

SEQ ID NO: 4068755 - DNA, 25 bp, Homo sapien
cccacgtctgttcctagccagaagg

SEQ ID NO: 4068756 - DNA, 25 bp, Homo sapien
tgctgacagtgccccacgtctgttc

SEQ ID NO: 4068757 - DNA, 25 bp, Homo sapien
ctgttcctagccagaaggcacaagg

SEQ ID NO: 4068758 - DNA, 25 bp, Homo sapien
ttttcttatgaggctgatgctgaca

SEQ ID NO: 4068759 - DNA, 25 bp, Homo sapien
gtaggccacgagcagtagcatccac

SEQ ID NO: 4068760 - DNA, 25 bp, Homo sapien
cctgaaaagcccctggtgaagctgt

SEQ ID NO: 4068761 - DNA, 25 bp, Homo sapien
cacttgaagaactctcggaagccga

SEQ ID NO: 4068762 - DNA, 25 bp, Homo sapien
ccatacaggttactcacgagggtgg

SEQ ID NO: 4068763 - DNA, 25 bp, Homo sapien
tgctgtttcttcgtgctcggaacaa

SEQ ID NO: 4068764 - DNA, 25 bp, Homo sapien
ctctgatgagggcaaatgctttctg

SEQ ID NO: 4068765 - DNA, 25 bp, Homo sapien
catcttctcaatggcagcggtgaga

SEQ ID NO: 4068766 - DNA, 25 bp, Homo sapien
ttcgtgctcggaacaaggcataggg

SEQ ID NO: 4068767 - DNA, 25 bp, Homo sapien
caggacagcccctacgtgtgcagag

SEQ ID NO: 4068768 - DNA, 25 bp, Homo sapien
ctgggcccaacagatgtcctggcag

SEQ ID NO: 4068769 - DNA, 25 bp, Homo sapien
gggcccaacagatgtcctggcagcg

SEQ ID NO: 4068770 - DNA, 25 bp, Homo sapien
gggccacagtatcctcctcatcgtc

SEQ ID NO: 4068771 - DNA, 25 bp, Homo sapien
gcccaacagatgtcctggcagcggg

SEQ ID NO: 4068772 - DNA, 25 bp, Homo sapien
caagaccagtgcaaagaaagcagcg

SEQ ID NO: 4068773 - DNA, 25 bp, Homo sapien
agaccagtgcaaagaaagcagcgaa

SEQ ID NO: 4068774 - DNA, 25 bp, Homo sapien
aagaccagtgcaaagaaagcagcga

SEQ ID NO: 4068775 - DNA, 25 bp, Homo sapien
ggcttggggccacgtttgtatgttg

SEQ ID NO: 4068776 - DNA, 25 bp, Homo sapien
aacccctcatctgcgagcacgtggg

SEQ ID NO: 4068777 - DNA, 25 bp, Homo sapien
ggtaactctcaacccctcatctgcg

SEQ ID NO: 4068778 - DNA, 25 bp, Homo sapien
gaggtcctcgaacccactctggtaa

SEQ ID NO: 4068779 - DNA, 25 bp, Homo sapien
gggctgggtgacgaacatgctctcc

SEQ ID NO: 4068780 - DNA, 25 bp, Homo sapien
tagagcatggtgaagaaggccgcca

SEQ ID NO: 4068781 - DNA, 25 bp, Homo sapien
tcccgtagtgcaggccgtagagcat

SEQ ID NO: 4068782 - DNA, 25 bp, Homo sapien
ctctccacgaaggagacagccatgg

SEQ ID NO: 4068783 - DNA, 25 bp, Homo sapien
tgtagcatgcggtacaaagggccct

SEQ ID NO: 4068784 - DNA, 25 bp, Homo sapien
cctgagaagttgaggagccggtcca

SEQ ID NO: 4068785 - DNA, 25 bp, Homo sapien
caggaacaccgttgtgactgtagca

SEQ ID NO: 4068786 - DNA, 25 bp, Homo sapien
gagtgccttccagcaaacagacctg

SEQ ID NO: 4068787 - DNA, 25 bp, Homo sapien
ccaggtgcccggctgtacccccagg

SEQ ID NO: 4068788 - DNA, 25 bp, Homo sapien
cccaggtgcccggctgtacccccag

SEQ ID NO: 4068789 - DNA, 25 bp, Homo sapien
gcccaggtgcccggctgtaccccca

SEQ ID NO: 4068790 - DNA, 25 bp, Homo sapien
ggctgggagaagcctcggggcccca

SEQ ID NO: 4068791 - DNA, 25 bp, Homo sapien
gctgggagaagcctcggggccccac

SEQ ID NO: 4068792 - DNA, 25 bp, Homo sapien
tggggctgggagaagcctcggggcc

SEQ ID NO: 4068793 - DNA, 25 bp, Homo sapien
ctgtggggctgggagaagcctcggg

SEQ ID NO: 4068794 - DNA, 25 bp, Homo sapien
gggccactccgtgccgccttgggct

SEQ ID NO: 4068795 - DNA, 25 bp, Homo sapien
gctgaaggtacagacactgcctgta

SEQ ID NO: 4068796 - DNA, 25 bp, Homo sapien
gttccagctgaaggtacagacactg

SEQ ID NO: 4068797 - DNA, 25 bp, Homo sapien
cgcagctcttgctccacgtgttcca

SEQ ID NO: 4068798 - DNA, 25 bp, Homo sapien
ctgatgaccccaaagtgagtgttac

SEQ ID NO: 4068799 - DNA, 25 bp, Homo sapien
aatgacatcttccaccaaggcgagg

SEQ ID NO: 4068800 - DNA, 25 bp, Homo sapien
tgttgatgtccatcaagttcactga

SEQ ID NO: 4068801 - DNA, 25 bp, Homo sapien
gagggagctgacgattcttgacaca

SEQ ID NO: 4068802 - DNA, 25 bp, Homo sapien
gtactcctcaaagcgtggcacacag

SEQ ID NO: 4068803 - DNA, 25 bp, Homo sapien
tgaatccctcttctagggtttgaac

SEQ ID NO: 4068804 - DNA, 25 bp, Homo sapien
gagatgtgatagtgacctccctgag

SEQ ID NO: 4068805 - DNA, 25 bp, Homo sapien
tctagggtttgaactcattccaggc

SEQ ID NO: 4068806 - DNA, 25 bp, Homo sapien
cccccaggctagctgaggttgagga

SEQ ID NO: 4068807 - DNA, 25 bp, Homo sapien
ccccaggctagctgaggttgaggac

SEQ ID NO: 4068808 - DNA, 25 bp, Homo sapien
agctctccaggccaatcatcacctc

SEQ ID NO: 4068809 - DNA, 25 bp, Homo sapien
cagaaggccgtcctccatgggctgt

SEQ ID NO: 4068810 - DNA, 25 bp, Homo sapien
tctgaacaatcaggaggttgatggg

SEQ ID NO: 4068811 - DNA, 25 bp, Homo sapien
ggacgggtgttctgaaagatctgaa

SEQ ID NO: 4068812 - DNA, 25 bp, Homo sapien
caagtccatcttttgctcagctggg

SEQ ID NO: 4068813 - DNA, 25 bp, Homo sapien
aggacaccctctggacgcgggtgaa

SEQ ID NO: 4068814 - DNA, 25 bp, Homo sapien
cgcagcggctgaagatcgaatacca

SEQ ID NO: 4068815 - DNA, 25 bp, Homo sapien
gaagcccgcggaagtcttcatgaaa

SEQ ID NO: 4068816 - DNA, 25 bp, Homo sapien
caggaaacaccttatcgaggacgca

SEQ ID NO: 4068817 - DNA, 25 bp, Homo sapien
tggatagccaggagttgcacaggaa

SEQ ID NO: 4068818 - DNA, 25 bp, Homo sapien
gaggacgcaatctccaacattgatg

SEQ ID NO: 4068819 - DNA, 25 bp, Homo sapien
ttccggtccatcaccaggtcataga

SEQ ID NO: 4068820 - DNA, 25 bp, Homo sapien
aaaaccggagtgtcgggatcagcca

SEQ ID NO: 4068821 - DNA, 25 bp, Homo sapien
cctgagttgtcatgccacagccgga

SEQ ID NO: 4068822 - DNA, 25 bp, Homo sapien
cggaggctccgcagttctcccaggg

SEQ ID NO: 4068823 - DNA, 25 bp, Homo sapien
tccatccaggccatacagggtgaca

SEQ ID NO: 4068824 - DNA, 25 bp, Homo sapien
tgtgtagactgtcaccaggtagtgg

SEQ ID NO: 4068825 - DNA, 25 bp, Homo sapien
gactgtcaccaggtagtggtactga

SEQ ID NO: 4068826 - DNA, 25 bp, Homo sapien
ctttgaggacgtggctgcccctcgt

SEQ ID NO: 4068827 - DNA, 25 bp, Homo sapien
ccctcgtcggtgtcctgtgtagact

SEQ ID NO: 4068828 - DNA, 25 bp, Homo sapien
cacagggttgtcctcaaaggtggca

SEQ ID NO: 4068829 - DNA, 25 bp, Homo sapien
caaagagctcagcagtctggtggat

SEQ ID NO: 4068830 - DNA, 25 bp, Homo sapien
cttccgaagaaagtgaggtggttgc

SEQ ID NO: 4068831 - DNA, 25 bp, Homo sapien
gacatcaccaggaacgtgcttccga

SEQ ID NO: 4068832 - DNA, 25 bp, Homo sapien
tctccaaaacgcaggtcctgtgggc

SEQ ID NO: 4068833 - DNA, 25 bp, Homo sapien
tcagggaccacagtcaaatagtaga

SEQ ID NO: 4068834 - DNA, 25 bp, Homo sapien
gtgatgccaaccgtgaggtccctgc

SEQ ID NO: 4068835 - DNA, 25 bp, Homo sapien
tggcatcctgagtcgtcccaagtct

SEQ ID NO: 4068836 - DNA, 25 bp, Homo sapien
tgagtgcaatgtctggtctccagtg

SEQ ID NO: 4068837 - DNA, 25 bp, Homo sapien
aaagcttcaggactggtcaggttca

SEQ ID NO: 4068838 - DNA, 25 bp, Homo sapien
ccatagcccaggctaagcgtgagtg

SEQ ID NO: 4068839 - DNA, 25 bp, Homo sapien
tcaggttcaacacggtcggctggct

SEQ ID NO: 4068840 - DNA, 25 bp, Homo sapien
gacagtcccgctgacatcaaagtgg

SEQ ID NO: 4068841 - DNA, 25 bp, Homo sapien
tatgagttgaccactagggctggtc

SEQ ID NO: 4068842 - DNA, 25 bp, Homo sapien
gatattctccgacagattcttcaca

SEQ ID NO: 4068843 - DNA, 25 bp, Homo sapien
tagggctggtcacacggaggccacc

SEQ ID NO: 4068844 - DNA, 25 bp, Homo sapien
cacgggctcctggccgccctccaga

SEQ ID NO: 4068845 - DNA, 25 bp, Homo sapien
acgggctcctggccgccctccagag

SEQ ID NO: 4068846 - DNA, 25 bp, Homo sapien
cagagtctgcggcatcagggcgcag

SEQ ID NO: 4068847 - DNA, 25 bp, Homo sapien
gttgcagagtctgcggcatcagggc

SEQ ID NO: 4068848 - DNA, 25 bp, Homo sapien
tctgcggcatcagggcgcagggagg

SEQ ID NO: 4068849 - DNA, 25 bp, Homo sapien
ggttgcagagtctgcggcatcaggg

SEQ ID NO: 4068850 - DNA, 25 bp, Homo sapien
cgcgcgcacgccaaaagtaagagga

SEQ ID NO: 4068851 - DNA, 25 bp, Homo sapien
tgtatccccaatgtctacagcagcg

SEQ ID NO: 4068852 - DNA, 25 bp, Homo sapien
tcaggtggatctaacactgggcttg

SEQ ID NO: 4068853 - DNA, 25 bp, Homo sapien
catggttaacagcaggctagtccca

SEQ ID NO: 4068854 - DNA, 25 bp, Homo sapien
aggccccctggcagttttcccagca

SEQ ID NO: 4068855 - DNA, 25 bp, Homo sapien
ctgtttgtgtacacagagatggagg

SEQ ID NO: 4068856 - DNA, 25 bp, Homo sapien
cctggcagttttcccagcaggaggg

SEQ ID NO: 4068857 - DNA, 25 bp, Homo sapien
cccctggcagttttcccagcaggag

SEQ ID NO: 4068858 - DNA, 25 bp, Homo sapien
ctgcacatgctccatgactcgaagc

SEQ ID NO: 4068859 - DNA, 25 bp, Homo sapien
catgctccatgactcgaagcagccg

SEQ ID NO: 4068860 - DNA, 25 bp, Homo sapien
tgactcgaagcagccgcagcactgt

SEQ ID NO: 4068861 - DNA, 25 bp, Homo sapien
tccatgactcgaagcagccgcagca

SEQ ID NO: 4068862 - DNA, 25 bp, Homo sapien
ctgcctggcgcctctggtcctcagg

SEQ ID NO: 4068863 - DNA, 25 bp, Homo sapien
ctcactgtcaacagggcctcactgg

SEQ ID NO: 4068864 - DNA, 25 bp, Homo sapien
gcactcactgtcaacagggcctcac

SEQ ID NO: 4068865 - DNA, 25 bp, Homo sapien
gctgcctggcgcctctggtcctcag

SEQ ID NO: 4068866 - DNA, 25 bp, Homo sapien
tggaagccagtacaggagtgtgatc

SEQ ID NO: 4068867 - DNA, 25 bp, Homo sapien
gagtgtgatcaagcccattacctgg

SEQ ID NO: 4068868 - DNA, 25 bp, Homo sapien
tcacagccatatgggcaggtacagt

SEQ ID NO: 4068869 - DNA, 25 bp, Homo sapien
tagcagtgtctggactcacatttgg

SEQ ID NO: 4068870 - DNA, 25 bp, Homo sapien
gggcaccttcccatgaatcgcccat

SEQ ID NO: 4068871 - DNA, 25 bp, Homo sapien
cctagcgtgagatacatgggcagca

SEQ ID NO: 4068872 - DNA, 25 bp, Homo sapien
tcacctagcgtgagatacatgggca

SEQ ID NO: 4068873 - DNA, 25 bp, Homo sapien
cttcccatgaatcgcccatgcagga

SEQ ID NO: 4068874 - DNA, 25 bp, Homo sapien
ggccgagggtgtgagttccttactc

SEQ ID NO: 4068875 - DNA, 25 bp, Homo sapien
tgcagacagtgatcccagcacatgc

SEQ ID NO: 4068876 - DNA, 25 bp, Homo sapien
gagttccttactccggcaggtcacc

SEQ ID NO: 4068877 - DNA, 25 bp, Homo sapien
gtggtgactgcagacagtgatccca

SEQ ID NO: 4068878 - DNA, 25 bp, Homo sapien
ggctggccgcctcattcttcaaaag

SEQ ID NO: 4068879 - DNA, 25 bp, Homo sapien
tatccgaacaggtgggaccaacgtc

SEQ ID NO: 4068880 - DNA, 25 bp, Homo sapien
tgcgaatggtaagtgacaaagccgg

SEQ ID NO: 4068881 - DNA, 25 bp, Homo sapien
gctgtaacatagatggaggcctcac

SEQ ID NO: 4068882 - DNA, 25 bp, Homo sapien
ttctcccctgatccatgaaccttga

SEQ ID NO: 4068883 - DNA, 25 bp, Homo sapien
tggtgtcagccgcttgggagacacc

SEQ ID NO: 4068884 - DNA, 25 bp, Homo sapien
gatccatgaaccttgatccacagcc

SEQ ID NO: 4068885 - DNA, 25 bp, Homo sapien
ccgcttgggagacaccacaggtttc

SEQ ID NO: 4068886 - DNA, 25 bp, Homo sapien
tctgacacggcagcctggaatgcta

SEQ ID NO: 4068887 - DNA, 25 bp, Homo sapien
gcagcctggaatgctacatcctcaa

SEQ ID NO: 4068888 - DNA, 25 bp, Homo sapien
caacacatgtgtctccgagtgccac

SEQ ID NO: 4068889 - DNA, 25 bp, Homo sapien
tctgacgtctatgctcagtgactgt

SEQ ID NO: 4068890 - DNA, 25 bp, Homo sapien
cccctgcacgattggtggcagaaat

SEQ ID NO: 4068891 - DNA, 25 bp, Homo sapien
ctgcgtgtcccctgcacgattggtg

SEQ ID NO: 4068892 - DNA, 25 bp, Homo sapien
cgtgtcccctgcacgattggtggca

SEQ ID NO: 4068893 - DNA, 25 bp, Homo sapien
tgtcccctgcacgattggtggcaga

SEQ ID NO: 4068894 - DNA, 25 bp, Homo sapien
tcagggccacagtgtaggcaggaac

SEQ ID NO: 4068895 - DNA, 25 bp, Homo sapien
ttcagggccacagtgtaggcaggaa

SEQ ID NO: 4068896 - DNA, 25 bp, Homo sapien
tcttaacggtgatgcatttccacat

SEQ ID NO: 4068897 - DNA, 25 bp, Homo sapien
ccctcttaacggtgatgcatttcca

SEQ ID NO: 4068898 - DNA, 25 bp, Homo sapien
cacagccctcttaacggtgatgcat

SEQ ID NO: 4068899 - DNA, 25 bp, Homo sapien
cagccctcttaacggtgatgcattt

SEQ ID NO: 4068900 - DNA, 25 bp, Homo sapien
ggcccctgttctgcaagaagatgag

SEQ ID NO: 4068901 - DNA, 25 bp, Homo sapien
ctcgcacacggaacatattctttgc

SEQ ID NO: 4068902 - DNA, 25 bp, Homo sapien
cccctgttctgcaagaagatgagcc

SEQ ID NO: 4068903 - DNA, 25 bp, Homo sapien
cggaacatattctttgcagctccca

SEQ ID NO: 4068904 - DNA, 25 bp, Homo sapien
ctgtggaggcgttgcagaagatggc

SEQ ID NO: 4068905 - DNA, 25 bp, Homo sapien
cagtgctgatcacataggtgtcctc

SEQ ID NO: 4068906 - DNA, 25 bp, Homo sapien
tccccataggcatgcctggtcagtg

SEQ ID NO: 4068907 - DNA, 25 bp, Homo sapien
aagatggcaaagctcgtcagaacgg

SEQ ID NO: 4068908 - DNA, 25 bp, Homo sapien
ctgtggctctgattcggatgacctc

SEQ ID NO: 4068909 - DNA, 25 bp, Homo sapien
ctccccgggactgcagaaacgagct

SEQ ID NO: 4068910 - DNA, 25 bp, Homo sapien
attcggatgacctctccccgggact

SEQ ID NO: 4068911 - DNA, 25 bp, Homo sapien
tgttcaacagcaacgtggaggtgtt

SEQ ID NO: 4068912 - DNA, 25 bp, Homo sapien
taaggaccttggccaaaatcctctg

SEQ ID NO: 4068913 - DNA, 25 bp, Homo sapien
tggccaaaatcctctgagtctgcag

SEQ ID NO: 4068914 - DNA, 25 bp, Homo sapien
aatcctctgagtctgcaggcatcca

SEQ ID NO: 4068915 - DNA, 25 bp, Homo sapien
ggaccttggccaaaatcctctgagt

SEQ ID NO: 4068916 - DNA, 25 bp, Homo sapien
tgctctgttggggtgttgtccaaat

SEQ ID NO: 4068917 - DNA, 25 bp, Homo sapien
gctctgttggggtgttgtccaaata

SEQ ID NO: 4068918 - DNA, 25 bp, Homo sapien
ctgctctgttggggtgttgtccaaa

SEQ ID NO: 4068919 - DNA, 25 bp, Homo sapien
ggtgaccctgagcagaatgtctttg

SEQ ID NO: 4068920 - DNA, 25 bp, Homo sapien
gaccctgagcagaatgtctttgctg

SEQ ID NO: 4068921 - DNA, 25 bp, Homo sapien
ggcattaactggcctgcagttcctc

SEQ ID NO: 4068922 - DNA, 25 bp, Homo sapien
gagcagaatgtctttgctggcatta

SEQ ID NO: 4068923 - DNA, 25 bp, Homo sapien
gctccccgaggcattgctatcatct

SEQ ID NO: 4068924 - DNA, 25 bp, Homo sapien
gaagcagctgcctctcaacacagct

SEQ ID NO: 4068925 - DNA, 25 bp, Homo sapien
gcagacacgtagaggcactgctctg

SEQ ID NO: 4068926 - DNA, 25 bp, Homo sapien
tccctctggtctgtgcgaagcagct

SEQ ID NO: 4068927 - DNA, 25 bp, Homo sapien
tgactcgaggcctgagttcccaggg

SEQ ID NO: 4068928 - DNA, 25 bp, Homo sapien
ggaagcgtaactccttgtcattgtc

SEQ ID NO: 4068929 - DNA, 25 bp, Homo sapien
ggatccacatatggaccaggttgga

SEQ ID NO: 4068930 - DNA, 25 bp, Homo sapien
catgaccattggaagcgtaactcct

SEQ ID NO: 4068931 - DNA, 25 bp, Homo sapien
gtcactgtcgtgaaaggatccacat

SEQ ID NO: 4068932 - DNA, 25 bp, Homo sapien
ttcagcattcatcccagatggttct

SEQ ID NO: 4068933 - DNA, 25 bp, Homo sapien
cagcattcatcccagatggttcttg

SEQ ID NO: 4068934 - DNA, 25 bp, Homo sapien
agcattcatcccagatggttcttgg

SEQ ID NO: 4068935 - DNA, 25 bp, Homo sapien
tcagcattcatcccagatggttctt

SEQ ID NO: 4068936 - DNA, 25 bp, Homo sapien
tatcaagctttggttggaaacctta

SEQ ID NO: 4068937 - DNA, 25 bp, Homo sapien
tcaagctttggttggaaaccttata

SEQ ID NO: 4068938 - DNA, 25 bp, Homo sapien
gaacgggtatcaagctttggttgga

SEQ ID NO: 4068939 - DNA, 25 bp, Homo sapien
cagtgggaacgggtatcaagctttg

SEQ ID NO: 4068940 - DNA, 25 bp, Homo sapien
gtaaaaggttttatgctcccttgca

SEQ ID NO: 4068941 - DNA, 25 bp, Homo sapien
ggagcccaagcaggtgcaatgctct

SEQ ID NO: 4068942 - DNA, 25 bp, Homo sapien
ccaagcaggtgcaatgctctggact

SEQ ID NO: 4068943 - DNA, 25 bp, Homo sapien
aggttttatgctcccttgcagaaac

SEQ ID NO: 4068944 - DNA, 25 bp, Homo sapien
gtgatagtgatgttcccgatttcca

SEQ ID NO: 4068945 - DNA, 25 bp, Homo sapien
gatgttcccgatttccaaactcagg

SEQ ID NO: 4068946 - DNA, 25 bp, Homo sapien
gatagtgatgttcccgatttccaaa

SEQ ID NO: 4068947 - DNA, 25 bp, Homo sapien
agtgatgttcccgatttccaaactc

SEQ ID NO: 4068948 - DNA, 25 bp, Homo sapien
agatggtgatcaataggtcctgtcc

SEQ ID NO: 4068949 - DNA, 25 bp, Homo sapien
gatcagattgtacggtagcgagccc

SEQ ID NO: 4068950 - DNA, 25 bp, Homo sapien
tgtccaagctccaaatggtcagaag

SEQ ID NO: 4068951 - DNA, 25 bp, Homo sapien
gaaggttgcattgagtccagccacc

SEQ ID NO: 4068952 - DNA, 25 bp, Homo sapien
caaacacggtgaattccccaggaga

SEQ ID NO: 4068953 - DNA, 25 bp, Homo sapien
tcctgactgggacaggccggagcat

SEQ ID NO: 4068954 - DNA, 25 bp, Homo sapien
cactcactggttgtgcattcagcaa

SEQ ID NO: 4068955 - DNA, 25 bp, Homo sapien
cggagcatgcagtcacactgagcgt

SEQ ID NO: 4068956 - DNA, 25 bp, Homo sapien
cacattgccggccacagtcagggac

SEQ ID NO: 4068957 - DNA, 25 bp, Homo sapien
ctggacacattgccggccacagtca

SEQ ID NO: 4068958 - DNA, 25 bp, Homo sapien
ggacacattgccggccacagtcagg

SEQ ID NO: 4068959 - DNA, 25 bp, Homo sapien
acacattgccggccacagtcaggga

SEQ ID NO: 4068960 - DNA, 25 bp, Homo sapien
tagggatcaaaagtgtggctgtctc

SEQ ID NO: 4068961 - DNA, 25 bp, Homo sapien
tactaattatacaggacaggtttcc

SEQ ID NO: 4068962 - DNA, 25 bp, Homo sapien
gaaactctcactggacaccatcagc

SEQ ID NO: 4068963 - DNA, 25 bp, Homo sapien
ttcctatgtagggtgagaggagcca

SEQ ID NO: 4068964 - DNA, 25 bp, Homo sapien
cttcccggcactggtactgcaccca

SEQ ID NO: 4068965 - DNA, 25 bp, Homo sapien
tgagtcggacacaggtttccaaagt

SEQ ID NO: 4068966 - DNA, 25 bp, Homo sapien
tgccacctggcatgactgtagctcc

SEQ ID NO: 4068967 - DNA, 25 bp, Homo sapien
tgcacccacaggtaactgccctgag

SEQ ID NO: 4068968 - DNA, 25 bp, Homo sapien
acatttcaggaacttgcagctgagc

SEQ ID NO: 4068969 - DNA, 25 bp, Homo sapien
aaggtacatccattctcccgtccgg

SEQ ID NO: 4068970 - DNA, 25 bp, Homo sapien
gaggaaacagctcactaagccccag

SEQ ID NO: 4068971 - DNA, 25 bp, Homo sapien
gcctcaggaacgctggagtaagaag

SEQ ID NO: 4068972 - DNA, 25 bp, Homo sapien
ctccttgacgttggcccagctgcat

SEQ ID NO: 4068973 - DNA, 25 bp, Homo sapien
tggacctggatgacctgccccaagc

SEQ ID NO: 4068974 - DNA, 25 bp, Homo sapien
agatctgaaggacgcccggcatcct

SEQ ID NO: 4068975 - DNA, 25 bp, Homo sapien
attctggcgcccgtagacggcatcc

SEQ ID NO: 4068976 - DNA, 25 bp, Homo sapien
ggaactcgcacatgaaggcgaaggt

SEQ ID NO: 4068977 - DNA, 25 bp, Homo sapien
tgaaggcgaaggtctgggcgcagtc

SEQ ID NO: 4068978 - DNA, 25 bp, Homo sapien
gtctgggcgcagtccgaggtcaccc

SEQ ID NO: 4068979 - DNA, 25 bp, Homo sapien
ctcgcacatgaaggcgaaggtctgg

SEQ ID NO: 4068980 - DNA, 25 bp, Homo sapien
cactgggtgccttcgtcctgaatga

SEQ ID NO: 4068981 - DNA, 25 bp, Homo sapien
cagctctgggcatcacggaaggtgc

SEQ ID NO: 4068982 - DNA, 25 bp, Homo sapien
gaaggtgcgtccgagtggcacaaat

SEQ ID NO: 4068983 - DNA, 25 bp, Homo sapien
tggcacaaattcatagcaagcatct

SEQ ID NO: 4068984 - DNA, 25 bp, Homo sapien
acagtggtggccctaagcctcagag

SEQ ID NO: 4068985 - DNA, 25 bp, Homo sapien
ctgttagagcaaaagctgccttcct

SEQ ID NO: 4068986 - DNA, 25 bp, Homo sapien
agcaccaggagtaccaagcccactg

SEQ ID NO: 4068987 - DNA, 25 bp, Homo sapien
aaggccacctggctgttagagcaaa

SEQ ID NO: 4068988 - DNA, 25 bp, Homo sapien
tcaaatacaagatatgttcgatatt

SEQ ID NO: 4068989 - DNA, 25 bp, Homo sapien
tacaagatatgttcgatatttttag

SEQ ID NO: 4068990 - DNA, 25 bp, Homo sapien
aattgcacccttaaagcaacaaagg

SEQ ID NO: 4068991 - DNA, 25 bp, Homo sapien
ttatttaactcatataaaattgcag

SEQ ID NO: 4068992 - DNA, 25 bp, Homo sapien
cataaggccctgataagtaacgtcc

SEQ ID NO: 4068993 - DNA, 25 bp, Homo sapien
ggcatggtgtaatgtagactaccct

SEQ ID NO: 4068994 - DNA, 25 bp, Homo sapien
taacgtcctgcataaaattctagag

SEQ ID NO: 4068995 - DNA, 25 bp, Homo sapien
gattccccactgaaaatttctgagc

SEQ ID NO: 4068996 - DNA, 25 bp, Homo sapien
tagcaccgattggaaacgggcctta

SEQ ID NO: 4068997 - DNA, 25 bp, Homo sapien
tgttctatattttgacgtggctggg

SEQ ID NO: 4068998 - DNA, 25 bp, Homo sapien
gccagtttcttttgggtagcaccga

SEQ ID NO: 4068999 - DNA, 25 bp, Homo sapien
ggaaacattcattcagccgtgcact

SEQ ID NO: 4069000 - DNA, 25 bp, Homo sapien
catgtgaagtaatcccttgtaaaca

SEQ ID NO: 4069001 - DNA, 25 bp, Homo sapien
gaagcttactttctgaggtgttaaa

SEQ ID NO: 4069002 - DNA, 25 bp, Homo sapien
tctaggtttctattattcaaatggc

SEQ ID NO: 4069003 - DNA, 25 bp, Homo sapien
tattcaaatggcaatgttaagcagg

SEQ ID NO: 4069004 - DNA, 25 bp, Homo sapien
cagaagagctcagtaaagccaccag

SEQ ID NO: 4069005 - DNA, 25 bp, Homo sapien
tgtagcaggtatcgtacagcaggtg

SEQ ID NO: 4069006 - DNA, 25 bp, Homo sapien
gcacaatatcaagggtggctcagtt

SEQ ID NO: 4069007 - DNA, 25 bp, Homo sapien
tgtttcacctctaaaccagaagagc

SEQ ID NO: 4069008 - DNA, 25 bp, Homo sapien
gaaggttcacctttatctggaagag

SEQ ID NO: 4069009 - DNA, 25 bp, Homo sapien
gaataagagttcaccaggccaatgg

SEQ ID NO: 4069010 - DNA, 25 bp, Homo sapien
tatcgcacagagcaatcaatcagag

SEQ ID NO: 4069011 - DNA, 25 bp, Homo sapien
gaagccagctcaagatttcctgaag

SEQ ID NO: 4069012 - DNA, 25 bp, Homo sapien
taaacatagtatagcaggtgacatg

SEQ ID NO: 4069013 - DNA, 25 bp, Homo sapien
gcactattacgcaccaagtactgtg

SEQ ID NO: 4069014 - DNA, 25 bp, Homo sapien
gagaaaggaatgtcagctgctcaca

SEQ ID NO: 4069015 - DNA, 25 bp, Homo sapien
taaaaagtttcttgctcgagcaatg

SEQ ID NO: 4069016 - DNA, 25 bp, Homo sapien
gacacacggccttaagatgaagtga

SEQ ID NO: 4069017 - DNA, 25 bp, Homo sapien
taggatccacgtaaatgaacggcca

SEQ ID NO: 4069018 - DNA, 25 bp, Homo sapien
ggtgcttattaccacactcggcgaa

SEQ ID NO: 4069019 - DNA, 25 bp, Homo sapien
tagtattgtgcttgatcccctgcca

SEQ ID NO: 4069020 - DNA, 25 bp, Homo sapien
cttcctccggtatgcgccttctgca

SEQ ID NO: 4069021 - DNA, 25 bp, Homo sapien
gcagaactatatagagttggatgat

SEQ ID NO: 4069022 - DNA, 25 bp, Homo sapien
cctcagtgcagagttgaggttggca

SEQ ID NO: 4069023 - DNA, 25 bp, Homo sapien
atgtatctgtggaacatccctcacc

SEQ ID NO: 4069024 - DNA, 25 bp, Homo sapien
gcacgtcgtcaccaagggacctgat

SEQ ID NO: 4069025 - DNA, 25 bp, Homo sapien
ccaagggacctgattgttgtcatgg

SEQ ID NO: 4069026 - DNA, 25 bp, Homo sapien
ctccctggtgaaagtctactgcagt

SEQ ID NO: 4069027 - DNA, 25 bp, Homo sapien
tccgtaggtgggtagccttgctgat

SEQ ID NO: 4069028 - DNA, 25 bp, Homo sapien
taaaaaatcatgtaggatctggtac

SEQ ID NO: 4069029 - DNA, 25 bp, Homo sapien
gcgggcaaaagggtatcatcagctt

SEQ ID NO: 4069030 - DNA, 25 bp, Homo sapien
gatcgtacctcaaaattcaggctct

SEQ ID NO: 4069031 - DNA, 25 bp, Homo sapien
ccttccatttgtgtgggtgataaca

SEQ ID NO: 4069032 - DNA, 25 bp, Homo sapien
tttgtatcataccttttgtgaattg

SEQ ID NO: 4069033 - DNA, 25 bp, Homo sapien
tgtgaattgtgacaaccatcccgta

SEQ ID NO: 4069034 - DNA, 25 bp, Homo sapien
ttttgtgaattgtgacaaccatccc

SEQ ID NO: 4069035 - DNA, 25 bp, Homo sapien
aattgtgacaaccatcccgtaatca

SEQ ID NO: 4069036 - DNA, 25 bp, Homo sapien
gcagaagttttgaacaatctttgca

SEQ ID NO: 4069037 - DNA, 25 bp, Homo sapien
gccactgttggggtgtgtaccagca

SEQ ID NO: 4069038 - DNA, 25 bp, Homo sapien
tgcagccactgttggggtgtgtacc

SEQ ID NO: 4069039 - DNA, 25 bp, Homo sapien
gttttgaacaatctttgcagccact

SEQ ID NO: 4069040 - DNA, 25 bp, Homo sapien
cagagctgacaaaagcaccccctgc

SEQ ID NO: 4069041 - DNA, 25 bp, Homo sapien
agagctgacaaaagcaccccctgct

SEQ ID NO: 4069042 - DNA, 25 bp, Homo sapien
gtcctcatcagaaacggtatcgcgg

SEQ ID NO: 4069043 - DNA, 25 bp, Homo sapien
acggtatcgcggatgctcctcaggt

SEQ ID NO: 4069044 - DNA, 25 bp, Homo sapien
gatgctcctcaggtaggcgtaggca

SEQ ID NO: 4069045 - DNA, 25 bp, Homo sapien
tcaggtaggcgtaggcagacttcat

SEQ ID NO: 4069046 - DNA, 25 bp, Homo sapien
tttgtttacatgcttcagtatattg

SEQ ID NO: 4069047 - DNA, 25 bp, Homo sapien
tggggaacattttgccatcatgctg

SEQ ID NO: 4069048 - DNA, 25 bp, Homo sapien
catgctgttctcttgtaccaaggat

SEQ ID NO: 4069049 - DNA, 25 bp, Homo sapien
ttctcacgaacccaggacctgtgct

SEQ ID NO: 4069050 - DNA, 25 bp, Homo sapien
tgaaatattttctagaagggtacca

SEQ ID NO: 4069051 - DNA, 25 bp, Homo sapien
gatggggaaggcattctaattgttt

SEQ ID NO: 4069052 - DNA, 25 bp, Homo sapien
ctgatttttagagtggttcctgcta

SEQ ID NO: 4069053 - DNA, 25 bp, Homo sapien
tctagaagggtaccacacaaaagga

SEQ ID NO: 4069054 - DNA, 25 bp, Homo sapien
tagatccgtcccttagcagccacac

SEQ ID NO: 4069055 - DNA, 25 bp, Homo sapien
ttagatccgtcccttagcagccaca

SEQ ID NO: 4069056 - DNA, 25 bp, Homo sapien
catcgccgtcagcataagtctcctt

SEQ ID NO: 4069057 - DNA, 25 bp, Homo sapien
gccgtcagcataagtctccttgctg

SEQ ID NO: 4069058 - DNA, 25 bp, Homo sapien
tctccatcgccgtcagcataagtct

SEQ ID NO: 4069059 - DNA, 25 bp, Homo sapien
gtcagcataagtctccttgctgtct

SEQ ID NO: 4069060 - DNA, 25 bp, Homo sapien
ctgaaaaatggtttcaaattggctt

SEQ ID NO: 4069061 - DNA, 25 bp, Homo sapien
gaaaatagatttcggaggactagag

SEQ ID NO: 4069062 - DNA, 25 bp, Homo sapien
aaaatagatttcggaggactagagg

SEQ ID NO: 4069063 - DNA, 25 bp, Homo sapien
cacagccgccccgtgtgtgcccagc

SEQ ID NO: 4069064 - DNA, 25 bp, Homo sapien
agcagttgccacagccgccccgtgt

SEQ ID NO: 4069065 - DNA, 25 bp, Homo sapien
agccgccccgtgtgtgcccagcaaa

SEQ ID NO: 4069066 - DNA, 25 bp, Homo sapien
agttgccacagccgccccgtgtgtg

SEQ ID NO: 4069067 - DNA, 25 bp, Homo sapien
acccctgaggccgtcctggcatcag

SEQ ID NO: 4069068 - DNA, 25 bp, Homo sapien
ccctgaggccgtcctggcatcagac

SEQ ID NO: 4069069 - DNA, 25 bp, Homo sapien
caaacccctgaggccgtcctggcat

SEQ ID NO: 4069070 - DNA, 25 bp, Homo sapien
aacccctgaggccgtcctggcatca

SEQ ID NO: 4069071 - DNA, 25 bp, Homo sapien
aagaagaaggtagcggccgctgtcc

SEQ ID NO: 4069072 - DNA, 25 bp, Homo sapien
gaagggatcgctggacactggcgat

SEQ ID NO: 4069073 - DNA, 25 bp, Homo sapien
caggcaggtccggtgcggaagggat

SEQ ID NO: 4069074 - DNA, 25 bp, Homo sapien
gcaggccataaaagcgtccagcaga

SEQ ID NO: 4069075 - DNA, 25 bp, Homo sapien
acttttccagcctgactccgggttg

SEQ ID NO: 4069076 - DNA, 25 bp, Homo sapien
ctccgggttggaacctgcgtgcctg

SEQ ID NO: 4069077 - DNA, 25 bp, Homo sapien
gatcagcgtctccaccgtcagacat

SEQ ID NO: 4069078 - DNA, 25 bp, Homo sapien
aggttcaaagtcgtagtctctttga

SEQ ID NO: 4069079 - DNA, 25 bp, Homo sapien
tgtaggcagaccacagtagtgctgc

SEQ ID NO: 4069080 - DNA, 25 bp, Homo sapien
ctgccttttagaggggagagcatgc

SEQ ID NO: 4069081 - DNA, 25 bp, Homo sapien
agcacctgctcgaggttgtaggcag

SEQ ID NO: 4069082 - DNA, 25 bp, Homo sapien
tcttttgagcttccgagcacctgct

SEQ ID NO: 4069083 - DNA, 25 bp, Homo sapien
cactgagcatcagctactttcatca

SEQ ID NO: 4069084 - DNA, 25 bp, Homo sapien
gaactcgagttgagactgtgcccat

SEQ ID NO: 4069085 - DNA, 25 bp, Homo sapien
ttactgttcagtttggcatcccagc

SEQ ID NO: 4069086 - DNA, 25 bp, Homo sapien
agttgatcgagtgggtcctccacca

SEQ ID NO: 4069087 - DNA, 25 bp, Homo sapien
cagctcctagcattgagttgatcga

SEQ ID NO: 4069088 - DNA, 25 bp, Homo sapien
ggttctgcataagcggccgggttcg

SEQ ID NO: 4069089 - DNA, 25 bp, Homo sapien
gatggtcgtgttggttgtaaatgac

SEQ ID NO: 4069090 - DNA, 25 bp, Homo sapien
gctgctctcgtctgtgggttgaatt

SEQ ID NO: 4069091 - DNA, 25 bp, Homo sapien
ggttcggcaggaccagaatccattt

SEQ ID NO: 4069092 - DNA, 25 bp, Homo sapien
gcagggggtcagcttacacctttga

SEQ ID NO: 4069093 - DNA, 25 bp, Homo sapien
gttttgttggcatggacattgcagg

SEQ ID NO: 4069094 - DNA, 25 bp, Homo sapien
tgccagccaggactgactcgtcttg

SEQ ID NO: 4069095 - DNA, 25 bp, Homo sapien
tcgtcttgaaggtacccaattggtg

SEQ ID NO: 4069096 - DNA, 25 bp, Homo sapien
gcaaagacccttgcagctggctcag

SEQ ID NO: 4069097 - DNA, 25 bp, Homo sapien
ggtggacggagcgactaaactgatt

SEQ ID NO: 4069098 - DNA, 25 bp, Homo sapien
taaactgattgtgctgggcgaactc

SEQ ID NO: 4069099 - DNA, 25 bp, Homo sapien
cacgtggtctggatcgtctggtccc

SEQ ID NO: 4069100 - DNA, 25 bp, Homo sapien
ctaggcctgtgctgtctcgaaggtg

SEQ ID NO: 4069101 - DNA, 25 bp, Homo sapien
gtgctgtctcgaaggtgatcccatc

SEQ ID NO: 4069102 - DNA, 25 bp, Homo sapien
gcgacgcaggagtggcactctgcct

SEQ ID NO: 4069103 - DNA, 25 bp, Homo sapien
gggcaccttgtaggcgacgcaggag

SEQ ID NO: 4069104 - DNA, 25 bp, Homo sapien
agagctgggaactcctgcaccgtcc

SEQ ID NO: 4069105 - DNA, 25 bp, Homo sapien
ctgcaccgtcccacagtcacctcgt

SEQ ID NO: 4069106 - DNA, 25 bp, Homo sapien
tcgtctcttcagaactggcccacag

SEQ ID NO: 4069107 - DNA, 25 bp, Homo sapien
tgcccgggctggcatgtgacagagc

SEQ ID NO: 4069108 - DNA, 25 bp, Homo sapien
tttttccaggaatacccgatgtcaa

SEQ ID NO: 4069109 - DNA, 25 bp, Homo sapien
ccaggaatacccgatgtcaataaag

SEQ ID NO: 4069110 - DNA, 25 bp, Homo sapien
aggaatacccgatgtcaataaaggc

SEQ ID NO: 4069111 - DNA, 25 bp, Homo sapien
tgcaggactgtgagcttgaaggcag

SEQ ID NO: 4069112 - DNA, 25 bp, Homo sapien
tttgtgatcttctgagggagccgca

SEQ ID NO: 4069113 - DNA, 25 bp, Homo sapien
cattagtctccgcatttcacaggtg

SEQ ID NO: 4069114 - DNA, 25 bp, Homo sapien
ttggttggacaacaaggcaggcctt

SEQ ID NO: 4069115 - DNA, 25 bp, Homo sapien
ctagtcccttgagttacctggccgg

SEQ ID NO: 4069116 - DNA, 25 bp, Homo sapien
agcaccttcctagaattagctgtga

SEQ ID NO: 4069117 - DNA, 25 bp, Homo sapien
agtcgctgtccctaccccggtacag

SEQ ID NO: 4069118 - DNA, 25 bp, Homo sapien
atctggtccgatggggcagatgcct

SEQ ID NO: 4069119 - DNA, 25 bp, Homo sapien
aggctccacatctggtccgatgggg

SEQ ID NO: 4069120 - DNA, 25 bp, Homo sapien
gatgcaaccaggaaaatcttgatca

SEQ ID NO: 4069121 - DNA, 25 bp, Homo sapien
ctcactttgtctatttgatgatgca

SEQ ID NO: 4069122 - DNA, 25 bp, Homo sapien
gtcaccactgtctacacccagaact

SEQ ID NO: 4069123 - DNA, 25 bp, Homo sapien
tcattcattcgttttggcagctgaa

SEQ ID NO: 4069124 - DNA, 25 bp, Homo sapien
cctgggataggagcaagttaatgca

SEQ ID NO: 4069125 - DNA, 25 bp, Homo sapien
atgattgcataatgaatctgatggc

SEQ ID NO: 4069126 - DNA, 25 bp, Homo sapien
tccaattgattggtgatctgcctgg

SEQ ID NO: 4069127 - DNA, 25 bp, Homo sapien
tacaaaaccaatgccatccaattga

SEQ ID NO: 4069128 - DNA, 25 bp, Homo sapien
caaactgccctttgaagctgtccat

SEQ ID NO: 4069129 - DNA, 25 bp, Homo sapien
cttctggttagatgattgaggtgac

SEQ ID NO: 4069130 - DNA, 25 bp, Homo sapien
gttcagtttctgcaaccagttccag

SEQ ID NO: 4069131 - DNA, 25 bp, Homo sapien
gaggtgaccagaacatacaggaaaa

SEQ ID NO: 4069132 - DNA, 25 bp, Homo sapien
cccgtccaggcagcttgggtccaga

SEQ ID NO: 4069133 - DNA, 25 bp, Homo sapien
ccaggcgccccgtccaggcagcttg

SEQ ID NO: 4069134 - DNA, 25 bp, Homo sapien
ggcgccccgtccaggcagcttgggt

SEQ ID NO: 4069135 - DNA, 25 bp, Homo sapien
agagccttctttgcacgtgcagcct

SEQ ID NO: 4069136 - DNA, 25 bp, Homo sapien
gcacactacttctgcttcatgtgag

SEQ ID NO: 4069137 - DNA, 25 bp, Homo sapien
acactacttctgcttcatgtgaggg

SEQ ID NO: 4069138 - DNA, 25 bp, Homo sapien
ggcacgtcgcacactacttctgctt

SEQ ID NO: 4069139 - DNA, 25 bp, Homo sapien
caccaggtaggcacgtcgcacacta

SEQ ID NO: 4069140 - DNA, 25 bp, Homo sapien
ttactgtgtggtctcttccgtgtca

SEQ ID NO: 4069141 - DNA, 25 bp, Homo sapien
aggatcccaggggtgaactgagtca

SEQ ID NO: 4069142 - DNA, 25 bp, Homo sapien
gtggtctcttccgtgtcaccgcact

SEQ ID NO: 4069143 - DNA, 25 bp, Homo sapien
ggaggtgctgcgtgaggatcccagg

SEQ ID NO: 4069144 - DNA, 25 bp, Homo sapien
tttaagtggccctcttcaccgtggc

SEQ ID NO: 4069145 - DNA, 25 bp, Homo sapien
cagcaacatggagtttaagtggccc

SEQ ID NO: 4069146 - DNA, 25 bp, Homo sapien
acatggagtttaagtggccctcttc

SEQ ID NO: 4069147 - DNA, 25 bp, Homo sapien
ttaagtggccctcttcaccgtggcc

SEQ ID NO: 4069148 - DNA, 25 bp, Homo sapien
tggcctccacagtcttcacgtcttc

SEQ ID NO: 4069149 - DNA, 25 bp, Homo sapien
catggcctccacagtcttcacgtct

SEQ ID NO: 4069150 - DNA, 25 bp, Homo sapien
ggcctccacagtcttcacgtcttct

SEQ ID NO: 4069151 - DNA, 25 bp, Homo sapien
atggcctccacagtcttcacgtctt

SEQ ID NO: 4069152 - DNA, 25 bp, Homo sapien
gggctcgccgttgacagcgatgtca

SEQ ID NO: 4069153 - DNA, 25 bp, Homo sapien
ctcgccgttgacagcgatgtcagag

SEQ ID NO: 4069154 - DNA, 25 bp, Homo sapien
tcttggcagtgcgtgtggaaaactg

SEQ ID NO: 4069155 - DNA, 25 bp, Homo sapien
cagtcttggcagtgcgtgtggaaaa

SEQ ID NO: 4069156 - DNA, 25 bp, Homo sapien
ttcccgacggcgccggtgtctgcag

SEQ ID NO: 4069157 - DNA, 25 bp, Homo sapien
ctgatagaacaggtttcccgacggc

SEQ ID NO: 4069158 - DNA, 25 bp, Homo sapien
ggctgatagaacaggtttcccgacg

SEQ ID NO: 4069159 - DNA, 25 bp, Homo sapien
gatagaacaggtttcccgacggcgc

SEQ ID NO: 4069160 - DNA, 25 bp, Homo sapien
cccattccttctggcaaagtcagat

SEQ ID NO: 4069161 - DNA, 25 bp, Homo sapien
gtggaagtcgcccttccctggcgga

SEQ ID NO: 4069162 - DNA, 25 bp, Homo sapien
cgggaagccaaaaccgcctgtgaag

SEQ ID NO: 4069163 - DNA, 25 bp, Homo sapien
tggagttccacttgccagctcgagg

SEQ ID NO: 4069164 - DNA, 25 bp, Homo sapien
gcgttgagcgccgtgagggaagctt

SEQ ID NO: 4069165 - DNA, 25 bp, Homo sapien
aggcgataaccgcactgggcgttga

SEQ ID NO: 4069166 - DNA, 25 bp, Homo sapien
tcaggcatcgcacattccatactcc

SEQ ID NO: 4069167 - DNA, 25 bp, Homo sapien
ttcaaaggcgcacggcaggcgataa

SEQ ID NO: 4069168 - DNA, 25 bp, Homo sapien
tggcgcagcttcgtttctctggaca

SEQ ID NO: 4069169 - DNA, 25 bp, Homo sapien
cgcagcttcgtttctctggacacca

SEQ ID NO: 4069170 - DNA, 25 bp, Homo sapien
ggcgcagcttcgtttctctggacac

SEQ ID NO: 4069171 - DNA, 25 bp, Homo sapien
ctggcgcagcttcgtttctctggac

SEQ ID NO: 4069172 - DNA, 25 bp, Homo sapien
tgaccgtagcacaccgaagctgaga

SEQ ID NO: 4069173 - DNA, 25 bp, Homo sapien
gttctgattagctccgtgaccgtag

SEQ ID NO: 4069174 - DNA, 25 bp, Homo sapien
tggttctccccgaaacagtggatat

SEQ ID NO: 4069175 - DNA, 25 bp, Homo sapien
tcctgggactgctataagggtgaca

SEQ ID NO: 4069176 - DNA, 25 bp, Homo sapien
cgcagcaccagggaggctcctgtga

SEQ ID NO: 4069177 - DNA, 25 bp, Homo sapien
ggagagccttgggagggcacagaac

SEQ ID NO: 4069178 - DNA, 25 bp, Homo sapien
ggctcctgtgactttcaggagagcc

SEQ ID NO: 4069179 - DNA, 25 bp, Homo sapien
ccagggaggctcctgtgactttcag

SEQ ID NO: 4069180 - DNA, 25 bp, Homo sapien
agctcctggctcttcgctgttctgc

SEQ ID NO: 4069181 - DNA, 25 bp, Homo sapien
acagctcctggctcttcgctgttct

SEQ ID NO: 4069182 - DNA, 25 bp, Homo sapien
tctgtactcctcttcgggaactctc

SEQ ID NO: 4069183 - DNA, 25 bp, Homo sapien
tcctcttcgggaactctccccacag

SEQ ID NO: 4069184 - DNA, 25 bp, Homo sapien
atctctggcagagcgatgtagttgc

SEQ ID NO: 4069185 - DNA, 25 bp, Homo sapien
taatctctggcagagcgatgtagtt

SEQ ID NO: 4069186 - DNA, 25 bp, Homo sapien
gaataatctctggcagagcgatgta

SEQ ID NO: 4069187 - DNA, 25 bp, Homo sapien
ctctggcagagcgatgtagttgcca

SEQ ID NO: 4069188 - DNA, 25 bp, Homo sapien
tagcatagggtttctcagtgaaaca

SEQ ID NO: 4069189 - DNA, 25 bp, Homo sapien
catcatcattactgtagcatagggt

SEQ ID NO: 4069190 - DNA, 25 bp, Homo sapien
tgatggtcagagtggacctctcagc

SEQ ID NO: 4069191 - DNA, 25 bp, Homo sapien
cattactgtagcatagggtttctca

SEQ ID NO: 4069192 - DNA, 25 bp, Homo sapien
gcctgtcccggcgcccatgtagctt

SEQ ID NO: 4069193 - DNA, 25 bp, Homo sapien
cgcctgtcccggcgcccatgtagct

SEQ ID NO: 4069194 - DNA, 25 bp, Homo sapien
ctgtcccggcgcccatgtagcttcc

SEQ ID NO: 4069195 - DNA, 25 bp, Homo sapien
tccgcctgtcccggcgcccatgtag

SEQ ID NO: 4069196 - DNA, 25 bp, Homo sapien
cgacttttagagctggtgcgcagtc

SEQ ID NO: 4069197 - DNA, 25 bp, Homo sapien
gccccagcctctggcgacttttaga

SEQ ID NO: 4069198 - DNA, 25 bp, Homo sapien
gcctctggcgacttttagagctggt

SEQ ID NO: 4069199 - DNA, 25 bp, Homo sapien
ctggtgcgcagtcctgcctgagcat

SEQ ID NO: 4069200 - DNA, 25 bp, Homo sapien
gagtggctggtttaaatcaggaaca

SEQ ID NO: 4069201 - DNA, 25 bp, Homo sapien
gcacagaaactttggccaagatcat

SEQ ID NO: 4069202 - DNA, 25 bp, Homo sapien
cttagtttgggaactgaaagccttg

SEQ ID NO: 4069203 - DNA, 25 bp, Homo sapien
tatgagtagtgtcagggagctctgc

SEQ ID NO: 4069204 - DNA, 25 bp, Homo sapien
tgcgtttgccctgctttatatttgg

SEQ ID NO: 4069205 - DNA, 25 bp, Homo sapien
gggtggccgcagatcactttgcgtt

SEQ ID NO: 4069206 - DNA, 25 bp, Homo sapien
ggccgcagatcactttgcgtttgcc

SEQ ID NO: 4069207 - DNA, 25 bp, Homo sapien
ttggggtggccgcagatcactttgc

SEQ ID NO: 4069208 - DNA, 25 bp, Homo sapien
atccttggggctgggtcttaactgg

SEQ ID NO: 4069209 - DNA, 25 bp, Homo sapien
ctgccccagctgcacatccttgggg

SEQ ID NO: 4069210 - DNA, 25 bp, Homo sapien
gctgggtcttaactgggacccagac

SEQ ID NO: 4069211 - DNA, 25 bp, Homo sapien
gacccctcagcttgctgtcttcctg

SEQ ID NO: 4069212 - DNA, 25 bp, Homo sapien
tgtctcttgggcctctatcaaggta

SEQ ID NO: 4069213 - DNA, 25 bp, Homo sapien
acagtgacgtcagcatcctgctgcg

SEQ ID NO: 4069214 - DNA, 25 bp, Homo sapien
tatcaaggtattgacgacagtgacg

SEQ ID NO: 4069215 - DNA, 25 bp, Homo sapien
tgccaccctctttgtgttatagttc

SEQ ID NO: 4069216 - DNA, 25 bp, Homo sapien
gggacgagggggtgctcgctcctca

SEQ ID NO: 4069217 - DNA, 25 bp, Homo sapien
tgatcggggacgagggggtgctcgc

SEQ ID NO: 4069218 - DNA, 25 bp, Homo sapien
gacgagggggtgctcgctcctcaca

SEQ ID NO: 4069219 - DNA, 25 bp, Homo sapien
agggggtgctcgctcctcacagctg

SEQ ID NO: 4069220 - DNA, 25 bp, Homo sapien
ccccggtccgttctggcctggctgc

SEQ ID NO: 4069221 - DNA, 25 bp, Homo sapien
cccccggtccgttctggcctggctg

SEQ ID NO: 4069222 - DNA, 25 bp, Homo sapien
cccggtccgttctggcctggctgct

SEQ ID NO: 4069223 - DNA, 25 bp, Homo sapien
gctgaaggattgaccgggcaggtga

SEQ ID NO: 4069224 - DNA, 25 bp, Homo sapien
tctagggctgaaggattgaccgggc

SEQ ID NO: 4069225 - DNA, 25 bp, Homo sapien
gctttattctgggctctagggctga

SEQ ID NO: 4069226 - DNA, 25 bp, Homo sapien
ggggctgtgctttattctgggctct

SEQ ID NO: 4069227 - DNA, 25 bp, Homo sapien
ccttgaagcgttgtggtccctcacg

SEQ ID NO: 4069228 - DNA, 25 bp, Homo sapien
cacagctgaaaggaacaccttggcc

SEQ ID NO: 4069229 - DNA, 25 bp, Homo sapien
cagctgaaaggaacaccttggcctt

SEQ ID NO: 4069230 - DNA, 25 bp, Homo sapien
tctgattctcatccttgaagcgttg

SEQ ID NO: 4069231 - DNA, 25 bp, Homo sapien
gtgtgtggcgatgtaaggagaggca

SEQ ID NO: 4069232 - DNA, 25 bp, Homo sapien
tgtgtggcgatgtaaggagaggcac

SEQ ID NO: 4069233 - DNA, 25 bp, Homo sapien
gtgtggcgatgtaaggagaggcaca

SEQ ID NO: 4069234 - DNA, 25 bp, Homo sapien
aatggggtgctgtttccccgagtca

SEQ ID NO: 4069235 - DNA, 25 bp, Homo sapien
tccccgagtcagttgaaacgcccat

SEQ ID NO: 4069236 - DNA, 25 bp, Homo sapien
ggtcaatggggtgctgtttccccga

SEQ ID NO: 4069237 - DNA, 25 bp, Homo sapien
ccttcttcggaaggctggggtcaat

SEQ ID NO: 4069238 - DNA, 25 bp, Homo sapien
gacacctggagttgggtagcagaga

SEQ ID NO: 4069239 - DNA, 25 bp, Homo sapien
gggatgtcgggaccgtgaattaaca

SEQ ID NO: 4069240 - DNA, 25 bp, Homo sapien
cagagagagggatgtcgggaccgtg

SEQ ID NO: 4069241 - DNA, 25 bp, Homo sapien
ccgtgaattaacagtggccaccact

SEQ ID NO: 4069242 - DNA, 25 bp, Homo sapien
ccattctactgacggtgggcattca

SEQ ID NO: 4069243 - DNA, 25 bp, Homo sapien
aattgatatgaccagaggtggagcg

SEQ ID NO: 4069244 - DNA, 25 bp, Homo sapien
cattcgctggtattgcataggttca

SEQ ID NO: 4069245 - DNA, 25 bp, Homo sapien
tcctggcctggtagaagttcttaca

SEQ ID NO: 4069246 - DNA, 25 bp, Homo sapien
attatcttcgatcagttcagcttct

SEQ ID NO: 4069247 - DNA, 25 bp, Homo sapien
ttatcttcgatcagttcagcttctt

SEQ ID NO: 4069248 - DNA, 25 bp, Homo sapien
cataaattaccgaggtcaccccaga

SEQ ID NO: 4069249 - DNA, 25 bp, Homo sapien
aattgtccacgctgacttcaaggcg

SEQ ID NO: 4069250 - DNA, 25 bp, Homo sapien
tcatcttaccttgcgccatgcaggg

SEQ ID NO: 4069251 - DNA, 25 bp, Homo sapien
taaactcataagcagggacccgaag

SEQ ID NO: 4069252 - DNA, 25 bp, Homo sapien
gtcacaatgttcacgtgtgagcctg

SEQ ID NO: 4069253 - DNA, 25 bp, Homo sapien
cgtcctggccgtcacaatgttcacg

SEQ ID NO: 4069254 - DNA, 25 bp, Homo sapien
ggccgtcacaatgttcacgtgtgag

SEQ ID NO: 4069255 - DNA, 25 bp, Homo sapien
aatgttcacgtgtgagcctgccttg

SEQ ID NO: 4069256 - DNA, 25 bp, Homo sapien
gggggtcttgaaaccaatgtctgca

SEQ ID NO: 4069257 - DNA, 25 bp, Homo sapien
cacaatgtctggctgttcagggggt

SEQ ID NO: 4069258 - DNA, 25 bp, Homo sapien
ttcagggggtcttgaaaccaatgtc

SEQ ID NO: 4069259 - DNA, 25 bp, Homo sapien
gtcttgaaaccaatgtctgcaggcc

SEQ ID NO: 4069260 - DNA, 25 bp, Homo sapien
ctgccggccctcccgtgggccccag

SEQ ID NO: 4069261 - DNA, 25 bp, Homo sapien
tagaagccttcctgccggccctccc

SEQ ID NO: 4069262 - DNA, 25 bp, Homo sapien
ctgggcatagaagccttcctgccgg

SEQ ID NO: 4069263 - DNA, 25 bp, Homo sapien
agccttcctgccggccctcccgtgg

SEQ ID NO: 4069264 - DNA, 25 bp, Homo sapien
cagccgagggccgttgggaaattct

SEQ ID NO: 4069265 - DNA, 25 bp, Homo sapien
tccttgctagccctggagtgctgta

SEQ ID NO: 4069266 - DNA, 25 bp, Homo sapien
tggaaaatgccgggcttgcaaatgg

SEQ ID NO: 4069267 - DNA, 25 bp, Homo sapien
agtgctgtacgtgccccaggaaact

SEQ ID NO: 4069268 - DNA, 25 bp, Homo sapien
ttcccgcccactgcttttctggaag

SEQ ID NO: 4069269 - DNA, 25 bp, Homo sapien
gggctggcttcctgcgtcctggcct

SEQ ID NO: 4069270 - DNA, 25 bp, Homo sapien
cccattcccgcccactgcttttctg

SEQ ID NO: 4069271 - DNA, 25 bp, Homo sapien
ggagcaggccatgcccccaggaggc

SEQ ID NO: 4069272 - DNA, 25 bp, Homo sapien
tttcccgtgccctcgccccttgcca

SEQ ID NO: 4069273 - DNA, 25 bp, Homo sapien
gccaaaagctataggcagcatggcc

SEQ ID NO: 4069274 - DNA, 25 bp, Homo sapien
tataggcagcatggccaagattcct

SEQ ID NO: 4069275 - DNA, 25 bp, Homo sapien
ccccttgccaaaagctataggcagc

SEQ ID NO: 4069276 - DNA, 25 bp, Homo sapien
gtgtgcggcttccagcttgttggcc

SEQ ID NO: 4069277 - DNA, 25 bp, Homo sapien
tgtgcggcttccagcttgttggcct

SEQ ID NO: 4069278 - DNA, 25 bp, Homo sapien
acaggcgagccacaacctggctggc

SEQ ID NO: 4069279 - DNA, 25 bp, Homo sapien
aggcgagccacaacctggctggcac

SEQ ID NO: 4069280 - DNA, 25 bp, Homo sapien
tacaggcgagccacaacctggctgg

SEQ ID NO: 4069281 - DNA, 25 bp, Homo sapien
ctacaggcgagccacaacctggctg

SEQ ID NO: 4069282 - DNA, 25 bp, Homo sapien
ctctctccctgttccagatgcagat

SEQ ID NO: 4069283 - DNA, 25 bp, Homo sapien
tctctccctgttccagatgcagatc

SEQ ID NO: 4069284 - DNA, 25 bp, Homo sapien
atccttcagccatacagtttctgtg

SEQ ID NO: 4069285 - DNA, 25 bp, Homo sapien
ggaggaattcccacatcgaagtccg

SEQ ID NO: 4069286 - DNA, 25 bp, Homo sapien
acatcgaagtccgaggctttgccgc

SEQ ID NO: 4069287 - DNA, 25 bp, Homo sapien
catgtgtccggctgggaggaattcc

SEQ ID NO: 4069288 - DNA, 25 bp, Homo sapien
ggtcttcggagccatgtgtccggct

SEQ ID NO: 4069289 - DNA, 25 bp, Homo sapien
cagctgcagacttccctgaagggac

SEQ ID NO: 4069290 - DNA, 25 bp, Homo sapien
aaaccccgcaccacgggagcttgtg

SEQ ID NO: 4069291 - DNA, 25 bp, Homo sapien
ccgcaccacgggagcttgtgctgct

SEQ ID NO: 4069292 - DNA, 25 bp, Homo sapien
agctgcagacttccctgaagggact

SEQ ID NO: 4069293 - DNA, 25 bp, Homo sapien
gaggtccttcggtttgtctttctgc

SEQ ID NO: 4069294 - DNA, 25 bp, Homo sapien
tcagtgcggtcagtaaagtctgcct

SEQ ID NO: 4069295 - DNA, 25 bp, Homo sapien
gccttctagggcacctttgatggga

SEQ ID NO: 4069296 - DNA, 25 bp, Homo sapien
ggagaatccgtaggcttgatgttga

SEQ ID NO: 4069297 - DNA, 25 bp, Homo sapien
taaaccagtctgaaaggcgagtggg

SEQ ID NO: 4069298 - DNA, 25 bp, Homo sapien
gaaaacgcacttgtggcccagttga

SEQ ID NO: 4069299 - DNA, 25 bp, Homo sapien
gacccttgagcgtggaaaagcagac

SEQ ID NO: 4069300 - DNA, 25 bp, Homo sapien
tcaacccagtaagtaggaatcagcc

SEQ ID NO: 4069301 - DNA, 25 bp, Homo sapien
gcaggaactgattccacaggacagt

SEQ ID NO: 4069302 - DNA, 25 bp, Homo sapien
gtctcccgggggctcttttgcatgt

SEQ ID NO: 4069303 - DNA, 25 bp, Homo sapien
ttcagctccgcgtctgaagcagcca

SEQ ID NO: 4069304 - DNA, 25 bp, Homo sapien
ccagcccagggtgactttgatgtcg

SEQ ID NO: 4069305 - DNA, 25 bp, Homo sapien
gatgtcgtgttctggcgcgtccttg

SEQ ID NO: 4069306 - DNA, 25 bp, Homo sapien
taccactacattattatcactatca

SEQ ID NO: 4069307 - DNA, 25 bp, Homo sapien
ttaccactacattattatcactatc

SEQ ID NO: 4069308 - DNA, 25 bp, Homo sapien
attaccactacattattatcactat

SEQ ID NO: 4069309 - DNA, 25 bp, Homo sapien
ttcctaatctccagctttacagcag

SEQ ID NO: 4069310 - DNA, 25 bp, Homo sapien
ccattcctaatctccagctttacag

SEQ ID NO: 4069311 - DNA, 25 bp, Homo sapien
cagcagctgtgatgtagggccttga

SEQ ID NO: 4069312 - DNA, 25 bp, Homo sapien
tttacagcagctgtgatgtagggcc

SEQ ID NO: 4069313 - DNA, 25 bp, Homo sapien
gggtccctcaagatctcagagaaga

SEQ ID NO: 4069314 - DNA, 25 bp, Homo sapien
tcaatggcgtgtgtaatgataggcc

SEQ ID NO: 4069315 - DNA, 25 bp, Homo sapien
ccctcaagatctcagagaagacatt

SEQ ID NO: 4069316 - DNA, 25 bp, Homo sapien
ataggccggcgtcagccctgggtcc

SEQ ID NO: 4069317 - DNA, 25 bp, Homo sapien
tggatcatgtccagcagcctcgctt

SEQ ID NO: 4069318 - DNA, 25 bp, Homo sapien
agaaaacccatgtcgcccggcttct

SEQ ID NO: 4069319 - DNA, 25 bp, Homo sapien
gcctcgcttccccaagtggatgtgg

SEQ ID NO: 4069320 - DNA, 25 bp, Homo sapien
gcttccatagaacttagggattggg

SEQ ID NO: 4069321 - DNA, 25 bp, Homo sapien
actgtggtgttgttactttgcactc

SEQ ID NO: 4069322 - DNA, 25 bp, Homo sapien
tcctgtccttgccctttgtaccgga

SEQ ID NO: 4069323 - DNA, 25 bp, Homo sapien
tgttactttgcactccccattactt

SEQ ID NO: 4069324 - DNA, 25 bp, Homo sapien
ttcctcctgcggtgcctttggcact

SEQ ID NO: 4069325 - DNA, 25 bp, Homo sapien
ctcatcctggggctcccaggccagt

SEQ ID NO: 4069326 - DNA, 25 bp, Homo sapien
tgctcatcctggggctcccaggcca

SEQ ID NO: 4069327 - DNA, 25 bp, Homo sapien
catcctggggctcccaggccagtgt

SEQ ID NO: 4069328 - DNA, 25 bp, Homo sapien
cctgctcatcctggggctcccaggc

SEQ ID NO: 4069329 - DNA, 25 bp, Homo sapien
ggactcaaaacaacagtcctggctt

SEQ ID NO: 4069330 - DNA, 25 bp, Homo sapien
gcaggactcaaaacaacagtcctgg

SEQ ID NO: 4069331 - DNA, 25 bp, Homo sapien
actcaaaacaacagtcctggcttcc

SEQ ID NO: 4069332 - DNA, 25 bp, Homo sapien
aggactcaaaacaacagtcctggct

SEQ ID NO: 4069333 - DNA, 25 bp, Homo sapien
acctgttccaatggcaaaggtgccc

SEQ ID NO: 4069334 - DNA, 25 bp, Homo sapien
gagtcttagcagtgcccctttccca

SEQ ID NO: 4069335 - DNA, 25 bp, Homo sapien
ggtgcccagtggcacagatgccaag

SEQ ID NO: 4069336 - DNA, 25 bp, Homo sapien
catgagatgaagatggtccctggag

SEQ ID NO: 4069337 - DNA, 25 bp, Homo sapien
aagagctgtgcgacctgcttgccat

SEQ ID NO: 4069338 - DNA, 25 bp, Homo sapien
catcatgtggagctggtcggtcacc

SEQ ID NO: 4069339 - DNA, 25 bp, Homo sapien
gcttgaaagtaatcgcctccgtgta

SEQ ID NO: 4069340 - DNA, 25 bp, Homo sapien
ctccgtgtattgagtgcccgccgac

SEQ ID NO: 4069341 - DNA, 25 bp, Homo sapien
tccctccctagcaccctcttgagga

SEQ ID NO: 4069342 - DNA, 25 bp, Homo sapien
tggcacaaatggatcctcgcctcac

SEQ ID NO: 4069343 - DNA, 25 bp, Homo sapien
tggccgctggcacaaatggatcctc

SEQ ID NO: 4069344 - DNA, 25 bp, Homo sapien
cgctggcacaaatggatcctcgcct

SEQ ID NO: 4069345 - DNA, 25 bp, Homo sapien
ataacaacagccccggggcaaggag

SEQ ID NO: 4069346 - DNA, 25 bp, Homo sapien
aacaacagccccggggcaaggagag

SEQ ID NO: 4069347 - DNA, 25 bp, Homo sapien
ataataacaacagccccggggcaag

SEQ ID NO: 4069348 - DNA, 25 bp, Homo sapien
taacaacagccccggggcaaggaga

SEQ ID NO: 4069349 - DNA, 25 bp, Homo sapien
cttctcacatggccctgtcaagctg

SEQ ID NO: 4069350 - DNA, 25 bp, Homo sapien
ccttgcttctcacatggccctgtca

SEQ ID NO: 4069351 - DNA, 25 bp, Homo sapien
tctcacatggccctgtcaagctggt

SEQ ID NO: 4069352 - DNA, 25 bp, Homo sapien
tgcttctcacatggccctgtcaagc

SEQ ID NO: 4069353 - DNA, 25 bp, Homo sapien
tatacatttgtctcctgtggctgcg

SEQ ID NO: 4069354 - DNA, 25 bp, Homo sapien
ctcctaatgctatcttgtttttgtc

SEQ ID NO: 4069355 - DNA, 25 bp, Homo sapien
tgtggctgcggtgcacatactgtca

SEQ ID NO: 4069356 - DNA, 25 bp, Homo sapien
gtcagaatacgttctcctgtatgta

SEQ ID NO: 4069357 - DNA, 25 bp, Homo sapien
taatactttctgcagcgcttcaggg

SEQ ID NO: 4069358 - DNA, 25 bp, Homo sapien
tatttagaatagcacctgccatgtg

SEQ ID NO: 4069359 - DNA, 25 bp, Homo sapien
accaagctcaccagtttcttacggg

SEQ ID NO: 4069360 - DNA, 25 bp, Homo sapien
tctagaagtggttactgggccagag

SEQ ID NO: 4069361 - DNA, 25 bp, Homo sapien
tctcaaaatttggttaggcctgtct

SEQ ID NO: 4069362 - DNA, 25 bp, Homo sapien
gagacacaggacgttttcgaaataa

SEQ ID NO: 4069363 - DNA, 25 bp, Homo sapien
tttgcccagctggagctatctttgg

SEQ ID NO: 4069364 - DNA, 25 bp, Homo sapien
agagaggcacgtccaggatcacaca

SEQ ID NO: 4069365 - DNA, 25 bp, Homo sapien
gatatcccctgcgaacatttaacaa

SEQ ID NO: 4069366 - DNA, 25 bp, Homo sapien
aatgcacgtacataggtggtagtcc

SEQ ID NO: 4069367 - DNA, 25 bp, Homo sapien
aaaagttggcctctactccttcaag

SEQ ID NO: 4069368 - DNA, 25 bp, Homo sapien
ccgtcacccagaagatctcctcgcg

SEQ ID NO: 4069369 - DNA, 25 bp, Homo sapien
cacgcagactttatcatccacgcgg

SEQ ID NO: 4069370 - DNA, 25 bp, Homo sapien
tccttaatatatgtcgcagcagtgt

SEQ ID NO: 4069371 - DNA, 25 bp, Homo sapien
cgcggttccgttccatgctccttaa

SEQ ID NO: 4069372 - DNA, 25 bp, Homo sapien
tattcctttgtaaacaccacgcaga

SEQ ID NO: 4069373 - DNA, 25 bp, Homo sapien
gaagcctgtaagcacactccaggga

SEQ ID NO: 4069374 - DNA, 25 bp, Homo sapien
ttgagcatctactatccacaggcca

SEQ ID NO: 4069375 - DNA, 25 bp, Homo sapien
ccagaggcagtacaaggcggtttgc

SEQ ID NO: 4069376 - DNA, 25 bp, Homo sapien
gctgtcatccacatagggagactga

SEQ ID NO: 4069377 - DNA, 25 bp, Homo sapien
tgctggtgtcggctgatgtacagct

SEQ ID NO: 4069378 - DNA, 25 bp, Homo sapien
agcacagggcccagtacataggaag

SEQ ID NO: 4069379 - DNA, 25 bp, Homo sapien
tgtacagctttgtgtgagaggacag

SEQ ID NO: 4069380 - DNA, 25 bp, Homo sapien
gcacagggcccagtacataggaagc

SEQ ID NO: 4069381 - DNA, 25 bp, Homo sapien
caccgaggctgattttgtgacatgg

SEQ ID NO: 4069382 - DNA, 25 bp, Homo sapien
caattagatcacagatgccctccag

SEQ ID NO: 4069383 - DNA, 25 bp, Homo sapien
gaaaattgtagccaaagcaccgagg

SEQ ID NO: 4069384 - DNA, 25 bp, Homo sapien
acagataatcgggacagtgttgcct

SEQ ID NO: 4069385 - DNA, 25 bp, Homo sapien
cacacacccaagagggagagtcagt

SEQ ID NO: 4069386 - DNA, 25 bp, Homo sapien
ggtgcctgcacaagtcaagaaaggg

SEQ ID NO: 4069387 - DNA, 25 bp, Homo sapien
cagctttcttcggaggacaggagga

SEQ ID NO: 4069388 - DNA, 25 bp, Homo sapien
tgctttgaagtcgataagggaaccc

SEQ ID NO: 4069389 - DNA, 25 bp, Homo sapien
gatgctttcttcctagaggctccga

SEQ ID NO: 4069390 - DNA, 25 bp, Homo sapien
gaaaagtcaactccgatgccaccat

SEQ ID NO: 4069391 - DNA, 25 bp, Homo sapien
cccttgggacaagaagacccagtca

SEQ ID NO: 4069392 - DNA, 25 bp, Homo sapien
gatgccgtcgtgtgggaaaagtcaa

SEQ ID NO: 4069393 - DNA, 25 bp, Homo sapien
tgggacccgcctcttatttatgaag

SEQ ID NO: 4069394 - DNA, 25 bp, Homo sapien
cgcctcttatttatgaagtctttga

SEQ ID NO: 4069395 - DNA, 25 bp, Homo sapien
caaattgcgggtctgggacccgcct

SEQ ID NO: 4069396 - DNA, 25 bp, Homo sapien
tatttaagacatgttgacaaattgc

SEQ ID NO: 4069397 - DNA, 25 bp, Homo sapien
ctggcgtgtagtactgtataaacca

SEQ ID NO: 4069398 - DNA, 25 bp, Homo sapien
cagctgtcgggttagtggtagtatt

SEQ ID NO: 4069399 - DNA, 25 bp, Homo sapien
taaaccagtcagctgtcgggttagt

SEQ ID NO: 4069400 - DNA, 25 bp, Homo sapien
actgtataaaccagtcagctgtcgg

SEQ ID NO: 4069401 - DNA, 25 bp, Homo sapien
ttgaatgggaggctgctaacccgcc

SEQ ID NO: 4069402 - DNA, 25 bp, Homo sapien
tacttcacagcactctggtgcggga

SEQ ID NO: 4069403 - DNA, 25 bp, Homo sapien
cagtccaccccggtaaaagagctgt

SEQ ID NO: 4069404 - DNA, 25 bp, Homo sapien
tgtgaccactgcaacgaagacactc

SEQ ID NO: 4069405 - DNA, 25 bp, Homo sapien
tcaaattaaagtgagatcattaggg

SEQ ID NO: 4069406 - DNA, 25 bp, Homo sapien
cacaagtttaatatgactgataccc

SEQ ID NO: 4069407 - DNA, 25 bp, Homo sapien
tgactgatacccatttgagaaggag

SEQ ID NO: 4069408 - DNA, 25 bp, Homo sapien
gagatcattagggtgagcacaagtt

SEQ ID NO: 4069409 - DNA, 25 bp, Homo sapien
ctttgtgctgaggatgggtcacctg

SEQ ID NO: 4069410 - DNA, 25 bp, Homo sapien
cttaaacaccctgtgcctccattct

SEQ ID NO: 4069411 - DNA, 25 bp, Homo sapien
acgtggacttggagccagacggcct

SEQ ID NO: 4069412 - DNA, 25 bp, Homo sapien
ctgcggctgcccctaaaaggacaga

SEQ ID NO: 4069413 - DNA, 25 bp, Homo sapien
tttgttcagcacatgtttgccatca

SEQ ID NO: 4069414 - DNA, 25 bp, Homo sapien
ttgccatcatattgagtgctaaact

SEQ ID NO: 4069415 - DNA, 25 bp, Homo sapien
tcatttgttcagcacatgtttgcca

SEQ ID NO: 4069416 - DNA, 25 bp, Homo sapien
catgtttgccatcatattgagtgct

SEQ ID NO: 4069417 - DNA, 25 bp, Homo sapien
atgctctcttcatctttctgccagt

SEQ ID NO: 4069418 - DNA, 25 bp, Homo sapien
tttctgccagtctttgtctgccacc

SEQ ID NO: 4069419 - DNA, 25 bp, Homo sapien
gcatccaagatgcaatgcctttccc

SEQ ID NO: 4069420 - DNA, 25 bp, Homo sapien
tgcaatgcctttcccatgctctctt

SEQ ID NO: 4069421 - DNA, 25 bp, Homo sapien
tgagcttcaggaattatctgcttgg

SEQ ID NO: 4069422 - DNA, 25 bp, Homo sapien
atcggctgcacggaaatggagctcc

SEQ ID NO: 4069423 - DNA, 25 bp, Homo sapien
aggacagagccaactagccgggcat

SEQ ID NO: 4069424 - DNA, 25 bp, Homo sapien
tcagtggcctgaacaatagccagga

SEQ ID NO: 4069425 - DNA, 25 bp, Homo sapien
cttttctctgcagcagcaagccttg

SEQ ID NO: 4069426 - DNA, 25 bp, Homo sapien
tctgcagcagcaagccttgttggca

SEQ ID NO: 4069427 - DNA, 25 bp, Homo sapien
tctctgcagcagcaagccttgttgg

SEQ ID NO: 4069428 - DNA, 25 bp, Homo sapien
ttctctgcagcagcaagccttgttg

SEQ ID NO: 4069429 - DNA, 25 bp, Homo sapien
gcaggaaatggctgaaataacttcc

SEQ ID NO: 4069430 - DNA, 25 bp, Homo sapien
caggaaatggctgaaataacttcca

SEQ ID NO: 4069431 - DNA, 25 bp, Homo sapien
aaatggctgaaataacttccatcat

SEQ ID NO: 4069432 - DNA, 25 bp, Homo sapien
ggaaatggctgaaataacttccatc

SEQ ID NO: 4069433 - DNA, 25 bp, Homo sapien
tcctctctcgacagaaacgcagaag

SEQ ID NO: 4069434 - DNA, 25 bp, Homo sapien
cagaagtgagctgcttgctcgcaga

SEQ ID NO: 4069435 - DNA, 25 bp, Homo sapien
gaaacgcagaagtgagctgcttgct

SEQ ID NO: 4069436 - DNA, 25 bp, Homo sapien
ctgcttgctcgcagaggccaggctt

SEQ ID NO: 4069437 - DNA, 25 bp, Homo sapien
tacttgaaggcctcctgtgtgccca

SEQ ID NO: 4069438 - DNA, 25 bp, Homo sapien
tcagccgatacttgaaggcctcctg

SEQ ID NO: 4069439 - DNA, 25 bp, Homo sapien
ccgatacttgaaggcctcctgtgtg

SEQ ID NO: 4069440 - DNA, 25 bp, Homo sapien
cagtggtcagccgatacttgaaggc

SEQ ID NO: 4069441 - DNA, 25 bp, Homo sapien
tggttgtgtgttagagtcactgggc

SEQ ID NO: 4069442 - DNA, 25 bp, Homo sapien
actgtggctccggtcggtacacggg

SEQ ID NO: 4069443 - DNA, 25 bp, Homo sapien
ggccttctttcgcaatctgtccaca

SEQ ID NO: 4069444 - DNA, 25 bp, Homo sapien
tccggtcggtacacgggtcctgagc

SEQ ID NO: 4069445 - DNA, 25 bp, Homo sapien
ggacagggtgagatctgagcagggt

SEQ ID NO: 4069446 - DNA, 25 bp, Homo sapien
gtggggaggagaacccactggacca

SEQ ID NO: 4069447 - DNA, 25 bp, Homo sapien
cagggtgagatctgagcagggtggg

SEQ ID NO: 4069448 - DNA, 25 bp, Homo sapien
ggaggagaacccactggaccaaggc

SEQ ID NO: 4069449 - DNA, 25 bp, Homo sapien
gcatgagaggatgctagcctctccc

SEQ ID NO: 4069450 - DNA, 25 bp, Homo sapien
cagcatgagaggatgctggtctctc

SEQ ID NO: 4069451 - DNA, 25 bp, Homo sapien
gacatgggatggttcctttgccctg

SEQ ID NO: 4069452 - DNA, 25 bp, Homo sapien
ctgttcctggacatgggatggttcc

SEQ ID NO: 4069453 - DNA, 25 bp, Homo sapien
gggcaccagcatgagaggacgtggc

SEQ ID NO: 4069454 - DNA, 25 bp, Homo sapien
ttgctcccaagatgagctccactgg

SEQ ID NO: 4069455 - DNA, 25 bp, Homo sapien
cttgctcccaagatgagctccactg

SEQ ID NO: 4069456 - DNA, 25 bp, Homo sapien
caccagcatgagaggacgtggcctc

SEQ ID NO: 4069457 - DNA, 25 bp, Homo sapien
tgagaggacgctggcctctcccttg

SEQ ID NO: 4069458 - DNA, 25 bp, Homo sapien
gagaggacgctggcctctcccttgc

SEQ ID NO: 4069459 - DNA, 25 bp, Homo sapien
cagcgtgagaggacgctggcctctc

SEQ ID NO: 4069460 - DNA, 25 bp, Homo sapien
cgtgagaggacgctggcctctccct

SEQ ID NO: 4069461 - DNA, 25 bp, Homo sapien
agcatgagaggacactggcctctcc

SEQ ID NO: 4069462 - DNA, 25 bp, Homo sapien
cccaggatgggctccactggggcac

SEQ ID NO: 4069463 - DNA, 25 bp, Homo sapien
ttgctcccaggatgggctccactgg

SEQ ID NO: 4069464 - DNA, 25 bp, Homo sapien
cagcatgagaggacactggcctctc

SEQ ID NO: 4069465 - DNA, 25 bp, Homo sapien
tctggtagcgcctgttcccactgct

SEQ ID NO: 4069466 - DNA, 25 bp, Homo sapien
gctgccgctctggtagcgcctgttc

SEQ ID NO: 4069467 - DNA, 25 bp, Homo sapien
gacccctctcgctgccgctctggta

SEQ ID NO: 4069468 - DNA, 25 bp, Homo sapien
tctcgctgccgctctggtagcgcct

SEQ ID NO: 4069469 - DNA, 25 bp, Homo sapien
ttcacagtgtcagactagagtcaaa

SEQ ID NO: 4069470 - DNA, 25 bp, Homo sapien
caacacctatattgggcctttggca

SEQ ID NO: 4069471 - DNA, 25 bp, Homo sapien
agcatttggctacatgaagagtgtc

SEQ ID NO: 4069472 - DNA, 25 bp, Homo sapien
tcctggctgattctgccaagcccgt

SEQ ID NO: 4069473 - DNA, 25 bp, Homo sapien
tctactgaccgtgttgcctgggtgg

SEQ ID NO: 4069474 - DNA, 25 bp, Homo sapien
acagaaacagaatgcgaaggtgtct

SEQ ID NO: 4069475 - DNA, 25 bp, Homo sapien
tttcatagccctttcttactcttct

SEQ ID NO: 4069476 - DNA, 25 bp, Homo sapien
caccagggagagttgaaccattgca

SEQ ID NO: 4069477 - DNA, 25 bp, Homo sapien
tcccgggctctagagccccgaggag

SEQ ID NO: 4069478 - DNA, 25 bp, Homo sapien
ctgccatcaagttctcacccgagtg

SEQ ID NO: 4069479 - DNA, 25 bp, Homo sapien
ctccctccaaatgcgggaaggcctg

SEQ ID NO: 4069480 - DNA, 25 bp, Homo sapien
gagagtgcaagttgctcccgggctc

SEQ ID NO: 4069481 - DNA, 25 bp, Homo sapien
tctttgctccgattaccagatggga

SEQ ID NO: 4069482 - DNA, 25 bp, Homo sapien
tacaatgatccagcaggataggtag

SEQ ID NO: 4069483 - DNA, 25 bp, Homo sapien
aggatccctgcatccacttctggtg

SEQ ID NO: 4069484 - DNA, 25 bp, Homo sapien
ctaagtgaccgaccaccacatgtgc

SEQ ID NO: 4069485 - DNA, 25 bp, Homo sapien
ctttgagtggtttcagagcatccga

SEQ ID NO: 4069486 - DNA, 25 bp, Homo sapien
gatgtgtacttaccccgatggaaag

SEQ ID NO: 4069487 - DNA, 25 bp, Homo sapien
gagatcacctggaagattgacacca

SEQ ID NO: 4069488 - DNA, 25 bp, Homo sapien
caattggagcacctcttgttagaga

SEQ ID NO: 4069489 - DNA, 25 bp, Homo sapien
gcatcatcagacagaagcccgtcga

SEQ ID NO: 4069490 - DNA, 25 bp, Homo sapien
gcccgtcgacctcctgaagtacaat

SEQ ID NO: 4069491 - DNA, 25 bp, Homo sapien
tcctttgtggagacgaaggctgaca

SEQ ID NO: 4069492 - DNA, 25 bp, Homo sapien
gagtccacagtgataccaattggga

SEQ ID NO: 4069493 - DNA, 25 bp, Homo sapien
caaaggtcaaaacctcaagggagat

SEQ ID NO: 4069494 - DNA, 25 bp, Homo sapien
cacccattgtcattagagatgcact

SEQ ID NO: 4069495 - DNA, 25 bp, Homo sapien
cagaatgcaatgacttagcttggag

SEQ ID NO: 4069496 - DNA, 25 bp, Homo sapien
tgtgagatactctcagcagggacct

SEQ ID NO: 4069497 - DNA, 25 bp, Homo sapien
aagggacaaatgggacatcccattt

SEQ ID NO: 4069498 - DNA, 25 bp, Homo sapien
aataaaggtacagaacttatataag

SEQ ID NO: 4069499 - DNA, 25 bp, Homo sapien
atgggacatcccatttgtgatactg

SEQ ID NO: 4069500 - DNA, 25 bp, Homo sapien
taaaggtacagaacttatataagaa

SEQ ID NO: 4069501 - DNA, 25 bp, Homo sapien
tactgctacatacccagaattcagg

SEQ ID NO: 4069502 - DNA, 25 bp, Homo sapien
tattgagtgagaaaccgtagtagca

SEQ ID NO: 4069503 - DNA, 25 bp, Homo sapien
tatatacccggtgacctcctatgtc

SEQ ID NO: 4069504 - DNA, 25 bp, Homo sapien
agaactgtcttaggccaactaggac

SEQ ID NO: 4069505 - DNA, 25 bp, Homo sapien
tactcttggatctgaaatatggctc

SEQ ID NO: 4069506 - DNA, 25 bp, Homo sapien
tcttggattcaagtaaacctggctc

SEQ ID NO: 4069507 - DNA, 25 bp, Homo sapien
taaatcccctatgaaaggcacagga

SEQ ID NO: 4069508 - DNA, 25 bp, Homo sapien
tcctagctggtgacgctgggtaccc

SEQ ID NO: 4069509 - DNA, 25 bp, Homo sapien
aaaagaggctctaggttggctggaa

SEQ ID NO: 4069510 - DNA, 25 bp, Homo sapien
tgtctgtgtcaacaaagaactgggc

SEQ ID NO: 4069511 - DNA, 25 bp, Homo sapien
tccctttggctcaagaaaaagaggc

SEQ ID NO: 4069512 - DNA, 25 bp, Homo sapien
caggtaaccaggcacaacaagatgt

SEQ ID NO: 4069513 - DNA, 25 bp, Homo sapien
cagcaaatgttaaattacccaggga

SEQ ID NO: 4069514 - DNA, 25 bp, Homo sapien
tgtggacatggcacaccaggacatg

SEQ ID NO: 4069515 - DNA, 25 bp, Homo sapien
tattgggcatatgaagggtacagaa

SEQ ID NO: 4069516 - DNA, 25 bp, Homo sapien
gcattcaccccgtcaacaagcattt

SEQ ID NO: 4069517 - DNA, 25 bp, Homo sapien
tctggaatgatgagcgtcccgcagg

SEQ ID NO: 4069518 - DNA, 25 bp, Homo sapien
aaccccagtgtagtcaccaggacct

SEQ ID NO: 4069519 - DNA, 25 bp, Homo sapien
gtcccgcaggcagcgttacggaacc

SEQ ID NO: 4069520 - DNA, 25 bp, Homo sapien
gacgatctggaatgatgagcgtccc

SEQ ID NO: 4069521 - DNA, 25 bp, Homo sapien
aggagctgcaccaagcgcctgtcct

SEQ ID NO: 4069522 - DNA, 25 bp, Homo sapien
aagcaatcctagctgaaagggtttc

SEQ ID NO: 4069523 - DNA, 25 bp, Homo sapien
ccttcaggtaggaggaccctgaaga

SEQ ID NO: 4069524 - DNA, 25 bp, Homo sapien
tagctggacccagcagcccaaacat

SEQ ID NO: 4069525 - DNA, 25 bp, Homo sapien
cgtaccctgtgaatagctaatgcct

SEQ ID NO: 4069526 - DNA, 25 bp, Homo sapien
ttaaggccacacacgatattcacgg

SEQ ID NO: 4069527 - DNA, 25 bp, Homo sapien
gaaagtccagtagcaatagccctct

SEQ ID NO: 4069528 - DNA, 25 bp, Homo sapien
tttatgctcccagtgaaccctatgg

SEQ ID NO: 4069529 - DNA, 25 bp, Homo sapien
tgggcatctccaactcaactaagcc

SEQ ID NO: 4069530 - DNA, 25 bp, Homo sapien
gcctacttctatggctccaaactga

SEQ ID NO: 4069531 - DNA, 25 bp, Homo sapien
caactcaactaagcctacttctatg

SEQ ID NO: 4069532 - DNA, 25 bp, Homo sapien
tcaactaagcctacttctatggctc

SEQ ID NO: 4069533 - DNA, 25 bp, Homo sapien
tcttaagtagcaatttgaagagcca

SEQ ID NO: 4069534 - DNA, 25 bp, Homo sapien
tgtttggcaccagatatcactgtac

SEQ ID NO: 4069535 - DNA, 25 bp, Homo sapien
cattcccatctggattagtgcaagg

SEQ ID NO: 4069536 - DNA, 25 bp, Homo sapien
taaaacccatgtttcttgagaacca

SEQ ID NO: 4069537 - DNA, 25 bp, Homo sapien
gaggaagaccaatagcccatcccaa

SEQ ID NO: 4069538 - DNA, 25 bp, Homo sapien
ccaaacaaaacactccgagtcacga

SEQ ID NO: 4069539 - DNA, 25 bp, Homo sapien
ccgagtcacgacttccagaacttct

SEQ ID NO: 4069540 - DNA, 25 bp, Homo sapien
tcaggaggaagaccaatagcccatc

SEQ ID NO: 4069541 - DNA, 25 bp, Homo sapien
atgggctttaaaccattccactgct

SEQ ID NO: 4069542 - DNA, 25 bp, Homo sapien
catgggctttaaaccattccactgc

SEQ ID NO: 4069543 - DNA, 25 bp, Homo sapien
tgtaaacttcagtgcgagtgaggaa

SEQ ID NO: 4069544 - DNA, 25 bp, Homo sapien
gctggaagttgtagagtcgacccaa

SEQ ID NO: 4069545 - DNA, 25 bp, Homo sapien
tagacgggaatgtgtagcccaggcc

SEQ ID NO: 4069546 - DNA, 25 bp, Homo sapien
aagcaaagcagtagaccaaggtcaa

SEQ ID NO: 4069547 - DNA, 25 bp, Homo sapien
cacaagtgacgtctgcatcctggaa

SEQ ID NO: 4069548 - DNA, 25 bp, Homo sapien
gatgtagctgactatcctgggaagg

SEQ ID NO: 4069549 - DNA, 25 bp, Homo sapien
ggacaaactcaaccaggctcctggg

SEQ ID NO: 4069550 - DNA, 25 bp, Homo sapien
gaaggctttctctacgtcagacagg

SEQ ID NO: 4069551 - DNA, 25 bp, Homo sapien
tcctgagcccctcactatgcatgtt

SEQ ID NO: 4069552 - DNA, 25 bp, Homo sapien
tggtgcaagcctcgcttcttcaaat

SEQ ID NO: 4069553 - DNA, 25 bp, Homo sapien
gggctgatccaagtcttcttggctc

SEQ ID NO: 4069554 - DNA, 25 bp, Homo sapien
catgttccttggtgcaagcctcgct

SEQ ID NO: 4069555 - DNA, 25 bp, Homo sapien
gctgcaatgtctgagcagtgggcaa

SEQ ID NO: 4069556 - DNA, 25 bp, Homo sapien
caatgtctgagcagtgggcaacaca

SEQ ID NO: 4069557 - DNA, 25 bp, Homo sapien
tcagctgcaatgtctgagcagtggg

SEQ ID NO: 4069558 - DNA, 25 bp, Homo sapien
ctgagcagtgggcaacacagatcat

SEQ ID NO: 4069559 - DNA, 25 bp, Homo sapien
tcctgtaatgaggacactttccttt

SEQ ID NO: 4069560 - DNA, 25 bp, Homo sapien
cacttcctcctgtaatgaggacact

SEQ ID NO: 4069561 - DNA, 25 bp, Homo sapien
ttcctcctgtaatgaggacactttc

SEQ ID NO: 4069562 - DNA, 25 bp, Homo sapien
atagccacttcctcctgtaatgagg

SEQ ID NO: 4069563 - DNA, 25 bp, Homo sapien
atgtggcagtcaaaagataactgga

SEQ ID NO: 4069564 - DNA, 25 bp, Homo sapien
tgtggcagtcaaaagataactggac

SEQ ID NO: 4069565 - DNA, 25 bp, Homo sapien
cttccaactagtttcagaatgatct

SEQ ID NO: 4069566 - DNA, 25 bp, Homo sapien
gagggctttcactgttaacacattc

SEQ ID NO: 4069567 - DNA, 25 bp, Homo sapien
ggctttcactgttaacacattctgc

SEQ ID NO: 4069568 - DNA, 25 bp, Homo sapien
agggctttcactgttaacacattct

SEQ ID NO: 4069569 - DNA, 25 bp, Homo sapien
gggctttcactgttaacacattctg

SEQ ID NO: 4069570 - DNA, 25 bp, Homo sapien
cactgatgaagggttaagactccca

SEQ ID NO: 4069571 - DNA, 25 bp, Homo sapien
gtttggaaatctgggcattagactt

SEQ ID NO: 4069572 - DNA, 25 bp, Homo sapien
tgttaccctaggcaattcactgaac

SEQ ID NO: 4069573 - DNA, 25 bp, Homo sapien
gaaaatgaattggaggtggcccatc

SEQ ID NO: 4069574 - DNA, 25 bp, Homo sapien
agaggaggtaatcgttctcccaaag

SEQ ID NO: 4069575 - DNA, 25 bp, Homo sapien
tgataaagaggaggtaatcgttctc

SEQ ID NO: 4069576 - DNA, 25 bp, Homo sapien
ttaaatgggaacctgtcactgccac

SEQ ID NO: 4069577 - DNA, 25 bp, Homo sapien
acaggaatcaagtatagccagccac

SEQ ID NO: 4069578 - DNA, 25 bp, Homo sapien
aagttcggagcttggggccccgatg

SEQ ID NO: 4069579 - DNA, 25 bp, Homo sapien
ctgtggaaagttcggagcttggggc

SEQ ID NO: 4069580 - DNA, 25 bp, Homo sapien
tgtggaaagttcggagcttggggcc

SEQ ID NO: 4069581 - DNA, 25 bp, Homo sapien
gttcggagcttggggccccgatgtc

SEQ ID NO: 4069582 - DNA, 25 bp, Homo sapien
aagggcgcggcagacggctacagca

SEQ ID NO: 4069583 - DNA, 25 bp, Homo sapien
cccaggcctcctagctacccatcac

SEQ ID NO: 4069584 - DNA, 25 bp, Homo sapien
tgcaggaacaagggcgcggcagacg

SEQ ID NO: 4069585 - DNA, 25 bp, Homo sapien
tcctagctacccatcaccacagctg

SEQ ID NO: 4069586 - DNA, 25 bp, Homo sapien
tatgacgcgcaggtgtctccttcac

SEQ ID NO: 4069587 - DNA, 25 bp, Homo sapien
ctatgacgcgcaggtgtctccttca

SEQ ID NO: 4069588 - DNA, 25 bp, Homo sapien
aggaggttcgcttcatgaattcccc

SEQ ID NO: 4069589 - DNA, 25 bp, Homo sapien
tggctgtgcgttccgccgtggcggg

SEQ ID NO: 4069590 - DNA, 25 bp, Homo sapien
tagcaggaggttcgcttcatgaatt

SEQ ID NO: 4069591 - DNA, 25 bp, Homo sapien
aggtagcaggaggttcgcttcatga

SEQ ID NO: 4069592 - DNA, 25 bp, Homo sapien
ggcccgtgggataagatgatgctaa

SEQ ID NO: 4069593 - DNA, 25 bp, Homo sapien
tgacaagaaacgggacaatgcaggg

SEQ ID NO: 4069594 - DNA, 25 bp, Homo sapien
ttgggtaagagagcatgacaagaaa

SEQ ID NO: 4069595 - DNA, 25 bp, Homo sapien
aaggcccgtgggataagatgatgct

SEQ ID NO: 4069596 - DNA, 25 bp, Homo sapien
tcattcacagaagtgagtagatggg

SEQ ID NO: 4069597 - DNA, 25 bp, Homo sapien
gttaggaatagatgggacactcaat

SEQ ID NO: 4069598 - DNA, 25 bp, Homo sapien
ttttatggtcaactggcaactaggt

SEQ ID NO: 4069599 - DNA, 25 bp, Homo sapien
gataaaattctcagcgagttaggaa

SEQ ID NO: 4069600 - DNA, 25 bp, Homo sapien
tctcaaccacaacatagtgggaaaa

SEQ ID NO: 4069601 - DNA, 25 bp, Homo sapien
aaagagcagaccaacacgattgtaa

SEQ ID NO: 4069602 - DNA, 25 bp, Homo sapien
catctaccttgccttaggctaggtc

SEQ ID NO: 4069603 - DNA, 25 bp, Homo sapien
gccttaggctaggtccccagaggca

SEQ ID NO: 4069604 - DNA, 25 bp, Homo sapien
tgatagatgcattggagcacgggtc

SEQ ID NO: 4069605 - DNA, 25 bp, Homo sapien
tcagccaaggcaaggtcgaaaagtc

SEQ ID NO: 4069606 - DNA, 25 bp, Homo sapien
caaggtcgaaaagtctcaggcctca

SEQ ID NO: 4069607 - DNA, 25 bp, Homo sapien
catgtggtaataacggtgctcagcc

SEQ ID NO: 4069608 - DNA, 25 bp, Homo sapien
cacgtgagggtctggcctcttggat

SEQ ID NO: 4069609 - DNA, 25 bp, Homo sapien
ggcctcttggattttctcctctcct

SEQ ID NO: 4069610 - DNA, 25 bp, Homo sapien
catttcctccgagttgtcatttggt

SEQ ID NO: 4069611 - DNA, 25 bp, Homo sapien
ttggaaggaagagacaatagggtcc

SEQ ID NO: 4069612 - DNA, 25 bp, Homo sapien
caatcagatactttgctccacctcc

SEQ ID NO: 4069613 - DNA, 25 bp, Homo sapien
atgttgttaaagaatgaagtttagg

SEQ ID NO: 4069614 - DNA, 25 bp, Homo sapien
tatgttgttaaagaatgaagtttag

SEQ ID NO: 4069615 - DNA, 25 bp, Homo sapien
ggaactgagtatgggcagctgttcc

SEQ ID NO: 4069616 - DNA, 25 bp, Homo sapien
gtgtctcttagacccagggaactga

SEQ ID NO: 4069617 - DNA, 25 bp, Homo sapien
ccttggtcagagcaagcgaactgtc

SEQ ID NO: 4069618 - DNA, 25 bp, Homo sapien
tccaaatgtttctagcgagagggtc

SEQ ID NO: 4069619 - DNA, 25 bp, Homo sapien
cttaagctgctggtagttgaagaca

SEQ ID NO: 4069620 - DNA, 25 bp, Homo sapien
gatctttggctgattcatcgctgtg

SEQ ID NO: 4069621 - DNA, 25 bp, Homo sapien
caaggacgcataaagcagagctgtg

SEQ ID NO: 4069622 - DNA, 25 bp, Homo sapien
caaagggagcactcggaggagcttt

SEQ ID NO: 4069623 - DNA, 25 bp, Homo sapien
gagtcttaaccaagatgttcagctg

SEQ ID NO: 4069624 - DNA, 25 bp, Homo sapien
tcttaaccaagatgttcagctgaca

SEQ ID NO: 4069625 - DNA, 25 bp, Homo sapien
taaccaagatgttcagctgacagtc

SEQ ID NO: 4069626 - DNA, 25 bp, Homo sapien
accaagatgttcagctgacagtcag

SEQ ID NO: 4069627 - DNA, 25 bp, Homo sapien
tggcagtgttcgcacatgccaacca

SEQ ID NO: 4069628 - DNA, 25 bp, Homo sapien
ctctctggcagtgttcgcacatgcc

SEQ ID NO: 4069629 - DNA, 25 bp, Homo sapien
tctggcagtgttcgcacatgccaac

SEQ ID NO: 4069630 - DNA, 25 bp, Homo sapien
ggcagtgttcgcacatgccaaccat

SEQ ID NO: 4069631 - DNA, 25 bp, Homo sapien
cggtatttgccggagttttgaatga

SEQ ID NO: 4069632 - DNA, 25 bp, Homo sapien
tgaggaattgcgaagaacctgctct

SEQ ID NO: 4069633 - DNA, 25 bp, Homo sapien
aaatggacatcacgaagccagtgca

SEQ ID NO: 4069634 - DNA, 25 bp, Homo sapien
tgagctgggcttcacggtatttgcc

SEQ ID NO: 4069635 - DNA, 25 bp, Homo sapien
ctcacacgtaacacctcttgcatgg

SEQ ID NO: 4069636 - DNA, 25 bp, Homo sapien
tcttccagacactcactcattatgg

SEQ ID NO: 4069637 - DNA, 25 bp, Homo sapien
tcttgcatggtcttccaggtattgc

SEQ ID NO: 4069638 - DNA, 25 bp, Homo sapien
tgtccagtggcagactctaatcccc

SEQ ID NO: 4069639 - DNA, 25 bp, Homo sapien
ggctttccaactgatggggagcttc

SEQ ID NO: 4069640 - DNA, 25 bp, Homo sapien
aggtcacaaagacgtttttgcctct

SEQ ID NO: 4069641 - DNA, 25 bp, Homo sapien
ttcttatgactgactacaaacaatg

SEQ ID NO: 4069642 - DNA, 25 bp, Homo sapien
tttggaactgtggaggtcacaaaga

SEQ ID NO: 4069643 - DNA, 25 bp, Homo sapien
tagtgaaaaagtacaagggtccatc

SEQ ID NO: 4069644 - DNA, 25 bp, Homo sapien
tctcagggatgtcttggatagaaca

SEQ ID NO: 4069645 - DNA, 25 bp, Homo sapien
ggttgcatgggcctcttctaagtgc

SEQ ID NO: 4069646 - DNA, 25 bp, Homo sapien
caaggttgagccttcttaggcaggc

SEQ ID NO: 4069647 - DNA, 25 bp, Homo sapien
aaaaggccacctaggcaatggaagc

SEQ ID NO: 4069648 - DNA, 25 bp, Homo sapien
catgcccagagctctaagaatgcct

SEQ ID NO: 4069649 - DNA, 25 bp, Homo sapien
caatggaagccctcaaagaagtcgg

SEQ ID NO: 4069650 - DNA, 25 bp, Homo sapien
tgtcatagtcttgaaatgaaaggga

SEQ ID NO: 4069651 - DNA, 25 bp, Homo sapien
cacgccattgccattatgatgctgg

SEQ ID NO: 4069652 - DNA, 25 bp, Homo sapien
tatatgagagctaggccagtacacg

SEQ ID NO: 4069653 - DNA, 25 bp, Homo sapien
ccagcattttagctccaggacttgg

SEQ ID NO: 4069654 - DNA, 25 bp, Homo sapien
tgtgagatcttgatgggaagcagct

SEQ ID NO: 4069655 - DNA, 25 bp, Homo sapien
cctggacttgtggtagcatcactcc

SEQ ID NO: 4069656 - DNA, 25 bp, Homo sapien
tctagggtgggatccttgcttgcca

SEQ ID NO: 4069657 - DNA, 25 bp, Homo sapien
ccttgatgttcctggacttgtggta

SEQ ID NO: 4069658 - DNA, 25 bp, Homo sapien
gcagtggacgctggccatccttgat

SEQ ID NO: 4069659 - DNA, 25 bp, Homo sapien
ttacaagaccagagtattgaattat

SEQ ID NO: 4069660 - DNA, 25 bp, Homo sapien
ctggggagggaattctccatttctg

SEQ ID NO: 4069661 - DNA, 25 bp, Homo sapien
gagtattgaattatactacaaggac

SEQ ID NO: 4069662 - DNA, 25 bp, Homo sapien
gtgtcctggggagggaattctccat

SEQ ID NO: 4069663 - DNA, 25 bp, Homo sapien
caagaaggcagacaattggattttt

SEQ ID NO: 4069664 - DNA, 25 bp, Homo sapien
gaagtacaactggaatagctaatat

SEQ ID NO: 4069665 - DNA, 25 bp, Homo sapien
gagtgtaggataagatgttcattca

SEQ ID NO: 4069666 - DNA, 25 bp, Homo sapien
cattgcaattacgaaaaggcaagct

SEQ ID NO: 4069667 - DNA, 25 bp, Homo sapien
ttcaaacaatccagagaccaatttt

SEQ ID NO: 4069668 - DNA, 25 bp, Homo sapien
tcaaacaatccagagaccaattttc

SEQ ID NO: 4069669 - DNA, 25 bp, Homo sapien
tgctgtcagacaggattaccttggg

SEQ ID NO: 4069670 - DNA, 25 bp, Homo sapien
taacatttatatgaggttgggtaaa

SEQ ID NO: 4069671 - DNA, 25 bp, Homo sapien
cagaagagactcactggaaacattt

SEQ ID NO: 4069672 - DNA, 25 bp, Homo sapien
taccttgggaaacagtgaaacatgc

SEQ ID NO: 4069673 - DNA, 25 bp, Homo sapien
ggttaccattggttcacatgtacta

SEQ ID NO: 4069674 - DNA, 25 bp, Homo sapien
gagttatattccaagtgagctccca

SEQ ID NO: 4069675 - DNA, 25 bp, Homo sapien
caaataggatatttcatagaatatg

SEQ ID NO: 4069676 - DNA, 25 bp, Homo sapien
ggttgcaaccaaagggtgtccttgc

SEQ ID NO: 4069677 - DNA, 25 bp, Homo sapien
ttcttcaccacgttgtggcaggcca

SEQ ID NO: 4069678 - DNA, 25 bp, Homo sapien
caatataatgcatatcatctgtaaa

SEQ ID NO: 4069679 - DNA, 25 bp, Homo sapien
aacaatcacttgtgtctaagattga

SEQ ID NO: 4069680 - DNA, 25 bp, Homo sapien
cacttgtgtctaagattgattgtta

SEQ ID NO: 4069681 - DNA, 25 bp, Homo sapien
tagctgtcccttagaagttagtggc

SEQ ID NO: 4069682 - DNA, 25 bp, Homo sapien
taaaaatgccctagagaatccttgg

SEQ ID NO: 4069683 - DNA, 25 bp, Homo sapien
gagccattgttgtgtcccctagcgg

SEQ ID NO: 4069684 - DNA, 25 bp, Homo sapien
ggaaacaaatcacccatgagtggga

SEQ ID NO: 4069685 - DNA, 25 bp, Homo sapien
tacataagacacgtagtaagtccgg

SEQ ID NO: 4069686 - DNA, 25 bp, Homo sapien
caatcagaagtcgactgtgcagaca

SEQ ID NO: 4069687 - DNA, 25 bp, Homo sapien
taaggcactgggaagaactcgttac

SEQ ID NO: 4069688 - DNA, 25 bp, Homo sapien
gctaagaccagtgcactcaagaggc

SEQ ID NO: 4069689 - DNA, 25 bp, Homo sapien
aataccataaactgacaatgacctg

SEQ ID NO: 4069690 - DNA, 25 bp, Homo sapien
gggctaaaaatccactctgaatgaa

SEQ ID NO: 4069691 - DNA, 25 bp, Homo sapien
gacaccattgggatgagctccagat

SEQ ID NO: 4069692 - DNA, 25 bp, Homo sapien
tgggccatcgcttaaggcatccatc

SEQ ID NO: 4069693 - DNA, 25 bp, Homo sapien
gaagcagccctgtaacaatgtacat

SEQ ID NO: 4069694 - DNA, 25 bp, Homo sapien
tggcatggtctctctttctggcaaa

SEQ ID NO: 4069695 - DNA, 25 bp, Homo sapien
aatcctggggctttaagaacatctt

SEQ ID NO: 4069696 - DNA, 25 bp, Homo sapien
tcataattggcatggtctctctttc

SEQ ID NO: 4069697 - DNA, 25 bp, Homo sapien
ctttaattggtgttatgtctccatt

SEQ ID NO: 4069698 - DNA, 25 bp, Homo sapien
ccaatgaatgctaggtccagattag

SEQ ID NO: 4069699 - DNA, 25 bp, Homo sapien
tagaaggctgctgcgcagcacggtt

SEQ ID NO: 4069700 - DNA, 25 bp, Homo sapien
ggactcccttgaaagctgccgtgca

SEQ ID NO: 4069701 - DNA, 25 bp, Homo sapien
cgatcacagtcatcgtcctactggg

SEQ ID NO: 4069702 - DNA, 25 bp, Homo sapien
caagctctactgtttcatcttcaac

SEQ ID NO: 4069703 - DNA, 25 bp, Homo sapien
atcaagctctactgtttcatcttca

SEQ ID NO: 4069704 - DNA, 25 bp, Homo sapien
aagctctactgtttcatcttcaact

SEQ ID NO: 4069705 - DNA, 25 bp, Homo sapien
tcaagctctactgtttcatcttcaa

SEQ ID NO: 4069706 - DNA, 25 bp, Homo sapien
ggcatactgctgacacattccggtg

SEQ ID NO: 4069707 - DNA, 25 bp, Homo sapien
tgatgtcaaacttacctgaaggcag

SEQ ID NO: 4069708 - DNA, 25 bp, Homo sapien
catatggaagaaacactagtcgtca

SEQ ID NO: 4069709 - DNA, 25 bp, Homo sapien
ccttcaggctagaaaacgcttgtga

SEQ ID NO: 4069710 - DNA, 25 bp, Homo sapien
taaagaaagtcaaagcgagaccagc

SEQ ID NO: 4069711 - DNA, 25 bp, Homo sapien
cagacatactttggaatgctcgcct

SEQ ID NO: 4069712 - DNA, 25 bp, Homo sapien
ctctgtcaagggctgtatactgcta

SEQ ID NO: 4069713 - DNA, 25 bp, Homo sapien
aagggcaagaaacactggcttcaag

SEQ ID NO: 4069714 - DNA, 25 bp, Homo sapien
atgacattcttccatagagaagatc

SEQ ID NO: 4069715 - DNA, 25 bp, Homo sapien
gagaagatcttcacatagtaagaaa

SEQ ID NO: 4069716 - DNA, 25 bp, Homo sapien
aatgacattcttccatagagaagat

SEQ ID NO: 4069717 - DNA, 25 bp, Homo sapien
cttcacatagtaagaaactctgctc

SEQ ID NO: 4069718 - DNA, 25 bp, Homo sapien
taacggtcgctaggtggttgcacca

SEQ ID NO: 4069719 - DNA, 25 bp, Homo sapien
gaagacgggcagaaataacggtcgc

SEQ ID NO: 4069720 - DNA, 25 bp, Homo sapien
catctcagaatcaccgggaaggctg

SEQ ID NO: 4069721 - DNA, 25 bp, Homo sapien
taacagtgttatcagtcagagctct

SEQ ID NO: 4069722 - DNA, 25 bp, Homo sapien
taggaaaaccactgttgctgctgac

SEQ ID NO: 4069723 - DNA, 25 bp, Homo sapien
ctaggaaaaccactgttgctgctga

SEQ ID NO: 4069724 - DNA, 25 bp, Homo sapien
cctaggaaaaccactgttgctgctg

SEQ ID NO: 4069725 - DNA, 25 bp, Homo sapien
gacatatctatctccagcctggcca

SEQ ID NO: 4069726 - DNA, 25 bp, Homo sapien
tgagcacgacaccactgatggcatt

SEQ ID NO: 4069727 - DNA, 25 bp, Homo sapien
gcaggttgcgttccctggaccagga

SEQ ID NO: 4069728 - DNA, 25 bp, Homo sapien
ccacatgaccgtaaatccaaggtga

SEQ ID NO: 4069729 - DNA, 25 bp, Homo sapien
gctacactatggaattcaggacctg

SEQ ID NO: 4069730 - DNA, 25 bp, Homo sapien
gaactgctcgcatcccagaagtgga

SEQ ID NO: 4069731 - DNA, 25 bp, Homo sapien
tgaagtagaccccatgaatgcggag

SEQ ID NO: 4069732 - DNA, 25 bp, Homo sapien
cagatgttagtaggcctgggatccc

SEQ ID NO: 4069733 - DNA, 25 bp, Homo sapien
attaaaaatgtgttaggtaatgaat

SEQ ID NO: 4069734 - DNA, 25 bp, Homo sapien
attatccaattttcattaatgagga

SEQ ID NO: 4069735 - DNA, 25 bp, Homo sapien
ttcattaatgaggataattttcagg

SEQ ID NO: 4069736 - DNA, 25 bp, Homo sapien
taattatccaattttcattaatgag

SEQ ID NO: 4069737 - DNA, 25 bp, Homo sapien
tccaattttcattaatgaggataat

SEQ ID NO: 4069738 - DNA, 25 bp, Homo sapien
taaaagtgtcccctgtgaggcagtg

SEQ ID NO: 4069739 - DNA, 25 bp, Homo sapien
cctacatggtctagccactggctaa

SEQ ID NO: 4069740 - DNA, 25 bp, Homo sapien
gaattacagactgatacggctgaca

SEQ ID NO: 4069741 - DNA, 25 bp, Homo sapien
cagttgttccaagttgaggcacagc

SEQ ID NO: 4069742 - DNA, 25 bp, Homo sapien
aagtaaacaactggcggagctgggc

SEQ ID NO: 4069743 - DNA, 25 bp, Homo sapien
caagtaaacaactggcggagctggg

SEQ ID NO: 4069744 - DNA, 25 bp, Homo sapien
gacaagtaaacaactggcggagctg

SEQ ID NO: 4069745 - DNA, 25 bp, Homo sapien
tgacaagtaaacaactggcggagct

SEQ ID NO: 4069746 - DNA, 25 bp, Homo sapien
atgatgagttaaatttaccaggagt

SEQ ID NO: 4069747 - DNA, 25 bp, Homo sapien
ttctgaatgccacaagcatcatcag

SEQ ID NO: 4069748 - DNA, 25 bp, Homo sapien
tcatgggctttatgtcaccggaatg

SEQ ID NO: 4069749 - DNA, 25 bp, Homo sapien
gttgtgctactaaatcaataaactg

SEQ ID NO: 4069750 - DNA, 25 bp, Homo sapien
tctttaagctctggcaaatccaagt

SEQ ID NO: 4069751 - DNA, 25 bp, Homo sapien
tttctctttaagctctggcaaatcc

SEQ ID NO: 4069752 - DNA, 25 bp, Homo sapien
tctttctctttaagctctggcaaat

SEQ ID NO: 4069753 - DNA, 25 bp, Homo sapien
tctctttaagctctggcaaatccaa

SEQ ID NO: 4069754 - DNA, 25 bp, Homo sapien
ggtttctgagtccagtcccctttgc

SEQ ID NO: 4069755 - DNA, 25 bp, Homo sapien
agtgctcttcactaatgattttctt

SEQ ID NO: 4069756 - DNA, 25 bp, Homo sapien
ttctagttgtttcttggtttctgag

SEQ ID NO: 4069757 - DNA, 25 bp, Homo sapien
cagtgctcttcactaatgattttct

SEQ ID NO: 4069758 - DNA, 25 bp, Homo sapien
ctaaaggtgcgtgccactaggcctg

SEQ ID NO: 4069759 - DNA, 25 bp, Homo sapien
gactaaaggtgcgtgccactaggcc

SEQ ID NO: 4069760 - DNA, 25 bp, Homo sapien
gggactaaaggtgcgtgccactagg

SEQ ID NO: 4069761 - DNA, 25 bp, Homo sapien
cctggctaatattttgtattttttg

SEQ ID NO: 4069762 - DNA, 25 bp, Homo sapien
cgcccggagtggcgctctcagcgtc

SEQ ID NO: 4069763 - DNA, 25 bp, Homo sapien
cggagtggcgctctcagcgtccccg

SEQ ID NO: 4069764 - DNA, 25 bp, Homo sapien
gagtggcgctctcagcgtccccgca

SEQ ID NO: 4069765 - DNA, 25 bp, Homo sapien
cccggagtggcgctctcagcgtccc

SEQ ID NO: 4069766 - DNA, 25 bp, Homo sapien
cagtagattcttggacaaccttgtc

SEQ ID NO: 4069767 - DNA, 25 bp, Homo sapien
cgcagtagattcttggacaaccttg

SEQ ID NO: 4069768 - DNA, 25 bp, Homo sapien
catgcgcagtagattcttggacaac

SEQ ID NO: 4069769 - DNA, 25 bp, Homo sapien
cttcatgcgcagtagattcttggac

SEQ ID NO: 4069770 - DNA, 25 bp, Homo sapien
gtagcttccgcccagcgccgcactc

SEQ ID NO: 4069771 - DNA, 25 bp, Homo sapien
ggtagcttccgcccagcgccgcact

SEQ ID NO: 4069772 - DNA, 25 bp, Homo sapien
cagatggcgtaggttgatggaaagt

SEQ ID NO: 4069773 - DNA, 25 bp, Homo sapien
aagtgaattcttaatcctgatgctg

SEQ ID NO: 4069774 - DNA, 25 bp, Homo sapien
tgttgaagactcctttatcccactg

SEQ ID NO: 4069775 - DNA, 25 bp, Homo sapien
cttaccatagttagaaattgctggc

SEQ ID NO: 4069776 - DNA, 25 bp, Homo sapien
attacagaatggaggtagattgctt

SEQ ID NO: 4069777 - DNA, 25 bp, Homo sapien
tattacagaatggaggtagattgct

SEQ ID NO: 4069778 - DNA, 25 bp, Homo sapien
tacagaatggaggtagattgcttct

SEQ ID NO: 4069779 - DNA, 25 bp, Homo sapien
ttacagaatggaggtagattgcttc

SEQ ID NO: 4069780 - DNA, 25 bp, Homo sapien
ttttcgtagtgaattgcctttggtg

SEQ ID NO: 4069781 - DNA, 25 bp, Homo sapien
tttcgtagtgaattgcctttggtgt

SEQ ID NO: 4069782 - DNA, 25 bp, Homo sapien
tttggaagcccagttctcttcagca

SEQ ID NO: 4069783 - DNA, 25 bp, Homo sapien
tggaagcccagttctcttcagcaat

SEQ ID NO: 4069784 - DNA, 25 bp, Homo sapien
cttttggaagcccagttctcttcag

SEQ ID NO: 4069785 - DNA, 25 bp, Homo sapien
ggaagcccagttctcttcagcaatt

SEQ ID NO: 4069786 - DNA, 25 bp, Homo sapien
cagtttctgtttgttatgatgctaa

SEQ ID NO: 4069787 - DNA, 25 bp, Homo sapien
gccaacattgatcccatggcagttt

SEQ ID NO: 4069788 - DNA, 25 bp, Homo sapien
gacaactggatcttttatactgcca

SEQ ID NO: 4069789 - DNA, 25 bp, Homo sapien
caccaagctttgtatgtgccatacc

SEQ ID NO: 4069790 - DNA, 25 bp, Homo sapien
caatcctctgattctgacttgtgtt

SEQ ID NO: 4069791 - DNA, 25 bp, Homo sapien
taaaacccttagtgacaatcctctg

SEQ ID NO: 4069792 - DNA, 25 bp, Homo sapien
tcgtcttttttgacgcttctgatga

SEQ ID NO: 4069793 - DNA, 25 bp, Homo sapien
tggtggtttttgcatcggtgctgct

SEQ ID NO: 4069794 - DNA, 25 bp, Homo sapien
aaggaagtgctggaacatggcagaa

SEQ ID NO: 4069795 - DNA, 25 bp, Homo sapien
ccttgcgaaccattcaaggaagtgc

SEQ ID NO: 4069796 - DNA, 25 bp, Homo sapien
tgctgacagccttgcgaaccattca

SEQ ID NO: 4069797 - DNA, 25 bp, Homo sapien
gacagccttgcgaaccattcaagga

SEQ ID NO: 4069798 - DNA, 25 bp, Homo sapien
aagccagcaactcaaggacgccttt

SEQ ID NO: 4069799 - DNA, 25 bp, Homo sapien
tagcagaggccggggcacgaacaca

SEQ ID NO: 4069800 - DNA, 25 bp, Homo sapien
tgggtagcagaggccggggcacgaa

SEQ ID NO: 4069801 - DNA, 25 bp, Homo sapien
acactccagtcccaagccagcaact

SEQ ID NO: 4069802 - DNA, 25 bp, Homo sapien
gtgattttcatcagtgatatcctcc

SEQ ID NO: 4069803 - DNA, 25 bp, Homo sapien
gttaggattcaacttagtccatttc

SEQ ID NO: 4069804 - DNA, 25 bp, Homo sapien
tgattttcatcagtgatatcctcca

SEQ ID NO: 4069805 - DNA, 25 bp, Homo sapien
ggattcaacttagtccatttcacag

SEQ ID NO: 4069806 - DNA, 25 bp, Homo sapien
tggcaataatctctgctggggatcg

SEQ ID NO: 4069807 - DNA, 25 bp, Homo sapien
gggatcgttcttgagcttcttagga

SEQ ID NO: 4069808 - DNA, 25 bp, Homo sapien
tgtgtctgcccagctttgcggccag

SEQ ID NO: 4069809 - DNA, 25 bp, Homo sapien
gacgagaattctgttagattctgga

SEQ ID NO: 4069810 - DNA, 25 bp, Homo sapien
cttcggtggtcaaagagggcccctg

SEQ ID NO: 4069811 - DNA, 25 bp, Homo sapien
ctgtggttccaggggggatggaggc

SEQ ID NO: 4069812 - DNA, 25 bp, Homo sapien
tgtggttccaggggggatggaggcc

SEQ ID NO: 4069813 - DNA, 25 bp, Homo sapien
gtggttccaggggggatggaggcca

SEQ ID NO: 4069814 - DNA, 25 bp, Homo sapien
tggttccaggggggatggaggccat

SEQ ID NO: 4069815 - DNA, 25 bp, Homo sapien
gctccttggagaagaggacgatggc

SEQ ID NO: 4069816 - DNA, 25 bp, Homo sapien
tccttggagaagaggacgatggcca

SEQ ID NO: 4069817 - DNA, 25 bp, Homo sapien
ccttggagaagaggacgatggccat

SEQ ID NO: 4069818 - DNA, 25 bp, Homo sapien
ctgctccttggagaagaggacgatg

SEQ ID NO: 4069819 - DNA, 25 bp, Homo sapien
gtctgcttctgggattgactctttt

SEQ ID NO: 4069820 - DNA, 25 bp, Homo sapien
tatttgcttgtagagctttctgaaa

SEQ ID NO: 4069821 - DNA, 25 bp, Homo sapien
tgaaaagccacgataccaaaaggcc

SEQ ID NO: 4069822 - DNA, 25 bp, Homo sapien
tgatatttgcttgtagagctttctg

SEQ ID NO: 4069823 - DNA, 25 bp, Homo sapien
gagctttctgaaaagccacgatacc

SEQ ID NO: 4069824 - DNA, 25 bp, Homo sapien
taacacagagccacatggttaggca

SEQ ID NO: 4069825 - DNA, 25 bp, Homo sapien
cagagatagacctggtgaagcacaa

SEQ ID NO: 4069826 - DNA, 25 bp, Homo sapien
tctctaagaatagcaaccctgtctg

SEQ ID NO: 4069827 - DNA, 25 bp, Homo sapien
ccttggtatatctgagtggagttgc

SEQ ID NO: 4069828 - DNA, 25 bp, Homo sapien
ccctctgctgatcaagcagccggag

SEQ ID NO: 4069829 - DNA, 25 bp, Homo sapien
ttctgaggctcccatggatctggga

SEQ ID NO: 4069830 - DNA, 25 bp, Homo sapien
gggaaatgggaacctccagtctctc

SEQ ID NO: 4069831 - DNA, 25 bp, Homo sapien
cggaggacctgtcatgatggttaca

SEQ ID NO: 4069832 - DNA, 25 bp, Homo sapien
ttatttctgagtacagtgctgtgca

SEQ ID NO: 4069833 - DNA, 25 bp, Homo sapien
atttctgagtacagtgctgtgcacc

SEQ ID NO: 4069834 - DNA, 25 bp, Homo sapien
ctttatttctgagtacagtgctgtg

SEQ ID NO: 4069835 - DNA, 25 bp, Homo sapien
ttaatctttatttctgagtacagtg

SEQ ID NO: 4069836 - DNA, 25 bp, Homo sapien
tcaagagctccatagactttatagt

SEQ ID NO: 4069837 - DNA, 25 bp, Homo sapien
caaagtactctagtgtggcagcagt

SEQ ID NO: 4069838 - DNA, 25 bp, Homo sapien
gactttatagtcattaactcgataa

SEQ ID NO: 4069839 - DNA, 25 bp, Homo sapien
cattaactcgataaccctcaaagta

SEQ ID NO: 4069840 - DNA, 25 bp, Homo sapien
tagtagttggatccactctaggacc

SEQ ID NO: 4069841 - DNA, 25 bp, Homo sapien
tctctgtgcaccgagcctgctgtgt

SEQ ID NO: 4069842 - DNA, 25 bp, Homo sapien
gagctgacgtgaagacttgatcata

SEQ ID NO: 4069843 - DNA, 25 bp, Homo sapien
tgtcccaggcataggctctcgctgt

SEQ ID NO: 4069844 - DNA, 25 bp, Homo sapien
tgccgccatacctgactgagttttt

SEQ ID NO: 4069845 - DNA, 25 bp, Homo sapien
tccttctagaattcccacaacacaa

SEQ ID NO: 4069846 - DNA, 25 bp, Homo sapien
cagcctaaatagggttcttatacct

SEQ ID NO: 4069847 - DNA, 25 bp, Homo sapien
ttgagactaccagttcatgccgcca

SEQ ID NO: 4069848 - DNA, 25 bp, Homo sapien
catttggttaactggtcctcagtcc

SEQ ID NO: 4069849 - DNA, 25 bp, Homo sapien
tatgctctgccaattgtatgggtgg

SEQ ID NO: 4069850 - DNA, 25 bp, Homo sapien
tggtagtacgtagcaggcttgtcct

SEQ ID NO: 4069851 - DNA, 25 bp, Homo sapien
tcctcagtgatgtagactgtgggca

SEQ ID NO: 4069852 - DNA, 25 bp, Homo sapien
tgtagaggcaactgtggctttcact

SEQ ID NO: 4069853 - DNA, 25 bp, Homo sapien
tctgggaaccgagctttcattgcta

SEQ ID NO: 4069854 - DNA, 25 bp, Homo sapien
tgccagcttgagtcctagccagagc

SEQ ID NO: 4069855 - DNA, 25 bp, Homo sapien
gggtggcaacattgcccaggacttt

SEQ ID NO: 4069856 - DNA, 25 bp, Homo sapien
aagcctgcgtgatttgattgatgac

SEQ ID NO: 4069857 - DNA, 25 bp, Homo sapien
tatcaatattgatggccgtgagcac

SEQ ID NO: 4069858 - DNA, 25 bp, Homo sapien
ctacggtgtcctgctagcatccaag

SEQ ID NO: 4069859 - DNA, 25 bp, Homo sapien
tataatgcatggtgaggcgaggcta

SEQ ID NO: 4069860 - DNA, 25 bp, Homo sapien
agtatttctcaaagcatggagccac

SEQ ID NO: 4069861 - DNA, 25 bp, Homo sapien
tctataatgattaaagcagacagtc

SEQ ID NO: 4069862 - DNA, 25 bp, Homo sapien
tgagtctgagatgtcggcttgtttt

SEQ ID NO: 4069863 - DNA, 25 bp, Homo sapien
gtccgtgagtctgagatgtcggctt

SEQ ID NO: 4069864 - DNA, 25 bp, Homo sapien
cttctgggctggtccgtgagtctga

SEQ ID NO: 4069865 - DNA, 25 bp, Homo sapien
ctgagatgtcggcttgttttccatg

SEQ ID NO: 4069866 - DNA, 25 bp, Homo sapien
agggacagattcatggatgtgtgtt

SEQ ID NO: 4069867 - DNA, 25 bp, Homo sapien
cagggacagattcatggatgtgtgt

SEQ ID NO: 4069868 - DNA, 25 bp, Homo sapien
acagattcatggatgtgtgttggag

SEQ ID NO: 4069869 - DNA, 25 bp, Homo sapien
ggacagattcatggatgtgtgttgg

SEQ ID NO: 4069870 - DNA, 25 bp, Homo sapien
gccctgtcccatgctcctcctcctc

SEQ ID NO: 4069871 - DNA, 25 bp, Homo sapien
cctgtcccatgctcctcctcctcca

SEQ ID NO: 4069872 - DNA, 25 bp, Homo sapien
ctgccctgtcccatgctcctcctcc

SEQ ID NO: 4069873 - DNA, 25 bp, Homo sapien
ctgtcccatgctcctcctcctccat

SEQ ID NO: 4069874 - DNA, 25 bp, Homo sapien
tcctttgatgtcaggcattatttct

SEQ ID NO: 4069875 - DNA, 25 bp, Homo sapien
agctcctttgatgtcaggcattatt

SEQ ID NO: 4069876 - DNA, 25 bp, Homo sapien
cttgctcttcttgcctgacattgag

SEQ ID NO: 4069877 - DNA, 25 bp, Homo sapien
ttaagctcctttgatgtcaggcatt

SEQ ID NO: 4069878 - DNA, 25 bp, Homo sapien
tcttctgctttttccgaggtggctc

SEQ ID NO: 4069879 - DNA, 25 bp, Homo sapien
tctgggtaaactttggttcctcaga

SEQ ID NO: 4069880 - DNA, 25 bp, Homo sapien
catctctgggtaaactttggttcct

SEQ ID NO: 4069881 - DNA, 25 bp, Homo sapien
tgctttttccgaggtggctctggga

SEQ ID NO: 4069882 - DNA, 25 bp, Homo sapien
agagcgttgtgagagaggctgctgc

SEQ ID NO: 4069883 - DNA, 25 bp, Homo sapien
ctgccaagagcgttgtgagagaggc

SEQ ID NO: 4069884 - DNA, 25 bp, Homo sapien
ccaagagcgttgtgagagaggctgc

SEQ ID NO: 4069885 - DNA, 25 bp, Homo sapien
tgccaagagcgttgtgagagaggct

SEQ ID NO: 4069886 - DNA, 25 bp, Homo sapien
cttcgtaactctgggccaacctgaa

SEQ ID NO: 4069887 - DNA, 25 bp, Homo sapien
actctgggccaacctgaaattgaac

SEQ ID NO: 4069888 - DNA, 25 bp, Homo sapien
tgaaattgaacagcttgcaaaaggc

SEQ ID NO: 4069889 - DNA, 25 bp, Homo sapien
cctgaaattgaacagcttgcaaaag

SEQ ID NO: 4069890 - DNA, 25 bp, Homo sapien
acctgagtagtagatggcaaacatc

SEQ ID NO: 4069891 - DNA, 25 bp, Homo sapien
gcccgacacggacggagtgagataa

SEQ ID NO: 4069892 - DNA, 25 bp, Homo sapien
gatggcaaacatcagagtcgaggcc

SEQ ID NO: 4069893 - DNA, 25 bp, Homo sapien
cggacggagtgagataacctgagta

SEQ ID NO: 4069894 - DNA, 25 bp, Homo sapien
tgcaaacgtgcaaggcctgcttcat

SEQ ID NO: 4069895 - DNA, 25 bp, Homo sapien
ctgcaaacgtgcaaggcctgcttca

SEQ ID NO: 4069896 - DNA, 25 bp, Homo sapien
tctgggttgaggatcagagtgctgc

SEQ ID NO: 4069897 - DNA, 25 bp, Homo sapien
tgggttgaggatcagagtgctgctt

SEQ ID NO: 4069898 - DNA, 25 bp, Homo sapien
ctctgggttgaggatcagagtgctg

SEQ ID NO: 4069899 - DNA, 25 bp, Homo sapien
ctgggttgaggatcagagtgctgct

SEQ ID NO: 4069900 - DNA, 25 bp, Homo sapien
tgtactttgtgtcctgtatagcagc

SEQ ID NO: 4069901 - DNA, 25 bp, Homo sapien
tgcgagagctttgcttcctgccgtg

SEQ ID NO: 4069902 - DNA, 25 bp, Homo sapien
tggtgatgctggacctccatccagc

SEQ ID NO: 4069903 - DNA, 25 bp, Homo sapien
gctttgagttcagtaactgaggaca

SEQ ID NO: 4069904 - DNA, 25 bp, Homo sapien
tatgctgcacacaatacgacccaga

SEQ ID NO: 4069905 - DNA, 25 bp, Homo sapien
tgtctgctagaggattcaaaggccc

SEQ ID NO: 4069906 - DNA, 25 bp, Homo sapien
caaaggccctcagattgttgggagg

SEQ ID NO: 4069907 - DNA, 25 bp, Homo sapien
ggacccattgtttaatgaccctctg

SEQ ID NO: 4069908 - DNA, 25 bp, Homo sapien
tgttaacccatatggtttacagatg

SEQ ID NO: 4069909 - DNA, 25 bp, Homo sapien
gctttgtgattagcatccttctttg

SEQ ID NO: 4069910 - DNA, 25 bp, Homo sapien
gagggtgctgagcatttctgaagct

SEQ ID NO: 4069911 - DNA, 25 bp, Homo sapien
gttttcaagggtggtactgatagat

SEQ ID NO: 4069912 - DNA, 25 bp, Homo sapien
gagcagagaagttgggctgttttca

SEQ ID NO: 4069913 - DNA, 25 bp, Homo sapien
gcagtgacagaatccggtcctctgt

SEQ ID NO: 4069914 - DNA, 25 bp, Homo sapien
tcagttgcaagcctctgagcagaga

SEQ ID NO: 4069915 - DNA, 25 bp, Homo sapien
tcctctgtaagggaggcaccaaccc

SEQ ID NO: 4069916 - DNA, 25 bp, Homo sapien
agtttcagcataaatggacattttc

SEQ ID NO: 4069917 - DNA, 25 bp, Homo sapien
tgtggtttgatggaacatcactttc

SEQ ID NO: 4069918 - DNA, 25 bp, Homo sapien
ccaggaggtagagaaatggtgtttt

SEQ ID NO: 4069919 - DNA, 25 bp, Homo sapien
gaaactttgtttagtttcagcataa

SEQ ID NO: 4069920 - DNA, 25 bp, Homo sapien
tgaaagctgcttctctcactacacc

SEQ ID NO: 4069921 - DNA, 25 bp, Homo sapien
cttgaaagctgcttctctcactaca

SEQ ID NO: 4069922 - DNA, 25 bp, Homo sapien
gaaagctgcttctctcactacacct

SEQ ID NO: 4069923 - DNA, 25 bp, Homo sapien
ttgaaagctgcttctctcactacac

SEQ ID NO: 4069924 - DNA, 25 bp, Homo sapien
agtttgtagtggatcctataccagc

SEQ ID NO: 4069925 - DNA, 25 bp, Homo sapien
tttctcctgccagttaactttagga

SEQ ID NO: 4069926 - DNA, 25 bp, Homo sapien
gtagtggatcctataccagctctgg

SEQ ID NO: 4069927 - DNA, 25 bp, Homo sapien
gactagactcagtgtggagtctcca

SEQ ID NO: 4069928 - DNA, 25 bp, Homo sapien
tattaggattccaggggatgttctt

SEQ ID NO: 4069929 - DNA, 25 bp, Homo sapien
tggggcagtagggtgtatgtattag

SEQ ID NO: 4069930 - DNA, 25 bp, Homo sapien
gtatgtattaggattccaggggatg

SEQ ID NO: 4069931 - DNA, 25 bp, Homo sapien
ggcagtagggtgtatgtattaggat

SEQ ID NO: 4069932 - DNA, 25 bp, Homo sapien
cttaatgaggacttccagtgccaca

SEQ ID NO: 4069933 - DNA, 25 bp, Homo sapien
ttaatgaggacttccagtgccacat

SEQ ID NO: 4069934 - DNA, 25 bp, Homo sapien
tcttaatgaggacttccagtgccac

SEQ ID NO: 4069935 - DNA, 25 bp, Homo sapien
taatgaggacttccagtgccacatt

SEQ ID NO: 4069936 - DNA, 25 bp, Homo sapien
ttctttgaatccacaggcaacacaa

SEQ ID NO: 4069937 - DNA, 25 bp, Homo sapien
caaatttccttgtgagttggggaca

SEQ ID NO: 4069938 - DNA, 25 bp, Homo sapien
tacaaatttccttgtgagttgggga

SEQ ID NO: 4069939 - DNA, 25 bp, Homo sapien
gtcatagacccctgccagcctctgc

SEQ ID NO: 4069940 - DNA, 25 bp, Homo sapien
ttagtcatagacccctgccagcctc

SEQ ID NO: 4069941 - DNA, 25 bp, Homo sapien
ctcagcttccctttcacatcagaaa

SEQ ID NO: 4069942 - DNA, 25 bp, Homo sapien
gcttccctttcacatcagaaaactc

SEQ ID NO: 4069943 - DNA, 25 bp, Homo sapien
ttgtgtggatgtggttcttccatta

SEQ ID NO: 4069944 - DNA, 25 bp, Homo sapien
gacatattaacagccagtcatacca

SEQ ID NO: 4069945 - DNA, 25 bp, Homo sapien
catattaacagccagtcataccaaa

SEQ ID NO: 4069946 - DNA, 25 bp, Homo sapien
tgacatattaacagccagtcatacc

SEQ ID NO: 4069947 - DNA, 25 bp, Homo sapien
catgacatattaacagccagtcata

SEQ ID NO: 4069948 - DNA, 25 bp, Homo sapien
ccgaaagtatattcttgctgtcagc

SEQ ID NO: 4069949 - DNA, 25 bp, Homo sapien
tttttagctttgtgagttatcaaaa

SEQ ID NO: 4069950 - DNA, 25 bp, Homo sapien
tcaaaaagttctctggcgtttttgc

SEQ ID NO: 4069951 - DNA, 25 bp, Homo sapien
tttagctttgtgagttatcaaaata

SEQ ID NO: 4069952 - DNA, 25 bp, Homo sapien
agttctctggcgtttttgctaaaca

SEQ ID NO: 4069953 - DNA, 25 bp, Homo sapien
gggagaaagttgaattgtctgaaaa

SEQ ID NO: 4069954 - DNA, 25 bp, Homo sapien
gaaatgaatttaggcactcaggcat

SEQ ID NO: 4069955 - DNA, 25 bp, Homo sapien
catgggagtcatcttttagatctga

SEQ ID NO: 4069956 - DNA, 25 bp, Homo sapien
taggcggtcaccaaagaagggccac

SEQ ID NO: 4069957 - DNA, 25 bp, Homo sapien
gggagacacgcatatataagatggc

SEQ ID NO: 4069958 - DNA, 25 bp, Homo sapien
tcgcagggagacacgcatatataag

SEQ ID NO: 4069959 - DNA, 25 bp, Homo sapien
agatcttgtcgcagggagacacgca

SEQ ID NO: 4069960 - DNA, 25 bp, Homo sapien
cacgcatatataagatggcttgtct

SEQ ID NO: 4069961 - DNA, 25 bp, Homo sapien
cctgtttgtagaatatccagatttt

SEQ ID NO: 4069962 - DNA, 25 bp, Homo sapien
caaccatagttgtgagtttcctgtt

SEQ ID NO: 4069963 - DNA, 25 bp, Homo sapien
tgttccagggacaaccatagttgtg

SEQ ID NO: 4069964 - DNA, 25 bp, Homo sapien
tagaatatccagattttctacccat

SEQ ID NO: 4069965 - DNA, 25 bp, Homo sapien
tgcacagtggacttgtaatagatac

SEQ ID NO: 4069966 - DNA, 25 bp, Homo sapien
tgtgtctaggatgtggctttcctgg

SEQ ID NO: 4069967 - DNA, 25 bp, Homo sapien
taggatgtggctttcctggcattgc

SEQ ID NO: 4069968 - DNA, 25 bp, Homo sapien
tggacttgtaatagatactgtgagt

SEQ ID NO: 4069969 - DNA, 25 bp, Homo sapien
atatgcttcagtgtaacacatttac

SEQ ID NO: 4069970 - DNA, 25 bp, Homo sapien
ctgcaatatggcatggctgcagatg

SEQ ID NO: 4069971 - DNA, 25 bp, Homo sapien
agctcaatgccaaaagcagactttg

SEQ ID NO: 4069972 - DNA, 25 bp, Homo sapien
tcagtgtaacacatttacagcaggg

SEQ ID NO: 4069973 - DNA, 25 bp, Homo sapien
aacagcaggaatatcgtcattgtca

SEQ ID NO: 4069974 - DNA, 25 bp, Homo sapien
gtcaaagtgattaatggaggaagag

SEQ ID NO: 4069975 - DNA, 25 bp, Homo sapien
ggccttagctggtcaaagtgattaa

SEQ ID NO: 4069976 - DNA, 25 bp, Homo sapien
atgacaatgggccttagctggtcaa

SEQ ID NO: 4069977 - DNA, 25 bp, Homo sapien
acagacgaagagctacataatgatg

SEQ ID NO: 4069978 - DNA, 25 bp, Homo sapien
gggcaaatgcaacagacgaagagct

SEQ ID NO: 4069979 - DNA, 25 bp, Homo sapien
tgcaacagacgaagagctacataat

SEQ ID NO: 4069980 - DNA, 25 bp, Homo sapien
ctactccgagggcaaatgcaacaga

SEQ ID NO: 4069981 - DNA, 25 bp, Homo sapien
cacacaggacattcggcataggaga

SEQ ID NO: 4069982 - DNA, 25 bp, Homo sapien
tgttcccagtaacaacacacaggac

SEQ ID NO: 4069983 - DNA, 25 bp, Homo sapien
tcttttgagcgaagcttttaaactg

SEQ ID NO: 4069984 - DNA, 25 bp, Homo sapien
ccaaagatgtagtcagaaaaaagga

SEQ ID NO: 4069985 - DNA, 25 bp, Homo sapien
ggatgtgccaatccatgtagcctgc

SEQ ID NO: 4069986 - DNA, 25 bp, Homo sapien
ctatagcatgcaactggctgccctt

SEQ ID NO: 4069987 - DNA, 25 bp, Homo sapien
gccgtcagctctatagcatgcaact

SEQ ID NO: 4069988 - DNA, 25 bp, Homo sapien
tgtggctcaacatattggatgtgcc

SEQ ID NO: 4069989 - DNA, 25 bp, Homo sapien
gaggtaggaagggatcgccatctat

SEQ ID NO: 4069990 - DNA, 25 bp, Homo sapien
ggaagggatcgccatctatagttag

SEQ ID NO: 4069991 - DNA, 25 bp, Homo sapien
ggtaggaagggatcgccatctatag

SEQ ID NO: 4069992 - DNA, 25 bp, Homo sapien
gtaggaagggatcgccatctatagt

SEQ ID NO: 4069993 - DNA, 25 bp, Homo sapien
agctttttctgcctgacgtctgagg

SEQ ID NO: 4069994 - DNA, 25 bp, Homo sapien
tctgcctgacgtctgagggtcccac

SEQ ID NO: 4069995 - DNA, 25 bp, Homo sapien
tttttctgcctgacgtctgagggtc

SEQ ID NO: 4069996 - DNA, 25 bp, Homo sapien
tttctgcctgacgtctgagggtccc

SEQ ID NO: 4069997 - DNA, 25 bp, Homo sapien
ttgtgccagtagcaccaaaccgggc

SEQ ID NO: 4069998 - DNA, 25 bp, Homo sapien
tcagtttctccttgagcaccacaat

SEQ ID NO: 4069999 - DNA, 25 bp, Homo sapien
agtagcaccaaaccgggccttgctc

SEQ ID NO: 4070000 - DNA, 25 bp, Homo sapien
tttctccttgagcaccacaatgagg

SEQ ID NO: 4070001 - DNA, 25 bp, Homo sapien
cttcgttttgcccatccactagtat

SEQ ID NO: 4070002 - DNA, 25 bp, Homo sapien
gctcccaagctcagaatgaaggtat

SEQ ID NO: 4070003 - DNA, 25 bp, Homo sapien
aatgaaggtatctgctgacagatcc

SEQ ID NO: 4070004 - DNA, 25 bp, Homo sapien
tccactagtatcatagagcattccc

SEQ ID NO: 4070005 - DNA, 25 bp, Homo sapien
ccatttgtacccagtcatatgttac

SEQ ID NO: 4070006 - DNA, 25 bp, Homo sapien
catcaaagggatgttagggcttcca

SEQ ID NO: 4070007 - DNA, 25 bp, Homo sapien
ctgtgtagcttcgtttcatcaaagg

SEQ ID NO: 4070008 - DNA, 25 bp, Homo sapien
tcaagatggatgtgcatggatatcc

SEQ ID NO: 4070009 - DNA, 25 bp, Homo sapien
ttgagctctgggcacgacgaatagt

SEQ ID NO: 4070010 - DNA, 25 bp, Homo sapien
tatgattcatgaagccgatgggaca

SEQ ID NO: 4070011 - DNA, 25 bp, Homo sapien
atgagagcacgctcagcctgtagcg

SEQ ID NO: 4070012 - DNA, 25 bp, Homo sapien
gaatagtggcatgtacaattaaatg

SEQ ID NO: 4070013 - DNA, 25 bp, Homo sapien
gaaagaccgtacagtttggaggaga

SEQ ID NO: 4070014 - DNA, 25 bp, Homo sapien
aggacaggtgggccgttgagaggga

SEQ ID NO: 4070015 - DNA, 25 bp, Homo sapien
gtgaaagaccgtacagtttggagga

SEQ ID NO: 4070016 - DNA, 25 bp, Homo sapien
gaggtgaaagaccgtacagtttgga

SEQ ID NO: 4070017 - DNA, 25 bp, Homo sapien
cccatatttatgtggcagggacaca

SEQ ID NO: 4070018 - DNA, 25 bp, Homo sapien
aaataatgtcttgccgtctgacagc

SEQ ID NO: 4070019 - DNA, 25 bp, Homo sapien
tctgacagcagatataggcctggaa

SEQ ID NO: 4070020 - DNA, 25 bp, Homo sapien
ggaatttctgcaaaggctttccaac

SEQ ID NO: 4070021 - DNA, 25 bp, Homo sapien
caggatgtcgatgtgtagagagtag

SEQ ID NO: 4070022 - DNA, 25 bp, Homo sapien
gaagagagcaggatgtcgatgtgta

SEQ ID NO: 4070023 - DNA, 25 bp, Homo sapien
ggtatggttcatgtaggttactctc

SEQ ID NO: 4070024 - DNA, 25 bp, Homo sapien
catgtaggttactctccctggaaga

SEQ ID NO: 4070025 - DNA, 25 bp, Homo sapien
gaatccagagtgcacaaaagcccat

SEQ ID NO: 4070026 - DNA, 25 bp, Homo sapien
cgttctgaatccagagtgcacaaaa

SEQ ID NO: 4070027 - DNA, 25 bp, Homo sapien
ctgaatccagagtgcacaaaagccc

SEQ ID NO: 4070028 - DNA, 25 bp, Homo sapien
tcacgttctgaatccagagtgcaca

SEQ ID NO: 4070029 - DNA, 25 bp, Homo sapien
aaggaggccatcagacacataggac

SEQ ID NO: 4070030 - DNA, 25 bp, Homo sapien
aggaggccatcagacacataggact

SEQ ID NO: 4070031 - DNA, 25 bp, Homo sapien
aaagtgttctgttagttaccatgtg

SEQ ID NO: 4070032 - DNA, 25 bp, Homo sapien
tcagcctatacaacaggctgctgct

SEQ ID NO: 4070033 - DNA, 25 bp, Homo sapien
gcttttggtttctcgcccctctgat

SEQ ID NO: 4070034 - DNA, 25 bp, Homo sapien
tattttgtcaagaatccaaagtgtt

SEQ ID NO: 4070035 - DNA, 25 bp, Homo sapien
aaggagtattcagttctttggtgag

SEQ ID NO: 4070036 - DNA, 25 bp, Homo sapien
ttcagttctttggtgagtgtgccaa

SEQ ID NO: 4070037 - DNA, 25 bp, Homo sapien
ctgcaaaggagtattcagttctttg

SEQ ID NO: 4070038 - DNA, 25 bp, Homo sapien
gagtattcagttctttggtgagtgt

SEQ ID NO: 4070039 - DNA, 25 bp, Homo sapien
tctgcaacgttgctgatgggcctgc

SEQ ID NO: 4070040 - DNA, 25 bp, Homo sapien
gcttgagtgtctgcaacgttgctga

SEQ ID NO: 4070041 - DNA, 25 bp, Homo sapien
tgtctgcaacgttgctgatgggcct

SEQ ID NO: 4070042 - DNA, 25 bp, Homo sapien
tttgcttgtgcttgagtgtctgcaa

SEQ ID NO: 4070043 - DNA, 25 bp, Homo sapien
tccatctgtgctagagtcgttatct

SEQ ID NO: 4070044 - DNA, 25 bp, Homo sapien
tcataaatctccaatgaagagcctt

SEQ ID NO: 4070045 - DNA, 25 bp, Homo sapien
caaacaagaatacaatggctcacca

SEQ ID NO: 4070046 - DNA, 25 bp, Homo sapien
ctcaccagggaaggcattaaccaac

SEQ ID NO: 4070047 - DNA, 25 bp, Homo sapien
tatcccacgtctttccataagctct

SEQ ID NO: 4070048 - DNA, 25 bp, Homo sapien
cttatcccacgtctttccataagct

SEQ ID NO: 4070049 - DNA, 25 bp, Homo sapien
ctgggttgagtctgtcatattctgc

SEQ ID NO: 4070050 - DNA, 25 bp, Homo sapien
tctgctccctaaagctaccaaggtt

SEQ ID NO: 4070051 - DNA, 25 bp, Homo sapien
tgaaaagtaattgcagacacatgtg

SEQ ID NO: 4070052 - DNA, 25 bp, Homo sapien
gaggaaaccaatcatgccacttatc

SEQ ID NO: 4070053 - DNA, 25 bp, Homo sapien
cgctgaagcctgcatgaggaaacca

SEQ ID NO: 4070054 - DNA, 25 bp, Homo sapien
cacttatcgccccagtttgaaaagt

SEQ ID NO: 4070055 - DNA, 25 bp, Homo sapien
acacgtgggcgtcgaggaactgcat

SEQ ID NO: 4070056 - DNA, 25 bp, Homo sapien
tcagtggtggcaagaggacgttggt

SEQ ID NO: 4070057 - DNA, 25 bp, Homo sapien
tgtgtagtgtcccactctggaggtg

SEQ ID NO: 4070058 - DNA, 25 bp, Homo sapien
ctaacacagggtagatgtcagtggt

SEQ ID NO: 4070059 - DNA, 25 bp, Homo sapien
taactgggccatggacatcttctgg

SEQ ID NO: 4070060 - DNA, 25 bp, Homo sapien
tatgacaagcaacgagaattctttg

SEQ ID NO: 4070061 - DNA, 25 bp, Homo sapien
cacccagaagccctatgacaagcaa

SEQ ID NO: 4070062 - DNA, 25 bp, Homo sapien
catcttctgggaatatgctgagacc

SEQ ID NO: 4070063 - DNA, 25 bp, Homo sapien
cttaacttgcttccaccgattaact

SEQ ID NO: 4070064 - DNA, 25 bp, Homo sapien
tgtgcttaacttgcttccaccgatt

SEQ ID NO: 4070065 - DNA, 25 bp, Homo sapien
tgcttaacttgcttccaccgattaa

SEQ ID NO: 4070066 - DNA, 25 bp, Homo sapien
tgcttccaccgattaactttcccca

SEQ ID NO: 4070067 - DNA, 25 bp, Homo sapien
ctgctgctgtcgctcaaaggcgccg

SEQ ID NO: 4070068 - DNA, 25 bp, Homo sapien
agaggccgagcaggcaccaccgact

SEQ ID NO: 4070069 - DNA, 25 bp, Homo sapien
tcagttagaggcgactccaacgagc

SEQ ID NO: 4070070 - DNA, 25 bp, Homo sapien
ccgaagcgctgctcgggtccggatt

SEQ ID NO: 4070071 - DNA, 25 bp, Homo sapien
ctagctgaacgcagcccgggctggg

SEQ ID NO: 4070072 - DNA, 25 bp, Homo sapien
cagccatcaacagccctgccacatg

SEQ ID NO: 4070073 - DNA, 25 bp, Homo sapien
agctgctcagccatcaacagccctg

SEQ ID NO: 4070074 - DNA, 25 bp, Homo sapien
gctcagccatcaacagccctgccac

SEQ ID NO: 4070075 - DNA, 25 bp, Homo sapien
ttccctcaaggtgtcagggaaccgc

SEQ ID NO: 4070076 - DNA, 25 bp, Homo sapien
cagggaaccgctttcttgtgttgtg

SEQ ID NO: 4070077 - DNA, 25 bp, Homo sapien
gggccttcaggccaatgtctctttc

SEQ ID NO: 4070078 - DNA, 25 bp, Homo sapien
ccctcaaggtgtcagggaaccgctt

SEQ ID NO: 4070079 - DNA, 25 bp, Homo sapien
actgattgctgtagggcctgcggaa

SEQ ID NO: 4070080 - DNA, 25 bp, Homo sapien
gctgactcagactgcccggagtatc

SEQ ID NO: 4070081 - DNA, 25 bp, Homo sapien
tcagccgtcgggcatctgggatcat

SEQ ID NO: 4070082 - DNA, 25 bp, Homo sapien
tgcggaaagttgctggacactgcca

SEQ ID NO: 4070083 - DNA, 25 bp, Homo sapien
cctaccaactatgaagaacgctgca

SEQ ID NO: 4070084 - DNA, 25 bp, Homo sapien
ggaacccagaggtgaacacgacagt

SEQ ID NO: 4070085 - DNA, 25 bp, Homo sapien
ccttggactgcttagggactgctga

SEQ ID NO: 4070086 - DNA, 25 bp, Homo sapien
gaactgaatccctgtctcatggagc

SEQ ID NO: 4070087 - DNA, 25 bp, Homo sapien
tgtgcatgcacgcaccagtgccatg

SEQ ID NO: 4070088 - DNA, 25 bp, Homo sapien
cctgcaacccttagaggcgactctt

SEQ ID NO: 4070089 - DNA, 25 bp, Homo sapien
tcctgggaggctttattagggcagt

SEQ ID NO: 4070090 - DNA, 25 bp, Homo sapien
gttgctatgcactagttacccatgt

SEQ ID NO: 4070091 - DNA, 25 bp, Homo sapien
tgggttttccaatgatcagcatgct

SEQ ID NO: 4070092 - DNA, 25 bp, Homo sapien
taaatctgggttttccaatgatcag

SEQ ID NO: 4070093 - DNA, 25 bp, Homo sapien
gaagaagactgaagaccacattcaa

SEQ ID NO: 4070094 - DNA, 25 bp, Homo sapien
cttttgcagtagttccggagaagaa

SEQ ID NO: 4070095 - DNA, 25 bp, Homo sapien
ggtttcccaactctcatagcatcag

SEQ ID NO: 4070096 - DNA, 25 bp, Homo sapien
cccttgagttgttttgagccaagca

SEQ ID NO: 4070097 - DNA, 25 bp, Homo sapien
atagcatcagctttagggcatcccc

SEQ ID NO: 4070098 - DNA, 25 bp, Homo sapien
ctgaaggctgccaattaaatgaaga

SEQ ID NO: 4070099 - DNA, 25 bp, Homo sapien
gggacatggcagtggccacttcaaa

SEQ ID NO: 4070100 - DNA, 25 bp, Homo sapien
cccaggggccggtgtgatgtttcat

SEQ ID NO: 4070101 - DNA, 25 bp, Homo sapien
tgggtcaggtctccgtgaaggaaag

SEQ ID NO: 4070102 - DNA, 25 bp, Homo sapien
ggatacagctgtccgtttcctttgc

SEQ ID NO: 4070103 - DNA, 25 bp, Homo sapien
ttgtctgatgtcacgttgcccctat

SEQ ID NO: 4070104 - DNA, 25 bp, Homo sapien
gttgtctgatgtcacgttgccccta

SEQ ID NO: 4070105 - DNA, 25 bp, Homo sapien
tccagaatttctgtgcatgtgagtt

SEQ ID NO: 4070106 - DNA, 25 bp, Homo sapien
ggacttcagcaagttccagaatttc

SEQ ID NO: 4070107 - DNA, 25 bp, Homo sapien
aatttctgtgcatgtgagtttaccc

SEQ ID NO: 4070108 - DNA, 25 bp, Homo sapien
ctggacttcagcaagttccagaatt

SEQ ID NO: 4070109 - DNA, 25 bp, Homo sapien
caggtctattgccacttctttggga

SEQ ID NO: 4070110 - DNA, 25 bp, Homo sapien
aaattactgctgtgtagataaggca

SEQ ID NO: 4070111 - DNA, 25 bp, Homo sapien
gcacaatgctgaacacctttgaagt

SEQ ID NO: 4070112 - DNA, 25 bp, Homo sapien
ggtttagaagtatcagaggcaggac

SEQ ID NO: 4070113 - DNA, 25 bp, Homo sapien
ctgggaacctggttgttatatccat

SEQ ID NO: 4070114 - DNA, 25 bp, Homo sapien
ccagggatgaggatgaacgctctag

SEQ ID NO: 4070115 - DNA, 25 bp, Homo sapien
ggatgaggatgaacgctctagttgc

SEQ ID NO: 4070116 - DNA, 25 bp, Homo sapien
gcagagccagggatgaggatgaacg

SEQ ID NO: 4070117 - DNA, 25 bp, Homo sapien
agccagggatgaggatgaacgctct

SEQ ID NO: 4070118 - DNA, 25 bp, Homo sapien
gcacagttgatccatattcccaggt

SEQ ID NO: 4070119 - DNA, 25 bp, Homo sapien
taaagttaatagcacagttgatcca

SEQ ID NO: 4070120 - DNA, 25 bp, Homo sapien
tgggtaaagttaatagcacagttga

SEQ ID NO: 4070121 - DNA, 25 bp, Homo sapien
tattcccaggtactggtgatttcca

SEQ ID NO: 4070122 - DNA, 25 bp, Homo sapien
tctgcctctgagaactaagcttcca

SEQ ID NO: 4070123 - DNA, 25 bp, Homo sapien
ccggtagtagggagtgcattcagct

SEQ ID NO: 4070124 - DNA, 25 bp, Homo sapien
gaccaccggtagtagggagtgcatt

SEQ ID NO: 4070125 - DNA, 25 bp, Homo sapien
gagaactaagcttccaggaggacca

SEQ ID NO: 4070126 - DNA, 25 bp, Homo sapien
tgaatgcgaagaaccagagtcccct

SEQ ID NO: 4070127 - DNA, 25 bp, Homo sapien
gaagaaccagagtcccctgctctaa

SEQ ID NO: 4070128 - DNA, 25 bp, Homo sapien
tctgtccttgaatgcgaagaaccag

SEQ ID NO: 4070129 - DNA, 25 bp, Homo sapien
tcccctgctctaaatggctcctttt

SEQ ID NO: 4070130 - DNA, 25 bp, Homo sapien
ttagaatctccagtgatcctgcagg

SEQ ID NO: 4070131 - DNA, 25 bp, Homo sapien
gcaggaccctcatcccgtggtttta

SEQ ID NO: 4070132 - DNA, 25 bp, Homo sapien
aaggatagagtcttagaatctccag

SEQ ID NO: 4070133 - DNA, 25 bp, Homo sapien
tccagaggtctagcattgagcggtg

SEQ ID NO: 4070134 - DNA, 25 bp, Homo sapien
cagacttaacgccattatctcgcat

SEQ ID NO: 4070135 - DNA, 25 bp, Homo sapien
ctacagacttaacgccattatctcg

SEQ ID NO: 4070136 - DNA, 25 bp, Homo sapien
tgttctacagacttaacgccattat

SEQ ID NO: 4070137 - DNA, 25 bp, Homo sapien
aatgttctacagacttaacgccatt

SEQ ID NO: 4070138 - DNA, 25 bp, Homo sapien
ccttgatgaagatagtaaccctccc

SEQ ID NO: 4070139 - DNA, 25 bp, Homo sapien
ttgatgaagatagtaaccctccctt

SEQ ID NO: 4070140 - DNA, 25 bp, Homo sapien
gaccttgatgaagatagtaaccctc

SEQ ID NO: 4070141 - DNA, 25 bp, Homo sapien
tgaagatagtaaccctccctttatc

SEQ ID NO: 4070142 - DNA, 25 bp, Homo sapien
tcatgagtccatggaaacagcctct

SEQ ID NO: 4070143 - DNA, 25 bp, Homo sapien
ctgttacttgcccatcaggatccat

SEQ ID NO: 4070144 - DNA, 25 bp, Homo sapien
ctttctttgcctggcaaactgttac

SEQ ID NO: 4070145 - DNA, 25 bp, Homo sapien
aaactgttacttgcccatcaggatc

SEQ ID NO: 4070146 - DNA, 25 bp, Homo sapien
cctctttctttgcctggcaaactgt

SEQ ID NO: 4070147 - DNA, 25 bp, Homo sapien
gtgcttattgagtaattctccccta

SEQ ID NO: 4070148 - DNA, 25 bp, Homo sapien
tattgagtaattctcccctatcctg

SEQ ID NO: 4070149 - DNA, 25 bp, Homo sapien
ctctgtcttagaagtgcttattgag

SEQ ID NO: 4070150 - DNA, 25 bp, Homo sapien
tatcctgacgcactgcgcctctgtt

SEQ ID NO: 4070151 - DNA, 25 bp, Homo sapien
catatgaagggtctggaagtggaag

SEQ ID NO: 4070152 - DNA, 25 bp, Homo sapien
tttcctttgccataagagccactgc

SEQ ID NO: 4070153 - DNA, 25 bp, Homo sapien
ccctggattgatgtagtagccagca

SEQ ID NO: 4070154 - DNA, 25 bp, Homo sapien
ttgcccatccctggattgatgtagt

SEQ ID NO: 4070155 - DNA, 25 bp, Homo sapien
caggtagtggtagaaagattttgga

SEQ ID NO: 4070156 - DNA, 25 bp, Homo sapien
tgtagcaggtagtggtagaaagatt

SEQ ID NO: 4070157 - DNA, 25 bp, Homo sapien
agattttggaagtcgagggagatga

SEQ ID NO: 4070158 - DNA, 25 bp, Homo sapien
tatctgtgtagcaggtagtggtaga

SEQ ID NO: 4070159 - DNA, 25 bp, Homo sapien
tccatcaatatagccttgtatccat

SEQ ID NO: 4070160 - DNA, 25 bp, Homo sapien
cctctcatccatcaatatagccttg

SEQ ID NO: 4070161 - DNA, 25 bp, Homo sapien
tgtatccatccacgtaaccactcat

SEQ ID NO: 4070162 - DNA, 25 bp, Homo sapien
ttgtatccatccacgtaaccactca

SEQ ID NO: 4070163 - DNA, 25 bp, Homo sapien
caggaatcctgacaggagcaggctg

SEQ ID NO: 4070164 - DNA, 25 bp, Homo sapien
aatcctgacaggagcaggctgcctt

SEQ ID NO: 4070165 - DNA, 25 bp, Homo sapien
tcctgacaggagcaggctgcctttc

SEQ ID NO: 4070166 - DNA, 25 bp, Homo sapien
ggaatcctgacaggagcaggctgcc

SEQ ID NO: 4070167 - DNA, 25 bp, Homo sapien
cctgatgtggtccacgtgactctta

SEQ ID NO: 4070168 - DNA, 25 bp, Homo sapien
gtggtccacgtgactcttaacaggt

SEQ ID NO: 4070169 - DNA, 25 bp, Homo sapien
gatgtggtccacgtgactcttaaca

SEQ ID NO: 4070170 - DNA, 25 bp, Homo sapien
tgtggtccacgtgactcttaacagg

SEQ ID NO: 4070171 - DNA, 25 bp, Homo sapien
tataggcctaacagccagcatttgt

SEQ ID NO: 4070172 - DNA, 25 bp, Homo sapien
cacatgacaaagagccggacagatc

SEQ ID NO: 4070173 - DNA, 25 bp, Homo sapien
tggagcccaggtgatgttatttgca

SEQ ID NO: 4070174 - DNA, 25 bp, Homo sapien
caaggtgcttagagtgccacatgac

SEQ ID NO: 4070175 - DNA, 25 bp, Homo sapien
gcatctcctcactggacaggcattg

SEQ ID NO: 4070176 - DNA, 25 bp, Homo sapien
tctcctcactggacaggcattgtgg

SEQ ID NO: 4070177 - DNA, 25 bp, Homo sapien
catctcctcactggacaggcattgt

SEQ ID NO: 4070178 - DNA, 25 bp, Homo sapien
ctcctcactggacaggcattgtggg

SEQ ID NO: 4070179 - DNA, 25 bp, Homo sapien
ggtcatgccattcaactgccacaca

SEQ ID NO: 4070180 - DNA, 25 bp, Homo sapien
ggccagctctacatgatttggagca

SEQ ID NO: 4070181 - DNA, 25 bp, Homo sapien
atgggtcctggccagctctacatga

SEQ ID NO: 4070182 - DNA, 25 bp, Homo sapien
ttggtcatgccattcaactgccaca

SEQ ID NO: 4070183 - DNA, 25 bp, Homo sapien
ccatgtctttgtaagatgtgtagtc

SEQ ID NO: 4070184 - DNA, 25 bp, Homo sapien
tgtctttgtaagatgtgtagtccat

SEQ ID NO: 4070185 - DNA, 25 bp, Homo sapien
taccatgtctttgtaagatgtgtag

SEQ ID NO: 4070186 - DNA, 25 bp, Homo sapien
catgtctttgtaagatgtgtagtcc

SEQ ID NO: 4070187 - DNA, 25 bp, Homo sapien
gatgtgggcaattggcttactccag

SEQ ID NO: 4070188 - DNA, 25 bp, Homo sapien
cactttggcctggaatgagagatgc

SEQ ID NO: 4070189 - DNA, 25 bp, Homo sapien
gagatgccgaaaatgacaagggtgc

SEQ ID NO: 4070190 - DNA, 25 bp, Homo sapien
tccagtctgtggcattagttagcat

SEQ ID NO: 4070191 - DNA, 25 bp, Homo sapien
gttgtccacccattatactgtgagg

SEQ ID NO: 4070192 - DNA, 25 bp, Homo sapien
cacagggctctgttatttggatcct

SEQ ID NO: 4070193 - DNA, 25 bp, Homo sapien
gaacagtgcccctaatcgtagacta

SEQ ID NO: 4070194 - DNA, 25 bp, Homo sapien
tctgtatcaaaatgctggtggatgc

SEQ ID NO: 4070195 - DNA, 25 bp, Homo sapien
agaggtgctcaaaaggcccactgta

SEQ ID NO: 4070196 - DNA, 25 bp, Homo sapien
gaggtgctcaaaaggcccactgtac

SEQ ID NO: 4070197 - DNA, 25 bp, Homo sapien
tagaggtgctcaaaaggcccactgt

SEQ ID NO: 4070198 - DNA, 25 bp, Homo sapien
ttggcttcatagctgtagaaatcgg

SEQ ID NO: 4070199 - DNA, 25 bp, Homo sapien
cttcatagctgtagaaatcgggcat

SEQ ID NO: 4070200 - DNA, 25 bp, Homo sapien
ggcttcatagctgtagaaatcgggc

SEQ ID NO: 4070201 - DNA, 25 bp, Homo sapien
ctttggcttcatagctgtagaaatc

SEQ ID NO: 4070202 - DNA, 25 bp, Homo sapien
ctaaagtgaaaagcgtgaaataaag

SEQ ID NO: 4070203 - DNA, 25 bp, Homo sapien
gcctgctgatgccgacttcctgcat

SEQ ID NO: 4070204 - DNA, 25 bp, Homo sapien
tgatgagcctgctgatgccgacttc

SEQ ID NO: 4070205 - DNA, 25 bp, Homo sapien
cctgctgatgccgacttcctgcatt

SEQ ID NO: 4070206 - DNA, 25 bp, Homo sapien
atgagcctgctgatgccgacttcct

SEQ ID NO: 4070207 - DNA, 25 bp, Homo sapien
aaagctcttcccctgagttctccat

SEQ ID NO: 4070208 - DNA, 25 bp, Homo sapien
ttgaaagctcttcccctgagttctc

SEQ ID NO: 4070209 - DNA, 25 bp, Homo sapien
ttttgaaagctcttcccctgagttc

SEQ ID NO: 4070210 - DNA, 25 bp, Homo sapien
tctgttttgaaagctcttcccctga

SEQ ID NO: 4070211 - DNA, 25 bp, Homo sapien
tttctgaagttttaatatgtcgttg

SEQ ID NO: 4070212 - DNA, 25 bp, Homo sapien
tttgctcttcacttttctgatactt

SEQ ID NO: 4070213 - DNA, 25 bp, Homo sapien
tctgaagttttaatatgtcgttgtt

SEQ ID NO: 4070214 - DNA, 25 bp, Homo sapien
caccctttttgctcttcacttttct

SEQ ID NO: 4070215 - DNA, 25 bp, Homo sapien
tagtagtgagaagtgcggaaggggt

SEQ ID NO: 4070216 - DNA, 25 bp, Homo sapien
gtagtagtgagaagtgcggaagggg

SEQ ID NO: 4070217 - DNA, 25 bp, Homo sapien
tgtagtagtgagaagtgcggaaggg

SEQ ID NO: 4070218 - DNA, 25 bp, Homo sapien
cactcacttggttctggagctggta

SEQ ID NO: 4070219 - DNA, 25 bp, Homo sapien
agtgtcttcactcacttggttctgg

SEQ ID NO: 4070220 - DNA, 25 bp, Homo sapien
tcactcttcaacctgttgagtgtct

SEQ ID NO: 4070221 - DNA, 25 bp, Homo sapien
cttggttctggagctggtataaatc

SEQ ID NO: 4070222 - DNA, 25 bp, Homo sapien
ttgagttggcgtcttcacatcccgg

SEQ ID NO: 4070223 - DNA, 25 bp, Homo sapien
agttggcgtcttcacatcccggcca

SEQ ID NO: 4070224 - DNA, 25 bp, Homo sapien
tgttgagttggcgtcttcacatccc

SEQ ID NO: 4070225 - DNA, 25 bp, Homo sapien
taagatgttgagttggcgtcttcac

SEQ ID NO: 4070226 - DNA, 25 bp, Homo sapien
gtgtttcaacttatggtcagctccc

SEQ ID NO: 4070227 - DNA, 25 bp, Homo sapien
aagccttgccttgagctttgcaggc

SEQ ID NO: 4070228 - DNA, 25 bp, Homo sapien
tctggtgggataagcaagccttgcc

SEQ ID NO: 4070229 - DNA, 25 bp, Homo sapien
tcttgagtttccctgtttgctgatg

SEQ ID NO: 4070230 - DNA, 25 bp, Homo sapien
tctccagtcatcaacttataacgta

SEQ ID NO: 4070231 - DNA, 25 bp, Homo sapien
catcaacttataacgtaaagacaaa

SEQ ID NO: 4070232 - DNA, 25 bp, Homo sapien
ttcttctccagtcatcaacttataa

SEQ ID NO: 4070233 - DNA, 25 bp, Homo sapien
ccagtcatcaacttataacgtaaag

SEQ ID NO: 4070234 - DNA, 25 bp, Homo sapien
caatataaagtggttctttatgttc

SEQ ID NO: 4070235 - DNA, 25 bp, Homo sapien
aatataaagtggttctttatgttct

SEQ ID NO: 4070236 - DNA, 25 bp, Homo sapien
tataaagtggttctttatgttctta

SEQ ID NO: 4070237 - DNA, 25 bp, Homo sapien
ataaagtggttctttatgttcttag

SEQ ID NO: 4070238 - DNA, 25 bp, Homo sapien
gacgccagagtgctttacaaactta

SEQ ID NO: 4070239 - DNA, 25 bp, Homo sapien
tatacagggatcgttttagcctctg

SEQ ID NO: 4070240 - DNA, 25 bp, Homo sapien
acttgactccaagggccaaagcagc

SEQ ID NO: 4070241 - DNA, 25 bp, Homo sapien
aaagtgatatacagggatcgtttta

SEQ ID NO: 4070242 - DNA, 25 bp, Homo sapien
tttttacatctttgtcatatggcat

SEQ ID NO: 4070243 - DNA, 25 bp, Homo sapien
gaaaagctggtaatcagccatggca

SEQ ID NO: 4070244 - DNA, 25 bp, Homo sapien
gacgttgttactgcagataattgcc

SEQ ID NO: 4070245 - DNA, 25 bp, Homo sapien
gaaatgccagacttcatgctgcaag

SEQ ID NO: 4070246 - DNA, 25 bp, Homo sapien
aattgccagttgagtgtggaggccc

SEQ ID NO: 4070247 - DNA, 25 bp, Homo sapien
cagactctaatgttcgacttgtggc

SEQ ID NO: 4070248 - DNA, 25 bp, Homo sapien
ctgcagactctaatgttcgacttgt

SEQ ID NO: 4070249 - DNA, 25 bp, Homo sapien
gactctaatgttcgacttgtggctt

SEQ ID NO: 4070250 - DNA, 25 bp, Homo sapien
ctaatgttcgacttgtggctttgtc

SEQ ID NO: 4070251 - DNA, 25 bp, Homo sapien
tcattttatgatgggtcctgtgatg

SEQ ID NO: 4070252 - DNA, 25 bp, Homo sapien
tgatgggtcctgtgatgtggccaat

SEQ ID NO: 4070253 - DNA, 25 bp, Homo sapien
caatgtgaaccatgctgtatgtgca

SEQ ID NO: 4070254 - DNA, 25 bp, Homo sapien
gtgatgtggccaatgtgaaccatgc

SEQ ID NO: 4070255 - DNA, 25 bp, Homo sapien
cgactttctgcaccatcggtagttt

SEQ ID NO: 4070256 - DNA, 25 bp, Homo sapien
acgactttctgcaccatcggtagtt

SEQ ID NO: 4070257 - DNA, 25 bp, Homo sapien
gtcatttcctagggacactctcagt

SEQ ID NO: 4070258 - DNA, 25 bp, Homo sapien
catttcctagggacactctcagttc

SEQ ID NO: 4070259 - DNA, 25 bp, Homo sapien
ttcctagggacactctcagttcctt

SEQ ID NO: 4070260 - DNA, 25 bp, Homo sapien
tttcctagggacactctcagttcct

SEQ ID NO: 4070261 - DNA, 25 bp, Homo sapien
caaggaaggcaacaccaggatgcac

SEQ ID NO: 4070262 - DNA, 25 bp, Homo sapien
tctggtgacgcacaaggatgtgagc

SEQ ID NO: 4070263 - DNA, 25 bp, Homo sapien
tgtgagcacacaagaacagtacctg

SEQ ID NO: 4070264 - DNA, 25 bp, Homo sapien
caggcttccagatgggccgagatct

SEQ ID NO: 4070265 - DNA, 25 bp, Homo sapien
aattgtgcaaccgtcgccacaatga

SEQ ID NO: 4070266 - DNA, 25 bp, Homo sapien
cgtcgccacaatgaactttagaata

SEQ ID NO: 4070267 - DNA, 25 bp, Homo sapien
aagtgtagcactccatggttttcag

SEQ ID NO: 4070268 - DNA, 25 bp, Homo sapien
cactcttttaaagtgtagcactcca

SEQ ID NO: 4070269 - DNA, 25 bp, Homo sapien
tttgcactcttttcgacctccatct

SEQ ID NO: 4070270 - DNA, 25 bp, Homo sapien
gctggcaaatgatgttttgcctcct

SEQ ID NO: 4070271 - DNA, 25 bp, Homo sapien
ggcttaaagcaacccatggatgtct

SEQ ID NO: 4070272 - DNA, 25 bp, Homo sapien
tcactcaaacctgcatggtgatttt

SEQ ID NO: 4070273 - DNA, 25 bp, Homo sapien
cttttctttaggcttctttccactg

SEQ ID NO: 4070274 - DNA, 25 bp, Homo sapien
ggatttgtacagtatgaccctcaga

SEQ ID NO: 4070275 - DNA, 25 bp, Homo sapien
catactcatgatcctacgggagcaa

SEQ ID NO: 4070276 - DNA, 25 bp, Homo sapien
gagacctcccgagtcgctttgtgtg

SEQ ID NO: 4070277 - DNA, 25 bp, Homo sapien
tgtgggagtcccacacaccgctgtt

SEQ ID NO: 4070278 - DNA, 25 bp, Homo sapien
gcagcgggtcaaggatggcttcact

SEQ ID NO: 4070279 - DNA, 25 bp, Homo sapien
cactgaagggatgatatttgaacaa

SEQ ID NO: 4070280 - DNA, 25 bp, Homo sapien
ggcagccatcaacaaggtgcacaaa

SEQ ID NO: 4070281 - DNA, 25 bp, Homo sapien
cattgatgtaaatgatcctgtgtca

SEQ ID NO: 4070282 - DNA, 25 bp, Homo sapien
gacaaaagacaatggcttgttctga

SEQ ID NO: 4070283 - DNA, 25 bp, Homo sapien
gacatcttctccagttgacaaaaga

SEQ ID NO: 4070284 - DNA, 25 bp, Homo sapien
ccaggtggtactcggagttggcatt

SEQ ID NO: 4070285 - DNA, 25 bp, Homo sapien
gctgcatttggtgagttgcgggaag

SEQ ID NO: 4070286 - DNA, 25 bp, Homo sapien
gcccatagatgactcactgaaattt

SEQ ID NO: 4070287 - DNA, 25 bp, Homo sapien
cacttccttgggtcatgtttaagta

SEQ ID NO: 4070288 - DNA, 25 bp, Homo sapien
tgtttaagtaagatttgcagcagcc

SEQ ID NO: 4070289 - DNA, 25 bp, Homo sapien
aatgcatagttgaagtacagggaaa

SEQ ID NO: 4070290 - DNA, 25 bp, Homo sapien
agtaggttgctgtgtcccgcaaggt

SEQ ID NO: 4070291 - DNA, 25 bp, Homo sapien
taggttgctgtgtcccgcaaggtag

SEQ ID NO: 4070292 - DNA, 25 bp, Homo sapien
tcagtaggttgctgtgtcccgcaag

SEQ ID NO: 4070293 - DNA, 25 bp, Homo sapien
tgtgtcccgcaaggtaggaggtgtt

SEQ ID NO: 4070294 - DNA, 25 bp, Homo sapien
ccaatctgttgcgtctagaagtcag

SEQ ID NO: 4070295 - DNA, 25 bp, Homo sapien
tgccaatcattctagaattcagcat

SEQ ID NO: 4070296 - DNA, 25 bp, Homo sapien
ggatagcctcttgttctgcagaaaa

SEQ ID NO: 4070297 - DNA, 25 bp, Homo sapien
caaggatcctagaaaaaacatgcaa

SEQ ID NO: 4070298 - DNA, 25 bp, Homo sapien
gctctcaaattttcgtgggcatcag

SEQ ID NO: 4070299 - DNA, 25 bp, Homo sapien
tgtttccactgaaaggagcattgag

SEQ ID NO: 4070300 - DNA, 25 bp, Homo sapien
tatttcgtagaagtgaaacggcact

SEQ ID NO: 4070301 - DNA, 25 bp, Homo sapien
taaacttcagaatgagaccagcact

SEQ ID NO: 4070302 - DNA, 25 bp, Homo sapien
aaaaccttcgggcagatgaaataat

SEQ ID NO: 4070303 - DNA, 25 bp, Homo sapien
gaagtaaaaccttcgggcagatgaa

SEQ ID NO: 4070304 - DNA, 25 bp, Homo sapien
aaccttcgggcagatgaaataattc

SEQ ID NO: 4070305 - DNA, 25 bp, Homo sapien
aggaagtaaaaccttcgggcagatg

SEQ ID NO: 4070306 - DNA, 25 bp, Homo sapien
gcaattccatcttcttaagtcgttc

SEQ ID NO: 4070307 - DNA, 25 bp, Homo sapien
aagtcgttcttgcaattgagaatgc

SEQ ID NO: 4070308 - DNA, 25 bp, Homo sapien
ccatcttcttaagtcgttcttgcaa

SEQ ID NO: 4070309 - DNA, 25 bp, Homo sapien
ttgcttcgcaattccatcttcttaa

SEQ ID NO: 4070310 - DNA, 25 bp, Homo sapien
gtaaccactggtttccctctgatag

SEQ ID NO: 4070311 - DNA, 25 bp, Homo sapien
cacagcccatatcccaatgagggtt

SEQ ID NO: 4070312 - DNA, 25 bp, Homo sapien
gcagcctcgataacaccattcttgg

SEQ ID NO: 4070313 - DNA, 25 bp, Homo sapien
tagccaagcgcttgactgctcagtg

SEQ ID NO: 4070314 - DNA, 25 bp, Homo sapien
tcttagcattttgtggctgaagctc

SEQ ID NO: 4070315 - DNA, 25 bp, Homo sapien
ttctttccagagcacttagttcaca

SEQ ID NO: 4070316 - DNA, 25 bp, Homo sapien
cagttggttgtagcaaacagctctt

SEQ ID NO: 4070317 - DNA, 25 bp, Homo sapien
ttgtggctgaagctcaaaccagatg

SEQ ID NO: 4070318 - DNA, 25 bp, Homo sapien
cttgtcaaagccttgtgcattccct

SEQ ID NO: 4070319 - DNA, 25 bp, Homo sapien
ttgtcaaagccttgtgcattccctt

SEQ ID NO: 4070320 - DNA, 25 bp, Homo sapien
aagccttgtgcattccctttaggaa

SEQ ID NO: 4070321 - DNA, 25 bp, Homo sapien
gccttgtgcattccctttaggaagg

SEQ ID NO: 4070322 - DNA, 25 bp, Homo sapien
gccccagaagttacacaccatcagt

SEQ ID NO: 4070323 - DNA, 25 bp, Homo sapien
tttaaagggagcaggtcaaccatat

SEQ ID NO: 4070324 - DNA, 25 bp, Homo sapien
gtgttctgttcgtcaaagcagccca

SEQ ID NO: 4070325 - DNA, 25 bp, Homo sapien
ccagcctggtggttggcttttaaag

SEQ ID NO: 4070326 - DNA, 25 bp, Homo sapien
tgttgagcaagccaataaggtaagg

SEQ ID NO: 4070327 - DNA, 25 bp, Homo sapien
tcagggtttggcgaatgttgagcaa

SEQ ID NO: 4070328 - DNA, 25 bp, Homo sapien
tctttaaacactatggcctgaccct

SEQ ID NO: 4070329 - DNA, 25 bp, Homo sapien
tgcggtacaattctcacactcgttg

SEQ ID NO: 4070330 - DNA, 25 bp, Homo sapien
attcttccaagtgtttagcctccag

SEQ ID NO: 4070331 - DNA, 25 bp, Homo sapien
accagtaccggtccatggccgagga

SEQ ID NO: 4070332 - DNA, 25 bp, Homo sapien
tgctataagccaccaagactatggg

SEQ ID NO: 4070333 - DNA, 25 bp, Homo sapien
gatccctcgcatgtgaggatcacaa

SEQ ID NO: 4070334 - DNA, 25 bp, Homo sapien
gagtcgcacatttcagtagctagaa

SEQ ID NO: 4070335 - DNA, 25 bp, Homo sapien
taggatcccgacagcaatcttgtgg

SEQ ID NO: 4070336 - DNA, 25 bp, Homo sapien
gttgctcaaattggtgatgacagcc

SEQ ID NO: 4070337 - DNA, 25 bp, Homo sapien
ggtcccaattcgctgagactaggaa

SEQ ID NO: 4070338 - DNA, 25 bp, Homo sapien
tccatcacttggctcaccagtggga

SEQ ID NO: 4070339 - DNA, 25 bp, Homo sapien
ttcagcaatgaaccccagggcttgg

SEQ ID NO: 4070340 - DNA, 25 bp, Homo sapien
ccctccatcacttggctcaccagtg

SEQ ID NO: 4070341 - DNA, 25 bp, Homo sapien
ccatcacttggctcaccagtgggac

SEQ ID NO: 4070342 - DNA, 25 bp, Homo sapien
gaggtgagtctacattgcaaaggcc

SEQ ID NO: 4070343 - DNA, 25 bp, Homo sapien
gctaacatgctagtgggaagacaga

SEQ ID NO: 4070344 - DNA, 25 bp, Homo sapien
gagggaatcttcacgcagatggctg

SEQ ID NO: 4070345 - DNA, 25 bp, Homo sapien
tctggttgaacagcatctttggcag

SEQ ID NO: 4070346 - DNA, 25 bp, Homo sapien
tatctgtcttactctttatatctcc

SEQ ID NO: 4070347 - DNA, 25 bp, Homo sapien
aactccaccacagctgacgagctgt

SEQ ID NO: 4070348 - DNA, 25 bp, Homo sapien
tcatcaactccaccacagctgacga

SEQ ID NO: 4070349 - DNA, 25 bp, Homo sapien
tatctcctgtcttatcctcatcaac

SEQ ID NO: 4070350 - DNA, 25 bp, Homo sapien
ggatgttccgcagcctgaatgcagg

SEQ ID NO: 4070351 - DNA, 25 bp, Homo sapien
tgcaggttcccagattcgtaggagt

SEQ ID NO: 4070352 - DNA, 25 bp, Homo sapien
ggatgttccgcagcctgaatgcaga

SEQ ID NO: 4070353 - DNA, 25 bp, Homo sapien
gttagtgggtagatgatcaaacacc

SEQ ID NO: 4070354 - DNA, 25 bp, Homo sapien
gaagtaattccgaagaggactcctg

SEQ ID NO: 4070355 - DNA, 25 bp, Homo sapien
gatcttggaaaaatcgagaaggcag

SEQ ID NO: 4070356 - DNA, 25 bp, Homo sapien
gaaggcagaagaagtaattccgaag

SEQ ID NO: 4070357 - DNA, 25 bp, Homo sapien
ctgtaaacaggcagacaagcgctgt

SEQ ID NO: 4070358 - DNA, 25 bp, Homo sapien
tgggaaactcatacacaggcgtgtc

SEQ ID NO: 4070359 - DNA, 25 bp, Homo sapien
agttgatgtcggctgggaaactcat

SEQ ID NO: 4070360 - DNA, 25 bp, Homo sapien
tcctctttgccgttcctctgcctga

SEQ ID NO: 4070361 - DNA, 25 bp, Homo sapien
tacacaggcgtgtcccagtcctgtg

SEQ ID NO: 4070362 - DNA, 25 bp, Homo sapien
ttgcaaaagcgttcatggaaatggc

SEQ ID NO: 4070363 - DNA, 25 bp, Homo sapien
gggatcccagattctgtgagcagaa

SEQ ID NO: 4070364 - DNA, 25 bp, Homo sapien
acccaggtgtctatttcaagaacag

SEQ ID NO: 4070365 - DNA, 25 bp, Homo sapien
acttcatccacccaggtgtctattt

SEQ ID NO: 4070366 - DNA, 25 bp, Homo sapien
caccaaggaccgtgtcaacacagtt

SEQ ID NO: 4070367 - DNA, 25 bp, Homo sapien
catgtcatgaggactgttgccgtta

SEQ ID NO: 4070368 - DNA, 25 bp, Homo sapien
cgttattagcgatgacaatgcagtc

SEQ ID NO: 4070369 - DNA, 25 bp, Homo sapien
cactggcttaattgttcagcagaca

SEQ ID NO: 4070370 - DNA, 25 bp, Homo sapien
gacatgaaaccaggctttgacagca

SEQ ID NO: 4070371 - DNA, 25 bp, Homo sapien
gaaaccaggctttgacagcattcat

SEQ ID NO: 4070372 - DNA, 25 bp, Homo sapien
acttctgcgtcttgacgacatgaaa

SEQ ID NO: 4070373 - DNA, 25 bp, Homo sapien
tcttgacgacatgaaaccaggcttt

SEQ ID NO: 4070374 - DNA, 25 bp, Homo sapien
cactgttcagaaagtcgtggaggta

SEQ ID NO: 4070375 - DNA, 25 bp, Homo sapien
catctacgggcgcactgttcagaaa

SEQ ID NO: 4070376 - DNA, 25 bp, Homo sapien
cagaaagtcgtggaggtagatatac

SEQ ID NO: 4070377 - DNA, 25 bp, Homo sapien
agagcagcccatctacgggcgcact

SEQ ID NO: 4070378 - DNA, 25 bp, Homo sapien
agatccacggtacactcagtccctg

SEQ ID NO: 4070379 - DNA, 25 bp, Homo sapien
aacagatccacggtacactcagtcc

SEQ ID NO: 4070380 - DNA, 25 bp, Homo sapien
gttaaacagatccacggtacactca

SEQ ID NO: 4070381 - DNA, 25 bp, Homo sapien
ttaaacagatccacggtacactcag

SEQ ID NO: 4070382 - DNA, 25 bp, Homo sapien
cgagtcactgagcagtgtgcctggc

SEQ ID NO: 4070383 - DNA, 25 bp, Homo sapien
ggtcgcacccttgctcgagtcactg

SEQ ID NO: 4070384 - DNA, 25 bp, Homo sapien
gcacccttgctcgagtcactgagca

SEQ ID NO: 4070385 - DNA, 25 bp, Homo sapien
tgctcgagtcactgagcagtgtgcc

SEQ ID NO: 4070386 - DNA, 25 bp, Homo sapien
ccttcaacttcacgtttccattttg

SEQ ID NO: 4070387 - DNA, 25 bp, Homo sapien
agacaccttcaacttcacgtttcca

SEQ ID NO: 4070388 - DNA, 25 bp, Homo sapien
caacttcacgtttccattttgattc

SEQ ID NO: 4070389 - DNA, 25 bp, Homo sapien
gacaccttcaacttcacgtttccat

SEQ ID NO: 4070390 - DNA, 25 bp, Homo sapien
gtgataaccaccactaataatccta

SEQ ID NO: 4070391 - DNA, 25 bp, Homo sapien
cagtgataaccaccactaataatcc

SEQ ID NO: 4070392 - DNA, 25 bp, Homo sapien
taaccaccactaataatcctacaaa

SEQ ID NO: 4070393 - DNA, 25 bp, Homo sapien
ccacagtgataaccaccactaataa

SEQ ID NO: 4070394 - DNA, 25 bp, Homo sapien
cagctgctttcagtgacatgacttc

SEQ ID NO: 4070395 - DNA, 25 bp, Homo sapien
gctgctttcagtgacatgacttctg

SEQ ID NO: 4070396 - DNA, 25 bp, Homo sapien
tccagctgctttcagtgacatgact

SEQ ID NO: 4070397 - DNA, 25 bp, Homo sapien
tgctttcagtgacatgacttctgat

SEQ ID NO: 4070398 - DNA, 25 bp, Homo sapien
gcattggttcagagtccatctcttc

SEQ ID NO: 4070399 - DNA, 25 bp, Homo sapien
tctgcattggttcagagtccatctc

SEQ ID NO: 4070400 - DNA, 25 bp, Homo sapien
cctctttgttccctacataggttct

SEQ ID NO: 4070401 - DNA, 25 bp, Homo sapien
tccctacataggttctctgcattgg

SEQ ID NO: 4070402 - DNA, 25 bp, Homo sapien
gccatcagcattatagtagagccat

SEQ ID NO: 4070403 - DNA, 25 bp, Homo sapien
gcattatagtagagccattggcact

SEQ ID NO: 4070404 - DNA, 25 bp, Homo sapien
tgttttgttgtctttgccatcagca

SEQ ID NO: 4070405 - DNA, 25 bp, Homo sapien
tagtagagccattggcactcaccca

SEQ ID NO: 4070406 - DNA, 25 bp, Homo sapien
gtggtcacaaatgagaagagtggac

SEQ ID NO: 4070407 - DNA, 25 bp, Homo sapien
tggttgtggaagatgtagtggtcac

SEQ ID NO: 4070408 - DNA, 25 bp, Homo sapien
aaggtggttggttgtggaagatgta

SEQ ID NO: 4070409 - DNA, 25 bp, Homo sapien
cacaaatgagaagagtggacagtgg

SEQ ID NO: 4070410 - DNA, 25 bp, Homo sapien
ttccatatttaatatattcaggcat

SEQ ID NO: 4070411 - DNA, 25 bp, Homo sapien
ctgccccatttccatatttaatata

SEQ ID NO: 4070412 - DNA, 25 bp, Homo sapien
ccatttccatatttaatatattcag

SEQ ID NO: 4070413 - DNA, 25 bp, Homo sapien
tttccatatttaatatattcaggca

SEQ ID NO: 4070414 - DNA, 25 bp, Homo sapien
tggttaataccagaagtcccgtcaa

SEQ ID NO: 4070415 - DNA, 25 bp, Homo sapien
taaccacatcttgggctgtagtact

SEQ ID NO: 4070416 - DNA, 25 bp, Homo sapien
gagctagaatcttatgcctgcctgg

SEQ ID NO: 4070417 - DNA, 25 bp, Homo sapien
cccgtcaagttggaagcttctctaa

SEQ ID NO: 4070418 - DNA, 25 bp, Homo sapien
catctggatctttcgctaaagactg

SEQ ID NO: 4070419 - DNA, 25 bp, Homo sapien
atctggatctttcgctaaagactga

SEQ ID NO: 4070420 - DNA, 25 bp, Homo sapien
tcatctggatctttcgctaaagact

SEQ ID NO: 4070421 - DNA, 25 bp, Homo sapien
caggttatcataacgagaacaggag

SEQ ID NO: 4070422 - DNA, 25 bp, Homo sapien
ttctgcaggttatcataacgagaac

SEQ ID NO: 4070423 - DNA, 25 bp, Homo sapien
ctgttggtccaattcatttctggaa

SEQ ID NO: 4070424 - DNA, 25 bp, Homo sapien
gttatcataacgagaacaggagtga

SEQ ID NO: 4070425 - DNA, 25 bp, Homo sapien
cctgtagtcggggtgagttttcaca

SEQ ID NO: 4070426 - DNA, 25 bp, Homo sapien
cttcagctgcttgtcgccttgcctt

SEQ ID NO: 4070427 - DNA, 25 bp, Homo sapien
tagtcggggtgagttttcacatcac

SEQ ID NO: 4070428 - DNA, 25 bp, Homo sapien
tgcttgtcgccttgccttcttttct

SEQ ID NO: 4070429 - DNA, 25 bp, Homo sapien
ctagttgggtagttgggagcattac

SEQ ID NO: 4070430 - DNA, 25 bp, Homo sapien
tcctagttgggtagttgggagcatt

SEQ ID NO: 4070431 - DNA, 25 bp, Homo sapien
ctgacttcctagttgggtagttggg

SEQ ID NO: 4070432 - DNA, 25 bp, Homo sapien
cttcctagttgggtagttgggagca

SEQ ID NO: 4070433 - DNA, 25 bp, Homo sapien
ctgagacgggtctgtggcaacactt

SEQ ID NO: 4070434 - DNA, 25 bp, Homo sapien
ggcctgggtggctattacggtcatc

SEQ ID NO: 4070435 - DNA, 25 bp, Homo sapien
aacactttgtgacggccaggcctgg

SEQ ID NO: 4070436 - DNA, 25 bp, Homo sapien
ggcaaggtggcttcattatgcttca

SEQ ID NO: 4070437 - DNA, 25 bp, Homo sapien
tgggtaagtaatcgccggcaccaag

SEQ ID NO: 4070438 - DNA, 25 bp, Homo sapien
aggttcagtgggtaagtaatcgccg

SEQ ID NO: 4070439 - DNA, 25 bp, Homo sapien
cggcaccaagtccaggaagatgagg

SEQ ID NO: 4070440 - DNA, 25 bp, Homo sapien
tgagggcatccccagcagagtaggt

SEQ ID NO: 4070441 - DNA, 25 bp, Homo sapien
tcattctgatacttcaaattcattt

SEQ ID NO: 4070442 - DNA, 25 bp, Homo sapien
cattctgatacttcaaattcatttt

SEQ ID NO: 4070443 - DNA, 25 bp, Homo sapien
ggtggtcccatagggcctctcactc

SEQ ID NO: 4070444 - DNA, 25 bp, Homo sapien
cttcaaagtgaacatagctctgagg

SEQ ID NO: 4070445 - DNA, 25 bp, Homo sapien
tggtggtcccatagggcctctcact

SEQ ID NO: 4070446 - DNA, 25 bp, Homo sapien
tgggtgtttcttcaaagtgaacata

SEQ ID NO: 4070447 - DNA, 25 bp, Homo sapien
gtttttctgactaggtagtcgatag

SEQ ID NO: 4070448 - DNA, 25 bp, Homo sapien
aattgctcatgggagtatgtttgca

SEQ ID NO: 4070449 - DNA, 25 bp, Homo sapien
tgtttgcaatgtgctttctctgtgt

SEQ ID NO: 4070450 - DNA, 25 bp, Homo sapien
aggtagtcgatagtgacaggccaga

SEQ ID NO: 4070451 - DNA, 25 bp, Homo sapien
tctcggaagccttgccaaagccttt

SEQ ID NO: 4070452 - DNA, 25 bp, Homo sapien
tgggcaatgcgctcaagggtctcag

SEQ ID NO: 4070453 - DNA, 25 bp, Homo sapien
tccagatgtccatctcggaagcctt

SEQ ID NO: 4070454 - DNA, 25 bp, Homo sapien
caatgcgctcaagggtctcaggccc

SEQ ID NO: 4070455 - DNA, 25 bp, Homo sapien
cagctggccttgacagtaaccagag

SEQ ID NO: 4070456 - DNA, 25 bp, Homo sapien
ggccttgacagtaaccagaggtgac

SEQ ID NO: 4070457 - DNA, 25 bp, Homo sapien
ttccagctggccttgacagtaacca

SEQ ID NO: 4070458 - DNA, 25 bp, Homo sapien
gctggccttgacagtaaccagaggt

SEQ ID NO: 4070459 - DNA, 25 bp, Homo sapien
cagctcctgtaggaacaaccagcag

SEQ ID NO: 4070460 - DNA, 25 bp, Homo sapien
gcccatcatgggagtctccaagaaa

SEQ ID NO: 4070461 - DNA, 25 bp, Homo sapien
gactatggatagatgccctcttgtc

SEQ ID NO: 4070462 - DNA, 25 bp, Homo sapien
tgggagtctccaagaaagttctggc

SEQ ID NO: 4070463 - DNA, 25 bp, Homo sapien
ggaagagccccgatcattctgcggt

SEQ ID NO: 4070464 - DNA, 25 bp, Homo sapien
tcaatgggctcatgagggcctactt

SEQ ID NO: 4070465 - DNA, 25 bp, Homo sapien
tgcacttcagttcggtcattgtcct

SEQ ID NO: 4070466 - DNA, 25 bp, Homo sapien
ttggcagcgcactcttcaatgggct

SEQ ID NO: 4070467 - DNA, 25 bp, Homo sapien
attggagatcattggtacctgtgcc

SEQ ID NO: 4070468 - DNA, 25 bp, Homo sapien
ttggagatcattggtacctgtgcca

SEQ ID NO: 4070469 - DNA, 25 bp, Homo sapien
gattggagatcattggtacctgtgc

SEQ ID NO: 4070470 - DNA, 25 bp, Homo sapien
tggagatcattggtacctgtgccat

SEQ ID NO: 4070471 - DNA, 25 bp, Homo sapien
ggcacattcgccacaagatacctgt

SEQ ID NO: 4070472 - DNA, 25 bp, Homo sapien
caggtctgacaacgtgaaagctggc

SEQ ID NO: 4070473 - DNA, 25 bp, Homo sapien
ggtcgtgttgagagaaccaggcaca

SEQ ID NO: 4070474 - DNA, 25 bp, Homo sapien
gaagcagccagtgtccaaggcaaaa

SEQ ID NO: 4070475 - DNA, 25 bp, Homo sapien
gcacatagttggcatagaaaaggag

SEQ ID NO: 4070476 - DNA, 25 bp, Homo sapien
tgccttttcctgattgagctgctga

SEQ ID NO: 4070477 - DNA, 25 bp, Homo sapien
tgatgcagacccaacttcctagggc

SEQ ID NO: 4070478 - DNA, 25 bp, Homo sapien
cctagggccactgaggattaaatag

SEQ ID NO: 4070479 - DNA, 25 bp, Homo sapien
ttctgcttatgaggcttttgactgg

SEQ ID NO: 4070480 - DNA, 25 bp, Homo sapien
gcttcttctgcttatgaggcttttg

SEQ ID NO: 4070481 - DNA, 25 bp, Homo sapien
gcttatgaggcttttgactggcttc

SEQ ID NO: 4070482 - DNA, 25 bp, Homo sapien
ttcttctgcttatgaggcttttgac

SEQ ID NO: 4070483 - DNA, 25 bp, Homo sapien
tttttctctgatgaggagctgtgtt

SEQ ID NO: 4070484 - DNA, 25 bp, Homo sapien
ttagtttttctctgatgaggagctg

SEQ ID NO: 4070485 - DNA, 25 bp, Homo sapien
gagctgtgttttatttccttgatct

SEQ ID NO: 4070486 - DNA, 25 bp, Homo sapien
agtttttctctgatgaggagctgtg

SEQ ID NO: 4070487 - DNA, 25 bp, Homo sapien
aaaaggcaccttctaagctccaaga

SEQ ID NO: 4070488 - DNA, 25 bp, Homo sapien
tttgagttgaagctatcaacccggc

SEQ ID NO: 4070489 - DNA, 25 bp, Homo sapien
tagcgggaaccaaatccatctggat

SEQ ID NO: 4070490 - DNA, 25 bp, Homo sapien
catggtgtgaagaatcccgttatag

SEQ ID NO: 4070491 - DNA, 25 bp, Homo sapien
tcagtgtcagataaggctttgatgt

SEQ ID NO: 4070492 - DNA, 25 bp, Homo sapien
ggcacatagatggttaatatatatc

SEQ ID NO: 4070493 - DNA, 25 bp, Homo sapien
tcaaccagtcaaggagatttcagtg

SEQ ID NO: 4070494 - DNA, 25 bp, Homo sapien
caaggagatttcagtgtcagataag

SEQ ID NO: 4070495 - DNA, 25 bp, Homo sapien
tatagagctttgcagcttacaacat

SEQ ID NO: 4070496 - DNA, 25 bp, Homo sapien
atatagagctttgcagcttacaaca

SEQ ID NO: 4070497 - DNA, 25 bp, Homo sapien
cttgtttaatgatggagctcatcat

SEQ ID NO: 4070498 - DNA, 25 bp, Homo sapien
tttttctctccgtgatgctgccaca

SEQ ID NO: 4070499 - DNA, 25 bp, Homo sapien
gagtttttctctccgtgatgctgcc

SEQ ID NO: 4070500 - DNA, 25 bp, Homo sapien
ttttctctccgtgatgctgccacat

SEQ ID NO: 4070501 - DNA, 25 bp, Homo sapien
gcattccttccgaaggcgtttattc

SEQ ID NO: 4070502 - DNA, 25 bp, Homo sapien
ctttggcattccttccgaaggcgtt

SEQ ID NO: 4070503 - DNA, 25 bp, Homo sapien
gtttctctgccagcaaaggtagcat

SEQ ID NO: 4070504 - DNA, 25 bp, Homo sapien
tttctctgccagcaaaggtagcatt

SEQ ID NO: 4070505 - DNA, 25 bp, Homo sapien
aaatgatttgcgaggcagagcgtgt

SEQ ID NO: 4070506 - DNA, 25 bp, Homo sapien
tgttgccggctggtgtctctctgga

SEQ ID NO: 4070507 - DNA, 25 bp, Homo sapien
ctccaaggaagtggaaatgatttgc

SEQ ID NO: 4070508 - DNA, 25 bp, Homo sapien
cattatgtcgatgagattagagcct

SEQ ID NO: 4070509 - DNA, 25 bp, Homo sapien
agaacgaagtccacaatgtcccttc

SEQ ID NO: 4070510 - DNA, 25 bp, Homo sapien
tattctggaagagtaccctttagca

SEQ ID NO: 4070511 - DNA, 25 bp, Homo sapien
cccatgtgttcgaatgccctcggca

SEQ ID NO: 4070512 - DNA, 25 bp, Homo sapien
tagcaaaggtaaagcaaagagacac

SEQ ID NO: 4070513 - DNA, 25 bp, Homo sapien
attcatcttccagcaaaccacgcgt

SEQ ID NO: 4070514 - DNA, 25 bp, Homo sapien
acagtcggctcccttgtcatagcca

SEQ ID NO: 4070515 - DNA, 25 bp, Homo sapien
cagaaccaagacagtcggctccctt

SEQ ID NO: 4070516 - DNA, 25 bp, Homo sapien
accctgatgggcaccattgcacatg

SEQ ID NO: 4070517 - DNA, 25 bp, Homo sapien
atgtcaggcccgccctgatgggcac

SEQ ID NO: 4070518 - DNA, 25 bp, Homo sapien
tagcccagcttgccaggtaactcca

SEQ ID NO: 4070519 - DNA, 25 bp, Homo sapien
gcccagcttgccaggtaactccacg

SEQ ID NO: 4070520 - DNA, 25 bp, Homo sapien
agcccagcttgccaggtaactccac

SEQ ID NO: 4070521 - DNA, 25 bp, Homo sapien
cgagggcctagttcatcctccacct

SEQ ID NO: 4070522 - DNA, 25 bp, Homo sapien
agtttggaagaatgcagccctacat

SEQ ID NO: 4070523 - DNA, 25 bp, Homo sapien
tttcctcgggaccagtttcaggtca

SEQ ID NO: 4070524 - DNA, 25 bp, Homo sapien
gcagtgtgatgctcaacgtggtcca

SEQ ID NO: 4070525 - DNA, 25 bp, Homo sapien
gactttcatcgtcccaacagtttgg

SEQ ID NO: 4070526 - DNA, 25 bp, Homo sapien
aagcagtaattgaaggaggagaatc

SEQ ID NO: 4070527 - DNA, 25 bp, Homo sapien
ctgacaggtgacgttcgtgaggtgc

SEQ ID NO: 4070528 - DNA, 25 bp, Homo sapien
cgttcgtgaggtgcatggcttttct

SEQ ID NO: 4070529 - DNA, 25 bp, Homo sapien
ctgaactctctcatcctcacccacc

SEQ ID NO: 4070530 - DNA, 25 bp, Homo sapien
agttgttcttgatatgcagactaat

SEQ ID NO: 4070531 - DNA, 25 bp, Homo sapien
tcttgccccagatgttcaatgcctg

SEQ ID NO: 4070532 - DNA, 25 bp, Homo sapien
tagaccagtgtatccgaagcttgag

SEQ ID NO: 4070533 - DNA, 25 bp, Homo sapien
tcattgctaggcgtactaccctggt

SEQ ID NO: 4070534 - DNA, 25 bp, Homo sapien
agcttgagtgtacagcagaatcccc

SEQ ID NO: 4070535 - DNA, 25 bp, Homo sapien
tctcttctcgttgtaaattttctca

SEQ ID NO: 4070536 - DNA, 25 bp, Homo sapien
cttgatggccacgaaagggatgact

SEQ ID NO: 4070537 - DNA, 25 bp, Homo sapien
gaaatgtctatgtggctgccctttc

SEQ ID NO: 4070538 - DNA, 25 bp, Homo sapien
gacttttaaagaaatcgatccagaa

SEQ ID NO: 4070539 - DNA, 25 bp, Homo sapien
ccagatcctgttctaatgcagagca

SEQ ID NO: 4070540 - DNA, 25 bp, Homo sapien
agatcctgttctaatgcagagcagg

SEQ ID NO: 4070541 - DNA, 25 bp, Homo sapien
atcctgttctaatgcagagcaggaa

SEQ ID NO: 4070542 - DNA, 25 bp, Homo sapien
agcaggaagatggtgactttttgaa

SEQ ID NO: 4070543 - DNA, 25 bp, Homo sapien
tagaataaccagatttgttgggttc

SEQ ID NO: 4070544 - DNA, 25 bp, Homo sapien
ttgtaagtaagtaataatatagaat

SEQ ID NO: 4070545 - DNA, 25 bp, Homo sapien
ttgcttggggatggtacttgtttcc

SEQ ID NO: 4070546 - DNA, 25 bp, Homo sapien
atatagaataaccagatttgttggg

SEQ ID NO: 4070547 - DNA, 25 bp, Homo sapien
gaaagacgtcatgacagtagaatgc

SEQ ID NO: 4070548 - DNA, 25 bp, Homo sapien
tgcagtacaacgtgaaagacgtcat

SEQ ID NO: 4070549 - DNA, 25 bp, Homo sapien
gggtcagttgcagtacaacgtgaaa

SEQ ID NO: 4070550 - DNA, 25 bp, Homo sapien
cagtagaatgcacggggaaccctgg

SEQ ID NO: 4070551 - DNA, 25 bp, Homo sapien
tatttactgatttccctttttcagc

SEQ ID NO: 4070552 - DNA, 25 bp, Homo sapien
tattttttcatagctatggtagcct

SEQ ID NO: 4070553 - DNA, 25 bp, Homo sapien
ggtagccttgtaacttatttactga

SEQ ID NO: 4070554 - DNA, 25 bp, Homo sapien
tcatagctatggtagccttgtaact

SEQ ID NO: 4070555 - DNA, 25 bp, Homo sapien
tcaggacgcaaagattgagctgcct

SEQ ID NO: 4070556 - DNA, 25 bp, Homo sapien
ggtaaagcagatatgtcgacagcac

SEQ ID NO: 4070557 - DNA, 25 bp, Homo sapien
gcaaagatgtgctgttcaaaccgaa

SEQ ID NO: 4070558 - DNA, 25 bp, Homo sapien
aaaccgaaccttgatggctgtgtgg

SEQ ID NO: 4070559 - DNA, 25 bp, Homo sapien
ctaaaaagctaaagaatgttttcat

SEQ ID NO: 4070560 - DNA, 25 bp, Homo sapien
ttcattttattttatatgaagtacc

SEQ ID NO: 4070561 - DNA, 25 bp, Homo sapien
ttatatgaagtaccctaaaaagcta

SEQ ID NO: 4070562 - DNA, 25 bp, Homo sapien
cattttattttatatgaagtaccct

SEQ ID NO: 4070563 - DNA, 25 bp, Homo sapien
gaaaaatgttgctcctgccatatgg

SEQ ID NO: 4070564 - DNA, 25 bp, Homo sapien
tgttgtcagtgaaagaggtaccttc

SEQ ID NO: 4070565 - DNA, 25 bp, Homo sapien
caggaactgggtggttagaacagct

SEQ ID NO: 4070566 - DNA, 25 bp, Homo sapien
gctgcaatatgattccactggaaag

SEQ ID NO: 4070567 - DNA, 25 bp, Homo sapien
ctatgaagctgattaggaaagcctt

SEQ ID NO: 4070568 - DNA, 25 bp, Homo sapien
gcatgaagcattttggaggtatttc

SEQ ID NO: 4070569 - DNA, 25 bp, Homo sapien
ttctcttctgaagatctgctgtgca

SEQ ID NO: 4070570 - DNA, 25 bp, Homo sapien
gatctgctgtgcatgaagcattttg

SEQ ID NO: 4070571 - DNA, 25 bp, Homo sapien
tcttcagctcagaacacagcaactt

SEQ ID NO: 4070572 - DNA, 25 bp, Homo sapien
cagagtttcaaagatgtaagagctg

SEQ ID NO: 4070573 - DNA, 25 bp, Homo sapien
ccaccttgatggtattcacaaagta

SEQ ID NO: 4070574 - DNA, 25 bp, Homo sapien
gatggtattcacaaagtatagcagg

SEQ ID NO: 4070575 - DNA, 25 bp, Homo sapien
cacaaagtatagcagggaggcggcc

SEQ ID NO: 4070576 - DNA, 25 bp, Homo sapien
gtgcacatgattagtttgaaaaagt

SEQ ID NO: 4070577 - DNA, 25 bp, Homo sapien
acatgattagtttgaaaaagtatgt

SEQ ID NO: 4070578 - DNA, 25 bp, Homo sapien
ctgtgcacatgattagtttgaaaaa

SEQ ID NO: 4070579 - DNA, 25 bp, Homo sapien
gcacatgattagtttgaaaaagtat

SEQ ID NO: 4070580 - DNA, 25 bp, Homo sapien
cagcttcgggggtaggaatctagaa

SEQ ID NO: 4070581 - DNA, 25 bp, Homo sapien
cttcgggggtaggaatctagaatct

SEQ ID NO: 4070582 - DNA, 25 bp, Homo sapien
gaggtttagggtcagaggcagcttc

SEQ ID NO: 4070583 - DNA, 25 bp, Homo sapien
gtttagggtcagaggcagcttcggg

SEQ ID NO: 4070584 - DNA, 25 bp, Homo sapien
acaggacgtggctagcttttcagct

SEQ ID NO: 4070585 - DNA, 25 bp, Homo sapien
cagaacaggacgtggctagcttttc

SEQ ID NO: 4070586 - DNA, 25 bp, Homo sapien
gagccagaacaggacgtggctagct

SEQ ID NO: 4070587 - DNA, 25 bp, Homo sapien
aacaggacgtggctagcttttcagc

SEQ ID NO: 4070588 - DNA, 25 bp, Homo sapien
tcccattcctgagttggatctactc

SEQ ID NO: 4070589 - DNA, 25 bp, Homo sapien
gagaatggtggagtatgataaccat

SEQ ID NO: 4070590 - DNA, 25 bp, Homo sapien
caggagaatggtggagtatgataac

SEQ ID NO: 4070591 - DNA, 25 bp, Homo sapien
cataaaggtgaatgtgtcaagcact

SEQ ID NO: 4070592 - DNA, 25 bp, Homo sapien
ccaggagaatggtggagtatgataa

SEQ ID NO: 4070593 - DNA, 25 bp, Homo sapien
ttggttccgagaaaacatcccactc

SEQ ID NO: 4070594 - DNA, 25 bp, Homo sapien
gagttggttccgagaaaacatccca

SEQ ID NO: 4070595 - DNA, 25 bp, Homo sapien
ttcttttgtgcaaagcacctatttg

SEQ ID NO: 4070596 - DNA, 25 bp, Homo sapien
ctgtgagttggttccgagaaaacat

SEQ ID NO: 4070597 - DNA, 25 bp, Homo sapien
gggaaatgtattctccaacgtggct

SEQ ID NO: 4070598 - DNA, 25 bp, Homo sapien
gccaaacttggctgaccaagccaaa

SEQ ID NO: 4070599 - DNA, 25 bp, Homo sapien
gctggtacaatctggatcgttcata

SEQ ID NO: 4070600 - DNA, 25 bp, Homo sapien
gactgcaggatgcactttgccaggg

SEQ ID NO: 4070601 - DNA, 25 bp, Homo sapien
ttgtgataccagtttgaccccagta

SEQ ID NO: 4070602 - DNA, 25 bp, Homo sapien
gataccagtttgaccccagtagcac

SEQ ID NO: 4070603 - DNA, 25 bp, Homo sapien
tcaatgcccatttgtgataccagtt

SEQ ID NO: 4070604 - DNA, 25 bp, Homo sapien
catctcaatgcccatttgtgatacc

SEQ ID NO: 4070605 - DNA, 25 bp, Homo sapien
gtaggtaggaaaactggatctgtgg

SEQ ID NO: 4070606 - DNA, 25 bp, Homo sapien
tgggtaggtaggaaaactggatctg

SEQ ID NO: 4070607 - DNA, 25 bp, Homo sapien
ggtaggtaggaaaactggatctgtg

SEQ ID NO: 4070608 - DNA, 25 bp, Homo sapien
gtgcgggtatccgaagctgggtgtc

SEQ ID NO: 4070609 - DNA, 25 bp, Homo sapien
tgtccacagtcacatcgggtcctct

SEQ ID NO: 4070610 - DNA, 25 bp, Homo sapien
ccacagtcacatcgggtcctctgta

SEQ ID NO: 4070611 - DNA, 25 bp, Homo sapien
tcatgcgtagtgtgcgggtatccga

SEQ ID NO: 4070612 - DNA, 25 bp, Homo sapien
cacagcacaattgtctgagtcctgc

SEQ ID NO: 4070613 - DNA, 25 bp, Homo sapien
cattgcacccagcagggatgaatct

SEQ ID NO: 4070614 - DNA, 25 bp, Homo sapien
gaggttggagaaaggcagccctcct

SEQ ID NO: 4070615 - DNA, 25 bp, Homo sapien
tcagggatagtctgtgcagaggcca

SEQ ID NO: 4070616 - DNA, 25 bp, Homo sapien
gagtctcttctttccccaagagtac

SEQ ID NO: 4070617 - DNA, 25 bp, Homo sapien
cgagtctcttctttccccaagagta

SEQ ID NO: 4070618 - DNA, 25 bp, Homo sapien
tgacatttaattcatctcctgttct

SEQ ID NO: 4070619 - DNA, 25 bp, Homo sapien
gtgacatttaattcatctcctgttc

SEQ ID NO: 4070620 - DNA, 25 bp, Homo sapien
ggtgacatttaattcatctcctgtt

SEQ ID NO: 4070621 - DNA, 25 bp, Homo sapien
ataatggcagcccagttgcttctgc

SEQ ID NO: 4070622 - DNA, 25 bp, Homo sapien
ggatgtccaggcattggataatggc

SEQ ID NO: 4070623 - DNA, 25 bp, Homo sapien
taatggcagcccagttgcttctgct

SEQ ID NO: 4070624 - DNA, 25 bp, Homo sapien
ccaggcattggataatggcagccca

SEQ ID NO: 4070625 - DNA, 25 bp, Homo sapien
gcagcaagccgttttgtgcttcctg

SEQ ID NO: 4070626 - DNA, 25 bp, Homo sapien
tgcagcaagccgttttgtgcttcct

SEQ ID NO: 4070627 - DNA, 25 bp, Homo sapien
gtgcagcaagccgttttgtgcttcc

SEQ ID NO: 4070628 - DNA, 25 bp, Homo sapien
caaaaccaccttgaggactagcaaa

SEQ ID NO: 4070629 - DNA, 25 bp, Homo sapien
accaccttgaggactagcaaaagag

SEQ ID NO: 4070630 - DNA, 25 bp, Homo sapien
ccttgaggactagcaaaagagccat

SEQ ID NO: 4070631 - DNA, 25 bp, Homo sapien
cacaaaaccaccttgaggactagca

SEQ ID NO: 4070632 - DNA, 25 bp, Homo sapien
ccggtacttgatatttaccactttg

SEQ ID NO: 4070633 - DNA, 25 bp, Homo sapien
tacttgatatttaccactttgtaga

SEQ ID NO: 4070634 - DNA, 25 bp, Homo sapien
cttctccggtacttgatatttacca

SEQ ID NO: 4070635 - DNA, 25 bp, Homo sapien
cttgatatttaccactttgtagatg

SEQ ID NO: 4070636 - DNA, 25 bp, Homo sapien
gcatgactgcagaactcaaaccagg

SEQ ID NO: 4070637 - DNA, 25 bp, Homo sapien
tccttgagctgcagttccgcaaagt

SEQ ID NO: 4070638 - DNA, 25 bp, Homo sapien
taaatcgcccaccttgtgtgctgac

SEQ ID NO: 4070639 - DNA, 25 bp, Homo sapien
tagctagttgacacccaggaggaga

SEQ ID NO: 4070640 - DNA, 25 bp, Homo sapien
cataatcgaagagaggtttgctgca

SEQ ID NO: 4070641 - DNA, 25 bp, Homo sapien
tttgctgcaaaaccgccaacacctt

SEQ ID NO: 4070642 - DNA, 25 bp, Homo sapien
tctttcttgtcctggccaacacttt

SEQ ID NO: 4070643 - DNA, 25 bp, Homo sapien
taagagatcatctactgcaaattgc

SEQ ID NO: 4070644 - DNA, 25 bp, Homo sapien
gtcaatgctagaggccccgaggaat

SEQ ID NO: 4070645 - DNA, 25 bp, Homo sapien
gctgattttgccgtaccgcgtgtgc

SEQ ID NO: 4070646 - DNA, 25 bp, Homo sapien
gacacacactgtctgggaccttctg

SEQ ID NO: 4070647 - DNA, 25 bp, Homo sapien
aacatgattggcgttgtcaccggga

SEQ ID NO: 4070648 - DNA, 25 bp, Homo sapien
actgctgccgccaatgaacttgtag

SEQ ID NO: 4070649 - DNA, 25 bp, Homo sapien
gaacttgtaggttgttgtgggataa

SEQ ID NO: 4070650 - DNA, 25 bp, Homo sapien
ttgaccaaaccacgcatcaaggtca

SEQ ID NO: 4070651 - DNA, 25 bp, Homo sapien
acgcatcaaggtcatggatcccagg

SEQ ID NO: 4070652 - DNA, 25 bp, Homo sapien
tataaatggactaaattctgcaatt

SEQ ID NO: 4070653 - DNA, 25 bp, Homo sapien
ttaaatataaatggactaaattctg

SEQ ID NO: 4070654 - DNA, 25 bp, Homo sapien
aatataaatggactaaattctgcaa

SEQ ID NO: 4070655 - DNA, 25 bp, Homo sapien
taaatataaatggactaaattctgc

SEQ ID NO: 4070656 - DNA, 25 bp, Homo sapien
agtgaagtaggatcccaaaggccac

SEQ ID NO: 4070657 - DNA, 25 bp, Homo sapien
caaaggccacagcaattggacggat

SEQ ID NO: 4070658 - DNA, 25 bp, Homo sapien
gaacttgaacttgcagtggaagcct

SEQ ID NO: 4070659 - DNA, 25 bp, Homo sapien
tgcttccacgggcatgaacttgaac

SEQ ID NO: 4070660 - DNA, 25 bp, Homo sapien
tgggtccagaaagttgatagccacg

SEQ ID NO: 4070661 - DNA, 25 bp, Homo sapien
ctgggtccagaaagttgatagccac

SEQ ID NO: 4070662 - DNA, 25 bp, Homo sapien
ttcctggcacatgggatgcacagcc

SEQ ID NO: 4070663 - DNA, 25 bp, Homo sapien
aggcactacttgagatcctgtctga

SEQ ID NO: 4070664 - DNA, 25 bp, Homo sapien
caaggacggaggcatacaaggcact

SEQ ID NO: 4070665 - DNA, 25 bp, Homo sapien
gaaacttggcaaatcttgttggcaa

SEQ ID NO: 4070666 - DNA, 25 bp, Homo sapien
gctttcattgctgatagccacagca

SEQ ID NO: 4070667 - DNA, 25 bp, Homo sapien
gttgatggatttatgacagctttca

SEQ ID NO: 4070668 - DNA, 25 bp, Homo sapien
tttcattgctgatagccacagcaaa

SEQ ID NO: 4070669 - DNA, 25 bp, Homo sapien
agcaaaaatcattgctgccagatgc

SEQ ID NO: 4070670 - DNA, 25 bp, Homo sapien
cagactccgtctgtcccggtttctt

SEQ ID NO: 4070671 - DNA, 25 bp, Homo sapien
gatgatgcgaaatgtttttacagac

SEQ ID NO: 4070672 - DNA, 25 bp, Homo sapien
gaaatgtttttacagactccgtctg

SEQ ID NO: 4070673 - DNA, 25 bp, Homo sapien
ctgttgcacgggttgatgatgcgaa

SEQ ID NO: 4070674 - DNA, 25 bp, Homo sapien
tcatgaaggccgtcataaacgctaa

SEQ ID NO: 4070675 - DNA, 25 bp, Homo sapien
gaacatctacttgtggcctctccac

SEQ ID NO: 4070676 - DNA, 25 bp, Homo sapien
ggtgagcatcccaaaagccagcttg

SEQ ID NO: 4070677 - DNA, 25 bp, Homo sapien
aattgttgattgctgtcagccagaa

SEQ ID NO: 4070678 - DNA, 25 bp, Homo sapien
tgcaacttggccaaatgacctctga

SEQ ID NO: 4070679 - DNA, 25 bp, Homo sapien
aagcttggtcttgggcaaaagtgcc

SEQ ID NO: 4070680 - DNA, 25 bp, Homo sapien
aaattcaggtgtgttcaagggaggc

SEQ ID NO: 4070681 - DNA, 25 bp, Homo sapien
gagctggcttaaaacctgttcaagg

SEQ ID NO: 4070682 - DNA, 25 bp, Homo sapien
ccgtctggccaacatgtctggccaa

SEQ ID NO: 4070683 - DNA, 25 bp, Homo sapien
agacccgtctggccaacatgtctgg

SEQ ID NO: 4070684 - DNA, 25 bp, Homo sapien
acccgtctggccaacatgtctggcc

SEQ ID NO: 4070685 - DNA, 25 bp, Homo sapien
gacccgtctggccaacatgtctggc

SEQ ID NO: 4070686 - DNA, 25 bp, Homo sapien
ttctttcacgcaaaccccattcagt

SEQ ID NO: 4070687 - DNA, 25 bp, Homo sapien
tttctttcacgcaaaccccattcag

SEQ ID NO: 4070688 - DNA, 25 bp, Homo sapien
ttttctttcacgcaaaccccattca

SEQ ID NO: 4070689 - DNA, 25 bp, Homo sapien
tgcaggacacctttccctggatttt

SEQ ID NO: 4070690 - DNA, 25 bp, Homo sapien
agacacctttgccacgctccactgg

SEQ ID NO: 4070691 - DNA, 25 bp, Homo sapien
tcaggcagaccatctcgttttcaca

SEQ ID NO: 4070692 - DNA, 25 bp, Homo sapien
ccatctcgttttcacaggaagcagc

SEQ ID NO: 4070693 - DNA, 25 bp, Homo sapien
gcaaagacagggtgccagacacctt

SEQ ID NO: 4070694 - DNA, 25 bp, Homo sapien
cttatcacatgtgggcacaggatct

SEQ ID NO: 4070695 - DNA, 25 bp, Homo sapien
ggtgggccgtaaatcagctcctttg

SEQ ID NO: 4070696 - DNA, 25 bp, Homo sapien
taacccgtcatctgcaatgagacag

SEQ ID NO: 4070697 - DNA, 25 bp, Homo sapien
tggtctgaatcttcccacaagggat

SEQ ID NO: 4070698 - DNA, 25 bp, Homo sapien
aatacaaactagaagaggtgggccg

SEQ ID NO: 4070699 - DNA, 25 bp, Homo sapien
cagggagtgaacaggggcgttggcg

SEQ ID NO: 4070700 - DNA, 25 bp, Homo sapien
cccagggagtgaacaggggcgttgg

SEQ ID NO: 4070701 - DNA, 25 bp, Homo sapien
acaggggcgttggcggggagggcag

SEQ ID NO: 4070702 - DNA, 25 bp, Homo sapien
agcccagggagtgaacaggggcgtt

SEQ ID NO: 4070703 - DNA, 25 bp, Homo sapien
ttgacttcttgaaagtggcaatatc

SEQ ID NO: 4070704 - DNA, 25 bp, Homo sapien
aaagtggcaatatccatgctcagct

SEQ ID NO: 4070705 - DNA, 25 bp, Homo sapien
gtgtgtcggttaatcacccaataaa

SEQ ID NO: 4070706 - DNA, 25 bp, Homo sapien
tgtgtcggttaatcacccaataaaa

SEQ ID NO: 4070707 - DNA, 25 bp, Homo sapien
ggtgtgtcggttaatcacccaataa

SEQ ID NO: 4070708 - DNA, 25 bp, Homo sapien
cactgggcgataactcatgaggtct

SEQ ID NO: 4070709 - DNA, 25 bp, Homo sapien
tataggcctggtcgggagttcattc

SEQ ID NO: 4070710 - DNA, 25 bp, Homo sapien
taataggctagtctcacagtgaaca

SEQ ID NO: 4070711 - DNA, 25 bp, Homo sapien
gctgcaagagagaattataggcctg

SEQ ID NO: 4070712 - DNA, 25 bp, Homo sapien
cagagagaccatccagagtggcttc

SEQ ID NO: 4070713 - DNA, 25 bp, Homo sapien
gagagaccatccagagtggcttctc

SEQ ID NO: 4070714 - DNA, 25 bp, Homo sapien
ttgccaacatctgaacatgtcaaag

SEQ ID NO: 4070715 - DNA, 25 bp, Homo sapien
gccaacatctgaacatgtcaaagaa

SEQ ID NO: 4070716 - DNA, 25 bp, Homo sapien
ctggattatcacaaccagatcccct

SEQ ID NO: 4070717 - DNA, 25 bp, Homo sapien
tgccaacatctgaacatgtcaaaga

SEQ ID NO: 4070718 - DNA, 25 bp, Homo sapien
gagtaatcagcgaggccagcattca

SEQ ID NO: 4070719 - DNA, 25 bp, Homo sapien
gatccaagtagactggcagcaacca

SEQ ID NO: 4070720 - DNA, 25 bp, Homo sapien
taatcacgtcacattcatggcaaga

SEQ ID NO: 4070721 - DNA, 25 bp, Homo sapien
ctggcccaagaagccgaaaatatta

SEQ ID NO: 4070722 - DNA, 25 bp, Homo sapien
taggtggctttactgcaactgagag

SEQ ID NO: 4070723 - DNA, 25 bp, Homo sapien
caactgagagttgaactgaaggatc

SEQ ID NO: 4070724 - DNA, 25 bp, Homo sapien
agtttagtatgacctgatcctgtag

SEQ ID NO: 4070725 - DNA, 25 bp, Homo sapien
agttgaactgaaggatctgcatttc

SEQ ID NO: 4070726 - DNA, 25 bp, Homo sapien
actaagacacctgaaccctccaggg

SEQ ID NO: 4070727 - DNA, 25 bp, Homo sapien
ggagaagcctcgttttgatgccatt

SEQ ID NO: 4070728 - DNA, 25 bp, Homo sapien
tgacatatgacttgatcttctggga

SEQ ID NO: 4070729 - DNA, 25 bp, Homo sapien
tgtgttaacatgtcgctagccagtg

SEQ ID NO: 4070730 - DNA, 25 bp, Homo sapien
tgtacaactgcacctgtcatcatgg

SEQ ID NO: 4070731 - DNA, 25 bp, Homo sapien
catacaaagaggtgtacaggtacca

SEQ ID NO: 4070732 - DNA, 25 bp, Homo sapien
tagagctcgccacgaactagggtaa

SEQ ID NO: 4070733 - DNA, 25 bp, Homo sapien
tgactaccgttgtttgcaaacccga

SEQ ID NO: 4070734 - DNA, 25 bp, Homo sapien
catttggggtccgtcgtacatctct

SEQ ID NO: 4070735 - DNA, 25 bp, Homo sapien
cgtacatctctggttggtgagtgag

SEQ ID NO: 4070736 - DNA, 25 bp, Homo sapien
ttgacagaccatttggggtccgtcg

SEQ ID NO: 4070737 - DNA, 25 bp, Homo sapien
gggtccgtcgtacatctctggttgg

SEQ ID NO: 4070738 - DNA, 25 bp, Homo sapien
catcttgtccacctcatgatatgat

SEQ ID NO: 4070739 - DNA, 25 bp, Homo sapien
tatgatctgagggtgtcataatcag

SEQ ID NO: 4070740 - DNA, 25 bp, Homo sapien
atcttgtccacctcatgatatgatc

SEQ ID NO: 4070741 - DNA, 25 bp, Homo sapien
atatgatctgagggtgtcataatca

SEQ ID NO: 4070742 - DNA, 25 bp, Homo sapien
cattaagcatagtcatggccatctg

SEQ ID NO: 4070743 - DNA, 25 bp, Homo sapien
tataaaggtaattgcatactcaaag

SEQ ID NO: 4070744 - DNA, 25 bp, Homo sapien
tggccatctgtcaacagtcccaaga

SEQ ID NO: 4070745 - DNA, 25 bp, Homo sapien
tgagacggaccattctcagttgatg

SEQ ID NO: 4070746 - DNA, 25 bp, Homo sapien
agggcactgtcacgcgtctcccggg

SEQ ID NO: 4070747 - DNA, 25 bp, Homo sapien
cactccacaagatttcctctactgg

SEQ ID NO: 4070748 - DNA, 25 bp, Homo sapien
ggacaggggaatctaagcctgtgca

SEQ ID NO: 4070749 - DNA, 25 bp, Homo sapien
ggctttacagggcactgtcacgcgt

SEQ ID NO: 4070750 - DNA, 25 bp, Homo sapien
agagcatcctcagccagtcaggcgg

SEQ ID NO: 4070751 - DNA, 25 bp, Homo sapien
caaggcagggggagaacgttcatcc

SEQ ID NO: 4070752 - DNA, 25 bp, Homo sapien
ggggagaacgttcatccttgaacaa

SEQ ID NO: 4070753 - DNA, 25 bp, Homo sapien
gcatcctcagccagtcaggcggctg

SEQ ID NO: 4070754 - DNA, 25 bp, Homo sapien
ctcctcgtgccagcgggacagcatc

SEQ ID NO: 4070755 - DNA, 25 bp, Homo sapien
tggatgatgactgtcgtgccccagc

SEQ ID NO: 4070756 - DNA, 25 bp, Homo sapien
ctttgcttggatgatgactgtcgtg

SEQ ID NO: 4070757 - DNA, 25 bp, Homo sapien
tcctgaggcttactagcacctgaag

SEQ ID NO: 4070758 - DNA, 25 bp, Homo sapien
cctgatgcagtcatagttcctgtgc

SEQ ID NO: 4070759 - DNA, 25 bp, Homo sapien
atcctctctgagtttatccccacgg

SEQ ID NO: 4070760 - DNA, 25 bp, Homo sapien
tgtgcttccccttatcaaattttgt

SEQ ID NO: 4070761 - DNA, 25 bp, Homo sapien
tatccccacggagaagaagcaagtc

SEQ ID NO: 4070762 - DNA, 25 bp, Homo sapien
tggagtctgagaggttgaggttaca

SEQ ID NO: 4070763 - DNA, 25 bp, Homo sapien
aggttacagggagccatgactgcgc

SEQ ID NO: 4070764 - DNA, 25 bp, Homo sapien
aggattgctggagtctgagaggttg

SEQ ID NO: 4070765 - DNA, 25 bp, Homo sapien
gattgctggagtctgagaggttgag

SEQ ID NO: 4070766 - DNA, 25 bp, Homo sapien
aaaatgtcctaccagtctcagatgc

SEQ ID NO: 4070767 - DNA, 25 bp, Homo sapien
gctttctatgggttatgtcatcgtt

SEQ ID NO: 4070768 - DNA, 25 bp, Homo sapien
tttagattcgtagagtactaagcag

SEQ ID NO: 4070769 - DNA, 25 bp, Homo sapien
ttctgggcttgctgtggaccacatt

SEQ ID NO: 4070770 - DNA, 25 bp, Homo sapien
tatcttcacatcttggaccttggtc

SEQ ID NO: 4070771 - DNA, 25 bp, Homo sapien
gatcgaatggctttttgcagctaac

SEQ ID NO: 4070772 - DNA, 25 bp, Homo sapien
tccaagccaagagaagatcgaatgg

SEQ ID NO: 4070773 - DNA, 25 bp, Homo sapien
gaccttggtcagttgtgctattcat

SEQ ID NO: 4070774 - DNA, 25 bp, Homo sapien
caggagtgctaaacctagaggccaa

SEQ ID NO: 4070775 - DNA, 25 bp, Homo sapien
gagtcgacctcctcaagtaatggaa

SEQ ID NO: 4070776 - DNA, 25 bp, Homo sapien
taatggaacgatttcaaaggcaggc

SEQ ID NO: 4070777 - DNA, 25 bp, Homo sapien
gagtccctgagatcacatgctaaag

SEQ ID NO: 4070778 - DNA, 25 bp, Homo sapien
ggtgtgttcccagaactcttgcccc

SEQ ID NO: 4070779 - DNA, 25 bp, Homo sapien
agacttgtctcaggtgtgttcccag

SEQ ID NO: 4070780 - DNA, 25 bp, Homo sapien
tagacgacattctgtgaacctcatg

SEQ ID NO: 4070781 - DNA, 25 bp, Homo sapien
taaagactctgaaagtagagcagag

SEQ ID NO: 4070782 - DNA, 25 bp, Homo sapien
ggtgagtaagttgtaggtgccacaa

SEQ ID NO: 4070783 - DNA, 25 bp, Homo sapien
caagtatgcgggataactgctgaga

SEQ ID NO: 4070784 - DNA, 25 bp, Homo sapien
gaaggcttcagtagcgggtagcaca

SEQ ID NO: 4070785 - DNA, 25 bp, Homo sapien
catagccagcagtagagggagtgac

SEQ ID NO: 4070786 - DNA, 25 bp, Homo sapien
gtctcttgtgagtctccaccacgtc

SEQ ID NO: 4070787 - DNA, 25 bp, Homo sapien
gaagtctcttgtgagtctccaccac

SEQ ID NO: 4070788 - DNA, 25 bp, Homo sapien
tcccagaccagcctatacccagcct

SEQ ID NO: 4070789 - DNA, 25 bp, Homo sapien
tctgcctaagggtcaccttgaccct

SEQ ID NO: 4070790 - DNA, 25 bp, Homo sapien
tgtgacaatgtcaaaggtgtattta

SEQ ID NO: 4070791 - DNA, 25 bp, Homo sapien
cacctgtgacaatgtcaaaggtgta

SEQ ID NO: 4070792 - DNA, 25 bp, Homo sapien
tcagcacctgtgacaatgtcaaagg

SEQ ID NO: 4070793 - DNA, 25 bp, Homo sapien
ccttcagcacctgtgacaatgtcaa

SEQ ID NO: 4070794 - DNA, 25 bp, Homo sapien
gacagctagacaggtgctgggtgca

SEQ ID NO: 4070795 - DNA, 25 bp, Homo sapien
cagggctggattgggttggagagtg

SEQ ID NO: 4070796 - DNA, 25 bp, Homo sapien
tggttcctgccagttgtttccaggg

SEQ ID NO: 4070797 - DNA, 25 bp, Homo sapien
gttcctgccagttgtttccagggct

SEQ ID NO: 4070798 - DNA, 25 bp, Homo sapien
caaaaagaaaggcatttgaagaagc

SEQ ID NO: 4070799 - DNA, 25 bp, Homo sapien
aaagaaaggcatttgaagaagccat

SEQ ID NO: 4070800 - DNA, 25 bp, Homo sapien
gtgcaaaaagaaaggcatttgaaga

SEQ ID NO: 4070801 - DNA, 25 bp, Homo sapien
aaaagaaaggcatttgaagaagcca

SEQ ID NO: 4070802 - DNA, 25 bp, Homo sapien
tcctttgcatgaccaccattgtgtg

SEQ ID NO: 4070803 - DNA, 25 bp, Homo sapien
tttttcacgtggcaacatacggcca

SEQ ID NO: 4070804 - DNA, 25 bp, Homo sapien
catacggccaccagatgagtgaaag

SEQ ID NO: 4070805 - DNA, 25 bp, Homo sapien
cttacaggcttagctgacgctgcag

SEQ ID NO: 4070806 - DNA, 25 bp, Homo sapien
tctctgacccggaagcccgtccctg

SEQ ID NO: 4070807 - DNA, 25 bp, Homo sapien
ccggaagcccgtccctgtccagctc

SEQ ID NO: 4070808 - DNA, 25 bp, Homo sapien
tctgacccggaagcccgtccctgtc

SEQ ID NO: 4070809 - DNA, 25 bp, Homo sapien
ttggatctctgacccggaagcccgt

SEQ ID NO: 4070810 - DNA, 25 bp, Homo sapien
gcgctacgcgctggtgccgcgctat

SEQ ID NO: 4070811 - DNA, 25 bp, Homo sapien
ggcctacgagctgcgcgagaagaca

SEQ ID NO: 4070812 - DNA, 25 bp, Homo sapien
tcagtgcgcggacttcgtgagcttc

SEQ ID NO: 4070813 - DNA, 25 bp, Homo sapien
acatcagcaagctggacggcggcgt

SEQ ID NO: 4070814 - DNA, 25 bp, Homo sapien
ggaatgagaggtgctccaaccttaa

SEQ ID NO: 4070815 - DNA, 25 bp, Homo sapien
gaggcccagttggttgatgacttca

SEQ ID NO: 4070816 - DNA, 25 bp, Homo sapien
gaaatcccagtgaaaccgagtcgaa

SEQ ID NO: 4070817 - DNA, 25 bp, Homo sapien
tctgatctgagtgagtttggaggct

SEQ ID NO: 4070818 - DNA, 25 bp, Homo sapien
aagtgggctggtctaaacggtgtca

SEQ ID NO: 4070819 - DNA, 25 bp, Homo sapien
gacagtatacccatagcatcaagtg

SEQ ID NO: 4070820 - DNA, 25 bp, Homo sapien
cagcttacgtgagtgggaattttcc

SEQ ID NO: 4070821 - DNA, 25 bp, Homo sapien
tacacaatacacagagccgggtgca

SEQ ID NO: 4070822 - DNA, 25 bp, Homo sapien
tgaaaggaatgctctcagaatggtt

SEQ ID NO: 4070823 - DNA, 25 bp, Homo sapien
tgaacctagaacgggttacctggca

SEQ ID NO: 4070824 - DNA, 25 bp, Homo sapien
gttacctggcattcaccgtgtgaag

SEQ ID NO: 4070825 - DNA, 25 bp, Homo sapien
aaatgaatggggtgctgaaaggaat

SEQ ID NO: 4070826 - DNA, 25 bp, Homo sapien
gctgtcctgagggtgtcgcttaact

SEQ ID NO: 4070827 - DNA, 25 bp, Homo sapien
ggaggcgctcgtcagggtttacaaa

SEQ ID NO: 4070828 - DNA, 25 bp, Homo sapien
gccagcctagaagtcctcaaaggga

SEQ ID NO: 4070829 - DNA, 25 bp, Homo sapien
aacaaatggcccctctgcgtggagg

SEQ ID NO: 4070830 - DNA, 25 bp, Homo sapien
ccgggagttatgtatctgaagcagc

SEQ ID NO: 4070831 - DNA, 25 bp, Homo sapien
gtggcccagtttcaaaagaacagca

SEQ ID NO: 4070832 - DNA, 25 bp, Homo sapien
tgggcgtgacatgcacccagtgcaa

SEQ ID NO: 4070833 - DNA, 25 bp, Homo sapien
gccaactaccgctacttcctggagg

SEQ ID NO: 4070834 - DNA, 25 bp, Homo sapien
gctttagccgtttctcaccatgcaa

SEQ ID NO: 4070835 - DNA, 25 bp, Homo sapien
gatctggcatcctcctaaggaccgg

SEQ ID NO: 4070836 - DNA, 25 bp, Homo sapien
gaagattctgtcgttgcccttggcc

SEQ ID NO: 4070837 - DNA, 25 bp, Homo sapien
tgtgctcataaaacagaatgcggcg

SEQ ID NO: 4070838 - DNA, 25 bp, Homo sapien
gctctttacggacagcgcagggacg

SEQ ID NO: 4070839 - DNA, 25 bp, Homo sapien
tctcaaaagataaggcaggtctgga

SEQ ID NO: 4070840 - DNA, 25 bp, Homo sapien
gacacctccgatttcgtcctgtgaa

SEQ ID NO: 4070841 - DNA, 25 bp, Homo sapien
cgcagggacgcactttgatgctgaa

SEQ ID NO: 4070842 - DNA, 25 bp, Homo sapien
cgcttctgtggtcatttggtaaaca

SEQ ID NO: 4070843 - DNA, 25 bp, Homo sapien
aacttgagcaagacgattagcaggc

SEQ ID NO: 4070844 - DNA, 25 bp, Homo sapien
caggcacctcttggaatgagctgtg

SEQ ID NO: 4070845 - DNA, 25 bp, Homo sapien
attagcaggctctgccgaactgcgc

SEQ ID NO: 4070846 - DNA, 25 bp, Homo sapien
gggccctgtgtacccatcatcacag

SEQ ID NO: 4070847 - DNA, 25 bp, Homo sapien
agggccctgtgtacccatcatcaca

SEQ ID NO: 4070848 - DNA, 25 bp, Homo sapien
ccctgtgtacccatcatcacagcaa

SEQ ID NO: 4070849 - DNA, 25 bp, Homo sapien
gccctgtgtacccatcatcacagca

SEQ ID NO: 4070850 - DNA, 25 bp, Homo sapien
aaaccaaggtggcttcgaggaggca

SEQ ID NO: 4070851 - DNA, 25 bp, Homo sapien
cgtggaactcatcgctcagcctgtg

SEQ ID NO: 4070852 - DNA, 25 bp, Homo sapien
tcagcgacaacacgaacccagtgtg

SEQ ID NO: 4070853 - DNA, 25 bp, Homo sapien
tcagtacggctggaacatgaggtcc

SEQ ID NO: 4070854 - DNA, 25 bp, Homo sapien
caagaggaaccccattgacgtggac

SEQ ID NO: 4070855 - DNA, 25 bp, Homo sapien
tgctggatgcaggacccgtccaaag

SEQ ID NO: 4070856 - DNA, 25 bp, Homo sapien
gctccctgctaaggaaggagaccag

SEQ ID NO: 4070857 - DNA, 25 bp, Homo sapien
tcaagaggagtagggatcccaggct

SEQ ID NO: 4070858 - DNA, 25 bp, Homo sapien
aaagaaatggcatcggtctcctggc

SEQ ID NO: 4070859 - DNA, 25 bp, Homo sapien
ggaaaagaaatggcatcggtctcct

SEQ ID NO: 4070860 - DNA, 25 bp, Homo sapien
gaaaagaaatggcatcggtctcctg

SEQ ID NO: 4070861 - DNA, 25 bp, Homo sapien
gcagccacgtagggtcagcccccgg

SEQ ID NO: 4070862 - DNA, 25 bp, Homo sapien
gccgccgtgctctgcccaaagatga

SEQ ID NO: 4070863 - DNA, 25 bp, Homo sapien
agaacatctcccagaccgctgccgc

SEQ ID NO: 4070864 - DNA, 25 bp, Homo sapien
tcccagaccgctgccgccgtgctct

SEQ ID NO: 4070865 - DNA, 25 bp, Homo sapien
accgctgccgccgtgctctgcccaa

SEQ ID NO: 4070866 - DNA, 25 bp, Homo sapien
aagtgaataaacccatgtcagagct

SEQ ID NO: 4070867 - DNA, 25 bp, Homo sapien
atactgggtagacagagactctctt

SEQ ID NO: 4070868 - DNA, 25 bp, Homo sapien
ctcatactgggtagacagagactct

SEQ ID NO: 4070869 - DNA, 25 bp, Homo sapien
tcttcctgtggctcgcaggtttctc

SEQ ID NO: 4070870 - DNA, 25 bp, Homo sapien
cttcctgtggctcgcaggtttctca

SEQ ID NO: 4070871 - DNA, 25 bp, Homo sapien
tataggctcgacacccattgcacag

SEQ ID NO: 4070872 - DNA, 25 bp, Homo sapien
ggtcctataggctcgacacccattg

SEQ ID NO: 4070873 - DNA, 25 bp, Homo sapien
tcttggtcctataggctcgacaccc

SEQ ID NO: 4070874 - DNA, 25 bp, Homo sapien
tgactcttggtcctataggctcgac

SEQ ID NO: 4070875 - DNA, 25 bp, Homo sapien
ctccgctcagagcatgcaggagcag

SEQ ID NO: 4070876 - DNA, 25 bp, Homo sapien
tgaaagcccggcccagaactgaggg

SEQ ID NO: 4070877 - DNA, 25 bp, Homo sapien
catccccatcaatgaaagctccgct

SEQ ID NO: 4070878 - DNA, 25 bp, Homo sapien
cccatcaatgaaagctccgctcaga

SEQ ID NO: 4070879 - DNA, 25 bp, Homo sapien
cagataatgcttgggctgtttggga

SEQ ID NO: 4070880 - DNA, 25 bp, Homo sapien
taagaaaccatccttcgcagaaacg

SEQ ID NO: 4070881 - DNA, 25 bp, Homo sapien
tggcttccccttctcagataatgct

SEQ ID NO: 4070882 - DNA, 25 bp, Homo sapien
cgcagaaacggtgtttgcctccagg

SEQ ID NO: 4070883 - DNA, 25 bp, Homo sapien
gaactgatgcctccgatgatgctga

SEQ ID NO: 4070884 - DNA, 25 bp, Homo sapien
agcgtcacggtgacccacaggatgg

SEQ ID NO: 4070885 - DNA, 25 bp, Homo sapien
gatgctgacgatctcgctgaggtca

SEQ ID NO: 4070886 - DNA, 25 bp, Homo sapien
ctgaggtcaggcataaacagcgcca

SEQ ID NO: 4070887 - DNA, 25 bp, Homo sapien
cattgcctgggtaggacatcaagac

SEQ ID NO: 4070888 - DNA, 25 bp, Homo sapien
tcaagacgtcagcagaaacttctgt

SEQ ID NO: 4070889 - DNA, 25 bp, Homo sapien
caatgatgaccatatcattgcctgg

SEQ ID NO: 4070890 - DNA, 25 bp, Homo sapien
aaggacccgggccacaatgatgacc

SEQ ID NO: 4070891 - DNA, 25 bp, Homo sapien
cagtgggagaggctccgtttgcgca

SEQ ID NO: 4070892 - DNA, 25 bp, Homo sapien
agtgggagaggctccgtttgcgcat

SEQ ID NO: 4070893 - DNA, 25 bp, Homo sapien
ccagtgggagaggctccgtttgcgc

SEQ ID NO: 4070894 - DNA, 25 bp, Homo sapien
agatggagacggcagcttcgtgaca

SEQ ID NO: 4070895 - DNA, 25 bp, Homo sapien
cagtagatggagacggcagcttcgt

SEQ ID NO: 4070896 - DNA, 25 bp, Homo sapien
tgcagtagatggagacggcagcttc

SEQ ID NO: 4070897 - DNA, 25 bp, Homo sapien
gctgcagtagatggagacggcagct

SEQ ID NO: 4070898 - DNA, 25 bp, Homo sapien
aagacactgaacacagaggtccagg

SEQ ID NO: 4070899 - DNA, 25 bp, Homo sapien
gggaagacactgaacacagaggtcc

SEQ ID NO: 4070900 - DNA, 25 bp, Homo sapien
gatggtggggaagacactgaacaca

SEQ ID NO: 4070901 - DNA, 25 bp, Homo sapien
actgaacacagaggtccaggaggca

SEQ ID NO: 4070902 - DNA, 25 bp, Homo sapien
tgtcccggtcatcgctagccacggc

SEQ ID NO: 4070903 - DNA, 25 bp, Homo sapien
tgcgtcccttggcctgtcccggtca

SEQ ID NO: 4070904 - DNA, 25 bp, Homo sapien
cctgtcccggtcatcgctagccacg

SEQ ID NO: 4070905 - DNA, 25 bp, Homo sapien
cccggtcatcgctagccacggccag

SEQ ID NO: 4070906 - DNA, 25 bp, Homo sapien
gccagaggtagtactgcacggtgat

SEQ ID NO: 4070907 - DNA, 25 bp, Homo sapien
tgaccagggccaggtaacaggcagc

SEQ ID NO: 4070908 - DNA, 25 bp, Homo sapien
agtgaaggatgggactcacgcacga

SEQ ID NO: 4070909 - DNA, 25 bp, Homo sapien
atgggactcacgcacgaggccctgg

SEQ ID NO: 4070910 - DNA, 25 bp, Homo sapien
tgtgaaggccaattccccagctcct

SEQ ID NO: 4070911 - DNA, 25 bp, Homo sapien
ctccaaatgtgaaggccaattcccc

SEQ ID NO: 4070912 - DNA, 25 bp, Homo sapien
tcctctgaccccagatggacagaaa

SEQ ID NO: 4070913 - DNA, 25 bp, Homo sapien
tcgttttccccttctccaaatgtga

SEQ ID NO: 4070914 - DNA, 25 bp, Homo sapien
aaggcgatctcccgcggggcagaca

SEQ ID NO: 4070915 - DNA, 25 bp, Homo sapien
agggtgaagcgctggtctgcgtacc

SEQ ID NO: 4070916 - DNA, 25 bp, Homo sapien
tgaagcgctggtctgcgtaccacgg

SEQ ID NO: 4070917 - DNA, 25 bp, Homo sapien
ggtgaagcgctggtctgcgtaccac

SEQ ID NO: 4070918 - DNA, 25 bp, Homo sapien
tgcggggcgggcggggtgccagaca

SEQ ID NO: 4070919 - DNA, 25 bp, Homo sapien
gtgccagacaggagggagtcacaca

SEQ ID NO: 4070920 - DNA, 25 bp, Homo sapien
cgggcggggtgccagacaggaggga

SEQ ID NO: 4070921 - DNA, 25 bp, Homo sapien
gggcgggcggggtgccagacaggag

SEQ ID NO: 4070922 - DNA, 25 bp, Homo sapien
aggtcattagaggtccggcaccctg

SEQ ID NO: 4070923 - DNA, 25 bp, Homo sapien
gccaccccgagtcccatgaaggtac

SEQ ID NO: 4070924 - DNA, 25 bp, Homo sapien
ggccaccccgagtcccatgaaggta

SEQ ID NO: 4070925 - DNA, 25 bp, Homo sapien
ttagaggtccggcaccctgggccac

SEQ ID NO: 4070926 - DNA, 25 bp, Homo sapien
cggagatcatgagcaggttgaggag

SEQ ID NO: 4070927 - DNA, 25 bp, Homo sapien
ccacggagatcatgagcaggttgag

SEQ ID NO: 4070928 - DNA, 25 bp, Homo sapien
tccccgatcaccctgaggaaggcca

SEQ ID NO: 4070929 - DNA, 25 bp, Homo sapien
agcttcccaatggcagggccacaca

SEQ ID NO: 4070930 - DNA, 25 bp, Homo sapien
atgagatcaggtgcgttcaaggtgg

SEQ ID NO: 4070931 - DNA, 25 bp, Homo sapien
ccatccaagtactaatcgcgcccga

SEQ ID NO: 4070932 - DNA, 25 bp, Homo sapien
caagtactaatcgcgcccgaccctg

SEQ ID NO: 4070933 - DNA, 25 bp, Homo sapien
tgcgttcaaggtggtatggccctag

SEQ ID NO: 4070934 - DNA, 25 bp, Homo sapien
cccagcgcggacttcatgaggatga

SEQ ID NO: 4070935 - DNA, 25 bp, Homo sapien
agcgcccatcgaggacagagtggca

SEQ ID NO: 4070936 - DNA, 25 bp, Homo sapien
tccgcccgctttggagaaggcccag

SEQ ID NO: 4070937 - DNA, 25 bp, Homo sapien
agggaccactccgcccgctttggag

SEQ ID NO: 4070938 - DNA, 25 bp, Homo sapien
tggggatgggactcgggcttactcc

SEQ ID NO: 4070939 - DNA, 25 bp, Homo sapien
taaggtgccggacagtctttggctg

SEQ ID NO: 4070940 - DNA, 25 bp, Homo sapien
atgggactcgggcttactccaggtg

SEQ ID NO: 4070941 - DNA, 25 bp, Homo sapien
atccaacttttaaggtgccggacag

SEQ ID NO: 4070942 - DNA, 25 bp, Homo sapien
ggccacacggaggtgcccgtgtgga

SEQ ID NO: 4070943 - DNA, 25 bp, Homo sapien
tgcacaagagcgcccagcctggggt

SEQ ID NO: 4070944 - DNA, 25 bp, Homo sapien
ctgcacaagagcgcccagcctgggg

SEQ ID NO: 4070945 - DNA, 25 bp, Homo sapien
ctggggtggcctctcccccgctgtg

SEQ ID NO: 4070946 - DNA, 25 bp, Homo sapien
agcctggggtggcctctcccccgct

SEQ ID NO: 4070947 - DNA, 25 bp, Homo sapien
gccttcttgttaccagcaaatgaaa

SEQ ID NO: 4070948 - DNA, 25 bp, Homo sapien
cttcttgttaccagcaaatgaaacc

SEQ ID NO: 4070949 - DNA, 25 bp, Homo sapien
ccttcttgttaccagcaaatgaaac

SEQ ID NO: 4070950 - DNA, 25 bp, Homo sapien
catcgctgataagggactcgcctaa

SEQ ID NO: 4070951 - DNA, 25 bp, Homo sapien
gaaaggacagcccaaagaacaagag

SEQ ID NO: 4070952 - DNA, 25 bp, Homo sapien
caaagaagacaaacgggcaacagac

SEQ ID NO: 4070953 - DNA, 25 bp, Homo sapien
caatatctgcaagttccatcgctga

SEQ ID NO: 4070954 - DNA, 25 bp, Homo sapien
catggtggcaggtgatacttacaaa

SEQ ID NO: 4070955 - DNA, 25 bp, Homo sapien
tgaaaattttcttcaccgacaatgg

SEQ ID NO: 4070956 - DNA, 25 bp, Homo sapien
tagctttgcttccaaatagcacaag

SEQ ID NO: 4070957 - DNA, 25 bp, Homo sapien
tacaaaaataaagcgaaggtctatg

SEQ ID NO: 4070958 - DNA, 25 bp, Homo sapien
agggcaggcccatgtagaacagact

SEQ ID NO: 4070959 - DNA, 25 bp, Homo sapien
gaatcttctcgatgtaccaggagcc

SEQ ID NO: 4070960 - DNA, 25 bp, Homo sapien
gactctaacaaacctgcagctggaa

SEQ ID NO: 4070961 - DNA, 25 bp, Homo sapien
tctcccgagtctttggtgcgcacag

SEQ ID NO: 4070962 - DNA, 25 bp, Homo sapien
gtctttggcgggtgaacctgctgca

SEQ ID NO: 4070963 - DNA, 25 bp, Homo sapien
gcttcggcctgctcttggccttgtt

SEQ ID NO: 4070964 - DNA, 25 bp, Homo sapien
tgctgcatgagctgcgggcgcttca

SEQ ID NO: 4070965 - DNA, 25 bp, Homo sapien
ggccttgttgatttgtaccacaaag

SEQ ID NO: 4070966 - DNA, 25 bp, Homo sapien
acctcctggttgtagcggccaggca

SEQ ID NO: 4070967 - DNA, 25 bp, Homo sapien
ctcctggttgtagcggccaggcatg

SEQ ID NO: 4070968 - DNA, 25 bp, Homo sapien
tggttgtagcggccaggcatgatcc

SEQ ID NO: 4070969 - DNA, 25 bp, Homo sapien
ccacctcctggttgtagcggccagg

SEQ ID NO: 4070970 - DNA, 25 bp, Homo sapien
aggaacgccacagagctaccatgac

SEQ ID NO: 4070971 - DNA, 25 bp, Homo sapien
catgacggcctttttctatgacggc

SEQ ID NO: 4070972 - DNA, 25 bp, Homo sapien
tatgacggctggattcatcagaaac

SEQ ID NO: 4070973 - DNA, 25 bp, Homo sapien
gacagccggttgaacaggcaggaac

SEQ ID NO: 4070974 - DNA, 25 bp, Homo sapien
ccagctatgcttctgtcacaaccta

SEQ ID NO: 4070975 - DNA, 25 bp, Homo sapien
tgtcacaacctaccgaagggaggcc

SEQ ID NO: 4070976 - DNA, 25 bp, Homo sapien
agacggatgatcaggcccagctatg

SEQ ID NO: 4070977 - DNA, 25 bp, Homo sapien
aagatgggcacgtctctatccaggg

SEQ ID NO: 4070978 - DNA, 25 bp, Homo sapien
cagaggaccctggttcagaatgtca

SEQ ID NO: 4070979 - DNA, 25 bp, Homo sapien
atcagaggaccctggttcagaatgt

SEQ ID NO: 4070980 - DNA, 25 bp, Homo sapien
tcagaggaccctggttcagaatgtc

SEQ ID NO: 4070981 - DNA, 25 bp, Homo sapien
caatacgactgggcaaggccaaggg

SEQ ID NO: 4070982 - DNA, 25 bp, Homo sapien
tgccttgggtagtggagaagaacct

SEQ ID NO: 4070983 - DNA, 25 bp, Homo sapien
caggatgagaccacctaagggacac

SEQ ID NO: 4070984 - DNA, 25 bp, Homo sapien
tctagagcaaaagaactgcccaggc

SEQ ID NO: 4070985 - DNA, 25 bp, Homo sapien
tatgtagccagtcaggatccctgga

SEQ ID NO: 4070986 - DNA, 25 bp, Homo sapien
agaactttcataaagagcgtgcaag

SEQ ID NO: 4070987 - DNA, 25 bp, Homo sapien
agttactttgaacatgtttaagtag

SEQ ID NO: 4070988 - DNA, 25 bp, Homo sapien
acatgtttaagtagatcacccagcc

SEQ ID NO: 4070989 - DNA, 25 bp, Homo sapien
gagcgtgcaagttactttgaacatg

SEQ ID NO: 4070990 - DNA, 25 bp, Homo sapien
cagagacagggagagtctggcccgc

SEQ ID NO: 4070991 - DNA, 25 bp, Homo sapien
agacagggagagtctggcccgcctc

SEQ ID NO: 4070992 - DNA, 25 bp, Homo sapien
acagggagagtctggcccgcctcct

SEQ ID NO: 4070993 - DNA, 25 bp, Homo sapien
cagggagagtctggcccgcctcctg

SEQ ID NO: 4070994 - DNA, 25 bp, Homo sapien
agggcctcacttgagggcgattcga

SEQ ID NO: 4070995 - DNA, 25 bp, Homo sapien
agttgggtaacaccaccttgtccag

SEQ ID NO: 4070996 - DNA, 25 bp, Homo sapien
tctccaggggacaagggcctcactt

SEQ ID NO: 4070997 - DNA, 25 bp, Homo sapien
gattcgatcgaaagttgggtaacac

SEQ ID NO: 4070998 - DNA, 25 bp, Homo sapien
tactagtctaggtactagtctagga

SEQ ID NO: 4070999 - DNA, 25 bp, Homo sapien
ccattgtactagtctaggtactagt

SEQ ID NO: 4071000 - DNA, 25 bp, Homo sapien
tagtctaggtactagtctaggaagt

SEQ ID NO: 4071001 - DNA, 25 bp, Homo sapien
tgtactagtctaggtactagtctag

SEQ ID NO: 4071002 - DNA, 25 bp, Homo sapien
agaggttccctaggcaggcaagaga

SEQ ID NO: 4071003 - DNA, 25 bp, Homo sapien
tgaaagcaaagacgtccagtcctat

SEQ ID NO: 4071004 - DNA, 25 bp, Homo sapien
gctttacagcatactgacggaagga

SEQ ID NO: 4071005 - DNA, 25 bp, Homo sapien
gctgaaagtcaacgccaagctggcg

SEQ ID NO: 4071006 - DNA, 25 bp, Homo sapien
tgcccggccacggacacagctctga

SEQ ID NO: 4071007 - DNA, 25 bp, Homo sapien
ggcctcggagggcaagactcctgct

SEQ ID NO: 4071008 - DNA, 25 bp, Homo sapien
ctcggagggcaagactcctgcttga

SEQ ID NO: 4071009 - DNA, 25 bp, Homo sapien
cggccacggacacagctctgacagc

SEQ ID NO: 4071010 - DNA, 25 bp, Homo sapien
ctgggcgccgtctcgtttaaaggct

SEQ ID NO: 4071011 - DNA, 25 bp, Homo sapien
gacaggctggtagaggccgaggttt

SEQ ID NO: 4071012 - DNA, 25 bp, Homo sapien
aaggctgtggcttggcccaagacaa

SEQ ID NO: 4071013 - DNA, 25 bp, Homo sapien
gaaccttggagtaccgatgaagatg

SEQ ID NO: 4071014 - DNA, 25 bp, Homo sapien
aacaaaaaggaaaatcatctctatt

SEQ ID NO: 4071015 - DNA, 25 bp, Homo sapien
tcaacaaaaaggaaaatcatctcta

SEQ ID NO: 4071016 - DNA, 25 bp, Homo sapien
acatcaacaaaaaggaaaatcatct

SEQ ID NO: 4071017 - DNA, 25 bp, Homo sapien
ctgtggttagcagcaacatcaacaa

SEQ ID NO: 4071018 - DNA, 25 bp, Homo sapien
tattaagctatcctccatgagccgc

SEQ ID NO: 4071019 - DNA, 25 bp, Homo sapien
agccattacgaaaaccactcagcgg

SEQ ID NO: 4071020 - DNA, 25 bp, Homo sapien
taaatgatgcctgtggttcccatga

SEQ ID NO: 4071021 - DNA, 25 bp, Homo sapien
tgcgaaatctaagctacagaccggt

SEQ ID NO: 4071022 - DNA, 25 bp, Homo sapien
tgaggctaggcggtgtcaccccata

SEQ ID NO: 4071023 - DNA, 25 bp, Homo sapien
cccatacgatgtgtactggaggagg

SEQ ID NO: 4071024 - DNA, 25 bp, Homo sapien
tcccagagtgactgaggctaggcgg

SEQ ID NO: 4071025 - DNA, 25 bp, Homo sapien
tgtcaccccatacgatgtgtactgg

SEQ ID NO: 4071026 - DNA, 25 bp, Homo sapien
ctttctgagagggaaggcgcaacct

SEQ ID NO: 4071027 - DNA, 25 bp, Homo sapien
tcgagagactgacataaagacgcgg

SEQ ID NO: 4071028 - DNA, 25 bp, Homo sapien
caagatccgtgtgagaaaaatgcca

SEQ ID NO: 4071029 - DNA, 25 bp, Homo sapien
aaggaactgtactgacaccccaggg

SEQ ID NO: 4071030 - DNA, 25 bp, Homo sapien
caaagtccatctgcgtttttcctac

SEQ ID NO: 4071031 - DNA, 25 bp, Homo sapien
cacaaagtccatctgcgtttttcct

SEQ ID NO: 4071032 - DNA, 25 bp, Homo sapien
tctgagtgccgaagtcacaaagtcc

SEQ ID NO: 4071033 - DNA, 25 bp, Homo sapien
gaaaggatctgagtgccgaagtcac

SEQ ID NO: 4071034 - DNA, 25 bp, Homo sapien
cttctgtcggtgactgtcatccaag

SEQ ID NO: 4071035 - DNA, 25 bp, Homo sapien
caagcaattggagtccccatacagt

SEQ ID NO: 4071036 - DNA, 25 bp, Homo sapien
gaatctgataaagtcccaaaatggg

SEQ ID NO: 4071037 - DNA, 25 bp, Homo sapien
caccctcagctggaatctgataaag

SEQ ID NO: 4071038 - DNA, 25 bp, Homo sapien
aaccaaaatgtcgaatgggcatggg

SEQ ID NO: 4071039 - DNA, 25 bp, Homo sapien
tctggaagtagacaatggtgatggt

SEQ ID NO: 4071040 - DNA, 25 bp, Homo sapien
catgggatttcttattgcggtgata

SEQ ID NO: 4071041 - DNA, 25 bp, Homo sapien
gcaaaaggcccatgaatggcatcct

SEQ ID NO: 4071042 - DNA, 25 bp, Homo sapien
tctgtgttatcacgacgccatcttc

SEQ ID NO: 4071043 - DNA, 25 bp, Homo sapien
ttatcacgacgccatcttctggaaa

SEQ ID NO: 4071044 - DNA, 25 bp, Homo sapien
cttgaaagtctgtgttatcacgacg

SEQ ID NO: 4071045 - DNA, 25 bp, Homo sapien
gaaagtctgtgttatcacgacgcca

SEQ ID NO: 4071046 - DNA, 25 bp, Homo sapien
taaataatagctactcgtttaccca

SEQ ID NO: 4071047 - DNA, 25 bp, Homo sapien
tgttcaaagtcaagggaacacagga

SEQ ID NO: 4071048 - DNA, 25 bp, Homo sapien
cacaggaacgccgaacactttaata

SEQ ID NO: 4071049 - DNA, 25 bp, Homo sapien
gctgctattgccttgtcacacataa

SEQ ID NO: 4071050 - DNA, 25 bp, Homo sapien
gagcctcacagatgtacttttgaaa

SEQ ID NO: 4071051 - DNA, 25 bp, Homo sapien
gaaaggctcaaaacaagctgtccag

SEQ ID NO: 4071052 - DNA, 25 bp, Homo sapien
gacgttgttctcaaaaccagctacc

SEQ ID NO: 4071053 - DNA, 25 bp, Homo sapien
tccagctaactgagggatcaccatt

SEQ ID NO: 4071054 - DNA, 25 bp, Homo sapien
taagaccacgccctcaggaaacaga

SEQ ID NO: 4071055 - DNA, 25 bp, Homo sapien
ctaagaccacgccctcaggaaacag

SEQ ID NO: 4071056 - DNA, 25 bp, Homo sapien
atgttagctcctccggtatccggca

SEQ ID NO: 4071057 - DNA, 25 bp, Homo sapien
ggtgaactccccttcatacaggcca

SEQ ID NO: 4071058 - DNA, 25 bp, Homo sapien
gctgaaccccatgttccacacagac

SEQ ID NO: 4071059 - DNA, 25 bp, Homo sapien
acaggccatcgctgaaccccatgtt

SEQ ID NO: 4071060 - DNA, 25 bp, Homo sapien
gcaaccgcactcagtcgaaagggct

SEQ ID NO: 4071061 - DNA, 25 bp, Homo sapien
gagataactgcttagcctagaccca

SEQ ID NO: 4071062 - DNA, 25 bp, Homo sapien
tagacccagcaaggttcagtgaagg

SEQ ID NO: 4071063 - DNA, 25 bp, Homo sapien
agtactttaccgaaatgcaccagag

SEQ ID NO: 4071064 - DNA, 25 bp, Homo sapien
tcactgaagatgacgagcgagaggc

SEQ ID NO: 4071065 - DNA, 25 bp, Homo sapien
cataacagaagtgttgtaccagtca

SEQ ID NO: 4071066 - DNA, 25 bp, Homo sapien
ggagcttggcgatctcttcagggaa

SEQ ID NO: 4071067 - DNA, 25 bp, Homo sapien
ttgtccacgtccctccggagcttgg

SEQ ID NO: 4071068 - DNA, 25 bp, Homo sapien
gaaattggtgtggatgtgatcacca

SEQ ID NO: 4071069 - DNA, 25 bp, Homo sapien
tggcatcaaaacacgtgaagggggc

SEQ ID NO: 4071070 - DNA, 25 bp, Homo sapien
ctctacaaagtagcccatgcttctc

SEQ ID NO: 4071071 - DNA, 25 bp, Homo sapien
tggtacatatccctgaaattggtgt

SEQ ID NO: 4071072 - DNA, 25 bp, Homo sapien
cagtctaaagggtcattcttcatcc

SEQ ID NO: 4071073 - DNA, 25 bp, Homo sapien
ccagagaactctcttgcttcgcggg

SEQ ID NO: 4071074 - DNA, 25 bp, Homo sapien
tagcggaggttgtggtactgatccc

SEQ ID NO: 4071075 - DNA, 25 bp, Homo sapien
tttactgttgaagtctgttctgcac

SEQ ID NO: 4071076 - DNA, 25 bp, Homo sapien
tctgctggggaagccacagtgatca

SEQ ID NO: 4071077 - DNA, 25 bp, Homo sapien
tgctggggaagccacagtgatcatg

SEQ ID NO: 4071078 - DNA, 25 bp, Homo sapien
ctggggaagccacagtgatcatgac

SEQ ID NO: 4071079 - DNA, 25 bp, Homo sapien
ctctgtctctgctggggaagccaca

SEQ ID NO: 4071080 - DNA, 25 bp, Homo sapien
caggtagcccgaccaaggccataag

SEQ ID NO: 4071081 - DNA, 25 bp, Homo sapien
ggtagcccgaccaaggccataagac

SEQ ID NO: 4071082 - DNA, 25 bp, Homo sapien
atggccaggtagcccgaccaaggcc

SEQ ID NO: 4071083 - DNA, 25 bp, Homo sapien
gccaggtagcccgaccaaggccata

SEQ ID NO: 4071084 - DNA, 25 bp, Homo sapien
ttgtctccgttctgtggcaaatagg

SEQ ID NO: 4071085 - DNA, 25 bp, Homo sapien
tcaatgttgtctccgttctgtggca

SEQ ID NO: 4071086 - DNA, 25 bp, Homo sapien
ggcaacttcaatgttgtctccgttc

SEQ ID NO: 4071087 - DNA, 25 bp, Homo sapien
cgttctgtggcaaatagggctgcca

SEQ ID NO: 4071088 - DNA, 25 bp, Homo sapien
tcctgtgactcccatgccgttgagg

SEQ ID NO: 4071089 - DNA, 25 bp, Homo sapien
gcagtagggccacatgtagggacac

SEQ ID NO: 4071090 - DNA, 25 bp, Homo sapien
gatggtgacattaacaactgtcggc

SEQ ID NO: 4071091 - DNA, 25 bp, Homo sapien
tgtcggcattcctccatagtagatg

SEQ ID NO: 4071092 - DNA, 25 bp, Homo sapien
gacttgagtctctagagggcttccc

SEQ ID NO: 4071093 - DNA, 25 bp, Homo sapien
tcagaagggcttgcttacagcgctg

SEQ ID NO: 4071094 - DNA, 25 bp, Homo sapien
tggaatgctcctgcacagataaggc

SEQ ID NO: 4071095 - DNA, 25 bp, Homo sapien
cagagaatgagtacgtgaccagccc

SEQ ID NO: 4071096 - DNA, 25 bp, Homo sapien
gaagccttaagaattggcaaggaag

SEQ ID NO: 4071097 - DNA, 25 bp, Homo sapien
tccatatggtaggttagtacacctg

SEQ ID NO: 4071098 - DNA, 25 bp, Homo sapien
aatcaaccagttagagaatatacaa

SEQ ID NO: 4071099 - DNA, 25 bp, Homo sapien
gtgctagatataccagcccatgcaa

SEQ ID NO: 4071100 - DNA, 25 bp, Homo sapien
tggaacagaatggaaagctcaggga

SEQ ID NO: 4071101 - DNA, 25 bp, Homo sapien
tggtaccagtacatggacagacaga

SEQ ID NO: 4071102 - DNA, 25 bp, Homo sapien
aatgggtggccatttggcaaaagaa

SEQ ID NO: 4071103 - DNA, 25 bp, Homo sapien
ttaactccaaatggatcaaggaatt

SEQ ID NO: 4071104 - DNA, 25 bp, Homo sapien
agagggaaaattcgcccagagccca

SEQ ID NO: 4071105 - DNA, 25 bp, Homo sapien
ccccgagaattctgtgcttagtcat

SEQ ID NO: 4071106 - DNA, 25 bp, Homo sapien
tccaagcaccccgagaattctgtgc

SEQ ID NO: 4071107 - DNA, 25 bp, Homo sapien
taagcgaaagcagctaccagttctg

SEQ ID NO: 4071108 - DNA, 25 bp, Homo sapien
ctgttgaggatctgataggctctga

SEQ ID NO: 4071109 - DNA, 25 bp, Homo sapien
ggctgacgcgatcagggcctgcttc

SEQ ID NO: 4071110 - DNA, 25 bp, Homo sapien
tctgagcagatcgagcttgccgtgg

SEQ ID NO: 4071111 - DNA, 25 bp, Homo sapien
ttgccgtggccttgctcaaacatgt

SEQ ID NO: 4071112 - DNA, 25 bp, Homo sapien
tacgggacccacttatgctaaatgc

SEQ ID NO: 4071113 - DNA, 25 bp, Homo sapien
tacaaacgtgcacacaagaggcctg

SEQ ID NO: 4071114 - DNA, 25 bp, Homo sapien
cctgcatgagagaatgagtgcacac

SEQ ID NO: 4071115 - DNA, 25 bp, Homo sapien
agtatccaacaggtgcttgtctggc

SEQ ID NO: 4071116 - DNA, 25 bp, Homo sapien
caaccagccaagtatctagctttat

SEQ ID NO: 4071117 - DNA, 25 bp, Homo sapien
taaggattactaacaaaataatatc

SEQ ID NO: 4071118 - DNA, 25 bp, Homo sapien
gctgaaatcaatattcaatttactt

SEQ ID NO: 4071119 - DNA, 25 bp, Homo sapien
tatctggcatcagaagctgaaatca

SEQ ID NO: 4071120 - DNA, 25 bp, Homo sapien
agtgactcctacctctttgcagaga

SEQ ID NO: 4071121 - DNA, 25 bp, Homo sapien
cacagttctagcacataaatgggat

SEQ ID NO: 4071122 - DNA, 25 bp, Homo sapien
tcctgacgtgggagctactggtctc

SEQ ID NO: 4071123 - DNA, 25 bp, Homo sapien
tgaagggcctaagctctcaaaccca

SEQ ID NO: 4071124 - DNA, 25 bp, Homo sapien
ttcatgcgaccgtagcctcctggta

SEQ ID NO: 4071125 - DNA, 25 bp, Homo sapien
gacagcacctgcaaccactggagaa

SEQ ID NO: 4071126 - DNA, 25 bp, Homo sapien
cgcacgccagcaccataggtgacaa

SEQ ID NO: 4071127 - DNA, 25 bp, Homo sapien
ccataggtgacaatgtcaggtttca

SEQ ID NO: 4071128 - DNA, 25 bp, Homo sapien
gataccgagtaaaggcatcctccac

SEQ ID NO: 4071129 - DNA, 25 bp, Homo sapien
caaggaccatggatgcacatactgg

SEQ ID NO: 4071130 - DNA, 25 bp, Homo sapien
gaaggccatggacgtgacatctcat

SEQ ID NO: 4071131 - DNA, 25 bp, Homo sapien
cacagttcggtgagagcatttacac

SEQ ID NO: 4071132 - DNA, 25 bp, Homo sapien
cattccccttgaagaaaagcgggcg

SEQ ID NO: 4071133 - DNA, 25 bp, Homo sapien
tatcttcaaagtcaatgccgcctac

SEQ ID NO: 4071134 - DNA, 25 bp, Homo sapien
atcacatccatttgatcagcagggt

SEQ ID NO: 4071135 - DNA, 25 bp, Homo sapien
aaagcgggcgatgttatcttcaaag

SEQ ID NO: 4071136 - DNA, 25 bp, Homo sapien
gaaaccatgattacattgttagctg

SEQ ID NO: 4071137 - DNA, 25 bp, Homo sapien
gtcattgccaatagcagaaaccatg

SEQ ID NO: 4071138 - DNA, 25 bp, Homo sapien
tgccaatagcagaaaccatgattac

SEQ ID NO: 4071139 - DNA, 25 bp, Homo sapien
taaagaggtccgtcattgccaatag

SEQ ID NO: 4071140 - DNA, 25 bp, Homo sapien
gaaggcgtccaaaaaccaagatgtg

SEQ ID NO: 4071141 - DNA, 25 bp, Homo sapien
ggatgatccatgaagtccgggccgc

SEQ ID NO: 4071142 - DNA, 25 bp, Homo sapien
gggccgccgatgctgaggtttaaca

SEQ ID NO: 4071143 - DNA, 25 bp, Homo sapien
aacacgtcgatcttctttaaaatgg

SEQ ID NO: 4071144 - DNA, 25 bp, Homo sapien
cacacctgccacgaatgtgccatgg

SEQ ID NO: 4071145 - DNA, 25 bp, Homo sapien
agcaaatccttggcactccctcatg

SEQ ID NO: 4071146 - DNA, 25 bp, Homo sapien
tgtgaagttctgcatctggagcaaa

SEQ ID NO: 4071147 - DNA, 25 bp, Homo sapien
aaagaccctgaaaatgtgaagttct

SEQ ID NO: 4071148 - DNA, 25 bp, Homo sapien
gcccagtgtcaaaaacagcaactct

SEQ ID NO: 4071149 - DNA, 25 bp, Homo sapien
catcgtccagcgttcgctcgttggt

SEQ ID NO: 4071150 - DNA, 25 bp, Homo sapien
cgctcgttggtccagttggttctct

SEQ ID NO: 4071151 - DNA, 25 bp, Homo sapien
tgcttctcgctcagcccagtgtcaa

SEQ ID NO: 4071152 - DNA, 25 bp, Homo sapien
tgtatatcccataagcaccttccct

SEQ ID NO: 4071153 - DNA, 25 bp, Homo sapien
accttccctgggtaatagcacacac

SEQ ID NO: 4071154 - DNA, 25 bp, Homo sapien
tatatcccataagcaccttccctgg

SEQ ID NO: 4071155 - DNA, 25 bp, Homo sapien
gcaccttccctgggtaatagcacac

SEQ ID NO: 4071156 - DNA, 25 bp, Homo sapien
caccgggtttcattgcagggtactg

SEQ ID NO: 4071157 - DNA, 25 bp, Homo sapien
ggacgtgatgattgccacttctggc

SEQ ID NO: 4071158 - DNA, 25 bp, Homo sapien
gaatgccttcccgtagcatgccaga

SEQ ID NO: 4071159 - DNA, 25 bp, Homo sapien
tcagcagccgtctgctcgaatgcct

SEQ ID NO: 4071160 - DNA, 25 bp, Homo sapien
tcaaaatcactagggtagtcactgg

SEQ ID NO: 4071161 - DNA, 25 bp, Homo sapien
caagtgttagcagccccgctttctg

SEQ ID NO: 4071162 - DNA, 25 bp, Homo sapien
gcatacttgagggaacgaaagactt

SEQ ID NO: 4071163 - DNA, 25 bp, Homo sapien
tagtcactggatggattgtttcgag

SEQ ID NO: 4071164 - DNA, 25 bp, Homo sapien
agcagccagatgttgacaagcttca

SEQ ID NO: 4071165 - DNA, 25 bp, Homo sapien
catggggccttttcaaaagatttct

SEQ ID NO: 4071166 - DNA, 25 bp, Homo sapien
cacagagcaaaaccacgagcagaag

SEQ ID NO: 4071167 - DNA, 25 bp, Homo sapien
cacaactgttgatgagaattccacc

SEQ ID NO: 4071168 - DNA, 25 bp, Homo sapien
tgtaccacagaaccaacgtccaatg

SEQ ID NO: 4071169 - DNA, 25 bp, Homo sapien
tcaggccgtgacgactgagtcctgt

SEQ ID NO: 4071170 - DNA, 25 bp, Homo sapien
ggtcacaagcgaatatgatcataaa

SEQ ID NO: 4071171 - DNA, 25 bp, Homo sapien
tcttggaaataaggcttctctcact

SEQ ID NO: 4071172 - DNA, 25 bp, Homo sapien
taattcactcaaaggtaaagactct

SEQ ID NO: 4071173 - DNA, 25 bp, Homo sapien
gatgttctcttacaacttaggcagg

SEQ ID NO: 4071174 - DNA, 25 bp, Homo sapien
ttcaacctgttctaaaataattcac

SEQ ID NO: 4071175 - DNA, 25 bp, Homo sapien
tcttagacctaactgggttaaatca

SEQ ID NO: 4071176 - DNA, 25 bp, Homo sapien
gagaggtaagcagacaagcagcagc

SEQ ID NO: 4071177 - DNA, 25 bp, Homo sapien
cgccgacccagcgtgccctgtctgt

SEQ ID NO: 4071178 - DNA, 25 bp, Homo sapien
cattcggggctgtttactcccaact

SEQ ID NO: 4071179 - DNA, 25 bp, Homo sapien
ggcgaacacgcctgggcactccatt

SEQ ID NO: 4071180 - DNA, 25 bp, Homo sapien
aactctcgcgagactgggcgaccgg

SEQ ID NO: 4071181 - DNA, 25 bp, Homo sapien
taatttcttgcaatcactcctaaga

SEQ ID NO: 4071182 - DNA, 25 bp, Homo sapien
gaccactgttgttcatgttaatttc

SEQ ID NO: 4071183 - DNA, 25 bp, Homo sapien
acgtgtcagcttttaatcagttatg

SEQ ID NO: 4071184 - DNA, 25 bp, Homo sapien
ttttaatcagttatgaccactgttg

SEQ ID NO: 4071185 - DNA, 25 bp, Homo sapien
ccacagtggtccaatcaactttcaa

SEQ ID NO: 4071186 - DNA, 25 bp, Homo sapien
ccatccacagtggtccaatcaactt

SEQ ID NO: 4071187 - DNA, 25 bp, Homo sapien
tcccacattcttaatgacaccccat

SEQ ID NO: 4071188 - DNA, 25 bp, Homo sapien
ttcttaatgacaccccatccacagt

SEQ ID NO: 4071189 - DNA, 25 bp, Homo sapien
atctttcactgcagctatggacagc

SEQ ID NO: 4071190 - DNA, 25 bp, Homo sapien
tgcagctatggacagctcggcacca

SEQ ID NO: 4071191 - DNA, 25 bp, Homo sapien
cactgcagctatggacagctcggca

SEQ ID NO: 4071192 - DNA, 25 bp, Homo sapien
tggacagctcggcaccacatttgca

SEQ ID NO: 4071193 - DNA, 25 bp, Homo sapien
caatctaagacattactggaccacg

SEQ ID NO: 4071194 - DNA, 25 bp, Homo sapien
gatggattccatacctaatttatca

SEQ ID NO: 4071195 - DNA, 25 bp, Homo sapien
tcatcactgacaaggtgtgttcacc

SEQ ID NO: 4071196 - DNA, 25 bp, Homo sapien
tattctcatcacgtaacactgatgg

SEQ ID NO: 4071197 - DNA, 25 bp, Homo sapien
tttcaaagcactaggtacatggtcc

SEQ ID NO: 4071198 - DNA, 25 bp, Homo sapien
aatcctgtaggcaatgtcatgggca

SEQ ID NO: 4071199 - DNA, 25 bp, Homo sapien
tacatggtcctcaaaaatggttggc

SEQ ID NO: 4071200 - DNA, 25 bp, Homo sapien
gacatgatctaagcgtggaagagct

SEQ ID NO: 4071201 - DNA, 25 bp, Homo sapien
ggctgtgcaggataaggcttcctta

SEQ ID NO: 4071202 - DNA, 25 bp, Homo sapien
caggctgtgcaggataaggcttcct

SEQ ID NO: 4071203 - DNA, 25 bp, Homo sapien
gctgtgcaggataaggcttccttac

SEQ ID NO: 4071204 - DNA, 25 bp, Homo sapien
tcaggctgtgcaggataaggcttcc

SEQ ID NO: 4071205 - DNA, 25 bp, Homo sapien
acggttgagaatatttgctccccac

SEQ ID NO: 4071206 - DNA, 25 bp, Homo sapien
tagtgaacggttgagaatatttgct

SEQ ID NO: 4071207 - DNA, 25 bp, Homo sapien
ccagagccattcaggcatatactgt

SEQ ID NO: 4071208 - DNA, 25 bp, Homo sapien
ccattcaggcatatactgtgcaaaa

SEQ ID NO: 4071209 - DNA, 25 bp, Homo sapien
caatatcctgtggtccttttggaaa

SEQ ID NO: 4071210 - DNA, 25 bp, Homo sapien
gctacatagaaagggattagactct

SEQ ID NO: 4071211 - DNA, 25 bp, Homo sapien
gctgtcatgctggtggctacataga

SEQ ID NO: 4071212 - DNA, 25 bp, Homo sapien
tagacttttggcgaaggcaccaacc

SEQ ID NO: 4071213 - DNA, 25 bp, Homo sapien
catcttccagtaagtaacatctgac

SEQ ID NO: 4071214 - DNA, 25 bp, Homo sapien
actagcggcggcaatgttcacattt

SEQ ID NO: 4071215 - DNA, 25 bp, Homo sapien
aacatggaccatcaaactagcggcg

SEQ ID NO: 4071216 - DNA, 25 bp, Homo sapien
gaaggtagatctcacgaccgctgct

SEQ ID NO: 4071217 - DNA, 25 bp, Homo sapien
atactgcgggtagggataaaacaca

SEQ ID NO: 4071218 - DNA, 25 bp, Homo sapien
tcaagtcggttctagtatctacaag

SEQ ID NO: 4071219 - DNA, 25 bp, Homo sapien
tactatctggcttgaatgagtggca

SEQ ID NO: 4071220 - DNA, 25 bp, Homo sapien
cacacggacagggagttattttaca

SEQ ID NO: 4071221 - DNA, 25 bp, Homo sapien
gaagggcgcatgctatacactctcc

SEQ ID NO: 4071222 - DNA, 25 bp, Homo sapien
aatagctccttgaataatgcatccg

SEQ ID NO: 4071223 - DNA, 25 bp, Homo sapien
aaacaccacattaaattcaatagct

SEQ ID NO: 4071224 - DNA, 25 bp, Homo sapien
tgcatccgacttcacagaaaagatt

SEQ ID NO: 4071225 - DNA, 25 bp, Homo sapien
cacattaaattcaatagctccttga

SEQ ID NO: 4071226 - DNA, 25 bp, Homo sapien
tataccaggctccaaccaaagctag

SEQ ID NO: 4071227 - DNA, 25 bp, Homo sapien
cggcccatcttccatactgcttgat

SEQ ID NO: 4071228 - DNA, 25 bp, Homo sapien
taaaatgcagcctgatcaggctgta

SEQ ID NO: 4071229 - DNA, 25 bp, Homo sapien
tttttctggccgtataccaggctcc

SEQ ID NO: 4071230 - DNA, 25 bp, Homo sapien
gacctggcgatttccctgtacaaga

SEQ ID NO: 4071231 - DNA, 25 bp, Homo sapien
atagcaattgcaagacctggcgatt

SEQ ID NO: 4071232 - DNA, 25 bp, Homo sapien
gcgatttccctgtacaagaggtaga

SEQ ID NO: 4071233 - DNA, 25 bp, Homo sapien
tacaagaggtagaaactgtcaacag

SEQ ID NO: 4071234 - DNA, 25 bp, Homo sapien
ccagatctgcatgagaggaagccgc

SEQ ID NO: 4071235 - DNA, 25 bp, Homo sapien
acgggcacggtatcagagttttcac

SEQ ID NO: 4071236 - DNA, 25 bp, Homo sapien
gatatgctgatgacgggcacggtat

SEQ ID NO: 4071237 - DNA, 25 bp, Homo sapien
agatctgcatgagaggaagccgcgc

SEQ ID NO: 4071238 - DNA, 25 bp, Homo sapien
ggctccgtccttctcttaaggccaa

SEQ ID NO: 4071239 - DNA, 25 bp, Homo sapien
cagttctgggccgtcagcagtatgt

SEQ ID NO: 4071240 - DNA, 25 bp, Homo sapien
gcagtatgtggctccgtccttctct

SEQ ID NO: 4071241 - DNA, 25 bp, Homo sapien
tctgggccgtcagcagtatgtggct

SEQ ID NO: 4071242 - DNA, 25 bp, Homo sapien
agaggagatgcacccactgcagagg

SEQ ID NO: 4071243 - DNA, 25 bp, Homo sapien
gcacccactgcagaggtgagtacag

SEQ ID NO: 4071244 - DNA, 25 bp, Homo sapien
gatgcacccactgcagaggtgagta

SEQ ID NO: 4071245 - DNA, 25 bp, Homo sapien
ggagatgcacccactgcagaggtga

SEQ ID NO: 4071246 - DNA, 25 bp, Homo sapien
actgggatgtgaccggccggatctc

SEQ ID NO: 4071247 - DNA, 25 bp, Homo sapien
tgagcctaaagagcagcaacatgga

SEQ ID NO: 4071248 - DNA, 25 bp, Homo sapien
tataggactaaacgcacaatgaagc

SEQ ID NO: 4071249 - DNA, 25 bp, Homo sapien
catactctgcgtcagcactatgaca

SEQ ID NO: 4071250 - DNA, 25 bp, Homo sapien
tgcaggccggcaaagtcttccaaac

SEQ ID NO: 4071251 - DNA, 25 bp, Homo sapien
ctgcaggccggcaaagtcttccaaa

SEQ ID NO: 4071252 - DNA, 25 bp, Homo sapien
gcgccgcgccctcacgtgacccgcg

SEQ ID NO: 4071253 - DNA, 25 bp, Homo sapien
cgccgcgccctcacgtgacccgcgt

SEQ ID NO: 4071254 - DNA, 25 bp, Homo sapien
catttcacatagagttggtgttcct

SEQ ID NO: 4071255 - DNA, 25 bp, Homo sapien
cgtgttttgccagcaagaattgaaa

SEQ ID NO: 4071256 - DNA, 25 bp, Homo sapien
ccctgaaacagtgtatagtattgct

SEQ ID NO: 4071257 - DNA, 25 bp, Homo sapien
tggtgacaggcgctggtaatcctag

SEQ ID NO: 4071258 - DNA, 25 bp, Homo sapien
gagtaacaacctaggcaccgtggct

SEQ ID NO: 4071259 - DNA, 25 bp, Homo sapien
cagaggtgcatttggtttgggtccc

SEQ ID NO: 4071260 - DNA, 25 bp, Homo sapien
gacagtgcgtgtacctccctggtga

SEQ ID NO: 4071261 - DNA, 25 bp, Homo sapien
ttattagatccagacacctgaggtg

SEQ ID NO: 4071262 - DNA, 25 bp, Homo sapien
catcctatgaatgtctgtctgaata

SEQ ID NO: 4071263 - DNA, 25 bp, Homo sapien
tgtaacagctgagtacagtgcatag

SEQ ID NO: 4071264 - DNA, 25 bp, Homo sapien
catagttagctgaaagtactttctg

SEQ ID NO: 4071265 - DNA, 25 bp, Homo sapien
tctatgtccatcctatgaatgtctg

SEQ ID NO: 4071266 - DNA, 25 bp, Homo sapien
cagagagaagggcatagacatgagc

SEQ ID NO: 4071267 - DNA, 25 bp, Homo sapien
gtgacattgggtgaaaaagcagaac

SEQ ID NO: 4071268 - DNA, 25 bp, Homo sapien
tgctgtccaaggagctaagtcccag

SEQ ID NO: 4071269 - DNA, 25 bp, Homo sapien
ttcagagtcctgtgttcccttgggc

SEQ ID NO: 4071270 - DNA, 25 bp, Homo sapien
cacctgccaaagagatgctgcacca

SEQ ID NO: 4071271 - DNA, 25 bp, Homo sapien
tggagacagggacagcgacttcctt

SEQ ID NO: 4071272 - DNA, 25 bp, Homo sapien
gtctctaaagacacctcaaaggcgg

SEQ ID NO: 4071273 - DNA, 25 bp, Homo sapien
gctaagagggacttggaaatccgaa

SEQ ID NO: 4071274 - DNA, 25 bp, Homo sapien
tgctcagagggcactatcgacagcc

SEQ ID NO: 4071275 - DNA, 25 bp, Homo sapien
tcagctgccaagtgtatttagtccc

SEQ ID NO: 4071276 - DNA, 25 bp, Homo sapien
cattttaacacccacgcgagtcagt

SEQ ID NO: 4071277 - DNA, 25 bp, Homo sapien
tgccagacccatgtcccaagggaga

SEQ ID NO: 4071278 - DNA, 25 bp, Homo sapien
tcagaagcccattcgaggcttcttc

SEQ ID NO: 4071279 - DNA, 25 bp, Homo sapien
ctgggagcgagtggcccggacgctg

SEQ ID NO: 4071280 - DNA, 25 bp, Homo sapien
gggctgagagctagagaggacgggt

SEQ ID NO: 4071281 - DNA, 25 bp, Homo sapien
cccattcgaggcttcttccggaggg

SEQ ID NO: 4071282 - DNA, 25 bp, Homo sapien
catgcatccggagtcaactcctggg

SEQ ID NO: 4071283 - DNA, 25 bp, Homo sapien
gccctgggcgcatgcatccggagtc

SEQ ID NO: 4071284 - DNA, 25 bp, Homo sapien
cttggccatgtagtcacggagcatc

SEQ ID NO: 4071285 - DNA, 25 bp, Homo sapien
catgtagtcacggagcatctgccgc

SEQ ID NO: 4071286 - DNA, 25 bp, Homo sapien
ctggacagctgggtccggcgcttgg

SEQ ID NO: 4071287 - DNA, 25 bp, Homo sapien
catggccactgagcgaaaagctgct

SEQ ID NO: 4071288 - DNA, 25 bp, Homo sapien
ttgggccgcctggtctgtctcccgg

SEQ ID NO: 4071289 - DNA, 25 bp, Homo sapien
tcctctaggcctgactcgggtgcag

SEQ ID NO: 4071290 - DNA, 25 bp, Homo sapien
gtcaggttgggtgtcgccaggaggc

SEQ ID NO: 4071291 - DNA, 25 bp, Homo sapien
gccttgcggagcacacccagccgct

SEQ ID NO: 4071292 - DNA, 25 bp, Homo sapien
tgcccagcatctggcggtgggtgaa

SEQ ID NO: 4071293 - DNA, 25 bp, Homo sapien
ggctgcagccggcagtgtcctggga

SEQ ID NO: 4071294 - DNA, 25 bp, Homo sapien
tgggggcggagctgctggtagaaga

SEQ ID NO: 4071295 - DNA, 25 bp, Homo sapien
ctgggggcggagctgctggtagaag

SEQ ID NO: 4071296 - DNA, 25 bp, Homo sapien
gggggcggagctgctggtagaagac

SEQ ID NO: 4071297 - DNA, 25 bp, Homo sapien
ctggaagagcaccaggcctggtgtg

SEQ ID NO: 4071298 - DNA, 25 bp, Homo sapien
tggaagagcaccaggcctggtgtgg

SEQ ID NO: 4071299 - DNA, 25 bp, Homo sapien
atctcccgccgccgagagctggaag

SEQ ID NO: 4071300 - DNA, 25 bp, Homo sapien
tcccgccgccgagagctggaagagc

SEQ ID NO: 4071301 - DNA, 25 bp, Homo sapien
tgagggcaagggcgggacgacggca

SEQ ID NO: 4071302 - DNA, 25 bp, Homo sapien
agggcaagggcgggacgacggcagc

SEQ ID NO: 4071303 - DNA, 25 bp, Homo sapien
ctgagggcaagggcgggacgacggc

SEQ ID NO: 4071304 - DNA, 25 bp, Homo sapien
ggcaagggcgggacgacggcagcca

SEQ ID NO: 4071305 - DNA, 25 bp, Homo sapien
tgcagccgccactggatcttaggct

SEQ ID NO: 4071306 - DNA, 25 bp, Homo sapien
aatgcagggagggagtcgatcctgg

SEQ ID NO: 4071307 - DNA, 25 bp, Homo sapien
ctatggtcggtgctttcaggcgctc

SEQ ID NO: 4071308 - DNA, 25 bp, Homo sapien
gagggagtcgatcctggaaggaaga

SEQ ID NO: 4071309 - DNA, 25 bp, Homo sapien
gctcgtccactaggtagagagagaa

SEQ ID NO: 4071310 - DNA, 25 bp, Homo sapien
ggaaggcgctcgtccactaggtaga

SEQ ID NO: 4071311 - DNA, 25 bp, Homo sapien
ttccacttcagcatcggcaccaggg

SEQ ID NO: 4071312 - DNA, 25 bp, Homo sapien
ggcgctcgtccactaggtagagaga

SEQ ID NO: 4071313 - DNA, 25 bp, Homo sapien
gatgtggccgaacttgggagctgag

SEQ ID NO: 4071314 - DNA, 25 bp, Homo sapien
atgtggccgaacttgggagctgagc

SEQ ID NO: 4071315 - DNA, 25 bp, Homo sapien
tggacagacagaacaagtgggaaag

SEQ ID NO: 4071316 - DNA, 25 bp, Homo sapien
tcaccaattctgaccgacagtccgg

SEQ ID NO: 4071317 - DNA, 25 bp, Homo sapien
tgccagccctgaacaggtgccgctt

SEQ ID NO: 4071318 - DNA, 25 bp, Homo sapien
tgtgctcgaggcacgcctacgaatg

SEQ ID NO: 4071319 - DNA, 25 bp, Homo sapien
gatccactgcgtgtttgggccacag

SEQ ID NO: 4071320 - DNA, 25 bp, Homo sapien
gtaagcagcagcctctagtgaccat

SEQ ID NO: 4071321 - DNA, 25 bp, Homo sapien
cagcagagccgctggtaagcagcag

SEQ ID NO: 4071322 - DNA, 25 bp, Homo sapien
tcatccagggttgagtttggtttgc

SEQ ID NO: 4071323 - DNA, 25 bp, Homo sapien
gggcggggcggtgttgtgtgccact

SEQ ID NO: 4071324 - DNA, 25 bp, Homo sapien
tggggcggggcggtgttgtgtgcca

SEQ ID NO: 4071325 - DNA, 25 bp, Homo sapien
ggcggggcggtgttgtgtgccactc

SEQ ID NO: 4071326 - DNA, 25 bp, Homo sapien
ggggcggggcggtgttgtgtgccac

SEQ ID NO: 4071327 - DNA, 25 bp, Homo sapien
ctgggtacagacgagatgaagagta

SEQ ID NO: 4071328 - DNA, 25 bp, Homo sapien
ccctttctggcacgaagcctctgcc

SEQ ID NO: 4071329 - DNA, 25 bp, Homo sapien
caggtactgggtaagcaggacacgt

SEQ ID NO: 4071330 - DNA, 25 bp, Homo sapien
gcaggacacgttcccctttctggca

SEQ ID NO: 4071331 - DNA, 25 bp, Homo sapien
tctgcccaacgccacgaagaggagt

SEQ ID NO: 4071332 - DNA, 25 bp, Homo sapien
agggtgcgcagtgaagtctgcccaa

SEQ ID NO: 4071333 - DNA, 25 bp, Homo sapien
tcagggtccctgtagatttgccgca

SEQ ID NO: 4071334 - DNA, 25 bp, Homo sapien
agcatcttcactccggtgcggtcac

SEQ ID NO: 4071335 - DNA, 25 bp, Homo sapien
gggctcaagggtcgcgacatgctca

SEQ ID NO: 4071336 - DNA, 25 bp, Homo sapien
ctcaacagggcggagttcagttcgt

SEQ ID NO: 4071337 - DNA, 25 bp, Homo sapien
aagggtcgcgacatgctcaacaggg

SEQ ID NO: 4071338 - DNA, 25 bp, Homo sapien
aacagggcggagttcagttcgttag

SEQ ID NO: 4071339 - DNA, 25 bp, Homo sapien
acaggcagacggctcccgagcggct

SEQ ID NO: 4071340 - DNA, 25 bp, Homo sapien
gctcccgagcggctgcagatggcca

SEQ ID NO: 4071341 - DNA, 25 bp, Homo sapien
agacggctcccgagcggctgcagat

SEQ ID NO: 4071342 - DNA, 25 bp, Homo sapien
ggctccacaggcagacggctcccga

SEQ ID NO: 4071343 - DNA, 25 bp, Homo sapien
tagtcagagcggacggccagcagag

SEQ ID NO: 4071344 - DNA, 25 bp, Homo sapien
tgtttaccaaacttccacacggcac

SEQ ID NO: 4071345 - DNA, 25 bp, Homo sapien
cacacggcacagtggtagtcagagc

SEQ ID NO: 4071346 - DNA, 25 bp, Homo sapien
acctgcattgcctgcagaagggttg

SEQ ID NO: 4071347 - DNA, 25 bp, Homo sapien
gaggaaagtgtatataagggcctta

SEQ ID NO: 4071348 - DNA, 25 bp, Homo sapien
agtgagggaggaaagtgtatataag

SEQ ID NO: 4071349 - DNA, 25 bp, Homo sapien
ggtcaggtagcaggtcagccagtga

SEQ ID NO: 4071350 - DNA, 25 bp, Homo sapien
gggtcaggtagcaggtcagccagtg

SEQ ID NO: 4071351 - DNA, 25 bp, Homo sapien
atgtcaccacttgccggacaggtcc

SEQ ID NO: 4071352 - DNA, 25 bp, Homo sapien
gcatgtcaccacttgccggacaggt

SEQ ID NO: 4071353 - DNA, 25 bp, Homo sapien
tcaccacttgccggacaggtccctg

SEQ ID NO: 4071354 - DNA, 25 bp, Homo sapien
gtgcatgtcaccacttgccggacag

SEQ ID NO: 4071355 - DNA, 25 bp, Homo sapien
tgcgtccaggtttcccaaggaattg

SEQ ID NO: 4071356 - DNA, 25 bp, Homo sapien
ctggatgcgtccaggtttcccaagg

SEQ ID NO: 4071357 - DNA, 25 bp, Homo sapien
tggatgcgtccaggtttcccaagga

SEQ ID NO: 4071358 - DNA, 25 bp, Homo sapien
gatgcgtccaggtttcccaaggaat

SEQ ID NO: 4071359 - DNA, 25 bp, Homo sapien
ctggggtcagaacgacctcttggaa

SEQ ID NO: 4071360 - DNA, 25 bp, Homo sapien
tggggtcagaacgacctcttggaaa

SEQ ID NO: 4071361 - DNA, 25 bp, Homo sapien
atgatcactgcaagccccccaaatt

SEQ ID NO: 4071362 - DNA, 25 bp, Homo sapien
aggatcagtgcacgagctatgatca

SEQ ID NO: 4071363 - DNA, 25 bp, Homo sapien
gatcagtgcacgagctatgatcact

SEQ ID NO: 4071364 - DNA, 25 bp, Homo sapien
ctaaggatcagtgcacgagctatga

SEQ ID NO: 4071365 - DNA, 25 bp, Homo sapien
aggcgagcccgctggaatctcctgt

SEQ ID NO: 4071366 - DNA, 25 bp, Homo sapien
ggaatctcctgtctcgcaagaaagg

SEQ ID NO: 4071367 - DNA, 25 bp, Homo sapien
tctcctgtctcgcaagaaaggatac

SEQ ID NO: 4071368 - DNA, 25 bp, Homo sapien
gaggcgagcccgctggaatctcctg

SEQ ID NO: 4071369 - DNA, 25 bp, Homo sapien
ggcccccgaggatagagaagcggcg

SEQ ID NO: 4071370 - DNA, 25 bp, Homo sapien
tcgccaccgacgtgcccaggatggg

SEQ ID NO: 4071371 - DNA, 25 bp, Homo sapien
gctgcccgaactggggtgtccttcc

SEQ ID NO: 4071372 - DNA, 25 bp, Homo sapien
agcagctctgccaagtggctcgcca

SEQ ID NO: 4071373 - DNA, 25 bp, Homo sapien
gttgctgaggtaagcccagggacac

SEQ ID NO: 4071374 - DNA, 25 bp, Homo sapien
ggttgctgaggtaagcccagggaca

SEQ ID NO: 4071375 - DNA, 25 bp, Homo sapien
ctgtcggttgctgaggtaagcccag

SEQ ID NO: 4071376 - DNA, 25 bp, Homo sapien
tcggttgctgaggtaagcccaggga

SEQ ID NO: 4071377 - DNA, 25 bp, Homo sapien
agcttcttcacactgaccactgtct

SEQ ID NO: 4071378 - DNA, 25 bp, Homo sapien
accactgtcttcttcttagtgcggc

SEQ ID NO: 4071379 - DNA, 25 bp, Homo sapien
ccccagggctggtgtccaccgaggt

SEQ ID NO: 4071380 - DNA, 25 bp, Homo sapien
ggctggtgtccaccgaggtcctgga

SEQ ID NO: 4071381 - DNA, 25 bp, Homo sapien
ccctcgagttcacccctgaaggaca

SEQ ID NO: 4071382 - DNA, 25 bp, Homo sapien
atggaaaggccttgtcaggctcaca

SEQ ID NO: 4071383 - DNA, 25 bp, Homo sapien
gaaaggccttgtcaggctcacacac

SEQ ID NO: 4071384 - DNA, 25 bp, Homo sapien
ggacagcagggagtccccacccctg

SEQ ID NO: 4071385 - DNA, 25 bp, Homo sapien
gggcgcaaaggctacgtctccatga

SEQ ID NO: 4071386 - DNA, 25 bp, Homo sapien
gtctccatgatccaagaggaaccgg

SEQ ID NO: 4071387 - DNA, 25 bp, Homo sapien
ggctacgtctccatgatccaagagg

SEQ ID NO: 4071388 - DNA, 25 bp, Homo sapien
gcaaaggctacgtctccatgatcca

SEQ ID NO: 4071389 - DNA, 25 bp, Homo sapien
cagtcacatccagcacgactcgggg

SEQ ID NO: 4071390 - DNA, 25 bp, Homo sapien
aagcaggtcccgggcagtcaggcca

SEQ ID NO: 4071391 - DNA, 25 bp, Homo sapien
ggccgcttccgataccggcaccctc

SEQ ID NO: 4071392 - DNA, 25 bp, Homo sapien
taccggcaccctccgcggaaaagca

SEQ ID NO: 4071393 - DNA, 25 bp, Homo sapien
tccttggtcacatgcagtgccccat

SEQ ID NO: 4071394 - DNA, 25 bp, Homo sapien
gggttgccggctcccacagcaggtc

SEQ ID NO: 4071395 - DNA, 25 bp, Homo sapien
gaggcccaggggttgccggctccca

SEQ ID NO: 4071396 - DNA, 25 bp, Homo sapien
ccttggtcacatgcagtgccccatt

SEQ ID NO: 4071397 - DNA, 25 bp, Homo sapien
gcctctggcagagtcagtgcgtctc

SEQ ID NO: 4071398 - DNA, 25 bp, Homo sapien
tctggcagagtcagtgcgtctcgcc

SEQ ID NO: 4071399 - DNA, 25 bp, Homo sapien
cctctggcagagtcagtgcgtctcg

SEQ ID NO: 4071400 - DNA, 25 bp, Homo sapien
tggcagagtcagtgcgtctcgccag

SEQ ID NO: 4071401 - DNA, 25 bp, Homo sapien
tcagggacgtcgctcagaccaaggg

SEQ ID NO: 4071402 - DNA, 25 bp, Homo sapien
ccggtcagaaacaatgcagggcgga

SEQ ID NO: 4071403 - DNA, 25 bp, Homo sapien
ccaagggggccggtcagaaacaatg

SEQ ID NO: 4071404 - DNA, 25 bp, Homo sapien
aaagagaggtcagggacgtcgctca

SEQ ID NO: 4071405 - DNA, 25 bp, Homo sapien
tggccacctcgagagactggaagct

SEQ ID NO: 4071406 - DNA, 25 bp, Homo sapien
cctcgagagactggaagctggtaag

SEQ ID NO: 4071407 - DNA, 25 bp, Homo sapien
aagcaccacactggccacctcgaga

SEQ ID NO: 4071408 - DNA, 25 bp, Homo sapien
acactggccacctcgagagactgga

SEQ ID NO: 4071409 - DNA, 25 bp, Homo sapien
actgcgaaacgtgagcctgccgcgg

SEQ ID NO: 4071410 - DNA, 25 bp, Homo sapien
tcgaacacgcgcagtccgcgcggag

SEQ ID NO: 4071411 - DNA, 25 bp, Homo sapien
ggatccgcaataacgacaggccggg

SEQ ID NO: 4071412 - DNA, 25 bp, Homo sapien
tacatctgcgggtccgctcctcgaa

SEQ ID NO: 4071413 - DNA, 25 bp, Homo sapien
gcctcgtcgtggtcgtctggaaaat

SEQ ID NO: 4071414 - DNA, 25 bp, Homo sapien
cccggcctcgtcgtggtcgtctgga

SEQ ID NO: 4071415 - DNA, 25 bp, Homo sapien
gaaaatgggcctcggcgtgatgctc

SEQ ID NO: 4071416 - DNA, 25 bp, Homo sapien
tcgtggtcgtctggaaaatgggcct

SEQ ID NO: 4071417 - DNA, 25 bp, Homo sapien
atctcaagtagaaccccagctttgg

SEQ ID NO: 4071418 - DNA, 25 bp, Homo sapien
ctggcaccacgagggaaatctcaag

SEQ ID NO: 4071419 - DNA, 25 bp, Homo sapien
ccagctttggcactcgggacgggtc

SEQ ID NO: 4071420 - DNA, 25 bp, Homo sapien
tttggcactcgggacgggtcagccc

SEQ ID NO: 4071421 - DNA, 25 bp, Homo sapien
tgtccttgctcacggagtacgcggc

SEQ ID NO: 4071422 - DNA, 25 bp, Homo sapien
gctcacggagtacgcggccagcctg

SEQ ID NO: 4071423 - DNA, 25 bp, Homo sapien
agccaggccgtgtccttgctcacgg

SEQ ID NO: 4071424 - DNA, 25 bp, Homo sapien
caggccgtgtccttgctcacggagt

SEQ ID NO: 4071425 - DNA, 25 bp, Homo sapien
tgaatcagcgatgggtcacagcctg

SEQ ID NO: 4071426 - DNA, 25 bp, Homo sapien
tgttcaaatatagagcccctggagg

SEQ ID NO: 4071427 - DNA, 25 bp, Homo sapien
ttggcacgcatctcaccaggaagtg

SEQ ID NO: 4071428 - DNA, 25 bp, Homo sapien
gaaatggagtcacgcatccctgctg

SEQ ID NO: 4071429 - DNA, 25 bp, Homo sapien
cctgcgggcactgcgaatagcaaga

SEQ ID NO: 4071430 - DNA, 25 bp, Homo sapien
gggttgctgtacaaaccatctgagc

SEQ ID NO: 4071431 - DNA, 25 bp, Homo sapien
aatagcaagacggaggccaaacagc

SEQ ID NO: 4071432 - DNA, 25 bp, Homo sapien
tgccctctgctacatccggagtcag

SEQ ID NO: 4071433 - DNA, 25 bp, Homo sapien
tacatgtgccggtccctgctttcac

SEQ ID NO: 4071434 - DNA, 25 bp, Homo sapien
cgtaggtaggtgagcattcccggac

SEQ ID NO: 4071435 - DNA, 25 bp, Homo sapien
gaagagcagctcgtgtaatgtcctg

SEQ ID NO: 4071436 - DNA, 25 bp, Homo sapien
ccggacccaggcttgtagtgtcgag

SEQ ID NO: 4071437 - DNA, 25 bp, Homo sapien
ccggctttgacctcctgttggacga

SEQ ID NO: 4071438 - DNA, 25 bp, Homo sapien
cagtctctcgccctggcgcagagaa

SEQ ID NO: 4071439 - DNA, 25 bp, Homo sapien
cgctgcgcagcgttggtgagcgccg

SEQ ID NO: 4071440 - DNA, 25 bp, Homo sapien
tgacccatgagcagcgctgcgcagc

SEQ ID NO: 4071441 - DNA, 25 bp, Homo sapien
cacgtgaaggagatctacaagctgg

SEQ ID NO: 4071442 - DNA, 25 bp, Homo sapien
atggcctggtcatcgcccgcagggc

SEQ ID NO: 4071443 - DNA, 25 bp, Homo sapien
ggccacgtgaaggagatctacaagc

SEQ ID NO: 4071444 - DNA, 25 bp, Homo sapien
ctgcacagagatcccgcgtgccagg

SEQ ID NO: 4071445 - DNA, 25 bp, Homo sapien
accgaggtcccggagccaagctgta

SEQ ID NO: 4071446 - DNA, 25 bp, Homo sapien
gggcttggccctcgaagccactggt

SEQ ID NO: 4071447 - DNA, 25 bp, Homo sapien
cgaagccactggtgggcaaattcag

SEQ ID NO: 4071448 - DNA, 25 bp, Homo sapien
cggagccaagctgtacccctgctgg

SEQ ID NO: 4071449 - DNA, 25 bp, Homo sapien
caagacagtcttttcgtgacatcag

SEQ ID NO: 4071450 - DNA, 25 bp, Homo sapien
cacgttgcatacatctgcttgtcca

SEQ ID NO: 4071451 - DNA, 25 bp, Homo sapien
cagtaatatttgtccccacgttgca

SEQ ID NO: 4071452 - DNA, 25 bp, Homo sapien
cattaactctgttgtgttccgccaa

SEQ ID NO: 4071453 - DNA, 25 bp, Homo sapien
catggctctccacgtgtcatctaga

SEQ ID NO: 4071454 - DNA, 25 bp, Homo sapien
tgtcatctagaagtaggctgccgtg

SEQ ID NO: 4071455 - DNA, 25 bp, Homo sapien
aactcagcaaagtccgcctcagaac

SEQ ID NO: 4071456 - DNA, 25 bp, Homo sapien
tggcaaaggtgagttacgaaagtcg

SEQ ID NO: 4071457 - DNA, 25 bp, Homo sapien
ctctggcaaccacgtcgacaataca

SEQ ID NO: 4071458 - DNA, 25 bp, Homo sapien
aatacaacacgaaaatggctcgccg

SEQ ID NO: 4071459 - DNA, 25 bp, Homo sapien
cgtcgacaatacaacacgaaaatgg

SEQ ID NO: 4071460 - DNA, 25 bp, Homo sapien
cacgaaaatggctcgccgtaaaggg

SEQ ID NO: 4071461 - DNA, 25 bp, Homo sapien
gctggcacactttggtgaagaggtc

SEQ ID NO: 4071462 - DNA, 25 bp, Homo sapien
ggcatgcgcacaaaatatgtcttcg

SEQ ID NO: 4071463 - DNA, 25 bp, Homo sapien
tgtcattaagaagttttcaccaggc

SEQ ID NO: 4071464 - DNA, 25 bp, Homo sapien
taagccccacatgcgagcaatcaat

SEQ ID NO: 4071465 - DNA, 25 bp, Homo sapien
gcggatcacctgacatcaggagttc

SEQ ID NO: 4071466 - DNA, 25 bp, Homo sapien
ccagcactttgggaggccgaggcag

SEQ ID NO: 4071467 - DNA, 25 bp, Homo sapien
gtggctcgtgcctgtaattccagca

SEQ ID NO: 4071468 - DNA, 25 bp, Homo sapien
aaaatgttagtctgggccgggtgcg

SEQ ID NO: 4071469 - DNA, 25 bp, Homo sapien
tattgatccctctggaacccgtgga

SEQ ID NO: 4071470 - DNA, 25 bp, Homo sapien
ggatgaaaagctaaggcccctgcag

SEQ ID NO: 4071471 - DNA, 25 bp, Homo sapien
tacacgatatcagattggcagggcc

SEQ ID NO: 4071472 - DNA, 25 bp, Homo sapien
ttcaagagtcctagagccaacagca

SEQ ID NO: 4071473 - DNA, 25 bp, Homo sapien
gggtacccttgagtgtgtttcaggc

SEQ ID NO: 4071474 - DNA, 25 bp, Homo sapien
gcagggtgatgggttgaggttacca

SEQ ID NO: 4071475 - DNA, 25 bp, Homo sapien
ggttgaggttaccatgtagtcatgg

SEQ ID NO: 4071476 - DNA, 25 bp, Homo sapien
aacaccaccaggtggtctatgcggg

SEQ ID NO: 4071477 - DNA, 25 bp, Homo sapien
gatgatggcccaccaataggaggcg

SEQ ID NO: 4071478 - DNA, 25 bp, Homo sapien
gagcaggccgaactcacgtgtgcaa

SEQ ID NO: 4071479 - DNA, 25 bp, Homo sapien
gttcacattcactggctggaccggt

SEQ ID NO: 4071480 - DNA, 25 bp, Homo sapien
gcatgataggcaaggctgggccctc

SEQ ID NO: 4071481 - DNA, 25 bp, Homo sapien
agatgcaatgcaggccagttctgga

SEQ ID NO: 4071482 - DNA, 25 bp, Homo sapien
cagatgcaatgcaggccagttctgg

SEQ ID NO: 4071483 - DNA, 25 bp, Homo sapien
gcagatgcaatgcaggccagttctg

SEQ ID NO: 4071484 - DNA, 25 bp, Homo sapien
tgcagatgcaatgcaggccagttct

SEQ ID NO: 4071485 - DNA, 25 bp, Homo sapien
ggttgccatagggtgtgcatgtccc

SEQ ID NO: 4071486 - DNA, 25 bp, Homo sapien
cacccaagatgggaggagaacagtg

SEQ ID NO: 4071487 - DNA, 25 bp, Homo sapien
ctgacaatatccctgaaagccccag

SEQ ID NO: 4071488 - DNA, 25 bp, Homo sapien
agaaaagacgcgctgacagccggag

SEQ ID NO: 4071489 - DNA, 25 bp, Homo sapien
tgatgttacccatttcacggagtgg

SEQ ID NO: 4071490 - DNA, 25 bp, Homo sapien
aagagaacttaggtgggctggcaac

SEQ ID NO: 4071491 - DNA, 25 bp, Homo sapien
gcatccttactgtggagctccgagg

SEQ ID NO: 4071492 - DNA, 25 bp, Homo sapien
ttaggagccaaatagagcaagcacc

SEQ ID NO: 4071493 - DNA, 25 bp, Homo sapien
tcgcgcagccggttcatgcacaggc

SEQ ID NO: 4071494 - DNA, 25 bp, Homo sapien
ccggactgcgggttttccaccatct

SEQ ID NO: 4071495 - DNA, 25 bp, Homo sapien
agaggcaagcgaagaccttcccggg

SEQ ID NO: 4071496 - DNA, 25 bp, Homo sapien
aggtcgggcatggtgctgacacaca

SEQ ID NO: 4071497 - DNA, 25 bp, Homo sapien
gtacgtcctccctgtgcagcttggc

SEQ ID NO: 4071498 - DNA, 25 bp, Homo sapien
ctgcctcagtacgtcctccctgtgc

SEQ ID NO: 4071499 - DNA, 25 bp, Homo sapien
gcctcagtacgtcctccctgtgcag

SEQ ID NO: 4071500 - DNA, 25 bp, Homo sapien
tcagtacgtcctccctgtgcagctt

SEQ ID NO: 4071501 - DNA, 25 bp, Homo sapien
tcgtagctccgacagagcctgagtt

SEQ ID NO: 4071502 - DNA, 25 bp, Homo sapien
ggctgtcctcgtcgtaatcatcgca

SEQ ID NO: 4071503 - DNA, 25 bp, Homo sapien
aggcccttgatggacggcgtctcca

SEQ ID NO: 4071504 - DNA, 25 bp, Homo sapien
tcatcgcagagctgcacgatctcct

SEQ ID NO: 4071505 - DNA, 25 bp, Homo sapien
gggctggacaggagctgactccaag

SEQ ID NO: 4071506 - DNA, 25 bp, Homo sapien
ggggctggacaggagctgactccaa

SEQ ID NO: 4071507 - DNA, 25 bp, Homo sapien
ctgtgggaaccatagtggtggtgtc

SEQ ID NO: 4071508 - DNA, 25 bp, Homo sapien
tgggaaccatagtggtggtgtctgg

SEQ ID NO: 4071509 - DNA, 25 bp, Homo sapien
tgggatgcaggcccccgtctctgga

SEQ ID NO: 4071510 - DNA, 25 bp, Homo sapien
ggatgcaggcccccgtctctggaag

SEQ ID NO: 4071511 - DNA, 25 bp, Homo sapien
caccaggtaggaagcgctgggttta

SEQ ID NO: 4071512 - DNA, 25 bp, Homo sapien
ccaccaggtaggaagcgctgggttt

SEQ ID NO: 4071513 - DNA, 25 bp, Homo sapien
aagaccaccaggtaggaagcgctgg

SEQ ID NO: 4071514 - DNA, 25 bp, Homo sapien
gaccaccaggtaggaagcgctgggt

SEQ ID NO: 4071515 - DNA, 25 bp, Homo sapien
cttcttgtctcagggagccagtttc

SEQ ID NO: 4071516 - DNA, 25 bp, Homo sapien
ttctctgccaggcaaggggagccca

SEQ ID NO: 4071517 - DNA, 25 bp, Homo sapien
gtttctctgccaggcaaggggagcc

SEQ ID NO: 4071518 - DNA, 25 bp, Homo sapien
ctcagggagccagtttccagctgtt

SEQ ID NO: 4071519 - DNA, 25 bp, Homo sapien
ctcttggtgcccagggaagggacag

SEQ ID NO: 4071520 - DNA, 25 bp, Homo sapien
tcttggtgcccagggaagggacagg

SEQ ID NO: 4071521 - DNA, 25 bp, Homo sapien
cttggtgcccagggaagggacaggt

SEQ ID NO: 4071522 - DNA, 25 bp, Homo sapien
gagcagcggactctgcacttcaagt

SEQ ID NO: 4071523 - DNA, 25 bp, Homo sapien
tcctggttgagcagcggactctgca

SEQ ID NO: 4071524 - DNA, 25 bp, Homo sapien
cccagaagtccctttccttatgaga

SEQ ID NO: 4071525 - DNA, 25 bp, Homo sapien
cctttccttatgagagatgagggtc

SEQ ID NO: 4071526 - DNA, 25 bp, Homo sapien
gggcaggttgagtcaaggcagatga

SEQ ID NO: 4071527 - DNA, 25 bp, Homo sapien
agcagctagcaaggtggagaagcgg

SEQ ID NO: 4071528 - DNA, 25 bp, Homo sapien
ggtggagaagcgggtactggcagaa

SEQ ID NO: 4071529 - DNA, 25 bp, Homo sapien
caggttgagtcaaggcagatgagct

SEQ ID NO: 4071530 - DNA, 25 bp, Homo sapien
tcccttcctggtggaatgctgaggt

SEQ ID NO: 4071531 - DNA, 25 bp, Homo sapien
gcctcccttcctggtggaatgctga

SEQ ID NO: 4071532 - DNA, 25 bp, Homo sapien
cccttcctggtggaatgctgaggtc

SEQ ID NO: 4071533 - DNA, 25 bp, Homo sapien
cctcccttcctggtggaatgctgag

SEQ ID NO: 4071534 - DNA, 25 bp, Homo sapien
cagtgagaaggggggtctgtgcaga

SEQ ID NO: 4071535 - DNA, 25 bp, Homo sapien
gactctagtatatgaggcggtggct

SEQ ID NO: 4071536 - DNA, 25 bp, Homo sapien
gactttgggcaaggcacaacaagaa

SEQ ID NO: 4071537 - DNA, 25 bp, Homo sapien
gctgggacggttgctcagagcacct

SEQ ID NO: 4071538 - DNA, 25 bp, Homo sapien
tcatgatgtctagggtctcagccag

SEQ ID NO: 4071539 - DNA, 25 bp, Homo sapien
gatggccatctcttccagggatcct

SEQ ID NO: 4071540 - DNA, 25 bp, Homo sapien
agggatcctgctctctctggcatac

SEQ ID NO: 4071541 - DNA, 25 bp, Homo sapien
agatggccatctcttccagggatcc

SEQ ID NO: 4071542 - DNA, 25 bp, Homo sapien
ggccatctcttccagggatcctgct

SEQ ID NO: 4071543 - DNA, 25 bp, Homo sapien
gtgtccatgtcagagtacacctcac

SEQ ID NO: 4071544 - DNA, 25 bp, Homo sapien
gcactcctttgctcctggttgccat

SEQ ID NO: 4071545 - DNA, 25 bp, Homo sapien
ggcactcctttgctcctggttgcca

SEQ ID NO: 4071546 - DNA, 25 bp, Homo sapien
caggcactcctttgctcctggttgc

SEQ ID NO: 4071547 - DNA, 25 bp, Homo sapien
cactcctttgctcctggttgccatc

SEQ ID NO: 4071548 - DNA, 25 bp, Homo sapien
aatgcgagtggtgaagacgggagct

SEQ ID NO: 4071549 - DNA, 25 bp, Homo sapien
tcagccctggtgcatcttgtggccc

SEQ ID NO: 4071550 - DNA, 25 bp, Homo sapien
cgatgaagcatgacgatgttgcagg

SEQ ID NO: 4071551 - DNA, 25 bp, Homo sapien
ctctctggtggccaggaatgcgagt

SEQ ID NO: 4071552 - DNA, 25 bp, Homo sapien
gaccgcgtccaagcaagttctgagc

SEQ ID NO: 4071553 - DNA, 25 bp, Homo sapien
ggaagagaagccgttcagccccacg

SEQ ID NO: 4071554 - DNA, 25 bp, Homo sapien
cgcgtccaagcaagttctgagctct

SEQ ID NO: 4071555 - DNA, 25 bp, Homo sapien
cttgcagaccgcgtccaagcaagtt

SEQ ID NO: 4071556 - DNA, 25 bp, Homo sapien
gcttcgcttccgggatcagatgaga

SEQ ID NO: 4071557 - DNA, 25 bp, Homo sapien
ctgaccctgcttcgcttccgggatc

SEQ ID NO: 4071558 - DNA, 25 bp, Homo sapien
tcgcttccgggatcagatgagattg

SEQ ID NO: 4071559 - DNA, 25 bp, Homo sapien
tgaccctgcttcgcttccgggatca

SEQ ID NO: 4071560 - DNA, 25 bp, Homo sapien
tgggctcttgccgtggtctgagctt

SEQ ID NO: 4071561 - DNA, 25 bp, Homo sapien
tgagcttgcaatgccacaagacaca

SEQ ID NO: 4071562 - DNA, 25 bp, Homo sapien
gtctgagcttgcaatgccacaagac

SEQ ID NO: 4071563 - DNA, 25 bp, Homo sapien
ctgcttttacactctgggctcttgc

SEQ ID NO: 4071564 - DNA, 25 bp, Homo sapien
gatttgctagaagactctcctccca

SEQ ID NO: 4071565 - DNA, 25 bp, Homo sapien
gagatttgctagaagactctcctcc

SEQ ID NO: 4071566 - DNA, 25 bp, Homo sapien
agacctggagatttgctagaagact

SEQ ID NO: 4071567 - DNA, 25 bp, Homo sapien
cctggagatttgctagaagactctc

SEQ ID NO: 4071568 - DNA, 25 bp, Homo sapien
ggtgagtggaagacatcagcctgcc

SEQ ID NO: 4071569 - DNA, 25 bp, Homo sapien
ctgctccgggtgagtggaagacatc

SEQ ID NO: 4071570 - DNA, 25 bp, Homo sapien
agtggaagacatcagcctgccccac

SEQ ID NO: 4071571 - DNA, 25 bp, Homo sapien
ccgggtgagtggaagacatcagcct

SEQ ID NO: 4071572 - DNA, 25 bp, Homo sapien
ctaaagtcactttcccaggctttct

SEQ ID NO: 4071573 - DNA, 25 bp, Homo sapien
gtccttacagcatcggtcttcatga

SEQ ID NO: 4071574 - DNA, 25 bp, Homo sapien
caattccctaacgtgcctaaagtca

SEQ ID NO: 4071575 - DNA, 25 bp, Homo sapien
ttgccttctgactgatggccccctt

SEQ ID NO: 4071576 - DNA, 25 bp, Homo sapien
cagttgggtgacaaacgatggcagt

SEQ ID NO: 4071577 - DNA, 25 bp, Homo sapien
cattagctgcgtggcttctctcagg

SEQ ID NO: 4071578 - DNA, 25 bp, Homo sapien
cgatggcagtacaaagagaaggcat

SEQ ID NO: 4071579 - DNA, 25 bp, Homo sapien
tacaagataaaggaggtaccagccc

SEQ ID NO: 4071580 - DNA, 25 bp, Homo sapien
ggaggggtgagagactcttctcaga

SEQ ID NO: 4071581 - DNA, 25 bp, Homo sapien
gaggggtgagagactcttctcagat

SEQ ID NO: 4071582 - DNA, 25 bp, Homo sapien
aggaggggtgagagactcttctcag

SEQ ID NO: 4071583 - DNA, 25 bp, Homo sapien
agattttattgactcctccatgctc

SEQ ID NO: 4071584 - DNA, 25 bp, Homo sapien
tagatgcccgcctgggtgtacactc

SEQ ID NO: 4071585 - DNA, 25 bp, Homo sapien
cctgggtgtagacgccatgctgagt

SEQ ID NO: 4071586 - DNA, 25 bp, Homo sapien
cctgggcatagatgccatcctgggt

SEQ ID NO: 4071587 - DNA, 25 bp, Homo sapien
cgcctgggtgtacactccatcctga

SEQ ID NO: 4071588 - DNA, 25 bp, Homo sapien
ttccgaaccgtggttttcttcatga

SEQ ID NO: 4071589 - DNA, 25 bp, Homo sapien
cgtggttttcttcatgagccgccat

SEQ ID NO: 4071590 - DNA, 25 bp, Homo sapien
accgtggttttcttcatgagccgcc

SEQ ID NO: 4071591 - DNA, 25 bp, Homo sapien
gaaccgtggttttcttcatgagccg

SEQ ID NO: 4071592 - DNA, 25 bp, Homo sapien
tggtggacaagcacataaaggcact

SEQ ID NO: 4071593 - DNA, 25 bp, Homo sapien
tgacctgacatagggattctagcct

SEQ ID NO: 4071594 - DNA, 25 bp, Homo sapien
tcaagacagacagggactatttcag

SEQ ID NO: 4071595 - DNA, 25 bp, Homo sapien
taaatgttgcccctcatggtggaca

SEQ ID NO: 4071596 - DNA, 25 bp, Homo sapien
gctgagtttgaacttgaccctgttg

SEQ ID NO: 4071597 - DNA, 25 bp, Homo sapien
tgagtttgaacttgaccctgttgac

SEQ ID NO: 4071598 - DNA, 25 bp, Homo sapien
tcacacgctgagtttgaacttgacc

SEQ ID NO: 4071599 - DNA, 25 bp, Homo sapien
cacgctgagtttgaacttgaccctg

SEQ ID NO: 4071600 - DNA, 25 bp, Homo sapien
tctgttaccaaaacggagatggccg

SEQ ID NO: 4071601 - DNA, 25 bp, Homo sapien
agatggccggatcgctaggctgcca

SEQ ID NO: 4071602 - DNA, 25 bp, Homo sapien
caagtcactaggagtctgttgtgca

SEQ ID NO: 4071603 - DNA, 25 bp, Homo sapien
ccccgggagtgagatcacagcaagt

SEQ ID NO: 4071604 - DNA, 25 bp, Homo sapien
agccagctgcggcatccagtcccat

SEQ ID NO: 4071605 - DNA, 25 bp, Homo sapien
agccagacccaatgcaaagagccag

SEQ ID NO: 4071606 - DNA, 25 bp, Homo sapien
ttgatcaaaagtcccttggtgtcca

SEQ ID NO: 4071607 - DNA, 25 bp, Homo sapien
gtaaaaatgacagccagacccaatg

SEQ ID NO: 4071608 - DNA, 25 bp, Homo sapien
tgtgcacacgtgttgtccctggcta

SEQ ID NO: 4071609 - DNA, 25 bp, Homo sapien
tagaatctatcatgtctgcccacgc

SEQ ID NO: 4071610 - DNA, 25 bp, Homo sapien
gagtagcagcggttgttaccacgcg

SEQ ID NO: 4071611 - DNA, 25 bp, Homo sapien
caaatgttgagatcgaccagcctgt

SEQ ID NO: 4071612 - DNA, 25 bp, Homo sapien
caccagcatggcacatgtatacata

SEQ ID NO: 4071613 - DNA, 25 bp, Homo sapien
tgtaactaacctgcacaatgtgcac

SEQ ID NO: 4071614 - DNA, 25 bp, Homo sapien
agatgacacgttagtgggtgcagcg

SEQ ID NO: 4071615 - DNA, 25 bp, Homo sapien
tacctaatgctagatgacacgttag

SEQ ID NO: 4071616 - DNA, 25 bp, Homo sapien
caaagccaagtgtgagggttacctc

SEQ ID NO: 4071617 - DNA, 25 bp, Homo sapien
gatgtctagagataaagggcttgcc

SEQ ID NO: 4071618 - DNA, 25 bp, Homo sapien
cgtaaccgtatgagcacagagccag

SEQ ID NO: 4071619 - DNA, 25 bp, Homo sapien
ccttcaacaagctggccaagtggtg

SEQ ID NO: 4071620 - DNA, 25 bp, Homo sapien
tcttccagacggagaacctgggagc

SEQ ID NO: 4071621 - DNA, 25 bp, Homo sapien
ggcagctggcggtcatttacatccc

SEQ ID NO: 4071622 - DNA, 25 bp, Homo sapien
tgcctgaagacagagcaagcactcc

SEQ ID NO: 4071623 - DNA, 25 bp, Homo sapien
caagactgggatggtcaactctgcc

SEQ ID NO: 4071624 - DNA, 25 bp, Homo sapien
tcatgaatggcctacaggaaggcct

SEQ ID NO: 4071625 - DNA, 25 bp, Homo sapien
ggtgagcagcaatccatcatgaatg

SEQ ID NO: 4071626 - DNA, 25 bp, Homo sapien
gaaggcctcggcttttggacataaa

SEQ ID NO: 4071627 - DNA, 25 bp, Homo sapien
gaaacccacagccatgtgttaatgg

SEQ ID NO: 4071628 - DNA, 25 bp, Homo sapien
tgacgaaaatcaacttggcctggcc

SEQ ID NO: 4071629 - DNA, 25 bp, Homo sapien
caagtctaacatcttgagggcaggc

SEQ ID NO: 4071630 - DNA, 25 bp, Homo sapien
gttacacagcgccatctagaccagt

SEQ ID NO: 4071631 - DNA, 25 bp, Homo sapien
ggcccactcacgttatgaaggataa

SEQ ID NO: 4071632 - DNA, 25 bp, Homo sapien
taaggacacagtagacttgaacacc

SEQ ID NO: 4071633 - DNA, 25 bp, Homo sapien
tgtagaacaccccattcacgagtag

SEQ ID NO: 4071634 - DNA, 25 bp, Homo sapien
gatgggccattcctagtgagacaca

SEQ ID NO: 4071635 - DNA, 25 bp, Homo sapien
tcacgagtagcatagaaacagtcac

SEQ ID NO: 4071636 - DNA, 25 bp, Homo sapien
ctgagtttaagggcacagtgctcca

SEQ ID NO: 4071637 - DNA, 25 bp, Homo sapien
cacagtgctccaggtggctggccaa

SEQ ID NO: 4071638 - DNA, 25 bp, Homo sapien
caggtggctggccaagtctgcccag

SEQ ID NO: 4071639 - DNA, 25 bp, Homo sapien
tgctccaggtggctggccaagtctg

SEQ ID NO: 4071640 - DNA, 25 bp, Homo sapien
aaccactgctacaatgaggaggcaa

SEQ ID NO: 4071641 - DNA, 25 bp, Homo sapien
agtctttctagccaatcactgggtc

SEQ ID NO: 4071642 - DNA, 25 bp, Homo sapien
caaggtgacacagtctaatcagaca

SEQ ID NO: 4071643 - DNA, 25 bp, Homo sapien
cagccatgtctattaccaggaaaag

SEQ ID NO: 4071644 - DNA, 25 bp, Homo sapien
tggggtgcgtgttcccactcactgg

SEQ ID NO: 4071645 - DNA, 25 bp, Homo sapien
ctttgccgcacatgctgatatggct

SEQ ID NO: 4071646 - DNA, 25 bp, Homo sapien
gcgtatgccatggagggacctcaga

SEQ ID NO: 4071647 - DNA, 25 bp, Homo sapien
ccagctaccacagaaaatgcctgcg

SEQ ID NO: 4071648 - DNA, 25 bp, Homo sapien
gaacgatagatactagaggatggga

SEQ ID NO: 4071649 - DNA, 25 bp, Homo sapien
tgggcaaactcatgactgctcctgc

SEQ ID NO: 4071650 - DNA, 25 bp, Homo sapien
aagagatgtcggctagtgggtgcag

SEQ ID NO: 4071651 - DNA, 25 bp, Homo sapien
tgttctcactgatgtatgtcagcta

SEQ ID NO: 4071652 - DNA, 25 bp, Homo sapien
taggcccgagagcatccatatggtg

SEQ ID NO: 4071653 - DNA, 25 bp, Homo sapien
cagtgtgtaaaagacagtgatgccc

SEQ ID NO: 4071654 - DNA, 25 bp, Homo sapien
ccatatggtgggacatcacgcagtc

SEQ ID NO: 4071655 - DNA, 25 bp, Homo sapien
caggcaccccggtatattgagtata

SEQ ID NO: 4071656 - DNA, 25 bp, Homo sapien
agtcctaacctttgcagcggcctgg

SEQ ID NO: 4071657 - DNA, 25 bp, Homo sapien
tcatttgtagggagacctctagtcc

SEQ ID NO: 4071658 - DNA, 25 bp, Homo sapien
tctcagagccaggtaaggtactgtc

SEQ ID NO: 4071659 - DNA, 25 bp, Homo sapien
tctccttagaacaagctcagggtgg

SEQ ID NO: 4071660 - DNA, 25 bp, Homo sapien
cagacactgacggacatttaatttt

SEQ ID NO: 4071661 - DNA, 25 bp, Homo sapien
agacactgacggacatttaattttt

SEQ ID NO: 4071662 - DNA, 25 bp, Homo sapien
gatgaacctcccagtagaaaatgca

SEQ ID NO: 4071663 - DNA, 25 bp, Homo sapien
ttcagcatttcaggatcaccggagc

SEQ ID NO: 4071664 - DNA, 25 bp, Homo sapien
ccaacatgtcaggtaggaagctcac

SEQ ID NO: 4071665 - DNA, 25 bp, Homo sapien
cctgagtgaggccatatgaacccca

SEQ ID NO: 4071666 - DNA, 25 bp, Homo sapien
aattccctaatgccagcggaattcc

SEQ ID NO: 4071667 - DNA, 25 bp, Homo sapien
ctaatgccagcggaattccctaatg

SEQ ID NO: 4071668 - DNA, 25 bp, Homo sapien
gaattccctaatgccagcggaattc

SEQ ID NO: 4071669 - DNA, 25 bp, Homo sapien
tccctaatgccagcggaattcccta

SEQ ID NO: 4071670 - DNA, 25 bp, Homo sapien
tgacccgtgcggtacgctattacag

SEQ ID NO: 4071671 - DNA, 25 bp, Homo sapien
tacagttaaaccatgtgggagggaa

SEQ ID NO: 4071672 - DNA, 25 bp, Homo sapien
ggacatggcttcagagggcgtcttc

SEQ ID NO: 4071673 - DNA, 25 bp, Homo sapien
acatgtgggactaccaggctgtgac

SEQ ID NO: 4071674 - DNA, 25 bp, Homo sapien
ctgcaggcgttgccctctacccaga

SEQ ID NO: 4071675 - DNA, 25 bp, Homo sapien
tctacccagaggaatccaggtcctg

SEQ ID NO: 4071676 - DNA, 25 bp, Homo sapien
gccctctacccagaggaatccaggt

SEQ ID NO: 4071677 - DNA, 25 bp, Homo sapien
aggcgttgccctctacccagaggaa

SEQ ID NO: 4071678 - DNA, 25 bp, Homo sapien
cggagcccttcgctgtggcgcgaat

SEQ ID NO: 4071679 - DNA, 25 bp, Homo sapien
ttcatcgtccgggacttcccggagc

SEQ ID NO: 4071680 - DNA, 25 bp, Homo sapien
gcgaatgcccactgatctccagcag

SEQ ID NO: 4071681 - DNA, 25 bp, Homo sapien
tcattcatcgtccgggacttcccgg

SEQ ID NO: 4071682 - DNA, 25 bp, Homo sapien
ctcagggtccgcatccaggatgctc

SEQ ID NO: 4071683 - DNA, 25 bp, Homo sapien
cctcagggtccgcatccaggatgct

SEQ ID NO: 4071684 - DNA, 25 bp, Homo sapien
gggcctcagggtccgcatccaggat

SEQ ID NO: 4071685 - DNA, 25 bp, Homo sapien
gcctcagggtccgcatccaggatgc

SEQ ID NO: 4071686 - DNA, 25 bp, Homo sapien
ctcctctgaggggtctccaaccgcc

SEQ ID NO: 4071687 - DNA, 25 bp, Homo sapien
cctctgaggggtctccaaccgccca

SEQ ID NO: 4071688 - DNA, 25 bp, Homo sapien
tgctcctctgaggggtctccaaccg

SEQ ID NO: 4071689 - DNA, 25 bp, Homo sapien
tcctctgaggggtctccaaccgccc

SEQ ID NO: 4071690 - DNA, 25 bp, Homo sapien
aagcccaaagtaattgtgctgcccc

SEQ ID NO: 4071691 - DNA, 25 bp, Homo sapien
agctgcgggctgttgtacgtggtgc

SEQ ID NO: 4071692 - DNA, 25 bp, Homo sapien
tacgtggtgcacgtgggcttggctc

SEQ ID NO: 4071693 - DNA, 25 bp, Homo sapien
aagttctcctgagccgacagctgcg

SEQ ID NO: 4071694 - DNA, 25 bp, Homo sapien
catggttcaagtacatgtagtggtc

SEQ ID NO: 4071695 - DNA, 25 bp, Homo sapien
cgttgtagcccgtgtgtgtgtacac

SEQ ID NO: 4071696 - DNA, 25 bp, Homo sapien
ggatcgtctgctgtccatggttcaa

SEQ ID NO: 4071697 - DNA, 25 bp, Homo sapien
cagtccgttcgggatcgtctgctgt

SEQ ID NO: 4071698 - DNA, 25 bp, Homo sapien
atcagggtttgggacaagctgctag

SEQ ID NO: 4071699 - DNA, 25 bp, Homo sapien
caagctgctagggacccaggtggat

SEQ ID NO: 4071700 - DNA, 25 bp, Homo sapien
cggcagatcagggtttgggacaagc

SEQ ID NO: 4071701 - DNA, 25 bp, Homo sapien
gtgtcggcagatcagggtttgggac

SEQ ID NO: 4071702 - DNA, 25 bp, Homo sapien
aggcaagtgacgctgcgtagtgctg

SEQ ID NO: 4071703 - DNA, 25 bp, Homo sapien
tgacgctgcgtagtgctgaccccgg

SEQ ID NO: 4071704 - DNA, 25 bp, Homo sapien
agtgacgctgcgtagtgctgacccc

SEQ ID NO: 4071705 - DNA, 25 bp, Homo sapien
gcaagtgacgctgcgtagtgctgac

SEQ ID NO: 4071706 - DNA, 25 bp, Homo sapien
acttggccggaagggctgcccgcct

SEQ ID NO: 4071707 - DNA, 25 bp, Homo sapien
tcccaccatgttctgaggacttggc

SEQ ID NO: 4071708 - DNA, 25 bp, Homo sapien
gacaccagcatacacaactgtcaca

SEQ ID NO: 4071709 - DNA, 25 bp, Homo sapien
gcctcgacaccagcatacacaactg

SEQ ID NO: 4071710 - DNA, 25 bp, Homo sapien
tctgtagagtgtgggctgacaccgc

SEQ ID NO: 4071711 - DNA, 25 bp, Homo sapien
gatggccccgagcaagccaacaggg

SEQ ID NO: 4071712 - DNA, 25 bp, Homo sapien
gcaccatgatggaacgcagataaga

SEQ ID NO: 4071713 - DNA, 25 bp, Homo sapien
gcccaaggctccaatctagaaagat

SEQ ID NO: 4071714 - DNA, 25 bp, Homo sapien
gaaggaaaatgtccgatctgaacca

SEQ ID NO: 4071715 - DNA, 25 bp, Homo sapien
gcaccgtgtaataactgggcccgtg

SEQ ID NO: 4071716 - DNA, 25 bp, Homo sapien
ttccaacaagcaaacgcgtggcggt

SEQ ID NO: 4071717 - DNA, 25 bp, Homo sapien
tgtgataaacaccatagagcagcat

SEQ ID NO: 4071718 - DNA, 25 bp, Homo sapien
caaggttcaggacaccaagtcttac

SEQ ID NO: 4071719 - DNA, 25 bp, Homo sapien
tcaaggttcaggacaccaagtctta

SEQ ID NO: 4071720 - DNA, 25 bp, Homo sapien
aaactgaggcttcacctcccaagag

SEQ ID NO: 4071721 - DNA, 25 bp, Homo sapien
tgaaactgaggcttcacctcccaag

SEQ ID NO: 4071722 - DNA, 25 bp, Homo sapien
gaaactgaggcttcacctcccaaga

SEQ ID NO: 4071723 - DNA, 25 bp, Homo sapien
gatcacagctcggtcacagtcatag

SEQ ID NO: 4071724 - DNA, 25 bp, Homo sapien
tgtacatgacagagaggacatccag

SEQ ID NO: 4071725 - DNA, 25 bp, Homo sapien
catgcttgtcatggtcctcgaggac

SEQ ID NO: 4071726 - DNA, 25 bp, Homo sapien
ccagggtagtcagatcaagagacga

SEQ ID NO: 4071727 - DNA, 25 bp, Homo sapien
tggggccccagaagtctcttgccat

SEQ ID NO: 4071728 - DNA, 25 bp, Homo sapien
ctggggccccagaagtctcttgcca

SEQ ID NO: 4071729 - DNA, 25 bp, Homo sapien
gaagtgcgggtttcattcgccacta

SEQ ID NO: 4071730 - DNA, 25 bp, Homo sapien
tttcagaacccctcgagatggcagt

SEQ ID NO: 4071731 - DNA, 25 bp, Homo sapien
taaatgcctgagctacacctggagc

SEQ ID NO: 4071732 - DNA, 25 bp, Homo sapien
gggagccacgagtcacatgcaatta

SEQ ID NO: 4071733 - DNA, 25 bp, Homo sapien
gacagtaagagcgtgggagcacaca

SEQ ID NO: 4071734 - DNA, 25 bp, Homo sapien
cctgggactcgaacagctggcttca

SEQ ID NO: 4071735 - DNA, 25 bp, Homo sapien
taagctcttgctgacacaaaggccc

SEQ ID NO: 4071736 - DNA, 25 bp, Homo sapien
cccgctcggttattacaaggaacag

SEQ ID NO: 4071737 - DNA, 25 bp, Homo sapien
cttgcagcttcatgtcagagagcag

SEQ ID NO: 4071738 - DNA, 25 bp, Homo sapien
agccagcacctgcacccgggggttg

SEQ ID NO: 4071739 - DNA, 25 bp, Homo sapien
gcagccagcacctgcacccgggggt

SEQ ID NO: 4071740 - DNA, 25 bp, Homo sapien
tgcagcttcatgtcagagagcagct

SEQ ID NO: 4071741 - DNA, 25 bp, Homo sapien
ggcttagcacgtgcaccacagagcc

SEQ ID NO: 4071742 - DNA, 25 bp, Homo sapien
tgtggcttagcacgtgcaccacaga

SEQ ID NO: 4071743 - DNA, 25 bp, Homo sapien
ttagcacgtgcaccacagagccaac

SEQ ID NO: 4071744 - DNA, 25 bp, Homo sapien
gtctgtggcttagcacgtgcaccac

SEQ ID NO: 4071745 - DNA, 25 bp, Homo sapien
tggacatgacagatcagacaaaacc

SEQ ID NO: 4071746 - DNA, 25 bp, Homo sapien
attctggacatgacagatcagacaa

SEQ ID NO: 4071747 - DNA, 25 bp, Homo sapien
cattctggacatgacagatcagaca

SEQ ID NO: 4071748 - DNA, 25 bp, Homo sapien
tctggacatgacagatcagacaaaa

SEQ ID NO: 4071749 - DNA, 25 bp, Homo sapien
tcttctcctcggagtttcctttcaa

SEQ ID NO: 4071750 - DNA, 25 bp, Homo sapien
tgccatcatacagcctggtgaccat

SEQ ID NO: 4071751 - DNA, 25 bp, Homo sapien
tcaacaggtgggacatggatgctgt

SEQ ID NO: 4071752 - DNA, 25 bp, Homo sapien
ccttcacgggaccttctgtggcaga

SEQ ID NO: 4071753 - DNA, 25 bp, Homo sapien
gatgcaggacgttctctcaccgaag

SEQ ID NO: 4071754 - DNA, 25 bp, Homo sapien
tggtgtccaccgcacttgaggacct

SEQ ID NO: 4071755 - DNA, 25 bp, Homo sapien
tcctgggtgtagctcactttggcca

SEQ ID NO: 4071756 - DNA, 25 bp, Homo sapien
gagccgtatcagtagtatcacagga

SEQ ID NO: 4071757 - DNA, 25 bp, Homo sapien
aagaaactgtgaacaaaagctccgc

SEQ ID NO: 4071758 - DNA, 25 bp, Homo sapien
ttggatgagacattcgggctgtttt

SEQ ID NO: 4071759 - DNA, 25 bp, Homo sapien
gctgtttttatctgatgacagagca

SEQ ID NO: 4071760 - DNA, 25 bp, Homo sapien
aaagctccgccccacacggcttctg

SEQ ID NO: 4071761 - DNA, 25 bp, Homo sapien
ctgtcctgatatctggcagaattct

SEQ ID NO: 4071762 - DNA, 25 bp, Homo sapien
gaatactgctacacactagttggga

SEQ ID NO: 4071763 - DNA, 25 bp, Homo sapien
gtgacgcccatgacctactgaaaca

SEQ ID NO: 4071764 - DNA, 25 bp, Homo sapien
tgggcaagctactaaaacgctctct

SEQ ID NO: 4071765 - DNA, 25 bp, Homo sapien
ggtttgagaacatagtgcccaagct

SEQ ID NO: 4071766 - DNA, 25 bp, Homo sapien
gtgtggtggcgtgtgactatagttc

SEQ ID NO: 4071767 - DNA, 25 bp, Homo sapien
aggaggctgaggtgggaagatcgct

SEQ ID NO: 4071768 - DNA, 25 bp, Homo sapien
gggaagatcgcttgaaccaggaggc

SEQ ID NO: 4071769 - DNA, 25 bp, Homo sapien
cgtgtgactatagttccagctattc

SEQ ID NO: 4071770 - DNA, 25 bp, Homo sapien
tgtgctggccacctacatggcctgg

SEQ ID NO: 4071771 - DNA, 25 bp, Homo sapien
ccaactgcctcatctggacaggctt

SEQ ID NO: 4071772 - DNA, 25 bp, Homo sapien
ggacaggcttcgaagtcctgtctgt

SEQ ID NO: 4071773 - DNA, 25 bp, Homo sapien
tgcctcatctggacaggcttcgaag

SEQ ID NO: 4071774 - DNA, 25 bp, Homo sapien
acagcgggaggtgcaggatgattct

SEQ ID NO: 4071775 - DNA, 25 bp, Homo sapien
accacataaacagcgggaggtgcag

SEQ ID NO: 4071776 - DNA, 25 bp, Homo sapien
gatgattctgatcccccccaggaga

SEQ ID NO: 4071777 - DNA, 25 bp, Homo sapien
gcaggatgattctgatcccccccag

SEQ ID NO: 4071778 - DNA, 25 bp, Homo sapien
tcctggtgctgtccggtccggtcca

SEQ ID NO: 4071779 - DNA, 25 bp, Homo sapien
acgggctcctctcgagagccgcccc

SEQ ID NO: 4071780 - DNA, 25 bp, Homo sapien
gcccacgggctcctctcgagagccg

SEQ ID NO: 4071781 - DNA, 25 bp, Homo sapien
gcttcctggtgctgtccggtccggt

SEQ ID NO: 4071782 - DNA, 25 bp, Homo sapien
agtagaaaaagaccccaatattgca

SEQ ID NO: 4071783 - DNA, 25 bp, Homo sapien
tgagaccttgtatcttagacaaaaa

SEQ ID NO: 4071784 - DNA, 25 bp, Homo sapien
taaattcatgaatagcctgtggccc

SEQ ID NO: 4071785 - DNA, 25 bp, Homo sapien
aaatagaggatagtggccaggtgca

SEQ ID NO: 4071786 - DNA, 25 bp, Homo sapien
gaagtggcccttctcgtcacatcgt

SEQ ID NO: 4071787 - DNA, 25 bp, Homo sapien
gaactatcagtgtggctcacggccg

SEQ ID NO: 4071788 - DNA, 25 bp, Homo sapien
tcacatcgtttcaagggccagaact

SEQ ID NO: 4071789 - DNA, 25 bp, Homo sapien
catttagccatcaggtgtccccagg

SEQ ID NO: 4071790 - DNA, 25 bp, Homo sapien
cagaaggcaacaggaagaagcgact

SEQ ID NO: 4071791 - DNA, 25 bp, Homo sapien
tgccccagagcaggtaaaccatact

SEQ ID NO: 4071792 - DNA, 25 bp, Homo sapien
gaagcgactgcggttgaaaataata

SEQ ID NO: 4071793 - DNA, 25 bp, Homo sapien
gaactcgaccgccagctgggaactg

SEQ ID NO: 4071794 - DNA, 25 bp, Homo sapien
ttggacacccaaaccctcgatgttc

SEQ ID NO: 4071795 - DNA, 25 bp, Homo sapien
tctgttaacattggatgagcaccca

SEQ ID NO: 4071796 - DNA, 25 bp, Homo sapien
cctaacgtacggtgcctggatgtcc

SEQ ID NO: 4071797 - DNA, 25 bp, Homo sapien
aacctttctagagggctcactgtga

SEQ ID NO: 4071798 - DNA, 25 bp, Homo sapien
gcgacactcagaatacctcctggag

SEQ ID NO: 4071799 - DNA, 25 bp, Homo sapien
aacaccggcatctgacagaggaggc

SEQ ID NO: 4071800 - DNA, 25 bp, Homo sapien
cccgaacaccggcatctgacagagg

SEQ ID NO: 4071801 - DNA, 25 bp, Homo sapien
gagaacccgaagcaaaccatgtcat

SEQ ID NO: 4071802 - DNA, 25 bp, Homo sapien
gccggagaacccgaagcaaaccatg

SEQ ID NO: 4071803 - DNA, 25 bp, Homo sapien
cccagatgctgcagaaccgactcac

SEQ ID NO: 4071804 - DNA, 25 bp, Homo sapien
agggctgtaaggaccccccagatgc

SEQ ID NO: 4071805 - DNA, 25 bp, Homo sapien
gagggctgtaaggaccccccagatg

SEQ ID NO: 4071806 - DNA, 25 bp, Homo sapien
gggctgtaaggaccccccagatgct

SEQ ID NO: 4071807 - DNA, 25 bp, Homo sapien
ggttctcagcagcaaccagctgcat

SEQ ID NO: 4071808 - DNA, 25 bp, Homo sapien
tttggttctcagcagcaaccagctg

SEQ ID NO: 4071809 - DNA, 25 bp, Homo sapien
tcagacaacgaatttggttctcagc

SEQ ID NO: 4071810 - DNA, 25 bp, Homo sapien
ctttcagacaacgaatttggttctc

SEQ ID NO: 4071811 - DNA, 25 bp, Homo sapien
ttttatgctgttgggacacctggcc

SEQ ID NO: 4071812 - DNA, 25 bp, Homo sapien
catggtgaagtttggccgcctggtc

SEQ ID NO: 4071813 - DNA, 25 bp, Homo sapien
cctctttggatagcaacctggatta

SEQ ID NO: 4071814 - DNA, 25 bp, Homo sapien
ctgtattgatgccacctggtcagca

SEQ ID NO: 4071815 - DNA, 25 bp, Homo sapien
gatcttgtcgctttgggagcccctg

SEQ ID NO: 4071816 - DNA, 25 bp, Homo sapien
gatggcaaaataggcccgggctctg

SEQ ID NO: 4071817 - DNA, 25 bp, Homo sapien
caggtggtttcagaccgtgcagcaa

SEQ ID NO: 4071818 - DNA, 25 bp, Homo sapien
catgagataggacacggcagggttc

SEQ ID NO: 4071819 - DNA, 25 bp, Homo sapien
ctccgtctgggcgtcgtaattggct

SEQ ID NO: 4071820 - DNA, 25 bp, Homo sapien
ccgtctgggcgtcgtaattggctcc

SEQ ID NO: 4071821 - DNA, 25 bp, Homo sapien
tactccgtctgggcgtcgtaattgg

SEQ ID NO: 4071822 - DNA, 25 bp, Homo sapien
gtctgggcgtcgtaattggctcccc

SEQ ID NO: 4071823 - DNA, 25 bp, Homo sapien
tcagctcgctcttgatgaaatcttc

SEQ ID NO: 4071824 - DNA, 25 bp, Homo sapien
tttcaacaaataccacgccaggctg

SEQ ID NO: 4071825 - DNA, 25 bp, Homo sapien
aacacactgggaagcaaagcactga

SEQ ID NO: 4071826 - DNA, 25 bp, Homo sapien
caatgttcctaatgacgcaggagcc

SEQ ID NO: 4071827 - DNA, 25 bp, Homo sapien
ttttggaaccagacagaggtagggc

SEQ ID NO: 4071828 - DNA, 25 bp, Homo sapien
tatcaagcagctgatgtgtgccagg

SEQ ID NO: 4071829 - DNA, 25 bp, Homo sapien
gatttgcccagaatgacagaacacc

SEQ ID NO: 4071830 - DNA, 25 bp, Homo sapien
taaaaagacaatgcatttggcgcgc

SEQ ID NO: 4071831 - DNA, 25 bp, Homo sapien
catggagctaggcacaggtcaacct

SEQ ID NO: 4071832 - DNA, 25 bp, Homo sapien
agaccttgtattcagacatgagcct

SEQ ID NO: 4071833 - DNA, 25 bp, Homo sapien
cgcgtgactgccaaggtgtacagcc

SEQ ID NO: 4071834 - DNA, 25 bp, Homo sapien
cagtgcaaagccgagcagagagaag

SEQ ID NO: 4071835 - DNA, 25 bp, Homo sapien
tacagcctgggactcgatgcagccc

SEQ ID NO: 4071836 - DNA, 25 bp, Homo sapien
tcgatgcagcccacgccagtgcaaa

SEQ ID NO: 4071837 - DNA, 25 bp, Homo sapien
gcagactggtcatgcacgggcccat

SEQ ID NO: 4071838 - DNA, 25 bp, Homo sapien
ggcagactggtcatgcacgggccca

SEQ ID NO: 4071839 - DNA, 25 bp, Homo sapien
cggcagactggtcatgcacgggccc

SEQ ID NO: 4071840 - DNA, 25 bp, Homo sapien
ccgggtatacggcacacactgatat

SEQ ID NO: 4071841 - DNA, 25 bp, Homo sapien
cactgatatggctgggtgcgctttc

SEQ ID NO: 4071842 - DNA, 25 bp, Homo sapien
caatgctaaaaggtactgacgaggt

SEQ ID NO: 4071843 - DNA, 25 bp, Homo sapien
tttgaacccagccttagaaacgctg

SEQ ID NO: 4071844 - DNA, 25 bp, Homo sapien
cacctggtacaaagcggagtgctca

SEQ ID NO: 4071845 - DNA, 25 bp, Homo sapien
tagctctcacaatgaaggctgcctg

SEQ ID NO: 4071846 - DNA, 25 bp, Homo sapien
tgcacacttgatgagaacacctggt

SEQ ID NO: 4071847 - DNA, 25 bp, Homo sapien
catagacacgggacgaagttccacc

SEQ ID NO: 4071848 - DNA, 25 bp, Homo sapien
ctcggtgacaagatcaaaatgccat

SEQ ID NO: 4071849 - DNA, 25 bp, Homo sapien
cctcggtgacaagatcaaaatgcca

SEQ ID NO: 4071850 - DNA, 25 bp, Homo sapien
gcctcggtgacaagatcaaaatgcc

SEQ ID NO: 4071851 - DNA, 25 bp, Homo sapien
tgtacacgttcgaatgctgcatcct

SEQ ID NO: 4071852 - DNA, 25 bp, Homo sapien
gacctgtacacgttcgaatgctgca

SEQ ID NO: 4071853 - DNA, 25 bp, Homo sapien
ttaagacctgtacacgttcgaatgc

SEQ ID NO: 4071854 - DNA, 25 bp, Homo sapien
tacacgttcgaatgctgcatcctca

SEQ ID NO: 4071855 - DNA, 25 bp, Homo sapien
gactgtataccgtgctagcgactgt

SEQ ID NO: 4071856 - DNA, 25 bp, Homo sapien
gaatcactgcaccacagcgtccgga

SEQ ID NO: 4071857 - DNA, 25 bp, Homo sapien
tgctagcgactgtgtcgggaatcac

SEQ ID NO: 4071858 - DNA, 25 bp, Homo sapien
ggcacagcgactgtataccgtgcta

SEQ ID NO: 4071859 - DNA, 25 bp, Homo sapien
tgcatcgcttttgagtttcagatct

SEQ ID NO: 4071860 - DNA, 25 bp, Homo sapien
atttacatgccaggcccaaacctag

SEQ ID NO: 4071861 - DNA, 25 bp, Homo sapien
caaacctagggtgcagggatctcct

SEQ ID NO: 4071862 - DNA, 25 bp, Homo sapien
gatcaacaaagcagatgcatcgctt

SEQ ID NO: 4071863 - DNA, 25 bp, Homo sapien
tgctccagcctcaaaaagtactagg

SEQ ID NO: 4071864 - DNA, 25 bp, Homo sapien
gctagcacacagtaatcttccagca

SEQ ID NO: 4071865 - DNA, 25 bp, Homo sapien
tactatctagaccatagtagataca

SEQ ID NO: 4071866 - DNA, 25 bp, Homo sapien
taggagtacaatcacaaagcagcca

SEQ ID NO: 4071867 - DNA, 25 bp, Homo sapien
tgcaatgacacgagcacagctcatg

SEQ ID NO: 4071868 - DNA, 25 bp, Homo sapien
ggaatgcaatgacacgagcacagct

SEQ ID NO: 4071869 - DNA, 25 bp, Homo sapien
tggaatgcaatgacacgagcacagc

SEQ ID NO: 4071870 - DNA, 25 bp, Homo sapien
aatgacacgagcacagctcatgcag

SEQ ID NO: 4071871 - DNA, 25 bp, Homo sapien
gcgccactaagcctggttagtcctg

SEQ ID NO: 4071872 - DNA, 25 bp, Homo sapien
ggtgtgcgccactaagcctggttag

SEQ ID NO: 4071873 - DNA, 25 bp, Homo sapien
cgccactaagcctggttagtcctgg

SEQ ID NO: 4071874 - DNA, 25 bp, Homo sapien
tgtgcgccactaagcctggttagtc

SEQ ID NO: 4071875 - DNA, 25 bp, Homo sapien
agcatgatgcagcactgaccaagca

SEQ ID NO: 4071876 - DNA, 25 bp, Homo sapien
agcactgaccaagcatggctctaaa

SEQ ID NO: 4071877 - DNA, 25 bp, Homo sapien
aacccatcctgcaagacaagcatga

SEQ ID NO: 4071878 - DNA, 25 bp, Homo sapien
tcctgcaagacaagcatgatgcagc

SEQ ID NO: 4071879 - DNA, 25 bp, Homo sapien
ggccctggcacatcgcaggtcacta

SEQ ID NO: 4071880 - DNA, 25 bp, Homo sapien
gagagcctggccctggcacatcgca

SEQ ID NO: 4071881 - DNA, 25 bp, Homo sapien
gcctggccctggcacatcgcaggtc

SEQ ID NO: 4071882 - DNA, 25 bp, Homo sapien
tcaagagagcctggccctggcacat

SEQ ID NO: 4071883 - DNA, 25 bp, Homo sapien
cagcggtcactgcattgtccccaca

SEQ ID NO: 4071884 - DNA, 25 bp, Homo sapien
agcggtcactgcattgtccccacaa

SEQ ID NO: 4071885 - DNA, 25 bp, Homo sapien
gcggtcactgcattgtccccacaat

SEQ ID NO: 4071886 - DNA, 25 bp, Homo sapien
cggtcactgcattgtccccacaatc

SEQ ID NO: 4071887 - DNA, 25 bp, Homo sapien
cagagacacgagaacgataggagcg

SEQ ID NO: 4071888 - DNA, 25 bp, Homo sapien
ctgcagagacacgagaacgatagga

SEQ ID NO: 4071889 - DNA, 25 bp, Homo sapien
aacgataggagcgaggttctgtcct

SEQ ID NO: 4071890 - DNA, 25 bp, Homo sapien
acacgagaacgataggagcgaggtt

SEQ ID NO: 4071891 - DNA, 25 bp, Homo sapien
ctgtggccagccagccgtgcgtgct

SEQ ID NO: 4071892 - DNA, 25 bp, Homo sapien
cagccgggtacttctgtgtggcaga

SEQ ID NO: 4071893 - DNA, 25 bp, Homo sapien
tgctgtgcgttcagcgcattccccg

SEQ ID NO: 4071894 - DNA, 25 bp, Homo sapien
gagtctgggcatcgcaatcgccctg

SEQ ID NO: 4071895 - DNA, 25 bp, Homo sapien
aaagaggatcagagttgaacttcac

SEQ ID NO: 4071896 - DNA, 25 bp, Homo sapien
ttaactgtgagtttagggcaggtcc

SEQ ID NO: 4071897 - DNA, 25 bp, Homo sapien
gccacaggtgaagtatgagcttttt

SEQ ID NO: 4071898 - DNA, 25 bp, Homo sapien
cccatatgctgatgcacctgtgtgc

SEQ ID NO: 4071899 - DNA, 25 bp, Homo sapien
acccagagggaccaccatagcatgg

SEQ ID NO: 4071900 - DNA, 25 bp, Homo sapien
gaaaatactgcatgagccctcgatc

SEQ ID NO: 4071901 - DNA, 25 bp, Homo sapien
agcatggaccgtttctttggctgtg

SEQ ID NO: 4071902 - DNA, 25 bp, Homo sapien
tgcatgagccctcgatctagccaca

SEQ ID NO: 4071903 - DNA, 25 bp, Homo sapien
tgagcttgcaaacgtaagaattatc

SEQ ID NO: 4071904 - DNA, 25 bp, Homo sapien
ttgagcttgcaaacgtaagaattat

SEQ ID NO: 4071905 - DNA, 25 bp, Homo sapien
acgaaggcaaacaaccggacgtcat

SEQ ID NO: 4071906 - DNA, 25 bp, Homo sapien
tgtccgtcccggttttggcgcgctg

SEQ ID NO: 4071907 - DNA, 25 bp, Homo sapien
atggcatccccggtggtgaagcgca

SEQ ID NO: 4071908 - DNA, 25 bp, Homo sapien
gatccacgtgatgagggcaaacttg

SEQ ID NO: 4071909 - DNA, 25 bp, Homo sapien
ggagcagcgctttagctcgagagca

SEQ ID NO: 4071910 - DNA, 25 bp, Homo sapien
gctttagctcgagagcatttctcag

SEQ ID NO: 4071911 - DNA, 25 bp, Homo sapien
agccacaggcggctggtgcagactt

SEQ ID NO: 4071912 - DNA, 25 bp, Homo sapien
ttgtaaggtgcaaagtgcgcagcca

SEQ ID NO: 4071913 - DNA, 25 bp, Homo sapien
gggccaatggtccatctcttcaaac

SEQ ID NO: 4071914 - DNA, 25 bp, Homo sapien
ccaacagggccaatggtccatctct

SEQ ID NO: 4071915 - DNA, 25 bp, Homo sapien
acttggtccccaacagggccaatgg

SEQ ID NO: 4071916 - DNA, 25 bp, Homo sapien
ttggtccccaacagggccaatggtc

SEQ ID NO: 4071917 - DNA, 25 bp, Homo sapien
ccaccaggatgagccgctctaataa

SEQ ID NO: 4071918 - DNA, 25 bp, Homo sapien
aaagccaccaggatgagccgctcta

SEQ ID NO: 4071919 - DNA, 25 bp, Homo sapien
aggatgagccgctctaataactccc

SEQ ID NO: 4071920 - DNA, 25 bp, Homo sapien
caggatgagccgctctaataactcc

SEQ ID NO: 4071921 - DNA, 25 bp, Homo sapien
gacctagacatagagctccatgctc

SEQ ID NO: 4071922 - DNA, 25 bp, Homo sapien
gcctagacttatcgggcaggaagca

SEQ ID NO: 4071923 - DNA, 25 bp, Homo sapien
tggagccctaagaaacgcctagact

SEQ ID NO: 4071924 - DNA, 25 bp, Homo sapien
taggcaagtctagccacgcagaagc

SEQ ID NO: 4071925 - DNA, 25 bp, Homo sapien
catggacagcaagtgaatttgactc

SEQ ID NO: 4071926 - DNA, 25 bp, Homo sapien
gaaacccgggtgtgtatgttcagct

SEQ ID NO: 4071927 - DNA, 25 bp, Homo sapien
cacgataaatagactgccggctctc

SEQ ID NO: 4071928 - DNA, 25 bp, Homo sapien
tattgccatatacgcagaggtcatg

SEQ ID NO: 4071929 - DNA, 25 bp, Homo sapien
gctgctaggacttcccctggagttt

SEQ ID NO: 4071930 - DNA, 25 bp, Homo sapien
tgctgctaggacttcccctggagtt

SEQ ID NO: 4071931 - DNA, 25 bp, Homo sapien
tggagttcgggcagtctttgctgct

SEQ ID NO: 4071932 - DNA, 25 bp, Homo sapien
aggctgtttggagttcgggcagtct

SEQ ID NO: 4071933 - DNA, 25 bp, Homo sapien
ttaatctgcactgggcatttctcac

SEQ ID NO: 4071934 - DNA, 25 bp, Homo sapien
attaatctgcactgggcatttctca

SEQ ID NO: 4071935 - DNA, 25 bp, Homo sapien
ctctgaccatcccaggcgaactgag

SEQ ID NO: 4071936 - DNA, 25 bp, Homo sapien
tttatttcgcaaacaatcatgtagc

SEQ ID NO: 4071937 - DNA, 25 bp, Homo sapien
tactgactcacttatcctcgcaaca

SEQ ID NO: 4071938 - DNA, 25 bp, Homo sapien
aagcagccgttcagggattcgaacc

SEQ ID NO: 4071939 - DNA, 25 bp, Homo sapien
tcctcgcaacagcactgtgagagtg

SEQ ID NO: 4071940 - DNA, 25 bp, Homo sapien
aggggcaccccatgtggccaccggt

SEQ ID NO: 4071941 - DNA, 25 bp, Homo sapien
ggacactggagtttggaaacacagg

SEQ ID NO: 4071942 - DNA, 25 bp, Homo sapien
gagttgaccttagaaaaccagtgga

SEQ ID NO: 4071943 - DNA, 25 bp, Homo sapien
tgaggccttaaaacgctcacaccgg

SEQ ID NO: 4071944 - DNA, 25 bp, Homo sapien
aagtgctggtactccgctccctgct

SEQ ID NO: 4071945 - DNA, 25 bp, Homo sapien
gatgaagtgctggtactccgctccc

SEQ ID NO: 4071946 - DNA, 25 bp, Homo sapien
tgaagtgctggtactccgctccctg

SEQ ID NO: 4071947 - DNA, 25 bp, Homo sapien
ctccctgctcgccggggacgatggt

SEQ ID NO: 4071948 - DNA, 25 bp, Homo sapien
cacgccgtcccggaataaggcgagg

SEQ ID NO: 4071949 - DNA, 25 bp, Homo sapien
tgcagaggacaatctaacagacgcg

SEQ ID NO: 4071950 - DNA, 25 bp, Homo sapien
gcgtggagacgaatgaaaagttcct

SEQ ID NO: 4071951 - DNA, 25 bp, Homo sapien
taacagacgcgctggccacggagaa

SEQ ID NO: 4071952 - DNA, 25 bp, Homo sapien
ggcaagcctctttgtcgatcttggt

SEQ ID NO: 4071953 - DNA, 25 bp, Homo sapien
agccgtcgtcgcgcaccaggttgta

SEQ ID NO: 4071954 - DNA, 25 bp, Homo sapien
gcccggcaagcctctttgtcgatct

SEQ ID NO: 4071955 - DNA, 25 bp, Homo sapien
gccgagccgtcgtcgcgcaccaggt

SEQ ID NO: 4071956 - DNA, 25 bp, Homo sapien
agcgcggcgggtacgcgccgagggc

SEQ ID NO: 4071957 - DNA, 25 bp, Homo sapien
ggatgggagcgcggcgggtacgcgc

SEQ ID NO: 4071958 - DNA, 25 bp, Homo sapien
cggtggcgacggctacgcggcgcct

SEQ ID NO: 4071959 - DNA, 25 bp, Homo sapien
tacgcggcgcctgcaagctgcgagc

SEQ ID NO: 4071960 - DNA, 25 bp, Homo sapien
taagcgcttcatttagagatggaga

SEQ ID NO: 4071961 - DNA, 25 bp, Homo sapien
aagttgctggcccagttcacacagc

SEQ ID NO: 4071962 - DNA, 25 bp, Homo sapien
aaactgaggcacaacggagctaagt

SEQ ID NO: 4071963 - DNA, 25 bp, Homo sapien
cacacagctgggagtagccaggtca

SEQ ID NO: 4071964 - DNA, 25 bp, Homo sapien
caacacccggaaggccgatgttcat

SEQ ID NO: 4071965 - DNA, 25 bp, Homo sapien
aggttgcacgtcttctcattcatga

SEQ ID NO: 4071966 - DNA, 25 bp, Homo sapien
ccatacaccaggttgcacgtcttct

SEQ ID NO: 4071967 - DNA, 25 bp, Homo sapien
tcatgatgaacacaacacccggaag

SEQ ID NO: 4071968 - DNA, 25 bp, Homo sapien
tgagcgaggacaactacctgtacct

SEQ ID NO: 4071969 - DNA, 25 bp, Homo sapien
caaggccgtggtggacttcctgtac

SEQ ID NO: 4071970 - DNA, 25 bp, Homo sapien
tctggacggtggtagacttctgctg

SEQ ID NO: 4071971 - DNA, 25 bp, Homo sapien
caacattgactacgtcctggagacg

SEQ ID NO: 4071972 - DNA, 25 bp, Homo sapien
aagagcgtgggccttgatgtcagac

SEQ ID NO: 4071973 - DNA, 25 bp, Homo sapien
taaggagaccactagtgctcacgcc

SEQ ID NO: 4071974 - DNA, 25 bp, Homo sapien
cctattggacagtagcatgggtcta

SEQ ID NO: 4071975 - DNA, 25 bp, Homo sapien
tgatccatggttcaacatccccagg

SEQ ID NO: 4071976 - DNA, 25 bp, Homo sapien
taagaatacagatgcgtgagccccg

SEQ ID NO: 4071977 - DNA, 25 bp, Homo sapien
gcttgaataactaaccctgggccca

SEQ ID NO: 4071978 - DNA, 25 bp, Homo sapien
tgagccccgctcagaattatggaat

SEQ ID NO: 4071979 - DNA, 25 bp, Homo sapien
caaagggttctcttaggccacctag

SEQ ID NO: 4071980 - DNA, 25 bp, Homo sapien
gggcaaattctcgaacaagtccgtg

SEQ ID NO: 4071981 - DNA, 25 bp, Homo sapien
gagctgttcgtacccggatggcatc

SEQ ID NO: 4071982 - DNA, 25 bp, Homo sapien
gcacatgtggatccctgagaaggca

SEQ ID NO: 4071983 - DNA, 25 bp, Homo sapien
ctaagtagtttcgtgctgctgggca

SEQ ID NO: 4071984 - DNA, 25 bp, Homo sapien
tcagggtcgcttgccctttaagagg

SEQ ID NO: 4071985 - DNA, 25 bp, Homo sapien
agggctcttagctgcccgagtggat

SEQ ID NO: 4071986 - DNA, 25 bp, Homo sapien
caggtgtcagggtcgcttgcccttt

SEQ ID NO: 4071987 - DNA, 25 bp, Homo sapien
cgcttgccctttaagagggctctta

SEQ ID NO: 4071988 - DNA, 25 bp, Homo sapien
cttgtggctgtcagagcccgtggtt

SEQ ID NO: 4071989 - DNA, 25 bp, Homo sapien
tgtcagagcccgtggttggaacccc

SEQ ID NO: 4071990 - DNA, 25 bp, Homo sapien
cagcagcatctcatgggccttgtgg

SEQ ID NO: 4071991 - DNA, 25 bp, Homo sapien
ctggtcctccatggtgcagcagcat

SEQ ID NO: 4071992 - DNA, 25 bp, Homo sapien
aatgaaccattcttgcactttacag

SEQ ID NO: 4071993 - DNA, 25 bp, Homo sapien
tggttgccttagttaccagagttga

SEQ ID NO: 4071994 - DNA, 25 bp, Homo sapien
tgaatgtacacatttcggtagtggg

SEQ ID NO: 4071995 - DNA, 25 bp, Homo sapien
caaaaattaggcagtcgtggtcgcc

SEQ ID NO: 4071996 - DNA, 25 bp, Homo sapien
ggttctttcgcatccgcttcagaag

SEQ ID NO: 4071997 - DNA, 25 bp, Homo sapien
tgggttctttcgcatccgcttcaga

SEQ ID NO: 4071998 - DNA, 25 bp, Homo sapien
ctgggttctttcgcatccgcttcag

SEQ ID NO: 4071999 - DNA, 25 bp, Homo sapien
tctttcgcatccgcttcagaagcat

SEQ ID NO: 4072000 - DNA, 25 bp, Homo sapien
ggatcctgcgtaacaacaccttggg

SEQ ID NO: 4072001 - DNA, 25 bp, Homo sapien
caggtatagtttgcccttgcccaca

SEQ ID NO: 4072002 - DNA, 25 bp, Homo sapien
tcatgttgccccgaactgacactgt

SEQ ID NO: 4072003 - DNA, 25 bp, Homo sapien
cacagcgtttaattcactgacgtgg

SEQ ID NO: 4072004 - DNA, 25 bp, Homo sapien
aaaagactgcagtgctcattctccc

SEQ ID NO: 4072005 - DNA, 25 bp, Homo sapien
aaggaactgccttacccagggatgc

SEQ ID NO: 4072006 - DNA, 25 bp, Homo sapien
catgtctggccaacacgggagttca

SEQ ID NO: 4072007 - DNA, 25 bp, Homo sapien
gaacattgcccctgacagtttgtgg

SEQ ID NO: 4072008 - DNA, 25 bp, Homo sapien
ggatctaatgcgaacactcccgagg

SEQ ID NO: 4072009 - DNA, 25 bp, Homo sapien
gcggcaacgggatcttcataaacca

SEQ ID NO: 4072010 - DNA, 25 bp, Homo sapien
caaatgaatgaatgcgcggcaacgg

SEQ ID NO: 4072011 - DNA, 25 bp, Homo sapien
taatgcctagccaaaggcgtggccc

SEQ ID NO: 4072012 - DNA, 25 bp, Homo sapien
tgcccccagcatccctactcattct

SEQ ID NO: 4072013 - DNA, 25 bp, Homo sapien
gcccccagcatccctactcattctt

SEQ ID NO: 4072014 - DNA, 25 bp, Homo sapien
ttccagagagatgaaactttcagaa

SEQ ID NO: 4072015 - DNA, 25 bp, Homo sapien
gaagccgaaagtggcgtttcccgca

SEQ ID NO: 4072016 - DNA, 25 bp, Homo sapien
tgatagtccccagcgtctcctgaag

SEQ ID NO: 4072017 - DNA, 25 bp, Homo sapien
tttcccgcagttccggcgggagagc

SEQ ID NO: 4072018 - DNA, 25 bp, Homo sapien
tagtgccgtgctgtactgatagtcc

SEQ ID NO: 4072019 - DNA, 25 bp, Homo sapien
cacacctccagaaggtaaactgagc

SEQ ID NO: 4072020 - DNA, 25 bp, Homo sapien
tccctgctgtggtgtgggcttgccc

SEQ ID NO: 4072021 - DNA, 25 bp, Homo sapien
tagccaacaggctatgcttcaggga

SEQ ID NO: 4072022 - DNA, 25 bp, Homo sapien
taaactgagccagcttagccaacag

SEQ ID NO: 4072023 - DNA, 25 bp, Homo sapien
tacccagatccacctgttgttaaga

SEQ ID NO: 4072024 - DNA, 25 bp, Homo sapien
cacagacatgggctaacaaatgcaa

SEQ ID NO: 4072025 - DNA, 25 bp, Homo sapien
tagtacaaagaatccccagatggtc

SEQ ID NO: 4072026 - DNA, 25 bp, Homo sapien
tctgcaaatacacactcatacggat

SEQ ID NO: 4072027 - DNA, 25 bp, Homo sapien
tttgaagatctctcgctgtctgtac

SEQ ID NO: 4072028 - DNA, 25 bp, Homo sapien
cttttttacaccgagagtgctttct

SEQ ID NO: 4072029 - DNA, 25 bp, Homo sapien
gatctctcgctgtctgtacctaaag

SEQ ID NO: 4072030 - DNA, 25 bp, Homo sapien
ttttacaccgagagtgctttcttct

SEQ ID NO: 4072031 - DNA, 25 bp, Homo sapien
tgctgcaacctccacctcccgggtt

SEQ ID NO: 4072032 - DNA, 25 bp, Homo sapien
cacggaatctctctctgtcagcagg

SEQ ID NO: 4072033 - DNA, 25 bp, Homo sapien
ctggagtgcagtggctcattctcgg

SEQ ID NO: 4072034 - DNA, 25 bp, Homo sapien
agtggctcattctcggcttgctgca

SEQ ID NO: 4072035 - DNA, 25 bp, Homo sapien
atcaattctttgtgactcctcgatc

SEQ ID NO: 4072036 - DNA, 25 bp, Homo sapien
caatcaattctttgtgactcctcga

SEQ ID NO: 4072037 - DNA, 25 bp, Homo sapien
aatcaattctttgtgactcctcgat

SEQ ID NO: 4072038 - DNA, 25 bp, Homo sapien
tataaaaagagtttatcaaaatcac

SEQ ID NO: 4072039 - DNA, 25 bp, Homo sapien
ataaaaagagtttatcaaaatcaca

SEQ ID NO: 4072040 - DNA, 25 bp, Homo sapien
ttgagtgagtgttcacaccccgtgg

SEQ ID NO: 4072041 - DNA, 25 bp, Homo sapien
gcaggtgcgctcttttatcagctta

SEQ ID NO: 4072042 - DNA, 25 bp, Homo sapien
cagtctctcgggtctggaggtttcc

SEQ ID NO: 4072043 - DNA, 25 bp, Homo sapien
caccccgtggttgaatgttgaggaa

SEQ ID NO: 4072044 - DNA, 25 bp, Homo sapien
cagcatcaatgctggtgtgtggaat

SEQ ID NO: 4072045 - DNA, 25 bp, Homo sapien
ggtgcctgccagcatcaatgctggt

SEQ ID NO: 4072046 - DNA, 25 bp, Homo sapien
tggtgtgtggaatggtctttgcctt

SEQ ID NO: 4072047 - DNA, 25 bp, Homo sapien
gaatggtctttgccttgcgggtgcc

SEQ ID NO: 4072048 - DNA, 25 bp, Homo sapien
aggctgtggataaactacctgatgg

SEQ ID NO: 4072049 - DNA, 25 bp, Homo sapien
acacaggctgtggataaactacctg

SEQ ID NO: 4072050 - DNA, 25 bp, Homo sapien
caggctgtggataaactacctgatg

SEQ ID NO: 4072051 - DNA, 25 bp, Homo sapien
cacaggctgtggataaactacctga

SEQ ID NO: 4072052 - DNA, 25 bp, Homo sapien
ctgaaagccttccttagctagaaag

SEQ ID NO: 4072053 - DNA, 25 bp, Homo sapien
taaagaagcaagctatggctccatc

SEQ ID NO: 4072054 - DNA, 25 bp, Homo sapien
aaaagcggccacctggatattacag

SEQ ID NO: 4072055 - DNA, 25 bp, Homo sapien
aggctctgccctcgctttggatgga

SEQ ID NO: 4072056 - DNA, 25 bp, Homo sapien
tgtattaccgccgagtggacctgct

SEQ ID NO: 4072057 - DNA, 25 bp, Homo sapien
gtggtgaaaccaactgctgaacgca

SEQ ID NO: 4072058 - DNA, 25 bp, Homo sapien
cgggcggccattacactacagacgt

SEQ ID NO: 4072059 - DNA, 25 bp, Homo sapien
gacctgctgtaaaccctgtgtgcgc

SEQ ID NO: 4072060 - DNA, 25 bp, Homo sapien
gtcatcactggtgcttaggagtaaa

SEQ ID NO: 4072061 - DNA, 25 bp, Homo sapien
tcacaccctttcatacccgctgtca

SEQ ID NO: 4072062 - DNA, 25 bp, Homo sapien
acgaggtcatcactggtgcttagga

SEQ ID NO: 4072063 - DNA, 25 bp, Homo sapien
ctttcatacccgctgtcatctccct

SEQ ID NO: 4072064 - DNA, 25 bp, Homo sapien
ttgacttcggagtcttttcctcctg

SEQ ID NO: 4072065 - DNA, 25 bp, Homo sapien
aatctgtttcagcattctggtctcg

SEQ ID NO: 4072066 - DNA, 25 bp, Homo sapien
tgacttcggagtcttttcctcctga

SEQ ID NO: 4072067 - DNA, 25 bp, Homo sapien
gcattctggtctcgttaattctcat

SEQ ID NO: 4072068 - DNA, 25 bp, Homo sapien
ggtaggaggtgagggtgcgaggacc

SEQ ID NO: 4072069 - DNA, 25 bp, Homo sapien
cgaggaacacatgtactggcggtag

SEQ ID NO: 4072070 - DNA, 25 bp, Homo sapien
tcatgccgaggaacacatgtactgg

SEQ ID NO: 4072071 - DNA, 25 bp, Homo sapien
aacacatgtactggcggtaggaggt

SEQ ID NO: 4072072 - DNA, 25 bp, Homo sapien
agccaccgttctgcagacatgcatg

SEQ ID NO: 4072073 - DNA, 25 bp, Homo sapien
taaacatttatgaccgccggcccca

SEQ ID NO: 4072074 - DNA, 25 bp, Homo sapien
atcttggtcccaagagagagtgggc

SEQ ID NO: 4072075 - DNA, 25 bp, Homo sapien
ctgcagacatgcatgcggtccttct

SEQ ID NO: 4072076 - DNA, 25 bp, Homo sapien
gggcttgggctcaacattgctgaca

SEQ ID NO: 4072077 - DNA, 25 bp, Homo sapien
cccagggtttccacggatgagctca

SEQ ID NO: 4072078 - DNA, 25 bp, Homo sapien
gcttagtacagaccagacatgccca

SEQ ID NO: 4072079 - DNA, 25 bp, Homo sapien
ttaacgttggcagggatctgggtcc

SEQ ID NO: 4072080 - DNA, 25 bp, Homo sapien
catttgtgggcagtgttggcgtgcc

SEQ ID NO: 4072081 - DNA, 25 bp, Homo sapien
agttccttcttgaagcatcaactca

SEQ ID NO: 4072082 - DNA, 25 bp, Homo sapien
gaagcatcaactcaggtcatgtcat

SEQ ID NO: 4072083 - DNA, 25 bp, Homo sapien
gaatgtgttgctggccttctccatg

SEQ ID NO: 4072084 - DNA, 25 bp, Homo sapien
gggaatcctgagacatcgccctggg

SEQ ID NO: 4072085 - DNA, 25 bp, Homo sapien
tgcaaggctgcgaggacatcatggt

SEQ ID NO: 4072086 - DNA, 25 bp, Homo sapien
taccccaggctgtacaatgacgagt

SEQ ID NO: 4072087 - DNA, 25 bp, Homo sapien
gacaaagacccctcttgcaaggctg

SEQ ID NO: 4072088 - DNA, 25 bp, Homo sapien
gactgacttgagaagagcctgataa

SEQ ID NO: 4072089 - DNA, 25 bp, Homo sapien
tgacttgagaagagcctgataacgc

SEQ ID NO: 4072090 - DNA, 25 bp, Homo sapien
gagactgacttgagaagagcctgat

SEQ ID NO: 4072091 - DNA, 25 bp, Homo sapien
tgagactgacttgagaagagcctga

SEQ ID NO: 4072092 - DNA, 25 bp, Homo sapien
gtgtggacggttctggttatagggc

SEQ ID NO: 4072093 - DNA, 25 bp, Homo sapien
actggggtcagcgtggagctgtgtg

SEQ ID NO: 4072094 - DNA, 25 bp, Homo sapien
ggctactggggtcagcgtggagctg

SEQ ID NO: 4072095 - DNA, 25 bp, Homo sapien
ctactggggtcagcgtggagctgtg

SEQ ID NO: 4072096 - DNA, 25 bp, Homo sapien
gcagccagctctcgactcatcttcg

SEQ ID NO: 4072097 - DNA, 25 bp, Homo sapien
ctgcagagtgctatggaggttccgc

SEQ ID NO: 4072098 - DNA, 25 bp, Homo sapien
tctcgactcatcttcgcggatgcca

SEQ ID NO: 4072099 - DNA, 25 bp, Homo sapien
agagtgctatggaggttccgcagcc

SEQ ID NO: 4072100 - DNA, 25 bp, Homo sapien
gtcagtgaatcacgcttctcaggca

SEQ ID NO: 4072101 - DNA, 25 bp, Homo sapien
tgtcagtgaatcacgcttctcaggc

SEQ ID NO: 4072102 - DNA, 25 bp, Homo sapien
ctgtcagtgaatcacgcttctcagg

SEQ ID NO: 4072103 - DNA, 25 bp, Homo sapien
cagtgaatcacgcttctcaggcagg

SEQ ID NO: 4072104 - DNA, 25 bp, Homo sapien
ccaggcgctctaacgggatgttctg

SEQ ID NO: 4072105 - DNA, 25 bp, Homo sapien
ctctaacgggatgttctgctcagtc

SEQ ID NO: 4072106 - DNA, 25 bp, Homo sapien
caggcgctctaacgggatgttctgc

SEQ ID NO: 4072107 - DNA, 25 bp, Homo sapien
gcgctctaacgggatgttctgctca

SEQ ID NO: 4072108 - DNA, 25 bp, Homo sapien
tacactggaggtttctaggaagccg

SEQ ID NO: 4072109 - DNA, 25 bp, Homo sapien
tagcaatgagcaggaattcatctcc

SEQ ID NO: 4072110 - DNA, 25 bp, Homo sapien
tagacatcgacgcttcggcggtgaa

SEQ ID NO: 4072111 - DNA, 25 bp, Homo sapien
cgcaggtctgcggtgtgattacact

SEQ ID NO: 4072112 - DNA, 25 bp, Homo sapien
tacgatggcgcccaagagataacca

SEQ ID NO: 4072113 - DNA, 25 bp, Homo sapien
gagacccctcgctaaacttggacac

SEQ ID NO: 4072114 - DNA, 25 bp, Homo sapien
gacccctcgctaaacttggacacat

SEQ ID NO: 4072115 - DNA, 25 bp, Homo sapien
tctgagtgttgagtacgatggcgcc

SEQ ID NO: 4072116 - DNA, 25 bp, Homo sapien
tgttaagccggctacagcaaagtac

SEQ ID NO: 4072117 - DNA, 25 bp, Homo sapien
caacaataggaatttagattcccac

SEQ ID NO: 4072118 - DNA, 25 bp, Homo sapien
tgtggctggcagacggcgtcttctc

SEQ ID NO: 4072119 - DNA, 25 bp, Homo sapien
agtaccacaagcttcaacaatagga

SEQ ID NO: 4072120 - DNA, 25 bp, Homo sapien
tgttaagcacaggttggccctccct

SEQ ID NO: 4072121 - DNA, 25 bp, Homo sapien
ctcatatatggtggtgtgactaacc

SEQ ID NO: 4072122 - DNA, 25 bp, Homo sapien
gtgacgccgattaccgcactctcaa

SEQ ID NO: 4072123 - DNA, 25 bp, Homo sapien
gagcatcgtcatgacaccaggagga

SEQ ID NO: 4072124 - DNA, 25 bp, Homo sapien
acaagacctctaactgcctcgacga

SEQ ID NO: 4072125 - DNA, 25 bp, Homo sapien
tgggccaaagggcacacagacttcc

SEQ ID NO: 4072126 - DNA, 25 bp, Homo sapien
cagccttgagtctgcgtgaccttga

SEQ ID NO: 4072127 - DNA, 25 bp, Homo sapien
gcgctccgcttccagacagtaattg

SEQ ID NO: 4072128 - DNA, 25 bp, Homo sapien
catgctgtcagagatcacaggtggc

SEQ ID NO: 4072129 - DNA, 25 bp, Homo sapien
tgggaagggcactctgagctctctg

SEQ ID NO: 4072130 - DNA, 25 bp, Homo sapien
ggtgatcaagtcaggaaaagcttcc

SEQ ID NO: 4072131 - DNA, 25 bp, Homo sapien
tcagaaggagctctagagcaggcac

SEQ ID NO: 4072132 - DNA, 25 bp, Homo sapien
ttctaccattaagagacagaggctg

SEQ ID NO: 4072133 - DNA, 25 bp, Homo sapien
cttgaaagtgattcagctaaaattg

SEQ ID NO: 4072134 - DNA, 25 bp, Homo sapien
caaatgtttgaaccaaattctacca

SEQ ID NO: 4072135 - DNA, 25 bp, Homo sapien
taatattgtcgattattacaccaaa

SEQ ID NO: 4072136 - DNA, 25 bp, Homo sapien
tggcagacccctcgctgtgtggtga

SEQ ID NO: 4072137 - DNA, 25 bp, Homo sapien
gaccactgggctagcgatgacaatc

SEQ ID NO: 4072138 - DNA, 25 bp, Homo sapien
ttgactgacgcctactgagcatgtg

SEQ ID NO: 4072139 - DNA, 25 bp, Homo sapien
gaactgcatgttgaggaccactggg

SEQ ID NO: 4072140 - DNA, 25 bp, Homo sapien
tgggacagtggacagattgctggct

SEQ ID NO: 4072141 - DNA, 25 bp, Homo sapien
ggacagtggacagattgctggctcc

SEQ ID NO: 4072142 - DNA, 25 bp, Homo sapien
aggtgggacagtggacagattgctg

SEQ ID NO: 4072143 - DNA, 25 bp, Homo sapien
acagtggacagattgctggctccgg

SEQ ID NO: 4072144 - DNA, 25 bp, Homo sapien
tgggatcactgtgtcaatgcacgtg

SEQ ID NO: 4072145 - DNA, 25 bp, Homo sapien
cagtcacctgagtgttcaaagcgat

SEQ ID NO: 4072146 - DNA, 25 bp, Homo sapien
cctacccggcagagttactgggatc

SEQ ID NO: 4072147 - DNA, 25 bp, Homo sapien
tcaaagcgattgataatgacaacac

SEQ ID NO: 4072148 - DNA, 25 bp, Homo sapien
tcaggtattcctgttgcagtgggcc

SEQ ID NO: 4072149 - DNA, 25 bp, Homo sapien
gccagccggcgctggatgcaggatt

SEQ ID NO: 4072150 - DNA, 25 bp, Homo sapien
cagcttcatggatgtcaattgttag

SEQ ID NO: 4072151 - DNA, 25 bp, Homo sapien
tggatgcaggattggttaccagctt

SEQ ID NO: 4072152 - DNA, 25 bp, Homo sapien
gatgccttgtcccttttactgaagc

SEQ ID NO: 4072153 - DNA, 25 bp, Homo sapien
gccttgtcccttttactgaagcctg

SEQ ID NO: 4072154 - DNA, 25 bp, Homo sapien
tgcatattgataacggggcggtacc

SEQ ID NO: 4072155 - DNA, 25 bp, Homo sapien
tgtttgcgtgggagatgtgcatatt

SEQ ID NO: 4072156 - DNA, 25 bp, Homo sapien
aaccagaacctcttggcagctctca

SEQ ID NO: 4072157 - DNA, 25 bp, Homo sapien
agctctcaaccaggagggtgcccct

SEQ ID NO: 4072158 - DNA, 25 bp, Homo sapien
ggcagctctcaaccaggagggtgcc

SEQ ID NO: 4072159 - DNA, 25 bp, Homo sapien
accagaacctcttggcagctctcaa

SEQ ID NO: 4072160 - DNA, 25 bp, Homo sapien
gaaacagcctgggccttgctcctgg

SEQ ID NO: 4072161 - DNA, 25 bp, Homo sapien
agcctgggccttgctcctggtactg

SEQ ID NO: 4072162 - DNA, 25 bp, Homo sapien
cctgggccttgctcctggtactgca

SEQ ID NO: 4072163 - DNA, 25 bp, Homo sapien
tgggccttgctcctggtactgcagc

SEQ ID NO: 4072164 - DNA, 25 bp, Homo sapien
agcctggaggtcttatttcatcttg

SEQ ID NO: 4072165 - DNA, 25 bp, Homo sapien
cagaaagcctggaggtcttatttca

SEQ ID NO: 4072166 - DNA, 25 bp, Homo sapien
tggaggtcttatttcatcttgttgt

SEQ ID NO: 4072167 - DNA, 25 bp, Homo sapien
aaagcctggaggtcttatttcatct

SEQ ID NO: 4072168 - DNA, 25 bp, Homo sapien
caaggcttccgcctgccggaaagaa

SEQ ID NO: 4072169 - DNA, 25 bp, Homo sapien
aggcttccgcctgccggaaagaaca

SEQ ID NO: 4072170 - DNA, 25 bp, Homo sapien
gaaacaagcacaagtgtgagaacgt

SEQ ID NO: 4072171 - DNA, 25 bp, Homo sapien
gaacgtatccaagcaccaaggcttc

SEQ ID NO: 4072172 - DNA, 25 bp, Homo sapien
cggcgattttagaggaattctgaaa

SEQ ID NO: 4072173 - DNA, 25 bp, Homo sapien
cccgctcacggcgattttagaggaa

SEQ ID NO: 4072174 - DNA, 25 bp, Homo sapien
tttagaggaattctgaaatggtcgc

SEQ ID NO: 4072175 - DNA, 25 bp, Homo sapien
tagaggaattctgaaatggtcgctt

SEQ ID NO: 4072176 - DNA, 25 bp, Homo sapien
gggaaaatgcgtcctggttcagaca

SEQ ID NO: 4072177 - DNA, 25 bp, Homo sapien
tccttagtctttagcagggcacaaa

SEQ ID NO: 4072178 - DNA, 25 bp, Homo sapien
catccccggtttgcctagggctgag

SEQ ID NO: 4072179 - DNA, 25 bp, Homo sapien
cacaaagctctttgagaattgagaa

SEQ ID NO: 4072180 - DNA, 25 bp, Homo sapien
tagaaagaacatttttgcgcaagcc

SEQ ID NO: 4072181 - DNA, 25 bp, Homo sapien
gtgtcgcaccaaggaaaaaagtcag

SEQ ID NO: 4072182 - DNA, 25 bp, Homo sapien
ggtgacttcctcttaccagaacagc

SEQ ID NO: 4072183 - DNA, 25 bp, Homo sapien
caagcctgtgcactttcttgccgat

SEQ ID NO: 4072184 - DNA, 25 bp, Homo sapien
cattcacggcgtcggaagaggcctt

SEQ ID NO: 4072185 - DNA, 25 bp, Homo sapien
cacagtccgtccctaccaatagagg

SEQ ID NO: 4072186 - DNA, 25 bp, Homo sapien
tgatttcaacctccctgccaaaaga

SEQ ID NO: 4072187 - DNA, 25 bp, Homo sapien
gagcaagcgccaatgagtttcagga

SEQ ID NO: 4072188 - DNA, 25 bp, Homo sapien
ttgtaccaagccaacggcgttcctg

SEQ ID NO: 4072189 - DNA, 25 bp, Homo sapien
gcttccaaagcatcccactcaaggg

SEQ ID NO: 4072190 - DNA, 25 bp, Homo sapien
taccgtattccaaagcgtgtgctgg

SEQ ID NO: 4072191 - DNA, 25 bp, Homo sapien
tcctgtgtgtggaatagaggcccct

SEQ ID NO: 4072192 - DNA, 25 bp, Homo sapien
aagtccagtcgtgagggtcaggagc

SEQ ID NO: 4072193 - DNA, 25 bp, Homo sapien
agggtccgtcccactggcaggtttg

SEQ ID NO: 4072194 - DNA, 25 bp, Homo sapien
caggtttgcatgtgtatggaagtcc

SEQ ID NO: 4072195 - DNA, 25 bp, Homo sapien
cccagctttgggagaagatgccgag

SEQ ID NO: 4072196 - DNA, 25 bp, Homo sapien
cactggtctcgttttctgatttcag

SEQ ID NO: 4072197 - DNA, 25 bp, Homo sapien
agcgagtgtggacactggtctcgtt

SEQ ID NO: 4072198 - DNA, 25 bp, Homo sapien
tgtgtagctgtaaaccgctgctcca

SEQ ID NO: 4072199 - DNA, 25 bp, Homo sapien
gcaccaaccctggaggagcgagtgt

SEQ ID NO: 4072200 - DNA, 25 bp, Homo sapien
gcaaacttcatcacaacgggactga

SEQ ID NO: 4072201 - DNA, 25 bp, Homo sapien
cttcccttccagacggcgtgggttg

SEQ ID NO: 4072202 - DNA, 25 bp, Homo sapien
ccagatgctaaggagggataatcca

SEQ ID NO: 4072203 - DNA, 25 bp, Homo sapien
tgatgaccacttcacggatgagaca

SEQ ID NO: 4072204 - DNA, 25 bp, Homo sapien
gggtccttttaagccatgagcctga

SEQ ID NO: 4072205 - DNA, 25 bp, Homo sapien
ttacaattagggaaaatcgcactcg

SEQ ID NO: 4072206 - DNA, 25 bp, Homo sapien
aaaaagcgtcgtatatttggccagc

SEQ ID NO: 4072207 - DNA, 25 bp, Homo sapien
tccaagatgattcgccagacaggca

SEQ ID NO: 4072208 - DNA, 25 bp, Homo sapien
tgtctcgcagttcatcagcgttctc

SEQ ID NO: 4072209 - DNA, 25 bp, Homo sapien
caagaccccggtgagtattgtccaa

SEQ ID NO: 4072210 - DNA, 25 bp, Homo sapien
cccctcccatagagaggccacaggc

SEQ ID NO: 4072211 - DNA, 25 bp, Homo sapien
gcgttctccgcatcaggattccaga

SEQ ID NO: 4072212 - DNA, 25 bp, Homo sapien
ctggaaactgtttgggagtgacctt

SEQ ID NO: 4072213 - DNA, 25 bp, Homo sapien
ggtcacttgtcatgggcacaaaagc

SEQ ID NO: 4072214 - DNA, 25 bp, Homo sapien
gcaacagtactcactgggcaacatt

SEQ ID NO: 4072215 - DNA, 25 bp, Homo sapien
acatttgtgagtcgcgcttgagtgc

SEQ ID NO: 4072216 - DNA, 25 bp, Homo sapien
aaagttacattgaaagaagaggttg

SEQ ID NO: 4072217 - DNA, 25 bp, Homo sapien
gtatacttgatttgcacacacttgc

SEQ ID NO: 4072218 - DNA, 25 bp, Homo sapien
ctcgcttggctaggacggtggctca

SEQ ID NO: 4072219 - DNA, 25 bp, Homo sapien
gcacacgcttctgcggtgaccaagt

SEQ ID NO: 4072220 - DNA, 25 bp, Homo sapien
gaacaatctcggaaactggcgtctc

SEQ ID NO: 4072221 - DNA, 25 bp, Homo sapien
ccctttgtggttttgcatcagcagt

SEQ ID NO: 4072222 - DNA, 25 bp, Homo sapien
caacttctcttagtgtggagggcaa

SEQ ID NO: 4072223 - DNA, 25 bp, Homo sapien
ggcaagcataaaggaagaccctcag

SEQ ID NO: 4072224 - DNA, 25 bp, Homo sapien
tcgggctgccccaagtatcaagtca

SEQ ID NO: 4072225 - DNA, 25 bp, Homo sapien
cagattgcttcttgatgcgtccggc

SEQ ID NO: 4072226 - DNA, 25 bp, Homo sapien
tatgtaaacgccctgctgtgatccg

SEQ ID NO: 4072227 - DNA, 25 bp, Homo sapien
ggatcgagatgtcctccaacagcaa

SEQ ID NO: 4072228 - DNA, 25 bp, Homo sapien
caaagcatcggagctaatcgagacc

SEQ ID NO: 4072229 - DNA, 25 bp, Homo sapien
cattcatagtaaccacgggcaggac

SEQ ID NO: 4072230 - DNA, 25 bp, Homo sapien
tctgggtctcgtgggcagtcgccta

SEQ ID NO: 4072231 - DNA, 25 bp, Homo sapien
tctcgtgggcagtcgcctaaatcgg

SEQ ID NO: 4072232 - DNA, 25 bp, Homo sapien
tcgcctaaatcggaagcccacaaag

SEQ ID NO: 4072233 - DNA, 25 bp, Homo sapien
aaagggattcatccagaggagtgag

SEQ ID NO: 4072234 - DNA, 25 bp, Homo sapien
cgtcgttgcatatggagtggatttg

SEQ ID NO: 4072235 - DNA, 25 bp, Homo sapien
tcgtcgttgcatatggagtggattt

SEQ ID NO: 4072236 - DNA, 25 bp, Homo sapien
cgtctcgtcgttgcatatggagtgg

SEQ ID NO: 4072237 - DNA, 25 bp, Homo sapien
tctcgtcgttgcatatggagtggat

SEQ ID NO: 4072238 - DNA, 25 bp, Homo sapien
caggattacagttatcggaggtgaa

SEQ ID NO: 4072239 - DNA, 25 bp, Homo sapien
caacaggattacagttatcggaggt

SEQ ID NO: 4072240 - DNA, 25 bp, Homo sapien
tatcggaggtgaaaaatcactgcat

SEQ ID NO: 4072241 - DNA, 25 bp, Homo sapien
acagttatcggaggtgaaaaatcac

SEQ ID NO: 4072242 - DNA, 25 bp, Homo sapien
caaaggatcagagcatggactgaag

SEQ ID NO: 4072243 - DNA, 25 bp, Homo sapien
aggatcagagcatggactgaagaca

SEQ ID NO: 4072244 - DNA, 25 bp, Homo sapien
cacaaaggatcagagcatggactga

SEQ ID NO: 4072245 - DNA, 25 bp, Homo sapien
tccacaaaggatcagagcatggact

SEQ ID NO: 4072246 - DNA, 25 bp, Homo sapien
aattgttcacccacgggcagtgatg

SEQ ID NO: 4072247 - DNA, 25 bp, Homo sapien
gatgatccattttccgaatacatct

SEQ ID NO: 4072248 - DNA, 25 bp, Homo sapien
tgatgatccattttccgaatacatc

SEQ ID NO: 4072249 - DNA, 25 bp, Homo sapien
ttcttttctcctacacaattgttca

SEQ ID NO: 4072250 - DNA, 25 bp, Homo sapien
agagtttgatttttcagtattccat

SEQ ID NO: 4072251 - DNA, 25 bp, Homo sapien
ctgaaaaggagagtttgatttttca

SEQ ID NO: 4072252 - DNA, 25 bp, Homo sapien
gtttgatttttcagtattccatgct

SEQ ID NO: 4072253 - DNA, 25 bp, Homo sapien
tgaaaaggagagtttgatttttcag

SEQ ID NO: 4072254 - DNA, 25 bp, Homo sapien
ccgtacaacgttgcccagatgctcg

SEQ ID NO: 4072255 - DNA, 25 bp, Homo sapien
cgttgcccagatgctcgggggccat

SEQ ID NO: 4072256 - DNA, 25 bp, Homo sapien
cccgcccgtacaacgttgcccagat

SEQ ID NO: 4072257 - DNA, 25 bp, Homo sapien
gcccgtacaacgttgcccagatgct

SEQ ID NO: 4072258 - DNA, 25 bp, Homo sapien
tggtttaatacagcagcacacgtac

SEQ ID NO: 4072259 - DNA, 25 bp, Homo sapien
ggtggtgggcgcactctggtttaat

SEQ ID NO: 4072260 - DNA, 25 bp, Homo sapien
ctggtttaatacagcagcacacgta

SEQ ID NO: 4072261 - DNA, 25 bp, Homo sapien
ggtgggcgcactctggtttaataca

SEQ ID NO: 4072262 - DNA, 25 bp, Homo sapien
gcgctcgggtttaatacagcagcgc

SEQ ID NO: 4072263 - DNA, 25 bp, Homo sapien
ccgcagtggcggatgcgctcgggtt

SEQ ID NO: 4072264 - DNA, 25 bp, Homo sapien
cagtggcggatgcgctcgggtttaa

SEQ ID NO: 4072265 - DNA, 25 bp, Homo sapien
gctcgggtttaatacagcagcgcac

SEQ ID NO: 4072266 - DNA, 25 bp, Homo sapien
catgtattctttcgtagcgtttcct

SEQ ID NO: 4072267 - DNA, 25 bp, Homo sapien
ctccatgtattctttcgtagcgttt

SEQ ID NO: 4072268 - DNA, 25 bp, Homo sapien
ctcgggtttaatacagcagcacttg

SEQ ID NO: 4072269 - DNA, 25 bp, Homo sapien
gctcgggtttaatacagcagcactt

SEQ ID NO: 4072270 - DNA, 25 bp, Homo sapien
gactgataagcactgcccagagttt

SEQ ID NO: 4072271 - DNA, 25 bp, Homo sapien
gcagggaacctctttgcacaccact

SEQ ID NO: 4072272 - DNA, 25 bp, Homo sapien
cagagttttcttatcgggcagtcgg

SEQ ID NO: 4072273 - DNA, 25 bp, Homo sapien
tgataaatggcttaaccacctgcat

SEQ ID NO: 4072274 - DNA, 25 bp, Homo sapien
catctgtgccccaagtgctagagga

SEQ ID NO: 4072275 - DNA, 25 bp, Homo sapien
gcccagcggcatcagaaacttgaac

SEQ ID NO: 4072276 - DNA, 25 bp, Homo sapien
ctgacccgattcatgtctggcaacg

SEQ ID NO: 4072277 - DNA, 25 bp, Homo sapien
attcatgtctggcaacgaggccgcc

SEQ ID NO: 4072278 - DNA, 25 bp, Homo sapien
cagcaccatgtcaactgaggacccg

SEQ ID NO: 4072279 - DNA, 25 bp, Homo sapien
gaataaaataggcagacctgcctgg

SEQ ID NO: 4072280 - DNA, 25 bp, Homo sapien
tgcctgggggttccaatgcctcaag

SEQ ID NO: 4072281 - DNA, 25 bp, Homo sapien
ccttgtgtctgcctcttagcctgga

SEQ ID NO: 4072282 - DNA, 25 bp, Homo sapien
cctggatcctgcacttcacgtagaa

SEQ ID NO: 4072283 - DNA, 25 bp, Homo sapien
ccttcagaggtgctccctgattggc

SEQ ID NO: 4072284 - DNA, 25 bp, Homo sapien
ctcccttcagaggtgctccctgatt

SEQ ID NO: 4072285 - DNA, 25 bp, Homo sapien
ttcagaggtgctccctgattggctg

SEQ ID NO: 4072286 - DNA, 25 bp, Homo sapien
cagcggcctcccttcagaggtgctc

SEQ ID NO: 4072287 - DNA, 25 bp, Homo sapien
aaagcacgcttttggcagagctcct

SEQ ID NO: 4072288 - DNA, 25 bp, Homo sapien
ctggacagcagtcgcggccccatga

SEQ ID NO: 4072289 - DNA, 25 bp, Homo sapien
gaggaaagcacgcttttggcagagc

SEQ ID NO: 4072290 - DNA, 25 bp, Homo sapien
ggtgggaggaaagcacgcttttggc

SEQ ID NO: 4072291 - DNA, 25 bp, Homo sapien
cactcgcacggctgccgagaaggct

SEQ ID NO: 4072292 - DNA, 25 bp, Homo sapien
ctgccgagaaggctcgtaggcatcc

SEQ ID NO: 4072293 - DNA, 25 bp, Homo sapien
cgcacggctgccgagaaggctcgta

SEQ ID NO: 4072294 - DNA, 25 bp, Homo sapien
cgagaaggctcgtaggcatccacgg

SEQ ID NO: 4072295 - DNA, 25 bp, Homo sapien
gaatacttggcagttccacaaaagg

SEQ ID NO: 4072296 - DNA, 25 bp, Homo sapien
gccgaaaagcagaactcgcccagat

SEQ ID NO: 4072297 - DNA, 25 bp, Homo sapien
caaaaacttacacgcggccgttcag

SEQ ID NO: 4072298 - DNA, 25 bp, Homo sapien
cgaagacgcaatgcctggtgagagc

SEQ ID NO: 4072299 - DNA, 25 bp, Homo sapien
gagcagaagctggactgctgagtag

SEQ ID NO: 4072300 - DNA, 25 bp, Homo sapien
ggagcagaagctggactgctgagta

SEQ ID NO: 4072301 - DNA, 25 bp, Homo sapien
gggagcagaagctggactgctgagt

SEQ ID NO: 4072302 - DNA, 25 bp, Homo sapien
gaggctttgcacagactcggttccc

SEQ ID NO: 4072303 - DNA, 25 bp, Homo sapien
gctttgcacagactcggttccctca

SEQ ID NO: 4072304 - DNA, 25 bp, Homo sapien
gcaggaggctttgcacagactcggt

SEQ ID NO: 4072305 - DNA, 25 bp, Homo sapien
aagcaggaggctttgcacagactcg

SEQ ID NO: 4072306 - DNA, 25 bp, Homo sapien
gcccacaagggttgggtccagccca

SEQ ID NO: 4072307 - DNA, 25 bp, Homo sapien
gcagatggtcggcagtcactggatt

SEQ ID NO: 4072308 - DNA, 25 bp, Homo sapien
cacaaatgcccacaagggttgggtc

SEQ ID NO: 4072309 - DNA, 25 bp, Homo sapien
tgcaggcagatggtcggcagtcact

SEQ ID NO: 4072310 - DNA, 25 bp, Homo sapien
ctcctttgtcgaagtgcctgggcac

SEQ ID NO: 4072311 - DNA, 25 bp, Homo sapien
cggagacacacagggatcaggagca

SEQ ID NO: 4072312 - DNA, 25 bp, Homo sapien
tattccagtaaaaatcgctgagctg

SEQ ID NO: 4072313 - DNA, 25 bp, Homo sapien
cctgggcactttgggcaacaaacaa

SEQ ID NO: 4072314 - DNA, 25 bp, Homo sapien
ccgttgaccacagagtaccagaagt

SEQ ID NO: 4072315 - DNA, 25 bp, Homo sapien
tgacgaaagtcaccacgaagtctgc

SEQ ID NO: 4072316 - DNA, 25 bp, Homo sapien
cagttaaagatgaccccgttgacca

SEQ ID NO: 4072317 - DNA, 25 bp, Homo sapien
taggcgaccagaagccacgtcatga

SEQ ID NO: 4072318 - DNA, 25 bp, Homo sapien
tgagagctcttgcaggtccgacctc

SEQ ID NO: 4072319 - DNA, 25 bp, Homo sapien
tgctgtctggcgcacagcaagggca

SEQ ID NO: 4072320 - DNA, 25 bp, Homo sapien
atgccttgcatgctgtctggcgcac

SEQ ID NO: 4072321 - DNA, 25 bp, Homo sapien
cacttgctacctgagagctcttgca

SEQ ID NO: 4072322 - DNA, 25 bp, Homo sapien
tttgtgccgtttcttcaggatctta

SEQ ID NO: 4072323 - DNA, 25 bp, Homo sapien
tgcatactgtcctatgtgatcggat

SEQ ID NO: 4072324 - DNA, 25 bp, Homo sapien
cattttgtgccgtttcttcaggatc

SEQ ID NO: 4072325 - DNA, 25 bp, Homo sapien
taaggtgcatactgtcctatgtgat

SEQ ID NO: 4072326 - DNA, 25 bp, Homo sapien
agcggccgaggcagggacgcatcat

SEQ ID NO: 4072327 - DNA, 25 bp, Homo sapien
ggcggggtcgcccggcgctgcggct

SEQ ID NO: 4072328 - DNA, 25 bp, Homo sapien
ggtcgcccggcgctgcggctcctcc

SEQ ID NO: 4072329 - DNA, 25 bp, Homo sapien
cggcggcgactgcagcggccgaggc

SEQ ID NO: 4072330 - DNA, 25 bp, Homo sapien
ccgggcaggtcggaaggaggctgca

SEQ ID NO: 4072331 - DNA, 25 bp, Homo sapien
cggccgcgctcatggccgggctgga

SEQ ID NO: 4072332 - DNA, 25 bp, Homo sapien
ctcggctcggcttggtcccctgggt

SEQ ID NO: 4072333 - DNA, 25 bp, Homo sapien
ggcggtgcgagcgccggaagtgaac

SEQ ID NO: 4072334 - DNA, 25 bp, Homo sapien
caactgaaataatgtcgtgaggttg

SEQ ID NO: 4072335 - DNA, 25 bp, Homo sapien
actgaaataatgtcgtgaggttggg

SEQ ID NO: 4072336 - DNA, 25 bp, Homo sapien
ataatgtcgtgaggttgggggaggg

SEQ ID NO: 4072337 - DNA, 25 bp, Homo sapien
aaataatgtcgtgaggttgggggag

SEQ ID NO: 4072338 - DNA, 25 bp, Homo sapien
tgatttgcgagacaagtactgaccg

SEQ ID NO: 4072339 - DNA, 25 bp, Homo sapien
tactgaccgttgtgcttcaccgtga

SEQ ID NO: 4072340 - DNA, 25 bp, Homo sapien
ggccatgcggctcctgacagtgaat

SEQ ID NO: 4072341 - DNA, 25 bp, Homo sapien
ttcaggtcaggatgcagggtttctc

SEQ ID NO: 4072342 - DNA, 25 bp, Homo sapien
ttaatgtccccaattaccatcatcc

SEQ ID NO: 4072343 - DNA, 25 bp, Homo sapien
agatccagtgtccttttaatgtccc

SEQ ID NO: 4072344 - DNA, 25 bp, Homo sapien
gtctccttccagagatccagtgtcc

SEQ ID NO: 4072345 - DNA, 25 bp, Homo sapien
cattactgcccatttcttgtgtctc

SEQ ID NO: 4072346 - DNA, 25 bp, Homo sapien
cagatgatggcagccgacaatgtgc

SEQ ID NO: 4072347 - DNA, 25 bp, Homo sapien
caatgtgcatctcaaagggacgacc

SEQ ID NO: 4072348 - DNA, 25 bp, Homo sapien
cattctggctttgcacattgaggga

SEQ ID NO: 4072349 - DNA, 25 bp, Homo sapien
gatgttgcccttgatcttgcctgca

SEQ ID NO: 4072350 - DNA, 25 bp, Homo sapien
gcagtgcggctgcatctttcacaca

SEQ ID NO: 4072351 - DNA, 25 bp, Homo sapien
cagtgcggctgcatctttcacacat

SEQ ID NO: 4072352 - DNA, 25 bp, Homo sapien
gggcagtgcggctgcatctttcaca

SEQ ID NO: 4072353 - DNA, 25 bp, Homo sapien
tctgggcagtgcggctgcatctttc

SEQ ID NO: 4072354 - DNA, 25 bp, Homo sapien
ggcatgctccgtcctaaccttcagt

SEQ ID NO: 4072355 - DNA, 25 bp, Homo sapien
tagcttggttgtggcaggcactcca

SEQ ID NO: 4072356 - DNA, 25 bp, Homo sapien
cccatgcgagttgaggatattcacc

SEQ ID NO: 4072357 - DNA, 25 bp, Homo sapien
caggagctcgtaacaacttgatggg

SEQ ID NO: 4072358 - DNA, 25 bp, Homo sapien
ttaagagtggaaggccaagtcggtc

SEQ ID NO: 4072359 - DNA, 25 bp, Homo sapien
caagtcggtctctgtccgagttgaa

SEQ ID NO: 4072360 - DNA, 25 bp, Homo sapien
gtccgagttgaattcagctgtcccg

SEQ ID NO: 4072361 - DNA, 25 bp, Homo sapien
gctgtcccggagtcagccgctgtgt

SEQ ID NO: 4072362 - DNA, 25 bp, Homo sapien
gagttgggtttgttgtggagccttg

SEQ ID NO: 4072363 - DNA, 25 bp, Homo sapien
ttgggtttgttgtggagccttgtgc

SEQ ID NO: 4072364 - DNA, 25 bp, Homo sapien
tgttttccgcagtgtggtagagttg

SEQ ID NO: 4072365 - DNA, 25 bp, Homo sapien
cccttgttttccgcagtgtggtaga

SEQ ID NO: 4072366 - DNA, 25 bp, Homo sapien
cttcaggccttgtgcggagaacgca

SEQ ID NO: 4072367 - DNA, 25 bp, Homo sapien
cattgagggcctcgagaaagccaac

SEQ ID NO: 4072368 - DNA, 25 bp, Homo sapien
catggtccatagcattcacagggtc

SEQ ID NO: 4072369 - DNA, 25 bp, Homo sapien
tgcctgtagagtgcctggatagccg

SEQ ID NO: 4072370 - DNA, 25 bp, Homo sapien
gtgcgtggacactgctaggccgcct

SEQ ID NO: 4072371 - DNA, 25 bp, Homo sapien
gcacttactgcctgggaaccacggc

SEQ ID NO: 4072372 - DNA, 25 bp, Homo sapien
cagagccttctgtttcaccgtgcgt

SEQ ID NO: 4072373 - DNA, 25 bp, Homo sapien
accagacctttgtagctcctccagc

SEQ ID NO: 4072374 - DNA, 25 bp, Homo sapien
tgcatgcgcatgtttaaccacaggc

SEQ ID NO: 4072375 - DNA, 25 bp, Homo sapien
ggggccgtggtaatagattgcatct

SEQ ID NO: 4072376 - DNA, 25 bp, Homo sapien
gcgcatgtttaaccacaggccagag

SEQ ID NO: 4072377 - DNA, 25 bp, Homo sapien
gagaactcaattctgatgtcgtaag

SEQ ID NO: 4072378 - DNA, 25 bp, Homo sapien
tactcactgcaacctccacctcccg

SEQ ID NO: 4072379 - DNA, 25 bp, Homo sapien
tgcagtgacacaatctctactcact

SEQ ID NO: 4072380 - DNA, 25 bp, Homo sapien
gcagtgacacaatctctactcactg

SEQ ID NO: 4072381 - DNA, 25 bp, Homo sapien
cccccacctcagcctcccaaagtgc

SEQ ID NO: 4072382 - DNA, 25 bp, Homo sapien
tccttttctctgattgtaagaagtc

SEQ ID NO: 4072383 - DNA, 25 bp, Homo sapien
ctctgattgtaagaagtccacagcc

SEQ ID NO: 4072384 - DNA, 25 bp, Homo sapien
cacagccacattctgatactctggc

SEQ ID NO: 4072385 - DNA, 25 bp, Homo sapien
ttttctctgattgtaagaagtccac

SEQ ID NO: 4072386 - DNA, 25 bp, Homo sapien
tgtactccgggaccattggtctctt

SEQ ID NO: 4072387 - DNA, 25 bp, Homo sapien
ctgtactccgggaccattggtctct

SEQ ID NO: 4072388 - DNA, 25 bp, Homo sapien
gacacgtggcttgcctgagggcaca

SEQ ID NO: 4072389 - DNA, 25 bp, Homo sapien
tcctgggctccatatggtgctctga

SEQ ID NO: 4072390 - DNA, 25 bp, Homo sapien
cctgtgaagtgagtgatattggccc

SEQ ID NO: 4072391 - DNA, 25 bp, Homo sapien
agagcccacctgaggatccaaggcc

SEQ ID NO: 4072392 - DNA, 25 bp, Homo sapien
tgttgcgcaacaggccgggttttct

SEQ ID NO: 4072393 - DNA, 25 bp, Homo sapien
cacagagaggctaggagactttccc

SEQ ID NO: 4072394 - DNA, 25 bp, Homo sapien
taatggcagcaacaagtctcaagtg

SEQ ID NO: 4072395 - DNA, 25 bp, Homo sapien
cacggaggttactgttctaagccac

SEQ ID NO: 4072396 - DNA, 25 bp, Homo sapien
gccccttaaccacccactcacagag

SEQ ID NO: 4072397 - DNA, 25 bp, Homo sapien
ccttaaccacccactcacagagact

SEQ ID NO: 4072398 - DNA, 25 bp, Homo sapien
taaccacccactcacagagactaaa

SEQ ID NO: 4072399 - DNA, 25 bp, Homo sapien
tggctgccccttaaccacccactca

SEQ ID NO: 4072400 - DNA, 25 bp, Homo sapien
gttcagggtcttcatttgccctact

SEQ ID NO: 4072401 - DNA, 25 bp, Homo sapien
catgattggcatgaggatgttcagg

SEQ ID NO: 4072402 - DNA, 25 bp, Homo sapien
ctggctggcgagagactgaagaaca

SEQ ID NO: 4072403 - DNA, 25 bp, Homo sapien
gccgagtgtcataatgcccataaac

SEQ ID NO: 4072404 - DNA, 25 bp, Homo sapien
ctggcgagagactgaagaacagatg

SEQ ID NO: 4072405 - DNA, 25 bp, Homo sapien
tgttggcaagcagccgagtgtcata

SEQ ID NO: 4072406 - DNA, 25 bp, Homo sapien
gaatacacctccaccgctttggcat

SEQ ID NO: 4072407 - DNA, 25 bp, Homo sapien
gctttggcatggaaaaccatctcaa

SEQ ID NO: 4072408 - DNA, 25 bp, Homo sapien
tccagggtctggaaggcgctagaat

SEQ ID NO: 4072409 - DNA, 25 bp, Homo sapien
tctggaaggcgctagaatacacctc

SEQ ID NO: 4072410 - DNA, 25 bp, Homo sapien
tccacagcggccctctgcactctgg

SEQ ID NO: 4072411 - DNA, 25 bp, Homo sapien
ctggagggtggtgcggctggagtcc

SEQ ID NO: 4072412 - DNA, 25 bp, Homo sapien
agggtggtgcggctggagtccacag

SEQ ID NO: 4072413 - DNA, 25 bp, Homo sapien
agtccacagcggccctctgcactct

SEQ ID NO: 4072414 - DNA, 25 bp, Homo sapien
cctggcccggcagccccaggcccca

SEQ ID NO: 4072415 - DNA, 25 bp, Homo sapien
ctggcccggcagccccaggccccac

SEQ ID NO: 4072416 - DNA, 25 bp, Homo sapien
tgtttgatctcatgattttggacat

SEQ ID NO: 4072417 - DNA, 25 bp, Homo sapien
tcatttgctgatccgagggtgactt

SEQ ID NO: 4072418 - DNA, 25 bp, Homo sapien
tttccagttgtttgatctcatgatt

SEQ ID NO: 4072419 - DNA, 25 bp, Homo sapien
ccgagggtgacttctgcctcagttt

SEQ ID NO: 4072420 - DNA, 25 bp, Homo sapien
tgtctgcttgatctgtgccccgtag

SEQ ID NO: 4072421 - DNA, 25 bp, Homo sapien
ccgtagagcttcagggggttgacca

SEQ ID NO: 4072422 - DNA, 25 bp, Homo sapien
ccgtgtctgcttgatctgtgccccg

SEQ ID NO: 4072423 - DNA, 25 bp, Homo sapien
tctgcttgatctgtgccccgtagag

SEQ ID NO: 4072424 - DNA, 25 bp, Homo sapien
ggatctgagcgcagggtgctgcctg

SEQ ID NO: 4072425 - DNA, 25 bp, Homo sapien
ccaggggatctgagcgcagggtgct

SEQ ID NO: 4072426 - DNA, 25 bp, Homo sapien
gggatctgagcgcagggtgctgcct

SEQ ID NO: 4072427 - DNA, 25 bp, Homo sapien
acaccaggggatctgagcgcagggt

SEQ ID NO: 4072428 - DNA, 25 bp, Homo sapien
gtcttgcgcgtgtaggcggccagca

SEQ ID NO: 4072429 - DNA, 25 bp, Homo sapien
aagtacttctcggtgttggccacgg

SEQ ID NO: 4072430 - DNA, 25 bp, Homo sapien
gcaaagtcgatgagctgcttgacca

SEQ ID NO: 4072431 - DNA, 25 bp, Homo sapien
tgggcctgccggtaatcctgcactt

SEQ ID NO: 4072432 - DNA, 25 bp, Homo sapien
ctgtggaggcggggacctgagcagc

SEQ ID NO: 4072433 - DNA, 25 bp, Homo sapien
tggaggcggggacctgagcagccat

SEQ ID NO: 4072434 - DNA, 25 bp, Homo sapien
tgtggaggcggggacctgagcagcc

SEQ ID NO: 4072435 - DNA, 25 bp, Homo sapien
ggaggcggggacctgagcagccatt

SEQ ID NO: 4072436 - DNA, 25 bp, Homo sapien
tctcgtggctgtcccggtgcctcgg

SEQ ID NO: 4072437 - DNA, 25 bp, Homo sapien
ccgaggcaccgggacagccacgaga

SEQ ID NO: 4072438 - DNA, 25 bp, Homo sapien
gtgaccagagctttggctgtcccgg

SEQ ID NO: 4072439 - DNA, 25 bp, Homo sapien
gaccagagctttggctgtcccggtg

SEQ ID NO: 4072440 - DNA, 25 bp, Homo sapien
tgtgaccagagctttggctgtcccg

SEQ ID NO: 4072441 - DNA, 25 bp, Homo sapien
tgaccagagctttggctgtcccggt

SEQ ID NO: 4072442 - DNA, 25 bp, Homo sapien
ctggggaataaggacagggccccag

SEQ ID NO: 4072443 - DNA, 25 bp, Homo sapien
aggacagggccccaggggtcctgca

SEQ ID NO: 4072444 - DNA, 25 bp, Homo sapien
gacagggccccaggggtcctgcagg

SEQ ID NO: 4072445 - DNA, 25 bp, Homo sapien
acagggccccaggggtcctgcaggc

SEQ ID NO: 4072446 - DNA, 25 bp, Homo sapien
ccgggcagggctgggtgcagctgtg

SEQ ID NO: 4072447 - DNA, 25 bp, Homo sapien
cagggctgggtgcagctgtgtggcc

SEQ ID NO: 4072448 - DNA, 25 bp, Homo sapien
agggctgggtgcagctgtgtggcct

SEQ ID NO: 4072449 - DNA, 25 bp, Homo sapien
ggcagggctgggtgcagctgtgtgg

SEQ ID NO: 4072450 - DNA, 25 bp, Homo sapien
gttgctaggcgatggggccgcccac

SEQ ID NO: 4072451 - DNA, 25 bp, Homo sapien
tcaagggacgctgccacccggttgc

SEQ ID NO: 4072452 - DNA, 25 bp, Homo sapien
aagggacgctgccacccggttgcta

SEQ ID NO: 4072453 - DNA, 25 bp, Homo sapien
acccggttgctaggcgatggggccg

SEQ ID NO: 4072454 - DNA, 25 bp, Homo sapien
tggcctggtccgcgctactgccgat

SEQ ID NO: 4072455 - DNA, 25 bp, Homo sapien
gcctggtccgcgctactgccgatgg

SEQ ID NO: 4072456 - DNA, 25 bp, Homo sapien
cagttggcctggtccgcgctactgc

SEQ ID NO: 4072457 - DNA, 25 bp, Homo sapien
tggtccgcgctactgccgatggcca

SEQ ID NO: 4072458 - DNA, 25 bp, Homo sapien
catgccccagcgacaggcctggtgt

SEQ ID NO: 4072459 - DNA, 25 bp, Homo sapien
atgccccagcgacaggcctggtgtc

SEQ ID NO: 4072460 - DNA, 25 bp, Homo sapien
gaaaagtgcataatcccacatccag

SEQ ID NO: 4072461 - DNA, 25 bp, Homo sapien
ccgtgggtaacagaggatgcatttc

SEQ ID NO: 4072462 - DNA, 25 bp, Homo sapien
cacatccagagatacccgtgggtaa

SEQ ID NO: 4072463 - DNA, 25 bp, Homo sapien
gcctttccctccctgattatgtagt

SEQ ID NO: 4072464 - DNA, 25 bp, Homo sapien
taaacaataagtgctgagctgggcg

SEQ ID NO: 4072465 - DNA, 25 bp, Homo sapien
gggcacatccgctccaatgaggtga

SEQ ID NO: 4072466 - DNA, 25 bp, Homo sapien
tgtccgtgcatttggccgggacgac

SEQ ID NO: 4072467 - DNA, 25 bp, Homo sapien
gagacactgcttcccgtgggcctgg

SEQ ID NO: 4072468 - DNA, 25 bp, Homo sapien
ggcaatgaccgtagccccatcttca

SEQ ID NO: 4072469 - DNA, 25 bp, Homo sapien
taattcctttgaagctttccagcct

SEQ ID NO: 4072470 - DNA, 25 bp, Homo sapien
ttttgaaggcaatgaccgtagcccc

SEQ ID NO: 4072471 - DNA, 25 bp, Homo sapien
caaatccaggaaagcatataccgta

SEQ ID NO: 4072472 - DNA, 25 bp, Homo sapien
aacttcacatagattttcccgtatc

SEQ ID NO: 4072473 - DNA, 25 bp, Homo sapien
caaacttcacatagattttcccgta

SEQ ID NO: 4072474 - DNA, 25 bp, Homo sapien
aaacttcacatagattttcccgtat

SEQ ID NO: 4072475 - DNA, 25 bp, Homo sapien
ggccacgcctttcctgaagccaccc

SEQ ID NO: 4072476 - DNA, 25 bp, Homo sapien
gttccggccacgcctttcctgaagc

SEQ ID NO: 4072477 - DNA, 25 bp, Homo sapien
ccccaccctgctggccgggctgctc

SEQ ID NO: 4072478 - DNA, 25 bp, Homo sapien
cacgcctttcctgaagccaccccct

SEQ ID NO: 4072479 - DNA, 25 bp, Homo sapien
cgatcacgccgatgagaaggcctcg

SEQ ID NO: 4072480 - DNA, 25 bp, Homo sapien
tctgtcaccaaacttccgaggctgc

SEQ ID NO: 4072481 - DNA, 25 bp, Homo sapien
actggaatgaacgttctctgagccc

SEQ ID NO: 4072482 - DNA, 25 bp, Homo sapien
tatacaaatagtgcctacccagtgc

SEQ ID NO: 4072483 - DNA, 25 bp, Homo sapien
ttacagcaggaggcatacagggacc

SEQ ID NO: 4072484 - DNA, 25 bp, Homo sapien
tacagcaggaggcatacagggacct

SEQ ID NO: 4072485 - DNA, 25 bp, Homo sapien
tcttcttcgggccacggcaaagcca

SEQ ID NO: 4072486 - DNA, 25 bp, Homo sapien
gctttaaccgctgcatgcagattgg

SEQ ID NO: 4072487 - DNA, 25 bp, Homo sapien
tgtgacatgtcagctgtatgaccct

SEQ ID NO: 4072488 - DNA, 25 bp, Homo sapien
tatgaccctgagcagagctctgttg

SEQ ID NO: 4072489 - DNA, 25 bp, Homo sapien
ggaatgtggccatccccaccagcgg

SEQ ID NO: 4072490 - DNA, 25 bp, Homo sapien
agtccgcacagctgtgggtctcctg

SEQ ID NO: 4072491 - DNA, 25 bp, Homo sapien
tggaatgtggccatccccaccagcg

SEQ ID NO: 4072492 - DNA, 25 bp, Homo sapien
ccaccagcggggagtccgcacagct

SEQ ID NO: 4072493 - DNA, 25 bp, Homo sapien
ttatcaatcaataacctccctggcc

SEQ ID NO: 4072494 - DNA, 25 bp, Homo sapien
gctgctgttagctgagcacatactg

SEQ ID NO: 4072495 - DNA, 25 bp, Homo sapien
ggcaccttgacgatcattggagggt

SEQ ID NO: 4072496 - DNA, 25 bp, Homo sapien
tgtgtgccatcaggcgtcttatgtc

SEQ ID NO: 4072497 - DNA, 25 bp, Homo sapien
gccatgttccaggtgcaacccccag

SEQ ID NO: 4072498 - DNA, 25 bp, Homo sapien
cttgactcgcctgaggtcagctgga

SEQ ID NO: 4072499 - DNA, 25 bp, Homo sapien
ccaggaacacctttgtgcaacagct

SEQ ID NO: 4072500 - DNA, 25 bp, Homo sapien
catgttccaggtgcaacccccagcc

SEQ ID NO: 4072501 - DNA, 25 bp, Homo sapien
gaaattccaattagatgcaggcgag

SEQ ID NO: 4072502 - DNA, 25 bp, Homo sapien
gaaagtaaagcttgtcccgagaaca

SEQ ID NO: 4072503 - DNA, 25 bp, Homo sapien
ccaaaatccggatgtcgacagggct

SEQ ID NO: 4072504 - DNA, 25 bp, Homo sapien
taaggcactaacaatggcccagggc

SEQ ID NO: 4072505 - DNA, 25 bp, Homo sapien
tgggtttggaacatgcttcggtgac

SEQ ID NO: 4072506 - DNA, 25 bp, Homo sapien
cgagctggcggctgggtttggaaca

SEQ ID NO: 4072507 - DNA, 25 bp, Homo sapien
cagaggccagggaagtcgagctggc

SEQ ID NO: 4072508 - DNA, 25 bp, Homo sapien
agggaagtcgagctggcggctgggt

SEQ ID NO: 4072509 - DNA, 25 bp, Homo sapien
gaagccataggcaggactcgaaggc

SEQ ID NO: 4072510 - DNA, 25 bp, Homo sapien
taatctgctgctgttgacttcaccg

SEQ ID NO: 4072511 - DNA, 25 bp, Homo sapien
aaacctgtcctgaagttggcggccg

SEQ ID NO: 4072512 - DNA, 25 bp, Homo sapien
tgagtattccagtgccagagagctg

SEQ ID NO: 4072513 - DNA, 25 bp, Homo sapien
ggcacttctcggttgcacgctggtt

SEQ ID NO: 4072514 - DNA, 25 bp, Homo sapien
tcggttgcacgctggttagtattgg

SEQ ID NO: 4072515 - DNA, 25 bp, Homo sapien
ctggttagtattgggcgccgactgc

SEQ ID NO: 4072516 - DNA, 25 bp, Homo sapien
tgcacgctggttagtattgggcgcc

SEQ ID NO: 4072517 - DNA, 25 bp, Homo sapien
tgcacgctggttagtattgggcgcc

SEQ ID NO: 4072518 - DNA, 25 bp, Homo sapien
ggcacttctcggttgcacgctggtt

SEQ ID NO: 4072519 - DNA, 25 bp, Homo sapien
tcggttgcacgctggttagtattgg

SEQ ID NO: 4072520 - DNA, 25 bp, Homo sapien
ctggttagtattgggcgccgactgc

SEQ ID NO: 4072521 - DNA, 25 bp, Homo sapien
gagcatctgtcaattcttttaaagt

SEQ ID NO: 4072522 - DNA, 25 bp, Homo sapien
ctcccaatgcaaggtctgtctgtga

SEQ ID NO: 4072523 - DNA, 25 bp, Homo sapien
tgtctgtgagcatctgtcaattctt

SEQ ID NO: 4072524 - DNA, 25 bp, Homo sapien
ctgctcccaatgcaaggtctgtctg

SEQ ID NO: 4072525 - DNA, 25 bp, Homo sapien
gagagctcccgtcgaagatgggtct

SEQ ID NO: 4072526 - DNA, 25 bp, Homo sapien
agatgggtctgctgcatgatggatt

SEQ ID NO: 4072527 - DNA, 25 bp, Homo sapien
gatggattggctctccctgcaagcc

SEQ ID NO: 4072528 - DNA, 25 bp, Homo sapien
cctgcaagccagttggcgggcgggc

SEQ ID NO: 4072529 - DNA, 25 bp, Homo sapien
cctcattggagtggcacaaaggccg

SEQ ID NO: 4072530 - DNA, 25 bp, Homo sapien
ttcccgcgagaggtgcagaacctca

SEQ ID NO: 4072531 - DNA, 25 bp, Homo sapien
aatcggttgctggattgggcttccc

SEQ ID NO: 4072532 - DNA, 25 bp, Homo sapien
gcgtggagcccttgattaaatcggt

SEQ ID NO: 4072533 - DNA, 25 bp, Homo sapien
tatcctgcccatcattagtgtcatt

SEQ ID NO: 4072534 - DNA, 25 bp, Homo sapien
cctgcccatcattagtgtcatttgt

SEQ ID NO: 4072535 - DNA, 25 bp, Homo sapien
tggcacagaaagggtatttaggttc

SEQ ID NO: 4072536 - DNA, 25 bp, Homo sapien
ctcccaagccctcgggctctgatga

SEQ ID NO: 4072537 - DNA, 25 bp, Homo sapien
ggcctggatgtcccgagagcatggc

SEQ ID NO: 4072538 - DNA, 25 bp, Homo sapien
agtccctttgagctggcgcgtcctc

SEQ ID NO: 4072539 - DNA, 25 bp, Homo sapien
tgcagtccctttgagctggcgcgtc

SEQ ID NO: 4072540 - DNA, 25 bp, Homo sapien
cctggatgtcccgagagcatggcgg

SEQ ID NO: 4072541 - DNA, 25 bp, Homo sapien
ctgcttccaggctgcgcggcatccc

SEQ ID NO: 4072542 - DNA, 25 bp, Homo sapien
cagaatgtggcttcgtgctctgctt

SEQ ID NO: 4072543 - DNA, 25 bp, Homo sapien
gaacgtccagaatgtggcttcgtgc

SEQ ID NO: 4072544 - DNA, 25 bp, Homo sapien
ccccggaacgtccagaatgtggctt

SEQ ID NO: 4072545 - DNA, 25 bp, Homo sapien
acgcacggtggacagcgagggctcc

SEQ ID NO: 4072546 - DNA, 25 bp, Homo sapien
ccaggagtccgggtagtctgggctc

SEQ ID NO: 4072547 - DNA, 25 bp, Homo sapien
ctgccaggagtccgggtagtctggg

SEQ ID NO: 4072548 - DNA, 25 bp, Homo sapien
acaccaagcatgggggacgcacggt

SEQ ID NO: 4072549 - DNA, 25 bp, Homo sapien
ctcttggccgtaggggtgtccgtct

SEQ ID NO: 4072550 - DNA, 25 bp, Homo sapien
tgtccgtcttaagacacaacttggc

SEQ ID NO: 4072551 - DNA, 25 bp, Homo sapien
ggtgtccgtcttaagacacaacttg

SEQ ID NO: 4072552 - DNA, 25 bp, Homo sapien
gtaggggtgtccgtcttaagacaca

SEQ ID NO: 4072553 - DNA, 25 bp, Homo sapien
catgcctggcaaattcttgatcttg

SEQ ID NO: 4072554 - DNA, 25 bp, Homo sapien
cttgtctcagaaccaatgcctgtgg

SEQ ID NO: 4072555 - DNA, 25 bp, Homo sapien
ccctgcatgcctggcaaattcttga

SEQ ID NO: 4072556 - DNA, 25 bp, Homo sapien
ggtggcatcttctgatgtctctact

SEQ ID NO: 4072557 - DNA, 25 bp, Homo sapien
tccctgtttggtgagatggttctga

SEQ ID NO: 4072558 - DNA, 25 bp, Homo sapien
tggttctgagcatattggccagatc

SEQ ID NO: 4072559 - DNA, 25 bp, Homo sapien
ctctggagctcctggcgccatctcc

SEQ ID NO: 4072560 - DNA, 25 bp, Homo sapien
gagcatattggccagatcttcccag

SEQ ID NO: 4072561 - DNA, 25 bp, Homo sapien
aatcaggccagtggaatgcagcgtc

SEQ ID NO: 4072562 - DNA, 25 bp, Homo sapien
gccagtgggagcgactcagctgcct

SEQ ID NO: 4072563 - DNA, 25 bp, Homo sapien
tgatgggatcccttgtgactgtggc

SEQ ID NO: 4072564 - DNA, 25 bp, Homo sapien
tgtttctgtcgcctccaggtctgga

SEQ ID NO: 4072565 - DNA, 25 bp, Homo sapien
caggagggggatattctctttggca

SEQ ID NO: 4072566 - DNA, 25 bp, Homo sapien
tggcagagggcgtgagatcaggagg

SEQ ID NO: 4072567 - DNA, 25 bp, Homo sapien
tgttcttattgagtgaccttgcagg

SEQ ID NO: 4072568 - DNA, 25 bp, Homo sapien
cggagcctaagctcgtcgggcactg

SEQ ID NO: 4072569 - DNA, 25 bp, Homo sapien
ctaaggcagaaggagagaaggcgat

SEQ ID NO: 4072570 - DNA, 25 bp, Homo sapien
ggagagaaggcgatggggtcgaggc

SEQ ID NO: 4072571 - DNA, 25 bp, Homo sapien
gaaggcgatggggtcgaggcagcat

SEQ ID NO: 4072572 - DNA, 25 bp, Homo sapien
cagaaggagagaaggcgatggggtc

SEQ ID NO: 4072573 - DNA, 25 bp, Homo sapien
aaacaagagtgacccctgttcttgg

SEQ ID NO: 4072574 - DNA, 25 bp, Homo sapien
agctgcctcgcccttttgggaagaa

SEQ ID NO: 4072575 - DNA, 25 bp, Homo sapien
ggagcctgctaggaggctcttcccc

SEQ ID NO: 4072576 - DNA, 25 bp, Homo sapien
tgtaaatgccctcgcaaacaagagt

SEQ ID NO: 4072577 - DNA, 25 bp, Homo sapien
acttggaggggacctgcatctgact

SEQ ID NO: 4072578 - DNA, 25 bp, Homo sapien
aacttggaggggacctgcatctgac

SEQ ID NO: 4072579 - DNA, 25 bp, Homo sapien
gaacttggaggggacctgcatctga

SEQ ID NO: 4072580 - DNA, 25 bp, Homo sapien
cccacacagggatgttttcagttgc

SEQ ID NO: 4072581 - DNA, 25 bp, Homo sapien
ccacctagatggagtgatggccacc

SEQ ID NO: 4072582 - DNA, 25 bp, Homo sapien
gtcctcctcagcatgcgtttgcgat

SEQ ID NO: 4072583 - DNA, 25 bp, Homo sapien
gccctgcaacagcttcgcagggcat

SEQ ID NO: 4072584 - DNA, 25 bp, Homo sapien
tgcgatggccacctagatggagtga

SEQ ID NO: 4072585 - DNA, 25 bp, Homo sapien
ggttcgcctgtgttggggtttgcca

SEQ ID NO: 4072586 - DNA, 25 bp, Homo sapien
ttcgcctgtgttggggtttgccact

SEQ ID NO: 4072587 - DNA, 25 bp, Homo sapien
gttcgcctgtgttggggtttgccac

SEQ ID NO: 4072588 - DNA, 25 bp, Homo sapien
ctgtgttggggttcgctgtgtgttg

SEQ ID NO: 4072589 - DNA, 25 bp, Homo sapien
gtgacctaaagctgttggccaccag

SEQ ID NO: 4072590 - DNA, 25 bp, Homo sapien
gttggtgacctaaagctgttggcca

SEQ ID NO: 4072591 - DNA, 25 bp, Homo sapien
gacctaaagctgttggccaccagag

SEQ ID NO: 4072592 - DNA, 25 bp, Homo sapien
cctaaagctgttggccaccagagac

SEQ ID NO: 4072593 - DNA, 25 bp, Homo sapien
gttgcagaacaggatcaggttgttg

SEQ ID NO: 4072594 - DNA, 25 bp, Homo sapien
acaggatcaggttgttggctgccaa

SEQ ID NO: 4072595 - DNA, 25 bp, Homo sapien
gaacaggatcaggttgttggctgcc

SEQ ID NO: 4072596 - DNA, 25 bp, Homo sapien
tgcagaacaggatcaggttgttggc

SEQ ID NO: 4072597 - DNA, 25 bp, Homo sapien
caccaagacttctcacggattgtca

SEQ ID NO: 4072598 - DNA, 25 bp, Homo sapien
cagactgggaccctgagtggcagtg

SEQ ID NO: 4072599 - DNA, 25 bp, Homo sapien
ggtgttctggtagccctgagggcct

SEQ ID NO: 4072600 - DNA, 25 bp, Homo sapien
gtcactccgtggagcaacagcacag

SEQ ID NO: 4072601 - DNA, 25 bp, Homo sapien
catatggcgggcatatgccacgcgg

SEQ ID NO: 4072602 - DNA, 25 bp, Homo sapien
cgggcatatgccacgcgggaatgag

SEQ ID NO: 4072603 - DNA, 25 bp, Homo sapien
cgctgaagatgctgtgacggggaga

SEQ ID NO: 4072604 - DNA, 25 bp, Homo sapien
tgacggggagagcatatggcgggca

SEQ ID NO: 4072605 - DNA, 25 bp, Homo sapien
cttggaaacccagacgttatggtca

SEQ ID NO: 4072606 - DNA, 25 bp, Homo sapien
tgtgaccaggatgaccgtgctcctg

SEQ ID NO: 4072607 - DNA, 25 bp, Homo sapien
gaaacccagacgttatggtcaggaa

SEQ ID NO: 4072608 - DNA, 25 bp, Homo sapien
accaggatgaccgtgctcctgggcg

SEQ ID NO: 4072609 - DNA, 25 bp, Homo sapien
aggaatcccagcgagagccccttct

SEQ ID NO: 4072610 - DNA, 25 bp, Homo sapien
atcccagcgagagccccttctccgc

SEQ ID NO: 4072611 - DNA, 25 bp, Homo sapien
ggaatcccagcgagagccccttctc

SEQ ID NO: 4072612 - DNA, 25 bp, Homo sapien
tcaggaatcccagcgagagcccctt

SEQ ID NO: 4072613 - DNA, 25 bp, Homo sapien
gggcaggataggggctcagtgcaag

SEQ ID NO: 4072614 - DNA, 25 bp, Homo sapien
aggataggggctcagtgcaagggag

SEQ ID NO: 4072615 - DNA, 25 bp, Homo sapien
gcaggataggggctcagtgcaaggg

SEQ ID NO: 4072616 - DNA, 25 bp, Homo sapien
ggataggggctcagtgcaagggagg

SEQ ID NO: 4072617 - DNA, 25 bp, Homo sapien
agaaagggacggagatgaggcagtg

SEQ ID NO: 4072618 - DNA, 25 bp, Homo sapien
gtgtccccgtgtgagccccacagga

SEQ ID NO: 4072619 - DNA, 25 bp, Homo sapien
gggctggtgtccccgtgtgagcccc

SEQ ID NO: 4072620 - DNA, 25 bp, Homo sapien
ctggtgtccccgtgtgagccccaca

SEQ ID NO: 4072621 - DNA, 25 bp, Homo sapien
gggcatgggcagcccccccgcagca

SEQ ID NO: 4072622 - DNA, 25 bp, Homo sapien
cacccccgcctggagggccaaggct

SEQ ID NO: 4072623 - DNA, 25 bp, Homo sapien
tttcttctgccctgggctgccgcat

SEQ ID NO: 4072624 - DNA, 25 bp, Homo sapien
gggtctgggccatttcttctgccct

SEQ ID NO: 4072625 - DNA, 25 bp, Homo sapien
ctggagggccaaggctgcccagggt

SEQ ID NO: 4072626 - DNA, 25 bp, Homo sapien
caggcttgtgtgacgtagatgattg

SEQ ID NO: 4072627 - DNA, 25 bp, Homo sapien
gtcccaggtccacggtcacagggct

SEQ ID NO: 4072628 - DNA, 25 bp, Homo sapien
ggttctgcccgagaatgtttgctgt

SEQ ID NO: 4072629 - DNA, 25 bp, Homo sapien
gggtgcccgaacatcccatgcatcg

SEQ ID NO: 4072630 - DNA, 25 bp, Homo sapien
gtaagagtggctgggtggcctgcgg

SEQ ID NO: 4072631 - DNA, 25 bp, Homo sapien
aagagtggctgggtggcctgcgggt

SEQ ID NO: 4072632 - DNA, 25 bp, Homo sapien
ctgtaagagtggctgggtggcctgc

SEQ ID NO: 4072633 - DNA, 25 bp, Homo sapien
agagtggctgggtggcctgcgggtc

SEQ ID NO: 4072634 - DNA, 25 bp, Homo sapien
aggtgagggcagcatgaaggagggg

SEQ ID NO: 4072635 - DNA, 25 bp, Homo sapien
aaggtgagggcagcatgaaggaggg

SEQ ID NO: 4072636 - DNA, 25 bp, Homo sapien
aaaggtgagggcagcatgaaggagg

SEQ ID NO: 4072637 - DNA, 25 bp, Homo sapien
aggagctgcaccagacgcccttgca

SEQ ID NO: 4072638 - DNA, 25 bp, Homo sapien
gcaccagacgcccttgcacctggca

SEQ ID NO: 4072639 - DNA, 25 bp, Homo sapien
gaggagctgcaccagacgcccttgc

SEQ ID NO: 4072640 - DNA, 25 bp, Homo sapien
cagacgcccttgcacctggcactct

SEQ ID NO: 4072641 - DNA, 25 bp, Homo sapien
cagcccctgtagacattcggcacag

SEQ ID NO: 4072642 - DNA, 25 bp, Homo sapien
gacatttgtcccagcgacatccaag

SEQ ID NO: 4072643 - DNA, 25 bp, Homo sapien
agcctgggatgcttcggtagccaga

SEQ ID NO: 4072644 - DNA, 25 bp, Homo sapien
gtctgatggatagagagagtctcct

SEQ ID NO: 4072645 - DNA, 25 bp, Homo sapien
cctcctctgtgccagctgaaccagc

SEQ ID NO: 4072646 - DNA, 25 bp, Homo sapien
ctgcctcctctgtgccagctgaacc

SEQ ID NO: 4072647 - DNA, 25 bp, Homo sapien
tcctctgtgccagctgaaccagcat

SEQ ID NO: 4072648 - DNA, 25 bp, Homo sapien
tgcctcctctgtgccagctgaacca

SEQ ID NO: 4072649 - DNA, 25 bp, Homo sapien
tgcagaaagctcagtcctggaccct

SEQ ID NO: 4072650 - DNA, 25 bp, Homo sapien
gcgttccttattagagctccttggt

SEQ ID NO: 4072651 - DNA, 25 bp, Homo sapien
ggagtgagaccaggcattttctgca

SEQ ID NO: 4072652 - DNA, 25 bp, Homo sapien
gccttgaggctcaaagcgttcctta

SEQ ID NO: 4072653 - DNA, 25 bp, Homo sapien
tcaaagcactggaagctttggcggt

SEQ ID NO: 4072654 - DNA, 25 bp, Homo sapien
tacgggaaattgcagacgttggcca

SEQ ID NO: 4072655 - DNA, 25 bp, Homo sapien
gggacatcaacctcaacaccagtgt

SEQ ID NO: 4072656 - DNA, 25 bp, Homo sapien
gcggttatcgtccttgatagggaca

SEQ ID NO: 4072657 - DNA, 25 bp, Homo sapien
tacctggtcaccgtgggcaaaacca

SEQ ID NO: 4072658 - DNA, 25 bp, Homo sapien
tcaggagctctggaagcaaagcgga

SEQ ID NO: 4072659 - DNA, 25 bp, Homo sapien
cacttcaggttataggtggtgtcca

SEQ ID NO: 4072660 - DNA, 25 bp, Homo sapien
caaggtgcatggacgtggttttcag

SEQ ID NO: 4072661 - DNA, 25 bp, Homo sapien
caacctgggaggtactagccatgcc

SEQ ID NO: 4072662 - DNA, 25 bp, Homo sapien
tcggagttggagttggacatcagct

SEQ ID NO: 4072663 - DNA, 25 bp, Homo sapien
tcgctgcgtcctaaccaaatgctgg

SEQ ID NO: 4072664 - DNA, 25 bp, Homo sapien
cacggtaggcgcatggtttcctgtc

SEQ ID NO: 4072665 - DNA, 25 bp, Homo sapien
ggcagtcagtgacaggtattgctga

SEQ ID NO: 4072666 - DNA, 25 bp, Homo sapien
cagtgacaggtattgctgagatgtc

SEQ ID NO: 4072667 - DNA, 25 bp, Homo sapien
acaggtattgctgagatgtcagctc

SEQ ID NO: 4072668 - DNA, 25 bp, Homo sapien
cagtcagtgacaggtattgctgaga

SEQ ID NO: 4072669 - DNA, 25 bp, Homo sapien
tcgagggaatgtatgacaactcagc

SEQ ID NO: 4072670 - DNA, 25 bp, Homo sapien
taggttattgtagtgcggctggccc

SEQ ID NO: 4072671 - DNA, 25 bp, Homo sapien
tgagcctggtgtccgttcaaaggat

SEQ ID NO: 4072672 - DNA, 25 bp, Homo sapien
ggagctgcaacagtcatcgtgggca

SEQ ID NO: 4072673 - DNA, 25 bp, Homo sapien
tatgatcagcgagtgggatgttttc

SEQ ID NO: 4072674 - DNA, 25 bp, Homo sapien
ttcgtatgatcagcgagtgggatgt

SEQ ID NO: 4072675 - DNA, 25 bp, Homo sapien
cagacgagttcgtatgatcagcgag

SEQ ID NO: 4072676 - DNA, 25 bp, Homo sapien
agtttaaagtcagacgagttcgtat

SEQ ID NO: 4072677 - DNA, 25 bp, Homo sapien
tgggagaggcggcatttgtgctggg

SEQ ID NO: 4072678 - DNA, 25 bp, Homo sapien
tttgtgctgggtcattggaatctgg

SEQ ID NO: 4072679 - DNA, 25 bp, Homo sapien
cagccccagcaaatcttggaggtgg

SEQ ID NO: 4072680 - DNA, 25 bp, Homo sapien
tggggggcatttcagccccagcaaa

SEQ ID NO: 4072681 - DNA, 25 bp, Homo sapien
gctggtgaaggacatggcaaggtcc

SEQ ID NO: 4072682 - DNA, 25 bp, Homo sapien
gtcgcccgatgaggaacccaggccg

SEQ ID NO: 4072683 - DNA, 25 bp, Homo sapien
gtttgctggtgaaggacatggcaag

SEQ ID NO: 4072684 - DNA, 25 bp, Homo sapien
gggcagtcgcccgatgaggaaccca

SEQ ID NO: 4072685 - DNA, 25 bp, Homo sapien
cagatggccggccagtgccatgtcc

SEQ ID NO: 4072686 - DNA, 25 bp, Homo sapien
atgctgaccagatggccggccagtg

SEQ ID NO: 4072687 - DNA, 25 bp, Homo sapien
gctgaccagatggccggccagtgcc

SEQ ID NO: 4072688 - DNA, 25 bp, Homo sapien
gtcatgctgaccagatggccggcca

SEQ ID NO: 4072689 - DNA, 25 bp, Homo sapien
agggaagtgcccgttctcagtgtca

SEQ ID NO: 4072690 - DNA, 25 bp, Homo sapien
gcccgttctcagtgtcagagccgta

SEQ ID NO: 4072691 - DNA, 25 bp, Homo sapien
gtgcagtcccctcgtccctgagcag

SEQ ID NO: 4072692 - DNA, 25 bp, Homo sapien
tcagagccgtagcagacagacatgg

SEQ ID NO: 4072693 - DNA, 25 bp, Homo sapien
cgcctttgtgcccatctggcttgtg

SEQ ID NO: 4072694 - DNA, 25 bp, Homo sapien
cgctctgcagaagggcgcctttgtg

SEQ ID NO: 4072695 - DNA, 25 bp, Homo sapien
gaagggcgcctttgtgcccatctgg

SEQ ID NO: 4072696 - DNA, 25 bp, Homo sapien
ctgggcagcccgctctgcagaaggg

SEQ ID NO: 4072697 - DNA, 25 bp, Homo sapien
tccgctgcagatgggctagaacttt

SEQ ID NO: 4072698 - DNA, 25 bp, Homo sapien
tctgggccaggaccgcattgtgaac

SEQ ID NO: 4072699 - DNA, 25 bp, Homo sapien
cacgccctttgcatgttaatctggg

SEQ ID NO: 4072700 - DNA, 25 bp, Homo sapien
cattgtgaacgtcacaggtagggca

SEQ ID NO: 4072701 - DNA, 25 bp, Homo sapien
tagtccatggagtggtccgaccacg

SEQ ID NO: 4072702 - DNA, 25 bp, Homo sapien
tcgtcagggtctactgcgttgcagg

SEQ ID NO: 4072703 - DNA, 25 bp, Homo sapien
tgctttcactcagcagcgtcgtcag

SEQ ID NO: 4072704 - DNA, 25 bp, Homo sapien
tctctcgccgaggaatagtccatgg

SEQ ID NO: 4072705 - DNA, 25 bp, Homo sapien
agtgtcagggcggttgccaagccca

SEQ ID NO: 4072706 - DNA, 25 bp, Homo sapien
cagggcggttgccaagcccactgca

SEQ ID NO: 4072707 - DNA, 25 bp, Homo sapien
tctcccatcacatggcgccgtggtg

SEQ ID NO: 4072708 - DNA, 25 bp, Homo sapien
ctcccatcacatggcgccgtggtgg

SEQ ID NO: 4072709 - DNA, 25 bp, Homo sapien
tggtggatggcaagctgccctgcat

SEQ ID NO: 4072710 - DNA, 25 bp, Homo sapien
cggttggtggatggcaagctgccct

SEQ ID NO: 4072711 - DNA, 25 bp, Homo sapien
gataaaatccagtggctgccggttg

SEQ ID NO: 4072712 - DNA, 25 bp, Homo sapien
tgtgcaagccacacttgagataaaa

SEQ ID NO: 4072713 - DNA, 25 bp, Homo sapien
agaatcccgccaaaggaaagttgct

SEQ ID NO: 4072714 - DNA, 25 bp, Homo sapien
gaatcccgccaaaggaaagttgctg

SEQ ID NO: 4072715 - DNA, 25 bp, Homo sapien
tctgatagtcaagccttgtctggaa

SEQ ID NO: 4072716 - DNA, 25 bp, Homo sapien
ggttctgatagtcaagccttgtctg

SEQ ID NO: 4072717 - DNA, 25 bp, Homo sapien
tgggttctgatagtcaagccttgtc

SEQ ID NO: 4072718 - DNA, 25 bp, Homo sapien
atccttgggttctgatagtcaagcc

SEQ ID NO: 4072719 - DNA, 25 bp, Homo sapien
ccaatttcccgtcttggaatgtcac

SEQ ID NO: 4072720 - DNA, 25 bp, Homo sapien
tcaaaatcatccacgtccaatttcc

SEQ ID NO: 4072721 - DNA, 25 bp, Homo sapien
cacgtccaatttcccgtcttggaat

SEQ ID NO: 4072722 - DNA, 25 bp, Homo sapien
tggccaccccagatctcaaaatcat

SEQ ID NO: 4072723 - DNA, 25 bp, Homo sapien
tcacaagcacccctggtaattctgg

SEQ ID NO: 4072724 - DNA, 25 bp, Homo sapien
gaggttgtgctttcctgcgctgata

SEQ ID NO: 4072725 - DNA, 25 bp, Homo sapien
taaaatgtggattgcaggacctcat

SEQ ID NO: 4072726 - DNA, 25 bp, Homo sapien
gaatcaaaagagctgattgggccca

SEQ ID NO: 4072727 - DNA, 25 bp, Homo sapien
tgtccagagcgaggaaacgggttta

SEQ ID NO: 4072728 - DNA, 25 bp, Homo sapien
ggtttagtgaccatccctctggccg

SEQ ID NO: 4072729 - DNA, 25 bp, Homo sapien
tcgacctacattgcgctgactggag

SEQ ID NO: 4072730 - DNA, 25 bp, Homo sapien
tcttcagtggcgtgatgcagccgaa

SEQ ID NO: 4072731 - DNA, 25 bp, Homo sapien
ttcgagctgtccctctccgtggagt

SEQ ID NO: 4072732 - DNA, 25 bp, Homo sapien
catcaggcgggactcttcaagggcc

SEQ ID NO: 4072733 - DNA, 25 bp, Homo sapien
cgtcaagctgatgccctgtggttca

SEQ ID NO: 4072734 - DNA, 25 bp, Homo sapien
taactcctcatgacaacagcgtgtg

SEQ ID NO: 4072735 - DNA, 25 bp, Homo sapien
catggctctgtcaagaaggattatc

SEQ ID NO: 4072736 - DNA, 25 bp, Homo sapien
agaaggattatctcgtcctccagca

SEQ ID NO: 4072737 - DNA, 25 bp, Homo sapien
gtttgaggctaaatataaacccagc

SEQ ID NO: 4072738 - DNA, 25 bp, Homo sapien
tttccgcggccgtcagcaatggcca

SEQ ID NO: 4072739 - DNA, 25 bp, Homo sapien
attccagaggcccatcggatgcccc

SEQ ID NO: 4072740 - DNA, 25 bp, Homo sapien
gagagagggtgtgccatcctctctg

SEQ ID NO: 4072741 - DNA, 25 bp, Homo sapien
gaggcccatcggatgcccctggttc

SEQ ID NO: 4072742 - DNA, 25 bp, Homo sapien
cagagcctagccacggagagagggt

SEQ ID NO: 4072743 - DNA, 25 bp, Homo sapien
ttggggccctggatacctcctgcct

SEQ ID NO: 4072744 - DNA, 25 bp, Homo sapien
tctcttggggccctggatacctcct

SEQ ID NO: 4072745 - DNA, 25 bp, Homo sapien
cgaggctttgtttccggattcttct

SEQ ID NO: 4072746 - DNA, 25 bp, Homo sapien
ccttggggtactccatgggcttctg

SEQ ID NO: 4072747 - DNA, 25 bp, Homo sapien
cctcatgtctggagatgtgggcggt

SEQ ID NO: 4072748 - DNA, 25 bp, Homo sapien
gcctctctgccttgcacccccagag

SEQ ID NO: 4072749 - DNA, 25 bp, Homo sapien
ggcggtgtccgtgcacactgctgga

SEQ ID NO: 4072750 - DNA, 25 bp, Homo sapien
atgtgggcggtgtccgtgcacactg

SEQ ID NO: 4072751 - DNA, 25 bp, Homo sapien
aaatagggggacgtgaatgctgcca

SEQ ID NO: 4072752 - DNA, 25 bp, Homo sapien
atgcaggatgccatgtcccagccca

SEQ ID NO: 4072753 - DNA, 25 bp, Homo sapien
tttcagcttgtgtctcacgggtaga

SEQ ID NO: 4072754 - DNA, 25 bp, Homo sapien
cacctcccaggagtcccttggaaag

SEQ ID NO: 4072755 - DNA, 25 bp, Homo sapien
gggactggactgcccgtggccagta

SEQ ID NO: 4072756 - DNA, 25 bp, Homo sapien
tctctgcccggtgaagagcgctcca

SEQ ID NO: 4072757 - DNA, 25 bp, Homo sapien
gtccgggtgtcctctctgcccggtg

SEQ ID NO: 4072758 - DNA, 25 bp, Homo sapien
agtcactgaggtccacaggggtaag

SEQ ID NO: 4072759 - DNA, 25 bp, Homo sapien
catcagttgtcagaaatttgtgaag

SEQ ID NO: 4072760 - DNA, 25 bp, Homo sapien
ggcgtgtgacccagaacttgcgatc

SEQ ID NO: 4072761 - DNA, 25 bp, Homo sapien
gacatttaggcaaatgcccaggcgg

SEQ ID NO: 4072762 - DNA, 25 bp, Homo sapien
tgagggtctcagagccaatgaaaac

SEQ ID NO: 4072763 - DNA, 25 bp, Homo sapien
tgtagcgggagtcctaatggaagcc

SEQ ID NO: 4072764 - DNA, 25 bp, Homo sapien
ggaagcctctggatcgagtcccgtc

SEQ ID NO: 4072765 - DNA, 25 bp, Homo sapien
tgggtgggacagtgtagcgggagtc

SEQ ID NO: 4072766 - DNA, 25 bp, Homo sapien
tctggatcgagtcccgtcgtaacca

SEQ ID NO: 4072767 - DNA, 25 bp, Homo sapien
atgacaggccccacattttcacagg

SEQ ID NO: 4072768 - DNA, 25 bp, Homo sapien
tcgcttctccttggggttgcgtttc

SEQ ID NO: 4072769 - DNA, 25 bp, Homo sapien
ccagccggttcgcttctccttgggg

SEQ ID NO: 4072770 - DNA, 25 bp, Homo sapien
tgacaggccccacattttcacagga

SEQ ID NO: 4072771 - DNA, 25 bp, Homo sapien
tggtcgccctccgtggagggagtgg

SEQ ID NO: 4072772 - DNA, 25 bp, Homo sapien
tcgccctccgtggagggagtgggcg

SEQ ID NO: 4072773 - DNA, 25 bp, Homo sapien
cctggtcgccctccgtggagggagt

SEQ ID NO: 4072774 - DNA, 25 bp, Homo sapien
gccctggtcgccctccgtggaggga

SEQ ID NO: 4072775 - DNA, 25 bp, Homo sapien
tgctggagaccacgaaatggcaaga

SEQ ID NO: 4072776 - DNA, 25 bp, Homo sapien
ggagacagcattcagtgccaaagcc

SEQ ID NO: 4072777 - DNA, 25 bp, Homo sapien
gcagtctcaaaaccaaagattgggt

SEQ ID NO: 4072778 - DNA, 25 bp, Homo sapien
tgggtcacatggttcaatagagcgt

SEQ ID NO: 4072779 - DNA, 25 bp, Homo sapien
caggcctgggtctccgcaggctgtg

SEQ ID NO: 4072780 - DNA, 25 bp, Homo sapien
tcagtcgggcacccgctggccccag

SEQ ID NO: 4072781 - DNA, 25 bp, Homo sapien
gcctgggtctccgcaggctgtggga

SEQ ID NO: 4072782 - DNA, 25 bp, Homo sapien
ctgggtctccgcaggctgtgggagc

SEQ ID NO: 4072783 - DNA, 25 bp, Homo sapien
aggcgctcagcaacaagcccctggg

SEQ ID NO: 4072784 - DNA, 25 bp, Homo sapien
gaggcgctcagcaacaagcccctgg

SEQ ID NO: 4072785 - DNA, 25 bp, Homo sapien
tcagaggcgctcagcaacaagcccc

SEQ ID NO: 4072786 - DNA, 25 bp, Homo sapien
agaggcgctcagcaacaagcccctg

SEQ ID NO: 4072787 - DNA, 25 bp, Homo sapien
gcaggagaaggttcgcctgtgccaa

SEQ ID NO: 4072788 - DNA, 25 bp, Homo sapien
aacaccaggcgcttcctttcagagc

SEQ ID NO: 4072789 - DNA, 25 bp, Homo sapien
ttattaaaggctccgcgcagggtaa

SEQ ID NO: 4072790 - DNA, 25 bp, Homo sapien
tgtgccaaggctcattaagcgccgg

SEQ ID NO: 4072791 - DNA, 25 bp, Homo sapien
cagcgccccactgccatgtcgtctg

SEQ ID NO: 4072792 - DNA, 25 bp, Homo sapien
gcagcgccccactgccatgtcgtct

SEQ ID NO: 4072793 - DNA, 25 bp, Homo sapien
cgccccactgccatgtcgtctgcct

SEQ ID NO: 4072794 - DNA, 25 bp, Homo sapien
ctgcagcgccccactgccatgtcgt

SEQ ID NO: 4072795 - DNA, 25 bp, Homo sapien
ctgccgatccaggaagcgtgcaggt

SEQ ID NO: 4072796 - DNA, 25 bp, Homo sapien
ggcaggggtgggcaccggagggcat

SEQ ID NO: 4072797 - DNA, 25 bp, Homo sapien
caggtgggcaggggtgggcaccgga

SEQ ID NO: 4072798 - DNA, 25 bp, Homo sapien
gcgtgcaggtgggcaggggtgggca

SEQ ID NO: 4072799 - DNA, 25 bp, Homo sapien
gctgtgtgggaatcactcttgtctt

SEQ ID NO: 4072800 - DNA, 25 bp, Homo sapien
ctgtgtgggaatcactcttgtcttg

SEQ ID NO: 4072801 - DNA, 25 bp, Homo sapien
tgctgtgtgggaatcactcttgtct

SEQ ID NO: 4072802 - DNA, 25 bp, Homo sapien
agaatgaacacagaagccacgcctt

SEQ ID NO: 4072803 - DNA, 25 bp, Homo sapien
tccctgtgctggacctgtgggtgct

SEQ ID NO: 4072804 - DNA, 25 bp, Homo sapien
cctgctcttgctgaccacctgtcct

SEQ ID NO: 4072805 - DNA, 25 bp, Homo sapien
gaagccacgccttccctgtgctgga

SEQ ID NO: 4072806 - DNA, 25 bp, Homo sapien
catcctgtgagcgtcgtcggtttcg

SEQ ID NO: 4072807 - DNA, 25 bp, Homo sapien
tcctgtgagcgtcgtcggtttcggt

SEQ ID NO: 4072808 - DNA, 25 bp, Homo sapien
tcgcagctgggcatgttaccacccc

SEQ ID NO: 4072809 - DNA, 25 bp, Homo sapien
ggtgtttgggtggactcgcagctgg

SEQ ID NO: 4072810 - DNA, 25 bp, Homo sapien
agaccggcaggtggtctctctatcc

SEQ ID NO: 4072811 - DNA, 25 bp, Homo sapien
gcaggtgggattgtgtctgcagggc

SEQ ID NO: 4072812 - DNA, 25 bp, Homo sapien
tcggtctctcggcagtggaatagag

SEQ ID NO: 4072813 - DNA, 25 bp, Homo sapien
gcctgccgtccctccacagggactt

SEQ ID NO: 4072814 - DNA, 25 bp, Homo sapien
catgttcatttaggtattgtctgag

SEQ ID NO: 4072815 - DNA, 25 bp, Homo sapien
agctatctctgtggctagtgtcctc

SEQ ID NO: 4072816 - DNA, 25 bp, Homo sapien
gggccattgcgcttgctgttccttg

SEQ ID NO: 4072817 - DNA, 25 bp, Homo sapien
acacatgttcatttaggtattgtct

SEQ ID NO: 4072818 - DNA, 25 bp, Homo sapien
tagatgtcacgtgacagggtcagaa

SEQ ID NO: 4072819 - DNA, 25 bp, Homo sapien
gcagggctgtacacccaggtctagc

SEQ ID NO: 4072820 - DNA, 25 bp, Homo sapien
tggtgtttcaggaaggccgctgctc

SEQ ID NO: 4072821 - DNA, 25 bp, Homo sapien
ccgctgctcggtggtgttgagagct

SEQ ID NO: 4072822 - DNA, 25 bp, Homo sapien
cccagcagcacccaagcgccctgtt

SEQ ID NO: 4072823 - DNA, 25 bp, Homo sapien
gcagcacccaagcgccctgttgcct

SEQ ID NO: 4072824 - DNA, 25 bp, Homo sapien
cagcagcacccaagcgccctgttgc

SEQ ID NO: 4072825 - DNA, 25 bp, Homo sapien
agcagcacccaagcgccctgttgcc

SEQ ID NO: 4072826 - DNA, 25 bp, Homo sapien
aatgtcttcgtaggtgggctttggt

SEQ ID NO: 4072827 - DNA, 25 bp, Homo sapien
gggccacagcgggtcaggacagcgg

SEQ ID NO: 4072828 - DNA, 25 bp, Homo sapien
ggttgagcagaatgtcttcgtaggt

SEQ ID NO: 4072829 - DNA, 25 bp, Homo sapien
cacagcgggtcaggacagcgggaga

SEQ ID NO: 4072830 - DNA, 25 bp, Homo sapien
ctgagtctaccaggagttggctttc

SEQ ID NO: 4072831 - DNA, 25 bp, Homo sapien
tcctcccctgagtctaccaggagtt

SEQ ID NO: 4072832 - DNA, 25 bp, Homo sapien
agcagggatgtggcgtctgtcttcc

SEQ ID NO: 4072833 - DNA, 25 bp, Homo sapien
gggatgtggcgtctgtcttccccca

SEQ ID NO: 4072834 - DNA, 25 bp, Homo sapien
caggcccaggcacaatagtacttta

SEQ ID NO: 4072835 - DNA, 25 bp, Homo sapien
cagtctgcttgagccccttgaactg

SEQ ID NO: 4072836 - DNA, 25 bp, Homo sapien
tagtactttaaatccagacccactg

SEQ ID NO: 4072837 - DNA, 25 bp, Homo sapien
ccactgtgggcttggaattcctggc

SEQ ID NO: 4072838 - DNA, 25 bp, Homo sapien
caccttcaagatggtgctgagcagg

SEQ ID NO: 4072839 - DNA, 25 bp, Homo sapien
tggtgctgagcaggagataatccat

SEQ ID NO: 4072840 - DNA, 25 bp, Homo sapien
ctggctgagaacttttgtctccacc

SEQ ID NO: 4072841 - DNA, 25 bp, Homo sapien
gctgagaacttttgtctccaccttc

SEQ ID NO: 4072842 - DNA, 25 bp, Homo sapien
atcacaaaaccctgtgtgccccaca

SEQ ID NO: 4072843 - DNA, 25 bp, Homo sapien
acagccttgcgtgtccattaatatt

SEQ ID NO: 4072844 - DNA, 25 bp, Homo sapien
ttgcgtgtccattaatattgaccag

SEQ ID NO: 4072845 - DNA, 25 bp, Homo sapien
ccattaatattgaccaggctcccct

SEQ ID NO: 4072846 - DNA, 25 bp, Homo sapien
aaatcctttcactcccaacaagagt

SEQ ID NO: 4072847 - DNA, 25 bp, Homo sapien
agggactggcacctggttccctctg

SEQ ID NO: 4072848 - DNA, 25 bp, Homo sapien
tggtagtgggaagagctaggccagg

SEQ ID NO: 4072849 - DNA, 25 bp, Homo sapien
ctggttccctctgtttctgacacac

SEQ ID NO: 4072850 - DNA, 25 bp, Homo sapien
ttatactcacagtcccgcttccggg

SEQ ID NO: 4072851 - DNA, 25 bp, Homo sapien
tggtagttcttgctcgcctcgggac

SEQ ID NO: 4072852 - DNA, 25 bp, Homo sapien
gaggcacgttttgcagttcctgcaa

SEQ ID NO: 4072853 - DNA, 25 bp, Homo sapien
tcctgcaaaagtgccctgaggcccg

SEQ ID NO: 4072854 - DNA, 25 bp, Homo sapien
gatggagaggcacgttttgcagttc

SEQ ID NO: 4072855 - DNA, 25 bp, Homo sapien
gtgcagggacctagaagaaatatct

SEQ ID NO: 4072856 - DNA, 25 bp, Homo sapien
gcttgtggcgtagagctggtcacca

SEQ ID NO: 4072857 - DNA, 25 bp, Homo sapien
cacggctgtcagtggtcagtggcca

SEQ ID NO: 4072858 - DNA, 25 bp, Homo sapien
agtggccagtgttgccaggtcccag

SEQ ID NO: 4072859 - DNA, 25 bp, Homo sapien
acaaggctggacctttgggcttagc

SEQ ID NO: 4072860 - DNA, 25 bp, Homo sapien
agctccagttttggatggccaagaa

SEQ ID NO: 4072861 - DNA, 25 bp, Homo sapien
tcaggctccctcttagatgcttctg

SEQ ID NO: 4072862 - DNA, 25 bp, Homo sapien
cttctgggctccgtgcagtgctggc

SEQ ID NO: 4072863 - DNA, 25 bp, Homo sapien
tcccagagccgagttcagatacagt

SEQ ID NO: 4072864 - DNA, 25 bp, Homo sapien
tggtgcaggtagacgccagctcttt

SEQ ID NO: 4072865 - DNA, 25 bp, Homo sapien
tctttttgtatctctgggtactggg

SEQ ID NO: 4072866 - DNA, 25 bp, Homo sapien
atacagttccgccttgtgtcctcgg

SEQ ID NO: 4072867 - DNA, 25 bp, Homo sapien
cacctctcatccggcaggcgggcgg

SEQ ID NO: 4072868 - DNA, 25 bp, Homo sapien
tgccacctctcatccggcaggcggg

SEQ ID NO: 4072869 - DNA, 25 bp, Homo sapien
gggcgggcgctgtctcccgggccca

SEQ ID NO: 4072870 - DNA, 25 bp, Homo sapien
gccacctctcatccggcaggcgggc

SEQ ID NO: 4072871 - DNA, 25 bp, Homo sapien
cctggcactggctggggcaggagcc

SEQ ID NO: 4072872 - DNA, 25 bp, Homo sapien
gcactggctggggcaggagccttta

SEQ ID NO: 4072873 - DNA, 25 bp, Homo sapien
tggcactggctggggcaggagcctt

SEQ ID NO: 4072874 - DNA, 25 bp, Homo sapien
cactggctggggcaggagcctttac

SEQ ID NO: 4072875 - DNA, 25 bp, Homo sapien
ttccctggaaatgcctcgtacgtgg

SEQ ID NO: 4072876 - DNA, 25 bp, Homo sapien
tggtaacactgggttccctgccgtc

SEQ ID NO: 4072877 - DNA, 25 bp, Homo sapien
cagacttgcgtcactacggtcggat

SEQ ID NO: 4072878 - DNA, 25 bp, Homo sapien
gcccacagagcttatcagacttgcg

SEQ ID NO: 4072879 - DNA, 25 bp, Homo sapien
gctggctgccgggagtacagctcca

SEQ ID NO: 4072880 - DNA, 25 bp, Homo sapien
ttgcatttgaagtggccgtctggga

SEQ ID NO: 4072881 - DNA, 25 bp, Homo sapien
ctgccgggagtacagctccagggct

SEQ ID NO: 4072882 - DNA, 25 bp, Homo sapien
ggttcccaggtgttgcatttgaagt

SEQ ID NO: 4072883 - DNA, 25 bp, Homo sapien
cggcctttagtcaaatgaagaccca

SEQ ID NO: 4072884 - DNA, 25 bp, Homo sapien
agaagggtgcaaccgaaaccttgtg

SEQ ID NO: 4072885 - DNA, 25 bp, Homo sapien
ttcagctgccgggagaagggtgcaa

SEQ ID NO: 4072886 - DNA, 25 bp, Homo sapien
tgtgatggatgtccttccctcgtgg

SEQ ID NO: 4072887 - DNA, 25 bp, Homo sapien
ccgtgggtactgtcaccaccagttg

SEQ ID NO: 4072888 - DNA, 25 bp, Homo sapien
tgggtactgtcaccaccagttgccc

SEQ ID NO: 4072889 - DNA, 25 bp, Homo sapien
agagggtgcagttgcaaaagcctga

SEQ ID NO: 4072890 - DNA, 25 bp, Homo sapien
gagggtgcagttgcaaaagcctgat

SEQ ID NO: 4072891 - DNA, 25 bp, Homo sapien
gctggtttcacagctagcgcgggac

SEQ ID NO: 4072892 - DNA, 25 bp, Homo sapien
atggctggtttcacagctagcgcgg

SEQ ID NO: 4072893 - DNA, 25 bp, Homo sapien
gggtgtaagcggcttctcaccctcc

SEQ ID NO: 4072894 - DNA, 25 bp, Homo sapien
ggtttcacagctagcgcgggactgt

SEQ ID NO: 4072895 - DNA, 25 bp, Homo sapien
cagcgggtgtcacaaagagccacag

SEQ ID NO: 4072896 - DNA, 25 bp, Homo sapien
atgagggaggttcccgcctcatctt

SEQ ID NO: 4072897 - DNA, 25 bp, Homo sapien
gcccagggcgcccattaaggtggga

SEQ ID NO: 4072898 - DNA, 25 bp, Homo sapien
gaagcagcgggtgtcacaaagagcc

SEQ ID NO: 4072899 - DNA, 25 bp, Homo sapien
gagggtggccaaattggatgctccc

SEQ ID NO: 4072900 - DNA, 25 bp, Homo sapien
gaacttccctgaaccagtactgagg

SEQ ID NO: 4072901 - DNA, 25 bp, Homo sapien
tggccaaattggatgctccccaact

SEQ ID NO: 4072902 - DNA, 25 bp, Homo sapien
tccacttgagaacttccctgaacca

SEQ ID NO: 4072903 - DNA, 25 bp, Homo sapien
ttggctcctccgctgtgatcaatct

SEQ ID NO: 4072904 - DNA, 25 bp, Homo sapien
tcctccgctgtgatcaatcttgcgg

SEQ ID NO: 4072905 - DNA, 25 bp, Homo sapien
gctgtgatcaatcttgcggccctgg

SEQ ID NO: 4072906 - DNA, 25 bp, Homo sapien
cacagagccccggctttctgttgat

SEQ ID NO: 4072907 - DNA, 25 bp, Homo sapien
tccataggccctggacgagggctcc

SEQ ID NO: 4072908 - DNA, 25 bp, Homo sapien
ctaatcaggtccataggccctggac

SEQ ID NO: 4072909 - DNA, 25 bp, Homo sapien
cctggacgagggctcctctgtttca

SEQ ID NO: 4072910 - DNA, 25 bp, Homo sapien
gaggccacatggtgacccgctgccc

SEQ ID NO: 4072911 - DNA, 25 bp, Homo sapien
caggcctgtccgagtcttgctgggc

SEQ ID NO: 4072912 - DNA, 25 bp, Homo sapien
caggtaggagatccggccttgcatc

SEQ ID NO: 4072913 - DNA, 25 bp, Homo sapien
gagctccagctaatgaagcccaggc

SEQ ID NO: 4072914 - DNA, 25 bp, Homo sapien
gactggaaacaggtcctccagcgcc

SEQ ID NO: 4072915 - DNA, 25 bp, Homo sapien
tggcagacagctccttctcgggggc

SEQ ID NO: 4072916 - DNA, 25 bp, Homo sapien
ggcagacagctccttctcgggggcc

SEQ ID NO: 4072917 - DNA, 25 bp, Homo sapien
cgtggcagacagctccttctcgggg

SEQ ID NO: 4072918 - DNA, 25 bp, Homo sapien
ccgtggcagacagctccttctcggg

SEQ ID NO: 4072919 - DNA, 25 bp, Homo sapien
cctcggcggtaatggggtcatagat

SEQ ID NO: 4072920 - DNA, 25 bp, Homo sapien
cctccccgctctcgcgaggcagccg

SEQ ID NO: 4072921 - DNA, 25 bp, Homo sapien
gaggcctcggcggtaatggggtcat

SEQ ID NO: 4072922 - DNA, 25 bp, Homo sapien
gcggtaatggggtcatagatcactc

SEQ ID NO: 4072923 - DNA, 25 bp, Homo sapien
gtgtctgtggttattgtcatccttc

SEQ ID NO: 4072924 - DNA, 25 bp, Homo sapien
tcagaagcggtgtctgtggttattg

SEQ ID NO: 4072925 - DNA, 25 bp, Homo sapien
gcctcagaagcggtgtctgtggtta

SEQ ID NO: 4072926 - DNA, 25 bp, Homo sapien
agaagcggtgtctgtggttattgtc

SEQ ID NO: 4072927 - DNA, 25 bp, Homo sapien
tggactttggaagggacaactggac

SEQ ID NO: 4072928 - DNA, 25 bp, Homo sapien
gggtgccattcctggggtgcctctt

SEQ ID NO: 4072929 - DNA, 25 bp, Homo sapien
tgccattcctggggtgcctcttggg

SEQ ID NO: 4072930 - DNA, 25 bp, Homo sapien
gctgggtggactttggaagggacaa

SEQ ID NO: 4072931 - DNA, 25 bp, Homo sapien
tgggctgaggggcttgaggttcccc

SEQ ID NO: 4072932 - DNA, 25 bp, Homo sapien
ctgggctgaggggcttgaggttccc

SEQ ID NO: 4072933 - DNA, 25 bp, Homo sapien
tattcccccactgccccccagcctg

SEQ ID NO: 4072934 - DNA, 25 bp, Homo sapien
tgccccccagcctggtggctgggct

SEQ ID NO: 4072935 - DNA, 25 bp, Homo sapien
ggccacttgtcaccaggcgtcgata

SEQ ID NO: 4072936 - DNA, 25 bp, Homo sapien
tcactgctggctccgggttgttgac

SEQ ID NO: 4072937 - DNA, 25 bp, Homo sapien
ccctgggagaatgaacattcgggct

SEQ ID NO: 4072938 - DNA, 25 bp, Homo sapien
gtcgataccgttcgggctcactgct

SEQ ID NO: 4072939 - DNA, 25 bp, Homo sapien
tcctgttcgtgccacttccaaaaat

SEQ ID NO: 4072940 - DNA, 25 bp, Homo sapien
tgttcgtgccacttccaaaaatcca

SEQ ID NO: 4072941 - DNA, 25 bp, Homo sapien
tctcctgttcgtgccacttccaaaa

SEQ ID NO: 4072942 - DNA, 25 bp, Homo sapien
tttcctctcctgttcgtgccacttc

SEQ ID NO: 4072943 - DNA, 25 bp, Homo sapien
ggggctccacggccttcagagtgtc

SEQ ID NO: 4072944 - DNA, 25 bp, Homo sapien
ggctccacggccttcagagtgtcta

SEQ ID NO: 4072945 - DNA, 25 bp, Homo sapien
gggctccacggccttcagagtgtct

SEQ ID NO: 4072946 - DNA, 25 bp, Homo sapien
tcaggaagagaacgttgctgatgcg

SEQ ID NO: 4072947 - DNA, 25 bp, Homo sapien
gatgcggttgtaccttgtccctagt

SEQ ID NO: 4072948 - DNA, 25 bp, Homo sapien
agagaacgttgctgatgcggttgta

SEQ ID NO: 4072949 - DNA, 25 bp, Homo sapien
ctgatgcggttgtaccttgtcccta

SEQ ID NO: 4072950 - DNA, 25 bp, Homo sapien
gaacccaagacgctgagaagctcgg

SEQ ID NO: 4072951 - DNA, 25 bp, Homo sapien
tttgtcccggaacgcagcttacggc

SEQ ID NO: 4072952 - DNA, 25 bp, Homo sapien
ttcagaactggagcccggagacgtt

SEQ ID NO: 4072953 - DNA, 25 bp, Homo sapien
tgtccataggaaccttgcggcctgg

SEQ ID NO: 4072954 - DNA, 25 bp, Homo sapien
ataatcctcactgttgcactcaggg

SEQ ID NO: 4072955 - DNA, 25 bp, Homo sapien
ggcccccggataatcctcactgtta

SEQ ID NO: 4072956 - DNA, 25 bp, Homo sapien
cggataatcctcactgttgcactca

SEQ ID NO: 4072957 - DNA, 25 bp, Homo sapien
tggataatcctcactgttgcactca

SEQ ID NO: 4072958 - DNA, 25 bp, Homo sapien
ctgttgcactcagggtccctctgat

SEQ ID NO: 4072959 - DNA, 25 bp, Homo sapien
cactcagggtccctctgataatcct

SEQ ID NO: 4072960 - DNA, 25 bp, Homo sapien
ctcagggtccctctgataatcctca

SEQ ID NO: 4072961 - DNA, 25 bp, Homo sapien
tgcactcagggtccctctgataatc

SEQ ID NO: 4072962 - DNA, 25 bp, Homo sapien
ctgttacactcagggccccctggat

SEQ ID NO: 4072963 - DNA, 25 bp, Homo sapien
ctcagggccccctggataatcctca

SEQ ID NO: 4072964 - DNA, 25 bp, Homo sapien
gttacactcagggccccctggataa

SEQ ID NO: 4072965 - DNA, 25 bp, Homo sapien
cactcagggccccctggataatcct

SEQ ID NO: 4072966 - DNA, 25 bp, Homo sapien
tgttacactcaggcccccctggata

SEQ ID NO: 4072967 - DNA, 25 bp, Homo sapien
tcaggcccccctggataatcctcac

SEQ ID NO: 4072968 - DNA, 25 bp, Homo sapien
gttacactcaggcccccctggataa

SEQ ID NO: 4072969 - DNA, 25 bp, Homo sapien
cactcaggcccccctggataatcct

SEQ ID NO: 4072970 - DNA, 25 bp, Homo sapien
cccctggataatcctcgctgttaca

SEQ ID NO: 4072971 - DNA, 25 bp, Homo sapien
tcctcactgttacactcagggcacc

SEQ ID NO: 4072972 - DNA, 25 bp, Homo sapien
aatcctcgctgttacactcagggcc

SEQ ID NO: 4072973 - DNA, 25 bp, Homo sapien
ccccctggataatcctcgctgttac

SEQ ID NO: 4072974 - DNA, 25 bp, Homo sapien
cccggataatcctcactgttgcact

SEQ ID NO: 4072975 - DNA, 25 bp, Homo sapien
tgttactctcaggccccccggataa

SEQ ID NO: 4072976 - DNA, 25 bp, Homo sapien
ataatcctcactgttgcactcaggg

SEQ ID NO: 4072977 - DNA, 25 bp, Homo sapien
tcactgttactctcaggccccccgg

SEQ ID NO: 4072978 - DNA, 25 bp, Homo sapien
ctgttactctcaggccccccggata

SEQ ID NO: 4072979 - DNA, 25 bp, Homo sapien
actgttactctcaggccccccggat

SEQ ID NO: 4072980 - DNA, 25 bp, Homo sapien
tgttactctcaggccccccggataa

SEQ ID NO: 4072981 - DNA, 25 bp, Homo sapien
tcactgttactctcaggccccccgg

SEQ ID NO: 4072982 - DNA, 25 bp, Homo sapien
ctcaggcccccccggataatcctca

SEQ ID NO: 4072983 - DNA, 25 bp, Homo sapien
tcaggcccccccggataatcctcac

SEQ ID NO: 4072984 - DNA, 25 bp, Homo sapien
cccggataatcctcactgttgcact

SEQ ID NO: 4072985 - DNA, 25 bp, Homo sapien
gccccccggataatcctcactgtta

SEQ ID NO: 4072986 - DNA, 25 bp, Homo sapien
tgttactctcaggccccccggataa

SEQ ID NO: 4072987 - DNA, 25 bp, Homo sapien
ataatcctcactgttgcactcaggg

SEQ ID NO: 4072988 - DNA, 25 bp, Homo sapien
ataatcctcactgttgcactcaggg

SEQ ID NO: 4072989 - DNA, 25 bp, Homo sapien
ggataatcctcactgttgcactcag

SEQ ID NO: 4072990 - DNA, 25 bp, Homo sapien
ctggataatcctcactgttgcactc

SEQ ID NO: 4072991 - DNA, 25 bp, Homo sapien
tggataatcctcactgttgcactca

SEQ ID NO: 4072992 - DNA, 25 bp, Homo sapien
gtgttactctcaggcccccctggat

SEQ ID NO: 4072993 - DNA, 25 bp, Homo sapien
tctcaggcccccctggataatcctc

SEQ ID NO: 4072994 - DNA, 25 bp, Homo sapien
tcaggcccccctggataatcctcac

SEQ ID NO: 4072995 - DNA, 25 bp, Homo sapien
actctcaggcccccctggataatcc

SEQ ID NO: 4072996 - DNA, 25 bp, Homo sapien
taatcctcaccgttgcactcagggc

SEQ ID NO: 4072997 - DNA, 25 bp, Homo sapien
ataatcctcaccgttgcactcaggg

SEQ ID NO: 4072998 - DNA, 25 bp, Homo sapien
cactcagggccccccggataatcct

SEQ ID NO: 4072999 - DNA, 25 bp, Homo sapien
tacactcagggccccccggataatc

SEQ ID NO: 4073000 - DNA, 25 bp, Homo sapien
tcagggccccccggataatcctcat

SEQ ID NO: 4073001 - DNA, 25 bp, Homo sapien
ctgttacactcagggccccccggat

SEQ ID NO: 4073002 - DNA, 25 bp, Homo sapien
ggataatcctgttactctcagggca

SEQ ID NO: 4073003 - DNA, 25 bp, Homo sapien
taatcctgttactctcagggcacct

SEQ ID NO: 4073004 - DNA, 25 bp, Homo sapien
ataatcctgttactctcagggcacc

SEQ ID NO: 4073005 - DNA, 25 bp, Homo sapien
gataatcctgttactctcagggcac

SEQ ID NO: 4073006 - DNA, 25 bp, Homo sapien
cccggataatcctcactgttgcact

SEQ ID NO: 4073007 - DNA, 25 bp, Homo sapien
ataatcctcactgttgcactcaggg

SEQ ID NO: 4073008 - DNA, 25 bp, Homo sapien
gccccccggataatcctcactgtta

SEQ ID NO: 4073009 - DNA, 25 bp, Homo sapien
tgttactctcaggccccccggataa

SEQ ID NO: 4073010 - DNA, 25 bp, Homo sapien
gtctcgtggctgtcccggtgcctcg

SEQ ID NO: 4073011 - DNA, 25 bp, Homo sapien
cgaggcaccgggacagccacgagac

SEQ ID NO: 4073012 - DNA, 25 bp, Homo sapien
cctggataatcctcactgttgaact

SEQ ID NO: 4073013 - DNA, 25 bp, Homo sapien
taatcctcactgttacactcagggc

SEQ ID NO: 4073014 - DNA, 25 bp, Homo sapien
ggataatcctcactgttacactcag

SEQ ID NO: 4073015 - DNA, 25 bp, Homo sapien
aatcctcactgttacactcagggcc

SEQ ID NO: 4073016 - DNA, 25 bp, Homo sapien
cccggataatcctcactgttgcact

SEQ ID NO: 4073017 - DNA, 25 bp, Homo sapien
ataatcctcactgttgcactcaggg

SEQ ID NO: 4073018 - DNA, 25 bp, Homo sapien
gccccccggataatcctcactgtta

SEQ ID NO: 4073019 - DNA, 25 bp, Homo sapien
tgttactctcaggccccccggataa

SEQ ID NO: 4073020 - DNA, 25 bp, Homo sapien
actcagggcccccctggataatcct

SEQ ID NO: 4073021 - DNA, 25 bp, Homo sapien
gttacactcagggcccccctggata

SEQ ID NO: 4073022 - DNA, 25 bp, Homo sapien
cgttacactcagggcccccctggat

SEQ ID NO: 4073023 - DNA, 25 bp, Homo sapien
cagggcccccctggataatcctcac

SEQ ID NO: 4073024 - DNA, 25 bp, Homo sapien
cccggataatcctcactgttgcact

SEQ ID NO: 4073025 - DNA, 25 bp, Homo sapien
gccccccggataatcctcactgtta

SEQ ID NO: 4073026 - DNA, 25 bp, Homo sapien
tgttactctcaggccccccggataa

SEQ ID NO: 4073027 - DNA, 25 bp, Homo sapien
ataatcctcactgttgcactcaggg

SEQ ID NO: 4073028 - DNA, 25 bp, Homo sapien
acactcaggccccccggataatcct

SEQ ID NO: 4073029 - DNA, 25 bp, Homo sapien
actcaggccccccggataatcctca

SEQ ID NO: 4073030 - DNA, 25 bp, Homo sapien
tgttacactcaggccccccggataa

SEQ ID NO: 4073031 - DNA, 25 bp, Homo sapien
tcaggccccccggataatcctcact

SEQ ID NO: 4073032 - DNA, 25 bp, Homo sapien
tcagggcccccctggataatcctca

SEQ ID NO: 4073033 - DNA, 25 bp, Homo sapien
cagggcccccctggataatcctcac

SEQ ID NO: 4073034 - DNA, 25 bp, Homo sapien
gttacactcaggcccccggataatc

SEQ ID NO: 4073035 - DNA, 25 bp, Homo sapien
actcaggcccccggataatcctcac

SEQ ID NO: 4073036 - DNA, 25 bp, Homo sapien
tacactcaggcccccggataatcct

SEQ ID NO: 4073037 - DNA, 25 bp, Homo sapien
tgttacactcaggcccccggataat

SEQ ID NO: 4073038 - DNA, 25 bp, Homo sapien
tgttacactcagggccccctggata

SEQ ID NO: 4073039 - DNA, 25 bp, Homo sapien
tcagggccccctggataatcctcac

SEQ ID NO: 4073040 - DNA, 25 bp, Homo sapien
gttacactcagggccccctggataa

SEQ ID NO: 4073041 - DNA, 25 bp, Homo sapien
cactcagggccccctggataatcct

SEQ ID NO: 4073042 - DNA, 25 bp, Homo sapien
cggataatcctcaccgttgcactca

SEQ ID NO: 4073043 - DNA, 25 bp, Homo sapien
gccccccggataatcctcactgtta

SEQ ID NO: 4073044 - DNA, 25 bp, Homo sapien
tgttactctcaggccccccggataa

SEQ ID NO: 4073045 - DNA, 25 bp, Homo sapien
taatcctcaccgttgcactcagggc

SEQ ID NO: 4073046 - DNA, 25 bp, Homo sapien
ccctctgataatcctcgctgttaca

SEQ ID NO: 4073047 - DNA, 25 bp, Homo sapien
cccggataatcctcactgttgcact

SEQ ID NO: 4073048 - DNA, 25 bp, Homo sapien
ataatcctcactgttgcactcaggg

SEQ ID NO: 4073049 - DNA, 25 bp, Homo sapien
agggtccctctgataatcctcgctg

SEQ ID NO: 4073050 - DNA, 25 bp, Homo sapien
tctgataatcctcgctgttacactc

SEQ ID NO: 4073051 - DNA, 25 bp, Homo sapien
agggtccctctgataatcctcgctg

SEQ ID NO: 4073052 - DNA, 25 bp, Homo sapien
tgttacactcaggccccccggataa

SEQ ID NO: 4073053 - DNA, 25 bp, Homo sapien
ggtccctctgataatcctcgctgtt

SEQ ID NO: 4073054 - DNA, 25 bp, Homo sapien
ataatcctcactgttgcactcaggg

SEQ ID NO: 4073055 - DNA, 25 bp, Homo sapien
ggcccccggataatcctcactgtta

SEQ ID NO: 4073056 - DNA, 25 bp, Homo sapien
agggtccctctgataatcctcgctg

SEQ ID NO: 4073057 - DNA, 25 bp, Homo sapien
aatcctcgctgttacactcagggcc

SEQ ID NO: 4073058 - DNA, 25 bp, Homo sapien
tcagggcccccccggataattctca

SEQ ID NO: 4073059 - DNA, 25 bp, Homo sapien
taatcctcactgttacactcagggc

SEQ ID NO: 4073060 - DNA, 25 bp, Homo sapien
aatcctcactgttacactcagggcc

SEQ ID NO: 4073061 - DNA, 25 bp, Homo sapien
ggataatcctcaccgttacactcag

SEQ ID NO: 4073062 - DNA, 25 bp, Homo sapien
gataatcctcactcttacactcagg

SEQ ID NO: 4073063 - DNA, 25 bp, Homo sapien
ctcccggataatcctcaccgttaca

SEQ ID NO: 4073064 - DNA, 25 bp, Homo sapien
caggcctcccggataatcctcaccg

SEQ ID NO: 4073065 - DNA, 25 bp, Homo sapien
ggataatcctcaccgttacactcag

SEQ ID NO: 4073066 - DNA, 25 bp, Homo sapien
taatcctcaccgttacactcagggc

SEQ ID NO: 4073067 - DNA, 25 bp, Homo sapien
gccccccggataatcctcactgtta

SEQ ID NO: 4073068 - DNA, 25 bp, Homo sapien
aggccccccggataatcctcactgt

SEQ ID NO: 4073069 - DNA, 25 bp, Homo sapien
gcccccctgaataatcctcactgtt

SEQ ID NO: 4073070 - DNA, 25 bp, Homo sapien
tgttacactcaggccccccggataa

SEQ ID NO: 4073071 - DNA, 25 bp, Homo sapien
ctggataatcctcaccgttacactc

SEQ ID NO: 4073072 - DNA, 25 bp, Homo sapien
atcctcaccgttacactcagggccc

SEQ ID NO: 4073073 - DNA, 25 bp, Homo sapien
ggataatcctcaccgttacactcag

SEQ ID NO: 4073074 - DNA, 25 bp, Homo sapien
taatcctcaccgttacactcagggc

SEQ ID NO: 4073075 - DNA, 25 bp, Homo sapien
tctccagtgcaactgttgatttaat

SEQ ID NO: 4073076 - DNA, 25 bp, Homo sapien
cctctgataatcctcgctgacctct

SEQ ID NO: 4073077 - DNA, 25 bp, Homo sapien
ttacctttttgccatataaagccgc

SEQ ID NO: 4073078 - DNA, 25 bp, Homo sapien
ctttttgccatataaagccgcattc

SEQ ID NO: 4073079 - DNA, 25 bp, Homo sapien
gctgagcctttatcgcacacttagg

SEQ ID NO: 4073080 - DNA, 25 bp, Homo sapien
atgtgtccgtgaagccatcggcccg

SEQ ID NO: 4073081 - DNA, 25 bp, Homo sapien
cgggtgcaggttataatgctgagcc

SEQ ID NO: 4073082 - DNA, 25 bp, Homo sapien
tcgcacacttaggagggcctggctt

SEQ ID NO: 4073083 - DNA, 25 bp, Homo sapien
gtggaagtgccgctcccatccgggc

SEQ ID NO: 4073084 - DNA, 25 bp, Homo sapien
caagcacgtggaagtgccgctccca

SEQ ID NO: 4073085 - DNA, 25 bp, Homo sapien
agcacgtggaagtgccgctcccatc

SEQ ID NO: 4073086 - DNA, 25 bp, Homo sapien
ggaagtgccgctcccatccgggcag

SEQ ID NO: 4073087 - DNA, 25 bp, Homo sapien
ccccatctcccacgagagtgtggga

SEQ ID NO: 4073088 - DNA, 25 bp, Homo sapien
gagctgagtagctttggcgctttac

SEQ ID NO: 4073089 - DNA, 25 bp, Homo sapien
tctcccacgagagtgtgggacacgg

SEQ ID NO: 4073090 - DNA, 25 bp, Homo sapien
agccaagagctgagtagctttggcg

SEQ ID NO: 4073091 - DNA, 25 bp, Homo sapien
gaatgacatcgccatgccttcgtgg

SEQ ID NO: 4073092 - DNA, 25 bp, Homo sapien
gtgggtcccaacacccacgctcaga

SEQ ID NO: 4073093 - DNA, 25 bp, Homo sapien
atcgccatgccttcgtgggtcccaa

SEQ ID NO: 4073094 - DNA, 25 bp, Homo sapien
tgacatcgccatgccttcgtgggtc

SEQ ID NO: 4073095 - DNA, 25 bp, Homo sapien
tgaccccgtgatcgggatctgctct

SEQ ID NO: 4073096 - DNA, 25 bp, Homo sapien
attccctgtacagttgacggcccca

SEQ ID NO: 4073097 - DNA, 25 bp, Homo sapien
gccccgagcaaacccttctacagca

SEQ ID NO: 4073098 - DNA, 25 bp, Homo sapien
gatcgggatctgctctgtttggaag

SEQ ID NO: 4073099 - DNA, 25 bp, Homo sapien
agtgacagttttattggcaggcagg

SEQ ID NO: 4073100 - DNA, 25 bp, Homo sapien
gcttgttccccctgtcctggaggtg

SEQ ID NO: 4073101 - DNA, 25 bp, Homo sapien
gctggcagtgacagttttattggca

SEQ ID NO: 4073102 - DNA, 25 bp, Homo sapien
gacagttttattggcaggcaggccc

SEQ ID NO: 4073103 - DNA, 25 bp, Homo sapien
ggcggcgatggcggcttcacccgcg

SEQ ID NO: 4073104 - DNA, 25 bp, Homo sapien
cggcttcacccgcggtgtgagaccg

SEQ ID NO: 4073105 - DNA, 25 bp, Homo sapien
ttcacccgcggtgtgagaccgcgct

SEQ ID NO: 4073106 - DNA, 25 bp, Homo sapien
ccgcggtgtgagaccgcgctgtcct

SEQ ID NO: 4073107 - DNA, 25 bp, Homo sapien
tcaggacacacagcccccgcccagg

SEQ ID NO: 4073108 - DNA, 25 bp, Homo sapien
caggacacacagcccccgcccagga

SEQ ID NO: 4073109 - DNA, 25 bp, Homo sapien
aggacacacagcccccgcccaggac

SEQ ID NO: 4073110 - DNA, 25 bp, Homo sapien
caggatgcccggcaatgccaggtgc

SEQ ID NO: 4073111 - DNA, 25 bp, Homo sapien
cactggcatgttctgccacgggcat

SEQ ID NO: 4073112 - DNA, 25 bp, Homo sapien
gcatgtgcatggaggagctccccgc

SEQ ID NO: 4073113 - DNA, 25 bp, Homo sapien
gagttgcgctgctgccccgaaacat

SEQ ID NO: 4073114 - DNA, 25 bp, Homo sapien
tgcagagcgcgtctctgatccaacg

SEQ ID NO: 4073115 - DNA, 25 bp, Homo sapien
gcgtctctgatccaacgcctgctgt

SEQ ID NO: 4073116 - DNA, 25 bp, Homo sapien
cctcagaggtttctgcccgtgctcc

SEQ ID NO: 4073117 - DNA, 25 bp, Homo sapien
aggtttctgcccgtgctccccgaga

SEQ ID NO: 4073118 - DNA, 25 bp, Homo sapien
gaagagccccgtttttatcttgtgc

SEQ ID NO: 4073119 - DNA, 25 bp, Homo sapien
aggcctagagcggtcacactgtgga

SEQ ID NO: 4073120 - DNA, 25 bp, Homo sapien
tggcagatagggactgatctggcat

SEQ ID NO: 4073121 - DNA, 25 bp, Homo sapien
agctctatacgggtcatcctgtggc

SEQ ID NO: 4073122 - DNA, 25 bp, Homo sapien
tcggccagccttagagagagaagca

SEQ ID NO: 4073123 - DNA, 25 bp, Homo sapien
tcacctgggtccagttaccagatta

SEQ ID NO: 4073124 - DNA, 25 bp, Homo sapien
cataagaaccccaaagaaacatctc

SEQ ID NO: 4073125 - DNA, 25 bp, Homo sapien
agcaggagtgcacaccactggccgt

SEQ ID NO: 4073126 - DNA, 25 bp, Homo sapien
gtctgtatctctgaccagatgaagg

SEQ ID NO: 4073127 - DNA, 25 bp, Homo sapien
tgtagcgtcctgacaactctgggcc

SEQ ID NO: 4073128 - DNA, 25 bp, Homo sapien
aactctgggccctgctgtttggcat

SEQ ID NO: 4073129 - DNA, 25 bp, Homo sapien
gcattggtgtctgtatctctgacca

SEQ ID NO: 4073130 - DNA, 25 bp, Homo sapien
atggatggatgaagagaaggatcct

SEQ ID NO: 4073131 - DNA, 25 bp, Homo sapien
agagaaggatcctggatggatggat

SEQ ID NO: 4073132 - DNA, 25 bp, Homo sapien
atgaagagaaggatcctggatggat

SEQ ID NO: 4073133 - DNA, 25 bp, Homo sapien
gatggatggatgaagagaaggatcc

SEQ ID NO: 4073134 - DNA, 25 bp, Homo sapien
cccatgtagtcaccccagaaggcag

SEQ ID NO: 4073135 - DNA, 25 bp, Homo sapien
ggctcccggatctcaccagtgtggt

SEQ ID NO: 4073136 - DNA, 25 bp, Homo sapien
ctcaccagtgtggttggcgtgggtc

SEQ ID NO: 4073137 - DNA, 25 bp, Homo sapien
ccagccccatgtagtcaccccagaa

SEQ ID NO: 4073138 - DNA, 25 bp, Homo sapien
ttgtaccgtgttcctttccactgcc

SEQ ID NO: 4073139 - DNA, 25 bp, Homo sapien
ccttgtaccgtgttcctttccactg

SEQ ID NO: 4073140 - DNA, 25 bp, Homo sapien
tttccactgcccagagatagccagc

SEQ ID NO: 4073141 - DNA, 25 bp, Homo sapien
agccagctgctggactaagcacttg

SEQ ID NO: 4073142 - DNA, 25 bp, Homo sapien
tcccgggaggccaacgcatatgctg

SEQ ID NO: 4073143 - DNA, 25 bp, Homo sapien
ggtgggcctgaaatgcacacgtcca

SEQ ID NO: 4073144 - DNA, 25 bp, Homo sapien
gggcctcgtggcaattcgagccctg

SEQ ID NO: 4073145 - DNA, 25 bp, Homo sapien
aattcgagccctgggccacttgccg

SEQ ID NO: 4073146 - DNA, 25 bp, Homo sapien
ggccccagaccaccctctccaggcc

SEQ ID NO: 4073147 - DNA, 25 bp, Homo sapien
caggccccagaccaccctctccagg

SEQ ID NO: 4073148 - DNA, 25 bp, Homo sapien
ccccagaccaccctctccaggccca

SEQ ID NO: 4073149 - DNA, 25 bp, Homo sapien
catggcccgccaggccccagaccac

SEQ ID NO: 4073150 - DNA, 25 bp, Homo sapien
ggcccgcaaccccgctcccgctgtc

SEQ ID NO: 4073151 - DNA, 25 bp, Homo sapien
gcccgcaaccccgctcccgctgtcc

SEQ ID NO: 4073152 - DNA, 25 bp, Homo sapien
tggcctaaccgacttttctggatgg

SEQ ID NO: 4073153 - DNA, 25 bp, Homo sapien
agccattcaagaggcgccaggcagc

SEQ ID NO: 4073154 - DNA, 25 bp, Homo sapien
cacatctgagccattcaagaggcgc

SEQ ID NO: 4073155 - DNA, 25 bp, Homo sapien
cagctgttcctggcctaaccgactt

SEQ ID NO: 4073156 - DNA, 25 bp, Homo sapien
cagacccctggtatattgtcgtggg

SEQ ID NO: 4073157 - DNA, 25 bp, Homo sapien
caccgaggggtaggacagtattttg

SEQ ID NO: 4073158 - DNA, 25 bp, Homo sapien
gccagacccctggtatattgtcgtg

SEQ ID NO: 4073159 - DNA, 25 bp, Homo sapien
cgtggggtgcaaagggggtctgtca

SEQ ID NO: 4073160 - DNA, 25 bp, Homo sapien
gtagggaccaggaccccgctgcaaa

SEQ ID NO: 4073161 - DNA, 25 bp, Homo sapien
gcacgcagcccaccatttcacactg

SEQ ID NO: 4073162 - DNA, 25 bp, Homo sapien
atttcacactgccacgaagtccggg

SEQ ID NO: 4073163 - DNA, 25 bp, Homo sapien
tagggaccaggaccccgctgcaaat

SEQ ID NO: 4073164 - DNA, 25 bp, Homo sapien
ctgaggacagggaggggagggtcat

SEQ ID NO: 4073165 - DNA, 25 bp, Homo sapien
gattgaagtagctattattgacccc

SEQ ID NO: 4073166 - DNA, 25 bp, Homo sapien
accaaggcttggtggtaaccctgct

SEQ ID NO: 4073167 - DNA, 25 bp, Homo sapien
gagatgtgtcatcgtcccaggacct

SEQ ID NO: 4073168 - DNA, 25 bp, Homo sapien
gagaagggagcatgtccatctccac

SEQ ID NO: 4073169 - DNA, 25 bp, Homo sapien
ctgcgggccttttcttccaggtgag

SEQ ID NO: 4073170 - DNA, 25 bp, Homo sapien
agcagcggggggacgacgccatccc

SEQ ID NO: 4073171 - DNA, 25 bp, Homo sapien
ccagcagcggggggacgacgccatc

SEQ ID NO: 4073172 - DNA, 25 bp, Homo sapien
ggccttttcttccaggtgagccagg

SEQ ID NO: 4073173 - DNA, 25 bp, Homo sapien
ctaggacacgggcatcaccttttcc

SEQ ID NO: 4073174 - DNA, 25 bp, Homo sapien
tagtcacccagtttgtcgccgtttg

SEQ ID NO: 4073175 - DNA, 25 bp, Homo sapien
tcgccgtttgttaaggcaatactag

SEQ ID NO: 4073176 - DNA, 25 bp, Homo sapien
tgacaggggcccttatgagagacag

SEQ ID NO: 4073177 - DNA, 25 bp, Homo sapien
gttcgggacccaggcggctgtagga

SEQ ID NO: 4073178 - DNA, 25 bp, Homo sapien
cactgggggtgctcggatgtgtgcc

SEQ ID NO: 4073179 - DNA, 25 bp, Homo sapien
cagtgctgtcggctggagaagagcc

SEQ ID NO: 4073180 - DNA, 25 bp, Homo sapien
tcatgtttgttcgggacccaggcgg

SEQ ID NO: 4073181 - DNA, 25 bp, Homo sapien
tgccaggtgagagatcgcacttgcg

SEQ ID NO: 4073182 - DNA, 25 bp, Homo sapien
gtgagagatcgcacttgcgtgcttc

SEQ ID NO: 4073183 - DNA, 25 bp, Homo sapien
caggtgagagatcgcacttgcgtgc

SEQ ID NO: 4073184 - DNA, 25 bp, Homo sapien
ctgccaggtgagagatcgcacttgc

SEQ ID NO: 4073185 - DNA, 25 bp, Homo sapien
ggtctgcgctcagagccagcatagc

SEQ ID NO: 4073186 - DNA, 25 bp, Homo sapien
tctgccagtgatcgacaggttcctt

SEQ ID NO: 4073187 - DNA, 25 bp, Homo sapien
cgctcagagccagcatagccagcag

SEQ ID NO: 4073188 - DNA, 25 bp, Homo sapien
tcagatgggagcctggattcccatt

SEQ ID NO: 4073189 - DNA, 25 bp, Homo sapien
ctctgctccatgcgccggctctgtg

SEQ ID NO: 4073190 - DNA, 25 bp, Homo sapien
tccatgcgccggctctgtgcctggg

SEQ ID NO: 4073191 - DNA, 25 bp, Homo sapien
ggtggcccctcttctgtagccagct

SEQ ID NO: 4073192 - DNA, 25 bp, Homo sapien
tgtgcctggggtggcccctcttctg

SEQ ID NO: 4073193 - DNA, 25 bp, Homo sapien
cagttcacggtctttggcctccact

SEQ ID NO: 4073194 - DNA, 25 bp, Homo sapien
ctttggcctccactgtgatggccat

SEQ ID NO: 4073195 - DNA, 25 bp, Homo sapien
ctgtctccttgggccccgtttccag

SEQ ID NO: 4073196 - DNA, 25 bp, Homo sapien
tttccagttcacggtctttggcctc

SEQ ID NO: 4073197 - DNA, 25 bp, Homo sapien
gcagggtgggccaggtcccgtgcag

SEQ ID NO: 4073198 - DNA, 25 bp, Homo sapien
gcgttggtccggagagggagagaca

SEQ ID NO: 4073199 - DNA, 25 bp, Homo sapien
cccgcgcccagaggcatggatccca

SEQ ID NO: 4073200 - DNA, 25 bp, Homo sapien
attttcccagagaatggcgttggtc

SEQ ID NO: 4073201 - DNA, 25 bp, Homo sapien
ttagcactcgagagccttcctcgga

SEQ ID NO: 4073202 - DNA, 25 bp, Homo sapien
ccggctgtgcatcagtgtgcccgta

SEQ ID NO: 4073203 - DNA, 25 bp, Homo sapien
ccagcttgtcactcgcgaggtgggc

SEQ ID NO: 4073204 - DNA, 25 bp, Homo sapien
tcctcggattaaagccgtgcgcagc

SEQ ID NO: 4073205 - DNA, 25 bp, Homo sapien
tcagaggtctagatcctcaacttga

SEQ ID NO: 4073206 - DNA, 25 bp, Homo sapien
cagaggtctagatcctcaacttgac

SEQ ID NO: 4073207 - DNA, 25 bp, Homo sapien
ggcggccacaccacgagtggatgct

SEQ ID NO: 4073208 - DNA, 25 bp, Homo sapien
ccagggcatcgtagccagaaggaat

SEQ ID NO: 4073209 - DNA, 25 bp, Homo sapien
aatgatgatgtaggaggctgtcacc

SEQ ID NO: 4073210 - DNA, 25 bp, Homo sapien
cgggaacggagagcactgtgactcc

SEQ ID NO: 4073211 - DNA, 25 bp, Homo sapien
tcacagagagcagagcgataagcac

SEQ ID NO: 4073212 - DNA, 25 bp, Homo sapien
ggtgacagtgacttgacctcgctcc

SEQ ID NO: 4073213 - DNA, 25 bp, Homo sapien
tccaaggccgtcgtcagggatgagc

SEQ ID NO: 4073214 - DNA, 25 bp, Homo sapien
ggaaccattactgtgcccgggagac

SEQ ID NO: 4073215 - DNA, 25 bp, Homo sapien
tcaggggcactcgatgggggtccgt

SEQ ID NO: 4073216 - DNA, 25 bp, Homo sapien
cagatgtccaccaagagctctctct

SEQ ID NO: 4073217 - DNA, 25 bp, Homo sapien
tctcttgcaggaagatcccgggagg

SEQ ID NO: 4073218 - DNA, 25 bp, Homo sapien
agccggggagccagatgtccaccaa

SEQ ID NO: 4073219 - DNA, 25 bp, Homo sapien
ctggtggtccgagttcttggtctgt

SEQ ID NO: 4073220 - DNA, 25 bp, Homo sapien
ggctgcgaggcctctgctcttgaga

SEQ ID NO: 4073221 - DNA, 25 bp, Homo sapien
tggctgcgaggcctctgctcttgag

SEQ ID NO: 4073222 - DNA, 25 bp, Homo sapien
ctcttgagatcatgagctgaaagaa

SEQ ID NO: 4073223 - DNA, 25 bp, Homo sapien
tctgctcttgagatcatgagctgaa

SEQ ID NO: 4073224 - DNA, 25 bp, Homo sapien
tcagctgccgctcctcctcctcctc

SEQ ID NO: 4073225 - DNA, 25 bp, Homo sapien
ctgccctcagctgccgctcctcctc

SEQ ID NO: 4073226 - DNA, 25 bp, Homo sapien
gatacaagactatcatcacccgtga

SEQ ID NO: 4073227 - DNA, 25 bp, Homo sapien
ctatcatcacccgtgaacccattag

SEQ ID NO: 4073228 - DNA, 25 bp, Homo sapien
ccgagactggtctttaaaactgtca

SEQ ID NO: 4073229 - DNA, 25 bp, Homo sapien
caagcggccgtcatttgatacaaga

SEQ ID NO: 4073230 - DNA, 25 bp, Homo sapien
gagagcatgatttgaaggtgccgct

SEQ ID NO: 4073231 - DNA, 25 bp, Homo sapien
gcatgatttgaaggtgccgctgtgg

SEQ ID NO: 4073232 - DNA, 25 bp, Homo sapien
gagcatgatttgaaggtgccgctgt

SEQ ID NO: 4073233 - DNA, 25 bp, Homo sapien
agagcatgatttgaaggtgccgctg

SEQ ID NO: 4073234 - DNA, 25 bp, Homo sapien
acctgtgtgggcatcagtgtccatc

SEQ ID NO: 4073235 - DNA, 25 bp, Homo sapien
cctgtgtgggcatcagtgtccatcg

SEQ ID NO: 4073236 - DNA, 25 bp, Homo sapien
cacctgtgtgggcatcagtgtccat

SEQ ID NO: 4073237 - DNA, 25 bp, Homo sapien
gatcatgatcacagaatcttctgga

SEQ ID NO: 4073238 - DNA, 25 bp, Homo sapien
ggagaaaggttcgtaactgtgtgcc

SEQ ID NO: 4073239 - DNA, 25 bp, Homo sapien
catccaggagaaaggttcgtaactg

SEQ ID NO: 4073240 - DNA, 25 bp, Homo sapien
aaaggttcgtaactgtgtgcccagc

SEQ ID NO: 4073241 - DNA, 25 bp, Homo sapien
tccaggagaaaggttcgtaactgtg

SEQ ID NO: 4073242 - DNA, 25 bp, Homo sapien
actgggcaggcacacatggttcgtt

SEQ ID NO: 4073243 - DNA, 25 bp, Homo sapien
cgctgctggtcactggcgactggct

SEQ ID NO: 4073244 - DNA, 25 bp, Homo sapien
gatatgtctggtagggctgggcaaa

SEQ ID NO: 4073245 - DNA, 25 bp, Homo sapien
catggttcgttggacaacagcgctg

SEQ ID NO: 4073246 - DNA, 25 bp, Homo sapien
gtgaggggcgagacacggacaaagg

SEQ ID NO: 4073247 - DNA, 25 bp, Homo sapien
tggtgaggggcgagacacggacaaa

SEQ ID NO: 4073248 - DNA, 25 bp, Homo sapien
ggtgaggggcgagacacggacaaag

SEQ ID NO: 4073249 - DNA, 25 bp, Homo sapien
acagctttgggcggcggtaacaaga

SEQ ID NO: 4073250 - DNA, 25 bp, Homo sapien
tgcacgtggacgcaagggggcagga

SEQ ID NO: 4073251 - DNA, 25 bp, Homo sapien
ctgatgggcgtgtgggtatgtgtgg

SEQ ID NO: 4073252 - DNA, 25 bp, Homo sapien
aagggttggatccatgccagggaca

SEQ ID NO: 4073253 - DNA, 25 bp, Homo sapien
agggtccgagctccgtttggccagc

SEQ ID NO: 4073254 - DNA, 25 bp, Homo sapien
actgtggagtgacgttgaatggaaa

SEQ ID NO: 4073255 - DNA, 25 bp, Homo sapien
gcctggtgctttgcgggtgcctgat

SEQ ID NO: 4073256 - DNA, 25 bp, Homo sapien
cctggccctcgctgtcatcagcttg

SEQ ID NO: 4073257 - DNA, 25 bp, Homo sapien
ccagcgtggggaacaagagccgaat

SEQ ID NO: 4073258 - DNA, 25 bp, Homo sapien
cgtggggaacaagagccgaatggcc

SEQ ID NO: 4073259 - DNA, 25 bp, Homo sapien
ggccagcgtggggaacaagagccga

SEQ ID NO: 4073260 - DNA, 25 bp, Homo sapien
tggggaacaagagccgaatggccat

SEQ ID NO: 4073261 - DNA, 25 bp, Homo sapien
tgtgtgtgagaacaggccctgggct

SEQ ID NO: 4073262 - DNA, 25 bp, Homo sapien
gcagctgtgtgtgtgagaacaggcc

SEQ ID NO: 4073263 - DNA, 25 bp, Homo sapien
ctggcagccttgctttgtgcctgca

SEQ ID NO: 4073264 - DNA, 25 bp, Homo sapien
tgagaacaggccctgggcttggtac

SEQ ID NO: 4073265 - DNA, 25 bp, Homo sapien
ggggccggggctgtttctgaggctc

SEQ ID NO: 4073266 - DNA, 25 bp, Homo sapien
tgtttctgaggctctctgctggaaa

SEQ ID NO: 4073267 - DNA, 25 bp, Homo sapien
ttctgaggctctctgctggaaaaca

SEQ ID NO: 4073268 - DNA, 25 bp, Homo sapien
aggggccggggctgtttctgaggct

SEQ ID NO: 4073269 - DNA, 25 bp, Homo sapien
tagggggaccccaatcttgcctgtg

SEQ ID NO: 4073270 - DNA, 25 bp, Homo sapien
gcctgtgtatttccggcctgctgac

SEQ ID NO: 4073271 - DNA, 25 bp, Homo sapien
taatttaatcgcaggtccgagaggg

SEQ ID NO: 4073272 - DNA, 25 bp, Homo sapien
ctaatttaatcgcaggtccgagagg

SEQ ID NO: 4073273 - DNA, 25 bp, Homo sapien
tgggcagcggtgcatcaccagacaa

SEQ ID NO: 4073274 - DNA, 25 bp, Homo sapien
agttggaagggctagctacaaccat

SEQ ID NO: 4073275 - DNA, 25 bp, Homo sapien
gagttggaagggctagctacaacca

SEQ ID NO: 4073276 - DNA, 25 bp, Homo sapien
agcggtgcatcaccagacaaggcct

SEQ ID NO: 4073277 - DNA, 25 bp, Homo sapien
aggtgtcacgttttccccaggagag

SEQ ID NO: 4073278 - DNA, 25 bp, Homo sapien
gccctcaggcgcagcggtctggttc

SEQ ID NO: 4073279 - DNA, 25 bp, Homo sapien
tggttcagagccagcaacaccacgg

SEQ ID NO: 4073280 - DNA, 25 bp, Homo sapien
ctaggtgtcacgttttccccaggag

SEQ ID NO: 4073281 - DNA, 25 bp, Homo sapien
gtttgcattcctgggccaggaagcc

SEQ ID NO: 4073282 - DNA, 25 bp, Homo sapien
ctgtttgcattcctgggccaggaag

SEQ ID NO: 4073283 - DNA, 25 bp, Homo sapien
attcctgggccaggaagcctgaggc

SEQ ID NO: 4073284 - DNA, 25 bp, Homo sapien
tcctgggccaggaagcctgaggcca

SEQ ID NO: 4073285 - DNA, 25 bp, Homo sapien
ggcgggtgattgatgagaaggccac

SEQ ID NO: 4073286 - DNA, 25 bp, Homo sapien
ggcgtcatgtgaggcgggtgattga

SEQ ID NO: 4073287 - DNA, 25 bp, Homo sapien
ctgtgcacacgcgcgtgttaaaggg

SEQ ID NO: 4073288 - DNA, 25 bp, Homo sapien
cacgcgcgtgttaaagggcgtcatg

SEQ ID NO: 4073289 - DNA, 25 bp, Homo sapien
cacgtgagtttctaagccctggctt

SEQ ID NO: 4073290 - DNA, 25 bp, Homo sapien
gaacagggaggcttccggaacctca

SEQ ID NO: 4073291 - DNA, 25 bp, Homo sapien
agcccctgctatgccgagagggcag

SEQ ID NO: 4073292 - DNA, 25 bp, Homo sapien
tggctttaggtgtccctggctggaa

SEQ ID NO: 4073293 - DNA, 25 bp, Homo sapien
gaatcctgcagtacctttttgtgac

SEQ ID NO: 4073294 - DNA, 25 bp, Homo sapien
gttttacccagtgcagcatcctcag

SEQ ID NO: 4073295 - DNA, 25 bp, Homo sapien
tttgtctgcagactcctgggtcgtg

SEQ ID NO: 4073296 - DNA, 25 bp, Homo sapien
tacataacattacgtggaatcctgc

SEQ ID NO: 4073297 - DNA, 25 bp, Homo sapien
tcctggacctgagacgagctttaaa

SEQ ID NO: 4073298 - DNA, 25 bp, Homo sapien
taaaatctgggctgcaggttagctg

SEQ ID NO: 4073299 - DNA, 25 bp, Homo sapien
catgacaacagaccatcaaggatgg

SEQ ID NO: 4073300 - DNA, 25 bp, Homo sapien
agtccccatgtggattcgtgcccag

SEQ ID NO: 4073301 - DNA, 25 bp, Homo sapien
tggggacttgccaccttcggaggcc

SEQ ID NO: 4073302 - DNA, 25 bp, Homo sapien
ctggggacttgccaccttcggaggc

SEQ ID NO: 4073303 - DNA, 25 bp, Homo sapien
tcactggggacttgccaccttcgga

SEQ ID NO: 4073304 - DNA, 25 bp, Homo sapien
cactggggacttgccaccttcggag

SEQ ID NO: 4073305 - DNA, 25 bp, Homo sapien
actgactctgccatccgggccacca

SEQ ID NO: 4073306 - DNA, 25 bp, Homo sapien
gagtgggtctgccactgactctgcc

SEQ ID NO: 4073307 - DNA, 25 bp, Homo sapien
tcggtatcccttggctggagtggcc

SEQ ID NO: 4073308 - DNA, 25 bp, Homo sapien
gcctacagctgtgttcaccaggagt

SEQ ID NO: 4073309 - DNA, 25 bp, Homo sapien
tgttcagctaattgcaggcaccaaa

SEQ ID NO: 4073310 - DNA, 25 bp, Homo sapien
tttgcaaacctgcttggtgcccctg

SEQ ID NO: 4073311 - DNA, 25 bp, Homo sapien
tgcatgcacatgtttcccggctcca

SEQ ID NO: 4073312 - DNA, 25 bp, Homo sapien
tggtacaggcttttcgagccaaggc

SEQ ID NO: 4073313 - DNA, 25 bp, Homo sapien
cagagacatgtcacgttgaagggaa

SEQ ID NO: 4073314 - DNA, 25 bp, Homo sapien
tccctgaaggccttagtccagtgtg

SEQ ID NO: 4073315 - DNA, 25 bp, Homo sapien
cactgactagagtgattcaccaggc

SEQ ID NO: 4073316 - DNA, 25 bp, Homo sapien
gactgtgccgcttctcttgttatga

SEQ ID NO: 4073317 - DNA, 25 bp, Homo sapien
ttctctagggtatcgtattccggga

SEQ ID NO: 4073318 - DNA, 25 bp, Homo sapien
cttggagaggtcaaaaggcacgccg

SEQ ID NO: 4073319 - DNA, 25 bp, Homo sapien
tagtgtcaccaagtcgtgattccgg

SEQ ID NO: 4073320 - DNA, 25 bp, Homo sapien
gacccctgatttacgcagtggttgg

SEQ ID NO: 4073321 - DNA, 25 bp, Homo sapien
aaaattgatcgaggggctctccacc

SEQ ID NO: 4073322 - DNA, 25 bp, Homo sapien
caatttaccgataatgattcttgca

SEQ ID NO: 4073323 - DNA, 25 bp, Homo sapien
ctgttggaagatgccgcgtagagac

SEQ ID NO: 4073324 - DNA, 25 bp, Homo sapien
tcattaggggagacaaatctgctgt

SEQ ID NO: 4073325 - DNA, 25 bp, Homo sapien
cagccgtggaggctccggcccgtcc

SEQ ID NO: 4073326 - DNA, 25 bp, Homo sapien
ctccggcccgtccttggtcgtcaat

SEQ ID NO: 4073327 - DNA, 25 bp, Homo sapien
agaaaatacacacgcggcgaagaca

SEQ ID NO: 4073328 - DNA, 25 bp, Homo sapien
tacacacgcggcgaagacacccggg

SEQ ID NO: 4073329 - DNA, 25 bp, Homo sapien
caaggtggccgaaattgcctgggcg

SEQ ID NO: 4073330 - DNA, 25 bp, Homo sapien
agggccaaggtggccgaaattgcct

SEQ ID NO: 4073331 - DNA, 25 bp, Homo sapien
ggttggcgctggtcgttaccctcag

SEQ ID NO: 4073332 - DNA, 25 bp, Homo sapien
taaagccaggtccaggtcttatctc

SEQ ID NO: 4073333 - DNA, 25 bp, Homo sapien
ttttccggctttttcccacacatgc

SEQ ID NO: 4073334 - DNA, 25 bp, Homo sapien
gagcgccatatagatttaaagtcct

SEQ ID NO: 4073335 - DNA, 25 bp, Homo sapien
cacagatggattgctctggaaactc

SEQ ID NO: 4073336 - DNA, 25 bp, Homo sapien
gtaagtcacttagggagcaaacaga

SEQ ID NO: 4073337 - DNA, 25 bp, Homo sapien
gaggtggcactaaaagcaggctttg

SEQ ID NO: 4073338 - DNA, 25 bp, Homo sapien
tcttacaagactcagcacattaggt

SEQ ID NO: 4073339 - DNA, 25 bp, Homo sapien
cgtgcagtgcccacaccggcgaggg

SEQ ID NO: 4073340 - DNA, 25 bp, Homo sapien
gcgaggggcccatggcgaagggtcc

SEQ ID NO: 4073341 - DNA, 25 bp, Homo sapien
tgcagtgcccacaccggcgaggggc

SEQ ID NO: 4073342 - DNA, 25 bp, Homo sapien
cagagctgcatcctcgtgcagtgcc

SEQ ID NO: 4073343 - DNA, 25 bp, Homo sapien
gagtgatctgggaggacttcctgca

SEQ ID NO: 4073344 - DNA, 25 bp, Homo sapien
gatacaggtaactccaggcgcttgg

SEQ ID NO: 4073345 - DNA, 25 bp, Homo sapien
gaggaataggaacgcaaatagcccg

SEQ ID NO: 4073346 - DNA, 25 bp, Homo sapien
aggattctctcgaagaccctgccgg

SEQ ID NO: 4073347 - DNA, 25 bp, Homo sapien
cttttgacattaaacacaggaagga

SEQ ID NO: 4073348 - DNA, 25 bp, Homo sapien
tcctggaggtgagctgaccgtccct

SEQ ID NO: 4073349 - DNA, 25 bp, Homo sapien
ggtgagctgaccgtccctgggcacc

SEQ ID NO: 4073350 - DNA, 25 bp, Homo sapien
gttctcttcatggtaggtggtggct

SEQ ID NO: 4073351 - DNA, 25 bp, Homo sapien
gtcttctcctctgcggttctcttca

SEQ ID NO: 4073352 - DNA, 25 bp, Homo sapien
cagcgatctggtttgtcttgttctc

SEQ ID NO: 4073353 - DNA, 25 bp, Homo sapien
tttctgcccttaggcctaaatagtc

SEQ ID NO: 4073354 - DNA, 25 bp, Homo sapien
tctgcaggtcaaaagctagcatctt

SEQ ID NO: 4073355 - DNA, 25 bp, Homo sapien
cagcaggcgcttaatcaatgtcagt

SEQ ID NO: 4073356 - DNA, 25 bp, Homo sapien
ggacaaccagagagggcctcttctc

SEQ ID NO: 4073357 - DNA, 25 bp, Homo sapien
ctgcagagaagggatacagctggga

SEQ ID NO: 4073358 - DNA, 25 bp, Homo sapien
atgggacaaccagagagggcctctt

SEQ ID NO: 4073359 - DNA, 25 bp, Homo sapien
tggaacgtggctcctggactatgtt

SEQ ID NO: 4073360 - DNA, 25 bp, Homo sapien
gttggcagcttggaagcagggggat

SEQ ID NO: 4073361 - DNA, 25 bp, Homo sapien
tcttcaggttgctgggggccgtact

SEQ ID NO: 4073362 - DNA, 25 bp, Homo sapien
caactgaatgcagggctccggcctg

SEQ ID NO: 4073363 - DNA, 25 bp, Homo sapien
ggaaatgaggaaggttggcagcttg

SEQ ID NO: 4073364 - DNA, 25 bp, Homo sapien
gggtgctggctcttgtgggatccgt

SEQ ID NO: 4073365 - DNA, 25 bp, Homo sapien
gctggctcttgtgggatccgtctcc

SEQ ID NO: 4073366 - DNA, 25 bp, Homo sapien
cttccgcaggcacgctggtgtcatc

SEQ ID NO: 4073367 - DNA, 25 bp, Homo sapien
cacttccgcaggcacgctggtgtca

SEQ ID NO: 4073368 - DNA, 25 bp, Homo sapien
agggtcctccatagctgacggcttc

SEQ ID NO: 4073369 - DNA, 25 bp, Homo sapien
ttccagggtcctccatagctgacgg

SEQ ID NO: 4073370 - DNA, 25 bp, Homo sapien
ggtcctccatagctgacggcttcca

SEQ ID NO: 4073371 - DNA, 25 bp, Homo sapien
ccagggtcctccatagctgacggct

SEQ ID NO: 4073372 - DNA, 25 bp, Homo sapien
ccaaggctctcggcctttccaggac

SEQ ID NO: 4073373 - DNA, 25 bp, Homo sapien
agactcctcagattccaaggctctc

SEQ ID NO: 4073374 - DNA, 25 bp, Homo sapien
tccaaggctctcggcctttccagga

SEQ ID NO: 4073375 - DNA, 25 bp, Homo sapien
tttgggagatccaggatgctgcttt

SEQ ID NO: 4073376 - DNA, 25 bp, Homo sapien
tccaaggccaaatccagcgtatggg

SEQ ID NO: 4073377 - DNA, 25 bp, Homo sapien
cagggaagtccgaagacctcgtctt

SEQ ID NO: 4073378 - DNA, 25 bp, Homo sapien
ggagctttcactgacgggaaagaaa

SEQ ID NO: 4073379 - DNA, 25 bp, Homo sapien
gttgtcacggtaatgggatgcgcca

SEQ ID NO: 4073380 - DNA, 25 bp, Homo sapien
acagtaggcacttaacgaatgctga

SEQ ID NO: 4073381 - DNA, 25 bp, Homo sapien
tgccagggccgggttagcagcacac

SEQ ID NO: 4073382 - DNA, 25 bp, Homo sapien
cagggccgggttagcagcacacagc

SEQ ID NO: 4073383 - DNA, 25 bp, Homo sapien
taacgaatgctgattctgagcagcc

SEQ ID NO: 4073384 - DNA, 25 bp, Homo sapien
tctaggcccgccagcgtcatcggga

SEQ ID NO: 4073385 - DNA, 25 bp, Homo sapien
gcgcgggccccgaacgctctaggcc

SEQ ID NO: 4073386 - DNA, 25 bp, Homo sapien
gcgctcgctcccgtcgcaatccggg

SEQ ID NO: 4073387 - DNA, 25 bp, Homo sapien
cagcgtcatcgggaacagatggatg

SEQ ID NO: 4073388 - DNA, 25 bp, Homo sapien
tctgttttgtgtcgcctccccccac

SEQ ID NO: 4073389 - DNA, 25 bp, Homo sapien
tggggcttgggtacacagtctgttt

SEQ ID NO: 4073390 - DNA, 25 bp, Homo sapien
gggtggggcttgggtacacagtctg

SEQ ID NO: 4073391 - DNA, 25 bp, Homo sapien
tcttagtattcagccttttctagtt

SEQ ID NO: 4073392 - DNA, 25 bp, Homo sapien
gagggtgctgcactactttaagagt

SEQ ID NO: 4073393 - DNA, 25 bp, Homo sapien
taagtggccggtcttagccaccaag

SEQ ID NO: 4073394 - DNA, 25 bp, Homo sapien
actgttctaggttcccgggacgcag

SEQ ID NO: 4073395 - DNA, 25 bp, Homo sapien
tgcgagacagggctccgctcacgtg

SEQ ID NO: 4073396 - DNA, 25 bp, Homo sapien
caacttccccggagtgttagcggcg

SEQ ID NO: 4073397 - DNA, 25 bp, Homo sapien
cagcatgtatcagccgaggtggagc

SEQ ID NO: 4073398 - DNA, 25 bp, Homo sapien
tagacaaacactgggcgacggtggc

SEQ ID NO: 4073399 - DNA, 25 bp, Homo sapien
cagccccgggtgagataagcagttt

SEQ ID NO: 4073400 - DNA, 25 bp, Homo sapien
ggctgtgcctgactcagccgccacg

SEQ ID NO: 4073401 - DNA, 25 bp, Homo sapien
caggctccgacggcgaagtgtgtca

SEQ ID NO: 4073402 - DNA, 25 bp, Homo sapien
agggcgcaggctccgacggcgaagt

SEQ ID NO: 4073403 - DNA, 25 bp, Homo sapien
cagggacggcagaacctgaggcaca

SEQ ID NO: 4073404 - DNA, 25 bp, Homo sapien
tgagctctgcagtttaagacctcct

SEQ ID NO: 4073405 - DNA, 25 bp, Homo sapien
gctgcttcggaaggccctgtttaac

SEQ ID NO: 4073406 - DNA, 25 bp, Homo sapien
gacttgctaggcagggattatcccc

SEQ ID NO: 4073407 - DNA, 25 bp, Homo sapien
ctggagagaggtcaccggctgcttc

SEQ ID NO: 4073408 - DNA, 25 bp, Homo sapien
tccaggttgagactggttgggatcc

SEQ ID NO: 4073409 - DNA, 25 bp, Homo sapien
tgggatcctgcggagtgactctgaa

SEQ ID NO: 4073410 - DNA, 25 bp, Homo sapien
tgaatccactaacagcaggactgtg

SEQ ID NO: 4073411 - DNA, 25 bp, Homo sapien
ttgtgtcatccgtgtctcttatcca

SEQ ID NO: 4073412 - DNA, 25 bp, Homo sapien
gacctgcatgtacttggagaattgg

SEQ ID NO: 4073413 - DNA, 25 bp, Homo sapien
tgtctgtgctgagggttgcagctgc

SEQ ID NO: 4073414 - DNA, 25 bp, Homo sapien
gccgcagggctgttagttgctcaga

SEQ ID NO: 4073415 - DNA, 25 bp, Homo sapien
gacatctgagtggagtgtctgtgct

SEQ ID NO: 4073416 - DNA, 25 bp, Homo sapien
gacctcatccgttcctctgcccagg

SEQ ID NO: 4073417 - DNA, 25 bp, Homo sapien
tgcctggacaccttggacctcatcc

SEQ ID NO: 4073418 - DNA, 25 bp, Homo sapien
cctggacaccttggacctcatccgt

SEQ ID NO: 4073419 - DNA, 25 bp, Homo sapien
ctggacaccttggacctcatccgtt

SEQ ID NO: 4073420 - DNA, 25 bp, Homo sapien
cccctggtaccttgatcgctgttgg

SEQ ID NO: 4073421 - DNA, 25 bp, Homo sapien
aagggtacaggtagccggcgccctg

SEQ ID NO: 4073422 - DNA, 25 bp, Homo sapien
tagccggcgccctgtaaaagttgcc

SEQ ID NO: 4073423 - DNA, 25 bp, Homo sapien
gtaccttgatcgctgttggtgctgg

SEQ ID NO: 4073424 - DNA, 25 bp, Homo sapien
ccttgatcgcggcagtggctgtgta

SEQ ID NO: 4073425 - DNA, 25 bp, Homo sapien
tggaccctgagcgtgacatctcctg

SEQ ID NO: 4073426 - DNA, 25 bp, Homo sapien
cttgtgggccatctgcggcgtgaca

SEQ ID NO: 4073427 - DNA, 25 bp, Homo sapien
ttttgtacacatgggctggcgcggt

SEQ ID NO: 4073428 - DNA, 25 bp, Homo sapien
acagaaacaatgatccttggggtgg

SEQ ID NO: 4073429 - DNA, 25 bp, Homo sapien
tcctggttgttggtctaggctggat

SEQ ID NO: 4073430 - DNA, 25 bp, Homo sapien
taggaggtcaggcacttcattctta

SEQ ID NO: 4073431 - DNA, 25 bp, Homo sapien
cctgagttctccagagagccaggaa

SEQ ID NO: 4073432 - DNA, 25 bp, Homo sapien
gatgctgaacactcaggtcctgtcc

SEQ ID NO: 4073433 - DNA, 25 bp, Homo sapien
taagctctagagaccaggatctgcg

SEQ ID NO: 4073434 - DNA, 25 bp, Homo sapien
tcagagaatagccatgtgcgcggcg

SEQ ID NO: 4073435 - DNA, 25 bp, Homo sapien
ccgggtcttggttctttgcgctagg

SEQ ID NO: 4073436 - DNA, 25 bp, Homo sapien
tgcgcggcggttacttaaatgttcc

SEQ ID NO: 4073437 - DNA, 25 bp, Homo sapien
gacacaatgtagacgactggaggcc

SEQ ID NO: 4073438 - DNA, 25 bp, Homo sapien
tctcctgttgaaactaggcctggta

SEQ ID NO: 4073439 - DNA, 25 bp, Homo sapien
ttttcagagcaaaatctggagcggc

SEQ ID NO: 4073440 - DNA, 25 bp, Homo sapien
tcgggctcctgcatacggaaaatac

SEQ ID NO: 4073441 - DNA, 25 bp, Homo sapien
tgtaaaagccacaaggtctgagctg

SEQ ID NO: 4073442 - DNA, 25 bp, Homo sapien
caggaacggtcagaaactgggctca

SEQ ID NO: 4073443 - DNA, 25 bp, Homo sapien
gaagctgccgtagaaagccatgcgc

SEQ ID NO: 4073444 - DNA, 25 bp, Homo sapien
gtaaaagagcttaccactggcgcct

SEQ ID NO: 4073445 - DNA, 25 bp, Homo sapien
caggtggcacaccatgagaggtctg

SEQ ID NO: 4073446 - DNA, 25 bp, Homo sapien
taaaaacgtagctcatcccttacca

SEQ ID NO: 4073447 - DNA, 25 bp, Homo sapien
ttggattttctatgacagcacaggg

SEQ ID NO: 4073448 - DNA, 25 bp, Homo sapien
tgctagcaatagttggcttctcccc

SEQ ID NO: 4073449 - DNA, 25 bp, Homo sapien
tgagtacctcaaatctgctctggag

SEQ ID NO: 4073450 - DNA, 25 bp, Homo sapien
taaagcactgaattgggactaacat

SEQ ID NO: 4073451 - DNA, 25 bp, Homo sapien
tcagataagtgaccaagacgggact

SEQ ID NO: 4073452 - DNA, 25 bp, Homo sapien
tctggagtcgattatgccacctgtg

SEQ ID NO: 4073453 - DNA, 25 bp, Homo sapien
tagaaaatgccagggatccaccaca

SEQ ID NO: 4073454 - DNA, 25 bp, Homo sapien
tctttcaagtaaccaagctgttgac

SEQ ID NO: 4073455 - DNA, 25 bp, Homo sapien
gatggtcagcacaaaccgattctgt

SEQ ID NO: 4073456 - DNA, 25 bp, Homo sapien
tataacagtaaaccccatacgcagg

SEQ ID NO: 4073457 - DNA, 25 bp, Homo sapien
tggtagttacgcagcacaaaaacct

SEQ ID NO: 4073458 - DNA, 25 bp, Homo sapien
caacatggagtgatagtgtgcagca

SEQ ID NO: 4073459 - DNA, 25 bp, Homo sapien
gaacaagtcctatgagctgaaccaa

SEQ ID NO: 4073460 - DNA, 25 bp, Homo sapien
gataagcaacccattaaacctgagc

SEQ ID NO: 4073461 - DNA, 25 bp, Homo sapien
tttttattgtggatcagggcttaga

SEQ ID NO: 4073462 - DNA, 25 bp, Homo sapien
ccatttttattgtggatcagggctt

SEQ ID NO: 4073463 - DNA, 25 bp, Homo sapien
catttttattgtggatcagggctta

SEQ ID NO: 4073464 - DNA, 25 bp, Homo sapien
atttttattgtggatcagggcttag

SEQ ID NO: 4073465 - DNA, 25 bp, Homo sapien
cattgttggctgcaccatctgccat

SEQ ID NO: 4073466 - DNA, 25 bp, Homo sapien
ggataagcaccggtcagcattgttg

SEQ ID NO: 4073467 - DNA, 25 bp, Homo sapien
ctctgtgagagagtctaaattcagc

SEQ ID NO: 4073468 - DNA, 25 bp, Homo sapien
ccatgcaggagacccaagtggctct

SEQ ID NO: 4073469 - DNA, 25 bp, Homo sapien
atcagaagtgtttctagagctccag

SEQ ID NO: 4073470 - DNA, 25 bp, Homo sapien
aggttcgtgcggagtttgtacatgt

SEQ ID NO: 4073471 - DNA, 25 bp, Homo sapien
tcgtgcggagtttgtacatgtggtt

SEQ ID NO: 4073472 - DNA, 25 bp, Homo sapien
ctggaggttcgtgcggagtttgtac

SEQ ID NO: 4073473 - DNA, 25 bp, Homo sapien
gctggaggttcgtgcggagtttgta

SEQ ID NO: 4073474 - DNA, 25 bp, Homo sapien
tgaaaagcacagctagtaatgcctg

SEQ ID NO: 4073475 - DNA, 25 bp, Homo sapien
aattatgcggcatcaaggccaccag

SEQ ID NO: 4073476 - DNA, 25 bp, Homo sapien
ccaagttggccaaggagtttttgat

SEQ ID NO: 4073477 - DNA, 25 bp, Homo sapien
gcagacgggagccatgtgaaattat

SEQ ID NO: 4073478 - DNA, 25 bp, Homo sapien
tcacaaagctgtcagcagacactcg

SEQ ID NO: 4073479 - DNA, 25 bp, Homo sapien
ggagtttggctatacgagtgtccca

SEQ ID NO: 4073480 - DNA, 25 bp, Homo sapien
gatttcgtctgccttcgggatgttg

SEQ ID NO: 4073481 - DNA, 25 bp, Homo sapien
atatccttgaccagggtccggattt

SEQ ID NO: 4073482 - DNA, 25 bp, Homo sapien
gctttcacaaagtcgaggctcccgt

SEQ ID NO: 4073483 - DNA, 25 bp, Homo sapien
gaatcagtttcgagggctggctcaa

SEQ ID NO: 4073484 - DNA, 25 bp, Homo sapien
tcacagcctagagaaggaaaacgcc

SEQ ID NO: 4073485 - DNA, 25 bp, Homo sapien
gaagattcactataggctcccaggc

SEQ ID NO: 4073486 - DNA, 25 bp, Homo sapien
ccaatgtcgagtgatgtgaggcaga

SEQ ID NO: 4073487 - DNA, 25 bp, Homo sapien
tactgaggcaataagcagggaagcg

SEQ ID NO: 4073488 - DNA, 25 bp, Homo sapien
tccagtcttgggtgtggcctctaag

SEQ ID NO: 4073489 - DNA, 25 bp, Homo sapien
tcactgacctgagaaacagggcggc

SEQ ID NO: 4073490 - DNA, 25 bp, Homo sapien
tgatttaacaggagcttcgtaagtt

SEQ ID NO: 4073491 - DNA, 25 bp, Homo sapien
gatttaacaggagcttcgtaagttc

SEQ ID NO: 4073492 - DNA, 25 bp, Homo sapien
gttccatgtagtaagggctgggcat

SEQ ID NO: 4073493 - DNA, 25 bp, Homo sapien
agttccatgtagtaagggctgggca

SEQ ID NO: 4073494 - DNA, 25 bp, Homo sapien
caggttaatcgccagccacaggggc

SEQ ID NO: 4073495 - DNA, 25 bp, Homo sapien
ggagggagcaggcgacatttctgtc

SEQ ID NO: 4073496 - DNA, 25 bp, Homo sapien
aggttaatcgccagccacaggggca

SEQ ID NO: 4073497 - DNA, 25 bp, Homo sapien
agaacaaagcgcctcctgagcggct

SEQ ID NO: 4073498 - DNA, 25 bp, Homo sapien
aggatgcaagtctcccctgagtggg

SEQ ID NO: 4073499 - DNA, 25 bp, Homo sapien
tcatactgaaaacgcaaagccgggc

SEQ ID NO: 4073500 - DNA, 25 bp, Homo sapien
ggcctttccgcggacaggatgcaag

SEQ ID NO: 4073501 - DNA, 25 bp, Homo sapien
tcggcgaggaattcgacctcggcag

SEQ ID NO: 4073502 - DNA, 25 bp, Homo sapien
ctccttctcggcgaggaattcgacc

SEQ ID NO: 4073503 - DNA, 25 bp, Homo sapien
ggaattcgacctcggcagcgtccat

SEQ ID NO: 4073504 - DNA, 25 bp, Homo sapien
ccttctcggcgaggaattcgacctc

SEQ ID NO: 4073505 - DNA, 25 bp, Homo sapien
ctgcaggccagagcctcacggtctc

SEQ ID NO: 4073506 - DNA, 25 bp, Homo sapien
ccagcctataggaaggcggtagaca

SEQ ID NO: 4073507 - DNA, 25 bp, Homo sapien
ggaagacggcctgcgccagcctata

SEQ ID NO: 4073508 - DNA, 25 bp, Homo sapien
gcggtagacagcctataggcgctgt

SEQ ID NO: 4073509 - DNA, 25 bp, Homo sapien
tacagtgggcgcaggtgaagccaga

SEQ ID NO: 4073510 - DNA, 25 bp, Homo sapien
cccctagcgggtgcccattgtctgt

SEQ ID NO: 4073511 - DNA, 25 bp, Homo sapien
gaccggctgcccctgtacagtgggc

SEQ ID NO: 4073512 - DNA, 25 bp, Homo sapien
tgtcagaatcccctagcgggtgccc

SEQ ID NO: 4073513 - DNA, 25 bp, Homo sapien
ggtgaagcgctattctaggactgca

SEQ ID NO: 4073514 - DNA, 25 bp, Homo sapien
taggactgcagtcgaatttgaaacc

SEQ ID NO: 4073515 - DNA, 25 bp, Homo sapien
tggtcatggccggaaaagcttcctg

SEQ ID NO: 4073516 - DNA, 25 bp, Homo sapien
tccggagtcgtggaaaggacagaaa

SEQ ID NO: 4073517 - DNA, 25 bp, Homo sapien
acgagggtttgcgtcctgatttgtc

SEQ ID NO: 4073518 - DNA, 25 bp, Homo sapien
tatttgtgttccaaagctgacgagg

SEQ ID NO: 4073519 - DNA, 25 bp, Homo sapien
aagctgacgagggtttgcgtcctga

SEQ ID NO: 4073520 - DNA, 25 bp, Homo sapien
gggtttgcgtcctgatttgtccagc

SEQ ID NO: 4073521 - DNA, 25 bp, Homo sapien
atctcattataggagaccctggggt

SEQ ID NO: 4073522 - DNA, 25 bp, Homo sapien
accatgaccagcctagatatacact

SEQ ID NO: 4073523 - DNA, 25 bp, Homo sapien
tagatatacactttagaagagaatt

SEQ ID NO: 4073524 - DNA, 25 bp, Homo sapien
gaccctggggtgacatgatagagct

SEQ ID NO: 4073525 - DNA, 25 bp, Homo sapien
aagtgacttgctcgaggccatcggc

SEQ ID NO: 4073526 - DNA, 25 bp, Homo sapien
tattcggaatgcagtcccaggaagg

SEQ ID NO: 4073527 - DNA, 25 bp, Homo sapien
cgagaaggtttctatggccggcaac

SEQ ID NO: 4073528 - DNA, 25 bp, Homo sapien
tctggatttgctccaaagaggcacc

SEQ ID NO: 4073529 - DNA, 25 bp, Homo sapien
gtaataagagcaccgacctgcggga

SEQ ID NO: 4073530 - DNA, 25 bp, Homo sapien
tacttacctcggatgaccttgggca

SEQ ID NO: 4073531 - DNA, 25 bp, Homo sapien
tatgaatgctaaataagggccgggc

SEQ ID NO: 4073532 - DNA, 25 bp, Homo sapien
ccacagacccgtgagtgaggaatca

SEQ ID NO: 4073533 - DNA, 25 bp, Homo sapien
gccggtgctctacttacgcctttga

SEQ ID NO: 4073534 - DNA, 25 bp, Homo sapien
tgcactcagccggtgctctacttac

SEQ ID NO: 4073535 - DNA, 25 bp, Homo sapien
gaggtggtgcctatgttccctcctt

SEQ ID NO: 4073536 - DNA, 25 bp, Homo sapien
cctttgactttgttcccgtcacgag

SEQ ID NO: 4073537 - DNA, 25 bp, Homo sapien
tggagggctcagagattgagcaggc

SEQ ID NO: 4073538 - DNA, 25 bp, Homo sapien
ctcagagattgagcaggcagcagag

SEQ ID NO: 4073539 - DNA, 25 bp, Homo sapien
agaaggcaagcaccaagcatcagca

SEQ ID NO: 4073540 - DNA, 25 bp, Homo sapien
aggctgctaagcaggcagtggaggg

SEQ ID NO: 4073541 - DNA, 25 bp, Homo sapien
tgtgcccaaccccagtgtgatagaa

SEQ ID NO: 4073542 - DNA, 25 bp, Homo sapien
tccatgtatatgaagggcgagaaca

SEQ ID NO: 4073543 - DNA, 25 bp, Homo sapien
ggacatggtatgaaggtgccctctt

SEQ ID NO: 4073544 - DNA, 25 bp, Homo sapien
taagacagttactcagccaaggcag

SEQ ID NO: 4073545 - DNA, 25 bp, Homo sapien
gaggcaacactacagtgagccaagc

SEQ ID NO: 4073546 - DNA, 25 bp, Homo sapien
gcaacactacagtgagccaagccga

SEQ ID NO: 4073547 - DNA, 25 bp, Homo sapien
acactacagtgagccaagccgagat

SEQ ID NO: 4073548 - DNA, 25 bp, Homo sapien
ggcaacactacagtgagccaagccg

SEQ ID NO: 4073549 - DNA, 25 bp, Homo sapien
tgccacgtctctctgagcggaggcc

SEQ ID NO: 4073550 - DNA, 25 bp, Homo sapien
gggttcgctcagttcccatccaggg

SEQ ID NO: 4073551 - DNA, 25 bp, Homo sapien
tgtttgtccagaagagagcctctcc

SEQ ID NO: 4073552 - DNA, 25 bp, Homo sapien
aggtgtcagaggtccggtccactca

SEQ ID NO: 4073553 - DNA, 25 bp, Homo sapien
ggcttctgggtcgatttctccatca

SEQ ID NO: 4073554 - DNA, 25 bp, Homo sapien
atcatctgggcacgaccctgtctca

SEQ ID NO: 4073555 - DNA, 25 bp, Homo sapien
tcatctgggcacgaccctgtctcat

SEQ ID NO: 4073556 - DNA, 25 bp, Homo sapien
tccatcatctgggcacgaccctgtc

SEQ ID NO: 4073557 - DNA, 25 bp, Homo sapien
gcctctgggattccttgctttctgg

SEQ ID NO: 4073558 - DNA, 25 bp, Homo sapien
agccccgtttccctgggaactgcag

SEQ ID NO: 4073559 - DNA, 25 bp, Homo sapien
gatggacacctggatgcaccctgcc

SEQ ID NO: 4073560 - DNA, 25 bp, Homo sapien
tgagatgggacccagcccagtgatg

SEQ ID NO: 4073561 - DNA, 25 bp, Homo sapien
gcataggcccagctcagtaaatctc

SEQ ID NO: 4073562 - DNA, 25 bp, Homo sapien
tgtacttaactctgaactctgagaa

SEQ ID NO: 4073563 - DNA, 25 bp, Homo sapien
aaatccatttgttacgctcagtaca

SEQ ID NO: 4073564 - DNA, 25 bp, Homo sapien
tacagtgctacctatcatgaccatc

SEQ ID NO: 4073565 - DNA, 25 bp, Homo sapien
aactctatttcctcgccgctcccag

SEQ ID NO: 4073566 - DNA, 25 bp, Homo sapien
agtctgtcctgtccggccaaactgc

SEQ ID NO: 4073567 - DNA, 25 bp, Homo sapien
gcctgggcacgagctgtgtttccaa

SEQ ID NO: 4073568 - DNA, 25 bp, Homo sapien
tgcagcggccaacaagatggagcag

SEQ ID NO: 4073569 - DNA, 25 bp, Homo sapien
tcgggcacgtccaggtgcttgtcgt

SEQ ID NO: 4073570 - DNA, 25 bp, Homo sapien
tccaggtgcttgtcgttcaggacgg

SEQ ID NO: 4073571 - DNA, 25 bp, Homo sapien
gacgggggcctcgtcgtggctgctg

SEQ ID NO: 4073572 - DNA, 25 bp, Homo sapien
aagtccctcggcagcatcatgcccg

SEQ ID NO: 4073573 - DNA, 25 bp, Homo sapien
acaggcatcagtggccgccgggaac

SEQ ID NO: 4073574 - DNA, 25 bp, Homo sapien
cacacgacagagagacaggcatcag

SEQ ID NO: 4073575 - DNA, 25 bp, Homo sapien
agacaggcatcagtggccgccggga

SEQ ID NO: 4073576 - DNA, 25 bp, Homo sapien
cacgacagagagacaggcatcagtg

SEQ ID NO: 4073577 - DNA, 25 bp, Homo sapien
tgacgcctcgcagcaaggagcgcag

SEQ ID NO: 4073578 - DNA, 25 bp, Homo sapien
gggtcctgacgcctcgcagcaagga

SEQ ID NO: 4073579 - DNA, 25 bp, Homo sapien
ctgggtcctgacgcctcgcagcaag

SEQ ID NO: 4073580 - DNA, 25 bp, Homo sapien
gtcctgacgcctcgcagcaaggagc

SEQ ID NO: 4073581 - DNA, 25 bp, Homo sapien
aaggagcccttgtcacatctcacag

SEQ ID NO: 4073582 - DNA, 25 bp, Homo sapien
cagaaccatgagtcgggaaacagat

SEQ ID NO: 4073583 - DNA, 25 bp, Homo sapien
cataggctagttggcctctgggtcc

SEQ ID NO: 4073584 - DNA, 25 bp, Homo sapien
tcctctgcctgagtaacaagctcct

SEQ ID NO: 4073585 - DNA, 25 bp, Homo sapien
ctagagacaggagcttcgacacacc

SEQ ID NO: 4073586 - DNA, 25 bp, Homo sapien
tttaccttttcgaggcatcccaggc

SEQ ID NO: 4073587 - DNA, 25 bp, Homo sapien
ggaaaaagccctagcttgcgtcagg

SEQ ID NO: 4073588 - DNA, 25 bp, Homo sapien
ccaggcccgatagagacagcagtgg

SEQ ID NO: 4073589 - DNA, 25 bp, Homo sapien
gccttggcgctgctaacactttggt

SEQ ID NO: 4073590 - DNA, 25 bp, Homo sapien
tcaccaggtaaaatgcgggccttcc

SEQ ID NO: 4073591 - DNA, 25 bp, Homo sapien
gcttgggacatgcttctacttgaca

SEQ ID NO: 4073592 - DNA, 25 bp, Homo sapien
gaaacactcgtgtgtgacccagggt

SEQ ID NO: 4073593 - DNA, 25 bp, Homo sapien
tactaagaggaaggtgtcgaatggc

SEQ ID NO: 4073594 - DNA, 25 bp, Homo sapien
tcgaatggcaggcacttagtcaggc

SEQ ID NO: 4073595 - DNA, 25 bp, Homo sapien
taagcaggccgattccagttagtac

SEQ ID NO: 4073596 - DNA, 25 bp, Homo sapien
tacttgagcgaactgggagtatccc

SEQ ID NO: 4073597 - DNA, 25 bp, Homo sapien
gcaacctcagcgaatcttacagagg

SEQ ID NO: 4073598 - DNA, 25 bp, Homo sapien
aacatgctttgggacccggcctatg

SEQ ID NO: 4073599 - DNA, 25 bp, Homo sapien
ggtccctcagcacgttctatgaacg

SEQ ID NO: 4073600 - DNA, 25 bp, Homo sapien
ggctcactgctgacgggaaagcccc

SEQ ID NO: 4073601 - DNA, 25 bp, Homo sapien
ctttcaggcaggacatcttaagccc

SEQ ID NO: 4073602 - DNA, 25 bp, Homo sapien
ttcaggcaggacatcttaagcccca

SEQ ID NO: 4073603 - DNA, 25 bp, Homo sapien
tttcaggcaggacatcttaagcccc

SEQ ID NO: 4073604 - DNA, 25 bp, Homo sapien
tcaggcaggacatcttaagccccat

SEQ ID NO: 4073605 - DNA, 25 bp, Homo sapien
agatgctttcatgcgagaggcccct

SEQ ID NO: 4073606 - DNA, 25 bp, Homo sapien
tctaaacatagggaagagccactgt

SEQ ID NO: 4073607 - DNA, 25 bp, Homo sapien
tgattgccactaggtaccaccaggg

SEQ ID NO: 4073608 - DNA, 25 bp, Homo sapien
tataaaaacgatgccactgaaccct

SEQ ID NO: 4073609 - DNA, 25 bp, Homo sapien
gactcacagcaaaatacttgcccat

SEQ ID NO: 4073610 - DNA, 25 bp, Homo sapien
tgcttggcctcccacggatgagccg

SEQ ID NO: 4073611 - DNA, 25 bp, Homo sapien
cgtgtgactcacagcaaaatacttg

SEQ ID NO: 4073612 - DNA, 25 bp, Homo sapien
cggatgagccgtgtgactcacagca

SEQ ID NO: 4073613 - DNA, 25 bp, Homo sapien
cactgcaggtaagagcaattcagta

SEQ ID NO: 4073614 - DNA, 25 bp, Homo sapien
gatgggggattatacttagcaggcc

SEQ ID NO: 4073615 - DNA, 25 bp, Homo sapien
agtaccacggctcagggttccaggc

SEQ ID NO: 4073616 - DNA, 25 bp, Homo sapien
ggcctagcctggcttccactgcagg

SEQ ID NO: 4073617 - DNA, 25 bp, Homo sapien
cttcttggtgggctcactgcggagc

SEQ ID NO: 4073618 - DNA, 25 bp, Homo sapien
agagcagcgggggtcatggcccggc

SEQ ID NO: 4073619 - DNA, 25 bp, Homo sapien
gggccgcggcgacgagcctgcaaga

SEQ ID NO: 4073620 - DNA, 25 bp, Homo sapien
ccgcggcgacgagcctgcaagacag

SEQ ID NO: 4073621 - DNA, 25 bp, Homo sapien
gtctcctctaatggtggcagcggaa

SEQ ID NO: 4073622 - DNA, 25 bp, Homo sapien
cctctaatggtggcagcggaagtcc

SEQ ID NO: 4073623 - DNA, 25 bp, Homo sapien
tcctctaatggtggcagcggaagtc

SEQ ID NO: 4073624 - DNA, 25 bp, Homo sapien
tctcctctaatggtggcagcggaag

SEQ ID NO: 4073625 - DNA, 25 bp, Homo sapien
cagagcaggtggctcgaagcctgct

SEQ ID NO: 4073626 - DNA, 25 bp, Homo sapien
ggctcgaagcctgctacagtgtggt

SEQ ID NO: 4073627 - DNA, 25 bp, Homo sapien
gaagcctgctacagtgtggtcctgg

SEQ ID NO: 4073628 - DNA, 25 bp, Homo sapien
caggtggctcgaagcctgctacagt

SEQ ID NO: 4073629 - DNA, 25 bp, Homo sapien
accacggcgcaggaggtagcagcta

SEQ ID NO: 4073630 - DNA, 25 bp, Homo sapien
gacgctccgtggaaccacggcgcag

SEQ ID NO: 4073631 - DNA, 25 bp, Homo sapien
ccagaagtcacgagggagtgacgct

SEQ ID NO: 4073632 - DNA, 25 bp, Homo sapien
catcggctgacccagaagtcacgag

SEQ ID NO: 4073633 - DNA, 25 bp, Homo sapien
gggtctatgggactctcaggcacag

SEQ ID NO: 4073634 - DNA, 25 bp, Homo sapien
acgggtcccctagtgaaaatgcatc

SEQ ID NO: 4073635 - DNA, 25 bp, Homo sapien
tgagcagacgctctacctaccgtga

SEQ ID NO: 4073636 - DNA, 25 bp, Homo sapien
gacctcagggcagccattttaccag

SEQ ID NO: 4073637 - DNA, 25 bp, Homo sapien
ttgtgctccaatcgggtgacagtgc

SEQ ID NO: 4073638 - DNA, 25 bp, Homo sapien
gactgcggcattgtgctccaatcgg

SEQ ID NO: 4073639 - DNA, 25 bp, Homo sapien
tgaaccgagactgcggcattgtgct

SEQ ID NO: 4073640 - DNA, 25 bp, Homo sapien
cggcattgtgctccaatcgggtgac

SEQ ID NO: 4073641 - DNA, 25 bp, Homo sapien
gaagtcagattaagacaccacatac

SEQ ID NO: 4073642 - DNA, 25 bp, Homo sapien
cccattcaagaatattgtgaggatt

SEQ ID NO: 4073643 - DNA, 25 bp, Homo sapien
gagtaacgagtcaactttatgagga

SEQ ID NO: 4073644 - DNA, 25 bp, Homo sapien
caaactcgattagatattatgtccc

SEQ ID NO: 4073645 - DNA, 25 bp, Homo sapien
tggcaggggcaacgctagcaattcc

SEQ ID NO: 4073646 - DNA, 25 bp, Homo sapien
caattcctaccaggcatttgattga

SEQ ID NO: 4073647 - DNA, 25 bp, Homo sapien
gctagcaattcctaccaggcatttg

SEQ ID NO: 4073648 - DNA, 25 bp, Homo sapien
gggcaacgctagcaattcctaccag

SEQ ID NO: 4073649 - DNA, 25 bp, Homo sapien
tgatgcataaagtagctactgtggc

SEQ ID NO: 4073650 - DNA, 25 bp, Homo sapien
tactgtggcaagagaagtgtaatgc

SEQ ID NO: 4073651 - DNA, 25 bp, Homo sapien
gaaatgtcaattactaaagcggaag

SEQ ID NO: 4073652 - DNA, 25 bp, Homo sapien
ggaatagagtttgctgctcaaggct

SEQ ID NO: 4073653 - DNA, 25 bp, Homo sapien
acgtcactctgcacaactcgggaag

SEQ ID NO: 4073654 - DNA, 25 bp, Homo sapien
tctgtgagccgacaccatgtggagc

SEQ ID NO: 4073655 - DNA, 25 bp, Homo sapien
gacagtaggaaaggtaccgctctct

SEQ ID NO: 4073656 - DNA, 25 bp, Homo sapien
gacgcctggacgacatcaaaattca

SEQ ID NO: 4073657 - DNA, 25 bp, Homo sapien
aacatacaactgagagagtccacag

SEQ ID NO: 4073658 - DNA, 25 bp, Homo sapien
gggatgtctgcacctcttctagaga

SEQ ID NO: 4073659 - DNA, 25 bp, Homo sapien
tctagagactctgtgttaaaaacac

SEQ ID NO: 4073660 - DNA, 25 bp, Homo sapien
aaacacgaccgactgaacattctgc

SEQ ID NO: 4073661 - DNA, 25 bp, Homo sapien
ttcttcttcaacgtagtggaaaggc

SEQ ID NO: 4073662 - DNA, 25 bp, Homo sapien
tcaacgtagtggaaaggcccggagc

SEQ ID NO: 4073663 - DNA, 25 bp, Homo sapien
ggagcccagtcacagcggtgcctgc

SEQ ID NO: 4073664 - DNA, 25 bp, Homo sapien
ccggagcccagtcacagcggtgcct

SEQ ID NO: 4073665 - DNA, 25 bp, Homo sapien
agcgtctcgtaggaccggctgtcca

SEQ ID NO: 4073666 - DNA, 25 bp, Homo sapien
tgagatcctctgtgcctctggccag

SEQ ID NO: 4073667 - DNA, 25 bp, Homo sapien
tcattccgaatgtcatccaggtggt

SEQ ID NO: 4073668 - DNA, 25 bp, Homo sapien
gttatcgaaatccacgagcgtctcg

SEQ ID NO: 4073669 - DNA, 25 bp, Homo sapien
caaacgcatgaagaggtatacagag

SEQ ID NO: 4073670 - DNA, 25 bp, Homo sapien
catctaacagtgaaaacgggcggct

SEQ ID NO: 4073671 - DNA, 25 bp, Homo sapien
gacgcctttcacgtggaattctgag

SEQ ID NO: 4073672 - DNA, 25 bp, Homo sapien
ttaatacatggaagggacgcctttc

SEQ ID NO: 4073673 - DNA, 25 bp, Homo sapien
tgctcgtacacgtggatcgtaggcg

SEQ ID NO: 4073674 - DNA, 25 bp, Homo sapien
taggcgctacgcagtccatcgtaaa

SEQ ID NO: 4073675 - DNA, 25 bp, Homo sapien
tacacgtggatcgtaggcgctacgc

SEQ ID NO: 4073676 - DNA, 25 bp, Homo sapien
cagtccatcgtaaacttggtgttgt

SEQ ID NO: 4073677 - DNA, 25 bp, Homo sapien
cacttgtgtagtgatgcggaagcac

SEQ ID NO: 4073678 - DNA, 25 bp, Homo sapien
catggcctgggattcaactggtctg

SEQ ID NO: 4073679 - DNA, 25 bp, Homo sapien
cacatgctgcacagaagcgacttac

SEQ ID NO: 4073680 - DNA, 25 bp, Homo sapien
ggcggcaatggtctcaagcagataa

SEQ ID NO: 4073681 - DNA, 25 bp, Homo sapien
agccctcggcgattctggaggccac

SEQ ID NO: 4073682 - DNA, 25 bp, Homo sapien
gaagccctcggcgattctggaggcc

SEQ ID NO: 4073683 - DNA, 25 bp, Homo sapien
gtcgctgaagccctcggcgattctg

SEQ ID NO: 4073684 - DNA, 25 bp, Homo sapien
cgctgaagccctcggcgattctgga

SEQ ID NO: 4073685 - DNA, 25 bp, Homo sapien
caaagaaataggctaccacattcca

SEQ ID NO: 4073686 - DNA, 25 bp, Homo sapien
cacattccagttaatgccattcaac

SEQ ID NO: 4073687 - DNA, 25 bp, Homo sapien
aataggctaccacattccagttaat

SEQ ID NO: 4073688 - DNA, 25 bp, Homo sapien
ctgtcaaagaaataggctaccacat

SEQ ID NO: 4073689 - DNA, 25 bp, Homo sapien
ccactgagacttaacaagcaatgac

SEQ ID NO: 4073690 - DNA, 25 bp, Homo sapien
tgagacttaacaagcaatgacagaa

SEQ ID NO: 4073691 - DNA, 25 bp, Homo sapien
agagccaacaggctgcacgtgctcg

SEQ ID NO: 4073692 - DNA, 25 bp, Homo sapien
gctcgcttcgctggtttacttatta

SEQ ID NO: 4073693 - DNA, 25 bp, Homo sapien
tccccacatatgaagaaatcgcagg

SEQ ID NO: 4073694 - DNA, 25 bp, Homo sapien
gtgatcttggtattttccctgacag

SEQ ID NO: 4073695 - DNA, 25 bp, Homo sapien
tgtgatcttggtattttccctgaca

SEQ ID NO: 4073696 - DNA, 25 bp, Homo sapien
cagttccccacatatgaagaaatcg

SEQ ID NO: 4073697 - DNA, 25 bp, Homo sapien
ggcagtccgtcaccctctgagaaat

SEQ ID NO: 4073698 - DNA, 25 bp, Homo sapien
gcctgaagcgggcagtgaaactgct

SEQ ID NO: 4073699 - DNA, 25 bp, Homo sapien
tctgcacgctagcaaagcagcttgt

SEQ ID NO: 4073700 - DNA, 25 bp, Homo sapien
taacaagtaagagcaacctcagggc

SEQ ID NO: 4073701 - DNA, 25 bp, Homo sapien
gaagccaatcgtactgaagaaagca

SEQ ID NO: 4073702 - DNA, 25 bp, Homo sapien
gaaagcagtgcgatggtggctccta

SEQ ID NO: 4073703 - DNA, 25 bp, Homo sapien
tgaagagtgggtacagagccctcag

SEQ ID NO: 4073704 - DNA, 25 bp, Homo sapien
gcagggccgcttgccatgaagagct

SEQ ID NO: 4073705 - DNA, 25 bp, Homo sapien
caaggtggacttgtttacccagctc

SEQ ID NO: 4073706 - DNA, 25 bp, Homo sapien
tcccctaatgggaggccacgtcagg

SEQ ID NO: 4073707 - DNA, 25 bp, Homo sapien
gggggacatcatgtactgactgctc

SEQ ID NO: 4073708 - DNA, 25 bp, Homo sapien
ctggctcggttcagccaaaggaaaa

SEQ ID NO: 4073709 - DNA, 25 bp, Homo sapien
cattgtatgaattcccttcatgcaa

SEQ ID NO: 4073710 - DNA, 25 bp, Homo sapien
gaagccaactgtcgctttcattgta

SEQ ID NO: 4073711 - DNA, 25 bp, Homo sapien
gcagggacagaagtcggaagccaac

SEQ ID NO: 4073712 - DNA, 25 bp, Homo sapien
cttcccagtgctctgcccaacacca

SEQ ID NO: 4073713 - DNA, 25 bp, Homo sapien
cacagagggttctgcatccacgtac

SEQ ID NO: 4073714 - DNA, 25 bp, Homo sapien
ccacagagggttctgcatccacgta

SEQ ID NO: 4073715 - DNA, 25 bp, Homo sapien
cccacagagggttctgcatccacgt

SEQ ID NO: 4073716 - DNA, 25 bp, Homo sapien
tcctttactcgctcattagcttgat

SEQ ID NO: 4073717 - DNA, 25 bp, Homo sapien
taaccagcaatcacgtagctatgat

SEQ ID NO: 4073718 - DNA, 25 bp, Homo sapien
gctatgatctttgcaccatgaatca

SEQ ID NO: 4073719 - DNA, 25 bp, Homo sapien
agcttgataataaccagcaatcacg

SEQ ID NO: 4073720 - DNA, 25 bp, Homo sapien
cagggctcagtgaaccaactagaca

SEQ ID NO: 4073721 - DNA, 25 bp, Homo sapien
gatgagctgatccttgagcaccgtg

SEQ ID NO: 4073722 - DNA, 25 bp, Homo sapien
tggtcatccacccaaaagatcagga

SEQ ID NO: 4073723 - DNA, 25 bp, Homo sapien
gagtctccttcacgaccaaaagcag

SEQ ID NO: 4073724 - DNA, 25 bp, Homo sapien
tgacagcagatatcttcaagagcta

SEQ ID NO: 4073725 - DNA, 25 bp, Homo sapien
cagagatacttcttgcttgcccaga

SEQ ID NO: 4073726 - DNA, 25 bp, Homo sapien
tcctacccggaaatgatatgaagtt

SEQ ID NO: 4073727 - DNA, 25 bp, Homo sapien
aagatgtgcccaggaaccttacgcc

SEQ ID NO: 4073728 - DNA, 25 bp, Homo sapien
caccatcttgcagtaggcctgggtg

SEQ ID NO: 4073729 - DNA, 25 bp, Homo sapien
ccaggagcccgttgacggcgcagtg

SEQ ID NO: 4073730 - DNA, 25 bp, Homo sapien
gtccacgaagagggtgtggtgggcg

SEQ ID NO: 4073731 - DNA, 25 bp, Homo sapien
gggtacttggcgccgtgcagcacca

SEQ ID NO: 4073732 - DNA, 25 bp, Homo sapien
gagtcttcctcgatcccgtggtgct

SEQ ID NO: 4073733 - DNA, 25 bp, Homo sapien
tttgggcctcggctcctggaaaagc

SEQ ID NO: 4073734 - DNA, 25 bp, Homo sapien
gcattttacgacgttcgcagcgcta

SEQ ID NO: 4073735 - DNA, 25 bp, Homo sapien
ctggaaaagcgactcgcgcctctgg

SEQ ID NO: 4073736 - DNA, 25 bp, Homo sapien
ctgcggaccggcctcgggcactgac

SEQ ID NO: 4073737 - DNA, 25 bp, Homo sapien
cggtccatcttacccggtctcgcag

SEQ ID NO: 4073738 - DNA, 25 bp, Homo sapien
tcggtggctccaggctcggggggcc

SEQ ID NO: 4073739 - DNA, 25 bp, Homo sapien
gcactgaccttggagcgcccgctgg

SEQ ID NO: 4073740 - DNA, 25 bp, Homo sapien
cgggcccgcgctctgtgcctgcagc

SEQ ID NO: 4073741 - DNA, 25 bp, Homo sapien
ccttgctccttcaaaaggtccctgt

SEQ ID NO: 4073742 - DNA, 25 bp, Homo sapien
ccgggcggcgctcggctttccagcc

SEQ ID NO: 4073743 - DNA, 25 bp, Homo sapien
tcaaaaggtccctgtgcaacccctc

SEQ ID NO: 4073744 - DNA, 25 bp, Homo sapien
aactccatgcctatttactggaaac

SEQ ID NO: 4073745 - DNA, 25 bp, Homo sapien
tggccataagttcctctgatgtttg

SEQ ID NO: 4073746 - DNA, 25 bp, Homo sapien
gggcaatgacaccaacaaggtgaca

SEQ ID NO: 4073747 - DNA, 25 bp, Homo sapien
tgattgtggacttcgcctcatccac

SEQ ID NO: 4073748 - DNA, 25 bp, Homo sapien
tcggaattgattgtggacttcgcct

SEQ ID NO: 4073749 - DNA, 25 bp, Homo sapien
gaattgattgtggacttcgcctcat

SEQ ID NO: 4073750 - DNA, 25 bp, Homo sapien
ttgattgtggacttcgcctcatcca

SEQ ID NO: 4073751 - DNA, 25 bp, Homo sapien
atcagagaccccgaggccaaaaatg

SEQ ID NO: 4073752 - DNA, 25 bp, Homo sapien
aggcctgggccaaggattcgtgaaa

SEQ ID NO: 4073753 - DNA, 25 bp, Homo sapien
cagagaccccgaggccaaaaatgca

SEQ ID NO: 4073754 - DNA, 25 bp, Homo sapien
gcctgggccaaggattcgtgaaatc

SEQ ID NO: 4073755 - DNA, 25 bp, Homo sapien
catgtgggggatacccatggccttg

SEQ ID NO: 4073756 - DNA, 25 bp, Homo sapien
gatacccatggccttggcctcgtca

SEQ ID NO: 4073757 - DNA, 25 bp, Homo sapien
tgggggatacccatggccttggcct

SEQ ID NO: 4073758 - DNA, 25 bp, Homo sapien
ctcgatgtccatgtgatgtccatgt

SEQ ID NO: 4073759 - DNA, 25 bp, Homo sapien
tgctgctggtcctccaggacacaca

SEQ ID NO: 4073760 - DNA, 25 bp, Homo sapien
agtgctgctggtcctccaggacaca

SEQ ID NO: 4073761 - DNA, 25 bp, Homo sapien
gtgctgctggtcctccaggacacac

SEQ ID NO: 4073762 - DNA, 25 bp, Homo sapien
gctgctggtcctccaggacacacac

SEQ ID NO: 4073763 - DNA, 25 bp, Homo sapien
agctgatctgtgactccactgtctc

SEQ ID NO: 4073764 - DNA, 25 bp, Homo sapien
cttgtgctggttcccacgtaggact

SEQ ID NO: 4073765 - DNA, 25 bp, Homo sapien
gatctgtgactccactgtctctagg

SEQ ID NO: 4073766 - DNA, 25 bp, Homo sapien
gactccactgtctctaggaacttgc

SEQ ID NO: 4073767 - DNA, 25 bp, Homo sapien
tctgcctcctacagggtccttgcca

SEQ ID NO: 4073768 - DNA, 25 bp, Homo sapien
aatttcaccaccaagaattctttgc

SEQ ID NO: 4073769 - DNA, 25 bp, Homo sapien
gaacgtcttgcagcaggtcacagct

SEQ ID NO: 4073770 - DNA, 25 bp, Homo sapien
gctggaaacataatttcaccaccaa

SEQ ID NO: 4073771 - DNA, 25 bp, Homo sapien
agcgtctggcattgctctgccctaa

SEQ ID NO: 4073772 - DNA, 25 bp, Homo sapien
tttttataagggtctgcggcaggct

SEQ ID NO: 4073773 - DNA, 25 bp, Homo sapien
gcaggcttacaatgctggaaaaatg

SEQ ID NO: 4073774 - DNA, 25 bp, Homo sapien
cccagtttcagttgcatgtagcgtc

SEQ ID NO: 4073775 - DNA, 25 bp, Homo sapien
gcccgcggcgcggagttggcggtca

SEQ ID NO: 4073776 - DNA, 25 bp, Homo sapien
cccgcggcgcggagttggcggtcat

SEQ ID NO: 4073777 - DNA, 25 bp, Homo sapien
gaaatggcccctggtggttatgtaa

SEQ ID NO: 4073778 - DNA, 25 bp, Homo sapien
tgagcttggcaacttaaggagacct

SEQ ID NO: 4073779 - DNA, 25 bp, Homo sapien
gtaagaaagcacatggacgtcaggc

SEQ ID NO: 4073780 - DNA, 25 bp, Homo sapien
gacgtcaggctttcggaaggacaga

SEQ ID NO: 4073781 - DNA, 25 bp, Homo sapien
caggtgggacggaattgtgtctcct

SEQ ID NO: 4073782 - DNA, 25 bp, Homo sapien
ttagtgtccctgaaccccaagtctg

SEQ ID NO: 4073783 - DNA, 25 bp, Homo sapien
tgtgtctcctgactcgttctcccga

SEQ ID NO: 4073784 - DNA, 25 bp, Homo sapien
agcatgggacagtgcccctggtccc

SEQ ID NO: 4073785 - DNA, 25 bp, Homo sapien
aaggttcgaggtgagggatatccca

SEQ ID NO: 4073786 - DNA, 25 bp, Homo sapien
tacgttctcgtgttctgtagcccag

SEQ ID NO: 4073787 - DNA, 25 bp, Homo sapien
tatgcatccagctgtcacatgtacc

SEQ ID NO: 4073788 - DNA, 25 bp, Homo sapien
tgtagcccagtagggtgactctagt

SEQ ID NO: 4073789 - DNA, 25 bp, Homo sapien
caattgtgtagcaagacacaccagc

SEQ ID NO: 4073790 - DNA, 25 bp, Homo sapien
cgctcccggcccaaatcagttgatt

SEQ ID NO: 4073791 - DNA, 25 bp, Homo sapien
ctcttaggctactgacaattgtgta

SEQ ID NO: 4073792 - DNA, 25 bp, Homo sapien
tgcaagtgtgttcctcgaacaccgt

SEQ ID NO: 4073793 - DNA, 25 bp, Homo sapien
cagacgcttgctggatggagacgcc

SEQ ID NO: 4073794 - DNA, 25 bp, Homo sapien
ttctccaccgggaggaagccttgcg

SEQ ID NO: 4073795 - DNA, 25 bp, Homo sapien
ctgcattgctgatgtgtgaggacgc

SEQ ID NO: 4073796 - DNA, 25 bp, Homo sapien
tcgcatcccgacgtgtttaacacag

SEQ ID NO: 4073797 - DNA, 25 bp, Homo sapien
acagtgaggttcatggggtagttgg

SEQ ID NO: 4073798 - DNA, 25 bp, Homo sapien
gaggttcatggggtagttggaggcc

SEQ ID NO: 4073799 - DNA, 25 bp, Homo sapien
tgaggttcatggggtagttggaggc

SEQ ID NO: 4073800 - DNA, 25 bp, Homo sapien
agtgaggttcatggggtagttggag

SEQ ID NO: 4073801 - DNA, 25 bp, Homo sapien
gattatcgctggtctgcaactggca

SEQ ID NO: 4073802 - DNA, 25 bp, Homo sapien
tagagttaggaatcactgtgtccat

SEQ ID NO: 4073803 - DNA, 25 bp, Homo sapien
cttcccattcttcatggaggcagat

SEQ ID NO: 4073804 - DNA, 25 bp, Homo sapien
gagctgaccagacgggaggaaccct

SEQ ID NO: 4073805 - DNA, 25 bp, Homo sapien
cagagcacttcgaagaaggcgggcc

SEQ ID NO: 4073806 - DNA, 25 bp, Homo sapien
tcggccagcggctccagaagaggcc

SEQ ID NO: 4073807 - DNA, 25 bp, Homo sapien
cgggaaagtgatttctcggaaagca

SEQ ID NO: 4073808 - DNA, 25 bp, Homo sapien
cgcgcgagccaagctgacgctattg

SEQ ID NO: 4073809 - DNA, 25 bp, Homo sapien
taaacagtgccagagtcccattcag

SEQ ID NO: 4073810 - DNA, 25 bp, Homo sapien
gctggactaggctgtgtagccctga

SEQ ID NO: 4073811 - DNA, 25 bp, Homo sapien
cattatagataaccccaaaagccgg

SEQ ID NO: 4073812 - DNA, 25 bp, Homo sapien
ggcacagttgcaggttggacatcag

SEQ ID NO: 4073813 - DNA, 25 bp, Homo sapien
tgtaaggatcaagttttgggctgga

SEQ ID NO: 4073814 - DNA, 25 bp, Homo sapien
ggccctgtcatgtaaggatcaagtt

SEQ ID NO: 4073815 - DNA, 25 bp, Homo sapien
tcatgtaaggatcaagttttgggct

SEQ ID NO: 4073816 - DNA, 25 bp, Homo sapien
ggtctcctggccctgtcatgtaagg

SEQ ID NO: 4073817 - DNA, 25 bp, Homo sapien
gcattttcggttaactatcatttcc

SEQ ID NO: 4073818 - DNA, 25 bp, Homo sapien
catatccaggcaaacgggtgtgttt

SEQ ID NO: 4073819 - DNA, 25 bp, Homo sapien
cagatagctgcttcgataaaggaat

SEQ ID NO: 4073820 - DNA, 25 bp, Homo sapien
tcatttccaaagacttgtcattcag

SEQ ID NO: 4073821 - DNA, 25 bp, Homo sapien
tgcagacggtcgacaaatccttcct

SEQ ID NO: 4073822 - DNA, 25 bp, Homo sapien
gatatcgtctgttgtctccccagag

SEQ ID NO: 4073823 - DNA, 25 bp, Homo sapien
gagtcacactaatgtccgcacgctg

SEQ ID NO: 4073824 - DNA, 25 bp, Homo sapien
agttcaacgctctcgtgcagacggt

SEQ ID NO: 4073825 - DNA, 25 bp, Homo sapien
ctgacacgggctttaggggctcaga

SEQ ID NO: 4073826 - DNA, 25 bp, Homo sapien
cagctcgtccctgatggataaggag

SEQ ID NO: 4073827 - DNA, 25 bp, Homo sapien
ggggacgagggctccatagagtggg

SEQ ID NO: 4073828 - DNA, 25 bp, Homo sapien
gggtcagctcgtccctgatggataa

SEQ ID NO: 4073829 - DNA, 25 bp, Homo sapien
ctgggtttcgtagaaaggtcatcct

SEQ ID NO: 4073830 - DNA, 25 bp, Homo sapien
gtgcatgcacattcagcgtgacgac

SEQ ID NO: 4073831 - DNA, 25 bp, Homo sapien
tgggtttcgtagaaaggtcatcctc

SEQ ID NO: 4073832 - DNA, 25 bp, Homo sapien
ttcagcgtgacgacctgctgacctg

SEQ ID NO: 4073833 - DNA, 25 bp, Homo sapien
atgaggtttattcgacaaagttaag

SEQ ID NO: 4073834 - DNA, 25 bp, Homo sapien
cactttatgaggtttattcgacaaa

SEQ ID NO: 4073835 - DNA, 25 bp, Homo sapien
ttatgaggtttattcgacaaagtta

SEQ ID NO: 4073836 - DNA, 25 bp, Homo sapien
gtttattcgacaaagttaaggatgc

SEQ ID NO: 4073837 - DNA, 25 bp, Homo sapien
tttgagtttagagacaaccggttgc

SEQ ID NO: 4073838 - DNA, 25 bp, Homo sapien
acacgacctcgggaagtcctgacga

SEQ ID NO: 4073839 - DNA, 25 bp, Homo sapien
gagtttctggtaagcgaggcaatca

SEQ ID NO: 4073840 - DNA, 25 bp, Homo sapien
cgatgcgaccgctggctttgaagat

SEQ ID NO: 4073841 - DNA, 25 bp, Homo sapien
tttctcaaaggggagctgtactctg

SEQ ID NO: 4073842 - DNA, 25 bp, Homo sapien
tttcatcagtccagagcaccgactt

SEQ ID NO: 4073843 - DNA, 25 bp, Homo sapien
ccagagcaccgactttctcaaaggg

SEQ ID NO: 4073844 - DNA, 25 bp, Homo sapien
tcagtccagagcaccgactttctca

SEQ ID NO: 4073845 - DNA, 25 bp, Homo sapien
cacggtgagcgcagaggtttcacaa

SEQ ID NO: 4073846 - DNA, 25 bp, Homo sapien
gaatcgaccatgatgctgtcacagc

SEQ ID NO: 4073847 - DNA, 25 bp, Homo sapien
tttctctgggtgtgagaatcgacca

SEQ ID NO: 4073848 - DNA, 25 bp, Homo sapien
aaatgccaagcacataagaagagcc

SEQ ID NO: 4073849 - DNA, 25 bp, Homo sapien
gggaccaagaggcacttcagtgtaa

SEQ ID NO: 4073850 - DNA, 25 bp, Homo sapien
gtttccaacacatggcctgctccag

SEQ ID NO: 4073851 - DNA, 25 bp, Homo sapien
gaggctcctggtgatcgtaactctt

SEQ ID NO: 4073852 - DNA, 25 bp, Homo sapien
ttccagttccatgacccaaagaggc

SEQ ID NO: 4073853 - DNA, 25 bp, Homo sapien
ttacaggacaacactgaccttgacg

SEQ ID NO: 4073854 - DNA, 25 bp, Homo sapien
gcagctgtggattagcctgacacac

SEQ ID NO: 4073855 - DNA, 25 bp, Homo sapien
gacgttggtcaagattcggcagccg

SEQ ID NO: 4073856 - DNA, 25 bp, Homo sapien
agccgtccaccaaagggcagctgtg

SEQ ID NO: 4073857 - DNA, 25 bp, Homo sapien
cccaagctcagtggcataaatgaca

SEQ ID NO: 4073858 - DNA, 25 bp, Homo sapien
catctatctgggttttatcaagcca

SEQ ID NO: 4073859 - DNA, 25 bp, Homo sapien
tctggatggaccaaggtggcttcac

SEQ ID NO: 4073860 - DNA, 25 bp, Homo sapien
aactttgcagtcagccgtttaggca

SEQ ID NO: 4073861 - DNA, 25 bp, Homo sapien
gaacagctatttggagtctggcctc

SEQ ID NO: 4073862 - DNA, 25 bp, Homo sapien
tcccctgtgctcttaggttgtacac

SEQ ID NO: 4073863 - DNA, 25 bp, Homo sapien
tcttgggtcgaatgcaggtcccctg

SEQ ID NO: 4073864 - DNA, 25 bp, Homo sapien
tacactttagctccactttgtggtc

SEQ ID NO: 4073865 - DNA, 25 bp, Homo sapien
ggcagccacgctgttgcaacatgag

SEQ ID NO: 4073866 - DNA, 25 bp, Homo sapien
cacactgcgcttggctagggtggtc

SEQ ID NO: 4073867 - DNA, 25 bp, Homo sapien
caacatgagcggctgaggtttctga

SEQ ID NO: 4073868 - DNA, 25 bp, Homo sapien
tctcttggccacctgtgtcgggcag

SEQ ID NO: 4073869 - DNA, 25 bp, Homo sapien
gagagggacttggacccaggcctcc

SEQ ID NO: 4073870 - DNA, 25 bp, Homo sapien
agagggacttggacccaggcctccg

SEQ ID NO: 4073871 - DNA, 25 bp, Homo sapien
agggacttggacccaggcctccgag

SEQ ID NO: 4073872 - DNA, 25 bp, Homo sapien
agagagggacttggacccaggcctc

SEQ ID NO: 4073873 - DNA, 25 bp, Homo sapien
gcagaagtgagcgagacggttccct

SEQ ID NO: 4073874 - DNA, 25 bp, Homo sapien
tactgagcaccaactttaggtcagg

SEQ ID NO: 4073875 - DNA, 25 bp, Homo sapien
taggtcaggcgttcctttaggcact

SEQ ID NO: 4073876 - DNA, 25 bp, Homo sapien
acgtgcttgtggcttcaagacgaca

SEQ ID NO: 4073877 - DNA, 25 bp, Homo sapien
catcaacactgaaacctagcctggg

SEQ ID NO: 4073878 - DNA, 25 bp, Homo sapien
tgagagctgatacccgaacctggat

SEQ ID NO: 4073879 - DNA, 25 bp, Homo sapien
cactagtcacgtttccatgccaggg

SEQ ID NO: 4073880 - DNA, 25 bp, Homo sapien
tacttgcaaagaagctaaggtggcc

SEQ ID NO: 4073881 - DNA, 25 bp, Homo sapien
gagacagaagttgagtgccggtcac

SEQ ID NO: 4073882 - DNA, 25 bp, Homo sapien
caatagggcagaattttggatccac

SEQ ID NO: 4073883 - DNA, 25 bp, Homo sapien
tcaagcggtcctgtgggaggacaat

SEQ ID NO: 4073884 - DNA, 25 bp, Homo sapien
taacccagtgcgctctggccataca

SEQ ID NO: 4073885 - DNA, 25 bp, Homo sapien
cacgtttgacagctgttaccatttc

SEQ ID NO: 4073886 - DNA, 25 bp, Homo sapien
ggtttcagctgttccggaggccaag

SEQ ID NO: 4073887 - DNA, 25 bp, Homo sapien
tcagtcttgggaaaatggtgagtag

SEQ ID NO: 4073888 - DNA, 25 bp, Homo sapien
ggatttactcactacccacgtttga

SEQ ID NO: 4073889 - DNA, 25 bp, Homo sapien
ttctgtgatgaacgggaagtgaccc

SEQ ID NO: 4073890 - DNA, 25 bp, Homo sapien
taaatgcgcattgcctagctgcagg

SEQ ID NO: 4073891 - DNA, 25 bp, Homo sapien
gagaagggcttgtctggcactcact

SEQ ID NO: 4073892 - DNA, 25 bp, Homo sapien
agttgagacccttgtgcagcaccgt

SEQ ID NO: 4073893 - DNA, 25 bp, Homo sapien
aatgtcccaattcaccttgggaacg

SEQ ID NO: 4073894 - DNA, 25 bp, Homo sapien
ggaacgtccttgagcgcatttcttt

SEQ ID NO: 4073895 - DNA, 25 bp, Homo sapien
tgagggccagtggtgccacaccaat

SEQ ID NO: 4073896 - DNA, 25 bp, Homo sapien
cagtggtgccacaccaatgtcccaa

SEQ ID NO: 4073897 - DNA, 25 bp, Homo sapien
aatgccgaagccagcaagctgttgg

SEQ ID NO: 4073898 - DNA, 25 bp, Homo sapien
gaatgccgaagccagcaagctgttg

SEQ ID NO: 4073899 - DNA, 25 bp, Homo sapien
agagtagaactgaatgccgaagcca

SEQ ID NO: 4073900 - DNA, 25 bp, Homo sapien
atgccgaagccagcaagctgttgga

SEQ ID NO: 4073901 - DNA, 25 bp, Homo sapien
ggatgatggtgttatgtgtgctggg

SEQ ID NO: 4073902 - DNA, 25 bp, Homo sapien
ggaaccatccgatgcccctcagtga

SEQ ID NO: 4073903 - DNA, 25 bp, Homo sapien
atggtgttatgtgtgctggggagtg

SEQ ID NO: 4073904 - DNA, 25 bp, Homo sapien
cctcagtgagggctgagttgtatgg

SEQ ID NO: 4073905 - DNA, 25 bp, Homo sapien
taaacagtcgcatttagccacagca

SEQ ID NO: 4073906 - DNA, 25 bp, Homo sapien
gggttaaccagagcccatgcaatgg

SEQ ID NO: 4073907 - DNA, 25 bp, Homo sapien
tcttggtggcaaaaccgacgtgaaa

SEQ ID NO: 4073908 - DNA, 25 bp, Homo sapien
gctcttaaaacaaccgcggcacata

SEQ ID NO: 4073909 - DNA, 25 bp, Homo sapien
cttttgaattgaggtcgcagaatga

SEQ ID NO: 4073910 - DNA, 25 bp, Homo sapien
ttgaattgaggtcgcagaatgaaaa

SEQ ID NO: 4073911 - DNA, 25 bp, Homo sapien
attgaggtcgcagaatgaaaatgcc

SEQ ID NO: 4073912 - DNA, 25 bp, Homo sapien
gaattgaggtcgcagaatgaaaatg

SEQ ID NO: 4073913 - DNA, 25 bp, Homo sapien
ccatctccactggacctgagtcaga

SEQ ID NO: 4073914 - DNA, 25 bp, Homo sapien
catctccactggacctgagtcagaa

SEQ ID NO: 4073915 - DNA, 25 bp, Homo sapien
cccatctccactggacctgagtcag

SEQ ID NO: 4073916 - DNA, 25 bp, Homo sapien
tttggttggagacgttgcatccatt

SEQ ID NO: 4073917 - DNA, 25 bp, Homo sapien
tggttttggttggagacgttgcatc

SEQ ID NO: 4073918 - DNA, 25 bp, Homo sapien
gttttggttggagacgttgcatcca

SEQ ID NO: 4073919 - DNA, 25 bp, Homo sapien
ggttttggttggagacgttgcatcc

SEQ ID NO: 4073920 - DNA, 25 bp, Homo sapien
ctttgtgaagtattccttgtgtgca

SEQ ID NO: 4073921 - DNA, 25 bp, Homo sapien
gagtgttaagccagatgttcccaag

SEQ ID NO: 4073922 - DNA, 25 bp, Homo sapien
tgaagtattccttgtgtgcagctga

SEQ ID NO: 4073923 - DNA, 25 bp, Homo sapien
gataattcagccagagaccaagggg

SEQ ID NO: 4073924 - DNA, 25 bp, Homo sapien
tattgtccgtgaagtctgggggcat

SEQ ID NO: 4073925 - DNA, 25 bp, Homo sapien
cctattgtccgtgaagtctgggggc

SEQ ID NO: 4073926 - DNA, 25 bp, Homo sapien
ttgtccgtgaagtctgggggcattc

SEQ ID NO: 4073927 - DNA, 25 bp, Homo sapien
cttccctattgtccgtgaagtctgg

SEQ ID NO: 4073928 - DNA, 25 bp, Homo sapien
gtgaccacactgtgtcgctgttgaa

SEQ ID NO: 4073929 - DNA, 25 bp, Homo sapien
gaacgctggctttccactgaagtgg

SEQ ID NO: 4073930 - DNA, 25 bp, Homo sapien
gtttgcatagcctgaggaacgctgg

SEQ ID NO: 4073931 - DNA, 25 bp, Homo sapien
taaagcatcaggcaataaaacacca

SEQ ID NO: 4073932 - DNA, 25 bp, Homo sapien
caggggtgagcgtgctgacaaggat

SEQ ID NO: 4073933 - DNA, 25 bp, Homo sapien
gattcacatctgatcttgcagtaga

SEQ ID NO: 4073934 - DNA, 25 bp, Homo sapien
aaggattcacatctgatcttgcagt

SEQ ID NO: 4073935 - DNA, 25 bp, Homo sapien
ttgcagtagaatcagcccctcccca

SEQ ID NO: 4073936 - DNA, 25 bp, Homo sapien
tgctggctcggtttgcatggaatcg

SEQ ID NO: 4073937 - DNA, 25 bp, Homo sapien
ggaggtctctatgctccaactccca

SEQ ID NO: 4073938 - DNA, 25 bp, Homo sapien
ggtctctcccggtatttcctgagtg

SEQ ID NO: 4073939 - DNA, 25 bp, Homo sapien
ccacatctaggtgggccaggtgcct

SEQ ID NO: 4073940 - DNA, 25 bp, Homo sapien
agaactccgaggctgttttgccgag

SEQ ID NO: 4073941 - DNA, 25 bp, Homo sapien
agcaccgtccgtgtggagttttgga

SEQ ID NO: 4073942 - DNA, 25 bp, Homo sapien
tttggaggggcacggaatccccagc

SEQ ID NO: 4073943 - DNA, 25 bp, Homo sapien
ccccgggcccttgcttggcacaagg

SEQ ID NO: 4073944 - DNA, 25 bp, Homo sapien
gctccaagataagatgggctgtgtg

SEQ ID NO: 4073945 - DNA, 25 bp, Homo sapien
cctggctccaagataagatgggctg

SEQ ID NO: 4073946 - DNA, 25 bp, Homo sapien
tgggcctggctccaagataagatgg

SEQ ID NO: 4073947 - DNA, 25 bp, Homo sapien
ggcctggctccaagataagatgggc

SEQ ID NO: 4073948 - DNA, 25 bp, Homo sapien
tcagcagcaagaaagcctcatggag

SEQ ID NO: 4073949 - DNA, 25 bp, Homo sapien
caaccagctggagtctatgtggaca

SEQ ID NO: 4073950 - DNA, 25 bp, Homo sapien
cacggctcgattgcatgttcaggag

SEQ ID NO: 4073951 - DNA, 25 bp, Homo sapien
cagcaaggcgatcagtggttgtcac

SEQ ID NO: 4073952 - DNA, 25 bp, Homo sapien
tccatggcgatgacctctgagtcca

SEQ ID NO: 4073953 - DNA, 25 bp, Homo sapien
catggccaagtaggcagcgctgttg

SEQ ID NO: 4073954 - DNA, 25 bp, Homo sapien
gacacctgggcttatatcaatgacc

SEQ ID NO: 4073955 - DNA, 25 bp, Homo sapien
gtaggctcacggcaatgactgctgg

SEQ ID NO: 4073956 - DNA, 25 bp, Homo sapien
gccttttggtcccagcaatgcctgg

SEQ ID NO: 4073957 - DNA, 25 bp, Homo sapien
gctcaggtcctctcctaatagggca

SEQ ID NO: 4073958 - DNA, 25 bp, Homo sapien
gtgcaggttcccgaggccgactttg

SEQ ID NO: 4073959 - DNA, 25 bp, Homo sapien
gacagccagagccttttggtcccag

SEQ ID NO: 4073960 - DNA, 25 bp, Homo sapien
tgtcagctcctccaaagcgcacgcc

SEQ ID NO: 4073961 - DNA, 25 bp, Homo sapien
agctcctccaaagcgcacgccagcc

SEQ ID NO: 4073962 - DNA, 25 bp, Homo sapien
ctgtcagctcctccaaagcgcacgc

SEQ ID NO: 4073963 - DNA, 25 bp, Homo sapien
tcagctcctccaaagcgcacgccag

SEQ ID NO: 4073964 - DNA, 25 bp, Homo sapien
aaaatctcctgcctacgacggtctg

SEQ ID NO: 4073965 - DNA, 25 bp, Homo sapien
tcctgcctacgacggtctgagtgcc

SEQ ID NO: 4073966 - DNA, 25 bp, Homo sapien
acgacggtctgagtgccagagccca

SEQ ID NO: 4073967 - DNA, 25 bp, Homo sapien
agaatggccatgtcaaaaatctcct

SEQ ID NO: 4073968 - DNA, 25 bp, Homo sapien
ctctttcctctgggccataacagga

SEQ ID NO: 4073969 - DNA, 25 bp, Homo sapien
caggggtaaggtgggtgctgctccc

SEQ ID NO: 4073970 - DNA, 25 bp, Homo sapien
cagcctgggccatttgttcagaacc

SEQ ID NO: 4073971 - DNA, 25 bp, Homo sapien
gccatttgttcagaacccagaggtg

SEQ ID NO: 4073972 - DNA, 25 bp, Homo sapien
gactcatcttgacgtggtccactgt

SEQ ID NO: 4073973 - DNA, 25 bp, Homo sapien
ttggcattggagactcatcttgacg

SEQ ID NO: 4073974 - DNA, 25 bp, Homo sapien
tgacctcccgaggactttggcattg

SEQ ID NO: 4073975 - DNA, 25 bp, Homo sapien
agcttccaaaccggccagcagactt

SEQ ID NO: 4073976 - DNA, 25 bp, Homo sapien
tcacccgcagagataccagtcattg

SEQ ID NO: 4073977 - DNA, 25 bp, Homo sapien
acccagccgcaggagcacaggtggc

SEQ ID NO: 4073978 - DNA, 25 bp, Homo sapien
aagcagcagtgcagacccagccgca

SEQ ID NO: 4073979 - DNA, 25 bp, Homo sapien
gggtcttagcaattccaccagtgca

SEQ ID NO: 4073980 - DNA, 25 bp, Homo sapien
ctgtgtggcccatgatgatgactga

SEQ ID NO: 4073981 - DNA, 25 bp, Homo sapien
tatttgagaggtggccttcttccaa

SEQ ID NO: 4073982 - DNA, 25 bp, Homo sapien
cataaataatacgacaaaggacagc

SEQ ID NO: 4073983 - DNA, 25 bp, Homo sapien
cagcaatgccaacgcctgtcactat

SEQ ID NO: 4073984 - DNA, 25 bp, Homo sapien
tcagagagcccgatgtttatgctgc

SEQ ID NO: 4073985 - DNA, 25 bp, Homo sapien
caggcattcatgtgtccgaggagcg

SEQ ID NO: 4073986 - DNA, 25 bp, Homo sapien
aaacagccccggatggtgggcatcc

SEQ ID NO: 4073987 - DNA, 25 bp, Homo sapien
gggcccattggctctatccggtgtt

SEQ ID NO: 4073988 - DNA, 25 bp, Homo sapien
cagatggtctttgttggacattatc

SEQ ID NO: 4073989 - DNA, 25 bp, Homo sapien
tgacactcccgctcagatggtcttt

SEQ ID NO: 4073990 - DNA, 25 bp, Homo sapien
ggccactgacacatctgtactcaga

SEQ ID NO: 4073991 - DNA, 25 bp, Homo sapien
tgtactcagagaggctgccggctga

SEQ ID NO: 4073992 - DNA, 25 bp, Homo sapien
aatagcagaagtggaagacctacca

SEQ ID NO: 4073993 - DNA, 25 bp, Homo sapien
taaatagcagaagtggaagacctac

SEQ ID NO: 4073994 - DNA, 25 bp, Homo sapien
cctcaaggaggtgatcctcattagc

SEQ ID NO: 4073995 - DNA, 25 bp, Homo sapien
caggtagatgataacaagaatggca

SEQ ID NO: 4073996 - DNA, 25 bp, Homo sapien
caggaacaatgacgtcacggctggg

SEQ ID NO: 4073997 - DNA, 25 bp, Homo sapien
gctggggcccttgacacaggttcca

SEQ ID NO: 4073998 - DNA, 25 bp, Homo sapien
aggagccagggacaatgatatcacg

SEQ ID NO: 4073999 - DNA, 25 bp, Homo sapien
atagagccgacagcaggttcccatc

SEQ ID NO: 4074000 - DNA, 25 bp, Homo sapien
ggatcacgaggatcactgtcttgga

SEQ ID NO: 4074001 - DNA, 25 bp, Homo sapien
tctagaggccggttgccagaatttc

SEQ ID NO: 4074002 - DNA, 25 bp, Homo sapien
gggaatgcagtagttcaaccagagc

SEQ ID NO: 4074003 - DNA, 25 bp, Homo sapien
cttacacaacggtgaggaagtgtgg

SEQ ID NO: 4074004 - DNA, 25 bp, Homo sapien
ctgttcttcagggtcccttacacaa

SEQ ID NO: 4074005 - DNA, 25 bp, Homo sapien
tccaagctggctccgcagttcttat

SEQ ID NO: 4074006 - DNA, 25 bp, Homo sapien
ggccagcaggagtgccagttcacac

SEQ ID NO: 4074007 - DNA, 25 bp, Homo sapien
cagttcttatccaaacaggaggtgc

SEQ ID NO: 4074008 - DNA, 25 bp, Homo sapien
gtgggatttgccctgatttatggcc

SEQ ID NO: 4074009 - DNA, 25 bp, Homo sapien
gcctgcccagcttcatagaaaggtg

SEQ ID NO: 4074010 - DNA, 25 bp, Homo sapien
tccctgctggagggatcaaggaaga

SEQ ID NO: 4074011 - DNA, 25 bp, Homo sapien
ccagcttcatagaaaggtgcagcga

SEQ ID NO: 4074012 - DNA, 25 bp, Homo sapien
catagaaaggtgcagcgatcagagg

SEQ ID NO: 4074013 - DNA, 25 bp, Homo sapien
aatttagcattcaggaatagcttcg

SEQ ID NO: 4074014 - DNA, 25 bp, Homo sapien
caggaaagtggtgaggcttctcaga

SEQ ID NO: 4074015 - DNA, 25 bp, Homo sapien
cattcaggaatagcttcgtataaac

SEQ ID NO: 4074016 - DNA, 25 bp, Homo sapien
ccgggcctggcggattagaggaata

SEQ ID NO: 4074017 - DNA, 25 bp, Homo sapien
tgttggcttttcgagtttctgggac

SEQ ID NO: 4074018 - DNA, 25 bp, Homo sapien
tggctgttggcttttcgagtttctg

SEQ ID NO: 4074019 - DNA, 25 bp, Homo sapien
gctgttggcttttcgagtttctggg

SEQ ID NO: 4074020 - DNA, 25 bp, Homo sapien
tggcttttcgagtttctgggaccca

SEQ ID NO: 4074021 - DNA, 25 bp, Homo sapien
ttagaagggcttaagggatggcacc

SEQ ID NO: 4074022 - DNA, 25 bp, Homo sapien
caaaacaagtcacacttagaagggc

SEQ ID NO: 4074023 - DNA, 25 bp, Homo sapien
ccagacactttaggatgagagaact

SEQ ID NO: 4074024 - DNA, 25 bp, Homo sapien
tctgcggaggactgagctagtcact

SEQ ID NO: 4074025 - DNA, 25 bp, Homo sapien
caacgtgagatcatactttgttaga

SEQ ID NO: 4074026 - DNA, 25 bp, Homo sapien
cagatgtcatgcgttaaggatcaac

SEQ ID NO: 4074027 - DNA, 25 bp, Homo sapien
tgagggtggcctaataaagagacag

SEQ ID NO: 4074028 - DNA, 25 bp, Homo sapien
aggacatacagggaccacacagctg

SEQ ID NO: 4074029 - DNA, 25 bp, Homo sapien
cttttttgcttgagagaaggtccat

SEQ ID NO: 4074030 - DNA, 25 bp, Homo sapien
tgatgctgcagtattgcctaaccag

SEQ ID NO: 4074031 - DNA, 25 bp, Homo sapien
tagggtgaactgtgcccttggttcc

SEQ ID NO: 4074032 - DNA, 25 bp, Homo sapien
gtcaacaggctgaaccacggaggtg

SEQ ID NO: 4074033 - DNA, 25 bp, Homo sapien
gggtgtgcgccttgctgaatctgtc

SEQ ID NO: 4074034 - DNA, 25 bp, Homo sapien
tgtcgtgctggttgttacgcggtac

SEQ ID NO: 4074035 - DNA, 25 bp, Homo sapien
ccctctgcgcatattgttcttctgt

SEQ ID NO: 4074036 - DNA, 25 bp, Homo sapien
tgttccttcaagcataaccagtaat

SEQ ID NO: 4074037 - DNA, 25 bp, Homo sapien
acgtgcaccctctgcgcatattgtt

SEQ ID NO: 4074038 - DNA, 25 bp, Homo sapien
gacctaagaggccgaggagaggagc

SEQ ID NO: 4074039 - DNA, 25 bp, Homo sapien
gaccacactaaataggaagtcttca

SEQ ID NO: 4074040 - DNA, 25 bp, Homo sapien
tctgagcatattggggacctaagag

SEQ ID NO: 4074041 - DNA, 25 bp, Homo sapien
cacactaaataggaagtcttcattt

SEQ ID NO: 4074042 - DNA, 25 bp, Homo sapien
ggtgccaccctcagatgacattgta

SEQ ID NO: 4074043 - DNA, 25 bp, Homo sapien
taacagacgcgatagaaaccagagg

SEQ ID NO: 4074044 - DNA, 25 bp, Homo sapien
ctagatccagagagggcaagctact

SEQ ID NO: 4074045 - DNA, 25 bp, Homo sapien
cgagaccttgagtggagtggcttcc

SEQ ID NO: 4074046 - DNA, 25 bp, Homo sapien
cttcgagcctcatctgttatgttct

SEQ ID NO: 4074047 - DNA, 25 bp, Homo sapien
catctcctctgatgtgaaatgtaga

SEQ ID NO: 4074048 - DNA, 25 bp, Homo sapien
gaaatgtagataatgacagtcagca

SEQ ID NO: 4074049 - DNA, 25 bp, Homo sapien
tatgttctccccttgtgaaactgaa

SEQ ID NO: 4074050 - DNA, 25 bp, Homo sapien
ctcgagagggggaccagggccaccg

SEQ ID NO: 4074051 - DNA, 25 bp, Homo sapien
tcagctgaaggtggccatgaggtgg

SEQ ID NO: 4074052 - DNA, 25 bp, Homo sapien
gcccaggcatggctgtaattggcca

SEQ ID NO: 4074053 - DNA, 25 bp, Homo sapien
ccttccaggtggaccaacgagtgaa

SEQ ID NO: 4074054 - DNA, 25 bp, Homo sapien
tggaccaacgagtgaacctgtgcca

SEQ ID NO: 4074055 - DNA, 25 bp, Homo sapien
gaagggcatgtgtaccgtcgactca

SEQ ID NO: 4074056 - DNA, 25 bp, Homo sapien
tgacacgtggcaaagtggagacctt

SEQ ID NO: 4074057 - DNA, 25 bp, Homo sapien
cagataaactagatgcttgtgcaca

SEQ ID NO: 4074058 - DNA, 25 bp, Homo sapien
cgtcgactcaccgtagatgagttga

SEQ ID NO: 4074059 - DNA, 25 bp, Homo sapien
agtcatgcgctgtttctgttcccgg

SEQ ID NO: 4074060 - DNA, 25 bp, Homo sapien
cttatcaggtggagaaggatttaca

SEQ ID NO: 4074061 - DNA, 25 bp, Homo sapien
ttctgttcccggagggcagtctcct

SEQ ID NO: 4074062 - DNA, 25 bp, Homo sapien
tttttgcagacaggtcgcagtcatg

SEQ ID NO: 4074063 - DNA, 25 bp, Homo sapien
aattctgaaatctactgccactgga

SEQ ID NO: 4074064 - DNA, 25 bp, Homo sapien
gaaatctactgccactggaccagcc

SEQ ID NO: 4074065 - DNA, 25 bp, Homo sapien
ttctgaaatctactgccactggacc

SEQ ID NO: 4074066 - DNA, 25 bp, Homo sapien
aataaattctgaaatctactgccac

SEQ ID NO: 4074067 - DNA, 25 bp, Homo sapien
tcaccccagaagcacaattatcatt

SEQ ID NO: 4074068 - DNA, 25 bp, Homo sapien
cgtcgtcgtcggagtcatcggagga

SEQ ID NO: 4074069 - DNA, 25 bp, Homo sapien
cctctcaccccagaagcacaattat

SEQ ID NO: 4074070 - DNA, 25 bp, Homo sapien
cgtcgtcggagtcatcggaggacca

SEQ ID NO: 4074071 - DNA, 25 bp, Homo sapien
tccttcggataaacaggtaacaagc

SEQ ID NO: 4074072 - DNA, 25 bp, Homo sapien
ctttcttgagcaccgatctgtcctt

SEQ ID NO: 4074073 - DNA, 25 bp, Homo sapien
ggtaacaagctatgggctgcttctc

SEQ ID NO: 4074074 - DNA, 25 bp, Homo sapien
gagcaccgatctgtccttcggataa

SEQ ID NO: 4074075 - DNA, 25 bp, Homo sapien
tggacggatccctccctatcagatg

SEQ ID NO: 4074076 - DNA, 25 bp, Homo sapien
ggctttcctgcgataaacggctcaa

SEQ ID NO: 4074077 - DNA, 25 bp, Homo sapien
cacgcacggtgccagaggtttaggt

SEQ ID NO: 4074078 - DNA, 25 bp, Homo sapien
ctcacatgcagacacggaggtccag

SEQ ID NO: 4074079 - DNA, 25 bp, Homo sapien
gccacggagttttcaaaggaggtgc

SEQ ID NO: 4074080 - DNA, 25 bp, Homo sapien
aacgcagcgtctattccttgtcttt

SEQ ID NO: 4074081 - DNA, 25 bp, Homo sapien
tttccagagactaccacgttccttg

SEQ ID NO: 4074082 - DNA, 25 bp, Homo sapien
ttctggtggccccaacgcagcgtct

SEQ ID NO: 4074083 - DNA, 25 bp, Homo sapien
cctactttaaggtcggctgattagc

SEQ ID NO: 4074084 - DNA, 25 bp, Homo sapien
gcattatcaggctcagaatcccaag

SEQ ID NO: 4074085 - DNA, 25 bp, Homo sapien
tcacaatgacggaccagatggctct

SEQ ID NO: 4074086 - DNA, 25 bp, Homo sapien
tggtgacacccatgatagcaatgag

SEQ ID NO: 4074087 - DNA, 25 bp, Homo sapien
tgggttcacacagcccgagtgagtg

SEQ ID NO: 4074088 - DNA, 25 bp, Homo sapien
cttcagccaagagcaatgatctgga

SEQ ID NO: 4074089 - DNA, 25 bp, Homo sapien
gggccaactcctgctggatgtaaac

SEQ ID NO: 4074090 - DNA, 25 bp, Homo sapien
cgagtttcctcgtggcagggaccat

SEQ ID NO: 4074091 - DNA, 25 bp, Homo sapien
gtccacaggaccacgagtttcctcg

SEQ ID NO: 4074092 - DNA, 25 bp, Homo sapien
gtgctgaggactcgaagatgactta

SEQ ID NO: 4074093 - DNA, 25 bp, Homo sapien
tcgaagatgacttaggttcaaggct

SEQ ID NO: 4074094 - DNA, 25 bp, Homo sapien
gactcgaagatgacttaggttcaag

SEQ ID NO: 4074095 - DNA, 25 bp, Homo sapien
tgacttaggttcaaggctttgccct

SEQ ID NO: 4074096 - DNA, 25 bp, Homo sapien
tatgccctgtgtgacaccctttaaa

SEQ ID NO: 4074097 - DNA, 25 bp, Homo sapien
caggtctccatttgcaggggcgtca

SEQ ID NO: 4074098 - DNA, 25 bp, Homo sapien
tgctcacaaccaggtgcacaggtct

SEQ ID NO: 4074099 - DNA, 25 bp, Homo sapien
aaggaatccaggcaccgaagggtat

SEQ ID NO: 4074100 - DNA, 25 bp, Homo sapien
tttccttcgcaggacttgacacccg

SEQ ID NO: 4074101 - DNA, 25 bp, Homo sapien
gcctcatggattgtgggtcctcccg

SEQ ID NO: 4074102 - DNA, 25 bp, Homo sapien
tcctcccgcactgaaatggaagctt

SEQ ID NO: 4074103 - DNA, 25 bp, Homo sapien
tggcttctcccgcatagagaccagg

SEQ ID NO: 4074104 - DNA, 25 bp, Homo sapien
gcagagagggttcagccccttgatc

SEQ ID NO: 4074105 - DNA, 25 bp, Homo sapien
ctcagtcccacgcagagagggttca

SEQ ID NO: 4074106 - DNA, 25 bp, Homo sapien
agtcccacgcagagagggttcagcc

SEQ ID NO: 4074107 - DNA, 25 bp, Homo sapien
tcctcatccgcacgcagagagggct

SEQ ID NO: 4074108 - DNA, 25 bp, Homo sapien
gccttaaggccgtgctgggagattc

SEQ ID NO: 4074109 - DNA, 25 bp, Homo sapien
gctgaccccagacactgaaggttgt

SEQ ID NO: 4074110 - DNA, 25 bp, Homo sapien
ccttaaggccgtgctgggagattca

SEQ ID NO: 4074111 - DNA, 25 bp, Homo sapien
cactgaaggttgtgcgggccttaag

SEQ ID NO: 4074112 - DNA, 25 bp, Homo sapien
ggccaggccgccgtcttgagtttcc

SEQ ID NO: 4074113 - DNA, 25 bp, Homo sapien
gggaggaagcttccgctcttctggc

SEQ ID NO: 4074114 - DNA, 25 bp, Homo sapien
gagtcctcgcatattaagattccag

SEQ ID NO: 4074115 - DNA, 25 bp, Homo sapien
tagggacgactcttcttcagtgccg

SEQ ID NO: 4074116 - DNA, 25 bp, Homo sapien
aaaggagaaacactcagctccccac

SEQ ID NO: 4074117 - DNA, 25 bp, Homo sapien
aaggagaaacactcagctccccaca

SEQ ID NO: 4074118 - DNA, 25 bp, Homo sapien
agctccccacacacgtttgtcccag

SEQ ID NO: 4074119 - DNA, 25 bp, Homo sapien
agaaaggagaaacactcagctcccc

SEQ ID NO: 4074120 - DNA, 25 bp, Homo sapien
atatccaggactgggttagggagcc

SEQ ID NO: 4074121 - DNA, 25 bp, Homo sapien
cagatatccaggactgggttaggga

SEQ ID NO: 4074122 - DNA, 25 bp, Homo sapien
cctgtggggatccactcattctttc

SEQ ID NO: 4074123 - DNA, 25 bp, Homo sapien
ttcacagatatccaggactgggtta

SEQ ID NO: 4074124 - DNA, 25 bp, Homo sapien
tcagtgatgtcaagctcggcacagt

SEQ ID NO: 4074125 - DNA, 25 bp, Homo sapien
tcctggcgaggatgaactgagttca

SEQ ID NO: 4074126 - DNA, 25 bp, Homo sapien
tagctattgtcacgtcgacggtacc

SEQ ID NO: 4074127 - DNA, 25 bp, Homo sapien
gcctgtccacaatgagcccaataat

SEQ ID NO: 4074128 - DNA, 25 bp, Homo sapien
gacaccattcacctgggtgatgcca

SEQ ID NO: 4074129 - DNA, 25 bp, Homo sapien
tgatgccactcacctggacaccatt

SEQ ID NO: 4074130 - DNA, 25 bp, Homo sapien
ggatgccactcacctggacaccatt

SEQ ID NO: 4074131 - DNA, 25 bp, Homo sapien
ggacaccacttacctggatgccact

SEQ ID NO: 4074132 - DNA, 25 bp, Homo sapien
ctgggtgccaccacctggaccccac

SEQ ID NO: 4074133 - DNA, 25 bp, Homo sapien
ggtgccaccacctggaccccactta

SEQ ID NO: 4074134 - DNA, 25 bp, Homo sapien
gtgccaccacctggaccccacttac

SEQ ID NO: 4074135 - DNA, 25 bp, Homo sapien
tgggtgccaccacctggaccccact

SEQ ID NO: 4074136 - DNA, 25 bp, Homo sapien
tgactcacttgggcaccactcaact

SEQ ID NO: 4074137 - DNA, 25 bp, Homo sapien
actcacttgggcaccactcaactgg

SEQ ID NO: 4074138 - DNA, 25 bp, Homo sapien
caccactcaactgggtgccactcac

SEQ ID NO: 4074139 - DNA, 25 bp, Homo sapien
gggcaccactcaactgggtgccact

SEQ ID NO: 4074140 - DNA, 25 bp, Homo sapien
caatgctagtcacgtggatgccact

SEQ ID NO: 4074141 - DNA, 25 bp, Homo sapien
gatgtcgtcactcacctggatgtca

SEQ ID NO: 4074142 - DNA, 25 bp, Homo sapien
tgggtgttatgcacctggacaatgc

SEQ ID NO: 4074143 - DNA, 25 bp, Homo sapien
gggtgccatttacctggatgatgtc

SEQ ID NO: 4074144 - DNA, 25 bp, Homo sapien
tggataatgccactcacccgaatgc

SEQ ID NO: 4074145 - DNA, 25 bp, Homo sapien
gaatgtcactcacctaggtgtcact

SEQ ID NO: 4074146 - DNA, 25 bp, Homo sapien
gggtgccactcacctggaagctact

SEQ ID NO: 4074147 - DNA, 25 bp, Homo sapien
cacacagacgccactaacctgaatg

SEQ ID NO: 4074148 - DNA, 25 bp, Homo sapien
ggtgtgtgagaacagtggaagttcc

SEQ ID NO: 4074149 - DNA, 25 bp, Homo sapien
gggtgtgtgagaacagtggaagttc

SEQ ID NO: 4074150 - DNA, 25 bp, Homo sapien
gtgtgtgagaacagtggaagttcct

SEQ ID NO: 4074151 - DNA, 25 bp, Homo sapien
cagccagcccttacatggttatttc

SEQ ID NO: 4074152 - DNA, 25 bp, Homo sapien
agccagcccttacatggttatttct

SEQ ID NO: 4074153 - DNA, 25 bp, Homo sapien
cagcccttacatggttatttcttca

SEQ ID NO: 4074154 - DNA, 25 bp, Homo sapien
gccagcccttacatggttatttctt

SEQ ID NO: 4074155 - DNA, 25 bp, Homo sapien
gtaaagcaggaagccggtgttttca

SEQ ID NO: 4074156 - DNA, 25 bp, Homo sapien
tacacagttgaggaccaacagacaa

SEQ ID NO: 4074157 - DNA, 25 bp, Homo sapien
tcagcatagtacctgctaggcagtg

SEQ ID NO: 4074158 - DNA, 25 bp, Homo sapien
cagtgcttggaaccgctcagcaggg

SEQ ID NO: 4074159 - DNA, 25 bp, Homo sapien
tggcacttagtattcattacacgac

SEQ ID NO: 4074160 - DNA, 25 bp, Homo sapien
tccatcctgcagaactggcacttag

SEQ ID NO: 4074161 - DNA, 25 bp, Homo sapien
cattgggtccattcgcattatcgca

SEQ ID NO: 4074162 - DNA, 25 bp, Homo sapien
actcaggcgctcatccagggatcat

SEQ ID NO: 4074163 - DNA, 25 bp, Homo sapien
tttgcaagcgcaggtcgcacggcct

SEQ ID NO: 4074164 - DNA, 25 bp, Homo sapien
ggtcgcacggcctgggatgccctct

SEQ ID NO: 4074165 - DNA, 25 bp, Homo sapien
ggcctttgcaagcgcaggtcgcacg

SEQ ID NO: 4074166 - DNA, 25 bp, Homo sapien
cctccttctcgtcagagaggccgcc

SEQ ID NO: 4074167 - DNA, 25 bp, Homo sapien
tgaggttggacttcgggagcccatt

SEQ ID NO: 4074168 - DNA, 25 bp, Homo sapien
tgtggtccgcagtggcattcagagc

SEQ ID NO: 4074169 - DNA, 25 bp, Homo sapien
atgcgttggtccttccaccaccatg

SEQ ID NO: 4074170 - DNA, 25 bp, Homo sapien
cattcagagcatgcgttggtccttc

SEQ ID NO: 4074171 - DNA, 25 bp, Homo sapien
ttctggctcaccacgtggctggctc

SEQ ID NO: 4074172 - DNA, 25 bp, Homo sapien
cacgtggctggctccatctcattca

SEQ ID NO: 4074173 - DNA, 25 bp, Homo sapien
atctcattcattggtctcagcccag

SEQ ID NO: 4074174 - DNA, 25 bp, Homo sapien
catctcattcattggtctcagccca

SEQ ID NO: 4074175 - DNA, 25 bp, Homo sapien
aggttcacatcttctcgccccgaga

SEQ ID NO: 4074176 - DNA, 25 bp, Homo sapien
ggcctttgagaccacaactgagaga

SEQ ID NO: 4074177 - DNA, 25 bp, Homo sapien
cacggagtagggtcccaatctgcca

SEQ ID NO: 4074178 - DNA, 25 bp, Homo sapien
aactgagagattacgggtggacgcc

SEQ ID NO: 4074179 - DNA, 25 bp, Homo sapien
tatttcctgatagcagctgggagcc

SEQ ID NO: 4074180 - DNA, 25 bp, Homo sapien
tgcagcgggattctggaacaatcta

SEQ ID NO: 4074181 - DNA, 25 bp, Homo sapien
tgagctatttcctgatagcagctgg

SEQ ID NO: 4074182 - DNA, 25 bp, Homo sapien
gctgggagccttttgaacagcctgc

SEQ ID NO: 4074183 - DNA, 25 bp, Homo sapien
tcatgtgggaaatcctccgaatccc

SEQ ID NO: 4074184 - DNA, 25 bp, Homo sapien
gcgtcaggtggtatattggcctcct

SEQ ID NO: 4074185 - DNA, 25 bp, Homo sapien
gctgcagagtgtccgattttcccaa

SEQ ID NO: 4074186 - DNA, 25 bp, Homo sapien
tcccaccctgcattgctgcagagtg

SEQ ID NO: 4074187 - DNA, 25 bp, Homo sapien
tgcctcgagctccatgtgctccgtg

SEQ ID NO: 4074188 - DNA, 25 bp, Homo sapien
gagctccatgtgctccgtggaagcc

SEQ ID NO: 4074189 - DNA, 25 bp, Homo sapien
ctcgagctccatgtgctccgtggaa

SEQ ID NO: 4074190 - DNA, 25 bp, Homo sapien
tccatgtgctccgtggaagcctgac

SEQ ID NO: 4074191 - DNA, 25 bp, Homo sapien
ccagcaaggggttcataaatcatcc

SEQ ID NO: 4074192 - DNA, 25 bp, Homo sapien
gagctttgcgtctctgtatattcca

SEQ ID NO: 4074193 - DNA, 25 bp, Homo sapien
ttcataaatcatcccgaaagagctt

SEQ ID NO: 4074194 - DNA, 25 bp, Homo sapien
ccgaaagagctttgcgtctctgtat

SEQ ID NO: 4074195 - DNA, 25 bp, Homo sapien
ctttgaggctatcatgcacattaga

SEQ ID NO: 4074196 - DNA, 25 bp, Homo sapien
cacctttgaggctatcatgcacatt

SEQ ID NO: 4074197 - DNA, 25 bp, Homo sapien
tagagagactctgaaaggggacatc

SEQ ID NO: 4074198 - DNA, 25 bp, Homo sapien
aggctatcatgcacattagagagac

SEQ ID NO: 4074199 - DNA, 25 bp, Homo sapien
ccgtcgcctgtgtagactctatttt

SEQ ID NO: 4074200 - DNA, 25 bp, Homo sapien
tctggggaagctgttgctgcctgaa

SEQ ID NO: 4074201 - DNA, 25 bp, Homo sapien
tggctgagcccgaaccgactctggg

SEQ ID NO: 4074202 - DNA, 25 bp, Homo sapien
ctgcaagttcccaggagcatcccgt

SEQ ID NO: 4074203 - DNA, 25 bp, Homo sapien
tcatcctcttgagccgcctgtgaac

SEQ ID NO: 4074204 - DNA, 25 bp, Homo sapien
ccttcatcctcttgagccgcctgtg

SEQ ID NO: 4074205 - DNA, 25 bp, Homo sapien
gagctgcacagtgttcagggccaca

SEQ ID NO: 4074206 - DNA, 25 bp, Homo sapien
gccgcctgtgaacactgggggccct

SEQ ID NO: 4074207 - DNA, 25 bp, Homo sapien
cacacacgagcatcccagaggggac

SEQ ID NO: 4074208 - DNA, 25 bp, Homo sapien
gacacagccggcattgctgccccct

SEQ ID NO: 4074209 - DNA, 25 bp, Homo sapien
ttcacacacgagcatcccagagggg

SEQ ID NO: 4074210 - DNA, 25 bp, Homo sapien
tttcacacacgagcatcccagaggg

SEQ ID NO: 4074211 - DNA, 25 bp, Homo sapien
ctcgagcgagcaaacagcttgagaa

SEQ ID NO: 4074212 - DNA, 25 bp, Homo sapien
agaaaacatcagaggtgttacttca

SEQ ID NO: 4074213 - DNA, 25 bp, Homo sapien
gagacctcgagcgagcaaacagctt

SEQ ID NO: 4074214 - DNA, 25 bp, Homo sapien
gttacttcagtaagcagcaccactg

SEQ ID NO: 4074215 - DNA, 25 bp, Homo sapien
ctttctggttaaggcaagtcactga

SEQ ID NO: 4074216 - DNA, 25 bp, Homo sapien
gaggcctcgcagctggcttctttgt

SEQ ID NO: 4074217 - DNA, 25 bp, Homo sapien
ttccactgttttaattagagacttg

SEQ ID NO: 4074218 - DNA, 25 bp, Homo sapien
ctgttttaattagagacttgggctc

SEQ ID NO: 4074219 - DNA, 25 bp, Homo sapien
ggctctgaggcctcgcagctggctt

SEQ ID NO: 4074220 - DNA, 25 bp, Homo sapien
agaagcatgggttaatttgagcaga

SEQ ID NO: 4074221 - DNA, 25 bp, Homo sapien
ttgagggtcctggccacttgcttgc

SEQ ID NO: 4074222 - DNA, 25 bp, Homo sapien
aagcaccgatgccatccccggaagg

SEQ ID NO: 4074223 - DNA, 25 bp, Homo sapien
tgccatccccggaaggtctcaggga

SEQ ID NO: 4074224 - DNA, 25 bp, Homo sapien
cttgcttgcagaccagtttgatctc

SEQ ID NO: 4074225 - DNA, 25 bp, Homo sapien
ggactatgcagagctttgacaacag

SEQ ID NO: 4074226 - DNA, 25 bp, Homo sapien
ttgacaacaggctgcactcaaccag

SEQ ID NO: 4074227 - DNA, 25 bp, Homo sapien
aaccagggagagctcgttgccatcg

SEQ ID NO: 4074228 - DNA, 25 bp, Homo sapien
cgagaaacctcttctgagagatgcc

SEQ ID NO: 4074229 - DNA, 25 bp, Homo sapien
cttgtccagagtatcgttgagtcct

SEQ ID NO: 4074230 - DNA, 25 bp, Homo sapien
ccagagtatcgttgagtcctgcatt

SEQ ID NO: 4074231 - DNA, 25 bp, Homo sapien
agagtatcgttgagtcctgcatttg

SEQ ID NO: 4074232 - DNA, 25 bp, Homo sapien
ttgtccagagtatcgttgagtcctg

SEQ ID NO: 4074233 - DNA, 25 bp, Homo sapien
tttagagctcttagcttggggtacc

SEQ ID NO: 4074234 - DNA, 25 bp, Homo sapien
agctcttagcttggggtacctgcag

SEQ ID NO: 4074235 - DNA, 25 bp, Homo sapien
agtcggcaaatacatccagcccagc

SEQ ID NO: 4074236 - DNA, 25 bp, Homo sapien
taggcagaaaagtcggcaaatacat

SEQ ID NO: 4074237 - DNA, 25 bp, Homo sapien
tctatgtgtgcttccatgccacgca

SEQ ID NO: 4074238 - DNA, 25 bp, Homo sapien
ctatgtgtgcttccatgccacgcag

SEQ ID NO: 4074239 - DNA, 25 bp, Homo sapien
tgtctatgtgtgcttccatgccacg

SEQ ID NO: 4074240 - DNA, 25 bp, Homo sapien
gtctatgtgtgcttccatgccacgc

SEQ ID NO: 4074241 - DNA, 25 bp, Homo sapien
cctttgagccagagcaccatgaaca

SEQ ID NO: 4074242 - DNA, 25 bp, Homo sapien
tgagccagagcaccatgaacagtct

SEQ ID NO: 4074243 - DNA, 25 bp, Homo sapien
atgttgaaagtgactcctttgagcc

SEQ ID NO: 4074244 - DNA, 25 bp, Homo sapien
tcaatggtggtgatgttgaaagtga

SEQ ID NO: 4074245 - DNA, 25 bp, Homo sapien
gatgctcgacccaagcaccggttat

SEQ ID NO: 4074246 - DNA, 25 bp, Homo sapien
tcgacccaagcaccggttataggtc

SEQ ID NO: 4074247 - DNA, 25 bp, Homo sapien
gctgtccgtgcacatgatggatgct

SEQ ID NO: 4074248 - DNA, 25 bp, Homo sapien
tgcacatgatggatgctcgacccaa

SEQ ID NO: 4074249 - DNA, 25 bp, Homo sapien
gggtcgggcagtgctccagaaagca

SEQ ID NO: 4074250 - DNA, 25 bp, Homo sapien
ctgagggtcgggcagtgctccagaa

SEQ ID NO: 4074251 - DNA, 25 bp, Homo sapien
ggtcgggcagtgctccagaaagcag

SEQ ID NO: 4074252 - DNA, 25 bp, Homo sapien
cccatgttgggtgcccataaaaatg

SEQ ID NO: 4074253 - DNA, 25 bp, Homo sapien
ccaaaatcccatgttgggtgcccat

SEQ ID NO: 4074254 - DNA, 25 bp, Homo sapien
tcagcacgttggttttcactccggt

SEQ ID NO: 4074255 - DNA, 25 bp, Homo sapien
actcaggaaatgcatcagcacgttg

SEQ ID NO: 4074256 - DNA, 25 bp, Homo sapien
ggtcaagtgggacaaaaacctcatc

SEQ ID NO: 4074257 - DNA, 25 bp, Homo sapien
aactgcttgggatccagattagccc

SEQ ID NO: 4074258 - DNA, 25 bp, Homo sapien
aaacctcatcttggtgtgtgcagga

SEQ ID NO: 4074259 - DNA, 25 bp, Homo sapien
gctctgtgttgagtcagctggccca

SEQ ID NO: 4074260 - DNA, 25 bp, Homo sapien
tgtgtcacctcacactcgtgcaggg

SEQ ID NO: 4074261 - DNA, 25 bp, Homo sapien
ataacgcgagctcagtgggcgcctg

SEQ ID NO: 4074262 - DNA, 25 bp, Homo sapien
ctcagtgggcgcctgtgtcacctca

SEQ ID NO: 4074263 - DNA, 25 bp, Homo sapien
catgataacgcgagctcagtgggcg

SEQ ID NO: 4074264 - DNA, 25 bp, Homo sapien
ccccacgaggtcccatgcccaacct

SEQ ID NO: 4074265 - DNA, 25 bp, Homo sapien
gctgctgccacgtcccccacgaggt

SEQ ID NO: 4074266 - DNA, 25 bp, Homo sapien
gccatgatgctgttccatgccctgc

SEQ ID NO: 4074267 - DNA, 25 bp, Homo sapien
gatgggggttcagggccaacttggc

SEQ ID NO: 4074268 - DNA, 25 bp, Homo sapien
ttgcagagaacattctcgacgccat

SEQ ID NO: 4074269 - DNA, 25 bp, Homo sapien
aaagctgttcgtttgtatctctgaa

SEQ ID NO: 4074270 - DNA, 25 bp, Homo sapien
tattggaagtggatctaggtcctga

SEQ ID NO: 4074271 - DNA, 25 bp, Homo sapien
cctaagacaagcctgaattattgga

SEQ ID NO: 4074272 - DNA, 25 bp, Homo sapien
gcacagggcaccgttagtgtcagtt

SEQ ID NO: 4074273 - DNA, 25 bp, Homo sapien
ccaacagatattcgcagtccgggca

SEQ ID NO: 4074274 - DNA, 25 bp, Homo sapien
gataatcccggctcgcatgtgcgtt

SEQ ID NO: 4074275 - DNA, 25 bp, Homo sapien
tggccacagttgatcacatgacgag

SEQ ID NO: 4074276 - DNA, 25 bp, Homo sapien
acgagtctctctagtcaaggcagga

SEQ ID NO: 4074277 - DNA, 25 bp, Homo sapien
tatgcaagcattcttcagtggctgc

SEQ ID NO: 4074278 - DNA, 25 bp, Homo sapien
cttttgacgagtaggctgcagtgcc

SEQ ID NO: 4074279 - DNA, 25 bp, Homo sapien
ctgggcttcgggcttttgacgagta

SEQ ID NO: 4074280 - DNA, 25 bp, Homo sapien
tgcaagataccatcactgtgtcggg

SEQ ID NO: 4074281 - DNA, 25 bp, Homo sapien
tttcttttatgtgcatgaagtaatc

SEQ ID NO: 4074282 - DNA, 25 bp, Homo sapien
agggtccactgtagttgcgttttct

SEQ ID NO: 4074283 - DNA, 25 bp, Homo sapien
tccactgtagttgcgttttctttta

SEQ ID NO: 4074284 - DNA, 25 bp, Homo sapien
tctagtgagactggacctatttcca

SEQ ID NO: 4074285 - DNA, 25 bp, Homo sapien
catgatatcatcgtgtctgtgtctg

SEQ ID NO: 4074286 - DNA, 25 bp, Homo sapien
catttcctgaacagttctagtgaga

SEQ ID NO: 4074287 - DNA, 25 bp, Homo sapien
taagcgatgggttagctctatcgcc

SEQ ID NO: 4074288 - DNA, 25 bp, Homo sapien
ttttccgaagggtcgaggctcctgc

SEQ ID NO: 4074289 - DNA, 25 bp, Homo sapien
gaacaatgttcccaaatgctgcagg

SEQ ID NO: 4074290 - DNA, 25 bp, Homo sapien
cccagattgcaccatgagccagtaa

SEQ ID NO: 4074291 - DNA, 25 bp, Homo sapien
tttgcttgacacagaagggttgcag

SEQ ID NO: 4074292 - DNA, 25 bp, Homo sapien
cacaatttaatgagttgtaacgttg

SEQ ID NO: 4074293 - DNA, 25 bp, Homo sapien
atttaatgagttgtaacgttgtcca

SEQ ID NO: 4074294 - DNA, 25 bp, Homo sapien
aacacaatttaatgagttgtaacgt

SEQ ID NO: 4074295 - DNA, 25 bp, Homo sapien
caatttaatgagttgtaacgttgtc

SEQ ID NO: 4074296 - DNA, 25 bp, Homo sapien
aagaaaccttgcacgttcagcccag

SEQ ID NO: 4074297 - DNA, 25 bp, Homo sapien
ggcagcagggctcggattcttaaat

SEQ ID NO: 4074298 - DNA, 25 bp, Homo sapien
gagagtggcaaccatccatgtggca

SEQ ID NO: 4074299 - DNA, 25 bp, Homo sapien
tgatggccacgtgagcaagaaacct

SEQ ID NO: 4074300 - DNA, 25 bp, Homo sapien
tcatcgagccaattggtggacgtct

SEQ ID NO: 4074301 - DNA, 25 bp, Homo sapien
tgcatgcagaaggtagccaagagac

SEQ ID NO: 4074302 - DNA, 25 bp, Homo sapien
tgaaaatgaacaaacgatggcttcc

SEQ ID NO: 4074303 - DNA, 25 bp, Homo sapien
taccacgttcagaattaggcaggac

SEQ ID NO: 4074304 - DNA, 25 bp, Homo sapien
caggatctctcatgcgctcagtcct

SEQ ID NO: 4074305 - DNA, 25 bp, Homo sapien
tcttgcagttcctgtaggtcagaaa

SEQ ID NO: 4074306 - DNA, 25 bp, Homo sapien
tgttttctggttatctacgactgca

SEQ ID NO: 4074307 - DNA, 25 bp, Homo sapien
tcagtcctcatggagggctaggttg

SEQ ID NO: 4074308 - DNA, 25 bp, Homo sapien
atcttcggaagacacgggcagagct

SEQ ID NO: 4074309 - DNA, 25 bp, Homo sapien
tgcagttgctggcaaatccgtttgc

SEQ ID NO: 4074310 - DNA, 25 bp, Homo sapien
cattgtcttgaaatttgggtcacct

SEQ ID NO: 4074311 - DNA, 25 bp, Homo sapien
tccgtttgcatccaacattgtcttg

SEQ ID NO: 4074312 - DNA, 25 bp, Homo sapien
tgaaccgctgccttagccatgggtg

SEQ ID NO: 4074313 - DNA, 25 bp, Homo sapien
cctgaacagtagcaaggaagccagt

SEQ ID NO: 4074314 - DNA, 25 bp, Homo sapien
tgatgcctgtttcggacatggcccc

SEQ ID NO: 4074315 - DNA, 25 bp, Homo sapien
tgagctggagcttttagacacacct

SEQ ID NO: 4074316 - DNA, 25 bp, Homo sapien
actaaaaaggatggcaccatcaaat

SEQ ID NO: 4074317 - DNA, 25 bp, Homo sapien
taaactaaaaaggatggcaccatca

SEQ ID NO: 4074318 - DNA, 25 bp, Homo sapien
ctggtctccagagggttaacaaaga

SEQ ID NO: 4074319 - DNA, 25 bp, Homo sapien
tctccagagggttaacaaagaatcc

SEQ ID NO: 4074320 - DNA, 25 bp, Homo sapien
taccaagctccagatagttccacag

SEQ ID NO: 4074321 - DNA, 25 bp, Homo sapien
ggttaactaacctacccatggcagc

SEQ ID NO: 4074322 - DNA, 25 bp, Homo sapien
aaaggctttcccactacagaccagg

SEQ ID NO: 4074323 - DNA, 25 bp, Homo sapien
gctttccgggagaaggcatggcctt

SEQ ID NO: 4074324 - DNA, 25 bp, Homo sapien
gcacccgagcgctgaggtggcaagg

SEQ ID NO: 4074325 - DNA, 25 bp, Homo sapien
ctgggtctgtgcgcgccgcgatgcg

SEQ ID NO: 4074326 - DNA, 25 bp, Homo sapien
ggcaccacctttcgtggctccaccg

SEQ ID NO: 4074327 - DNA, 25 bp, Homo sapien
ctgtcctgcgctccgctctcggcac

SEQ ID NO: 4074328 - DNA, 25 bp, Homo sapien
aacggcggccactcgtacatgggcg

SEQ ID NO: 4074329 - DNA, 25 bp, Homo sapien
ggcgctcaagcccatgtacagcatg

SEQ ID NO: 4074330 - DNA, 25 bp, Homo sapien
tgatgaacggccacttgccgggcaa

SEQ ID NO: 4074331 - DNA, 25 bp, Homo sapien
tacagcatgatgaacgggctcggct

SEQ ID NO: 4074332 - DNA, 25 bp, Homo sapien
tcttctcgaggtataaccgtcggca

SEQ ID NO: 4074333 - DNA, 25 bp, Homo sapien
gactgcagccatcggtaaataaaag

SEQ ID NO: 4074334 - DNA, 25 bp, Homo sapien
tttgatcctgttgaacccgcctgag

SEQ ID NO: 4074335 - DNA, 25 bp, Homo sapien
ggaatgcgcaagtctccctttagag

SEQ ID NO: 4074336 - DNA, 25 bp, Homo sapien
tatataatatgaaggactaccctcc

SEQ ID NO: 4074337 - DNA, 25 bp, Homo sapien
taataatcaaaacaccgcgtaggct

SEQ ID NO: 4074338 - DNA, 25 bp, Homo sapien
taaactttctggtccgagaacgagc

SEQ ID NO: 4074339 - DNA, 25 bp, Homo sapien
gcgtaggctcctccgtttatcagta

SEQ ID NO: 4074340 - DNA, 25 bp, Homo sapien
gaggtatgtcgggatcactggctga

SEQ ID NO: 4074341 - DNA, 25 bp, Homo sapien
tgttccaccgctgttctcggccttt

SEQ ID NO: 4074342 - DNA, 25 bp, Homo sapien
cctttctgatttctcggtgatgctg

SEQ ID NO: 4074343 - DNA, 25 bp, Homo sapien
ttccttctctacatgggtatctggg

SEQ ID NO: 4074344 - DNA, 25 bp, Homo sapien
cggaccaccaaatagctcctcagct

SEQ ID NO: 4074345 - DNA, 25 bp, Homo sapien
cattgagccagttgtcttcctgcct

SEQ ID NO: 4074346 - DNA, 25 bp, Homo sapien
ggagcccattgagccagttgtcttc

SEQ ID NO: 4074347 - DNA, 25 bp, Homo sapien
gcacacgacgtggagcccattgagc

SEQ ID NO: 4074348 - DNA, 25 bp, Homo sapien
tgtgactcctgtatgaacatgtcca

SEQ ID NO: 4074349 - DNA, 25 bp, Homo sapien
tcgtatctgtagacgaggcccagac

SEQ ID NO: 4074350 - DNA, 25 bp, Homo sapien
taatggaaacgatggcctccgagtc

SEQ ID NO: 4074351 - DNA, 25 bp, Homo sapien
acggctagcacgtgtctcaagatgc

SEQ ID NO: 4074352 - DNA, 25 bp, Homo sapien
tgaatgcccaatgacaaacgtgacc

SEQ ID NO: 4074353 - DNA, 25 bp, Homo sapien
gcctggtttaatcccgccgtctgag

SEQ ID NO: 4074354 - DNA, 25 bp, Homo sapien
tattctaacggcagcaaatccacag

SEQ ID NO: 4074355 - DNA, 25 bp, Homo sapien
tctggctaaagcgacaggaaatccc

SEQ ID NO: 4074356 - DNA, 25 bp, Homo sapien
tactctctcattttattcatggcga

SEQ ID NO: 4074357 - DNA, 25 bp, Homo sapien
actctctcattttattcatggcgac

SEQ ID NO: 4074358 - DNA, 25 bp, Homo sapien
tgagaagaattgagacccgagcagc

SEQ ID NO: 4074359 - DNA, 25 bp, Homo sapien
tgtgacgtaggctgggatgaaaccc

SEQ ID NO: 4074360 - DNA, 25 bp, Homo sapien
cccgggatcaattgcaaaagcgctt

SEQ ID NO: 4074361 - DNA, 25 bp, Homo sapien
cattttcttgaaagcgcgtgcacgg

SEQ ID NO: 4074362 - DNA, 25 bp, Homo sapien
caggccctgcaagcaggagacggcc

SEQ ID NO: 4074363 - DNA, 25 bp, Homo sapien
aggcgcaggccctgcaagcaggaga

SEQ ID NO: 4074364 - DNA, 25 bp, Homo sapien
ccctgcaagcaggagacggcctgct

SEQ ID NO: 4074365 - DNA, 25 bp, Homo sapien
tcagggtgtcggtgcccaggcgcag

SEQ ID NO: 4074366 - DNA, 25 bp, Homo sapien
cagagtccgggtaatggaggaaggc

SEQ ID NO: 4074367 - DNA, 25 bp, Homo sapien
agagtccgggtaatggaggaaggct

SEQ ID NO: 4074368 - DNA, 25 bp, Homo sapien
cggcagagtccgggtaatggaggaa

SEQ ID NO: 4074369 - DNA, 25 bp, Homo sapien
ccatggaattggtttctggtccggg

SEQ ID NO: 4074370 - DNA, 25 bp, Homo sapien
cctggagggtgacatccttcccagc

SEQ ID NO: 4074371 - DNA, 25 bp, Homo sapien
caacgtaaacatcggctgcaagcgg

SEQ ID NO: 4074372 - DNA, 25 bp, Homo sapien
ctcttcaggtcactcacacgggcgt

SEQ ID NO: 4074373 - DNA, 25 bp, Homo sapien
catcaagaggcaagccatggtcacc

SEQ ID NO: 4074374 - DNA, 25 bp, Homo sapien
tgaatatgtcgcagtacagggcagc

SEQ ID NO: 4074375 - DNA, 25 bp, Homo sapien
tcttgaatggcaaacagactcttgg

SEQ ID NO: 4074376 - DNA, 25 bp, Homo sapien
taagaacagccaagtgcattcctgc

SEQ ID NO: 4074377 - DNA, 25 bp, Homo sapien
tctgagccagcaaatatacaatcgg

SEQ ID NO: 4074378 - DNA, 25 bp, Homo sapien
cacattatgagctaactggcggcca

SEQ ID NO: 4074379 - DNA, 25 bp, Homo sapien
caaggttccctatggcagaagcgag

SEQ ID NO: 4074380 - DNA, 25 bp, Homo sapien
gaagcgagcattctcaggcgaggct

SEQ ID NO: 4074381 - DNA, 25 bp, Homo sapien
ctttctcactcttgcattacctgac

SEQ ID NO: 4074382 - DNA, 25 bp, Homo sapien
gctgtatgcacttaaatggactccc

SEQ ID NO: 4074383 - DNA, 25 bp, Homo sapien
tgggttcaaatgcacccgggcgcaa

SEQ ID NO: 4074384 - DNA, 25 bp, Homo sapien
cgggcgcaatgtctaccttggaaaa

SEQ ID NO: 4074385 - DNA, 25 bp, Homo sapien
gccctttaacatgagcagaatatga

SEQ ID NO: 4074386 - DNA, 25 bp, Homo sapien
tttttcaatgaaagcctctctcagc

SEQ ID NO: 4074387 - DNA, 25 bp, Homo sapien
agcctctctcagctctctaaacata

SEQ ID NO: 4074388 - DNA, 25 bp, Homo sapien
agtaattctttttcaatgaaagcct

SEQ ID NO: 4074389 - DNA, 25 bp, Homo sapien
gcctctctcagctctctaaacatac

SEQ ID NO: 4074390 - DNA, 25 bp, Homo sapien
tgcgggatctgaaattgggctttgc

SEQ ID NO: 4074391 - DNA, 25 bp, Homo sapien
cagaggagccctgttctcaaatcct

SEQ ID NO: 4074392 - DNA, 25 bp, Homo sapien
tgaggtatctgtagatcatgcagca

SEQ ID NO: 4074393 - DNA, 25 bp, Homo sapien
catgcagcatactgtggccatctga

SEQ ID NO: 4074394 - DNA, 25 bp, Homo sapien
ggatcagaagatcaatggagctgga

SEQ ID NO: 4074395 - DNA, 25 bp, Homo sapien
agaagatcaatggagctggacgaac

SEQ ID NO: 4074396 - DNA, 25 bp, Homo sapien
ctgacacacggctgtcacagggaga

SEQ ID NO: 4074397 - DNA, 25 bp, Homo sapien
gagacatcgcacgactgtctccaag

SEQ ID NO: 4074398 - DNA, 25 bp, Homo sapien
aaatcatgagacacaagctgagaag

SEQ ID NO: 4074399 - DNA, 25 bp, Homo sapien
aatcatgagacacaagctgagaaga

SEQ ID NO: 4074400 - DNA, 25 bp, Homo sapien
aactgcactcaaacagagcgtgtat

SEQ ID NO: 4074401 - DNA, 25 bp, Homo sapien
tgatggtcaatcaaggagatgcgct

SEQ ID NO: 4074402 - DNA, 25 bp, Homo sapien
caaacagagcgtgtattagactggt

SEQ ID NO: 4074403 - DNA, 25 bp, Homo sapien
caaggagatgcgctgtttacagtaa

SEQ ID NO: 4074404 - DNA, 25 bp, Homo sapien
ccagtagttttgtccacacgaagca

SEQ ID NO: 4074405 - DNA, 25 bp, Homo sapien
tgttaattttccatgcccaaaggag

SEQ ID NO: 4074406 - DNA, 25 bp, Homo sapien
cctacaggctgatttgcagggtcaa

SEQ ID NO: 4074407 - DNA, 25 bp, Homo sapien
ttcatcagcggccaaccgaggagtg

SEQ ID NO: 4074408 - DNA, 25 bp, Homo sapien
gccgctaagctacaggccagagctg

SEQ ID NO: 4074409 - DNA, 25 bp, Homo sapien
aattgctcaaaagctccttgggtga

SEQ ID NO: 4074410 - DNA, 25 bp, Homo sapien
acacttaaaagaggaggagccgcta

SEQ ID NO: 4074411 - DNA, 25 bp, Homo sapien
ccttgggtgattctaacatacagcc

SEQ ID NO: 4074412 - DNA, 25 bp, Homo sapien
ttgaaccaggtgattcccattggct

SEQ ID NO: 4074413 - DNA, 25 bp, Homo sapien
tgaggatgtagtccacagtgatgtc

SEQ ID NO: 4074414 - DNA, 25 bp, Homo sapien
tgatgtcgtgctcctcaacaagctc

SEQ ID NO: 4074415 - DNA, 25 bp, Homo sapien
gcctgtggcgatgactctggttgga

SEQ ID NO: 4074416 - DNA, 25 bp, Homo sapien
tctccttgctgacggcgcccatgga

SEQ ID NO: 4074417 - DNA, 25 bp, Homo sapien
catattccagatcggcgtagccttc

SEQ ID NO: 4074418 - DNA, 25 bp, Homo sapien
tggataccatcatggcatattccag

SEQ ID NO: 4074419 - DNA, 25 bp, Homo sapien
tggacgatggtgaccaccggcgtct

SEQ ID NO: 4074420 - DNA, 25 bp, Homo sapien
gaatcagtatcgctgtgcggtccgg

SEQ ID NO: 4074421 - DNA, 25 bp, Homo sapien
ggaataacaacacggccaatgtcag

SEQ ID NO: 4074422 - DNA, 25 bp, Homo sapien
acaagcagcccacactgacgatgga

SEQ ID NO: 4074423 - DNA, 25 bp, Homo sapien
ggcatcgctgagaagtggattttcc

SEQ ID NO: 4074424 - DNA, 25 bp, Homo sapien
catatctgtgtctcggcaaaagaaa

SEQ ID NO: 4074425 - DNA, 25 bp, Homo sapien
gacagtgtgctgatttctagaggac

SEQ ID NO: 4074426 - DNA, 25 bp, Homo sapien
cacgtgcacatgtaggttcactgta

SEQ ID NO: 4074427 - DNA, 25 bp, Homo sapien
ggaccactgctataacatatctgtg

SEQ ID NO: 4074428 - DNA, 25 bp, Homo sapien
caggtgtagcaggtataccagaaca

SEQ ID NO: 4074429 - DNA, 25 bp, Homo sapien
gaacagtgcgctcctgagtccccag

SEQ ID NO: 4074430 - DNA, 25 bp, Homo sapien
gatgacacagacgaagcaccagaaa

SEQ ID NO: 4074431 - DNA, 25 bp, Homo sapien
cagccccgatgacacagacgaagca

SEQ ID NO: 4074432 - DNA, 25 bp, Homo sapien
ttcagaaacggcgacggatcccacc

SEQ ID NO: 4074433 - DNA, 25 bp, Homo sapien
actctggagtccaagcctatgggga

SEQ ID NO: 4074434 - DNA, 25 bp, Homo sapien
ccacaactaaatccacgaggactct

SEQ ID NO: 4074435 - DNA, 25 bp, Homo sapien
aagcctatggggacactgtagttcc

SEQ ID NO: 4074436 - DNA, 25 bp, Homo sapien
gagaagccgcattccagaaaccgct

SEQ ID NO: 4074437 - DNA, 25 bp, Homo sapien
acaccggagatgtggcgtttcagga

SEQ ID NO: 4074438 - DNA, 25 bp, Homo sapien
tcatgatcaaagtgcactcagggtt

SEQ ID NO: 4074439 - DNA, 25 bp, Homo sapien
cagagatacggattggaaaacttca

SEQ ID NO: 4074440 - DNA, 25 bp, Homo sapien
tgtgttctcatcatctcgcagggtc

SEQ ID NO: 4074441 - DNA, 25 bp, Homo sapien
caaaatgtcccaaaagtgtaccgct

SEQ ID NO: 4074442 - DNA, 25 bp, Homo sapien
gacaagttccgtatggatcagtgca

SEQ ID NO: 4074443 - DNA, 25 bp, Homo sapien
ttttcagtcccgtatccagcagtaa

SEQ ID NO: 4074444 - DNA, 25 bp, Homo sapien
ttttggaaattctatcctgtctccc

SEQ ID NO: 4074445 - DNA, 25 bp, Homo sapien
tgtctccccagtcgctctggtggca

SEQ ID NO: 4074446 - DNA, 25 bp, Homo sapien
ttagaactggtgaggcaatttccaa

SEQ ID NO: 4074447 - DNA, 25 bp, Homo sapien
gcaatttccaatggagcatgttttg

SEQ ID NO: 4074448 - DNA, 25 bp, Homo sapien
tgagaggtggcacattttctcaaga

SEQ ID NO: 4074449 - DNA, 25 bp, Homo sapien
cccgttctcagtcgtggtgttggaa

SEQ ID NO: 4074450 - DNA, 25 bp, Homo sapien
caagatgtctttagttgccccaggg

SEQ ID NO: 4074451 - DNA, 25 bp, Homo sapien
tgtgatcttattaaacaatcccgtt

SEQ ID NO: 4074452 - DNA, 25 bp, Homo sapien
tcagggtccactttaacttcctgtg

SEQ ID NO: 4074453 - DNA, 25 bp, Homo sapien
cctgtgttctggcaaaaacgtctag

SEQ ID NO: 4074454 - DNA, 25 bp, Homo sapien
gatgttttggcaagccagataagac

SEQ ID NO: 4074455 - DNA, 25 bp, Homo sapien
gcagccgaacgccttccagtggttt

SEQ ID NO: 4074456 - DNA, 25 bp, Homo sapien
gggcatcaggatttactttaatggt

SEQ ID NO: 4074457 - DNA, 25 bp, Homo sapien
taatggtcctggccgttttgaacgc

SEQ ID NO: 4074458 - DNA, 25 bp, Homo sapien
acgaagaagcgagcacttttctggg

SEQ ID NO: 4074459 - DNA, 25 bp, Homo sapien
ttcaaggacgaagaagcgagcactt

SEQ ID NO: 4074460 - DNA, 25 bp, Homo sapien
gttgctcggcagcatgagaagcgcc

SEQ ID NO: 4074461 - DNA, 25 bp, Homo sapien
gcgtgggagttgctcggcagcatga

SEQ ID NO: 4074462 - DNA, 25 bp, Homo sapien
ggagttgctcggcagcatgagaagc

SEQ ID NO: 4074463 - DNA, 25 bp, Homo sapien
ctgcaagcgtgggagttgctcggca

SEQ ID NO: 4074464 - DNA, 25 bp, Homo sapien
ctgtttccaatgcaatcgcacgtta

SEQ ID NO: 4074465 - DNA, 25 bp, Homo sapien
ccagcgcgagttccatgtaggcgtg

SEQ ID NO: 4074466 - DNA, 25 bp, Homo sapien
accggcgggctcctgtgcagctaga

SEQ ID NO: 4074467 - DNA, 25 bp, Homo sapien
gcgggcgggaactgctgctgtgcat

SEQ ID NO: 4074468 - DNA, 25 bp, Homo sapien
tccccgaggagcgacgctcctgctc

SEQ ID NO: 4074469 - DNA, 25 bp, Homo sapien
actgctcgccacattctcatccacc

SEQ ID NO: 4074470 - DNA, 25 bp, Homo sapien
ccatgtagccccaaatttgttcacg

SEQ ID NO: 4074471 - DNA, 25 bp, Homo sapien
gaacaggtcggggaaagtcagctaa

SEQ ID NO: 4074472 - DNA, 25 bp, Homo sapien
gtgattccatgtagccccaaatttg

SEQ ID NO: 4074473 - DNA, 25 bp, Homo sapien
atttgttcacgtatgtcctgtttgg

SEQ ID NO: 4074474 - DNA, 25 bp, Homo sapien
ggttctggcgcgtagtgacgtcacc

SEQ ID NO: 4074475 - DNA, 25 bp, Homo sapien
tgtgcgacgcttcccggcgcaggtt

SEQ ID NO: 4074476 - DNA, 25 bp, Homo sapien
ggcggaggctgagcgggcgaggccc

SEQ ID NO: 4074477 - DNA, 25 bp, Homo sapien
ccgcgcctgcgcgatggtaggaggg

SEQ ID NO: 4074478 - DNA, 25 bp, Homo sapien
caaaagagtttgaatgcccgcctac

SEQ ID NO: 4074479 - DNA, 25 bp, Homo sapien
gaaaatggtgttccgtgtacaagcg

SEQ ID NO: 4074480 - DNA, 25 bp, Homo sapien
tccctgagcgaatgaaggcatcccc

SEQ ID NO: 4074481 - DNA, 25 bp, Homo sapien
tgagatcctcacaacacacttggga

SEQ ID NO: 4074482 - DNA, 25 bp, Homo sapien
ggcctggtgggttgtctcaacatcc

SEQ ID NO: 4074483 - DNA, 25 bp, Homo sapien
ttattggaaataagtggcacgcccc

SEQ ID NO: 4074484 - DNA, 25 bp, Homo sapien
tccttttgctgagaatcgaatacgc

SEQ ID NO: 4074485 - DNA, 25 bp, Homo sapien
cgaagaggccgaagcgaagaggcct

SEQ ID NO: 4074486 - DNA, 25 bp, Homo sapien
gaaacgtccacgcttggtgcccgcg

SEQ ID NO: 4074487 - DNA, 25 bp, Homo sapien
acgtccacgcttggtgcccgcggtg

SEQ ID NO: 4074488 - DNA, 25 bp, Homo sapien
ccacgggaaacgtccacgcttggtg

SEQ ID NO: 4074489 - DNA, 25 bp, Homo sapien
cacgggaaacgtccacgcttggtgc

SEQ ID NO: 4074490 - DNA, 25 bp, Homo sapien
tcaacgagtgcttcgtcaaggtgcc

SEQ ID NO: 4074491 - DNA, 25 bp, Homo sapien
gagtgcttcgtcaaggtgccccgcg

SEQ ID NO: 4074492 - DNA, 25 bp, Homo sapien
catggaccgcttccccttctaccgg

SEQ ID NO: 4074493 - DNA, 25 bp, Homo sapien
cttctaccgggagaacaagcagggc

SEQ ID NO: 4074494 - DNA, 25 bp, Homo sapien
tgccgctccactcgccagtgtgttt

SEQ ID NO: 4074495 - DNA, 25 bp, Homo sapien
tggatgtgccgctccactcgccagt

SEQ ID NO: 4074496 - DNA, 25 bp, Homo sapien
gtgccttggtgacgagtttcctgga

SEQ ID NO: 4074497 - DNA, 25 bp, Homo sapien
agtgggaagtctgggatgtccccca

SEQ ID NO: 4074498 - DNA, 25 bp, Homo sapien
tttccaaggctggataacacgccac

SEQ ID NO: 4074499 - DNA, 25 bp, Homo sapien
catattactccgtccatctgagggc

SEQ ID NO: 4074500 - DNA, 25 bp, Homo sapien
taatcacactgctatggacatgggt

SEQ ID NO: 4074501 - DNA, 25 bp, Homo sapien
cactcagtatcacgtcctcagggtt

SEQ ID NO: 4074502 - DNA, 25 bp, Homo sapien
gctcctattgaagctcaggtatgaa

SEQ ID NO: 4074503 - DNA, 25 bp, Homo sapien
ccaaatacctccctcacggagctgc

SEQ ID NO: 4074504 - DNA, 25 bp, Homo sapien
tcccagaggctcctattgaagctca

SEQ ID NO: 4074505 - DNA, 25 bp, Homo sapien
cattcccgccgttctcttggagcag

SEQ ID NO: 4074506 - DNA, 25 bp, Homo sapien
gcacaggatccacgcgatgcagaac

SEQ ID NO: 4074507 - DNA, 25 bp, Homo sapien
tttgtaaagggtctggccactggcg

SEQ ID NO: 4074508 - DNA, 25 bp, Homo sapien
gaagcccttaatctgcagccggagg

SEQ ID NO: 4074509 - DNA, 25 bp, Homo sapien
tgagcacggtgaccctatgtggtgt

SEQ ID NO: 4074510 - DNA, 25 bp, Homo sapien
cttgaggctcctcccgtcgccaggc

SEQ ID NO: 4074511 - DNA, 25 bp, Homo sapien
tggagctccggcccctgacggccac

SEQ ID NO: 4074512 - DNA, 25 bp, Homo sapien
agcaccacatcaccaaacgccccca

SEQ ID NO: 4074513 - DNA, 25 bp, Homo sapien
catcccagggttccgttttctccat

SEQ ID NO: 4074514 - DNA, 25 bp, Homo sapien
tttatagagagggaggttgccagct

SEQ ID NO: 4074515 - DNA, 25 bp, Homo sapien
tttttatagagagggaggttgccag

SEQ ID NO: 4074516 - DNA, 25 bp, Homo sapien
cacgttccacgtgttcatgcatttc

SEQ ID NO: 4074517 - DNA, 25 bp, Homo sapien
tatcacgttccacgtgttcatgcat

SEQ ID NO: 4074518 - DNA, 25 bp, Homo sapien
gagtggatgtaacaggacctggagc

SEQ ID NO: 4074519 - DNA, 25 bp, Homo sapien
ttttctgcagagtggatgtaacagg

SEQ ID NO: 4074520 - DNA, 25 bp, Homo sapien
agtggatgtaacaggacctggagca

SEQ ID NO: 4074521 - DNA, 25 bp, Homo sapien
gtgtcttttctgcagagtggatgta

SEQ ID NO: 4074522 - DNA, 25 bp, Homo sapien
cgttgacaacaccactaaataagga

SEQ ID NO: 4074523 - DNA, 25 bp, Homo sapien
ctaaataaggattcctcttggttgg

SEQ ID NO: 4074524 - DNA, 25 bp, Homo sapien
ctattgaaaagccacgttgacaaca

SEQ ID NO: 4074525 - DNA, 25 bp, Homo sapien
gaaaagccacgttgacaacaccact

SEQ ID NO: 4074526 - DNA, 25 bp, Homo sapien
taagtccgccatgcattgaagctac

SEQ ID NO: 4074527 - DNA, 25 bp, Homo sapien
cggccctgtatgcagtaagtccgcc

SEQ ID NO: 4074528 - DNA, 25 bp, Homo sapien
taaccagtgtcatcaatcttattcc

SEQ ID NO: 4074529 - DNA, 25 bp, Homo sapien
gcattgaagctactaaccagtgtca

SEQ ID NO: 4074530 - DNA, 25 bp, Homo sapien
aatgacaacagctagtttctggcac

SEQ ID NO: 4074531 - DNA, 25 bp, Homo sapien
cagcaggccggggttgttcccagca

SEQ ID NO: 4074532 - DNA, 25 bp, Homo sapien
cagagtgagtatccgggcagtttcc

SEQ ID NO: 4074533 - DNA, 25 bp, Homo sapien
tgggttcccatttgtatcacaatga

SEQ ID NO: 4074534 - DNA, 25 bp, Homo sapien
ctcggcgattctgatttggcatctg

SEQ ID NO: 4074535 - DNA, 25 bp, Homo sapien
gggtacagccatgtaggtatgaatg

SEQ ID NO: 4074536 - DNA, 25 bp, Homo sapien
gcatctgtgtgtagcaggctccagg

SEQ ID NO: 4074537 - DNA, 25 bp, Homo sapien
gtacagccatgtaggtatgaatggg

SEQ ID NO: 4074538 - DNA, 25 bp, Homo sapien
ttgtaacccactgagtctgaggcag

SEQ ID NO: 4074539 - DNA, 25 bp, Homo sapien
aagacaaggtgagtgaagtttgacc

SEQ ID NO: 4074540 - DNA, 25 bp, Homo sapien
aggtgagtgaagtttgaccttccca

SEQ ID NO: 4074541 - DNA, 25 bp, Homo sapien
tttgaccttcccattgtgaaggcca

SEQ ID NO: 4074542 - DNA, 25 bp, Homo sapien
ccccaattcggttgactgcaattcc

SEQ ID NO: 4074543 - DNA, 25 bp, Homo sapien
tattttccccaattcggttgactgc

SEQ ID NO: 4074544 - DNA, 25 bp, Homo sapien
ttttccccaattcggttgactgcaa

SEQ ID NO: 4074545 - DNA, 25 bp, Homo sapien
catattttccccaattcggttgact

SEQ ID NO: 4074546 - DNA, 25 bp, Homo sapien
ctggggctacgtccgtgttgccctg

SEQ ID NO: 4074547 - DNA, 25 bp, Homo sapien
aggtctcctcacagggcgaccacga

SEQ ID NO: 4074548 - DNA, 25 bp, Homo sapien
tacgtccgtgttgccctgggcagga

SEQ ID NO: 4074549 - DNA, 25 bp, Homo sapien
gggcgaccacgagggcacctggcag

SEQ ID NO: 4074550 - DNA, 25 bp, Homo sapien
tccactgtgaccacgagctttcggt

SEQ ID NO: 4074551 - DNA, 25 bp, Homo sapien
taaaagacaagtggatcccctgttc

SEQ ID NO: 4074552 - DNA, 25 bp, Homo sapien
gggaaccttggtccgtccactgtga

SEQ ID NO: 4074553 - DNA, 25 bp, Homo sapien
tgagcagggagctgaaaccccaggg

SEQ ID NO: 4074554 - DNA, 25 bp, Homo sapien
ctgacacaccggagagtcactgggt

SEQ ID NO: 4074555 - DNA, 25 bp, Homo sapien
tgacacaccggagagtcactgggtg

SEQ ID NO: 4074556 - DNA, 25 bp, Homo sapien
cagaccctggcactgacacaccgga

SEQ ID NO: 4074557 - DNA, 25 bp, Homo sapien
gacacaccggagagtcactgggtgg

SEQ ID NO: 4074558 - DNA, 25 bp, Homo sapien
caattctattagctacagacctcat

SEQ ID NO: 4074559 - DNA, 25 bp, Homo sapien
tgttgtcgcatctctttagtctcca

SEQ ID NO: 4074560 - DNA, 25 bp, Homo sapien
aattgtcctaagactgtttgagcca

SEQ ID NO: 4074561 - DNA, 25 bp, Homo sapien
tcatgcctggcattctgttgtcgca

SEQ ID NO: 4074562 - DNA, 25 bp, Homo sapien
cctgtggtgttgatttagcccgctg

SEQ ID NO: 4074563 - DNA, 25 bp, Homo sapien
gaatgcgtcaccatttcaggttgtc

SEQ ID NO: 4074564 - DNA, 25 bp, Homo sapien
ggtcagattcacgtcaagacttggg

SEQ ID NO: 4074565 - DNA, 25 bp, Homo sapien
caggttgtccgaattgtccttgtgg

SEQ ID NO: 4074566 - DNA, 25 bp, Homo sapien
tctggcccactgagggtcaccttgc

SEQ ID NO: 4074567 - DNA, 25 bp, Homo sapien
cttgtttgaaagtagcaggcaggaa

SEQ ID NO: 4074568 - DNA, 25 bp, Homo sapien
cattcataaggtattactgggaaaa

SEQ ID NO: 4074569 - DNA, 25 bp, Homo sapien
ttgctagaggtcatccctgtcccta

SEQ ID NO: 4074570 - DNA, 25 bp, Homo sapien
tgagtagcgctcatttctgcaggct

SEQ ID NO: 4074571 - DNA, 25 bp, Homo sapien
tctgctggcttggtgcgaactgtgc

SEQ ID NO: 4074572 - DNA, 25 bp, Homo sapien
ggtgagtaactgtgcagcctgccag

SEQ ID NO: 4074573 - DNA, 25 bp, Homo sapien
tctttcctgtaacatgtagagggcc

SEQ ID NO: 4074574 - DNA, 25 bp, Homo sapien
gaggagagaacttgacggccttgct

SEQ ID NO: 4074575 - DNA, 25 bp, Homo sapien
tgcagtgagcagatagggaatccac

SEQ ID NO: 4074576 - DNA, 25 bp, Homo sapien
tcggacggctcctgtgcccggttct

SEQ ID NO: 4074577 - DNA, 25 bp, Homo sapien
aggctgtgacccagatccttgtttg

SEQ ID NO: 4074578 - DNA, 25 bp, Homo sapien
ccatctgggcgtatatatacgtgca

SEQ ID NO: 4074579 - DNA, 25 bp, Homo sapien
cttttggagcaaggatgagccagga

SEQ ID NO: 4074580 - DNA, 25 bp, Homo sapien
cgggcaggagtcggggtcgcaagat

SEQ ID NO: 4074581 - DNA, 25 bp, Homo sapien
gctcagtgggggtgcttttggagca

SEQ ID NO: 4074582 - DNA, 25 bp, Homo sapien
tggccttggctgtccactggtccat

SEQ ID NO: 4074583 - DNA, 25 bp, Homo sapien
ctggccttggctgtccactggtcca

SEQ ID NO: 4074584 - DNA, 25 bp, Homo sapien
cctctagaccagcaggaaccacgaa

SEQ ID NO: 4074585 - DNA, 25 bp, Homo sapien
agcctcttctggcactaagcgatgt

SEQ ID NO: 4074586 - DNA, 25 bp, Homo sapien
gtccagctctgtctgcataacactt

SEQ ID NO: 4074587 - DNA, 25 bp, Homo sapien
tgtccagggctgtccgagcctgtgt

SEQ ID NO: 4074588 - DNA, 25 bp, Homo sapien
ccaacagcgtgcacagagacaggcg

SEQ ID NO: 4074589 - DNA, 25 bp, Homo sapien
aacagcgtgcacagagacaggcgct

SEQ ID NO: 4074590 - DNA, 25 bp, Homo sapien
cgtgcacagagacaggcgctccttc

SEQ ID NO: 4074591 - DNA, 25 bp, Homo sapien
tgcaggacccgagcatcactcagca

SEQ ID NO: 4074592 - DNA, 25 bp, Homo sapien
gcttggagaggaatctgtcagcctc

SEQ ID NO: 4074593 - DNA, 25 bp, Homo sapien
cctcgagggccccagcgagaaggct

SEQ ID NO: 4074594 - DNA, 25 bp, Homo sapien
cgtcccatgacggttcgtccctttg

SEQ ID NO: 4074595 - DNA, 25 bp, Homo sapien
tttggaagagaaccggcgtcccatg

SEQ ID NO: 4074596 - DNA, 25 bp, Homo sapien
gacactgtggatatcgcttgatgag

SEQ ID NO: 4074597 - DNA, 25 bp, Homo sapien
gtgcaggtatgatgtttggtgcttc

SEQ ID NO: 4074598 - DNA, 25 bp, Homo sapien
tgtcgttcttagcactggctccggg

SEQ ID NO: 4074599 - DNA, 25 bp, Homo sapien
gcccttcagggcctagacactgtgg

SEQ ID NO: 4074600 - DNA, 25 bp, Homo sapien
acgtgaccctgctcgctgcagtctt

SEQ ID NO: 4074601 - DNA, 25 bp, Homo sapien
cgctgcagtctttccgtgcctgcgg

SEQ ID NO: 4074602 - DNA, 25 bp, Homo sapien
tgcggctcctcgcattcatctccca

SEQ ID NO: 4074603 - DNA, 25 bp, Homo sapien
tctcccacacgaaagcccaggaaat

SEQ ID NO: 4074604 - DNA, 25 bp, Homo sapien
agggcagtgcacattcttcaccttc

SEQ ID NO: 4074605 - DNA, 25 bp, Homo sapien
gccaagatctttacttttgacccag

SEQ ID NO: 4074606 - DNA, 25 bp, Homo sapien
tacaatcggaatctgcagagactgg

SEQ ID NO: 4074607 - DNA, 25 bp, Homo sapien
cttccatagccaagatctttacttt

SEQ ID NO: 4074608 - DNA, 25 bp, Homo sapien
gtaagccttcgcaggtgccgttcat

SEQ ID NO: 4074609 - DNA, 25 bp, Homo sapien
tctgggtcgggtggacaggaacgtg

SEQ ID NO: 4074610 - DNA, 25 bp, Homo sapien
cctttgctgtaagccttcgcaggtg

SEQ ID NO: 4074611 - DNA, 25 bp, Homo sapien
tgggccccggccctttgctgtaagc

SEQ ID NO: 4074612 - DNA, 25 bp, Homo sapien
agatctcatctcaacggacctgggc

SEQ ID NO: 4074613 - DNA, 25 bp, Homo sapien
agagggcccattttggatccaagtg

SEQ ID NO: 4074614 - DNA, 25 bp, Homo sapien
gagggccttctttatatccatgact

SEQ ID NO: 4074615 - DNA, 25 bp, Homo sapien
caagtgcaatagtcctaccagtcca

SEQ ID NO: 4074616 - DNA, 25 bp, Homo sapien
tgggagcacacatcctattcagcct

SEQ ID NO: 4074617 - DNA, 25 bp, Homo sapien
caaatgctaagtggcaggctctggc

SEQ ID NO: 4074618 - DNA, 25 bp, Homo sapien
tgaagcctgcggtccactttgggtg

SEQ ID NO: 4074619 - DNA, 25 bp, Homo sapien
caagactcgttagcttcaggacagc

SEQ ID NO: 4074620 - DNA, 25 bp, Homo sapien
gatcgtatcgtgagctgcaagggtc

SEQ ID NO: 4074621 - DNA, 25 bp, Homo sapien
actctgaagccatctaacggccgcg

SEQ ID NO: 4074622 - DNA, 25 bp, Homo sapien
ttctttgctccattgggcgatcgta

SEQ ID NO: 4074623 - DNA, 25 bp, Homo sapien
tctgaagccatctaacggccgcgtc

SEQ ID NO: 4074624 - DNA, 25 bp, Homo sapien
gaaaagcactcgctccgtatggcac

SEQ ID NO: 4074625 - DNA, 25 bp, Homo sapien
tgttgttctcgcgatggcgaccgca

SEQ ID NO: 4074626 - DNA, 25 bp, Homo sapien
cagccttagtgggtgggtcagcatc

SEQ ID NO: 4074627 - DNA, 25 bp, Homo sapien
ggaagcttgctttgggctccgccaa

SEQ ID NO: 4074628 - DNA, 25 bp, Homo sapien
tgttttccatgaagacgggatcttg

SEQ ID NO: 4074629 - DNA, 25 bp, Homo sapien
accaccaacgtctggagcacattct

SEQ ID NO: 4074630 - DNA, 25 bp, Homo sapien
ctaatttgaaggtgaccatggactt

SEQ ID NO: 4074631 - DNA, 25 bp, Homo sapien
ctttttctacgaagaagtacagaca

SEQ ID NO: 4074632 - DNA, 25 bp, Homo sapien
gcgaggggtaatggaaaactgccca

SEQ ID NO: 4074633 - DNA, 25 bp, Homo sapien
cccagtttggaggttctgtttatca

SEQ ID NO: 4074634 - DNA, 25 bp, Homo sapien
agtttggaggttctgtttatcatca

SEQ ID NO: 4074635 - DNA, 25 bp, Homo sapien
tgcccagtttggaggttctgtttat

SEQ ID NO: 4074636 - DNA, 25 bp, Homo sapien
caggtccagccactcgtagtggccg

SEQ ID NO: 4074637 - DNA, 25 bp, Homo sapien
tcagggtgatcccctttggatggtg

SEQ ID NO: 4074638 - DNA, 25 bp, Homo sapien
tgatcccctttggatggtggaaagg

SEQ ID NO: 4074639 - DNA, 25 bp, Homo sapien
gtccagccactcgtagtggccgctg

SEQ ID NO: 4074640 - DNA, 25 bp, Homo sapien
tcgggctggcacaggcgtgccccag

SEQ ID NO: 4074641 - DNA, 25 bp, Homo sapien
gtggctgctcggcaaaccccaaagt

SEQ ID NO: 4074642 - DNA, 25 bp, Homo sapien
gacgcacccgcatgtccacagacat

SEQ ID NO: 4074643 - DNA, 25 bp, Homo sapien
cgcaggcgcagtttggaactgcgta

SEQ ID NO: 4074644 - DNA, 25 bp, Homo sapien
atacacccaccttctcacaatgcag

SEQ ID NO: 4074645 - DNA, 25 bp, Homo sapien
tttgaagacataggatgcggctgtg

SEQ ID NO: 4074646 - DNA, 25 bp, Homo sapien
tctctgcctgttggtgcattttgcg

SEQ ID NO: 4074647 - DNA, 25 bp, Homo sapien
cattttgcggctgactgtttgaaga

SEQ ID NO: 4074648 - DNA, 25 bp, Homo sapien
tcctcaggctgttgcacaggtttaa

SEQ ID NO: 4074649 - DNA, 25 bp, Homo sapien
ctgttgcacaggtttaagctcaggg

SEQ ID NO: 4074650 - DNA, 25 bp, Homo sapien
gaaagccagaccaaggttcttcctc

SEQ ID NO: 4074651 - DNA, 25 bp, Homo sapien
gccagaccaaggttcttcctcaggc

SEQ ID NO: 4074652 - DNA, 25 bp, Homo sapien
cccagcatgtggacatggtacagat

SEQ ID NO: 4074653 - DNA, 25 bp, Homo sapien
tacagataagaaccgtgaatggcac

SEQ ID NO: 4074654 - DNA, 25 bp, Homo sapien
cactagtccagtcaaggatggcctg

SEQ ID NO: 4074655 - DNA, 25 bp, Homo sapien
ttgatgatcgccacgaagctactgg

SEQ ID NO: 4074656 - DNA, 25 bp, Homo sapien
tctggagtccattgaacactttcac

SEQ ID NO: 4074657 - DNA, 25 bp, Homo sapien
ccaggagggcaatgatacgagtaat

SEQ ID NO: 4074658 - DNA, 25 bp, Homo sapien
tacgagtaattacttgcatgtgctc

SEQ ID NO: 4074659 - DNA, 25 bp, Homo sapien
atgagttcttccttctagggcagaa

SEQ ID NO: 4074660 - DNA, 25 bp, Homo sapien
ggctcccttgctgatgatcggctta

SEQ ID NO: 4074661 - DNA, 25 bp, Homo sapien
ttattcccattcagccccatgaggg

SEQ ID NO: 4074662 - DNA, 25 bp, Homo sapien
ccccatgagggtgacgagggcttct

SEQ ID NO: 4074663 - DNA, 25 bp, Homo sapien
agggcttcttgaatcagcttgctca

SEQ ID NO: 4074664 - DNA, 25 bp, Homo sapien
tcacgcgaggcatttgagcaaaaca

SEQ ID NO: 4074665 - DNA, 25 bp, Homo sapien
tgtaaagtccaaaccaatgttcctg

SEQ ID NO: 4074666 - DNA, 25 bp, Homo sapien
cactgattggtctccgccagagaag

SEQ ID NO: 4074667 - DNA, 25 bp, Homo sapien
taccacagctaattgcaagggaggc

SEQ ID NO: 4074668 - DNA, 25 bp, Homo sapien
tggtcactgccactaggcctccagt

SEQ ID NO: 4074669 - DNA, 25 bp, Homo sapien
gtggcatgagctttgatgtctgcat

SEQ ID NO: 4074670 - DNA, 25 bp, Homo sapien
tctgcataggcgaggtgctggcgag

SEQ ID NO: 4074671 - DNA, 25 bp, Homo sapien
gccagacccagcctgtggcatgagc

SEQ ID NO: 4074672 - DNA, 25 bp, Homo sapien
ctgcttgttggcttgttggccgcag

SEQ ID NO: 4074673 - DNA, 25 bp, Homo sapien
ctggtgcccgctgatccatgcgcag

SEQ ID NO: 4074674 - DNA, 25 bp, Homo sapien
atctgagagattgggaagacctccg

SEQ ID NO: 4074675 - DNA, 25 bp, Homo sapien
tttcaggcactgagcgggaatcgtc

SEQ ID NO: 4074676 - DNA, 25 bp, Homo sapien
tacagatatggacatgggtgtagac

SEQ ID NO: 4074677 - DNA, 25 bp, Homo sapien
acagatatggacatgggtgtagaca

SEQ ID NO: 4074678 - DNA, 25 bp, Homo sapien
agatatggacatgggtgtagacaga

SEQ ID NO: 4074679 - DNA, 25 bp, Homo sapien
agatacagatatggacatgggtgta

SEQ ID NO: 4074680 - DNA, 25 bp, Homo sapien
cctccagagccatccagcgcctggg

SEQ ID NO: 4074681 - DNA, 25 bp, Homo sapien
tccctccagagccatccagcgcctg

SEQ ID NO: 4074682 - DNA, 25 bp, Homo sapien
gcgttccctccagagccatccagcg

SEQ ID NO: 4074683 - DNA, 25 bp, Homo sapien
ccagcgttccctccagagccatcca

SEQ ID NO: 4074684 - DNA, 25 bp, Homo sapien
gcagccaggcggaccagtccatgca

SEQ ID NO: 4074685 - DNA, 25 bp, Homo sapien
gccaggcggaccagtccatgcaggc

SEQ ID NO: 4074686 - DNA, 25 bp, Homo sapien
aggcggaccagtccatgcaggctcc

SEQ ID NO: 4074687 - DNA, 25 bp, Homo sapien
ggcggaccagtccatgcaggctcca

SEQ ID NO: 4074688 - DNA, 25 bp, Homo sapien
caaaaggacgtgattctgccccatt

SEQ ID NO: 4074689 - DNA, 25 bp, Homo sapien
tttccaaaaggacgtgattctgccc

SEQ ID NO: 4074690 - DNA, 25 bp, Homo sapien
cacttgggactatggagagggccat

SEQ ID NO: 4074691 - DNA, 25 bp, Homo sapien
tgttttccaaaaggacgtgattctg

SEQ ID NO: 4074692 - DNA, 25 bp, Homo sapien
ccagattccgtggatccagaggtga

SEQ ID NO: 4074693 - DNA, 25 bp, Homo sapien
tctcatttgtgtgcacgggtaccca

SEQ ID NO: 4074694 - DNA, 25 bp, Homo sapien
gaggctggaccccaatgtttctgga

SEQ ID NO: 4074695 - DNA, 25 bp, Homo sapien
gacatgtgtggctaatgcaaacccc

SEQ ID NO: 4074696 - DNA, 25 bp, Homo sapien
gaacatccaggaagtcggcaaaatc

SEQ ID NO: 4074697 - DNA, 25 bp, Homo sapien
agaaagggaactccgcgctgaaggc

SEQ ID NO: 4074698 - DNA, 25 bp, Homo sapien
aatttagtagggactcactgggagc

SEQ ID NO: 4074699 - DNA, 25 bp, Homo sapien
tgtgcagaaccagaaatgaacatcc

SEQ ID NO: 4074700 - DNA, 25 bp, Homo sapien
cctctatttcttctatggagtagga

SEQ ID NO: 4074701 - DNA, 25 bp, Homo sapien
tctatttcttctatggagtaggaga

SEQ ID NO: 4074702 - DNA, 25 bp, Homo sapien
ggcctctatttcttctatggagtag

SEQ ID NO: 4074703 - DNA, 25 bp, Homo sapien
tatttcttctatggagtaggagaca

SEQ ID NO: 4074704 - DNA, 25 bp, Homo sapien
cagtgccacatgttcagccaagtag

SEQ ID NO: 4074705 - DNA, 25 bp, Homo sapien
gaggccacttgcaaccagtgccaca

SEQ ID NO: 4074706 - DNA, 25 bp, Homo sapien
ccaagagaggaactcagcgagttag

SEQ ID NO: 4074707 - DNA, 25 bp, Homo sapien
caacagttctggtagcagtactctc

SEQ ID NO: 4074708 - DNA, 25 bp, Homo sapien
tattggccccctctatatctgcttt

SEQ ID NO: 4074709 - DNA, 25 bp, Homo sapien
tgtgcttattggccccctctatatc

SEQ ID NO: 4074710 - DNA, 25 bp, Homo sapien
caccaatatgtgaggatttcgattt

SEQ ID NO: 4074711 - DNA, 25 bp, Homo sapien
ccaccaccaatatgtgaggatttcg

SEQ ID NO: 4074712 - DNA, 25 bp, Homo sapien
tctcttgaggctctttctgtgttgg

SEQ ID NO: 4074713 - DNA, 25 bp, Homo sapien
tcaggagcagaaaaacccaaaggtg

SEQ ID NO: 4074714 - DNA, 25 bp, Homo sapien
tgttggtggcatccccatactcctg

SEQ ID NO: 4074715 - DNA, 25 bp, Homo sapien
ggagcagaaaaacccaaaggtgcaa

SEQ ID NO: 4074716 - DNA, 25 bp, Homo sapien
ggctgcctgcttagggtcagcaggg

SEQ ID NO: 4074717 - DNA, 25 bp, Homo sapien
agtggagaagccgtgcagcctccgg

SEQ ID NO: 4074718 - DNA, 25 bp, Homo sapien
gccggcaagccgtgcagtggagaag

SEQ ID NO: 4074719 - DNA, 25 bp, Homo sapien
acctccagccttggcacggtcgtgt

SEQ ID NO: 4074720 - DNA, 25 bp, Homo sapien
cagaaggttattaagggtcatcctc

SEQ ID NO: 4074721 - DNA, 25 bp, Homo sapien
gagccatccagaaggttattaaggg

SEQ ID NO: 4074722 - DNA, 25 bp, Homo sapien
tccagaaggttattaagggtcatcc

SEQ ID NO: 4074723 - DNA, 25 bp, Homo sapien
gccatccagaaggttattaagggtc

SEQ ID NO: 4074724 - DNA, 25 bp, Homo sapien
gcccgtacacctgtggaggtgacga

SEQ ID NO: 4074725 - DNA, 25 bp, Homo sapien
tgacgaggagtcatccccttcaggg

SEQ ID NO: 4074726 - DNA, 25 bp, Homo sapien
tagcacatgcccgtacacctgtgga

SEQ ID NO: 4074727 - DNA, 25 bp, Homo sapien
tggaggtgacgaggagtcatcccct

SEQ ID NO: 4074728 - DNA, 25 bp, Homo sapien
gaacgccggatcacactggacactt

SEQ ID NO: 4074729 - DNA, 25 bp, Homo sapien
ctgggaatgaacgccggatcacact

SEQ ID NO: 4074730 - DNA, 25 bp, Homo sapien
tgagggtgacccatggaggagttgg

SEQ ID NO: 4074731 - DNA, 25 bp, Homo sapien
gaatgaacgccggatcacactggac

SEQ ID NO: 4074732 - DNA, 25 bp, Homo sapien
tgcttccacggtggcgccttgttgc

SEQ ID NO: 4074733 - DNA, 25 bp, Homo sapien
gaggggaggagtactgcgtccttaa

SEQ ID NO: 4074734 - DNA, 25 bp, Homo sapien
ctggaccctgcttccacggtggcgc

SEQ ID NO: 4074735 - DNA, 25 bp, Homo sapien
gaccctgcttccacggtggcgcctt

SEQ ID NO: 4074736 - DNA, 25 bp, Homo sapien
agcgtctccttctccccgtcatgtc

SEQ ID NO: 4074737 - DNA, 25 bp, Homo sapien
tctccccgtcatgtctggatccttg

SEQ ID NO: 4074738 - DNA, 25 bp, Homo sapien
tggctcccctcacgttaagttccag

SEQ ID NO: 4074739 - DNA, 25 bp, Homo sapien
tcacgttaagttccagcgaggcacc

SEQ ID NO: 4074740 - DNA, 25 bp, Homo sapien
cacgtggcaaaccatgtggcctgta

SEQ ID NO: 4074741 - DNA, 25 bp, Homo sapien
tcttccggagtgataccgcacggct

SEQ ID NO: 4074742 - DNA, 25 bp, Homo sapien
tactcatctaaggagagggccggca

SEQ ID NO: 4074743 - DNA, 25 bp, Homo sapien
tggtcagtcacgctgtcgcagaaac

SEQ ID NO: 4074744 - DNA, 25 bp, Homo sapien
ccagcaaatagaaaggcagaggtga

SEQ ID NO: 4074745 - DNA, 25 bp, Homo sapien
tcaatcccacaagtctaagatcagg

SEQ ID NO: 4074746 - DNA, 25 bp, Homo sapien
ggccagcaaatagaaaggcagaggt

SEQ ID NO: 4074747 - DNA, 25 bp, Homo sapien
cagcaaatagaaaggcagaggtgag

SEQ ID NO: 4074748 - DNA, 25 bp, Homo sapien
gaggtgaggcgctgcttgcattctc

SEQ ID NO: 4074749 - DNA, 25 bp, Homo sapien
tactggcattagctccagtcacggg

SEQ ID NO: 4074750 - DNA, 25 bp, Homo sapien
cagtttcaatcatgggcagaggtga

SEQ ID NO: 4074751 - DNA, 25 bp, Homo sapien
tactggcattagctccagtcactgg

SEQ ID NO: 4074752 - DNA, 25 bp, Homo sapien
gacacagggtcactctcattcccgc

SEQ ID NO: 4074753 - DNA, 25 bp, Homo sapien
tttcctttgactctcaagattggca

SEQ ID NO: 4074754 - DNA, 25 bp, Homo sapien
cagcaaatcccttggcgacacaggg

SEQ ID NO: 4074755 - DNA, 25 bp, Homo sapien
gagccgctcagagccggtcatgagc

SEQ ID NO: 4074756 - DNA, 25 bp, Homo sapien
aattctggaacgtctgccttttcct

SEQ ID NO: 4074757 - DNA, 25 bp, Homo sapien
ctgaacataagagcagtgcagaaga

SEQ ID NO: 4074758 - DNA, 25 bp, Homo sapien
tgaacataagagcagtgcagaagaa

SEQ ID NO: 4074759 - DNA, 25 bp, Homo sapien
ggaggattgccagcgagggtcaggc

SEQ ID NO: 4074760 - DNA, 25 bp, Homo sapien
caggggggcaatggcatttccagga

SEQ ID NO: 4074761 - DNA, 25 bp, Homo sapien
aagtggaggattgccagcgagggtc

SEQ ID NO: 4074762 - DNA, 25 bp, Homo sapien
gggaagtggaggattgccagcgagg

SEQ ID NO: 4074763 - DNA, 25 bp, Homo sapien
gaccaaacgggcctgcggacggcaa

SEQ ID NO: 4074764 - DNA, 25 bp, Homo sapien
ctctccccgccgagtccggcccatt

SEQ ID NO: 4074765 - DNA, 25 bp, Homo sapien
cgggcctgcggacggcaattcctct

SEQ ID NO: 4074766 - DNA, 25 bp, Homo sapien
ccgagaccaaacgggcctgcggacg

SEQ ID NO: 4074767 - DNA, 25 bp, Homo sapien
gccccgcaattccagtgcctgggtg

SEQ ID NO: 4074768 - DNA, 25 bp, Homo sapien
cccgcaattccagtgcctgggtggc

SEQ ID NO: 4074769 - DNA, 25 bp, Homo sapien
tgctgaaggccccgcaattccagtg

SEQ ID NO: 4074770 - DNA, 25 bp, Homo sapien
gaaggccccgcaattccagtgcctg

SEQ ID NO: 4074771 - DNA, 25 bp, Homo sapien
catgctgctaggaccaatgctgcag

SEQ ID NO: 4074772 - DNA, 25 bp, Homo sapien
tctgaagactgcaagttctcggcca

SEQ ID NO: 4074773 - DNA, 25 bp, Homo sapien
caccagatggttcttgaccctgcag

SEQ ID NO: 4074774 - DNA, 25 bp, Homo sapien
gaaacgtgagcctgaccagaggtct

SEQ ID NO: 4074775 - DNA, 25 bp, Homo sapien
tgtggaagggcgtcaccaaagtcct

SEQ ID NO: 4074776 - DNA, 25 bp, Homo sapien
gacagcggccctcgttggacaaaaa

SEQ ID NO: 4074777 - DNA, 25 bp, Homo sapien
taaacttcataggtaaagctgacag

SEQ ID NO: 4074778 - DNA, 25 bp, Homo sapien
acagcagccaagtcatagtccctga

SEQ ID NO: 4074779 - DNA, 25 bp, Homo sapien
tccctgaaacatgcagcagatgaag

SEQ ID NO: 4074780 - DNA, 25 bp, Homo sapien
atgacaaggacaggtagaatacggt

SEQ ID NO: 4074781 - DNA, 25 bp, Homo sapien
taatgacaaggacaggtagaatacg

SEQ ID NO: 4074782 - DNA, 25 bp, Homo sapien
tggtgtaatgacaaggacaggtaga

SEQ ID NO: 4074783 - DNA, 25 bp, Homo sapien
tgtaatgacaaggacaggtagaata

SEQ ID NO: 4074784 - DNA, 25 bp, Homo sapien
ccctcattgtcagctggaggtgctg

SEQ ID NO: 4074785 - DNA, 25 bp, Homo sapien
cagtaatggagttcaggaaggctga

SEQ ID NO: 4074786 - DNA, 25 bp, Homo sapien
taatcctttggactgtgggcacggc

SEQ ID NO: 4074787 - DNA, 25 bp, Homo sapien
caggctgggataatcctttggactg

SEQ ID NO: 4074788 - DNA, 25 bp, Homo sapien
cgcagcgaccacaggcagccactgg

SEQ ID NO: 4074789 - DNA, 25 bp, Homo sapien
gcgaccacaggcagccactgggagg

SEQ ID NO: 4074790 - DNA, 25 bp, Homo sapien
agcgaccacaggcagccactgggag

SEQ ID NO: 4074791 - DNA, 25 bp, Homo sapien
gcagcgaccacaggcagccactggg

SEQ ID NO: 4074792 - DNA, 25 bp, Homo sapien
cttggattcaacaggaagggtagga

SEQ ID NO: 4074793 - DNA, 25 bp, Homo sapien
caatctgattgttgcaccaggatag

SEQ ID NO: 4074794 - DNA, 25 bp, Homo sapien
tagtaacggtattaaggcaaaatgc

SEQ ID NO: 4074795 - DNA, 25 bp, Homo sapien
ggtgatcttgattggtagtaacggt

SEQ ID NO: 4074796 - DNA, 25 bp, Homo sapien
tcggttccgaaaatcagggcagcta

SEQ ID NO: 4074797 - DNA, 25 bp, Homo sapien
ggaaaagcagctccaaccacggctt

SEQ ID NO: 4074798 - DNA, 25 bp, Homo sapien
gatggactgttgaagactcggttaa

SEQ ID NO: 4074799 - DNA, 25 bp, Homo sapien
gagttgactatgttctaacccagcc

SEQ ID NO: 4074800 - DNA, 25 bp, Homo sapien
gcttatctgtgcatcacgcagccgg

SEQ ID NO: 4074801 - DNA, 25 bp, Homo sapien
acaatcgatcgtgcagacaggagac

SEQ ID NO: 4074802 - DNA, 25 bp, Homo sapien
cacagaatttccgtaggttgagata

SEQ ID NO: 4074803 - DNA, 25 bp, Homo sapien
gaatggtctcatcggctctgtccag

SEQ ID NO: 4074804 - DNA, 25 bp, Homo sapien
tatagttccagcttttatgaggcag

SEQ ID NO: 4074805 - DNA, 25 bp, Homo sapien
cagctttagtgggaatgtgtcaact

SEQ ID NO: 4074806 - DNA, 25 bp, Homo sapien
tacttggccaggaatgaaagccggg

SEQ ID NO: 4074807 - DNA, 25 bp, Homo sapien
gtttgcagtgctacctccctggagt

SEQ ID NO: 4074808 - DNA, 25 bp, Homo sapien
agcccaggctgaaaagagccctgcc

SEQ ID NO: 4074809 - DNA, 25 bp, Homo sapien
tgaagcccaggctgaaaagagccct

SEQ ID NO: 4074810 - DNA, 25 bp, Homo sapien
gaagcccaggctgaaaagagccctg

SEQ ID NO: 4074811 - DNA, 25 bp, Homo sapien
ctgaagcccaggctgaaaagagccc

SEQ ID NO: 4074812 - DNA, 25 bp, Homo sapien
cactgggtcacaagcaggtgggtca

SEQ ID NO: 4074813 - DNA, 25 bp, Homo sapien
tgcaaagccaggcaagtgtcgggcc

SEQ ID NO: 4074814 - DNA, 25 bp, Homo sapien
gacacaccgtgccaatgcttggagc

SEQ ID NO: 4074815 - DNA, 25 bp, Homo sapien
gatgttggtgcctcagacacaccgt

SEQ ID NO: 4074816 - DNA, 25 bp, Homo sapien
accagaaaatccgagtacaggatca

SEQ ID NO: 4074817 - DNA, 25 bp, Homo sapien
gacaccagaaaatccgagtacagga

SEQ ID NO: 4074818 - DNA, 25 bp, Homo sapien
cagaaaatccgagtacaggatcatc

SEQ ID NO: 4074819 - DNA, 25 bp, Homo sapien
gaaaatccgagtacaggatcatcat

SEQ ID NO: 4074820 - DNA, 25 bp, Homo sapien
tacccacgtggagcaaagatcaaac

SEQ ID NO: 4074821 - DNA, 25 bp, Homo sapien
tgcgcttgaaagtgatggacccctg

SEQ ID NO: 4074822 - DNA, 25 bp, Homo sapien
ggacccctgccttggacgattgaaa

SEQ ID NO: 4074823 - DNA, 25 bp, Homo sapien
tcaaccacgggcatgaagcagagag

SEQ ID NO: 4074824 - DNA, 25 bp, Homo sapien
tccacttcttgctatgtcttctcag

SEQ ID NO: 4074825 - DNA, 25 bp, Homo sapien
tcgtcccattcctcagtggatttgg

SEQ ID NO: 4074826 - DNA, 25 bp, Homo sapien
aagcaaaatcgtcccattcctcagt

SEQ ID NO: 4074827 - DNA, 25 bp, Homo sapien
aaagcaaaatcgtcccattcctcag

SEQ ID NO: 4074828 - DNA, 25 bp, Homo sapien
cattcctcagtggatttggatgaaa

SEQ ID NO: 4074829 - DNA, 25 bp, Homo sapien
gaagacagtggtgacacgatgtcca

SEQ ID NO: 4074830 - DNA, 25 bp, Homo sapien
ctgaaatgttaggtctcccagcccg

SEQ ID NO: 4074831 - DNA, 25 bp, Homo sapien
tcccagcccggacacatatggctgt

SEQ ID NO: 4074832 - DNA, 25 bp, Homo sapien
taaccacgtgggtccattagaagct

SEQ ID NO: 4074833 - DNA, 25 bp, Homo sapien
tggtcatggaggaaaaccaggcagg

SEQ ID NO: 4074834 - DNA, 25 bp, Homo sapien
tcatggaggaaaaccaggcaggagt

SEQ ID NO: 4074835 - DNA, 25 bp, Homo sapien
ctggtcatggaggaaaaccaggcag

SEQ ID NO: 4074836 - DNA, 25 bp, Homo sapien
ggtcatggaggaaaaccaggcagga

SEQ ID NO: 4074837 - DNA, 25 bp, Homo sapien
tcaaatccagttttagggcagtcct

SEQ ID NO: 4074838 - DNA, 25 bp, Homo sapien
cctctctgataaggtcccctcagga

SEQ ID NO: 4074839 - DNA, 25 bp, Homo sapien
ttccaatggagtcatacggcatgtg

SEQ ID NO: 4074840 - DNA, 25 bp, Homo sapien
tcaccactcagtccgaggtggcttc

SEQ ID NO: 4074841 - DNA, 25 bp, Homo sapien
ccaggagcttgtaagtgaggcagac

SEQ ID NO: 4074842 - DNA, 25 bp, Homo sapien
tctgaccttgggaagaccctggaaa

SEQ ID NO: 4074843 - DNA, 25 bp, Homo sapien
gagcagccagtaaagtccacggaaa

SEQ ID NO: 4074844 - DNA, 25 bp, Homo sapien
caagcgttgtgtcttcaagccctgg

SEQ ID NO: 4074845 - DNA, 25 bp, Homo sapien
ttttattgttactgttgccacagat

SEQ ID NO: 4074846 - DNA, 25 bp, Homo sapien
tttattgttactgttgccacagatc

SEQ ID NO: 4074847 - DNA, 25 bp, Homo sapien
gtgaaagcactccttttgtgaactg

SEQ ID NO: 4074848 - DNA, 25 bp, Homo sapien
gagaactttacacaccaagagggaa

SEQ ID NO: 4074849 - DNA, 25 bp, Homo sapien
tgtaagattcccctcggctggagac

SEQ ID NO: 4074850 - DNA, 25 bp, Homo sapien
tgggcacatgcggagccccaacact

SEQ ID NO: 4074851 - DNA, 25 bp, Homo sapien
gagtgaatcaatgtcatgcatgtag

SEQ ID NO: 4074852 - DNA, 25 bp, Homo sapien
tgcatgtaggatgtctgtggaacac

SEQ ID NO: 4074853 - DNA, 25 bp, Homo sapien
tgtaagagtgaatcaatgtcatgca

SEQ ID NO: 4074854 - DNA, 25 bp, Homo sapien
caatgtcatgcatgtaggatgtctg

SEQ ID NO: 4074855 - DNA, 25 bp, Homo sapien
ttctgctgcagaaacgtgacgtgta

SEQ ID NO: 4074856 - DNA, 25 bp, Homo sapien
gaatcactgcagttaagcctaagcg

SEQ ID NO: 4074857 - DNA, 25 bp, Homo sapien
cctaagcgacagagggaaatcccat

SEQ ID NO: 4074858 - DNA, 25 bp, Homo sapien
taactatcgttactgctggtgctca

SEQ ID NO: 4074859 - DNA, 25 bp, Homo sapien
tgtggcatggtcacaaggctgatgg

SEQ ID NO: 4074860 - DNA, 25 bp, Homo sapien
catgtggcatggtcacaaggctgat

SEQ ID NO: 4074861 - DNA, 25 bp, Homo sapien
atgtggcatggtcacaaggctgatg

SEQ ID NO: 4074862 - DNA, 25 bp, Homo sapien
acaaggctgatggtgatgtagcagc

SEQ ID NO: 4074863 - DNA, 25 bp, Homo sapien
cacatatacaatgttatgctactta

SEQ ID NO: 4074864 - DNA, 25 bp, Homo sapien
caatgttatgctacttaaagggaga

SEQ ID NO: 4074865 - DNA, 25 bp, Homo sapien
tatacaatgttatgctacttaaagg

SEQ ID NO: 4074866 - DNA, 25 bp, Homo sapien
tgttatgctacttaaagggagaccc

SEQ ID NO: 4074867 - DNA, 25 bp, Homo sapien
gggaaatcagaggtcatcatttaag

SEQ ID NO: 4074868 - DNA, 25 bp, Homo sapien
gtccctgaagagacactcggaaata

SEQ ID NO: 4074869 - DNA, 25 bp, Homo sapien
caggtgctgaaaccattttcgggcc

SEQ ID NO: 4074870 - DNA, 25 bp, Homo sapien
ggacacggacatggggacaagtccc

SEQ ID NO: 4074871 - DNA, 25 bp, Homo sapien
tgctacaaccaagaatcacctgatg

SEQ ID NO: 4074872 - DNA, 25 bp, Homo sapien
cacagacgcctcctgattggtggac

SEQ ID NO: 4074873 - DNA, 25 bp, Homo sapien
tgttctgagaagacagcgactgtca

SEQ ID NO: 4074874 - DNA, 25 bp, Homo sapien
ggtggactctcaaagatcttgatcg

SEQ ID NO: 4074875 - DNA, 25 bp, Homo sapien
gaaacctccatgagcggaaggcaga

SEQ ID NO: 4074876 - DNA, 25 bp, Homo sapien
gggctccctgccaagagattctaag

SEQ ID NO: 4074877 - DNA, 25 bp, Homo sapien
tgcagtcctggccatatcgctttcc

SEQ ID NO: 4074878 - DNA, 25 bp, Homo sapien
tctcctgagataagctgggttggtg

SEQ ID NO: 4074879 - DNA, 25 bp, Homo sapien
tcagaagcagacacctgctatggaa

SEQ ID NO: 4074880 - DNA, 25 bp, Homo sapien
agaagcagacacctgctatggaagc

SEQ ID NO: 4074881 - DNA, 25 bp, Homo sapien
gatgctggttggtgcctgctccgct

SEQ ID NO: 4074882 - DNA, 25 bp, Homo sapien
gggatgctggttggtgcctgctccg

SEQ ID NO: 4074883 - DNA, 25 bp, Homo sapien
tatggagactggcggctggggctca

SEQ ID NO: 4074884 - DNA, 25 bp, Homo sapien
agtatggagactggcggctggggct

SEQ ID NO: 4074885 - DNA, 25 bp, Homo sapien
ctagtatggagactggcggctgggg

SEQ ID NO: 4074886 - DNA, 25 bp, Homo sapien
tggagactggcggctggggctcaag

SEQ ID NO: 4074887 - DNA, 25 bp, Homo sapien
catgatgaccctcgggatggcctgg

SEQ ID NO: 4074888 - DNA, 25 bp, Homo sapien
gccatgatgaccctcgggatggcct

SEQ ID NO: 4074889 - DNA, 25 bp, Homo sapien
atgatgaccctcgggatggcctgga

SEQ ID NO: 4074890 - DNA, 25 bp, Homo sapien
gatgaccctcgggatggcctggagg

SEQ ID NO: 4074891 - DNA, 25 bp, Homo sapien
gggcagcagacgcgctgcaggagcc

SEQ ID NO: 4074892 - DNA, 25 bp, Homo sapien
caggcactcatcaccgcagatccgc

SEQ ID NO: 4074893 - DNA, 25 bp, Homo sapien
gcagcagacgcgctgcaggagccgg

SEQ ID NO: 4074894 - DNA, 25 bp, Homo sapien
atcaccgcagatccgccagcagttg

SEQ ID NO: 4074895 - DNA, 25 bp, Homo sapien
tcacgagataaaggccgtcttgcgg

SEQ ID NO: 4074896 - DNA, 25 bp, Homo sapien
gccgtcttgcgggtttatgatatcc

SEQ ID NO: 4074897 - DNA, 25 bp, Homo sapien
ccggagctcacgagataaaggccgt

SEQ ID NO: 4074898 - DNA, 25 bp, Homo sapien
ggtttatgatatcctgggtaacggc

SEQ ID NO: 4074899 - DNA, 25 bp, Homo sapien
cctttcaaactctgctgcctcctga

SEQ ID NO: 4074900 - DNA, 25 bp, Homo sapien
tttcaaactctgctgcctcctgact

SEQ ID NO: 4074901 - DNA, 25 bp, Homo sapien
tcaaactctgctgcctcctgactat

SEQ ID NO: 4074902 - DNA, 25 bp, Homo sapien
cttggatgcctttcaaactctgctg

SEQ ID NO: 4074903 - DNA, 25 bp, Homo sapien
gataggaaattgaaccgtcttttga

SEQ ID NO: 4074904 - DNA, 25 bp, Homo sapien
tggtccctaggcatcgggaggcggc

SEQ ID NO: 4074905 - DNA, 25 bp, Homo sapien
gggcacccagtagggcatcactgcc

SEQ ID NO: 4074906 - DNA, 25 bp, Homo sapien
gcccccaaagcggtggcataggcag

SEQ ID NO: 4074907 - DNA, 25 bp, Homo sapien
gagggacccagtaaggcagtgctgc

SEQ ID NO: 4074908 - DNA, 25 bp, Homo sapien
agggacccagtaaggcagtgctgct

SEQ ID NO: 4074909 - DNA, 25 bp, Homo sapien
ccccgaatctggtctggcattcaca

SEQ ID NO: 4074910 - DNA, 25 bp, Homo sapien
ggtctggcattcacagcagatggcc

SEQ ID NO: 4074911 - DNA, 25 bp, Homo sapien
ccgaatctggtctggcattcacagc

SEQ ID NO: 4074912 - DNA, 25 bp, Homo sapien
caggcggcccccgaatctggtctgg

SEQ ID NO: 4074913 - DNA, 25 bp, Homo sapien
ctttcttgtaggtttgaaatgtgct

SEQ ID NO: 4074914 - DNA, 25 bp, Homo sapien
cgaatgacgggggaggcacacttct

SEQ ID NO: 4074915 - DNA, 25 bp, Homo sapien
ggggaggcacacttctttcttgtag

SEQ ID NO: 4074916 - DNA, 25 bp, Homo sapien
tcttgtaggtttgaaatgtgctatt

SEQ ID NO: 4074917 - DNA, 25 bp, Homo sapien
cagtggcctcatgatgatggtgaca

SEQ ID NO: 4074918 - DNA, 25 bp, Homo sapien
gggaccggctcgcacgcatatggct

SEQ ID NO: 4074919 - DNA, 25 bp, Homo sapien
tcaaccgctcagaggagcccaacaa

SEQ ID NO: 4074920 - DNA, 25 bp, Homo sapien
tcttatggctgacgcgccctttcac

SEQ ID NO: 4074921 - DNA, 25 bp, Homo sapien
tcatttccgacggatgggccggagg

SEQ ID NO: 4074922 - DNA, 25 bp, Homo sapien
gaggggccgccggccgccccagcca

SEQ ID NO: 4074923 - DNA, 25 bp, Homo sapien
catttccgacggatgggccggaggg

SEQ ID NO: 4074924 - DNA, 25 bp, Homo sapien
gccgccggccgccccagccagggtc

SEQ ID NO: 4074925 - DNA, 25 bp, Homo sapien
gagccaggaagcagcaactccagat

SEQ ID NO: 4074926 - DNA, 25 bp, Homo sapien
cacactcggtgaaagggtcccagag

SEQ ID NO: 4074927 - DNA, 25 bp, Homo sapien
gctccgggcttgaaatgtgagtccc

SEQ ID NO: 4074928 - DNA, 25 bp, Homo sapien
cactgctgtgtgagctggcgcttct

SEQ ID NO: 4074929 - DNA, 25 bp, Homo sapien
ccagccctcgctgcccatctgctgt

SEQ ID NO: 4074930 - DNA, 25 bp, Homo sapien
ggatgctggtgtcggacagatccct

SEQ ID NO: 4074931 - DNA, 25 bp, Homo sapien
tcggacagatccctggagaacaaag

SEQ ID NO: 4074932 - DNA, 25 bp, Homo sapien
gtctaggtgaggctgcggcacccag

SEQ ID NO: 4074933 - DNA, 25 bp, Homo sapien
cagggtctcgtccagacaggaggct

SEQ ID NO: 4074934 - DNA, 25 bp, Homo sapien
gactcgtttgtggttggcacgccca

SEQ ID NO: 4074935 - DNA, 25 bp, Homo sapien
tatgaaagacgccacatttagtccc

SEQ ID NO: 4074936 - DNA, 25 bp, Homo sapien
taatccacggtatcaggatcaacag

SEQ ID NO: 4074937 - DNA, 25 bp, Homo sapien
cacagggtagtccacggtttgcaca

SEQ ID NO: 4074938 - DNA, 25 bp, Homo sapien
tcatgatcagatggcacagcgcttt

SEQ ID NO: 4074939 - DNA, 25 bp, Homo sapien
tagggactcgagacacctctgatgc

SEQ ID NO: 4074940 - DNA, 25 bp, Homo sapien
gattgctccggtcctacctagtggg

SEQ ID NO: 4074941 - DNA, 25 bp, Homo sapien
caaaaaaagtaccagccgcatggag

SEQ ID NO: 4074942 - DNA, 25 bp, Homo sapien
gacaggttgggccacgttaacactg

SEQ ID NO: 4074943 - DNA, 25 bp, Homo sapien
tgcttgcatcttctctaaataatta

SEQ ID NO: 4074944 - DNA, 25 bp, Homo sapien
catggagactatctgctgcttgcat

SEQ ID NO: 4074945 - DNA, 25 bp, Homo sapien
ttaaaagttacaccacgaaggcagc

SEQ ID NO: 4074946 - DNA, 25 bp, Homo sapien
gactgcccacgagcactgaaaatgg

SEQ ID NO: 4074947 - DNA, 25 bp, Homo sapien
tgaaaatggcctaaccgtgtgcagg

SEQ ID NO: 4074948 - DNA, 25 bp, Homo sapien
gcagcaccttggacggtggaccaca

SEQ ID NO: 4074949 - DNA, 25 bp, Homo sapien
ggtgaacacgccctgaggagtcagg

SEQ ID NO: 4074950 - DNA, 25 bp, Homo sapien
ggggtgaacacgccctgaggagtca

SEQ ID NO: 4074951 - DNA, 25 bp, Homo sapien
cccttgcgtgcggctgcagcacaac

SEQ ID NO: 4074952 - DNA, 25 bp, Homo sapien
tgaacacgccctgaggagtcaggga

SEQ ID NO: 4074953 - DNA, 25 bp, Homo sapien
gcacaaagctcagaatggagcggcc

SEQ ID NO: 4074954 - DNA, 25 bp, Homo sapien
agctcagacccggttctgcacaaag

SEQ ID NO: 4074955 - DNA, 25 bp, Homo sapien
aaagctcagaatggagcggccagca

SEQ ID NO: 4074956 - DNA, 25 bp, Homo sapien
caaagctcagaatggagcggccagc

SEQ ID NO: 4074957 - DNA, 25 bp, Homo sapien
ccgtggtgcaaaagatggagagtcc

SEQ ID NO: 4074958 - DNA, 25 bp, Homo sapien
caagaactggctaaggacacatcgg

SEQ ID NO: 4074959 - DNA, 25 bp, Homo sapien
ttttgaggcgcgcagattcagtgcc

SEQ ID NO: 4074960 - DNA, 25 bp, Homo sapien
tgaactgaccaacagcccatggctg

SEQ ID NO: 4074961 - DNA, 25 bp, Homo sapien
aaagggcacgcctctaggactgcgt

SEQ ID NO: 4074962 - DNA, 25 bp, Homo sapien
agccccaaagggcacgcctctagga

SEQ ID NO: 4074963 - DNA, 25 bp, Homo sapien
cacgtgcgtcccacagtgtgctctt

SEQ ID NO: 4074964 - DNA, 25 bp, Homo sapien
taatcagaagcacgtgcgtcccaca

SEQ ID NO: 4074965 - DNA, 25 bp, Homo sapien
ggtgacattccctagtgactcaggt

SEQ ID NO: 4074966 - DNA, 25 bp, Homo sapien
tcacaggaagagcaccagtcaggag

SEQ ID NO: 4074967 - DNA, 25 bp, Homo sapien
tgtgcgttctggtcaaaaggccgga

SEQ ID NO: 4074968 - DNA, 25 bp, Homo sapien
gtccaaactccaagcaagccggtag

SEQ ID NO: 4074969 - DNA, 25 bp, Homo sapien
tcttgagcatctcatcgaaggcctg

SEQ ID NO: 4074970 - DNA, 25 bp, Homo sapien
gggacggcgcatctgcgttccggaa

SEQ ID NO: 4074971 - DNA, 25 bp, Homo sapien
cgcatctgcgttccggaaggtggcc

SEQ ID NO: 4074972 - DNA, 25 bp, Homo sapien
ctggacccggctgtacaggctgaag

SEQ ID NO: 4074973 - DNA, 25 bp, Homo sapien
cccgaagcggtcctcatcgaagagg

SEQ ID NO: 4074974 - DNA, 25 bp, Homo sapien
ggtcctcatcgaagaggatgaagac

SEQ ID NO: 4074975 - DNA, 25 bp, Homo sapien
gaagcggtcctcatcgaagaggatg

SEQ ID NO: 4074976 - DNA, 25 bp, Homo sapien
tggtgaagccgtggcccgcgatgag

SEQ ID NO: 4074977 - DNA, 25 bp, Homo sapien
acatccactgttcatcagccagaag

SEQ ID NO: 4074978 - DNA, 25 bp, Homo sapien
cacatccactgttcatcagccagaa

SEQ ID NO: 4074979 - DNA, 25 bp, Homo sapien
gatgggcgctgactcgcagcacccg

SEQ ID NO: 4074980 - DNA, 25 bp, Homo sapien
ctcgcagcacccgtgagggattcac

SEQ ID NO: 4074981 - DNA, 25 bp, Homo sapien
cgtgagggattcacccactgactgc

SEQ ID NO: 4074982 - DNA, 25 bp, Homo sapien
gatgatggacgcagaggccagagct

SEQ ID NO: 4074983 - DNA, 25 bp, Homo sapien
agtcaccgttatcatacatggaaca

SEQ ID NO: 4074984 - DNA, 25 bp, Homo sapien
accccccagtcaccgttatcataca

SEQ ID NO: 4074985 - DNA, 25 bp, Homo sapien
ccagtcaccgttatcatacatggaa

SEQ ID NO: 4074986 - DNA, 25 bp, Homo sapien
ccccagtcaccgttatcatacatgg

SEQ ID NO: 4074987 - DNA, 25 bp, Homo sapien
catagcagcatacgcacatagtggc

SEQ ID NO: 4074988 - DNA, 25 bp, Homo sapien
tccctccgtgacaggaagtttagcg

SEQ ID NO: 4074989 - DNA, 25 bp, Homo sapien
tgtaacttgacaatggcagaatgac

SEQ ID NO: 4074990 - DNA, 25 bp, Homo sapien
gcacttgaaacatggcctgggcggc

SEQ ID NO: 4074991 - DNA, 25 bp, Homo sapien
aaagcaccggctgccgccctctgtg

SEQ ID NO: 4074992 - DNA, 25 bp, Homo sapien
aggtcacaggccctctccgcctgtg

SEQ ID NO: 4074993 - DNA, 25 bp, Homo sapien
tggggccctcgctgaagcccatgct

SEQ ID NO: 4074994 - DNA, 25 bp, Homo sapien
ggtcagaggccgcactcctgtccca

SEQ ID NO: 4074995 - DNA, 25 bp, Homo sapien
ttcgggggtagtcctcattcctgga

SEQ ID NO: 4074996 - DNA, 25 bp, Homo sapien
tcgggggtagtcctcattcctggag

SEQ ID NO: 4074997 - DNA, 25 bp, Homo sapien
tgccggccacgaccctcgcccgcct

SEQ ID NO: 4074998 - DNA, 25 bp, Homo sapien
ggctgctcggccgcagctacggcat

SEQ ID NO: 4074999 - DNA, 25 bp, Homo sapien
acggcatccccaggctcgccaccat

SEQ ID NO: 4075000 - DNA, 25 bp, Homo sapien
cacgggcagcacgaacggctgcccc

SEQ ID NO: 4075001 - DNA, 25 bp, Homo sapien
ctccaggacgatgcgggagagctca

SEQ ID NO: 4075002 - DNA, 25 bp, Homo sapien
agctggatccgatgcctcaggtcga

SEQ ID NO: 4075003 - DNA, 25 bp, Homo sapien
tgaagttgcgctggttctcgaggtc

SEQ ID NO: 4075004 - DNA, 25 bp, Homo sapien
gcctcaggtcgatctccactgtctg

SEQ ID NO: 4075005 - DNA, 25 bp, Homo sapien
ctttgaagaggccaggcttgatgag

SEQ ID NO: 4075006 - DNA, 25 bp, Homo sapien
gccgtggctgccataggtacctttg

SEQ ID NO: 4075007 - DNA, 25 bp, Homo sapien
tagatgcggcggtaggtcaggcagt

SEQ ID NO: 4075008 - DNA, 25 bp, Homo sapien
cgtgatcttggtgcccctggcacgc

SEQ ID NO: 4075009 - DNA, 25 bp, Homo sapien
tactgactggtgtagatgaacttca

SEQ ID NO: 4075010 - DNA, 25 bp, Homo sapien
attcctccctcagccacgtccgaaa

SEQ ID NO: 4075011 - DNA, 25 bp, Homo sapien
gaagatgtcctccagcgtgcgcccc

SEQ ID NO: 4075012 - DNA, 25 bp, Homo sapien
cctgcatgtgctcgtggaagatgtc

SEQ ID NO: 4075013 - DNA, 25 bp, Homo sapien
tgcacttggtggagaactcatcctt

SEQ ID NO: 4075014 - DNA, 25 bp, Homo sapien
ggtggagaactcatccttcttcaca

SEQ ID NO: 4075015 - DNA, 25 bp, Homo sapien
tccgtctggttgcacttggtggaga

SEQ ID NO: 4075016 - DNA, 25 bp, Homo sapien
tcccgccggacatcctgtggtggtc

SEQ ID NO: 4075017 - DNA, 25 bp, Homo sapien
tggatcctgaacagaggcttgaatc

SEQ ID NO: 4075018 - DNA, 25 bp, Homo sapien
ccgtacatgcactccactgtggcag

SEQ ID NO: 4075019 - DNA, 25 bp, Homo sapien
cctttgtggccgtacatgcactcca

SEQ ID NO: 4075020 - DNA, 25 bp, Homo sapien
aatctcatagggtcatcgacgtggg

SEQ ID NO: 4075021 - DNA, 25 bp, Homo sapien
ccacccgatgatgaacaggccgtcc

SEQ ID NO: 4075022 - DNA, 25 bp, Homo sapien
acccgatgatgaacaggccgtccac

SEQ ID NO: 4075023 - DNA, 25 bp, Homo sapien
cacccgatgatgaacaggccgtcca

SEQ ID NO: 4075024 - DNA, 25 bp, Homo sapien
caatcccaaaatgtgtctatatcgg

SEQ ID NO: 4075025 - DNA, 25 bp, Homo sapien
atggcccgatatctggctgccacaa

SEQ ID NO: 4075026 - DNA, 25 bp, Homo sapien
caaaatgtgtctatatcggtgaagc

SEQ ID NO: 4075027 - DNA, 25 bp, Homo sapien
gttcagcagtcctccgtatggcccg

SEQ ID NO: 4075028 - DNA, 25 bp, Homo sapien
ccctgcactgtatctgcactcatga

SEQ ID NO: 4075029 - DNA, 25 bp, Homo sapien
tgcctcgacttcaccaccactgtta

SEQ ID NO: 4075030 - DNA, 25 bp, Homo sapien
ccactgttagttcccatcattcggg

SEQ ID NO: 4075031 - DNA, 25 bp, Homo sapien
cactgtatctgcactcatgagccac

SEQ ID NO: 4075032 - DNA, 25 bp, Homo sapien
tcgctcactcggtaggaggagcagc

SEQ ID NO: 4075033 - DNA, 25 bp, Homo sapien
gaatccagcagaagcatcgctcact

SEQ ID NO: 4075034 - DNA, 25 bp, Homo sapien
tggatcccgcagaacaactgagcac

SEQ ID NO: 4075035 - DNA, 25 bp, Homo sapien
tgagggagtacaccggaatccagca

SEQ ID NO: 4075036 - DNA, 25 bp, Homo sapien
gcagcaagtaggtcgccacctggat

SEQ ID NO: 4075037 - DNA, 25 bp, Homo sapien
tcagcccagaccatggtttaggaag

SEQ ID NO: 4075038 - DNA, 25 bp, Homo sapien
gcctttggagaagacgctagactcc

SEQ ID NO: 4075039 - DNA, 25 bp, Homo sapien
tgactggacgaatgggcaggatctc

SEQ ID NO: 4075040 - DNA, 25 bp, Homo sapien
agtgcaactctgaagactcgctagg

SEQ ID NO: 4075041 - DNA, 25 bp, Homo sapien
tacatcacaataggaggctgcgcag

SEQ ID NO: 4075042 - DNA, 25 bp, Homo sapien
tgataaagccgccagctcgaagcaa

SEQ ID NO: 4075043 - DNA, 25 bp, Homo sapien
gacagacatgcgacatgaggagcct

SEQ ID NO: 4075044 - DNA, 25 bp, Homo sapien
cacgaaggtcccctcagtaaagcgg

SEQ ID NO: 4075045 - DNA, 25 bp, Homo sapien
taagatgtaggtctgctcccaacag

SEQ ID NO: 4075046 - DNA, 25 bp, Homo sapien
tagcaggcgtgtaaagggttcagac

SEQ ID NO: 4075047 - DNA, 25 bp, Homo sapien
tgaagcgtgctaaccaaatccaggc

SEQ ID NO: 4075048 - DNA, 25 bp, Homo sapien
aaagtgatctcgactggtagtaccc

SEQ ID NO: 4075049 - DNA, 25 bp, Homo sapien
taaagcttctactctgttcgttcct

SEQ ID NO: 4075050 - DNA, 25 bp, Homo sapien
ctgtgtctgcagtagctcctcaata

SEQ ID NO: 4075051 - DNA, 25 bp, Homo sapien
ccactgcagaaaggtaagccaaatg

SEQ ID NO: 4075052 - DNA, 25 bp, Homo sapien
gagccacgctgcagcaagtgaacgt

SEQ ID NO: 4075053 - DNA, 25 bp, Homo sapien
caaaaagccacgaggtccgcttgct

SEQ ID NO: 4075054 - DNA, 25 bp, Homo sapien
catgcagttcttggccgtgctggct

SEQ ID NO: 4075055 - DNA, 25 bp, Homo sapien
gaacgtgaaaggatgacaaaaagcc

SEQ ID NO: 4075056 - DNA, 25 bp, Homo sapien
tgtacgccatgtgctcataatcagg

SEQ ID NO: 4075057 - DNA, 25 bp, Homo sapien
ggcaggtgtaaacgtctctgtacgc

SEQ ID NO: 4075058 - DNA, 25 bp, Homo sapien
ataatcagggagaattttcacaaaa

SEQ ID NO: 4075059 - DNA, 25 bp, Homo sapien
acaaaacgtcccgacttcacgcgag

SEQ ID NO: 4075060 - DNA, 25 bp, Homo sapien
cgcaagttttcgcaaacaccatact

SEQ ID NO: 4075061 - DNA, 25 bp, Homo sapien
gacaagacacgcctgtgatctccag

SEQ ID NO: 4075062 - DNA, 25 bp, Homo sapien
gcttcgcatagacgtcccgacaaga

SEQ ID NO: 4075063 - DNA, 25 bp, Homo sapien
tccagcttccgcaagttttcgcaaa

SEQ ID NO: 4075064 - DNA, 25 bp, Homo sapien
gacaatccctagtttatgaacaagg

SEQ ID NO: 4075065 - DNA, 25 bp, Homo sapien
taaacacccttgttcaccgatgaag

SEQ ID NO: 4075066 - DNA, 25 bp, Homo sapien
tcataacgcgacagacgtgggcagg

SEQ ID NO: 4075067 - DNA, 25 bp, Homo sapien
ttagggttcagacagtgccagaggc

SEQ ID NO: 4075068 - DNA, 25 bp, Homo sapien
ggcactctagtgagcgctgcagcag

SEQ ID NO: 4075069 - DNA, 25 bp, Homo sapien
tgtccttccaagtgatcaccggagt

SEQ ID NO: 4075070 - DNA, 25 bp, Homo sapien
gaagcacctgtcaatgtggaagtca

SEQ ID NO: 4075071 - DNA, 25 bp, Homo sapien
ggacacagcacgaagctcaaaaggg

SEQ ID NO: 4075072 - DNA, 25 bp, Homo sapien
tcaaactgggagtagaaggaggtaa

SEQ ID NO: 4075073 - DNA, 25 bp, Homo sapien
ggagcctcaaaaggctcctgagcag

SEQ ID NO: 4075074 - DNA, 25 bp, Homo sapien
cgagattcaaactgggagtagaagg

SEQ ID NO: 4075075 - DNA, 25 bp, Homo sapien
acagaggcaggcggaatgagcctct

SEQ ID NO: 4075076 - DNA, 25 bp, Homo sapien
acaaactgtccccatggagcggcaa

SEQ ID NO: 4075077 - DNA, 25 bp, Homo sapien
gaagcatgccgtacttgtcctttgg

SEQ ID NO: 4075078 - DNA, 25 bp, Homo sapien
cactgttgactgtacggctcacggg

SEQ ID NO: 4075079 - DNA, 25 bp, Homo sapien
taagacacctcatccaagtggaagc

SEQ ID NO: 4075080 - DNA, 25 bp, Homo sapien
ggtggatgatattcaacttgcaaaa

SEQ ID NO: 4075081 - DNA, 25 bp, Homo sapien
ctttccccacagtgctgagacccca

SEQ ID NO: 4075082 - DNA, 25 bp, Homo sapien
ctacgtttctctagacagtggtgga

SEQ ID NO: 4075083 - DNA, 25 bp, Homo sapien
tgctaagtgaaatgactacgtttct

SEQ ID NO: 4075084 - DNA, 25 bp, Homo sapien
gagtacgcgcctgagtcattcctgt

SEQ ID NO: 4075085 - DNA, 25 bp, Homo sapien
gcccgactgtctgtataggaaaagg

SEQ ID NO: 4075086 - DNA, 25 bp, Homo sapien
gatgaaatttagacccaccttaggc

SEQ ID NO: 4075087 - DNA, 25 bp, Homo sapien
ggaccatgctggctagtgtgcctca

SEQ ID NO: 4075088 - DNA, 25 bp, Homo sapien
gacttgcccatccatggcctggtga

SEQ ID NO: 4075089 - DNA, 25 bp, Homo sapien
aaatatatacgcatcctggctgggc

SEQ ID NO: 4075090 - DNA, 25 bp, Homo sapien
tgcatccgggcagttaagtttctcc

SEQ ID NO: 4075091 - DNA, 25 bp, Homo sapien
gctactgtgcaatactgcatccggg

SEQ ID NO: 4075092 - DNA, 25 bp, Homo sapien
tgagaaccgcagcagtgggaaagaa

SEQ ID NO: 4075093 - DNA, 25 bp, Homo sapien
tgaagggtcctatatctgtccccag

SEQ ID NO: 4075094 - DNA, 25 bp, Homo sapien
tctcacgttagcaggtcacttgggt

SEQ ID NO: 4075095 - DNA, 25 bp, Homo sapien
aaaaccttgttatccctctgctgag

SEQ ID NO: 4075096 - DNA, 25 bp, Homo sapien
tggtgtcggtgtggaggatgcgccg

SEQ ID NO: 4075097 - DNA, 25 bp, Homo sapien
gtgtcggtgtggaggatgcgccgga

SEQ ID NO: 4075098 - DNA, 25 bp, Homo sapien
gatggtgtcggtgtggaggatgcgc

SEQ ID NO: 4075099 - DNA, 25 bp, Homo sapien
tgtcggtgtggaggatgcgccggaa

SEQ ID NO: 4075100 - DNA, 25 bp, Homo sapien
gcagcgacgcgaagatctccaccag

SEQ ID NO: 4075101 - DNA, 25 bp, Homo sapien
tccgtgcccggcagcgacgcgaaga

SEQ ID NO: 4075102 - DNA, 25 bp, Homo sapien
gggccaagctgggtaggtccgtgcc

SEQ ID NO: 4075103 - DNA, 25 bp, Homo sapien
aagctgggtaggtccgtgcccggca

SEQ ID NO: 4075104 - DNA, 25 bp, Homo sapien
ggcggcgaggggcccgcgcacaagc

SEQ ID NO: 4075105 - DNA, 25 bp, Homo sapien
ctccagcagcgagcagcgcgggggc

SEQ ID NO: 4075106 - DNA, 25 bp, Homo sapien
gaggggcccgcgcacaagccgcccc

SEQ ID NO: 4075107 - DNA, 25 bp, Homo sapien
cggcgaggggcccgcgcacaagccg

SEQ ID NO: 4075108 - DNA, 25 bp, Homo sapien
gcgctagcctcgatgcgctcctcct

SEQ ID NO: 4075109 - DNA, 25 bp, Homo sapien
tcggggtctgtgtccggctcgctgt

SEQ ID NO: 4075110 - DNA, 25 bp, Homo sapien
acatccgcgcgacgggcccacgccg

SEQ ID NO: 4075111 - DNA, 25 bp, Homo sapien
ctggcggcgccgacatccgcgcgac

SEQ ID NO: 4075112 - DNA, 25 bp, Homo sapien
gccgcccagtgacggccactgctgc

SEQ ID NO: 4075113 - DNA, 25 bp, Homo sapien
ctgccccgtgtgaggctcgaactca

SEQ ID NO: 4075114 - DNA, 25 bp, Homo sapien
gcgctgcctactgcgctaacgaggc

SEQ ID NO: 4075115 - DNA, 25 bp, Homo sapien
ccgtgtgaggctcgaactcacgacc

SEQ ID NO: 4075116 - DNA, 25 bp, Homo sapien
gacgcgctgcctactgcgctaacga

SEQ ID NO: 4075117 - DNA, 25 bp, Homo sapien
cccaggcgggagtatcaatcgaggc

SEQ ID NO: 4075118 - DNA, 25 bp, Homo sapien
tcggagaccagcctacccacatagt

SEQ ID NO: 4075119 - DNA, 25 bp, Homo sapien
gaggcgggtagatcggttaagccca

SEQ ID NO: 4075120 - DNA, 25 bp, Homo sapien
cgaggctgtagtgacccgtgatggt

SEQ ID NO: 4075121 - DNA, 25 bp, Homo sapien
gaacgctgtcctagatcatgtgaag

SEQ ID NO: 4075122 - DNA, 25 bp, Homo sapien
gactgtagccatcttctgaacgctg

SEQ ID NO: 4075123 - DNA, 25 bp, Homo sapien
tacaaaccaacagactgtagccatc

SEQ ID NO: 4075124 - DNA, 25 bp, Homo sapien
tagatcatgtgaaggcacagcttca

SEQ ID NO: 4075125 - DNA, 25 bp, Homo sapien
ccccacgctgcgtgccgctgctggg

SEQ ID NO: 4075126 - DNA, 25 bp, Homo sapien
tccgcccccacgctgcgtgccgctg

SEQ ID NO: 4075127 - DNA, 25 bp, Homo sapien
cacgctgcgtgccgctgctgggttc

SEQ ID NO: 4075128 - DNA, 25 bp, Homo sapien
cgctgctgggttccgccacgcccgt

SEQ ID NO: 4075129 - DNA, 25 bp, Homo sapien
agagaacgccgcagatccaggtatc

SEQ ID NO: 4075130 - DNA, 25 bp, Homo sapien
tatttcccgcttgagcaagagaacg

SEQ ID NO: 4075131 - DNA, 25 bp, Homo sapien
cagacaccggtttggaagggaagca

SEQ ID NO: 4075132 - DNA, 25 bp, Homo sapien
ttgttgcctaagttccagacaccgg

SEQ ID NO: 4075133 - DNA, 25 bp, Homo sapien
ggcacaggcttagatcttagaatag

SEQ ID NO: 4075134 - DNA, 25 bp, Homo sapien
caagataattaggtattcagtcacc

SEQ ID NO: 4075135 - DNA, 25 bp, Homo sapien
gagaatgtagactctgtgagtggca

SEQ ID NO: 4075136 - DNA, 25 bp, Homo sapien
tgctagactgcagagcccgtttctt

SEQ ID NO: 4075137 - DNA, 25 bp, Homo sapien
gaagttttctactcagctagagaga

SEQ ID NO: 4075138 - DNA, 25 bp, Homo sapien
tggcacaaacgcagggtaaacgggc

SEQ ID NO: 4075139 - DNA, 25 bp, Homo sapien
taggcctgagttgtgaagcgcaacc

SEQ ID NO: 4075140 - DNA, 25 bp, Homo sapien
gctagagagatctccctaagaggat

SEQ ID NO: 4075141 - DNA, 25 bp, Homo sapien
tctgggccctctactgattgttaaa

SEQ ID NO: 4075142 - DNA, 25 bp, Homo sapien
tgtagcaggtcacaacttacccttg

SEQ ID NO: 4075143 - DNA, 25 bp, Homo sapien
taccgtgtgatcagtaagattcctg

SEQ ID NO: 4075144 - DNA, 25 bp, Homo sapien
ggtgacctatatcccatgtgagtgg

SEQ ID NO: 4075145 - DNA, 25 bp, Homo sapien
tcctctgggacagcagtcgagtcaa

SEQ ID NO: 4075146 - DNA, 25 bp, Homo sapien
ttgttacaacgcacgtgaggccgcg

SEQ ID NO: 4075147 - DNA, 25 bp, Homo sapien
ccttccttggtgaacagtggagcaa

SEQ ID NO: 4075148 - DNA, 25 bp, Homo sapien
tcatgatgtacaacgagcaaggcat

SEQ ID NO: 4075149 - DNA, 25 bp, Homo sapien
gactttgggcaataaaggacctaga

SEQ ID NO: 4075150 - DNA, 25 bp, Homo sapien
catctggcaagtgcctaaagccccg

SEQ ID NO: 4075151 - DNA, 25 bp, Homo sapien
tactgtattaacaagctgactcctg

SEQ ID NO: 4075152 - DNA, 25 bp, Homo sapien
tgtttaggcaaagtcactaccccgc

SEQ ID NO: 4075153 - DNA, 25 bp, Homo sapien
tcccatttcctcagtgctctttagc

SEQ ID NO: 4075154 - DNA, 25 bp, Homo sapien
aaagggcaaagacgtggcacatggc

SEQ ID NO: 4075155 - DNA, 25 bp, Homo sapien
tgttgtatccaaacatcacgttctg

SEQ ID NO: 4075156 - DNA, 25 bp, Homo sapien
tttattacaagtgcgctagctccca

SEQ ID NO: 4075157 - DNA, 25 bp, Homo sapien
atgcatccgagctcgctgctggcaa

SEQ ID NO: 4075158 - DNA, 25 bp, Homo sapien
gtctgatgaccgcaaaacgctcttc

SEQ ID NO: 4075159 - DNA, 25 bp, Homo sapien
tttctctgcgctgtgtagctcctac

SEQ ID NO: 4075160 - DNA, 25 bp, Homo sapien
ttcagacgcgccgaccttggtggct

SEQ ID NO: 4075161 - DNA, 25 bp, Homo sapien
gcctccctggagatgtcacacgccg

SEQ ID NO: 4075162 - DNA, 25 bp, Homo sapien
acgttcaagacgactggcagctccg

SEQ ID NO: 4075163 - DNA, 25 bp, Homo sapien
gacgattctcgacttcggacggcct

SEQ ID NO: 4075164 - DNA, 25 bp, Homo sapien
ttacagctgacgattctcgacttcg

SEQ ID NO: 4075165 - DNA, 25 bp, Homo sapien
gctttcagcacatatccaggccact

SEQ ID NO: 4075166 - DNA, 25 bp, Homo sapien
taatactgtgtaccatgaggagaag

SEQ ID NO: 4075167 - DNA, 25 bp, Homo sapien
tcaacgctgaatggcaggctccaag

SEQ ID NO: 4075168 - DNA, 25 bp, Homo sapien
tacgtgggtaacaacagacgctttc

SEQ ID NO: 4075169 - DNA, 25 bp, Homo sapien
gccctggaattgacgtgtgagccta

SEQ ID NO: 4075170 - DNA, 25 bp, Homo sapien
tgatggcaatgctcttcgggagaca

SEQ ID NO: 4075171 - DNA, 25 bp, Homo sapien
tgcgtcctaagtcgagtagcctctg

SEQ ID NO: 4075172 - DNA, 25 bp, Homo sapien
gattcagaccacgtgtagctgccct

SEQ ID NO: 4075173 - DNA, 25 bp, Homo sapien
gctggaggggcgtatttcaacctaa

SEQ ID NO: 4075174 - DNA, 25 bp, Homo sapien
aatctgtggagtccagactttctgc

SEQ ID NO: 4075175 - DNA, 25 bp, Homo sapien
cagactttctgctggaggggcgtat

SEQ ID NO: 4075176 - DNA, 25 bp, Homo sapien
tcaatctgtggagtccagactttct

SEQ ID NO: 4075177 - DNA, 25 bp, Homo sapien
cctattacaactacatcagacatcc

SEQ ID NO: 4075178 - DNA, 25 bp, Homo sapien
gaaccctattacaactacatcagac

SEQ ID NO: 4075179 - DNA, 25 bp, Homo sapien
aagaaccctattacaactacatcag

SEQ ID NO: 4075180 - DNA, 25 bp, Homo sapien
tacaactacatcagacatccactgg

SEQ ID NO: 4075181 - DNA, 25 bp, Homo sapien
tgtgcactggtcctgcgggagcctg

SEQ ID NO: 4075182 - DNA, 25 bp, Homo sapien
tgcactggtcctgcgggagcctggt

SEQ ID NO: 4075183 - DNA, 25 bp, Homo sapien
aaaccaagcatttgtgtgcactggt

SEQ ID NO: 4075184 - DNA, 25 bp, Homo sapien
ccaagcatttgtgtgcactggtcct

SEQ ID NO: 4075185 - DNA, 25 bp, Homo sapien
tgtgactggaaccattgctactgcc

SEQ ID NO: 4075186 - DNA, 25 bp, Homo sapien
tagttggcgtagctgacagtcaggc

SEQ ID NO: 4075187 - DNA, 25 bp, Homo sapien
cagttgtaacaagataggttcccgc

SEQ ID NO: 4075188 - DNA, 25 bp, Homo sapien
acgtagccgctgctgcacatgggac

SEQ ID NO: 4075189 - DNA, 25 bp, Homo sapien
ggaatgtttcctgtggagccgccac

SEQ ID NO: 4075190 - DNA, 25 bp, Homo sapien
aggcaggaatgtttcctgtggagcc

SEQ ID NO: 4075191 - DNA, 25 bp, Homo sapien
ggtggtggtggttcggattcgaggc

SEQ ID NO: 4075192 - DNA, 25 bp, Homo sapien
ggtggttcggattcgaggcaggaat

SEQ ID NO: 4075193 - DNA, 25 bp, Homo sapien
actgctttcagggacggaggacagc

SEQ ID NO: 4075194 - DNA, 25 bp, Homo sapien
ctgggcaacgtggccatgttggcaa

SEQ ID NO: 4075195 - DNA, 25 bp, Homo sapien
gaaactgctttcagggacggaggac

SEQ ID NO: 4075196 - DNA, 25 bp, Homo sapien
tatagaaactgctttcagggacgga

SEQ ID NO: 4075197 - DNA, 25 bp, Homo sapien
tgtgcacggaattcagcatgcggat

SEQ ID NO: 4075198 - DNA, 25 bp, Homo sapien
gacgagaggagcttcatgtccgcgc

SEQ ID NO: 4075199 - DNA, 25 bp, Homo sapien
cattattaggacaggaagtttgccc

SEQ ID NO: 4075200 - DNA, 25 bp, Homo sapien
gatgcatgcacgactttggtccggg

SEQ ID NO: 4075201 - DNA, 25 bp, Homo sapien
tcggagctctcttcccgggcctgta

SEQ ID NO: 4075202 - DNA, 25 bp, Homo sapien
agcgctgtcggagctctcttcccgg

SEQ ID NO: 4075203 - DNA, 25 bp, Homo sapien
agtactccgaggaactgccttcccg

SEQ ID NO: 4075204 - DNA, 25 bp, Homo sapien
ttctcctcagcgctgtcggagctct

SEQ ID NO: 4075205 - DNA, 25 bp, Homo sapien
gaggggttcaggcaccgtctctctg

SEQ ID NO: 4075206 - DNA, 25 bp, Homo sapien
tggggggcactcgagccacaccact

SEQ ID NO: 4075207 - DNA, 25 bp, Homo sapien
gccgaggggttcaggcaccgtctct

SEQ ID NO: 4075208 - DNA, 25 bp, Homo sapien
ttcaggcaccgtctctctgacttct

SEQ ID NO: 4075209 - DNA, 25 bp, Homo sapien
gactcaaatttattcagatcttctt

SEQ ID NO: 4075210 - DNA, 25 bp, Homo sapien
ctcaaatttattcagatcttcttca

SEQ ID NO: 4075211 - DNA, 25 bp, Homo sapien
agactcaaatttattcagatcttct

SEQ ID NO: 4075212 - DNA, 25 bp, Homo sapien
gagactcaaatttattcagatcttc

SEQ ID NO: 4075213 - DNA, 25 bp, Homo sapien
tgcaaacgcagtttcctaagccagt

SEQ ID NO: 4075214 - DNA, 25 bp, Homo sapien
taagccagtctagaatcccattctg

SEQ ID NO: 4075215 - DNA, 25 bp, Homo sapien
gctccgctctgcgaggacgggatac

SEQ ID NO: 4075216 - DNA, 25 bp, Homo sapien
tgatgtgtccatctgggtccggtag

SEQ ID NO: 4075217 - DNA, 25 bp, Homo sapien
actgtggcttccacaaccacagact

SEQ ID NO: 4075218 - DNA, 25 bp, Homo sapien
agacctcacttccaggcctttctgt

SEQ ID NO: 4075219 - DNA, 25 bp, Homo sapien
tgccaacactgctgtgctatgactg

SEQ ID NO: 4075220 - DNA, 25 bp, Homo sapien
gttgtcacaggccaccctgaactgc

SEQ ID NO: 4075221 - DNA, 25 bp, Homo sapien
tccagacacgcccatcacggtacct

SEQ ID NO: 4075222 - DNA, 25 bp, Homo sapien
catcacggtacctactttagaaagg

SEQ ID NO: 4075223 - DNA, 25 bp, Homo sapien
acgcccatcacggtacctactttag

SEQ ID NO: 4075224 - DNA, 25 bp, Homo sapien
actttagaaagggagggattgccag

SEQ ID NO: 4075225 - DNA, 25 bp, Homo sapien
atggtcatttttcaacacgtgagaa

SEQ ID NO: 4075226 - DNA, 25 bp, Homo sapien
ggaagtgctgagaaacctcctgaca

SEQ ID NO: 4075227 - DNA, 25 bp, Homo sapien
tgagaaacctcctgacatggtcatt

SEQ ID NO: 4075228 - DNA, 25 bp, Homo sapien
cgtgagaaggtaatgaggccaggta

SEQ ID NO: 4075229 - DNA, 25 bp, Homo sapien
cacataaaatgcgtccggaccagct

SEQ ID NO: 4075230 - DNA, 25 bp, Homo sapien
ggtttcgctccacataaaatgcgtc

SEQ ID NO: 4075231 - DNA, 25 bp, Homo sapien
tccggaccagctaagcaaggaatga

SEQ ID NO: 4075232 - DNA, 25 bp, Homo sapien
gtccagatccacgtggtttcgctcc

SEQ ID NO: 4075233 - DNA, 25 bp, Homo sapien
tgttcttcaatgcccaagaggccaa

SEQ ID NO: 4075234 - DNA, 25 bp, Homo sapien
gttcttcaatgcccaagaggccaaa

SEQ ID NO: 4075235 - DNA, 25 bp, Homo sapien
tcttcaatgcccaagaggccaaaaa

SEQ ID NO: 4075236 - DNA, 25 bp, Homo sapien
ttcttcaatgcccaagaggccaaaa

SEQ ID NO: 4075237 - DNA, 25 bp, Homo sapien
ttattgaagaatcagaccacaagac

SEQ ID NO: 4075238 - DNA, 25 bp, Homo sapien
cagaggaagatttggttactgatgt

SEQ ID NO: 4075239 - DNA, 25 bp, Homo sapien
tttgaaataaattccgtcacttcag

SEQ ID NO: 4075240 - DNA, 25 bp, Homo sapien
taaattccgtcacttcagaggaaga

SEQ ID NO: 4075241 - DNA, 25 bp, Homo sapien
cctaggctggaacttacgggtcata

SEQ ID NO: 4075242 - DNA, 25 bp, Homo sapien
cagtatttcaagaggtgtgcagtgc

SEQ ID NO: 4075243 - DNA, 25 bp, Homo sapien
tgtccacgcgcctgtgaacgggtgt

SEQ ID NO: 4075244 - DNA, 25 bp, Homo sapien
taacaccagggttggcctgtccacg

SEQ ID NO: 4075245 - DNA, 25 bp, Homo sapien
gtgtgtgataatcccttcaggtcta

SEQ ID NO: 4075246 - DNA, 25 bp, Homo sapien
gtgataatcccttcaggtctatctt

SEQ ID NO: 4075247 - DNA, 25 bp, Homo sapien
gtgtgataatcccttcaggtctatc

SEQ ID NO: 4075248 - DNA, 25 bp, Homo sapien
ttgtgtgtgataatcccttcaggtc

SEQ ID NO: 4075249 - DNA, 25 bp, Homo sapien
gcgggagtccactcgctttagagtt

SEQ ID NO: 4075250 - DNA, 25 bp, Homo sapien
agggaacctcgtgcatctcacggat

SEQ ID NO: 4075251 - DNA, 25 bp, Homo sapien
gagggtcgtggagcacgaggcagcg

SEQ ID NO: 4075252 - DNA, 25 bp, Homo sapien
tcacggatgcgggagtccactcgct

SEQ ID NO: 4075253 - DNA, 25 bp, Homo sapien
acagaatttgtaacatgtttcagga

SEQ ID NO: 4075254 - DNA, 25 bp, Homo sapien
ctaaagttttagacagagagatcag

SEQ ID NO: 4075255 - DNA, 25 bp, Homo sapien
taacatgtttcaggaaggcaccaaa

SEQ ID NO: 4075256 - DNA, 25 bp, Homo sapien
acatcccagactatgcataaactga

SEQ ID NO: 4075257 - DNA, 25 bp, Homo sapien
tatacatatgcgactgttcccataa

SEQ ID NO: 4075258 - DNA, 25 bp, Homo sapien
gggcttacaggcctgcaccttcacg

SEQ ID NO: 4075259 - DNA, 25 bp, Homo sapien
gaaagcatagaaatactctctaaca

SEQ ID NO: 4075260 - DNA, 25 bp, Homo sapien
gaaatactctctaacatcagtcttc

SEQ ID NO: 4075261 - DNA, 25 bp, Homo sapien
gattcaagtttgaaaggcaacacaa

SEQ ID NO: 4075262 - DNA, 25 bp, Homo sapien
ttcttaaaggtacaatcgacaactc

SEQ ID NO: 4075263 - DNA, 25 bp, Homo sapien
tccaacataaacatactggtgttac

SEQ ID NO: 4075264 - DNA, 25 bp, Homo sapien
agtctgtagttctattggattcaag

SEQ ID NO: 4075265 - DNA, 25 bp, Homo sapien
cagctgagttgggatcagtaaattt

SEQ ID NO: 4075266 - DNA, 25 bp, Homo sapien
caagtgagccttttatttgctacca

SEQ ID NO: 4075267 - DNA, 25 bp, Homo sapien
caatgcaggaattgtcaagtgagcc

SEQ ID NO: 4075268 - DNA, 25 bp, Homo sapien
ttgctaccaggtaagtcagctgagt

SEQ ID NO: 4075269 - DNA, 25 bp, Homo sapien
tagagggtggtgacatctcaatgcc

SEQ ID NO: 4075270 - DNA, 25 bp, Homo sapien
gttcctggcaaagatgtacagcctg

SEQ ID NO: 4075271 - DNA, 25 bp, Homo sapien
caatggccggaatgggagtaagcct

SEQ ID NO: 4075272 - DNA, 25 bp, Homo sapien
gattccgaacttgatcctctgggta

SEQ ID NO: 4075273 - DNA, 25 bp, Homo sapien
tcttgaacgtcatataaacaggacc

SEQ ID NO: 4075274 - DNA, 25 bp, Homo sapien
tgagtttgggtacatttatatgccc

SEQ ID NO: 4075275 - DNA, 25 bp, Homo sapien
gcccatgtgatcactaatccttgaa

SEQ ID NO: 4075276 - DNA, 25 bp, Homo sapien
tccttgaatcaagacgcagtgcttt

SEQ ID NO: 4075277 - DNA, 25 bp, Homo sapien
ctctggtggtcacttttacatccca

SEQ ID NO: 4075278 - DNA, 25 bp, Homo sapien
ggcaatcctcgaacactactgaatg

SEQ ID NO: 4075279 - DNA, 25 bp, Homo sapien
tacatcccaacaactctctcttggt

SEQ ID NO: 4075280 - DNA, 25 bp, Homo sapien
cacattcggcaatcctcgaacacta

SEQ ID NO: 4075281 - DNA, 25 bp, Homo sapien
gccactgcgcatggtctgataatat

SEQ ID NO: 4075282 - DNA, 25 bp, Homo sapien
agccactgcgcatggtctgataata

SEQ ID NO: 4075283 - DNA, 25 bp, Homo sapien
ccactgcgcatggtctgataatatt

SEQ ID NO: 4075284 - DNA, 25 bp, Homo sapien
gcagagggatgctacagtcagggcc

SEQ ID NO: 4075285 - DNA, 25 bp, Homo sapien
tcattggagcggaaggggagcgtca

SEQ ID NO: 4075286 - DNA, 25 bp, Homo sapien
agcaggacagtgctgttgtcattgg

SEQ ID NO: 4075287 - DNA, 25 bp, Homo sapien
gcttcaagggcagggcctattctgg

SEQ ID NO: 4075288 - DNA, 25 bp, Homo sapien
cactcgaatgctgggatcaatcacc

SEQ ID NO: 4075289 - DNA, 25 bp, Homo sapien
tcaatcaccaatgtgggaaccatgt

SEQ ID NO: 4075290 - DNA, 25 bp, Homo sapien
tatcagtggctgacgaggacttgga

SEQ ID NO: 4075291 - DNA, 25 bp, Homo sapien
tgggcgactgcatacccactggctg

SEQ ID NO: 4075292 - DNA, 25 bp, Homo sapien
ctgcttgtcagctgaggagcccctg

SEQ ID NO: 4075293 - DNA, 25 bp, Homo sapien
agcagtttcagggaggtgcaggtgc

SEQ ID NO: 4075294 - DNA, 25 bp, Homo sapien
gtgagtggtgcagctgaaagaaaca

SEQ ID NO: 4075295 - DNA, 25 bp, Homo sapien
gtgacccccctcgtgacagcagttt

SEQ ID NO: 4075296 - DNA, 25 bp, Homo sapien
gcgttgtcagaacgggactttagaa

SEQ ID NO: 4075297 - DNA, 25 bp, Homo sapien
acaggtggctctcgatggcgttgtc

SEQ ID NO: 4075298 - DNA, 25 bp, Homo sapien
gtggctctcgatggcgttgtcagaa

SEQ ID NO: 4075299 - DNA, 25 bp, Homo sapien
tcgatggcgttgtcagaacgggact

SEQ ID NO: 4075300 - DNA, 25 bp, Homo sapien
ctgtgttttcctaagggcctcttgg

SEQ ID NO: 4075301 - DNA, 25 bp, Homo sapien
agcgactcctccgtggaatgtgctg

SEQ ID NO: 4075302 - DNA, 25 bp, Homo sapien
ggcattctccaaactattactgaca

SEQ ID NO: 4075303 - DNA, 25 bp, Homo sapien
gcagcgactcctccgtggaatgtgc

SEQ ID NO: 4075304 - DNA, 25 bp, Homo sapien
aaaaagaaacacgtgtgatcagtgc

SEQ ID NO: 4075305 - DNA, 25 bp, Homo sapien
tgtgatcagtgcgttctcgcacaca

SEQ ID NO: 4075306 - DNA, 25 bp, Homo sapien
gccttgacaaccagcatcagcagtt

SEQ ID NO: 4075307 - DNA, 25 bp, Homo sapien
tgctggtagtggcaaaccttcctgc

SEQ ID NO: 4075308 - DNA, 25 bp, Homo sapien
gccatttctgttcacggtgtgagta

SEQ ID NO: 4075309 - DNA, 25 bp, Homo sapien
cactatgacatgaatacagcatccc

SEQ ID NO: 4075310 - DNA, 25 bp, Homo sapien
ggagcaaatatgattggtaataaaa

SEQ ID NO: 4075311 - DNA, 25 bp, Homo sapien
cctctggaggacagatgtaccacta

SEQ ID NO: 4075312 - DNA, 25 bp, Homo sapien
ggagtcaaatgctcataaagctgca

SEQ ID NO: 4075313 - DNA, 25 bp, Homo sapien
ggtggcctcgtcctcagctgagtgt

SEQ ID NO: 4075314 - DNA, 25 bp, Homo sapien
tgtgaaaatgggcagaacgtacatc

SEQ ID NO: 4075315 - DNA, 25 bp, Homo sapien
taaaaggcatgcaggatgctcacag

SEQ ID NO: 4075316 - DNA, 25 bp, Homo sapien
cttagaccaagtgaaagccaacgct

SEQ ID NO: 4075317 - DNA, 25 bp, Homo sapien
cagagggagtctaaagtcgagagcc

SEQ ID NO: 4075318 - DNA, 25 bp, Homo sapien
tcacaaatagccacagggcagcacg

SEQ ID NO: 4075319 - DNA, 25 bp, Homo sapien
gctcccagagtgaccagatgcaaat

SEQ ID NO: 4075320 - DNA, 25 bp, Homo sapien
agcaccctctccattgcaggcatag

SEQ ID NO: 4075321 - DNA, 25 bp, Homo sapien
gatgtgacactcgtaatgttagaaa

SEQ ID NO: 4075322 - DNA, 25 bp, Homo sapien
gcaatctaactccactgatgccaca

SEQ ID NO: 4075323 - DNA, 25 bp, Homo sapien
ttagaaacagtgagctgcaacagct

SEQ ID NO: 4075324 - DNA, 25 bp, Homo sapien
tgtcagtaaaatcggctagcaggct

SEQ ID NO: 4075325 - DNA, 25 bp, Homo sapien
caaaagatcagaccagaaagggctc

SEQ ID NO: 4075326 - DNA, 25 bp, Homo sapien
caaaacaagagtgcatccaaggtcc

SEQ ID NO: 4075327 - DNA, 25 bp, Homo sapien
tccaaggtccagaaagtgtcagtaa

SEQ ID NO: 4075328 - DNA, 25 bp, Homo sapien
aaataagaaagtagggccaggcgca

SEQ ID NO: 4075329 - DNA, 25 bp, Homo sapien
acctggccttgcatgccagcttttg

SEQ ID NO: 4075330 - DNA, 25 bp, Homo sapien
agtgcacctggccttgcatgccagc

SEQ ID NO: 4075331 - DNA, 25 bp, Homo sapien
ggccttgcatgccagcttttgaaaa

SEQ ID NO: 4075332 - DNA, 25 bp, Homo sapien
tctccggtgacaaggatattacctc

SEQ ID NO: 4075333 - DNA, 25 bp, Homo sapien
aaccactctccggtgacaaggatat

SEQ ID NO: 4075334 - DNA, 25 bp, Homo sapien
cacaaaaaccactctccggtgacaa

SEQ ID NO: 4075335 - DNA, 25 bp, Homo sapien
caaggatattacctcattgtaatgg

SEQ ID NO: 4075336 - DNA, 25 bp, Homo sapien
caacgaagcaaaagctgttgctgat

SEQ ID NO: 4075337 - DNA, 25 bp, Homo sapien
gcttacgaaaagcaacgaagcaaaa

SEQ ID NO: 4075338 - DNA, 25 bp, Homo sapien
tgattttcaacagcttacgaaaagc

SEQ ID NO: 4075339 - DNA, 25 bp, Homo sapien
gaaaagcaacgaagcaaaagctgtt

SEQ ID NO: 4075340 - DNA, 25 bp, Homo sapien
ccgccgttcaggctgctctggatct

SEQ ID NO: 4075341 - DNA, 25 bp, Homo sapien
caggctgctctggatctgcgtgagc

SEQ ID NO: 4075342 - DNA, 25 bp, Homo sapien
tcaggctgctctggatctgcgtgag

SEQ ID NO: 4075343 - DNA, 25 bp, Homo sapien
gctgctctggatctgcgtgagctcc

SEQ ID NO: 4075344 - DNA, 25 bp, Homo sapien
gctgaaggccgggtggttggaggcc

SEQ ID NO: 4075345 - DNA, 25 bp, Homo sapien
tgaaggccgggtggttggaggccat

SEQ ID NO: 4075346 - DNA, 25 bp, Homo sapien
ctgcttctggtggaagctgaaggcc

SEQ ID NO: 4075347 - DNA, 25 bp, Homo sapien
ggaagctgaaggccgggtggttgga

SEQ ID NO: 4075348 - DNA, 25 bp, Homo sapien
tcggccgggttgttggccttgatct

SEQ ID NO: 4075349 - DNA, 25 bp, Homo sapien
agcccgtagttgtggatgatggagt

SEQ ID NO: 4075350 - DNA, 25 bp, Homo sapien
tgatctccgagtcgcgcagcgagtg

SEQ ID NO: 4075351 - DNA, 25 bp, Homo sapien
agcaggaactcatcgcccgtgcggc

SEQ ID NO: 4075352 - DNA, 25 bp, Homo sapien
ggtacacgccgtccctctgcagcgg

SEQ ID NO: 4075353 - DNA, 25 bp, Homo sapien
tctgcagcgggcagcgcttctccac

SEQ ID NO: 4075354 - DNA, 25 bp, Homo sapien
agctccgagaaccagcggtacacgc

SEQ ID NO: 4075355 - DNA, 25 bp, Homo sapien
gcgacggcagctccgagaaccagcg

SEQ ID NO: 4075356 - DNA, 25 bp, Homo sapien
gccccaccggcaacggattccgcag

SEQ ID NO: 4075357 - DNA, 25 bp, Homo sapien
aggtctgccagatgaatccccgccc

SEQ ID NO: 4075358 - DNA, 25 bp, Homo sapien
ccgcagcccgtggacacactttctt

SEQ ID NO: 4075359 - DNA, 25 bp, Homo sapien
tcccgttcacgtggctatttctctg

SEQ ID NO: 4075360 - DNA, 25 bp, Homo sapien
ctccatagcagggagctccacccct

SEQ ID NO: 4075361 - DNA, 25 bp, Homo sapien
tgatgcgagaggtgggctcccacgc

SEQ ID NO: 4075362 - DNA, 25 bp, Homo sapien
cagaggttctccatagcagggagct

SEQ ID NO: 4075363 - DNA, 25 bp, Homo sapien
ctgccccaatggggactctgcgtgg

SEQ ID NO: 4075364 - DNA, 25 bp, Homo sapien
ggaacgcaattcgatgggccaacgc

SEQ ID NO: 4075365 - DNA, 25 bp, Homo sapien
gaacgcaattcgatgggccaacgcg

SEQ ID NO: 4075366 - DNA, 25 bp, Homo sapien
caaggcacaagaggggtgctgtctc

SEQ ID NO: 4075367 - DNA, 25 bp, Homo sapien
gctcaagaatctgcgtgctccaagg

SEQ ID NO: 4075368 - DNA, 25 bp, Homo sapien
agtggaacagaaggcgccggcgaga

SEQ ID NO: 4075369 - DNA, 25 bp, Homo sapien
tgctccaaggcacaagaggggtgct

SEQ ID NO: 4075370 - DNA, 25 bp, Homo sapien
gctctgcagagcgtttctcgcgaca

SEQ ID NO: 4075371 - DNA, 25 bp, Homo sapien
cgtgctggatccgtgccgccagcat

SEQ ID NO: 4075372 - DNA, 25 bp, Homo sapien
ccagcatggattccttcagcctggc

SEQ ID NO: 4075373 - DNA, 25 bp, Homo sapien
ttctggaaagctccccgctcaggct

SEQ ID NO: 4075374 - DNA, 25 bp, Homo sapien
cactgcttcagaatctgtgagctcc

SEQ ID NO: 4075375 - DNA, 25 bp, Homo sapien
tccatctcctttggagctcagctgc

SEQ ID NO: 4075376 - DNA, 25 bp, Homo sapien
caccagcaggacctggaggcaggtc

SEQ ID NO: 4075377 - DNA, 25 bp, Homo sapien
tgatcttggtcctggctggcaggcc

SEQ ID NO: 4075378 - DNA, 25 bp, Homo sapien
gaagcaatgggatccagctctatca

SEQ ID NO: 4075379 - DNA, 25 bp, Homo sapien
tgaagcaatgggatccagctctatc

SEQ ID NO: 4075380 - DNA, 25 bp, Homo sapien
aagcaatgggatccagctctatcat

SEQ ID NO: 4075381 - DNA, 25 bp, Homo sapien
ctgaagcaatgggatccagctctat

SEQ ID NO: 4075382 - DNA, 25 bp, Homo sapien
gaaggtgctggcacagattccacga

SEQ ID NO: 4075383 - DNA, 25 bp, Homo sapien
tgccgcgtgtggtccgaaaatcatc

SEQ ID NO: 4075384 - DNA, 25 bp, Homo sapien
gaagtttcaggtctttcccataagc

SEQ ID NO: 4075385 - DNA, 25 bp, Homo sapien
tcccataagcagagcccttgaaggt

SEQ ID NO: 4075386 - DNA, 25 bp, Homo sapien
ctctgttgggtcttgatgttctcct

SEQ ID NO: 4075387 - DNA, 25 bp, Homo sapien
ttgatgttctcctccgtccagcaaa

SEQ ID NO: 4075388 - DNA, 25 bp, Homo sapien
tgttgggtcttgatgttctcctccg

SEQ ID NO: 4075389 - DNA, 25 bp, Homo sapien
gatgttctcctccgtccagcaaagc

SEQ ID NO: 4075390 - DNA, 25 bp, Homo sapien
tcctctctggtcagcaaaatctcct

SEQ ID NO: 4075391 - DNA, 25 bp, Homo sapien
cggcccctgccatttgcctggttgt

SEQ ID NO: 4075392 - DNA, 25 bp, Homo sapien
cctccccgcccaggaatctggacgg

SEQ ID NO: 4075393 - DNA, 25 bp, Homo sapien
aggaatctggacggcccctgccatt

SEQ ID NO: 4075394 - DNA, 25 bp, Homo sapien
tcgtcaacatctgtccaaatagtac

SEQ ID NO: 4075395 - DNA, 25 bp, Homo sapien
ctttcgtcaacatctgtccaaatag

SEQ ID NO: 4075396 - DNA, 25 bp, Homo sapien
catctttcgtcaacatctgtccaaa

SEQ ID NO: 4075397 - DNA, 25 bp, Homo sapien
tcatctttcgtcaacatctgtccaa

SEQ ID NO: 4075398 - DNA, 25 bp, Homo sapien
taaggattggaaacgaccatcggca

SEQ ID NO: 4075399 - DNA, 25 bp, Homo sapien
caaagcgtttgctcctaaggattgg

SEQ ID NO: 4075400 - DNA, 25 bp, Homo sapien
gtgatgcgcagccagtgtaacggcc

SEQ ID NO: 4075401 - DNA, 25 bp, Homo sapien
gttaaaccgattaaggtgactgaca

SEQ ID NO: 4075402 - DNA, 25 bp, Homo sapien
ctgtggaggacatctaggtgcatcg

SEQ ID NO: 4075403 - DNA, 25 bp, Homo sapien
tgtggaggacatctaggtgcatcgt

SEQ ID NO: 4075404 - DNA, 25 bp, Homo sapien
caaggtcacgaggtgtaccaggctg

SEQ ID NO: 4075405 - DNA, 25 bp, Homo sapien
cagaagcccctgaactgacctgcag

SEQ ID NO: 4075406 - DNA, 25 bp, Homo sapien
ctcttgactgcaagacggtggctcc

SEQ ID NO: 4075407 - DNA, 25 bp, Homo sapien
cagtgtacggtacagccgagggaaa

SEQ ID NO: 4075408 - DNA, 25 bp, Homo sapien
cttccgcacgcagtcgtgcccagcc

SEQ ID NO: 4075409 - DNA, 25 bp, Homo sapien
tgctggaggagactagtccaggcca

SEQ ID NO: 4075410 - DNA, 25 bp, Homo sapien
gggccagcttgactcctgcccgctg

SEQ ID NO: 4075411 - DNA, 25 bp, Homo sapien
tccgtgctggaggagactagtccag

SEQ ID NO: 4075412 - DNA, 25 bp, Homo sapien
ctccggaagtgtgccagcttggtcc

SEQ ID NO: 4075413 - DNA, 25 bp, Homo sapien
tccagttccggccagaatgctggtg

SEQ ID NO: 4075414 - DNA, 25 bp, Homo sapien
ttccggccagaatgctggtggcctc

SEQ ID NO: 4075415 - DNA, 25 bp, Homo sapien
ctggtggcctctccggaagtgtgcc

SEQ ID NO: 4075416 - DNA, 25 bp, Homo sapien
tgccatcgcaggggagtacttggga

SEQ ID NO: 4075417 - DNA, 25 bp, Homo sapien
atcgcaggggagtacttgggaccca

SEQ ID NO: 4075418 - DNA, 25 bp, Homo sapien
cttgccatcgcaggggagtacttgg

SEQ ID NO: 4075419 - DNA, 25 bp, Homo sapien
ccatcgcaggggagtacttgggacc

SEQ ID NO: 4075420 - DNA, 25 bp, Homo sapien
tcagggcttggcgtcttcttgctgg

SEQ ID NO: 4075421 - DNA, 25 bp, Homo sapien
gcttggcgtcttcttgctggggggc

SEQ ID NO: 4075422 - DNA, 25 bp, Homo sapien
acaaggtagtgtctgcttcgatggt

SEQ ID NO: 4075423 - DNA, 25 bp, Homo sapien
gggacaaggtagtgtctgcttcgat

SEQ ID NO: 4075424 - DNA, 25 bp, Homo sapien
aggacacccttgctggtctggcacg

SEQ ID NO: 4075425 - DNA, 25 bp, Homo sapien
cagtgtctgctttgatgacggggtc

SEQ ID NO: 4075426 - DNA, 25 bp, Homo sapien
ccttgctggtctggcacgaatgctg

SEQ ID NO: 4075427 - DNA, 25 bp, Homo sapien
tggcacgaatgctgtggccacggca

SEQ ID NO: 4075428 - DNA, 25 bp, Homo sapien
aaggcgaatacaccggctcgtggag

SEQ ID NO: 4075429 - DNA, 25 bp, Homo sapien
ggcaacacgtaccagggcacctggg

SEQ ID NO: 4075430 - DNA, 25 bp, Homo sapien
gcttcgaggtgctgggcgtctacac

SEQ ID NO: 4075431 - DNA, 25 bp, Homo sapien
attttgacgacggagggtcctactg

SEQ ID NO: 4075432 - DNA, 25 bp, Homo sapien
tgtgccgttgttgttttcatggagc

SEQ ID NO: 4075433 - DNA, 25 bp, Homo sapien
ggcggccttttctgtgccgttgttg

SEQ ID NO: 4075434 - DNA, 25 bp, Homo sapien
tcaggcggccttttctgtgccgttg

SEQ ID NO: 4075435 - DNA, 25 bp, Homo sapien
tttctgtgccgttgttgttttcatg

SEQ ID NO: 4075436 - DNA, 25 bp, Homo sapien
agcctgctccaggaggactgtgcag

SEQ ID NO: 4075437 - DNA, 25 bp, Homo sapien
ctccaggaggactgtgcaggccggg

SEQ ID NO: 4075438 - DNA, 25 bp, Homo sapien
tccaggaggactgtgcaggccgggc

SEQ ID NO: 4075439 - DNA, 25 bp, Homo sapien
atcaggcgagctctgagcgacagga

SEQ ID NO: 4075440 - DNA, 25 bp, Homo sapien
tgcaggagggagacggtgcgtgcag

SEQ ID NO: 4075441 - DNA, 25 bp, Homo sapien
tcaatcaggcgagctctgagcgaca

SEQ ID NO: 4075442 - DNA, 25 bp, Homo sapien
gacggtgcgtgcaggggcaccacgg

SEQ ID NO: 4075443 - DNA, 25 bp, Homo sapien
tcagcagagaagctgtgcgcagccg

SEQ ID NO: 4075444 - DNA, 25 bp, Homo sapien
ctgtgaaacatgctcagcagagaag

SEQ ID NO: 4075445 - DNA, 25 bp, Homo sapien
gcagccggggcaggggtgcgtccat

SEQ ID NO: 4075446 - DNA, 25 bp, Homo sapien
gcgcagccggggcaggggtgcgtcc

SEQ ID NO: 4075447 - DNA, 25 bp, Homo sapien
agctccggtcctcggacaccacgac

SEQ ID NO: 4075448 - DNA, 25 bp, Homo sapien
cagctccggtcctcggacaccacga

SEQ ID NO: 4075449 - DNA, 25 bp, Homo sapien
ctccggtcctcggacaccacgacgg

SEQ ID NO: 4075450 - DNA, 25 bp, Homo sapien
gctccggtcctcggacaccacgacg

SEQ ID NO: 4075451 - DNA, 25 bp, Homo sapien
tcccatttctcagtgactaccaggt

SEQ ID NO: 4075452 - DNA, 25 bp, Homo sapien
tttctcagtgactaccaggtgctgt

SEQ ID NO: 4075453 - DNA, 25 bp, Homo sapien
ctcagtgactaccaggtgctgtggc

SEQ ID NO: 4075454 - DNA, 25 bp, Homo sapien
gttcccatttctcagtgactaccag

SEQ ID NO: 4075455 - DNA, 25 bp, Homo sapien
cctgccgctgagaggcctggtcctg

SEQ ID NO: 4075456 - DNA, 25 bp, Homo sapien
tgagaggcctggtcctgctctaaac

SEQ ID NO: 4075457 - DNA, 25 bp, Homo sapien
ctgccgctgagaggcctggtcctgc

SEQ ID NO: 4075458 - DNA, 25 bp, Homo sapien
cgctgagaggcctggtcctgctcta

SEQ ID NO: 4075459 - DNA, 25 bp, Homo sapien
gagccaaagtggtgcctgaaatctg

SEQ ID NO: 4075460 - DNA, 25 bp, Homo sapien
ctgcactggtcctggcccgaacact

SEQ ID NO: 4075461 - DNA, 25 bp, Homo sapien
tctcctccttcggagccaaagtggt

SEQ ID NO: 4075462 - DNA, 25 bp, Homo sapien
gcatgggccacaaggaccctctggg

SEQ ID NO: 4075463 - DNA, 25 bp, Homo sapien
tgaggtctgcgtttggaggaagtgg

SEQ ID NO: 4075464 - DNA, 25 bp, Homo sapien
ggtgaggtctgcgtttggaggaagt

SEQ ID NO: 4075465 - DNA, 25 bp, Homo sapien
gtgaggtctgcgtttggaggaagtg

SEQ ID NO: 4075466 - DNA, 25 bp, Homo sapien
gaggtctgcgtttggaggaagtggg

SEQ ID NO: 4075467 - DNA, 25 bp, Homo sapien
gcatgggcgggtcagaaggagcagc

SEQ ID NO: 4075468 - DNA, 25 bp, Homo sapien
ggagcgacccgaataccttgcggca

SEQ ID NO: 4075469 - DNA, 25 bp, Homo sapien
taatttatgtgcttgtgaaacggcc

SEQ ID NO: 4075470 - DNA, 25 bp, Homo sapien
ccttgcggcataggattagcttgta

SEQ ID NO: 4075471 - DNA, 25 bp, Homo sapien
tgaatgccgtctgttggccagcgca

SEQ ID NO: 4075472 - DNA, 25 bp, Homo sapien
cacgttggacctgtgcccagggtct

SEQ ID NO: 4075473 - DNA, 25 bp, Homo sapien
tcacgttggacctgtgcccagggtc

SEQ ID NO: 4075474 - DNA, 25 bp, Homo sapien
cacaacaggcgaagaccccaaagac

SEQ ID NO: 4075475 - DNA, 25 bp, Homo sapien
gggggcacaacaggcgaagacccca

SEQ ID NO: 4075476 - DNA, 25 bp, Homo sapien
agagggggcacaacaggcgaagacc

SEQ ID NO: 4075477 - DNA, 25 bp, Homo sapien
aagacaggggtctgttccggggcat

SEQ ID NO: 4075478 - DNA, 25 bp, Homo sapien
cagaaacccagccaaagcggctcaa

SEQ ID NO: 4075479 - DNA, 25 bp, Homo sapien
ccaaagcggctcaagtggaagatgg

SEQ ID NO: 4075480 - DNA, 25 bp, Homo sapien
gatgggtgctggtcgatatgggcca

SEQ ID NO: 4075481 - DNA, 25 bp, Homo sapien
aacccagccaaagcggctcaagtgg

SEQ ID NO: 4075482 - DNA, 25 bp, Homo sapien
cctgggacctctcaggtgctctttg

SEQ ID NO: 4075483 - DNA, 25 bp, Homo sapien
aggtgctctttggaggtgttgacct

SEQ ID NO: 4075484 - DNA, 25 bp, Homo sapien
tgggacctctcaggtgctctttgga

SEQ ID NO: 4075485 - DNA, 25 bp, Homo sapien
tctcaggtgctctttggaggtgttg

SEQ ID NO: 4075486 - DNA, 25 bp, Homo sapien
ggacccagacaatgctgctgaccaa

SEQ ID NO: 4075487 - DNA, 25 bp, Homo sapien
gggctctggctttcggacccagaca

SEQ ID NO: 4075488 - DNA, 25 bp, Homo sapien
aggccaggcgctgagtgactgtccc

SEQ ID NO: 4075489 - DNA, 25 bp, Homo sapien
cccagcggatctccgagcagggtcc

SEQ ID NO: 4075490 - DNA, 25 bp, Homo sapien
tctctcggtgtttgggccatcggtg

SEQ ID NO: 4075491 - DNA, 25 bp, Homo sapien
ccgacttcctctctcggtgtttggg

SEQ ID NO: 4075492 - DNA, 25 bp, Homo sapien
tcctgtgtgcggaggcagcaccgac

SEQ ID NO: 4075493 - DNA, 25 bp, Homo sapien
tgtgcggaggcagcaccgacatcca

SEQ ID NO: 4075494 - DNA, 25 bp, Homo sapien
tcttcatgcacacaagccgcctgtt

SEQ ID NO: 4075495 - DNA, 25 bp, Homo sapien
tgaccgagccagaccctcgcggcgg

SEQ ID NO: 4075496 - DNA, 25 bp, Homo sapien
cagggccagggcaactggagcagac

SEQ ID NO: 4075497 - DNA, 25 bp, Homo sapien
ttatctagctctgggggccgtgctg

SEQ ID NO: 4075498 - DNA, 25 bp, Homo sapien
tctcggggacaaccctgggataaca

SEQ ID NO: 4075499 - DNA, 25 bp, Homo sapien
aacagccaccactggagtctatgct

SEQ ID NO: 4075500 - DNA, 25 bp, Homo sapien
cctgggcgaatgtcgagggaaagca

SEQ ID NO: 4075501 - DNA, 25 bp, Homo sapien
gcttgaaggccattccgcctcgtgg

SEQ ID NO: 4075502 - DNA, 25 bp, Homo sapien
gctgtttcggcgctcgctgctgagt

SEQ ID NO: 4075503 - DNA, 25 bp, Homo sapien
cagtgactccgagatcctcaagagc

SEQ ID NO: 4075504 - DNA, 25 bp, Homo sapien
gcaagcagagctcctttcgcagcga

SEQ ID NO: 4075505 - DNA, 25 bp, Homo sapien
gctgaagctgcgcaagtcggagtcc

SEQ ID NO: 4075506 - DNA, 25 bp, Homo sapien
gatggatcggccgagcgctctcctt

SEQ ID NO: 4075507 - DNA, 25 bp, Homo sapien
atcggccgagcgctctccttggcat

SEQ ID NO: 4075508 - DNA, 25 bp, Homo sapien
gtctgatggatcggccgagcgctct

SEQ ID NO: 4075509 - DNA, 25 bp, Homo sapien
ctggtctgatggatcggccgagcgc

SEQ ID NO: 4075510 - DNA, 25 bp, Homo sapien
tcctcaccgctgtgcacagccagca

SEQ ID NO: 4075511 - DNA, 25 bp, Homo sapien
ccactcacggcctcctcaccgctgt

SEQ ID NO: 4075512 - DNA, 25 bp, Homo sapien
acacggctctgcacaccactcacgg

SEQ ID NO: 4075513 - DNA, 25 bp, Homo sapien
ccgccatgtcctgctgtccacacac

SEQ ID NO: 4075514 - DNA, 25 bp, Homo sapien
gtggagccagggtgtacggctgcac

SEQ ID NO: 4075515 - DNA, 25 bp, Homo sapien
cagggtgtacggctgcacaggtgcg

SEQ ID NO: 4075516 - DNA, 25 bp, Homo sapien
cacctgtggagccagggtgtacggc

SEQ ID NO: 4075517 - DNA, 25 bp, Homo sapien
gcgcacctgtggagccagggtgtac

SEQ ID NO: 4075518 - DNA, 25 bp, Homo sapien
ggaactcccactagtgaaagtctga

SEQ ID NO: 4075519 - DNA, 25 bp, Homo sapien
aactcccactagtgaaagtctgaga

SEQ ID NO: 4075520 - DNA, 25 bp, Homo sapien
agtgggaactcccactagtgaaagt

SEQ ID NO: 4075521 - DNA, 25 bp, Homo sapien
cccagtgggaactcccactagtgaa

SEQ ID NO: 4075522 - DNA, 25 bp, Homo sapien
ctaattggtggctgcgttgagaatc

SEQ ID NO: 4075523 - DNA, 25 bp, Homo sapien
tgtcctgcgggcatagcaggaagtg

SEQ ID NO: 4075524 - DNA, 25 bp, Homo sapien
accaggcaggctcttctgtcggctc

SEQ ID NO: 4075525 - DNA, 25 bp, Homo sapien
ctgcgttgagaatcttgtcaccagg

SEQ ID NO: 4075526 - DNA, 25 bp, Homo sapien
ggcgtaaccacgcatgtccactggt

SEQ ID NO: 4075527 - DNA, 25 bp, Homo sapien
tgataaatccctgccggagtgcggc

SEQ ID NO: 4075528 - DNA, 25 bp, Homo sapien
gacaagaacgtgtgataaatccctg

SEQ ID NO: 4075529 - DNA, 25 bp, Homo sapien
actggtcacctggtggccttcgaca

SEQ ID NO: 4075530 - DNA, 25 bp, Homo sapien
gggtcgacattgtaggtcaccacca

SEQ ID NO: 4075531 - DNA, 25 bp, Homo sapien
gggagcaaagcctcccgctctgagc

SEQ ID NO: 4075532 - DNA, 25 bp, Homo sapien
aaagcctcccgctctgagcatgggc

SEQ ID NO: 4075533 - DNA, 25 bp, Homo sapien
tcaccaccatgtgtgactgtccagg

SEQ ID NO: 4075534 - DNA, 25 bp, Homo sapien
cccgctgagccatgcggagagtttg

SEQ ID NO: 4075535 - DNA, 25 bp, Homo sapien
agtttgggagaagtgcatacctgcc

SEQ ID NO: 4075536 - DNA, 25 bp, Homo sapien
tccagagtctgtcccggccatggac

SEQ ID NO: 4075537 - DNA, 25 bp, Homo sapien
ttatagtggaattgggtgtagtgtc

SEQ ID NO: 4075538 - DNA, 25 bp, Homo sapien
tgagctcactaatctcagccgtcac

SEQ ID NO: 4075539 - DNA, 25 bp, Homo sapien
gccgtcacatgctgttgggcaccag

SEQ ID NO: 4075540 - DNA, 25 bp, Homo sapien
ggtaagccctgagctcactaatctc

SEQ ID NO: 4075541 - DNA, 25 bp, Homo sapien
tgcagggaaaagcaccggctccttt

SEQ ID NO: 4075542 - DNA, 25 bp, Homo sapien
tcacacagccccagccgccccaggg

SEQ ID NO: 4075543 - DNA, 25 bp, Homo sapien
cacagccccagccgccccagggacc

SEQ ID NO: 4075544 - DNA, 25 bp, Homo sapien
ctcacacagccccagccgccccagg

SEQ ID NO: 4075545 - DNA, 25 bp, Homo sapien
cacacagccccagccgccccaggga

SEQ ID NO: 4075546 - DNA, 25 bp, Homo sapien
tccagaagtctgagggtaaacatgg

SEQ ID NO: 4075547 - DNA, 25 bp, Homo sapien
gtaggcttagatgggctcagcccca

SEQ ID NO: 4075548 - DNA, 25 bp, Homo sapien
gcagatgtgtcctccagagcgggta

SEQ ID NO: 4075549 - DNA, 25 bp, Homo sapien
tccagcaccgggaaaacggtgagtc

SEQ ID NO: 4075550 - DNA, 25 bp, Homo sapien
tgagtgccccatgcaacggctgttt

SEQ ID NO: 4075551 - DNA, 25 bp, Homo sapien
gacactgtgctcacggactttggga

SEQ ID NO: 4075552 - DNA, 25 bp, Homo sapien
gcagctcgcaattggacacagtcct

SEQ ID NO: 4075553 - DNA, 25 bp, Homo sapien
tactgtatctgtagggcagcaccca

SEQ ID NO: 4075554 - DNA, 25 bp, Homo sapien
agggctcagcgcctatcctggtggt

SEQ ID NO: 4075555 - DNA, 25 bp, Homo sapien
ctcaacatcggagtcgccattctgt

SEQ ID NO: 4075556 - DNA, 25 bp, Homo sapien
cggagtcgccattctgtttattaac

SEQ ID NO: 4075557 - DNA, 25 bp, Homo sapien
tcagcgcctatcctggtggtcatgg

SEQ ID NO: 4075558 - DNA, 25 bp, Homo sapien
gctgcagaccagaagtgaaccaaat

SEQ ID NO: 4075559 - DNA, 25 bp, Homo sapien
ctgataatgtcgctttctaaagggc

SEQ ID NO: 4075560 - DNA, 25 bp, Homo sapien
gaaccaaataaagactcctgctctg

SEQ ID NO: 4075561 - DNA, 25 bp, Homo sapien
tagtagcaagtggttgctgcagacc

SEQ ID NO: 4075562 - DNA, 25 bp, Homo sapien
gtaactgcatgacacaaaacggtac

SEQ ID NO: 4075563 - DNA, 25 bp, Homo sapien
ttccagtaactgcatgacacaaaac

SEQ ID NO: 4075564 - DNA, 25 bp, Homo sapien
acattccagtaactgcatgacacaa

SEQ ID NO: 4075565 - DNA, 25 bp, Homo sapien
cagtaactgcatgacacaaaacggt

SEQ ID NO: 4075566 - DNA, 25 bp, Homo sapien
gagttttcattaacccgagagcagc

SEQ ID NO: 4075567 - DNA, 25 bp, Homo sapien
caggtgtccctgagcgaagttgtgc

SEQ ID NO: 4075568 - DNA, 25 bp, Homo sapien
tggtgagagccattttccgccccaa

SEQ ID NO: 4075569 - DNA, 25 bp, Homo sapien
aatgccccgggtctgagagaatcga

SEQ ID NO: 4075570 - DNA, 25 bp, Homo sapien
tacacactgtagaaagacgggccct

SEQ ID NO: 4075571 - DNA, 25 bp, Homo sapien
ggttttatcgacagctggacccgtc

SEQ ID NO: 4075572 - DNA, 25 bp, Homo sapien
tgagccgagctaactgacaagacag

SEQ ID NO: 4075573 - DNA, 25 bp, Homo sapien
ggatttcacctcatacgtgcgacag

SEQ ID NO: 4075574 - DNA, 25 bp, Homo sapien
gattttcagtcgtcgccttccatag

SEQ ID NO: 4075575 - DNA, 25 bp, Homo sapien
cagaaactgaggaagcgactgtccc

SEQ ID NO: 4075576 - DNA, 25 bp, Homo sapien
gtgaggcagtcggtacgcagaaact

SEQ ID NO: 4075577 - DNA, 25 bp, Homo sapien
aggagtcagtcaactcaggcacctg

SEQ ID NO: 4075578 - DNA, 25 bp, Homo sapien
cccgcatgatcgtgtgtggaacaga

SEQ ID NO: 4075579 - DNA, 25 bp, Homo sapien
ccaggcgccgagtccataaagggca

SEQ ID NO: 4075580 - DNA, 25 bp, Homo sapien
gaacagaccgggagattccagcaga

SEQ ID NO: 4075581 - DNA, 25 bp, Homo sapien
tccttacagaggctaacgccgggtc

SEQ ID NO: 4075582 - DNA, 25 bp, Homo sapien
taaacaatgtcgtgtgacactttgg

SEQ ID NO: 4075583 - DNA, 25 bp, Homo sapien
tacaaaccagcgtctttactgaagg

SEQ ID NO: 4075584 - DNA, 25 bp, Homo sapien
tcatactgttacgaaaacaacactg

SEQ ID NO: 4075585 - DNA, 25 bp, Homo sapien
gaacgcttctctcgttacaaaccag

SEQ ID NO: 4075586 - DNA, 25 bp, Homo sapien
agtctccgcagtggtgaccagggca

SEQ ID NO: 4075587 - DNA, 25 bp, Homo sapien
tgtctcgctggctcaccactggtgg

SEQ ID NO: 4075588 - DNA, 25 bp, Homo sapien
tggttttcgagcaggaaacgtgctg

SEQ ID NO: 4075589 - DNA, 25 bp, Homo sapien
agctagtcggcacgtggaggctctc

SEQ ID NO: 4075590 - DNA, 25 bp, Homo sapien
tttctaagctcaatgggtggttccc

SEQ ID NO: 4075591 - DNA, 25 bp, Homo sapien
tatgaaaacgagactggcctccagc

SEQ ID NO: 4075592 - DNA, 25 bp, Homo sapien
gagcagcggtcactagcaagttcct

SEQ ID NO: 4075593 - DNA, 25 bp, Homo sapien
gatggaaaccatcaagcacacggcg

SEQ ID NO: 4075594 - DNA, 25 bp, Homo sapien
actgcggtgtgcctagggccacaca

SEQ ID NO: 4075595 - DNA, 25 bp, Homo sapien
tgcggtgtgcctagggccacacaga

SEQ ID NO: 4075596 - DNA, 25 bp, Homo sapien
gcggtgtgcctagggccacacagaa

SEQ ID NO: 4075597 - DNA, 25 bp, Homo sapien
gactgcggtgtgcctagggccacac

SEQ ID NO: 4075598 - DNA, 25 bp, Homo sapien
actcaacacggctgggtcctgggcg

SEQ ID NO: 4075599 - DNA, 25 bp, Homo sapien
gcactcagttgaacttccggcccag

SEQ ID NO: 4075600 - DNA, 25 bp, Homo sapien
tgggagaaagttcacaccctggcct

SEQ ID NO: 4075601 - DNA, 25 bp, Homo sapien
cagtgccgcgtcagagactaaacca

SEQ ID NO: 4075602 - DNA, 25 bp, Homo sapien
agaaacacattcagccgagggggag

SEQ ID NO: 4075603 - DNA, 25 bp, Homo sapien
agagagaaacacattcagccgaggg

SEQ ID NO: 4075604 - DNA, 25 bp, Homo sapien
tgagagagaaacacattcagccgag

SEQ ID NO: 4075605 - DNA, 25 bp, Homo sapien
aaacacattcagccgagggggaggc

SEQ ID NO: 4075606 - DNA, 25 bp, Homo sapien
cagtcctccgcaccgctctcctctc

SEQ ID NO: 4075607 - DNA, 25 bp, Homo sapien
tcagtcctccgcaccgctctcctct

SEQ ID NO: 4075608 - DNA, 25 bp, Homo sapien
gtcctccgcaccgctctcctctccg

SEQ ID NO: 4075609 - DNA, 25 bp, Homo sapien
agtcctccgcaccgctctcctctcc

SEQ ID NO: 4075610 - DNA, 25 bp, Homo sapien
ctgtcttcgtcgtcgaccccaccct

SEQ ID NO: 4075611 - DNA, 25 bp, Homo sapien
cctcttccgagtccgtctcctccag

SEQ ID NO: 4075612 - DNA, 25 bp, Homo sapien
tgtcttcgtcgtcgaccccaccctc

SEQ ID NO: 4075613 - DNA, 25 bp, Homo sapien
gcagaatgaacgcacatacacgtca

SEQ ID NO: 4075614 - DNA, 25 bp, Homo sapien
caaaagcagaatgaacgcacataca

SEQ ID NO: 4075615 - DNA, 25 bp, Homo sapien
tgaacgcacatacacgtcagcgcag

SEQ ID NO: 4075616 - DNA, 25 bp, Homo sapien
gaatgaacgcacatacacgtcagcg

SEQ ID NO: 4075617 - DNA, 25 bp, Homo sapien
gggaggctgcgggacggtggtggct

SEQ ID NO: 4075618 - DNA, 25 bp, Homo sapien
gctgcgggacggtggtggctacgtc

SEQ ID NO: 4075619 - DNA, 25 bp, Homo sapien
tgggggaggctgcgggacggtggtg

SEQ ID NO: 4075620 - DNA, 25 bp, Homo sapien
gaggctgcgggacggtggtggctac

SEQ ID NO: 4075621 - DNA, 25 bp, Homo sapien
cccatagacgtagagcaccccatgc

SEQ ID NO: 4075622 - DNA, 25 bp, Homo sapien
gcatggcgttggagcgtggacacgg

SEQ ID NO: 4075623 - DNA, 25 bp, Homo sapien
caaacatgcccccatagacgtagag

SEQ ID NO: 4075624 - DNA, 25 bp, Homo sapien
tgacctggcggtcgccggcctcaaa

SEQ ID NO: 4075625 - DNA, 25 bp, Homo sapien
ctgtcttcgtcctcagaccggggct

SEQ ID NO: 4075626 - DNA, 25 bp, Homo sapien
cggggctgccccgccgagcctggcg

SEQ ID NO: 4075627 - DNA, 25 bp, Homo sapien
gtcttcgtcctcagaccggggctgc

SEQ ID NO: 4075628 - DNA, 25 bp, Homo sapien
gggctgccccgccgagcctggcgcg

SEQ ID NO: 4075629 - DNA, 25 bp, Homo sapien
ggctcctcttttctgccccgcctgc

SEQ ID NO: 4075630 - DNA, 25 bp, Homo sapien
tgctaccaccttcgggctcctcttt

SEQ ID NO: 4075631 - DNA, 25 bp, Homo sapien
cccgcctgcgtttcttcttttcaga

SEQ ID NO: 4075632 - DNA, 25 bp, Homo sapien
ctgcttaatggtgaccacggtgcca

SEQ ID NO: 4075633 - DNA, 25 bp, Homo sapien
tgtcaacggccctgagatcacagtg

SEQ ID NO: 4075634 - DNA, 25 bp, Homo sapien
gcagctatgctcacgtggacagtaa

SEQ ID NO: 4075635 - DNA, 25 bp, Homo sapien
gaaacctgtgtagactctgcttgga

SEQ ID NO: 4075636 - DNA, 25 bp, Homo sapien
aagggtcataacacaggctggtcca

SEQ ID NO: 4075637 - DNA, 25 bp, Homo sapien
catggccacggaaaagccagaccgt

SEQ ID NO: 4075638 - DNA, 25 bp, Homo sapien
ctcaaaccaacggttcctggtggcg

SEQ ID NO: 4075639 - DNA, 25 bp, Homo sapien
tggtggcgtcgtagaagtacagatc

SEQ ID NO: 4075640 - DNA, 25 bp, Homo sapien
agtacagatcgttgaagaactcgcc

SEQ ID NO: 4075641 - DNA, 25 bp, Homo sapien
cgccctggaggcacagcacctctac

SEQ ID NO: 4075642 - DNA, 25 bp, Homo sapien
ctcccgccctggaggcacagcacct

SEQ ID NO: 4075643 - DNA, 25 bp, Homo sapien
agccagctcccgccctggaggcaca

SEQ ID NO: 4075644 - DNA, 25 bp, Homo sapien
ccagctcccgccctggaggcacagc

SEQ ID NO: 4075645 - DNA, 25 bp, Homo sapien
ttcagcaggaacatgtctgagtgcc

SEQ ID NO: 4075646 - DNA, 25 bp, Homo sapien
cagcaggaacatgtctgagtgccgt

SEQ ID NO: 4075647 - DNA, 25 bp, Homo sapien
caggaacatgtctgagtgccgtgtg

SEQ ID NO: 4075648 - DNA, 25 bp, Homo sapien
ccttgtccacgtctttcttaactct

SEQ ID NO: 4075649 - DNA, 25 bp, Homo sapien
cctgtgggcgcattttggatggaag

SEQ ID NO: 4075650 - DNA, 25 bp, Homo sapien
ggcagctacagtggttgcttacaga

SEQ ID NO: 4075651 - DNA, 25 bp, Homo sapien
cccaaatgggtccatctgaagaggc

SEQ ID NO: 4075652 - DNA, 25 bp, Homo sapien
caaagcgtgcctgcagtgtgctcag

SEQ ID NO: 4075653 - DNA, 25 bp, Homo sapien
cacgactcaggcttcacagcagaaa

SEQ ID NO: 4075654 - DNA, 25 bp, Homo sapien
ccctggtctgtgtggaaaccaccac

SEQ ID NO: 4075655 - DNA, 25 bp, Homo sapien
acagtacactagagttcctgtcggg

SEQ ID NO: 4075656 - DNA, 25 bp, Homo sapien
tctaatggccgcgatcacacagtac

SEQ ID NO: 4075657 - DNA, 25 bp, Homo sapien
gcaggcactgcccactgaaagactt

SEQ ID NO: 4075658 - DNA, 25 bp, Homo sapien
ggcaggcactgcccactgaaagact

SEQ ID NO: 4075659 - DNA, 25 bp, Homo sapien
agggcaggcactgcccactgaaaga

SEQ ID NO: 4075660 - DNA, 25 bp, Homo sapien
agagggcaggcactgcccactgaaa

SEQ ID NO: 4075661 - DNA, 25 bp, Homo sapien
gagggagatagccagcaaaacgctc

SEQ ID NO: 4075662 - DNA, 25 bp, Homo sapien
gggagatagccagcaaaacgctcac

SEQ ID NO: 4075663 - DNA, 25 bp, Homo sapien
tgtgagggagatagccagcaaaacg

SEQ ID NO: 4075664 - DNA, 25 bp, Homo sapien
gttgtgagggagatagccagcaaaa

SEQ ID NO: 4075665 - DNA, 25 bp, Homo sapien
tatgaatcattaggacgatccccgg

SEQ ID NO: 4075666 - DNA, 25 bp, Homo sapien
ccttgtgacggatcaggaaccggca

SEQ ID NO: 4075667 - DNA, 25 bp, Homo sapien
tctctgaggaccatgatagctgtgt

SEQ ID NO: 4075668 - DNA, 25 bp, Homo sapien
gacgatagtaccgagagctctcaca

SEQ ID NO: 4075669 - DNA, 25 bp, Homo sapien
acagcttagccggtctggctgttca

SEQ ID NO: 4075670 - DNA, 25 bp, Homo sapien
gctgctgagaatgacacgcgactct

SEQ ID NO: 4075671 - DNA, 25 bp, Homo sapien
tctgatgaaagcgatacagcttagc

SEQ ID NO: 4075672 - DNA, 25 bp, Homo sapien
gactgagggcgggtgcacgtggctg

SEQ ID NO: 4075673 - DNA, 25 bp, Homo sapien
taggaaattaccaccgactacaggc

SEQ ID NO: 4075674 - DNA, 25 bp, Homo sapien
tttagcagaagctccaggacaggca

SEQ ID NO: 4075675 - DNA, 25 bp, Homo sapien
gacaggcagatctattacggtggga

SEQ ID NO: 4075676 - DNA, 25 bp, Homo sapien
tgaacagaaacatgcaacacgtggg

SEQ ID NO: 4075677 - DNA, 25 bp, Homo sapien
catctggcagcctgatctgggtgtg

SEQ ID NO: 4075678 - DNA, 25 bp, Homo sapien
cagcttgctccatgtgaaggtgtcc

SEQ ID NO: 4075679 - DNA, 25 bp, Homo sapien
catacacgtcgttgtagtagatgta

SEQ ID NO: 4075680 - DNA, 25 bp, Homo sapien
gaaggtgtccagattaaaggcatac

SEQ ID NO: 4075681 - DNA, 25 bp, Homo sapien
tgcatttgaaaaccggaaataatgc

SEQ ID NO: 4075682 - DNA, 25 bp, Homo sapien
aggcagaggaatttaatctgaaagc

SEQ ID NO: 4075683 - DNA, 25 bp, Homo sapien
ccacaagcacgtatgagtttgcatt

SEQ ID NO: 4075684 - DNA, 25 bp, Homo sapien
gtttgaattgatatgaaaggaccac

SEQ ID NO: 4075685 - DNA, 25 bp, Homo sapien
gaacacccacgtgacatcaaaagag

SEQ ID NO: 4075686 - DNA, 25 bp, Homo sapien
tgcacgaacacccacgtgacatcaa

SEQ ID NO: 4075687 - DNA, 25 bp, Homo sapien
cacccacgtgacatcaaaagagaac

SEQ ID NO: 4075688 - DNA, 25 bp, Homo sapien
cgtgacatcaaaagagaaccgcagg

SEQ ID NO: 4075689 - DNA, 25 bp, Homo sapien
ccgacccgaaggaccgcctgttgat

SEQ ID NO: 4075690 - DNA, 25 bp, Homo sapien
atccgatgtccactccgacccgaag

SEQ ID NO: 4075691 - DNA, 25 bp, Homo sapien
ttccaggccaccatccgatgtccac

SEQ ID NO: 4075692 - DNA, 25 bp, Homo sapien
gccaccaaacaggatcaattgtctc

SEQ ID NO: 4075693 - DNA, 25 bp, Homo sapien
ttgatcagaaagttcgtaagataga

SEQ ID NO: 4075694 - DNA, 25 bp, Homo sapien
gatcagaaagttcgtaagatagaaa

SEQ ID NO: 4075695 - DNA, 25 bp, Homo sapien
cagaattctatcttaatagtaagat

SEQ ID NO: 4075696 - DNA, 25 bp, Homo sapien
tcagaaagttcgtaagatagaaaaa

SEQ ID NO: 4075697 - DNA, 25 bp, Homo sapien
agacagcgtttcattcttgcccagg

SEQ ID NO: 4075698 - DNA, 25 bp, Homo sapien
acagcgtttcattcttgcccaggcc

SEQ ID NO: 4075699 - DNA, 25 bp, Homo sapien
tgagacagcgtttcattcttgccca

SEQ ID NO: 4075700 - DNA, 25 bp, Homo sapien
agcgtttcattcttgcccaggccgg

SEQ ID NO: 4075701 - DNA, 25 bp, Homo sapien
gacatggaatctcaaacgtaaaagg

SEQ ID NO: 4075702 - DNA, 25 bp, Homo sapien
ggttctcactgctcaaacgcgggat

SEQ ID NO: 4075703 - DNA, 25 bp, Homo sapien
aattagcttggcgtcgtggaggcac

SEQ ID NO: 4075704 - DNA, 25 bp, Homo sapien
caagctggagcgaattcggttctca

SEQ ID NO: 4075705 - DNA, 25 bp, Homo sapien
aggccagtcactgttagctaactcg

SEQ ID NO: 4075706 - DNA, 25 bp, Homo sapien
cagtcactgttagctaactcgttgc

SEQ ID NO: 4075707 - DNA, 25 bp, Homo sapien
actgttagctaactcgttgcggtcc

SEQ ID NO: 4075708 - DNA, 25 bp, Homo sapien
ttagctaactcgttgcggtccttca

SEQ ID NO: 4075709 - DNA, 25 bp, Homo sapien
cggtggggtgtctgctaaaaagacg

SEQ ID NO: 4075710 - DNA, 25 bp, Homo sapien
acagacacagacagcagggaccggg

SEQ ID NO: 4075711 - DNA, 25 bp, Homo sapien
aatacccagaagaggcagatccaca

SEQ ID NO: 4075712 - DNA, 25 bp, Homo sapien
agacagcagggaccggggacggtgg

SEQ ID NO: 4075713 - DNA, 25 bp, Homo sapien
tgttatgaaacacctatcgggcggg

SEQ ID NO: 4075714 - DNA, 25 bp, Homo sapien
cagagcctaatgctgggaggatcca

SEQ ID NO: 4075715 - DNA, 25 bp, Homo sapien
caagtgcctggagaaacgctggctg

SEQ ID NO: 4075716 - DNA, 25 bp, Homo sapien
gctgagcagcacaacgggagattga

SEQ ID NO: 4075717 - DNA, 25 bp, Homo sapien
tcttgccaataaccgcagacagact

SEQ ID NO: 4075718 - DNA, 25 bp, Homo sapien
gccaataaccgcagacagactttca

SEQ ID NO: 4075719 - DNA, 25 bp, Homo sapien
cactcttgccaataaccgcagacag

SEQ ID NO: 4075720 - DNA, 25 bp, Homo sapien
tgccaataaccgcagacagactttc

SEQ ID NO: 4075721 - DNA, 25 bp, Homo sapien
gacgagcacggagaacacttgagga

SEQ ID NO: 4075722 - DNA, 25 bp, Homo sapien
ggcgccgcagctgtagtccagtgtc

SEQ ID NO: 4075723 - DNA, 25 bp, Homo sapien
caggtatgaagtgacgacgagcacg

SEQ ID NO: 4075724 - DNA, 25 bp, Homo sapien
tgtctgccacaggtatgaagtgacg

SEQ ID NO: 4075725 - DNA, 25 bp, Homo sapien
agagtcagccctccacacgccagca

SEQ ID NO: 4075726 - DNA, 25 bp, Homo sapien
gggagaaccatcagacatgaggtca

SEQ ID NO: 4075727 - DNA, 25 bp, Homo sapien
aggcatcacgccaagagtcagccct

SEQ ID NO: 4075728 - DNA, 25 bp, Homo sapien
agcaccggcaccaactggaggcttt

SEQ ID NO: 4075729 - DNA, 25 bp, Homo sapien
caaagaccttcctgtttcatatggg

SEQ ID NO: 4075730 - DNA, 25 bp, Homo sapien
ttccacacaaagaccttcctgtttc

SEQ ID NO: 4075731 - DNA, 25 bp, Homo sapien
gaatgtcttgctcagaaaaccttag

SEQ ID NO: 4075732 - DNA, 25 bp, Homo sapien
tttcatatgggcaaatccatccacc

SEQ ID NO: 4075733 - DNA, 25 bp, Homo sapien
caggctgtgtctccttatcagacgc

SEQ ID NO: 4075734 - DNA, 25 bp, Homo sapien
caaatccgtactcacaacaggctgt

SEQ ID NO: 4075735 - DNA, 25 bp, Homo sapien
ttccaggaccaagggtgacctgcgg

SEQ ID NO: 4075736 - DNA, 25 bp, Homo sapien
accaagggtgacctgcggaaccaca

SEQ ID NO: 4075737 - DNA, 25 bp, Homo sapien
tgtttatcagacaatccagacccag

SEQ ID NO: 4075738 - DNA, 25 bp, Homo sapien
caagcattcgaggaatgaggtgtct

SEQ ID NO: 4075739 - DNA, 25 bp, Homo sapien
ggaacagatacccacgatccgagtg

SEQ ID NO: 4075740 - DNA, 25 bp, Homo sapien
caggtacccacagtgcatccctatt

SEQ ID NO: 4075741 - DNA, 25 bp, Homo sapien
tgtaaggctatggtcatgtcctcct

SEQ ID NO: 4075742 - DNA, 25 bp, Homo sapien
cagactcttcatttgactggttaac

SEQ ID NO: 4075743 - DNA, 25 bp, Homo sapien
catttgactggttaacattcccggc

SEQ ID NO: 4075744 - DNA, 25 bp, Homo sapien
ttccgggtcccactgtaaggctatg

SEQ ID NO: 4075745 - DNA, 25 bp, Homo sapien
ggtattctgaggtctgctccgagca

SEQ ID NO: 4075746 - DNA, 25 bp, Homo sapien
catcagcaacattcccgacagaggt

SEQ ID NO: 4075747 - DNA, 25 bp, Homo sapien
gacacccgtgcgtggtaaacatgca

SEQ ID NO: 4075748 - DNA, 25 bp, Homo sapien
gctggtggccaacaacaagaggaac

SEQ ID NO: 4075749 - DNA, 25 bp, Homo sapien
agctgtccgccaccttgaggcacta

SEQ ID NO: 4075750 - DNA, 25 bp, Homo sapien
tggtagaactgctctccgttgggag

SEQ ID NO: 4075751 - DNA, 25 bp, Homo sapien
gccaaatgcaggacccagagatcct

SEQ ID NO: 4075752 - DNA, 25 bp, Homo sapien
gacccagagatccttgtagtggtag

SEQ ID NO: 4075753 - DNA, 25 bp, Homo sapien
catctccacaggtgagagccgccca

SEQ ID NO: 4075754 - DNA, 25 bp, Homo sapien
tctgtgttagcaaccacgctggagg

SEQ ID NO: 4075755 - DNA, 25 bp, Homo sapien
cagtctgtgttagcaaccacgctgg

SEQ ID NO: 4075756 - DNA, 25 bp, Homo sapien
aaagcacgctcctaggcagtctgtg

SEQ ID NO: 4075757 - DNA, 25 bp, Homo sapien
ccagcttcgcctgactgtaacgcac

SEQ ID NO: 4075758 - DNA, 25 bp, Homo sapien
ccagggtcacgcagcccagcttcgc

SEQ ID NO: 4075759 - DNA, 25 bp, Homo sapien
agcccagcttcgcctgactgtaacg

SEQ ID NO: 4075760 - DNA, 25 bp, Homo sapien
gcagcccagcttcgcctgactgtaa

SEQ ID NO: 4075761 - DNA, 25 bp, Homo sapien
cctatcattctaaaagcccagtagt

SEQ ID NO: 4075762 - DNA, 25 bp, Homo sapien
tatcattctaaaagcccagtagttc

SEQ ID NO: 4075763 - DNA, 25 bp, Homo sapien
taaaagcccagtagttccataggga

SEQ ID NO: 4075764 - DNA, 25 bp, Homo sapien
attctaaaagcccagtagttccata

SEQ ID NO: 4075765 - DNA, 25 bp, Homo sapien
tttggtccaggtgtcctttctggta

SEQ ID NO: 4075766 - DNA, 25 bp, Homo sapien
ggatgtcaactttggtccaggtgtc

SEQ ID NO: 4075767 - DNA, 25 bp, Homo sapien
gtattgtagacatagagctcgttat

SEQ ID NO: 4075768 - DNA, 25 bp, Homo sapien
agcacagcgcctcggaggtggactg

SEQ ID NO: 4075769 - DNA, 25 bp, Homo sapien
tgtcacaaatgatacgcttccaagg

SEQ ID NO: 4075770 - DNA, 25 bp, Homo sapien
gatgacgacacaatgaaaacgaccg

SEQ ID NO: 4075771 - DNA, 25 bp, Homo sapien
caaatgatactcacgcaacatggga

SEQ ID NO: 4075772 - DNA, 25 bp, Homo sapien
tgtaaaccataccagcacagggagg

SEQ ID NO: 4075773 - DNA, 25 bp, Homo sapien
ttttggccgttgaaatattcacctc

SEQ ID NO: 4075774 - DNA, 25 bp, Homo sapien
ccttcctcacagaatcctctgtcac

SEQ ID NO: 4075775 - DNA, 25 bp, Homo sapien
tcaccacaaactggctgcctctaca

SEQ ID NO: 4075776 - DNA, 25 bp, Homo sapien
tcctcacagaatcctctgtcaccac

SEQ ID NO: 4075777 - DNA, 25 bp, Homo sapien
tgtcaccacaaactggctgcctcta

SEQ ID NO: 4075778 - DNA, 25 bp, Homo sapien
aatgggctatgagcgcttccaggtc

SEQ ID NO: 4075779 - DNA, 25 bp, Homo sapien
tcgagtgtctggaaatgggctatga

SEQ ID NO: 4075780 - DNA, 25 bp, Homo sapien
cttggcatcgagtgtctggaaatgg

SEQ ID NO: 4075781 - DNA, 25 bp, Homo sapien
gagtcctcttggcatcgagtgtctg

SEQ ID NO: 4075782 - DNA, 25 bp, Homo sapien
tttgctcaacgaggttaaacaaaca

SEQ ID NO: 4075783 - DNA, 25 bp, Homo sapien
cagttcaaatactaacgtctatgta

SEQ ID NO: 4075784 - DNA, 25 bp, Homo sapien
tcaacgaggttaaacaaacagttca

SEQ ID NO: 4075785 - DNA, 25 bp, Homo sapien
caaacagttcaaatactaacgtcta

SEQ ID NO: 4075786 - DNA, 25 bp, Homo sapien
ctgctacttagagcggtctttgacc

SEQ ID NO: 4075787 - DNA, 25 bp, Homo sapien
tacttagagcggtctttgaccttgg

SEQ ID NO: 4075788 - DNA, 25 bp, Homo sapien
agagcggtctttgaccttggctgaa

SEQ ID NO: 4075789 - DNA, 25 bp, Homo sapien
tgctgctgctacttagagcggtctt

SEQ ID NO: 4075790 - DNA, 25 bp, Homo sapien
ctgctcgtgaggagtaaagcccagg

SEQ ID NO: 4075791 - DNA, 25 bp, Homo sapien
aggtcaggacggatcctcctgcaga

SEQ ID NO: 4075792 - DNA, 25 bp, Homo sapien
cccggttagggaatccatgagcagc

SEQ ID NO: 4075793 - DNA, 25 bp, Homo sapien
tggcgcacggcaggccataaaactg

SEQ ID NO: 4075794 - DNA, 25 bp, Homo sapien
tcctccttccgcgagcgcttagaca

SEQ ID NO: 4075795 - DNA, 25 bp, Homo sapien
gagcgcttagacaccttcttctcca

SEQ ID NO: 4075796 - DNA, 25 bp, Homo sapien
tcttctccatcttggcggccgtctt

SEQ ID NO: 4075797 - DNA, 25 bp, Homo sapien
gcggccgtcttctccgcgccgcggc

SEQ ID NO: 4075798 - DNA, 25 bp, Homo sapien
cttgccgggtcccaagccgcgacgg

SEQ ID NO: 4075799 - DNA, 25 bp, Homo sapien
tccgctcggaaacaggtgctcgtgg

SEQ ID NO: 4075800 - DNA, 25 bp, Homo sapien
cgcgctctccgctcggaaacaggtg

SEQ ID NO: 4075801 - DNA, 25 bp, Homo sapien
gccgcgacgggacaccaggaaagaa

SEQ ID NO: 4075802 - DNA, 25 bp, Homo sapien
tgttattgaaatgacccagaaggct

SEQ ID NO: 4075803 - DNA, 25 bp, Homo sapien
caggcttgttccatcaggtctggga

SEQ ID NO: 4075804 - DNA, 25 bp, Homo sapien
caatgttggacgtggctgacgttca

SEQ ID NO: 4075805 - DNA, 25 bp, Homo sapien
aaaatggcaggaggcacgaaagacc

SEQ ID NO: 4075806 - DNA, 25 bp, Homo sapien
ggtggcatgccactctgtagaccca

SEQ ID NO: 4075807 - DNA, 25 bp, Homo sapien
caaggccacactctgatttgttagt

SEQ ID NO: 4075808 - DNA, 25 bp, Homo sapien
tattctctgctatcaacagccaagg

SEQ ID NO: 4075809 - DNA, 25 bp, Homo sapien
cagggcatcatttacccactatggt

SEQ ID NO: 4075810 - DNA, 25 bp, Homo sapien
gtgaggccacgggaaagcctttggc

SEQ ID NO: 4075811 - DNA, 25 bp, Homo sapien
gtcctctcgcattgatccttccagt

SEQ ID NO: 4075812 - DNA, 25 bp, Homo sapien
cctctcgcattgatccttccagtga

SEQ ID NO: 4075813 - DNA, 25 bp, Homo sapien
tcagtcctctcgcattgatccttcc

SEQ ID NO: 4075814 - DNA, 25 bp, Homo sapien
ccctggtcttccgaggagtaagagg

SEQ ID NO: 4075815 - DNA, 25 bp, Homo sapien
atctcctccctggtcttccgaggag

SEQ ID NO: 4075816 - DNA, 25 bp, Homo sapien
ctggtggagaacccgacttcccatc

SEQ ID NO: 4075817 - DNA, 25 bp, Homo sapien
taagagggaggagttgatttgctcc

SEQ ID NO: 4075818 - DNA, 25 bp, Homo sapien
cctcgtggccatggggcctccaacg

SEQ ID NO: 4075819 - DNA, 25 bp, Homo sapien
gcctcgtggccatggggcctccaac

SEQ ID NO: 4075820 - DNA, 25 bp, Homo sapien
cgtggccatggggcctccaacgccg

SEQ ID NO: 4075821 - DNA, 25 bp, Homo sapien
tcgtggccatggggcctccaacgcc

SEQ ID NO: 4075822 - DNA, 25 bp, Homo sapien
gggcagcagcgtgcacactgagcac

SEQ ID NO: 4075823 - DNA, 25 bp, Homo sapien
tgttctttctccaatggccccactg

SEQ ID NO: 4075824 - DNA, 25 bp, Homo sapien
tcaggccgcggcacagagatgggca

SEQ ID NO: 4075825 - DNA, 25 bp, Homo sapien
gcaattccctggacaagagagcccc

SEQ ID NO: 4075826 - DNA, 25 bp, Homo sapien
taagtgtgatgtacatgccctaagt

SEQ ID NO: 4075827 - DNA, 25 bp, Homo sapien
agtgtccaccgtttgatgaatttca

SEQ ID NO: 4075828 - DNA, 25 bp, Homo sapien
accctctattttaatgcagactttt

SEQ ID NO: 4075829 - DNA, 25 bp, Homo sapien
tgtacatgccctaagtgtccaccgt

SEQ ID NO: 4075830 - DNA, 25 bp, Homo sapien
tgcctaaagatgaagcgtcgccctg

SEQ ID NO: 4075831 - DNA, 25 bp, Homo sapien
cctggcagcgtttgaaacacggtca

SEQ ID NO: 4075832 - DNA, 25 bp, Homo sapien
aaatcggcgcggtgagttgtgcagg

SEQ ID NO: 4075833 - DNA, 25 bp, Homo sapien
aaagtgtcacggccgctgaaggaga

SEQ ID NO: 4075834 - DNA, 25 bp, Homo sapien
ctgaaggagggcgaggtagcaggag

SEQ ID NO: 4075835 - DNA, 25 bp, Homo sapien
ctctgaaggagggcgaggtagcagg

SEQ ID NO: 4075836 - DNA, 25 bp, Homo sapien
tgaaggagggcgaggtagcaggaga

SEQ ID NO: 4075837 - DNA, 25 bp, Homo sapien
cacacacgtcattactcggcagagg

SEQ ID NO: 4075838 - DNA, 25 bp, Homo sapien
cacagaataaagaaggtcccagcca

SEQ ID NO: 4075839 - DNA, 25 bp, Homo sapien
gttggaacagaacggcatcccgagg

SEQ ID NO: 4075840 - DNA, 25 bp, Homo sapien
ggaagaggtcttgcccaacacagtc

SEQ ID NO: 4075841 - DNA, 25 bp, Homo sapien
gaagcaacggggcaggggtgaataa

SEQ ID NO: 4075842 - DNA, 25 bp, Homo sapien
gcaggggtgaataaaggtcttcatt

SEQ ID NO: 4075843 - DNA, 25 bp, Homo sapien
ctatgagcagacgctgtgaagtctg

SEQ ID NO: 4075844 - DNA, 25 bp, Homo sapien
tgtccatgtgcagcgggaagcaacg

SEQ ID NO: 4075845 - DNA, 25 bp, Homo sapien
tcaagcaagagagacggacatctgg

SEQ ID NO: 4075846 - DNA, 25 bp, Homo sapien
tgagcactggagtgacgctggacca

SEQ ID NO: 4075847 - DNA, 25 bp, Homo sapien
cacttgctgagagcttgcggcttga

SEQ ID NO: 4075848 - DNA, 25 bp, Homo sapien
tttctccgggcccactggatggtga

SEQ ID NO: 4075849 - DNA, 25 bp, Homo sapien
ctcaggaaagtgggccgcattggcc

SEQ ID NO: 4075850 - DNA, 25 bp, Homo sapien
gctcaggaaagtgggccgcattggc

SEQ ID NO: 4075851 - DNA, 25 bp, Homo sapien
tcaggaaagtgggccgcattggcca

SEQ ID NO: 4075852 - DNA, 25 bp, Homo sapien
aggaaagtgggccgcattggccagg

SEQ ID NO: 4075853 - DNA, 25 bp, Homo sapien
tgtctcctagacaacgggcatcagg

SEQ ID NO: 4075854 - DNA, 25 bp, Homo sapien
cagagacgtgagcagtgcttggctc

SEQ ID NO: 4075855 - DNA, 25 bp, Homo sapien
tgtctgcatgaaccagaactcagcc

SEQ ID NO: 4075856 - DNA, 25 bp, Homo sapien
ccaggacaggacatgagcgtgacag

SEQ ID NO: 4075857 - DNA, 25 bp, Homo sapien
gcagctgtccggcttcagtgcaagt

SEQ ID NO: 4075858 - DNA, 25 bp, Homo sapien
gggcccaaggagaccaaaagctgct

SEQ ID NO: 4075859 - DNA, 25 bp, Homo sapien
caagtctgtggtagcaatgaggttc

SEQ ID NO: 4075860 - DNA, 25 bp, Homo sapien
catcttagtggtgtcaagttgaccc

SEQ ID NO: 4075861 - DNA, 25 bp, Homo sapien
agagttttcacagcagcctccactg

SEQ ID NO: 4075862 - DNA, 25 bp, Homo sapien
cagagttttcacagcagcctccact

SEQ ID NO: 4075863 - DNA, 25 bp, Homo sapien
gttttcacagcagcctccactgccc

SEQ ID NO: 4075864 - DNA, 25 bp, Homo sapien
ttcacagcagcctccactgcccgac

SEQ ID NO: 4075865 - DNA, 25 bp, Homo sapien
tctactttaactggcctctgcgcat

SEQ ID NO: 4075866 - DNA, 25 bp, Homo sapien
ccggagtgggttcgaggaggtgatc

SEQ ID NO: 4075867 - DNA, 25 bp, Homo sapien
gggttcgaggaggtgatctacttta

SEQ ID NO: 4075868 - DNA, 25 bp, Homo sapien
tgatctactttaactggcctctgcg

SEQ ID NO: 4075869 - DNA, 25 bp, Homo sapien
ttctgacacaggacggtcgtggaga

SEQ ID NO: 4075870 - DNA, 25 bp, Homo sapien
tcaactcccttcgctgcccagggca

SEQ ID NO: 4075871 - DNA, 25 bp, Homo sapien
cttcgctgcccagggcagagggtac

SEQ ID NO: 4075872 - DNA, 25 bp, Homo sapien
aactcccttcgctgcccagggcaga

SEQ ID NO: 4075873 - DNA, 25 bp, Homo sapien
cccttcgctgcccagggcagagggt

SEQ ID NO: 4075874 - DNA, 25 bp, Homo sapien
ggctgtgggccagcgagatactcac

SEQ ID NO: 4075875 - DNA, 25 bp, Homo sapien
gggctgtgggccagcgagatactca

SEQ ID NO: 4075876 - DNA, 25 bp, Homo sapien
cgggctgtgggccagcgagatactc

SEQ ID NO: 4075877 - DNA, 25 bp, Homo sapien
cacgggctgtgggccagcgagatac

SEQ ID NO: 4075878 - DNA, 25 bp, Homo sapien
cacactccacgggtgtcttccagaa

SEQ ID NO: 4075879 - DNA, 25 bp, Homo sapien
atggtgaagccgatgccacactcca

SEQ ID NO: 4075880 - DNA, 25 bp, Homo sapien
caccagaccccgaagaagtagacgg

SEQ ID NO: 4075881 - DNA, 25 bp, Homo sapien
ttccagaaggagacggcgatcagga

SEQ ID NO: 4075882 - DNA, 25 bp, Homo sapien
agatgagctccacccggcacagaag

SEQ ID NO: 4075883 - DNA, 25 bp, Homo sapien
aaggagcctgcaggccgcaacctgc

SEQ ID NO: 4075884 - DNA, 25 bp, Homo sapien
caggccgcaacctgcggctcggcat

SEQ ID NO: 4075885 - DNA, 25 bp, Homo sapien
ttcagcagatgagctccacccggca

SEQ ID NO: 4075886 - DNA, 25 bp, Homo sapien
aggcagcccacggataacagctacc

SEQ ID NO: 4075887 - DNA, 25 bp, Homo sapien
gcgggacttgctgggccccaggcaa

SEQ ID NO: 4075888 - DNA, 25 bp, Homo sapien
ccagggcggcgggacttgctgggcc

SEQ ID NO: 4075889 - DNA, 25 bp, Homo sapien
tggcctctgctggacggccccgttt

SEQ ID NO: 4075890 - DNA, 25 bp, Homo sapien
ggcgcagccagatcatgccgatgat

SEQ ID NO: 4075891 - DNA, 25 bp, Homo sapien
cttgatgggccgctcaagctcaggc

SEQ ID NO: 4075892 - DNA, 25 bp, Homo sapien
gatgggccgctcaagctcaggcttt

SEQ ID NO: 4075893 - DNA, 25 bp, Homo sapien
ctttctgtggcgcagccagatcatg

SEQ ID NO: 4075894 - DNA, 25 bp, Homo sapien
cacgagggacggcacgggggtgagg

SEQ ID NO: 4075895 - DNA, 25 bp, Homo sapien
ggtgaggagctgtgggtggatcatg

SEQ ID NO: 4075896 - DNA, 25 bp, Homo sapien
gggtggatcatggagaggatggagg

SEQ ID NO: 4075897 - DNA, 25 bp, Homo sapien
aggatggagggcaggtggccttccc

SEQ ID NO: 4075898 - DNA, 25 bp, Homo sapien
gggatgatccaggacatgacgccca

SEQ ID NO: 4075899 - DNA, 25 bp, Homo sapien
cgcccaggtgatagttcccgaagtc

SEQ ID NO: 4075900 - DNA, 25 bp, Homo sapien
acccattgacggagccgaagcagga

SEQ ID NO: 4075901 - DNA, 25 bp, Homo sapien
atgtgaacagggacccattgacgga

SEQ ID NO: 4075902 - DNA, 25 bp, Homo sapien
gtacaccagcgtcacgatgggcagg

SEQ ID NO: 4075903 - DNA, 25 bp, Homo sapien
caggttggtcagcacgtacaccagc

SEQ ID NO: 4075904 - DNA, 25 bp, Homo sapien
gacgacagcatctgctcggtggaca

SEQ ID NO: 4075905 - DNA, 25 bp, Homo sapien
gacagggtggtgaagtaggccaggt

SEQ ID NO: 4075906 - DNA, 25 bp, Homo sapien
cctctgtgacgaaattcaagtaatt

SEQ ID NO: 4075907 - DNA, 25 bp, Homo sapien
ttcctctgtgacgaaattcaagtaa

SEQ ID NO: 4075908 - DNA, 25 bp, Homo sapien
tcctctgtgacgaaattcaagtaat

SEQ ID NO: 4075909 - DNA, 25 bp, Homo sapien
ttgggattcctggacacgtcaggga

SEQ ID NO: 4075910 - DNA, 25 bp, Homo sapien
cctggacacgtcagggactgtatgt

SEQ ID NO: 4075911 - DNA, 25 bp, Homo sapien
tatgtccccagaccaagggacccag

SEQ ID NO: 4075912 - DNA, 25 bp, Homo sapien
caagggacccagacattccagaacc

SEQ ID NO: 4075913 - DNA, 25 bp, Homo sapien
cccacatccagtttggtgccttcaa

SEQ ID NO: 4075914 - DNA, 25 bp, Homo sapien
ccttcaaatgagaagttgggatcta

SEQ ID NO: 4075915 - DNA, 25 bp, Homo sapien
ttgggatctagattggacacatcac

SEQ ID NO: 4075916 - DNA, 25 bp, Homo sapien
tcctccataggcaaagaggccgctg

SEQ ID NO: 4075917 - DNA, 25 bp, Homo sapien
gagggtgcagggttccaaccacaac

SEQ ID NO: 4075918 - DNA, 25 bp, Homo sapien
gggaggttcccataagaccttggca

SEQ ID NO: 4075919 - DNA, 25 bp, Homo sapien
tggcaccagatttcctacggcagag

SEQ ID NO: 4075920 - DNA, 25 bp, Homo sapien
caccgcagagtgacgaggtgagcaa

SEQ ID NO: 4075921 - DNA, 25 bp, Homo sapien
gagaaccgtgtgtgacagtatcctt

SEQ ID NO: 4075922 - DNA, 25 bp, Homo sapien
taattgcggtgggaacgagcgctcc

SEQ ID NO: 4075923 - DNA, 25 bp, Homo sapien
tgggagttagacagcgttcaaaccc

SEQ ID NO: 4075924 - DNA, 25 bp, Homo sapien
tccagctctgcttaagggtggcctg

SEQ ID NO: 4075925 - DNA, 25 bp, Homo sapien
catggaccctagactcgggcgtggt

SEQ ID NO: 4075926 - DNA, 25 bp, Homo sapien
atgtctccccatgaacgcagtgtcc

SEQ ID NO: 4075927 - DNA, 25 bp, Homo sapien
caagcctctggctcctgactcagag

SEQ ID NO: 4075928 - DNA, 25 bp, Homo sapien
cctcctctgtgatgcggccaaccct

SEQ ID NO: 4075929 - DNA, 25 bp, Homo sapien
ctgactcagaggacgatgtctcccc

SEQ ID NO: 4075930 - DNA, 25 bp, Homo sapien
ctgccaggaccaggaccgtctgcat

SEQ ID NO: 4075931 - DNA, 25 bp, Homo sapien
tgttgctaaagccagtctgtaggca

SEQ ID NO: 4075932 - DNA, 25 bp, Homo sapien
tctgttgctaaagccagtctgtagg

SEQ ID NO: 4075933 - DNA, 25 bp, Homo sapien
gtctgttgctaaagccagtctgtag

SEQ ID NO: 4075934 - DNA, 25 bp, Homo sapien
gttgctaaagccagtctgtaggcat

SEQ ID NO: 4075935 - DNA, 25 bp, Homo sapien
tgctgtgaccactgagggggccttt

SEQ ID NO: 4075936 - DNA, 25 bp, Homo sapien
tgtgaccactgagggggcctttgtc

SEQ ID NO: 4075937 - DNA, 25 bp, Homo sapien
catgtgctgtgaccactgagggggc

SEQ ID NO: 4075938 - DNA, 25 bp, Homo sapien
tgtgctgtgaccactgagggggcct

SEQ ID NO: 4075939 - DNA, 25 bp, Homo sapien
gcatagatgcggcacacgggacaga

SEQ ID NO: 4075940 - DNA, 25 bp, Homo sapien
tctgcggatggccaactgggaaggg

SEQ ID NO: 4075941 - DNA, 25 bp, Homo sapien
agatgcggcacacgggacagaagat

SEQ ID NO: 4075942 - DNA, 25 bp, Homo sapien
cagaagatggttctgcggatggcca

SEQ ID NO: 4075943 - DNA, 25 bp, Homo sapien
gcaaagcctcgaggggccgccggtg

SEQ ID NO: 4075944 - DNA, 25 bp, Homo sapien
caaagcctcgaggggccgccggtgg

SEQ ID NO: 4075945 - DNA, 25 bp, Homo sapien
aggcaaagcctcgaggggccgccgg

SEQ ID NO: 4075946 - DNA, 25 bp, Homo sapien
tcccgatctggacgaagcccagcag

SEQ ID NO: 4075947 - DNA, 25 bp, Homo sapien
cttcccgatctggacgaagcccagc

SEQ ID NO: 4075948 - DNA, 25 bp, Homo sapien
ttcccgatctggacgaagcccagca

SEQ ID NO: 4075949 - DNA, 25 bp, Homo sapien
ccttcccgatctggacgaagcccag

SEQ ID NO: 4075950 - DNA, 25 bp, Homo sapien
ttcacgctgtagcagttcacggccg

SEQ ID NO: 4075951 - DNA, 25 bp, Homo sapien
tgtagcagttcacggccgtgagcag

SEQ ID NO: 4075952 - DNA, 25 bp, Homo sapien
gtggcggccttcacgctgtagcagt

SEQ ID NO: 4075953 - DNA, 25 bp, Homo sapien
ggccttcacgctgtagcagttcacg

SEQ ID NO: 4075954 - DNA, 25 bp, Homo sapien
catgagggcggggccctttcctcaa

SEQ ID NO: 4075955 - DNA, 25 bp, Homo sapien
ccgactgccggactccatgagggcg

SEQ ID NO: 4075956 - DNA, 25 bp, Homo sapien
ttccaacagaagtggggtgtcccgc

SEQ ID NO: 4075957 - DNA, 25 bp, Homo sapien
agcccgactgccggactccatgagg

SEQ ID NO: 4075958 - DNA, 25 bp, Homo sapien
ctggccagtcacctggggacggcag

SEQ ID NO: 4075959 - DNA, 25 bp, Homo sapien
tggccagtcacctggggacggcagc

SEQ ID NO: 4075960 - DNA, 25 bp, Homo sapien
ttggggggagcacgaccataaaaga

SEQ ID NO: 4075961 - DNA, 25 bp, Homo sapien
ttccttatggttggggggagcacga

SEQ ID NO: 4075962 - DNA, 25 bp, Homo sapien
caggtcctggcttgccagtcccatt

SEQ ID NO: 4075963 - DNA, 25 bp, Homo sapien
taggcagctccttgtccgctgcaca

SEQ ID NO: 4075964 - DNA, 25 bp, Homo sapien
actcgctcattcatgcccggaggga

SEQ ID NO: 4075965 - DNA, 25 bp, Homo sapien
cagcgagttgcccagaattgcccaa

SEQ ID NO: 4075966 - DNA, 25 bp, Homo sapien
tttctggattcgcaagaggccggct

SEQ ID NO: 4075967 - DNA, 25 bp, Homo sapien
gctgggtaatgacgccatcagggct

SEQ ID NO: 4075968 - DNA, 25 bp, Homo sapien
tcagggccatcagccacagaaacat

SEQ ID NO: 4075969 - DNA, 25 bp, Homo sapien
ccttcagggccatcagccacagaaa

SEQ ID NO: 4075970 - DNA, 25 bp, Homo sapien
tgtgtctccaccacccttcagggcc

SEQ ID NO: 4075971 - DNA, 25 bp, Homo sapien
ctgtgtctccaccacccttcagggc

SEQ ID NO: 4075972 - DNA, 25 bp, Homo sapien
acagcccggtgaaggaaggacagcc

SEQ ID NO: 4075973 - DNA, 25 bp, Homo sapien
gggcattgacagcaaggcccacagc

SEQ ID NO: 4075974 - DNA, 25 bp, Homo sapien
gcaaggcccacagcccggtgaagga

SEQ ID NO: 4075975 - DNA, 25 bp, Homo sapien
cttcgggtgggcattgacagcaagg

SEQ ID NO: 4075976 - DNA, 25 bp, Homo sapien
ccagagccagcgccagggccttggc

SEQ ID NO: 4075977 - DNA, 25 bp, Homo sapien
agagccagcgccagggccttggcca

SEQ ID NO: 4075978 - DNA, 25 bp, Homo sapien
atacccagagccagcgccagggcct

SEQ ID NO: 4075979 - DNA, 25 bp, Homo sapien
ctggccatacccagagccagcgcca

SEQ ID NO: 4075980 - DNA, 25 bp, Homo sapien
tgctcacctcccctgatgctggcat

SEQ ID NO: 4075981 - DNA, 25 bp, Homo sapien
cacacggactaatgcctgattcttt

SEQ ID NO: 4075982 - DNA, 25 bp, Homo sapien
catccgtggatagggttcagggtca

SEQ ID NO: 4075983 - DNA, 25 bp, Homo sapien
acacggactaatgcctgattctttc

SEQ ID NO: 4075984 - DNA, 25 bp, Homo sapien
caggtacaggagcatccgtggatag

SEQ ID NO: 4075985 - DNA, 25 bp, Homo sapien
ccccgagccaggcacagcagtgagt

SEQ ID NO: 4075986 - DNA, 25 bp, Homo sapien
cgagccaggcacagcagtgagtcct

SEQ ID NO: 4075987 - DNA, 25 bp, Homo sapien
tgcagggctcagcaccttggcctgt

SEQ ID NO: 4075988 - DNA, 25 bp, Homo sapien
cagcagtgagtcctgcagggctcag

SEQ ID NO: 4075989 - DNA, 25 bp, Homo sapien
ctttgggccggacatacagatgtcc

SEQ ID NO: 4075990 - DNA, 25 bp, Homo sapien
tcaggattcggccagtatcagggaa

SEQ ID NO: 4075991 - DNA, 25 bp, Homo sapien
agagggagaattcaggattcggcca

SEQ ID NO: 4075992 - DNA, 25 bp, Homo sapien
actcccggaggcacgcacgtgctgt

SEQ ID NO: 4075993 - DNA, 25 bp, Homo sapien
agggtccgccttccagagggagaat

SEQ ID NO: 4075994 - DNA, 25 bp, Homo sapien
gcacattctgctggattatgaaaga

SEQ ID NO: 4075995 - DNA, 25 bp, Homo sapien
aaggcggctgatacacatttctggg

SEQ ID NO: 4075996 - DNA, 25 bp, Homo sapien
cattctgctggattatgaaagaggt

SEQ ID NO: 4075997 - DNA, 25 bp, Homo sapien
gtgtgaaggcggctgatacacattt

SEQ ID NO: 4075998 - DNA, 25 bp, Homo sapien
aaagcgcaccaacacgaagacacgc

SEQ ID NO: 4075999 - DNA, 25 bp, Homo sapien
tgaccagtgaaaagcgcaccaacac

SEQ ID NO: 4076000 - DNA, 25 bp, Homo sapien
ctttatgaccagtgaaaagcgcacc

SEQ ID NO: 4076001 - DNA, 25 bp, Homo sapien
cagtgaaaagcgcaccaacacgaag

SEQ ID NO: 4076002 - DNA, 25 bp, Homo sapien
gcagggacccagagactacgacctc

SEQ ID NO: 4076003 - DNA, 25 bp, Homo sapien
gatggtccaggaacgtaaagatgta

SEQ ID NO: 4076004 - DNA, 25 bp, Homo sapien
tggtccaggaacgtaaagatgtaga

SEQ ID NO: 4076005 - DNA, 25 bp, Homo sapien
cgggatggtccaggaacgtaaagat

SEQ ID NO: 4076006 - DNA, 25 bp, Homo sapien
ccgagccgataatggtccccacgat

SEQ ID NO: 4076007 - DNA, 25 bp, Homo sapien
gccgataatggtccccacgatgatg

SEQ ID NO: 4076008 - DNA, 25 bp, Homo sapien
gataatggtccccacgatgatggcc

SEQ ID NO: 4076009 - DNA, 25 bp, Homo sapien
agccgtccgcgctcttggcggccag

SEQ ID NO: 4076010 - DNA, 25 bp, Homo sapien
gcggcccagcgagcagtgtgcgcgc

SEQ ID NO: 4076011 - DNA, 25 bp, Homo sapien
agccgcggcccagcgagcagtgtgc

SEQ ID NO: 4076012 - DNA, 25 bp, Homo sapien
ggagccgcggcccagcgagcagtgt

SEQ ID NO: 4076013 - DNA, 25 bp, Homo sapien
ccgcggcccagcgagcagtgtgcgc

SEQ ID NO: 4076014 - DNA, 25 bp, Homo sapien
tctgccgtccacattgctggctgtg

SEQ ID NO: 4076015 - DNA, 25 bp, Homo sapien
taatctgccgtccacattgctggct

SEQ ID NO: 4076016 - DNA, 25 bp, Homo sapien
tgccgtccacattgctggctgtgga

SEQ ID NO: 4076017 - DNA, 25 bp, Homo sapien
ccgtccacattgctggctgtggaag

SEQ ID NO: 4076018 - DNA, 25 bp, Homo sapien
tcatgcagcaacacgtgcctgatgc

SEQ ID NO: 4076019 - DNA, 25 bp, Homo sapien
catcatgcagcaacacgtgcctgat

SEQ ID NO: 4076020 - DNA, 25 bp, Homo sapien
agcatcatgcagcaacacgtgcctg

SEQ ID NO: 4076021 - DNA, 25 bp, Homo sapien
agggggatgcaagcatcatgcagca

SEQ ID NO: 4076022 - DNA, 25 bp, Homo sapien
gggaagggtgccctcaggtccatca

SEQ ID NO: 4076023 - DNA, 25 bp, Homo sapien
ctcaggccgaggaaacaggaggagc

SEQ ID NO: 4076024 - DNA, 25 bp, Homo sapien
ccgttaacggagtaatggagcagac

SEQ ID NO: 4076025 - DNA, 25 bp, Homo sapien
tactgctgggcaccgctgtgtgcca

SEQ ID NO: 4076026 - DNA, 25 bp, Homo sapien
gaatcaatgtcttttcctctcggcg

SEQ ID NO: 4076027 - DNA, 25 bp, Homo sapien
agggccccctgtgtgttgatacgga

SEQ ID NO: 4076028 - DNA, 25 bp, Homo sapien
cacaggcgtatctttattaaacaag

SEQ ID NO: 4076029 - DNA, 25 bp, Homo sapien
ccctgtgtgttgatacggaaaatga

SEQ ID NO: 4076030 - DNA, 25 bp, Homo sapien
ttgttggacacgatgtcaacatggg

SEQ ID NO: 4076031 - DNA, 25 bp, Homo sapien
ttctcttggtgtcttgttggacacg

SEQ ID NO: 4076032 - DNA, 25 bp, Homo sapien
cgatgtcaacatggggccggtagaa

SEQ ID NO: 4076033 - DNA, 25 bp, Homo sapien
tggtgtcttgttggacacgatgtca

SEQ ID NO: 4076034 - DNA, 25 bp, Homo sapien
tcagaagtcatgtacaatcacattg

SEQ ID NO: 4076035 - DNA, 25 bp, Homo sapien
tttcagaagtcatgtacaatcacat

SEQ ID NO: 4076036 - DNA, 25 bp, Homo sapien
tgctattcatgtggacctaatgtct

SEQ ID NO: 4076037 - DNA, 25 bp, Homo sapien
acaatcacattgtgaaacttgggaa

SEQ ID NO: 4076038 - DNA, 25 bp, Homo sapien
cttgtgccctcattagtggcctgga

SEQ ID NO: 4076039 - DNA, 25 bp, Homo sapien
tggcctggaaggacgcccagacctt

SEQ ID NO: 4076040 - DNA, 25 bp, Homo sapien
acaggagagtacgaaatgcagagag

SEQ ID NO: 4076041 - DNA, 25 bp, Homo sapien
aaaacaggagagtacgaaatgcaga

SEQ ID NO: 4076042 - DNA, 25 bp, Homo sapien
caacgggctccttctggatgatcca

SEQ ID NO: 4076043 - DNA, 25 bp, Homo sapien
gatgatccaggtgaccgactcggtc

SEQ ID NO: 4076044 - DNA, 25 bp, Homo sapien
tctggatgatccaggtgaccgactc

SEQ ID NO: 4076045 - DNA, 25 bp, Homo sapien
tggcttggggccacttcaacgggct

SEQ ID NO: 4076046 - DNA, 25 bp, Homo sapien
tcttgtctcagcacgtgaggccttc

SEQ ID NO: 4076047 - DNA, 25 bp, Homo sapien
gaagcacaggacgtgtcagtcctca

SEQ ID NO: 4076048 - DNA, 25 bp, Homo sapien
tgtgacccttctatacagagcaagg

SEQ ID NO: 4076049 - DNA, 25 bp, Homo sapien
ggaattacgttacattacaccagct

SEQ ID NO: 4076050 - DNA, 25 bp, Homo sapien
gggcatccagtatctccgtgattac

SEQ ID NO: 4076051 - DNA, 25 bp, Homo sapien
tgagggcatccagtatctccgtgat

SEQ ID NO: 4076052 - DNA, 25 bp, Homo sapien
aatgagggcatccagtatctccgtg

SEQ ID NO: 4076053 - DNA, 25 bp, Homo sapien
taccaatgagggcatccagtatctc

SEQ ID NO: 4076054 - DNA, 25 bp, Homo sapien
acaaggcagccaattccccggtagc

SEQ ID NO: 4076055 - DNA, 25 bp, Homo sapien
cctggatcccctggacctggtgggc

SEQ ID NO: 4076056 - DNA, 25 bp, Homo sapien
ctggatcccctggacctggtgggct

SEQ ID NO: 4076057 - DNA, 25 bp, Homo sapien
cacaaggcagccaattccccggtag

SEQ ID NO: 4076058 - DNA, 25 bp, Homo sapien
gcgtgctgggagctgagtgcatagt

SEQ ID NO: 4076059 - DNA, 25 bp, Homo sapien
gctgggagctgagtgcatagtgaca

SEQ ID NO: 4076060 - DNA, 25 bp, Homo sapien
catagtgacaggtcggcactggtag

SEQ ID NO: 4076061 - DNA, 25 bp, Homo sapien
ctgagtgcatagtgacaggtcggca

SEQ ID NO: 4076062 - DNA, 25 bp, Homo sapien
ttttatttccggcaagatgtccacc

SEQ ID NO: 4076063 - DNA, 25 bp, Homo sapien
cttatgttttatttccggcaagatg

SEQ ID NO: 4076064 - DNA, 25 bp, Homo sapien
tatgttttatttccggcaagatgtc

SEQ ID NO: 4076065 - DNA, 25 bp, Homo sapien
tttccggcaagatgtccaccagcct

SEQ ID NO: 4076066 - DNA, 25 bp, Homo sapien
tgcatggcagacaaaggaggggtta

SEQ ID NO: 4076067 - DNA, 25 bp, Homo sapien
gcatggcagacaaaggaggggttag

SEQ ID NO: 4076068 - DNA, 25 bp, Homo sapien
ctgcatggcagacaaaggaggggtt

SEQ ID NO: 4076069 - DNA, 25 bp, Homo sapien
agatctacacccgagcaagtgatta

SEQ ID NO: 4076070 - DNA, 25 bp, Homo sapien
gatctacacccgagcaagtgattac

SEQ ID NO: 4076071 - DNA, 25 bp, Homo sapien
ttcattagatctacacccgagcaag

SEQ ID NO: 4076072 - DNA, 25 bp, Homo sapien
attagatctacacccgagcaagtga

SEQ ID NO: 4076073 - DNA, 25 bp, Homo sapien
cacagaattccagtgaactaaatgc

SEQ ID NO: 4076074 - DNA, 25 bp, Homo sapien
cagaattccagtgaactaaatgcag

SEQ ID NO: 4076075 - DNA, 25 bp, Homo sapien
cccacgacagcttccttgtaatttt

SEQ ID NO: 4076076 - DNA, 25 bp, Homo sapien
gacagcttccttgtaattttggtat

SEQ ID NO: 4076077 - DNA, 25 bp, Homo sapien
ccctcgttcactgctccccagtgga

SEQ ID NO: 4076078 - DNA, 25 bp, Homo sapien
ctctgcggggtacgcgtggccgtcc

SEQ ID NO: 4076079 - DNA, 25 bp, Homo sapien
ccagtggaagtgaaattgcttcagt

SEQ ID NO: 4076080 - DNA, 25 bp, Homo sapien
gcgtggccgtccactgtgtgctctg

SEQ ID NO: 4076081 - DNA, 25 bp, Homo sapien
gaggcattgtctacattagggttat

SEQ ID NO: 4076082 - DNA, 25 bp, Homo sapien
ggttatatgagttcactcgcaaggg

SEQ ID NO: 4076083 - DNA, 25 bp, Homo sapien
ctgaggcattgtctacattagggtt

SEQ ID NO: 4076084 - DNA, 25 bp, Homo sapien
ctacattagggttatatgagttcac

SEQ ID NO: 4076085 - DNA, 25 bp, Homo sapien
gggctcagccataagcatcgctcgc

SEQ ID NO: 4076086 - DNA, 25 bp, Homo sapien
cagccataagcatcgctcgctgagg

SEQ ID NO: 4076087 - DNA, 25 bp, Homo sapien
gagcttgcttctcctgacatgtggg

SEQ ID NO: 4076088 - DNA, 25 bp, Homo sapien
gcatcgctcgctgaggcctctggct

SEQ ID NO: 4076089 - DNA, 25 bp, Homo sapien
tggagcactgatcccgaattcaggg

SEQ ID NO: 4076090 - DNA, 25 bp, Homo sapien
cactgatcccgaattcagggtggcc

SEQ ID NO: 4076091 - DNA, 25 bp, Homo sapien
agcactgatcccgaattcagggtgg

SEQ ID NO: 4076092 - DNA, 25 bp, Homo sapien
actggagcactgatcccgaattcag

SEQ ID NO: 4076093 - DNA, 25 bp, Homo sapien
tgtgcttgacgtcgcttatttcccc

SEQ ID NO: 4076094 - DNA, 25 bp, Homo sapien
gcttgacgtcgcttatttccccgat

SEQ ID NO: 4076095 - DNA, 25 bp, Homo sapien
tccactgtgcttgacgtcgcttatt

SEQ ID NO: 4076096 - DNA, 25 bp, Homo sapien
ttgacgtcgcttatttccccgatga

SEQ ID NO: 4076097 - DNA, 25 bp, Homo sapien
tgcagccatgtcaccgatttacaat

SEQ ID NO: 4076098 - DNA, 25 bp, Homo sapien
tttacaataggaacttctcgtatgg

SEQ ID NO: 4076099 - DNA, 25 bp, Homo sapien
atttacaataggaacttctcgtatg

SEQ ID NO: 4076100 - DNA, 25 bp, Homo sapien
ctgcagccatgtcaccgatttacaa

SEQ ID NO: 4076101 - DNA, 25 bp, Homo sapien
tccatcctgagcgtttcacggacat

SEQ ID NO: 4076102 - DNA, 25 bp, Homo sapien
agctccatcctgagcgtttcacgga

SEQ ID NO: 4076103 - DNA, 25 bp, Homo sapien
gagcgtttcacggacatggccctct

SEQ ID NO: 4076104 - DNA, 25 bp, Homo sapien
tcctgagcgtttcacggacatggcc

SEQ ID NO: 4076105 - DNA, 25 bp, Homo sapien
cttgcagtgtaactttctggcccct

SEQ ID NO: 4076106 - DNA, 25 bp, Homo sapien
ttacttgcagtgtaactttctggcc

SEQ ID NO: 4076107 - DNA, 25 bp, Homo sapien
cacatgtatttggtaagcttttgtt

SEQ ID NO: 4076108 - DNA, 25 bp, Homo sapien
gcagtgtaactttctggccccttcc

SEQ ID NO: 4076109 - DNA, 25 bp, Homo sapien
gctcccgattcccaatccaggtgaa

SEQ ID NO: 4076110 - DNA, 25 bp, Homo sapien
ctcccgattcccaatccaggtgaac

SEQ ID NO: 4076111 - DNA, 25 bp, Homo sapien
tgggaccacttctgaaaggtgcacc

SEQ ID NO: 4076112 - DNA, 25 bp, Homo sapien
ggaccacttctgaaaggtgcaccag

SEQ ID NO: 4076113 - DNA, 25 bp, Homo sapien
ctgggaccacttctgaaaggtgcac

SEQ ID NO: 4076114 - DNA, 25 bp, Homo sapien
accacttctgaaaggtgcaccagcc

SEQ ID NO: 4076115 - DNA, 25 bp, Homo sapien
agtcacgaagcatggacgaggctga

SEQ ID NO: 4076116 - DNA, 25 bp, Homo sapien
ctgagtcacgaagcatggacgaggc

SEQ ID NO: 4076117 - DNA, 25 bp, Homo sapien
cacgaagcatggacgaggctgagct

SEQ ID NO: 4076118 - DNA, 25 bp, Homo sapien
tgagtcacgaagcatggacgaggct

SEQ ID NO: 4076119 - DNA, 25 bp, Homo sapien
agcaagccccacacgggaagcatcc

SEQ ID NO: 4076120 - DNA, 25 bp, Homo sapien
ctgatgaagcaaccgtgaatggcac

SEQ ID NO: 4076121 - DNA, 25 bp, Homo sapien
tgcagtggagcctgatgaagcaacc

SEQ ID NO: 4076122 - DNA, 25 bp, Homo sapien
cactgagcatacaggcagcgtggct

SEQ ID NO: 4076123 - DNA, 25 bp, Homo sapien
aaggaccaagccgtggtgtttgcga

SEQ ID NO: 4076124 - DNA, 25 bp, Homo sapien
aagccgtggtgtttgcgatgcactg

SEQ ID NO: 4076125 - DNA, 25 bp, Homo sapien
cactggaaggaccaagccgtggtgt

SEQ ID NO: 4076126 - DNA, 25 bp, Homo sapien
acactggaaggaccaagccgtggtg

SEQ ID NO: 4076127 - DNA, 25 bp, Homo sapien
ggaggcctggcgcataaaatatcaa

SEQ ID NO: 4076128 - DNA, 25 bp, Homo sapien
gcggagttacatcctcatgggagca

SEQ ID NO: 4076129 - DNA, 25 bp, Homo sapien
catgggagcaacagtgagtgagcaa

SEQ ID NO: 4076130 - DNA, 25 bp, Homo sapien
tggtcccgcttggataacgcagaag

SEQ ID NO: 4076131 - DNA, 25 bp, Homo sapien
tacattcagcaaaaggacgcagagc

SEQ ID NO: 4076132 - DNA, 25 bp, Homo sapien
tgtaccagaggagctcactagcaac

SEQ ID NO: 4076133 - DNA, 25 bp, Homo sapien
caggtttgatgattccccaggaaga

SEQ ID NO: 4076134 - DNA, 25 bp, Homo sapien
gatcagccacgcgaagaggtgtctg

SEQ ID NO: 4076135 - DNA, 25 bp, Homo sapien
accaggtaggacctggcagccagtc

SEQ ID NO: 4076136 - DNA, 25 bp, Homo sapien
gggtcatagacgctgtccctccact

SEQ ID NO: 4076137 - DNA, 25 bp, Homo sapien
cagtgttccagatgtacaggcagga

SEQ ID NO: 4076138 - DNA, 25 bp, Homo sapien
gttccagatgtacaggcaggatgcc

SEQ ID NO: 4076139 - DNA, 25 bp, Homo sapien
tcatagacgctgtccctccactgga

SEQ ID NO: 4076140 - DNA, 25 bp, Homo sapien
cctttctgcaccactcggggacttt

SEQ ID NO: 4076141 - DNA, 25 bp, Homo sapien
tgcaccactcggggactttctttcc

SEQ ID NO: 4076142 - DNA, 25 bp, Homo sapien
tttctgcaccactcggggactttct

SEQ ID NO: 4076143 - DNA, 25 bp, Homo sapien
ttctgcaccactcggggactttctt

SEQ ID NO: 4076144 - DNA, 25 bp, Homo sapien
tgccctcgtcacagagtagccacag

SEQ ID NO: 4076145 - DNA, 25 bp, Homo sapien
acaggaagtctggatagaccttggg

SEQ ID NO: 4076146 - DNA, 25 bp, Homo sapien
ttttgacttttgtgttgccctcgtc

SEQ ID NO: 4076147 - DNA, 25 bp, Homo sapien
ccacaggaagtctggatagaccttg

SEQ ID NO: 4076148 - DNA, 25 bp, Homo sapien
cttcacaggcctgagctaaaccagt

SEQ ID NO: 4076149 - DNA, 25 bp, Homo sapien
ttcacaggcctgagctaaaccagtt

SEQ ID NO: 4076150 - DNA, 25 bp, Homo sapien
ctgcggtcacacacagaactcgcta

SEQ ID NO: 4076151 - DNA, 25 bp, Homo sapien
cggcgctgggaaacagtgggccctg

SEQ ID NO: 4076152 - DNA, 25 bp, Homo sapien
cacagaactcgctaagtgccggaaa

SEQ ID NO: 4076153 - DNA, 25 bp, Homo sapien
ggaaagcagtgactaagccggcgct

SEQ ID NO: 4076154 - DNA, 25 bp, Homo sapien
atcgccctggcctcatcgaacgact

SEQ ID NO: 4076155 - DNA, 25 bp, Homo sapien
tgagaacaccatcgccctggcctca

SEQ ID NO: 4076156 - DNA, 25 bp, Homo sapien
acatctgctcaaccaagaaggagaa

SEQ ID NO: 4076157 - DNA, 25 bp, Homo sapien
tggcctcatcgaacgactccagaga

SEQ ID NO: 4076158 - DNA, 25 bp, Homo sapien
gactccagtctgaagagggtgatgt

SEQ ID NO: 4076159 - DNA, 25 bp, Homo sapien
ttccctgctgtctgttctcactttg

SEQ ID NO: 4076160 - DNA, 25 bp, Homo sapien
ctgttctcactttgatcaggaccac

SEQ ID NO: 4076161 - DNA, 25 bp, Homo sapien
taggttgactgcgttgcagcagtac

SEQ ID NO: 4076162 - DNA, 25 bp, Homo sapien
ccagtttaggttgactgcgttgcag

SEQ ID NO: 4076163 - DNA, 25 bp, Homo sapien
tttaggttgactgcgttgcagcagt

SEQ ID NO: 4076164 - DNA, 25 bp, Homo sapien
agtttaggttgactgcgttgcagca

SEQ ID NO: 4076165 - DNA, 25 bp, Homo sapien
tctcgtctgcatagatttctcatta

SEQ ID NO: 4076166 - DNA, 25 bp, Homo sapien
gccagttatcatttttctcgtctgc

SEQ ID NO: 4076167 - DNA, 25 bp, Homo sapien
gcatagatttctcattaactgcctc

SEQ ID NO: 4076168 - DNA, 25 bp, Homo sapien
tagggcttatgaggcacccagttgg

SEQ ID NO: 4076169 - DNA, 25 bp, Homo sapien
ctcactgtagcttgttggatggtca

SEQ ID NO: 4076170 - DNA, 25 bp, Homo sapien
cacctttgcccacaagttcctcctc

SEQ ID NO: 4076171 - DNA, 25 bp, Homo sapien
tcacctttgcccacaagttcctcct

SEQ ID NO: 4076172 - DNA, 25 bp, Homo sapien
cactgtagcttgttggatggtcaca

SEQ ID NO: 4076173 - DNA, 25 bp, Homo sapien
gtggaacctccaagcctaattctgg

SEQ ID NO: 4076174 - DNA, 25 bp, Homo sapien
ctcggtaaggttgcccaaggtcgca

SEQ ID NO: 4076175 - DNA, 25 bp, Homo sapien
taattctggaggagactttaactcg

SEQ ID NO: 4076176 - DNA, 25 bp, Homo sapien
cttttgccacgaagtaacccagcca

SEQ ID NO: 4076177 - DNA, 25 bp, Homo sapien
caggaaattcaaggtaaagcatttt

SEQ ID NO: 4076178 - DNA, 25 bp, Homo sapien
aggaaattcaaggtaaagcattttg

SEQ ID NO: 4076179 - DNA, 25 bp, Homo sapien
ggcaggaaattcaaggtaaagcatt

SEQ ID NO: 4076180 - DNA, 25 bp, Homo sapien
gcaggaaattcaaggtaaagcattt

SEQ ID NO: 4076181 - DNA, 25 bp, Homo sapien
gaaaggcaaggtaatcctagattag

SEQ ID NO: 4076182 - DNA, 25 bp, Homo sapien
cctagattagcagagggagataacc

SEQ ID NO: 4076183 - DNA, 25 bp, Homo sapien
tgcctcgccctgtgtttgggagctc

SEQ ID NO: 4076184 - DNA, 25 bp, Homo sapien
aattgaggaaacagaggcgagtata

SEQ ID NO: 4076185 - DNA, 25 bp, Homo sapien
aacgcacatttgcacatttattcta

SEQ ID NO: 4076186 - DNA, 25 bp, Homo sapien
ccacaaacgcacatttgcacattta

SEQ ID NO: 4076187 - DNA, 25 bp, Homo sapien
cacatttgcacatttattctacgtg

SEQ ID NO: 4076188 - DNA, 25 bp, Homo sapien
caaacgcacatttgcacatttattc

SEQ ID NO: 4076189 - DNA, 25 bp, Homo sapien
gaggacggacgccattatcgcatct

SEQ ID NO: 4076190 - DNA, 25 bp, Homo sapien
gagtccggagagactacaagtcccg

SEQ ID NO: 4076191 - DNA, 25 bp, Homo sapien
tgattgttctcacgcaggccatggg

SEQ ID NO: 4076192 - DNA, 25 bp, Homo sapien
tctaagaccataatcactgccgcgt

SEQ ID NO: 4076193 - DNA, 25 bp, Homo sapien
gtttttcactgatgagatggtaggg

SEQ ID NO: 4076194 - DNA, 25 bp, Homo sapien
cacactgtgtgagcaaattggagag

SEQ ID NO: 4076195 - DNA, 25 bp, Homo sapien
aattggagagattgccttgatagag

SEQ ID NO: 4076196 - DNA, 25 bp, Homo sapien
gatagaggactgatgtttttcactg

SEQ ID NO: 4076197 - DNA, 25 bp, Homo sapien
aagggtagcgagcttgcaccctgac

SEQ ID NO: 4076198 - DNA, 25 bp, Homo sapien
gctttgaagggtagcgagcttgcac

SEQ ID NO: 4076199 - DNA, 25 bp, Homo sapien
tgaagggtagcgagcttgcaccctg

SEQ ID NO: 4076200 - DNA, 25 bp, Homo sapien
tggagcgagtgtgggctttgaaggg

SEQ ID NO: 4076201 - DNA, 25 bp, Homo sapien
ttggagttgcctgttctgcccagga

SEQ ID NO: 4076202 - DNA, 25 bp, Homo sapien
tctgcccaggaatgtactccagggc

SEQ ID NO: 4076203 - DNA, 25 bp, Homo sapien
cctgatggcgatgctggaactcgca

SEQ ID NO: 4076204 - DNA, 25 bp, Homo sapien
ggaacaggtaattgccctgtttgga

SEQ ID NO: 4076205 - DNA, 25 bp, Homo sapien
gatgtttactgttgtctgaggcagg

SEQ ID NO: 4076206 - DNA, 25 bp, Homo sapien
tctctgggctgttccgcttctttag

SEQ ID NO: 4076207 - DNA, 25 bp, Homo sapien
agagtccagtttcccctcgggtgat

SEQ ID NO: 4076208 - DNA, 25 bp, Homo sapien
gtgggacctggagcaccaacttgca

SEQ ID NO: 4076209 - DNA, 25 bp, Homo sapien
tgtggccttggtaattgcccacagt

SEQ ID NO: 4076210 - DNA, 25 bp, Homo sapien
tccttgtggccttggtaattgccca

SEQ ID NO: 4076211 - DNA, 25 bp, Homo sapien
ttggtaattgcccacagtcaacggg

SEQ ID NO: 4076212 - DNA, 25 bp, Homo sapien
cgccgttccacagccgcctctgaat

SEQ ID NO: 4076213 - DNA, 25 bp, Homo sapien
tcagtgtgccaagcgggccgtctgc

SEQ ID NO: 4076214 - DNA, 25 bp, Homo sapien
caaggcccggcagacccgtgtggta

SEQ ID NO: 4076215 - DNA, 25 bp, Homo sapien
tagcaaagaccctgactttggctcc

SEQ ID NO: 4076216 - DNA, 25 bp, Homo sapien
gcagtggtgagcgtactgggagcat

SEQ ID NO: 4076217 - DNA, 25 bp, Homo sapien
gattaaacattctggatcgtcagcg

SEQ ID NO: 4076218 - DNA, 25 bp, Homo sapien
ggagcagactccacgactcgctgct

SEQ ID NO: 4076219 - DNA, 25 bp, Homo sapien
tcagcgttcacggtggagcagactc

SEQ ID NO: 4076220 - DNA, 25 bp, Homo sapien
tcaagaaccgtccaatttgattaaa

SEQ ID NO: 4076221 - DNA, 25 bp, Homo sapien
gatggcgcggtgctccattcggaac

SEQ ID NO: 4076222 - DNA, 25 bp, Homo sapien
tggtggtggaggatggcgcggtgct

SEQ ID NO: 4076223 - DNA, 25 bp, Homo sapien
gaggatggcgcggtgctccattcgg

SEQ ID NO: 4076224 - DNA, 25 bp, Homo sapien
ggcgcggtgctccattcggaaccca

SEQ ID NO: 4076225 - DNA, 25 bp, Homo sapien
ctgtggaaggacacatggagcagag

SEQ ID NO: 4076226 - DNA, 25 bp, Homo sapien
gtggaaggacacatggagcagaggc

SEQ ID NO: 4076227 - DNA, 25 bp, Homo sapien
ggaaggacacatggagcagaggcgg

SEQ ID NO: 4076228 - DNA, 25 bp, Homo sapien
tggaaggacacatggagcagaggcg

SEQ ID NO: 4076229 - DNA, 25 bp, Homo sapien
gtgtccacattctgtcgtggttgag

SEQ ID NO: 4076230 - DNA, 25 bp, Homo sapien
tcgtggttgagaccggatcctgtgt

SEQ ID NO: 4076231 - DNA, 25 bp, Homo sapien
cacattctgtcgtggttgagaccgg

SEQ ID NO: 4076232 - DNA, 25 bp, Homo sapien
ttgagaccggatcctgtgtggaccg

SEQ ID NO: 4076233 - DNA, 25 bp, Homo sapien
ggccgttgtggcctgtagtgatttt

SEQ ID NO: 4076234 - DNA, 25 bp, Homo sapien
tgtggcctgtagtgattttcctttt

SEQ ID NO: 4076235 - DNA, 25 bp, Homo sapien
cgttgtggcctgtagtgattttcct

SEQ ID NO: 4076236 - DNA, 25 bp, Homo sapien
ccgttgtggcctgtagtgattttcc

SEQ ID NO: 4076237 - DNA, 25 bp, Homo sapien
tgtcatcatggcatgctgcaagctc

SEQ ID NO: 4076238 - DNA, 25 bp, Homo sapien
atgacgcggggggaattgggccacg

SEQ ID NO: 4076239 - DNA, 25 bp, Homo sapien
cacggtccctgctgtcatcatggca

SEQ ID NO: 4076240 - DNA, 25 bp, Homo sapien
ctttcaccagatgacgcggggggaa

SEQ ID NO: 4076241 - DNA, 25 bp, Homo sapien
ctcagctcttgtgtcggtgggagct

SEQ ID NO: 4076242 - DNA, 25 bp, Homo sapien
aagtgagctcagctcttgtgtcggt

SEQ ID NO: 4076243 - DNA, 25 bp, Homo sapien
tgagcagagtgctgccgctgccagt

SEQ ID NO: 4076244 - DNA, 25 bp, Homo sapien
tctgcgttttctgccgaaatgcgtc

SEQ ID NO: 4076245 - DNA, 25 bp, Homo sapien
taggtcatgttaggtggtggtcctt

SEQ ID NO: 4076246 - DNA, 25 bp, Homo sapien
ggtcgtttgtgccacgttccctcat

SEQ ID NO: 4076247 - DNA, 25 bp, Homo sapien
tggtggtccttggtcgtttgtgcca

SEQ ID NO: 4076248 - DNA, 25 bp, Homo sapien
tctttgtggtgtaggtcatgttagg

SEQ ID NO: 4076249 - DNA, 25 bp, Homo sapien
gaggtggccgggactcctggtagta

SEQ ID NO: 4076250 - DNA, 25 bp, Homo sapien
gagggaggagcctcgggatgcggaa

SEQ ID NO: 4076251 - DNA, 25 bp, Homo sapien
aggagcctcgggatgcggaagggcg

SEQ ID NO: 4076252 - DNA, 25 bp, Homo sapien
agggcgagagcagggcgatgagggt

SEQ ID NO: 4076253 - DNA, 25 bp, Homo sapien
tgacacctgggagatgaatttcagt

SEQ ID NO: 4076254 - DNA, 25 bp, Homo sapien
cagtctgatggtggatctggaccca

SEQ ID NO: 4076255 - DNA, 25 bp, Homo sapien
ccagatggcttgcttgggattcagc

SEQ ID NO: 4076256 - DNA, 25 bp, Homo sapien
cttgggaagagccacacttgaggat

SEQ ID NO: 4076257 - DNA, 25 bp, Homo sapien
cccccgcaagcacacatttgggggg

SEQ ID NO: 4076258 - DNA, 25 bp, Homo sapien
tttcccccgcaagcacacatttggg

SEQ ID NO: 4076259 - DNA, 25 bp, Homo sapien
ccctttcccccgcaagcacacattt

SEQ ID NO: 4076260 - DNA, 25 bp, Homo sapien
ccccgcaagcacacatttggggggc

SEQ ID NO: 4076261 - DNA, 25 bp, Homo sapien
gacttcttcacatgtctcagtttaa

SEQ ID NO: 4076262 - DNA, 25 bp, Homo sapien
gttccacttcagactgatttcgggc

SEQ ID NO: 4076263 - DNA, 25 bp, Homo sapien
taggctgagacttcttcacatgtct

SEQ ID NO: 4076264 - DNA, 25 bp, Homo sapien
gatttcgggcaaaagaagtaggctg

SEQ ID NO: 4076265 - DNA, 25 bp, Homo sapien
cggcagctaggactctctgggatta

SEQ ID NO: 4076266 - DNA, 25 bp, Homo sapien
ctgtcgtgggctcttccgtgagctc

SEQ ID NO: 4076267 - DNA, 25 bp, Homo sapien
cacagctgtcgtgggctcttccgtg

SEQ ID NO: 4076268 - DNA, 25 bp, Homo sapien
gggagagcaggtactggcaccggca

SEQ ID NO: 4076269 - DNA, 25 bp, Homo sapien
cagtgccttcaggagggaatttttg

SEQ ID NO: 4076270 - DNA, 25 bp, Homo sapien
tcagtcctgcgtggagatagggtgc

SEQ ID NO: 4076271 - DNA, 25 bp, Homo sapien
gagatagggtgctccgctagccgct

SEQ ID NO: 4076272 - DNA, 25 bp, Homo sapien
gctagccgctcttcccaatgcctct

SEQ ID NO: 4076273 - DNA, 25 bp, Homo sapien
tgtttggggttcttgaggaatatgc

SEQ ID NO: 4076274 - DNA, 25 bp, Homo sapien
tctgcttgtgtttggggttcttgag

SEQ ID NO: 4076275 - DNA, 25 bp, Homo sapien
tttggggttcttgaggaatatgctg

SEQ ID NO: 4076276 - DNA, 25 bp, Homo sapien
cttgtgtttggggttcttgaggaat

SEQ ID NO: 4076277 - DNA, 25 bp, Homo sapien
tcacctcgttctgttgtcggtgttg

SEQ ID NO: 4076278 - DNA, 25 bp, Homo sapien
tgtcggtgttgacttggattttggt

SEQ ID NO: 4076279 - DNA, 25 bp, Homo sapien
gttgacttggattttggttttgcta

SEQ ID NO: 4076280 - DNA, 25 bp, Homo sapien
gttctgttgtcggtgttgacttgga

SEQ ID NO: 4076281 - DNA, 25 bp, Homo sapien
cccgccctggacagcacagttgtgg

SEQ ID NO: 4076282 - DNA, 25 bp, Homo sapien
acagcacagttgtggacaggacaga

SEQ ID NO: 4076283 - DNA, 25 bp, Homo sapien
cacagttgtggacaggacagatggt

SEQ ID NO: 4076284 - DNA, 25 bp, Homo sapien
ccctggacagcacagttgtggacag

SEQ ID NO: 4076285 - DNA, 25 bp, Homo sapien
atgctgctcgggctcaggacagaac

SEQ ID NO: 4076286 - DNA, 25 bp, Homo sapien
tcatggtggcaggatgctgctcggg

SEQ ID NO: 4076287 - DNA, 25 bp, Homo sapien
gtggcaggatgctgctcgggctcag

SEQ ID NO: 4076288 - DNA, 25 bp, Homo sapien
caggatgctgctcgggctcaggaca

SEQ ID NO: 4076289 - DNA, 25 bp, Homo sapien
gtaaaactccacagacgttcgcggc

SEQ ID NO: 4076290 - DNA, 25 bp, Homo sapien
acagacgttcgcggcctcttgcata

SEQ ID NO: 4076291 - DNA, 25 bp, Homo sapien
atgtaaaactccacagacgttcgcg

SEQ ID NO: 4076292 - DNA, 25 bp, Homo sapien
aaaactccacagacgttcgcggcct

SEQ ID NO: 4076293 - DNA, 25 bp, Homo sapien
tgctctggatgatgtcggaacacga

SEQ ID NO: 4076294 - DNA, 25 bp, Homo sapien
tgaactctttcgtgttgaccggcca

SEQ ID NO: 4076295 - DNA, 25 bp, Homo sapien
gattgcagtggaagacctgagccct

SEQ ID NO: 4076296 - DNA, 25 bp, Homo sapien
tcacgtgtagcgatggttaatgtcc

SEQ ID NO: 4076297 - DNA, 25 bp, Homo sapien
caggctctggtgtcgctagccttcc

SEQ ID NO: 4076298 - DNA, 25 bp, Homo sapien
agctcgtgctgaagcgcaggctctg

SEQ ID NO: 4076299 - DNA, 25 bp, Homo sapien
tgtcagatattccagccgacagctc

SEQ ID NO: 4076300 - DNA, 25 bp, Homo sapien
tcggacctgcttggtgtccactcat

SEQ ID NO: 4076301 - DNA, 25 bp, Homo sapien
tgctggccgaagcagtggtgcctct

SEQ ID NO: 4076302 - DNA, 25 bp, Homo sapien
gctgtagccttctgcccggtgtgtc

SEQ ID NO: 4076303 - DNA, 25 bp, Homo sapien
gttaggtgctttgtgggcctcgcca

SEQ ID NO: 4076304 - DNA, 25 bp, Homo sapien
gccgcaacaagcctggagggactgt

SEQ ID NO: 4076305 - DNA, 25 bp, Homo sapien
cggccgtcttccgagctccgctgct

SEQ ID NO: 4076306 - DNA, 25 bp, Homo sapien
acccggccgtcttccgagctccgct

SEQ ID NO: 4076307 - DNA, 25 bp, Homo sapien
cgctacccggccgtcttccgagctc

SEQ ID NO: 4076308 - DNA, 25 bp, Homo sapien
cgtcttccgagctccgctgctggtg

SEQ ID NO: 4076309 - DNA, 25 bp, Homo sapien
cgttatgtcacatggtctgcaggga

SEQ ID NO: 4076310 - DNA, 25 bp, Homo sapien
cagggcacgcacatgctcacgttta

SEQ ID NO: 4076311 - DNA, 25 bp, Homo sapien
tggtgtaaacaggatgcagcagagc

SEQ ID NO: 4076312 - DNA, 25 bp, Homo sapien
gacagttcggttggtgcattcgtta

SEQ ID NO: 4076313 - DNA, 25 bp, Homo sapien
acacaggacacagggcgggtgacgg

SEQ ID NO: 4076314 - DNA, 25 bp, Homo sapien
ctgcgcgcatccaggacacaggaca

SEQ ID NO: 4076315 - DNA, 25 bp, Homo sapien
gacacaggacacagggcgggtgatg

SEQ ID NO: 4076316 - DNA, 25 bp, Homo sapien
gacacaggacacagggcgggtgacg

SEQ ID NO: 4076317 - DNA, 25 bp, Homo sapien
atgcaggcccgcgtggctgcgcgca

SEQ ID NO: 4076318 - DNA, 25 bp, Homo sapien
ggggatgcaggcccgcgtggctgcg

SEQ ID NO: 4076319 - DNA, 25 bp, Homo sapien
tgcaggcccgcgtggctgcgcgcat

SEQ ID NO: 4076320 - DNA, 25 bp, Homo sapien
ggatgcaggcccgcgtggctgcgcg

SEQ ID NO: 4076321 - DNA, 25 bp, Homo sapien
gcagctcacagccccggattttctg

SEQ ID NO: 4076322 - DNA, 25 bp, Homo sapien
gagttggctactgggcagctcagac

SEQ ID NO: 4076323 - DNA, 25 bp, Homo sapien
cccagcacacctgtggagttggcta

SEQ ID NO: 4076324 - DNA, 25 bp, Homo sapien
caggtgacagggctctgtgtgccca

SEQ ID NO: 4076325 - DNA, 25 bp, Homo sapien
gagggttctcgggttctgctcactg

SEQ ID NO: 4076326 - DNA, 25 bp, Homo sapien
ttggagatggcttccgatgctaacc

SEQ ID NO: 4076327 - DNA, 25 bp, Homo sapien
gatgctaacctctgctgcgagggtt

SEQ ID NO: 4076328 - DNA, 25 bp, Homo sapien
ctggttctgagtgttgctggtccct

SEQ ID NO: 4076329 - DNA, 25 bp, Homo sapien
tcctgctcggtggattctgctctgg

SEQ ID NO: 4076330 - DNA, 25 bp, Homo sapien
tttgctttcggcacgcagagcagca

SEQ ID NO: 4076331 - DNA, 25 bp, Homo sapien
cattctaggctgtcttttggcatcc

SEQ ID NO: 4076332 - DNA, 25 bp, Homo sapien
tctgctctgggtcgggattctcagt

SEQ ID NO: 4076333 - DNA, 25 bp, Homo sapien
tcttcagcacttccatggggggtgc

SEQ ID NO: 4076334 - DNA, 25 bp, Homo sapien
tgtgccgagaatggggccagcatct

SEQ ID NO: 4076335 - DNA, 25 bp, Homo sapien
gtcagatttaatctcagcccgtagt

SEQ ID NO: 4076336 - DNA, 25 bp, Homo sapien
ccgtagtggcgtcctctcttcagca

SEQ ID NO: 4076337 - DNA, 25 bp, Homo sapien
agctcttggtgatgccagtgaaggc

SEQ ID NO: 4076338 - DNA, 25 bp, Homo sapien
ctgtgagagctgtcagctgtggcca

SEQ ID NO: 4076339 - DNA, 25 bp, Homo sapien
tggtagctcttggtgatgccagtga

SEQ ID NO: 4076340 - DNA, 25 bp, Homo sapien
cagtgaaggctggtgaggcacagct

SEQ ID NO: 4076341 - DNA, 25 bp, Homo sapien
ttcaatggcgtttgatgggcgctca

SEQ ID NO: 4076342 - DNA, 25 bp, Homo sapien
cagagcccgtctgcttcagaagccg

SEQ ID NO: 4076343 - DNA, 25 bp, Homo sapien
tccaaagcctgattttcgtgcccag

SEQ ID NO: 4076344 - DNA, 25 bp, Homo sapien
tggcgattgcggtactgcccttcaa

SEQ ID NO: 4076345 - DNA, 25 bp, Homo sapien
ccagcctgttgcgatgctccatgtt

SEQ ID NO: 4076346 - DNA, 25 bp, Homo sapien
agcctgttgcgatgctccatgtttg

SEQ ID NO: 4076347 - DNA, 25 bp, Homo sapien
ctgtctcccgggtgaccgtccttcg

SEQ ID NO: 4076348 - DNA, 25 bp, Homo sapien
caggactgtctcccgggtgaccgtc

SEQ ID NO: 4076349 - DNA, 25 bp, Homo sapien
agttcccggtgggttatcctgagag

SEQ ID NO: 4076350 - DNA, 25 bp, Homo sapien
gagcaccagggactcgggcgtgtct

SEQ ID NO: 4076351 - DNA, 25 bp, Homo sapien
tggcagtggctttaatttggacacc

SEQ ID NO: 4076352 - DNA, 25 bp, Homo sapien
agggactcgggcgtgtctgctggca

SEQ ID NO: 4076353 - DNA, 25 bp, Homo sapien
ctccattcttagttccacggaggga

SEQ ID NO: 4076354 - DNA, 25 bp, Homo sapien
atagcctccattcttagttccacgg

SEQ ID NO: 4076355 - DNA, 25 bp, Homo sapien
cattcttagttccacggagggaggg

SEQ ID NO: 4076356 - DNA, 25 bp, Homo sapien
tagcctccattcttagttccacgga

SEQ ID NO: 4076357 - DNA, 25 bp, Homo sapien
attctgcggcgatgctgcctctgga

SEQ ID NO: 4076358 - DNA, 25 bp, Homo sapien
gatagaccagttggccacttcaggg

SEQ ID NO: 4076359 - DNA, 25 bp, Homo sapien
gctttgctgccgtgggtaccctgag

SEQ ID NO: 4076360 - DNA, 25 bp, Homo sapien
agcatctgcgcaagccacagcagga

SEQ ID NO: 4076361 - DNA, 25 bp, Homo sapien
gggcaaaatgtccatgccagaatct

SEQ ID NO: 4076362 - DNA, 25 bp, Homo sapien
cacagccaagctgttgaccgcagca

SEQ ID NO: 4076363 - DNA, 25 bp, Homo sapien
gcgggcctcgcagcatgagatcaag

SEQ ID NO: 4076364 - DNA, 25 bp, Homo sapien
ccccagtggtttagggctgaggccg

SEQ ID NO: 4076365 - DNA, 25 bp, Homo sapien
cagcacacattgagcttgtagaaag

SEQ ID NO: 4076366 - DNA, 25 bp, Homo sapien
catgtgtagatgtggagctccttaa

SEQ ID NO: 4076367 - DNA, 25 bp, Homo sapien
cacattgagcttgtagaaagtatgg

SEQ ID NO: 4076368 - DNA, 25 bp, Homo sapien
tccttaagggcaggacccgtgccca

SEQ ID NO: 4076369 - DNA, 25 bp, Homo sapien
gcccacgttgtgtaaaattggaaga

SEQ ID NO: 4076370 - DNA, 25 bp, Homo sapien
gaatgttcttcacacccttcatgtt

SEQ ID NO: 4076371 - DNA, 25 bp, Homo sapien
gcaaaatgcaggcactctgactggc

SEQ ID NO: 4076372 - DNA, 25 bp, Homo sapien
acccttcatgttggcaatgtttggg

SEQ ID NO: 4076373 - DNA, 25 bp, Homo sapien
ggcactgtgcgagacagtctgactt

SEQ ID NO: 4076374 - DNA, 25 bp, Homo sapien
gttgcggcactgtgcgagacagtct

SEQ ID NO: 4076375 - DNA, 25 bp, Homo sapien
gggaagttgcggcactgtgcgagac

SEQ ID NO: 4076376 - DNA, 25 bp, Homo sapien
gcggcactgtgcgagacagtctgac

SEQ ID NO: 4076377 - DNA, 25 bp, Homo sapien
acaagtaagagagatggcggggcca

SEQ ID NO: 4076378 - DNA, 25 bp, Homo sapien
caagtaagagagatggcggggccat

SEQ ID NO: 4076379 - DNA, 25 bp, Homo sapien
ctgacaagtaagagagatggcgggg

SEQ ID NO: 4076380 - DNA, 25 bp, Homo sapien
gacaagtaagagagatggcggggcc

SEQ ID NO: 4076381 - DNA, 25 bp, Homo sapien
gcgtgcagtgactcgcgctggccct

SEQ ID NO: 4076382 - DNA, 25 bp, Homo sapien
gtgcagtgactcgcgctggccctgt

SEQ ID NO: 4076383 - DNA, 25 bp, Homo sapien
gcagtgactcgcgctggccctgtcc

SEQ ID NO: 4076384 - DNA, 25 bp, Homo sapien
tgcgtgcagtgactcgcgctggccc

SEQ ID NO: 4076385 - DNA, 25 bp, Homo sapien
ctgtgttccgacaagccaggcgccg

SEQ ID NO: 4076386 - DNA, 25 bp, Homo sapien
gggcacgcagcgagcactttccgga

SEQ ID NO: 4076387 - DNA, 25 bp, Homo sapien
agcactttccggacagtgcggtgcg

SEQ ID NO: 4076388 - DNA, 25 bp, Homo sapien
aagtggtgctggccggatgcccaca

SEQ ID NO: 4076389 - DNA, 25 bp, Homo sapien
ttgaagtcacactcctgccccctta

SEQ ID NO: 4076390 - DNA, 25 bp, Homo sapien
gattgaagtcacactcctgccccct

SEQ ID NO: 4076391 - DNA, 25 bp, Homo sapien
ctgattgaagtcacactcctgcccc

SEQ ID NO: 4076392 - DNA, 25 bp, Homo sapien
gaagtcacactcctgcccccttaaa

SEQ ID NO: 4076393 - DNA, 25 bp, Homo sapien
tatcagggatgttgcctggtcggaa

SEQ ID NO: 4076394 - DNA, 25 bp, Homo sapien
ttgcctggtcggaacccctgtacca

SEQ ID NO: 4076395 - DNA, 25 bp, Homo sapien
gcatgaccttgaggagagtagggat

SEQ ID NO: 4076396 - DNA, 25 bp, Homo sapien
ccagtgtgtatcagggatgttgcct

SEQ ID NO: 4076397 - DNA, 25 bp, Homo sapien
cctggtggggaagggtcacatttag

SEQ ID NO: 4076398 - DNA, 25 bp, Homo sapien
ctggagccacggcctggtggggaag

SEQ ID NO: 4076399 - DNA, 25 bp, Homo sapien
tggtggggaagggtcacatttaggc

SEQ ID NO: 4076400 - DNA, 25 bp, Homo sapien
gaagggtcacatttaggccccagac

SEQ ID NO: 4076401 - DNA, 25 bp, Homo sapien
ttagccaccagcacatagcaaccac

SEQ ID NO: 4076402 - DNA, 25 bp, Homo sapien
aagtgtgagcggcttgtgtgagaag

SEQ ID NO: 4076403 - DNA, 25 bp, Homo sapien
gtgtgagaagtgtgcaaaggtgctc

SEQ ID NO: 4076404 - DNA, 25 bp, Homo sapien
ctgctgtggccgaaggtgccgaagt

SEQ ID NO: 4076405 - DNA, 25 bp, Homo sapien
ctgtcggcacgagtggcaaggccgt

SEQ ID NO: 4076406 - DNA, 25 bp, Homo sapien
cggcacgagtggcaaggccgtatgt

SEQ ID NO: 4076407 - DNA, 25 bp, Homo sapien
gcacgagtggcaaggccgtatgttt

SEQ ID NO: 4076408 - DNA, 25 bp, Homo sapien
gtcggcacgagtggcaaggccgtat

SEQ ID NO: 4076409 - DNA, 25 bp, Homo sapien
agccagccgcagagcactgtggaga

SEQ ID NO: 4076410 - DNA, 25 bp, Homo sapien
tggagactgctgtgcctaccgcttg

SEQ ID NO: 4076411 - DNA, 25 bp, Homo sapien
ccaaggctgtgcttgattgaggttc

SEQ ID NO: 4076412 - DNA, 25 bp, Homo sapien
catgctgaaacgctggagccagccg

SEQ ID NO: 4076413 - DNA, 25 bp, Homo sapien
tgaaggcctgcatcagacttggggt

SEQ ID NO: 4076414 - DNA, 25 bp, Homo sapien
ctgaaggcctgcatcagacttgggg

SEQ ID NO: 4076415 - DNA, 25 bp, Homo sapien
ccctgaaggcctgcatcagacttgg

SEQ ID NO: 4076416 - DNA, 25 bp, Homo sapien
cctgaaggcctgcatcagacttggg

SEQ ID NO: 4076417 - DNA, 25 bp, Homo sapien
cggcagcagcatcaactgcacagat

SEQ ID NO: 4076418 - DNA, 25 bp, Homo sapien
actgcacagatcccagggcgctcat

SEQ ID NO: 4076419 - DNA, 25 bp, Homo sapien
gcagcagcatcaactgcacagatcc

SEQ ID NO: 4076420 - DNA, 25 bp, Homo sapien
catcaactgcacagatcccagggcg

SEQ ID NO: 4076421 - DNA, 25 bp, Homo sapien
ctctgtccagtgtcatgaggcaggt

SEQ ID NO: 4076422 - DNA, 25 bp, Homo sapien
tccgatggggtattgctgacctact

SEQ ID NO: 4076423 - DNA, 25 bp, Homo sapien
tcatgaggcaggtgtttgcaaagcc

SEQ ID NO: 4076424 - DNA, 25 bp, Homo sapien
tctcggttccgatggggtattgctg

SEQ ID NO: 4076425 - DNA, 25 bp, Homo sapien
gacacactcaagtatcacaggcaga

SEQ ID NO: 4076426 - DNA, 25 bp, Homo sapien
ggcagagataattttgacagcagcc

SEQ ID NO: 4076427 - DNA, 25 bp, Homo sapien
gataattttgacagcagccagagag

SEQ ID NO: 4076428 - DNA, 25 bp, Homo sapien
gagaaaggacagatgcctgcgatgg

SEQ ID NO: 4076429 - DNA, 25 bp, Homo sapien
caaagaatgggacgtcatccagcca

SEQ ID NO: 4076430 - DNA, 25 bp, Homo sapien
tcagaggagctgtgccaagtgaagc

SEQ ID NO: 4076431 - DNA, 25 bp, Homo sapien
cgtgaaggaacagaacatggatgcg

SEQ ID NO: 4076432 - DNA, 25 bp, Homo sapien
gacaactgcagagagaccggttcgt

SEQ ID NO: 4076433 - DNA, 25 bp, Homo sapien
ctgcagcagcccatattgggtgtgc

SEQ ID NO: 4076434 - DNA, 25 bp, Homo sapien
ttgggtgtgcccatcagaaacggca

SEQ ID NO: 4076435 - DNA, 25 bp, Homo sapien
ggtggaagacggtgcggtgccttct

SEQ ID NO: 4076436 - DNA, 25 bp, Homo sapien
catcagaaacggcaagtgggcttca

SEQ ID NO: 4076437 - DNA, 25 bp, Homo sapien
gagggttcacattactaggacgcca

SEQ ID NO: 4076438 - DNA, 25 bp, Homo sapien
gacaggtttcacaggtatccacggg

SEQ ID NO: 4076439 - DNA, 25 bp, Homo sapien
tcaaattcacaatgggatctggccc

SEQ ID NO: 4076440 - DNA, 25 bp, Homo sapien
tttaaagtagcaggtgtccccgatg

SEQ ID NO: 4076441 - DNA, 25 bp, Homo sapien
gatcttgatggttcctagagcctgg

SEQ ID NO: 4076442 - DNA, 25 bp, Homo sapien
agtgttccctggctcgcttcctgta

SEQ ID NO: 4076443 - DNA, 25 bp, Homo sapien
tagctgctccacacggcggaattct

SEQ ID NO: 4076444 - DNA, 25 bp, Homo sapien
cacccctaagggagcatagctgctc

SEQ ID NO: 4076445 - DNA, 25 bp, Homo sapien
gcagactcccagccgggtgccgttc

SEQ ID NO: 4076446 - DNA, 25 bp, Homo sapien
gactcccagccgggtgccgttcctg

SEQ ID NO: 4076447 - DNA, 25 bp, Homo sapien
actcccagccgggtgccgttcctgc

SEQ ID NO: 4076448 - DNA, 25 bp, Homo sapien
agactcccagccgggtgccgttcct

SEQ ID NO: 4076449 - DNA, 25 bp, Homo sapien
tttatggcgaaagccaggtgaagcc

SEQ ID NO: 4076450 - DNA, 25 bp, Homo sapien
ggccgctcgttccagtttatggcga

SEQ ID NO: 4076451 - DNA, 25 bp, Homo sapien
tggatctctcttgaccagacaaggt

SEQ ID NO: 4076452 - DNA, 25 bp, Homo sapien
tgcagaccgcctggaacttgaaact

SEQ ID NO: 4076453 - DNA, 25 bp, Homo sapien
tccatcatggttgcaagctgcaggc

SEQ ID NO: 4076454 - DNA, 25 bp, Homo sapien
aaaagtccctggattccagaagtca

SEQ ID NO: 4076455 - DNA, 25 bp, Homo sapien
gataacggcacgtgtgctacgtggt

SEQ ID NO: 4076456 - DNA, 25 bp, Homo sapien
ctgggtcttggcacgggcccagtaa

SEQ ID NO: 4076457 - DNA, 25 bp, Homo sapien
accagaccccattgccctgccacac

SEQ ID NO: 4076458 - DNA, 25 bp, Homo sapien
caacatctggcccagcacagtgtgt

SEQ ID NO: 4076459 - DNA, 25 bp, Homo sapien
cagtgtgtgtccttcttgggtagcc

SEQ ID NO: 4076460 - DNA, 25 bp, Homo sapien
tggcccagcacagtgtgtgtccttc

SEQ ID NO: 4076461 - DNA, 25 bp, Homo sapien
tgtgtccttcttgggtagccgggtc

SEQ ID NO: 4076462 - DNA, 25 bp, Homo sapien
gcctatcgtaggtcaggtctggcct

SEQ ID NO: 4076463 - DNA, 25 bp, Homo sapien
cacaaaggctctcgcagctgaaggg

SEQ ID NO: 4076464 - DNA, 25 bp, Homo sapien
cagctgaagggcctatcgtaggtca

SEQ ID NO: 4076465 - DNA, 25 bp, Homo sapien
aaggcacaaaggctctcgcagctga

SEQ ID NO: 4076466 - DNA, 25 bp, Homo sapien
tggtctagtgcgtggagaagctccc

SEQ ID NO: 4076467 - DNA, 25 bp, Homo sapien
gtggtcccatgatgtccggcgagca

SEQ ID NO: 4076468 - DNA, 25 bp, Homo sapien
tcttgccgcactgagagtgctgtgg

SEQ ID NO: 4076469 - DNA, 25 bp, Homo sapien
tgggccgtgcgatgggaggtcctgt

SEQ ID NO: 4076470 - DNA, 25 bp, Homo sapien
tcttcatggaccgtgggaaagtgcc

SEQ ID NO: 4076471 - DNA, 25 bp, Homo sapien
gaagtgtcacgtgccttcacggacc

SEQ ID NO: 4076472 - DNA, 25 bp, Homo sapien
cagtttcttggagccccggtcgtgt

SEQ ID NO: 4076473 - DNA, 25 bp, Homo sapien
tgtcttcacaaaccgtggaggtgcc

SEQ ID NO: 4076474 - DNA, 25 bp, Homo sapien
ctatggcaaagggaggctccacaca

SEQ ID NO: 4076475 - DNA, 25 bp, Homo sapien
gaggccgccgtgtcgtcagaggcag

SEQ ID NO: 4076476 - DNA, 25 bp, Homo sapien
tgggaggtggacctgtcggagtgac

SEQ ID NO: 4076477 - DNA, 25 bp, Homo sapien
tggacctgtcggagtgactgtgagg

SEQ ID NO: 4076478 - DNA, 25 bp, Homo sapien
gaaccgtgggagcaatgtctaccat

SEQ ID NO: 4076479 - DNA, 25 bp, Homo sapien
tgcccgccgtgggcccagagaaccg

SEQ ID NO: 4076480 - DNA, 25 bp, Homo sapien
agagaaccgtgggagcaatgtctac

SEQ ID NO: 4076481 - DNA, 25 bp, Homo sapien
cccgccgtgggcccagagaaccgtg

SEQ ID NO: 4076482 - DNA, 25 bp, Homo sapien
ctggccgtccgcagcctgtggtgca

SEQ ID NO: 4076483 - DNA, 25 bp, Homo sapien
agaagcctggccgtccgcagcctgt

SEQ ID NO: 4076484 - DNA, 25 bp, Homo sapien
aagcctggccgtccgcagcctgtgg

SEQ ID NO: 4076485 - DNA, 25 bp, Homo sapien
cgtccgcagcctgtggtgcacgtgc

SEQ ID NO: 4076486 - DNA, 25 bp, Homo sapien
actgggcagttgcaggcggccggat

SEQ ID NO: 4076487 - DNA, 25 bp, Homo sapien
gagagccctcaaccagggacggagc

SEQ ID NO: 4076488 - DNA, 25 bp, Homo sapien
atgctggacccgcagcgtgagctcc

SEQ ID NO: 4076489 - DNA, 25 bp, Homo sapien
ctgtgacggtcacctggactgggca

SEQ ID NO: 4076490 - DNA, 25 bp, Homo sapien
tcagatacggcgaaaccatttgttg

SEQ ID NO: 4076491 - DNA, 25 bp, Homo sapien
agatacggcgaaaccatttgttgag

SEQ ID NO: 4076492 - DNA, 25 bp, Homo sapien
tgttgagagtggaaaggctggtgtg

SEQ ID NO: 4076493 - DNA, 25 bp, Homo sapien
gctggtgtgatgagcgtcgtcagtg

SEQ ID NO: 4076494 - DNA, 25 bp, Homo sapien
tgtgtctaacccgaatgccaagctt

SEQ ID NO: 4076495 - DNA, 25 bp, Homo sapien
tcgctgtatgctctggacaaaccgc

SEQ ID NO: 4076496 - DNA, 25 bp, Homo sapien
gccggtatagtcagttctgccaaaa

SEQ ID NO: 4076497 - DNA, 25 bp, Homo sapien
tctgccaaaacgtgatatcggcgtc

SEQ ID NO: 4076498 - DNA, 25 bp, Homo sapien
cgcttggcagctcgagaacgtcttt

SEQ ID NO: 4076499 - DNA, 25 bp, Homo sapien
aagggttacttctgatgattcccac

SEQ ID NO: 4076500 - DNA, 25 bp, Homo sapien
ggtattgtttctgacggcctaagaa

SEQ ID NO: 4076501 - DNA, 25 bp, Homo sapien
aatcattactgctggcgatcccgca

SEQ ID NO: 4076502 - DNA, 25 bp, Homo sapien
ggctgcccttggcatttagctttat

SEQ ID NO: 4076503 - DNA, 25 bp, Homo sapien
cttggcatttagctttatgaccact

SEQ ID NO: 4076504 - DNA, 25 bp, Homo sapien
gcccttggcatttagctttatgacc

SEQ ID NO: 4076505 - DNA, 25 bp, Homo sapien
tgcccttggcatttagctttatgac

SEQ ID NO: 4076506 - DNA, 25 bp, Homo sapien
gcgtctggaacagaagcctattggc

SEQ ID NO: 4076507 - DNA, 25 bp, Homo sapien
ggcgtctggaacagaagcctattgg

SEQ ID NO: 4076508 - DNA, 25 bp, Homo sapien
tcctcagcaacagcggcttggtgct

SEQ ID NO: 4076509 - DNA, 25 bp, Homo sapien
cttggtgctgggaccggtgatccac

SEQ ID NO: 4076510 - DNA, 25 bp, Homo sapien
ctgggaccggtgatccacaggcaca

SEQ ID NO: 4076511 - DNA, 25 bp, Homo sapien
tctttcctgggcattcggttcctca

SEQ ID NO: 4076512 - DNA, 25 bp, Homo sapien
gtgggacggatggcatcgtcaccct

SEQ ID NO: 4076513 - DNA, 25 bp, Homo sapien
tgggacggatggcatcgtcaccctc

SEQ ID NO: 4076514 - DNA, 25 bp, Homo sapien
gacacgggtgaaaatgctgcctttg

SEQ ID NO: 4076515 - DNA, 25 bp, Homo sapien
cacacgtttgctctaattaagggaa

SEQ ID NO: 4076516 - DNA, 25 bp, Homo sapien
tggatgtgtcctctgatcggcccct

SEQ ID NO: 4076517 - DNA, 25 bp, Homo sapien
gaacgttgtgaacaagtcgcagcct

SEQ ID NO: 4076518 - DNA, 25 bp, Homo sapien
gccaggcccgcttctttgtgctctt

SEQ ID NO: 4076519 - DNA, 25 bp, Homo sapien
cagctgatattgtggaacttctcct

SEQ ID NO: 4076520 - DNA, 25 bp, Homo sapien
agcagccaggcccgcttctttgtgc

SEQ ID NO: 4076521 - DNA, 25 bp, Homo sapien
gatattgtggaacttctccttgaag

SEQ ID NO: 4076522 - DNA, 25 bp, Homo sapien
ctcccgttgtgcaatggctttgtcg

SEQ ID NO: 4076523 - DNA, 25 bp, Homo sapien
cagtaggtggtgtgccccgccatgc

SEQ ID NO: 4076524 - DNA, 25 bp, Homo sapien
ccatcgtgggctcgtgtgtctttta

SEQ ID NO: 4076525 - DNA, 25 bp, Homo sapien
tcacagtctacactgagcgtgcttt

SEQ ID NO: 4076526 - DNA, 25 bp, Homo sapien
gctttccaaattggctcagggccag

SEQ ID NO: 4076527 - DNA, 25 bp, Homo sapien
gaggccgacccttgtcccacggtca

SEQ ID NO: 4076528 - DNA, 25 bp, Homo sapien
tcactgcgtgtagagtgagattcat

SEQ ID NO: 4076529 - DNA, 25 bp, Homo sapien
tcccacggtcactgcgtgtagagtg

SEQ ID NO: 4076530 - DNA, 25 bp, Homo sapien
ccttgtcccacggtcactgcgtgta

SEQ ID NO: 4076531 - DNA, 25 bp, Homo sapien
taggcacagcaaattcaaatgctat

SEQ ID NO: 4076532 - DNA, 25 bp, Homo sapien
gcgacatgttctaaagttactcgga

SEQ ID NO: 4076533 - DNA, 25 bp, Homo sapien
gaacttgcgtttccttccatgcaag

SEQ ID NO: 4076534 - DNA, 25 bp, Homo sapien
cttgcggcttgtggaatgctcccct

SEQ ID NO: 4076535 - DNA, 25 bp, Homo sapien
tcctgcatttaaaccgggcctcgta

SEQ ID NO: 4076536 - DNA, 25 bp, Homo sapien
gagtgaaactcgctcaccagattcc

SEQ ID NO: 4076537 - DNA, 25 bp, Homo sapien
tgttgcatcagagtgaaactcgctc

SEQ ID NO: 4076538 - DNA, 25 bp, Homo sapien
ctcctgcatttaaaccgggcctcgt

SEQ ID NO: 4076539 - DNA, 25 bp, Homo sapien
gcaatccgtagctttgagagctccc

SEQ ID NO: 4076540 - DNA, 25 bp, Homo sapien
tcatggcccatgaagcagaattgga

SEQ ID NO: 4076541 - DNA, 25 bp, Homo sapien
tagtccatcgatcaaactgctgaga

SEQ ID NO: 4076542 - DNA, 25 bp, Homo sapien
gaggcggtgttgactcttgcaatcc

SEQ ID NO: 4076543 - DNA, 25 bp, Homo sapien
gagctgggggtgctccctgacgacc

SEQ ID NO: 4076544 - DNA, 25 bp, Homo sapien
gggtgctccctgacgaccgggagga

SEQ ID NO: 4076545 - DNA, 25 bp, Homo sapien
gctccctgacgaccgggaggagagg

SEQ ID NO: 4076546 - DNA, 25 bp, Homo sapien
cctgacgaccgggaggagaggaagg

SEQ ID NO: 4076547 - DNA, 25 bp, Homo sapien
aggccctaagtgagttctgctccgg

SEQ ID NO: 4076548 - DNA, 25 bp, Homo sapien
agcactccgacgttctgagaactgg

SEQ ID NO: 4076549 - DNA, 25 bp, Homo sapien
gagagcactgacgtccaacaggagt

SEQ ID NO: 4076550 - DNA, 25 bp, Homo sapien
agaggacacttcgatttgccagaga

SEQ ID NO: 4076551 - DNA, 25 bp, Homo sapien
tcaggaataatctttgagttgaaac

SEQ ID NO: 4076552 - DNA, 25 bp, Homo sapien
ccttcacctggaggccgccttcacc

SEQ ID NO: 4076553 - DNA, 25 bp, Homo sapien
ccttcacctggaggccgcccttgct

SEQ ID NO: 4076554 - DNA, 25 bp, Homo sapien
tcacctggaggccgccttcacctgg

SEQ ID NO: 4076555 - DNA, 25 bp, Homo sapien
tcaggctgtgtagccaaatgcagtc

SEQ ID NO: 4076556 - DNA, 25 bp, Homo sapien
tgtggttcggctacagaagagaata

SEQ ID NO: 4076557 - DNA, 25 bp, Homo sapien
ttttgtggttcggctacagaagaga

SEQ ID NO: 4076558 - DNA, 25 bp, Homo sapien
tattttttgtggttcggctacagaa

SEQ ID NO: 4076559 - DNA, 25 bp, Homo sapien
ttttttgtggttcggctacagaaga

SEQ ID NO: 4076560 - DNA, 25 bp, Homo sapien
tagaagtcagaaccccaccagcttc

SEQ ID NO: 4076561 - DNA, 25 bp, Homo sapien
atagaagtcagaaccccaccagctt

SEQ ID NO: 4076562 - DNA, 25 bp, Homo sapien
gtgtgaatcgggatagaagtcagaa

SEQ ID NO: 4076563 - DNA, 25 bp, Homo sapien
aaagggtgtgaatcgggatagaagt

SEQ ID NO: 4076564 - DNA, 25 bp, Homo sapien
aacaaattcctcttgttgaaaccat

SEQ ID NO: 4076565 - DNA, 25 bp, Homo sapien
caaattcctcttgttgaaaccatgc

SEQ ID NO: 4076566 - DNA, 25 bp, Homo sapien
acaaattcctcttgttgaaaccatg

SEQ ID NO: 4076567 - DNA, 25 bp, Homo sapien
gtctgcctgcaagacctgcacagct

SEQ ID NO: 4076568 - DNA, 25 bp, Homo sapien
gctgggccggcgtctggaaatgatt

SEQ ID NO: 4076569 - DNA, 25 bp, Homo sapien
cagctcccaggcctatggctttggg

SEQ ID NO: 4076570 - DNA, 25 bp, Homo sapien
ctaagtggtgtcgtctgcctgcaag

SEQ ID NO: 4076571 - DNA, 25 bp, Homo sapien
cagatctgacgggaaacgcatgtgg

SEQ ID NO: 4076572 - DNA, 25 bp, Homo sapien
aaataacgtgtgcatggaacgtgcc

SEQ ID NO: 4076573 - DNA, 25 bp, Homo sapien
gcaagccgcctgttctcagaataca

SEQ ID NO: 4076574 - DNA, 25 bp, Homo sapien
gaacgtgccttcagatgagcgtgaa

SEQ ID NO: 4076575 - DNA, 25 bp, Homo sapien
taattatagctgtgttcgtgggccc

SEQ ID NO: 4076576 - DNA, 25 bp, Homo sapien
cacactgataatctgctctgaggct

SEQ ID NO: 4076577 - DNA, 25 bp, Homo sapien
ccgggactgtgctgctaattatagc

SEQ ID NO: 4076578 - DNA, 25 bp, Homo sapien
cgctgggtggttttgcgaaaatcca

SEQ ID NO: 4076579 - DNA, 25 bp, Homo sapien
tgtccaacgttcagaatgaactctg

SEQ ID NO: 4076580 - DNA, 25 bp, Homo sapien
gccactccattgagtttggtggagt

SEQ ID NO: 4076581 - DNA, 25 bp, Homo sapien
tgaactctgcaaccttgtcccttgg

SEQ ID NO: 4076582 - DNA, 25 bp, Homo sapien
ccttggccaggagtggccgacagcc

SEQ ID NO: 4076583 - DNA, 25 bp, Homo sapien
tgttcagcggctggaattcgtccat

SEQ ID NO: 4076584 - DNA, 25 bp, Homo sapien
tgactgtcttgttcagcggctggaa

SEQ ID NO: 4076585 - DNA, 25 bp, Homo sapien
ctgtcttgttcagcggctggaattc

SEQ ID NO: 4076586 - DNA, 25 bp, Homo sapien
cttgttcagcggctggaattcgtcc

SEQ ID NO: 4076587 - DNA, 25 bp, Homo sapien
tttggccactagagcaggagcgagc

SEQ ID NO: 4076588 - DNA, 25 bp, Homo sapien
gaggagggctttggccactagagca

SEQ ID NO: 4076589 - DNA, 25 bp, Homo sapien
gcgggatcctgcctctttgtacaga

SEQ ID NO: 4076590 - DNA, 25 bp, Homo sapien
gggatcctgcctctttgtacagaca

SEQ ID NO: 4076591 - DNA, 25 bp, Homo sapien
tctctgctccaactatggcctcgct

SEQ ID NO: 4076592 - DNA, 25 bp, Homo sapien
ggcctcgctcttcacatgcaggcag

SEQ ID NO: 4076593 - DNA, 25 bp, Homo sapien
cccgaggaggttgtggggccaggat

SEQ ID NO: 4076594 - DNA, 25 bp, Homo sapien
caactatggcctcgctcttcacatg

SEQ ID NO: 4076595 - DNA, 25 bp, Homo sapien
tgtgaagcgcccagtgggtccccag

SEQ ID NO: 4076596 - DNA, 25 bp, Homo sapien
cccacagccttttgattccttatct

SEQ ID NO: 4076597 - DNA, 25 bp, Homo sapien
acagccttttgattccttatctgtg

SEQ ID NO: 4076598 - DNA, 25 bp, Homo sapien
gtccccagcggctcagggtgttgag

SEQ ID NO: 4076599 - DNA, 25 bp, Homo sapien
gctagccattgcctgaaagcatgag

SEQ ID NO: 4076600 - DNA, 25 bp, Homo sapien
aaagcatgaggcatctccggcacat

SEQ ID NO: 4076601 - DNA, 25 bp, Homo sapien
taaagcccagggtgtttacacattc

SEQ ID NO: 4076602 - DNA, 25 bp, Homo sapien
cacagcgaggatgctagccattgcc

SEQ ID NO: 4076603 - DNA, 25 bp, Homo sapien
tgctggccagcccgggtattctgca

SEQ ID NO: 4076604 - DNA, 25 bp, Homo sapien
gcccgggtattctgcatcccctggg

SEQ ID NO: 4076605 - DNA, 25 bp, Homo sapien
agcccgggtattctgcatcccctgg

SEQ ID NO: 4076606 - DNA, 25 bp, Homo sapien
tggccagcccgggtattctgcatcc

SEQ ID NO: 4076607 - DNA, 25 bp, Homo sapien
actcttgttgcccatgctggactgc

SEQ ID NO: 4076608 - DNA, 25 bp, Homo sapien
cttttcttttctttcgttgatggag

SEQ ID NO: 4076609 - DNA, 25 bp, Homo sapien
catgcaccaccataccccactaatt

SEQ ID NO: 4076610 - DNA, 25 bp, Homo sapien
tcttttctttcgttgatggagtttc

SEQ ID NO: 4076611 - DNA, 25 bp, Homo sapien
agggtcctggatgctcgcacctgct

SEQ ID NO: 4076612 - DNA, 25 bp, Homo sapien
cagggtcctggatgctcgcacctgc

SEQ ID NO: 4076613 - DNA, 25 bp, Homo sapien
ccagggtcctggatgctcgcacctg

SEQ ID NO: 4076614 - DNA, 25 bp, Homo sapien
catactcgatgcttcacagactgtg

SEQ ID NO: 4076615 - DNA, 25 bp, Homo sapien
tactcgatgcttcacagactgtgcc

SEQ ID NO: 4076616 - DNA, 25 bp, Homo sapien
atactcgatgcttcacagactgtgc

SEQ ID NO: 4076617 - DNA, 25 bp, Homo sapien
ggaaaattctccaggctgctttcct

SEQ ID NO: 4076618 - DNA, 25 bp, Homo sapien
gaaaattctccaggctgctttcctc

SEQ ID NO: 4076619 - DNA, 25 bp, Homo sapien
tcatggccgtaggatcctgagaacc

SEQ ID NO: 4076620 - DNA, 25 bp, Homo sapien
cagacggacactggcaaacattgct

SEQ ID NO: 4076621 - DNA, 25 bp, Homo sapien
gtatacacgcttggacactcgctcg

SEQ ID NO: 4076622 - DNA, 25 bp, Homo sapien
ggacctgacatggttcgcagacgga

SEQ ID NO: 4076623 - DNA, 25 bp, Homo sapien
ggagtggctcgggccctcacagcat

SEQ ID NO: 4076624 - DNA, 25 bp, Homo sapien
gagtggctcgggccctcacagcatc

SEQ ID NO: 4076625 - DNA, 25 bp, Homo sapien
gtggctcgggccctcacagcatcct

SEQ ID NO: 4076626 - DNA, 25 bp, Homo sapien
cttccggggcgttgatggcgggagg

SEQ ID NO: 4076627 - DNA, 25 bp, Homo sapien
agagggaggcgcggctttctcctca

SEQ ID NO: 4076628 - DNA, 25 bp, Homo sapien
aatctcgacattccagcagttcttg

SEQ ID NO: 4076629 - DNA, 25 bp, Homo sapien
agttcttgggatggaccaagggcca

SEQ ID NO: 4076630 - DNA, 25 bp, Homo sapien
gggccagaaacacctttgggcagga

SEQ ID NO: 4076631 - DNA, 25 bp, Homo sapien
ggcaggaaacaccttcagccaggct

SEQ ID NO: 4076632 - DNA, 25 bp, Homo sapien
tgtgaggagttggagcggattctta

SEQ ID NO: 4076633 - DNA, 25 bp, Homo sapien
ggctggccactttccggatggccca

SEQ ID NO: 4076634 - DNA, 25 bp, Homo sapien
gagcggattcttagggctggccact

SEQ ID NO: 4076635 - DNA, 25 bp, Homo sapien
gattcttagggctggccactttccg

SEQ ID NO: 4076636 - DNA, 25 bp, Homo sapien
gtagctcagctgtgaacgcggaggc

SEQ ID NO: 4076637 - DNA, 25 bp, Homo sapien
tagctcagctgtgaacgcggaggct

SEQ ID NO: 4076638 - DNA, 25 bp, Homo sapien
aggtagctcagctgtgaacgcggag

SEQ ID NO: 4076639 - DNA, 25 bp, Homo sapien
ctcagctgtgaacgcggaggctggt

SEQ ID NO: 4076640 - DNA, 25 bp, Homo sapien
tgggaactgcctttggcttttggag

SEQ ID NO: 4076641 - DNA, 25 bp, Homo sapien
gtgcctccatcgtgccccattgctg

SEQ ID NO: 4076642 - DNA, 25 bp, Homo sapien
gcttttggagtttttgtgcatcctg

SEQ ID NO: 4076643 - DNA, 25 bp, Homo sapien
gggatggagcacattcccctgttgg

SEQ ID NO: 4076644 - DNA, 25 bp, Homo sapien
ctctgagctcgctggtgccctcttc

SEQ ID NO: 4076645 - DNA, 25 bp, Homo sapien
gctctgagctcgctggtgccctctt

SEQ ID NO: 4076646 - DNA, 25 bp, Homo sapien
ctgagctcgctggtgccctcttctc

SEQ ID NO: 4076647 - DNA, 25 bp, Homo sapien
tctgagctcgctggtgccctcttct

SEQ ID NO: 4076648 - DNA, 25 bp, Homo sapien
ttacaccttcctgccaatctgcagg

SEQ ID NO: 4076649 - DNA, 25 bp, Homo sapien
tccccatctgaacgccgggtattta

SEQ ID NO: 4076650 - DNA, 25 bp, Homo sapien
tctccccatctgaacgccgggtatt

SEQ ID NO: 4076651 - DNA, 25 bp, Homo sapien
gccgggtatttacaccttcctgcca

SEQ ID NO: 4076652 - DNA, 25 bp, Homo sapien
ttggccactgagcaatgcgttcaaa

SEQ ID NO: 4076653 - DNA, 25 bp, Homo sapien
ccctggtgcagcacgttggatgcag

SEQ ID NO: 4076654 - DNA, 25 bp, Homo sapien
cgttcaaactgtctctcagtgggtc

SEQ ID NO: 4076655 - DNA, 25 bp, Homo sapien
ccatttcggtgcaggctggatcaga

SEQ ID NO: 4076656 - DNA, 25 bp, Homo sapien
gaagctgttgccatgagccctgcat

SEQ ID NO: 4076657 - DNA, 25 bp, Homo sapien
cacggcacacggcaagtgggaaacg

SEQ ID NO: 4076658 - DNA, 25 bp, Homo sapien
cactgccgctgagtctctcacagcc

SEQ ID NO: 4076659 - DNA, 25 bp, Homo sapien
tggaggtgtccggcctgcctcactg

SEQ ID NO: 4076660 - DNA, 25 bp, Homo sapien
acagcccatggggtgaggtggggtc

SEQ ID NO: 4076661 - DNA, 25 bp, Homo sapien
cacagcccatggggtgaggtggggt

SEQ ID NO: 4076662 - DNA, 25 bp, Homo sapien
cagcccatggggtgaggtggggtct

SEQ ID NO: 4076663 - DNA, 25 bp, Homo sapien
gcccatggggtgaggtggggtctgg

SEQ ID NO: 4076664 - DNA, 25 bp, Homo sapien
aacatgcctcgagcgtgtttgctgg

SEQ ID NO: 4076665 - DNA, 25 bp, Homo sapien
ggtccccaggactctttcatcagcg

SEQ ID NO: 4076666 - DNA, 25 bp, Homo sapien
gcagcggcacccctggtcagggctt

SEQ ID NO: 4076667 - DNA, 25 bp, Homo sapien
ggcttcccggaccaagaacatgcct

SEQ ID NO: 4076668 - DNA, 25 bp, Homo sapien
gcgcttgtttgaggacgaccttttc

SEQ ID NO: 4076669 - DNA, 25 bp, Homo sapien
gcagcattgcagggcgcttgtttga

SEQ ID NO: 4076670 - DNA, 25 bp, Homo sapien
agcactgccccggtgcaatggcagc

SEQ ID NO: 4076671 - DNA, 25 bp, Homo sapien
tgtggtggcatcaccacggcccctc

SEQ ID NO: 4076672 - DNA, 25 bp, Homo sapien
tgtgatggaggcagcgcacggcacg

SEQ ID NO: 4076673 - DNA, 25 bp, Homo sapien
gtgatggaggcagcgcacggcacgg

SEQ ID NO: 4076674 - DNA, 25 bp, Homo sapien
ctgtgatggaggcagcgcacggcac

SEQ ID NO: 4076675 - DNA, 25 bp, Homo sapien
ggacacaggcatctcctgagcgttt

SEQ ID NO: 4076676 - DNA, 25 bp, Homo sapien
tagccacgtccaggaattcccagga

SEQ ID NO: 4076677 - DNA, 25 bp, Homo sapien
caccgtcaggcgagtaggggacaca

SEQ ID NO: 4076678 - DNA, 25 bp, Homo sapien
gcgtttgggcaggtcaccatttgta

SEQ ID NO: 4076679 - DNA, 25 bp, Homo sapien
tgggagtggtcatgagatgccgtcc

SEQ ID NO: 4076680 - DNA, 25 bp, Homo sapien
gagccccctcctcagatctccactc

SEQ ID NO: 4076681 - DNA, 25 bp, Homo sapien
gccccctcctcagatctccactcgg

SEQ ID NO: 4076682 - DNA, 25 bp, Homo sapien
cctcctcagatctccactcggggct

SEQ ID NO: 4076683 - DNA, 25 bp, Homo sapien
ccccctcctcagatctccactcggg

SEQ ID NO: 4076684 - DNA, 25 bp, Homo sapien
agaacagctgggctctcggtcagga

SEQ ID NO: 4076685 - DNA, 25 bp, Homo sapien
cagctgggctctcggtcaggacagt

SEQ ID NO: 4076686 - DNA, 25 bp, Homo sapien
ggctctcggtcaggacagtggccct

SEQ ID NO: 4076687 - DNA, 25 bp, Homo sapien
ctgagaacagctgggctctcggtca

SEQ ID NO: 4076688 - DNA, 25 bp, Homo sapien
tccgttcctcggcttctccatgaaa

SEQ ID NO: 4076689 - DNA, 25 bp, Homo sapien
agcactccgttcctcggcttctcca

SEQ ID NO: 4076690 - DNA, 25 bp, Homo sapien
catgaaaaggagaacgtgttccggc

SEQ ID NO: 4076691 - DNA, 25 bp, Homo sapien
gttcctcggcttctccatgaaaagg

SEQ ID NO: 4076692 - DNA, 25 bp, Homo sapien
tggttgagaaaggttctccattgcc

SEQ ID NO: 4076693 - DNA, 25 bp, Homo sapien
tgtggttgagaaaggttctccattg

SEQ ID NO: 4076694 - DNA, 25 bp, Homo sapien
gtggttgagaaaggttctccattgc

SEQ ID NO: 4076695 - DNA, 25 bp, Homo sapien
ctgtggttgagaaaggttctccatt

SEQ ID NO: 4076696 - DNA, 25 bp, Homo sapien
ctggctgctctgtagggccctgcat

SEQ ID NO: 4076697 - DNA, 25 bp, Homo sapien
tttctgcttggactccgaggcccct

SEQ ID NO: 4076698 - DNA, 25 bp, Homo sapien
gcttggactccgaggcccctgtccc

SEQ ID NO: 4076699 - DNA, 25 bp, Homo sapien
gctggctgctctgtagggccctgca

SEQ ID NO: 4076700 - DNA, 25 bp, Homo sapien
gaggtaatggggcaactccgcagct

SEQ ID NO: 4076701 - DNA, 25 bp, Homo sapien
aatggggcaactccgcagctcctgg

SEQ ID NO: 4076702 - DNA, 25 bp, Homo sapien
gtaatggggcaactccgcagctcct

SEQ ID NO: 4076703 - DNA, 25 bp, Homo sapien
aggtaatggggcaactccgcagctc

SEQ ID NO: 4076704 - DNA, 25 bp, Homo sapien
tctgcacggccagtacaacagcctg

SEQ ID NO: 4076705 - DNA, 25 bp, Homo sapien
ccaccctgttgcaggcgagtctgca

SEQ ID NO: 4076706 - DNA, 25 bp, Homo sapien
acacgtccccatcgcactgtgggct

SEQ ID NO: 4076707 - DNA, 25 bp, Homo sapien
tgacaccagggcgatggaatgcaca

SEQ ID NO: 4076708 - DNA, 25 bp, Homo sapien
tcgcccggtgagcaagggggccagc

SEQ ID NO: 4076709 - DNA, 25 bp, Homo sapien
ccagtcgcccggtgagcaagggggc

SEQ ID NO: 4076710 - DNA, 25 bp, Homo sapien
agtcgcccggtgagcaagggggcca

SEQ ID NO: 4076711 - DNA, 25 bp, Homo sapien
gcccggtgagcaagggggccagcat

SEQ ID NO: 4076712 - DNA, 25 bp, Homo sapien
aggaagatgcgggatgtcacctgca

SEQ ID NO: 4076713 - DNA, 25 bp, Homo sapien
gaagatgcgggatgtcacctgcacc

SEQ ID NO: 4076714 - DNA, 25 bp, Homo sapien
tcaggaagatgcgggatgtcacctg

SEQ ID NO: 4076715 - DNA, 25 bp, Homo sapien
agatgcgggatgtcacctgcaccca

SEQ ID NO: 4076716 - DNA, 25 bp, Homo sapien
tgcgacatacacagggcctcaagtc

SEQ ID NO: 4076717 - DNA, 25 bp, Homo sapien
agctgcgacatacacagggcctcaa

SEQ ID NO: 4076718 - DNA, 25 bp, Homo sapien
acagcagctgcgacatacacagggc

SEQ ID NO: 4076719 - DNA, 25 bp, Homo sapien
ccgacagcagctgcgacatacacag

SEQ ID NO: 4076720 - DNA, 25 bp, Homo sapien
cgtgctccgtacctcagggctgagt

SEQ ID NO: 4076721 - DNA, 25 bp, Homo sapien
aggacagggcacgtgctccgtacct

SEQ ID NO: 4076722 - DNA, 25 bp, Homo sapien
ttagaccccgcaccacaggtgtcat

SEQ ID NO: 4076723 - DNA, 25 bp, Homo sapien
ctcccaccttccgtgcacactcact

SEQ ID NO: 4076724 - DNA, 25 bp, Homo sapien
ccatgggagccacggtcctaaagct

SEQ ID NO: 4076725 - DNA, 25 bp, Homo sapien
gaggagctgccgagtctgtgcttct

SEQ ID NO: 4076726 - DNA, 25 bp, Homo sapien
acagaagggcacacgccatgggagc

SEQ ID NO: 4076727 - DNA, 25 bp, Homo sapien
atgaggtcgaggaatccgcaggtcc

SEQ ID NO: 4076728 - DNA, 25 bp, Homo sapien
tccccaggaaaacgccatggcagtt

SEQ ID NO: 4076729 - DNA, 25 bp, Homo sapien
agtgcaagacaccatcagtgtgtgc

SEQ ID NO: 4076730 - DNA, 25 bp, Homo sapien
tgctgctggacctgaaacgccacgg

SEQ ID NO: 4076731 - DNA, 25 bp, Homo sapien
ggctaccgtcgaagctctgctgctg

SEQ ID NO: 4076732 - DNA, 25 bp, Homo sapien
gagtaacacggccgctgctgtccgt

SEQ ID NO: 4076733 - DNA, 25 bp, Homo sapien
ggagtaacacggccgctgctgtccg

SEQ ID NO: 4076734 - DNA, 25 bp, Homo sapien
gtaacacggccgctgctgtccgtga

SEQ ID NO: 4076735 - DNA, 25 bp, Homo sapien
taacacggccgctgctgtccgtgac

SEQ ID NO: 4076736 - DNA, 25 bp, Homo sapien
ctgagaacacggagaagccccgttg

SEQ ID NO: 4076737 - DNA, 25 bp, Homo sapien
gagaacacggagaagccccgttgga

SEQ ID NO: 4076738 - DNA, 25 bp, Homo sapien
tgagaacacggagaagccccgttgg

SEQ ID NO: 4076739 - DNA, 25 bp, Homo sapien
tgggttagtattgatccagatgtgg

SEQ ID NO: 4076740 - DNA, 25 bp, Homo sapien
ctgggttagtattgatccagatgtg

SEQ ID NO: 4076741 - DNA, 25 bp, Homo sapien
ttagtattgatccagatgtggacac

SEQ ID NO: 4076742 - DNA, 25 bp, Homo sapien
acgggcgcccacaggcgtggcatca

SEQ ID NO: 4076743 - DNA, 25 bp, Homo sapien
cgggcgcccacaggcgtggcatcat

SEQ ID NO: 4076744 - DNA, 25 bp, Homo sapien
cagccctcaggccatccggtgaggg

SEQ ID NO: 4076745 - DNA, 25 bp, Homo sapien
tccggtgagggacggacaagcacca

SEQ ID NO: 4076746 - DNA, 25 bp, Homo sapien
cgtttcacagacgagaagaccaagg

SEQ ID NO: 4076747 - DNA, 25 bp, Homo sapien
ccgggttgccccttgagtctgggca

SEQ ID NO: 4076748 - DNA, 25 bp, Homo sapien
gtttcacagacgagaagaccaaggc

SEQ ID NO: 4076749 - DNA, 25 bp, Homo sapien
tttcacagacgagaagaccaaggcc

SEQ ID NO: 4076750 - DNA, 25 bp, Homo sapien
ttgtgctgctgctcattggtgattt

SEQ ID NO: 4076751 - DNA, 25 bp, Homo sapien
gtggcacccagaggtgcactctggc

SEQ ID NO: 4076752 - DNA, 25 bp, Homo sapien
gctgctcattggtgatttggcggta

SEQ ID NO: 4076753 - DNA, 25 bp, Homo sapien
gctcattggtgatttggcggtaaac

SEQ ID NO: 4076754 - DNA, 25 bp, Homo sapien
gtctccaagccggtgggtacggcca

SEQ ID NO: 4076755 - DNA, 25 bp, Homo sapien
ctccaagccggtgggtacggccagg

SEQ ID NO: 4076756 - DNA, 25 bp, Homo sapien
tctccaagccggtgggtacggccag

SEQ ID NO: 4076757 - DNA, 25 bp, Homo sapien
ggtgcactcccagaactaggagggc

SEQ ID NO: 4076758 - DNA, 25 bp, Homo sapien
aactaggagggccactggagcgaga

SEQ ID NO: 4076759 - DNA, 25 bp, Homo sapien
tgctgcgtcctggagggggcgtgcc

SEQ ID NO: 4076760 - DNA, 25 bp, Homo sapien
ccactggagcgagagtgggagccag

SEQ ID NO: 4076761 - DNA, 25 bp, Homo sapien
gggccagggcgagagcatcaccaag

SEQ ID NO: 4076762 - DNA, 25 bp, Homo sapien
gaaggccgtgagaaggagctgtgca

SEQ ID NO: 4076763 - DNA, 25 bp, Homo sapien
tgatgtgtggacttcgaggtgccca

SEQ ID NO: 4076764 - DNA, 25 bp, Homo sapien
accaagggcgctggccatctgggaa

SEQ ID NO: 4076765 - DNA, 25 bp, Homo sapien
ccgcctgatgccagcgtagggcgat

SEQ ID NO: 4076766 - DNA, 25 bp, Homo sapien
gtgtaagactctagcagccgcctga

SEQ ID NO: 4076767 - DNA, 25 bp, Homo sapien
catctgttctgcgttgggccaggtg

SEQ ID NO: 4076768 - DNA, 25 bp, Homo sapien
tgggagaacgtgcataagtgtaaga

SEQ ID NO: 4076769 - DNA, 25 bp, Homo sapien
gggctcaagtccttcatggccactg

SEQ ID NO: 4076770 - DNA, 25 bp, Homo sapien
ctggatgagctttgtgggcaactgc

SEQ ID NO: 4076771 - DNA, 25 bp, Homo sapien
acaggcaaagcagcgggaacatagc

SEQ ID NO: 4076772 - DNA, 25 bp, Homo sapien
gactgagaagcataggcgtcctgtc

SEQ ID NO: 4076773 - DNA, 25 bp, Homo sapien
ccctctgtaagacgagaggcctctg

SEQ ID NO: 4076774 - DNA, 25 bp, Homo sapien
ggtcgccacggggtccatttcacac

SEQ ID NO: 4076775 - DNA, 25 bp, Homo sapien
actgccctctgtaagacgagaggcc

SEQ ID NO: 4076776 - DNA, 25 bp, Homo sapien
cggggtccatttcacacaagcccag

SEQ ID NO: 4076777 - DNA, 25 bp, Homo sapien
gggcgctttccaaagccttgcctgc

SEQ ID NO: 4076778 - DNA, 25 bp, Homo sapien
gaagggcgctttccaaagccttgcc

SEQ ID NO: 4076779 - DNA, 25 bp, Homo sapien
cagggaagggcgctttccaaagcct

SEQ ID NO: 4076780 - DNA, 25 bp, Homo sapien
ctcacgtggatggaactcccccggc

SEQ ID NO: 4076781 - DNA, 25 bp, Homo sapien
gagcccagaggcccaaacggtctac

SEQ ID NO: 4076782 - DNA, 25 bp, Homo sapien
ggagcccagaggcccaaacggtcta

SEQ ID NO: 4076783 - DNA, 25 bp, Homo sapien
cctgcacccccacgtcctcctcgct

SEQ ID NO: 4076784 - DNA, 25 bp, Homo sapien
cccacgtcctcctcgctgtggaagc

SEQ ID NO: 4076785 - DNA, 25 bp, Homo sapien
cacccccacgtcctcctcgctgtgg

SEQ ID NO: 4076786 - DNA, 25 bp, Homo sapien
cccccacgtcctcctcgctgtggaa

SEQ ID NO: 4076787 - DNA, 25 bp, Homo sapien
cagcgggtcggagcctgagtcttct

SEQ ID NO: 4076788 - DNA, 25 bp, Homo sapien
ccacctgccccttcgcatctgtgtg

SEQ ID NO: 4076789 - DNA, 25 bp, Homo sapien
cagcagaagcgatcctttcagagct

SEQ ID NO: 4076790 - DNA, 25 bp, Homo sapien
ccttcgcatctgtgtgcgtcccctg

SEQ ID NO: 4076791 - DNA, 25 bp, Homo sapien
ggactggctgcaatcgtatacttca

SEQ ID NO: 4076792 - DNA, 25 bp, Homo sapien
ctctgtgaagtagccttgaggtggc

SEQ ID NO: 4076793 - DNA, 25 bp, Homo sapien
aaagatgggccagtacagttgggca

SEQ ID NO: 4076794 - DNA, 25 bp, Homo sapien
tatacttcagagctaaggacttcca

SEQ ID NO: 4076795 - DNA, 25 bp, Homo sapien
gaagcccaactgttcacggagaagt

SEQ ID NO: 4076796 - DNA, 25 bp, Homo sapien
atcagggaagcccaactgttcacgg

SEQ ID NO: 4076797 - DNA, 25 bp, Homo sapien
gggaagcccaactgttcacggagaa

SEQ ID NO: 4076798 - DNA, 25 bp, Homo sapien
tagcagatcagggaagcccaactgt

SEQ ID NO: 4076799 - DNA, 25 bp, Homo sapien
tcacacagttcacggtgacgtctat

SEQ ID NO: 4076800 - DNA, 25 bp, Homo sapien
cagttcacggtgacgtctatgatgc

SEQ ID NO: 4076801 - DNA, 25 bp, Homo sapien
cacagttcacggtgacgtctatgat

SEQ ID NO: 4076802 - DNA, 25 bp, Homo sapien
ggtcacacagttcacggtgacgtct

SEQ ID NO: 4076803 - DNA, 25 bp, Homo sapien
gttcacggtgacgtctatgatgccg

SEQ ID NO: 4076804 - DNA, 25 bp, Homo sapien
cggtgacgtctatgatgccgttgat

SEQ ID NO: 4076805 - DNA, 25 bp, Homo sapien
tctatgatgccgttgatggtgcagg

SEQ ID NO: 4076806 - DNA, 25 bp, Homo sapien
ggtcacacagttcacggtgacgtct

SEQ ID NO: 4076807 - DNA, 25 bp, Homo sapien
gctggcgaacctggggtcccaagac

SEQ ID NO: 4076808 - DNA, 25 bp, Homo sapien
gttcatggagccctggcgtggtgtc

SEQ ID NO: 4076809 - DNA, 25 bp, Homo sapien
cctgttggtctcgcctctgtctcct

SEQ ID NO: 4076810 - DNA, 25 bp, Homo sapien
ctgccagagccgagtcagcctcagg

SEQ ID NO: 4076811 - DNA, 25 bp, Homo sapien
cctggggaccgcagactcgagttgt

SEQ ID NO: 4076812 - DNA, 25 bp, Homo sapien
cagactcgagttgttggaggcccag

SEQ ID NO: 4076813 - DNA, 25 bp, Homo sapien
gccgggatttgaaaggtggcagcct

SEQ ID NO: 4076814 - DNA, 25 bp, Homo sapien
cagggatgctgtggcgccgggattt

SEQ ID NO: 4076815 - DNA, 25 bp, Homo sapien
cagacgtccactgccacccggccct

SEQ ID NO: 4076816 - DNA, 25 bp, Homo sapien
ccgcccagacgtccactgccacccg

SEQ ID NO: 4076817 - DNA, 25 bp, Homo sapien
ccacgcaggacagccccgcccagac

SEQ ID NO: 4076818 - DNA, 25 bp, Homo sapien
ccatgggtcagccagttagggcggg

SEQ ID NO: 4076819 - DNA, 25 bp, Homo sapien
gctattgctgcccgggcgtcctcat

SEQ ID NO: 4076820 - DNA, 25 bp, Homo sapien
tgcccgggcgtcctcatctgtgaga

SEQ ID NO: 4076821 - DNA, 25 bp, Homo sapien
tgctgcccgggcgtcctcatctgtg

SEQ ID NO: 4076822 - DNA, 25 bp, Homo sapien
attgctgcccgggcgtcctcatctg

SEQ ID NO: 4076823 - DNA, 25 bp, Homo sapien
actgtcaggtcaaggtcagccaccc

SEQ ID NO: 4076824 - DNA, 25 bp, Homo sapien
tcccgtggagtctccgtggtactcg

SEQ ID NO: 4076825 - DNA, 25 bp, Homo sapien
aagtggcacgctcgctccccgggag

SEQ ID NO: 4076826 - DNA, 25 bp, Homo sapien
cggcttccttctcgctgtgacaggg

SEQ ID NO: 4076827 - DNA, 25 bp, Homo sapien
caggcacagcctagcgggtggttct

SEQ ID NO: 4076828 - DNA, 25 bp, Homo sapien
aattccctcacaaggttgcggtcag

SEQ ID NO: 4076829 - DNA, 25 bp, Homo sapien
tgagtgcccggaaagcatggcagct

SEQ ID NO: 4076830 - DNA, 25 bp, Homo sapien
tcttagtttccaaaggtcaggatgc

SEQ ID NO: 4076831 - DNA, 25 bp, Homo sapien
ttccctgtcgccgatgtccagcagc

SEQ ID NO: 4076832 - DNA, 25 bp, Homo sapien
tgtcgccgatgtccagcagcccagc

SEQ ID NO: 4076833 - DNA, 25 bp, Homo sapien
gctcttccctgtcgccgatgtccag

SEQ ID NO: 4076834 - DNA, 25 bp, Homo sapien
acctgctcttccctgtcgccgatgt

SEQ ID NO: 4076835 - DNA, 25 bp, Homo sapien
ctggagggcagcagcgctgtcgccc

SEQ ID NO: 4076836 - DNA, 25 bp, Homo sapien
ctgcgtgagcacgcggtccgcttcg

SEQ ID NO: 4076837 - DNA, 25 bp, Homo sapien
agggggcaggcgcggaggtccttgg

SEQ ID NO: 4076838 - DNA, 25 bp, Homo sapien
cacgcggtccgcttcgcccgcaggg

SEQ ID NO: 4076839 - DNA, 25 bp, Homo sapien
gctccagagcgagacagccaccacc

SEQ ID NO: 4076840 - DNA, 25 bp, Homo sapien
tccagagcgagacagccaccacccc

SEQ ID NO: 4076841 - DNA, 25 bp, Homo sapien
agctccagagcgagacagccaccac

SEQ ID NO: 4076842 - DNA, 25 bp, Homo sapien
cagagcgagacagccaccaccccag

SEQ ID NO: 4076843 - DNA, 25 bp, Homo sapien
tggagatttgcacaacctcccgttc

SEQ ID NO: 4076844 - DNA, 25 bp, Homo sapien
tgttgctggaattccaaagtgacct

SEQ ID NO: 4076845 - DNA, 25 bp, Homo sapien
gaagtaagttgaggcagccgtggga

SEQ ID NO: 4076846 - DNA, 25 bp, Homo sapien
gatggtggtaggttccctcttagtc

SEQ ID NO: 4076847 - DNA, 25 bp, Homo sapien
tcacagcgtcgtgcctgtgaaggtg

SEQ ID NO: 4076848 - DNA, 25 bp, Homo sapien
tccggagtgtcgcaaaccaagtgcg

SEQ ID NO: 4076849 - DNA, 25 bp, Homo sapien
ggtgttgtaggccattcaaaacgcc

SEQ ID NO: 4076850 - DNA, 25 bp, Homo sapien
ggacgcacgtgtcctctcacagcgt

SEQ ID NO: 4076851 - DNA, 25 bp, Homo sapien
caggccctgcggcgctgccgtcccc

SEQ ID NO: 4076852 - DNA, 25 bp, Homo sapien
ggtgggagcagttgctttgctgcct

SEQ ID NO: 4076853 - DNA, 25 bp, Homo sapien
tgtgcggtgggagcagttgctttgc

SEQ ID NO: 4076854 - DNA, 25 bp, Homo sapien
gctctagcgccccacaagcttccag

SEQ ID NO: 4076855 - DNA, 25 bp, Homo sapien
cataaactgtgaagggctgtgcatt

SEQ ID NO: 4076856 - DNA, 25 bp, Homo sapien
cattcgtgttgatggggatctggtc

SEQ ID NO: 4076857 - DNA, 25 bp, Homo sapien
agcttcataaactgtgaagggctgt

SEQ ID NO: 4076858 - DNA, 25 bp, Homo sapien
tgaagggctgtgcattcgtgttgat

SEQ ID NO: 4076859 - DNA, 25 bp, Homo sapien
caagtgctgatcccgaactgaggag

SEQ ID NO: 4076860 - DNA, 25 bp, Homo sapien
gcaagtgctgatcccgaactgagga

SEQ ID NO: 4076861 - DNA, 25 bp, Homo sapien
cggcatccgcttttgtggttgccct

SEQ ID NO: 4076862 - DNA, 25 bp, Homo sapien
gatgagagatgctcctagctgggcc

SEQ ID NO: 4076863 - DNA, 25 bp, Homo sapien
cctgcttggcgagattcacgggatg

SEQ ID NO: 4076864 - DNA, 25 bp, Homo sapien
cagctgccctagtgcctggaagtca

SEQ ID NO: 4076865 - DNA, 25 bp, Homo sapien
gattgcgcgtgaggtactggccact

SEQ ID NO: 4076866 - DNA, 25 bp, Homo sapien
gggttctttgctagccccgggcatg

SEQ ID NO: 4076867 - DNA, 25 bp, Homo sapien
cagacgagaccggtgctgacttagg

SEQ ID NO: 4076868 - DNA, 25 bp, Homo sapien
taaataggagaacccatcaccatcc

SEQ ID NO: 4076869 - DNA, 25 bp, Homo sapien
tcaccacggctttgtgtggagcagg

SEQ ID NO: 4076870 - DNA, 25 bp, Homo sapien
tggatggacgctgggcctacagtac

SEQ ID NO: 4076871 - DNA, 25 bp, Homo sapien
tctggcaagagtggaatccgtgggc

SEQ ID NO: 4076872 - DNA, 25 bp, Homo sapien
gggttcgtcaagaatcatcaggtct

SEQ ID NO: 4076873 - DNA, 25 bp, Homo sapien
gaggccaagggtcacggcaggtaag

SEQ ID NO: 4076874 - DNA, 25 bp, Homo sapien
gtctggaaacggtgtcccaggccga

SEQ ID NO: 4076875 - DNA, 25 bp, Homo sapien
gctgagccgacgtttgagttccaaa

SEQ ID NO: 4076876 - DNA, 25 bp, Homo sapien
tcaaccagcgtgtgtatgagggacg

SEQ ID NO: 4076877 - DNA, 25 bp, Homo sapien
tcatgacgaggtaggaaccccacat

SEQ ID NO: 4076878 - DNA, 25 bp, Homo sapien
gcctcgtcaggaagacggccacagg

SEQ ID NO: 4076879 - DNA, 25 bp, Homo sapien
cccatgagctggtggcctcgtcagg

SEQ ID NO: 4076880 - DNA, 25 bp, Homo sapien
gtggcctcgtcaggaagacggccac

SEQ ID NO: 4076881 - DNA, 25 bp, Homo sapien
tgccgcatggccggggacacagcca

SEQ ID NO: 4076882 - DNA, 25 bp, Homo sapien
caggtgctcttgatgatggaggtaa

SEQ ID NO: 4076883 - DNA, 25 bp, Homo sapien
caccactgctggtgatggaggtagc

SEQ ID NO: 4076884 - DNA, 25 bp, Homo sapien
ctgatgataatggagatagcgggca

SEQ ID NO: 4076885 - DNA, 25 bp, Homo sapien
ctgaccgacaggtacagcgggccct

SEQ ID NO: 4076886 - DNA, 25 bp, Homo sapien
cgtggacgcagctgataagatcggt

SEQ ID NO: 4076887 - DNA, 25 bp, Homo sapien
tgataagatcggtccccggagatgg

SEQ ID NO: 4076888 - DNA, 25 bp, Homo sapien
ttttccattacagcggccgtggacg

SEQ ID NO: 4076889 - DNA, 25 bp, Homo sapien
gatcggtccccggagatgggacaaa

SEQ ID NO: 4076890 - DNA, 25 bp, Homo sapien
tcacaggaatgggtgttcccggtcc

SEQ ID NO: 4076891 - DNA, 25 bp, Homo sapien
tcctggttcgctgccatcttatctg

SEQ ID NO: 4076892 - DNA, 25 bp, Homo sapien
tagctggcccgtgtgactgtgatgc

SEQ ID NO: 4076893 - DNA, 25 bp, Homo sapien
ctgaagctgagacggcagaaccgct

SEQ ID NO: 4076894 - DNA, 25 bp, Homo sapien
gaggaaaatgagtgcacaagtcccc

SEQ ID NO: 4076895 - DNA, 25 bp, Homo sapien
aaatatttttgcgtctcagcgggcc

SEQ ID NO: 4076896 - DNA, 25 bp, Homo sapien
tggactctggcaccgacttgccgtg

SEQ ID NO: 4076897 - DNA, 25 bp, Homo sapien
gggcccctgtcgctcttggctgata

SEQ ID NO: 4076898 - DNA, 25 bp, Homo sapien
cacactccaggactcacgggagatg

SEQ ID NO: 4076899 - DNA, 25 bp, Homo sapien
ccacactccaggactcacgggagat

SEQ ID NO: 4076900 - DNA, 25 bp, Homo sapien
ggaaccaattccagggtcagatcca

SEQ ID NO: 4076901 - DNA, 25 bp, Homo sapien
actctgggcccatctcgcctgtgaa

SEQ ID NO: 4076902 - DNA, 25 bp, Homo sapien
agggcacggccgacgcttgtctgct

SEQ ID NO: 4076903 - DNA, 25 bp, Homo sapien
tgagtcctgccctagcacttctgcg

SEQ ID NO: 4076904 - DNA, 25 bp, Homo sapien
ccctgcgtgataactgcagactcag

SEQ ID NO: 4076905 - DNA, 25 bp, Homo sapien
gaggtggcgagcaggccgcagaggg

SEQ ID NO: 4076906 - DNA, 25 bp, Homo sapien
ggcagaggtggcgagcaggccgcag

SEQ ID NO: 4076907 - DNA, 25 bp, Homo sapien
taggggccacccctgcgtgataact

SEQ ID NO: 4076908 - DNA, 25 bp, Homo sapien
gaatgcgtgccgagtggagatccac

SEQ ID NO: 4076909 - DNA, 25 bp, Homo sapien
tttccattaaaagacacttcgtgtg

SEQ ID NO: 4076910 - DNA, 25 bp, Homo sapien
agtcagccccggtgggttcctgcag

SEQ ID NO: 4076911 - DNA, 25 bp, Homo sapien
gacggatgcgcagctgaaattccgg

SEQ ID NO: 4076912 - DNA, 25 bp, Homo sapien
gaagagttttgccaccccagaaatg

SEQ ID NO: 4076913 - DNA, 25 bp, Homo sapien
tgtaatgagtcgcagcaacacgagc

SEQ ID NO: 4076914 - DNA, 25 bp, Homo sapien
tctagtccggagtgtaacgagtcat

SEQ ID NO: 4076915 - DNA, 25 bp, Homo sapien
tttgatagaaacgtggaccgggcgc

SEQ ID NO: 4076916 - DNA, 25 bp, Homo sapien
aaactcagatcgcagacaggcacgt

SEQ ID NO: 4076917 - DNA, 25 bp, Homo sapien
tgagagctcttcatggaccacaggg

SEQ ID NO: 4076918 - DNA, 25 bp, Homo sapien
taacaacccctagtgatactgaggc

SEQ ID NO: 4076919 - DNA, 25 bp, Homo sapien
cagaaggtgccaactggtgtcgcag

SEQ ID NO: 4076920 - DNA, 25 bp, Homo sapien
tggcctcccaacttcgtttgactta

SEQ ID NO: 4076921 - DNA, 25 bp, Homo sapien
gacttatgtgtgatctctgaaatgc

SEQ ID NO: 4076922 - DNA, 25 bp, Homo sapien
taactgcatgttaacccattgaaaa

SEQ ID NO: 4076923 - DNA, 25 bp, Homo sapien
taaaccgcttagatactatatgcca

SEQ ID NO: 4076924 - DNA, 25 bp, Homo sapien
tgatacgcgtgaactctccacaaag

SEQ ID NO: 4076925 - DNA, 25 bp, Homo sapien
agaaatgcagacgtacagaggtggc

SEQ ID NO: 4076926 - DNA, 25 bp, Homo sapien
agttgtacctagatgagcctgggcc

SEQ ID NO: 4076927 - DNA, 25 bp, Homo sapien
tatgagcaaagtgtaaaagcccgtt

SEQ ID NO: 4076928 - DNA, 25 bp, Homo sapien
gcgacgcccggtattctgttccatg

SEQ ID NO: 4076929 - DNA, 25 bp, Homo sapien
ctattcgaaaagaacaggagcctga

SEQ ID NO: 4076930 - DNA, 25 bp, Homo sapien
gagattggaattctcggatcccgag

SEQ ID NO: 4076931 - DNA, 25 bp, Homo sapien
ccattggcgaagacgaacgggaatt

SEQ ID NO: 4076932 - DNA, 25 bp, Homo sapien
tacccaatgtacctggaagacgtgg

SEQ ID NO: 4076933 - DNA, 25 bp, Homo sapien
tctgtctgccgtgtgttcctcaggc

SEQ ID NO: 4076934 - DNA, 25 bp, Homo sapien
tgtccgtgttgagtgcacgccagtg

SEQ ID NO: 4076935 - DNA, 25 bp, Homo sapien
gtgttttctcgagcagcatatgggc

SEQ ID NO: 4076936 - DNA, 25 bp, Homo sapien
ccaggagagcattgcgcctcagttt

SEQ ID NO: 4076937 - DNA, 25 bp, Homo sapien
gcccaggagagcattgcgcctcagt

SEQ ID NO: 4076938 - DNA, 25 bp, Homo sapien
cagcccaggagagcattgcgcctca

SEQ ID NO: 4076939 - DNA, 25 bp, Homo sapien
aggagagcattgcgcctcagtttcc

SEQ ID NO: 4076940 - DNA, 25 bp, Homo sapien
ggtgggcaggcagacgtagaccctg

SEQ ID NO: 4076941 - DNA, 25 bp, Homo sapien
ggcaggcagacgtagaccctgcttg

SEQ ID NO: 4076942 - DNA, 25 bp, Homo sapien
aggcagacgtagaccctgcttggag

SEQ ID NO: 4076943 - DNA, 25 bp, Homo sapien
tgggcaggcagacgtagaccctgct

SEQ ID NO: 4076944 - DNA, 25 bp, Homo sapien
acagcgctgagaacacgcggaaggt

SEQ ID NO: 4076945 - DNA, 25 bp, Homo sapien
ttgtggtttgagagccgctcggcct

SEQ ID NO: 4076946 - DNA, 25 bp, Homo sapien
tcagaaccagagcaaagcgggagat

SEQ ID NO: 4076947 - DNA, 25 bp, Homo sapien
tcgttccgcatctccggaccagggt

SEQ ID NO: 4076948 - DNA, 25 bp, Homo sapien
gcgcaggatgcgggggcgcccagcc

SEQ ID NO: 4076949 - DNA, 25 bp, Homo sapien
cgcaggatgcgggggcgcccagccg

SEQ ID NO: 4076950 - DNA, 25 bp, Homo sapien
tcctgccgaacttttccactcggcc

SEQ ID NO: 4076951 - DNA, 25 bp, Homo sapien
tgccgaacttttccactcggccatt

SEQ ID NO: 4076952 - DNA, 25 bp, Homo sapien
ctgccctcatcaggccgaccaggtc

SEQ ID NO: 4076953 - DNA, 25 bp, Homo sapien
gctgccctcatcaggccgaccaggt

SEQ ID NO: 4076954 - DNA, 25 bp, Homo sapien
tgtgacccacgtgtggacagacctg

SEQ ID NO: 4076955 - DNA, 25 bp, Homo sapien
tgcccgagggaacggcgtgtgtgac

SEQ ID NO: 4076956 - DNA, 25 bp, Homo sapien
gacccacgtgtggacagacctgttc

SEQ ID NO: 4076957 - DNA, 25 bp, Homo sapien
agacctgttccccatgccaggaggg

SEQ ID NO: 4076958 - DNA, 25 bp, Homo sapien
ggcctgcagccctagccccaagccg

SEQ ID NO: 4076959 - DNA, 25 bp, Homo sapien
gccccaagccgcagctgggcaggtt

SEQ ID NO: 4076960 - DNA, 25 bp, Homo sapien
agccctagccccaagccgcagctgg

SEQ ID NO: 4076961 - DNA, 25 bp, Homo sapien
gccgcagctgggcaggttgggcaga

SEQ ID NO: 4076962 - DNA, 25 bp, Homo sapien
ttgcaggtgggtgcacctggcggga

SEQ ID NO: 4076963 - DNA, 25 bp, Homo sapien
caggtgggtgcacctggcgggaggg

SEQ ID NO: 4076964 - DNA, 25 bp, Homo sapien
gcatttattgcaggtgggtgcacct

SEQ ID NO: 4076965 - DNA, 25 bp, Homo sapien
tttattgcaggtgggtgcacctggc

SEQ ID NO: 4076966 - DNA, 25 bp, Homo sapien
tcacacgacctcgtcggtcaccggg

SEQ ID NO: 4076967 - DNA, 25 bp, Homo sapien
cgacctcgtcggtcaccgggatggg

SEQ ID NO: 4076968 - DNA, 25 bp, Homo sapien
acgacctcgtcggtcaccgggatgg

SEQ ID NO: 4076969 - DNA, 25 bp, Homo sapien
acacgacctcgtcggtcaccgggat

SEQ ID NO: 4076970 - DNA, 25 bp, Homo sapien
ccggggcttgggctcgatgggcgtc

SEQ ID NO: 4076971 - DNA, 25 bp, Homo sapien
cttgggctcgatgggcgtccactgc

SEQ ID NO: 4076972 - DNA, 25 bp, Homo sapien
atggtgcctccgatctgcggccgct

SEQ ID NO: 4076973 - DNA, 25 bp, Homo sapien
ggctcgatgggcgtccactgctcgc

SEQ ID NO: 4076974 - DNA, 25 bp, Homo sapien
atgcccggaggttccactgcaacag

SEQ ID NO: 4076975 - DNA, 25 bp, Homo sapien
tagtactcaaattctcctctcaagg

SEQ ID NO: 4076976 - DNA, 25 bp, Homo sapien
tgaatcccacgcaggatggtgtgac

SEQ ID NO: 4076977 - DNA, 25 bp, Homo sapien
agagcttgaagaccacgggattcca

SEQ ID NO: 4076978 - DNA, 25 bp, Homo sapien
ctgactccaaaacggaaacattcca

SEQ ID NO: 4076979 - DNA, 25 bp, Homo sapien
cattctgaaaagcaaaactagaagg

SEQ ID NO: 4076980 - DNA, 25 bp, Homo sapien
caaaacggaaacattccattctgaa

SEQ ID NO: 4076981 - DNA, 25 bp, Homo sapien
ctccaaaacggaaacattccattct

SEQ ID NO: 4076982 - DNA, 25 bp, Homo sapien
tttcacaaagcacagaccatagagc

SEQ ID NO: 4076983 - DNA, 25 bp, Homo sapien
ctcttccgtgcagtgaaggactcca

SEQ ID NO: 4076984 - DNA, 25 bp, Homo sapien
gactccacgcgccaagttaacagac

SEQ ID NO: 4076985 - DNA, 25 bp, Homo sapien
tatgtggacttcctgcaacttaaga

SEQ ID NO: 4076986 - DNA, 25 bp, Homo sapien
ctaaaggagagttctgccggtggca

SEQ ID NO: 4076987 - DNA, 25 bp, Homo sapien
cgcggaaggcgtacacagaaagtgc

SEQ ID NO: 4076988 - DNA, 25 bp, Homo sapien
caagcgtgggagaaagcctagtgca

SEQ ID NO: 4076989 - DNA, 25 bp, Homo sapien
tctgggtttagcacaaggaattcct

SEQ ID NO: 4076990 - DNA, 25 bp, Homo sapien
gagatcactgtatcccatgggatgg

SEQ ID NO: 4076991 - DNA, 25 bp, Homo sapien
gcagagggcatttcacccaaggcct

SEQ ID NO: 4076992 - DNA, 25 bp, Homo sapien
cagggtgcagcagtcataaaccaaa

SEQ ID NO: 4076993 - DNA, 25 bp, Homo sapien
gatgggcagccttctaacagggtgc

SEQ ID NO: 4076994 - DNA, 25 bp, Homo sapien
gacccaagcgcaggcacggtcttcg

SEQ ID NO: 4076995 - DNA, 25 bp, Homo sapien
gaaaatgtctgcgtcctggcaccgc

SEQ ID NO: 4076996 - DNA, 25 bp, Homo sapien
gaatcagcgcgaatagggtttaggt

SEQ ID NO: 4076997 - DNA, 25 bp, Homo sapien
tgagaaaagcctgataatgggaccc

SEQ ID NO: 4076998 - DNA, 25 bp, Homo sapien
gctcagcctacagagccggcttcaa

SEQ ID NO: 4076999 - DNA, 25 bp, Homo sapien
ggcttcaagggccatgcgtgtccga

SEQ ID NO: 4077000 - DNA, 25 bp, Homo sapien
cactagacacgccaaaaatggcagc

SEQ ID NO: 4077001 - DNA, 25 bp, Homo sapien
aatgcaaggaaatgacccgacacac

SEQ ID NO: 4077002 - DNA, 25 bp, Homo sapien
gtagatgccgctcgcaatggccagg

SEQ ID NO: 4077003 - DNA, 25 bp, Homo sapien
cagtaggtagatgccgctcgcaatg

SEQ ID NO: 4077004 - DNA, 25 bp, Homo sapien
atgccgctcgcaatggccaggcagg

SEQ ID NO: 4077005 - DNA, 25 bp, Homo sapien
aggtagatgccgctcgcaatggcca

SEQ ID NO: 4077006 - DNA, 25 bp, Homo sapien
cacaaagtctcaggacaaggcagac

SEQ ID NO: 4077007 - DNA, 25 bp, Homo sapien
gtgtcctggcctcagccggcagtaa

SEQ ID NO: 4077008 - DNA, 25 bp, Homo sapien
cttgtttcggtcctgggtgttctca

SEQ ID NO: 4077009 - DNA, 25 bp, Homo sapien
gacactagcggctctggtgcacttg

SEQ ID NO: 4077010 - DNA, 25 bp, Homo sapien
cctggcgacggatcggagctcctcg

SEQ ID NO: 4077011 - DNA, 25 bp, Homo sapien
aatcctgcacactagacagcagaca

SEQ ID NO: 4077012 - DNA, 25 bp, Homo sapien
gtggatccttacaaatcctgcacac

SEQ ID NO: 4077013 - DNA, 25 bp, Homo sapien
cagaccctggcgacggatcggagct

SEQ ID NO: 4077014 - DNA, 25 bp, Homo sapien
ggagggtcggctccaagccctcctg

SEQ ID NO: 4077015 - DNA, 25 bp, Homo sapien
ccctcctgagccctagagggggtgc

SEQ ID NO: 4077016 - DNA, 25 bp, Homo sapien
actgaggtaagtgggggtggctcct

SEQ ID NO: 4077017 - DNA, 25 bp, Homo sapien
cagagccagggacccgaatttttgt

SEQ ID NO: 4077018 - DNA, 25 bp, Homo sapien
aggagatgcaggacggcccgaacat

SEQ ID NO: 4077019 - DNA, 25 bp, Homo sapien
cacggcggtcatgtacttctgtccc

SEQ ID NO: 4077020 - DNA, 25 bp, Homo sapien
cgaacatagtaattcctggtaaagg

SEQ ID NO: 4077021 - DNA, 25 bp, Homo sapien
gtaaagggcccgaacagcttcacca

SEQ ID NO: 4077022 - DNA, 25 bp, Homo sapien
gcaggcaccggccttggtttaccca

SEQ ID NO: 4077023 - DNA, 25 bp, Homo sapien
gcctccaagtgagaaaccaagctcc

SEQ ID NO: 4077024 - DNA, 25 bp, Homo sapien
ggttggttccggagcctccaagtga

SEQ ID NO: 4077025 - DNA, 25 bp, Homo sapien
tccaagtgagaaaccaagctccacc

SEQ ID NO: 4077026 - DNA, 25 bp, Homo sapien
agcgctccatggtggagcccttctt

SEQ ID NO: 4077027 - DNA, 25 bp, Homo sapien
caggcacacaaacacgcccgccaca

SEQ ID NO: 4077028 - DNA, 25 bp, Homo sapien
cagcgctccatggtggagcccttct

SEQ ID NO: 4077029 - DNA, 25 bp, Homo sapien
gcgctccatggtggagcccttcttc

SEQ ID NO: 4077030 - DNA, 25 bp, Homo sapien
aggggatcccagcagtccaacaggg

SEQ ID NO: 4077031 - DNA, 25 bp, Homo sapien
gccctctggtgacaccccctgccca

SEQ ID NO: 4077032 - DNA, 25 bp, Homo sapien
ggatcccagcagtccaacagggagg

SEQ ID NO: 4077033 - DNA, 25 bp, Homo sapien
cagaggggatcccagcagtccaaca

SEQ ID NO: 4077034 - DNA, 25 bp, Homo sapien
gcgggtctgccgctgatcgccacat

SEQ ID NO: 4077035 - DNA, 25 bp, Homo sapien
tagactggcgggtctgccgctgatc

SEQ ID NO: 4077036 - DNA, 25 bp, Homo sapien
aggacttagactggcgggtctgccg

SEQ ID NO: 4077037 - DNA, 25 bp, Homo sapien
tgatcgccacatggtcctggcgagg

SEQ ID NO: 4077038 - DNA, 25 bp, Homo sapien
ccaccccagcctcaggtggaaggat

SEQ ID NO: 4077039 - DNA, 25 bp, Homo sapien
gcccaccccagcctcaggtggaagg

SEQ ID NO: 4077040 - DNA, 25 bp, Homo sapien
tctgccctgggcgttccccgcccac

SEQ ID NO: 4077041 - DNA, 25 bp, Homo sapien
accccagcctcaggtggaaggatac

SEQ ID NO: 4077042 - DNA, 25 bp, Homo sapien
ctgggtgaagcgcccagctgtggcc

SEQ ID NO: 4077043 - DNA, 25 bp, Homo sapien
ctgtggccacgatgcccccggtgat

SEQ ID NO: 4077044 - DNA, 25 bp, Homo sapien
cactgggtgaagcgcccagctgtgg

SEQ ID NO: 4077045 - DNA, 25 bp, Homo sapien
cagctgtggccacgatgcccccggt

SEQ ID NO: 4077046 - DNA, 25 bp, Homo sapien
ctgaaagctaacaggccgagtgtgg

SEQ ID NO: 4077047 - DNA, 25 bp, Homo sapien
cacatggtcttgttggaagatttcc

SEQ ID NO: 4077048 - DNA, 25 bp, Homo sapien
taatttcggtttcgtctgatatggc

SEQ ID NO: 4077049 - DNA, 25 bp, Homo sapien
cggagttcctcttaacccgtcagcg

SEQ ID NO: 4077050 - DNA, 25 bp, Homo sapien
tggctctaactcttcgggccaggag

SEQ ID NO: 4077051 - DNA, 25 bp, Homo sapien
cctgccatccgaaagagggtgcaaa

SEQ ID NO: 4077052 - DNA, 25 bp, Homo sapien
cacgctcaggagatctaggaacaga

SEQ ID NO: 4077053 - DNA, 25 bp, Homo sapien
aacagaaaggaagcacggcagctgg

SEQ ID NO: 4077054 - DNA, 25 bp, Homo sapien
cttggccgctgactcgaagcaggcg

SEQ ID NO: 4077055 - DNA, 25 bp, Homo sapien
ttcttggccgctgactcgaagcagg

SEQ ID NO: 4077056 - DNA, 25 bp, Homo sapien
tgactcgaagcaggcggtcactttc

SEQ ID NO: 4077057 - DNA, 25 bp, Homo sapien
gccgctgactcgaagcaggcggtca

SEQ ID NO: 4077058 - DNA, 25 bp, Homo sapien
tgccctcagacctcgcctgagccca

SEQ ID NO: 4077059 - DNA, 25 bp, Homo sapien
ctccagacaacagggagggcgctca

SEQ ID NO: 4077060 - DNA, 25 bp, Homo sapien
ggagtggtggcagcgggcccctcct

SEQ ID NO: 4077061 - DNA, 25 bp, Homo sapien
ccccggtgcaggtccttcctggagc

SEQ ID NO: 4077062 - DNA, 25 bp, Homo sapien
tgtaagtagcccgaggtcccggctg

SEQ ID NO: 4077063 - DNA, 25 bp, Homo sapien
ttgtgaaatctcagaccgcctccag

SEQ ID NO: 4077064 - DNA, 25 bp, Homo sapien
cgtcactgggtggtttcggcgcctt

SEQ ID NO: 4077065 - DNA, 25 bp, Homo sapien
ttccaaatggagtccgctgccctca

SEQ ID NO: 4077066 - DNA, 25 bp, Homo sapien
gcgcctgttcgttggcccacatggc

SEQ ID NO: 4077067 - DNA, 25 bp, Homo sapien
ggacgccagcgcctgttcgttggcc

SEQ ID NO: 4077068 - DNA, 25 bp, Homo sapien
aggccggacgccagcgcctgttcgt

SEQ ID NO: 4077069 - DNA, 25 bp, Homo sapien
cagcgcctgttcgttggcccacatg

SEQ ID NO: 4077070 - DNA, 25 bp, Homo sapien
gcactgccgcccctgcgctcccggc

SEQ ID NO: 4077071 - DNA, 25 bp, Homo sapien
tgggacactgctaggcgcgcactgc

SEQ ID NO: 4077072 - DNA, 25 bp, Homo sapien
acacgaacccggctgggacactgct

SEQ ID NO: 4077073 - DNA, 25 bp, Homo sapien
ggcgacacgaacccggctgggacac

SEQ ID NO: 4077074 - DNA, 25 bp, Homo sapien
ctcctgccaccattccagccacacc

SEQ ID NO: 4077075 - DNA, 25 bp, Homo sapien
tggtgcccactcctgccaccattcc

SEQ ID NO: 4077076 - DNA, 25 bp, Homo sapien
cattccagccacacccaggccgtgg

SEQ ID NO: 4077077 - DNA, 25 bp, Homo sapien
actggtgcccactcctgccaccatt

SEQ ID NO: 4077078 - DNA, 25 bp, Homo sapien
cttggcaaagcgctggtgcagctta

SEQ ID NO: 4077079 - DNA, 25 bp, Homo sapien
tcagagaactgggcatagccagagc

SEQ ID NO: 4077080 - DNA, 25 bp, Homo sapien
accatccgaggcacttggtggtttc

SEQ ID NO: 4077081 - DNA, 25 bp, Homo sapien
ttctccaagcggcatgcggtccctg

SEQ ID NO: 4077082 - DNA, 25 bp, Homo sapien
ggcagctggcttcggcaggccgtca

SEQ ID NO: 4077083 - DNA, 25 bp, Homo sapien
ttcggcaggccgtcaggacccagga

SEQ ID NO: 4077084 - DNA, 25 bp, Homo sapien
caggggtcatccaggatttgaggcc

SEQ ID NO: 4077085 - DNA, 25 bp, Homo sapien
tcatccaggatttgaggccctggcc

SEQ ID NO: 4077086 - DNA, 25 bp, Homo sapien
tggcagcgcctcatcctgtgcccag

SEQ ID NO: 4077087 - DNA, 25 bp, Homo sapien
tgtgcccagcatctgtagggccgga

SEQ ID NO: 4077088 - DNA, 25 bp, Homo sapien
gacacaggagggtagcggtgtgccc

SEQ ID NO: 4077089 - DNA, 25 bp, Homo sapien
gaaatccatgtcaggtcaccaggaa

SEQ ID NO: 4077090 - DNA, 25 bp, Homo sapien
caatgatgtatttgaccccaccggg

SEQ ID NO: 4077091 - DNA, 25 bp, Homo sapien
gccagcgcagcctgaagctcagctg

SEQ ID NO: 4077092 - DNA, 25 bp, Homo sapien
gctccatggccagcgcagcctgaag

SEQ ID NO: 4077093 - DNA, 25 bp, Homo sapien
gagtgacaatgatgtatttgacccc

SEQ ID NO: 4077094 - DNA, 25 bp, Homo sapien
tacaacagtctacaacaggcaagtc

SEQ ID NO: 4077095 - DNA, 25 bp, Homo sapien
gggcacggtgaatgcatccgtttct

SEQ ID NO: 4077096 - DNA, 25 bp, Homo sapien
aacaggcaagtccagagatgggaag

SEQ ID NO: 4077097 - DNA, 25 bp, Homo sapien
gcatccgtttctctaagcgtctaca

SEQ ID NO: 4077098 - DNA, 25 bp, Homo sapien
ccattcgagcctgggggaaagccgt

SEQ ID NO: 4077099 - DNA, 25 bp, Homo sapien
gtgtctccattcgagcctgggggaa

SEQ ID NO: 4077100 - DNA, 25 bp, Homo sapien
gcctgggggaaagccgtgccacaca

SEQ ID NO: 4077101 - DNA, 25 bp, Homo sapien
agcctgggggaaagccgtgccacac

SEQ ID NO: 4077102 - DNA, 25 bp, Homo sapien
tcacggcattggggcccgcgtcaaa

SEQ ID NO: 4077103 - DNA, 25 bp, Homo sapien
gcattggggcccgcgtcaaaggtgt

SEQ ID NO: 4077104 - DNA, 25 bp, Homo sapien
tggggcccgcgtcaaaggtgtacgc

SEQ ID NO: 4077105 - DNA, 25 bp, Homo sapien
gggcccgcgtcaaaggtgtacgcca

SEQ ID NO: 4077106 - DNA, 25 bp, Homo sapien
ccaaccctctggtctgccaggcggc

SEQ ID NO: 4077107 - DNA, 25 bp, Homo sapien
tggtgcctgacccttgtctccccaa

SEQ ID NO: 4077108 - DNA, 25 bp, Homo sapien
accctggctattcacgtggtgcctg

SEQ ID NO: 4077109 - DNA, 25 bp, Homo sapien
tctccaagagctcagtctaggccct

SEQ ID NO: 4077110 - DNA, 25 bp, Homo sapien
cgttgaagcggtgcaccaggtggat

SEQ ID NO: 4077111 - DNA, 25 bp, Homo sapien
atgatgcgccaggagatggcattga

SEQ ID NO: 4077112 - DNA, 25 bp, Homo sapien
ggcgtggaactggttgctgtccttc

SEQ ID NO: 4077113 - DNA, 25 bp, Homo sapien
tcatggtcagctgggcgaagctggg

SEQ ID NO: 4077114 - DNA, 25 bp, Homo sapien
actggcccgcatgcccacggtactg

SEQ ID NO: 4077115 - DNA, 25 bp, Homo sapien
cacggtactgcctgtcagcttcttc

SEQ ID NO: 4077116 - DNA, 25 bp, Homo sapien
cgcatgcccacggtactgcctgtca

SEQ ID NO: 4077117 - DNA, 25 bp, Homo sapien
tgcccacggtactgcctgtcagctt

SEQ ID NO: 4077118 - DNA, 25 bp, Homo sapien
tggatggacgccttcgctcctgctc

SEQ ID NO: 4077119 - DNA, 25 bp, Homo sapien
tgagcactcaaccacgcttctgttc

SEQ ID NO: 4077120 - DNA, 25 bp, Homo sapien
cccgccgcatgggagcggttcctga

SEQ ID NO: 4077121 - DNA, 25 bp, Homo sapien
ggagcggttcctgagcactcaacca

SEQ ID NO: 4077122 - DNA, 25 bp, Homo sapien
gccacttgccgagcgatgctgtcct

SEQ ID NO: 4077123 - DNA, 25 bp, Homo sapien
ctgtccttcccgtcggcctgctctc

SEQ ID NO: 4077124 - DNA, 25 bp, Homo sapien
cgcggagttcaggccagtgtgactc

SEQ ID NO: 4077125 - DNA, 25 bp, Homo sapien
ggagttcaggccagtgtgactcggg

SEQ ID NO: 4077126 - DNA, 25 bp, Homo sapien
tgagaggtcactctccacgccgtag

SEQ ID NO: 4077127 - DNA, 25 bp, Homo sapien
tgagccccggcgagccacttctgag

SEQ ID NO: 4077128 - DNA, 25 bp, Homo sapien
tccggcaggcgctgcctgagccccg

SEQ ID NO: 4077129 - DNA, 25 bp, Homo sapien
ccacgccgtagacacgggccagggt

SEQ ID NO: 4077130 - DNA, 25 bp, Homo sapien
atcagcctttgaggccagcattcac

SEQ ID NO: 4077131 - DNA, 25 bp, Homo sapien
gggatttccagatgacagggcttct

SEQ ID NO: 4077132 - DNA, 25 bp, Homo sapien
tcggacactctctgttcacggcctg

SEQ ID NO: 4077133 - DNA, 25 bp, Homo sapien
ggcctgcgacaagggcaacaaaagg

SEQ ID NO: 4077134 - DNA, 25 bp, Homo sapien
ggaatcctcagttacgtgagccaca

SEQ ID NO: 4077135 - DNA, 25 bp, Homo sapien
tgcaaccagctgtgcccattggaat

SEQ ID NO: 4077136 - DNA, 25 bp, Homo sapien
cacatacagcaacgggaagattttt

SEQ ID NO: 4077137 - DNA, 25 bp, Homo sapien
accctggtcaccgagggtggttcag

SEQ ID NO: 4077138 - DNA, 25 bp, Homo sapien
tcctggcctacagtgcttctccccc

SEQ ID NO: 4077139 - DNA, 25 bp, Homo sapien
gaactcctggcctacagtgcttctc

SEQ ID NO: 4077140 - DNA, 25 bp, Homo sapien
ttataggcgagagccccacgccagc

SEQ ID NO: 4077141 - DNA, 25 bp, Homo sapien
ccccatcagcctcttaagtactggg

SEQ ID NO: 4077142 - DNA, 25 bp, Homo sapien
taggcaggcatagcccgccgctgag

SEQ ID NO: 4077143 - DNA, 25 bp, Homo sapien
cgatgccacgtgcaccttgcagctg

SEQ ID NO: 4077144 - DNA, 25 bp, Homo sapien
cgcagccgtggggaagttgttcacc

SEQ ID NO: 4077145 - DNA, 25 bp, Homo sapien
gcagcgggtccccatcccgtgagtt

SEQ ID NO: 4077146 - DNA, 25 bp, Homo sapien
cagactcctcgtggagagtttctta

SEQ ID NO: 4077147 - DNA, 25 bp, Homo sapien
cctgccagactcctcgtggagagtt

SEQ ID NO: 4077148 - DNA, 25 bp, Homo sapien
gagacaatgagacagcgtgtggccc

SEQ ID NO: 4077149 - DNA, 25 bp, Homo sapien
caatgagacagcgtgtggcccagcc

SEQ ID NO: 4077150 - DNA, 25 bp, Homo sapien
gaagcactttctggatgctcggacc

SEQ ID NO: 4077151 - DNA, 25 bp, Homo sapien
gagggatgggcttatggggacccca

SEQ ID NO: 4077152 - DNA, 25 bp, Homo sapien
gggatgggcttatggggaccccagc

SEQ ID NO: 4077153 - DNA, 25 bp, Homo sapien
atgggcttatggggaccccagctca

SEQ ID NO: 4077154 - DNA, 25 bp, Homo sapien
ggatgggcttatggggaccccagct

SEQ ID NO: 4077155 - DNA, 25 bp, Homo sapien
agtccttgctgatgacggctgttgt

SEQ ID NO: 4077156 - DNA, 25 bp, Homo sapien
tcctcccggccattcagccaaatcc

SEQ ID NO: 4077157 - DNA, 25 bp, Homo sapien
ccttgctgatgacggctgttgtggt

SEQ ID NO: 4077158 - DNA, 25 bp, Homo sapien
agccaaatccggtcctcggtgaagt

SEQ ID NO: 4077159 - DNA, 25 bp, Homo sapien
agaaccagctcttcatcgcgcttgc

SEQ ID NO: 4077160 - DNA, 25 bp, Homo sapien
gcagaaccagctcttcatcgcgctt

SEQ ID NO: 4077161 - DNA, 25 bp, Homo sapien
tggtgcagagtgacgctcagggagg

SEQ ID NO: 4077162 - DNA, 25 bp, Homo sapien
ctggtcctggtgcagagtgacgctc

SEQ ID NO: 4077163 - DNA, 25 bp, Homo sapien
gtgataaacgcggacacctggcaga

SEQ ID NO: 4077164 - DNA, 25 bp, Homo sapien
agctcgcgaggctctttcacgcaca

SEQ ID NO: 4077165 - DNA, 25 bp, Homo sapien
tctctgaggatggcggacagttcca

SEQ ID NO: 4077166 - DNA, 25 bp, Homo sapien
agaaccacgccctgcagctcgcgag

SEQ ID NO: 4077167 - DNA, 25 bp, Homo sapien
tccagcctgggtgtcgcagtgacag

SEQ ID NO: 4077168 - DNA, 25 bp, Homo sapien
ccagcctgggtgtcgcagtgacagt

SEQ ID NO: 4077169 - DNA, 25 bp, Homo sapien
cccaaatactcggaagactaaggca

SEQ ID NO: 4077170 - DNA, 25 bp, Homo sapien
tagtcccaaatactcggaagactaa

SEQ ID NO: 4077171 - DNA, 25 bp, Homo sapien
tcccaaatactcggaagactaaggc

SEQ ID NO: 4077172 - DNA, 25 bp, Homo sapien
agtcccaaatactcggaagactaag

SEQ ID NO: 4077173 - DNA, 25 bp, Homo sapien
gaatgtgtaatgaactctccaaact

SEQ ID NO: 4077174 - DNA, 25 bp, Homo sapien
tctccaaacttatagtaaaaaagca

SEQ ID NO: 4077175 - DNA, 25 bp, Homo sapien
tgcccagcctagaatgtgtaatgaa

SEQ ID NO: 4077176 - DNA, 25 bp, Homo sapien
caggagactaatatctagaatacat

SEQ ID NO: 4077177 - DNA, 25 bp, Homo sapien
aaagaaagatgctccacgtcactgg

SEQ ID NO: 4077178 - DNA, 25 bp, Homo sapien
ggaaaatctgcatcaccgtagggat

SEQ ID NO: 4077179 - DNA, 25 bp, Homo sapien
tccctaccaggacgcggctaaaatg

SEQ ID NO: 4077180 - DNA, 25 bp, Homo sapien
tggccaacagggaaacgcgaatgag

SEQ ID NO: 4077181 - DNA, 25 bp, Homo sapien
catctgacccagcaaccgcactcct

SEQ ID NO: 4077182 - DNA, 25 bp, Homo sapien
tctgacccagcaaccgcactcctgg

SEQ ID NO: 4077183 - DNA, 25 bp, Homo sapien
ctgacccagcaaccgcactcctggg

SEQ ID NO: 4077184 - DNA, 25 bp, Homo sapien
atctgacccagcaaccgcactcctg

SEQ ID NO: 4077185 - DNA, 25 bp, Homo sapien
cagctttattggtaagggaaacaca

SEQ ID NO: 4077186 - DNA, 25 bp, Homo sapien
ggcagctttattggtaagggaaaca

SEQ ID NO: 4077187 - DNA, 25 bp, Homo sapien
acaacattttatggcagctttattg

SEQ ID NO: 4077188 - DNA, 25 bp, Homo sapien
tatggcagctttattggtaagggaa

SEQ ID NO: 4077189 - DNA, 25 bp, Homo sapien
tggattccacggactggctcagcaa

SEQ ID NO: 4077190 - DNA, 25 bp, Homo sapien
gaaaacgttagatgctctttgcggg

SEQ ID NO: 4077191 - DNA, 25 bp, Homo sapien
actcaaaagatactgggtgggccac

SEQ ID NO: 4077192 - DNA, 25 bp, Homo sapien
gggcacgtccacattctatgctgaa

SEQ ID NO: 4077193 - DNA, 25 bp, Homo sapien
cgccgagcttgtcacgcgaaggagc

SEQ ID NO: 4077194 - DNA, 25 bp, Homo sapien
cggtaatcgctaatgggcaggcgcc

SEQ ID NO: 4077195 - DNA, 25 bp, Homo sapien
gatgattgatgatttcgatagttcg

SEQ ID NO: 4077196 - DNA, 25 bp, Homo sapien
gattcatgggaatcgatgattgatg

SEQ ID NO: 4077197 - DNA, 25 bp, Homo sapien
gcctcgctcccggccatccccgtcc

SEQ ID NO: 4077198 - DNA, 25 bp, Homo sapien
cggcctcgctcccggccatccccgt

SEQ ID NO: 4077199 - DNA, 25 bp, Homo sapien
ctcgctcccggccatccccgtccca

SEQ ID NO: 4077200 - DNA, 25 bp, Homo sapien
tcgctcccggccatccccgtcccag

SEQ ID NO: 4077201 - DNA, 25 bp, Homo sapien
tgaccggcgctgtacaagtgactgc

SEQ ID NO: 4077202 - DNA, 25 bp, Homo sapien
ccgcgatgttgaccggcgctgtaca

SEQ ID NO: 4077203 - DNA, 25 bp, Homo sapien
agtacttgatgaccgcgatgttgac

SEQ ID NO: 4077204 - DNA, 25 bp, Homo sapien
gtacaagtgactgccgccagcggct

SEQ ID NO: 4077205 - DNA, 25 bp, Homo sapien
tccacagccacttacggcccgcgat

SEQ ID NO: 4077206 - DNA, 25 bp, Homo sapien
ctccacagccacttacggcccgcga

SEQ ID NO: 4077207 - DNA, 25 bp, Homo sapien
agctccacagccacttacggcccgc

SEQ ID NO: 4077208 - DNA, 25 bp, Homo sapien
cacagccacttacggcccgcgatcc

SEQ ID NO: 4077209 - DNA, 25 bp, Homo sapien
tctgactcttggaagggtagccccg

SEQ ID NO: 4077210 - DNA, 25 bp, Homo sapien
gacctggccgtgtcgaaatggaacc

SEQ ID NO: 4077211 - DNA, 25 bp, Homo sapien
gagaccatttattaccccacggctg

SEQ ID NO: 4077212 - DNA, 25 bp, Homo sapien
cagggcggtgctcactataagtcag

SEQ ID NO: 4077213 - DNA, 25 bp, Homo sapien
ctcatgccgcgccaggagggacatg

SEQ ID NO: 4077214 - DNA, 25 bp, Homo sapien
tgcgtttgcagatgggcccgaaggt

SEQ ID NO: 4077215 - DNA, 25 bp, Homo sapien
ttcttggcgtctgagtgcgtttgca

SEQ ID NO: 4077216 - DNA, 25 bp, Homo sapien
tggtgcagcgccggcaccggtactt

SEQ ID NO: 4077217 - DNA, 25 bp, Homo sapien
gcccatcaatggatactcccatccc

SEQ ID NO: 4077218 - DNA, 25 bp, Homo sapien
aagatggagtgaaggctaaagcacc

SEQ ID NO: 4077219 - DNA, 25 bp, Homo sapien
agtgacaccatggaagatggagtga

SEQ ID NO: 4077220 - DNA, 25 bp, Homo sapien
agtgaaggctaaagcacccaccctg

SEQ ID NO: 4077221 - DNA, 25 bp, Homo sapien
agagcttcctcgatccgtggcagga

SEQ ID NO: 4077222 - DNA, 25 bp, Homo sapien
ccttgtcgcagtacttgcaggtgaa

SEQ ID NO: 4077223 - DNA, 25 bp, Homo sapien
ggtcgacctcgctgacttccaaggc

SEQ ID NO: 4077224 - DNA, 25 bp, Homo sapien
ttgccacagatcttgcaggtgcagg

SEQ ID NO: 4077225 - DNA, 25 bp, Homo sapien
tggggaaggtcaccgggcacagaag

SEQ ID NO: 4077226 - DNA, 25 bp, Homo sapien
tcataactaatcaccctccagtcac

SEQ ID NO: 4077227 - DNA, 25 bp, Homo sapien
gcaaggtgccggctgagtgtaaaat

SEQ ID NO: 4077228 - DNA, 25 bp, Homo sapien
gccatcagtcagacgcttggcagca

SEQ ID NO: 4077229 - DNA, 25 bp, Homo sapien
gtaaaatcagcccactcataactaa

SEQ ID NO: 4077230 - DNA, 25 bp, Homo sapien
cagagtcctcttctctcgtgtccct

SEQ ID NO: 4077231 - DNA, 25 bp, Homo sapien
agtcctcttctctcgtgtccctaag

SEQ ID NO: 4077232 - DNA, 25 bp, Homo sapien
gacagagtcctcttctctcgtgtcc

SEQ ID NO: 4077233 - DNA, 25 bp, Homo sapien
gagtcctcttctctcgtgtccctaa

SEQ ID NO: 4077234 - DNA, 25 bp, Homo sapien
ccctcagggtcgagtcccggcaggg

SEQ ID NO: 4077235 - DNA, 25 bp, Homo sapien
ggctcggggatcgggtagtcagtac

SEQ ID NO: 4077236 - DNA, 25 bp, Homo sapien
tctctcccgcccctcagggtcgagt

SEQ ID NO: 4077237 - DNA, 25 bp, Homo sapien
cgcccctcagggtcgagtcccggca

SEQ ID NO: 4077238 - DNA, 25 bp, Homo sapien
ctctgcgtctccagccgccggtagt

SEQ ID NO: 4077239 - DNA, 25 bp, Homo sapien
tctgcgtctccagccgccggtagtt

SEQ ID NO: 4077240 - DNA, 25 bp, Homo sapien
ctctctgcgtctccagccgccggta

SEQ ID NO: 4077241 - DNA, 25 bp, Homo sapien
tgcgtctccagccgccggtagttgg

SEQ ID NO: 4077242 - DNA, 25 bp, Homo sapien
gttttcaccaggaaggagcgcggca

SEQ ID NO: 4077243 - DNA, 25 bp, Homo sapien
cgttttcaccaggaaggagcgcggc

SEQ ID NO: 4077244 - DNA, 25 bp, Homo sapien
ttttcaccaggaaggagcgcggcat

SEQ ID NO: 4077245 - DNA, 25 bp, Homo sapien
aggggcgcgcctgggtccggactgc

SEQ ID NO: 4077246 - DNA, 25 bp, Homo sapien
ggggcgcgcctgggtccggactgct

SEQ ID NO: 4077247 - DNA, 25 bp, Homo sapien
agggagcaatgcctgccggacgagg

SEQ ID NO: 4077248 - DNA, 25 bp, Homo sapien
tccagggctcctgcgaacaggggcg

SEQ ID NO: 4077249 - DNA, 25 bp, Homo sapien
cgcatcatgcctgggacccggatga

SEQ ID NO: 4077250 - DNA, 25 bp, Homo sapien
gacccggatgagcactgtccagggc

SEQ ID NO: 4077251 - DNA, 25 bp, Homo sapien
atcccttccggatgcaggccagcag

SEQ ID NO: 4077252 - DNA, 25 bp, Homo sapien
caggcccttcgtaaaggtgctttct

SEQ ID NO: 4077253 - DNA, 25 bp, Homo sapien
tggcctgcgccctgggtcaccccat

SEQ ID NO: 4077254 - DNA, 25 bp, Homo sapien
ttggcatcccttccggatgcaggcc

SEQ ID NO: 4077255 - DNA, 25 bp, Homo sapien
agaatgttgacgtgttgcccggccc

SEQ ID NO: 4077256 - DNA, 25 bp, Homo sapien
aaagaatgttgacgtgttgcccggc

SEQ ID NO: 4077257 - DNA, 25 bp, Homo sapien
aaaagaatgttgacgtgttgcccgg

SEQ ID NO: 4077258 - DNA, 25 bp, Homo sapien
agaaaagaatgttgacgtgttgccc

SEQ ID NO: 4077259 - DNA, 25 bp, Homo sapien
cgcagcggggcacagtcagctttga

SEQ ID NO: 4077260 - DNA, 25 bp, Homo sapien
ttgaaggtgacagcgggccaaggcc

SEQ ID NO: 4077261 - DNA, 25 bp, Homo sapien
tcagctttgaaggtgacagcgggcc

SEQ ID NO: 4077262 - DNA, 25 bp, Homo sapien
agctttgaaggtgacagcgggccaa

SEQ ID NO: 4077263 - DNA, 25 bp, Homo sapien
gtggaggaggccccttctctgccgg

SEQ ID NO: 4077264 - DNA, 25 bp, Homo sapien
tattcctagtcaaacacagatattg

SEQ ID NO: 4077265 - DNA, 25 bp, Homo sapien
ctggtcatcaaagagaaacgtacaa

SEQ ID NO: 4077266 - DNA, 25 bp, Homo sapien
gatattgcaatatgaagagtaactg

SEQ ID NO: 4077267 - DNA, 25 bp, Homo sapien
aacgtgaaaagattatcacactgga

SEQ ID NO: 4077268 - DNA, 25 bp, Homo sapien
cggctggcccgtattcaggcccgga

SEQ ID NO: 4077269 - DNA, 25 bp, Homo sapien
agctcagtccggtgaggtgcgctcc

SEQ ID NO: 4077270 - DNA, 25 bp, Homo sapien
tcatggctttgaagagacggcggca

SEQ ID NO: 4077271 - DNA, 25 bp, Homo sapien
tcggccagaagcaccgaagaaccca

SEQ ID NO: 4077272 - DNA, 25 bp, Homo sapien
gaaggcggcctcctcgtcaatactg

SEQ ID NO: 4077273 - DNA, 25 bp, Homo sapien
ccagagcagcctggaaggcggcctc

SEQ ID NO: 4077274 - DNA, 25 bp, Homo sapien
cggcctcctcgtcaatactgtagtc

SEQ ID NO: 4077275 - DNA, 25 bp, Homo sapien
agagcagcctggaaggcggcctcct

SEQ ID NO: 4077276 - DNA, 25 bp, Homo sapien
cctgcggaccctgaggctggcgagg

SEQ ID NO: 4077277 - DNA, 25 bp, Homo sapien
gcattgccgagcagatggggcacac

SEQ ID NO: 4077278 - DNA, 25 bp, Homo sapien
cacaaaggtgtcgtaggagaacttg

SEQ ID NO: 4077279 - DNA, 25 bp, Homo sapien
aacttgtgtcggtgaagcaggtgct

SEQ ID NO: 4077280 - DNA, 25 bp, Homo sapien
gctgcaggaagttggcgctcttgta

SEQ ID NO: 4077281 - DNA, 25 bp, Homo sapien
gggtcgctgcggtggctttccacac

SEQ ID NO: 4077282 - DNA, 25 bp, Homo sapien
acagtacgggcaggcgaaggtggac

SEQ ID NO: 4077283 - DNA, 25 bp, Homo sapien
tgcgggcaccacagtacgggcaggc

SEQ ID NO: 4077284 - DNA, 25 bp, Homo sapien
cgctgcggtggctttccacacagtg

SEQ ID NO: 4077285 - DNA, 25 bp, Homo sapien
ccttcaggcaggacgaaatgtgcac

SEQ ID NO: 4077286 - DNA, 25 bp, Homo sapien
caggcaggacgaaatgtgcactctc

SEQ ID NO: 4077287 - DNA, 25 bp, Homo sapien
ggaccttcaggcaggacgaaatgtg

SEQ ID NO: 4077288 - DNA, 25 bp, Homo sapien
gcaggacgaaatgtgcactctcatc

SEQ ID NO: 4077289 - DNA, 25 bp, Homo sapien
caggaccagagaactgtaagcaagc

SEQ ID NO: 4077290 - DNA, 25 bp, Homo sapien
gcaaggcggtcctgagaatctggaa

SEQ ID NO: 4077291 - DNA, 25 bp, Homo sapien
taagcaagcgtctgtgttgccagca

SEQ ID NO: 4077292 - DNA, 25 bp, Homo sapien
aagtcactgcaggacaatctggccg

SEQ ID NO: 4077293 - DNA, 25 bp, Homo sapien
tagtgtgagcgcttcatagaactta

SEQ ID NO: 4077294 - DNA, 25 bp, Homo sapien
agtgtgagcgcttcatagaacttat

SEQ ID NO: 4077295 - DNA, 25 bp, Homo sapien
gtgtgagcgcttcatagaacttatt

SEQ ID NO: 4077296 - DNA, 25 bp, Homo sapien
cttacgctgctctgatgtgggtgtg

SEQ ID NO: 4077297 - DNA, 25 bp, Homo sapien
tagatgtccttgactgtgcccgcgg

SEQ ID NO: 4077298 - DNA, 25 bp, Homo sapien
atgacaagctgcaggcccttacgct

SEQ ID NO: 4077299 - DNA, 25 bp, Homo sapien
gtgcccgcggcccttgtgaccttgg

SEQ ID NO: 4077300 - DNA, 25 bp, Homo sapien
ttcttggggtcgaagggcaggcggc

SEQ ID NO: 4077301 - DNA, 25 bp, Homo sapien
caggcggcagagtgggcacagcggg

SEQ ID NO: 4077302 - DNA, 25 bp, Homo sapien
cagcctcgacagggcgctttgtagg

SEQ ID NO: 4077303 - DNA, 25 bp, Homo sapien
ctcgacagggcgctttgtaggatga

SEQ ID NO: 4077304 - DNA, 25 bp, Homo sapien
caggcttgggacagcttcgcaggca

SEQ ID NO: 4077305 - DNA, 25 bp, Homo sapien
aggcttgggacagcttcgcaggcag

SEQ ID NO: 4077306 - DNA, 25 bp, Homo sapien
gcttgggacagcttcgcaggcagga

SEQ ID NO: 4077307 - DNA, 25 bp, Homo sapien
cttgggacagcttcgcaggcaggag

SEQ ID NO: 4077308 - DNA, 25 bp, Homo sapien
ggccaagcaggcatcttaagtccct

SEQ ID NO: 4077309 - DNA, 25 bp, Homo sapien
cttgagacccgtcagaaagtgaaca

SEQ ID NO: 4077310 - DNA, 25 bp, Homo sapien
tggctcccacatgaaacttcgtgtg

SEQ ID NO: 4077311 - DNA, 25 bp, Homo sapien
gaaagcgggactcagcttgagaccc

SEQ ID NO: 4077312 - DNA, 25 bp, Homo sapien
tgcacacccatggaaagggcgttcg

SEQ ID NO: 4077313 - DNA, 25 bp, Homo sapien
ttgcaaacacactggaaacgactgg

SEQ ID NO: 4077314 - DNA, 25 bp, Homo sapien
gcactgacccctggatttgagccgg

SEQ ID NO: 4077315 - DNA, 25 bp, Homo sapien
tcacgctcaacgtccagcagagaga

SEQ ID NO: 4077316 - DNA, 25 bp, Homo sapien
catgagagatctaccctggaggagg

SEQ ID NO: 4077317 - DNA, 25 bp, Homo sapien
tcagactgtcccctggctgagaaca

SEQ ID NO: 4077318 - DNA, 25 bp, Homo sapien
gaccagcaacaaacttccgaaggga

SEQ ID NO: 4077319 - DNA, 25 bp, Homo sapien
ttccaggcaggttcgtgatcacgcg

SEQ ID NO: 4077320 - DNA, 25 bp, Homo sapien
ggccacgggccggtgatagacctcc

SEQ ID NO: 4077321 - DNA, 25 bp, Homo sapien
ggccggtgatagacctccaggcaga

SEQ ID NO: 4077322 - DNA, 25 bp, Homo sapien
acgggccggtgatagacctccaggc

SEQ ID NO: 4077323 - DNA, 25 bp, Homo sapien
tgtggccgcagctgccgatggccac

SEQ ID NO: 4077324 - DNA, 25 bp, Homo sapien
ccgggccggcccgctagtcacagcc

SEQ ID NO: 4077325 - DNA, 25 bp, Homo sapien
cccgggccggcccgctagtcacagc

SEQ ID NO: 4077326 - DNA, 25 bp, Homo sapien
tactgcgccgcgctgacgtcatcgt

SEQ ID NO: 4077327 - DNA, 25 bp, Homo sapien
ccagccgggcttcgcggccgtcacg

SEQ ID NO: 4077328 - DNA, 25 bp, Homo sapien
tgcgccgcgctgacgtcatcgtagg

SEQ ID NO: 4077329 - DNA, 25 bp, Homo sapien
gctgacgtcatcgtagggcgccgcc

SEQ ID NO: 4077330 - DNA, 25 bp, Homo sapien
tatatctgtaacctgtagtcctatc

SEQ ID NO: 4077331 - DNA, 25 bp, Homo sapien
gagcctcttagccattcctggccca

SEQ ID NO: 4077332 - DNA, 25 bp, Homo sapien
gaaggatcacatgaatcgaggagtt

SEQ ID NO: 4077333 - DNA, 25 bp, Homo sapien
gcatatatctgtaacctgtagtcct

SEQ ID NO: 4077334 - DNA, 25 bp, Homo sapien
aggcggccgtggacagcttcctcca

SEQ ID NO: 4077335 - DNA, 25 bp, Homo sapien
aaggcggccgtggacagcttcctcc

SEQ ID NO: 4077336 - DNA, 25 bp, Homo sapien
tgcagacagtgccacggcttttggg

SEQ ID NO: 4077337 - DNA, 25 bp, Homo sapien
tgaaggacttggtgagtacgtgccc

SEQ ID NO: 4077338 - DNA, 25 bp, Homo sapien
tacagctgccgcgtgaacatgaagg

SEQ ID NO: 4077339 - DNA, 25 bp, Homo sapien
cactgcacggcattgaggtgccaag

SEQ ID NO: 4077340 - DNA, 25 bp, Homo sapien
aactctacagtacacgtgggggacg

SEQ ID NO: 4077341 - DNA, 25 bp, Homo sapien
gccgtggggacgcagtgtccttctc

SEQ ID NO: 4077342 - DNA, 25 bp, Homo sapien
ggctccttccctctcgggcgccagc

SEQ ID NO: 4077343 - DNA, 25 bp, Homo sapien
caggccgggaggatgcatcacagct

SEQ ID NO: 4077344 - DNA, 25 bp, Homo sapien
gatggacacgtacagccccatgatg

SEQ ID NO: 4077345 - DNA, 25 bp, Homo sapien
cacggcagctcctcgaacataatgg

SEQ ID NO: 4077346 - DNA, 25 bp, Homo sapien
agagcttgaggatgcggtccacgca

SEQ ID NO: 4077347 - DNA, 25 bp, Homo sapien
aacataatggagtgcgagatctcgc

SEQ ID NO: 4077348 - DNA, 25 bp, Homo sapien
cccgagctgcggggtgcccccccag

SEQ ID NO: 4077349 - DNA, 25 bp, Homo sapien
gccaggaagccgaggctcggtgggc

SEQ ID NO: 4077350 - DNA, 25 bp, Homo sapien
ccaggaagccgaggctcggtgggct

SEQ ID NO: 4077351 - DNA, 25 bp, Homo sapien
ggaagccgaggctcggtgggctgac

SEQ ID NO: 4077352 - DNA, 25 bp, Homo sapien
ccgtagccagccaggaagccgaggc

SEQ ID NO: 4077353 - DNA, 25 bp, Homo sapien
gacccaccattcgaggaagccggtg

SEQ ID NO: 4077354 - DNA, 25 bp, Homo sapien
agcaggttgcagtcggtccggcact

SEQ ID NO: 4077355 - DNA, 25 bp, Homo sapien
gttgcagtcggtccggcactcctgc

SEQ ID NO: 4077356 - DNA, 25 bp, Homo sapien
tgcagctcgatgacccaccattcga

SEQ ID NO: 4077357 - DNA, 25 bp, Homo sapien
gagggagaagatcgttgaggccgca

SEQ ID NO: 4077358 - DNA, 25 bp, Homo sapien
ggagaagatcgttgaggccgcaggt

SEQ ID NO: 4077359 - DNA, 25 bp, Homo sapien
gaagatcgttgaggccgcaggtcac

SEQ ID NO: 4077360 - DNA, 25 bp, Homo sapien
atggagggagaagatcgttgaggcc

SEQ ID NO: 4077361 - DNA, 25 bp, Homo sapien
cacggatgtacttggggaagagatt

SEQ ID NO: 4077362 - DNA, 25 bp, Homo sapien
ttgggggcacggatgtacttgggga

SEQ ID NO: 4077363 - DNA, 25 bp, Homo sapien
gcttcacagggttggcttcgggccc

SEQ ID NO: 4077364 - DNA, 25 bp, Homo sapien
cttcacagggttggcttcgggcccg

SEQ ID NO: 4077365 - DNA, 25 bp, Homo sapien
gcttctcgttggcatactccacagt

SEQ ID NO: 4077366 - DNA, 25 bp, Homo sapien
tcgttggcatactccacagtgcctc

SEQ ID NO: 4077367 - DNA, 25 bp, Homo sapien
ttctcgttggcatactccacagtgc

SEQ ID NO: 4077368 - DNA, 25 bp, Homo sapien
cacagtgcctcccttcgccaggtcc

SEQ ID NO: 4077369 - DNA, 25 bp, Homo sapien
cacagcgtgacccactgtagtgggt

SEQ ID NO: 4077370 - DNA, 25 bp, Homo sapien
gggtgggaacacagcgtgacccact

SEQ ID NO: 4077371 - DNA, 25 bp, Homo sapien
tgacccactgtagtgggtccaccca

SEQ ID NO: 4077372 - DNA, 25 bp, Homo sapien
tgggaacacagcgtgacccactgta

SEQ ID NO: 4077373 - DNA, 25 bp, Homo sapien
tgccctcaatctgcgccgtgacgat

SEQ ID NO: 4077374 - DNA, 25 bp, Homo sapien
ggaagttccaggtgaagcgcagggt

SEQ ID NO: 4077375 - DNA, 25 bp, Homo sapien
tgccgttgtagagctcccgcttcat

SEQ ID NO: 4077376 - DNA, 25 bp, Homo sapien
tcctcagggctgtactggctgatga

SEQ ID NO: 4077377 - DNA, 25 bp, Homo sapien
caccctcagtgactgcagccgcctc

SEQ ID NO: 4077378 - DNA, 25 bp, Homo sapien
acaccctcagtgactgcagccgcct

SEQ ID NO: 4077379 - DNA, 25 bp, Homo sapien
ctgggtacaagtgacaccctcagtg

SEQ ID NO: 4077380 - DNA, 25 bp, Homo sapien
taggcctgggccgtgaaggggatga

SEQ ID NO: 4077381 - DNA, 25 bp, Homo sapien
gaaggggatgatggacggctgctgg

SEQ ID NO: 4077382 - DNA, 25 bp, Homo sapien
gggatgatggacggctgctgggcgc

SEQ ID NO: 4077383 - DNA, 25 bp, Homo sapien
tgggggtcaaactgccgggacagct

SEQ ID NO: 4077384 - DNA, 25 bp, Homo sapien
ggggacacggggccacgaagatgag

SEQ ID NO: 4077385 - DNA, 25 bp, Homo sapien
ccacgaagatgagcgtggaggagcg

SEQ ID NO: 4077386 - DNA, 25 bp, Homo sapien
gcaggcacggggacacggggccacg

SEQ ID NO: 4077387 - DNA, 25 bp, Homo sapien
gccacgaagatgagcgtggaggagc

SEQ ID NO: 4077388 - DNA, 25 bp, Homo sapien
atgggaatggacaggcggacccaca

SEQ ID NO: 4077389 - DNA, 25 bp, Homo sapien
gaatggacaggcggacccacacatg

SEQ ID NO: 4077390 - DNA, 25 bp, Homo sapien
ggaatggacaggcggacccacacat

SEQ ID NO: 4077391 - DNA, 25 bp, Homo sapien
tgggaatggacaggcggacccacac

SEQ ID NO: 4077392 - DNA, 25 bp, Homo sapien
tgacggtgacatcgatgggctggtt

SEQ ID NO: 4077393 - DNA, 25 bp, Homo sapien
gctggttgacaaccccaaccacgga

SEQ ID NO: 4077394 - DNA, 25 bp, Homo sapien
caccagcgacatgaagagcagtggg

SEQ ID NO: 4077395 - DNA, 25 bp, Homo sapien
tgaggccacccatgccgtacttgac

SEQ ID NO: 4077396 - DNA, 25 bp, Homo sapien
taagagtccagttggaaccctcatg

SEQ ID NO: 4077397 - DNA, 25 bp, Homo sapien
gacacaggtcatacgctcagctctg

SEQ ID NO: 4077398 - DNA, 25 bp, Homo sapien
cctcagtatggcacagcggtagtaa

SEQ ID NO: 4077399 - DNA, 25 bp, Homo sapien
tgatcttagacaagggagctgtgac

SEQ ID NO: 4077400 - DNA, 25 bp, Homo sapien
gatcaaagagcgaaacttcagagct

SEQ ID NO: 4077401 - DNA, 25 bp, Homo sapien
aaagtggatcaaagagcgaaacttc

SEQ ID NO: 4077402 - DNA, 25 bp, Homo sapien
gtggatcaaagagcgaaacttcaga

SEQ ID NO: 4077403 - DNA, 25 bp, Homo sapien
ggatcaaagagcgaaacttcagagc

SEQ ID NO: 4077404 - DNA, 25 bp, Homo sapien
tttgtgcttccaaagacaccaagaa

SEQ ID NO: 4077405 - DNA, 25 bp, Homo sapien
aattttaattgataaggttctagca

SEQ ID NO: 4077406 - DNA, 25 bp, Homo sapien
aggttctagcaaccagagaatacag

SEQ ID NO: 4077407 - DNA, 25 bp, Homo sapien
taagagacagtccatagaattggag

SEQ ID NO: 4077408 - DNA, 25 bp, Homo sapien
catactgccacgtgggtggacctca

SEQ ID NO: 4077409 - DNA, 25 bp, Homo sapien
gatgtggagaaaccgcaacctcgtg

SEQ ID NO: 4077410 - DNA, 25 bp, Homo sapien
taggcaaatctcatagaaccaggac

SEQ ID NO: 4077411 - DNA, 25 bp, Homo sapien
cataaacaggaaggccatactgcca

SEQ ID NO: 4077412 - DNA, 25 bp, Homo sapien
atcagctagtgggtgggctcgcctc

SEQ ID NO: 4077413 - DNA, 25 bp, Homo sapien
tggtctgacgcacgaattctctctg

SEQ ID NO: 4077414 - DNA, 25 bp, Homo sapien
tcctgggtctcttacagtgctggga

SEQ ID NO: 4077415 - DNA, 25 bp, Homo sapien
cgcttgtggccgtgcagatcttgaa

SEQ ID NO: 4077416 - DNA, 25 bp, Homo sapien
agctggacagggacagcgtggtgtc

SEQ ID NO: 4077417 - DNA, 25 bp, Homo sapien
gctggacagggacagcgtggtgtcc

SEQ ID NO: 4077418 - DNA, 25 bp, Homo sapien
caccaggaacggcaccagccggaac

SEQ ID NO: 4077419 - DNA, 25 bp, Homo sapien
tggacagggacagcgtggtgtccgt

SEQ ID NO: 4077420 - DNA, 25 bp, Homo sapien
ttcacgaagtaccagagctgggcca

SEQ ID NO: 4077421 - DNA, 25 bp, Homo sapien
tagatgcacttcacgaagtaccaga

SEQ ID NO: 4077422 - DNA, 25 bp, Homo sapien
gcagcggatctggtaggcggacagg

SEQ ID NO: 4077423 - DNA, 25 bp, Homo sapien
cggacagggcgaagtagatgcactt

SEQ ID NO: 4077424 - DNA, 25 bp, Homo sapien
gggcgcggtcaaccaccatggtact

SEQ ID NO: 4077425 - DNA, 25 bp, Homo sapien
tgaagaacatccataggtggatggc

SEQ ID NO: 4077426 - DNA, 25 bp, Homo sapien
ctcgggtacctggtcgtctgatagg

SEQ ID NO: 4077427 - DNA, 25 bp, Homo sapien
ccagcacggtcttgcgcaggtagag

SEQ ID NO: 4077428 - DNA, 25 bp, Homo sapien
catgagggcatagacgtcggtggct

SEQ ID NO: 4077429 - DNA, 25 bp, Homo sapien
gtcgacaacatcagccaggaacatg

SEQ ID NO: 4077430 - DNA, 25 bp, Homo sapien
gaagaagcgccgtagcggccgatat

SEQ ID NO: 4077431 - DNA, 25 bp, Homo sapien
ggtggctgcgcggtacttggtgtgc

SEQ ID NO: 4077432 - DNA, 25 bp, Homo sapien
ttactcttcctccagagcggcttgg

SEQ ID NO: 4077433 - DNA, 25 bp, Homo sapien
ttcctccagagcggcttggcctctt

SEQ ID NO: 4077434 - DNA, 25 bp, Homo sapien
tactcttcctccagagcggcttggc

SEQ ID NO: 4077435 - DNA, 25 bp, Homo sapien
ctcttcctccagagcggcttggcct

SEQ ID NO: 4077436 - DNA, 25 bp, Homo sapien
cagggacggctctgtaggcagagcc

SEQ ID NO: 4077437 - DNA, 25 bp, Homo sapien
agggacggctctgtaggcagagccg

SEQ ID NO: 4077438 - DNA, 25 bp, Homo sapien
tcagggacggctctgtaggcagagc

SEQ ID NO: 4077439 - DNA, 25 bp, Homo sapien
gggcttggccgtctcatctgagaaa

SEQ ID NO: 4077440 - DNA, 25 bp, Homo sapien
tccaggtgggcctcgcactgggctt

SEQ ID NO: 4077441 - DNA, 25 bp, Homo sapien
tgggatccaggtgggcctcgcactg

SEQ ID NO: 4077442 - DNA, 25 bp, Homo sapien
ctcgcactgggcttggccgtctcat

SEQ ID NO: 4077443 - DNA, 25 bp, Homo sapien
tagccccactcagaaaactgggtag

SEQ ID NO: 4077444 - DNA, 25 bp, Homo sapien
gcagtagccccactcagaaaactgg

SEQ ID NO: 4077445 - DNA, 25 bp, Homo sapien
ctgcagtagccccactcagaaaact

SEQ ID NO: 4077446 - DNA, 25 bp, Homo sapien
cagtagccccactcagaaaactggg

SEQ ID NO: 4077447 - DNA, 25 bp, Homo sapien
cttccttcttctaaaacgtagactg

SEQ ID NO: 4077448 - DNA, 25 bp, Homo sapien
agactgatgcgcctcgtatcacggg

SEQ ID NO: 4077449 - DNA, 25 bp, Homo sapien
taaaacgtagactgatgcgcctcgt

SEQ ID NO: 4077450 - DNA, 25 bp, Homo sapien
tccgtgggtccgaccctggcttcca

SEQ ID NO: 4077451 - DNA, 25 bp, Homo sapien
gtgagtcctcctcatggtcccagag

SEQ ID NO: 4077452 - DNA, 25 bp, Homo sapien
cctcctcatggtcccagaggccata

SEQ ID NO: 4077453 - DNA, 25 bp, Homo sapien
tccttggatggtgagtcctcctcat

SEQ ID NO: 4077454 - DNA, 25 bp, Homo sapien
tgtcatgctccttggatggtgagtc

SEQ ID NO: 4077455 - DNA, 25 bp, Homo sapien
tgatgtagccgtcagtcttctccag

SEQ ID NO: 4077456 - DNA, 25 bp, Homo sapien
tagggcttgttctcgtagcgccgca

SEQ ID NO: 4077457 - DNA, 25 bp, Homo sapien
tggaacaggtacttgacgaccaccg

SEQ ID NO: 4077458 - DNA, 25 bp, Homo sapien
tgagctgcaccaggtcgtacttgat

SEQ ID NO: 4077459 - DNA, 25 bp, Homo sapien
tcggtgaagacgatggccgtcatcc

SEQ ID NO: 4077460 - DNA, 25 bp, Homo sapien
gccgtcatccagaagcgcttgctgg

SEQ ID NO: 4077461 - DNA, 25 bp, Homo sapien
cgcttgctgggcctcgggatcgaca

SEQ ID NO: 4077462 - DNA, 25 bp, Homo sapien
atggcccacaggaagacgagcacgg

SEQ ID NO: 4077463 - DNA, 25 bp, Homo sapien
agacccgcgtgtttgggggagtctg

SEQ ID NO: 4077464 - DNA, 25 bp, Homo sapien
ctacagggagacccgcgtgtttggg

SEQ ID NO: 4077465 - DNA, 25 bp, Homo sapien
aggctggtgttgtgcgcgtcccgcc

SEQ ID NO: 4077466 - DNA, 25 bp, Homo sapien
ctgcccgaaggcatgacggcccgat

SEQ ID NO: 4077467 - DNA, 25 bp, Homo sapien
catgacggcccgatctgttgccggt

SEQ ID NO: 4077468 - DNA, 25 bp, Homo sapien
ctgttgccggtcacagtcagtctcc

SEQ ID NO: 4077469 - DNA, 25 bp, Homo sapien
gcgcgtgtggtagccggtgctcagg

SEQ ID NO: 4077470 - DNA, 25 bp, Homo sapien
tggccgtccgcatcagtccctggta

SEQ ID NO: 4077471 - DNA, 25 bp, Homo sapien
catcagtccctggtacagagaggca

SEQ ID NO: 4077472 - DNA, 25 bp, Homo sapien
cctcactgccactgcgcgtgtggta

SEQ ID NO: 4077473 - DNA, 25 bp, Homo sapien
ggatggctaggcgatgcccacacac

SEQ ID NO: 4077474 - DNA, 25 bp, Homo sapien
gagggaagccgagtcacagagaatc

SEQ ID NO: 4077475 - DNA, 25 bp, Homo sapien
cagagaatcctgctctatggcctga

SEQ ID NO: 4077476 - DNA, 25 bp, Homo sapien
gagtcacagagaatcctgctctatg

SEQ ID NO: 4077477 - DNA, 25 bp, Homo sapien
tggcttgtgtacagctgatccagca

SEQ ID NO: 4077478 - DNA, 25 bp, Homo sapien
gcctggcttgtgtacagctgatcca

SEQ ID NO: 4077479 - DNA, 25 bp, Homo sapien
tggacacggtgcttggggcattggg

SEQ ID NO: 4077480 - DNA, 25 bp, Homo sapien
tgtgtacagctgatccagcacgccc

SEQ ID NO: 4077481 - DNA, 25 bp, Homo sapien
gcatccacaggaactgcgccgtgct

SEQ ID NO: 4077482 - DNA, 25 bp, Homo sapien
tcatggtgccgtggtgccgggtgaa

SEQ ID NO: 4077483 - DNA, 25 bp, Homo sapien
gtgtcagctcatccactagcgcctg

SEQ ID NO: 4077484 - DNA, 25 bp, Homo sapien
aggaggtagcgctctgcccgcagca

SEQ ID NO: 4077485 - DNA, 25 bp, Homo sapien
ctcctcggggccctctgctggctcc

SEQ ID NO: 4077486 - DNA, 25 bp, Homo sapien
tgcctcctcggggccctctgctggc

SEQ ID NO: 4077487 - DNA, 25 bp, Homo sapien
ccgctgcctcctcggggccctctgc

SEQ ID NO: 4077488 - DNA, 25 bp, Homo sapien
gctgcctcctcggggccctctgctg

SEQ ID NO: 4077489 - DNA, 25 bp, Homo sapien
ccgcctgggcgttggtcacccatgc

SEQ ID NO: 4077490 - DNA, 25 bp, Homo sapien
agcaccgcctgggcgttggtcaccc

SEQ ID NO: 4077491 - DNA, 25 bp, Homo sapien
accgcctgggcgttggtcacccatg

SEQ ID NO: 4077492 - DNA, 25 bp, Homo sapien
caccgcctgggcgttggtcacccat

SEQ ID NO: 4077493 - DNA, 25 bp, Homo sapien
actctgtgccgacggcctcgggtct

SEQ ID NO: 4077494 - DNA, 25 bp, Homo sapien
ggaaggcactctgtgccgacggcct

SEQ ID NO: 4077495 - DNA, 25 bp, Homo sapien
tgtgccgacggcctcgggtcttcag

SEQ ID NO: 4077496 - DNA, 25 bp, Homo sapien
cgacggcctcgggtcttcaggaaca

SEQ ID NO: 4077497 - DNA, 25 bp, Homo sapien
caaacaggaagtagtccccggagtg

SEQ ID NO: 4077498 - DNA, 25 bp, Homo sapien
aggaagtagtccccggagtggatga

SEQ ID NO: 4077499 - DNA, 25 bp, Homo sapien
acaggaagtagtccccggagtggat

SEQ ID NO: 4077500 - DNA, 25 bp, Homo sapien
ctcaaacaggaagtagtccccggag

SEQ ID NO: 4077501 - DNA, 25 bp, Homo sapien
cactgcctccgtggcggggaggagc

SEQ ID NO: 4077502 - DNA, 25 bp, Homo sapien
ccactgcctccgtggcggggaggag

SEQ ID NO: 4077503 - DNA, 25 bp, Homo sapien
ctgcctccgtggcggggaggagccc

SEQ ID NO: 4077504 - DNA, 25 bp, Homo sapien
accactgcctccgtggcggggagga

SEQ ID NO: 4077505 - DNA, 25 bp, Homo sapien
tctcctgcttggcacggatacgctc

SEQ ID NO: 4077506 - DNA, 25 bp, Homo sapien
tcctgcttggcacggatacgctcca

SEQ ID NO: 4077507 - DNA, 25 bp, Homo sapien
ctgggggcgactgcggtccacccgg

SEQ ID NO: 4077508 - DNA, 25 bp, Homo sapien
cttctcctgcttggcacggatacgc

SEQ ID NO: 4077509 - DNA, 25 bp, Homo sapien
tctatcctgcggtgaaagtcaatgc

SEQ ID NO: 4077510 - DNA, 25 bp, Homo sapien
ttggcagcgttgtagagggcgaagc

SEQ ID NO: 4077511 - DNA, 25 bp, Homo sapien
cagggacttctcctctatcctgcgg

SEQ ID NO: 4077512 - DNA, 25 bp, Homo sapien
tcaatgctcttgaggttggcagcgt

SEQ ID NO: 4077513 - DNA, 25 bp, Homo sapien
ctcccagccccaagacgggagctct

SEQ ID NO: 4077514 - DNA, 25 bp, Homo sapien
cctcccagccccaagacgggagctc

SEQ ID NO: 4077515 - DNA, 25 bp, Homo sapien
tcccagccccaagacgggagctctg

SEQ ID NO: 4077516 - DNA, 25 bp, Homo sapien
cagggcggtggcctggaggtcggcc

SEQ ID NO: 4077517 - DNA, 25 bp, Homo sapien
ctggaggctagcagggcggtggcct

SEQ ID NO: 4077518 - DNA, 25 bp, Homo sapien
gcaggtagtaatggctaaggaagac

SEQ ID NO: 4077519 - DNA, 25 bp, Homo sapien
aggtagtaatggctaaggaagacgc

SEQ ID NO: 4077520 - DNA, 25 bp, Homo sapien
taatggctaaggaagacgcggcgct

SEQ ID NO: 4077521 - DNA, 25 bp, Homo sapien
tagtaatggctaaggaagacgcggc

SEQ ID NO: 4077522 - DNA, 25 bp, Homo sapien
cggtgcatacaaggctgaagagctg

SEQ ID NO: 4077523 - DNA, 25 bp, Homo sapien
acccagcagaagccggtctgcatct

SEQ ID NO: 4077524 - DNA, 25 bp, Homo sapien
gtcatagtagcccttgacggtgcat

SEQ ID NO: 4077525 - DNA, 25 bp, Homo sapien
ccttgacggtgcatacaaggctgaa

SEQ ID NO: 4077526 - DNA, 25 bp, Homo sapien
ccagcccgaagatgctgatgcgggt

SEQ ID NO: 4077527 - DNA, 25 bp, Homo sapien
caccttcagcatgtcaaggtaggac

SEQ ID NO: 4077528 - DNA, 25 bp, Homo sapien
cgttgtacagaatgaggcagtccca

SEQ ID NO: 4077529 - DNA, 25 bp, Homo sapien
ggtatcggaagacggccaccttcag

SEQ ID NO: 4077530 - DNA, 25 bp, Homo sapien
ctccaggcggtcggtgttgacgcca

SEQ ID NO: 4077531 - DNA, 25 bp, Homo sapien
tgccactgctgggaggcgcacagca

SEQ ID NO: 4077532 - DNA, 25 bp, Homo sapien
cggtgttgacgccagccatgcgctg

SEQ ID NO: 4077533 - DNA, 25 bp, Homo sapien
tgtgcgctcagctgagaacacctgc

SEQ ID NO: 4077534 - DNA, 25 bp, Homo sapien
ctgggagcggacacacgtctgcctg

SEQ ID NO: 4077535 - DNA, 25 bp, Homo sapien
caggacacaggagccgccgctgtgc

SEQ ID NO: 4077536 - DNA, 25 bp, Homo sapien
gggacccacacgaggtgggcacggc

SEQ ID NO: 4077537 - DNA, 25 bp, Homo sapien
tgggcacggcgcataaatcccacct

SEQ ID NO: 4077538 - DNA, 25 bp, Homo sapien
acagccacttgatgagtgcggagtt

SEQ ID NO: 4077539 - DNA, 25 bp, Homo sapien
gccacttgatgagtgcggagttcat

SEQ ID NO: 4077540 - DNA, 25 bp, Homo sapien
cacttgatgagtgcggagttcatgg

SEQ ID NO: 4077541 - DNA, 25 bp, Homo sapien
cagccacttgatgagtgcggagttc

SEQ ID NO: 4077542 - DNA, 25 bp, Homo sapien
ctcagggtccatgggaatcacctcg

SEQ ID NO: 4077543 - DNA, 25 bp, Homo sapien
gtccatgggaatcacctcgcgcaca

SEQ ID NO: 4077544 - DNA, 25 bp, Homo sapien
gcacacctggtgtctcgagaactga

SEQ ID NO: 4077545 - DNA, 25 bp, Homo sapien
cgttgacccgagtctatcaccagcc

SEQ ID NO: 4077546 - DNA, 25 bp, Homo sapien
aggagacgcatgctcgaggcagcac

SEQ ID NO: 4077547 - DNA, 25 bp, Homo sapien
gcccggagaggacgcagtgctcctt

SEQ ID NO: 4077548 - DNA, 25 bp, Homo sapien
gtgtgaggcatcacggccgacccgc

SEQ ID NO: 4077549 - DNA, 25 bp, Homo sapien
ccaggagacgcatgctcgaggcagc

SEQ ID NO: 4077550 - DNA, 25 bp, Homo sapien
ggggcatccccaggcacagcaggta

SEQ ID NO: 4077551 - DNA, 25 bp, Homo sapien
gccgggggcatccccaggcacagca

SEQ ID NO: 4077552 - DNA, 25 bp, Homo sapien
caatgcacagggccgggggcatccc

SEQ ID NO: 4077553 - DNA, 25 bp, Homo sapien
cgggggcatccccaggcacagcagg

SEQ ID NO: 4077554 - DNA, 25 bp, Homo sapien
acgttcacggccatcaggaagcaga

SEQ ID NO: 4077555 - DNA, 25 bp, Homo sapien
gccagcaaccgtgcagggtcaccag

SEQ ID NO: 4077556 - DNA, 25 bp, Homo sapien
cagaaagttcatgcgctgcccgatc

SEQ ID NO: 4077557 - DNA, 25 bp, Homo sapien
ctggtacagcaggaacagcgccagg

SEQ ID NO: 4077558 - DNA, 25 bp, Homo sapien
gggtgccgctggcaaacacggcctg

SEQ ID NO: 4077559 - DNA, 25 bp, Homo sapien
tcctggcgccggtacacgatggcct

SEQ ID NO: 4077560 - DNA, 25 bp, Homo sapien
cggcggtagtgctcctggcgccggt

SEQ ID NO: 4077561 - DNA, 25 bp, Homo sapien
ttgaggcagccgagcagatcctggt

SEQ ID NO: 4077562 - DNA, 25 bp, Homo sapien
tttccgcaccccaaaccagttggca

SEQ ID NO: 4077563 - DNA, 25 bp, Homo sapien
agcagggactggctgatctccgtgg

SEQ ID NO: 4077564 - DNA, 25 bp, Homo sapien
gggactggctgatctccgtgggcag

SEQ ID NO: 4077565 - DNA, 25 bp, Homo sapien
actggctgatctccgtgggcagcaa

SEQ ID NO: 4077566 - DNA, 25 bp, Homo sapien
tgccccctggccctgcccggagccc

SEQ ID NO: 4077567 - DNA, 25 bp, Homo sapien
ccaggccacagtgccccctggccct

SEQ ID NO: 4077568 - DNA, 25 bp, Homo sapien
aagaggccaggcatcagtgccccct

SEQ ID NO: 4077569 - DNA, 25 bp, Homo sapien
tggcaagaggccaggcatcagtgcc

SEQ ID NO: 4077570 - DNA, 25 bp, Homo sapien
cagccttggagccaccttcacgggg

SEQ ID NO: 4077571 - DNA, 25 bp, Homo sapien
tgtttgagaaacagggagaccacgg

SEQ ID NO: 4077572 - DNA, 25 bp, Homo sapien
aggtgtttgagaaacagggagacca

SEQ ID NO: 4077573 - DNA, 25 bp, Homo sapien
gccttggagccaccttcacggggaa

SEQ ID NO: 4077574 - DNA, 25 bp, Homo sapien
gcagagatgcctgactgtctctccc

SEQ ID NO: 4077575 - DNA, 25 bp, Homo sapien
ccctggtccacagttgaggtcgaag

SEQ ID NO: 4077576 - DNA, 25 bp, Homo sapien
tactggacacccttgtgtgcaggga

SEQ ID NO: 4077577 - DNA, 25 bp, Homo sapien
gtcgggctgcgaatacagagttgcc

SEQ ID NO: 4077578 - DNA, 25 bp, Homo sapien
gggttgacaaccttgagctggtaca

SEQ ID NO: 4077579 - DNA, 25 bp, Homo sapien
tggaatactcctgggggttgacaac

SEQ ID NO: 4077580 - DNA, 25 bp, Homo sapien
acaaccttgagctggtacagcatct

SEQ ID NO: 4077581 - DNA, 25 bp, Homo sapien
ctcggtgcagttgctggaatactcc

SEQ ID NO: 4077582 - DNA, 25 bp, Homo sapien
catgggccggaagcgtgggtagggc

SEQ ID NO: 4077583 - DNA, 25 bp, Homo sapien
aggaggccatgggccggaagcgtgg

SEQ ID NO: 4077584 - DNA, 25 bp, Homo sapien
ccggaagcgtgggtagggcagggcg

SEQ ID NO: 4077585 - DNA, 25 bp, Homo sapien
tagggcagggcgaaggcccacagca

SEQ ID NO: 4077586 - DNA, 25 bp, Homo sapien
gagaggacgtccgagaagccggctg

SEQ ID NO: 4077587 - DNA, 25 bp, Homo sapien
cttgaaaacgtgaagctccagcagc

SEQ ID NO: 4077588 - DNA, 25 bp, Homo sapien
gcaggaacacctgcacgcgtgagag

SEQ ID NO: 4077589 - DNA, 25 bp, Homo sapien
agacggtgtacagggccaccagctt

SEQ ID NO: 4077590 - DNA, 25 bp, Homo sapien
gtgtgagggtcagtgcggggcacaa

SEQ ID NO: 4077591 - DNA, 25 bp, Homo sapien
tgagggtcagtgcggggcacaaacg

SEQ ID NO: 4077592 - DNA, 25 bp, Homo sapien
tgtgagggtcagtgcggggcacaaa

SEQ ID NO: 4077593 - DNA, 25 bp, Homo sapien
tggtgtgagggtcagtgcggggcac

SEQ ID NO: 4077594 - DNA, 25 bp, Homo sapien
cctggtggggagtggccacgcccag

SEQ ID NO: 4077595 - DNA, 25 bp, Homo sapien
gcagcagtggggtcccactcactgc

SEQ ID NO: 4077596 - DNA, 25 bp, Homo sapien
tgctcctcccgcagcagtggggtcc

SEQ ID NO: 4077597 - DNA, 25 bp, Homo sapien
ctcccgcagcagtggggtcccactc

SEQ ID NO: 4077598 - DNA, 25 bp, Homo sapien
agtggggtcccactcactgcatcct

SEQ ID NO: 4077599 - DNA, 25 bp, Homo sapien
gcgcgggaggcgcgtgccaggcagg

SEQ ID NO: 4077600 - DNA, 25 bp, Homo sapien
agcgcgggaggcgcgtgccaggcag

SEQ ID NO: 4077601 - DNA, 25 bp, Homo sapien
cgcgggaggcgcgtgccaggcaggg

SEQ ID NO: 4077602 - DNA, 25 bp, Homo sapien
cctgtggaagtagtgcagctgcagg

SEQ ID NO: 4077603 - DNA, 25 bp, Homo sapien
gcctgtggaagtagtgcagctgcag

SEQ ID NO: 4077604 - DNA, 25 bp, Homo sapien
ctgtggaagtagtgcagctgcagga

SEQ ID NO: 4077605 - DNA, 25 bp, Homo sapien
accacgagccaccagaaggccttga

SEQ ID NO: 4077606 - DNA, 25 bp, Homo sapien
tgtagacggcgatgaggaccagcat

SEQ ID NO: 4077607 - DNA, 25 bp, Homo sapien
gcttccgccacaggctgtagtagac

SEQ ID NO: 4077608 - DNA, 25 bp, Homo sapien
ttgcgccagtaggcagggaagtcct

SEQ ID NO: 4077609 - DNA, 25 bp, Homo sapien
gctgaccacgatgaacatgccagca

SEQ ID NO: 4077610 - DNA, 25 bp, Homo sapien
acaatcttgtagaccacgaggcggc

SEQ ID NO: 4077611 - DNA, 25 bp, Homo sapien
gcacacacatagatccagtacttgg

SEQ ID NO: 4077612 - DNA, 25 bp, Homo sapien
aggctctgcaacagcgtctgcgtcc

SEQ ID NO: 4077613 - DNA, 25 bp, Homo sapien
acggtgacctccgtcagcgcagctg

SEQ ID NO: 4077614 - DNA, 25 bp, Homo sapien
ctccgtcagcgcagctggagactct

SEQ ID NO: 4077615 - DNA, 25 bp, Homo sapien
acaaactggcgcagcaggagccaga

SEQ ID NO: 4077616 - DNA, 25 bp, Homo sapien
ctctttcacaaactggcgcagcagg

SEQ ID NO: 4077617 - DNA, 25 bp, Homo sapien
caggggtagcgggtgtgctccagcc

SEQ ID NO: 4077618 - DNA, 25 bp, Homo sapien
tccagacaggggtagcgggtgtgct

SEQ ID NO: 4077619 - DNA, 25 bp, Homo sapien
caccaaggtccagacaggggtagcg

SEQ ID NO: 4077620 - DNA, 25 bp, Homo sapien
gcaccaaggtccagacaggggtagc

SEQ ID NO: 4077621 - DNA, 25 bp, Homo sapien
acagcgtcatcccatacagcaggat

SEQ ID NO: 4077622 - DNA, 25 bp, Homo sapien
gctgcgcaccgtccagatgaggcag

SEQ ID NO: 4077623 - DNA, 25 bp, Homo sapien
catggccagttggtggcggctgcgc

SEQ ID NO: 4077624 - DNA, 25 bp, Homo sapien
acacgtagcgtaggcagcacagcgt

SEQ ID NO: 4077625 - DNA, 25 bp, Homo sapien
atcatggcaatgagcgcgcacacat

SEQ ID NO: 4077626 - DNA, 25 bp, Homo sapien
cacatagctctggtccatgatgagg

SEQ ID NO: 4077627 - DNA, 25 bp, Homo sapien
ccaggctgtggagcggagacgcctc

SEQ ID NO: 4077628 - DNA, 25 bp, Homo sapien
aatgagcgcgcacacatagctctgg

SEQ ID NO: 4077629 - DNA, 25 bp, Homo sapien
gcaggacggagctctggccggtcag

SEQ ID NO: 4077630 - DNA, 25 bp, Homo sapien
tatcagcctcggtgtcgggtgctgt

SEQ ID NO: 4077631 - DNA, 25 bp, Homo sapien
tggccggtcagctcgtgcacgatgc

SEQ ID NO: 4077632 - DNA, 25 bp, Homo sapien
tcgtgcacgatgcagttatcagcct

SEQ ID NO: 4077633 - DNA, 25 bp, Homo sapien
ctggtcagactcccgttcctggggc

SEQ ID NO: 4077634 - DNA, 25 bp, Homo sapien
ctcccgagcctcatacccctttgcc

SEQ ID NO: 4077635 - DNA, 25 bp, Homo sapien
tcccgagcctcatacccctttgccg

SEQ ID NO: 4077636 - DNA, 25 bp, Homo sapien
cgttcctggggccactggtccagct

SEQ ID NO: 4077637 - DNA, 25 bp, Homo sapien
cgcagagaggccgtggcgtagcaca

SEQ ID NO: 4077638 - DNA, 25 bp, Homo sapien
agtccaggccggtgttgaggaccag

SEQ ID NO: 4077639 - DNA, 25 bp, Homo sapien
agcagttggtgggacccacgaagtc

SEQ ID NO: 4077640 - DNA, 25 bp, Homo sapien
tacgcgcggagcttgcgcagagagg

SEQ ID NO: 4077641 - DNA, 25 bp, Homo sapien
tagaggcagatgagatggccggcgc

SEQ ID NO: 4077642 - DNA, 25 bp, Homo sapien
agagtctgctgaagccccgagtgct

SEQ ID NO: 4077643 - DNA, 25 bp, Homo sapien
aaagtggcaggcccaccaggtgcag

SEQ ID NO: 4077644 - DNA, 25 bp, Homo sapien
ggtagacactggagagggccgaggg

SEQ ID NO: 4077645 - DNA, 25 bp, Homo sapien
ctgccagtgcaagcagtgttacggc

SEQ ID NO: 4077646 - DNA, 25 bp, Homo sapien
gccgtgactcggaaacgagcggcca

SEQ ID NO: 4077647 - DNA, 25 bp, Homo sapien
cggccagccgtgacctccgtgtagg

SEQ ID NO: 4077648 - DNA, 25 bp, Homo sapien
caagcagtgttacggccaggacccg

SEQ ID NO: 4077649 - DNA, 25 bp, Homo sapien
gggctggcatccacatccctctcat

SEQ ID NO: 4077650 - DNA, 25 bp, Homo sapien
gctggcatccacatccctctcatca

SEQ ID NO: 4077651 - DNA, 25 bp, Homo sapien
tgcagccctgccgtcgggctggcat

SEQ ID NO: 4077652 - DNA, 25 bp, Homo sapien
tcgggctggcatccacatccctctc

SEQ ID NO: 4077653 - DNA, 25 bp, Homo sapien
gggtgttccttgcaaggcgcccgca

SEQ ID NO: 4077654 - DNA, 25 bp, Homo sapien
cccgcagatgccgaggcagacagag

SEQ ID NO: 4077655 - DNA, 25 bp, Homo sapien
gatgtgggctctgccgggtgttcct

SEQ ID NO: 4077656 - DNA, 25 bp, Homo sapien
agacagaggagaccaccaagatgcc

SEQ ID NO: 4077657 - DNA, 25 bp, Homo sapien
tgtgacccctatgtgtcgcgagagg

SEQ ID NO: 4077658 - DNA, 25 bp, Homo sapien
tatgtgtcgcgagagggtctcccag

SEQ ID NO: 4077659 - DNA, 25 bp, Homo sapien
cttgtgacccctatgtgtcgcgaga

SEQ ID NO: 4077660 - DNA, 25 bp, Homo sapien
acccctatgtgtcgcgagagggtct

SEQ ID NO: 4077661 - DNA, 25 bp, Homo sapien
gggcacaatatgcaggcagatctgg

SEQ ID NO: 4077662 - DNA, 25 bp, Homo sapien
tccaggcggggcacaatatgcaggc

SEQ ID NO: 4077663 - DNA, 25 bp, Homo sapien
caatatgcaggcagatctggagggc

SEQ ID NO: 4077664 - DNA, 25 bp, Homo sapien
gcacaatatgcaggcagatctggag

SEQ ID NO: 4077665 - DNA, 25 bp, Homo sapien
gcaggtagaccagcgagagtccgct

SEQ ID NO: 4077666 - DNA, 25 bp, Homo sapien
ggtagaccagcgagagtccgctgaa

SEQ ID NO: 4077667 - DNA, 25 bp, Homo sapien
aagagcaggtagaccagcgagagtc

SEQ ID NO: 4077668 - DNA, 25 bp, Homo sapien
accagcgagagtccgctgaagcgga

SEQ ID NO: 4077669 - DNA, 25 bp, Homo sapien
ttgggttcgaagcccgtggcagggc

SEQ ID NO: 4077670 - DNA, 25 bp, Homo sapien
ctgccaggaacgtccaatgctcaac

SEQ ID NO: 4077671 - DNA, 25 bp, Homo sapien
aatgctcaacaagtgcaccagggtt

SEQ ID NO: 4077672 - DNA, 25 bp, Homo sapien
tggcagggcaccttagtgtggtgtg

SEQ ID NO: 4077673 - DNA, 25 bp, Homo sapien
ggttaaaaggctccaatgacagtgc

SEQ ID NO: 4077674 - DNA, 25 bp, Homo sapien
ctgcctgctttcccgtgtggttaaa

SEQ ID NO: 4077675 - DNA, 25 bp, Homo sapien
aaaaggctccaatgacagtgcctga

SEQ ID NO: 4077676 - DNA, 25 bp, Homo sapien
cccgtgtggttaaaaggctccaatg

SEQ ID NO: 4077677 - DNA, 25 bp, Homo sapien
acaggtctccaaaaggactgacggg

SEQ ID NO: 4077678 - DNA, 25 bp, Homo sapien
gagccaatgggctggactgagatcc

SEQ ID NO: 4077679 - DNA, 25 bp, Homo sapien
gagggacaggtgcttgaacaagggc

SEQ ID NO: 4077680 - DNA, 25 bp, Homo sapien
gggaacaggtctccaaaaggactga

SEQ ID NO: 4077681 - DNA, 25 bp, Homo sapien
ccacagacaggcgaactgagcccag

SEQ ID NO: 4077682 - DNA, 25 bp, Homo sapien
acaacctaagggtggcaccatccca

SEQ ID NO: 4077683 - DNA, 25 bp, Homo sapien
tcccaacaacctaagggtggcacca

SEQ ID NO: 4077684 - DNA, 25 bp, Homo sapien
agcccgagggttggagtccatgacc

SEQ ID NO: 4077685 - DNA, 25 bp, Homo sapien
tggattcctgctgctcgacaatccc

SEQ ID NO: 4077686 - DNA, 25 bp, Homo sapien
tgaggtcagtgatgggcactttcct

SEQ ID NO: 4077687 - DNA, 25 bp, Homo sapien
tttcctgccacccttggatcggccc

SEQ ID NO: 4077688 - DNA, 25 bp, Homo sapien
attcctgctgctcgacaatcccggg

SEQ ID NO: 4077689 - DNA, 25 bp, Homo sapien
ctggcgttccaggtcatgattcaag

SEQ ID NO: 4077690 - DNA, 25 bp, Homo sapien
ggtagcccgtccagagggtgcaacc

SEQ ID NO: 4077691 - DNA, 25 bp, Homo sapien
caggactaggaattggcagctccct

SEQ ID NO: 4077692 - DNA, 25 bp, Homo sapien
agcagccatcatgggggtagcccgt

SEQ ID NO: 4077693 - DNA, 25 bp, Homo sapien
ctggactcgagactgcaacagcggc

SEQ ID NO: 4077694 - DNA, 25 bp, Homo sapien
gccctgcgaacttcagacgtgacag

SEQ ID NO: 4077695 - DNA, 25 bp, Homo sapien
caatcgcgtgcgtcagctccttaaa

SEQ ID NO: 4077696 - DNA, 25 bp, Homo sapien
taaatcagcagacggcatgagggcc

SEQ ID NO: 4077697 - DNA, 25 bp, Homo sapien
ctgactgagcttgacagccagctct

SEQ ID NO: 4077698 - DNA, 25 bp, Homo sapien
ggctcataaccactaggtgggcagg

SEQ ID NO: 4077699 - DNA, 25 bp, Homo sapien
aaaatcaacattctgggctcataac

SEQ ID NO: 4077700 - DNA, 25 bp, Homo sapien
agagccacagggacgatcacctcag

SEQ ID NO: 4077701 - DNA, 25 bp, Homo sapien
atcacctcaggccacgagggccggg

SEQ ID NO: 4077702 - DNA, 25 bp, Homo sapien
tggctgtgctgagacccctgggcca

SEQ ID NO: 4077703 - DNA, 25 bp, Homo sapien
ggccatctgcaagggcatccctggc

SEQ ID NO: 4077704 - DNA, 25 bp, Homo sapien
tggaattccatccagggccatctgc

SEQ ID NO: 4077705 - DNA, 25 bp, Homo sapien
ggagacatttctgagttctggaatt

SEQ ID NO: 4077706 - DNA, 25 bp, Homo sapien
aatccaattcctaacagcagagcga

SEQ ID NO: 4077707 - DNA, 25 bp, Homo sapien
aattcctaacagcagagcgagcagc

SEQ ID NO: 4077708 - DNA, 25 bp, Homo sapien
tcccgggtggccctgacaagcaggt

SEQ ID NO: 4077709 - DNA, 25 bp, Homo sapien
agggcaagagcgcttccctctcagc

SEQ ID NO: 4077710 - DNA, 25 bp, Homo sapien
gctcctgcgcaggttagagggaaca

SEQ ID NO: 4077711 - DNA, 25 bp, Homo sapien
gagtgtggttaacagatcccctagg

SEQ ID NO: 4077712 - DNA, 25 bp, Homo sapien
ggaacgcctcggcagcaatggagct

SEQ ID NO: 4077713 - DNA, 25 bp, Homo sapien
atgaagacagacctgcggaacgcct

SEQ ID NO: 4077714 - DNA, 25 bp, Homo sapien
gaggagaaacgggtgggcatcgctg

SEQ ID NO: 4077715 - DNA, 25 bp, Homo sapien
cctctgtataccacgtggaggagaa

SEQ ID NO: 4077716 - DNA, 25 bp, Homo sapien
aaacgggtgggcatcgctggcccag

SEQ ID NO: 4077717 - DNA, 25 bp, Homo sapien
agcctgggcacctctgtataccacg

SEQ ID NO: 4077718 - DNA, 25 bp, Homo sapien
acacccaggacgtaacggagtgagg

SEQ ID NO: 4077719 - DNA, 25 bp, Homo sapien
gaggggccgtccctgaccctgacag

SEQ ID NO: 4077720 - DNA, 25 bp, Homo sapien
ggaccagggactccggagcatggca

SEQ ID NO: 4077721 - DNA, 25 bp, Homo sapien
aaggtgagcaggattgcctggcaca

SEQ ID NO: 4077722 - DNA, 25 bp, Homo sapien
actggcccgcagacacattgcaggg

SEQ ID NO: 4077723 - DNA, 25 bp, Homo sapien
tggcccgcagacacattgcagggtc

SEQ ID NO: 4077724 - DNA, 25 bp, Homo sapien
gtcactggcccgcagacacattgca

SEQ ID NO: 4077725 - DNA, 25 bp, Homo sapien
tcactggcccgcagacacattgcag

SEQ ID NO: 4077726 - DNA, 25 bp, Homo sapien
atcctcacccgcacacaggaagggt

SEQ ID NO: 4077727 - DNA, 25 bp, Homo sapien
ggagaaacatgaacgtgagcaaaaa

SEQ ID NO: 4077728 - DNA, 25 bp, Homo sapien
caacccagcgtccaccgtggagaaa

SEQ ID NO: 4077729 - DNA, 25 bp, Homo sapien
acccgggacggtcagcgtccccatg

SEQ ID NO: 4077730 - DNA, 25 bp, Homo sapien
agagctctgtcccacaggaccggcg

SEQ ID NO: 4077731 - DNA, 25 bp, Homo sapien
gaatgaatctgagtggtcgggaatc

SEQ ID NO: 4077732 - DNA, 25 bp, Homo sapien
gaatctgagtggtcgggaatctgca

SEQ ID NO: 4077733 - DNA, 25 bp, Homo sapien
ccggcgtgagaggatgcatgaatga

SEQ ID NO: 4077734 - DNA, 25 bp, Homo sapien
gctgctctcgaatggctacgctcaa

SEQ ID NO: 4077735 - DNA, 25 bp, Homo sapien
tttccaaagtgtgggaccgcctcag

SEQ ID NO: 4077736 - DNA, 25 bp, Homo sapien
tctagatccccaaagctagcgctgg

SEQ ID NO: 4077737 - DNA, 25 bp, Homo sapien
cacgcggatagcaatcgagaaggca

SEQ ID NO: 4077738 - DNA, 25 bp, Homo sapien
gcagccagtacaggaccgcgccgag

SEQ ID NO: 4077739 - DNA, 25 bp, Homo sapien
gcagcagccagtacaggaccgcgcc

SEQ ID NO: 4077740 - DNA, 25 bp, Homo sapien
agcagccagtacaggaccgcgccga

SEQ ID NO: 4077741 - DNA, 25 bp, Homo sapien
agccagtacaggaccgcgccgagca

SEQ ID NO: 4077742 - DNA, 25 bp, Homo sapien
gcgcgccatggctgacccgcgggga

SEQ ID NO: 4077743 - DNA, 25 bp, Homo sapien
ccggcccagaccgagcggacgccgc

SEQ ID NO: 4077744 - DNA, 25 bp, Homo sapien
gggccggcgcgccatggctgacccg

SEQ ID NO: 4077745 - DNA, 25 bp, Homo sapien
gccgcggcgctatggggcggtgcgg

SEQ ID NO: 4077746 - DNA, 25 bp, Homo sapien
agtggcgccatttcgcctcccgggt

SEQ ID NO: 4077747 - DNA, 25 bp, Homo sapien
cagtggcagccgcaagcgcgcccgc

SEQ ID NO: 4077748 - DNA, 25 bp, Homo sapien
gccaccggcccgcaggagactgcgg

SEQ ID NO: 4077749 - DNA, 25 bp, Homo sapien
ccccggcctccgctaccagtggcag

SEQ ID NO: 4077750 - DNA, 25 bp, Homo sapien
caggcccgcactccgcgccccggcc

SEQ ID NO: 4077751 - DNA, 25 bp, Homo sapien
caaggctgatatttccctgggatcc

SEQ ID NO: 4077752 - DNA, 25 bp, Homo sapien
ctgaaccccagcaaaggaatgtgtt

SEQ ID NO: 4077753 - DNA, 25 bp, Homo sapien
cccacagtacagctgaagtctggtg

SEQ ID NO: 4077754 - DNA, 25 bp, Homo sapien
aaagctgtttactgcgttctcccgc

SEQ ID NO: 4077755 - DNA, 25 bp, Homo sapien
tcacgcactccaggacctcagcctg

SEQ ID NO: 4077756 - DNA, 25 bp, Homo sapien
ttctccctgcccttaagcgaggtca

SEQ ID NO: 4077757 - DNA, 25 bp, Homo sapien
tgcccttaagcgaggtcagctccac

SEQ ID NO: 4077758 - DNA, 25 bp, Homo sapien
accaggctcacgcactccaggacct

SEQ ID NO: 4077759 - DNA, 25 bp, Homo sapien
gtgaggtccccagttggcctgggct

SEQ ID NO: 4077760 - DNA, 25 bp, Homo sapien
gatgggagggtgaggtccccagttg

SEQ ID NO: 4077761 - DNA, 25 bp, Homo sapien
gagggtgaggtccccagttggcctg

SEQ ID NO: 4077762 - DNA, 25 bp, Homo sapien
tgggagggtgaggtccccagttggc

SEQ ID NO: 4077763 - DNA, 25 bp, Homo sapien
tggacaacagtaagctgcatcccat

SEQ ID NO: 4077764 - DNA, 25 bp, Homo sapien
tcccatgtcacacagcgaggtcctg

SEQ ID NO: 4077765 - DNA, 25 bp, Homo sapien
tgcatcccatgtcacacagcgaggt

SEQ ID NO: 4077766 - DNA, 25 bp, Homo sapien
accaggcaccctctggacaacagta

SEQ ID NO: 4077767 - DNA, 25 bp, Homo sapien
gcccttggagccacagcagttggct

SEQ ID NO: 4077768 - DNA, 25 bp, Homo sapien
agccacagcagttggctgcggggag

SEQ ID NO: 4077769 - DNA, 25 bp, Homo sapien
cttggagccacagcagttggctgcg

SEQ ID NO: 4077770 - DNA, 25 bp, Homo sapien
caggcccttggagccacagcagttg

SEQ ID NO: 4077771 - DNA, 25 bp, Homo sapien
gctccagggcgtctttctgaatctc

SEQ ID NO: 4077772 - DNA, 25 bp, Homo sapien
gtggccagcagatcatccacgacga

SEQ ID NO: 4077773 - DNA, 25 bp, Homo sapien
ccagtggccagcagatcatccacga

SEQ ID NO: 4077774 - DNA, 25 bp, Homo sapien
acgacgaccaccctctgtcctggct

SEQ ID NO: 4077775 - DNA, 25 bp, Homo sapien
gctccacttgacacgcctgggaagg

SEQ ID NO: 4077776 - DNA, 25 bp, Homo sapien
caccttgctgttacctggctgtgtg

SEQ ID NO: 4077777 - DNA, 25 bp, Homo sapien
agcctcccgcagaaaacagctttgt

SEQ ID NO: 4077778 - DNA, 25 bp, Homo sapien
caaggccactgtaaccacagcagct

SEQ ID NO: 4077779 - DNA, 25 bp, Homo sapien
cagcttcccccgctttcggatgagc

SEQ ID NO: 4077780 - DNA, 25 bp, Homo sapien
aagaggaagcctcgggagtctaggc

SEQ ID NO: 4077781 - DNA, 25 bp, Homo sapien
ccccgctttcggatgagcacgcagc

SEQ ID NO: 4077782 - DNA, 25 bp, Homo sapien
tcccgtactccagggaataggaggc

SEQ ID NO: 4077783 - DNA, 25 bp, Homo sapien
gagtgactcggcagcatgggaatcc

SEQ ID NO: 4077784 - DNA, 25 bp, Homo sapien
ggctggtagaaacctgacaggcctc

SEQ ID NO: 4077785 - DNA, 25 bp, Homo sapien
agctgagcagcccatctgtaactgg

SEQ ID NO: 4077786 - DNA, 25 bp, Homo sapien
aaaagggagtctctcgaggtggcct

SEQ ID NO: 4077787 - DNA, 25 bp, Homo sapien
gcggaagcgccctagatgcggccac

SEQ ID NO: 4077788 - DNA, 25 bp, Homo sapien
agcgccctagatgcggccactgggc

SEQ ID NO: 4077789 - DNA, 25 bp, Homo sapien
ggaagcgccctagatgcggccactg

SEQ ID NO: 4077790 - DNA, 25 bp, Homo sapien
aagcgccctagatgcggccactggg

SEQ ID NO: 4077791 - DNA, 25 bp, Homo sapien
caggaggccgatggcggcgcggaag

SEQ ID NO: 4077792 - DNA, 25 bp, Homo sapien
ctgcgatgtagtcgatgcggccccc

SEQ ID NO: 4077793 - DNA, 25 bp, Homo sapien
ggtccttcaggacgggcgagatgtc

SEQ ID NO: 4077794 - DNA, 25 bp, Homo sapien
tcgccttcaggtgtcgcgccaggag

SEQ ID NO: 4077795 - DNA, 25 bp, Homo sapien
acgcgctcccatccgtaggcccgca

SEQ ID NO: 4077796 - DNA, 25 bp, Homo sapien
tcggggcgccacgagggcggcctgt

SEQ ID NO: 4077797 - DNA, 25 bp, Homo sapien
ctcccatccgtaggcccgcaggtcg

SEQ ID NO: 4077798 - DNA, 25 bp, Homo sapien
gaggtcgcgggccacgcgctcccat

SEQ ID NO: 4077799 - DNA, 25 bp, Homo sapien
gggaagctgcggatccgctgctcaa

SEQ ID NO: 4077800 - DNA, 25 bp, Homo sapien
ggggaagtcggggaagctgcggatc

SEQ ID NO: 4077801 - DNA, 25 bp, Homo sapien
gaagctgcggatccgctgctcaacc

SEQ ID NO: 4077802 - DNA, 25 bp, Homo sapien
gtcggggaagctgcggatccgctgc

SEQ ID NO: 4077803 - DNA, 25 bp, Homo sapien
cgcgtgcgaagagccagcggcagcc

SEQ ID NO: 4077804 - DNA, 25 bp, Homo sapien
gccgcgtgcgaagagccagcggcag

SEQ ID NO: 4077805 - DNA, 25 bp, Homo sapien
ccgcgtgcgaagagccagcggcagc

SEQ ID NO: 4077806 - DNA, 25 bp, Homo sapien
ggccgcgtgcgaagagccagcggca

SEQ ID NO: 4077807 - DNA, 25 bp, Homo sapien
tgcgcggggacgggcgggaccgcca

SEQ ID NO: 4077808 - DNA, 25 bp, Homo sapien
agtgtgcggtggtcagggctggcaa

SEQ ID NO: 4077809 - DNA, 25 bp, Homo sapien
gggacccatcgtctgatgccaaggg

SEQ ID NO: 4077810 - DNA, 25 bp, Homo sapien
aggccggaggctgcatgcggctgct

SEQ ID NO: 4077811 - DNA, 25 bp, Homo sapien
cggctgcctcgcagtgtgcggtggt

SEQ ID NO: 4077812 - DNA, 25 bp, Homo sapien
gacaaacgcttatatgattgccccg

SEQ ID NO: 4077813 - DNA, 25 bp, Homo sapien
cataaaaatgcggattcactgggcc

SEQ ID NO: 4077814 - DNA, 25 bp, Homo sapien
caatgataagaagctacacgcctcc

SEQ ID NO: 4077815 - DNA, 25 bp, Homo sapien
ttgcagggccaaccggagattctag

SEQ ID NO: 4077816 - DNA, 25 bp, Homo sapien
cctaacttttcacagcccggaggtg

SEQ ID NO: 4077817 - DNA, 25 bp, Homo sapien
gtgtcagacacttccctaacttttc

SEQ ID NO: 4077818 - DNA, 25 bp, Homo sapien
gaatggattctggaggtgtcagaca

SEQ ID NO: 4077819 - DNA, 25 bp, Homo sapien
taacttttcacagcccggaggtgcc

SEQ ID NO: 4077820 - DNA, 25 bp, Homo sapien
gagccaccacgcccaaccatttttg

SEQ ID NO: 4077821 - DNA, 25 bp, Homo sapien
agggttccccaagttggccaggctg

SEQ ID NO: 4077822 - DNA, 25 bp, Homo sapien
tgccaagtggctgagggcctccgag

SEQ ID NO: 4077823 - DNA, 25 bp, Homo sapien
cagtgttagaaagggcaggcggtcc

SEQ ID NO: 4077824 - DNA, 25 bp, Homo sapien
gcagccttgcttagcggaagccttg

SEQ ID NO: 4077825 - DNA, 25 bp, Homo sapien
gtccctactgcgctgctgggctcag

SEQ ID NO: 4077826 - DNA, 25 bp, Homo sapien
gggatgccgcatgagtgtccctgcc

SEQ ID NO: 4077827 - DNA, 25 bp, Homo sapien
ttctgtgccacgtcagacgccgcat

SEQ ID NO: 4077828 - DNA, 25 bp, Homo sapien
tcagggtactaaggacagtctccag

SEQ ID NO: 4077829 - DNA, 25 bp, Homo sapien
gacttatgccgctaagaggagcctt

SEQ ID NO: 4077830 - DNA, 25 bp, Homo sapien
cgtgtaaacaggtgagcgacggccc

SEQ ID NO: 4077831 - DNA, 25 bp, Homo sapien
ggaaagaggcttcagctgggccttt

SEQ ID NO: 4077832 - DNA, 25 bp, Homo sapien
ggtgctctcctgttacatccgccgg

SEQ ID NO: 4077833 - DNA, 25 bp, Homo sapien
ttcttcccgaatcctgcgcggcaga

SEQ ID NO: 4077834 - DNA, 25 bp, Homo sapien
tttgcggccactgcacacgcgggat

SEQ ID NO: 4077835 - DNA, 25 bp, Homo sapien
gcacgtgtcccatctgaaggagctg

SEQ ID NO: 4077836 - DNA, 25 bp, Homo sapien
ctgtgtgtggctcgtttttgccgac

SEQ ID NO: 4077837 - DNA, 25 bp, Homo sapien
ttttgccgactagagcgagggccgc

SEQ ID NO: 4077838 - DNA, 25 bp, Homo sapien
cagttgcacacgttgagctggggct

SEQ ID NO: 4077839 - DNA, 25 bp, Homo sapien
ggctgcgcggggaccaaggcctcct

SEQ ID NO: 4077840 - DNA, 25 bp, Homo sapien
catgaccgcccagttgcacacgttg

SEQ ID NO: 4077841 - DNA, 25 bp, Homo sapien
gacgaccgaggtgatcctgctgagg

SEQ ID NO: 4077842 - DNA, 25 bp, Homo sapien
ggtcttccagattgtgagttgtgac

SEQ ID NO: 4077843 - DNA, 25 bp, Homo sapien
agatcaggggcagcttcgtgtggtc

SEQ ID NO: 4077844 - DNA, 25 bp, Homo sapien
cgtcccaggtggaagatcaggggca

SEQ ID NO: 4077845 - DNA, 25 bp, Homo sapien
ccagattgtgagttgtgacccctga

SEQ ID NO: 4077846 - DNA, 25 bp, Homo sapien
ctggagcccctgactgcggccgtga

SEQ ID NO: 4077847 - DNA, 25 bp, Homo sapien
tgcccgtgtcctggagcccctgact

SEQ ID NO: 4077848 - DNA, 25 bp, Homo sapien
gtgtcctggagcccctgactgcggc

SEQ ID NO: 4077849 - DNA, 25 bp, Homo sapien
ctgcggccgtgaggggcctcgtctg

SEQ ID NO: 4077850 - DNA, 25 bp, Homo sapien
caggatggcccttgcaggtgacagt

SEQ ID NO: 4077851 - DNA, 25 bp, Homo sapien
gccaaggggctcgtccgaggactgt

SEQ ID NO: 4077852 - DNA, 25 bp, Homo sapien
aatgccggggaccgatgcccaggat

SEQ ID NO: 4077853 - DNA, 25 bp, Homo sapien
tgacagtgctgggtaaaacccgaaa

SEQ ID NO: 4077854 - DNA, 25 bp, Homo sapien
tcccaggagttggtccaggtccaga

SEQ ID NO: 4077855 - DNA, 25 bp, Homo sapien
gccatcagcgtgtcgccacggtaat

SEQ ID NO: 4077856 - DNA, 25 bp, Homo sapien
tgtcgccacggtaatagaagatagg

SEQ ID NO: 4077857 - DNA, 25 bp, Homo sapien
aagtgagccttgtgctgcccgaggg

SEQ ID NO: 4077858 - DNA, 25 bp, Homo sapien
tcgctgggcggcgtcaggcccgcaa

SEQ ID NO: 4077859 - DNA, 25 bp, Homo sapien
tgggcggcgtcaggcccgcaagggc

SEQ ID NO: 4077860 - DNA, 25 bp, Homo sapien
atcaatggccctgtcgctgggcggc

SEQ ID NO: 4077861 - DNA, 25 bp, Homo sapien
gctgggcggcgtcaggcccgcaagg

SEQ ID NO: 4077862 - DNA, 25 bp, Homo sapien
agcacagccacgggtggctcccagc

SEQ ID NO: 4077863 - DNA, 25 bp, Homo sapien
gagcacagccacgggtggctcccag

SEQ ID NO: 4077864 - DNA, 25 bp, Homo sapien
tcccacacagaaaggggccgttgct

SEQ ID NO: 4077865 - DNA, 25 bp, Homo sapien
cttcccacacagaaaggggccgttg

SEQ ID NO: 4077866 - DNA, 25 bp, Homo sapien
gccaccatgcgagggcaggctccct

SEQ ID NO: 4077867 - DNA, 25 bp, Homo sapien
gcagtgacgtgccctggccaccatg

SEQ ID NO: 4077868 - DNA, 25 bp, Homo sapien
cagcgccgttgtccgacgtgaagaa

SEQ ID NO: 4077869 - DNA, 25 bp, Homo sapien
tgttgtccgcgacgtgcaggtcttg

SEQ ID NO: 4077870 - DNA, 25 bp, Homo sapien
tccgacgtgaagaagacgaaggtgt

SEQ ID NO: 4077871 - DNA, 25 bp, Homo sapien
gaggagctccagtatcttcccaatg

SEQ ID NO: 4077872 - DNA, 25 bp, Homo sapien
ctgtcatcaatctcccggacggcgt

SEQ ID NO: 4077873 - DNA, 25 bp, Homo sapien
atcaatctcccggacggcgtctcca

SEQ ID NO: 4077874 - DNA, 25 bp, Homo sapien
caatctcccggacggcgtctccata

SEQ ID NO: 4077875 - DNA, 25 bp, Homo sapien
gtcatcaatctcccggacggcgtct

SEQ ID NO: 4077876 - DNA, 25 bp, Homo sapien
cctcgctgactggtgcccaagaagg

SEQ ID NO: 4077877 - DNA, 25 bp, Homo sapien
gggtgcgtgcgtggcgtcgacagcc

SEQ ID NO: 4077878 - DNA, 25 bp, Homo sapien
tttggaggcatagacgggtgcgtgc

SEQ ID NO: 4077879 - DNA, 25 bp, Homo sapien
tgcgtggcgtcgacagcccagtaga

SEQ ID NO: 4077880 - DNA, 25 bp, Homo sapien
tcccccgtcttcagattaataggaa

SEQ ID NO: 4077881 - DNA, 25 bp, Homo sapien
cttcccccgtcttcagattaatagg

SEQ ID NO: 4077882 - DNA, 25 bp, Homo sapien
ggcttcccccgtcttcagattaata

SEQ ID NO: 4077883 - DNA, 25 bp, Homo sapien
ttggcttcccccgtcttcagattaa

SEQ ID NO: 4077884 - DNA, 25 bp, Homo sapien
ttgtcataaggtccaaagtggcagt

SEQ ID NO: 4077885 - DNA, 25 bp, Homo sapien
tccctgtacacagggatgttgggcc

SEQ ID NO: 4077886 - DNA, 25 bp, Homo sapien
gttgggcctggccttgttgtcataa

SEQ ID NO: 4077887 - DNA, 25 bp, Homo sapien
cagttgggggatccaaaccactcat

SEQ ID NO: 4077888 - DNA, 25 bp, Homo sapien
ttcttggtaagacgagcaccctcca

SEQ ID NO: 4077889 - DNA, 25 bp, Homo sapien
ggacactcggaagttctgagcagca

SEQ ID NO: 4077890 - DNA, 25 bp, Homo sapien
cctccagcactgagtatgggctatg

SEQ ID NO: 4077891 - DNA, 25 bp, Homo sapien
aacaggaacccaggacacttcaggg

SEQ ID NO: 4077892 - DNA, 25 bp, Homo sapien
ccaggccagctgtccgggtttcctt

SEQ ID NO: 4077893 - DNA, 25 bp, Homo sapien
tggtggcacctaatctcatcctccg

SEQ ID NO: 4077894 - DNA, 25 bp, Homo sapien
ggtttccttgcgcagcctgtcctgt

SEQ ID NO: 4077895 - DNA, 25 bp, Homo sapien
gtcctgtcctggaacgaatccagct

SEQ ID NO: 4077896 - DNA, 25 bp, Homo sapien
tccacgtccgcagcacaaaggcctt

SEQ ID NO: 4077897 - DNA, 25 bp, Homo sapien
ccacgtccgcagcacaaaggccttg

SEQ ID NO: 4077898 - DNA, 25 bp, Homo sapien
ttccacgtccgcagcacaaaggcct

SEQ ID NO: 4077899 - DNA, 25 bp, Homo sapien
atactcgcggccgtgggaccagcct

SEQ ID NO: 4077900 - DNA, 25 bp, Homo sapien
gagacacctgaacacacccagaatc

SEQ ID NO: 4077901 - DNA, 25 bp, Homo sapien
agtctgatgccgcaggatactcgcg

SEQ ID NO: 4077902 - DNA, 25 bp, Homo sapien
ggtgacctgagatcctgctggcaag

SEQ ID NO: 4077903 - DNA, 25 bp, Homo sapien
tgctccgagtctgggatgccgccca

SEQ ID NO: 4077904 - DNA, 25 bp, Homo sapien
cgcccacaatctcctgcggtgtgta

SEQ ID NO: 4077905 - DNA, 25 bp, Homo sapien
ttcttcagaagctccggcaggagct

SEQ ID NO: 4077906 - DNA, 25 bp, Homo sapien
ttgccgacaatcttgctgacgtagc

SEQ ID NO: 4077907 - DNA, 25 bp, Homo sapien
ttctggcatgggcgttggtggtgta

SEQ ID NO: 4077908 - DNA, 25 bp, Homo sapien
cattgcggatgggtagccgtcctgt

SEQ ID NO: 4077909 - DNA, 25 bp, Homo sapien
cgttggtggtgtagaagccattgcg

SEQ ID NO: 4077910 - DNA, 25 bp, Homo sapien
tagaagccattgcggatgggtagcc

SEQ ID NO: 4077911 - DNA, 25 bp, Homo sapien
acaagagccccaacgagtagacaga

SEQ ID NO: 4077912 - DNA, 25 bp, Homo sapien
acgaggcacgcgcaggtttacaagg

SEQ ID NO: 4077913 - DNA, 25 bp, Homo sapien
gaatagacaaggttgatgcagccgc

SEQ ID NO: 4077914 - DNA, 25 bp, Homo sapien
tccactgaaagacgcgtggcccttg

SEQ ID NO: 4077915 - DNA, 25 bp, Homo sapien
tgcagccatccggtccaaattcggg

SEQ ID NO: 4077916 - DNA, 25 bp, Homo sapien
agcacagagggttggcagaatagaa

SEQ ID NO: 4077917 - DNA, 25 bp, Homo sapien
aagtttgggaaaagcagcccttctg

SEQ ID NO: 4077918 - DNA, 25 bp, Homo sapien
gagggctctccatacaccccgaggt

SEQ ID NO: 4077919 - DNA, 25 bp, Homo sapien
ggagctggcctctaaacacgtgcat

SEQ ID NO: 4077920 - DNA, 25 bp, Homo sapien
cacgctgtgaatggactgtgcccga

SEQ ID NO: 4077921 - DNA, 25 bp, Homo sapien
tggtagaagccaacactccgaggcc

SEQ ID NO: 4077922 - DNA, 25 bp, Homo sapien
tatgactgggcccttagagacgcag

SEQ ID NO: 4077923 - DNA, 25 bp, Homo sapien
caggctggagggcacaatctcgact

SEQ ID NO: 4077924 - DNA, 25 bp, Homo sapien
cactgcaacctttgcctgcacgatc

SEQ ID NO: 4077925 - DNA, 25 bp, Homo sapien
ccaggctggagggcacaatctcgac

SEQ ID NO: 4077926 - DNA, 25 bp, Homo sapien
gcaacctttgcctgcacgatctcgg

SEQ ID NO: 4077927 - DNA, 25 bp, Homo sapien
cctggtgctccaagagccggagaga

SEQ ID NO: 4077928 - DNA, 25 bp, Homo sapien
gccctggtgctccaagagccggaga

SEQ ID NO: 4077929 - DNA, 25 bp, Homo sapien
tctccacagttcaccacgacaggga

SEQ ID NO: 4077930 - DNA, 25 bp, Homo sapien
acagggactagagtctgatcgctga

SEQ ID NO: 4077931 - DNA, 25 bp, Homo sapien
cttggtctttgtctggatgcaatga

SEQ ID NO: 4077932 - DNA, 25 bp, Homo sapien
ggtctttgtctggatgcaatgatcc

SEQ ID NO: 4077933 - DNA, 25 bp, Homo sapien
tggtctttgtctggatgcaatgatc

SEQ ID NO: 4077934 - DNA, 25 bp, Homo sapien
tctttgtctggatgcaatgatccat

SEQ ID NO: 4077935 - DNA, 25 bp, Homo sapien
cacgctcatcactcaccagaaaata

SEQ ID NO: 4077936 - DNA, 25 bp, Homo sapien
tggatgcagcggaaaatgctgtaaa

SEQ ID NO: 4077937 - DNA, 25 bp, Homo sapien
gggtcatcctcctacctgttccagg

SEQ ID NO: 4077938 - DNA, 25 bp, Homo sapien
ggagtgggctccacgctcatcactc

SEQ ID NO: 4077939 - DNA, 25 bp, Homo sapien
aatcaggacactcccgcccaaatag

SEQ ID NO: 4077940 - DNA, 25 bp, Homo sapien
tgcctggttcatcctactgggactg

SEQ ID NO: 4077941 - DNA, 25 bp, Homo sapien
gcctggttcatcctactgggactgg

SEQ ID NO: 4077942 - DNA, 25 bp, Homo sapien
cgcccaaatagtgcgcttttccaac

SEQ ID NO: 4077943 - DNA, 25 bp, Homo sapien
agaaaggcccggctactgctgtcag

SEQ ID NO: 4077944 - DNA, 25 bp, Homo sapien
caaagtatctacactggcccagagg

SEQ ID NO: 4077945 - DNA, 25 bp, Homo sapien
gcccagaggaacttcaaaagtgaaa

SEQ ID NO: 4077946 - DNA, 25 bp, Homo sapien
ggcccagaaggagttacacaatgaa

SEQ ID NO: 4077947 - DNA, 25 bp, Homo sapien
gaaattatgggtggtgtctgttatc

SEQ ID NO: 4077948 - DNA, 25 bp, Homo sapien
aaattatgggtggtgtctgttatct

SEQ ID NO: 4077949 - DNA, 25 bp, Homo sapien
gggaaattatgggtggtgtctgtta

SEQ ID NO: 4077950 - DNA, 25 bp, Homo sapien
aataagacatatgagatggaaaagc

SEQ ID NO: 4077951 - DNA, 25 bp, Homo sapien
cagttcttcagaccttagggacacc

SEQ ID NO: 4077952 - DNA, 25 bp, Homo sapien
tggctgtgacccctgaccccgcact

SEQ ID NO: 4077953 - DNA, 25 bp, Homo sapien
ccaggagacattccagcctttcagt

SEQ ID NO: 4077954 - DNA, 25 bp, Homo sapien
ccaggtggctcccacaaggagttag

SEQ ID NO: 4077955 - DNA, 25 bp, Homo sapien
gagacagccgtcaggtaagactgga

SEQ ID NO: 4077956 - DNA, 25 bp, Homo sapien
cggcccgaggtggcgggagtgattc

SEQ ID NO: 4077957 - DNA, 25 bp, Homo sapien
agagacagccgtcaggtaagactgg

SEQ ID NO: 4077958 - DNA, 25 bp, Homo sapien
gcggcccgaggtggcgggagtgatt

SEQ ID NO: 4077959 - DNA, 25 bp, Homo sapien
ccagggaggacgctgtcccggtcat

SEQ ID NO: 4077960 - DNA, 25 bp, Homo sapien
ctgtcccggtcatgcagcacagtgg

SEQ ID NO: 4077961 - DNA, 25 bp, Homo sapien
tggtgatcggtgaccgccgagaccc

SEQ ID NO: 4077962 - DNA, 25 bp, Homo sapien
agcacagtggcagcgcgtgtggtga

SEQ ID NO: 4077963 - DNA, 25 bp, Homo sapien
gtcgtccatgagcaggagcaggatg

SEQ ID NO: 4077964 - DNA, 25 bp, Homo sapien
agcaggagcaggatgttggggggct

SEQ ID NO: 4077965 - DNA, 25 bp, Homo sapien
tccccgcggcgctgagcaccagcaa

SEQ ID NO: 4077966 - DNA, 25 bp, Homo sapien
ccccatccccgcggcgctgagcacc

SEQ ID NO: 4077967 - DNA, 25 bp, Homo sapien
cacctcgtcgccgcgacaaccgccg

SEQ ID NO: 4077968 - DNA, 25 bp, Homo sapien
tcgtcgccgcgacaaccgccgccat

SEQ ID NO: 4077969 - DNA, 25 bp, Homo sapien
ccaccacctcgtcgccgcgacaacc

SEQ ID NO: 4077970 - DNA, 25 bp, Homo sapien
tgccaccacctcgtcgccgcgacaa

SEQ ID NO: 4077971 - DNA, 25 bp, Homo sapien
agcgagccgacctagcgagcgtccg

SEQ ID NO: 4077972 - DNA, 25 bp, Homo sapien
cccggccagcgagccgacctagcga

SEQ ID NO: 4077973 - DNA, 25 bp, Homo sapien
cggccagcgagccgacctagcgagc

SEQ ID NO: 4077974 - DNA, 25 bp, Homo sapien
gccagcgagccgacctagcgagcgt

SEQ ID NO: 4077975 - DNA, 25 bp, Homo sapien
ctgctttgtacctgcaaggatttct

SEQ ID NO: 4077976 - DNA, 25 bp, Homo sapien
taggccttgcctcttatgtcactag

SEQ ID NO: 4077977 - DNA, 25 bp, Homo sapien
ttcccaaaagtcatcatgtagcctg

SEQ ID NO: 4077978 - DNA, 25 bp, Homo sapien
gacactcgtctagtcccttgggaca

SEQ ID NO: 4077979 - DNA, 25 bp, Homo sapien
ttgcagttaactttccgggccaggc

SEQ ID NO: 4077980 - DNA, 25 bp, Homo sapien
tatttaggcttgtacccagcacggc

SEQ ID NO: 4077981 - DNA, 25 bp, Homo sapien
tttctccaaagtgagggcccacaga

SEQ ID NO: 4077982 - DNA, 25 bp, Homo sapien
gacgtcgccctagcaaagtatttag

SEQ ID NO: 4077983 - DNA, 25 bp, Homo sapien
ccggagttggttccagcactggtcc

SEQ ID NO: 4077984 - DNA, 25 bp, Homo sapien
tcacttgatgacgtggctgactacc

SEQ ID NO: 4077985 - DNA, 25 bp, Homo sapien
cggccgagcccatagtggcgtcagt

SEQ ID NO: 4077986 - DNA, 25 bp, Homo sapien
gactggagagtttctcaaggacctt

SEQ ID NO: 4077987 - DNA, 25 bp, Homo sapien
cttttcatcccatctagcaagcaca

SEQ ID NO: 4077988 - DNA, 25 bp, Homo sapien
tagggaggggaactttcttgataca

SEQ ID NO: 4077989 - DNA, 25 bp, Homo sapien
tgccttttcatcccatctagcaagc

SEQ ID NO: 4077990 - DNA, 25 bp, Homo sapien
gccttttcatcccatctagcaagca

SEQ ID NO: 4077991 - DNA, 25 bp, Homo sapien
ccagttccaatagcgggcagacgag

SEQ ID NO: 4077992 - DNA, 25 bp, Homo sapien
tgtgggccacagaccactctcacaa

SEQ ID NO: 4077993 - DNA, 25 bp, Homo sapien
tctgcaagttgctaacccagcgtcc

SEQ ID NO: 4077994 - DNA, 25 bp, Homo sapien
aagagcctcatgtttgttaggagaa

SEQ ID NO: 4077995 - DNA, 25 bp, Homo sapien
tgtgcacataagcagccttgggctt

SEQ ID NO: 4077996 - DNA, 25 bp, Homo sapien
gaaaataaatgcacccctctctggt

SEQ ID NO: 4077997 - DNA, 25 bp, Homo sapien
ttacatgagggcgttttcacaagcc

SEQ ID NO: 4077998 - DNA, 25 bp, Homo sapien
gaaacagtgcctgatgaggcgctgt

SEQ ID NO: 4077999 - DNA, 25 bp, Homo sapien
gtggtctgagccggggcctgccctg

SEQ ID NO: 4078000 - DNA, 25 bp, Homo sapien
tgtggtctgagccggggcctgccct

SEQ ID NO: 4078001 - DNA, 25 bp, Homo sapien
tggtctgagccggggcctgccctgg

SEQ ID NO: 4078002 - DNA, 25 bp, Homo sapien
ggaagttggttcttttcggcagcac

SEQ ID NO: 4078003 - DNA, 25 bp, Homo sapien
cccgcggtctgtggagctgatccca

SEQ ID NO: 4078004 - DNA, 25 bp, Homo sapien
gctgatcccagggaagttggttctt

SEQ ID NO: 4078005 - DNA, 25 bp, Homo sapien
ccgcggtctgtggagctgatcccag

SEQ ID NO: 4078006 - DNA, 25 bp, Homo sapien
catagctgtcatatgacaccccgtc

SEQ ID NO: 4078007 - DNA, 25 bp, Homo sapien
cctgcagaggggggggtcacggcca

SEQ ID NO: 4078008 - DNA, 25 bp, Homo sapien
gctgtcatatgacaccccgtcacgg

SEQ ID NO: 4078009 - DNA, 25 bp, Homo sapien
tagctgtcatatgacaccccgtcac

SEQ ID NO: 4078010 - DNA, 25 bp, Homo sapien
aggtccgagggtcccgccacatcct

SEQ ID NO: 4078011 - DNA, 25 bp, Homo sapien
agcccctctgcgctcatgttcctgg

SEQ ID NO: 4078012 - DNA, 25 bp, Homo sapien
cctgagacacgctgtgcagagagga

SEQ ID NO: 4078013 - DNA, 25 bp, Homo sapien
catgccactggcagaccaaacccag

SEQ ID NO: 4078014 - DNA, 25 bp, Homo sapien
cttgatgacccggccccggaagagg

SEQ ID NO: 4078015 - DNA, 25 bp, Homo sapien
tggtccagctccacggcggcctgca

SEQ ID NO: 4078016 - DNA, 25 bp, Homo sapien
cggcggcctgcacggagcccttggt

SEQ ID NO: 4078017 - DNA, 25 bp, Homo sapien
gccccggaagaggctctggtccagc

SEQ ID NO: 4078018 - DNA, 25 bp, Homo sapien
aggatcgtgactcggtggacctccc

SEQ ID NO: 4078019 - DNA, 25 bp, Homo sapien
cacacaggatcgtgactcggtggac

SEQ ID NO: 4078020 - DNA, 25 bp, Homo sapien
cagagaacttgtcacacaggatcgt

SEQ ID NO: 4078021 - DNA, 25 bp, Homo sapien
agagaacttgtcacacaggatcgtg

SEQ ID NO: 4078022 - DNA, 25 bp, Homo sapien
tgcccacgtagacggatctgtggtc

SEQ ID NO: 4078023 - DNA, 25 bp, Homo sapien
cccacgtagacggatctgtggtcag

SEQ ID NO: 4078024 - DNA, 25 bp, Homo sapien
cacgtagacggatctgtggtcagcc

SEQ ID NO: 4078025 - DNA, 25 bp, Homo sapien
gttgcccacgtagacggatctgtgg

SEQ ID NO: 4078026 - DNA, 25 bp, Homo sapien
tcgggggtcccagagagggggcagc

SEQ ID NO: 4078027 - DNA, 25 bp, Homo sapien
ctcgggggtcccagagagggggcag

SEQ ID NO: 4078028 - DNA, 25 bp, Homo sapien
tgttgctgcactcctggaggccgtg

SEQ ID NO: 4078029 - DNA, 25 bp, Homo sapien
ctgttgctgcactcctggaggccgt

SEQ ID NO: 4078030 - DNA, 25 bp, Homo sapien
caatgggcactcagccaggttctct

SEQ ID NO: 4078031 - DNA, 25 bp, Homo sapien
ggcaatgggcactcagccaggttct

SEQ ID NO: 4078032 - DNA, 25 bp, Homo sapien
tcaggcaatgggcactcagccaggt

SEQ ID NO: 4078033 - DNA, 25 bp, Homo sapien
ggcactcagccaggttctcttgctc

SEQ ID NO: 4078034 - DNA, 25 bp, Homo sapien
tgctcccactagagcatttgcaaag

SEQ ID NO: 4078035 - DNA, 25 bp, Homo sapien
tgtcactcggacaggtacctccagg

SEQ ID NO: 4078036 - DNA, 25 bp, Homo sapien
cgccccttccctgtcactcggacag

SEQ ID NO: 4078037 - DNA, 25 bp, Homo sapien
ctggagttttaagccctcccctgag

SEQ ID NO: 4078038 - DNA, 25 bp, Homo sapien
cagtgttgatgacttggccagctct

SEQ ID NO: 4078039 - DNA, 25 bp, Homo sapien
ctgctgtccgtccagtgttgatgac

SEQ ID NO: 4078040 - DNA, 25 bp, Homo sapien
tgtgcgtggtccctggacgctgttc

SEQ ID NO: 4078041 - DNA, 25 bp, Homo sapien
aacacggtgccactgtttccgggag

SEQ ID NO: 4078042 - DNA, 25 bp, Homo sapien
gtcttcctctccggccagcacgctc

SEQ ID NO: 4078043 - DNA, 25 bp, Homo sapien
tgtcttcctctccggccagcacgct

SEQ ID NO: 4078044 - DNA, 25 bp, Homo sapien
tggccagatcgatgcagccagctgg

SEQ ID NO: 4078045 - DNA, 25 bp, Homo sapien
gccagatcgatgcagccagctggtg

SEQ ID NO: 4078046 - DNA, 25 bp, Homo sapien
tgctggccagatcgatgcagccagc

SEQ ID NO: 4078047 - DNA, 25 bp, Homo sapien
ggccagatcgatgcagccagctggt

SEQ ID NO: 4078048 - DNA, 25 bp, Homo sapien
gtgggcacgggcgtgtccgctgctg

SEQ ID NO: 4078049 - DNA, 25 bp, Homo sapien
gaggcaagtccccttcgtgggcacg

SEQ ID NO: 4078050 - DNA, 25 bp, Homo sapien
tcccaggacgtctacctccgaggga

SEQ ID NO: 4078051 - DNA, 25 bp, Homo sapien
ctccgagggaggcaagtccccttcg

SEQ ID NO: 4078052 - DNA, 25 bp, Homo sapien
aagaaccaccagcaggcaaaccgct

SEQ ID NO: 4078053 - DNA, 25 bp, Homo sapien
cgacaggatccatccttatgatgct

SEQ ID NO: 4078054 - DNA, 25 bp, Homo sapien
ctgaccggtggtgacccgacaggat

SEQ ID NO: 4078055 - DNA, 25 bp, Homo sapien
cctcggggccactgttcggatttct

SEQ ID NO: 4078056 - DNA, 25 bp, Homo sapien
tatacattcacattaacgtacacgc

SEQ ID NO: 4078057 - DNA, 25 bp, Homo sapien
acatctcgtttattaccatcatgaa

SEQ ID NO: 4078058 - DNA, 25 bp, Homo sapien
gaatatcatttggacctctgcaaag

SEQ ID NO: 4078059 - DNA, 25 bp, Homo sapien
ggacctctgcaaagactatatacat

SEQ ID NO: 4078060 - DNA, 25 bp, Homo sapien
tgcactgagttcctagaactcctga

SEQ ID NO: 4078061 - DNA, 25 bp, Homo sapien
actcctgatagccacgcacacagat

SEQ ID NO: 4078062 - DNA, 25 bp, Homo sapien
ctgttcgtggctggttcagtagctg

SEQ ID NO: 4078063 - DNA, 25 bp, Homo sapien
tgggtcactcccgtattgcactgag

SEQ ID NO: 4078064 - DNA, 25 bp, Homo sapien
cctacacatatggagacgcaggccg

SEQ ID NO: 4078065 - DNA, 25 bp, Homo sapien
tctccgcgcggaatcattaggtagc

SEQ ID NO: 4078066 - DNA, 25 bp, Homo sapien
gctggctccgcatgctcgaaaagca

SEQ ID NO: 4078067 - DNA, 25 bp, Homo sapien
aaaagtcgcttctaactgggcacaa

SEQ ID NO: 4078068 - DNA, 25 bp, Homo sapien
cagcggggcacggtgtccagtgggc

SEQ ID NO: 4078069 - DNA, 25 bp, Homo sapien
agaaggccccgcagagccggcttcg

SEQ ID NO: 4078070 - DNA, 25 bp, Homo sapien
gagccggggcgagaaggccccgcag

SEQ ID NO: 4078071 - DNA, 25 bp, Homo sapien
ggcacggtgtccagtgggccaggtg

SEQ ID NO: 4078072 - DNA, 25 bp, Homo sapien
tgtgggcggcttcgggcggtccagg

SEQ ID NO: 4078073 - DNA, 25 bp, Homo sapien
gctgtgggcggcttcgggcggtcca

SEQ ID NO: 4078074 - DNA, 25 bp, Homo sapien
caggctgtgggcggcttcgggcggt

SEQ ID NO: 4078075 - DNA, 25 bp, Homo sapien
ggctgtgggcggcttcgggcggtcc

SEQ ID NO: 4078076 - DNA, 25 bp, Homo sapien
agcgtgccgcgttgcagccgctgca

SEQ ID NO: 4078077 - DNA, 25 bp, Homo sapien
agccgctgcacgtctcactggcttt

SEQ ID NO: 4078078 - DNA, 25 bp, Homo sapien
cagaaggacccgcagtagcgtgccg

SEQ ID NO: 4078079 - DNA, 25 bp, Homo sapien
ttctcccagtcccgatgctggcaga

SEQ ID NO: 4078080 - DNA, 25 bp, Homo sapien
catcttggcacgctccgtggtgatg

SEQ ID NO: 4078081 - DNA, 25 bp, Homo sapien
acggctttctgcagctccgacatgg

SEQ ID NO: 4078082 - DNA, 25 bp, Homo sapien
agtcctcctgctggttgatgaccgt

SEQ ID NO: 4078083 - DNA, 25 bp, Homo sapien
tgatgagctcgtgcgctttgcgctc

SEQ ID NO: 4078084 - DNA, 25 bp, Homo sapien
atctgcattcctaacgcgagccggg

SEQ ID NO: 4078085 - DNA, 25 bp, Homo sapien
tcacgtggtgtcacaagtcaaagct

SEQ ID NO: 4078086 - DNA, 25 bp, Homo sapien
tctctggacttcctacgcgtggcca

SEQ ID NO: 4078087 - DNA, 25 bp, Homo sapien
tgaagcacttggataactctgccgt

SEQ ID NO: 4078088 - DNA, 25 bp, Homo sapien
cagccttcctccagatgtcctcagg

SEQ ID NO: 4078089 - DNA, 25 bp, Homo sapien
agccttcctccagatgtcctcaggc

SEQ ID NO: 4078090 - DNA, 25 bp, Homo sapien
agatgtcctcaggcacgtagccggt

SEQ ID NO: 4078091 - DNA, 25 bp, Homo sapien
ctcaggcacgtagccggtgagggtc

SEQ ID NO: 4078092 - DNA, 25 bp, Homo sapien
ctcggcaggaactcgcgaggcacgt

SEQ ID NO: 4078093 - DNA, 25 bp, Homo sapien
gggccggcgtcacacaggatgggcc

SEQ ID NO: 4078094 - DNA, 25 bp, Homo sapien
gtcacacaggatgggccacgcggct

SEQ ID NO: 4078095 - DNA, 25 bp, Homo sapien
ctgaaacaggggccggcgtcacaca

SEQ ID NO: 4078096 - DNA, 25 bp, Homo sapien
cggcgtcacacaggatgggccacgc

SEQ ID NO: 4078097 - DNA, 25 bp, Homo sapien
aggtgccctcggacaaggtctggct

SEQ ID NO: 4078098 - DNA, 25 bp, Homo sapien
tgcagggcgtgagtgtgtgcgtccc

SEQ ID NO: 4078099 - DNA, 25 bp, Homo sapien
cacggggggcattggagctgtggac

SEQ ID NO: 4078100 - DNA, 25 bp, Homo sapien
gagtgcagggcgtgagtgtgtgcgt

SEQ ID NO: 4078101 - DNA, 25 bp, Homo sapien
tgtcagcattcgtcgctgaggcgga

SEQ ID NO: 4078102 - DNA, 25 bp, Homo sapien
gcctctcctgtgtcagcattcgtcg

SEQ ID NO: 4078103 - DNA, 25 bp, Homo sapien
tcctgtgtcagcattcgtcgctgag

SEQ ID NO: 4078104 - DNA, 25 bp, Homo sapien
tgggcctctcctgtgtcagcattcg

SEQ ID NO: 4078105 - DNA, 25 bp, Homo sapien
ccttctttgtgtcctcggcgtcgct

SEQ ID NO: 4078106 - DNA, 25 bp, Homo sapien
tggttgagctcctcgcggtcggcct

SEQ ID NO: 4078107 - DNA, 25 bp, Homo sapien
gctgaggcccttcgggaccggcgga

SEQ ID NO: 4078108 - DNA, 25 bp, Homo sapien
tagcgccgcgcccagtggttgagct

SEQ ID NO: 4078109 - DNA, 25 bp, Homo sapien
ctgcgcagcaccgtgagcgagcgcc

SEQ ID NO: 4078110 - DNA, 25 bp, Homo sapien
tgcgcagcaccgtgagcgagcgccg

SEQ ID NO: 4078111 - DNA, 25 bp, Homo sapien
tggtcgatcacttcttcctgccggg

SEQ ID NO: 4078112 - DNA, 25 bp, Homo sapien
tcttctgcccactcacgctctgtga

SEQ ID NO: 4078113 - DNA, 25 bp, Homo sapien
ctctgtgagcttgtggtcgatcact

SEQ ID NO: 4078114 - DNA, 25 bp, Homo sapien
gcttgtggtcgatcacttcttcctg

SEQ ID NO: 4078115 - DNA, 25 bp, Homo sapien
gtctgggtggcggtaggcatctcgg

SEQ ID NO: 4078116 - DNA, 25 bp, Homo sapien
taggcatctcggaagtggtgggcca

SEQ ID NO: 4078117 - DNA, 25 bp, Homo sapien
ctatgtcctccaggcggtagtgcgg

SEQ ID NO: 4078118 - DNA, 25 bp, Homo sapien
caagcggccgatggcgctctcgtag

SEQ ID NO: 4078119 - DNA, 25 bp, Homo sapien
ggtgcatggccgtttgctgaggtgc

SEQ ID NO: 4078120 - DNA, 25 bp, Homo sapien
ttcagggtgcatggccgtttgctga

SEQ ID NO: 4078121 - DNA, 25 bp, Homo sapien
cagggtgcatggccgtttgctgagg

SEQ ID NO: 4078122 - DNA, 25 bp, Homo sapien
gggtgcatggccgtttgctgaggtg

SEQ ID NO: 4078123 - DNA, 25 bp, Homo sapien
cgggtcgcggtctgacccgttctct

SEQ ID NO: 4078124 - DNA, 25 bp, Homo sapien
cagcgggtcgcggtctgacccgttc

SEQ ID NO: 4078125 - DNA, 25 bp, Homo sapien
ggtgcagcgggtcgcggtctgaccc

SEQ ID NO: 4078126 - DNA, 25 bp, Homo sapien
gggtgcagcgggtcgcggtctgacc

SEQ ID NO: 4078127 - DNA, 25 bp, Homo sapien
gcacaagagcgtctggggcagcaga

SEQ ID NO: 4078128 - DNA, 25 bp, Homo sapien
tggggcctggtggtcaaagagccgg

SEQ ID NO: 4078129 - DNA, 25 bp, Homo sapien
ctcgctgctctgggaacgaggagag

SEQ ID NO: 4078130 - DNA, 25 bp, Homo sapien
cttccgtaactggagaccacctgcc

SEQ ID NO: 4078131 - DNA, 25 bp, Homo sapien
ggtgagccgcgtgtccacggcaccc

SEQ ID NO: 4078132 - DNA, 25 bp, Homo sapien
gggagcagggtgagccgcgtgtcca

SEQ ID NO: 4078133 - DNA, 25 bp, Homo sapien
cacccccagcccagatccccggagc

SEQ ID NO: 4078134 - DNA, 25 bp, Homo sapien
agggtgagccgcgtgtccacggcac

SEQ ID NO: 4078135 - DNA, 25 bp, Homo sapien
tgacttccagtagcagctctgagga

SEQ ID NO: 4078136 - DNA, 25 bp, Homo sapien
tcctcttgccgttctcgttgacttc

SEQ ID NO: 4078137 - DNA, 25 bp, Homo sapien
tcgttgacttccagtagcagctctg

SEQ ID NO: 4078138 - DNA, 25 bp, Homo sapien
ctcctcttgccgttctcgttgactt

SEQ ID NO: 4078139 - DNA, 25 bp, Homo sapien
agtactgggcgggcgtctgcttggc

SEQ ID NO: 4078140 - DNA, 25 bp, Homo sapien
actgggcgggcgtctgcttggccag

SEQ ID NO: 4078141 - DNA, 25 bp, Homo sapien
caagtactgggcgggcgtctgcttg

SEQ ID NO: 4078142 - DNA, 25 bp, Homo sapien
tgcttggccaggcgtgcacagtgca

SEQ ID NO: 4078143 - DNA, 25 bp, Homo sapien
agctccctcccatggcgtggtctgg

SEQ ID NO: 4078144 - DNA, 25 bp, Homo sapien
agatcatggttggtcttcccgcctg

SEQ ID NO: 4078145 - DNA, 25 bp, Homo sapien
atcatggttggtcttcccgcctgca

SEQ ID NO: 4078146 - DNA, 25 bp, Homo sapien
tggtctggagaaggcgagaggacga

SEQ ID NO: 4078147 - DNA, 25 bp, Homo sapien
tacgggatccgtatgcagaccctgc

SEQ ID NO: 4078148 - DNA, 25 bp, Homo sapien
gcaagccgggctcctcgggtgcctt

SEQ ID NO: 4078149 - DNA, 25 bp, Homo sapien
tgtgcgggtaaagactccgcagcat

SEQ ID NO: 4078150 - DNA, 25 bp, Homo sapien
agaccctgcctttgacgcctgtgtg

SEQ ID NO: 4078151 - DNA, 25 bp, Homo sapien
gccagcggttctaagcatttgtaaa

SEQ ID NO: 4078152 - DNA, 25 bp, Homo sapien
acttgggagagccagcggttctaag

SEQ ID NO: 4078153 - DNA, 25 bp, Homo sapien
atgcgtttcaaagctgccacgccgc

SEQ ID NO: 4078154 - DNA, 25 bp, Homo sapien
ccccaactttctcatgcgtttcaaa

SEQ ID NO: 4078155 - DNA, 25 bp, Homo sapien
ctgttgaggacatcaggagcatgag

SEQ ID NO: 4078156 - DNA, 25 bp, Homo sapien
gcttggaatgaaactcctcgatcgt

SEQ ID NO: 4078157 - DNA, 25 bp, Homo sapien
aagggaatgacaaacggccgcagag

SEQ ID NO: 4078158 - DNA, 25 bp, Homo sapien
gaaactcctcgatcgtcaatgtcga

SEQ ID NO: 4078159 - DNA, 25 bp, Homo sapien
ctcctgaagcttggaatgaaactcc

SEQ ID NO: 4078160 - DNA, 25 bp, Homo sapien
ggagatgtcgctgccaaactgctgc

SEQ ID NO: 4078161 - DNA, 25 bp, Homo sapien
aggctgtggacgaggtggccgggcc

SEQ ID NO: 4078162 - DNA, 25 bp, Homo sapien
cggtgcaccattgatggctgttggt

SEQ ID NO: 4078163 - DNA, 25 bp, Homo sapien
tggccgggccattgctgaagccgtt

SEQ ID NO: 4078164 - DNA, 25 bp, Homo sapien
acaacccagacggcggcgacagtga

SEQ ID NO: 4078165 - DNA, 25 bp, Homo sapien
aggagggaagcggacatgaggacac

SEQ ID NO: 4078166 - DNA, 25 bp, Homo sapien
agggaagcggacatgaggacacaaa

SEQ ID NO: 4078167 - DNA, 25 bp, Homo sapien
acggcggcgacagtgagggaagcag

SEQ ID NO: 4078168 - DNA, 25 bp, Homo sapien
atgatgagacacaaggacagtagcg

SEQ ID NO: 4078169 - DNA, 25 bp, Homo sapien
aaagtgacggcaacaatgatgagac

SEQ ID NO: 4078170 - DNA, 25 bp, Homo sapien
aatgtcaaaagtgacggcaacaatg

SEQ ID NO: 4078171 - DNA, 25 bp, Homo sapien
aacaatgatgagacacaaggacagt

SEQ ID NO: 4078172 - DNA, 25 bp, Homo sapien
cttctccacacgtcgggggcttgat

SEQ ID NO: 4078173 - DNA, 25 bp, Homo sapien
ttctccacacgtcgggggcttgatg

SEQ ID NO: 4078174 - DNA, 25 bp, Homo sapien
gcttctccacacgtcgggggcttga

SEQ ID NO: 4078175 - DNA, 25 bp, Homo sapien
ggcttctccacacgtcgggggcttg

SEQ ID NO: 4078176 - DNA, 25 bp, Homo sapien
aacagctgatgagcgcgctgcaggg

SEQ ID NO: 4078177 - DNA, 25 bp, Homo sapien
tgttggccactgagacgtgactgcc

SEQ ID NO: 4078178 - DNA, 25 bp, Homo sapien
actgagacgtgactgcctggctggc

SEQ ID NO: 4078179 - DNA, 25 bp, Homo sapien
gcaggtgacataaggaacagctgat

SEQ ID NO: 4078180 - DNA, 25 bp, Homo sapien
tcagggccgaattcctccgaggccc

SEQ ID NO: 4078181 - DNA, 25 bp, Homo sapien
cagccgtgtgttcgcacctgtggct

SEQ ID NO: 4078182 - DNA, 25 bp, Homo sapien
acctgtggctgagacctggcggggc

SEQ ID NO: 4078183 - DNA, 25 bp, Homo sapien
gaggccccagccgtgtgttcgcacc

SEQ ID NO: 4078184 - DNA, 25 bp, Homo sapien
cgcggcaccgataacggcgtcgtat

SEQ ID NO: 4078185 - DNA, 25 bp, Homo sapien
cgcgctgccgagtttccctctcaat

SEQ ID NO: 4078186 - DNA, 25 bp, Homo sapien
gacagtggacgctgacacaggatgc

SEQ ID NO: 4078187 - DNA, 25 bp, Homo sapien
agcccctggtctctcgccttctgag

SEQ ID NO: 4078188 - DNA, 25 bp, Homo sapien
tggccaggcccatcacagaataatg

SEQ ID NO: 4078189 - DNA, 25 bp, Homo sapien
gagctgcacgccaggcgcgagtgcg

SEQ ID NO: 4078190 - DNA, 25 bp, Homo sapien
tccgggatctgggattcaccaactt

SEQ ID NO: 4078191 - DNA, 25 bp, Homo sapien
gatcacagagtggatgacaagagcc

SEQ ID NO: 4078192 - DNA, 25 bp, Homo sapien
aagcagccatgaaaacggccgtggg

SEQ ID NO: 4078193 - DNA, 25 bp, Homo sapien
gggcagcgtcgcaggcccgtcctct

SEQ ID NO: 4078194 - DNA, 25 bp, Homo sapien
gacagaccatagaccattttaagca

SEQ ID NO: 4078195 - DNA, 25 bp, Homo sapien
ggccgtggggcagcgtcgcaggccc

SEQ ID NO: 4078196 - DNA, 25 bp, Homo sapien
ggggctgcgtcttcacctccgctgg

SEQ ID NO: 4078197 - DNA, 25 bp, Homo sapien
tcacctccgctggggagtccggcat

SEQ ID NO: 4078198 - DNA, 25 bp, Homo sapien
gggtgtggaccggggctgcgtcttc

SEQ ID NO: 4078199 - DNA, 25 bp, Homo sapien
tggaccggggctgcgtcttcacctc

SEQ ID NO: 4078200 - DNA, 25 bp, Homo sapien
tgtgggggccatcaacaccgcctgg

SEQ ID NO: 4078201 - DNA, 25 bp, Homo sapien
gggccatcaacaccgcctggctgca

SEQ ID NO: 4078202 - DNA, 25 bp, Homo sapien
catcaacaccgcctggctgcagggc

SEQ ID NO: 4078203 - DNA, 25 bp, Homo sapien
gccacccgcctgtccggaggctgat

SEQ ID NO: 4078204 - DNA, 25 bp, Homo sapien
acggctgcgaaccacacaggaagag

SEQ ID NO: 4078205 - DNA, 25 bp, Homo sapien
gtgggctaccagcccacggctgcga

SEQ ID NO: 4078206 - DNA, 25 bp, Homo sapien
cagacccacttcgaggctcggaggc

SEQ ID NO: 4078207 - DNA, 25 bp, Homo sapien
gacacacggaggtgaataagtcatc

SEQ ID NO: 4078208 - DNA, 25 bp, Homo sapien
gagccagtgggaaagagcctgcaat

SEQ ID NO: 4078209 - DNA, 25 bp, Homo sapien
tgccggggccgctcatccatcactt

SEQ ID NO: 4078210 - DNA, 25 bp, Homo sapien
ccagtgggaaagagcctgcaatgtg

SEQ ID NO: 4078211 - DNA, 25 bp, Homo sapien
gaggaagccgctttgcaggttgggc

SEQ ID NO: 4078212 - DNA, 25 bp, Homo sapien
ttctacagcaccctgccggttgagc

SEQ ID NO: 4078213 - DNA, 25 bp, Homo sapien
agcaccctgccggttgagcaaagcc

SEQ ID NO: 4078214 - DNA, 25 bp, Homo sapien
tgccctgcaccctgtggacagtgcc

SEQ ID NO: 4078215 - DNA, 25 bp, Homo sapien
tgccggttgagcaaagcctggaaag

SEQ ID NO: 4078216 - DNA, 25 bp, Homo sapien
cacgtgcagtctggtgcatgtttac

SEQ ID NO: 4078217 - DNA, 25 bp, Homo sapien
cagttacttctgagcacgtgcagtc

SEQ ID NO: 4078218 - DNA, 25 bp, Homo sapien
ggcgggaccccagttacttctgagc

SEQ ID NO: 4078219 - DNA, 25 bp, Homo sapien
ttctgagcacgtgcagtctggtgca

SEQ ID NO: 4078220 - DNA, 25 bp, Homo sapien
gcaccaaaagtgcaggtggacaagg

SEQ ID NO: 4078221 - DNA, 25 bp, Homo sapien
taattcaaactccaacggccacagg

SEQ ID NO: 4078222 - DNA, 25 bp, Homo sapien
atggtgacggagtggcaggaggccc

SEQ ID NO: 4078223 - DNA, 25 bp, Homo sapien
acggccacaggtggtgcatggtgac

SEQ ID NO: 4078224 - DNA, 25 bp, Homo sapien
tggggaacgaggctctcgggggcga

SEQ ID NO: 4078225 - DNA, 25 bp, Homo sapien
gcagctctcggtgctgtgtcgtggg

SEQ ID NO: 4078226 - DNA, 25 bp, Homo sapien
tggagacgggtccagcaatgggcag

SEQ ID NO: 4078227 - DNA, 25 bp, Homo sapien
tggccttggagacgggtccagcaat

SEQ ID NO: 4078228 - DNA, 25 bp, Homo sapien
ctgggatcctgtggtttcggggacg

SEQ ID NO: 4078229 - DNA, 25 bp, Homo sapien
gggtggtttgttcggcagcactggg

SEQ ID NO: 4078230 - DNA, 25 bp, Homo sapien
gatcctgtggtttcggggacgctcc

SEQ ID NO: 4078231 - DNA, 25 bp, Homo sapien
gggcagcttcttgcccggcgtgtgg

SEQ ID NO: 4078232 - DNA, 25 bp, Homo sapien
ccggcacaccatcgcctgtgagagg

SEQ ID NO: 4078233 - DNA, 25 bp, Homo sapien
tgtgagaggcgtggtgagggctgct

SEQ ID NO: 4078234 - DNA, 25 bp, Homo sapien
gggccggcacaccatcgcctgtgag

SEQ ID NO: 4078235 - DNA, 25 bp, Homo sapien
caccatcgcctgtgagaggcgtggt

SEQ ID NO: 4078236 - DNA, 25 bp, Homo sapien
cacagctgcatggtccacgtaaaag

SEQ ID NO: 4078237 - DNA, 25 bp, Homo sapien
aaaactaccaatacccacagctgcg

SEQ ID NO: 4078238 - DNA, 25 bp, Homo sapien
gctgcatggtccacgcaaaagctac

SEQ ID NO: 4078239 - DNA, 25 bp, Homo sapien
tgcatggtccacgtaaaagctacca

SEQ ID NO: 4078240 - DNA, 25 bp, Homo sapien
ttcatgtgccaaggacgagccagag

SEQ ID NO: 4078241 - DNA, 25 bp, Homo sapien
ctgtggcaagtgacaagtgaccttt

SEQ ID NO: 4078242 - DNA, 25 bp, Homo sapien
tgggccggccccgtggatgagccag

SEQ ID NO: 4078243 - DNA, 25 bp, Homo sapien
aggtctcctcggcagaagccccttc

SEQ ID NO: 4078244 - DNA, 25 bp, Homo sapien
ggacggcgcacactcgcgactcggt

SEQ ID NO: 4078245 - DNA, 25 bp, Homo sapien
accccgcgcgggaacaaagcgcgca

SEQ ID NO: 4078246 - DNA, 25 bp, Homo sapien
tcggtccgggagtcgctgctccttc

SEQ ID NO: 4078247 - DNA, 25 bp, Homo sapien
gcgctgtcttctggcgccgcaccgg

SEQ ID NO: 4078248 - DNA, 25 bp, Homo sapien
ggcgctgaccctgcacggcttctga

SEQ ID NO: 4078249 - DNA, 25 bp, Homo sapien
ctgtgccccgaaccctggagatgag

SEQ ID NO: 4078250 - DNA, 25 bp, Homo sapien
tgagcaccgacatgaattcccaggt

SEQ ID NO: 4078251 - DNA, 25 bp, Homo sapien
cgtctgtgccccgaaccctggagat

SEQ ID NO: 4078252 - DNA, 25 bp, Homo sapien
taaaatgggaccagaccgtatgcgg

SEQ ID NO: 4078253 - DNA, 25 bp, Homo sapien
cgctgcagtgcgcatcaggaataga

SEQ ID NO: 4078254 - DNA, 25 bp, Homo sapien
tcatcaacctcgcagtgaatcccgg

SEQ ID NO: 4078255 - DNA, 25 bp, Homo sapien
gaatagattttagcggcgtcatgcc

SEQ ID NO: 4078256 - DNA, 25 bp, Homo sapien
ttccagattgttctgcaaacacggc

SEQ ID NO: 4078257 - DNA, 25 bp, Homo sapien
tgggccgatcggcttaaaggaatcc

SEQ ID NO: 4078258 - DNA, 25 bp, Homo sapien
gaatccatatgtgggtcttcacctt

SEQ ID NO: 4078259 - DNA, 25 bp, Homo sapien
tgcaaacacggcttggggtcagctg

SEQ ID NO: 4078260 - DNA, 25 bp, Homo sapien
tatctgacaaacatcagtctgggca

SEQ ID NO: 4078261 - DNA, 25 bp, Homo sapien
gaaaacctctctagtggctcctggg

SEQ ID NO: 4078262 - DNA, 25 bp, Homo sapien
tagaaggatacttggtgcgcagcgc

SEQ ID NO: 4078263 - DNA, 25 bp, Homo sapien
caccattgccaagggtcctgtgtcc

SEQ ID NO: 4078264 - DNA, 25 bp, Homo sapien
aggtggatcccgaggctgaactggc

SEQ ID NO: 4078265 - DNA, 25 bp, Homo sapien
cccggggtgcggagcagccggcaga

SEQ ID NO: 4078266 - DNA, 25 bp, Homo sapien
ccagcacagggtgcgtctgggacat

SEQ ID NO: 4078267 - DNA, 25 bp, Homo sapien
ccggcagatgccaggaggccgctct

SEQ ID NO: 4078268 - DNA, 25 bp, Homo sapien
tctgtccctggaaagccgaggccct

SEQ ID NO: 4078269 - DNA, 25 bp, Homo sapien
tccctgcagcctgcgggtgaggcag

SEQ ID NO: 4078270 - DNA, 25 bp, Homo sapien
aggactgcctttcccgacctcctgc

SEQ ID NO: 4078271 - DNA, 25 bp, Homo sapien
tcctgcagccttgagggaaagagga

SEQ ID NO: 4078272 - DNA, 25 bp, Homo sapien
agtgcacagagtgaaggcgtcaccc

SEQ ID NO: 4078273 - DNA, 25 bp, Homo sapien
agtgccctcaccaaagaggccaagg

SEQ ID NO: 4078274 - DNA, 25 bp, Homo sapien
cagaacagtgaggactagatccccg

SEQ ID NO: 4078275 - DNA, 25 bp, Homo sapien
gcaaagacaatcaccgaggcaagtt

SEQ ID NO: 4078276 - DNA, 25 bp, Homo sapien
gaatgtgtaaagaccagcaggctga

SEQ ID NO: 4078277 - DNA, 25 bp, Homo sapien
caacctgataggtgtgcccttgcca

SEQ ID NO: 4078278 - DNA, 25 bp, Homo sapien
tagtgatagagcctgaacttgaacc

SEQ ID NO: 4078279 - DNA, 25 bp, Homo sapien
caaaggagtggctcatccaagcata

SEQ ID NO: 4078280 - DNA, 25 bp, Homo sapien
gtgcacggccctgacgtctgaagga

SEQ ID NO: 4078281 - DNA, 25 bp, Homo sapien
cagaagctcagaacctatggccaaa

SEQ ID NO: 4078282 - DNA, 25 bp, Homo sapien
tagaagacataatgccagagcggcc

SEQ ID NO: 4078283 - DNA, 25 bp, Homo sapien
atgtcctcagaacccaggagtgccg

SEQ ID NO: 4078284 - DNA, 25 bp, Homo sapien
tccaggtagaggcatccagagcttc

SEQ ID NO: 4078285 - DNA, 25 bp, Homo sapien
caacggccacacagatggatgatgg

SEQ ID NO: 4078286 - DNA, 25 bp, Homo sapien
cctggagccgcccatgaggatgtaa

SEQ ID NO: 4078287 - DNA, 25 bp, Homo sapien
gatggtgttaagtactcatcagctg

SEQ ID NO: 4078288 - DNA, 25 bp, Homo sapien
gcagatcgtcccgaggcgtgcatct

SEQ ID NO: 4078289 - DNA, 25 bp, Homo sapien
cagggcagacgtttgtcagtgcggg

SEQ ID NO: 4078290 - DNA, 25 bp, Homo sapien
gacgtttgtcagtgcgggaatggca

SEQ ID NO: 4078291 - DNA, 25 bp, Homo sapien
tcccgaggcgtgcatctcgaagcca

SEQ ID NO: 4078292 - DNA, 25 bp, Homo sapien
gtgccagccgaagtcaacaggcagg

SEQ ID NO: 4078293 - DNA, 25 bp, Homo sapien
acaggcaggcgggtaaatgcgtccc

SEQ ID NO: 4078294 - DNA, 25 bp, Homo sapien
caggcgggtaaatgcgtcccagcgc

SEQ ID NO: 4078295 - DNA, 25 bp, Homo sapien
ccgaagtcaacaggcaggcgggtaa

SEQ ID NO: 4078296 - DNA, 25 bp, Homo sapien
ccccggaagcccctcagtgggtgag

SEQ ID NO: 4078297 - DNA, 25 bp, Homo sapien
cggaagcccctcagtgggtgaggtg

SEQ ID NO: 4078298 - DNA, 25 bp, Homo sapien
ctgttgctggaagcccagtgggcag

SEQ ID NO: 4078299 - DNA, 25 bp, Homo sapien
aagcccctcagtgggtgaggtgcct

SEQ ID NO: 4078300 - DNA, 25 bp, Homo sapien
ccccgtcatgaagtgttggccagag

SEQ ID NO: 4078301 - DNA, 25 bp, Homo sapien
tgttggccagagtcggactgaagcc

SEQ ID NO: 4078302 - DNA, 25 bp, Homo sapien
agtcggactgaagccgccacagcag

SEQ ID NO: 4078303 - DNA, 25 bp, Homo sapien
tcatgaagtgttggccagagtcgga

SEQ ID NO: 4078304 - DNA, 25 bp, Homo sapien
ggactggattggctgcccagagcat

SEQ ID NO: 4078305 - DNA, 25 bp, Homo sapien
atgtgctctaatcgcccctccagtg

SEQ ID NO: 4078306 - DNA, 25 bp, Homo sapien
tggctgcccagagcattgactggga

SEQ ID NO: 4078307 - DNA, 25 bp, Homo sapien
agcccctgcccatgtgctctaatcg

SEQ ID NO: 4078308 - DNA, 25 bp, Homo sapien
actcctgctaccacacgtttggcgt

SEQ ID NO: 4078309 - DNA, 25 bp, Homo sapien
cccatcgttccgcacaggctctgag

SEQ ID NO: 4078310 - DNA, 25 bp, Homo sapien
cacacgtttggcgtctgtcccatcg

SEQ ID NO: 4078311 - DNA, 25 bp, Homo sapien
gtttggcgtctgtcccatcgttccg

SEQ ID NO: 4078312 - DNA, 25 bp, Homo sapien
tggccagcgtctcgcggctgagtat

SEQ ID NO: 4078313 - DNA, 25 bp, Homo sapien
ggcttcgccgaacggaggaacctca

SEQ ID NO: 4078314 - DNA, 25 bp, Homo sapien
cggctgagtataggcacgcttcttt

SEQ ID NO: 4078315 - DNA, 25 bp, Homo sapien
cagccgctggcatacgtcggtggca

SEQ ID NO: 4078316 - DNA, 25 bp, Homo sapien
taccctcattagctgttggacctgc

SEQ ID NO: 4078317 - DNA, 25 bp, Homo sapien
cgtggttgtgaacagcgcaggaact

SEQ ID NO: 4078318 - DNA, 25 bp, Homo sapien
caaaaaacaaagtcacgccgtagcg

SEQ ID NO: 4078319 - DNA, 25 bp, Homo sapien
tgttcacccgtgatcagctccgtgg

SEQ ID NO: 4078320 - DNA, 25 bp, Homo sapien
cacctgattgctcctgcctgagttt

SEQ ID NO: 4078321 - DNA, 25 bp, Homo sapien
accatctagtcagaaatgtccccag

SEQ ID NO: 4078322 - DNA, 25 bp, Homo sapien
ccccagcagagagcagaacgtgagt

SEQ ID NO: 4078323 - DNA, 25 bp, Homo sapien
tccaggtgtcagtcagctgacactc

SEQ ID NO: 4078324 - DNA, 25 bp, Homo sapien
aaggcagagacatgaaatagcacca

SEQ ID NO: 4078325 - DNA, 25 bp, Homo sapien
tggcagccgactccgattccagaat

SEQ ID NO: 4078326 - DNA, 25 bp, Homo sapien
ttaatgaacacatcaggccgaggac

SEQ ID NO: 4078327 - DNA, 25 bp, Homo sapien
tcaaaagcagctcataaatccaggt

SEQ ID NO: 4078328 - DNA, 25 bp, Homo sapien
tcagtgccgtgcgtagctttggtgc

SEQ ID NO: 4078329 - DNA, 25 bp, Homo sapien
gacacaggcagctcaagagggtgcc

SEQ ID NO: 4078330 - DNA, 25 bp, Homo sapien
taacggtggtacatcctcagtgccg

SEQ ID NO: 4078331 - DNA, 25 bp, Homo sapien
catcagcctggtgtgtaacggtggt

SEQ ID NO: 4078332 - DNA, 25 bp, Homo sapien
gatatccagggaggaaattcacagt

SEQ ID NO: 4078333 - DNA, 25 bp, Homo sapien
aaaccaaaggtcatgagttttcagg

SEQ ID NO: 4078334 - DNA, 25 bp, Homo sapien
tgggagttccaacaagaagatatcc

SEQ ID NO: 4078335 - DNA, 25 bp, Homo sapien
tgagactgcagtgcttgtccattca

SEQ ID NO: 4078336 - DNA, 25 bp, Homo sapien
ggagctcgttgaccacaaactacag

SEQ ID NO: 4078337 - DNA, 25 bp, Homo sapien
tgaccagccggttgaccagaatacg

SEQ ID NO: 4078338 - DNA, 25 bp, Homo sapien
cagaatacggtgctccaaggacatg

SEQ ID NO: 4078339 - DNA, 25 bp, Homo sapien
caaactacagaaagcctggagctcg

SEQ ID NO: 4078340 - DNA, 25 bp, Homo sapien
tcaggtagctctcatcacaaggtcc

SEQ ID NO: 4078341 - DNA, 25 bp, Homo sapien
tctagagccttcctgagccagagca

SEQ ID NO: 4078342 - DNA, 25 bp, Homo sapien
caggttgggactcgctcaggtagct

SEQ ID NO: 4078343 - DNA, 25 bp, Homo sapien
ccttgtgcactgttgcggctgctct

SEQ ID NO: 4078344 - DNA, 25 bp, Homo sapien
taaacatccgtgactgcacctcatg

SEQ ID NO: 4078345 - DNA, 25 bp, Homo sapien
tccgtgactgcacctcatgatccat

SEQ ID NO: 4078346 - DNA, 25 bp, Homo sapien
ctcatgatccatcacgcacgacggc

SEQ ID NO: 4078347 - DNA, 25 bp, Homo sapien
tcactggaggataaacatccgtgac

SEQ ID NO: 4078348 - DNA, 25 bp, Homo sapien
ctccatgcagtacttacactgctgt

SEQ ID NO: 4078349 - DNA, 25 bp, Homo sapien
gtcgggccgcggctcctccatgcag

SEQ ID NO: 4078350 - DNA, 25 bp, Homo sapien
acgtggcgcgtgctgtgggcgtcgg

SEQ ID NO: 4078351 - DNA, 25 bp, Homo sapien
ggacgtggcgcgtgctgtgggcgtc

SEQ ID NO: 4078352 - DNA, 25 bp, Homo sapien
ggcacatcagctccctcaacaggga

SEQ ID NO: 4078353 - DNA, 25 bp, Homo sapien
cacagcagcggggacctgcgactgt

SEQ ID NO: 4078354 - DNA, 25 bp, Homo sapien
agggtacctccgtcctgctgagtgg

SEQ ID NO: 4078355 - DNA, 25 bp, Homo sapien
agggcacagggtacctccgtcctgc

SEQ ID NO: 4078356 - DNA, 25 bp, Homo sapien
cgcctgcatctatcgtgagaaagtt

SEQ ID NO: 4078357 - DNA, 25 bp, Homo sapien
acatccaagactgcaaggctcctgg

SEQ ID NO: 4078358 - DNA, 25 bp, Homo sapien
gatggtcctgcagccgaaaatgtac

SEQ ID NO: 4078359 - DNA, 25 bp, Homo sapien
tcgaccactgcctgcggtgttggga

SEQ ID NO: 4078360 - DNA, 25 bp, Homo sapien
cactagtcccgtgaggatgaaaacc

SEQ ID NO: 4078361 - DNA, 25 bp, Homo sapien
gggagggcgagcacttctacctcac

SEQ ID NO: 4078362 - DNA, 25 bp, Homo sapien
tcaagcaggccaagtgcacagatgc

SEQ ID NO: 4078363 - DNA, 25 bp, Homo sapien
agcagtgagcgctagggacagtcct

SEQ ID NO: 4078364 - DNA, 25 bp, Homo sapien
gaggaatgtgtctgccctggaccag

SEQ ID NO: 4078365 - DNA, 25 bp, Homo sapien
caccaggcaggactagtgctgctcg

SEQ ID NO: 4078366 - DNA, 25 bp, Homo sapien
tccacctgcactgagacacgggctt

SEQ ID NO: 4078367 - DNA, 25 bp, Homo sapien
aggcgaagacgacttgttgcaggaa

SEQ ID NO: 4078368 - DNA, 25 bp, Homo sapien
ggcagtgctttaccccgagtcctta

SEQ ID NO: 4078369 - DNA, 25 bp, Homo sapien
tccttactggatggaggaatcacag

SEQ ID NO: 4078370 - DNA, 25 bp, Homo sapien
cctaaggtttgctggctgaggataa

SEQ ID NO: 4078371 - DNA, 25 bp, Homo sapien
gatgctttccccgagaattctgcca

SEQ ID NO: 4078372 - DNA, 25 bp, Homo sapien
tggggaagacctcggccgcgaagag

SEQ ID NO: 4078373 - DNA, 25 bp, Homo sapien
tcaccgtggggaagacctcggccgc

SEQ ID NO: 4078374 - DNA, 25 bp, Homo sapien
atcaccgtggggaagacctcggccg

SEQ ID NO: 4078375 - DNA, 25 bp, Homo sapien
gaagacctcggccgcgaagaggctg

SEQ ID NO: 4078376 - DNA, 25 bp, Homo sapien
agagaggaacagcacagtccagcct

SEQ ID NO: 4078377 - DNA, 25 bp, Homo sapien
ccaggacagagaggaacagcacagt

SEQ ID NO: 4078378 - DNA, 25 bp, Homo sapien
ctgagtgcggacacagcccgggagg

SEQ ID NO: 4078379 - DNA, 25 bp, Homo sapien
aacagcacagtccagcctggcagat

SEQ ID NO: 4078380 - DNA, 25 bp, Homo sapien
cccaggctctctccccaggccttcc

SEQ ID NO: 4078381 - DNA, 25 bp, Homo sapien
tcccaggctctctccccaggccttc

SEQ ID NO: 4078382 - DNA, 25 bp, Homo sapien
aggctctctccccaggccttccacc

SEQ ID NO: 4078383 - DNA, 25 bp, Homo sapien
caaagaacaggggttcccaggctct

SEQ ID NO: 4078384 - DNA, 25 bp, Homo sapien
tgtcggcactatggccccctggtgt

SEQ ID NO: 4078385 - DNA, 25 bp, Homo sapien
ccttccacaaggatcagaggaaaac

SEQ ID NO: 4078386 - DNA, 25 bp, Homo sapien
aagatccttttgggccttccacaag

SEQ ID NO: 4078387 - DNA, 25 bp, Homo sapien
gtgtggcagaccgtcggcccaaaca

SEQ ID NO: 4078388 - DNA, 25 bp, Homo sapien
gctcctgtatggcctgcggggcccc

SEQ ID NO: 4078389 - DNA, 25 bp, Homo sapien
tggctcctgtatggcctgcggggcc

SEQ ID NO: 4078390 - DNA, 25 bp, Homo sapien
aatggctcctgtatggcctgcgggg

SEQ ID NO: 4078391 - DNA, 25 bp, Homo sapien
tcctgtatggcctgcggggccccaa

SEQ ID NO: 4078392 - DNA, 25 bp, Homo sapien
tgcggcggaagctagctctgatgcc

SEQ ID NO: 4078393 - DNA, 25 bp, Homo sapien
gatgccaggcctgtgaccatggtgc

SEQ ID NO: 4078394 - DNA, 25 bp, Homo sapien
agcaatctgccgtcaggagcaggaa

SEQ ID NO: 4078395 - DNA, 25 bp, Homo sapien
tagaaggtcggcacctgaggtgcca

SEQ ID NO: 4078396 - DNA, 25 bp, Homo sapien
ctccgtgcagacagcatggtcagct

SEQ ID NO: 4078397 - DNA, 25 bp, Homo sapien
gggctccgtgcagacagcatggtca

SEQ ID NO: 4078398 - DNA, 25 bp, Homo sapien
agcccaagataagcccgtttctcca

SEQ ID NO: 4078399 - DNA, 25 bp, Homo sapien
ccaggtgactcgggtacgcagaagc

SEQ ID NO: 4078400 - DNA, 25 bp, Homo sapien
tagccagggagttctcctccaagga

SEQ ID NO: 4078401 - DNA, 25 bp, Homo sapien
tggcttctgcaaagcgccacaggat

SEQ ID NO: 4078402 - DNA, 25 bp, Homo sapien
tgcaaagcgccacaggatcttcctg

SEQ ID NO: 4078403 - DNA, 25 bp, Homo sapien
tggctcgagctacctgacctgtggc

SEQ ID NO: 4078404 - DNA, 25 bp, Homo sapien
gtgcccaccaccgagaaaaggccag

SEQ ID NO: 4078405 - DNA, 25 bp, Homo sapien
gcccaccaccgagaaaaggccagcc

SEQ ID NO: 4078406 - DNA, 25 bp, Homo sapien
cactcatcagggcacccagcccctg

SEQ ID NO: 4078407 - DNA, 25 bp, Homo sapien
ccagtcctgcacaagcgcagccagg

SEQ ID NO: 4078408 - DNA, 25 bp, Homo sapien
caggagcgggatgcccaagggactc

SEQ ID NO: 4078409 - DNA, 25 bp, Homo sapien
cctattggtgacctgcccaggagcg

SEQ ID NO: 4078410 - DNA, 25 bp, Homo sapien
tggaacagttccattgggaactgcg

SEQ ID NO: 4078411 - DNA, 25 bp, Homo sapien
gaactgcggggacctattggtgacc

SEQ ID NO: 4078412 - DNA, 25 bp, Homo sapien
gagccagatacagggcgaggagggc

SEQ ID NO: 4078413 - DNA, 25 bp, Homo sapien
gggcccctgccaatgtgcccccgtg

SEQ ID NO: 4078414 - DNA, 25 bp, Homo sapien
aatgtgcccccgtggagtaggcgca

SEQ ID NO: 4078415 - DNA, 25 bp, Homo sapien
ccccgtggagtaggcgcaggaccag

SEQ ID NO: 4078416 - DNA, 25 bp, Homo sapien
tccacacacaaggttccactatggg

SEQ ID NO: 4078417 - DNA, 25 bp, Homo sapien
tgcagggagtcccagaatggctact

SEQ ID NO: 4078418 - DNA, 25 bp, Homo sapien
tgcttgtccctagatagggcctccc

SEQ ID NO: 4078419 - DNA, 25 bp, Homo sapien
gttttctgcttgtccctagataggg

SEQ ID NO: 4078420 - DNA, 25 bp, Homo sapien
gaggcggaggccagcaggcgccggg

SEQ ID NO: 4078421 - DNA, 25 bp, Homo sapien
tcagcacccgcgcctcctgctccat

SEQ ID NO: 4078422 - DNA, 25 bp, Homo sapien
cgggcccggccaaagccgcccgcag

SEQ ID NO: 4078423 - DNA, 25 bp, Homo sapien
aaagccgcccgcagctctcagcacc

SEQ ID NO: 4078424 - DNA, 25 bp, Homo sapien
gtttattaagaactcctataactca

SEQ ID NO: 4078425 - DNA, 25 bp, Homo sapien
tattaagaactcctataactcaaga

SEQ ID NO: 4078426 - DNA, 25 bp, Homo sapien
attaagaactcctataactcaagaa

SEQ ID NO: 4078427 - DNA, 25 bp, Homo sapien
ttattaagaactcctataactcaag

SEQ ID NO: 4078428 - DNA, 25 bp, Homo sapien
tgaatgaaccttgggagaacccctg

SEQ ID NO: 4078429 - DNA, 25 bp, Homo sapien
taaagactgcaagccgttgctgccc

SEQ ID NO: 4078430 - DNA, 25 bp, Homo sapien
tacttaaaacatatccgtgcggtgg

SEQ ID NO: 4078431 - DNA, 25 bp, Homo sapien
taaagttggaaccttgtgcacctgc

SEQ ID NO: 4078432 - DNA, 25 bp, Homo sapien
gccttcagctctactccaaatgttg

SEQ ID NO: 4078433 - DNA, 25 bp, Homo sapien
aatgttgtttcccagcaagcatgca

SEQ ID NO: 4078434 - DNA, 25 bp, Homo sapien
gagcagttttccgtgttgggtcagt

SEQ ID NO: 4078435 - DNA, 25 bp, Homo sapien
gcaagcatgcactcgggacagatct

SEQ ID NO: 4078436 - DNA, 25 bp, Homo sapien
tcacgttgaagacatgaaagacctc

SEQ ID NO: 4078437 - DNA, 25 bp, Homo sapien
tccagatgtccatgacttgaggaat

SEQ ID NO: 4078438 - DNA, 25 bp, Homo sapien
aagctgtcagctacactcattcacg

SEQ ID NO: 4078439 - DNA, 25 bp, Homo sapien
gaaagacctctcgttctccagatgt

SEQ ID NO: 4078440 - DNA, 25 bp, Homo sapien
acgggtgagagccctgagtgtcctt

SEQ ID NO: 4078441 - DNA, 25 bp, Homo sapien
gctgcgatccggcactgatgaggca

SEQ ID NO: 4078442 - DNA, 25 bp, Homo sapien
gcagctgctgtgatccggcattcat

SEQ ID NO: 4078443 - DNA, 25 bp, Homo sapien
ttcacagcatgcagagcggtcctgg

SEQ ID NO: 4078444 - DNA, 25 bp, Homo sapien
ggctagatcattcctaaagatggta

SEQ ID NO: 4078445 - DNA, 25 bp, Homo sapien
tgcgtatgcgaatccactcactgcc

SEQ ID NO: 4078446 - DNA, 25 bp, Homo sapien
gctagaccgtccctctcaggctaga

SEQ ID NO: 4078447 - DNA, 25 bp, Homo sapien
cacaccgtgtatgcaaatcaactcg

SEQ ID NO: 4078448 - DNA, 25 bp, Homo sapien
taaaagacagttagactggacatgg

SEQ ID NO: 4078449 - DNA, 25 bp, Homo sapien
cagcaatttgggagctcaagctggg

SEQ ID NO: 4078450 - DNA, 25 bp, Homo sapien
accaccttgcgcagctagagagtaa

SEQ ID NO: 4078451 - DNA, 25 bp, Homo sapien
gacagttagactggacatggtggct

SEQ ID NO: 4078452 - DNA, 25 bp, Homo sapien
ttttcctaaagagggcagagcactc

SEQ ID NO: 4078453 - DNA, 25 bp, Homo sapien
gattttcgctgtgagaacctggcag

SEQ ID NO: 4078454 - DNA, 25 bp, Homo sapien
tgctactgagaaagccggttgccca

SEQ ID NO: 4078455 - DNA, 25 bp, Homo sapien
cctgtctctgctagagccctgaggg

SEQ ID NO: 4078456 - DNA, 25 bp, Homo sapien
taaatgtagggtttctgtactgaag

SEQ ID NO: 4078457 - DNA, 25 bp, Homo sapien
tgtcagttgtcgtggctctaaccag

SEQ ID NO: 4078458 - DNA, 25 bp, Homo sapien
tggaaatgggcggtgaacttcccgc

SEQ ID NO: 4078459 - DNA, 25 bp, Homo sapien
gcttggcccacagttcaacttctca

SEQ ID NO: 4078460 - DNA, 25 bp, Homo sapien
cctctcgtcgttgctgttgggacgg

SEQ ID NO: 4078461 - DNA, 25 bp, Homo sapien
ccgaaagcgcattccgtcgtcaaaa

SEQ ID NO: 4078462 - DNA, 25 bp, Homo sapien
cgtcaaaatacaccacgaggtcccg

SEQ ID NO: 4078463 - DNA, 25 bp, Homo sapien
gttgggacgggctctcgtcgcccgc

SEQ ID NO: 4078464 - DNA, 25 bp, Homo sapien
tcaagctgtcccttaacatccagct

SEQ ID NO: 4078465 - DNA, 25 bp, Homo sapien
ccgtcaagctgtcccttaacatcca

SEQ ID NO: 4078466 - DNA, 25 bp, Homo sapien
gctgtcccttaacatccagctgctt

SEQ ID NO: 4078467 - DNA, 25 bp, Homo sapien
gtgggaccatggtggtttaggaaca

SEQ ID NO: 4078468 - DNA, 25 bp, Homo sapien
tccaggttttacaaaagccaccagc

SEQ ID NO: 4078469 - DNA, 25 bp, Homo sapien
ctcttctacagcagcaaaagccgcc

SEQ ID NO: 4078470 - DNA, 25 bp, Homo sapien
cttctacagcagcaaaagccgccat

SEQ ID NO: 4078471 - DNA, 25 bp, Homo sapien
caggttttacaaaagccaccagctt

SEQ ID NO: 4078472 - DNA, 25 bp, Homo sapien
cagttgctggagaaaagggcccgaa

SEQ ID NO: 4078473 - DNA, 25 bp, Homo sapien
gaaagaagatacaaaccacgcggat

SEQ ID NO: 4078474 - DNA, 25 bp, Homo sapien
tcactgtttgtgagaggtggacacc

SEQ ID NO: 4078475 - DNA, 25 bp, Homo sapien
tccatttcaatacggctgggagtcc

SEQ ID NO: 4078476 - DNA, 25 bp, Homo sapien
tcatgccggcaacaatacaaagtcg

SEQ ID NO: 4078477 - DNA, 25 bp, Homo sapien
catgccggcaacaatacaaagtcgt

SEQ ID NO: 4078478 - DNA, 25 bp, Homo sapien
gccggcaacaatacaaagtcgtcgt

SEQ ID NO: 4078479 - DNA, 25 bp, Homo sapien
tgccggcaacaatacaaagtcgtcg

SEQ ID NO: 4078480 - DNA, 25 bp, Homo sapien
tttagataccgtctcaaggctggag

SEQ ID NO: 4078481 - DNA, 25 bp, Homo sapien
ggtatgtcacaagcaaccgtgtaga

SEQ ID NO: 4078482 - DNA, 25 bp, Homo sapien
catctagttactacacgtggcggta

SEQ ID NO: 4078483 - DNA, 25 bp, Homo sapien
aatgggcctcatagcttttactcgg

SEQ ID NO: 4078484 - DNA, 25 bp, Homo sapien
gctgcagtatgacacacgggtgctt

SEQ ID NO: 4078485 - DNA, 25 bp, Homo sapien
ggtagggctggtggttctcatctgt

SEQ ID NO: 4078486 - DNA, 25 bp, Homo sapien
acacacgggtgcttggttcagggac

SEQ ID NO: 4078487 - DNA, 25 bp, Homo sapien
ctgagagctgcagtatgacacacgg

SEQ ID NO: 4078488 - DNA, 25 bp, Homo sapien
ggcgttgaaacggtcgcgcactgac

SEQ ID NO: 4078489 - DNA, 25 bp, Homo sapien
gcgggcgttgaaacggtcgcgcact

SEQ ID NO: 4078490 - DNA, 25 bp, Homo sapien
tggcgggcgttgaaacggtcgcgca

SEQ ID NO: 4078491 - DNA, 25 bp, Homo sapien
ctggcgggcgttgaaacggtcgcgc

SEQ ID NO: 4078492 - DNA, 25 bp, Homo sapien
atggtcctggccgcccggcagtgaa

SEQ ID NO: 4078493 - DNA, 25 bp, Homo sapien
gctcacaggatacgatcagcttctc

SEQ ID NO: 4078494 - DNA, 25 bp, Homo sapien
tctcctgctcacaggatacgatcag

SEQ ID NO: 4078495 - DNA, 25 bp, Homo sapien
ggttggcgatggtcctggccgcccg

SEQ ID NO: 4078496 - DNA, 25 bp, Homo sapien
gtgctgtagacgcagctttccccgg

SEQ ID NO: 4078497 - DNA, 25 bp, Homo sapien
tgctgtagacgcagctttccccgga

SEQ ID NO: 4078498 - DNA, 25 bp, Homo sapien
gctgtgctgtagacgcagctttccc

SEQ ID NO: 4078499 - DNA, 25 bp, Homo sapien
atgctgtgctgtagacgcagctttc

SEQ ID NO: 4078500 - DNA, 25 bp, Homo sapien
aatccccagaaggaaatggccgttg

SEQ ID NO: 4078501 - DNA, 25 bp, Homo sapien
tcatcgtgcaggtatggaggctcag

SEQ ID NO: 4078502 - DNA, 25 bp, Homo sapien
tattttgggcccagacgtagcgcaa

SEQ ID NO: 4078503 - DNA, 25 bp, Homo sapien
gattccgagatgtttcacctgagcc

SEQ ID NO: 4078504 - DNA, 25 bp, Homo sapien
gcggcttgccgtccaggaggtagga

SEQ ID NO: 4078505 - DNA, 25 bp, Homo sapien
gtcgctgtggtagggctcgatggca

SEQ ID NO: 4078506 - DNA, 25 bp, Homo sapien
gcggcgtgatacagcacaggatctt

SEQ ID NO: 4078507 - DNA, 25 bp, Homo sapien
ggcgcctgcggcgtgatacagcaca

SEQ ID NO: 4078508 - DNA, 25 bp, Homo sapien
cgctccccagtgggcgctgttctgg

SEQ ID NO: 4078509 - DNA, 25 bp, Homo sapien
cgggctccacgctggagtccggatc

SEQ ID NO: 4078510 - DNA, 25 bp, Homo sapien
cggctcctcagccactacggtggaa

SEQ ID NO: 4078511 - DNA, 25 bp, Homo sapien
cgcctccaccgcagcttctagagcc

SEQ ID NO: 4078512 - DNA, 25 bp, Homo sapien
tccacgggttccgcttcaccatctg

SEQ ID NO: 4078513 - DNA, 25 bp, Homo sapien
tcttccacgggttccgcttcaccat

SEQ ID NO: 4078514 - DNA, 25 bp, Homo sapien
acgggttccgcttcaccatctgcgg

SEQ ID NO: 4078515 - DNA, 25 bp, Homo sapien
cacgggttccgcttcaccatctgcg

SEQ ID NO: 4078516 - DNA, 25 bp, Homo sapien
tgaagccacggagaacctgtcgaaa

SEQ ID NO: 4078517 - DNA, 25 bp, Homo sapien
ttccgaaagcccacttgaagccacg

SEQ ID NO: 4078518 - DNA, 25 bp, Homo sapien
tgaagagcttgtctccgacgctgaa

SEQ ID NO: 4078519 - DNA, 25 bp, Homo sapien
ggagtagtaccctggcgacaagcag

SEQ ID NO: 4078520 - DNA, 25 bp, Homo sapien
cgaggtccgcgtagtcatcggcgct

SEQ ID NO: 4078521 - DNA, 25 bp, Homo sapien
tgcgagtcggcgcagtcgaacacga

SEQ ID NO: 4078522 - DNA, 25 bp, Homo sapien
cggcgcagtcgaacacgaggtccgc

SEQ ID NO: 4078523 - DNA, 25 bp, Homo sapien
acacgaggtccgcgtagtcatcggc

SEQ ID NO: 4078524 - DNA, 25 bp, Homo sapien
gaagctggtcatcatcaggtcgccg

SEQ ID NO: 4078525 - DNA, 25 bp, Homo sapien
gggacgcaggcaggacctctttcat

SEQ ID NO: 4078526 - DNA, 25 bp, Homo sapien
ccccggcggtttcttagcaggaatg

SEQ ID NO: 4078527 - DNA, 25 bp, Homo sapien
tgtagcttattttccgcggcaggtg

SEQ ID NO: 4078528 - DNA, 25 bp, Homo sapien
tgatgccgcaggagctcgtccctgt

SEQ ID NO: 4078529 - DNA, 25 bp, Homo sapien
gatgccgcagcagcccatccgcatg

SEQ ID NO: 4078530 - DNA, 25 bp, Homo sapien
tcttctcttttaggatgttgatggc

SEQ ID NO: 4078531 - DNA, 25 bp, Homo sapien
gttgatggcactagatccataaggc

SEQ ID NO: 4078532 - DNA, 25 bp, Homo sapien
taggatgttgatggcactagatcca

SEQ ID NO: 4078533 - DNA, 25 bp, Homo sapien
cttttaggatgttgatggcactaga

SEQ ID NO: 4078534 - DNA, 25 bp, Homo sapien
ccgtaagcatccgcctccaggaagt

SEQ ID NO: 4078535 - DNA, 25 bp, Homo sapien
gctcatcttctatgtcagctttcat

SEQ ID NO: 4078536 - DNA, 25 bp, Homo sapien
ttgtaagaaactccgtaagcatccg

SEQ ID NO: 4078537 - DNA, 25 bp, Homo sapien
ctcatcttctatgtcagctttcatg

SEQ ID NO: 4078538 - DNA, 25 bp, Homo sapien
tctttcttggctcgctctcggtcgt

SEQ ID NO: 4078539 - DNA, 25 bp, Homo sapien
tcggcttgtcgtctccaggtggctc

SEQ ID NO: 4078540 - DNA, 25 bp, Homo sapien
tccttgtaatcttcgcccttctctt

SEQ ID NO: 4078541 - DNA, 25 bp, Homo sapien
tctcggtcgtggctcttcttggatg

SEQ ID NO: 4078542 - DNA, 25 bp, Homo sapien
gaagatgtctgcgatgtaccagctt

SEQ ID NO: 4078543 - DNA, 25 bp, Homo sapien
ctgtgtctgtcggaggcataggcct

SEQ ID NO: 4078544 - DNA, 25 bp, Homo sapien
gaggagacctcgctgattttatcgt

SEQ ID NO: 4078545 - DNA, 25 bp, Homo sapien
tttccgcgtcggcacttctcgagga

SEQ ID NO: 4078546 - DNA, 25 bp, Homo sapien
tcgagagacgctttcctttctttgt

SEQ ID NO: 4078547 - DNA, 25 bp, Homo sapien
gtcgagagacgctttcctttctttg

SEQ ID NO: 4078548 - DNA, 25 bp, Homo sapien
cttggtcgagagacgctttcctttc

SEQ ID NO: 4078549 - DNA, 25 bp, Homo sapien
tggtcgagagacgctttcctttctt

SEQ ID NO: 4078550 - DNA, 25 bp, Homo sapien
ctttccttatcggggccatccttct

SEQ ID NO: 4078551 - DNA, 25 bp, Homo sapien
ttgaagccactctcgcagccacact

SEQ ID NO: 4078552 - DNA, 25 bp, Homo sapien
tcgtgctgggtggtgccgttcccac

SEQ ID NO: 4078553 - DNA, 25 bp, Homo sapien
agtcgccgtcggacttgtccttgaa

SEQ ID NO: 4078554 - DNA, 25 bp, Homo sapien
tcccggtgcgcctcctcgggcttgg

SEQ ID NO: 4078555 - DNA, 25 bp, Homo sapien
gccctcagaggagtagtcagactcg

SEQ ID NO: 4078556 - DNA, 25 bp, Homo sapien
gaacttgtcgctccgctttccgaag

SEQ ID NO: 4078557 - DNA, 25 bp, Homo sapien
aagtggtcgcgatcgtgctttaaca

SEQ ID NO: 4078558 - DNA, 25 bp, Homo sapien
agagtcgctcttcatgtccctgtag

SEQ ID NO: 4078559 - DNA, 25 bp, Homo sapien
gcattagaaggctctcgtgtcttac

SEQ ID NO: 4078560 - DNA, 25 bp, Homo sapien
tctgctgcttggcattagaaggctc

SEQ ID NO: 4078561 - DNA, 25 bp, Homo sapien
ttggcattagaaggctctcgtgtct

SEQ ID NO: 4078562 - DNA, 25 bp, Homo sapien
gctgcttggcattagaaggctctcg

SEQ ID NO: 4078563 - DNA, 25 bp, Homo sapien
taccaggcaatatcgtatgtgccga

SEQ ID NO: 4078564 - DNA, 25 bp, Homo sapien
cctcgtccgacgtgtctgacaggat

SEQ ID NO: 4078565 - DNA, 25 bp, Homo sapien
gatacgatgggacgctttctttggt

SEQ ID NO: 4078566 - DNA, 25 bp, Homo sapien
tcgtatgtgccgagagtctcagctt

SEQ ID NO: 4078567 - DNA, 25 bp, Homo sapien
gcttgaggcctttttcgaactcgga

SEQ ID NO: 4078568 - DNA, 25 bp, Homo sapien
gttgttgccgtcgactgaactggaa

SEQ ID NO: 4078569 - DNA, 25 bp, Homo sapien
ggaggaaccctgtcctgctcgtcgt

SEQ ID NO: 4078570 - DNA, 25 bp, Homo sapien
caataggtgcttgtcgtccaccgga

SEQ ID NO: 4078571 - DNA, 25 bp, Homo sapien
gtaggaagcgagaggtcacaggcag

SEQ ID NO: 4078572 - DNA, 25 bp, Homo sapien
ctgttggaggtaggaagcgagaggt

SEQ ID NO: 4078573 - DNA, 25 bp, Homo sapien
ttggaggtaggaagcgagaggtcac

SEQ ID NO: 4078574 - DNA, 25 bp, Homo sapien
aggtaggaagcgagaggtcacaggc

SEQ ID NO: 4078575 - DNA, 25 bp, Homo sapien
tgggcggggtctcccgcagtccaga

SEQ ID NO: 4078576 - DNA, 25 bp, Homo sapien
aggagctgatcagaggggcaacact

SEQ ID NO: 4078577 - DNA, 25 bp, Homo sapien
gaggggcaacactgtgcaaacacca

SEQ ID NO: 4078578 - DNA, 25 bp, Homo sapien
ggtctcccgcagtccagaagctcct

SEQ ID NO: 4078579 - DNA, 25 bp, Homo sapien
cgtcgagctctcctcgctggaagtg

SEQ ID NO: 4078580 - DNA, 25 bp, Homo sapien
gtaagtgcctttgcctaacaggagg

SEQ ID NO: 4078581 - DNA, 25 bp, Homo sapien
gagttggccactttcagcggcgtct

SEQ ID NO: 4078582 - DNA, 25 bp, Homo sapien
gcggcgtctcgcctttcctgttgct

SEQ ID NO: 4078583 - DNA, 25 bp, Homo sapien
ggactgctggagaagcacaactcct

SEQ ID NO: 4078584 - DNA, 25 bp, Homo sapien
taccgttccgcataacacggcagcc

SEQ ID NO: 4078585 - DNA, 25 bp, Homo sapien
tacaagacagtaacacccgcgtcag

SEQ ID NO: 4078586 - DNA, 25 bp, Homo sapien
gagagcagcccctcacggtctgagg

SEQ ID NO: 4078587 - DNA, 25 bp, Homo sapien
tggatttcctatgcccagaacagca

SEQ ID NO: 4078588 - DNA, 25 bp, Homo sapien
gactgacagagacaaccatggtgac

SEQ ID NO: 4078589 - DNA, 25 bp, Homo sapien
ggtgactacacaaaacctcaggctt

SEQ ID NO: 4078590 - DNA, 25 bp, Homo sapien
tccagtctgagattagcgcattcaa

SEQ ID NO: 4078591 - DNA, 25 bp, Homo sapien
tgagcgaatcccagacactgcagag

SEQ ID NO: 4078592 - DNA, 25 bp, Homo sapien
tctccacggagctctgatgaagaca

SEQ ID NO: 4078593 - DNA, 25 bp, Homo sapien
gaactataaagctgcatcggatgcc

SEQ ID NO: 4078594 - DNA, 25 bp, Homo sapien
caagtgagctctttaaggccaaggc

SEQ ID NO: 4078595 - DNA, 25 bp, Homo sapien
catagatggcacttgctgggaaacc

SEQ ID NO: 4078596 - DNA, 25 bp, Homo sapien
cggatacgagcctttcatagatggc

SEQ ID NO: 4078597 - DNA, 25 bp, Homo sapien
tgtgccccacatcatggaaccggct

SEQ ID NO: 4078598 - DNA, 25 bp, Homo sapien
gacctacacggctagcggatacgag

SEQ ID NO: 4078599 - DNA, 25 bp, Homo sapien
gatgccaggacaggccggatgtgtg

SEQ ID NO: 4078600 - DNA, 25 bp, Homo sapien
agctacagaaccacccagatgccag

SEQ ID NO: 4078601 - DNA, 25 bp, Homo sapien
gacaggccggatgtgtgaagaacgg

SEQ ID NO: 4078602 - DNA, 25 bp, Homo sapien
ggaaacaaagctacagaaccaccca

SEQ ID NO: 4078603 - DNA, 25 bp, Homo sapien
cagctgcttcgcgacgtcgtagtag

SEQ ID NO: 4078604 - DNA, 25 bp, Homo sapien
tgcaaaggcgtgtcgtcatctaggc

SEQ ID NO: 4078605 - DNA, 25 bp, Homo sapien
cccgttgttggcagcgtcgtgcaaa

SEQ ID NO: 4078606 - DNA, 25 bp, Homo sapien
taggcccttggtgttcacctccgca

SEQ ID NO: 4078607 - DNA, 25 bp, Homo sapien
tctgcggcaatcaccctaaaagggt

SEQ ID NO: 4078608 - DNA, 25 bp, Homo sapien
tcaccgatctggaggcgtatgtgcc

SEQ ID NO: 4078609 - DNA, 25 bp, Homo sapien
cacagtgtagtaaacagcagcctca

SEQ ID NO: 4078610 - DNA, 25 bp, Homo sapien
tatgtgcctttgcaaaacacggagg

SEQ ID NO: 4078611 - DNA, 25 bp, Homo sapien
tgcaggcgggtctctccacgctcgt

SEQ ID NO: 4078612 - DNA, 25 bp, Homo sapien
tgagctctttgatgcgccgggcgtc

SEQ ID NO: 4078613 - DNA, 25 bp, Homo sapien
gagttgggcgttcccttctgacaca

SEQ ID NO: 4078614 - DNA, 25 bp, Homo sapien
tgcgaagtccttgacgttgacgtct

SEQ ID NO: 4078615 - DNA, 25 bp, Homo sapien
gggtagccggctcggattccagaca

SEQ ID NO: 4078616 - DNA, 25 bp, Homo sapien
tggcagactcctcggccgtcatctg

SEQ ID NO: 4078617 - DNA, 25 bp, Homo sapien
ccttcttaatcctcttccgctcagg

SEQ ID NO: 4078618 - DNA, 25 bp, Homo sapien
gcagcccggccttccgggtgacagg

SEQ ID NO: 4078619 - DNA, 25 bp, Homo sapien
ggagccccctgcgtccacctgacag

SEQ ID NO: 4078620 - DNA, 25 bp, Homo sapien
ctaatgttacggagccccctgcgtc

SEQ ID NO: 4078621 - DNA, 25 bp, Homo sapien
ttacggagccccctgcgtccacctg

SEQ ID NO: 4078622 - DNA, 25 bp, Homo sapien
acggagccccctgcgtccacctgac

SEQ ID NO: 4078623 - DNA, 25 bp, Homo sapien
tcatgccatggtgcttcgaggagcg

SEQ ID NO: 4078624 - DNA, 25 bp, Homo sapien
gaggagcgtaccagccttgcagcac

SEQ ID NO: 4078625 - DNA, 25 bp, Homo sapien
gccatggtgcttcgaggagcgtacc

SEQ ID NO: 4078626 - DNA, 25 bp, Homo sapien
gtgcttcgaggagcgtaccagcctt

SEQ ID NO: 4078627 - DNA, 25 bp, Homo sapien
gaacggtcttaactagtctctcagc

SEQ ID NO: 4078628 - DNA, 25 bp, Homo sapien
catctctaacaacggactaactgga

SEQ ID NO: 4078629 - DNA, 25 bp, Homo sapien
gatttcctaagaggacgctgcccac

SEQ ID NO: 4078630 - DNA, 25 bp, Homo sapien
tcctacagaggtgggagacatctct

SEQ ID NO: 4078631 - DNA, 25 bp, Homo sapien
tcaacgtcttgtaattccaaccagg

SEQ ID NO: 4078632 - DNA, 25 bp, Homo sapien
tgtctacactctgggagccggaagg

SEQ ID NO: 4078633 - DNA, 25 bp, Homo sapien
gcatttaaccatcccagcacgtgag

SEQ ID NO: 4078634 - DNA, 25 bp, Homo sapien
taagctacatcatctgctcactggg

SEQ ID NO: 4078635 - DNA, 25 bp, Homo sapien
gccaagaagtctaaatcacagccga

SEQ ID NO: 4078636 - DNA, 25 bp, Homo sapien
caacagaaagttcacggccgatggc

SEQ ID NO: 4078637 - DNA, 25 bp, Homo sapien
gaaaatgtgcaactcctgcgtccca

SEQ ID NO: 4078638 - DNA, 25 bp, Homo sapien
tgcgtcccaccgtaaaactcgaaga

SEQ ID NO: 4078639 - DNA, 25 bp, Homo sapien
gctcgcacaactccaaacgagggcg

SEQ ID NO: 4078640 - DNA, 25 bp, Homo sapien
ggcactgagctcaacgctcgcacaa

SEQ ID NO: 4078641 - DNA, 25 bp, Homo sapien
gagggcgcaaccatattcccactga

SEQ ID NO: 4078642 - DNA, 25 bp, Homo sapien
gcaagacaagctccgaacagcctgt

SEQ ID NO: 4078643 - DNA, 25 bp, Homo sapien
tttccagagactcacgaggtggcag

SEQ ID NO: 4078644 - DNA, 25 bp, Homo sapien
tctgtattcagaggccgaccctgct

SEQ ID NO: 4078645 - DNA, 25 bp, Homo sapien
gaggcaccaggaacaaacatgacgt

SEQ ID NO: 4078646 - DNA, 25 bp, Homo sapien
agaacagccgtctcctatctgaggc

SEQ ID NO: 4078647 - DNA, 25 bp, Homo sapien
gcacccacagcccttacagaggcct

SEQ ID NO: 4078648 - DNA, 25 bp, Homo sapien
catggcaggtgccttcccactcctt

SEQ ID NO: 4078649 - DNA, 25 bp, Homo sapien
aggcctggtcctaggacgggctctt

SEQ ID NO: 4078650 - DNA, 25 bp, Homo sapien
ctggtcctaggacgggctcttgccc

SEQ ID NO: 4078651 - DNA, 25 bp, Homo sapien
ttctgctccccattggcgcccgcgg

SEQ ID NO: 4078652 - DNA, 25 bp, Homo sapien
ttggcgcccgcggtgaagggcagct

SEQ ID NO: 4078653 - DNA, 25 bp, Homo sapien
tccccattggcgcccgcggtgaagg

SEQ ID NO: 4078654 - DNA, 25 bp, Homo sapien
tggttagagaaactttatctttatc

SEQ ID NO: 4078655 - DNA, 25 bp, Homo sapien
ctcccactccgcagacacgcgccac

SEQ ID NO: 4078656 - DNA, 25 bp, Homo sapien
ctcccactccgcagacacgcgccat

SEQ ID NO: 4078657 - DNA, 25 bp, Homo sapien
actccgcagacacgcgccacccacc

SEQ ID NO: 4078658 - DNA, 25 bp, Homo sapien
gcagacacgcgccacccacctccca

SEQ ID NO: 4078659 - DNA, 25 bp, Homo sapien
agtaactgaaaaatggccacgtcca

SEQ ID NO: 4078660 - DNA, 25 bp, Homo sapien
ggtatccaaactgtctatgtgcggg

SEQ ID NO: 4078661 - DNA, 25 bp, Homo sapien
cgtgttgtccactgactgcagcaca

SEQ ID NO: 4078662 - DNA, 25 bp, Homo sapien
cgaggtaggctctgcacatgtcata

SEQ ID NO: 4078663 - DNA, 25 bp, Homo sapien
gatcagaacacactcaacgatgcag

SEQ ID NO: 4078664 - DNA, 25 bp, Homo sapien
aggtcagcgcggcatcaggatgcac

SEQ ID NO: 4078665 - DNA, 25 bp, Homo sapien
ttcttcccgaggcagctcagcggtt

SEQ ID NO: 4078666 - DNA, 25 bp, Homo sapien
tgctcactggtgcagccaaagggac

SEQ ID NO: 4078667 - DNA, 25 bp, Homo sapien
tgtcgctgctgaggggaagctcttc

SEQ ID NO: 4078668 - DNA, 25 bp, Homo sapien
ctgctgtggtgctttagggcaccca

SEQ ID NO: 4078669 - DNA, 25 bp, Homo sapien
agtctgcttctccaccatgtcgctg

SEQ ID NO: 4078670 - DNA, 25 bp, Homo sapien
ctttagggcacccacccttgggcat

SEQ ID NO: 4078671 - DNA, 25 bp, Homo sapien
cggccggcgcttcatcatcaaccgt

SEQ ID NO: 4078672 - DNA, 25 bp, Homo sapien
atttacacggccggcgcttcatcat

SEQ ID NO: 4078673 - DNA, 25 bp, Homo sapien
cttcatttacacggccggcgcttca

SEQ ID NO: 4078674 - DNA, 25 bp, Homo sapien
acacggccggcgcttcatcatcaac

SEQ ID NO: 4078675 - DNA, 25 bp, Homo sapien
gaggaaccgttactcagccgtgtca

SEQ ID NO: 4078676 - DNA, 25 bp, Homo sapien
cccttgccgtgaaatggcagagcca

SEQ ID NO: 4078677 - DNA, 25 bp, Homo sapien
tgggagtcccctctttagacagttc

SEQ ID NO: 4078678 - DNA, 25 bp, Homo sapien
actcaggagtcaggccaacaggctc

SEQ ID NO: 4078679 - DNA, 25 bp, Homo sapien
ggagtcaacccccagtgagtgtact

SEQ ID NO: 4078680 - DNA, 25 bp, Homo sapien
ccccagtgagtgtactgccaatacg

SEQ ID NO: 4078681 - DNA, 25 bp, Homo sapien
tgctgactgggagtcaacccccagt

SEQ ID NO: 4078682 - DNA, 25 bp, Homo sapien
gtgtactgccaatacggccaagttt

SEQ ID NO: 4078683 - DNA, 25 bp, Homo sapien
cgtgtccaccagcagaagagcaaat

SEQ ID NO: 4078684 - DNA, 25 bp, Homo sapien
gagcaaatgagtccaggtggcccac

SEQ ID NO: 4078685 - DNA, 25 bp, Homo sapien
gattcgaagagccagacacgagtgt

SEQ ID NO: 4078686 - DNA, 25 bp, Homo sapien
catagacagcacactggattcgaag

SEQ ID NO: 4078687 - DNA, 25 bp, Homo sapien
cagcacaggaacaaatccacaccga

SEQ ID NO: 4078688 - DNA, 25 bp, Homo sapien
gaggcatccgtgagtcccacaggtc

SEQ ID NO: 4078689 - DNA, 25 bp, Homo sapien
cagcttgaggcctctgcattcaggg

SEQ ID NO: 4078690 - DNA, 25 bp, Homo sapien
cagaagcatgggagcagcttgaggc

SEQ ID NO: 4078691 - DNA, 25 bp, Homo sapien
tgtgagtttcccctacagctggtgc

SEQ ID NO: 4078692 - DNA, 25 bp, Homo sapien
gtgctgaggcatccgccgcaaacat

SEQ ID NO: 4078693 - DNA, 25 bp, Homo sapien
tctaaagggctaggagaaacgcagg

SEQ ID NO: 4078694 - DNA, 25 bp, Homo sapien
tcacaagcttgttttacggtttgac

SEQ ID NO: 4078695 - DNA, 25 bp, Homo sapien
tcttactgctttgaacaatggagga

SEQ ID NO: 4078696 - DNA, 25 bp, Homo sapien
ttgctagaatgccaccacgtgcggg

SEQ ID NO: 4078697 - DNA, 25 bp, Homo sapien
tgtgacagttaacaaccagggtggc

SEQ ID NO: 4078698 - DNA, 25 bp, Homo sapien
tgacccaaggacacaggtcaagctg

SEQ ID NO: 4078699 - DNA, 25 bp, Homo sapien
taccacgaaggtagccggctgttca

SEQ ID NO: 4078700 - DNA, 25 bp, Homo sapien
tatctgagtctcaacagccagcaga

SEQ ID NO: 4078701 - DNA, 25 bp, Homo sapien
ggctgctggccgaaactgttattaa

SEQ ID NO: 4078702 - DNA, 25 bp, Homo sapien
taagtaaacacatgtcggcagtggg

SEQ ID NO: 4078703 - DNA, 25 bp, Homo sapien
cctgctgggagaatgccgctctgag

SEQ ID NO: 4078704 - DNA, 25 bp, Homo sapien
tcctgctgggagaatgccgctctga

SEQ ID NO: 4078705 - DNA, 25 bp, Homo sapien
ggaacatccgcatcaccagaaggct

SEQ ID NO: 4078706 - DNA, 25 bp, Homo sapien
atcagcagaggaacatccgcatcac

SEQ ID NO: 4078707 - DNA, 25 bp, Homo sapien
taacgagaacgcaaaccttctggct

SEQ ID NO: 4078708 - DNA, 25 bp, Homo sapien
ggccaagaccatccagtaacgagaa

SEQ ID NO: 4078709 - DNA, 25 bp, Homo sapien
ggtggccagcctgcactttagtgtg

SEQ ID NO: 4078710 - DNA, 25 bp, Homo sapien
gacacactgctgttcaactggaaaa

SEQ ID NO: 4078711 - DNA, 25 bp, Homo sapien
gagcgtcttgactttcagggtgcac

SEQ ID NO: 4078712 - DNA, 25 bp, Homo sapien
taagtggctggtcccaccaaggaag

SEQ ID NO: 4078713 - DNA, 25 bp, Homo sapien
gcaatgttatagctgccccgtctca

SEQ ID NO: 4078714 - DNA, 25 bp, Homo sapien
tgagaaacgttcaactgcgcgctcg

SEQ ID NO: 4078715 - DNA, 25 bp, Homo sapien
tgtccccattgtcgctgtcataaag

SEQ ID NO: 4078716 - DNA, 25 bp, Homo sapien
tacgtgcgttcactgcaaggaaaga

SEQ ID NO: 4078717 - DNA, 25 bp, Homo sapien
aagctgactggtgtgtgcctgccta

SEQ ID NO: 4078718 - DNA, 25 bp, Homo sapien
gagagtatcacccacagaatgcaag

SEQ ID NO: 4078719 - DNA, 25 bp, Homo sapien
aaacttagcacacagcggacagcag

SEQ ID NO: 4078720 - DNA, 25 bp, Homo sapien
agcggacagcagtccagaactccct

SEQ ID NO: 4078721 - DNA, 25 bp, Homo sapien
acagcggacagcagtccagaactcc

SEQ ID NO: 4078722 - DNA, 25 bp, Homo sapien
atgccaaacttagcacacagcggac

SEQ ID NO: 4078723 - DNA, 25 bp, Homo sapien
tgcaggagcctaaccaacggtaagg

SEQ ID NO: 4078724 - DNA, 25 bp, Homo sapien
gaagatcactggatcaaaccccgag

SEQ ID NO: 4078725 - DNA, 25 bp, Homo sapien
gaactcagagaaacggcatgtcaac

SEQ ID NO: 4078726 - DNA, 25 bp, Homo sapien
gggatgacagatacacgccactacg

SEQ ID NO: 4078727 - DNA, 25 bp, Homo sapien
agacctgtcttggttgtccctcaga

SEQ ID NO: 4078728 - DNA, 25 bp, Homo sapien
tgatgccacgctgagatgctccagg

SEQ ID NO: 4078729 - DNA, 25 bp, Homo sapien
cgtgatgtgttgaagcagacctgtc

SEQ ID NO: 4078730 - DNA, 25 bp, Homo sapien
agatcccagctacagaagttaacga

SEQ ID NO: 4078731 - DNA, 25 bp, Homo sapien
cggattccaccgtaagtgctgtcaa

SEQ ID NO: 4078732 - DNA, 25 bp, Homo sapien
tttctgtgcagtcgtccctgacggg

SEQ ID NO: 4078733 - DNA, 25 bp, Homo sapien
caacggcgtctcacagtcctgagga

SEQ ID NO: 4078734 - DNA, 25 bp, Homo sapien
tgaagctttccgtgtcctcagtgat

SEQ ID NO: 4078735 - DNA, 25 bp, Homo sapien
aaagcaggtgcctcgggtggcaaca

SEQ ID NO: 4078736 - DNA, 25 bp, Homo sapien
cacaaaccttcgtcctgggcatggg

SEQ ID NO: 4078737 - DNA, 25 bp, Homo sapien
tctccatccctggtcaaagcaggtg

SEQ ID NO: 4078738 - DNA, 25 bp, Homo sapien
gagaatctggtgacgctgtgaaaca

SEQ ID NO: 4078739 - DNA, 25 bp, Homo sapien
aaaggaccatagacgcatgctgctg

SEQ ID NO: 4078740 - DNA, 25 bp, Homo sapien
ggcggtcgcgactataacaaatggc

SEQ ID NO: 4078741 - DNA, 25 bp, Homo sapien
catttatccgtaagagaagcccaga

SEQ ID NO: 4078742 - DNA, 25 bp, Homo sapien
tgagtggattaaacacccggcgtcc

SEQ ID NO: 4078743 - DNA, 25 bp, Homo sapien
cggagatcgtggtgatgcgtctaca

SEQ ID NO: 4078744 - DNA, 25 bp, Homo sapien
cctgggaaacatggtctttgcagat

SEQ ID NO: 4078745 - DNA, 25 bp, Homo sapien
cagacgtggacactgagctgtgcac

SEQ ID NO: 4078746 - DNA, 25 bp, Homo sapien
aacaccacagacgatggccttcctg

SEQ ID NO: 4078747 - DNA, 25 bp, Homo sapien
gagccgtgggagaacagatccttgc

SEQ ID NO: 4078748 - DNA, 25 bp, Homo sapien
ggtgatttatcacggcagccccgaa

SEQ ID NO: 4078749 - DNA, 25 bp, Homo sapien
tctgggtgcctacacgtgacgtacg

SEQ ID NO: 4078750 - DNA, 25 bp, Homo sapien
caaaggcaggcgaaatgtggaacca

SEQ ID NO: 4078751 - DNA, 25 bp, Homo sapien
gaaatgcaccaaagcgtcctcaagg

SEQ ID NO: 4078752 - DNA, 25 bp, Homo sapien
gacagatgtgcttccccagtgctta

SEQ ID NO: 4078753 - DNA, 25 bp, Homo sapien
gataaggcatgttctcacagggaca

SEQ ID NO: 4078754 - DNA, 25 bp, Homo sapien
gcaggacatcagacacagggtttta

SEQ ID NO: 4078755 - DNA, 25 bp, Homo sapien
cttctgaagaagatggacctcagtg

SEQ ID NO: 4078756 - DNA, 25 bp, Homo sapien
gacaaagccttgtgtccaggacagg

SEQ ID NO: 4078757 - DNA, 25 bp, Homo sapien
tccttcacgctgataagcgatccca

SEQ ID NO: 4078758 - DNA, 25 bp, Homo sapien
aaggacagctgtggaatatggaagg

SEQ ID NO: 4078759 - DNA, 25 bp, Homo sapien
cactgatcagccgtggaatcctgaa

SEQ ID NO: 4078760 - DNA, 25 bp, Homo sapien
tgtgcctctcacagaccttaggagt

SEQ ID NO: 4078761 - DNA, 25 bp, Homo sapien
aatacaagtgaacaggccgctgtgg

SEQ ID NO: 4078762 - DNA, 25 bp, Homo sapien
gaagatatctagcagagcatgtgcc

SEQ ID NO: 4078763 - DNA, 25 bp, Homo sapien
caagttgtaaatgggccttctggtg

SEQ ID NO: 4078764 - DNA, 25 bp, Homo sapien
ccttctggtggcaatgatgtattaa

SEQ ID NO: 4078765 - DNA, 25 bp, Homo sapien
aagcaagttgtaaatgggccttctg

SEQ ID NO: 4078766 - DNA, 25 bp, Homo sapien
tgtattaagacacgcagagccctta

SEQ ID NO: 4078767 - DNA, 25 bp, Homo sapien
agtcagtgctgacgaggactgtctt

SEQ ID NO: 4078768 - DNA, 25 bp, Homo sapien
gtcagtgctgacgaggactgtcttt

SEQ ID NO: 4078769 - DNA, 25 bp, Homo sapien
tcagtgctgacgaggactgtctttt

SEQ ID NO: 4078770 - DNA, 25 bp, Homo sapien
gcagcgtcggtcttctagatgccag

SEQ ID NO: 4078771 - DNA, 25 bp, Homo sapien
caagtgtgccacgaagctttccgta

SEQ ID NO: 4078772 - DNA, 25 bp, Homo sapien
ggcatttgggttcagcgcgccaaca

SEQ ID NO: 4078773 - DNA, 25 bp, Homo sapien
tcatgagtccaacgatttgcaagct

SEQ ID NO: 4078774 - DNA, 25 bp, Homo sapien
ggatgggaccatcacccgtccacgt

SEQ ID NO: 4078775 - DNA, 25 bp, Homo sapien
ggaccatcacccgtccacgtctggg

SEQ ID NO: 4078776 - DNA, 25 bp, Homo sapien
agggatgggaccatcacccgtccac

SEQ ID NO: 4078777 - DNA, 25 bp, Homo sapien
atgggaccatcacccgtccacgtct

SEQ ID NO: 4078778 - DNA, 25 bp, Homo sapien
taagaagaaagagctcgaggccaaa

SEQ ID NO: 4078779 - DNA, 25 bp, Homo sapien
gaaagagctcgaggccaaacctata

SEQ ID NO: 4078780 - DNA, 25 bp, Homo sapien
gaagaaagagctcgaggccaaacct

SEQ ID NO: 4078781 - DNA, 25 bp, Homo sapien
gagctcgaggccaaacctataatcc

SEQ ID NO: 4078782 - DNA, 25 bp, Homo sapien
tagcaaagacaggtccctacactgg

SEQ ID NO: 4078783 - DNA, 25 bp, Homo sapien
cttcagacaaccaagggccacggtg

SEQ ID NO: 4078784 - DNA, 25 bp, Homo sapien
tagccagagctatgaccttatgcaa

SEQ ID NO: 4078785 - DNA, 25 bp, Homo sapien
ggccttggtctcaaaacgctgctag

SEQ ID NO: 4078786 - DNA, 25 bp, Homo sapien
taagaggacagggtacaaccttgta

SEQ ID NO: 4078787 - DNA, 25 bp, Homo sapien
ataatgaaactcaggcgacctccgg

SEQ ID NO: 4078788 - DNA, 25 bp, Homo sapien
gacggcgtacaacgggataatgaaa

SEQ ID NO: 4078789 - DNA, 25 bp, Homo sapien
ggagataaactacctgctgtgactg

SEQ ID NO: 4078790 - DNA, 25 bp, Homo sapien
gataaataagctgagtccacccaca

SEQ ID NO: 4078791 - DNA, 25 bp, Homo sapien
cgaacattacgctgagcaaaaaggc

SEQ ID NO: 4078792 - DNA, 25 bp, Homo sapien
aatgtgtgtttctcaccatggataa

SEQ ID NO: 4078793 - DNA, 25 bp, Homo sapien
aaaggttacatttctacgactccat

SEQ ID NO: 4078794 - DNA, 25 bp, Homo sapien
agaacagcaacgtccctgcagcgtg

SEQ ID NO: 4078795 - DNA, 25 bp, Homo sapien
ctgcagcgtgggattctcaactctc

SEQ ID NO: 4078796 - DNA, 25 bp, Homo sapien
gatgcaatgaacagaatgtaaatgg

SEQ ID NO: 4078797 - DNA, 25 bp, Homo sapien
gggaagggactacacagcttctgag

SEQ ID NO: 4078798 - DNA, 25 bp, Homo sapien
gattctcaactctcacgctcagacg

SEQ ID NO: 4078799 - DNA, 25 bp, Homo sapien
cgcgctcagtcgttctagtacacag

SEQ ID NO: 4078800 - DNA, 25 bp, Homo sapien
cacgctcagtcgttctagtacacag

SEQ ID NO: 4078801 - DNA, 25 bp, Homo sapien
gggactctcaactctcacgctcaga

SEQ ID NO: 4078802 - DNA, 25 bp, Homo sapien
gcgttgttcaccgacaaatcccgtg

SEQ ID NO: 4078803 - DNA, 25 bp, Homo sapien
atcccgtgtctggaagagtcctggc

SEQ ID NO: 4078804 - DNA, 25 bp, Homo sapien
tcaccgacaaatcccgtgtctggaa

SEQ ID NO: 4078805 - DNA, 25 bp, Homo sapien
tgcatcagctctgcgttgttcaccg

SEQ ID NO: 4078806 - DNA, 25 bp, Homo sapien
tcgaaataatgaccataaagcaatt

SEQ ID NO: 4078807 - DNA, 25 bp, Homo sapien
cagtcatacagttgtcgaaataatg

SEQ ID NO: 4078808 - DNA, 25 bp, Homo sapien
tcttcttctccacgcaagtcggaaa

SEQ ID NO: 4078809 - DNA, 25 bp, Homo sapien
ttgagaattctcatactcttcttct

SEQ ID NO: 4078810 - DNA, 25 bp, Homo sapien
ccagcgaagtcgctgcagccaggag

SEQ ID NO: 4078811 - DNA, 25 bp, Homo sapien
aggaggagcagcaccgcgcagtcct

SEQ ID NO: 4078812 - DNA, 25 bp, Homo sapien
ctgcagaagcatgcggctggtcagc

SEQ ID NO: 4078813 - DNA, 25 bp, Homo sapien
atgagagaatccagcgaagtcgctg

SEQ ID NO: 4078814 - DNA, 25 bp, Homo sapien
caccgtgcccatccaagaaaatttt

SEQ ID NO: 4078815 - DNA, 25 bp, Homo sapien
tggacagtttggaaggcattgcccc

SEQ ID NO: 4078816 - DNA, 25 bp, Homo sapien
gcacagtcccttcgaagctaaagta

SEQ ID NO: 4078817 - DNA, 25 bp, Homo sapien
atgttactgcatttaggaggccgag

SEQ ID NO: 4078818 - DNA, 25 bp, Homo sapien
aggattcttcctccggaagaattca

SEQ ID NO: 4078819 - DNA, 25 bp, Homo sapien
caatggcagggttcacaggattctt

SEQ ID NO: 4078820 - DNA, 25 bp, Homo sapien
cacaggattcttcctccggaagaat

SEQ ID NO: 4078821 - DNA, 25 bp, Homo sapien
caggattcttcctccggaagaattc

SEQ ID NO: 4078822 - DNA, 25 bp, Homo sapien
gaatctctctggatggcaaggtggc

SEQ ID NO: 4078823 - DNA, 25 bp, Homo sapien
aaggtggcagccgactatggcactc

SEQ ID NO: 4078824 - DNA, 25 bp, Homo sapien
tatggcactcaccaaaaaggcacct

SEQ ID NO: 4078825 - DNA, 25 bp, Homo sapien
taactgaacagtgtccacaagcagg

SEQ ID NO: 4078826 - DNA, 25 bp, Homo sapien
ccggagcgcacgtgagtcccggcat

SEQ ID NO: 4078827 - DNA, 25 bp, Homo sapien
tccaccggagcgcacgtgagtcccg

SEQ ID NO: 4078828 - DNA, 25 bp, Homo sapien
ccccgtccaccggagcgcacgtgag

SEQ ID NO: 4078829 - DNA, 25 bp, Homo sapien
accgccccgtccaccggagcgcacg

SEQ ID NO: 4078830 - DNA, 25 bp, Homo sapien
gccaaatccccctctatgagaaaca

SEQ ID NO: 4078831 - DNA, 25 bp, Homo sapien
ctgccaaatccccctctatgagaaa

SEQ ID NO: 4078832 - DNA, 25 bp, Homo sapien
accctgccaaatccccctctatgag

SEQ ID NO: 4078833 - DNA, 25 bp, Homo sapien
ccctgccaaatccccctctatgaga

SEQ ID NO: 4078834 - DNA, 25 bp, Homo sapien
cacaacgctaacgccaggcacagtg

SEQ ID NO: 4078835 - DNA, 25 bp, Homo sapien
tagaccacaacgctaacgccaggca

SEQ ID NO: 4078836 - DNA, 25 bp, Homo sapien
ctattagaccacaacgctaacgcca

SEQ ID NO: 4078837 - DNA, 25 bp, Homo sapien
ccacaacgctaacgccaggcacagt

SEQ ID NO: 4078838 - DNA, 25 bp, Homo sapien
tgggcgtggggtcagacacctgtaa

SEQ ID NO: 4078839 - DNA, 25 bp, Homo sapien
attagctgggcgtggggtcagacac

SEQ ID NO: 4078840 - DNA, 25 bp, Homo sapien
tagctgggcgtggggtcagacacct

SEQ ID NO: 4078841 - DNA, 25 bp, Homo sapien
gctgggcgtggggtcagacacctgt

SEQ ID NO: 4078842 - DNA, 25 bp, Homo sapien
catgggccaccacgcgtaatttctt

SEQ ID NO: 4078843 - DNA, 25 bp, Homo sapien
atgggccaccacgcgtaatttcttt

SEQ ID NO: 4078844 - DNA, 25 bp, Homo sapien
cggactatcaccctagtgagaaaga

SEQ ID NO: 4078845 - DNA, 25 bp, Homo sapien
ggaaacagacatgcacgtcggacta

SEQ ID NO: 4078846 - DNA, 25 bp, Homo sapien
caacgttgttgtcagggcacagtga

SEQ ID NO: 4078847 - DNA, 25 bp, Homo sapien
tcacatccagggtccaggaaacaga

SEQ ID NO: 4078848 - DNA, 25 bp, Homo sapien
tatgtgcatagaagtaacagaagat

SEQ ID NO: 4078849 - DNA, 25 bp, Homo sapien
gcatagaagtaacagaagatataaa

SEQ ID NO: 4078850 - DNA, 25 bp, Homo sapien
ttaatatgtgcatagaagtaacaga

SEQ ID NO: 4078851 - DNA, 25 bp, Homo sapien
ttaggtatctattaatatgtgcata

SEQ ID NO: 4078852 - DNA, 25 bp, Homo sapien
aaagcagtcaggtgagccacacgtc

SEQ ID NO: 4078853 - DNA, 25 bp, Homo sapien
cccggatggcatctgaggacagcaa

SEQ ID NO: 4078854 - DNA, 25 bp, Homo sapien
caaacatgccaatgtgtgaacggtc

SEQ ID NO: 4078855 - DNA, 25 bp, Homo sapien
tgaggttactaatcagcagagaggg

SEQ ID NO: 4078856 - DNA, 25 bp, Homo sapien
gctggaaaaccaacacgggcagcac

SEQ ID NO: 4078857 - DNA, 25 bp, Homo sapien
caacgcccaagagctgttctctgtc

SEQ ID NO: 4078858 - DNA, 25 bp, Homo sapien
gaacccaagtttagcagaatcagat

SEQ ID NO: 4078859 - DNA, 25 bp, Homo sapien
gaaaaggcacagattaagttctaag

SEQ ID NO: 4078860 - DNA, 25 bp, Homo sapien
tcactgagaccttgatggaaacgat

SEQ ID NO: 4078861 - DNA, 25 bp, Homo sapien
gcaaaccacacttagtccagactga

SEQ ID NO: 4078862 - DNA, 25 bp, Homo sapien
gcctccggacaaacgagacacttaa

SEQ ID NO: 4078863 - DNA, 25 bp, Homo sapien
tactctggcctgaaaacagcagtcc

SEQ ID NO: 4078864 - DNA, 25 bp, Homo sapien
gcccggcagagctgcgagggacggc

SEQ ID NO: 4078865 - DNA, 25 bp, Homo sapien
acggctcgggcgagagccgcggctc

SEQ ID NO: 4078866 - DNA, 25 bp, Homo sapien
agggctgcgcggctccgcgacggct

SEQ ID NO: 4078867 - DNA, 25 bp, Homo sapien
gagggacggcgggaggcgagcccgc

SEQ ID NO: 4078868 - DNA, 25 bp, Homo sapien
tactgatggggcgtctggccgcggg

SEQ ID NO: 4078869 - DNA, 25 bp, Homo sapien
ctgatggggcgtctggccgcgggct

SEQ ID NO: 4078870 - DNA, 25 bp, Homo sapien
gctactgatggggcgtctggccgcg

SEQ ID NO: 4078871 - DNA, 25 bp, Homo sapien
cggcggcggcgcctccccggctggg

SEQ ID NO: 4078872 - DNA, 25 bp, Homo sapien
cgcgcaccgtctcagggcggcctct

SEQ ID NO: 4078873 - DNA, 25 bp, Homo sapien
ggtctttccaagtgccggaagcaac

SEQ ID NO: 4078874 - DNA, 25 bp, Homo sapien
attgacagcctctctggcggtccgg

SEQ ID NO: 4078875 - DNA, 25 bp, Homo sapien
gaagcaacagggatgtcgtctggaa

SEQ ID NO: 4078876 - DNA, 25 bp, Homo sapien
tgaagcgcagggagacaaaacgtcc

SEQ ID NO: 4078877 - DNA, 25 bp, Homo sapien
cacgcgaaaaaggtagacgaggact

SEQ ID NO: 4078878 - DNA, 25 bp, Homo sapien
gtagacgaggactggttttctttgc

SEQ ID NO: 4078879 - DNA, 25 bp, Homo sapien
tccctgccttgctagttagttctcc

SEQ ID NO: 4078880 - DNA, 25 bp, Homo sapien
tagttagttctccaacacgcgaaaa

SEQ ID NO: 4078881 - DNA, 25 bp, Homo sapien
ggtgcgggccaggagcacctatttc

SEQ ID NO: 4078882 - DNA, 25 bp, Homo sapien
taggcccatcgggaagattaaatga

SEQ ID NO: 4078883 - DNA, 25 bp, Homo sapien
aacattagttatgctataactggac

SEQ ID NO: 4078884 - DNA, 25 bp, Homo sapien
acctatttcataggcccatcgggaa

SEQ ID NO: 4078885 - DNA, 25 bp, Homo sapien
aactagtcacgccattggatgaggg

SEQ ID NO: 4078886 - DNA, 25 bp, Homo sapien
ggtgagcgcctgataaaaacagccg

SEQ ID NO: 4078887 - DNA, 25 bp, Homo sapien
aaaacagccggcgtatgcgctgatg

SEQ ID NO: 4078888 - DNA, 25 bp, Homo sapien
cgaagaggtgatccaagtgtttcca

SEQ ID NO: 4078889 - DNA, 25 bp, Homo sapien
gattgacgggcagtggtattcacag

SEQ ID NO: 4078890 - DNA, 25 bp, Homo sapien
gaaaaacatcaacctaagccgtcat

SEQ ID NO: 4078891 - DNA, 25 bp, Homo sapien
aagccgtcatgctcgcactcgagaa

SEQ ID NO: 4078892 - DNA, 25 bp, Homo sapien
aatgtttcccctaggctgattgacg

SEQ ID NO: 4078893 - DNA, 25 bp, Homo sapien
taagccgtcagagggttgtgggaag

SEQ ID NO: 4078894 - DNA, 25 bp, Homo sapien
aaaggtaagccgtcagagggttgtg

SEQ ID NO: 4078895 - DNA, 25 bp, Homo sapien
agccgtcagagggttgtgggaaggt

SEQ ID NO: 4078896 - DNA, 25 bp, Homo sapien
ggtaagccgtcagagggttgtggga

SEQ ID NO: 4078897 - DNA, 25 bp, Homo sapien
agtagagagccacggttggactgaa

SEQ ID NO: 4078898 - DNA, 25 bp, Homo sapien
gatggctgtgagatgatgaacgcac

SEQ ID NO: 4078899 - DNA, 25 bp, Homo sapien
actgaagacagtcggcaaggttttg

SEQ ID NO: 4078900 - DNA, 25 bp, Homo sapien
gatgatgaacgcacagagacagcag

SEQ ID NO: 4078901 - DNA, 25 bp, Homo sapien
ctgtaaaagaagggtccagggtgag

SEQ ID NO: 4078902 - DNA, 25 bp, Homo sapien
gaagggtccagggtgaggttagcat

SEQ ID NO: 4078903 - DNA, 25 bp, Homo sapien
aagggtccagggtgaggttagcatt

SEQ ID NO: 4078904 - DNA, 25 bp, Homo sapien
agaagggtccagggtgaggttagca

SEQ ID NO: 4078905 - DNA, 25 bp, Homo sapien
aggacatgaggggcgcagcaacaga

SEQ ID NO: 4078906 - DNA, 25 bp, Homo sapien
gacatgaggggcgcagcaacagaaa

SEQ ID NO: 4078907 - DNA, 25 bp, Homo sapien
acatgaggggcgcagcaacagaaac

SEQ ID NO: 4078908 - DNA, 25 bp, Homo sapien
atgaggggcgcagcaacagaaaccg

SEQ ID NO: 4078909 - DNA, 25 bp, Homo sapien
gagattagttgtcactgtgttgccc

SEQ ID NO: 4078910 - DNA, 25 bp, Homo sapien
gattagttgtcactgtgttgcccag

SEQ ID NO: 4078911 - DNA, 25 bp, Homo sapien
agattagttgtcactgtgttgccca

SEQ ID NO: 4078912 - DNA, 25 bp, Homo sapien
atttgggaagcagccgaagatttac

SEQ ID NO: 4078913 - DNA, 25 bp, Homo sapien
ggctccttctatccctggaaatcgg

SEQ ID NO: 4078914 - DNA, 25 bp, Homo sapien
gatttacgggccatggaggctcctt

SEQ ID NO: 4078915 - DNA, 25 bp, Homo sapien
tatccggtgcgtgacacagtactct

SEQ ID NO: 4078916 - DNA, 25 bp, Homo sapien
aacccaaactgcatgctttcgttca

SEQ ID NO: 4078917 - DNA, 25 bp, Homo sapien
aaacccaaactgcatgctttcgttc

SEQ ID NO: 4078918 - DNA, 25 bp, Homo sapien
cccaaactgcatgctttcgttcaag

SEQ ID NO: 4078919 - DNA, 25 bp, Homo sapien
taaacccaaactgcatgctttcgtt

SEQ ID NO: 4078920 - DNA, 25 bp, Homo sapien
gcaccagcccaagtccactcatgtg

SEQ ID NO: 4078921 - DNA, 25 bp, Homo sapien
gaacttaacctgatcagcccttgtg

SEQ ID NO: 4078922 - DNA, 25 bp, Homo sapien
aaaggcatgctggtctctggaaggc

SEQ ID NO: 4078923 - DNA, 25 bp, Homo sapien
ccatgggtccgcgaggtgaggaggt

SEQ ID NO: 4078924 - DNA, 25 bp, Homo sapien
tatgtagaaatgactacctgtagct

SEQ ID NO: 4078925 - DNA, 25 bp, Homo sapien
tgtagaaatgactacctgtagctgg

SEQ ID NO: 4078926 - DNA, 25 bp, Homo sapien
tttatgtagaaatgactacctgtag

SEQ ID NO: 4078927 - DNA, 25 bp, Homo sapien
cagccggggttcggattttatgtag

SEQ ID NO: 4078928 - DNA, 25 bp, Homo sapien
gcagctgggccaccagcagccacat

SEQ ID NO: 4078929 - DNA, 25 bp, Homo sapien
cctcatcgccctcagcagctgggcc

SEQ ID NO: 4078930 - DNA, 25 bp, Homo sapien
cagcagctgggccaccagcagccac

SEQ ID NO: 4078931 - DNA, 25 bp, Homo sapien
ctcagcagctgggccaccagcagcc

SEQ ID NO: 4078932 - DNA, 25 bp, Homo sapien
acatgttttatgtaagacatcctca

SEQ ID NO: 4078933 - DNA, 25 bp, Homo sapien
tttatgtaagacatcctcatattca

SEQ ID NO: 4078934 - DNA, 25 bp, Homo sapien
tgtaagacatcctcatattcaacac

SEQ ID NO: 4078935 - DNA, 25 bp, Homo sapien
tgttttatgtaagacatcctcatat

SEQ ID NO: 4078936 - DNA, 25 bp, Homo sapien
gagacagtcttggcctggcgcgatg

SEQ ID NO: 4078937 - DNA, 25 bp, Homo sapien
tttggccatcattatgggtgctgca

SEQ ID NO: 4078938 - DNA, 25 bp, Homo sapien
tgttcagatattaataaggaagcct

SEQ ID NO: 4078939 - DNA, 25 bp, Homo sapien
catcattatgggtgctgcagtccaa

SEQ ID NO: 4078940 - DNA, 25 bp, Homo sapien
caagtccaagcgcagagttcagagg

SEQ ID NO: 4078941 - DNA, 25 bp, Homo sapien
tagccatccagagacctaaggcgtg

SEQ ID NO: 4078942 - DNA, 25 bp, Homo sapien
tgtgccaagtcctgacgtgcagagt

SEQ ID NO: 4078943 - DNA, 25 bp, Homo sapien
tgacacggaagcacaaatgagcaag

SEQ ID NO: 4078944 - DNA, 25 bp, Homo sapien
aaccctttatgcctgtgcgttcaga

SEQ ID NO: 4078945 - DNA, 25 bp, Homo sapien
tgtgcgttcagaggatttgtgacct

SEQ ID NO: 4078946 - DNA, 25 bp, Homo sapien
tgcgttcagaggatttgtgaccttt

SEQ ID NO: 4078947 - DNA, 25 bp, Homo sapien
tgaccgagccccacaaccctttatg

SEQ ID NO: 4078948 - DNA, 25 bp, Homo sapien
tgcctcctgagttcaagcgattctc

SEQ ID NO: 4078949 - DNA, 25 bp, Homo sapien
gtgcgatgtcggctcagtgcaaccc

SEQ ID NO: 4078950 - DNA, 25 bp, Homo sapien
ccaccgcacccagccctggaccttt

SEQ ID NO: 4078951 - DNA, 25 bp, Homo sapien
gcgatgtcggctcagtgcaacccct

SEQ ID NO: 4078952 - DNA, 25 bp, Homo sapien
agtgcctggatgacagtcgtaagcc

SEQ ID NO: 4078953 - DNA, 25 bp, Homo sapien
ttaaggacttcatgggaaggagatg

SEQ ID NO: 4078954 - DNA, 25 bp, Homo sapien
tccttttatacctagagtgcttttg

SEQ ID NO: 4078955 - DNA, 25 bp, Homo sapien
tcgggcagcgcagtggaagggacgc

SEQ ID NO: 4078956 - DNA, 25 bp, Homo sapien
tatgctctgagtacgtttctttaaa

SEQ ID NO: 4078957 - DNA, 25 bp, Homo sapien
ctgcacctggtggactggattcttt

SEQ ID NO: 4078958 - DNA, 25 bp, Homo sapien
taaagcaaacccatagttttgaatc

SEQ ID NO: 4078959 - DNA, 25 bp, Homo sapien
ggtggactggattcttttaaagcaa

SEQ ID NO: 4078960 - DNA, 25 bp, Homo sapien
tggtgaaactcatggtcccgaccgt

SEQ ID NO: 4078961 - DNA, 25 bp, Homo sapien
agggacagccgtgctttcagcgcag

SEQ ID NO: 4078962 - DNA, 25 bp, Homo sapien
gaccaaactgggaatcggagctgct

SEQ ID NO: 4078963 - DNA, 25 bp, Homo sapien
gtagacgctcgtccaacagaaataa

SEQ ID NO: 4078964 - DNA, 25 bp, Homo sapien
gaaccctcagtagctgtcgctggtg

SEQ ID NO: 4078965 - DNA, 25 bp, Homo sapien
aattaagcgtcctcgggattctcag

SEQ ID NO: 4078966 - DNA, 25 bp, Homo sapien
tgtcgagttagctcgttgccccgcg

SEQ ID NO: 4078967 - DNA, 25 bp, Homo sapien
gagcacttggatgtggccatctcgc

SEQ ID NO: 4078968 - DNA, 25 bp, Homo sapien
tcctgtggctccctcggaatgctaa

SEQ ID NO: 4078969 - DNA, 25 bp, Homo sapien
gagccgattgtcctatctccagcgg

SEQ ID NO: 4078970 - DNA, 25 bp, Homo sapien
ggatcggacatgaaaggaccctgtg

SEQ ID NO: 4078971 - DNA, 25 bp, Homo sapien
ttcccagggttatagacagtcgttc

SEQ ID NO: 4078972 - DNA, 25 bp, Homo sapien
cggaccatcggcatttctgtggatc

SEQ ID NO: 4078973 - DNA, 25 bp, Homo sapien
gaggcggaacaagtccacggagtcc

SEQ ID NO: 4078974 - DNA, 25 bp, Homo sapien
gcggaacaagtccacggagtccctg

SEQ ID NO: 4078975 - DNA, 25 bp, Homo sapien
gaaggtggcccggaccatcggcatt

SEQ ID NO: 4078976 - DNA, 25 bp, Homo sapien
tgaccggaccggtcatgcccgtccg

SEQ ID NO: 4078977 - DNA, 25 bp, Homo sapien
tgaagaactgaaactggccacccag

SEQ ID NO: 4078978 - DNA, 25 bp, Homo sapien
gaactgaaactggccacccagctga

SEQ ID NO: 4078979 - DNA, 25 bp, Homo sapien
cagctgaccggaccggtcatgcccg

SEQ ID NO: 4078980 - DNA, 25 bp, Homo sapien
caaggttgggctggtgctcacagct

SEQ ID NO: 4078981 - DNA, 25 bp, Homo sapien
tgtgtttcgtgggaacaactgggcc

SEQ ID NO: 4078982 - DNA, 25 bp, Homo sapien
taagcttgttgtgcccggtaaccat

SEQ ID NO: 4078983 - DNA, 25 bp, Homo sapien
gaatcagtcggcagtcatgctgggt

SEQ ID NO: 4078984 - DNA, 25 bp, Homo sapien
tattatgcagtagtttcgaccctgg

SEQ ID NO: 4078985 - DNA, 25 bp, Homo sapien
gttgtaacacgtgtacctcgcccat

SEQ ID NO: 4078986 - DNA, 25 bp, Homo sapien
catccaggcgtagtttcatttggaa

SEQ ID NO: 4078987 - DNA, 25 bp, Homo sapien
catttggaatctggttatcctgtag

SEQ ID NO: 4078988 - DNA, 25 bp, Homo sapien
tgacacggaacatctcacccgtcac

SEQ ID NO: 4078989 - DNA, 25 bp, Homo sapien
acccgtcacacggaacatcccatca

SEQ ID NO: 4078990 - DNA, 25 bp, Homo sapien
ggaacatctcacccgtcacacggaa

SEQ ID NO: 4078991 - DNA, 25 bp, Homo sapien
tcacccgctgacacggaacatctca

SEQ ID NO: 4078992 - DNA, 25 bp, Homo sapien
atcacacggaacatcccgtcacccg

SEQ ID NO: 4078993 - DNA, 25 bp, Homo sapien
acccatcacacggaacatcccgtca

SEQ ID NO: 4078994 - DNA, 25 bp, Homo sapien
cacccgtcacatggaacatcccatc

SEQ ID NO: 4078995 - DNA, 25 bp, Homo sapien
acccgtcacatggaacatcccatca

SEQ ID NO: 4078996 - DNA, 25 bp, Homo sapien
atcacacggaacatcccgtcacccg

SEQ ID NO: 4078997 - DNA, 25 bp, Homo sapien
acccatcacacggaacatcccgtca

SEQ ID NO: 4078998 - DNA, 25 bp, Homo sapien
cacccgtcacatggaacatcccatc

SEQ ID NO: 4078999 - DNA, 25 bp, Homo sapien
acccgtcacatggaacatcccatca

SEQ ID NO: 4079000 - DNA, 25 bp, Homo sapien
acccatcacatggaacatcccgtca

SEQ ID NO: 4079001 - DNA, 25 bp, Homo sapien
catcacatggaacatcccgtcaccc

SEQ ID NO: 4079002 - DNA, 25 bp, Homo sapien
acccatcacacggaacatcccgtca

SEQ ID NO: 4079003 - DNA, 25 bp, Homo sapien
atcacacggaacatcccgtcacccg

SEQ ID NO: 4079004 - DNA, 25 bp, Homo sapien
gtcacctgtaacacggaacatcctg

SEQ ID NO: 4079005 - DNA, 25 bp, Homo sapien
tcacatggaacatcccgtcacctgt

SEQ ID NO: 4079006 - DNA, 25 bp, Homo sapien
cagaacatctcacccatcacatgga

SEQ ID NO: 4079007 - DNA, 25 bp, Homo sapien
ggaacatcccgtaacccatcacatg

SEQ ID NO: 4079008 - DNA, 25 bp, Homo sapien
cccgtcacatggaacatctcaccaa

SEQ ID NO: 4079009 - DNA, 25 bp, Homo sapien
cccgcctggttcgtctcttctggaa

SEQ ID NO: 4079010 - DNA, 25 bp, Homo sapien
tccccgcctggttcgtctcttctgg

SEQ ID NO: 4079011 - DNA, 25 bp, Homo sapien
gcctggttcgtctcttctggaattc

SEQ ID NO: 4079012 - DNA, 25 bp, Homo sapien
cagctccccgcctggttcgtctctt

SEQ ID NO: 4079013 - DNA, 25 bp, Homo sapien
tgcctgaaattgaccacggcagacg

SEQ ID NO: 4079014 - DNA, 25 bp, Homo sapien
cccaggtgttgactggtgcctgaaa

SEQ ID NO: 4079015 - DNA, 25 bp, Homo sapien
ttacaaggccggagaggcagccctt

SEQ ID NO: 4079016 - DNA, 25 bp, Homo sapien
tggaaggccgttctgttacaaggcc

SEQ ID NO: 4079017 - DNA, 25 bp, Homo sapien
atgtcaccaggtggacgtcggtgtc

SEQ ID NO: 4079018 - DNA, 25 bp, Homo sapien
gcaatgtcaccaggtggacgtcggt

SEQ ID NO: 4079019 - DNA, 25 bp, Homo sapien
acttgggcaatgtcaccaggtggac

SEQ ID NO: 4079020 - DNA, 25 bp, Homo sapien
tgggcaatgtcaccaggtggacgtc

SEQ ID NO: 4079021 - DNA, 25 bp, Homo sapien
ctgggactggaagttacgtgcgtcc

SEQ ID NO: 4079022 - DNA, 25 bp, Homo sapien
tcctgggcgcgcatgttccctggca

SEQ ID NO: 4079023 - DNA, 25 bp, Homo sapien
cacgtccctgtctactgcgtcctct

SEQ ID NO: 4079024 - DNA, 25 bp, Homo sapien
aagttacgtgcgtcctgccagggct

SEQ ID NO: 4079025 - DNA, 25 bp, Homo sapien
tatcatccgaaatggccacggtggc

SEQ ID NO: 4079026 - DNA, 25 bp, Homo sapien
tgtgcgtttactcatcccgtgggaa

SEQ ID NO: 4079027 - DNA, 25 bp, Homo sapien
cgtatctgaccgtgtgggcttgcga

SEQ ID NO: 4079028 - DNA, 25 bp, Homo sapien
cacatgtctgttctaggtacgcgga

SEQ ID NO: 4079029 - DNA, 25 bp, Homo sapien
ttcgtcttgagatgcacacagggca

SEQ ID NO: 4079030 - DNA, 25 bp, Homo sapien
catatgggcctccaagggttcgtct

SEQ ID NO: 4079031 - DNA, 25 bp, Homo sapien
ccaggccgaccacagggacagacgt

SEQ ID NO: 4079032 - DNA, 25 bp, Homo sapien
gggctcagtgccttcccatatgggc

SEQ ID NO: 4079033 - DNA, 25 bp, Homo sapien
agaatgagcatagccatctgcccag

SEQ ID NO: 4079034 - DNA, 25 bp, Homo sapien
ccaaggctccaaagcaaagcttgag

SEQ ID NO: 4079035 - DNA, 25 bp, Homo sapien
taagcagagaactgaacatgggaga

SEQ ID NO: 4079036 - DNA, 25 bp, Homo sapien
cagcccctagcagtgaacactccag

SEQ ID NO: 4079037 - DNA, 25 bp, Homo sapien
gctggagggaaccacgtctaggacc

SEQ ID NO: 4079038 - DNA, 25 bp, Homo sapien
ggagaaaggtgaatgggcccctctc

SEQ ID NO: 4079039 - DNA, 25 bp, Homo sapien
cccacgatggacagaaggacgttct

SEQ ID NO: 4079040 - DNA, 25 bp, Homo sapien
tccccaaggctgttacccacgatgg

SEQ ID NO: 4079041 - DNA, 25 bp, Homo sapien
caaaacctggaagcctcaagacaat

SEQ ID NO: 4079042 - DNA, 25 bp, Homo sapien
gaaggcacccagttgtttacagatg

SEQ ID NO: 4079043 - DNA, 25 bp, Homo sapien
gccacaatggcaggttttcctcaca

SEQ ID NO: 4079044 - DNA, 25 bp, Homo sapien
aaaaccaaacgcagtgagcccacgt

SEQ ID NO: 4079045 - DNA, 25 bp, Homo sapien
tccctgtcgaggagacaaacagcac

SEQ ID NO: 4079046 - DNA, 25 bp, Homo sapien
tgagtgacggttctgtccccatgga

SEQ ID NO: 4079047 - DNA, 25 bp, Homo sapien
tgctgggtgaaagtccacagggccc

SEQ ID NO: 4079048 - DNA, 25 bp, Homo sapien
accaggacagcgttgggtggcacct

SEQ ID NO: 4079049 - DNA, 25 bp, Homo sapien
ggcagaggcggtgcacaccggcggg

SEQ ID NO: 4079050 - DNA, 25 bp, Homo sapien
tcagcacaaaggcaagacgcggtgg

SEQ ID NO: 4079051 - DNA, 25 bp, Homo sapien
tgagagacgcagagtggctgccggc

SEQ ID NO: 4079052 - DNA, 25 bp, Homo sapien
cagccccgcggggtcagcacaaagg

SEQ ID NO: 4079053 - DNA, 25 bp, Homo sapien
cagagctctcgcccacggcagaggc

SEQ ID NO: 4079054 - DNA, 25 bp, Homo sapien
acagagctctcgcccacggcagagg

SEQ ID NO: 4079055 - DNA, 25 bp, Homo sapien
gcacagagctctcgcccacggcaga

SEQ ID NO: 4079056 - DNA, 25 bp, Homo sapien
ccaggccattctcctcggcgatctg

SEQ ID NO: 4079057 - DNA, 25 bp, Homo sapien
gcttcacaagggtacgactgcactt

SEQ ID NO: 4079058 - DNA, 25 bp, Homo sapien
caagggtacgactgcacttttcgtt

SEQ ID NO: 4079059 - DNA, 25 bp, Homo sapien
actcagcttcacaagggtacgactg

SEQ ID NO: 4079060 - DNA, 25 bp, Homo sapien
acttttcgttccctcacacagccag

SEQ ID NO: 4079061 - DNA, 25 bp, Homo sapien
cagccccaccctctgactgtgccat

SEQ ID NO: 4079062 - DNA, 25 bp, Homo sapien
cacccagccccaccctctgactgtg

SEQ ID NO: 4079063 - DNA, 25 bp, Homo sapien
ttccaccaggagcctttcctgcccc

SEQ ID NO: 4079064 - DNA, 25 bp, Homo sapien
cttccaccaggagcctttcctgccc

SEQ ID NO: 4079065 - DNA, 25 bp, Homo sapien
acaggtatgcagagacagcacgtca

SEQ ID NO: 4079066 - DNA, 25 bp, Homo sapien
gcccacacacgctccttgtccccag

SEQ ID NO: 4079067 - DNA, 25 bp, Homo sapien
gacagcacgtcagcctgtgagccac

SEQ ID NO: 4079068 - DNA, 25 bp, Homo sapien
tgagctgcccacacacgctccttgt

SEQ ID NO: 4079069 - DNA, 25 bp, Homo sapien
tcacctgggccatattcttggtcac

SEQ ID NO: 4079070 - DNA, 25 bp, Homo sapien
ctgctgctcgaacctgtccatcact

SEQ ID NO: 4079071 - DNA, 25 bp, Homo sapien
tgtatggacgtccaggttctgcacc

SEQ ID NO: 4079072 - DNA, 25 bp, Homo sapien
gcacctgctgctcgaacctgtccat

SEQ ID NO: 4079073 - DNA, 25 bp, Homo sapien
gacggaaaaggccatggagacccag

SEQ ID NO: 4079074 - DNA, 25 bp, Homo sapien
tcgacggaaaaggccatggagaccc

SEQ ID NO: 4079075 - DNA, 25 bp, Homo sapien
aaggccgccgacgtggggtctccag

SEQ ID NO: 4079076 - DNA, 25 bp, Homo sapien
cggaaaaggccatggagacccagtg

SEQ ID NO: 4079077 - DNA, 25 bp, Homo sapien
cttggaggccactgcgtctacgcgg

SEQ ID NO: 4079078 - DNA, 25 bp, Homo sapien
ggacgccatccgaagccagttcaca

SEQ ID NO: 4079079 - DNA, 25 bp, Homo sapien
ggatggcgttctcggcatacacacg

SEQ ID NO: 4079080 - DNA, 25 bp, Homo sapien
cacaccttcgttcttcttgcggatg

SEQ ID NO: 4079081 - DNA, 25 bp, Homo sapien
cttcttcactttggcctgctccgcc

SEQ ID NO: 4079082 - DNA, 25 bp, Homo sapien
tcactttggcctgctccgccttgga

SEQ ID NO: 4079083 - DNA, 25 bp, Homo sapien
gctccgccttggagtccttctccgc

SEQ ID NO: 4079084 - DNA, 25 bp, Homo sapien
tgctccgccttggagtccttctccg

SEQ ID NO: 4079085 - DNA, 25 bp, Homo sapien
gggtgaacggccattcggtacatac

SEQ ID NO: 4079086 - DNA, 25 bp, Homo sapien
agggctggggtgaacggccattcgg

SEQ ID NO: 4079087 - DNA, 25 bp, Homo sapien
tggcttatactatctgtcctcacca

SEQ ID NO: 4079088 - DNA, 25 bp, Homo sapien
ctggggtgaacggccattcggtaca

SEQ ID NO: 4079089 - DNA, 25 bp, Homo sapien
aaaggccgaacaggcatcgcacagt

SEQ ID NO: 4079090 - DNA, 25 bp, Homo sapien
aaagggcgcctgacgctgaggagtg

SEQ ID NO: 4079091 - DNA, 25 bp, Homo sapien
gagaatggacgcaaagagctgctgt

SEQ ID NO: 4079092 - DNA, 25 bp, Homo sapien
tgacccgacattccaagtcccgaaa

SEQ ID NO: 4079093 - DNA, 25 bp, Homo sapien
cgggttgagatttggggatggaggc

SEQ ID NO: 4079094 - DNA, 25 bp, Homo sapien
ggttgagatttggggatggaggccc

SEQ ID NO: 4079095 - DNA, 25 bp, Homo sapien
atcgggggtcggggatcgaggcctg

SEQ ID NO: 4079096 - DNA, 25 bp, Homo sapien
tgagatttggggatggaggccccgg

SEQ ID NO: 4079097 - DNA, 25 bp, Homo sapien
acttccggtcgcacgggatgctctc

SEQ ID NO: 4079098 - DNA, 25 bp, Homo sapien
ggtcgccatggtgacgcacgccgct

SEQ ID NO: 4079099 - DNA, 25 bp, Homo sapien
ggcggcgatcgaaccgaccaagctg

SEQ ID NO: 4079100 - DNA, 25 bp, Homo sapien
aatgacaggagcagcactcggagag

SEQ ID NO: 4079101 - DNA, 25 bp, Homo sapien
aagcaattctacctcggcctccgga

SEQ ID NO: 4079102 - DNA, 25 bp, Homo sapien
aattctacctcggcctccggagtag

SEQ ID NO: 4079103 - DNA, 25 bp, Homo sapien
atccgcttgcctcaaactcccgatc

SEQ ID NO: 4079104 - DNA, 25 bp, Homo sapien
gatccgcttgcctcaaactcccgat

SEQ ID NO: 4079105 - DNA, 25 bp, Homo sapien
tggtagatacgtggtttctccatgt

SEQ ID NO: 4079106 - DNA, 25 bp, Homo sapien
tgagccaccgcacccagccttatgg

SEQ ID NO: 4079107 - DNA, 25 bp, Homo sapien
agccaccgcacccagccttatggcc

SEQ ID NO: 4079108 - DNA, 25 bp, Homo sapien
ttttggtagatacgtggtttctcca

SEQ ID NO: 4079109 - DNA, 25 bp, Homo sapien
gaatgggagaccagaatttgatgat

SEQ ID NO: 4079110 - DNA, 25 bp, Homo sapien
ttggagccgtaggtatcagacatgc

SEQ ID NO: 4079111 - DNA, 25 bp, Homo sapien
catcgtagggtgtgagacaggatcc

SEQ ID NO: 4079112 - DNA, 25 bp, Homo sapien
ccgtgtgctgaaccgcttctgggtg

SEQ ID NO: 4079113 - DNA, 25 bp, Homo sapien
aaggcagcttgaaggctaaaggtca

SEQ ID NO: 4079114 - DNA, 25 bp, Homo sapien
acaatagcattgttatctgcaggac

SEQ ID NO: 4079115 - DNA, 25 bp, Homo sapien
atacaatttttgtggccgggctcgg

SEQ ID NO: 4079116 - DNA, 25 bp, Homo sapien
gctacatcagatcttccccaattgg

SEQ ID NO: 4079117 - DNA, 25 bp, Homo sapien
tgtgcctggtcacaacacctgcatt

SEQ ID NO: 4079118 - DNA, 25 bp, Homo sapien
ggacttcagaggaacacagcctacg

SEQ ID NO: 4079119 - DNA, 25 bp, Homo sapien
tcacgcctgcctgctgtgtatggac

SEQ ID NO: 4079120 - DNA, 25 bp, Homo sapien
aatctgaatggagtctaggtctggc

SEQ ID NO: 4079121 - DNA, 25 bp, Homo sapien
gtttctttaattcctctagcgccgc

SEQ ID NO: 4079122 - DNA, 25 bp, Homo sapien
tttaattcctctagcgccgctgggt

SEQ ID NO: 4079123 - DNA, 25 bp, Homo sapien
agcgccgctgggttagggtctccac

SEQ ID NO: 4079124 - DNA, 25 bp, Homo sapien
cctatatttctgtgtgtgtttcttt

SEQ ID NO: 4079125 - DNA, 25 bp, Homo sapien
cagtgggcagtggtttgggcccgac

SEQ ID NO: 4079126 - DNA, 25 bp, Homo sapien
tcccgcagtgggcagtggtttgggc

SEQ ID NO: 4079127 - DNA, 25 bp, Homo sapien
gagctggtcccgcagtgggcagtgg

SEQ ID NO: 4079128 - DNA, 25 bp, Homo sapien
ccgcagtgggcagtggtttgggccc

SEQ ID NO: 4079129 - DNA, 25 bp, Homo sapien
tggtttgggcccgaccgagctggtc

SEQ ID NO: 4079130 - DNA, 25 bp, Homo sapien
gctggtctcgcagtgggcggtggtt

SEQ ID NO: 4079131 - DNA, 25 bp, Homo sapien
gcagtgggcggtggtttgggcccga

SEQ ID NO: 4079132 - DNA, 25 bp, Homo sapien
tcgcagtgggcggtggtttgggccc

SEQ ID NO: 4079133 - DNA, 25 bp, Homo sapien
cgagctggtctcgcagtgggcggtg

SEQ ID NO: 4079134 - DNA, 25 bp, Homo sapien
gccagattagaggacatgctggctg

SEQ ID NO: 4079135 - DNA, 25 bp, Homo sapien
tcgactggatttcaacagtgaagcc

SEQ ID NO: 4079136 - DNA, 25 bp, Homo sapien
gtttgggccctgcttgctcgactgg

SEQ ID NO: 4079137 - DNA, 25 bp, Homo sapien
gacctggaccaatggtgcttcctaa

SEQ ID NO: 4079138 - DNA, 25 bp, Homo sapien
gctgcccgggcttcaccctaaaata

SEQ ID NO: 4079139 - DNA, 25 bp, Homo sapien
gcagtcggagccgatccctggagcc

SEQ ID NO: 4079140 - DNA, 25 bp, Homo sapien
ttcacctgggtaatcgccgtggcct

SEQ ID NO: 4079141 - DNA, 25 bp, Homo sapien
aataaggcccgaactgcagcagtcg

SEQ ID NO: 4079142 - DNA, 25 bp, Homo sapien
ttcaccagcgtttaatgtgctctga

SEQ ID NO: 4079143 - DNA, 25 bp, Homo sapien
ccagggtcagggagttgtgggccca

SEQ ID NO: 4079144 - DNA, 25 bp, Homo sapien
tgtgctctgatgttgaccgtccctc

SEQ ID NO: 4079145 - DNA, 25 bp, Homo sapien
gcagcagtgacgctcagggccttcc

SEQ ID NO: 4079146 - DNA, 25 bp, Homo sapien
cagagccccgcagattggctccagc

SEQ ID NO: 4079147 - DNA, 25 bp, Homo sapien
tcagccgtgcacccggcagagcccc

SEQ ID NO: 4079148 - DNA, 25 bp, Homo sapien
ccggcagagccccgcagattggctc

SEQ ID NO: 4079149 - DNA, 25 bp, Homo sapien
agccccgcagattggctccagcaga

SEQ ID NO: 4079150 - DNA, 25 bp, Homo sapien
tggagccttccatatacagagagtc

SEQ ID NO: 4079151 - DNA, 25 bp, Homo sapien
cactcgtgtggagaatccctgggac

SEQ ID NO: 4079152 - DNA, 25 bp, Homo sapien
acatgtgggcatgcgtctgggttcc

SEQ ID NO: 4079153 - DNA, 25 bp, Homo sapien
caacaggcccttgaggacactcgtg

SEQ ID NO: 4079154 - DNA, 25 bp, Homo sapien
tccaaggccccatatggtgggctgc

SEQ ID NO: 4079155 - DNA, 25 bp, Homo sapien
gggctccgagacagacctataggct

SEQ ID NO: 4079156 - DNA, 25 bp, Homo sapien
gcaagtcccggtataagtccagtgg

SEQ ID NO: 4079157 - DNA, 25 bp, Homo sapien
tctgtgcacgctgtagccacaagcg

SEQ ID NO: 4079158 - DNA, 25 bp, Homo sapien
tctgagagcacacccttcagcacgt

SEQ ID NO: 4079159 - DNA, 25 bp, Homo sapien
gaggaggtcgtctgagagcacaccc

SEQ ID NO: 4079160 - DNA, 25 bp, Homo sapien
tgtctctgcgtacgtagcccatctt

SEQ ID NO: 4079161 - DNA, 25 bp, Homo sapien
gagccgatggctgtctctgcgtacg

SEQ ID NO: 4079162 - DNA, 25 bp, Homo sapien
ggtctctaaccaaagctagacaggt

SEQ ID NO: 4079163 - DNA, 25 bp, Homo sapien
tgaagagcccctgtactgagaaatt

SEQ ID NO: 4079164 - DNA, 25 bp, Homo sapien
tagttttgaatgtacttgcccaggt

SEQ ID NO: 4079165 - DNA, 25 bp, Homo sapien
gacaggtagcctcttaaacgtgttg

SEQ ID NO: 4079166 - DNA, 25 bp, Homo sapien
taaaggagctcaggacaatcactgc

SEQ ID NO: 4079167 - DNA, 25 bp, Homo sapien
cagcagaactaagtccaaaccaggg

SEQ ID NO: 4079168 - DNA, 25 bp, Homo sapien
cctctggccccatgaactggactgt

SEQ ID NO: 4079169 - DNA, 25 bp, Homo sapien
agctaatttggccaagtcctcgcgg

SEQ ID NO: 4079170 - DNA, 25 bp, Homo sapien
ggtagtcctcggacagcgagctgct

SEQ ID NO: 4079171 - DNA, 25 bp, Homo sapien
tgagcagagccagcgcgtcgtcctg

SEQ ID NO: 4079172 - DNA, 25 bp, Homo sapien
gagctccagaagctcgaaggcgcga

SEQ ID NO: 4079173 - DNA, 25 bp, Homo sapien
cgtgcaggtcgaagtcctccaccag

SEQ ID NO: 4079174 - DNA, 25 bp, Homo sapien
tagagacgcgcttccgcccgctgag

SEQ ID NO: 4079175 - DNA, 25 bp, Homo sapien
ccttcgcccggcagatggagctgcg

SEQ ID NO: 4079176 - DNA, 25 bp, Homo sapien
ggttatcgaccgcacccttctctag

SEQ ID NO: 4079177 - DNA, 25 bp, Homo sapien
tggagctgcggatcccgcgggtgac

SEQ ID NO: 4079178 - DNA, 25 bp, Homo sapien
agcggtctccggccgccgcggatca

SEQ ID NO: 4079179 - DNA, 25 bp, Homo sapien
ctgtccccagcggtctccggccgcc

SEQ ID NO: 4079180 - DNA, 25 bp, Homo sapien
cgccgcggatcagttcgggcctccc

SEQ ID NO: 4079181 - DNA, 25 bp, Homo sapien
ccgccgcggatcagttcgggcctcc

SEQ ID NO: 4079182 - DNA, 25 bp, Homo sapien
ctggagagcacaccacagtggacaa

SEQ ID NO: 4079183 - DNA, 25 bp, Homo sapien
caagagggctgacccttgggctgca

SEQ ID NO: 4079184 - DNA, 25 bp, Homo sapien
gtcctcagtagatcccatggctcca

SEQ ID NO: 4079185 - DNA, 25 bp, Homo sapien
cccagggtcccggaatgttcacagc

SEQ ID NO: 4079186 - DNA, 25 bp, Homo sapien
agcagctccacgtagctcagggcac

SEQ ID NO: 4079187 - DNA, 25 bp, Homo sapien
caggggcagccggtgtcatctgaac

SEQ ID NO: 4079188 - DNA, 25 bp, Homo sapien
ctgaacgaacagaaggatacccccg

SEQ ID NO: 4079189 - DNA, 25 bp, Homo sapien
cccggccctccagaaggtagtgtct

SEQ ID NO: 4079190 - DNA, 25 bp, Homo sapien
ggcagccggtgtcatctgaacgaac

SEQ ID NO: 4079191 - DNA, 25 bp, Homo sapien
agggccgcgcactccgacaccagct

SEQ ID NO: 4079192 - DNA, 25 bp, Homo sapien
ccagctgagggaggccgctcctcag

SEQ ID NO: 4079193 - DNA, 25 bp, Homo sapien
ccctcgtggatgaactcctccaggg

SEQ ID NO: 4079194 - DNA, 25 bp, Homo sapien
ctcctcagcaccacgaaggacagga

SEQ ID NO: 4079195 - DNA, 25 bp, Homo sapien
gggcagtagtcttccgcacagacac

SEQ ID NO: 4079196 - DNA, 25 bp, Homo sapien
gacacagatgatccgcagggtccgc

SEQ ID NO: 4079197 - DNA, 25 bp, Homo sapien
cagacacagatgatccgcagggtcc

SEQ ID NO: 4079198 - DNA, 25 bp, Homo sapien
tggggtggggcagtagtcttccgca

SEQ ID NO: 4079199 - DNA, 25 bp, Homo sapien
cagcctcccgggctcggtgcacgct

SEQ ID NO: 4079200 - DNA, 25 bp, Homo sapien
tccaggaccagcagtccgagctcct

SEQ ID NO: 4079201 - DNA, 25 bp, Homo sapien
gggtgcattcctgtagagctccatg

SEQ ID NO: 4079202 - DNA, 25 bp, Homo sapien
tgggccgccgcgcagtaggggtagc

SEQ ID NO: 4079203 - DNA, 25 bp, Homo sapien
agaaaaagggttcctcaatgcaggc

SEQ ID NO: 4079204 - DNA, 25 bp, Homo sapien
gggagaaaaagggttcctcaatgca

SEQ ID NO: 4079205 - DNA, 25 bp, Homo sapien
ccttggaggcagctgtgtttaggcc

SEQ ID NO: 4079206 - DNA, 25 bp, Homo sapien
cgaaggccagaagggtcagcgagag

SEQ ID NO: 4079207 - DNA, 25 bp, Homo sapien
ggcattgtggatctcctccaccgcg

SEQ ID NO: 4079208 - DNA, 25 bp, Homo sapien
ctacggcattgtggatctcctccac

SEQ ID NO: 4079209 - DNA, 25 bp, Homo sapien
cattgtggatctcctccaccgcggt

SEQ ID NO: 4079210 - DNA, 25 bp, Homo sapien
acggcattgtggatctcctccaccg

SEQ ID NO: 4079211 - DNA, 25 bp, Homo sapien
gatacagggcgctgtacacggagca

SEQ ID NO: 4079212 - DNA, 25 bp, Homo sapien
tgctctgctcacggcgggatacagg

SEQ ID NO: 4079213 - DNA, 25 bp, Homo sapien
ctcgaacgagctgtccttgtctggc

SEQ ID NO: 4079214 - DNA, 25 bp, Homo sapien
tgcaatggaggctctgcgagggccg

SEQ ID NO: 4079215 - DNA, 25 bp, Homo sapien
gtcccccggattcctcttgagcttg

SEQ ID NO: 4079216 - DNA, 25 bp, Homo sapien
caggctggtcacgagtgacaggtcc

SEQ ID NO: 4079217 - DNA, 25 bp, Homo sapien
ggctggtcacgagtgacaggtcccc

SEQ ID NO: 4079218 - DNA, 25 bp, Homo sapien
acaggtcccccggattcctcttgag

SEQ ID NO: 4079219 - DNA, 25 bp, Homo sapien
tggcggcgtaaagggcccgctgctc

SEQ ID NO: 4079220 - DNA, 25 bp, Homo sapien
tcagggcgacttggctgcaaaacct

SEQ ID NO: 4079221 - DNA, 25 bp, Homo sapien
gtcctgttcgtactccaggatggcg

SEQ ID NO: 4079222 - DNA, 25 bp, Homo sapien
caggatggcggcgtaaagggcccgc

SEQ ID NO: 4079223 - DNA, 25 bp, Homo sapien
agccgcagccggcgctcctccatct

SEQ ID NO: 4079224 - DNA, 25 bp, Homo sapien
ctgttggcggcctcctggagccgca

SEQ ID NO: 4079225 - DNA, 25 bp, Homo sapien
tggagccgcagccggcgctcctcca

SEQ ID NO: 4079226 - DNA, 25 bp, Homo sapien
cgcagccggcgctcctccatctttc

SEQ ID NO: 4079227 - DNA, 25 bp, Homo sapien
gtcccagggacctcctctcggtgag

SEQ ID NO: 4079228 - DNA, 25 bp, Homo sapien
cccagggacctcctctcggtgaggg

SEQ ID NO: 4079229 - DNA, 25 bp, Homo sapien
gggctgtccccaggtaaggcttctg

SEQ ID NO: 4079230 - DNA, 25 bp, Homo sapien
acgtcccagggacctcctctcggtg

SEQ ID NO: 4079231 - DNA, 25 bp, Homo sapien
cccggaacctccgctcccctcgctg

SEQ ID NO: 4079232 - DNA, 25 bp, Homo sapien
cccttctctgcccttggctcaaggc

SEQ ID NO: 4079233 - DNA, 25 bp, Homo sapien
gcccccttctctgcccttggctcaa

SEQ ID NO: 4079234 - DNA, 25 bp, Homo sapien
cggaacctccgctcccctcgctgcc

SEQ ID NO: 4079235 - DNA, 25 bp, Homo sapien
tggcaatcactaggttctccatcat

SEQ ID NO: 4079236 - DNA, 25 bp, Homo sapien
tttggcaatcactaggttctccatc

SEQ ID NO: 4079237 - DNA, 25 bp, Homo sapien
ggctttggcaatcactaggttctcc

SEQ ID NO: 4079238 - DNA, 25 bp, Homo sapien
cccgggctttggcaatcactaggtt

SEQ ID NO: 4079239 - DNA, 25 bp, Homo sapien
tggctggggtctagccgcgccattc

SEQ ID NO: 4079240 - DNA, 25 bp, Homo sapien
gggtctagccgcgccattcgggcct

SEQ ID NO: 4079241 - DNA, 25 bp, Homo sapien
gccattcgggcctcatacgcagcct

SEQ ID NO: 4079242 - DNA, 25 bp, Homo sapien
gggcctcatacgcagccttcagctt

SEQ ID NO: 4079243 - DNA, 25 bp, Homo sapien
tcaacctgtcaggctcaagtgagcc

SEQ ID NO: 4079244 - DNA, 25 bp, Homo sapien
ctgcaccctcaacctgtcaggctca

SEQ ID NO: 4079245 - DNA, 25 bp, Homo sapien
caggggcacaccactatgcctaatt

SEQ ID NO: 4079246 - DNA, 25 bp, Homo sapien
acaggggcacaccactatgcctaat

SEQ ID NO: 4079247 - DNA, 25 bp, Homo sapien
tcatcggagtatacacggcggtgtc

SEQ ID NO: 4079248 - DNA, 25 bp, Homo sapien
ttcctccttcatcggagtatacacg

SEQ ID NO: 4079249 - DNA, 25 bp, Homo sapien
tctggaagatctcgggtggcagaaa

SEQ ID NO: 4079250 - DNA, 25 bp, Homo sapien
catggttggcttcaggcgtgttttc

SEQ ID NO: 4079251 - DNA, 25 bp, Homo sapien
gggtcaagcggtgggccacatccca

SEQ ID NO: 4079252 - DNA, 25 bp, Homo sapien
accaggggtcaagcggtgggccaca

SEQ ID NO: 4079253 - DNA, 25 bp, Homo sapien
agatgcgggcttgggggatgcccca

SEQ ID NO: 4079254 - DNA, 25 bp, Homo sapien
tgcaagccatgggtaaccaggggtc

SEQ ID NO: 4079255 - DNA, 25 bp, Homo sapien
ttggcggccgtcgactgggccctct

SEQ ID NO: 4079256 - DNA, 25 bp, Homo sapien
agcttggcggccgtcgactgggccc

SEQ ID NO: 4079257 - DNA, 25 bp, Homo sapien
caagcttggcggccgtcgactgggc

SEQ ID NO: 4079258 - DNA, 25 bp, Homo sapien
gcttggcggccgtcgactgggccct

SEQ ID NO: 4079259 - DNA, 25 bp, Homo sapien
accgcgcccggctggctgagccgta

SEQ ID NO: 4079260 - DNA, 25 bp, Homo sapien
ccgcgcccggctggctgagccgtac

SEQ ID NO: 4079261 - DNA, 25 bp, Homo sapien
caccgcgcccggctggctgagccgt

SEQ ID NO: 4079262 - DNA, 25 bp, Homo sapien
gtaacacctgggagatatagtggat

SEQ ID NO: 4079263 - DNA, 25 bp, Homo sapien
ctttagtggtttccacttcttctag

SEQ ID NO: 4079264 - DNA, 25 bp, Homo sapien
ttagtggtttccacttcttctagta

SEQ ID NO: 4079265 - DNA, 25 bp, Homo sapien
cctgggagatatagtggatgctcct

SEQ ID NO: 4079266 - DNA, 25 bp, Homo sapien
gatacacccagagacattgagcctg

SEQ ID NO: 4079267 - DNA, 25 bp, Homo sapien
cagggacgagctggacctcattttc

SEQ ID NO: 4079268 - DNA, 25 bp, Homo sapien
aacacggttttctgcgcagggcaca

SEQ ID NO: 4079269 - DNA, 25 bp, Homo sapien
gaagtgactccattattccggccag

SEQ ID NO: 4079270 - DNA, 25 bp, Homo sapien
tctgcagcggcttcaccgtgccgtc

SEQ ID NO: 4079271 - DNA, 25 bp, Homo sapien
tggcaagcttcatggcgctctgcag

SEQ ID NO: 4079272 - DNA, 25 bp, Homo sapien
ccggttgccggtgtccagctcgatg

SEQ ID NO: 4079273 - DNA, 25 bp, Homo sapien
cagctcgatggccccgttggcaagc

SEQ ID NO: 4079274 - DNA, 25 bp, Homo sapien
ggcggcggtagccgaggggctggac

SEQ ID NO: 4079275 - DNA, 25 bp, Homo sapien
ggcgaccggaggcccggaacgcagc

SEQ ID NO: 4079276 - DNA, 25 bp, Homo sapien
ccggaggcccggaacgcagccggcg

SEQ ID NO: 4079277 - DNA, 25 bp, Homo sapien
cggcggtagccgaggggctggacgg

SEQ ID NO: 4079278 - DNA, 25 bp, Homo sapien
cgtctcccacggtaagaggcggtga

SEQ ID NO: 4079279 - DNA, 25 bp, Homo sapien
aagggcccctcacggagttgccatg

SEQ ID NO: 4079280 - DNA, 25 bp, Homo sapien
ttgccatgggcgtctaaccgcggca

SEQ ID NO: 4079281 - DNA, 25 bp, Homo sapien
cagcgctccattggcgacagaggcg

SEQ ID NO: 4079282 - DNA, 25 bp, Homo sapien
tgacttcagtggaaaccgctgcgca

SEQ ID NO: 4079283 - DNA, 25 bp, Homo sapien
cagaacaaaggtccagagggcaggt

SEQ ID NO: 4079284 - DNA, 25 bp, Homo sapien
tgcagactgagaggtcaacggcctt

SEQ ID NO: 4079285 - DNA, 25 bp, Homo sapien
accttggagttctagcgggcgtgcc

SEQ ID NO: 4079286 - DNA, 25 bp, Homo sapien
cttcattgcagggaggagcttccca

SEQ ID NO: 4079287 - DNA, 25 bp, Homo sapien
ccaagcccggatggaagaagaagct

SEQ ID NO: 4079288 - DNA, 25 bp, Homo sapien
taggttaaccgagacctgaagcagt

SEQ ID NO: 4079289 - DNA, 25 bp, Homo sapien
cgctgacggcatgaaggtgagcact

SEQ ID NO: 4079290 - DNA, 25 bp, Homo sapien
ctcagtcacgttggtagatgaaggc

SEQ ID NO: 4079291 - DNA, 25 bp, Homo sapien
gggtctttggtactcagtcacgttg

SEQ ID NO: 4079292 - DNA, 25 bp, Homo sapien
ctagagtagggcgtcagtgtgaatc

SEQ ID NO: 4079293 - DNA, 25 bp, Homo sapien
gctcatggggtctttggtactcagt

SEQ ID NO: 4079294 - DNA, 25 bp, Homo sapien
gaggcacgtgtggttctgccttttc

SEQ ID NO: 4079295 - DNA, 25 bp, Homo sapien
cccacgtggacaggcgggaggcacg

SEQ ID NO: 4079296 - DNA, 25 bp, Homo sapien
tggacaggcgggaggcacgtgtggt

SEQ ID NO: 4079297 - DNA, 25 bp, Homo sapien
aaacaagtgtatcttaaaaggcaag

SEQ ID NO: 4079298 - DNA, 25 bp, Homo sapien
tttgcagggctaacttcgggacttc

SEQ ID NO: 4079299 - DNA, 25 bp, Homo sapien
cttgtttgaaccacgtggacccaca

SEQ ID NO: 4079300 - DNA, 25 bp, Homo sapien
agagggctgccttttcctaagtgca

SEQ ID NO: 4079301 - DNA, 25 bp, Homo sapien
tggaaccagctgaggacaactgtat

SEQ ID NO: 4079302 - DNA, 25 bp, Homo sapien
gttttaccatattgattgggctggg

SEQ ID NO: 4079303 - DNA, 25 bp, Homo sapien
tttttccgggacagtctgtgtcgcc

SEQ ID NO: 4079304 - DNA, 25 bp, Homo sapien
gaaagatttccagagccagtacagc

SEQ ID NO: 4079305 - DNA, 25 bp, Homo sapien
gaacagcgtagagtaaaatgccaag

SEQ ID NO: 4079306 - DNA, 25 bp, Homo sapien
ggtatggacccctctcatatggaga

SEQ ID NO: 4079307 - DNA, 25 bp, Homo sapien
tatacaaccttagtgatacggcttc

SEQ ID NO: 4079308 - DNA, 25 bp, Homo sapien
gactttgcctgtgaccagtgtggcc

SEQ ID NO: 4079309 - DNA, 25 bp, Homo sapien
gatcttaataaacgaggccctcata

SEQ ID NO: 4079310 - DNA, 25 bp, Homo sapien
gctgatgaagccacgtgacagtgta

SEQ ID NO: 4079311 - DNA, 25 bp, Homo sapien
gaggtgcggaactatatctgtgacg

SEQ ID NO: 4079312 - DNA, 25 bp, Homo sapien
ccccactaaagcagtcgaggagatt

SEQ ID NO: 4079313 - DNA, 25 bp, Homo sapien
taaattatttacacgggagctgggc

SEQ ID NO: 4079314 - DNA, 25 bp, Homo sapien
tattttcccgcaaacgctgagtgac

SEQ ID NO: 4079315 - DNA, 25 bp, Homo sapien
tttttagtgcaacaagagctccatg

SEQ ID NO: 4079316 - DNA, 25 bp, Homo sapien
aggtcagcgtcaggggcagcctgct

SEQ ID NO: 4079317 - DNA, 25 bp, Homo sapien
gctgtctgctctggagggcggcgct

SEQ ID NO: 4079318 - DNA, 25 bp, Homo sapien
gatgaggctcctgggacaggtcagc

SEQ ID NO: 4079319 - DNA, 25 bp, Homo sapien
gtctgctctggagggcggcgctcac

SEQ ID NO: 4079320 - DNA, 25 bp, Homo sapien
tctgggtcgcagtccccacgatcag

SEQ ID NO: 4079321 - DNA, 25 bp, Homo sapien
ctgggtcgcagtccccacgatcagc

SEQ ID NO: 4079322 - DNA, 25 bp, Homo sapien
ctctgggtcgcagtccccacgatca

SEQ ID NO: 4079323 - DNA, 25 bp, Homo sapien
tagtcgagttgtattgccagccagg

SEQ ID NO: 4079324 - DNA, 25 bp, Homo sapien
cagaaatagtcgagttgtattgcca

SEQ ID NO: 4079325 - DNA, 25 bp, Homo sapien
gggctctggcagaaatagtcgagtt

SEQ ID NO: 4079326 - DNA, 25 bp, Homo sapien
ggcagctgtcaattctcatgtcccc

SEQ ID NO: 4079327 - DNA, 25 bp, Homo sapien
gagaagctctttttcgggcaccgag

SEQ ID NO: 4079328 - DNA, 25 bp, Homo sapien
agctctttttcgggcaccgaggtat

SEQ ID NO: 4079329 - DNA, 25 bp, Homo sapien
agaagctctttttcgggcaccgagg

SEQ ID NO: 4079330 - DNA, 25 bp, Homo sapien
aaaagacgagcttttgttatcagtt

SEQ ID NO: 4079331 - DNA, 25 bp, Homo sapien
ttgttatcagttccacggggttgcc

SEQ ID NO: 4079332 - DNA, 25 bp, Homo sapien
gcagcagaaaaagacgagcttttgt

SEQ ID NO: 4079333 - DNA, 25 bp, Homo sapien
cagaaaaagacgagcttttgttatc

SEQ ID NO: 4079334 - DNA, 25 bp, Homo sapien
aaacagggctggtgtgtcccccata

SEQ ID NO: 4079335 - DNA, 25 bp, Homo sapien
ccggaacattctttggcagaaggag

SEQ ID NO: 4079336 - DNA, 25 bp, Homo sapien
ccccatagtctgcatgctgtgccgg

SEQ ID NO: 4079337 - DNA, 25 bp, Homo sapien
catgctgtgccggaacattctttgg

SEQ ID NO: 4079338 - DNA, 25 bp, Homo sapien
tgagctccaggctcctgccagctgg

SEQ ID NO: 4079339 - DNA, 25 bp, Homo sapien
ggctcctgccagctggaggtgaaac

SEQ ID NO: 4079340 - DNA, 25 bp, Homo sapien
caggctcctgccagctggaggtgaa

SEQ ID NO: 4079341 - DNA, 25 bp, Homo sapien
ccttgagctccaggctcctgccagc

SEQ ID NO: 4079342 - DNA, 25 bp, Homo sapien
cagcaacatgcaggaaggcctcttc

SEQ ID NO: 4079343 - DNA, 25 bp, Homo sapien
gcaggaaggcctcttccctgatggc

SEQ ID NO: 4079344 - DNA, 25 bp, Homo sapien
tgcaggaaggcctcttccctgatgg

SEQ ID NO: 4079345 - DNA, 25 bp, Homo sapien
atgtccacagcaacatgcaggaagg

SEQ ID NO: 4079346 - DNA, 25 bp, Homo sapien
tgacaaatggctacagactgctgga

SEQ ID NO: 4079347 - DNA, 25 bp, Homo sapien
gacaaatggctacagactgctggaa

SEQ ID NO: 4079348 - DNA, 25 bp, Homo sapien
tggaaaggtagcaggtgatgccaag

SEQ ID NO: 4079349 - DNA, 25 bp, Homo sapien
aggtgatgccaagggatactgctca

SEQ ID NO: 4079350 - DNA, 25 bp, Homo sapien
gggaaacactgcccagccctgacca

SEQ ID NO: 4079351 - DNA, 25 bp, Homo sapien
tgaccagccctgtgggtggaggtac

SEQ ID NO: 4079352 - DNA, 25 bp, Homo sapien
cagccctgaccagccctgtgggtgg

SEQ ID NO: 4079353 - DNA, 25 bp, Homo sapien
ccctgaccagccctgtgggtggagg

SEQ ID NO: 4079354 - DNA, 25 bp, Homo sapien
gcctggtgtgctgatccggggccac

SEQ ID NO: 4079355 - DNA, 25 bp, Homo sapien
cctggtgtgctgatccggggccaca

SEQ ID NO: 4079356 - DNA, 25 bp, Homo sapien
aaagcgaaaggcagcagcctggtgt

SEQ ID NO: 4079357 - DNA, 25 bp, Homo sapien
gtaaaaagcgaaaggcagcagcctg

SEQ ID NO: 4079358 - DNA, 25 bp, Homo sapien
agaggcagtccccatgataggccca

SEQ ID NO: 4079359 - DNA, 25 bp, Homo sapien
ggttgaccagtgagccagtaaatta

SEQ ID NO: 4079360 - DNA, 25 bp, Homo sapien
tgcaacaccaagaagtggctcaggc

SEQ ID NO: 4079361 - DNA, 25 bp, Homo sapien
gatacccaggtacctgtcagcagct

SEQ ID NO: 4079362 - DNA, 25 bp, Homo sapien
taaccatttgcaagatgcctctgaa

SEQ ID NO: 4079363 - DNA, 25 bp, Homo sapien
aaaagagcggccctccgcatttgtg

SEQ ID NO: 4079364 - DNA, 25 bp, Homo sapien
aggaacctcaaggagggctcgttct

SEQ ID NO: 4079365 - DNA, 25 bp, Homo sapien
ctccgcatttgtgcctcagcagcgt

SEQ ID NO: 4079366 - DNA, 25 bp, Homo sapien
gcacaaacgtggaaagcctttggca

SEQ ID NO: 4079367 - DNA, 25 bp, Homo sapien
tcttctctaaacactcgaggattgc

SEQ ID NO: 4079368 - DNA, 25 bp, Homo sapien
agagtgccagccaggatatcttcct

SEQ ID NO: 4079369 - DNA, 25 bp, Homo sapien
tctgtcaactgaaagagtgccagcc

SEQ ID NO: 4079370 - DNA, 25 bp, Homo sapien
agcaggcccatcaaggagaagaaga

SEQ ID NO: 4079371 - DNA, 25 bp, Homo sapien
caggcccatcaaggagaagaagaaa

SEQ ID NO: 4079372 - DNA, 25 bp, Homo sapien
tcagatgtgacgacagcaggcccat

SEQ ID NO: 4079373 - DNA, 25 bp, Homo sapien
atttgaggtcagatgtgacgacagc

SEQ ID NO: 4079374 - DNA, 25 bp, Homo sapien
cctgacttgttgaatcgcaaagtgc

SEQ ID NO: 4079375 - DNA, 25 bp, Homo sapien
ctttagctgcttcctgatgttttct

SEQ ID NO: 4079376 - DNA, 25 bp, Homo sapien
cagcagctgagagccagtccgggtt

SEQ ID NO: 4079377 - DNA, 25 bp, Homo sapien
aatcgcaaagtgcagtgcagcagct

SEQ ID NO: 4079378 - DNA, 25 bp, Homo sapien
agcaggtcccgaagtgcatctgggc

SEQ ID NO: 4079379 - DNA, 25 bp, Homo sapien
caagccagggtgtttaggagatgac

SEQ ID NO: 4079380 - DNA, 25 bp, Homo sapien
tctattggccgttggagtgatctcg

SEQ ID NO: 4079381 - DNA, 25 bp, Homo sapien
caccaccacgagaactcggttcttt

SEQ ID NO: 4079382 - DNA, 25 bp, Homo sapien
tcgctggcaaactgccggccttctt

SEQ ID NO: 4079383 - DNA, 25 bp, Homo sapien
gcttctgcagttcccggggcagcgg

SEQ ID NO: 4079384 - DNA, 25 bp, Homo sapien
ggcaaactgccggccttcttgtagc

SEQ ID NO: 4079385 - DNA, 25 bp, Homo sapien
caaactgccggccttcttgtagctt

SEQ ID NO: 4079386 - DNA, 25 bp, Homo sapien
gagcagcacaggctccaggctcggc

SEQ ID NO: 4079387 - DNA, 25 bp, Homo sapien
tggcagtgtctcctccaccggcaga

SEQ ID NO: 4079388 - DNA, 25 bp, Homo sapien
acaggctccaggctcggccaccaca

SEQ ID NO: 4079389 - DNA, 25 bp, Homo sapien
ctcctccaccggcagagcagcacag

SEQ ID NO: 4079390 - DNA, 25 bp, Homo sapien
ggtggctgagatggacacacctccg

SEQ ID NO: 4079391 - DNA, 25 bp, Homo sapien
tggctgagatggacacacctccgct

SEQ ID NO: 4079392 - DNA, 25 bp, Homo sapien
gctgagatggacacacctccgctgc

SEQ ID NO: 4079393 - DNA, 25 bp, Homo sapien
gggtggctgagatggacacacctcc

SEQ ID NO: 4079394 - DNA, 25 bp, Homo sapien
acttggccagtatgaagtcgaccat

SEQ ID NO: 4079395 - DNA, 25 bp, Homo sapien
aattaaggggcatttcgtctggcac

SEQ ID NO: 4079396 - DNA, 25 bp, Homo sapien
tgctccgcagacaggcgttcaggag

SEQ ID NO: 4079397 - DNA, 25 bp, Homo sapien
agtatgaagtcgaccatcagggagg

SEQ ID NO: 4079398 - DNA, 25 bp, Homo sapien
acggcgttctgagaaggccacgaga

SEQ ID NO: 4079399 - DNA, 25 bp, Homo sapien
ggaggatccacccacggcgttctga

SEQ ID NO: 4079400 - DNA, 25 bp, Homo sapien
tgacaggaggatccacccacggcgt

SEQ ID NO: 4079401 - DNA, 25 bp, Homo sapien
tccacccacggcgttctgagaaggc

SEQ ID NO: 4079402 - DNA, 25 bp, Homo sapien
cacctccgtgggagcagaagtttct

SEQ ID NO: 4079403 - DNA, 25 bp, Homo sapien
gaagaagtgggcagtgatgtcctgt

SEQ ID NO: 4079404 - DNA, 25 bp, Homo sapien
gtgatgtcctgtgtcagggcacctc

SEQ ID NO: 4079405 - DNA, 25 bp, Homo sapien
gcagtgatgtcctgtgtcagggcac

SEQ ID NO: 4079406 - DNA, 25 bp, Homo sapien
tgagaaaaacactcgctaaggcttg

SEQ ID NO: 4079407 - DNA, 25 bp, Homo sapien
ttggcgtggccaccatggatggtgc

SEQ ID NO: 4079408 - DNA, 25 bp, Homo sapien
aagagaggcgagaccaacatgcaga

SEQ ID NO: 4079409 - DNA, 25 bp, Homo sapien
gaccaacatgcagagtggctgctgt

SEQ ID NO: 4079410 - DNA, 25 bp, Homo sapien
cctcagtaattcacacggtcagtac

SEQ ID NO: 4079411 - DNA, 25 bp, Homo sapien
ctgacagatcggacggacacgtgca

SEQ ID NO: 4079412 - DNA, 25 bp, Homo sapien
gtacacgcatggaggctgcaagagc

SEQ ID NO: 4079413 - DNA, 25 bp, Homo sapien
acaggcactgacagatcggacggac

SEQ ID NO: 4079414 - DNA, 25 bp, Homo sapien
aagaactgctcgcatctggcagtga

SEQ ID NO: 4079415 - DNA, 25 bp, Homo sapien
gaactgctcgcatctggcagtgatg

SEQ ID NO: 4079416 - DNA, 25 bp, Homo sapien
agaactgctcgcatctggcagtgat

SEQ ID NO: 4079417 - DNA, 25 bp, Homo sapien
ccgcagaggacagacgaaggcaggc

SEQ ID NO: 4079418 - DNA, 25 bp, Homo sapien
cgcagaggacagacgaaggcaggcg

SEQ ID NO: 4079419 - DNA, 25 bp, Homo sapien
agaggacagacgaaggcaggcggag

SEQ ID NO: 4079420 - DNA, 25 bp, Homo sapien
ctgccgcagaggacagacgaaggca

SEQ ID NO: 4079421 - DNA, 25 bp, Homo sapien
tggcccactgcattcaaaatgtgtt

SEQ ID NO: 4079422 - DNA, 25 bp, Homo sapien
ccctatactgtgtttggcccactgc

SEQ ID NO: 4079423 - DNA, 25 bp, Homo sapien
gcgacagcacagcgtacactctgct

SEQ ID NO: 4079424 - DNA, 25 bp, Homo sapien
gcccacctcccctatactgtgtttg

SEQ ID NO: 4079425 - DNA, 25 bp, Homo sapien
tggccgagaggcactatgaggtctt

SEQ ID NO: 4079426 - DNA, 25 bp, Homo sapien
tccacccgcttgtcagagcctggag

SEQ ID NO: 4079427 - DNA, 25 bp, Homo sapien
tggcagccacgctccacccgcttgt

SEQ ID NO: 4079428 - DNA, 25 bp, Homo sapien
tacattagcagctccctctgtctct

SEQ ID NO: 4079429 - DNA, 25 bp, Homo sapien
atcctcatttcctgtgcggccacca

SEQ ID NO: 4079430 - DNA, 25 bp, Homo sapien
ttcctgtgcggccaccaaagaccaa

SEQ ID NO: 4079431 - DNA, 25 bp, Homo sapien
ctcatttcctgtgcggccaccaaag

SEQ ID NO: 4079432 - DNA, 25 bp, Homo sapien
tgcggccaccaaagaccaaatcaga

SEQ ID NO: 4079433 - DNA, 25 bp, Homo sapien
acaagaatggtacacgcagcctgca

SEQ ID NO: 4079434 - DNA, 25 bp, Homo sapien
catggatcgcccactggtggaagtc

SEQ ID NO: 4079435 - DNA, 25 bp, Homo sapien
ctttggtggaaatccatcagtgcgt

SEQ ID NO: 4079436 - DNA, 25 bp, Homo sapien
cagggagaaagtgctcatggatcgc

SEQ ID NO: 4079437 - DNA, 25 bp, Homo sapien
tgaaagagcatcagcttcaggttga

SEQ ID NO: 4079438 - DNA, 25 bp, Homo sapien
ctgaaagagcatcagcttcaggttg

SEQ ID NO: 4079439 - DNA, 25 bp, Homo sapien
caatcgtagctcgctgcagactctg

SEQ ID NO: 4079440 - DNA, 25 bp, Homo sapien
gcaatcgtagctcgctgcagactct

SEQ ID NO: 4079441 - DNA, 25 bp, Homo sapien
atcgtagctcgctgcagactctgcc

SEQ ID NO: 4079442 - DNA, 25 bp, Homo sapien
aatcgtagctcgctgcagactctgc

SEQ ID NO: 4079443 - DNA, 25 bp, Homo sapien
ttcttgcccgaggagcacacacaaa

SEQ ID NO: 4079444 - DNA, 25 bp, Homo sapien
acacacaaaccctagactcaggacg

SEQ ID NO: 4079445 - DNA, 25 bp, Homo sapien
tgcaggagaaggaacggtcacctac

SEQ ID NO: 4079446 - DNA, 25 bp, Homo sapien
tagactcaggacgtggcatgatgca

SEQ ID NO: 4079447 - DNA, 25 bp, Homo sapien
caacacctctcggaaggttctgtgt

SEQ ID NO: 4079448 - DNA, 25 bp, Homo sapien
tctttcaacacctctcggaaggttc

SEQ ID NO: 4079449 - DNA, 25 bp, Homo sapien
cacctctcggaaggttctgtgtgtc

SEQ ID NO: 4079450 - DNA, 25 bp, Homo sapien
tttcaacacctctcggaaggttctg

SEQ ID NO: 4079451 - DNA, 25 bp, Homo sapien
ggctggctacgtcctcctcagaaag

SEQ ID NO: 4079452 - DNA, 25 bp, Homo sapien
aggctgtcgggcctctgagaacaat

SEQ ID NO: 4079453 - DNA, 25 bp, Homo sapien
gaaggtgcaagggtctccaggaaag

SEQ ID NO: 4079454 - DNA, 25 bp, Homo sapien
tcagaaagaggctgtcgggcctctg

SEQ ID NO: 4079455 - DNA, 25 bp, Homo sapien
ctgaaacagagagtgacccggccgt

SEQ ID NO: 4079456 - DNA, 25 bp, Homo sapien
tgaaacagagagtgacccggccgtt

SEQ ID NO: 4079457 - DNA, 25 bp, Homo sapien
aacagagagtgacccggccgtttct

SEQ ID NO: 4079458 - DNA, 25 bp, Homo sapien
gagagtgacccggccgtttcttcat

SEQ ID NO: 4079459 - DNA, 25 bp, Homo sapien
ggtccgaaagctgcgtaaacctgaa

SEQ ID NO: 4079460 - DNA, 25 bp, Homo sapien
cagtcaggctgcctaagcagacagc

SEQ ID NO: 4079461 - DNA, 25 bp, Homo sapien
agatgggcacaaagcggcagcagac

SEQ ID NO: 4079462 - DNA, 25 bp, Homo sapien
aacacaaggaaaggcagcactcagc

SEQ ID NO: 4079463 - DNA, 25 bp, Homo sapien
tggagataagcagctgcacaaagta

SEQ ID NO: 4079464 - DNA, 25 bp, Homo sapien
agtatctcgtgactgggaagaaaac

SEQ ID NO: 4079465 - DNA, 25 bp, Homo sapien
gctgcacaaagtatctcgtgactgg

SEQ ID NO: 4079466 - DNA, 25 bp, Homo sapien
taagcagctgcacaaagtatctcgt

SEQ ID NO: 4079467 - DNA, 25 bp, Homo sapien
aaacgcacgcatattataaacaaat

SEQ ID NO: 4079468 - DNA, 25 bp, Homo sapien
caaacgcacgcatattataaacaaa

SEQ ID NO: 4079469 - DNA, 25 bp, Homo sapien
acaaacgcacgcatattataaacaa

SEQ ID NO: 4079470 - DNA, 25 bp, Homo sapien
aacgcacgcatattataaacaaatg

SEQ ID NO: 4079471 - DNA, 25 bp, Homo sapien
gagaagacgcgactgtggaagaaga

SEQ ID NO: 4079472 - DNA, 25 bp, Homo sapien
catgtgtcacttttcgagagagagg

SEQ ID NO: 4079473 - DNA, 25 bp, Homo sapien
ggttatctttgggtggtatgtctgc

SEQ ID NO: 4079474 - DNA, 25 bp, Homo sapien
taattttatcaaacgagcatgtgtc

SEQ ID NO: 4079475 - DNA, 25 bp, Homo sapien
aggtcaggaggctgtcaaagagcgc

SEQ ID NO: 4079476 - DNA, 25 bp, Homo sapien
tcaggaggctgtcaaagagcgcagg

SEQ ID NO: 4079477 - DNA, 25 bp, Homo sapien
ggctgtcaaagagcgcagggacagg

SEQ ID NO: 4079478 - DNA, 25 bp, Homo sapien
gtgcaggaggacccacatccacctc

SEQ ID NO: 4079479 - DNA, 25 bp, Homo sapien
acatgtggggcactcaggctcgggc

SEQ ID NO: 4079480 - DNA, 25 bp, Homo sapien
gggcagccaaccccagcacatgtgg

SEQ ID NO: 4079481 - DNA, 25 bp, Homo sapien
cagggcagccaaccccagcacatgt

SEQ ID NO: 4079482 - DNA, 25 bp, Homo sapien
caggtgcacggccagggcagccaac

SEQ ID NO: 4079483 - DNA, 25 bp, Homo sapien
cagactgccctcttccaagctggaa

SEQ ID NO: 4079484 - DNA, 25 bp, Homo sapien
ggcactgaagacgaattgagaagta

SEQ ID NO: 4079485 - DNA, 25 bp, Homo sapien
aattgagaagtagcagcctggccct

SEQ ID NO: 4079486 - DNA, 25 bp, Homo sapien
ctgcaacgagaatgagggtggcaga

SEQ ID NO: 4079487 - DNA, 25 bp, Homo sapien
gagcacacgtccacacatggtcctc

SEQ ID NO: 4079488 - DNA, 25 bp, Homo sapien
ggagcacacgtccacacatggtcct

SEQ ID NO: 4079489 - DNA, 25 bp, Homo sapien
ctccgggggagcgacactggaggca

SEQ ID NO: 4079490 - DNA, 25 bp, Homo sapien
gacagaaagacgtcagcaggaggtc

SEQ ID NO: 4079491 - DNA, 25 bp, Homo sapien
agccatcaggttctgacagaaagac

SEQ ID NO: 4079492 - DNA, 25 bp, Homo sapien
agaaagacgtcagcaggaggtccac

SEQ ID NO: 4079493 - DNA, 25 bp, Homo sapien
cagagacacagttctcatgagcgtg

SEQ ID NO: 4079494 - DNA, 25 bp, Homo sapien
acacagttctcatgagcgtggtgtc

SEQ ID NO: 4079495 - DNA, 25 bp, Homo sapien
gagacacagttctcatgagcgtggt

SEQ ID NO: 4079496 - DNA, 25 bp, Homo sapien
gcagagacacagttctcatgagcgt

SEQ ID NO: 4079497 - DNA, 25 bp, Homo sapien
ctcggcgtgttgatgctgagctgaa

SEQ ID NO: 4079498 - DNA, 25 bp, Homo sapien
gctgaatctttgatatctcaacgct

SEQ ID NO: 4079499 - DNA, 25 bp, Homo sapien
tttgatatctcaacgctgctgtcat

SEQ ID NO: 4079500 - DNA, 25 bp, Homo sapien
tccagtctcggcgtgttgatgctga

SEQ ID NO: 4079501 - DNA, 25 bp, Homo sapien
gggtctgtcatggaggctctcagct

SEQ ID NO: 4079502 - DNA, 25 bp, Homo sapien
ggggtctgtcatggaggctctcagc

SEQ ID NO: 4079503 - DNA, 25 bp, Homo sapien
tggggtctgtcatggaggctctcag

SEQ ID NO: 4079504 - DNA, 25 bp, Homo sapien
cttctggcttctcttcagcagcaga

SEQ ID NO: 4079505 - DNA, 25 bp, Homo sapien
tggcttctcttcagcagcagagcag

SEQ ID NO: 4079506 - DNA, 25 bp, Homo sapien
tctggcttctcttcagcagcagagc

SEQ ID NO: 4079507 - DNA, 25 bp, Homo sapien
gcttctcttcagcagcagagcaggc

SEQ ID NO: 4079508 - DNA, 25 bp, Homo sapien
tggcagtaggtggagtacagagatg

SEQ ID NO: 4079509 - DNA, 25 bp, Homo sapien
agtaggtggagtacagagatggggg

SEQ ID NO: 4079510 - DNA, 25 bp, Homo sapien
gtaggtggagtacagagatgggggg

SEQ ID NO: 4079511 - DNA, 25 bp, Homo sapien
aggcagagcttgcagtgagccaaga

SEQ ID NO: 4079512 - DNA, 25 bp, Homo sapien
gaggcaggacaattgctccaaccca

SEQ ID NO: 4079513 - DNA, 25 bp, Homo sapien
cctgggcaacagagcgagactccat

SEQ ID NO: 4079514 - DNA, 25 bp, Homo sapien
attgtgcaattgcactccagcctgg

SEQ ID NO: 4079515 - DNA, 25 bp, Homo sapien
tctataaacgccacacgggagtcag

SEQ ID NO: 4079516 - DNA, 25 bp, Homo sapien
ctcttcagagactctataaacgcca

SEQ ID NO: 4079517 - DNA, 25 bp, Homo sapien
acgccacacgggagtcagggacttt

SEQ ID NO: 4079518 - DNA, 25 bp, Homo sapien
gagactctataaacgccacacggga

SEQ ID NO: 4079519 - DNA, 25 bp, Homo sapien
gaggaagtgggacacgtagtaaggc

SEQ ID NO: 4079520 - DNA, 25 bp, Homo sapien
gaagtgggacacgtagtaaggcctc

SEQ ID NO: 4079521 - DNA, 25 bp, Homo sapien
ccatgacggtgactgggatgttccc

SEQ ID NO: 4079522 - DNA, 25 bp, Homo sapien
gactgggatgttccccgtatgctca

SEQ ID NO: 4079523 - DNA, 25 bp, Homo sapien
ctggcctccatgacggtgactggga

SEQ ID NO: 4079524 - DNA, 25 bp, Homo sapien
tgttccccgtatgctcaaacaccat

SEQ ID NO: 4079525 - DNA, 25 bp, Homo sapien
tgacaaatcctcgtagagtcccatg

SEQ ID NO: 4079526 - DNA, 25 bp, Homo sapien
ctgatgacaaatcctcgtagagtcc

SEQ ID NO: 4079527 - DNA, 25 bp, Homo sapien
gatgacaaatcctcgtagagtccca

SEQ ID NO: 4079528 - DNA, 25 bp, Homo sapien
caaatcctcgtagagtcccatgttt

SEQ ID NO: 4079529 - DNA, 25 bp, Homo sapien
ctgtgaggagggagcggtacttgcc

SEQ ID NO: 4079530 - DNA, 25 bp, Homo sapien
ccaatgagatgtagtctgtgaggag

SEQ ID NO: 4079531 - DNA, 25 bp, Homo sapien
cttgaggtcggccagccgtgtcttg

SEQ ID NO: 4079532 - DNA, 25 bp, Homo sapien
gccagccgtgtcttggccaatgaga

SEQ ID NO: 4079533 - DNA, 25 bp, Homo sapien
gctgcagccatggtagcctcgtgtg

SEQ ID NO: 4079534 - DNA, 25 bp, Homo sapien
caaaaggcacgagttctgacaagaa

SEQ ID NO: 4079535 - DNA, 25 bp, Homo sapien
acaagaacgtaaacaggaagaccag

SEQ ID NO: 4079536 - DNA, 25 bp, Homo sapien
gtagcctcgtgtgctcccaaaggag

SEQ ID NO: 4079537 - DNA, 25 bp, Homo sapien
aatggaaactttactcacaagcact

SEQ ID NO: 4079538 - DNA, 25 bp, Homo sapien
ggagcgtagtaatgcaatcccagct

SEQ ID NO: 4079539 - DNA, 25 bp, Homo sapien
gaaaccatggcggtccttcaaagct

SEQ ID NO: 4079540 - DNA, 25 bp, Homo sapien
ctcttcaaatggaaactttactcac

SEQ ID NO: 4079541 - DNA, 25 bp, Homo sapien
ctcggcacacgcagaggaagatctg

SEQ ID NO: 4079542 - DNA, 25 bp, Homo sapien
tcaggtattaggtagccgattggca

SEQ ID NO: 4079543 - DNA, 25 bp, Homo sapien
caggaggctccgtcaactaagtgag

SEQ ID NO: 4079544 - DNA, 25 bp, Homo sapien
gaacatgcagaggaagatccgctga

SEQ ID NO: 4079545 - DNA, 25 bp, Homo sapien
gaatgcctgggccatcaaacgcgcc

SEQ ID NO: 4079546 - DNA, 25 bp, Homo sapien
ctgcatatgacaggaacgcagaggg

SEQ ID NO: 4079547 - DNA, 25 bp, Homo sapien
cttgaaccagtctgcatatgacagg

SEQ ID NO: 4079548 - DNA, 25 bp, Homo sapien
tggcgcacaaccaggaacgcagtga

SEQ ID NO: 4079549 - DNA, 25 bp, Homo sapien
agtgaacctcctgcgtttccagaac

SEQ ID NO: 4079550 - DNA, 25 bp, Homo sapien
tctgccagtgaacctcctgcgtttc

SEQ ID NO: 4079551 - DNA, 25 bp, Homo sapien
caaaggagagcactctctgccagtg

SEQ ID NO: 4079552 - DNA, 25 bp, Homo sapien
ctgctgcgcttctggaaagcagaca

SEQ ID NO: 4079553 - DNA, 25 bp, Homo sapien
gtgtgtccgcgcaaagctccactct

SEQ ID NO: 4079554 - DNA, 25 bp, Homo sapien
cctgcggtacagtgaggtgagcaga

SEQ ID NO: 4079555 - DNA, 25 bp, Homo sapien
gagcagagggtgtgtccgcgcaaag

SEQ ID NO: 4079556 - DNA, 25 bp, Homo sapien
cagagggtgtgtccgcgcaaagctc

SEQ ID NO: 4079557 - DNA, 25 bp, Homo sapien
atgactgaagaacctcttcagagga

SEQ ID NO: 4079558 - DNA, 25 bp, Homo sapien
agggctgtgagtgagtatctgagtc

SEQ ID NO: 4079559 - DNA, 25 bp, Homo sapien
tgactgaagaacctcttcagaggat

SEQ ID NO: 4079560 - DNA, 25 bp, Homo sapien
gagtatctgagtcagggtatgactg

SEQ ID NO: 4079561 - DNA, 25 bp, Homo sapien
tgtggaaattacactgccaagcgtg

SEQ ID NO: 4079562 - DNA, 25 bp, Homo sapien
cactgccaagcgtgtgtccactgaa

SEQ ID NO: 4079563 - DNA, 25 bp, Homo sapien
tgccaagcgtgtgtccactgaacac

SEQ ID NO: 4079564 - DNA, 25 bp, Homo sapien
aaattacactgccaagcgtgtgtcc

SEQ ID NO: 4079565 - DNA, 25 bp, Homo sapien
tgcccacactagagggaagcaaacc

SEQ ID NO: 4079566 - DNA, 25 bp, Homo sapien
gggccaagctttgcctactggtgaa

SEQ ID NO: 4079567 - DNA, 25 bp, Homo sapien
gaatgaaaaggttgacaaggcctgg

SEQ ID NO: 4079568 - DNA, 25 bp, Homo sapien
gacaaacattggtgcaggacttcca

SEQ ID NO: 4079569 - DNA, 25 bp, Homo sapien
cacgttatcgtaactggcagaggaa

SEQ ID NO: 4079570 - DNA, 25 bp, Homo sapien
gaaaaggctgaccagagcgttcccc

SEQ ID NO: 4079571 - DNA, 25 bp, Homo sapien
tgaccagagcgttccccgggctttc

SEQ ID NO: 4079572 - DNA, 25 bp, Homo sapien
gtcgcctcctcctcacgcacgttat

SEQ ID NO: 4079573 - DNA, 25 bp, Homo sapien
aatatcttggctctttaatttggca

SEQ ID NO: 4079574 - DNA, 25 bp, Homo sapien
ttaatttggcagacacctccctgct

SEQ ID NO: 4079575 - DNA, 25 bp, Homo sapien
ctccctgctgcacactcaggcaggc

SEQ ID NO: 4079576 - DNA, 25 bp, Homo sapien
tggctctttaatttggcagacacct

SEQ ID NO: 4079577 - DNA, 25 bp, Homo sapien
cacgatcttgtgagtggaggactcc

SEQ ID NO: 4079578 - DNA, 25 bp, Homo sapien
cagcacctcacgatcttgtgagtgg

SEQ ID NO: 4079579 - DNA, 25 bp, Homo sapien
cacctcacgatcttgtgagtggagg

SEQ ID NO: 4079580 - DNA, 25 bp, Homo sapien
gatcttgtgagtggaggactcctcc

SEQ ID NO: 4079581 - DNA, 25 bp, Homo sapien
acagatgtcagcacacggcggcagc

SEQ ID NO: 4079582 - DNA, 25 bp, Homo sapien
aaacagatgtcagcacacggcggca

SEQ ID NO: 4079583 - DNA, 25 bp, Homo sapien
gaaaacagatgtcagcacacggcgg

SEQ ID NO: 4079584 - DNA, 25 bp, Homo sapien
cagaaaacagatgtcagcacacggc

SEQ ID NO: 4079585 - DNA, 25 bp, Homo sapien
tcagcattctctgcagtacatcaac

SEQ ID NO: 4079586 - DNA, 25 bp, Homo sapien
agcattctctgcagtacatcaaccg

SEQ ID NO: 4079587 - DNA, 25 bp, Homo sapien
cattctctgcagtacatcaaccgtg

SEQ ID NO: 4079588 - DNA, 25 bp, Homo sapien
ttctctgcagtacatcaaccgtgac

SEQ ID NO: 4079589 - DNA, 25 bp, Homo sapien
ccacagttcttctcagatctgagtt

SEQ ID NO: 4079590 - DNA, 25 bp, Homo sapien
atggccctggcgacgtcagcatgct

SEQ ID NO: 4079591 - DNA, 25 bp, Homo sapien
cctggcgacgtcagcatgctggcag

SEQ ID NO: 4079592 - DNA, 25 bp, Homo sapien
cgacgtcagcatgctggcaggatgc

SEQ ID NO: 4079593 - DNA, 25 bp, Homo sapien
gaaagcatggccctggcgacgtcag

SEQ ID NO: 4079594 - DNA, 25 bp, Homo sapien
gagccacgatcccacagcatgcatg

SEQ ID NO: 4079595 - DNA, 25 bp, Homo sapien
cacgatcccacagcatgcatgtcgg

SEQ ID NO: 4079596 - DNA, 25 bp, Homo sapien
tcccacagcatgcatgtcgggatgg

SEQ ID NO: 4079597 - DNA, 25 bp, Homo sapien
acagattcctgaagagccacgatcc

SEQ ID NO: 4079598 - DNA, 25 bp, Homo sapien
tcttgcaggctcacaatgccttgta

SEQ ID NO: 4079599 - DNA, 25 bp, Homo sapien
gctcacaatgccttgtacgtgaaga

SEQ ID NO: 4079600 - DNA, 25 bp, Homo sapien
ccttgtacgtgaagatgccacaccg

SEQ ID NO: 4079601 - DNA, 25 bp, Homo sapien
caatgccttgtacgtgaagatgcca

SEQ ID NO: 4079602 - DNA, 25 bp, Homo sapien
tccataattcttgacagaaggaaag

SEQ ID NO: 4079603 - DNA, 25 bp, Homo sapien
ctgtattttccataattcttgacag

SEQ ID NO: 4079604 - DNA, 25 bp, Homo sapien
ttgacagaaggaaagacgggagaac

SEQ ID NO: 4079605 - DNA, 25 bp, Homo sapien
gacagaaggaaagacgggagaacat

SEQ ID NO: 4079606 - DNA, 25 bp, Homo sapien
aaatactgagcaaactctaacaggg

SEQ ID NO: 4079607 - DNA, 25 bp, Homo sapien
gagcaaactctaacagggaagacag

SEQ ID NO: 4079608 - DNA, 25 bp, Homo sapien
actgtgtgccaataaatactgagca

SEQ ID NO: 4079609 - DNA, 25 bp, Homo sapien
aactctaacagggaagacagcttct

SEQ ID NO: 4079610 - DNA, 25 bp, Homo sapien
tactaaagctatgtcctattttccc

SEQ ID NO: 4079611 - DNA, 25 bp, Homo sapien
agtaacaacgggcaggtttcctcat

SEQ ID NO: 4079612 - DNA, 25 bp, Homo sapien
aattacctgaaacaatactaaagct

SEQ ID NO: 4079613 - DNA, 25 bp, Homo sapien
caacgggcaggtttcctcatctttg

SEQ ID NO: 4079614 - DNA, 25 bp, Homo sapien
acgctagaggcaaccatcccggctg

SEQ ID NO: 4079615 - DNA, 25 bp, Homo sapien
agcacagggtgactggtctccgctg

SEQ ID NO: 4079616 - DNA, 25 bp, Homo sapien
caaccatcccggctgagagaatacc

SEQ ID NO: 4079617 - DNA, 25 bp, Homo sapien
ccgtgcagatctgtcccacgctaga

SEQ ID NO: 4079618 - DNA, 25 bp, Homo sapien
gaggcttgatcctgcaaagcagagc

SEQ ID NO: 4079619 - DNA, 25 bp, Homo sapien
cttgaggcttgatcctgcaaagcag

SEQ ID NO: 4079620 - DNA, 25 bp, Homo sapien
tgaggcttgatcctgcaaagcagag

SEQ ID NO: 4079621 - DNA, 25 bp, Homo sapien
ttgaggcttgatcctgcaaagcaga

SEQ ID NO: 4079622 - DNA, 25 bp, Homo sapien
gccaccaagtggaacctcactaaca

SEQ ID NO: 4079623 - DNA, 25 bp, Homo sapien
tcaataaagtgagaaacggtgggca

SEQ ID NO: 4079624 - DNA, 25 bp, Homo sapien
gcaggccaccaagtggaacctcact

SEQ ID NO: 4079625 - DNA, 25 bp, Homo sapien
accattctcctgagcaaccagccac

SEQ ID NO: 4079626 - DNA, 25 bp, Homo sapien
tgaactagaatgattagcataggcc

SEQ ID NO: 4079627 - DNA, 25 bp, Homo sapien
tgctgagagacaattttttacacag

SEQ ID NO: 4079628 - DNA, 25 bp, Homo sapien
tgtcacagtcaatcactttgctgag

SEQ ID NO: 4079629 - DNA, 25 bp, Homo sapien
cataggcctcagaactgtcacagtc

SEQ ID NO: 4079630 - DNA, 25 bp, Homo sapien
tggcttcgcaggaggcgcacagctg

SEQ ID NO: 4079631 - DNA, 25 bp, Homo sapien
cattcaggtcctgatggcttcgcag

SEQ ID NO: 4079632 - DNA, 25 bp, Homo sapien
tgatggcttcgcaggaggcgcacag

SEQ ID NO: 4079633 - DNA, 25 bp, Homo sapien
atggcttcgcaggaggcgcacagct

SEQ ID NO: 4079634 - DNA, 25 bp, Homo sapien
ggagagaagtcggttcgaaaccatc

SEQ ID NO: 4079635 - DNA, 25 bp, Homo sapien
cggttcgaaaccatcacagcacaat

SEQ ID NO: 4079636 - DNA, 25 bp, Homo sapien
gaagtcggttcgaaaccatcacagc

SEQ ID NO: 4079637 - DNA, 25 bp, Homo sapien
cgcgcaggtggacgccgcggagaaa

SEQ ID NO: 4079638 - DNA, 25 bp, Homo sapien
gcctctgcgctgaggggagccccag

SEQ ID NO: 4079639 - DNA, 25 bp, Homo sapien
gcaggtctcgggaaactaacggaga

SEQ ID NO: 4079640 - DNA, 25 bp, Homo sapien
cagcgacaccctcccgaagaggggc

SEQ ID NO: 4079641 - DNA, 25 bp, Homo sapien
atccgaccggcggaggctctggcgg

SEQ ID NO: 4079642 - DNA, 25 bp, Homo sapien
agttcgggacccacgagtcggacat

SEQ ID NO: 4079643 - DNA, 25 bp, Homo sapien
gagttcgggacccacgagtcggaca

SEQ ID NO: 4079644 - DNA, 25 bp, Homo sapien
cgaggcggagttcgggacccacgag

SEQ ID NO: 4079645 - DNA, 25 bp, Homo sapien
cgcgcacacccgttggctggcggcg

SEQ ID NO: 4079646 - DNA, 25 bp, Homo sapien
aggccacgcccctcaggtcgaggcc

SEQ ID NO: 4079647 - DNA, 25 bp, Homo sapien
tggctgcggccaggcgcgcacaccc

SEQ ID NO: 4079648 - DNA, 25 bp, Homo sapien
gccttgcgtcgtggccatgttggtc

SEQ ID NO: 4079649 - DNA, 25 bp, Homo sapien
acagttgagatcttctaggctctgt

SEQ ID NO: 4079650 - DNA, 25 bp, Homo sapien
ctcagcctccaggaacctacagttg

SEQ ID NO: 4079651 - DNA, 25 bp, Homo sapien
agcctccaggaacctacagttgaga

SEQ ID NO: 4079652 - DNA, 25 bp, Homo sapien
tccaggaacctacagttgagatctt

SEQ ID NO: 4079653 - DNA, 25 bp, Homo sapien
gtttccttgtgtatcgttgctctgc

SEQ ID NO: 4079654 - DNA, 25 bp, Homo sapien
ttgtttccttgtgtatcgttgctct

SEQ ID NO: 4079655 - DNA, 25 bp, Homo sapien
tgtttccttgtgtatcgttgctctg

SEQ ID NO: 4079656 - DNA, 25 bp, Homo sapien
tgctgttgctcttctaagccagaac

SEQ ID NO: 4079657 - DNA, 25 bp, Homo sapien
ttaccacgaatgtagagcgtgctgc

SEQ ID NO: 4079658 - DNA, 25 bp, Homo sapien
agcgtgctgctcctgtggaataaga

SEQ ID NO: 4079659 - DNA, 25 bp, Homo sapien
aacttacccatcgttggtacccatg

SEQ ID NO: 4079660 - DNA, 25 bp, Homo sapien
tgtcaccgcgtgtccgagcgcgcgg

SEQ ID NO: 4079661 - DNA, 25 bp, Homo sapien
ggtcaccgcagtgtcccgggctgga

SEQ ID NO: 4079662 - DNA, 25 bp, Homo sapien
ttttgtgggcatcggccgtctgggt

SEQ ID NO: 4079663 - DNA, 25 bp, Homo sapien
tgccggcccgggcttttgtgggcat

SEQ ID NO: 4079664 - DNA, 25 bp, Homo sapien
gcgcctgcgggataccggggacctc

SEQ ID NO: 4079665 - DNA, 25 bp, Homo sapien
cttctctttacggagacatctgtga

SEQ ID NO: 4079666 - DNA, 25 bp, Homo sapien
aagactcttctctttacggagacat

SEQ ID NO: 4079667 - DNA, 25 bp, Homo sapien
ggcagtcctgcagcaagactcttct

SEQ ID NO: 4079668 - DNA, 25 bp, Homo sapien
ttacggagacatctgtgaacctgcc

SEQ ID NO: 4079669 - DNA, 25 bp, Homo sapien
tagaagcctggataagcatagcccg

SEQ ID NO: 4079670 - DNA, 25 bp, Homo sapien
gaagcctggataagcatagcccgtg

SEQ ID NO: 4079671 - DNA, 25 bp, Homo sapien
gtgtgaatctgtgaacctgcccgca

SEQ ID NO: 4079672 - DNA, 25 bp, Homo sapien
tagaagcgtggataagcatagcccg

SEQ ID NO: 4079673 - DNA, 25 bp, Homo sapien
taagcatagcccgtgtgatttttcg

SEQ ID NO: 4079674 - DNA, 25 bp, Homo sapien
catagcccgtgtgatttttcgctga

SEQ ID NO: 4079675 - DNA, 25 bp, Homo sapien
gcccgtgtgatttttcgctgagccc

SEQ ID NO: 4079676 - DNA, 25 bp, Homo sapien
cgtgtgatttttcgctgagccctgg

SEQ ID NO: 4079677 - DNA, 25 bp, Homo sapien
ccggggaagtcgaggacacctggag

SEQ ID NO: 4079678 - DNA, 25 bp, Homo sapien
aattaggcaaatcagcccgtgccgg

SEQ ID NO: 4079679 - DNA, 25 bp, Homo sapien
gaccccttcattccagcgcgtgtgt

SEQ ID NO: 4079680 - DNA, 25 bp, Homo sapien
aaagaccccttcattccagcgcgtg

SEQ ID NO: 4079681 - DNA, 25 bp, Homo sapien
ctggcccgtcgcgtgggttctggaa

SEQ ID NO: 4079682 - DNA, 25 bp, Homo sapien
gaatccggaatgtacattcacccag

SEQ ID NO: 4079683 - DNA, 25 bp, Homo sapien
gattcctgttctgtaggtctttgca

SEQ ID NO: 4079684 - DNA, 25 bp, Homo sapien
gtgaaggtctcaccgccctggagag

SEQ ID NO: 4079685 - DNA, 25 bp, Homo sapien
gggattaatagcatagccgcatcgt

SEQ ID NO: 4079686 - DNA, 25 bp, Homo sapien
tctggacctcttggaccgggattaa

SEQ ID NO: 4079687 - DNA, 25 bp, Homo sapien
gaagagttgaggtctccgtgtcagc

SEQ ID NO: 4079688 - DNA, 25 bp, Homo sapien
ccttctcaggtaggatctgacgctg

SEQ ID NO: 4079689 - DNA, 25 bp, Homo sapien
cctttctgctgtgaccagcggtggg

SEQ ID NO: 4079690 - DNA, 25 bp, Homo sapien
gcctttctgctgtgaccagcggtgg

SEQ ID NO: 4079691 - DNA, 25 bp, Homo sapien
tccccttagggctcacctcaagact

SEQ ID NO: 4079692 - DNA, 25 bp, Homo sapien
aagacttgacacacgccaggcaggg

SEQ ID NO: 4079693 - DNA, 25 bp, Homo sapien
tcccggactcgggtctccgcacgca

SEQ ID NO: 4079694 - DNA, 25 bp, Homo sapien
tctgtggccaacacacgcctcccgg

SEQ ID NO: 4079695 - DNA, 25 bp, Homo sapien
caggggcactgctgagggcagttct

SEQ ID NO: 4079696 - DNA, 25 bp, Homo sapien
gcaggagcggagaagcgggggatca

SEQ ID NO: 4079697 - DNA, 25 bp, Homo sapien
tcgggtctccgcaggcattgatgcc

SEQ ID NO: 4079698 - DNA, 25 bp, Homo sapien
tttatggaacgagtgggttggtctc

SEQ ID NO: 4079699 - DNA, 25 bp, Homo sapien
ctctgagacgagcactggcggaagt

SEQ ID NO: 4079700 - DNA, 25 bp, Homo sapien
gatgcaagaggaagctcacggctca

SEQ ID NO: 4079701 - DNA, 25 bp, Homo sapien
tgggggtctgtccacaagctgacca

SEQ ID NO: 4079702 - DNA, 25 bp, Homo sapien
cctgactcgcctttgagtggtcacc

SEQ ID NO: 4079703 - DNA, 25 bp, Homo sapien
tgaactcctggctgctagcagctct

SEQ ID NO: 4079704 - DNA, 25 bp, Homo sapien
cagtgcccgggacagactgtgggac

SEQ ID NO: 4079705 - DNA, 25 bp, Homo sapien
gttactgggcaggtgtcctgggctg

SEQ ID NO: 4079706 - DNA, 25 bp, Homo sapien
agttactgggcaggtgtcctgggct

SEQ ID NO: 4079707 - DNA, 25 bp, Homo sapien
ttactgggcaggtgtcctgggctgg

SEQ ID NO: 4079708 - DNA, 25 bp, Homo sapien
ggccttctgcggcttttttgcaggt

SEQ ID NO: 4079709 - DNA, 25 bp, Homo sapien
gccttctgcggcttttttgcaggtc

SEQ ID NO: 4079710 - DNA, 25 bp, Homo sapien
taagcaactcccagtttcagccaag

SEQ ID NO: 4079711 - DNA, 25 bp, Homo sapien
gattggcagactatagccacgggcc

SEQ ID NO: 4079712 - DNA, 25 bp, Homo sapien
tcgagtccgccgtgtagaactccag

SEQ ID NO: 4079713 - DNA, 25 bp, Homo sapien
gagagtttctaggtcatgagccaca

SEQ ID NO: 4079714 - DNA, 25 bp, Homo sapien
tgcccagtcggaagtgcaatgccgc

SEQ ID NO: 4079715 - DNA, 25 bp, Homo sapien
cacttggaaatgaaagcccacgtta

SEQ ID NO: 4079716 - DNA, 25 bp, Homo sapien
tgtaagcatttcacggactctctgg

SEQ ID NO: 4079717 - DNA, 25 bp, Homo sapien
tgcttggtaaggacgacggttgttc

SEQ ID NO: 4079718 - DNA, 25 bp, Homo sapien
aaaccctaaaccacggcaggtgcag

SEQ ID NO: 4079719 - DNA, 25 bp, Homo sapien
gatctccgtgatgacgatgacgcgg

SEQ ID NO: 4079720 - DNA, 25 bp, Homo sapien
tctctccagacgtcgtggtcgttcg

SEQ ID NO: 4079721 - DNA, 25 bp, Homo sapien
atgacgcggaagaagaagggcccaa

SEQ ID NO: 4079722 - DNA, 25 bp, Homo sapien
tggtcgttcggtcctatgtcgcgcc

SEQ ID NO: 4079723 - DNA, 25 bp, Homo sapien
acttctgcgctcaaacaatctgtcc

SEQ ID NO: 4079724 - DNA, 25 bp, Homo sapien
ttctgcgctcaaacaatctgtccac

SEQ ID NO: 4079725 - DNA, 25 bp, Homo sapien
agagaagagttttcgccttgttgcc

SEQ ID NO: 4079726 - DNA, 25 bp, Homo sapien
ttgtagagaagagttttcgccttgt

SEQ ID NO: 4079727 - DNA, 25 bp, Homo sapien
agaggtctggctgtgcgctcacaga

SEQ ID NO: 4079728 - DNA, 25 bp, Homo sapien
aaacattgacgatcttgaggatgac

SEQ ID NO: 4079729 - DNA, 25 bp, Homo sapien
tggctgtgcgctcacagacgctgtg

SEQ ID NO: 4079730 - DNA, 25 bp, Homo sapien
gataaacattgacgatcttgaggat

SEQ ID NO: 4079731 - DNA, 25 bp, Homo sapien
ttccatggccatgtattcctgcagg

SEQ ID NO: 4079732 - DNA, 25 bp, Homo sapien
tgtaaggacacatctaggagcgagg

SEQ ID NO: 4079733 - DNA, 25 bp, Homo sapien
tgtgctgtcagaaggtgaaccccgc

SEQ ID NO: 4079734 - DNA, 25 bp, Homo sapien
ggaacccctgctcactgcagacagg

SEQ ID NO: 4079735 - DNA, 25 bp, Homo sapien
tgttggtgtttaatatatgccacag

SEQ ID NO: 4079736 - DNA, 25 bp, Homo sapien
ttgtttgttggtgtttaatatatgc

SEQ ID NO: 4079737 - DNA, 25 bp, Homo sapien
gttggtgtttaatatatgccacagc

SEQ ID NO: 4079738 - DNA, 25 bp, Homo sapien
tttgttggtgtttaatatatgccac

SEQ ID NO: 4079739 - DNA, 25 bp, Homo sapien
tatttgggggtcacagctctgcgtt

SEQ ID NO: 4079740 - DNA, 25 bp, Homo sapien
tctgcgtttgcaggccacgttcttt

SEQ ID NO: 4079741 - DNA, 25 bp, Homo sapien
ggcaggtgcgagtgacacagtggaa

SEQ ID NO: 4079742 - DNA, 25 bp, Homo sapien
tccaccgaatgtacaagcgcttgcg

SEQ ID NO: 4079743 - DNA, 25 bp, Homo sapien
ttgagaggccaaggtgggcaaatca

SEQ ID NO: 4079744 - DNA, 25 bp, Homo sapien
gcctggccaacgtgctgaaaacccg

SEQ ID NO: 4079745 - DNA, 25 bp, Homo sapien
gactcacgcctgtaattccagcagt

SEQ ID NO: 4079746 - DNA, 25 bp, Homo sapien
caaaacttagccagctgggtgcagt

SEQ ID NO: 4079747 - DNA, 25 bp, Homo sapien
ttgctctcttcttccggtcactgtt

SEQ ID NO: 4079748 - DNA, 25 bp, Homo sapien
ttccggtcactgttgccaaactata

SEQ ID NO: 4079749 - DNA, 25 bp, Homo sapien
ccggtcactgttgccaaactatacc

SEQ ID NO: 4079750 - DNA, 25 bp, Homo sapien
gtcactgttgccaaactataccatg

SEQ ID NO: 4079751 - DNA, 25 bp, Homo sapien
cttccacctcaacgacctggaggcg

SEQ ID NO: 4079752 - DNA, 25 bp, Homo sapien
tgcgcgacatgatggccaacttcca

SEQ ID NO: 4079753 - DNA, 25 bp, Homo sapien
tgatgctggctgtgcgcgacatgat

SEQ ID NO: 4079754 - DNA, 25 bp, Homo sapien
tggctgggggtctgaaccgcaacca

SEQ ID NO: 4079755 - DNA, 25 bp, Homo sapien
ggtgcctgtgtgtgtggggcacatt

SEQ ID NO: 4079756 - DNA, 25 bp, Homo sapien
tgcctgtgtgtgtggggcacatttg

SEQ ID NO: 4079757 - DNA, 25 bp, Homo sapien
tgggtgcctgtgtgtgtggggcaca

SEQ ID NO: 4079758 - DNA, 25 bp, Homo sapien
gcctgtgtgtgtggggcacatttgt

SEQ ID NO: 4079759 - DNA, 25 bp, Homo sapien
cctgtgtgtgtgggtgcacatttgt

SEQ ID NO: 4079760 - DNA, 25 bp, Homo sapien
tgtgtgtgtgggtgcacatttgtgt

SEQ ID NO: 4079761 - DNA, 25 bp, Homo sapien
tgtgtgtgggtgcacatttgtgtgt

SEQ ID NO: 4079762 - DNA, 25 bp, Homo sapien
gcctgtgtgtgtgggtgcacatttg

SEQ ID NO: 4079763 - DNA, 25 bp, Homo sapien
ctgtgtgtgtgggtgcacatttgtg

SEQ ID NO: 4079764 - DNA, 25 bp, Homo sapien
tgtgtgtgggtgcacatttgtgtgt

SEQ ID NO: 4079765 - DNA, 25 bp, Homo sapien
tgcctgtgtgtgtgggtgcacattt

SEQ ID NO: 4079766 - DNA, 25 bp, Homo sapien
gcctgtgtgtgtgggtgcacatttg

SEQ ID NO: 4079767 - DNA, 25 bp, Homo sapien
ctggaggtgtccatctctgacgggc

SEQ ID NO: 4079768 - DNA, 25 bp, Homo sapien
cttggtggagaacgcgctggtggtg

SEQ ID NO: 4079769 - DNA, 25 bp, Homo sapien
gtgtccatctctgacgggctcttcc

SEQ ID NO: 4079770 - DNA, 25 bp, Homo sapien
gactatggctgtgcagggatcccag

SEQ ID NO: 4079771 - DNA, 25 bp, Homo sapien
tggccgtgctgtacgtccacatgct

SEQ ID NO: 4079772 - DNA, 25 bp, Homo sapien
tgggacactccgtctgctccaatga

SEQ ID NO: 4079773 - DNA, 25 bp, Homo sapien
tccgcaggacgctcaaggaggtgct

SEQ ID NO: 4079774 - DNA, 25 bp, Homo sapien
tctgaaagtgttgaagcgcggaccc

SEQ ID NO: 4079775 - DNA, 25 bp, Homo sapien
cctgacacggatgcgcaccgggcag

SEQ ID NO: 4079776 - DNA, 25 bp, Homo sapien
ttcctgacacggatgcgcaccgggc

SEQ ID NO: 4079777 - DNA, 25 bp, Homo sapien
tgcgtccttgtgacaattcctgaca

SEQ ID NO: 4079778 - DNA, 25 bp, Homo sapien
tccttgtgacaattcctgacacgga

SEQ ID NO: 4079779 - DNA, 25 bp, Homo sapien
ccggggcggggttcgcctgcagcgg

SEQ ID NO: 4079780 - DNA, 25 bp, Homo sapien
cggggttcgcctgcagcggcggagg

SEQ ID NO: 4079781 - DNA, 25 bp, Homo sapien
ggcggggttcgcctgcagcggcgga

SEQ ID NO: 4079782 - DNA, 25 bp, Homo sapien
gctgaatctggacccccgggctttg

SEQ ID NO: 4079783 - DNA, 25 bp, Homo sapien
gtgcgtgaggagtatcccgaccgca

SEQ ID NO: 4079784 - DNA, 25 bp, Homo sapien
agcaaggtgcgtgaggagtatcccg

SEQ ID NO: 4079785 - DNA, 25 bp, Homo sapien
aaggtgcgtgaggagtatcccgacc

SEQ ID NO: 4079786 - DNA, 25 bp, Homo sapien
cgtgaggagtatcccgaccgcatca

SEQ ID NO: 4079787 - DNA, 25 bp, Homo sapien
gcccggcttcgcccccctcacagcc

SEQ ID NO: 4079788 - DNA, 25 bp, Homo sapien
gcccccctcacagcccggggcagcc

SEQ ID NO: 4079789 - DNA, 25 bp, Homo sapien
cggcttcgcccccctcacagcccgg

SEQ ID NO: 4079790 - DNA, 25 bp, Homo sapien
ttcgcccccctcacagcccggggca

SEQ ID NO: 4079791 - DNA, 25 bp, Homo sapien
gccgctacctgacggtggccaccgt

SEQ ID NO: 4079792 - DNA, 25 bp, Homo sapien
cacggccgctacctgacggtggcca

SEQ ID NO: 4079793 - DNA, 25 bp, Homo sapien
gcgccacggccgctacctgacggtg

SEQ ID NO: 4079794 - DNA, 25 bp, Homo sapien
cctgacggtggccaccgtgttccgg

SEQ ID NO: 4079795 - DNA, 25 bp, Homo sapien
ggccgaagccagcagtgtctaaacc

SEQ ID NO: 4079796 - DNA, 25 bp, Homo sapien
cacctaggccacgtgtgagctgctc

SEQ ID NO: 4079797 - DNA, 25 bp, Homo sapien
tcctgcagtatttatggcctcgtcc

SEQ ID NO: 4079798 - DNA, 25 bp, Homo sapien
tgtcttattgcagctccaggcctga

SEQ ID NO: 4079799 - DNA, 25 bp, Homo sapien
gatgggccttaacagggagctcctg

SEQ ID NO: 4079800 - DNA, 25 bp, Homo sapien
tgcaggatgggcctttgactgcccc

SEQ ID NO: 4079801 - DNA, 25 bp, Homo sapien
accgggtggaccttgaccgtgctgc

SEQ ID NO: 4079802 - DNA, 25 bp, Homo sapien
ctgccctggagcaagtcctcggtgc

SEQ ID NO: 4079803 - DNA, 25 bp, Homo sapien
tattagcctagaccctcctgttgca

SEQ ID NO: 4079804 - DNA, 25 bp, Homo sapien
ctgtgtctgatccagcctcaggcag

SEQ ID NO: 4079805 - DNA, 25 bp, Homo sapien
caaccctgagtagcttaagccaaaa

SEQ ID NO: 4079806 - DNA, 25 bp, Homo sapien
cactgcgggaggtttccctattagc

SEQ ID NO: 4079807 - DNA, 25 bp, Homo sapien
tggaaccagatttacctgaggagct

SEQ ID NO: 4079808 - DNA, 25 bp, Homo sapien
tccagttaggcgatgggatcctgca

SEQ ID NO: 4079809 - DNA, 25 bp, Homo sapien
tagctcagaaatgaccagccaatgg

SEQ ID NO: 4079810 - DNA, 25 bp, Homo sapien
ggttcaaaggcctcatcggatggtc

SEQ ID NO: 4079811 - DNA, 25 bp, Homo sapien
tcattgtacagctcctgctagcagt

SEQ ID NO: 4079812 - DNA, 25 bp, Homo sapien
cattagggctgttactagcaaggac

SEQ ID NO: 4079813 - DNA, 25 bp, Homo sapien
cctaagagagttgttttgagtggcg

SEQ ID NO: 4079814 - DNA, 25 bp, Homo sapien
gaggtcatcatggtgcttccgcttt

SEQ ID NO: 4079815 - DNA, 25 bp, Homo sapien
tgtgagagggctgccgacagtcttc

SEQ ID NO: 4079816 - DNA, 25 bp, Homo sapien
tttgaagctgtgcaatgttatctgc

SEQ ID NO: 4079817 - DNA, 25 bp, Homo sapien
tcctgtggttagctgccacagtgcc

SEQ ID NO: 4079818 - DNA, 25 bp, Homo sapien
atttctggcaagggtcacaatgttt

SEQ ID NO: 4079819 - DNA, 25 bp, Homo sapien
gctgttcattagtgctggtttgagc

SEQ ID NO: 4079820 - DNA, 25 bp, Homo sapien
cacactcaggccaaatcttcttcca

SEQ ID NO: 4079821 - DNA, 25 bp, Homo sapien
acatgctgttcattagtgctggttt

SEQ ID NO: 4079822 - DNA, 25 bp, Homo sapien
aaacgctgggcctgaacacactcag

SEQ ID NO: 4079823 - DNA, 25 bp, Homo sapien
cgtggtccggattgagtcagctgta

SEQ ID NO: 4079824 - DNA, 25 bp, Homo sapien
gattacaccttgacacgtggtccgg

SEQ ID NO: 4079825 - DNA, 25 bp, Homo sapien
gcttctaggatgtgctgaaaagtcc

SEQ ID NO: 4079826 - DNA, 25 bp, Homo sapien
tgagctttcaaggtcgagattacac

SEQ ID NO: 4079827 - DNA, 25 bp, Homo sapien
ggatgacttaaaccctggctcagca

SEQ ID NO: 4079828 - DNA, 25 bp, Homo sapien
ccttgcgggtttctgagcggtacac

SEQ ID NO: 4079829 - DNA, 25 bp, Homo sapien
caaatcacgggcaaactgggcttca

SEQ ID NO: 4079830 - DNA, 25 bp, Homo sapien
caaatttacagagtggcatgacgca

SEQ ID NO: 4079831 - DNA, 25 bp, Homo sapien
agccttctcctgaacgatggcggcg

SEQ ID NO: 4079832 - DNA, 25 bp, Homo sapien
gatggcgagtcaaccgagaggctct

SEQ ID NO: 4079833 - DNA, 25 bp, Homo sapien
gggagctgcgctgttcatcttgaag

SEQ ID NO: 4079834 - DNA, 25 bp, Homo sapien
gaatggtcgccactgtagagatagc

SEQ ID NO: 4079835 - DNA, 25 bp, Homo sapien
tcccttttggcactagggatgacag

SEQ ID NO: 4079836 - DNA, 25 bp, Homo sapien
ttctcacccgcttcaaatcgtcgta

SEQ ID NO: 4079837 - DNA, 25 bp, Homo sapien
ctagggatgacagttgcatctgtgg

SEQ ID NO: 4079838 - DNA, 25 bp, Homo sapien
atcgtcgtaacacttccaatttgag

SEQ ID NO: 4079839 - DNA, 25 bp, Homo sapien
ttaagataagtctaaaggcgctggc

SEQ ID NO: 4079840 - DNA, 25 bp, Homo sapien
gaaaacgaggctgcgaagaggctca

SEQ ID NO: 4079841 - DNA, 25 bp, Homo sapien
tgcagaactcggtcaacagaaaacg

SEQ ID NO: 4079842 - DNA, 25 bp, Homo sapien
gctggcgatcaaaccctcgaacggt

SEQ ID NO: 4079843 - DNA, 25 bp, Homo sapien
gagcgatttgcgcttgagtcccacc

SEQ ID NO: 4079844 - DNA, 25 bp, Homo sapien
tgctcggctttgtaaagcgccgggc

SEQ ID NO: 4079845 - DNA, 25 bp, Homo sapien
cgctgtttactggatgcccggtccc

SEQ ID NO: 4079846 - DNA, 25 bp, Homo sapien
acctcctcgcgaaccagctttgtgg

SEQ ID NO: 4079847 - DNA, 25 bp, Homo sapien
gtcctggggtagtcatggaaaagct

SEQ ID NO: 4079848 - DNA, 25 bp, Homo sapien
accagtaccagtgccacactgtctt

SEQ ID NO: 4079849 - DNA, 25 bp, Homo sapien
tgccacactgtctttgaggtggtcc

SEQ ID NO: 4079850 - DNA, 25 bp, Homo sapien
taggctacctggtatctacccagcc

SEQ ID NO: 4079851 - DNA, 25 bp, Homo sapien
tggcaccctacaacgtgcagtatgg

SEQ ID NO: 4079852 - DNA, 25 bp, Homo sapien
gggaaacattcatgggatccttcga

SEQ ID NO: 4079853 - DNA, 25 bp, Homo sapien
cattcatgggatccttcgagagtca

SEQ ID NO: 4079854 - DNA, 25 bp, Homo sapien
tgcagtatggccaccttctgttgtt

SEQ ID NO: 4079855 - DNA, 25 bp, Homo sapien
ctgcagcacacgacctgcctccagg

SEQ ID NO: 4079856 - DNA, 25 bp, Homo sapien
tggcgccttgtactgagggagggtt

SEQ ID NO: 4079857 - DNA, 25 bp, Homo sapien
tgtgggactcgatgaggatgccccg

SEQ ID NO: 4079858 - DNA, 25 bp, Homo sapien
ccttgtactgagggagggtttgctt

SEQ ID NO: 4079859 - DNA, 25 bp, Homo sapien
ctgagaagcaccatcggcccagcag

SEQ ID NO: 4079860 - DNA, 25 bp, Homo sapien
cccagcagagtgacacctgcgggca

SEQ ID NO: 4079861 - DNA, 25 bp, Homo sapien
tgtctgtgctgtagcggtctgtgca

SEQ ID NO: 4079862 - DNA, 25 bp, Homo sapien
cagcagagtgacacctgcgggcact

SEQ ID NO: 4079863 - DNA, 25 bp, Homo sapien
tagctgtgcacccttcccagaagat

SEQ ID NO: 4079864 - DNA, 25 bp, Homo sapien
agaagatacatcactgactgaggcc

SEQ ID NO: 4079865 - DNA, 25 bp, Homo sapien
cagtagctgtgcacccttcccagaa

SEQ ID NO: 4079866 - DNA, 25 bp, Homo sapien
tgactgaggccgtttctgggtccat

SEQ ID NO: 4079867 - DNA, 25 bp, Homo sapien
accctggcgggtggaagtgtggcca

SEQ ID NO: 4079868 - DNA, 25 bp, Homo sapien
agaccctggcgggtggaagtgtggc

SEQ ID NO: 4079869 - DNA, 25 bp, Homo sapien
ccctgtttgcaaacgagctctgtgg

SEQ ID NO: 4079870 - DNA, 25 bp, Homo sapien
gatgctttaatccccctgtttgcaa

SEQ ID NO: 4079871 - DNA, 25 bp, Homo sapien
ggaacgagctggacgtaaggccact

SEQ ID NO: 4079872 - DNA, 25 bp, Homo sapien
cattccgggaggtgtcatcaagtct

SEQ ID NO: 4079873 - DNA, 25 bp, Homo sapien
ccagcaagtttaagggccgtgggca

SEQ ID NO: 4079874 - DNA, 25 bp, Homo sapien
cagaaacgagaatgtggcctagcag

SEQ ID NO: 4079875 - DNA, 25 bp, Homo sapien
tcgcctaggggctgcttctcgtggc

SEQ ID NO: 4079876 - DNA, 25 bp, Homo sapien
cagtgagaaacgtgtccaggactgt

SEQ ID NO: 4079877 - DNA, 25 bp, Homo sapien
aaggggagcgcaggtagccggcccg

SEQ ID NO: 4079878 - DNA, 25 bp, Homo sapien
taggggctgcttctcgtggctctgc

SEQ ID NO: 4079879 - DNA, 25 bp, Homo sapien
cctgggcagggtcttttctggtgct

SEQ ID NO: 4079880 - DNA, 25 bp, Homo sapien
tgcacacatctacctctaacgggag

SEQ ID NO: 4079881 - DNA, 25 bp, Homo sapien
tggccccaccagagaggtggatgtt

SEQ ID NO: 4079882 - DNA, 25 bp, Homo sapien
ttttctggtgctccccggagtcact

SEQ ID NO: 4079883 - DNA, 25 bp, Homo sapien
ccagctcctggtccgacatgtcggt

SEQ ID NO: 4079884 - DNA, 25 bp, Homo sapien
tcgtcgtccgagtcagcaaagacct

SEQ ID NO: 4079885 - DNA, 25 bp, Homo sapien
gactcggtgttgaggttctcgtcgt

SEQ ID NO: 4079886 - DNA, 25 bp, Homo sapien
catgtcggtgagctcagtgaggtcc

SEQ ID NO: 4079887 - DNA, 25 bp, Homo sapien
gctggtactgggatgcccccgacct

SEQ ID NO: 4079888 - DNA, 25 bp, Homo sapien
aggcgtgtggccattgtcccctgtc

SEQ ID NO: 4079889 - DNA, 25 bp, Homo sapien
ctccacaggcgtgtggccattgtcc

SEQ ID NO: 4079890 - DNA, 25 bp, Homo sapien
tgcaggagccccggtgctggtactg

SEQ ID NO: 4079891 - DNA, 25 bp, Homo sapien
gcgcagcctgcggcacctcagcctc

SEQ ID NO: 4079892 - DNA, 25 bp, Homo sapien
agcgcagcctgcggcacctcagcct

SEQ ID NO: 4079893 - DNA, 25 bp, Homo sapien
gaaggatcgcccatggatttccatg

SEQ ID NO: 4079894 - DNA, 25 bp, Homo sapien
gatcacctttggtacgcaagcaccc

SEQ ID NO: 4079895 - DNA, 25 bp, Homo sapien
agtgtcaccttgagatccacagggc

SEQ ID NO: 4079896 - DNA, 25 bp, Homo sapien
tctgatttctagctcggcccagggt

SEQ ID NO: 4079897 - DNA, 25 bp, Homo sapien
caggaggaataggcaggcctgccat

SEQ ID NO: 4079898 - DNA, 25 bp, Homo sapien
tgtgatcccttagccaccaaccatg

SEQ ID NO: 4079899 - DNA, 25 bp, Homo sapien
aaccatgcctcacagttgagcaaat

SEQ ID NO: 4079900 - DNA, 25 bp, Homo sapien
cacagttgagcaaatattcttccag

SEQ ID NO: 4079901 - DNA, 25 bp, Homo sapien
tgcctcacagttgagcaaatattct

SEQ ID NO: 4079902 - DNA, 25 bp, Homo sapien
ctctgccccttgggtttgagcgatt

SEQ ID NO: 4079903 - DNA, 25 bp, Homo sapien
acctctgccccttgggtttgagcga

SEQ ID NO: 4079904 - DNA, 25 bp, Homo sapien
caacctctgccccttgggtttgagc

SEQ ID NO: 4079905 - DNA, 25 bp, Homo sapien
ctcctgcctcatccccctgagtaga

SEQ ID NO: 4079906 - DNA, 25 bp, Homo sapien
ccccagcggtgagcactgatcgtag

SEQ ID NO: 4079907 - DNA, 25 bp, Homo sapien
ccagcgcacgcttgtcagatggata

SEQ ID NO: 4079908 - DNA, 25 bp, Homo sapien
gaccctgtggggtatttttggcagc

SEQ ID NO: 4079909 - DNA, 25 bp, Homo sapien
aggtgccttcccgttgctgccagca

SEQ ID NO: 4079910 - DNA, 25 bp, Homo sapien
ctgcggcagcgactcggccccggct

SEQ ID NO: 4079911 - DNA, 25 bp, Homo sapien
tccatgcggccggtgcggtctggga

SEQ ID NO: 4079912 - DNA, 25 bp, Homo sapien
gcatcggggcagcaaccggggggcc

SEQ ID NO: 4079913 - DNA, 25 bp, Homo sapien
ccgggcgccccaacagctgcggcag

SEQ ID NO: 4079914 - DNA, 25 bp, Homo sapien
tcttccaggtacttgcgtgtggggc

SEQ ID NO: 4079915 - DNA, 25 bp, Homo sapien
gcctgactcgcgctgggtaatgaca

SEQ ID NO: 4079916 - DNA, 25 bp, Homo sapien
ggtaatgacagactcacagagcgcc

SEQ ID NO: 4079917 - DNA, 25 bp, Homo sapien
gagcgccctggatggcgcgaattaa

SEQ ID NO: 4079918 - DNA, 25 bp, Homo sapien
ctgggcgtggggctcacgtgctccc

SEQ ID NO: 4079919 - DNA, 25 bp, Homo sapien
aaagatgagagcttagggctgggcg

SEQ ID NO: 4079920 - DNA, 25 bp, Homo sapien
ggcttctgggctgccggcgacattt

SEQ ID NO: 4079921 - DNA, 25 bp, Homo sapien
tgccctgcagcgaaaggcttctggg

SEQ ID NO: 4079922 - DNA, 25 bp, Homo sapien
ccctcgtggagcttaggttccagca

SEQ ID NO: 4079923 - DNA, 25 bp, Homo sapien
ggtgtgtgtaaacccaccagcgcag

SEQ ID NO: 4079924 - DNA, 25 bp, Homo sapien
cattggcagtttaagccagtggcta

SEQ ID NO: 4079925 - DNA, 25 bp, Homo sapien
taagccagtggctaagcagagaggt

SEQ ID NO: 4079926 - DNA, 25 bp, Homo sapien
caggcaaaccattggcagtttaagc

SEQ ID NO: 4079927 - DNA, 25 bp, Homo sapien
ttacatgcaggcaaaccattggcag

SEQ ID NO: 4079928 - DNA, 25 bp, Homo sapien
gaatggattgaacactgcgttgtcc

SEQ ID NO: 4079929 - DNA, 25 bp, Homo sapien
gggcaggcccttgcactgcacatcg

SEQ ID NO: 4079930 - DNA, 25 bp, Homo sapien
tgtccgcttcccattcctgtggaga

SEQ ID NO: 4079931 - DNA, 25 bp, Homo sapien
atcgcacgttgagccacagactcag

SEQ ID NO: 4079932 - DNA, 25 bp, Homo sapien
gatggcaaaatctcaacaccatgtg

SEQ ID NO: 4079933 - DNA, 25 bp, Homo sapien
gagcctctaaaggtctgtgacgtga

SEQ ID NO: 4079934 - DNA, 25 bp, Homo sapien
cttgtgggcctaggagttcagtgct

SEQ ID NO: 4079935 - DNA, 25 bp, Homo sapien
aagacatttgtcgttgtgccgaggc

SEQ ID NO: 4079936 - DNA, 25 bp, Homo sapien
gcgcctcgcttatttccctgtttaa

SEQ ID NO: 4079937 - DNA, 25 bp, Homo sapien
ccgcgcctcgcttatttccctgttt

SEQ ID NO: 4079938 - DNA, 25 bp, Homo sapien
cataactaaccgcagcctcaacccc

SEQ ID NO: 4079939 - DNA, 25 bp, Homo sapien
caccgcgcctcgcttatttccctgt

SEQ ID NO: 4079940 - DNA, 25 bp, Homo sapien
gaaagccagttcctagcagtgggat

SEQ ID NO: 4079941 - DNA, 25 bp, Homo sapien
tatgttacgaacacgggatcaggcc

SEQ ID NO: 4079942 - DNA, 25 bp, Homo sapien
cacactggcgagttttatgggctcc

SEQ ID NO: 4079943 - DNA, 25 bp, Homo sapien
gctgcacataggaagcggtctcatc

SEQ ID NO: 4079944 - DNA, 25 bp, Homo sapien
gagctctatcggaagttcaccgcag

SEQ ID NO: 4079945 - DNA, 25 bp, Homo sapien
tgcgtggatggctctacaaagggcc

SEQ ID NO: 4079946 - DNA, 25 bp, Homo sapien
cagcagaagacagggttcaagaacc

SEQ ID NO: 4079947 - DNA, 25 bp, Homo sapien
tgctagaacgcaagctgcaggctct

SEQ ID NO: 4079948 - DNA, 25 bp, Homo sapien
gggaaccagatcagggcccactctg

SEQ ID NO: 4079949 - DNA, 25 bp, Homo sapien
tgtttgctcagcactgggcccagtg

SEQ ID NO: 4079950 - DNA, 25 bp, Homo sapien
ctgtggccccgggactgaaaactca

SEQ ID NO: 4079951 - DNA, 25 bp, Homo sapien
ccagtttcgggccagttgggaactg

SEQ ID NO: 4079952 - DNA, 25 bp, Homo sapien
ccttccctgggtgccgcacgtccag

SEQ ID NO: 4079953 - DNA, 25 bp, Homo sapien
tgtccaggcctactccctggtctca

SEQ ID NO: 4079954 - DNA, 25 bp, Homo sapien
ccatggtgtccctgtcgctcccttc

SEQ ID NO: 4079955 - DNA, 25 bp, Homo sapien
ctccgaccacagtcggcggcacctt

SEQ ID NO: 4079956 - DNA, 25 bp, Homo sapien
tccctaggaagtggtgagccaatgc

SEQ ID NO: 4079957 - DNA, 25 bp, Homo sapien
ggtgctggcactaacttcattgaca

SEQ ID NO: 4079958 - DNA, 25 bp, Homo sapien
tcccaccgaatggacagctttgcag

SEQ ID NO: 4079959 - DNA, 25 bp, Homo sapien
tccctcggtaggtgatgtaggacca

SEQ ID NO: 4079960 - DNA, 25 bp, Homo sapien
gcttctgcggcggctccagtgtggg

SEQ ID NO: 4079961 - DNA, 25 bp, Homo sapien
agctggagttggctcagatgaaaac

SEQ ID NO: 4079962 - DNA, 25 bp, Homo sapien
cccagtaagtcaggcgcttctgcgg

SEQ ID NO: 4079963 - DNA, 25 bp, Homo sapien
cttctgcggcggctccagtgtgggg

SEQ ID NO: 4079964 - DNA, 25 bp, Homo sapien
tggcctgcagatcccagtgagtcat

SEQ ID NO: 4079965 - DNA, 25 bp, Homo sapien
ggcctgcagatcccagtgagtcatg

SEQ ID NO: 4079966 - DNA, 25 bp, Homo sapien
tcttcctccagtagccctcagtgtc

SEQ ID NO: 4079967 - DNA, 25 bp, Homo sapien
cagtagccctcagtgtcgaaggtga

SEQ ID NO: 4079968 - DNA, 25 bp, Homo sapien
cctcagtgtcgaaggtgagcttgta

SEQ ID NO: 4079969 - DNA, 25 bp, Homo sapien
cctccagtagccctcagtgtcgaag

SEQ ID NO: 4079970 - DNA, 25 bp, Homo sapien
aggacagtgaccatctgggtctgtg

SEQ ID NO: 4079971 - DNA, 25 bp, Homo sapien
ggtccaggacagtgaccatctgggt

SEQ ID NO: 4079972 - DNA, 25 bp, Homo sapien
cttcatctggtccaggacagtgacc

SEQ ID NO: 4079973 - DNA, 25 bp, Homo sapien
tctggtccaggacagtgaccatctg

SEQ ID NO: 4079974 - DNA, 25 bp, Homo sapien
tctggaaaacctcccatcattcttg

SEQ ID NO: 4079975 - DNA, 25 bp, Homo sapien
tggtcccttatcagggttctgaata

SEQ ID NO: 4079976 - DNA, 25 bp, Homo sapien
ttctgaataaccgtggctttgccca

SEQ ID NO: 4079977 - DNA, 25 bp, Homo sapien
caactccacggagcgtctgtgttgt

SEQ ID NO: 4079978 - DNA, 25 bp, Homo sapien
cacgtgggtggtcagtaggttgtcc

SEQ ID NO: 4079979 - DNA, 25 bp, Homo sapien
tccagccagcacaagcggaggcaga

SEQ ID NO: 4079980 - DNA, 25 bp, Homo sapien
tcagtaggttgtccggaggctccgt

SEQ ID NO: 4079981 - DNA, 25 bp, Homo sapien
tcagctccgcccactgctggccgtg

SEQ ID NO: 4079982 - DNA, 25 bp, Homo sapien
aggccagggtgagcctctggagccc

SEQ ID NO: 4079983 - DNA, 25 bp, Homo sapien
aaggaggccagggtgagcctctgga

SEQ ID NO: 4079984 - DNA, 25 bp, Homo sapien
ccagggtgagcctctggagccctgt

SEQ ID NO: 4079985 - DNA, 25 bp, Homo sapien
gtgagcctctggagccctgtgcccg

SEQ ID NO: 4079986 - DNA, 25 bp, Homo sapien
ccacaccaatcctgcgtccacacca

SEQ ID NO: 4079987 - DNA, 25 bp, Homo sapien
caccaatcctgcgtccacaccagct

SEQ ID NO: 4079988 - DNA, 25 bp, Homo sapien
cacaccaatcctgcgtccacaccag

SEQ ID NO: 4079989 - DNA, 25 bp, Homo sapien
ccaatcctgcgtccacaccagctgt

SEQ ID NO: 4079990 - DNA, 25 bp, Homo sapien
accaaacgtaaacagcgcagcctgt

SEQ ID NO: 4079991 - DNA, 25 bp, Homo sapien
aggcagctgatgaggcaccaaacgt

SEQ ID NO: 4079992 - DNA, 25 bp, Homo sapien
ggcaccaaacgtaaacagcgcagcc

SEQ ID NO: 4079993 - DNA, 25 bp, Homo sapien
cagggggcaagggtgaccggaagtg

SEQ ID NO: 4079994 - DNA, 25 bp, Homo sapien
ctgccccactggggacacccactgt

SEQ ID NO: 4079995 - DNA, 25 bp, Homo sapien
gccccactggggacacccactgtcc

SEQ ID NO: 4079996 - DNA, 25 bp, Homo sapien
ccactggggacacccactgtcccgc

SEQ ID NO: 4079997 - DNA, 25 bp, Homo sapien
tggggacacccactgtcccgcccac

SEQ ID NO: 4079998 - DNA, 25 bp, Homo sapien
ctgggccctcgacgctcagccccac

SEQ ID NO: 4079999 - DNA, 25 bp, Homo sapien
gccccacgcaagcagctgaggggac

SEQ ID NO: 4080000 - DNA, 25 bp, Homo sapien
ttcctgggccctcgacgctcagccc

SEQ ID NO: 4080001 - DNA, 25 bp, Homo sapien
ccggttcctgggccctcgacgctca

SEQ ID NO: 4080002 - DNA, 25 bp, Homo sapien
gcctaggtgtcgctggagcctcagc

SEQ ID NO: 4080003 - DNA, 25 bp, Homo sapien
gggcctaggtgtcgctggagcctca

SEQ ID NO: 4080004 - DNA, 25 bp, Homo sapien
gggggcctaggtgtcgctggagcct

SEQ ID NO: 4080005 - DNA, 25 bp, Homo sapien
cctaggtgtcgctggagcctcagca

SEQ ID NO: 4080006 - DNA, 25 bp, Homo sapien
ccggccggaaccactgcttggtgaa

SEQ ID NO: 4080007 - DNA, 25 bp, Homo sapien
tctgtagacaggctagaacgaatgc

SEQ ID NO: 4080008 - DNA, 25 bp, Homo sapien
ggtgaatctctgtagactggccgga

SEQ ID NO: 4080009 - DNA, 25 bp, Homo sapien
ttctctgtagacaggctagaacgaa

SEQ ID NO: 4080010 - DNA, 25 bp, Homo sapien
cccaaagggctgattgctgtttagc

SEQ ID NO: 4080011 - DNA, 25 bp, Homo sapien
gcaacaagggtttctgttcaatgag

SEQ ID NO: 4080012 - DNA, 25 bp, Homo sapien
gggctgattgctgtttagccctttg

SEQ ID NO: 4080013 - DNA, 25 bp, Homo sapien
attgctgtttagccctttgggaaga

SEQ ID NO: 4080014 - DNA, 25 bp, Homo sapien
tcctgtggagacttgaactgaacgt

SEQ ID NO: 4080015 - DNA, 25 bp, Homo sapien
tagaagaggtcacacttcccaggag

SEQ ID NO: 4080016 - DNA, 25 bp, Homo sapien
tcacacagatacgtacacagagggc

SEQ ID NO: 4080017 - DNA, 25 bp, Homo sapien
catgcgtgttcctgtctggcgttca

SEQ ID NO: 4080018 - DNA, 25 bp, Homo sapien
gacttccggctaaagccctcccaca

SEQ ID NO: 4080019 - DNA, 25 bp, Homo sapien
gcagactggggcgtctcccctgtgt

SEQ ID NO: 4080020 - DNA, 25 bp, Homo sapien
tctgacttccggctaaagccctccc

SEQ ID NO: 4080021 - DNA, 25 bp, Homo sapien
agactggggcgtctcccctgtgtgt

SEQ ID NO: 4080022 - DNA, 25 bp, Homo sapien
acttatcactgaaaccttgcccaca

SEQ ID NO: 4080023 - DNA, 25 bp, Homo sapien
gacttatcactgaaaccttgcccac

SEQ ID NO: 4080024 - DNA, 25 bp, Homo sapien
cttatcactgaaaccttgcccacac

SEQ ID NO: 4080025 - DNA, 25 bp, Homo sapien
ggttttgtcattacagcagcgtgga

SEQ ID NO: 4080026 - DNA, 25 bp, Homo sapien
tggttttgtcattacagcagcgtgg

SEQ ID NO: 4080027 - DNA, 25 bp, Homo sapien
agttctgagaggagtgattgcgttc

SEQ ID NO: 4080028 - DNA, 25 bp, Homo sapien
tcctgattctgatcccctgggcagg

SEQ ID NO: 4080029 - DNA, 25 bp, Homo sapien
ctgggaagttctgagaggagtgatt

SEQ ID NO: 4080030 - DNA, 25 bp, Homo sapien
ggaagttctgagaggagtgattgcg

SEQ ID NO: 4080031 - DNA, 25 bp, Homo sapien
ccacttgctgccccacttgatgccc

SEQ ID NO: 4080032 - DNA, 25 bp, Homo sapien
cacttgctgccccacttgatgccca

SEQ ID NO: 4080033 - DNA, 25 bp, Homo sapien
ctggcctaatgactcggcaggttct

SEQ ID NO: 4080034 - DNA, 25 bp, Homo sapien
taatgactcggcaggttctatagaa

SEQ ID NO: 4080035 - DNA, 25 bp, Homo sapien
ctcggcaggttctatagaagatctg

SEQ ID NO: 4080036 - DNA, 25 bp, Homo sapien
tgactcggcaggttctatagaagat

SEQ ID NO: 4080037 - DNA, 25 bp, Homo sapien
ggccatactcatccccagaccagac

SEQ ID NO: 4080038 - DNA, 25 bp, Homo sapien
tggccatactcatccccagaccaga

SEQ ID NO: 4080039 - DNA, 25 bp, Homo sapien
tcggcaggttctatagaagatctgc

SEQ ID NO: 4080040 - DNA, 25 bp, Homo sapien
atcttttccatccacatactcatag

SEQ ID NO: 4080041 - DNA, 25 bp, Homo sapien
tccatccacatactcatagcagttt

SEQ ID NO: 4080042 - DNA, 25 bp, Homo sapien
catactcatagcagtttctcccctt

SEQ ID NO: 4080043 - DNA, 25 bp, Homo sapien
tccacatactcatagcagtttctcc

SEQ ID NO: 4080044 - DNA, 25 bp, Homo sapien
cgtcttctgtaattcggccctcata

SEQ ID NO: 4080045 - DNA, 25 bp, Homo sapien
ctgagggatgcctgatggcccaatt

SEQ ID NO: 4080046 - DNA, 25 bp, Homo sapien
gcctcttcgtcttctgtaattcggc

SEQ ID NO: 4080047 - DNA, 25 bp, Homo sapien
gggatgcctgatggcccaattctca

SEQ ID NO: 4080048 - DNA, 25 bp, Homo sapien
tgcatgttccttgatataagagctt

SEQ ID NO: 4080049 - DNA, 25 bp, Homo sapien
tactttaattcattcgagtaaggga

SEQ ID NO: 4080050 - DNA, 25 bp, Homo sapien
gaagcagggattaggaaagttgtaa

SEQ ID NO: 4080051 - DNA, 25 bp, Homo sapien
gagcgtggcactcacattatttagc

SEQ ID NO: 4080052 - DNA, 25 bp, Homo sapien
gtcatcatcctgtggctcgctgatc

SEQ ID NO: 4080053 - DNA, 25 bp, Homo sapien
agtcatcatcctgtggctcgctgat

SEQ ID NO: 4080054 - DNA, 25 bp, Homo sapien
ccttcagtctccttcctcctgagtt

SEQ ID NO: 4080055 - DNA, 25 bp, Homo sapien
ttccttcagtctccttcctcctgag

SEQ ID NO: 4080056 - DNA, 25 bp, Homo sapien
atacatctttccttcagtctccttc

SEQ ID NO: 4080057 - DNA, 25 bp, Homo sapien
ctatacatctttccttcagtctcct

SEQ ID NO: 4080058 - DNA, 25 bp, Homo sapien
cttgtattcagtaaatttggcgttc

SEQ ID NO: 4080059 - DNA, 25 bp, Homo sapien
aaatttggcgttcctgacaattctc

SEQ ID NO: 4080060 - DNA, 25 bp, Homo sapien
ttcagtaaatttggcgttcctgaca

SEQ ID NO: 4080061 - DNA, 25 bp, Homo sapien
tgtattcagtaaatttggcgttcct

SEQ ID NO: 4080062 - DNA, 25 bp, Homo sapien
gtttactctgttctcctctgaaggc

SEQ ID NO: 4080063 - DNA, 25 bp, Homo sapien
cacatgaaagctggtcgagtggctc

SEQ ID NO: 4080064 - DNA, 25 bp, Homo sapien
gagtttgatggcctgccttcggtga

SEQ ID NO: 4080065 - DNA, 25 bp, Homo sapien
catgaaagctggtcgagtggctctg

SEQ ID NO: 4080066 - DNA, 25 bp, Homo sapien
cctgccttcggtgacacatgaaagc

SEQ ID NO: 4080067 - DNA, 25 bp, Homo sapien
cattcctatagcgagttttctccca

SEQ ID NO: 4080068 - DNA, 25 bp, Homo sapien
cacattcctatagcgagttttctcc

SEQ ID NO: 4080069 - DNA, 25 bp, Homo sapien
tttcacattcctatagcgagttttc

SEQ ID NO: 4080070 - DNA, 25 bp, Homo sapien
cctatagcgagttttctcccagtct

SEQ ID NO: 4080071 - DNA, 25 bp, Homo sapien
catgggcttccgctctgttctctct

SEQ ID NO: 4080072 - DNA, 25 bp, Homo sapien
atgggcttccgctctgttctctctg

SEQ ID NO: 4080073 - DNA, 25 bp, Homo sapien
tcaccacttgtggaacagacttttc

SEQ ID NO: 4080074 - DNA, 25 bp, Homo sapien
tgtttctaaacgaggactatctgca

SEQ ID NO: 4080075 - DNA, 25 bp, Homo sapien
tttggctgacccgtgaagtttgtgt

SEQ ID NO: 4080076 - DNA, 25 bp, Homo sapien
cattgaattgcgtttgccccatgac

SEQ ID NO: 4080077 - DNA, 25 bp, Homo sapien
caaacttcattatagaggccaaacc

SEQ ID NO: 4080078 - DNA, 25 bp, Homo sapien
ccaggtcagtggaagctgtgtacca

SEQ ID NO: 4080079 - DNA, 25 bp, Homo sapien
caagcgccctgctgtcatgtcagta

SEQ ID NO: 4080080 - DNA, 25 bp, Homo sapien
tatagaggccaaaccaatccaaatc

SEQ ID NO: 4080081 - DNA, 25 bp, Homo sapien
gcaagggaagtatagcgtaaaagct

SEQ ID NO: 4080082 - DNA, 25 bp, Homo sapien
agaggaattgaaggcattttagaaa

SEQ ID NO: 4080083 - DNA, 25 bp, Homo sapien
tgcagcctactcatgtggcagaaaa

SEQ ID NO: 4080084 - DNA, 25 bp, Homo sapien
caggctgtggagcaatcacttgtta

SEQ ID NO: 4080085 - DNA, 25 bp, Homo sapien
catgtgatgtgcaagcaccggattt

SEQ ID NO: 4080086 - DNA, 25 bp, Homo sapien
gcaagcaccggatttatttttcacc

SEQ ID NO: 4080087 - DNA, 25 bp, Homo sapien
gcagaagccagtgctatgctttctg

SEQ ID NO: 4080088 - DNA, 25 bp, Homo sapien
tgattgtcagttgtcagaggcttca

SEQ ID NO: 4080089 - DNA, 25 bp, Homo sapien
cagttgcacatggtcggagaggcct

SEQ ID NO: 4080090 - DNA, 25 bp, Homo sapien
tgcacatggtcggagaggcctcaca

SEQ ID NO: 4080091 - DNA, 25 bp, Homo sapien
gttgcacatggtcggagaggcctca

SEQ ID NO: 4080092 - DNA, 25 bp, Homo sapien
cacagttgcacatggtcggagaggc

SEQ ID NO: 4080093 - DNA, 25 bp, Homo sapien
aaacacattgagcatcctgctcttg

SEQ ID NO: 4080094 - DNA, 25 bp, Homo sapien
tataaacacattgagcatcctgctc

SEQ ID NO: 4080095 - DNA, 25 bp, Homo sapien
acacattgagcatcctgctcttgcc

SEQ ID NO: 4080096 - DNA, 25 bp, Homo sapien
ttataaacacattgagcatcctgct

SEQ ID NO: 4080097 - DNA, 25 bp, Homo sapien
cataagcccttaagctgtgagcact

SEQ ID NO: 4080098 - DNA, 25 bp, Homo sapien
ttgagccggtgtgtgtcataagccc

SEQ ID NO: 4080099 - DNA, 25 bp, Homo sapien
gaggctcctgggcactaaatgttca

SEQ ID NO: 4080100 - DNA, 25 bp, Homo sapien
caagaaacacgtagaacccatggca

SEQ ID NO: 4080101 - DNA, 25 bp, Homo sapien
tctggttacaccatcagcgatacct

SEQ ID NO: 4080102 - DNA, 25 bp, Homo sapien
gccaggcgatgtccattaaaacagt

SEQ ID NO: 4080103 - DNA, 25 bp, Homo sapien
ggagaccctgcacagtgtttgagga

SEQ ID NO: 4080104 - DNA, 25 bp, Homo sapien
aactggaaactcatgctggcttgac

SEQ ID NO: 4080105 - DNA, 25 bp, Homo sapien
cactatttctagttgtcgtctgcta

SEQ ID NO: 4080106 - DNA, 25 bp, Homo sapien
catataaataaacgggcacatccag

SEQ ID NO: 4080107 - DNA, 25 bp, Homo sapien
tgtatctttcgatgcatctagagag

SEQ ID NO: 4080108 - DNA, 25 bp, Homo sapien
cgtctgctaataagtttacatctgg

SEQ ID NO: 4080109 - DNA, 25 bp, Homo sapien
catgctgttggatattcaggttttt

SEQ ID NO: 4080110 - DNA, 25 bp, Homo sapien
tcatgctgttggatattcaggtttt

SEQ ID NO: 4080111 - DNA, 25 bp, Homo sapien
tgctgttggatattcaggttttttt

SEQ ID NO: 4080112 - DNA, 25 bp, Homo sapien
gtcatgctgttggatattcaggttt

SEQ ID NO: 4080113 - DNA, 25 bp, Homo sapien
gatgggtacattaaagcttgcaact

SEQ ID NO: 4080114 - DNA, 25 bp, Homo sapien
tctgaaaagtccagccagatgatgg

SEQ ID NO: 4080115 - DNA, 25 bp, Homo sapien
tccccaaatgcgaaagaactctaag

SEQ ID NO: 4080116 - DNA, 25 bp, Homo sapien
gcaactttgcacgtgagtgcaccct

SEQ ID NO: 4080117 - DNA, 25 bp, Homo sapien
agttcatggcctgcggtcatcaggg

SEQ ID NO: 4080118 - DNA, 25 bp, Homo sapien
cactgactgggggtcagtcttttct

SEQ ID NO: 4080119 - DNA, 25 bp, Homo sapien
ccataagttcatggcctgcggtcat

SEQ ID NO: 4080120 - DNA, 25 bp, Homo sapien
catggcctgcggtcatcagggaaaa

SEQ ID NO: 4080121 - DNA, 25 bp, Homo sapien
agtgccaaggagtgagtctttagag

SEQ ID NO: 4080122 - DNA, 25 bp, Homo sapien
gtccacggccctgagtgccaaggag

SEQ ID NO: 4080123 - DNA, 25 bp, Homo sapien
gcaagagcgtctgtgctgaaccatg

SEQ ID NO: 4080124 - DNA, 25 bp, Homo sapien
gtgctgaaccatggcgccaccagag

SEQ ID NO: 4080125 - DNA, 25 bp, Homo sapien
catgtgcttgttggtgaagtgtgtc

SEQ ID NO: 4080126 - DNA, 25 bp, Homo sapien
tcttgtgtgagttaagggttatctc

SEQ ID NO: 4080127 - DNA, 25 bp, Homo sapien
tctggataacagacactgatgaagt

SEQ ID NO: 4080128 - DNA, 25 bp, Homo sapien
acacgtaggctgcaccatttcatat

SEQ ID NO: 4080129 - DNA, 25 bp, Homo sapien
gaggcaccctggtaggctagtggag

SEQ ID NO: 4080130 - DNA, 25 bp, Homo sapien
atgagaggcaccctggtaggctagt

SEQ ID NO: 4080131 - DNA, 25 bp, Homo sapien
ctttatgagaggcaccctggtaggc

SEQ ID NO: 4080132 - DNA, 25 bp, Homo sapien
ttatgagaggcaccctggtaggcta

SEQ ID NO: 4080133 - DNA, 25 bp, Homo sapien
gacaaagaccaacgagccaccacag

SEQ ID NO: 4080134 - DNA, 25 bp, Homo sapien
agagacaaagaccaacgagccacca

SEQ ID NO: 4080135 - DNA, 25 bp, Homo sapien
tctaagagacaaagaccaacgagcc

SEQ ID NO: 4080136 - DNA, 25 bp, Homo sapien
ctaagagacaaagaccaacgagcca

SEQ ID NO: 4080137 - DNA, 25 bp, Homo sapien
gaaggctttctactaatggaattcc

SEQ ID NO: 4080138 - DNA, 25 bp, Homo sapien
aatggcgcaaccttgctggtcactg

SEQ ID NO: 4080139 - DNA, 25 bp, Homo sapien
tatgtagaaggccttcccaaaggaa

SEQ ID NO: 4080140 - DNA, 25 bp, Homo sapien
ttcccgcctcgactcctgatatcaa

SEQ ID NO: 4080141 - DNA, 25 bp, Homo sapien
tgtagggtactttgttgtagcaaca

SEQ ID NO: 4080142 - DNA, 25 bp, Homo sapien
cctcatgttacagttgctcacgcct

SEQ ID NO: 4080143 - DNA, 25 bp, Homo sapien
catgaagctgggacctcatgttaca

SEQ ID NO: 4080144 - DNA, 25 bp, Homo sapien
tgccactaaatgtagggtactttgt

SEQ ID NO: 4080145 - DNA, 25 bp, Homo sapien
tgacctcaggcaatctgcctgcctc

SEQ ID NO: 4080146 - DNA, 25 bp, Homo sapien
cctcagcctcccaaaattcaaggag

SEQ ID NO: 4080147 - DNA, 25 bp, Homo sapien
attggccaggctcctctggagctcc

SEQ ID NO: 4080148 - DNA, 25 bp, Homo sapien
catattggccaggctcctctggagc

SEQ ID NO: 4080149 - DNA, 25 bp, Homo sapien
aggagaaagagtgtgcgttcaaggg

SEQ ID NO: 4080150 - DNA, 25 bp, Homo sapien
tcgggagtcatagaagtcttctatg

SEQ ID NO: 4080151 - DNA, 25 bp, Homo sapien
atctcgggagtcatagaagtcttct

SEQ ID NO: 4080152 - DNA, 25 bp, Homo sapien
gaggagaaagagtgtgcgttcaagg

SEQ ID NO: 4080153 - DNA, 25 bp, Homo sapien
acatctggctagtttcttttatttt

SEQ ID NO: 4080154 - DNA, 25 bp, Homo sapien
aggctggccacaaattcctggtctc

SEQ ID NO: 4080155 - DNA, 25 bp, Homo sapien
accacatctggctagtttcttttat

SEQ ID NO: 4080156 - DNA, 25 bp, Homo sapien
atagatggggtcttgttgtgttggc

SEQ ID NO: 4080157 - DNA, 25 bp, Homo sapien
taataactggtgtggtgttgtgcac

SEQ ID NO: 4080158 - DNA, 25 bp, Homo sapien
tggtgttgtgcacctagagttccaa

SEQ ID NO: 4080159 - DNA, 25 bp, Homo sapien
ctgagatgagaggataccttgagct

SEQ ID NO: 4080160 - DNA, 25 bp, Homo sapien
tagagttccaactactagggaagct

SEQ ID NO: 4080161 - DNA, 25 bp, Homo sapien
tcatgtcacgacatactgccgctgc

SEQ ID NO: 4080162 - DNA, 25 bp, Homo sapien
tgtcatgtcacgacatactgccgct

SEQ ID NO: 4080163 - DNA, 25 bp, Homo sapien
gtatgtcatgtcacgacatactgcc

SEQ ID NO: 4080164 - DNA, 25 bp, Homo sapien
gtcacgacatactgccgctgcacga

SEQ ID NO: 4080165 - DNA, 25 bp, Homo sapien
aatgaaaaatatcgcccacgatcaa

SEQ ID NO: 4080166 - DNA, 25 bp, Homo sapien
atatcgcccacgatcaacgtgttct

SEQ ID NO: 4080167 - DNA, 25 bp, Homo sapien
gcacaatgaaaaatatcgcccacga

SEQ ID NO: 4080168 - DNA, 25 bp, Homo sapien
tatcgcccacgatcaacgtgttctg

SEQ ID NO: 4080169 - DNA, 25 bp, Homo sapien
agtgggcctggagggtggctgtggc

SEQ ID NO: 4080170 - DNA, 25 bp, Homo sapien
gggaagatgtgtgcatagtgggcct

SEQ ID NO: 4080171 - DNA, 25 bp, Homo sapien
tgtgtgcatagtgggcctggagggt

SEQ ID NO: 4080172 - DNA, 25 bp, Homo sapien
agatgtgtgcatagtgggcctggag

SEQ ID NO: 4080173 - DNA, 25 bp, Homo sapien
ggccggcactggtccagggtacgtg

SEQ ID NO: 4080174 - DNA, 25 bp, Homo sapien
aggacagtgccttctcggtctccgg

SEQ ID NO: 4080175 - DNA, 25 bp, Homo sapien
tacgtgcagtgaagaggacagtgcc

SEQ ID NO: 4080176 - DNA, 25 bp, Homo sapien
ccggcactggtccagggtacgtgca

SEQ ID NO: 4080177 - DNA, 25 bp, Homo sapien
ccttgaacttgagatcggtgtcggt

SEQ ID NO: 4080178 - DNA, 25 bp, Homo sapien
ggtgtcggtggtgctaaagccatca

SEQ ID NO: 4080179 - DNA, 25 bp, Homo sapien
atcggtgtcggtggtgctaaagcca

SEQ ID NO: 4080180 - DNA, 25 bp, Homo sapien
cttgaacttgagatcggtgtcggtg

SEQ ID NO: 4080181 - DNA, 25 bp, Homo sapien
tcctcgtcactcgctatgacctcgc

SEQ ID NO: 4080182 - DNA, 25 bp, Homo sapien
ctcgctatgacctcgctggccatgt

SEQ ID NO: 4080183 - DNA, 25 bp, Homo sapien
tcgctatgacctcgctggccatgtg

SEQ ID NO: 4080184 - DNA, 25 bp, Homo sapien
tcgtcactcgctatgacctcgctgg

SEQ ID NO: 4080185 - DNA, 25 bp, Homo sapien
ccaggtcgtatttctgcatctcatt

SEQ ID NO: 4080186 - DNA, 25 bp, Homo sapien
aaggccaggtcgtatttctgcatct

SEQ ID NO: 4080187 - DNA, 25 bp, Homo sapien
ggccaggtcgtatttctgcatctca

SEQ ID NO: 4080188 - DNA, 25 bp, Homo sapien
gaaggccaggtcgtatttctgcatc

SEQ ID NO: 4080189 - DNA, 25 bp, Homo sapien
agtcctgttccttgctcagggcact

SEQ ID NO: 4080190 - DNA, 25 bp, Homo sapien
tgccgcctgctgaagatcatgagcg

SEQ ID NO: 4080191 - DNA, 25 bp, Homo sapien
ccccgccagggcctggtgccgcctg

SEQ ID NO: 4080192 - DNA, 25 bp, Homo sapien
ccgcctgctgaagatcatgagcgcc

SEQ ID NO: 4080193 - DNA, 25 bp, Homo sapien
tccatggtgggaggtgagcttttac

SEQ ID NO: 4080194 - DNA, 25 bp, Homo sapien
tgtccagcagggactcccctgaggg

SEQ ID NO: 4080195 - DNA, 25 bp, Homo sapien
tcctccatggtgggaggtgagcttt

SEQ ID NO: 4080196 - DNA, 25 bp, Homo sapien
gcagggactcccctgaggggcccag

SEQ ID NO: 4080197 - DNA, 25 bp, Homo sapien
caaagtgtgtggggttgcgggccct

SEQ ID NO: 4080198 - DNA, 25 bp, Homo sapien
ggccgcccagggtcaacactccctg

SEQ ID NO: 4080199 - DNA, 25 bp, Homo sapien
cgcccagggtcaacactccctgtcc

SEQ ID NO: 4080200 - DNA, 25 bp, Homo sapien
ccagggtcaacactccctgtcccac

SEQ ID NO: 4080201 - DNA, 25 bp, Homo sapien
ctggtggacgctcatgagcaacggc

SEQ ID NO: 4080202 - DNA, 25 bp, Homo sapien
tggacgctcatgagcaacggctgcc

SEQ ID NO: 4080203 - DNA, 25 bp, Homo sapien
tggtggacgctcatgagcaacggct

SEQ ID NO: 4080204 - DNA, 25 bp, Homo sapien
gacgctcatgagcaacggctgccaa

SEQ ID NO: 4080205 - DNA, 25 bp, Homo sapien
tggcaggttgctgggcctcgtgtgg

SEQ ID NO: 4080206 - DNA, 25 bp, Homo sapien
tggcaggttgttttctctggttgga

SEQ ID NO: 4080207 - DNA, 25 bp, Homo sapien
gactggcaggttgctgggcctcgtg

SEQ ID NO: 4080208 - DNA, 25 bp, Homo sapien
cttggcaggttgttttctctggttg

SEQ ID NO: 4080209 - DNA, 25 bp, Homo sapien
ggagaacacggccgcagagtgacct

SEQ ID NO: 4080210 - DNA, 25 bp, Homo sapien
taccaggagaacacggccgcagagt

SEQ ID NO: 4080211 - DNA, 25 bp, Homo sapien
agaacacggccgcagagtgaccttc

SEQ ID NO: 4080212 - DNA, 25 bp, Homo sapien
caggagaacacggccgcagagtgac

SEQ ID NO: 4080213 - DNA, 25 bp, Homo sapien
aacaaagcaatttactgaacccagt

SEQ ID NO: 4080214 - DNA, 25 bp, Homo sapien
agcaatttactgaacccagtggtct

SEQ ID NO: 4080215 - DNA, 25 bp, Homo sapien
cccagtggtctcattattctggagg

SEQ ID NO: 4080216 - DNA, 25 bp, Homo sapien
gaacccagtggtctcattattctgg

SEQ ID NO: 4080217 - DNA, 25 bp, Homo sapien
caaacatgaggcaaagctagacaca

SEQ ID NO: 4080218 - DNA, 25 bp, Homo sapien
ccagacttcttagagaacccagtga

SEQ ID NO: 4080219 - DNA, 25 bp, Homo sapien
tgtctatgccacatgtgccttcggc

SEQ ID NO: 4080220 - DNA, 25 bp, Homo sapien
tagcctcaggctaaactttggtttc

SEQ ID NO: 4080221 - DNA, 25 bp, Homo sapien
aaaagctatgcagaagaattctgag

SEQ ID NO: 4080222 - DNA, 25 bp, Homo sapien
cataaaagctatgcagaagaattct

SEQ ID NO: 4080223 - DNA, 25 bp, Homo sapien
cacataaaagctatgcagaagaatt

SEQ ID NO: 4080224 - DNA, 25 bp, Homo sapien
ttcacataaaagctatgcagaagaa

SEQ ID NO: 4080225 - DNA, 25 bp, Homo sapien
cactttgtggactatggtagagaag

SEQ ID NO: 4080226 - DNA, 25 bp, Homo sapien
cttttagtagagtctgaatgtggac

SEQ ID NO: 4080227 - DNA, 25 bp, Homo sapien
acatttggagcgcactgaggccatg

SEQ ID NO: 4080228 - DNA, 25 bp, Homo sapien
ggagcactttgtggactatggtaga

SEQ ID NO: 4080229 - DNA, 25 bp, Homo sapien
gagtcaggcagccattgtcagttgg

SEQ ID NO: 4080230 - DNA, 25 bp, Homo sapien
tcaggcagccattgtcagttggtgg

SEQ ID NO: 4080231 - DNA, 25 bp, Homo sapien
ggcagccattgtcagttggtgggtc

SEQ ID NO: 4080232 - DNA, 25 bp, Homo sapien
gagtgttagagtcaggcagccattg

SEQ ID NO: 4080233 - DNA, 25 bp, Homo sapien
cactttctatctaccagaggtgtta

SEQ ID NO: 4080234 - DNA, 25 bp, Homo sapien
caccatcaaggatgtcaagctggca

SEQ ID NO: 4080235 - DNA, 25 bp, Homo sapien
tggcactttctatctaccagaggtg

SEQ ID NO: 4080236 - DNA, 25 bp, Homo sapien
tgtcaagctggcactttctatctac

SEQ ID NO: 4080237 - DNA, 25 bp, Homo sapien
attctcaccataaagagcataatgg

SEQ ID NO: 4080238 - DNA, 25 bp, Homo sapien
ctgacaaattctcaccataaagagc

SEQ ID NO: 4080239 - DNA, 25 bp, Homo sapien
aaattctcaccataaagagcataat

SEQ ID NO: 4080240 - DNA, 25 bp, Homo sapien
caccataaagagcataatggacagc

SEQ ID NO: 4080241 - DNA, 25 bp, Homo sapien
caaatattttgaaaataacattggt

SEQ ID NO: 4080242 - DNA, 25 bp, Homo sapien
tttgaaaataacattggttaacatc

SEQ ID NO: 4080243 - DNA, 25 bp, Homo sapien
gaaaataacattggttaacatctac

SEQ ID NO: 4080244 - DNA, 25 bp, Homo sapien
tcaaatattttgaaaataacattgg

SEQ ID NO: 4080245 - DNA, 25 bp, Homo sapien
tgctctaaatgggtcactaaggaag

SEQ ID NO: 4080246 - DNA, 25 bp, Homo sapien
cattccagatgccaatgtcaggctc

SEQ ID NO: 4080247 - DNA, 25 bp, Homo sapien
tctgtcaatgatcccaacattccag

SEQ ID NO: 4080248 - DNA, 25 bp, Homo sapien
gatcccaacattccagatgccaatg

SEQ ID NO: 4080249 - DNA, 25 bp, Homo sapien
cttttccttatggccagtaaaagtg

SEQ ID NO: 4080250 - DNA, 25 bp, Homo sapien
ccagtaaaagtggtgtgtggccagc

SEQ ID NO: 4080251 - DNA, 25 bp, Homo sapien
ggccagtaaaagtggtgtgtggcca

SEQ ID NO: 4080252 - DNA, 25 bp, Homo sapien
tccttatggccagtaaaagtggtgt

SEQ ID NO: 4080253 - DNA, 25 bp, Homo sapien
tttaaacttatcaactgcatttgca

SEQ ID NO: 4080254 - DNA, 25 bp, Homo sapien
taaacttatcaactgcatttgcatt

SEQ ID NO: 4080255 - DNA, 25 bp, Homo sapien
aaacttatcaactgcatttgcattt

SEQ ID NO: 4080256 - DNA, 25 bp, Homo sapien
catttaaacttatcaactgcatttg

SEQ ID NO: 4080257 - DNA, 25 bp, Homo sapien
tgcaatcattccacacggatcttca

SEQ ID NO: 4080258 - DNA, 25 bp, Homo sapien
tccacacggatcttcagcacaggtg

SEQ ID NO: 4080259 - DNA, 25 bp, Homo sapien
gcaatcattccacacggatcttcag

SEQ ID NO: 4080260 - DNA, 25 bp, Homo sapien
acggatcttcagcacaggtgtcaac

SEQ ID NO: 4080261 - DNA, 25 bp, Homo sapien
atatgcaacactttacggatttcta

SEQ ID NO: 4080262 - DNA, 25 bp, Homo sapien
cgttgtttcaattttactatatgaa

SEQ ID NO: 4080263 - DNA, 25 bp, Homo sapien
actttacggatttctatgtcatcct

SEQ ID NO: 4080264 - DNA, 25 bp, Homo sapien
caacactttacggatttctatgtca

SEQ ID NO: 4080265 - DNA, 25 bp, Homo sapien
cctcggcgctgcccttgccaagaca

SEQ ID NO: 4080266 - DNA, 25 bp, Homo sapien
ggcgctgcccttgccaagacaccag

SEQ ID NO: 4080267 - DNA, 25 bp, Homo sapien
tcggcgctgcccttgccaagacacc

SEQ ID NO: 4080268 - DNA, 25 bp, Homo sapien
tgccaagacaccagtagagctggca

SEQ ID NO: 4080269 - DNA, 25 bp, Homo sapien
catcgcctccgcgtgcagcgccgct

SEQ ID NO: 4080270 - DNA, 25 bp, Homo sapien
tgcaccaccctccgcttcacccctg

SEQ ID NO: 4080271 - DNA, 25 bp, Homo sapien
ctgcaccaccctccgcttcacccct

SEQ ID NO: 4080272 - DNA, 25 bp, Homo sapien
accaccctccgcttcacccctgcca

SEQ ID NO: 4080273 - DNA, 25 bp, Homo sapien
agcccccacaggctgccaatgaaga

SEQ ID NO: 4080274 - DNA, 25 bp, Homo sapien
cacagcgcacttgctgcacagcccc

SEQ ID NO: 4080275 - DNA, 25 bp, Homo sapien
acaggctgccaatgaagatgacgat

SEQ ID NO: 4080276 - DNA, 25 bp, Homo sapien
cccacaggctgccaatgaagatgac

SEQ ID NO: 4080277 - DNA, 25 bp, Homo sapien
gtgactcgggctcaaggatgcaact

SEQ ID NO: 4080278 - DNA, 25 bp, Homo sapien
ttggtcccgggtcctctggctgccg

SEQ ID NO: 4080279 - DNA, 25 bp, Homo sapien
ctggctgccgcatcagcgagtgcag

SEQ ID NO: 4080280 - DNA, 25 bp, Homo sapien
aagggggtgactcgggctcaaggat

SEQ ID NO: 4080281 - DNA, 25 bp, Homo sapien
catgacatacaccagatggctctcc

SEQ ID NO: 4080282 - DNA, 25 bp, Homo sapien
agctaggaaagcaaacccatttgct

SEQ ID NO: 4080283 - DNA, 25 bp, Homo sapien
cagcctctcttcaaccacccaattt

SEQ ID NO: 4080284 - DNA, 25 bp, Homo sapien
ataccagcctctcttcaaccaccca

SEQ ID NO: 4080285 - DNA, 25 bp, Homo sapien
atggctggctaagtctacagggata

SEQ ID NO: 4080286 - DNA, 25 bp, Homo sapien
tcatggctggctaagtctacaggga

SEQ ID NO: 4080287 - DNA, 25 bp, Homo sapien
agtcctttaaagcgatcttcagtat

SEQ ID NO: 4080288 - DNA, 25 bp, Homo sapien
aagcgatcttcagtatgatggcaga

SEQ ID NO: 4080289 - DNA, 25 bp, Homo sapien
ctttaaagcgatcttcagtatgatg

SEQ ID NO: 4080290 - DNA, 25 bp, Homo sapien
tcagtctgtgctcgtttaattttgg

SEQ ID NO: 4080291 - DNA, 25 bp, Homo sapien
tgcttaatctagagataggcaatgc

SEQ ID NO: 4080292 - DNA, 25 bp, Homo sapien
tttgcttaatctagagataggcaat

SEQ ID NO: 4080293 - DNA, 25 bp, Homo sapien
ttaatctagagataggcaatgctcc

SEQ ID NO: 4080294 - DNA, 25 bp, Homo sapien
aagattgagcaggttattgtgcttt

SEQ ID NO: 4080295 - DNA, 25 bp, Homo sapien
agtcaggtaggttgtatccaacggt

SEQ ID NO: 4080296 - DNA, 25 bp, Homo sapien
ggtgagtcaggtaggttgtatccaa

SEQ ID NO: 4080297 - DNA, 25 bp, Homo sapien
tgactcccgctgcaaccgagcaggt

SEQ ID NO: 4080298 - DNA, 25 bp, Homo sapien
ttgactcccgctgcaaccgagcagg

SEQ ID NO: 4080299 - DNA, 25 bp, Homo sapien
tacaggcatagaatgtctttactgg

SEQ ID NO: 4080300 - DNA, 25 bp, Homo sapien
caggcatagaatgtctttactggat

SEQ ID NO: 4080301 - DNA, 25 bp, Homo sapien
aggcatagaatgtctttactggatc

SEQ ID NO: 4080302 - DNA, 25 bp, Homo sapien
acaggcatagaatgtctttactgga

SEQ ID NO: 4080303 - DNA, 25 bp, Homo sapien
ctatggcccatgcaaatgatttccc

SEQ ID NO: 4080304 - DNA, 25 bp, Homo sapien
catgtacaacagagggtgagaattc

SEQ ID NO: 4080305 - DNA, 25 bp, Homo sapien
gatcctgaaaccttcggcttctgtg

SEQ ID NO: 4080306 - DNA, 25 bp, Homo sapien
tctcagagacagatgatgcctcatt

SEQ ID NO: 4080307 - DNA, 25 bp, Homo sapien
tctttcgtgatattgtatagcctgg

SEQ ID NO: 4080308 - DNA, 25 bp, Homo sapien
cttggctgtcttcaagtatgtcatc

SEQ ID NO: 4080309 - DNA, 25 bp, Homo sapien
cgtgatattgtatagcctggtttgt

SEQ ID NO: 4080310 - DNA, 25 bp, Homo sapien
tcttggctgtcttcaagtatgtcat

SEQ ID NO: 4080311 - DNA, 25 bp, Homo sapien
ctttaatccaagaaagttgttgact

SEQ ID NO: 4080312 - DNA, 25 bp, Homo sapien
aatccaagaaagttgttgacttgac

SEQ ID NO: 4080313 - DNA, 25 bp, Homo sapien
ctggctttaatccaagaaagttgtt

SEQ ID NO: 4080314 - DNA, 25 bp, Homo sapien
tggctttaatccaagaaagttgttg

SEQ ID NO: 4080315 - DNA, 25 bp, Homo sapien
gaagaattgtatggccaagataagc

SEQ ID NO: 4080316 - DNA, 25 bp, Homo sapien
tggttactacaatgctgtctctgac

SEQ ID NO: 4080317 - DNA, 25 bp, Homo sapien
tgtctctgaccttctcaggatcgaa

SEQ ID NO: 4080318 - DNA, 25 bp, Homo sapien
gagaatcttacatggtccaatgcag

SEQ ID NO: 4080319 - DNA, 25 bp, Homo sapien
tccctcagtgggaggtctgttctca

SEQ ID NO: 4080320 - DNA, 25 bp, Homo sapien
caaggtcactgttgtctgcactctg

SEQ ID NO: 4080321 - DNA, 25 bp, Homo sapien
cctcagtgggaggtctgttctcagc

SEQ ID NO: 4080322 - DNA, 25 bp, Homo sapien
ctcagtgggaggtctgttctcagct

SEQ ID NO: 4080323 - DNA, 25 bp, Homo sapien
ttccaagacagaaggcattcccggg

SEQ ID NO: 4080324 - DNA, 25 bp, Homo sapien
tcagtgatatcacatcgggaaccca

SEQ ID NO: 4080325 - DNA, 25 bp, Homo sapien
tgagtccaacaggtctgcatcgctg

SEQ ID NO: 4080326 - DNA, 25 bp, Homo sapien
gccacatgtgtggaccctgagaacc

SEQ ID NO: 4080327 - DNA, 25 bp, Homo sapien
cccggagaccatgaaacagatggcc

SEQ ID NO: 4080328 - DNA, 25 bp, Homo sapien
ggattatcccataggtcagccagac

SEQ ID NO: 4080329 - DNA, 25 bp, Homo sapien
gccagccccggagaccatgaaacag

SEQ ID NO: 4080330 - DNA, 25 bp, Homo sapien
cagatggccaggattatcccatagg

SEQ ID NO: 4080331 - DNA, 25 bp, Homo sapien
gcaggcacaatggacaagcccaaga

SEQ ID NO: 4080332 - DNA, 25 bp, Homo sapien
gcagcaggcacaatggacaagccca

SEQ ID NO: 4080333 - DNA, 25 bp, Homo sapien
cacaatggacaagcccaagagtgac

SEQ ID NO: 4080334 - DNA, 25 bp, Homo sapien
agggcagcaggcacaatggacaagc

SEQ ID NO: 4080335 - DNA, 25 bp, Homo sapien
ctgaggctgcaagggctcatccagg

SEQ ID NO: 4080336 - DNA, 25 bp, Homo sapien
gttgctggaacctcagtagcactga

SEQ ID NO: 4080337 - DNA, 25 bp, Homo sapien
ggctcatccagggttgcagaatgac

SEQ ID NO: 4080338 - DNA, 25 bp, Homo sapien
gctgcaagggctcatccagggttgc

SEQ ID NO: 4080339 - DNA, 25 bp, Homo sapien
ggcctggatctcacctggcctgggc

SEQ ID NO: 4080340 - DNA, 25 bp, Homo sapien
gcctggatctcacctggcctgggct

SEQ ID NO: 4080341 - DNA, 25 bp, Homo sapien
ctgggcatcactggcctggatctca

SEQ ID NO: 4080342 - DNA, 25 bp, Homo sapien
gcatcactggcctggatctcacctg

SEQ ID NO: 4080343 - DNA, 25 bp, Homo sapien
caaggatggcacagtcggcacattc

SEQ ID NO: 4080344 - DNA, 25 bp, Homo sapien
gcacagtcggcacattccagagaga

SEQ ID NO: 4080345 - DNA, 25 bp, Homo sapien
ccccaaggatggcacagtcggcaca

SEQ ID NO: 4080346 - DNA, 25 bp, Homo sapien
ggatggcacagtcggcacattccag

SEQ ID NO: 4080347 - DNA, 25 bp, Homo sapien
tgatgtgtggtagcactcatctccc

SEQ ID NO: 4080348 - DNA, 25 bp, Homo sapien
ggcctgatgtgtggtagcactcatc

SEQ ID NO: 4080349 - DNA, 25 bp, Homo sapien
cctgatgtgtggtagcactcatctc

SEQ ID NO: 4080350 - DNA, 25 bp, Homo sapien
tgtgtggtagcactcatctccctgg

SEQ ID NO: 4080351 - DNA, 25 bp, Homo sapien
catagtaactgagtcagtgactgac

SEQ ID NO: 4080352 - DNA, 25 bp, Homo sapien
caggcagcaacatcacgggagaatg

SEQ ID NO: 4080353 - DNA, 25 bp, Homo sapien
ccatggagcccgctgcatagtaact

SEQ ID NO: 4080354 - DNA, 25 bp, Homo sapien
aacatcacgggagaatgcagggctc

SEQ ID NO: 4080355 - DNA, 25 bp, Homo sapien
catgggccagggagctattccacac

SEQ ID NO: 4080356 - DNA, 25 bp, Homo sapien
atgggccagggagctattccacaca

SEQ ID NO: 4080357 - DNA, 25 bp, Homo sapien
tgggccagggagctattccacacag

SEQ ID NO: 4080358 - DNA, 25 bp, Homo sapien
cagactggggcttagggaacaccac

SEQ ID NO: 4080359 - DNA, 25 bp, Homo sapien
gcttagggaacaccactgtggcccc

SEQ ID NO: 4080360 - DNA, 25 bp, Homo sapien
ttcctgccctgtggcggcacagact

SEQ ID NO: 4080361 - DNA, 25 bp, Homo sapien
tgtggccccaacctcgaccaggaca

SEQ ID NO: 4080362 - DNA, 25 bp, Homo sapien
cagggaggatggttgtctgcgtggc

SEQ ID NO: 4080363 - DNA, 25 bp, Homo sapien
aggatggttgtctgcgtggccccta

SEQ ID NO: 4080364 - DNA, 25 bp, Homo sapien
tctgcgtggcccctaggagcccaga

SEQ ID NO: 4080365 - DNA, 25 bp, Homo sapien
tggcccctaggagcccagatctttg

SEQ ID NO: 4080366 - DNA, 25 bp, Homo sapien
tgaaggctaggaagccgcccctcca

SEQ ID NO: 4080367 - DNA, 25 bp, Homo sapien
gaaggctaggaagccgcccctccag

SEQ ID NO: 4080368 - DNA, 25 bp, Homo sapien
gctgaaggctaggaagccgcccctc

SEQ ID NO: 4080369 - DNA, 25 bp, Homo sapien
atgctgaaggctaggaagccgcccc

SEQ ID NO: 4080370 - DNA, 25 bp, Homo sapien
ctgggttcccctcaaggcgcagcag

SEQ ID NO: 4080371 - DNA, 25 bp, Homo sapien
catctgaccttacagggccaagcct

SEQ ID NO: 4080372 - DNA, 25 bp, Homo sapien
gagtctgcctccctgtcatttagga

SEQ ID NO: 4080373 - DNA, 25 bp, Homo sapien
gaactaaacctagcggcaggatgct

SEQ ID NO: 4080374 - DNA, 25 bp, Homo sapien
cgtcccttcccgatgtctgtgcatt

SEQ ID NO: 4080375 - DNA, 25 bp, Homo sapien
ctccgtcccttcccgatgtctgtgc

SEQ ID NO: 4080376 - DNA, 25 bp, Homo sapien
ccgtcccttcccgatgtctgtgcat

SEQ ID NO: 4080377 - DNA, 25 bp, Homo sapien
gtcccttcccgatgtctgtgcattt

SEQ ID NO: 4080378 - DNA, 25 bp, Homo sapien
gaaagtccaaagcaagtccaggagc

SEQ ID NO: 4080379 - DNA, 25 bp, Homo sapien
gaggtggggaccttatgacctaatc

SEQ ID NO: 4080380 - DNA, 25 bp, Homo sapien
gacctaatcactcttcatactgtta

SEQ ID NO: 4080381 - DNA, 25 bp, Homo sapien
gccgaactcacccttttataacagc

SEQ ID NO: 4080382 - DNA, 25 bp, Homo sapien
tgatttttaaagtatgctataagca

SEQ ID NO: 4080383 - DNA, 25 bp, Homo sapien
ttttaaagtatgctataagcatatg

SEQ ID NO: 4080384 - DNA, 25 bp, Homo sapien
ttttgggctgatttttaaagtatgc

SEQ ID NO: 4080385 - DNA, 25 bp, Homo sapien
taaagtatgctataagcatatgctc

SEQ ID NO: 4080386 - DNA, 25 bp, Homo sapien
ccgtgcatggaaagccagcccaagc

SEQ ID NO: 4080387 - DNA, 25 bp, Homo sapien
cccttctcccaagtgagctctagcc

SEQ ID NO: 4080388 - DNA, 25 bp, Homo sapien
gcccgtgcatggaaagccagcccaa

SEQ ID NO: 4080389 - DNA, 25 bp, Homo sapien
ctgcccgtgcatggaaagccagccc

SEQ ID NO: 4080390 - DNA, 25 bp, Homo sapien
ggaagattcaatgtccacacccggg

SEQ ID NO: 4080391 - DNA, 25 bp, Homo sapien
ggcagctggccacccgtcccagagt

SEQ ID NO: 4080392 - DNA, 25 bp, Homo sapien
cctagggtagacctggaagattcaa

SEQ ID NO: 4080393 - DNA, 25 bp, Homo sapien
acagcaagcagccaatgttgcccag

SEQ ID NO: 4080394 - DNA, 25 bp, Homo sapien
tgcccgttcaccatcatagaagcaa

SEQ ID NO: 4080395 - DNA, 25 bp, Homo sapien
accatcatagaagcaactctgtcac

SEQ ID NO: 4080396 - DNA, 25 bp, Homo sapien
gctgcccgttcaccatcatagaagc

SEQ ID NO: 4080397 - DNA, 25 bp, Homo sapien
gttcaccatcatagaagcaactctg

SEQ ID NO: 4080398 - DNA, 25 bp, Homo sapien
gtgggatcattgttcccggttgtca

SEQ ID NO: 4080399 - DNA, 25 bp, Homo sapien
tctgtgggatcattgttcccggttg

SEQ ID NO: 4080400 - DNA, 25 bp, Homo sapien
tgtgggatcattgttcccggttgtc

SEQ ID NO: 4080401 - DNA, 25 bp, Homo sapien
cctctgtgggatcattgttcccggt

SEQ ID NO: 4080402 - DNA, 25 bp, Homo sapien
aggccccaggccagcaaggggttgc

SEQ ID NO: 4080403 - DNA, 25 bp, Homo sapien
gccccaggccagcaaggggttgcag

SEQ ID NO: 4080404 - DNA, 25 bp, Homo sapien
gggttgcaggaagcaagaggcccca

SEQ ID NO: 4080405 - DNA, 25 bp, Homo sapien
cccaggccagcaaggggttgcagga

SEQ ID NO: 4080406 - DNA, 25 bp, Homo sapien
agagatgctctgtgcacgccagcac

SEQ ID NO: 4080407 - DNA, 25 bp, Homo sapien
agggagagatgctctgtgcacgcca

SEQ ID NO: 4080408 - DNA, 25 bp, Homo sapien
agccggtgcaggcccacagaactcg

SEQ ID NO: 4080409 - DNA, 25 bp, Homo sapien
caggcccacagaactcgaggaggca

SEQ ID NO: 4080410 - DNA, 25 bp, Homo sapien
gtgagggcaaggtctcggggcccca

SEQ ID NO: 4080411 - DNA, 25 bp, Homo sapien
cacccgggcactgaagtgagggcaa

SEQ ID NO: 4080412 - DNA, 25 bp, Homo sapien
ctggagcacccgggcactgaagtga

SEQ ID NO: 4080413 - DNA, 25 bp, Homo sapien
gagggcaaggtctcggggccccaca

SEQ ID NO: 4080414 - DNA, 25 bp, Homo sapien
acaggtccttggcggttgccgtatt

SEQ ID NO: 4080415 - DNA, 25 bp, Homo sapien
ggtatacattgccaggtgtgtccga

SEQ ID NO: 4080416 - DNA, 25 bp, Homo sapien
cattgccaggtgtgtccgataggct

SEQ ID NO: 4080417 - DNA, 25 bp, Homo sapien
ggacacccggtatacattgccaggt

SEQ ID NO: 4080418 - DNA, 25 bp, Homo sapien
cagccctgtgtgaaggatgggcggt

SEQ ID NO: 4080419 - DNA, 25 bp, Homo sapien
agcagccctgtgtgaaggatgggcg

SEQ ID NO: 4080420 - DNA, 25 bp, Homo sapien
agccctgtgtgaaggatgggcggtg

SEQ ID NO: 4080421 - DNA, 25 bp, Homo sapien
cagcagccctgtgtgaaggatgggc

SEQ ID NO: 4080422 - DNA, 25 bp, Homo sapien
cagagaggacggatatggggatgca

SEQ ID NO: 4080423 - DNA, 25 bp, Homo sapien
gatatggggatgcacactgaggagc

SEQ ID NO: 4080424 - DNA, 25 bp, Homo sapien
gacggatatggggatgcacactgag

SEQ ID NO: 4080425 - DNA, 25 bp, Homo sapien
gaggacggatatggggatgcacact

SEQ ID NO: 4080426 - DNA, 25 bp, Homo sapien
aatgggtacctcagtgtgagcccag

SEQ ID NO: 4080427 - DNA, 25 bp, Homo sapien
cagagacacatccaaggcccagtta

SEQ ID NO: 4080428 - DNA, 25 bp, Homo sapien
tgggagacagaatgggtacctcagt

SEQ ID NO: 4080429 - DNA, 25 bp, Homo sapien
acattcccgtgggagacagaatggg

SEQ ID NO: 4080430 - DNA, 25 bp, Homo sapien
ttccatgtgagtgtctcagagattt

SEQ ID NO: 4080431 - DNA, 25 bp, Homo sapien
agtgtcctgcatcaagtgcagctac

SEQ ID NO: 4080432 - DNA, 25 bp, Homo sapien
cagctactagagtcatgcccagggc

SEQ ID NO: 4080433 - DNA, 25 bp, Homo sapien
gctgtggtgtccgtttgcgactcat

SEQ ID NO: 4080434 - DNA, 25 bp, Homo sapien
gtcacagcagcggctgccctgcaga

SEQ ID NO: 4080435 - DNA, 25 bp, Homo sapien
tgagtcacagcagcggctgccctgc

SEQ ID NO: 4080436 - DNA, 25 bp, Homo sapien
acagcagcggctgccctgcagactc

SEQ ID NO: 4080437 - DNA, 25 bp, Homo sapien
ctgagtcacagcagcggctgccctg

SEQ ID NO: 4080438 - DNA, 25 bp, Homo sapien
ggcaggcgtcaggttcctgtgcgca

SEQ ID NO: 4080439 - DNA, 25 bp, Homo sapien
aaagcagaaagcctcttctgttgca

SEQ ID NO: 4080440 - DNA, 25 bp, Homo sapien
tcttctgcttatacggaagctcacg

SEQ ID NO: 4080441 - DNA, 25 bp, Homo sapien
tagatggaactgtttgggtccccaa

SEQ ID NO: 4080442 - DNA, 25 bp, Homo sapien
atgttgttgtgttcaatggcttgtt

SEQ ID NO: 4080443 - DNA, 25 bp, Homo sapien
tgttgttgtgttcaatggcttgttg

SEQ ID NO: 4080444 - DNA, 25 bp, Homo sapien
ctttgtggccttcagaatgccataa

SEQ ID NO: 4080445 - DNA, 25 bp, Homo sapien
tttgtggccttcagaatgccataac

SEQ ID NO: 4080446 - DNA, 25 bp, Homo sapien
cttcagaatgccataacaggctttt

SEQ ID NO: 4080447 - DNA, 25 bp, Homo sapien
agaatgccataacaggcttttccca

SEQ ID NO: 4080448 - DNA, 25 bp, Homo sapien
ggcagggtaatgttaagagatgccc

SEQ ID NO: 4080449 - DNA, 25 bp, Homo sapien
tttttctcctagtggagtgatgcaa

SEQ ID NO: 4080450 - DNA, 25 bp, Homo sapien
tcacagcaggtagagttttttctcc

SEQ ID NO: 4080451 - DNA, 25 bp, Homo sapien
tttctgcaacagatcacgtggttgt

SEQ ID NO: 4080452 - DNA, 25 bp, Homo sapien
tttgtaatgcgaccttgttccaggc

SEQ ID NO: 4080453 - DNA, 25 bp, Homo sapien
tctcctgccatcctgaatgcttctg

SEQ ID NO: 4080454 - DNA, 25 bp, Homo sapien
tctcatgagcattgtgaagattctt

SEQ ID NO: 4080455 - DNA, 25 bp, Homo sapien
gaaggtccaagatgtctcatgagca

SEQ ID NO: 4080456 - DNA, 25 bp, Homo sapien
acaactgctaccgggttgttggtgt

SEQ ID NO: 4080457 - DNA, 25 bp, Homo sapien
aggacaactgctaccgggttgttgg

SEQ ID NO: 4080458 - DNA, 25 bp, Homo sapien
caggacaactgctaccgggttgttg

SEQ ID NO: 4080459 - DNA, 25 bp, Homo sapien
actgctaccgggttgttggtgtgga

SEQ ID NO: 4080460 - DNA, 25 bp, Homo sapien
tttgagaactaagaacagtgaaact

SEQ ID NO: 4080461 - DNA, 25 bp, Homo sapien
aaagcaacacaatattccccaggaa

SEQ ID NO: 4080462 - DNA, 25 bp, Homo sapien
actgggctgccaagagagtctagag

SEQ ID NO: 4080463 - DNA, 25 bp, Homo sapien
aacagtgaaacttctgtatgttcag

SEQ ID NO: 4080464 - DNA, 25 bp, Homo sapien
tccggcttcatcccttaagtaagct

SEQ ID NO: 4080465 - DNA, 25 bp, Homo sapien
gcatggataggctggaacctttccc

SEQ ID NO: 4080466 - DNA, 25 bp, Homo sapien
tggataggctggaacctttcccgag

SEQ ID NO: 4080467 - DNA, 25 bp, Homo sapien
gataggctggaacctttcccgaggc

SEQ ID NO: 4080468 - DNA, 25 bp, Homo sapien
cactgtcttggaatctgtctggatg

SEQ ID NO: 4080469 - DNA, 25 bp, Homo sapien
gacactgtcttggaatctgtctgga

SEQ ID NO: 4080470 - DNA, 25 bp, Homo sapien
gtggacactgtcttggaatctgtct

SEQ ID NO: 4080471 - DNA, 25 bp, Homo sapien
ggacactgtcttggaatctgtctgg

SEQ ID NO: 4080472 - DNA, 25 bp, Homo sapien
actggatgctcagggcgtctctgcc

SEQ ID NO: 4080473 - DNA, 25 bp, Homo sapien
gactggatgctcagggcgtctctgc

SEQ ID NO: 4080474 - DNA, 25 bp, Homo sapien
ggactggatgctcagggcgtctctg

SEQ ID NO: 4080475 - DNA, 25 bp, Homo sapien
tggatgctcagggcgtctctgccca

SEQ ID NO: 4080476 - DNA, 25 bp, Homo sapien
gagggacccaaacatgggctggctc

SEQ ID NO: 4080477 - DNA, 25 bp, Homo sapien
caacagtgatgagcaggcacaggct

SEQ ID NO: 4080478 - DNA, 25 bp, Homo sapien
aggagggatgctccctcaacagtga

SEQ ID NO: 4080479 - DNA, 25 bp, Homo sapien
cagccacaagtgagcctgctgcagg

SEQ ID NO: 4080480 - DNA, 25 bp, Homo sapien
ctccccaagctgaagttcacaaggg

SEQ ID NO: 4080481 - DNA, 25 bp, Homo sapien
ccccaagctgaagttcacaagggag

SEQ ID NO: 4080482 - DNA, 25 bp, Homo sapien
acctccccaagctgaagttcacaag

SEQ ID NO: 4080483 - DNA, 25 bp, Homo sapien
ccaagctgaagttcacaagggagtc

SEQ ID NO: 4080484 - DNA, 25 bp, Homo sapien
gacacagctctagtcatgaggacag

SEQ ID NO: 4080485 - DNA, 25 bp, Homo sapien
tctctctgaagatgtgacacagctc

SEQ ID NO: 4080486 - DNA, 25 bp, Homo sapien
cagcccatcactatgtcggaatgtg

SEQ ID NO: 4080487 - DNA, 25 bp, Homo sapien
tccttccgaagagcatttcagaggg

SEQ ID NO: 4080488 - DNA, 25 bp, Homo sapien
gattgcctgcgagggctttgcccct

SEQ ID NO: 4080489 - DNA, 25 bp, Homo sapien
tgcgagggctttgcccctcctacgg

SEQ ID NO: 4080490 - DNA, 25 bp, Homo sapien
aagcagcatgggacacggagattgc

SEQ ID NO: 4080491 - DNA, 25 bp, Homo sapien
cacggagattgcctgcgagggcttt

SEQ ID NO: 4080492 - DNA, 25 bp, Homo sapien
tgcagggcacgtgtctctgacaagt

SEQ ID NO: 4080493 - DNA, 25 bp, Homo sapien
gagagtggggtttcagtgcagggca

SEQ ID NO: 4080494 - DNA, 25 bp, Homo sapien
ctaaggaactccatctttgtggaaa

SEQ ID NO: 4080495 - DNA, 25 bp, Homo sapien
aaatgaatcctgtggatatgaaagc

SEQ ID NO: 4080496 - DNA, 25 bp, Homo sapien
tcagactcactacgctacagggaaa

SEQ ID NO: 4080497 - DNA, 25 bp, Homo sapien
ggctacatacctcccacagaatttg

SEQ ID NO: 4080498 - DNA, 25 bp, Homo sapien
gatattgaccctaaaagagttgtgt

SEQ ID NO: 4080499 - DNA, 25 bp, Homo sapien
taaaatcttgggatctcagactcac

SEQ ID NO: 4080500 - DNA, 25 bp, Homo sapien
gacagggacagagaccatatatgtg

SEQ ID NO: 4080501 - DNA, 25 bp, Homo sapien
agctgtgcaccaggagacagggaca

SEQ ID NO: 4080502 - DNA, 25 bp, Homo sapien
ccaagggtttcaggagctgtgcacc

SEQ ID NO: 4080503 - DNA, 25 bp, Homo sapien
tagctctcagatcttacaaatatac

SEQ ID NO: 4080504 - DNA, 25 bp, Homo sapien
tagtgagcatggtatctgctcaggg

SEQ ID NO: 4080505 - DNA, 25 bp, Homo sapien
tgagcatggtatctgctcaggggcc

SEQ ID NO: 4080506 - DNA, 25 bp, Homo sapien
agcatggtatctgctcaggggcctc

SEQ ID NO: 4080507 - DNA, 25 bp, Homo sapien
cacttagtgagcatggtatctgctc

SEQ ID NO: 4080508 - DNA, 25 bp, Homo sapien
ctagccaaaacctagtgccttggat

SEQ ID NO: 4080509 - DNA, 25 bp, Homo sapien
cctagccaaaacctagtgccttgga

SEQ ID NO: 4080510 - DNA, 25 bp, Homo sapien
aacctagccaaaacctagtgccttg

SEQ ID NO: 4080511 - DNA, 25 bp, Homo sapien
gcaacctagccaaaacctagtgcct

SEQ ID NO: 4080512 - DNA, 25 bp, Homo sapien
gtgaggttgatcagtctcccctgga

SEQ ID NO: 4080513 - DNA, 25 bp, Homo sapien
atcagtctcccctggaaggccaaca

SEQ ID NO: 4080514 - DNA, 25 bp, Homo sapien
gttgatcagtctcccctggaaggcc

SEQ ID NO: 4080515 - DNA, 25 bp, Homo sapien
agtctcccctggaaggccaacagct

SEQ ID NO: 4080516 - DNA, 25 bp, Homo sapien
cttcctggagtgtctcctctttctc

SEQ ID NO: 4080517 - DNA, 25 bp, Homo sapien
ggtcttcctggagtgtctcctcttt

SEQ ID NO: 4080518 - DNA, 25 bp, Homo sapien
tcctggagtgtctcctctttctctc

SEQ ID NO: 4080519 - DNA, 25 bp, Homo sapien
ctgcaggtcttcctggagtgtctcc

SEQ ID NO: 4080520 - DNA, 25 bp, Homo sapien
tccagagggaaaaactgggtggtga

SEQ ID NO: 4080521 - DNA, 25 bp, Homo sapien
gtgacagggactggacagggatgcc

SEQ ID NO: 4080522 - DNA, 25 bp, Homo sapien
gactggacagggatgccacaggggc

SEQ ID NO: 4080523 - DNA, 25 bp, Homo sapien
ctgggtggtgacagggactggacag

SEQ ID NO: 4080524 - DNA, 25 bp, Homo sapien
attatatgcagccaactggagcagc

SEQ ID NO: 4080525 - DNA, 25 bp, Homo sapien
tgtaattatatgcagccaactggag

SEQ ID NO: 4080526 - DNA, 25 bp, Homo sapien
atgcagccaactggagcagcggacc

SEQ ID NO: 4080527 - DNA, 25 bp, Homo sapien
caaggttgtaattatatgcagccaa

SEQ ID NO: 4080528 - DNA, 25 bp, Homo sapien
tgctgctgagctaggggccgcctct

SEQ ID NO: 4080529 - DNA, 25 bp, Homo sapien
tctgagctggtatcggggtgtgagc

SEQ ID NO: 4080530 - DNA, 25 bp, Homo sapien
ttaaagtgtccgtgatgtccctgct

SEQ ID NO: 4080531 - DNA, 25 bp, Homo sapien
ctaggggccgcctctgagctggtat

SEQ ID NO: 4080532 - DNA, 25 bp, Homo sapien
ccacctacttgaggagtgccaaagc

SEQ ID NO: 4080533 - DNA, 25 bp, Homo sapien
cctccacctacttgaggagtgccaa

SEQ ID NO: 4080534 - DNA, 25 bp, Homo sapien
tccacctacttgaggagtgccaaag

SEQ ID NO: 4080535 - DNA, 25 bp, Homo sapien
ttcctccacctacttgaggagtgcc

SEQ ID NO: 4080536 - DNA, 25 bp, Homo sapien
cgtggaagcgtccagaacaggaatt

SEQ ID NO: 4080537 - DNA, 25 bp, Homo sapien
gccctgtgcgtggaagcgtccagaa

SEQ ID NO: 4080538 - DNA, 25 bp, Homo sapien
ctgtgcgtggaagcgtccagaacag

SEQ ID NO: 4080539 - DNA, 25 bp, Homo sapien
tgcgtggaagcgtccagaacaggaa

SEQ ID NO: 4080540 - DNA, 25 bp, Homo sapien
gacaggcccacaatgcgctctgtgt

SEQ ID NO: 4080541 - DNA, 25 bp, Homo sapien
aatgcgctctgtgttccaagcctca

SEQ ID NO: 4080542 - DNA, 25 bp, Homo sapien
cgacaggcccacaatgcgctctgtg

SEQ ID NO: 4080543 - DNA, 25 bp, Homo sapien
gcccacaatgcgctctgtgttccaa

SEQ ID NO: 4080544 - DNA, 25 bp, Homo sapien
gctgctctgtgagcccggcatgcat

SEQ ID NO: 4080545 - DNA, 25 bp, Homo sapien
tgggaaaagaacacccaaaggctgc

SEQ ID NO: 4080546 - DNA, 25 bp, Homo sapien
aaggctgctctgtgagcccggcatg

SEQ ID NO: 4080547 - DNA, 25 bp, Homo sapien
gaaaagaacacccaaaggctgctct

SEQ ID NO: 4080548 - DNA, 25 bp, Homo sapien
tgcacgtcccctgtttccaagtctt

SEQ ID NO: 4080549 - DNA, 25 bp, Homo sapien
ggcccgattttcccttgtgcacgtc

SEQ ID NO: 4080550 - DNA, 25 bp, Homo sapien
caagtcttcaaagtcaccatagagc

SEQ ID NO: 4080551 - DNA, 25 bp, Homo sapien
tcttcaaagtcaccatagagctcct

SEQ ID NO: 4080552 - DNA, 25 bp, Homo sapien
catcagggtcaatttctttcttgtt

SEQ ID NO: 4080553 - DNA, 25 bp, Homo sapien
cagggtcaatttctttcttgtttct

SEQ ID NO: 4080554 - DNA, 25 bp, Homo sapien
ttcatcagggtcaatttctttcttg

SEQ ID NO: 4080555 - DNA, 25 bp, Homo sapien
cttcatcagggtcaatttctttctt

SEQ ID NO: 4080556 - DNA, 25 bp, Homo sapien
ttcaattttctcttcttatccaaat

SEQ ID NO: 4080557 - DNA, 25 bp, Homo sapien
tcaattttctcttcttatccaaatg

SEQ ID NO: 4080558 - DNA, 25 bp, Homo sapien
cttcaattttctcttcttatccaaa

SEQ ID NO: 4080559 - DNA, 25 bp, Homo sapien
gcatttctcctttaagatcatcaaa

SEQ ID NO: 4080560 - DNA, 25 bp, Homo sapien
tcatcaaaatatgtgctttctcctt

SEQ ID NO: 4080561 - DNA, 25 bp, Homo sapien
ttcatcatattccacatcaaacatc

SEQ ID NO: 4080562 - DNA, 25 bp, Homo sapien
gcttgtttctgcatttctcctttaa

SEQ ID NO: 4080563 - DNA, 25 bp, Homo sapien
cttatactccacatgtccttctgaa

SEQ ID NO: 4080564 - DNA, 25 bp, Homo sapien
ccttatactccacatgtccttctga

SEQ ID NO: 4080565 - DNA, 25 bp, Homo sapien
ttatactccacatgtccttctgaac

SEQ ID NO: 4080566 - DNA, 25 bp, Homo sapien
tatactccacatgtccttctgaact

SEQ ID NO: 4080567 - DNA, 25 bp, Homo sapien
ctgtacatgacggggcggggggcgg

SEQ ID NO: 4080568 - DNA, 25 bp, Homo sapien
ggggcggggaacctgtatgctgtta

SEQ ID NO: 4080569 - DNA, 25 bp, Homo sapien
cggggggcggggaacctgtatgctg

SEQ ID NO: 4080570 - DNA, 25 bp, Homo sapien
gggcggggaacctgtatgctgttat

SEQ ID NO: 4080571 - DNA, 25 bp, Homo sapien
aggtcgaaaaccctcatactgaact

SEQ ID NO: 4080572 - DNA, 25 bp, Homo sapien
tcccaggtcgaaaaccctcatactg

SEQ ID NO: 4080573 - DNA, 25 bp, Homo sapien
ccaggtcgaaaaccctcatactgaa

SEQ ID NO: 4080574 - DNA, 25 bp, Homo sapien
gtcgaaaaccctcatactgaactct

SEQ ID NO: 4080575 - DNA, 25 bp, Homo sapien
cccaagccacccaggataatggggt

SEQ ID NO: 4080576 - DNA, 25 bp, Homo sapien
ccaagccacccaggataatggggta

SEQ ID NO: 4080577 - DNA, 25 bp, Homo sapien
caagccacccaggataatggggtaa

SEQ ID NO: 4080578 - DNA, 25 bp, Homo sapien
gcctcaggcaccaaatatgcagcaa

SEQ ID NO: 4080579 - DNA, 25 bp, Homo sapien
gaaggggatgagagggtaagatgat

SEQ ID NO: 4080580 - DNA, 25 bp, Homo sapien
agagcctcaggcaccaaatatgcag

SEQ ID NO: 4080581 - DNA, 25 bp, Homo sapien
gatgattgatggaggggaaatccac

SEQ ID NO: 4080582 - DNA, 25 bp, Homo sapien
tatgattggatctcgggacttgagg

SEQ ID NO: 4080583 - DNA, 25 bp, Homo sapien
aggattttcttataccagcgatgtt

SEQ ID NO: 4080584 - DNA, 25 bp, Homo sapien
taccagcgatgtttcttcagacgca

SEQ ID NO: 4080585 - DNA, 25 bp, Homo sapien
aaatatgattggatctcgggacttg

SEQ ID NO: 4080586 - DNA, 25 bp, Homo sapien
tagagcgggatggtctgaaacctcc

SEQ ID NO: 4080587 - DNA, 25 bp, Homo sapien
tcgatataatagagcgggatggtct

SEQ ID NO: 4080588 - DNA, 25 bp, Homo sapien
gtggtcttcgatataatagagcggg

SEQ ID NO: 4080589 - DNA, 25 bp, Homo sapien
tccattgtggtcttcgatataatag

SEQ ID NO: 4080590 - DNA, 25 bp, Homo sapien
caaaaggctgctccacaatgcatgt

SEQ ID NO: 4080591 - DNA, 25 bp, Homo sapien
tgctccacaatgcatgtgctgtggg

SEQ ID NO: 4080592 - DNA, 25 bp, Homo sapien
aaaggctgctccacaatgcatgtgc

SEQ ID NO: 4080593 - DNA, 25 bp, Homo sapien
ggctgctccacaatgcatgtgctgt

SEQ ID NO: 4080594 - DNA, 25 bp, Homo sapien
gcaataggcaagttattgtaatcat

SEQ ID NO: 4080595 - DNA, 25 bp, Homo sapien
caataggcaagttattgtaatcata

SEQ ID NO: 4080596 - DNA, 25 bp, Homo sapien
tttagattctagtttaacatactgg

SEQ ID NO: 4080597 - DNA, 25 bp, Homo sapien
ttagattctagtttaacatactgga

SEQ ID NO: 4080598 - DNA, 25 bp, Homo sapien
tagattctagtttaacatactggat

SEQ ID NO: 4080599 - DNA, 25 bp, Homo sapien
gccactgacagactgtattgccaag

SEQ ID NO: 4080600 - DNA, 25 bp, Homo sapien
gacagactgtattgccaagaaacca

SEQ ID NO: 4080601 - DNA, 25 bp, Homo sapien
ttatgccactgacagactgtattgc

SEQ ID NO: 4080602 - DNA, 25 bp, Homo sapien
actgtattgccaagaaaccagttcc

SEQ ID NO: 4080603 - DNA, 25 bp, Homo sapien
taataacccacattcaggatatatt

SEQ ID NO: 4080604 - DNA, 25 bp, Homo sapien
tatatttctcaaaccaatctgtaaa

SEQ ID NO: 4080605 - DNA, 25 bp, Homo sapien
tgtaaaagaaatcatccaagatagt

SEQ ID NO: 4080606 - DNA, 25 bp, Homo sapien
ttcaatttaaagtctcatgtacata

SEQ ID NO: 4080607 - DNA, 25 bp, Homo sapien
ttatggatttatccagatcaaggac

SEQ ID NO: 4080608 - DNA, 25 bp, Homo sapien
ttttatggatttatccagatcaagg

SEQ ID NO: 4080609 - DNA, 25 bp, Homo sapien
tttatggatttatccagatcaagga

SEQ ID NO: 4080610 - DNA, 25 bp, Homo sapien
tatggatttatccagatcaaggaca

SEQ ID NO: 4080611 - DNA, 25 bp, Homo sapien
caaaaacaactcactgaagggtgat

SEQ ID NO: 4080612 - DNA, 25 bp, Homo sapien
cctgaaagtggaattactacctcaa

SEQ ID NO: 4080613 - DNA, 25 bp, Homo sapien
cagatgcatgcacttagaacatgaa

SEQ ID NO: 4080614 - DNA, 25 bp, Homo sapien
taatcaaaatgtatttgcccctgaa

SEQ ID NO: 4080615 - DNA, 25 bp, Homo sapien
ttcaaatttggccacgtccaaggca

SEQ ID NO: 4080616 - DNA, 25 bp, Homo sapien
tttggccacgtccaaggcagaatta

SEQ ID NO: 4080617 - DNA, 25 bp, Homo sapien
aaatttggccacgtccaaggcagaa

SEQ ID NO: 4080618 - DNA, 25 bp, Homo sapien
ggccacgtccaaggcagaattaaac

SEQ ID NO: 4080619 - DNA, 25 bp, Homo sapien
ggtcgctaagggaactattctcata

SEQ ID NO: 4080620 - DNA, 25 bp, Homo sapien
taagggaactattctcatagatcac

SEQ ID NO: 4080621 - DNA, 25 bp, Homo sapien
acagaactgttactgggtgtggcca

SEQ ID NO: 4080622 - DNA, 25 bp, Homo sapien
catatccatattgcgaagaaacaaa

SEQ ID NO: 4080623 - DNA, 25 bp, Homo sapien
ttggcccgtggtccgcattcctgac

SEQ ID NO: 4080624 - DNA, 25 bp, Homo sapien
caccatgggcgagcctgagttggcc

SEQ ID NO: 4080625 - DNA, 25 bp, Homo sapien
tgcctttagtctgacaccatgggcg

SEQ ID NO: 4080626 - DNA, 25 bp, Homo sapien
ctgagttggcccgtggtccgcattc

SEQ ID NO: 4080627 - DNA, 25 bp, Homo sapien
taattttttggatatcgcaccacaa

SEQ ID NO: 4080628 - DNA, 25 bp, Homo sapien
tgtaaacataaacaaggaggactgc

SEQ ID NO: 4080629 - DNA, 25 bp, Homo sapien
catagggggaaagcctcttgacatt

SEQ ID NO: 4080630 - DNA, 25 bp, Homo sapien
tgaaaggggaacctacagactggaa

SEQ ID NO: 4080631 - DNA, 25 bp, Homo sapien
tgcaagtgttgaggaccccaggcaa

SEQ ID NO: 4080632 - DNA, 25 bp, Homo sapien
ttgaggaccccaggcaagtgcactg

SEQ ID NO: 4080633 - DNA, 25 bp, Homo sapien
agggaactgcaagtgttgaggaccc

SEQ ID NO: 4080634 - DNA, 25 bp, Homo sapien
ccaggcaagtgcactgaggaatgaa

SEQ ID NO: 4080635 - DNA, 25 bp, Homo sapien
gcgcctcggaaggacgcggttctcc

SEQ ID NO: 4080636 - DNA, 25 bp, Homo sapien
cggaaggacgcggttctccagccct

SEQ ID NO: 4080637 - DNA, 25 bp, Homo sapien
gctgagtttcttcgcgtgggtggaa

SEQ ID NO: 4080638 - DNA, 25 bp, Homo sapien
cagccctttccgtgcctaaacagga

SEQ ID NO: 4080639 - DNA, 25 bp, Homo sapien
gctgtcccggttaaatgttctctca

SEQ ID NO: 4080640 - DNA, 25 bp, Homo sapien
gatagcatcttaaggcggcctcatc

SEQ ID NO: 4080641 - DNA, 25 bp, Homo sapien
gggatgaagatagcatcttaaggcg

SEQ ID NO: 4080642 - DNA, 25 bp, Homo sapien
catgctgtcccggttaaatgttctc

SEQ ID NO: 4080643 - DNA, 25 bp, Homo sapien
tgcagtctggccccggttgtgctgt

SEQ ID NO: 4080644 - DNA, 25 bp, Homo sapien
agagctgcagtctggccccggttgt

SEQ ID NO: 4080645 - DNA, 25 bp, Homo sapien
cagtctggccccggttgtgctgtgt

SEQ ID NO: 4080646 - DNA, 25 bp, Homo sapien
tggccccggttgtgctgtgtggcct

SEQ ID NO: 4080647 - DNA, 25 bp, Homo sapien
agggaacgcccctgtccttctagct

SEQ ID NO: 4080648 - DNA, 25 bp, Homo sapien
agcctgcccaggtgtcgtggccctc

SEQ ID NO: 4080649 - DNA, 25 bp, Homo sapien
gctgtaattggctgtccttgggctg

SEQ ID NO: 4080650 - DNA, 25 bp, Homo sapien
ctctggccttgcctagattcctggg

SEQ ID NO: 4080651 - DNA, 25 bp, Homo sapien
tcagtcagttttttgtcaatatcaa

SEQ ID NO: 4080652 - DNA, 25 bp, Homo sapien
acaccagaaatcctttcttcaggaa

SEQ ID NO: 4080653 - DNA, 25 bp, Homo sapien
tcacccgagaatacttgatctttgc

SEQ ID NO: 4080654 - DNA, 25 bp, Homo sapien
caccagaggtcacccgagaatactt

SEQ ID NO: 4080655 - DNA, 25 bp, Homo sapien
agtatctttccaatcacccacaaca

SEQ ID NO: 4080656 - DNA, 25 bp, Homo sapien
ttaagtatctttccaatcacccaca

SEQ ID NO: 4080657 - DNA, 25 bp, Homo sapien
tgtatgggccagcaagcccctgggc

SEQ ID NO: 4080658 - DNA, 25 bp, Homo sapien
agccacaagccctctgtatgggcca

SEQ ID NO: 4080659 - DNA, 25 bp, Homo sapien
taattgtcacccgagttggattgaa

SEQ ID NO: 4080660 - DNA, 25 bp, Homo sapien
cctgggcctgagaggcatcagtaat

SEQ ID NO: 4080661 - DNA, 25 bp, Homo sapien
tgctgatatgaggtcatttccccaa

SEQ ID NO: 4080662 - DNA, 25 bp, Homo sapien
cccaaaatgacgcttttgttatcat

SEQ ID NO: 4080663 - DNA, 25 bp, Homo sapien
atgagtggggaaactgctgatatga

SEQ ID NO: 4080664 - DNA, 25 bp, Homo sapien
tccccaaaatgacgcttttgttatc

SEQ ID NO: 4080665 - DNA, 25 bp, Homo sapien
tagattccgaacaactaagcttcca

SEQ ID NO: 4080666 - DNA, 25 bp, Homo sapien
tgttactaagacattctgcgccctg

SEQ ID NO: 4080667 - DNA, 25 bp, Homo sapien
cagggctgctttctggctttagtca

SEQ ID NO: 4080668 - DNA, 25 bp, Homo sapien
acattcattgacagttacgtgcagc

SEQ ID NO: 4080669 - DNA, 25 bp, Homo sapien
cattcctggagtcttgacggtcacc

SEQ ID NO: 4080670 - DNA, 25 bp, Homo sapien
tccaaggagcccataatcaatgctg

SEQ ID NO: 4080671 - DNA, 25 bp, Homo sapien
taagagttagtgtcatgtgtgaggc

SEQ ID NO: 4080672 - DNA, 25 bp, Homo sapien
cacatgctgcgacttgtttgaggga

SEQ ID NO: 4080673 - DNA, 25 bp, Homo sapien
tccgatgtggccttttcttgagtct

SEQ ID NO: 4080674 - DNA, 25 bp, Homo sapien
ttggagagcctttactcccttcagg

SEQ ID NO: 4080675 - DNA, 25 bp, Homo sapien
tcccttcaggggaaaggatcgaggc

SEQ ID NO: 4080676 - DNA, 25 bp, Homo sapien
agtctttggagagcctttactccct

SEQ ID NO: 4080677 - DNA, 25 bp, Homo sapien
aacacatcttcccatgggtggaggg

SEQ ID NO: 4080678 - DNA, 25 bp, Homo sapien
tcttacaaacattccaggcaaatac

SEQ ID NO: 4080679 - DNA, 25 bp, Homo sapien
tcaaaaatcttacaaacattccagg

SEQ ID NO: 4080680 - DNA, 25 bp, Homo sapien
tggagggctggtgttgtttctgaga

SEQ ID NO: 4080681 - DNA, 25 bp, Homo sapien
cttgtactacttgtctaaaccgagg

SEQ ID NO: 4080682 - DNA, 25 bp, Homo sapien
gaatgagttatacctcctatggctc

SEQ ID NO: 4080683 - DNA, 25 bp, Homo sapien
ggttatcactccttggtcccagctc

SEQ ID NO: 4080684 - DNA, 25 bp, Homo sapien
tatggctcacaggaggtacccaaat

SEQ ID NO: 4080685 - DNA, 25 bp, Homo sapien
gaattttcacctggaatctagaatc

SEQ ID NO: 4080686 - DNA, 25 bp, Homo sapien
tttaattctgcctgtgtgcaagagg

SEQ ID NO: 4080687 - DNA, 25 bp, Homo sapien
gttataagcttctttagagagagga

SEQ ID NO: 4080688 - DNA, 25 bp, Homo sapien
aaatgctggcatcaagataggtaac

SEQ ID NO: 4080689 - DNA, 25 bp, Homo sapien
tgtggcggtcagtgcgattagtcct

SEQ ID NO: 4080690 - DNA, 25 bp, Homo sapien
gatccatctttgcagtgtcgtacag

SEQ ID NO: 4080691 - DNA, 25 bp, Homo sapien
tacagtaggtagcaacgttcaggtt

SEQ ID NO: 4080692 - DNA, 25 bp, Homo sapien
gaatgttggactcacacagcgtgct

SEQ ID NO: 4080693 - DNA, 25 bp, Homo sapien
catacataccttgttgtgttcctca

SEQ ID NO: 4080694 - DNA, 25 bp, Homo sapien
tccggttgggggtgttcatacatac

SEQ ID NO: 4080695 - DNA, 25 bp, Homo sapien
caaggctgtggcatgcacaagggtc

SEQ ID NO: 4080696 - DNA, 25 bp, Homo sapien
tgttgtgttcctcatagggaggcat

SEQ ID NO: 4080697 - DNA, 25 bp, Homo sapien
ggacgcctagacacttcccaaagaa

SEQ ID NO: 4080698 - DNA, 25 bp, Homo sapien
acgaacccagagttgtgaatgtgag

SEQ ID NO: 4080699 - DNA, 25 bp, Homo sapien
cgaacccagagttgtgaatgtgagg

SEQ ID NO: 4080700 - DNA, 25 bp, Homo sapien
ctggtggtgggacgcctagacactt

SEQ ID NO: 4080701 - DNA, 25 bp, Homo sapien
tgtggttacagagtggtcagctggg

SEQ ID NO: 4080702 - DNA, 25 bp, Homo sapien
gtcagctgggggagaggaggtggag

SEQ ID NO: 4080703 - DNA, 25 bp, Homo sapien
ggagaggaggtggagggtgtctgac

SEQ ID NO: 4080704 - DNA, 25 bp, Homo sapien
ctgtggttacagagtggtcagctgg

SEQ ID NO: 4080705 - DNA, 25 bp, Homo sapien
gccttcagcagaattcggctttcca

SEQ ID NO: 4080706 - DNA, 25 bp, Homo sapien
ctcttgttgttgcctggacagccac

SEQ ID NO: 4080707 - DNA, 25 bp, Homo sapien
ttcccaccctgcgtagcctggagga

SEQ ID NO: 4080708 - DNA, 25 bp, Homo sapien
tcaggacagtcgctcctcctcttgt

SEQ ID NO: 4080709 - DNA, 25 bp, Homo sapien
attctgcccaaagcgatgcagtgct

SEQ ID NO: 4080710 - DNA, 25 bp, Homo sapien
tctgcccaaagcgatgcagtgctcc

SEQ ID NO: 4080711 - DNA, 25 bp, Homo sapien
ctattctgcccaaagcgatgcagtg

SEQ ID NO: 4080712 - DNA, 25 bp, Homo sapien
tgcccaaagcgatgcagtgctccca

SEQ ID NO: 4080713 - DNA, 25 bp, Homo sapien
tccagcagtccacagcacggttata

SEQ ID NO: 4080714 - DNA, 25 bp, Homo sapien
tccacagcacggttatacccagcag

SEQ ID NO: 4080715 - DNA, 25 bp, Homo sapien
cagcagtcccaacagaaacaagaac

SEQ ID NO: 4080716 - DNA, 25 bp, Homo sapien
gttatacccagcagtcccaacagaa

SEQ ID NO: 4080717 - DNA, 25 bp, Homo sapien
tttccactggtgatctggtccttca

SEQ ID NO: 4080718 - DNA, 25 bp, Homo sapien
ccttcagtgacacttgagtcctgtg

SEQ ID NO: 4080719 - DNA, 25 bp, Homo sapien
ttaggaatgaagttgtgttttccac

SEQ ID NO: 4080720 - DNA, 25 bp, Homo sapien
gacttctgcccagactttaggaatg

SEQ ID NO: 4080721 - DNA, 25 bp, Homo sapien
ccaacaacttcttgacaaggtccag

SEQ ID NO: 4080722 - DNA, 25 bp, Homo sapien
ctttggatccactaccaacaacttc

SEQ ID NO: 4080723 - DNA, 25 bp, Homo sapien
taccaacaacttcttgacaaggtcc

SEQ ID NO: 4080724 - DNA, 25 bp, Homo sapien
gcctttggatccactaccaacaact

SEQ ID NO: 4080725 - DNA, 25 bp, Homo sapien
gaacctggagtagagctgtggattc

SEQ ID NO: 4080726 - DNA, 25 bp, Homo sapien
tcacacagaagatcttgaaactttc

SEQ ID NO: 4080727 - DNA, 25 bp, Homo sapien
ctgtggattcattttcctcacacag

SEQ ID NO: 4080728 - DNA, 25 bp, Homo sapien
ctgggctagaacctggagtagagct

SEQ ID NO: 4080729 - DNA, 25 bp, Homo sapien
tccccttcatgaggccactttcgac

SEQ ID NO: 4080730 - DNA, 25 bp, Homo sapien
ccttcatgaggccactttcgactag

SEQ ID NO: 4080731 - DNA, 25 bp, Homo sapien
catgaggccactttcgactagtaga

SEQ ID NO: 4080732 - DNA, 25 bp, Homo sapien
ttcatgaggccactttcgactagta

SEQ ID NO: 4080733 - DNA, 25 bp, Homo sapien
tgcagaccacccctgacccgacctc

SEQ ID NO: 4080734 - DNA, 25 bp, Homo sapien
tgacccgacctctcggccatttccc

SEQ ID NO: 4080735 - DNA, 25 bp, Homo sapien
gtgagcgcgcggttcccgactcagc

SEQ ID NO: 4080736 - DNA, 25 bp, Homo sapien
ggcgggtgagcgcgcggttcccgac

SEQ ID NO: 4080737 - DNA, 25 bp, Homo sapien
gcgccggttccgcgcgccatgttcc

SEQ ID NO: 4080738 - DNA, 25 bp, Homo sapien
ggttccgcgcgccatgttcccgccg

SEQ ID NO: 4080739 - DNA, 25 bp, Homo sapien
gccggttccgcgcgccatgttcccg

SEQ ID NO: 4080740 - DNA, 25 bp, Homo sapien
gttccgcgcgccatgttcccgccgt

SEQ ID NO: 4080741 - DNA, 25 bp, Homo sapien
ggccgcgtccgcctcgagctaacgg

SEQ ID NO: 4080742 - DNA, 25 bp, Homo sapien
gtccgcctcgagctaacggtcccac

SEQ ID NO: 4080743 - DNA, 25 bp, Homo sapien
gcgtccgcctcgagctaacggtccc

SEQ ID NO: 4080744 - DNA, 25 bp, Homo sapien
cgcctcgagctaacggtcccaccag

SEQ ID NO: 4080745 - DNA, 25 bp, Homo sapien
cagctccttgcgggggtcggccctt

SEQ ID NO: 4080746 - DNA, 25 bp, Homo sapien
ggcgccgactcggtctcccgccgcc

SEQ ID NO: 4080747 - DNA, 25 bp, Homo sapien
gccttcagctccttgcgggggtcgg

SEQ ID NO: 4080748 - DNA, 25 bp, Homo sapien
tcggcccttgggccggctcgggcgc

SEQ ID NO: 4080749 - DNA, 25 bp, Homo sapien
cggcccgagtccctcacgcactcac

SEQ ID NO: 4080750 - DNA, 25 bp, Homo sapien
tgacaaagaaagtctcccggcccga

SEQ ID NO: 4080751 - DNA, 25 bp, Homo sapien
cccggcccgagtccctcacgcactc

SEQ ID NO: 4080752 - DNA, 25 bp, Homo sapien
cgccggagtttgacaaagaaagtct

SEQ ID NO: 4080753 - DNA, 25 bp, Homo sapien
tttttatcaggtgctcccaatgatt

SEQ ID NO: 4080754 - DNA, 25 bp, Homo sapien
ttggtgagccacaatccgtggcatt

SEQ ID NO: 4080755 - DNA, 25 bp, Homo sapien
ccaaatcggcttccctgctttggtg

SEQ ID NO: 4080756 - DNA, 25 bp, Homo sapien
ttaagttccaaatcggcttccctgc

SEQ ID NO: 4080757 - DNA, 25 bp, Homo sapien
cagtgggccacaggctgtagcaccc

SEQ ID NO: 4080758 - DNA, 25 bp, Homo sapien
gtgggccacaggctgtagcacccag

SEQ ID NO: 4080759 - DNA, 25 bp, Homo sapien
ctcaggattcccacgcaaacgctgt

SEQ ID NO: 4080760 - DNA, 25 bp, Homo sapien
gggggctctgccacgctcaggattc

SEQ ID NO: 4080761 - DNA, 25 bp, Homo sapien
tcaggattcccacgcaaacgctgtg

SEQ ID NO: 4080762 - DNA, 25 bp, Homo sapien
ggattcccacgcaaacgctgtgcgc

SEQ ID NO: 4080763 - DNA, 25 bp, Homo sapien
cagctgggcgggcaaagccagaaaa

SEQ ID NO: 4080764 - DNA, 25 bp, Homo sapien
ggagcagctgggcgggcaaagccag

SEQ ID NO: 4080765 - DNA, 25 bp, Homo sapien
agcagctgggcgggcaaagccagaa

SEQ ID NO: 4080766 - DNA, 25 bp, Homo sapien
gctgggcgggcaaagccagaaaagc

SEQ ID NO: 4080767 - DNA, 25 bp, Homo sapien
cattgtcatttcatctcgtcacatt

SEQ ID NO: 4080768 - DNA, 25 bp, Homo sapien
tcatctgatttcatgttatcatatc

SEQ ID NO: 4080769 - DNA, 25 bp, Homo sapien
tgttatcatatcttgtcatcatttc

SEQ ID NO: 4080770 - DNA, 25 bp, Homo sapien
tttcattgtcatttcatctcgtcac

SEQ ID NO: 4080771 - DNA, 25 bp, Homo sapien
catcaactcatttcatcttatctca

SEQ ID NO: 4080772 - DNA, 25 bp, Homo sapien
ctcatcaactcatttcatcttatct

SEQ ID NO: 4080773 - DNA, 25 bp, Homo sapien
tcatctcatctcatatcttctcatt

SEQ ID NO: 4080774 - DNA, 25 bp, Homo sapien
tcatctcattacatttcatctaatt

SEQ ID NO: 4080775 - DNA, 25 bp, Homo sapien
tcctttaattatttcatttcatctc

SEQ ID NO: 4080776 - DNA, 25 bp, Homo sapien
cctttaattatttcatttcatctca

SEQ ID NO: 4080777 - DNA, 25 bp, Homo sapien
tttcctttaattatttcatttcatc

SEQ ID NO: 4080778 - DNA, 25 bp, Homo sapien
ctttaattatttcatttcatctcat

SEQ ID NO: 4080779 - DNA, 25 bp, Homo sapien
attattgccacaatttcagctcctg

SEQ ID NO: 4080780 - DNA, 25 bp, Homo sapien
ttgccacaatttcagctcctgttat

SEQ ID NO: 4080781 - DNA, 25 bp, Homo sapien
tgattattgccacaatttcagctcc

SEQ ID NO: 4080782 - DNA, 25 bp, Homo sapien
tattgccacaatttcagctcctgtt

SEQ ID NO: 4080783 - DNA, 25 bp, Homo sapien
ttgtccctgtttaaatcagtagcat

SEQ ID NO: 4080784 - DNA, 25 bp, Homo sapien
tgtccctgtttaaatcagtagcatt

SEQ ID NO: 4080785 - DNA, 25 bp, Homo sapien
gtccctgtttaaatcagtagcattt

SEQ ID NO: 4080786 - DNA, 25 bp, Homo sapien
agcaagttgtagtagagaatactca

SEQ ID NO: 4080787 - DNA, 25 bp, Homo sapien
caagttgtagtagagaatactcaac

SEQ ID NO: 4080788 - DNA, 25 bp, Homo sapien
tgtagtagagaatactcaacatatt

SEQ ID NO: 4080789 - DNA, 25 bp, Homo sapien
aaagcaagttgtagtagagaatact

SEQ ID NO: 4080790 - DNA, 25 bp, Homo sapien
taaacatagtatattgcaagagaat

SEQ ID NO: 4080791 - DNA, 25 bp, Homo sapien
taaaggattagctcccagaaatatt

SEQ ID NO: 4080792 - DNA, 25 bp, Homo sapien
tctaggattgcatatccccaactct

SEQ ID NO: 4080793 - DNA, 25 bp, Homo sapien
ataatttagtaccattccatttgcc

SEQ ID NO: 4080794 - DNA, 25 bp, Homo sapien
ctgactaggacagagtttagcatag

SEQ ID NO: 4080795 - DNA, 25 bp, Homo sapien
taggacagagtttagcatagaaaaa

SEQ ID NO: 4080796 - DNA, 25 bp, Homo sapien
gactaggacagagtttagcatagaa

SEQ ID NO: 4080797 - DNA, 25 bp, Homo sapien
gaaattgcaaagttcaaaaggctat

SEQ ID NO: 4080798 - DNA, 25 bp, Homo sapien
acagccaggtcgcatacaattacat

SEQ ID NO: 4080799 - DNA, 25 bp, Homo sapien
ctacagccaggtcgcatacaattac

SEQ ID NO: 4080800 - DNA, 25 bp, Homo sapien
cagccaggtcgcatacaattacatc

SEQ ID NO: 4080801 - DNA, 25 bp, Homo sapien
cactacagccaggtcgcatacaatt

SEQ ID NO: 4080802 - DNA, 25 bp, Homo sapien
tctccacagagtatgaaggtcaaat

SEQ ID NO: 4080803 - DNA, 25 bp, Homo sapien
tttctccacagagtatgaaggtcaa

SEQ ID NO: 4080804 - DNA, 25 bp, Homo sapien
tccacagagtatgaaggtcaaatga

SEQ ID NO: 4080805 - DNA, 25 bp, Homo sapien
tatttctccacagagtatgaaggtc

SEQ ID NO: 4080806 - DNA, 25 bp, Homo sapien
tccaaggcactaggttttggctagg

SEQ ID NO: 4080807 - DNA, 25 bp, Homo sapien
tgctctcctgctgtgtcggtgagtt

SEQ ID NO: 4080808 - DNA, 25 bp, Homo sapien
tggctaggttgcaggttccaagctg

SEQ ID NO: 4080809 - DNA, 25 bp, Homo sapien
gagttctggttaacctgcaacctcc

SEQ ID NO: 4080810 - DNA, 25 bp, Homo sapien
gaatctgacgcaacaaaaattaaat

SEQ ID NO: 4080811 - DNA, 25 bp, Homo sapien
aggaatctgacgcaacaaaaattaa

SEQ ID NO: 4080812 - DNA, 25 bp, Homo sapien
ggaatctgacgcaacaaaaattaaa

SEQ ID NO: 4080813 - DNA, 25 bp, Homo sapien
caattggcccctacgactgtgggac

SEQ ID NO: 4080814 - DNA, 25 bp, Homo sapien
ataatttaatcaattggcccctacg

SEQ ID NO: 4080815 - DNA, 25 bp, Homo sapien
atttaatcaattggcccctacgact

SEQ ID NO: 4080816 - DNA, 25 bp, Homo sapien
atcaattggcccctacgactgtggg

SEQ ID NO: 4080817 - DNA, 25 bp, Homo sapien
gagttggctacatatacatactcaa

SEQ ID NO: 4080818 - DNA, 25 bp, Homo sapien
tactcaataggatatcagaggagct

SEQ ID NO: 4080819 - DNA, 25 bp, Homo sapien
tgagaatactcataaaagaggtcct

SEQ ID NO: 4080820 - DNA, 25 bp, Homo sapien
ggacaggaatttgagccaaatgagt

SEQ ID NO: 4080821 - DNA, 25 bp, Homo sapien
gatgcagaaagaccacatttgcttt

SEQ ID NO: 4080822 - DNA, 25 bp, Homo sapien
tttatctagtggagaacatgtggta

SEQ ID NO: 4080823 - DNA, 25 bp, Homo sapien
gtgtagaagggccacatttgcttta

SEQ ID NO: 4080824 - DNA, 25 bp, Homo sapien
cagttgaggacatgtagtatttcat

SEQ ID NO: 4080825 - DNA, 25 bp, Homo sapien
actgcggtcaaagtctctggattcc

SEQ ID NO: 4080826 - DNA, 25 bp, Homo sapien
caataaatctgccaactgcggtcaa

SEQ ID NO: 4080827 - DNA, 25 bp, Homo sapien
tgccaactgcggtcaaagtctctgg

SEQ ID NO: 4080828 - DNA, 25 bp, Homo sapien
taccacaataaatctgccaactgcg

SEQ ID NO: 4080829 - DNA, 25 bp, Homo sapien
ttggcccccgtgcagtgagtgcctg

SEQ ID NO: 4080830 - DNA, 25 bp, Homo sapien
cgcttggcccccgtgcagtgagtgc

SEQ ID NO: 4080831 - DNA, 25 bp, Homo sapien
gatcactggtttcacgcttggcccc

SEQ ID NO: 4080832 - DNA, 25 bp, Homo sapien
ctggagctccggtgaaatttgggct

SEQ ID NO: 4080833 - DNA, 25 bp, Homo sapien
ctgacgttagcacaccctccaggtt

SEQ ID NO: 4080834 - DNA, 25 bp, Homo sapien
cttcagtaggatctgcaccttggaa

SEQ ID NO: 4080835 - DNA, 25 bp, Homo sapien
ctgcaccttggaaacccaggttcct

SEQ ID NO: 4080836 - DNA, 25 bp, Homo sapien
gtaggatctgcaccttggaaaccca

SEQ ID NO: 4080837 - DNA, 25 bp, Homo sapien
ttgcttcagtaggatctgcaccttg

SEQ ID NO: 4080838 - DNA, 25 bp, Homo sapien
aggcagaaggggggacaccacagcc

SEQ ID NO: 4080839 - DNA, 25 bp, Homo sapien
tgacaccccaggcagaaggggggac

SEQ ID NO: 4080840 - DNA, 25 bp, Homo sapien
acagccagctctgcccgcggttgcg

SEQ ID NO: 4080841 - DNA, 25 bp, Homo sapien
ctctgcccgcggttgcgacgtccat

SEQ ID NO: 4080842 - DNA, 25 bp, Homo sapien
aatcagacgtgatgctgcctgccga

SEQ ID NO: 4080843 - DNA, 25 bp, Homo sapien
gagacctggaggcttcccatgcatg

SEQ ID NO: 4080844 - DNA, 25 bp, Homo sapien
tgataacgcagttgaatcagacgtg

SEQ ID NO: 4080845 - DNA, 25 bp, Homo sapien
tgcatgagctttcagatgagaggtc

SEQ ID NO: 4080846 - DNA, 25 bp, Homo sapien
caaggcatcaagggctccctggaag

SEQ ID NO: 4080847 - DNA, 25 bp, Homo sapien
caagggctccctggaagcaccaatc

SEQ ID NO: 4080848 - DNA, 25 bp, Homo sapien
ggctccctggaagcaccaatctggg

SEQ ID NO: 4080849 - DNA, 25 bp, Homo sapien
agggctccctggaagcaccaatctg

SEQ ID NO: 4080850 - DNA, 25 bp, Homo sapien
gggacgttccactccagccaaattg

SEQ ID NO: 4080851 - DNA, 25 bp, Homo sapien
aattgcataatcaggccattcctcc

SEQ ID NO: 4080852 - DNA, 25 bp, Homo sapien
aagactcattgccatgtcgtcatgg

SEQ ID NO: 4080853 - DNA, 25 bp, Homo sapien
gggaagactcattgccatgtcgtca

SEQ ID NO: 4080854 - DNA, 25 bp, Homo sapien
agcttcttgggttgctgaggtagga

SEQ ID NO: 4080855 - DNA, 25 bp, Homo sapien
atcatttaagcccaggggtttgaag

SEQ ID NO: 4080856 - DNA, 25 bp, Homo sapien
catttaagcccaggggtttgaagct

SEQ ID NO: 4080857 - DNA, 25 bp, Homo sapien
cccagcttcttgggttgctgaggta

SEQ ID NO: 4080858 - DNA, 25 bp, Homo sapien
ctgggtgagcaggacggacccggac

SEQ ID NO: 4080859 - DNA, 25 bp, Homo sapien
tgggtgagcaggacggacccggacc

SEQ ID NO: 4080860 - DNA, 25 bp, Homo sapien
gcaggacggacccggacccgagatg

SEQ ID NO: 4080861 - DNA, 25 bp, Homo sapien
cggacccggacccgagatgcctcag

SEQ ID NO: 4080862 - DNA, 25 bp, Homo sapien
agtggcatgacaagggcccctgtga

SEQ ID NO: 4080863 - DNA, 25 bp, Homo sapien
caaaagggacattgccagtgtgacc

SEQ ID NO: 4080864 - DNA, 25 bp, Homo sapien
aatcttattgcagaagttgctcgcc

SEQ ID NO: 4080865 - DNA, 25 bp, Homo sapien
ggtcaatttgagagcctccctgagg

SEQ ID NO: 4080866 - DNA, 25 bp, Homo sapien
gggctttgtgactatcagaaacacc

SEQ ID NO: 4080867 - DNA, 25 bp, Homo sapien
gcaggggctttgtgactatcagaaa

SEQ ID NO: 4080868 - DNA, 25 bp, Homo sapien
gattttcttaattgggtcttagctg

SEQ ID NO: 4080869 - DNA, 25 bp, Homo sapien
ttgtgactatcagaaacacctgcca

SEQ ID NO: 4080870 - DNA, 25 bp, Homo sapien
tctattggtgtgattaccctcccca

SEQ ID NO: 4080871 - DNA, 25 bp, Homo sapien
ggttcctttgagtaacatagacata

SEQ ID NO: 4080872 - DNA, 25 bp, Homo sapien
tgcaccttccgtccaagcaggagtg

SEQ ID NO: 4080873 - DNA, 25 bp, Homo sapien
tggtgccgcaatcctcacgcgtatg

SEQ ID NO: 4080874 - DNA, 25 bp, Homo sapien
gtatggccattcaacctgataccaa

SEQ ID NO: 4080875 - DNA, 25 bp, Homo sapien
tggccattcaacctgataccaaagc

SEQ ID NO: 4080876 - DNA, 25 bp, Homo sapien
tatggccattcaacctgataccaaa

SEQ ID NO: 4080877 - DNA, 25 bp, Homo sapien
cagtatggccattcaacctgatacc

SEQ ID NO: 4080878 - DNA, 25 bp, Homo sapien
atgttgtgaggctccacaaaaatta

SEQ ID NO: 4080879 - DNA, 25 bp, Homo sapien
ggtgaaactcttagaggtcatctta

SEQ ID NO: 4080880 - DNA, 25 bp, Homo sapien
tatccctcatagtcacaggtctgct

SEQ ID NO: 4080881 - DNA, 25 bp, Homo sapien
gctcatccttgatgttggaattaca

SEQ ID NO: 4080882 - DNA, 25 bp, Homo sapien
caccagggggtgaaactcttagagg

SEQ ID NO: 4080883 - DNA, 25 bp, Homo sapien
cagaaaataaagagaggctgggcgc

SEQ ID NO: 4080884 - DNA, 25 bp, Homo sapien
tcaacttgagtgtaattacctggct

SEQ ID NO: 4080885 - DNA, 25 bp, Homo sapien
gattacttgcattatgagaacagaa

SEQ ID NO: 4080886 - DNA, 25 bp, Homo sapien
tacctggctgtaaaataatgaatct

SEQ ID NO: 4080887 - DNA, 25 bp, Homo sapien
ggccagagtgcagtgacacagtctt

SEQ ID NO: 4080888 - DNA, 25 bp, Homo sapien
gttgaccaggatgatctaaatctct

SEQ ID NO: 4080889 - DNA, 25 bp, Homo sapien
catgttgaccaggatgatctaaatc

SEQ ID NO: 4080890 - DNA, 25 bp, Homo sapien
accatgttgaccaggatgatctaaa

SEQ ID NO: 4080891 - DNA, 25 bp, Homo sapien
gggccagtcacatacgcaggcagtg

SEQ ID NO: 4080892 - DNA, 25 bp, Homo sapien
gcttgatgattcactaaaaggactc

SEQ ID NO: 4080893 - DNA, 25 bp, Homo sapien
cacgtggatgtgcttagctctccca

SEQ ID NO: 4080894 - DNA, 25 bp, Homo sapien
gcacctgagcctcgagtctagagat

SEQ ID NO: 4080895 - DNA, 25 bp, Homo sapien
ctgcaacaaacggcggttgttgtca

SEQ ID NO: 4080896 - DNA, 25 bp, Homo sapien
tctgcaacaaacggcggttgttgtc

SEQ ID NO: 4080897 - DNA, 25 bp, Homo sapien
aacaaacggcggttgttgtcatggc

SEQ ID NO: 4080898 - DNA, 25 bp, Homo sapien
gcaacaaacggcggttgttgtcatg

SEQ ID NO: 4080899 - DNA, 25 bp, Homo sapien
caattttggctttatctctgactct

SEQ ID NO: 4080900 - DNA, 25 bp, Homo sapien
cattttaccattatgggcccttaag

SEQ ID NO: 4080901 - DNA, 25 bp, Homo sapien
tctgactctacacaaatcactttgt

SEQ ID NO: 4080902 - DNA, 25 bp, Homo sapien
gtttctgtcccagctaccttgtgtt

SEQ ID NO: 4080903 - DNA, 25 bp, Homo sapien
ttattagtcacgcatgctcacagcc

SEQ ID NO: 4080904 - DNA, 25 bp, Homo sapien
taggacaccgacactggacagatga

SEQ ID NO: 4080905 - DNA, 25 bp, Homo sapien
gttctcacctgagccgtgttcctgg

SEQ ID NO: 4080906 - DNA, 25 bp, Homo sapien
tatgggatggctgaacgtaggacac

SEQ ID NO: 4080907 - DNA, 25 bp, Homo sapien
ctttcgtgcgtatacccgcaagcaa

SEQ ID NO: 4080908 - DNA, 25 bp, Homo sapien
atacccgcaagcaagtacgaacacc

SEQ ID NO: 4080909 - DNA, 25 bp, Homo sapien
ttttatctttcgtgcgtatacccgc

SEQ ID NO: 4080910 - DNA, 25 bp, Homo sapien
tacccgcaagcaagtacgaacacct

SEQ ID NO: 4080911 - DNA, 25 bp, Homo sapien
aaacagagtaagcaaatatattcaa

SEQ ID NO: 4080912 - DNA, 25 bp, Homo sapien
aacagagtaagcaaatatattcaaa

SEQ ID NO: 4080913 - DNA, 25 bp, Homo sapien
ttcctaggaggcttccacagtgcat

SEQ ID NO: 4080914 - DNA, 25 bp, Homo sapien
catttatttgggtcatcagttccta

SEQ ID NO: 4080915 - DNA, 25 bp, Homo sapien
catcagttcctaggaggcttccaca

SEQ ID NO: 4080916 - DNA, 25 bp, Homo sapien
tgggtcatcagttcctaggaggctt

SEQ ID NO: 4080917 - DNA, 25 bp, Homo sapien
cctcaggtccgtcaaggtttgttga

SEQ ID NO: 4080918 - DNA, 25 bp, Homo sapien
tatatttgcgcatactgccccagtg

SEQ ID NO: 4080919 - DNA, 25 bp, Homo sapien
caatgtgtgtgcgtagttctgtgcc

SEQ ID NO: 4080920 - DNA, 25 bp, Homo sapien
aatattgtcacttcggctgggcgcg

SEQ ID NO: 4080921 - DNA, 25 bp, Homo sapien
gtgactgttgtttgttactgatcgt

SEQ ID NO: 4080922 - DNA, 25 bp, Homo sapien
ggtgactgttgtttgttactgatcg

SEQ ID NO: 4080923 - DNA, 25 bp, Homo sapien
tggtgactgttgtttgttactgatc

SEQ ID NO: 4080924 - DNA, 25 bp, Homo sapien
gcctcgactccaaatggttgaaaac

SEQ ID NO: 4080925 - DNA, 25 bp, Homo sapien
ggttgaaaacagatatacaggtggg

SEQ ID NO: 4080926 - DNA, 25 bp, Homo sapien
tacaggtggggtttgacatgtcttt

SEQ ID NO: 4080927 - DNA, 25 bp, Homo sapien
caggctcgcctcgactccaaatggt

SEQ ID NO: 4080928 - DNA, 25 bp, Homo sapien
aaacgatgggctccctgttatgtgt

SEQ ID NO: 4080929 - DNA, 25 bp, Homo sapien
acgatgggctccctgttatgtgtgt

SEQ ID NO: 4080930 - DNA, 25 bp, Homo sapien
atgggctccctgttatgtgtgtgta

SEQ ID NO: 4080931 - DNA, 25 bp, Homo sapien
taaaacgatgggctccctgttatgt

SEQ ID NO: 4080932 - DNA, 25 bp, Homo sapien
cagcctcgttgcgattggccgtacg

SEQ ID NO: 4080933 - DNA, 25 bp, Homo sapien
cctcgttgcgattggccgtacgcgg

SEQ ID NO: 4080934 - DNA, 25 bp, Homo sapien
cggagcagcctcgttgcgattggcc

SEQ ID NO: 4080935 - DNA, 25 bp, Homo sapien
ccacggagcagcctcgttgcgattg

SEQ ID NO: 4080936 - DNA, 25 bp, Homo sapien
ccggcgcccgctgttggccttggcc

SEQ ID NO: 4080937 - DNA, 25 bp, Homo sapien
gccaagcagtctcccgtgggagtgc

SEQ ID NO: 4080938 - DNA, 25 bp, Homo sapien
cccgctgttggccttggccgcagcc

SEQ ID NO: 4080939 - DNA, 25 bp, Homo sapien
cagccagggcgctccaagtaggaag

SEQ ID NO: 4080940 - DNA, 25 bp, Homo sapien
tggaatctgcccaagacttttgctg

SEQ ID NO: 4080941 - DNA, 25 bp, Homo sapien
caattttgttttgtggtcgctggag

SEQ ID NO: 4080942 - DNA, 25 bp, Homo sapien
agcgctgagaattacatacgtgagc

SEQ ID NO: 4080943 - DNA, 25 bp, Homo sapien
caaagatgcgttctcatacccaggg

SEQ ID NO: 4080944 - DNA, 25 bp, Homo sapien
cacctgaacccggtaagtcaaggct

SEQ ID NO: 4080945 - DNA, 25 bp, Homo sapien
gctgaggtggagaaccacctgaacc

SEQ ID NO: 4080946 - DNA, 25 bp, Homo sapien
ctgcagtcccagctagtggcaaggc

SEQ ID NO: 4080947 - DNA, 25 bp, Homo sapien
caggtgtggttccatgtgcctgcag

SEQ ID NO: 4080948 - DNA, 25 bp, Homo sapien
ctggagcgctatggtgcgatctcag

SEQ ID NO: 4080949 - DNA, 25 bp, Homo sapien
gctggagcgctatggtgcgatctca

SEQ ID NO: 4080950 - DNA, 25 bp, Homo sapien
cacagcaactagtgaataatagcct

SEQ ID NO: 4080951 - DNA, 25 bp, Homo sapien
tctaactgcacccagaaatactgat

SEQ ID NO: 4080952 - DNA, 25 bp, Homo sapien
tacacaaactagaggcaccgtggtg

SEQ ID NO: 4080953 - DNA, 25 bp, Homo sapien
gtcttgggcatcaactctaataatt

SEQ ID NO: 4080954 - DNA, 25 bp, Homo sapien
tgagcaaatatccaccccaaaaggg

SEQ ID NO: 4080955 - DNA, 25 bp, Homo sapien
tcaaaagtcactgagcaaatatcca

SEQ ID NO: 4080956 - DNA, 25 bp, Homo sapien
agattcagcgttgccacagccacgc

SEQ ID NO: 4080957 - DNA, 25 bp, Homo sapien
tcggggaagattcagcgttgccaca

SEQ ID NO: 4080958 - DNA, 25 bp, Homo sapien
acagccacgcactctttctcctggg

SEQ ID NO: 4080959 - DNA, 25 bp, Homo sapien
gggccagtccgtggagccatccatc

SEQ ID NO: 4080960 - DNA, 25 bp, Homo sapien
tcagcacgtctgcgctgcttgccag

SEQ ID NO: 4080961 - DNA, 25 bp, Homo sapien
gcacgtctgcgctgcttgccagggt

SEQ ID NO: 4080962 - DNA, 25 bp, Homo sapien
acgtctgcgctgcttgccagggtca

SEQ ID NO: 4080963 - DNA, 25 bp, Homo sapien
gtgctcagcacgtctgcgctgcttg

SEQ ID NO: 4080964 - DNA, 25 bp, Homo sapien
ctgcttctcagcggtgggcaacagc

SEQ ID NO: 4080965 - DNA, 25 bp, Homo sapien
gcttctcagcggtgggcaacagcat

SEQ ID NO: 4080966 - DNA, 25 bp, Homo sapien
ggcctgcttctcagcggtgggcaac

SEQ ID NO: 4080967 - DNA, 25 bp, Homo sapien
cttctcagcggtgggcaacagcatg

SEQ ID NO: 4080968 - DNA, 25 bp, Homo sapien
atttgagtgaaacgccatcccctcc

SEQ ID NO: 4080969 - DNA, 25 bp, Homo sapien
caatttgagtgaaacgccatcccct

SEQ ID NO: 4080970 - DNA, 25 bp, Homo sapien
gccaatttgagtgaaacgccatccc

SEQ ID NO: 4080971 - DNA, 25 bp, Homo sapien
tgtgccaatttgagtgaaacgccat

SEQ ID NO: 4080972 - DNA, 25 bp, Homo sapien
aagatcaatcaccaatcgatgacct

SEQ ID NO: 4080973 - DNA, 25 bp, Homo sapien
tcaatcaccaatcgatgacctggac

SEQ ID NO: 4080974 - DNA, 25 bp, Homo sapien
atcaatcaccaatcgatgacctgga

SEQ ID NO: 4080975 - DNA, 25 bp, Homo sapien
gatcaatcaccaatcgatgacctgg

SEQ ID NO: 4080976 - DNA, 25 bp, Homo sapien
ggctgcgtgtaaggctgactccaac

SEQ ID NO: 4080977 - DNA, 25 bp, Homo sapien
agtaatggctgcgtgtaaggctgac

SEQ ID NO: 4080978 - DNA, 25 bp, Homo sapien
gtgtaaggctgactccaaccctcca

SEQ ID NO: 4080979 - DNA, 25 bp, Homo sapien
tctctgcagtaatggctgcgtgtaa

SEQ ID NO: 4080980 - DNA, 25 bp, Homo sapien
ccagctgctctgtaaggacaagaag

SEQ ID NO: 4080981 - DNA, 25 bp, Homo sapien
gatccaaggtctaggctgcctctgc

SEQ ID NO: 4080982 - DNA, 25 bp, Homo sapien
caaaacccaatgtgatcggctccac

SEQ ID NO: 4080983 - DNA, 25 bp, Homo sapien
taaaatccttaaccctgctaatggc

SEQ ID NO: 4080984 - DNA, 25 bp, Homo sapien
cctccttctatgaaatgttgaggca

SEQ ID NO: 4080985 - DNA, 25 bp, Homo sapien
tatccaatggagtcctccttctatg

SEQ ID NO: 4080986 - DNA, 25 bp, Homo sapien
cgtattaataaggtctttatccaat

SEQ ID NO: 4080987 - DNA, 25 bp, Homo sapien
taataaggtctttatccaatggagt

SEQ ID NO: 4080988 - DNA, 25 bp, Homo sapien
ccagaggcaaacactgtttgccaga

SEQ ID NO: 4080989 - DNA, 25 bp, Homo sapien
tgttgtatgagctgaaccagaggca

SEQ ID NO: 4080990 - DNA, 25 bp, Homo sapien
agaagctgttgtatgagctgaacca

SEQ ID NO: 4080991 - DNA, 25 bp, Homo sapien
tgtatgagctgaaccagaggcaaac

SEQ ID NO: 4080992 - DNA, 25 bp, Homo sapien
aaaacttttgagtatcatcacaccc

SEQ ID NO: 4080993 - DNA, 25 bp, Homo sapien
tagcgtctgttcacaggctgagtct

SEQ ID NO: 4080994 - DNA, 25 bp, Homo sapien
ggcttctgccaaggttagcgtctgt

SEQ ID NO: 4080995 - DNA, 25 bp, Homo sapien
ggccttccaaaataatgctcaccat

SEQ ID NO: 4080996 - DNA, 25 bp, Homo sapien
acgcagcgaagacgaagacacagga

SEQ ID NO: 4080997 - DNA, 25 bp, Homo sapien
aaccaaaaagtcacacgcagcgaag

SEQ ID NO: 4080998 - DNA, 25 bp, Homo sapien
gtcacacgcagcgaagacgaagaca

SEQ ID NO: 4080999 - DNA, 25 bp, Homo sapien
aaagtcacacgcagcgaagacgaag

SEQ ID NO: 4081000 - DNA, 25 bp, Homo sapien
cttcactacatgataccctgcctgg

SEQ ID NO: 4081001 - DNA, 25 bp, Homo sapien
cactacatgataccctgcctggata

SEQ ID NO: 4081002 - DNA, 25 bp, Homo sapien
atcaccttcactacatgataccctg

SEQ ID NO: 4081003 - DNA, 25 bp, Homo sapien
atgataccctgcctggataacacca

SEQ ID NO: 4081004 - DNA, 25 bp, Homo sapien
agaagttaggtttgagggcatcctc

SEQ ID NO: 4081005 - DNA, 25 bp, Homo sapien
gcaacaatgctgttgacgtggagca

SEQ ID NO: 4081006 - DNA, 25 bp, Homo sapien
tggagcagacttcccatttgggatg

SEQ ID NO: 4081007 - DNA, 25 bp, Homo sapien
taggtttgagggcatcctctcttct

SEQ ID NO: 4081008 - DNA, 25 bp, Homo sapien
gggtctgaggaaggaaccaccttca

SEQ ID NO: 4081009 - DNA, 25 bp, Homo sapien
gctggtggagacttctgatactgag

SEQ ID NO: 4081010 - DNA, 25 bp, Homo sapien
tctgcaacagccgtgctggtggaga

SEQ ID NO: 4081011 - DNA, 25 bp, Homo sapien
tctgtgcccactcttcaagaaagtc

SEQ ID NO: 4081012 - DNA, 25 bp, Homo sapien
ctacacagcccaggttgccggctcc

SEQ ID NO: 4081013 - DNA, 25 bp, Homo sapien
ctcgctgcctatctgagcagatgcg

SEQ ID NO: 4081014 - DNA, 25 bp, Homo sapien
tatctgagcagatgcgatattgggc

SEQ ID NO: 4081015 - DNA, 25 bp, Homo sapien
tgcctattgcatccactttccaact

SEQ ID NO: 4081016 - DNA, 25 bp, Homo sapien
cgatattgggcaccttgtgaaacat

SEQ ID NO: 4081017 - DNA, 25 bp, Homo sapien
tgcagctgacagctatgaagcagga

SEQ ID NO: 4081018 - DNA, 25 bp, Homo sapien
ctgcagctgacagctatgaagcagg

SEQ ID NO: 4081019 - DNA, 25 bp, Homo sapien
gcagctgacagctatgaagcaggag

SEQ ID NO: 4081020 - DNA, 25 bp, Homo sapien
ctgggtaaacacacagacatgctgg

SEQ ID NO: 4081021 - DNA, 25 bp, Homo sapien
gagagcgccgtctggatggagatga

SEQ ID NO: 4081022 - DNA, 25 bp, Homo sapien
ggccagggagagcgccgtctggatg

SEQ ID NO: 4081023 - DNA, 25 bp, Homo sapien
atcagtttctgctcggcatgggcca

SEQ ID NO: 4081024 - DNA, 25 bp, Homo sapien
tcagtttctgctcggcatgggccat

SEQ ID NO: 4081025 - DNA, 25 bp, Homo sapien
tgagcctgagccacaggtaccctct

SEQ ID NO: 4081026 - DNA, 25 bp, Homo sapien
ctgagcctgagccacaggtaccctc

SEQ ID NO: 4081027 - DNA, 25 bp, Homo sapien
cctgagccacaggtaccctctgcac

SEQ ID NO: 4081028 - DNA, 25 bp, Homo sapien
agcctgagccacaggtaccctctgc

SEQ ID NO: 4081029 - DNA, 25 bp, Homo sapien
agcctataaggtcacctgttgagca

SEQ ID NO: 4081030 - DNA, 25 bp, Homo sapien
ctgcaaagagtagggagcctataag

SEQ ID NO: 4081031 - DNA, 25 bp, Homo sapien
caaagagtagggagcctataaggtc

SEQ ID NO: 4081032 - DNA, 25 bp, Homo sapien
cctataaggtcacctgttgagcaag

SEQ ID NO: 4081033 - DNA, 25 bp, Homo sapien
ccgcctgggtcagtagacgcttcac

SEQ ID NO: 4081034 - DNA, 25 bp, Homo sapien
ctgggtcagtagacgcttcactgcc

SEQ ID NO: 4081035 - DNA, 25 bp, Homo sapien
gcctgggtcagtagacgcttcactg

SEQ ID NO: 4081036 - DNA, 25 bp, Homo sapien
tgtggtcctgcgcctacacctgggc

SEQ ID NO: 4081037 - DNA, 25 bp, Homo sapien
atgggccctgggagtgccgccatct

SEQ ID NO: 4081038 - DNA, 25 bp, Homo sapien
tgggagtgccgccatctgtgcctgc

SEQ ID NO: 4081039 - DNA, 25 bp, Homo sapien
gtccacatgtggagaccctgacaat

SEQ ID NO: 4081040 - DNA, 25 bp, Homo sapien
tggagaccctgacaatgggccctgg

SEQ ID NO: 4081041 - DNA, 25 bp, Homo sapien
ctgtaggtttcacaggctgggtgtg

SEQ ID NO: 4081042 - DNA, 25 bp, Homo sapien
ggctgggtgtgtgggggccaccgtg

SEQ ID NO: 4081043 - DNA, 25 bp, Homo sapien
gtaggtttcacaggctgggtgtgtg

SEQ ID NO: 4081044 - DNA, 25 bp, Homo sapien
caggctgggtgtgtgggggccaccg

SEQ ID NO: 4081045 - DNA, 25 bp, Homo sapien
gagggagccgctcattaatttggcc

SEQ ID NO: 4081046 - DNA, 25 bp, Homo sapien
ctgggagagggagccgctcattaat

SEQ ID NO: 4081047 - DNA, 25 bp, Homo sapien
taatttggccaaagccttcttgagg

SEQ ID NO: 4081048 - DNA, 25 bp, Homo sapien
gctcattaatttggccaaagccttc

SEQ ID NO: 4081049 - DNA, 25 bp, Homo sapien
agaaagggggcggagcacacacaac

SEQ ID NO: 4081050 - DNA, 25 bp, Homo sapien
ctgcggagaaagggggcggagcaca

SEQ ID NO: 4081051 - DNA, 25 bp, Homo sapien
cggagaaagggggcggagcacacac

SEQ ID NO: 4081052 - DNA, 25 bp, Homo sapien
gaaagggggcggagcacacacaact

SEQ ID NO: 4081053 - DNA, 25 bp, Homo sapien
ccagcctgggcgagcctggctgaaa

SEQ ID NO: 4081054 - DNA, 25 bp, Homo sapien
tggacagtgacactcagaccccagc

SEQ ID NO: 4081055 - DNA, 25 bp, Homo sapien
tcacccattaagcaagaagccaata

SEQ ID NO: 4081056 - DNA, 25 bp, Homo sapien
gaagccaatagctggacagtgacac

SEQ ID NO: 4081057 - DNA, 25 bp, Homo sapien
ttcaccctcactagggcggcagctg

SEQ ID NO: 4081058 - DNA, 25 bp, Homo sapien
aatgtaactcgcctgccggttcacc

SEQ ID NO: 4081059 - DNA, 25 bp, Homo sapien
tttcagaaatgtaactcgcctgccg

SEQ ID NO: 4081060 - DNA, 25 bp, Homo sapien
tgccggttcaccctcactagggcgg

SEQ ID NO: 4081061 - DNA, 25 bp, Homo sapien
gcgagaccattacctgggtcacctg

SEQ ID NO: 4081062 - DNA, 25 bp, Homo sapien
gcagcagcgagaccattacctgggt

SEQ ID NO: 4081063 - DNA, 25 bp, Homo sapien
tacgtggccgcctatcagcagctgg

SEQ ID NO: 4081064 - DNA, 25 bp, Homo sapien
gtacgtggccgcctatcagcagctg

SEQ ID NO: 4081065 - DNA, 25 bp, Homo sapien
tcagcaaaatcccaccaagcactga

SEQ ID NO: 4081066 - DNA, 25 bp, Homo sapien
cagcaaaatcccaccaagcactgat

SEQ ID NO: 4081067 - DNA, 25 bp, Homo sapien
tctggcagcagtcttgtcgttggag

SEQ ID NO: 4081068 - DNA, 25 bp, Homo sapien
ctctggcagcagtcttgtcgttgga

SEQ ID NO: 4081069 - DNA, 25 bp, Homo sapien
actctggcagcagtcttgtcgttgg

SEQ ID NO: 4081070 - DNA, 25 bp, Homo sapien
ctggcagcagtcttgtcgttggaga

SEQ ID NO: 4081071 - DNA, 25 bp, Homo sapien
accagaagtggctgtctcatggatg

SEQ ID NO: 4081072 - DNA, 25 bp, Homo sapien
acaccagggctgtttctctgccaat

SEQ ID NO: 4081073 - DNA, 25 bp, Homo sapien
aacaccagggctgtttctctgccaa

SEQ ID NO: 4081074 - DNA, 25 bp, Homo sapien
agaagtggctgtctcatggatgctg

SEQ ID NO: 4081075 - DNA, 25 bp, Homo sapien
ccacagcaccctgcggccctttcag

SEQ ID NO: 4081076 - DNA, 25 bp, Homo sapien
accacagcaccctgcggccctttca

SEQ ID NO: 4081077 - DNA, 25 bp, Homo sapien
agcaccctgcggccctttcagtgac

SEQ ID NO: 4081078 - DNA, 25 bp, Homo sapien
acagcaccctgcggccctttcagtg

SEQ ID NO: 4081079 - DNA, 25 bp, Homo sapien
tagggctctccccgtggatacctgt

SEQ ID NO: 4081080 - DNA, 25 bp, Homo sapien
atgtagggctctccccgtggatacc

SEQ ID NO: 4081081 - DNA, 25 bp, Homo sapien
agggctctccccgtggatacctgtt

SEQ ID NO: 4081082 - DNA, 25 bp, Homo sapien
atgatgtagggctctccccgtggat

SEQ ID NO: 4081083 - DNA, 25 bp, Homo sapien
gagggctgccctgcagggtcactgc

SEQ ID NO: 4081084 - DNA, 25 bp, Homo sapien
ggaggttggagggctgccctgcagg

SEQ ID NO: 4081085 - DNA, 25 bp, Homo sapien
gaggaggaggttggagggctgccct

SEQ ID NO: 4081086 - DNA, 25 bp, Homo sapien
agggctgccctgcagggtcactgca

SEQ ID NO: 4081087 - DNA, 25 bp, Homo sapien
ggctggggtgtgtgtggactgtctc

SEQ ID NO: 4081088 - DNA, 25 bp, Homo sapien
ggaggagtggggggagaggtagaga

SEQ ID NO: 4081089 - DNA, 25 bp, Homo sapien
tagagagagcaatcattagggctgg

SEQ ID NO: 4081090 - DNA, 25 bp, Homo sapien
ctggcagaggggcaccccgtcccac

SEQ ID NO: 4081091 - DNA, 25 bp, Homo sapien
tgactgacttttacggacctcgagt

SEQ ID NO: 4081092 - DNA, 25 bp, Homo sapien
ctgacttttacggacctcgagtctg

SEQ ID NO: 4081093 - DNA, 25 bp, Homo sapien
gactgacttttacggacctcgagtc

SEQ ID NO: 4081094 - DNA, 25 bp, Homo sapien
tgacttttacggacctcgagtctgg

SEQ ID NO: 4081095 - DNA, 25 bp, Homo sapien
ttcttccagctgatgttccacttgt

SEQ ID NO: 4081096 - DNA, 25 bp, Homo sapien
ttccagctgatgttccacttgtttc

SEQ ID NO: 4081097 - DNA, 25 bp, Homo sapien
cttccagctgatgttccacttgttt

SEQ ID NO: 4081098 - DNA, 25 bp, Homo sapien
tcttccagctgatgttccacttgtt

SEQ ID NO: 4081099 - DNA, 25 bp, Homo sapien
gctttctgtttctcgttgtttgctt

SEQ ID NO: 4081100 - DNA, 25 bp, Homo sapien
ctctagccccctttcagctttctgt

SEQ ID NO: 4081101 - DNA, 25 bp, Homo sapien
tctgtttctcgttgtttgctttctt

SEQ ID NO: 4081102 - DNA, 25 bp, Homo sapien
tctagccccctttcagctttctgtt

SEQ ID NO: 4081103 - DNA, 25 bp, Homo sapien
tcaaagtatctgagagaacgtttcg

SEQ ID NO: 4081104 - DNA, 25 bp, Homo sapien
ccctttctgtatgttcaatctctgg

SEQ ID NO: 4081105 - DNA, 25 bp, Homo sapien
cctttctgtatgttcaatctctgga

SEQ ID NO: 4081106 - DNA, 25 bp, Homo sapien
cgtttcgtgtggtacaggtccgtat

SEQ ID NO: 4081107 - DNA, 25 bp, Homo sapien
tgagatggggcccaaaggactcccc

SEQ ID NO: 4081108 - DNA, 25 bp, Homo sapien
agttgagatggggcccaaaggactc

SEQ ID NO: 4081109 - DNA, 25 bp, Homo sapien
gagagagttgagatggggcccaaag

SEQ ID NO: 4081110 - DNA, 25 bp, Homo sapien
atgagagagttgagatggggcccaa

SEQ ID NO: 4081111 - DNA, 25 bp, Homo sapien
tgttgcagacggacggccagatcct

SEQ ID NO: 4081112 - DNA, 25 bp, Homo sapien
aatgaatgttgcagacggacggcca

SEQ ID NO: 4081113 - DNA, 25 bp, Homo sapien
caatgaatgttgcagacggacggcc

SEQ ID NO: 4081114 - DNA, 25 bp, Homo sapien
gaatgttgcagacggacggccagat

SEQ ID NO: 4081115 - DNA, 25 bp, Homo sapien
gagcccgctctaactctcctttacg

SEQ ID NO: 4081116 - DNA, 25 bp, Homo sapien
tcttctgtgtggcggtgacagcaga

SEQ ID NO: 4081117 - DNA, 25 bp, Homo sapien
ttcttctgtgtggcggtgacagcag

SEQ ID NO: 4081118 - DNA, 25 bp, Homo sapien
tctgtgtggcggtgacagcagagag

SEQ ID NO: 4081119 - DNA, 25 bp, Homo sapien
tcctctgtctgcgaagccaggctcc

SEQ ID NO: 4081120 - DNA, 25 bp, Homo sapien
tctgtctgcgaagccaggctcccag

SEQ ID NO: 4081121 - DNA, 25 bp, Homo sapien
tcccaggggacgcggcaggtggttg

SEQ ID NO: 4081122 - DNA, 25 bp, Homo sapien
gggacgcggcaggtggttggactca

SEQ ID NO: 4081123 - DNA, 25 bp, Homo sapien
tgactcagtcccaagctgccgctaa

SEQ ID NO: 4081124 - DNA, 25 bp, Homo sapien
gctaacaaccatacaaaaaagcagt

SEQ ID NO: 4081125 - DNA, 25 bp, Homo sapien
caagctgccgctaacaaccatacaa

SEQ ID NO: 4081126 - DNA, 25 bp, Homo sapien
tgccgctaacaaccatacaaaaaag

SEQ ID NO: 4081127 - DNA, 25 bp, Homo sapien
atacgtgctttactgcggctggaga

SEQ ID NO: 4081128 - DNA, 25 bp, Homo sapien
ttccactccatacgtgctttactgc

SEQ ID NO: 4081129 - DNA, 25 bp, Homo sapien
cagctgcgctttcagcagtgcctgc

SEQ ID NO: 4081130 - DNA, 25 bp, Homo sapien
tccatacgtgctttactgcggctgg

SEQ ID NO: 4081131 - DNA, 25 bp, Homo sapien
tttagatgttcagcatattcatccc

SEQ ID NO: 4081132 - DNA, 25 bp, Homo sapien
ccctctctagctggacttctttaag

SEQ ID NO: 4081133 - DNA, 25 bp, Homo sapien
ggacttctttaagtgactccttcaa

SEQ ID NO: 4081134 - DNA, 25 bp, Homo sapien
tagatgttcagcatattcatccctc

SEQ ID NO: 4081135 - DNA, 25 bp, Homo sapien
acctatctaatgtgggggggctgaa

SEQ ID NO: 4081136 - DNA, 25 bp, Homo sapien
tgacctatctaatgtgggggggctg

SEQ ID NO: 4081137 - DNA, 25 bp, Homo sapien
agtgacctatctaatgtgggggggc

SEQ ID NO: 4081138 - DNA, 25 bp, Homo sapien
tccagtgacctatctaatgtggggg

SEQ ID NO: 4081139 - DNA, 25 bp, Homo sapien
tctctacccgatatttatcatgctt

SEQ ID NO: 4081140 - DNA, 25 bp, Homo sapien
ctctacccgatatttatcatgcttc

SEQ ID NO: 4081141 - DNA, 25 bp, Homo sapien
agcgctcctgccactctctctagtt

SEQ ID NO: 4081142 - DNA, 25 bp, Homo sapien
tggagcgctcctgccactctctcta

SEQ ID NO: 4081143 - DNA, 25 bp, Homo sapien
cctggagcgctcctgccactctctc

SEQ ID NO: 4081144 - DNA, 25 bp, Homo sapien
ctctagttccttcctcaggtgctgc

SEQ ID NO: 4081145 - DNA, 25 bp, Homo sapien
ttgaagctgttctgtggctcggcca

SEQ ID NO: 4081146 - DNA, 25 bp, Homo sapien
gtgactgcctcccatggcaccggga

SEQ ID NO: 4081147 - DNA, 25 bp, Homo sapien
gactgcctcccatggcaccgggaag

SEQ ID NO: 4081148 - DNA, 25 bp, Homo sapien
acagagagaagcaatcagcagccac

SEQ ID NO: 4081149 - DNA, 25 bp, Homo sapien
aagcaatcagcagccacccactgca

SEQ ID NO: 4081150 - DNA, 25 bp, Homo sapien
tgctccaactgtagtacgctcttgt

SEQ ID NO: 4081151 - DNA, 25 bp, Homo sapien
ccaactgtagtacgctcttgttctc

SEQ ID NO: 4081152 - DNA, 25 bp, Homo sapien
aactgtagtacgctcttgttctcat

SEQ ID NO: 4081153 - DNA, 25 bp, Homo sapien
ctccaactgtagtacgctcttgttc

SEQ ID NO: 4081154 - DNA, 25 bp, Homo sapien
gtgacccaggtaatggtctggctgc

SEQ ID NO: 4081155 - DNA, 25 bp, Homo sapien
tgcaggtgacccaggtaatggtctg

SEQ ID NO: 4081156 - DNA, 25 bp, Homo sapien
tgacccaggtaatggtctggctgct

SEQ ID NO: 4081157 - DNA, 25 bp, Homo sapien
caggtgacccaggtaatggtctggc

SEQ ID NO: 4081158 - DNA, 25 bp, Homo sapien
ctgctgctgataggtggccacgtac

SEQ ID NO: 4081159 - DNA, 25 bp, Homo sapien
tctcacaggtcagctgctgataggc

SEQ ID NO: 4081160 - DNA, 25 bp, Homo sapien
tcactgcctgtacagcgcctccttc

SEQ ID NO: 4081161 - DNA, 25 bp, Homo sapien
tgtacagcgcctccttctcacaggt

SEQ ID NO: 4081162 - DNA, 25 bp, Homo sapien
tcacaggtcagctgctgataggcgg

SEQ ID NO: 4081163 - DNA, 25 bp, Homo sapien
actgggccgttagctgctgtttctg

SEQ ID NO: 4081164 - DNA, 25 bp, Homo sapien
gctcaactgggccgttagctgctgt

SEQ ID NO: 4081165 - DNA, 25 bp, Homo sapien
tcaactgggccgttagctgctgttt

SEQ ID NO: 4081166 - DNA, 25 bp, Homo sapien
caactgggccgttagctgctgtttc

SEQ ID NO: 4081167 - DNA, 25 bp, Homo sapien
cactactggtcggtgtgggagttct

SEQ ID NO: 4081168 - DNA, 25 bp, Homo sapien
tagtgcaggcacccggttagtataa

SEQ ID NO: 4081169 - DNA, 25 bp, Homo sapien
gcacattcccactactggtcggtgt

SEQ ID NO: 4081170 - DNA, 25 bp, Homo sapien
ttagtgcaggcacccggttagtata

SEQ ID NO: 4081171 - DNA, 25 bp, Homo sapien
ctgtccagatgttctcctccgtgtc

SEQ ID NO: 4081172 - DNA, 25 bp, Homo sapien
caggtcctgtgggacactcggcatg

SEQ ID NO: 4081173 - DNA, 25 bp, Homo sapien
tccaggtcctgtgggacactcggca

SEQ ID NO: 4081174 - DNA, 25 bp, Homo sapien
cactgtccagatgttctcctccgtg

SEQ ID NO: 4081175 - DNA, 25 bp, Homo sapien
cctgctcttgtaactgtgcctgctt

SEQ ID NO: 4081176 - DNA, 25 bp, Homo sapien
gctctttcacctgctcttgtaactg

SEQ ID NO: 4081177 - DNA, 25 bp, Homo sapien
tttcacctgctcttgtaactgtgcc

SEQ ID NO: 4081178 - DNA, 25 bp, Homo sapien
gcctgcttctcctgggcactagctc

SEQ ID NO: 4081179 - DNA, 25 bp, Homo sapien
cccaggccctggggctgggaccgct

SEQ ID NO: 4081180 - DNA, 25 bp, Homo sapien
ggctgggaccgctgcctctggctcc

SEQ ID NO: 4081181 - DNA, 25 bp, Homo sapien
tcgcccccaggccctggggctggga

SEQ ID NO: 4081182 - DNA, 25 bp, Homo sapien
aggccctggggctgggaccgctgcc

SEQ ID NO: 4081183 - DNA, 25 bp, Homo sapien
ctgccctcaggtggcattttcaagt

SEQ ID NO: 4081184 - DNA, 25 bp, Homo sapien
caaaataatggggtcacatctcggc

SEQ ID NO: 4081185 - DNA, 25 bp, Homo sapien
aaataatggggtcacatctcggcag

SEQ ID NO: 4081186 - DNA, 25 bp, Homo sapien
ctggagccaaaataatggggtcaca

SEQ ID NO: 4081187 - DNA, 25 bp, Homo sapien
gagccaaaataatggggtcacatct

SEQ ID NO: 4081188 - DNA, 25 bp, Homo sapien
cctccaggtggtccataaagccgct

SEQ ID NO: 4081189 - DNA, 25 bp, Homo sapien
aggtctgccttctcctccaggtggt

SEQ ID NO: 4081190 - DNA, 25 bp, Homo sapien
ggtctgccttctcctccaggtggtc

SEQ ID NO: 4081191 - DNA, 25 bp, Homo sapien
tctcctccaggtggtccataaagcc

SEQ ID NO: 4081192 - DNA, 25 bp, Homo sapien
ggcatctctctctgtagtactggaa

SEQ ID NO: 4081193 - DNA, 25 bp, Homo sapien
tctctctctgtagtactggaagaat

SEQ ID NO: 4081194 - DNA, 25 bp, Homo sapien
catctctctctgtagtactggaaga

SEQ ID NO: 4081195 - DNA, 25 bp, Homo sapien
tctctctgtagtactggaagaatcc

SEQ ID NO: 4081196 - DNA, 25 bp, Homo sapien
ctgtccagggccagcctgatggtgt

SEQ ID NO: 4081197 - DNA, 25 bp, Homo sapien
tcatctcctccctgtccagggccag

SEQ ID NO: 4081198 - DNA, 25 bp, Homo sapien
tccctgtccagggccagcctgatgg

SEQ ID NO: 4081199 - DNA, 25 bp, Homo sapien
catctcctccctgtccagggccagc

SEQ ID NO: 4081200 - DNA, 25 bp, Homo sapien
ctgtcacgctgctgccagcgctcac

SEQ ID NO: 4081201 - DNA, 25 bp, Homo sapien
tgctgccagcgctcaccgtcacagc

SEQ ID NO: 4081202 - DNA, 25 bp, Homo sapien
gggtgctcagctgtcacgctgctgc

SEQ ID NO: 4081203 - DNA, 25 bp, Homo sapien
ccccgcagagatgttgcacactcta

SEQ ID NO: 4081204 - DNA, 25 bp, Homo sapien
tctcctgcagctccagcagcttcac

SEQ ID NO: 4081205 - DNA, 25 bp, Homo sapien
catctcctgcagctccagcagcttc

SEQ ID NO: 4081206 - DNA, 25 bp, Homo sapien
cagctgcaacaccatctcctgcagc

SEQ ID NO: 4081207 - DNA, 25 bp, Homo sapien
accatctcctgcagctccagcagct

SEQ ID NO: 4081208 - DNA, 25 bp, Homo sapien
aatttgctgtgtcccttgtagtcgc

SEQ ID NO: 4081209 - DNA, 25 bp, Homo sapien
caagaatttgctgtgtcccttgtag

SEQ ID NO: 4081210 - DNA, 25 bp, Homo sapien
agaatttgctgtgtcccttgtagtc

SEQ ID NO: 4081211 - DNA, 25 bp, Homo sapien
ttgctgtgtcccttgtagtcgccac

SEQ ID NO: 4081212 - DNA, 25 bp, Homo sapien
ggactgggctcatgagcagggttct

SEQ ID NO: 4081213 - DNA, 25 bp, Homo sapien
atgcttgtgggcagccccaagctcc

SEQ ID NO: 4081214 - DNA, 25 bp, Homo sapien
tcctggactgggctcatgagcaggg

SEQ ID NO: 4081215 - DNA, 25 bp, Homo sapien
ggctcctggactgggctcatgagca

SEQ ID NO: 4081216 - DNA, 25 bp, Homo sapien
ctccttgcacaggctccacgctgtc

SEQ ID NO: 4081217 - DNA, 25 bp, Homo sapien
tccttgcacaggctccacgctgtca

SEQ ID NO: 4081218 - DNA, 25 bp, Homo sapien
cccaagcctgggtgctcctggtggt

SEQ ID NO: 4081219 - DNA, 25 bp, Homo sapien
agcagttgctgcccaagcctgggtg

SEQ ID NO: 4081220 - DNA, 25 bp, Homo sapien
ctgcccaagcctgggtgctcctggt

SEQ ID NO: 4081221 - DNA, 25 bp, Homo sapien
ccaagcctgggtgctcctggtggtc

SEQ ID NO: 4081222 - DNA, 25 bp, Homo sapien
aaagaaaattgcgaaagtatgccag

SEQ ID NO: 4081223 - DNA, 25 bp, Homo sapien
agaaaattgcgaaagtatgccagag

SEQ ID NO: 4081224 - DNA, 25 bp, Homo sapien
aaattgcgaaagtatgccagagtga

SEQ ID NO: 4081225 - DNA, 25 bp, Homo sapien
gaaaattgcgaaagtatgccagagt

SEQ ID NO: 4081226 - DNA, 25 bp, Homo sapien
tacaatagtacagcactaattcttg

SEQ ID NO: 4081227 - DNA, 25 bp, Homo sapien
agtacagcactaattcttggcaaca

SEQ ID NO: 4081228 - DNA, 25 bp, Homo sapien
agcactaattcttggcaacagaaca

SEQ ID NO: 4081229 - DNA, 25 bp, Homo sapien
ctaaaggaactacaatagtacagca

SEQ ID NO: 4081230 - DNA, 25 bp, Homo sapien
cctgtatgcgtgttccagggacatt

SEQ ID NO: 4081231 - DNA, 25 bp, Homo sapien
gagcctgtatgcgtgttccagggac

SEQ ID NO: 4081232 - DNA, 25 bp, Homo sapien
agagcctgtatgcgtgttccaggga

SEQ ID NO: 4081233 - DNA, 25 bp, Homo sapien
gactagagcctgtatgcgtgttcca

SEQ ID NO: 4081234 - DNA, 25 bp, Homo sapien
tgaagaataggcagagtggtctaga

SEQ ID NO: 4081235 - DNA, 25 bp, Homo sapien
aagaataggcagagtggtctagatg

SEQ ID NO: 4081236 - DNA, 25 bp, Homo sapien
ggttgaagaataggcagagtggtct

SEQ ID NO: 4081237 - DNA, 25 bp, Homo sapien
ttgaagaataggcagagtggtctag

SEQ ID NO: 4081238 - DNA, 25 bp, Homo sapien
catatctccctacatcctaataatg

SEQ ID NO: 4081239 - DNA, 25 bp, Homo sapien
atcctaataatgtgatgtgttttgg

SEQ ID NO: 4081240 - DNA, 25 bp, Homo sapien
acatacatatctccctacatcctaa

SEQ ID NO: 4081241 - DNA, 25 bp, Homo sapien
ccagggagcacacatacatatctcc

SEQ ID NO: 4081242 - DNA, 25 bp, Homo sapien
taaaagtatcatgaggatgccaaat

SEQ ID NO: 4081243 - DNA, 25 bp, Homo sapien
tgttaatgtcgtatttataaaagta

SEQ ID NO: 4081244 - DNA, 25 bp, Homo sapien
ttataaaagtatcatgaggatgcca

SEQ ID NO: 4081245 - DNA, 25 bp, Homo sapien
ctgttaatgtcgtatttataaaagt

SEQ ID NO: 4081246 - DNA, 25 bp, Homo sapien
tcggcaaaatcgtactgctgctctc

SEQ ID NO: 4081247 - DNA, 25 bp, Homo sapien
tattccatcggcaaaatcgtactgc

SEQ ID NO: 4081248 - DNA, 25 bp, Homo sapien
aatttggaagagtccgttgaagtca

SEQ ID NO: 4081249 - DNA, 25 bp, Homo sapien
cacaaggacccgatatttgcactct

SEQ ID NO: 4081250 - DNA, 25 bp, Homo sapien
gatgctcgtagttgtctttaaactg

SEQ ID NO: 4081251 - DNA, 25 bp, Homo sapien
ttacagatgctcgtagttgtcttta

SEQ ID NO: 4081252 - DNA, 25 bp, Homo sapien
cagatgctcgtagttgtctttaaac

SEQ ID NO: 4081253 - DNA, 25 bp, Homo sapien
tgctcgtagttgtctttaaactgaa

SEQ ID NO: 4081254 - DNA, 25 bp, Homo sapien
cagttagacataaagttccacaagg

SEQ ID NO: 4081255 - DNA, 25 bp, Homo sapien
tctggatctttccagttagacataa

SEQ ID NO: 4081256 - DNA, 25 bp, Homo sapien
acttcgcagattagtgaaaactgcc

SEQ ID NO: 4081257 - DNA, 25 bp, Homo sapien
tccagaactgccgtagaatcctcat

SEQ ID NO: 4081258 - DNA, 25 bp, Homo sapien
caacggtgggtgaagtgacgtggca

SEQ ID NO: 4081259 - DNA, 25 bp, Homo sapien
ggtgaagtgacgtggcagcctcagg

SEQ ID NO: 4081260 - DNA, 25 bp, Homo sapien
catgtttcaggaagatcaactcata

SEQ ID NO: 4081261 - DNA, 25 bp, Homo sapien
gatcaactcataagtgttcaggaag

SEQ ID NO: 4081262 - DNA, 25 bp, Homo sapien
gcactttagccagaggcctgagcct

SEQ ID NO: 4081263 - DNA, 25 bp, Homo sapien
tgattgatcttgcagcgagagagcc

SEQ ID NO: 4081264 - DNA, 25 bp, Homo sapien
gatcttgcagcgagagagcctcact

SEQ ID NO: 4081265 - DNA, 25 bp, Homo sapien
cccttgctggctgcactttagccag

SEQ ID NO: 4081266 - DNA, 25 bp, Homo sapien
ttcaccttccactacatacactggg

SEQ ID NO: 4081267 - DNA, 25 bp, Homo sapien
ccttccactacatacactgggggcg

SEQ ID NO: 4081268 - DNA, 25 bp, Homo sapien
tccactacatacactgggggcgaca

SEQ ID NO: 4081269 - DNA, 25 bp, Homo sapien
cttcaccttccactacatacactgg

SEQ ID NO: 4081270 - DNA, 25 bp, Homo sapien
agttaagtggagtctcaaccacttc

SEQ ID NO: 4081271 - DNA, 25 bp, Homo sapien
ggtccagttaagtggagtctcaacc

SEQ ID NO: 4081272 - DNA, 25 bp, Homo sapien
ctgggtccagttaagtggagtctca

SEQ ID NO: 4081273 - DNA, 25 bp, Homo sapien
cccattcccaggtccaatcggtgca

SEQ ID NO: 4081274 - DNA, 25 bp, Homo sapien
tggaccgggaggatcctcctcttgg

SEQ ID NO: 4081275 - DNA, 25 bp, Homo sapien
catggactggaccgggaggatcctc

SEQ ID NO: 4081276 - DNA, 25 bp, Homo sapien
gaccgggaggatcctcctcttggtg

SEQ ID NO: 4081277 - DNA, 25 bp, Homo sapien
gactggaccgggaggatcctcctct

SEQ ID NO: 4081278 - DNA, 25 bp, Homo sapien
attccctttgtagtccagttccagg

SEQ ID NO: 4081279 - DNA, 25 bp, Homo sapien
gaacctctcaggtaatgactctagg

SEQ ID NO: 4081280 - DNA, 25 bp, Homo sapien
taacctcgcactccaaccgtgagga

SEQ ID NO: 4081281 - DNA, 25 bp, Homo sapien
aatatattgacacatctgccctaag

SEQ ID NO: 4081282 - DNA, 25 bp, Homo sapien
cttcttacaatacatgaggtaggac

SEQ ID NO: 4081283 - DNA, 25 bp, Homo sapien
ttcttacaatacatgaggtaggaca

SEQ ID NO: 4081284 - DNA, 25 bp, Homo sapien
tcttacaatacatgaggtaggacat

SEQ ID NO: 4081285 - DNA, 25 bp, Homo sapien
tggccatcctcctgacctctactgt

SEQ ID NO: 4081286 - DNA, 25 bp, Homo sapien
gctctataagatcctgggtatcacc

SEQ ID NO: 4081287 - DNA, 25 bp, Homo sapien
ttggccctcaccctgaaagtccttc

SEQ ID NO: 4081288 - DNA, 25 bp, Homo sapien
tccatagaacccgtgtccctgaggc

SEQ ID NO: 4081289 - DNA, 25 bp, Homo sapien
gaatttctgattatgatctcacaag

SEQ ID NO: 4081290 - DNA, 25 bp, Homo sapien
atggatttacctgttaggttttgtg

SEQ ID NO: 4081291 - DNA, 25 bp, Homo sapien
tccctactcttaatatatatgacta

SEQ ID NO: 4081292 - DNA, 25 bp, Homo sapien
caagagtttagttgtatcatgtgat

SEQ ID NO: 4081293 - DNA, 25 bp, Homo sapien
ggttgtattggcattggcgctagtg

SEQ ID NO: 4081294 - DNA, 25 bp, Homo sapien
tggttgtattggcattggcgctagt

SEQ ID NO: 4081295 - DNA, 25 bp, Homo sapien
ccggcacgccctcatgctctgtgtt

SEQ ID NO: 4081296 - DNA, 25 bp, Homo sapien
tcctgctcgtgctagattgcacggc

SEQ ID NO: 4081297 - DNA, 25 bp, Homo sapien
ttctcctgctcgtgctagattgcac

SEQ ID NO: 4081298 - DNA, 25 bp, Homo sapien
tcccggcacgccctcatgctctgtg

SEQ ID NO: 4081299 - DNA, 25 bp, Homo sapien
caccagtggttgcttgagcctttct

SEQ ID NO: 4081300 - DNA, 25 bp, Homo sapien
ttgagcctttctgctgtttagcctc

SEQ ID NO: 4081301 - DNA, 25 bp, Homo sapien
tgttcccctccaccagtggttgctt

SEQ ID NO: 4081302 - DNA, 25 bp, Homo sapien
tgagcctttctgctgtttagcctca

SEQ ID NO: 4081303 - DNA, 25 bp, Homo sapien
tcaaaccgggcaacagccattctgg

SEQ ID NO: 4081304 - DNA, 25 bp, Homo sapien
ctggcgcaatcaaaccgggcaacag

SEQ ID NO: 4081305 - DNA, 25 bp, Homo sapien
agctgtcagacactggcgcaatcaa

SEQ ID NO: 4081306 - DNA, 25 bp, Homo sapien
gcaacagccattctggtgtaaacat

SEQ ID NO: 4081307 - DNA, 25 bp, Homo sapien
ggctgtcccaccacataaaacgtta

SEQ ID NO: 4081308 - DNA, 25 bp, Homo sapien
cttttgaaagggctgtcccaccaca

SEQ ID NO: 4081309 - DNA, 25 bp, Homo sapien
tgaaagggctgtcccaccacataaa

SEQ ID NO: 4081310 - DNA, 25 bp, Homo sapien
cccaccacataaaacgttacatttg

SEQ ID NO: 4081311 - DNA, 25 bp, Homo sapien
taacagcaaacatgggctccgtgat

SEQ ID NO: 4081312 - DNA, 25 bp, Homo sapien
tgggctccgtgatacctttttcagt

SEQ ID NO: 4081313 - DNA, 25 bp, Homo sapien
gcaaacatgggctccgtgatacctt

SEQ ID NO: 4081314 - DNA, 25 bp, Homo sapien
aaagacggtaacagcaaacatgggc

SEQ ID NO: 4081315 - DNA, 25 bp, Homo sapien
caaaaacgtctgctgcattttcact

SEQ ID NO: 4081316 - DNA, 25 bp, Homo sapien
gtctggatccattccgtggagctca

SEQ ID NO: 4081317 - DNA, 25 bp, Homo sapien
gatccattccgtggagctcacatca

SEQ ID NO: 4081318 - DNA, 25 bp, Homo sapien
ggagctcacatcaaaaacgtctgct

SEQ ID NO: 4081319 - DNA, 25 bp, Homo sapien
tccaaactagcaagtacccattaca

SEQ ID NO: 4081320 - DNA, 25 bp, Homo sapien
tcattaactcattagttgcataatc

SEQ ID NO: 4081321 - DNA, 25 bp, Homo sapien
ggattatttctgtttccgcgtttca

SEQ ID NO: 4081322 - DNA, 25 bp, Homo sapien
gttgcataatcttaaggtcaaatta

SEQ ID NO: 4081323 - DNA, 25 bp, Homo sapien
cactgatttgttgtccttcataatg

SEQ ID NO: 4081324 - DNA, 25 bp, Homo sapien
gcttcacttctatgccctgaatttc

SEQ ID NO: 4081325 - DNA, 25 bp, Homo sapien
tccctcatgatactgcttcacttct

SEQ ID NO: 4081326 - DNA, 25 bp, Homo sapien
tgtcccacaatctgcacctgtcttt

SEQ ID NO: 4081327 - DNA, 25 bp, Homo sapien
tgtgcagggaccacgctaatgttct

SEQ ID NO: 4081328 - DNA, 25 bp, Homo sapien
gatggaaagcctcaccaatttgcat

SEQ ID NO: 4081329 - DNA, 25 bp, Homo sapien
aaagatggaaagcctcaccaatttg

SEQ ID NO: 4081330 - DNA, 25 bp, Homo sapien
aaaaagatggaaagcctcaccaatt

SEQ ID NO: 4081331 - DNA, 25 bp, Homo sapien
tagattggctgcctatgacgacaga

SEQ ID NO: 4081332 - DNA, 25 bp, Homo sapien
tattatggacgacctaagttcctcg

SEQ ID NO: 4081333 - DNA, 25 bp, Homo sapien
gacgacagacctcttttggctccaa

SEQ ID NO: 4081334 - DNA, 25 bp, Homo sapien
ggtacagccccacttgtcgttaatg

SEQ ID NO: 4081335 - DNA, 25 bp, Homo sapien
tgtgggacgtatcctgggagcgccc

SEQ ID NO: 4081336 - DNA, 25 bp, Homo sapien
tggtctgtggggatccatcgttgct

SEQ ID NO: 4081337 - DNA, 25 bp, Homo sapien
gcggttggcgtaactcagggaacac

SEQ ID NO: 4081338 - DNA, 25 bp, Homo sapien
agctcggccgggaccctaggtgcgg

SEQ ID NO: 4081339 - DNA, 25 bp, Homo sapien
tgtctcctcccggggtgaggaggag

SEQ ID NO: 4081340 - DNA, 25 bp, Homo sapien
ctagtagctcagtcgctgccctgcg

SEQ ID NO: 4081341 - DNA, 25 bp, Homo sapien
ggaggctgtgccgtggcgggccttg

SEQ ID NO: 4081342 - DNA, 25 bp, Homo sapien
gaggaggctgtgccgtggcgggcct

SEQ ID NO: 4081343 - DNA, 25 bp, Homo sapien
ggatggcagccttgcctgtgcagtc

SEQ ID NO: 4081344 - DNA, 25 bp, Homo sapien
atggcagccttgcctgtgcagtcat

SEQ ID NO: 4081345 - DNA, 25 bp, Homo sapien
gatggcagccttgcctgtgcagtca

SEQ ID NO: 4081346 - DNA, 25 bp, Homo sapien
cccagaattggagggcatctttctc

SEQ ID NO: 4081347 - DNA, 25 bp, Homo sapien
cctaaggggtgtccttttctgcgct

SEQ ID NO: 4081348 - DNA, 25 bp, Homo sapien
ctccatctagtaactagggggcatc

SEQ ID NO: 4081349 - DNA, 25 bp, Homo sapien
aggggtgtccttttctgcgcttcca

SEQ ID NO: 4081350 - DNA, 25 bp, Homo sapien
cctgacatgtggcattgatggagcc

SEQ ID NO: 4081351 - DNA, 25 bp, Homo sapien
taatgcctcccacaaatgggcagga

SEQ ID NO: 4081352 - DNA, 25 bp, Homo sapien
tgccttgcccctcgatgatggaaaa

SEQ ID NO: 4081353 - DNA, 25 bp, Homo sapien
gaagtcttgccatctgctgaccaag

SEQ ID NO: 4081354 - DNA, 25 bp, Homo sapien
aagtaagtcacagtcgggacactgg

SEQ ID NO: 4081355 - DNA, 25 bp, Homo sapien
gggacactggttcctgtcactgggt

SEQ ID NO: 4081356 - DNA, 25 bp, Homo sapien
cagtcgggacactggttcctgtcac

SEQ ID NO: 4081357 - DNA, 25 bp, Homo sapien
agtaagtcacagtcgggacactggt

SEQ ID NO: 4081358 - DNA, 25 bp, Homo sapien
gtaatgatgatctcttggttcccct

SEQ ID NO: 4081359 - DNA, 25 bp, Homo sapien
cacaccgggttactatttgagtagc

SEQ ID NO: 4081360 - DNA, 25 bp, Homo sapien
tcaacccgaaggaaaatgcacatgg

SEQ ID NO: 4081361 - DNA, 25 bp, Homo sapien
ccttctgctctattgaggagtggga

SEQ ID NO: 4081362 - DNA, 25 bp, Homo sapien
tgccctgcgggctcacggtctgtga

SEQ ID NO: 4081363 - DNA, 25 bp, Homo sapien
ccacggctgctgcacaagcctgtga

SEQ ID NO: 4081364 - DNA, 25 bp, Homo sapien
acggctgctgcacaagcctgtgacg

SEQ ID NO: 4081365 - DNA, 25 bp, Homo sapien
aagcctgtgacgctgccctgcgggc

SEQ ID NO: 4081366 - DNA, 25 bp, Homo sapien
cccggtggccctgggcgcgttccat

SEQ ID NO: 4081367 - DNA, 25 bp, Homo sapien
gaaagcgccgggctcttccgctcca

SEQ ID NO: 4081368 - DNA, 25 bp, Homo sapien
cagcccgaccgcggccggtgcctga

SEQ ID NO: 4081369 - DNA, 25 bp, Homo sapien
tgaggctgggggacgcgctggcccg

SEQ ID NO: 4081370 - DNA, 25 bp, Homo sapien
tggtggagccattggaagacttatg

SEQ ID NO: 4081371 - DNA, 25 bp, Homo sapien
caaatgttgcagcagtggtggagcc

SEQ ID NO: 4081372 - DNA, 25 bp, Homo sapien
tctaacgtgggatttggactctctc

SEQ ID NO: 4081373 - DNA, 25 bp, Homo sapien
gggctccctgtggatcacccatggg

SEQ ID NO: 4081374 - DNA, 25 bp, Homo sapien
gctgtgtatggtcagtggagtcttc

SEQ ID NO: 4081375 - DNA, 25 bp, Homo sapien
ccatttgcactgtcctctggaacag

SEQ ID NO: 4081376 - DNA, 25 bp, Homo sapien
gggtcgaagtcgcctctgttgctgt

SEQ ID NO: 4081377 - DNA, 25 bp, Homo sapien
gtccgagctgctgatggcgtgggcg

SEQ ID NO: 4081378 - DNA, 25 bp, Homo sapien
catgccaccctaggttacgctcttt

SEQ ID NO: 4081379 - DNA, 25 bp, Homo sapien
caccctaggttacgctctttcttgg

SEQ ID NO: 4081380 - DNA, 25 bp, Homo sapien
tgccaccctaggttacgctctttct

SEQ ID NO: 4081381 - DNA, 25 bp, Homo sapien
ccaccctaggttacgctctttcttg

SEQ ID NO: 4081382 - DNA, 25 bp, Homo sapien
tgcagctggaggacgattacctgaa

SEQ ID NO: 4081383 - DNA, 25 bp, Homo sapien
gcatctggccctgggttactgctgc

SEQ ID NO: 4081384 - DNA, 25 bp, Homo sapien
tgaattagccgctgaggcggcatct

SEQ ID NO: 4081385 - DNA, 25 bp, Homo sapien
caagagcgggttgtgcgggcgctgg

SEQ ID NO: 4081386 - DNA, 25 bp, Homo sapien
cactgccggtggcttgcacagggtc

SEQ ID NO: 4081387 - DNA, 25 bp, Homo sapien
ctgagttatgcgccgcggcggcttt

SEQ ID NO: 4081388 - DNA, 25 bp, Homo sapien
tttggtcatggggtccgcactgccg

SEQ ID NO: 4081389 - DNA, 25 bp, Homo sapien
ccacagctgctatagttcaccatgt

SEQ ID NO: 4081390 - DNA, 25 bp, Homo sapien
atgggctaagctgcaagtttccgcc

SEQ ID NO: 4081391 - DNA, 25 bp, Homo sapien
agctgaacccgcagcggaggctgga

SEQ ID NO: 4081392 - DNA, 25 bp, Homo sapien
gctgcagctgaacccgcagcggagg

SEQ ID NO: 4081393 - DNA, 25 bp, Homo sapien
gatgggctaagctgcaagtttccgc

SEQ ID NO: 4081394 - DNA, 25 bp, Homo sapien
tggacactgtgcagccatgaggatc

SEQ ID NO: 4081395 - DNA, 25 bp, Homo sapien
gctggtctgaggttgcctaagggtg

SEQ ID NO: 4081396 - DNA, 25 bp, Homo sapien
gggtggctgagtgcaccgcccttcc

SEQ ID NO: 4081397 - DNA, 25 bp, Homo sapien
gggctgccactactactgccgtgcg

SEQ ID NO: 4081398 - DNA, 25 bp, Homo sapien
tgccgtgcgccatgcgcaggtgcca

SEQ ID NO: 4081399 - DNA, 25 bp, Homo sapien
gctatgggaccgaccacctgactta

SEQ ID NO: 4081400 - DNA, 25 bp, Homo sapien
ggaccgaccacctgacttagatgcc

SEQ ID NO: 4081401 - DNA, 25 bp, Homo sapien
gctgcagcgggcgaccgctgcaatc

SEQ ID NO: 4081402 - DNA, 25 bp, Homo sapien
gctgcaatccccagcgctatgggac

SEQ ID NO: 4081403 - DNA, 25 bp, Homo sapien
ccaaggtgcttcggccgagggcaaa

SEQ ID NO: 4081404 - DNA, 25 bp, Homo sapien
agccaaggtgcttcggccgagggca

SEQ ID NO: 4081405 - DNA, 25 bp, Homo sapien
gcagccaaggtgcttcggccgaggg

SEQ ID NO: 4081406 - DNA, 25 bp, Homo sapien
tgcagccaaggtgcttcggccgagg

SEQ ID NO: 4081407 - DNA, 25 bp, Homo sapien
ttctccatatgcactagtgatacct

SEQ ID NO: 4081408 - DNA, 25 bp, Homo sapien
tatgcactagtgataccttggctac

SEQ ID NO: 4081409 - DNA, 25 bp, Homo sapien
gccgggacaaccagcaccctgtgga

SEQ ID NO: 4081410 - DNA, 25 bp, Homo sapien
gtgataccttggctacatgaagacc

SEQ ID NO: 4081411 - DNA, 25 bp, Homo sapien
aaagagttaccagcccttccttgat

SEQ ID NO: 4081412 - DNA, 25 bp, Homo sapien
tgaaagagttaccagcccttccttg

SEQ ID NO: 4081413 - DNA, 25 bp, Homo sapien
tggttgaaagagttaccagcccttc

SEQ ID NO: 4081414 - DNA, 25 bp, Homo sapien
ctgtggttgaaagagttaccagccc

SEQ ID NO: 4081415 - DNA, 25 bp, Homo sapien
gatgcagagtgtactgtagaatgcc

SEQ ID NO: 4081416 - DNA, 25 bp, Homo sapien
gagtgtactgtagaatgccatagag

SEQ ID NO: 4081417 - DNA, 25 bp, Homo sapien
cagagtgtactgtagaatgccatag

SEQ ID NO: 4081418 - DNA, 25 bp, Homo sapien
gtgtactgtagaatgccatagagac

SEQ ID NO: 4081419 - DNA, 25 bp, Homo sapien
gggaaagtcttgacatataccagga

SEQ ID NO: 4081420 - DNA, 25 bp, Homo sapien
gaaagtcttgacatataccaggatt

SEQ ID NO: 4081421 - DNA, 25 bp, Homo sapien
ggaaagtcttgacatataccaggat

SEQ ID NO: 4081422 - DNA, 25 bp, Homo sapien
tgagaccacggcaggtcgcgggtcc

SEQ ID NO: 4081423 - DNA, 25 bp, Homo sapien
accacggcaggtcgcgggtcccact

SEQ ID NO: 4081424 - DNA, 25 bp, Homo sapien
agaccacggcaggtcgcgggtccca

SEQ ID NO: 4081425 - DNA, 25 bp, Homo sapien
ctgagaccacggcaggtcgcgggtc

SEQ ID NO: 4081426 - DNA, 25 bp, Homo sapien
ggctgagccgcggtagaggtccttc

SEQ ID NO: 4081427 - DNA, 25 bp, Homo sapien
tgagccgcggtagaggtccttcagt

SEQ ID NO: 4081428 - DNA, 25 bp, Homo sapien
cccgtgccttggtctagggcgtgga

SEQ ID NO: 4081429 - DNA, 25 bp, Homo sapien
cgtgccttggtctagggcgtggaag

SEQ ID NO: 4081430 - DNA, 25 bp, Homo sapien
aggagtcctccaatgccagagtcca

SEQ ID NO: 4081431 - DNA, 25 bp, Homo sapien
tcctctggtgcaggagtccagaacc

SEQ ID NO: 4081432 - DNA, 25 bp, Homo sapien
tggtgcaggagtccagaacctagcc

SEQ ID NO: 4081433 - DNA, 25 bp, Homo sapien
ccgaggagtcctccaatgccagagt

SEQ ID NO: 4081434 - DNA, 25 bp, Homo sapien
atgtgatagcccactgggcggtgaa

SEQ ID NO: 4081435 - DNA, 25 bp, Homo sapien
ggcggggggtcacctcgtcctgcag

SEQ ID NO: 4081436 - DNA, 25 bp, Homo sapien
ttcagtggtggagtccgtggagcag

SEQ ID NO: 4081437 - DNA, 25 bp, Homo sapien
tcctgcagtccaccaaccacgaggc

SEQ ID NO: 4081438 - DNA, 25 bp, Homo sapien
tccttcggtgacttagtccagggcg

SEQ ID NO: 4081439 - DNA, 25 bp, Homo sapien
ccttcggtgacttagtccagggcgt

SEQ ID NO: 4081440 - DNA, 25 bp, Homo sapien
gtccttcggtgacttagtccagggc

SEQ ID NO: 4081441 - DNA, 25 bp, Homo sapien
ttcggtgacttagtccagggcgtac

SEQ ID NO: 4081442 - DNA, 25 bp, Homo sapien
cttgctatatccagggtgccgcggg

SEQ ID NO: 4081443 - DNA, 25 bp, Homo sapien
agtccaggacgtggcggagcaggag

SEQ ID NO: 4081444 - DNA, 25 bp, Homo sapien
cgatagtccagtgcttgagtccgca

SEQ ID NO: 4081445 - DNA, 25 bp, Homo sapien
ctgcagggcgggattcctgccttgc

SEQ ID NO: 4081446 - DNA, 25 bp, Homo sapien
cgatggggcatggattctcaggtgc

SEQ ID NO: 4081447 - DNA, 25 bp, Homo sapien
catggattctcaggtgccgcagtcc

SEQ ID NO: 4081448 - DNA, 25 bp, Homo sapien
gcgcgatggggcatggattctcagg

SEQ ID NO: 4081449 - DNA, 25 bp, Homo sapien
ggcatggattctcaggtgccgcagt

SEQ ID NO: 4081450 - DNA, 25 bp, Homo sapien
atgcgaggggctgggtcctctggtg

SEQ ID NO: 4081451 - DNA, 25 bp, Homo sapien
tgggtcctctggtgccatagtccag

SEQ ID NO: 4081452 - DNA, 25 bp, Homo sapien
gatgcgaggggctgggtcctctggt

SEQ ID NO: 4081453 - DNA, 25 bp, Homo sapien
ggctgggtcctctggtgccatagtc

SEQ ID NO: 4081454 - DNA, 25 bp, Homo sapien
tgggtcctctggtgccatagtccag

SEQ ID NO: 4081455 - DNA, 25 bp, Homo sapien
gggctgggtcctctggtgccatagt

SEQ ID NO: 4081456 - DNA, 25 bp, Homo sapien
ttagtccaagacgccagggggctgg

SEQ ID NO: 4081457 - DNA, 25 bp, Homo sapien
gctgggtcctctggtgccatagtcc

SEQ ID NO: 4081458 - DNA, 25 bp, Homo sapien
tagctcagtccaggacgcagccctg

SEQ ID NO: 4081459 - DNA, 25 bp, Homo sapien
gtcctcctgtgcaggagtacacgat

SEQ ID NO: 4081460 - DNA, 25 bp, Homo sapien
tcctgtgcaggagtacacgatgctg

SEQ ID NO: 4081461 - DNA, 25 bp, Homo sapien
gtgaggctccttcagtagctcagtc

SEQ ID NO: 4081462 - DNA, 25 bp, Homo sapien
ctgtggagcaagagttctccagtgc

SEQ ID NO: 4081463 - DNA, 25 bp, Homo sapien
cacggctgggcgcaggttctctcgt

SEQ ID NO: 4081464 - DNA, 25 bp, Homo sapien
gttctctcgtgcaagagtccgcagc

SEQ ID NO: 4081465 - DNA, 25 bp, Homo sapien
gctgggcgcaggttctctcgtgcaa

SEQ ID NO: 4081466 - DNA, 25 bp, Homo sapien
gcgcaggttctctcgtgcaagagtc

SEQ ID NO: 4081467 - DNA, 25 bp, Homo sapien
tctggctaggcaattacacataatg

SEQ ID NO: 4081468 - DNA, 25 bp, Homo sapien
ctggctaggcaattacacataatgt

SEQ ID NO: 4081469 - DNA, 25 bp, Homo sapien
gaagactttgaacgcactcctcaga

SEQ ID NO: 4081470 - DNA, 25 bp, Homo sapien
tgatgattcccgcacagagcaagga

SEQ ID NO: 4081471 - DNA, 25 bp, Homo sapien
tctaagtcgaatgggcgcgattcct

SEQ ID NO: 4081472 - DNA, 25 bp, Homo sapien
ggtagctgcccctaatctaagtcga

SEQ ID NO: 4081473 - DNA, 25 bp, Homo sapien
ttctcctcaaacggctcacagagcc

SEQ ID NO: 4081474 - DNA, 25 bp, Homo sapien
cctcaaacggctcacagagccactt

SEQ ID NO: 4081475 - DNA, 25 bp, Homo sapien
tttctcctcaaacggctcacagagc

SEQ ID NO: 4081476 - DNA, 25 bp, Homo sapien
ctcctcaaacggctcacagagccac

SEQ ID NO: 4081477 - DNA, 25 bp, Homo sapien
tcctccatctccaccgtgttctcct

SEQ ID NO: 4081478 - DNA, 25 bp, Homo sapien
tccaccgtgttctcctcgggctgaa

SEQ ID NO: 4081479 - DNA, 25 bp, Homo sapien
cgggctgaagcccaaagtcccccat

SEQ ID NO: 4081480 - DNA, 25 bp, Homo sapien
tcctcgggctgaagcccaaagtccc

SEQ ID NO: 4081481 - DNA, 25 bp, Homo sapien
gtgtcctctcatgttttcagttaac

SEQ ID NO: 4081482 - DNA, 25 bp, Homo sapien
tgtgtcctctcatgttttcagttaa

SEQ ID NO: 4081483 - DNA, 25 bp, Homo sapien
gtcccgtgcttgtgtcctctcatgt

SEQ ID NO: 4081484 - DNA, 25 bp, Homo sapien
ttggtcccgtgcttgtgtcctctca

SEQ ID NO: 4081485 - DNA, 25 bp, Homo sapien
acactgggatggcccagtcatgacc

SEQ ID NO: 4081486 - DNA, 25 bp, Homo sapien
taacctcggaatgtatagaaataag

SEQ ID NO: 4081487 - DNA, 25 bp, Homo sapien
ggtaacctcggaatgtatagaaata

SEQ ID NO: 4081488 - DNA, 25 bp, Homo sapien
gaacactgggatggcccagtcatga

SEQ ID NO: 4081489 - DNA, 25 bp, Homo sapien
cgctggaggtccctgaacccggcgt

SEQ ID NO: 4081490 - DNA, 25 bp, Homo sapien
aggccaatccgcaggtgcctggtgc

SEQ ID NO: 4081491 - DNA, 25 bp, Homo sapien
caggtgcctggtgcccggtgccggt

SEQ ID NO: 4081492 - DNA, 25 bp, Homo sapien
ggtgccggtcgcagtctcaaaagcg

SEQ ID NO: 4081493 - DNA, 25 bp, Homo sapien
agctccacgttgaggtcgcctgcag

SEQ ID NO: 4081494 - DNA, 25 bp, Homo sapien
gctccacgttgaggtcgcctgcagc

SEQ ID NO: 4081495 - DNA, 25 bp, Homo sapien
cagccagcttgacgccgttgttcct

SEQ ID NO: 4081496 - DNA, 25 bp, Homo sapien
gtcagccagcttgacgccgttgttc

SEQ ID NO: 4081497 - DNA, 25 bp, Homo sapien
catcaggccaaagactttcctccaa

SEQ ID NO: 4081498 - DNA, 25 bp, Homo sapien
caggccaaagactttcctccaaact

SEQ ID NO: 4081499 - DNA, 25 bp, Homo sapien
ggtggctcacacctgtaattgcagc

SEQ ID NO: 4081500 - DNA, 25 bp, Homo sapien
taaaagatgaaaacaaggctgggtg

SEQ ID NO: 4081501 - DNA, 25 bp, Homo sapien
atcacagcttctcaggagactgaga

SEQ ID NO: 4081502 - DNA, 25 bp, Homo sapien
agacttcccatagcattgttttaaa

SEQ ID NO: 4081503 - DNA, 25 bp, Homo sapien
caatcattcaagtgcttaggtcagt

SEQ ID NO: 4081504 - DNA, 25 bp, Homo sapien
tattggcactatctatcagcttaca

SEQ ID NO: 4081505 - DNA, 25 bp, Homo sapien
gagtagtcttccaataagtagagga

SEQ ID NO: 4081506 - DNA, 25 bp, Homo sapien
ctgacttatctctgtcgttgggaca

SEQ ID NO: 4081507 - DNA, 25 bp, Homo sapien
tccgtcgagaagatctggacaagct

SEQ ID NO: 4081508 - DNA, 25 bp, Homo sapien
caagatgggcaagtggtgctgtcac

SEQ ID NO: 4081509 - DNA, 25 bp, Homo sapien
gcgccttcatggagccgaggtacca

SEQ ID NO: 4081510 - DNA, 25 bp, Homo sapien
caacatgggcacttctggagaccac

SEQ ID NO: 4081511 - DNA, 25 bp, Homo sapien
caggagcaagatgggcaagtggtgc

SEQ ID NO: 4081512 - DNA, 25 bp, Homo sapien
ctcaggagcaagatgggcaagtggt

SEQ ID NO: 4081513 - DNA, 25 bp, Homo sapien
tcaggagcaagatgggcaagtggtg

SEQ ID NO: 4081514 - DNA, 25 bp, Homo sapien
tgtaacgggtacacttcgcttcgcg

SEQ ID NO: 4081515 - DNA, 25 bp, Homo sapien
ctgtaacgggtacacttcgcttcgc

SEQ ID NO: 4081516 - DNA, 25 bp, Homo sapien
gtacacttcgcttcgcgttcctcgc

SEQ ID NO: 4081517 - DNA, 25 bp, Homo sapien
cgggtacacttcgcttcgcgttcct

SEQ ID NO: 4081518 - DNA, 25 bp, Homo sapien
ccaccactagtgtcttgggggcttt

SEQ ID NO: 4081519 - DNA, 25 bp, Homo sapien
tgcagcggcggccacccgcaacagc

SEQ ID NO: 4081520 - DNA, 25 bp, Homo sapien
tagcagcccagccccgattctgtgg

SEQ ID NO: 4081521 - DNA, 25 bp, Homo sapien
ccagccccgattctgtggccccgag

SEQ ID NO: 4081522 - DNA, 25 bp, Homo sapien
ctataaatgatacttgagccttgca

SEQ ID NO: 4081523 - DNA, 25 bp, Homo sapien
tgtccattcggccacacctctaatg

SEQ ID NO: 4081524 - DNA, 25 bp, Homo sapien
caactaatggcagaatggtgtacag

SEQ ID NO: 4081525 - DNA, 25 bp, Homo sapien
ttgtcaggtacaactacacatgagt

SEQ ID NO: 4081526 - DNA, 25 bp, Homo sapien
aagctccgcctgctgagttcaagcc

SEQ ID NO: 4081527 - DNA, 25 bp, Homo sapien
caagccattctccccctcagcctcc

SEQ ID NO: 4081528 - DNA, 25 bp, Homo sapien
atgcccagctaatttattttatttt

SEQ ID NO: 4081529 - DNA, 25 bp, Homo sapien
caagctccgcctgctgagttcaagc

SEQ ID NO: 4081530 - DNA, 25 bp, Homo sapien
ctccgtaagtgtcaattctgaaggc

SEQ ID NO: 4081531 - DNA, 25 bp, Homo sapien
caattctgaaggccacaacttccat

SEQ ID NO: 4081532 - DNA, 25 bp, Homo sapien
tctccgtaagtgtcaattctgaagg

SEQ ID NO: 4081533 - DNA, 25 bp, Homo sapien
tccgtaagtgtcaattctgaaggcc

SEQ ID NO: 4081534 - DNA, 25 bp, Homo sapien
agaagggccagaggcgaaaccatta

SEQ ID NO: 4081535 - DNA, 25 bp, Homo sapien
agggccagaggcgaaaccattagca

SEQ ID NO: 4081536 - DNA, 25 bp, Homo sapien
tggatgcaaacttgttttcagtgtt

SEQ ID NO: 4081537 - DNA, 25 bp, Homo sapien
ttttcagtgtttacagaagggccag

SEQ ID NO: 4081538 - DNA, 25 bp, Homo sapien
cacgtatttcatcatgcttgggaac

SEQ ID NO: 4081539 - DNA, 25 bp, Homo sapien
tctgctagttgggataatacgaatt

SEQ ID NO: 4081540 - DNA, 25 bp, Homo sapien
tagtatcccattgttatcttaggct

SEQ ID NO: 4081541 - DNA, 25 bp, Homo sapien
taatgtcagtgtagatgcattgcaa

SEQ ID NO: 4081542 - DNA, 25 bp, Homo sapien
tttgtgtggaatctttttacccatc

SEQ ID NO: 4081543 - DNA, 25 bp, Homo sapien
caacctatttgtgagcttaggacta

SEQ ID NO: 4081544 - DNA, 25 bp, Homo sapien
gcctatcttgtctaagggtaaccac

SEQ ID NO: 4081545 - DNA, 25 bp, Homo sapien
tagcaatgttgtcttaatgcctatc

SEQ ID NO: 4081546 - DNA, 25 bp, Homo sapien
ttaatatccccattgacccactggc

SEQ ID NO: 4081547 - DNA, 25 bp, Homo sapien
ttgcattaaatctgtcatgaagttg

SEQ ID NO: 4081548 - DNA, 25 bp, Homo sapien
ctatgtaggcacttttttgatccat

SEQ ID NO: 4081549 - DNA, 25 bp, Homo sapien
taggcacttttttgatccatattaa

SEQ ID NO: 4081550 - DNA, 25 bp, Homo sapien
gaagttaaagaagcacactgagtct

SEQ ID NO: 4081551 - DNA, 25 bp, Homo sapien
taagcaaattacctagcatacagtc

SEQ ID NO: 4081552 - DNA, 25 bp, Homo sapien
caaaatatgtctagtaggtgttccc

SEQ ID NO: 4081553 - DNA, 25 bp, Homo sapien
gttccctagaaattgagctcagtga

SEQ ID NO: 4081554 - DNA, 25 bp, Homo sapien
tatgtttctttgaccaagcctagct

SEQ ID NO: 4081555 - DNA, 25 bp, Homo sapien
tccgtggatacagaactcgctgaga

SEQ ID NO: 4081556 - DNA, 25 bp, Homo sapien
tcgctgagacagagggccaattgta

SEQ ID NO: 4081557 - DNA, 25 bp, Homo sapien
catgttgagtacagatgaaacccta

SEQ ID NO: 4081558 - DNA, 25 bp, Homo sapien
ctggccagctgcagtatccgtcgct

SEQ ID NO: 4081559 - DNA, 25 bp, Homo sapien
cagcctgcggcagcacaatctgctg

SEQ ID NO: 4081560 - DNA, 25 bp, Homo sapien
ttccttcctgtagccaagcacggag

SEQ ID NO: 4081561 - DNA, 25 bp, Homo sapien
actctgcggcagaagtacaggttaa

SEQ ID NO: 4081562 - DNA, 25 bp, Homo sapien
tggtgactggtaacatcacactgcc

SEQ ID NO: 4081563 - DNA, 25 bp, Homo sapien
tggagtggtgactggtaacatcaca

SEQ ID NO: 4081564 - DNA, 25 bp, Homo sapien
actggtaacatcacactgcctggct

SEQ ID NO: 4081565 - DNA, 25 bp, Homo sapien
ggaactgggacctggagtggtgact

SEQ ID NO: 4081566 - DNA, 25 bp, Homo sapien
tttccaactttagaagaggcaaaca

SEQ ID NO: 4081567 - DNA, 25 bp, Homo sapien
cattcacaaatccagtgatattagt

SEQ ID NO: 4081568 - DNA, 25 bp, Homo sapien
gcccaagaggatgaactcattcaca

SEQ ID NO: 4081569 - DNA, 25 bp, Homo sapien
agtgatattagtagtctccaaggtc

SEQ ID NO: 4081570 - DNA, 25 bp, Homo sapien
tctccaaggtcctcactggtttggc

SEQ ID NO: 4081571 - DNA, 25 bp, Homo sapien
agaactgacacagcagatctccagg

SEQ ID NO: 4081572 - DNA, 25 bp, Homo sapien
gacagaaataagcactctgcagcac

SEQ ID NO: 4081573 - DNA, 25 bp, Homo sapien
agaagaagtagaaccggagcaggca

SEQ ID NO: 4081574 - DNA, 25 bp, Homo sapien
cattatgggcacgtcagaactgaca

SEQ ID NO: 4081575 - DNA, 25 bp, Homo sapien
tcaaaggggtcaataaccagagaca

SEQ ID NO: 4081576 - DNA, 25 bp, Homo sapien
aaggtctacaaatggcaggaaacct

SEQ ID NO: 4081577 - DNA, 25 bp, Homo sapien
ttaaggtgggatagtgcaaaggtct

SEQ ID NO: 4081578 - DNA, 25 bp, Homo sapien
caggaaacctatcaaaagacatcac

SEQ ID NO: 4081579 - DNA, 25 bp, Homo sapien
cagaacctgggctaacatacatcac

SEQ ID NO: 4081580 - DNA, 25 bp, Homo sapien
tatcccatgatagtccccagaacct

SEQ ID NO: 4081581 - DNA, 25 bp, Homo sapien
tgttccggaaactgtagatcagagg

SEQ ID NO: 4081582 - DNA, 25 bp, Homo sapien
gacactacagcaaggtgacagccac

SEQ ID NO: 4081583 - DNA, 25 bp, Homo sapien
tgacttgtgctacagtaagctctct

SEQ ID NO: 4081584 - DNA, 25 bp, Homo sapien
tttttctgtaacctgggaccattgc

SEQ ID NO: 4081585 - DNA, 25 bp, Homo sapien
gatgcctgcagtgcttatgtcccga

SEQ ID NO: 4081586 - DNA, 25 bp, Homo sapien
tatgtcccgagtgcctttctgtggc

SEQ ID NO: 4081587 - DNA, 25 bp, Homo sapien
gatgtcctttgatcggttccttacc

SEQ ID NO: 4081588 - DNA, 25 bp, Homo sapien
ctgcagaaggctactttctgtctgt

SEQ ID NO: 4081589 - DNA, 25 bp, Homo sapien
ctgtgatgtcctttgatcggttcct

SEQ ID NO: 4081590 - DNA, 25 bp, Homo sapien
tcctttgatcggttccttaccatct

SEQ ID NO: 4081591 - DNA, 25 bp, Homo sapien
gtcccaaaatgttggccaatctcat

SEQ ID NO: 4081592 - DNA, 25 bp, Homo sapien
tatcaagagcatctcctatgctggc

SEQ ID NO: 4081593 - DNA, 25 bp, Homo sapien
tcccatatcaagagcatctcctatg

SEQ ID NO: 4081594 - DNA, 25 bp, Homo sapien
tcccaaaatgttggccaatctcatc

SEQ ID NO: 4081595 - DNA, 25 bp, Homo sapien
taggcctgtgatggtggtggccaca

SEQ ID NO: 4081596 - DNA, 25 bp, Homo sapien
ggtggccacagggtcattctcctct

SEQ ID NO: 4081597 - DNA, 25 bp, Homo sapien
cataggcctgtgatggtggtggcca

SEQ ID NO: 4081598 - DNA, 25 bp, Homo sapien
gtggtggccacagggtcattctcct

SEQ ID NO: 4081599 - DNA, 25 bp, Homo sapien
tcctgtcacatttcgtgatgtggcc

SEQ ID NO: 4081600 - DNA, 25 bp, Homo sapien
aaggctatcctgtcacatttcgtga

SEQ ID NO: 4081601 - DNA, 25 bp, Homo sapien
tcaaggctatcctgtcacatttcgt

SEQ ID NO: 4081602 - DNA, 25 bp, Homo sapien
catttcgtgatgtggcctgagccct

SEQ ID NO: 4081603 - DNA, 25 bp, Homo sapien
caatgtcttcttggtcctcaaggaa

SEQ ID NO: 4081604 - DNA, 25 bp, Homo sapien
ttcagaaacccaatcaggacctagg

SEQ ID NO: 4081605 - DNA, 25 bp, Homo sapien
ttttctgcctagtggtcaaattcag

SEQ ID NO: 4081606 - DNA, 25 bp, Homo sapien
gccttggctccactgtaggtgggta

SEQ ID NO: 4081607 - DNA, 25 bp, Homo sapien
tcacctgcaggtgaatcttagtctc

SEQ ID NO: 4081608 - DNA, 25 bp, Homo sapien
cacctgcaggtgaatcttagtctct

SEQ ID NO: 4081609 - DNA, 25 bp, Homo sapien
agcactgtagtcagatgaatgggaa

SEQ ID NO: 4081610 - DNA, 25 bp, Homo sapien
tctgctttcagggtagcactgtagt

SEQ ID NO: 4081611 - DNA, 25 bp, Homo sapien
tagacctggaacactcttgaggagc

SEQ ID NO: 4081612 - DNA, 25 bp, Homo sapien
taaggcctaacatgattcaatggag

SEQ ID NO: 4081613 - DNA, 25 bp, Homo sapien
tactaatcagggatacatggtgacc

SEQ ID NO: 4081614 - DNA, 25 bp, Homo sapien
catggtgacctaaactagacctgga

SEQ ID NO: 4081615 - DNA, 25 bp, Homo sapien
cattcaggccttctatcaacagtca

SEQ ID NO: 4081616 - DNA, 25 bp, Homo sapien
caaagaagtgctaaatgcatgaggc

SEQ ID NO: 4081617 - DNA, 25 bp, Homo sapien
gcatttttacaaagctagaagagag

SEQ ID NO: 4081618 - DNA, 25 bp, Homo sapien
tcaacagtcacacaagtataagagt

SEQ ID NO: 4081619 - DNA, 25 bp, Homo sapien
ggctctgtactctctactgtcttct

SEQ ID NO: 4081620 - DNA, 25 bp, Homo sapien
gagctacttgtcagtgttctaaagc

SEQ ID NO: 4081621 - DNA, 25 bp, Homo sapien
gaggcaagaatcaatgagctacttg

SEQ ID NO: 4081622 - DNA, 25 bp, Homo sapien
tagtagtattgcatgagtgagaaca

SEQ ID NO: 4081623 - DNA, 25 bp, Homo sapien
catgaggttctcacaatagtagtat

SEQ ID NO: 4081624 - DNA, 25 bp, Homo sapien
gatgccttctgtgagtgactttgga

SEQ ID NO: 4081625 - DNA, 25 bp, Homo sapien
tgcaggcagtgcttactccaagccc

SEQ ID NO: 4081626 - DNA, 25 bp, Homo sapien
ctcacaaaagtggtctgcaggcagt

SEQ ID NO: 4081627 - DNA, 25 bp, Homo sapien
gaagctgtgagaggtttaaccaggc

SEQ ID NO: 4081628 - DNA, 25 bp, Homo sapien
gctgcacagctaccaccgttttacc

SEQ ID NO: 4081629 - DNA, 25 bp, Homo sapien
gcagctgcacagctaccaccgtttt

SEQ ID NO: 4081630 - DNA, 25 bp, Homo sapien
cagcagctgcacagctaccaccgtt

SEQ ID NO: 4081631 - DNA, 25 bp, Homo sapien
agctgcacagctaccaccgttttac

SEQ ID NO: 4081632 - DNA, 25 bp, Homo sapien
cttggtggccaacgcagggactgct

SEQ ID NO: 4081633 - DNA, 25 bp, Homo sapien
ggtggccaacgcagggactgctcac

SEQ ID NO: 4081634 - DNA, 25 bp, Homo sapien
cacttggtggccaacgcagggactg

SEQ ID NO: 4081635 - DNA, 25 bp, Homo sapien
tggtggccaacgcagggactgctca

SEQ ID NO: 4081636 - DNA, 25 bp, Homo sapien
gaaagatgaataagtaaacagtgca

SEQ ID NO: 4081637 - DNA, 25 bp, Homo sapien
aaagatgaataagtaaacagtgcaa

SEQ ID NO: 4081638 - DNA, 25 bp, Homo sapien
cataataggcaactggaggctttac

SEQ ID NO: 4081639 - DNA, 25 bp, Homo sapien
tctgctcagaggtaaacagccgcta

SEQ ID NO: 4081640 - DNA, 25 bp, Homo sapien
tactcttgctgcacgataaagtgga

SEQ ID NO: 4081641 - DNA, 25 bp, Homo sapien
ggtctgagatttaccccagcctctg

SEQ ID NO: 4081642 - DNA, 25 bp, Homo sapien
gtgggtccctcttcaattgtactgc

SEQ ID NO: 4081643 - DNA, 25 bp, Homo sapien
tctggaaaacaagatccgaccattc

SEQ ID NO: 4081644 - DNA, 25 bp, Homo sapien
gtctccaaaggcaaacttatgtcat

SEQ ID NO: 4081645 - DNA, 25 bp, Homo sapien
tctctttgggagattaaattaccaa

SEQ ID NO: 4081646 - DNA, 25 bp, Homo sapien
tgctcctttgatgtaagacagtatc

SEQ ID NO: 4081647 - DNA, 25 bp, Homo sapien
tgatcagcaaatggactcaggaaga

SEQ ID NO: 4081648 - DNA, 25 bp, Homo sapien
tgaaacagactgtcccagaaaatac

SEQ ID NO: 4081649 - DNA, 25 bp, Homo sapien
tatctctcacttgtatagccgctga

SEQ ID NO: 4081650 - DNA, 25 bp, Homo sapien
tcagagggccaacgtactgggtcct

SEQ ID NO: 4081651 - DNA, 25 bp, Homo sapien
ttggctgcatctgtccgcagtggag

SEQ ID NO: 4081652 - DNA, 25 bp, Homo sapien
gagctagaaaccagagacccagtgt

SEQ ID NO: 4081653 - DNA, 25 bp, Homo sapien
gcagtggagtttacatcatgctgag

SEQ ID NO: 4081654 - DNA, 25 bp, Homo sapien
cctcagtgggaggtctgttctcagc

SEQ ID NO: 4081655 - DNA, 25 bp, Homo sapien
caaggtcactgttgtctgcactctg

SEQ ID NO: 4081656 - DNA, 25 bp, Homo sapien
ctcagtgggaggtctgttctcagct

SEQ ID NO: 4081657 - DNA, 25 bp, Homo sapien
tccctcagtgggaggtctgttctca

SEQ ID NO: 4081658 - DNA, 25 bp, Homo sapien
acagtcagagacaaagaaccttcca

SEQ ID NO: 4081659 - DNA, 25 bp, Homo sapien
tcacatcgggaacccacatctggat

SEQ ID NO: 4081660 - DNA, 25 bp, Homo sapien
acatctggatcaggacggcacccag

SEQ ID NO: 4081661 - DNA, 25 bp, Homo sapien
tccaggacagtcctcagtgatatca

SEQ ID NO: 4081662 - DNA, 25 bp, Homo sapien
tgagtccaacaggtctgcatcgctg

SEQ ID NO: 4081663 - DNA, 25 bp, Homo sapien
tccctcaaggctgagccacatgtgt

SEQ ID NO: 4081664 - DNA, 25 bp, Homo sapien
gccacatgtgtggaccctgagaacc

SEQ ID NO: 4081665 - DNA, 25 bp, Homo sapien
ttccaagacagaaggcattcccggg

SEQ ID NO: 4081666 - DNA, 25 bp, Homo sapien
cccggagaccatgaaacagatggcc

SEQ ID NO: 4081667 - DNA, 25 bp, Homo sapien
ggattatcccataggtcagccagac

SEQ ID NO: 4081668 - DNA, 25 bp, Homo sapien
gccagccccggagaccatgaaacag

SEQ ID NO: 4081669 - DNA, 25 bp, Homo sapien
cagatggccaggattatcccatagg

SEQ ID NO: 4081670 - DNA, 25 bp, Homo sapien
gcaggcacaatggacaagcccaaga

SEQ ID NO: 4081671 - DNA, 25 bp, Homo sapien
gcagcaggcacaatggacaagccca

SEQ ID NO: 4081672 - DNA, 25 bp, Homo sapien
cacaatggacaagcccaagagtgac

SEQ ID NO: 4081673 - DNA, 25 bp, Homo sapien
agggcagcaggcacaatggacaagc

SEQ ID NO: 4081674 - DNA, 25 bp, Homo sapien
ctgaggctgcaagggctcatccagg

SEQ ID NO: 4081675 - DNA, 25 bp, Homo sapien
gttgctggaacctcagtagcactga

SEQ ID NO: 4081676 - DNA, 25 bp, Homo sapien
ggctcatccagggttgcagaatgac

SEQ ID NO: 4081677 - DNA, 25 bp, Homo sapien
gctgcaagggctcatccagggttgc

SEQ ID NO: 4081678 - DNA, 25 bp, Homo sapien
ggcctggatctcacctggcctgggc

SEQ ID NO: 4081679 - DNA, 25 bp, Homo sapien
gcctggatctcacctggcctgggct

SEQ ID NO: 4081680 - DNA, 25 bp, Homo sapien
ctgggcatcactggcctggatctca

SEQ ID NO: 4081681 - DNA, 25 bp, Homo sapien
gcatcactggcctggatctcacctg

SEQ ID NO: 4081682 - DNA, 25 bp, Homo sapien
caaggatggcacagtcggcacattc

SEQ ID NO: 4081683 - DNA, 25 bp, Homo sapien
ccccaaggatggcacagtcggcaca

SEQ ID NO: 4081684 - DNA, 25 bp, Homo sapien
gcacagtcggcacattccagagaga

SEQ ID NO: 4081685 - DNA, 25 bp, Homo sapien
ggatggcacagtcggcacattccag

SEQ ID NO: 4081686 - DNA, 25 bp, Homo sapien
tgatgtgtggtagcactcatctccc

SEQ ID NO: 4081687 - DNA, 25 bp, Homo sapien
ggcctgatgtgtggtagcactcatc

SEQ ID NO: 4081688 - DNA, 25 bp, Homo sapien
cctgatgtgtggtagcactcatctc

SEQ ID NO: 4081689 - DNA, 25 bp, Homo sapien
tgtgtggtagcactcatctccctgg

SEQ ID NO: 4081690 - DNA, 25 bp, Homo sapien
caggcagcaacatcacgggagaatg

SEQ ID NO: 4081691 - DNA, 25 bp, Homo sapien
catagtaactgagtcagtgactgac

SEQ ID NO: 4081692 - DNA, 25 bp, Homo sapien
ccatggagcccgctgcatagtaact

SEQ ID NO: 4081693 - DNA, 25 bp, Homo sapien
aacatcacgggagaatgcagggctc

SEQ ID NO: 4081694 - DNA, 25 bp, Homo sapien
catggccctggtatttccaggacga

SEQ ID NO: 4081695 - DNA, 25 bp, Homo sapien
ggacgaaggctcacccaagtcttcc

SEQ ID NO: 4081696 - DNA, 25 bp, Homo sapien
gtatttccaggacgaaggctcaccc

SEQ ID NO: 4081697 - DNA, 25 bp, Homo sapien
ttggacatggccctggtatttccag

SEQ ID NO: 4081698 - DNA, 25 bp, Homo sapien
gagaagactggaccctgccttgggc

SEQ ID NO: 4081699 - DNA, 25 bp, Homo sapien
agcccacaccctgagaagactggac

SEQ ID NO: 4081700 - DNA, 25 bp, Homo sapien
tccagacaaccctggggtcccatcc

SEQ ID NO: 4081701 - DNA, 25 bp, Homo sapien
tgctcttgccgcccacccagacaat

SEQ ID NO: 4081702 - DNA, 25 bp, Homo sapien
catgggccagggagctattccacac

SEQ ID NO: 4081703 - DNA, 25 bp, Homo sapien
atgggccagggagctattccacaca

SEQ ID NO: 4081704 - DNA, 25 bp, Homo sapien
tgggccagggagctattccacacag

SEQ ID NO: 4081705 - DNA, 25 bp, Homo sapien
ttcctgccctgtggcggcacagact

SEQ ID NO: 4081706 - DNA, 25 bp, Homo sapien
cagactggggcttagggaacaccac

SEQ ID NO: 4081707 - DNA, 25 bp, Homo sapien
tgtggccccaacctcgaccaggaca

SEQ ID NO: 4081708 - DNA, 25 bp, Homo sapien
gcttagggaacaccactgtggcccc

SEQ ID NO: 4081709 - DNA, 25 bp, Homo sapien
cagggaggatggttgtctgcgtggc

SEQ ID NO: 4081710 - DNA, 25 bp, Homo sapien
aggatggttgtctgcgtggccccta

SEQ ID NO: 4081711 - DNA, 25 bp, Homo sapien
tctgcgtggcccctaggagcccaga

SEQ ID NO: 4081712 - DNA, 25 bp, Homo sapien
tggcccctaggagcccagatctttg

SEQ ID NO: 4081713 - DNA, 25 bp, Homo sapien
tgaaggctaggaagccgcccctcca

SEQ ID NO: 4081714 - DNA, 25 bp, Homo sapien
gaaggctaggaagccgcccctccag

SEQ ID NO: 4081715 - DNA, 25 bp, Homo sapien
gctgaaggctaggaagccgcccctc

SEQ ID NO: 4081716 - DNA, 25 bp, Homo sapien
atgctgaaggctaggaagccgcccc

SEQ ID NO: 4081717 - DNA, 25 bp, Homo sapien
ctccgtcccttcccgatgtctgtgc

SEQ ID NO: 4081718 - DNA, 25 bp, Homo sapien
gtcccttcccgatgtctgtgcattt

SEQ ID NO: 4081719 - DNA, 25 bp, Homo sapien
cgtcccttcccgatgtctgtgcatt

SEQ ID NO: 4081720 - DNA, 25 bp, Homo sapien
ccgtcccttcccgatgtctgtgcat

SEQ ID NO: 4081721 - DNA, 25 bp, Homo sapien
taaagtatgctataagcatatgctc

SEQ ID NO: 4081722 - DNA, 25 bp, Homo sapien
ttttaaagtatgctataagcatatg

SEQ ID NO: 4081723 - DNA, 25 bp, Homo sapien
ttttgggctgatttttaaagtatgc

SEQ ID NO: 4081724 - DNA, 25 bp, Homo sapien
tgatttttaaagtatgctataagca

SEQ ID NO: 4081725 - DNA, 25 bp, Homo sapien
cccttctcccaagtgagctctagcc

SEQ ID NO: 4081726 - DNA, 25 bp, Homo sapien
ccgtgcatggaaagccagcccaagc

SEQ ID NO: 4081727 - DNA, 25 bp, Homo sapien
gcccgtgcatggaaagccagcccaa

SEQ ID NO: 4081728 - DNA, 25 bp, Homo sapien
ctgcccgtgcatggaaagccagccc

SEQ ID NO: 4081729 - DNA, 25 bp, Homo sapien
ggaagattcaatgtccacacccggg

SEQ ID NO: 4081730 - DNA, 25 bp, Homo sapien
tggaagattcaatgtccacacccgg

SEQ ID NO: 4081731 - DNA, 25 bp, Homo sapien
gaagtcgtatggtggtcccatccca

SEQ ID NO: 4081732 - DNA, 25 bp, Homo sapien
tgtgggatcattgttcccggttgtc

SEQ ID NO: 4081733 - DNA, 25 bp, Homo sapien
gtgggatcattgttcccggttgtca

SEQ ID NO: 4081734 - DNA, 25 bp, Homo sapien
tctgtgggatcattgttcccggttg

SEQ ID NO: 4081735 - DNA, 25 bp, Homo sapien
cctctgtgggatcattgttcccggt

SEQ ID NO: 4081736 - DNA, 25 bp, Homo sapien
cttccactgtcaaccggaggagttt

SEQ ID NO: 4081737 - DNA, 25 bp, Homo sapien
cttcactgtgcggagtccacgggcc

SEQ ID NO: 4081738 - DNA, 25 bp, Homo sapien
caaccggaggagtttcttcactgtg

SEQ ID NO: 4081739 - DNA, 25 bp, Homo sapien
gtgtgtgcatgggcccaagtgtgtg

SEQ ID NO: 4081740 - DNA, 25 bp, Homo sapien
agggagagatgctctgtgcacgcca

SEQ ID NO: 4081741 - DNA, 25 bp, Homo sapien
agccggtgcaggcccacagaactcg

SEQ ID NO: 4081742 - DNA, 25 bp, Homo sapien
agagatgctctgtgcacgccagcac

SEQ ID NO: 4081743 - DNA, 25 bp, Homo sapien
caggcccacagaactcgaggaggca

SEQ ID NO: 4081744 - DNA, 25 bp, Homo sapien
gtgagggcaaggtctcggggcccca

SEQ ID NO: 4081745 - DNA, 25 bp, Homo sapien
gagggcaaggtctcggggccccaca

SEQ ID NO: 4081746 - DNA, 25 bp, Homo sapien
ctgaagtgagggcaaggtctcgggg

SEQ ID NO: 4081747 - DNA, 25 bp, Homo sapien
gaagtgagggcaaggtctcggggcc

SEQ ID NO: 4081748 - DNA, 25 bp, Homo sapien
ccacaggtccgtggcggttgccgta

SEQ ID NO: 4081749 - DNA, 25 bp, Homo sapien
gacacccggtatacgttgccaggtg

SEQ ID NO: 4081750 - DNA, 25 bp, Homo sapien
ggtgtgtccgataggctcatgctca

SEQ ID NO: 4081751 - DNA, 25 bp, Homo sapien
tgccgtattgggaggccccgtggtg

SEQ ID NO: 4081752 - DNA, 25 bp, Homo sapien
cagccctgtgtgaaggatgggcggt

SEQ ID NO: 4081753 - DNA, 25 bp, Homo sapien
agcagccctgtgtgaaggatgggcg

SEQ ID NO: 4081754 - DNA, 25 bp, Homo sapien
agccctgtgtgaaggatgggcggtg

SEQ ID NO: 4081755 - DNA, 25 bp, Homo sapien
cagcagccctgtgtgaaggatgggc

SEQ ID NO: 4081756 - DNA, 25 bp, Homo sapien
gaaattgcatcatgctgcacacggc

SEQ ID NO: 4081757 - DNA, 25 bp, Homo sapien
gcatcatgctgcacacggcccaagg

SEQ ID NO: 4081758 - DNA, 25 bp, Homo sapien
aattgcatcatgctgcacacggccc

SEQ ID NO: 4081759 - DNA, 25 bp, Homo sapien
ttgcatcatgctgcacacggcccaa

SEQ ID NO: 4081760 - DNA, 25 bp, Homo sapien
gaggacggatatggggatgcacact

SEQ ID NO: 4081761 - DNA, 25 bp, Homo sapien
cagagaggacggatatggggatgca

SEQ ID NO: 4081762 - DNA, 25 bp, Homo sapien
gatatggggatgcacactgaggagc

SEQ ID NO: 4081763 - DNA, 25 bp, Homo sapien
gacggatatggggatgcacactgag

SEQ ID NO: 4081764 - DNA, 25 bp, Homo sapien
aatgggtacctcagtgtgagcccag

SEQ ID NO: 4081765 - DNA, 25 bp, Homo sapien
tgggagacagaatgggtacctcagt

SEQ ID NO: 4081766 - DNA, 25 bp, Homo sapien
cagagacacatccaaggcccagtta

SEQ ID NO: 4081767 - DNA, 25 bp, Homo sapien
acattcccgtgggagacagaatggg

SEQ ID NO: 4081768 - DNA, 25 bp, Homo sapien
ttccatgtgagtgtctcagagattt

SEQ ID NO: 4081769 - DNA, 25 bp, Homo sapien
agtgtcctgcatcaagtgcagctac

SEQ ID NO: 4081770 - DNA, 25 bp, Homo sapien
cagctactagagtcatgcccagggc

SEQ ID NO: 4081771 - DNA, 25 bp, Homo sapien
gctgtggtgtccgtttgcgactcat

SEQ ID NO: 4081772 - DNA, 25 bp, Homo sapien
ctgagtcacagcagcggctgccctg

SEQ ID NO: 4081773 - DNA, 25 bp, Homo sapien
gtcacagcagcggctgccctgcaga

SEQ ID NO: 4081774 - DNA, 25 bp, Homo sapien
tgagtcacagcagcggctgccctgc

SEQ ID NO: 4081775 - DNA, 25 bp, Homo sapien
acagcagcggctgccctgcagactc

SEQ ID NO: 4081776 - DNA, 25 bp, Homo sapien
ggcaggcgtcaggttcctgtgcgca

SEQ ID NO: 4081777 - DNA, 25 bp, Homo sapien
aaagcagaaagcctcttctgttgca

SEQ ID NO: 4081778 - DNA, 25 bp, Homo sapien
tcttctgcttatacggaagctcacg

SEQ ID NO: 4081779 - DNA, 25 bp, Homo sapien
tagatggaactgtttgggtccccaa

SEQ ID NO: 4081780 - DNA, 25 bp, Homo sapien
atgttgttgtgttcaatggcttgtt

SEQ ID NO: 4081781 - DNA, 25 bp, Homo sapien
tgttgttgtgttcaatggcttgttg

SEQ ID NO: 4081782 - DNA, 25 bp, Homo sapien
agaatgccataacaggcttttccca

SEQ ID NO: 4081783 - DNA, 25 bp, Homo sapien
ctccctctttgtggtcttcagaatg

SEQ ID NO: 4081784 - DNA, 25 bp, Homo sapien
cctctttgtggtcttcagaatgcca

SEQ ID NO: 4081785 - DNA, 25 bp, Homo sapien
tcttcagaatgccataacaggcttt

SEQ ID NO: 4081786 - DNA, 25 bp, Homo sapien
cattattcccactggaattaagacc

SEQ ID NO: 4081787 - DNA, 25 bp, Homo sapien
cttgaaggtaggagcggcccaaagt

SEQ ID NO: 4081788 - DNA, 25 bp, Homo sapien
attcccactggaattaagacctcta

SEQ ID NO: 4081789 - DNA, 25 bp, Homo sapien
cagcattattcccactggaattaag

SEQ ID NO: 4081790 - DNA, 25 bp, Homo sapien
tctcctgccatcctgaatgcttctg

SEQ ID NO: 4081791 - DNA, 25 bp, Homo sapien
tctcatgagcattgtgaagattctt

SEQ ID NO: 4081792 - DNA, 25 bp, Homo sapien
gaaggtccaagatgtctcatgagca

SEQ ID NO: 4081793 - DNA, 25 bp, Homo sapien
tttgtaatgcgaccttgttccaggc

SEQ ID NO: 4081794 - DNA, 25 bp, Homo sapien
aggacaactgctaccgggttgttgg

SEQ ID NO: 4081795 - DNA, 25 bp, Homo sapien
acaactgctaccgggttgttggtgt

SEQ ID NO: 4081796 - DNA, 25 bp, Homo sapien
actgctaccgggttgttggtgtgga

SEQ ID NO: 4081797 - DNA, 25 bp, Homo sapien
caggacaactgctaccgggttgttg

SEQ ID NO: 4081798 - DNA, 25 bp, Homo sapien
aaagcaacacaatattccccaggaa

SEQ ID NO: 4081799 - DNA, 25 bp, Homo sapien
actgggctgccaagagagtctagag

SEQ ID NO: 4081800 - DNA, 25 bp, Homo sapien
aacagtgaaacttctgtatgttcag

SEQ ID NO: 4081801 - DNA, 25 bp, Homo sapien
tttgagaactaagaacagtgaaact

SEQ ID NO: 4081802 - DNA, 25 bp, Homo sapien
tccggcttcatcccttaagtaagct

SEQ ID NO: 4081803 - DNA, 25 bp, Homo sapien
gcatggataggctggaacctttccc

SEQ ID NO: 4081804 - DNA, 25 bp, Homo sapien
tggataggctggaacctttcccgag

SEQ ID NO: 4081805 - DNA, 25 bp, Homo sapien
gataggctggaacctttcccgaggc

SEQ ID NO: 4081806 - DNA, 25 bp, Homo sapien
gcttctaggtaattatatgtggcaa

SEQ ID NO: 4081807 - DNA, 25 bp, Homo sapien
tacaccaggcagttgattctttcgg

SEQ ID NO: 4081808 - DNA, 25 bp, Homo sapien
aaagcatcatacaccaggcagttga

SEQ ID NO: 4081809 - DNA, 25 bp, Homo sapien
tctttcggctgtcggcactggcaca

SEQ ID NO: 4081810 - DNA, 25 bp, Homo sapien
tcagcggggctcctcccttccctgc

SEQ ID NO: 4081811 - DNA, 25 bp, Homo sapien
gctcagcggggctcctcccttccct

SEQ ID NO: 4081812 - DNA, 25 bp, Homo sapien
agcggggctcctcccttccctgcct

SEQ ID NO: 4081813 - DNA, 25 bp, Homo sapien
gtgtgcactgctcagcggggctcct

SEQ ID NO: 4081814 - DNA, 25 bp, Homo sapien
agggcctgcaggacagcggatgagc

SEQ ID NO: 4081815 - DNA, 25 bp, Homo sapien
caacagtgatgagcaggcacaggct

SEQ ID NO: 4081816 - DNA, 25 bp, Homo sapien
gagggacccaaacatgggctggctc

SEQ ID NO: 4081817 - DNA, 25 bp, Homo sapien
aggagggatgctccctcaacagtga

SEQ ID NO: 4081818 - DNA, 25 bp, Homo sapien
cagccacaagtgagcctgctgcagg

SEQ ID NO: 4081819 - DNA, 25 bp, Homo sapien
ctcccccagctgaagttcacaaggg

SEQ ID NO: 4081820 - DNA, 25 bp, Homo sapien
cccccagctgaagttcacaagggag

SEQ ID NO: 4081821 - DNA, 25 bp, Homo sapien
tcatgtgtcctcgacctcccccagc

SEQ ID NO: 4081822 - DNA, 25 bp, Homo sapien
cccagctgaagttcacaagggagtc

SEQ ID NO: 4081823 - DNA, 25 bp, Homo sapien
tctcttacacagtcatacagggctg

SEQ ID NO: 4081824 - DNA, 25 bp, Homo sapien
tagtcacaaaactcagctgcaagga

SEQ ID NO: 4081825 - DNA, 25 bp, Homo sapien
gagaaccggatgtatcctgaatgca

SEQ ID NO: 4081826 - DNA, 25 bp, Homo sapien
tccataacagaggtgagcaatccat

SEQ ID NO: 4081827 - DNA, 25 bp, Homo sapien
tgcagggcacgtgtctctgacaagt

SEQ ID NO: 4081828 - DNA, 25 bp, Homo sapien
gagagtggggtttcagtgcagggca

SEQ ID NO: 4081829 - DNA, 25 bp, Homo sapien
ctaaggaactccatctttgtggaaa

SEQ ID NO: 4081830 - DNA, 25 bp, Homo sapien
aaatgaatcctgtggatatgaaagc

SEQ ID NO: 4081831 - DNA, 25 bp, Homo sapien
ggctacatacctcccacagaatttg

SEQ ID NO: 4081832 - DNA, 25 bp, Homo sapien
taaaatcttgggatctcagactcac

SEQ ID NO: 4081833 - DNA, 25 bp, Homo sapien
gatattgaccctaaaagagttgtgt

SEQ ID NO: 4081834 - DNA, 25 bp, Homo sapien
tcagactcactacgctacagggaaa

SEQ ID NO: 4081835 - DNA, 25 bp, Homo sapien
tagctctcagatcttacaaatatac

SEQ ID NO: 4081836 - DNA, 25 bp, Homo sapien
gacagggacagagaccatatatgtg

SEQ ID NO: 4081837 - DNA, 25 bp, Homo sapien
agctgtgcaccaggagacagggaca

SEQ ID NO: 4081838 - DNA, 25 bp, Homo sapien
ccaagggtttcaggagctgtgcacc

SEQ ID NO: 4081839 - DNA, 25 bp, Homo sapien
tagtgagcatggtatctgctcaggg

SEQ ID NO: 4081840 - DNA, 25 bp, Homo sapien
tgagcatggtatctgctcaggggcc

SEQ ID NO: 4081841 - DNA, 25 bp, Homo sapien
agcatggtatctgctcaggggcctc

SEQ ID NO: 4081842 - DNA, 25 bp, Homo sapien
cacttagtgagcatggtatctgctc

SEQ ID NO: 4081843 - DNA, 25 bp, Homo sapien
ctagccaaaacctagtgccttggat

SEQ ID NO: 4081844 - DNA, 25 bp, Homo sapien
cctagccaaaacctagtgccttgga

SEQ ID NO: 4081845 - DNA, 25 bp, Homo sapien
aacctagccaaaacctagtgccttg

SEQ ID NO: 4081846 - DNA, 25 bp, Homo sapien
gcaacctagccaaaacctagtgcct

SEQ ID NO: 4081847 - DNA, 25 bp, Homo sapien
gtgaggttgatcagtctcccctgga

SEQ ID NO: 4081848 - DNA, 25 bp, Homo sapien
atcagtctcccctggaaggccaaca

SEQ ID NO: 4081849 - DNA, 25 bp, Homo sapien
agtctcccctggaaggccaacagct

SEQ ID NO: 4081850 - DNA, 25 bp, Homo sapien
gttgatcagtctcccctggaaggcc

SEQ ID NO: 4081851 - DNA, 25 bp, Homo sapien
cttcctggagtgtctcctctttctc

SEQ ID NO: 4081852 - DNA, 25 bp, Homo sapien
ggtcttcctggagtgtctcctcttt

SEQ ID NO: 4081853 - DNA, 25 bp, Homo sapien
tcctggagtgtctcctctttctctc

SEQ ID NO: 4081854 - DNA, 25 bp, Homo sapien
ctgcaggtcttcctggagtgtctcc

SEQ ID NO: 4081855 - DNA, 25 bp, Homo sapien
tgtaattatatgcagccaactggag

SEQ ID NO: 4081856 - DNA, 25 bp, Homo sapien
atgcagccaactggagcagcggacc

SEQ ID NO: 4081857 - DNA, 25 bp, Homo sapien
caaggttgtaattatatgcagccaa

SEQ ID NO: 4081858 - DNA, 25 bp, Homo sapien
attatatgcagccaactggagcagc

SEQ ID NO: 4081859 - DNA, 25 bp, Homo sapien
tgctgctgagctaggggccgcctct

SEQ ID NO: 4081860 - DNA, 25 bp, Homo sapien
tctgagctggtatcggggtgtgagc

SEQ ID NO: 4081861 - DNA, 25 bp, Homo sapien
ttaaagtgtccgtgatgtccctgct

SEQ ID NO: 4081862 - DNA, 25 bp, Homo sapien
ctaggggccgcctctgagctggtat

SEQ ID NO: 4081863 - DNA, 25 bp, Homo sapien
tccacctacttgaggagcgccaaag

SEQ ID NO: 4081864 - DNA, 25 bp, Homo sapien
ccacctacttgaggagcgccaaagc

SEQ ID NO: 4081865 - DNA, 25 bp, Homo sapien
ttcctccacctacttgaggagcgcc

SEQ ID NO: 4081866 - DNA, 25 bp, Homo sapien
cctccacctacttgaggagcgccaa

SEQ ID NO: 4081867 - DNA, 25 bp, Homo sapien
ggcattcaccctagccttacctggg

SEQ ID NO: 4081868 - DNA, 25 bp, Homo sapien
tacttaaggccataccctggtccag

SEQ ID NO: 4081869 - DNA, 25 bp, Homo sapien
ggccctgcaatagacctgccttggt

SEQ ID NO: 4081870 - DNA, 25 bp, Homo sapien
gcgtaacatggctctgcattggcct

SEQ ID NO: 4081871 - DNA, 25 bp, Homo sapien
gtgcgtggaagcgtccggaacagga

SEQ ID NO: 4081872 - DNA, 25 bp, Homo sapien
cctgtgcgtggaagcgtccggaaca

SEQ ID NO: 4081873 - DNA, 25 bp, Homo sapien
cgtggaagcgtccggaacaggaatt

SEQ ID NO: 4081874 - DNA, 25 bp, Homo sapien
ccctgtgcgtggaagcgtccggaac

SEQ ID NO: 4081875 - DNA, 25 bp, Homo sapien
tcgggtatacgctactggcggcatt

SEQ ID NO: 4081876 - DNA, 25 bp, Homo sapien
caggttagggcactatcgggtatac

SEQ ID NO: 4081877 - DNA, 25 bp, Homo sapien
tactagttggtagcactgtacaggg

SEQ ID NO: 4081878 - DNA, 25 bp, Homo sapien
gacgagttcggtgctatcaggctgc

SEQ ID NO: 4081879 - DNA, 25 bp, Homo sapien
ccacaatgcgctccgtgttccaagc

SEQ ID NO: 4081880 - DNA, 25 bp, Homo sapien
gacaggcccacaatgcgctccgtgt

SEQ ID NO: 4081881 - DNA, 25 bp, Homo sapien
acaggcccacaatgcgctccgtgtt

SEQ ID NO: 4081882 - DNA, 25 bp, Homo sapien
atgcgctccgtgttccaagcctcat

SEQ ID NO: 4081883 - DNA, 25 bp, Homo sapien
ctgggaaaagaacacccaaaggctg

SEQ ID NO: 4081884 - DNA, 25 bp, Homo sapien
ggctgctctgtgagcctggcatgca

SEQ ID NO: 4081885 - DNA, 25 bp, Homo sapien
gctgctctgtgagcctggcatgcat

SEQ ID NO: 4081886 - DNA, 25 bp, Homo sapien
gaaaagaacacccaaaggctgctct

SEQ ID NO: 4081887 - DNA, 25 bp, Homo sapien
tgcacgtcccctgtttccaagtctt

SEQ ID NO: 4081888 - DNA, 25 bp, Homo sapien
ggcccgattttcccttgtgcacgtc

SEQ ID NO: 4081889 - DNA, 25 bp, Homo sapien
caagtcttcaaagtcaccatagagc

SEQ ID NO: 4081890 - DNA, 25 bp, Homo sapien
tcttcaaagtcaccatagagctcct

SEQ ID NO: 4081891 - DNA, 25 bp, Homo sapien
catcagggtcaatttctttcttgtt

SEQ ID NO: 4081892 - DNA, 25 bp, Homo sapien
cagggtcaatttctttcttgtttct

SEQ ID NO: 4081893 - DNA, 25 bp, Homo sapien
ttcatcagggtcaatttctttcttg

SEQ ID NO: 4081894 - DNA, 25 bp, Homo sapien
cttcatcagggtcaatttctttctt

SEQ ID NO: 4081895 - DNA, 25 bp, Homo sapien
ttcaattttctcttcttatccaaat

SEQ ID NO: 4081896 - DNA, 25 bp, Homo sapien
cttcaattttctcttcttatccaaa

SEQ ID NO: 4081897 - DNA, 25 bp, Homo sapien
tcaattttctcttcttatccaaatg

SEQ ID NO: 4081898 - DNA, 25 bp, Homo sapien
gcatttctcctttaagatcatcaaa

SEQ ID NO: 4081899 - DNA, 25 bp, Homo sapien
tcatcaaaatatgtgctttctcctt

SEQ ID NO: 4081900 - DNA, 25 bp, Homo sapien
ttcatcatattccacatcaaacatc

SEQ ID NO: 4081901 - DNA, 25 bp, Homo sapien
gcttgtttctgcatttctcctttaa

SEQ ID NO: 4081902 - DNA, 25 bp, Homo sapien
ccttatactccacatgtccttctga

SEQ ID NO: 4081903 - DNA, 25 bp, Homo sapien
ttatactccacatgtccttctgaac

SEQ ID NO: 4081904 - DNA, 25 bp, Homo sapien
tatactccacatgtccttctgaact

SEQ ID NO: 4081905 - DNA, 25 bp, Homo sapien
cttatactccacatgtccttctgaa

SEQ ID NO: 4081906 - DNA, 25 bp, Homo sapien
ccaggtcgaaaaccctcatactgaa

SEQ ID NO: 4081907 - DNA, 25 bp, Homo sapien
tcccaggtcgaaaaccctcatactg

SEQ ID NO: 4081908 - DNA, 25 bp, Homo sapien
gtcgaaaaccctcatactgaactct

SEQ ID NO: 4081909 - DNA, 25 bp, Homo sapien
aggtcgaaaaccctcatactgaact

SEQ ID NO: 4081910 - DNA, 25 bp, Homo sapien
cccaagccacccaggataatggggt

SEQ ID NO: 4081911 - DNA, 25 bp, Homo sapien
ccaagccacccaggataatggggta

SEQ ID NO: 4081912 - DNA, 25 bp, Homo sapien
caagccacccaggataatggggtaa

SEQ ID NO: 4081913 - DNA, 25 bp, Homo sapien
aggggaaatccacagagcctcaggc

SEQ ID NO: 4081914 - DNA, 25 bp, Homo sapien
gcctcaggcaccaaatatgcagcaa

SEQ ID NO: 4081915 - DNA, 25 bp, Homo sapien
agagcctcaggcaccaaatatgcag

SEQ ID NO: 4081916 - DNA, 25 bp, Homo sapien
gatgattgatggaggggaaatccac

SEQ ID NO: 4081917 - DNA, 25 bp, Homo sapien
taccagcgatgtttcttcagatgca

SEQ ID NO: 4081918 - DNA, 25 bp, Homo sapien
aggattttcttataccagcgatgtt

SEQ ID NO: 4081919 - DNA, 25 bp, Homo sapien
ttataccagcgatgtttcttcagat

SEQ ID NO: 4081920 - DNA, 25 bp, Homo sapien
tatgattggatctcgggacttgagg

SEQ ID NO: 4081921 - DNA, 25 bp, Homo sapien
tccattgtggtcttcgatataatag

SEQ ID NO: 4081922 - DNA, 25 bp, Homo sapien
tcgatataatagagcgggatggtct

SEQ ID NO: 4081923 - DNA, 25 bp, Homo sapien
gtggtcttcgatataatagagcggg

SEQ ID NO: 4081924 - DNA, 25 bp, Homo sapien
tagagcgggatggtctgaaacctcc

SEQ ID NO: 4081925 - DNA, 25 bp, Homo sapien
caaaaggctgctccacaatgcatgt

SEQ ID NO: 4081926 - DNA, 25 bp, Homo sapien
tgctccacaatgcatgtgctgtggg

SEQ ID NO: 4081927 - DNA, 25 bp, Homo sapien
aaaggctgctccacaatgcatgtgc

SEQ ID NO: 4081928 - DNA, 25 bp, Homo sapien
ggctgctccacaatgcatgtgctgt

SEQ ID NO: 4081929 - DNA, 25 bp, Homo sapien
tagattctagtttaacatactggat

SEQ ID NO: 4081930 - DNA, 25 bp, Homo sapien
gcaataggcaagttattgtaatcat

SEQ ID NO: 4081931 - DNA, 25 bp, Homo sapien
tttagattctagtttaacatactgg

SEQ ID NO: 4081932 - DNA, 25 bp, Homo sapien
caataggcaagttattgtaatcata

SEQ ID NO: 4081933 - DNA, 25 bp, Homo sapien
actgtattgccaagaaaccagttcc

SEQ ID NO: 4081934 - DNA, 25 bp, Homo sapien
gacagactgtattgccaagaaacca

SEQ ID NO: 4081935 - DNA, 25 bp, Homo sapien
gccactgacagactgtattgccaag

SEQ ID NO: 4081936 - DNA, 25 bp, Homo sapien
ttatgccactgacagactgtattgc

SEQ ID NO: 4081937 - DNA, 25 bp, Homo sapien
taataacccacattcaggatatatt

SEQ ID NO: 4081938 - DNA, 25 bp, Homo sapien
tcaacttaaagtctcatgtacataa

SEQ ID NO: 4081939 - DNA, 25 bp, Homo sapien
tatatttctcaaaccaatctgtaaa

SEQ ID NO: 4081940 - DNA, 25 bp, Homo sapien
tgtaaaagaaatcatccaagatagt

SEQ ID NO: 4081941 - DNA, 25 bp, Homo sapien
ttatggatttatccagatcaaggac

SEQ ID NO: 4081942 - DNA, 25 bp, Homo sapien
tttatggatttatccagatcaagga

SEQ ID NO: 4081943 - DNA, 25 bp, Homo sapien
tatggatttatccagatcaaggaca

SEQ ID NO: 4081944 - DNA, 25 bp, Homo sapien
ttttatggatttatccagatcaagg

SEQ ID NO: 4081945 - DNA, 25 bp, Homo sapien
cctgaaagtggaattactacctcaa

SEQ ID NO: 4081946 - DNA, 25 bp, Homo sapien
caaaaacaactcactgaagggtgat

SEQ ID NO: 4081947 - DNA, 25 bp, Homo sapien
cagatgcatgcacttagaacatgaa

SEQ ID NO: 4081948 - DNA, 25 bp, Homo sapien
taatcaaaatgtatttgcccctgaa

SEQ ID NO: 4081949 - DNA, 25 bp, Homo sapien
ggccacgtccaaggcagaattaaac

SEQ ID NO: 4081950 - DNA, 25 bp, Homo sapien
tttggccacgtccaaggcagaatta

SEQ ID NO: 4081951 - DNA, 25 bp, Homo sapien
ttcaaatttggccacgtccaaggca

SEQ ID NO: 4081952 - DNA, 25 bp, Homo sapien
aaatttggccacgtccaaggcagaa

SEQ ID NO: 4081953 - DNA, 25 bp, Homo sapien
ggtcgctaagggaactattctcata

SEQ ID NO: 4081954 - DNA, 25 bp, Homo sapien
acagaactgttactgggtgtggcca

SEQ ID NO: 4081955 - DNA, 25 bp, Homo sapien
taagggaactattctcatagatcac

SEQ ID NO: 4081956 - DNA, 25 bp, Homo sapien
catatccatattgcgaagaaacaaa

SEQ ID NO: 4081957 - DNA, 25 bp, Homo sapien
ttggcccgtggtccgcattcctgac

SEQ ID NO: 4081958 - DNA, 25 bp, Homo sapien
caccatgggcgagcctgagttggcc

SEQ ID NO: 4081959 - DNA, 25 bp, Homo sapien
tgcctttagtctgacaccatgggcg

SEQ ID NO: 4081960 - DNA, 25 bp, Homo sapien
ctgagttggcccgtggtccgcattc

SEQ ID NO: 4081961 - DNA, 25 bp, Homo sapien
taattttttggatatcgcaccacaa

SEQ ID NO: 4081962 - DNA, 25 bp, Homo sapien
catagggggaaagcctcttgacatt

SEQ ID NO: 4081963 - DNA, 25 bp, Homo sapien
tgtaaacataaacaaggaggactgc

SEQ ID NO: 4081964 - DNA, 25 bp, Homo sapien
tgaaaggggaacctacagactggaa

SEQ ID NO: 4081965 - DNA, 25 bp, Homo sapien
tgcaagtgttgaggaccccaggcaa

SEQ ID NO: 4081966 - DNA, 25 bp, Homo sapien
ttgaggaccccaggcaagtgcactg

SEQ ID NO: 4081967 - DNA, 25 bp, Homo sapien
agggaactgcaagtgttgaggaccc

SEQ ID NO: 4081968 - DNA, 25 bp, Homo sapien
ccaggcaagtgcactgaggaatgaa

SEQ ID NO: 4081969 - DNA, 25 bp, Homo sapien
agagctgcagtctggccccggttgt

SEQ ID NO: 4081970 - DNA, 25 bp, Homo sapien
cagtctggccccggttgtgctgtgt

SEQ ID NO: 4081971 - DNA, 25 bp, Homo sapien
tggccccggttgtgctgtgtggcct

SEQ ID NO: 4081972 - DNA, 25 bp, Homo sapien
tgcagtctggccccggttgtgctgt

SEQ ID NO: 4081973 - DNA, 25 bp, Homo sapien
agggaacgcccctgtccttctagct

SEQ ID NO: 4081974 - DNA, 25 bp, Homo sapien
agcctgcccaggtgtcgtggccctc

SEQ ID NO: 4081975 - DNA, 25 bp, Homo sapien
gctgtaattggctgtccttgggctg

SEQ ID NO: 4081976 - DNA, 25 bp, Homo sapien
ctctggccttgcctagattcctggg

SEQ ID NO: 4081977 - DNA, 25 bp, Homo sapien
gatgcctgcagtgcttatgtcccga

SEQ ID NO: 4081978 - DNA, 25 bp, Homo sapien
tttttctgtaacctgggaccattgc

SEQ ID NO: 4081979 - DNA, 25 bp, Homo sapien
tgacttgtgctacagtaagctctct

SEQ ID NO: 4081980 - DNA, 25 bp, Homo sapien
tatgtcccgagtgcctttctgtggc

SEQ ID NO: 4081981 - DNA, 25 bp, Homo sapien
gatgtcctttgatcggttccttacc

SEQ ID NO: 4081982 - DNA, 25 bp, Homo sapien
ctgcagaaggctactttctgtctgt

SEQ ID NO: 4081983 - DNA, 25 bp, Homo sapien
ctgtgatgtcctttgatcggttcct

SEQ ID NO: 4081984 - DNA, 25 bp, Homo sapien
tcctttgatcggttccttaccatct

SEQ ID NO: 4081985 - DNA, 25 bp, Homo sapien
tatcaagagcatctcctatgctggc

SEQ ID NO: 4081986 - DNA, 25 bp, Homo sapien
tcccaaaatgttggccaatctcatc

SEQ ID NO: 4081987 - DNA, 25 bp, Homo sapien
gtcccaaaatgttggccaatctcat

SEQ ID NO: 4081988 - DNA, 25 bp, Homo sapien
tcccatatcaagagcatctcctatg

SEQ ID NO: 4081989 - DNA, 25 bp, Homo sapien
tcaaggctatcctgtcacatttcgt

SEQ ID NO: 4081990 - DNA, 25 bp, Homo sapien
aaggctatcctgtcacatttcgtga

SEQ ID NO: 4081991 - DNA, 25 bp, Homo sapien
tcctgtcacatttcgtgatgtggcc

SEQ ID NO: 4081992 - DNA, 25 bp, Homo sapien
catttcgtgatgtggcctgagccct

SEQ ID NO: 4081993 - DNA, 25 bp, Homo sapien
caatgtcttcttggtcctcaaggaa

SEQ ID NO: 4081994 - DNA, 25 bp, Homo sapien
ttttctgcctagtggtcaaattcag

SEQ ID NO: 4081995 - DNA, 25 bp, Homo sapien
gccttggctccactgtaggtgggta

SEQ ID NO: 4081996 - DNA, 25 bp, Homo sapien
ttcagaaacccaatcaggacctagg

SEQ ID NO: 4081997 - DNA, 25 bp, Homo sapien
tcacctgcaggtgaatcttagtctc

SEQ ID NO: 4081998 - DNA, 25 bp, Homo sapien
cacctgcaggtgaatcttagtctct

SEQ ID NO: 4081999 - DNA, 25 bp, Homo sapien
agcactgtagtcagatgaatgggaa

SEQ ID NO: 4082000 - DNA, 25 bp, Homo sapien
tctgctttcagggtagcactgtagt

SEQ ID NO: 4082001 - DNA, 25 bp, Homo sapien
tagacctggaacactcttgaggagc

SEQ ID NO: 4082002 - DNA, 25 bp, Homo sapien
taaggcctaacatgattcaatggag

SEQ ID NO: 4082003 - DNA, 25 bp, Homo sapien
tactaatcagggatacatggtgacc

SEQ ID NO: 4082004 - DNA, 25 bp, Homo sapien
catggtgacctaaactagacctgga

SEQ ID NO: 4082005 - DNA, 25 bp, Homo sapien
ggctctgtactctctactgtcttcc

SEQ ID NO: 4082006 - DNA, 25 bp, Homo sapien
tgtactctctactgtcttccgctta

SEQ ID NO: 4082007 - DNA, 25 bp, Homo sapien
gtactctctactgtcttccgcttac

SEQ ID NO: 4082008 - DNA, 25 bp, Homo sapien
tctgtactctctactgtcttccgct

SEQ ID NO: 4082009 - DNA, 25 bp, Homo sapien
gagctacttgtcagtgttctaaagc

SEQ ID NO: 4082010 - DNA, 25 bp, Homo sapien
gaggcaagaatcaatgagctacttg

SEQ ID NO: 4082011 - DNA, 25 bp, Homo sapien
tagtagtattgcatgagtgagaaca

SEQ ID NO: 4082012 - DNA, 25 bp, Homo sapien
catgaggttctcacaatagtagtat

SEQ ID NO: 4082013 - DNA, 25 bp, Homo sapien
gatgccttctgtgagtgactttgga

SEQ ID NO: 4082014 - DNA, 25 bp, Homo sapien
tgcaggcagtgcttactccaagccc

SEQ ID NO: 4082015 - DNA, 25 bp, Homo sapien
ctcacaaaagtggtctgcaggcagt

SEQ ID NO: 4082016 - DNA, 25 bp, Homo sapien
gaagctgtgagaggtttaaccaggc

SEQ ID NO: 4082017 - DNA, 25 bp, Homo sapien
tgtttctggagcctgttgatcagca

SEQ ID NO: 4082018 - DNA, 25 bp, Homo sapien
gtttctggagcctgttgatcagcag

SEQ ID NO: 4082019 - DNA, 25 bp, Homo sapien
tggtggccaacgcagggactgctca

SEQ ID NO: 4082020 - DNA, 25 bp, Homo sapien
ggtggccaacgcagggactgctcac

SEQ ID NO: 4082021 - DNA, 25 bp, Homo sapien
cttggtggccaacgcagggactgct

SEQ ID NO: 4082022 - DNA, 25 bp, Homo sapien
cacttggtggccaacgcagggactg

SEQ ID NO: 4082023 - DNA, 25 bp, Homo sapien
caacttcagtaggaaggtcatgttc

SEQ ID NO: 4082024 - DNA, 25 bp, Homo sapien
ttccttcagcaagactgtgggtccc

SEQ ID NO: 4082025 - DNA, 25 bp, Homo sapien
ctattccgtaatcccaacttcagta

SEQ ID NO: 4082026 - DNA, 25 bp, Homo sapien
gtcatgttccttcagcaagactgtg

SEQ ID NO: 4082027 - DNA, 25 bp, Homo sapien
gccctcccagagtgttactgtctac

SEQ ID NO: 4082028 - DNA, 25 bp, Homo sapien
tatcttggcacatttggttatgtgg

SEQ ID NO: 4082029 - DNA, 25 bp, Homo sapien
actgtctactagttacccattaaag

SEQ ID NO: 4082030 - DNA, 25 bp, Homo sapien
tcaggattatcttggcacatttggt

SEQ ID NO: 4082031 - DNA, 25 bp, Homo sapien
taatcctctaatatatagtctcagg

SEQ ID NO: 4082032 - DNA, 25 bp, Homo sapien
aatatatagtctcaggaacaaagag

SEQ ID NO: 4082033 - DNA, 25 bp, Homo sapien
cttttctgtgataacaccactctgt

SEQ ID NO: 4082034 - DNA, 25 bp, Homo sapien
taacaccactctgtaatcctctaat

SEQ ID NO: 4082035 - DNA, 25 bp, Homo sapien
tcccgtcccattgaagatgctgtcc

SEQ ID NO: 4082036 - DNA, 25 bp, Homo sapien
tgtggcccaaatattatcaaccatt

SEQ ID NO: 4082037 - DNA, 25 bp, Homo sapien
atttgtgatcccgtcccattgaaga

SEQ ID NO: 4082038 - DNA, 25 bp, Homo sapien
ccattttatttgtgatcccgtccca

SEQ ID NO: 4082039 - DNA, 25 bp, Homo sapien
tgcacctaccacatacataccaaag

SEQ ID NO: 4082040 - DNA, 25 bp, Homo sapien
tatttaatagtacaagaggatgact

SEQ ID NO: 4082041 - DNA, 25 bp, Homo sapien
tacatgcctgtatctaagtatctca

SEQ ID NO: 4082042 - DNA, 25 bp, Homo sapien
aaactgagaaagatagtggttaggg

SEQ ID NO: 4082043 - DNA, 25 bp, Homo sapien
gatgatcaatggtgtttgagcacct

SEQ ID NO: 4082044 - DNA, 25 bp, Homo sapien
tatctaagagagtttcccccaatgt

SEQ ID NO: 4082045 - DNA, 25 bp, Homo sapien
ctcactgttgatgtacggatttgct

SEQ ID NO: 4082046 - DNA, 25 bp, Homo sapien
gatgtacggatttgcttctgggttc

SEQ ID NO: 4082047 - DNA, 25 bp, Homo sapien
tgatttgtttgtatatgccatccat

SEQ ID NO: 4082048 - DNA, 25 bp, Homo sapien
gaagattctcactggtttttatctc

SEQ ID NO: 4082049 - DNA, 25 bp, Homo sapien
tctcactggtttttatctcaatcat

SEQ ID NO: 4082050 - DNA, 25 bp, Homo sapien
gatttgtttgtatatgccatccatt

SEQ ID NO: 4082051 - DNA, 25 bp, Homo sapien
ttttttcatcaagccaagaatatca

SEQ ID NO: 4082052 - DNA, 25 bp, Homo sapien
caagaagatgataggcccagaagaa

SEQ ID NO: 4082053 - DNA, 25 bp, Homo sapien
tttcccaggacaatagcaatgtaaa

SEQ ID NO: 4082054 - DNA, 25 bp, Homo sapien
cagctcccaagaagatgataggccc

SEQ ID NO: 4082055 - DNA, 25 bp, Homo sapien
taatacataggagattggagcagat

SEQ ID NO: 4082056 - DNA, 25 bp, Homo sapien
gcttaggcataggtcaatgaaagag

SEQ ID NO: 4082057 - DNA, 25 bp, Homo sapien
gagcagatgagcatgggcttgcact

SEQ ID NO: 4082058 - DNA, 25 bp, Homo sapien
agtaacacagcttaggcataggtca

SEQ ID NO: 4082059 - DNA, 25 bp, Homo sapien
ttgccctgctgtaggaaatccccta

SEQ ID NO: 4082060 - DNA, 25 bp, Homo sapien
gcaaaaacatctcactggctcctag

SEQ ID NO: 4082061 - DNA, 25 bp, Homo sapien
aaacatctcactggctcctagaaag

SEQ ID NO: 4082062 - DNA, 25 bp, Homo sapien
tcttgccctgctgtaggaaatcccc

SEQ ID NO: 4082063 - DNA, 25 bp, Homo sapien
caaagggttacagatggcaacatac

SEQ ID NO: 4082064 - DNA, 25 bp, Homo sapien
ataaggtagcgcaaagggttacaga

SEQ ID NO: 4082065 - DNA, 25 bp, Homo sapien
ttataaggtagcgcaaagggttaca

SEQ ID NO: 4082066 - DNA, 25 bp, Homo sapien
cgcaaagggttacagatggcaacat

SEQ ID NO: 4082067 - DNA, 25 bp, Homo sapien
ccacaccagcaggcaagaaccaacc

SEQ ID NO: 4082068 - DNA, 25 bp, Homo sapien
cacaccagcaggcaagaaccaacca

SEQ ID NO: 4082069 - DNA, 25 bp, Homo sapien
aaggcagctggatgactagtatgac

SEQ ID NO: 4082070 - DNA, 25 bp, Homo sapien
cagtagaagttgtccagttcattgg

SEQ ID NO: 4082071 - DNA, 25 bp, Homo sapien
taccacataggtgtccatgcaggcc

SEQ ID NO: 4082072 - DNA, 25 bp, Homo sapien
gccagcttgatgacctgtgggacat

SEQ ID NO: 4082073 - DNA, 25 bp, Homo sapien
atatacatggcatgaagatcaggct

SEQ ID NO: 4082074 - DNA, 25 bp, Homo sapien
gaatatacatggcatgaagatcagg

SEQ ID NO: 4082075 - DNA, 25 bp, Homo sapien
aaatagatgaatatacatggcatga

SEQ ID NO: 4082076 - DNA, 25 bp, Homo sapien
tagatgaatatacatggcatgaaga

SEQ ID NO: 4082077 - DNA, 25 bp, Homo sapien
atgagggggctcaacataggtgtca

SEQ ID NO: 4082078 - DNA, 25 bp, Homo sapien
ttcatagctgtcttcatatcagcat

SEQ ID NO: 4082079 - DNA, 25 bp, Homo sapien
gagggggctcaacataggtgtcatc

SEQ ID NO: 4082080 - DNA, 25 bp, Homo sapien
tcttcatagctgtcttcatatcagc

SEQ ID NO: 4082081 - DNA, 25 bp, Homo sapien
tgggcacaaaagaatagacagggca

SEQ ID NO: 4082082 - DNA, 25 bp, Homo sapien
caaaagaatagacagggcaggaaga

SEQ ID NO: 4082083 - DNA, 25 bp, Homo sapien
gggcacaaaagaatagacagggcag

SEQ ID NO: 4082084 - DNA, 25 bp, Homo sapien
tgagtggaattctgatagatgagtt

SEQ ID NO: 4082085 - DNA, 25 bp, Homo sapien
acaggactgccttttcaaacgttgt

SEQ ID NO: 4082086 - DNA, 25 bp, Homo sapien
ttctgatagatgagttagagttaac

SEQ ID NO: 4082087 - DNA, 25 bp, Homo sapien
actgccttttcaaacgttgtcactg

SEQ ID NO: 4082088 - DNA, 25 bp, Homo sapien
agacaaagaacatcaattgcattcc

SEQ ID NO: 4082089 - DNA, 25 bp, Homo sapien
acacgttataaaccgtggtaagcat

SEQ ID NO: 4082090 - DNA, 25 bp, Homo sapien
tctcagcacaaccaaaaaagtggaa

SEQ ID NO: 4082091 - DNA, 25 bp, Homo sapien
aatctcagcacaaccaaaaaagtgg

SEQ ID NO: 4082092 - DNA, 25 bp, Homo sapien
cagcacaaccaaaaaagtggaaggt

SEQ ID NO: 4082093 - DNA, 25 bp, Homo sapien
tcagcacaaccaaaaaagtggaagg

SEQ ID NO: 4082094 - DNA, 25 bp, Homo sapien
gggagatgagaccactgttggcaac

SEQ ID NO: 4082095 - DNA, 25 bp, Homo sapien
cacaaaagtaatggtctataacctg

SEQ ID NO: 4082096 - DNA, 25 bp, Homo sapien
cccagggagatgagaccactgttgg

SEQ ID NO: 4082097 - DNA, 25 bp, Homo sapien
cctgagcattacagaagggcagctg

SEQ ID NO: 4082098 - DNA, 25 bp, Homo sapien
tctagtccatacatgaagagtagaa

SEQ ID NO: 4082099 - DNA, 25 bp, Homo sapien
aagcccctctagtccatacatgaag

SEQ ID NO: 4082100 - DNA, 25 bp, Homo sapien
cctctagtccatacatgaagagtag

SEQ ID NO: 4082101 - DNA, 25 bp, Homo sapien
gcccctctagtccatacatgaagag

SEQ ID NO: 4082102 - DNA, 25 bp, Homo sapien
tctgcatctaactcctgtcctgttt

SEQ ID NO: 4082103 - DNA, 25 bp, Homo sapien
ttgttcctgtgggtctcagccattt

SEQ ID NO: 4082104 - DNA, 25 bp, Homo sapien
tcttctctgcatctaactcctgtcc

SEQ ID NO: 4082105 - DNA, 25 bp, Homo sapien
gttcctgtgggtctcagccattttt

SEQ ID NO: 4082106 - DNA, 25 bp, Homo sapien
tactaactggcagacttctggtcag

SEQ ID NO: 4082107 - DNA, 25 bp, Homo sapien
agattgatctcttaagccagcttac

SEQ ID NO: 4082108 - DNA, 25 bp, Homo sapien
tctgtgactcatatgctaccgttag

SEQ ID NO: 4082109 - DNA, 25 bp, Homo sapien
tctggtcagggttccagtagaaagg

SEQ ID NO: 4082110 - DNA, 25 bp, Homo sapien
tctttcattgatgagaagatacagt

SEQ ID NO: 4082111 - DNA, 25 bp, Homo sapien
ccgaattacctctaattccaccagt

SEQ ID NO: 4082112 - DNA, 25 bp, Homo sapien
ttctatattttttcagtacatcata

SEQ ID NO: 4082113 - DNA, 25 bp, Homo sapien
gagaagatacagttttttacagttc

SEQ ID NO: 4082114 - DNA, 25 bp, Homo sapien
gtgacagtcttggtgccttcaggaa

SEQ ID NO: 4082115 - DNA, 25 bp, Homo sapien
ctgtgacagtcttggtgccttcagg

SEQ ID NO: 4082116 - DNA, 25 bp, Homo sapien
caattactgtgacagtcttggtgcc

SEQ ID NO: 4082117 - DNA, 25 bp, Homo sapien
attactgtgacagtcttggtgcctt

SEQ ID NO: 4082118 - DNA, 25 bp, Homo sapien
tggaggaggcagctcatagccctca

SEQ ID NO: 4082119 - DNA, 25 bp, Homo sapien
aggaggcagctcatagccctcataa

SEQ ID NO: 4082120 - DNA, 25 bp, Homo sapien
ctggaggaggcagctcatagccctc

SEQ ID NO: 4082121 - DNA, 25 bp, Homo sapien
gaggaggcagctcatagccctcata

SEQ ID NO: 4082122 - DNA, 25 bp, Homo sapien
ttcaatttactcttttcataatata

SEQ ID NO: 4082123 - DNA, 25 bp, Homo sapien
cttcaatttactcttttcataatat

SEQ ID NO: 4082124 - DNA, 25 bp, Homo sapien
tcaatttactcttttcataatatag

SEQ ID NO: 4082125 - DNA, 25 bp, Homo sapien
aatggaagagtaccaaatatcaagg

SEQ ID NO: 4082126 - DNA, 25 bp, Homo sapien
taacaaataggactagttggacctc

SEQ ID NO: 4082127 - DNA, 25 bp, Homo sapien
gattagccaacaggaaatacatagg

SEQ ID NO: 4082128 - DNA, 25 bp, Homo sapien
ctgatggtgcaaatgataaggatat

SEQ ID NO: 4082129 - DNA, 25 bp, Homo sapien
actgtgagcaagaacatctccgaag

SEQ ID NO: 4082130 - DNA, 25 bp, Homo sapien
cactgtgagcaagaacatctccgaa

SEQ ID NO: 4082131 - DNA, 25 bp, Homo sapien
tgtgagcaagaacatctccgaagcc

SEQ ID NO: 4082132 - DNA, 25 bp, Homo sapien
tgagcaagaacatctccgaagcccc

SEQ ID NO: 4082133 - DNA, 25 bp, Homo sapien
tcggcagatagcagtgtagaggtca

SEQ ID NO: 4082134 - DNA, 25 bp, Homo sapien
gatagcagtgtagaggtcaaaggcc

SEQ ID NO: 4082135 - DNA, 25 bp, Homo sapien
tagcagtgtagaggtcaaaggccat

SEQ ID NO: 4082136 - DNA, 25 bp, Homo sapien
ggcagatagcagtgtagaggtcaaa

SEQ ID NO: 4082137 - DNA, 25 bp, Homo sapien
gaaaggaagtcgaacaatgagagcc

SEQ ID NO: 4082138 - DNA, 25 bp, Homo sapien
gatcatcactaactcctctgggaag

SEQ ID NO: 4082139 - DNA, 25 bp, Homo sapien
gcaatccggacaacctgtgtgatgt

SEQ ID NO: 4082140 - DNA, 25 bp, Homo sapien
gtaactgtctaactcattgggccca

SEQ ID NO: 4082141 - DNA, 25 bp, Homo sapien
accacaatggtaatgtgggaatagc

SEQ ID NO: 4082142 - DNA, 25 bp, Homo sapien
tggacatggccctgttggtattctc

SEQ ID NO: 4082143 - DNA, 25 bp, Homo sapien
ggcccaaacattagcaccacaatgg

SEQ ID NO: 4082144 - DNA, 25 bp, Homo sapien
aatgggcgagcataaatgtagatgg

SEQ ID NO: 4082145 - DNA, 25 bp, Homo sapien
tatatttggtgaccaacttcctcat

SEQ ID NO: 4082146 - DNA, 25 bp, Homo sapien
aaatatatttggtgaccaacttcct

SEQ ID NO: 4082147 - DNA, 25 bp, Homo sapien
tatttggtgaccaacttcctcatgg

SEQ ID NO: 4082148 - DNA, 25 bp, Homo sapien
ttggtgaccaacttcctcatggctg

SEQ ID NO: 4082149 - DNA, 25 bp, Homo sapien
tttataagttgatggaaaatcctca

SEQ ID NO: 4082150 - DNA, 25 bp, Homo sapien
tcagtttataagttgatggaaaatc

SEQ ID NO: 4082151 - DNA, 25 bp, Homo sapien
tatttcagtttataagttgatggaa

SEQ ID NO: 4082152 - DNA, 25 bp, Homo sapien
ggtatttcagtttataagttgatgg

SEQ ID NO: 4082153 - DNA, 25 bp, Homo sapien
ttccaggtgatgagaagtcaagtca

SEQ ID NO: 4082154 - DNA, 25 bp, Homo sapien
aaaaatcaggacttataacgtcaat

SEQ ID NO: 4082155 - DNA, 25 bp, Homo sapien
ccaggtgatgagaagtcaagtcaaa

SEQ ID NO: 4082156 - DNA, 25 bp, Homo sapien
aaatcaggacttataacgtcaatct

SEQ ID NO: 4082157 - DNA, 25 bp, Homo sapien
ttttttcatgctgtgttacaaaatg

SEQ ID NO: 4082158 - DNA, 25 bp, Homo sapien
tctatattttttcatgctgtgttac

SEQ ID NO: 4082159 - DNA, 25 bp, Homo sapien
gtactctatattttttcatgctgtg

SEQ ID NO: 4082160 - DNA, 25 bp, Homo sapien
atattttttcatgctgtgttacaaa

SEQ ID NO: 4082161 - DNA, 25 bp, Homo sapien
tattgtagtgtctgcaatgcagcac

SEQ ID NO: 4082162 - DNA, 25 bp, Homo sapien
tgaaggcttgttattcctgctagga

SEQ ID NO: 4082163 - DNA, 25 bp, Homo sapien
gacagaaaatatccctgttcctggg

SEQ ID NO: 4082164 - DNA, 25 bp, Homo sapien
tgcagcaccgaacaagacagaaaat

SEQ ID NO: 4082165 - DNA, 25 bp, Homo sapien
cacgtttagagtccaggctcttgtt

SEQ ID NO: 4082166 - DNA, 25 bp, Homo sapien
actgttcacgtttagagtccaggct

SEQ ID NO: 4082167 - DNA, 25 bp, Homo sapien
ccagataaaggctgcgctatgcact

SEQ ID NO: 4082168 - DNA, 25 bp, Homo sapien
aaggctgcgctatgcactgttcacg

SEQ ID NO: 4082169 - DNA, 25 bp, Homo sapien
tagaagaacataacaatgttagaag

SEQ ID NO: 4082170 - DNA, 25 bp, Homo sapien
gaaatctgaatgactgccactccct

SEQ ID NO: 4082171 - DNA, 25 bp, Homo sapien
tagaaatctgaatgactgccactcc

SEQ ID NO: 4082172 - DNA, 25 bp, Homo sapien
atgttagaaggatcactgtcagtgg

SEQ ID NO: 4082173 - DNA, 25 bp, Homo sapien
ctgtcactactgtgttgtttgctat

SEQ ID NO: 4082174 - DNA, 25 bp, Homo sapien
tactgtgttgtttgctatcttcatt

SEQ ID NO: 4082175 - DNA, 25 bp, Homo sapien
cactactgtgttgtttgctatcttc

SEQ ID NO: 4082176 - DNA, 25 bp, Homo sapien
tgtgttgtttgctatcttcatttct

SEQ ID NO: 4082177 - DNA, 25 bp, Homo sapien
ctgagtcagaccaaggaggataaat

SEQ ID NO: 4082178 - DNA, 25 bp, Homo sapien
tgagactgagtcagaccaaggagga

SEQ ID NO: 4082179 - DNA, 25 bp, Homo sapien
aagagctgaatatcttgagactgag

SEQ ID NO: 4082180 - DNA, 25 bp, Homo sapien
gaatatcttgagactgagtcagacc

SEQ ID NO: 4082181 - DNA, 25 bp, Homo sapien
ctttttctcagagaggaagtccacc

SEQ ID NO: 4082182 - DNA, 25 bp, Homo sapien
tctcagagaggaagtccaccaacat

SEQ ID NO: 4082183 - DNA, 25 bp, Homo sapien
ttttctcagagaggaagtccaccaa

SEQ ID NO: 4082184 - DNA, 25 bp, Homo sapien
tttctcagagaggaagtccaccaac

SEQ ID NO: 4082185 - DNA, 25 bp, Homo sapien
cacaacaaggagtaatccctcccct

SEQ ID NO: 4082186 - DNA, 25 bp, Homo sapien
agggttcatgacagttgaacagtgc

SEQ ID NO: 4082187 - DNA, 25 bp, Homo sapien
ggttcatgacagttgaacagtgcag

SEQ ID NO: 4082188 - DNA, 25 bp, Homo sapien
gggttcatgacagttgaacagtgca

SEQ ID NO: 4082189 - DNA, 25 bp, Homo sapien
gcaggtccaaacataagaagtataa

SEQ ID NO: 4082190 - DNA, 25 bp, Homo sapien
gatagcaggtccaaacataagaagt

SEQ ID NO: 4082191 - DNA, 25 bp, Homo sapien
tagcaggtccaaacataagaagtat

SEQ ID NO: 4082192 - DNA, 25 bp, Homo sapien
agcaggtccaaacataagaagtata

SEQ ID NO: 4082193 - DNA, 25 bp, Homo sapien
acttgacagactacatgtcgactca

SEQ ID NO: 4082194 - DNA, 25 bp, Homo sapien
acagactacatgtcgactcaataac

SEQ ID NO: 4082195 - DNA, 25 bp, Homo sapien
tgacagactacatgtcgactcaata

SEQ ID NO: 4082196 - DNA, 25 bp, Homo sapien
tccacttgacagactacatgtcgac

SEQ ID NO: 4082197 - DNA, 25 bp, Homo sapien
cattatgcataactctcctccattg

SEQ ID NO: 4082198 - DNA, 25 bp, Homo sapien
tacaatggtacctggcaaatgggag

SEQ ID NO: 4082199 - DNA, 25 bp, Homo sapien
gaggtactcagtgaaaaacaggact

SEQ ID NO: 4082200 - DNA, 25 bp, Homo sapien
gaatgatatgaattccagccagaat

SEQ ID NO: 4082201 - DNA, 25 bp, Homo sapien
tgatgttgctctaaccagtagagga

SEQ ID NO: 4082202 - DNA, 25 bp, Homo sapien
tcagaccgaaagacccttgcagtca

SEQ ID NO: 4082203 - DNA, 25 bp, Homo sapien
taatctctgcctaaaatcttgctga

SEQ ID NO: 4082204 - DNA, 25 bp, Homo sapien
gaaagcattgtagatgaactgctcc

SEQ ID NO: 4082205 - DNA, 25 bp, Homo sapien
ttagaccccactattaatacaggag

SEQ ID NO: 4082206 - DNA, 25 bp, Homo sapien
tgtcatggcaccagccaagtaaagc

SEQ ID NO: 4082207 - DNA, 25 bp, Homo sapien
gacaacgaactgcaggtatttcccc

SEQ ID NO: 4082208 - DNA, 25 bp, Homo sapien
aagtaaatgcaggtggctaacagcc

SEQ ID NO: 4082209 - DNA, 25 bp, Homo sapien
caagtactctgttgaagaagtgtgg

SEQ ID NO: 4082210 - DNA, 25 bp, Homo sapien
ggtgagaatgtacatccttgtcctt

SEQ ID NO: 4082211 - DNA, 25 bp, Homo sapien
acctctcgggaatagtacctacttg

SEQ ID NO: 4082212 - DNA, 25 bp, Homo sapien
cattgaatcagccttacctctcggg

SEQ ID NO: 4082213 - DNA, 25 bp, Homo sapien
tgagtggatgaaaggataccaggga

SEQ ID NO: 4082214 - DNA, 25 bp, Homo sapien
gtggatgaaaggataccagggattg

SEQ ID NO: 4082215 - DNA, 25 bp, Homo sapien
agtggatgaaaggataccagggatt

SEQ ID NO: 4082216 - DNA, 25 bp, Homo sapien
ttgagtggatgaaaggataccaggg

SEQ ID NO: 4082217 - DNA, 25 bp, Homo sapien
aatgatacatatcagtcatttgtat

SEQ ID NO: 4082218 - DNA, 25 bp, Homo sapien
aaatgatacatatcagtcatttgta

SEQ ID NO: 4082219 - DNA, 25 bp, Homo sapien
atgatacatatcagtcatttgtatg

SEQ ID NO: 4082220 - DNA, 25 bp, Homo sapien
gaaaatgatacatatcagtcatttg

SEQ ID NO: 4082221 - DNA, 25 bp, Homo sapien
gagcttttagccaaccatttctgca

SEQ ID NO: 4082222 - DNA, 25 bp, Homo sapien
tctctggagcttttagccaaccatt

SEQ ID NO: 4082223 - DNA, 25 bp, Homo sapien
tctggagcttttagccaaccatttc

SEQ ID NO: 4082224 - DNA, 25 bp, Homo sapien
cgcaaaatcataaaatctgttaagt

SEQ ID NO: 4082225 - DNA, 25 bp, Homo sapien
gtctatgttcatggctactccattc

SEQ ID NO: 4082226 - DNA, 25 bp, Homo sapien
tttgtctatgttcatggctactcca

SEQ ID NO: 4082227 - DNA, 25 bp, Homo sapien
gttcatggctactccattctaccca

SEQ ID NO: 4082228 - DNA, 25 bp, Homo sapien
tccattctacccacacctgtcttgc

SEQ ID NO: 4082229 - DNA, 25 bp, Homo sapien
agctaattcgtggattgatcagttt

SEQ ID NO: 4082230 - DNA, 25 bp, Homo sapien
gctaattcgtggattgatcagtttc

SEQ ID NO: 4082231 - DNA, 25 bp, Homo sapien
cagctaattcgtggattgatcagtt

SEQ ID NO: 4082232 - DNA, 25 bp, Homo sapien
tcagctaattcgtggattgatcagt

SEQ ID NO: 4082233 - DNA, 25 bp, Homo sapien
gttctgttctcgctttccatttccc

SEQ ID NO: 4082234 - DNA, 25 bp, Homo sapien
tgttctgttctcgctttccatttcc

SEQ ID NO: 4082235 - DNA, 25 bp, Homo sapien
tctgttctcgctttccatttccctg

SEQ ID NO: 4082236 - DNA, 25 bp, Homo sapien
tgttctcgctttccatttccctggc

SEQ ID NO: 4082237 - DNA, 25 bp, Homo sapien
caagttgcccagaaataaatagagg

SEQ ID NO: 4082238 - DNA, 25 bp, Homo sapien
cttgggagccacaatgaaggagtag

SEQ ID NO: 4082239 - DNA, 25 bp, Homo sapien
catccaggaaggccaagttgcccag

SEQ ID NO: 4082240 - DNA, 25 bp, Homo sapien
aatgaaggagtaggatgcatccagg

SEQ ID NO: 4082241 - DNA, 25 bp, Homo sapien
tctagagttcatgacagttgaatac

SEQ ID NO: 4082242 - DNA, 25 bp, Homo sapien
agagttcatgacagttgaatactgc

SEQ ID NO: 4082243 - DNA, 25 bp, Homo sapien
ctagagttcatgacagttgaatact

SEQ ID NO: 4082244 - DNA, 25 bp, Homo sapien
tagagttcatgacagttgaatactg

SEQ ID NO: 4082245 - DNA, 25 bp, Homo sapien
gaagagagaaaccaccttgtcggct

SEQ ID NO: 4082246 - DNA, 25 bp, Homo sapien
caaaggaagaatcactgtgtggaag

SEQ ID NO: 4082247 - DNA, 25 bp, Homo sapien
cctggttatgaagggtataaatgac

SEQ ID NO: 4082248 - DNA, 25 bp, Homo sapien
caccttgtcggctgggaaagccctg

SEQ ID NO: 4082249 - DNA, 25 bp, Homo sapien
attaaacacctttttcatggaagct

SEQ ID NO: 4082250 - DNA, 25 bp, Homo sapien
aggctatgtgtttattaaacacctt

SEQ ID NO: 4082251 - DNA, 25 bp, Homo sapien
acacctttttcatggaagctttcac

SEQ ID NO: 4082252 - DNA, 25 bp, Homo sapien
aacacctttttcatggaagctttca

SEQ ID NO: 4082253 - DNA, 25 bp, Homo sapien
tatagaccatccagtcatccagggc

SEQ ID NO: 4082254 - DNA, 25 bp, Homo sapien
gacatcagtggagcagcctgcacat

SEQ ID NO: 4082255 - DNA, 25 bp, Homo sapien
catgggctccattgaagagtgtctg

SEQ ID NO: 4082256 - DNA, 25 bp, Homo sapien
tccatccaggcatcgttgagtctag

SEQ ID NO: 4082257 - DNA, 25 bp, Homo sapien
gcactgggccccacaggtaactgag

SEQ ID NO: 4082258 - DNA, 25 bp, Homo sapien
actgggccccacaggtaactgagca

SEQ ID NO: 4082259 - DNA, 25 bp, Homo sapien
gccccacaggtaactgagcaggtgc

SEQ ID NO: 4082260 - DNA, 25 bp, Homo sapien
tgggccccacaggtaactgagcagg

SEQ ID NO: 4082261 - DNA, 25 bp, Homo sapien
caagatgaaggtgtgctttgcacgt

SEQ ID NO: 4082262 - DNA, 25 bp, Homo sapien
cagtcataagcagggaaggtccagg

SEQ ID NO: 4082263 - DNA, 25 bp, Homo sapien
tgcaagatgaaggtgtgctttgcac

SEQ ID NO: 4082264 - DNA, 25 bp, Homo sapien
tttgcacgtgggaggccccagtcat

SEQ ID NO: 4082265 - DNA, 25 bp, Homo sapien
cagacaggagacagttgaaagaaag

SEQ ID NO: 4082266 - DNA, 25 bp, Homo sapien
tcatgagataaatggccaaacatta

SEQ ID NO: 4082267 - DNA, 25 bp, Homo sapien
tgtaggaattccttatgctgtggct

SEQ ID NO: 4082268 - DNA, 25 bp, Homo sapien
tcctgtcctggctcatcatcaggct

SEQ ID NO: 4082269 - DNA, 25 bp, Homo sapien
tgtagagtgcctttcctcctaaact

SEQ ID NO: 4082270 - DNA, 25 bp, Homo sapien
tcctggtagttgagcgttgtgtaga

SEQ ID NO: 4082271 - DNA, 25 bp, Homo sapien
cgttgtgtagagtgcctttcctcct

SEQ ID NO: 4082272 - DNA, 25 bp, Homo sapien
tagttgagcgttgtgtagagtgcct

SEQ ID NO: 4082273 - DNA, 25 bp, Homo sapien
gagacaccgtcccagtctgagaagt

SEQ ID NO: 4082274 - DNA, 25 bp, Homo sapien
cagagacaccgtcccagtctgagaa

SEQ ID NO: 4082275 - DNA, 25 bp, Homo sapien
agagacaccgtcccagtctgagaag

SEQ ID NO: 4082276 - DNA, 25 bp, Homo sapien
ttcgggaggtgtcagcaggcacagg

SEQ ID NO: 4082277 - DNA, 25 bp, Homo sapien
tcgggaggtgtcagcaggcacagga

SEQ ID NO: 4082278 - DNA, 25 bp, Homo sapien
tataatcgatgctcctcagccagtg

SEQ ID NO: 4082279 - DNA, 25 bp, Homo sapien
cgctgcttgttggatgagtctctgg

SEQ ID NO: 4082280 - DNA, 25 bp, Homo sapien
gcggcggttgttcgtgtttctctta

SEQ ID NO: 4082281 - DNA, 25 bp, Homo sapien
cagccagtgcaaccccttgtctagg

SEQ ID NO: 4082282 - DNA, 25 bp, Homo sapien
ggaaaaagcagaccacgtgggagcc

SEQ ID NO: 4082283 - DNA, 25 bp, Homo sapien
ggaaggaaagcagaccacatggaag

SEQ ID NO: 4082284 - DNA, 25 bp, Homo sapien
ccggatgaagggaaggtttctatga

SEQ ID NO: 4082285 - DNA, 25 bp, Homo sapien
aaagcagaccacatggaagcagatg

SEQ ID NO: 4082286 - DNA, 25 bp, Homo sapien
ggacagatgtgggagagggtgtgcc

SEQ ID NO: 4082287 - DNA, 25 bp, Homo sapien
agggaagaatttctcgagcaagtgt

SEQ ID NO: 4082288 - DNA, 25 bp, Homo sapien
gtttgagggaagaatttctcgagca

SEQ ID NO: 4082289 - DNA, 25 bp, Homo sapien
tggagtttgagggaagaatttctcg

SEQ ID NO: 4082290 - DNA, 25 bp, Homo sapien
tgtgcccctctgagggaaatgtcca

SEQ ID NO: 4082291 - DNA, 25 bp, Homo sapien
tgctcgtgtggaggaaggttccacc

SEQ ID NO: 4082292 - DNA, 25 bp, Homo sapien
gcacgtggggacagatgtgctcatc

SEQ ID NO: 4082293 - DNA, 25 bp, Homo sapien
ggtgtactcatttgagggaagggtc

SEQ ID NO: 4082294 - DNA, 25 bp, Homo sapien
gagcttggacaaagcgggacgtcct

SEQ ID NO: 4082295 - DNA, 25 bp, Homo sapien
tgtggaaagtgcaccctactgacag

SEQ ID NO: 4082296 - DNA, 25 bp, Homo sapien
gggacgtcctccaaccttctgactg

SEQ ID NO: 4082297 - DNA, 25 bp, Homo sapien
tatatcatatggctactcaccctgg

SEQ ID NO: 4082298 - DNA, 25 bp, Homo sapien
gagaactgagttctcaaagggcaaa

SEQ ID NO: 4082299 - DNA, 25 bp, Homo sapien
actgagttctcaaagggcaaagcaa

SEQ ID NO: 4082300 - DNA, 25 bp, Homo sapien
cccaggaagagaactgagttctcaa

SEQ ID NO: 4082301 - DNA, 25 bp, Homo sapien
tctcaaagggcaaagcaagcatcct

SEQ ID NO: 4082302 - DNA, 25 bp, Homo sapien
tatacatgcctatgacattttcttc

SEQ ID NO: 4082303 - DNA, 25 bp, Homo sapien
cccgtacacacccacatagatatat

SEQ ID NO: 4082304 - DNA, 25 bp, Homo sapien
agcacatcgtggaaacccgtacaca

SEQ ID NO: 4082305 - DNA, 25 bp, Homo sapien
ctgtgtatgagcacatcgtggaaac

SEQ ID NO: 4082306 - DNA, 25 bp, Homo sapien
ttgggaggttttaccgccagctcta

SEQ ID NO: 4082307 - DNA, 25 bp, Homo sapien
gacacatttgtgcttaacaacacct

SEQ ID NO: 4082308 - DNA, 25 bp, Homo sapien
tacaaattcagaagcccttcggttc

SEQ ID NO: 4082309 - DNA, 25 bp, Homo sapien
tgtctccatgacaattttgggaggt

SEQ ID NO: 4082310 - DNA, 25 bp, Homo sapien
ccaggagccaatggtgacacagtag

SEQ ID NO: 4082311 - DNA, 25 bp, Homo sapien
ctgagcgagcctctccactctgcat

SEQ ID NO: 4082312 - DNA, 25 bp, Homo sapien
gccaatggtgacacagtagtgcctt

SEQ ID NO: 4082313 - DNA, 25 bp, Homo sapien
gtagtgccttcacctgagcgagcct

SEQ ID NO: 4082314 - DNA, 25 bp, Homo sapien
tcagctccgtttcttccctgaactg

SEQ ID NO: 4082315 - DNA, 25 bp, Homo sapien
ttcagctccgtttcttccctgaact

SEQ ID NO: 4082316 - DNA, 25 bp, Homo sapien
cttcagctccgtttcttccctgaac

SEQ ID NO: 4082317 - DNA, 25 bp, Homo sapien
ttcttccacatgcccttcagctccg

SEQ ID NO: 4082318 - DNA, 25 bp, Homo sapien
acagccgatgccccgcacctccccc

SEQ ID NO: 4082319 - DNA, 25 bp, Homo sapien
cagggacagccgatgccccgcacct

SEQ ID NO: 4082320 - DNA, 25 bp, Homo sapien
ggacagccgatgccccgcacctccc

SEQ ID NO: 4082321 - DNA, 25 bp, Homo sapien
agggacagccgatgccccgcacctc

SEQ ID NO: 4082322 - DNA, 25 bp, Homo sapien
gtgtttctcctgcacaggccccaga

SEQ ID NO: 4082323 - DNA, 25 bp, Homo sapien
agtttggttgtggagcacagatgcc

SEQ ID NO: 4082324 - DNA, 25 bp, Homo sapien
atgatgatggctctaggagtttggt

SEQ ID NO: 4082325 - DNA, 25 bp, Homo sapien
tgcagtgacgaagtcagtggcctct

SEQ ID NO: 4082326 - DNA, 25 bp, Homo sapien
gtcttctctgttattgatactatgt

SEQ ID NO: 4082327 - DNA, 25 bp, Homo sapien
tcttctctgttattgatactatgtc

SEQ ID NO: 4082328 - DNA, 25 bp, Homo sapien
tgtcttctctgttattgatactatg

SEQ ID NO: 4082329 - DNA, 25 bp, Homo sapien
cgtgccctccgagccatccaagggc

SEQ ID NO: 4082330 - DNA, 25 bp, Homo sapien
gagggttggtaagtgagtccacgga

SEQ ID NO: 4082331 - DNA, 25 bp, Homo sapien
ccatccaagggcttcaggaggccga

SEQ ID NO: 4082332 - DNA, 25 bp, Homo sapien
gtgagtccacggaccaccacgcagg

SEQ ID NO: 4082333 - DNA, 25 bp, Homo sapien
gtggtgtgcaaagcgtcctgcaacc

SEQ ID NO: 4082334 - DNA, 25 bp, Homo sapien
ccgtggtgtgcaaagcgtcctgcaa

SEQ ID NO: 4082335 - DNA, 25 bp, Homo sapien
ggtgtgcaaagcgtcctgcaacccc

SEQ ID NO: 4082336 - DNA, 25 bp, Homo sapien
tgtgcaaagcgtcctgcaaccccag

SEQ ID NO: 4082337 - DNA, 25 bp, Homo sapien
gatccagcggttctgagtccagcct

SEQ ID NO: 4082338 - DNA, 25 bp, Homo sapien
tgatgggatccagcggttctgagtc

SEQ ID NO: 4082339 - DNA, 25 bp, Homo sapien
tgggatccagcggttctgagtccag

SEQ ID NO: 4082340 - DNA, 25 bp, Homo sapien
gccttgatgggatccagcggttctg

SEQ ID NO: 4082341 - DNA, 25 bp, Homo sapien
ctcccagagcctaggtgaaaatctg

SEQ ID NO: 4082342 - DNA, 25 bp, Homo sapien
cagagcctaggtgaaaatctgtgca

SEQ ID NO: 4082343 - DNA, 25 bp, Homo sapien
cctaggtgaaaatctgtgcagggga

SEQ ID NO: 4082344 - DNA, 25 bp, Homo sapien
gagcctaggtgaaaatctgtgcagg

SEQ ID NO: 4082345 - DNA, 25 bp, Homo sapien
gcaggcagcgtgacgcccatgctgc

SEQ ID NO: 4082346 - DNA, 25 bp, Homo sapien
agactgaggccctgagtccggtcct

SEQ ID NO: 4082347 - DNA, 25 bp, Homo sapien
catgccgctccagcctctacactgt

SEQ ID NO: 4082348 - DNA, 25 bp, Homo sapien
gagtccggtcctgatgccaacagtt

SEQ ID NO: 4082349 - DNA, 25 bp, Homo sapien
aggggacagagcaacaaggacagca

SEQ ID NO: 4082350 - DNA, 25 bp, Homo sapien
caggggacagagcaacaaggacagc

SEQ ID NO: 4082351 - DNA, 25 bp, Homo sapien
agaatctgtgagctccacgtcctca

SEQ ID NO: 4082352 - DNA, 25 bp, Homo sapien
ttaagcccgaggatgctggagcaga

SEQ ID NO: 4082353 - DNA, 25 bp, Homo sapien
cggcaggcctgccagtgctgcagaa

SEQ ID NO: 4082354 - DNA, 25 bp, Homo sapien
acatgtgatcttggtcctggccggc

SEQ ID NO: 4082355 - DNA, 25 bp, Homo sapien
tcaatgggccaacgggccctgaggg

SEQ ID NO: 4082356 - DNA, 25 bp, Homo sapien
ttcaatgggccaacgggccctgagg

SEQ ID NO: 4082357 - DNA, 25 bp, Homo sapien
atgggccaacgggccctgagggatg

SEQ ID NO: 4082358 - DNA, 25 bp, Homo sapien
aattcaatgggccaacgggccctga

SEQ ID NO: 4082359 - DNA, 25 bp, Homo sapien
tgggtgccctcttgcaacattgcgt

SEQ ID NO: 4082360 - DNA, 25 bp, Homo sapien
gaatgaaccacaaaacgaggtgcag

SEQ ID NO: 4082361 - DNA, 25 bp, Homo sapien
tactggctcacaagacacgttgctt

SEQ ID NO: 4082362 - DNA, 25 bp, Homo sapien
tgtcaagacatcgtagcgtggtgcc

SEQ ID NO: 4082363 - DNA, 25 bp, Homo sapien
cagagccgtggcggctggacgctca

SEQ ID NO: 4082364 - DNA, 25 bp, Homo sapien
agagccgtggcggctggacgctcat

SEQ ID NO: 4082365 - DNA, 25 bp, Homo sapien
ctgtcactgcgggccccaggccggc

SEQ ID NO: 4082366 - DNA, 25 bp, Homo sapien
cgcgggcgcggcgtcgcagcctagg

SEQ ID NO: 4082367 - DNA, 25 bp, Homo sapien
gcgtcgcagcctagggagcgatggg

SEQ ID NO: 4082368 - DNA, 25 bp, Homo sapien
ggcgcggcgtcgcagcctagggagc

SEQ ID NO: 4082369 - DNA, 25 bp, Homo sapien
tgcccagcagcggccggtgagcggc

SEQ ID NO: 4082370 - DNA, 25 bp, Homo sapien
cgtgcccagcagcggccggtgagcg

SEQ ID NO: 4082371 - DNA, 25 bp, Homo sapien
gtgcccagcagcggccggtgagcgg

SEQ ID NO: 4082372 - DNA, 25 bp, Homo sapien
gcccagcagcggccggtgagcggca

SEQ ID NO: 4082373 - DNA, 25 bp, Homo sapien
cagcgggcagcgcttctccaccacg

SEQ ID NO: 4082374 - DNA, 25 bp, Homo sapien
tgcagcgggcagcgcttctccacca

SEQ ID NO: 4082375 - DNA, 25 bp, Homo sapien
gcagcgggcagcgcttctccaccac

SEQ ID NO: 4082376 - DNA, 25 bp, Homo sapien
ctgcagcgggcagcgcttctccacc

SEQ ID NO: 4082377 - DNA, 25 bp, Homo sapien
ggcagctccgagaaccagcggtaca

SEQ ID NO: 4082378 - DNA, 25 bp, Homo sapien
acggcagctccgagaaccagcggta

SEQ ID NO: 4082379 - DNA, 25 bp, Homo sapien
agctccgagaaccagcggtacacgc

SEQ ID NO: 4082380 - DNA, 25 bp, Homo sapien
gcgacggcagctccgagaaccagcg

SEQ ID NO: 4082381 - DNA, 25 bp, Homo sapien
tgcgcaccacctcgtccgtcaggtt

SEQ ID NO: 4082382 - DNA, 25 bp, Homo sapien
tcggccgggttgttggccttgatct

SEQ ID NO: 4082383 - DNA, 25 bp, Homo sapien
gccttgatctccgagtcgcgcagcg

SEQ ID NO: 4082384 - DNA, 25 bp, Homo sapien
tgatctccgagtcgcgcagcgagtg

SEQ ID NO: 4082385 - DNA, 25 bp, Homo sapien
agcccgtagttgtggatgatggagt

SEQ ID NO: 4082386 - DNA, 25 bp, Homo sapien
gcagcaggaactcatcgcccgtgcg

SEQ ID NO: 4082387 - DNA, 25 bp, Homo sapien
agcaggaactcatcgcccgtgcggc

SEQ ID NO: 4082388 - DNA, 25 bp, Homo sapien
aactcatcgcccgtgcggccctcgt

SEQ ID NO: 4082389 - DNA, 25 bp, Homo sapien
actcatcgcccgtgcggccctcgtt

SEQ ID NO: 4082390 - DNA, 25 bp, Homo sapien
ccgccgttcaggctgctctggatct

SEQ ID NO: 4082391 - DNA, 25 bp, Homo sapien
caggctgctctggatctgcgtgagc

SEQ ID NO: 4082392 - DNA, 25 bp, Homo sapien
tcaggctgctctggatctgcgtgag

SEQ ID NO: 4082393 - DNA, 25 bp, Homo sapien
gctgctctggatctgcgtgagctcc

SEQ ID NO: 4082394 - DNA, 25 bp, Homo sapien
cataaatgagctcacacggacagcc

SEQ ID NO: 4082395 - DNA, 25 bp, Homo sapien
gcttctggcatggccacggctcctt

SEQ ID NO: 4082396 - DNA, 25 bp, Homo sapien
gaaggccggtgccttgcaatgttca

SEQ ID NO: 4082397 - DNA, 25 bp, Homo sapien
cctgtatggagtgagcagctcagaa

SEQ ID NO: 4082398 - DNA, 25 bp, Homo sapien
tgtgggagtaaacgagagacagctc

SEQ ID NO: 4082399 - DNA, 25 bp, Homo sapien
tggagacatccatgaagcagaacgc

SEQ ID NO: 4082400 - DNA, 25 bp, Homo sapien
gaacgcagggtccagaagtgaaccc

SEQ ID NO: 4082401 - DNA, 25 bp, Homo sapien
caaatgggctgtcatctggaaaata

SEQ ID NO: 4082402 - DNA, 25 bp, Homo sapien
gacatgcctccaccgcatccccgag

SEQ ID NO: 4082403 - DNA, 25 bp, Homo sapien
acacctgggtaacaccgacatgcct

SEQ ID NO: 4082404 - DNA, 25 bp, Homo sapien
tcacacctgggtaacaccgacatgc

SEQ ID NO: 4082405 - DNA, 25 bp, Homo sapien
cacatcacacctgggtaacaccgac

SEQ ID NO: 4082406 - DNA, 25 bp, Homo sapien
ctacttctaccagccgcagagtctg

SEQ ID NO: 4082407 - DNA, 25 bp, Homo sapien
acttctaccagccgcagagtctggg

SEQ ID NO: 4082408 - DNA, 25 bp, Homo sapien
ttctaccagccgcagagtctggggc

SEQ ID NO: 4082409 - DNA, 25 bp, Homo sapien
tctaccagccgcagagtctggggct

SEQ ID NO: 4082410 - DNA, 25 bp, Homo sapien
tccagggaaaatccaaccactccaa

SEQ ID NO: 4082411 - DNA, 25 bp, Homo sapien
tgaaaggtagacagtaagcctgggc

SEQ ID NO: 4082412 - DNA, 25 bp, Homo sapien
tagacagtaagcctgggcttcagtc

SEQ ID NO: 4082413 - DNA, 25 bp, Homo sapien
tcttctgtcctctcacggctaggcc

SEQ ID NO: 4082414 - DNA, 25 bp, Homo sapien
ctccgtgaaaggtagacagtaagcc

SEQ ID NO: 4082415 - DNA, 25 bp, Homo sapien
gaattctcactctctcttgctttgt

SEQ ID NO: 4082416 - DNA, 25 bp, Homo sapien
attctcactctctcttgctttgtct

SEQ ID NO: 4082417 - DNA, 25 bp, Homo sapien
tgaattctcactctctcttgctttg

SEQ ID NO: 4082418 - DNA, 25 bp, Homo sapien
cttgaattctcactctctcttgctt

SEQ ID NO: 4082419 - DNA, 25 bp, Homo sapien
cttccaaggtacagctccggcgtgg

SEQ ID NO: 4082420 - DNA, 25 bp, Homo sapien
ttccaaggtacagctccggcgtggc

SEQ ID NO: 4082421 - DNA, 25 bp, Homo sapien
ggtatctgtcctttcataacgagac

SEQ ID NO: 4082422 - DNA, 25 bp, Homo sapien
cattgtcctcgtcttcactgtgatc

SEQ ID NO: 4082423 - DNA, 25 bp, Homo sapien
ccggtatctgtcctttcataacgag

SEQ ID NO: 4082424 - DNA, 25 bp, Homo sapien
cttcagtgatgtaggatgttatctc

SEQ ID NO: 4082425 - DNA, 25 bp, Homo sapien
tgaagtcttgaatgctacagatgaa

SEQ ID NO: 4082426 - DNA, 25 bp, Homo sapien
taaccacgtcaacagcgatggagta

SEQ ID NO: 4082427 - DNA, 25 bp, Homo sapien
taacaataagagatagccaatggaa

SEQ ID NO: 4082428 - DNA, 25 bp, Homo sapien
cagtgctactgccacgaggcagtta

SEQ ID NO: 4082429 - DNA, 25 bp, Homo sapien
gaggcagttagcactcaaaaggtga

SEQ ID NO: 4082430 - DNA, 25 bp, Homo sapien
tctacccttaagagtacagacagtg

SEQ ID NO: 4082431 - DNA, 25 bp, Homo sapien
cattgtcgaattacaaagcgtgttg

SEQ ID NO: 4082432 - DNA, 25 bp, Homo sapien
tagggtcccttgtaagatcaaaatg

SEQ ID NO: 4082433 - DNA, 25 bp, Homo sapien
aacaaacggtggttcctgccaggca

SEQ ID NO: 4082434 - DNA, 25 bp, Homo sapien
ggctgtacccgtatttcaggtgtca

SEQ ID NO: 4082435 - DNA, 25 bp, Homo sapien
tacccgtatttcaggtgtcagtgct

SEQ ID NO: 4082436 - DNA, 25 bp, Homo sapien
aataaggctgtacccgtatttcagg

SEQ ID NO: 4082437 - DNA, 25 bp, Homo sapien
tcaggaataaggctgtacccgtatt

SEQ ID NO: 4082438 - DNA, 25 bp, Homo sapien
cagtgttatactgaatgaaaattac

SEQ ID NO: 4082439 - DNA, 25 bp, Homo sapien
gaccttgttagcattctcagactcc

SEQ ID NO: 4082440 - DNA, 25 bp, Homo sapien
acaaggaactcctcagtgttatact

SEQ ID NO: 4082441 - DNA, 25 bp, Homo sapien
tactgtctccatgaccttgttagca

SEQ ID NO: 4082442 - DNA, 25 bp, Homo sapien
attccacacttgaactcaaacttac

SEQ ID NO: 4082443 - DNA, 25 bp, Homo sapien
ttccacacttgaactcaaacttacc

SEQ ID NO: 4082444 - DNA, 25 bp, Homo sapien
tccacacttgaactcaaacttaccc

SEQ ID NO: 4082445 - DNA, 25 bp, Homo sapien
tatttggtaccgactatgtgcaagc

SEQ ID NO: 4082446 - DNA, 25 bp, Homo sapien
cagtagcttccacaataagtcaagc

SEQ ID NO: 4082447 - DNA, 25 bp, Homo sapien
tcaatctcagttcgtgcctaaaaag

SEQ ID NO: 4082448 - DNA, 25 bp, Homo sapien
ggttactaggtatacaaagcaaatc

SEQ ID NO: 4082449 - DNA, 25 bp, Homo sapien
gaggtctctgtaatggctgtattaa

SEQ ID NO: 4082450 - DNA, 25 bp, Homo sapien
ccttctatctggaggtctctgtaat

SEQ ID NO: 4082451 - DNA, 25 bp, Homo sapien
tactatcattccttctatctggagg

SEQ ID NO: 4082452 - DNA, 25 bp, Homo sapien
gatactatcattccttctatctgga

SEQ ID NO: 4082453 - DNA, 25 bp, Homo sapien
gagctagtggatcatttggaagtga

SEQ ID NO: 4082454 - DNA, 25 bp, Homo sapien
tcagctctagaatttaagtttggtt

SEQ ID NO: 4082455 - DNA, 25 bp, Homo sapien
tgagggtacactctgactttttgga

SEQ ID NO: 4082456 - DNA, 25 bp, Homo sapien
tgaattccttgcactgaatttcact

SEQ ID NO: 4082457 - DNA, 25 bp, Homo sapien
cactggccggaacagggtacactct

SEQ ID NO: 4082458 - DNA, 25 bp, Homo sapien
gccggaacagggtacactcttcctc

SEQ ID NO: 4082459 - DNA, 25 bp, Homo sapien
ctggccggaacagggtacactcttc

SEQ ID NO: 4082460 - DNA, 25 bp, Homo sapien
gtgcactggccggaacagggtacac

SEQ ID NO: 4082461 - DNA, 25 bp, Homo sapien
actgggaactgtgtgcccccccaca

SEQ ID NO: 4082462 - DNA, 25 bp, Homo sapien
ctgggaactgtgtgcccccccacat

SEQ ID NO: 4082463 - DNA, 25 bp, Homo sapien
ctcaggtccaaggtgagcggcgagt

SEQ ID NO: 4082464 - DNA, 25 bp, Homo sapien
ggaaggcgtcgaagcagtaggtctt

SEQ ID NO: 4082465 - DNA, 25 bp, Homo sapien
gggaaggcgtcgaagcagtaggtct

SEQ ID NO: 4082466 - DNA, 25 bp, Homo sapien
ttggggaaggcgtcgaagcagtagg

SEQ ID NO: 4082467 - DNA, 25 bp, Homo sapien
tggggaaggcgtcgaagcagtaggt

SEQ ID NO: 4082468 - DNA, 25 bp, Homo sapien
tgcgggaggggcgtggggcgggtga

SEQ ID NO: 4082469 - DNA, 25 bp, Homo sapien
cgtgccgtggatgatgagcacgggc

SEQ ID NO: 4082470 - DNA, 25 bp, Homo sapien
ctcgtctttcgtgccgtggatgatg

SEQ ID NO: 4082471 - DNA, 25 bp, Homo sapien
tcgtgccgtggatgatgagcacggg

SEQ ID NO: 4082472 - DNA, 25 bp, Homo sapien
gccgtggatgatgagcacgggcgac

SEQ ID NO: 4082473 - DNA, 25 bp, Homo sapien
cagcggctccacagccttggggcag

SEQ ID NO: 4082474 - DNA, 25 bp, Homo sapien
ctttgtgcccggcgccctccaccca

SEQ ID NO: 4082475 - DNA, 25 bp, Homo sapien
ccacagcggctccacagccttgggg

SEQ ID NO: 4082476 - DNA, 25 bp, Homo sapien
cctccacccacagcggctccacagc

SEQ ID NO: 4082477 - DNA, 25 bp, Homo sapien
taggcgctctggctgcgcagctcct

SEQ ID NO: 4082478 - DNA, 25 bp, Homo sapien
ccaggtactggctgtagagctggat

SEQ ID NO: 4082479 - DNA, 25 bp, Homo sapien
ctgggagatgaagcggcgcaggcgc

SEQ ID NO: 4082480 - DNA, 25 bp, Homo sapien
cagctcctgggagatgaagcggcgc

SEQ ID NO: 4082481 - DNA, 25 bp, Homo sapien
ctcacagttactttctggcagtttc

SEQ ID NO: 4082482 - DNA, 25 bp, Homo sapien
ctatacttcagtgtatttcccagac

SEQ ID NO: 4082483 - DNA, 25 bp, Homo sapien
cttcagtgtatttcccagacatata

SEQ ID NO: 4082484 - DNA, 25 bp, Homo sapien
agtgtatttcccagacatatattgt

SEQ ID NO: 4082485 - DNA, 25 bp, Homo sapien
tacttcagtgtatttcccagacata

SEQ ID NO: 4082486 - DNA, 25 bp, Homo sapien
tgtatccgtggagaggtaaaaaaga

SEQ ID NO: 4082487 - DNA, 25 bp, Homo sapien
aaatctgtatccgtggagaggtaaa

SEQ ID NO: 4082488 - DNA, 25 bp, Homo sapien
tctgtatccgtggagaggtaaaaaa

SEQ ID NO: 4082489 - DNA, 25 bp, Homo sapien
ataaaaatctgtatccgtggagagg

SEQ ID NO: 4082490 - DNA, 25 bp, Homo sapien
cagggtccgtcagcgccaggcccat

SEQ ID NO: 4082491 - DNA, 25 bp, Homo sapien
gacaccgctccagggtccgtcagcg

SEQ ID NO: 4082492 - DNA, 25 bp, Homo sapien
tccagggtccgtcagcgccaggccc

SEQ ID NO: 4082493 - DNA, 25 bp, Homo sapien
ctccctcagacaccgctccagggtc

SEQ ID NO: 4082494 - DNA, 25 bp, Homo sapien
tgaggatgcactcgggccagccagt

SEQ ID NO: 4082495 - DNA, 25 bp, Homo sapien
gtgaggatgcactcgggccagccag

SEQ ID NO: 4082496 - DNA, 25 bp, Homo sapien
actcgggccagccagtggctttgcc

SEQ ID NO: 4082497 - DNA, 25 bp, Homo sapien
tgcactcgggccagccagtggcttt

SEQ ID NO: 4082498 - DNA, 25 bp, Homo sapien
gtgtccacgtgcgaccgcagtcgca

SEQ ID NO: 4082499 - DNA, 25 bp, Homo sapien
ccgtgtccacgtgcgaccgcagtcg

SEQ ID NO: 4082500 - DNA, 25 bp, Homo sapien
acccgtgtccacgtgcgaccgcagt

SEQ ID NO: 4082501 - DNA, 25 bp, Homo sapien
tgcaacccgtgtccacgtgcgaccg

SEQ ID NO: 4082502 - DNA, 25 bp, Homo sapien
aactttggttccaatccagcttgaa

SEQ ID NO: 4082503 - DNA, 25 bp, Homo sapien
taaagagctgccatggattctacca

SEQ ID NO: 4082504 - DNA, 25 bp, Homo sapien
attctggaagcactgtaaaattgct

SEQ ID NO: 4082505 - DNA, 25 bp, Homo sapien
agtgaactttggttccaatccagct

SEQ ID NO: 4082506 - DNA, 25 bp, Homo sapien
ctgggagaagactgatatcttcatc

SEQ ID NO: 4082507 - DNA, 25 bp, Homo sapien
tgggagaagactgatatcttcatct

SEQ ID NO: 4082508 - DNA, 25 bp, Homo sapien
ggagaagactgatatcttcatcttt

SEQ ID NO: 4082509 - DNA, 25 bp, Homo sapien
gggagaagactgatatcttcatctt

SEQ ID NO: 4082510 - DNA, 25 bp, Homo sapien
catttcaggattgtcaccacccata

SEQ ID NO: 4082511 - DNA, 25 bp, Homo sapien
ttgtcaccacccatatctgacacgt

SEQ ID NO: 4082512 - DNA, 25 bp, Homo sapien
gaaccagcctcttcatgctcctgtt

SEQ ID NO: 4082513 - DNA, 25 bp, Homo sapien
taaatcttctaagtcctcctggcca

SEQ ID NO: 4082514 - DNA, 25 bp, Homo sapien
gcagccaaggcttttttctaacaac

SEQ ID NO: 4082515 - DNA, 25 bp, Homo sapien
cagccaaggcttttttctaacaact

SEQ ID NO: 4082516 - DNA, 25 bp, Homo sapien
tctaacaactctttttctaaagatg

SEQ ID NO: 4082517 - DNA, 25 bp, Homo sapien
taacaactctttttctaaagatgta

SEQ ID NO: 4082518 - DNA, 25 bp, Homo sapien
ccatccggacagcatggtcaaagtg

SEQ ID NO: 4082519 - DNA, 25 bp, Homo sapien
tggtcaaagtgcaggctctcctcca

SEQ ID NO: 4082520 - DNA, 25 bp, Homo sapien
ccaggaggctcttctctggtctctt

SEQ ID NO: 4082521 - DNA, 25 bp, Homo sapien
cggacagcatggtcaaagtgcaggc

SEQ ID NO: 4082522 - DNA, 25 bp, Homo sapien
caggtgaggacaagtatatacctcc

SEQ ID NO: 4082523 - DNA, 25 bp, Homo sapien
ggacaagtatatacctccagtcacc

SEQ ID NO: 4082524 - DNA, 25 bp, Homo sapien
tgaggacaagtatatacctccagtc

SEQ ID NO: 4082525 - DNA, 25 bp, Homo sapien
tccaggtgaggacaagtatatacct

SEQ ID NO: 4082526 - DNA, 25 bp, Homo sapien
cataggatgggtagggaggtgggga

SEQ ID NO: 4082527 - DNA, 25 bp, Homo sapien
gggaggtggggttggggccacatca

SEQ ID NO: 4082528 - DNA, 25 bp, Homo sapien
ggaggtggggttggggccacatcag

SEQ ID NO: 4082529 - DNA, 25 bp, Homo sapien
ggtggggttggggccacatcagcat

SEQ ID NO: 4082530 - DNA, 25 bp, Homo sapien
gttccttggcctcggccaatttgct

SEQ ID NO: 4082531 - DNA, 25 bp, Homo sapien
ctgttccttggcctcggccaatttg

SEQ ID NO: 4082532 - DNA, 25 bp, Homo sapien
tcggccaatttgctctgtctggttt

SEQ ID NO: 4082533 - DNA, 25 bp, Homo sapien
tccttggcctcggccaatttgctct

SEQ ID NO: 4082534 - DNA, 25 bp, Homo sapien
cactagggttggtctggggatgatg

SEQ ID NO: 4082535 - DNA, 25 bp, Homo sapien
tctttttggtgtcgcttgctgctgt

SEQ ID NO: 4082536 - DNA, 25 bp, Homo sapien
ttgctgctgtaccaacactagggtt

SEQ ID NO: 4082537 - DNA, 25 bp, Homo sapien
ttctttttggtgtcgcttgctgctg

SEQ ID NO: 4082538 - DNA, 25 bp, Homo sapien
tctagctccctccttagggcttcct

SEQ ID NO: 4082539 - DNA, 25 bp, Homo sapien
gatgttggtggcttgccttctgttc

SEQ ID NO: 4082540 - DNA, 25 bp, Homo sapien
tccctccttagggcttcctgatgtt

SEQ ID NO: 4082541 - DNA, 25 bp, Homo sapien
ctccttagggcttcctgatgttggt

SEQ ID NO: 4082542 - DNA, 25 bp, Homo sapien
tgctggctgtagtagagtgccatct

SEQ ID NO: 4082543 - DNA, 25 bp, Homo sapien
tggctgtagtagagtgccatctgaa

SEQ ID NO: 4082544 - DNA, 25 bp, Homo sapien
catgctggctgtagtagagtgccat

SEQ ID NO: 4082545 - DNA, 25 bp, Homo sapien
tgacagcatgctggctgtagtagag

SEQ ID NO: 4082546 - DNA, 25 bp, Homo sapien
ctgcaaacttccatgaatcatgcag

SEQ ID NO: 4082547 - DNA, 25 bp, Homo sapien
cctctcctttgttaactcctcaatg

SEQ ID NO: 4082548 - DNA, 25 bp, Homo sapien
tctcctttgttaactcctcaatgta

SEQ ID NO: 4082549 - DNA, 25 bp, Homo sapien
acagttccagactcagggcgtccct

SEQ ID NO: 4082550 - DNA, 25 bp, Homo sapien
gtgttcctgtacagttccagactca

SEQ ID NO: 4082551 - DNA, 25 bp, Homo sapien
cagattctacaagttgaagtttttc

SEQ ID NO: 4082552 - DNA, 25 bp, Homo sapien
tagctcctttacgttgagctggatc

SEQ ID NO: 4082553 - DNA, 25 bp, Homo sapien
ttttagctcctttacgttgagctgg

SEQ ID NO: 4082554 - DNA, 25 bp, Homo sapien
aggagcttggccctctccagtttcc

SEQ ID NO: 4082555 - DNA, 25 bp, Homo sapien
tggttcaggcggttccacaactcgt

SEQ ID NO: 4082556 - DNA, 25 bp, Homo sapien
tgttgctggttcaggcggttccaca

SEQ ID NO: 4082557 - DNA, 25 bp, Homo sapien
ctgttgctggttcaggcggttccac

SEQ ID NO: 4082558 - DNA, 25 bp, Homo sapien
ggcggttccacaactcgttctcttc

SEQ ID NO: 4082559 - DNA, 25 bp, Homo sapien
ctgctctcgtatcttctcctcctgc

SEQ ID NO: 4082560 - DNA, 25 bp, Homo sapien
tcctcctgctctcgtatcttctcct

SEQ ID NO: 4082561 - DNA, 25 bp, Homo sapien
atcttctcctcctgctctcgtatct

SEQ ID NO: 4082562 - DNA, 25 bp, Homo sapien
cctcctgctctcgtatcttctcctt

SEQ ID NO: 4082563 - DNA, 25 bp, Homo sapien
ttctcctcctgctctcgtatcttct

SEQ ID NO: 4082564 - DNA, 25 bp, Homo sapien
cttcctgttcctgcatcatctcctc

SEQ ID NO: 4082565 - DNA, 25 bp, Homo sapien
ctgctctcgtatcttctcctcctgc

SEQ ID NO: 4082566 - DNA, 25 bp, Homo sapien
tgctcccacatcttctcttcctgtt

SEQ ID NO: 4082567 - DNA, 25 bp, Homo sapien
ctgttcttgcatcttctcttcctgc

SEQ ID NO: 4082568 - DNA, 25 bp, Homo sapien
tcagcctcttggctcttcagctcca

SEQ ID NO: 4082569 - DNA, 25 bp, Homo sapien
cagcctcttggctcttcagctccac

SEQ ID NO: 4082570 - DNA, 25 bp, Homo sapien
ctgcagactcagcctcttggctctt

SEQ ID NO: 4082571 - DNA, 25 bp, Homo sapien
cagactcagcctcttggctcttcag

SEQ ID NO: 4082572 - DNA, 25 bp, Homo sapien
gacccaggtaatggtctcgctgctg

SEQ ID NO: 4082573 - DNA, 25 bp, Homo sapien
caggtgacccaggtaatggtctcgc

SEQ ID NO: 4082574 - DNA, 25 bp, Homo sapien
tgacccaggtaatggtctcgctgct

SEQ ID NO: 4082575 - DNA, 25 bp, Homo sapien
ggtgacccaggtaatggtctcgctg

SEQ ID NO: 4082576 - DNA, 25 bp, Homo sapien
ccagctgctgataggcggccacgta

SEQ ID NO: 4082577 - DNA, 25 bp, Homo sapien
tcagaggccagctgctgataggcgg

SEQ ID NO: 4082578 - DNA, 25 bp, Homo sapien
aggccagctgctgataggcggccac

SEQ ID NO: 4082579 - DNA, 25 bp, Homo sapien
cagaggccagctgctgataggcggc

SEQ ID NO: 4082580 - DNA, 25 bp, Homo sapien
cttgctgccggcttttacatgttta

SEQ ID NO: 4082581 - DNA, 25 bp, Homo sapien
ggcttactcttctccaggccttgct

SEQ ID NO: 4082582 - DNA, 25 bp, Homo sapien
attctaaacagtcacatggcggctt

SEQ ID NO: 4082583 - DNA, 25 bp, Homo sapien
catggcggcttactcttctccaggc

SEQ ID NO: 4082584 - DNA, 25 bp, Homo sapien
gatctgcccttactccaattgtgtg

SEQ ID NO: 4082585 - DNA, 25 bp, Homo sapien
caaagtagatgaaggcgatctgccc

SEQ ID NO: 4082586 - DNA, 25 bp, Homo sapien
tgaatgtttggcactctcacagggc

SEQ ID NO: 4082587 - DNA, 25 bp, Homo sapien
cctaatgagaatttgggtcccagga

SEQ ID NO: 4082588 - DNA, 25 bp, Homo sapien
tgattggtcaacagtagagggctaa

SEQ ID NO: 4082589 - DNA, 25 bp, Homo sapien
tttaaaagacagatgggccggatgc

SEQ ID NO: 4082590 - DNA, 25 bp, Homo sapien
tcaaaatgtaaaccagacctgtgca

SEQ ID NO: 4082591 - DNA, 25 bp, Homo sapien
gacagtctgtagtgctttcccacat

SEQ ID NO: 4082592 - DNA, 25 bp, Homo sapien
agatgctggggggacatcataaccc

SEQ ID NO: 4082593 - DNA, 25 bp, Homo sapien
gagatgctggggggacatcataacc

SEQ ID NO: 4082594 - DNA, 25 bp, Homo sapien
agagatgctggggggacatcataac

SEQ ID NO: 4082595 - DNA, 25 bp, Homo sapien
gatgctggggggacatcataacccc

SEQ ID NO: 4082596 - DNA, 25 bp, Homo sapien
agatgctggggggacatcataaccc

SEQ ID NO: 4082597 - DNA, 25 bp, Homo sapien
agagatgctggggggacatcataac

SEQ ID NO: 4082598 - DNA, 25 bp, Homo sapien
gagatgctggggggacatcataacc

SEQ ID NO: 4082599 - DNA, 25 bp, Homo sapien
gatgctggggggacatcataacccc

SEQ ID NO: 4082600 - DNA, 25 bp, Homo sapien
agatgctggggggacatcataaccc

SEQ ID NO: 4082601 - DNA, 25 bp, Homo sapien
gagatgctggggggacatcataacc

SEQ ID NO: 4082602 - DNA, 25 bp, Homo sapien
agagatgctggggggacatcataac

SEQ ID NO: 4082603 - DNA, 25 bp, Homo sapien
gatgctggggggacatcataacccc

SEQ ID NO: 4082604 - DNA, 25 bp, Homo sapien
agatgctggggggacatcataaccc

SEQ ID NO: 4082605 - DNA, 25 bp, Homo sapien
agagatgctggggggacatcataac

SEQ ID NO: 4082606 - DNA, 25 bp, Homo sapien
gatgctggggggacatcataacccc

SEQ ID NO: 4082607 - DNA, 25 bp, Homo sapien
gagatgctggggggacatcataacc

SEQ ID NO: 4082608 - DNA, 25 bp, Homo sapien
ctgtcgcgcgagagctcgggctcct

SEQ ID NO: 4082609 - DNA, 25 bp, Homo sapien
cgcgtctaacgaattggtgcctgtc

SEQ ID NO: 4082610 - DNA, 25 bp, Homo sapien
attggtgcctgtcgcgcgagagctc

SEQ ID NO: 4082611 - DNA, 25 bp, Homo sapien
ctgcagcgcgcgtctaacgaattgg

SEQ ID NO: 4082612 - DNA, 25 bp, Homo sapien
ctgaagttggaccaggcgaagttta

SEQ ID NO: 4082613 - DNA, 25 bp, Homo sapien
aggccggcgacaccccggacgagct

SEQ ID NO: 4082614 - DNA, 25 bp, Homo sapien
agtttagggcgagctggaagttggg

SEQ ID NO: 4082615 - DNA, 25 bp, Homo sapien
gggtctgcctcgtcctggaggccgg

SEQ ID NO: 4082616 - DNA, 25 bp, Homo sapien
tgtggctgttgacatccaagaaacg

SEQ ID NO: 4082617 - DNA, 25 bp, Homo sapien
tctattttgtggctgttgacatcca

SEQ ID NO: 4082618 - DNA, 25 bp, Homo sapien
tattttgtggctgttgacatccaag

SEQ ID NO: 4082619 - DNA, 25 bp, Homo sapien
tgttgacatccaagaaacgatgaaa

SEQ ID NO: 4082620 - DNA, 25 bp, Homo sapien
gcttagatcagaatgaatgacaaat

SEQ ID NO: 4082621 - DNA, 25 bp, Homo sapien
catttagaaattcctccgttaatct

SEQ ID NO: 4082622 - DNA, 25 bp, Homo sapien
tttcctttatactgggaagtggtgc

SEQ ID NO: 4082623 - DNA, 25 bp, Homo sapien
taatctcttccaactagcagctttg

SEQ ID NO: 4082624 - DNA, 25 bp, Homo sapien
gaagaagtgacagtatggaataatg

SEQ ID NO: 4082625 - DNA, 25 bp, Homo sapien
cacagaagaagtgacagtatggaat

SEQ ID NO: 4082626 - DNA, 25 bp, Homo sapien
agacacagaagaagtgacagtatgg

SEQ ID NO: 4082627 - DNA, 25 bp, Homo sapien
gaagtgacagtatggaataatgtgc

SEQ ID NO: 4082628 - DNA, 25 bp, Homo sapien
atttcttggtgtctccacataactg

SEQ ID NO: 4082629 - DNA, 25 bp, Homo sapien
tatttcttggtgtctccacataact

SEQ ID NO: 4082630 - DNA, 25 bp, Homo sapien
taaaatgtaacagaagaacttcatt

SEQ ID NO: 4082631 - DNA, 25 bp, Homo sapien
ctaaaatgtaacagaagaacttcat

SEQ ID NO: 4082632 - DNA, 25 bp, Homo sapien
catgtacggaccaatgtccatttct

SEQ ID NO: 4082633 - DNA, 25 bp, Homo sapien
tccccagtcgaaatcatctttcttt

SEQ ID NO: 4082634 - DNA, 25 bp, Homo sapien
atcaagtattttccccagtcgaaat

SEQ ID NO: 4082635 - DNA, 25 bp, Homo sapien
tggtgtgtccatgtacggaccaatg

SEQ ID NO: 4082636 - DNA, 25 bp, Homo sapien
actgatacaaggatccagttttctg

SEQ ID NO: 4082637 - DNA, 25 bp, Homo sapien
tacctgaattccagagtcctctctg

SEQ ID NO: 4082638 - DNA, 25 bp, Homo sapien
tgatcttgttcttctaacggtgtcc

SEQ ID NO: 4082639 - DNA, 25 bp, Homo sapien
gcttaagggctgttgatcattttcc

SEQ ID NO: 4082640 - DNA, 25 bp, Homo sapien
tgggggggaagagcaaagtgggctg

SEQ ID NO: 4082641 - DNA, 25 bp, Homo sapien
cagcagctaaattagagtgcaaatg

SEQ ID NO: 4082642 - DNA, 25 bp, Homo sapien
gctaaattagagtgcaaatgtaaac

SEQ ID NO: 4082643 - DNA, 25 bp, Homo sapien
tccagtactgatggaccacatgatg

SEQ ID NO: 4082644 - DNA, 25 bp, Homo sapien
ccacatgatgttccagccagcttcg

SEQ ID NO: 4082645 - DNA, 25 bp, Homo sapien
catagggtttcccgaataacctgag

SEQ ID NO: 4082646 - DNA, 25 bp, Homo sapien
ggtttcccgaataacctgagtctca

SEQ ID NO: 4082647 - DNA, 25 bp, Homo sapien
ttcccatctatcaactgaaatataa

SEQ ID NO: 4082648 - DNA, 25 bp, Homo sapien
tcccatctatcaactgaaatataaa

SEQ ID NO: 4082649 - DNA, 25 bp, Homo sapien
cttcccatctatcaactgaaatata

SEQ ID NO: 4082650 - DNA, 25 bp, Homo sapien
aaatgagttactataatattgtttc

SEQ ID NO: 4082651 - DNA, 25 bp, Homo sapien
tactataatattgtttctcacagtt

SEQ ID NO: 4082652 - DNA, 25 bp, Homo sapien
tgagttactataatattgtttctca

SEQ ID NO: 4082653 - DNA, 25 bp, Homo sapien
gttactataatattgtttctcacag

SEQ ID NO: 4082654 - DNA, 25 bp, Homo sapien
aactgcaattattcaaaggtggtct

SEQ ID NO: 4082655 - DNA, 25 bp, Homo sapien
tttccctctcgctgtaaaatacttc

SEQ ID NO: 4082656 - DNA, 25 bp, Homo sapien
attcaaaggtggtcttctgtaaaca

SEQ ID NO: 4082657 - DNA, 25 bp, Homo sapien
gcaattattcaaaggtggtcttctg

SEQ ID NO: 4082658 - DNA, 25 bp, Homo sapien
ctcctggagtcgaaacacaacctgg

SEQ ID NO: 4082659 - DNA, 25 bp, Homo sapien
tctaaagggagcttcagttgacttc

SEQ ID NO: 4082660 - DNA, 25 bp, Homo sapien
gctctcagaactgtgtcccatgact

SEQ ID NO: 4082661 - DNA, 25 bp, Homo sapien
gttccagcacagatcgtaaacagct

SEQ ID NO: 4082662 - DNA, 25 bp, Homo sapien
gtatgagtaaagatgaagaacattt

SEQ ID NO: 4082663 - DNA, 25 bp, Homo sapien
gtgtagtatgagtaaagatgaagaa

SEQ ID NO: 4082664 - DNA, 25 bp, Homo sapien
atgagtaaagatgaagaacatttaa

SEQ ID NO: 4082665 - DNA, 25 bp, Homo sapien
gtagtatgagtaaagatgaagaaca

SEQ ID NO: 4082666 - DNA, 25 bp, Homo sapien
aaggatgcgtaagaagccaaggacc

SEQ ID NO: 4082667 - DNA, 25 bp, Homo sapien
gagaactacttatctgctaggcaac

SEQ ID NO: 4082668 - DNA, 25 bp, Homo sapien
ctcactgcctgtgtacgataacgga

SEQ ID NO: 4082669 - DNA, 25 bp, Homo sapien
tggtcagatgcagtataatcccagc

SEQ ID NO: 4082670 - DNA, 25 bp, Homo sapien
aaactcaacagcaaggaaaaataca

SEQ ID NO: 4082671 - DNA, 25 bp, Homo sapien
ataaatcaaactcaacagcaaggaa

SEQ ID NO: 4082672 - DNA, 25 bp, Homo sapien
actcaacagcaaggaaaaatacatg

SEQ ID NO: 4082673 - DNA, 25 bp, Homo sapien
atcaataaatcaaactcaacagcaa

SEQ ID NO: 4082674 - DNA, 25 bp, Homo sapien
aaacactttgtgcagaaccttgagc

SEQ ID NO: 4082675 - DNA, 25 bp, Homo sapien
gagaggcccggacgacatttcgagt

SEQ ID NO: 4082676 - DNA, 25 bp, Homo sapien
ggtggaacttctgctactccagtac

SEQ ID NO: 4082677 - DNA, 25 bp, Homo sapien
gagctgagacaatcgaggtgccaac

SEQ ID NO: 4082678 - DNA, 25 bp, Homo sapien
agagagtgtgcacggtcagctctca

SEQ ID NO: 4082679 - DNA, 25 bp, Homo sapien
gcagagagtgtgcacggtcagctct

SEQ ID NO: 4082680 - DNA, 25 bp, Homo sapien
gagtgtgcacggtcagctctcaggg

SEQ ID NO: 4082681 - DNA, 25 bp, Homo sapien
agagtgtgcacggtcagctctcagg

SEQ ID NO: 4082682 - DNA, 25 bp, Homo sapien
aggtgcccgtgcacgatccactcgt

SEQ ID NO: 4082683 - DNA, 25 bp, Homo sapien
cactcgtccaccgtctgcaggtaag

SEQ ID NO: 4082684 - DNA, 25 bp, Homo sapien
tccaccgtctgcaggtaaggccgca

SEQ ID NO: 4082685 - DNA, 25 bp, Homo sapien
gtctgcaggtaaggccgcaccgttt

SEQ ID NO: 4082686 - DNA, 25 bp, Homo sapien
gtaagttgcataccagaagtctctg

SEQ ID NO: 4082687 - DNA, 25 bp, Homo sapien
gaagtctctgtgattaactggaaca

SEQ ID NO: 4082688 - DNA, 25 bp, Homo sapien
tggtcactgccggaactcgcactag

SEQ ID NO: 4082689 - DNA, 25 bp, Homo sapien
tacgctatataacgtgtaagttgca

SEQ ID NO: 4082690 - DNA, 25 bp, Homo sapien
agcagctgcatcgacttgccagcca

SEQ ID NO: 4082691 - DNA, 25 bp, Homo sapien
gcaggtggtgctctccgcacactgc

SEQ ID NO: 4082692 - DNA, 25 bp, Homo sapien
tgctctccgcacactgcaggttctt

SEQ ID NO: 4082693 - DNA, 25 bp, Homo sapien
ctgcatcgacttgccagccattatg

SEQ ID NO: 4082694 - DNA, 25 bp, Homo sapien
taatggcaagcagtggatcatgaac

SEQ ID NO: 4082695 - DNA, 25 bp, Homo sapien
gaacctgtggagtggaatcttctcc

SEQ ID NO: 4082696 - DNA, 25 bp, Homo sapien
cctgttgctcagtaagaacctgtgg

SEQ ID NO: 4082697 - DNA, 25 bp, Homo sapien
ttctccatgtcgaagacgggactgt

SEQ ID NO: 4082698 - DNA, 25 bp, Homo sapien
aatgatgccatttcaattactgata

SEQ ID NO: 4082699 - DNA, 25 bp, Homo sapien
tgtttttagccctacctgccagaaa

SEQ ID NO: 4082700 - DNA, 25 bp, Homo sapien
tagcaaacattgcacaaatgatgcc

SEQ ID NO: 4082701 - DNA, 25 bp, Homo sapien
aaggatagcctacaagagtttttgt

SEQ ID NO: 4082702 - DNA, 25 bp, Homo sapien
tgaagtaggtgagcacaacatcttg

SEQ ID NO: 4082703 - DNA, 25 bp, Homo sapien
gacatggaatccaaactatacacct

SEQ ID NO: 4082704 - DNA, 25 bp, Homo sapien
caaaagttgtaccacatggtggcag

SEQ ID NO: 4082705 - DNA, 25 bp, Homo sapien
taaaagcagcttaagcccaggacat

SEQ ID NO: 4082706 - DNA, 25 bp, Homo sapien
caggatctcagcgttaattcaaaag

SEQ ID NO: 4082707 - DNA, 25 bp, Homo sapien
gcttgtcaatatgaggatagaggca

SEQ ID NO: 4082708 - DNA, 25 bp, Homo sapien
gtctggcatgtcacagattccgatg

SEQ ID NO: 4082709 - DNA, 25 bp, Homo sapien
ccagcaaacttctcgtgaaagtcac

SEQ ID NO: 4082710 - DNA, 25 bp, Homo sapien
tatcaaaaattgacgtgtagaagtc

SEQ ID NO: 4082711 - DNA, 25 bp, Homo sapien
tcatacatggtatctcctccttcca

SEQ ID NO: 4082712 - DNA, 25 bp, Homo sapien
tgtagaagtcatacatggtatctcc

SEQ ID NO: 4082713 - DNA, 25 bp, Homo sapien
aattgacgtgtagaagtcatacatg

SEQ ID NO: 4082714 - DNA, 25 bp, Homo sapien
gcatagggatgagtggtggaagtca

SEQ ID NO: 4082715 - DNA, 25 bp, Homo sapien
gagcatagggatgagtggtggaagt

SEQ ID NO: 4082716 - DNA, 25 bp, Homo sapien
gggagcatagggatgagtggtggaa

SEQ ID NO: 4082717 - DNA, 25 bp, Homo sapien
catagggatgagtggtggaagtcac

SEQ ID NO: 4082718 - DNA, 25 bp, Homo sapien
gctgagggtcagaccatctaagata

SEQ ID NO: 4082719 - DNA, 25 bp, Homo sapien
tgtagctgagggtcagaccatctaa

SEQ ID NO: 4082720 - DNA, 25 bp, Homo sapien
tagctgagggtcagaccatctaaga

SEQ ID NO: 4082721 - DNA, 25 bp, Homo sapien
gagggtcagaccatctaagatatga

SEQ ID NO: 4082722 - DNA, 25 bp, Homo sapien
gcccactttatttgcaataagagaa

SEQ ID NO: 4082723 - DNA, 25 bp, Homo sapien
catccagactatattttgcccactt

SEQ ID NO: 4082724 - DNA, 25 bp, Homo sapien
taacaatgtccacgggccatgggac

SEQ ID NO: 4082725 - DNA, 25 bp, Homo sapien
ccaaaaagtaaaacatccagactat

SEQ ID NO: 4082726 - DNA, 25 bp, Homo sapien
tgttcatgtataaggccttctttaa

SEQ ID NO: 4082727 - DNA, 25 bp, Homo sapien
ttgttcatgtataaggccttcttta

SEQ ID NO: 4082728 - DNA, 25 bp, Homo sapien
cgatgaatctgctgtcttactggtt

SEQ ID NO: 4082729 - DNA, 25 bp, Homo sapien
cactcttaagaggaacatgcgatga

SEQ ID NO: 4082730 - DNA, 25 bp, Homo sapien
cctggtcatgatgtagttgtgcaag

SEQ ID NO: 4082731 - DNA, 25 bp, Homo sapien
tgttcacgaaatgcatgagcttcac

SEQ ID NO: 4082732 - DNA, 25 bp, Homo sapien
tataaacatagtatgagtaattctc

SEQ ID NO: 4082733 - DNA, 25 bp, Homo sapien
gatacgacgatagaactgaagcaga

SEQ ID NO: 4082734 - DNA, 25 bp, Homo sapien
tacgaacaactgtatagatacgacg

SEQ ID NO: 4082735 - DNA, 25 bp, Homo sapien
gagtaattctctacgaacaactgta

SEQ ID NO: 4082736 - DNA, 25 bp, Homo sapien
taatgaaggccaaccttgtgaaggc

SEQ ID NO: 4082737 - DNA, 25 bp, Homo sapien
aaaaagtctataacctggctgcatc

SEQ ID NO: 4082738 - DNA, 25 bp, Homo sapien
tttcagaactcacagaccaggtata

SEQ ID NO: 4082739 - DNA, 25 bp, Homo sapien
ggcttcagtggctcacttcacccaa

SEQ ID NO: 4082740 - DNA, 25 bp, Homo sapien
tgaatgaacgccaaactctggacta

SEQ ID NO: 4082741 - DNA, 25 bp, Homo sapien
tgtaggacgcccacttgcacagtga

SEQ ID NO: 4082742 - DNA, 25 bp, Homo sapien
tcaaaggctggctggatactctggc

SEQ ID NO: 4082743 - DNA, 25 bp, Homo sapien
ggactaacagacttcctggcaggaa

SEQ ID NO: 4082744 - DNA, 25 bp, Homo sapien
tcgacttgatgttgaaactccagcc

SEQ ID NO: 4082745 - DNA, 25 bp, Homo sapien
gacaccggtcatggatggttgacag

SEQ ID NO: 4082746 - DNA, 25 bp, Homo sapien
gacagatacctatagtgaattttaa

SEQ ID NO: 4082747 - DNA, 25 bp, Homo sapien
ccttggcttcctcgacttgatgttg

SEQ ID NO: 4082748 - DNA, 25 bp, Homo sapien
aaattccaaagcacgcagacagcgc

SEQ ID NO: 4082749 - DNA, 25 bp, Homo sapien
gggcatttgtttgtaacctcatttc

SEQ ID NO: 4082750 - DNA, 25 bp, Homo sapien
caccatgtctgctaatctttttaac

SEQ ID NO: 4082751 - DNA, 25 bp, Homo sapien
tacaggacagaagcttaatcatcat

SEQ ID NO: 4082752 - DNA, 25 bp, Homo sapien
ctgccaaccgtctgcaaacatgaga

SEQ ID NO: 4082753 - DNA, 25 bp, Homo sapien
caaccgtctgcaaacatgagagcca

SEQ ID NO: 4082754 - DNA, 25 bp, Homo sapien
tgccaaccgtctgcaaacatgagag

SEQ ID NO: 4082755 - DNA, 25 bp, Homo sapien
cgtctgcaaacatgagagccaagtt

SEQ ID NO: 4082756 - DNA, 25 bp, Homo sapien
aaggatcctctacagacggctttgt

SEQ ID NO: 4082757 - DNA, 25 bp, Homo sapien
ggaaaggatcctctacagacggctt

SEQ ID NO: 4082758 - DNA, 25 bp, Homo sapien
ctacagacggctttgtttaaaatgg

SEQ ID NO: 4082759 - DNA, 25 bp, Homo sapien
gatcctctacagacggctttgttta

SEQ ID NO: 4082760 - DNA, 25 bp, Homo sapien
tcttcatgggatcagtaacaaaaca

SEQ ID NO: 4082761 - DNA, 25 bp, Homo sapien
ccagaaagtaagatcctcaggctta

SEQ ID NO: 4082762 - DNA, 25 bp, Homo sapien
cacctcaccgtaatgcttaaaaagc

SEQ ID NO: 4082763 - DNA, 25 bp, Homo sapien
catgggacaactgctaagggacttt

SEQ ID NO: 4082764 - DNA, 25 bp, Homo sapien
ccatgagtgacaacgctagagattc

SEQ ID NO: 4082765 - DNA, 25 bp, Homo sapien
catgagtgacaacgctagagattcc

SEQ ID NO: 4082766 - DNA, 25 bp, Homo sapien
atgagtgacaacgctagagattcca

SEQ ID NO: 4082767 - DNA, 25 bp, Homo sapien
ggagatatttattacgctgaagaca

SEQ ID NO: 4082768 - DNA, 25 bp, Homo sapien
caaagtcggagatatttattacgct

SEQ ID NO: 4082769 - DNA, 25 bp, Homo sapien
catggtggaaatgtacatgtatgat

SEQ ID NO: 4082770 - DNA, 25 bp, Homo sapien
catgtatgatgacaaagtcggagat

SEQ ID NO: 4082771 - DNA, 25 bp, Homo sapien
gaaaacccacctacaatccatctgt

SEQ ID NO: 4082772 - DNA, 25 bp, Homo sapien
gtaggaaatgtaagagtaaacagcc

SEQ ID NO: 4082773 - DNA, 25 bp, Homo sapien
atgagcgactgtgccaggctgactg

SEQ ID NO: 4082774 - DNA, 25 bp, Homo sapien
catctgtctggactgtgggcaagtg

SEQ ID NO: 4082775 - DNA, 25 bp, Homo sapien
tacatctaagacaacttttagggaa

SEQ ID NO: 4082776 - DNA, 25 bp, Homo sapien
ctaggacagctacatctaagacaac

SEQ ID NO: 4082777 - DNA, 25 bp, Homo sapien
cagctacatctaagacaacttttag

SEQ ID NO: 4082778 - DNA, 25 bp, Homo sapien
ggacagctacatctaagacaacttt

SEQ ID NO: 4082779 - DNA, 25 bp, Homo sapien
aatagtatgtaccaacagttggccc

SEQ ID NO: 4082780 - DNA, 25 bp, Homo sapien
ggaaataccaaacaatagtatgtac

SEQ ID NO: 4082781 - DNA, 25 bp, Homo sapien
tacatttatcgctatcagttgaagc

SEQ ID NO: 4082782 - DNA, 25 bp, Homo sapien
cagttggccctaagtgaagttggcc

SEQ ID NO: 4082783 - DNA, 25 bp, Homo sapien
caaaatataactggttagctcacaa

SEQ ID NO: 4082784 - DNA, 25 bp, Homo sapien
aaaatataactggttagctcacaaa

SEQ ID NO: 4082785 - DNA, 25 bp, Homo sapien
ttcaaaatataactggttagctcac

SEQ ID NO: 4082786 - DNA, 25 bp, Homo sapien
tcaaaatataactggttagctcaca

SEQ ID NO: 4082787 - DNA, 25 bp, Homo sapien
caccgtgctcggccccttttttgat

SEQ ID NO: 4082788 - DNA, 25 bp, Homo sapien
cccatgtttgcttctagaagctttc

SEQ ID NO: 4082789 - DNA, 25 bp, Homo sapien
tgtctaccccaagtttgtagtgtta

SEQ ID NO: 4082790 - DNA, 25 bp, Homo sapien
ttgtagtgttaatttcccatgtttg

SEQ ID NO: 4082791 - DNA, 25 bp, Homo sapien
tacagataggatagggcgatgtgca

SEQ ID NO: 4082792 - DNA, 25 bp, Homo sapien
ggcacttattcgtaaagccactata

SEQ ID NO: 4082793 - DNA, 25 bp, Homo sapien
gcagcacggccttagcttttccaca

SEQ ID NO: 4082794 - DNA, 25 bp, Homo sapien
tcaagcagtttgagactcatccaag

SEQ ID NO: 4082795 - DNA, 25 bp, Homo sapien
caacaggcagccctatggaaactga

SEQ ID NO: 4082796 - DNA, 25 bp, Homo sapien
caattaactgtgtaagagcaaagcc

SEQ ID NO: 4082797 - DNA, 25 bp, Homo sapien
tgctgtagcaaaacctaacaggtgg

SEQ ID NO: 4082798 - DNA, 25 bp, Homo sapien
gcagcaagtccacgattatccacag

SEQ ID NO: 4082799 - DNA, 25 bp, Homo sapien
tagtgatagggtcttgagcaccgtc

SEQ ID NO: 4082800 - DNA, 25 bp, Homo sapien
aaaagtttgaggatgggccacctgg

SEQ ID NO: 4082801 - DNA, 25 bp, Homo sapien
tgagaagaattgcagtcgtacgacc

SEQ ID NO: 4082802 - DNA, 25 bp, Homo sapien
ttaggtaccggacagcaaaggaggc

SEQ ID NO: 4082803 - DNA, 25 bp, Homo sapien
ttccttcctgatgcagtccacatgg

SEQ ID NO: 4082804 - DNA, 25 bp, Homo sapien
cttcctgatgcagtccacatggctt

SEQ ID NO: 4082805 - DNA, 25 bp, Homo sapien
tccttcctgatgcagtccacatggc

SEQ ID NO: 4082806 - DNA, 25 bp, Homo sapien
ctttccttcctgatgcagtccacat

SEQ ID NO: 4082807 - DNA, 25 bp, Homo sapien
taaaaatagaacaattgtagtggta

SEQ ID NO: 4082808 - DNA, 25 bp, Homo sapien
aataaattagacacagtaagacatt

SEQ ID NO: 4082809 - DNA, 25 bp, Homo sapien
ataaataaattagacacagtaagac

SEQ ID NO: 4082810 - DNA, 25 bp, Homo sapien
acacagtaagacattaacaataata

SEQ ID NO: 4082811 - DNA, 25 bp, Homo sapien
gaagacttcaagctgttactgacag

SEQ ID NO: 4082812 - DNA, 25 bp, Homo sapien
agtacacacaggtcggtaatcccag

SEQ ID NO: 4082813 - DNA, 25 bp, Homo sapien
tgaaaggacagatagtagcacactc

SEQ ID NO: 4082814 - DNA, 25 bp, Homo sapien
gacccctggtggatgtctgaaagga

SEQ ID NO: 4082815 - DNA, 25 bp, Homo sapien
gcctgcgggaaccagggacaaatcc

SEQ ID NO: 4082816 - DNA, 25 bp, Homo sapien
gccccattgcctgcgggaaccaggg

SEQ ID NO: 4082817 - DNA, 25 bp, Homo sapien
aggtcggcgcgcagagcccgctggg

SEQ ID NO: 4082818 - DNA, 25 bp, Homo sapien
tgcgctcgtcgggagggttccaggc

SEQ ID NO: 4082819 - DNA, 25 bp, Homo sapien
ggagcgcgaaggaacggggtccgca

SEQ ID NO: 4082820 - DNA, 25 bp, Homo sapien
ggagcggagcgggcgtggggtcctc

SEQ ID NO: 4082821 - DNA, 25 bp, Homo sapien
ctgcgggtccgtccggttcggagcg

SEQ ID NO: 4082822 - DNA, 25 bp, Homo sapien
ggtcaccgcagcctgcgcgggacgg

SEQ ID NO: 4082823 - DNA, 25 bp, Homo sapien
ccctgggagtttccttggccgagtg

SEQ ID NO: 4082824 - DNA, 25 bp, Homo sapien
ccttggccgagtgagtcactcgggc

SEQ ID NO: 4082825 - DNA, 25 bp, Homo sapien
cgggctggccgggaatgcgccagga

SEQ ID NO: 4082826 - DNA, 25 bp, Homo sapien
cgggaatgcgccaggaaacactcgg

SEQ ID NO: 4082827 - DNA, 25 bp, Homo sapien
ctggagcccgggaggcgcgggagcc

SEQ ID NO: 4082828 - DNA, 25 bp, Homo sapien
tggagcccgggaggcgcgggagccc

SEQ ID NO: 4082829 - DNA, 25 bp, Homo sapien
tattccttcgccactggagctgtgc

SEQ ID NO: 4082830 - DNA, 25 bp, Homo sapien
gctgtgccatgtgccggggcgcgga

SEQ ID NO: 4082831 - DNA, 25 bp, Homo sapien
taaggtattccttcgccactggagc

SEQ ID NO: 4082832 - DNA, 25 bp, Homo sapien
tcaaacactaaggtattccttcgcc

SEQ ID NO: 4082833 - DNA, 25 bp, Homo sapien
cttcctcaaaagtgacaatggcctg

SEQ ID NO: 4082834 - DNA, 25 bp, Homo sapien
cctgaatacctgaagcactggctct

SEQ ID NO: 4082835 - DNA, 25 bp, Homo sapien
tatggactacaatgggcaggtcacc

SEQ ID NO: 4082836 - DNA, 25 bp, Homo sapien
ctctagcatcggttgggacacggga

SEQ ID NO: 4082837 - DNA, 25 bp, Homo sapien
taacagggataacgaattaggcttc

SEQ ID NO: 4082838 - DNA, 25 bp, Homo sapien
gatgcatgactgtgattccttggaa

SEQ ID NO: 4082839 - DNA, 25 bp, Homo sapien
gatcaaaggcgataatgaagagccc

SEQ ID NO: 4082840 - DNA, 25 bp, Homo sapien
taggcttccctagtagcggacacac

SEQ ID NO: 4082841 - DNA, 25 bp, Homo sapien
catttcagcgggctcgtgctctggg

SEQ ID NO: 4082842 - DNA, 25 bp, Homo sapien
tctgggatgtcccaggcaccttgcc

SEQ ID NO: 4082843 - DNA, 25 bp, Homo sapien
gtcccaggcaccttgccggagacgt

SEQ ID NO: 4082844 - DNA, 25 bp, Homo sapien
gtggtctgtgccttcgggtgcccca

SEQ ID NO: 4082845 - DNA, 25 bp, Homo sapien
catctttcacccgaatccagtgcat

SEQ ID NO: 4082846 - DNA, 25 bp, Homo sapien
ttaaggagtgctcctcgacgacggc

SEQ ID NO: 4082847 - DNA, 25 bp, Homo sapien
gggcaacacacagacagcataaaca

SEQ ID NO: 4082848 - DNA, 25 bp, Homo sapien
tcgacgacggccattccttcatctt

SEQ ID NO: 4082849 - DNA, 25 bp, Homo sapien
aagggcagtgcctacagggcatgct

SEQ ID NO: 4082850 - DNA, 25 bp, Homo sapien
ggttcccagtgccacccacttgaag

SEQ ID NO: 4082851 - DNA, 25 bp, Homo sapien
atcgtggaaccccagatgggcttca

SEQ ID NO: 4082852 - DNA, 25 bp, Homo sapien
cagatgggcttcaagggacccacgg

SEQ ID NO: 4082853 - DNA, 25 bp, Homo sapien
catcttccatagatgcgaatctgca

SEQ ID NO: 4082854 - DNA, 25 bp, Homo sapien
caagggctctccgtccgtgcatctt

SEQ ID NO: 4082855 - DNA, 25 bp, Homo sapien
tgcatcttccatagatgcgaatctg

SEQ ID NO: 4082856 - DNA, 25 bp, Homo sapien
ctctccgtccgtgcatcttccatag

SEQ ID NO: 4082857 - DNA, 25 bp, Homo sapien
cccagatagtgccaggagaggcctg

SEQ ID NO: 4082858 - DNA, 25 bp, Homo sapien
aggctgcctgaggacgtgcttcggc

SEQ ID NO: 4082859 - DNA, 25 bp, Homo sapien
gggcgtgtccagtcatgcccgggcc

SEQ ID NO: 4082860 - DNA, 25 bp, Homo sapien
ccagagtcccgcagtctgccctttc

SEQ ID NO: 4082861 - DNA, 25 bp, Homo sapien
ctggaacaacacataaggacccctg

SEQ ID NO: 4082862 - DNA, 25 bp, Homo sapien
tggaacaacacataaggacccctgt

SEQ ID NO: 4082863 - DNA, 25 bp, Homo sapien
ccacgttggacagcgcgtcctccag

SEQ ID NO: 4082864 - DNA, 25 bp, Homo sapien
tccacgttggacagcgcgtcctcca

SEQ ID NO: 4082865 - DNA, 25 bp, Homo sapien
gtccacgttggacagcgcgtcctcc

SEQ ID NO: 4082866 - DNA, 25 bp, Homo sapien
ctagagtggacggtggcttgttcaa

SEQ ID NO: 4082867 - DNA, 25 bp, Homo sapien
gcgatgccagtaacaaatgcatttc

SEQ ID NO: 4082868 - DNA, 25 bp, Homo sapien
tgttcaatgtatcttgcgatgccag

SEQ ID NO: 4082869 - DNA, 25 bp, Homo sapien
tctgtcttcaaagttagtgttgaaa

SEQ ID NO: 4082870 - DNA, 25 bp, Homo sapien
gtatacatctgtccttcaaacacgc

SEQ ID NO: 4082871 - DNA, 25 bp, Homo sapien
tgggccagagacattgaattttcag

SEQ ID NO: 4082872 - DNA, 25 bp, Homo sapien
ggcaggtgcacccttgaaacgctga

SEQ ID NO: 4082873 - DNA, 25 bp, Homo sapien
tttcctcactgcatagtctattggg

SEQ ID NO: 4082874 - DNA, 25 bp, Homo sapien
gtgtacagcatgacagcatattctt

SEQ ID NO: 4082875 - DNA, 25 bp, Homo sapien
ggtgtacagcatgacagcatattct

SEQ ID NO: 4082876 - DNA, 25 bp, Homo sapien
aaaggaacaaggatgacataagagg

SEQ ID NO: 4082877 - DNA, 25 bp, Homo sapien
agagctagtgatcccgccctgctgt

SEQ ID NO: 4082878 - DNA, 25 bp, Homo sapien
cagccgctgggcttctagagctagt

SEQ ID NO: 4082879 - DNA, 25 bp, Homo sapien
ggatgacataagaggctttgatcca

SEQ ID NO: 4082880 - DNA, 25 bp, Homo sapien
tttctcgtagatttccactctgtta

SEQ ID NO: 4082881 - DNA, 25 bp, Homo sapien
cacggttttctcgtagatttccact

SEQ ID NO: 4082882 - DNA, 25 bp, Homo sapien
actctgttaggctgctcgttacatt

SEQ ID NO: 4082883 - DNA, 25 bp, Homo sapien
tgttaggctgctcgttacatttcac

SEQ ID NO: 4082884 - DNA, 25 bp, Homo sapien
tcgtccagcacagcgaacatgttga

SEQ ID NO: 4082885 - DNA, 25 bp, Homo sapien
tggtcgttcttcacactgcacttca

SEQ ID NO: 4082886 - DNA, 25 bp, Homo sapien
caggtaggcttctgacacgaagtcc

SEQ ID NO: 4082887 - DNA, 25 bp, Homo sapien
aatttgcccagtgtgatcaggtagg

SEQ ID NO: 4082888 - DNA, 25 bp, Homo sapien
ggaacatggacagattctgcgattc

SEQ ID NO: 4082889 - DNA, 25 bp, Homo sapien
gtgatcttgttatgattggccagga

SEQ ID NO: 4082890 - DNA, 25 bp, Homo sapien
ctgcgattcctggatggactgtgga

SEQ ID NO: 4082891 - DNA, 25 bp, Homo sapien
cttgttatgattggccaggaacatg

SEQ ID NO: 4082892 - DNA, 25 bp, Homo sapien
tcactgggcgtcaaatacatcctgt

SEQ ID NO: 4082893 - DNA, 25 bp, Homo sapien
ccagaaatcacttcgagctgctgct

SEQ ID NO: 4082894 - DNA, 25 bp, Homo sapien
tgtgtttctcactgggcgtcaaata

SEQ ID NO: 4082895 - DNA, 25 bp, Homo sapien
caggagctcttcgtagccagaaatc

SEQ ID NO: 4082896 - DNA, 25 bp, Homo sapien
agccaccgtgcccagtcacaaacta

SEQ ID NO: 4082897 - DNA, 25 bp, Homo sapien
cttgaagtacttgtcgattttggat

SEQ ID NO: 4082898 - DNA, 25 bp, Homo sapien
tttcttggcatccaacttatagatg

SEQ ID NO: 4082899 - DNA, 25 bp, Homo sapien
tgtcgattttggataagtttattct

SEQ ID NO: 4082900 - DNA, 25 bp, Homo sapien
tcccatccatcaggtacagaccaaa

SEQ ID NO: 4082901 - DNA, 25 bp, Homo sapien
tcttgccagttctatttgcatgtcc

SEQ ID NO: 4082902 - DNA, 25 bp, Homo sapien
tgtccccaaatagcggaaccacctg

SEQ ID NO: 4082903 - DNA, 25 bp, Homo sapien
tagtgggcgctggtcttgatatatc

SEQ ID NO: 4082904 - DNA, 25 bp, Homo sapien
gatttattttcctcgtagtgggcgc

SEQ ID NO: 4082905 - DNA, 25 bp, Homo sapien
cataaagactatcacccagcactgt

SEQ ID NO: 4082906 - DNA, 25 bp, Homo sapien
atccctaggatgatgaaagtgttct

SEQ ID NO: 4082907 - DNA, 25 bp, Homo sapien
cacagtagccactaactattgaaca

SEQ ID NO: 4082908 - DNA, 25 bp, Homo sapien
tcaaacgtggctgtcgtaaggaaat

SEQ ID NO: 4082909 - DNA, 25 bp, Homo sapien
ggtcctcgcggatctggatcatctg

SEQ ID NO: 4082910 - DNA, 25 bp, Homo sapien
agcgcgccagctccgaaatgaagcg

SEQ ID NO: 4082911 - DNA, 25 bp, Homo sapien
agatgttgtactgagggctgctgcc

SEQ ID NO: 4082912 - DNA, 25 bp, Homo sapien
aaatgaagcgcatgtggtcctcgcg

SEQ ID NO: 4082913 - DNA, 25 bp, Homo sapien
gaagggcaacacacaagtcacgtgg

SEQ ID NO: 4082914 - DNA, 25 bp, Homo sapien
tgagatcggaaatgcaatgcctaga

SEQ ID NO: 4082915 - DNA, 25 bp, Homo sapien
aaatgaaacaatggcgggaacctgc

SEQ ID NO: 4082916 - DNA, 25 bp, Homo sapien
tgttacacgcgtgggcttggcgcac

SEQ ID NO: 4082917 - DNA, 25 bp, Homo sapien
acttccatcacgtgcgcgctccact

SEQ ID NO: 4082918 - DNA, 25 bp, Homo sapien
cgccaggtcgaagagcttgcggtac

SEQ ID NO: 4082919 - DNA, 25 bp, Homo sapien
ggtactccgcgtccgtcttctgggc

SEQ ID NO: 4082920 - DNA, 25 bp, Homo sapien
gctccactgcgacaacagctgcagg

SEQ ID NO: 4082921 - DNA, 25 bp, Homo sapien
aaatctacccggcaaaatggcctgg

SEQ ID NO: 4082922 - DNA, 25 bp, Homo sapien
cttaaaaatgcagggcgtgaagcga

SEQ ID NO: 4082923 - DNA, 25 bp, Homo sapien
tgaaagtcacacatgagggcgcaca

SEQ ID NO: 4082924 - DNA, 25 bp, Homo sapien
gatgggcaaaagaccctggccctgt

SEQ ID NO: 4082925 - DNA, 25 bp, Homo sapien
aaagagcagaggtgttccatattgc

SEQ ID NO: 4082926 - DNA, 25 bp, Homo sapien
ctgtggtggccgaaagagcagaggt

SEQ ID NO: 4082927 - DNA, 25 bp, Homo sapien
ttctcctcgctggtgtagttgtagc

SEQ ID NO: 4082928 - DNA, 25 bp, Homo sapien
tagttgtagcgcgtggcacgctcgt

SEQ ID NO: 4082929 - DNA, 25 bp, Homo sapien
gctcgtactcttcagcgctgtcggg

SEQ ID NO: 4082930 - DNA, 25 bp, Homo sapien
tccttgttggagtacttgtcggtgg

SEQ ID NO: 4082931 - DNA, 25 bp, Homo sapien
agcgacatgaggaagagcgagcggc

SEQ ID NO: 4082932 - DNA, 25 bp, Homo sapien
tgaggaagagcgagcggccgagcat

SEQ ID NO: 4082933 - DNA, 25 bp, Homo sapien
aagagcgagcggccgagcatcctca

SEQ ID NO: 4082934 - DNA, 25 bp, Homo sapien
ctagagcgacatgaggaagagcgag

SEQ ID NO: 4082935 - DNA, 25 bp, Homo sapien
cctgattaaaatcctcactgtggga

SEQ ID NO: 4082936 - DNA, 25 bp, Homo sapien
tacagagtggtgctgggataccgac

SEQ ID NO: 4082937 - DNA, 25 bp, Homo sapien
cacacatgcattgtcacgtgaccag

SEQ ID NO: 4082938 - DNA, 25 bp, Homo sapien
caagaacactgagggccaactgtat

SEQ ID NO: 4082939 - DNA, 25 bp, Homo sapien
tgatctactcatatgaaatgcccag

SEQ ID NO: 4082940 - DNA, 25 bp, Homo sapien
tctaaatttgattgtgactgtacaa

SEQ ID NO: 4082941 - DNA, 25 bp, Homo sapien
taatgggctggcatttatatttgtt

SEQ ID NO: 4082942 - DNA, 25 bp, Homo sapien
caaagggccacatatggtatgatct

SEQ ID NO: 4082943 - DNA, 25 bp, Homo sapien
gtgatggcgccgcaggcactgtgcc

SEQ ID NO: 4082944 - DNA, 25 bp, Homo sapien
cgccatctctgtgatggcgccgcag

SEQ ID NO: 4082945 - DNA, 25 bp, Homo sapien
catctctgtgatggcgccgcaggca

SEQ ID NO: 4082946 - DNA, 25 bp, Homo sapien
cagcgccatctctgtgatggcgccg

SEQ ID NO: 4082947 - DNA, 25 bp, Homo sapien
catagacggtgtgccggatggcgtg

SEQ ID NO: 4082948 - DNA, 25 bp, Homo sapien
cggatggcgtggttgaacacgctct

SEQ ID NO: 4082949 - DNA, 25 bp, Homo sapien
aagtcctgcagtgcggcatagacgg

SEQ ID NO: 4082950 - DNA, 25 bp, Homo sapien
gcggctccctaagggtcacctggga

SEQ ID NO: 4082951 - DNA, 25 bp, Homo sapien
ttcatccgaggacgtgtgggcacag

SEQ ID NO: 4082952 - DNA, 25 bp, Homo sapien
caagttcatccgaggacgtgtgggc

SEQ ID NO: 4082953 - DNA, 25 bp, Homo sapien
gaatccaagttcatccgaggacgtg

SEQ ID NO: 4082954 - DNA, 25 bp, Homo sapien
atccaagttcatccgaggacgtgtg

SEQ ID NO: 4082955 - DNA, 25 bp, Homo sapien
cgtctcccagtcacacacggtcttc

SEQ ID NO: 4082956 - DNA, 25 bp, Homo sapien
acacacggtcttcctgatggcctgc

SEQ ID NO: 4082957 - DNA, 25 bp, Homo sapien
gccccgcaaggctgggtcattgaag

SEQ ID NO: 4082958 - DNA, 25 bp, Homo sapien
ttctcgccccgcaaggctgggtcat

SEQ ID NO: 4082959 - DNA, 25 bp, Homo sapien
ggagcagcagaaaccacaggcgcca

SEQ ID NO: 4082960 - DNA, 25 bp, Homo sapien
cagcagaaaccacaggcgccacttt

SEQ ID NO: 4082961 - DNA, 25 bp, Homo sapien
gaaaccacaggcgccactttctctg

SEQ ID NO: 4082962 - DNA, 25 bp, Homo sapien
gcagaaaccacaggcgccactttct

SEQ ID NO: 4082963 - DNA, 25 bp, Homo sapien
gagagagacgttagtcactcgacac

SEQ ID NO: 4082964 - DNA, 25 bp, Homo sapien
ccagaagagtggcagaagagattaa

SEQ ID NO: 4082965 - DNA, 25 bp, Homo sapien
agagccagcagcgtgcattgctggt

SEQ ID NO: 4082966 - DNA, 25 bp, Homo sapien
gattaaaagcctccggcagagatga

SEQ ID NO: 4082967 - DNA, 25 bp, Homo sapien
actcggccatggtgcgcaccaggta

SEQ ID NO: 4082968 - DNA, 25 bp, Homo sapien
ggtaggtaggtgcacgactgcctca

SEQ ID NO: 4082969 - DNA, 25 bp, Homo sapien
gactgcctcagaaacgtgttaaccg

SEQ ID NO: 4082970 - DNA, 25 bp, Homo sapien
gtgttaaccgcatgcaagagcctct

SEQ ID NO: 4082971 - DNA, 25 bp, Homo sapien
aacttgtagcggagcagttcgcctc

SEQ ID NO: 4082972 - DNA, 25 bp, Homo sapien
catgagagaaggactgctccgctac

SEQ ID NO: 4082973 - DNA, 25 bp, Homo sapien
gttcgcctccgtgccataaacgtca

SEQ ID NO: 4082974 - DNA, 25 bp, Homo sapien
ggtgcctgtctacgcggccacgttg

SEQ ID NO: 4082975 - DNA, 25 bp, Homo sapien
agggactctagcatggttctcacca

SEQ ID NO: 4082976 - DNA, 25 bp, Homo sapien
gggactctagcatggttctcaccat

SEQ ID NO: 4082977 - DNA, 25 bp, Homo sapien
ggactctagcatggttctcaccatg

SEQ ID NO: 4082978 - DNA, 25 bp, Homo sapien
ttttctatgtccaatatggtgggcc

SEQ ID NO: 4082979 - DNA, 25 bp, Homo sapien
tcaaggctacttctcaaggttttct

SEQ ID NO: 4082980 - DNA, 25 bp, Homo sapien
tgtccaatatggtgggcccctcaag

SEQ ID NO: 4082981 - DNA, 25 bp, Homo sapien
gtagaagaatgactctcgatgaaat

SEQ ID NO: 4082982 - DNA, 25 bp, Homo sapien
cttgatgagaacacgggacagacac

SEQ ID NO: 4082983 - DNA, 25 bp, Homo sapien
aactcaggcaccagattacattcgc

SEQ ID NO: 4082984 - DNA, 25 bp, Homo sapien
cagggaggtctgtctaacgcaaaaa

SEQ ID NO: 4082985 - DNA, 25 bp, Homo sapien
agcattagaggcacactcagggagg

SEQ ID NO: 4082986 - DNA, 25 bp, Homo sapien
tccatgttatctcccgcaagcaaaa

SEQ ID NO: 4082987 - DNA, 25 bp, Homo sapien
gggccttgcactagggacaggacca

SEQ ID NO: 4082988 - DNA, 25 bp, Homo sapien
gccccaagccatgcagcatggacat

SEQ ID NO: 4082989 - DNA, 25 bp, Homo sapien
ttagcagagatgacacaagggctgt

SEQ ID NO: 4082990 - DNA, 25 bp, Homo sapien
atgtggtccgtcaggatccagggca

SEQ ID NO: 4082991 - DNA, 25 bp, Homo sapien
gatccagggcatcgacatctcaatg

SEQ ID NO: 4082992 - DNA, 25 bp, Homo sapien
gaactggatcctcctgcccatggtc

SEQ ID NO: 4082993 - DNA, 25 bp, Homo sapien
tctcggaaccacagctgcgaaaggt

SEQ ID NO: 4082994 - DNA, 25 bp, Homo sapien
aggctggagacaggcccgcaggaca

SEQ ID NO: 4082995 - DNA, 25 bp, Homo sapien
acaaaggctggagacaggcccgcag

SEQ ID NO: 4082996 - DNA, 25 bp, Homo sapien
aaaggctggagacaggcccgcagga

SEQ ID NO: 4082997 - DNA, 25 bp, Homo sapien
tggagacaggcccgcaggacacgca

SEQ ID NO: 4082998 - DNA, 25 bp, Homo sapien
cacaccaggctaagttttctcattt

SEQ ID NO: 4082999 - DNA, 25 bp, Homo sapien
atttctgtggtaaagcaatcctccc

SEQ ID NO: 4083000 - DNA, 25 bp, Homo sapien
gctcaatgcagccacaaatttctgt

SEQ ID NO: 4083001 - DNA, 25 bp, Homo sapien
ccaggcccagaaacttgatttcaaa

SEQ ID NO: 4083002 - DNA, 25 bp, Homo sapien
cccacctcagaaactcaactccatt

SEQ ID NO: 4083003 - DNA, 25 bp, Homo sapien
agcctctgccactcactcgcagctc

SEQ ID NO: 4083004 - DNA, 25 bp, Homo sapien
cgccccacctcagaaactcaactcc

SEQ ID NO: 4083005 - DNA, 25 bp, Homo sapien
actcgcagctccgacagcctcgccc

SEQ ID NO: 4083006 - DNA, 25 bp, Homo sapien
tgagcgcgtagtgggcgctgtcatt

SEQ ID NO: 4083007 - DNA, 25 bp, Homo sapien
ctgtcattgtacaggtccagggagt

SEQ ID NO: 4083008 - DNA, 25 bp, Homo sapien
attgtacaggtccagggagtagagc

SEQ ID NO: 4083009 - DNA, 25 bp, Homo sapien
tgcttgttgaacctggtgagcgcgt

SEQ ID NO: 4083010 - DNA, 25 bp, Homo sapien
taaccttataataggcaaatatctg

SEQ ID NO: 4083011 - DNA, 25 bp, Homo sapien
taggcaaatatctggtctgctagct

SEQ ID NO: 4083012 - DNA, 25 bp, Homo sapien
tgctagcttgtaaacaaattggtca

SEQ ID NO: 4083013 - DNA, 25 bp, Homo sapien
caaattggtcaaaacatagattcac

SEQ ID NO: 4083014 - DNA, 25 bp, Homo sapien
tcgtaaccgtttatcaagaagcaaa

SEQ ID NO: 4083015 - DNA, 25 bp, Homo sapien
gattcttgcattctgatcgtaaccg

SEQ ID NO: 4083016 - DNA, 25 bp, Homo sapien
tagacggcgggaggtggatcgtggc

SEQ ID NO: 4083017 - DNA, 25 bp, Homo sapien
tctgcttcagcagcgtctcgtagcg

SEQ ID NO: 4083018 - DNA, 25 bp, Homo sapien
tgaggtctattgatctgccgaggag

SEQ ID NO: 4083019 - DNA, 25 bp, Homo sapien
aaatcgtccaatcgccagttctagg

SEQ ID NO: 4083020 - DNA, 25 bp, Homo sapien
tatacatggctgctgagacgcgctg

SEQ ID NO: 4083021 - DNA, 25 bp, Homo sapien
acgcgctgggtgatcagacgattga

SEQ ID NO: 4083022 - DNA, 25 bp, Homo sapien
agaggcttggtataggccacgccca

SEQ ID NO: 4083023 - DNA, 25 bp, Homo sapien
cacgttattaagtggtgtgctacct

SEQ ID NO: 4083024 - DNA, 25 bp, Homo sapien
gccatagttggcgattttttcaaga

SEQ ID NO: 4083025 - DNA, 25 bp, Homo sapien
aacactgagtgtaggcttggtatag

SEQ ID NO: 4083026 - DNA, 25 bp, Homo sapien
tgactaaaggactgtggtatcccca

SEQ ID NO: 4083027 - DNA, 25 bp, Homo sapien
ggcacaaacgatcggccttcggaag

SEQ ID NO: 4083028 - DNA, 25 bp, Homo sapien
agggctggcacaaacgatcggcctt

SEQ ID NO: 4083029 - DNA, 25 bp, Homo sapien
gtgccagtgttgactaaaggactgt

SEQ ID NO: 4083030 - DNA, 25 bp, Homo sapien
gaagtgaaataagctctctcatgct

SEQ ID NO: 4083031 - DNA, 25 bp, Homo sapien
tgtaatacgtctaaaggggattgga

SEQ ID NO: 4083032 - DNA, 25 bp, Homo sapien
catgatctttacctgtggctcgact

SEQ ID NO: 4083033 - DNA, 25 bp, Homo sapien
gggattggaccatgatctttacctg

SEQ ID NO: 4083034 - DNA, 25 bp, Homo sapien
taaggatgaatacgcagggccctgc

SEQ ID NO: 4083035 - DNA, 25 bp, Homo sapien
ggcgcactacatgagacaccagatt

SEQ ID NO: 4083036 - DNA, 25 bp, Homo sapien
tcttgaaatagatgccagtcggccc

SEQ ID NO: 4083037 - DNA, 25 bp, Homo sapien
ttacgctcgtagaaaaaggccgcca

SEQ ID NO: 4083038 - DNA, 25 bp, Homo sapien
aagtcactgaaaggcacgtgtgggt

SEQ ID NO: 4083039 - DNA, 25 bp, Homo sapien
gccagctttctctgaggtgcctgaa

SEQ ID NO: 4083040 - DNA, 25 bp, Homo sapien
aagccctcacgtgcgctgctctgga

SEQ ID NO: 4083041 - DNA, 25 bp, Homo sapien
gctgcatctccctgggcgttggagc

SEQ ID NO: 4083042 - DNA, 25 bp, Homo sapien
agcgtgcacgtgtggcctgctactg

SEQ ID NO: 4083043 - DNA, 25 bp, Homo sapien
tctgacaggtgacatgagcttgctt

SEQ ID NO: 4083044 - DNA, 25 bp, Homo sapien
ctgggtcatgcctttctccactgca

SEQ ID NO: 4083045 - DNA, 25 bp, Homo sapien
ccccagtgagcgtaggctctgacag

SEQ ID NO: 4083046 - DNA, 25 bp, Homo sapien
tggcaccaaagacaggggtgggtga

SEQ ID NO: 4083047 - DNA, 25 bp, Homo sapien
ccaaagacaggggtgggtgacagag

SEQ ID NO: 4083048 - DNA, 25 bp, Homo sapien
accaaagacaggggtgggtgacaga

SEQ ID NO: 4083049 - DNA, 25 bp, Homo sapien
ctgtggcaccaaagacaggggtggg

SEQ ID NO: 4083050 - DNA, 25 bp, Homo sapien
cagcttgtgggtcatgcggttgatt

SEQ ID NO: 4083051 - DNA, 25 bp, Homo sapien
agacgtgcagggtgatcctcccgta

SEQ ID NO: 4083052 - DNA, 25 bp, Homo sapien
tcccgtagggcgctgacacgttgtg

SEQ ID NO: 4083053 - DNA, 25 bp, Homo sapien
cgtcgaagccgtccagcgtcaggta

SEQ ID NO: 4083054 - DNA, 25 bp, Homo sapien
ccacccgagggtagacccgaggctg

SEQ ID NO: 4083055 - DNA, 25 bp, Homo sapien
aaagccatgaccatccacccgaggg

SEQ ID NO: 4083056 - DNA, 25 bp, Homo sapien
tgcagccccacgcaagccccacgtg

SEQ ID NO: 4083057 - DNA, 25 bp, Homo sapien
gcaagccccacgtgcaaagccatga

SEQ ID NO: 4083058 - DNA, 25 bp, Homo sapien
caggaaacgcggtcctgcacccagg

SEQ ID NO: 4083059 - DNA, 25 bp, Homo sapien
acaggaaacgcggtcctgcacccag

SEQ ID NO: 4083060 - DNA, 25 bp, Homo sapien
cggccccacaggaaacgcggtcctg

SEQ ID NO: 4083061 - DNA, 25 bp, Homo sapien
ccccacaggaaacgcggtcctgcac

SEQ ID NO: 4083062 - DNA, 25 bp, Homo sapien
gaatggcctcagtgatgcaacacac

SEQ ID NO: 4083063 - DNA, 25 bp, Homo sapien
ctgcagcccagagcgcgtggccatg

SEQ ID NO: 4083064 - DNA, 25 bp, Homo sapien
gcgcgtggccatgaccctggagaat

SEQ ID NO: 4083065 - DNA, 25 bp, Homo sapien
gaccctggagaatggcctcagtgat

SEQ ID NO: 4083066 - DNA, 25 bp, Homo sapien
cgcatggcactgggtgcaccgtgct

SEQ ID NO: 4083067 - DNA, 25 bp, Homo sapien
acgcatggcactgggtgcaccgtgc

SEQ ID NO: 4083068 - DNA, 25 bp, Homo sapien
ctggccttgtgtgaacgctgagaat

SEQ ID NO: 4083069 - DNA, 25 bp, Homo sapien
ccattcttcttgctagtaggaactc

SEQ ID NO: 4083070 - DNA, 25 bp, Homo sapien
ctgagaatcattcagctagcagctc

SEQ ID NO: 4083071 - DNA, 25 bp, Homo sapien
tcttcttgctagtaggaactcagaa

SEQ ID NO: 4083072 - DNA, 25 bp, Homo sapien
tgtgttgttttttaaagatagtctc

SEQ ID NO: 4083073 - DNA, 25 bp, Homo sapien
gttttttaaagatagtctctgtcac

SEQ ID NO: 4083074 - DNA, 25 bp, Homo sapien
ttgttttttaaagatagtctctgtc

SEQ ID NO: 4083075 - DNA, 25 bp, Homo sapien
cagccttgacgtcccgggttcaagt

SEQ ID NO: 4083076 - DNA, 25 bp, Homo sapien
tgaatttttggcacttgtagggatg

SEQ ID NO: 4083077 - DNA, 25 bp, Homo sapien
tacctctggcacctctagtgaacat

SEQ ID NO: 4083078 - DNA, 25 bp, Homo sapien
gtagggatgggcataattcagtacc

SEQ ID NO: 4083079 - DNA, 25 bp, Homo sapien
gtcaatctgctggatcttgtcatga

SEQ ID NO: 4083080 - DNA, 25 bp, Homo sapien
actgcacgttgcctcgggtacactg

SEQ ID NO: 4083081 - DNA, 25 bp, Homo sapien
aaagtctactctgatattcggccca

SEQ ID NO: 4083082 - DNA, 25 bp, Homo sapien
tagtcgctgccttaacatccttgtc

SEQ ID NO: 4083083 - DNA, 25 bp, Homo sapien
tggtcagtgctaggcccaacagtgg

SEQ ID NO: 4083084 - DNA, 25 bp, Homo sapien
tgctgcgcttccagacacggcgagg

SEQ ID NO: 4083085 - DNA, 25 bp, Homo sapien
agagccgcctcgagcccaacgcaat

SEQ ID NO: 4083086 - DNA, 25 bp, Homo sapien
gagcccaacgcaatcctcaggtagc

SEQ ID NO: 4083087 - DNA, 25 bp, Homo sapien
ggctctgctgcgcttccagacacgg

SEQ ID NO: 4083088 - DNA, 25 bp, Homo sapien
agatactgaggctgtgcattaggct

SEQ ID NO: 4083089 - DNA, 25 bp, Homo sapien
gcattaggctgcttatctctttgaa

SEQ ID NO: 4083090 - DNA, 25 bp, Homo sapien
tctctttgaaattcctgagaaaatg

SEQ ID NO: 4083091 - DNA, 25 bp, Homo sapien
gaaaatggtaacactgtccgaacaa

SEQ ID NO: 4083092 - DNA, 25 bp, Homo sapien
tcgtaacacgaacacattggagcct

SEQ ID NO: 4083093 - DNA, 25 bp, Homo sapien
gtaacacgaacacattggagcctac

SEQ ID NO: 4083094 - DNA, 25 bp, Homo sapien
agctcgtaacacgaacacattggag

SEQ ID NO: 4083095 - DNA, 25 bp, Homo sapien
tcaagctcgtaacacgaacacattg

SEQ ID NO: 4083096 - DNA, 25 bp, Homo sapien
ccaaaaaccaatgccctgatttggg

SEQ ID NO: 4083097 - DNA, 25 bp, Homo sapien
ggtgtttgccgtttcccaggtgcaa

SEQ ID NO: 4083098 - DNA, 25 bp, Homo sapien
tctgagtgccgtaaaaaggccgccc

SEQ ID NO: 4083099 - DNA, 25 bp, Homo sapien
cagcgtatgccgaggcttgggccct

SEQ ID NO: 4083100 - DNA, 25 bp, Homo sapien
gaagcccagaatcacacgaactgtg

SEQ ID NO: 4083101 - DNA, 25 bp, Homo sapien
ccacatgaagcccagaatcacacga

SEQ ID NO: 4083102 - DNA, 25 bp, Homo sapien
gcccagaatcacacgaactgtgtgt

SEQ ID NO: 4083103 - DNA, 25 bp, Homo sapien
catgaagcccagaatcacacgaact

SEQ ID NO: 4083104 - DNA, 25 bp, Homo sapien
aaacagggcacagagctctcagcat

SEQ ID NO: 4083105 - DNA, 25 bp, Homo sapien
ctggaaaacagggcacagagctctc

SEQ ID NO: 4083106 - DNA, 25 bp, Homo sapien
ggaaaacagggcacagagctctcag

SEQ ID NO: 4083107 - DNA, 25 bp, Homo sapien
aaaacagggcacagagctctcagca

SEQ ID NO: 4083108 - DNA, 25 bp, Homo sapien
tgacttgaaagtgtggaggtcccac

SEQ ID NO: 4083109 - DNA, 25 bp, Homo sapien
ccgagaagccggcagatgacttgaa

SEQ ID NO: 4083110 - DNA, 25 bp, Homo sapien
gcgataccctggtagccgagaagcc

SEQ ID NO: 4083111 - DNA, 25 bp, Homo sapien
ccggtagctgccgtaaatgctggag

SEQ ID NO: 4083112 - DNA, 25 bp, Homo sapien
acctccatcagcgtcttcacgtact

SEQ ID NO: 4083113 - DNA, 25 bp, Homo sapien
ttgggcatcacctccatcagcgtct

SEQ ID NO: 4083114 - DNA, 25 bp, Homo sapien
gagccgtactcgtgccggggcaggc

SEQ ID NO: 4083115 - DNA, 25 bp, Homo sapien
cacgtactgcaggattgtgccttgc

SEQ ID NO: 4083116 - DNA, 25 bp, Homo sapien
gttctggaagcacaccgtcttcagc

SEQ ID NO: 4083117 - DNA, 25 bp, Homo sapien
tcttcagctctgcgtactccacgat

SEQ ID NO: 4083118 - DNA, 25 bp, Homo sapien
ttctggaagcacaccgtcttcagct

SEQ ID NO: 4083119 - DNA, 25 bp, Homo sapien
tctggaagcacaccgtcttcagctc

SEQ ID NO: 4083120 - DNA, 25 bp, Homo sapien
gcagaagaggatggcgttccccacc

SEQ ID NO: 4083121 - DNA, 25 bp, Homo sapien
ggctctgctcgatgagcaggcagaa

SEQ ID NO: 4083122 - DNA, 25 bp, Homo sapien
agaggatggcgttccccacctcccg

SEQ ID NO: 4083123 - DNA, 25 bp, Homo sapien
caggctctgctcgatgagcaggcag

SEQ ID NO: 4083124 - DNA, 25 bp, Homo sapien
tttaacttctgaggacctcccagag

SEQ ID NO: 4083125 - DNA, 25 bp, Homo sapien
gatggcaaaactaagaccaagagga

SEQ ID NO: 4083126 - DNA, 25 bp, Homo sapien
gagcaactgctgttcatctttagag

SEQ ID NO: 4083127 - DNA, 25 bp, Homo sapien
gctgaaatcttaaagtcccatagga

SEQ ID NO: 4083128 - DNA, 25 bp, Homo sapien
gccatgcatgcctagtaagtacttg

SEQ ID NO: 4083129 - DNA, 25 bp, Homo sapien
tagacacaggtaagacccagtgttg

SEQ ID NO: 4083130 - DNA, 25 bp, Homo sapien
gatttacctgtctaaaagctctcgc

SEQ ID NO: 4083131 - DNA, 25 bp, Homo sapien
aagctaggaagggtatctcgccaga

SEQ ID NO: 4083132 - DNA, 25 bp, Homo sapien
cggcaagatgttctggaaaggagcc

SEQ ID NO: 4083133 - DNA, 25 bp, Homo sapien
atgttctggaaaggagccgcgtgca

SEQ ID NO: 4083134 - DNA, 25 bp, Homo sapien
tggactcgcggcaagatgttctgga

SEQ ID NO: 4083135 - DNA, 25 bp, Homo sapien
tttcacatggactcgcggcaagatg

SEQ ID NO: 4083136 - DNA, 25 bp, Homo sapien
gggacaagatgcagcggggcgtact

SEQ ID NO: 4083137 - DNA, 25 bp, Homo sapien
atgcagcggggcgtactttgattct

SEQ ID NO: 4083138 - DNA, 25 bp, Homo sapien
agtctttcaatcagtgggacaagat

SEQ ID NO: 4083139 - DNA, 25 bp, Homo sapien
gcggggcgtactttgattctagtct

SEQ ID NO: 4083140 - DNA, 25 bp, Homo sapien
cagcttgcaacagccacagccatca

SEQ ID NO: 4083141 - DNA, 25 bp, Homo sapien
ttccagtctggctcccaaccaggcc

SEQ ID NO: 4083142 - DNA, 25 bp, Homo sapien
tgcaacagccacagccatcacggta

SEQ ID NO: 4083143 - DNA, 25 bp, Homo sapien
ggacttcacgatgccttccagtctg

SEQ ID NO: 4083144 - DNA, 25 bp, Homo sapien
gctggacagtgaaagtgatgtcttc

SEQ ID NO: 4083145 - DNA, 25 bp, Homo sapien
tgatgtcttctgtgtaagccttacg

SEQ ID NO: 4083146 - DNA, 25 bp, Homo sapien
tgttcttaaacacctatgggaaagc

SEQ ID NO: 4083147 - DNA, 25 bp, Homo sapien
cgtgccaggtgatgtgctaagctct

SEQ ID NO: 4083148 - DNA, 25 bp, Homo sapien
cagaggcgctcctttgtcagcaggt

SEQ ID NO: 4083149 - DNA, 25 bp, Homo sapien
ccgtgtcaggatgacctcaaacatg

SEQ ID NO: 4083150 - DNA, 25 bp, Homo sapien
tccccacgggaatgcagtagacaaa

SEQ ID NO: 4083151 - DNA, 25 bp, Homo sapien
gggtcatccagaaagctccggatcc

SEQ ID NO: 4083152 - DNA, 25 bp, Homo sapien
ctgctgcccaagaagtacgatgatc

SEQ ID NO: 4083153 - DNA, 25 bp, Homo sapien
gatggtagcagaaatccagcacagc

SEQ ID NO: 4083154 - DNA, 25 bp, Homo sapien
cagtgtagcccatcaccaaagcact

SEQ ID NO: 4083155 - DNA, 25 bp, Homo sapien
tctggactttaagtagatggtagca

SEQ ID NO: 4083156 - DNA, 25 bp, Homo sapien
tggtggcaccttacgtactaggatg

SEQ ID NO: 4083157 - DNA, 25 bp, Homo sapien
gcaccttacgtactaggatgaaaaa

SEQ ID NO: 4083158 - DNA, 25 bp, Homo sapien
gaaacaagaacttataacacaaaga

SEQ ID NO: 4083159 - DNA, 25 bp, Homo sapien
tctgttggtggcaccttacgtacta

SEQ ID NO: 4083160 - DNA, 25 bp, Homo sapien
ttaatgcaacagttggaaggatgaa

SEQ ID NO: 4083161 - DNA, 25 bp, Homo sapien
taatgcaacagttggaaggatgaat

SEQ ID NO: 4083162 - DNA, 25 bp, Homo sapien
aatgcaacagttggaaggatgaata

SEQ ID NO: 4083163 - DNA, 25 bp, Homo sapien
cttcaggtacttatccaggatggtg

SEQ ID NO: 4083164 - DNA, 25 bp, Homo sapien
gagaatctggaacttgcgaattctc

SEQ ID NO: 4083165 - DNA, 25 bp, Homo sapien
cctccccgtcgcctgacttcaggta

SEQ ID NO: 4083166 - DNA, 25 bp, Homo sapien
ggaacttgcgaattctctccaccat

SEQ ID NO: 4083167 - DNA, 25 bp, Homo sapien
tcagctgctggcgagggactggtgg

SEQ ID NO: 4083168 - DNA, 25 bp, Homo sapien
ggactggtggatgggcggctggaag

SEQ ID NO: 4083169 - DNA, 25 bp, Homo sapien
agggactggtggatgggcggctgga

SEQ ID NO: 4083170 - DNA, 25 bp, Homo sapien
gcgagggactggtggatgggcggct

SEQ ID NO: 4083171 - DNA, 25 bp, Homo sapien
cattttatgacacagctgccagaac

SEQ ID NO: 4083172 - DNA, 25 bp, Homo sapien
tataacctttcgatctgatgtcacg

SEQ ID NO: 4083173 - DNA, 25 bp, Homo sapien
catgttgagttacggagtgcagcgc

SEQ ID NO: 4083174 - DNA, 25 bp, Homo sapien
aacaattttgtaggaacgtgatggc

SEQ ID NO: 4083175 - DNA, 25 bp, Homo sapien
ttggagcagccaacacggccgtttt

SEQ ID NO: 4083176 - DNA, 25 bp, Homo sapien
tgagcattcgatggccttagcacct

SEQ ID NO: 4083177 - DNA, 25 bp, Homo sapien
gaaagtgttcgcctgttccagcctg

SEQ ID NO: 4083178 - DNA, 25 bp, Homo sapien
ctccggaaaagtaggcgaggcctgc

SEQ ID NO: 4083179 - DNA, 25 bp, Homo sapien
taagtcggcataaagtgctgctgca

SEQ ID NO: 4083180 - DNA, 25 bp, Homo sapien
ttaatcttcgtggtgggtcctcgcc

SEQ ID NO: 4083181 - DNA, 25 bp, Homo sapien
gaaagcttaacctgtggaatcgaac

SEQ ID NO: 4083182 - DNA, 25 bp, Homo sapien
taatcggcgcgttttcagtctcctg

SEQ ID NO: 4083183 - DNA, 25 bp, Homo sapien
tgtggcctcaatctaggcgggtgtc

SEQ ID NO: 4083184 - DNA, 25 bp, Homo sapien
aatgtatcatgaaactcttccccag

SEQ ID NO: 4083185 - DNA, 25 bp, Homo sapien
aaattgtcgtcatgttccctgctcc

SEQ ID NO: 4083186 - DNA, 25 bp, Homo sapien
ctctgtgtttgtaagtagtgtgcgt

SEQ ID NO: 4083187 - DNA, 25 bp, Homo sapien
gcccggccaatgagtagatttgcat

SEQ ID NO: 4083188 - DNA, 25 bp, Homo sapien
gtctggatcttggttactattccca

SEQ ID NO: 4083189 - DNA, 25 bp, Homo sapien
gattagcccaaacaactaagcccat

SEQ ID NO: 4083190 - DNA, 25 bp, Homo sapien
actattcccaaagtagattgactga

SEQ ID NO: 4083191 - DNA, 25 bp, Homo sapien
aattagcatatgcttatgtgcacct

SEQ ID NO: 4083192 - DNA, 25 bp, Homo sapien
aaaggacacatttgagaacctgata

SEQ ID NO: 4083193 - DNA, 25 bp, Homo sapien
gcaagaattgttaccctctgataaa

SEQ ID NO: 4083194 - DNA, 25 bp, Homo sapien
tatgtgcacctattgctaagaagaa

SEQ ID NO: 4083195 - DNA, 25 bp, Homo sapien
cttcctttcaggcaagcgcgaaggg

SEQ ID NO: 4083196 - DNA, 25 bp, Homo sapien
ggattgccgttcagtcccacggaag

SEQ ID NO: 4083197 - DNA, 25 bp, Homo sapien
tgaggaaacccaccgtgaatcggat

SEQ ID NO: 4083198 - DNA, 25 bp, Homo sapien
gccagcccgccttgtgtcggagaag

SEQ ID NO: 4083199 - DNA, 25 bp, Homo sapien
tattaccagtccaaagaggacagga

SEQ ID NO: 4083200 - DNA, 25 bp, Homo sapien
ctctctattaccagtccaaagagga

SEQ ID NO: 4083201 - DNA, 25 bp, Homo sapien
tctattaccagtccaaagaggacag

SEQ ID NO: 4083202 - DNA, 25 bp, Homo sapien
ccagtccaaagaggacaggattcat

SEQ ID NO: 4083203 - DNA, 25 bp, Homo sapien
cggccgaggtctgtattctgaaaaa

SEQ ID NO: 4083204 - DNA, 25 bp, Homo sapien
tgtgctcctgacattcggccgaggt

SEQ ID NO: 4083205 - DNA, 25 bp, Homo sapien
taataaatgacgctgaacttcctgc

SEQ ID NO: 4083206 - DNA, 25 bp, Homo sapien
gggacttcagaaagccgcacagaaa

SEQ ID NO: 4083207 - DNA, 25 bp, Homo sapien
gtgtaaggtctgttcccgacagcat

SEQ ID NO: 4083208 - DNA, 25 bp, Homo sapien
gaacatttcagtgtaaggtctgttc

SEQ ID NO: 4083209 - DNA, 25 bp, Homo sapien
catttcagtgtaaggtctgttcccg

SEQ ID NO: 4083210 - DNA, 25 bp, Homo sapien
tcagtgtaaggtctgttcccgacag

SEQ ID NO: 4083211 - DNA, 25 bp, Homo sapien
agagcccctcccgttgtgccgcttc

SEQ ID NO: 4083212 - DNA, 25 bp, Homo sapien
tcaagctgctcagctaacccagaag

SEQ ID NO: 4083213 - DNA, 25 bp, Homo sapien
agagtactccggtggttcccagagc

SEQ ID NO: 4083214 - DNA, 25 bp, Homo sapien
cctgctcgatgctgacttaggcttc

SEQ ID NO: 4083215 - DNA, 25 bp, Homo sapien
tcattgagatcttttcctatcagaa

SEQ ID NO: 4083216 - DNA, 25 bp, Homo sapien
ctttgttcagcaataaggaatattc

SEQ ID NO: 4083217 - DNA, 25 bp, Homo sapien
aatgttagtgaatatacttcgcagc

SEQ ID NO: 4083218 - DNA, 25 bp, Homo sapien
ttcaagccaatttactacacccagt

SEQ ID NO: 4083219 - DNA, 25 bp, Homo sapien
caggatgacttttcaatagctcaaa

SEQ ID NO: 4083220 - DNA, 25 bp, Homo sapien
aagtatgtcatccaaataagaggca

SEQ ID NO: 4083221 - DNA, 25 bp, Homo sapien
tctgacaagttgactcttcgacccc

SEQ ID NO: 4083222 - DNA, 25 bp, Homo sapien
ttgaactctggcactgtacagtgaa

SEQ ID NO: 4083223 - DNA, 25 bp, Homo sapien
ttttgtccacactcggtggtctgca

SEQ ID NO: 4083224 - DNA, 25 bp, Homo sapien
tggttttgtccacactcggtggtct

SEQ ID NO: 4083225 - DNA, 25 bp, Homo sapien
accctggtttgcaagtccacactcg

SEQ ID NO: 4083226 - DNA, 25 bp, Homo sapien
tttgtccacactcggtggtctgcat

SEQ ID NO: 4083227 - DNA, 25 bp, Homo sapien
tgctggtttacatgtccacactcgc

SEQ ID NO: 4083228 - DNA, 25 bp, Homo sapien
catcagtttgctggtttacatgtcc

SEQ ID NO: 4083229 - DNA, 25 bp, Homo sapien
gcctccacatcagtttgctggttta

SEQ ID NO: 4083230 - DNA, 25 bp, Homo sapien
ctgcctccacatcagtttgctggtt

SEQ ID NO: 4083231 - DNA, 25 bp, Homo sapien
tgcagtaggagtgccaactttttta

SEQ ID NO: 4083232 - DNA, 25 bp, Homo sapien
agcactgccaagaaagtttgcagta

SEQ ID NO: 4083233 - DNA, 25 bp, Homo sapien
ggtaattcctttctagcagcactgc

SEQ ID NO: 4083234 - DNA, 25 bp, Homo sapien
tccaggtaattcctttctagcagca

SEQ ID NO: 4083235 - DNA, 25 bp, Homo sapien
agcctccgaggagcttggattacag

SEQ ID NO: 4083236 - DNA, 25 bp, Homo sapien
tgactttaggtgatccacccacttt

SEQ ID NO: 4083237 - DNA, 25 bp, Homo sapien
cctcagcctccgaggagcttggatt

SEQ ID NO: 4083238 - DNA, 25 bp, Homo sapien
caggtgcccaccaccacgcccagct

SEQ ID NO: 4083239 - DNA, 25 bp, Homo sapien
cgtgagtgtggcaagacaaacagca

SEQ ID NO: 4083240 - DNA, 25 bp, Homo sapien
agacgtgagtgtggcaagacaaaca

SEQ ID NO: 4083241 - DNA, 25 bp, Homo sapien
acgtgagtgtggcaagacaaacagc

SEQ ID NO: 4083242 - DNA, 25 bp, Homo sapien
gagacgtgagtgtggcaagacaaac

SEQ ID NO: 4083243 - DNA, 25 bp, Homo sapien
agtagtccagggagcgtcgtctaca

SEQ ID NO: 4083244 - DNA, 25 bp, Homo sapien
agtacaactcccagtagtccaggga

SEQ ID NO: 4083245 - DNA, 25 bp, Homo sapien
ggacaccactcagaaagtatgcgtg

SEQ ID NO: 4083246 - DNA, 25 bp, Homo sapien
tatgcgtgtttctccgcgctggaaa

SEQ ID NO: 4083247 - DNA, 25 bp, Homo sapien
gcatttccatttgcgaaatccggga

SEQ ID NO: 4083248 - DNA, 25 bp, Homo sapien
tccgctgcccggatattgcagagga

SEQ ID NO: 4083249 - DNA, 25 bp, Homo sapien
gtcctgctcggggacccccagacca

SEQ ID NO: 4083250 - DNA, 25 bp, Homo sapien
ctcggggacccccagaccacagtga

SEQ ID NO: 4083251 - DNA, 25 bp, Homo sapien
gggacccccagaccacagtgaacat

SEQ ID NO: 4083252 - DNA, 25 bp, Homo sapien
tgtcctgctcggggacccccagacc

SEQ ID NO: 4083253 - DNA, 25 bp, Homo sapien
ttgttaatcaatcttgctggaggcc

SEQ ID NO: 4083254 - DNA, 25 bp, Homo sapien
aagtctccggttagagtttgtgcct

SEQ ID NO: 4083255 - DNA, 25 bp, Homo sapien
tagtgtaccacgtatctcagttagg

SEQ ID NO: 4083256 - DNA, 25 bp, Homo sapien
gctatgctggttagacaatttggaa

SEQ ID NO: 4083257 - DNA, 25 bp, Homo sapien
tcggctcactgtcacaatgtccgcc

SEQ ID NO: 4083258 - DNA, 25 bp, Homo sapien
cacaatgtccgcctccatggttcaa

SEQ ID NO: 4083259 - DNA, 25 bp, Homo sapien
actgagccacaggaggtgtcaccag

SEQ ID NO: 4083260 - DNA, 25 bp, Homo sapien
tgactgagccacaggaggtgtcacc

SEQ ID NO: 4083261 - DNA, 25 bp, Homo sapien
ccacaggaggtgtcaccagggtctc

SEQ ID NO: 4083262 - DNA, 25 bp, Homo sapien
cacgcagctatgtgactgagccaca

SEQ ID NO: 4083263 - DNA, 25 bp, Homo sapien
gggttggggtgctgcaatccgatgc

SEQ ID NO: 4083264 - DNA, 25 bp, Homo sapien
ggttggggtgctgcaatccgatgca

SEQ ID NO: 4083265 - DNA, 25 bp, Homo sapien
tggggttggggtgctgcaatccgat

SEQ ID NO: 4083266 - DNA, 25 bp, Homo sapien
gttggggtgctgcaatccgatgcat

SEQ ID NO: 4083267 - DNA, 25 bp, Homo sapien
tggggctgacacaagattttggttg

SEQ ID NO: 4083268 - DNA, 25 bp, Homo sapien
tggagtgacacggattctggcagct

SEQ ID NO: 4083269 - DNA, 25 bp, Homo sapien
gttggggctgacacaagattttggt

SEQ ID NO: 4083270 - DNA, 25 bp, Homo sapien
gggttggggctgacacaagattttg

SEQ ID NO: 4083271 - DNA, 25 bp, Homo sapien
ctcaggcgagtggcagccccccgaa

SEQ ID NO: 4083272 - DNA, 25 bp, Homo sapien
cgagtggcagccccccgaagtggtt

SEQ ID NO: 4083273 - DNA, 25 bp, Homo sapien
caggcgagtggcagccccccgaagt

SEQ ID NO: 4083274 - DNA, 25 bp, Homo sapien
aggcgagtggcagccccccgaagtg

SEQ ID NO: 4083275 - DNA, 25 bp, Homo sapien
tcaggagaccggccagccaagactc

SEQ ID NO: 4083276 - DNA, 25 bp, Homo sapien
gtcctcaggagaccggccagccaag

SEQ ID NO: 4083277 - DNA, 25 bp, Homo sapien
caatcttaacagttaccctcgacct

SEQ ID NO: 4083278 - DNA, 25 bp, Homo sapien
ttgtcctcaggagaccggccagcca

SEQ ID NO: 4083279 - DNA, 25 bp, Homo sapien
ctctttcagctgagctccgttctgt

SEQ ID NO: 4083280 - DNA, 25 bp, Homo sapien
tcagctgagctccgttctgttgttt

SEQ ID NO: 4083281 - DNA, 25 bp, Homo sapien
tttcagctgagctccgttctgttgt

SEQ ID NO: 4083282 - DNA, 25 bp, Homo sapien
tctttcagctgagctccgttctgtt

SEQ ID NO: 4083283 - DNA, 25 bp, Homo sapien
ctctagctgcctccttagggcttgc

SEQ ID NO: 4083284 - DNA, 25 bp, Homo sapien
gctgcctccttagggcttgctgatg

SEQ ID NO: 4083285 - DNA, 25 bp, Homo sapien
gcctccttagggcttgctgatgttg

SEQ ID NO: 4083286 - DNA, 25 bp, Homo sapien
tagctgcctccttagggcttgctga

SEQ ID NO: 4083287 - DNA, 25 bp, Homo sapien
tcctggctgtcatggagcgctgtct

SEQ ID NO: 4083288 - DNA, 25 bp, Homo sapien
gctgtctccagttcagttttctgac

SEQ ID NO: 4083289 - DNA, 25 bp, Homo sapien
ggagcgctgtctccagttcagtttt

SEQ ID NO: 4083290 - DNA, 25 bp, Homo sapien
tgtcatggagcgctgtctccagttc

SEQ ID NO: 4083291 - DNA, 25 bp, Homo sapien
cagcctgccagatccttggaatctt

SEQ ID NO: 4083292 - DNA, 25 bp, Homo sapien
ctgcaaagtgccaggaatgatgcag

SEQ ID NO: 4083293 - DNA, 25 bp, Homo sapien
gcaaagtgccaggaatgatgcaggc

SEQ ID NO: 4083294 - DNA, 25 bp, Homo sapien
gatgcaggcagcctgccagatcctt

SEQ ID NO: 4083295 - DNA, 25 bp, Homo sapien
gtgctctgcggacatagcagagaga

SEQ ID NO: 4083296 - DNA, 25 bp, Homo sapien
acagttccagactcatggcttccct

SEQ ID NO: 4083297 - DNA, 25 bp, Homo sapien
tgtacagttccagactcatggcttc

SEQ ID NO: 4083298 - DNA, 25 bp, Homo sapien
tgttcctgtacagttccagactcat

SEQ ID NO: 4083299 - DNA, 25 bp, Homo sapien
gttcctgtacagttccagactcatg

SEQ ID NO: 4083300 - DNA, 25 bp, Homo sapien
tggcagcgggattttgtccgtctcc

SEQ ID NO: 4083301 - DNA, 25 bp, Homo sapien
ctgtggcagcgggattttgtccgtc

SEQ ID NO: 4083302 - DNA, 25 bp, Homo sapien
ctttttagctccttgatgtggagct

SEQ ID NO: 4083303 - DNA, 25 bp, Homo sapien
cagcgggattttgtccgtctccagt

SEQ ID NO: 4083304 - DNA, 25 bp, Homo sapien
tctcctcggtagaagaatgggatgc

SEQ ID NO: 4083305 - DNA, 25 bp, Homo sapien
ctcctgggcgttcttcattccaggg

SEQ ID NO: 4083306 - DNA, 25 bp, Homo sapien
tgggcgctcctgggcgttcttcatt

SEQ ID NO: 4083307 - DNA, 25 bp, Homo sapien
aggtgctgcctaagcctgggcgctc

SEQ ID NO: 4083308 - DNA, 25 bp, Homo sapien
gctttggccaaatccatgagcggct

SEQ ID NO: 4083309 - DNA, 25 bp, Homo sapien
tgtcaaaccttcagccctcaggaag

SEQ ID NO: 4083310 - DNA, 25 bp, Homo sapien
aaaccttcagccctcaggaaggctt

SEQ ID NO: 4083311 - DNA, 25 bp, Homo sapien
cttcagccctcaggaaggctttggc

SEQ ID NO: 4083312 - DNA, 25 bp, Homo sapien
tcttggttgttttcgtggcctccag

SEQ ID NO: 4083313 - DNA, 25 bp, Homo sapien
actcttgaggtgtacttagggttct

SEQ ID NO: 4083314 - DNA, 25 bp, Homo sapien
tgtaaagtgttgtaatttatgctcc

SEQ ID NO: 4083315 - DNA, 25 bp, Homo sapien
tttatgctcctgagaataactcttg

SEQ ID NO: 4083316 - DNA, 25 bp, Homo sapien
accggggctgccagcgtcggaggag

SEQ ID NO: 4083317 - DNA, 25 bp, Homo sapien
gaggctgtgtccgcaagccagcggg

SEQ ID NO: 4083318 - DNA, 25 bp, Homo sapien
cggctgggccctgcgcgtcaggtcc

SEQ ID NO: 4083319 - DNA, 25 bp, Homo sapien
gcgctgggttgacgggcggccgaac

SEQ ID NO: 4083320 - DNA, 25 bp, Homo sapien
ctgctagggagccaagccaggtcac

SEQ ID NO: 4083321 - DNA, 25 bp, Homo sapien
ggagccaagccaggtcactccacat

SEQ ID NO: 4083322 - DNA, 25 bp, Homo sapien
accaggagagctgaaagtcaccaac

SEQ ID NO: 4083323 - DNA, 25 bp, Homo sapien
accaacgaagatgcctgacccagaa

SEQ ID NO: 4083324 - DNA, 25 bp, Homo sapien
agttaatcacgatgttgcattcttg

SEQ ID NO: 4083325 - DNA, 25 bp, Homo sapien
gtttacacatagatacatctgttct

SEQ ID NO: 4083326 - DNA, 25 bp, Homo sapien
tttacacatagatacatctgttctt

SEQ ID NO: 4083327 - DNA, 25 bp, Homo sapien
gcagctgcaggaataggccatattc

SEQ ID NO: 4083328 - DNA, 25 bp, Homo sapien
cagtccttgaaatgcctagtggtca

SEQ ID NO: 4083329 - DNA, 25 bp, Homo sapien
tcagggatctccagaatgggaatgt

SEQ ID NO: 4083330 - DNA, 25 bp, Homo sapien
gaagaaacttctaaggcctgccagt

SEQ ID NO: 4083331 - DNA, 25 bp, Homo sapien
gcgccaccgaacacaaaaaaactgc

SEQ ID NO: 4083332 - DNA, 25 bp, Homo sapien
cgccaccgaacacaaaaaaactgct

SEQ ID NO: 4083333 - DNA, 25 bp, Homo sapien
agtccctcgtctctagcagtgcctg

SEQ ID NO: 4083334 - DNA, 25 bp, Homo sapien
gctgaagtccctcgtctctagcagt

SEQ ID NO: 4083335 - DNA, 25 bp, Homo sapien
atgctgaagtccctcgtctctagca

SEQ ID NO: 4083336 - DNA, 25 bp, Homo sapien
tgaagtccctcgtctctagcagtgc

SEQ ID NO: 4083337 - DNA, 25 bp, Homo sapien
tcccgtctataggacttacgacacc

SEQ ID NO: 4083338 - DNA, 25 bp, Homo sapien
tttgctttgtattctgatccgtgga

SEQ ID NO: 4083339 - DNA, 25 bp, Homo sapien
tattctgatccgtggaatatcttca

SEQ ID NO: 4083340 - DNA, 25 bp, Homo sapien
tctccatggacttcccgtctatagg

SEQ ID NO: 4083341 - DNA, 25 bp, Homo sapien
agtgttacacgtagtcccagtttgg

SEQ ID NO: 4083342 - DNA, 25 bp, Homo sapien
caaggcgctgtccaaatcattcatg

SEQ ID NO: 4083343 - DNA, 25 bp, Homo sapien
gatagccagcctgatctgagtcaag

SEQ ID NO: 4083344 - DNA, 25 bp, Homo sapien
tcattcatggactgcgagggaaggg

SEQ ID NO: 4083345 - DNA, 25 bp, Homo sapien
gggctgagctggcaggcccctccat

SEQ ID NO: 4083346 - DNA, 25 bp, Homo sapien
gctggcaggcccctccatggatcac

SEQ ID NO: 4083347 - DNA, 25 bp, Homo sapien
agggctgagctggcaggcccctcca

SEQ ID NO: 4083348 - DNA, 25 bp, Homo sapien
tgagctggcaggcccctccatggat

SEQ ID NO: 4083349 - DNA, 25 bp, Homo sapien
tagttgatttgatgatcccactcac

SEQ ID NO: 4083350 - DNA, 25 bp, Homo sapien
gctgtaactcacatctgctctttga

SEQ ID NO: 4083351 - DNA, 25 bp, Homo sapien
tattgagcagttactgataccttgc

SEQ ID NO: 4083352 - DNA, 25 bp, Homo sapien
cagttgttccagagacgatgggctt

SEQ ID NO: 4083353 - DNA, 25 bp, Homo sapien
gtcatgatataatcaggaatgttat

SEQ ID NO: 4083354 - DNA, 25 bp, Homo sapien
tgggagtggtcatgatataatcagg

SEQ ID NO: 4083355 - DNA, 25 bp, Homo sapien
ggagtggtcatgatataatcaggaa

SEQ ID NO: 4083356 - DNA, 25 bp, Homo sapien
tataatcaggaatgttatattcaca

SEQ ID NO: 4083357 - DNA, 25 bp, Homo sapien
tcatgacagcagcttcagaaccaga

SEQ ID NO: 4083358 - DNA, 25 bp, Homo sapien
aaccagagctggcttccaggcaagg

SEQ ID NO: 4083359 - DNA, 25 bp, Homo sapien
gcagcttcagaaccagagctggctt

SEQ ID NO: 4083360 - DNA, 25 bp, Homo sapien
gcttcagaaccagagctggcttcca

SEQ ID NO: 4083361 - DNA, 25 bp, Homo sapien
agcaggatgttgtaacgggaaatgc

SEQ ID NO: 4083362 - DNA, 25 bp, Homo sapien
ctttgccctgaagatgctggcagag

SEQ ID NO: 4083363 - DNA, 25 bp, Homo sapien
ggatgttgtaacgggaaatgccaga

SEQ ID NO: 4083364 - DNA, 25 bp, Homo sapien
caggatgttgtaacgggaaatgcca

SEQ ID NO: 4083365 - DNA, 25 bp, Homo sapien
gcgcgggatcgctgcgggaaaccag

SEQ ID NO: 4083366 - DNA, 25 bp, Homo sapien
ctgcgcgggatcgctgcgggaaacc

SEQ ID NO: 4083367 - DNA, 25 bp, Homo sapien
tgcgcgggatcgctgcgggaaacca

SEQ ID NO: 4083368 - DNA, 25 bp, Homo sapien
gccggcgtttgaccgcgcttgggtg

SEQ ID NO: 4083369 - DNA, 25 bp, Homo sapien
tgcgtcaggtaagcgaggccgggcc

SEQ ID NO: 4083370 - DNA, 25 bp, Homo sapien
ggccgccggcgtttgaccgcgcttg

SEQ ID NO: 4083371 - DNA, 25 bp, Homo sapien
ctgcgtcaggtaagcgaggccgggc

SEQ ID NO: 4083372 - DNA, 25 bp, Homo sapien
tgcgcgacgctctcttcgcggctaa

SEQ ID NO: 4083373 - DNA, 25 bp, Homo sapien
ggccctgcgcgcctgatgggtcgag

SEQ ID NO: 4083374 - DNA, 25 bp, Homo sapien
gagcccgcgcgagtttcgggagcgg

SEQ ID NO: 4083375 - DNA, 25 bp, Homo sapien
ccgactgcgagagcccgcgcgagtt

SEQ ID NO: 4083376 - DNA, 25 bp, Homo sapien
tctggaacactgcttcccacggctg

SEQ ID NO: 4083377 - DNA, 25 bp, Homo sapien
ctgtggccgcctctggaacactgct

SEQ ID NO: 4083378 - DNA, 25 bp, Homo sapien
gagctttgcgggcagctggagcgct

SEQ ID NO: 4083379 - DNA, 25 bp, Homo sapien
gctttgcgggcagctggagcgctac

SEQ ID NO: 4083380 - DNA, 25 bp, Homo sapien
gccaaaatgttcattagatactgtt

SEQ ID NO: 4083381 - DNA, 25 bp, Homo sapien
tcagttttaattaatattggggcca

SEQ ID NO: 4083382 - DNA, 25 bp, Homo sapien
tttaatgatcagtttttatgcaaat

SEQ ID NO: 4083383 - DNA, 25 bp, Homo sapien
tatgcaaatgatttatataagtcag

SEQ ID NO: 4083384 - DNA, 25 bp, Homo sapien
agtgccacaggatgttttaacgggt

SEQ ID NO: 4083385 - DNA, 25 bp, Homo sapien
ccaatatccatagggtgatggtcaa

SEQ ID NO: 4083386 - DNA, 25 bp, Homo sapien
gccacaggatgttttaacgggttca

SEQ ID NO: 4083387 - DNA, 25 bp, Homo sapien
gccaatatccatagggtgatggtca

SEQ ID NO: 4083388 - DNA, 25 bp, Homo sapien
aatgagaaccgatcaaggcctccag

SEQ ID NO: 4083389 - DNA, 25 bp, Homo sapien
tgagaaccgatcaaggcctccagtc

SEQ ID NO: 4083390 - DNA, 25 bp, Homo sapien
caatgagaaccgatcaaggcctcca

SEQ ID NO: 4083391 - DNA, 25 bp, Homo sapien
gagaaccgatcaaggcctccagtca

SEQ ID NO: 4083392 - DNA, 25 bp, Homo sapien
gtggctgtctgagggatactgccat

SEQ ID NO: 4083393 - DNA, 25 bp, Homo sapien
tcctgttcgctcctgctggaactct

SEQ ID NO: 4083394 - DNA, 25 bp, Homo sapien
ctgctggaactctagggctgttttt

SEQ ID NO: 4083395 - DNA, 25 bp, Homo sapien
tgtctgagggatactgccatttgtt

SEQ ID NO: 4083396 - DNA, 25 bp, Homo sapien
cagatgatgtagggccttccctgtg

SEQ ID NO: 4083397 - DNA, 25 bp, Homo sapien
gatgatgtagggccttccctgtgaa

SEQ ID NO: 4083398 - DNA, 25 bp, Homo sapien
gatgtagggccttccctgtgaaaac

SEQ ID NO: 4083399 - DNA, 25 bp, Homo sapien
tgatgtagggccttccctgtgaaaa

SEQ ID NO: 4083400 - DNA, 25 bp, Homo sapien
gagcaggagtcgggggagaggtaga

SEQ ID NO: 4083401 - DNA, 25 bp, Homo sapien
ggaggtggagcaggagtcgggggag

SEQ ID NO: 4083402 - DNA, 25 bp, Homo sapien
ctggcagaggggcacccagtccctc

SEQ ID NO: 4083403 - DNA, 25 bp, Homo sapien
aggaggaggtggagcaggagtcggg

SEQ ID NO: 4083404 - DNA, 25 bp, Homo sapien
agttgactgatttctacggaccttg

SEQ ID NO: 4083405 - DNA, 25 bp, Homo sapien
tgactgatttctacggaccttgaat

SEQ ID NO: 4083406 - DNA, 25 bp, Homo sapien
ttgactgatttctacggaccttgaa

SEQ ID NO: 4083407 - DNA, 25 bp, Homo sapien
gttgactgatttctacggaccttga

SEQ ID NO: 4083408 - DNA, 25 bp, Homo sapien
ttcttccagctgatgttccacttgt

SEQ ID NO: 4083409 - DNA, 25 bp, Homo sapien
ttccagctgatgttccacttgtttc

SEQ ID NO: 4083410 - DNA, 25 bp, Homo sapien
cttccagctgatgttccacttgttt

SEQ ID NO: 4083411 - DNA, 25 bp, Homo sapien
tcttccagctgatgttccacttgtt

SEQ ID NO: 4083412 - DNA, 25 bp, Homo sapien
gagccttcttccagcagtcatgttg

SEQ ID NO: 4083413 - DNA, 25 bp, Homo sapien
catgttgcaaggaaacgaaatcacg

SEQ ID NO: 4083414 - DNA, 25 bp, Homo sapien
ttgcaaggaaacgaaatcacgttac

SEQ ID NO: 4083415 - DNA, 25 bp, Homo sapien
tccagcagtcatgttgcaaggaaac

SEQ ID NO: 4083416 - DNA, 25 bp, Homo sapien
agaatgccaccaatgccccaggaca

SEQ ID NO: 4083417 - DNA, 25 bp, Homo sapien
aatgccaccaatgccccaggacagg

SEQ ID NO: 4083418 - DNA, 25 bp, Homo sapien
cagaatgccaccaatgccccaggac

SEQ ID NO: 4083419 - DNA, 25 bp, Homo sapien
gaatgccaccaatgccccaggacag

SEQ ID NO: 4083420 - DNA, 25 bp, Homo sapien
taggaagaggaagacagagctctta

SEQ ID NO: 4083421 - DNA, 25 bp, Homo sapien
ctgtaggaagaggaagacagagctc

SEQ ID NO: 4083422 - DNA, 25 bp, Homo sapien
aggaagaggaagacagagctcttac

SEQ ID NO: 4083423 - DNA, 25 bp, Homo sapien
tgtaggaagaggaagacagagctct

SEQ ID NO: 4083424 - DNA, 25 bp, Homo sapien
ctctagcacccttttggctttctgt

SEQ ID NO: 4083425 - DNA, 25 bp, Homo sapien
ttttggctttctgtttcttgatgtt

SEQ ID NO: 4083426 - DNA, 25 bp, Homo sapien
tggctttctgtttcttgatgtttgc

SEQ ID NO: 4083427 - DNA, 25 bp, Homo sapien
tctagcacccttttggctttctgtt

SEQ ID NO: 4083428 - DNA, 25 bp, Homo sapien
tgagagaacgtttcatgtggtacag

SEQ ID NO: 4083429 - DNA, 25 bp, Homo sapien
cctctttctgtatgttcaatgtctg

SEQ ID NO: 4083430 - DNA, 25 bp, Homo sapien
tcaaagtatctgagagaacgtttca

SEQ ID NO: 4083431 - DNA, 25 bp, Homo sapien
tgtggtacaggtccgtatttagttc

SEQ ID NO: 4083432 - DNA, 25 bp, Homo sapien
cttcttctgtgtggccatgacatca

SEQ ID NO: 4083433 - DNA, 25 bp, Homo sapien
ctgtgtggccatgacatcagagaga

SEQ ID NO: 4083434 - DNA, 25 bp, Homo sapien
ggccatgacatcagagagaacactc

SEQ ID NO: 4083435 - DNA, 25 bp, Homo sapien
agagagaacactctctaactctcct

SEQ ID NO: 4083436 - DNA, 25 bp, Homo sapien
tcagctgcactttcagtagtgcctc

SEQ ID NO: 4083437 - DNA, 25 bp, Homo sapien
agctgcactttcagtagtgcctcct

SEQ ID NO: 4083438 - DNA, 25 bp, Homo sapien
gctgcactttcagtagtgcctcctc

SEQ ID NO: 4083439 - DNA, 25 bp, Homo sapien
cagctgcactttcagtagtgcctcc

SEQ ID NO: 4083440 - DNA, 25 bp, Homo sapien
gttcagcatattcatgtctttctaa

SEQ ID NO: 4083441 - DNA, 25 bp, Homo sapien
agcatattcatgtctttctaattgg

SEQ ID NO: 4083442 - DNA, 25 bp, Homo sapien
catattcatgtctttctaattggag

SEQ ID NO: 4083443 - DNA, 25 bp, Homo sapien
tcagcatattcatgtctttctaatt

SEQ ID NO: 4083444 - DNA, 25 bp, Homo sapien
ctctacccgacgcatatcttgctgc

SEQ ID NO: 4083445 - DNA, 25 bp, Homo sapien
ctacccgacgcatatcttgctgctt

SEQ ID NO: 4083446 - DNA, 25 bp, Homo sapien
tctacccgacgcatatcttgctgct

SEQ ID NO: 4083447 - DNA, 25 bp, Homo sapien
agcgctcctgccactctctctagtt

SEQ ID NO: 4083448 - DNA, 25 bp, Homo sapien
tggagcgctcctgccactctctcta

SEQ ID NO: 4083449 - DNA, 25 bp, Homo sapien
cctggagcgctcctgccactctctc

SEQ ID NO: 4083450 - DNA, 25 bp, Homo sapien
ctctagttccttcctcaggtgctgc

SEQ ID NO: 4083451 - DNA, 25 bp, Homo sapien
ctgctgaaggctcttgtgctgctcc

SEQ ID NO: 4083452 - DNA, 25 bp, Homo sapien
ctgctccaactgcagtgcgctcttg

SEQ ID NO: 4083453 - DNA, 25 bp, Homo sapien
tgcagtgcgctcttgttctcattgt

SEQ ID NO: 4083454 - DNA, 25 bp, Homo sapien
ctcaccaagcttctcctgtagctcc

SEQ ID NO: 4083455 - DNA, 25 bp, Homo sapien
accaagcttctcctgtagctccttt

SEQ ID NO: 4083456 - DNA, 25 bp, Homo sapien
tcttggatggggtggaggtttccga

SEQ ID NO: 4083457 - DNA, 25 bp, Homo sapien
cctcccagcccttcttggatggggt

SEQ ID NO: 4083458 - DNA, 25 bp, Homo sapien
tggatggggtggaggtttccgactc

SEQ ID NO: 4083459 - DNA, 25 bp, Homo sapien
cccagcccttcttggatggggtgga

SEQ ID NO: 4083460 - DNA, 25 bp, Homo sapien
gcaggaagcaagaaacaggactgcc

SEQ ID NO: 4083461 - DNA, 25 bp, Homo sapien
aagcaagaaacaggactgccctggg

SEQ ID NO: 4083462 - DNA, 25 bp, Homo sapien
aggaagcaagaaacaggactgccct

SEQ ID NO: 4083463 - DNA, 25 bp, Homo sapien
gctggaagctgcctctggcctggta

SEQ ID NO: 4083464 - DNA, 25 bp, Homo sapien
tcttcccctgtgattgggggctcca

SEQ ID NO: 4083465 - DNA, 25 bp, Homo sapien
gggctccatgcctctagctaggatg

SEQ ID NO: 4083466 - DNA, 25 bp, Homo sapien
gctccatgcctctagctaggatgat

SEQ ID NO: 4083467 - DNA, 25 bp, Homo sapien
ccatgcctctagctaggatgatgat

SEQ ID NO: 4083468 - DNA, 25 bp, Homo sapien
actgcacctggcataaggagcctgt

SEQ ID NO: 4083469 - DNA, 25 bp, Homo sapien
gccactgcacctggcataaggagcc

SEQ ID NO: 4083470 - DNA, 25 bp, Homo sapien
cactgcacctggcataaggagcctg

SEQ ID NO: 4083471 - DNA, 25 bp, Homo sapien
tgcacctggcataaggagcctgtta

SEQ ID NO: 4083472 - DNA, 25 bp, Homo sapien
tgcaggtgacccaggtaatggtctg

SEQ ID NO: 4083473 - DNA, 25 bp, Homo sapien
tgacccaggtaatggtctggctgct

SEQ ID NO: 4083474 - DNA, 25 bp, Homo sapien
caggtgacccaggtaatggtctggc

SEQ ID NO: 4083475 - DNA, 25 bp, Homo sapien
gtgacccaggtaatggtctggctgc

SEQ ID NO: 4083476 - DNA, 25 bp, Homo sapien
ctgctgctgataggtggccacgtac

SEQ ID NO: 4083477 - DNA, 25 bp, Homo sapien
gaggctcagctgggctgttagctgc

SEQ ID NO: 4083478 - DNA, 25 bp, Homo sapien
cagctgggctgttagctgctggttc

SEQ ID NO: 4083479 - DNA, 25 bp, Homo sapien
ggctcagctgggctgttagctgctg

SEQ ID NO: 4083480 - DNA, 25 bp, Homo sapien
ctcagctgggctgttagctgctggt

SEQ ID NO: 4083481 - DNA, 25 bp, Homo sapien
ttgctattccgcccaggcacattcc

SEQ ID NO: 4083482 - DNA, 25 bp, Homo sapien
ggcacattcccactactggtcgatg

SEQ ID NO: 4083483 - DNA, 25 bp, Homo sapien
cattcccactactggtcgatgtggg

SEQ ID NO: 4083484 - DNA, 25 bp, Homo sapien
ccacactgatgcccaacttagtgca

SEQ ID NO: 4083485 - DNA, 25 bp, Homo sapien
actcggcatgggctgaggtgcctcc

SEQ ID NO: 4083486 - DNA, 25 bp, Homo sapien
cactgtccagatgttctcctccgtg

SEQ ID NO: 4083487 - DNA, 25 bp, Homo sapien
actgtccagatgttctcctccgtgt

SEQ ID NO: 4083488 - DNA, 25 bp, Homo sapien
ctgggacactcggcatgggctgagg

SEQ ID NO: 4083489 - DNA, 25 bp, Homo sapien
catggcctccctgctctccaggtcc

SEQ ID NO: 4083490 - DNA, 25 bp, Homo sapien
atggcctccctgctctccaggtcct

SEQ ID NO: 4083491 - DNA, 25 bp, Homo sapien
ctgagggcaagatgtgagcattctt

SEQ ID NO: 4083492 - DNA, 25 bp, Homo sapien
gccaggcgctggcagcataccctct

SEQ ID NO: 4083493 - DNA, 25 bp, Homo sapien
aggcgctggcagcataccctctgct

SEQ ID NO: 4083494 - DNA, 25 bp, Homo sapien
tggcagcataccctctgctctttca

SEQ ID NO: 4083495 - DNA, 25 bp, Homo sapien
gctggcagcataccctctgctcttt

SEQ ID NO: 4083496 - DNA, 25 bp, Homo sapien
ctgccctcaggtggcattttcaagt

SEQ ID NO: 4083497 - DNA, 25 bp, Homo sapien
tctcctccaggtggtccataaagct

SEQ ID NO: 4083498 - DNA, 25 bp, Homo sapien
cctccaggtggtccataaagctgct

SEQ ID NO: 4083499 - DNA, 25 bp, Homo sapien
ggtctgccttctcctccaggtggtc

SEQ ID NO: 4083500 - DNA, 25 bp, Homo sapien
aggtctgccttctcctccaggtggt

SEQ ID NO: 4083501 - DNA, 25 bp, Homo sapien
catctctctcgccagtggtggatga

SEQ ID NO: 4083502 - DNA, 25 bp, Homo sapien
tctctctcgccagtggtggatgaag

SEQ ID NO: 4083503 - DNA, 25 bp, Homo sapien
ctctcgccagtggtggatgaagcag

SEQ ID NO: 4083504 - DNA, 25 bp, Homo sapien
tggatgaagcagagttcttttttct

SEQ ID NO: 4083505 - DNA, 25 bp, Homo sapien
atctttggcacggccccctggttct

SEQ ID NO: 4083506 - DNA, 25 bp, Homo sapien
tctttggcacggccccctggttctg

SEQ ID NO: 4083507 - DNA, 25 bp, Homo sapien
atctgctgcagctccagcagcttca

SEQ ID NO: 4083508 - DNA, 25 bp, Homo sapien
catctgctgcagctccagcagcttc

SEQ ID NO: 4083509 - DNA, 25 bp, Homo sapien
tctgctgcagctccagcagcttcac

SEQ ID NO: 4083510 - DNA, 25 bp, Homo sapien
ttgtagttgctgtaagccgcaatac

SEQ ID NO: 4083511 - DNA, 25 bp, Homo sapien
gcccattgttgtagttgctgtaagc

SEQ ID NO: 4083512 - DNA, 25 bp, Homo sapien
ggaattttctgtgcccattgttgta

SEQ ID NO: 4083513 - DNA, 25 bp, Homo sapien
gggttgtgggcagcggccaggaatt

SEQ ID NO: 4083514 - DNA, 25 bp, Homo sapien
caccatgcttgtctgcagccccaag

SEQ ID NO: 4083515 - DNA, 25 bp, Homo sapien
ccatgcttgtctgcagccccaagct

SEQ ID NO: 4083516 - DNA, 25 bp, Homo sapien
catgcttgtctgcagccccaagctc

SEQ ID NO: 4083517 - DNA, 25 bp, Homo sapien
accatgcttgtctgcagccccaagc

SEQ ID NO: 4083518 - DNA, 25 bp, Homo sapien
tcttgagcagctgtttgatgatggt

SEQ ID NO: 4083519 - DNA, 25 bp, Homo sapien
aaagaatggcacacagcagttgctg

SEQ ID NO: 4083520 - DNA, 25 bp, Homo sapien
ttgagcagctgtttgatgatggtga

SEQ ID NO: 4083521 - DNA, 25 bp, Homo sapien
aaatttcttgagcagctgtttgatg

SEQ ID NO: 4083522 - DNA, 25 bp, Homo sapien
aagtaaatgaattgtgtaggagatt

SEQ ID NO: 4083523 - DNA, 25 bp, Homo sapien
taaatgaattgtgtaggagattaac

SEQ ID NO: 4083524 - DNA, 25 bp, Homo sapien
taacattcaaaggaagtaaatgaat

SEQ ID NO: 4083525 - DNA, 25 bp, Homo sapien
ctaacattcaaaggaagtaaatgaa

SEQ ID NO: 4083526 - DNA, 25 bp, Homo sapien
caataaggccactctagggaaaaat

SEQ ID NO: 4083527 - DNA, 25 bp, Homo sapien
ataaggccactctagggaaaaatct

SEQ ID NO: 4083528 - DNA, 25 bp, Homo sapien
ggagttttcagtaccacatgggaga

SEQ ID NO: 4083529 - DNA, 25 bp, Homo sapien
tatcctggttgttaagccctcctta

SEQ ID NO: 4083530 - DNA, 25 bp, Homo sapien
caaaggaagcccgtgatctctaggc

SEQ ID NO: 4083531 - DNA, 25 bp, Homo sapien
caaccattgtggtctggcttccact

SEQ ID NO: 4083532 - DNA, 25 bp, Homo sapien
ctcctgaagaaaggcggtgaagact

SEQ ID NO: 4083533 - DNA, 25 bp, Homo sapien
gactcctgaagaaaggcggtgaaga

SEQ ID NO: 4083534 - DNA, 25 bp, Homo sapien
aagactgtgaagagcgggtcaggaa

SEQ ID NO: 4083535 - DNA, 25 bp, Homo sapien
gggagactcctgaagaaaggcggtg

SEQ ID NO: 4083536 - DNA, 25 bp, Homo sapien
cttggtgagcgccagtaggaactga

SEQ ID NO: 4083537 - DNA, 25 bp, Homo sapien
gtgagcgccagtaggaactgagctc

SEQ ID NO: 4083538 - DNA, 25 bp, Homo sapien
agagccctggcgcaacctgaagtaa

SEQ ID NO: 4083539 - DNA, 25 bp, Homo sapien
gagccctggcgcaacctgaagtaat

SEQ ID NO: 4083540 - DNA, 25 bp, Homo sapien
agccctggcgcaacctgaagtaatc

SEQ ID NO: 4083541 - DNA, 25 bp, Homo sapien
cagagccctggcgcaacctgaagta

SEQ ID NO: 4083542 - DNA, 25 bp, Homo sapien
ccgagtccgtgaccgccaggcagtg

SEQ ID NO: 4083543 - DNA, 25 bp, Homo sapien
cccgagtccgtgaccgccaggcagt

SEQ ID NO: 4083544 - DNA, 25 bp, Homo sapien
ccccgagtccgtgaccgccaggcag

SEQ ID NO: 4083545 - DNA, 25 bp, Homo sapien
tggtcgtgccattgccctgctggcc

SEQ ID NO: 4083546 - DNA, 25 bp, Homo sapien
aagaggacgggctcgtggacagagg

SEQ ID NO: 4083547 - DNA, 25 bp, Homo sapien
tctggccttctaagccttgcacgag

SEQ ID NO: 4083548 - DNA, 25 bp, Homo sapien
ggcttcctgttaaccgtggtcgtgc

SEQ ID NO: 4083549 - DNA, 25 bp, Homo sapien
actttcattccagcatgtataaatc

SEQ ID NO: 4083550 - DNA, 25 bp, Homo sapien
atgtataaatcacatgagcgcacac

SEQ ID NO: 4083551 - DNA, 25 bp, Homo sapien
tataaatcacatgagcgcacaccat

SEQ ID NO: 4083552 - DNA, 25 bp, Homo sapien
ttcattccagcatgtataaatcaca

SEQ ID NO: 4083553 - DNA, 25 bp, Homo sapien
atatgtcaattataactgaataaag

SEQ ID NO: 4083554 - DNA, 25 bp, Homo sapien
aaaatacaaaagagcccagtacagt

SEQ ID NO: 4083555 - DNA, 25 bp, Homo sapien
aaatacaaaagagcccagtacagtg

SEQ ID NO: 4083556 - DNA, 25 bp, Homo sapien
tattatatgtcaattataactgaat

SEQ ID NO: 4083557 - DNA, 25 bp, Homo sapien
tgtgcgaaggtgatgtgatgttggc

SEQ ID NO: 4083558 - DNA, 25 bp, Homo sapien
tggacagagatggattgcatgatct

SEQ ID NO: 4083559 - DNA, 25 bp, Homo sapien
ggattgcatgatctcaatgtgcagt

SEQ ID NO: 4083560 - DNA, 25 bp, Homo sapien
gccgaacatacgaagaagtgtgcga

SEQ ID NO: 4083561 - DNA, 25 bp, Homo sapien
attctaacatctgcccacctgttgg

SEQ ID NO: 4083562 - DNA, 25 bp, Homo sapien
tggccaaatctatcttttgctgtac

SEQ ID NO: 4083563 - DNA, 25 bp, Homo sapien
cacctgttggtctgctgctctttgc

SEQ ID NO: 4083564 - DNA, 25 bp, Homo sapien
gaatttcttgtttgctaattctaac

SEQ ID NO: 4083565 - DNA, 25 bp, Homo sapien
tgctgcggcgccagcagttgaagct

SEQ ID NO: 4083566 - DNA, 25 bp, Homo sapien
ggtcgggcgctgttctcccaccagg

SEQ ID NO: 4083567 - DNA, 25 bp, Homo sapien
cagcagttgaagctatacatcctga

SEQ ID NO: 4083568 - DNA, 25 bp, Homo sapien
tacatcctgaaagcaggtcgggcgc

SEQ ID NO: 4083569 - DNA, 25 bp, Homo sapien
ataaagaaatcgactaaacaggcct

SEQ ID NO: 4083570 - DNA, 25 bp, Homo sapien
gtgaacctcgctggaagcaagttag

SEQ ID NO: 4083571 - DNA, 25 bp, Homo sapien
gaaatcgactaaacaggcctttgca

SEQ ID NO: 4083572 - DNA, 25 bp, Homo sapien
ctgtctgggctcagttggtgaacct

SEQ ID NO: 4083573 - DNA, 25 bp, Homo sapien
tcaacttgagtgtaattacctggct

SEQ ID NO: 4083574 - DNA, 25 bp, Homo sapien
gattacttgcattatgagaacagaa

SEQ ID NO: 4083575 - DNA, 25 bp, Homo sapien
cagaaaataaagagaggctgggcgc

SEQ ID NO: 4083576 - DNA, 25 bp, Homo sapien
tacctggctgtaaaataatgaatct

SEQ ID NO: 4083577 - DNA, 25 bp, Homo sapien
ctgcaacaaacggcggttgttgtca

SEQ ID NO: 4083578 - DNA, 25 bp, Homo sapien
tctgcaacaaacggcggttgttgtc

SEQ ID NO: 4083579 - DNA, 25 bp, Homo sapien
aacaaacggcggttgttgtcatggc

SEQ ID NO: 4083580 - DNA, 25 bp, Homo sapien
gcaacaaacggcggttgttgtcatg

SEQ ID NO: 4083581 - DNA, 25 bp, Homo sapien
taattagtgacaccatgcatggtag

SEQ ID NO: 4083582 - DNA, 25 bp, Homo sapien
tagccactattatcccttcagagtg

SEQ ID NO: 4083583 - DNA, 25 bp, Homo sapien
ctttcctggcatggacatacatatg

SEQ ID NO: 4083584 - DNA, 25 bp, Homo sapien
taggagttccttatcatggatggac

SEQ ID NO: 4083585 - DNA, 25 bp, Homo sapien
gcattcagttaatcatgtgtgttgt

SEQ ID NO: 4083586 - DNA, 25 bp, Homo sapien
gatctgttacaggtatgattgatgt

SEQ ID NO: 4083587 - DNA, 25 bp, Homo sapien
cacgcccggccaatatattggtttc

SEQ ID NO: 4083588 - DNA, 25 bp, Homo sapien
aaaattatactggatctgttacagg

SEQ ID NO: 4083589 - DNA, 25 bp, Homo sapien
ttattagtcacgcatgctcacagcc

SEQ ID NO: 4083590 - DNA, 25 bp, Homo sapien
taggacaccgacactggacagatga

SEQ ID NO: 4083591 - DNA, 25 bp, Homo sapien
gttctcacctgagccgtgttcctgg

SEQ ID NO: 4083592 - DNA, 25 bp, Homo sapien
tatgggatggctgaacgtaggacac

SEQ ID NO: 4083593 - DNA, 25 bp, Homo sapien
tctacagtgaactcacctttgacag

SEQ ID NO: 4083594 - DNA, 25 bp, Homo sapien
cctaagacttcagactatgaaagtg

SEQ ID NO: 4083595 - DNA, 25 bp, Homo sapien
cctttgacagaggtgcccggaggat

SEQ ID NO: 4083596 - DNA, 25 bp, Homo sapien
agggaaaggatagcctcattgataa

SEQ ID NO: 4083597 - DNA, 25 bp, Homo sapien
cctcaggtccgtcaaggtttgttga

SEQ ID NO: 4083598 - DNA, 25 bp, Homo sapien
tatatttgcgcatactgccccagtg

SEQ ID NO: 4083599 - DNA, 25 bp, Homo sapien
aatattgtcacttcggctgggcgcg

SEQ ID NO: 4083600 - DNA, 25 bp, Homo sapien
caatgtgtgtgcgtagttctgtgcc

SEQ ID NO: 4083601 - DNA, 25 bp, Homo sapien
gtgactgttgtttgttactgatcgt

SEQ ID NO: 4083602 - DNA, 25 bp, Homo sapien
ggtgactgttgtttgttactgatcg

SEQ ID NO: 4083603 - DNA, 25 bp, Homo sapien
tggtgactgttgtttgttactgatc

SEQ ID NO: 4083604 - DNA, 25 bp, Homo sapien
caggctcgcctcgactccaaatggt

SEQ ID NO: 4083605 - DNA, 25 bp, Homo sapien
ggttgaaaacagatatacaggtggg

SEQ ID NO: 4083606 - DNA, 25 bp, Homo sapien
tacaggtggggtttgacatgtcttt

SEQ ID NO: 4083607 - DNA, 25 bp, Homo sapien
gcctcgactccaaatggttgaaaac

SEQ ID NO: 4083608 - DNA, 25 bp, Homo sapien
cacctgaacccggtaagtcaaggct

SEQ ID NO: 4083609 - DNA, 25 bp, Homo sapien
ctgcagtcccagctagtggcaaggc

SEQ ID NO: 4083610 - DNA, 25 bp, Homo sapien
gctgaggtggagaaccacctgaacc

SEQ ID NO: 4083611 - DNA, 25 bp, Homo sapien
caggtgtggttccatgtgcctgcag

SEQ ID NO: 4083612 - DNA, 25 bp, Homo sapien
ctggagcgctatggtgcgatctcag

SEQ ID NO: 4083613 - DNA, 25 bp, Homo sapien
gctggagcgctatggtgcgatctca

SEQ ID NO: 4083614 - DNA, 25 bp, Homo sapien
cacagcaactagtgaataatagcct

SEQ ID NO: 4083615 - DNA, 25 bp, Homo sapien
gtcttgggcatcaactctaataatt

SEQ ID NO: 4083616 - DNA, 25 bp, Homo sapien
tctaactgcacccagaaatactgat

SEQ ID NO: 4083617 - DNA, 25 bp, Homo sapien
tacacaaactagaggcaccgtggtg

SEQ ID NO: 4083618 - DNA, 25 bp, Homo sapien
tgagcaaatatccaccccaaaaggg

SEQ ID NO: 4083619 - DNA, 25 bp, Homo sapien
tcaaaagtcactgagcaaatatcca

SEQ ID NO: 4083620 - DNA, 25 bp, Homo sapien
acggccacgcactctttctcctggg

SEQ ID NO: 4083621 - DNA, 25 bp, Homo sapien
tggggcgggggccagtccgtggagc

SEQ ID NO: 4083622 - DNA, 25 bp, Homo sapien
ggggccagtccgtggagccatccat

SEQ ID NO: 4083623 - DNA, 25 bp, Homo sapien
aagattcagcgttgccacggccacg

SEQ ID NO: 4083624 - DNA, 25 bp, Homo sapien
gcacgtctgcgctgcttgccagggt

SEQ ID NO: 4083625 - DNA, 25 bp, Homo sapien
tcagcacgtctgcgctgcttgccag

SEQ ID NO: 4083626 - DNA, 25 bp, Homo sapien
gtgctcagcacgtctgcgctgcttg

SEQ ID NO: 4083627 - DNA, 25 bp, Homo sapien
acgtctgcgctgcttgccagggtca

SEQ ID NO: 4083628 - DNA, 25 bp, Homo sapien
ctgcttctcagcggtgggcaacagc

SEQ ID NO: 4083629 - DNA, 25 bp, Homo sapien
gcttctcagcggtgggcaacagcat

SEQ ID NO: 4083630 - DNA, 25 bp, Homo sapien
ggcctgcttctcagcggtgggcaac

SEQ ID NO: 4083631 - DNA, 25 bp, Homo sapien
cttctcagcggtgggcaacagcatg

SEQ ID NO: 4083632 - DNA, 25 bp, Homo sapien
atttgagtgaaacgccatcccctcc

SEQ ID NO: 4083633 - DNA, 25 bp, Homo sapien
caatttgagtgaaacgccatcccct

SEQ ID NO: 4083634 - DNA, 25 bp, Homo sapien
gccaatttgagtgaaacgccatccc

SEQ ID NO: 4083635 - DNA, 25 bp, Homo sapien
tgtgccaatttgagtgaaacgccat

SEQ ID NO: 4083636 - DNA, 25 bp, Homo sapien
atcaatcaccaatcgatgacctgga

SEQ ID NO: 4083637 - DNA, 25 bp, Homo sapien
aagatcaatcaccaatcgatgacct

SEQ ID NO: 4083638 - DNA, 25 bp, Homo sapien
tcaatcaccaatcgatgacctggac

SEQ ID NO: 4083639 - DNA, 25 bp, Homo sapien
gatcaatcaccaatcgatgacctgg

SEQ ID NO: 4083640 - DNA, 25 bp, Homo sapien
gtgtaaggctgactccaaccctcca

SEQ ID NO: 4083641 - DNA, 25 bp, Homo sapien
agtaatggctgcgtgtaaggctgac

SEQ ID NO: 4083642 - DNA, 25 bp, Homo sapien
tctctgcagtaatggctgcgtgtaa

SEQ ID NO: 4083643 - DNA, 25 bp, Homo sapien
ggctgcgtgtaaggctgactccaac

SEQ ID NO: 4083644 - DNA, 25 bp, Homo sapien
ccagctgctctgtaaggacaagaag

SEQ ID NO: 4083645 - DNA, 25 bp, Homo sapien
caaaacccaatgtgatcggctccac

SEQ ID NO: 4083646 - DNA, 25 bp, Homo sapien
gatccaaggtctaggctgcctctgc

SEQ ID NO: 4083647 - DNA, 25 bp, Homo sapien
taaaatccttaaccctgctaatggc

SEQ ID NO: 4083648 - DNA, 25 bp, Homo sapien
cctccttctatgaaatgttgaggca

SEQ ID NO: 4083649 - DNA, 25 bp, Homo sapien
tatccaatggagtcctccttctatg

SEQ ID NO: 4083650 - DNA, 25 bp, Homo sapien
cgtattaataaggtctttatccaat

SEQ ID NO: 4083651 - DNA, 25 bp, Homo sapien
taataaggtctttatccaatggagt

SEQ ID NO: 4083652 - DNA, 25 bp, Homo sapien
tgttgtatgagctgaaccagaggca

SEQ ID NO: 4083653 - DNA, 25 bp, Homo sapien
ccagaggcaaacactgtttgccaga

SEQ ID NO: 4083654 - DNA, 25 bp, Homo sapien
agaagctgttgtatgagctgaacca

SEQ ID NO: 4083655 - DNA, 25 bp, Homo sapien
tgtatgagctgaaccagaggcaaac

SEQ ID NO: 4083656 - DNA, 25 bp, Homo sapien
tttgataggccaaagtggatggacc

SEQ ID NO: 4083657 - DNA, 25 bp, Homo sapien
aaagggtctgctctttatcctaaca

SEQ ID NO: 4083658 - DNA, 25 bp, Homo sapien
gagatccttgcgctagatttcacta

SEQ ID NO: 4083659 - DNA, 25 bp, Homo sapien
ccaaggttagcgtctgttcacaggc

SEQ ID NO: 4083660 - DNA, 25 bp, Homo sapien
aaccaaaaagtcacacgcagcgaag

SEQ ID NO: 4083661 - DNA, 25 bp, Homo sapien
gtcacacgcagcgaagacgaagaca

SEQ ID NO: 4083662 - DNA, 25 bp, Homo sapien
aaagtcacacgcagcgaagacgaag

SEQ ID NO: 4083663 - DNA, 25 bp, Homo sapien
acgcagcgaagacgaagacacagga

SEQ ID NO: 4083664 - DNA, 25 bp, Homo sapien
cttcactacatgataccctgcctgg

SEQ ID NO: 4083665 - DNA, 25 bp, Homo sapien
cactacatgataccctgcctggata

SEQ ID NO: 4083666 - DNA, 25 bp, Homo sapien
atcaccttcactacatgataccctg

SEQ ID NO: 4083667 - DNA, 25 bp, Homo sapien
atgataccctgcctggataacacca

SEQ ID NO: 4083668 - DNA, 25 bp, Homo sapien
agaagttaggtttgagggcatcctc

SEQ ID NO: 4083669 - DNA, 25 bp, Homo sapien
gcaacaatgctgttgacgtggagca

SEQ ID NO: 4083670 - DNA, 25 bp, Homo sapien
tggagcagacttcccatttgggatg

SEQ ID NO: 4083671 - DNA, 25 bp, Homo sapien
gggtctgaggaaggaaccaccttca

SEQ ID NO: 4083672 - DNA, 25 bp, Homo sapien
ttcgcccgtggaggagctccaacag

SEQ ID NO: 4083673 - DNA, 25 bp, Homo sapien
ctcttcgcccgtggaggagctccaa

SEQ ID NO: 4083674 - DNA, 25 bp, Homo sapien
gcccgtggaggagctccaacagcaa

SEQ ID NO: 4083675 - DNA, 25 bp, Homo sapien
cgtggaggagctccaacagcaaatc

SEQ ID NO: 4083676 - DNA, 25 bp, Homo sapien
gcagatgacagctatgaagcaggag

SEQ ID NO: 4083677 - DNA, 25 bp, Homo sapien
tgcagatgacagctatgaagcagga

SEQ ID NO: 4083678 - DNA, 25 bp, Homo sapien
ctgcagatgacagctatgaagcagg

SEQ ID NO: 4083679 - DNA, 25 bp, Homo sapien
ctgggtaaacacacagacatgctgg

SEQ ID NO: 4083680 - DNA, 25 bp, Homo sapien
gagagcgccgtctggatggagatga

SEQ ID NO: 4083681 - DNA, 25 bp, Homo sapien
ggccagggagagcgccgtctggatg

SEQ ID NO: 4083682 - DNA, 25 bp, Homo sapien
atcagtttctgctcggcatgggcca

SEQ ID NO: 4083683 - DNA, 25 bp, Homo sapien
tcagtttctgctcggcatgggccat

SEQ ID NO: 4083684 - DNA, 25 bp, Homo sapien
tgagcctgagccacaggtaccctct

SEQ ID NO: 4083685 - DNA, 25 bp, Homo sapien
ctgagcctgagccacaggtaccctc

SEQ ID NO: 4083686 - DNA, 25 bp, Homo sapien
cctgagccacaggtaccctctgcac

SEQ ID NO: 4083687 - DNA, 25 bp, Homo sapien
agcctgagccacaggtaccctctgc

SEQ ID NO: 4083688 - DNA, 25 bp, Homo sapien
ctgcaaagagtagggagcctgtaag

SEQ ID NO: 4083689 - DNA, 25 bp, Homo sapien
cctgtaaggtcacctgttgagcaag

SEQ ID NO: 4083690 - DNA, 25 bp, Homo sapien
caaagagtagggagcctgtaaggtc

SEQ ID NO: 4083691 - DNA, 25 bp, Homo sapien
gagtagggagcctgtaaggtcacct

SEQ ID NO: 4083692 - DNA, 25 bp, Homo sapien
ctgggtcagtagacgcttcactgcc

SEQ ID NO: 4083693 - DNA, 25 bp, Homo sapien
tgtggtcctgcgcctacacctgggc

SEQ ID NO: 4083694 - DNA, 25 bp, Homo sapien
ccgcctgggtcagtagacgcttcac

SEQ ID NO: 4083695 - DNA, 25 bp, Homo sapien
gcctgggtcagtagacgcttcactg

SEQ ID NO: 4083696 - DNA, 25 bp, Homo sapien
cagagctgcttccaggggaggggtt

SEQ ID NO: 4083697 - DNA, 25 bp, Homo sapien
tcagagctgcttccaggggaggggt

SEQ ID NO: 4083698 - DNA, 25 bp, Homo sapien
tgcttccaggggaggggttctaatc

SEQ ID NO: 4083699 - DNA, 25 bp, Homo sapien
agctgcttccaggggaggggttcta

SEQ ID NO: 4083700 - DNA, 25 bp, Homo sapien
ttcaccctcactagggcggcagctg

SEQ ID NO: 4083701 - DNA, 25 bp, Homo sapien
gctgggctcacccattaagcaagaa

SEQ ID NO: 4083702 - DNA, 25 bp, Homo sapien
tttcagaaatgtaactcgcctgccg

SEQ ID NO: 4083703 - DNA, 25 bp, Homo sapien
aatgtaactcgcctgccggttcacc

SEQ ID NO: 4083704 - DNA, 25 bp, Homo sapien
tctatgggagaaatatatcctggca

SEQ ID NO: 4083705 - DNA, 25 bp, Homo sapien
aagtgaatcattgccaccccagagg

SEQ ID NO: 4083706 - DNA, 25 bp, Homo sapien
tagaatcacaatacatggtcttttg

SEQ ID NO: 4083707 - DNA, 25 bp, Homo sapien
tctgtagcctatgtgggatacatac

SEQ ID NO: 4083708 - DNA, 25 bp, Homo sapien
tgcgactgcggtcgcacgtggacac

SEQ ID NO: 4083709 - DNA, 25 bp, Homo sapien
cgcacgtggacacgggttgcagacc

SEQ ID NO: 4083710 - DNA, 25 bp, Homo sapien
ccgggctcgggtgcgactgcggtcg

SEQ ID NO: 4083711 - DNA, 25 bp, Homo sapien
ttgcagacccctggcaaattgtgga

SEQ ID NO: 4083712 - DNA, 25 bp, Homo sapien
cagcaaaatcccaccaagcactgat

SEQ ID NO: 4083713 - DNA, 25 bp, Homo sapien
tcagcaaaatcccaccaagcactga

SEQ ID NO: 4083714 - DNA, 25 bp, Homo sapien
ctggcagcagtcttgtcgttggaga

SEQ ID NO: 4083715 - DNA, 25 bp, Homo sapien
actctggcagcagtcttgtcgttgg

SEQ ID NO: 4083716 - DNA, 25 bp, Homo sapien
tctggcagcagtcttgtcgttggag

SEQ ID NO: 4083717 - DNA, 25 bp, Homo sapien
ctctggcagcagtcttgtcgttgga

SEQ ID NO: 4083718 - DNA, 25 bp, Homo sapien
accagaagtggctgtctcatggatg

SEQ ID NO: 4083719 - DNA, 25 bp, Homo sapien
agaagtggctgtctcatggatgctg

SEQ ID NO: 4083720 - DNA, 25 bp, Homo sapien
acaccagggctgtttctctgccaat

SEQ ID NO: 4083721 - DNA, 25 bp, Homo sapien
aacaccagggctgtttctctgccaa

SEQ ID NO: 4083722 - DNA, 25 bp, Homo sapien
ccacagcaccctgcggccctttcag

SEQ ID NO: 4083723 - DNA, 25 bp, Homo sapien
accacagcaccctgcggccctttca

SEQ ID NO: 4083724 - DNA, 25 bp, Homo sapien
agcaccctgcggccctttcagtgac

SEQ ID NO: 4083725 - DNA, 25 bp, Homo sapien
acagcaccctgcggccctttcagtg

SEQ ID NO: 4083726 - DNA, 25 bp, Homo sapien
agggctctccccgtggatacctgtt

SEQ ID NO: 4083727 - DNA, 25 bp, Homo sapien
tagggctctccccgtggatacctgt

SEQ ID NO: 4083728 - DNA, 25 bp, Homo sapien
atgatgtagggctctccccgtggat

SEQ ID NO: 4083729 - DNA, 25 bp, Homo sapien
atgtagggctctccccgtggatacc

SEQ ID NO: 4083730 - DNA, 25 bp, Homo sapien
aggaggttggagggctgccctgcag

SEQ ID NO: 4083731 - DNA, 25 bp, Homo sapien
gaggaggaggttggagggctgccct

SEQ ID NO: 4083732 - DNA, 25 bp, Homo sapien
agggctgccctgcagggtcactgca

SEQ ID NO: 4083733 - DNA, 25 bp, Homo sapien
tggaggaggaggttggagggctgcc

SEQ ID NO: 4083734 - DNA, 25 bp, Homo sapien
tgtggactgtctcagctggcagagg

SEQ ID NO: 4083735 - DNA, 25 bp, Homo sapien
gtgtggactgtctcagctggcagag

SEQ ID NO: 4083736 - DNA, 25 bp, Homo sapien
ctggcagaggggcaccccgtcccac

SEQ ID NO: 4083737 - DNA, 25 bp, Homo sapien
tcagctggcagaggggcaccccgtc

SEQ ID NO: 4083738 - DNA, 25 bp, Homo sapien
agacctcgagtctgggactactgct

SEQ ID NO: 4083739 - DNA, 25 bp, Homo sapien
tcttcagttgactgacttttacaga

SEQ ID NO: 4083740 - DNA, 25 bp, Homo sapien
agttgactgacttttacagacctcg

SEQ ID NO: 4083741 - DNA, 25 bp, Homo sapien
cttttacagacctcgagtctgggac

SEQ ID NO: 4083742 - DNA, 25 bp, Homo sapien
ttccagctgatgtaccacttgtttc

SEQ ID NO: 4083743 - DNA, 25 bp, Homo sapien
cagctgatgtaccacttgtttcttc

SEQ ID NO: 4083744 - DNA, 25 bp, Homo sapien
ttcttccagctgatgtaccacttgt

SEQ ID NO: 4083745 - DNA, 25 bp, Homo sapien
tcttccagctgatgtaccacttgtt

SEQ ID NO: 4083746 - DNA, 25 bp, Homo sapien
atggtactgcaagagacatgtcccc

SEQ ID NO: 4083747 - DNA, 25 bp, Homo sapien
gagatggtactgcaagagacatgtc

SEQ ID NO: 4083748 - DNA, 25 bp, Homo sapien
tggtactgcaagagacatgtcccca

SEQ ID NO: 4083749 - DNA, 25 bp, Homo sapien
gatggtactgcaagagacatgtccc

SEQ ID NO: 4083750 - DNA, 25 bp, Homo sapien
ctagctccctttcggctttctgttt

SEQ ID NO: 4083751 - DNA, 25 bp, Homo sapien
ctccctttcggctttctgtttctcg

SEQ ID NO: 4083752 - DNA, 25 bp, Homo sapien
ctctagctccctttcggctttctgt

SEQ ID NO: 4083753 - DNA, 25 bp, Homo sapien
ctgtttctcgttgtttgctttcttt

SEQ ID NO: 4083754 - DNA, 25 bp, Homo sapien
tcaaagtatctgagagaacgtttcg

SEQ ID NO: 4083755 - DNA, 25 bp, Homo sapien
ccctttctgtatgttcaatctctgg

SEQ ID NO: 4083756 - DNA, 25 bp, Homo sapien
cctttctgtatgttcaatctctgga

SEQ ID NO: 4083757 - DNA, 25 bp, Homo sapien
cgtttcgtgtggtacaggtccgtat

SEQ ID NO: 4083758 - DNA, 25 bp, Homo sapien
tgttgcagacggacggccagatcct

SEQ ID NO: 4083759 - DNA, 25 bp, Homo sapien
caatgaatgttgcagacggacggcc

SEQ ID NO: 4083760 - DNA, 25 bp, Homo sapien
gaatgttgcagacggacggccagat

SEQ ID NO: 4083761 - DNA, 25 bp, Homo sapien
aatgaatgttgcagacggacggcca

SEQ ID NO: 4083762 - DNA, 25 bp, Homo sapien
tcttctgtgtggcggtgacagcaga

SEQ ID NO: 4083763 - DNA, 25 bp, Homo sapien
tctgtgtggcggtgacagcagagag

SEQ ID NO: 4083764 - DNA, 25 bp, Homo sapien
gagcccgctctaactctcctttacg

SEQ ID NO: 4083765 - DNA, 25 bp, Homo sapien
ttcttctgtgtggcggtgacagcag

SEQ ID NO: 4083766 - DNA, 25 bp, Homo sapien
tggactgctctaacttccactccat

SEQ ID NO: 4083767 - DNA, 25 bp, Homo sapien
atacgtgctttactgcggctggaga

SEQ ID NO: 4083768 - DNA, 25 bp, Homo sapien
cagctgcgctttcagcagtgcctgc

SEQ ID NO: 4083769 - DNA, 25 bp, Homo sapien
tccactccatacgtgctttactgcg

SEQ ID NO: 4083770 - DNA, 25 bp, Homo sapien
ccctctctagctggacttctttaag

SEQ ID NO: 4083771 - DNA, 25 bp, Homo sapien
tttagatgttcagcatattcatccc

SEQ ID NO: 4083772 - DNA, 25 bp, Homo sapien
tagatgttcagcatattcatccctc

SEQ ID NO: 4083773 - DNA, 25 bp, Homo sapien
ggacttctttaagtgactccttcaa

SEQ ID NO: 4083774 - DNA, 25 bp, Homo sapien
acctatctaatgtgggggggctgaa

SEQ ID NO: 4083775 - DNA, 25 bp, Homo sapien
tgacctatctaatgtgggggggctg

SEQ ID NO: 4083776 - DNA, 25 bp, Homo sapien
agtgacctatctaatgtgggggggc

SEQ ID NO: 4083777 - DNA, 25 bp, Homo sapien
tccagtgacctatctaatgtggggg

SEQ ID NO: 4083778 - DNA, 25 bp, Homo sapien
ctctacccgatatttatcatgcttc

SEQ ID NO: 4083779 - DNA, 25 bp, Homo sapien
tctctacccgatatttatcatgctt

SEQ ID NO: 4083780 - DNA, 25 bp, Homo sapien
agcgctcctgccactctctctagtt

SEQ ID NO: 4083781 - DNA, 25 bp, Homo sapien
tggagcgctcctgccactctctcta

SEQ ID NO: 4083782 - DNA, 25 bp, Homo sapien
cctggagcgctcctgccactctctc

SEQ ID NO: 4083783 - DNA, 25 bp, Homo sapien
ctctagttccttcctcaggtgctgc

SEQ ID NO: 4083784 - DNA, 25 bp, Homo sapien
ttgaagctgttctgtggctcggcca

SEQ ID NO: 4083785 - DNA, 25 bp, Homo sapien
ccaactgtagtacgctcttgttctc

SEQ ID NO: 4083786 - DNA, 25 bp, Homo sapien
tgctccaactgtagtacgctcttgt

SEQ ID NO: 4083787 - DNA, 25 bp, Homo sapien
aactgtagtacgctcttgttctcat

SEQ ID NO: 4083788 - DNA, 25 bp, Homo sapien
ctccaactgtagtacgctcttgttc

SEQ ID NO: 4083789 - DNA, 25 bp, Homo sapien
ctgcccccgggctggagctgcctct

SEQ ID NO: 4083790 - DNA, 25 bp, Homo sapien
agctgcctctggcctggcacctccc

SEQ ID NO: 4083791 - DNA, 25 bp, Homo sapien
tgcctctggcctggcacctcccctc

SEQ ID NO: 4083792 - DNA, 25 bp, Homo sapien
tcccctccccagaggctggtgccca

SEQ ID NO: 4083793 - DNA, 25 bp, Homo sapien
tgacccaggtaatggtctggctgct

SEQ ID NO: 4083794 - DNA, 25 bp, Homo sapien
caggtgacccaggtaatggtctggc

SEQ ID NO: 4083795 - DNA, 25 bp, Homo sapien
gtgacccaggtaatggtctggctgc

SEQ ID NO: 4083796 - DNA, 25 bp, Homo sapien
tgcaggtgacccaggtaatggtctg

SEQ ID NO: 4083797 - DNA, 25 bp, Homo sapien
ctgctgctgataggtggccacgtac

SEQ ID NO: 4083798 - DNA, 25 bp, Homo sapien
actgcctgtacagcgcctccttctc

SEQ ID NO: 4083799 - DNA, 25 bp, Homo sapien
tgcctgtacagcgcctccttctcac

SEQ ID NO: 4083800 - DNA, 25 bp, Homo sapien
tcactgcctgtacagcgcctccttc

SEQ ID NO: 4083801 - DNA, 25 bp, Homo sapien
cactgcctgtacagcgcctccttct

SEQ ID NO: 4083802 - DNA, 25 bp, Homo sapien
gctcagctgggccgttagctgctgt

SEQ ID NO: 4083803 - DNA, 25 bp, Homo sapien
tcagctgggccgttagctgctgttt

SEQ ID NO: 4083804 - DNA, 25 bp, Homo sapien
aggctcagctgggccgttagctgct

SEQ ID NO: 4083805 - DNA, 25 bp, Homo sapien
agctgggccgttagctgctgtttct

SEQ ID NO: 4083806 - DNA, 25 bp, Homo sapien
ttcccactactggtcggtgtgggag

SEQ ID NO: 4083807 - DNA, 25 bp, Homo sapien
tagtgcaggcacccggttagtataa

SEQ ID NO: 4083808 - DNA, 25 bp, Homo sapien
gcacattcccactactggtcggtgt

SEQ ID NO: 4083809 - DNA, 25 bp, Homo sapien
acattcccactactggtcggtgtgg

SEQ ID NO: 4083810 - DNA, 25 bp, Homo sapien
aggtcctctgggacactcggcatgg

SEQ ID NO: 4083811 - DNA, 25 bp, Homo sapien
tcctctgggacactcggcatgggcc

SEQ ID NO: 4083812 - DNA, 25 bp, Homo sapien
ccaggtcctctgggacactcggcat

SEQ ID NO: 4083813 - DNA, 25 bp, Homo sapien
ctctgggacactcggcatgggccga

SEQ ID NO: 4083814 - DNA, 25 bp, Homo sapien
ctgagggcaagatgtgagcattctt

SEQ ID NO: 4083815 - DNA, 25 bp, Homo sapien
ccaggccctggggctgggaccgctg

SEQ ID NO: 4083816 - DNA, 25 bp, Homo sapien
cctgctcttgtaactgtgcctgctt

SEQ ID NO: 4083817 - DNA, 25 bp, Homo sapien
gctctttcacctgctcttgtaactg

SEQ ID NO: 4083818 - DNA, 25 bp, Homo sapien
ggctgggaccgctgcctctggctcc

SEQ ID NO: 4083819 - DNA, 25 bp, Homo sapien
ctgccctcaggtggcattttcaagt

SEQ ID NO: 4083820 - DNA, 25 bp, Homo sapien
ggcatctctctctgtagtactggaa

SEQ ID NO: 4083821 - DNA, 25 bp, Homo sapien
tctctctctgtagtactggaagaat

SEQ ID NO: 4083822 - DNA, 25 bp, Homo sapien
tctctctgtagtactggaagaatcc

SEQ ID NO: 4083823 - DNA, 25 bp, Homo sapien
catctctctctgtagtactggaaga

SEQ ID NO: 4083824 - DNA, 25 bp, Homo sapien
tggctttgttatagggtgataaact

SEQ ID NO: 4083825 - DNA, 25 bp, Homo sapien
ctggctttgttatagggtgataaac

SEQ ID NO: 4083826 - DNA, 25 bp, Homo sapien
ctgtccagggccagcctgatggtgt

SEQ ID NO: 4083827 - DNA, 25 bp, Homo sapien
tcatctcctccctgtccagggccag

SEQ ID NO: 4083828 - DNA, 25 bp, Homo sapien
catctcctccctgtccagggccagc

SEQ ID NO: 4083829 - DNA, 25 bp, Homo sapien
tccctgtccagggccagcctgatgg

SEQ ID NO: 4083830 - DNA, 25 bp, Homo sapien
tgctgccagcgctcaccgtcacagc

SEQ ID NO: 4083831 - DNA, 25 bp, Homo sapien
ctgtcacgctgctgccagcgctcac

SEQ ID NO: 4083832 - DNA, 25 bp, Homo sapien
gggtgctcagctgtcacgctgctgc

SEQ ID NO: 4083833 - DNA, 25 bp, Homo sapien
ccccgcagagatgttgcacactcta

SEQ ID NO: 4083834 - DNA, 25 bp, Homo sapien
tctcctgcagctccagcagcttcac

SEQ ID NO: 4083835 - DNA, 25 bp, Homo sapien
catctcctgcagctccagcagcttc

SEQ ID NO: 4083836 - DNA, 25 bp, Homo sapien
cagctgcaacaccatctcctgcagc

SEQ ID NO: 4083837 - DNA, 25 bp, Homo sapien
accatctcctgcagctccagcagct

SEQ ID NO: 4083838 - DNA, 25 bp, Homo sapien
aatttgctgtgtcccttgtagtcgc

SEQ ID NO: 4083839 - DNA, 25 bp, Homo sapien
caagaatttgctgtgtcccttgtag

SEQ ID NO: 4083840 - DNA, 25 bp, Homo sapien
agaatttgctgtgtcccttgtagtc

SEQ ID NO: 4083841 - DNA, 25 bp, Homo sapien
ttgctgtgtcccttgtagtcgccac

SEQ ID NO: 4083842 - DNA, 25 bp, Homo sapien
ggactgggctcatgagcagggttct

SEQ ID NO: 4083843 - DNA, 25 bp, Homo sapien
tcctggactgggctcatgagcaggg

SEQ ID NO: 4083844 - DNA, 25 bp, Homo sapien
atgcttgtgggcagccccaagctcc

SEQ ID NO: 4083845 - DNA, 25 bp, Homo sapien
ggctcctggactgggctcatgagca

SEQ ID NO: 4083846 - DNA, 25 bp, Homo sapien
ctccttgcacaggctccacgctgtc

SEQ ID NO: 4083847 - DNA, 25 bp, Homo sapien
tccttgcacaggctccacgctgtca

SEQ ID NO: 4083848 - DNA, 25 bp, Homo sapien
tacaatagtacagcactaattcttg

SEQ ID NO: 4083849 - DNA, 25 bp, Homo sapien
agtacagcactaattcttggcaaca

SEQ ID NO: 4083850 - DNA, 25 bp, Homo sapien
cagcactaattcttggcaacagaac

SEQ ID NO: 4083851 - DNA, 25 bp, Homo sapien
taaaggaactacaatagtacagcac

SEQ ID NO: 4083852 - DNA, 25 bp, Homo sapien
aaatatgcccgtaagtgaaacccag

SEQ ID NO: 4083853 - DNA, 25 bp, Homo sapien
taagtgaaacccagaggtacagaaa

SEQ ID NO: 4083854 - DNA, 25 bp, Homo sapien
tatgcccgtaagtgaaacccagagg

SEQ ID NO: 4083855 - DNA, 25 bp, Homo sapien
ctgcacaaaatatgcccgtaagtga

SEQ ID NO: 4083856 - DNA, 25 bp, Homo sapien
taaaagtatcatgaggatgccaaat

SEQ ID NO: 4083857 - DNA, 25 bp, Homo sapien
tgttaatgtcgtatttataaaagta

SEQ ID NO: 4083858 - DNA, 25 bp, Homo sapien
ttataaaagtatcatgaggatgcca

SEQ ID NO: 4083859 - DNA, 25 bp, Homo sapien
ctgttaatgtcgtatttataaaagt

SEQ ID NO: 4083860 - DNA, 25 bp, Homo sapien
tcggcaaaatcgtactgctgctctc

SEQ ID NO: 4083861 - DNA, 25 bp, Homo sapien
aatttggaagagtccgttgaagtca

SEQ ID NO: 4083862 - DNA, 25 bp, Homo sapien
tattccatcggcaaaatcgtactgc

SEQ ID NO: 4083863 - DNA, 25 bp, Homo sapien
cacaaggacccgatatttgcactct

SEQ ID NO: 4083864 - DNA, 25 bp, Homo sapien
taagttatagtcatgcgatttccat

SEQ ID NO: 4083865 - DNA, 25 bp, Homo sapien
cttaagttatagtcatgcgatttcc

SEQ ID NO: 4083866 - DNA, 25 bp, Homo sapien
tatagtcatgcgatttccattcttt

SEQ ID NO: 4083867 - DNA, 25 bp, Homo sapien
agttatagtcatgcgatttccattc

SEQ ID NO: 4083868 - DNA, 25 bp, Homo sapien
aatgtttccacgcttatcattcatg

SEQ ID NO: 4083869 - DNA, 25 bp, Homo sapien
ggtggtgcattttctctcgtggaaa

SEQ ID NO: 4083870 - DNA, 25 bp, Homo sapien
aaatccctgtttggtggtgcatttt

SEQ ID NO: 4083871 - DNA, 25 bp, Homo sapien
ttccacgcttatcattcatgttcca

SEQ ID NO: 4083872 - DNA, 25 bp, Homo sapien
cctctggcggggataaagtctggaa

SEQ ID NO: 4083873 - DNA, 25 bp, Homo sapien
cagagctcagtactggcttccagaa

SEQ ID NO: 4083874 - DNA, 25 bp, Homo sapien
tggaggtcgatgtctttatgatgtt

SEQ ID NO: 4083875 - DNA, 25 bp, Homo sapien
ttccagaagtggaggtcgatgtctt

SEQ ID NO: 4083876 - DNA, 25 bp, Homo sapien
caacggtgggtgaagtgacgtggca

SEQ ID NO: 4083877 - DNA, 25 bp, Homo sapien
catgtttcaggaagatcaactcata

SEQ ID NO: 4083878 - DNA, 25 bp, Homo sapien
ggtgaagtgacgtggcagcctcagg

SEQ ID NO: 4083879 - DNA, 25 bp, Homo sapien
gatcaactcataagtgttcaggaag

SEQ ID NO: 4083880 - DNA, 25 bp, Homo sapien
ttcaccttccactacatacactggg

SEQ ID NO: 4083881 - DNA, 25 bp, Homo sapien
agttaagtggagtctcaaccacttc

SEQ ID NO: 4083882 - DNA, 25 bp, Homo sapien
ctgggtccagttaagtggagtctca

SEQ ID NO: 4083883 - DNA, 25 bp, Homo sapien
cccattcccaggtccaatcggtgca

SEQ ID NO: 4083884 - DNA, 25 bp, Homo sapien
tgcctattgcatccactttccaact

SEQ ID NO: 4083885 - DNA, 25 bp, Homo sapien
ctcgctgcctatctgagcagatgcg

SEQ ID NO: 4083886 - DNA, 25 bp, Homo sapien
cgatattgggcaccttgtgaaacat

SEQ ID NO: 4083887 - DNA, 25 bp, Homo sapien
tatctgagcagatgcgatattgggc

SEQ ID NO: 4083888 - DNA, 25 bp, Homo sapien
ctgggtaaacacacagacatgctgg

SEQ ID NO: 4083889 - DNA, 25 bp, Homo sapien
ggccagggagagcgccgtctggatg

SEQ ID NO: 4083890 - DNA, 25 bp, Homo sapien
atcagtttctgctcggcatgggcca

SEQ ID NO: 4083891 - DNA, 25 bp, Homo sapien
tcagtttctgctcggcatgggccat

SEQ ID NO: 4083892 - DNA, 25 bp, Homo sapien
gagagcgccgtctggatggagatga

SEQ ID NO: 4083893 - DNA, 25 bp, Homo sapien
ctgcaaagagtagggagcctgtaag

SEQ ID NO: 4083894 - DNA, 25 bp, Homo sapien
cctgtaaggtcacctgttgagcaag

SEQ ID NO: 4083895 - DNA, 25 bp, Homo sapien
caaagagtagggagcctgtaaggtc

SEQ ID NO: 4083896 - DNA, 25 bp, Homo sapien
gagtagggagcctgtaaggtcacct

SEQ ID NO: 4083897 - DNA, 25 bp, Homo sapien
ccgcctgggtcagtagacgcttcac

SEQ ID NO: 4083898 - DNA, 25 bp, Homo sapien
ctgggtcagtagacgcttcactgcc

SEQ ID NO: 4083899 - DNA, 25 bp, Homo sapien
gcctgggtcagtagacgcttcactg

SEQ ID NO: 4083900 - DNA, 25 bp, Homo sapien
tgtggtcctgcgcctacacctgggc

SEQ ID NO: 4083901 - DNA, 25 bp, Homo sapien
atgggccctgggagtgccgccatct

SEQ ID NO: 4083902 - DNA, 25 bp, Homo sapien
tgggagtgccgccatctgtgcctgc

SEQ ID NO: 4083903 - DNA, 25 bp, Homo sapien
gtccacatgtggagaccctgacaat

SEQ ID NO: 4083904 - DNA, 25 bp, Homo sapien
tggagaccctgacaatgggccctgg

SEQ ID NO: 4083905 - DNA, 25 bp, Homo sapien
ggctgggtgtgtgggggccaccgtg

SEQ ID NO: 4083906 - DNA, 25 bp, Homo sapien
gtaggtttcacaggctgggtgtgtg

SEQ ID NO: 4083907 - DNA, 25 bp, Homo sapien
ctgtaggtttcacaggctgggtgtg

SEQ ID NO: 4083908 - DNA, 25 bp, Homo sapien
caggctgggtgtgtgggggccaccg

SEQ ID NO: 4083909 - DNA, 25 bp, Homo sapien
gagggagccgctccttaatttggcc

SEQ ID NO: 4083910 - DNA, 25 bp, Homo sapien
agccgctccttaatttggccaaagc

SEQ ID NO: 4083911 - DNA, 25 bp, Homo sapien
gctccttaatttggccaaagccttc

SEQ ID NO: 4083912 - DNA, 25 bp, Homo sapien
tcctgggagagggagccgctcctta

SEQ ID NO: 4083913 - DNA, 25 bp, Homo sapien
gagaaagggggcggagcacacacaa

SEQ ID NO: 4083914 - DNA, 25 bp, Homo sapien
ctgtggagaaagggggcggagcaca

SEQ ID NO: 4083915 - DNA, 25 bp, Homo sapien
gaaagggggcggagcacacacaact

SEQ ID NO: 4083916 - DNA, 25 bp, Homo sapien
tggagaaagggggcggagcacacac

SEQ ID NO: 4083917 - DNA, 25 bp, Homo sapien
ccagcctgggcgagcctggctgaaa

SEQ ID NO: 4083918 - DNA, 25 bp, Homo sapien
tggacagtgacactcagaccccagc

SEQ ID NO: 4083919 - DNA, 25 bp, Homo sapien
tcacccattaagcaagaagccaata

SEQ ID NO: 4083920 - DNA, 25 bp, Homo sapien
gaagccaatagctggacagtgacac

SEQ ID NO: 4083921 - DNA, 25 bp, Homo sapien
ttcaccctcactagggcggcagctg

SEQ ID NO: 4083922 - DNA, 25 bp, Homo sapien
aatgtaactcgcctgccggttcacc

SEQ ID NO: 4083923 - DNA, 25 bp, Homo sapien
tttcagaaatgtaactcgcctgccg

SEQ ID NO: 4083924 - DNA, 25 bp, Homo sapien
tgccggttcaccctcactagggcgg

SEQ ID NO: 4083925 - DNA, 25 bp, Homo sapien
tattgatacgtagatctctgcttag

SEQ ID NO: 4083926 - DNA, 25 bp, Homo sapien
gattgagccatggagcctggccaga

SEQ ID NO: 4083927 - DNA, 25 bp, Homo sapien
ccttctaatccttgtattgggaaga

SEQ ID NO: 4083928 - DNA, 25 bp, Homo sapien
ccagacatgggctattgattctcgc

SEQ ID NO: 4083929 - DNA, 25 bp, Homo sapien
cagcaaaatcccaccaagcactgat

SEQ ID NO: 4083930 - DNA, 25 bp, Homo sapien
tcagcaaaatcccaccaagcactga

SEQ ID NO: 4083931 - DNA, 25 bp, Homo sapien
ggctgctgccaatttactttgtcga

SEQ ID NO: 4083932 - DNA, 25 bp, Homo sapien
ttactttgtcgagtttcttctgcca

SEQ ID NO: 4083933 - DNA, 25 bp, Homo sapien
ctgccaatttactttgtcgagtttc

SEQ ID NO: 4083934 - DNA, 25 bp, Homo sapien
tttactttgtcgagtttcttctgcc

SEQ ID NO: 4083935 - DNA, 25 bp, Homo sapien
tatggctgggttgggggtccgtgac

SEQ ID NO: 4083936 - DNA, 25 bp, Homo sapien
ctatggctgggttgggggtccgtga

SEQ ID NO: 4083937 - DNA, 25 bp, Homo sapien
tctggcagcagtcttgtcgttggag

SEQ ID NO: 4083938 - DNA, 25 bp, Homo sapien
ctggcagcagtcttgtcgttggaga

SEQ ID NO: 4083939 - DNA, 25 bp, Homo sapien
actctggcagcagtcttgtcgttgg

SEQ ID NO: 4083940 - DNA, 25 bp, Homo sapien
ctctggcagcagtcttgtcgttgga

SEQ ID NO: 4083941 - DNA, 25 bp, Homo sapien
accagaagtggctgtctcatggatg

SEQ ID NO: 4083942 - DNA, 25 bp, Homo sapien
agaagtggctgtctcatggatgctg

SEQ ID NO: 4083943 - DNA, 25 bp, Homo sapien
aacaccagggctgtttctctgccaa

SEQ ID NO: 4083944 - DNA, 25 bp, Homo sapien
acaccagggctgtttctctgccaat

SEQ ID NO: 4083945 - DNA, 25 bp, Homo sapien
atgatgtagggctctccccgtggat

SEQ ID NO: 4083946 - DNA, 25 bp, Homo sapien
agggctctccccgtggatacctgtt

SEQ ID NO: 4083947 - DNA, 25 bp, Homo sapien
tagggctctccccgtggatacctgt

SEQ ID NO: 4083948 - DNA, 25 bp, Homo sapien
atgtagggctctccccgtggatacc

SEQ ID NO: 4083949 - DNA, 25 bp, Homo sapien
gagggctggcctgcagggtcactgc

SEQ ID NO: 4083950 - DNA, 25 bp, Homo sapien
ggctggcctgcagggtcactgcacc

SEQ ID NO: 4083951 - DNA, 25 bp, Homo sapien
gaggaggttggagggctggcctgca

SEQ ID NO: 4083952 - DNA, 25 bp, Homo sapien
aggaggttggagggctggcctgcag

SEQ ID NO: 4083953 - DNA, 25 bp, Homo sapien
ctggcagaggggcaccccgtcccac

SEQ ID NO: 4083954 - DNA, 25 bp, Homo sapien
ggaggagtggggggagaggtagaga

SEQ ID NO: 4083955 - DNA, 25 bp, Homo sapien
gggctggggtgtgtgtggactgtct

SEQ ID NO: 4083956 - DNA, 25 bp, Homo sapien
ggggtgtgtgtggactgtctcagct

SEQ ID NO: 4083957 - DNA, 25 bp, Homo sapien
ctcgagtctgggactactgctagtt

SEQ ID NO: 4083958 - DNA, 25 bp, Homo sapien
cagttgactgacttttacggacctc

SEQ ID NO: 4083959 - DNA, 25 bp, Homo sapien
tgactgacttttacggacctcgagt

SEQ ID NO: 4083960 - DNA, 25 bp, Homo sapien
tgacttttacggacctcgagtctgg

SEQ ID NO: 4083961 - DNA, 25 bp, Homo sapien
gagacgagactcggggcctctacat

SEQ ID NO: 4083962 - DNA, 25 bp, Homo sapien
ctctagctccctttcggctttctgt

SEQ ID NO: 4083963 - DNA, 25 bp, Homo sapien
ctccctttcggctttctgtttctcg

SEQ ID NO: 4083964 - DNA, 25 bp, Homo sapien
ctagctccctttcggctttctgttt

SEQ ID NO: 4083965 - DNA, 25 bp, Homo sapien
ctgtttctcgttgtttgctttcttt

SEQ ID NO: 4083966 - DNA, 25 bp, Homo sapien
cctttctgtatgttcaatctctgga

SEQ ID NO: 4083967 - DNA, 25 bp, Homo sapien
ccctttctgtatgttcaatctctgg

SEQ ID NO: 4083968 - DNA, 25 bp, Homo sapien
cgtttcgtgtggtacaggtccgtat

SEQ ID NO: 4083969 - DNA, 25 bp, Homo sapien
tcaaagtatctgagagaacgtttcg

SEQ ID NO: 4083970 - DNA, 25 bp, Homo sapien
agttgagatggggcccaaaggactc

SEQ ID NO: 4083971 - DNA, 25 bp, Homo sapien
gagagagttgagatggggcccaaag

SEQ ID NO: 4083972 - DNA, 25 bp, Homo sapien
atgagagagttgagatggggcccaa

SEQ ID NO: 4083973 - DNA, 25 bp, Homo sapien
tgagatggggcccaaaggactcccc

SEQ ID NO: 4083974 - DNA, 25 bp, Homo sapien
tgttgcagacggacggccagatcct

SEQ ID NO: 4083975 - DNA, 25 bp, Homo sapien
caatgaatgttgcagacggacggcc

SEQ ID NO: 4083976 - DNA, 25 bp, Homo sapien
gaatgttgcagacggacggccagat

SEQ ID NO: 4083977 - DNA, 25 bp, Homo sapien
aatgaatgttgcagacggacggcca

SEQ ID NO: 4083978 - DNA, 25 bp, Homo sapien
tcttctgtgtggcggtgacagcaga

SEQ ID NO: 4083979 - DNA, 25 bp, Homo sapien
gagcccgctctaactctcctttacg

SEQ ID NO: 4083980 - DNA, 25 bp, Homo sapien
tctgtgtggcggtgacagcagagag

SEQ ID NO: 4083981 - DNA, 25 bp, Homo sapien
ttcttctgtgtggcggtgacagcag

SEQ ID NO: 4083982 - DNA, 25 bp, Homo sapien
gctaacaaccatacaaaaaagcagt

SEQ ID NO: 4083983 - DNA, 25 bp, Homo sapien
tgactcagtcccaagctgccgctaa

SEQ ID NO: 4083984 - DNA, 25 bp, Homo sapien
caagctgccgctaacaaccatacaa

SEQ ID NO: 4083985 - DNA, 25 bp, Homo sapien
tgccgctaacaaccatacaaaaaag

SEQ ID NO: 4083986 - DNA, 25 bp, Homo sapien
gtacgtgctttactgcggctggaga

SEQ ID NO: 4083987 - DNA, 25 bp, Homo sapien
cagctgcgctttcagcagtgcctgc

SEQ ID NO: 4083988 - DNA, 25 bp, Homo sapien
tggactgctctaacttccactccgt

SEQ ID NO: 4083989 - DNA, 25 bp, Homo sapien
cactccgtacgtgctttactgcggc

SEQ ID NO: 4083990 - DNA, 25 bp, Homo sapien
tttagatgttcagcatattcatccc

SEQ ID NO: 4083991 - DNA, 25 bp, Homo sapien
tagatgttcagcatattcatccctc

SEQ ID NO: 4083992 - DNA, 25 bp, Homo sapien
ccctctctagctggacttctttaag

SEQ ID NO: 4083993 - DNA, 25 bp, Homo sapien
ggacttctttaagtgactccttcaa

SEQ ID NO: 4083994 - DNA, 25 bp, Homo sapien
tctctacccgatatttatcatgctt

SEQ ID NO: 4083995 - DNA, 25 bp, Homo sapien
ctctacccgatatttatcatgcttc

SEQ ID NO: 4083996 - DNA, 25 bp, Homo sapien
agcgctcctgccactctctctagtt

SEQ ID NO: 4083997 - DNA, 25 bp, Homo sapien
agctccgcctcagagggcactgctg

SEQ ID NO: 4083998 - DNA, 25 bp, Homo sapien
ctggagcgctcctgccactctctct

SEQ ID NO: 4083999 - DNA, 25 bp, Homo sapien
ctgcagctccgcctcagagggcact

SEQ ID NO: 4084000 - DNA, 25 bp, Homo sapien
ttgaagctgttctgtggctcggcca

SEQ ID NO: 4084001 - DNA, 25 bp, Homo sapien
ccaactgtagtacgctcttgttctc

SEQ ID NO: 4084002 - DNA, 25 bp, Homo sapien
tgctccaactgtagtacgctcttgt

SEQ ID NO: 4084003 - DNA, 25 bp, Homo sapien
aactgtagtacgctcttgttctcat

SEQ ID NO: 4084004 - DNA, 25 bp, Homo sapien
ctccaactgtagtacgctcttgttc

SEQ ID NO: 4084005 - DNA, 25 bp, Homo sapien
cccagaccttcttggatggggtgga

SEQ ID NO: 4084006 - DNA, 25 bp, Homo sapien
ccagaccttcttggatggggtggag

SEQ ID NO: 4084007 - DNA, 25 bp, Homo sapien
agaccttcttggatggggtggaggt

SEQ ID NO: 4084008 - DNA, 25 bp, Homo sapien
ctcccagaccttcttggatggggtg

SEQ ID NO: 4084009 - DNA, 25 bp, Homo sapien
tgcaggtgacccaggtaatggtctg

SEQ ID NO: 4084010 - DNA, 25 bp, Homo sapien
tgacccaggtaatggtctggctgct

SEQ ID NO: 4084011 - DNA, 25 bp, Homo sapien
caggtgacccaggtaatggtctggc

SEQ ID NO: 4084012 - DNA, 25 bp, Homo sapien
gtgacccaggtaatggtctggctgc

SEQ ID NO: 4084013 - DNA, 25 bp, Homo sapien
ttcattagctgggtctgctgcagcc

SEQ ID NO: 4084014 - DNA, 25 bp, Homo sapien
attagctgggtctgctgcagccact

SEQ ID NO: 4084015 - DNA, 25 bp, Homo sapien
ttcctgctgctgcaactggttcatt

SEQ ID NO: 4084016 - DNA, 25 bp, Homo sapien
ctgctgctgcaactggttcattagc

SEQ ID NO: 4084017 - DNA, 25 bp, Homo sapien
ctcaactgggccgttagctgctgtt

SEQ ID NO: 4084018 - DNA, 25 bp, Homo sapien
actgggccgttagctgctgtttctg

SEQ ID NO: 4084019 - DNA, 25 bp, Homo sapien
gctggctggcagcttccagacgctc

SEQ ID NO: 4084020 - DNA, 25 bp, Homo sapien
caactgggccgttagctgctgtttc

SEQ ID NO: 4084021 - DNA, 25 bp, Homo sapien
gcacattcccactactggtcggtgc

SEQ ID NO: 4084022 - DNA, 25 bp, Homo sapien
tagtgcaggcacccggttagtataa

SEQ ID NO: 4084023 - DNA, 25 bp, Homo sapien
ttagtgcaggcacccggttagtata

SEQ ID NO: 4084024 - DNA, 25 bp, Homo sapien
cattcccactactggtcggtgcggg

SEQ ID NO: 4084025 - DNA, 25 bp, Homo sapien
ggatgctaggaatgggccgaggtgc

SEQ ID NO: 4084026 - DNA, 25 bp, Homo sapien
tcttgtaactgtgcctgcttctcct

SEQ ID NO: 4084027 - DNA, 25 bp, Homo sapien
gcactagctccagcggacttgaaaa

SEQ ID NO: 4084028 - DNA, 25 bp, Homo sapien
gcctgcttctcctgggcactagctc

SEQ ID NO: 4084029 - DNA, 25 bp, Homo sapien
ctgctcttgtaactgtgcctgcttc

SEQ ID NO: 4084030 - DNA, 25 bp, Homo sapien
gtgagccaggcgctggcagccaccc

SEQ ID NO: 4084031 - DNA, 25 bp, Homo sapien
aggtgagccaggcgctggcagccac

SEQ ID NO: 4084032 - DNA, 25 bp, Homo sapien
caggcgctggcagccaccctctgct

SEQ ID NO: 4084033 - DNA, 25 bp, Homo sapien
gagccaggcgctggcagccaccctc

SEQ ID NO: 4084034 - DNA, 25 bp, Homo sapien
caggccctggggctccagggcctct

SEQ ID NO: 4084035 - DNA, 25 bp, Homo sapien
tccagggcctctggctgcctctggc

SEQ ID NO: 4084036 - DNA, 25 bp, Homo sapien
ggggctccagggcctctggctgcct

SEQ ID NO: 4084037 - DNA, 25 bp, Homo sapien
gctccagggcctctggctgcctctg

SEQ ID NO: 4084038 - DNA, 25 bp, Homo sapien
ggcattttcaagtcatggagaaggt

SEQ ID NO: 4084039 - DNA, 25 bp, Homo sapien
gtggaggtgagtcctggcatgggcc

SEQ ID NO: 4084040 - DNA, 25 bp, Homo sapien
tggagaaggtggaggtgagtcctgg

SEQ ID NO: 4084041 - DNA, 25 bp, Homo sapien
gaaggtggaggtgagtcctggcatg

SEQ ID NO: 4084042 - DNA, 25 bp, Homo sapien
caaaatattgtagtcacatctcggc

SEQ ID NO: 4084043 - DNA, 25 bp, Homo sapien
aaatattgtagtcacatctcggcag

SEQ ID NO: 4084044 - DNA, 25 bp, Homo sapien
gagccaaaatattgtagtcacatct

SEQ ID NO: 4084045 - DNA, 25 bp, Homo sapien
ctggagccaaaatattgtagtcaca

SEQ ID NO: 4084046 - DNA, 25 bp, Homo sapien
tctcctccaggtggtccataaagct

SEQ ID NO: 4084047 - DNA, 25 bp, Homo sapien
ggtctgccttctcctccaggtggtc

SEQ ID NO: 4084048 - DNA, 25 bp, Homo sapien
cctccaggtggtccataaagctgct

SEQ ID NO: 4084049 - DNA, 25 bp, Homo sapien
aggtctgccttctcctccaggtggt

SEQ ID NO: 4084050 - DNA, 25 bp, Homo sapien
tctctcttgccagtattgaatgaag

SEQ ID NO: 4084051 - DNA, 25 bp, Homo sapien
attgaatgaagcgaagttcttgttt

SEQ ID NO: 4084052 - DNA, 25 bp, Homo sapien
ctcttgccagtattgaatgaagcga

SEQ ID NO: 4084053 - DNA, 25 bp, Homo sapien
catctctcttgccagtattgaatga

SEQ ID NO: 4084054 - DNA, 25 bp, Homo sapien
atctttggcacggccccctggttct

SEQ ID NO: 4084055 - DNA, 25 bp, Homo sapien
tctttggcacggccccctggttctg

SEQ ID NO: 4084056 - DNA, 25 bp, Homo sapien
tagttgctgtaagccgcaataccat

SEQ ID NO: 4084057 - DNA, 25 bp, Homo sapien
caccatgcttgtctgcagccccaag

SEQ ID NO: 4084058 - DNA, 25 bp, Homo sapien
ccatgcttgtctgcagccccaagct

SEQ ID NO: 4084059 - DNA, 25 bp, Homo sapien
catgcttgtctgcagccccaagctc

SEQ ID NO: 4084060 - DNA, 25 bp, Homo sapien
accatgcttgtctgcagccccaagc

SEQ ID NO: 4084061 - DNA, 25 bp, Homo sapien
tgtaggagattaaccccataacttg

SEQ ID NO: 4084062 - DNA, 25 bp, Homo sapien
cttgagcagctctttgatgatggtg

SEQ ID NO: 4084063 - DNA, 25 bp, Homo sapien
acagcagttgttgcccaagcctggg

SEQ ID NO: 4084064 - DNA, 25 bp, Homo sapien
caaaagaatggcacacagcagttgt

SEQ ID NO: 4084065 - DNA, 25 bp, Homo sapien
agttacgatttaggcaatacataac

SEQ ID NO: 4084066 - DNA, 25 bp, Homo sapien
atatgtcccgaacagaaacccagag

SEQ ID NO: 4084067 - DNA, 25 bp, Homo sapien
cacaaaatatgtcccgaacagaaac

SEQ ID NO: 4084068 - DNA, 25 bp, Homo sapien
caagttacgatttaggcaatacata

SEQ ID NO: 4084069 - DNA, 25 bp, Homo sapien
ttcctctaaagtctggatgagtttc

SEQ ID NO: 4084070 - DNA, 25 bp, Homo sapien
tcaggtgaccgacagcagcagctgt

SEQ ID NO: 4084071 - DNA, 25 bp, Homo sapien
ggtgaccgacagcagcagctgtaga

SEQ ID NO: 4084072 - DNA, 25 bp, Homo sapien
tgaccgacagcagcagctgtagatc

SEQ ID NO: 4084073 - DNA, 25 bp, Homo sapien
cgacagcagcagctgtagatcttgt

SEQ ID NO: 4084074 - DNA, 25 bp, Homo sapien
aagagcgtggcaggactgttcgtcc

SEQ ID NO: 4084075 - DNA, 25 bp, Homo sapien
tggcaggactgttcgtccagatgct

SEQ ID NO: 4084076 - DNA, 25 bp, Homo sapien
gcaggactgttcgtccagatgcttc

SEQ ID NO: 4084077 - DNA, 25 bp, Homo sapien
agcgtggcaggactgttcgtccaga

SEQ ID NO: 4084078 - DNA, 25 bp, Homo sapien
cattgcaggtactttctgaggctct

SEQ ID NO: 4084079 - DNA, 25 bp, Homo sapien
ggctcttctgttgtattgccattgc

SEQ ID NO: 4084080 - DNA, 25 bp, Homo sapien
tgtattgccattgcaggtactttct

SEQ ID NO: 4084081 - DNA, 25 bp, Homo sapien
agaggctcttctgttgtattgccat

SEQ ID NO: 4084082 - DNA, 25 bp, Homo sapien
tgatttcctctgggcgttcagacac

SEQ ID NO: 4084083 - DNA, 25 bp, Homo sapien
gggcgttcagacacctcttcgcatt

SEQ ID NO: 4084084 - DNA, 25 bp, Homo sapien
tcctctgggcgttcagacacctctt

SEQ ID NO: 4084085 - DNA, 25 bp, Homo sapien
gacacctcttcgcatttcctttggc

SEQ ID NO: 4084086 - DNA, 25 bp, Homo sapien
tgcttctcagcacattggtctattt

SEQ ID NO: 4084087 - DNA, 25 bp, Homo sapien
ttgctcccagaattgagctgcttct

SEQ ID NO: 4084088 - DNA, 25 bp, Homo sapien
taagtcccagtgcaagctctcttcc

SEQ ID NO: 4084089 - DNA, 25 bp, Homo sapien
cattggtctatttttgcaggagagc

SEQ ID NO: 4084090 - DNA, 25 bp, Homo sapien
gtggctgggtattcctgctctctcc

SEQ ID NO: 4084091 - DNA, 25 bp, Homo sapien
gacggtaggaagttgatcaatatct

SEQ ID NO: 4084092 - DNA, 25 bp, Homo sapien
caccatgacggtaggaagttgatca

SEQ ID NO: 4084093 - DNA, 25 bp, Homo sapien
gcatggctccaccatgacggtagga

SEQ ID NO: 4084094 - DNA, 25 bp, Homo sapien
tcggatctggtcagtttgatacctc

SEQ ID NO: 4084095 - DNA, 25 bp, Homo sapien
tcagtttgatacctcccagtgcagg

SEQ ID NO: 4084096 - DNA, 25 bp, Homo sapien
gatctggtcagtttgatacctccca

SEQ ID NO: 4084097 - DNA, 25 bp, Homo sapien
ggctgtcggatctggtcagtttgat

SEQ ID NO: 4084098 - DNA, 25 bp, Homo sapien
gacagaagagctgctagtaagctgg

SEQ ID NO: 4084099 - DNA, 25 bp, Homo sapien
agaagagctgctagtaagctgggct

SEQ ID NO: 4084100 - DNA, 25 bp, Homo sapien
cagaagagctgctagtaagctgggc

SEQ ID NO: 4084101 - DNA, 25 bp, Homo sapien
acagaagagctgctagtaagctggg

SEQ ID NO: 4084102 - DNA, 25 bp, Homo sapien
agggatgagctttctctgtcgcagg

SEQ ID NO: 4084103 - DNA, 25 bp, Homo sapien
ggatgagctttctctgtcgcaggag

SEQ ID NO: 4084104 - DNA, 25 bp, Homo sapien
ttctctgtcgcaggagttgcctctc

SEQ ID NO: 4084105 - DNA, 25 bp, Homo sapien
agctttctctgtcgcaggagttgcc

SEQ ID NO: 4084106 - DNA, 25 bp, Homo sapien
tgtagactgaagacttggcagggca

SEQ ID NO: 4084107 - DNA, 25 bp, Homo sapien
aagcgggtcagtgctgttgtagact

SEQ ID NO: 4084108 - DNA, 25 bp, Homo sapien
gggcaaggccagtagcaatgccctt

SEQ ID NO: 4084109 - DNA, 25 bp, Homo sapien
gtcggaataacagcgtgtctgggaa

SEQ ID NO: 4084110 - DNA, 25 bp, Homo sapien
cagaagaaagtcgaagttccagcca

SEQ ID NO: 4084111 - DNA, 25 bp, Homo sapien
ttttgaggctacctaccgcagctac

SEQ ID NO: 4084112 - DNA, 25 bp, Homo sapien
cacccagtgatattggaggcatttt

SEQ ID NO: 4084113 - DNA, 25 bp, Homo sapien
gatgttcttgcagataggcatggcc

SEQ ID NO: 4084114 - DNA, 25 bp, Homo sapien
tctgcacaagcgtagtagtcagggt

SEQ ID NO: 4084115 - DNA, 25 bp, Homo sapien
ggtggtcccaacctgattgaactgg

SEQ ID NO: 4084116 - DNA, 25 bp, Homo sapien
gggtgggatctttggccctctgaca

SEQ ID NO: 4084117 - DNA, 25 bp, Homo sapien
gatatttatgcgttagggaaacacg

SEQ ID NO: 4084118 - DNA, 25 bp, Homo sapien
ctcctagaggagcttggcgaaaagc

SEQ ID NO: 4084119 - DNA, 25 bp, Homo sapien
gatagtggcccttcactaaaaacca

SEQ ID NO: 4084120 - DNA, 25 bp, Homo sapien
tagtggcccttcactaaaaaccaca

SEQ ID NO: 4084121 - DNA, 25 bp, Homo sapien
agcttggcgaaaagcttgggaagca

SEQ ID NO: 4084122 - DNA, 25 bp, Homo sapien
tatatcttctgagcatatcaaattc

SEQ ID NO: 4084123 - DNA, 25 bp, Homo sapien
gaccctgtgtggatacactgcgact

SEQ ID NO: 4084124 - DNA, 25 bp, Homo sapien
gactgattgcttgtgcgcatgcagc

SEQ ID NO: 4084125 - DNA, 25 bp, Homo sapien
tgaatcctggagtgggttgggaccc

SEQ ID NO: 4084126 - DNA, 25 bp, Homo sapien
gaagccatcccgaaatgaatcctgg

SEQ ID NO: 4084127 - DNA, 25 bp, Homo sapien
cacatgatcgccgtggagatggaga

SEQ ID NO: 4084128 - DNA, 25 bp, Homo sapien
caaacacatgatcgccgtggagatg

SEQ ID NO: 4084129 - DNA, 25 bp, Homo sapien
ctgcaaacacatgatcgccgtggag

SEQ ID NO: 4084130 - DNA, 25 bp, Homo sapien
acatgatcgccgtggagatggagat

SEQ ID NO: 4084131 - DNA, 25 bp, Homo sapien
tccctgctagcttccggttgacatt

SEQ ID NO: 4084132 - DNA, 25 bp, Homo sapien
tagcttccggttgacattgactctc

SEQ ID NO: 4084133 - DNA, 25 bp, Homo sapien
tgctagcttccggttgacattgact

SEQ ID NO: 4084134 - DNA, 25 bp, Homo sapien
ccctgctagcttccggttgacattg

SEQ ID NO: 4084135 - DNA, 25 bp, Homo sapien
ctggattcccccatccagcgtgaga

SEQ ID NO: 4084136 - DNA, 25 bp, Homo sapien
gattcccccatccagcgtgagacac

SEQ ID NO: 4084137 - DNA, 25 bp, Homo sapien
ggattcccccatccagcgtgagaca

SEQ ID NO: 4084138 - DNA, 25 bp, Homo sapien
tggattcccccatccagcgtgagac

SEQ ID NO: 4084139 - DNA, 25 bp, Homo sapien
agccatatccaatggctacccagct

SEQ ID NO: 4084140 - DNA, 25 bp, Homo sapien
atgtgctttagccatatccaatggc

SEQ ID NO: 4084141 - DNA, 25 bp, Homo sapien
gctttagccatatccaatggctacc

SEQ ID NO: 4084142 - DNA, 25 bp, Homo sapien
gattcatgtgctttagccatatcca

SEQ ID NO: 4084143 - DNA, 25 bp, Homo sapien
ctctccttgggccactgacttgctg

SEQ ID NO: 4084144 - DNA, 25 bp, Homo sapien
tgtccaaacagtgcaccacggtcat

SEQ ID NO: 4084145 - DNA, 25 bp, Homo sapien
tgacttgctgtccaaacagtgcacc

SEQ ID NO: 4084146 - DNA, 25 bp, Homo sapien
cactgacttgctgtccaaacagtgc

SEQ ID NO: 4084147 - DNA, 25 bp, Homo sapien
caccagtcccctggcctgatctctg

SEQ ID NO: 4084148 - DNA, 25 bp, Homo sapien
gatctctgctggggtgagagggtga

SEQ ID NO: 4084149 - DNA, 25 bp, Homo sapien
ggcctgatctctgctggggtgagag

SEQ ID NO: 4084150 - DNA, 25 bp, Homo sapien
ttgccaccagtcccctggcctgatc

SEQ ID NO: 4084151 - DNA, 25 bp, Homo sapien
gggccagtctggtaacatagacatg

SEQ ID NO: 4084152 - DNA, 25 bp, Homo sapien
agtgacacctgtccagtttcggggc

SEQ ID NO: 4084153 - DNA, 25 bp, Homo sapien
aaccacaggcgccaaatggccgcta

SEQ ID NO: 4084154 - DNA, 25 bp, Homo sapien
catgtgaaacgggtggagttgaaac

SEQ ID NO: 4084155 - DNA, 25 bp, Homo sapien
ccattcactggtccaatagatattt

SEQ ID NO: 4084156 - DNA, 25 bp, Homo sapien
gacgttcagtcccttggatgatcca

SEQ ID NO: 4084157 - DNA, 25 bp, Homo sapien
ctgacacaaactcccttcctgtttg

SEQ ID NO: 4084158 - DNA, 25 bp, Homo sapien
cctgtttgcactggggacgttcagt

SEQ ID NO: 4084159 - DNA, 25 bp, Homo sapien
tgagttttcgccactctgagtcccc

SEQ ID NO: 4084160 - DNA, 25 bp, Homo sapien
catattgtctcatgttggcgggtgc

SEQ ID NO: 4084161 - DNA, 25 bp, Homo sapien
ctttgaggtcttcgtgggcaaggtc

SEQ ID NO: 4084162 - DNA, 25 bp, Homo sapien
ccaatcaagtaggaaggcgtccagc

SEQ ID NO: 4084163 - DNA, 25 bp, Homo sapien
tgagcaaatatccaccccaaaaggg

SEQ ID NO: 4084164 - DNA, 25 bp, Homo sapien
tcaaaagtcactgagcaaatatcca

SEQ ID NO: 4084165 - DNA, 25 bp, Homo sapien
tcagcacgtctgcgctgcttgccag

SEQ ID NO: 4084166 - DNA, 25 bp, Homo sapien
gcacgtctgcgctgcttgccagggt

SEQ ID NO: 4084167 - DNA, 25 bp, Homo sapien
gtgctcagcacgtctgcgctgcttg

SEQ ID NO: 4084168 - DNA, 25 bp, Homo sapien
acgtctgcgctgcttgccagggtca

SEQ ID NO: 4084169 - DNA, 25 bp, Homo sapien
gcttctcagcggtgggcaacagcat

SEQ ID NO: 4084170 - DNA, 25 bp, Homo sapien
ggcctgcttctcagcggtgggcaac

SEQ ID NO: 4084171 - DNA, 25 bp, Homo sapien
cttctcagcggtgggcaacagcatg

SEQ ID NO: 4084172 - DNA, 25 bp, Homo sapien
ctgcttctcagcggtgggcaacagc

SEQ ID NO: 4084173 - DNA, 25 bp, Homo sapien
atttgagtgaaacgccatcccctcc

SEQ ID NO: 4084174 - DNA, 25 bp, Homo sapien
gccaatttgagtgaaacgccatccc

SEQ ID NO: 4084175 - DNA, 25 bp, Homo sapien
caatttgagtgaaacgccatcccct

SEQ ID NO: 4084176 - DNA, 25 bp, Homo sapien
tgtgccaatttgagtgaaacgccat

SEQ ID NO: 4084177 - DNA, 25 bp, Homo sapien
aagatcaatcaccaatcgatgacct

SEQ ID NO: 4084178 - DNA, 25 bp, Homo sapien
gatcaatcaccaatcgatgacctgg

SEQ ID NO: 4084179 - DNA, 25 bp, Homo sapien
tcaatcaccaatcgatgacctggac

SEQ ID NO: 4084180 - DNA, 25 bp, Homo sapien
atcaatcaccaatcgatgacctgga

SEQ ID NO: 4084181 - DNA, 25 bp, Homo sapien
ggctgcgtgtaaggctgactccaac

SEQ ID NO: 4084182 - DNA, 25 bp, Homo sapien
gtgtaaggctgactccaaccctcca

SEQ ID NO: 4084183 - DNA, 25 bp, Homo sapien
agtaatggctgcgtgtaaggctgac

SEQ ID NO: 4084184 - DNA, 25 bp, Homo sapien
tctctgcagtaatggctgcgtgtaa

SEQ ID NO: 4084185 - DNA, 25 bp, Homo sapien
tcacagatccccgtattaataaggt

SEQ ID NO: 4084186 - DNA, 25 bp, Homo sapien
ctgtccttcttttttggcttcaata

SEQ ID NO: 4084187 - DNA, 25 bp, Homo sapien
tgtatgagctgaaccagaggcaaac

SEQ ID NO: 4084188 - DNA, 25 bp, Homo sapien
ggagtcctccttctatgaaatgttg

SEQ ID NO: 4084189 - DNA, 25 bp, Homo sapien
tcagtcaggtgtggttgcagacgcc

SEQ ID NO: 4084190 - DNA, 25 bp, Homo sapien
cctatatcgaaaagggtctgctctt

SEQ ID NO: 4084191 - DNA, 25 bp, Homo sapien
gagatccttgcgctagatttcacta

SEQ ID NO: 4084192 - DNA, 25 bp, Homo sapien
tgaacatcatcacgctctccaactt

SEQ ID NO: 4084193 - DNA, 25 bp, Homo sapien
tgaggtcctcagtggtaaagactgc

SEQ ID NO: 4084194 - DNA, 25 bp, Homo sapien
tgttgaggtcctcagtggtaaagac

SEQ ID NO: 4084195 - DNA, 25 bp, Homo sapien
aatggtgagagatgaagcctttgct

SEQ ID NO: 4084196 - DNA, 25 bp, Homo sapien
ggtcctcaatggtgagagatgaagc

SEQ ID NO: 4084197 - DNA, 25 bp, Homo sapien
cataaagaaacaatgccagcagcat

SEQ ID NO: 4084198 - DNA, 25 bp, Homo sapien
ctcataaagaaacaatgccagcagc

SEQ ID NO: 4084199 - DNA, 25 bp, Homo sapien
tcataaagaaacaatgccagcagca

SEQ ID NO: 4084200 - DNA, 25 bp, Homo sapien
attccttatataggaagaatgcctg

SEQ ID NO: 4084201 - DNA, 25 bp, Homo sapien
aattccttatataggaagaatgcct

SEQ ID NO: 4084202 - DNA, 25 bp, Homo sapien
taattccttatataggaagaatgcc

SEQ ID NO: 4084203 - DNA, 25 bp, Homo sapien
gaaatcttacattatggttaaagta

SEQ ID NO: 4084204 - DNA, 25 bp, Homo sapien
taatggaacactgttgcaaaggtaa

SEQ ID NO: 4084205 - DNA, 25 bp, Homo sapien
tatataaggcttattgaaatcttac

SEQ ID NO: 4084206 - DNA, 25 bp, Homo sapien
ggtttaattaatggaacactgttgc

SEQ ID NO: 4084207 - DNA, 25 bp, Homo sapien
gtcctgaccacgtaccctgtccgct

SEQ ID NO: 4084208 - DNA, 25 bp, Homo sapien
tttcttgtggtcctgaccacgtacc

SEQ ID NO: 4084209 - DNA, 25 bp, Homo sapien
cacgtaccctgtccgctgcacccat

SEQ ID NO: 4084210 - DNA, 25 bp, Homo sapien
ctttcttgtggtcctgaccacgtac

SEQ ID NO: 4084211 - DNA, 25 bp, Homo sapien
acagaagcacagatgcaagtcagca

SEQ ID NO: 4084212 - DNA, 25 bp, Homo sapien
tatagtcggaagtcttggtcacact

SEQ ID NO: 4084213 - DNA, 25 bp, Homo sapien
aagcacagatgcaagtcagcaagca

SEQ ID NO: 4084214 - DNA, 25 bp, Homo sapien
ttatagtcggaagtcttggtcacac

SEQ ID NO: 4084215 - DNA, 25 bp, Homo sapien
attgcattgaataggctgcaaggag

SEQ ID NO: 4084216 - DNA, 25 bp, Homo sapien
cattgcattgaataggctgcaagga

SEQ ID NO: 4084217 - DNA, 25 bp, Homo sapien
ctctctagggtgtctgcattgcatt

SEQ ID NO: 4084218 - DNA, 25 bp, Homo sapien
ccctctctagggtgtctgcattgca

SEQ ID NO: 4084219 - DNA, 25 bp, Homo sapien
tatttacatgactccggtgtgggcc

SEQ ID NO: 4084220 - DNA, 25 bp, Homo sapien
gctttcctgctggagttgcggactg

SEQ ID NO: 4084221 - DNA, 25 bp, Homo sapien
caggcctaagctccgtgggcgttat

SEQ ID NO: 4084222 - DNA, 25 bp, Homo sapien
gcagatagctctcctagtgtgtgga

SEQ ID NO: 4084223 - DNA, 25 bp, Homo sapien
tgtctgctatgagtagcatcttccc

SEQ ID NO: 4084224 - DNA, 25 bp, Homo sapien
catcttccctttattgggtgtccca

SEQ ID NO: 4084225 - DNA, 25 bp, Homo sapien
gtgtcccactaaacctcagaggcat

SEQ ID NO: 4084226 - DNA, 25 bp, Homo sapien
gcagtctgaataatgtctgctatga

SEQ ID NO: 4084227 - DNA, 25 bp, Homo sapien
cagtcgtacagtcgtacaatcatac

SEQ ID NO: 4084228 - DNA, 25 bp, Homo sapien
aagaaaattgtacagtcgtacagtc

SEQ ID NO: 4084229 - DNA, 25 bp, Homo sapien
aattgtacagtcgtacagtcgtaca

SEQ ID NO: 4084230 - DNA, 25 bp, Homo sapien
tgtacagtcgtacagtcgtacaatc

SEQ ID NO: 4084231 - DNA, 25 bp, Homo sapien
ctgttttgaatagacatctgatcac

SEQ ID NO: 4084232 - DNA, 25 bp, Homo sapien
gttttgaatagacatctgatcaccc

SEQ ID NO: 4084233 - DNA, 25 bp, Homo sapien
tgttttgaatagacatctgatcacc

SEQ ID NO: 4084234 - DNA, 25 bp, Homo sapien
agcagtaggattctggctggaacag

SEQ ID NO: 4084235 - DNA, 25 bp, Homo sapien
tagaatacctttgtggaggatttct

SEQ ID NO: 4084236 - DNA, 25 bp, Homo sapien
tcatcacttgtggtagcagtaggat

SEQ ID NO: 4084237 - DNA, 25 bp, Homo sapien
agttgtagaatacctttgtggagga

SEQ ID NO: 4084238 - DNA, 25 bp, Homo sapien
gggccctagaaattactggcacatg

SEQ ID NO: 4084239 - DNA, 25 bp, Homo sapien
gaatcctgtgactgaagtctttgtg

SEQ ID NO: 4084240 - DNA, 25 bp, Homo sapien
ccttatattgatagacaaactgatt

SEQ ID NO: 4084241 - DNA, 25 bp, Homo sapien
tctttgtgtcagtccctctatgtgc

SEQ ID NO: 4084242 - DNA, 25 bp, Homo sapien
tatttgaccctctcttgatgcacca

SEQ ID NO: 4084243 - DNA, 25 bp, Homo sapien
tacagtatgaaagctagccccatgg

SEQ ID NO: 4084244 - DNA, 25 bp, Homo sapien
aaatggtgctgattattcatcgtga

SEQ ID NO: 4084245 - DNA, 25 bp, Homo sapien
tctttatagtcggtcagtagaaggc

SEQ ID NO: 4084246 - DNA, 25 bp, Homo sapien
aatggtgccagaacctctccggtat

SEQ ID NO: 4084247 - DNA, 25 bp, Homo sapien
atattttttcgttcacacaggcggg

SEQ ID NO: 4084248 - DNA, 25 bp, Homo sapien
tctggtttcggtcatgcacgcttcg

SEQ ID NO: 4084249 - DNA, 25 bp, Homo sapien
tgtgtgttcctacctacttccgggc

SEQ ID NO: 4084250 - DNA, 25 bp, Homo sapien
ccggctgcctcgtgggcttctgagg

SEQ ID NO: 4084251 - DNA, 25 bp, Homo sapien
gccccttgccgcatgtggcagggct

SEQ ID NO: 4084252 - DNA, 25 bp, Homo sapien
aatctggagcagcagattccccgga

SEQ ID NO: 4084253 - DNA, 25 bp, Homo sapien
tccccggagggctcacagacgggaa

SEQ ID NO: 4084254 - DNA, 25 bp, Homo sapien
cagacgggaaggtccggcccagaca

SEQ ID NO: 4084255 - DNA, 25 bp, Homo sapien
cctcctctgcggaggtgggcaggga

SEQ ID NO: 4084256 - DNA, 25 bp, Homo sapien
caggcctcctctgcggaggtgggca

SEQ ID NO: 4084257 - DNA, 25 bp, Homo sapien
cctcaggcctcctctgcggaggtgg

SEQ ID NO: 4084258 - DNA, 25 bp, Homo sapien
ggcctcaggcctcctctgcggaggt

SEQ ID NO: 4084259 - DNA, 25 bp, Homo sapien
gatgatctgctttgtccaaatgccg

SEQ ID NO: 4084260 - DNA, 25 bp, Homo sapien
cagatgatctgctttgtccaaatgc

SEQ ID NO: 4084261 - DNA, 25 bp, Homo sapien
ccgctgcttcggcttggcaacggac

SEQ ID NO: 4084262 - DNA, 25 bp, Homo sapien
ttcggcttggcaacggactgggcca

SEQ ID NO: 4084263 - DNA, 25 bp, Homo sapien
tgtctctctcggcttcaaagaaacc

SEQ ID NO: 4084264 - DNA, 25 bp, Homo sapien
cagccgagccaatcacaggcaagga

SEQ ID NO: 4084265 - DNA, 25 bp, Homo sapien
atgtgcgcagccgtgctagggcctc

SEQ ID NO: 4084266 - DNA, 25 bp, Homo sapien
catcttccgaccagaaaggtcgtgc

SEQ ID NO: 4084267 - DNA, 25 bp, Homo sapien
aaactcaatggcatccgcccagctt

SEQ ID NO: 4084268 - DNA, 25 bp, Homo sapien
gcggccccggtagggctgccctgga

SEQ ID NO: 4084269 - DNA, 25 bp, Homo sapien
gagcctcgggggcagatgcaaccca

SEQ ID NO: 4084270 - DNA, 25 bp, Homo sapien
aatggcatccgcccagctttctaca

SEQ ID NO: 4084271 - DNA, 25 bp, Homo sapien
ggaagcataatagcaaaaccgcaac

SEQ ID NO: 4084272 - DNA, 25 bp, Homo sapien
ccacgaaagcaaactcccctggaag

SEQ ID NO: 4084273 - DNA, 25 bp, Homo sapien
atacagctctccccacgaaagcaaa

SEQ ID NO: 4084274 - DNA, 25 bp, Homo sapien
gtcgcatatgtctccatggaggtac

SEQ ID NO: 4084275 - DNA, 25 bp, Homo sapien
gatcctgttctcaaactgtctggca

SEQ ID NO: 4084276 - DNA, 25 bp, Homo sapien
ttcgcacaggctccacaagttgatg

SEQ ID NO: 4084277 - DNA, 25 bp, Homo sapien
gctgcacagcaaacgagagttccat

SEQ ID NO: 4084278 - DNA, 25 bp, Homo sapien
tgatgccagtatgcgctgaatgacc

SEQ ID NO: 4084279 - DNA, 25 bp, Homo sapien
ggtcctcagagaagggtaactcatc

SEQ ID NO: 4084280 - DNA, 25 bp, Homo sapien
cagagaagggtaactcatctctcag

SEQ ID NO: 4084281 - DNA, 25 bp, Homo sapien
gaagggtaactcatctctcagtgaa

SEQ ID NO: 4084282 - DNA, 25 bp, Homo sapien
ttcttccagctcataatgaagcaag

SEQ ID NO: 4084283 - DNA, 25 bp, Homo sapien
gacgacagaacctcagcagactaga

SEQ ID NO: 4084284 - DNA, 25 bp, Homo sapien
gaactgagttaatcctgttgacaac

SEQ ID NO: 4084285 - DNA, 25 bp, Homo sapien
gccctgcaagggtccatttgttaag

SEQ ID NO: 4084286 - DNA, 25 bp, Homo sapien
gaaaacaggcaatagcagacgacag

SEQ ID NO: 4084287 - DNA, 25 bp, Homo sapien
cccttgttgggaaagtctagagact

SEQ ID NO: 4084288 - DNA, 25 bp, Homo sapien
catttggccagacccacttgaacag

SEQ ID NO: 4084289 - DNA, 25 bp, Homo sapien
aatcctgttaggctttgaccttcag

SEQ ID NO: 4084290 - DNA, 25 bp, Homo sapien
gtgcctctgagcctaggatttgctg

SEQ ID NO: 4084291 - DNA, 25 bp, Homo sapien
tctatgaaccaagctgccggtgcca

SEQ ID NO: 4084292 - DNA, 25 bp, Homo sapien
ccaacgaggttggtagtgccttcca

SEQ ID NO: 4084293 - DNA, 25 bp, Homo sapien
tgagtacagatccagaagtatcctg

SEQ ID NO: 4084294 - DNA, 25 bp, Homo sapien
tacatttccctcaggtataacaagg

SEQ ID NO: 4084295 - DNA, 25 bp, Homo sapien
ttctcttttgcatggacaggcttga

SEQ ID NO: 4084296 - DNA, 25 bp, Homo sapien
ttaggccgtcactcttaagttcagc

SEQ ID NO: 4084297 - DNA, 25 bp, Homo sapien
tgttgattgttggatgcagccacac

SEQ ID NO: 4084298 - DNA, 25 bp, Homo sapien
tctagcaagcagttgttcagctgcg

SEQ ID NO: 4084299 - DNA, 25 bp, Homo sapien
gatattggcccctcaatcttagatt

SEQ ID NO: 4084300 - DNA, 25 bp, Homo sapien
caactttacgatgggtgtatcagga

SEQ ID NO: 4084301 - DNA, 25 bp, Homo sapien
tgccacaggatggtgcaacaagaag

SEQ ID NO: 4084302 - DNA, 25 bp, Homo sapien
tgtgtccccgcaagaggatgtgttg

SEQ ID NO: 4084303 - DNA, 25 bp, Homo sapien
acttctggattgtgttacatagcac

SEQ ID NO: 4084304 - DNA, 25 bp, Homo sapien
gtttttgcctgatcaaaagagatga

SEQ ID NO: 4084305 - DNA, 25 bp, Homo sapien
tttcaacatacaacatctcagagag

SEQ ID NO: 4084306 - DNA, 25 bp, Homo sapien
gtgtgtgttcactaccttagttaca

SEQ ID NO: 4084307 - DNA, 25 bp, Homo sapien
ctgagttggatctaaaagctaggcc

SEQ ID NO: 4084308 - DNA, 25 bp, Homo sapien
aagctaggccaaactcagacctggg

SEQ ID NO: 4084309 - DNA, 25 bp, Homo sapien
tatgccaggcaaccaaaaagtatct

SEQ ID NO: 4084310 - DNA, 25 bp, Homo sapien
tcctgagtggcaatgtggtcaccca

SEQ ID NO: 4084311 - DNA, 25 bp, Homo sapien
tattggaacatattgaccatgctag

SEQ ID NO: 4084312 - DNA, 25 bp, Homo sapien
gtccctggcttagggcgctgtttcc

SEQ ID NO: 4084313 - DNA, 25 bp, Homo sapien
cattaggacttgttctgtagtccac

SEQ ID NO: 4084314 - DNA, 25 bp, Homo sapien
catgctagtcctgattgatatccct

SEQ ID NO: 4084315 - DNA, 25 bp, Homo sapien
tccatggagattgggcgtatctgaa

SEQ ID NO: 4084316 - DNA, 25 bp, Homo sapien
ttaggtccaaaacggatgcgaccat

SEQ ID NO: 4084317 - DNA, 25 bp, Homo sapien
tgactgtgaccacacattctgcctt

SEQ ID NO: 4084318 - DNA, 25 bp, Homo sapien
tcattgacagatctggttctgcatc

SEQ ID NO: 4084319 - DNA, 25 bp, Homo sapien
gctgttgtaagcagagttagacctg

SEQ ID NO: 4084320 - DNA, 25 bp, Homo sapien
tggctaaggccatacgggaactctg

SEQ ID NO: 4084321 - DNA, 25 bp, Homo sapien
gaggttgaggttcaatcccaggatg

SEQ ID NO: 4084322 - DNA, 25 bp, Homo sapien
tgcgctatcttgtctgatctcagaa

SEQ ID NO: 4084323 - DNA, 25 bp, Homo sapien
tcgagtatcttggactacaggcgcc

SEQ ID NO: 4084324 - DNA, 25 bp, Homo sapien
cgcccgccacccggcccagctaatt

SEQ ID NO: 4084325 - DNA, 25 bp, Homo sapien
tctcgagtatcttggactacaggcg

SEQ ID NO: 4084326 - DNA, 25 bp, Homo sapien
gctctccttggctgtaccatctgat

SEQ ID NO: 4084327 - DNA, 25 bp, Homo sapien
cctgatctggaatgcattgctgttg

SEQ ID NO: 4084328 - DNA, 25 bp, Homo sapien
tccttccctggcgatattgtctcag

SEQ ID NO: 4084329 - DNA, 25 bp, Homo sapien
caattttagtcggtcaaggagatgg

SEQ ID NO: 4084330 - DNA, 25 bp, Homo sapien
tcagcagcaatgtctgctattaggg

SEQ ID NO: 4084331 - DNA, 25 bp, Homo sapien
tgtccttggtggtttcccactgtcc

SEQ ID NO: 4084332 - DNA, 25 bp, Homo sapien
taagcaagggccgtgctcattcctc

SEQ ID NO: 4084333 - DNA, 25 bp, Homo sapien
caaagggaccaagtgtccttggtgg

SEQ ID NO: 4084334 - DNA, 25 bp, Homo sapien
ctataagtcacagggtgttccttca

SEQ ID NO: 4084335 - DNA, 25 bp, Homo sapien
cgtcagaaaggtctgtgagtttttc

SEQ ID NO: 4084336 - DNA, 25 bp, Homo sapien
ccccagagggcaattgtctgtgggt

SEQ ID NO: 4084337 - DNA, 25 bp, Homo sapien
aattgggcacctgtatctaataacg

SEQ ID NO: 4084338 - DNA, 25 bp, Homo sapien
gctttgagtctataagtcatttggg

SEQ ID NO: 4084339 - DNA, 25 bp, Homo sapien
cagccaacgagtctattttcatgcc

SEQ ID NO: 4084340 - DNA, 25 bp, Homo sapien
aaatcatgcatgtggttggtgcctc

SEQ ID NO: 4084341 - DNA, 25 bp, Homo sapien
attcagagtttgttgtggttccaca

SEQ ID NO: 4084342 - DNA, 25 bp, Homo sapien
taaaattacgaaactgaagcctgag

SEQ ID NO: 4084343 - DNA, 25 bp, Homo sapien
caaccttggaggatatatttgcacg

SEQ ID NO: 4084344 - DNA, 25 bp, Homo sapien
gaagcctgagactaagattacacat

SEQ ID NO: 4084345 - DNA, 25 bp, Homo sapien
tagatagtgtacagcaagtccttgt

SEQ ID NO: 4084346 - DNA, 25 bp, Homo sapien
atggtatttgggactcagaggcttc

SEQ ID NO: 4084347 - DNA, 25 bp, Homo sapien
ggtatttgggactcagaggcttcat

SEQ ID NO: 4084348 - DNA, 25 bp, Homo sapien
tggtatttgggactcagaggcttca

SEQ ID NO: 4084349 - DNA, 25 bp, Homo sapien
gaaatcctggaatggcctacctgta

SEQ ID NO: 4084350 - DNA, 25 bp, Homo sapien
caaaggcagaaaccacccatggctt

SEQ ID NO: 4084351 - DNA, 25 bp, Homo sapien
tgatcccaagcattccgcagtctga

SEQ ID NO: 4084352 - DNA, 25 bp, Homo sapien
catggcttcagtgatccggttgagc

SEQ ID NO: 4084353 - DNA, 25 bp, Homo sapien
tctgcatgggattccgggaactgcc

SEQ ID NO: 4084354 - DNA, 25 bp, Homo sapien
ctctaatatctgcatgggattccgg

SEQ ID NO: 4084355 - DNA, 25 bp, Homo sapien
taatatctgcatgggattccgggaa

SEQ ID NO: 4084356 - DNA, 25 bp, Homo sapien
tatctgcatgggattccgggaactg

SEQ ID NO: 4084357 - DNA, 25 bp, Homo sapien
ggtagcagatgcctataacctcagc

SEQ ID NO: 4084358 - DNA, 25 bp, Homo sapien
aaaaattttccaagcgtggtagcag

SEQ ID NO: 4084359 - DNA, 25 bp, Homo sapien
aattttccaagcgtggtagcagatg

SEQ ID NO: 4084360 - DNA, 25 bp, Homo sapien
gatgcctataacctcagctactggg

SEQ ID NO: 4084361 - DNA, 25 bp, Homo sapien
aggtcttgcccgttttgccaatttg

SEQ ID NO: 4084362 - DNA, 25 bp, Homo sapien
ttgccaatttgtatgtcagtgtttt

SEQ ID NO: 4084363 - DNA, 25 bp, Homo sapien
tttgatcggttgtcaggtcttgccc

SEQ ID NO: 4084364 - DNA, 25 bp, Homo sapien
tctctctgatttgatcggttgtcag

SEQ ID NO: 4084365 - DNA, 25 bp, Homo sapien
gaaggcagccggcaacgcctgaagt

SEQ ID NO: 4084366 - DNA, 25 bp, Homo sapien
gaagttgctgaacaaccgcggtcag

SEQ ID NO: 4084367 - DNA, 25 bp, Homo sapien
cattctaacttgtaggggaaggcag

SEQ ID NO: 4084368 - DNA, 25 bp, Homo sapien
acaaccgcggtcagcccttggctat

SEQ ID NO: 4084369 - DNA, 25 bp, Homo sapien
tggcaggcgacctcgccaggatggc

SEQ ID NO: 4084370 - DNA, 25 bp, Homo sapien
gcgacctcgccaggatggcaggcca

SEQ ID NO: 4084371 - DNA, 25 bp, Homo sapien
gggctggcaggcgacctcgccagga

SEQ ID NO: 4084372 - DNA, 25 bp, Homo sapien
cccgggctggcaggcgacctcgcca

SEQ ID NO: 4084373 - DNA, 25 bp, Homo sapien
ccgatggcttcttgggccccgcagg

SEQ ID NO: 4084374 - DNA, 25 bp, Homo sapien
tgcacagccgatggcttcttgggcc

SEQ ID NO: 4084375 - DNA, 25 bp, Homo sapien
acagccgatggcttcttgggccccg

SEQ ID NO: 4084376 - DNA, 25 bp, Homo sapien
agccgatggcttcttgggccccgca

SEQ ID NO: 4084377 - DNA, 25 bp, Homo sapien
agccttcaggagcaccgatggccaa

SEQ ID NO: 4084378 - DNA, 25 bp, Homo sapien
ttcatcctccaggtgcgagagctcc

SEQ ID NO: 4084379 - DNA, 25 bp, Homo sapien
tgatggtgcatccttcagctcccgg

SEQ ID NO: 4084380 - DNA, 25 bp, Homo sapien
gcaggcttcattggccgcttggcag

SEQ ID NO: 4084381 - DNA, 25 bp, Homo sapien
caccctcgtggagtacactaatttg

SEQ ID NO: 4084382 - DNA, 25 bp, Homo sapien
cactaatttgaactggactggtctc

SEQ ID NO: 4084383 - DNA, 25 bp, Homo sapien
gatttttgtaccagagatgtgctaa

SEQ ID NO: 4084384 - DNA, 25 bp, Homo sapien
tcgcttttgtgctacctttcttgga

SEQ ID NO: 4084385 - DNA, 25 bp, Homo sapien
tttgctgagttgtgtcaatccagat

SEQ ID NO: 4084386 - DNA, 25 bp, Homo sapien
aacttaactttccagcgcaggcgtt

SEQ ID NO: 4084387 - DNA, 25 bp, Homo sapien
agaccgttcggtcttcccacaatct

SEQ ID NO: 4084388 - DNA, 25 bp, Homo sapien
gatatccgctgggtaagaccgttcg

SEQ ID NO: 4084389 - DNA, 25 bp, Homo sapien
gggaccgcgctgcccataaaagggc

SEQ ID NO: 4084390 - DNA, 25 bp, Homo sapien
ccgcgctgcccataaaagggctttt

SEQ ID NO: 4084391 - DNA, 25 bp, Homo sapien
gaccgcgctgcccataaaagggctt

SEQ ID NO: 4084392 - DNA, 25 bp, Homo sapien
tggggaccgcgctgcccataaaagg

SEQ ID NO: 4084393 - DNA, 25 bp, Homo sapien
cagggtgacattaatccataggtgg

SEQ ID NO: 4084394 - DNA, 25 bp, Homo sapien
ttcagggtgacattaatccataggt

SEQ ID NO: 4084395 - DNA, 25 bp, Homo sapien
cttcagggtgacattaatccatagg

SEQ ID NO: 4084396 - DNA, 25 bp, Homo sapien
tcagggtgacattaatccataggtg

SEQ ID NO: 4084397 - DNA, 25 bp, Homo sapien
ggatctgtatcaagtcccaggtgtc

SEQ ID NO: 4084398 - DNA, 25 bp, Homo sapien
taggatctgtatcaagtcccaggtg

SEQ ID NO: 4084399 - DNA, 25 bp, Homo sapien
gcttaggatctgtatcaagtcccag

SEQ ID NO: 4084400 - DNA, 25 bp, Homo sapien
agtcccaggtgtcttttagccaaat

SEQ ID NO: 4084401 - DNA, 25 bp, Homo sapien
ggtttcaaatattatcacgatatca

SEQ ID NO: 4084402 - DNA, 25 bp, Homo sapien
tctttggtttcaaatattatcacga

SEQ ID NO: 4084403 - DNA, 25 bp, Homo sapien
tattatcacgatatcatcagtgtgt

SEQ ID NO: 4084404 - DNA, 25 bp, Homo sapien
cacgatatcatcagtgtgttttatc

SEQ ID NO: 4084405 - DNA, 25 bp, Homo sapien
ttttgttctacacatgaaccagaga

SEQ ID NO: 4084406 - DNA, 25 bp, Homo sapien
tgtgaaccttttgttctacacatga

SEQ ID NO: 4084407 - DNA, 25 bp, Homo sapien
gatttcctgtctgaaaccagaggct

SEQ ID NO: 4084408 - DNA, 25 bp, Homo sapien
gctctcgagaatttttgtgaacctt

SEQ ID NO: 4084409 - DNA, 25 bp, Homo sapien
cacacctgaatcgaaggccccaata

SEQ ID NO: 4084410 - DNA, 25 bp, Homo sapien
tttatttggaggcactgaagtctgc

SEQ ID NO: 4084411 - DNA, 25 bp, Homo sapien
ggagcagataggcataaaggcaatt

SEQ ID NO: 4084412 - DNA, 25 bp, Homo sapien
accacagatgatcaggacttctcca

SEQ ID NO: 4084413 - DNA, 25 bp, Homo sapien
taatcatggcgtcattgagagggag

SEQ ID NO: 4084414 - DNA, 25 bp, Homo sapien
gataaagacaaacgcacaacctcct

SEQ ID NO: 4084415 - DNA, 25 bp, Homo sapien
agtgagaaatggtttattaataatc

SEQ ID NO: 4084416 - DNA, 25 bp, Homo sapien
gagaagccgggagataaagacaaac

SEQ ID NO: 4084417 - DNA, 25 bp, Homo sapien
cgcacgcaagagctgcgcaattctg

SEQ ID NO: 4084418 - DNA, 25 bp, Homo sapien
aataggaaagcgcacgcaagagctg

SEQ ID NO: 4084419 - DNA, 25 bp, Homo sapien
gaaagcgcacgcaagagctgcgcaa

SEQ ID NO: 4084420 - DNA, 25 bp, Homo sapien
caagagctgcgcaattctggtgaag

SEQ ID NO: 4084421 - DNA, 25 bp, Homo sapien
tcaaaatcccagcccgccagctacg

SEQ ID NO: 4084422 - DNA, 25 bp, Homo sapien
ggaatacatattaggtcagccactg

SEQ ID NO: 4084423 - DNA, 25 bp, Homo sapien
ggtgggaatacatattaggtcagcc

SEQ ID NO: 4084424 - DNA, 25 bp, Homo sapien
atacatattaggtcagccactgtgg

SEQ ID NO: 4084425 - DNA, 25 bp, Homo sapien
tgggaatacatattaggtcagccac

SEQ ID NO: 4084426 - DNA, 25 bp, Homo sapien
gtacaggtcaaagggaggcacagct

SEQ ID NO: 4084427 - DNA, 25 bp, Homo sapien
tgtacaggtcaaagggaggcacagc

SEQ ID NO: 4084428 - DNA, 25 bp, Homo sapien
aggtcaaagggaggcacagctgtgg

SEQ ID NO: 4084429 - DNA, 25 bp, Homo sapien
acaggtcaaagggaggcacagctgt

SEQ ID NO: 4084430 - DNA, 25 bp, Homo sapien
tctagtttccaactgtgggtctaac

SEQ ID NO: 4084431 - DNA, 25 bp, Homo sapien
ggtctaacccaatcacatcaggcag

SEQ ID NO: 4084432 - DNA, 25 bp, Homo sapien
caactgtgggtctaacccaatcaca

SEQ ID NO: 4084433 - DNA, 25 bp, Homo sapien
catctctccaggtatctagtttcca

SEQ ID NO: 4084434 - DNA, 25 bp, Homo sapien
cagtaatcatgagctttgggtgtgc

SEQ ID NO: 4084435 - DNA, 25 bp, Homo sapien
agagctatggataggtatatcaacc

SEQ ID NO: 4084436 - DNA, 25 bp, Homo sapien
ctggaccaaggagctgtatgtcgag

SEQ ID NO: 4084437 - DNA, 25 bp, Homo sapien
cagaaagctccccagtaatcatgag

SEQ ID NO: 4084438 - DNA, 25 bp, Homo sapien
cagtccaagatgttttagcctcacc

SEQ ID NO: 4084439 - DNA, 25 bp, Homo sapien
tccatgagcattgggaagtctctac

SEQ ID NO: 4084440 - DNA, 25 bp, Homo sapien
tacttctgggtccttacaacatgcc

SEQ ID NO: 4084441 - DNA, 25 bp, Homo sapien
ggcaccagccatataagagaaggga

SEQ ID NO: 4084442 - DNA, 25 bp, Homo sapien
tttccgatggacatgagggaatagc

SEQ ID NO: 4084443 - DNA, 25 bp, Homo sapien
tctttccgatggacatgagggaata

SEQ ID NO: 4084444 - DNA, 25 bp, Homo sapien
tcttctttccgatggacatgaggga

SEQ ID NO: 4084445 - DNA, 25 bp, Homo sapien
cttctttccgatggacatgagggaa

SEQ ID NO: 4084446 - DNA, 25 bp, Homo sapien
ctcagactcagatgtagccagggct

SEQ ID NO: 4084447 - DNA, 25 bp, Homo sapien
gctgctaagggtagagcagcagcac

SEQ ID NO: 4084448 - DNA, 25 bp, Homo sapien
tattgctgccatgaaagacagtgtg

SEQ ID NO: 4084449 - DNA, 25 bp, Homo sapien
cagacatttgccacacggattccac

SEQ ID NO: 4084450 - DNA, 25 bp, Homo sapien
gctgtttcatttgcacatacaaagt

SEQ ID NO: 4084451 - DNA, 25 bp, Homo sapien
tagggtatcttctctaatctgcatc

SEQ ID NO: 4084452 - DNA, 25 bp, Homo sapien
catcttagaagaacctccagaaccc

SEQ ID NO: 4084453 - DNA, 25 bp, Homo sapien
ttccctagtagttccaagttacatg

SEQ ID NO: 4084454 - DNA, 25 bp, Homo sapien
gtttctggcaaccatgcctacaaag

SEQ ID NO: 4084455 - DNA, 25 bp, Homo sapien
tgtttctggcaaccatgcctacaaa

SEQ ID NO: 4084456 - DNA, 25 bp, Homo sapien
ctgtttctggcaaccatgcctacaa

SEQ ID NO: 4084457 - DNA, 25 bp, Homo sapien
tttctggcaaccatgcctacaaagc

SEQ ID NO: 4084458 - DNA, 25 bp, Homo sapien
cctcatgctcctcattacccagttg

SEQ ID NO: 4084459 - DNA, 25 bp, Homo sapien
cccctcatgctcctcattacccagt

SEQ ID NO: 4084460 - DNA, 25 bp, Homo sapien
ctcatgctcctcattacccagttgc

SEQ ID NO: 4084461 - DNA, 25 bp, Homo sapien
ttccaaatccaggggcaccttcttc

SEQ ID NO: 4084462 - DNA, 25 bp, Homo sapien
actgagtcagccacagtaaaaatca

SEQ ID NO: 4084463 - DNA, 25 bp, Homo sapien
aagatgtccactattgccacttata

SEQ ID NO: 4084464 - DNA, 25 bp, Homo sapien
gatgtccactattgccacttatatt

SEQ ID NO: 4084465 - DNA, 25 bp, Homo sapien
cccaagatgtccactattgccactt

SEQ ID NO: 4084466 - DNA, 25 bp, Homo sapien
caagatgtccactattgccacttat

SEQ ID NO: 4084467 - DNA, 25 bp, Homo sapien
aatgcaattagaagggaacacaaaa

SEQ ID NO: 4084468 - DNA, 25 bp, Homo sapien
aaatatgcatcccatgcctgaacgg

SEQ ID NO: 4084469 - DNA, 25 bp, Homo sapien
tgcctgaacggtgccaggaaatcca

SEQ ID NO: 4084470 - DNA, 25 bp, Homo sapien
catgcattcctggtgaatccaattt

SEQ ID NO: 4084471 - DNA, 25 bp, Homo sapien
ccctaaggtcccagaggttcatgtg

SEQ ID NO: 4084472 - DNA, 25 bp, Homo sapien
tatagcatgagttgttgatcactca

SEQ ID NO: 4084473 - DNA, 25 bp, Homo sapien
ctgacggttgagcaggatggtttct

SEQ ID NO: 4084474 - DNA, 25 bp, Homo sapien
agcaggatggtttctgcagagtcct

SEQ ID NO: 4084475 - DNA, 25 bp, Homo sapien
gaacaccaaggacatccgccagagg

SEQ ID NO: 4084476 - DNA, 25 bp, Homo sapien
catgttgtccttctacaacaatgta

SEQ ID NO: 4084477 - DNA, 25 bp, Homo sapien
ccatgttgtccttctacaacaatgt

SEQ ID NO: 4084478 - DNA, 25 bp, Homo sapien
atccgccagaggtcggggtcaccag

SEQ ID NO: 4084479 - DNA, 25 bp, Homo sapien
caacataggagaggattaaacatgt

SEQ ID NO: 4084480 - DNA, 25 bp, Homo sapien
tatttgaaaaactaccacaacatag

SEQ ID NO: 4084481 - DNA, 25 bp, Homo sapien
taactagattacataagagacctct

SEQ ID NO: 4084482 - DNA, 25 bp, Homo sapien
gacctctatgcatcagtaagagaaa

SEQ ID NO: 4084483 - DNA, 25 bp, Homo sapien
cattatcccaaccagtaatcacagt

SEQ ID NO: 4084484 - DNA, 25 bp, Homo sapien
catttccccagacccattatcccaa

SEQ ID NO: 4084485 - DNA, 25 bp, Homo sapien
tcccaaccagtaatcacagtcttgg

SEQ ID NO: 4084486 - DNA, 25 bp, Homo sapien
cagacccattatcccaaccagtaat

SEQ ID NO: 4084487 - DNA, 25 bp, Homo sapien
cagccagggaggccttcaagggatc

SEQ ID NO: 4084488 - DNA, 25 bp, Homo sapien
agccagggaggccttcaagggatca

SEQ ID NO: 4084489 - DNA, 25 bp, Homo sapien
gggaggccttcaagggatcagctgc

SEQ ID NO: 4084490 - DNA, 25 bp, Homo sapien
ccagggaggccttcaagggatcagc

SEQ ID NO: 4084491 - DNA, 25 bp, Homo sapien
tatctgctgcacgtactgctcccca

SEQ ID NO: 4084492 - DNA, 25 bp, Homo sapien
caagggcagctcttcaaactacaat

SEQ ID NO: 4084493 - DNA, 25 bp, Homo sapien
tcccctatctgctgcacgtactgct

SEQ ID NO: 4084494 - DNA, 25 bp, Homo sapien
gttcccaagggcagctcttcaaact

SEQ ID NO: 4084495 - DNA, 25 bp, Homo sapien
cctgtgcattctgccgggtctggtc

SEQ ID NO: 4084496 - DNA, 25 bp, Homo sapien
cactgagcgggtcagcctgaattct

SEQ ID NO: 4084497 - DNA, 25 bp, Homo sapien
gccagttggcgcactgagcgggtca

SEQ ID NO: 4084498 - DNA, 25 bp, Homo sapien
ccatccggtgtggacgccagttggc

SEQ ID NO: 4084499 - DNA, 25 bp, Homo sapien
gtagtgcgttcccatgtcgtggcag

SEQ ID NO: 4084500 - DNA, 25 bp, Homo sapien
aggctttgtgggcatggctcctgca

SEQ ID NO: 4084501 - DNA, 25 bp, Homo sapien
cagacagtaaatataggagtcttga

SEQ ID NO: 4084502 - DNA, 25 bp, Homo sapien
ggagtcttgacttggtaaatgtcca

SEQ ID NO: 4084503 - DNA, 25 bp, Homo sapien
caggtacttctacagacgctcctct

SEQ ID NO: 4084504 - DNA, 25 bp, Homo sapien
tacagacgctcctctaatagtcacg

SEQ ID NO: 4084505 - DNA, 25 bp, Homo sapien
gacgctcctctaatagtcacgtgca

SEQ ID NO: 4084506 - DNA, 25 bp, Homo sapien
ctctaatagtcacgtgcacagacac

SEQ ID NO: 4084507 - DNA, 25 bp, Homo sapien
ggcactagaataggagctggatgct

SEQ ID NO: 4084508 - DNA, 25 bp, Homo sapien
gaaacaaggccctcagattgcacaa

SEQ ID NO: 4084509 - DNA, 25 bp, Homo sapien
cctgtggctaaggtaatcactcagc

SEQ ID NO: 4084510 - DNA, 25 bp, Homo sapien
cctggtgccctccagaaagcagaaa

SEQ ID NO: 4084511 - DNA, 25 bp, Homo sapien
ccagattcacgtccagattcaagcg

SEQ ID NO: 4084512 - DNA, 25 bp, Homo sapien
aaatatcatctacagttgcaaagca

SEQ ID NO: 4084513 - DNA, 25 bp, Homo sapien
gaaagaaggaagagggtatagaatc

SEQ ID NO: 4084514 - DNA, 25 bp, Homo sapien
tagaatcagggagttccacaggtac

SEQ ID NO: 4084515 - DNA, 25 bp, Homo sapien
cagcgttcatacaggactgctgggc

SEQ ID NO: 4084516 - DNA, 25 bp, Homo sapien
acagcgttcatacaggactgctggg

SEQ ID NO: 4084517 - DNA, 25 bp, Homo sapien
gcgttcatacaggactgctgggctc

SEQ ID NO: 4084518 - DNA, 25 bp, Homo sapien
agcgttcatacaggactgctgggct

SEQ ID NO: 4084519 - DNA, 25 bp, Homo sapien
gcaagccagaagcaggcgcgcagcc

SEQ ID NO: 4084520 - DNA, 25 bp, Homo sapien
caaaggtcgagctactccctctggg

SEQ ID NO: 4084521 - DNA, 25 bp, Homo sapien
tacttgcgtctctgaccaaaggtcg

SEQ ID NO: 4084522 - DNA, 25 bp, Homo sapien
gcgacatcccttctcttcatacggg

SEQ ID NO: 4084523 - DNA, 25 bp, Homo sapien
tattctgaattgtggagaaagggca

SEQ ID NO: 4084524 - DNA, 25 bp, Homo sapien
ttctgaattgtggagaaagggcatt

SEQ ID NO: 4084525 - DNA, 25 bp, Homo sapien
gaatattctgaattgtggagaaagg

SEQ ID NO: 4084526 - DNA, 25 bp, Homo sapien
tctgaattgtggagaaagggcattc

SEQ ID NO: 4084527 - DNA, 25 bp, Homo sapien
ggttttctaacgatggcaactggct

SEQ ID NO: 4084528 - DNA, 25 bp, Homo sapien
tcttcgagaatttgacgagcccatc

SEQ ID NO: 4084529 - DNA, 25 bp, Homo sapien
cccacgatgagagactttaccttga

SEQ ID NO: 4084530 - DNA, 25 bp, Homo sapien
caaaatcagtttagggtggtccaga

SEQ ID NO: 4084531 - DNA, 25 bp, Homo sapien
caatgtagattctgtccaagccatc

SEQ ID NO: 4084532 - DNA, 25 bp, Homo sapien
ccccaaggaccatagggttgtgcca

SEQ ID NO: 4084533 - DNA, 25 bp, Homo sapien
ccccgggagacagttcaatgtagat

SEQ ID NO: 4084534 - DNA, 25 bp, Homo sapien
gttgtgccagaacccgataggtcag

SEQ ID NO: 4084535 - DNA, 25 bp, Homo sapien
tgagagcctcacaggttctctccct

SEQ ID NO: 4084536 - DNA, 25 bp, Homo sapien
ttaccgaacacccactgctggccac

SEQ ID NO: 4084537 - DNA, 25 bp, Homo sapien
gcatcctcttaatcagcccttcttg

SEQ ID NO: 4084538 - DNA, 25 bp, Homo sapien
cttaatcagcccttcttgcagagga

SEQ ID NO: 4084539 - DNA, 25 bp, Homo sapien
ttaaatccgactccagaatttagca

SEQ ID NO: 4084540 - DNA, 25 bp, Homo sapien
ccgactccagaatttagcacctttt

SEQ ID NO: 4084541 - DNA, 25 bp, Homo sapien
aaatccgactccagaatttagcacc

SEQ ID NO: 4084542 - DNA, 25 bp, Homo sapien
tccgactccagaatttagcaccttt

SEQ ID NO: 4084543 - DNA, 25 bp, Homo sapien
tggcggttgagtgctttgccagaaa

SEQ ID NO: 4084544 - DNA, 25 bp, Homo sapien
tggaaagttgactaaggagccccat

SEQ ID NO: 4084545 - DNA, 25 bp, Homo sapien
gaaactgcatctcagtgggagttgg

SEQ ID NO: 4084546 - DNA, 25 bp, Homo sapien
ttgggagattggaaagttgactaag

SEQ ID NO: 4084547 - DNA, 25 bp, Homo sapien
tgagagctcagcactgctagatgag

SEQ ID NO: 4084548 - DNA, 25 bp, Homo sapien
agctcagcactgctagatgagctga

SEQ ID NO: 4084549 - DNA, 25 bp, Homo sapien
gagagctcagcactgctagatgagc

SEQ ID NO: 4084550 - DNA, 25 bp, Homo sapien
gagctcagcactgctagatgagctg

SEQ ID NO: 4084551 - DNA, 25 bp, Homo sapien
cagaaactgtgggatctgaacggca

SEQ ID NO: 4084552 - DNA, 25 bp, Homo sapien
ctacagaaactgtgggatctgaacg

SEQ ID NO: 4084553 - DNA, 25 bp, Homo sapien
tacagaaactgtgggatctgaacgg

SEQ ID NO: 4084554 - DNA, 25 bp, Homo sapien
agaaactgtgggatctgaacggcac

SEQ ID NO: 4084555 - DNA, 25 bp, Homo sapien
ctatgaactgtacccatcaaagaat

SEQ ID NO: 4084556 - DNA, 25 bp, Homo sapien
tatgaactgtacccatcaaagaatg

SEQ ID NO: 4084557 - DNA, 25 bp, Homo sapien
taaaccttcccttctatcacaccat

SEQ ID NO: 4084558 - DNA, 25 bp, Homo sapien
ctaaaccttcccttctatcacacca

SEQ ID NO: 4084559 - DNA, 25 bp, Homo sapien
tattggtccatatccattgcccttg

SEQ ID NO: 4084560 - DNA, 25 bp, Homo sapien
ggacaggtccctacatacgcgtaca

SEQ ID NO: 4084561 - DNA, 25 bp, Homo sapien
tacctatgaatttgggcctattggc

SEQ ID NO: 4084562 - DNA, 25 bp, Homo sapien
tctgggtatccaaccctattggtcc

SEQ ID NO: 4084563 - DNA, 25 bp, Homo sapien
aaagtcctcattatggtgtccaact

SEQ ID NO: 4084564 - DNA, 25 bp, Homo sapien
gtcctcattatggtgtccaactttc

SEQ ID NO: 4084565 - DNA, 25 bp, Homo sapien
acaaaagtcctcattatggtgtcca

SEQ ID NO: 4084566 - DNA, 25 bp, Homo sapien
cattatggtgtccaactttctctcc

SEQ ID NO: 4084567 - DNA, 25 bp, Homo sapien
gatgtctctatattgcaaacgcatt

SEQ ID NO: 4084568 - DNA, 25 bp, Homo sapien
agctcactcatcaggcctttgatgt

SEQ ID NO: 4084569 - DNA, 25 bp, Homo sapien
actcatcaggcctttgatgtctcta

SEQ ID NO: 4084570 - DNA, 25 bp, Homo sapien
gcttgctttgatctttccgctgatc

SEQ ID NO: 4084571 - DNA, 25 bp, Homo sapien
gccccaccggttcatccaggatgtc

SEQ ID NO: 4084572 - DNA, 25 bp, Homo sapien
gttaagctccttgatccttcctgaa

SEQ ID NO: 4084573 - DNA, 25 bp, Homo sapien
gatcaatgttattccgttaagctcc

SEQ ID NO: 4084574 - DNA, 25 bp, Homo sapien
accaggaaccctctttcttcaagat

SEQ ID NO: 4084575 - DNA, 25 bp, Homo sapien
gacctccttgagagcatccaggagt

SEQ ID NO: 4084576 - DNA, 25 bp, Homo sapien
aatgatccttggtcatgcagacctc

SEQ ID NO: 4084577 - DNA, 25 bp, Homo sapien
gagagcatccaggagtttgactggc

SEQ ID NO: 4084578 - DNA, 25 bp, Homo sapien
gctgcttgcaagattcatgaacttg

SEQ ID NO: 4084579 - DNA, 25 bp, Homo sapien
gacaggtgtacgagtcctggctaat

SEQ ID NO: 4084580 - DNA, 25 bp, Homo sapien
cagaaacgatgcatgaagtgggaca

SEQ ID NO: 4084581 - DNA, 25 bp, Homo sapien
cctacttttgtgtctctgttctgcg

SEQ ID NO: 4084582 - DNA, 25 bp, Homo sapien
gggatctctttgctactgtagataa

SEQ ID NO: 4084583 - DNA, 25 bp, Homo sapien
gctcccctggaccaaatgaagaaca

SEQ ID NO: 4084584 - DNA, 25 bp, Homo sapien
gatgtgcacctggatgatgctttcc

SEQ ID NO: 4084585 - DNA, 25 bp, Homo sapien
tgaagaacagatgtgcacctggatg

SEQ ID NO: 4084586 - DNA, 25 bp, Homo sapien
ctgtaattgtagcagacccctctga

SEQ ID NO: 4084587 - DNA, 25 bp, Homo sapien
gactggagatctccatgcaagcaag

SEQ ID NO: 4084588 - DNA, 25 bp, Homo sapien
cacaggtctagcattataacctgct

SEQ ID NO: 4084589 - DNA, 25 bp, Homo sapien
cctgcttccagttcagcagactgga

SEQ ID NO: 4084590 - DNA, 25 bp, Homo sapien
gagatctccatgcaagcaagctgaa

SEQ ID NO: 4084591 - DNA, 25 bp, Homo sapien
cgttttattcctcgctctaagtcca

SEQ ID NO: 4084592 - DNA, 25 bp, Homo sapien
gattggtgacttcacgttttattcc

SEQ ID NO: 4084593 - DNA, 25 bp, Homo sapien
gacttcacgttttattcctcgctct

SEQ ID NO: 4084594 - DNA, 25 bp, Homo sapien
ggtgacttcacgttttattcctcgc

SEQ ID NO: 4084595 - DNA, 25 bp, Homo sapien
cttgataaagctgcacactcaaatc

SEQ ID NO: 4084596 - DNA, 25 bp, Homo sapien
aagctgcacactcaaatcagtgcag

SEQ ID NO: 4084597 - DNA, 25 bp, Homo sapien
ttgataaagctgcacactcaaatca

SEQ ID NO: 4084598 - DNA, 25 bp, Homo sapien
gctgcacactcaaatcagtgcagct

SEQ ID NO: 4084599 - DNA, 25 bp, Homo sapien
tccaggaaggttgtaaaacaccaca

SEQ ID NO: 4084600 - DNA, 25 bp, Homo sapien
gatgaactgacggtatccaggaagg

SEQ ID NO: 4084601 - DNA, 25 bp, Homo sapien
tcagcccaacatcgagaagagaggc

SEQ ID NO: 4084602 - DNA, 25 bp, Homo sapien
taacagaccctcagttccccagatt

SEQ ID NO: 4084603 - DNA, 25 bp, Homo sapien
tgtacaccaagataacaagaataac

SEQ ID NO: 4084604 - DNA, 25 bp, Homo sapien
caaaaggcctagatcttctggaaaa

SEQ ID NO: 4084605 - DNA, 25 bp, Homo sapien
gttccccttctgtacaccaagataa

SEQ ID NO: 4084606 - DNA, 25 bp, Homo sapien
tcttcccagcgagagtaattaggtg

SEQ ID NO: 4084607 - DNA, 25 bp, Homo sapien
gaggaaagaggcactcttcttccct

SEQ ID NO: 4084608 - DNA, 25 bp, Homo sapien
cgagctctactgtggatccccagga

SEQ ID NO: 4084609 - DNA, 25 bp, Homo sapien
caaaagccctagcagtgggaaggca

SEQ ID NO: 4084610 - DNA, 25 bp, Homo sapien
tttagccatactctccctgaaaaag

SEQ ID NO: 4084611 - DNA, 25 bp, Homo sapien
tgcatatgccaaagcctgagacagc

SEQ ID NO: 4084612 - DNA, 25 bp, Homo sapien
tcagctacagaaagtaacacgtggc

SEQ ID NO: 4084613 - DNA, 25 bp, Homo sapien
taacaccaagaggtatacggatcct

SEQ ID NO: 4084614 - DNA, 25 bp, Homo sapien
taaacaattggacattagcaggagg

SEQ ID NO: 4084615 - DNA, 25 bp, Homo sapien
aatagattttacacacacgaaattc

SEQ ID NO: 4084616 - DNA, 25 bp, Homo sapien
agcaatagattttacacacacgaaa

SEQ ID NO: 4084617 - DNA, 25 bp, Homo sapien
aagcaatagattttacacacacgaa

SEQ ID NO: 4084618 - DNA, 25 bp, Homo sapien
gcaatagattttacacacacgaaat

SEQ ID NO: 4084619 - DNA, 25 bp, Homo sapien
tacaaatggcgttgtgtctgagatc

SEQ ID NO: 4084620 - DNA, 25 bp, Homo sapien
taccaccggccagtcatacaaatgg

SEQ ID NO: 4084621 - DNA, 25 bp, Homo sapien
aaaacatgtcaaccaccacgactga

SEQ ID NO: 4084622 - DNA, 25 bp, Homo sapien
caagtccaccttgtccattctgctg

SEQ ID NO: 4084623 - DNA, 25 bp, Homo sapien
tttgaaagagcccagtgtaacttgc

SEQ ID NO: 4084624 - DNA, 25 bp, Homo sapien
ccagcacgtccaagtcagcgagatg

SEQ ID NO: 4084625 - DNA, 25 bp, Homo sapien
ttttcctgtgcatgcccagagcgga

SEQ ID NO: 4084626 - DNA, 25 bp, Homo sapien
acacatctgcaatttgatttgaaag

SEQ ID NO: 4084627 - DNA, 25 bp, Homo sapien
gtttgaatgacattctcccttgaaa

SEQ ID NO: 4084628 - DNA, 25 bp, Homo sapien
tgtttgaatgacattctcccttgaa

SEQ ID NO: 4084629 - DNA, 25 bp, Homo sapien
aagccggctccttcacaggcccatg

SEQ ID NO: 4084630 - DNA, 25 bp, Homo sapien
tcacaggcccatgcatcctcacagg

SEQ ID NO: 4084631 - DNA, 25 bp, Homo sapien
aacctgtcctaacatagggtccttg

SEQ ID NO: 4084632 - DNA, 25 bp, Homo sapien
ttgaacctgtcctaacatagggtcc

SEQ ID NO: 4084633 - DNA, 25 bp, Homo sapien
cctgtcctaacatagggtccttgac

SEQ ID NO: 4084634 - DNA, 25 bp, Homo sapien
tgtcctaacatagggtccttgacat

SEQ ID NO: 4084635 - DNA, 25 bp, Homo sapien
tgtcttggggaagattaatttatgt

SEQ ID NO: 4084636 - DNA, 25 bp, Homo sapien
gtgtcttggggaagattaatttatg

SEQ ID NO: 4084637 - DNA, 25 bp, Homo sapien
tgtgtgaagtccgtttttgcaaaac

SEQ ID NO: 4084638 - DNA, 25 bp, Homo sapien
ggatagtgtgttggccacaggcaat

SEQ ID NO: 4084639 - DNA, 25 bp, Homo sapien
ctttatcagtttggatagtgtgttg

SEQ ID NO: 4084640 - DNA, 25 bp, Homo sapien
taattgcccttctacacagtcaacc

SEQ ID NO: 4084641 - DNA, 25 bp, Homo sapien
tgttcctgattatcagctgctttca

SEQ ID NO: 4084642 - DNA, 25 bp, Homo sapien
tgctggcaaacctctcatctctagc

SEQ ID NO: 4084643 - DNA, 25 bp, Homo sapien
tatcagctgctttcaatgcagaatg

SEQ ID NO: 4084644 - DNA, 25 bp, Homo sapien
catctctagcacgtccacatctatg

SEQ ID NO: 4084645 - DNA, 25 bp, Homo sapien
ggctttgttgtactcctcagtcccc

SEQ ID NO: 4084646 - DNA, 25 bp, Homo sapien
cctggctgcccagttggctttgttg

SEQ ID NO: 4084647 - DNA, 25 bp, Homo sapien
ctttgttgtactcctcagtccccat

SEQ ID NO: 4084648 - DNA, 25 bp, Homo sapien
tggctgcccagttggctttgttgta

SEQ ID NO: 4084649 - DNA, 25 bp, Homo sapien
gatcagactatggaactgaaggacc

SEQ ID NO: 4084650 - DNA, 25 bp, Homo sapien
tcagactatggaactgaaggaccac

SEQ ID NO: 4084651 - DNA, 25 bp, Homo sapien
ctgatcagactatggaactgaagga

SEQ ID NO: 4084652 - DNA, 25 bp, Homo sapien
cagactatggaactgaaggaccaca

SEQ ID NO: 4084653 - DNA, 25 bp, Homo sapien
ccagcgtcttgaagtaattcagaaa

SEQ ID NO: 4084654 - DNA, 25 bp, Homo sapien
tctttcagttagcattccactgcag

SEQ ID NO: 4084655 - DNA, 25 bp, Homo sapien
tatcaccagcgtcttgaagtaattc

SEQ ID NO: 4084656 - DNA, 25 bp, Homo sapien
tccactgcaggtatcaccagcgtct

SEQ ID NO: 4084657 - DNA, 25 bp, Homo sapien
tttgacacccgcaaaaggactctct

SEQ ID NO: 4084658 - DNA, 25 bp, Homo sapien
tctctacactgtggagagtcattag

SEQ ID NO: 4084659 - DNA, 25 bp, Homo sapien
tcttaaaatactcatttctctacac

SEQ ID NO: 4084660 - DNA, 25 bp, Homo sapien
ctttctttgataccccagcacttgg

SEQ ID NO: 4084661 - DNA, 25 bp, Homo sapien
accatgctacttgtgaaatatctat

SEQ ID NO: 4084662 - DNA, 25 bp, Homo sapien
catgctacttgtgaaatatctataa

SEQ ID NO: 4084663 - DNA, 25 bp, Homo sapien
ttgtgaaatatctataatatcagcc

SEQ ID NO: 4084664 - DNA, 25 bp, Homo sapien
acttgtgaaatatctataatatcag

SEQ ID NO: 4084665 - DNA, 25 bp, Homo sapien
tgtccgttgcctgcatctgtactgt

SEQ ID NO: 4084666 - DNA, 25 bp, Homo sapien
accatgctggtgtccgttgcctgca

SEQ ID NO: 4084667 - DNA, 25 bp, Homo sapien
tgctggtgtccgttgcctgcatctg

SEQ ID NO: 4084668 - DNA, 25 bp, Homo sapien
cgttgcctgcatctgtactgttggg

SEQ ID NO: 4084669 - DNA, 25 bp, Homo sapien
tgactcagccttcccgtagcaacct

SEQ ID NO: 4084670 - DNA, 25 bp, Homo sapien
tcagccttcccgtagcaacctatgg

SEQ ID NO: 4084671 - DNA, 25 bp, Homo sapien
caatcctcagctgctcaaaacttcc

SEQ ID NO: 4084672 - DNA, 25 bp, Homo sapien
gtagcaacctatggcccagattttc

SEQ ID NO: 4084673 - DNA, 25 bp, Homo sapien
ctcatatcatctgggacctgagaag

SEQ ID NO: 4084674 - DNA, 25 bp, Homo sapien
gaactttcaggatctggtaactacc

SEQ ID NO: 4084675 - DNA, 25 bp, Homo sapien
ttcaggatctggtaactaccctgag

SEQ ID NO: 4084676 - DNA, 25 bp, Homo sapien
aggatctggtaactaccctgagggc

SEQ ID NO: 4084677 - DNA, 25 bp, Homo sapien
tcaagatttagcatgtgcatttccc

SEQ ID NO: 4084678 - DNA, 25 bp, Homo sapien
caagatttagcatgtgcatttccca

SEQ ID NO: 4084679 - DNA, 25 bp, Homo sapien
aagatttagcatgtgcatttcccat

SEQ ID NO: 4084680 - DNA, 25 bp, Homo sapien
ttactccaacagcattccaggtgag

SEQ ID NO: 4084681 - DNA, 25 bp, Homo sapien
tccaacagcattccaggtgaggaag

SEQ ID NO: 4084682 - DNA, 25 bp, Homo sapien
ccaacagcattccaggtgaggaaga

SEQ ID NO: 4084683 - DNA, 25 bp, Homo sapien
actccaacagcattccaggtgagga

SEQ ID NO: 4084684 - DNA, 25 bp, Homo sapien
cctggccgatgatggggttgtctaa

SEQ ID NO: 4084685 - DNA, 25 bp, Homo sapien
ctggccgatgatggggttgtctaaa

SEQ ID NO: 4084686 - DNA, 25 bp, Homo sapien
cgcctggccgatgatggggttgtct

SEQ ID NO: 4084687 - DNA, 25 bp, Homo sapien
tggccgatgatggggttgtctaaat

SEQ ID NO: 4084688 - DNA, 25 bp, Homo sapien
gttggtctatatgtcagttttgata

SEQ ID NO: 4084689 - DNA, 25 bp, Homo sapien
agcggtagtttaacgggaatagcat

SEQ ID NO: 4084690 - DNA, 25 bp, Homo sapien
ccacgtggcattaaaaatggacctt

SEQ ID NO: 4084691 - DNA, 25 bp, Homo sapien
agaaaggtttcacgaagtccacgtg

SEQ ID NO: 4084692 - DNA, 25 bp, Homo sapien
atctagaaaggtttcacgaagtcca

SEQ ID NO: 4084693 - DNA, 25 bp, Homo sapien
gaaaagagagtttctttataacagc

SEQ ID NO: 4084694 - DNA, 25 bp, Homo sapien
gaccgcacactgagtcccattttca

SEQ ID NO: 4084695 - DNA, 25 bp, Homo sapien
gatggaccgcacactgagtcccatt

SEQ ID NO: 4084696 - DNA, 25 bp, Homo sapien
ctaaagatggaccgcacactgagtc

SEQ ID NO: 4084697 - DNA, 25 bp, Homo sapien
aagatggaccgcacactgagtccca

SEQ ID NO: 4084698 - DNA, 25 bp, Homo sapien
acctcaggtagatgtaattccagga

SEQ ID NO: 4084699 - DNA, 25 bp, Homo sapien
tcctccttctgatcagaaacggcat

SEQ ID NO: 4084700 - DNA, 25 bp, Homo sapien
atgccaaacctcaggtagatgtaat

SEQ ID NO: 4084701 - DNA, 25 bp, Homo sapien
ggaatcctccttctgatcagaaacg

SEQ ID NO: 4084702 - DNA, 25 bp, Homo sapien
tcagcttaacttcttagacaaaaca

SEQ ID NO: 4084703 - DNA, 25 bp, Homo sapien
cagcttaacttcttagacaaaacat

SEQ ID NO: 4084704 - DNA, 25 bp, Homo sapien
cagcagaaaagccctgggaacttgc

SEQ ID NO: 4084705 - DNA, 25 bp, Homo sapien
atccatcgggaggatagccagagga

SEQ ID NO: 4084706 - DNA, 25 bp, Homo sapien
gcagaaaagccctgggaacttgctg

SEQ ID NO: 4084707 - DNA, 25 bp, Homo sapien
ccacagggatccatcgggaggatag

SEQ ID NO: 4084708 - DNA, 25 bp, Homo sapien
ggagtggcaactaatgaatctgcaa

SEQ ID NO: 4084709 - DNA, 25 bp, Homo sapien
ttttcttctaacacaggagtggcaa

SEQ ID NO: 4084710 - DNA, 25 bp, Homo sapien
tgaaaattcttgcagagcccgtagg

SEQ ID NO: 4084711 - DNA, 25 bp, Homo sapien
gtatgatcgaaaaataagaccttgt

SEQ ID NO: 4084712 - DNA, 25 bp, Homo sapien
tttgaagaggtttctaggatgcccc

SEQ ID NO: 4084713 - DNA, 25 bp, Homo sapien
cacaggcaggctatattccagctca

SEQ ID NO: 4084714 - DNA, 25 bp, Homo sapien
gcccgcttatatggtggtcctgcaa

SEQ ID NO: 4084715 - DNA, 25 bp, Homo sapien
cagggttcttgcagtcgatgcccaa

SEQ ID NO: 4084716 - DNA, 25 bp, Homo sapien
taaggtctctgttctcacgaatgga

SEQ ID NO: 4084717 - DNA, 25 bp, Homo sapien
ggtattaacaggtaggacattgaag

SEQ ID NO: 4084718 - DNA, 25 bp, Homo sapien
tcgttatcacaggagtttggtcccc

SEQ ID NO: 4084719 - DNA, 25 bp, Homo sapien
cacgttatgacactgcaagaaggcc

SEQ ID NO: 4084720 - DNA, 25 bp, Homo sapien
tcttgtaagagatggcttgtgttta

SEQ ID NO: 4084721 - DNA, 25 bp, Homo sapien
gaatgccgatccaatcttgtaagag

SEQ ID NO: 4084722 - DNA, 25 bp, Homo sapien
ctcatggatgaatgccgatccaatc

SEQ ID NO: 4084723 - DNA, 25 bp, Homo sapien
ggcttgtgtttagggatgtttctca

SEQ ID NO: 4084724 - DNA, 25 bp, Homo sapien
tcatcccctcttaatagttccccaa

SEQ ID NO: 4084725 - DNA, 25 bp, Homo sapien
tatcacatcgaaaatataatcatcc

SEQ ID NO: 4084726 - DNA, 25 bp, Homo sapien
gaggatgggccaagtaattaatgaa

SEQ ID NO: 4084727 - DNA, 25 bp, Homo sapien
tccaaacacccctcaccaggttcca

SEQ ID NO: 4084728 - DNA, 25 bp, Homo sapien
tgaaccccggtttgcataccagcac

SEQ ID NO: 4084729 - DNA, 25 bp, Homo sapien
tggtcctaacgtctagatccctgtg

SEQ ID NO: 4084730 - DNA, 25 bp, Homo sapien
cacccataggtctggtaagttgcca

SEQ ID NO: 4084731 - DNA, 25 bp, Homo sapien
taaagataagatgccacatggagtc

SEQ ID NO: 4084732 - DNA, 25 bp, Homo sapien
tacaaacccgttcagtgcagtctct

SEQ ID NO: 4084733 - DNA, 25 bp, Homo sapien
tgtcctctacaaacccgttcagtgc

SEQ ID NO: 4084734 - DNA, 25 bp, Homo sapien
ctcatattgtcctctacaaacccgt

SEQ ID NO: 4084735 - DNA, 25 bp, Homo sapien
tctacaaacccgttcagtgcagtct

SEQ ID NO: 4084736 - DNA, 25 bp, Homo sapien
gaataatcaaccttcagattaacac

SEQ ID NO: 4084737 - DNA, 25 bp, Homo sapien
acactctcataaccactggaggaat

SEQ ID NO: 4084738 - DNA, 25 bp, Homo sapien
ctggaggaataatcaaccttcagat

SEQ ID NO: 4084739 - DNA, 25 bp, Homo sapien
cactttaattcgagttgtctctgcc

SEQ ID NO: 4084740 - DNA, 25 bp, Homo sapien
tccatctgcatgaactctgagccac

SEQ ID NO: 4084741 - DNA, 25 bp, Homo sapien
tgaaaacgtttcattttgatgaacg

SEQ ID NO: 4084742 - DNA, 25 bp, Homo sapien
gaacggcaaacggagaaaatacaga

SEQ ID NO: 4084743 - DNA, 25 bp, Homo sapien
aaatacagaacctgattccgggtat

SEQ ID NO: 4084744 - DNA, 25 bp, Homo sapien
tcatgagtgagaacagggtgctgat

SEQ ID NO: 4084745 - DNA, 25 bp, Homo sapien
ttttgttgcaattgtcccaggacca

SEQ ID NO: 4084746 - DNA, 25 bp, Homo sapien
ggaccatcctctgcacataaaaagg

SEQ ID NO: 4084747 - DNA, 25 bp, Homo sapien
gcagcagcagctctaaggatcctat

SEQ ID NO: 4084748 - DNA, 25 bp, Homo sapien
tactagatgtcacagcaagggcaaa

SEQ ID NO: 4084749 - DNA, 25 bp, Homo sapien
taaaaatgcctaaacgctctcgatt

SEQ ID NO: 4084750 - DNA, 25 bp, Homo sapien
cagtttgtggtttggccctgggcct

SEQ ID NO: 4084751 - DNA, 25 bp, Homo sapien
tacacttatcttgacatgggccact

SEQ ID NO: 4084752 - DNA, 25 bp, Homo sapien
tggaaaccttcttatataaacttca

SEQ ID NO: 4084753 - DNA, 25 bp, Homo sapien
ctctcctttgatatctgttgccgtc

SEQ ID NO: 4084754 - DNA, 25 bp, Homo sapien
catcttctccaataaagaacaaatt

SEQ ID NO: 4084755 - DNA, 25 bp, Homo sapien
ttggaagtattggctagaagcaaac

SEQ ID NO: 4084756 - DNA, 25 bp, Homo sapien
tgttgccgtctttacactgaatcca

SEQ ID NO: 4084757 - DNA, 25 bp, Homo sapien
taattgccaatgtaaaattacaagg

SEQ ID NO: 4084758 - DNA, 25 bp, Homo sapien
taattacggaagtcgaatagtctgt

SEQ ID NO: 4084759 - DNA, 25 bp, Homo sapien
tgtctccaagaaggcaatataccta

SEQ ID NO: 4084760 - DNA, 25 bp, Homo sapien
tctataatgaacaggcctaagagtt

SEQ ID NO: 4084761 - DNA, 25 bp, Homo sapien
tcacaaatgcgtcactagaatcaaa

SEQ ID NO: 4084762 - DNA, 25 bp, Homo sapien
acaaatgcgtcactagaatcaaaat

SEQ ID NO: 4084763 - DNA, 25 bp, Homo sapien
gctcacaaatgcgtcactagaatca

SEQ ID NO: 4084764 - DNA, 25 bp, Homo sapien
cacaaatgcgtcactagaatcaaaa

SEQ ID NO: 4084765 - DNA, 25 bp, Homo sapien
tctttatggatgccgccataaagtc

SEQ ID NO: 4084766 - DNA, 25 bp, Homo sapien
agtcaccttctacatgcttatttgc

SEQ ID NO: 4084767 - DNA, 25 bp, Homo sapien
taaagtcaccttctacatgcttatt

SEQ ID NO: 4084768 - DNA, 25 bp, Homo sapien
atggatgccgccataaagtcacctt

SEQ ID NO: 4084769 - DNA, 25 bp, Homo sapien
gaagagcaccacatccctgcaatag

SEQ ID NO: 4084770 - DNA, 25 bp, Homo sapien
catgcaaatgcgatagggatgcgac

SEQ ID NO: 4084771 - DNA, 25 bp, Homo sapien
ggctcacccctacagcagggatgct

SEQ ID NO: 4084772 - DNA, 25 bp, Homo sapien
gcaatagggatcgtactggcaaatg

SEQ ID NO: 4084773 - DNA, 25 bp, Homo sapien
aacagtcaccccctgtagaaatatg

SEQ ID NO: 4084774 - DNA, 25 bp, Homo sapien
cagtcaccccctgtagaaatatgaa

SEQ ID NO: 4084775 - DNA, 25 bp, Homo sapien
gtcaccccctgtagaaatatgaaag

SEQ ID NO: 4084776 - DNA, 25 bp, Homo sapien
caccccctgtagaaatatgaaagca

SEQ ID NO: 4084777 - DNA, 25 bp, Homo sapien
cctattaagcgttgagtggctggcc

SEQ ID NO: 4084778 - DNA, 25 bp, Homo sapien
tggctggcctatttgccatgtccac

SEQ ID NO: 4084779 - DNA, 25 bp, Homo sapien
ggcctatttgccatgtccacatcag

SEQ ID NO: 4084780 - DNA, 25 bp, Homo sapien
taagcgttgagtggctggcctattt

SEQ ID NO: 4084781 - DNA, 25 bp, Homo sapien
agatacaggagctgaatgcactgct

SEQ ID NO: 4084782 - DNA, 25 bp, Homo sapien
gatacaggagctgaatgcactgctc

SEQ ID NO: 4084783 - DNA, 25 bp, Homo sapien
cttctcaacatagagccgtttaggg

SEQ ID NO: 4084784 - DNA, 25 bp, Homo sapien
caaagttcttctcaacatagagccg

SEQ ID NO: 4084785 - DNA, 25 bp, Homo sapien
atagaaatagtgattcactggtccc

SEQ ID NO: 4084786 - DNA, 25 bp, Homo sapien
tgacaggacggccaaagttcttctc

SEQ ID NO: 4084787 - DNA, 25 bp, Homo sapien
tttcttgatgaaaggcaatggcatc

SEQ ID NO: 4084788 - DNA, 25 bp, Homo sapien
caatggcatctccccgttcaagagg

SEQ ID NO: 4084789 - DNA, 25 bp, Homo sapien
gagggtgacaagataaaacaagttc

SEQ ID NO: 4084790 - DNA, 25 bp, Homo sapien
catctccccgttcaagagggtgaca

SEQ ID NO: 4084791 - DNA, 25 bp, Homo sapien
tgggatctgctgagtaagtttcaca

SEQ ID NO: 4084792 - DNA, 25 bp, Homo sapien
cagcaatctgcctgttgggatctgc

SEQ ID NO: 4084793 - DNA, 25 bp, Homo sapien
taattcaaaaatgccaatccacaca

SEQ ID NO: 4084794 - DNA, 25 bp, Homo sapien
cctactggatgagagagctcacact

SEQ ID NO: 4084795 - DNA, 25 bp, Homo sapien
gatctgcccacctcagcttcccaaa

SEQ ID NO: 4084796 - DNA, 25 bp, Homo sapien
ttcccaaagtgctgagattataggc

SEQ ID NO: 4084797 - DNA, 25 bp, Homo sapien
gctggtttcaatatcctgacctcgt

SEQ ID NO: 4084798 - DNA, 25 bp, Homo sapien
gagtgcggtggcgtcatctccactc

SEQ ID NO: 4084799 - DNA, 25 bp, Homo sapien
cctactcaaagaagataccctgttg

SEQ ID NO: 4084800 - DNA, 25 bp, Homo sapien
aaagacatgtagaaatcccagctgc

SEQ ID NO: 4084801 - DNA, 25 bp, Homo sapien
ccagctgctcggaaaataaattttg

SEQ ID NO: 4084802 - DNA, 25 bp, Homo sapien
tcccaattcagagagcttcaccaat

SEQ ID NO: 4084803 - DNA, 25 bp, Homo sapien
gaaatagactgatccacaatcagag

SEQ ID NO: 4084804 - DNA, 25 bp, Homo sapien
aatactatgtaacttagaggagaca

SEQ ID NO: 4084805 - DNA, 25 bp, Homo sapien
caatcagagtaggaaacttttacac

SEQ ID NO: 4084806 - DNA, 25 bp, Homo sapien
taggcaactgtactcaacgatgaaa

SEQ ID NO: 4084807 - DNA, 25 bp, Homo sapien
gaatcatcaaaagtaagttgttcca

SEQ ID NO: 4084808 - DNA, 25 bp, Homo sapien
gggctgagactggaccagtaagtaa

SEQ ID NO: 4084809 - DNA, 25 bp, Homo sapien
ctggaccagtaagtaagaatcatca

SEQ ID NO: 4084810 - DNA, 25 bp, Homo sapien
ccagtaagtaagaatcatcaaaagt

SEQ ID NO: 4084811 - DNA, 25 bp, Homo sapien
cagattaaacaccttgttacggcta

SEQ ID NO: 4084812 - DNA, 25 bp, Homo sapien
gttacggctaaattcctcttctgtg

SEQ ID NO: 4084813 - DNA, 25 bp, Homo sapien
agatttgtgcgtctcaaagaagcag

SEQ ID NO: 4084814 - DNA, 25 bp, Homo sapien
gagtatctcaagaatgtcactgggc

SEQ ID NO: 4084815 - DNA, 25 bp, Homo sapien
gggcgctttccctgatcttgtctcc

SEQ ID NO: 4084816 - DNA, 25 bp, Homo sapien
tcaaaaaattctctcacatgtgaga

SEQ ID NO: 4084817 - DNA, 25 bp, Homo sapien
cagcaagccaatgtgctctgtcagt

SEQ ID NO: 4084818 - DNA, 25 bp, Homo sapien
tcttctcacacggatttggcaaatt

SEQ ID NO: 4084819 - DNA, 25 bp, Homo sapien
cttaggtctgtagatggtgcaaagc

SEQ ID NO: 4084820 - DNA, 25 bp, Homo sapien
gatggtgcaaagctaattcttggac

SEQ ID NO: 4084821 - DNA, 25 bp, Homo sapien
gctgcttaggtctgtagatggtgca

SEQ ID NO: 4084822 - DNA, 25 bp, Homo sapien
aagctaattcttggacgaagacttc

SEQ ID NO: 4084823 - DNA, 25 bp, Homo sapien
aactgaacaactgaatgattactgg

SEQ ID NO: 4084824 - DNA, 25 bp, Homo sapien
taatcagtctctccgatcacagtgg

SEQ ID NO: 4084825 - DNA, 25 bp, Homo sapien
taacatgatcaatgcaacaggaaga

SEQ ID NO: 4084826 - DNA, 25 bp, Homo sapien
tagactcccacgcaataacagtgag

SEQ ID NO: 4084827 - DNA, 25 bp, Homo sapien
ctgcttcgctaagagccttggaacc

SEQ ID NO: 4084828 - DNA, 25 bp, Homo sapien
tctgcttcgctaagagccttggaac

SEQ ID NO: 4084829 - DNA, 25 bp, Homo sapien
tatctgcttcgctaagagccttgga

SEQ ID NO: 4084830 - DNA, 25 bp, Homo sapien
atctgcttcgctaagagccttggaa

SEQ ID NO: 4084831 - DNA, 25 bp, Homo sapien
gcatttttatcacacacatattggc

SEQ ID NO: 4084832 - DNA, 25 bp, Homo sapien
tgaggtaacatctcattgcagttcc

SEQ ID NO: 4084833 - DNA, 25 bp, Homo sapien
gcatatatttcctcccattgagtaa

SEQ ID NO: 4084834 - DNA, 25 bp, Homo sapien
gcagataccttttcaacacactgat

SEQ ID NO: 4084835 - DNA, 25 bp, Homo sapien
caaatccagcctgatggcaattatc

SEQ ID NO: 4084836 - DNA, 25 bp, Homo sapien
tgtatggcaccaattaatgtctaac

SEQ ID NO: 4084837 - DNA, 25 bp, Homo sapien
ggaggtggcattgtgcaatttggct

SEQ ID NO: 4084838 - DNA, 25 bp, Homo sapien
tatttgaattcctaatacaggccaa

SEQ ID NO: 4084839 - DNA, 25 bp, Homo sapien
ctgctattgtctcttctcctttcct

SEQ ID NO: 4084840 - DNA, 25 bp, Homo sapien
tgctattgtctcttctcctttcctc

SEQ ID NO: 4084841 - DNA, 25 bp, Homo sapien
ctattgtctcttctcctttcctcat

SEQ ID NO: 4084842 - DNA, 25 bp, Homo sapien
gctattgtctcttctcctttcctca

SEQ ID NO: 4084843 - DNA, 25 bp, Homo sapien
ttcagaaacctgctccaagtatttt

SEQ ID NO: 4084844 - DNA, 25 bp, Homo sapien
tgtccaaaaatcacaattggttcag

SEQ ID NO: 4084845 - DNA, 25 bp, Homo sapien
tgacactggacaaggctgtcccagt

SEQ ID NO: 4084846 - DNA, 25 bp, Homo sapien
caggtcatgattcacagtgtgtcca

SEQ ID NO: 4084847 - DNA, 25 bp, Homo sapien
cttggatcttaacaaagcaaacctg

SEQ ID NO: 4084848 - DNA, 25 bp, Homo sapien
ctgggtctgttcgaactcttggcac

SEQ ID NO: 4084849 - DNA, 25 bp, Homo sapien
tcttggatcttaacaaagcaaacct

SEQ ID NO: 4084850 - DNA, 25 bp, Homo sapien
gctttgccagattgagattttagaa

SEQ ID NO: 4084851 - DNA, 25 bp, Homo sapien
tgctttgccagattgagattttaga

SEQ ID NO: 4084852 - DNA, 25 bp, Homo sapien
ctttgccagattgagattttagaag

SEQ ID NO: 4084853 - DNA, 25 bp, Homo sapien
ttgccagattgagattttagaagta

SEQ ID NO: 4084854 - DNA, 25 bp, Homo sapien
tgaaatacgcaaacctccgaaggat

SEQ ID NO: 4084855 - DNA, 25 bp, Homo sapien
taatgttgctgttataccaggtcag

SEQ ID NO: 4084856 - DNA, 25 bp, Homo sapien
cctgaacgccttttaggtatctgtc

SEQ ID NO: 4084857 - DNA, 25 bp, Homo sapien
catgaaataagcagctgaatcaccc

SEQ ID NO: 4084858 - DNA, 25 bp, Homo sapien
gtcttccctccccagacacggcagg

SEQ ID NO: 4084859 - DNA, 25 bp, Homo sapien
ttccctccccagacacggcagggat

SEQ ID NO: 4084860 - DNA, 25 bp, Homo sapien
tgtgcctcttggatgtcttccctcc

SEQ ID NO: 4084861 - DNA, 25 bp, Homo sapien
ccctccccagacacggcagggatga

SEQ ID NO: 4084862 - DNA, 25 bp, Homo sapien
cagattccattaactcaaggtcacc

SEQ ID NO: 4084863 - DNA, 25 bp, Homo sapien
gctttgcgagcaatatgttctcttt

SEQ ID NO: 4084864 - DNA, 25 bp, Homo sapien
cagctttgcgagcaatatgttctct

SEQ ID NO: 4084865 - DNA, 25 bp, Homo sapien
tctttcagagaactcagattccatt

SEQ ID NO: 4084866 - DNA, 25 bp, Homo sapien
tctcctcgttgatggtcaatatcac

SEQ ID NO: 4084867 - DNA, 25 bp, Homo sapien
ctaccgacgttgttctcctcgttga

SEQ ID NO: 4084868 - DNA, 25 bp, Homo sapien
taccgacgttgttctcctcgttgat

SEQ ID NO: 4084869 - DNA, 25 bp, Homo sapien
tcattacttcattcttaataacagc

SEQ ID NO: 4084870 - DNA, 25 bp, Homo sapien
ttcttaataacagcccagcgtttct

SEQ ID NO: 4084871 - DNA, 25 bp, Homo sapien
tacttcattcttaataacagcccag

SEQ ID NO: 4084872 - DNA, 25 bp, Homo sapien
ttcattcttaataacagcccagcgt

SEQ ID NO: 4084873 - DNA, 25 bp, Homo sapien
gacagattccacaagaagattttct

SEQ ID NO: 4084874 - DNA, 25 bp, Homo sapien
tgtatatctcagcaaagacctttct

SEQ ID NO: 4084875 - DNA, 25 bp, Homo sapien
tccagttgctgtacaaatattgcca

SEQ ID NO: 4084876 - DNA, 25 bp, Homo sapien
gattttctgggcaagttatcacaca

SEQ ID NO: 4084877 - DNA, 25 bp, Homo sapien
attctcaggttccatcagacacccc

SEQ ID NO: 4084878 - DNA, 25 bp, Homo sapien
gaattctcaggttccatcagacacc

SEQ ID NO: 4084879 - DNA, 25 bp, Homo sapien
aattctcaggttccatcagacaccc

SEQ ID NO: 4084880 - DNA, 25 bp, Homo sapien
agaattctcaggttccatcagacac

SEQ ID NO: 4084881 - DNA, 25 bp, Homo sapien
aactctcagtgtcggctgttgttga

SEQ ID NO: 4084882 - DNA, 25 bp, Homo sapien
cagtgtcggctgttgttgactcagg

SEQ ID NO: 4084883 - DNA, 25 bp, Homo sapien
tctcagtgtcggctgttgttgactc

SEQ ID NO: 4084884 - DNA, 25 bp, Homo sapien
ccaaaactctcagtgtcggctgttg

SEQ ID NO: 4084885 - DNA, 25 bp, Homo sapien
gtccatggcctgctgtgaactcgtg

SEQ ID NO: 4084886 - DNA, 25 bp, Homo sapien
gcctgctgtgaactcgtgggctctt

SEQ ID NO: 4084887 - DNA, 25 bp, Homo sapien
gctgtgaactcgtgggctcttttgt

SEQ ID NO: 4084888 - DNA, 25 bp, Homo sapien
tgaactcgtgggctcttttgtttac

SEQ ID NO: 4084889 - DNA, 25 bp, Homo sapien
aggatttctcatccaaaatcttggt

SEQ ID NO: 4084890 - DNA, 25 bp, Homo sapien
tttaaacagcagaggatttctcatc

SEQ ID NO: 4084891 - DNA, 25 bp, Homo sapien
ctctgggggaaaatgatttaaacag

SEQ ID NO: 4084892 - DNA, 25 bp, Homo sapien
ggtggtcagaaggaagtagcacatt

SEQ ID NO: 4084893 - DNA, 25 bp, Homo sapien
tccttttccaaacgagctcttgaac

SEQ ID NO: 4084894 - DNA, 25 bp, Homo sapien
ccttgacatatagtagtttgccaca

SEQ ID NO: 4084895 - DNA, 25 bp, Homo sapien
ttctctatgtcagcaaccttagcat

SEQ ID NO: 4084896 - DNA, 25 bp, Homo sapien
tttgcaaagcacgatatgatgaact

SEQ ID NO: 4084897 - DNA, 25 bp, Homo sapien
gagcagagtacttgttgttgtcctc

SEQ ID NO: 4084898 - DNA, 25 bp, Homo sapien
ctagttttccatttgcgagcattat

SEQ ID NO: 4084899 - DNA, 25 bp, Homo sapien
tgcgagcattatggcttaaattcaa

SEQ ID NO: 4084900 - DNA, 25 bp, Homo sapien
atgagcagagtacttgttgttgtcc

SEQ ID NO: 4084901 - DNA, 25 bp, Homo sapien
gctgctgtcagaatcaagcctttca

SEQ ID NO: 4084902 - DNA, 25 bp, Homo sapien
acaatcctttcgtagcgtgtcctgc

SEQ ID NO: 4084903 - DNA, 25 bp, Homo sapien
aataacatgatgctccttcagacag

SEQ ID NO: 4084904 - DNA, 25 bp, Homo sapien
gctacctgatatgttctccagctgg

SEQ ID NO: 4084905 - DNA, 25 bp, Homo sapien
taatgagttgagctgtcgttagcag

SEQ ID NO: 4084906 - DNA, 25 bp, Homo sapien
gagacgtaatgacaagtctgttcca

SEQ ID NO: 4084907 - DNA, 25 bp, Homo sapien
ggtaagatggcaaaaatggagacgt

SEQ ID NO: 4084908 - DNA, 25 bp, Homo sapien
tgaagcatatcagggtgtagaggta

SEQ ID NO: 4084909 - DNA, 25 bp, Homo sapien
taagttgtaacattcctccgttgct

SEQ ID NO: 4084910 - DNA, 25 bp, Homo sapien
gagacactcattgaggtaggaccac

SEQ ID NO: 4084911 - DNA, 25 bp, Homo sapien
tcattctgaccatggctgagacact

SEQ ID NO: 4084912 - DNA, 25 bp, Homo sapien
gaagaggcctttggtcagtgactca

SEQ ID NO: 4084913 - DNA, 25 bp, Homo sapien
ttctcagttgcaatcccgaagctgg

SEQ ID NO: 4084914 - DNA, 25 bp, Homo sapien
tctcagttgcaatcccgaagctggc

SEQ ID NO: 4084915 - DNA, 25 bp, Homo sapien
cttctcagttgcaatcccgaagctg

SEQ ID NO: 4084916 - DNA, 25 bp, Homo sapien
cacttctcagttgcaatcccgaagc

SEQ ID NO: 4084917 - DNA, 25 bp, Homo sapien
atcagctataaaggcgaagctccag

SEQ ID NO: 4084918 - DNA, 25 bp, Homo sapien
cagctataaaggcgaagctccagag

SEQ ID NO: 4084919 - DNA, 25 bp, Homo sapien
tcagctataaaggcgaagctccaga

SEQ ID NO: 4084920 - DNA, 25 bp, Homo sapien
ttaattgattcttgaactatatcca

SEQ ID NO: 4084921 - DNA, 25 bp, Homo sapien
cttaattgattcttgaactatatcc

SEQ ID NO: 4084922 - DNA, 25 bp, Homo sapien
taattgattcttgaactatatccat

SEQ ID NO: 4084923 - DNA, 25 bp, Homo sapien
tgcgtgcagttgacccgctgtaagc

SEQ ID NO: 4084924 - DNA, 25 bp, Homo sapien
tgttcaacaaggagcaactcagcat

SEQ ID NO: 4084925 - DNA, 25 bp, Homo sapien
cgctgtaagcacacaacaatgattg

SEQ ID NO: 4084926 - DNA, 25 bp, Homo sapien
ctcttctcctactgtgaaaaaacgg

SEQ ID NO: 4084927 - DNA, 25 bp, Homo sapien
gaccggcttaaaaatcctcgcacca

SEQ ID NO: 4084928 - DNA, 25 bp, Homo sapien
aagaatgtaagccggaggagccaag

SEQ ID NO: 4084929 - DNA, 25 bp, Homo sapien
ccagacagcagccttttgagcaggg

SEQ ID NO: 4084930 - DNA, 25 bp, Homo sapien
taagataaggcaatgcatcactgtg

SEQ ID NO: 4084931 - DNA, 25 bp, Homo sapien
tgtttgtggagagagtccagacagc

SEQ ID NO: 4084932 - DNA, 25 bp, Homo sapien
tccaaactgtacagggtggctttcc

SEQ ID NO: 4084933 - DNA, 25 bp, Homo sapien
gcaactggttgtcctcggcagagct

SEQ ID NO: 4084934 - DNA, 25 bp, Homo sapien
caaaatgatgagctttgcctctcag

SEQ ID NO: 4084935 - DNA, 25 bp, Homo sapien
attaaatgggccttcacctagccct

SEQ ID NO: 4084936 - DNA, 25 bp, Homo sapien
gcctctcagcaactggttgtcctcg

SEQ ID NO: 4084937 - DNA, 25 bp, Homo sapien
gatgtagccaaatttcactctgcat

SEQ ID NO: 4084938 - DNA, 25 bp, Homo sapien
gcaactctgtatgaagatgtagcca

SEQ ID NO: 4084939 - DNA, 25 bp, Homo sapien
ggctcttcagtcataaatcatgtct

SEQ ID NO: 4084940 - DNA, 25 bp, Homo sapien
tcagatcatcaacaaaactaggaaa

SEQ ID NO: 4084941 - DNA, 25 bp, Homo sapien
ggatggatcatcaatgaccaatgac

SEQ ID NO: 4084942 - DNA, 25 bp, Homo sapien
gaccaatgacttatggatgggctga

SEQ ID NO: 4084943 - DNA, 25 bp, Homo sapien
caaaggtatcatggagactggtaca

SEQ ID NO: 4084944 - DNA, 25 bp, Homo sapien
aagggcatctctatcaacgctgtgg

SEQ ID NO: 4084945 - DNA, 25 bp, Homo sapien
cagacttcaggagctaattggagga

SEQ ID NO: 4084946 - DNA, 25 bp, Homo sapien
tgtgtatgtcttctcacgggagcct

SEQ ID NO: 4084947 - DNA, 25 bp, Homo sapien
tcaaataacatgtggaaaactggca

SEQ ID NO: 4084948 - DNA, 25 bp, Homo sapien
tgtcgcacacgtcatacattgagtg

SEQ ID NO: 4084949 - DNA, 25 bp, Homo sapien
ttcccagatgataaccagtgactag

SEQ ID NO: 4084950 - DNA, 25 bp, Homo sapien
catatgcacagagggactaccttgt

SEQ ID NO: 4084951 - DNA, 25 bp, Homo sapien
tacccagtgtcttagcatgtagctg

SEQ ID NO: 4084952 - DNA, 25 bp, Homo sapien
tgttcgaagctccaatacccagtgt

SEQ ID NO: 4084953 - DNA, 25 bp, Homo sapien
ccaaattagttgagctcctgcttcg

SEQ ID NO: 4084954 - DNA, 25 bp, Homo sapien
ttccaggatatataacaaagtgagg

SEQ ID NO: 4084955 - DNA, 25 bp, Homo sapien
cagatattcaatgccaagtgtcaaa

SEQ ID NO: 4084956 - DNA, 25 bp, Homo sapien
tcctgcttcgtgcaaggtatcatga

SEQ ID NO: 4084957 - DNA, 25 bp, Homo sapien
tgtgtgaacatgatagaaggtgctc

SEQ ID NO: 4084958 - DNA, 25 bp, Homo sapien
gggatatgttctaggaaatgaattt

SEQ ID NO: 4084959 - DNA, 25 bp, Homo sapien
tacaaactggtacagcatgtgactg

SEQ ID NO: 4084960 - DNA, 25 bp, Homo sapien
ggtgctcatacaaacctagagtaca

SEQ ID NO: 4084961 - DNA, 25 bp, Homo sapien
cagcaaaagtactggagaatcacca

SEQ ID NO: 4084962 - DNA, 25 bp, Homo sapien
taaagaatctttactgagggtagac

SEQ ID NO: 4084963 - DNA, 25 bp, Homo sapien
tagctgagacgatattctaggctct

SEQ ID NO: 4084964 - DNA, 25 bp, Homo sapien
ttcacccagttgacataaagaatct

SEQ ID NO: 4084965 - DNA, 25 bp, Homo sapien
ttcataaatgtgatcaattgcaata

SEQ ID NO: 4084966 - DNA, 25 bp, Homo sapien
taaacttgggggacaactgtagtgc

SEQ ID NO: 4084967 - DNA, 25 bp, Homo sapien
tagtgcctcctgacaaactttcatt

SEQ ID NO: 4084968 - DNA, 25 bp, Homo sapien
ttccttgcattataactgttatttt

SEQ ID NO: 4084969 - DNA, 25 bp, Homo sapien
tagtcctggctatttggagtaacca

SEQ ID NO: 4084970 - DNA, 25 bp, Homo sapien
taacaaggtatcaggcttaacaacc

SEQ ID NO: 4084971 - DNA, 25 bp, Homo sapien
ctcactgggattgtggctaagtctc

SEQ ID NO: 4084972 - DNA, 25 bp, Homo sapien
cgggctctgataccactcactggga

SEQ ID NO: 4084973 - DNA, 25 bp, Homo sapien
tgatatccccagcattgagcaaaat

SEQ ID NO: 4084974 - DNA, 25 bp, Homo sapien
tagttacctcagaagcacacgagat

SEQ ID NO: 4084975 - DNA, 25 bp, Homo sapien
agaaaagggtcactctccacagaga

SEQ ID NO: 4084976 - DNA, 25 bp, Homo sapien
tgtaccaagaaacaggcttcaagag

SEQ ID NO: 4084977 - DNA, 25 bp, Homo sapien
taatcagtgagtcctgcctgaacaa

SEQ ID NO: 4084978 - DNA, 25 bp, Homo sapien
agtgagtcctgcctgaacaactgtc

SEQ ID NO: 4084979 - DNA, 25 bp, Homo sapien
gagctcataatcagtgagtcctgcc

SEQ ID NO: 4084980 - DNA, 25 bp, Homo sapien
tgcaacagagagctcataatcagtg

SEQ ID NO: 4084981 - DNA, 25 bp, Homo sapien
caagtccttcgtgtgcaaaatggaa

SEQ ID NO: 4084982 - DNA, 25 bp, Homo sapien
cagtctgaattagaattaccgtgag

SEQ ID NO: 4084983 - DNA, 25 bp, Homo sapien
aatactgtgacgagttcggctggga

SEQ ID NO: 4084984 - DNA, 25 bp, Homo sapien
ttgccactccttctatcaagaggtg

SEQ ID NO: 4084985 - DNA, 25 bp, Homo sapien
gcctgagacccaagatatgcagctt

SEQ ID NO: 4084986 - DNA, 25 bp, Homo sapien
cacactgggccagggtggatcttgt

SEQ ID NO: 4084987 - DNA, 25 bp, Homo sapien
tgtgggtctgtacacctcctgaagt

SEQ ID NO: 4084988 - DNA, 25 bp, Homo sapien
tggacagctatttctcccacactgg

SEQ ID NO: 4084989 - DNA, 25 bp, Homo sapien
tgtgctgttggcaaactgggaaatc

SEQ ID NO: 4084990 - DNA, 25 bp, Homo sapien
tgatgtgctgttggcaaactgggaa

SEQ ID NO: 4084991 - DNA, 25 bp, Homo sapien
gtggtataattcagttcaagtctga

SEQ ID NO: 4084992 - DNA, 25 bp, Homo sapien
tgctgttggcaaactgggaaatcag

SEQ ID NO: 4084993 - DNA, 25 bp, Homo sapien
caaggtagggttatattggcacagt

SEQ ID NO: 4084994 - DNA, 25 bp, Homo sapien
cctattaaaggcagatcatccgttg

SEQ ID NO: 4084995 - DNA, 25 bp, Homo sapien
tgagtttagcgtggtcatggtcgca

SEQ ID NO: 4084996 - DNA, 25 bp, Homo sapien
catggtcgcagcatataagcttcac

SEQ ID NO: 4084997 - DNA, 25 bp, Homo sapien
ggttcaactctgttcctcaagaaat

SEQ ID NO: 4084998 - DNA, 25 bp, Homo sapien
tgctttctccagtggctaaactatt

SEQ ID NO: 4084999 - DNA, 25 bp, Homo sapien
cagtaacagtattgctgggtcagat

SEQ ID NO: 4085000 - DNA, 25 bp, Homo sapien
ttgttggatgtgtgtattacttctt

SEQ ID NO: 4085001 - DNA, 25 bp, Homo sapien
ttcaagccatgtattcgataatgag

SEQ ID NO: 4085002 - DNA, 25 bp, Homo sapien
taattaacaatatgcagagacaacc

SEQ ID NO: 4085003 - DNA, 25 bp, Homo sapien
gacaaacgggattacatgatactaa

SEQ ID NO: 4085004 - DNA, 25 bp, Homo sapien
tcttctgcgaagtaaataattaaca

SEQ ID NO: 4085005 - DNA, 25 bp, Homo sapien
tctgtgaacacagtagcctggggtc

SEQ ID NO: 4085006 - DNA, 25 bp, Homo sapien
caggagttgagaagtaggcagacca

SEQ ID NO: 4085007 - DNA, 25 bp, Homo sapien
agttcttcctagtgaaattcacgac

SEQ ID NO: 4085008 - DNA, 25 bp, Homo sapien
tgagaagtaggcagaccattaactc

SEQ ID NO: 4085009 - DNA, 25 bp, Homo sapien
cctttcttatggatgacacaacccc

SEQ ID NO: 4085010 - DNA, 25 bp, Homo sapien
tcccagttgtgcttgcttgtccaaa

SEQ ID NO: 4085011 - DNA, 25 bp, Homo sapien
caaaagagcgtaagaggtgcctcta

SEQ ID NO: 4085012 - DNA, 25 bp, Homo sapien
tgaaatacaaacttgccctgaggca

SEQ ID NO: 4085013 - DNA, 25 bp, Homo sapien
aaatgaacatgttatgccttctaaa

SEQ ID NO: 4085014 - DNA, 25 bp, Homo sapien
tgttctttgttctgcctataaaatc

SEQ ID NO: 4085015 - DNA, 25 bp, Homo sapien
tcagtacataggccacgcatggtgg

SEQ ID NO: 4085016 - DNA, 25 bp, Homo sapien
catgttatgccttctaaatgtaaca

SEQ ID NO: 4085017 - DNA, 25 bp, Homo sapien
cctgagcgggagtaattcacactct

SEQ ID NO: 4085018 - DNA, 25 bp, Homo sapien
ggcaatttgctaaccagattgctgg

SEQ ID NO: 4085019 - DNA, 25 bp, Homo sapien
ttagttcagtaaagaggcaatttgc

SEQ ID NO: 4085020 - DNA, 25 bp, Homo sapien
aaaaatgtggcccaatatgttaaca

SEQ ID NO: 4085021 - DNA, 25 bp, Homo sapien
ctaaggtcctccaaccagaatttct

SEQ ID NO: 4085022 - DNA, 25 bp, Homo sapien
aatgacactactctgtgtgagaatc

SEQ ID NO: 4085023 - DNA, 25 bp, Homo sapien
agttgcagtctgtaatgacactact

SEQ ID NO: 4085024 - DNA, 25 bp, Homo sapien
gtctgtaatgacactactctgtgtg

SEQ ID NO: 4085025 - DNA, 25 bp, Homo sapien
ggcaagtcattaccacccagaatct

SEQ ID NO: 4085026 - DNA, 25 bp, Homo sapien
tttcaataccagaggatagtgccag

SEQ ID NO: 4085027 - DNA, 25 bp, Homo sapien
tgtgagttcttgagtggaacaccgc

SEQ ID NO: 4085028 - DNA, 25 bp, Homo sapien
gagtatcactcccacccaggtatgt

SEQ ID NO: 4085029 - DNA, 25 bp, Homo sapien
agccaggagcagaacttaatctgct

SEQ ID NO: 4085030 - DNA, 25 bp, Homo sapien
caggagcagaacttaatctgctgag

SEQ ID NO: 4085031 - DNA, 25 bp, Homo sapien
ccaggagcagaacttaatctgctga

SEQ ID NO: 4085032 - DNA, 25 bp, Homo sapien
gccaggagcagaacttaatctgctg

SEQ ID NO: 4085033 - DNA, 25 bp, Homo sapien
aatcaaaggagaaccggcccctgtg

SEQ ID NO: 4085034 - DNA, 25 bp, Homo sapien
ttcctcatatttctcgaaaggattg

SEQ ID NO: 4085035 - DNA, 25 bp, Homo sapien
cgaaaggattgtgccaatcaaagga

SEQ ID NO: 4085036 - DNA, 25 bp, Homo sapien
tcatgtgcggggagcctttagaacc

SEQ ID NO: 4085037 - DNA, 25 bp, Homo sapien
ggagaaactggaaatcttgaatcat

SEQ ID NO: 4085038 - DNA, 25 bp, Homo sapien
tcttgaatcatctggcgaataaagg

SEQ ID NO: 4085039 - DNA, 25 bp, Homo sapien
tctggcgaataaagggctgatcatt

SEQ ID NO: 4085040 - DNA, 25 bp, Homo sapien
gaacaaagagcatatgcagtataaa

SEQ ID NO: 4085041 - DNA, 25 bp, Homo sapien
tagcattaaacctaatattgcagga

SEQ ID NO: 4085042 - DNA, 25 bp, Homo sapien
cacatcaaacatagcaaacgattaa

SEQ ID NO: 4085043 - DNA, 25 bp, Homo sapien
tttgcttacagtatcaccggattga

SEQ ID NO: 4085044 - DNA, 25 bp, Homo sapien
aacgattaaacatgccagtagaggc

SEQ ID NO: 4085045 - DNA, 25 bp, Homo sapien
gtaaaatctttggatattatctgtc

SEQ ID NO: 4085046 - DNA, 25 bp, Homo sapien
tctgtgatgggcttatcaaaagtta

SEQ ID NO: 4085047 - DNA, 25 bp, Homo sapien
agtctttattcagtgtgtgaaattc

SEQ ID NO: 4085048 - DNA, 25 bp, Homo sapien
tatattaaccaaggtgcaggaaagc

SEQ ID NO: 4085049 - DNA, 25 bp, Homo sapien
tatgttatctttcaactcatggatc

SEQ ID NO: 4085050 - DNA, 25 bp, Homo sapien
tgctatcccgattctgaattctttg

SEQ ID NO: 4085051 - DNA, 25 bp, Homo sapien
tgaaacctttgagggtctgactgtg

SEQ ID NO: 4085052 - DNA, 25 bp, Homo sapien
ttgtccgttggatggtgctttttgc

SEQ ID NO: 4085053 - DNA, 25 bp, Homo sapien
tatgttaggctcatgtctgcagtat

SEQ ID NO: 4085054 - DNA, 25 bp, Homo sapien
tggaagaagttgaagtgctccatct

SEQ ID NO: 4085055 - DNA, 25 bp, Homo sapien
tatatgaaggtcaactaggactccc

SEQ ID NO: 4085056 - DNA, 25 bp, Homo sapien
taaggcatattcatctgaggagaac

SEQ ID NO: 4085057 - DNA, 25 bp, Homo sapien
ataaagactccaaaaatgaggcaca

SEQ ID NO: 4085058 - DNA, 25 bp, Homo sapien
gatgggagtcataaagactccaaaa

SEQ ID NO: 4085059 - DNA, 25 bp, Homo sapien
gtcataaagactccaaaaatgaggc

SEQ ID NO: 4085060 - DNA, 25 bp, Homo sapien
aaagactccaaaaatgaggcacata

SEQ ID NO: 4085061 - DNA, 25 bp, Homo sapien
catttgtagagaaaccatatggtct

SEQ ID NO: 4085062 - DNA, 25 bp, Homo sapien
ttagaacagatggtctccttccatc

SEQ ID NO: 4085063 - DNA, 25 bp, Homo sapien
ggtagtattggctgtactgcccaaa

SEQ ID NO: 4085064 - DNA, 25 bp, Homo sapien
gactccgtgtggctaaagttaatca

SEQ ID NO: 4085065 - DNA, 25 bp, Homo sapien
gccagaagtgttctgcagccccgga

SEQ ID NO: 4085066 - DNA, 25 bp, Homo sapien
tctcttgctctcagtagctttccag

SEQ ID NO: 4085067 - DNA, 25 bp, Homo sapien
tcagtagctttccagatgggccaga

SEQ ID NO: 4085068 - DNA, 25 bp, Homo sapien
tgaaaattaaagatgtgcctttcag

SEQ ID NO: 4085069 - DNA, 25 bp, Homo sapien
ctggtgaggggaaattcttggtttg

SEQ ID NO: 4085070 - DNA, 25 bp, Homo sapien
caatccatgacagattataagcaga

SEQ ID NO: 4085071 - DNA, 25 bp, Homo sapien
agtcgattaactcctccaaagtttg

SEQ ID NO: 4085072 - DNA, 25 bp, Homo sapien
ttccaatccatgacagattataagc

SEQ ID NO: 4085073 - DNA, 25 bp, Homo sapien
tcttttacttagagtcgattaactc

SEQ ID NO: 4085074 - DNA, 25 bp, Homo sapien
gagggaaagcacaagcaatgactaa

SEQ ID NO: 4085075 - DNA, 25 bp, Homo sapien
caacagaataaaatgcagcaggatc

SEQ ID NO: 4085076 - DNA, 25 bp, Homo sapien
taacctatgagaggaataagagcct

SEQ ID NO: 4085077 - DNA, 25 bp, Homo sapien
tgagttagctggactgacatcagtc

SEQ ID NO: 4085078 - DNA, 25 bp, Homo sapien
gtgtttacacggatcttcttttgca

SEQ ID NO: 4085079 - DNA, 25 bp, Homo sapien
ggctataaatctatgtcaatgtggg

SEQ ID NO: 4085080 - DNA, 25 bp, Homo sapien
atccccaactggctgaatccacaaa

SEQ ID NO: 4085081 - DNA, 25 bp, Homo sapien
ggaaaaattggctgaaaatcatatg

SEQ ID NO: 4085082 - DNA, 25 bp, Homo sapien
ccatgcctgcatcaagaagcctaaa

SEQ ID NO: 4085083 - DNA, 25 bp, Homo sapien
cctttgttccacagccgtgctagat

SEQ ID NO: 4085084 - DNA, 25 bp, Homo sapien
ctatcatctctgcaggaatgtgctg

SEQ ID NO: 4085085 - DNA, 25 bp, Homo sapien
tgacaagtatcagatgagctcctat

SEQ ID NO: 4085086 - DNA, 25 bp, Homo sapien
cacaaaactatgcaacaaatgggcg

SEQ ID NO: 4085087 - DNA, 25 bp, Homo sapien
caaatgggcgttacctactctcaac

SEQ ID NO: 4085088 - DNA, 25 bp, Homo sapien
caaggccgcctgtgtagtttgatac

SEQ ID NO: 4085089 - DNA, 25 bp, Homo sapien
ccagtgatggccaagacctatacaa

SEQ ID NO: 4085090 - DNA, 25 bp, Homo sapien
tgggatgtcacacaaacatgactcc

SEQ ID NO: 4085091 - DNA, 25 bp, Homo sapien
tggtcaagttttaacacacagtagg

SEQ ID NO: 4085092 - DNA, 25 bp, Homo sapien
ccctggacacaaggagaataagtgc

SEQ ID NO: 4085093 - DNA, 25 bp, Homo sapien
cagagaccctactggttgggatgtc

SEQ ID NO: 4085094 - DNA, 25 bp, Homo sapien
tgtttctctttggtaccttcctgca

SEQ ID NO: 4085095 - DNA, 25 bp, Homo sapien
cagtccctagagttctgtggtacca

SEQ ID NO: 4085096 - DNA, 25 bp, Homo sapien
ggcagatcctttcttcacgtagcac

SEQ ID NO: 4085097 - DNA, 25 bp, Homo sapien
tgtggtaccaaaccaggaagctctg

SEQ ID NO: 4085098 - DNA, 25 bp, Homo sapien
gaatagcaaatggaggttatcttat

SEQ ID NO: 4085099 - DNA, 25 bp, Homo sapien
ttattgtaacgcatatgcacatgca

SEQ ID NO: 4085100 - DNA, 25 bp, Homo sapien
catcgacactcatttacatgcacac

SEQ ID NO: 4085101 - DNA, 25 bp, Homo sapien
catgcacacatcgacactcatttac

SEQ ID NO: 4085102 - DNA, 25 bp, Homo sapien
acattctaagggatacatcaccaga

SEQ ID NO: 4085103 - DNA, 25 bp, Homo sapien
ttcacaacattctaagggatacatc

SEQ ID NO: 4085104 - DNA, 25 bp, Homo sapien
gctaatgtatcagggtccaccagac

SEQ ID NO: 4085105 - DNA, 25 bp, Homo sapien
gatttgctaatgtatcagggtccac

SEQ ID NO: 4085106 - DNA, 25 bp, Homo sapien
aaaaataatccacatcatagctcat

SEQ ID NO: 4085107 - DNA, 25 bp, Homo sapien
tgtctaaaaaataatccacatcata

SEQ ID NO: 4085108 - DNA, 25 bp, Homo sapien
gtctaaaaaataatccacatcatag

SEQ ID NO: 4085109 - DNA, 25 bp, Homo sapien
taaaaaataatccacatcatagctc

SEQ ID NO: 4085110 - DNA, 25 bp, Homo sapien
cacttttatgtgatcatgaacatgc

SEQ ID NO: 4085111 - DNA, 25 bp, Homo sapien
acttttatgtgatcatgaacatgct

SEQ ID NO: 4085112 - DNA, 25 bp, Homo sapien
acacttttatgtgatcatgaacatg

SEQ ID NO: 4085113 - DNA, 25 bp, Homo sapien
tcaagatggtctttccaaattgctg

SEQ ID NO: 4085114 - DNA, 25 bp, Homo sapien
gcttctgtgtaataccttgtattcc

SEQ ID NO: 4085115 - DNA, 25 bp, Homo sapien
caagatggtctttccaaattgctgc

SEQ ID NO: 4085116 - DNA, 25 bp, Homo sapien
tcaggataaccagccaactttctca

SEQ ID NO: 4085117 - DNA, 25 bp, Homo sapien
tctgatgtcttaacacaatagcaaa

SEQ ID NO: 4085118 - DNA, 25 bp, Homo sapien
gagattagcaccttggaagatccat

SEQ ID NO: 4085119 - DNA, 25 bp, Homo sapien
aacacaatagcaaatgggagaagac

SEQ ID NO: 4085120 - DNA, 25 bp, Homo sapien
gatactactcaggacactaagcaag

SEQ ID NO: 4085121 - DNA, 25 bp, Homo sapien
ctgccaactttgtgatgacctcctt

SEQ ID NO: 4085122 - DNA, 25 bp, Homo sapien
tgttcaccactcttgtacccgctat

SEQ ID NO: 4085123 - DNA, 25 bp, Homo sapien
tacatccagtgggtgtttttagcct

SEQ ID NO: 4085124 - DNA, 25 bp, Homo sapien
ccaactcttacatcaacaaagagaa

SEQ ID NO: 4085125 - DNA, 25 bp, Homo sapien
aaccaactcttacatcaacaaagag

SEQ ID NO: 4085126 - DNA, 25 bp, Homo sapien
accaactcttacatcaacaaagaga

SEQ ID NO: 4085127 - DNA, 25 bp, Homo sapien
cttgttgccctgagatccttcacca

SEQ ID NO: 4085128 - DNA, 25 bp, Homo sapien
catcggtgacaggtacaggattaga

SEQ ID NO: 4085129 - DNA, 25 bp, Homo sapien
gagatccttcaccatttgcatcggt

SEQ ID NO: 4085130 - DNA, 25 bp, Homo sapien
caccatttgcatcggtgacaggtac

SEQ ID NO: 4085131 - DNA, 25 bp, Homo sapien
gaagatgcccattgtacacgctgta

SEQ ID NO: 4085132 - DNA, 25 bp, Homo sapien
caaactcgtaaaatcccgcctatca

SEQ ID NO: 4085133 - DNA, 25 bp, Homo sapien
ttgaagccatccctatcatcagctt

SEQ ID NO: 4085134 - DNA, 25 bp, Homo sapien
gcttcataaaaatgcgaagatgccc

SEQ ID NO: 4085135 - DNA, 25 bp, Homo sapien
agctgagccattactcttctggaat

SEQ ID NO: 4085136 - DNA, 25 bp, Homo sapien
tcagcaacatataaggcaagatgtg

SEQ ID NO: 4085137 - DNA, 25 bp, Homo sapien
tatactatgaatagtccatgagtga

SEQ ID NO: 4085138 - DNA, 25 bp, Homo sapien
aagtccacgagcctcaagattcagc

SEQ ID NO: 4085139 - DNA, 25 bp, Homo sapien
gcatagatgtcaccaacaacataca

SEQ ID NO: 4085140 - DNA, 25 bp, Homo sapien
ttagcatagatgtcaccaacaacat

SEQ ID NO: 4085141 - DNA, 25 bp, Homo sapien
tctttgacagttagcatagatgtca

SEQ ID NO: 4085142 - DNA, 25 bp, Homo sapien
gacagttagcatagatgtcaccaac

SEQ ID NO: 4085143 - DNA, 25 bp, Homo sapien
taggtccggagcctaggctcttagc

SEQ ID NO: 4085144 - DNA, 25 bp, Homo sapien
gtgctgactgctcccaaaccctagg

SEQ ID NO: 4085145 - DNA, 25 bp, Homo sapien
gcgaggacgtcgtgctgactgctcc

SEQ ID NO: 4085146 - DNA, 25 bp, Homo sapien
cgggtgtcatcagccgcgggatggg

SEQ ID NO: 4085147 - DNA, 25 bp, Homo sapien
tgcgtgctgaggtaagggggggaaa

SEQ ID NO: 4085148 - DNA, 25 bp, Homo sapien
gggctgcgtgctgaggtaagggggg

SEQ ID NO: 4085149 - DNA, 25 bp, Homo sapien
tcctcggaatgggagtttcgtggtc

SEQ ID NO: 4085150 - DNA, 25 bp, Homo sapien
gctgcgtgctgaggtaaggggggga

SEQ ID NO: 4085151 - DNA, 25 bp, Homo sapien
gggcagggactgctatcgctttaaa

SEQ ID NO: 4085152 - DNA, 25 bp, Homo sapien
ttaaatggtcgttcggctccctctc

SEQ ID NO: 4085153 - DNA, 25 bp, Homo sapien
gctatcgctttaaatggtcgttcgg

SEQ ID NO: 4085154 - DNA, 25 bp, Homo sapien
tcgcgctctcgggttagccggccgg

SEQ ID NO: 4085155 - DNA, 25 bp, Homo sapien
gcgctggagggaacggtggtgggct

SEQ ID NO: 4085156 - DNA, 25 bp, Homo sapien
ggctcgccgaggtccgggcccttca

SEQ ID NO: 4085157 - DNA, 25 bp, Homo sapien
gctggagggaacggtggtgggctcg

SEQ ID NO: 4085158 - DNA, 25 bp, Homo sapien
ctcgccgaggtccgggcccttcagg

SEQ ID NO: 4085159 - DNA, 25 bp, Homo sapien
cgagcgcgtaagtgtccctggaaca

SEQ ID NO: 4085160 - DNA, 25 bp, Homo sapien
gatgagcgcctggacgaaagtaagc

SEQ ID NO: 4085161 - DNA, 25 bp, Homo sapien
gaaagtaagcgactgttcgagcgcg

SEQ ID NO: 4085162 - DNA, 25 bp, Homo sapien
tcatcaaagtcaggacgcggagcag

SEQ ID NO: 4085163 - DNA, 25 bp, Homo sapien
cgccccggagggagcgcatccctac

SEQ ID NO: 4085164 - DNA, 25 bp, Homo sapien
ggccataaatccagatgtcaagccg

SEQ ID NO: 4085165 - DNA, 25 bp, Homo sapien
caagcagggaaggtatctcctcgag

SEQ ID NO: 4085166 - DNA, 25 bp, Homo sapien
tttttcgcagattgcttcttgtaaa

SEQ ID NO: 4085167 - DNA, 25 bp, Homo sapien
tgtcaagccggatggagtggagcgt

SEQ ID NO: 4085168 - DNA, 25 bp, Homo sapien
gggaatcgtcctccaagccgaggat

SEQ ID NO: 4085169 - DNA, 25 bp, Homo sapien
tccgggaatcgtcctccaagccgag

SEQ ID NO: 4085170 - DNA, 25 bp, Homo sapien
tcatgcctcgctccgggaatcgtcc

SEQ ID NO: 4085171 - DNA, 25 bp, Homo sapien
ctcgctccgggaatcgtcctccaag

SEQ ID NO: 4085172 - DNA, 25 bp, Homo sapien
tcagcggccccggatccgccttcct

SEQ ID NO: 4085173 - DNA, 25 bp, Homo sapien
cgagagaacactgcggcagaaccca

SEQ ID NO: 4085174 - DNA, 25 bp, Homo sapien
ggagcaggaggcgagagaacactgc

SEQ ID NO: 4085175 - DNA, 25 bp, Homo sapien
tgcggcagaacccaccgctcagcgg

SEQ ID NO: 4085176 - DNA, 25 bp, Homo sapien
caagtgatcggtttggcatggtccc

SEQ ID NO: 4085177 - DNA, 25 bp, Homo sapien
tataaacgtatatctcaagtgatcg

SEQ ID NO: 4085178 - DNA, 25 bp, Homo sapien
tatatctcaagtgatcggtttggca

SEQ ID NO: 4085179 - DNA, 25 bp, Homo sapien
tcggtttggcatggtccctaaagca

SEQ ID NO: 4085180 - DNA, 25 bp, Homo sapien
ccaagtctatagtgtagagcatgtc

SEQ ID NO: 4085181 - DNA, 25 bp, Homo sapien
tatgatacaaggtccacagacttag

SEQ ID NO: 4085182 - DNA, 25 bp, Homo sapien
tccgacaagggtagagttgaccgct

SEQ ID NO: 4085183 - DNA, 25 bp, Homo sapien
tcagagtcagaatgtagcaagggta

SEQ ID NO: 4085184 - DNA, 25 bp, Homo sapien
gactgtgtcaattcacaaaaggtcc

SEQ ID NO: 4085185 - DNA, 25 bp, Homo sapien
tgttgcttactgtagagtgacccag

SEQ ID NO: 4085186 - DNA, 25 bp, Homo sapien
ccagtcagactatatgttgcataaa

SEQ ID NO: 4085187 - DNA, 25 bp, Homo sapien
aaaggtccattaattaaccagtcag

SEQ ID NO: 4085188 - DNA, 25 bp, Homo sapien
ttcaactaagtttaatgaagaacat

SEQ ID NO: 4085189 - DNA, 25 bp, Homo sapien
aaatttcatcatgcgtatcagtgat

SEQ ID NO: 4085190 - DNA, 25 bp, Homo sapien
gaattgattgtcattaaagagccac

SEQ ID NO: 4085191 - DNA, 25 bp, Homo sapien
tattgcattaactaagtagctcaga

SEQ ID NO: 4085192 - DNA, 25 bp, Homo sapien
tatctgtagatagagttgtaaccac

SEQ ID NO: 4085193 - DNA, 25 bp, Homo sapien
tgaatggaattttgctgtggaaggt

SEQ ID NO: 4085194 - DNA, 25 bp, Homo sapien
atgaatggaattttgctgtggaagg

SEQ ID NO: 4085195 - DNA, 25 bp, Homo sapien
tgtagatagagttgtaaccacagat

SEQ ID NO: 4085196 - DNA, 25 bp, Homo sapien
ccaaatacgagacgagaaggaataa

SEQ ID NO: 4085197 - DNA, 25 bp, Homo sapien
ggagaaaccatagccatctcctttt

SEQ ID NO: 4085198 - DNA, 25 bp, Homo sapien
ctccaagcttctggagaaaccatag

SEQ ID NO: 4085199 - DNA, 25 bp, Homo sapien
tttgagagatgagtccaaatacgag

SEQ ID NO: 4085200 - DNA, 25 bp, Homo sapien
tgcctgcaatgtcatctagttctac

SEQ ID NO: 4085201 - DNA, 25 bp, Homo sapien
cctagccctgatggaccttatttgg

SEQ ID NO: 4085202 - DNA, 25 bp, Homo sapien
ggctaggtcgtggtgtgttaaacaa

SEQ ID NO: 4085203 - DNA, 25 bp, Homo sapien
tgttaaacaataatacctagccctg

SEQ ID NO: 4085204 - DNA, 25 bp, Homo sapien
gaaatactgtgaatgttgcactgga

SEQ ID NO: 4085205 - DNA, 25 bp, Homo sapien
tgaaaatgtaacatgcaggttcatt

SEQ ID NO: 4085206 - DNA, 25 bp, Homo sapien
aaaatgtaacatgcaggttcattgg

SEQ ID NO: 4085207 - DNA, 25 bp, Homo sapien
gaaaatgtaacatgcaggttcattg

SEQ ID NO: 4085208 - DNA, 25 bp, Homo sapien
aaatgtaacatgcaggttcattggt

SEQ ID NO: 4085209 - DNA, 25 bp, Homo sapien
cctacatcctggaagtgtgtgagag

SEQ ID NO: 4085210 - DNA, 25 bp, Homo sapien
atggctccgaatacctccaggccta

SEQ ID NO: 4085211 - DNA, 25 bp, Homo sapien
tccaggcctacatcctggaagtgtg

SEQ ID NO: 4085212 - DNA, 25 bp, Homo sapien
catggctccgaatacctccaggcct

SEQ ID NO: 4085213 - DNA, 25 bp, Homo sapien
tgagcatctcaaagtggaacaggca

SEQ ID NO: 4085214 - DNA, 25 bp, Homo sapien
gagcatctcaaagtggaacaggcac

SEQ ID NO: 4085215 - DNA, 25 bp, Homo sapien
gctgctctttcggattctgcctgca

SEQ ID NO: 4085216 - DNA, 25 bp, Homo sapien
ccaagccaaacaagttgcctctcgg

SEQ ID NO: 4085217 - DNA, 25 bp, Homo sapien
ttctgcctgcaaacttttcacattg

SEQ ID NO: 4085218 - DNA, 25 bp, Homo sapien
tgcaaacttttcacattgggcatgc

SEQ ID NO: 4085219 - DNA, 25 bp, Homo sapien
actttattcctgtcagtggccaaga

SEQ ID NO: 4085220 - DNA, 25 bp, Homo sapien
tgtttgtttgatagcctaaaagtca

SEQ ID NO: 4085221 - DNA, 25 bp, Homo sapien
gattccgcaagtgtactccagctgg

SEQ ID NO: 4085222 - DNA, 25 bp, Homo sapien
aagtcaactttattcctgtcagtgg

SEQ ID NO: 4085223 - DNA, 25 bp, Homo sapien
ttaattttgggcacctcagtgctgt

SEQ ID NO: 4085224 - DNA, 25 bp, Homo sapien
ttccaaagcaagtcctgaaatgagc

SEQ ID NO: 4085225 - DNA, 25 bp, Homo sapien
ttctgagttaattttgggcacctca

SEQ ID NO: 4085226 - DNA, 25 bp, Homo sapien
agtgctgtctccagtagatattcca

SEQ ID NO: 4085227 - DNA, 25 bp, Homo sapien
ggctgacgatactccttggtctgtg

SEQ ID NO: 4085228 - DNA, 25 bp, Homo sapien
tcagtctggctgacgatactccttg

SEQ ID NO: 4085229 - DNA, 25 bp, Homo sapien
tctggctgacgatactccttggtct

SEQ ID NO: 4085230 - DNA, 25 bp, Homo sapien
agtctggctgacgatactccttggt

SEQ ID NO: 4085231 - DNA, 25 bp, Homo sapien
gaggggagtgctacaacatacaaca

SEQ ID NO: 4085232 - DNA, 25 bp, Homo sapien
caaactggtgtcgtttcttagagta

SEQ ID NO: 4085233 - DNA, 25 bp, Homo sapien
tggagaagggatcctcagcaaagca

SEQ ID NO: 4085234 - DNA, 25 bp, Homo sapien
ttagagtaaataaggtagagccttc

SEQ ID NO: 4085235 - DNA, 25 bp, Homo sapien
taccataatttgctcaacgttcaac

SEQ ID NO: 4085236 - DNA, 25 bp, Homo sapien
cacccatgggtttaccataatttgc

SEQ ID NO: 4085237 - DNA, 25 bp, Homo sapien
tttgctcaacgttcaacccatgtgg

SEQ ID NO: 4085238 - DNA, 25 bp, Homo sapien
ccacccatgggtttaccataatttg

SEQ ID NO: 4085239 - DNA, 25 bp, Homo sapien
ttaagtggccacaggcggcaaacac

SEQ ID NO: 4085240 - DNA, 25 bp, Homo sapien
tggaatgctggagctattgacgtcc

SEQ ID NO: 4085241 - DNA, 25 bp, Homo sapien
tgacgtccagccatgagtagcaact

SEQ ID NO: 4085242 - DNA, 25 bp, Homo sapien
tctggaaaggtgactcaagagaggc

SEQ ID NO: 4085243 - DNA, 25 bp, Homo sapien
tgagacaggatagaagggcatctcc

SEQ ID NO: 4085244 - DNA, 25 bp, Homo sapien
gaaactgagacaggatagaagggca

SEQ ID NO: 4085245 - DNA, 25 bp, Homo sapien
aactgagacaggatagaagggcatc

SEQ ID NO: 4085246 - DNA, 25 bp, Homo sapien
gacgtttaggattgggaaactgaga

SEQ ID NO: 4085247 - DNA, 25 bp, Homo sapien
attatttgtgtcactgataggaata

SEQ ID NO: 4085248 - DNA, 25 bp, Homo sapien
ttatttgtgtcactgataggaataa

SEQ ID NO: 4085249 - DNA, 25 bp, Homo sapien
actgataggaataagtatatgtcat

SEQ ID NO: 4085250 - DNA, 25 bp, Homo sapien
ttttcatatcattattgtcctcatt

SEQ ID NO: 4085251 - DNA, 25 bp, Homo sapien
acccagctcttgacctttacttgct

SEQ ID NO: 4085252 - DNA, 25 bp, Homo sapien
caatggttaattggtcagaagcatg

SEQ ID NO: 4085253 - DNA, 25 bp, Homo sapien
tctgagtaccagagaagcagcatga

SEQ ID NO: 4085254 - DNA, 25 bp, Homo sapien
ctttacttgctgcttccctggtacc

SEQ ID NO: 4085255 - DNA, 25 bp, Homo sapien
ttcagggggaagtggcaggctctct

SEQ ID NO: 4085256 - DNA, 25 bp, Homo sapien
tcttcagggggaagtggcaggctct

SEQ ID NO: 4085257 - DNA, 25 bp, Homo sapien
tcagttcctcttcagggggaagtgg

SEQ ID NO: 4085258 - DNA, 25 bp, Homo sapien
agttcctcttcagggggaagtggca

SEQ ID NO: 4085259 - DNA, 25 bp, Homo sapien
actgtcttgagtcagcttctacttc

SEQ ID NO: 4085260 - DNA, 25 bp, Homo sapien
tctacttcttgaccctgcaataaaa

SEQ ID NO: 4085261 - DNA, 25 bp, Homo sapien
tcatgatgccttgaaagatatggag

SEQ ID NO: 4085262 - DNA, 25 bp, Homo sapien
aaaactctcctgagcccaaaggagc

SEQ ID NO: 4085263 - DNA, 25 bp, Homo sapien
cagaagacgaagaaacacggacaat

SEQ ID NO: 4085264 - DNA, 25 bp, Homo sapien
gaagaaacacggacaatcagaactc

SEQ ID NO: 4085265 - DNA, 25 bp, Homo sapien
cttctgcgctctatcagaagacgaa

SEQ ID NO: 4085266 - DNA, 25 bp, Homo sapien
tctgcgctctatcagaagacgaaga

SEQ ID NO: 4085267 - DNA, 25 bp, Homo sapien
ttggtgtatatggagtgaagacata

SEQ ID NO: 4085268 - DNA, 25 bp, Homo sapien
ctttggtgtatatggagtgaagaca

SEQ ID NO: 4085269 - DNA, 25 bp, Homo sapien
tttggtgtatatggagtgaagacat

SEQ ID NO: 4085270 - DNA, 25 bp, Homo sapien
ttggcccctgtaagcccaaggttgc

SEQ ID NO: 4085271 - DNA, 25 bp, Homo sapien
cattattgatatgaaggagtggcct

SEQ ID NO: 4085272 - DNA, 25 bp, Homo sapien
tgggacctagcagtaagacatcaga

SEQ ID NO: 4085273 - DNA, 25 bp, Homo sapien
cagggtgctgcattgtctcattgac

SEQ ID NO: 4085274 - DNA, 25 bp, Homo sapien
catctggattccgtatgtttgtagg

SEQ ID NO: 4085275 - DNA, 25 bp, Homo sapien
ttccattccgaagcatttcatctgg

SEQ ID NO: 4085276 - DNA, 25 bp, Homo sapien
tccagctcccataaggaatccttgg

SEQ ID NO: 4085277 - DNA, 25 bp, Homo sapien
taggacagggaattgcatggatgtt

SEQ ID NO: 4085278 - DNA, 25 bp, Homo sapien
tttgtaaattagagcttcattatta

SEQ ID NO: 4085279 - DNA, 25 bp, Homo sapien
ttagagcttcattattattttgaaa

SEQ ID NO: 4085280 - DNA, 25 bp, Homo sapien
ttgtaaattagagcttcattattat

SEQ ID NO: 4085281 - DNA, 25 bp, Homo sapien
aaattagagcttcattattattttg

SEQ ID NO: 4085282 - DNA, 25 bp, Homo sapien
tacagaccttccctttgtgcataag

SEQ ID NO: 4085283 - DNA, 25 bp, Homo sapien
ggccatatgtctcaagagccagcag

SEQ ID NO: 4085284 - DNA, 25 bp, Homo sapien
caccttgacgcgtgacttgttcgaa

SEQ ID NO: 4085285 - DNA, 25 bp, Homo sapien
ctagccctgagaggaactactgagt

SEQ ID NO: 4085286 - DNA, 25 bp, Homo sapien
tacagtatggggcagttagggccat

SEQ ID NO: 4085287 - DNA, 25 bp, Homo sapien
tgagcagcccaaaagtacagtatgg

SEQ ID NO: 4085288 - DNA, 25 bp, Homo sapien
gctcagccttctttgatgcctctgc

SEQ ID NO: 4085289 - DNA, 25 bp, Homo sapien
gcttggtccttagaatgagcagccc

SEQ ID NO: 4085290 - DNA, 25 bp, Homo sapien
taaagctatgtgagctacacaggca

SEQ ID NO: 4085291 - DNA, 25 bp, Homo sapien
aaagcaatgaggcttgaaagctcaa

SEQ ID NO: 4085292 - DNA, 25 bp, Homo sapien
ggccagcgccagaaatttggtaatg

SEQ ID NO: 4085293 - DNA, 25 bp, Homo sapien
gaagatgagttgattggccagcgcc

SEQ ID NO: 4085294 - DNA, 25 bp, Homo sapien
catgtggtaatttgatgtttacttt

SEQ ID NO: 4085295 - DNA, 25 bp, Homo sapien
gcccaaccctaatcatgtggtaatt

SEQ ID NO: 4085296 - DNA, 25 bp, Homo sapien
caccgtgcccaaccctaatcatgtg

SEQ ID NO: 4085297 - DNA, 25 bp, Homo sapien
ccgtgcccaaccctaatcatgtggt

SEQ ID NO: 4085298 - DNA, 25 bp, Homo sapien
agaaggtggttgaacagagatcttt

SEQ ID NO: 4085299 - DNA, 25 bp, Homo sapien
cccttcttggttagctgtagaagaa

SEQ ID NO: 4085300 - DNA, 25 bp, Homo sapien
tggttgaacagagatctttcctgaa

SEQ ID NO: 4085301 - DNA, 25 bp, Homo sapien
tgaacagagatctttcctgaatatg

SEQ ID NO: 4085302 - DNA, 25 bp, Homo sapien
ctgtattgtcaattggaataaactt

SEQ ID NO: 4085303 - DNA, 25 bp, Homo sapien
catggccacgatgcctgtagaagct

SEQ ID NO: 4085304 - DNA, 25 bp, Homo sapien
gagaactctaagtcctcttttccag

SEQ ID NO: 4085305 - DNA, 25 bp, Homo sapien
tgccattgagaactctaagtcctct

SEQ ID NO: 4085306 - DNA, 25 bp, Homo sapien
cctgtagaagctctgccattgagaa

SEQ ID NO: 4085307 - DNA, 25 bp, Homo sapien
caaagatcggtaggatctgggctcc

SEQ ID NO: 4085308 - DNA, 25 bp, Homo sapien
atcctgttagaaagccgtttccaat

SEQ ID NO: 4085309 - DNA, 25 bp, Homo sapien
ctttataccaaaccacagcaaactg

SEQ ID NO: 4085310 - DNA, 25 bp, Homo sapien
aactgaatgcaaagatcggtaggat

SEQ ID NO: 4085311 - DNA, 25 bp, Homo sapien
tttacaaggtaaagatcatatcatc

SEQ ID NO: 4085312 - DNA, 25 bp, Homo sapien
ccgttgttgatgtaatagaagagct

SEQ ID NO: 4085313 - DNA, 25 bp, Homo sapien
ggcgtgtcatatttactgacttgcg

SEQ ID NO: 4085314 - DNA, 25 bp, Homo sapien
ttaaatctgtttatgtggcgtgtca

SEQ ID NO: 4085315 - DNA, 25 bp, Homo sapien
cagtttcacgtttacttccctgatt

SEQ ID NO: 4085316 - DNA, 25 bp, Homo sapien
ggcatatttgagttcattgcccctt

SEQ ID NO: 4085317 - DNA, 25 bp, Homo sapien
caaattcttcacttcataaactatt

SEQ ID NO: 4085318 - DNA, 25 bp, Homo sapien
tacaatcagtttcacgtttacttcc

SEQ ID NO: 4085319 - DNA, 25 bp, Homo sapien
gctttatgcgttcctccacatagta

SEQ ID NO: 4085320 - DNA, 25 bp, Homo sapien
gcgttcctccacatagtagttgtga

SEQ ID NO: 4085321 - DNA, 25 bp, Homo sapien
cacatagtagttgtgaatccttaaa

SEQ ID NO: 4085322 - DNA, 25 bp, Homo sapien
tgtcatgctttatgcgttcctccac

SEQ ID NO: 4085323 - DNA, 25 bp, Homo sapien
cactgagtcattccaaagagggatg

SEQ ID NO: 4085324 - DNA, 25 bp, Homo sapien
tcactgagtcattccaaagagggat

SEQ ID NO: 4085325 - DNA, 25 bp, Homo sapien
tatagcggacgaaatgaaaaggagt

SEQ ID NO: 4085326 - DNA, 25 bp, Homo sapien
tagcggacgaaatgaaaaggagtcc

SEQ ID NO: 4085327 - DNA, 25 bp, Homo sapien
agcggacgaaatgaaaaggagtcca

SEQ ID NO: 4085328 - DNA, 25 bp, Homo sapien
gcggacgaaatgaaaaggagtccag

SEQ ID NO: 4085329 - DNA, 25 bp, Homo sapien
cacagaagccagtcaggatgggtgg

SEQ ID NO: 4085330 - DNA, 25 bp, Homo sapien
aattgcaagccaccattctggtact

SEQ ID NO: 4085331 - DNA, 25 bp, Homo sapien
caagccaccattctggtactctgac

SEQ ID NO: 4085332 - DNA, 25 bp, Homo sapien
ttgcaagccaccattctggtactct

SEQ ID NO: 4085333 - DNA, 25 bp, Homo sapien
gtttgcctaaagtatacccatttgc

SEQ ID NO: 4085334 - DNA, 25 bp, Homo sapien
tcctttgtagtttgcctaaagtata

SEQ ID NO: 4085335 - DNA, 25 bp, Homo sapien
tgcctaaagtatacccatttgccat

SEQ ID NO: 4085336 - DNA, 25 bp, Homo sapien
tgtagtttgcctaaagtatacccat

SEQ ID NO: 4085337 - DNA, 25 bp, Homo sapien
tcaaagcaccgtaacatttgttccc

SEQ ID NO: 4085338 - DNA, 25 bp, Homo sapien
cttcaaagcaccgtaacatttgttc

SEQ ID NO: 4085339 - DNA, 25 bp, Homo sapien
ctcttcaaagcaccgtaacatttgt

SEQ ID NO: 4085340 - DNA, 25 bp, Homo sapien
caaagcaccgtaacatttgttccct

SEQ ID NO: 4085341 - DNA, 25 bp, Homo sapien
gaagaagtcatagcgccggtcatca

SEQ ID NO: 4085342 - DNA, 25 bp, Homo sapien
gaaatctgcgtgaaggactccacac

SEQ ID NO: 4085343 - DNA, 25 bp, Homo sapien
gacacataattccagcctagggcct

SEQ ID NO: 4085344 - DNA, 25 bp, Homo sapien
tccttccgatgcgagggtagacaca

SEQ ID NO: 4085345 - DNA, 25 bp, Homo sapien
gcaccagctggctttttagctactc

SEQ ID NO: 4085346 - DNA, 25 bp, Homo sapien
ttttcaagacatcacctaaacattc

SEQ ID NO: 4085347 - DNA, 25 bp, Homo sapien
ggctttttagctactcccgtcctca

SEQ ID NO: 4085348 - DNA, 25 bp, Homo sapien
caagacatcacctaaacattcactg

SEQ ID NO: 4085349 - DNA, 25 bp, Homo sapien
aatgaagaggcgcttatcggtgcac

SEQ ID NO: 4085350 - DNA, 25 bp, Homo sapien
actgtgacggtgagcatggtggaga

SEQ ID NO: 4085351 - DNA, 25 bp, Homo sapien
tggtggagatgctttaggctctggt

SEQ ID NO: 4085352 - DNA, 25 bp, Homo sapien
aggcgcttatcggtgcactgtgacg

SEQ ID NO: 4085353 - DNA, 25 bp, Homo sapien
ttacatatcgtaaggtgtttctcta

SEQ ID NO: 4085354 - DNA, 25 bp, Homo sapien
catatcgtaaggtgtttctctacat

SEQ ID NO: 4085355 - DNA, 25 bp, Homo sapien
tcgtaaggtgtttctctacatgctt

SEQ ID NO: 4085356 - DNA, 25 bp, Homo sapien
tatcgtaaggtgtttctctacatgc

SEQ ID NO: 4085357 - DNA, 25 bp, Homo sapien
tttcataatagcatgggtaatgctt

SEQ ID NO: 4085358 - DNA, 25 bp, Homo sapien
tcataatagcatgggtaatgctttt

SEQ ID NO: 4085359 - DNA, 25 bp, Homo sapien
ttcataatagcatgggtaatgcttt

SEQ ID NO: 4085360 - DNA, 25 bp, Homo sapien
gtttgcaatcaaacaggatacggat

SEQ ID NO: 4085361 - DNA, 25 bp, Homo sapien
atcaaacaggatacggatgctgagc

SEQ ID NO: 4085362 - DNA, 25 bp, Homo sapien
tgcaatcaaacaggatacggatgct

SEQ ID NO: 4085363 - DNA, 25 bp, Homo sapien
caatcaaacaggatacggatgctga

SEQ ID NO: 4085364 - DNA, 25 bp, Homo sapien
tctattgccctcaatggagtttggg

SEQ ID NO: 4085365 - DNA, 25 bp, Homo sapien
gagtttgggcctgatctcgctcctt

SEQ ID NO: 4085366 - DNA, 25 bp, Homo sapien
cacagaacaggactgctacgagcag

SEQ ID NO: 4085367 - DNA, 25 bp, Homo sapien
gagactatggtatttgcacagaaca

SEQ ID NO: 4085368 - DNA, 25 bp, Homo sapien
aaactccctgtgaaggtgttgaggt

SEQ ID NO: 4085369 - DNA, 25 bp, Homo sapien
actctcgttggcagtggcactggag

SEQ ID NO: 4085370 - DNA, 25 bp, Homo sapien
aaccaggtcttccaaactccctgtg

SEQ ID NO: 4085371 - DNA, 25 bp, Homo sapien
cactggagcacacaaccaggtcttc

SEQ ID NO: 4085372 - DNA, 25 bp, Homo sapien
ggtatgccagctcacctaaaggagg

SEQ ID NO: 4085373 - DNA, 25 bp, Homo sapien
gggaattaggtcagtcagtacacac

SEQ ID NO: 4085374 - DNA, 25 bp, Homo sapien
gaagacatcagcatgccatagggaa

SEQ ID NO: 4085375 - DNA, 25 bp, Homo sapien
taagcaggcaaactaccttcaaggt

SEQ ID NO: 4085376 - DNA, 25 bp, Homo sapien
gaaaagcctccttggattagtgctc

SEQ ID NO: 4085377 - DNA, 25 bp, Homo sapien
aaaagcctccttggattagtgctcc

SEQ ID NO: 4085378 - DNA, 25 bp, Homo sapien
ggtggcatcgatgtcctcagagttc

SEQ ID NO: 4085379 - DNA, 25 bp, Homo sapien
caagttattagggtggcatcgatgt

SEQ ID NO: 4085380 - DNA, 25 bp, Homo sapien
tcgatgtcctcagagttcacaacac

SEQ ID NO: 4085381 - DNA, 25 bp, Homo sapien
ccttcagcacttgtgtacctgctca

SEQ ID NO: 4085382 - DNA, 25 bp, Homo sapien
caaccatttgcaacagtcttgaaag

SEQ ID NO: 4085383 - DNA, 25 bp, Homo sapien
gacctcaatataaatttgatcaacc

SEQ ID NO: 4085384 - DNA, 25 bp, Homo sapien
aatataaatttgatcaaccatttgc

SEQ ID NO: 4085385 - DNA, 25 bp, Homo sapien
aaatttgatcaaccatttgcaacag

SEQ ID NO: 4085386 - DNA, 25 bp, Homo sapien
ctttatctctatctatgggatcaac

SEQ ID NO: 4085387 - DNA, 25 bp, Homo sapien
tggcagaattattctgaaaatagct

SEQ ID NO: 4085388 - DNA, 25 bp, Homo sapien
cagaattattctgaaaatagctttc

SEQ ID NO: 4085389 - DNA, 25 bp, Homo sapien
tatctctatctatgggatcaaccat

SEQ ID NO: 4085390 - DNA, 25 bp, Homo sapien
ctttagtgtctctgctaagatacat

SEQ ID NO: 4085391 - DNA, 25 bp, Homo sapien
ctaatgcactttccatggtattaca

SEQ ID NO: 4085392 - DNA, 25 bp, Homo sapien
aatgcactttccatggtattacacg

SEQ ID NO: 4085393 - DNA, 25 bp, Homo sapien
gcactttccatggtattacacgaca

SEQ ID NO: 4085394 - DNA, 25 bp, Homo sapien
tgcactttccatggtattacacgac

SEQ ID NO: 4085395 - DNA, 25 bp, Homo sapien
caaaaatcacgacggccctggagtt

SEQ ID NO: 4085396 - DNA, 25 bp, Homo sapien
aatggtcctgtctttgcgttcctgg

SEQ ID NO: 4085397 - DNA, 25 bp, Homo sapien
aattctatcaaagtcaatggtcctg

SEQ ID NO: 4085398 - DNA, 25 bp, Homo sapien
tatatcctcatcgttggcaaaaatc

SEQ ID NO: 4085399 - DNA, 25 bp, Homo sapien
cttgggctgaatggtgatggcccct

SEQ ID NO: 4085400 - DNA, 25 bp, Homo sapien
ttccaccgtggctcgcttgggctga

SEQ ID NO: 4085401 - DNA, 25 bp, Homo sapien
gatggccccttctgcgatatcttca

SEQ ID NO: 4085402 - DNA, 25 bp, Homo sapien
tctgatcccacccaaagaaaatggc

SEQ ID NO: 4085403 - DNA, 25 bp, Homo sapien
cagatgtttgctgaacgtagtcatg

SEQ ID NO: 4085404 - DNA, 25 bp, Homo sapien
gcatactcagaaaaatgccggccga

SEQ ID NO: 4085405 - DNA, 25 bp, Homo sapien
aaaatgccggccgaaaatccagatg

SEQ ID NO: 4085406 - DNA, 25 bp, Homo sapien
tgctgaacgtagtcatgatatggat

SEQ ID NO: 4085407 - DNA, 25 bp, Homo sapien
aaaggaaaaatctacccagtgtcag

SEQ ID NO: 4085408 - DNA, 25 bp, Homo sapien
ccttagggacaattcttgcatggat

SEQ ID NO: 4085409 - DNA, 25 bp, Homo sapien
tatcaagacactggcgttctgcttt

SEQ ID NO: 4085410 - DNA, 25 bp, Homo sapien
tctcaattgggcaagggtcacatga

SEQ ID NO: 4085411 - DNA, 25 bp, Homo sapien
caaactctcctctaataatgccatt

SEQ ID NO: 4085412 - DNA, 25 bp, Homo sapien
tagaagacagttgaggggctcttgt

SEQ ID NO: 4085413 - DNA, 25 bp, Homo sapien
acccagaatcccctgaaacctctgg

SEQ ID NO: 4085414 - DNA, 25 bp, Homo sapien
tcaatacccagaatcccctgaaacc

SEQ ID NO: 4085415 - DNA, 25 bp, Homo sapien
ctcttcatgttagaagacagttgag

SEQ ID NO: 4085416 - DNA, 25 bp, Homo sapien
gttaccagatacacaggtgcattct

SEQ ID NO: 4085417 - DNA, 25 bp, Homo sapien
tattgtccttgccaggttgacttag

SEQ ID NO: 4085418 - DNA, 25 bp, Homo sapien
tcaacagttaccagatacacaggtg

SEQ ID NO: 4085419 - DNA, 25 bp, Homo sapien
tgtccttgccaggttgacttagtga

SEQ ID NO: 4085420 - DNA, 25 bp, Homo sapien
caattaccggcaatgcagtcttgct

SEQ ID NO: 4085421 - DNA, 25 bp, Homo sapien
gaataaatcaggctgcaacttctca

SEQ ID NO: 4085422 - DNA, 25 bp, Homo sapien
taaaaaggctgagtctcaactcctc

SEQ ID NO: 4085423 - DNA, 25 bp, Homo sapien
aaggagaagtgcagcccatcactgg

SEQ ID NO: 4085424 - DNA, 25 bp, Homo sapien
gcaacagggtgtatttcccatgtct

SEQ ID NO: 4085425 - DNA, 25 bp, Homo sapien
gatgcccattgcaacggaaagtttg

SEQ ID NO: 4085426 - DNA, 25 bp, Homo sapien
gaaccctgtggtcaattgctgtact

SEQ ID NO: 4085427 - DNA, 25 bp, Homo sapien
gctgaattaacataggatgcccatt

SEQ ID NO: 4085428 - DNA, 25 bp, Homo sapien
cttctctgagccaaaagttgtgcca

SEQ ID NO: 4085429 - DNA, 25 bp, Homo sapien
gccaaaagttgtgccaaaattaaca

SEQ ID NO: 4085430 - DNA, 25 bp, Homo sapien
tcgggtaaatgattcttctctaaag

SEQ ID NO: 4085431 - DNA, 25 bp, Homo sapien
tcatatctttcgggtaaatgattct

SEQ ID NO: 4085432 - DNA, 25 bp, Homo sapien
ttctgctgctaaagggggccacatg

SEQ ID NO: 4085433 - DNA, 25 bp, Homo sapien
ctaaagggggccacatgtcagacat

SEQ ID NO: 4085434 - DNA, 25 bp, Homo sapien
ctgctaaagggggccacatgtcaga

SEQ ID NO: 4085435 - DNA, 25 bp, Homo sapien
tctgctgctaaagggggccacatgt

SEQ ID NO: 4085436 - DNA, 25 bp, Homo sapien
catcttttgcccactcagagaagtc

SEQ ID NO: 4085437 - DNA, 25 bp, Homo sapien
gcattagctacagtccataaatcag

SEQ ID NO: 4085438 - DNA, 25 bp, Homo sapien
ctgctgatgtcaccttttgatgaac

SEQ ID NO: 4085439 - DNA, 25 bp, Homo sapien
tcatgtggacgcaaataccttcaca

SEQ ID NO: 4085440 - DNA, 25 bp, Homo sapien
ctttaaattctgctgagatattgac

SEQ ID NO: 4085441 - DNA, 25 bp, Homo sapien
aattctgctgagatattgaccaaat

SEQ ID NO: 4085442 - DNA, 25 bp, Homo sapien
taaattctgctgagatattgaccaa

SEQ ID NO: 4085443 - DNA, 25 bp, Homo sapien
tttaaattctgctgagatattgacc

SEQ ID NO: 4085444 - DNA, 25 bp, Homo sapien
gaatgtagcaatagttgaggccctc

SEQ ID NO: 4085445 - DNA, 25 bp, Homo sapien
caactgtatctttagggtcccctgt

SEQ ID NO: 4085446 - DNA, 25 bp, Homo sapien
gattatctccaactgtatctttagg

SEQ ID NO: 4085447 - DNA, 25 bp, Homo sapien
ggtacagaatgtctgactggacctc

SEQ ID NO: 4085448 - DNA, 25 bp, Homo sapien
cattcacgaggagaacagctcggtg

SEQ ID NO: 4085449 - DNA, 25 bp, Homo sapien
caaaggtattttgcataggtgtggg

SEQ ID NO: 4085450 - DNA, 25 bp, Homo sapien
acagctcggtgtgaggattatagca

SEQ ID NO: 4085451 - DNA, 25 bp, Homo sapien
ttaaggaactcaaaggtattttgca

SEQ ID NO: 4085452 - DNA, 25 bp, Homo sapien
agagaatacgatatttcctgcagga

SEQ ID NO: 4085453 - DNA, 25 bp, Homo sapien
gggttgtaaggatattcaggatcac

SEQ ID NO: 4085454 - DNA, 25 bp, Homo sapien
tgtcttgacacccaacagcttcact

SEQ ID NO: 4085455 - DNA, 25 bp, Homo sapien
tgcaggatcaatgtcttgacaccca

SEQ ID NO: 4085456 - DNA, 25 bp, Homo sapien
tgtaaaaatgagaatagatggctcg

SEQ ID NO: 4085457 - DNA, 25 bp, Homo sapien
gatggctcgtaaacaaatgtcttca

SEQ ID NO: 4085458 - DNA, 25 bp, Homo sapien
aactgtccaacgttctaaaacatgc

SEQ ID NO: 4085459 - DNA, 25 bp, Homo sapien
ggatcaagttcaagcagcaaactca

SEQ ID NO: 4085460 - DNA, 25 bp, Homo sapien
tctctttctctactagacgctccat

SEQ ID NO: 4085461 - DNA, 25 bp, Homo sapien
ctctctttctctactagacgctcca

SEQ ID NO: 4085462 - DNA, 25 bp, Homo sapien
tgtgcatttgcgatctgtgtcttct

SEQ ID NO: 4085463 - DNA, 25 bp, Homo sapien
tgtacgggacgtaaagtaggcatca

SEQ ID NO: 4085464 - DNA, 25 bp, Homo sapien
tctgttgttttcaagtgtacgggac

SEQ ID NO: 4085465 - DNA, 25 bp, Homo sapien
gacccactaatcgtcaacttgcagt

SEQ ID NO: 4085466 - DNA, 25 bp, Homo sapien
gtaataggagaaggacaacgagaat

SEQ ID NO: 4085467 - DNA, 25 bp, Homo sapien
ctatgcagacatgtcagtgctagcc

SEQ ID NO: 4085468 - DNA, 25 bp, Homo sapien
gagaaggacaacgagaattaaatta

SEQ ID NO: 4085469 - DNA, 25 bp, Homo sapien
tgctagccacgtagagtaataggag

SEQ ID NO: 4085470 - DNA, 25 bp, Homo sapien
caaccgattccaccttccagacact

SEQ ID NO: 4085471 - DNA, 25 bp, Homo sapien
tcaaccgattccaccttccagacac

SEQ ID NO: 4085472 - DNA, 25 bp, Homo sapien
tgacacagacaaaaagatcttcatg

SEQ ID NO: 4085473 - DNA, 25 bp, Homo sapien
aagatcttcatgaattcctcacagg

SEQ ID NO: 4085474 - DNA, 25 bp, Homo sapien
ctgacacagacaaaaagatcttcat

SEQ ID NO: 4085475 - DNA, 25 bp, Homo sapien
atcttcatgaattcctcacaggcca

SEQ ID NO: 4085476 - DNA, 25 bp, Homo sapien
tggagttgatatacatcctgatctc

SEQ ID NO: 4085477 - DNA, 25 bp, Homo sapien
ttgatatacatcctgatctctaagg

SEQ ID NO: 4085478 - DNA, 25 bp, Homo sapien
ttttctgattggagttgatatacat

SEQ ID NO: 4085479 - DNA, 25 bp, Homo sapien
tgattggagttgatatacatcctga

SEQ ID NO: 4085480 - DNA, 25 bp, Homo sapien
tcttcactactaagggcaggaatgg

SEQ ID NO: 4085481 - DNA, 25 bp, Homo sapien
ccttcacatcttcactactaagggc

SEQ ID NO: 4085482 - DNA, 25 bp, Homo sapien
catcttcactactaagggcaggaat

SEQ ID NO: 4085483 - DNA, 25 bp, Homo sapien
actactaagggcaggaatggacaag

SEQ ID NO: 4085484 - DNA, 25 bp, Homo sapien
cctggagtcatcaaaaccacagttg

SEQ ID NO: 4085485 - DNA, 25 bp, Homo sapien
gaaggacctggagtcatcaaaacca

SEQ ID NO: 4085486 - DNA, 25 bp, Homo sapien
ggacctggagtcatcaaaaccacag

SEQ ID NO: 4085487 - DNA, 25 bp, Homo sapien
aaggacctggagtcatcaaaaccac

SEQ ID NO: 4085488 - DNA, 25 bp, Homo sapien
cattttgctcccatctgcctaataa

SEQ ID NO: 4085489 - DNA, 25 bp, Homo sapien
ttgctcccatctgcctaataatgat

SEQ ID NO: 4085490 - DNA, 25 bp, Homo sapien
tttgctcccatctgcctaataatga

SEQ ID NO: 4085491 - DNA, 25 bp, Homo sapien
ttttgctcccatctgcctaataatg

SEQ ID NO: 4085492 - DNA, 25 bp, Homo sapien
ctgtgaagtactgaacagtgtcaaa

SEQ ID NO: 4085493 - DNA, 25 bp, Homo sapien
acactccaccaatggcctctttatg

SEQ ID NO: 4085494 - DNA, 25 bp, Homo sapien
cagtgtcaaacactccaccaatggc

SEQ ID NO: 4085495 - DNA, 25 bp, Homo sapien
ctttatgcctcccaccattttccat

SEQ ID NO: 4085496 - DNA, 25 bp, Homo sapien
tcacgaactggactttaccctcctg

SEQ ID NO: 4085497 - DNA, 25 bp, Homo sapien
taacattgcgtatatacttcagcaa

SEQ ID NO: 4085498 - DNA, 25 bp, Homo sapien
acaccccggtagtcagcacagagat

SEQ ID NO: 4085499 - DNA, 25 bp, Homo sapien
gccatagcatagactgcgtcaatca

SEQ ID NO: 4085500 - DNA, 25 bp, Homo sapien
ttcccttcctcttccatcctatacc

SEQ ID NO: 4085501 - DNA, 25 bp, Homo sapien
ccttcctcttccatcctatacccac

SEQ ID NO: 4085502 - DNA, 25 bp, Homo sapien
ctacagcaactgctcctttcccttc

SEQ ID NO: 4085503 - DNA, 25 bp, Homo sapien
tttcccttcctcttccatcctatac

SEQ ID NO: 4085504 - DNA, 25 bp, Homo sapien
gagctgaagttcgtctgtccactgc

SEQ ID NO: 4085505 - DNA, 25 bp, Homo sapien
tcttgttaaacatcactggagtgcc

SEQ ID NO: 4085506 - DNA, 25 bp, Homo sapien
gaaagatgtcataacgcccaggtgc

SEQ ID NO: 4085507 - DNA, 25 bp, Homo sapien
tgtccactgcccgatcagacggtaa

SEQ ID NO: 4085508 - DNA, 25 bp, Homo sapien
taaatgagataattcgcacaggtca

SEQ ID NO: 4085509 - DNA, 25 bp, Homo sapien
tgagataattcgcacaggtcatgaa

SEQ ID NO: 4085510 - DNA, 25 bp, Homo sapien
cacaggtcatgaatataatgcacaa

SEQ ID NO: 4085511 - DNA, 25 bp, Homo sapien
ttcgcacaggtcatgaatataatgc

SEQ ID NO: 4085512 - DNA, 25 bp, Homo sapien
ggctccctatgtgaataaccctttc

SEQ ID NO: 4085513 - DNA, 25 bp, Homo sapien
tgtagtggcttcacggctccctatg

SEQ ID NO: 4085514 - DNA, 25 bp, Homo sapien
cttcatagaaaccatgacataacct

SEQ ID NO: 4085515 - DNA, 25 bp, Homo sapien
gcaaatgaggtaactggcctgtagt

SEQ ID NO: 4085516 - DNA, 25 bp, Homo sapien
catttgcttgagatgatgtaactga

SEQ ID NO: 4085517 - DNA, 25 bp, Homo sapien
gaatctttgtgaggagacatacact

SEQ ID NO: 4085518 - DNA, 25 bp, Homo sapien
tgcaattactgaccacagagaaagc

SEQ ID NO: 4085519 - DNA, 25 bp, Homo sapien
gagaaagccgccctcgaaaatttca

SEQ ID NO: 4085520 - DNA, 25 bp, Homo sapien
gccttgtatcaatctgtaattgcaa

SEQ ID NO: 4085521 - DNA, 25 bp, Homo sapien
ccttgtatcaatctgtaattgcaaa

SEQ ID NO: 4085522 - DNA, 25 bp, Homo sapien
cattgcattgcacagtgccttgaac

SEQ ID NO: 4085523 - DNA, 25 bp, Homo sapien
ctgtatgactgtgggacagcagaac

SEQ ID NO: 4085524 - DNA, 25 bp, Homo sapien
ttatgctgtatgactgtgggacagc

SEQ ID NO: 4085525 - DNA, 25 bp, Homo sapien
tatgctgtatgactgtgggacagca

SEQ ID NO: 4085526 - DNA, 25 bp, Homo sapien
tgctgtatgactgtgggacagcaga

SEQ ID NO: 4085527 - DNA, 25 bp, Homo sapien
ggacttgttcccatgacactaagaa

SEQ ID NO: 4085528 - DNA, 25 bp, Homo sapien
aaaggtcactgtcatctagaaaaga

SEQ ID NO: 4085529 - DNA, 25 bp, Homo sapien
tttattctcttggtggaaaggtcac

SEQ ID NO: 4085530 - DNA, 25 bp, Homo sapien
catctagaaaagagccattccctgg

SEQ ID NO: 4085531 - DNA, 25 bp, Homo sapien
ctctgtatgtgaccaggtagcaaat

SEQ ID NO: 4085532 - DNA, 25 bp, Homo sapien
tctgtatgtgaccaggtagcaaatg

SEQ ID NO: 4085533 - DNA, 25 bp, Homo sapien
tctatttgagcagctatggttttaa

SEQ ID NO: 4085534 - DNA, 25 bp, Homo sapien
gcttcttaagagtatgatcagctgg

SEQ ID NO: 4085535 - DNA, 25 bp, Homo sapien
cttaagagtatgatcagctggtgct

SEQ ID NO: 4085536 - DNA, 25 bp, Homo sapien
gtctggcttcttaagagtatgatca

SEQ ID NO: 4085537 - DNA, 25 bp, Homo sapien
ctggccatgcaccaaggctagggga

SEQ ID NO: 4085538 - DNA, 25 bp, Homo sapien
aggctaggggaacatcgaaggcact

SEQ ID NO: 4085539 - DNA, 25 bp, Homo sapien
tgcaccaaggctaggggaacatcga

SEQ ID NO: 4085540 - DNA, 25 bp, Homo sapien
caaggctaggggaacatcgaaggca

SEQ ID NO: 4085541 - DNA, 25 bp, Homo sapien
cattgggtaagttcggccagagact

SEQ ID NO: 4085542 - DNA, 25 bp, Homo sapien
tgccatggtcaggtgtccgtaacag

SEQ ID NO: 4085543 - DNA, 25 bp, Homo sapien
cagagacttcctgaaactagcacaa

SEQ ID NO: 4085544 - DNA, 25 bp, Homo sapien
ctgcttctcctacggcaagttatct

SEQ ID NO: 4085545 - DNA, 25 bp, Homo sapien
gtgatccagggcatttcagaaaaag

SEQ ID NO: 4085546 - DNA, 25 bp, Homo sapien
atccagggcatttcagaaaaagcat

SEQ ID NO: 4085547 - DNA, 25 bp, Homo sapien
gatccagggcatttcagaaaaagca

SEQ ID NO: 4085548 - DNA, 25 bp, Homo sapien
tccagggcatttcagaaaaagcata

SEQ ID NO: 4085549 - DNA, 25 bp, Homo sapien
gcacacatttctagagcatctgact

SEQ ID NO: 4085550 - DNA, 25 bp, Homo sapien
gcttctccagacctgacaggtgata

SEQ ID NO: 4085551 - DNA, 25 bp, Homo sapien
ttcagtcctcaacatgcacacattt

SEQ ID NO: 4085552 - DNA, 25 bp, Homo sapien
catctgactttatcttggatgggaa

SEQ ID NO: 4085553 - DNA, 25 bp, Homo sapien
tcccatccttctaacatcatcttgt

SEQ ID NO: 4085554 - DNA, 25 bp, Homo sapien
tgtagcaggcacaaatggtctctat

SEQ ID NO: 4085555 - DNA, 25 bp, Homo sapien
taagggtactacgatgtcctggaag

SEQ ID NO: 4085556 - DNA, 25 bp, Homo sapien
aattctcctatctcataatcaaagg

SEQ ID NO: 4085557 - DNA, 25 bp, Homo sapien
ttcttattcctttactctgctttct

SEQ ID NO: 4085558 - DNA, 25 bp, Homo sapien
ccgtgttgggtccacttaattgctc

SEQ ID NO: 4085559 - DNA, 25 bp, Homo sapien
ttgggtccacttaattgctctctct

SEQ ID NO: 4085560 - DNA, 25 bp, Homo sapien
tgctctctctgattttgggtcttcc

SEQ ID NO: 4085561 - DNA, 25 bp, Homo sapien
cagtgatgaccatctattaaagtca

SEQ ID NO: 4085562 - DNA, 25 bp, Homo sapien
cccagtgatgaccatctattaaagt

SEQ ID NO: 4085563 - DNA, 25 bp, Homo sapien
tgtgaaagttcgttcctgttttctc

SEQ ID NO: 4085564 - DNA, 25 bp, Homo sapien
ctcccattggagagtaacaattgtg

SEQ ID NO: 4085565 - DNA, 25 bp, Homo sapien
cttgttagaaccttaatagaatcag

SEQ ID NO: 4085566 - DNA, 25 bp, Homo sapien
tacttgttagaaccttaatagaatc

SEQ ID NO: 4085567 - DNA, 25 bp, Homo sapien
ccaagctggctggtgcttttattgc

SEQ ID NO: 4085568 - DNA, 25 bp, Homo sapien
tccatagaccaagctggctggtgct

SEQ ID NO: 4085569 - DNA, 25 bp, Homo sapien
gggtacaccccgagtcttgatggca

SEQ ID NO: 4085570 - DNA, 25 bp, Homo sapien
tggtaaccatcgcaaggctcacagg

SEQ ID NO: 4085571 - DNA, 25 bp, Homo sapien
gatgcccgtcaaaagaacatagctg

SEQ ID NO: 4085572 - DNA, 25 bp, Homo sapien
tagtgtgcacactgaggcgggtatc

SEQ ID NO: 4085573 - DNA, 25 bp, Homo sapien
tctccataggcttttaagatactca

SEQ ID NO: 4085574 - DNA, 25 bp, Homo sapien
gcatgaggtattgagttgttttaat

SEQ ID NO: 4085575 - DNA, 25 bp, Homo sapien
taatgtcttcaacctgttgcatgag

SEQ ID NO: 4085576 - DNA, 25 bp, Homo sapien
taggcttttaagatactcatcattc

SEQ ID NO: 4085577 - DNA, 25 bp, Homo sapien
tacttcttttcctagatgtgcaact

SEQ ID NO: 4085578 - DNA, 25 bp, Homo sapien
cttcttttcctagatgtgcaactct

SEQ ID NO: 4085579 - DNA, 25 bp, Homo sapien
acttcttttcctagatgtgcaactc

SEQ ID NO: 4085580 - DNA, 25 bp, Homo sapien
tggctgaggtctcaaagcgcaagac

SEQ ID NO: 4085581 - DNA, 25 bp, Homo sapien
ctctcagtggctgaggtctcaaagc

SEQ ID NO: 4085582 - DNA, 25 bp, Homo sapien
gctgaggtctcaaagcgcaagacac

SEQ ID NO: 4085583 - DNA, 25 bp, Homo sapien
tcagtggctgaggtctcaaagcgca

SEQ ID NO: 4085584 - DNA, 25 bp, Homo sapien
ctgttacctgctttgatctgaaatg

SEQ ID NO: 4085585 - DNA, 25 bp, Homo sapien
tgttacctgctttgatctgaaatgc

SEQ ID NO: 4085586 - DNA, 25 bp, Homo sapien
gaaatgcttctgatgggtttccaga

SEQ ID NO: 4085587 - DNA, 25 bp, Homo sapien
gttacctgctttgatctgaaatgct

SEQ ID NO: 4085588 - DNA, 25 bp, Homo sapien
aaagcatgagtcatgtcttttgcag

SEQ ID NO: 4085589 - DNA, 25 bp, Homo sapien
cagccataaaaaagcatgagtcatg

SEQ ID NO: 4085590 - DNA, 25 bp, Homo sapien
taaaaaagcatgagtcatgtctttt

SEQ ID NO: 4085591 - DNA, 25 bp, Homo sapien
ccataaaaaagcatgagtcatgtct

SEQ ID NO: 4085592 - DNA, 25 bp, Homo sapien
agcagtggagacagggagaacggag

SEQ ID NO: 4085593 - DNA, 25 bp, Homo sapien
gagaacggagggatgacaggtatct

SEQ ID NO: 4085594 - DNA, 25 bp, Homo sapien
ttaggcatgatgatgataggtggca

SEQ ID NO: 4085595 - DNA, 25 bp, Homo sapien
ttcttggctgattgttaggcatgat

SEQ ID NO: 4085596 - DNA, 25 bp, Homo sapien
tatgttgataacctaaattgttggc

SEQ ID NO: 4085597 - DNA, 25 bp, Homo sapien
cttatgttgataacctaaattgttg

SEQ ID NO: 4085598 - DNA, 25 bp, Homo sapien
atgttgataacctaaattgttggca

SEQ ID NO: 4085599 - DNA, 25 bp, Homo sapien
ttatgttgataacctaaattgttgg

SEQ ID NO: 4085600 - DNA, 25 bp, Homo sapien
gtttgccaagttccaatcattccca

SEQ ID NO: 4085601 - DNA, 25 bp, Homo sapien
ggtagttatgttcaatcagggagac

SEQ ID NO: 4085602 - DNA, 25 bp, Homo sapien
attcccatatccctggtagttatgt

SEQ ID NO: 4085603 - DNA, 25 bp, Homo sapien
tcagggagacattacagtctataaa

SEQ ID NO: 4085604 - DNA, 25 bp, Homo sapien
aaatgccttgatacaaatgcccttc

SEQ ID NO: 4085605 - DNA, 25 bp, Homo sapien
tctccctttgctgatatcttcagca

SEQ ID NO: 4085606 - DNA, 25 bp, Homo sapien
cagcaaaatgccttgatacaaatgc

SEQ ID NO: 4085607 - DNA, 25 bp, Homo sapien
ttctccctttgctgatatcttcagc

SEQ ID NO: 4085608 - DNA, 25 bp, Homo sapien
cttcagagtaagcatcaatccacat

SEQ ID NO: 4085609 - DNA, 25 bp, Homo sapien
cggacacatttcctttaggttctgt

SEQ ID NO: 4085610 - DNA, 25 bp, Homo sapien
gtggatcaatgactgcttcggacac

SEQ ID NO: 4085611 - DNA, 25 bp, Homo sapien
caatccacatttgtggatcaatgac

SEQ ID NO: 4085612 - DNA, 25 bp, Homo sapien
tgattataagaaggtatgcctcctc

SEQ ID NO: 4085613 - DNA, 25 bp, Homo sapien
ctggccacaaattcacgtttttgtc

SEQ ID NO: 4085614 - DNA, 25 bp, Homo sapien
gagttttatacccattacatcccag

SEQ ID NO: 4085615 - DNA, 25 bp, Homo sapien
actggcccaggccatttttagagtt

SEQ ID NO: 4085616 - DNA, 25 bp, Homo sapien
cttacaatgattcagggaaagcctg

SEQ ID NO: 4085617 - DNA, 25 bp, Homo sapien
aataaataggacagaggccccgtct

SEQ ID NO: 4085618 - DNA, 25 bp, Homo sapien
tgtccaggcaccattagatgctcag

SEQ ID NO: 4085619 - DNA, 25 bp, Homo sapien
aaacaatgacagtgtgtgtccaggc

SEQ ID NO: 4085620 - DNA, 25 bp, Homo sapien
taaagcgtgcatggaactcacgtgg

SEQ ID NO: 4085621 - DNA, 25 bp, Homo sapien
cctggtggccactgtatttagactt

SEQ ID NO: 4085622 - DNA, 25 bp, Homo sapien
taagcacagccttatttaaagcgtg

SEQ ID NO: 4085623 - DNA, 25 bp, Homo sapien
tggttaatacagtcccgtgacctta

SEQ ID NO: 4085624 - DNA, 25 bp, Homo sapien
gactttacatggctacctgaggaaa

SEQ ID NO: 4085625 - DNA, 25 bp, Homo sapien
gaatgacctccagaatacagacttt

SEQ ID NO: 4085626 - DNA, 25 bp, Homo sapien
ggtaatgcagccttgtgacacagac

SEQ ID NO: 4085627 - DNA, 25 bp, Homo sapien
gaggaattgcaatccagagccattc

SEQ ID NO: 4085628 - DNA, 25 bp, Homo sapien
gccactctgactgaaatgtaggaga

SEQ ID NO: 4085629 - DNA, 25 bp, Homo sapien
aatccactagtcaaaaggaacgcca

SEQ ID NO: 4085630 - DNA, 25 bp, Homo sapien
tgaatattagcaagccgtacttgac

SEQ ID NO: 4085631 - DNA, 25 bp, Homo sapien
gccacaacgtctgactttcgccaag

SEQ ID NO: 4085632 - DNA, 25 bp, Homo sapien
ggagattgtaagcgtggtagtttgt

SEQ ID NO: 4085633 - DNA, 25 bp, Homo sapien
attgtaagcgtggtagtttgtatgt

SEQ ID NO: 4085634 - DNA, 25 bp, Homo sapien
gagattgtaagcgtggtagtttgta

SEQ ID NO: 4085635 - DNA, 25 bp, Homo sapien
gattgtaagcgtggtagtttgtatg

SEQ ID NO: 4085636 - DNA, 25 bp, Homo sapien
cccagcgccactgatgcacttaggt

SEQ ID NO: 4085637 - DNA, 25 bp, Homo sapien
atccccagcgccactgatgcactta

SEQ ID NO: 4085638 - DNA, 25 bp, Homo sapien
gtatagcatccccagcgccactgat

SEQ ID NO: 4085639 - DNA, 25 bp, Homo sapien
tatagcatccccagcgccactgatg

SEQ ID NO: 4085640 - DNA, 25 bp, Homo sapien
gagctcggtctttgcctcaccgttg

SEQ ID NO: 4085641 - DNA, 25 bp, Homo sapien
tgacagcctcgatgacatggtggct

SEQ ID NO: 4085642 - DNA, 25 bp, Homo sapien
tccgtttctggacattgagttcagg

SEQ ID NO: 4085643 - DNA, 25 bp, Homo sapien
tgactaccgccttgaagcttcgctt

SEQ ID NO: 4085644 - DNA, 25 bp, Homo sapien
acccagcccataagacaagaacgat

SEQ ID NO: 4085645 - DNA, 25 bp, Homo sapien
tggtggcaggaatgagtcaaactca

SEQ ID NO: 4085646 - DNA, 25 bp, Homo sapien
gacaagaacgatcacagtatttctc

SEQ ID NO: 4085647 - DNA, 25 bp, Homo sapien
gaagatgaaagaaacggagagttac

SEQ ID NO: 4085648 - DNA, 25 bp, Homo sapien
cacttctgaagcagagcctccaaaa

SEQ ID NO: 4085649 - DNA, 25 bp, Homo sapien
tcacacttctgaagcagagcctcca

SEQ ID NO: 4085650 - DNA, 25 bp, Homo sapien
ttctgaagcagagcctccaaaagct

SEQ ID NO: 4085651 - DNA, 25 bp, Homo sapien
cacacttctgaagcagagcctccaa

SEQ ID NO: 4085652 - DNA, 25 bp, Homo sapien
tcaacattcacatgctagaggaaaa

SEQ ID NO: 4085653 - DNA, 25 bp, Homo sapien
caacctgataggtgcatttgtcagt

SEQ ID NO: 4085654 - DNA, 25 bp, Homo sapien
tttgtcagttggaggattcagtacc

SEQ ID NO: 4085655 - DNA, 25 bp, Homo sapien
caaaaagttgttgccttagcaggaa

SEQ ID NO: 4085656 - DNA, 25 bp, Homo sapien
ttccccacagtatgatgccgttatc

SEQ ID NO: 4085657 - DNA, 25 bp, Homo sapien
tatcatggtagtgtctggccctgtg

SEQ ID NO: 4085658 - DNA, 25 bp, Homo sapien
tgtcttgcatagaataaaactcttc

SEQ ID NO: 4085659 - DNA, 25 bp, Homo sapien
ctccagtggtatggtagatatgttt

SEQ ID NO: 4085660 - DNA, 25 bp, Homo sapien
gcaactagccaaaatattcctggaa

SEQ ID NO: 4085661 - DNA, 25 bp, Homo sapien
tgcatgcatgactaaaggctcctag

SEQ ID NO: 4085662 - DNA, 25 bp, Homo sapien
gaaatcccttctgccttaaacaaca

SEQ ID NO: 4085663 - DNA, 25 bp, Homo sapien
tacaaagtgatagctatatgcccat

SEQ ID NO: 4085664 - DNA, 25 bp, Homo sapien
gatatctctcttatttgcagagcaa

SEQ ID NO: 4085665 - DNA, 25 bp, Homo sapien
cagttctttgtgtagtgtttgtcag

SEQ ID NO: 4085666 - DNA, 25 bp, Homo sapien
caaagtatttcacgacattcactca

SEQ ID NO: 4085667 - DNA, 25 bp, Homo sapien
tttgtcaggatcaaacccagttggc

SEQ ID NO: 4085668 - DNA, 25 bp, Homo sapien
ggtgggatagtgtaccaagtaacag

SEQ ID NO: 4085669 - DNA, 25 bp, Homo sapien
ctctttcttactggtggtatacagt

SEQ ID NO: 4085670 - DNA, 25 bp, Homo sapien
tgttggtgggatagtgtaccaagta

SEQ ID NO: 4085671 - DNA, 25 bp, Homo sapien
gatagtgtaccaagtaacagacttt

SEQ ID NO: 4085672 - DNA, 25 bp, Homo sapien
cttgagtgcctttccgtttatggct

SEQ ID NO: 4085673 - DNA, 25 bp, Homo sapien
cacctgtagcttggtgacacttggc

SEQ ID NO: 4085674 - DNA, 25 bp, Homo sapien
gcaactcaagcaaaacatcccgggt

SEQ ID NO: 4085675 - DNA, 25 bp, Homo sapien
taccttgaggaagagcccttgtcac

SEQ ID NO: 4085676 - DNA, 25 bp, Homo sapien
tcaaagcccaatagcctcacgtaac

SEQ ID NO: 4085677 - DNA, 25 bp, Homo sapien
gcccaatagcctcacgtaactgctt

SEQ ID NO: 4085678 - DNA, 25 bp, Homo sapien
tgtcacattctcttgtactgcaggt

SEQ ID NO: 4085679 - DNA, 25 bp, Homo sapien
gtaactgctttctagtaccagaaca

SEQ ID NO: 4085680 - DNA, 25 bp, Homo sapien
cctctcttgaatattgggaagatgc

SEQ ID NO: 4085681 - DNA, 25 bp, Homo sapien
tgaatgacagtctctaaggaaatgc

SEQ ID NO: 4085682 - DNA, 25 bp, Homo sapien
tggaaacgagtcacaagggtcacct

SEQ ID NO: 4085683 - DNA, 25 bp, Homo sapien
aactgaccttggtttaggatacaca

SEQ ID NO: 4085684 - DNA, 25 bp, Homo sapien
caagttccactgtacagccaaaaaa

SEQ ID NO: 4085685 - DNA, 25 bp, Homo sapien
aagtgtaatccaagttccactgtac

SEQ ID NO: 4085686 - DNA, 25 bp, Homo sapien
aatccaagttccactgtacagccaa

SEQ ID NO: 4085687 - DNA, 25 bp, Homo sapien
gtaatccaagttccactgtacagcc

SEQ ID NO: 4085688 - DNA, 25 bp, Homo sapien
tagtcatttagatcatagagagaaa

SEQ ID NO: 4085689 - DNA, 25 bp, Homo sapien
agtcatttagatcatagagagaaat

SEQ ID NO: 4085690 - DNA, 25 bp, Homo sapien
aatagtcatttagatcatagagaga

SEQ ID NO: 4085691 - DNA, 25 bp, Homo sapien
agaatagtcatttagatcatagaga

SEQ ID NO: 4085692 - DNA, 25 bp, Homo sapien
caatcctctttgtgcaagctgaggt

SEQ ID NO: 4085693 - DNA, 25 bp, Homo sapien
aatcctctttgtgcaagctgaggtc

SEQ ID NO: 4085694 - DNA, 25 bp, Homo sapien
atcctctttgtgcaagctgaggtcc

SEQ ID NO: 4085695 - DNA, 25 bp, Homo sapien
tcaatcctctttgtgcaagctgagg

SEQ ID NO: 4085696 - DNA, 25 bp, Homo sapien
tcagctcaagaagaacaagctttgg

SEQ ID NO: 4085697 - DNA, 25 bp, Homo sapien
tgctgatccatgtcatgttttccta

SEQ ID NO: 4085698 - DNA, 25 bp, Homo sapien
ttttcctaagtgttgggtcagctca

SEQ ID NO: 4085699 - DNA, 25 bp, Homo sapien
ggagttgctgatccatgtcatgttt

SEQ ID NO: 4085700 - DNA, 25 bp, Homo sapien
aaatgctcttcagcttgccagccgg

SEQ ID NO: 4085701 - DNA, 25 bp, Homo sapien
tcaggtggtatgagcctatctgtcc

SEQ ID NO: 4085702 - DNA, 25 bp, Homo sapien
catgataggccctttgaagactgag

SEQ ID NO: 4085703 - DNA, 25 bp, Homo sapien
ggagctacctgtcgaagttaatcac

SEQ ID NO: 4085704 - DNA, 25 bp, Homo sapien
cagactgataatgaccctggtggcc

SEQ ID NO: 4085705 - DNA, 25 bp, Homo sapien
gaatggctaaacttcactcaggatg

SEQ ID NO: 4085706 - DNA, 25 bp, Homo sapien
gaagactcatcgtttgaactctgaa

SEQ ID NO: 4085707 - DNA, 25 bp, Homo sapien
ccctaggaggccagcttaatcaaat

SEQ ID NO: 4085708 - DNA, 25 bp, Homo sapien
gacaatcgcttgactagatgccagt

SEQ ID NO: 4085709 - DNA, 25 bp, Homo sapien
aatcgcttgactagatgccagtgca

SEQ ID NO: 4085710 - DNA, 25 bp, Homo sapien
ctcagacaatcgcttgactagatgc

SEQ ID NO: 4085711 - DNA, 25 bp, Homo sapien
gcttgactagatgccagtgcagatg

SEQ ID NO: 4085712 - DNA, 25 bp, Homo sapien
ggtagcaaagcttccttaggacact

SEQ ID NO: 4085713 - DNA, 25 bp, Homo sapien
catcattaagttcattggtgggctg

SEQ ID NO: 4085714 - DNA, 25 bp, Homo sapien
gggctgggtagcaaagcttccttag

SEQ ID NO: 4085715 - DNA, 25 bp, Homo sapien
caaagcttccttaggacacttagaa

SEQ ID NO: 4085716 - DNA, 25 bp, Homo sapien
tattatgtgtggtacaggatgacaa

SEQ ID NO: 4085717 - DNA, 25 bp, Homo sapien
cttaaactttattatgtgtggtaca

SEQ ID NO: 4085718 - DNA, 25 bp, Homo sapien
actttattatgtgtggtacaggatg

SEQ ID NO: 4085719 - DNA, 25 bp, Homo sapien
aatgggtacaagagaccaaatagaa

SEQ ID NO: 4085720 - DNA, 25 bp, Homo sapien
aaatagcttcagatcttttgcatta

SEQ ID NO: 4085721 - DNA, 25 bp, Homo sapien
aaacaggtcccgtggcattttcatg

SEQ ID NO: 4085722 - DNA, 25 bp, Homo sapien
ttgccttcataatgagtctgattac

SEQ ID NO: 4085723 - DNA, 25 bp, Homo sapien
tttgcattacgcattcttttgcctt

SEQ ID NO: 4085724 - DNA, 25 bp, Homo sapien
gtaacagagccaaccataaaaacaa

SEQ ID NO: 4085725 - DNA, 25 bp, Homo sapien
ctgtaacagagccaaccataaaaac

SEQ ID NO: 4085726 - DNA, 25 bp, Homo sapien
cataaaaacaaaatcaatcagcagc

SEQ ID NO: 4085727 - DNA, 25 bp, Homo sapien
taaaaacaaaatcaatcagcagcat

SEQ ID NO: 4085728 - DNA, 25 bp, Homo sapien
ttttcaactgactgtactgatgtcc

SEQ ID NO: 4085729 - DNA, 25 bp, Homo sapien
actgactgtactgatgtcctgtaaa

SEQ ID NO: 4085730 - DNA, 25 bp, Homo sapien
caactgactgtactgatgtcctgta

SEQ ID NO: 4085731 - DNA, 25 bp, Homo sapien
gactgtactgatgtcctgtaaatac

SEQ ID NO: 4085732 - DNA, 25 bp, Homo sapien
tctaaggggtgactctcctacgcaa

SEQ ID NO: 4085733 - DNA, 25 bp, Homo sapien
tcaggcctgagtagccacatccctt

SEQ ID NO: 4085734 - DNA, 25 bp, Homo sapien
tagtctctgaagaggcctctaaggg

SEQ ID NO: 4085735 - DNA, 25 bp, Homo sapien
ggtgactctcctacgcaatctaata

SEQ ID NO: 4085736 - DNA, 25 bp, Homo sapien
ttttgactgcggatctcagaggacc

SEQ ID NO: 4085737 - DNA, 25 bp, Homo sapien
cggatctcagaggaccaagagggct

SEQ ID NO: 4085738 - DNA, 25 bp, Homo sapien
tcagaggaccaagagggctcaaagg

SEQ ID NO: 4085739 - DNA, 25 bp, Homo sapien
gcttcttgttttgactgcggatctc

SEQ ID NO: 4085740 - DNA, 25 bp, Homo sapien
gatgaacacatggcctcaataatgc

SEQ ID NO: 4085741 - DNA, 25 bp, Homo sapien
cccagtgttgtcttcaacaatacgc

SEQ ID NO: 4085742 - DNA, 25 bp, Homo sapien
caatacgcttggtttgggtacaagg

SEQ ID NO: 4085743 - DNA, 25 bp, Homo sapien
caaatcttccaggaagtttcccatt

SEQ ID NO: 4085744 - DNA, 25 bp, Homo sapien
agataaccaggttattataactgac

SEQ ID NO: 4085745 - DNA, 25 bp, Homo sapien
ataaccaggttattataactgacat

SEQ ID NO: 4085746 - DNA, 25 bp, Homo sapien
gataaccaggttattataactgaca

SEQ ID NO: 4085747 - DNA, 25 bp, Homo sapien
ttagataaccaggttattataactg

SEQ ID NO: 4085748 - DNA, 25 bp, Homo sapien
tagggaaggtccacaattgcagccg

SEQ ID NO: 4085749 - DNA, 25 bp, Homo sapien
ccagggcgggacttgagtttcaaca

SEQ ID NO: 4085750 - DNA, 25 bp, Homo sapien
tccaccgtctgagagaatagggctc

SEQ ID NO: 4085751 - DNA, 25 bp, Homo sapien
aaaacggtcctgtggctctcagtgg

SEQ ID NO: 4085752 - DNA, 25 bp, Homo sapien
ggaattcctgcttgtatatcatttg

SEQ ID NO: 4085753 - DNA, 25 bp, Homo sapien
agtgtaattgatctggttgtctgca

SEQ ID NO: 4085754 - DNA, 25 bp, Homo sapien
cttttgtagatcaggtacaccccta

SEQ ID NO: 4085755 - DNA, 25 bp, Homo sapien
gcataaaatgtaaggcaacaggctg

SEQ ID NO: 4085756 - DNA, 25 bp, Homo sapien
cccacactgacccactgacatagcc

SEQ ID NO: 4085757 - DNA, 25 bp, Homo sapien
cacactgacccactgacatagccat

SEQ ID NO: 4085758 - DNA, 25 bp, Homo sapien
atccccacactgacccactgacata

SEQ ID NO: 4085759 - DNA, 25 bp, Homo sapien
ctgccatccccacactgacccactg

SEQ ID NO: 4085760 - DNA, 25 bp, Homo sapien
cttatgtgacttttggcattgttca

SEQ ID NO: 4085761 - DNA, 25 bp, Homo sapien
tggctctgcgagtctcttcacactg

SEQ ID NO: 4085762 - DNA, 25 bp, Homo sapien
ggctgaggagccaagacagcttttg

SEQ ID NO: 4085763 - DNA, 25 bp, Homo sapien
cttttgtgtatgaaatgaaggtgac

SEQ ID NO: 4085764 - DNA, 25 bp, Homo sapien
tcatatccgacttgcatctttgccc

SEQ ID NO: 4085765 - DNA, 25 bp, Homo sapien
tgtcacactcctgattacaaatctt

SEQ ID NO: 4085766 - DNA, 25 bp, Homo sapien
cctgcataagccacaaggtacgctg

SEQ ID NO: 4085767 - DNA, 25 bp, Homo sapien
tccttcactcctagatggttgatat

SEQ ID NO: 4085768 - DNA, 25 bp, Homo sapien
gctgacaattctgctacataagccc

SEQ ID NO: 4085769 - DNA, 25 bp, Homo sapien
cagaaattcgtagttgtcgttataa

SEQ ID NO: 4085770 - DNA, 25 bp, Homo sapien
tcgtagttgtcgttataatagagac

SEQ ID NO: 4085771 - DNA, 25 bp, Homo sapien
cggtgctcagaaattcgtagttgtc

SEQ ID NO: 4085772 - DNA, 25 bp, Homo sapien
acaggatcggtgctcagaaattcgt

SEQ ID NO: 4085773 - DNA, 25 bp, Homo sapien
gaggtgagtgatgagcacagctacc

SEQ ID NO: 4085774 - DNA, 25 bp, Homo sapien
gggaggtgagtgatgagcacagcta

SEQ ID NO: 4085775 - DNA, 25 bp, Homo sapien
cagggaggtgagtgatgagcacagc

SEQ ID NO: 4085776 - DNA, 25 bp, Homo sapien
ggtgagtgatgagcacagctaccat

SEQ ID NO: 4085777 - DNA, 25 bp, Homo sapien
tttctccagctggtcggtacagatt

SEQ ID NO: 4085778 - DNA, 25 bp, Homo sapien
ccatcctgtgtataaagtggagtct

SEQ ID NO: 4085779 - DNA, 25 bp, Homo sapien
tctggccatcctgtgtataaagtgg

SEQ ID NO: 4085780 - DNA, 25 bp, Homo sapien
gtacagattcgctgagatgcccact

SEQ ID NO: 4085781 - DNA, 25 bp, Homo sapien
gacgatggatgtccttgcgagccat

SEQ ID NO: 4085782 - DNA, 25 bp, Homo sapien
gataaggttgctaacatagtcaggg

SEQ ID NO: 4085783 - DNA, 25 bp, Homo sapien
aattagattcagatgataaggttgc

SEQ ID NO: 4085784 - DNA, 25 bp, Homo sapien
gcaagacgatggatgtccttgcgag

SEQ ID NO: 4085785 - DNA, 25 bp, Homo sapien
tccaatgcgtgttgtcctaagtacc

SEQ ID NO: 4085786 - DNA, 25 bp, Homo sapien
catgagtagatttacagcagccttg

SEQ ID NO: 4085787 - DNA, 25 bp, Homo sapien
gccaagttcatggacgcgtagacca

SEQ ID NO: 4085788 - DNA, 25 bp, Homo sapien
gaaagtgcccataattgatgaaaga

SEQ ID NO: 4085789 - DNA, 25 bp, Homo sapien
tgtggtagatccatcagtctctgtg

SEQ ID NO: 4085790 - DNA, 25 bp, Homo sapien
ggtagatccatcagtctctgtggct

SEQ ID NO: 4085791 - DNA, 25 bp, Homo sapien
tgcatgtggtagatccatcagtctc

SEQ ID NO: 4085792 - DNA, 25 bp, Homo sapien
tcccagtgcatgtggtagatccatc

SEQ ID NO: 4085793 - DNA, 25 bp, Homo sapien
taaatcagagtttacgtccttcgga

SEQ ID NO: 4085794 - DNA, 25 bp, Homo sapien
gtccttcggaagattgagtgctgca

SEQ ID NO: 4085795 - DNA, 25 bp, Homo sapien
catctaccactaagggaagggcgca

SEQ ID NO: 4085796 - DNA, 25 bp, Homo sapien
tgcaagagatgtgcctccaccagta

SEQ ID NO: 4085797 - DNA, 25 bp, Homo sapien
tccaatgctacttcacccaactgtg

SEQ ID NO: 4085798 - DNA, 25 bp, Homo sapien
aagcacctgctgtgaatccaatgct

SEQ ID NO: 4085799 - DNA, 25 bp, Homo sapien
cctgctgtgaatccaatgctacttc

SEQ ID NO: 4085800 - DNA, 25 bp, Homo sapien
tgaatccaatgctacttcacccaac

SEQ ID NO: 4085801 - DNA, 25 bp, Homo sapien
cccctttcaggcctgaccatttcat

SEQ ID NO: 4085802 - DNA, 25 bp, Homo sapien
aacagaacctcccatgagctaacac

SEQ ID NO: 4085803 - DNA, 25 bp, Homo sapien
gctaacacccctttcaggcctgacc

SEQ ID NO: 4085804 - DNA, 25 bp, Homo sapien
gaagttggaagaacagaacctccca

SEQ ID NO: 4085805 - DNA, 25 bp, Homo sapien
tttcagcatgctgttcacctattct

SEQ ID NO: 4085806 - DNA, 25 bp, Homo sapien
gtttcagcatgctgttcacctattc

SEQ ID NO: 4085807 - DNA, 25 bp, Homo sapien
ttcagcatgctgttcacctattctc

SEQ ID NO: 4085808 - DNA, 25 bp, Homo sapien
ggaaatgcagtcctctctgttcagg

SEQ ID NO: 4085809 - DNA, 25 bp, Homo sapien
gggaaatgcagtcctctctgttcag

SEQ ID NO: 4085810 - DNA, 25 bp, Homo sapien
tgggaaatgcagtcctctctgttca

SEQ ID NO: 4085811 - DNA, 25 bp, Homo sapien
gcggacacctccctgtaaggctcat

SEQ ID NO: 4085812 - DNA, 25 bp, Homo sapien
taaggctcatactgaacttccaagt

SEQ ID NO: 4085813 - DNA, 25 bp, Homo sapien
tgtgtctgtcttgtggcccattggc

SEQ ID NO: 4085814 - DNA, 25 bp, Homo sapien
ccaagtatcctggaggtgtgtgtct

SEQ ID NO: 4085815 - DNA, 25 bp, Homo sapien
acctttctcacttccttcgcacagg

SEQ ID NO: 4085816 - DNA, 25 bp, Homo sapien
ccttcgcacaggctttgatcctaat

SEQ ID NO: 4085817 - DNA, 25 bp, Homo sapien
caccacctttctcacttccttcgca

SEQ ID NO: 4085818 - DNA, 25 bp, Homo sapien
ttccttcgcacaggctttgatccta

SEQ ID NO: 4085819 - DNA, 25 bp, Homo sapien
ggacacagcatctgctaggcatatt

SEQ ID NO: 4085820 - DNA, 25 bp, Homo sapien
gacttggcaagctcgaggcagaatg

SEQ ID NO: 4085821 - DNA, 25 bp, Homo sapien
cagaatgaagggataaacagaatcc

SEQ ID NO: 4085822 - DNA, 25 bp, Homo sapien
tcctctgcaagtaggctcatgactt

SEQ ID NO: 4085823 - DNA, 25 bp, Homo sapien
gaaccttcgttgatttgacccagag

SEQ ID NO: 4085824 - DNA, 25 bp, Homo sapien
gagtgaatcccaaactaatagcaag

SEQ ID NO: 4085825 - DNA, 25 bp, Homo sapien
tgaggaaaccaatgtgcataccagg

SEQ ID NO: 4085826 - DNA, 25 bp, Homo sapien
gacccagagctgtaaaccatagttg

SEQ ID NO: 4085827 - DNA, 25 bp, Homo sapien
tgttgggtgattatcaaagcagatt

SEQ ID NO: 4085828 - DNA, 25 bp, Homo sapien
agcagatttcaaagttttggatcat

SEQ ID NO: 4085829 - DNA, 25 bp, Homo sapien
caggtgttgggtgattatcaaagca

SEQ ID NO: 4085830 - DNA, 25 bp, Homo sapien
tccaggtgttgggtgattatcaaag

SEQ ID NO: 4085831 - DNA, 25 bp, Homo sapien
gtttgggcatccttgactctggggc

SEQ ID NO: 4085832 - DNA, 25 bp, Homo sapien
catggtccccacaggtattggcaga

SEQ ID NO: 4085833 - DNA, 25 bp, Homo sapien
cacattctatcctcctgccatcctg

SEQ ID NO: 4085834 - DNA, 25 bp, Homo sapien
gggacagcccttcatgaagctttgt

SEQ ID NO: 4085835 - DNA, 25 bp, Homo sapien
gctgtggtggtctcataggccatat

SEQ ID NO: 4085836 - DNA, 25 bp, Homo sapien
cataaagtacaccaaacatgcatct

SEQ ID NO: 4085837 - DNA, 25 bp, Homo sapien
atgcatctctgcgtcattgcttgca

SEQ ID NO: 4085838 - DNA, 25 bp, Homo sapien
gacatatgacctttagcttcataaa

SEQ ID NO: 4085839 - DNA, 25 bp, Homo sapien
taaccattgaaactaaatcgggtca

SEQ ID NO: 4085840 - DNA, 25 bp, Homo sapien
tatggttagaacagatagcaaggta

SEQ ID NO: 4085841 - DNA, 25 bp, Homo sapien
ttctcaaaggtctaggatgctctcc

SEQ ID NO: 4085842 - DNA, 25 bp, Homo sapien
tatagttgaattgtcagcctcacca

SEQ ID NO: 4085843 - DNA, 25 bp, Homo sapien
gaatcttcataccaatcaaatctcc

SEQ ID NO: 4085844 - DNA, 25 bp, Homo sapien
ggtcatcccgcttcaggtgtctact

SEQ ID NO: 4085845 - DNA, 25 bp, Homo sapien
ccccaaaaatgatttgaatcttcat

SEQ ID NO: 4085846 - DNA, 25 bp, Homo sapien
ctggttatggtcatcccgcttcagg

SEQ ID NO: 4085847 - DNA, 25 bp, Homo sapien
tcacccctaacctccacagacccac

SEQ ID NO: 4085848 - DNA, 25 bp, Homo sapien
attcagtgcctgctgactcttccag

SEQ ID NO: 4085849 - DNA, 25 bp, Homo sapien
tcattcagtgcctgctgactcttcc

SEQ ID NO: 4085850 - DNA, 25 bp, Homo sapien
cttccagttcatcctgcccgctcac

SEQ ID NO: 4085851 - DNA, 25 bp, Homo sapien
tgtcctctcgtatttaaggatttgt

SEQ ID NO: 4085852 - DNA, 25 bp, Homo sapien
gctctgtcctctcgtatttaaggat

SEQ ID NO: 4085853 - DNA, 25 bp, Homo sapien
ttttatcccagtcacgcctataaaa

SEQ ID NO: 4085854 - DNA, 25 bp, Homo sapien
cagtcacgcctataaaaactgcctt

SEQ ID NO: 4085855 - DNA, 25 bp, Homo sapien
tgagtccttcaattccagagcttag

SEQ ID NO: 4085856 - DNA, 25 bp, Homo sapien
tacatgtagcttcatcctggaaact

SEQ ID NO: 4085857 - DNA, 25 bp, Homo sapien
ccagagcttaggactgtggaattac

SEQ ID NO: 4085858 - DNA, 25 bp, Homo sapien
gatgatctacggttcttaatacgtg

SEQ ID NO: 4085859 - DNA, 25 bp, Homo sapien
ccagccagcattgagcaggatctgc

SEQ ID NO: 4085860 - DNA, 25 bp, Homo sapien
tggtgttctttgcagagctcagatc

SEQ ID NO: 4085861 - DNA, 25 bp, Homo sapien
caggatctgctaccattgccttaca

SEQ ID NO: 4085862 - DNA, 25 bp, Homo sapien
tgctgatgtaaattcaccatcccca

SEQ ID NO: 4085863 - DNA, 25 bp, Homo sapien
ttaaagctctgatcctaggggggta

SEQ ID NO: 4085864 - DNA, 25 bp, Homo sapien
gagcctttaaagctctgatcctagg

SEQ ID NO: 4085865 - DNA, 25 bp, Homo sapien
gctctgatcctaggggggtaactaa

SEQ ID NO: 4085866 - DNA, 25 bp, Homo sapien
gggtaactaaggctggcatctgcca

SEQ ID NO: 4085867 - DNA, 25 bp, Homo sapien
ctcttgcctgtacatatccaacttc

SEQ ID NO: 4085868 - DNA, 25 bp, Homo sapien
gcctgtacatatccaacttccgcat

SEQ ID NO: 4085869 - DNA, 25 bp, Homo sapien
caacttccgcattacaaatttggct

SEQ ID NO: 4085870 - DNA, 25 bp, Homo sapien
tacatatccaacttccgcattacaa

SEQ ID NO: 4085871 - DNA, 25 bp, Homo sapien
tgcttttatagccatattcatactg

SEQ ID NO: 4085872 - DNA, 25 bp, Homo sapien
ctttctagtcacttcctgatgtctg

SEQ ID NO: 4085873 - DNA, 25 bp, Homo sapien
tttctagtcacttcctgatgtctgc

SEQ ID NO: 4085874 - DNA, 25 bp, Homo sapien
gatgtctgcttttatagccatattc

SEQ ID NO: 4085875 - DNA, 25 bp, Homo sapien
agtggtactcttaacactaagcacc

SEQ ID NO: 4085876 - DNA, 25 bp, Homo sapien
taaagtcggacttttcatccatagt

SEQ ID NO: 4085877 - DNA, 25 bp, Homo sapien
tggaacaattttgctgtagcttata

SEQ ID NO: 4085878 - DNA, 25 bp, Homo sapien
gctgcttttatatctaaagtcggac

SEQ ID NO: 4085879 - DNA, 25 bp, Homo sapien
agccataccgtttcattcccctggg

SEQ ID NO: 4085880 - DNA, 25 bp, Homo sapien
tctaacaccttgaacaaagcaaagt

SEQ ID NO: 4085881 - DNA, 25 bp, Homo sapien
ctgctctaacaccttgaacaaagca

SEQ ID NO: 4085882 - DNA, 25 bp, Homo sapien
aagcaaagtttgtcaggcagccata

SEQ ID NO: 4085883 - DNA, 25 bp, Homo sapien
gtccagctccttactgagatgcaca

SEQ ID NO: 4085884 - DNA, 25 bp, Homo sapien
agttttgacttgcatggtccagctc

SEQ ID NO: 4085885 - DNA, 25 bp, Homo sapien
tggtccagctccttactgagatgca

SEQ ID NO: 4085886 - DNA, 25 bp, Homo sapien
catggtccagctccttactgagatg

SEQ ID NO: 4085887 - DNA, 25 bp, Homo sapien
gtgagtccttgagaatggcattgag

SEQ ID NO: 4085888 - DNA, 25 bp, Homo sapien
caagggatgcctcatatgcctgtgt

SEQ ID NO: 4085889 - DNA, 25 bp, Homo sapien
tcaacggtacattctgggatctcag

SEQ ID NO: 4085890 - DNA, 25 bp, Homo sapien
gatctcagaaagtgtctgtctcttc

SEQ ID NO: 4085891 - DNA, 25 bp, Homo sapien
tagggatgaacagagaaataagcgc

SEQ ID NO: 4085892 - DNA, 25 bp, Homo sapien
tgaacagagaaataagcgctgatgc

SEQ ID NO: 4085893 - DNA, 25 bp, Homo sapien
agcgctgatgcgaatgcaggagaca

SEQ ID NO: 4085894 - DNA, 25 bp, Homo sapien
gagaaataagcgctgatgcgaatgc

SEQ ID NO: 4085895 - DNA, 25 bp, Homo sapien
ggccgtcctccaaacaagatcaatg

SEQ ID NO: 4085896 - DNA, 25 bp, Homo sapien
ctgatgcggttgtattgaagttgac

SEQ ID NO: 4085897 - DNA, 25 bp, Homo sapien
gaactgacaacacaaacgtctgatg

SEQ ID NO: 4085898 - DNA, 25 bp, Homo sapien
tggattccctataaagagttggctc

SEQ ID NO: 4085899 - DNA, 25 bp, Homo sapien
ttcttttcaagagccaattgtgcat

SEQ ID NO: 4085900 - DNA, 25 bp, Homo sapien
gagccaattgtgcatgactggtaga

SEQ ID NO: 4085901 - DNA, 25 bp, Homo sapien
ttttcaagagccaattgtgcatgac

SEQ ID NO: 4085902 - DNA, 25 bp, Homo sapien
tgtgcatgactggtagaagctttga

SEQ ID NO: 4085903 - DNA, 25 bp, Homo sapien
agaagcttttggtgcagcgtacacg

SEQ ID NO: 4085904 - DNA, 25 bp, Homo sapien
cagtcccattgggaataggaccaag

SEQ ID NO: 4085905 - DNA, 25 bp, Homo sapien
tctggtaataccctttgtggcacct

SEQ ID NO: 4085906 - DNA, 25 bp, Homo sapien
ggatggtgcaattttccaacttccc

SEQ ID NO: 4085907 - DNA, 25 bp, Homo sapien
ctcattatacccttgttcgttttct

SEQ ID NO: 4085908 - DNA, 25 bp, Homo sapien
ccggttgagatgacagacgtccttt

SEQ ID NO: 4085909 - DNA, 25 bp, Homo sapien
tgtatttccggttgagatgacagac

SEQ ID NO: 4085910 - DNA, 25 bp, Homo sapien
gagatgacagacgtcctttttgtgc

SEQ ID NO: 4085911 - DNA, 25 bp, Homo sapien
ccggactgtatttccggttgagatg

SEQ ID NO: 4085912 - DNA, 25 bp, Homo sapien
tttgtgcgtgtaaggaggcaatccc

SEQ ID NO: 4085913 - DNA, 25 bp, Homo sapien
ctgttgctttctatgatgtgtgtgt

SEQ ID NO: 4085914 - DNA, 25 bp, Homo sapien
tgtgtgatgtttgtgcgtgtaagga

SEQ ID NO: 4085915 - DNA, 25 bp, Homo sapien
atgtttgtgcgtgtaaggaggcaat

SEQ ID NO: 4085916 - DNA, 25 bp, Homo sapien
ccatggacacacttgcagggagtag

SEQ ID NO: 4085917 - DNA, 25 bp, Homo sapien
cagggagtagtggtgattctaagtt

SEQ ID NO: 4085918 - DNA, 25 bp, Homo sapien
tagtggtgattctaagttggacgag

SEQ ID NO: 4085919 - DNA, 25 bp, Homo sapien
aaatacttggggatgtttagcacca

SEQ ID NO: 4085920 - DNA, 25 bp, Homo sapien
catcacatgaatgcacataaatcac

SEQ ID NO: 4085921 - DNA, 25 bp, Homo sapien
ggcaaacatcgtcctctcgttgaga

SEQ ID NO: 4085922 - DNA, 25 bp, Homo sapien
tctcgttgagattctgaaccatcac

SEQ ID NO: 4085923 - DNA, 25 bp, Homo sapien
gtacagcagtggcaaacatcgtcct

SEQ ID NO: 4085924 - DNA, 25 bp, Homo sapien
tcagatttttccacttcccttattc

SEQ ID NO: 4085925 - DNA, 25 bp, Homo sapien
ttctctttggggcttctgcaaatcc

SEQ ID NO: 4085926 - DNA, 25 bp, Homo sapien
cacttcccttattctctttggggct

SEQ ID NO: 4085927 - DNA, 25 bp, Homo sapien
cagatttttccacttcccttattct

SEQ ID NO: 4085928 - DNA, 25 bp, Homo sapien
ttcctggattatgatgttgcttcct

SEQ ID NO: 4085929 - DNA, 25 bp, Homo sapien
tcctggattatgatgttgcttcctg

SEQ ID NO: 4085930 - DNA, 25 bp, Homo sapien
cctggattatgatgttgcttcctgc

SEQ ID NO: 4085931 - DNA, 25 bp, Homo sapien
ctggattatgatgttgcttcctgca

SEQ ID NO: 4085932 - DNA, 25 bp, Homo sapien
tcttctgtcgtttttgctgcgatga

SEQ ID NO: 4085933 - DNA, 25 bp, Homo sapien
ttctgtcgtttttgctgcgatgacc

SEQ ID NO: 4085934 - DNA, 25 bp, Homo sapien
gaccacaactcctggtgatgtttcc

SEQ ID NO: 4085935 - DNA, 25 bp, Homo sapien
ctcttccactggttgttcagtttcc

SEQ ID NO: 4085936 - DNA, 25 bp, Homo sapien
ttgtccactgtgtgacttttagggc

SEQ ID NO: 4085937 - DNA, 25 bp, Homo sapien
agcctttgcagtacctctccacgtc

SEQ ID NO: 4085938 - DNA, 25 bp, Homo sapien
ctctccacgtcagcagagtatatac

SEQ ID NO: 4085939 - DNA, 25 bp, Homo sapien
caattcttcgcttcccataatagga

SEQ ID NO: 4085940 - DNA, 25 bp, Homo sapien
taaaattctctgactagctgcaatg

SEQ ID NO: 4085941 - DNA, 25 bp, Homo sapien
ccttagccttggtggagatagctgc

SEQ ID NO: 4085942 - DNA, 25 bp, Homo sapien
tgtctcctggttgaccttaggggtg

SEQ ID NO: 4085943 - DNA, 25 bp, Homo sapien
cttagttcttctcttcccttagcct

SEQ ID NO: 4085944 - DNA, 25 bp, Homo sapien
ctggttgaccttaggggtggtcttg

SEQ ID NO: 4085945 - DNA, 25 bp, Homo sapien
attttattcttacaaattgctggca

SEQ ID NO: 4085946 - DNA, 25 bp, Homo sapien
ttttattcttacaaattgctggcat

SEQ ID NO: 4085947 - DNA, 25 bp, Homo sapien
cattttattcttacaaattgctggc

SEQ ID NO: 4085948 - DNA, 25 bp, Homo sapien
tgaagacagcatggaccgtgctcac

SEQ ID NO: 4085949 - DNA, 25 bp, Homo sapien
ctgagctttccacgggctgagaatg

SEQ ID NO: 4085950 - DNA, 25 bp, Homo sapien
catggaccgtgctcactggttgaga

SEQ ID NO: 4085951 - DNA, 25 bp, Homo sapien
agaggggatgacaagtctggcccct

SEQ ID NO: 4085952 - DNA, 25 bp, Homo sapien
gctctcgtaccacctgcgacaaaat

SEQ ID NO: 4085953 - DNA, 25 bp, Homo sapien
ttgctctcgtaccacctgcgacaaa

SEQ ID NO: 4085954 - DNA, 25 bp, Homo sapien
cactctggatcagagttcctgtgtg

SEQ ID NO: 4085955 - DNA, 25 bp, Homo sapien
tctcgtaccacctgcgacaaaatca

SEQ ID NO: 4085956 - DNA, 25 bp, Homo sapien
agactggttgtacttctccctgctc

SEQ ID NO: 4085957 - DNA, 25 bp, Homo sapien
ttctccttcactaccccagaagtgg

SEQ ID NO: 4085958 - DNA, 25 bp, Homo sapien
ggagactggttgtacttctccctgc

SEQ ID NO: 4085959 - DNA, 25 bp, Homo sapien
ctccttcactaccccagaagtggag

SEQ ID NO: 4085960 - DNA, 25 bp, Homo sapien
tggcttagccaggtagcaagttgca

SEQ ID NO: 4085961 - DNA, 25 bp, Homo sapien
tctgaggacttcaggatgtggaagt

SEQ ID NO: 4085962 - DNA, 25 bp, Homo sapien
tgtggaagtcatagatggcttagcc

SEQ ID NO: 4085963 - DNA, 25 bp, Homo sapien
tgctctgacaccagtatttccccag

SEQ ID NO: 4085964 - DNA, 25 bp, Homo sapien
ggcaatgcagttggggggcacttga

SEQ ID NO: 4085965 - DNA, 25 bp, Homo sapien
cctccttctcatggtaaatagaggc

SEQ ID NO: 4085966 - DNA, 25 bp, Homo sapien
ctccttctcatggtaaatagaggca

SEQ ID NO: 4085967 - DNA, 25 bp, Homo sapien
gcttatacttggaggaccatgatgt

SEQ ID NO: 4085968 - DNA, 25 bp, Homo sapien
ggcttatacttggaggaccatgatg

SEQ ID NO: 4085969 - DNA, 25 bp, Homo sapien
aggcttggcacatccagacccacag

SEQ ID NO: 4085970 - DNA, 25 bp, Homo sapien
gcctggtaatgggttgtcataggct

SEQ ID NO: 4085971 - DNA, 25 bp, Homo sapien
ggtgaggctgagtggttgtgttcat

SEQ ID NO: 4085972 - DNA, 25 bp, Homo sapien
gtggcctggtaatgggttgtcatag

SEQ ID NO: 4085973 - DNA, 25 bp, Homo sapien
cctggtaatgggttgtcataggctg

SEQ ID NO: 4085974 - DNA, 25 bp, Homo sapien
ttctccggggctttcaatagggtca

SEQ ID NO: 4085975 - DNA, 25 bp, Homo sapien
gaaggtttgcatcaagcaagagtgg

SEQ ID NO: 4085976 - DNA, 25 bp, Homo sapien
ggatcctctaataaattgttctggg

SEQ ID NO: 4085977 - DNA, 25 bp, Homo sapien
caatcactgcttaatctaggaaggt

SEQ ID NO: 4085978 - DNA, 25 bp, Homo sapien
agtaggcaccgctcctgggtcaata

SEQ ID NO: 4085979 - DNA, 25 bp, Homo sapien
tttttctggctaccacactcatggg

SEQ ID NO: 4085980 - DNA, 25 bp, Homo sapien
ggcacattgccagttgattctcaag

SEQ ID NO: 4085981 - DNA, 25 bp, Homo sapien
ggaacacagtcatatctgcagtagg

SEQ ID NO: 4085982 - DNA, 25 bp, Homo sapien
cttttagcactgttccttactcttc

SEQ ID NO: 4085983 - DNA, 25 bp, Homo sapien
gaaagtaatcccctttgctgccact

SEQ ID NO: 4085984 - DNA, 25 bp, Homo sapien
cttactcttccctctaccgctgcct

SEQ ID NO: 4085985 - DNA, 25 bp, Homo sapien
cagagggagccagtctttactgtct

SEQ ID NO: 4085986 - DNA, 25 bp, Homo sapien
tcaggagctgaaagaatgtcgcttc

SEQ ID NO: 4085987 - DNA, 25 bp, Homo sapien
ggagcctactggctcccagctgcaa

SEQ ID NO: 4085988 - DNA, 25 bp, Homo sapien
tggtagctgcagttgcttaaaacac

SEQ ID NO: 4085989 - DNA, 25 bp, Homo sapien
cattgcgggagcctactggctccca

SEQ ID NO: 4085990 - DNA, 25 bp, Homo sapien
gatgaggagaatggcagtttgaggt

SEQ ID NO: 4085991 - DNA, 25 bp, Homo sapien
atgatgaggagaatggcagtttgag

SEQ ID NO: 4085992 - DNA, 25 bp, Homo sapien
tgatgaggagaatggcagtttgagg

SEQ ID NO: 4085993 - DNA, 25 bp, Homo sapien
ttttgcacaacaccagctctccata

SEQ ID NO: 4085994 - DNA, 25 bp, Homo sapien
aaataaagggcactctctccatctg

SEQ ID NO: 4085995 - DNA, 25 bp, Homo sapien
gctctccatacccagaaacttgcaa

SEQ ID NO: 4085996 - DNA, 25 bp, Homo sapien
aatgtcaccagcatgattagcgcct

SEQ ID NO: 4085997 - DNA, 25 bp, Homo sapien
gccagggacgtggagcacaagattt

SEQ ID NO: 4085998 - DNA, 25 bp, Homo sapien
tagtgttgctgtggctaaagccagg

SEQ ID NO: 4085999 - DNA, 25 bp, Homo sapien
ctaaagccagggacgtggagcacaa

SEQ ID NO: 4086000 - DNA, 25 bp, Homo sapien
ttgctgtggctaaagccagggacgt

SEQ ID NO: 4086001 - DNA, 25 bp, Homo sapien
ccagggctggtccattgtcaatgct

SEQ ID NO: 4086002 - DNA, 25 bp, Homo sapien
tcacactcaacaccccagagtcatg

SEQ ID NO: 4086003 - DNA, 25 bp, Homo sapien
gctggtccattgtcaatgctgtctc

SEQ ID NO: 4086004 - DNA, 25 bp, Homo sapien
gtccattgtcaatgctgtctcttct

SEQ ID NO: 4086005 - DNA, 25 bp, Homo sapien
gaaatgagtgattctgatggtggcc

SEQ ID NO: 4086006 - DNA, 25 bp, Homo sapien
gatggtggcctctagatgaccacac

SEQ ID NO: 4086007 - DNA, 25 bp, Homo sapien
gaggtccctgtctttaggaaatgag

SEQ ID NO: 4086008 - DNA, 25 bp, Homo sapien
cagtcaggaccgaagttgttgttaa

SEQ ID NO: 4086009 - DNA, 25 bp, Homo sapien
caagccgatgacattttgattgcag

SEQ ID NO: 4086010 - DNA, 25 bp, Homo sapien
cactcggagaggcattgtggaactt

SEQ ID NO: 4086011 - DNA, 25 bp, Homo sapien
gcaggccccactcggagaggcattg

SEQ ID NO: 4086012 - DNA, 25 bp, Homo sapien
gatgacattttgattgcaggcccca

SEQ ID NO: 4086013 - DNA, 25 bp, Homo sapien
tctgtctccagcgtctggggtcgtc

SEQ ID NO: 4086014 - DNA, 25 bp, Homo sapien
tcgtttcgccaggaaactgcaggtg

SEQ ID NO: 4086015 - DNA, 25 bp, Homo sapien
tctccagcgtctggggtcgtcattt

SEQ ID NO: 4086016 - DNA, 25 bp, Homo sapien
tcacctcgtttcgccaggaaactgc

SEQ ID NO: 4086017 - DNA, 25 bp, Homo sapien
cttggaacagtgttgggaaggccat

SEQ ID NO: 4086018 - DNA, 25 bp, Homo sapien
actacaggatggcagtgtttggcct

SEQ ID NO: 4086019 - DNA, 25 bp, Homo sapien
cagtgtttggccttggaacagtgtt

SEQ ID NO: 4086020 - DNA, 25 bp, Homo sapien
gaaggagtaaggctctaggactaca

SEQ ID NO: 4086021 - DNA, 25 bp, Homo sapien
ggttgctgactcagatacaaaccga

SEQ ID NO: 4086022 - DNA, 25 bp, Homo sapien
cgacggcgtgcaggagttcaattcc

SEQ ID NO: 4086023 - DNA, 25 bp, Homo sapien
ttttgcaattctacccattggctga

SEQ ID NO: 4086024 - DNA, 25 bp, Homo sapien
gttcaattccatccaactttggctg

SEQ ID NO: 4086025 - DNA, 25 bp, Homo sapien
cattctctcaatctcttgtggtatc

SEQ ID NO: 4086026 - DNA, 25 bp, Homo sapien
ggattcacacccataactaagaagg

SEQ ID NO: 4086027 - DNA, 25 bp, Homo sapien
gctgaagtcctcattgtgaatctgt

SEQ ID NO: 4086028 - DNA, 25 bp, Homo sapien
agaaggtctgccctgaataaaatcc

SEQ ID NO: 4086029 - DNA, 25 bp, Homo sapien
agtgtacaggagattgctgaagtcc

SEQ ID NO: 4086030 - DNA, 25 bp, Homo sapien
acagattaattatatcgactgctgg

SEQ ID NO: 4086031 - DNA, 25 bp, Homo sapien
tttccaacagattaattatatcgac

SEQ ID NO: 4086032 - DNA, 25 bp, Homo sapien
taattatatcgactgctggctgttt

SEQ ID NO: 4086033 - DNA, 25 bp, Homo sapien
gattaattatatcgactgctggctg

SEQ ID NO: 4086034 - DNA, 25 bp, Homo sapien
gtagaactttgtaagtacaacctca

SEQ ID NO: 4086035 - DNA, 25 bp, Homo sapien
tcattgctcatgtggtagaactttg

SEQ ID NO: 4086036 - DNA, 25 bp, Homo sapien
tttgtaagtacaacctcatgtctag

SEQ ID NO: 4086037 - DNA, 25 bp, Homo sapien
taagtacaacctcatgtctagaaga

SEQ ID NO: 4086038 - DNA, 25 bp, Homo sapien
accacctctgcttttagaagcttca

SEQ ID NO: 4086039 - DNA, 25 bp, Homo sapien
acaaccacctctgcttttagaagct

SEQ ID NO: 4086040 - DNA, 25 bp, Homo sapien
acctctgcttttagaagcttcaaca

SEQ ID NO: 4086041 - DNA, 25 bp, Homo sapien
cacaaccacctctgcttttagaagc

SEQ ID NO: 4086042 - DNA, 25 bp, Homo sapien
cacttgtggctcagcaagtgggcac

SEQ ID NO: 4086043 - DNA, 25 bp, Homo sapien
catctgaactctgctgcatgcgcac

SEQ ID NO: 4086044 - DNA, 25 bp, Homo sapien
tgctgcatgcgcacttgtggctcag

SEQ ID NO: 4086045 - DNA, 25 bp, Homo sapien
tgtggctcagcaagtgggcacagaa

SEQ ID NO: 4086046 - DNA, 25 bp, Homo sapien
tcatgggcctgaattgttcctcctg

SEQ ID NO: 4086047 - DNA, 25 bp, Homo sapien
acagagtggagggcttctagattcc

SEQ ID NO: 4086048 - DNA, 25 bp, Homo sapien
cttcctgggtgcgattccttccaca

SEQ ID NO: 4086049 - DNA, 25 bp, Homo sapien
ttccacatcgtgtggccatggctgc

SEQ ID NO: 4086050 - DNA, 25 bp, Homo sapien
gtctgcacgatggcttgaatttctc

SEQ ID NO: 4086051 - DNA, 25 bp, Homo sapien
tgaagacctctaccctcatcctgag

SEQ ID NO: 4086052 - DNA, 25 bp, Homo sapien
tctggtatgtgcctggtgaaatatt

SEQ ID NO: 4086053 - DNA, 25 bp, Homo sapien
cacagagcggccgtgagactgtctg

SEQ ID NO: 4086054 - DNA, 25 bp, Homo sapien
ttgctttgcgtctctggtatgtgcc

SEQ ID NO: 4086055 - DNA, 25 bp, Homo sapien
ctggtccgctctgtccacagagcgg

SEQ ID NO: 4086056 - DNA, 25 bp, Homo sapien
caacatttcctcgtggaacgattcc

SEQ ID NO: 4086057 - DNA, 25 bp, Homo sapien
gcacagcttctgagttcaacatttc

SEQ ID NO: 4086058 - DNA, 25 bp, Homo sapien
tttgtaacatgggaacgaagctgca

SEQ ID NO: 4086059 - DNA, 25 bp, Homo sapien
tgtaacatgggaacgaagctgcaca

SEQ ID NO: 4086060 - DNA, 25 bp, Homo sapien
gaatgttctctaagcccttccagtg

SEQ ID NO: 4086061 - DNA, 25 bp, Homo sapien
ttttctgagagactttgacagcacg

SEQ ID NO: 4086062 - DNA, 25 bp, Homo sapien
tgaacttttgtagaactgtcattgc

SEQ ID NO: 4086063 - DNA, 25 bp, Homo sapien
tttgacagcacggattccaagtctt

SEQ ID NO: 4086064 - DNA, 25 bp, Homo sapien
ccctaatggcattacctgacaggca

SEQ ID NO: 4086065 - DNA, 25 bp, Homo sapien
gattccttctgagcggttttccaag

SEQ ID NO: 4086066 - DNA, 25 bp, Homo sapien
tccatagccttagaagagtgcatcc

SEQ ID NO: 4086067 - DNA, 25 bp, Homo sapien
tccacagatggataagaccggccga

SEQ ID NO: 4086068 - DNA, 25 bp, Homo sapien
cccagccctctgcaaccatttgtct

SEQ ID NO: 4086069 - DNA, 25 bp, Homo sapien
catttgtctctttggttctctctcc

SEQ ID NO: 4086070 - DNA, 25 bp, Homo sapien
cttcccagccctctgcaaccatttg

SEQ ID NO: 4086071 - DNA, 25 bp, Homo sapien
ccatttgtctctttggttctctctc

SEQ ID NO: 4086072 - DNA, 25 bp, Homo sapien
ctgccaaagaaaaaccaggcaggag

SEQ ID NO: 4086073 - DNA, 25 bp, Homo sapien
ctcggaaggcatttttgctgtttac

SEQ ID NO: 4086074 - DNA, 25 bp, Homo sapien
gactaggaaatgtgtggattgcttg

SEQ ID NO: 4086075 - DNA, 25 bp, Homo sapien
gaatgattctcggaaggcatttttg

SEQ ID NO: 4086076 - DNA, 25 bp, Homo sapien
cttggtttggaatgattctcggaag

SEQ ID NO: 4086077 - DNA, 25 bp, Homo sapien
tgctagaatccaaggtgtggcatgg

SEQ ID NO: 4086078 - DNA, 25 bp, Homo sapien
gactgcttataacccaggcaactga

SEQ ID NO: 4086079 - DNA, 25 bp, Homo sapien
gcaactgagtcataacctccaggag

SEQ ID NO: 4086080 - DNA, 25 bp, Homo sapien
tggcatgggtatgcccaacagacag

SEQ ID NO: 4086081 - DNA, 25 bp, Homo sapien
taggcaaaacccaggtatctctaga

SEQ ID NO: 4086082 - DNA, 25 bp, Homo sapien
ctagatagggcagcaatttggacac

SEQ ID NO: 4086083 - DNA, 25 bp, Homo sapien
tggcttagtccagggaaagtaggga

SEQ ID NO: 4086084 - DNA, 25 bp, Homo sapien
gaactcataggattccacgggggaa

SEQ ID NO: 4086085 - DNA, 25 bp, Homo sapien
ggctagcgcgtaacccacactgctt

SEQ ID NO: 4086086 - DNA, 25 bp, Homo sapien
ccgagttgtgtcgtggatggctagc

SEQ ID NO: 4086087 - DNA, 25 bp, Homo sapien
tcttccccgcgtggcccgagttgtg

SEQ ID NO: 4086088 - DNA, 25 bp, Homo sapien
acactgcttctctcgctgtctgcgt

SEQ ID NO: 4086089 - DNA, 25 bp, Homo sapien
tataggacgaatactctgctatgtc

SEQ ID NO: 4086090 - DNA, 25 bp, Homo sapien
ccaagtgcctatggtcaggagtgac

SEQ ID NO: 4086091 - DNA, 25 bp, Homo sapien
tcaacacgtagggaagccaagtgcc

SEQ ID NO: 4086092 - DNA, 25 bp, Homo sapien
acaagcatttttcaacacgtaggga

SEQ ID NO: 4086093 - DNA, 25 bp, Homo sapien
actggcagctccaagtatcttactt

SEQ ID NO: 4086094 - DNA, 25 bp, Homo sapien
gataattgggtcttgactggcagct

SEQ ID NO: 4086095 - DNA, 25 bp, Homo sapien
ggcagctccaagtatcttacttgat

SEQ ID NO: 4086096 - DNA, 25 bp, Homo sapien
agtcttggataattgggtcttgact

SEQ ID NO: 4086097 - DNA, 25 bp, Homo sapien
gatgagtgtttgctaaggtccagcc

SEQ ID NO: 4086098 - DNA, 25 bp, Homo sapien
atcaggcactgacaatcgattgcag

SEQ ID NO: 4086099 - DNA, 25 bp, Homo sapien
gggatactccttgacttggtgcaga

SEQ ID NO: 4086100 - DNA, 25 bp, Homo sapien
tttataaatccggtgtccagggcca

SEQ ID NO: 4086101 - DNA, 25 bp, Homo sapien
gaccctgcatcatttgtgattggaa

SEQ ID NO: 4086102 - DNA, 25 bp, Homo sapien
gaatcaatttctgtagcttgggctc

SEQ ID NO: 4086103 - DNA, 25 bp, Homo sapien
tgagctcctatctgtgaccctgcat

SEQ ID NO: 4086104 - DNA, 25 bp, Homo sapien
gcttgggctcaaggccaaaattaga

SEQ ID NO: 4086105 - DNA, 25 bp, Homo sapien
tctctgcactgtggcagcgagcgga

SEQ ID NO: 4086106 - DNA, 25 bp, Homo sapien
gcagctgggccgctttaattggaga

SEQ ID NO: 4086107 - DNA, 25 bp, Homo sapien
tggagagcgggactccctctaaaac

SEQ ID NO: 4086108 - DNA, 25 bp, Homo sapien
cagccaatcccagcgcgaggctgtc

SEQ ID NO: 4086109 - DNA, 25 bp, Homo sapien
aatggccaagttcgcgggcctggga

SEQ ID NO: 4086110 - DNA, 25 bp, Homo sapien
tgaatggccaagttcgcgggcctgg

SEQ ID NO: 4086111 - DNA, 25 bp, Homo sapien
ctgaatggccaagttcgcgggcctg

SEQ ID NO: 4086112 - DNA, 25 bp, Homo sapien
tggccaagttcgcgggcctgggagg

SEQ ID NO: 4086113 - DNA, 25 bp, Homo sapien
tctcaggcagaggcgcgagggcgcg

SEQ ID NO: 4086114 - DNA, 25 bp, Homo sapien
gcttctcaggcagaggcgcgagggc

SEQ ID NO: 4086115 - DNA, 25 bp, Homo sapien
cttctcaggcagaggcgcgagggcg

SEQ ID NO: 4086116 - DNA, 25 bp, Homo sapien
gggtgggggaacagcgcctggcttc

SEQ ID NO: 4086117 - DNA, 25 bp, Homo sapien
taactcctgggttgaggtccttagc

SEQ ID NO: 4086118 - DNA, 25 bp, Homo sapien
gatgtgccagtagtttggcacactg

SEQ ID NO: 4086119 - DNA, 25 bp, Homo sapien
tgccagtagtttggcacactgcagg

SEQ ID NO: 4086120 - DNA, 25 bp, Homo sapien
ggtgatgtgccagtagtttggcaca

SEQ ID NO: 4086121 - DNA, 25 bp, Homo sapien
cgggtgatgtgccagtagtttggca

SEQ ID NO: 4086122 - DNA, 25 bp, Homo sapien
gatgtcctgaaaagctgctccacaa

SEQ ID NO: 4086123 - DNA, 25 bp, Homo sapien
cctgaaaagctgctccacaattccg

SEQ ID NO: 4086124 - DNA, 25 bp, Homo sapien
tcctgaaaagctgctccacaattcc

SEQ ID NO: 4086125 - DNA, 25 bp, Homo sapien
tgtcctgaaaagctgctccacaatt

SEQ ID NO: 4086126 - DNA, 25 bp, Homo sapien
tgaggatatttctaaacgaaggctc

SEQ ID NO: 4086127 - DNA, 25 bp, Homo sapien
tgttgtgctcttgaaggagtcctgc

SEQ ID NO: 4086128 - DNA, 25 bp, Homo sapien
caattgttccacgtggatttaagga

SEQ ID NO: 4086129 - DNA, 25 bp, Homo sapien
ctgcacctggtgagacagtagcagc

SEQ ID NO: 4086130 - DNA, 25 bp, Homo sapien
tacactgtagggatgaccagagttg

SEQ ID NO: 4086131 - DNA, 25 bp, Homo sapien
ctgtagggatgaccagagttgagat

SEQ ID NO: 4086132 - DNA, 25 bp, Homo sapien
actgttacactgtagggatgaccag

SEQ ID NO: 4086133 - DNA, 25 bp, Homo sapien
gatgaccagagttgagatgtggctc

SEQ ID NO: 4086134 - DNA, 25 bp, Homo sapien
ccagcagattgcacgggtcagtcac

SEQ ID NO: 4086135 - DNA, 25 bp, Homo sapien
cagatcctcttaacaaggagactgg

SEQ ID NO: 4086136 - DNA, 25 bp, Homo sapien
cagagctgggatctactttgccttc

SEQ ID NO: 4086137 - DNA, 25 bp, Homo sapien
ggagcacccgtgtgccgtggtagga

SEQ ID NO: 4086138 - DNA, 25 bp, Homo sapien
caaaatatagatgctctgaccttca

SEQ ID NO: 4086139 - DNA, 25 bp, Homo sapien
gaaacaggatagctggtggcacaga

SEQ ID NO: 4086140 - DNA, 25 bp, Homo sapien
ggccatctcactcagctaagaactg

SEQ ID NO: 4086141 - DNA, 25 bp, Homo sapien
gcacaagtaacaagatggatcccca

SEQ ID NO: 4086142 - DNA, 25 bp, Homo sapien
gagtgagatggccagcagacatccc

SEQ ID NO: 4086143 - DNA, 25 bp, Homo sapien
ccatatagtaataagcgatgacaac

SEQ ID NO: 4086144 - DNA, 25 bp, Homo sapien
ccttcagggagacttggtgtcagct

SEQ ID NO: 4086145 - DNA, 25 bp, Homo sapien
taatggccagccttcatagttattt

SEQ ID NO: 4086146 - DNA, 25 bp, Homo sapien
ttatatgtatatcccatgtgatcac

SEQ ID NO: 4086147 - DNA, 25 bp, Homo sapien
gtattcgctcgattactttatatgt

SEQ ID NO: 4086148 - DNA, 25 bp, Homo sapien
atgcaccaatctccagtattcgctc

SEQ ID NO: 4086149 - DNA, 25 bp, Homo sapien
tatgtatatcccatgtgatcaccat

SEQ ID NO: 4086150 - DNA, 25 bp, Homo sapien
gagcttagtgttgaacctgagccct

SEQ ID NO: 4086151 - DNA, 25 bp, Homo sapien
tctgagcctgggaactacttgccaa

SEQ ID NO: 4086152 - DNA, 25 bp, Homo sapien
tacctgtgtggaccctggcaaatag

SEQ ID NO: 4086153 - DNA, 25 bp, Homo sapien
taaaggcgttttagcatcagaagga

SEQ ID NO: 4086154 - DNA, 25 bp, Homo sapien
tcgtgaaaactcaaggcaatcagtg

SEQ ID NO: 4086155 - DNA, 25 bp, Homo sapien
tgctctagaaaaactctgctgcagg

SEQ ID NO: 4086156 - DNA, 25 bp, Homo sapien
tcagtgagtcagtaagccttgcagc

SEQ ID NO: 4086157 - DNA, 25 bp, Homo sapien
gaaatagaatacagacaagcactgg

SEQ ID NO: 4086158 - DNA, 25 bp, Homo sapien
tgaaacagaaactagtgaacggtcc

SEQ ID NO: 4086159 - DNA, 25 bp, Homo sapien
gagggcagggtcactttatgtctag

SEQ ID NO: 4086160 - DNA, 25 bp, Homo sapien
aaattcctgcatacttctgagcctg

SEQ ID NO: 4086161 - DNA, 25 bp, Homo sapien
tatcatatggtcttagaaaaccccg

SEQ ID NO: 4086162 - DNA, 25 bp, Homo sapien
gaactgatggaagggaactgttgct

SEQ ID NO: 4086163 - DNA, 25 bp, Homo sapien
cagaagcccaacctgccaaggtgga

SEQ ID NO: 4086164 - DNA, 25 bp, Homo sapien
ttttccaggttcaactcaagggaga

SEQ ID NO: 4086165 - DNA, 25 bp, Homo sapien
gagtgaagcatggtagtcccagacc

SEQ ID NO: 4086166 - DNA, 25 bp, Homo sapien
tgaaagtaaatcctctgcctgacct

SEQ ID NO: 4086167 - DNA, 25 bp, Homo sapien
ccaagaattgaagcaaggaattgcc

SEQ ID NO: 4086168 - DNA, 25 bp, Homo sapien
gggtcttgacaagggtctggacttc

SEQ ID NO: 4086169 - DNA, 25 bp, Homo sapien
gataactgcctgtccataacttaaa

SEQ ID NO: 4086170 - DNA, 25 bp, Homo sapien
ggctcccgagcctttaacaggccag

SEQ ID NO: 4086171 - DNA, 25 bp, Homo sapien
tgagatgttacgaagtggttcctgg

SEQ ID NO: 4086172 - DNA, 25 bp, Homo sapien
aatacaaatggcaggcactggatgt

SEQ ID NO: 4086173 - DNA, 25 bp, Homo sapien
gagtgggacagagaattacctgatc

SEQ ID NO: 4086174 - DNA, 25 bp, Homo sapien
aagcccgaacacgtccccttgcatc

SEQ ID NO: 4086175 - DNA, 25 bp, Homo sapien
ctcgaagcccgaacacgtccccttg

SEQ ID NO: 4086176 - DNA, 25 bp, Homo sapien
gaagcccgaacacgtccccttgcat

SEQ ID NO: 4086177 - DNA, 25 bp, Homo sapien
tgtggctcgaagcccgaacacgtcc

SEQ ID NO: 4086178 - DNA, 25 bp, Homo sapien
tcctcaacggtattaaaacagccat

SEQ ID NO: 4086179 - DNA, 25 bp, Homo sapien
cagtaaagtgagcaatgtcaaggcc

SEQ ID NO: 4086180 - DNA, 25 bp, Homo sapien
gggtctcagatgctcttctgcatgc

SEQ ID NO: 4086181 - DNA, 25 bp, Homo sapien
cttctgcatgcaacttgagagcttg

SEQ ID NO: 4086182 - DNA, 25 bp, Homo sapien
aatgatcggcaaggctgagggaacc

SEQ ID NO: 4086183 - DNA, 25 bp, Homo sapien
tgctagcagcatctacccttttgaa

SEQ ID NO: 4086184 - DNA, 25 bp, Homo sapien
ctgctagcagcatctacccttttga

SEQ ID NO: 4086185 - DNA, 25 bp, Homo sapien
gattaacctccaggaaaaagaggca

SEQ ID NO: 4086186 - DNA, 25 bp, Homo sapien
tgagattaacctccaggaaaaagag

SEQ ID NO: 4086187 - DNA, 25 bp, Homo sapien
cttgtaaatccggatgccgtccccg

SEQ ID NO: 4086188 - DNA, 25 bp, Homo sapien
caatagggttggtcatgatcatccg

SEQ ID NO: 4086189 - DNA, 25 bp, Homo sapien
taggtcagatgttaggcagtggtcc

SEQ ID NO: 4086190 - DNA, 25 bp, Homo sapien
tacttggagtccatcagcaagcggc

SEQ ID NO: 4086191 - DNA, 25 bp, Homo sapien
gaggcaaattgctcatcctggacaa

SEQ ID NO: 4086192 - DNA, 25 bp, Homo sapien
tgaaccttagtacccagtctcctga

SEQ ID NO: 4086193 - DNA, 25 bp, Homo sapien
tcttatgcatgggtgagtcccaggg

SEQ ID NO: 4086194 - DNA, 25 bp, Homo sapien
gattcctatcactgaggtggctgct

SEQ ID NO: 4086195 - DNA, 25 bp, Homo sapien
gcctcagcaggagaatccggagtgg

SEQ ID NO: 4086196 - DNA, 25 bp, Homo sapien
tcagcaggagaatccggagtggctg

SEQ ID NO: 4086197 - DNA, 25 bp, Homo sapien
ccgcacctgaccctgtttgcttttc

SEQ ID NO: 4086198 - DNA, 25 bp, Homo sapien
accgcacctgaccctgtttgctttt

SEQ ID NO: 4086199 - DNA, 25 bp, Homo sapien
gggatgagctccatgtactgcagtc

SEQ ID NO: 4086200 - DNA, 25 bp, Homo sapien
tccttggggatgagctccatgtact

SEQ ID NO: 4086201 - DNA, 25 bp, Homo sapien
ggatgagctccatgtactgcagtcc

SEQ ID NO: 4086202 - DNA, 25 bp, Homo sapien
ttggggatgagctccatgtactgca

SEQ ID NO: 4086203 - DNA, 25 bp, Homo sapien
ccgagggcctcgctcttatattgct

SEQ ID NO: 4086204 - DNA, 25 bp, Homo sapien
attctccaaaagtccacggcagcgc

SEQ ID NO: 4086205 - DNA, 25 bp, Homo sapien
gcggcggtaaaaggcaccctctgtg

SEQ ID NO: 4086206 - DNA, 25 bp, Homo sapien
ccatcagtttcaactcattctccaa

SEQ ID NO: 4086207 - DNA, 25 bp, Homo sapien
ctgcttcccctcctccttgggcaag

SEQ ID NO: 4086208 - DNA, 25 bp, Homo sapien
tgcttcccctcctccttgggcaagc

SEQ ID NO: 4086209 - DNA, 25 bp, Homo sapien
gcaagccaccctgccccgggagggc

SEQ ID NO: 4086210 - DNA, 25 bp, Homo sapien
ttcccctcctccttgggcaagccac

SEQ ID NO: 4086211 - DNA, 25 bp, Homo sapien
actgagactgccgttggtggtagca

SEQ ID NO: 4086212 - DNA, 25 bp, Homo sapien
acgggtcactgagactgccgttggt

SEQ ID NO: 4086213 - DNA, 25 bp, Homo sapien
tccacttctttggacgggtcactga

SEQ ID NO: 4086214 - DNA, 25 bp, Homo sapien
ttccacttctttggacgggtcactg

SEQ ID NO: 4086215 - DNA, 25 bp, Homo sapien
atttccctgggtcgcctggctcatg

SEQ ID NO: 4086216 - DNA, 25 bp, Homo sapien
cacttcctatgggttgaacatcccc

SEQ ID NO: 4086217 - DNA, 25 bp, Homo sapien
gggatctcgtgtgctgggacttcta

SEQ ID NO: 4086218 - DNA, 25 bp, Homo sapien
ggaccagaaacgcagtacacgctag

SEQ ID NO: 4086219 - DNA, 25 bp, Homo sapien
gatgcaggttttggatgattagctt

SEQ ID NO: 4086220 - DNA, 25 bp, Homo sapien
ctttggtcttagagttctcagataa

SEQ ID NO: 4086221 - DNA, 25 bp, Homo sapien
tctttggtcttagagttctcagata

SEQ ID NO: 4086222 - DNA, 25 bp, Homo sapien
ggaggatgcaggttttggatgatta

SEQ ID NO: 4086223 - DNA, 25 bp, Homo sapien
cacagaacaaatatgcgaggctcag

SEQ ID NO: 4086224 - DNA, 25 bp, Homo sapien
tgtcagatccacatgtctcttggga

SEQ ID NO: 4086225 - DNA, 25 bp, Homo sapien
tacagacggtgacagacatcgattc

SEQ ID NO: 4086226 - DNA, 25 bp, Homo sapien
aaagctgactgtaggcaaggacccg

SEQ ID NO: 4086227 - DNA, 25 bp, Homo sapien
ggggtggacatgggaatcctttcat

SEQ ID NO: 4086228 - DNA, 25 bp, Homo sapien
ctgggggtggacatgggaatccttt

SEQ ID NO: 4086229 - DNA, 25 bp, Homo sapien
tgggggtggacatgggaatcctttc

SEQ ID NO: 4086230 - DNA, 25 bp, Homo sapien
gggggtggacatgggaatcctttca

SEQ ID NO: 4086231 - DNA, 25 bp, Homo sapien
ggtccaggttgctggagtcggcagc

SEQ ID NO: 4086232 - DNA, 25 bp, Homo sapien
tctgatactcaaaaggcccacaaga

SEQ ID NO: 4086233 - DNA, 25 bp, Homo sapien
ccctggccacggagatctctgatac

SEQ ID NO: 4086234 - DNA, 25 bp, Homo sapien
aaaggcccacaagaacccacagtgg

SEQ ID NO: 4086235 - DNA, 25 bp, Homo sapien
aaacactgtttaactttgctaagag

SEQ ID NO: 4086236 - DNA, 25 bp, Homo sapien
gtagcaaatacattacacgtcctga

SEQ ID NO: 4086237 - DNA, 25 bp, Homo sapien
tattacccactgacggattgtgacc

SEQ ID NO: 4086238 - DNA, 25 bp, Homo sapien
tccactaaattgatgtattacccac

SEQ ID NO: 4086239 - DNA, 25 bp, Homo sapien
caccggcaggcaccctgatgataca

SEQ ID NO: 4086240 - DNA, 25 bp, Homo sapien
gcaccggcaggcaccctgatgatac

SEQ ID NO: 4086241 - DNA, 25 bp, Homo sapien
tgaagacagggaagcacataagagt

SEQ ID NO: 4086242 - DNA, 25 bp, Homo sapien
gatagcagtttctgagcgtaggagc

SEQ ID NO: 4086243 - DNA, 25 bp, Homo sapien
tcttcacatgattgagactcagctg

SEQ ID NO: 4086244 - DNA, 25 bp, Homo sapien
caaggaacgtcatgtactgatagca

SEQ ID NO: 4086245 - DNA, 25 bp, Homo sapien
ttttggccaccatgacagttttgag

SEQ ID NO: 4086246 - DNA, 25 bp, Homo sapien
actatgatgagtacgttgggaggaa

SEQ ID NO: 4086247 - DNA, 25 bp, Homo sapien
tgggatttgcctgatgttactatga

SEQ ID NO: 4086248 - DNA, 25 bp, Homo sapien
gggcaaactgctcctcttatcacat

SEQ ID NO: 4086249 - DNA, 25 bp, Homo sapien
taacaggctattcacgaggactaaa

SEQ ID NO: 4086250 - DNA, 25 bp, Homo sapien
taaaggaccttccaggcaactgtgg

SEQ ID NO: 4086251 - DNA, 25 bp, Homo sapien
taattctagcacgttgggaactgga

SEQ ID NO: 4086252 - DNA, 25 bp, Homo sapien
gcacagtgacatgggttcgaattcc

SEQ ID NO: 4086253 - DNA, 25 bp, Homo sapien
tgtccgagtagaccacggggctgtc

SEQ ID NO: 4086254 - DNA, 25 bp, Homo sapien
gcttgttgtagcctgccctgtccga

SEQ ID NO: 4086255 - DNA, 25 bp, Homo sapien
accagcggctcggagcacttggcac

SEQ ID NO: 4086256 - DNA, 25 bp, Homo sapien
gggccgcagactctcgcagtaatgg

SEQ ID NO: 4086257 - DNA, 25 bp, Homo sapien
taagttcctaggtcaggccctgtgg

SEQ ID NO: 4086258 - DNA, 25 bp, Homo sapien
caagttatagggtggtggttcatcc

SEQ ID NO: 4086259 - DNA, 25 bp, Homo sapien
tacaggtttgaacgtgggcaatgcc

SEQ ID NO: 4086260 - DNA, 25 bp, Homo sapien
cactctatgggatgggcgctggtct

SEQ ID NO: 4086261 - DNA, 25 bp, Homo sapien
ctgacccttggtgacgatgtacgcc

SEQ ID NO: 4086262 - DNA, 25 bp, Homo sapien
cagacaaagtgctttcggtgccagg

SEQ ID NO: 4086263 - DNA, 25 bp, Homo sapien
tgcaagttgggcacagaagctgacc

SEQ ID NO: 4086264 - DNA, 25 bp, Homo sapien
tcaggagcgtttggacttgctgcaa

SEQ ID NO: 4086265 - DNA, 25 bp, Homo sapien
aacaagcgatagttgggatcccagc

SEQ ID NO: 4086266 - DNA, 25 bp, Homo sapien
tgaaactactgaccctcaaggatct

SEQ ID NO: 4086267 - DNA, 25 bp, Homo sapien
ttgctgtcacatcggacccttagga

SEQ ID NO: 4086268 - DNA, 25 bp, Homo sapien
acccttaggatggtctcggcacacc

SEQ ID NO: 4086269 - DNA, 25 bp, Homo sapien
tcaggtccctggctaaagagaagct

SEQ ID NO: 4086270 - DNA, 25 bp, Homo sapien
caaagcctacactcccagtggaagt

SEQ ID NO: 4086271 - DNA, 25 bp, Homo sapien
tgttcagtggtttcccagtactggt

SEQ ID NO: 4086272 - DNA, 25 bp, Homo sapien
taaagatctgcccacattagtcacc

SEQ ID NO: 4086273 - DNA, 25 bp, Homo sapien
gatattcctaagtccagtttacatg

SEQ ID NO: 4086274 - DNA, 25 bp, Homo sapien
tgagaatatttgcttgaggcccatc

SEQ ID NO: 4086275 - DNA, 25 bp, Homo sapien
tttacagcccagttcaagcatcact

SEQ ID NO: 4086276 - DNA, 25 bp, Homo sapien
tccttttatagcatgcacagtagtg

SEQ ID NO: 4086277 - DNA, 25 bp, Homo sapien
gtcaaaaggacatagcaaccagttt

SEQ ID NO: 4086278 - DNA, 25 bp, Homo sapien
taattagttcgatcagtaaacgtca

SEQ ID NO: 4086279 - DNA, 25 bp, Homo sapien
taaaagacattattgggacagctgg

SEQ ID NO: 4086280 - DNA, 25 bp, Homo sapien
aaagcattgtgtcagcaacaccctc

SEQ ID NO: 4086281 - DNA, 25 bp, Homo sapien
caagatgggtatgtagcacgttatt

SEQ ID NO: 4086282 - DNA, 25 bp, Homo sapien
tacctgggctctgtttaactctaag

SEQ ID NO: 4086283 - DNA, 25 bp, Homo sapien
tctaagatggtaccaggagttccaa

SEQ ID NO: 4086284 - DNA, 25 bp, Homo sapien
catgacataacttagtacctgggct

SEQ ID NO: 4086285 - DNA, 25 bp, Homo sapien
gaaacatcttgggtatccgtcacat

SEQ ID NO: 4086286 - DNA, 25 bp, Homo sapien
taaactaggaagtgtaatggcttca

SEQ ID NO: 4086287 - DNA, 25 bp, Homo sapien
tcagaaatgtgtaattcacccaagc

SEQ ID NO: 4086288 - DNA, 25 bp, Homo sapien
gaggaaatgtaccaccctacataga

SEQ ID NO: 4086289 - DNA, 25 bp, Homo sapien
taacccagcgagtcaagtgctcatg

SEQ ID NO: 4086290 - DNA, 25 bp, Homo sapien
tctccatgggacaggcttgattgaa

SEQ ID NO: 4086291 - DNA, 25 bp, Homo sapien
tcatccccattcttggcagagagag

SEQ ID NO: 4086292 - DNA, 25 bp, Homo sapien
ggagccaaagcctgataacccagcg

SEQ ID NO: 4086293 - DNA, 25 bp, Homo sapien
ggctgatcaaagttacccctgggaa

SEQ ID NO: 4086294 - DNA, 25 bp, Homo sapien
tgggctcactggctccaaggacaaa

SEQ ID NO: 4086295 - DNA, 25 bp, Homo sapien
tattgccaatcagagtaccctgccc

SEQ ID NO: 4086296 - DNA, 25 bp, Homo sapien
tcaagggataagcataggactgacc

SEQ ID NO: 4086297 - DNA, 25 bp, Homo sapien
tgttaatgctgccagtagccaggaa

SEQ ID NO: 4086298 - DNA, 25 bp, Homo sapien
gccttttggcatggtctggtctaga

SEQ ID NO: 4086299 - DNA, 25 bp, Homo sapien
tgcagaggccttggatgctgccatg

SEQ ID NO: 4086300 - DNA, 25 bp, Homo sapien
tttttgcacctggtcgctgggagcc

SEQ ID NO: 4086301 - DNA, 25 bp, Homo sapien
atccacccaccttggccttccaaag

SEQ ID NO: 4086302 - DNA, 25 bp, Homo sapien
ggtgatccacccaccttggccttcc

SEQ ID NO: 4086303 - DNA, 25 bp, Homo sapien
ttacacctttttggtcaggctggtc

SEQ ID NO: 4086304 - DNA, 25 bp, Homo sapien
tgatccacccaccttggccttccaa

SEQ ID NO: 4086305 - DNA, 25 bp, Homo sapien
tctcaaagtgcccaactttctctcc

SEQ ID NO: 4086306 - DNA, 25 bp, Homo sapien
ctgccttcagatgccggggaagatt

SEQ ID NO: 4086307 - DNA, 25 bp, Homo sapien
tccaaaataactctcctgccaggag

SEQ ID NO: 4086308 - DNA, 25 bp, Homo sapien
cactgcggtctgagtgaaatataaa

SEQ ID NO: 4086309 - DNA, 25 bp, Homo sapien
gtctctgagctctaacccctgtgtg

SEQ ID NO: 4086310 - DNA, 25 bp, Homo sapien
cagggagcctaatttaggagaagga

SEQ ID NO: 4086311 - DNA, 25 bp, Homo sapien
tgatagcatggacttaattactttc

SEQ ID NO: 4086312 - DNA, 25 bp, Homo sapien
taggacaagttgagtgatgatagca

SEQ ID NO: 4086313 - DNA, 25 bp, Homo sapien
cctgggcatgagttcctgtggaccc

SEQ ID NO: 4086314 - DNA, 25 bp, Homo sapien
gattgagatcacgagtgagagccct

SEQ ID NO: 4086315 - DNA, 25 bp, Homo sapien
tctctggtaattttaggaggcagct

SEQ ID NO: 4086316 - DNA, 25 bp, Homo sapien
gattgcagactgaaaccttttccag

SEQ ID NO: 4086317 - DNA, 25 bp, Homo sapien
tgtagcttgcgatctcttcttccgt

SEQ ID NO: 4086318 - DNA, 25 bp, Homo sapien
ctgtagcttgcgatctcttcttccg

SEQ ID NO: 4086319 - DNA, 25 bp, Homo sapien
tcggtccaagcacactcgaagggca

SEQ ID NO: 4086320 - DNA, 25 bp, Homo sapien
gagcagctgctatgatgaacgatat

SEQ ID NO: 4086321 - DNA, 25 bp, Homo sapien
tattccaactgggtaacaatgggcc

SEQ ID NO: 4086322 - DNA, 25 bp, Homo sapien
tgagggtggtccatcagagcacatc

SEQ ID NO: 4086323 - DNA, 25 bp, Homo sapien
cacttgcatgctgtcggcgatgggc

SEQ ID NO: 4086324 - DNA, 25 bp, Homo sapien
cagtcagtgacgagggtgaaggcag

SEQ ID NO: 4086325 - DNA, 25 bp, Homo sapien
cagccataaaaatcgatttgtgagg

SEQ ID NO: 4086326 - DNA, 25 bp, Homo sapien
gtgaggactgagtcacctaagaagc

SEQ ID NO: 4086327 - DNA, 25 bp, Homo sapien
tcccgaagcatttatgacagaaacc

SEQ ID NO: 4086328 - DNA, 25 bp, Homo sapien
tccccgcttgctgagatagccgaga

SEQ ID NO: 4086329 - DNA, 25 bp, Homo sapien
gctgagatagccgagagatgcaatg

SEQ ID NO: 4086330 - DNA, 25 bp, Homo sapien
gatgcaatgggctggatcccgaagc

SEQ ID NO: 4086331 - DNA, 25 bp, Homo sapien
atcactgtgcatgcgggacacgctg

SEQ ID NO: 4086332 - DNA, 25 bp, Homo sapien
ctgtagaacagctcacactggctgg

SEQ ID NO: 4086333 - DNA, 25 bp, Homo sapien
tgtagaacagctcacactggctggc

SEQ ID NO: 4086334 - DNA, 25 bp, Homo sapien
ccgtttcctggtcatcactgtgcat

SEQ ID NO: 4086335 - DNA, 25 bp, Homo sapien
aacaaaggaatggtgctttctctcc

SEQ ID NO: 4086336 - DNA, 25 bp, Homo sapien
tctgattggctctgaacaaaggaat

SEQ ID NO: 4086337 - DNA, 25 bp, Homo sapien
gggctgtgttatcagttttctgatt

SEQ ID NO: 4086338 - DNA, 25 bp, Homo sapien
tctccacgctgtcagctcattgatg

SEQ ID NO: 4086339 - DNA, 25 bp, Homo sapien
ctagaagaaacagcatggacttcgg

SEQ ID NO: 4086340 - DNA, 25 bp, Homo sapien
tggacttcggcgtcagacagtaagt

SEQ ID NO: 4086341 - DNA, 25 bp, Homo sapien
tccaagagcatgagagccagaaatg

SEQ ID NO: 4086342 - DNA, 25 bp, Homo sapien
gaaacagcatggacttcggcgtcag

SEQ ID NO: 4086343 - DNA, 25 bp, Homo sapien
ccacgtgggtgtcatcacatccctg

SEQ ID NO: 4086344 - DNA, 25 bp, Homo sapien
tggagccatcttcagccacgtgggt

SEQ ID NO: 4086345 - DNA, 25 bp, Homo sapien
tcttcagccacgtgggtgtcatcac

SEQ ID NO: 4086346 - DNA, 25 bp, Homo sapien
atttgtcccaagtcagtaccactgg

SEQ ID NO: 4086347 - DNA, 25 bp, Homo sapien
taggagcttcgaaacaatccacttg

SEQ ID NO: 4086348 - DNA, 25 bp, Homo sapien
ttttctaggagcttcgaaacaatcc

SEQ ID NO: 4086349 - DNA, 25 bp, Homo sapien
ttcgaaacaatccacttgggctccc

SEQ ID NO: 4086350 - DNA, 25 bp, Homo sapien
gtcgttttctaggagcttcgaaaca

SEQ ID NO: 4086351 - DNA, 25 bp, Homo sapien
tcctccaggtgggtcctaaggatct

SEQ ID NO: 4086352 - DNA, 25 bp, Homo sapien
ctgctttcggcagctctgagctttc

SEQ ID NO: 4086353 - DNA, 25 bp, Homo sapien
tcttcttggacacctaaaacccaca

SEQ ID NO: 4086354 - DNA, 25 bp, Homo sapien
ccaggtgggtcctaaggatcttagg

SEQ ID NO: 4086355 - DNA, 25 bp, Homo sapien
tacagctcctagcaactgtggcgca

SEQ ID NO: 4086356 - DNA, 25 bp, Homo sapien
gagggagcactgatgcccgaaaggg

SEQ ID NO: 4086357 - DNA, 25 bp, Homo sapien
gtggtttcttgtccaactacagctc

SEQ ID NO: 4086358 - DNA, 25 bp, Homo sapien
tcttgtccaactacagctcctagca

SEQ ID NO: 4086359 - DNA, 25 bp, Homo sapien
atctgtgagattccgtggctgtgac

SEQ ID NO: 4086360 - DNA, 25 bp, Homo sapien
attccgtggctgtgacttggacacc

SEQ ID NO: 4086361 - DNA, 25 bp, Homo sapien
tgagattccgtggctgtgacttgga

SEQ ID NO: 4086362 - DNA, 25 bp, Homo sapien
gacatctgtgagattccgtggctgt

SEQ ID NO: 4086363 - DNA, 25 bp, Homo sapien
agggacagcccagcgaggacgggct

SEQ ID NO: 4086364 - DNA, 25 bp, Homo sapien
tccgtgtcaggcagcccacataaga

SEQ ID NO: 4086365 - DNA, 25 bp, Homo sapien
aggaccaaaaaagacatccgtgtca

SEQ ID NO: 4086366 - DNA, 25 bp, Homo sapien
cagggacagcccagcgaggacgggc

SEQ ID NO: 4086367 - DNA, 25 bp, Homo sapien
gctgggaatccaacaggctaaggaa

SEQ ID NO: 4086368 - DNA, 25 bp, Homo sapien
tgggaatccaacaggctaaggaaaa

SEQ ID NO: 4086369 - DNA, 25 bp, Homo sapien
gcagctgggaatccaacaggctaag

SEQ ID NO: 4086370 - DNA, 25 bp, Homo sapien
tccaacaggctaaggaaaaaggaca

SEQ ID NO: 4086371 - DNA, 25 bp, Homo sapien
tgaagaaggtgaattgtaacacaat

SEQ ID NO: 4086372 - DNA, 25 bp, Homo sapien
ttgaagaaggtgaattgtaacacaa

SEQ ID NO: 4086373 - DNA, 25 bp, Homo sapien
cttgaagaaggtgaattgtaacaca

SEQ ID NO: 4086374 - DNA, 25 bp, Homo sapien
ggcaagcttgagaagttgagatggc

SEQ ID NO: 4086375 - DNA, 25 bp, Homo sapien
gcttgagaagttgagatggctcaca

SEQ ID NO: 4086376 - DNA, 25 bp, Homo sapien
cttgagaagttgagatggctcacag

SEQ ID NO: 4086377 - DNA, 25 bp, Homo sapien
caagcttgagaagttgagatggctc

SEQ ID NO: 4086378 - DNA, 25 bp, Homo sapien
tgatgttgaaatccttagaatggag

SEQ ID NO: 4086379 - DNA, 25 bp, Homo sapien
gagggaacaattttacagtaagaca

SEQ ID NO: 4086380 - DNA, 25 bp, Homo sapien
tagaatggagggaacaattttacag

SEQ ID NO: 4086381 - DNA, 25 bp, Homo sapien
ctttatatttcccatctgatgttga

SEQ ID NO: 4086382 - DNA, 25 bp, Homo sapien
ctgctgagcagcctcctcagggtgc

SEQ ID NO: 4086383 - DNA, 25 bp, Homo sapien
ctgagcagcctcctcagggtgcttt

SEQ ID NO: 4086384 - DNA, 25 bp, Homo sapien
tgctgagcagcctcctcagggtgct

SEQ ID NO: 4086385 - DNA, 25 bp, Homo sapien
ttctgctgagcagcctcctcagggt

SEQ ID NO: 4086386 - DNA, 25 bp, Homo sapien
aaggatggaacagatcatgagattc

SEQ ID NO: 4086387 - DNA, 25 bp, Homo sapien
gaaaaaggatggaacagatcatgag

SEQ ID NO: 4086388 - DNA, 25 bp, Homo sapien
aaaaggatggaacagatcatgagat

SEQ ID NO: 4086389 - DNA, 25 bp, Homo sapien
ggatggaacagatcatgagattcga

SEQ ID NO: 4086390 - DNA, 25 bp, Homo sapien
tgtggaaaatcacagtacaggtatt

SEQ ID NO: 4086391 - DNA, 25 bp, Homo sapien
tcattcagacaatccaaatgccgtg

SEQ ID NO: 4086392 - DNA, 25 bp, Homo sapien
aaagtgtcactttgaggattcattc

SEQ ID NO: 4086393 - DNA, 25 bp, Homo sapien
gacaatccaaatgccgtgcttgtga

SEQ ID NO: 4086394 - DNA, 25 bp, Homo sapien
caatcttcctggatagtcccgcggg

SEQ ID NO: 4086395 - DNA, 25 bp, Homo sapien
tttttgtgagccagcgagtctagtc

SEQ ID NO: 4086396 - DNA, 25 bp, Homo sapien
tgatagagtaacctgccagtgtctg

SEQ ID NO: 4086397 - DNA, 25 bp, Homo sapien
ccgcgggcaggctcgatgattacgt

SEQ ID NO: 4086398 - DNA, 25 bp, Homo sapien
atccaaccagtcttcaggtgatgca

SEQ ID NO: 4086399 - DNA, 25 bp, Homo sapien
ctcatccaaccagtcttcaggtgat

SEQ ID NO: 4086400 - DNA, 25 bp, Homo sapien
agttttctcatccaaccagtcttca

SEQ ID NO: 4086401 - DNA, 25 bp, Homo sapien
cagttttctcatccaaccagtcttc

SEQ ID NO: 4086402 - DNA, 25 bp, Homo sapien
ctctgcacaatctctgggtgctgaa

SEQ ID NO: 4086403 - DNA, 25 bp, Homo sapien
acatggaggtcctttataaaccaga

SEQ ID NO: 4086404 - DNA, 25 bp, Homo sapien
gggctaccgcatgatctttaggcac

SEQ ID NO: 4086405 - DNA, 25 bp, Homo sapien
gatctttaggcacgtcccaaggtgg

SEQ ID NO: 4086406 - DNA, 25 bp, Homo sapien
aggatcctgaaagacgccaaagcct

SEQ ID NO: 4086407 - DNA, 25 bp, Homo sapien
gatcctgaaagacgccaaagccttc

SEQ ID NO: 4086408 - DNA, 25 bp, Homo sapien
tagaattcatctccggtggtggcat

SEQ ID NO: 4086409 - DNA, 25 bp, Homo sapien
tgaaagacgccaaagccttccctag

SEQ ID NO: 4086410 - DNA, 25 bp, Homo sapien
cagagcatcaaaggagcccagggca

SEQ ID NO: 4086411 - DNA, 25 bp, Homo sapien
tggtaagtcagttcctcctggtgga

SEQ ID NO: 4086412 - DNA, 25 bp, Homo sapien
tcctggtggagagggggcagctctt

SEQ ID NO: 4086413 - DNA, 25 bp, Homo sapien
tggtggagagggggcagctcttgga

SEQ ID NO: 4086414 - DNA, 25 bp, Homo sapien
cttggtaagtcagttcctcctggtg

SEQ ID NO: 4086415 - DNA, 25 bp, Homo sapien
tgtgagattggggatcatggcttta

SEQ ID NO: 4086416 - DNA, 25 bp, Homo sapien
gctttaattgggcaagcagtctcta

SEQ ID NO: 4086417 - DNA, 25 bp, Homo sapien
ctttaattgggcaagcagtctctag

SEQ ID NO: 4086418 - DNA, 25 bp, Homo sapien
tggggatcatggctttaattgggca

SEQ ID NO: 4086419 - DNA, 25 bp, Homo sapien
tcctgtgcttcttgcctgttggctg

SEQ ID NO: 4086420 - DNA, 25 bp, Homo sapien
gagttccttgattcctttccagccc

SEQ ID NO: 4086421 - DNA, 25 bp, Homo sapien
aatcccacacttttggtcaaccagg

SEQ ID NO: 4086422 - DNA, 25 bp, Homo sapien
acagccactggctccgtggaaatcc

SEQ ID NO: 4086423 - DNA, 25 bp, Homo sapien
gatccctgcagcgtgtgctgaagtt

SEQ ID NO: 4086424 - DNA, 25 bp, Homo sapien
gctgaagttccatcgagtcagtggg

SEQ ID NO: 4086425 - DNA, 25 bp, Homo sapien
tcagtgggggaggtgaacactgccc

SEQ ID NO: 4086426 - DNA, 25 bp, Homo sapien
cctgcagcgtgtgctgaagttccat

SEQ ID NO: 4086427 - DNA, 25 bp, Homo sapien
ggagttgatggactgtggtgtgggg

SEQ ID NO: 4086428 - DNA, 25 bp, Homo sapien
agcaggagttgatggactgtggtgt

SEQ ID NO: 4086429 - DNA, 25 bp, Homo sapien
gcaggagttgatggactgtggtgtg

SEQ ID NO: 4086430 - DNA, 25 bp, Homo sapien
caggagttgatggactgtggtgtgg

SEQ ID NO: 4086431 - DNA, 25 bp, Homo sapien
ttctcgttggattgccagtgcctgg

SEQ ID NO: 4086432 - DNA, 25 bp, Homo sapien
ttcaggagctggaatgcgatgtagt

SEQ ID NO: 4086433 - DNA, 25 bp, Homo sapien
aatgcgatgtagtggggcttctcgt

SEQ ID NO: 4086434 - DNA, 25 bp, Homo sapien
ggtccgagctttgtgggtttctgag

SEQ ID NO: 4086435 - DNA, 25 bp, Homo sapien
tggaaggccgatcgctccttaaagg

SEQ ID NO: 4086436 - DNA, 25 bp, Homo sapien
ggcaggcctccaagctaaaattaag

SEQ ID NO: 4086437 - DNA, 25 bp, Homo sapien
ggcagagagaccaattcagtgtccc

SEQ ID NO: 4086438 - DNA, 25 bp, Homo sapien
tatgtccctgccagctaaataggcc

SEQ ID NO: 4086439 - DNA, 25 bp, Homo sapien
atccacaggaggagatccgagctgt

SEQ ID NO: 4086440 - DNA, 25 bp, Homo sapien
gatccacaggaggagatccgagctg

SEQ ID NO: 4086441 - DNA, 25 bp, Homo sapien
ccacaggaggagatccgagctgtgt

SEQ ID NO: 4086442 - DNA, 25 bp, Homo sapien
acaggaggagatccgagctgtgtgg

SEQ ID NO: 4086443 - DNA, 25 bp, Homo sapien
ggtcaatctccttgcagtggatatc

SEQ ID NO: 4086444 - DNA, 25 bp, Homo sapien
ctatgtcctcgttaatgttcttggg

SEQ ID NO: 4086445 - DNA, 25 bp, Homo sapien
gggtctcggttcaccaggtcaatct

SEQ ID NO: 4086446 - DNA, 25 bp, Homo sapien
tctgggcctcgagatctgtgtgctc

SEQ ID NO: 4086447 - DNA, 25 bp, Homo sapien
aaaccatgttctcccgtgggatcct

SEQ ID NO: 4086448 - DNA, 25 bp, Homo sapien
ccacctgggtgtaccagatggctac

SEQ ID NO: 4086449 - DNA, 25 bp, Homo sapien
agcccacctgggtgtaccagatggc

SEQ ID NO: 4086450 - DNA, 25 bp, Homo sapien
catgttctcccgtgggatcctcttt

SEQ ID NO: 4086451 - DNA, 25 bp, Homo sapien
gtctgaaggttgaggcaaccttggg

SEQ ID NO: 4086452 - DNA, 25 bp, Homo sapien
accttgggtgtacctgctggtgagc

SEQ ID NO: 4086453 - DNA, 25 bp, Homo sapien
gaaggttgaggcaaccttgggtgta

SEQ ID NO: 4086454 - DNA, 25 bp, Homo sapien
tgggtgttgtgtagcctgagccggg

SEQ ID NO: 4086455 - DNA, 25 bp, Homo sapien
cctgatgagcacaaacctggaacaa

SEQ ID NO: 4086456 - DNA, 25 bp, Homo sapien
tctttgtgcaacagggtgtccctga

SEQ ID NO: 4086457 - DNA, 25 bp, Homo sapien
acaagtgtttgtagggctggtgggc

SEQ ID NO: 4086458 - DNA, 25 bp, Homo sapien
gatctcgatcaggtagctcttaatg

SEQ ID NO: 4086459 - DNA, 25 bp, Homo sapien
acgccgtcaaagctgtaggtgccca

SEQ ID NO: 4086460 - DNA, 25 bp, Homo sapien
gacggtagcaccagtacttggagac

SEQ ID NO: 4086461 - DNA, 25 bp, Homo sapien
caggctctgcgatcacgtcttcaaa

SEQ ID NO: 4086462 - DNA, 25 bp, Homo sapien
aagagaaagagctcgccagcagccc

SEQ ID NO: 4086463 - DNA, 25 bp, Homo sapien
agagaaagagctcgccagcagcccc

SEQ ID NO: 4086464 - DNA, 25 bp, Homo sapien
aaagagaaagagctcgccagcagcc

SEQ ID NO: 4086465 - DNA, 25 bp, Homo sapien
taaagagaaagagctcgccagcagc

SEQ ID NO: 4086466 - DNA, 25 bp, Homo sapien
aaggtaccctcatgtcaaatggcag

SEQ ID NO: 4086467 - DNA, 25 bp, Homo sapien
tgagtccacacacgcacaaattaga

SEQ ID NO: 4086468 - DNA, 25 bp, Homo sapien
tcgtcacatctcctgagggcgaagg

SEQ ID NO: 4086469 - DNA, 25 bp, Homo sapien
tatttttggagctggtcaggacaca

SEQ ID NO: 4086470 - DNA, 25 bp, Homo sapien
caaggtcttcagtactacccggaga

SEQ ID NO: 4086471 - DNA, 25 bp, Homo sapien
tgcacatgtactggagcactggtga

SEQ ID NO: 4086472 - DNA, 25 bp, Homo sapien
gacatgcacgaagagggtcaacacc

SEQ ID NO: 4086473 - DNA, 25 bp, Homo sapien
tacccggagactgaagatagtatcg

SEQ ID NO: 4086474 - DNA, 25 bp, Homo sapien
tccagtttacaatcactaggatggc

SEQ ID NO: 4086475 - DNA, 25 bp, Homo sapien
tcttataacacaacaataaggagaa

SEQ ID NO: 4086476 - DNA, 25 bp, Homo sapien
aatgggctaacggtttgaatagaca

SEQ ID NO: 4086477 - DNA, 25 bp, Homo sapien
ataaaaagatggacaagaacgagtg

SEQ ID NO: 4086478 - DNA, 25 bp, Homo sapien
catacggagcagaataaagagtaca

SEQ ID NO: 4086479 - DNA, 25 bp, Homo sapien
tacgataaaggtaatcagctcagtg

SEQ ID NO: 4086480 - DNA, 25 bp, Homo sapien
caaatggcaccgagacaatgatatg

SEQ ID NO: 4086481 - DNA, 25 bp, Homo sapien
tggtttaaggatagacatacggagc

SEQ ID NO: 4086482 - DNA, 25 bp, Homo sapien
tcagattcctccggggtattctctt

SEQ ID NO: 4086483 - DNA, 25 bp, Homo sapien
cagattcctccggggtattctcttt

SEQ ID NO: 4086484 - DNA, 25 bp, Homo sapien
ttcagattcctccggggtattctct

SEQ ID NO: 4086485 - DNA, 25 bp, Homo sapien
cagaagtgtttgagagcttcagatt

SEQ ID NO: 4086486 - DNA, 25 bp, Homo sapien
tatgcagataatcacatgaattccc

SEQ ID NO: 4086487 - DNA, 25 bp, Homo sapien
gggaagtccacctgactcacaaaag

SEQ ID NO: 4086488 - DNA, 25 bp, Homo sapien
tttggactctcagactgtcagcctc

SEQ ID NO: 4086489 - DNA, 25 bp, Homo sapien
tcaaacaacctatgcatcaccacgt

SEQ ID NO: 4086490 - DNA, 25 bp, Homo sapien
cctgtgtggtcaataaggaagccca

SEQ ID NO: 4086491 - DNA, 25 bp, Homo sapien
taaggtttcaagaccctggtggtgc

SEQ ID NO: 4086492 - DNA, 25 bp, Homo sapien
caggtatgatcagtaaccagcagga

SEQ ID NO: 4086493 - DNA, 25 bp, Homo sapien
catataagtatcaaaggaagcgcct

SEQ ID NO: 4086494 - DNA, 25 bp, Homo sapien
gaagagacctaacatggtccccgtg

SEQ ID NO: 4086495 - DNA, 25 bp, Homo sapien
cttagacttgcccttgaagcctgaa

SEQ ID NO: 4086496 - DNA, 25 bp, Homo sapien
gctgtgcccttttctaacactagga

SEQ ID NO: 4086497 - DNA, 25 bp, Homo sapien
atttggtccagcacattcatccggg

SEQ ID NO: 4086498 - DNA, 25 bp, Homo sapien
gcaggtagttaaagttggctctcat

SEQ ID NO: 4086499 - DNA, 25 bp, Homo sapien
agcaggtagttaaagttggctctca

SEQ ID NO: 4086500 - DNA, 25 bp, Homo sapien
gcttcatggaagcatatttgtctaa

SEQ ID NO: 4086501 - DNA, 25 bp, Homo sapien
cagttttgtagaaatacaggcttca

SEQ ID NO: 4086502 - DNA, 25 bp, Homo sapien
tcatggaagcatatttgtctaaatg

SEQ ID NO: 4086503 - DNA, 25 bp, Homo sapien
ttttgtagaaatacaggcttcatgg

SEQ ID NO: 4086504 - DNA, 25 bp, Homo sapien
tcatcagtgtcaatgtcacagcaaa

SEQ ID NO: 4086505 - DNA, 25 bp, Homo sapien
tgtcacagcaaatgcaaggctttca

SEQ ID NO: 4086506 - DNA, 25 bp, Homo sapien
tgggttttaagaatcacattggagt

SEQ ID NO: 4086507 - DNA, 25 bp, Homo sapien
taagaatcacattggagttcatcag

SEQ ID NO: 4086508 - DNA, 25 bp, Homo sapien
aatagccactttcacttcgccccga

SEQ ID NO: 4086509 - DNA, 25 bp, Homo sapien
ttcgccccgatgttacaggcatagc

SEQ ID NO: 4086510 - DNA, 25 bp, Homo sapien
tgtcaggctattatccattcttgtt

SEQ ID NO: 4086511 - DNA, 25 bp, Homo sapien
ggctattatccattcttgttgttca

SEQ ID NO: 4086512 - DNA, 25 bp, Homo sapien
gactccctggccgagtctcggtggc

SEQ ID NO: 4086513 - DNA, 25 bp, Homo sapien
cctggcagtcatgaaggtgagtgct

SEQ ID NO: 4086514 - DNA, 25 bp, Homo sapien
ggtccctccctttgaggaggatgtc

SEQ ID NO: 4086515 - DNA, 25 bp, Homo sapien
tcgggagcgaccatggactccctgg

SEQ ID NO: 4086516 - DNA, 25 bp, Homo sapien
agagtttctgcttcatctccatgct

SEQ ID NO: 4086517 - DNA, 25 bp, Homo sapien
aagagtttctgcttcatctccatgc

SEQ ID NO: 4086518 - DNA, 25 bp, Homo sapien
ttaaagagtttctgcttcatctcca

SEQ ID NO: 4086519 - DNA, 25 bp, Homo sapien
aaagagtttctgcttcatctccatg

SEQ ID NO: 4086520 - DNA, 25 bp, Homo sapien
ttgaaccccggacagagtgcacaat

SEQ ID NO: 4086521 - DNA, 25 bp, Homo sapien
tgcacaatcggagggaattgcgagc

SEQ ID NO: 4086522 - DNA, 25 bp, Homo sapien
tctaggaatgaaccagcaagttgtt

SEQ ID NO: 4086523 - DNA, 25 bp, Homo sapien
taacgatttctcacctcgaagcgcc

SEQ ID NO: 4086524 - DNA, 25 bp, Homo sapien
gctcttgggttaaatgctgccttcc

SEQ ID NO: 4086525 - DNA, 25 bp, Homo sapien
tgaacaaaatatggtgcagagtgat

SEQ ID NO: 4086526 - DNA, 25 bp, Homo sapien
ccagcaactggccacagattctttt

SEQ ID NO: 4086527 - DNA, 25 bp, Homo sapien
aagctgccctgtggcatggtgagcc

SEQ ID NO: 4086528 - DNA, 25 bp, Homo sapien
aacctggaaaacttaggtccagctg

SEQ ID NO: 4086529 - DNA, 25 bp, Homo sapien
gatatatgccccgtccggctctatg

SEQ ID NO: 4086530 - DNA, 25 bp, Homo sapien
tcttaggtgggatcctcctctcagg

SEQ ID NO: 4086531 - DNA, 25 bp, Homo sapien
ccttcacacggcatcagcagatata

SEQ ID NO: 4086532 - DNA, 25 bp, Homo sapien
caagctgaaatatcatctcgtctct

SEQ ID NO: 4086533 - DNA, 25 bp, Homo sapien
cattttcaaataagttgcagggaga

SEQ ID NO: 4086534 - DNA, 25 bp, Homo sapien
atctcttcggccatctgcacgttct

SEQ ID NO: 4086535 - DNA, 25 bp, Homo sapien
gctggaccaggtcatctcttcggcc

SEQ ID NO: 4086536 - DNA, 25 bp, Homo sapien
gctccaaactgtgggctggccttcc

SEQ ID NO: 4086537 - DNA, 25 bp, Homo sapien
tccaaactgtgggctggccttccaa

SEQ ID NO: 4086538 - DNA, 25 bp, Homo sapien
caaactgtgggctggccttccaagc

SEQ ID NO: 4086539 - DNA, 25 bp, Homo sapien
tgctccaaactgtgggctggccttc

SEQ ID NO: 4086540 - DNA, 25 bp, Homo sapien
atatagttcttgttcatgtattggc

SEQ ID NO: 4086541 - DNA, 25 bp, Homo sapien
tcagcccaacacaatatagttcttg

SEQ ID NO: 4086542 - DNA, 25 bp, Homo sapien
acacaatatagttcttgttcatgta

SEQ ID NO: 4086543 - DNA, 25 bp, Homo sapien
agcccaacacaatatagttcttgtt

SEQ ID NO: 4086544 - DNA, 25 bp, Homo sapien
gggactgttgagcatataacctgat

SEQ ID NO: 4086545 - DNA, 25 bp, Homo sapien
tgttagattaagctattgaggctaa

SEQ ID NO: 4086546 - DNA, 25 bp, Homo sapien
tggcccagaggtgattcctatggga

SEQ ID NO: 4086547 - DNA, 25 bp, Homo sapien
gatttttggcaaaacagggaacaga

SEQ ID NO: 4086548 - DNA, 25 bp, Homo sapien
ctgggtccttctgggaccatccagc

SEQ ID NO: 4086549 - DNA, 25 bp, Homo sapien
ggctccccgtgctgggtccttctgg

SEQ ID NO: 4086550 - DNA, 25 bp, Homo sapien
gggctccccgtgctgggtccttctg

SEQ ID NO: 4086551 - DNA, 25 bp, Homo sapien
tgcggcacaaagctgcatcctcatt

SEQ ID NO: 4086552 - DNA, 25 bp, Homo sapien
caggcgtggtgctaggagtgccagg

SEQ ID NO: 4086553 - DNA, 25 bp, Homo sapien
ggtgctaggagtgccaggaatgcgg

SEQ ID NO: 4086554 - DNA, 25 bp, Homo sapien
ccagcttttccccatagcagaccag

SEQ ID NO: 4086555 - DNA, 25 bp, Homo sapien
cctggtttgggacatgctggtaaag

SEQ ID NO: 4086556 - DNA, 25 bp, Homo sapien
ctttgctgataacggagcccttttt

SEQ ID NO: 4086557 - DNA, 25 bp, Homo sapien
ccacacctggtttgggacatgctgg

SEQ ID NO: 4086558 - DNA, 25 bp, Homo sapien
taaagtgttgatttccgttgatggt

SEQ ID NO: 4086559 - DNA, 25 bp, Homo sapien
ttgagggtacacgatgtggtcgcct

SEQ ID NO: 4086560 - DNA, 25 bp, Homo sapien
ggtggttgagggtacacgatgtggt

SEQ ID NO: 4086561 - DNA, 25 bp, Homo sapien
tcatcttggtggttgagggtacacg

SEQ ID NO: 4086562 - DNA, 25 bp, Homo sapien
gggtacacgatgtggtcgcctgctt

SEQ ID NO: 4086563 - DNA, 25 bp, Homo sapien
ttaaaggtcatgactgtgccgggca

SEQ ID NO: 4086564 - DNA, 25 bp, Homo sapien
aaaggtcatgactgtgccgggcagc

SEQ ID NO: 4086565 - DNA, 25 bp, Homo sapien
tgttaaaggtcatgactgtgccggg

SEQ ID NO: 4086566 - DNA, 25 bp, Homo sapien
aggtcatgactgtgccgggcagcac

SEQ ID NO: 4086567 - DNA, 25 bp, Homo sapien
gacatccagtgagcgagcgttcggt

SEQ ID NO: 4086568 - DNA, 25 bp, Homo sapien
tctgagggcgtctctgacgggtata

SEQ ID NO: 4086569 - DNA, 25 bp, Homo sapien
gtataagtcacgtcgtacacggcct

SEQ ID NO: 4086570 - DNA, 25 bp, Homo sapien
cgttcggtgaaatgagatcgagcct

SEQ ID NO: 4086571 - DNA, 25 bp, Homo sapien
aatgagtttgggggatttgttgtga

SEQ ID NO: 4086572 - DNA, 25 bp, Homo sapien
tgagtttgggggatttgttgtgaac

SEQ ID NO: 4086573 - DNA, 25 bp, Homo sapien
aaatgagtttgggggatttgttgtg

SEQ ID NO: 4086574 - DNA, 25 bp, Homo sapien
atgagtttgggggatttgttgtgaa

SEQ ID NO: 4086575 - DNA, 25 bp, Homo sapien
cagttttacggaaggtctgaacaca

SEQ ID NO: 4086576 - DNA, 25 bp, Homo sapien
gacagttttacggaaggtctgaaca

SEQ ID NO: 4086577 - DNA, 25 bp, Homo sapien
tcaagacagttttacggaaggtctg

SEQ ID NO: 4086578 - DNA, 25 bp, Homo sapien
ttttacggaaggtctgaacacatct

SEQ ID NO: 4086579 - DNA, 25 bp, Homo sapien
tgcccctgtttgactctctgtgatg

SEQ ID NO: 4086580 - DNA, 25 bp, Homo sapien
gtcggaagtcttctagaggtgtaca

SEQ ID NO: 4086581 - DNA, 25 bp, Homo sapien
gggcgaagttcagactcattagcct

SEQ ID NO: 4086582 - DNA, 25 bp, Homo sapien
tactataacgattacctccagggcg

SEQ ID NO: 4086583 - DNA, 25 bp, Homo sapien
caagcacacttttcggtggctttta

SEQ ID NO: 4086584 - DNA, 25 bp, Homo sapien
tttaaggaggagcaatcagttagtg

SEQ ID NO: 4086585 - DNA, 25 bp, Homo sapien
cagcagagaaattgaggtcagggag

SEQ ID NO: 4086586 - DNA, 25 bp, Homo sapien
agggagatcagccaagcacactttt

SEQ ID NO: 4086587 - DNA, 25 bp, Homo sapien
atttcacagaaggtgctgatgcctt

SEQ ID NO: 4086588 - DNA, 25 bp, Homo sapien
aggtgctgatgcctttcttgtgatt

SEQ ID NO: 4086589 - DNA, 25 bp, Homo sapien
cagaaggtgctgatgcctttcttgt

SEQ ID NO: 4086590 - DNA, 25 bp, Homo sapien
tcacagaaggtgctgatgcctttct

SEQ ID NO: 4086591 - DNA, 25 bp, Homo sapien
tgtggtgtggatgacggcagctgac

SEQ ID NO: 4086592 - DNA, 25 bp, Homo sapien
tggatgacggcagctgacatggact

SEQ ID NO: 4086593 - DNA, 25 bp, Homo sapien
ggcagctgacatggactcctcgcca

SEQ ID NO: 4086594 - DNA, 25 bp, Homo sapien
tgacggcagctgacatggactcctc

SEQ ID NO: 4086595 - DNA, 25 bp, Homo sapien
aaggctgctaatgagcgtttcccag

SEQ ID NO: 4086596 - DNA, 25 bp, Homo sapien
gcacagccaggatttgcccttaggc

SEQ ID NO: 4086597 - DNA, 25 bp, Homo sapien
gggttgttggagccatcacagcaca

SEQ ID NO: 4086598 - DNA, 25 bp, Homo sapien
ggcttggtgacaggttggatcacct

SEQ ID NO: 4086599 - DNA, 25 bp, Homo sapien
aaggctccgaggatggaagccagct

SEQ ID NO: 4086600 - DNA, 25 bp, Homo sapien
gctccgaggatggaagccagctgtg

SEQ ID NO: 4086601 - DNA, 25 bp, Homo sapien
ggaaggctccgaggatggaagccag

SEQ ID NO: 4086602 - DNA, 25 bp, Homo sapien
ggctccgaggatggaagccagctgt

SEQ ID NO: 4086603 - DNA, 25 bp, Homo sapien
catttgggattccagccccacttgg

SEQ ID NO: 4086604 - DNA, 25 bp, Homo sapien
ggatctagagattgcttggtttcat

SEQ ID NO: 4086605 - DNA, 25 bp, Homo sapien
cagctagtaaatggcccatttggga

SEQ ID NO: 4086606 - DNA, 25 bp, Homo sapien
aaaagaggctcttgctacatcaggg

SEQ ID NO: 4086607 - DNA, 25 bp, Homo sapien
tctcctttaatcaacttgcatttaa

SEQ ID NO: 4086608 - DNA, 25 bp, Homo sapien
ctctcctttaatcaacttgcattta

SEQ ID NO: 4086609 - DNA, 25 bp, Homo sapien
cctttaatcaacttgcatttaaatg

SEQ ID NO: 4086610 - DNA, 25 bp, Homo sapien
ctcctttaatcaacttgcatttaaa

SEQ ID NO: 4086611 - DNA, 25 bp, Homo sapien
ctccaagcacacaggcgatgccttg

SEQ ID NO: 4086612 - DNA, 25 bp, Homo sapien
ggctgtagctatgctcccctccaag

SEQ ID NO: 4086613 - DNA, 25 bp, Homo sapien
aggcgatgccttgcatacagccacc

SEQ ID NO: 4086614 - DNA, 25 bp, Homo sapien
cttcttggctgtagctatgctcccc

SEQ ID NO: 4086615 - DNA, 25 bp, Homo sapien
cgtgtctccttgagtgttacatgca

SEQ ID NO: 4086616 - DNA, 25 bp, Homo sapien
gcctcataaggcgtctcttgactgt

SEQ ID NO: 4086617 - DNA, 25 bp, Homo sapien
actcaagtctctgtaacgtgtctcc

SEQ ID NO: 4086618 - DNA, 25 bp, Homo sapien
tcattggtgattggagcctcataag

SEQ ID NO: 4086619 - DNA, 25 bp, Homo sapien
ccaaattcctggtccttcatctgaa

SEQ ID NO: 4086620 - DNA, 25 bp, Homo sapien
gatcaaaaccgagataggacatctg

SEQ ID NO: 4086621 - DNA, 25 bp, Homo sapien
gccataagcacagatcaaaaccgag

SEQ ID NO: 4086622 - DNA, 25 bp, Homo sapien
tcatctgaatcaaaggatgccataa

SEQ ID NO: 4086623 - DNA, 25 bp, Homo sapien
caatgaagttgtctgccctaaaggt

SEQ ID NO: 4086624 - DNA, 25 bp, Homo sapien
agttgtctgccctaaaggtccctgg

SEQ ID NO: 4086625 - DNA, 25 bp, Homo sapien
tcactgtcagtcttgacactggagc

SEQ ID NO: 4086626 - DNA, 25 bp, Homo sapien
ctaaaggtccctggatcactgtcag

SEQ ID NO: 4086627 - DNA, 25 bp, Homo sapien
tgccttgaagccatttgtgtctgtc

SEQ ID NO: 4086628 - DNA, 25 bp, Homo sapien
gaatcagcaggttcttggaaacagt

SEQ ID NO: 4086629 - DNA, 25 bp, Homo sapien
tcagaatcagcaggttcttggaaac

SEQ ID NO: 4086630 - DNA, 25 bp, Homo sapien
aacagttgatgccttgaagccattt

SEQ ID NO: 4086631 - DNA, 25 bp, Homo sapien
gatgggcaggcaccctctgacctgc

SEQ ID NO: 4086632 - DNA, 25 bp, Homo sapien
gagaagatgggcaggcaccctctga

SEQ ID NO: 4086633 - DNA, 25 bp, Homo sapien
gaagatgggcaggcaccctctgacc

SEQ ID NO: 4086634 - DNA, 25 bp, Homo sapien
ctgcatggggggagaagatgggcag

SEQ ID NO: 4086635 - DNA, 25 bp, Homo sapien
tgtggcaattttgggaaggcggtat

SEQ ID NO: 4086636 - DNA, 25 bp, Homo sapien
tactcgacatttggaagatgctgga

SEQ ID NO: 4086637 - DNA, 25 bp, Homo sapien
gcagggtgctccacgattactcgac

SEQ ID NO: 4086638 - DNA, 25 bp, Homo sapien
cttatctctctgtttaaggactcgc

SEQ ID NO: 4086639 - DNA, 25 bp, Homo sapien
gattgaagccaaatctagtaacaga

SEQ ID NO: 4086640 - DNA, 25 bp, Homo sapien
aattatcatctgaatgggcaggggg

SEQ ID NO: 4086641 - DNA, 25 bp, Homo sapien
ccaagaccctgataattatcatctg

SEQ ID NO: 4086642 - DNA, 25 bp, Homo sapien
ccaaatctagtaacagagccctggg

SEQ ID NO: 4086643 - DNA, 25 bp, Homo sapien
agttaatgtagatcagtaagttttc

SEQ ID NO: 4086644 - DNA, 25 bp, Homo sapien
gttttccaaccatttgtcaaataga

SEQ ID NO: 4086645 - DNA, 25 bp, Homo sapien
aatacagttaatgtagatcagtaag

SEQ ID NO: 4086646 - DNA, 25 bp, Homo sapien
tacagttaatgtagatcagtaagtt

SEQ ID NO: 4086647 - DNA, 25 bp, Homo sapien
tgctggatttcctggccattgtgat

SEQ ID NO: 4086648 - DNA, 25 bp, Homo sapien
gctggatttcctggccattgtgata

SEQ ID NO: 4086649 - DNA, 25 bp, Homo sapien
tgctcctggcagatgtagcctgcca

SEQ ID NO: 4086650 - DNA, 25 bp, Homo sapien
gctcctggcagatgtagcctgccat

SEQ ID NO: 4086651 - DNA, 25 bp, Homo sapien
gcaaaggattcatcttcagcagctg

SEQ ID NO: 4086652 - DNA, 25 bp, Homo sapien
gggcaaaggattcatcttcagcagc

SEQ ID NO: 4086653 - DNA, 25 bp, Homo sapien
tagggcaaaggattcatcttcagca

SEQ ID NO: 4086654 - DNA, 25 bp, Homo sapien
tcttcagcagctggagaccctccct

SEQ ID NO: 4086655 - DNA, 25 bp, Homo sapien
cagatcccacctccaacgttgaaga

SEQ ID NO: 4086656 - DNA, 25 bp, Homo sapien
ggctataccagcataacaccagcat

SEQ ID NO: 4086657 - DNA, 25 bp, Homo sapien
ggtggaaggtgcaggcatatcacat

SEQ ID NO: 4086658 - DNA, 25 bp, Homo sapien
gaagaggagcgaggtcccagactct

SEQ ID NO: 4086659 - DNA, 25 bp, Homo sapien
taatgggaatgttcttagaaagcca

SEQ ID NO: 4086660 - DNA, 25 bp, Homo sapien
gcagctccgtgacaggtcctgatgg

SEQ ID NO: 4086661 - DNA, 25 bp, Homo sapien
gacatgtgggctgagtaatgggaat

SEQ ID NO: 4086662 - DNA, 25 bp, Homo sapien
tcactgaagctgtccagtccttgga

SEQ ID NO: 4086663 - DNA, 25 bp, Homo sapien
catggtaggtatgtgtccaccaggc

SEQ ID NO: 4086664 - DNA, 25 bp, Homo sapien
taactctccatcaccgacttagact

SEQ ID NO: 4086665 - DNA, 25 bp, Homo sapien
gctttaagctagattgcaggacatg

SEQ ID NO: 4086666 - DNA, 25 bp, Homo sapien
ggcagttgcagaaccagaggtctcc

SEQ ID NO: 4086667 - DNA, 25 bp, Homo sapien
gagagttcgctttggtgtcttcctt

SEQ ID NO: 4086668 - DNA, 25 bp, Homo sapien
taacagatgcttatgtggcacttac

SEQ ID NO: 4086669 - DNA, 25 bp, Homo sapien
tccaaatagcatcacatcgagagta

SEQ ID NO: 4086670 - DNA, 25 bp, Homo sapien
ggttctgaactaactgaggaataga

SEQ ID NO: 4086671 - DNA, 25 bp, Homo sapien
tcaggttctggagcagtctcttttc

SEQ ID NO: 4086672 - DNA, 25 bp, Homo sapien
atggtcaggttctggagcagtctct

SEQ ID NO: 4086673 - DNA, 25 bp, Homo sapien
caggttctggagcagtctcttttcc

SEQ ID NO: 4086674 - DNA, 25 bp, Homo sapien
ggtcaggttctggagcagtctcttt

SEQ ID NO: 4086675 - DNA, 25 bp, Homo sapien
gagctagtgtctataaagtcgccag

SEQ ID NO: 4086676 - DNA, 25 bp, Homo sapien
tcaattctgcatccgaaaatacagg

SEQ ID NO: 4086677 - DNA, 25 bp, Homo sapien
cacctggtatgtggtgccactgata

SEQ ID NO: 4086678 - DNA, 25 bp, Homo sapien
tcctcaaaggccaatctgatgtcag

SEQ ID NO: 4086679 - DNA, 25 bp, Homo sapien
taagaaactaccagcctggtgcggt

SEQ ID NO: 4086680 - DNA, 25 bp, Homo sapien
tctgcataattcagtgagccaatat

SEQ ID NO: 4086681 - DNA, 25 bp, Homo sapien
tgtgacagtgtttggaagatctgca

SEQ ID NO: 4086682 - DNA, 25 bp, Homo sapien
caaagtacatgataggccaatagat

SEQ ID NO: 4086683 - DNA, 25 bp, Homo sapien
tggatcaacaccaatttgtaggcag

SEQ ID NO: 4086684 - DNA, 25 bp, Homo sapien
acatgctctcgccatgctggatcaa

SEQ ID NO: 4086685 - DNA, 25 bp, Homo sapien
ctgaagcggttctccggattccaca

SEQ ID NO: 4086686 - DNA, 25 bp, Homo sapien
gttctccggattccacatgctctcg

SEQ ID NO: 4086687 - DNA, 25 bp, Homo sapien
cgctgggctcaggtcggtgttgtac

SEQ ID NO: 4086688 - DNA, 25 bp, Homo sapien
cccgctgggctcaggtcggtgttgt

SEQ ID NO: 4086689 - DNA, 25 bp, Homo sapien
ccgctgggctcaggtcggtgttgta

SEQ ID NO: 4086690 - DNA, 25 bp, Homo sapien
cagatgtcaaactcagccggcttct

SEQ ID NO: 4086691 - DNA, 25 bp, Homo sapien
tactggcagccacgtctgatcaatg

SEQ ID NO: 4086692 - DNA, 25 bp, Homo sapien
ctggcagccacgtctgatcaatggc

SEQ ID NO: 4086693 - DNA, 25 bp, Homo sapien
actgtccagagggtctggatcactc

SEQ ID NO: 4086694 - DNA, 25 bp, Homo sapien
gtccagagggtctggatcactctct

SEQ ID NO: 4086695 - DNA, 25 bp, Homo sapien
ctgctcattgaggcaccaatcctca

SEQ ID NO: 4086696 - DNA, 25 bp, Homo sapien
attgagaccgatcagacccccagag

SEQ ID NO: 4086697 - DNA, 25 bp, Homo sapien
ttgagaccgatcagacccccagagt

SEQ ID NO: 4086698 - DNA, 25 bp, Homo sapien
tgagaccgatcagacccccagagtg

SEQ ID NO: 4086699 - DNA, 25 bp, Homo sapien
tattgagaccgatcagacccccaga

SEQ ID NO: 4086700 - DNA, 25 bp, Homo sapien
gggcagagccttggcaatagtgtcc

SEQ ID NO: 4086701 - DNA, 25 bp, Homo sapien
tgggctgcaattagtacctgcttcc

SEQ ID NO: 4086702 - DNA, 25 bp, Homo sapien
cttcagtgaggtttgcaaacctgcg

SEQ ID NO: 4086703 - DNA, 25 bp, Homo sapien
caggaactgtatgggtttcaagttc

SEQ ID NO: 4086704 - DNA, 25 bp, Homo sapien
aacatggatagccatcaggtctcct

SEQ ID NO: 4086705 - DNA, 25 bp, Homo sapien
caagggagaatgttgtaggtaaaca

SEQ ID NO: 4086706 - DNA, 25 bp, Homo sapien
ggaacgaaaagagcactgacaaggg

SEQ ID NO: 4086707 - DNA, 25 bp, Homo sapien
tcaaatacagcgaatgtcctgaatc

SEQ ID NO: 4086708 - DNA, 25 bp, Homo sapien
tacgagtcacggtggctccgcgctg

SEQ ID NO: 4086709 - DNA, 25 bp, Homo sapien
cggaaacggaagtcaggctacgagt

SEQ ID NO: 4086710 - DNA, 25 bp, Homo sapien
actccattggcctcttgcggtcagg

SEQ ID NO: 4086711 - DNA, 25 bp, Homo sapien
tcagtaagctgaaagcggagagtca

SEQ ID NO: 4086712 - DNA, 25 bp, Homo sapien
tgcaagaggaaggccacccctctct

SEQ ID NO: 4086713 - DNA, 25 bp, Homo sapien
atcctagggagcgggtaaaggcctg

SEQ ID NO: 4086714 - DNA, 25 bp, Homo sapien
agcaagatgggctccgccacgagat

SEQ ID NO: 4086715 - DNA, 25 bp, Homo sapien
gatccgcctgaagtccggctcggcg

SEQ ID NO: 4086716 - DNA, 25 bp, Homo sapien
ggtcagctaaaggacgcgttccgca

SEQ ID NO: 4086717 - DNA, 25 bp, Homo sapien
tgtttaacactacgtcagttcccgc

SEQ ID NO: 4086718 - DNA, 25 bp, Homo sapien
tgtgccagcgatacacgacagtgtt

SEQ ID NO: 4086719 - DNA, 25 bp, Homo sapien
gttccgcacaaggtcagagagccaa

SEQ ID NO: 4086720 - DNA, 25 bp, Homo sapien
caaaataacttaattgagtacagaa

SEQ ID NO: 4086721 - DNA, 25 bp, Homo sapien
gagagagatcttggaagtaatccga

SEQ ID NO: 4086722 - DNA, 25 bp, Homo sapien
gggccatagcttacacgagattttc

SEQ ID NO: 4086723 - DNA, 25 bp, Homo sapien
ctctgggatccatagatgggcatca

SEQ ID NO: 4086724 - DNA, 25 bp, Homo sapien
tctgcgtaagatggcaaaatctcat

SEQ ID NO: 4086725 - DNA, 25 bp, Homo sapien
cgagaccaatctgcgtaagatggca

SEQ ID NO: 4086726 - DNA, 25 bp, Homo sapien
ttcgagaccaatctgcgtaagatgg

SEQ ID NO: 4086727 - DNA, 25 bp, Homo sapien
ccaatctgcgtaagatggcaaaatc

SEQ ID NO: 4086728 - DNA, 25 bp, Homo sapien
cttccaagatccctaacactgtctc

SEQ ID NO: 4086729 - DNA, 25 bp, Homo sapien
tccaagatccctaacactgtctctt

SEQ ID NO: 4086730 - DNA, 25 bp, Homo sapien
ttccaagatccctaacactgtctct

SEQ ID NO: 4086731 - DNA, 25 bp, Homo sapien
tcacatctaggagttggttagtggc

SEQ ID NO: 4086732 - DNA, 25 bp, Homo sapien
ggttcacatctaggagttggttagt

SEQ ID NO: 4086733 - DNA, 25 bp, Homo sapien
tgaaggttcacatctaggagttggt

SEQ ID NO: 4086734 - DNA, 25 bp, Homo sapien
cacatctaggagttggttagtggct

SEQ ID NO: 4086735 - DNA, 25 bp, Homo sapien
cttgccacggtctctgctgattttg

SEQ ID NO: 4086736 - DNA, 25 bp, Homo sapien
ccagtaggtacagtggctccaatag

SEQ ID NO: 4086737 - DNA, 25 bp, Homo sapien
gattttgcatgatgacccaagtttc

SEQ ID NO: 4086738 - DNA, 25 bp, Homo sapien
gctccaatagtgactagaagctcag

SEQ ID NO: 4086739 - DNA, 25 bp, Homo sapien
tttgaactggtaatcttgaaactcc

SEQ ID NO: 4086740 - DNA, 25 bp, Homo sapien
ctttgtttgtttgaactggtaatct

SEQ ID NO: 4086741 - DNA, 25 bp, Homo sapien
gaactggtaatcttgaaactcctga

SEQ ID NO: 4086742 - DNA, 25 bp, Homo sapien
gtttgtttgaactggtaatcttgaa

SEQ ID NO: 4086743 - DNA, 25 bp, Homo sapien
gcagcctcatttgaggtaaagcaat

SEQ ID NO: 4086744 - DNA, 25 bp, Homo sapien
gatacatcctctttgatggctggat

SEQ ID NO: 4086745 - DNA, 25 bp, Homo sapien
ctgatttatctttttgcgctttgct

SEQ ID NO: 4086746 - DNA, 25 bp, Homo sapien
tctgatcgattttgacttcttgtcc

SEQ ID NO: 4086747 - DNA, 25 bp, Homo sapien
caacctgttggtcccctactcctgg

SEQ ID NO: 4086748 - DNA, 25 bp, Homo sapien
acctgattggcatagcgcaccacag

SEQ ID NO: 4086749 - DNA, 25 bp, Homo sapien
cctgttggtcccctactcctgggag

SEQ ID NO: 4086750 - DNA, 25 bp, Homo sapien
tgattggcatagcgcaccacagccc

SEQ ID NO: 4086751 - DNA, 25 bp, Homo sapien
tcagtcaatgcaatgcccacaatga

SEQ ID NO: 4086752 - DNA, 25 bp, Homo sapien
cacaatgacttcattatcatggatg

SEQ ID NO: 4086753 - DNA, 25 bp, Homo sapien
tgatctaagagttgtaggtccaaaa

SEQ ID NO: 4086754 - DNA, 25 bp, Homo sapien
cggtggagactctcttcagtcaatg

SEQ ID NO: 4086755 - DNA, 25 bp, Homo sapien
ttatatcataaggtagaggatcaca

SEQ ID NO: 4086756 - DNA, 25 bp, Homo sapien
atcataaggtagaggatcacagagc

SEQ ID NO: 4086757 - DNA, 25 bp, Homo sapien
tatatcataaggtagaggatcacag

SEQ ID NO: 4086758 - DNA, 25 bp, Homo sapien
tatcataaggtagaggatcacagag

SEQ ID NO: 4086759 - DNA, 25 bp, Homo sapien
tcttggccacaagaaggactgggtt

SEQ ID NO: 4086760 - DNA, 25 bp, Homo sapien
gctttcacggaacacagtcacatgt

SEQ ID NO: 4086761 - DNA, 25 bp, Homo sapien
atttcttgacatgcggtgaccttac

SEQ ID NO: 4086762 - DNA, 25 bp, Homo sapien
ccccttgtgggcttgctttggactt

SEQ ID NO: 4086763 - DNA, 25 bp, Homo sapien
aaagatgcaatgttatttgctgctc

SEQ ID NO: 4086764 - DNA, 25 bp, Homo sapien
ataaagatgcaatgttatttgctgc

SEQ ID NO: 4086765 - DNA, 25 bp, Homo sapien
tggtcaataaagatgcaatgttatt

SEQ ID NO: 4086766 - DNA, 25 bp, Homo sapien
tcaataaagatgcaatgttatttgc

SEQ ID NO: 4086767 - DNA, 25 bp, Homo sapien
cgtcacaatgcactgggagttttaa

SEQ ID NO: 4086768 - DNA, 25 bp, Homo sapien
tggttacaatgacgtcacaatgcac

SEQ ID NO: 4086769 - DNA, 25 bp, Homo sapien
tatattcattttggttacaatgacg

SEQ ID NO: 4086770 - DNA, 25 bp, Homo sapien
taaatggagtctcatagtatattca

SEQ ID NO: 4086771 - DNA, 25 bp, Homo sapien
tctcaatggcagattgcagatatcc

SEQ ID NO: 4086772 - DNA, 25 bp, Homo sapien
gcatctatgggcaagccccaggagg

SEQ ID NO: 4086773 - DNA, 25 bp, Homo sapien
atctatgggcaagccccaggagggt

SEQ ID NO: 4086774 - DNA, 25 bp, Homo sapien
ggcagattgcagatatcccactgaa

SEQ ID NO: 4086775 - DNA, 25 bp, Homo sapien
tgtcctcttagtataataagcagtc

SEQ ID NO: 4086776 - DNA, 25 bp, Homo sapien
tgtgttagttatatgacttgtcctc

SEQ ID NO: 4086777 - DNA, 25 bp, Homo sapien
aaacagtttcatgcatcctgaggca

SEQ ID NO: 4086778 - DNA, 25 bp, Homo sapien
gacctttgccattacatgtctatga

SEQ ID NO: 4086779 - DNA, 25 bp, Homo sapien
acacggctcatctcccgtaggcaag

SEQ ID NO: 4086780 - DNA, 25 bp, Homo sapien
tcggcctgtggtaggtgtgcagaca

SEQ ID NO: 4086781 - DNA, 25 bp, Homo sapien
agcattttgtgtcttgagtaagtag

SEQ ID NO: 4086782 - DNA, 25 bp, Homo sapien
taagtagtacagctcggcctgtggt

SEQ ID NO: 4086783 - DNA, 25 bp, Homo sapien
cgccatacgtgtcgcattccagata

SEQ ID NO: 4086784 - DNA, 25 bp, Homo sapien
ctttcgccatacgtgtcgcattcca

SEQ ID NO: 4086785 - DNA, 25 bp, Homo sapien
ttcgccatacgtgtcgcattccaga

SEQ ID NO: 4086786 - DNA, 25 bp, Homo sapien
atacgtgtcgcattccagataacgc

SEQ ID NO: 4086787 - DNA, 25 bp, Homo sapien
aagcttgaggtgtacgtatcagaac

SEQ ID NO: 4086788 - DNA, 25 bp, Homo sapien
caccaacgttcacccagactgtatc

SEQ ID NO: 4086789 - DNA, 25 bp, Homo sapien
ctgcagcacgaagaccaccaacgtt

SEQ ID NO: 4086790 - DNA, 25 bp, Homo sapien
tcagaacgtaaactgcagcacgaag

SEQ ID NO: 4086791 - DNA, 25 bp, Homo sapien
agagttcctctttctccgtcttgtt

SEQ ID NO: 4086792 - DNA, 25 bp, Homo sapien
ccagggtagttttgcacttgacaca

SEQ ID NO: 4086793 - DNA, 25 bp, Homo sapien
ttatgctaacatttccagtggtggg

SEQ ID NO: 4086794 - DNA, 25 bp, Homo sapien
acacttcggcttcctaaactgctgg

SEQ ID NO: 4086795 - DNA, 25 bp, Homo sapien
gacttcgtcttataggctgaacacc

SEQ ID NO: 4086796 - DNA, 25 bp, Homo sapien
gttcaacaaatacccagtctggcag

SEQ ID NO: 4086797 - DNA, 25 bp, Homo sapien
tgtgttcggcccataaacaaagcag

SEQ ID NO: 4086798 - DNA, 25 bp, Homo sapien
catcgtggtgaaaacagacatggtc

SEQ ID NO: 4086799 - DNA, 25 bp, Homo sapien
agatacaataccctgcccttagtgg

SEQ ID NO: 4086800 - DNA, 25 bp, Homo sapien
caccatactagggaagaagacggca

SEQ ID NO: 4086801 - DNA, 25 bp, Homo sapien
tagtccaggagacccactttgaagg

SEQ ID NO: 4086802 - DNA, 25 bp, Homo sapien
gaagacggcaaactattgcccacta

SEQ ID NO: 4086803 - DNA, 25 bp, Homo sapien
caggccttatgaatcctgcttatag

SEQ ID NO: 4086804 - DNA, 25 bp, Homo sapien
cattcccagtaacaatatgtctggt

SEQ ID NO: 4086805 - DNA, 25 bp, Homo sapien
ggtctgtaactaagtcattccatgt

SEQ ID NO: 4086806 - DNA, 25 bp, Homo sapien
aatatgtctggtctgtaactaagtc

SEQ ID NO: 4086807 - DNA, 25 bp, Homo sapien
cagtaacaatatgtctggtctgtaa

SEQ ID NO: 4086808 - DNA, 25 bp, Homo sapien
tgaagggattctctgaggccacaaa

SEQ ID NO: 4086809 - DNA, 25 bp, Homo sapien
taaaatttggtatacaggcctatgg

SEQ ID NO: 4086810 - DNA, 25 bp, Homo sapien
taatgggcatgctaggacaggaagc

SEQ ID NO: 4086811 - DNA, 25 bp, Homo sapien
cagacatttagggaaacaattgcca

SEQ ID NO: 4086812 - DNA, 25 bp, Homo sapien
gccgctgttgagtgataaagcaact

SEQ ID NO: 4086813 - DNA, 25 bp, Homo sapien
aaagatcatagtagtgccgctgttg

SEQ ID NO: 4086814 - DNA, 25 bp, Homo sapien
tctctgctggctgaagtgtaagtaa

SEQ ID NO: 4086815 - DNA, 25 bp, Homo sapien
cccttttataaaatggcgctgtatc

SEQ ID NO: 4086816 - DNA, 25 bp, Homo sapien
caggtatgccactactgggaaaaaa

SEQ ID NO: 4086817 - DNA, 25 bp, Homo sapien
cacctatgttgtggcatcattttga

SEQ ID NO: 4086818 - DNA, 25 bp, Homo sapien
ttttttaatgcaggtatgccactac

SEQ ID NO: 4086819 - DNA, 25 bp, Homo sapien
cttgaatagtgttggtgccacctat

SEQ ID NO: 4086820 - DNA, 25 bp, Homo sapien
gtgttgcccaggctattcacagctg

SEQ ID NO: 4086821 - DNA, 25 bp, Homo sapien
ttgtcatgatagcaagatgcctgtc

SEQ ID NO: 4086822 - DNA, 25 bp, Homo sapien
gctttatccgttgcgtaagcacaga

SEQ ID NO: 4086823 - DNA, 25 bp, Homo sapien
gaggtctgcgaggtcaaaactattg

SEQ ID NO: 4086824 - DNA, 25 bp, Homo sapien
catttattctcacggtgtgcagagg

SEQ ID NO: 4086825 - DNA, 25 bp, Homo sapien
actggaagtaaagcattgaagatgt

SEQ ID NO: 4086826 - DNA, 25 bp, Homo sapien
actagaactggaagtaaagcattga

SEQ ID NO: 4086827 - DNA, 25 bp, Homo sapien
agtaaagcattgaagatgtgactga

SEQ ID NO: 4086828 - DNA, 25 bp, Homo sapien
aactagaactggaagtaaagcattg

SEQ ID NO: 4086829 - DNA, 25 bp, Homo sapien
cctctagtgtatggattctggtaaa

SEQ ID NO: 4086830 - DNA, 25 bp, Homo sapien
gtcagtcaacagtcttcacagcctt

SEQ ID NO: 4086831 - DNA, 25 bp, Homo sapien
tcctgctgacaacagtaacagagtt

SEQ ID NO: 4086832 - DNA, 25 bp, Homo sapien
tttatctagagcagggttaaacctg

SEQ ID NO: 4086833 - DNA, 25 bp, Homo sapien
cagttagtaactgatctcagatgcc

SEQ ID NO: 4086834 - DNA, 25 bp, Homo sapien
tgatccatcttacatcttgttagga

SEQ ID NO: 4086835 - DNA, 25 bp, Homo sapien
tttgatccatcttacatcttgttag

SEQ ID NO: 4086836 - DNA, 25 bp, Homo sapien
gatgcctgtgtgatagcttccaaat

SEQ ID NO: 4086837 - DNA, 25 bp, Homo sapien
gtgagcagctgtaagatttgagggg

SEQ ID NO: 4086838 - DNA, 25 bp, Homo sapien
agtgagcagctgtaagatttgaggg

SEQ ID NO: 4086839 - DNA, 25 bp, Homo sapien
gagtgagcagctgtaagatttgagg

SEQ ID NO: 4086840 - DNA, 25 bp, Homo sapien
gcttctcgattatgggcgggattct

SEQ ID NO: 4086841 - DNA, 25 bp, Homo sapien
gctgcctcccgtcttgtaaggaccg

SEQ ID NO: 4086842 - DNA, 25 bp, Homo sapien
tcgtcatcgcctccatgtcgagtcg

SEQ ID NO: 4086843 - DNA, 25 bp, Homo sapien
gcgggattcttttgcctaggcttaa

SEQ ID NO: 4086844 - DNA, 25 bp, Homo sapien
cgcgagctgcaatcctgagggagct

SEQ ID NO: 4086845 - DNA, 25 bp, Homo sapien
acctgctacaggcactcgtgggggt

SEQ ID NO: 4086846 - DNA, 25 bp, Homo sapien
tgttctccaaaaaccggcgcgagct

SEQ ID NO: 4086847 - DNA, 25 bp, Homo sapien
gagaaggccgcacccttctgggcag

SEQ ID NO: 4086848 - DNA, 25 bp, Homo sapien
cagtgaaatcggctctggcgcgggc

SEQ ID NO: 4086849 - DNA, 25 bp, Homo sapien
tttacccgccgcctgcttgtcttcg

SEQ ID NO: 4086850 - DNA, 25 bp, Homo sapien
ctgcttgtcttcgacacctgattgg

SEQ ID NO: 4086851 - DNA, 25 bp, Homo sapien
agtcggtttacccgccgcctgcttg

SEQ ID NO: 4086852 - DNA, 25 bp, Homo sapien
agcgccggcgccaggggcacccggg

SEQ ID NO: 4086853 - DNA, 25 bp, Homo sapien
cgccgccaatcagcggaagccgccg

SEQ ID NO: 4086854 - DNA, 25 bp, Homo sapien
cgcacggggattcccagcgccggcg

SEQ ID NO: 4086855 - DNA, 25 bp, Homo sapien
acccattggcccactcgccgccaat

SEQ ID NO: 4086856 - DNA, 25 bp, Homo sapien
gaaaggcggagcgagccaaaggcgg

SEQ ID NO: 4086857 - DNA, 25 bp, Homo sapien
gaggggggccggcactactgtgttg

SEQ ID NO: 4086858 - DNA, 25 bp, Homo sapien
tgtgttggcggactggcgggactgg

SEQ ID NO: 4086859 - DNA, 25 bp, Homo sapien
aaaggcggagcgagccaaaggcggg

SEQ ID NO: 4086860 - DNA, 25 bp, Homo sapien
aggactcgagttaggcccaacgcgg

SEQ ID NO: 4086861 - DNA, 25 bp, Homo sapien
gggaggcggcaggactcgagttagg

SEQ ID NO: 4086862 - DNA, 25 bp, Homo sapien
agttaggcccaacgcggcgccacgg

SEQ ID NO: 4086863 - DNA, 25 bp, Homo sapien
tgcggcgcacggcactcccgggagg

SEQ ID NO: 4086864 - DNA, 25 bp, Homo sapien
ccccagagcgatcagagttgtctgt

SEQ ID NO: 4086865 - DNA, 25 bp, Homo sapien
cagaaaacgagagggaaggcgtcca

SEQ ID NO: 4086866 - DNA, 25 bp, Homo sapien
aaggcgtccaggaagattacggagg

SEQ ID NO: 4086867 - DNA, 25 bp, Homo sapien
ttgtctgtcacaaggccgcgagaac

SEQ ID NO: 4086868 - DNA, 25 bp, Homo sapien
cacgccacggggagccagagaacgt

SEQ ID NO: 4086869 - DNA, 25 bp, Homo sapien
tacacattcaacgaggctatctcag

SEQ ID NO: 4086870 - DNA, 25 bp, Homo sapien
gctatctcagacacgctgtggcaca

SEQ ID NO: 4086871 - DNA, 25 bp, Homo sapien
gacacgctgtggcacacgccacggg

SEQ ID NO: 4086872 - DNA, 25 bp, Homo sapien
caagtaaaacgacacaatctggctc

SEQ ID NO: 4086873 - DNA, 25 bp, Homo sapien
cccaaggcaagtaaaacgacacaat

SEQ ID NO: 4086874 - DNA, 25 bp, Homo sapien
gatcgttctccacgcccaaggcaag

SEQ ID NO: 4086875 - DNA, 25 bp, Homo sapien
aagatcgttctccacgcccaaggca

SEQ ID NO: 4086876 - DNA, 25 bp, Homo sapien
cattaatggacgctgcactgctgtc

SEQ ID NO: 4086877 - DNA, 25 bp, Homo sapien
tcacgtagcaaccagagctccagag

SEQ ID NO: 4086878 - DNA, 25 bp, Homo sapien
taaaaagcaaaccagctcagcagtg

SEQ ID NO: 4086879 - DNA, 25 bp, Homo sapien
tgaagcagccatcgcctaagtgctg

SEQ ID NO: 4086880 - DNA, 25 bp, Homo sapien
caaacagccagtatacatgaaatca

SEQ ID NO: 4086881 - DNA, 25 bp, Homo sapien
tgatagtaataagaattggaacctc

SEQ ID NO: 4086882 - DNA, 25 bp, Homo sapien
ctgggaaaacaatgtgagccacatt

SEQ ID NO: 4086883 - DNA, 25 bp, Homo sapien
gccacaaatgccagagtgatactac

SEQ ID NO: 4086884 - DNA, 25 bp, Homo sapien
tactgggtatcttttacgcaattca

SEQ ID NO: 4086885 - DNA, 25 bp, Homo sapien
tatcttttacgcaattcataattaa

SEQ ID NO: 4086886 - DNA, 25 bp, Homo sapien
ctgggtatcttttacgcaattcata

SEQ ID NO: 4086887 - DNA, 25 bp, Homo sapien
gggtatcttttacgcaattcataat

SEQ ID NO: 4086888 - DNA, 25 bp, Homo sapien
ttcgctaagtattaaagacagaatg

SEQ ID NO: 4086889 - DNA, 25 bp, Homo sapien
ccttcgctaagtattaaagacagaa

SEQ ID NO: 4086890 - DNA, 25 bp, Homo sapien
cccttcgctaagtattaaagacaga

SEQ ID NO: 4086891 - DNA, 25 bp, Homo sapien
tcgctaagtattaaagacagaatgc

SEQ ID NO: 4086892 - DNA, 25 bp, Homo sapien
gaggcacgatgcgattacaaattcc

SEQ ID NO: 4086893 - DNA, 25 bp, Homo sapien
gacatgagcatcaggcaaaactggc

SEQ ID NO: 4086894 - DNA, 25 bp, Homo sapien
ggtattccctcaggtactcagcaaa

SEQ ID NO: 4086895 - DNA, 25 bp, Homo sapien
gatggtataaacgaatgaggcacga

SEQ ID NO: 4086896 - DNA, 25 bp, Homo sapien
gaattcagctctagaacgggtctcc

SEQ ID NO: 4086897 - DNA, 25 bp, Homo sapien
tatcccacttgtatgcgagctgaac

SEQ ID NO: 4086898 - DNA, 25 bp, Homo sapien
tatggcaacccaacacatgaaagct

SEQ ID NO: 4086899 - DNA, 25 bp, Homo sapien
tccttggcgagaatggatccctaca

SEQ ID NO: 4086900 - DNA, 25 bp, Homo sapien
gggcatagtagtttgtaccatagaa

SEQ ID NO: 4086901 - DNA, 25 bp, Homo sapien
taaacacatacttccatgggcatag

SEQ ID NO: 4086902 - DNA, 25 bp, Homo sapien
tccaccgaatatatttcaggctgtg

SEQ ID NO: 4086903 - DNA, 25 bp, Homo sapien
aatcaatcatactgcttcaaaggcc

SEQ ID NO: 4086904 - DNA, 25 bp, Homo sapien
ttagctccatcctaaaatgtgcagg

SEQ ID NO: 4086905 - DNA, 25 bp, Homo sapien
tttggattaacactaaatatctggc

SEQ ID NO: 4086906 - DNA, 25 bp, Homo sapien
tacataatatgccaccaataaggtg

SEQ ID NO: 4086907 - DNA, 25 bp, Homo sapien
tgcagggacatgtaaacccaccctt

SEQ ID NO: 4086908 - DNA, 25 bp, Homo sapien
ttttcacaagagatatttgacataa

SEQ ID NO: 4086909 - DNA, 25 bp, Homo sapien
ccacagaaacatattcctagtatta

SEQ ID NO: 4086910 - DNA, 25 bp, Homo sapien
acagaaacatattcctagtattaaa

SEQ ID NO: 4086911 - DNA, 25 bp, Homo sapien
aattttcacaagagatatttgacat

SEQ ID NO: 4086912 - DNA, 25 bp, Homo sapien
aaatcacattacttgtattagcagg

SEQ ID NO: 4086913 - DNA, 25 bp, Homo sapien
aatcacattacttgtattagcaggc

SEQ ID NO: 4086914 - DNA, 25 bp, Homo sapien
tcacattacttgtattagcaggctt

SEQ ID NO: 4086915 - DNA, 25 bp, Homo sapien
acattacttgtattagcaggcttta

SEQ ID NO: 4086916 - DNA, 25 bp, Homo sapien
ttagtagccaacagacaaaggtagg

SEQ ID NO: 4086917 - DNA, 25 bp, Homo sapien
catcaagtgaggcatgactatctct

SEQ ID NO: 4086918 - DNA, 25 bp, Homo sapien
ctgcgtatagtatccagtggtcaca

SEQ ID NO: 4086919 - DNA, 25 bp, Homo sapien
tgagaatgcctgaagtcctctagat

SEQ ID NO: 4086920 - DNA, 25 bp, Homo sapien
tatgatctccctggtcactcacaga

SEQ ID NO: 4086921 - DNA, 25 bp, Homo sapien
ggagtgccgcttcagaaagagaaca

SEQ ID NO: 4086922 - DNA, 25 bp, Homo sapien
gaacaggcctcatatgcttcagaca

SEQ ID NO: 4086923 - DNA, 25 bp, Homo sapien
aattgcatcagacaggtgaggcgga

SEQ ID NO: 4086924 - DNA, 25 bp, Homo sapien
aaggagtcagttctatttgcggtca

SEQ ID NO: 4086925 - DNA, 25 bp, Homo sapien
aagtcaaatttaacgctagccagag

SEQ ID NO: 4086926 - DNA, 25 bp, Homo sapien
tttgcggtcaaatggaaacatgctt

SEQ ID NO: 4086927 - DNA, 25 bp, Homo sapien
tctttaacccgatgtccgacaactg

SEQ ID NO: 4086928 - DNA, 25 bp, Homo sapien
aaattatctgctagtagttctgaag

SEQ ID NO: 4086929 - DNA, 25 bp, Homo sapien
caaattatctgctagtagttctgaa

SEQ ID NO: 4086930 - DNA, 25 bp, Homo sapien
ccaaattatctgctagtagttctga

SEQ ID NO: 4086931 - DNA, 25 bp, Homo sapien
attatctgctagtagttctgaagac

SEQ ID NO: 4086932 - DNA, 25 bp, Homo sapien
catctaaatgcagtattttcttatt

SEQ ID NO: 4086933 - DNA, 25 bp, Homo sapien
taactgacacgtagagaagttccag

SEQ ID NO: 4086934 - DNA, 25 bp, Homo sapien
tgttaaccgaggaacatttaacaga

SEQ ID NO: 4086935 - DNA, 25 bp, Homo sapien
actgctgtagtttcaatggccaaaa

SEQ ID NO: 4086936 - DNA, 25 bp, Homo sapien
tgataccgactgagtcaacccaggg

SEQ ID NO: 4086937 - DNA, 25 bp, Homo sapien
gacccatgttaacaaggacttttgc

SEQ ID NO: 4086938 - DNA, 25 bp, Homo sapien
gatacactgattcataataagacat

SEQ ID NO: 4086939 - DNA, 25 bp, Homo sapien
caaagagagtcatgactgatacact

SEQ ID NO: 4086940 - DNA, 25 bp, Homo sapien
ttagtgccttcttttgtcattgaac

SEQ ID NO: 4086941 - DNA, 25 bp, Homo sapien
tctggcagcctaggatatagcaaac

SEQ ID NO: 4086942 - DNA, 25 bp, Homo sapien
tgcctatctcactaaccaacacatt

SEQ ID NO: 4086943 - DNA, 25 bp, Homo sapien
ttttctggcagcctaggatatagca

SEQ ID NO: 4086944 - DNA, 25 bp, Homo sapien
gcctcatccaacatgttatggacat

SEQ ID NO: 4086945 - DNA, 25 bp, Homo sapien
tcatccaacatgttatggacatgag

SEQ ID NO: 4086946 - DNA, 25 bp, Homo sapien
agagcctcatccaacatgttatgga

SEQ ID NO: 4086947 - DNA, 25 bp, Homo sapien
tccaacatgttatggacatgaggaa

SEQ ID NO: 4086948 - DNA, 25 bp, Homo sapien
caacacagcagagattggaaatcac

SEQ ID NO: 4086949 - DNA, 25 bp, Homo sapien
ccaacacagcagagattggaaatca

SEQ ID NO: 4086950 - DNA, 25 bp, Homo sapien
tccaacacagcagagattggaaatc

SEQ ID NO: 4086951 - DNA, 25 bp, Homo sapien
gatgtatctgatgtggtgactccca

SEQ ID NO: 4086952 - DNA, 25 bp, Homo sapien
atccagcagccatatctgagtagga

SEQ ID NO: 4086953 - DNA, 25 bp, Homo sapien
ccagcagccatatctgagtaggatg

SEQ ID NO: 4086954 - DNA, 25 bp, Homo sapien
ctgagtaggatgtatctgatgtggt

SEQ ID NO: 4086955 - DNA, 25 bp, Homo sapien
gataatgtacctactacctagaaag

SEQ ID NO: 4086956 - DNA, 25 bp, Homo sapien
gctatccataagaaggctgtctcca

SEQ ID NO: 4086957 - DNA, 25 bp, Homo sapien
tatttgcccagaaatacccctctga

SEQ ID NO: 4086958 - DNA, 25 bp, Homo sapien
taattacagtggaataggatctggt

SEQ ID NO: 4086959 - DNA, 25 bp, Homo sapien
aagctgctcttagctgaaaaaaaag

SEQ ID NO: 4086960 - DNA, 25 bp, Homo sapien
accactgattttgaaggtcctcttt

SEQ ID NO: 4086961 - DNA, 25 bp, Homo sapien
gagagtataattttagggattgggc

SEQ ID NO: 4086962 - DNA, 25 bp, Homo sapien
cattcttcaagaattgagagtataa

SEQ ID NO: 4086963 - DNA, 25 bp, Homo sapien
ctgtgagcagggggaatctcggaca

SEQ ID NO: 4086964 - DNA, 25 bp, Homo sapien
tgtgagcagggggaatctcggacaa

SEQ ID NO: 4086965 - DNA, 25 bp, Homo sapien
aaaaggacaagagggggaatctgtg

SEQ ID NO: 4086966 - DNA, 25 bp, Homo sapien
tctgtgagcagggggaatctcggac

SEQ ID NO: 4086967 - DNA, 25 bp, Homo sapien
tgccacttcgtcttgaaaggtaggg

SEQ ID NO: 4086968 - DNA, 25 bp, Homo sapien
tactgcctggaatagacttggcttc

SEQ ID NO: 4086969 - DNA, 25 bp, Homo sapien
cacatcctggtgtagtgccacttcg

SEQ ID NO: 4086970 - DNA, 25 bp, Homo sapien
tggctgtgggatcaagagtctgaac

SEQ ID NO: 4086971 - DNA, 25 bp, Homo sapien
aactggctacctactaatgcaggga

SEQ ID NO: 4086972 - DNA, 25 bp, Homo sapien
ccagcagtatttacgggcagtcatg

SEQ ID NO: 4086973 - DNA, 25 bp, Homo sapien
taatcagggatgtcattcaacccag

SEQ ID NO: 4086974 - DNA, 25 bp, Homo sapien
gaattagtcctagactccccagcag

SEQ ID NO: 4086975 - DNA, 25 bp, Homo sapien
ggaattacatctctttagcagccaa

SEQ ID NO: 4086976 - DNA, 25 bp, Homo sapien
tatcactgaattggacacatacaca

SEQ ID NO: 4086977 - DNA, 25 bp, Homo sapien
taatcttaaagtgcccagaacagcg

SEQ ID NO: 4086978 - DNA, 25 bp, Homo sapien
gaatacacagttagacacttacagg

SEQ ID NO: 4086979 - DNA, 25 bp, Homo sapien
gaacatatgcacttcatgtgcaagt

SEQ ID NO: 4086980 - DNA, 25 bp, Homo sapien
ctccaaacgggtaaatatgaacata

SEQ ID NO: 4086981 - DNA, 25 bp, Homo sapien
tctccaaacgggtaaatatgaacat

SEQ ID NO: 4086982 - DNA, 25 bp, Homo sapien
aatatgaacatatgcacttcatgtg

SEQ ID NO: 4086983 - DNA, 25 bp, Homo sapien
aaggaaagttgcatgaaatcaaaga

SEQ ID NO: 4086984 - DNA, 25 bp, Homo sapien
agttgcatgaaatcaaagatggcca

SEQ ID NO: 4086985 - DNA, 25 bp, Homo sapien
ccatggagatggagctatgctggtt

SEQ ID NO: 4086986 - DNA, 25 bp, Homo sapien
tggagctatgctggttgtatcttac

SEQ ID NO: 4086987 - DNA, 25 bp, Homo sapien
aactttagacagaggaaagtattct

SEQ ID NO: 4086988 - DNA, 25 bp, Homo sapien
gtgagaaaggatcttattaataaca

SEQ ID NO: 4086989 - DNA, 25 bp, Homo sapien
gtgaagaactttagacagaggaaag

SEQ ID NO: 4086990 - DNA, 25 bp, Homo sapien
ggatcttattaataacagcaaagga

SEQ ID NO: 4086991 - DNA, 25 bp, Homo sapien
caatggcatcttatatttatcatac

SEQ ID NO: 4086992 - DNA, 25 bp, Homo sapien
aaaaacaatggcatcttatatttat

SEQ ID NO: 4086993 - DNA, 25 bp, Homo sapien
aacaatggcatcttatatttatcat

SEQ ID NO: 4086994 - DNA, 25 bp, Homo sapien
gtaaaaacaatggcatcttatattt

SEQ ID NO: 4086995 - DNA, 25 bp, Homo sapien
cagtgagtgagatgatcaaagtgcc

SEQ ID NO: 4086996 - DNA, 25 bp, Homo sapien
gaccaggccctcttccattcactac

SEQ ID NO: 4086997 - DNA, 25 bp, Homo sapien
ccattcactaccaagacaggatacc

SEQ ID NO: 4086998 - DNA, 25 bp, Homo sapien
gagtgagatgatcaaagtgccttct

SEQ ID NO: 4086999 - DNA, 25 bp, Homo sapien
cttcttaattggatctcttaatact

SEQ ID NO: 4087000 - DNA, 25 bp, Homo sapien
gactcagaactattcttcttaattg

SEQ ID NO: 4087001 - DNA, 25 bp, Homo sapien
tgagcggggagtttcccctagagaa

SEQ ID NO: 4087002 - DNA, 25 bp, Homo sapien
gccactctgggctggtttagactca

SEQ ID NO: 4087003 - DNA, 25 bp, Homo sapien
tgcacaaaggcgaaaagcaatgcat

SEQ ID NO: 4087004 - DNA, 25 bp, Homo sapien
ctgcacaaaggcgaaaagcaatgca

SEQ ID NO: 4087005 - DNA, 25 bp, Homo sapien
cctctgagtggtcccataattatga

SEQ ID NO: 4087006 - DNA, 25 bp, Homo sapien
gaatacacgctcttctcattaactg

SEQ ID NO: 4087007 - DNA, 25 bp, Homo sapien
tcattaactgctggactagcctcca

SEQ ID NO: 4087008 - DNA, 25 bp, Homo sapien
ataaggcagtcctcgacacccatgc

SEQ ID NO: 4087009 - DNA, 25 bp, Homo sapien
aatgtataagaatggattacactcc

SEQ ID NO: 4087010 - DNA, 25 bp, Homo sapien
tgtataagaatggattacactccag

SEQ ID NO: 4087011 - DNA, 25 bp, Homo sapien
atgtataagaatggattacactcca

SEQ ID NO: 4087012 - DNA, 25 bp, Homo sapien
tgcatataaacatttcaagaaagtc

SEQ ID NO: 4087013 - DNA, 25 bp, Homo sapien
ctgcatataaacatttcaagaaagt

SEQ ID NO: 4087014 - DNA, 25 bp, Homo sapien
gcatataaacatttcaagaaagtca

SEQ ID NO: 4087015 - DNA, 25 bp, Homo sapien
catataaacatttcaagaaagtcac

SEQ ID NO: 4087016 - DNA, 25 bp, Homo sapien
gtgcaaaaggggcaacttcgtcatg

SEQ ID NO: 4087017 - DNA, 25 bp, Homo sapien
ctagacgtccgctggagtcagggaa

SEQ ID NO: 4087018 - DNA, 25 bp, Homo sapien
aaaatgccaaggtcaactgggacat

SEQ ID NO: 4087019 - DNA, 25 bp, Homo sapien
agaacaatgatgcagggctagacgt

SEQ ID NO: 4087020 - DNA, 25 bp, Homo sapien
agtgtccaaacactggcccctctct

SEQ ID NO: 4087021 - DNA, 25 bp, Homo sapien
cctctctcccctaaagtatggtaca

SEQ ID NO: 4087022 - DNA, 25 bp, Homo sapien
cccctaaagtatggtacatatggaa

SEQ ID NO: 4087023 - DNA, 25 bp, Homo sapien
atcaacagtgtccaaacactggccc

SEQ ID NO: 4087024 - DNA, 25 bp, Homo sapien
gaggaggggctccgtaattatgatc

SEQ ID NO: 4087025 - DNA, 25 bp, Homo sapien
cacaaggacaccaggtaggtacagt

SEQ ID NO: 4087026 - DNA, 25 bp, Homo sapien
tgtctccacagcgttcctctacagg

SEQ ID NO: 4087027 - DNA, 25 bp, Homo sapien
ttcaggtcagaacgagggatgatcg

SEQ ID NO: 4087028 - DNA, 25 bp, Homo sapien
acaggcgacggcaggccattcaggt

SEQ ID NO: 4087029 - DNA, 25 bp, Homo sapien
caaggagcactaaggaatcatctac

SEQ ID NO: 4087030 - DNA, 25 bp, Homo sapien
gcagagaattcgagccaaggagcac

SEQ ID NO: 4087031 - DNA, 25 bp, Homo sapien
cacacatgggcgaagtgtctctgca

SEQ ID NO: 4087032 - DNA, 25 bp, Homo sapien
tgtaagaaaccctaatcccagcaac

SEQ ID NO: 4087033 - DNA, 25 bp, Homo sapien
cctgcttccgccgatgaagtctaat

SEQ ID NO: 4087034 - DNA, 25 bp, Homo sapien
tccgccgatgaagtctaataacctt

SEQ ID NO: 4087035 - DNA, 25 bp, Homo sapien
gccgatgaagtctaataaccttccc

SEQ ID NO: 4087036 - DNA, 25 bp, Homo sapien
atgttgtcctgcttccgccgatgaa

SEQ ID NO: 4087037 - DNA, 25 bp, Homo sapien
tttttatgtcaaattgtggacctaa

SEQ ID NO: 4087038 - DNA, 25 bp, Homo sapien
attgtggacctaacccatcttccgc

SEQ ID NO: 4087039 - DNA, 25 bp, Homo sapien
ttttatgtcaaattgtggacctaac

SEQ ID NO: 4087040 - DNA, 25 bp, Homo sapien
tggacctaacccatcttccgctcac

SEQ ID NO: 4087041 - DNA, 25 bp, Homo sapien
tattcagtccctaagcttcgctgac

SEQ ID NO: 4087042 - DNA, 25 bp, Homo sapien
caaggaatactttgctacaggacta

SEQ ID NO: 4087043 - DNA, 25 bp, Homo sapien
gaactatacagtggtcttgagagga

SEQ ID NO: 4087044 - DNA, 25 bp, Homo sapien
tcttttaggtgtgccccacatgcag

SEQ ID NO: 4087045 - DNA, 25 bp, Homo sapien
ggaaggagaaagctcctcatcccag

SEQ ID NO: 4087046 - DNA, 25 bp, Homo sapien
gctttctgttgcactgctatcccca

SEQ ID NO: 4087047 - DNA, 25 bp, Homo sapien
tcccagctttctgttgcactgctat

SEQ ID NO: 4087048 - DNA, 25 bp, Homo sapien
ctgtatacaacacagtggaaggaga

SEQ ID NO: 4087049 - DNA, 25 bp, Homo sapien
taaggtgatgcttgtaggtgtgtgc

SEQ ID NO: 4087050 - DNA, 25 bp, Homo sapien
ggttcttctaacagttaaggtgatg

SEQ ID NO: 4087051 - DNA, 25 bp, Homo sapien
tcgtctttggtgctgcacgaccctt

SEQ ID NO: 4087052 - DNA, 25 bp, Homo sapien
tttcttcgtctttggtgctgcacga

SEQ ID NO: 4087053 - DNA, 25 bp, Homo sapien
gctggaatttcatacctgggatggg

SEQ ID NO: 4087054 - DNA, 25 bp, Homo sapien
gaccatgacactgaggaaacctaga

SEQ ID NO: 4087055 - DNA, 25 bp, Homo sapien
ccttaacaagggatgaacaagtcac

SEQ ID NO: 4087056 - DNA, 25 bp, Homo sapien
tgaggctgcaacacatacgggattg

SEQ ID NO: 4087057 - DNA, 25 bp, Homo sapien
cttcatccgcaaggacttccgggat

SEQ ID NO: 4087058 - DNA, 25 bp, Homo sapien
gacttccgggatccctctcgaaatg

SEQ ID NO: 4087059 - DNA, 25 bp, Homo sapien
atccgcaaggacttccgggatccct

SEQ ID NO: 4087060 - DNA, 25 bp, Homo sapien
caaggacttccgggatccctctcga

SEQ ID NO: 4087061 - DNA, 25 bp, Homo sapien
gaaaagcagagtccaagattcccag

SEQ ID NO: 4087062 - DNA, 25 bp, Homo sapien
tacaagcgtcctgcaattaaagccc

SEQ ID NO: 4087063 - DNA, 25 bp, Homo sapien
gctagggtagatgcacaagagatcc

SEQ ID NO: 4087064 - DNA, 25 bp, Homo sapien
cacgtaaaggaggataccagacagc

SEQ ID NO: 4087065 - DNA, 25 bp, Homo sapien
ggaatatgaatactcataaacttga

SEQ ID NO: 4087066 - DNA, 25 bp, Homo sapien
ttaatatttatgccctataactctc

SEQ ID NO: 4087067 - DNA, 25 bp, Homo sapien
ctatttaaatgctttgaagccccca

SEQ ID NO: 4087068 - DNA, 25 bp, Homo sapien
actctcaataggaaagatcctgctt

SEQ ID NO: 4087069 - DNA, 25 bp, Homo sapien
cctgtaatctttgctaacaccagtc

SEQ ID NO: 4087070 - DNA, 25 bp, Homo sapien
gcaatcctaaaaagcttatccttac

SEQ ID NO: 4087071 - DNA, 25 bp, Homo sapien
gtcacactggtgctgcacataaagc

SEQ ID NO: 4087072 - DNA, 25 bp, Homo sapien
atctttgctaacaccagtcacactg

SEQ ID NO: 4087073 - DNA, 25 bp, Homo sapien
tagggctattatctgcctccaaagt

SEQ ID NO: 4087074 - DNA, 25 bp, Homo sapien
ggtttcgagcttctggagataagtt

SEQ ID NO: 4087075 - DNA, 25 bp, Homo sapien
gatagttgcttgataagagaaaagc

SEQ ID NO: 4087076 - DNA, 25 bp, Homo sapien
aaagcatttagtagccaggattagg

SEQ ID NO: 4087077 - DNA, 25 bp, Homo sapien
tacaaatgaacagtagagacctcaa

SEQ ID NO: 4087078 - DNA, 25 bp, Homo sapien
tctaatcaaaggactgacatcaagt

SEQ ID NO: 4087079 - DNA, 25 bp, Homo sapien
tttgttaccaatgagaggtgagacc

SEQ ID NO: 4087080 - DNA, 25 bp, Homo sapien
tatcacttggcaattgatgtggcat

SEQ ID NO: 4087081 - DNA, 25 bp, Homo sapien
tctaaaatagtaggtttgcccacaa

SEQ ID NO: 4087082 - DNA, 25 bp, Homo sapien
tgtgttattacaggccaattcagtc

SEQ ID NO: 4087083 - DNA, 25 bp, Homo sapien
gttcaagcgcgttctgtacatctgc

SEQ ID NO: 4087084 - DNA, 25 bp, Homo sapien
gaaagcttcttcatactggtcagtc

SEQ ID NO: 4087085 - DNA, 25 bp, Homo sapien
tattccatggccttgtacatttgga

SEQ ID NO: 4087086 - DNA, 25 bp, Homo sapien
tggttacatatgatcaacacctggc

SEQ ID NO: 4087087 - DNA, 25 bp, Homo sapien
tagagagtcctcaaccctttggtgc

SEQ ID NO: 4087088 - DNA, 25 bp, Homo sapien
tatgtatccaggtagtttccagtta

SEQ ID NO: 4087089 - DNA, 25 bp, Homo sapien
gcaagaacaccttagtagacactca

SEQ ID NO: 4087090 - DNA, 25 bp, Homo sapien
aagaacaccttagtagacactcaaa

SEQ ID NO: 4087091 - DNA, 25 bp, Homo sapien
caacagcaagaacaccttagtagac

SEQ ID NO: 4087092 - DNA, 25 bp, Homo sapien
cagcaagaacaccttagtagacact

SEQ ID NO: 4087093 - DNA, 25 bp, Homo sapien
tctattataagagtgtccaaagcca

SEQ ID NO: 4087094 - DNA, 25 bp, Homo sapien
gacctcaaattgctgtcgtaacatg

SEQ ID NO: 4087095 - DNA, 25 bp, Homo sapien
agccaaatctcttgcagccctcagg

SEQ ID NO: 4087096 - DNA, 25 bp, Homo sapien
tccggtgcttttgaacacgagtgac

SEQ ID NO: 4087097 - DNA, 25 bp, Homo sapien
ccctcactgctcaatgaatgacgtt

SEQ ID NO: 4087098 - DNA, 25 bp, Homo sapien
accttagccctcactgctcaatgaa

SEQ ID NO: 4087099 - DNA, 25 bp, Homo sapien
tgatttttacaacaacactggtcaa

SEQ ID NO: 4087100 - DNA, 25 bp, Homo sapien
actggtcaaccaggtccaccttagc

SEQ ID NO: 4087101 - DNA, 25 bp, Homo sapien
tctgcatttggtgtacatgatcttc

SEQ ID NO: 4087102 - DNA, 25 bp, Homo sapien
ttaccgaaagtacgggcatccacac

SEQ ID NO: 4087103 - DNA, 25 bp, Homo sapien
gatgaaccgagcatcattaccgaaa

SEQ ID NO: 4087104 - DNA, 25 bp, Homo sapien
catctctacaccattgaattttgag

SEQ ID NO: 4087105 - DNA, 25 bp, Homo sapien
gaccatgaactttccgtaagagaga

SEQ ID NO: 4087106 - DNA, 25 bp, Homo sapien
gaaaccttgagatgttagaaatcag

SEQ ID NO: 4087107 - DNA, 25 bp, Homo sapien
ctctccatttggagttatggtaatc

SEQ ID NO: 4087108 - DNA, 25 bp, Homo sapien
gaaactattatactgcactggcttg

SEQ ID NO: 4087109 - DNA, 25 bp, Homo sapien
tgacctcagcatccttggtgatggc

SEQ ID NO: 4087110 - DNA, 25 bp, Homo sapien
aatcaaatgctatggtgacctcagc

SEQ ID NO: 4087111 - DNA, 25 bp, Homo sapien
gatgcacaggtgaatcatcccatct

SEQ ID NO: 4087112 - DNA, 25 bp, Homo sapien
tgatggcagacacagcatagatgca

SEQ ID NO: 4087113 - DNA, 25 bp, Homo sapien
tattcttgctaaaaaggcataagcg

SEQ ID NO: 4087114 - DNA, 25 bp, Homo sapien
taagtactctgtgcataacaacagg

SEQ ID NO: 4087115 - DNA, 25 bp, Homo sapien
tgagcagtatcatacaaggtatccg

SEQ ID NO: 4087116 - DNA, 25 bp, Homo sapien
tgtaatttccaggagtgtctcatac

SEQ ID NO: 4087117 - DNA, 25 bp, Homo sapien
caattccggtttcccttgtgacagg

SEQ ID NO: 4087118 - DNA, 25 bp, Homo sapien
gacaattccggtttcccttgtgaca

SEQ ID NO: 4087119 - DNA, 25 bp, Homo sapien
acaggcacagtccactttataatta

SEQ ID NO: 4087120 - DNA, 25 bp, Homo sapien
tgtgacaggcacagtccactttata

SEQ ID NO: 4087121 - DNA, 25 bp, Homo sapien
tggtaggagtggcagttctgtagca

SEQ ID NO: 4087122 - DNA, 25 bp, Homo sapien
catgatcactggatacagttacttt

SEQ ID NO: 4087123 - DNA, 25 bp, Homo sapien
tctctagctctttccgtcgtgcttt

SEQ ID NO: 4087124 - DNA, 25 bp, Homo sapien
ttttctacgtctagtctctgctcca

SEQ ID NO: 4087125 - DNA, 25 bp, Homo sapien
gattgctggtcattattctcctctg

SEQ ID NO: 4087126 - DNA, 25 bp, Homo sapien
tagctcccctacttaaaccatgcgg

SEQ ID NO: 4087127 - DNA, 25 bp, Homo sapien
taaactgttaactcatgtgaggcca

SEQ ID NO: 4087128 - DNA, 25 bp, Homo sapien
ccacattgatataaagggcactaag

SEQ ID NO: 4087129 - DNA, 25 bp, Homo sapien
gataactaacccctattctctggtg

SEQ ID NO: 4087130 - DNA, 25 bp, Homo sapien
cctgctatgagctaggttctcctgg

SEQ ID NO: 4087131 - DNA, 25 bp, Homo sapien
taggttctcctggtcatctataacc

SEQ ID NO: 4087132 - DNA, 25 bp, Homo sapien
tggtcatctataacctcttctttct

SEQ ID NO: 4087133 - DNA, 25 bp, Homo sapien
cctcctgctatgagctaggttctcc

SEQ ID NO: 4087134 - DNA, 25 bp, Homo sapien
caaagtaatgtcagacagtactcac

SEQ ID NO: 4087135 - DNA, 25 bp, Homo sapien
gagaacagaagaggttcacatgatg

SEQ ID NO: 4087136 - DNA, 25 bp, Homo sapien
caatgagatgatacaaagtcaagag

SEQ ID NO: 4087137 - DNA, 25 bp, Homo sapien
taaccttcaggtcaaatcaatgaga

SEQ ID NO: 4087138 - DNA, 25 bp, Homo sapien
cagaaattcatttaactaccagtaa

SEQ ID NO: 4087139 - DNA, 25 bp, Homo sapien
tcaaatgaggacgagtggatagctt

SEQ ID NO: 4087140 - DNA, 25 bp, Homo sapien
tagaaagagatagtactggtgtaga

SEQ ID NO: 4087141 - DNA, 25 bp, Homo sapien
taaataaaggcaaggtcaaacataa

SEQ ID NO: 4087142 - DNA, 25 bp, Homo sapien
tggcttctacctttctatcttccct

SEQ ID NO: 4087143 - DNA, 25 bp, Homo sapien
gcttctacctttctatcttccctgg

SEQ ID NO: 4087144 - DNA, 25 bp, Homo sapien
cttctacctttctatcttccctggt

SEQ ID NO: 4087145 - DNA, 25 bp, Homo sapien
gatggcttctacctttctatcttcc

SEQ ID NO: 4087146 - DNA, 25 bp, Homo sapien
cctgcttgggaagacctccgggtat

SEQ ID NO: 4087147 - DNA, 25 bp, Homo sapien
tacatcagagttgctctgttccaag

SEQ ID NO: 4087148 - DNA, 25 bp, Homo sapien
tgttccaagggctgatcccgccgct

SEQ ID NO: 4087149 - DNA, 25 bp, Homo sapien
ggtgcttgggatggtaacatttgaa

SEQ ID NO: 4087150 - DNA, 25 bp, Homo sapien
caatagtagggtcagatgcttacca

SEQ ID NO: 4087151 - DNA, 25 bp, Homo sapien
tattgtgatatggagcaaagctgaa

SEQ ID NO: 4087152 - DNA, 25 bp, Homo sapien
ggccaatgaaatggttccagttaaa

SEQ ID NO: 4087153 - DNA, 25 bp, Homo sapien
aagaggctagcgacaaatgtttgcg

SEQ ID NO: 4087154 - DNA, 25 bp, Homo sapien
cgagaaattcgactcttcggccggg

SEQ ID NO: 4087155 - DNA, 25 bp, Homo sapien
gctgaactggtcctgtaccgagaaa

SEQ ID NO: 4087156 - DNA, 25 bp, Homo sapien
cagtaattgacaccacagttgggtc

SEQ ID NO: 4087157 - DNA, 25 bp, Homo sapien
gcagcacggttgacatgggatccag

SEQ ID NO: 4087158 - DNA, 25 bp, Homo sapien
ctaagacagcccttgccagactgga

SEQ ID NO: 4087159 - DNA, 25 bp, Homo sapien
gacaaacgtcatctagaaactagga

SEQ ID NO: 4087160 - DNA, 25 bp, Homo sapien
ccagactggacttataaaggatgca

SEQ ID NO: 4087161 - DNA, 25 bp, Homo sapien
tgagcaactagaacacaaggatatc

SEQ ID NO: 4087162 - DNA, 25 bp, Homo sapien
ccgttgtgatacgtaaagggcactc

SEQ ID NO: 4087163 - DNA, 25 bp, Homo sapien
ggccttcgacgtctctcagggataa

SEQ ID NO: 4087164 - DNA, 25 bp, Homo sapien
aagggcactcaacagggcactcttg

SEQ ID NO: 4087165 - DNA, 25 bp, Homo sapien
acatgtttagggtcgttgccagtac

SEQ ID NO: 4087166 - DNA, 25 bp, Homo sapien
cctcaagggttctcagaagagacat

SEQ ID NO: 4087167 - DNA, 25 bp, Homo sapien
tgctctcactcaggaacctcaaggg

SEQ ID NO: 4087168 - DNA, 25 bp, Homo sapien
ttgatcaaggaacaggaattatgcc

SEQ ID NO: 4087169 - DNA, 25 bp, Homo sapien
gtgttctagaggacccagggcctaa

SEQ ID NO: 4087170 - DNA, 25 bp, Homo sapien
ctgaggaaggcagcctgaatccaga

SEQ ID NO: 4087171 - DNA, 25 bp, Homo sapien
tgaggaaggcagcctgaatccagat

SEQ ID NO: 4087172 - DNA, 25 bp, Homo sapien
caaataatctacatgcagcatcctc

SEQ ID NO: 4087173 - DNA, 25 bp, Homo sapien
catcctcatgtacgtgatgccagtg

SEQ ID NO: 4087174 - DNA, 25 bp, Homo sapien
cctcatgtacgtgatgccagtggag

SEQ ID NO: 4087175 - DNA, 25 bp, Homo sapien
atgcagcatcctcatgtacgtgatg

SEQ ID NO: 4087176 - DNA, 25 bp, Homo sapien
gcattgtctttgcagatactagaag

SEQ ID NO: 4087177 - DNA, 25 bp, Homo sapien
ctcattgctttggtataggtgctga

SEQ ID NO: 4087178 - DNA, 25 bp, Homo sapien
gatactagaagagctactattctca

SEQ ID NO: 4087179 - DNA, 25 bp, Homo sapien
tttgagtcatcccttcttctaaggc

SEQ ID NO: 4087180 - DNA, 25 bp, Homo sapien
gaaacaatcattggtcatataatca

SEQ ID NO: 4087181 - DNA, 25 bp, Homo sapien
catataatcagaaaggttttagata

SEQ ID NO: 4087182 - DNA, 25 bp, Homo sapien
agacctgaaacaatcattggtcata

SEQ ID NO: 4087183 - DNA, 25 bp, Homo sapien
caatcattggtcatataatcagaaa

SEQ ID NO: 4087184 - DNA, 25 bp, Homo sapien
gcctcagcctcctgtttagggaggg

SEQ ID NO: 4087185 - DNA, 25 bp, Homo sapien
gcctcctgtttagggagggattaca

SEQ ID NO: 4087186 - DNA, 25 bp, Homo sapien
cagcctcctgtttagggagggatta

SEQ ID NO: 4087187 - DNA, 25 bp, Homo sapien
ctcagcctcctgtttagggagggat

SEQ ID NO: 4087188 - DNA, 25 bp, Homo sapien
tataacttgcgcatttgactgctgc

SEQ ID NO: 4087189 - DNA, 25 bp, Homo sapien
tcactgttagactagggcagaagct

SEQ ID NO: 4087190 - DNA, 25 bp, Homo sapien
ttccaaccagggcatgtgataacaa

SEQ ID NO: 4087191 - DNA, 25 bp, Homo sapien
caaaaaaggctggtgactaggaatc

SEQ ID NO: 4087192 - DNA, 25 bp, Homo sapien
agtttactccatatacccaactaag

SEQ ID NO: 4087193 - DNA, 25 bp, Homo sapien
ccaactaaggttattcctaggcagt

SEQ ID NO: 4087194 - DNA, 25 bp, Homo sapien
cagctgattacttaggctcttctaa

SEQ ID NO: 4087195 - DNA, 25 bp, Homo sapien
gaaatttatcaaaggctcacgtatg

SEQ ID NO: 4087196 - DNA, 25 bp, Homo sapien
aacaaggcagtttcatgggaactat

SEQ ID NO: 4087197 - DNA, 25 bp, Homo sapien
gctcgtcttacacctcaagagaaag

SEQ ID NO: 4087198 - DNA, 25 bp, Homo sapien
ctggaaattgcaggtgagagtcacc

SEQ ID NO: 4087199 - DNA, 25 bp, Homo sapien
catgccaggcccaagtttgaattaa

SEQ ID NO: 4087200 - DNA, 25 bp, Homo sapien
caaatgaacgactactaggttaagg

SEQ ID NO: 4087201 - DNA, 25 bp, Homo sapien
tgtaggaaagataccaagcagaaca

SEQ ID NO: 4087202 - DNA, 25 bp, Homo sapien
tagcagggatattactccccggcag

SEQ ID NO: 4087203 - DNA, 25 bp, Homo sapien
aaattttatcagattgctagcaggg

SEQ ID NO: 4087204 - DNA, 25 bp, Homo sapien
cattacaagtatgtgcacaagcaga

SEQ ID NO: 4087205 - DNA, 25 bp, Homo sapien
tgacaactttttacagggaaggtgc

SEQ ID NO: 4087206 - DNA, 25 bp, Homo sapien
gccaaccaggtaccacttcaagcat

SEQ ID NO: 4087207 - DNA, 25 bp, Homo sapien
agtttcgtctcacccgccatgttca

SEQ ID NO: 4087208 - DNA, 25 bp, Homo sapien
ttatatttagtcctgtgagaactgc

SEQ ID NO: 4087209 - DNA, 25 bp, Homo sapien
tttgctaacccaccctgacactgta

SEQ ID NO: 4087210 - DNA, 25 bp, Homo sapien
gaatgttgaccccttgtcaataaaa

SEQ ID NO: 4087211 - DNA, 25 bp, Homo sapien
tctatttagtcaaacggatcacttt

SEQ ID NO: 4087212 - DNA, 25 bp, Homo sapien
caataggttaaagtatatccccaag

SEQ ID NO: 4087213 - DNA, 25 bp, Homo sapien
cacagtagttagcaaagaattatga

SEQ ID NO: 4087214 - DNA, 25 bp, Homo sapien
tgagactagtaactgggaaaccatc

SEQ ID NO: 4087215 - DNA, 25 bp, Homo sapien
tatgaggcactaaactagggtagga

SEQ ID NO: 4087216 - DNA, 25 bp, Homo sapien
taatttaaggctctacagtaaagcc

SEQ ID NO: 4087217 - DNA, 25 bp, Homo sapien
aaactccaggtaaatcaaatgtgac

SEQ ID NO: 4087218 - DNA, 25 bp, Homo sapien
tgtaatctacaatggctcttaactg

SEQ ID NO: 4087219 - DNA, 25 bp, Homo sapien
tcaccaactaaaggtactgggatgc

SEQ ID NO: 4087220 - DNA, 25 bp, Homo sapien
catcagatagcgagacttccatttc

SEQ ID NO: 4087221 - DNA, 25 bp, Homo sapien
acttggtgacattctgctccatcag

SEQ ID NO: 4087222 - DNA, 25 bp, Homo sapien
tgactggagacagaggccgaagtaa

SEQ ID NO: 4087223 - DNA, 25 bp, Homo sapien
cagaggccgaagtaacttggtgaca

SEQ ID NO: 4087224 - DNA, 25 bp, Homo sapien
tcaaactgtagaggagtgttgcagc

SEQ ID NO: 4087225 - DNA, 25 bp, Homo sapien
cagtagtaagagatgtgactggtga

SEQ ID NO: 4087226 - DNA, 25 bp, Homo sapien
tgttgcagcgactagcagtagtaag

SEQ ID NO: 4087227 - DNA, 25 bp, Homo sapien
gaggctgtatccatttcgacactcc

SEQ ID NO: 4087228 - DNA, 25 bp, Homo sapien
caaacaacctgggaaagacacttca

SEQ ID NO: 4087229 - DNA, 25 bp, Homo sapien
taacaggccacaatgaccctgaggt

SEQ ID NO: 4087230 - DNA, 25 bp, Homo sapien
caagatgagaggctaccaggtaaca

SEQ ID NO: 4087231 - DNA, 25 bp, Homo sapien
taacagatactacaggcagctagag

SEQ ID NO: 4087232 - DNA, 25 bp, Homo sapien
ttgataaagtatgacactctattcc

SEQ ID NO: 4087233 - DNA, 25 bp, Homo sapien
aaacctgtattgataaagtatgaca

SEQ ID NO: 4087234 - DNA, 25 bp, Homo sapien
cctgtattgataaagtatgacactc

SEQ ID NO: 4087235 - DNA, 25 bp, Homo sapien
tattgataaagtatgacactctatt

SEQ ID NO: 4087236 - DNA, 25 bp, Homo sapien
caaatgctacaagggataaggaaca

SEQ ID NO: 4087237 - DNA, 25 bp, Homo sapien
tccttaaattgcaagtgaaaccatg

SEQ ID NO: 4087238 - DNA, 25 bp, Homo sapien
gaatacagcaaagagtatggccatt

SEQ ID NO: 4087239 - DNA, 25 bp, Homo sapien
tgtcacagcctttgctacaaaaaag

SEQ ID NO: 4087240 - DNA, 25 bp, Homo sapien
gcagaactcatctcaatggacagaa

SEQ ID NO: 4087241 - DNA, 25 bp, Homo sapien
catacaaggaaagagttagactggt

SEQ ID NO: 4087242 - DNA, 25 bp, Homo sapien
tagatgagagtttagcaacctacag

SEQ ID NO: 4087243 - DNA, 25 bp, Homo sapien
taaacatctcaagcacatacaagga

SEQ ID NO: 4087244 - DNA, 25 bp, Homo sapien
ggcctatgcgcaggggaactctcag

SEQ ID NO: 4087245 - DNA, 25 bp, Homo sapien
tcgggtgacagggactcgggcctat

SEQ ID NO: 4087246 - DNA, 25 bp, Homo sapien
actcgggcctatgcgcaggggaact

SEQ ID NO: 4087247 - DNA, 25 bp, Homo sapien
tgacagggactcgggcctatgcgca

SEQ ID NO: 4087248 - DNA, 25 bp, Homo sapien
tcctccatctacattgacagtcctg

SEQ ID NO: 4087249 - DNA, 25 bp, Homo sapien
gacagtcctgtgtagtcacagtcac

SEQ ID NO: 4087250 - DNA, 25 bp, Homo sapien
aacttactgtgactgagtggccgcc

SEQ ID NO: 4087251 - DNA, 25 bp, Homo sapien
ggaacacattcatgaacactcactc

SEQ ID NO: 4087252 - DNA, 25 bp, Homo sapien
acacacacaaacacacacgctccta

SEQ ID NO: 4087253 - DNA, 25 bp, Homo sapien
cacacacaaacacacacgctcctac

SEQ ID NO: 4087254 - DNA, 25 bp, Homo sapien
cccaccaaacacacacacaacacac

SEQ ID NO: 4087255 - DNA, 25 bp, Homo sapien
ccccaccaaacacacacacaacaca

SEQ ID NO: 4087256 - DNA, 25 bp, Homo sapien
tacagtccatctgctcgaggcatag

SEQ ID NO: 4087257 - DNA, 25 bp, Homo sapien
gaaaccagtctcagaagtgggtccg

SEQ ID NO: 4087258 - DNA, 25 bp, Homo sapien
tgacaaggatccacgagagaggtct

SEQ ID NO: 4087259 - DNA, 25 bp, Homo sapien
gttgaactctgtccgaaatgcctgg

SEQ ID NO: 4087260 - DNA, 25 bp, Homo sapien
cgtagaacctattaccatgccttga

SEQ ID NO: 4087261 - DNA, 25 bp, Homo sapien
cattgcttacacaggccgtagaacc

SEQ ID NO: 4087262 - DNA, 25 bp, Homo sapien
accataatccgtgccctgcctagta

SEQ ID NO: 4087263 - DNA, 25 bp, Homo sapien
taaactataagttctaggaaggcaa

SEQ ID NO: 4087264 - DNA, 25 bp, Homo sapien
gttttcggtactccagcagggatac

SEQ ID NO: 4087265 - DNA, 25 bp, Homo sapien
tccgttttcggtactccagcaggga

SEQ ID NO: 4087266 - DNA, 25 bp, Homo sapien
ccgttttcggtactccagcagggat

SEQ ID NO: 4087267 - DNA, 25 bp, Homo sapien
tgtttccgttttcggtactccagca

SEQ ID NO: 4087268 - DNA, 25 bp, Homo sapien
acggagttactgctgccttgcccag

SEQ ID NO: 4087269 - DNA, 25 bp, Homo sapien
tgtcggaaacggagttactgctgcc

SEQ ID NO: 4087270 - DNA, 25 bp, Homo sapien
catgggcaccagtgtcggaaacgga

SEQ ID NO: 4087271 - DNA, 25 bp, Homo sapien
ttgctctgtgcagagtcacctcccc

SEQ ID NO: 4087272 - DNA, 25 bp, Homo sapien
gaagatggagttcgggctgaggatc

SEQ ID NO: 4087273 - DNA, 25 bp, Homo sapien
ggcttaccgcctccaaatgggacat

SEQ ID NO: 4087274 - DNA, 25 bp, Homo sapien
gaatctgatgggcttaccgcctcca

SEQ ID NO: 4087275 - DNA, 25 bp, Homo sapien
cctctggaatctgatgggcttaccg

SEQ ID NO: 4087276 - DNA, 25 bp, Homo sapien
tgttcccatcaagtgttcccataga

SEQ ID NO: 4087277 - DNA, 25 bp, Homo sapien
taaatcagctgaacaggacagatgg

SEQ ID NO: 4087278 - DNA, 25 bp, Homo sapien
gaacttggctggattcttgactcac

SEQ ID NO: 4087279 - DNA, 25 bp, Homo sapien
aaaggcagtgttagtgcccaccaaa

SEQ ID NO: 4087280 - DNA, 25 bp, Homo sapien
atgctccctccttctcggagtcgtt

SEQ ID NO: 4087281 - DNA, 25 bp, Homo sapien
ttttgggccaccctcacgctgcttc

SEQ ID NO: 4087282 - DNA, 25 bp, Homo sapien
ctcacgctgcttcggaggaccttgg

SEQ ID NO: 4087283 - DNA, 25 bp, Homo sapien
tctgtgatgttactctcccatgtgg

SEQ ID NO: 4087284 - DNA, 25 bp, Homo sapien
tacaggactcggctcatgtgtccct

SEQ ID NO: 4087285 - DNA, 25 bp, Homo sapien
tagatcttacaaatgtggtagccca

SEQ ID NO: 4087286 - DNA, 25 bp, Homo sapien
gcataagtgggctggaacctagcat

SEQ ID NO: 4087287 - DNA, 25 bp, Homo sapien
gcactaggcatgaactgtacaggac

SEQ ID NO: 4087288 - DNA, 25 bp, Homo sapien
ccttcatcgaggtagatttccagga

SEQ ID NO: 4087289 - DNA, 25 bp, Homo sapien
cccgtactgctctctttgtgacaaa

SEQ ID NO: 4087290 - DNA, 25 bp, Homo sapien
taaatgcctgatgtgattcccgtct

SEQ ID NO: 4087291 - DNA, 25 bp, Homo sapien
gccagaagggcaaaatgagtggtta

SEQ ID NO: 4087292 - DNA, 25 bp, Homo sapien
gctgtatctggaagggctgtaaact

SEQ ID NO: 4087293 - DNA, 25 bp, Homo sapien
tttagagagtgctgagcttaatgtc

SEQ ID NO: 4087294 - DNA, 25 bp, Homo sapien
gcttaatgtctctgggccttctcca

SEQ ID NO: 4087295 - DNA, 25 bp, Homo sapien
gtaaactgttgctcctttagagagt

SEQ ID NO: 4087296 - DNA, 25 bp, Homo sapien
tattacctgaggacaagcagatgat

SEQ ID NO: 4087297 - DNA, 25 bp, Homo sapien
gatgaccaggacaatttgggaccca

SEQ ID NO: 4087298 - DNA, 25 bp, Homo sapien
cactcctatggctagagaccagcaa

SEQ ID NO: 4087299 - DNA, 25 bp, Homo sapien
caagtcccttaaatggctggtgaac

SEQ ID NO: 4087300 - DNA, 25 bp, Homo sapien
tgtccgaggactatcacactgcagg

SEQ ID NO: 4087301 - DNA, 25 bp, Homo sapien
gaggctttgtgattctgtccgagga

SEQ ID NO: 4087302 - DNA, 25 bp, Homo sapien
tgtggctggctgctaaaataccctg

SEQ ID NO: 4087303 - DNA, 25 bp, Homo sapien
tccaggtctcagtgcagtagttcga

SEQ ID NO: 4087304 - DNA, 25 bp, Homo sapien
accctggaggcctggtagacagctg

SEQ ID NO: 4087305 - DNA, 25 bp, Homo sapien
attggaaaccgcagataccctggag

SEQ ID NO: 4087306 - DNA, 25 bp, Homo sapien
cagcactgggcagactgatagtccg

SEQ ID NO: 4087307 - DNA, 25 bp, Homo sapien
tgatagtccgtaagtctgatggcaa

SEQ ID NO: 4087308 - DNA, 25 bp, Homo sapien
ggctggagtcggtactggtgcacac

SEQ ID NO: 4087309 - DNA, 25 bp, Homo sapien
gcagtggctggagtcggtactggtg

SEQ ID NO: 4087310 - DNA, 25 bp, Homo sapien
agtggctggagtcggtactggtgca

SEQ ID NO: 4087311 - DNA, 25 bp, Homo sapien
ccttgcagtggctggagtcggtact

SEQ ID NO: 4087312 - DNA, 25 bp, Homo sapien
gaaagtcccgtctgagtcttgactc

SEQ ID NO: 4087313 - DNA, 25 bp, Homo sapien
aaagtcccgtctgagtcttgactcc

SEQ ID NO: 4087314 - DNA, 25 bp, Homo sapien
aaaagatgtcctcactgcacaagtg

SEQ ID NO: 4087315 - DNA, 25 bp, Homo sapien
tgactacgggctacaggcaaggatg

SEQ ID NO: 4087316 - DNA, 25 bp, Homo sapien
aatatgctcggcctaggttccagag

SEQ ID NO: 4087317 - DNA, 25 bp, Homo sapien
taaacagtattcttggtggacacac

SEQ ID NO: 4087318 - DNA, 25 bp, Homo sapien
ctccagttggtgcaggttccaagct

SEQ ID NO: 4087319 - DNA, 25 bp, Homo sapien
ggtgcaggttccaagctttactatc

SEQ ID NO: 4087320 - DNA, 25 bp, Homo sapien
ggttccaagctttactatccttgcc

SEQ ID NO: 4087321 - DNA, 25 bp, Homo sapien
aagctttactatccttgcctatttc

SEQ ID NO: 4087322 - DNA, 25 bp, Homo sapien
gttggaggctcagacaatctactca

SEQ ID NO: 4087323 - DNA, 25 bp, Homo sapien
tacttcatgggttactgagctgtga

SEQ ID NO: 4087324 - DNA, 25 bp, Homo sapien
gaagcattcccaaaccactcggtat

SEQ ID NO: 4087325 - DNA, 25 bp, Homo sapien
gcaattggcctatatcatgtctcat

SEQ ID NO: 4087326 - DNA, 25 bp, Homo sapien
tgcagtcacaagtgcatgctcccca

SEQ ID NO: 4087327 - DNA, 25 bp, Homo sapien
cccaatcatggaggcggtcctgctc

SEQ ID NO: 4087328 - DNA, 25 bp, Homo sapien
ggtcctgctcatgggatcatcaact

SEQ ID NO: 4087329 - DNA, 25 bp, Homo sapien
caagtgcatgctccccaatcatgga

SEQ ID NO: 4087330 - DNA, 25 bp, Homo sapien
aaagattgtgtaccccacctgggct

SEQ ID NO: 4087331 - DNA, 25 bp, Homo sapien
catttgagcaaacacctgatttcga

SEQ ID NO: 4087332 - DNA, 25 bp, Homo sapien
aaaagaaggtccactgcagcaccag

SEQ ID NO: 4087333 - DNA, 25 bp, Homo sapien
gggtgtacaacaggcacaatgcact

SEQ ID NO: 4087334 - DNA, 25 bp, Homo sapien
agcattctaatcaccataagcccag

SEQ ID NO: 4087335 - DNA, 25 bp, Homo sapien
gaaagaagagaccttactttgccca

SEQ ID NO: 4087336 - DNA, 25 bp, Homo sapien
tattcctggccccattatcatgggc

SEQ ID NO: 4087337 - DNA, 25 bp, Homo sapien
cataaaaagcgaaggaagatcagac

SEQ ID NO: 4087338 - DNA, 25 bp, Homo sapien
tgattcgcacccagccaaagggctg

SEQ ID NO: 4087339 - DNA, 25 bp, Homo sapien
ccacagagtctgcaacgttcaagaa

SEQ ID NO: 4087340 - DNA, 25 bp, Homo sapien
tagaaagagtttgccgactcctgct

SEQ ID NO: 4087341 - DNA, 25 bp, Homo sapien
gaatttcactcacatcgtcccagga

SEQ ID NO: 4087342 - DNA, 25 bp, Homo sapien
cactgcattgttgcttgcctgaaca

SEQ ID NO: 4087343 - DNA, 25 bp, Homo sapien
taccgtcttaatagaagccaccact

SEQ ID NO: 4087344 - DNA, 25 bp, Homo sapien
tgactcctccactgtacttactgaa

SEQ ID NO: 4087345 - DNA, 25 bp, Homo sapien
tgtgtacttgcaaaacatatcctga

SEQ ID NO: 4087346 - DNA, 25 bp, Homo sapien
ctggggggcaaaagggccagactgc

SEQ ID NO: 4087347 - DNA, 25 bp, Homo sapien
ggggcaaaagggccagactgctgtt

SEQ ID NO: 4087348 - DNA, 25 bp, Homo sapien
caaaagggccagactgctgttttta

SEQ ID NO: 4087349 - DNA, 25 bp, Homo sapien
ggcaaaagggccagactgctgtttt

SEQ ID NO: 4087350 - DNA, 25 bp, Homo sapien
gagcctcacagcagattatgcgggt

SEQ ID NO: 4087351 - DNA, 25 bp, Homo sapien
cctagttttgctgtcaagttgtcca

SEQ ID NO: 4087352 - DNA, 25 bp, Homo sapien
tgctttgtggtgctttaacgggtaa

SEQ ID NO: 4087353 - DNA, 25 bp, Homo sapien
gtgccattgcttccactagaacaga

SEQ ID NO: 4087354 - DNA, 25 bp, Homo sapien
gactgtgtgaaccatagctatttaa

SEQ ID NO: 4087355 - DNA, 25 bp, Homo sapien
tgttttacctgcatgtctttggcat

SEQ ID NO: 4087356 - DNA, 25 bp, Homo sapien
ggcatactttgattgtctctataga

SEQ ID NO: 4087357 - DNA, 25 bp, Homo sapien
tctctcaggagttaaagaacaagtt

SEQ ID NO: 4087358 - DNA, 25 bp, Homo sapien
tttacatatctgtcacctaacattg

SEQ ID NO: 4087359 - DNA, 25 bp, Homo sapien
tatctgtcacctaacattgttacct

SEQ ID NO: 4087360 - DNA, 25 bp, Homo sapien
catatctgtcacctaacattgttac

SEQ ID NO: 4087361 - DNA, 25 bp, Homo sapien
taagtttacatatctgtcacctaac

SEQ ID NO: 4087362 - DNA, 25 bp, Homo sapien
ccttgctctttctcctaggatggag

SEQ ID NO: 4087363 - DNA, 25 bp, Homo sapien
ttaccacgttagccaggcaggtctc

SEQ ID NO: 4087364 - DNA, 25 bp, Homo sapien
cccaggcaggctggcctcagcctcc

SEQ ID NO: 4087365 - DNA, 25 bp, Homo sapien
cacgttagccaggcaggtctctaac

SEQ ID NO: 4087366 - DNA, 25 bp, Homo sapien
gagttatagttattgaatggtgagc

SEQ ID NO: 4087367 - DNA, 25 bp, Homo sapien
gctgagttatagttattgaatggtg

SEQ ID NO: 4087368 - DNA, 25 bp, Homo sapien
atagttattgaatggtgagctcacc

SEQ ID NO: 4087369 - DNA, 25 bp, Homo sapien
gttatagttattgaatggtgagctc

SEQ ID NO: 4087370 - DNA, 25 bp, Homo sapien
gagtatttggcttcgggcatggaca

SEQ ID NO: 4087371 - DNA, 25 bp, Homo sapien
tatccctggaaccacacatggactg

SEQ ID NO: 4087372 - DNA, 25 bp, Homo sapien
catggtgactctgtctaaggcccga

SEQ ID NO: 4087373 - DNA, 25 bp, Homo sapien
ataattccagcaaacgttccagggc

SEQ ID NO: 4087374 - DNA, 25 bp, Homo sapien
tacggtctacaagatctgcgcctgg

SEQ ID NO: 4087375 - DNA, 25 bp, Homo sapien
tgggtacgctgcatttattgctcgg

SEQ ID NO: 4087376 - DNA, 25 bp, Homo sapien
ggtacgctgcagagagacaccttag

SEQ ID NO: 4087377 - DNA, 25 bp, Homo sapien
ccttcctgaaggagtcggatagatt

SEQ ID NO: 4087378 - DNA, 25 bp, Homo sapien
gccgggccgcgccggtgcacgagag

SEQ ID NO: 4087379 - DNA, 25 bp, Homo sapien
tcgggagcgcgcctccgccgggccg

SEQ ID NO: 4087380 - DNA, 25 bp, Homo sapien
cccgctcgggagcgcgcctccgccg

SEQ ID NO: 4087381 - DNA, 25 bp, Homo sapien
ggccgcgccggtgcacgagagcgcg

SEQ ID NO: 4087382 - DNA, 25 bp, Homo sapien
ggcatcacataacctgagttcaact

SEQ ID NO: 4087383 - DNA, 25 bp, Homo sapien
gaaaatgatcatacggcccaaagca

SEQ ID NO: 4087384 - DNA, 25 bp, Homo sapien
gcccaaagcaacctatatgttcaat

SEQ ID NO: 4087385 - DNA, 25 bp, Homo sapien
taaagccaaatactcacaactaact

SEQ ID NO: 4087386 - DNA, 25 bp, Homo sapien
tagcctagatccatcgcggccgccg

SEQ ID NO: 4087387 - DNA, 25 bp, Homo sapien
ttgccaggcatctagccagctggcg

SEQ ID NO: 4087388 - DNA, 25 bp, Homo sapien
aggtcgggcgggcagtggagcacgc

SEQ ID NO: 4087389 - DNA, 25 bp, Homo sapien
caccgagtcgaaggtgacgttgagc

SEQ ID NO: 4087390 - DNA, 25 bp, Homo sapien
gattccttctgtaggagctggtcca

SEQ ID NO: 4087391 - DNA, 25 bp, Homo sapien
gctggtccatgaagccaaaattgga

SEQ ID NO: 4087392 - DNA, 25 bp, Homo sapien
tggagggtgggatctcagattcctt

SEQ ID NO: 4087393 - DNA, 25 bp, Homo sapien
gagcctgctgcctcgcttggcaaga

SEQ ID NO: 4087394 - DNA, 25 bp, Homo sapien
agtgtgcctcaagcgggcccatggc

SEQ ID NO: 4087395 - DNA, 25 bp, Homo sapien
ctcagtgtgcctcaagcgggcccat

SEQ ID NO: 4087396 - DNA, 25 bp, Homo sapien
gcacccaactccgacactagaacct

SEQ ID NO: 4087397 - DNA, 25 bp, Homo sapien
caactccgacactagaacctccgga

SEQ ID NO: 4087398 - DNA, 25 bp, Homo sapien
ggtactgagtccgggagaactcctc

SEQ ID NO: 4087399 - DNA, 25 bp, Homo sapien
cgccggtcccgctgccatccttggc

SEQ ID NO: 4087400 - DNA, 25 bp, Homo sapien
ctcctgaggcggctggttgcctgaa

SEQ ID NO: 4087401 - DNA, 25 bp, Homo sapien
cagctcctgaggcggctggttgcct

SEQ ID NO: 4087402 - DNA, 25 bp, Homo sapien
gtaatctctgaggtcaaatcagagt

SEQ ID NO: 4087403 - DNA, 25 bp, Homo sapien
attcccaccgcactgccagccagtg

SEQ ID NO: 4087404 - DNA, 25 bp, Homo sapien
tggcagggtcggcaagattcccacc

SEQ ID NO: 4087405 - DNA, 25 bp, Homo sapien
gctaaagctgccaaaaccacgtggg

SEQ ID NO: 4087406 - DNA, 25 bp, Homo sapien
tccccattcgtgtttggaatcacgc

SEQ ID NO: 4087407 - DNA, 25 bp, Homo sapien
gatagtggccacagatatccccatt

SEQ ID NO: 4087408 - DNA, 25 bp, Homo sapien
gaaacagtagtctcggccaaacagc

SEQ ID NO: 4087409 - DNA, 25 bp, Homo sapien
tactccaggaacacgatgtgccggg

SEQ ID NO: 4087410 - DNA, 25 bp, Homo sapien
ggttctagaatctgtcatctttttt

SEQ ID NO: 4087411 - DNA, 25 bp, Homo sapien
gagaggttctagaatctgtcatctt

SEQ ID NO: 4087412 - DNA, 25 bp, Homo sapien
agaggttctagaatctgtcatcttt

SEQ ID NO: 4087413 - DNA, 25 bp, Homo sapien
gaggttctagaatctgtcatctttt

SEQ ID NO: 4087414 - DNA, 25 bp, Homo sapien
ggttcccctacatcaagctccaatt

SEQ ID NO: 4087415 - DNA, 25 bp, Homo sapien
cttttcttgttaggtcggccagtgg

SEQ ID NO: 4087416 - DNA, 25 bp, Homo sapien
ttcttgttaggtcggccagtggttc

SEQ ID NO: 4087417 - DNA, 25 bp, Homo sapien
ttaccggttcccctacatcaagctc

SEQ ID NO: 4087418 - DNA, 25 bp, Homo sapien
gcaacttgctcacctgtacggtact

SEQ ID NO: 4087419 - DNA, 25 bp, Homo sapien
tgcaacttgctcacctgtacggtac

SEQ ID NO: 4087420 - DNA, 25 bp, Homo sapien
gcccttgaacaggattactgggcag

SEQ ID NO: 4087421 - DNA, 25 bp, Homo sapien
gcagacaaaccgtcctctgcaccgg

SEQ ID NO: 4087422 - DNA, 25 bp, Homo sapien
cttgaacaggattactgggcagaca

SEQ ID NO: 4087423 - DNA, 25 bp, Homo sapien
aacaggattactgggcagacaaacc

SEQ ID NO: 4087424 - DNA, 25 bp, Homo sapien
cccaaatggtgaacataggacccaa

SEQ ID NO: 4087425 - DNA, 25 bp, Homo sapien
acctttatgaccatgcgtacccgct

SEQ ID NO: 4087426 - DNA, 25 bp, Homo sapien
taggacccaacaggtattcttcaac

SEQ ID NO: 4087427 - DNA, 25 bp, Homo sapien
aagtccctgacgtctattgtttcca

SEQ ID NO: 4087428 - DNA, 25 bp, Homo sapien
acaagaggcgccagtgttaccaaca

SEQ ID NO: 4087429 - DNA, 25 bp, Homo sapien
gatccaaacccactgacctctatgt

SEQ ID NO: 4087430 - DNA, 25 bp, Homo sapien
gaattttacaacaagcccatgaggg

SEQ ID NO: 4087431 - DNA, 25 bp, Homo sapien
gagtctcactcccaaacaagaggcg

SEQ ID NO: 4087432 - DNA, 25 bp, Homo sapien
tgtagcctgagcgtccatacagctc

SEQ ID NO: 4087433 - DNA, 25 bp, Homo sapien
tagttgtagcctgagcgtccataca

SEQ ID NO: 4087434 - DNA, 25 bp, Homo sapien
gttgtagcctgagcgtccatacagc

SEQ ID NO: 4087435 - DNA, 25 bp, Homo sapien
aatagttgtagcctgagcgtccata

SEQ ID NO: 4087436 - DNA, 25 bp, Homo sapien
gccagagaaacctatctgtcagtac

SEQ ID NO: 4087437 - DNA, 25 bp, Homo sapien
ctgccagagaaacctatctgtcagt

SEQ ID NO: 4087438 - DNA, 25 bp, Homo sapien
gagaaacctatctgtcagtactgag

SEQ ID NO: 4087439 - DNA, 25 bp, Homo sapien
aacctatctgtcagtactgaggctg

SEQ ID NO: 4087440 - DNA, 25 bp, Homo sapien
tcctccgtgacgtcctccacatctg

SEQ ID NO: 4087441 - DNA, 25 bp, Homo sapien
tatttggctgctacccagtggactt

SEQ ID NO: 4087442 - DNA, 25 bp, Homo sapien
tatctcgggcctgcagtaccaggaa

SEQ ID NO: 4087443 - DNA, 25 bp, Homo sapien
tacccacggacaatatgaacatggc

SEQ ID NO: 4087444 - DNA, 25 bp, Homo sapien
tagctgcaaactggcaactctgtgg

SEQ ID NO: 4087445 - DNA, 25 bp, Homo sapien
ccttatcaaaaagatgcgtgtcacc

SEQ ID NO: 4087446 - DNA, 25 bp, Homo sapien
actgacaggtatcgaagcagcttga

SEQ ID NO: 4087447 - DNA, 25 bp, Homo sapien
catagcctctgaccttatcaaaaag

SEQ ID NO: 4087448 - DNA, 25 bp, Homo sapien
caggtatcgaagcagcttgatgtca

SEQ ID NO: 4087449 - DNA, 25 bp, Homo sapien
agtgaagtcggcatagcgctgggct

SEQ ID NO: 4087450 - DNA, 25 bp, Homo sapien
agtcggcatagcgctgggctttgtc

SEQ ID NO: 4087451 - DNA, 25 bp, Homo sapien
tcggcatagcgctgggctttgtcca

SEQ ID NO: 4087452 - DNA, 25 bp, Homo sapien
tgaagtcggcatagcgctgggcttt

SEQ ID NO: 4087453 - DNA, 25 bp, Homo sapien
taggcttcggaaccactgtcaggca

SEQ ID NO: 4087454 - DNA, 25 bp, Homo sapien
tatgagcccaggtttagaagagaca

SEQ ID NO: 4087455 - DNA, 25 bp, Homo sapien
tagcctattcttgggagcctcactg

SEQ ID NO: 4087456 - DNA, 25 bp, Homo sapien
aaagtcatcacagggctcaactgag

SEQ ID NO: 4087457 - DNA, 25 bp, Homo sapien
tgtaatcccgatctttatattcctt

SEQ ID NO: 4087458 - DNA, 25 bp, Homo sapien
ctgcttccagttaaatatgagccct

SEQ ID NO: 4087459 - DNA, 25 bp, Homo sapien
tctgccatgtaatcccgatctttat

SEQ ID NO: 4087460 - DNA, 25 bp, Homo sapien
ccttctgccatgtaatcccgatctt

SEQ ID NO: 4087461 - DNA, 25 bp, Homo sapien
tgctcaatggggcatcaacgtagtc

SEQ ID NO: 4087462 - DNA, 25 bp, Homo sapien
tactggctccagtcaatgttcagag

SEQ ID NO: 4087463 - DNA, 25 bp, Homo sapien
cagtcaatgttcagagagtgagtca

SEQ ID NO: 4087464 - DNA, 25 bp, Homo sapien
caggaagtcggggatgctcaatggg

SEQ ID NO: 4087465 - DNA, 25 bp, Homo sapien
ttttgtgtttgttgcaccagatccc

SEQ ID NO: 4087466 - DNA, 25 bp, Homo sapien
gtgtttgttgcaccagatcccaaca

SEQ ID NO: 4087467 - DNA, 25 bp, Homo sapien
tttgtgtttgttgcaccagatccca

SEQ ID NO: 4087468 - DNA, 25 bp, Homo sapien
tgtgtttgttgcaccagatcccaac

SEQ ID NO: 4087469 - DNA, 25 bp, Homo sapien
gaagtcctgattgctaccagggatt

SEQ ID NO: 4087470 - DNA, 25 bp, Homo sapien
agtgcaactcctacagaagtcctga

SEQ ID NO: 4087471 - DNA, 25 bp, Homo sapien
taccagggatttagagtccgtctgc

SEQ ID NO: 4087472 - DNA, 25 bp, Homo sapien
cataagccaatgcatttccacttgt

SEQ ID NO: 4087473 - DNA, 25 bp, Homo sapien
gcccacaaggaaaggcgcaggaggg

SEQ ID NO: 4087474 - DNA, 25 bp, Homo sapien
gatacagtgtaccagcagcccgctg

SEQ ID NO: 4087475 - DNA, 25 bp, Homo sapien
gggtccgatcccagcctgagataca

SEQ ID NO: 4087476 - DNA, 25 bp, Homo sapien
atgaagaggggggtccgatcccagc

SEQ ID NO: 4087477 - DNA, 25 bp, Homo sapien
cagtgggcttcagggacgtgtggat

SEQ ID NO: 4087478 - DNA, 25 bp, Homo sapien
aggtagaggatctcagtgggcttca

SEQ ID NO: 4087479 - DNA, 25 bp, Homo sapien
tcagggacgtgtggatgagcccatc

SEQ ID NO: 4087480 - DNA, 25 bp, Homo sapien
gcttcagggacgtgtggatgagccc

SEQ ID NO: 4087481 - DNA, 25 bp, Homo sapien
gctgagccgatctaccaacatgtgc

SEQ ID NO: 4087482 - DNA, 25 bp, Homo sapien
ttgctgagccgatctaccaacatgt

SEQ ID NO: 4087483 - DNA, 25 bp, Homo sapien
cctcccctttgctgagccgatctac

SEQ ID NO: 4087484 - DNA, 25 bp, Homo sapien
ctttgctgagccgatctaccaacat

SEQ ID NO: 4087485 - DNA, 25 bp, Homo sapien
gccaaggctgtcatgtaactgctca

SEQ ID NO: 4087486 - DNA, 25 bp, Homo sapien
cgacgtgtgggcttgtatcctctcc

SEQ ID NO: 4087487 - DNA, 25 bp, Homo sapien
taacacgtggaactcagacaggcta

SEQ ID NO: 4087488 - DNA, 25 bp, Homo sapien
ggcaccctgacattgaaaagtggct

SEQ ID NO: 4087489 - DNA, 25 bp, Homo sapien
gaaatccctacttggcatcccacga

SEQ ID NO: 4087490 - DNA, 25 bp, Homo sapien
tgtggtgattcccaaaggcctggcc

SEQ ID NO: 4087491 - DNA, 25 bp, Homo sapien
caggtcttaagcttgaggtgggcac

SEQ ID NO: 4087492 - DNA, 25 bp, Homo sapien
gccaggccagtgatttttcaaacca

SEQ ID NO: 4087493 - DNA, 25 bp, Homo sapien
agcagagaactcctcggaggtaata

SEQ ID NO: 4087494 - DNA, 25 bp, Homo sapien
aactcctcggaggtaatatgcttca

SEQ ID NO: 4087495 - DNA, 25 bp, Homo sapien
cctcggaggtaatatgcttcaaaaa

SEQ ID NO: 4087496 - DNA, 25 bp, Homo sapien
gagaactcctcggaggtaatatgct

SEQ ID NO: 4087497 - DNA, 25 bp, Homo sapien
agggtgaagcctccatcccgggctg

SEQ ID NO: 4087498 - DNA, 25 bp, Homo sapien
ctccatcccgggctggcaaactctt

SEQ ID NO: 4087499 - DNA, 25 bp, Homo sapien
ccagggtgaagcctccatcccgggc

SEQ ID NO: 4087500 - DNA, 25 bp, Homo sapien
ccatcccgggctggcaaactcttcc

SEQ ID NO: 4087501 - DNA, 25 bp, Homo sapien
tcccccaccttttctataccacata

SEQ ID NO: 4087502 - DNA, 25 bp, Homo sapien
gcctcataggtgaagctcccagtgg

SEQ ID NO: 4087503 - DNA, 25 bp, Homo sapien
gggagaagtcgctgccaaggctggt

SEQ ID NO: 4087504 - DNA, 25 bp, Homo sapien
ggtggtgctgccacggtcctttcgt

SEQ ID NO: 4087505 - DNA, 25 bp, Homo sapien
caagctgcctgagttggcgctcctg

SEQ ID NO: 4087506 - DNA, 25 bp, Homo sapien
tctgagggttgtggccggttccaga

SEQ ID NO: 4087507 - DNA, 25 bp, Homo sapien
tccaggggactgctacccatcctga

SEQ ID NO: 4087508 - DNA, 25 bp, Homo sapien
ctgggaaggcaagcggtcctctgag

SEQ ID NO: 4087509 - DNA, 25 bp, Homo sapien
ttccagaggacactctgtggagagg

SEQ ID NO: 4087510 - DNA, 25 bp, Homo sapien
tcagcccttgctttattaccaaaca

SEQ ID NO: 4087511 - DNA, 25 bp, Homo sapien
cagcaagggctttggagctcctcac

SEQ ID NO: 4087512 - DNA, 25 bp, Homo sapien
ggaaccccatcttgagaccctagct

SEQ ID NO: 4087513 - DNA, 25 bp, Homo sapien
ggaaagctaggcacttccaacagca

SEQ ID NO: 4087514 - DNA, 25 bp, Homo sapien
cacatgggcttgtctgtctggcccc

SEQ ID NO: 4087515 - DNA, 25 bp, Homo sapien
cgtgtggcggtggtttcacaggctc

SEQ ID NO: 4087516 - DNA, 25 bp, Homo sapien
cacacaggatgggacggggcaccgg

SEQ ID NO: 4087517 - DNA, 25 bp, Homo sapien
ggcaccggcacatgggcttgtctgt

SEQ ID NO: 4087518 - DNA, 25 bp, Homo sapien
catggttgttacactgcatgttcac

SEQ ID NO: 4087519 - DNA, 25 bp, Homo sapien
cagtgtcagtgctctgtacatggtt

SEQ ID NO: 4087520 - DNA, 25 bp, Homo sapien
ttttcaatctggttggctgatcatg

SEQ ID NO: 4087521 - DNA, 25 bp, Homo sapien
gagtcagagttatacccagatttca

SEQ ID NO: 4087522 - DNA, 25 bp, Homo sapien
aaaaagctggacaagtagtgaccga

SEQ ID NO: 4087523 - DNA, 25 bp, Homo sapien
catggcagtaagagtgaatcggagc

SEQ ID NO: 4087524 - DNA, 25 bp, Homo sapien
ctcaagagtgatggaatgggagccc

SEQ ID NO: 4087525 - DNA, 25 bp, Homo sapien
gcaaggctagcacccaaatgaaggt

SEQ ID NO: 4087526 - DNA, 25 bp, Homo sapien
caactgttagggagctcatccggga

SEQ ID NO: 4087527 - DNA, 25 bp, Homo sapien
cagctgccatagtctgtggagagag

SEQ ID NO: 4087528 - DNA, 25 bp, Homo sapien
gttaccatctgccagctgccatagt

SEQ ID NO: 4087529 - DNA, 25 bp, Homo sapien
aggacagcccgctcctgaatactgc

SEQ ID NO: 4087530 - DNA, 25 bp, Homo sapien
tagaatccccatccaattcttattc

SEQ ID NO: 4087531 - DNA, 25 bp, Homo sapien
atctagaatccccatccaattctta

SEQ ID NO: 4087532 - DNA, 25 bp, Homo sapien
ctggaaactcagggttttgtaggtg

SEQ ID NO: 4087533 - DNA, 25 bp, Homo sapien
gggatctagaatccccatccaattc

SEQ ID NO: 4087534 - DNA, 25 bp, Homo sapien
ccatggtatggaaggcttgctgaga

SEQ ID NO: 4087535 - DNA, 25 bp, Homo sapien
gatgagctggattgcggtgctggtg

SEQ ID NO: 4087536 - DNA, 25 bp, Homo sapien
tgctggtggtaaggccccagcatgt

SEQ ID NO: 4087537 - DNA, 25 bp, Homo sapien
gccattcatccagcccatggtatgg

SEQ ID NO: 4087538 - DNA, 25 bp, Homo sapien
gatcttgtttctagcctaggggctg

SEQ ID NO: 4087539 - DNA, 25 bp, Homo sapien
gcacagtgacctcagaagctctttg

SEQ ID NO: 4087540 - DNA, 25 bp, Homo sapien
tgccctcagctaggatccagggccc

SEQ ID NO: 4087541 - DNA, 25 bp, Homo sapien
tttttaagccttcgaacatctaaga

SEQ ID NO: 4087542 - DNA, 25 bp, Homo sapien
tacctaacagtaaggaggcccctga

SEQ ID NO: 4087543 - DNA, 25 bp, Homo sapien
gagaccaccacctactgagagatga

SEQ ID NO: 4087544 - DNA, 25 bp, Homo sapien
gaaacaagtgcgcacaactcaggct

SEQ ID NO: 4087545 - DNA, 25 bp, Homo sapien
gaagctattgccctggaagaaccca

SEQ ID NO: 4087546 - DNA, 25 bp, Homo sapien
cccccgatggcaccggaaggactgg

SEQ ID NO: 4087547 - DNA, 25 bp, Homo sapien
gcagccgagtctctcgatcactcag

SEQ ID NO: 4087548 - DNA, 25 bp, Homo sapien
cacgggcaaattgctccagcaggcc

SEQ ID NO: 4087549 - DNA, 25 bp, Homo sapien
attgctgctgatgctccggagtcca

SEQ ID NO: 4087550 - DNA, 25 bp, Homo sapien
gggaaaccccacacagttctgagag

SEQ ID NO: 4087551 - DNA, 25 bp, Homo sapien
cattctcagtgcaggtgatccctcc

SEQ ID NO: 4087552 - DNA, 25 bp, Homo sapien
tccccagaaacaagaactgacaggt

SEQ ID NO: 4087553 - DNA, 25 bp, Homo sapien
gattctctgctaagggctcagctga

SEQ ID NO: 4087554 - DNA, 25 bp, Homo sapien
gacaataaccaaatgatgacacaag

SEQ ID NO: 4087555 - DNA, 25 bp, Homo sapien
acaataaccaaatgatgacacaaga

SEQ ID NO: 4087556 - DNA, 25 bp, Homo sapien
agacaataaccaaatgatgacacaa

SEQ ID NO: 4087557 - DNA, 25 bp, Homo sapien
ggcccatgtgccgcggtgtcggcgg

SEQ ID NO: 4087558 - DNA, 25 bp, Homo sapien
ccagccgctcgcgccctgacagtgg

SEQ ID NO: 4087559 - DNA, 25 bp, Homo sapien
cgctcgcgccctgacagtggccgcc

SEQ ID NO: 4087560 - DNA, 25 bp, Homo sapien
gccgcaggaggctgcgagaccaggg

SEQ ID NO: 4087561 - DNA, 25 bp, Homo sapien
cggcaggacacggtaatttcaatct

SEQ ID NO: 4087562 - DNA, 25 bp, Homo sapien
tgcgctcggaggctccgccgagaga

SEQ ID NO: 4087563 - DNA, 25 bp, Homo sapien
cgggacgctgcgctcggaggctccg

SEQ ID NO: 4087564 - DNA, 25 bp, Homo sapien
tttcaatcttggtggccgggacgct

SEQ ID NO: 4087565 - DNA, 25 bp, Homo sapien
actctggacagcaccggaaatcgct

SEQ ID NO: 4087566 - DNA, 25 bp, Homo sapien
agcaacagacagacagagtggatca

SEQ ID NO: 4087567 - DNA, 25 bp, Homo sapien
ggaaatcgctgtccaggaaccatgg

SEQ ID NO: 4087568 - DNA, 25 bp, Homo sapien
gggccgagctcctaccggatatctg

SEQ ID NO: 4087569 - DNA, 25 bp, Homo sapien
gagaaggtatcaaggtctagcaggt

SEQ ID NO: 4087570 - DNA, 25 bp, Homo sapien
acttggagaaggtatcaaggtctag

SEQ ID NO: 4087571 - DNA, 25 bp, Homo sapien
ttggagaaggtatcaaggtctagca

SEQ ID NO: 4087572 - DNA, 25 bp, Homo sapien
gaaggtatcaaggtctagcaggttc

SEQ ID NO: 4087573 - DNA, 25 bp, Homo sapien
tggccccgactccacccgcccctga

SEQ ID NO: 4087574 - DNA, 25 bp, Homo sapien
ggagggaaggacgtcaggtcggctc

SEQ ID NO: 4087575 - DNA, 25 bp, Homo sapien
acccgcccctgagtcgcgcccagac

SEQ ID NO: 4087576 - DNA, 25 bp, Homo sapien
gaaggacgtcaggtcggctcccacc

SEQ ID NO: 4087577 - DNA, 25 bp, Homo sapien
gcccggctctgcgtgtaaagcacca

SEQ ID NO: 4087578 - DNA, 25 bp, Homo sapien
cggctctgcgtgtaaagcaccacca

SEQ ID NO: 4087579 - DNA, 25 bp, Homo sapien
ccggctctgcgtgtaaagcaccacc

SEQ ID NO: 4087580 - DNA, 25 bp, Homo sapien
tggcccggctctgcgtgtaaagcac

SEQ ID NO: 4087581 - DNA, 25 bp, Homo sapien
tcagcgtgggacgtgcagacgggca

SEQ ID NO: 4087582 - DNA, 25 bp, Homo sapien
gggtcagcgtgggacgtgcagacgg

SEQ ID NO: 4087583 - DNA, 25 bp, Homo sapien
gcgtgggacgtgcagacgggcaggg

SEQ ID NO: 4087584 - DNA, 25 bp, Homo sapien
gtcagcgtgggacgtgcagacgggc

SEQ ID NO: 4087585 - DNA, 25 bp, Homo sapien
tatcaatcacctcggtccgtccgaa

SEQ ID NO: 4087586 - DNA, 25 bp, Homo sapien
ttcagcgtgttatcaatcacctcgg

SEQ ID NO: 4087587 - DNA, 25 bp, Homo sapien
gcgtgttatcaatcacctcggtccg

SEQ ID NO: 4087588 - DNA, 25 bp, Homo sapien
aagtctgggttcagcgtgttatcaa

SEQ ID NO: 4087589 - DNA, 25 bp, Homo sapien
aagaaatagtcgaggacgaatttgc

SEQ ID NO: 4087590 - DNA, 25 bp, Homo sapien
acatcgaagcgcagattttgctttt

SEQ ID NO: 4087591 - DNA, 25 bp, Homo sapien
aatagtcgaggacgaatttgcgcac

SEQ ID NO: 4087592 - DNA, 25 bp, Homo sapien
cctcaaagaaatagtcgaggacgaa

SEQ ID NO: 4087593 - DNA, 25 bp, Homo sapien
gtagtcagacggtcaagcctgggcc

SEQ ID NO: 4087594 - DNA, 25 bp, Homo sapien
ggccgtggacccgaattcagctttg

SEQ ID NO: 4087595 - DNA, 25 bp, Homo sapien
aactggaccgcatctcataaaaggg

SEQ ID NO: 4087596 - DNA, 25 bp, Homo sapien
ccagccagaattccgggcggatcca

SEQ ID NO: 4087597 - DNA, 25 bp, Homo sapien
ctgggaaaagagtggaaccggtgtg

SEQ ID NO: 4087598 - DNA, 25 bp, Homo sapien
cggtttggagatgttggttttggag

SEQ ID NO: 4087599 - DNA, 25 bp, Homo sapien
tgttggttttggagtccacgttgta

SEQ ID NO: 4087600 - DNA, 25 bp, Homo sapien
tttggagatgttggttttggagtcc

SEQ ID NO: 4087601 - DNA, 25 bp, Homo sapien
gagatgttggttttggagtccacgt

SEQ ID NO: 4087602 - DNA, 25 bp, Homo sapien
tctgagagtcgttgaacacatctaa

SEQ ID NO: 4087603 - DNA, 25 bp, Homo sapien
ggagttctgagagtcgttgaacaca

SEQ ID NO: 4087604 - DNA, 25 bp, Homo sapien
tcgttgaacacatctaagtgcctcc

SEQ ID NO: 4087605 - DNA, 25 bp, Homo sapien
aacacatctaagtgcctcctgtgcg

SEQ ID NO: 4087606 - DNA, 25 bp, Homo sapien
cacaggcaggacactcaggcaggag

SEQ ID NO: 4087607 - DNA, 25 bp, Homo sapien
aagaaggaagaggaacagtgagtag

SEQ ID NO: 4087608 - DNA, 25 bp, Homo sapien
ggaagaggaacagtgagtagggggc

SEQ ID NO: 4087609 - DNA, 25 bp, Homo sapien
ggtcccagcagtggcagccaagaag

SEQ ID NO: 4087610 - DNA, 25 bp, Homo sapien
tagtgggtcatcagtccaagcctgt

SEQ ID NO: 4087611 - DNA, 25 bp, Homo sapien
caggacaaggagtcagcaagaccag

SEQ ID NO: 4087612 - DNA, 25 bp, Homo sapien
gaagctcttgagtgctgagtcccag

SEQ ID NO: 4087613 - DNA, 25 bp, Homo sapien
gaccagaagctcttgagtgctgagt

SEQ ID NO: 4087614 - DNA, 25 bp, Homo sapien
aggcgaatgagtggtgcaagagcca

SEQ ID NO: 4087615 - DNA, 25 bp, Homo sapien
ggttcgctctactcggctgccctgg

SEQ ID NO: 4087616 - DNA, 25 bp, Homo sapien
gtgagggttcgctctactcggctgc

SEQ ID NO: 4087617 - DNA, 25 bp, Homo sapien
ccaggaacgcttgtcccaggaaatc

SEQ ID NO: 4087618 - DNA, 25 bp, Homo sapien
ccagggccaggaacgcttgtcccag

SEQ ID NO: 4087619 - DNA, 25 bp, Homo sapien
ttctatcagtcagcggcatccttgg

SEQ ID NO: 4087620 - DNA, 25 bp, Homo sapien
acttttctacgagggtgatgggagc

SEQ ID NO: 4087621 - DNA, 25 bp, Homo sapien
ctgatactgactcgggcagagcact

SEQ ID NO: 4087622 - DNA, 25 bp, Homo sapien
agcctccacttctatcagtcagcgg

SEQ ID NO: 4087623 - DNA, 25 bp, Homo sapien
gcctagaacagggtgtgggatataa

SEQ ID NO: 4087624 - DNA, 25 bp, Homo sapien
caagctaatcccctttaacagtggc

SEQ ID NO: 4087625 - DNA, 25 bp, Homo sapien
cagtggctgacatagggtatgtata

SEQ ID NO: 4087626 - DNA, 25 bp, Homo sapien
taatggtaattcctgaggatttgac

SEQ ID NO: 4087627 - DNA, 25 bp, Homo sapien
tagcaccatcttttgtaagccgcca

SEQ ID NO: 4087628 - DNA, 25 bp, Homo sapien
aaagttacctgtccgtgaggcctgc

SEQ ID NO: 4087629 - DNA, 25 bp, Homo sapien
aaaggtggaagtccgctgcaaggcc

SEQ ID NO: 4087630 - DNA, 25 bp, Homo sapien
ccagtgactcccgtttcagaggaaa

SEQ ID NO: 4087631 - DNA, 25 bp, Homo sapien
gtcagcaatatggtcccacacttct

SEQ ID NO: 4087632 - DNA, 25 bp, Homo sapien
cttctgcagtcagcaatatggtccc

SEQ ID NO: 4087633 - DNA, 25 bp, Homo sapien
gcagtcagcaatatggtcccacact

SEQ ID NO: 4087634 - DNA, 25 bp, Homo sapien
tctgcagtcagcaatatggtcccac

SEQ ID NO: 4087635 - DNA, 25 bp, Homo sapien
tccagcttgtttgcacacagctgca

SEQ ID NO: 4087636 - DNA, 25 bp, Homo sapien
ccagcttgtttgcacacagctgcat

SEQ ID NO: 4087637 - DNA, 25 bp, Homo sapien
gagcccgcacagggatgctgaaggg

SEQ ID NO: 4087638 - DNA, 25 bp, Homo sapien
tagtctccattgcacagagcccgca

SEQ ID NO: 4087639 - DNA, 25 bp, Homo sapien
catagtctccattgcacagagcccg

SEQ ID NO: 4087640 - DNA, 25 bp, Homo sapien
gtcatagtctccattgcacagagcc

SEQ ID NO: 4087641 - DNA, 25 bp, Homo sapien
ggtcccagtcgtacacatcaatctt

SEQ ID NO: 4087642 - DNA, 25 bp, Homo sapien
cccggtcccagtcgtacacatcaat

SEQ ID NO: 4087643 - DNA, 25 bp, Homo sapien
cagtcgtacacatcaatcttcaccg

SEQ ID NO: 4087644 - DNA, 25 bp, Homo sapien
gtcgtacacatcaatcttcaccgtt

SEQ ID NO: 4087645 - DNA, 25 bp, Homo sapien
ggtgaactcaccaatgaaatcgtgg

SEQ ID NO: 4087646 - DNA, 25 bp, Homo sapien
tatactgtgaactggttctgggcct

SEQ ID NO: 4087647 - DNA, 25 bp, Homo sapien
gtggtgaactcaccaatgaaatcgt

SEQ ID NO: 4087648 - DNA, 25 bp, Homo sapien
ctcatatactgtgaactggttctgg

SEQ ID NO: 4087649 - DNA, 25 bp, Homo sapien
agttcctgagttgacatatttcttc

SEQ ID NO: 4087650 - DNA, 25 bp, Homo sapien
tcagagtccacagagaaggagagca

SEQ ID NO: 4087651 - DNA, 25 bp, Homo sapien
cctcccttgatgtaatcaacaaaag

SEQ ID NO: 4087652 - DNA, 25 bp, Homo sapien
ttgatgtaatcaacaaaagtgaatt

SEQ ID NO: 4087653 - DNA, 25 bp, Homo sapien
aattcagagtccacagagaaggaga

SEQ ID NO: 4087654 - DNA, 25 bp, Homo sapien
caatggctactgtgaagttcagctg

SEQ ID NO: 4087655 - DNA, 25 bp, Homo sapien
ttggaagccgtgaagtcaatggcta

SEQ ID NO: 4087656 - DNA, 25 bp, Homo sapien
tgaagtcaatggctactgtgaagtt

SEQ ID NO: 4087657 - DNA, 25 bp, Homo sapien
gaagccgtgaagtcaatggctactg

SEQ ID NO: 4087658 - DNA, 25 bp, Homo sapien
tccgactttttcactcatccgtgtc

SEQ ID NO: 4087659 - DNA, 25 bp, Homo sapien
cgactttttcactcatccgtgtctc

SEQ ID NO: 4087660 - DNA, 25 bp, Homo sapien
actttttcactcatccgtgtctcac

SEQ ID NO: 4087661 - DNA, 25 bp, Homo sapien
ctccgactttttcactcatccgtgt

SEQ ID NO: 4087662 - DNA, 25 bp, Homo sapien
ctggatgatctctcccactgccttg

SEQ ID NO: 4087663 - DNA, 25 bp, Homo sapien
ataagctgggaagagcttatcactg

SEQ ID NO: 4087664 - DNA, 25 bp, Homo sapien
cgctgagctggtagggactcatgta

SEQ ID NO: 4087665 - DNA, 25 bp, Homo sapien
aactggtgggagatccgtccctctg

SEQ ID NO: 4087666 - DNA, 25 bp, Homo sapien
cacaccctcgatgcccgcacagttg

SEQ ID NO: 4087667 - DNA, 25 bp, Homo sapien
tagagctgcactgtgcgcaggctct

SEQ ID NO: 4087668 - DNA, 25 bp, Homo sapien
tggaaatagctctccagcacaccct

SEQ ID NO: 4087669 - DNA, 25 bp, Homo sapien
ggcccatagagctgcactgtgcgca

SEQ ID NO: 4087670 - DNA, 25 bp, Homo sapien
gtactgggagccatcagagatcttg

SEQ ID NO: 4087671 - DNA, 25 bp, Homo sapien
tgatgagcagaacatagtactggga

SEQ ID NO: 4087672 - DNA, 25 bp, Homo sapien
tactgggagccatcagagatcttgg

SEQ ID NO: 4087673 - DNA, 25 bp, Homo sapien
agcagaacatagtactgggagccat

SEQ ID NO: 4087674 - DNA, 25 bp, Homo sapien
tacaccgacgataatgatagacatg

SEQ ID NO: 4087675 - DNA, 25 bp, Homo sapien
tggctggtcctacaccgacgataat

SEQ ID NO: 4087676 - DNA, 25 bp, Homo sapien
ggtcctacaccgacgataatgatag

SEQ ID NO: 4087677 - DNA, 25 bp, Homo sapien
ctcaaacatggctggtcctacaccg

SEQ ID NO: 4087678 - DNA, 25 bp, Homo sapien
ctgaacgatgtcccgctctgcgtag

SEQ ID NO: 4087679 - DNA, 25 bp, Homo sapien
gctctgcgtagcgtcccctagagga

SEQ ID NO: 4087680 - DNA, 25 bp, Homo sapien
gaggacacgcgcacatcatcaccgt

SEQ ID NO: 4087681 - DNA, 25 bp, Homo sapien
tagcgtcccctagaggacacgcgca

SEQ ID NO: 4087682 - DNA, 25 bp, Homo sapien
ccacggatgtgccaaggctgcagca

SEQ ID NO: 4087683 - DNA, 25 bp, Homo sapien
acctcccgacctacaccacggatgt

SEQ ID NO: 4087684 - DNA, 25 bp, Homo sapien
cgacctacaccacggatgtgccaag

SEQ ID NO: 4087685 - DNA, 25 bp, Homo sapien
ctacaccacggatgtgccaaggctg

SEQ ID NO: 4087686 - DNA, 25 bp, Homo sapien
ctggttccccgaccggtcaacatag

SEQ ID NO: 4087687 - DNA, 25 bp, Homo sapien
gccagcacatccttggccagtcggg

SEQ ID NO: 4087688 - DNA, 25 bp, Homo sapien
gatgtctctggtgcgcatataggac

SEQ ID NO: 4087689 - DNA, 25 bp, Homo sapien
tcaacatagtctcggaatgggacga

SEQ ID NO: 4087690 - DNA, 25 bp, Homo sapien
cagtgggtgagcaggcttgcagact

SEQ ID NO: 4087691 - DNA, 25 bp, Homo sapien
gcagactgtgaggcattggatatgt

SEQ ID NO: 4087692 - DNA, 25 bp, Homo sapien
agcactgatcctccaagttggccct

SEQ ID NO: 4087693 - DNA, 25 bp, Homo sapien
aaagatcagctttattattggcatg

SEQ ID NO: 4087694 - DNA, 25 bp, Homo sapien
accgggcgctgctggaacaatggag

SEQ ID NO: 4087695 - DNA, 25 bp, Homo sapien
ggcgtctgcgcagggtaaacgtggc

SEQ ID NO: 4087696 - DNA, 25 bp, Homo sapien
ggcggagaccgtggcggcaaaggct

SEQ ID NO: 4087697 - DNA, 25 bp, Homo sapien
ccaagatgcccggtctcgggaccgg

SEQ ID NO: 4087698 - DNA, 25 bp, Homo sapien
gaaatcactggatcacagaaagaat

SEQ ID NO: 4087699 - DNA, 25 bp, Homo sapien
ggtggctaatgctttagcgttggac

SEQ ID NO: 4087700 - DNA, 25 bp, Homo sapien
gaatgaggggatcaccagactgaga

SEQ ID NO: 4087701 - DNA, 25 bp, Homo sapien
cgttggactcctgcagaaatcactg

SEQ ID NO: 4087702 - DNA, 25 bp, Homo sapien
tagtcgcccgcaagttgtggcagaa

SEQ ID NO: 4087703 - DNA, 25 bp, Homo sapien
atggtggcttagtcgcccgcaagtt

SEQ ID NO: 4087704 - DNA, 25 bp, Homo sapien
cagaaagtcttcacatcaaagtcca

SEQ ID NO: 4087705 - DNA, 25 bp, Homo sapien
cgggcactcgtatggtggcttagtc

SEQ ID NO: 4087706 - DNA, 25 bp, Homo sapien
taactcttgtagacctttcggcagg

SEQ ID NO: 4087707 - DNA, 25 bp, Homo sapien
actcttgtagacctttcggcaggtc

SEQ ID NO: 4087708 - DNA, 25 bp, Homo sapien
ttgtagacctttcggcaggtctcca

SEQ ID NO: 4087709 - DNA, 25 bp, Homo sapien
tgtaactcttgtagacctttcggca

SEQ ID NO: 4087710 - DNA, 25 bp, Homo sapien
tatgtttgcctgacttgggagtagc

SEQ ID NO: 4087711 - DNA, 25 bp, Homo sapien
tagctcatcacctcacggcctggtg

SEQ ID NO: 4087712 - DNA, 25 bp, Homo sapien
tcaaagatgctgatgcggtggacgc

SEQ ID NO: 4087713 - DNA, 25 bp, Homo sapien
tggtgctcgcagaaacattgtggtg

SEQ ID NO: 4087714 - DNA, 25 bp, Homo sapien
tccacagcacgagagggtgactgca

SEQ ID NO: 4087715 - DNA, 25 bp, Homo sapien
gatatccagccagatgtagtcctcc

SEQ ID NO: 4087716 - DNA, 25 bp, Homo sapien
tgcttgaaggcaccgcccttgttgg

SEQ ID NO: 4087717 - DNA, 25 bp, Homo sapien
tctcctgcgggatgggacttacacc

SEQ ID NO: 4087718 - DNA, 25 bp, Homo sapien
gagccccgttgtttgcaaatgtagc

SEQ ID NO: 4087719 - DNA, 25 bp, Homo sapien
tctaggaagaccgtgttggcgaagc

SEQ ID NO: 4087720 - DNA, 25 bp, Homo sapien
tgtagcaggtgagcttccagcgagc

SEQ ID NO: 4087721 - DNA, 25 bp, Homo sapien
tcttgcggacactgaaagaggtgcc

SEQ ID NO: 4087722 - DNA, 25 bp, Homo sapien
ctcaccctcgctgtgggacagggca

SEQ ID NO: 4087723 - DNA, 25 bp, Homo sapien
cctcaccctcgctgtgggacagggc

SEQ ID NO: 4087724 - DNA, 25 bp, Homo sapien
ctgccaggatcttccgtgccttctt

SEQ ID NO: 4087725 - DNA, 25 bp, Homo sapien
attttgatccgggacttggccttgg

SEQ ID NO: 4087726 - DNA, 25 bp, Homo sapien
ttcttcattttgatccgggacttgg

SEQ ID NO: 4087727 - DNA, 25 bp, Homo sapien
cttcattttgatccgggacttggcc

SEQ ID NO: 4087728 - DNA, 25 bp, Homo sapien
gagtactatttgaccctgggagccc

SEQ ID NO: 4087729 - DNA, 25 bp, Homo sapien
cctgggactctggacttaaggcaag

SEQ ID NO: 4087730 - DNA, 25 bp, Homo sapien
gatctcttgtccaaaaggcctggga

SEQ ID NO: 4087731 - DNA, 25 bp, Homo sapien
cagtggtaccgtggcagacaggaaa

SEQ ID NO: 4087732 - DNA, 25 bp, Homo sapien
gcttcagtgtccagtagctgtgcag

SEQ ID NO: 4087733 - DNA, 25 bp, Homo sapien
ggtcacagttcctctgagattgcag

SEQ ID NO: 4087734 - DNA, 25 bp, Homo sapien
ggcgacgtagcaatgggaccccatt

SEQ ID NO: 4087735 - DNA, 25 bp, Homo sapien
gctcttcctttggatggtcaggcgg

SEQ ID NO: 4087736 - DNA, 25 bp, Homo sapien
cccaggaaactcaggtcaagccaaa

SEQ ID NO: 4087737 - DNA, 25 bp, Homo sapien
tgtagaggcaaaacgaagatcagag

SEQ ID NO: 4087738 - DNA, 25 bp, Homo sapien
cagaggatgattagaaagccagagg

SEQ ID NO: 4087739 - DNA, 25 bp, Homo sapien
gaaactcaggtcaagccaaaagagg

SEQ ID NO: 4087740 - DNA, 25 bp, Homo sapien
acttgagctgttctttaagggccca

SEQ ID NO: 4087741 - DNA, 25 bp, Homo sapien
acgagcagccgagctcgctccaagt

SEQ ID NO: 4087742 - DNA, 25 bp, Homo sapien
cttgcggatcaattccacgagcagc

SEQ ID NO: 4087743 - DNA, 25 bp, Homo sapien
tttgagtttttcccgcttgcggatc

SEQ ID NO: 4087744 - DNA, 25 bp, Homo sapien
tcagacagagggaccggctcgctga

SEQ ID NO: 4087745 - DNA, 25 bp, Homo sapien
tcgctgaagatgttgcctgtgtcct

SEQ ID NO: 4087746 - DNA, 25 bp, Homo sapien
tggagctgctccaaggttttgcgaa

SEQ ID NO: 4087747 - DNA, 25 bp, Homo sapien
gaaaggagtcagctgcatctccatg

SEQ ID NO: 4087748 - DNA, 25 bp, Homo sapien
cagagtccaggtgatacatgtggct

SEQ ID NO: 4087749 - DNA, 25 bp, Homo sapien
taggtgctgagccttctaaagtctc

SEQ ID NO: 4087750 - DNA, 25 bp, Homo sapien
cagtcaggacctagggcttcagagc

SEQ ID NO: 4087751 - DNA, 25 bp, Homo sapien
taaagtctccgttctagggttcagc

SEQ ID NO: 4087752 - DNA, 25 bp, Homo sapien
tgctgcccggtagaagatggtgtcc

SEQ ID NO: 4087753 - DNA, 25 bp, Homo sapien
tccaagttctgcttcatggtgaaaa

SEQ ID NO: 4087754 - DNA, 25 bp, Homo sapien
tccttggcgttatacttgaggcagt

SEQ ID NO: 4087755 - DNA, 25 bp, Homo sapien
tcatcaaaattcaggtagcggtaag

SEQ ID NO: 4087756 - DNA, 25 bp, Homo sapien
gggatagcttgccactgctcagcct

SEQ ID NO: 4087757 - DNA, 25 bp, Homo sapien
atggcgggcactgctatccattcac

SEQ ID NO: 4087758 - DNA, 25 bp, Homo sapien
gaacagctgtaaaatagcagcacca

SEQ ID NO: 4087759 - DNA, 25 bp, Homo sapien
agcagcaccaagatgtggaatggcg

SEQ ID NO: 4087760 - DNA, 25 bp, Homo sapien
tgatgggcaagcttccgccgcagtg

SEQ ID NO: 4087761 - DNA, 25 bp, Homo sapien
tcacgtcccgtctctcgctgatggg

SEQ ID NO: 4087762 - DNA, 25 bp, Homo sapien
gggtgtcagactaccccggctcgag

SEQ ID NO: 4087763 - DNA, 25 bp, Homo sapien
tgatcatctttgcacgccgtgagcg

SEQ ID NO: 4087764 - DNA, 25 bp, Homo sapien
tgcccacctcatgtgcgggggttga

SEQ ID NO: 4087765 - DNA, 25 bp, Homo sapien
gcgggggttgaggacatgttgggac

SEQ ID NO: 4087766 - DNA, 25 bp, Homo sapien
tcctgcccacctcatgtgcgggggt

SEQ ID NO: 4087767 - DNA, 25 bp, Homo sapien
gttgaggacatgttgggacccaggc

SEQ ID NO: 4087768 - DNA, 25 bp, Homo sapien
tcttgggcggtccagctgtcttcgg

SEQ ID NO: 4087769 - DNA, 25 bp, Homo sapien
tgggcggtccagctgtcttcgggtt

SEQ ID NO: 4087770 - DNA, 25 bp, Homo sapien
ttgggcggtccagctgtcttcgggt

SEQ ID NO: 4087771 - DNA, 25 bp, Homo sapien
cctcttgggcggtccagctgtcttc

SEQ ID NO: 4087772 - DNA, 25 bp, Homo sapien
accccgcttgcgctgacgcagggaa

SEQ ID NO: 4087773 - DNA, 25 bp, Homo sapien
tgtctgagctcgaactgggccgggg

SEQ ID NO: 4087774 - DNA, 25 bp, Homo sapien
cgctgacgcagggaactcatgatgg

SEQ ID NO: 4087775 - DNA, 25 bp, Homo sapien
cgcttgcgctgacgcagggaactca

SEQ ID NO: 4087776 - DNA, 25 bp, Homo sapien
aaggaaccggtcaggaagatgtaga

SEQ ID NO: 4087777 - DNA, 25 bp, Homo sapien
tgcttccctcggcagttactggctt

SEQ ID NO: 4087778 - DNA, 25 bp, Homo sapien
accttggccagcagagctagctctg

SEQ ID NO: 4087779 - DNA, 25 bp, Homo sapien
gcagtgtctaccacagttggccaca

SEQ ID NO: 4087780 - DNA, 25 bp, Homo sapien
ctggtccggtctgaagcagcgctgc

SEQ ID NO: 4087781 - DNA, 25 bp, Homo sapien
gaaggctgcagtcattacggtatac

SEQ ID NO: 4087782 - DNA, 25 bp, Homo sapien
cattacggtataccaagaaactctt

SEQ ID NO: 4087783 - DNA, 25 bp, Homo sapien
actggttggtttccaccgctgaagc

SEQ ID NO: 4087784 - DNA, 25 bp, Homo sapien
gctgtcctctgggaaagtgccccga

SEQ ID NO: 4087785 - DNA, 25 bp, Homo sapien
tctcagtgcctgaggtatcctcact

SEQ ID NO: 4087786 - DNA, 25 bp, Homo sapien
cggagtaggcctcattctcagtgcc

SEQ ID NO: 4087787 - DNA, 25 bp, Homo sapien
tgccccgagagaaggagggtttgcc

SEQ ID NO: 4087788 - DNA, 25 bp, Homo sapien
ggctggcgagaccctgacactgggt

SEQ ID NO: 4087789 - DNA, 25 bp, Homo sapien
gggctggcgagaccctgacactggg

SEQ ID NO: 4087790 - DNA, 25 bp, Homo sapien
ctgggtatgatggatagcctcggca

SEQ ID NO: 4087791 - DNA, 25 bp, Homo sapien
agctgggtatgatggatagcctcgg

SEQ ID NO: 4087792 - DNA, 25 bp, Homo sapien
ggtatgatggatagcctcggcattt

SEQ ID NO: 4087793 - DNA, 25 bp, Homo sapien
gatggatagcctcggcatttggccc

SEQ ID NO: 4087794 - DNA, 25 bp, Homo sapien
cagcagggagtaggaaaagtctgct

SEQ ID NO: 4087795 - DNA, 25 bp, Homo sapien
cccacagctcagcagggagtaggaa

SEQ ID NO: 4087796 - DNA, 25 bp, Homo sapien
agtctgctaactgtgaatctgtatt

SEQ ID NO: 4087797 - DNA, 25 bp, Homo sapien
gagtaggaaaagtctgctaactgtg

SEQ ID NO: 4087798 - DNA, 25 bp, Homo sapien
gaaccccatggtggaacataccttc

SEQ ID NO: 4087799 - DNA, 25 bp, Homo sapien
ccccatggtggaacataccttctcg

SEQ ID NO: 4087800 - DNA, 25 bp, Homo sapien
ttctcggggcatctttggatcaatg

SEQ ID NO: 4087801 - DNA, 25 bp, Homo sapien
aagaggacgaggtagagatgctctc

SEQ ID NO: 4087802 - DNA, 25 bp, Homo sapien
tgcctgttgctggagtttcctggca

SEQ ID NO: 4087803 - DNA, 25 bp, Homo sapien
actgacttgtgatagcccagtctgc

SEQ ID NO: 4087804 - DNA, 25 bp, Homo sapien
gtgagtcacaccaaatgctcccctc

SEQ ID NO: 4087805 - DNA, 25 bp, Homo sapien
tgatagcccagtctgcctgttgctg

SEQ ID NO: 4087806 - DNA, 25 bp, Homo sapien
aggtcctggttcacacccagaggaa

SEQ ID NO: 4087807 - DNA, 25 bp, Homo sapien
cttgcggatgttggacttgcggccc

SEQ ID NO: 4087808 - DNA, 25 bp, Homo sapien
caccttgctgcggtgctgcagagcc

SEQ ID NO: 4087809 - DNA, 25 bp, Homo sapien
taggcgatctgtactgacttgcgga

SEQ ID NO: 4087810 - DNA, 25 bp, Homo sapien
gacccggaaacgcagttacaaatga

SEQ ID NO: 4087811 - DNA, 25 bp, Homo sapien
tctccttgcgctgaactgccattgg

SEQ ID NO: 4087812 - DNA, 25 bp, Homo sapien
tagtaccaaatgactctggcgcgac

SEQ ID NO: 4087813 - DNA, 25 bp, Homo sapien
gagtgttctgtacagtccagctgca

SEQ ID NO: 4087814 - DNA, 25 bp, Homo sapien
gaagcccatcaggttgagtccaagt

SEQ ID NO: 4087815 - DNA, 25 bp, Homo sapien
cttctagtcgcctggagtaggagga

SEQ ID NO: 4087816 - DNA, 25 bp, Homo sapien
gaggatggattatttaatttcttcc

SEQ ID NO: 4087817 - DNA, 25 bp, Homo sapien
gacctttatctgggccattctcacc

SEQ ID NO: 4087818 - DNA, 25 bp, Homo sapien
cccgccggccgccacagctgctgcc

SEQ ID NO: 4087819 - DNA, 25 bp, Homo sapien
gctgcctgccgtcttgggcatttct

SEQ ID NO: 4087820 - DNA, 25 bp, Homo sapien
ctcggattgtcgtcccgccggccgc

SEQ ID NO: 4087821 - DNA, 25 bp, Homo sapien
gaggcctctcctcggattgtcgtcc

SEQ ID NO: 4087822 - DNA, 25 bp, Homo sapien
gggcgctaacgagttccatctgggc

SEQ ID NO: 4087823 - DNA, 25 bp, Homo sapien
tgtcccattcaaggcctttaggcgt

SEQ ID NO: 4087824 - DNA, 25 bp, Homo sapien
tgtcttcaccaagaaccggagcgaa

SEQ ID NO: 4087825 - DNA, 25 bp, Homo sapien
taggaggcgccaatgagaaatcagg

SEQ ID NO: 4087826 - DNA, 25 bp, Homo sapien
acagcaggcaccgccccgtagtagc

SEQ ID NO: 4087827 - DNA, 25 bp, Homo sapien
accaggcctcgtcgacgcccaaaga

SEQ ID NO: 4087828 - DNA, 25 bp, Homo sapien
cagacaaggaccacgacccttaagg

SEQ ID NO: 4087829 - DNA, 25 bp, Homo sapien
tagtagccccgcctacccagaacca

SEQ ID NO: 4087830 - DNA, 25 bp, Homo sapien
gcgcctgggcagaagcgcgcgggca

SEQ ID NO: 4087831 - DNA, 25 bp, Homo sapien
cgcctgggcagaagcgcgcgggcag

SEQ ID NO: 4087832 - DNA, 25 bp, Homo sapien
gcctgggcagaagcgcgcgggcagg

SEQ ID NO: 4087833 - DNA, 25 bp, Homo sapien
ggcgcagctcagagcgagggcacgg

SEQ ID NO: 4087834 - DNA, 25 bp, Homo sapien
agagcgagggcacgggatggaggcc

SEQ ID NO: 4087835 - DNA, 25 bp, Homo sapien
ttgtccagaaggcagaaccaggtcc

SEQ ID NO: 4087836 - DNA, 25 bp, Homo sapien
cggaaagattgtccagaaggcagaa

SEQ ID NO: 4087837 - DNA, 25 bp, Homo sapien
ggttataccgctggatccttacaat

SEQ ID NO: 4087838 - DNA, 25 bp, Homo sapien
caagtgctattatcttctgcatcgg

SEQ ID NO: 4087839 - DNA, 25 bp, Homo sapien
tacagacatattaaaggtaacaggt

SEQ ID NO: 4087840 - DNA, 25 bp, Homo sapien
taacaggttggctacccgtgcttgt

SEQ ID NO: 4087841 - DNA, 25 bp, Homo sapien
caagtaacagtgctatcttccagtc

SEQ ID NO: 4087842 - DNA, 25 bp, Homo sapien
tgggcctctctgcattcctacctgg

SEQ ID NO: 4087843 - DNA, 25 bp, Homo sapien
gacaaccctggcactcaatttcctt

SEQ ID NO: 4087844 - DNA, 25 bp, Homo sapien
tacaatagctccatgtacgaaacta

SEQ ID NO: 4087845 - DNA, 25 bp, Homo sapien
tagctggaagtacttgcgcacggcc

SEQ ID NO: 4087846 - DNA, 25 bp, Homo sapien
tgtctcctcggtacacagtgcagtg

SEQ ID NO: 4087847 - DNA, 25 bp, Homo sapien
cagctcgtctggtgtgggcctgcta

SEQ ID NO: 4087848 - DNA, 25 bp, Homo sapien
gagtcagtgtccatacttgatccgc

SEQ ID NO: 4087849 - DNA, 25 bp, Homo sapien
tcaagctggatgagccgaggtccaa

SEQ ID NO: 4087850 - DNA, 25 bp, Homo sapien
ccatgccagtgatgcgggcgatgtt

SEQ ID NO: 4087851 - DNA, 25 bp, Homo sapien
gggaagccatggtaggtgacatcat

SEQ ID NO: 4087852 - DNA, 25 bp, Homo sapien
gggtcttgtcgcagcagtcgcacac

SEQ ID NO: 4087853 - DNA, 25 bp, Homo sapien
gggagaaatgaacagatcttgaaag

SEQ ID NO: 4087854 - DNA, 25 bp, Homo sapien
caggggagaaatgaacagatcttga

SEQ ID NO: 4087855 - DNA, 25 bp, Homo sapien
aggaagccttgagaaggtaaccagg

SEQ ID NO: 4087856 - DNA, 25 bp, Homo sapien
aaggcaggaagccttgagaaggtaa

SEQ ID NO: 4087857 - DNA, 25 bp, Homo sapien
cagaccagtgaggtgctgacatttt

SEQ ID NO: 4087858 - DNA, 25 bp, Homo sapien
cattgaacccattgggcaaaaagca

SEQ ID NO: 4087859 - DNA, 25 bp, Homo sapien
caactccaataatagcataggtagg

SEQ ID NO: 4087860 - DNA, 25 bp, Homo sapien
gaatgcatgctcttaaccccaaact

SEQ ID NO: 4087861 - DNA, 25 bp, Homo sapien
aacgggcacgatagcccaggcccag

SEQ ID NO: 4087862 - DNA, 25 bp, Homo sapien
ctggcactcacgtaacgggcacgat

SEQ ID NO: 4087863 - DNA, 25 bp, Homo sapien
gcactcacgtaacgggcacgatagc

SEQ ID NO: 4087864 - DNA, 25 bp, Homo sapien
tcacgtaacgggcacgatagcccag

SEQ ID NO: 4087865 - DNA, 25 bp, Homo sapien
tcctcatatgaggactctcgtagct

SEQ ID NO: 4087866 - DNA, 25 bp, Homo sapien
gcagccaggctagcccgccctgttc

SEQ ID NO: 4087867 - DNA, 25 bp, Homo sapien
gaggactctcgtagctgctgcagcc

SEQ ID NO: 4087868 - DNA, 25 bp, Homo sapien
tgggcctcctcatatgaggactctc

SEQ ID NO: 4087869 - DNA, 25 bp, Homo sapien
tgtctagggccatcaggcagatgca

SEQ ID NO: 4087870 - DNA, 25 bp, Homo sapien
gctcggtcccttcgcctgggacgtg

SEQ ID NO: 4087871 - DNA, 25 bp, Homo sapien
atatggacatccacgggcacagcct

SEQ ID NO: 4087872 - DNA, 25 bp, Homo sapien
tcacgttgggcaatgtgccacatat

SEQ ID NO: 4087873 - DNA, 25 bp, Homo sapien
agcccctgcagcccactttcctcac

SEQ ID NO: 4087874 - DNA, 25 bp, Homo sapien
gcccagccagcataaggtccccaca

SEQ ID NO: 4087875 - DNA, 25 bp, Homo sapien
ccagccagcataaggtccccacagg

SEQ ID NO: 4087876 - DNA, 25 bp, Homo sapien
tgggcccagccagcataaggtcccc

SEQ ID NO: 4087877 - DNA, 25 bp, Homo sapien
ttgggcccagccagcataaggtccc

SEQ ID NO: 4087878 - DNA, 25 bp, Homo sapien
ctagggaggacacctaggtacactc

SEQ ID NO: 4087879 - DNA, 25 bp, Homo sapien
agggaggacacctaggtacactcac

SEQ ID NO: 4087880 - DNA, 25 bp, Homo sapien
tagggaggacacctaggtacactca

SEQ ID NO: 4087881 - DNA, 25 bp, Homo sapien
ccgaaggcaatgagaatccactggg

SEQ ID NO: 4087882 - DNA, 25 bp, Homo sapien
gaacagggccgaaggcaatgagaat

SEQ ID NO: 4087883 - DNA, 25 bp, Homo sapien
gggctggtgagactagtgacagtgt

SEQ ID NO: 4087884 - DNA, 25 bp, Homo sapien
cagggccgaaggcaatgagaatcca

SEQ ID NO: 4087885 - DNA, 25 bp, Homo sapien
tgagcatggcgggattggcgcaggt

SEQ ID NO: 4087886 - DNA, 25 bp, Homo sapien
cctttggaaccctttctgcgctttg

SEQ ID NO: 4087887 - DNA, 25 bp, Homo sapien
attggcgcaggtcggcactgaacag

SEQ ID NO: 4087888 - DNA, 25 bp, Homo sapien
tgctggtggctcctgagcatggcgg

SEQ ID NO: 4087889 - DNA, 25 bp, Homo sapien
cctccccaacatgagactgggtggg

SEQ ID NO: 4087890 - DNA, 25 bp, Homo sapien
cctttgaggtagtcacagggaggcc

SEQ ID NO: 4087891 - DNA, 25 bp, Homo sapien
actgactgcttgatttgggggtgcc

SEQ ID NO: 4087892 - DNA, 25 bp, Homo sapien
atcttgttgtgcaaactgactgctt

SEQ ID NO: 4087893 - DNA, 25 bp, Homo sapien
taaaaccatccttagcgctgtctcc

SEQ ID NO: 4087894 - DNA, 25 bp, Homo sapien
aaaaccatccttagcgctgtctccc

SEQ ID NO: 4087895 - DNA, 25 bp, Homo sapien
ataaaagtggtgatgacctgacaga

SEQ ID NO: 4087896 - DNA, 25 bp, Homo sapien
ctatggggtccgagaaaggtcataa

SEQ ID NO: 4087897 - DNA, 25 bp, Homo sapien
gaaaggtcataaaagtggtgatgac

SEQ ID NO: 4087898 - DNA, 25 bp, Homo sapien
tccgagaaaggtcataaaagtggtg

SEQ ID NO: 4087899 - DNA, 25 bp, Homo sapien
ctccaagtctagaggaagaagtctg

SEQ ID NO: 4087900 - DNA, 25 bp, Homo sapien
taaccccatcctaggattgcaggag

SEQ ID NO: 4087901 - DNA, 25 bp, Homo sapien
caccagtcggtgagtgagcagatca

SEQ ID NO: 4087902 - DNA, 25 bp, Homo sapien
gcagcacccatggtgagaattcaca

SEQ ID NO: 4087903 - DNA, 25 bp, Homo sapien
gaattcacacaacctgtgagctggg

SEQ ID NO: 4087904 - DNA, 25 bp, Homo sapien
cctgaagaagagcataggttgggtg

SEQ ID NO: 4087905 - DNA, 25 bp, Homo sapien
tggcctctttgtcttgatgccaggc

SEQ ID NO: 4087906 - DNA, 25 bp, Homo sapien
ggtggggcatggactgatttggcct

SEQ ID NO: 4087907 - DNA, 25 bp, Homo sapien
gcctctttgtcttgatgccaggcca

SEQ ID NO: 4087908 - DNA, 25 bp, Homo sapien
aaaaccaagcaggaatagggagacg

SEQ ID NO: 4087909 - DNA, 25 bp, Homo sapien
taaatctacaaactgacgtcaggtg

SEQ ID NO: 4087910 - DNA, 25 bp, Homo sapien
taatgtagctagaacaggagtgagc

SEQ ID NO: 4087911 - DNA, 25 bp, Homo sapien
gatggcggcacatacaaggaacaga

SEQ ID NO: 4087912 - DNA, 25 bp, Homo sapien
ttgctggtccataggtgtcatcgcc

SEQ ID NO: 4087913 - DNA, 25 bp, Homo sapien
ttctcagaaggtgcttggagcggca

SEQ ID NO: 4087914 - DNA, 25 bp, Homo sapien
cctttagggctttacagtgcacacc

SEQ ID NO: 4087915 - DNA, 25 bp, Homo sapien
cacctgaggtttagagacagttccc

SEQ ID NO: 4087916 - DNA, 25 bp, Homo sapien
tgtaaagatccatcctgaacatggc

SEQ ID NO: 4087917 - DNA, 25 bp, Homo sapien
tcctgcacaagtgcgtgggccacag

SEQ ID NO: 4087918 - DNA, 25 bp, Homo sapien
caagtgcctggcctaacatgacaga

SEQ ID NO: 4087919 - DNA, 25 bp, Homo sapien
gaatgagattgctgtcctgcacaag

SEQ ID NO: 4087920 - DNA, 25 bp, Homo sapien
caaagtgctagtaagctggcttgca

SEQ ID NO: 4087921 - DNA, 25 bp, Homo sapien
gagagactactttgactggccaggc

SEQ ID NO: 4087922 - DNA, 25 bp, Homo sapien
ggccttctcggaggtgatcctggca

SEQ ID NO: 4087923 - DNA, 25 bp, Homo sapien
gagggtcatccacgtccttggtcca

SEQ ID NO: 4087924 - DNA, 25 bp, Homo sapien
tagccatgactcgaattagcagaaa

SEQ ID NO: 4087925 - DNA, 25 bp, Homo sapien
tgtacacataatccaaaagcccagg

SEQ ID NO: 4087926 - DNA, 25 bp, Homo sapien
aaagatgatcgccattagctccagg

SEQ ID NO: 4087927 - DNA, 25 bp, Homo sapien
agttcccgggtgatgctgatggttc

SEQ ID NO: 4087928 - DNA, 25 bp, Homo sapien
cagatgtggaaagaataccctagca

SEQ ID NO: 4087929 - DNA, 25 bp, Homo sapien
tgtggaaagaataccctagcaaatc

SEQ ID NO: 4087930 - DNA, 25 bp, Homo sapien
gaataccctagcaaatcctctttaa

SEQ ID NO: 4087931 - DNA, 25 bp, Homo sapien
gaaagaataccctagcaaatcctct

SEQ ID NO: 4087932 - DNA, 25 bp, Homo sapien
gctgcagaaggatgtatatgtatac

SEQ ID NO: 4087933 - DNA, 25 bp, Homo sapien
gcacccctaattcctttggacaaga

SEQ ID NO: 4087934 - DNA, 25 bp, Homo sapien
tactttgaaatgtgctcatcgggac

SEQ ID NO: 4087935 - DNA, 25 bp, Homo sapien
ctctatcactcaagcagagccagag

SEQ ID NO: 4087936 - DNA, 25 bp, Homo sapien
gcaagaagccttttcccagatacca

SEQ ID NO: 4087937 - DNA, 25 bp, Homo sapien
ggtgagtccttctctggctgtagtg

SEQ ID NO: 4087938 - DNA, 25 bp, Homo sapien
cacagtgtcgacctctgcctaaggt

SEQ ID NO: 4087939 - DNA, 25 bp, Homo sapien
tggcccatctacagaagcaagaagc

SEQ ID NO: 4087940 - DNA, 25 bp, Homo sapien
tagctctgtacaaccaggacacagg

SEQ ID NO: 4087941 - DNA, 25 bp, Homo sapien
tagtctctgcttggtccccgagatg

SEQ ID NO: 4087942 - DNA, 25 bp, Homo sapien
tgtggctgtccctcaaatggcggca

SEQ ID NO: 4087943 - DNA, 25 bp, Homo sapien
tttgggcacaggaaacattggcctg

SEQ ID NO: 4087944 - DNA, 25 bp, Homo sapien
ggctctggaatgcagatgccgacgt

SEQ ID NO: 4087945 - DNA, 25 bp, Homo sapien
gatgccgacgtaagcaggccttctg

SEQ ID NO: 4087946 - DNA, 25 bp, Homo sapien
cagcctcaggctgcctagaccttag

SEQ ID NO: 4087947 - DNA, 25 bp, Homo sapien
gcctcaggctgcctagaccttaggg

SEQ ID NO: 4087948 - DNA, 25 bp, Homo sapien
caagctgccagggtatttaaggata

SEQ ID NO: 4087949 - DNA, 25 bp, Homo sapien
aaaggagaggtagttgctgacaagc

SEQ ID NO: 4087950 - DNA, 25 bp, Homo sapien
cagatgatcagtaaagataagtgcc

SEQ ID NO: 4087951 - DNA, 25 bp, Homo sapien
aagtgtcttgacaacaacccaggag

SEQ ID NO: 4087952 - DNA, 25 bp, Homo sapien
gctcatcacaagaaattgaccagtg

SEQ ID NO: 4087953 - DNA, 25 bp, Homo sapien
tgaccagtgttttaggacatgttct

SEQ ID NO: 4087954 - DNA, 25 bp, Homo sapien
atttgctcatcacaagaaattgacc

SEQ ID NO: 4087955 - DNA, 25 bp, Homo sapien
caagaaattgaccagtgttttagga

SEQ ID NO: 4087956 - DNA, 25 bp, Homo sapien
tgtgccgcatactaagtccctggag

SEQ ID NO: 4087957 - DNA, 25 bp, Homo sapien
tgagcgttagcaggatgcacagtcc

SEQ ID NO: 4087958 - DNA, 25 bp, Homo sapien
gctcttgagtctgacgggcctgcct

SEQ ID NO: 4087959 - DNA, 25 bp, Homo sapien
gaggagctaattgcccagggccttt

SEQ ID NO: 4087960 - DNA, 25 bp, Homo sapien
gccaggacagtggttaacgctgtgt

SEQ ID NO: 4087961 - DNA, 25 bp, Homo sapien
cacaaatgagcttgtattaccagcc

SEQ ID NO: 4087962 - DNA, 25 bp, Homo sapien
taccagcctggagattacaaaatga

SEQ ID NO: 4087963 - DNA, 25 bp, Homo sapien
aagggaactgttcacttgaggtctc

SEQ ID NO: 4087964 - DNA, 25 bp, Homo sapien
ccttggactagggacttgagagaga

SEQ ID NO: 4087965 - DNA, 25 bp, Homo sapien
tggacactaaaggtaggcctctcac

SEQ ID NO: 4087966 - DNA, 25 bp, Homo sapien
gggccactgaccgaactggacacta

SEQ ID NO: 4087967 - DNA, 25 bp, Homo sapien
tgaatgaagcatggctggccagtgc

SEQ ID NO: 4087968 - DNA, 25 bp, Homo sapien
atgacatggcgctgcatccaggcct

SEQ ID NO: 4087969 - DNA, 25 bp, Homo sapien
agaatcctcccataggtgagctgtc

SEQ ID NO: 4087970 - DNA, 25 bp, Homo sapien
gattccccagcagaaagttagtcag

SEQ ID NO: 4087971 - DNA, 25 bp, Homo sapien
cgtgttgaccagtcccaccaagtat

SEQ ID NO: 4087972 - DNA, 25 bp, Homo sapien
gaatggaattaacttgtccctggga

SEQ ID NO: 4087973 - DNA, 25 bp, Homo sapien
tgggaatccatggaccctccttgag

SEQ ID NO: 4087974 - DNA, 25 bp, Homo sapien
gcatctcagtagtggtgacatcgaa

SEQ ID NO: 4087975 - DNA, 25 bp, Homo sapien
aacacgattgggtgcacgttggagc

SEQ ID NO: 4087976 - DNA, 25 bp, Homo sapien
agcgcggagatctcggccgccaagc

SEQ ID NO: 4087977 - DNA, 25 bp, Homo sapien
tctagcggctttgctcgaggcccac

SEQ ID NO: 4087978 - DNA, 25 bp, Homo sapien
gggctcgcctgaggccgaccacccg

SEQ ID NO: 4087979 - DNA, 25 bp, Homo sapien
gggctaactgcagcgcggagatctc

SEQ ID NO: 4087980 - DNA, 25 bp, Homo sapien
gcgatgcctgccctttcgcgagaag

SEQ ID NO: 4087981 - DNA, 25 bp, Homo sapien
cggtaccatctatgctccgagcggg

SEQ ID NO: 4087982 - DNA, 25 bp, Homo sapien
tagagagcccttacgaacgcttggg

SEQ ID NO: 4087983 - DNA, 25 bp, Homo sapien
aagttttccacctagggctgtctcg

SEQ ID NO: 4087984 - DNA, 25 bp, Homo sapien
actgccctgaggccgaacagccggg

SEQ ID NO: 4087985 - DNA, 25 bp, Homo sapien
ccactgccctgaggccgaacagccg

SEQ ID NO: 4087986 - DNA, 25 bp, Homo sapien
cactgccctgaggccgaacagccgg

SEQ ID NO: 4087987 - DNA, 25 bp, Homo sapien
tgccctgaggccgaacagccggggg

SEQ ID NO: 4087988 - DNA, 25 bp, Homo sapien
tggcccgcacggcactcaggtaggg

SEQ ID NO: 4087989 - DNA, 25 bp, Homo sapien
agggcagcctgcaatgtggcccgca

SEQ ID NO: 4087990 - DNA, 25 bp, Homo sapien
tgtcgttccacaacctgggaggaga

SEQ ID NO: 4087991 - DNA, 25 bp, Homo sapien
ttccacttccggcttgttgtgtcgt

SEQ ID NO: 4087992 - DNA, 25 bp, Homo sapien
tactgcaggacataagttcatggca

SEQ ID NO: 4087993 - DNA, 25 bp, Homo sapien
tcatggcaccttctagacagcagcc

SEQ ID NO: 4087994 - DNA, 25 bp, Homo sapien
tgttttcaacaatgccacaggagag

SEQ ID NO: 4087995 - DNA, 25 bp, Homo sapien
aaattgggaatcaccattcagctgg

SEQ ID NO: 4087996 - DNA, 25 bp, Homo sapien
agttaccctgttggaatctcaattt

SEQ ID NO: 4087997 - DNA, 25 bp, Homo sapien
tgaagtcagggcgaaaaggttttga

SEQ ID NO: 4087998 - DNA, 25 bp, Homo sapien
atgactctgattcctaattcactgg

SEQ ID NO: 4087999 - DNA, 25 bp, Homo sapien
gctctgaagtcagggcgaaaaggtt

SEQ ID NO: 4088000 - DNA, 25 bp, Homo sapien
ctgaaaacataatgtgacagagtac

SEQ ID NO: 4088001 - DNA, 25 bp, Homo sapien
gaaaacataatgtgacagagtactt

SEQ ID NO: 4088002 - DNA, 25 bp, Homo sapien
aaacataatgtgacagagtacttgt

SEQ ID NO: 4088003 - DNA, 25 bp, Homo sapien
aacataatgtgacagagtacttgta

SEQ ID NO: 4088004 - DNA, 25 bp, Homo sapien
gatggagccctcaatcagaaccttt

SEQ ID NO: 4088005 - DNA, 25 bp, Homo sapien
tgtttcacagcaatgctgacccgga

SEQ ID NO: 4088006 - DNA, 25 bp, Homo sapien
ggttgtaacaggagctctttgctac

SEQ ID NO: 4088007 - DNA, 25 bp, Homo sapien
tgctgacccggacagagttgatgga

SEQ ID NO: 4088008 - DNA, 25 bp, Homo sapien
acaaaatcttctcgatctcatcagc

SEQ ID NO: 4088009 - DNA, 25 bp, Homo sapien
ccacaggcttccttcgaaggataaa

SEQ ID NO: 4088010 - DNA, 25 bp, Homo sapien
cacaggcttccttcgaaggataaag

SEQ ID NO: 4088011 - DNA, 25 bp, Homo sapien
taaagaagttctctgctcgcatcat

SEQ ID NO: 4088012 - DNA, 25 bp, Homo sapien
acaggcttccttcgaaggataaaga

SEQ ID NO: 4088013 - DNA, 25 bp, Homo sapien
ggttctagaaacaatcccaggccat

SEQ ID NO: 4088014 - DNA, 25 bp, Homo sapien
taacagggtcctgggtatcgcaaac

SEQ ID NO: 4088015 - DNA, 25 bp, Homo sapien
aaactcatgggtcacagggtctcac

SEQ ID NO: 4088016 - DNA, 25 bp, Homo sapien
agctggagtagctggttctagaaac

SEQ ID NO: 4088017 - DNA, 25 bp, Homo sapien
tctgtgtgtatcagacatctctgga

SEQ ID NO: 4088018 - DNA, 25 bp, Homo sapien
actgaaccccgttgagaattctgtg

SEQ ID NO: 4088019 - DNA, 25 bp, Homo sapien
ctggaaaactatctgtggcacaaca

SEQ ID NO: 4088020 - DNA, 25 bp, Homo sapien
agggtgtctaggttggatccaagca

SEQ ID NO: 4088021 - DNA, 25 bp, Homo sapien
cgggcacgggcattgactgacagct

SEQ ID NO: 4088022 - DNA, 25 bp, Homo sapien
gcacgggcattgactgacagcttca

SEQ ID NO: 4088023 - DNA, 25 bp, Homo sapien
cacaaagtccaccaacttgtgtttg

SEQ ID NO: 4088024 - DNA, 25 bp, Homo sapien
tccaccaacttgtgtttgtacatct

SEQ ID NO: 4088025 - DNA, 25 bp, Homo sapien
ggtttaaacgagatagaggcaagga

SEQ ID NO: 4088026 - DNA, 25 bp, Homo sapien
taaacgagatagaggcaaggacttt

SEQ ID NO: 4088027 - DNA, 25 bp, Homo sapien
cacttggggtttaaacgagatagag

SEQ ID NO: 4088028 - DNA, 25 bp, Homo sapien
agatagaggcaaggactttgtgaac

SEQ ID NO: 4088029 - DNA, 25 bp, Homo sapien
ttccagttcaatctagaggcctcct

SEQ ID NO: 4088030 - DNA, 25 bp, Homo sapien
tacccgacctttggatgcacctgaa

SEQ ID NO: 4088031 - DNA, 25 bp, Homo sapien
gatgagcactgcatggcccacatgg

SEQ ID NO: 4088032 - DNA, 25 bp, Homo sapien
tagacctctgagtccgaaaacccag

SEQ ID NO: 4088033 - DNA, 25 bp, Homo sapien
taattcagccagctttcagaagtga

SEQ ID NO: 4088034 - DNA, 25 bp, Homo sapien
gtgacctatgggcaccggccctaag

SEQ ID NO: 4088035 - DNA, 25 bp, Homo sapien
ggacaccttgtggtcatgctctaat

SEQ ID NO: 4088036 - DNA, 25 bp, Homo sapien
ccttgtggtcatgctctaattcagc

SEQ ID NO: 4088037 - DNA, 25 bp, Homo sapien
actgctctaaggaggtgcatgaacc

SEQ ID NO: 4088038 - DNA, 25 bp, Homo sapien
tgctctaaggaggtgcatgaacctg

SEQ ID NO: 4088039 - DNA, 25 bp, Homo sapien
cactgctctaaggaggtgcatgaac

SEQ ID NO: 4088040 - DNA, 25 bp, Homo sapien
ctgctctaaggaggtgcatgaacct

SEQ ID NO: 4088041 - DNA, 25 bp, Homo sapien
ccttcgtggagacatgggtagtctg

SEQ ID NO: 4088042 - DNA, 25 bp, Homo sapien
gagtgactccaggacgccttcgtgg

SEQ ID NO: 4088043 - DNA, 25 bp, Homo sapien
tccaggacgccttcgtggagacatg

SEQ ID NO: 4088044 - DNA, 25 bp, Homo sapien
acgccttcgtggagacatgggtagt

SEQ ID NO: 4088045 - DNA, 25 bp, Homo sapien
caataacgtataatcactgggacca

SEQ ID NO: 4088046 - DNA, 25 bp, Homo sapien
taatggcaggaccaatcatgagact

SEQ ID NO: 4088047 - DNA, 25 bp, Homo sapien
aaataagtcgccttctggctccagg

SEQ ID NO: 4088048 - DNA, 25 bp, Homo sapien
gttacagtatcctacaagcacagag

SEQ ID NO: 4088049 - DNA, 25 bp, Homo sapien
gcgcccctcgccgcgctcgccctcc

SEQ ID NO: 4088050 - DNA, 25 bp, Homo sapien
ccgcgctcgccctcccagggcccct

SEQ ID NO: 4088051 - DNA, 25 bp, Homo sapien
gccgcgctcgccctcccagggcccc

SEQ ID NO: 4088052 - DNA, 25 bp, Homo sapien
cctcgccgcgctcgccctcccaggg

SEQ ID NO: 4088053 - DNA, 25 bp, Homo sapien
tccctcgcgctcaggagcagtggcg

SEQ ID NO: 4088054 - DNA, 25 bp, Homo sapien
ctggcggtaccaggaggccgagccc

SEQ ID NO: 4088055 - DNA, 25 bp, Homo sapien
agctccctcgcgctcaggagcagtg

SEQ ID NO: 4088056 - DNA, 25 bp, Homo sapien
cgctcaggagcagtggcgcgtcggg

SEQ ID NO: 4088057 - DNA, 25 bp, Homo sapien
cagcctcctgggtggacggaactcg

SEQ ID NO: 4088058 - DNA, 25 bp, Homo sapien
tgcggcttccgcagccagttgcaca

SEQ ID NO: 4088059 - DNA, 25 bp, Homo sapien
aaactggtgcgtggctcgagcggct

SEQ ID NO: 4088060 - DNA, 25 bp, Homo sapien
acggaactcggagcggcgcgccgag

SEQ ID NO: 4088061 - DNA, 25 bp, Homo sapien
cgcctggcatctgccgcctgcgtga

SEQ ID NO: 4088062 - DNA, 25 bp, Homo sapien
ggaccagcgtcttgaaggcgccgct

SEQ ID NO: 4088063 - DNA, 25 bp, Homo sapien
accctcctcggactgggcggaggca

SEQ ID NO: 4088064 - DNA, 25 bp, Homo sapien
gtgggtatccgaggcgccctgggcg

SEQ ID NO: 4088065 - DNA, 25 bp, Homo sapien
ggtctcggcctaggatcttttctgg

SEQ ID NO: 4088066 - DNA, 25 bp, Homo sapien
accccagcgtcttgtcgtcctcgca

SEQ ID NO: 4088067 - DNA, 25 bp, Homo sapien
tacactgaggctgggcctagggtct

SEQ ID NO: 4088068 - DNA, 25 bp, Homo sapien
tcgcagccgctgtaggccagagcga

SEQ ID NO: 4088069 - DNA, 25 bp, Homo sapien
gccttggaggatcctcgccagagga

SEQ ID NO: 4088070 - DNA, 25 bp, Homo sapien
aggatcctcgccagaggaccgggaa

SEQ ID NO: 4088071 - DNA, 25 bp, Homo sapien
ttggaggatcctcgccagaggaccg

SEQ ID NO: 4088072 - DNA, 25 bp, Homo sapien
gagacgccttggaggatcctcgcca

SEQ ID NO: 4088073 - DNA, 25 bp, Homo sapien
cttgacagctctctccacgtagatt

SEQ ID NO: 4088074 - DNA, 25 bp, Homo sapien
tagattttggcgtttctgagccggt

SEQ ID NO: 4088075 - DNA, 25 bp, Homo sapien
ccacgtagattttggcgtttctgag

SEQ ID NO: 4088076 - DNA, 25 bp, Homo sapien
gacagctctctccacgtagattttg

SEQ ID NO: 4088077 - DNA, 25 bp, Homo sapien
cagggccctttctaagcgcccctgc

SEQ ID NO: 4088078 - DNA, 25 bp, Homo sapien
gtcactgtcacccatcgctgagcta

SEQ ID NO: 4088079 - DNA, 25 bp, Homo sapien
gagacaccggatcaccgggtagcag

SEQ ID NO: 4088080 - DNA, 25 bp, Homo sapien
gggcctgagcgatggaccatcttct

SEQ ID NO: 4088081 - DNA, 25 bp, Homo sapien
tagcagccttggattgtaaagatct

SEQ ID NO: 4088082 - DNA, 25 bp, Homo sapien
atcgaagtcgaacagctgtgatggc

SEQ ID NO: 4088083 - DNA, 25 bp, Homo sapien
tgtgttccatctaggtcatcaaatt

SEQ ID NO: 4088084 - DNA, 25 bp, Homo sapien
aaatttcagtaaatcatcgaagtcg

SEQ ID NO: 4088085 - DNA, 25 bp, Homo sapien
ccatctaggtcatcaaatttcagta

SEQ ID NO: 4088086 - DNA, 25 bp, Homo sapien
gctctatccagcctttaaagaagca

SEQ ID NO: 4088087 - DNA, 25 bp, Homo sapien
gagttaccatgcatggcggctgtgc

SEQ ID NO: 4088088 - DNA, 25 bp, Homo sapien
gaagcagtttttactacagataggg

SEQ ID NO: 4088089 - DNA, 25 bp, Homo sapien
gccttcacttaccaagggcagcggg

SEQ ID NO: 4088090 - DNA, 25 bp, Homo sapien
ccaaggtggcctctagcccacacat

SEQ ID NO: 4088091 - DNA, 25 bp, Homo sapien
aggtggcctctagcccacacatcat

SEQ ID NO: 4088092 - DNA, 25 bp, Homo sapien
aaggtggcctctagcccacacatca

SEQ ID NO: 4088093 - DNA, 25 bp, Homo sapien
ttccaaggtggcctctagcccacac

SEQ ID NO: 4088094 - DNA, 25 bp, Homo sapien
ttgtggtaaaggagccagcccgggc

SEQ ID NO: 4088095 - DNA, 25 bp, Homo sapien
gcccgggcgtagtggtttatcatct

SEQ ID NO: 4088096 - DNA, 25 bp, Homo sapien
cccgccgagtggtccagatgaagta

SEQ ID NO: 4088097 - DNA, 25 bp, Homo sapien
gagaggaagcgacagtcgagcacat

SEQ ID NO: 4088098 - DNA, 25 bp, Homo sapien
aaggagttggcatcaacctcatcaa

SEQ ID NO: 4088099 - DNA, 25 bp, Homo sapien
tggcatcaacctcatcaaaccacgg

SEQ ID NO: 4088100 - DNA, 25 bp, Homo sapien
tcaaaccacggcaaattccggagat

SEQ ID NO: 4088101 - DNA, 25 bp, Homo sapien
tccggagattgagacatagacccac

SEQ ID NO: 4088102 - DNA, 25 bp, Homo sapien
tcagagttgaccaagctaagaggct

SEQ ID NO: 4088103 - DNA, 25 bp, Homo sapien
gaatctggcttggacccattgtctg

SEQ ID NO: 4088104 - DNA, 25 bp, Homo sapien
tgtggaatcggaacctagtctgcct

SEQ ID NO: 4088105 - DNA, 25 bp, Homo sapien
tggattccaaactcaagggactgac

SEQ ID NO: 4088106 - DNA, 25 bp, Homo sapien
gcccctaggcttgaggcctgttctg

SEQ ID NO: 4088107 - DNA, 25 bp, Homo sapien
aggccaggggataccctgctcagcc

SEQ ID NO: 4088108 - DNA, 25 bp, Homo sapien
cagaacctgatcatgacttgcccca

SEQ ID NO: 4088109 - DNA, 25 bp, Homo sapien
acttgccccattttggatccagaac

SEQ ID NO: 4088110 - DNA, 25 bp, Homo sapien
cttgagaacgttgcgggcagcagtc

SEQ ID NO: 4088111 - DNA, 25 bp, Homo sapien
gcttgagaacgttgcgggcagcagt

SEQ ID NO: 4088112 - DNA, 25 bp, Homo sapien
ttgagaacgttgcgggcagcagtca

SEQ ID NO: 4088113 - DNA, 25 bp, Homo sapien
gggagagtggaggtaaccacagtac

SEQ ID NO: 4088114 - DNA, 25 bp, Homo sapien
tgggagagtggaggtaaccacagta

SEQ ID NO: 4088115 - DNA, 25 bp, Homo sapien
gtgggagagtggaggtaaccacagt

SEQ ID NO: 4088116 - DNA, 25 bp, Homo sapien
aatccctcgctgatgggtccctgga

SEQ ID NO: 4088117 - DNA, 25 bp, Homo sapien
gagacacgagctaaatccagaaggg

SEQ ID NO: 4088118 - DNA, 25 bp, Homo sapien
caaacggatgggaagacaagtgtct

SEQ ID NO: 4088119 - DNA, 25 bp, Homo sapien
tctcaggccatgtgtaaagcccagt

SEQ ID NO: 4088120 - DNA, 25 bp, Homo sapien
tgggacctctaacacacctgaggct

SEQ ID NO: 4088121 - DNA, 25 bp, Homo sapien
taaaatgcacctgggagtcttggcc

SEQ ID NO: 4088122 - DNA, 25 bp, Homo sapien
tgaggcccagcacgaacctagatag

SEQ ID NO: 4088123 - DNA, 25 bp, Homo sapien
tgtcacgatcccatatcaaggcagg

SEQ ID NO: 4088124 - DNA, 25 bp, Homo sapien
aactctggggacaccaacactgggt

SEQ ID NO: 4088125 - DNA, 25 bp, Homo sapien
gttgctaaggtactcctcgcacgca

SEQ ID NO: 4088126 - DNA, 25 bp, Homo sapien
gtgggccaagttgctaaggtactcc

SEQ ID NO: 4088127 - DNA, 25 bp, Homo sapien
aggtactcctcgcacgcacacagag

SEQ ID NO: 4088128 - DNA, 25 bp, Homo sapien
tggtagtagcgctggaggaagaggg

SEQ ID NO: 4088129 - DNA, 25 bp, Homo sapien
gggtgaggtacagcggggcctccag

SEQ ID NO: 4088130 - DNA, 25 bp, Homo sapien
tggaccacttggtagtagcgctgga

SEQ ID NO: 4088131 - DNA, 25 bp, Homo sapien
ggggtgaggtacagcggggcctcca

SEQ ID NO: 4088132 - DNA, 25 bp, Homo sapien
cagaccctatcacggaggcagtggg

SEQ ID NO: 4088133 - DNA, 25 bp, Homo sapien
catgctcttagtgactatgctatgc

SEQ ID NO: 4088134 - DNA, 25 bp, Homo sapien
ggctgcacgagacagaaagggtcta

SEQ ID NO: 4088135 - DNA, 25 bp, Homo sapien
caagaaccaagaaaagtggcccaga

SEQ ID NO: 4088136 - DNA, 25 bp, Homo sapien
gccctccctgcagatatccataggt

SEQ ID NO: 4088137 - DNA, 25 bp, Homo sapien
ctacacaaatgggaaaggctgataa

SEQ ID NO: 4088138 - DNA, 25 bp, Homo sapien
aactgtctttgacagaatttaatca

SEQ ID NO: 4088139 - DNA, 25 bp, Homo sapien
ttccagttcctaatgataaagcacc

SEQ ID NO: 4088140 - DNA, 25 bp, Homo sapien
aatgatagaacttgggcagggctgg

SEQ ID NO: 4088141 - DNA, 25 bp, Homo sapien
cctgagtgtcgaggtgcctgagttc

SEQ ID NO: 4088142 - DNA, 25 bp, Homo sapien
tcctcacagcgctggacctgagtgt

SEQ ID NO: 4088143 - DNA, 25 bp, Homo sapien
tatctggggtaccacggcctgcagc

SEQ ID NO: 4088144 - DNA, 25 bp, Homo sapien
gctgcaggatgtcctcacagcgctg

SEQ ID NO: 4088145 - DNA, 25 bp, Homo sapien
gatccagatgttgcgatccccttcc

SEQ ID NO: 4088146 - DNA, 25 bp, Homo sapien
gtccgcgggacttggctcctggctt

SEQ ID NO: 4088147 - DNA, 25 bp, Homo sapien
ctcgtccgcgggacttggctcctgg

SEQ ID NO: 4088148 - DNA, 25 bp, Homo sapien
tcctggcttcacgatccagatgttg

SEQ ID NO: 4088149 - DNA, 25 bp, Homo sapien
gccgtccttcatcaccacggggttg

SEQ ID NO: 4088150 - DNA, 25 bp, Homo sapien
ggggttgccgttcaccagcttcagc

SEQ ID NO: 4088151 - DNA, 25 bp, Homo sapien
ttgccgtccttcatcaccacggggt

SEQ ID NO: 4088152 - DNA, 25 bp, Homo sapien
tccaggtggtccatgcacatgatgc

SEQ ID NO: 4088153 - DNA, 25 bp, Homo sapien
ctgcgtggaaaagcggatatagctg

SEQ ID NO: 4088154 - DNA, 25 bp, Homo sapien
taagtgggttccagtcagttaccag

SEQ ID NO: 4088155 - DNA, 25 bp, Homo sapien
tcgcggtagaaccacacggtaagtg

SEQ ID NO: 4088156 - DNA, 25 bp, Homo sapien
gtcagttaccaggaaccactgtctg

SEQ ID NO: 4088157 - DNA, 25 bp, Homo sapien
tgtccaggttcttcagggagaaggg

SEQ ID NO: 4088158 - DNA, 25 bp, Homo sapien
ttgtccaggttcttcagggagaagg

SEQ ID NO: 4088159 - DNA, 25 bp, Homo sapien
tccccaactaggcagggagctcgtg

SEQ ID NO: 4088160 - DNA, 25 bp, Homo sapien
gtcccctgcactgtaatcgcctgtt

SEQ ID NO: 4088161 - DNA, 25 bp, Homo sapien
ggtacacactcggtcaaatctgttg

SEQ ID NO: 4088162 - DNA, 25 bp, Homo sapien
tgctagaatgtaagcccttgagagc

SEQ ID NO: 4088163 - DNA, 25 bp, Homo sapien
ccaaggcttaaataggttttcacat

SEQ ID NO: 4088164 - DNA, 25 bp, Homo sapien
atgtggaaaccaaggcttaaatagg

SEQ ID NO: 4088165 - DNA, 25 bp, Homo sapien
tgaccagattcaaacaacttggaag

SEQ ID NO: 4088166 - DNA, 25 bp, Homo sapien
taggttttcacatgaccagattcaa

SEQ ID NO: 4088167 - DNA, 25 bp, Homo sapien
caataattgatagctatgaatttca

SEQ ID NO: 4088168 - DNA, 25 bp, Homo sapien
cactgggttcttattaagaatgaga

SEQ ID NO: 4088169 - DNA, 25 bp, Homo sapien
ggtgaacaagaagtatgcactgggt

SEQ ID NO: 4088170 - DNA, 25 bp, Homo sapien
aagtgctcagcactatcacatatga

SEQ ID NO: 4088171 - DNA, 25 bp, Homo sapien
cagtacccacttcactgttttttat

SEQ ID NO: 4088172 - DNA, 25 bp, Homo sapien
agtaacagtacccacttcactgttt

SEQ ID NO: 4088173 - DNA, 25 bp, Homo sapien
gccgcagtagtaagtgctttgtgca

SEQ ID NO: 4088174 - DNA, 25 bp, Homo sapien
tgggccccaccacattcttctaggg

SEQ ID NO: 4088175 - DNA, 25 bp, Homo sapien
tcttctagggccagaaccactctta

SEQ ID NO: 4088176 - DNA, 25 bp, Homo sapien
gctttgtgcatagtctcagttaacc

SEQ ID NO: 4088177 - DNA, 25 bp, Homo sapien
gatggggccctactgggaaggacaa

SEQ ID NO: 4088178 - DNA, 25 bp, Homo sapien
ttgagatggggccctactgggaagg

SEQ ID NO: 4088179 - DNA, 25 bp, Homo sapien
gagatggggccctactgggaaggac

SEQ ID NO: 4088180 - DNA, 25 bp, Homo sapien
ctactgggaaggacaaaaaggacag

SEQ ID NO: 4088181 - DNA, 25 bp, Homo sapien
gggaggacaggcaagtcctggaagc

SEQ ID NO: 4088182 - DNA, 25 bp, Homo sapien
ggaggacaggcaagtcctggaagca

SEQ ID NO: 4088183 - DNA, 25 bp, Homo sapien
tgtgtcacagttgcggtccagcatc

SEQ ID NO: 4088184 - DNA, 25 bp, Homo sapien
ggtctgaagtgcgtggatcacagca

SEQ ID NO: 4088185 - DNA, 25 bp, Homo sapien
tccggtcaatgaccacgcgcagggt

SEQ ID NO: 4088186 - DNA, 25 bp, Homo sapien
cgaacacgaagtcagcgccatagag

SEQ ID NO: 4088187 - DNA, 25 bp, Homo sapien
actgcagagtcctatgctccactgc

SEQ ID NO: 4088188 - DNA, 25 bp, Homo sapien
ggctcaaggaagtgaggtcacctta

SEQ ID NO: 4088189 - DNA, 25 bp, Homo sapien
gaagtgaggtcaccttagcaggacc

SEQ ID NO: 4088190 - DNA, 25 bp, Homo sapien
tcttaaactgggtctgactgcagag

SEQ ID NO: 4088191 - DNA, 25 bp, Homo sapien
gacagaaaccggaggctaatcagaa

SEQ ID NO: 4088192 - DNA, 25 bp, Homo sapien
cactggcattgggagcactgcacta

SEQ ID NO: 4088193 - DNA, 25 bp, Homo sapien
taacaactgtaacaaaggcgaggtc

SEQ ID NO: 4088194 - DNA, 25 bp, Homo sapien
taggtcatgtgatcagtacgttctc

SEQ ID NO: 4088195 - DNA, 25 bp, Homo sapien
ggtacgcggcatcacctctgaagtg

SEQ ID NO: 4088196 - DNA, 25 bp, Homo sapien
tgtaacccacagtcaaactcagcag

SEQ ID NO: 4088197 - DNA, 25 bp, Homo sapien
tgtgatgccacatgaggtacgcggc

SEQ ID NO: 4088198 - DNA, 25 bp, Homo sapien
tcagcagcactaactgtgagacact

SEQ ID NO: 4088199 - DNA, 25 bp, Homo sapien
tactggaatccttggcccagcggga

SEQ ID NO: 4088200 - DNA, 25 bp, Homo sapien
gaagaggagacaaggcccactcagt

SEQ ID NO: 4088201 - DNA, 25 bp, Homo sapien
ggaattactttctgaggcacctggt

SEQ ID NO: 4088202 - DNA, 25 bp, Homo sapien
cccagcgggacccagagtagagatg

SEQ ID NO: 4088203 - DNA, 25 bp, Homo sapien
tggtgaagccctctaccaggagccg

SEQ ID NO: 4088204 - DNA, 25 bp, Homo sapien
gagccggatgcccacatattgaggc

SEQ ID NO: 4088205 - DNA, 25 bp, Homo sapien
agcagagggactgctgggcggaccc

SEQ ID NO: 4088206 - DNA, 25 bp, Homo sapien
ccgatgacacatcgccatgggcttc

SEQ ID NO: 4088207 - DNA, 25 bp, Homo sapien
gccccagtgcctttcctagaagctg

SEQ ID NO: 4088208 - DNA, 25 bp, Homo sapien
cccagtgcctttcctagaagctgac

SEQ ID NO: 4088209 - DNA, 25 bp, Homo sapien
ctggccccagtgcctttcctagaag

SEQ ID NO: 4088210 - DNA, 25 bp, Homo sapien
ggccccagtgcctttcctagaagct

SEQ ID NO: 4088211 - DNA, 25 bp, Homo sapien
tgtccccactagaaaaggtcatggt

SEQ ID NO: 4088212 - DNA, 25 bp, Homo sapien
cactcccagagattggggcagacca

SEQ ID NO: 4088213 - DNA, 25 bp, Homo sapien
gggttcttcggactcagtggcaatc

SEQ ID NO: 4088214 - DNA, 25 bp, Homo sapien
cagtggcaatctgttcaagtggtgg

SEQ ID NO: 4088215 - DNA, 25 bp, Homo sapien
aagcgatcctcattagcctcgcgag

SEQ ID NO: 4088216 - DNA, 25 bp, Homo sapien
tacttgctactggtggctctttggt

SEQ ID NO: 4088217 - DNA, 25 bp, Homo sapien
taaatcgccttggaacactcgggtg

SEQ ID NO: 4088218 - DNA, 25 bp, Homo sapien
tgtgagtagtggcttttacttgcta

SEQ ID NO: 4088219 - DNA, 25 bp, Homo sapien
tgttagttctttccccgagaggtga

SEQ ID NO: 4088220 - DNA, 25 bp, Homo sapien
gcaacctgggcttaagtcctggcat

SEQ ID NO: 4088221 - DNA, 25 bp, Homo sapien
tgaaataagtcactctgtgaggcag

SEQ ID NO: 4088222 - DNA, 25 bp, Homo sapien
taccttgctaggttggtgtaaacac

SEQ ID NO: 4088223 - DNA, 25 bp, Homo sapien
cagctgtgccccttctgagctgtgc

SEQ ID NO: 4088224 - DNA, 25 bp, Homo sapien
ttgctgtgctgtcgtctgaggacct

SEQ ID NO: 4088225 - DNA, 25 bp, Homo sapien
tgtgctgtcgtctgaggacctggcc

SEQ ID NO: 4088226 - DNA, 25 bp, Homo sapien
gccctggtgtcggagtacatgggga

SEQ ID NO: 4088227 - DNA, 25 bp, Homo sapien
cctggtgtcggagtacatggggaga

SEQ ID NO: 4088228 - DNA, 25 bp, Homo sapien
ccttgcctgtggtcgacagggcctt

SEQ ID NO: 4088229 - DNA, 25 bp, Homo sapien
gccttgcctgtggtcgacagggcct

SEQ ID NO: 4088230 - DNA, 25 bp, Homo sapien
cttgcctgtggtcgacagggcctta

SEQ ID NO: 4088231 - DNA, 25 bp, Homo sapien
ggccttgcctgtggtcgacagggcc

SEQ ID NO: 4088232 - DNA, 25 bp, Homo sapien
aaatgaagaccttagccgtgggtag

SEQ ID NO: 4088233 - DNA, 25 bp, Homo sapien
ccttgaaatcaaggttcggtgggag

SEQ ID NO: 4088234 - DNA, 25 bp, Homo sapien
ctgggtgccaccttgaaatcaaggt

SEQ ID NO: 4088235 - DNA, 25 bp, Homo sapien
atgaagaccttagccgtgggtagag

SEQ ID NO: 4088236 - DNA, 25 bp, Homo sapien
agagggagatgatcagaagtctgtg

SEQ ID NO: 4088237 - DNA, 25 bp, Homo sapien
aagagggagatgatcagaagtctgt

SEQ ID NO: 4088238 - DNA, 25 bp, Homo sapien
ctggaatgtaccaacaaggggcagg

SEQ ID NO: 4088239 - DNA, 25 bp, Homo sapien
gcaacaaggcacttccagctggggg

SEQ ID NO: 4088240 - DNA, 25 bp, Homo sapien
gaattgttccgacttcaaagggcag

SEQ ID NO: 4088241 - DNA, 25 bp, Homo sapien
tttggccttgaccttccgacaggtg

SEQ ID NO: 4088242 - DNA, 25 bp, Homo sapien
aagggcagtggggaatcgaagcagg

SEQ ID NO: 4088243 - DNA, 25 bp, Homo sapien
tccctagcttcatatcccccaggcc

SEQ ID NO: 4088244 - DNA, 25 bp, Homo sapien
ttttatttggtgttggatccaggac

SEQ ID NO: 4088245 - DNA, 25 bp, Homo sapien
ggacaagggcagtggggaatcgaag

SEQ ID NO: 4088246 - DNA, 25 bp, Homo sapien
ctccaacagcaatggagtcaagccc

SEQ ID NO: 4088247 - DNA, 25 bp, Homo sapien
ctgtggaccctggggtacacggcct

SEQ ID NO: 4088248 - DNA, 25 bp, Homo sapien
ccaacagcaatggagtcaagcccca

SEQ ID NO: 4088249 - DNA, 25 bp, Homo sapien
tggaccctggggtacacggcctcgc

SEQ ID NO: 4088250 - DNA, 25 bp, Homo sapien
cattaacgttcctatgcccggtagg

SEQ ID NO: 4088251 - DNA, 25 bp, Homo sapien
ggcaatatgtccctgcgtcgactca

SEQ ID NO: 4088252 - DNA, 25 bp, Homo sapien
tgatcttgggtaagccatgcctcct

SEQ ID NO: 4088253 - DNA, 25 bp, Homo sapien
cttgctgaagaagggatagacccat

SEQ ID NO: 4088254 - DNA, 25 bp, Homo sapien
atgtgggcagtcattatattattct

SEQ ID NO: 4088255 - DNA, 25 bp, Homo sapien
aaaactggaagcacgcagtaaaggg

SEQ ID NO: 4088256 - DNA, 25 bp, Homo sapien
aattctgatggtaggaatgtgggca

SEQ ID NO: 4088257 - DNA, 25 bp, Homo sapien
agggagtgaaaactggaagcacgca

SEQ ID NO: 4088258 - DNA, 25 bp, Homo sapien
tgaagtcagttccttcgggagcaac

SEQ ID NO: 4088259 - DNA, 25 bp, Homo sapien
gatgccaaggctccaaacgttgatg

SEQ ID NO: 4088260 - DNA, 25 bp, Homo sapien
tctccgagctctgttgcacatgaag

SEQ ID NO: 4088261 - DNA, 25 bp, Homo sapien
tctgggcctgcataagggagagtcc

SEQ ID NO: 4088262 - DNA, 25 bp, Homo sapien
cgacttcccagtgggttcccagaga

SEQ ID NO: 4088263 - DNA, 25 bp, Homo sapien
ctagaatcccatggccactatgagc

SEQ ID NO: 4088264 - DNA, 25 bp, Homo sapien
tcatctccaggccaagtagggttct

SEQ ID NO: 4088265 - DNA, 25 bp, Homo sapien
tcttccacatggagcgagccgactt

SEQ ID NO: 4088266 - DNA, 25 bp, Homo sapien
tgccagatgccctcttgacttttga

SEQ ID NO: 4088267 - DNA, 25 bp, Homo sapien
ttcagctccttgagccatttccaga

SEQ ID NO: 4088268 - DNA, 25 bp, Homo sapien
ttgagccatttccagacattgttct

SEQ ID NO: 4088269 - DNA, 25 bp, Homo sapien
cacggatggccttctgatggttgtt

SEQ ID NO: 4088270 - DNA, 25 bp, Homo sapien
cccggctacacggatggccttctga

SEQ ID NO: 4088271 - DNA, 25 bp, Homo sapien
ggagctcaggttccccaaattggat

SEQ ID NO: 4088272 - DNA, 25 bp, Homo sapien
catgggcagctgtgaaaccatcagg

SEQ ID NO: 4088273 - DNA, 25 bp, Homo sapien
tgaggtgggtctgaaacaggactcc

SEQ ID NO: 4088274 - DNA, 25 bp, Homo sapien
gaagttgccgaggaaaccatcatgg

SEQ ID NO: 4088275 - DNA, 25 bp, Homo sapien
acgcggacctggtaccgcaacgaca

SEQ ID NO: 4088276 - DNA, 25 bp, Homo sapien
aagcggcccactgaccctatttgcg

SEQ ID NO: 4088277 - DNA, 25 bp, Homo sapien
gcggctccgtgaagagaacttccgg

SEQ ID NO: 4088278 - DNA, 25 bp, Homo sapien
cagccgcgcggctccgtgaagagaa

SEQ ID NO: 4088279 - DNA, 25 bp, Homo sapien
atggcgacgcgctcccggtgctgaa

SEQ ID NO: 4088280 - DNA, 25 bp, Homo sapien
tcatctggtagtgcatggcgacgcg

SEQ ID NO: 4088281 - DNA, 25 bp, Homo sapien
aaagtcgctgccgtcggtgccggcc

SEQ ID NO: 4088282 - DNA, 25 bp, Homo sapien
ctcgcgggcctgctcgagacgccat

SEQ ID NO: 4088283 - DNA, 25 bp, Homo sapien
gccagcatcgacgtgactcgggagc

SEQ ID NO: 4088284 - DNA, 25 bp, Homo sapien
aaacctaaaaggcagattattctct

SEQ ID NO: 4088285 - DNA, 25 bp, Homo sapien
tatattacgtggtaggccttatgct

SEQ ID NO: 4088286 - DNA, 25 bp, Homo sapien
ttcggtttcgaaggtgatacagcgg

SEQ ID NO: 4088287 - DNA, 25 bp, Homo sapien
atgccagacaactgtactggacact

SEQ ID NO: 4088288 - DNA, 25 bp, Homo sapien
cagacaactgtactggacactggga

SEQ ID NO: 4088289 - DNA, 25 bp, Homo sapien
atttttcttaccaccaactatatgc

SEQ ID NO: 4088290 - DNA, 25 bp, Homo sapien
aatttttcttaccaccaactatatg

SEQ ID NO: 4088291 - DNA, 25 bp, Homo sapien
tatgaccagatgtacgtagatcagc

SEQ ID NO: 4088292 - DNA, 25 bp, Homo sapien
ggaaaagagtcccatgctgatcatg

SEQ ID NO: 4088293 - DNA, 25 bp, Homo sapien
aacggtaggccttgccatggcggta

SEQ ID NO: 4088294 - DNA, 25 bp, Homo sapien
caccaggtacatgatggaaacggca

SEQ ID NO: 4088295 - DNA, 25 bp, Homo sapien
tttatgcttcttctcctgtgtgctg

SEQ ID NO: 4088296 - DNA, 25 bp, Homo sapien
tatgcttcttctcctgtgtgctggt

SEQ ID NO: 4088297 - DNA, 25 bp, Homo sapien
tcatttatgcttcttctcctgtgtg

SEQ ID NO: 4088298 - DNA, 25 bp, Homo sapien
tgcttcttctcctgtgtgctggtga

SEQ ID NO: 4088299 - DNA, 25 bp, Homo sapien
tatagttttgccacctcagcagatg

SEQ ID NO: 4088300 - DNA, 25 bp, Homo sapien
cattcgatgggatgtccaggcttca

SEQ ID NO: 4088301 - DNA, 25 bp, Homo sapien
caccagaagggattttggaaccgct

SEQ ID NO: 4088302 - DNA, 25 bp, Homo sapien
tcctgacccgtgacctagagatgaa

SEQ ID NO: 4088303 - DNA, 25 bp, Homo sapien
tggccactgctaggtttctcaagga

SEQ ID NO: 4088304 - DNA, 25 bp, Homo sapien
gagagattaaatgtctggcccatag

SEQ ID NO: 4088305 - DNA, 25 bp, Homo sapien
tatgacttaggttccccatacccag

SEQ ID NO: 4088306 - DNA, 25 bp, Homo sapien
agaagagcccataacctaaggtaga

SEQ ID NO: 4088307 - DNA, 25 bp, Homo sapien
gaaagggtggtctggccatactaag

SEQ ID NO: 4088308 - DNA, 25 bp, Homo sapien
tttgcctggctacatatagggtctg

SEQ ID NO: 4088309 - DNA, 25 bp, Homo sapien
cacagtatgccttttggccttgaag

SEQ ID NO: 4088310 - DNA, 25 bp, Homo sapien
taagaataggttagagagccttccc

SEQ ID NO: 4088311 - DNA, 25 bp, Homo sapien
tgctctattacccaggctggagtgc

SEQ ID NO: 4088312 - DNA, 25 bp, Homo sapien
ctattacccaggctggagtgccgtg

SEQ ID NO: 4088313 - DNA, 25 bp, Homo sapien
ctctattacccaggctggagtgccg

SEQ ID NO: 4088314 - DNA, 25 bp, Homo sapien
gagactgagtcttgctctattaccc

SEQ ID NO: 4088315 - DNA, 25 bp, Homo sapien
gctggagaaaggctgacgaggctcc

SEQ ID NO: 4088316 - DNA, 25 bp, Homo sapien
tttccggtgctggagaaaggctgac

SEQ ID NO: 4088317 - DNA, 25 bp, Homo sapien
gtggtttccggtgctggagaaaggc

SEQ ID NO: 4088318 - DNA, 25 bp, Homo sapien
gtttccggtgctggagaaaggctga

SEQ ID NO: 4088319 - DNA, 25 bp, Homo sapien
tgtctcccatagacatgcgcttcac

SEQ ID NO: 4088320 - DNA, 25 bp, Homo sapien
tgcagatctgatccacccatcagca

SEQ ID NO: 4088321 - DNA, 25 bp, Homo sapien
tagcatcaggttgggggacgcaccc

SEQ ID NO: 4088322 - DNA, 25 bp, Homo sapien
ttagcccctcctactcctgaaacac

SEQ ID NO: 4088323 - DNA, 25 bp, Homo sapien
tgaggaaagcttgtgcccccaaaaa

SEQ ID NO: 4088324 - DNA, 25 bp, Homo sapien
agcagcgaacacagtaccagcagga

SEQ ID NO: 4088325 - DNA, 25 bp, Homo sapien
tgcccgaaagctcctccttgatccc

SEQ ID NO: 4088326 - DNA, 25 bp, Homo sapien
ccttgatcccaaccagccagccagg

SEQ ID NO: 4088327 - DNA, 25 bp, Homo sapien
gcaattagggctcccggaacatggc

SEQ ID NO: 4088328 - DNA, 25 bp, Homo sapien
gggcttctgtgcaattagggctccc

SEQ ID NO: 4088329 - DNA, 25 bp, Homo sapien
tctgtgcaattagggctcccggaac

SEQ ID NO: 4088330 - DNA, 25 bp, Homo sapien
gcttctgtgcaattagggctcccgg

SEQ ID NO: 4088331 - DNA, 25 bp, Homo sapien
gggctgccagtctggagctccccat

SEQ ID NO: 4088332 - DNA, 25 bp, Homo sapien
gcagggctgccagtctggagctccc

SEQ ID NO: 4088333 - DNA, 25 bp, Homo sapien
gagcagggctgccagtctggagctc

SEQ ID NO: 4088334 - DNA, 25 bp, Homo sapien
agggctgccagtctggagctcccca

SEQ ID NO: 4088335 - DNA, 25 bp, Homo sapien
aggccagaggacagcgggtgttcca

SEQ ID NO: 4088336 - DNA, 25 bp, Homo sapien
caggtggcgaaagccaatcccagca

SEQ ID NO: 4088337 - DNA, 25 bp, Homo sapien
gcgaaagccaatcccagcagagtca

SEQ ID NO: 4088338 - DNA, 25 bp, Homo sapien
gggcaggtggcgaaagccaatccca

SEQ ID NO: 4088339 - DNA, 25 bp, Homo sapien
ccaggtgcggcaagggatataggca

SEQ ID NO: 4088340 - DNA, 25 bp, Homo sapien
gcccaccaggtgcggcaagggatat

SEQ ID NO: 4088341 - DNA, 25 bp, Homo sapien
cagatgctggcacaaacagcgggaa

SEQ ID NO: 4088342 - DNA, 25 bp, Homo sapien
cagcgggaacagtgccagactcgca

SEQ ID NO: 4088343 - DNA, 25 bp, Homo sapien
ctgcaccaggaggtggaagaggccc

SEQ ID NO: 4088344 - DNA, 25 bp, Homo sapien
gaggtggaagaggccccgttgaaga

SEQ ID NO: 4088345 - DNA, 25 bp, Homo sapien
caggaggtggaagaggccccgttga

SEQ ID NO: 4088346 - DNA, 25 bp, Homo sapien
caccaggaggtggaagaggccccgt

SEQ ID NO: 4088347 - DNA, 25 bp, Homo sapien
cttgtgtctcctatagaacttgaat

SEQ ID NO: 4088348 - DNA, 25 bp, Homo sapien
acttgaatgtggaagactttttgga

SEQ ID NO: 4088349 - DNA, 25 bp, Homo sapien
tgaatgtggaagactttttggattt

SEQ ID NO: 4088350 - DNA, 25 bp, Homo sapien
tgtgtctcctatagaacttgaatgt

SEQ ID NO: 4088351 - DNA, 25 bp, Homo sapien
acaggtgacgacgaggcagcagctt

SEQ ID NO: 4088352 - DNA, 25 bp, Homo sapien
tcagacaggtgacgacgaggcagca

SEQ ID NO: 4088353 - DNA, 25 bp, Homo sapien
aggtgacgacgaggcagcagcttcc

SEQ ID NO: 4088354 - DNA, 25 bp, Homo sapien
tctcagacaggtgacgacgaggcag

SEQ ID NO: 4088355 - DNA, 25 bp, Homo sapien
cctttgtgagtccaatctgggaaga

SEQ ID NO: 4088356 - DNA, 25 bp, Homo sapien
tttagagcgaagtcccttgtgggag

SEQ ID NO: 4088357 - DNA, 25 bp, Homo sapien
ctctggatccgaaggttgggtcctt

SEQ ID NO: 4088358 - DNA, 25 bp, Homo sapien
tccttttagagcgaagtcccttgtg

SEQ ID NO: 4088359 - DNA, 25 bp, Homo sapien
ccatctcctgttgtacccagtgccc

SEQ ID NO: 4088360 - DNA, 25 bp, Homo sapien
tgaacccatctcctgttgtacccag

SEQ ID NO: 4088361 - DNA, 25 bp, Homo sapien
gaacccatctcctgttgtacccagt

SEQ ID NO: 4088362 - DNA, 25 bp, Homo sapien
ctgaacccatctcctgttgtaccca

SEQ ID NO: 4088363 - DNA, 25 bp, Homo sapien
atatggtcacccgaatagcccgggc

SEQ ID NO: 4088364 - DNA, 25 bp, Homo sapien
ctcagggcctgaagatatggtcacc

SEQ ID NO: 4088365 - DNA, 25 bp, Homo sapien
aaagacgcacgctgacctcagggcc

SEQ ID NO: 4088366 - DNA, 25 bp, Homo sapien
cagtgcccactggtgacaaagacgc

SEQ ID NO: 4088367 - DNA, 25 bp, Homo sapien
gaattcataaggcagctctacagtg

SEQ ID NO: 4088368 - DNA, 25 bp, Homo sapien
taaggcagctctacagtgtggcccc

SEQ ID NO: 4088369 - DNA, 25 bp, Homo sapien
gcagaaggaattcataaggcagctc

SEQ ID NO: 4088370 - DNA, 25 bp, Homo sapien
acagggcagaaggaattcataaggc

SEQ ID NO: 4088371 - DNA, 25 bp, Homo sapien
acgcaagctgcctgagctggccagg

SEQ ID NO: 4088372 - DNA, 25 bp, Homo sapien
tactgtgacgcaagctgcctgagct

SEQ ID NO: 4088373 - DNA, 25 bp, Homo sapien
tgtgacgcaagctgcctgagctggc

SEQ ID NO: 4088374 - DNA, 25 bp, Homo sapien
cttactgtgacgcaagctgcctgag

SEQ ID NO: 4088375 - DNA, 25 bp, Homo sapien
cagtgtcctcttgcaggtaggatgc

SEQ ID NO: 4088376 - DNA, 25 bp, Homo sapien
gaagggacattttttgcgcctcaca

SEQ ID NO: 4088377 - DNA, 25 bp, Homo sapien
gggacattttttgcgcctcacagtg

SEQ ID NO: 4088378 - DNA, 25 bp, Homo sapien
tctggccagctctggaagggacatt

SEQ ID NO: 4088379 - DNA, 25 bp, Homo sapien
caaactcgaaatctgcttagggtcc

SEQ ID NO: 4088380 - DNA, 25 bp, Homo sapien
tgatctattggcaagcggactggta

SEQ ID NO: 4088381 - DNA, 25 bp, Homo sapien
ggaaagtacctgcatgccttctggg

SEQ ID NO: 4088382 - DNA, 25 bp, Homo sapien
tcaggtgccacttcctctaagaggc

SEQ ID NO: 4088383 - DNA, 25 bp, Homo sapien
ccatgaccatctgagtgtgctggct

SEQ ID NO: 4088384 - DNA, 25 bp, Homo sapien
cagcggagtgtcagggccatgacca

SEQ ID NO: 4088385 - DNA, 25 bp, Homo sapien
gactctcgagctgtggcattcggga

SEQ ID NO: 4088386 - DNA, 25 bp, Homo sapien
tgcaaagggtatgccagtcgtgcct

SEQ ID NO: 4088387 - DNA, 25 bp, Homo sapien
ggtccaccttctccaaaacatacca

SEQ ID NO: 4088388 - DNA, 25 bp, Homo sapien
gcaggtccaccttctccaaaacata

SEQ ID NO: 4088389 - DNA, 25 bp, Homo sapien
cttgaagcagagctgggggtgcagg

SEQ ID NO: 4088390 - DNA, 25 bp, Homo sapien
gctgggggtgcaggtccaccttctc

SEQ ID NO: 4088391 - DNA, 25 bp, Homo sapien
tctggtgggggcattcaacatggct

SEQ ID NO: 4088392 - DNA, 25 bp, Homo sapien
tggtgggggcattcaacatggctgc

SEQ ID NO: 4088393 - DNA, 25 bp, Homo sapien
cagtctggtgggggcattcaacatg

SEQ ID NO: 4088394 - DNA, 25 bp, Homo sapien
ggtgggggcattcaacatggctgct

SEQ ID NO: 4088395 - DNA, 25 bp, Homo sapien
agcttggttacagttgggtgaggat

SEQ ID NO: 4088396 - DNA, 25 bp, Homo sapien
tgggctggggtttagcttggttaca

SEQ ID NO: 4088397 - DNA, 25 bp, Homo sapien
ccagcagaggtcacttattgactca

SEQ ID NO: 4088398 - DNA, 25 bp, Homo sapien
ttacagttgggtgaggatgaaatgg

SEQ ID NO: 4088399 - DNA, 25 bp, Homo sapien
acacggggggcaccaaagtgtcctg

SEQ ID NO: 4088400 - DNA, 25 bp, Homo sapien
tgctgggcttgggtatccatgctta

SEQ ID NO: 4088401 - DNA, 25 bp, Homo sapien
caggcagcactgaaggtggcatgca

SEQ ID NO: 4088402 - DNA, 25 bp, Homo sapien
aggtggcatgcattcttgaggagaa

SEQ ID NO: 4088403 - DNA, 25 bp, Homo sapien
cccttgaggaacctactgtcagcaa

SEQ ID NO: 4088404 - DNA, 25 bp, Homo sapien
tgctctgagcaataggacctagtgg

SEQ ID NO: 4088405 - DNA, 25 bp, Homo sapien
tcccagggtctatctcaatgaggtc

SEQ ID NO: 4088406 - DNA, 25 bp, Homo sapien
caagttagctgaacagaggctgatc

SEQ ID NO: 4088407 - DNA, 25 bp, Homo sapien
catcaaatgggtatatgcacatgaa

SEQ ID NO: 4088408 - DNA, 25 bp, Homo sapien
ttattttactgggttattgagagca

SEQ ID NO: 4088409 - DNA, 25 bp, Homo sapien
tgagagcatcaaatgggtatatgca

SEQ ID NO: 4088410 - DNA, 25 bp, Homo sapien
gggtatatgcacatgaatgtctttt

SEQ ID NO: 4088411 - DNA, 25 bp, Homo sapien
aagggaatgatgaggtctagtgaca

SEQ ID NO: 4088412 - DNA, 25 bp, Homo sapien
cctggcctcaggaagggaatgatga

SEQ ID NO: 4088413 - DNA, 25 bp, Homo sapien
cctcaggaagggaatgatgaggtct

SEQ ID NO: 4088414 - DNA, 25 bp, Homo sapien
gatgaggtctagtgacactgggctt

SEQ ID NO: 4088415 - DNA, 25 bp, Homo sapien
actggctagggaattcttcccaggt

SEQ ID NO: 4088416 - DNA, 25 bp, Homo sapien
gtccccactggctagggaattcttc

SEQ ID NO: 4088417 - DNA, 25 bp, Homo sapien
ctggctagggaattcttcccaggtg

SEQ ID NO: 4088418 - DNA, 25 bp, Homo sapien
cctcccggggagctgagtgaagcat

SEQ ID NO: 4088419 - DNA, 25 bp, Homo sapien
ctcccggggagctgagtgaagcatg

SEQ ID NO: 4088420 - DNA, 25 bp, Homo sapien
tcccggggagctgagtgaagcatgg

SEQ ID NO: 4088421 - DNA, 25 bp, Homo sapien
ccggggagctgagtgaagcatggag

SEQ ID NO: 4088422 - DNA, 25 bp, Homo sapien
aagaggtgcttccaggcaaactgga

SEQ ID NO: 4088423 - DNA, 25 bp, Homo sapien
caagaggtgcttccaggcaaactgg

SEQ ID NO: 4088424 - DNA, 25 bp, Homo sapien
acaagaggtgcttccaggcaaactg

SEQ ID NO: 4088425 - DNA, 25 bp, Homo sapien
gagggccagaacaacacccagtagg

SEQ ID NO: 4088426 - DNA, 25 bp, Homo sapien
ggccagaacaacacccagtagggtg

SEQ ID NO: 4088427 - DNA, 25 bp, Homo sapien
gtgagggccagaacaacacccagta

SEQ ID NO: 4088428 - DNA, 25 bp, Homo sapien
cagaacaacacccagtagggtgagg

SEQ ID NO: 4088429 - DNA, 25 bp, Homo sapien
ggcagctagtctccgagctgggcag

SEQ ID NO: 4088430 - DNA, 25 bp, Homo sapien
tgagggggcagctagtctccgagct

SEQ ID NO: 4088431 - DNA, 25 bp, Homo sapien
gtgagggggcagctagtctccgagc

SEQ ID NO: 4088432 - DNA, 25 bp, Homo sapien
gctagtctccgagctgggcaggtct

SEQ ID NO: 4088433 - DNA, 25 bp, Homo sapien
ctggtggcgggaagcaacagatgaa

SEQ ID NO: 4088434 - DNA, 25 bp, Homo sapien
agcgctgcccgtagcagttcagcca

SEQ ID NO: 4088435 - DNA, 25 bp, Homo sapien
gaaggtcggcgccgctccacagcag

SEQ ID NO: 4088436 - DNA, 25 bp, Homo sapien
ctcccacaggtccacgatcacgtcg

SEQ ID NO: 4088437 - DNA, 25 bp, Homo sapien
tgctcccgcgctacgcgcgtccgcg

SEQ ID NO: 4088438 - DNA, 25 bp, Homo sapien
cagaggcgactgaagtaagcgagca

SEQ ID NO: 4088439 - DNA, 25 bp, Homo sapien
cttggcgcagaggcgactgaagtaa

SEQ ID NO: 4088440 - DNA, 25 bp, Homo sapien
gcgcagaggcgactgaagtaagcga

SEQ ID NO: 4088441 - DNA, 25 bp, Homo sapien
cgactgaagtaagcgagcagcagca

SEQ ID NO: 4088442 - DNA, 25 bp, Homo sapien
tggcctctgcgaaaggccgcgcgtc

SEQ ID NO: 4088443 - DNA, 25 bp, Homo sapien
cgcccgcagcagacgcggcaggtcg

SEQ ID NO: 4088444 - DNA, 25 bp, Homo sapien
gcaggcggtagcgcggcagggcgcg

SEQ ID NO: 4088445 - DNA, 25 bp, Homo sapien
gacgcggcaggtcgcgcagcaggcg

SEQ ID NO: 4088446 - DNA, 25 bp, Homo sapien
tcaacctaggtctgcaagtcgggcg

SEQ ID NO: 4088447 - DNA, 25 bp, Homo sapien
aagtcgggcggcctctcgttcgagc

SEQ ID NO: 4088448 - DNA, 25 bp, Homo sapien
taggtctgcaagtcgggcggcctct

SEQ ID NO: 4088449 - DNA, 25 bp, Homo sapien
tctcgttcgagccggctgcacagct

SEQ ID NO: 4088450 - DNA, 25 bp, Homo sapien
aaagcctcttttcctaggtccagag

SEQ ID NO: 4088451 - DNA, 25 bp, Homo sapien
gatttcagggtcgaaggctcattcc

SEQ ID NO: 4088452 - DNA, 25 bp, Homo sapien
gaatgcggcttttcggccagtcgtc

SEQ ID NO: 4088453 - DNA, 25 bp, Homo sapien
ctcgaggcaccccaaggatttcagg

SEQ ID NO: 4088454 - DNA, 25 bp, Homo sapien
ctcctacttccagcacggagtgctt

SEQ ID NO: 4088455 - DNA, 25 bp, Homo sapien
gtagtttgtgcactctctgtcctgg

SEQ ID NO: 4088456 - DNA, 25 bp, Homo sapien
cccagtcagcccgtgtctgtgggtg

SEQ ID NO: 4088457 - DNA, 25 bp, Homo sapien
tctaggtgccaggtggcacccaggc

SEQ ID NO: 4088458 - DNA, 25 bp, Homo sapien
ggagagcagtgggtagcgtcctgag

SEQ ID NO: 4088459 - DNA, 25 bp, Homo sapien
agagaaaggaccactgggcttcggc

SEQ ID NO: 4088460 - DNA, 25 bp, Homo sapien
ggcttcggcccagtgccaaggacag

SEQ ID NO: 4088461 - DNA, 25 bp, Homo sapien
gtgggtagcgtcctgaggccccaca

SEQ ID NO: 4088462 - DNA, 25 bp, Homo sapien
tttgctgagccaaaaactgaaccct

SEQ ID NO: 4088463 - DNA, 25 bp, Homo sapien
agccaaaaactgaaccctgagcctt

SEQ ID NO: 4088464 - DNA, 25 bp, Homo sapien
cctgagcctttcctcgtctccccag

SEQ ID NO: 4088465 - DNA, 25 bp, Homo sapien
gagccaggctaaggctttgctgagc

SEQ ID NO: 4088466 - DNA, 25 bp, Homo sapien
ttttctggggctccgtattcccaga

SEQ ID NO: 4088467 - DNA, 25 bp, Homo sapien
tccgtattcccagaccctcccagag

SEQ ID NO: 4088468 - DNA, 25 bp, Homo sapien
tcttctcttctaccatcagcaccag

SEQ ID NO: 4088469 - DNA, 25 bp, Homo sapien
agcaccagacagaccagacagggca

SEQ ID NO: 4088470 - DNA, 25 bp, Homo sapien
tgttccaagcccagaatttggtggc

SEQ ID NO: 4088471 - DNA, 25 bp, Homo sapien
gctgttccaagcccagaatttggtg

SEQ ID NO: 4088472 - DNA, 25 bp, Homo sapien
aagctgttccaagcccagaatttgg

SEQ ID NO: 4088473 - DNA, 25 bp, Homo sapien
ttccaagcccagaatttggtggcac

SEQ ID NO: 4088474 - DNA, 25 bp, Homo sapien
tctgcaggtgcgtaggcgccagcac

SEQ ID NO: 4088475 - DNA, 25 bp, Homo sapien
gctctgtctgcaggtgcgtaggcgc

SEQ ID NO: 4088476 - DNA, 25 bp, Homo sapien
cagctctgtctgcaggtgcgtaggc

SEQ ID NO: 4088477 - DNA, 25 bp, Homo sapien
tctgtctgcaggtgcgtaggcgcca

SEQ ID NO: 4088478 - DNA, 25 bp, Homo sapien
gacagaggtcacagtcggtctcctt

SEQ ID NO: 4088479 - DNA, 25 bp, Homo sapien
cagaggtcacagtcggtctccttct

SEQ ID NO: 4088480 - DNA, 25 bp, Homo sapien
aggtcacagtcggtctccttctggc

SEQ ID NO: 4088481 - DNA, 25 bp, Homo sapien
agaggtcacagtcggtctccttctg

SEQ ID NO: 4088482 - DNA, 25 bp, Homo sapien
atgcactgtcacaggatgacttgct

SEQ ID NO: 4088483 - DNA, 25 bp, Homo sapien
tacacatgcactgtcacaggatgac

SEQ ID NO: 4088484 - DNA, 25 bp, Homo sapien
gcactgtcacaggatgacttgctca

SEQ ID NO: 4088485 - DNA, 25 bp, Homo sapien
gtgtacacatgcactgtcacaggat

SEQ ID NO: 4088486 - DNA, 25 bp, Homo sapien
gctcctccacccctgagtcagctgc

SEQ ID NO: 4088487 - DNA, 25 bp, Homo sapien
ctcctccacccctgagtcagctgct

SEQ ID NO: 4088488 - DNA, 25 bp, Homo sapien
ggctcctccacccctgagtcagctg

SEQ ID NO: 4088489 - DNA, 25 bp, Homo sapien
gaaggagagcacgacttgggcctgg

SEQ ID NO: 4088490 - DNA, 25 bp, Homo sapien
agagcacgacttgggcctggagaga

SEQ ID NO: 4088491 - DNA, 25 bp, Homo sapien
aaggagagcacgacttgggcctgga

SEQ ID NO: 4088492 - DNA, 25 bp, Homo sapien
ggagagcacgacttgggcctggaga

SEQ ID NO: 4088493 - DNA, 25 bp, Homo sapien
ctagggcagcctcgaagcagtcata

SEQ ID NO: 4088494 - DNA, 25 bp, Homo sapien
gattcgtacctcactccctagggca

SEQ ID NO: 4088495 - DNA, 25 bp, Homo sapien
gctgtgtgtggttgagttccttctc

SEQ ID NO: 4088496 - DNA, 25 bp, Homo sapien
tcgtacctgggctgagtataggacc

SEQ ID NO: 4088497 - DNA, 25 bp, Homo sapien
gatgctgttccagacttcgagcccc

SEQ ID NO: 4088498 - DNA, 25 bp, Homo sapien
tcgggatgctgttccagacttcgag

SEQ ID NO: 4088499 - DNA, 25 bp, Homo sapien
cgggatgctgttccagacttcgagc

SEQ ID NO: 4088500 - DNA, 25 bp, Homo sapien
agctcgggatgctgttccagacttc

SEQ ID NO: 4088501 - DNA, 25 bp, Homo sapien
cagaaccagatgcacgttgtcacca

SEQ ID NO: 4088502 - DNA, 25 bp, Homo sapien
ctgctgacacgttgagccagggcag

SEQ ID NO: 4088503 - DNA, 25 bp, Homo sapien
gaaccagatgcacgttgtcaccatc

SEQ ID NO: 4088504 - DNA, 25 bp, Homo sapien
tcagaaccagatgcacgttgtcacc

SEQ ID NO: 4088505 - DNA, 25 bp, Homo sapien
cctacagtgggaatggacttgggaa

SEQ ID NO: 4088506 - DNA, 25 bp, Homo sapien
tctgatatggcactgcgtcctttgc

SEQ ID NO: 4088507 - DNA, 25 bp, Homo sapien
cactgcgtcctttgcacaggcatcg

SEQ ID NO: 4088508 - DNA, 25 bp, Homo sapien
ttgcacaggcatcggcctacagtgg

SEQ ID NO: 4088509 - DNA, 25 bp, Homo sapien
caattttcccttgcttggggtgagt

SEQ ID NO: 4088510 - DNA, 25 bp, Homo sapien
tttcccttgcttggggtgagtcctc

SEQ ID NO: 4088511 - DNA, 25 bp, Homo sapien
ttcccttgcttggggtgagtcctct

SEQ ID NO: 4088512 - DNA, 25 bp, Homo sapien
ggaggttggagaagataaggaggaa

SEQ ID NO: 4088513 - DNA, 25 bp, Homo sapien
aggaaggaggttggagaagataagg

SEQ ID NO: 4088514 - DNA, 25 bp, Homo sapien
ctgtggaacaaataaaggaaggagg

SEQ ID NO: 4088515 - DNA, 25 bp, Homo sapien
caaagtcaaggaaaccaggaaggca

SEQ ID NO: 4088516 - DNA, 25 bp, Homo sapien
tgaatacagaggcagggaaccaggt

SEQ ID NO: 4088517 - DNA, 25 bp, Homo sapien
tcaaggtaatgatctgcggtccagt

SEQ ID NO: 4088518 - DNA, 25 bp, Homo sapien
tacagaggcagggaaccaggtctgt

SEQ ID NO: 4088519 - DNA, 25 bp, Homo sapien
tggttcaaggtaatgatctgcggtc

SEQ ID NO: 4088520 - DNA, 25 bp, Homo sapien
cctaacggagtcaggttccagaggc

SEQ ID NO: 4088521 - DNA, 25 bp, Homo sapien
tccctgaaggggcagatgttcgtcc

SEQ ID NO: 4088522 - DNA, 25 bp, Homo sapien
tcgtcctaacggagtcaggttccag

SEQ ID NO: 4088523 - DNA, 25 bp, Homo sapien
gggcagatgttcgtcctaacggagt

SEQ ID NO: 4088524 - DNA, 25 bp, Homo sapien
gcagtcgggcggcttgccagaggtt

SEQ ID NO: 4088525 - DNA, 25 bp, Homo sapien
agcacagtgccgcttctgcgggcag

SEQ ID NO: 4088526 - DNA, 25 bp, Homo sapien
gtcgggcggcttgccagaggttctg

SEQ ID NO: 4088527 - DNA, 25 bp, Homo sapien
tgcgggcagcgagcacggtgcgtcc

SEQ ID NO: 4088528 - DNA, 25 bp, Homo sapien
aaagcggtgggaccagtggctggca

SEQ ID NO: 4088529 - DNA, 25 bp, Homo sapien
caggaaagcggtgggaccagtggct

SEQ ID NO: 4088530 - DNA, 25 bp, Homo sapien
ggaaagcggtgggaccagtggctgg

SEQ ID NO: 4088531 - DNA, 25 bp, Homo sapien
aagcggtgggaccagtggctggcag

SEQ ID NO: 4088532 - DNA, 25 bp, Homo sapien
gggtggcctttcagcaatgggaact

SEQ ID NO: 4088533 - DNA, 25 bp, Homo sapien
ttagggtggcctttcagcaatggga

SEQ ID NO: 4088534 - DNA, 25 bp, Homo sapien
agaggttagggtggcctttcagcaa

SEQ ID NO: 4088535 - DNA, 25 bp, Homo sapien
acacagaggttagggtggcctttca

SEQ ID NO: 4088536 - DNA, 25 bp, Homo sapien
gatgttagggtctatcacaagtgcc

SEQ ID NO: 4088537 - DNA, 25 bp, Homo sapien
tgccccagccttgtgagatcatctg

SEQ ID NO: 4088538 - DNA, 25 bp, Homo sapien
tatgtcttacggagcatggttcccc

SEQ ID NO: 4088539 - DNA, 25 bp, Homo sapien
ggttgggaatctgcactcaatctga

SEQ ID NO: 4088540 - DNA, 25 bp, Homo sapien
tgggaagagaccatggttagggcca

SEQ ID NO: 4088541 - DNA, 25 bp, Homo sapien
ctgggaagagaccatggttagggcc

SEQ ID NO: 4088542 - DNA, 25 bp, Homo sapien
gctgcagcttctccgagctgttcac

SEQ ID NO: 4088543 - DNA, 25 bp, Homo sapien
cagcccacaagcactcctgcagctg

SEQ ID NO: 4088544 - DNA, 25 bp, Homo sapien
tgcagctgcagcttctccgagctgt

SEQ ID NO: 4088545 - DNA, 25 bp, Homo sapien
gcagctgcagcttctccgagctgtt

SEQ ID NO: 4088546 - DNA, 25 bp, Homo sapien
tcgtgtctccaacagtagcacatcg

SEQ ID NO: 4088547 - DNA, 25 bp, Homo sapien
aacagtagcacatcgtctttgagag

SEQ ID NO: 4088548 - DNA, 25 bp, Homo sapien
tagtgaagtacagccactgggttcc

SEQ ID NO: 4088549 - DNA, 25 bp, Homo sapien
aaggcacagagggatctgttgtcct

SEQ ID NO: 4088550 - DNA, 25 bp, Homo sapien
gagatgcatttggagagatctgtgg

SEQ ID NO: 4088551 - DNA, 25 bp, Homo sapien
gatggagtgaaaatttgaggccaga

SEQ ID NO: 4088552 - DNA, 25 bp, Homo sapien
agatctgtggaggagggtcgcccag

SEQ ID NO: 4088553 - DNA, 25 bp, Homo sapien
ttgaggccagatgtgagatgcattt

SEQ ID NO: 4088554 - DNA, 25 bp, Homo sapien
gtagtaagtactctccaaggcgagc

SEQ ID NO: 4088555 - DNA, 25 bp, Homo sapien
gactgcaggtcttgtagtaagtact

SEQ ID NO: 4088556 - DNA, 25 bp, Homo sapien
cctgactgcaggtcttgtagtaagt

SEQ ID NO: 4088557 - DNA, 25 bp, Homo sapien
caggtcttgtagtaagtactctcca

SEQ ID NO: 4088558 - DNA, 25 bp, Homo sapien
tatctcccggctaaggttcctgcag

SEQ ID NO: 4088559 - DNA, 25 bp, Homo sapien
tatgggtgtctagccaacagtgtgc

SEQ ID NO: 4088560 - DNA, 25 bp, Homo sapien
tggaacccaaaacttagcacctgta

SEQ ID NO: 4088561 - DNA, 25 bp, Homo sapien
cactgactagggtatgacttcttcc

SEQ ID NO: 4088562 - DNA, 25 bp, Homo sapien
gggcaggcccatagcgctcccaagt

SEQ ID NO: 4088563 - DNA, 25 bp, Homo sapien
gcccatagcgctcccaagtcatcgt

SEQ ID NO: 4088564 - DNA, 25 bp, Homo sapien
catggggcaggcccatagcgctccc

SEQ ID NO: 4088565 - DNA, 25 bp, Homo sapien
caggcccatagcgctcccaagtcat

SEQ ID NO: 4088566 - DNA, 25 bp, Homo sapien
tgctctcaacataagatccaaatcc

SEQ ID NO: 4088567 - DNA, 25 bp, Homo sapien
ttatctcatgacagaaacctgcctg

SEQ ID NO: 4088568 - DNA, 25 bp, Homo sapien
caattgatttgccttgaattgattc

SEQ ID NO: 4088569 - DNA, 25 bp, Homo sapien
tgaattgattcatgacagcctcaga

SEQ ID NO: 4088570 - DNA, 25 bp, Homo sapien
gaaacttaccctccacagagaagaa

SEQ ID NO: 4088571 - DNA, 25 bp, Homo sapien
actgagacttaacagaaatgaattg

SEQ ID NO: 4088572 - DNA, 25 bp, Homo sapien
agagttagaaacttaccctccacag

SEQ ID NO: 4088573 - DNA, 25 bp, Homo sapien
acagaaatgaattgggccgggtgcg

SEQ ID NO: 4088574 - DNA, 25 bp, Homo sapien
ctttcgcgtgatcctttttgagaag

SEQ ID NO: 4088575 - DNA, 25 bp, Homo sapien
taggcaggccagccacacgagggcc

SEQ ID NO: 4088576 - DNA, 25 bp, Homo sapien
aaagcgcagcggcaaagagtaggca

SEQ ID NO: 4088577 - DNA, 25 bp, Homo sapien
acacgagggcccagcgcttgtggat

SEQ ID NO: 4088578 - DNA, 25 bp, Homo sapien
tccctcggagaactcccacagccac

SEQ ID NO: 4088579 - DNA, 25 bp, Homo sapien
cgctttccctcggagaactcccaca

SEQ ID NO: 4088580 - DNA, 25 bp, Homo sapien
gccgccgctttccctcggagaactc

SEQ ID NO: 4088581 - DNA, 25 bp, Homo sapien
ccctcggagaactcccacagccact

SEQ ID NO: 4088582 - DNA, 25 bp, Homo sapien
gagcggacgtcctgtttcaagagcc

SEQ ID NO: 4088583 - DNA, 25 bp, Homo sapien
ccccgagcggacgtcctgtttcaag

SEQ ID NO: 4088584 - DNA, 25 bp, Homo sapien
cggacgtcctgtttcaagagcctca

SEQ ID NO: 4088585 - DNA, 25 bp, Homo sapien
gacgtcctgtttcaagagcctcagc

SEQ ID NO: 4088586 - DNA, 25 bp, Homo sapien
ccgcccagcgcttgctcccactcac

SEQ ID NO: 4088587 - DNA, 25 bp, Homo sapien
cctccgcccagcgcttgctcccact

SEQ ID NO: 4088588 - DNA, 25 bp, Homo sapien
ggccctccgcccagcgcttgctccc

SEQ ID NO: 4088589 - DNA, 25 bp, Homo sapien
tccgcccagcgcttgctcccactca

SEQ ID NO: 4088590 - DNA, 25 bp, Homo sapien
atcggctgagtagaggagcagagcc

SEQ ID NO: 4088591 - DNA, 25 bp, Homo sapien
tcggctgagtagaggagcagagccg

SEQ ID NO: 4088592 - DNA, 25 bp, Homo sapien
catcggctgagtagaggagcagagc

SEQ ID NO: 4088593 - DNA, 25 bp, Homo sapien
tcatcggctgagtagaggagcagag

SEQ ID NO: 4088594 - DNA, 25 bp, Homo sapien
aagaagtcgggcagcacgcagctga

SEQ ID NO: 4088595 - DNA, 25 bp, Homo sapien
ttcacgacggctccacaggtctacg

SEQ ID NO: 4088596 - DNA, 25 bp, Homo sapien
gctgcgcgtgaaaccaagccacggg

SEQ ID NO: 4088597 - DNA, 25 bp, Homo sapien
tggagcagcctgtcgaagcaggccc

SEQ ID NO: 4088598 - DNA, 25 bp, Homo sapien
tgtgaagacgggcacggtgcggaaa

SEQ ID NO: 4088599 - DNA, 25 bp, Homo sapien
ctccgctctctcttggagccgcccg

SEQ ID NO: 4088600 - DNA, 25 bp, Homo sapien
aacgcggggcgcgaggctgctgcag

SEQ ID NO: 4088601 - DNA, 25 bp, Homo sapien
ctctctcttggagccgcccggaacg

SEQ ID NO: 4088602 - DNA, 25 bp, Homo sapien
tggaagtagctatccagggctggct

SEQ ID NO: 4088603 - DNA, 25 bp, Homo sapien
gatggaagtagctatccagggctgg

SEQ ID NO: 4088604 - DNA, 25 bp, Homo sapien
gggatggaagtagctatccagggct

SEQ ID NO: 4088605 - DNA, 25 bp, Homo sapien
gaagtagctatccagggctggctga

SEQ ID NO: 4088606 - DNA, 25 bp, Homo sapien
gccccaggtcccgcgcctggtccca

SEQ ID NO: 4088607 - DNA, 25 bp, Homo sapien
agaaggaagaagcgaccgccccagc

SEQ ID NO: 4088608 - DNA, 25 bp, Homo sapien
aggaagaagcgaccgccccagcccg

SEQ ID NO: 4088609 - DNA, 25 bp, Homo sapien
gaaggaagaagcgaccgccccagcc

SEQ ID NO: 4088610 - DNA, 25 bp, Homo sapien
gagaaggaagaagcgaccgccccag

SEQ ID NO: 4088611 - DNA, 25 bp, Homo sapien
gcgttattacaagcaaaagaggcca

SEQ ID NO: 4088612 - DNA, 25 bp, Homo sapien
aagggatcagattcagggcctcgca

SEQ ID NO: 4088613 - DNA, 25 bp, Homo sapien
tctgttctaaggtgccgtggcgctg

SEQ ID NO: 4088614 - DNA, 25 bp, Homo sapien
aataagttatcctcgctagcatggg

SEQ ID NO: 4088615 - DNA, 25 bp, Homo sapien
gaggccccagagcatagctgggact

SEQ ID NO: 4088616 - DNA, 25 bp, Homo sapien
aggctgaggccccagagcatagctg

SEQ ID NO: 4088617 - DNA, 25 bp, Homo sapien
cccagagcatagctgggactaggcc

SEQ ID NO: 4088618 - DNA, 25 bp, Homo sapien
catagctgggactaggcccttcggg

SEQ ID NO: 4088619 - DNA, 25 bp, Homo sapien
ctgaggcgggggagaagactgggga

SEQ ID NO: 4088620 - DNA, 25 bp, Homo sapien
ggagagggctggagccagataggtc

SEQ ID NO: 4088621 - DNA, 25 bp, Homo sapien
gggaggtggagagggctggagccag

SEQ ID NO: 4088622 - DNA, 25 bp, Homo sapien
ggtggagagggctggagccagatag

SEQ ID NO: 4088623 - DNA, 25 bp, Homo sapien
tccccggcaggtatgacacggatgg

SEQ ID NO: 4088624 - DNA, 25 bp, Homo sapien
gctgtcaaccagtccccggcaggta

SEQ ID NO: 4088625 - DNA, 25 bp, Homo sapien
ctgtcaaccagtccccggcaggtat

SEQ ID NO: 4088626 - DNA, 25 bp, Homo sapien
accagtccccggcaggtatgacacg

SEQ ID NO: 4088627 - DNA, 25 bp, Homo sapien
ccaggcagtgtttccacctccaaag

SEQ ID NO: 4088628 - DNA, 25 bp, Homo sapien
cacctccaaagttgtcccggatggt

SEQ ID NO: 4088629 - DNA, 25 bp, Homo sapien
cttcctcccaggcagtgtttccacc

SEQ ID NO: 4088630 - DNA, 25 bp, Homo sapien
tatttggacaaattctcttcctccc

SEQ ID NO: 4088631 - DNA, 25 bp, Homo sapien
tgaataagtgctccccaagagttcc

SEQ ID NO: 4088632 - DNA, 25 bp, Homo sapien
tactatagatgttcagtgctatttg

SEQ ID NO: 4088633 - DNA, 25 bp, Homo sapien
caagagttcctagccctacaccagc

SEQ ID NO: 4088634 - DNA, 25 bp, Homo sapien
gtttactgctatactatagatgttc

SEQ ID NO: 4088635 - DNA, 25 bp, Homo sapien
gacatttcagcccaatacgttcaaa

SEQ ID NO: 4088636 - DNA, 25 bp, Homo sapien
ggagtctacctggatgtctaatgga

SEQ ID NO: 4088637 - DNA, 25 bp, Homo sapien
gaaccgacaaccaggtctaactctg

SEQ ID NO: 4088638 - DNA, 25 bp, Homo sapien
gactttgaaaagctggagggctcag

SEQ ID NO: 4088639 - DNA, 25 bp, Homo sapien
ggtggcactcgaagtctgacttgct

SEQ ID NO: 4088640 - DNA, 25 bp, Homo sapien
tccagcaggcggtggcactcgaagt

SEQ ID NO: 4088641 - DNA, 25 bp, Homo sapien
gaagtctgacttgctgcacacaccc

SEQ ID NO: 4088642 - DNA, 25 bp, Homo sapien
cagcacctctaccaggcgggtctca

SEQ ID NO: 4088643 - DNA, 25 bp, Homo sapien
ccagggaaggccctttgccactcac

SEQ ID NO: 4088644 - DNA, 25 bp, Homo sapien
cttccagggaaggccctttgccact

SEQ ID NO: 4088645 - DNA, 25 bp, Homo sapien
tgtgacccacttccagggaaggccc

SEQ ID NO: 4088646 - DNA, 25 bp, Homo sapien
cacttccagggaaggccctttgcca

SEQ ID NO: 4088647 - DNA, 25 bp, Homo sapien
gcagagcttcagggaatctgagcac

SEQ ID NO: 4088648 - DNA, 25 bp, Homo sapien
cagagcttcagggaatctgagcaca

SEQ ID NO: 4088649 - DNA, 25 bp, Homo sapien
tatctgagtagcctgagttcacaca

SEQ ID NO: 4088650 - DNA, 25 bp, Homo sapien
agtaagttcagctcttgtgccagga

SEQ ID NO: 4088651 - DNA, 25 bp, Homo sapien
tcacacagcgaactagggacagagc

SEQ ID NO: 4088652 - DNA, 25 bp, Homo sapien
catagtccgatctggcatgggaaat

SEQ ID NO: 4088653 - DNA, 25 bp, Homo sapien
cccggctgcccctactgggaagtga

SEQ ID NO: 4088654 - DNA, 25 bp, Homo sapien
aacgggccaggatgacaatggcggt

SEQ ID NO: 4088655 - DNA, 25 bp, Homo sapien
agaaagaagtagacacgggagactt

SEQ ID NO: 4088656 - DNA, 25 bp, Homo sapien
tgagaaatcggatggttgctgtgtc

SEQ ID NO: 4088657 - DNA, 25 bp, Homo sapien
tgggatatgaggagcctctctgcca

SEQ ID NO: 4088658 - DNA, 25 bp, Homo sapien
tcgtctgggatatgaggagcctctc

SEQ ID NO: 4088659 - DNA, 25 bp, Homo sapien
tggcggcccatcgtctgggatatga

SEQ ID NO: 4088660 - DNA, 25 bp, Homo sapien
gatatgaggagcctctctgccaggc

SEQ ID NO: 4088661 - DNA, 25 bp, Homo sapien
ccccgtagccggcttggcagtcaca

SEQ ID NO: 4088662 - DNA, 25 bp, Homo sapien
ttcacactgcccgtagccaccgcag

SEQ ID NO: 4088663 - DNA, 25 bp, Homo sapien
gttgcgttctgcctcaaagtagcca

SEQ ID NO: 4088664 - DNA, 25 bp, Homo sapien
aacataccagatggctggcgttgcg

SEQ ID NO: 4088665 - DNA, 25 bp, Homo sapien
ctacacacttgaggtgatgcagggc

SEQ ID NO: 4088666 - DNA, 25 bp, Homo sapien
tgagcatcgggcacaggggccaaaa

SEQ ID NO: 4088667 - DNA, 25 bp, Homo sapien
ccagcccttcttgcattgcaaacag

SEQ ID NO: 4088668 - DNA, 25 bp, Homo sapien
cacacttgaggtgatgcagggccca

SEQ ID NO: 4088669 - DNA, 25 bp, Homo sapien
taggacttggccaaagtaacgcctc

SEQ ID NO: 4088670 - DNA, 25 bp, Homo sapien
gtacacagggactatactacacagt

SEQ ID NO: 4088671 - DNA, 25 bp, Homo sapien
ccaggttgagatctccatgaaggtg

SEQ ID NO: 4088672 - DNA, 25 bp, Homo sapien
gaggcatctctcactgtacacaggg

SEQ ID NO: 4088673 - DNA, 25 bp, Homo sapien
gggatgattgtgcagtaagttacag

SEQ ID NO: 4088674 - DNA, 25 bp, Homo sapien
gatgattgtgcagtaagttacagga

SEQ ID NO: 4088675 - DNA, 25 bp, Homo sapien
tgattgtgcagtaagttacaggaat

SEQ ID NO: 4088676 - DNA, 25 bp, Homo sapien
gattgtgcagtaagttacaggaata

SEQ ID NO: 4088677 - DNA, 25 bp, Homo sapien
tcggcactcataggagccctcagtg

SEQ ID NO: 4088678 - DNA, 25 bp, Homo sapien
gtgttcacgcagaattggtcagctc

SEQ ID NO: 4088679 - DNA, 25 bp, Homo sapien
tcacgcagaattggtcagctccaca

SEQ ID NO: 4088680 - DNA, 25 bp, Homo sapien
ctcggcactcataggagccctcagt

SEQ ID NO: 4088681 - DNA, 25 bp, Homo sapien
ctcctctgcagaagtagacactgac

SEQ ID NO: 4088682 - DNA, 25 bp, Homo sapien
cctcctctgcagaagtagacactga

SEQ ID NO: 4088683 - DNA, 25 bp, Homo sapien
gtcccctcctctgcagaagtagaca

SEQ ID NO: 4088684 - DNA, 25 bp, Homo sapien
cccctcctctgcagaagtagacact

SEQ ID NO: 4088685 - DNA, 25 bp, Homo sapien
tgatagccagggctacacttcttac

SEQ ID NO: 4088686 - DNA, 25 bp, Homo sapien
gctacacttcttacagcgacctggc

SEQ ID NO: 4088687 - DNA, 25 bp, Homo sapien
cccatgcagcctaggcaggccttgg

SEQ ID NO: 4088688 - DNA, 25 bp, Homo sapien
tgcagcctaggcaggccttggcaca

SEQ ID NO: 4088689 - DNA, 25 bp, Homo sapien
tgggtgaggcactcccaggtgcctg

SEQ ID NO: 4088690 - DNA, 25 bp, Homo sapien
gctgggtgaggcactcccaggtgcc

SEQ ID NO: 4088691 - DNA, 25 bp, Homo sapien
gggtgaggcactcccaggtgcctgt

SEQ ID NO: 4088692 - DNA, 25 bp, Homo sapien
ctgggtgaggcactcccaggtgcct

SEQ ID NO: 4088693 - DNA, 25 bp, Homo sapien
ctgcccttgcccaggcaacattcca

SEQ ID NO: 4088694 - DNA, 25 bp, Homo sapien
cccttgcccaggcaacattccaccc

SEQ ID NO: 4088695 - DNA, 25 bp, Homo sapien
cttgcccaggcaacattccaccctt

SEQ ID NO: 4088696 - DNA, 25 bp, Homo sapien
ttgcccaggcaacattccacccttc

SEQ ID NO: 4088697 - DNA, 25 bp, Homo sapien
ctcggcacagatgcagcgataaccg

SEQ ID NO: 4088698 - DNA, 25 bp, Homo sapien
acagatgcagcgataaccgccctcg

SEQ ID NO: 4088699 - DNA, 25 bp, Homo sapien
ggcacagatgcagcgataaccgccc

SEQ ID NO: 4088700 - DNA, 25 bp, Homo sapien
atgcagcgataaccgccctcggtgt

SEQ ID NO: 4088701 - DNA, 25 bp, Homo sapien
tgggatctgctccttcacacagatg

SEQ ID NO: 4088702 - DNA, 25 bp, Homo sapien
gatcagatgtagagcccggtctcag

SEQ ID NO: 4088703 - DNA, 25 bp, Homo sapien
ttctctttgaatgaggacctcccct

SEQ ID NO: 4088704 - DNA, 25 bp, Homo sapien
gatttgatgccaggtctgattccct

SEQ ID NO: 4088705 - DNA, 25 bp, Homo sapien
tgtaccctggaaggtataaggctgc

SEQ ID NO: 4088706 - DNA, 25 bp, Homo sapien
gacttgcttgccatatagccctggg

SEQ ID NO: 4088707 - DNA, 25 bp, Homo sapien
ttgggatcccagctttgcgacttgc

SEQ ID NO: 4088708 - DNA, 25 bp, Homo sapien
tgtatgagtctcgttccacggtcag

SEQ ID NO: 4088709 - DNA, 25 bp, Homo sapien
gatgagaacccaacttccagcgtcg

SEQ ID NO: 4088710 - DNA, 25 bp, Homo sapien
cagcaagccaggcacactacattta

SEQ ID NO: 4088711 - DNA, 25 bp, Homo sapien
ctggcactcgtatccctgttcctgg

SEQ ID NO: 4088712 - DNA, 25 bp, Homo sapien
taccatccctgtctcactaaatggg

SEQ ID NO: 4088713 - DNA, 25 bp, Homo sapien
tactgctcaaaaccaccctgcaagg

SEQ ID NO: 4088714 - DNA, 25 bp, Homo sapien
catctctgagaagaagcctgctgac

SEQ ID NO: 4088715 - DNA, 25 bp, Homo sapien
tcatctctgagaagaagcctgctga

SEQ ID NO: 4088716 - DNA, 25 bp, Homo sapien
atctctgagaagaagcctgctgact

SEQ ID NO: 4088717 - DNA, 25 bp, Homo sapien
gcacacggtcactgcgctctgacaa

SEQ ID NO: 4088718 - DNA, 25 bp, Homo sapien
tgcagcaccaccaactcgtcttctg

SEQ ID NO: 4088719 - DNA, 25 bp, Homo sapien
gtgaacaccaagtcgcccttagcag

SEQ ID NO: 4088720 - DNA, 25 bp, Homo sapien
agtagccagtcatggccgccacagc

SEQ ID NO: 4088721 - DNA, 25 bp, Homo sapien
ggtaggggtgcttaccccactctca

SEQ ID NO: 4088722 - DNA, 25 bp, Homo sapien
gcaggtaggggtgcttaccccactc

SEQ ID NO: 4088723 - DNA, 25 bp, Homo sapien
tgctctgtaaggcaggtaggggtgc

SEQ ID NO: 4088724 - DNA, 25 bp, Homo sapien
tgaagagctcatggtatccaccttc

SEQ ID NO: 4088725 - DNA, 25 bp, Homo sapien
ctgtgaggaccacctaatcctaagc

SEQ ID NO: 4088726 - DNA, 25 bp, Homo sapien
ggagctgtgatggccccacccctgt

SEQ ID NO: 4088727 - DNA, 25 bp, Homo sapien
gctctagcagccaccattaaggaaa

SEQ ID NO: 4088728 - DNA, 25 bp, Homo sapien
gaggaccacctaatcctaagcaggg

SEQ ID NO: 4088729 - DNA, 25 bp, Homo sapien
atgtggtgaacacagaacaggaact

SEQ ID NO: 4088730 - DNA, 25 bp, Homo sapien
tccttctcctaacagcacttcaggg

SEQ ID NO: 4088731 - DNA, 25 bp, Homo sapien
taatggcgaccacacttttattgaa

SEQ ID NO: 4088732 - DNA, 25 bp, Homo sapien
tgggacaggtagtaagactgatgcc

SEQ ID NO: 4088733 - DNA, 25 bp, Homo sapien
taattctcatgttaagcctgagtgg

SEQ ID NO: 4088734 - DNA, 25 bp, Homo sapien
tcaagatcagttggaacccctggcg

SEQ ID NO: 4088735 - DNA, 25 bp, Homo sapien
catggcatggcctactgggacagtt

SEQ ID NO: 4088736 - DNA, 25 bp, Homo sapien
gacagtctgcccctagatgagttgc

SEQ ID NO: 4088737 - DNA, 25 bp, Homo sapien
gataccatcgagctttgaagagcgg

SEQ ID NO: 4088738 - DNA, 25 bp, Homo sapien
tgctgtccacatggtctgtgctcaa

SEQ ID NO: 4088739 - DNA, 25 bp, Homo sapien
ctgctgtccacatggtctgtgctca

SEQ ID NO: 4088740 - DNA, 25 bp, Homo sapien
ccttacggctcgcaggcgcggctgg

SEQ ID NO: 4088741 - DNA, 25 bp, Homo sapien
ttccccttgctgcttacggcgctgg

SEQ ID NO: 4088742 - DNA, 25 bp, Homo sapien
gccaccgctgcaaaacccactcctg

SEQ ID NO: 4088743 - DNA, 25 bp, Homo sapien
cagccctgactctgctcggcctggg

SEQ ID NO: 4088744 - DNA, 25 bp, Homo sapien
ttgggcaccgggctaaacatttcat

SEQ ID NO: 4088745 - DNA, 25 bp, Homo sapien
tgggcaccgggctaaacatttcatc

SEQ ID NO: 4088746 - DNA, 25 bp, Homo sapien
ttcacaacgcaatgaggcaggtgct

SEQ ID NO: 4088747 - DNA, 25 bp, Homo sapien
catcttcttcacaacgcaatgaggc

SEQ ID NO: 4088748 - DNA, 25 bp, Homo sapien
ggtgggagatcacttgtcctggagg

SEQ ID NO: 4088749 - DNA, 25 bp, Homo sapien
tgggagatcacttgtcctggaggtc

SEQ ID NO: 4088750 - DNA, 25 bp, Homo sapien
aggctgcagtaagcccacattgcac

SEQ ID NO: 4088751 - DNA, 25 bp, Homo sapien
gaggtgggagatcacttgtcctgga

SEQ ID NO: 4088752 - DNA, 25 bp, Homo sapien
tcatgtgtgaaacgggcaaggcctg

SEQ ID NO: 4088753 - DNA, 25 bp, Homo sapien
gattccacatggtgagaacccagaa

SEQ ID NO: 4088754 - DNA, 25 bp, Homo sapien
caaggaacagctgaaaaactcggag

SEQ ID NO: 4088755 - DNA, 25 bp, Homo sapien
aactcggagtgtttgtcctggagaa

SEQ ID NO: 4088756 - DNA, 25 bp, Homo sapien
ttccaagagtcctactttcagaggg

SEQ ID NO: 4088757 - DNA, 25 bp, Homo sapien
gccgtatgaatggagtagaatcctg

SEQ ID NO: 4088758 - DNA, 25 bp, Homo sapien
tcccaacaaggttcatttccaagag

SEQ ID NO: 4088759 - DNA, 25 bp, Homo sapien
cattaattcagtgtgaggccgtatg

SEQ ID NO: 4088760 - DNA, 25 bp, Homo sapien
tcctctgtgtagaagggcattccaa

SEQ ID NO: 4088761 - DNA, 25 bp, Homo sapien
aattggtgattgagtggtagccgcc

SEQ ID NO: 4088762 - DNA, 25 bp, Homo sapien
taatgacccgcagacccaagttaag

SEQ ID NO: 4088763 - DNA, 25 bp, Homo sapien
tgaggtcaccgaatctgagaatctg

SEQ ID NO: 4088764 - DNA, 25 bp, Homo sapien
tgcccagtgaaaatcagtgaccctg

SEQ ID NO: 4088765 - DNA, 25 bp, Homo sapien
gacggcagttgttggtagacacaca

SEQ ID NO: 4088766 - DNA, 25 bp, Homo sapien
tcccagggaagtgacggtgccattt

SEQ ID NO: 4088767 - DNA, 25 bp, Homo sapien
tcttcagagtgaatacccagggtca

SEQ ID NO: 4088768 - DNA, 25 bp, Homo sapien
ttaggcccactgaagataccctggg

SEQ ID NO: 4088769 - DNA, 25 bp, Homo sapien
actggactcccacaaactgtaatga

SEQ ID NO: 4088770 - DNA, 25 bp, Homo sapien
ccctgggccatttatgtcaaagcat

SEQ ID NO: 4088771 - DNA, 25 bp, Homo sapien
taaaccagatggcaagtcccttgat

SEQ ID NO: 4088772 - DNA, 25 bp, Homo sapien
aaaagaaatggccgtggccgggcat

SEQ ID NO: 4088773 - DNA, 25 bp, Homo sapien
tctctggcaatgactgggacagtat

SEQ ID NO: 4088774 - DNA, 25 bp, Homo sapien
tctgataccatcatgtgagggatcc

SEQ ID NO: 4088775 - DNA, 25 bp, Homo sapien
agttcattgactagagcccttgcca

SEQ ID NO: 4088776 - DNA, 25 bp, Homo sapien
tccagcaccagcagtgtaagcctgt

SEQ ID NO: 4088777 - DNA, 25 bp, Homo sapien
tagtcactgggcttagcgttttcca

SEQ ID NO: 4088778 - DNA, 25 bp, Homo sapien
agtaatacccttgagcttatgggag

SEQ ID NO: 4088779 - DNA, 25 bp, Homo sapien
tgttcaaatccagcacccatgtgtt

SEQ ID NO: 4088780 - DNA, 25 bp, Homo sapien
tagcaacctatgaaacctgtgtagg

SEQ ID NO: 4088781 - DNA, 25 bp, Homo sapien
cactaataatccatggaatatcaat

SEQ ID NO: 4088782 - DNA, 25 bp, Homo sapien
gacctcactaataatccatggaata

SEQ ID NO: 4088783 - DNA, 25 bp, Homo sapien
aacaaaagaccattaaatatatgaa

SEQ ID NO: 4088784 - DNA, 25 bp, Homo sapien
aagttacttgacctcactaataatc

SEQ ID NO: 4088785 - DNA, 25 bp, Homo sapien
tacagggatctatggaagtggaatt

SEQ ID NO: 4088786 - DNA, 25 bp, Homo sapien
cttattgctgttctcaggacccagg

SEQ ID NO: 4088787 - DNA, 25 bp, Homo sapien
caggattctagggagcacagttggt

SEQ ID NO: 4088788 - DNA, 25 bp, Homo sapien
tctgagaaccccaatgtataaagtg

SEQ ID NO: 4088789 - DNA, 25 bp, Homo sapien
tgaaatatattagactaggtttggg

SEQ ID NO: 4088790 - DNA, 25 bp, Homo sapien
cagacttgacaaatatactactgac

SEQ ID NO: 4088791 - DNA, 25 bp, Homo sapien
ggtttggggatagattatgtgtaaa

SEQ ID NO: 4088792 - DNA, 25 bp, Homo sapien
ggttctcagacttgacaaatatact

SEQ ID NO: 4088793 - DNA, 25 bp, Homo sapien
gtggctcagtctcatcaggtcatca

SEQ ID NO: 4088794 - DNA, 25 bp, Homo sapien
gagagcactggcacagtcaaggctt

SEQ ID NO: 4088795 - DNA, 25 bp, Homo sapien
gctgaaccagcctaagtccaagaaa

SEQ ID NO: 4088796 - DNA, 25 bp, Homo sapien
caaaatgctgtacatgctgaaccag

SEQ ID NO: 4088797 - DNA, 25 bp, Homo sapien
ctgggccaccgccgatagttttcca

SEQ ID NO: 4088798 - DNA, 25 bp, Homo sapien
gcctgggccaccgccgatagttttc

SEQ ID NO: 4088799 - DNA, 25 bp, Homo sapien
tgggccaccgccgatagttttccac

SEQ ID NO: 4088800 - DNA, 25 bp, Homo sapien
agtgggtaggtacagtccagtctct

SEQ ID NO: 4088801 - DNA, 25 bp, Homo sapien
cagtccagtctctcaaccatgacaa

SEQ ID NO: 4088802 - DNA, 25 bp, Homo sapien
tccagtctctcaaccatgacaatct

SEQ ID NO: 4088803 - DNA, 25 bp, Homo sapien
gtgggtaggtacagtccagtctctc

SEQ ID NO: 4088804 - DNA, 25 bp, Homo sapien
cagaaagttaatattagctatggtg

SEQ ID NO: 4088805 - DNA, 25 bp, Homo sapien
ctgcagaaagttaatattagctatg

SEQ ID NO: 4088806 - DNA, 25 bp, Homo sapien
gttaatattagctatggtgttctgc

SEQ ID NO: 4088807 - DNA, 25 bp, Homo sapien
aaagttaatattagctatggtgttc

SEQ ID NO: 4088808 - DNA, 25 bp, Homo sapien
gatccaacttctcccgaagctcaga

SEQ ID NO: 4088809 - DNA, 25 bp, Homo sapien
accctggagtaaatgacaacctcat

SEQ ID NO: 4088810 - DNA, 25 bp, Homo sapien
taccctggagtaaatgacaacctca

SEQ ID NO: 4088811 - DNA, 25 bp, Homo sapien
gtaccctggagtaaatgacaacctc

SEQ ID NO: 4088812 - DNA, 25 bp, Homo sapien
aagatgtgaattcctgcttagtagc

SEQ ID NO: 4088813 - DNA, 25 bp, Homo sapien
atgtgaattcctgcttagtagccat

SEQ ID NO: 4088814 - DNA, 25 bp, Homo sapien
gatgtgaattcctgcttagtagcca

SEQ ID NO: 4088815 - DNA, 25 bp, Homo sapien
agatgtgaattcctgcttagtagcc

SEQ ID NO: 4088816 - DNA, 25 bp, Homo sapien
catcaaagagaataatacggttctg

SEQ ID NO: 4088817 - DNA, 25 bp, Homo sapien
caaagagaataatacggttctgacc

SEQ ID NO: 4088818 - DNA, 25 bp, Homo sapien
aagagaataatacggttctgaccgc

SEQ ID NO: 4088819 - DNA, 25 bp, Homo sapien
acatcaaagagaataatacggttct

SEQ ID NO: 4088820 - DNA, 25 bp, Homo sapien
atactgaggcagtgttttcaattgc

SEQ ID NO: 4088821 - DNA, 25 bp, Homo sapien
cagatactgaggcagtgttttcaat

SEQ ID NO: 4088822 - DNA, 25 bp, Homo sapien
gtgttcagatactgaggcagtgttt

SEQ ID NO: 4088823 - DNA, 25 bp, Homo sapien
cttgtgttcagatactgaggcagtg

SEQ ID NO: 4088824 - DNA, 25 bp, Homo sapien
tggtgctatagatgatgaaaagcat

SEQ ID NO: 4088825 - DNA, 25 bp, Homo sapien
ctttgtctgagtattggtgctatag

SEQ ID NO: 4088826 - DNA, 25 bp, Homo sapien
agagaatgtactctggagcagctgt

SEQ ID NO: 4088827 - DNA, 25 bp, Homo sapien
tgaatgcagcctgatcgaatcttat

SEQ ID NO: 4088828 - DNA, 25 bp, Homo sapien
cacattatttgtataggagactgcc

SEQ ID NO: 4088829 - DNA, 25 bp, Homo sapien
tggcagtatgtgtcaaaaaacataa

SEQ ID NO: 4088830 - DNA, 25 bp, Homo sapien
tgtataggagactgccaaatgaaat

SEQ ID NO: 4088831 - DNA, 25 bp, Homo sapien
ctgccaaatgaaattctactctagt

SEQ ID NO: 4088832 - DNA, 25 bp, Homo sapien
ttgccactggatggccattctaagg

SEQ ID NO: 4088833 - DNA, 25 bp, Homo sapien
aaaatcagccgattgtggtgacacg

SEQ ID NO: 4088834 - DNA, 25 bp, Homo sapien
tgccagtgtaacttgaccatcccgt

SEQ ID NO: 4088835 - DNA, 25 bp, Homo sapien
gcactgaactgagacagcgccaact

SEQ ID NO: 4088836 - DNA, 25 bp, Homo sapien
ctgcagcctgggtgacagagcaaga

SEQ ID NO: 4088837 - DNA, 25 bp, Homo sapien
caagaggctgaggagggaagactgc

SEQ ID NO: 4088838 - DNA, 25 bp, Homo sapien
agtgaactatgatcacgccactgca

SEQ ID NO: 4088839 - DNA, 25 bp, Homo sapien
ttgagcccaggagtttcaggctgca

SEQ ID NO: 4088840 - DNA, 25 bp, Homo sapien
tactcagaaggctgacatgagagga

SEQ ID NO: 4088841 - DNA, 25 bp, Homo sapien
ctcagaaggctgacatgagaggatc

SEQ ID NO: 4088842 - DNA, 25 bp, Homo sapien
cagaaggctgacatgagaggatcgc

SEQ ID NO: 4088843 - DNA, 25 bp, Homo sapien
agaaggctgacatgagaggatcgct

SEQ ID NO: 4088844 - DNA, 25 bp, Homo sapien
gatctcctaagctcaaaagttcgag

SEQ ID NO: 4088845 - DNA, 25 bp, Homo sapien
tgggtaacatgacgaaaccttatgt

SEQ ID NO: 4088846 - DNA, 25 bp, Homo sapien
gaggcagaggtggttagatctccta

SEQ ID NO: 4088847 - DNA, 25 bp, Homo sapien
taactcctatacctcaacaatgaca

SEQ ID NO: 4088848 - DNA, 25 bp, Homo sapien
gcccggccgacaaattgatttttga

SEQ ID NO: 4088849 - DNA, 25 bp, Homo sapien
aaataaataacagggtgatgctcag

SEQ ID NO: 4088850 - DNA, 25 bp, Homo sapien
ggtgtatccagttgtgcaggtctcc

SEQ ID NO: 4088851 - DNA, 25 bp, Homo sapien
gtatccagttgtgcaggtctcctcc

SEQ ID NO: 4088852 - DNA, 25 bp, Homo sapien
ttctgggtgtatccagttgtgcagg

SEQ ID NO: 4088853 - DNA, 25 bp, Homo sapien
tgggtgtatccagttgtgcaggtct

SEQ ID NO: 4088854 - DNA, 25 bp, Homo sapien
ttggcaaggctgaagtcaaagcctt

SEQ ID NO: 4088855 - DNA, 25 bp, Homo sapien
tgttgctggtgctctgcgtggaggg

SEQ ID NO: 4088856 - DNA, 25 bp, Homo sapien
gctctgggtataggggtaggccaca

SEQ ID NO: 4088857 - DNA, 25 bp, Homo sapien
tcacagcctccttattggcaaggct

SEQ ID NO: 4088858 - DNA, 25 bp, Homo sapien
tgagaggaccctaatgctgcatgag

SEQ ID NO: 4088859 - DNA, 25 bp, Homo sapien
tgtggtaccaaagccgaagtctgcg

SEQ ID NO: 4088860 - DNA, 25 bp, Homo sapien
tagccctggcctaggaaacgttcca

SEQ ID NO: 4088861 - DNA, 25 bp, Homo sapien
tacaatggaagtgcatcccctggca

SEQ ID NO: 4088862 - DNA, 25 bp, Homo sapien
ggagtagacacatggacagtcgttc

SEQ ID NO: 4088863 - DNA, 25 bp, Homo sapien
actgtcggtgacaataccccaggct

SEQ ID NO: 4088864 - DNA, 25 bp, Homo sapien
cactaactgtgctagctaggctaag

SEQ ID NO: 4088865 - DNA, 25 bp, Homo sapien
tctaaaagctatgctgtgatgcaca

SEQ ID NO: 4088866 - DNA, 25 bp, Homo sapien
tggtgcctcccaactatactgacta

SEQ ID NO: 4088867 - DNA, 25 bp, Homo sapien
cctcgatgtggccatagtggtatat

SEQ ID NO: 4088868 - DNA, 25 bp, Homo sapien
tatatctggtggtgcaactctcctc

SEQ ID NO: 4088869 - DNA, 25 bp, Homo sapien
tatctccttgtcaagtgaggtggag

SEQ ID NO: 4088870 - DNA, 25 bp, Homo sapien
tatgctgagccagttccctatcaga

SEQ ID NO: 4088871 - DNA, 25 bp, Homo sapien
tgtccctggcgggtcactggcatgc

SEQ ID NO: 4088872 - DNA, 25 bp, Homo sapien
acactgaggctttgtatgtccctgg

SEQ ID NO: 4088873 - DNA, 25 bp, Homo sapien
gaaatacagtatgacactgaggctt

SEQ ID NO: 4088874 - DNA, 25 bp, Homo sapien
gcgggtcactggcatgcctggccca

SEQ ID NO: 4088875 - DNA, 25 bp, Homo sapien
cagggacgtttctaagacttcacca

SEQ ID NO: 4088876 - DNA, 25 bp, Homo sapien
tcctgggatggtttttggtgtatca

SEQ ID NO: 4088877 - DNA, 25 bp, Homo sapien
tggacttctcagcttggacgatgct

SEQ ID NO: 4088878 - DNA, 25 bp, Homo sapien
tatctcctggcaaccctgcggcagc

SEQ ID NO: 4088879 - DNA, 25 bp, Homo sapien
cacgtggaattggtctctctgaggt

SEQ ID NO: 4088880 - DNA, 25 bp, Homo sapien
cttgtttagatcaacacttctggga

SEQ ID NO: 4088881 - DNA, 25 bp, Homo sapien
tgctacttctatggggtcaacttgt

SEQ ID NO: 4088882 - DNA, 25 bp, Homo sapien
tggtcaccatcgatctacttgctac

SEQ ID NO: 4088883 - DNA, 25 bp, Homo sapien
tgcaggctcccacgttgccgggcag

SEQ ID NO: 4088884 - DNA, 25 bp, Homo sapien
ggctcccacgttgccgggcagacga

SEQ ID NO: 4088885 - DNA, 25 bp, Homo sapien
ggcagacgacaacctgggcgcctcg

SEQ ID NO: 4088886 - DNA, 25 bp, Homo sapien
cgttgccgggcagacgacaacctgg

SEQ ID NO: 4088887 - DNA, 25 bp, Homo sapien
tacaagatttgcaagaaccggtcac

SEQ ID NO: 4088888 - DNA, 25 bp, Homo sapien
ctacaagatttgcaagaaccggtca

SEQ ID NO: 4088889 - DNA, 25 bp, Homo sapien
ctgagtaactgacaggaatccttga

SEQ ID NO: 4088890 - DNA, 25 bp, Homo sapien
tctgtgacccatttgccacctaatg

SEQ ID NO: 4088891 - DNA, 25 bp, Homo sapien
cacagccctcgttctgtgcaaagag

SEQ ID NO: 4088892 - DNA, 25 bp, Homo sapien
caggaatccttgactgcatgccgcc

SEQ ID NO: 4088893 - DNA, 25 bp, Homo sapien
cagtgatagtaaaagccacgcctgg

SEQ ID NO: 4088894 - DNA, 25 bp, Homo sapien
tcattaggaacccacaaggaagctc

SEQ ID NO: 4088895 - DNA, 25 bp, Homo sapien
catccagtattgacacctgagggac

SEQ ID NO: 4088896 - DNA, 25 bp, Homo sapien
tctaccacaggtcacagccagaaag

SEQ ID NO: 4088897 - DNA, 25 bp, Homo sapien
gctcttcttgaaccgaaagggctcc

SEQ ID NO: 4088898 - DNA, 25 bp, Homo sapien
tcttcttgaaccgaaagggctccag

SEQ ID NO: 4088899 - DNA, 25 bp, Homo sapien
ctcttcttgaaccgaaagggctcca

SEQ ID NO: 4088900 - DNA, 25 bp, Homo sapien
ggccccaggctaccgagctgcagct

SEQ ID NO: 4088901 - DNA, 25 bp, Homo sapien
gggccccaggctaccgagctgcagc

SEQ ID NO: 4088902 - DNA, 25 bp, Homo sapien
ggcgggccccaggctaccgagctgc

SEQ ID NO: 4088903 - DNA, 25 bp, Homo sapien
cgggccccaggctaccgagctgcag

SEQ ID NO: 4088904 - DNA, 25 bp, Homo sapien
tggcttcctgtgatgattgtcgctg

SEQ ID NO: 4088905 - DNA, 25 bp, Homo sapien
cttcctgtgatgattgtcgctgggc

SEQ ID NO: 4088906 - DNA, 25 bp, Homo sapien
aggtagaggccacagcgtcacgctg

SEQ ID NO: 4088907 - DNA, 25 bp, Homo sapien
tttgccaaaactgtccggcttcctc

SEQ ID NO: 4088908 - DNA, 25 bp, Homo sapien
ggtagcttagcccatccagactggt

SEQ ID NO: 4088909 - DNA, 25 bp, Homo sapien
agcagtccggcctcacaggctgtac

SEQ ID NO: 4088910 - DNA, 25 bp, Homo sapien
tgtccctccattggcatgaagtctg

SEQ ID NO: 4088911 - DNA, 25 bp, Homo sapien
gaattcgcaagcatactagcatgtg

SEQ ID NO: 4088912 - DNA, 25 bp, Homo sapien
tccccagtgaaggactagactaggg

SEQ ID NO: 4088913 - DNA, 25 bp, Homo sapien
gactaggggccccacgctcaactgg

SEQ ID NO: 4088914 - DNA, 25 bp, Homo sapien
cacgctcaactggtagtggccacaa

SEQ ID NO: 4088915 - DNA, 25 bp, Homo sapien
tttccccagtgaaggactagactag

SEQ ID NO: 4088916 - DNA, 25 bp, Homo sapien
taaccatctggttgtctcgatgcag

SEQ ID NO: 4088917 - DNA, 25 bp, Homo sapien
tgaacccacaggacttcattggctg

SEQ ID NO: 4088918 - DNA, 25 bp, Homo sapien
taagcctgccaagaagattgatgtg

SEQ ID NO: 4088919 - DNA, 25 bp, Homo sapien
tgatgtggcccgtgtaacctttgac

SEQ ID NO: 4088920 - DNA, 25 bp, Homo sapien
gctctgacgccaccgaggcgcgcca

SEQ ID NO: 4088921 - DNA, 25 bp, Homo sapien
ggcccgacgccgctctgacgccacc

SEQ ID NO: 4088922 - DNA, 25 bp, Homo sapien
ccgacgccgctctgacgccaccgag

SEQ ID NO: 4088923 - DNA, 25 bp, Homo sapien
acgccgctctgacgccaccgaggcg

SEQ ID NO: 4088924 - DNA, 25 bp, Homo sapien
gaccgcggcccggacttagagatta

SEQ ID NO: 4088925 - DNA, 25 bp, Homo sapien
agccccagaggagaacgccgaccgc

SEQ ID NO: 4088926 - DNA, 25 bp, Homo sapien
gaagccaaggttcggggcgcggagc

SEQ ID NO: 4088927 - DNA, 25 bp, Homo sapien
ccggacttagagattaggccgcagg

SEQ ID NO: 4088928 - DNA, 25 bp, Homo sapien
ttctcgtttccgcattttaatgacg

SEQ ID NO: 4088929 - DNA, 25 bp, Homo sapien
cgtttccgcattttaatgacgcaga

SEQ ID NO: 4088930 - DNA, 25 bp, Homo sapien
tcatcgggaagcgggtgagggtaaa

SEQ ID NO: 4088931 - DNA, 25 bp, Homo sapien
cctttctcgtttccgcattttaatg

SEQ ID NO: 4088932 - DNA, 25 bp, Homo sapien
ccaatgtcttgtgcacttaaattac

SEQ ID NO: 4088933 - DNA, 25 bp, Homo sapien
caatgtcttgtgcacttaaattact

SEQ ID NO: 4088934 - DNA, 25 bp, Homo sapien
tttgaccaatgtcttgtgcacttaa

SEQ ID NO: 4088935 - DNA, 25 bp, Homo sapien
gaccaatgtcttgtgcacttaaatt

SEQ ID NO: 4088936 - DNA, 25 bp, Homo sapien
cagattttgacagtcttcttttgga

SEQ ID NO: 4088937 - DNA, 25 bp, Homo sapien
tggaggcatcttctgtcaggctctc

SEQ ID NO: 4088938 - DNA, 25 bp, Homo sapien
ctctctttatcctcagattttgaca

SEQ ID NO: 4088939 - DNA, 25 bp, Homo sapien
tcttctgtcaggctctctttatcct

SEQ ID NO: 4088940 - DNA, 25 bp, Homo sapien
acttcattagcaatatgagatttct

SEQ ID NO: 4088941 - DNA, 25 bp, Homo sapien
attctgactctctcccgttttaaga

SEQ ID NO: 4088942 - DNA, 25 bp, Homo sapien
tgactctctcccgttttaagaataa

SEQ ID NO: 4088943 - DNA, 25 bp, Homo sapien
tcttcaacttcattagcaatatgag

SEQ ID NO: 4088944 - DNA, 25 bp, Homo sapien
tcttttggaaagctatttgatccac

SEQ ID NO: 4088945 - DNA, 25 bp, Homo sapien
ttcttttggaaagctatttgatcca

SEQ ID NO: 4088946 - DNA, 25 bp, Homo sapien
cttttggaaagctatttgatccaca

SEQ ID NO: 4088947 - DNA, 25 bp, Homo sapien
tctgaaagagcttcttttggaaagc

SEQ ID NO: 4088948 - DNA, 25 bp, Homo sapien
tttaatatttgctgttaaaaatcat

SEQ ID NO: 4088949 - DNA, 25 bp, Homo sapien
gtttaatatttgctgttaaaaatca

SEQ ID NO: 4088950 - DNA, 25 bp, Homo sapien
tgcagacgctcacaagacaaaaggc

SEQ ID NO: 4088951 - DNA, 25 bp, Homo sapien
aatgtaagactccaggccactaaca

SEQ ID NO: 4088952 - DNA, 25 bp, Homo sapien
ctgcagacgctcacaagacaaaagg

SEQ ID NO: 4088953 - DNA, 25 bp, Homo sapien
gcagacgctcacaagacaaaaggca

SEQ ID NO: 4088954 - DNA, 25 bp, Homo sapien
gaagcagtttgatgagactcttaga

SEQ ID NO: 4088955 - DNA, 25 bp, Homo sapien
ttgatgagactcttagaataagatg

SEQ ID NO: 4088956 - DNA, 25 bp, Homo sapien
agcagtttgatgagactcttagaat

SEQ ID NO: 4088957 - DNA, 25 bp, Homo sapien
cagtttgatgagactcttagaataa

SEQ ID NO: 4088958 - DNA, 25 bp, Homo sapien
ctcaaataaggttttgataatggca

SEQ ID NO: 4088959 - DNA, 25 bp, Homo sapien
tcaaataaggttttgataatggcag

SEQ ID NO: 4088960 - DNA, 25 bp, Homo sapien
caaataaggttttgataatggcagg

SEQ ID NO: 4088961 - DNA, 25 bp, Homo sapien
tcacaaatttgggtatcacccttgc

SEQ ID NO: 4088962 - DNA, 25 bp, Homo sapien
aatttgggtatcacccttgcaaaag

SEQ ID NO: 4088963 - DNA, 25 bp, Homo sapien
caaatttgggtatcacccttgcaaa

SEQ ID NO: 4088964 - DNA, 25 bp, Homo sapien
ttgggtatcacccttgcaaaagggc

SEQ ID NO: 4088965 - DNA, 25 bp, Homo sapien
caagccattttagttgactgacaat

SEQ ID NO: 4088966 - DNA, 25 bp, Homo sapien
tgagtcgaggtatgttgatttcatc

SEQ ID NO: 4088967 - DNA, 25 bp, Homo sapien
tgactgacaatgagtcgaggtatgt

SEQ ID NO: 4088968 - DNA, 25 bp, Homo sapien
ctctgtcaagccattttagttgact

SEQ ID NO: 4088969 - DNA, 25 bp, Homo sapien
ctaggatctcaggtaggctggtgat

SEQ ID NO: 4088970 - DNA, 25 bp, Homo sapien
ttctctggagcaatactgatcagct

SEQ ID NO: 4088971 - DNA, 25 bp, Homo sapien
tgggaatcccctaggatctcaggta

SEQ ID NO: 4088972 - DNA, 25 bp, Homo sapien
ggagcaatactgatcagctgcatga

SEQ ID NO: 4088973 - DNA, 25 bp, Homo sapien
agatgatgacagagggtttatccac

SEQ ID NO: 4088974 - DNA, 25 bp, Homo sapien
ttagatgatgacagagggtttatcc

SEQ ID NO: 4088975 - DNA, 25 bp, Homo sapien
tagatgatgacagagggtttatcca

SEQ ID NO: 4088976 - DNA, 25 bp, Homo sapien
gaaacttaagggatcatggtcaact

SEQ ID NO: 4088977 - DNA, 25 bp, Homo sapien
ctaggaacccaaagaaggtagatgt

SEQ ID NO: 4088978 - DNA, 25 bp, Homo sapien
cagacttcacgctcataacaggtat

SEQ ID NO: 4088979 - DNA, 25 bp, Homo sapien
ttgcatactgcagtgatagaacccc

SEQ ID NO: 4088980 - DNA, 25 bp, Homo sapien
cgcaagcggtctgatgcaggactgt

SEQ ID NO: 4088981 - DNA, 25 bp, Homo sapien
tcaatacttccctaccaattactat

SEQ ID NO: 4088982 - DNA, 25 bp, Homo sapien
tattacctagggatattgttctccc

SEQ ID NO: 4088983 - DNA, 25 bp, Homo sapien
gaatgacagtaagcaatgggtctcc

SEQ ID NO: 4088984 - DNA, 25 bp, Homo sapien
agtttggtatgtatccttccccgca

SEQ ID NO: 4088985 - DNA, 25 bp, Homo sapien
gatggcgtagtactttgcccagaag

SEQ ID NO: 4088986 - DNA, 25 bp, Homo sapien
agaattataagtgcgtaccaccacg

SEQ ID NO: 4088987 - DNA, 25 bp, Homo sapien
tgcgcccaacagacggtgacagatg

SEQ ID NO: 4088988 - DNA, 25 bp, Homo sapien
gattgggacagtgagtgaagtattc

SEQ ID NO: 4088989 - DNA, 25 bp, Homo sapien
caataggaagtttgggtcaagtcgg

SEQ ID NO: 4088990 - DNA, 25 bp, Homo sapien
tgaagtattctctatcagtaggtca

SEQ ID NO: 4088991 - DNA, 25 bp, Homo sapien
tcggaggcttgaaaggacatccagg

SEQ ID NO: 4088992 - DNA, 25 bp, Homo sapien
aacttatccatcaccaactggcgaa

SEQ ID NO: 4088993 - DNA, 25 bp, Homo sapien
tgtatccatggctgttacggaatga

SEQ ID NO: 4088994 - DNA, 25 bp, Homo sapien
ctttattatcacaggtaaatcctcc

SEQ ID NO: 4088995 - DNA, 25 bp, Homo sapien
ggtaaatcctccaatctaatagacg

SEQ ID NO: 4088996 - DNA, 25 bp, Homo sapien
gtctctctaccatgacaatctcctg

SEQ ID NO: 4088997 - DNA, 25 bp, Homo sapien
tctctaccatgacaatctcctgaaa

SEQ ID NO: 4088998 - DNA, 25 bp, Homo sapien
tctctctaccatgacaatctcctga

SEQ ID NO: 4088999 - DNA, 25 bp, Homo sapien
ctctctaccatgacaatctcctgaa

SEQ ID NO: 4089000 - DNA, 25 bp, Homo sapien
tacttgggaagcctgtaaccgtgat

SEQ ID NO: 4089001 - DNA, 25 bp, Homo sapien
ggaagcctgtaaccgtgatggcaaa

SEQ ID NO: 4089002 - DNA, 25 bp, Homo sapien
ttcaactttacttgggaagcctgta

SEQ ID NO: 4089003 - DNA, 25 bp, Homo sapien
tcaactttacttgggaagcctgtaa

SEQ ID NO: 4089004 - DNA, 25 bp, Homo sapien
tctaatagctgactttattacatca

SEQ ID NO: 4089005 - DNA, 25 bp, Homo sapien
gctgactttattacatcaaagagga

SEQ ID NO: 4089006 - DNA, 25 bp, Homo sapien
acatcaaagaggagaataatacagc

SEQ ID NO: 4089007 - DNA, 25 bp, Homo sapien
ggagaataatacagctctgaccgct

SEQ ID NO: 4089008 - DNA, 25 bp, Homo sapien
atactgaggcagtgttttcaattgc

SEQ ID NO: 4089009 - DNA, 25 bp, Homo sapien
cagatactgaggcagtgttttcaat

SEQ ID NO: 4089010 - DNA, 25 bp, Homo sapien
gtgttcagatactgaggcagtgttt

SEQ ID NO: 4089011 - DNA, 25 bp, Homo sapien
cttgtgttcagatactgaggcagtg

SEQ ID NO: 4089012 - DNA, 25 bp, Homo sapien
agagaatgtactctggagcagctgt

SEQ ID NO: 4089013 - DNA, 25 bp, Homo sapien
ctttgtctgagtattggtgctatag

SEQ ID NO: 4089014 - DNA, 25 bp, Homo sapien
tgaatgcagcctgatcgaatcttat

SEQ ID NO: 4089015 - DNA, 25 bp, Homo sapien
ggtgctatagatgatgaaaagcatc

SEQ ID NO: 4089016 - DNA, 25 bp, Homo sapien
tctagagagtgaagcaaactctgag

SEQ ID NO: 4089017 - DNA, 25 bp, Homo sapien
tgagccagcgacagaatggatgaac

SEQ ID NO: 4089018 - DNA, 25 bp, Homo sapien
cttaaatgcatatttgtataggaga

SEQ ID NO: 4089019 - DNA, 25 bp, Homo sapien
caaatgaaattatactctggtctag

SEQ ID NO: 4089020 - DNA, 25 bp, Homo sapien
catctaaggcagtatcaacttcagc

SEQ ID NO: 4089021 - DNA, 25 bp, Homo sapien
tttaacactaccaactctagaagga

SEQ ID NO: 4089022 - DNA, 25 bp, Homo sapien
gggtcactaaggcaccaaccacttc

SEQ ID NO: 4089023 - DNA, 25 bp, Homo sapien
caactctagaaggacatctaaggca

SEQ ID NO: 4089024 - DNA, 25 bp, Homo sapien
gaagagttttcgtatttgctgaggg

SEQ ID NO: 4089025 - DNA, 25 bp, Homo sapien
tgtctttagcaagtcaattcatctc

SEQ ID NO: 4089026 - DNA, 25 bp, Homo sapien
tctttagcaagtcaattcatctctc

SEQ ID NO: 4089027 - DNA, 25 bp, Homo sapien
tgtgtgtctttagcaagtcaattca

SEQ ID NO: 4089028 - DNA, 25 bp, Homo sapien
ttagcaagtcaattcatctctccaa

SEQ ID NO: 4089029 - DNA, 25 bp, Homo sapien
tgaatacggtgctagagagctgctt

SEQ ID NO: 4089030 - DNA, 25 bp, Homo sapien
caatgagcttgtacttgaatacggt

SEQ ID NO: 4089031 - DNA, 25 bp, Homo sapien
catgatgccagccatggtcacagca

SEQ ID NO: 4089032 - DNA, 25 bp, Homo sapien
ggtcacagcaccaataatcccaatg

SEQ ID NO: 4089033 - DNA, 25 bp, Homo sapien
atcgctcaggttggctctctcttgg

SEQ ID NO: 4089034 - DNA, 25 bp, Homo sapien
catcgctcaggttggctctctcttg

SEQ ID NO: 4089035 - DNA, 25 bp, Homo sapien
tcatcgctcaggttggctctctctt

SEQ ID NO: 4089036 - DNA, 25 bp, Homo sapien
gctcatcgctcaggttggctctctc

SEQ ID NO: 4089037 - DNA, 25 bp, Homo sapien
gaaccaactgcaacaaggaggtcac

SEQ ID NO: 4089038 - DNA, 25 bp, Homo sapien
atgaaccaactgcaacaaggaggtc

SEQ ID NO: 4089039 - DNA, 25 bp, Homo sapien
aatgaaccaactgcaacaaggaggt

SEQ ID NO: 4089040 - DNA, 25 bp, Homo sapien
tgaaccaactgcaacaaggaggtca

SEQ ID NO: 4089041 - DNA, 25 bp, Homo sapien
atccagcttttcatgttggatcagg

SEQ ID NO: 4089042 - DNA, 25 bp, Homo sapien
ggatccagcttttcatgttggatca

SEQ ID NO: 4089043 - DNA, 25 bp, Homo sapien
tcatcatagtaaagtgcagaggcct

SEQ ID NO: 4089044 - DNA, 25 bp, Homo sapien
gatccagcttttcatgttggatcag

SEQ ID NO: 4089045 - DNA, 25 bp, Homo sapien
gagtccactacgaaggcatcctgga

SEQ ID NO: 4089046 - DNA, 25 bp, Homo sapien
tcctggaaatcattacagatggtat

SEQ ID NO: 4089047 - DNA, 25 bp, Homo sapien
ccttccggaacaacacaggagtcca

SEQ ID NO: 4089048 - DNA, 25 bp, Homo sapien
tacagatggtatgcccaacccattc

SEQ ID NO: 4089049 - DNA, 25 bp, Homo sapien
tcagctactgacagaattgatgtaa

SEQ ID NO: 4089050 - DNA, 25 bp, Homo sapien
gcaaccaagccagcaggtaaacaat

SEQ ID NO: 4089051 - DNA, 25 bp, Homo sapien
gaattgatgtaacttcaccagtgca

SEQ ID NO: 4089052 - DNA, 25 bp, Homo sapien
tacgcaaggctacagggaaaaccac

SEQ ID NO: 4089053 - DNA, 25 bp, Homo sapien
tacagtgctttcacaggaaatggaa

SEQ ID NO: 4089054 - DNA, 25 bp, Homo sapien
atcccatcctgagtgtcgtattctt

SEQ ID NO: 4089055 - DNA, 25 bp, Homo sapien
tgctttcacaggaaatggaaagtca

SEQ ID NO: 4089056 - DNA, 25 bp, Homo sapien
tattcttccagtccgtacagtgctt

SEQ ID NO: 4089057 - DNA, 25 bp, Homo sapien
ttttggcctgattcctgtgaggtca

SEQ ID NO: 4089058 - DNA, 25 bp, Homo sapien
tttggcctgattcctgtgaggtcac

SEQ ID NO: 4089059 - DNA, 25 bp, Homo sapien
aagagctgtggaattccccatgaac

SEQ ID NO: 4089060 - DNA, 25 bp, Homo sapien
cctctccaaataccatttgtctcga

SEQ ID NO: 4089061 - DNA, 25 bp, Homo sapien
gtggaattccccatgaacattcaaa

SEQ ID NO: 4089062 - DNA, 25 bp, Homo sapien
taccatttgtctcgagagaaacttt

SEQ ID NO: 4089063 - DNA, 25 bp, Homo sapien
tcctccaagtttccgttatgctgtc

SEQ ID NO: 4089064 - DNA, 25 bp, Homo sapien
gtttccgttatgctgtctctccaca

SEQ ID NO: 4089065 - DNA, 25 bp, Homo sapien
cacaaagtctcagtaaccggaaata

SEQ ID NO: 4089066 - DNA, 25 bp, Homo sapien
cggaaatacggagccaggcacagcg

SEQ ID NO: 4089067 - DNA, 25 bp, Homo sapien
tgaatgaacgctctttagcagacat

SEQ ID NO: 4089068 - DNA, 25 bp, Homo sapien
ggctccaggtcagttaggaatatag

SEQ ID NO: 4089069 - DNA, 25 bp, Homo sapien
aacacatgaatgaacgctctttagc

SEQ ID NO: 4089070 - DNA, 25 bp, Homo sapien
ccaggtcagttaggaatataggaca

SEQ ID NO: 4089071 - DNA, 25 bp, Homo sapien
gcctgtgccaggacgaacagtagtt

SEQ ID NO: 4089072 - DNA, 25 bp, Homo sapien
gtagttccacagtgaaggtgagaag

SEQ ID NO: 4089073 - DNA, 25 bp, Homo sapien
aacagtaggcatatgcctgtgccag

SEQ ID NO: 4089074 - DNA, 25 bp, Homo sapien
cgaacagtagttccacagtgaaggt

SEQ ID NO: 4089075 - DNA, 25 bp, Homo sapien
ttccccttcatctcaggtgatgttt

SEQ ID NO: 4089076 - DNA, 25 bp, Homo sapien
tccccttcatctcaggtgatgtttc

SEQ ID NO: 4089077 - DNA, 25 bp, Homo sapien
cttccccttcatctcaggtgatgtt

SEQ ID NO: 4089078 - DNA, 25 bp, Homo sapien
tgctgaaatagcagtaacagtatga

SEQ ID NO: 4089079 - DNA, 25 bp, Homo sapien
ttctcttctgaaagtgtgtcagagg

SEQ ID NO: 4089080 - DNA, 25 bp, Homo sapien
tcttctgaaagtgtgtcagaggagg

SEQ ID NO: 4089081 - DNA, 25 bp, Homo sapien
agctggcctctatgagatggcgtag

SEQ ID NO: 4089082 - DNA, 25 bp, Homo sapien
tgtttagctggcctctatgagatgg

SEQ ID NO: 4089083 - DNA, 25 bp, Homo sapien
gcatttcagtatctaagatgaactt

SEQ ID NO: 4089084 - DNA, 25 bp, Homo sapien
catgggaattatgtagtaacaatga

SEQ ID NO: 4089085 - DNA, 25 bp, Homo sapien
gctctcggaaaaaagcatgggaatt

SEQ ID NO: 4089086 - DNA, 25 bp, Homo sapien
gatgaacttcgtcacaagtccacaa

SEQ ID NO: 4089087 - DNA, 25 bp, Homo sapien
gggcccaagttgcacaacttctgta

SEQ ID NO: 4089088 - DNA, 25 bp, Homo sapien
aataggaggtgtcagcatactctcc

SEQ ID NO: 4089089 - DNA, 25 bp, Homo sapien
ggactctcctggcaataggaggtgt

SEQ ID NO: 4089090 - DNA, 25 bp, Homo sapien
agagatcttccagcaagaaaagcag

SEQ ID NO: 4089091 - DNA, 25 bp, Homo sapien
ctgaaaatagttgtgaatgttctcc

SEQ ID NO: 4089092 - DNA, 25 bp, Homo sapien
gttctccaggtggttacacattggg

SEQ ID NO: 4089093 - DNA, 25 bp, Homo sapien
tgaacaatttcttgggcagatctct

SEQ ID NO: 4089094 - DNA, 25 bp, Homo sapien
gagatgtgagaatccaatattccgg

SEQ ID NO: 4089095 - DNA, 25 bp, Homo sapien
tttcactcctggtccatcaactaca

SEQ ID NO: 4089096 - DNA, 25 bp, Homo sapien
tgtggtactcctgaactttcactcc

SEQ ID NO: 4089097 - DNA, 25 bp, Homo sapien
tatgtggtactcctgaactttcact

SEQ ID NO: 4089098 - DNA, 25 bp, Homo sapien
aactacaccgtgattctcagcagct

SEQ ID NO: 4089099 - DNA, 25 bp, Homo sapien
aaagcccatgaaaaatctgcagcag

SEQ ID NO: 4089100 - DNA, 25 bp, Homo sapien
agcccatgaaaaatctgcagcagcc

SEQ ID NO: 4089101 - DNA, 25 bp, Homo sapien
aagcccatgaaaaatctgcagcagc

SEQ ID NO: 4089102 - DNA, 25 bp, Homo sapien
gcccatgaaaaatctgcagcagcct

SEQ ID NO: 4089103 - DNA, 25 bp, Homo sapien
aaattctgattttcaggttgagaaa

SEQ ID NO: 4089104 - DNA, 25 bp, Homo sapien
cagtaaattctgattttcaggttga

SEQ ID NO: 4089105 - DNA, 25 bp, Homo sapien
tgattttcaggttgagaaaatccac

SEQ ID NO: 4089106 - DNA, 25 bp, Homo sapien
ctgaatacagtaaattctgattttc

SEQ ID NO: 4089107 - DNA, 25 bp, Homo sapien
tgtttcagtcggctactaaggacat

SEQ ID NO: 4089108 - DNA, 25 bp, Homo sapien
ctccctgtttcagtcggctactaag

SEQ ID NO: 4089109 - DNA, 25 bp, Homo sapien
tcagtcggctactaaggacatggag

SEQ ID NO: 4089110 - DNA, 25 bp, Homo sapien
ccctgtttcagtcggctactaagga

SEQ ID NO: 4089111 - DNA, 25 bp, Homo sapien
gcagaagctgttgatttctccaaaa

SEQ ID NO: 4089112 - DNA, 25 bp, Homo sapien
gaatgctttgatggaaattctgcaa

SEQ ID NO: 4089113 - DNA, 25 bp, Homo sapien
aattctgcaagtaatggacgctctg

SEQ ID NO: 4089114 - DNA, 25 bp, Homo sapien
tctgatgagataaagagcacactgg

SEQ ID NO: 4089115 - DNA, 25 bp, Homo sapien
ttggccacacccgacagaggaattg

SEQ ID NO: 4089116 - DNA, 25 bp, Homo sapien
tctttatccccacttggccacaccc

SEQ ID NO: 4089117 - DNA, 25 bp, Homo sapien
gccacacccgacagaggaattgtct

SEQ ID NO: 4089118 - DNA, 25 bp, Homo sapien
cacttggccacacccgacagaggaa

SEQ ID NO: 4089119 - DNA, 25 bp, Homo sapien
ctgcattgagagtcaaatatttgac

SEQ ID NO: 4089120 - DNA, 25 bp, Homo sapien
caccagcaatctcctctatggcctt

SEQ ID NO: 4089121 - DNA, 25 bp, Homo sapien
gccttcagaatgctctctgtgtgct

SEQ ID NO: 4089122 - DNA, 25 bp, Homo sapien
gcaatctcctctatggccttcagaa

SEQ ID NO: 4089123 - DNA, 25 bp, Homo sapien
ggtcagtgtagggaatgtggaggaa

SEQ ID NO: 4089124 - DNA, 25 bp, Homo sapien
ttctctagttcagccatcatcacac

SEQ ID NO: 4089125 - DNA, 25 bp, Homo sapien
tgctgcgagtctgctgctgtgccag

SEQ ID NO: 4089126 - DNA, 25 bp, Homo sapien
ctagttcagccatcatcacacggaa

SEQ ID NO: 4089127 - DNA, 25 bp, Homo sapien
ctgctgcgagtctgctgctgtgcca

SEQ ID NO: 4089128 - DNA, 25 bp, Homo sapien
tgaggatactgaagtctcgaacagc

SEQ ID NO: 4089129 - DNA, 25 bp, Homo sapien
gaagtctcgaacagccatgttccag

SEQ ID NO: 4089130 - DNA, 25 bp, Homo sapien
cagccatgttccagtagaggagttt

SEQ ID NO: 4089131 - DNA, 25 bp, Homo sapien
ccatgttccagtagaggagtttctc

SEQ ID NO: 4089132 - DNA, 25 bp, Homo sapien
aacatacatgcagaacaggatgact

SEQ ID NO: 4089133 - DNA, 25 bp, Homo sapien
acatacatgcagaacaggatgacta

SEQ ID NO: 4089134 - DNA, 25 bp, Homo sapien
gcagaacaggatgactatcaaatac

SEQ ID NO: 4089135 - DNA, 25 bp, Homo sapien
gcagaatagtctcatccagcccaag

SEQ ID NO: 4089136 - DNA, 25 bp, Homo sapien
ttacctaccacagatacagtcgatg

SEQ ID NO: 4089137 - DNA, 25 bp, Homo sapien
tgaggtatctcactgaaaggcccct

SEQ ID NO: 4089138 - DNA, 25 bp, Homo sapien
taggcctgttaactaagccccagaa

SEQ ID NO: 4089139 - DNA, 25 bp, Homo sapien
ctaaaactgaagtctaggagcggca

SEQ ID NO: 4089140 - DNA, 25 bp, Homo sapien
tctaggagcggcatacattgcttca

SEQ ID NO: 4089141 - DNA, 25 bp, Homo sapien
tgaagtctaggagcggcatacattg

SEQ ID NO: 4089142 - DNA, 25 bp, Homo sapien
ggagcggcatacattgcttcagaaa

SEQ ID NO: 4089143 - DNA, 25 bp, Homo sapien
gagtatacctacagaagcataaagg

SEQ ID NO: 4089144 - DNA, 25 bp, Homo sapien
tagaaaggtgggtttgatccagagt

SEQ ID NO: 4089145 - DNA, 25 bp, Homo sapien
ccaggagtcaccaaggacatatctt

SEQ ID NO: 4089146 - DNA, 25 bp, Homo sapien
gttcagcctactttggaatattcag

SEQ ID NO: 4089147 - DNA, 25 bp, Homo sapien
agcagccttgtgtccaactggaagg

SEQ ID NO: 4089148 - DNA, 25 bp, Homo sapien
gccttgtgtccaactggaaggtttc

SEQ ID NO: 4089149 - DNA, 25 bp, Homo sapien
agccttgtgtccaactggaaggttt

SEQ ID NO: 4089150 - DNA, 25 bp, Homo sapien
gaagcagccttgtgtccaactggaa

SEQ ID NO: 4089151 - DNA, 25 bp, Homo sapien
ttgggtgagtctcgtgtcctggtga

SEQ ID NO: 4089152 - DNA, 25 bp, Homo sapien
gttgggtgagtctcgtgtcctggtg

SEQ ID NO: 4089153 - DNA, 25 bp, Homo sapien
tgcaagtcccggttttttagattgc

SEQ ID NO: 4089154 - DNA, 25 bp, Homo sapien
gaaagcctctctacaattgttgaga

SEQ ID NO: 4089155 - DNA, 25 bp, Homo sapien
cagccagaaagcctctctacaattg

SEQ ID NO: 4089156 - DNA, 25 bp, Homo sapien
gagtgagcatagctttgactctgca

SEQ ID NO: 4089157 - DNA, 25 bp, Homo sapien
taagcactatcacaccaagcacgaa

SEQ ID NO: 4089158 - DNA, 25 bp, Homo sapien
caacttgtgattcagcatctagagg

SEQ ID NO: 4089159 - DNA, 25 bp, Homo sapien
cacgaatggccatgcggaggctaaa

SEQ ID NO: 4089160 - DNA, 25 bp, Homo sapien
aaaggctagactgtattggtgactc

SEQ ID NO: 4089161 - DNA, 25 bp, Homo sapien
gaattttgggacttaatctcttcac

SEQ ID NO: 4089162 - DNA, 25 bp, Homo sapien
ggaattttgggacttaatctcttca

SEQ ID NO: 4089163 - DNA, 25 bp, Homo sapien
ggcatagaagcatttgacaataaac

SEQ ID NO: 4089164 - DNA, 25 bp, Homo sapien
ataaacataagtaggcaaagttctg

SEQ ID NO: 4089165 - DNA, 25 bp, Homo sapien
tgctccaccaacttagaacaattaa

SEQ ID NO: 4089166 - DNA, 25 bp, Homo sapien
caaccatcagtgccagactctggtg

SEQ ID NO: 4089167 - DNA, 25 bp, Homo sapien
aatgagaggctataatgcagaaaat

SEQ ID NO: 4089168 - DNA, 25 bp, Homo sapien
tataacaaatgccacaactcgagat

SEQ ID NO: 4089169 - DNA, 25 bp, Homo sapien
caggagtgattctaagattgtgtcg

SEQ ID NO: 4089170 - DNA, 25 bp, Homo sapien
gaaaatacttcgatgacttctccct

SEQ ID NO: 4089171 - DNA, 25 bp, Homo sapien
tgtcgaaagcatctgtaccacaaaa

SEQ ID NO: 4089172 - DNA, 25 bp, Homo sapien
tagctttctttaaattgtcgaaagc

SEQ ID NO: 4089173 - DNA, 25 bp, Homo sapien
tgttatgttgtgcagctttgccttg

SEQ ID NO: 4089174 - DNA, 25 bp, Homo sapien
tcttgttatgttgtgcagctttgcc

SEQ ID NO: 4089175 - DNA, 25 bp, Homo sapien
ctccagcacttacttcgtcttcttc

SEQ ID NO: 4089176 - DNA, 25 bp, Homo sapien
tccagcacttacttcgtcttcttca

SEQ ID NO: 4089177 - DNA, 25 bp, Homo sapien
gcacttacttcgtcttcttcaccat

SEQ ID NO: 4089178 - DNA, 25 bp, Homo sapien
cagcacttacttcgtcttcttcacc

SEQ ID NO: 4089179 - DNA, 25 bp, Homo sapien
taccagtaagaaaggcaaacagcgg

SEQ ID NO: 4089180 - DNA, 25 bp, Homo sapien
gcacagctgggtttatccaaaccaa

SEQ ID NO: 4089181 - DNA, 25 bp, Homo sapien
tagctcccaaagtccagaatcatga

SEQ ID NO: 4089182 - DNA, 25 bp, Homo sapien
tggtgttagacaatccatgatgtcc

SEQ ID NO: 4089183 - DNA, 25 bp, Homo sapien
ggcagaactatgttagcaccagtct

SEQ ID NO: 4089184 - DNA, 25 bp, Homo sapien
ccacctaatccttgaataatgaagc

SEQ ID NO: 4089185 - DNA, 25 bp, Homo sapien
tcaattccacctaatccttgaataa

SEQ ID NO: 4089186 - DNA, 25 bp, Homo sapien
gagacatgattttaatcggcagaac

SEQ ID NO: 4089187 - DNA, 25 bp, Homo sapien
atcaagtcaatcctccagaaagatc

SEQ ID NO: 4089188 - DNA, 25 bp, Homo sapien
aaagttaacatgagtttgatgctgc

SEQ ID NO: 4089189 - DNA, 25 bp, Homo sapien
tacatatacaaagttaacatgagtt

SEQ ID NO: 4089190 - DNA, 25 bp, Homo sapien
ctaggttaggtataactcagaaaat

SEQ ID NO: 4089191 - DNA, 25 bp, Homo sapien
ctttgtagcgttcttgtaactaggt

SEQ ID NO: 4089192 - DNA, 25 bp, Homo sapien
tagctgaaatgtactcctaatgtaa

SEQ ID NO: 4089193 - DNA, 25 bp, Homo sapien
actgaagctaggctttctggtaggc

SEQ ID NO: 4089194 - DNA, 25 bp, Homo sapien
aagaaagaacttggtagcagcactg

SEQ ID NO: 4089195 - DNA, 25 bp, Homo sapien
ctaggctttctggtaggctacatgg

SEQ ID NO: 4089196 - DNA, 25 bp, Homo sapien
gaccctacaggcctctagtgcgcct

SEQ ID NO: 4089197 - DNA, 25 bp, Homo sapien
acaggcctctagtgcgcctgcgctg

SEQ ID NO: 4089198 - DNA, 25 bp, Homo sapien
ctgaggaagagcgactgcgcaggcg

SEQ ID NO: 4089199 - DNA, 25 bp, Homo sapien
gcaggcgccccgaccctacaggcct

SEQ ID NO: 4089200 - DNA, 25 bp, Homo sapien
gctgctggtgattatctcaatgtac

SEQ ID NO: 4089201 - DNA, 25 bp, Homo sapien
agtcctggtgaatctcccgctgcac

SEQ ID NO: 4089202 - DNA, 25 bp, Homo sapien
tgtactcccggttagcccagtcctg

SEQ ID NO: 4089203 - DNA, 25 bp, Homo sapien
gagaaagtctgcgattttcttgatg

SEQ ID NO: 4089204 - DNA, 25 bp, Homo sapien
cttcatcctcattgtcttcctgctg

SEQ ID NO: 4089205 - DNA, 25 bp, Homo sapien
tcctcattgtcttcctgctgagtag

SEQ ID NO: 4089206 - DNA, 25 bp, Homo sapien
tcatcctcattgtcttcctgctgag

SEQ ID NO: 4089207 - DNA, 25 bp, Homo sapien
catcctcattgtcttcctgctgagt

SEQ ID NO: 4089208 - DNA, 25 bp, Homo sapien
agtgttgcaagtcttgaacgacaag

SEQ ID NO: 4089209 - DNA, 25 bp, Homo sapien
atttctcgtttagtgttgcaagtct

SEQ ID NO: 4089210 - DNA, 25 bp, Homo sapien
gttgcaagtcttgaacgacaagaca

SEQ ID NO: 4089211 - DNA, 25 bp, Homo sapien
gcaagtcttgaacgacaagacatat

SEQ ID NO: 4089212 - DNA, 25 bp, Homo sapien
gaccttcacaaagagtcccaggctt

SEQ ID NO: 4089213 - DNA, 25 bp, Homo sapien
tgagaggcatagacactccaagtga

SEQ ID NO: 4089214 - DNA, 25 bp, Homo sapien
tgggttagcaacaacattctctggc

SEQ ID NO: 4089215 - DNA, 25 bp, Homo sapien
gaaaatgtcccttcaagccaagtgg

SEQ ID NO: 4089216 - DNA, 25 bp, Homo sapien
tttctgtgcaataagtgaacccatc

SEQ ID NO: 4089217 - DNA, 25 bp, Homo sapien
tagtcagctgaaagtccaaacatgg

SEQ ID NO: 4089218 - DNA, 25 bp, Homo sapien
gggacttgggctggtaagccaccta

SEQ ID NO: 4089219 - DNA, 25 bp, Homo sapien
gccacctaggctttgaatcaaacag

SEQ ID NO: 4089220 - DNA, 25 bp, Homo sapien
aaatcagagataaatccatatcaag

SEQ ID NO: 4089221 - DNA, 25 bp, Homo sapien
aatccagagctgaagcacagtgtca

SEQ ID NO: 4089222 - DNA, 25 bp, Homo sapien
cacagtgtcagcatggtaggattgg

SEQ ID NO: 4089223 - DNA, 25 bp, Homo sapien
cagagataaatccatatcaagatca

SEQ ID NO: 4089224 - DNA, 25 bp, Homo sapien
gcacctgtctgctattaaatccatg

SEQ ID NO: 4089225 - DNA, 25 bp, Homo sapien
cggcaccagataacctaaaacttga

SEQ ID NO: 4089226 - DNA, 25 bp, Homo sapien
gccaataaaaaacgtactgagcatt

SEQ ID NO: 4089227 - DNA, 25 bp, Homo sapien
tgtcttttaaactgacggcaccaga

SEQ ID NO: 4089228 - DNA, 25 bp, Homo sapien
tggcttatagtacgggctgagtatt

SEQ ID NO: 4089229 - DNA, 25 bp, Homo sapien
ctggcctgtactctacttagtgtgg

SEQ ID NO: 4089230 - DNA, 25 bp, Homo sapien
acttagtgtggcttatagtacgggc

SEQ ID NO: 4089231 - DNA, 25 bp, Homo sapien
tgcttttatagaggggggtcgcact

SEQ ID NO: 4089232 - DNA, 25 bp, Homo sapien
tattcaggccaattgttaatgcttt

SEQ ID NO: 4089233 - DNA, 25 bp, Homo sapien
caggccaattgttaatgcttttcaa

SEQ ID NO: 4089234 - DNA, 25 bp, Homo sapien
atttattcaggccaattgttaatgc

SEQ ID NO: 4089235 - DNA, 25 bp, Homo sapien
caattgttaatgcttttcaaatgca

SEQ ID NO: 4089236 - DNA, 25 bp, Homo sapien
cacacctcacacatgaacatgaaaa

SEQ ID NO: 4089237 - DNA, 25 bp, Homo sapien
atgaacatgaaaacccactcatcat

SEQ ID NO: 4089238 - DNA, 25 bp, Homo sapien
atcagatgggcaatgtgttgacatc

SEQ ID NO: 4089239 - DNA, 25 bp, Homo sapien
tgggcaatgtgttgacatcataaca

SEQ ID NO: 4089240 - DNA, 25 bp, Homo sapien
tggcgcatctcacacgggaacaccc

SEQ ID NO: 4089241 - DNA, 25 bp, Homo sapien
tcagacgcgcaatgtgccgacgtcg

SEQ ID NO: 4089242 - DNA, 25 bp, Homo sapien
gcgcatctcacacgggaacacccaa

SEQ ID NO: 4089243 - DNA, 25 bp, Homo sapien
gacgcgcaatgtgccgacgtcgtaa

SEQ ID NO: 4089244 - DNA, 25 bp, Homo sapien
acgcgctcgcggaaatagccggccg

SEQ ID NO: 4089245 - DNA, 25 bp, Homo sapien
ctcggtagaggatggaacgcgctcg

SEQ ID NO: 4089246 - DNA, 25 bp, Homo sapien
tccagcaccgtaggccgttgtaacg

SEQ ID NO: 4089247 - DNA, 25 bp, Homo sapien
ggatcctccagcaccgtaggccgtt

SEQ ID NO: 4089248 - DNA, 25 bp, Homo sapien
tccctccgcgatccagaccacccgg

SEQ ID NO: 4089249 - DNA, 25 bp, Homo sapien
agtcgacctccgtagtcttcgcgcg

SEQ ID NO: 4089250 - DNA, 25 bp, Homo sapien
gtgcgcgctcccgagtcgacctccg

SEQ ID NO: 4089251 - DNA, 25 bp, Homo sapien
gacgccgcgggatccgcgggtcgga

SEQ ID NO: 4089252 - DNA, 25 bp, Homo sapien
ctcctccccgccgtcttcttcaggg

SEQ ID NO: 4089253 - DNA, 25 bp, Homo sapien
cttcttcagggccgtactcttcgac

SEQ ID NO: 4089254 - DNA, 25 bp, Homo sapien
tcagggccgtactcttcgacgcctg

SEQ ID NO: 4089255 - DNA, 25 bp, Homo sapien
tcttcagggccgtactcttcgacgc

SEQ ID NO: 4089256 - DNA, 25 bp, Homo sapien
ctgcgattgcagaagatgacctggg

SEQ ID NO: 4089257 - DNA, 25 bp, Homo sapien
gaagttgagccatacgggcagcacg

SEQ ID NO: 4089258 - DNA, 25 bp, Homo sapien
ctgcggctcgccgtcgaagttgagc

SEQ ID NO: 4089259 - DNA, 25 bp, Homo sapien
ggctcgcgcgagttcaccgagcgca

SEQ ID NO: 4089260 - DNA, 25 bp, Homo sapien
gtcggctcttccggcgccaacatga

SEQ ID NO: 4089261 - DNA, 25 bp, Homo sapien
caggcaggtaagtcaatttcccacg

SEQ ID NO: 4089262 - DNA, 25 bp, Homo sapien
gaggaatgtgttctccacgagggca

SEQ ID NO: 4089263 - DNA, 25 bp, Homo sapien
gccaacatgaccctggcttgttcct

SEQ ID NO: 4089264 - DNA, 25 bp, Homo sapien
accaaactccagcctccacactcca

SEQ ID NO: 4089265 - DNA, 25 bp, Homo sapien
agcccaggcaacagcaggacatcct

SEQ ID NO: 4089266 - DNA, 25 bp, Homo sapien
agccagacatagtggagcatgccta

SEQ ID NO: 4089267 - DNA, 25 bp, Homo sapien
agcccaggttaagggtgcaatgagc

SEQ ID NO: 4089268 - DNA, 25 bp, Homo sapien
tggttaaccagaagcccatcgtgtg

SEQ ID NO: 4089269 - DNA, 25 bp, Homo sapien
gcaaaaataggctgtccgtcaacat

SEQ ID NO: 4089270 - DNA, 25 bp, Homo sapien
ccgtcaacattgagagatggcacaa

SEQ ID NO: 4089271 - DNA, 25 bp, Homo sapien
catcgtgtgtccctgcatctctgaa

SEQ ID NO: 4089272 - DNA, 25 bp, Homo sapien
aaaatatctcatgctctacacattg

SEQ ID NO: 4089273 - DNA, 25 bp, Homo sapien
caaaaaattatcagagtgggtggca

SEQ ID NO: 4089274 - DNA, 25 bp, Homo sapien
aacacctctgattggcactgtgagc

SEQ ID NO: 4089275 - DNA, 25 bp, Homo sapien
gcactgtgagcttgattgtgttaaa

SEQ ID NO: 4089276 - DNA, 25 bp, Homo sapien
tcttccagatcttcgtagagcgacc

SEQ ID NO: 4089277 - DNA, 25 bp, Homo sapien
atttgggtggtcttccagatcttcg

SEQ ID NO: 4089278 - DNA, 25 bp, Homo sapien
aggcttgactaggctccggacaacc

SEQ ID NO: 4089279 - DNA, 25 bp, Homo sapien
ttcgtagagcgacctgacgatgtcc

SEQ ID NO: 4089280 - DNA, 25 bp, Homo sapien
tcaatctcccatccgttgatgtgca

SEQ ID NO: 4089281 - DNA, 25 bp, Homo sapien
ttgatgtgcaatgcgctcctgtgtc

SEQ ID NO: 4089282 - DNA, 25 bp, Homo sapien
catccgttgatgtgcaatgcgctcc

SEQ ID NO: 4089283 - DNA, 25 bp, Homo sapien
tgtgcaatgcgctcctgtgtcagcc

SEQ ID NO: 4089284 - DNA, 25 bp, Homo sapien
ctgagatgaaacagtgtaagtttca

SEQ ID NO: 4089285 - DNA, 25 bp, Homo sapien
agctgagatgaaacagtgtaagttt

SEQ ID NO: 4089286 - DNA, 25 bp, Homo sapien
gagatgaaacagtgtaagtttcaac

SEQ ID NO: 4089287 - DNA, 25 bp, Homo sapien
gatgaaacagtgtaagtttcaacag

SEQ ID NO: 4089288 - DNA, 25 bp, Homo sapien
ccaaccgctacggatgtagaatgga

SEQ ID NO: 4089289 - DNA, 25 bp, Homo sapien
tggaccgagaaagtgcacgacttag

SEQ ID NO: 4089290 - DNA, 25 bp, Homo sapien
ggaaccagtcctgtatctagatcaa

SEQ ID NO: 4089291 - DNA, 25 bp, Homo sapien
caatgcctagtgaagtcagttaact

SEQ ID NO: 4089292 - DNA, 25 bp, Homo sapien
ttaatactataatcaaacatgcaga

SEQ ID NO: 4089293 - DNA, 25 bp, Homo sapien
tctcgtattttctgtgcggatggca

SEQ ID NO: 4089294 - DNA, 25 bp, Homo sapien
gcggatggcaagttacaaaaatgct

SEQ ID NO: 4089295 - DNA, 25 bp, Homo sapien
cagaaatactcacatttagcaaaaa

SEQ ID NO: 4089296 - DNA, 25 bp, Homo sapien
ctactcaggaggattacgtgaaccc

SEQ ID NO: 4089297 - DNA, 25 bp, Homo sapien
caaaatctgccctaaaaaggctgga

SEQ ID NO: 4089298 - DNA, 25 bp, Homo sapien
ccatgaatccattggtaggaccaga

SEQ ID NO: 4089299 - DNA, 25 bp, Homo sapien
tgaaacagtccaggctactccatga

SEQ ID NO: 4089300 - DNA, 25 bp, Homo sapien
cacaggaattgtgcccaaaggctag

SEQ ID NO: 4089301 - DNA, 25 bp, Homo sapien
aataataaagctggctggacgcggt

SEQ ID NO: 4089302 - DNA, 25 bp, Homo sapien
tgtgctcggcctgcaggttttaaca

SEQ ID NO: 4089303 - DNA, 25 bp, Homo sapien
gccgccgcggccggcaatttttgta

SEQ ID NO: 4089304 - DNA, 25 bp, Homo sapien
actgtgctcggcctgcaggttttaa

SEQ ID NO: 4089305 - DNA, 25 bp, Homo sapien
aaaaacacagtactcaaacggcatg

SEQ ID NO: 4089306 - DNA, 25 bp, Homo sapien
cacagtactcaaacggcatgttttt

SEQ ID NO: 4089307 - DNA, 25 bp, Homo sapien
aacacagtactcaaacggcatgttt

SEQ ID NO: 4089308 - DNA, 25 bp, Homo sapien
aaaacacagtactcaaacggcatgt

SEQ ID NO: 4089309 - DNA, 25 bp, Homo sapien
aatacattcacaagattcgaaatga

SEQ ID NO: 4089310 - DNA, 25 bp, Homo sapien
tacattcacaagattcgaaatgaaa

SEQ ID NO: 4089311 - DNA, 25 bp, Homo sapien
ttaatacattcacaagattcgaaat

SEQ ID NO: 4089312 - DNA, 25 bp, Homo sapien
cattcacaagattcgaaatgaaaaa

SEQ ID NO: 4089313 - DNA, 25 bp, Homo sapien
actcagcaccatttaatgtattaaa

SEQ ID NO: 4089314 - DNA, 25 bp, Homo sapien
ttactatgtgtagccttcacctggg

SEQ ID NO: 4089315 - DNA, 25 bp, Homo sapien
tcaccactggctaaagtatattgta

SEQ ID NO: 4089316 - DNA, 25 bp, Homo sapien
tgaacctaagtattctgaccccagg

SEQ ID NO: 4089317 - DNA, 25 bp, Homo sapien
ctctgaggtaggtatggttatagcc

SEQ ID NO: 4089318 - DNA, 25 bp, Homo sapien
ggacgactgggtcggacactgcggg

SEQ ID NO: 4089319 - DNA, 25 bp, Homo sapien
cgactgggtcggacactgcgggctg

SEQ ID NO: 4089320 - DNA, 25 bp, Homo sapien
cgcgggacgactgggtcggacactg

SEQ ID NO: 4089321 - DNA, 25 bp, Homo sapien
cgggacgactgggtcggacactgcg

SEQ ID NO: 4089322 - DNA, 25 bp, Homo sapien
ctcgctgagcgcgtccatgttgcgg

SEQ ID NO: 4089323 - DNA, 25 bp, Homo sapien
tgagcgcgtccatgttgcggcacag

SEQ ID NO: 4089324 - DNA, 25 bp, Homo sapien
atccagtcccactcgctgagcgcgt

SEQ ID NO: 4089325 - DNA, 25 bp, Homo sapien
atgttgcggcacaggtcgtccagca

SEQ ID NO: 4089326 - DNA, 25 bp, Homo sapien
gactgaagggtcaatcacagtcact

SEQ ID NO: 4089327 - DNA, 25 bp, Homo sapien
tttaggactgaagggtcaatcacag

SEQ ID NO: 4089328 - DNA, 25 bp, Homo sapien
atttttaggactgaagggtcaatca

SEQ ID NO: 4089329 - DNA, 25 bp, Homo sapien
gggtcaatcacagtcactcgttcat

SEQ ID NO: 4089330 - DNA, 25 bp, Homo sapien
ttccccagaattgagaatagtgcct

SEQ ID NO: 4089331 - DNA, 25 bp, Homo sapien
tccgtgtaggcagggagctctacct

SEQ ID NO: 4089332 - DNA, 25 bp, Homo sapien
ctcaacaagtgtatgaggccaggtg

SEQ ID NO: 4089333 - DNA, 25 bp, Homo sapien
gaaggaaaatgcaggaggcgctcat

SEQ ID NO: 4089334 - DNA, 25 bp, Homo sapien
ggagagaactctgcttagagtcaga

SEQ ID NO: 4089335 - DNA, 25 bp, Homo sapien
aagttacaacgctgactctgctggg

SEQ ID NO: 4089336 - DNA, 25 bp, Homo sapien
gagtcagagaggcagtccctctagg

SEQ ID NO: 4089337 - DNA, 25 bp, Homo sapien
ctctaggacaggtccccacactagc

SEQ ID NO: 4089338 - DNA, 25 bp, Homo sapien
ggacttgatcttccgcagctgggtc

SEQ ID NO: 4089339 - DNA, 25 bp, Homo sapien
ctgggtcaggtctgtgatcacgtag

SEQ ID NO: 4089340 - DNA, 25 bp, Homo sapien
cacaggaggtccacaagttgctgga

SEQ ID NO: 4089341 - DNA, 25 bp, Homo sapien
atgatctgggcagcccggtagagct

SEQ ID NO: 4089342 - DNA, 25 bp, Homo sapien
gctcaggagcgtgatgggccccact

SEQ ID NO: 4089343 - DNA, 25 bp, Homo sapien
caactcacacggatggaaactgctc

SEQ ID NO: 4089344 - DNA, 25 bp, Homo sapien
caggagcgtgatgggccccactcaa

SEQ ID NO: 4089345 - DNA, 25 bp, Homo sapien
tgctcaggagcgtgatgggccccac

SEQ ID NO: 4089346 - DNA, 25 bp, Homo sapien
ctggaatgggacacctgatttcagg

SEQ ID NO: 4089347 - DNA, 25 bp, Homo sapien
ctgttcatcctcagcctttcttaca

SEQ ID NO: 4089348 - DNA, 25 bp, Homo sapien
cctggaaaggtggccatcctcacag

SEQ ID NO: 4089349 - DNA, 25 bp, Homo sapien
gcctggaaaggtggccatcctcaca

SEQ ID NO: 4089350 - DNA, 25 bp, Homo sapien
aatcagacgaagtggggaggtcgct

SEQ ID NO: 4089351 - DNA, 25 bp, Homo sapien
ctttgaatcagacgaagtggggagg

SEQ ID NO: 4089352 - DNA, 25 bp, Homo sapien
acgaagtggggaggtcgcttctcaa

SEQ ID NO: 4089353 - DNA, 25 bp, Homo sapien
tggggaggtcgcttctcaaggaatg

SEQ ID NO: 4089354 - DNA, 25 bp, Homo sapien
tttgcggttttgattgaagtcatcg

SEQ ID NO: 4089355 - DNA, 25 bp, Homo sapien
aaggtcccctggctgattttgcggt

SEQ ID NO: 4089356 - DNA, 25 bp, Homo sapien
tcttgaagacgaatggcttcccgtg

SEQ ID NO: 4089357 - DNA, 25 bp, Homo sapien
gcctgtgccctctgtagacgtcagc

SEQ ID NO: 4089358 - DNA, 25 bp, Homo sapien
ctaagacaaatctgcaactctgcct

SEQ ID NO: 4089359 - DNA, 25 bp, Homo sapien
taagacaaatctgcaactctgcctg

SEQ ID NO: 4089360 - DNA, 25 bp, Homo sapien
acaatataaggcacaagtgtttcag

SEQ ID NO: 4089361 - DNA, 25 bp, Homo sapien
agctgcagtgatctacaatcattcc

SEQ ID NO: 4089362 - DNA, 25 bp, Homo sapien
ttaaaataccctacaatataaggca

SEQ ID NO: 4089363 - DNA, 25 bp, Homo sapien
ctggttacagaatgaacagatactc

SEQ ID NO: 4089364 - DNA, 25 bp, Homo sapien
gtagggaaccatttgccatgtaggg

SEQ ID NO: 4089365 - DNA, 25 bp, Homo sapien
cctgtagggaaccatttgccatgta

SEQ ID NO: 4089366 - DNA, 25 bp, Homo sapien
ctgtcctgtagggaaccatttgcca

SEQ ID NO: 4089367 - DNA, 25 bp, Homo sapien
ctgcagtctgtcctgtagggaacca

SEQ ID NO: 4089368 - DNA, 25 bp, Homo sapien
tggtatatgtgctgccaaagtgagc

SEQ ID NO: 4089369 - DNA, 25 bp, Homo sapien
atcttctctgtatcgttccaatttt

SEQ ID NO: 4089370 - DNA, 25 bp, Homo sapien
tcatcctcattcagaggccatgctg

SEQ ID NO: 4089371 - DNA, 25 bp, Homo sapien
tatatgtgctgccaaagtgagcact

SEQ ID NO: 4089372 - DNA, 25 bp, Homo sapien
ttgacgttgctgtggatgatctcca

SEQ ID NO: 4089373 - DNA, 25 bp, Homo sapien
ggtactcgacggcacagagcagccc

SEQ ID NO: 4089374 - DNA, 25 bp, Homo sapien
agcagatgctgacacgctggggcca

SEQ ID NO: 4089375 - DNA, 25 bp, Homo sapien
tctccagaccatgcaggtactcgac

SEQ ID NO: 4089376 - DNA, 25 bp, Homo sapien
cagatgagccattgggtgagcaagt

SEQ ID NO: 4089377 - DNA, 25 bp, Homo sapien
acacagatgagccattgggtgagca

SEQ ID NO: 4089378 - DNA, 25 bp, Homo sapien
atgagccattgggtgagcaagtttg

SEQ ID NO: 4089379 - DNA, 25 bp, Homo sapien
aggacacagatgagccattgggtga

SEQ ID NO: 4089380 - DNA, 25 bp, Homo sapien
gatgtccactcgctttgtcagctgc

SEQ ID NO: 4089381 - DNA, 25 bp, Homo sapien
ctctggcagatacgcggctgacgtc

SEQ ID NO: 4089382 - DNA, 25 bp, Homo sapien
gctgacgtccggagcaggtgagtct

SEQ ID NO: 4089383 - DNA, 25 bp, Homo sapien
cacccggatgaaatcctctggcaga

SEQ ID NO: 4089384 - DNA, 25 bp, Homo sapien
ttaacacatcaatcctagaggtccg

SEQ ID NO: 4089385 - DNA, 25 bp, Homo sapien
tcaggagaggatatctggagcctac

SEQ ID NO: 4089386 - DNA, 25 bp, Homo sapien
gaaacctgcttgactttgcctaatg

SEQ ID NO: 4089387 - DNA, 25 bp, Homo sapien
tatactttggagactgctacatgca

SEQ ID NO: 4089388 - DNA, 25 bp, Homo sapien
tggagagaacagaacgtgagttagc

SEQ ID NO: 4089389 - DNA, 25 bp, Homo sapien
ttcagacgctcgtgcacacagccag

SEQ ID NO: 4089390 - DNA, 25 bp, Homo sapien
agcatggttcagacgctcgtgcaca

SEQ ID NO: 4089391 - DNA, 25 bp, Homo sapien
gaacgtgagttagcatggttcagac

SEQ ID NO: 4089392 - DNA, 25 bp, Homo sapien
cattgcagggatgcccgtgaggacc

SEQ ID NO: 4089393 - DNA, 25 bp, Homo sapien
accgggcttcggttgttatccattg

SEQ ID NO: 4089394 - DNA, 25 bp, Homo sapien
ccgggcttcggttgttatccattgc

SEQ ID NO: 4089395 - DNA, 25 bp, Homo sapien
tgttatccattgcagggatgcccgt

SEQ ID NO: 4089396 - DNA, 25 bp, Homo sapien
agccagatgtgacaagttcccttac

SEQ ID NO: 4089397 - DNA, 25 bp, Homo sapien
cagccagatgtgacaagttccctta

SEQ ID NO: 4089398 - DNA, 25 bp, Homo sapien
gatgcaaatgcaaccttgtaccggg

SEQ ID NO: 4089399 - DNA, 25 bp, Homo sapien
tgcatgtgtaaaactagctagaatt

SEQ ID NO: 4089400 - DNA, 25 bp, Homo sapien
gtctcccaaaggctgtgatcacagg

SEQ ID NO: 4089401 - DNA, 25 bp, Homo sapien
caagccccagatgctattatcatga

SEQ ID NO: 4089402 - DNA, 25 bp, Homo sapien
tgctgcttggaatatcactgaggag

SEQ ID NO: 4089403 - DNA, 25 bp, Homo sapien
tggtgttacgcctccgcaggcacag

SEQ ID NO: 4089404 - DNA, 25 bp, Homo sapien
ggtacttctggcagatctcctttgc

SEQ ID NO: 4089405 - DNA, 25 bp, Homo sapien
gcccttctccaggtacttctggcag

SEQ ID NO: 4089406 - DNA, 25 bp, Homo sapien
gacaattactatgcaatgtccatga

SEQ ID NO: 4089407 - DNA, 25 bp, Homo sapien
tgttcccgaacagatgtgtcccctg

SEQ ID NO: 4089408 - DNA, 25 bp, Homo sapien
cacaaagacaattactatgcaatgt

SEQ ID NO: 4089409 - DNA, 25 bp, Homo sapien
tccatgagttccaggagcgtggacc

SEQ ID NO: 4089410 - DNA, 25 bp, Homo sapien
aagcccactccaagggagcaacgtc

SEQ ID NO: 4089411 - DNA, 25 bp, Homo sapien
aagggagcaacgtctcccgacctcg

SEQ ID NO: 4089412 - DNA, 25 bp, Homo sapien
actccaagggagcaacgtctcccga

SEQ ID NO: 4089413 - DNA, 25 bp, Homo sapien
ggagcaacgtctcccgacctcggag

SEQ ID NO: 4089414 - DNA, 25 bp, Homo sapien
gtcgtctgtttcctctggggtgttg

SEQ ID NO: 4089415 - DNA, 25 bp, Homo sapien
cgtctgtttcctctggggtgttgga

SEQ ID NO: 4089416 - DNA, 25 bp, Homo sapien
ctggggtgttggaagaagagcctgt

SEQ ID NO: 4089417 - DNA, 25 bp, Homo sapien
ggggtgttggaagaagagcctgtac

SEQ ID NO: 4089418 - DNA, 25 bp, Homo sapien
gcccagggtgccacactcatggagg

SEQ ID NO: 4089419 - DNA, 25 bp, Homo sapien
catggaggaggaggcatcaaggctg

SEQ ID NO: 4089420 - DNA, 25 bp, Homo sapien
aggcatcaaggctggaattgtcaac

SEQ ID NO: 4089421 - DNA, 25 bp, Homo sapien
tgcccagggtgccacactcatggag

SEQ ID NO: 4089422 - DNA, 25 bp, Homo sapien
ctcccttcccacgatgacccgcagc

SEQ ID NO: 4089423 - DNA, 25 bp, Homo sapien
ccttcccacgatgacccgcagcctt

SEQ ID NO: 4089424 - DNA, 25 bp, Homo sapien
ttcccacgatgacccgcagccttcc

SEQ ID NO: 4089425 - DNA, 25 bp, Homo sapien
gcctcccttcccacgatgacccgca

SEQ ID NO: 4089426 - DNA, 25 bp, Homo sapien
gctggacgacacacacagttaattt

SEQ ID NO: 4089427 - DNA, 25 bp, Homo sapien
caggctggacgacacacacagttaa

SEQ ID NO: 4089428 - DNA, 25 bp, Homo sapien
tgctcaggctggacgacacacacag

SEQ ID NO: 4089429 - DNA, 25 bp, Homo sapien
tggacgacacacacagttaattttt

SEQ ID NO: 4089430 - DNA, 25 bp, Homo sapien
cattgatctcaatttgccacgaagt

SEQ ID NO: 4089431 - DNA, 25 bp, Homo sapien
gtagagcagaatattctccatcagt

SEQ ID NO: 4089432 - DNA, 25 bp, Homo sapien
gagctcaatgctgtccactttttcc

SEQ ID NO: 4089433 - DNA, 25 bp, Homo sapien
tcaggggccaaagagctcaatgctg

SEQ ID NO: 4089434 - DNA, 25 bp, Homo sapien
tcaagaactgcactgagacacaagt

SEQ ID NO: 4089435 - DNA, 25 bp, Homo sapien
agagctcttcgctaggtgtctggca

SEQ ID NO: 4089436 - DNA, 25 bp, Homo sapien
taacaacacatattctcggccgggt

SEQ ID NO: 4089437 - DNA, 25 bp, Homo sapien
gaggattgcgccaacaaagcgagac

SEQ ID NO: 4089438 - DNA, 25 bp, Homo sapien
cggggcctgcgccaaacggaaggcg

SEQ ID NO: 4089439 - DNA, 25 bp, Homo sapien
gcctgcgccaaacggaaggcgccca

SEQ ID NO: 4089440 - DNA, 25 bp, Homo sapien
gccggagagcgacaggggcggggcc

SEQ ID NO: 4089441 - DNA, 25 bp, Homo sapien
cggcccgcaggccggagagcgacag

SEQ ID NO: 4089442 - DNA, 25 bp, Homo sapien
gccccagccctacagccccgcctgg

SEQ ID NO: 4089443 - DNA, 25 bp, Homo sapien
tgccccagccctacagccccgcctg

SEQ ID NO: 4089444 - DNA, 25 bp, Homo sapien
cccagccctacagccccgcctggcc

SEQ ID NO: 4089445 - DNA, 25 bp, Homo sapien
cctgccccagccctacagccccgcc

SEQ ID NO: 4089446 - DNA, 25 bp, Homo sapien
ctcgggagctggcagcgccctcgac

SEQ ID NO: 4089447 - DNA, 25 bp, Homo sapien
ctgcggcccaaccagacccgggccg

SEQ ID NO: 4089448 - DNA, 25 bp, Homo sapien
gccggctgccgcagctgtcccgccg

SEQ ID NO: 4089449 - DNA, 25 bp, Homo sapien
gccctcgaccgccaactcaggacgc

SEQ ID NO: 4089450 - DNA, 25 bp, Homo sapien
taaagccctttagaactgtcaagcg

SEQ ID NO: 4089451 - DNA, 25 bp, Homo sapien
taaaggctgccgtcggtttccaagc

SEQ ID NO: 4089452 - DNA, 25 bp, Homo sapien
tttgcccagcgctacttcggagatg

SEQ ID NO: 4089453 - DNA, 25 bp, Homo sapien
ggcgcttcaagatccacacatggct

SEQ ID NO: 4089454 - DNA, 25 bp, Homo sapien
cgagtgttccgaatcaggcagcctt

SEQ ID NO: 4089455 - DNA, 25 bp, Homo sapien
tccaaagaggcgttggcaggacgca

SEQ ID NO: 4089456 - DNA, 25 bp, Homo sapien
tccgacgtgctgctccagttgtgct

SEQ ID NO: 4089457 - DNA, 25 bp, Homo sapien
cacaccagggcccaagaaatgtggg

SEQ ID NO: 4089458 - DNA, 25 bp, Homo sapien
agccctggtctcgaagtctatccct

SEQ ID NO: 4089459 - DNA, 25 bp, Homo sapien
tggcactgtcttatcctcctccatg

SEQ ID NO: 4089460 - DNA, 25 bp, Homo sapien
tcttgagggtctataactactctcc

SEQ ID NO: 4089461 - DNA, 25 bp, Homo sapien
ctgcgcttggttttgcccgagtggc

SEQ ID NO: 4089462 - DNA, 25 bp, Homo sapien
tttgtcaatgacagtccttcggtcc

SEQ ID NO: 4089463 - DNA, 25 bp, Homo sapien
aatgacagtccttcggtccccaagg

SEQ ID NO: 4089464 - DNA, 25 bp, Homo sapien
tcaatgacagtccttcggtccccaa

SEQ ID NO: 4089465 - DNA, 25 bp, Homo sapien
tgtcaatgacagtccttcggtcccc

SEQ ID NO: 4089466 - DNA, 25 bp, Homo sapien
aatgaggagggtacatgacatagtc

SEQ ID NO: 4089467 - DNA, 25 bp, Homo sapien
aatagctggcgtagtcacaccaagg

SEQ ID NO: 4089468 - DNA, 25 bp, Homo sapien
tacatgacatagtcggtggtgaagg

SEQ ID NO: 4089469 - DNA, 25 bp, Homo sapien
tctgactgtggagatctcctcaaca

SEQ ID NO: 4089470 - DNA, 25 bp, Homo sapien
ccctgtagagttgggggaataatca

SEQ ID NO: 4089471 - DNA, 25 bp, Homo sapien
ctctggaggtgttttggacactccc

SEQ ID NO: 4089472 - DNA, 25 bp, Homo sapien
gttttggacactccctgtagagttg

SEQ ID NO: 4089473 - DNA, 25 bp, Homo sapien
ggtgttttggacactccctgtagag

SEQ ID NO: 4089474 - DNA, 25 bp, Homo sapien
gacaatgagtgtcaatgaagccctc

SEQ ID NO: 4089475 - DNA, 25 bp, Homo sapien
aatgccacagccttagggtgcctta

SEQ ID NO: 4089476 - DNA, 25 bp, Homo sapien
cccttggaaagatagcttggaatag

SEQ ID NO: 4089477 - DNA, 25 bp, Homo sapien
ctgtagtaacgtgcaaaatgagggt

SEQ ID NO: 4089478 - DNA, 25 bp, Homo sapien
taggtaaatgcaactcagcactgac

SEQ ID NO: 4089479 - DNA, 25 bp, Homo sapien
tcagtttgttgtgcaggtcgcccca

SEQ ID NO: 4089480 - DNA, 25 bp, Homo sapien
tcagcaggacacatccagaacttgc

SEQ ID NO: 4089481 - DNA, 25 bp, Homo sapien
gacatccaactaggtgcagttgcca

SEQ ID NO: 4089482 - DNA, 25 bp, Homo sapien
ggtctcaaactaacctcaactgatc

SEQ ID NO: 4089483 - DNA, 25 bp, Homo sapien
gcctccacctcctgggttcaagcga

SEQ ID NO: 4089484 - DNA, 25 bp, Homo sapien
gtggtgcaattgcagctcacttcag

SEQ ID NO: 4089485 - DNA, 25 bp, Homo sapien
tattacaggcaggcaccaccttgcc

SEQ ID NO: 4089486 - DNA, 25 bp, Homo sapien
tttttcatgatttctagcagatctt

SEQ ID NO: 4089487 - DNA, 25 bp, Homo sapien
catgatttctagcagatcttcatca

SEQ ID NO: 4089488 - DNA, 25 bp, Homo sapien
ccaagggcttctttagagacacagc

SEQ ID NO: 4089489 - DNA, 25 bp, Homo sapien
atcaccaagggcttctttagagaca

SEQ ID NO: 4089490 - DNA, 25 bp, Homo sapien
gcccgctgaagttccagtcttctaa

SEQ ID NO: 4089491 - DNA, 25 bp, Homo sapien
ttcatttgcccgctgaagttccagt

SEQ ID NO: 4089492 - DNA, 25 bp, Homo sapien
tttgcccgctgaagttccagtcttc

SEQ ID NO: 4089493 - DNA, 25 bp, Homo sapien
ttctttcatttgcccgctgaagttc

SEQ ID NO: 4089494 - DNA, 25 bp, Homo sapien
gtatgtcagcactgccgtgaagccc

SEQ ID NO: 4089495 - DNA, 25 bp, Homo sapien
ctcaatgaccgggtagctgccggtg

SEQ ID NO: 4089496 - DNA, 25 bp, Homo sapien
caatgaccgggtagctgccggtgaa

SEQ ID NO: 4089497 - DNA, 25 bp, Homo sapien
tcccaggcagaggagtatgtcagca

SEQ ID NO: 4089498 - DNA, 25 bp, Homo sapien
gcttccttggactaccctctacagg

SEQ ID NO: 4089499 - DNA, 25 bp, Homo sapien
ctctacagggtagggctttgcactg

SEQ ID NO: 4089500 - DNA, 25 bp, Homo sapien
cagggtcccacgcttccttggacta

SEQ ID NO: 4089501 - DNA, 25 bp, Homo sapien
ggtgagcagggtcccacgcttcctt

SEQ ID NO: 4089502 - DNA, 25 bp, Homo sapien
gggagagtggctgatctttgactct

SEQ ID NO: 4089503 - DNA, 25 bp, Homo sapien
ggtgttctcacgcaaggcagccaag

SEQ ID NO: 4089504 - DNA, 25 bp, Homo sapien
ttttctaggagactcccgaggactg

SEQ ID NO: 4089505 - DNA, 25 bp, Homo sapien
tttctaggagactcccgaggactgt

SEQ ID NO: 4089506 - DNA, 25 bp, Homo sapien
cttttctaggagactcccgaggact

SEQ ID NO: 4089507 - DNA, 25 bp, Homo sapien
tctaggagactcccgaggactgtac

SEQ ID NO: 4089508 - DNA, 25 bp, Homo sapien
aatgcaacaaaagacttgtcctggt

SEQ ID NO: 4089509 - DNA, 25 bp, Homo sapien
aaaatgcaacaaaagacttgtcctg

SEQ ID NO: 4089510 - DNA, 25 bp, Homo sapien
ttctttacattaacaaaatgcaaca

SEQ ID NO: 4089511 - DNA, 25 bp, Homo sapien
tgcaacaaaagacttgtcctggttt

SEQ ID NO: 4089512 - DNA, 25 bp, Homo sapien
ggcaaaatcccagtgctattacagg

SEQ ID NO: 4089513 - DNA, 25 bp, Homo sapien
tgcttagacaagtaggcgggtgact

SEQ ID NO: 4089514 - DNA, 25 bp, Homo sapien
cttatgacccgcttggaggaaaaca

SEQ ID NO: 4089515 - DNA, 25 bp, Homo sapien
gagacacagacttcaagccagcctg

SEQ ID NO: 4089516 - DNA, 25 bp, Homo sapien
tatacctttacaaggcaccagcagg

SEQ ID NO: 4089517 - DNA, 25 bp, Homo sapien
tgtgccgacgctggagttgacacca

SEQ ID NO: 4089518 - DNA, 25 bp, Homo sapien
gactagcaggtagtttccgccgcaa

SEQ ID NO: 4089519 - DNA, 25 bp, Homo sapien
cacagacgagggactccaggtgatc

SEQ ID NO: 4089520 - DNA, 25 bp, Homo sapien
ccactgtaacttgagggtctctaaa

SEQ ID NO: 4089521 - DNA, 25 bp, Homo sapien
tacccctagggtgagcgagctattt

SEQ ID NO: 4089522 - DNA, 25 bp, Homo sapien
gtataattagcataagagcacacgt

SEQ ID NO: 4089523 - DNA, 25 bp, Homo sapien
tctactgcctaggatgagagaggtt

SEQ ID NO: 4089524 - DNA, 25 bp, Homo sapien
aatgtagaatcttgggcagcacccc

SEQ ID NO: 4089525 - DNA, 25 bp, Homo sapien
tgtgggaaacatgcaggaagccgtc

SEQ ID NO: 4089526 - DNA, 25 bp, Homo sapien
catgtggactgacttgactgtaggc

SEQ ID NO: 4089527 - DNA, 25 bp, Homo sapien
taactactgatcaggtgcggcaggc

SEQ ID NO: 4089528 - DNA, 25 bp, Homo sapien
tgctagacagcactgaaagagctgc

SEQ ID NO: 4089529 - DNA, 25 bp, Homo sapien
tgagaaggcctgacaaagcaaatgc

SEQ ID NO: 4089530 - DNA, 25 bp, Homo sapien
cagttacgacactggtcttcccggg

SEQ ID NO: 4089531 - DNA, 25 bp, Homo sapien
agttagacgttaagtgaggtgccca

SEQ ID NO: 4089532 - DNA, 25 bp, Homo sapien
aaaggacaagtagcaaggccaatgt

SEQ ID NO: 4089533 - DNA, 25 bp, Homo sapien
caggatgacattatcgaagccaaca

SEQ ID NO: 4089534 - DNA, 25 bp, Homo sapien
gcttattaacaaccagccagggctg

SEQ ID NO: 4089535 - DNA, 25 bp, Homo sapien
gctcactcaagcagagaagctactg

SEQ ID NO: 4089536 - DNA, 25 bp, Homo sapien
ctctctctaagtttagaagcgctca

SEQ ID NO: 4089537 - DNA, 25 bp, Homo sapien
tagaagcgctcatctggcttttcgc

SEQ ID NO: 4089538 - DNA, 25 bp, Homo sapien
gctcatctggcttttcgcttgcttc

SEQ ID NO: 4089539 - DNA, 25 bp, Homo sapien
ctaagtttagaagcgctcatctggc

SEQ ID NO: 4089540 - DNA, 25 bp, Homo sapien
ccaaagctttgagctccaataaatc

SEQ ID NO: 4089541 - DNA, 25 bp, Homo sapien
caggaatacctggaaaatggaagag

SEQ ID NO: 4089542 - DNA, 25 bp, Homo sapien
ccaataaatcatctcaggaatacct

SEQ ID NO: 4089543 - DNA, 25 bp, Homo sapien
aaatggaagagatgaggcgctctcc

SEQ ID NO: 4089544 - DNA, 25 bp, Homo sapien
gaccggtgctcctgtttcctaagat

SEQ ID NO: 4089545 - DNA, 25 bp, Homo sapien
gagggaatggaaggccccaactctc

SEQ ID NO: 4089546 - DNA, 25 bp, Homo sapien
taagatgtctgccaggtgatcagcc

SEQ ID NO: 4089547 - DNA, 25 bp, Homo sapien
accacagcgccaggtgttaggccag

SEQ ID NO: 4089548 - DNA, 25 bp, Homo sapien
tagaaagctccaatcctccctgagg

SEQ ID NO: 4089549 - DNA, 25 bp, Homo sapien
tctacactcaggtggcagacaggcc

SEQ ID NO: 4089550 - DNA, 25 bp, Homo sapien
gaaataaaggattcagcctcccaga

SEQ ID NO: 4089551 - DNA, 25 bp, Homo sapien
cagggtaggtggtcattcggcaatc

SEQ ID NO: 4089552 - DNA, 25 bp, Homo sapien
gatggctgcaagattcaaacacgct

SEQ ID NO: 4089553 - DNA, 25 bp, Homo sapien
caaacacgctagtgcatctggtgac

SEQ ID NO: 4089554 - DNA, 25 bp, Homo sapien
tggcttaaccccacgcacaaaggtg

SEQ ID NO: 4089555 - DNA, 25 bp, Homo sapien
tacaaaatgccacgcaggtgcaacg

SEQ ID NO: 4089556 - DNA, 25 bp, Homo sapien
catactttggaaatactgcgagcaa

SEQ ID NO: 4089557 - DNA, 25 bp, Homo sapien
gagcccttcctgagaaatctactag

SEQ ID NO: 4089558 - DNA, 25 bp, Homo sapien
gcaggcccatggtcaccacgattgg

SEQ ID NO: 4089559 - DNA, 25 bp, Homo sapien
cagggactattgtttctaggagccc

SEQ ID NO: 4089560 - DNA, 25 bp, Homo sapien
gactggcttctcctacttactataa

SEQ ID NO: 4089561 - DNA, 25 bp, Homo sapien
tatcatagcgtgtatcagcactcca

SEQ ID NO: 4089562 - DNA, 25 bp, Homo sapien
cagatgatggatgttctcggcctta

SEQ ID NO: 4089563 - DNA, 25 bp, Homo sapien
tgaaaggaaaccagagtaccaggag

SEQ ID NO: 4089564 - DNA, 25 bp, Homo sapien
ctcccagtctgaagtaataaccccg

SEQ ID NO: 4089565 - DNA, 25 bp, Homo sapien
tttgaaactgcagatggctcagacc

SEQ ID NO: 4089566 - DNA, 25 bp, Homo sapien
actctggatcccactacgtgacgga

SEQ ID NO: 4089567 - DNA, 25 bp, Homo sapien
gaagatatgcaagagagtccagcca

SEQ ID NO: 4089568 - DNA, 25 bp, Homo sapien
cattgttcgtaatctccgcctgcta

SEQ ID NO: 4089569 - DNA, 25 bp, Homo sapien
tataccgagccctcagcattgttcg

SEQ ID NO: 4089570 - DNA, 25 bp, Homo sapien
cagaggagctactgtataccgagcc

SEQ ID NO: 4089571 - DNA, 25 bp, Homo sapien
tcttttcggtcaacaattgaaaaca

SEQ ID NO: 4089572 - DNA, 25 bp, Homo sapien
tgggatttgtctgccttttcaacac

SEQ ID NO: 4089573 - DNA, 25 bp, Homo sapien
tataatagagtagcgagggaatggt

SEQ ID NO: 4089574 - DNA, 25 bp, Homo sapien
agcttccgtaagctgcccgggctct

SEQ ID NO: 4089575 - DNA, 25 bp, Homo sapien
gaagtgactgtgctcttattgtaca

SEQ ID NO: 4089576 - DNA, 25 bp, Homo sapien
ggaccttcaagagcgcatcacctga

SEQ ID NO: 4089577 - DNA, 25 bp, Homo sapien
cctgaatgtcgtgaagaagtatctc

SEQ ID NO: 4089578 - DNA, 25 bp, Homo sapien
ccatagtcaactgggagggcctaca

SEQ ID NO: 4089579 - DNA, 25 bp, Homo sapien
tatccaggagaggaactgcataacc

SEQ ID NO: 4089580 - DNA, 25 bp, Homo sapien
ggatgtcagcctcttaactgctaag

SEQ ID NO: 4089581 - DNA, 25 bp, Homo sapien
gaataccatgatcgatgatgtccca

SEQ ID NO: 4089582 - DNA, 25 bp, Homo sapien
tttccccaagacaacagcactagta

SEQ ID NO: 4089583 - DNA, 25 bp, Homo sapien
tgggtctcagcgtttttcataaaag

SEQ ID NO: 4089584 - DNA, 25 bp, Homo sapien
tatattgagatgtactcagtgtgat

SEQ ID NO: 4089585 - DNA, 25 bp, Homo sapien
gaaccttatgatgtgtatattgaga

SEQ ID NO: 4089586 - DNA, 25 bp, Homo sapien
ctgcactatttagatccgaatgaac

SEQ ID NO: 4089587 - DNA, 25 bp, Homo sapien
actgtagccttttaacagcaagtct

SEQ ID NO: 4089588 - DNA, 25 bp, Homo sapien
ccttgaagccgggtaaacattcgag

SEQ ID NO: 4089589 - DNA, 25 bp, Homo sapien
gaccagggcctgtgcgttttctcag

SEQ ID NO: 4089590 - DNA, 25 bp, Homo sapien
tgacaacgggcatgggtctccctgt

SEQ ID NO: 4089591 - DNA, 25 bp, Homo sapien
caaccttgggttggcgagaaaatgg

SEQ ID NO: 4089592 - DNA, 25 bp, Homo sapien
gctggaaataaagacgtgcagcccc

SEQ ID NO: 4089593 - DNA, 25 bp, Homo sapien
cattgtcgcagggatcaagctggag

SEQ ID NO: 4089594 - DNA, 25 bp, Homo sapien
cattcgttttatctgaaatttcctg

SEQ ID NO: 4089595 - DNA, 25 bp, Homo sapien
acattggcttcaccagatagggtca

SEQ ID NO: 4089596 - DNA, 25 bp, Homo sapien
tcctgagcaccccattgtcgcaggg

SEQ ID NO: 4089597 - DNA, 25 bp, Homo sapien
agatgcccgcaacacaagctgtttt

SEQ ID NO: 4089598 - DNA, 25 bp, Homo sapien
catacagaccgatatcacagcagat

SEQ ID NO: 4089599 - DNA, 25 bp, Homo sapien
cccatacagaccgatatcacagcag

SEQ ID NO: 4089600 - DNA, 25 bp, Homo sapien
atcacagcagatgcccgcaacacaa

SEQ ID NO: 4089601 - DNA, 25 bp, Homo sapien
gatgtgatcataaactctaggcatt

SEQ ID NO: 4089602 - DNA, 25 bp, Homo sapien
gaaccgtcaacaccgtgatgtgatc

SEQ ID NO: 4089603 - DNA, 25 bp, Homo sapien
ccatcaggaaccgtcaacaccgtga

SEQ ID NO: 4089604 - DNA, 25 bp, Homo sapien
tcaacaccgtgatgtgatcataaac

SEQ ID NO: 4089605 - DNA, 25 bp, Homo sapien
atcattgaaggagccacttgagatc

SEQ ID NO: 4089606 - DNA, 25 bp, Homo sapien
aggagccacttgagatcacagaaca

SEQ ID NO: 4089607 - DNA, 25 bp, Homo sapien
atgagaggggcattggtcctgcatc

SEQ ID NO: 4089608 - DNA, 25 bp, Homo sapien
cattgaaggagccacttgagatcac

SEQ ID NO: 4089609 - DNA, 25 bp, Homo sapien
ccaacagctttttcgcccagtagta

SEQ ID NO: 4089610 - DNA, 25 bp, Homo sapien
ttcaccaacagctttttcgcccagt

SEQ ID NO: 4089611 - DNA, 25 bp, Homo sapien
caccaacagctttttcgcccagtag

SEQ ID NO: 4089612 - DNA, 25 bp, Homo sapien
caacagctttttcgcccagtagtaa

SEQ ID NO: 4089613 - DNA, 25 bp, Homo sapien
gatattttggatgcagcaatctcaa

SEQ ID NO: 4089614 - DNA, 25 bp, Homo sapien
ctgatattttggatgcagcaatctc

SEQ ID NO: 4089615 - DNA, 25 bp, Homo sapien
tgatattttggatgcagcaatctca

SEQ ID NO: 4089616 - DNA, 25 bp, Homo sapien
atattttggatgcagcaatctcaaa

SEQ ID NO: 4089617 - DNA, 25 bp, Homo sapien
ggctgttgggtgagcccttgggaaa

SEQ ID NO: 4089618 - DNA, 25 bp, Homo sapien
aggagggcaggctgttgggtgagcc

SEQ ID NO: 4089619 - DNA, 25 bp, Homo sapien
gggcaggctgttgggtgagcccttg

SEQ ID NO: 4089620 - DNA, 25 bp, Homo sapien
tgttgggtgagcccttgggaaagct

SEQ ID NO: 4089621 - DNA, 25 bp, Homo sapien
cagttggacagagcagtcgccagga

SEQ ID NO: 4089622 - DNA, 25 bp, Homo sapien
cactggattggcaggcagttggaca

SEQ ID NO: 4089623 - DNA, 25 bp, Homo sapien
tacagtgtgatgagagtatctgaca

SEQ ID NO: 4089624 - DNA, 25 bp, Homo sapien
agcagtcgccaggaagtaggacgaa

SEQ ID NO: 4089625 - DNA, 25 bp, Homo sapien
ccaaagaaatgagtcgagccatggg

SEQ ID NO: 4089626 - DNA, 25 bp, Homo sapien
agcaaggaccgcagcaaacatgggt

SEQ ID NO: 4089627 - DNA, 25 bp, Homo sapien
gaccaacagcgacttttactccaaa

SEQ ID NO: 4089628 - DNA, 25 bp, Homo sapien
ttcgggtgcacaatggaggagctcc

SEQ ID NO: 4089629 - DNA, 25 bp, Homo sapien
gggcccaggatggccagctgtccat

SEQ ID NO: 4089630 - DNA, 25 bp, Homo sapien
cgtcctgggcccaggatggccagct

SEQ ID NO: 4089631 - DNA, 25 bp, Homo sapien
tgggcccaggatggccagctgtcca

SEQ ID NO: 4089632 - DNA, 25 bp, Homo sapien
tcctgggcccaggatggccagctgt

SEQ ID NO: 4089633 - DNA, 25 bp, Homo sapien
cttctccgaggaatacattgttggg

SEQ ID NO: 4089634 - DNA, 25 bp, Homo sapien
ctgcttctccgaggaatacattgtt

SEQ ID NO: 4089635 - DNA, 25 bp, Homo sapien
gaggaatacattgttggggtcaaaa

SEQ ID NO: 4089636 - DNA, 25 bp, Homo sapien
cgaggaatacattgttggggtcaaa

SEQ ID NO: 4089637 - DNA, 25 bp, Homo sapien
ttctgcaccttttactagcagacag

SEQ ID NO: 4089638 - DNA, 25 bp, Homo sapien
ccttttactagcagacagttgtgta

SEQ ID NO: 4089639 - DNA, 25 bp, Homo sapien
gacagttgtgtatttcagtttcttc

SEQ ID NO: 4089640 - DNA, 25 bp, Homo sapien
actagcagacagttgtgtatttcag

SEQ ID NO: 4089641 - DNA, 25 bp, Homo sapien
gagctgactgcaagtgaacctcatt

SEQ ID NO: 4089642 - DNA, 25 bp, Homo sapien
agagctgactgcaagtgaacctcat

SEQ ID NO: 4089643 - DNA, 25 bp, Homo sapien
gctgactgcaagtgaacctcattgc

SEQ ID NO: 4089644 - DNA, 25 bp, Homo sapien
tgactgcaagtgaacctcattgcaa

SEQ ID NO: 4089645 - DNA, 25 bp, Homo sapien
gggtactgtctttcagcaccaggac

SEQ ID NO: 4089646 - DNA, 25 bp, Homo sapien
gtactgtctttcagcaccaggacca

SEQ ID NO: 4089647 - DNA, 25 bp, Homo sapien
tccacctccctaatcagcactgtgc

SEQ ID NO: 4089648 - DNA, 25 bp, Homo sapien
caggggtactgtctttcagcaccag

SEQ ID NO: 4089649 - DNA, 25 bp, Homo sapien
tgtggatgaacctaaaccagagttg

SEQ ID NO: 4089650 - DNA, 25 bp, Homo sapien
cactgaaggaggatgtaaggctaga

SEQ ID NO: 4089651 - DNA, 25 bp, Homo sapien
tgtggtcactgaaggaggatgtaag

SEQ ID NO: 4089652 - DNA, 25 bp, Homo sapien
gctgtggatgaacctaaaccagagt

SEQ ID NO: 4089653 - DNA, 25 bp, Homo sapien
actcagctagcttttgccatgtgcc

SEQ ID NO: 4089654 - DNA, 25 bp, Homo sapien
attcaaacataagcgtggaaggagg

SEQ ID NO: 4089655 - DNA, 25 bp, Homo sapien
gggtccagccacaagtttccgtggc

SEQ ID NO: 4089656 - DNA, 25 bp, Homo sapien
gtgcccactcagctagcttttgcca

SEQ ID NO: 4089657 - DNA, 25 bp, Homo sapien
gagcttggtgtgagtgacatcctgc

SEQ ID NO: 4089658 - DNA, 25 bp, Homo sapien
gggtctgggctcctgaaatctgagc

SEQ ID NO: 4089659 - DNA, 25 bp, Homo sapien
tgaaatctgagcttggtgtgagtga

SEQ ID NO: 4089660 - DNA, 25 bp, Homo sapien
aaatctgagcttggtgtgagtgaca

SEQ ID NO: 4089661 - DNA, 25 bp, Homo sapien
tggatttaatcttaggggcactggg

SEQ ID NO: 4089662 - DNA, 25 bp, Homo sapien
taattcggacattctcagcccaagc

SEQ ID NO: 4089663 - DNA, 25 bp, Homo sapien
tgtgatgatacgtttcagacgtggg

SEQ ID NO: 4089664 - DNA, 25 bp, Homo sapien
tgagggttcaccatgagccatggac

SEQ ID NO: 4089665 - DNA, 25 bp, Homo sapien
gacatggggacactgaatgcatgag

SEQ ID NO: 4089666 - DNA, 25 bp, Homo sapien
cctcccaccaggttacacatgggaa

SEQ ID NO: 4089667 - DNA, 25 bp, Homo sapien
tgctggattctatgctgaccacctg

SEQ ID NO: 4089668 - DNA, 25 bp, Homo sapien
gatacgttgagtctaaatccctacc

SEQ ID NO: 4089669 - DNA, 25 bp, Homo sapien
cacagcagtcacctaggcaagagat

SEQ ID NO: 4089670 - DNA, 25 bp, Homo sapien
ctgagtttcatgatgccctggcccc

SEQ ID NO: 4089671 - DNA, 25 bp, Homo sapien
acccctcggccccatgtcgcaatgg

SEQ ID NO: 4089672 - DNA, 25 bp, Homo sapien
ggctgagtttcatgatgccctggcc

SEQ ID NO: 4089673 - DNA, 25 bp, Homo sapien
ccatgtcgcaatggcgctggctgag

SEQ ID NO: 4089674 - DNA, 25 bp, Homo sapien
tggcagaagcccgtgtagatgacaa

SEQ ID NO: 4089675 - DNA, 25 bp, Homo sapien
aatgagaagtggcagaagcccgtgt

SEQ ID NO: 4089676 - DNA, 25 bp, Homo sapien
cccgtgtagatgacaaggaccttgt

SEQ ID NO: 4089677 - DNA, 25 bp, Homo sapien
gacaaggaccttgttgctgccagcc

SEQ ID NO: 4089678 - DNA, 25 bp, Homo sapien
tcccgtggcatccattctagctggg

SEQ ID NO: 4089679 - DNA, 25 bp, Homo sapien
gtgcagtcgcaaatgaggcagctgc

SEQ ID NO: 4089680 - DNA, 25 bp, Homo sapien
tgcaattcacagtctcccgtggcat

SEQ ID NO: 4089681 - DNA, 25 bp, Homo sapien
gaagctcatctggaacaagtctgac

SEQ ID NO: 4089682 - DNA, 25 bp, Homo sapien
tctcttttgcgcagctgtgaaaggg

SEQ ID NO: 4089683 - DNA, 25 bp, Homo sapien
catctgctctcttttgcgcagctgt

SEQ ID NO: 4089684 - DNA, 25 bp, Homo sapien
tctgctctcttttgcgcagctgtga

SEQ ID NO: 4089685 - DNA, 25 bp, Homo sapien
tttgcgcagctgtgaaagggacacc

SEQ ID NO: 4089686 - DNA, 25 bp, Homo sapien
gaggaggcgccatcctagaaaatgt

SEQ ID NO: 4089687 - DNA, 25 bp, Homo sapien
tcttccctagacaatcagtagcttg

SEQ ID NO: 4089688 - DNA, 25 bp, Homo sapien
gtcttccctagacaatcagtagctt

SEQ ID NO: 4089689 - DNA, 25 bp, Homo sapien
tccctagacaatcagtagcttgagg

SEQ ID NO: 4089690 - DNA, 25 bp, Homo sapien
cagggagctgtgattagactcagca

SEQ ID NO: 4089691 - DNA, 25 bp, Homo sapien
cccagggagctgtgattagactcag

SEQ ID NO: 4089692 - DNA, 25 bp, Homo sapien
ccagggagctgtgattagactcagc

SEQ ID NO: 4089693 - DNA, 25 bp, Homo sapien
taagtgagcaggcaagcccgaccag

SEQ ID NO: 4089694 - DNA, 25 bp, Homo sapien
tggcctgccccaatcaggcaagggc

SEQ ID NO: 4089695 - DNA, 25 bp, Homo sapien
caagcccgaccagccggcagagggt

SEQ ID NO: 4089696 - DNA, 25 bp, Homo sapien
agcctggctcgaccttcagaagggt

SEQ ID NO: 4089697 - DNA, 25 bp, Homo sapien
taaaatgtgttgagtcgacttctcc

SEQ ID NO: 4089698 - DNA, 25 bp, Homo sapien
tgagtcgacttctccccatttgcga

SEQ ID NO: 4089699 - DNA, 25 bp, Homo sapien
gacttctccccatttgcgacctttg

SEQ ID NO: 4089700 - DNA, 25 bp, Homo sapien
gtcgcaggggtagcgcttcagggca

SEQ ID NO: 4089701 - DNA, 25 bp, Homo sapien
cccgagggcaggtggggtcgcacac

SEQ ID NO: 4089702 - DNA, 25 bp, Homo sapien
ccccgagggcaggtggggtcgcaca

SEQ ID NO: 4089703 - DNA, 25 bp, Homo sapien
agattaggtgggtgtacagacatgc

SEQ ID NO: 4089704 - DNA, 25 bp, Homo sapien
aggtgggtgtacagacatgcagaca

SEQ ID NO: 4089705 - DNA, 25 bp, Homo sapien
ttaggtgggtgtacagacatgcaga

SEQ ID NO: 4089706 - DNA, 25 bp, Homo sapien
gattaggtgggtgtacagacatgca

SEQ ID NO: 4089707 - DNA, 25 bp, Homo sapien
gtggaagtgtcagtcagcccacagt

SEQ ID NO: 4089708 - DNA, 25 bp, Homo sapien
gtcggcctgcaactcatcatagatg

SEQ ID NO: 4089709 - DNA, 25 bp, Homo sapien
cctgggttcccgtggaagtgtcagt

SEQ ID NO: 4089710 - DNA, 25 bp, Homo sapien
acagtcggcctgcaactcatcatag

SEQ ID NO: 4089711 - DNA, 25 bp, Homo sapien
ggcaggtgggcacccttccatgggg

SEQ ID NO: 4089712 - DNA, 25 bp, Homo sapien
accacccggcccttgacatcgtagc

SEQ ID NO: 4089713 - DNA, 25 bp, Homo sapien
cttgacatcgtagcttcgcagcatc

SEQ ID NO: 4089714 - DNA, 25 bp, Homo sapien
aatgaccacccggcccttgacatcg

SEQ ID NO: 4089715 - DNA, 25 bp, Homo sapien
ttgacatcgtagcttcgcagcatcc

SEQ ID NO: 4089716 - DNA, 25 bp, Homo sapien
ccttggagagcctatgctctttgga

SEQ ID NO: 4089717 - DNA, 25 bp, Homo sapien
gagtggccactagactggggctttc

SEQ ID NO: 4089718 - DNA, 25 bp, Homo sapien
agcctatgctctttggagctgtgtc

SEQ ID NO: 4089719 - DNA, 25 bp, Homo sapien
actagactggggctttccccgctgc

SEQ ID NO: 4089720 - DNA, 25 bp, Homo sapien
tagtcattgaggtcagcacggccgc

SEQ ID NO: 4089721 - DNA, 25 bp, Homo sapien
tcagcacggccgcagcggcgcttgg

SEQ ID NO: 4089722 - DNA, 25 bp, Homo sapien
aggtcagcacggccgcagcggcgct

SEQ ID NO: 4089723 - DNA, 25 bp, Homo sapien
ttagtcattgaggtcagcacggccg

SEQ ID NO: 4089724 - DNA, 25 bp, Homo sapien
atggattcttgctctgtcagcaagg

SEQ ID NO: 4089725 - DNA, 25 bp, Homo sapien
gcgattctctcgctgcagcctccca

SEQ ID NO: 4089726 - DNA, 25 bp, Homo sapien
agatggattcttgctctgtcagcaa

SEQ ID NO: 4089727 - DNA, 25 bp, Homo sapien
ttcaagcgattctctcgctgcagcc

SEQ ID NO: 4089728 - DNA, 25 bp, Homo sapien
taagctgacatattcacaggctctg

SEQ ID NO: 4089729 - DNA, 25 bp, Homo sapien
taaagtcagcggtgagacaccttca

SEQ ID NO: 4089730 - DNA, 25 bp, Homo sapien
tgagacatttctgagaggccttggg

SEQ ID NO: 4089731 - DNA, 25 bp, Homo sapien
taaaggtccttgtattccattggcc

SEQ ID NO: 4089732 - DNA, 25 bp, Homo sapien
catggctgttctccatatctgtgag

SEQ ID NO: 4089733 - DNA, 25 bp, Homo sapien
tggctgttctccatatctgtgagtt

SEQ ID NO: 4089734 - DNA, 25 bp, Homo sapien
tgtgagttccttcttcttcccaacc

SEQ ID NO: 4089735 - DNA, 25 bp, Homo sapien
gctgttctccatatctgtgagttcc

SEQ ID NO: 4089736 - DNA, 25 bp, Homo sapien
tcccctgatatctgcctttgagcag

SEQ ID NO: 4089737 - DNA, 25 bp, Homo sapien
ctgcctttgagcagaaactgtgttg

SEQ ID NO: 4089738 - DNA, 25 bp, Homo sapien
tttgagcagaaactgtgttgtccat

SEQ ID NO: 4089739 - DNA, 25 bp, Homo sapien
cttcccctgatatctgcctttgagc

SEQ ID NO: 4089740 - DNA, 25 bp, Homo sapien
tgagtctcctctgctagcctcacag

SEQ ID NO: 4089741 - DNA, 25 bp, Homo sapien
ccagggattcagggcttgcttccgc

SEQ ID NO: 4089742 - DNA, 25 bp, Homo sapien
ggagctgcctgagctacatgtttga

SEQ ID NO: 4089743 - DNA, 25 bp, Homo sapien
tactgaaggttattcagcaggggca

SEQ ID NO: 4089744 - DNA, 25 bp, Homo sapien
cggtggcgggcccatgctggacagt

SEQ ID NO: 4089745 - DNA, 25 bp, Homo sapien
acgttgctggagcttgtccagttgg

SEQ ID NO: 4089746 - DNA, 25 bp, Homo sapien
ccctgagcccctgtcagattcggtg

SEQ ID NO: 4089747 - DNA, 25 bp, Homo sapien
ctgtcagattcggtggcgggcccat

SEQ ID NO: 4089748 - DNA, 25 bp, Homo sapien
tgaatacacttaggtaatacgtggg

SEQ ID NO: 4089749 - DNA, 25 bp, Homo sapien
gcacagatcacgtactcagtcacgg

SEQ ID NO: 4089750 - DNA, 25 bp, Homo sapien
tcagtcacggttgaatgaatacact

SEQ ID NO: 4089751 - DNA, 25 bp, Homo sapien
tcatgcagttctggcacagatcacg

SEQ ID NO: 4089752 - DNA, 25 bp, Homo sapien
aaatgctttatccacctgtgaaggg

SEQ ID NO: 4089753 - DNA, 25 bp, Homo sapien
gcaaatgctttatccacctgtgaag

SEQ ID NO: 4089754 - DNA, 25 bp, Homo sapien
caaatgctttatccacctgtgaagg

SEQ ID NO: 4089755 - DNA, 25 bp, Homo sapien
aaggatggccttaaatagggcttca

SEQ ID NO: 4089756 - DNA, 25 bp, Homo sapien
gtggaaggatggccttaaatagggc

SEQ ID NO: 4089757 - DNA, 25 bp, Homo sapien
tggaaggatggccttaaatagggct

SEQ ID NO: 4089758 - DNA, 25 bp, Homo sapien
gaaggatggccttaaatagggcttc

SEQ ID NO: 4089759 - DNA, 25 bp, Homo sapien
aggagagcaggcttttagcagcagc

SEQ ID NO: 4089760 - DNA, 25 bp, Homo sapien
ggagagcaggcttttagcagcagca

SEQ ID NO: 4089761 - DNA, 25 bp, Homo sapien
taagcagattgacggtgtcacaagc

SEQ ID NO: 4089762 - DNA, 25 bp, Homo sapien
tgctaagcagattgacggtgtcaca

SEQ ID NO: 4089763 - DNA, 25 bp, Homo sapien
gcagattgacggtgtcacaagccca

SEQ ID NO: 4089764 - DNA, 25 bp, Homo sapien
agcagattgacggtgtcacaagccc

SEQ ID NO: 4089765 - DNA, 25 bp, Homo sapien
tacagcaggcttagcttggccctcg

SEQ ID NO: 4089766 - DNA, 25 bp, Homo sapien
tcaggtattgaatggcaatgccact

SEQ ID NO: 4089767 - DNA, 25 bp, Homo sapien
gaaagtggatgccatgtccctagtg

SEQ ID NO: 4089768 - DNA, 25 bp, Homo sapien
ctttccatctaagtgcaagtgtgga

SEQ ID NO: 4089769 - DNA, 25 bp, Homo sapien
cgtatgtggtgacgggctcggcagg

SEQ ID NO: 4089770 - DNA, 25 bp, Homo sapien
tggtgacgggctcggcaggtctgag

SEQ ID NO: 4089771 - DNA, 25 bp, Homo sapien
aaaatgtgatcgtatgtggtgacgg

SEQ ID NO: 4089772 - DNA, 25 bp, Homo sapien
tgatcgtatgtggtgacgggctcgg

SEQ ID NO: 4089773 - DNA, 25 bp, Homo sapien
ttggaaagctcccggcttcagccag

SEQ ID NO: 4089774 - DNA, 25 bp, Homo sapien
agtagcagggctgatcgatgccggg

SEQ ID NO: 4089775 - DNA, 25 bp, Homo sapien
ccttgcggctgccagagccgtagtc

SEQ ID NO: 4089776 - DNA, 25 bp, Homo sapien
ggcctgctcctgggttacagcttgc

SEQ ID NO: 4089777 - DNA, 25 bp, Homo sapien
atggcctctgttggctgactttctt

SEQ ID NO: 4089778 - DNA, 25 bp, Homo sapien
tctctgatctatggagacacccctg

SEQ ID NO: 4089779 - DNA, 25 bp, Homo sapien
aacaggcagacggtgcctcctgagg

SEQ ID NO: 4089780 - DNA, 25 bp, Homo sapien
tgggaaccacccgttctaacaggca

SEQ ID NO: 4089781 - DNA, 25 bp, Homo sapien
atctatggagacacccctgcgagcc

SEQ ID NO: 4089782 - DNA, 25 bp, Homo sapien
gagtcgctcaaaagagggacccagt

SEQ ID NO: 4089783 - DNA, 25 bp, Homo sapien
cacgtgagtcccatgtgagtcgctc

SEQ ID NO: 4089784 - DNA, 25 bp, Homo sapien
gagaagaagtggaacacgtgagtcc

SEQ ID NO: 4089785 - DNA, 25 bp, Homo sapien
gggagagtgcagatgtcggtggaca

SEQ ID NO: 4089786 - DNA, 25 bp, Homo sapien
gggacagatacaggggaccctcctc

SEQ ID NO: 4089787 - DNA, 25 bp, Homo sapien
ctggggacagatacaggggaccctc

SEQ ID NO: 4089788 - DNA, 25 bp, Homo sapien
ctccttgctggggacagatacaggg

SEQ ID NO: 4089789 - DNA, 25 bp, Homo sapien
agggccatctccttgctggggacag

SEQ ID NO: 4089790 - DNA, 25 bp, Homo sapien
taaactgtgcaggtcttccaagcac

SEQ ID NO: 4089791 - DNA, 25 bp, Homo sapien
aaactgtgcaggtcttccaagcacc

SEQ ID NO: 4089792 - DNA, 25 bp, Homo sapien
ggagtgctcccattgtaaattcccc

SEQ ID NO: 4089793 - DNA, 25 bp, Homo sapien
tgggagtgctcccattgtaaattcc

SEQ ID NO: 4089794 - DNA, 25 bp, Homo sapien
ctgggagtgctcccattgtaaattc

SEQ ID NO: 4089795 - DNA, 25 bp, Homo sapien
gtgctcccattgtaaattcccccat

SEQ ID NO: 4089796 - DNA, 25 bp, Homo sapien
ctctctccgttgtggccaagtctct

SEQ ID NO: 4089797 - DNA, 25 bp, Homo sapien
ctgcttttaaaagcagcgtagtagc

SEQ ID NO: 4089798 - DNA, 25 bp, Homo sapien
gcccgtgcccactctggtcatctct

SEQ ID NO: 4089799 - DNA, 25 bp, Homo sapien
cttttaaaagcagcgtagtagcagg

SEQ ID NO: 4089800 - DNA, 25 bp, Homo sapien
gaagcaactcagtgccaatcagtac

SEQ ID NO: 4089801 - DNA, 25 bp, Homo sapien
tgaagcaactcagtgccaatcagta

SEQ ID NO: 4089802 - DNA, 25 bp, Homo sapien
tccagggctcagaggcgatgcaaac

SEQ ID NO: 4089803 - DNA, 25 bp, Homo sapien
agggctcagaggcgatgcaaaccat

SEQ ID NO: 4089804 - DNA, 25 bp, Homo sapien
ccagggctcagaggcgatgcaaacc

SEQ ID NO: 4089805 - DNA, 25 bp, Homo sapien
ctccagggctcagaggcgatgcaaa

SEQ ID NO: 4089806 - DNA, 25 bp, Homo sapien
ttaaaatgtagtgacagcatcctgg

SEQ ID NO: 4089807 - DNA, 25 bp, Homo sapien
gctcggtggccagtaatctgcaaac

SEQ ID NO: 4089808 - DNA, 25 bp, Homo sapien
taattagtccaaactgccttgtgcg

SEQ ID NO: 4089809 - DNA, 25 bp, Homo sapien
ggtcctgctccaagtgatgggaatg

SEQ ID NO: 4089810 - DNA, 25 bp, Homo sapien
tcacagcgggtgttctctgaatagt

SEQ ID NO: 4089811 - DNA, 25 bp, Homo sapien
ttcagcccaggaacattgtcaagtc

SEQ ID NO: 4089812 - DNA, 25 bp, Homo sapien
tctgaatagttctgggagcatcctt

SEQ ID NO: 4089813 - DNA, 25 bp, Homo sapien
gactggctgagacccctagggatgt

SEQ ID NO: 4089814 - DNA, 25 bp, Homo sapien
cagtcaagcgaggaattccatccca

SEQ ID NO: 4089815 - DNA, 25 bp, Homo sapien
ctcagtcaagcgaggaattccatcc

SEQ ID NO: 4089816 - DNA, 25 bp, Homo sapien
tgtccaggggtagttaatggcttgc

SEQ ID NO: 4089817 - DNA, 25 bp, Homo sapien
tcaagcgaggaattccatcccactg

SEQ ID NO: 4089818 - DNA, 25 bp, Homo sapien
tcgtactcatggcacagaatacctt

SEQ ID NO: 4089819 - DNA, 25 bp, Homo sapien
tactcatggcacagaatacctttct

SEQ ID NO: 4089820 - DNA, 25 bp, Homo sapien
tggcacagaatacctttcttcatgg

SEQ ID NO: 4089821 - DNA, 25 bp, Homo sapien
ctcatcgtactcatggcacagaata

SEQ ID NO: 4089822 - DNA, 25 bp, Homo sapien
gcacagctgccaaaatcagcattga

SEQ ID NO: 4089823 - DNA, 25 bp, Homo sapien
tgcacagctgccaaaatcagcattg

SEQ ID NO: 4089824 - DNA, 25 bp, Homo sapien
acctcagcataggtgctggttacca

SEQ ID NO: 4089825 - DNA, 25 bp, Homo sapien
ctctgggcccgtcccagagcctgta

SEQ ID NO: 4089826 - DNA, 25 bp, Homo sapien
tgtaacctcagcataggtgctggtt

SEQ ID NO: 4089827 - DNA, 25 bp, Homo sapien
taacctcagcataggtgctggttac

SEQ ID NO: 4089828 - DNA, 25 bp, Homo sapien
gatgatatggtgctcagtgcacgga

SEQ ID NO: 4089829 - DNA, 25 bp, Homo sapien
tgtgacacccttttcagcaaggagc

SEQ ID NO: 4089830 - DNA, 25 bp, Homo sapien
tcctccttgaggattctgatgagcg

SEQ ID NO: 4089831 - DNA, 25 bp, Homo sapien
gattttctaaatcatcccggctgtt

SEQ ID NO: 4089832 - DNA, 25 bp, Homo sapien
gcatatagcctcctcagcactttgg

SEQ ID NO: 4089833 - DNA, 25 bp, Homo sapien
tttcgttctggtgcctccagtttgc

SEQ ID NO: 4089834 - DNA, 25 bp, Homo sapien
cagtttgcttgggaaagcatatagc

SEQ ID NO: 4089835 - DNA, 25 bp, Homo sapien
cactttggaacttgatgccgaggct

SEQ ID NO: 4089836 - DNA, 25 bp, Homo sapien
tgcccgatgaggctggctgcttttc

SEQ ID NO: 4089837 - DNA, 25 bp, Homo sapien
tcagcagcttccagtaatagcctgc

SEQ ID NO: 4089838 - DNA, 25 bp, Homo sapien
tggctctgaggcgagtatcgatctg

SEQ ID NO: 4089839 - DNA, 25 bp, Homo sapien
aggatggatgagtggacacccagcc

SEQ ID NO: 4089840 - DNA, 25 bp, Homo sapien
ggaagaacttgctgacgacgacaat

SEQ ID NO: 4089841 - DNA, 25 bp, Homo sapien
tggctgcaggtctctagagtccacc

SEQ ID NO: 4089842 - DNA, 25 bp, Homo sapien
ggcgctggcgctgtcctctgtctgt

SEQ ID NO: 4089843 - DNA, 25 bp, Homo sapien
tctgtctgttgtgcgaggagtcccc

SEQ ID NO: 4089844 - DNA, 25 bp, Homo sapien
ctctgcaggtccagagggaagagct

SEQ ID NO: 4089845 - DNA, 25 bp, Homo sapien
tcacatgaagcagtttttcttcctc

SEQ ID NO: 4089846 - DNA, 25 bp, Homo sapien
tcctctgcaggtccagagggaagag

SEQ ID NO: 4089847 - DNA, 25 bp, Homo sapien
cttcctctgcaggtccagagggaag

SEQ ID NO: 4089848 - DNA, 25 bp, Homo sapien
ttcctgaagcgtggatgaacgctgc

SEQ ID NO: 4089849 - DNA, 25 bp, Homo sapien
agtgatgtttgtgccatcctgctga

SEQ ID NO: 4089850 - DNA, 25 bp, Homo sapien
caaatgtgctgtgacaaccgctgac

SEQ ID NO: 4089851 - DNA, 25 bp, Homo sapien
gaacgctgctgccacaaatgtgctg

SEQ ID NO: 4089852 - DNA, 25 bp, Homo sapien
actcggtttgttctcactcctctgg

SEQ ID NO: 4089853 - DNA, 25 bp, Homo sapien
actcctctggttcgaaaatagaggc

SEQ ID NO: 4089854 - DNA, 25 bp, Homo sapien
gtgcgtccgtcatgccaactcggtt

SEQ ID NO: 4089855 - DNA, 25 bp, Homo sapien
cctctggttcgaaaatagaggctgg

SEQ ID NO: 4089856 - DNA, 25 bp, Homo sapien
cttccctgaaagtgttgcatttcct

SEQ ID NO: 4089857 - DNA, 25 bp, Homo sapien
acttccctgaaagtgttgcatttcc

SEQ ID NO: 4089858 - DNA, 25 bp, Homo sapien
gaacttccctgaaagtgttgcattt

SEQ ID NO: 4089859 - DNA, 25 bp, Homo sapien
atgaacttccctgaaagtgttgcat

SEQ ID NO: 4089860 - DNA, 25 bp, Homo sapien
cagatgggccagtggtctttagaac

SEQ ID NO: 4089861 - DNA, 25 bp, Homo sapien
tgctgaatagacaggctgcagacag

SEQ ID NO: 4089862 - DNA, 25 bp, Homo sapien
tctgtgggcagaacaagcatgggca

SEQ ID NO: 4089863 - DNA, 25 bp, Homo sapien
gaattggctgtccacagggttgatc

SEQ ID NO: 4089864 - DNA, 25 bp, Homo sapien
atgacgcaggcggaagttcccagca

SEQ ID NO: 4089865 - DNA, 25 bp, Homo sapien
taggtgctggatagacaattgtccc

SEQ ID NO: 4089866 - DNA, 25 bp, Homo sapien
gaagttcccagcatgcataggtgct

SEQ ID NO: 4089867 - DNA, 25 bp, Homo sapien
ggagcctgatttgggatgacgcagg

SEQ ID NO: 4089868 - DNA, 25 bp, Homo sapien
aacctgcagaagtcccaaacctggc

SEQ ID NO: 4089869 - DNA, 25 bp, Homo sapien
tgagaggaggtcttggccaaggtca

SEQ ID NO: 4089870 - DNA, 25 bp, Homo sapien
gccgaaagggactgtgacattgaag

SEQ ID NO: 4089871 - DNA, 25 bp, Homo sapien
gagggtgcactttaataggcatcag

SEQ ID NO: 4089872 - DNA, 25 bp, Homo sapien
ggtgtccttgcagcttatcctgttg

SEQ ID NO: 4089873 - DNA, 25 bp, Homo sapien
tcctcgaggcgctgacatgggtgtc

SEQ ID NO: 4089874 - DNA, 25 bp, Homo sapien
ccaggagcgtctcctcctcgaggcg

SEQ ID NO: 4089875 - DNA, 25 bp, Homo sapien
gcttatcctgttgcctgatgctcca

SEQ ID NO: 4089876 - DNA, 25 bp, Homo sapien
ccccagccacccggcttccctgctc

SEQ ID NO: 4089877 - DNA, 25 bp, Homo sapien
agccacccggcttccctgctcgcat

SEQ ID NO: 4089878 - DNA, 25 bp, Homo sapien
ccagccacccggcttccctgctcgc

SEQ ID NO: 4089879 - DNA, 25 bp, Homo sapien
agcccccagccacccggcttccctg

SEQ ID NO: 4089880 - DNA, 25 bp, Homo sapien
tagtaattcctgtgctgtgctaaag

SEQ ID NO: 4089881 - DNA, 25 bp, Homo sapien
cattggagagcctacatgtgccctg

SEQ ID NO: 4089882 - DNA, 25 bp, Homo sapien
tggagacattcttagctggctgggt

SEQ ID NO: 4089883 - DNA, 25 bp, Homo sapien
cacaatatgcctgatggagctgggt

SEQ ID NO: 4089884 - DNA, 25 bp, Homo sapien
aagaggcagagatcattctgggcag

SEQ ID NO: 4089885 - DNA, 25 bp, Homo sapien
ctgattccaggtggtaggaagaggc

SEQ ID NO: 4089886 - DNA, 25 bp, Homo sapien
ctgggcaggtaatgaacaagattaa

SEQ ID NO: 4089887 - DNA, 25 bp, Homo sapien
tctgattccaggtggtaggaagagg

SEQ ID NO: 4089888 - DNA, 25 bp, Homo sapien
agggccttaggccacccatgagtcc

SEQ ID NO: 4089889 - DNA, 25 bp, Homo sapien
acagagcggcagtcagggccttagg

SEQ ID NO: 4089890 - DNA, 25 bp, Homo sapien
gggatatcactgaatctgtctttga

SEQ ID NO: 4089891 - DNA, 25 bp, Homo sapien
gataaggtttgccaggtatcccagg

SEQ ID NO: 4089892 - DNA, 25 bp, Homo sapien
tggagactgcttggggtactttaaa

SEQ ID NO: 4089893 - DNA, 25 bp, Homo sapien
aggcaagtaggtctcatcctgtgtg

SEQ ID NO: 4089894 - DNA, 25 bp, Homo sapien
agtaggtctcatcctgtgtgcccag

SEQ ID NO: 4089895 - DNA, 25 bp, Homo sapien
caggcctgtgaaggcgatggagact

SEQ ID NO: 4089896 - DNA, 25 bp, Homo sapien
cataatcatattctacatcctcact

SEQ ID NO: 4089897 - DNA, 25 bp, Homo sapien
cctgcagcgcccgtccttcccgcgg

SEQ ID NO: 4089898 - DNA, 25 bp, Homo sapien
ccctgcagcgcccgtccttcccgcg

SEQ ID NO: 4089899 - DNA, 25 bp, Homo sapien
gccgcgctggctgcctcgtgcgccg

SEQ ID NO: 4089900 - DNA, 25 bp, Homo sapien
ggccgcgctggctgcctcgtgcgcc

SEQ ID NO: 4089901 - DNA, 25 bp, Homo sapien
gcagccgccacccggcgcctcggac

SEQ ID NO: 4089902 - DNA, 25 bp, Homo sapien
cagcagccttcccattgcccagggg

SEQ ID NO: 4089903 - DNA, 25 bp, Homo sapien
ggcgcctcggactcccgcgcctcct

SEQ ID NO: 4089904 - DNA, 25 bp, Homo sapien
gcgcctcctcagcagccttcccatt

SEQ ID NO: 4089905 - DNA, 25 bp, Homo sapien
gctcagcacgaactccaccttgttg

SEQ ID NO: 4089906 - DNA, 25 bp, Homo sapien
tggccgcgctcgtggaccgccttgt

SEQ ID NO: 4089907 - DNA, 25 bp, Homo sapien
ttgttgttccagtggccgcgctcgt

SEQ ID NO: 4089908 - DNA, 25 bp, Homo sapien
tccaccttgttgttccagtggccgc

SEQ ID NO: 4089909 - DNA, 25 bp, Homo sapien
taagcgcgcaaaaactgagaccact

SEQ ID NO: 4089910 - DNA, 25 bp, Homo sapien
tgatatggtcaaaggtgctcggcac

SEQ ID NO: 4089911 - DNA, 25 bp, Homo sapien
gacccctgcctacgaaagtgactga

SEQ ID NO: 4089912 - DNA, 25 bp, Homo sapien
gaaccctcaggtgcgaattggcacg

SEQ ID NO: 4089913 - DNA, 25 bp, Homo sapien
acacgtaatgccaccttcacttgtg

SEQ ID NO: 4089914 - DNA, 25 bp, Homo sapien
cacttgtgaactgccccagagctgt

SEQ ID NO: 4089915 - DNA, 25 bp, Homo sapien
tcacttgtgaactgccccagagctg

SEQ ID NO: 4089916 - DNA, 25 bp, Homo sapien
gcaaactttcctccaacacgtaatg

SEQ ID NO: 4089917 - DNA, 25 bp, Homo sapien
tagcccagggtagctcagtagtgaa

SEQ ID NO: 4089918 - DNA, 25 bp, Homo sapien
gaagcagttgctcaggtaaaaaatg

SEQ ID NO: 4089919 - DNA, 25 bp, Homo sapien
aaaaatggcccatgccaggatgatg

SEQ ID NO: 4089920 - DNA, 25 bp, Homo sapien
tgtgttccactcatgcccacaggta

SEQ ID NO: 4089921 - DNA, 25 bp, Homo sapien
aatctccatgaaagctgaatcctga

SEQ ID NO: 4089922 - DNA, 25 bp, Homo sapien
agaaaattaatctccatgaaagctg

SEQ ID NO: 4089923 - DNA, 25 bp, Homo sapien
aattaatctccatgaaagctgaatc

SEQ ID NO: 4089924 - DNA, 25 bp, Homo sapien
ccatgaaagctgaatcctgaaaaac

SEQ ID NO: 4089925 - DNA, 25 bp, Homo sapien
tcagtttctggaactccacacaatt

SEQ ID NO: 4089926 - DNA, 25 bp, Homo sapien
cagtttctggaactccacacaattc

SEQ ID NO: 4089927 - DNA, 25 bp, Homo sapien
ctgtagttgctcacattcagtttct

SEQ ID NO: 4089928 - DNA, 25 bp, Homo sapien
cacatggctgtagttgctcacattc

SEQ ID NO: 4089929 - DNA, 25 bp, Homo sapien
tcaccatcagagtaagggaggcttc

SEQ ID NO: 4089930 - DNA, 25 bp, Homo sapien
taaaacaaacttgcaagtcagggcc

SEQ ID NO: 4089931 - DNA, 25 bp, Homo sapien
gaaagctaacctatcccctctagag

SEQ ID NO: 4089932 - DNA, 25 bp, Homo sapien
tagtccagcctttgacccatacagg

SEQ ID NO: 4089933 - DNA, 25 bp, Homo sapien
gccaagagactgaccctgggacaag

SEQ ID NO: 4089934 - DNA, 25 bp, Homo sapien
gacacacaggatctggtgagaaatc

SEQ ID NO: 4089935 - DNA, 25 bp, Homo sapien
tcgtccttgccagcatggaacttaa

SEQ ID NO: 4089936 - DNA, 25 bp, Homo sapien
ggagggctccccatatgacactgac

SEQ ID NO: 4089937 - DNA, 25 bp, Homo sapien
catcccatattcagaggagcaggca

SEQ ID NO: 4089938 - DNA, 25 bp, Homo sapien
catgcagtgctgacctaggaaaggg

SEQ ID NO: 4089939 - DNA, 25 bp, Homo sapien
aggctcttcaggttgcccagggtca

SEQ ID NO: 4089940 - DNA, 25 bp, Homo sapien
gggccaggtaatccaaactagcaga

SEQ ID NO: 4089941 - DNA, 25 bp, Homo sapien
ccagtgccgcgggttattgctaaat

SEQ ID NO: 4089942 - DNA, 25 bp, Homo sapien
ttctaactatcacatgcagtgctgc

SEQ ID NO: 4089943 - DNA, 25 bp, Homo sapien
tgagagttcaggcagattaagagct

SEQ ID NO: 4089944 - DNA, 25 bp, Homo sapien
ggacaaaacttatgtgcagccccag

SEQ ID NO: 4089945 - DNA, 25 bp, Homo sapien
gaaggtcacaacaccctattagagc

SEQ ID NO: 4089946 - DNA, 25 bp, Homo sapien
ttcgttacacaaacaggagggttca

SEQ ID NO: 4089947 - DNA, 25 bp, Homo sapien
gggttcattatgacacgtaacagct

SEQ ID NO: 4089948 - DNA, 25 bp, Homo sapien
tcagggctagatatttctgccggcc

SEQ ID NO: 4089949 - DNA, 25 bp, Homo sapien
acagcccaggtgtactctgcaccag

SEQ ID NO: 4089950 - DNA, 25 bp, Homo sapien
agctggaaggaatctgggctgctgc

SEQ ID NO: 4089951 - DNA, 25 bp, Homo sapien
cagcccactccagatgcttagcttg

SEQ ID NO: 4089952 - DNA, 25 bp, Homo sapien
tgggctgctgctgacggaaacagcc

SEQ ID NO: 4089953 - DNA, 25 bp, Homo sapien
ctggggctggcccattttcagcaaa

SEQ ID NO: 4089954 - DNA, 25 bp, Homo sapien
tggcccattttcagcaaagctagta

SEQ ID NO: 4089955 - DNA, 25 bp, Homo sapien
ctgcagaagggagggtggagagtca

SEQ ID NO: 4089956 - DNA, 25 bp, Homo sapien
gaagggagggtggagagtcactggg

SEQ ID NO: 4089957 - DNA, 25 bp, Homo sapien
cagatacagaagtaacagatggtcc

SEQ ID NO: 4089958 - DNA, 25 bp, Homo sapien
gctcgatcccgtcagagatggccag

SEQ ID NO: 4089959 - DNA, 25 bp, Homo sapien
gtccaggctgccaagagacacaagg

SEQ ID NO: 4089960 - DNA, 25 bp, Homo sapien
agctcccagcgaaggttcccgatgt

SEQ ID NO: 4089961 - DNA, 25 bp, Homo sapien
agctgcttgaagatcgacctcttac

SEQ ID NO: 4089962 - DNA, 25 bp, Homo sapien
tagctgcttgaagatcgacctctta

SEQ ID NO: 4089963 - DNA, 25 bp, Homo sapien
ttagctgcttgaagatcgacctctt

SEQ ID NO: 4089964 - DNA, 25 bp, Homo sapien
agccaagaacttagagtttatgagc

SEQ ID NO: 4089965 - DNA, 25 bp, Homo sapien
atgagcaactgcctatgggaaggag

SEQ ID NO: 4089966 - DNA, 25 bp, Homo sapien
ccagccaagaacttagagtttatga

SEQ ID NO: 4089967 - DNA, 25 bp, Homo sapien
ttatgagcaactgcctatgggaagg

SEQ ID NO: 4089968 - DNA, 25 bp, Homo sapien
gggggctctccattgaggggtacat

SEQ ID NO: 4089969 - DNA, 25 bp, Homo sapien
aataagcaatgcctctccaacccag

SEQ ID NO: 4089970 - DNA, 25 bp, Homo sapien
catcactgtgcaataagcaatgcct

SEQ ID NO: 4089971 - DNA, 25 bp, Homo sapien
atgcctctccaacccagtgagtgag

SEQ ID NO: 4089972 - DNA, 25 bp, Homo sapien
tgtgcaataagcaatgcctctccaa

SEQ ID NO: 4089973 - DNA, 25 bp, Homo sapien
cccctcgtatcaggaggatcagcag

SEQ ID NO: 4089974 - DNA, 25 bp, Homo sapien
cgggcaacgtgacccctcgtatcag

SEQ ID NO: 4089975 - DNA, 25 bp, Homo sapien
gaggtcagggtacaagtagaacttg

SEQ ID NO: 4089976 - DNA, 25 bp, Homo sapien
gggaatgtcgcagtcacgtatacaa

SEQ ID NO: 4089977 - DNA, 25 bp, Homo sapien
tcctgactttcccagtggacctttc

SEQ ID NO: 4089978 - DNA, 25 bp, Homo sapien
ctgactttcccagtggacctttcca

SEQ ID NO: 4089979 - DNA, 25 bp, Homo sapien
cctcctgactttcccagtggacctt

SEQ ID NO: 4089980 - DNA, 25 bp, Homo sapien
agccctcctgactttcccagtggac

SEQ ID NO: 4089981 - DNA, 25 bp, Homo sapien
cttgaacttctggaggtagccagac

SEQ ID NO: 4089982 - DNA, 25 bp, Homo sapien
gccacaactgcccataggctgtaac

SEQ ID NO: 4089983 - DNA, 25 bp, Homo sapien
aaactcacacgatggcactagctcc

SEQ ID NO: 4089984 - DNA, 25 bp, Homo sapien
caactgcccataggctgtaacatca

SEQ ID NO: 4089985 - DNA, 25 bp, Homo sapien
catctgaatggaaccggtgacagct

SEQ ID NO: 4089986 - DNA, 25 bp, Homo sapien
gacagctttaaacggcgccagttcc

SEQ ID NO: 4089987 - DNA, 25 bp, Homo sapien
gttccctgggaatctgactaacgga

SEQ ID NO: 4089988 - DNA, 25 bp, Homo sapien
cggagcatcctggttcacataagcc

SEQ ID NO: 4089989 - DNA, 25 bp, Homo sapien
caacggcttttgtagaagtgaatga

SEQ ID NO: 4089990 - DNA, 25 bp, Homo sapien
tctttcggctaatgccacatacaga

SEQ ID NO: 4089991 - DNA, 25 bp, Homo sapien
cccttgctccttctttcggctaatg

SEQ ID NO: 4089992 - DNA, 25 bp, Homo sapien
cagaagctgatgaatacagtatggc

SEQ ID NO: 4089993 - DNA, 25 bp, Homo sapien
ccagtaagagggtgtatgatgatag

SEQ ID NO: 4089994 - DNA, 25 bp, Homo sapien
tctatgtcctcgaattggcttgtgt

SEQ ID NO: 4089995 - DNA, 25 bp, Homo sapien
gcattaacccatcctgccacgaaag

SEQ ID NO: 4089996 - DNA, 25 bp, Homo sapien
ctgtggtaatgccttaggtctttga

SEQ ID NO: 4089997 - DNA, 25 bp, Homo sapien
caaatggcataggagaaaaagatct

SEQ ID NO: 4089998 - DNA, 25 bp, Homo sapien
gagaaaaagatctgcgttccagcat

SEQ ID NO: 4089999 - DNA, 25 bp, Homo sapien
taattgttataacttcccagagcgg

SEQ ID NO: 4090000 - DNA, 25 bp, Homo sapien
ttcccagagcggtcagacagcccag

SEQ ID NO: 4090001 - DNA, 25 bp, Homo sapien
cgctgttcaggcaacagagcatgat

SEQ ID NO: 4090002 - DNA, 25 bp, Homo sapien
gctggtgccgctgttcaggcaacag

SEQ ID NO: 4090003 - DNA, 25 bp, Homo sapien
tcagcaatgggtaccccctgctcgt

SEQ ID NO: 4090004 - DNA, 25 bp, Homo sapien
ctgctcgtacgccataaaacccagg

SEQ ID NO: 4090005 - DNA, 25 bp, Homo sapien
ggtcttgcctgcaaccatgattaca

SEQ ID NO: 4090006 - DNA, 25 bp, Homo sapien
catgattacaatggtgtttgcctaa

SEQ ID NO: 4090007 - DNA, 25 bp, Homo sapien
tgattttagtatccattggtgggtc

SEQ ID NO: 4090008 - DNA, 25 bp, Homo sapien
ccaaggaatagctgtcctttcacac

SEQ ID NO: 4090009 - DNA, 25 bp, Homo sapien
taataccattaattacgccacagag

SEQ ID NO: 4090010 - DNA, 25 bp, Homo sapien
cgtcttgtgaagagcagaagttaaa

SEQ ID NO: 4090011 - DNA, 25 bp, Homo sapien
ccatatggtatagaggcagagacag

SEQ ID NO: 4090012 - DNA, 25 bp, Homo sapien
tccttaggatttttgactcggtcag

SEQ ID NO: 4090013 - DNA, 25 bp, Homo sapien
tcgtcctcggactagttttgcctat

SEQ ID NO: 4090014 - DNA, 25 bp, Homo sapien
gaacactgccattggccccttgagg

SEQ ID NO: 4090015 - DNA, 25 bp, Homo sapien
tcaagccatggcaatcaagctatag

SEQ ID NO: 4090016 - DNA, 25 bp, Homo sapien
tcctcttcacgttgggcaaccatca

SEQ ID NO: 4090017 - DNA, 25 bp, Homo sapien
ctggagcgagggagagagagaaagc

SEQ ID NO: 4090018 - DNA, 25 bp, Homo sapien
tggagcgagggagagagagaaagcc

SEQ ID NO: 4090019 - DNA, 25 bp, Homo sapien
ggagcgagggagagagagaaagcca

SEQ ID NO: 4090020 - DNA, 25 bp, Homo sapien
gcatcatggtgaccgccttggggta

SEQ ID NO: 4090021 - DNA, 25 bp, Homo sapien
gcccacagcggggagagaggcatca

SEQ ID NO: 4090022 - DNA, 25 bp, Homo sapien
ccttggggtacgcaataaaggccag

SEQ ID NO: 4090023 - DNA, 25 bp, Homo sapien
aacaaggtggcccacagcggggaga

SEQ ID NO: 4090024 - DNA, 25 bp, Homo sapien
tggtgtgaaactcaaggacaaggct

SEQ ID NO: 4090025 - DNA, 25 bp, Homo sapien
gatggtgtgaaactcaaggacaagg

SEQ ID NO: 4090026 - DNA, 25 bp, Homo sapien
tgtgaaactcaaggacaaggctgct

SEQ ID NO: 4090027 - DNA, 25 bp, Homo sapien
gaaactcaaggacaaggctgctcct

SEQ ID NO: 4090028 - DNA, 25 bp, Homo sapien
gataacagacaaggctaggatgagc

SEQ ID NO: 4090029 - DNA, 25 bp, Homo sapien
catgtccaccacggcggtcaccagg

SEQ ID NO: 4090030 - DNA, 25 bp, Homo sapien
accacggcggtcaccaggctttcca

SEQ ID NO: 4090031 - DNA, 25 bp, Homo sapien
agataacagacaaggctaggatgag

SEQ ID NO: 4090032 - DNA, 25 bp, Homo sapien
ctctgttaacatcacgaggcccaga

SEQ ID NO: 4090033 - DNA, 25 bp, Homo sapien
cttaatttggaggtcatggagaacc

SEQ ID NO: 4090034 - DNA, 25 bp, Homo sapien
caaaggtgccaatatcatcatggga

SEQ ID NO: 4090035 - DNA, 25 bp, Homo sapien
tagctgacgttgttgcttcacccag

SEQ ID NO: 4090036 - DNA, 25 bp, Homo sapien
gaccactcataggtaaatgctgtag

SEQ ID NO: 4090037 - DNA, 25 bp, Homo sapien
gctctcctcccatgaacatcatact

SEQ ID NO: 4090038 - DNA, 25 bp, Homo sapien
tacacccagccgatgcagatgcact

SEQ ID NO: 4090039 - DNA, 25 bp, Homo sapien
cccactggcggcataggagtcaaag

SEQ ID NO: 4090040 - DNA, 25 bp, Homo sapien
catacacccagccgatgcagatgca

SEQ ID NO: 4090041 - DNA, 25 bp, Homo sapien
acatcccactggcggcataggagtc

SEQ ID NO: 4090042 - DNA, 25 bp, Homo sapien
cacaccccagagaagttttgtacat

SEQ ID NO: 4090043 - DNA, 25 bp, Homo sapien
gttttgtacatgagtcagaggaatg

SEQ ID NO: 4090044 - DNA, 25 bp, Homo sapien
tgtccggaataaatcagaggggaac

SEQ ID NO: 4090045 - DNA, 25 bp, Homo sapien
taaatcagaggggaacatacacacc

SEQ ID NO: 4090046 - DNA, 25 bp, Homo sapien
gggtcatgatcatccagcaccactt

SEQ ID NO: 4090047 - DNA, 25 bp, Homo sapien
accacttaatgagcgacggtggccg

SEQ ID NO: 4090048 - DNA, 25 bp, Homo sapien
caatgttatcatagaaccggttgct

SEQ ID NO: 4090049 - DNA, 25 bp, Homo sapien
gcgcagatcccaggggtcatgatca

SEQ ID NO: 4090050 - DNA, 25 bp, Homo sapien
ctcgggcagtgtcccctccgtcttc

SEQ ID NO: 4090051 - DNA, 25 bp, Homo sapien
gatccagagcgggatgcagagcatg

SEQ ID NO: 4090052 - DNA, 25 bp, Homo sapien
ggcagtgtcccctccgtcttccaca

SEQ ID NO: 4090053 - DNA, 25 bp, Homo sapien
gctgggtaggtgtagatgttgttgt

SEQ ID NO: 4090054 - DNA, 25 bp, Homo sapien
actgggacccaaggcgcgaaccctg

SEQ ID NO: 4090055 - DNA, 25 bp, Homo sapien
cgtcatcgcgcaccatgcagatgag

SEQ ID NO: 4090056 - DNA, 25 bp, Homo sapien
acagcgtccccttgaggcaggtggg

SEQ ID NO: 4090057 - DNA, 25 bp, Homo sapien
caggtgggcgcaggccgtcatcgcg

SEQ ID NO: 4090058 - DNA, 25 bp, Homo sapien
tctgaacaccaaaaggccatctgga

SEQ ID NO: 4090059 - DNA, 25 bp, Homo sapien
gacatgtttggcctgagatcagaat

SEQ ID NO: 4090060 - DNA, 25 bp, Homo sapien
tgcccttgacctacattccctgcag

SEQ ID NO: 4090061 - DNA, 25 bp, Homo sapien
caggccggagatgatctctggagga

SEQ ID NO: 4090062 - DNA, 25 bp, Homo sapien
ggcctctcccaagcacacggcggac

SEQ ID NO: 4090063 - DNA, 25 bp, Homo sapien
tctcccaagcacacggcggacatct

SEQ ID NO: 4090064 - DNA, 25 bp, Homo sapien
tcccaagcacacggcggacatctgg

SEQ ID NO: 4090065 - DNA, 25 bp, Homo sapien
caagcacacggcggacatctgggtg

SEQ ID NO: 4090066 - DNA, 25 bp, Homo sapien
agaggaggggaagatctgagtgatt

SEQ ID NO: 4090067 - DNA, 25 bp, Homo sapien
gaggaggggaagatctgagtgatta

SEQ ID NO: 4090068 - DNA, 25 bp, Homo sapien
aggaggggaagatctgagtgattag

SEQ ID NO: 4090069 - DNA, 25 bp, Homo sapien
ttaactgtcaccatccgtgggctca

SEQ ID NO: 4090070 - DNA, 25 bp, Homo sapien
gcttgccccgcattttcagatctgt

SEQ ID NO: 4090071 - DNA, 25 bp, Homo sapien
gatggtcccgtcactcttgagtttg

SEQ ID NO: 4090072 - DNA, 25 bp, Homo sapien
tctctgtgatggctgcgatggtccc

SEQ ID NO: 4090073 - DNA, 25 bp, Homo sapien
cattaaaaggccgacagaggaggac

SEQ ID NO: 4090074 - DNA, 25 bp, Homo sapien
aaggtcacttcatgggatcagggca

SEQ ID NO: 4090075 - DNA, 25 bp, Homo sapien
tggcagtccccgtacagtgttatct

SEQ ID NO: 4090076 - DNA, 25 bp, Homo sapien
ttagagcagtgtacagtggccacct

SEQ ID NO: 4090077 - DNA, 25 bp, Homo sapien
ggtcctaagacatagaccctggctg

SEQ ID NO: 4090078 - DNA, 25 bp, Homo sapien
tggctcctgaaccaggggcaaggat

SEQ ID NO: 4090079 - DNA, 25 bp, Homo sapien
tggctgcaagaatagatggctgctt

SEQ ID NO: 4090080 - DNA, 25 bp, Homo sapien
aggccggaggaaggtcctaagacat

SEQ ID NO: 4090081 - DNA, 25 bp, Homo sapien
gacagcagccgaggataaacacaag

SEQ ID NO: 4090082 - DNA, 25 bp, Homo sapien
ccctgccccatgagtagtgttaagt

SEQ ID NO: 4090083 - DNA, 25 bp, Homo sapien
gatctgtggagaaccggtagcagca

SEQ ID NO: 4090084 - DNA, 25 bp, Homo sapien
gagtcaagcgttagccacattacga

SEQ ID NO: 4090085 - DNA, 25 bp, Homo sapien
gggcagatcctggagcctaactcag

SEQ ID NO: 4090086 - DNA, 25 bp, Homo sapien
tttaggcctcatagcacgagaaaca

SEQ ID NO: 4090087 - DNA, 25 bp, Homo sapien
gcagctattttcaccactgtgaggg

SEQ ID NO: 4090088 - DNA, 25 bp, Homo sapien
catgatcccgtgatgcctgcattac

SEQ ID NO: 4090089 - DNA, 25 bp, Homo sapien
ccacgtcaactgctcctaaaccagc

SEQ ID NO: 4090090 - DNA, 25 bp, Homo sapien
acgtcaactgctcctaaaccagctg

SEQ ID NO: 4090091 - DNA, 25 bp, Homo sapien
cacgtcaactgctcctaaaccagct

SEQ ID NO: 4090092 - DNA, 25 bp, Homo sapien
gatgatagtcccatggccagcgggc

SEQ ID NO: 4090093 - DNA, 25 bp, Homo sapien
agatgatagtcccatggccagcggg

SEQ ID NO: 4090094 - DNA, 25 bp, Homo sapien
aagatgatagtcccatggccagcgg

SEQ ID NO: 4090095 - DNA, 25 bp, Homo sapien
cagtaggacatggccagccgctggc

SEQ ID NO: 4090096 - DNA, 25 bp, Homo sapien
tcagtaggacatggccagccgctgg

SEQ ID NO: 4090097 - DNA, 25 bp, Homo sapien
ttcagtttgacagtttgtagctcca

SEQ ID NO: 4090098 - DNA, 25 bp, Homo sapien
cagtttgacagtttgtagctccatt

SEQ ID NO: 4090099 - DNA, 25 bp, Homo sapien
ttgacagtttgtagctccattagca

SEQ ID NO: 4090100 - DNA, 25 bp, Homo sapien
cagtttgtagctccattagcagtca

SEQ ID NO: 4090101 - DNA, 25 bp, Homo sapien
agcaatgagtcctgcagtgttatta

SEQ ID NO: 4090102 - DNA, 25 bp, Homo sapien
aatgagtcctgcagtgttattatct

SEQ ID NO: 4090103 - DNA, 25 bp, Homo sapien
tgagtcctgcagtgttattatctgg

SEQ ID NO: 4090104 - DNA, 25 bp, Homo sapien
caatgagtcctgcagtgttattatc

SEQ ID NO: 4090105 - DNA, 25 bp, Homo sapien
cttccaggaagcgttccttgatctc

SEQ ID NO: 4090106 - DNA, 25 bp, Homo sapien
ttcttcttccaggaagcgttccttg

SEQ ID NO: 4090107 - DNA, 25 bp, Homo sapien
ttcttccaggaagcgttccttgatc

SEQ ID NO: 4090108 - DNA, 25 bp, Homo sapien
tcttcttccaggaagcgttccttga

SEQ ID NO: 4090109 - DNA, 25 bp, Homo sapien
cattttcgttttcttataacgctgg

SEQ ID NO: 4090110 - DNA, 25 bp, Homo sapien
gtctctgcgcgcttgtcactgccag

SEQ ID NO: 4090111 - DNA, 25 bp, Homo sapien
ttcatcgttcgggtctctgcgcgct

SEQ ID NO: 4090112 - DNA, 25 bp, Homo sapien
ctctcagagctttgcacggatggga

SEQ ID NO: 4090113 - DNA, 25 bp, Homo sapien
tctgggtcagactcagttcccaggg

SEQ ID NO: 4090114 - DNA, 25 bp, Homo sapien
gccagtcatcatgatttctgggtca

SEQ ID NO: 4090115 - DNA, 25 bp, Homo sapien
acagccctgtttacagaaccatgct

SEQ ID NO: 4090116 - DNA, 25 bp, Homo sapien
ggccacatgcacaagtccctttctt

SEQ ID NO: 4090117 - DNA, 25 bp, Homo sapien
tccgctgtctcggtcttccgagggc

SEQ ID NO: 4090118 - DNA, 25 bp, Homo sapien
tcgggctcagcgctactgcgctccc

SEQ ID NO: 4090119 - DNA, 25 bp, Homo sapien
tactgcgctcccgactcctcggctc

SEQ ID NO: 4090120 - DNA, 25 bp, Homo sapien
cgctccgatgcgctcgggacgcggg

SEQ ID NO: 4090121 - DNA, 25 bp, Homo sapien
gggcatagctctaactcggctcagc

SEQ ID NO: 4090122 - DNA, 25 bp, Homo sapien
ttcgacggctccagcagaatccagt

SEQ ID NO: 4090123 - DNA, 25 bp, Homo sapien
gaatgaatagggagcttcgacggct

SEQ ID NO: 4090124 - DNA, 25 bp, Homo sapien
tcagctgaccccaggattgggaaag

SEQ ID NO: 4090125 - DNA, 25 bp, Homo sapien
tgtctgagaagccagcatcgaggca

SEQ ID NO: 4090126 - DNA, 25 bp, Homo sapien
agttggcaagaagagccacccgtgc

SEQ ID NO: 4090127 - DNA, 25 bp, Homo sapien
gagacccatttcctgggaagtccta

SEQ ID NO: 4090128 - DNA, 25 bp, Homo sapien
ggatgttaatatgctcactgagacc

SEQ ID NO: 4090129 - DNA, 25 bp, Homo sapien
tggatttcagcctagcaaaggtgat

SEQ ID NO: 4090130 - DNA, 25 bp, Homo sapien
atttcagcctagcaaaggtgatttt

SEQ ID NO: 4090131 - DNA, 25 bp, Homo sapien
ggatttcagcctagcaaaggtgatt

SEQ ID NO: 4090132 - DNA, 25 bp, Homo sapien
gatttcagcctagcaaaggtgattt

SEQ ID NO: 4090133 - DNA, 25 bp, Homo sapien
aaacagagagctggcttagggtcgc

SEQ ID NO: 4090134 - DNA, 25 bp, Homo sapien
gcttagggtcgcagaaggcatatcc

SEQ ID NO: 4090135 - DNA, 25 bp, Homo sapien
catatccgtgacagtggctgcagac

SEQ ID NO: 4090136 - DNA, 25 bp, Homo sapien
cagcccaaacagagagctggcttag

SEQ ID NO: 4090137 - DNA, 25 bp, Homo sapien
tctcatgatctgggcatttttccaa

SEQ ID NO: 4090138 - DNA, 25 bp, Homo sapien
cttctcatgatctgggcatttttcc

SEQ ID NO: 4090139 - DNA, 25 bp, Homo sapien
ttctcatgatctgggcatttttcca

SEQ ID NO: 4090140 - DNA, 25 bp, Homo sapien
tgagttcacggcagggtaacttggc

SEQ ID NO: 4090141 - DNA, 25 bp, Homo sapien
gaagcagaaccaacctttttgcaag

SEQ ID NO: 4090142 - DNA, 25 bp, Homo sapien
gacacacccctgtgttttgtggctc

SEQ ID NO: 4090143 - DNA, 25 bp, Homo sapien
ttctagaacatttctctgaagcaga

SEQ ID NO: 4090144 - DNA, 25 bp, Homo sapien
gggaacagtgcatccgcaattttaa

SEQ ID NO: 4090145 - DNA, 25 bp, Homo sapien
acagtgcatccgcaattttaattcc

SEQ ID NO: 4090146 - DNA, 25 bp, Homo sapien
gtgcatccgcaattttaattcccgg

SEQ ID NO: 4090147 - DNA, 25 bp, Homo sapien
gcatccgcaattttaattcccggca

SEQ ID NO: 4090148 - DNA, 25 bp, Homo sapien
caatcatctggtccacgggaggaaa

SEQ ID NO: 4090149 - DNA, 25 bp, Homo sapien
aagcaaagaggtctagctcagcacc

SEQ ID NO: 4090150 - DNA, 25 bp, Homo sapien
ggaaattgataaagagcctcctgct

SEQ ID NO: 4090151 - DNA, 25 bp, Homo sapien
atgcttaaatggagtggtcccagga

SEQ ID NO: 4090152 - DNA, 25 bp, Homo sapien
tgtgaagcggtctgcattccctcag

SEQ ID NO: 4090153 - DNA, 25 bp, Homo sapien
taccagggactcttgggatacgcag

SEQ ID NO: 4090154 - DNA, 25 bp, Homo sapien
aatgatgcccttaacggtcccatga

SEQ ID NO: 4090155 - DNA, 25 bp, Homo sapien
gagttcacggagaaccaggccatct

SEQ ID NO: 4090156 - DNA, 25 bp, Homo sapien
ccagggtggccgcagcgagaccatg

SEQ ID NO: 4090157 - DNA, 25 bp, Homo sapien
ctgtgcgcgtgtcccgcagagcgtc

SEQ ID NO: 4090158 - DNA, 25 bp, Homo sapien
tggccgcagcgagaccatgcagcat

SEQ ID NO: 4090159 - DNA, 25 bp, Homo sapien
gcgtctgggctgtgcgcgtgtcccg

SEQ ID NO: 4090160 - DNA, 25 bp, Homo sapien
ggagggatggtgaagcagcgatggg

SEQ ID NO: 4090161 - DNA, 25 bp, Homo sapien
ggagaggagggatggtgaagcagcg

SEQ ID NO: 4090162 - DNA, 25 bp, Homo sapien
gtgaagcagcgatggggcaggcagg

SEQ ID NO: 4090163 - DNA, 25 bp, Homo sapien
gatggtgaagcagcgatggggcagg

SEQ ID NO: 4090164 - DNA, 25 bp, Homo sapien
ggtgggtcagctccagaaggcctcc

SEQ ID NO: 4090165 - DNA, 25 bp, Homo sapien
tgatggtcgtcgggggtgggtcagc

SEQ ID NO: 4090166 - DNA, 25 bp, Homo sapien
tggtcgtcgggggtgggtcagctcc

SEQ ID NO: 4090167 - DNA, 25 bp, Homo sapien
gtcgtcgggggtgggtcagctccag

SEQ ID NO: 4090168 - DNA, 25 bp, Homo sapien
agaaagagagtaggaccttggagtt

SEQ ID NO: 4090169 - DNA, 25 bp, Homo sapien
acagaaagagagtaggaccttggag

SEQ ID NO: 4090170 - DNA, 25 bp, Homo sapien
aaagagagtaggaccttggagttgc

SEQ ID NO: 4090171 - DNA, 25 bp, Homo sapien
aagagagtaggaccttggagttgcc

SEQ ID NO: 4090172 - DNA, 25 bp, Homo sapien
cgtggacagcagttttgcggctcaa

SEQ ID NO: 4090173 - DNA, 25 bp, Homo sapien
cggtccacgtggacagcagttttgc

SEQ ID NO: 4090174 - DNA, 25 bp, Homo sapien
ccccggtccacgtggacagcagttt

SEQ ID NO: 4090175 - DNA, 25 bp, Homo sapien
tccacgtggacagcagttttgcggc

SEQ ID NO: 4090176 - DNA, 25 bp, Homo sapien
ctggcagatggacgtgcgatgtcac

SEQ ID NO: 4090177 - DNA, 25 bp, Homo sapien
gtctcggaatttggacgcaggggtc

SEQ ID NO: 4090178 - DNA, 25 bp, Homo sapien
agacgttgcccaggccgatggcata

SEQ ID NO: 4090179 - DNA, 25 bp, Homo sapien
tgaggaagtcgaagcggcccttcca

SEQ ID NO: 4090180 - DNA, 25 bp, Homo sapien
cccaccatttttcccgcagagatag

SEQ ID NO: 4090181 - DNA, 25 bp, Homo sapien
cttgaccaccaaggttttgggcttg

SEQ ID NO: 4090182 - DNA, 25 bp, Homo sapien
caggaggtccccgggccagcaccta

SEQ ID NO: 4090183 - DNA, 25 bp, Homo sapien
tatcattaacagaggacaattgtcc

SEQ ID NO: 4090184 - DNA, 25 bp, Homo sapien
aaccacaggcccaaggaaagccata

SEQ ID NO: 4090185 - DNA, 25 bp, Homo sapien
gcttttctcctacagttgccccaga

SEQ ID NO: 4090186 - DNA, 25 bp, Homo sapien
tgccccagaaaaatgcctaagcagg

SEQ ID NO: 4090187 - DNA, 25 bp, Homo sapien
ggtaaagaagacagagctcgtggcc

SEQ ID NO: 4090188 - DNA, 25 bp, Homo sapien
aggtaaagaagacagagctcgtggc

SEQ ID NO: 4090189 - DNA, 25 bp, Homo sapien
gtaaagaagacagagctcgtggccc

SEQ ID NO: 4090190 - DNA, 25 bp, Homo sapien
ctagccccccgatggaggtgtactg

SEQ ID NO: 4090191 - DNA, 25 bp, Homo sapien
ccttgaacataggagccagcttcca

SEQ ID NO: 4090192 - DNA, 25 bp, Homo sapien
gtgggacccccgcaaagatgagtgt

SEQ ID NO: 4090193 - DNA, 25 bp, Homo sapien
tgtactggcccagggagcactccag

SEQ ID NO: 4090194 - DNA, 25 bp, Homo sapien
tgacgatgtagtagatgttcagcca

SEQ ID NO: 4090195 - DNA, 25 bp, Homo sapien
gccagaatgatagcacagcagccgc

SEQ ID NO: 4090196 - DNA, 25 bp, Homo sapien
cgatgtagtagatgttcagccagaa

SEQ ID NO: 4090197 - DNA, 25 bp, Homo sapien
ccagaatgatagcacagcagccgca

SEQ ID NO: 4090198 - DNA, 25 bp, Homo sapien
taaatttgattactctagggaactc

SEQ ID NO: 4090199 - DNA, 25 bp, Homo sapien
tataagcaagatcaaacactatttg

SEQ ID NO: 4090200 - DNA, 25 bp, Homo sapien
ccatcttaactattggtgcctgtac

SEQ ID NO: 4090201 - DNA, 25 bp, Homo sapien
tacccataatgtagctccctgaacc

SEQ ID NO: 4090202 - DNA, 25 bp, Homo sapien
gaactccaccacagcgctggtcatg

SEQ ID NO: 4090203 - DNA, 25 bp, Homo sapien
tagtgttgaccatgctgtagttgga

SEQ ID NO: 4090204 - DNA, 25 bp, Homo sapien
ggttgtcgcactgtttccacggcag

SEQ ID NO: 4090205 - DNA, 25 bp, Homo sapien
gagaagcagcggtctgtgttccagg

SEQ ID NO: 4090206 - DNA, 25 bp, Homo sapien
catggatgcttccttcatgccagag

SEQ ID NO: 4090207 - DNA, 25 bp, Homo sapien
tcaggatgtggtcaacctctccagg

SEQ ID NO: 4090208 - DNA, 25 bp, Homo sapien
taattggctatgctggttattcccc

SEQ ID NO: 4090209 - DNA, 25 bp, Homo sapien
gatgctgacgactatggccacatta

SEQ ID NO: 4090210 - DNA, 25 bp, Homo sapien
cagtggccagcggatctgacctggc

SEQ ID NO: 4090211 - DNA, 25 bp, Homo sapien
atacacaaggatccaggcgatggcc

SEQ ID NO: 4090212 - DNA, 25 bp, Homo sapien
gatctgacctggcttatccagcccg

SEQ ID NO: 4090213 - DNA, 25 bp, Homo sapien
gtccgtcatctgatgcatgttgcgc

SEQ ID NO: 4090214 - DNA, 25 bp, Homo sapien
tgaagggacctgcttaattcaaggt

SEQ ID NO: 4090215 - DNA, 25 bp, Homo sapien
agagcttcctttgtagacctgttcc

SEQ ID NO: 4090216 - DNA, 25 bp, Homo sapien
tcacagtaaaagaaacggacacacc

SEQ ID NO: 4090217 - DNA, 25 bp, Homo sapien
aattcaaggttggatgggactcttg

SEQ ID NO: 4090218 - DNA, 25 bp, Homo sapien
tctgttaggcccagtggaatcccat

SEQ ID NO: 4090219 - DNA, 25 bp, Homo sapien
ctctgttgttcctcaagggtcagga

SEQ ID NO: 4090220 - DNA, 25 bp, Homo sapien
tcatctctggagtttctgcacctag

SEQ ID NO: 4090221 - DNA, 25 bp, Homo sapien
gaacaaggtttggtgcagagcagat

SEQ ID NO: 4090222 - DNA, 25 bp, Homo sapien
gctgggtgctgagcgcttgacaaaa

SEQ ID NO: 4090223 - DNA, 25 bp, Homo sapien
tgggctagacatcccagcttggcat

SEQ ID NO: 4090224 - DNA, 25 bp, Homo sapien
aatggtgaggttgggatcttaactc

SEQ ID NO: 4090225 - DNA, 25 bp, Homo sapien
gagtaataacaactctccttgctgg

SEQ ID NO: 4090226 - DNA, 25 bp, Homo sapien
gtgagagactgccatcttctgcccc

SEQ ID NO: 4090227 - DNA, 25 bp, Homo sapien
cttctgcccccaggctcctggggta

SEQ ID NO: 4090228 - DNA, 25 bp, Homo sapien
ccccaggctcctggggtagggcttg

SEQ ID NO: 4090229 - DNA, 25 bp, Homo sapien
caggctcctggggtagggcttgaaa

SEQ ID NO: 4090230 - DNA, 25 bp, Homo sapien
tgcctcccatcttattcagtacaaa

SEQ ID NO: 4090231 - DNA, 25 bp, Homo sapien
tactgcttctagaaccttgcattca

SEQ ID NO: 4090232 - DNA, 25 bp, Homo sapien
gaaccttgcattcacttcttgggta

SEQ ID NO: 4090233 - DNA, 25 bp, Homo sapien
ttcttgggtagttctgaccttcctg

SEQ ID NO: 4090234 - DNA, 25 bp, Homo sapien
cacatcaggacatgccgcaggctta

SEQ ID NO: 4090235 - DNA, 25 bp, Homo sapien
tgttcagcatgaagccaggcacata

SEQ ID NO: 4090236 - DNA, 25 bp, Homo sapien
tgacttgaccccgagattctgcagg

SEQ ID NO: 4090237 - DNA, 25 bp, Homo sapien
cacaagctgcgtaacttagggtcaa

SEQ ID NO: 4090238 - DNA, 25 bp, Homo sapien
catgtctagaacagtccaccgtata

SEQ ID NO: 4090239 - DNA, 25 bp, Homo sapien
tgtctgacgaacacataaatgcagg

SEQ ID NO: 4090240 - DNA, 25 bp, Homo sapien
tgtcacaaggccagcactaggtatc

SEQ ID NO: 4090241 - DNA, 25 bp, Homo sapien
caagtattgcatgtggtgacaggaa

SEQ ID NO: 4090242 - DNA, 25 bp, Homo sapien
ccgggcagcgtcactccacggaaga

SEQ ID NO: 4090243 - DNA, 25 bp, Homo sapien
cgtcactccacggaagaacaggatg

SEQ ID NO: 4090244 - DNA, 25 bp, Homo sapien
gcagcgtcactccacggaagaacag

SEQ ID NO: 4090245 - DNA, 25 bp, Homo sapien
gacagcttgcggaagttgggtgtga

SEQ ID NO: 4090246 - DNA, 25 bp, Homo sapien
tagctcccgagagcgatcagggacc

SEQ ID NO: 4090247 - DNA, 25 bp, Homo sapien
tgttgtggaaagagttgtagctccc

SEQ ID NO: 4090248 - DNA, 25 bp, Homo sapien
gaaagagttgtagctcccgagagcg

SEQ ID NO: 4090249 - DNA, 25 bp, Homo sapien
caggcccagcccgtatgagaagaag

SEQ ID NO: 4090250 - DNA, 25 bp, Homo sapien
tgtgggatgtggactcaaagggctc

SEQ ID NO: 4090251 - DNA, 25 bp, Homo sapien
ggctcccgcagctgtcctctcaaac

SEQ ID NO: 4090252 - DNA, 25 bp, Homo sapien
atgtggactcaaagggctcggccag

SEQ ID NO: 4090253 - DNA, 25 bp, Homo sapien
tgggatgtggactcaaagggctcgg

SEQ ID NO: 4090254 - DNA, 25 bp, Homo sapien
gccacatcagcaatggacctcttgg

SEQ ID NO: 4090255 - DNA, 25 bp, Homo sapien
gctggtgcacgaattgatgcagcag

SEQ ID NO: 4090256 - DNA, 25 bp, Homo sapien
acatgggccatgaagcccacgatgg

SEQ ID NO: 4090257 - DNA, 25 bp, Homo sapien
gagaagatgacgaatcctgcgaaca

SEQ ID NO: 4090258 - DNA, 25 bp, Homo sapien
tgggtcaccgcctctgggtatgcca

SEQ ID NO: 4090259 - DNA, 25 bp, Homo sapien
ctctgggtatgccaggaacgccagc

SEQ ID NO: 4090260 - DNA, 25 bp, Homo sapien
caccgcctctgggtatgccaggaac

SEQ ID NO: 4090261 - DNA, 25 bp, Homo sapien
gcctctgggtatgccaggaacgcca

SEQ ID NO: 4090262 - DNA, 25 bp, Homo sapien
cttcaggtgggaacagaggtcagcc

SEQ ID NO: 4090263 - DNA, 25 bp, Homo sapien
ttcaggtgggaacagaggtcagcca

SEQ ID NO: 4090264 - DNA, 25 bp, Homo sapien
tcaggtgggaacagaggtcagccac

SEQ ID NO: 4090265 - DNA, 25 bp, Homo sapien
ggggtactcatccaccagggctgtg

SEQ ID NO: 4090266 - DNA, 25 bp, Homo sapien
ttagagagaccgatcaggtaggaga

SEQ ID NO: 4090267 - DNA, 25 bp, Homo sapien
gaggagcctggggtactcatccacc

SEQ ID NO: 4090268 - DNA, 25 bp, Homo sapien
ctctctgcggttgcggaggagcctg

SEQ ID NO: 4090269 - DNA, 25 bp, Homo sapien
acaggcacctgccccaatgcctgac

SEQ ID NO: 4090270 - DNA, 25 bp, Homo sapien
gcacctgccccaatgcctgactaat

SEQ ID NO: 4090271 - DNA, 25 bp, Homo sapien
acctgccccaatgcctgactaattt

SEQ ID NO: 4090272 - DNA, 25 bp, Homo sapien
aggcacctgccccaatgcctgacta

SEQ ID NO: 4090273 - DNA, 25 bp, Homo sapien
cacattcaaagaacacgaggaacag

SEQ ID NO: 4090274 - DNA, 25 bp, Homo sapien
tagtagtcaaagagtttgaagacat

SEQ ID NO: 4090275 - DNA, 25 bp, Homo sapien
tcaaagaacacgaggaacagcaggc

SEQ ID NO: 4090276 - DNA, 25 bp, Homo sapien
agtagtagtcaaagagtttgaagac

SEQ ID NO: 4090277 - DNA, 25 bp, Homo sapien
cgccacaatgattggtgtgaagaaa

SEQ ID NO: 4090278 - DNA, 25 bp, Homo sapien
tcttggatattgtcatagaatcggt

SEQ ID NO: 4090279 - DNA, 25 bp, Homo sapien
catctcttggatattgtcatagaat

SEQ ID NO: 4090280 - DNA, 25 bp, Homo sapien
gattggtgtgaagaaagaccagcag

SEQ ID NO: 4090281 - DNA, 25 bp, Homo sapien
ctgcacagcactgaaaatgaacacg

SEQ ID NO: 4090282 - DNA, 25 bp, Homo sapien
tgcacagcactgaaaatgaacacgc

SEQ ID NO: 4090283 - DNA, 25 bp, Homo sapien
gcacagcactgaaaatgaacacgcc

SEQ ID NO: 4090284 - DNA, 25 bp, Homo sapien
tcagggagccctttaaggtgaggaa

SEQ ID NO: 4090285 - DNA, 25 bp, Homo sapien
cttcagggagccctttaaggtgagg

SEQ ID NO: 4090286 - DNA, 25 bp, Homo sapien
cggggatgaggaccatggaagacag

SEQ ID NO: 4090287 - DNA, 25 bp, Homo sapien
tagtttcccatggtgagtggcgtca

SEQ ID NO: 4090288 - DNA, 25 bp, Homo sapien
tctgggcgaacgatgtcttcgctgg

SEQ ID NO: 4090289 - DNA, 25 bp, Homo sapien
tgctcaggaccattctctgggcgaa

SEQ ID NO: 4090290 - DNA, 25 bp, Homo sapien
gatgtcttcgctgggctggaccatg

SEQ ID NO: 4090291 - DNA, 25 bp, Homo sapien
cattctctgggcgaacgatgtcttc

SEQ ID NO: 4090292 - DNA, 25 bp, Homo sapien
tacttaagagcaagcgttcccggga

SEQ ID NO: 4090293 - DNA, 25 bp, Homo sapien
tacgatttgctacgtgggaacccat

SEQ ID NO: 4090294 - DNA, 25 bp, Homo sapien
tggattaaaaaggtcaccagcccgc

SEQ ID NO: 4090295 - DNA, 25 bp, Homo sapien
tgggaatatcgactgacgcccctgg

SEQ ID NO: 4090296 - DNA, 25 bp, Homo sapien
atcactggaacccttgatttctcct

SEQ ID NO: 4090297 - DNA, 25 bp, Homo sapien
aagacattctctttgacagtatcag

SEQ ID NO: 4090298 - DNA, 25 bp, Homo sapien
gaacccttgatttctccttcgctca

SEQ ID NO: 4090299 - DNA, 25 bp, Homo sapien
cattctctttgacagtatcaggtga

SEQ ID NO: 4090300 - DNA, 25 bp, Homo sapien
ctttggctcctctagggtcacagag

SEQ ID NO: 4090301 - DNA, 25 bp, Homo sapien
cctctagggtcacagagtactctgt

SEQ ID NO: 4090302 - DNA, 25 bp, Homo sapien
ttggctcctctagggtcacagagta

SEQ ID NO: 4090303 - DNA, 25 bp, Homo sapien
gtcacagagtactctgtatcttttt

SEQ ID NO: 4090304 - DNA, 25 bp, Homo sapien
cttggctgtatgactgcagccacca

SEQ ID NO: 4090305 - DNA, 25 bp, Homo sapien
tgagttacatgctggttggggcttt

SEQ ID NO: 4090306 - DNA, 25 bp, Homo sapien
cccttgctgggatccgaagccagag

SEQ ID NO: 4090307 - DNA, 25 bp, Homo sapien
cagagttcatcactttgagttacat

SEQ ID NO: 4090308 - DNA, 25 bp, Homo sapien
cttcccattccagcgaccctgagca

SEQ ID NO: 4090309 - DNA, 25 bp, Homo sapien
ctgctgcttccaggagcgctttggt

SEQ ID NO: 4090310 - DNA, 25 bp, Homo sapien
ctgcttgtcagcccctgctgcttcc

SEQ ID NO: 4090311 - DNA, 25 bp, Homo sapien
ctgcttccaggagcgctttggtctc

SEQ ID NO: 4090312 - DNA, 25 bp, Homo sapien
tgcttgtcagcccctgctgcttcca

SEQ ID NO: 4090313 - DNA, 25 bp, Homo sapien
accacggagatgtctttggctgctg

SEQ ID NO: 4090314 - DNA, 25 bp, Homo sapien
tggccgacttgtaccacggagatgt

SEQ ID NO: 4090315 - DNA, 25 bp, Homo sapien
acttgtaccacggagatgtctttgg

SEQ ID NO: 4090316 - DNA, 25 bp, Homo sapien
caccagatggccgacttgtaccacg

SEQ ID NO: 4090317 - DNA, 25 bp, Homo sapien
tcagtggcttcaggagctaagctgc

SEQ ID NO: 4090318 - DNA, 25 bp, Homo sapien
caagaatgaagtctgggactctctc

SEQ ID NO: 4090319 - DNA, 25 bp, Homo sapien
aagaatgaagtctgggactctctca

SEQ ID NO: 4090320 - DNA, 25 bp, Homo sapien
tgctcagaatttagcaggggctggt

SEQ ID NO: 4090321 - DNA, 25 bp, Homo sapien
ggatgaggcttccactggtgtcaat

SEQ ID NO: 4090322 - DNA, 25 bp, Homo sapien
cttcttccaagtctgaggatgaggc

SEQ ID NO: 4090323 - DNA, 25 bp, Homo sapien
tggtgccttcttcagacccaagagt

SEQ ID NO: 4090324 - DNA, 25 bp, Homo sapien
caaggccattaagtgctgagaacgg

SEQ ID NO: 4090325 - DNA, 25 bp, Homo sapien
ttcacctgcctgtaagagggacggc

SEQ ID NO: 4090326 - DNA, 25 bp, Homo sapien
tcaaaggaacctaatggcagtcgtc

SEQ ID NO: 4090327 - DNA, 25 bp, Homo sapien
taaaggttgcaatcacggtcgttcc

SEQ ID NO: 4090328 - DNA, 25 bp, Homo sapien
cagaggtggaaagcgataacaactg

SEQ ID NO: 4090329 - DNA, 25 bp, Homo sapien
cagggagactttcagcggcttcgcc

SEQ ID NO: 4090330 - DNA, 25 bp, Homo sapien
cagcggcttcgccaatgtggcagag

SEQ ID NO: 4090331 - DNA, 25 bp, Homo sapien
gaaagcgataacaactgtgtccact

SEQ ID NO: 4090332 - DNA, 25 bp, Homo sapien
tatgaagtctttaaacctgggctgt

SEQ ID NO: 4090333 - DNA, 25 bp, Homo sapien
gcacattgcaatttggatcaactgc

SEQ ID NO: 4090334 - DNA, 25 bp, Homo sapien
cacagctctagatcagctaccagct

SEQ ID NO: 4090335 - DNA, 25 bp, Homo sapien
accagcttccgggaaattcagagga

SEQ ID NO: 4090336 - DNA, 25 bp, Homo sapien
tctatttcattgatcttgaatattg

SEQ ID NO: 4090337 - DNA, 25 bp, Homo sapien
ttaatcaatgcccttttctatttca

SEQ ID NO: 4090338 - DNA, 25 bp, Homo sapien
atttcattgatcttgaatattgcag

SEQ ID NO: 4090339 - DNA, 25 bp, Homo sapien
taatcaatgcccttttctatttcat

SEQ ID NO: 4090340 - DNA, 25 bp, Homo sapien
gatttgataagcaggtggtatgtga

SEQ ID NO: 4090341 - DNA, 25 bp, Homo sapien
ttgataagcaggtggtatgtgacag

SEQ ID NO: 4090342 - DNA, 25 bp, Homo sapien
atttgataagcaggtggtatgtgac

SEQ ID NO: 4090343 - DNA, 25 bp, Homo sapien
tttgataagcaggtggtatgtgaca

SEQ ID NO: 4090344 - DNA, 25 bp, Homo sapien
aaaaccctggcattaaacttgactg

SEQ ID NO: 4090345 - DNA, 25 bp, Homo sapien
aagccaccatgaagattggatctac

SEQ ID NO: 4090346 - DNA, 25 bp, Homo sapien
gctcccatatcacttggcatagagt

SEQ ID NO: 4090347 - DNA, 25 bp, Homo sapien
catcacctacaaggccttatgggac

SEQ ID NO: 4090348 - DNA, 25 bp, Homo sapien
tctggatgtctggttagaagaactc

SEQ ID NO: 4090349 - DNA, 25 bp, Homo sapien
tgggctctccccatggtactcagga

SEQ ID NO: 4090350 - DNA, 25 bp, Homo sapien
gaagaactctcatccagagtccaag

SEQ ID NO: 4090351 - DNA, 25 bp, Homo sapien
taaggtttcaccctaggctgagtcc

SEQ ID NO: 4090352 - DNA, 25 bp, Homo sapien
ccaaactcagcactgtctaggctga

SEQ ID NO: 4090353 - DNA, 25 bp, Homo sapien
gccgtgaggaagcagatcagcctga

SEQ ID NO: 4090354 - DNA, 25 bp, Homo sapien
cactgtctaggctgaggttggcctt

SEQ ID NO: 4090355 - DNA, 25 bp, Homo sapien
ctgacgtacaggacagccccaagga

SEQ ID NO: 4090356 - DNA, 25 bp, Homo sapien
agtgagaaggctcagtctatgaacc

SEQ ID NO: 4090357 - DNA, 25 bp, Homo sapien
aaatgttgactgtcaccatttactc

SEQ ID NO: 4090358 - DNA, 25 bp, Homo sapien
tgagaaggctcagtctatgaaccaa

SEQ ID NO: 4090359 - DNA, 25 bp, Homo sapien
gactgtcaccatttactcaatctgc

SEQ ID NO: 4090360 - DNA, 25 bp, Homo sapien
tatggtttctcctcacgttggcagt

SEQ ID NO: 4090361 - DNA, 25 bp, Homo sapien
tgcactctcaaaggtttcggctgga

SEQ ID NO: 4090362 - DNA, 25 bp, Homo sapien
tgtcctggagggatgccaaactgca

SEQ ID NO: 4090363 - DNA, 25 bp, Homo sapien
cagatatgcctcaatgtggtgccag

SEQ ID NO: 4090364 - DNA, 25 bp, Homo sapien
gaagtggagggaacttccagtggtg

SEQ ID NO: 4090365 - DNA, 25 bp, Homo sapien
ctgaagtggagggaacttccagtgg

SEQ ID NO: 4090366 - DNA, 25 bp, Homo sapien
cagtggtgggggattgaggaaccac

SEQ ID NO: 4090367 - DNA, 25 bp, Homo sapien
agtggagggaacttccagtggtggg

SEQ ID NO: 4090368 - DNA, 25 bp, Homo sapien
gagtcacttggttctgctgaataca

SEQ ID NO: 4090369 - DNA, 25 bp, Homo sapien
ggacaccaggaagagattatccaga

SEQ ID NO: 4090370 - DNA, 25 bp, Homo sapien
catccaatactgtcatgagagtcac

SEQ ID NO: 4090371 - DNA, 25 bp, Homo sapien
tatccagatagctcatttcatccaa

SEQ ID NO: 4090372 - DNA, 25 bp, Homo sapien
taagtttcaccatcagtatagggca

SEQ ID NO: 4090373 - DNA, 25 bp, Homo sapien
tatagggcaactcccatgtgctagg

SEQ ID NO: 4090374 - DNA, 25 bp, Homo sapien
caaagggcgcaagcattaagtttca

SEQ ID NO: 4090375 - DNA, 25 bp, Homo sapien
accgtgcccggacgagattctgcat

SEQ ID NO: 4090376 - DNA, 25 bp, Homo sapien
caccattaccgactggtttcttttg

SEQ ID NO: 4090377 - DNA, 25 bp, Homo sapien
cttttggatgtgatatcccattcag

SEQ ID NO: 4090378 - DNA, 25 bp, Homo sapien
cagaaatcccaccattaccgactgg

SEQ ID NO: 4090379 - DNA, 25 bp, Homo sapien
taccgactggtttcttttggatgtg

SEQ ID NO: 4090380 - DNA, 25 bp, Homo sapien
gcactcaccattccacttccttttt

SEQ ID NO: 4090381 - DNA, 25 bp, Homo sapien
ggcactcaccattccacttcctttt

SEQ ID NO: 4090382 - DNA, 25 bp, Homo sapien
ctggcactcaccattccacttcctt

SEQ ID NO: 4090383 - DNA, 25 bp, Homo sapien
ccctggcactcaccattccacttcc

SEQ ID NO: 4090384 - DNA, 25 bp, Homo sapien
tcttctccatgatgggcttcttaaa

SEQ ID NO: 4090385 - DNA, 25 bp, Homo sapien
gtcttctccatgatgggcttcttaa

SEQ ID NO: 4090386 - DNA, 25 bp, Homo sapien
catgatgggcttcttaaatcctgta

SEQ ID NO: 4090387 - DNA, 25 bp, Homo sapien
ctccatgatgggcttcttaaatcct

SEQ ID NO: 4090388 - DNA, 25 bp, Homo sapien
ccatctagtgtaacttgttcacaag

SEQ ID NO: 4090389 - DNA, 25 bp, Homo sapien
ttccatctagtgtaacttgttcaca

SEQ ID NO: 4090390 - DNA, 25 bp, Homo sapien
ctttttaatcgagtcagaagcagct

SEQ ID NO: 4090391 - DNA, 25 bp, Homo sapien
tcttccatctagtgtaacttgttca

SEQ ID NO: 4090392 - DNA, 25 bp, Homo sapien
gggtgacccaaagtcctgccctatg

SEQ ID NO: 4090393 - DNA, 25 bp, Homo sapien
cgtgcctggcctgtagaaggctaaa

SEQ ID NO: 4090394 - DNA, 25 bp, Homo sapien
gaggacaacactcaaacccacagct

SEQ ID NO: 4090395 - DNA, 25 bp, Homo sapien
tccaggtctctttcttacagcggta

SEQ ID NO: 4090396 - DNA, 25 bp, Homo sapien
gcagccaccagttatggctcactcc

SEQ ID NO: 4090397 - DNA, 25 bp, Homo sapien
tggcgcaagagcagccaccagttat

SEQ ID NO: 4090398 - DNA, 25 bp, Homo sapien
gcaagagcagccaccagttatggct

SEQ ID NO: 4090399 - DNA, 25 bp, Homo sapien
agagcagccaccagttatggctcac

SEQ ID NO: 4090400 - DNA, 25 bp, Homo sapien
ggcaggaggaattggggaggctcat

SEQ ID NO: 4090401 - DNA, 25 bp, Homo sapien
gaggcaggaggaattggggaggctc

SEQ ID NO: 4090402 - DNA, 25 bp, Homo sapien
cttctaagaggcaggaggaattggg

SEQ ID NO: 4090403 - DNA, 25 bp, Homo sapien
tctaagaggcaggaggaattgggga

SEQ ID NO: 4090404 - DNA, 25 bp, Homo sapien
gtacggcatacagcaccagcaggtt

SEQ ID NO: 4090405 - DNA, 25 bp, Homo sapien
gacagagcggtagcgatcaatgcac

SEQ ID NO: 4090406 - DNA, 25 bp, Homo sapien
cactgaaaatggacgctgtgctggc

SEQ ID NO: 4090407 - DNA, 25 bp, Homo sapien
tgagccctactgtgaccaagcagat

SEQ ID NO: 4090408 - DNA, 25 bp, Homo sapien
gcacaatatcaagtggaaagcagta

SEQ ID NO: 4090409 - DNA, 25 bp, Homo sapien
ggttgacggctacatagtccctgct

SEQ ID NO: 4090410 - DNA, 25 bp, Homo sapien
tgatatctcgctggccccatgtgtg

SEQ ID NO: 4090411 - DNA, 25 bp, Homo sapien
tttgggatggtgacttcaagacaga

SEQ ID NO: 4090412 - DNA, 25 bp, Homo sapien
ggattggctatcacctaacatctga

SEQ ID NO: 4090413 - DNA, 25 bp, Homo sapien
tatctgagtccgttcgagagaagga

SEQ ID NO: 4090414 - DNA, 25 bp, Homo sapien
tactgtcttgaatgcgagcggagcc

SEQ ID NO: 4090415 - DNA, 25 bp, Homo sapien
taatccaggcctgtgttagacccac

SEQ ID NO: 4090416 - DNA, 25 bp, Homo sapien
gaggcagagctcacaatcagttctc

SEQ ID NO: 4090417 - DNA, 25 bp, Homo sapien
tgaattacaatgagtctgaggctcc

SEQ ID NO: 4090418 - DNA, 25 bp, Homo sapien
tgcagcttctgaaaccgggattaaa

SEQ ID NO: 4090419 - DNA, 25 bp, Homo sapien
tctgagaagggatagcccctgtgga

SEQ ID NO: 4090420 - DNA, 25 bp, Homo sapien
tccagaatcagacctcggagcagtt

SEQ ID NO: 4090421 - DNA, 25 bp, Homo sapien
ttaatttccatcgttcagacaggag

SEQ ID NO: 4090422 - DNA, 25 bp, Homo sapien
aagccattagccactgatgggctgg

SEQ ID NO: 4090423 - DNA, 25 bp, Homo sapien
cagacaggagtacgaagagcagatt

SEQ ID NO: 4090424 - DNA, 25 bp, Homo sapien
tctctatggcacttagggtgcataa

SEQ ID NO: 4090425 - DNA, 25 bp, Homo sapien
aacagcatgtctctatggcacttag

SEQ ID NO: 4090426 - DNA, 25 bp, Homo sapien
cttagggtgcataaatagccaggag

SEQ ID NO: 4090427 - DNA, 25 bp, Homo sapien
ggagcatcccagcatctttttcatg

SEQ ID NO: 4090428 - DNA, 25 bp, Homo sapien
tgccgttgccctctcaaactgcatg

SEQ ID NO: 4090429 - DNA, 25 bp, Homo sapien
ctgccgttgccctctcaaactgcat

SEQ ID NO: 4090430 - DNA, 25 bp, Homo sapien
cctgccgttgccctctcaaactgca

SEQ ID NO: 4090431 - DNA, 25 bp, Homo sapien
tcctgccgttgccctctcaaactgc

SEQ ID NO: 4090432 - DNA, 25 bp, Homo sapien
gccccgatgacgcaacgcggtcctg

SEQ ID NO: 4090433 - DNA, 25 bp, Homo sapien
ttgccactgggaagcggcgcgcgtg

SEQ ID NO: 4090434 - DNA, 25 bp, Homo sapien
acagctctctctgaggcgcgcgccc

SEQ ID NO: 4090435 - DNA, 25 bp, Homo sapien
gcaacgcggtcctgcccgcgcttgc

SEQ ID NO: 4090436 - DNA, 25 bp, Homo sapien
tgacttaggaaatcagcacgagctt

SEQ ID NO: 4090437 - DNA, 25 bp, Homo sapien
acgcggctacagacgaagggcgcca

SEQ ID NO: 4090438 - DNA, 25 bp, Homo sapien
cgagcttccaagtcagaagaccccg

SEQ ID NO: 4090439 - DNA, 25 bp, Homo sapien
gaagaccccggactgaaccagtctg

SEQ ID NO: 4090440 - DNA, 25 bp, Homo sapien
gaaatcccggtagacaaggtgaaga

SEQ ID NO: 4090441 - DNA, 25 bp, Homo sapien
cccggtagacaaggtgaagatacag

SEQ ID NO: 4090442 - DNA, 25 bp, Homo sapien
aaggtgaagatacaggaattggatc

SEQ ID NO: 4090443 - DNA, 25 bp, Homo sapien
ctagaaatcccggtagacaaggtga

SEQ ID NO: 4090444 - DNA, 25 bp, Homo sapien
gacgcaggacatacaggtctcagaa

SEQ ID NO: 4090445 - DNA, 25 bp, Homo sapien
gaatcatagacgcaggacatacagg

SEQ ID NO: 4090446 - DNA, 25 bp, Homo sapien
cagggaagaatcatagacgcaggac

SEQ ID NO: 4090447 - DNA, 25 bp, Homo sapien
cttgatcagggaagaatcatagacg

SEQ ID NO: 4090448 - DNA, 25 bp, Homo sapien
agtttttgagaacggatgcactgga

SEQ ID NO: 4090449 - DNA, 25 bp, Homo sapien
gaacggatgcactggataccagcat

SEQ ID NO: 4090450 - DNA, 25 bp, Homo sapien
cacatgcaatctggtgtccatcagc

SEQ ID NO: 4090451 - DNA, 25 bp, Homo sapien
cttcacatgcaatctggtgtccatc

SEQ ID NO: 4090452 - DNA, 25 bp, Homo sapien
gtccttctcattggttacttccagg

SEQ ID NO: 4090453 - DNA, 25 bp, Homo sapien
ttccttctgctataatatccttcac

SEQ ID NO: 4090454 - DNA, 25 bp, Homo sapien
ttcttcagtgtgtcaaccagggaac

SEQ ID NO: 4090455 - DNA, 25 bp, Homo sapien
tccaagccaactctgaatcaacatg

SEQ ID NO: 4090456 - DNA, 25 bp, Homo sapien
gctttggcatatggagccaatgcac

SEQ ID NO: 4090457 - DNA, 25 bp, Homo sapien
aaggaggtagagatcaccaggagtc

SEQ ID NO: 4090458 - DNA, 25 bp, Homo sapien
gatgcttctgcaacctcatgagttt

SEQ ID NO: 4090459 - DNA, 25 bp, Homo sapien
tatagacaaatgatgcttctgcaac

SEQ ID NO: 4090460 - DNA, 25 bp, Homo sapien
gccattcacttagcagaagtgccag

SEQ ID NO: 4090461 - DNA, 25 bp, Homo sapien
cagtgtccgatttctctgagcccat

SEQ ID NO: 4090462 - DNA, 25 bp, Homo sapien
tacaggtcatcgagaagtccaaaag

SEQ ID NO: 4090463 - DNA, 25 bp, Homo sapien
ttctaaagggcagcgagcactcagt

SEQ ID NO: 4090464 - DNA, 25 bp, Homo sapien
caggaaatgtgcagtggcggttgcc

SEQ ID NO: 4090465 - DNA, 25 bp, Homo sapien
gaaatgtgcagtggcggttgcctcc

SEQ ID NO: 4090466 - DNA, 25 bp, Homo sapien
cccacaggaaatgtgcagtggcggt

SEQ ID NO: 4090467 - DNA, 25 bp, Homo sapien
tccccacaggaaatgtgcagtggcg

SEQ ID NO: 4090468 - DNA, 25 bp, Homo sapien
gcagtttagagagtccaggatcccc

SEQ ID NO: 4090469 - DNA, 25 bp, Homo sapien
gccgatactcgttcagcttcttctg

SEQ ID NO: 4090470 - DNA, 25 bp, Homo sapien
cattgtagtaataacccttaatgtc

SEQ ID NO: 4090471 - DNA, 25 bp, Homo sapien
tctgggtcaactcatgccaaaaccc

SEQ ID NO: 4090472 - DNA, 25 bp, Homo sapien
agcactgaactccaatgttaagcga

SEQ ID NO: 4090473 - DNA, 25 bp, Homo sapien
aatgttaagcgagctggcagcccag

SEQ ID NO: 4090474 - DNA, 25 bp, Homo sapien
ccaatgttaagcgagctggcagccc

SEQ ID NO: 4090475 - DNA, 25 bp, Homo sapien
tgaactccaatgttaagcgagctgg

SEQ ID NO: 4090476 - DNA, 25 bp, Homo sapien
cagcttcacatgcccacagggaacg

SEQ ID NO: 4090477 - DNA, 25 bp, Homo sapien
acagcttcacatgcccacagggaac

SEQ ID NO: 4090478 - DNA, 25 bp, Homo sapien
tcaaatgccgtctgtcaggctcaaa

SEQ ID NO: 4090479 - DNA, 25 bp, Homo sapien
ggagagctagctttcaatggccaga

SEQ ID NO: 4090480 - DNA, 25 bp, Homo sapien
taatgttgtcgcagctaatgcagac

SEQ ID NO: 4090481 - DNA, 25 bp, Homo sapien
gagatgaggacatccaagctggtct

SEQ ID NO: 4090482 - DNA, 25 bp, Homo sapien
gactcgagtgtgttggtgttataca

SEQ ID NO: 4090483 - DNA, 25 bp, Homo sapien
tatctgcagtcttgaaagactcgag

SEQ ID NO: 4090484 - DNA, 25 bp, Homo sapien
tatacagtgttccaatagctgggca

SEQ ID NO: 4090485 - DNA, 25 bp, Homo sapien
gctgcttgttccaaaaggagcttct

SEQ ID NO: 4090486 - DNA, 25 bp, Homo sapien
catacatcacgttttcacagctaac

SEQ ID NO: 4090487 - DNA, 25 bp, Homo sapien
aatatgacacatacatcacgttttc

SEQ ID NO: 4090488 - DNA, 25 bp, Homo sapien
gacacatacatcacgttttcacagc

SEQ ID NO: 4090489 - DNA, 25 bp, Homo sapien
tatgacacatacatcacgttttcac

SEQ ID NO: 4090490 - DNA, 25 bp, Homo sapien
ctgtcacagaagtaggtagaattta

SEQ ID NO: 4090491 - DNA, 25 bp, Homo sapien
tgctgtcacagaagtaggtagaatt

SEQ ID NO: 4090492 - DNA, 25 bp, Homo sapien
atttgctgtcacagaagtaggtaga

SEQ ID NO: 4090493 - DNA, 25 bp, Homo sapien
ttgctgtcacagaagtaggtagaat

SEQ ID NO: 4090494 - DNA, 25 bp, Homo sapien
cagtgcctgattttatggattccca

SEQ ID NO: 4090495 - DNA, 25 bp, Homo sapien
cttgttgaggagtacagggttttca

SEQ ID NO: 4090496 - DNA, 25 bp, Homo sapien
caagagcagtgcctgattttatgga

SEQ ID NO: 4090497 - DNA, 25 bp, Homo sapien
gtacagggttttcaagagcagtgcc

SEQ ID NO: 4090498 - DNA, 25 bp, Homo sapien
gcaaaaccaatagtagaagtggtac

SEQ ID NO: 4090499 - DNA, 25 bp, Homo sapien
ctggcccctgaatgagaggtaaact

SEQ ID NO: 4090500 - DNA, 25 bp, Homo sapien
cctgaatgagaggtaaactctctgg

SEQ ID NO: 4090501 - DNA, 25 bp, Homo sapien
agagggcaggatagcaaaaccaata

SEQ ID NO: 4090502 - DNA, 25 bp, Homo sapien
tcttactctattacagcaagtgaac

SEQ ID NO: 4090503 - DNA, 25 bp, Homo sapien
tagaaatgactgatcacactcctct

SEQ ID NO: 4090504 - DNA, 25 bp, Homo sapien
tagttctgggctaaaaactaactca

SEQ ID NO: 4090505 - DNA, 25 bp, Homo sapien
accagaagactagaaatgactgatc

SEQ ID NO: 4090506 - DNA, 25 bp, Homo sapien
cactgtagtgtttaagcaaggaaac

SEQ ID NO: 4090507 - DNA, 25 bp, Homo sapien
gaaaccagcaccatgttctcatcat

SEQ ID NO: 4090508 - DNA, 25 bp, Homo sapien
gaccttggaagaaatcactgtagtg

SEQ ID NO: 4090509 - DNA, 25 bp, Homo sapien
gaagagctgtgactccttctgtttg

SEQ ID NO: 4090510 - DNA, 25 bp, Homo sapien
caaattcataagacttgggccctgc

SEQ ID NO: 4090511 - DNA, 25 bp, Homo sapien
tgagggcctcagacaagtactagac

SEQ ID NO: 4090512 - DNA, 25 bp, Homo sapien
cctagaggagctgattcgataactg

SEQ ID NO: 4090513 - DNA, 25 bp, Homo sapien
aggccgaagcaggtcacgcattcaa

SEQ ID NO: 4090514 - DNA, 25 bp, Homo sapien
ttcctaggctagaaacctggagagc

SEQ ID NO: 4090515 - DNA, 25 bp, Homo sapien
cacgcctggcctataggataattct

SEQ ID NO: 4090516 - DNA, 25 bp, Homo sapien
gaggccagcgcttaacaaatagtaa

SEQ ID NO: 4090517 - DNA, 25 bp, Homo sapien
gcatcgttaggcaatttcaccgtca

SEQ ID NO: 4090518 - DNA, 25 bp, Homo sapien
gaacaagatttccagtccagggctt

SEQ ID NO: 4090519 - DNA, 25 bp, Homo sapien
tgatgcctgactgacgcagacctga

SEQ ID NO: 4090520 - DNA, 25 bp, Homo sapien
caacattacagggtctcatggcatt

SEQ ID NO: 4090521 - DNA, 25 bp, Homo sapien
catggcattttaaccctgggattct

SEQ ID NO: 4090522 - DNA, 25 bp, Homo sapien
tgtgggctgctaggaccaaaaaatt

SEQ ID NO: 4090523 - DNA, 25 bp, Homo sapien
ctcaaaggccatccagggtactggg

SEQ ID NO: 4090524 - DNA, 25 bp, Homo sapien
ggctgctaggaccaaaaaattcctc

SEQ ID NO: 4090525 - DNA, 25 bp, Homo sapien
ggctaagttacagggatcatataca

SEQ ID NO: 4090526 - DNA, 25 bp, Homo sapien
ttttaaatgcggaaaaaatgctcac

SEQ ID NO: 4090527 - DNA, 25 bp, Homo sapien
ttatgcctctctgatacccacagga

SEQ ID NO: 4090528 - DNA, 25 bp, Homo sapien
tcacataagagcttcagcaaaccag

SEQ ID NO: 4090529 - DNA, 25 bp, Homo sapien
ctctgtccaagtgtttagaggctga

SEQ ID NO: 4090530 - DNA, 25 bp, Homo sapien
ttcaacagactggaaactgctactc

SEQ ID NO: 4090531 - DNA, 25 bp, Homo sapien
cacggaagcaaacaacttcaacaga

SEQ ID NO: 4090532 - DNA, 25 bp, Homo sapien
tacggtcacggaagcaaacaacttc

SEQ ID NO: 4090533 - DNA, 25 bp, Homo sapien
ggtcacggaagcaaacaacttcaac

SEQ ID NO: 4090534 - DNA, 25 bp, Homo sapien
tgggctaaatgccatttctggaagc

SEQ ID NO: 4090535 - DNA, 25 bp, Homo sapien
tctggaagcttcacttcgaagatga

SEQ ID NO: 4090536 - DNA, 25 bp, Homo sapien
gatgctgtgggcaacgtctctcgcc

SEQ ID NO: 4090537 - DNA, 25 bp, Homo sapien
ggaagcttcacttcgaagatgatgc

SEQ ID NO: 4090538 - DNA, 25 bp, Homo sapien
taccattaccatggcaactatggga

SEQ ID NO: 4090539 - DNA, 25 bp, Homo sapien
tcaaatggaaatgtacggtgtggtt

SEQ ID NO: 4090540 - DNA, 25 bp, Homo sapien
cattagtggacgacagaaaaccttt

SEQ ID NO: 4090541 - DNA, 25 bp, Homo sapien
tatttacagctaagagggaacatat

SEQ ID NO: 4090542 - DNA, 25 bp, Homo sapien
tccatacattcactgaggttcacca

SEQ ID NO: 4090543 - DNA, 25 bp, Homo sapien
attcactgaggttcaccatccttgg

SEQ ID NO: 4090544 - DNA, 25 bp, Homo sapien
tccttggtcccatgcctcctttctg

SEQ ID NO: 4090545 - DNA, 25 bp, Homo sapien
tacattcactgaggttcaccatcct

SEQ ID NO: 4090546 - DNA, 25 bp, Homo sapien
catcaacgtcctagctacattgcaa

SEQ ID NO: 4090547 - DNA, 25 bp, Homo sapien
acatcagtttgagatttagatccac

SEQ ID NO: 4090548 - DNA, 25 bp, Homo sapien
tttgacagacacaaccttgtccaag

SEQ ID NO: 4090549 - DNA, 25 bp, Homo sapien
tacattgcaacccaaggtgccggct

SEQ ID NO: 4090550 - DNA, 25 bp, Homo sapien
ggaatgctacacagtttaaatggct

SEQ ID NO: 4090551 - DNA, 25 bp, Homo sapien
gaatgctacacagtttaaatggcta

SEQ ID NO: 4090552 - DNA, 25 bp, Homo sapien
aatgctacacagtttaaatggctaa

SEQ ID NO: 4090553 - DNA, 25 bp, Homo sapien
tggaatgctacacagtttaaatggc

SEQ ID NO: 4090554 - DNA, 25 bp, Homo sapien
tgcctcacaggattggagtaggaga

SEQ ID NO: 4090555 - DNA, 25 bp, Homo sapien
tcttcaaactcatagagaggctgcc

SEQ ID NO: 4090556 - DNA, 25 bp, Homo sapien
atattttctggagccggtccgctgc

SEQ ID NO: 4090557 - DNA, 25 bp, Homo sapien
ggagatcttggcattgtccacaaat

SEQ ID NO: 4090558 - DNA, 25 bp, Homo sapien
gagctgtaacatgcgaacgtccgtg

SEQ ID NO: 4090559 - DNA, 25 bp, Homo sapien
taacatgcgaacgtccgtggcttca

SEQ ID NO: 4090560 - DNA, 25 bp, Homo sapien
gcgagactatgaacccaccaaactc

SEQ ID NO: 4090561 - DNA, 25 bp, Homo sapien
gactatgaacccaccaaactccaga

SEQ ID NO: 4090562 - DNA, 25 bp, Homo sapien
tataagcaaatgctctggagacacc

SEQ ID NO: 4090563 - DNA, 25 bp, Homo sapien
tcagggactctagtgaaatggacaa

SEQ ID NO: 4090564 - DNA, 25 bp, Homo sapien
tgagtaagttcagcctagtgacaca

SEQ ID NO: 4090565 - DNA, 25 bp, Homo sapien
gaacctgactcgaagttatgtggct

SEQ ID NO: 4090566 - DNA, 25 bp, Homo sapien
tgaattacaccagtactttgatggg

SEQ ID NO: 4090567 - DNA, 25 bp, Homo sapien
gccccttaaggctggctaaccaata

SEQ ID NO: 4090568 - DNA, 25 bp, Homo sapien
gatgggttgtgtatattatctccta

SEQ ID NO: 4090569 - DNA, 25 bp, Homo sapien
cacacaagtgcctgtcgtggcgtgg

SEQ ID NO: 4090570 - DNA, 25 bp, Homo sapien
tttccaagtcaaatgtcactcgact

SEQ ID NO: 4090571 - DNA, 25 bp, Homo sapien
tttccaggtaaccaaatatctagga

SEQ ID NO: 4090572 - DNA, 25 bp, Homo sapien
caagcactgagattagaatcttgca

SEQ ID NO: 4090573 - DNA, 25 bp, Homo sapien
taccccaaattagataatcttgcat

SEQ ID NO: 4090574 - DNA, 25 bp, Homo sapien
ggcctcataatctgacatcttattg

SEQ ID NO: 4090575 - DNA, 25 bp, Homo sapien
ctgacatcttattgcctcaaatagc

SEQ ID NO: 4090576 - DNA, 25 bp, Homo sapien
cataatctgacatcttattgcctca

SEQ ID NO: 4090577 - DNA, 25 bp, Homo sapien
tgcgcccggcctcataatctgacat

SEQ ID NO: 4090578 - DNA, 25 bp, Homo sapien
tgaagccagggacactgactttcca

SEQ ID NO: 4090579 - DNA, 25 bp, Homo sapien
cagtgttaaacatctccatatggag

SEQ ID NO: 4090580 - DNA, 25 bp, Homo sapien
taacagtgagtcacatatgggtgct

SEQ ID NO: 4090581 - DNA, 25 bp, Homo sapien
tcacggaaaccatgacctcttgggc

SEQ ID NO: 4090582 - DNA, 25 bp, Homo sapien
tcatggctttcgatgagctgctcca

SEQ ID NO: 4090583 - DNA, 25 bp, Homo sapien
caataggaagacgacatcatggctt

SEQ ID NO: 4090584 - DNA, 25 bp, Homo sapien
tcttgcttgcagcaatgacggcagg

SEQ ID NO: 4090585 - DNA, 25 bp, Homo sapien
cactggagaagttcactggatgccc

SEQ ID NO: 4090586 - DNA, 25 bp, Homo sapien
taaccagggatgttggcaaaaagcg

SEQ ID NO: 4090587 - DNA, 25 bp, Homo sapien
tagcagccaagcttgtaaccaggga

SEQ ID NO: 4090588 - DNA, 25 bp, Homo sapien
ggtttcttcagaccatgtctcatga

SEQ ID NO: 4090589 - DNA, 25 bp, Homo sapien
caacaaatgtgtcaaatcccaaagc

SEQ ID NO: 4090590 - DNA, 25 bp, Homo sapien
gtcctggacgactcacagtgcactg

SEQ ID NO: 4090591 - DNA, 25 bp, Homo sapien
agataccatcaattccacggccagg

SEQ ID NO: 4090592 - DNA, 25 bp, Homo sapien
agggctcctgcaatcacggccagtc

SEQ ID NO: 4090593 - DNA, 25 bp, Homo sapien
tctggatgctgcaaaacagatacca

SEQ ID NO: 4090594 - DNA, 25 bp, Homo sapien
ttcatccgatcgtcactgctgctgg

SEQ ID NO: 4090595 - DNA, 25 bp, Homo sapien
tggaggctcattcatccgatcgtca

SEQ ID NO: 4090596 - DNA, 25 bp, Homo sapien
ctggtgaggcacaagcccaagagag

SEQ ID NO: 4090597 - DNA, 25 bp, Homo sapien
aggcacaagcccaagagaggttgga

SEQ ID NO: 4090598 - DNA, 25 bp, Homo sapien
catggttgcataaatggactcactc

SEQ ID NO: 4090599 - DNA, 25 bp, Homo sapien
caaattctgcctgtggacccagaga

SEQ ID NO: 4090600 - DNA, 25 bp, Homo sapien
gaacaactaagtaatcctcaggcct

SEQ ID NO: 4090601 - DNA, 25 bp, Homo sapien
gaaatcatttgtctctaggagccag

SEQ ID NO: 4090602 - DNA, 25 bp, Homo sapien
ctggagatatcaagagtggcctgta

SEQ ID NO: 4090603 - DNA, 25 bp, Homo sapien
caaacatctcccatggtgctgataa

SEQ ID NO: 4090604 - DNA, 25 bp, Homo sapien
tgtgcctcctaccaaagaaccagaa

SEQ ID NO: 4090605 - DNA, 25 bp, Homo sapien
caaagaattagcaggccaacaggct

SEQ ID NO: 4090606 - DNA, 25 bp, Homo sapien
cattatcaaaccgtgaaagaaatcc

SEQ ID NO: 4090607 - DNA, 25 bp, Homo sapien
tttggaagaacaagctgtacatttg

SEQ ID NO: 4090608 - DNA, 25 bp, Homo sapien
catttgtcaaatgccaggctgacgg

SEQ ID NO: 4090609 - DNA, 25 bp, Homo sapien
aggacattatcaaaccgtgaaagaa

SEQ ID NO: 4090610 - DNA, 25 bp, Homo sapien
cccaggtcaagtcgctgggcagcag

SEQ ID NO: 4090611 - DNA, 25 bp, Homo sapien
aaagcccaggtcaagtcgctgggca

SEQ ID NO: 4090612 - DNA, 25 bp, Homo sapien
aagcccaggtcaagtcgctgggcag

SEQ ID NO: 4090613 - DNA, 25 bp, Homo sapien
caggtcaagtcgctgggcagcagaa

SEQ ID NO: 4090614 - DNA, 25 bp, Homo sapien
aatcttccttatcagtcaagtcaaa

SEQ ID NO: 4090615 - DNA, 25 bp, Homo sapien
caatcttccttatcagtcaagtcaa

SEQ ID NO: 4090616 - DNA, 25 bp, Homo sapien
cctctcacctcaaccccctgaagta

SEQ ID NO: 4090617 - DNA, 25 bp, Homo sapien
tcaaccccctgaagtagctggaact

SEQ ID NO: 4090618 - DNA, 25 bp, Homo sapien
ctggggtacagggcacaatcatagc

SEQ ID NO: 4090619 - DNA, 25 bp, Homo sapien
ctacaggcatgcgtctggctaattt

SEQ ID NO: 4090620 - DNA, 25 bp, Homo sapien
tctagtttatacgcttctttgggaa

SEQ ID NO: 4090621 - DNA, 25 bp, Homo sapien
ctctagtttatacgcttctttggga

SEQ ID NO: 4090622 - DNA, 25 bp, Homo sapien
gctctagtttatacgcttctttggg

SEQ ID NO: 4090623 - DNA, 25 bp, Homo sapien
ctgctctagtttatacgcttctttg

SEQ ID NO: 4090624 - DNA, 25 bp, Homo sapien
ttagcattatacttacttgctcttg

SEQ ID NO: 4090625 - DNA, 25 bp, Homo sapien
caaatggattgtggtatagtcatgc

SEQ ID NO: 4090626 - DNA, 25 bp, Homo sapien
cagcagcgctattcatgatagccca

SEQ ID NO: 4090627 - DNA, 25 bp, Homo sapien
atgaaataggcaacatgaatctgtg

SEQ ID NO: 4090628 - DNA, 25 bp, Homo sapien
aaaccattgaggtgaccatcaacag

SEQ ID NO: 4090629 - DNA, 25 bp, Homo sapien
tgcagcaatgtaagaccagtcaagt

SEQ ID NO: 4090630 - DNA, 25 bp, Homo sapien
gaagaattaaacaccttggctagga

SEQ ID NO: 4090631 - DNA, 25 bp, Homo sapien
tggctaggaagttaaatccttctcg

SEQ ID NO: 4090632 - DNA, 25 bp, Homo sapien
tccttctcgttcatattgatcaaga

SEQ ID NO: 4090633 - DNA, 25 bp, Homo sapien
tagctggagtccaatgtctttacca

SEQ ID NO: 4090634 - DNA, 25 bp, Homo sapien
tgatcaaatcgtgaaaaagccaggc

SEQ ID NO: 4090635 - DNA, 25 bp, Homo sapien
tggacagcaacctacacacatcagt

SEQ ID NO: 4090636 - DNA, 25 bp, Homo sapien
caagaggtgcctggaaatctacaac

SEQ ID NO: 4090637 - DNA, 25 bp, Homo sapien
gggattacacgtgcctgccaccatg

SEQ ID NO: 4090638 - DNA, 25 bp, Homo sapien
ctgggattacacgtgcctgccacca

SEQ ID NO: 4090639 - DNA, 25 bp, Homo sapien
cgcaccgtcgcccggactggagtgc

SEQ ID NO: 4090640 - DNA, 25 bp, Homo sapien
gattacacgtgcctgccaccatgcc

SEQ ID NO: 4090641 - DNA, 25 bp, Homo sapien
aaaactcaggctcgtggatgaaacc

SEQ ID NO: 4090642 - DNA, 25 bp, Homo sapien
tacatacctgcaagccgtatctggc

SEQ ID NO: 4090643 - DNA, 25 bp, Homo sapien
taccatcaggcagtacagcattgct

SEQ ID NO: 4090644 - DNA, 25 bp, Homo sapien
ctgggaacccaatcacaattcaggg

SEQ ID NO: 4090645 - DNA, 25 bp, Homo sapien
gcacattgccacaccgggctagatt

SEQ ID NO: 4090646 - DNA, 25 bp, Homo sapien
tataaactttgcttcttggctctag

SEQ ID NO: 4090647 - DNA, 25 bp, Homo sapien
tgcccagcccagagtatttcgtaat

SEQ ID NO: 4090648 - DNA, 25 bp, Homo sapien
gctggaattcagtcgcgcgatttca

SEQ ID NO: 4090649 - DNA, 25 bp, Homo sapien
tgaaaaacaattgcgtaccttgcta

SEQ ID NO: 4090650 - DNA, 25 bp, Homo sapien
tatatttagggagacagaccacagg

SEQ ID NO: 4090651 - DNA, 25 bp, Homo sapien
tgctaaatagaagatgccagacaca

SEQ ID NO: 4090652 - DNA, 25 bp, Homo sapien
aaggatcatttatgtgatgtgtcca

SEQ ID NO: 4090653 - DNA, 25 bp, Homo sapien
caaaaatattccacaggaaccaaat

SEQ ID NO: 4090654 - DNA, 25 bp, Homo sapien
aatattccacaggaaccaaatcaaa

SEQ ID NO: 4090655 - DNA, 25 bp, Homo sapien
tgttgttaaatgcaaaacaaaacaa

SEQ ID NO: 4090656 - DNA, 25 bp, Homo sapien
ctgttgttaaatgcaaaacaaaaca

SEQ ID NO: 4090657 - DNA, 25 bp, Homo sapien
cactcatgagaacactggcggaacc

SEQ ID NO: 4090658 - DNA, 25 bp, Homo sapien
ggctagttcagtccccagagcgatt

SEQ ID NO: 4090659 - DNA, 25 bp, Homo sapien
tcagaggctcttgatgaagctgtac

SEQ ID NO: 4090660 - DNA, 25 bp, Homo sapien
catccgagactcttttccgaagggt

SEQ ID NO: 4090661 - DNA, 25 bp, Homo sapien
cccagttatggccagggtggatttg

SEQ ID NO: 4090662 - DNA, 25 bp, Homo sapien
acccagttatggccagggtggattt

SEQ ID NO: 4090663 - DNA, 25 bp, Homo sapien
ttgaaaaacctctcctacccagcaa

SEQ ID NO: 4090664 - DNA, 25 bp, Homo sapien
ctcacatattagatcttgaaaaacc

SEQ ID NO: 4090665 - DNA, 25 bp, Homo sapien
ccaggtcagataacagtatgccatt

SEQ ID NO: 4090666 - DNA, 25 bp, Homo sapien
tcataactaccaatcagagcttctg

SEQ ID NO: 4090667 - DNA, 25 bp, Homo sapien
gggccaggagtgaacaccttctctt

SEQ ID NO: 4090668 - DNA, 25 bp, Homo sapien
agcacatcaactttgtggagtaggc

SEQ ID NO: 4090669 - DNA, 25 bp, Homo sapien
tcttcaggacccacatcctatgctc

SEQ ID NO: 4090670 - DNA, 25 bp, Homo sapien
tccaggcaagatgaagtgatgcaac

SEQ ID NO: 4090671 - DNA, 25 bp, Homo sapien
actgctttctacaacgatttaacta

SEQ ID NO: 4090672 - DNA, 25 bp, Homo sapien
cgatgagtttgtaaggataaaggcc

SEQ ID NO: 4090673 - DNA, 25 bp, Homo sapien
ctcctcgatgagtttgtaaggataa

SEQ ID NO: 4090674 - DNA, 25 bp, Homo sapien
tgctttctacaacgatttaactaat

SEQ ID NO: 4090675 - DNA, 25 bp, Homo sapien
tgcagtctgctcaagtaccatgatg

SEQ ID NO: 4090676 - DNA, 25 bp, Homo sapien
tggagcatagctggttcaccttgac

SEQ ID NO: 4090677 - DNA, 25 bp, Homo sapien
tacacagaggtagatggacaacacg

SEQ ID NO: 4090678 - DNA, 25 bp, Homo sapien
agtagccccttgactggatttagag

SEQ ID NO: 4090679 - DNA, 25 bp, Homo sapien
ggagttctctcatggacacaacagc

SEQ ID NO: 4090680 - DNA, 25 bp, Homo sapien
ccagtgatacgcttgggccaagggc

SEQ ID NO: 4090681 - DNA, 25 bp, Homo sapien
taatgccgactttcactttgggagg

SEQ ID NO: 4090682 - DNA, 25 bp, Homo sapien
gcagaggccctttataccagtgata

SEQ ID NO: 4090683 - DNA, 25 bp, Homo sapien
caatgcactaggtccggtcctgagg

SEQ ID NO: 4090684 - DNA, 25 bp, Homo sapien
tcatgggccaattccaaaaactagg

SEQ ID NO: 4090685 - DNA, 25 bp, Homo sapien
ccctgatccggaggcaaagaatgca

SEQ ID NO: 4090686 - DNA, 25 bp, Homo sapien
taaaaaccctggataatggctcatg

SEQ ID NO: 4090687 - DNA, 25 bp, Homo sapien
taactagctatggtcacacaatgtg

SEQ ID NO: 4090688 - DNA, 25 bp, Homo sapien
tcaactaggccaaagacagagaatt

SEQ ID NO: 4090689 - DNA, 25 bp, Homo sapien
aatgagagaagtgatcgcctaggcc

SEQ ID NO: 4090690 - DNA, 25 bp, Homo sapien
gatgaatgaaactgtcctacctcag

SEQ ID NO: 4090691 - DNA, 25 bp, Homo sapien
gatgctaatgcatccaacagttgag

SEQ ID NO: 4090692 - DNA, 25 bp, Homo sapien
aaaatttctgagatctgtgaacaca

SEQ ID NO: 4090693 - DNA, 25 bp, Homo sapien
caagctgtcattctgatgctaatgc

SEQ ID NO: 4090694 - DNA, 25 bp, Homo sapien
gaacacaaatgagtgtactacaagc

SEQ ID NO: 4090695 - DNA, 25 bp, Homo sapien
taacattttgcgtacagtccctggg

SEQ ID NO: 4090696 - DNA, 25 bp, Homo sapien
aaatacattaggtccactcagggtc

SEQ ID NO: 4090697 - DNA, 25 bp, Homo sapien
cccacaggcatttagaggaacaggt

SEQ ID NO: 4090698 - DNA, 25 bp, Homo sapien
tgtgtccagccatacctcaaagggc

SEQ ID NO: 4090699 - DNA, 25 bp, Homo sapien
gactgaacgagagtaatacggcaag

SEQ ID NO: 4090700 - DNA, 25 bp, Homo sapien
gcagaacccaagtagcctctatgaa

SEQ ID NO: 4090701 - DNA, 25 bp, Homo sapien
gcctttggaagtccctgagtaacat

SEQ ID NO: 4090702 - DNA, 25 bp, Homo sapien
cgcctggttgctaccatggagggta

SEQ ID NO: 4090703 - DNA, 25 bp, Homo sapien
tattattcctcaccatataagaggg

SEQ ID NO: 4090704 - DNA, 25 bp, Homo sapien
attttatggctaggtcagagggaca

SEQ ID NO: 4090705 - DNA, 25 bp, Homo sapien
caccatataagagggagctgcaaat

SEQ ID NO: 4090706 - DNA, 25 bp, Homo sapien
tattttatggctaggtcagagggac

SEQ ID NO: 4090707 - DNA, 25 bp, Homo sapien
ctcagatgagccttctacttcagcc

SEQ ID NO: 4090708 - DNA, 25 bp, Homo sapien
cctccaagtcctgtgctcagatgag

SEQ ID NO: 4090709 - DNA, 25 bp, Homo sapien
gcaacctccaagtcctgtgctcaga

SEQ ID NO: 4090710 - DNA, 25 bp, Homo sapien
ccaagtcctgtgctcagatgagcct

SEQ ID NO: 4090711 - DNA, 25 bp, Homo sapien
ctggcaggtacaaacatgctccctt

SEQ ID NO: 4090712 - DNA, 25 bp, Homo sapien
gaacaaagcagccaagaatcagatg

SEQ ID NO: 4090713 - DNA, 25 bp, Homo sapien
ttcacagaagtgcttgattcttccg

SEQ ID NO: 4090714 - DNA, 25 bp, Homo sapien
tccagagccgaagatctcaaagatg

SEQ ID NO: 4090715 - DNA, 25 bp, Homo sapien
tgattcttccgtccatttgtttatg

SEQ ID NO: 4090716 - DNA, 25 bp, Homo sapien
acattttattttatcatcattgttc

SEQ ID NO: 4090717 - DNA, 25 bp, Homo sapien
tattttatcatcattgttcatctac

SEQ ID NO: 4090718 - DNA, 25 bp, Homo sapien
ttttattttatcatcattgttcatc

SEQ ID NO: 4090719 - DNA, 25 bp, Homo sapien
cattttattttatcatcattgttca

SEQ ID NO: 4090720 - DNA, 25 bp, Homo sapien
ttccagctgtgtctaacaaacgccc

SEQ ID NO: 4090721 - DNA, 25 bp, Homo sapien
caaacgcccttatcttttgcggcaa

SEQ ID NO: 4090722 - DNA, 25 bp, Homo sapien
caggagggccatcttaactttggaa

SEQ ID NO: 4090723 - DNA, 25 bp, Homo sapien
cattcctgctaacttctatagtgac

SEQ ID NO: 4090724 - DNA, 25 bp, Homo sapien
caagactgtcggtcacaggactcca

SEQ ID NO: 4090725 - DNA, 25 bp, Homo sapien
tcagtcattagctaccaccgatggg

SEQ ID NO: 4090726 - DNA, 25 bp, Homo sapien
agatagagactgctttccactggag

SEQ ID NO: 4090727 - DNA, 25 bp, Homo sapien
cacaggtattacatgggatccaggc

SEQ ID NO: 4090728 - DNA, 25 bp, Homo sapien
ctttaattcaagtttgggcttgcac

SEQ ID NO: 4090729 - DNA, 25 bp, Homo sapien
gccacttaagttacccagagcttaa

SEQ ID NO: 4090730 - DNA, 25 bp, Homo sapien
gctgactgttttgcctttgcacttg

SEQ ID NO: 4090731 - DNA, 25 bp, Homo sapien
tccttgtgtgttcaggtagtactct

SEQ ID NO: 4090732 - DNA, 25 bp, Homo sapien
acccgcgggccccagctgcagatat

SEQ ID NO: 4090733 - DNA, 25 bp, Homo sapien
gcagccgccgctgcccgaccgccgg

SEQ ID NO: 4090734 - DNA, 25 bp, Homo sapien
gccggcgagtgccgcccgggaggca

SEQ ID NO: 4090735 - DNA, 25 bp, Homo sapien
agtctttgccgccgcgccggcgagt

SEQ ID NO: 4090736 - DNA, 25 bp, Homo sapien
tatccacggctgttagaatgatggc

SEQ ID NO: 4090737 - DNA, 25 bp, Homo sapien
tacgtcatagggctaccatgtggaa

SEQ ID NO: 4090738 - DNA, 25 bp, Homo sapien
agcgtgacgcgcctatgaaaatgac

SEQ ID NO: 4090739 - DNA, 25 bp, Homo sapien
tctattgaccaacagcgcagggagt

SEQ ID NO: 4090740 - DNA, 25 bp, Homo sapien
tcccagatagcaggaattgtgtccc

SEQ ID NO: 4090741 - DNA, 25 bp, Homo sapien
gacgagtcaggtccagtcttttcca

SEQ ID NO: 4090742 - DNA, 25 bp, Homo sapien
gcaggtggcccatatagcaagtgaa

SEQ ID NO: 4090743 - DNA, 25 bp, Homo sapien
gaaggctcacgtctacccgacgagt

SEQ ID NO: 4090744 - DNA, 25 bp, Homo sapien
gggtttgagacattacatcctcacc

SEQ ID NO: 4090745 - DNA, 25 bp, Homo sapien
caccactgccatacaactgtgttca

SEQ ID NO: 4090746 - DNA, 25 bp, Homo sapien
tggtgtcctactcgatatgatcaat

SEQ ID NO: 4090747 - DNA, 25 bp, Homo sapien
atattttggcatgggggtttgagac

SEQ ID NO: 4090748 - DNA, 25 bp, Homo sapien
ggcttcccttcgctactgttttgag

SEQ ID NO: 4090749 - DNA, 25 bp, Homo sapien
tctagtcatcctcagtgcttcaggc

SEQ ID NO: 4090750 - DNA, 25 bp, Homo sapien
tcagacacattaggtattcaagcca

SEQ ID NO: 4090751 - DNA, 25 bp, Homo sapien
tccaatggtttgcatagggtgacta

SEQ ID NO: 4090752 - DNA, 25 bp, Homo sapien
ctgctgtgagcccccttacccctgt

SEQ ID NO: 4090753 - DNA, 25 bp, Homo sapien
tgagcccccttacccctgtcatggc

SEQ ID NO: 4090754 - DNA, 25 bp, Homo sapien
gctgtgagcccccttacccctgtca

SEQ ID NO: 4090755 - DNA, 25 bp, Homo sapien
tgtgagcccccttacccctgtcatg

SEQ ID NO: 4090756 - DNA, 25 bp, Homo sapien
tagccaagaggctactaagcacttg

SEQ ID NO: 4090757 - DNA, 25 bp, Homo sapien
gcagctctagactgttacatggaga

SEQ ID NO: 4090758 - DNA, 25 bp, Homo sapien
tccaatacagtaacctctagccaag

SEQ ID NO: 4090759 - DNA, 25 bp, Homo sapien
tgcttagtggccaccgcactggatg

SEQ ID NO: 4090760 - DNA, 25 bp, Homo sapien
tgagtgctggcaccaaacggtacat

SEQ ID NO: 4090761 - DNA, 25 bp, Homo sapien
cggtacatttacaagtggctctcac

SEQ ID NO: 4090762 - DNA, 25 bp, Homo sapien
gaaatcaacttagaaagcttccctg

SEQ ID NO: 4090763 - DNA, 25 bp, Homo sapien
taaataagtatggagcgctggctgc

SEQ ID NO: 4090764 - DNA, 25 bp, Homo sapien
ttctaatttctgcagacaccagctg

SEQ ID NO: 4090765 - DNA, 25 bp, Homo sapien
tccttctaatttctgcagacaccag

SEQ ID NO: 4090766 - DNA, 25 bp, Homo sapien
cttccttctaatttctgcagacacc

SEQ ID NO: 4090767 - DNA, 25 bp, Homo sapien
tctaatttctgcagacaccagctgg

SEQ ID NO: 4090768 - DNA, 25 bp, Homo sapien
cagccgactcctgagtgcaggtggc

SEQ ID NO: 4090769 - DNA, 25 bp, Homo sapien
ggtagagatctatttcaggacaggc

SEQ ID NO: 4090770 - DNA, 25 bp, Homo sapien
gatttcaggcaactctgtgtcaggc

SEQ ID NO: 4090771 - DNA, 25 bp, Homo sapien
gggcagggacaaacttacaaagaca

SEQ ID NO: 4090772 - DNA, 25 bp, Homo sapien
gttcaggaagtgagaaagggcctgg

SEQ ID NO: 4090773 - DNA, 25 bp, Homo sapien
gacccagaggtggaactcggagcct

SEQ ID NO: 4090774 - DNA, 25 bp, Homo sapien
gtggaactcggagcctgacaacagt

SEQ ID NO: 4090775 - DNA, 25 bp, Homo sapien
ttctacttccagtacttggttcagg

SEQ ID NO: 4090776 - DNA, 25 bp, Homo sapien
tagagctggctagcgccatgcactg

SEQ ID NO: 4090777 - DNA, 25 bp, Homo sapien
ccggcagaatcaccatagagctggc

SEQ ID NO: 4090778 - DNA, 25 bp, Homo sapien
cactgactatgactaacatagtgca

SEQ ID NO: 4090779 - DNA, 25 bp, Homo sapien
ggctagcgccatgcactgactatga

SEQ ID NO: 4090780 - DNA, 25 bp, Homo sapien
aatgtatacatgtggccgtgcagcc

SEQ ID NO: 4090781 - DNA, 25 bp, Homo sapien
tagactgtctttagcccagcaagag

SEQ ID NO: 4090782 - DNA, 25 bp, Homo sapien
catcaaggctgagacttcccgtggc

SEQ ID NO: 4090783 - DNA, 25 bp, Homo sapien
caatatacacttgaggctgggcggg

SEQ ID NO: 4090784 - DNA, 25 bp, Homo sapien
tcggctcaggtttttcaatacagtc

SEQ ID NO: 4090785 - DNA, 25 bp, Homo sapien
catctaaactagaccccagggaagc

SEQ ID NO: 4090786 - DNA, 25 bp, Homo sapien
gaccttggcattcagtatcctcaca

SEQ ID NO: 4090787 - DNA, 25 bp, Homo sapien
cctcacagcatggttctaattaact

SEQ ID NO: 4090788 - DNA, 25 bp, Homo sapien
aagtctccctcatgaaaacaagccc

SEQ ID NO: 4090789 - DNA, 25 bp, Homo sapien
tgaagagaccaggacgttgctaacc

SEQ ID NO: 4090790 - DNA, 25 bp, Homo sapien
gcagcttctcttgtgttacggttcc

SEQ ID NO: 4090791 - DNA, 25 bp, Homo sapien
gaagccacgtatctgggaacataaa

SEQ ID NO: 4090792 - DNA, 25 bp, Homo sapien
tcccactgctaccacgatgacgtgt

SEQ ID NO: 4090793 - DNA, 25 bp, Homo sapien
cactgctaccacgatgacgtgtggg

SEQ ID NO: 4090794 - DNA, 25 bp, Homo sapien
ccacgatgacgtgtggggtgtcccc

SEQ ID NO: 4090795 - DNA, 25 bp, Homo sapien
cctcccactgctaccacgatgacgt

SEQ ID NO: 4090796 - DNA, 25 bp, Homo sapien
gaggggctgacgagcacagagccat

SEQ ID NO: 4090797 - DNA, 25 bp, Homo sapien
gggctgacgagcacagagccatctc

SEQ ID NO: 4090798 - DNA, 25 bp, Homo sapien
ggggctgacgagcacagagccatct

SEQ ID NO: 4090799 - DNA, 25 bp, Homo sapien
aggggctgacgagcacagagccatc

SEQ ID NO: 4090800 - DNA, 25 bp, Homo sapien
tcatgctagggtgagtaagaaaagg

SEQ ID NO: 4090801 - DNA, 25 bp, Homo sapien
tgggtcatgctagggtgagtaagaa

SEQ ID NO: 4090802 - DNA, 25 bp, Homo sapien
ggtcatgctagggtgagtaagaaaa

SEQ ID NO: 4090803 - DNA, 25 bp, Homo sapien
agatgggtcatgctagggtgagtaa

SEQ ID NO: 4090804 - DNA, 25 bp, Homo sapien
ttaaatgcagaaggtggcgatgcag

SEQ ID NO: 4090805 - DNA, 25 bp, Homo sapien
agtgcttctcggagtacggccaggc

SEQ ID NO: 4090806 - DNA, 25 bp, Homo sapien
gcttctcggagtacggccaggcagc

SEQ ID NO: 4090807 - DNA, 25 bp, Homo sapien
aaggtggcgatgcagagtgcttctc

SEQ ID NO: 4090808 - DNA, 25 bp, Homo sapien
gacaccttactagctagcatcctgg

SEQ ID NO: 4090809 - DNA, 25 bp, Homo sapien
ttttatgaacggacaggacgttgcc

SEQ ID NO: 4090810 - DNA, 25 bp, Homo sapien
gcaagcaagctaacgtatgggcctg

SEQ ID NO: 4090811 - DNA, 25 bp, Homo sapien
caccccagaggaggtttaccatata

SEQ ID NO: 4090812 - DNA, 25 bp, Homo sapien
tacgaaaccgcagtatgcagtccct

SEQ ID NO: 4090813 - DNA, 25 bp, Homo sapien
catgagcatgtctaacccacagggc

SEQ ID NO: 4090814 - DNA, 25 bp, Homo sapien
tgtcctgctaacagacggcgtgtgg

SEQ ID NO: 4090815 - DNA, 25 bp, Homo sapien
tctgcttttgacaccactagggcca

SEQ ID NO: 4090816 - DNA, 25 bp, Homo sapien
ctgtggcattgggtataaaggaaac

SEQ ID NO: 4090817 - DNA, 25 bp, Homo sapien
ccaattttggatccgggctctacca

SEQ ID NO: 4090818 - DNA, 25 bp, Homo sapien
tgtgggctagctcgtttctcaggac

SEQ ID NO: 4090819 - DNA, 25 bp, Homo sapien
ccatacagaggttatcaaggataca

SEQ ID NO: 4090820 - DNA, 25 bp, Homo sapien
tgccaagagagctatcccttgaagg

SEQ ID NO: 4090821 - DNA, 25 bp, Homo sapien
tacacttaaggaactcagagctcac

SEQ ID NO: 4090822 - DNA, 25 bp, Homo sapien
tctggcaattaggtctggcaaaagg

SEQ ID NO: 4090823 - DNA, 25 bp, Homo sapien
ggagtttcatcacactgaccagggt

SEQ ID NO: 4090824 - DNA, 25 bp, Homo sapien
cctctggaaggcaagctccctgagg

SEQ ID NO: 4090825 - DNA, 25 bp, Homo sapien
caccccaagccagcttgttctcctt

SEQ ID NO: 4090826 - DNA, 25 bp, Homo sapien
agcttgttctccttgtggtccacct

SEQ ID NO: 4090827 - DNA, 25 bp, Homo sapien
ccctctggaaggcaagctccctgag

SEQ ID NO: 4090828 - DNA, 25 bp, Homo sapien
ctcctgcatgtccacctcgggggac

SEQ ID NO: 4090829 - DNA, 25 bp, Homo sapien
ggggaccgtccctgacccagccagc

SEQ ID NO: 4090830 - DNA, 25 bp, Homo sapien
gaccgtccctgacccagccagcctc

SEQ ID NO: 4090831 - DNA, 25 bp, Homo sapien
ctgcatgtccacctcgggggaccgt

SEQ ID NO: 4090832 - DNA, 25 bp, Homo sapien
cagatggtctcatcatcgctcatgt

SEQ ID NO: 4090833 - DNA, 25 bp, Homo sapien
agatggtctcatcatcgctcatgtc

SEQ ID NO: 4090834 - DNA, 25 bp, Homo sapien
gatggtctcatcatcgctcatgtcc

SEQ ID NO: 4090835 - DNA, 25 bp, Homo sapien
tcagatggtctcatcatcgctcatg

SEQ ID NO: 4090836 - DNA, 25 bp, Homo sapien
gggtcagcagtcctgctctggcgat

SEQ ID NO: 4090837 - DNA, 25 bp, Homo sapien
ggggtcagcagtcctgctctggcga

SEQ ID NO: 4090838 - DNA, 25 bp, Homo sapien
gaactggtggtatcttgaatcccga

SEQ ID NO: 4090839 - DNA, 25 bp, Homo sapien
catgtgggccctttagtctcgtacc

SEQ ID NO: 4090840 - DNA, 25 bp, Homo sapien
ggaaatctggcgtcactgggtcatg

SEQ ID NO: 4090841 - DNA, 25 bp, Homo sapien
caagtcccaggtcaatagcaaggcc

SEQ ID NO: 4090842 - DNA, 25 bp, Homo sapien
catgagctgaacgacagccactgga

SEQ ID NO: 4090843 - DNA, 25 bp, Homo sapien
agctgaacgacagccactggaactt

SEQ ID NO: 4090844 - DNA, 25 bp, Homo sapien
agctcccatgagctgaacgacagcc

SEQ ID NO: 4090845 - DNA, 25 bp, Homo sapien
gctcccatgagctgaacgacagcca

SEQ ID NO: 4090846 - DNA, 25 bp, Homo sapien
cgtgtgcagtttcagcgccaggctg

SEQ ID NO: 4090847 - DNA, 25 bp, Homo sapien
tgggtgggcggactcgggccctgca

SEQ ID NO: 4090848 - DNA, 25 bp, Homo sapien
taaagtgctcttaaaccacatagtg

SEQ ID NO: 4090849 - DNA, 25 bp, Homo sapien
taaaccacatagtgtacgtgtgcag

SEQ ID NO: 4090850 - DNA, 25 bp, Homo sapien
tataccattctctgtggcctgtttt

SEQ ID NO: 4090851 - DNA, 25 bp, Homo sapien
tctgtaatataccattctctgtggc

SEQ ID NO: 4090852 - DNA, 25 bp, Homo sapien
taatataccattctctgtggcctgt

SEQ ID NO: 4090853 - DNA, 25 bp, Homo sapien
taaatctgtaatataccattctctg

SEQ ID NO: 4090854 - DNA, 25 bp, Homo sapien
ccaaacatttcactgagaaagcccc

SEQ ID NO: 4090855 - DNA, 25 bp, Homo sapien
aaccaaacatttcactgagaaagcc

SEQ ID NO: 4090856 - DNA, 25 bp, Homo sapien
ccagagccgcgctgcctgcagtgcg

SEQ ID NO: 4090857 - DNA, 25 bp, Homo sapien
ccgcgctgcctgcagtgcgctctga

SEQ ID NO: 4090858 - DNA, 25 bp, Homo sapien
ctgggataggcagtaccctggaggg

SEQ ID NO: 4090859 - DNA, 25 bp, Homo sapien
tcagtgaacaagggcgtcactctgg

SEQ ID NO: 4090860 - DNA, 25 bp, Homo sapien
cagtgaacaagggcgtcactctggg

SEQ ID NO: 4090861 - DNA, 25 bp, Homo sapien
gtgaacaagggcgtcactctgggag

SEQ ID NO: 4090862 - DNA, 25 bp, Homo sapien
gaacaagggcgtcactctgggaggg

SEQ ID NO: 4090863 - DNA, 25 bp, Homo sapien
gattttgagaccatcgttacgctgt

SEQ ID NO: 4090864 - DNA, 25 bp, Homo sapien
tctgcattcatagccacgagtttgt

SEQ ID NO: 4090865 - DNA, 25 bp, Homo sapien
tattgctacaggctactgagcgtcg

SEQ ID NO: 4090866 - DNA, 25 bp, Homo sapien
tgagcgtcgtaacaggaaaaccacc

SEQ ID NO: 4090867 - DNA, 25 bp, Homo sapien
ttagctgttgaattttggaaattgg

SEQ ID NO: 4090868 - DNA, 25 bp, Homo sapien
tgtggactctgcacaccgtatgacc

SEQ ID NO: 4090869 - DNA, 25 bp, Homo sapien
ctgcaaggctttgtggactctgcac

SEQ ID NO: 4090870 - DNA, 25 bp, Homo sapien
attttggaaattggcactgggtgaa

SEQ ID NO: 4090871 - DNA, 25 bp, Homo sapien
tttatacgcttcctcgtacgctggg

SEQ ID NO: 4090872 - DNA, 25 bp, Homo sapien
cctcgcgatgagcagtgggtcagct

SEQ ID NO: 4090873 - DNA, 25 bp, Homo sapien
tttactcacaagtagtgcgggaggc

SEQ ID NO: 4090874 - DNA, 25 bp, Homo sapien
tggtcaatgagcgtttctatcccct

SEQ ID NO: 4090875 - DNA, 25 bp, Homo sapien
tccatagtgctttaaacgtgatgca

SEQ ID NO: 4090876 - DNA, 25 bp, Homo sapien
ggaagtctcatacaggttataggtc

SEQ ID NO: 4090877 - DNA, 25 bp, Homo sapien
gactgcagactctaccaatcacggg

SEQ ID NO: 4090878 - DNA, 25 bp, Homo sapien
gcagtttgttagactagagctgagg

SEQ ID NO: 4090879 - DNA, 25 bp, Homo sapien
gacaactttatgtgttatgccagaa

SEQ ID NO: 4090880 - DNA, 25 bp, Homo sapien
tatacttgaagagaactgtcgtgtc

SEQ ID NO: 4090881 - DNA, 25 bp, Homo sapien
ccacggcgtgtttggttcggtccat

SEQ ID NO: 4090882 - DNA, 25 bp, Homo sapien
tctgatttgcactattggaggagga

SEQ ID NO: 4090883 - DNA, 25 bp, Homo sapien
ggagcctcgggatcccataaacgct

SEQ ID NO: 4090884 - DNA, 25 bp, Homo sapien
ttagtgacagggctcatactggccc

SEQ ID NO: 4090885 - DNA, 25 bp, Homo sapien
cataaacgctcaccatctggaggcc

SEQ ID NO: 4090886 - DNA, 25 bp, Homo sapien
tccgcagcgtaacttccaacagggt

SEQ ID NO: 4090887 - DNA, 25 bp, Homo sapien
ccagctcatgagttacggaaaaagg

SEQ ID NO: 4090888 - DNA, 25 bp, Homo sapien
taatagatgcaacacgtaacgctgc

SEQ ID NO: 4090889 - DNA, 25 bp, Homo sapien
tggattccacgtggcatcgcctggg

SEQ ID NO: 4090890 - DNA, 25 bp, Homo sapien
cttagtgctgttaggaagacgggct

SEQ ID NO: 4090891 - DNA, 25 bp, Homo sapien
gggcagtgccttatgtaccacgact

SEQ ID NO: 4090892 - DNA, 25 bp, Homo sapien
tgccgtgcccctaggacataaggtg

SEQ ID NO: 4090893 - DNA, 25 bp, Homo sapien
gacatgggcagacgcctgaccttta

SEQ ID NO: 4090894 - DNA, 25 bp, Homo sapien
tggatttcctaaggcgcagctgagt

SEQ ID NO: 4090895 - DNA, 25 bp, Homo sapien
catgagggaaagacacggttgtaca

SEQ ID NO: 4090896 - DNA, 25 bp, Homo sapien
taaaggaacgggtacatatgcagtg

SEQ ID NO: 4090897 - DNA, 25 bp, Homo sapien
catgggtagagctccaagaccaaca

SEQ ID NO: 4090898 - DNA, 25 bp, Homo sapien
cgacggatgtgtgcttccggacaca

SEQ ID NO: 4090899 - DNA, 25 bp, Homo sapien
gatgtcaccgaggatacacagcagc

SEQ ID NO: 4090900 - DNA, 25 bp, Homo sapien
aaagatgctcaactgcgctggtaac

SEQ ID NO: 4090901 - DNA, 25 bp, Homo sapien
tggatgacctgcaaatactgacctg

SEQ ID NO: 4090902 - DNA, 25 bp, Homo sapien
tcacattggattagagcacgccctc

SEQ ID NO: 4090903 - DNA, 25 bp, Homo sapien
aaggaagtctgattatttgtctctc

SEQ ID NO: 4090904 - DNA, 25 bp, Homo sapien
aaaggaagtctgattatttgtctct

SEQ ID NO: 4090905 - DNA, 25 bp, Homo sapien
aggaagtctgattatttgtctctca

SEQ ID NO: 4090906 - DNA, 25 bp, Homo sapien
accatgctccggtgtgtggggagga

SEQ ID NO: 4090907 - DNA, 25 bp, Homo sapien
tgaccatgctccggtgtgtggggag

SEQ ID NO: 4090908 - DNA, 25 bp, Homo sapien
attcaggcagttgtgaccatgctcc

SEQ ID NO: 4090909 - DNA, 25 bp, Homo sapien
tggggaggaggagactgccacacac

SEQ ID NO: 4090910 - DNA, 25 bp, Homo sapien
catcctccgatgacttgaaacaatt

SEQ ID NO: 4090911 - DNA, 25 bp, Homo sapien
gattacaacatcattgactccagtg

SEQ ID NO: 4090912 - DNA, 25 bp, Homo sapien
taagtctccgaaatgctcactgttg

SEQ ID NO: 4090913 - DNA, 25 bp, Homo sapien
gctgttaacattagccatcctccga

SEQ ID NO: 4090914 - DNA, 25 bp, Homo sapien
cgtgccttcggagcgtctccacttc

SEQ ID NO: 4090915 - DNA, 25 bp, Homo sapien
ttcggagcgtctccacttctgcagc

SEQ ID NO: 4090916 - DNA, 25 bp, Homo sapien
tgccttcggagcgtctccacttctg

SEQ ID NO: 4090917 - DNA, 25 bp, Homo sapien
ccttcggagcgtctccacttctgca

SEQ ID NO: 4090918 - DNA, 25 bp, Homo sapien
agaataggggatttctggcattcct

SEQ ID NO: 4090919 - DNA, 25 bp, Homo sapien
tgcagcagagaataggggatttctg

SEQ ID NO: 4090920 - DNA, 25 bp, Homo sapien
gtgagactgtagttgcggctgcagc

SEQ ID NO: 4090921 - DNA, 25 bp, Homo sapien
tacagtgcaggagtgagactgtagt

SEQ ID NO: 4090922 - DNA, 25 bp, Homo sapien
gagtcctaagagaaaagcctctcac

SEQ ID NO: 4090923 - DNA, 25 bp, Homo sapien
gcagcctgagtcctaagagaaaagc

SEQ ID NO: 4090924 - DNA, 25 bp, Homo sapien
gcctgagtcctaagagaaaagcctc

SEQ ID NO: 4090925 - DNA, 25 bp, Homo sapien
gttcaccaagacaaacctaggatgg

SEQ ID NO: 4090926 - DNA, 25 bp, Homo sapien
tgcttcacttctccgggctacttga

SEQ ID NO: 4090927 - DNA, 25 bp, Homo sapien
gctggcgtatggctaagacatctgc

SEQ ID NO: 4090928 - DNA, 25 bp, Homo sapien
gctacttgatgctggcgtatggcta

SEQ ID NO: 4090929 - DNA, 25 bp, Homo sapien
tctgcagacttagcaacttcttgca

SEQ ID NO: 4090930 - DNA, 25 bp, Homo sapien
gaaagttacactcctgagatttgga

SEQ ID NO: 4090931 - DNA, 25 bp, Homo sapien
tagacagtgattctgtcagggcagg

SEQ ID NO: 4090932 - DNA, 25 bp, Homo sapien
cagatgtttcctgtggcttgacaga

SEQ ID NO: 4090933 - DNA, 25 bp, Homo sapien
tactctgataaataccgtggtgctt

SEQ ID NO: 4090934 - DNA, 25 bp, Homo sapien
tcacactgggatcaaagccatggtc

SEQ ID NO: 4090935 - DNA, 25 bp, Homo sapien
aagtgtttgctggagcccgatgtcc

SEQ ID NO: 4090936 - DNA, 25 bp, Homo sapien
gacccactgagcaacccataatgaa

SEQ ID NO: 4090937 - DNA, 25 bp, Homo sapien
tcctggtgtgagatgggccccttgt

SEQ ID NO: 4090938 - DNA, 25 bp, Homo sapien
gctgtagtggttgttttccatagca

SEQ ID NO: 4090939 - DNA, 25 bp, Homo sapien
aactcttgttgctacacagctggca

SEQ ID NO: 4090940 - DNA, 25 bp, Homo sapien
cgcatcctgccaggggtgttgagaa

SEQ ID NO: 4090941 - DNA, 25 bp, Homo sapien
gcatctgatgaaatgatgaccacag

SEQ ID NO: 4090942 - DNA, 25 bp, Homo sapien
tgaatcagtatcttactccttttta

SEQ ID NO: 4090943 - DNA, 25 bp, Homo sapien
tactgttttgtaggttcatctgtgt

SEQ ID NO: 4090944 - DNA, 25 bp, Homo sapien
gttttgtaggttcatctgtgtcatg

SEQ ID NO: 4090945 - DNA, 25 bp, Homo sapien
actcagcatactgttttgtaggttc

SEQ ID NO: 4090946 - DNA, 25 bp, Homo sapien
gggccgcccagagcattatagtatg

SEQ ID NO: 4090947 - DNA, 25 bp, Homo sapien
tatctgccggctcgcattgcaatgg

SEQ ID NO: 4090948 - DNA, 25 bp, Homo sapien
tctgcacgattagagctgagcctgg

SEQ ID NO: 4090949 - DNA, 25 bp, Homo sapien
gattgcaggcgatccttgcgcttgg

SEQ ID NO: 4090950 - DNA, 25 bp, Homo sapien
tctggaagcggcatctgtacgttca

SEQ ID NO: 4090951 - DNA, 25 bp, Homo sapien
ggcagatgatcaccaagtcagaggg

SEQ ID NO: 4090952 - DNA, 25 bp, Homo sapien
tcgaggttcctctggctagtgcagg

SEQ ID NO: 4090953 - DNA, 25 bp, Homo sapien
tcagtacgacatgtctgggagcagg

SEQ ID NO: 4090954 - DNA, 25 bp, Homo sapien
ggtcttccttcctgactgactccat

SEQ ID NO: 4090955 - DNA, 25 bp, Homo sapien
tgccctccaccatagttgtctgcaa

SEQ ID NO: 4090956 - DNA, 25 bp, Homo sapien
cttgtagcatacaaggtcttccttc

SEQ ID NO: 4090957 - DNA, 25 bp, Homo sapien
ccctccaccatagttgtctgcaaga

SEQ ID NO: 4090958 - DNA, 25 bp, Homo sapien
tcagcgagcacaggcgggctctttg

SEQ ID NO: 4090959 - DNA, 25 bp, Homo sapien
tgctcgcgagtgagcgtcccaaaca

SEQ ID NO: 4090960 - DNA, 25 bp, Homo sapien
tcccaaacagcggagaatgtccctc

SEQ ID NO: 4090961 - DNA, 25 bp, Homo sapien
gtgggagcgattacacaacaccccg

SEQ ID NO: 4090962 - DNA, 25 bp, Homo sapien
gatctcatgtatactggatgttacg

SEQ ID NO: 4090963 - DNA, 25 bp, Homo sapien
cagtaagagtactccaaaactatca

SEQ ID NO: 4090964 - DNA, 25 bp, Homo sapien
tgtaaaaacgtagcacagtaagagt

SEQ ID NO: 4090965 - DNA, 25 bp, Homo sapien
ctgggactttagaagctactgctgc

SEQ ID NO: 4090966 - DNA, 25 bp, Homo sapien
cagatacgttgagggcttagccaca

SEQ ID NO: 4090967 - DNA, 25 bp, Homo sapien
tatttgggaagcactccctgtgtgg

SEQ ID NO: 4090968 - DNA, 25 bp, Homo sapien
ccctgtgtggtgaatggacctcgtc

SEQ ID NO: 4090969 - DNA, 25 bp, Homo sapien
ttctgcaaagatccccagctcaggt

SEQ ID NO: 4090970 - DNA, 25 bp, Homo sapien
tctggaatgtgtcctccatatattt

SEQ ID NO: 4090971 - DNA, 25 bp, Homo sapien
tgctccttcttgagccaatcactgg

SEQ ID NO: 4090972 - DNA, 25 bp, Homo sapien
tttagtgcggcatccgtttccggga

SEQ ID NO: 4090973 - DNA, 25 bp, Homo sapien
ccgggattgcctcactcttcttgaa

SEQ ID NO: 4090974 - DNA, 25 bp, Homo sapien
tggcgacataatgttagccagggag

SEQ ID NO: 4090975 - DNA, 25 bp, Homo sapien
gaaagtctgcagctaatgtctgtga

SEQ ID NO: 4090976 - DNA, 25 bp, Homo sapien
gacttccaccgtggtagcagctggc

SEQ ID NO: 4090977 - DNA, 25 bp, Homo sapien
ccgtggtagcagctggcgacataat

SEQ ID NO: 4090978 - DNA, 25 bp, Homo sapien
tggccattggattgtgcctactgca

SEQ ID NO: 4090979 - DNA, 25 bp, Homo sapien
ttctcagtccctctagtggaggcag

SEQ ID NO: 4090980 - DNA, 25 bp, Homo sapien
tattacatggcactcctagttagga

SEQ ID NO: 4090981 - DNA, 25 bp, Homo sapien
cattggccagatccgtattacatgg

SEQ ID NO: 4090982 - DNA, 25 bp, Homo sapien
gaaaaagcaactattatattgggca

SEQ ID NO: 4090983 - DNA, 25 bp, Homo sapien
ggcactcagtaaaccccttcaatct

SEQ ID NO: 4090984 - DNA, 25 bp, Homo sapien
gcaactattatattgggcactcagt

SEQ ID NO: 4090985 - DNA, 25 bp, Homo sapien
attttgtatctgctggtgtgtgacc

SEQ ID NO: 4090986 - DNA, 25 bp, Homo sapien
gcacccaccaccacacccggctaat

SEQ ID NO: 4090987 - DNA, 25 bp, Homo sapien
ccaggctggaatgctggaatgcagt

SEQ ID NO: 4090988 - DNA, 25 bp, Homo sapien
cacccaccaccacacccggctaatt

SEQ ID NO: 4090989 - DNA, 25 bp, Homo sapien
cccaggctggaatgctggaatgcag

SEQ ID NO: 4090990 - DNA, 25 bp, Homo sapien
catgccacaaaatagttacagttgt

SEQ ID NO: 4090991 - DNA, 25 bp, Homo sapien
taactcagatcaatagcctataggt

SEQ ID NO: 4090992 - DNA, 25 bp, Homo sapien
tcctaattctaggaagattgctgaa

SEQ ID NO: 4090993 - DNA, 25 bp, Homo sapien
cacctgtattggatattggcctttc

SEQ ID NO: 4090994 - DNA, 25 bp, Homo sapien
gtgagtgtcggcagctgtggacagt

SEQ ID NO: 4090995 - DNA, 25 bp, Homo sapien
cagctgtggacagtcgagtgcttca

SEQ ID NO: 4090996 - DNA, 25 bp, Homo sapien
gtcgagtgcttcaggcaccacaggg

SEQ ID NO: 4090997 - DNA, 25 bp, Homo sapien
ggacagtcgagtgcttcaggcacca

SEQ ID NO: 4090998 - DNA, 25 bp, Homo sapien
gagctgtcagccatcctgtgtcggg

SEQ ID NO: 4090999 - DNA, 25 bp, Homo sapien
tcctgtgtcggggatgtcttctgag

SEQ ID NO: 4091000 - DNA, 25 bp, Homo sapien
cagagctgtcagccatcctgtgtcg

SEQ ID NO: 4091001 - DNA, 25 bp, Homo sapien
ctgtgtcggggatgtcttctgagct

SEQ ID NO: 4091002 - DNA, 25 bp, Homo sapien
catgttagccgggatggggtttcac

SEQ ID NO: 4091003 - DNA, 25 bp, Homo sapien
ttttgagatggagcccaggctaggg

SEQ ID NO: 4091004 - DNA, 25 bp, Homo sapien
tcagctcattgcagcttcagcttcc

SEQ ID NO: 4091005 - DNA, 25 bp, Homo sapien
ctcattgcagcttcagcttcctggg

SEQ ID NO: 4091006 - DNA, 25 bp, Homo sapien
ttggactgtgaacgtcggcgtcccg

SEQ ID NO: 4091007 - DNA, 25 bp, Homo sapien
gagatgccgtgtccacagcagtgtg

SEQ ID NO: 4091008 - DNA, 25 bp, Homo sapien
tgtttgtacatttgcacggcgctgt

SEQ ID NO: 4091009 - DNA, 25 bp, Homo sapien
aggttcggctgaactccgggcgctt

SEQ ID NO: 4091010 - DNA, 25 bp, Homo sapien
cttcaggtgcgtggccgtcggccgt

SEQ ID NO: 4091011 - DNA, 25 bp, Homo sapien
ctgtcccttcaggtgcgtggccgtc

SEQ ID NO: 4091012 - DNA, 25 bp, Homo sapien
aggtgcgtggccgtcggccgtcggg

SEQ ID NO: 4091013 - DNA, 25 bp, Homo sapien
cccttcaggtgcgtggccgtcggcc

SEQ ID NO: 4091014 - DNA, 25 bp, Homo sapien
cgtgtgcgagtgtgaagtgcagcgc

SEQ ID NO: 4091015 - DNA, 25 bp, Homo sapien
gccgagcgcctggagttgtgcgcgt

SEQ ID NO: 4091016 - DNA, 25 bp, Homo sapien
taatgggaggaaacccagcggcgtc

SEQ ID NO: 4091017 - DNA, 25 bp, Homo sapien
tgcaacatgctgtaatgggaggaaa

SEQ ID NO: 4091018 - DNA, 25 bp, Homo sapien
atcgtggaccccatccagttgggtc

SEQ ID NO: 4091019 - DNA, 25 bp, Homo sapien
aatgggcccatcgtggaccccatcc

SEQ ID NO: 4091020 - DNA, 25 bp, Homo sapien
gggcccatcgtggaccccatccagt

SEQ ID NO: 4091021 - DNA, 25 bp, Homo sapien
ccatcgtggaccccatccagttggg

SEQ ID NO: 4091022 - DNA, 25 bp, Homo sapien
agctcttcgactaatcgccagaggg

SEQ ID NO: 4091023 - DNA, 25 bp, Homo sapien
cacagctcttcgactaatcgccaga

SEQ ID NO: 4091024 - DNA, 25 bp, Homo sapien
ctaatcgccagaggggcatgaagct

SEQ ID NO: 4091025 - DNA, 25 bp, Homo sapien
tcacagctcttcgactaatcgccag

SEQ ID NO: 4091026 - DNA, 25 bp, Homo sapien
cacagtgcaaccccaggattcacat

SEQ ID NO: 4091027 - DNA, 25 bp, Homo sapien
cagtgcaaccccaggattcacataa

SEQ ID NO: 4091028 - DNA, 25 bp, Homo sapien
acagtgcaaccccaggattcacata

SEQ ID NO: 4091029 - DNA, 25 bp, Homo sapien
tcacagtgcaaccccaggattcaca

SEQ ID NO: 4091030 - DNA, 25 bp, Homo sapien
ttgcaagatggccacagcatgccca

SEQ ID NO: 4091031 - DNA, 25 bp, Homo sapien
tatccttaagttcactgcatggttg

SEQ ID NO: 4091032 - DNA, 25 bp, Homo sapien
gcccttaacgcatcttctatcctta

SEQ ID NO: 4091033 - DNA, 25 bp, Homo sapien
ccactcactgtaaggaggcaggagg

SEQ ID NO: 4091034 - DNA, 25 bp, Homo sapien
aatgtttaagatccaggaactgctt

SEQ ID NO: 4091035 - DNA, 25 bp, Homo sapien
cttaaatgtttaagatccaggaact

SEQ ID NO: 4091036 - DNA, 25 bp, Homo sapien
taaatgtttaagatccaggaactgc

SEQ ID NO: 4091037 - DNA, 25 bp, Homo sapien
gttgagctgggaattatcatggccc

SEQ ID NO: 4091038 - DNA, 25 bp, Homo sapien
taacttcgctgtaggtcatgtgaaa

SEQ ID NO: 4091039 - DNA, 25 bp, Homo sapien
gtgtgtattaacttcgctgtaggtc

SEQ ID NO: 4091040 - DNA, 25 bp, Homo sapien
tattaacttcgctgtaggtcatgtg

SEQ ID NO: 4091041 - DNA, 25 bp, Homo sapien
ttcgctgtaggtcatgtgaaacaag

SEQ ID NO: 4091042 - DNA, 25 bp, Homo sapien
tgttttggggatactaattttatca

SEQ ID NO: 4091043 - DNA, 25 bp, Homo sapien
ctggaaggatgttttggggatacta

SEQ ID NO: 4091044 - DNA, 25 bp, Homo sapien
tggaaggatgttttggggatactaa

SEQ ID NO: 4091045 - DNA, 25 bp, Homo sapien
agagattttctttgtcgatatatct

SEQ ID NO: 4091046 - DNA, 25 bp, Homo sapien
ttctttgtcgatatatctgcttatg

SEQ ID NO: 4091047 - DNA, 25 bp, Homo sapien
agattttctttgtcgatatatctgc

SEQ ID NO: 4091048 - DNA, 25 bp, Homo sapien
ttgtcgatatatctgcttatggttg

SEQ ID NO: 4091049 - DNA, 25 bp, Homo sapien
catatgaaatgcgagaatacccacc

SEQ ID NO: 4091050 - DNA, 25 bp, Homo sapien
cagttccgtgctgcatacgttccca

SEQ ID NO: 4091051 - DNA, 25 bp, Homo sapien
tgccacatttggttcaggttgaggt

SEQ ID NO: 4091052 - DNA, 25 bp, Homo sapien
tcagccctgcttaccagaggcagct

SEQ ID NO: 4091053 - DNA, 25 bp, Homo sapien
ggtatagatctggtttatactctcc

SEQ ID NO: 4091054 - DNA, 25 bp, Homo sapien
gtatagatctggtttatactctcca

SEQ ID NO: 4091055 - DNA, 25 bp, Homo sapien
tatagatctggtttatactctccat

SEQ ID NO: 4091056 - DNA, 25 bp, Homo sapien
ggagactaatacagctctgatgctg

SEQ ID NO: 4091057 - DNA, 25 bp, Homo sapien
gaggagactaatacagctctgatgc

SEQ ID NO: 4091058 - DNA, 25 bp, Homo sapien
aggagactaatacagctctgatgct

SEQ ID NO: 4091059 - DNA, 25 bp, Homo sapien
acactgaggcagtgttttcaattgc

SEQ ID NO: 4091060 - DNA, 25 bp, Homo sapien
gttcagacactgaggcagtgttttc

SEQ ID NO: 4091061 - DNA, 25 bp, Homo sapien
cgtgttcagacactgaggcagtgtt

SEQ ID NO: 4091062 - DNA, 25 bp, Homo sapien
ctcgtgttcagacactgaggcagtg

SEQ ID NO: 4091063 - DNA, 25 bp, Homo sapien
catctaaggcagtatcaacttcagc

SEQ ID NO: 4091064 - DNA, 25 bp, Homo sapien
tctagaaggacatctaaggcagtat

SEQ ID NO: 4091065 - DNA, 25 bp, Homo sapien
gggtcactaaggcaccaaccacttc

SEQ ID NO: 4091066 - DNA, 25 bp, Homo sapien
taccaactctagaaggacatctaag

SEQ ID NO: 4091067 - DNA, 25 bp, Homo sapien
ctttacaaagacagcattcatcatc

SEQ ID NO: 4091068 - DNA, 25 bp, Homo sapien
agacagcattcatcatcatagcaga

SEQ ID NO: 4091069 - DNA, 25 bp, Homo sapien
gcattcatcatcatagcagatggat

SEQ ID NO: 4091070 - DNA, 25 bp, Homo sapien
aaagacagcattcatcatcatagca

SEQ ID NO: 4091071 - DNA, 25 bp, Homo sapien
gaagagttttcgtatttgctgaggg

SEQ ID NO: 4091072 - DNA, 25 bp, Homo sapien
gtccagtatgaattactgccataag

SEQ ID NO: 4091073 - DNA, 25 bp, Homo sapien
cagtatgaattactgccataaggta

SEQ ID NO: 4091074 - DNA, 25 bp, Homo sapien
cagtccagtatgaattactgccata

SEQ ID NO: 4091075 - DNA, 25 bp, Homo sapien
cacagtccagtatgaattactgcca

SEQ ID NO: 4091076 - DNA, 25 bp, Homo sapien
cccaatgagtttgtacttgaatatg

SEQ ID NO: 4091077 - DNA, 25 bp, Homo sapien
cagccatggtgacagcaccaaaaat

SEQ ID NO: 4091078 - DNA, 25 bp, Homo sapien
gctttcttatcaccaagtgcatgtc

SEQ ID NO: 4091079 - DNA, 25 bp, Homo sapien
ctgtctgccaccatgatgccagcca

SEQ ID NO: 4091080 - DNA, 25 bp, Homo sapien
atcactcaggttggctacctcttgg

SEQ ID NO: 4091081 - DNA, 25 bp, Homo sapien
gaaccaactgcaacaaggaggtcac

SEQ ID NO: 4091082 - DNA, 25 bp, Homo sapien
atgaaccaactgcaacaaggaggtc

SEQ ID NO: 4091083 - DNA, 25 bp, Homo sapien
aatgaaccaactgcaacaaggaggt

SEQ ID NO: 4091084 - DNA, 25 bp, Homo sapien
tgaaccaactgcaacaaggaggtca

SEQ ID NO: 4091085 - DNA, 25 bp, Homo sapien
gatccagcttttcatgttggatcag

SEQ ID NO: 4091086 - DNA, 25 bp, Homo sapien
atccagcttttcatgttggatcagg

SEQ ID NO: 4091087 - DNA, 25 bp, Homo sapien
tcatcatagtaaagtgcagaggcct

SEQ ID NO: 4091088 - DNA, 25 bp, Homo sapien
ggatccagcttttcatgttggatca

SEQ ID NO: 4091089 - DNA, 25 bp, Homo sapien
ccttccggaacaacacaggagtcca

SEQ ID NO: 4091090 - DNA, 25 bp, Homo sapien
tacagatggtatgcccaacccattc

SEQ ID NO: 4091091 - DNA, 25 bp, Homo sapien
gagtccactacgaaggcatcctgga

SEQ ID NO: 4091092 - DNA, 25 bp, Homo sapien
tcctggaaatcattacagatggtat

SEQ ID NO: 4091093 - DNA, 25 bp, Homo sapien
tattcttccagtccgtacagtgctt

SEQ ID NO: 4091094 - DNA, 25 bp, Homo sapien
atcccatcctgagtgtcgtattctt

SEQ ID NO: 4091095 - DNA, 25 bp, Homo sapien
tacagtgctttcacaggaaatggaa

SEQ ID NO: 4091096 - DNA, 25 bp, Homo sapien
tgctttcacaggaaatggaaagtca

SEQ ID NO: 4091097 - DNA, 25 bp, Homo sapien
tttggcctgattcctgtgaggtcac

SEQ ID NO: 4091098 - DNA, 25 bp, Homo sapien
ttttggcctgattcctgtgaggtca

SEQ ID NO: 4091099 - DNA, 25 bp, Homo sapien
taactggaaatacggagccaggcac

SEQ ID NO: 4091100 - DNA, 25 bp, Homo sapien
tagtagactgtcaatctcctccaag

SEQ ID NO: 4091101 - DNA, 25 bp, Homo sapien
tcctccaagtttccattatgctgtc

SEQ ID NO: 4091102 - DNA, 25 bp, Homo sapien
gtctctccacataaagtctcagtaa

SEQ ID NO: 4091103 - DNA, 25 bp, Homo sapien
aacacatgaatgaacgctctttagc

SEQ ID NO: 4091104 - DNA, 25 bp, Homo sapien
ggctccaggtcagttaggaatatag

SEQ ID NO: 4091105 - DNA, 25 bp, Homo sapien
tgaatgaacgctctttagcagacat

SEQ ID NO: 4091106 - DNA, 25 bp, Homo sapien
ccaggtcagttaggaatataggaca

SEQ ID NO: 4091107 - DNA, 25 bp, Homo sapien
ttccccttcatctcaggtgatgttt

SEQ ID NO: 4091108 - DNA, 25 bp, Homo sapien
tccccttcatctcaggtgatgtttc

SEQ ID NO: 4091109 - DNA, 25 bp, Homo sapien
cttccccttcatctcaggtgatgtt

SEQ ID NO: 4091110 - DNA, 25 bp, Homo sapien
tgctgaaatagcagtaacagtatga

SEQ ID NO: 4091111 - DNA, 25 bp, Homo sapien
aaagctgctcaagggatcccgtgag

SEQ ID NO: 4091112 - DNA, 25 bp, Homo sapien
ggaaagctgctcaagggatcccgtg

SEQ ID NO: 4091113 - DNA, 25 bp, Homo sapien
cagcaggaaagctgctcaagggatc

SEQ ID NO: 4091114 - DNA, 25 bp, Homo sapien
caggaaagctgctcaagggatcccg

SEQ ID NO: 4091115 - DNA, 25 bp, Homo sapien
gagcactgctgctcgtccaggccca

SEQ ID NO: 4091116 - DNA, 25 bp, Homo sapien
atgctggccacctccggccgggtgg

SEQ ID NO: 4091117 - DNA, 25 bp, Homo sapien
tggccacctccggccgggtggacaa

SEQ ID NO: 4091118 - DNA, 25 bp, Homo sapien
cactgctgctcgtccaggcccagcg

SEQ ID NO: 4091119 - DNA, 25 bp, Homo sapien
ccggggatgaggtccacggtggcgt

SEQ ID NO: 4091120 - DNA, 25 bp, Homo sapien
ggggatgaggtccacggtggcgtca

SEQ ID NO: 4091121 - DNA, 25 bp, Homo sapien
ccacggtggcgtcacagtgcaggac

SEQ ID NO: 4091122 - DNA, 25 bp, Homo sapien
acggtggcgtcacagtgcaggacct

SEQ ID NO: 4091123 - DNA, 25 bp, Homo sapien
gcagggttggatgccagaggagtgg

SEQ ID NO: 4091124 - DNA, 25 bp, Homo sapien
tcagaggagagggacaatccagcat

SEQ ID NO: 4091125 - DNA, 25 bp, Homo sapien
aagctgccctctaggggacctgcag

SEQ ID NO: 4091126 - DNA, 25 bp, Homo sapien
ccaggttcagaggagagggacaatc

SEQ ID NO: 4091127 - DNA, 25 bp, Homo sapien
cttgacaagccacagtagaaaatgt

SEQ ID NO: 4091128 - DNA, 25 bp, Homo sapien
ttgacaagccacagtagaaaatgtc

SEQ ID NO: 4091129 - DNA, 25 bp, Homo sapien
cctgcgtgggctctggggaaatcaa

SEQ ID NO: 4091130 - DNA, 25 bp, Homo sapien
caaggagtttgccttcccaggcctg

SEQ ID NO: 4091131 - DNA, 25 bp, Homo sapien
ggaaatcaaggcaaggagtttgcct

SEQ ID NO: 4091132 - DNA, 25 bp, Homo sapien
ctggggaaatcaaggcaaggagttt

SEQ ID NO: 4091133 - DNA, 25 bp, Homo sapien
catggataggttctcggcctggaat

SEQ ID NO: 4091134 - DNA, 25 bp, Homo sapien
aaataatgtaggaggccatgggaaa

SEQ ID NO: 4091135 - DNA, 25 bp, Homo sapien
tgtggtctgatagtaaactgcttct

SEQ ID NO: 4091136 - DNA, 25 bp, Homo sapien
ctcatcacttcttctagtgctgtct

SEQ ID NO: 4091137 - DNA, 25 bp, Homo sapien
ggcttgattaaagctctctggcttc

SEQ ID NO: 4091138 - DNA, 25 bp, Homo sapien
cttcaatggatagggaaaaacagtt

SEQ ID NO: 4091139 - DNA, 25 bp, Homo sapien
actgggggggcttgattaaagctct

SEQ ID NO: 4091140 - DNA, 25 bp, Homo sapien
atgctatgagtccacttcagtggga

SEQ ID NO: 4091141 - DNA, 25 bp, Homo sapien
ccagcttgaatgacgctggcgtcct

SEQ ID NO: 4091142 - DNA, 25 bp, Homo sapien
tgcccagcttgaatgacgctggcgt

SEQ ID NO: 4091143 - DNA, 25 bp, Homo sapien
ttgaatgacgctggcgtcctgggat

SEQ ID NO: 4091144 - DNA, 25 bp, Homo sapien
agcctgcccagcttgaatgacgctg

SEQ ID NO: 4091145 - DNA, 25 bp, Homo sapien
tcttcagccatgcaactatgttggg

SEQ ID NO: 4091146 - DNA, 25 bp, Homo sapien
tgcaactatgttggggtcatctagt

SEQ ID NO: 4091147 - DNA, 25 bp, Homo sapien
tttgtcttcagccatgcaactatgt

SEQ ID NO: 4091148 - DNA, 25 bp, Homo sapien
tgatttttgtcttcagccatgcaac

SEQ ID NO: 4091149 - DNA, 25 bp, Homo sapien
tgtgtgaaatttatttgctatggct

SEQ ID NO: 4091150 - DNA, 25 bp, Homo sapien
tgtgaaatttatttgctatggctgt

SEQ ID NO: 4091151 - DNA, 25 bp, Homo sapien
ctgtgtgaaatttatttgctatggc

SEQ ID NO: 4091152 - DNA, 25 bp, Homo sapien
gtgtgaaatttatttgctatggctg

SEQ ID NO: 4091153 - DNA, 25 bp, Homo sapien
ataatttccaggttcaggtctctct

SEQ ID NO: 4091154 - DNA, 25 bp, Homo sapien
gaatgtggtacggaagctgaagtct

SEQ ID NO: 4091155 - DNA, 25 bp, Homo sapien
gggtaggtgccacaaagggctatca

SEQ ID NO: 4091156 - DNA, 25 bp, Homo sapien
tgatataacattactccgaggctcc

SEQ ID NO: 4091157 - DNA, 25 bp, Homo sapien
tcacactggggggcctgattgaagc

SEQ ID NO: 4091158 - DNA, 25 bp, Homo sapien
ggcctgattgaagctctctggcttt

SEQ ID NO: 4091159 - DNA, 25 bp, Homo sapien
ggagagagaggccacaggatcacac

SEQ ID NO: 4091160 - DNA, 25 bp, Homo sapien
ctctggctttctctgcaggccggca

SEQ ID NO: 4091161 - DNA, 25 bp, Homo sapien
cacagggtcacgctgaagggcttgt

SEQ ID NO: 4091162 - DNA, 25 bp, Homo sapien
cagggatatttctgggtctccacta

SEQ ID NO: 4091163 - DNA, 25 bp, Homo sapien
accactgctgcggtactctgggtgg

SEQ ID NO: 4091164 - DNA, 25 bp, Homo sapien
aggccacagggtcacgctgaagggc

SEQ ID NO: 4091165 - DNA, 25 bp, Homo sapien
acagggttatgctagggagcttgtt

SEQ ID NO: 4091166 - DNA, 25 bp, Homo sapien
aaggccacagggttatgctagggag

SEQ ID NO: 4091167 - DNA, 25 bp, Homo sapien
gccacagggttatgctagggagctt

SEQ ID NO: 4091168 - DNA, 25 bp, Homo sapien
aaaggccacagggttatgctaggga

SEQ ID NO: 4091169 - DNA, 25 bp, Homo sapien
cagagtgtcatactggaaggattgg

SEQ ID NO: 4091170 - DNA, 25 bp, Homo sapien
ccagagtgtcatactggaaggattg

SEQ ID NO: 4091171 - DNA, 25 bp, Homo sapien
cttgctgagccaaggatgtttctgc

SEQ ID NO: 4091172 - DNA, 25 bp, Homo sapien
gtggagggggaagccacagagtcac

SEQ ID NO: 4091173 - DNA, 25 bp, Homo sapien
tcagggtggagggggaagccacaga

SEQ ID NO: 4091174 - DNA, 25 bp, Homo sapien
gggtggagggggaagccacagagtc

SEQ ID NO: 4091175 - DNA, 25 bp, Homo sapien
cagggtggagggggaagccacagag

SEQ ID NO: 4091176 - DNA, 25 bp, Homo sapien
tgtttctgggtctgcacaactgctg

SEQ ID NO: 4091177 - DNA, 25 bp, Homo sapien
agagatgtttctgggtctgcacaac

SEQ ID NO: 4091178 - DNA, 25 bp, Homo sapien
ctggggggcttgtttagccagagat

SEQ ID NO: 4091179 - DNA, 25 bp, Homo sapien
tgggtctgcacaactgctgctggtg

SEQ ID NO: 4091180 - DNA, 25 bp, Homo sapien
gctgcccagcttggaagacactggc

SEQ ID NO: 4091181 - DNA, 25 bp, Homo sapien
gaaacgtttctgtgtctctaccact

SEQ ID NO: 4091182 - DNA, 25 bp, Homo sapien
aaaggcatatcctggcagctctgca

SEQ ID NO: 4091183 - DNA, 25 bp, Homo sapien
cttggatgacgtcatagcctcggct

SEQ ID NO: 4091184 - DNA, 25 bp, Homo sapien
caggctccaacgttgctgggcacgt

SEQ ID NO: 4091185 - DNA, 25 bp, Homo sapien
gctccaacgttgctgggcacgtggc

SEQ ID NO: 4091186 - DNA, 25 bp, Homo sapien
aggctccaacgttgctgggcacgtg

SEQ ID NO: 4091187 - DNA, 25 bp, Homo sapien
tccaacgttgctgggcacgtggcag

SEQ ID NO: 4091188 - DNA, 25 bp, Homo sapien
ttcttgaggctacagggctccagct

SEQ ID NO: 4091189 - DNA, 25 bp, Homo sapien
cttcttgaggctacagggctccagc

SEQ ID NO: 4091190 - DNA, 25 bp, Homo sapien
cttgaggctacagggctccagctcc

SEQ ID NO: 4091191 - DNA, 25 bp, Homo sapien
ctcttcttgaggctacagggctcca

SEQ ID NO: 4091192 - DNA, 25 bp, Homo sapien
tcttctggccggcattgacccaggg

SEQ ID NO: 4091193 - DNA, 25 bp, Homo sapien
ttgacccaggggtgccacgtcagct

SEQ ID NO: 4091194 - DNA, 25 bp, Homo sapien
tgtcttctggccggcattgacccag

SEQ ID NO: 4091195 - DNA, 25 bp, Homo sapien
gtgccacgtcagctggtttagtggg

SEQ ID NO: 4091196 - DNA, 25 bp, Homo sapien
ctttactaaaactgtgcggcttcct

SEQ ID NO: 4091197 - DNA, 25 bp, Homo sapien
gaacatgggacaagctggctcgctg

SEQ ID NO: 4091198 - DNA, 25 bp, Homo sapien
ttactaaaactgtgcggcttcctct

SEQ ID NO: 4091199 - DNA, 25 bp, Homo sapien
catgggacaagctggctcgctgtga

SEQ ID NO: 4091200 - DNA, 25 bp, Homo sapien
gtcatcctgatacttccctgaggtc

SEQ ID NO: 4091201 - DNA, 25 bp, Homo sapien
cctgatacttccctgaggtctcttt

SEQ ID NO: 4091202 - DNA, 25 bp, Homo sapien
gccgcctaaactagggtttgcacag

SEQ ID NO: 4091203 - DNA, 25 bp, Homo sapien
tgagaggatcatatgactgcatgcc

SEQ ID NO: 4091204 - DNA, 25 bp, Homo sapien
gaattcacccaactggccttagcaa

SEQ ID NO: 4091205 - DNA, 25 bp, Homo sapien
actggccttagcaatctggcctcct

SEQ ID NO: 4091206 - DNA, 25 bp, Homo sapien
tggagaattcacccaactggcctta

SEQ ID NO: 4091207 - DNA, 25 bp, Homo sapien
gagaattcacccaactggccttagc

SEQ ID NO: 4091208 - DNA, 25 bp, Homo sapien
ctgtaagcatccagaaccgagaagg

SEQ ID NO: 4091209 - DNA, 25 bp, Homo sapien
agcagcccgccacgtttgtatccac

SEQ ID NO: 4091210 - DNA, 25 bp, Homo sapien
gccacgtttgtatccacgtcactca

SEQ ID NO: 4091211 - DNA, 25 bp, Homo sapien
taagcatccagaaccgagaaggaaa

SEQ ID NO: 4091212 - DNA, 25 bp, Homo sapien
ctatcttgttccctctgccatgagc

SEQ ID NO: 4091213 - DNA, 25 bp, Homo sapien
ttgtcttgtccctgtccattcttgc

SEQ ID NO: 4091214 - DNA, 25 bp, Homo sapien
cattcttgccatcctttatctttac

SEQ ID NO: 4091215 - DNA, 25 bp, Homo sapien
gttcctggcatgcaggtctttgtct

SEQ ID NO: 4091216 - DNA, 25 bp, Homo sapien
ttcctctttccttcacagtccaact

SEQ ID NO: 4091217 - DNA, 25 bp, Homo sapien
ctccttcctctttccttcacagtcc

SEQ ID NO: 4091218 - DNA, 25 bp, Homo sapien
tccttcctctttccttcacagtcca

SEQ ID NO: 4091219 - DNA, 25 bp, Homo sapien
ccttcctctttccttcacagtccaa

SEQ ID NO: 4091220 - DNA, 25 bp, Homo sapien
agggaccttcagaattagcacaggg

SEQ ID NO: 4091221 - DNA, 25 bp, Homo sapien
ccttcagaattagcacaggggccat

SEQ ID NO: 4091222 - DNA, 25 bp, Homo sapien
gagggaccttcagaattagcacagg

SEQ ID NO: 4091223 - DNA, 25 bp, Homo sapien
gaccttcagaattagcacaggggcc

SEQ ID NO: 4091224 - DNA, 25 bp, Homo sapien
gaagcagtagcccagactgatttgc

SEQ ID NO: 4091225 - DNA, 25 bp, Homo sapien
ctcatggccctggaacgtagcattg

SEQ ID NO: 4091226 - DNA, 25 bp, Homo sapien
tagcccagactgatttgcgaggctg

SEQ ID NO: 4091227 - DNA, 25 bp, Homo sapien
cattgaacaccagggcatgggttga

SEQ ID NO: 4091228 - DNA, 25 bp, Homo sapien
gcttcatccagaagtgggaaaggac

SEQ ID NO: 4091229 - DNA, 25 bp, Homo sapien
ctccttctgcttcatccagaagtgg

SEQ ID NO: 4091230 - DNA, 25 bp, Homo sapien
tccttctgcttcatccagaagtggg

SEQ ID NO: 4091231 - DNA, 25 bp, Homo sapien
tctgcttcatccagaagtgggaaag

SEQ ID NO: 4091232 - DNA, 25 bp, Homo sapien
ccccgcatggggacaggcaagtgat

SEQ ID NO: 4091233 - DNA, 25 bp, Homo sapien
gcaagtgatgagtggtaaggcacag

SEQ ID NO: 4091234 - DNA, 25 bp, Homo sapien
gaagcctcagatgagccccacaccc

SEQ ID NO: 4091235 - DNA, 25 bp, Homo sapien
tcaatgaccgcctgaataggaagcc

SEQ ID NO: 4091236 - DNA, 25 bp, Homo sapien
agcagcgcagagtgggtttccccca

SEQ ID NO: 4091237 - DNA, 25 bp, Homo sapien
tggtgatggaggagcatctctgtta

SEQ ID NO: 4091238 - DNA, 25 bp, Homo sapien
atgcgggtgtattcggtgttgccat

SEQ ID NO: 4091239 - DNA, 25 bp, Homo sapien
tctgttatgcacacgtgagcagcgc

SEQ ID NO: 4091240 - DNA, 25 bp, Homo sapien
gaacatagcactattactctgtcgc

SEQ ID NO: 4091241 - DNA, 25 bp, Homo sapien
catagcactattactctgtcgccta

SEQ ID NO: 4091242 - DNA, 25 bp, Homo sapien
caggtagaacatagcactattactc

SEQ ID NO: 4091243 - DNA, 25 bp, Homo sapien
ctattactctgtcgcctacctttta

SEQ ID NO: 4091244 - DNA, 25 bp, Homo sapien
agagcgagggcggaaggcgagattg

SEQ ID NO: 4091245 - DNA, 25 bp, Homo sapien
cgaggctcgcggagagggagcgggc

SEQ ID NO: 4091246 - DNA, 25 bp, Homo sapien
aaggcgagattgaggcgactgaggc

SEQ ID NO: 4091247 - DNA, 25 bp, Homo sapien
ggcgtcggcttagccagcagagact

SEQ ID NO: 4091248 - DNA, 25 bp, Homo sapien
gccggcgccgcaggaagttcatcat

SEQ ID NO: 4091249 - DNA, 25 bp, Homo sapien
cagccggcgccgcaggaagttcatc

SEQ ID NO: 4091250 - DNA, 25 bp, Homo sapien
tgctgtccgacagccggcgccgcag

SEQ ID NO: 4091251 - DNA, 25 bp, Homo sapien
gaagctgctgtccgacagccggcgc

SEQ ID NO: 4091252 - DNA, 25 bp, Homo sapien
gcgtcggcgcttgctggggctcggg

SEQ ID NO: 4091253 - DNA, 25 bp, Homo sapien
tcatgtagccgttgggcagattggc

SEQ ID NO: 4091254 - DNA, 25 bp, Homo sapien
ttcggcgcgtcttacggcgcgggcg

SEQ ID NO: 4091255 - DNA, 25 bp, Homo sapien
ggggcgccgcctaggccgaggcggc

SEQ ID NO: 4091256 - DNA, 25 bp, Homo sapien
ggcaccgggcgcgtccaccaggcca

SEQ ID NO: 4091257 - DNA, 25 bp, Homo sapien
gcgtgcggctcgtcgaccaccagca

SEQ ID NO: 4091258 - DNA, 25 bp, Homo sapien
cagtcggcgtgcggctcgtcgacca

SEQ ID NO: 4091259 - DNA, 25 bp, Homo sapien
caggccagccgaggcggccgtctgc

SEQ ID NO: 4091260 - DNA, 25 bp, Homo sapien
gattatccaggtaaagacacaggag

SEQ ID NO: 4091261 - DNA, 25 bp, Homo sapien
tcagaaaaatggttccttgagagcc

SEQ ID NO: 4091262 - DNA, 25 bp, Homo sapien
tatagacaaagcaatagcccaaagg

SEQ ID NO: 4091263 - DNA, 25 bp, Homo sapien
tgtgatagttctgaagagcccttag

SEQ ID NO: 4091264 - DNA, 25 bp, Homo sapien
tgtccacagacagagaataagaggc

SEQ ID NO: 4091265 - DNA, 25 bp, Homo sapien
tacagtttgcaaagtcctcccatag

SEQ ID NO: 4091266 - DNA, 25 bp, Homo sapien
aacagccctgatacttgagaaaacc

SEQ ID NO: 4091267 - DNA, 25 bp, Homo sapien
gttctaactagactcaacagccctg

SEQ ID NO: 4091268 - DNA, 25 bp, Homo sapien
gacgcagaggcttgatcagactcct

SEQ ID NO: 4091269 - DNA, 25 bp, Homo sapien
taattcaatgggagttgcaaaacgg

SEQ ID NO: 4091270 - DNA, 25 bp, Homo sapien
tagagttgatctgttcaagagcctg

SEQ ID NO: 4091271 - DNA, 25 bp, Homo sapien
tgctgattacactctcaccaggaag

SEQ ID NO: 4091272 - DNA, 25 bp, Homo sapien
ctgtcaatgaccagcatggcaatct

SEQ ID NO: 4091273 - DNA, 25 bp, Homo sapien
gtcaatgaccagcatggcaatctct

SEQ ID NO: 4091274 - DNA, 25 bp, Homo sapien
actgtcaatgaccagcatggcaatc

SEQ ID NO: 4091275 - DNA, 25 bp, Homo sapien
tcagggggcgtcgtccccagcaaat

SEQ ID NO: 4091276 - DNA, 25 bp, Homo sapien
gcgtcgtccccagcaaatccagctt

SEQ ID NO: 4091277 - DNA, 25 bp, Homo sapien
cagggggcgtcgtccccagcaaatc

SEQ ID NO: 4091278 - DNA, 25 bp, Homo sapien
cgtccccagcaaatccagctttgta

SEQ ID NO: 4091279 - DNA, 25 bp, Homo sapien
tcatcccagttgatgacgatgccac

SEQ ID NO: 4091280 - DNA, 25 bp, Homo sapien
atcccagttgatgacgatgccacgc

SEQ ID NO: 4091281 - DNA, 25 bp, Homo sapien
catcccagttgatgacgatgccacg

SEQ ID NO: 4091282 - DNA, 25 bp, Homo sapien
gggccacacgcaactcactgtagaa

SEQ ID NO: 4091283 - DNA, 25 bp, Homo sapien
ttggggttcacaagggcctccgtca

SEQ ID NO: 4091284 - DNA, 25 bp, Homo sapien
aagggcctccgtcagcagcaccagg

SEQ ID NO: 4091285 - DNA, 25 bp, Homo sapien
ggccacacgcaactcactgtagaag

SEQ ID NO: 4091286 - DNA, 25 bp, Homo sapien
tcgtagatgggcactgtatgagtga

SEQ ID NO: 4091287 - DNA, 25 bp, Homo sapien
cttaggcctcgtagatgggcactgt

SEQ ID NO: 4091288 - DNA, 25 bp, Homo sapien
taggcctcgtagatgggcactgtat

SEQ ID NO: 4091289 - DNA, 25 bp, Homo sapien
ggcctcgtagatgggcactgtatga

SEQ ID NO: 4091290 - DNA, 25 bp, Homo sapien
ccaggtccagatgcaggacggcatg

SEQ ID NO: 4091291 - DNA, 25 bp, Homo sapien
ggtccagatgcaggacggcatgggg

SEQ ID NO: 4091292 - DNA, 25 bp, Homo sapien
cagccaggtccagatgcaggacggc

SEQ ID NO: 4091293 - DNA, 25 bp, Homo sapien
agccaggtccagatgcaggacggca

SEQ ID NO: 4091294 - DNA, 25 bp, Homo sapien
atgtcacccaagatctcccactcag

SEQ ID NO: 4091295 - DNA, 25 bp, Homo sapien
agatctcccactcagccatggtgtt

SEQ ID NO: 4091296 - DNA, 25 bp, Homo sapien
cccaagatctcccactcagccatgg

SEQ ID NO: 4091297 - DNA, 25 bp, Homo sapien
caagatctcccactcagccatggtg

SEQ ID NO: 4091298 - DNA, 25 bp, Homo sapien
gaaggtggtctcatggatgccacaa

SEQ ID NO: 4091299 - DNA, 25 bp, Homo sapien
aaggtggtctcatggatgccacaag

SEQ ID NO: 4091300 - DNA, 25 bp, Homo sapien
ggtggtctcatggatgccacaagat

SEQ ID NO: 4091301 - DNA, 25 bp, Homo sapien
ttgaaggtggtctcatggatgccac

SEQ ID NO: 4091302 - DNA, 25 bp, Homo sapien
gacagcaccttgttggcatgtaggt

SEQ ID NO: 4091303 - DNA, 25 bp, Homo sapien
cagcaccttgttggcatgtaggtct

SEQ ID NO: 4091304 - DNA, 25 bp, Homo sapien
ccttgttggcatgtaggtctttgca

SEQ ID NO: 4091305 - DNA, 25 bp, Homo sapien
gcaccttgttggcatgtaggtcttt

SEQ ID NO: 4091306 - DNA, 25 bp, Homo sapien
ggtgatgcccgggtacatggtagtg

SEQ ID NO: 4091307 - DNA, 25 bp, Homo sapien
cgctctgggggcacgatgatcttga

SEQ ID NO: 4091308 - DNA, 25 bp, Homo sapien
ggtgccagggcagtgattgccttct

SEQ ID NO: 4091309 - DNA, 25 bp, Homo sapien
atcctgttggtgatgcccgggtaca

SEQ ID NO: 4091310 - DNA, 25 bp, Homo sapien
acgatggaggggccaacttgttgta

SEQ ID NO: 4091311 - DNA, 25 bp, Homo sapien
cgatggaggggccaacttgttgtac

SEQ ID NO: 4091312 - DNA, 25 bp, Homo sapien
gacgatggaggggccaacttgttgt

SEQ ID NO: 4091313 - DNA, 25 bp, Homo sapien
ccatgcagcaaatgctacacatctg

SEQ ID NO: 4091314 - DNA, 25 bp, Homo sapien
cagcaaatgctacacatctgcttac

SEQ ID NO: 4091315 - DNA, 25 bp, Homo sapien
taacccatgcagcaaatgctacaca

SEQ ID NO: 4091316 - DNA, 25 bp, Homo sapien
tatacttctgaattaacccatgcag

SEQ ID NO: 4091317 - DNA, 25 bp, Homo sapien
tcttccttcaacacctcttcttcca

SEQ ID NO: 4091318 - DNA, 25 bp, Homo sapien
agtcttccttcaacacctcttcttc

SEQ ID NO: 4091319 - DNA, 25 bp, Homo sapien
tcagtcttccttcaacacctcttct

SEQ ID NO: 4091320 - DNA, 25 bp, Homo sapien
cttccttcaacacctcttcttccat

SEQ ID NO: 4091321 - DNA, 25 bp, Homo sapien
ggagactagttcacagaggagatac

SEQ ID NO: 4091322 - DNA, 25 bp, Homo sapien
gaggaaactgtaactccacttccaa

SEQ ID NO: 4091323 - DNA, 25 bp, Homo sapien
catcttaattgggtcactgatacca

SEQ ID NO: 4091324 - DNA, 25 bp, Homo sapien
ggagatactgtagcaagattgcccc

SEQ ID NO: 4091325 - DNA, 25 bp, Homo sapien
ggtggtcaaaccctctattccaata

SEQ ID NO: 4091326 - DNA, 25 bp, Homo sapien
acctgcctctcaatatccaagtaag

SEQ ID NO: 4091327 - DNA, 25 bp, Homo sapien
tctgggtctcacttataagaattac

SEQ ID NO: 4091328 - DNA, 25 bp, Homo sapien
tagtgttcccactaagtcttgaggc

SEQ ID NO: 4091329 - DNA, 25 bp, Homo sapien
tctagtggtgtttgtcctaggtagc

SEQ ID NO: 4091330 - DNA, 25 bp, Homo sapien
ctagtggtgtttgtcctaggtagcc

SEQ ID NO: 4091331 - DNA, 25 bp, Homo sapien
tagtggtgtttgtcctaggtagccc

SEQ ID NO: 4091332 - DNA, 25 bp, Homo sapien
cttctagtggtgtttgtcctaggta

SEQ ID NO: 4091333 - DNA, 25 bp, Homo sapien
accatgacctgcctgaatccgctct

SEQ ID NO: 4091334 - DNA, 25 bp, Homo sapien
gccagactggctaagggacaggaaa

SEQ ID NO: 4091335 - DNA, 25 bp, Homo sapien
tggcaccacaaaaactgggaacaga

SEQ ID NO: 4091336 - DNA, 25 bp, Homo sapien
gaacaaaggctaaggcaagccccag

SEQ ID NO: 4091337 - DNA, 25 bp, Homo sapien
ctagatacaaggaaatgtcctccat

SEQ ID NO: 4091338 - DNA, 25 bp, Homo sapien
agagctgcaggttcccatcctttgg

SEQ ID NO: 4091339 - DNA, 25 bp, Homo sapien
caggttcccatcctttggtagcagt

SEQ ID NO: 4091340 - DNA, 25 bp, Homo sapien
ctgcaggttcccatcctttggtagc

SEQ ID NO: 4091341 - DNA, 25 bp, Homo sapien
acagtcaccgctgtcaccagagctg

SEQ ID NO: 4091342 - DNA, 25 bp, Homo sapien
gaatactgcaggtctacctccactg

SEQ ID NO: 4091343 - DNA, 25 bp, Homo sapien
tccactgtacggtcacgaatcacac

SEQ ID NO: 4091344 - DNA, 25 bp, Homo sapien
ctagcatcttgaatactgcaggtct

SEQ ID NO: 4091345 - DNA, 25 bp, Homo sapien
tgcaggtctacctccactgtacggt

SEQ ID NO: 4091346 - DNA, 25 bp, Homo sapien
cccacacaaattagttttgtgcaag

SEQ ID NO: 4091347 - DNA, 25 bp, Homo sapien
tggagaaaagaataaacccacacaa

SEQ ID NO: 4091348 - DNA, 25 bp, Homo sapien
attagttttgtgcaagtatttaaag

SEQ ID NO: 4091349 - DNA, 25 bp, Homo sapien
ttttgtgcaagtatttaaagtcaga

SEQ ID NO: 4091350 - DNA, 25 bp, Homo sapien
ctgttccaccttgatatcataatct

SEQ ID NO: 4091351 - DNA, 25 bp, Homo sapien
cataatctccaaggacttttttgcc

SEQ ID NO: 4091352 - DNA, 25 bp, Homo sapien
cttgatatcataatctccaaggact

SEQ ID NO: 4091353 - DNA, 25 bp, Homo sapien
tgttccaccttgatatcataatctc

SEQ ID NO: 4091354 - DNA, 25 bp, Homo sapien
acctttgtgccattccggagaacct

SEQ ID NO: 4091355 - DNA, 25 bp, Homo sapien
tgccattccggagaacctgcatatc

SEQ ID NO: 4091356 - DNA, 25 bp, Homo sapien
catatccacagcataggtgccatct

SEQ ID NO: 4091357 - DNA, 25 bp, Homo sapien
ctgcatatccacagcataggtgcca

SEQ ID NO: 4091358 - DNA, 25 bp, Homo sapien
tatttcctgttgttaggtcccagac

SEQ ID NO: 4091359 - DNA, 25 bp, Homo sapien
acccggatggacatctctttttctg

SEQ ID NO: 4091360 - DNA, 25 bp, Homo sapien
tcagaatggacaagctcgtatttcc

SEQ ID NO: 4091361 - DNA, 25 bp, Homo sapien
cctgttgttaggtcccagacacctc

SEQ ID NO: 4091362 - DNA, 25 bp, Homo sapien
actgccacagaggtccatgatctca

SEQ ID NO: 4091363 - DNA, 25 bp, Homo sapien
tatttttccttgacttcatgaggct

SEQ ID NO: 4091364 - DNA, 25 bp, Homo sapien
tttttccttgacttcatgaggctgt

SEQ ID NO: 4091365 - DNA, 25 bp, Homo sapien
aaatatttttccttgacttcatgag

SEQ ID NO: 4091366 - DNA, 25 bp, Homo sapien
atatttttccttgacttcatgaggc

SEQ ID NO: 4091367 - DNA, 25 bp, Homo sapien
catactgcataccaatgatcaggtg

SEQ ID NO: 4091368 - DNA, 25 bp, Homo sapien
gcggaagtcctcattctccgccatg

SEQ ID NO: 4091369 - DNA, 25 bp, Homo sapien
caaatgcatgctgccggatgagcac

SEQ ID NO: 4091370 - DNA, 25 bp, Homo sapien
gccaaatgcatgctgccggatgagc

SEQ ID NO: 4091371 - DNA, 25 bp, Homo sapien
caagccaatgaggatgtgattaggg

SEQ ID NO: 4091372 - DNA, 25 bp, Homo sapien
ctgcaagccaatgaggatgtgatta

SEQ ID NO: 4091373 - DNA, 25 bp, Homo sapien
gatgtgattaggggtaggtgttacc

SEQ ID NO: 4091374 - DNA, 25 bp, Homo sapien
atgtgattaggggtaggtgttacct

SEQ ID NO: 4091375 - DNA, 25 bp, Homo sapien
tggattccagtgagttgatgcaggg

SEQ ID NO: 4091376 - DNA, 25 bp, Homo sapien
ggattccagtgagttgatgcagggg

SEQ ID NO: 4091377 - DNA, 25 bp, Homo sapien
atggattccagtgagttgatgcagg

SEQ ID NO: 4091378 - DNA, 25 bp, Homo sapien
aaacggtggtgccattcttgctttg

SEQ ID NO: 4091379 - DNA, 25 bp, Homo sapien
agtggcttgccctgaccaacttcag

SEQ ID NO: 4091380 - DNA, 25 bp, Homo sapien
gaatttcagatagactggcagcaat

SEQ ID NO: 4091381 - DNA, 25 bp, Homo sapien
tagactggcagcaataaacggtggt

SEQ ID NO: 4091382 - DNA, 25 bp, Homo sapien
gtgtcttatagatagcgaccagctg

SEQ ID NO: 4091383 - DNA, 25 bp, Homo sapien
tatagatagcgaccagctgggcaaa

SEQ ID NO: 4091384 - DNA, 25 bp, Homo sapien
tgtctgttcaatgagagggaacttt

SEQ ID NO: 4091385 - DNA, 25 bp, Homo sapien
gggtagtatgtctgttcaatgagag

SEQ ID NO: 4091386 - DNA, 25 bp, Homo sapien
acagcagaaagactaatgtccccac

SEQ ID NO: 4091387 - DNA, 25 bp, Homo sapien
agaaagactaatgtccccactgagc

SEQ ID NO: 4091388 - DNA, 25 bp, Homo sapien
cagaaagactaatgtccccactgag

SEQ ID NO: 4091389 - DNA, 25 bp, Homo sapien
agcagaaagactaatgtccccactg

SEQ ID NO: 4091390 - DNA, 25 bp, Homo sapien
agcaccggagagaaataacacaaag

SEQ ID NO: 4091391 - DNA, 25 bp, Homo sapien
aggtggtcctctcttgagggcaaat

SEQ ID NO: 4091392 - DNA, 25 bp, Homo sapien
tctcttgagggcaaatttcaggata

SEQ ID NO: 4091393 - DNA, 25 bp, Homo sapien
gcaaatttcaggatagagcaccgga

SEQ ID NO: 4091394 - DNA, 25 bp, Homo sapien
cctgagtgagcgtggccaatcttca

SEQ ID NO: 4091395 - DNA, 25 bp, Homo sapien
tgagcgtggccaatcttcaccacca

SEQ ID NO: 4091396 - DNA, 25 bp, Homo sapien
agtgagcgtggccaatcttcaccac

SEQ ID NO: 4091397 - DNA, 25 bp, Homo sapien
ccatgcctgagtgagcgtggccaat

SEQ ID NO: 4091398 - DNA, 25 bp, Homo sapien
ggcgctctgaaaactgcccttcttg

SEQ ID NO: 4091399 - DNA, 25 bp, Homo sapien
gaggtggcaaatcatcttctctttg

SEQ ID NO: 4091400 - DNA, 25 bp, Homo sapien
tagcagttcacaaatgggcgctctg

SEQ ID NO: 4091401 - DNA, 25 bp, Homo sapien
ccttcttggttcaaccctgaagcac

SEQ ID NO: 4091402 - DNA, 25 bp, Homo sapien
cataggtctgggtgagagccaccac

SEQ ID NO: 4091403 - DNA, 25 bp, Homo sapien
taagccttgtagttgttgccaatct

SEQ ID NO: 4091404 - DNA, 25 bp, Homo sapien
cccggatgtcatacttggagtcaat

SEQ ID NO: 4091405 - DNA, 25 bp, Homo sapien
gttgccaatcttctggacccggatg

SEQ ID NO: 4091406 - DNA, 25 bp, Homo sapien
gagccagtgttcgtcttccagttcc

SEQ ID NO: 4091407 - DNA, 25 bp, Homo sapien
agtgttcgtcttccagttccctgag

SEQ ID NO: 4091408 - DNA, 25 bp, Homo sapien
ccagttccctgagatcgatgtcctc

SEQ ID NO: 4091409 - DNA, 25 bp, Homo sapien
cagcatcgcagagccagtgttcgtc

SEQ ID NO: 4091410 - DNA, 25 bp, Homo sapien
gcaggtgtccacccacagtttgtac

SEQ ID NO: 4091411 - DNA, 25 bp, Homo sapien
tgtcctccacctgatgttccccaat

SEQ ID NO: 4091412 - DNA, 25 bp, Homo sapien
tagttcggtgatgagttgcctgtcc

SEQ ID NO: 4091413 - DNA, 25 bp, Homo sapien
tcagtggcatgctacagtccatgac

SEQ ID NO: 4091414 - DNA, 25 bp, Homo sapien
catcttgctgatgactagttcggtg

SEQ ID NO: 4091415 - DNA, 25 bp, Homo sapien
aaattcctgcatgagcaattcagcc

SEQ ID NO: 4091416 - DNA, 25 bp, Homo sapien
aattcctgcatgagcaattcagcct

SEQ ID NO: 4091417 - DNA, 25 bp, Homo sapien
gaaattcctgcatgagcaattcagc

SEQ ID NO: 4091418 - DNA, 25 bp, Homo sapien
ctgaaattcctgcatgagcaattca

SEQ ID NO: 4091419 - DNA, 25 bp, Homo sapien
tctgctgatgtgggagcaccaaaag

SEQ ID NO: 4091420 - DNA, 25 bp, Homo sapien
ctctgctgatgtgggagcaccaaaa

SEQ ID NO: 4091421 - DNA, 25 bp, Homo sapien
gaatgtgaagtgcagtgcttgtgcc

SEQ ID NO: 4091422 - DNA, 25 bp, Homo sapien
tctggcgtcactgccaaaggctggc

SEQ ID NO: 4091423 - DNA, 25 bp, Homo sapien
gcatcctgggatgccgaattccaca

SEQ ID NO: 4091424 - DNA, 25 bp, Homo sapien
cacagcaggaactcatggccagact

SEQ ID NO: 4091425 - DNA, 25 bp, Homo sapien
aagcctgctgtctactaggggctcc

SEQ ID NO: 4091426 - DNA, 25 bp, Homo sapien
tctactaggggctccgggcctattc

SEQ ID NO: 4091427 - DNA, 25 bp, Homo sapien
ctccgggcctattccctgtggggct

SEQ ID NO: 4091428 - DNA, 25 bp, Homo sapien
tgctgtctactaggggctccgggcc

SEQ ID NO: 4091429 - DNA, 25 bp, Homo sapien
gggtcttgcttgagtccggatcctt

SEQ ID NO: 4091430 - DNA, 25 bp, Homo sapien
tgcttgagtccggatccttaagtgt

SEQ ID NO: 4091431 - DNA, 25 bp, Homo sapien
tcttgcttgagtccggatccttaag

SEQ ID NO: 4091432 - DNA, 25 bp, Homo sapien
gagtccggatccttaagtgttccgc

SEQ ID NO: 4091433 - DNA, 25 bp, Homo sapien
tgccattacagtcgagaatatactg

SEQ ID NO: 4091434 - DNA, 25 bp, Homo sapien
gttttggccctactgcaatgccatt

SEQ ID NO: 4091435 - DNA, 25 bp, Homo sapien
gcaatgccattacagtcgagaatat

SEQ ID NO: 4091436 - DNA, 25 bp, Homo sapien
cttggacttgttttggccctactgc

SEQ ID NO: 4091437 - DNA, 25 bp, Homo sapien
tttgatattgcacatcagcggcccc

SEQ ID NO: 4091438 - DNA, 25 bp, Homo sapien
cattacaagcacgaacaggaacagg

SEQ ID NO: 4091439 - DNA, 25 bp, Homo sapien
ttgaagatcccaagcacactggtgg

SEQ ID NO: 4091440 - DNA, 25 bp, Homo sapien
caaggttctgtaggcagtgtaccca

SEQ ID NO: 4091441 - DNA, 25 bp, Homo sapien
catggtgtttgttagaggcggctgc

SEQ ID NO: 4091442 - DNA, 25 bp, Homo sapien
atgaacttccacggaccatggtgtt

SEQ ID NO: 4091443 - DNA, 25 bp, Homo sapien
tcagaacggtgacatgacagtatag

SEQ ID NO: 4091444 - DNA, 25 bp, Homo sapien
acggtgacatgacagtatagaggtg

SEQ ID NO: 4091445 - DNA, 25 bp, Homo sapien
caactaccattatcagctgagggag

SEQ ID NO: 4091446 - DNA, 25 bp, Homo sapien
ggcacaagcccctggatacgtaact

SEQ ID NO: 4091447 - DNA, 25 bp, Homo sapien
gagttgtccctaagcatgctgcctg

SEQ ID NO: 4091448 - DNA, 25 bp, Homo sapien
gattcttatgcaacccatctggaag

SEQ ID NO: 4091449 - DNA, 25 bp, Homo sapien
actgacatatgctgttttatggagc

SEQ ID NO: 4091450 - DNA, 25 bp, Homo sapien
cctcgatggtcactgacatatgctg

SEQ ID NO: 4091451 - DNA, 25 bp, Homo sapien
catatgctgttttatggagctgccc

SEQ ID NO: 4091452 - DNA, 25 bp, Homo sapien
cttatgatcacctcgatggtcactg

SEQ ID NO: 4091453 - DNA, 25 bp, Homo sapien
ggagccggcgtggaggcagcacctt

SEQ ID NO: 4091454 - DNA, 25 bp, Homo sapien
ggggagccggcgtggaggcagcacc

SEQ ID NO: 4091455 - DNA, 25 bp, Homo sapien
agccggcgtggaggcagcaccttgc

SEQ ID NO: 4091456 - DNA, 25 bp, Homo sapien
ccggcgtggaggcagcaccttgcct

SEQ ID NO: 4091457 - DNA, 25 bp, Homo sapien
tgaggagccgaggaggaggaagaag

SEQ ID NO: 4091458 - DNA, 25 bp, Homo sapien
ggaggaagaagaggaggaagaggag

SEQ ID NO: 4091459 - DNA, 25 bp, Homo sapien
agggtgcatctccgtgggtggtggg

SEQ ID NO: 4091460 - DNA, 25 bp, Homo sapien
ggtgcatctccgtgggtggtggggc

SEQ ID NO: 4091461 - DNA, 25 bp, Homo sapien
ggagggtgcatctccgtgggtggtg

SEQ ID NO: 4091462 - DNA, 25 bp, Homo sapien
gtgcatctccgtgggtggtggggcc

SEQ ID NO: 4091463 - DNA, 25 bp, Homo sapien
tgagctgtgggtgaggctggggctt

SEQ ID NO: 4091464 - DNA, 25 bp, Homo sapien
ttgagctgtgggtgaggctggggct

SEQ ID NO: 4091465 - DNA, 25 bp, Homo sapien
catcctcattggctgaagaccggaa

SEQ ID NO: 4091466 - DNA, 25 bp, Homo sapien
cttcctcaagctccggatggtctct

SEQ ID NO: 4091467 - DNA, 25 bp, Homo sapien
gaggctggcaaaggacttcctcaag

SEQ ID NO: 4091468 - DNA, 25 bp, Homo sapien
tgaagaccggaagaaggaggactca

SEQ ID NO: 4091469 - DNA, 25 bp, Homo sapien
caaatggtcctttctgggctgcaca

SEQ ID NO: 4091470 - DNA, 25 bp, Homo sapien
tgggacataaccaccaagctggctg

SEQ ID NO: 4091471 - DNA, 25 bp, Homo sapien
taaggccactaaactcacagcgaac

SEQ ID NO: 4091472 - DNA, 25 bp, Homo sapien
gaaggaagctctcatgactacaggg

SEQ ID NO: 4091473 - DNA, 25 bp, Homo sapien
ccttcgttgagatctgtgggagcct

SEQ ID NO: 4091474 - DNA, 25 bp, Homo sapien
tgaggagcttgatgatagaccaggc

SEQ ID NO: 4091475 - DNA, 25 bp, Homo sapien
taaattgactcctccgggagcaagg

SEQ ID NO: 4091476 - DNA, 25 bp, Homo sapien
cacagcatccgtggtctttgggaaa

SEQ ID NO: 4091477 - DNA, 25 bp, Homo sapien
gcggctgcaactgcctgcagttctg

SEQ ID NO: 4091478 - DNA, 25 bp, Homo sapien
cggctgcaactgcctgcagttctgt

SEQ ID NO: 4091479 - DNA, 25 bp, Homo sapien
agcggctgcaactgcctgcagttct

SEQ ID NO: 4091480 - DNA, 25 bp, Homo sapien
tcctcttttatcaccggaagatctt

SEQ ID NO: 4091481 - DNA, 25 bp, Homo sapien
tcattctaatgcacgcagccagaag

SEQ ID NO: 4091482 - DNA, 25 bp, Homo sapien
gaagtttatgcaattcctcttttat

SEQ ID NO: 4091483 - DNA, 25 bp, Homo sapien
gatctttagtaactgtgggcactcc

SEQ ID NO: 4091484 - DNA, 25 bp, Homo sapien
cagctttctccatgataaagttatt

SEQ ID NO: 4091485 - DNA, 25 bp, Homo sapien
gtgtctctcacggttcgactggggt

SEQ ID NO: 4091486 - DNA, 25 bp, Homo sapien
tctctcacggttcgactggggttgt

SEQ ID NO: 4091487 - DNA, 25 bp, Homo sapien
tcacatcatgtcaaccttgaccacc

SEQ ID NO: 4091488 - DNA, 25 bp, Homo sapien
cacttagccatcctgtcgccttgga

SEQ ID NO: 4091489 - DNA, 25 bp, Homo sapien
tcgtatgatacgtttgccacaatta

SEQ ID NO: 4091490 - DNA, 25 bp, Homo sapien
tcttggttcttgacgaccttgacag

SEQ ID NO: 4091491 - DNA, 25 bp, Homo sapien
cagggtgccgcgtttcacttagcca

SEQ ID NO: 4091492 - DNA, 25 bp, Homo sapien
gacaatgtgaaatctagaaaggaac

SEQ ID NO: 4091493 - DNA, 25 bp, Homo sapien
gaaaggaactgcacctgtatcccga

SEQ ID NO: 4091494 - DNA, 25 bp, Homo sapien
ttccacttactcctatgcagaaaag

SEQ ID NO: 4091495 - DNA, 25 bp, Homo sapien
ggcgccaaaacaacgtagctactga

SEQ ID NO: 4091496 - DNA, 25 bp, Homo sapien
caaaacagctgtcattgaacaccat

SEQ ID NO: 4091497 - DNA, 25 bp, Homo sapien
gaagccattgatgggaaagagatct

SEQ ID NO: 4091498 - DNA, 25 bp, Homo sapien
cattgatgggaaagagatctccagg

SEQ ID NO: 4091499 - DNA, 25 bp, Homo sapien
catgagcttttaaggggtagtggaa

SEQ ID NO: 4091500 - DNA, 25 bp, Homo sapien
ctagcgatggaagccattgatggga

SEQ ID NO: 4091501 - DNA, 25 bp, Homo sapien
ggcgtggcgcccctctccggtgtcc

SEQ ID NO: 4091502 - DNA, 25 bp, Homo sapien
tcgaggccgacccaagcgccccagg

SEQ ID NO: 4091503 - DNA, 25 bp, Homo sapien
ggtgtcctcgaggccgacccaagcg

SEQ ID NO: 4091504 - DNA, 25 bp, Homo sapien
ccctctccggtgtcctcgaggccga

SEQ ID NO: 4091505 - DNA, 25 bp, Homo sapien
tcatccgtctgggaccccgtcagtt

SEQ ID NO: 4091506 - DNA, 25 bp, Homo sapien
ccgcgacccgtcagtccgggtcctg

SEQ ID NO: 4091507 - DNA, 25 bp, Homo sapien
tgccggaccatgaccctgcctcagc

SEQ ID NO: 4091508 - DNA, 25 bp, Homo sapien
tctcatccgtctgggaccccgtcag

SEQ ID NO: 4091509 - DNA, 25 bp, Homo sapien
ccttatataaaagccgcagctcggt

SEQ ID NO: 4091510 - DNA, 25 bp, Homo sapien
cagcagaggttaaggccccttcctt

SEQ ID NO: 4091511 - DNA, 25 bp, Homo sapien
gaaatgcaggcttctggtcaccagc

SEQ ID NO: 4091512 - DNA, 25 bp, Homo sapien
caccgaggcgtaaagtaccacgact

SEQ ID NO: 4091513 - DNA, 25 bp, Homo sapien
ggagttgagcatatacagacctggt

SEQ ID NO: 4091514 - DNA, 25 bp, Homo sapien
tcattgcactcgaacagtttgacag

SEQ ID NO: 4091515 - DNA, 25 bp, Homo sapien
tctccactgccctcgatatgaagga

SEQ ID NO: 4091516 - DNA, 25 bp, Homo sapien
taatcatgcaacctgctgactgtgg

SEQ ID NO: 4091517 - DNA, 25 bp, Homo sapien
tagtaatcctatattgccaaatgcc

SEQ ID NO: 4091518 - DNA, 25 bp, Homo sapien
taatcctatattgccaaatgcctgg

SEQ ID NO: 4091519 - DNA, 25 bp, Homo sapien
cctatattgccaaatgcctgggtat

SEQ ID NO: 4091520 - DNA, 25 bp, Homo sapien
catgtagtaatcctatattgccaaa

SEQ ID NO: 4091521 - DNA, 25 bp, Homo sapien
tatgaaactcttcgtgtatacggct

SEQ ID NO: 4091522 - DNA, 25 bp, Homo sapien
tcaagtagatcacggacccaaacaa

SEQ ID NO: 4091523 - DNA, 25 bp, Homo sapien
gtatggctgagaacattaagaggcc

SEQ ID NO: 4091524 - DNA, 25 bp, Homo sapien
gtaaggttccaatcaatagttcaca

SEQ ID NO: 4091525 - DNA, 25 bp, Homo sapien
gataataggatagtaagagagctgg

SEQ ID NO: 4091526 - DNA, 25 bp, Homo sapien
cctgagtccacggtgcctagcaatg

SEQ ID NO: 4091527 - DNA, 25 bp, Homo sapien
tacactataccaatctcagagagag

SEQ ID NO: 4091528 - DNA, 25 bp, Homo sapien
tagcaatgccatctagttacaagac

SEQ ID NO: 4091529 - DNA, 25 bp, Homo sapien
ccctcttcttacgatatggaatctc

SEQ ID NO: 4091530 - DNA, 25 bp, Homo sapien
tcttcttacgatatggaatctcccc

SEQ ID NO: 4091531 - DNA, 25 bp, Homo sapien
tccccgctcctgagataaaacccac

SEQ ID NO: 4091532 - DNA, 25 bp, Homo sapien
ttacgatatggaatctccccgctcc

SEQ ID NO: 4091533 - DNA, 25 bp, Homo sapien
tagatgctgaagacatctgctatat

SEQ ID NO: 4091534 - DNA, 25 bp, Homo sapien
ttagatgctgaagacatctgctata

SEQ ID NO: 4091535 - DNA, 25 bp, Homo sapien
ttttgtagaggcgagatctccttat

SEQ ID NO: 4091536 - DNA, 25 bp, Homo sapien
atgactattttagtcccttttcctg

SEQ ID NO: 4091537 - DNA, 25 bp, Homo sapien
tattatcctaccttatgatgactat

SEQ ID NO: 4091538 - DNA, 25 bp, Homo sapien
tgtgcacggcctcctattatcctac

SEQ ID NO: 4091539 - DNA, 25 bp, Homo sapien
taatgtgtcagtgtgtaatgcccac

SEQ ID NO: 4091540 - DNA, 25 bp, Homo sapien
cacactctaatgtgttagccagaaa

SEQ ID NO: 4091541 - DNA, 25 bp, Homo sapien
agaaatgaaaggagcacccacagcg

SEQ ID NO: 4091542 - DNA, 25 bp, Homo sapien
cgaaaccgctcattacacacaacag

SEQ ID NO: 4091543 - DNA, 25 bp, Homo sapien
tatttgtggtttagtgttggcttct

SEQ ID NO: 4091544 - DNA, 25 bp, Homo sapien
aatggccttgttgtatatttgtggt

SEQ ID NO: 4091545 - DNA, 25 bp, Homo sapien
agaaaatggccttgttgtatatttg

SEQ ID NO: 4091546 - DNA, 25 bp, Homo sapien
cgttaaaggctgactctcgtttgag

SEQ ID NO: 4091547 - DNA, 25 bp, Homo sapien
tcaatttggactcatgtgtatacat

SEQ ID NO: 4091548 - DNA, 25 bp, Homo sapien
ggaccagaaatatctcggattttga

SEQ ID NO: 4091549 - DNA, 25 bp, Homo sapien
agtattagtggaagttgcatgcagc

SEQ ID NO: 4091550 - DNA, 25 bp, Homo sapien
tctttcaggctgaccacaacatcct

SEQ ID NO: 4091551 - DNA, 25 bp, Homo sapien
gcccctgcattactctgttctaaga

SEQ ID NO: 4091552 - DNA, 25 bp, Homo sapien
caaagatagtggagggagttcctac

SEQ ID NO: 4091553 - DNA, 25 bp, Homo sapien
gagttcctacatacctttcagccag

SEQ ID NO: 4091554 - DNA, 25 bp, Homo sapien
gattatttagtgactccattgtgac

SEQ ID NO: 4091555 - DNA, 25 bp, Homo sapien
gcttgaatttagaccgctcattttc

SEQ ID NO: 4091556 - DNA, 25 bp, Homo sapien
catacacaagagttaccggcaaaaa

SEQ ID NO: 4091557 - DNA, 25 bp, Homo sapien
caaaatgcttgaatttagaccgctc

SEQ ID NO: 4091558 - DNA, 25 bp, Homo sapien
ctagtgcagtttgctaaattagttg

SEQ ID NO: 4091559 - DNA, 25 bp, Homo sapien
aaacgatggattgcttggtcagaga

SEQ ID NO: 4091560 - DNA, 25 bp, Homo sapien
aatataactatggactggaggatga

SEQ ID NO: 4091561 - DNA, 25 bp, Homo sapien
ctgggccgaccacagagtctgtaat

SEQ ID NO: 4091562 - DNA, 25 bp, Homo sapien
tgtgtctgacccataagatttgtgg

SEQ ID NO: 4091563 - DNA, 25 bp, Homo sapien
gagtgacttccaaaacagcgctatg

SEQ ID NO: 4091564 - DNA, 25 bp, Homo sapien
gctagccagaagacaagtgaaatca

SEQ ID NO: 4091565 - DNA, 25 bp, Homo sapien
tcagtggtctggaaaacgcatattg

SEQ ID NO: 4091566 - DNA, 25 bp, Homo sapien
taatgaacgaccgaaaactggaata

SEQ ID NO: 4091567 - DNA, 25 bp, Homo sapien
gaacactcaatgtttgaatacttgg

SEQ ID NO: 4091568 - DNA, 25 bp, Homo sapien
ggctatctcactatcttgaatcaaa

SEQ ID NO: 4091569 - DNA, 25 bp, Homo sapien
tatactgtgataatgcagattttga

SEQ ID NO: 4091570 - DNA, 25 bp, Homo sapien
ggatatctgtacagcctccactgaa

SEQ ID NO: 4091571 - DNA, 25 bp, Homo sapien
ctgaaaaataaacattcttcctaca

SEQ ID NO: 4091572 - DNA, 25 bp, Homo sapien
tgaaaaataaacattcttcctacac

SEQ ID NO: 4091573 - DNA, 25 bp, Homo sapien
ttcttcgctatttgctgcttctcta

SEQ ID NO: 4091574 - DNA, 25 bp, Homo sapien
tcttcgctatttgctgcttctctaa

SEQ ID NO: 4091575 - DNA, 25 bp, Homo sapien
tttcttcgctatttgctgcttctct

SEQ ID NO: 4091576 - DNA, 25 bp, Homo sapien
tctgctacatgtaggcctgaaagct

SEQ ID NO: 4091577 - DNA, 25 bp, Homo sapien
tcttctgtctgctacatgtaggcct

SEQ ID NO: 4091578 - DNA, 25 bp, Homo sapien
ctgaggcgttagtcaaagatacagg

SEQ ID NO: 4091579 - DNA, 25 bp, Homo sapien
tgaggcgttagtcaaagatacagga

SEQ ID NO: 4091580 - DNA, 25 bp, Homo sapien
gaatcagcctaacctttgcataggt

SEQ ID NO: 4091581 - DNA, 25 bp, Homo sapien
gaattcaggcaagtcgcaacagctc

SEQ ID NO: 4091582 - DNA, 25 bp, Homo sapien
ggtgggagcaactgcaaatggtaaa

SEQ ID NO: 4091583 - DNA, 25 bp, Homo sapien
ccatttttcaagtggagatagggaa

SEQ ID NO: 4091584 - DNA, 25 bp, Homo sapien
caaaatctgtacagggatccaaaga

SEQ ID NO: 4091585 - DNA, 25 bp, Homo sapien
gatgaatagctcaaaatgcctacag

SEQ ID NO: 4091586 - DNA, 25 bp, Homo sapien
cagcaggagaaaacaatgggccagg

SEQ ID NO: 4091587 - DNA, 25 bp, Homo sapien
actctgggcaagttgacaaatatcc

SEQ ID NO: 4091588 - DNA, 25 bp, Homo sapien
gctgtgccaaattaccgatgtggga

SEQ ID NO: 4091589 - DNA, 25 bp, Homo sapien
accgatgtgggagcaggtcttgtca

SEQ ID NO: 4091590 - DNA, 25 bp, Homo sapien
ttaggttggcgaggaattgtggtca

SEQ ID NO: 4091591 - DNA, 25 bp, Homo sapien
gaaatactagctgtgccaaattacc

SEQ ID NO: 4091592 - DNA, 25 bp, Homo sapien
taacagaatttgtgaatacacccat

SEQ ID NO: 4091593 - DNA, 25 bp, Homo sapien
ctatctagcaaaagatcaatccgtt

SEQ ID NO: 4091594 - DNA, 25 bp, Homo sapien
tacacccatgagtcaagacatcagt

SEQ ID NO: 4091595 - DNA, 25 bp, Homo sapien
gcaaaagatcaatccgttaaaagaa

SEQ ID NO: 4091596 - DNA, 25 bp, Homo sapien
aacagcatggaataggggtttgctg

SEQ ID NO: 4091597 - DNA, 25 bp, Homo sapien
acagcatggaataggggtttgctgt

SEQ ID NO: 4091598 - DNA, 25 bp, Homo sapien
gggtcaataggagaatctcccagag

SEQ ID NO: 4091599 - DNA, 25 bp, Homo sapien
tgtttgcagacagtgtatcagtgaa

SEQ ID NO: 4091600 - DNA, 25 bp, Homo sapien
gtgtatcagtgaaggaatcgctttc

SEQ ID NO: 4091601 - DNA, 25 bp, Homo sapien
gaatcgctttctgggtcaataggag

SEQ ID NO: 4091602 - DNA, 25 bp, Homo sapien
gccttctattctagccacaagtgat

SEQ ID NO: 4091603 - DNA, 25 bp, Homo sapien
tagggctttagatctacttgcacaa

SEQ ID NO: 4091604 - DNA, 25 bp, Homo sapien
cacaagtgattaacgctacaaggct

SEQ ID NO: 4091605 - DNA, 25 bp, Homo sapien
gcaataaattccatatagggcttta

SEQ ID NO: 4091606 - DNA, 25 bp, Homo sapien
ggaagttactatgtttggatcagct

SEQ ID NO: 4091607 - DNA, 25 bp, Homo sapien
cctattctgctttacaaggacactg

SEQ ID NO: 4091608 - DNA, 25 bp, Homo sapien
gctgagtagtcttttgaggcattcc

SEQ ID NO: 4091609 - DNA, 25 bp, Homo sapien
tgaggcctacgtcaagagtcttgtg

SEQ ID NO: 4091610 - DNA, 25 bp, Homo sapien
catgcagacaaaccaagtaagccaa

SEQ ID NO: 4091611 - DNA, 25 bp, Homo sapien
gagttaattaagagagaatgttcca

SEQ ID NO: 4091612 - DNA, 25 bp, Homo sapien
tgctaatttcgcaagtatgttcact

SEQ ID NO: 4091613 - DNA, 25 bp, Homo sapien
tgttccatatgggtcctaggagtgg

SEQ ID NO: 4091614 - DNA, 25 bp, Homo sapien
ttcctcttgagatcagcaacaaggt

SEQ ID NO: 4091615 - DNA, 25 bp, Homo sapien
tgaaatatttaaagccttcctcttg

SEQ ID NO: 4091616 - DNA, 25 bp, Homo sapien
aatcctagagtagccatcatacctg

SEQ ID NO: 4091617 - DNA, 25 bp, Homo sapien
caatgcaccatgatccagcttggag

SEQ ID NO: 4091618 - DNA, 25 bp, Homo sapien
ggaatgtcttcgtaatgtggagtag

SEQ ID NO: 4091619 - DNA, 25 bp, Homo sapien
tcatacttgtaatctgcaaccactg

SEQ ID NO: 4091620 - DNA, 25 bp, Homo sapien
tccattacggagagatccacggagc

SEQ ID NO: 4091621 - DNA, 25 bp, Homo sapien
tccacggagctgatcccaaagttgg

SEQ ID NO: 4091622 - DNA, 25 bp, Homo sapien
gaataataaggtggagatgcaggct

SEQ ID NO: 4091623 - DNA, 25 bp, Homo sapien
gatgcaggctccactttgattgcac

SEQ ID NO: 4091624 - DNA, 25 bp, Homo sapien
gacacgacattcaattgccatgagg

SEQ ID NO: 4091625 - DNA, 25 bp, Homo sapien
gaactccatagtgaaatccagaagc

SEQ ID NO: 4091626 - DNA, 25 bp, Homo sapien
cttccattgatcagtgaagaagaca

SEQ ID NO: 4091627 - DNA, 25 bp, Homo sapien
ctgtgtccagtaagctatctaaccc

SEQ ID NO: 4091628 - DNA, 25 bp, Homo sapien
gcagatcctggatagggcatattct

SEQ ID NO: 4091629 - DNA, 25 bp, Homo sapien
cactaaagttcattagtgagaacag

SEQ ID NO: 4091630 - DNA, 25 bp, Homo sapien
catagataagcttcaatctgattgt

SEQ ID NO: 4091631 - DNA, 25 bp, Homo sapien
tcatagataagcttcaatctgattg

SEQ ID NO: 4091632 - DNA, 25 bp, Homo sapien
caatctgattgttctccggaagaaa

SEQ ID NO: 4091633 - DNA, 25 bp, Homo sapien
cttcaatctgattgttctccggaag

SEQ ID NO: 4091634 - DNA, 25 bp, Homo sapien
ttttttgtggatccgacagttaaga

SEQ ID NO: 4091635 - DNA, 25 bp, Homo sapien
ggcatttctgaaaccgacagtactg

SEQ ID NO: 4091636 - DNA, 25 bp, Homo sapien
tggatccgacagttaagatcacatc

SEQ ID NO: 4091637 - DNA, 25 bp, Homo sapien
attatgagacatccccactgcaagg

SEQ ID NO: 4091638 - DNA, 25 bp, Homo sapien
tctaaattctggcatttggtggaaa

SEQ ID NO: 4091639 - DNA, 25 bp, Homo sapien
tggctttagtgtccactggtctggc

SEQ ID NO: 4091640 - DNA, 25 bp, Homo sapien
agagaaatgttttatcgccatgcaa

SEQ ID NO: 4091641 - DNA, 25 bp, Homo sapien
gttttatcgccatgcaatattctaa

SEQ ID NO: 4091642 - DNA, 25 bp, Homo sapien
tgtcagccaggcaaccaatcagaac

SEQ ID NO: 4091643 - DNA, 25 bp, Homo sapien
gaccttactgagttagttccacaga

SEQ ID NO: 4091644 - DNA, 25 bp, Homo sapien
gaagtgaaggaaacgaatactcgtc

SEQ ID NO: 4091645 - DNA, 25 bp, Homo sapien
cacaactcatggacgttccttgaag

SEQ ID NO: 4091646 - DNA, 25 bp, Homo sapien
tcttcccactccagactcccgagta

SEQ ID NO: 4091647 - DNA, 25 bp, Homo sapien
atatggagtcttgtcatgtttccca

SEQ ID NO: 4091648 - DNA, 25 bp, Homo sapien
cacaagccatcacgcccgactaatt

SEQ ID NO: 4091649 - DNA, 25 bp, Homo sapien
ttttagtagatatggagtcttgtca

SEQ ID NO: 4091650 - DNA, 25 bp, Homo sapien
ctttgctttggtcagcgggaaggac

SEQ ID NO: 4091651 - DNA, 25 bp, Homo sapien
tggattcagctggtcgatatcactg

SEQ ID NO: 4091652 - DNA, 25 bp, Homo sapien
tatcactggagatctccgccaacag

SEQ ID NO: 4091653 - DNA, 25 bp, Homo sapien
gaggtcagcggactctggattcagc

SEQ ID NO: 4091654 - DNA, 25 bp, Homo sapien
catttgtagcgcagtaaaccattta

SEQ ID NO: 4091655 - DNA, 25 bp, Homo sapien
taaagttaggatgaccaatacattg

SEQ ID NO: 4091656 - DNA, 25 bp, Homo sapien
cctaaaagagggtgataggctcagg

SEQ ID NO: 4091657 - DNA, 25 bp, Homo sapien
gcctgcaatatgttaacagccaaca

SEQ ID NO: 4091658 - DNA, 25 bp, Homo sapien
gaaaatgacaaacgcttggcctctg

SEQ ID NO: 4091659 - DNA, 25 bp, Homo sapien
gataagagcacgttgcacaccagta

SEQ ID NO: 4091660 - DNA, 25 bp, Homo sapien
ggcagggcgcattctacaataggca

SEQ ID NO: 4091661 - DNA, 25 bp, Homo sapien
cattttgaaaggtgcaagtggccct

SEQ ID NO: 4091662 - DNA, 25 bp, Homo sapien
gaaatgaattggcactactatcctg

SEQ ID NO: 4091663 - DNA, 25 bp, Homo sapien
gctcagtcgggcttttccagagata

SEQ ID NO: 4091664 - DNA, 25 bp, Homo sapien
aaagttggcaggtacatcaagcgct

SEQ ID NO: 4091665 - DNA, 25 bp, Homo sapien
tttgcagacagagtgcagccggagc

SEQ ID NO: 4091666 - DNA, 25 bp, Homo sapien
gattgaatgagtgtagtcaacccct

SEQ ID NO: 4091667 - DNA, 25 bp, Homo sapien
cctgtcagagtgaaaactggcttgg

SEQ ID NO: 4091668 - DNA, 25 bp, Homo sapien
tctgactaatggataaacggaagcc

SEQ ID NO: 4091669 - DNA, 25 bp, Homo sapien
ggaaaaatgtgtgcctcatcgagtg

SEQ ID NO: 4091670 - DNA, 25 bp, Homo sapien
tagggcacaaaatcctgctaatttt

SEQ ID NO: 4091671 - DNA, 25 bp, Homo sapien
gaaactctgtaatagttgaacatag

SEQ ID NO: 4091672 - DNA, 25 bp, Homo sapien
ccttggcaattgatgttggtcagga

SEQ ID NO: 4091673 - DNA, 25 bp, Homo sapien
tgtcccctcatataaagctccaggt

SEQ ID NO: 4091674 - DNA, 25 bp, Homo sapien
caaagagcagatatagaaggcctac

SEQ ID NO: 4091675 - DNA, 25 bp, Homo sapien
tacttgtatacctgaaagcactgga

SEQ ID NO: 4091676 - DNA, 25 bp, Homo sapien
gcagattacagctcttgaaccaaga

SEQ ID NO: 4091677 - DNA, 25 bp, Homo sapien
ggagttaaaccttgaatcctgttca

SEQ ID NO: 4091678 - DNA, 25 bp, Homo sapien
taaagtcaccaaaaggctttcgcag

SEQ ID NO: 4091679 - DNA, 25 bp, Homo sapien
tgtgtaaatgatctcgtggactcca

SEQ ID NO: 4091680 - DNA, 25 bp, Homo sapien
gaagccttggccctcggatatgaga

SEQ ID NO: 4091681 - DNA, 25 bp, Homo sapien
tagaaactcccttgtcatgaagcct

SEQ ID NO: 4091682 - DNA, 25 bp, Homo sapien
tatgacactctttcttggtacagtg

SEQ ID NO: 4091683 - DNA, 25 bp, Homo sapien
tgcagactaacactaaggaaatcca

SEQ ID NO: 4091684 - DNA, 25 bp, Homo sapien
gcacttaaagtgacaatgcagacta

SEQ ID NO: 4091685 - DNA, 25 bp, Homo sapien
gttttgcacgtgtagtgatgattca

SEQ ID NO: 4091686 - DNA, 25 bp, Homo sapien
ccatctgcagccgttgtagtgatat

SEQ ID NO: 4091687 - DNA, 25 bp, Homo sapien
taggacggcgatggcaatttgcctt

SEQ ID NO: 4091688 - DNA, 25 bp, Homo sapien
gccgttgtagtgatatcggcagctt

SEQ ID NO: 4091689 - DNA, 25 bp, Homo sapien
gcttctctgtcattaggacggcgat

SEQ ID NO: 4091690 - DNA, 25 bp, Homo sapien
ccattttagagctgggaacagtctc

SEQ ID NO: 4091691 - DNA, 25 bp, Homo sapien
gaatgagtgttctgccgtgacagct

SEQ ID NO: 4091692 - DNA, 25 bp, Homo sapien
tttgttccagagagaagacgaccct

SEQ ID NO: 4091693 - DNA, 25 bp, Homo sapien
gatgaatactcccaaacccggtgct

SEQ ID NO: 4091694 - DNA, 25 bp, Homo sapien
tctgaaaccgactgtccctagggcg

SEQ ID NO: 4091695 - DNA, 25 bp, Homo sapien
tgcctgtggacaaatcatctaatct

SEQ ID NO: 4091696 - DNA, 25 bp, Homo sapien
gttcacaggcatgttctaggaggca

SEQ ID NO: 4091697 - DNA, 25 bp, Homo sapien
gaaagaccttagttcaggtgtgggc

SEQ ID NO: 4091698 - DNA, 25 bp, Homo sapien
ttgctggaaacacttggctccggtg

SEQ ID NO: 4091699 - DNA, 25 bp, Homo sapien
gaactggcctctctaggagtggaga

SEQ ID NO: 4091700 - DNA, 25 bp, Homo sapien
gatgatgttaatctactaggtcccg

SEQ ID NO: 4091701 - DNA, 25 bp, Homo sapien
gactaacatgcaactgatcagggct

SEQ ID NO: 4091702 - DNA, 25 bp, Homo sapien
gggtcttcctcgcagttgctctatg

SEQ ID NO: 4091703 - DNA, 25 bp, Homo sapien
ggtttaatgactacagatcctcctg

SEQ ID NO: 4091704 - DNA, 25 bp, Homo sapien
gaacaaatgatctggtcctggcctg

SEQ ID NO: 4091705 - DNA, 25 bp, Homo sapien
ttgctctatgggaatgaaaaagcca

SEQ ID NO: 4091706 - DNA, 25 bp, Homo sapien
aggtggggtcttgctacgtagccca

SEQ ID NO: 4091707 - DNA, 25 bp, Homo sapien
tagaggtggggtcttgctacgtagc

SEQ ID NO: 4091708 - DNA, 25 bp, Homo sapien
ggtggggtcttgctacgtagcccag

SEQ ID NO: 4091709 - DNA, 25 bp, Homo sapien
cttaatctgttgcccagtgcagtgg

SEQ ID NO: 4091710 - DNA, 25 bp, Homo sapien
taatatatccccactgatgtgcaga

SEQ ID NO: 4091711 - DNA, 25 bp, Homo sapien
tatagcttctattgtgaatggaccc

SEQ ID NO: 4091712 - DNA, 25 bp, Homo sapien
gctccttcctgatgaatctacgttt

SEQ ID NO: 4091713 - DNA, 25 bp, Homo sapien
cttttcagtggtaagattgcaagca

SEQ ID NO: 4091714 - DNA, 25 bp, Homo sapien
ggtgctcaccaccacgcctttctaa

SEQ ID NO: 4091715 - DNA, 25 bp, Homo sapien
tatgcctcccgggatcaagctattc

SEQ ID NO: 4091716 - DNA, 25 bp, Homo sapien
taggtgctcaccaccacgcctttct

SEQ ID NO: 4091717 - DNA, 25 bp, Homo sapien
tgctcaccaccacgcctttctaatt

SEQ ID NO: 4091718 - DNA, 25 bp, Homo sapien
gctccagggcttgtagcaggttgtc

SEQ ID NO: 4091719 - DNA, 25 bp, Homo sapien
tcagggtggttcagcttcagctgga

SEQ ID NO: 4091720 - DNA, 25 bp, Homo sapien
tccgtgacaatctgtctgaggtctg

SEQ ID NO: 4091721 - DNA, 25 bp, Homo sapien
cagtagctgcacgtgttccgtgaca

SEQ ID NO: 4091722 - DNA, 25 bp, Homo sapien
tgtctgtctccgtcttcttgatcac

SEQ ID NO: 4091723 - DNA, 25 bp, Homo sapien
gactcatgtctgtctccgtcttctt

SEQ ID NO: 4091724 - DNA, 25 bp, Homo sapien
gagcgggtgaagactcatgtctgtc

SEQ ID NO: 4091725 - DNA, 25 bp, Homo sapien
ctgcaggagcgggtgaagactcatg

SEQ ID NO: 4091726 - DNA, 25 bp, Homo sapien
tttccctcagaatagtgcaactgga

SEQ ID NO: 4091727 - DNA, 25 bp, Homo sapien
gattttccctcagaatagtgcaact

SEQ ID NO: 4091728 - DNA, 25 bp, Homo sapien
ttttccctcagaatagtgcaactgg

SEQ ID NO: 4091729 - DNA, 25 bp, Homo sapien
tcagattttccctcagaatagtgca

SEQ ID NO: 4091730 - DNA, 25 bp, Homo sapien
cagtgcatttcttcccccctctctc

SEQ ID NO: 4091731 - DNA, 25 bp, Homo sapien
gcccagtgcatttcttcccccctct

SEQ ID NO: 4091732 - DNA, 25 bp, Homo sapien
atgagccgccgtgctcagcccagtg

SEQ ID NO: 4091733 - DNA, 25 bp, Homo sapien
cgtgctcagcccagtgcatttcttc

SEQ ID NO: 4091734 - DNA, 25 bp, Homo sapien
tcctttctctgactatgggagcctt

SEQ ID NO: 4091735 - DNA, 25 bp, Homo sapien
tctcctttctctgactatgggagcc

SEQ ID NO: 4091736 - DNA, 25 bp, Homo sapien
cattctcctttctctgactatggga

SEQ ID NO: 4091737 - DNA, 25 bp, Homo sapien
cctttctctgactatgggagccttc

SEQ ID NO: 4091738 - DNA, 25 bp, Homo sapien
tgttatcttcgtcagacctgcccat

SEQ ID NO: 4091739 - DNA, 25 bp, Homo sapien
tgtgtatgtgttatcttcgtcagac

SEQ ID NO: 4091740 - DNA, 25 bp, Homo sapien
tatgtgttatcttcgtcagacctgc

SEQ ID NO: 4091741 - DNA, 25 bp, Homo sapien
ctgctgtgtatgtgttatcttcgtc

SEQ ID NO: 4091742 - DNA, 25 bp, Homo sapien
catgacgtgccgtgcttacaagaca

SEQ ID NO: 4091743 - DNA, 25 bp, Homo sapien
ttacaagacaccatctgggataggg

SEQ ID NO: 4091744 - DNA, 25 bp, Homo sapien
gcaggaacttcctagagccaaggtc

SEQ ID NO: 4091745 - DNA, 25 bp, Homo sapien
tcaggtgctcttgttggaaccgcag

SEQ ID NO: 4091746 - DNA, 25 bp, Homo sapien
ttgtggatgttctttcaagtcctgc

SEQ ID NO: 4091747 - DNA, 25 bp, Homo sapien
gggcatgcgacctgctggggtgggt

SEQ ID NO: 4091748 - DNA, 25 bp, Homo sapien
cccattgtggatgttctttcaagtc

SEQ ID NO: 4091749 - DNA, 25 bp, Homo sapien
cattgtggatgttctttcaagtcct

SEQ ID NO: 4091750 - DNA, 25 bp, Homo sapien
tggctttctgcggagtgtgcctgca

SEQ ID NO: 4091751 - DNA, 25 bp, Homo sapien
acttggctttctgcggagtgtgcct

SEQ ID NO: 4091752 - DNA, 25 bp, Homo sapien
gagctgacgtgttggctggaggaca

SEQ ID NO: 4091753 - DNA, 25 bp, Homo sapien
tggaggacacgtgtatccggtccct

SEQ ID NO: 4091754 - DNA, 25 bp, Homo sapien
tgtggacacacacggcatatccagg

SEQ ID NO: 4091755 - DNA, 25 bp, Homo sapien
ggacacacacggcatatccaggaac

SEQ ID NO: 4091756 - DNA, 25 bp, Homo sapien
ccagaggtgtggacacacacggcat

SEQ ID NO: 4091757 - DNA, 25 bp, Homo sapien
gaggtgtggacacacacggcatatc

SEQ ID NO: 4091758 - DNA, 25 bp, Homo sapien
gccagaagactggaatgagaatcca

SEQ ID NO: 4091759 - DNA, 25 bp, Homo sapien
gctctcttgattccctccacgtggt

SEQ ID NO: 4091760 - DNA, 25 bp, Homo sapien
tcagtgacctgctcatccattcagt

SEQ ID NO: 4091761 - DNA, 25 bp, Homo sapien
tttccccagcgtgtctgctcagtga

SEQ ID NO: 4091762 - DNA, 25 bp, Homo sapien
cagagcatttccgaatcccttgctc

SEQ ID NO: 4091763 - DNA, 25 bp, Homo sapien
gagcatttccgaatcccttgctcta

SEQ ID NO: 4091764 - DNA, 25 bp, Homo sapien
agagcatttccgaatcccttgctct

SEQ ID NO: 4091765 - DNA, 25 bp, Homo sapien
tttttgtcattttctctaaactcat

SEQ ID NO: 4091766 - DNA, 25 bp, Homo sapien
ttttttgtcattttctctaaactca

SEQ ID NO: 4091767 - DNA, 25 bp, Homo sapien
caccttcttttttgtcattttctct

SEQ ID NO: 4091768 - DNA, 25 bp, Homo sapien
ttcattagttatctgtgggacttgg

SEQ ID NO: 4091769 - DNA, 25 bp, Homo sapien
ggtagtagataaagggacttcagct

SEQ ID NO: 4091770 - DNA, 25 bp, Homo sapien
tcaatatcaaatgctaaatatatgg

SEQ ID NO: 4091771 - DNA, 25 bp, Homo sapien
ggatatacaccaaattcattagtta

SEQ ID NO: 4091772 - DNA, 25 bp, Homo sapien
gaaagatctgtagcactgatgatga

SEQ ID NO: 4091773 - DNA, 25 bp, Homo sapien
aaagatctgtagcactgatgatgag

SEQ ID NO: 4091774 - DNA, 25 bp, Homo sapien
tgagagctacctggattcctaccat

SEQ ID NO: 4091775 - DNA, 25 bp, Homo sapien
atgagagctacctggattcctacca

SEQ ID NO: 4091776 - DNA, 25 bp, Homo sapien
ctgtgtacgctgcagcatgcgggga

SEQ ID NO: 4091777 - DNA, 25 bp, Homo sapien
acgctgcagcatgcggggaacttgc

SEQ ID NO: 4091778 - DNA, 25 bp, Homo sapien
cagcatgcggggaacttgcaaggac

SEQ ID NO: 4091779 - DNA, 25 bp, Homo sapien
catgcggggaacttgcaaggacgtt

SEQ ID NO: 4091780 - DNA, 25 bp, Homo sapien
acaccgctgccgtcaagcagtgcgg

SEQ ID NO: 4091781 - DNA, 25 bp, Homo sapien
cgcagagctcccgtcgggacttggc

SEQ ID NO: 4091782 - DNA, 25 bp, Homo sapien
agtgcggccgcaaagccagccgagt

SEQ ID NO: 4091783 - DNA, 25 bp, Homo sapien
ctctctgcaggattgtacggaagcc

SEQ ID NO: 4091784 - DNA, 25 bp, Homo sapien
cttggccccacgcgctcgccgttac

SEQ ID NO: 4091785 - DNA, 25 bp, Homo sapien
ctttcttggccccacgcgctcgccg

SEQ ID NO: 4091786 - DNA, 25 bp, Homo sapien
tttcttggccccacgcgctcgccgt

SEQ ID NO: 4091787 - DNA, 25 bp, Homo sapien
ttcttggccccacgcgctcgccgtt

SEQ ID NO: 4091788 - DNA, 25 bp, Homo sapien
tcctttcgctgcaaaacaccaaact

SEQ ID NO: 4091789 - DNA, 25 bp, Homo sapien
caccaaactcggaaagggccgcgct

SEQ ID NO: 4091790 - DNA, 25 bp, Homo sapien
tttcggaagagcgagatttcctttc

SEQ ID NO: 4091791 - DNA, 25 bp, Homo sapien
agggccgcgctttcctcgcccaggg

SEQ ID NO: 4091792 - DNA, 25 bp, Homo sapien
agcgcggaggagtcagtgaccgggc

SEQ ID NO: 4091793 - DNA, 25 bp, Homo sapien
gcactgtctcggccggctgtgcgac

SEQ ID NO: 4091794 - DNA, 25 bp, Homo sapien
accgggcgcactcggaagcctggct

SEQ ID NO: 4091795 - DNA, 25 bp, Homo sapien
tgcaggcgcacgaggaaagcgcgga

SEQ ID NO: 4091796 - DNA, 25 bp, Homo sapien
agccctgaacaaggcgccggcgttt

SEQ ID NO: 4091797 - DNA, 25 bp, Homo sapien
gctgcggctcctctcgggcattgtc

SEQ ID NO: 4091798 - DNA, 25 bp, Homo sapien
cgggcattgtcagctgcaccttgcg

SEQ ID NO: 4091799 - DNA, 25 bp, Homo sapien
tcctctcgggcattgtcagctgcac

SEQ ID NO: 4091800 - DNA, 25 bp, Homo sapien
tgcttctttccttgactacccccac

SEQ ID NO: 4091801 - DNA, 25 bp, Homo sapien
gcttctttccttgactacccccaca

SEQ ID NO: 4091802 - DNA, 25 bp, Homo sapien
ttgcttctttccttgactaccccca

SEQ ID NO: 4091803 - DNA, 25 bp, Homo sapien
gcacacaggctaacacctcttaggt

SEQ ID NO: 4091804 - DNA, 25 bp, Homo sapien
cacaggctaacacctcttaggtgat

SEQ ID NO: 4091805 - DNA, 25 bp, Homo sapien
tcttattcttccctcgagcacacag

SEQ ID NO: 4091806 - DNA, 25 bp, Homo sapien
cgagcacacaggctaacacctctta

SEQ ID NO: 4091807 - DNA, 25 bp, Homo sapien
gactcgtacatttcagaagggtgac

SEQ ID NO: 4091808 - DNA, 25 bp, Homo sapien
tctagtttcatggaagagtcctcct

SEQ ID NO: 4091809 - DNA, 25 bp, Homo sapien
gaatgacttcacagataccagcgtg

SEQ ID NO: 4091810 - DNA, 25 bp, Homo sapien
taactccgcgaatacgaagaccact

SEQ ID NO: 4091811 - DNA, 25 bp, Homo sapien
aatcgaacaggactggaggagtctg

SEQ ID NO: 4091812 - DNA, 25 bp, Homo sapien
aaatcgaacaggactggaggagtct

SEQ ID NO: 4091813 - DNA, 25 bp, Homo sapien
tgtcaaacacatagttacgacatga

SEQ ID NO: 4091814 - DNA, 25 bp, Homo sapien
atagttacgacatgatccagcaact

SEQ ID NO: 4091815 - DNA, 25 bp, Homo sapien
gtacttgcatcccattggcaaggga

SEQ ID NO: 4091816 - DNA, 25 bp, Homo sapien
tcccattggcaagggatgccatcaa

SEQ ID NO: 4091817 - DNA, 25 bp, Homo sapien
ttggcaagggatgccatcaagcctg

SEQ ID NO: 4091818 - DNA, 25 bp, Homo sapien
gtggctcctgcactcagtacttgca

SEQ ID NO: 4091819 - DNA, 25 bp, Homo sapien
tcctgaccaaaagggattggcaatg

SEQ ID NO: 4091820 - DNA, 25 bp, Homo sapien
gttgttaatcatttcagcacggaat

SEQ ID NO: 4091821 - DNA, 25 bp, Homo sapien
cagaggaccatggtcctgaccaaaa

SEQ ID NO: 4091822 - DNA, 25 bp, Homo sapien
tcagcacggaatatcttgaattctt

SEQ ID NO: 4091823 - DNA, 25 bp, Homo sapien
tatatagtctacgtaggccctccca

SEQ ID NO: 4091824 - DNA, 25 bp, Homo sapien
caaaatcggcagatggtcgagtccc

SEQ ID NO: 4091825 - DNA, 25 bp, Homo sapien
tctgagttaacaagaggttcgcccc

SEQ ID NO: 4091826 - DNA, 25 bp, Homo sapien
aaagtccccgtttggtacacatgca

SEQ ID NO: 4091827 - DNA, 25 bp, Homo sapien
tgtgaagcttggacggcttcttgaa

SEQ ID NO: 4091828 - DNA, 25 bp, Homo sapien
atctgaaattgtgaagcttggacgg

SEQ ID NO: 4091829 - DNA, 25 bp, Homo sapien
gaaattgtgaagcttggacggcttc

SEQ ID NO: 4091830 - DNA, 25 bp, Homo sapien
gcttggacggcttcttgaaagaata

SEQ ID NO: 4091831 - DNA, 25 bp, Homo sapien
aatgattaatttgtcaaaagaactg

SEQ ID NO: 4091832 - DNA, 25 bp, Homo sapien
gaactgaatgatacaacaactttac

SEQ ID NO: 4091833 - DNA, 25 bp, Homo sapien
gattaatttgtcaaaagaactgaat

SEQ ID NO: 4091834 - DNA, 25 bp, Homo sapien
gatataagatcaaaaacaaaggaaa

SEQ ID NO: 4091835 - DNA, 25 bp, Homo sapien
tactcaaatggccaggctcactggc

SEQ ID NO: 4091836 - DNA, 25 bp, Homo sapien
tggagacggagttgcattatgtcac

SEQ ID NO: 4091837 - DNA, 25 bp, Homo sapien
ttagctagctgcgatggcatgtgcc

SEQ ID NO: 4091838 - DNA, 25 bp, Homo sapien
tattgtgacaagaagtaactgatgc

SEQ ID NO: 4091839 - DNA, 25 bp, Homo sapien
gtgatgataggcatgtttgtcttca

SEQ ID NO: 4091840 - DNA, 25 bp, Homo sapien
taaacccacgtatgacacatgagga

SEQ ID NO: 4091841 - DNA, 25 bp, Homo sapien
cacatgaggaaagtgctgcacgccg

SEQ ID NO: 4091842 - DNA, 25 bp, Homo sapien
accacaaagtgtggcactgcagaga

SEQ ID NO: 4091843 - DNA, 25 bp, Homo sapien
gcaccgacagtctaaacccacgtat

SEQ ID NO: 4091844 - DNA, 25 bp, Homo sapien
gttgtactgatgaatgcccctttat

SEQ ID NO: 4091845 - DNA, 25 bp, Homo sapien
atttgcacagggcaccgttccctat

SEQ ID NO: 4091846 - DNA, 25 bp, Homo sapien
tattgttgtactgatgaatgcccct

SEQ ID NO: 4091847 - DNA, 25 bp, Homo sapien
gcaccgttccctattgttgtactga

SEQ ID NO: 4091848 - DNA, 25 bp, Homo sapien
taagaagactgaacagtgctcgatg

SEQ ID NO: 4091849 - DNA, 25 bp, Homo sapien
ggttaagaagactgaacagtgctcg

SEQ ID NO: 4091850 - DNA, 25 bp, Homo sapien
ctgaacagtgctcgatgcggcagca

SEQ ID NO: 4091851 - DNA, 25 bp, Homo sapien
aagactgaacagtgctcgatgcggc

SEQ ID NO: 4091852 - DNA, 25 bp, Homo sapien
cccctgtctacgcatcagctctgct

SEQ ID NO: 4091853 - DNA, 25 bp, Homo sapien
gctgcccactcaacactatgctgat

SEQ ID NO: 4091854 - DNA, 25 bp, Homo sapien
cctgtctacgcatcagctctgctgc

SEQ ID NO: 4091855 - DNA, 25 bp, Homo sapien
ctgcccactcaacactatgctgata

SEQ ID NO: 4091856 - DNA, 25 bp, Homo sapien
gagttaagcttgtcatgcacttgag

SEQ ID NO: 4091857 - DNA, 25 bp, Homo sapien
ttccagagttaagcttgtcatgcac

SEQ ID NO: 4091858 - DNA, 25 bp, Homo sapien
gcggtttcgtgtaatccttgaggat

SEQ ID NO: 4091859 - DNA, 25 bp, Homo sapien
caggaggatgctcaagcggtttcgt

SEQ ID NO: 4091860 - DNA, 25 bp, Homo sapien
aatggctcacggggatcacccacac

SEQ ID NO: 4091861 - DNA, 25 bp, Homo sapien
ggtgaggcatcctctcgcacgcttt

SEQ ID NO: 4091862 - DNA, 25 bp, Homo sapien
gaggcatcctctcgcacgcttttct

SEQ ID NO: 4091863 - DNA, 25 bp, Homo sapien
ctcacggggatcacccacaccacct

SEQ ID NO: 4091864 - DNA, 25 bp, Homo sapien
aggccgatgtgctggctgccgtctt

SEQ ID NO: 4091865 - DNA, 25 bp, Homo sapien
tctcgctcatggcacactccgcttc

SEQ ID NO: 4091866 - DNA, 25 bp, Homo sapien
ttcctcgaccagcacgtactcatgg

SEQ ID NO: 4091867 - DNA, 25 bp, Homo sapien
tggctgccgtcttcatgatgaaggc

SEQ ID NO: 4091868 - DNA, 25 bp, Homo sapien
gattcacattctattgtgttaatat

SEQ ID NO: 4091869 - DNA, 25 bp, Homo sapien
tctgcatattaacctgtttctttgc

SEQ ID NO: 4091870 - DNA, 25 bp, Homo sapien
gatttcttctgcatattaacctgtt

SEQ ID NO: 4091871 - DNA, 25 bp, Homo sapien
tatggatttcttctgcatattaacc

SEQ ID NO: 4091872 - DNA, 25 bp, Homo sapien
tcttctgcatattaacctgtttctt

SEQ ID NO: 4091873 - DNA, 25 bp, Homo sapien
ggctgagttgcaaatactcaaagat

SEQ ID NO: 4091874 - DNA, 25 bp, Homo sapien
gctgagttgcaaatactcaaagatc

SEQ ID NO: 4091875 - DNA, 25 bp, Homo sapien
aaacccctcgaatcttctgtggaat

SEQ ID NO: 4091876 - DNA, 25 bp, Homo sapien
tcttaatgagaaaagaagtactcag

SEQ ID NO: 4091877 - DNA, 25 bp, Homo sapien
ctcgaatcttctgtggaatgattgc

SEQ ID NO: 4091878 - DNA, 25 bp, Homo sapien
ggcatgagcaatcactctaattttt

SEQ ID NO: 4091879 - DNA, 25 bp, Homo sapien
gaatataccaaacaatagcgacttg

SEQ ID NO: 4091880 - DNA, 25 bp, Homo sapien
actgcattaagtagagggatcctgc

SEQ ID NO: 4091881 - DNA, 25 bp, Homo sapien
cccaagctaactttcaagaatgtag

SEQ ID NO: 4091882 - DNA, 25 bp, Homo sapien
gtgacctcggttcattaaagcctcg

SEQ ID NO: 4091883 - DNA, 25 bp, Homo sapien
gctgttcagtgtttgagacgtggct

SEQ ID NO: 4091884 - DNA, 25 bp, Homo sapien
tataaagcgctccacagtgctggga

SEQ ID NO: 4091885 - DNA, 25 bp, Homo sapien
ggaatgcctacgcatctgctgttca

SEQ ID NO: 4091886 - DNA, 25 bp, Homo sapien
tctaagaacgggtacatgtgggcta

SEQ ID NO: 4091887 - DNA, 25 bp, Homo sapien
tctaataactggatagcacagcctg

SEQ ID NO: 4091888 - DNA, 25 bp, Homo sapien
caaattgtcattgttagctagggcc

SEQ ID NO: 4091889 - DNA, 25 bp, Homo sapien
tccttaaatggctgagtcccttgca

SEQ ID NO: 4091890 - DNA, 25 bp, Homo sapien
tgaagtttgagatctgacagacctg

SEQ ID NO: 4091891 - DNA, 25 bp, Homo sapien
tcacaaacttgtgtcatccgtgggc

SEQ ID NO: 4091892 - DNA, 25 bp, Homo sapien
atggaaggcttcacaaacttgtgtc

SEQ ID NO: 4091893 - DNA, 25 bp, Homo sapien
aaacttgtgtcatccgtgggcaggg

SEQ ID NO: 4091894 - DNA, 25 bp, Homo sapien
tatatgtgctgttgaagacatcact

SEQ ID NO: 4091895 - DNA, 25 bp, Homo sapien
aaatggttcattcaaatgtcttaga

SEQ ID NO: 4091896 - DNA, 25 bp, Homo sapien
tggttcattcaaatgtcttagattt

SEQ ID NO: 4091897 - DNA, 25 bp, Homo sapien
aatggttcattcaaatgtcttagat

SEQ ID NO: 4091898 - DNA, 25 bp, Homo sapien
ggttcattcaaatgtcttagatttt

SEQ ID NO: 4091899 - DNA, 25 bp, Homo sapien
aatacagcaagcagaaaatgctcat

SEQ ID NO: 4091900 - DNA, 25 bp, Homo sapien
ctgaaaatacagcaagcagaaaatg

SEQ ID NO: 4091901 - DNA, 25 bp, Homo sapien
gaaaatacagcaagcagaaaatgct

SEQ ID NO: 4091902 - DNA, 25 bp, Homo sapien
aaatacagcaagcagaaaatgctca

SEQ ID NO: 4091903 - DNA, 25 bp, Homo sapien
aaacatcccagagcatagaccaaga

SEQ ID NO: 4091904 - DNA, 25 bp, Homo sapien
aatacttaaacatcccagagcatag

SEQ ID NO: 4091905 - DNA, 25 bp, Homo sapien
agtaaatacttaaacatcccagagc

SEQ ID NO: 4091906 - DNA, 25 bp, Homo sapien
acttaaacatcccagagcatagacc

SEQ ID NO: 4091907 - DNA, 25 bp, Homo sapien
acacatttcagctaaggcccgcgag

SEQ ID NO: 4091908 - DNA, 25 bp, Homo sapien
ggctcagtttgtcccagcctaagat

SEQ ID NO: 4091909 - DNA, 25 bp, Homo sapien
caaacggctggaatacccatgaacg

SEQ ID NO: 4091910 - DNA, 25 bp, Homo sapien
tgtgtgaccttgtgaccccaatgtg

SEQ ID NO: 4091911 - DNA, 25 bp, Homo sapien
acccagcccttgcttcgaaagtaat

SEQ ID NO: 4091912 - DNA, 25 bp, Homo sapien
taggccatgtaggtggttctgaacg

SEQ ID NO: 4091913 - DNA, 25 bp, Homo sapien
gcttcgaaagtaatggtaggccatg

SEQ ID NO: 4091914 - DNA, 25 bp, Homo sapien
tgaacgtgggctgaactacagtgaa

SEQ ID NO: 4091915 - DNA, 25 bp, Homo sapien
tacgtaaacgtgaagaatattaaca

SEQ ID NO: 4091916 - DNA, 25 bp, Homo sapien
atcaaaggcccggatgccacggctc

SEQ ID NO: 4091917 - DNA, 25 bp, Homo sapien
caggcattacatggtatgtaggaga

SEQ ID NO: 4091918 - DNA, 25 bp, Homo sapien
gaactgtgacagaatgaatctttgt

SEQ ID NO: 4091919 - DNA, 25 bp, Homo sapien
gatagaagtcataaccatacatgcc

SEQ ID NO: 4091920 - DNA, 25 bp, Homo sapien
tccaaagtcaaagtacaggcaatct

SEQ ID NO: 4091921 - DNA, 25 bp, Homo sapien
aaagaagaggaataagactcatgcc

SEQ ID NO: 4091922 - DNA, 25 bp, Homo sapien
gatttcagatcaacgtaatgcaaag

SEQ ID NO: 4091923 - DNA, 25 bp, Homo sapien
tctatatgtagacagatcatctgca

SEQ ID NO: 4091924 - DNA, 25 bp, Homo sapien
gagagaggagtaagactcaacaaaa

SEQ ID NO: 4091925 - DNA, 25 bp, Homo sapien
caaaataatgagagaggagtaagac

SEQ ID NO: 4091926 - DNA, 25 bp, Homo sapien
tcaataatctatatgtagacagatc

SEQ ID NO: 4091927 - DNA, 25 bp, Homo sapien
aatggagggcctttccgatatagca

SEQ ID NO: 4091928 - DNA, 25 bp, Homo sapien
aaaatggagggcctttccgatatag

SEQ ID NO: 4091929 - DNA, 25 bp, Homo sapien
aaatggagggcctttccgatatagc

SEQ ID NO: 4091930 - DNA, 25 bp, Homo sapien
taaaatgaacaattacggcacagat

SEQ ID NO: 4091931 - DNA, 25 bp, Homo sapien
tagcatctattcgtatcaggccagg

SEQ ID NO: 4091932 - DNA, 25 bp, Homo sapien
cgcacctggcctaagtgatgttaaa

SEQ ID NO: 4091933 - DNA, 25 bp, Homo sapien
tagaggccagaaattccttgtgtcc

SEQ ID NO: 4091934 - DNA, 25 bp, Homo sapien
ggagagagccttcaaaatggtcatc

SEQ ID NO: 4091935 - DNA, 25 bp, Homo sapien
caaaatggtcatcaactagctcgat

SEQ ID NO: 4091936 - DNA, 25 bp, Homo sapien
agaggcctgcggagagagccttcaa

SEQ ID NO: 4091937 - DNA, 25 bp, Homo sapien
aactagctcgataatgacagaataa

SEQ ID NO: 4091938 - DNA, 25 bp, Homo sapien
tctagcgcaataagggaagggtacg

SEQ ID NO: 4091939 - DNA, 25 bp, Homo sapien
tggatcccgagtatgcacatgagct

SEQ ID NO: 4091940 - DNA, 25 bp, Homo sapien
gaagcaatgcctacccagatcagat

SEQ ID NO: 4091941 - DNA, 25 bp, Homo sapien
gtcacatagcaacgatacccctggg

SEQ ID NO: 4091942 - DNA, 25 bp, Homo sapien
gtttaatcaaatagcacagcataag

SEQ ID NO: 4091943 - DNA, 25 bp, Homo sapien
tagtagagggtttaatcaaatagca

SEQ ID NO: 4091944 - DNA, 25 bp, Homo sapien
tcatagtagagggtttaatcaaata

SEQ ID NO: 4091945 - DNA, 25 bp, Homo sapien
gagggtttaatcaaatagcacagca

SEQ ID NO: 4091946 - DNA, 25 bp, Homo sapien
ttaaggctctacacacagagggagg

SEQ ID NO: 4091947 - DNA, 25 bp, Homo sapien
ggaccaactgaagggaagacgtgct

SEQ ID NO: 4091948 - DNA, 25 bp, Homo sapien
acatactggatgttgggaggagcca

SEQ ID NO: 4091949 - DNA, 25 bp, Homo sapien
ggaacaagtcaacagggacacctct

SEQ ID NO: 4091950 - DNA, 25 bp, Homo sapien
tataatgatgatactgttcccacct

SEQ ID NO: 4091951 - DNA, 25 bp, Homo sapien
caaagggcggtctatataatgatga

SEQ ID NO: 4091952 - DNA, 25 bp, Homo sapien
tgtaagaccattctgacaccacagc

SEQ ID NO: 4091953 - DNA, 25 bp, Homo sapien
caccacagctacatttcacaaaggg

SEQ ID NO: 4091954 - DNA, 25 bp, Homo sapien
ttaaagatcgtcttggtcactcctc

SEQ ID NO: 4091955 - DNA, 25 bp, Homo sapien
tcctctctcgtgaagaaacccatcg

SEQ ID NO: 4091956 - DNA, 25 bp, Homo sapien
tggtcactcctctctcgtgaagaaa

SEQ ID NO: 4091957 - DNA, 25 bp, Homo sapien
gaaacccatcgactcagaatcacct

SEQ ID NO: 4091958 - DNA, 25 bp, Homo sapien
ataaatagttgttggtgaaattaga

SEQ ID NO: 4091959 - DNA, 25 bp, Homo sapien
gatgtaggtaacaagagatgcctgc

SEQ ID NO: 4091960 - DNA, 25 bp, Homo sapien
gaggccaacgcaagtatagaatctg

SEQ ID NO: 4091961 - DNA, 25 bp, Homo sapien
tagaatctgcagtcctagcacaggg

SEQ ID NO: 4091962 - DNA, 25 bp, Homo sapien
gatgcctgcgtatgaaagtgcttca

SEQ ID NO: 4091963 - DNA, 25 bp, Homo sapien
gccctgaggcaacttaagtcttcat

SEQ ID NO: 4091964 - DNA, 25 bp, Homo sapien
ccagatgccctgaggcaacttaagt

SEQ ID NO: 4091965 - DNA, 25 bp, Homo sapien
tgccctgaggcaacttaagtcttca

SEQ ID NO: 4091966 - DNA, 25 bp, Homo sapien
gatgccctgaggcaacttaagtctt

SEQ ID NO: 4091967 - DNA, 25 bp, Homo sapien
cacaggcataaccagtaagtaaggg

SEQ ID NO: 4091968 - DNA, 25 bp, Homo sapien
tgcaccccacccgaggtagaggact

SEQ ID NO: 4091969 - DNA, 25 bp, Homo sapien
cccacccgaggtagaggactgtgtg

SEQ ID NO: 4091970 - DNA, 25 bp, Homo sapien
tgcaaaatcacaggcataaccagta

SEQ ID NO: 4091971 - DNA, 25 bp, Homo sapien
cataggtggtcgtcatggaatcttt

SEQ ID NO: 4091972 - DNA, 25 bp, Homo sapien
ccttggatccataggtggtcgtcat

SEQ ID NO: 4091973 - DNA, 25 bp, Homo sapien
ggatccataggtggtcgtcatggaa

SEQ ID NO: 4091974 - DNA, 25 bp, Homo sapien
tggtcgtcatggaatctttctgaca

SEQ ID NO: 4091975 - DNA, 25 bp, Homo sapien
aaagccaagtaccacacactgcacc

SEQ ID NO: 4091976 - DNA, 25 bp, Homo sapien
agccaagtaccacacactgcaccaa

SEQ ID NO: 4091977 - DNA, 25 bp, Homo sapien
gccaagtaccacacactgcaccaag

SEQ ID NO: 4091978 - DNA, 25 bp, Homo sapien
aagccaagtaccacacactgcacca

SEQ ID NO: 4091979 - DNA, 25 bp, Homo sapien
ccacacaaccacacgattaggtaaa

SEQ ID NO: 4091980 - DNA, 25 bp, Homo sapien
tctagaaggttcatttcactactca

SEQ ID NO: 4091981 - DNA, 25 bp, Homo sapien
cacgattaggtaaacatcattagcc

SEQ ID NO: 4091982 - DNA, 25 bp, Homo sapien
gttatcaagggcaagtaaactgccc

SEQ ID NO: 4091983 - DNA, 25 bp, Homo sapien
gcaatgcttacactttgtctgaaag

SEQ ID NO: 4091984 - DNA, 25 bp, Homo sapien
ggatggcaatgcttacactttgtct

SEQ ID NO: 4091985 - DNA, 25 bp, Homo sapien
taaggatggcaatgcttacactttg

SEQ ID NO: 4091986 - DNA, 25 bp, Homo sapien
tggcaatgcttacactttgtctgaa

SEQ ID NO: 4091987 - DNA, 25 bp, Homo sapien
ccagggcataaaataggctttgcac

SEQ ID NO: 4091988 - DNA, 25 bp, Homo sapien
ctaccagggcataaaataggctttg

SEQ ID NO: 4091989 - DNA, 25 bp, Homo sapien
gggcataaaataggctttgcacttc

SEQ ID NO: 4091990 - DNA, 25 bp, Homo sapien
taccagggcataaaataggctttgc

SEQ ID NO: 4091991 - DNA, 25 bp, Homo sapien
ttttctaccaccttcttctcctcca

SEQ ID NO: 4091992 - DNA, 25 bp, Homo sapien
accttcttctcctccactgactcac

SEQ ID NO: 4091993 - DNA, 25 bp, Homo sapien
taccaccttcttctcctccactgac

SEQ ID NO: 4091994 - DNA, 25 bp, Homo sapien
caccttcttctcctccactgactca

SEQ ID NO: 4091995 - DNA, 25 bp, Homo sapien
cttttcacagcaagtgccacagtgt

SEQ ID NO: 4091996 - DNA, 25 bp, Homo sapien
aaatgctaactgaagcactggcagc

SEQ ID NO: 4091997 - DNA, 25 bp, Homo sapien
aatcaatgttcatgggatgaccacc

SEQ ID NO: 4091998 - DNA, 25 bp, Homo sapien
tgcatgaattactcctagaaccagg

SEQ ID NO: 4091999 - DNA, 25 bp, Homo sapien
aaagctttagatggtccccatttct

SEQ ID NO: 4092000 - DNA, 25 bp, Homo sapien
cctggaggtgacattggcaagagct

SEQ ID NO: 4092001 - DNA, 25 bp, Homo sapien
caagagctggcctcatatttcttct

SEQ ID NO: 4092002 - DNA, 25 bp, Homo sapien
ctggattccggaggcacaatcacgg

SEQ ID NO: 4092003 - DNA, 25 bp, Homo sapien
aagcacatgaagagagggctatctt

SEQ ID NO: 4092004 - DNA, 25 bp, Homo sapien
gttgggtttgctgctacaaagcact

SEQ ID NO: 4092005 - DNA, 25 bp, Homo sapien
ctgacccgacacatggaggctcagg

SEQ ID NO: 4092006 - DNA, 25 bp, Homo sapien
gcctgacccgacacatggaggctca

SEQ ID NO: 4092007 - DNA, 25 bp, Homo sapien
ctcaggggttgggtttgctgctaca

SEQ ID NO: 4092008 - DNA, 25 bp, Homo sapien
ctaaatcaggaaatggtcactcctt

SEQ ID NO: 4092009 - DNA, 25 bp, Homo sapien
taaatcaggaaatggtcactccttt

SEQ ID NO: 4092010 - DNA, 25 bp, Homo sapien
gtgatccaagatcgcagcattggac

SEQ ID NO: 4092011 - DNA, 25 bp, Homo sapien
atccaagatcgcagcattggactcc

SEQ ID NO: 4092012 - DNA, 25 bp, Homo sapien
cagtgatccaagatcgcagcattgg

SEQ ID NO: 4092013 - DNA, 25 bp, Homo sapien
gatccaagatcgcagcattggactc

SEQ ID NO: 4092014 - DNA, 25 bp, Homo sapien
gcacatgctaagagctggatgcagt

SEQ ID NO: 4092015 - DNA, 25 bp, Homo sapien
taatgtgagctgaacaaattcacct

SEQ ID NO: 4092016 - DNA, 25 bp, Homo sapien
ggtgagacacaagttatgaagtaat

SEQ ID NO: 4092017 - DNA, 25 bp, Homo sapien
caaggtgggtgagacacaagttatg

SEQ ID NO: 4092018 - DNA, 25 bp, Homo sapien
ggcctgaagtgcacatcttgaagct

SEQ ID NO: 4092019 - DNA, 25 bp, Homo sapien
cccggcctgaagtgcacatcttgaa

SEQ ID NO: 4092020 - DNA, 25 bp, Homo sapien
cctgaagtgcacatcttgaagcttc

SEQ ID NO: 4092021 - DNA, 25 bp, Homo sapien
cacccggcctgaagtgcacatcttg

SEQ ID NO: 4092022 - DNA, 25 bp, Homo sapien
taacttgcaactgagtaaccactct

SEQ ID NO: 4092023 - DNA, 25 bp, Homo sapien
tctagaagttcaataagttccccaa

SEQ ID NO: 4092024 - DNA, 25 bp, Homo sapien
ttgtaagacgtatagcatgtttgtg

SEQ ID NO: 4092025 - DNA, 25 bp, Homo sapien
tccccaaattggtagttaacttgca

SEQ ID NO: 4092026 - DNA, 25 bp, Homo sapien
tactgcagcccaacatgtatggaat

SEQ ID NO: 4092027 - DNA, 25 bp, Homo sapien
gagcataagcatcccattactgcag

SEQ ID NO: 4092028 - DNA, 25 bp, Homo sapien
tggctgcctcacaggtacacgactg

SEQ ID NO: 4092029 - DNA, 25 bp, Homo sapien
catgctatgcaagtgggatccccgt

SEQ ID NO: 4092030 - DNA, 25 bp, Homo sapien
aataaaacaaaacaggctgggtgtg

SEQ ID NO: 4092031 - DNA, 25 bp, Homo sapien
ctttgggaggctgaggtggctggat

SEQ ID NO: 4092032 - DNA, 25 bp, Homo sapien
cacttgaggtcaggagtttgagacc

SEQ ID NO: 4092033 - DNA, 25 bp, Homo sapien
gtggctcacaactgtaataccagca

SEQ ID NO: 4092034 - DNA, 25 bp, Homo sapien
ccagctcgggactcaaaatggccat

SEQ ID NO: 4092035 - DNA, 25 bp, Homo sapien
gccagctcgggactcaaaatggcca

SEQ ID NO: 4092036 - DNA, 25 bp, Homo sapien
tagacttttcccgaaggatgcaagc

SEQ ID NO: 4092037 - DNA, 25 bp, Homo sapien
tggcgctgggcactaaacaccaagt

SEQ ID NO: 4092038 - DNA, 25 bp, Homo sapien
gcaactttgctaccaaacactcggg

SEQ ID NO: 4092039 - DNA, 25 bp, Homo sapien
ggcgcgtaaaactgcgtctgcttgc

SEQ ID NO: 4092040 - DNA, 25 bp, Homo sapien
ccgcgtagccgcgtcacgccggcgc

SEQ ID NO: 4092041 - DNA, 25 bp, Homo sapien
cccgcgtagccgcgtcacgccggcg

SEQ ID NO: 4092042 - DNA, 25 bp, Homo sapien
ggaccgtcgtcgtgccgccgcctct

SEQ ID NO: 4092043 - DNA, 25 bp, Homo sapien
agggaccgtcgtcgtgccgccgcct

SEQ ID NO: 4092044 - DNA, 25 bp, Homo sapien
ggctgagggaccgtcgtcgtgccgc

SEQ ID NO: 4092045 - DNA, 25 bp, Homo sapien
gctgggctgagggaccgtcgtcgtg

SEQ ID NO: 4092046 - DNA, 25 bp, Homo sapien
ctgcaagtgatctgcttggtgctca

SEQ ID NO: 4092047 - DNA, 25 bp, Homo sapien
ctgggggagcggcccgaagctcctg

SEQ ID NO: 4092048 - DNA, 25 bp, Homo sapien
cctgggggagcggcccgaagctcct

SEQ ID NO: 4092049 - DNA, 25 bp, Homo sapien
gcctctttcatgttgcgctttgtaa

SEQ ID NO: 4092050 - DNA, 25 bp, Homo sapien
tcaacctttctgatggacaaaccgc

SEQ ID NO: 4092051 - DNA, 25 bp, Homo sapien
tgtaatgaatttccaactgctcaac

SEQ ID NO: 4092052 - DNA, 25 bp, Homo sapien
ctgatggacaaaccgcccctcatat

SEQ ID NO: 4092053 - DNA, 25 bp, Homo sapien
tttagacacaccctaataaggctta

SEQ ID NO: 4092054 - DNA, 25 bp, Homo sapien
aagtaaactagtgttagagtagaag

SEQ ID NO: 4092055 - DNA, 25 bp, Homo sapien
taaactagtgttagagtagaagtat

SEQ ID NO: 4092056 - DNA, 25 bp, Homo sapien
tagacacaccctaataaggcttaaa

SEQ ID NO: 4092057 - DNA, 25 bp, Homo sapien
tgactaacgaaaccagaagatctgg

SEQ ID NO: 4092058 - DNA, 25 bp, Homo sapien
cttaactggtcgtggtgaggatcaa

SEQ ID NO: 4092059 - DNA, 25 bp, Homo sapien
tataaaggctctattaggcactgga

SEQ ID NO: 4092060 - DNA, 25 bp, Homo sapien
gaggcactacaactgattcaatgac

SEQ ID NO: 4092061 - DNA, 25 bp, Homo sapien
gagttccataggcacagtagccctt

SEQ ID NO: 4092062 - DNA, 25 bp, Homo sapien
tggtggacggtttgctgtttgccaa

SEQ ID NO: 4092063 - DNA, 25 bp, Homo sapien
gccaagtcatgtgagaataggcact

SEQ ID NO: 4092064 - DNA, 25 bp, Homo sapien
ctggtagtacttgcagatggtggac

SEQ ID NO: 4092065 - DNA, 25 bp, Homo sapien
agctggaatctgttgcagagtcctt

SEQ ID NO: 4092066 - DNA, 25 bp, Homo sapien
gctggaatctgttgcagagtccttg

SEQ ID NO: 4092067 - DNA, 25 bp, Homo sapien
ctggaatctgttgcagagtccttgc

SEQ ID NO: 4092068 - DNA, 25 bp, Homo sapien
ctttttgtgatgttgccatattact

SEQ ID NO: 4092069 - DNA, 25 bp, Homo sapien
aacttatttgccatactttttgtga

SEQ ID NO: 4092070 - DNA, 25 bp, Homo sapien
cttatcaagacccattctccaaatg

SEQ ID NO: 4092071 - DNA, 25 bp, Homo sapien
aagacccattctccaaatgaaatca

SEQ ID NO: 4092072 - DNA, 25 bp, Homo sapien
cacactccccagatgccaatggccc

SEQ ID NO: 4092073 - DNA, 25 bp, Homo sapien
ccagatgccaatggccctccttctg

SEQ ID NO: 4092074 - DNA, 25 bp, Homo sapien
acactccccagatgccaatggccct

SEQ ID NO: 4092075 - DNA, 25 bp, Homo sapien
tccccagatgccaatggccctcctt

SEQ ID NO: 4092076 - DNA, 25 bp, Homo sapien
aatggatgcagtgacctcggaagga

SEQ ID NO: 4092077 - DNA, 25 bp, Homo sapien
tctcttttcacgctttccgggttca

SEQ ID NO: 4092078 - DNA, 25 bp, Homo sapien
accaatgttctcttttcacgctttc

SEQ ID NO: 4092079 - DNA, 25 bp, Homo sapien
ttttcacgctttccgggttcatgtg

SEQ ID NO: 4092080 - DNA, 25 bp, Homo sapien
gacgcaacaaaaggcttccgcttac

SEQ ID NO: 4092081 - DNA, 25 bp, Homo sapien
caagagtgctatgcaaaaagacgca

SEQ ID NO: 4092082 - DNA, 25 bp, Homo sapien
ggctagaaaggagcaccaagcatta

SEQ ID NO: 4092083 - DNA, 25 bp, Homo sapien
cagttctgaagtctctccgcgcaga

SEQ ID NO: 4092084 - DNA, 25 bp, Homo sapien
tcaccatgctcggctgggtcttcct

SEQ ID NO: 4092085 - DNA, 25 bp, Homo sapien
ctcaccatgctcggctgggtcttcc

SEQ ID NO: 4092086 - DNA, 25 bp, Homo sapien
caccatgctcggctgggtcttcctt

SEQ ID NO: 4092087 - DNA, 25 bp, Homo sapien
tccccgtgcaggtagacacaggcat

SEQ ID NO: 4092088 - DNA, 25 bp, Homo sapien
tccacgtcatcaaggccactcctga

SEQ ID NO: 4092089 - DNA, 25 bp, Homo sapien
gctgctgctcgttgctgtaggagct

SEQ ID NO: 4092090 - DNA, 25 bp, Homo sapien
ccaggtaggaatgcggcttcatctc

SEQ ID NO: 4092091 - DNA, 25 bp, Homo sapien
cctctgctctgggtcgaatgggtgc

SEQ ID NO: 4092092 - DNA, 25 bp, Homo sapien
cttgcagcctacagatttcacacac

SEQ ID NO: 4092093 - DNA, 25 bp, Homo sapien
tctgggtcgaatgggtgcaagactt

SEQ ID NO: 4092094 - DNA, 25 bp, Homo sapien
aatgggtgcaagacttgcagcctac

SEQ ID NO: 4092095 - DNA, 25 bp, Homo sapien
caggatcacttccatgcagatactg

SEQ ID NO: 4092096 - DNA, 25 bp, Homo sapien
aaactgtttggcacaccgccactgc

SEQ ID NO: 4092097 - DNA, 25 bp, Homo sapien
tctcgtgttcgaacgtcaacatgca

SEQ ID NO: 4092098 - DNA, 25 bp, Homo sapien
tgccggatgcaggacaaacagtacg

SEQ ID NO: 4092099 - DNA, 25 bp, Homo sapien
tatcacacggcattctggacaagac

SEQ ID NO: 4092100 - DNA, 25 bp, Homo sapien
tacacacttggaattacaaactctg

SEQ ID NO: 4092101 - DNA, 25 bp, Homo sapien
ctgtttgaaagcttcaatcaactcg

SEQ ID NO: 4092102 - DNA, 25 bp, Homo sapien
tgaaagcttcaatcaactcgttctt

SEQ ID NO: 4092103 - DNA, 25 bp, Homo sapien
tttagcaactgcctaaagccatagg

SEQ ID NO: 4092104 - DNA, 25 bp, Homo sapien
ggagggcttcttcacgccttatgtg

SEQ ID NO: 4092105 - DNA, 25 bp, Homo sapien
tggtcactcctctgggcactaagct

SEQ ID NO: 4092106 - DNA, 25 bp, Homo sapien
gccgcagtgctgtcaaggtggctac

SEQ ID NO: 4092107 - DNA, 25 bp, Homo sapien
gagctgtttccgaggtttctcaggc

SEQ ID NO: 4092108 - DNA, 25 bp, Homo sapien
cttgagaactgagctgtttccgagg

SEQ ID NO: 4092109 - DNA, 25 bp, Homo sapien
ccttgccttgctcaaagtatttaca

SEQ ID NO: 4092110 - DNA, 25 bp, Homo sapien
taagcatggcgataaagacatttgc

SEQ ID NO: 4092111 - DNA, 25 bp, Homo sapien
aggtgcatgaagaggtccccgagct

SEQ ID NO: 4092112 - DNA, 25 bp, Homo sapien
tgatgattccactccagaaaggtgc

SEQ ID NO: 4092113 - DNA, 25 bp, Homo sapien
ggttctcgatgaaatcccagagccg

SEQ ID NO: 4092114 - DNA, 25 bp, Homo sapien
cccagagccgcactgaattaaagaa

SEQ ID NO: 4092115 - DNA, 25 bp, Homo sapien
ttggctgcagtacagggaagctccg

SEQ ID NO: 4092116 - DNA, 25 bp, Homo sapien
aaagtttcggccgatggagcccaag

SEQ ID NO: 4092117 - DNA, 25 bp, Homo sapien
cagaggcttggttcccctagagggc

SEQ ID NO: 4092118 - DNA, 25 bp, Homo sapien
tcagaatcagaaaccttgggtgcca

SEQ ID NO: 4092119 - DNA, 25 bp, Homo sapien
gagctcacaacttgaatgccccatt

SEQ ID NO: 4092120 - DNA, 25 bp, Homo sapien
tactctttgtaaacctctactgaag

SEQ ID NO: 4092121 - DNA, 25 bp, Homo sapien
cctaggctgggaatgaatttgtaat

SEQ ID NO: 4092122 - DNA, 25 bp, Homo sapien
ccttttaaagtaattctgagctcac

SEQ ID NO: 4092123 - DNA, 25 bp, Homo sapien
tctaccgaagatcaaccggagcgct

SEQ ID NO: 4092124 - DNA, 25 bp, Homo sapien
gaagtaaggtagcaggcagtccagc

SEQ ID NO: 4092125 - DNA, 25 bp, Homo sapien
cacaggcgggactttcttcagagag

SEQ ID NO: 4092126 - DNA, 25 bp, Homo sapien
tatcaatgcttgcacgctgaccacg

SEQ ID NO: 4092127 - DNA, 25 bp, Homo sapien
cagcagtctctggtatagggcaaaa

SEQ ID NO: 4092128 - DNA, 25 bp, Homo sapien
tcatatggtgatacatgtaggcccc

SEQ ID NO: 4092129 - DNA, 25 bp, Homo sapien
tttggcaacagtaaagtcacgctgg

SEQ ID NO: 4092130 - DNA, 25 bp, Homo sapien
taaccagtgcctgagttggagtcct

SEQ ID NO: 4092131 - DNA, 25 bp, Homo sapien
tctttacccagaagcgagccgactt

SEQ ID NO: 4092132 - DNA, 25 bp, Homo sapien
gagacccagcacctagatgtgcaaa

SEQ ID NO: 4092133 - DNA, 25 bp, Homo sapien
gaaacgactgtaagctgtcaggcca

SEQ ID NO: 4092134 - DNA, 25 bp, Homo sapien
tgagtggtaccgattctagtgagga

SEQ ID NO: 4092135 - DNA, 25 bp, Homo sapien
cacctggactgatgagagcgatgtt

SEQ ID NO: 4092136 - DNA, 25 bp, Homo sapien
gctttctatcacaagtggctctcgg

SEQ ID NO: 4092137 - DNA, 25 bp, Homo sapien
gtcagaaaattagtaggcttggcct

SEQ ID NO: 4092138 - DNA, 25 bp, Homo sapien
gactgctcggttctaaatttaggga

SEQ ID NO: 4092139 - DNA, 25 bp, Homo sapien
tgtccaggagaccaagtttcagatg

SEQ ID NO: 4092140 - DNA, 25 bp, Homo sapien
gaaagcacagtagacctccctgagc

SEQ ID NO: 4092141 - DNA, 25 bp, Homo sapien
ccacaggagggtcatggagtgtaca

SEQ ID NO: 4092142 - DNA, 25 bp, Homo sapien
aatgccacccgggttatcagccgtg

SEQ ID NO: 4092143 - DNA, 25 bp, Homo sapien
gaaggcctaactgtagcgatagcag

SEQ ID NO: 4092144 - DNA, 25 bp, Homo sapien
taaatggcctgcttccttacaccag

SEQ ID NO: 4092145 - DNA, 25 bp, Homo sapien
aaatgtggattcagagttcagcctc

SEQ ID NO: 4092146 - DNA, 25 bp, Homo sapien
gatttcatccccacaggacaaggtt

SEQ ID NO: 4092147 - DNA, 25 bp, Homo sapien
catgctcagtcaatcgtgggtcggg

SEQ ID NO: 4092148 - DNA, 25 bp, Homo sapien
tatttagactccaggaacaatagga

SEQ ID NO: 4092149 - DNA, 25 bp, Homo sapien
gagtcagaatcactctccaggtaat

SEQ ID NO: 4092150 - DNA, 25 bp, Homo sapien
ggataatgaaattacagctgccgat

SEQ ID NO: 4092151 - DNA, 25 bp, Homo sapien
ccagaagttctaggctgtagggagc

SEQ ID NO: 4092152 - DNA, 25 bp, Homo sapien
tcccagggcgtggtccagacgattt

SEQ ID NO: 4092153 - DNA, 25 bp, Homo sapien
taagttagattttgaggccaagggc

SEQ ID NO: 4092154 - DNA, 25 bp, Homo sapien
taattgtcctgccactattgtgagg

SEQ ID NO: 4092155 - DNA, 25 bp, Homo sapien
ttttgcttggtggaacttttgagaa

SEQ ID NO: 4092156 - DNA, 25 bp, Homo sapien
ttttgtgaacctaaggagcctccca

SEQ ID NO: 4092157 - DNA, 25 bp, Homo sapien
gtagtgttgaatacttaggtgcatt

SEQ ID NO: 4092158 - DNA, 25 bp, Homo sapien
gtgtttattccatatagtcaggtga

SEQ ID NO: 4092159 - DNA, 25 bp, Homo sapien
cagtgccagtgacaggttcatattg

SEQ ID NO: 4092160 - DNA, 25 bp, Homo sapien
tgacaccagccacttagttctgcgt

SEQ ID NO: 4092161 - DNA, 25 bp, Homo sapien
gacaggttcatattggcatcatggc

SEQ ID NO: 4092162 - DNA, 25 bp, Homo sapien
tggcaggacactgccactaggtttt

SEQ ID NO: 4092163 - DNA, 25 bp, Homo sapien
ttttaaagatgtaccactaaatgga

SEQ ID NO: 4092164 - DNA, 25 bp, Homo sapien
gatgtaccactaaatggagatttga

SEQ ID NO: 4092165 - DNA, 25 bp, Homo sapien
tggagatttgattcacatttgatag

SEQ ID NO: 4092166 - DNA, 25 bp, Homo sapien
ccactaaatggagatttgattcaca

SEQ ID NO: 4092167 - DNA, 25 bp, Homo sapien
cactatattttgagtgcctgcaaga

SEQ ID NO: 4092168 - DNA, 25 bp, Homo sapien
aaatctattgcaagctgggtgcagg

SEQ ID NO: 4092169 - DNA, 25 bp, Homo sapien
gtggattcttcaccaatcgattgga

SEQ ID NO: 4092170 - DNA, 25 bp, Homo sapien
cctcttaagctgtaagtggtcttga

SEQ ID NO: 4092171 - DNA, 25 bp, Homo sapien
cattacaaggtttgaagaaggcaca

SEQ ID NO: 4092172 - DNA, 25 bp, Homo sapien
aactcaatcatgcttataaactaca

SEQ ID NO: 4092173 - DNA, 25 bp, Homo sapien
gatgggtaatgtgtccatgtcatta

SEQ ID NO: 4092174 - DNA, 25 bp, Homo sapien
tgtgtccatgtcattacaaggtttg

SEQ ID NO: 4092175 - DNA, 25 bp, Homo sapien
tctgtctgaaatggccggcagtcgc

SEQ ID NO: 4092176 - DNA, 25 bp, Homo sapien
tgacctgacctgcatctactgtata

SEQ ID NO: 4092177 - DNA, 25 bp, Homo sapien
ccggcagtcgcagctgctgacctga

SEQ ID NO: 4092178 - DNA, 25 bp, Homo sapien
gaaaagatgaatagtctgtctgaaa

SEQ ID NO: 4092179 - DNA, 25 bp, Homo sapien
tggcagtgggaaaatccgcccagag

SEQ ID NO: 4092180 - DNA, 25 bp, Homo sapien
tttggcagtgggaaaatccgcccag

SEQ ID NO: 4092181 - DNA, 25 bp, Homo sapien
cagtgggaaaatccgcccagagctg

SEQ ID NO: 4092182 - DNA, 25 bp, Homo sapien
atttggcagtgggaaaatccgccca

SEQ ID NO: 4092183 - DNA, 25 bp, Homo sapien
acccttatgccatgcgcattcctca

SEQ ID NO: 4092184 - DNA, 25 bp, Homo sapien
ggccggcgagccgagttcccacatc

SEQ ID NO: 4092185 - DNA, 25 bp, Homo sapien
ttccttgtgtttggcggaaacgtgc

SEQ ID NO: 4092186 - DNA, 25 bp, Homo sapien
gaaacgtgccaacgccacccttatg

SEQ ID NO: 4092187 - DNA, 25 bp, Homo sapien
gcttgggccaggccgttgtcaccct

SEQ ID NO: 4092188 - DNA, 25 bp, Homo sapien
cttccagggcgaccgggcctgggtg

SEQ ID NO: 4092189 - DNA, 25 bp, Homo sapien
gtggcgctgatggagcggccccgcg

SEQ ID NO: 4092190 - DNA, 25 bp, Homo sapien
gggctgagggatcggcttccagggc

SEQ ID NO: 4092191 - DNA, 25 bp, Homo sapien
ctgccgccgaacgacaggacgttgg

SEQ ID NO: 4092192 - DNA, 25 bp, Homo sapien
ggaggagcgggcgagaagctgccgc

SEQ ID NO: 4092193 - DNA, 25 bp, Homo sapien
agctgccgccgaacgacaggacgtt

SEQ ID NO: 4092194 - DNA, 25 bp, Homo sapien
gaagctgccgccgaacgacaggacg

SEQ ID NO: 4092195 - DNA, 25 bp, Homo sapien
cgcgccgaatgtgaccgcctcccgc

SEQ ID NO: 4092196 - DNA, 25 bp, Homo sapien
ctggggacgcgccgaatgtgaccgc

SEQ ID NO: 4092197 - DNA, 25 bp, Homo sapien
gcgccgaatgtgaccgcctcccgct

SEQ ID NO: 4092198 - DNA, 25 bp, Homo sapien
gggacgcgccgaatgtgaccgcctc

SEQ ID NO: 4092199 - DNA, 25 bp, Homo sapien
tagatggcgggagtaagaggaaaac

SEQ ID NO: 4092200 - DNA, 25 bp, Homo sapien
cggagcgcgtttgctacgatgcggg

SEQ ID NO: 4092201 - DNA, 25 bp, Homo sapien
tgggccccgaaaagggtcagctggc

SEQ ID NO: 4092202 - DNA, 25 bp, Homo sapien
agtaagaggaaaacgattgtgaggc

SEQ ID NO: 4092203 - DNA, 25 bp, Homo sapien
caagttagaagtcgactgccagtag

SEQ ID NO: 4092204 - DNA, 25 bp, Homo sapien
tgccagtagggctcgcgcagaatcg

SEQ ID NO: 4092205 - DNA, 25 bp, Homo sapien
agagcgatggatgcccgagccaagt

SEQ ID NO: 4092206 - DNA, 25 bp, Homo sapien
agcaccgagtcgagggctcgctcgt

SEQ ID NO: 4092207 - DNA, 25 bp, Homo sapien
cttcttgttgcacttagagcgcttg

SEQ ID NO: 4092208 - DNA, 25 bp, Homo sapien
tcttgttgcacttagagcgcttggg

SEQ ID NO: 4092209 - DNA, 25 bp, Homo sapien
gcacttagagcgcttggggatggca

SEQ ID NO: 4092210 - DNA, 25 bp, Homo sapien
acttagagcgcttggggatggcagc

SEQ ID NO: 4092211 - DNA, 25 bp, Homo sapien
cagtttagcaggacccgtgggtaca

SEQ ID NO: 4092212 - DNA, 25 bp, Homo sapien
gaaggggaaatccagtttagcagga

SEQ ID NO: 4092213 - DNA, 25 bp, Homo sapien
aatccagtttagcaggacccgtggg

SEQ ID NO: 4092214 - DNA, 25 bp, Homo sapien
gaaatccagtttagcaggacccgtg

SEQ ID NO: 4092215 - DNA, 25 bp, Homo sapien
cacaggacagtaggaggttgtccta

SEQ ID NO: 4092216 - DNA, 25 bp, Homo sapien
tgtgctcacaggacagtaggaggtt

SEQ ID NO: 4092217 - DNA, 25 bp, Homo sapien
aggaggttgtcctatgaatcacccc

SEQ ID NO: 4092218 - DNA, 25 bp, Homo sapien
gcaggcccccgcttgcagttctgga

SEQ ID NO: 4092219 - DNA, 25 bp, Homo sapien
tcttcaaacggatctccagcgatgg

SEQ ID NO: 4092220 - DNA, 25 bp, Homo sapien
cagtgattgtcaaactgggttctct

SEQ ID NO: 4092221 - DNA, 25 bp, Homo sapien
tgttggtgttcccatcgacagccca

SEQ ID NO: 4092222 - DNA, 25 bp, Homo sapien
tgtttgtattgctgccctccagtga

SEQ ID NO: 4092223 - DNA, 25 bp, Homo sapien
caatgtcactcagctgcagcgagag

SEQ ID NO: 4092224 - DNA, 25 bp, Homo sapien
aagatcatggcagatatccaagccc

SEQ ID NO: 4092225 - DNA, 25 bp, Homo sapien
gccaggcccaggattacgagaccct

SEQ ID NO: 4092226 - DNA, 25 bp, Homo sapien
gattacgagaccctgctgaacatca

SEQ ID NO: 4092227 - DNA, 25 bp, Homo sapien
tcttgcggcatggacgtaatatcat

SEQ ID NO: 4092228 - DNA, 25 bp, Homo sapien
ggagctatcaaccaaagctggtcag

SEQ ID NO: 4092229 - DNA, 25 bp, Homo sapien
tcatagagtctcaggttcgaatccc

SEQ ID NO: 4092230 - DNA, 25 bp, Homo sapien
gttattcccgtaggtgccagctctg

SEQ ID NO: 4092231 - DNA, 25 bp, Homo sapien
ggccggcgggagggaatatggcggc

SEQ ID NO: 4092232 - DNA, 25 bp, Homo sapien
gagatgtggaaggcggcggtgctca

SEQ ID NO: 4092233 - DNA, 25 bp, Homo sapien
tggagatgtggaaggcggcggtgct

SEQ ID NO: 4092234 - DNA, 25 bp, Homo sapien
ggagatgtggaaggcggcggtgctc

SEQ ID NO: 4092235 - DNA, 25 bp, Homo sapien
agatgtggaaggcggcggtgctcat

SEQ ID NO: 4092236 - DNA, 25 bp, Homo sapien
caagaccttggatcccaggctctat

SEQ ID NO: 4092237 - DNA, 25 bp, Homo sapien
aagccaagaccttggatcccaggct

SEQ ID NO: 4092238 - DNA, 25 bp, Homo sapien
agtgagtgacggcagctgggatctg

SEQ ID NO: 4092239 - DNA, 25 bp, Homo sapien
gaccttggatcccaggctctattaa

SEQ ID NO: 4092240 - DNA, 25 bp, Homo sapien
tccgacatcaggtcgctggtggcca

SEQ ID NO: 4092241 - DNA, 25 bp, Homo sapien
tcttcaccaccttgcgctcgctgtc

SEQ ID NO: 4092242 - DNA, 25 bp, Homo sapien
ggttctgcacctcaccgttcttgtc

SEQ ID NO: 4092243 - DNA, 25 bp, Homo sapien
gatggagtccttctgcaactccgac

SEQ ID NO: 4092244 - DNA, 25 bp, Homo sapien
ccagagtttcagagtcaggagggct

SEQ ID NO: 4092245 - DNA, 25 bp, Homo sapien
gaatccaagggcacaaggttcagcc

SEQ ID NO: 4092246 - DNA, 25 bp, Homo sapien
ggctatgccaacatcgttcctggga

SEQ ID NO: 4092247 - DNA, 25 bp, Homo sapien
caaacttgagggtgcatctgaatcc

SEQ ID NO: 4092248 - DNA, 25 bp, Homo sapien
aatgccggcaatgtctcgcagctgc

SEQ ID NO: 4092249 - DNA, 25 bp, Homo sapien
tccttcactttgaccaccagaggac

SEQ ID NO: 4092250 - DNA, 25 bp, Homo sapien
agaggacggtcttgaggccaatgcc

SEQ ID NO: 4092251 - DNA, 25 bp, Homo sapien
gtctgaccgcatgttggtgcacagg

SEQ ID NO: 4092252 - DNA, 25 bp, Homo sapien
taaactaggacaaatactaacagta

SEQ ID NO: 4092253 - DNA, 25 bp, Homo sapien
cataaactaggacaaatactaacag

SEQ ID NO: 4092254 - DNA, 25 bp, Homo sapien
ttaccataaactaggacaaatacta

SEQ ID NO: 4092255 - DNA, 25 bp, Homo sapien
ccataaactaggacaaatactaaca

SEQ ID NO: 4092256 - DNA, 25 bp, Homo sapien
acagggcacaaggtgggcacagtga

SEQ ID NO: 4092257 - DNA, 25 bp, Homo sapien
ctgcacagggcacaaggtgggcaca

SEQ ID NO: 4092258 - DNA, 25 bp, Homo sapien
gcacagggcacaaggtgggcacagt

SEQ ID NO: 4092259 - DNA, 25 bp, Homo sapien
cagggcacaaggtgggcacagtgag

SEQ ID NO: 4092260 - DNA, 25 bp, Homo sapien
ttccggcacacgttggtggccagcc

SEQ ID NO: 4092261 - DNA, 25 bp, Homo sapien
tggcctgtgatcttccggcacacgt

SEQ ID NO: 4092262 - DNA, 25 bp, Homo sapien
caatggcactggtgagctggcctgt

SEQ ID NO: 4092263 - DNA, 25 bp, Homo sapien
cactggtgagctggcctgtgatctt

SEQ ID NO: 4092264 - DNA, 25 bp, Homo sapien
aaaagaggtgccctgcaactgtgag

SEQ ID NO: 4092265 - DNA, 25 bp, Homo sapien
gacaatggtttctgcgcacacagca

SEQ ID NO: 4092266 - DNA, 25 bp, Homo sapien
aacaagacagactgatcctgggagc

SEQ ID NO: 4092267 - DNA, 25 bp, Homo sapien
catagaggatctagtaaggctgtcc

SEQ ID NO: 4092268 - DNA, 25 bp, Homo sapien
tggtcagcgagctcgacgaagaggt

SEQ ID NO: 4092269 - DNA, 25 bp, Homo sapien
caaacattggatcagggtgcggatg

SEQ ID NO: 4092270 - DNA, 25 bp, Homo sapien
cagccggtccagtaggtggtcagcg

SEQ ID NO: 4092271 - DNA, 25 bp, Homo sapien
tggcggccgacgctgcccaaacatt

SEQ ID NO: 4092272 - DNA, 25 bp, Homo sapien
atcatcatccaggttgcagaaatcc

SEQ ID NO: 4092273 - DNA, 25 bp, Homo sapien
gactcccggagctcatcatcatcca

SEQ ID NO: 4092274 - DNA, 25 bp, Homo sapien
atcatccaggttgcagaaatcctcc

SEQ ID NO: 4092275 - DNA, 25 bp, Homo sapien
ggactcccggagctcatcatcatcc

SEQ ID NO: 4092276 - DNA, 25 bp, Homo sapien
catcactgtcgtagttgtagttggg

SEQ ID NO: 4092277 - DNA, 25 bp, Homo sapien
gtcacgttgggcacgtgaggaccca

SEQ ID NO: 4092278 - DNA, 25 bp, Homo sapien
ttgctcactgaattcactatcctct

SEQ ID NO: 4092279 - DNA, 25 bp, Homo sapien
gttttatgtattggaggcagaggct

SEQ ID NO: 4092280 - DNA, 25 bp, Homo sapien
gatcaaggctgcgatgcacttggca

SEQ ID NO: 4092281 - DNA, 25 bp, Homo sapien
gatgtaagcagtgaagacgtcagcc

SEQ ID NO: 4092282 - DNA, 25 bp, Homo sapien
tagcatatggaggttgctgccggtc

SEQ ID NO: 4092283 - DNA, 25 bp, Homo sapien
gtcaggccgcgagctgatcaaggct

SEQ ID NO: 4092284 - DNA, 25 bp, Homo sapien
aggctgaagcatccctggcgggctc

SEQ ID NO: 4092285 - DNA, 25 bp, Homo sapien
taccagcacaggcatatgctcggcc

SEQ ID NO: 4092286 - DNA, 25 bp, Homo sapien
gctccgatctttaagctgccgctgc

SEQ ID NO: 4092287 - DNA, 25 bp, Homo sapien
aggacacccgccagctcggtgagga

SEQ ID NO: 4092288 - DNA, 25 bp, Homo sapien
aactgggggctcaactcaggggtgg

SEQ ID NO: 4092289 - DNA, 25 bp, Homo sapien
tcaggaactgggggctcaactcagg

SEQ ID NO: 4092290 - DNA, 25 bp, Homo sapien
gatacctggttgcagtccagcctac

SEQ ID NO: 4092291 - DNA, 25 bp, Homo sapien
gcagatacctggttgcagtccagcc

SEQ ID NO: 4092292 - DNA, 25 bp, Homo sapien
tgcatgtcgctctcgttgaccaggg

SEQ ID NO: 4092293 - DNA, 25 bp, Homo sapien
cagggcctcggctgcaatcttgtag

SEQ ID NO: 4092294 - DNA, 25 bp, Homo sapien
tacaaggtggcccatgcaggaaatg

SEQ ID NO: 4092295 - DNA, 25 bp, Homo sapien
cataaacaggcgcagtgagcaggct

SEQ ID NO: 4092296 - DNA, 25 bp, Homo sapien
ggctggtccgagataaggaacttga

SEQ ID NO: 4092297 - DNA, 25 bp, Homo sapien
taaggaacttgaccgctgtgatgac

SEQ ID NO: 4092298 - DNA, 25 bp, Homo sapien
acggtgctccgggtgtgtggccgac

SEQ ID NO: 4092299 - DNA, 25 bp, Homo sapien
tgaccgctgtgatgacggtgctccg

SEQ ID NO: 4092300 - DNA, 25 bp, Homo sapien
acacacccagggaatagcagggcca

SEQ ID NO: 4092301 - DNA, 25 bp, Homo sapien
gatttgaacctgaggcaggtgagct

SEQ ID NO: 4092302 - DNA, 25 bp, Homo sapien
ctgaggatgagaagacttgtccaca

SEQ ID NO: 4092303 - DNA, 25 bp, Homo sapien
ttttatagctgaggatgagaagact

SEQ ID NO: 4092304 - DNA, 25 bp, Homo sapien
cacggcgcacgttcaggtctgggtc

SEQ ID NO: 4092305 - DNA, 25 bp, Homo sapien
tcgcacggcgcacgttcaggtctgg

SEQ ID NO: 4092306 - DNA, 25 bp, Homo sapien
agagtcgcacggcgcacgttcaggt

SEQ ID NO: 4092307 - DNA, 25 bp, Homo sapien
gccagagtcgcacggcgcacgttca

SEQ ID NO: 4092308 - DNA, 25 bp, Homo sapien
actagcgagggcttgttgtgcacag

SEQ ID NO: 4092309 - DNA, 25 bp, Homo sapien
tcccggactagcgagggcttgttgt

SEQ ID NO: 4092310 - DNA, 25 bp, Homo sapien
ctcggatgaggtcccgccggatctt

SEQ ID NO: 4092311 - DNA, 25 bp, Homo sapien
ggtcccgccggatctttgtctcctg

SEQ ID NO: 4092312 - DNA, 25 bp, Homo sapien
gatgtcgtagtggtccttcagcccg

SEQ ID NO: 4092313 - DNA, 25 bp, Homo sapien
aactcacagatatccagctggccca

SEQ ID NO: 4092314 - DNA, 25 bp, Homo sapien
tgaatacatgcattcaaaggccgcc

SEQ ID NO: 4092315 - DNA, 25 bp, Homo sapien
tccactgtatgtttaaagggcccca

SEQ ID NO: 4092316 - DNA, 25 bp, Homo sapien
tggccagccgggcaaccatgatgaa

SEQ ID NO: 4092317 - DNA, 25 bp, Homo sapien
tcaatgagtcggtccaccctctgca

SEQ ID NO: 4092318 - DNA, 25 bp, Homo sapien
gccgggcaaccatgatgaaggtcag

SEQ ID NO: 4092319 - DNA, 25 bp, Homo sapien
tgcaggtggcccttagtggctcaat

SEQ ID NO: 4092320 - DNA, 25 bp, Homo sapien
gcagcaagttcagggttggatctga

SEQ ID NO: 4092321 - DNA, 25 bp, Homo sapien
ttgggaagagaagtcggccatgatg

SEQ ID NO: 4092322 - DNA, 25 bp, Homo sapien
gggctgaagcggaatccttctggat

SEQ ID NO: 4092323 - DNA, 25 bp, Homo sapien
ttcagggttggatctgatttgggaa

SEQ ID NO: 4092324 - DNA, 25 bp, Homo sapien
caaaagtagagacctgcgatggtgg

SEQ ID NO: 4092325 - DNA, 25 bp, Homo sapien
ttctcttaagcgagggcccaccttg

SEQ ID NO: 4092326 - DNA, 25 bp, Homo sapien
aaaccaactggttatgcctgggtgg

SEQ ID NO: 4092327 - DNA, 25 bp, Homo sapien
cactgtaagccctgaccaggagcga

SEQ ID NO: 4092328 - DNA, 25 bp, Homo sapien
catgtaggtgtcattccacagccac

SEQ ID NO: 4092329 - DNA, 25 bp, Homo sapien
ctctcttagcttggtgctgggactc

SEQ ID NO: 4092330 - DNA, 25 bp, Homo sapien
tctcttgcagatcttactgtgccga

SEQ ID NO: 4092331 - DNA, 25 bp, Homo sapien
ccaccagggaaccatagtcaggatt

SEQ ID NO: 4092332 - DNA, 25 bp, Homo sapien
acctgcttagattaaaactagggca

SEQ ID NO: 4092333 - DNA, 25 bp, Homo sapien
cacttggtgagctttgtgtataaaa

SEQ ID NO: 4092334 - DNA, 25 bp, Homo sapien
tttgtgtataaaagactcagtgacc

SEQ ID NO: 4092335 - DNA, 25 bp, Homo sapien
tgagtaagttagacacttggtgagc

SEQ ID NO: 4092336 - DNA, 25 bp, Homo sapien
gcttacaagcgggagaaggtcaaac

SEQ ID NO: 4092337 - DNA, 25 bp, Homo sapien
cacagcccttgggagaccctaagaa

SEQ ID NO: 4092338 - DNA, 25 bp, Homo sapien
taagaatatgtgtccaaggtgggcg

SEQ ID NO: 4092339 - DNA, 25 bp, Homo sapien
ggaaaccaagagtgccctattcaag

SEQ ID NO: 4092340 - DNA, 25 bp, Homo sapien
aaagccctaaagaggcaaagaatgg

SEQ ID NO: 4092341 - DNA, 25 bp, Homo sapien
atggtgcaagcccagcagaaagcca

SEQ ID NO: 4092342 - DNA, 25 bp, Homo sapien
ggcaaagaatggtgcaagcccagca

SEQ ID NO: 4092343 - DNA, 25 bp, Homo sapien
ctaaagaggcaaagaatggtgcaag

SEQ ID NO: 4092344 - DNA, 25 bp, Homo sapien
caggccacactgttggcgtttggtt

SEQ ID NO: 4092345 - DNA, 25 bp, Homo sapien
tccaggccacactgttggcgtttgg

SEQ ID NO: 4092346 - DNA, 25 bp, Homo sapien
aggccacactgttggcgtttggttc

SEQ ID NO: 4092347 - DNA, 25 bp, Homo sapien
gttccaggccacactgttggcgttt

SEQ ID NO: 4092348 - DNA, 25 bp, Homo sapien
ggagccattgtagccgaccacaaag

SEQ ID NO: 4092349 - DNA, 25 bp, Homo sapien
gaagatcttggagccattgtagccg

SEQ ID NO: 4092350 - DNA, 25 bp, Homo sapien
attgtagccgaccacaaagccctgc

SEQ ID NO: 4092351 - DNA, 25 bp, Homo sapien
tggaggcagaagatcttggagccat

SEQ ID NO: 4092352 - DNA, 25 bp, Homo sapien
tacttggcagccctgacaaaccagt

SEQ ID NO: 4092353 - DNA, 25 bp, Homo sapien
ccctgacaaaccagttcttgcacaa

SEQ ID NO: 4092354 - DNA, 25 bp, Homo sapien
gcagccctgacaaaccagttcttgc

SEQ ID NO: 4092355 - DNA, 25 bp, Homo sapien
cttgcacaagattatataaattttg

SEQ ID NO: 4092356 - DNA, 25 bp, Homo sapien
gcatatgatggatggctaacacttg

SEQ ID NO: 4092357 - DNA, 25 bp, Homo sapien
gccacgctgactgccccgagagtgg

SEQ ID NO: 4092358 - DNA, 25 bp, Homo sapien
agtcaggactgaaagccggtgctcc

SEQ ID NO: 4092359 - DNA, 25 bp, Homo sapien
gggcgggcactcaggcatatcacag

SEQ ID NO: 4092360 - DNA, 25 bp, Homo sapien
agtctatcagtgcaaaaaactccca

SEQ ID NO: 4092361 - DNA, 25 bp, Homo sapien
tagtctatcagtgcaaaaaactccc

SEQ ID NO: 4092362 - DNA, 25 bp, Homo sapien
ctagtctatcagtgcaaaaaactcc

SEQ ID NO: 4092363 - DNA, 25 bp, Homo sapien
cagaatctgccttaacatgatccag

SEQ ID NO: 4092364 - DNA, 25 bp, Homo sapien
cccatccttgatgtcgtggtggtgg

SEQ ID NO: 4092365 - DNA, 25 bp, Homo sapien
tgctccctgaatattgtgctaaagc

SEQ ID NO: 4092366 - DNA, 25 bp, Homo sapien
acagaatctgccttaacatgatcca

SEQ ID NO: 4092367 - DNA, 25 bp, Homo sapien
tatggcaagtcaacggtaccccagt

SEQ ID NO: 4092368 - DNA, 25 bp, Homo sapien
ttgaaaggcagggacccggacatcg

SEQ ID NO: 4092369 - DNA, 25 bp, Homo sapien
tcagtaagtctttccattcgtaggg

SEQ ID NO: 4092370 - DNA, 25 bp, Homo sapien
gacatcgtggaatagagaatactgc

SEQ ID NO: 4092371 - DNA, 25 bp, Homo sapien
aatgacaagtaggaaattctggctt

SEQ ID NO: 4092372 - DNA, 25 bp, Homo sapien
aaatgacaagtaggaaattctggct

SEQ ID NO: 4092373 - DNA, 25 bp, Homo sapien
ctgacttttggccctgcttgggtag

SEQ ID NO: 4092374 - DNA, 25 bp, Homo sapien
tatatttgggcggttgggtgtcttc

SEQ ID NO: 4092375 - DNA, 25 bp, Homo sapien
aagttgtttctggctggtcaattac

SEQ ID NO: 4092376 - DNA, 25 bp, Homo sapien
tgttgtcgtgtatcatcatataagt

SEQ ID NO: 4092377 - DNA, 25 bp, Homo sapien
caattacctggtagagctgaattat

SEQ ID NO: 4092378 - DNA, 25 bp, Homo sapien
ttgggtggttgacagtcttcatgat

SEQ ID NO: 4092379 - DNA, 25 bp, Homo sapien
gtttataatatttgggtggttgaca

SEQ ID NO: 4092380 - DNA, 25 bp, Homo sapien
ggtggttgacagtcttcatgatact

SEQ ID NO: 4092381 - DNA, 25 bp, Homo sapien
ctggtacgcgtttataatatttggg

SEQ ID NO: 4092382 - DNA, 25 bp, Homo sapien
tggctttagctctggatgtgtgatg

SEQ ID NO: 4092383 - DNA, 25 bp, Homo sapien
tctatgactagatggatttgtggct

SEQ ID NO: 4092384 - DNA, 25 bp, Homo sapien
tattgccctaaatgaaaagcccatg

SEQ ID NO: 4092385 - DNA, 25 bp, Homo sapien
ggtagtaccgcaggcctgacagaat

SEQ ID NO: 4092386 - DNA, 25 bp, Homo sapien
cacttgttccagtgaaggacgctcc

SEQ ID NO: 4092387 - DNA, 25 bp, Homo sapien
gggatcttctggacacttttcactt

SEQ ID NO: 4092388 - DNA, 25 bp, Homo sapien
gaaactttccatcacttgttccagt

SEQ ID NO: 4092389 - DNA, 25 bp, Homo sapien
tcatacactggtagtgggatcttct

SEQ ID NO: 4092390 - DNA, 25 bp, Homo sapien
aagccaaagtccacgatttttatat

SEQ ID NO: 4092391 - DNA, 25 bp, Homo sapien
cccgaatgtcatgctaaagccaaag

SEQ ID NO: 4092392 - DNA, 25 bp, Homo sapien
cgaatctcctttccccgaatgtcat

SEQ ID NO: 4092393 - DNA, 25 bp, Homo sapien
aaagtccacgatttttatattgcgc

SEQ ID NO: 4092394 - DNA, 25 bp, Homo sapien
aggtggaggagaggactgcagcgag

SEQ ID NO: 4092395 - DNA, 25 bp, Homo sapien
cttggaaaggtggaggagaggactg

SEQ ID NO: 4092396 - DNA, 25 bp, Homo sapien
aaaggtggaggagaggactgcagcg

SEQ ID NO: 4092397 - DNA, 25 bp, Homo sapien
tggaaaggtggaggagaggactgca

SEQ ID NO: 4092398 - DNA, 25 bp, Homo sapien
acagcggaccgagtgcggccgcgtc

SEQ ID NO: 4092399 - DNA, 25 bp, Homo sapien
ccaggaccacagcggaccgagtgcg

SEQ ID NO: 4092400 - DNA, 25 bp, Homo sapien
atgcattggtcctttggagccctgg

SEQ ID NO: 4092401 - DNA, 25 bp, Homo sapien
tttgtccttcctaaatgccgccagc

SEQ ID NO: 4092402 - DNA, 25 bp, Homo sapien
ttctactattgacacggagatgttc

SEQ ID NO: 4092403 - DNA, 25 bp, Homo sapien
agttctctgagggtagagtgcttcc

SEQ ID NO: 4092404 - DNA, 25 bp, Homo sapien
gggccatgggatagttgaattttct

SEQ ID NO: 4092405 - DNA, 25 bp, Homo sapien
agatgttctcagcccggaatcccat

SEQ ID NO: 4092406 - DNA, 25 bp, Homo sapien
cactaaaactgtctggcttcctctg

SEQ ID NO: 4092407 - DNA, 25 bp, Homo sapien
atttcagtgggagcaggaaggtgga

SEQ ID NO: 4092408 - DNA, 25 bp, Homo sapien
gctgggggcgtcactaaaactgtct

SEQ ID NO: 4092409 - DNA, 25 bp, Homo sapien
agctggctttctgcgatggttctcg

SEQ ID NO: 4092410 - DNA, 25 bp, Homo sapien
caggctccaacgttgctgggcacgt

SEQ ID NO: 4092411 - DNA, 25 bp, Homo sapien
gctccaacgttgctgggcacgtggc

SEQ ID NO: 4092412 - DNA, 25 bp, Homo sapien
aggctccaacgttgctgggcacgtg

SEQ ID NO: 4092413 - DNA, 25 bp, Homo sapien
tccaacgttgctgggcacgtggcag

SEQ ID NO: 4092414 - DNA, 25 bp, Homo sapien
cagctggcaatgtgacaaaagtctt

SEQ ID NO: 4092415 - DNA, 25 bp, Homo sapien
cgtgtgtctttcatgggactgtccc

SEQ ID NO: 4092416 - DNA, 25 bp, Homo sapien
ggactgtcccctttagagatcccac

SEQ ID NO: 4092417 - DNA, 25 bp, Homo sapien
ttctcactgtgaggacgcccttggc

SEQ ID NO: 4092418 - DNA, 25 bp, Homo sapien
ccttgtttggtttgtagtaggcagc

SEQ ID NO: 4092419 - DNA, 25 bp, Homo sapien
agaggacaaggtttctgagccccac

SEQ ID NO: 4092420 - DNA, 25 bp, Homo sapien
agcacatgccctcagcccagttgag

SEQ ID NO: 4092421 - DNA, 25 bp, Homo sapien
gagctgagggccctgttttcagcag

SEQ ID NO: 4092422 - DNA, 25 bp, Homo sapien
tgatgaatgaacttgcgcggaaccc

SEQ ID NO: 4092423 - DNA, 25 bp, Homo sapien
gaacagtctgtccaccagtcagcga

SEQ ID NO: 4092424 - DNA, 25 bp, Homo sapien
tgtgttgctgctcaaggagtgtacg

SEQ ID NO: 4092425 - DNA, 25 bp, Homo sapien
gaaactgcctacattcctgggagtg

SEQ ID NO: 4092426 - DNA, 25 bp, Homo sapien
ccatgttcttgattgggtatgagga

SEQ ID NO: 4092427 - DNA, 25 bp, Homo sapien
gaaatcagacgtgtaagttcaaatc

SEQ ID NO: 4092428 - DNA, 25 bp, Homo sapien
tatgaggactggctaaccctctctg

SEQ ID NO: 4092429 - DNA, 25 bp, Homo sapien
atgttgaaatcagacgtgtaagttc

SEQ ID NO: 4092430 - DNA, 25 bp, Homo sapien
aatgtggagaccattcatcagccgc

SEQ ID NO: 4092431 - DNA, 25 bp, Homo sapien
ggtgcatggccctttcaagtccctg

SEQ ID NO: 4092432 - DNA, 25 bp, Homo sapien
gtgaaaatggcagcaaactccccaa

SEQ ID NO: 4092433 - DNA, 25 bp, Homo sapien
gagtgaccgcagcatcattagggag

SEQ ID NO: 4092434 - DNA, 25 bp, Homo sapien
tggaccaccgcaaactggacgagat

SEQ ID NO: 4092435 - DNA, 25 bp, Homo sapien
caagaggcagagtgcttacgagcgc

SEQ ID NO: 4092436 - DNA, 25 bp, Homo sapien
tgtcaccctgtacatcgatgaggag

SEQ ID NO: 4092437 - DNA, 25 bp, Homo sapien
ctgtggaccttagtgaccgctcgga

SEQ ID NO: 4092438 - DNA, 25 bp, Homo sapien
gcaagtgaaatcactggccgagtcc

SEQ ID NO: 4092439 - DNA, 25 bp, Homo sapien
aagtgaaatcactggccgagtccat

SEQ ID NO: 4092440 - DNA, 25 bp, Homo sapien
ggaggacgccttctctaggcaagtg

SEQ ID NO: 4092441 - DNA, 25 bp, Homo sapien
ctaggcaagtgaaatcactggccga

SEQ ID NO: 4092442 - DNA, 25 bp, Homo sapien
aaaaggcttgcgagttccgagtcgg

SEQ ID NO: 4092443 - DNA, 25 bp, Homo sapien
ttccgagtcgggatgagctcgtcag

SEQ ID NO: 4092444 - DNA, 25 bp, Homo sapien
tgcagcggaaaccagcgtctgcaca

SEQ ID NO: 4092445 - DNA, 25 bp, Homo sapien
tctgcacacagtgaaaaggcttgcg

SEQ ID NO: 4092446 - DNA, 25 bp, Homo sapien
ccttccctgctcgtcctacactgag

SEQ ID NO: 4092447 - DNA, 25 bp, Homo sapien
ctcccttccctgctcgtcctacact

SEQ ID NO: 4092448 - DNA, 25 bp, Homo sapien
ttccctgctcgtcctacactgagaa

SEQ ID NO: 4092449 - DNA, 25 bp, Homo sapien
tcccttccctgctcgtcctacactg

SEQ ID NO: 4092450 - DNA, 25 bp, Homo sapien
ggtcctgcaggcctcgtgaggagca

SEQ ID NO: 4092451 - DNA, 25 bp, Homo sapien
ggcttcacgggagccggagacgtca

SEQ ID NO: 4092452 - DNA, 25 bp, Homo sapien
cacgggagccggagacgtcacattc

SEQ ID NO: 4092453 - DNA, 25 bp, Homo sapien
tccaggcttcacgggagccggagac

SEQ ID NO: 4092454 - DNA, 25 bp, Homo sapien
cagaattggcagcaaagggccgtca

SEQ ID NO: 4092455 - DNA, 25 bp, Homo sapien
attggcagcaaagggccgtcactcc

SEQ ID NO: 4092456 - DNA, 25 bp, Homo sapien
gaattggcagcaaagggccgtcact

SEQ ID NO: 4092457 - DNA, 25 bp, Homo sapien
gcagaattggcagcaaagggccgtc

SEQ ID NO: 4092458 - DNA, 25 bp, Homo sapien
atgagctccccagtccagggaacag

SEQ ID NO: 4092459 - DNA, 25 bp, Homo sapien
caggccagtggaaggtgtctgggtc

SEQ ID NO: 4092460 - DNA, 25 bp, Homo sapien
atccccatgagctccccagtccagg

SEQ ID NO: 4092461 - DNA, 25 bp, Homo sapien
cccagtccagggaacaggccagtgg

SEQ ID NO: 4092462 - DNA, 25 bp, Homo sapien
gcagccaggcacagggtgggagaca

SEQ ID NO: 4092463 - DNA, 25 bp, Homo sapien
cagccaggcacagggtgggagacat

SEQ ID NO: 4092464 - DNA, 25 bp, Homo sapien
ctgcagccaggcacagggtgggaga

SEQ ID NO: 4092465 - DNA, 25 bp, Homo sapien
tgcagccaggcacagggtgggagac

SEQ ID NO: 4092466 - DNA, 25 bp, Homo sapien
tctgatgggccattggacaggtctg

SEQ ID NO: 4092467 - DNA, 25 bp, Homo sapien
tcagtgtccctcgcggatcgggtcg

SEQ ID NO: 4092468 - DNA, 25 bp, Homo sapien
caggtctgtctacggcgcacggaga

SEQ ID NO: 4092469 - DNA, 25 bp, Homo sapien
atcgggtcgggctgccccggcagtt

SEQ ID NO: 4092470 - DNA, 25 bp, Homo sapien
tgcttgtgtgctgtgcgcagcccca

SEQ ID NO: 4092471 - DNA, 25 bp, Homo sapien
gcaggctcttgagggtagcatgctt

SEQ ID NO: 4092472 - DNA, 25 bp, Homo sapien
gctcttgagggtagcatgcttgtgt

SEQ ID NO: 4092473 - DNA, 25 bp, Homo sapien
gtagcatgcttgtgtgctgtgcgca

SEQ ID NO: 4092474 - DNA, 25 bp, Homo sapien
gggcttctcaaggaccccattgctc

SEQ ID NO: 4092475 - DNA, 25 bp, Homo sapien
agcgcatgtccagcagttgcactga

SEQ ID NO: 4092476 - DNA, 25 bp, Homo sapien
cactgagaacatgcatatgtctccc

SEQ ID NO: 4092477 - DNA, 25 bp, Homo sapien
tgcagcgcatgtccagcagttgcac

SEQ ID NO: 4092478 - DNA, 25 bp, Homo sapien
tcgctggcgggagtcggcggcctct

SEQ ID NO: 4092479 - DNA, 25 bp, Homo sapien
gggatccggcggctcgctggcggga

SEQ ID NO: 4092480 - DNA, 25 bp, Homo sapien
caggagccccgacgtgatcgcgtgg

SEQ ID NO: 4092481 - DNA, 25 bp, Homo sapien
atcgcgtggcgggtggtcgggtctc

SEQ ID NO: 4092482 - DNA, 25 bp, Homo sapien
gctcggacttggggccggagccgcg

SEQ ID NO: 4092483 - DNA, 25 bp, Homo sapien
ggctcggacttggggccggagccgc

SEQ ID NO: 4092484 - DNA, 25 bp, Homo sapien
atggtgaggctgtcaaagaccgtgc

SEQ ID NO: 4092485 - DNA, 25 bp, Homo sapien
tgtcaaagaccgtgcccagagtgct

SEQ ID NO: 4092486 - DNA, 25 bp, Homo sapien
tgaaattcttggacaatccggatgg

SEQ ID NO: 4092487 - DNA, 25 bp, Homo sapien
ctggagaagtgcctgaaattcttgg

SEQ ID NO: 4092488 - DNA, 25 bp, Homo sapien
ggaaggacatagaaccagccctggc

SEQ ID NO: 4092489 - DNA, 25 bp, Homo sapien
cagccctggcagttggaatacagct

SEQ ID NO: 4092490 - DNA, 25 bp, Homo sapien
ccagccctggcagttggaatacagc

SEQ ID NO: 4092491 - DNA, 25 bp, Homo sapien
gccctggcagttggaatacagctca

SEQ ID NO: 4092492 - DNA, 25 bp, Homo sapien
ggctccactgtcggcacaggggctg

SEQ ID NO: 4092493 - DNA, 25 bp, Homo sapien
agctgtcgaagaccttctgtgcacc

SEQ ID NO: 4092494 - DNA, 25 bp, Homo sapien
cagctgtcgaagaccttctgtgcac

SEQ ID NO: 4092495 - DNA, 25 bp, Homo sapien
gctgtcgaagaccttctgtgcacca

SEQ ID NO: 4092496 - DNA, 25 bp, Homo sapien
tgagtccctgaatcttccccgcggg

SEQ ID NO: 4092497 - DNA, 25 bp, Homo sapien
tgccatctggcaaactccgttcatc

SEQ ID NO: 4092498 - DNA, 25 bp, Homo sapien
tccatgatacctctttggcaaatcc

SEQ ID NO: 4092499 - DNA, 25 bp, Homo sapien
cttccccgcggggataccattatca

SEQ ID NO: 4092500 - DNA, 25 bp, Homo sapien
cctccgcggctatgcagacggctta

SEQ ID NO: 4092501 - DNA, 25 bp, Homo sapien
tctgcggtgtcgctctctgggactg

SEQ ID NO: 4092502 - DNA, 25 bp, Homo sapien
ggcttatcccgaagccttgcgaacg

SEQ ID NO: 4092503 - DNA, 25 bp, Homo sapien
gcgccagcgccagtctttctgagct

SEQ ID NO: 4092504 - DNA, 25 bp, Homo sapien
ccttcacggctcctgggaatgaaaa

SEQ ID NO: 4092505 - DNA, 25 bp, Homo sapien
ttacaagtgagattgaagatctttc

SEQ ID NO: 4092506 - DNA, 25 bp, Homo sapien
tgcagttaagtgttcgacatcttcc

SEQ ID NO: 4092507 - DNA, 25 bp, Homo sapien
ttttcctatcgatttgaaagacctg

SEQ ID NO: 4092508 - DNA, 25 bp, Homo sapien
ctccaacccagacagacgagaccat

SEQ ID NO: 4092509 - DNA, 25 bp, Homo sapien
ttctgggtaatgaccgatggtgaac

SEQ ID NO: 4092510 - DNA, 25 bp, Homo sapien
tggtttggtgggcagtagggagtca

SEQ ID NO: 4092511 - DNA, 25 bp, Homo sapien
taatgaccgatggtgaactgcagag

SEQ ID NO: 4092512 - DNA, 25 bp, Homo sapien
cgatggtgaactgcagagacaatgg

SEQ ID NO: 4092513 - DNA, 25 bp, Homo sapien
tggccccactgtctcaagatgtaca

SEQ ID NO: 4092514 - DNA, 25 bp, Homo sapien
gccccactgtctcaagatgtacagg

SEQ ID NO: 4092515 - DNA, 25 bp, Homo sapien
ctggccccactgtctcaagatgtac

SEQ ID NO: 4092516 - DNA, 25 bp, Homo sapien
ccactgtctcaagatgtacaggaca

SEQ ID NO: 4092517 - DNA, 25 bp, Homo sapien
tactgctgaataataacattccatt

SEQ ID NO: 4092518 - DNA, 25 bp, Homo sapien
gcgcctggtctttcattccttttta

SEQ ID NO: 4092519 - DNA, 25 bp, Homo sapien
actgcgcctggtctttcattccttt

SEQ ID NO: 4092520 - DNA, 25 bp, Homo sapien
ctggcctcatgtgacactcccgcct

SEQ ID NO: 4092521 - DNA, 25 bp, Homo sapien
gattccgttctgagctttgctggtg

SEQ ID NO: 4092522 - DNA, 25 bp, Homo sapien
tctgggcctttcgaagcctgtgggc

SEQ ID NO: 4092523 - DNA, 25 bp, Homo sapien
ggccccagcggtcaaaagctctttg

SEQ ID NO: 4092524 - DNA, 25 bp, Homo sapien
gcctgtgggccccagcggtcaaaag

SEQ ID NO: 4092525 - DNA, 25 bp, Homo sapien
tacctcgtggatatttgcgtggcca

SEQ ID NO: 4092526 - DNA, 25 bp, Homo sapien
gaatccgtgtaacctccaggagctg

SEQ ID NO: 4092527 - DNA, 25 bp, Homo sapien
cacaccgtgaagtatgggaactcca

SEQ ID NO: 4092528 - DNA, 25 bp, Homo sapien
tgcacatacgggatgagagatcccc

SEQ ID NO: 4092529 - DNA, 25 bp, Homo sapien
cctggagccggatcaagagcgttgt

SEQ ID NO: 4092530 - DNA, 25 bp, Homo sapien
taactgaaagcctagcccgtgggat

SEQ ID NO: 4092531 - DNA, 25 bp, Homo sapien
gctgtcgatctcagaaagccaggcc

SEQ ID NO: 4092532 - DNA, 25 bp, Homo sapien
tctgcagcatacaagccatgtggcc

SEQ ID NO: 4092533 - DNA, 25 bp, Homo sapien
tgctaggttcttggaagtcctggct

SEQ ID NO: 4092534 - DNA, 25 bp, Homo sapien
ctggctgtgctaggttcttggaagt

SEQ ID NO: 4092535 - DNA, 25 bp, Homo sapien
ggtgcaggcaagtaagcctgcatgt

SEQ ID NO: 4092536 - DNA, 25 bp, Homo sapien
atgtgggtgaaaggtagccccagca

SEQ ID NO: 4092537 - DNA, 25 bp, Homo sapien
cagaagtcagaagtcctcagaggcc

SEQ ID NO: 4092538 - DNA, 25 bp, Homo sapien
gaaagatggactcttgacaatgccc

SEQ ID NO: 4092539 - DNA, 25 bp, Homo sapien
gacaatgcccagtttacagccgagt

SEQ ID NO: 4092540 - DNA, 25 bp, Homo sapien
caggccccattagggttgagaacca

SEQ ID NO: 4092541 - DNA, 25 bp, Homo sapien
cagccgcaaggggaagttctttagc

SEQ ID NO: 4092542 - DNA, 25 bp, Homo sapien
ccacagccgcaaggggaagttcttt

SEQ ID NO: 4092543 - DNA, 25 bp, Homo sapien
cacagccgcaaggggaagttcttta

SEQ ID NO: 4092544 - DNA, 25 bp, Homo sapien
acaccaggtgtttccccacagccgc

SEQ ID NO: 4092545 - DNA, 25 bp, Homo sapien
tttctcagagctgtattctgtgacc

SEQ ID NO: 4092546 - DNA, 25 bp, Homo sapien
tgtttctcagagctgtattctgtga

SEQ ID NO: 4092547 - DNA, 25 bp, Homo sapien
agagctgtattctgtgacccgtttc

SEQ ID NO: 4092548 - DNA, 25 bp, Homo sapien
agctgtattctgtgacccgtttctc

SEQ ID NO: 4092549 - DNA, 25 bp, Homo sapien
ctggcaccctctcccctgggtgtgg

SEQ ID NO: 4092550 - DNA, 25 bp, Homo sapien
agggtgcctggcaccctctcccctg

SEQ ID NO: 4092551 - DNA, 25 bp, Homo sapien
gcctggcaccctctcccctgggtgt

SEQ ID NO: 4092552 - DNA, 25 bp, Homo sapien
ggtgcctggcaccctctcccctggg

SEQ ID NO: 4092553 - DNA, 25 bp, Homo sapien
ggccttgctctgggtacagggcagt

SEQ ID NO: 4092554 - DNA, 25 bp, Homo sapien
ccttgctctgggtacagggcagtgc

SEQ ID NO: 4092555 - DNA, 25 bp, Homo sapien
gccttgctctgggtacagggcagtg

SEQ ID NO: 4092556 - DNA, 25 bp, Homo sapien
agaatgaaagggtggagcagagctc

SEQ ID NO: 4092557 - DNA, 25 bp, Homo sapien
aatgaaagggtggagcagagctcct

SEQ ID NO: 4092558 - DNA, 25 bp, Homo sapien
gaatgaaagggtggagcagagctcc

SEQ ID NO: 4092559 - DNA, 25 bp, Homo sapien
tatggcagtgccgtgtggagcctta

SEQ ID NO: 4092560 - DNA, 25 bp, Homo sapien
aatccgtgaagagagccgttccctg

SEQ ID NO: 4092561 - DNA, 25 bp, Homo sapien
gagccttatgtggaagtactgcatc

SEQ ID NO: 4092562 - DNA, 25 bp, Homo sapien
tctgcctggctgtcgactgttgggc

SEQ ID NO: 4092563 - DNA, 25 bp, Homo sapien
agtggcctgtggcagccagtgcctc

SEQ ID NO: 4092564 - DNA, 25 bp, Homo sapien
gccagtgcctcctcttttccctaac

SEQ ID NO: 4092565 - DNA, 25 bp, Homo sapien
tgtggcagccagtgcctcctctttt

SEQ ID NO: 4092566 - DNA, 25 bp, Homo sapien
cagtgcctcctcttttccctaactt

SEQ ID NO: 4092567 - DNA, 25 bp, Homo sapien
tcagtaagggagctcagtggacggg

SEQ ID NO: 4092568 - DNA, 25 bp, Homo sapien
ggacgggattccaagcacacagcct

SEQ ID NO: 4092569 - DNA, 25 bp, Homo sapien
agtggacgggattccaagcacacag

SEQ ID NO: 4092570 - DNA, 25 bp, Homo sapien
taagggagctcagtggacgggattc

SEQ ID NO: 4092571 - DNA, 25 bp, Homo sapien
cctggaccagggtcctccaaagatc

SEQ ID NO: 4092572 - DNA, 25 bp, Homo sapien
ctagctgactggcagctctgtgtcc

SEQ ID NO: 4092573 - DNA, 25 bp, Homo sapien
gcctggaccagggtcctccaaagat

SEQ ID NO: 4092574 - DNA, 25 bp, Homo sapien
cagctctgtgtccatgagcctggac

SEQ ID NO: 4092575 - DNA, 25 bp, Homo sapien
ggcaaatgggccccctcatagagct

SEQ ID NO: 4092576 - DNA, 25 bp, Homo sapien
aggcaaatgggccccctcatagagc

SEQ ID NO: 4092577 - DNA, 25 bp, Homo sapien
ccaccaaaggatccgtgaaggacag

SEQ ID NO: 4092578 - DNA, 25 bp, Homo sapien
tcttccaccaaaggatccgtgaagg

SEQ ID NO: 4092579 - DNA, 25 bp, Homo sapien
accatcttccaccaaaggatccgtg

SEQ ID NO: 4092580 - DNA, 25 bp, Homo sapien
ccgtgaaggacaggtccgacatcca

SEQ ID NO: 4092581 - DNA, 25 bp, Homo sapien
ccactgagagggtgctgctctcagg

SEQ ID NO: 4092582 - DNA, 25 bp, Homo sapien
gctcagtgctgggaaccactgagag

SEQ ID NO: 4092583 - DNA, 25 bp, Homo sapien
ctgctgtatgtccagctcagtgctg

SEQ ID NO: 4092584 - DNA, 25 bp, Homo sapien
gagagggtgctgctctcaggggata

SEQ ID NO: 4092585 - DNA, 25 bp, Homo sapien
ttctgcaggcacagttatcagcatc

SEQ ID NO: 4092586 - DNA, 25 bp, Homo sapien
gaaacttgtgcattgagccttcacc

SEQ ID NO: 4092587 - DNA, 25 bp, Homo sapien
tgggtcagttctgcaggcacagtta

SEQ ID NO: 4092588 - DNA, 25 bp, Homo sapien
cattatcaccttggctgggtcagtt

SEQ ID NO: 4092589 - DNA, 25 bp, Homo sapien
ctggtttgggggatggcggtggcct

SEQ ID NO: 4092590 - DNA, 25 bp, Homo sapien
tcagcagtgccaggcggcaacccac

SEQ ID NO: 4092591 - DNA, 25 bp, Homo sapien
gtgccaggcggcaacccacggggga

SEQ ID NO: 4092592 - DNA, 25 bp, Homo sapien
agcagtgccaggcggcaacccacgg

SEQ ID NO: 4092593 - DNA, 25 bp, Homo sapien
caggcggcaacccacgggggatggc

SEQ ID NO: 4092594 - DNA, 25 bp, Homo sapien
cagaggtgggtgagtgggtggatga

SEQ ID NO: 4092595 - DNA, 25 bp, Homo sapien
tgcagaggtgggtgagtgggtggat

SEQ ID NO: 4092596 - DNA, 25 bp, Homo sapien
ctgcagaggtgggtgagtgggtgga

SEQ ID NO: 4092597 - DNA, 25 bp, Homo sapien
gaggtgggtgagtgggtggatgatt

SEQ ID NO: 4092598 - DNA, 25 bp, Homo sapien
gggatgaaaacgctgtctgaatgct

SEQ ID NO: 4092599 - DNA, 25 bp, Homo sapien
ttcccacagtccacaatgatgaggc

SEQ ID NO: 4092600 - DNA, 25 bp, Homo sapien
ggttcccactgtgccttagtctcca

SEQ ID NO: 4092601 - DNA, 25 bp, Homo sapien
tgatccaagcggcttcccacagtcc

SEQ ID NO: 4092602 - DNA, 25 bp, Homo sapien
tgtggactgcatgctccaaccttct

SEQ ID NO: 4092603 - DNA, 25 bp, Homo sapien
tcagagtgttgacggctttgcagtt

SEQ ID NO: 4092604 - DNA, 25 bp, Homo sapien
tcttcccaaatgctgtcatgttcct

SEQ ID NO: 4092605 - DNA, 25 bp, Homo sapien
ttccacagttggaacggagcagcgg

SEQ ID NO: 4092606 - DNA, 25 bp, Homo sapien
tgacctagggtcaggtaaggccatg

SEQ ID NO: 4092607 - DNA, 25 bp, Homo sapien
ggacagacattgagggcaccactgc

SEQ ID NO: 4092608 - DNA, 25 bp, Homo sapien
tggggacctgaagacctgacctagg

SEQ ID NO: 4092609 - DNA, 25 bp, Homo sapien
cctgcaaaaagtcaaggaccttgtt

SEQ ID NO: 4092610 - DNA, 25 bp, Homo sapien
ttggtccactgcgacctccactttc

SEQ ID NO: 4092611 - DNA, 25 bp, Homo sapien
gacgtgatcttggtccactgcgacc

SEQ ID NO: 4092612 - DNA, 25 bp, Homo sapien
ccactgcgacctccactttctgtgt

SEQ ID NO: 4092613 - DNA, 25 bp, Homo sapien
gtgacgtgatcttggtccactgcga

SEQ ID NO: 4092614 - DNA, 25 bp, Homo sapien
gcaactcagtaccacttctggccag

SEQ ID NO: 4092615 - DNA, 25 bp, Homo sapien
caccaggactttgctaagagggcca

SEQ ID NO: 4092616 - DNA, 25 bp, Homo sapien
catggccaccatggtaaagtgcaag

SEQ ID NO: 4092617 - DNA, 25 bp, Homo sapien
tggccaggccctcatcctgaaactg

SEQ ID NO: 4092618 - DNA, 25 bp, Homo sapien
tgccgcctatccttggcttcggtgt

SEQ ID NO: 4092619 - DNA, 25 bp, Homo sapien
aatagagacagtgccatgtaacaaa

SEQ ID NO: 4092620 - DNA, 25 bp, Homo sapien
agggctgtcagaaatgccattctgc

SEQ ID NO: 4092621 - DNA, 25 bp, Homo sapien
taacaaaagctccatcttatctggg

SEQ ID NO: 4092622 - DNA, 25 bp, Homo sapien
ggcagcttcgtggagcgtgtgggca

SEQ ID NO: 4092623 - DNA, 25 bp, Homo sapien
aggacgatgccgaccatgctggcct

SEQ ID NO: 4092624 - DNA, 25 bp, Homo sapien
cagcgactgtgatagtcagggccga

SEQ ID NO: 4092625 - DNA, 25 bp, Homo sapien
caggtacagcatagggcagcgactg

SEQ ID NO: 4092626 - DNA, 25 bp, Homo sapien
acaaaggctggctggtggcacttgg

SEQ ID NO: 4092627 - DNA, 25 bp, Homo sapien
ctgacaaaggctggctggtggcact

SEQ ID NO: 4092628 - DNA, 25 bp, Homo sapien
aggctggctggtggcacttgggtac

SEQ ID NO: 4092629 - DNA, 25 bp, Homo sapien
caaaggctggctggtggcacttggg

SEQ ID NO: 4092630 - DNA, 25 bp, Homo sapien
gaacgaagcagttgctagctcaggg

SEQ ID NO: 4092631 - DNA, 25 bp, Homo sapien
ctgtggaacgaagcagttgctagct

SEQ ID NO: 4092632 - DNA, 25 bp, Homo sapien
cagttgctagctcagggtgcaggcc

SEQ ID NO: 4092633 - DNA, 25 bp, Homo sapien
cgaagcagttgctagctcagggtgc

SEQ ID NO: 4092634 - DNA, 25 bp, Homo sapien
agacgaacccgtataccctgatgga

SEQ ID NO: 4092635 - DNA, 25 bp, Homo sapien
gttgcagacgaacccgtataccctg

SEQ ID NO: 4092636 - DNA, 25 bp, Homo sapien
gcagacgaacccgtataccctgatg

SEQ ID NO: 4092637 - DNA, 25 bp, Homo sapien
ccagttgcagacgaacccgtatacc

SEQ ID NO: 4092638 - DNA, 25 bp, Homo sapien
taatgctgaacgactgctggcaggt

SEQ ID NO: 4092639 - DNA, 25 bp, Homo sapien
aatgctgaacgactgctggcaggtg

SEQ ID NO: 4092640 - DNA, 25 bp, Homo sapien
ggtggcagaggtgtctggagtctac

SEQ ID NO: 4092641 - DNA, 25 bp, Homo sapien
ggcagaggtgtctggagtctacatt

SEQ ID NO: 4092642 - DNA, 25 bp, Homo sapien
gcatagggtggcagaggtgtctgga

SEQ ID NO: 4092643 - DNA, 25 bp, Homo sapien
ggccagggcatagggtggcagaggt

SEQ ID NO: 4092644 - DNA, 25 bp, Homo sapien
ttagcaggaccgcactgggagggga

SEQ ID NO: 4092645 - DNA, 25 bp, Homo sapien
caggaccgcactgggaggggaacac

SEQ ID NO: 4092646 - DNA, 25 bp, Homo sapien
accattcccaggtggccaggtccct

SEQ ID NO: 4092647 - DNA, 25 bp, Homo sapien
ccattcccaggtggccaggtccctt

SEQ ID NO: 4092648 - DNA, 25 bp, Homo sapien
caccattcccaggtggccaggtccc

SEQ ID NO: 4092649 - DNA, 25 bp, Homo sapien
tcaccattcccaggtggccaggtcc

SEQ ID NO: 4092650 - DNA, 25 bp, Homo sapien
acgcagcagagtcccgcacgagggt

SEQ ID NO: 4092651 - DNA, 25 bp, Homo sapien
agtcccgcacgagggtctaactggg

SEQ ID NO: 4092652 - DNA, 25 bp, Homo sapien
tctcctctcatgtccacgatgctag

SEQ ID NO: 4092653 - DNA, 25 bp, Homo sapien
tcatgtccacgatgctaggcacggg

SEQ ID NO: 4092654 - DNA, 25 bp, Homo sapien
cctcttcgtggctgacaaggtcact

SEQ ID NO: 4092655 - DNA, 25 bp, Homo sapien
tgctgccgaaaatctcctttggggt

SEQ ID NO: 4092656 - DNA, 25 bp, Homo sapien
ggatctgggcccttctatggctaca

SEQ ID NO: 4092657 - DNA, 25 bp, Homo sapien
tgaaccccaggctataagttcctgt

SEQ ID NO: 4092658 - DNA, 25 bp, Homo sapien
tgagctgaatccaggatcacacaac

SEQ ID NO: 4092659 - DNA, 25 bp, Homo sapien
gatcacacaactgtgcgtctcaaac

SEQ ID NO: 4092660 - DNA, 25 bp, Homo sapien
ctgagctgaatccaggatcacacaa

SEQ ID NO: 4092661 - DNA, 25 bp, Homo sapien
tccaggatcacacaactgtgcgtct

SEQ ID NO: 4092662 - DNA, 25 bp, Homo sapien
gcctcaatagaggagccggatttcc

SEQ ID NO: 4092663 - DNA, 25 bp, Homo sapien
aggagccggatttcccagggtgcat

SEQ ID NO: 4092664 - DNA, 25 bp, Homo sapien
acagctcccgcctcaatagaggagc

SEQ ID NO: 4092665 - DNA, 25 bp, Homo sapien
atagaggagccggatttcccagggt

SEQ ID NO: 4092666 - DNA, 25 bp, Homo sapien
ctgcttcaacttccgctggaccaga

SEQ ID NO: 4092667 - DNA, 25 bp, Homo sapien
gggttgcctgcttcaacttccgctg

SEQ ID NO: 4092668 - DNA, 25 bp, Homo sapien
acttccgctggaccagactcctctg

SEQ ID NO: 4092669 - DNA, 25 bp, Homo sapien
taggggatttgctggagcagtcctg

SEQ ID NO: 4092670 - DNA, 25 bp, Homo sapien
gccccgatgactgaacttctgctaa

SEQ ID NO: 4092671 - DNA, 25 bp, Homo sapien
tcagccccgatgactgaacttctgc

SEQ ID NO: 4092672 - DNA, 25 bp, Homo sapien
cccgatgactgaacttctgctaatg

SEQ ID NO: 4092673 - DNA, 25 bp, Homo sapien
tagttcagccccgatgactgaactt

SEQ ID NO: 4092674 - DNA, 25 bp, Homo sapien
gatgaggcccctgagttgtggctcg

SEQ ID NO: 4092675 - DNA, 25 bp, Homo sapien
cccctgagttgtggctcgatggtgc

SEQ ID NO: 4092676 - DNA, 25 bp, Homo sapien
tgaggcccctgagttgtggctcgat

SEQ ID NO: 4092677 - DNA, 25 bp, Homo sapien
agttgtggctcgatggtgccagcac

SEQ ID NO: 4092678 - DNA, 25 bp, Homo sapien
taagcgtgtgctcttctcgttgcag

SEQ ID NO: 4092679 - DNA, 25 bp, Homo sapien
ggttctgggctctaagcgtgtgctc

SEQ ID NO: 4092680 - DNA, 25 bp, Homo sapien
cgttgtgcaggtctcccggagcaga

SEQ ID NO: 4092681 - DNA, 25 bp, Homo sapien
ctagtgtcgttgtgcaggtctcccg

SEQ ID NO: 4092682 - DNA, 25 bp, Homo sapien
ggaggattgggcctgcggatgtctg

SEQ ID NO: 4092683 - DNA, 25 bp, Homo sapien
ttgggcctgcggatgtctgctgagg

SEQ ID NO: 4092684 - DNA, 25 bp, Homo sapien
aggattgggcctgcggatgtctgct

SEQ ID NO: 4092685 - DNA, 25 bp, Homo sapien
gagaccccggaggattgggcctgcg

SEQ ID NO: 4092686 - DNA, 25 bp, Homo sapien
gaggctttagccatcagctgcatgg

SEQ ID NO: 4092687 - DNA, 25 bp, Homo sapien
caataccgcgtagtcacagtcttcg

SEQ ID NO: 4092688 - DNA, 25 bp, Homo sapien
ggaaggcatcactgtcaataccgcg

SEQ ID NO: 4092689 - DNA, 25 bp, Homo sapien
cgtgaaagttcaagtgcgcaataca

SEQ ID NO: 4092690 - DNA, 25 bp, Homo sapien
gtttgtccaagggcctctacagtct

SEQ ID NO: 4092691 - DNA, 25 bp, Homo sapien
aggcagggcttggaagcccactgct

SEQ ID NO: 4092692 - DNA, 25 bp, Homo sapien
cacagggtttgtccaagggcctcta

SEQ ID NO: 4092693 - DNA, 25 bp, Homo sapien
gccctctgggattgtccacagagcc

SEQ ID NO: 4092694 - DNA, 25 bp, Homo sapien
tcatgcaggggcctgacaaatggaa

SEQ ID NO: 4092695 - DNA, 25 bp, Homo sapien
gtcctcatgcaggggcctgacaaat

SEQ ID NO: 4092696 - DNA, 25 bp, Homo sapien
tgcaggggcctgacaaatggaacct

SEQ ID NO: 4092697 - DNA, 25 bp, Homo sapien
ggggcctgacaaatggaaccttcat

SEQ ID NO: 4092698 - DNA, 25 bp, Homo sapien
tgcagacagagacttccagggatcc

SEQ ID NO: 4092699 - DNA, 25 bp, Homo sapien
tcacgtgcagacagagacttccagg

SEQ ID NO: 4092700 - DNA, 25 bp, Homo sapien
cagacagagacttccagggatccat

SEQ ID NO: 4092701 - DNA, 25 bp, Homo sapien
cgtgcagacagagacttccagggat

SEQ ID NO: 4092702 - DNA, 25 bp, Homo sapien
gtgggtggccgtgaacagcaacaac

SEQ ID NO: 4092703 - DNA, 25 bp, Homo sapien
ggtggccgtgaacagcaacaactgt

SEQ ID NO: 4092704 - DNA, 25 bp, Homo sapien
ggctctgcatcgaccctgggacttg

SEQ ID NO: 4092705 - DNA, 25 bp, Homo sapien
cctgggacttgcagcatggccattt

SEQ ID NO: 4092706 - DNA, 25 bp, Homo sapien
ccacccgaccgtccacatccttcat

SEQ ID NO: 4092707 - DNA, 25 bp, Homo sapien
ctggcactcctcttcgtcccctctg

SEQ ID NO: 4092708 - DNA, 25 bp, Homo sapien
cagtcaccacccgaccgtccacatc

SEQ ID NO: 4092709 - DNA, 25 bp, Homo sapien
ggcactcctcttcgtcccctctgtg

SEQ ID NO: 4092710 - DNA, 25 bp, Homo sapien
gttaactacatgcttgtagaaagca

SEQ ID NO: 4092711 - DNA, 25 bp, Homo sapien
tacatgcttgtagaaagcagctctg

SEQ ID NO: 4092712 - DNA, 25 bp, Homo sapien
tggggcgccttgacaggaagcagct

SEQ ID NO: 4092713 - DNA, 25 bp, Homo sapien
tggaaagcgagttggggcgccttga

SEQ ID NO: 4092714 - DNA, 25 bp, Homo sapien
gcagacaaagctacacagtcccaag

SEQ ID NO: 4092715 - DNA, 25 bp, Homo sapien
gcctttgatgtccttgctgtcttgg

SEQ ID NO: 4092716 - DNA, 25 bp, Homo sapien
cagtcccaagaggaggtagcctttg

SEQ ID NO: 4092717 - DNA, 25 bp, Homo sapien
gaggcagacaaagctacacagtccc

SEQ ID NO: 4092718 - DNA, 25 bp, Homo sapien
ggatatctgttcagatgtcttcagg

SEQ ID NO: 4092719 - DNA, 25 bp, Homo sapien
caggccgtggcgcaggaagcctata

SEQ ID NO: 4092720 - DNA, 25 bp, Homo sapien
gcctatatggggccagtcgctgcac

SEQ ID NO: 4092721 - DNA, 25 bp, Homo sapien
caggaagcctatatggggccagtcg

SEQ ID NO: 4092722 - DNA, 25 bp, Homo sapien
aggccgtggcgcaggaagcctatat

SEQ ID NO: 4092723 - DNA, 25 bp, Homo sapien
tacagatgtgatcgttgtttctgat

SEQ ID NO: 4092724 - DNA, 25 bp, Homo sapien
acagatgtgatcgttgtttctgatc

SEQ ID NO: 4092725 - DNA, 25 bp, Homo sapien
ttacagatgtgatcgttgtttctga

SEQ ID NO: 4092726 - DNA, 25 bp, Homo sapien
cagatgtgatcgttgtttctgatct

SEQ ID NO: 4092727 - DNA, 25 bp, Homo sapien
caagcgcagtgtttcggctgctggt

SEQ ID NO: 4092728 - DNA, 25 bp, Homo sapien
gtgactaagggtactgcaagcgcag

SEQ ID NO: 4092729 - DNA, 25 bp, Homo sapien
cacgtcctctctgtgcgcgtgtgac

SEQ ID NO: 4092730 - DNA, 25 bp, Homo sapien
gtttgctgattcgtggagcagccac

SEQ ID NO: 4092731 - DNA, 25 bp, Homo sapien
tcactcgggtgcctgttcattcggc

SEQ ID NO: 4092732 - DNA, 25 bp, Homo sapien
tcattcggctagtgctcagcagagc

SEQ ID NO: 4092733 - DNA, 25 bp, Homo sapien
agagaagttccagaatgccaggtgc

SEQ ID NO: 4092734 - DNA, 25 bp, Homo sapien
tacttatgggtgcagtaaattccac

SEQ ID NO: 4092735 - DNA, 25 bp, Homo sapien
cctctctgcccagcccgtgccaggg

SEQ ID NO: 4092736 - DNA, 25 bp, Homo sapien
tctctgcccagcccgtgccaggggt

SEQ ID NO: 4092737 - DNA, 25 bp, Homo sapien
ccagcccgtgccaggggtggagtgc

SEQ ID NO: 4092738 - DNA, 25 bp, Homo sapien
tgcccagcccgtgccaggggtggag

SEQ ID NO: 4092739 - DNA, 25 bp, Homo sapien
tatttttccaatgtggggagctccc

SEQ ID NO: 4092740 - DNA, 25 bp, Homo sapien
caatttggggccaccagggccccag

SEQ ID NO: 4092741 - DNA, 25 bp, Homo sapien
tttttccaatgtggggagctccctg

SEQ ID NO: 4092742 - DNA, 25 bp, Homo sapien
aaatatttttccaatgtggggagct

SEQ ID NO: 4092743 - DNA, 25 bp, Homo sapien
tgagtattaatgaggcagcgctctg

SEQ ID NO: 4092744 - DNA, 25 bp, Homo sapien
ctgatccccgaagaccgccgggtgg

SEQ ID NO: 4092745 - DNA, 25 bp, Homo sapien
gcgctctgcgaggtgcgtctgcttc

SEQ ID NO: 4092746 - DNA, 25 bp, Homo sapien
tggtgaagtggcgatgagtattaat

SEQ ID NO: 4092747 - DNA, 25 bp, Homo sapien
agttggcggggggattgacaatgga

SEQ ID NO: 4092748 - DNA, 25 bp, Homo sapien
tgtgtggtcacgggagttggcgggg

SEQ ID NO: 4092749 - DNA, 25 bp, Homo sapien
gagatggctcccatgtggccatgtg

SEQ ID NO: 4092750 - DNA, 25 bp, Homo sapien
ttgacaatggagatggctcccatgt

SEQ ID NO: 4092751 - DNA, 25 bp, Homo sapien
ctgcctgatgtgcctctggtctcct

SEQ ID NO: 4092752 - DNA, 25 bp, Homo sapien
tgatgtgcctctggtctccttgcac

SEQ ID NO: 4092753 - DNA, 25 bp, Homo sapien
cctgatgtgcctctggtctccttgc

SEQ ID NO: 4092754 - DNA, 25 bp, Homo sapien
gcctgatgtgcctctggtctccttg

SEQ ID NO: 4092755 - DNA, 25 bp, Homo sapien
tccccgtggggcatccggtatgctt

SEQ ID NO: 4092756 - DNA, 25 bp, Homo sapien
gcttcacagagcatagtgactctgt

SEQ ID NO: 4092757 - DNA, 25 bp, Homo sapien
tctgtgctggacacgtccccgtggg

SEQ ID NO: 4092758 - DNA, 25 bp, Homo sapien
ggcatccggtatgctttgctgatgg

SEQ ID NO: 4092759 - DNA, 25 bp, Homo sapien
gacatgctggggcattattgaagga

SEQ ID NO: 4092760 - DNA, 25 bp, Homo sapien
ttatgcaggaagcgttgacttttcc

SEQ ID NO: 4092761 - DNA, 25 bp, Homo sapien
atgaagatctgacatgctggggcat

SEQ ID NO: 4092762 - DNA, 25 bp, Homo sapien
tgaaggagtgtggagaatcaggcac

SEQ ID NO: 4092763 - DNA, 25 bp, Homo sapien
tgcctgtaggttgtggctgtctcca

SEQ ID NO: 4092764 - DNA, 25 bp, Homo sapien
ttgccgaggtcatgcagttccagcc

SEQ ID NO: 4092765 - DNA, 25 bp, Homo sapien
tgaacttcttagctcgcgtcatcag

SEQ ID NO: 4092766 - DNA, 25 bp, Homo sapien
cagtgtgttcctatgcgccttgtaa

SEQ ID NO: 4092767 - DNA, 25 bp, Homo sapien
agcagcagtaatagcgcaagatgac

SEQ ID NO: 4092768 - DNA, 25 bp, Homo sapien
ctcgtaccagcccacttaagtaggt

SEQ ID NO: 4092769 - DNA, 25 bp, Homo sapien
cagtaatagcgcaagatgacatggg

SEQ ID NO: 4092770 - DNA, 25 bp, Homo sapien
ttaagtaggtattagtgtcagcagc

SEQ ID NO: 4092771 - DNA, 25 bp, Homo sapien
taaaagctgctttcgcctgcttgtg

SEQ ID NO: 4092772 - DNA, 25 bp, Homo sapien
tccaggtcgtccttcgaaagcttcc

SEQ ID NO: 4092773 - DNA, 25 bp, Homo sapien
gagcccagctcaggtagaacagcag

SEQ ID NO: 4092774 - DNA, 25 bp, Homo sapien
tcccaggcgtagaaaatggagaagg

SEQ ID NO: 4092775 - DNA, 25 bp, Homo sapien
tccaggggcaggatttgctggtcag

SEQ ID NO: 4092776 - DNA, 25 bp, Homo sapien
cagcgttccaggggcaggatttgct

SEQ ID NO: 4092777 - DNA, 25 bp, Homo sapien
gccagcgttccaggggcaggatttg

SEQ ID NO: 4092778 - DNA, 25 bp, Homo sapien
ccgaggcaaacaggccagcgttcca

SEQ ID NO: 4092779 - DNA, 25 bp, Homo sapien
gatggaatggaagcaatggcctaaa

SEQ ID NO: 4092780 - DNA, 25 bp, Homo sapien
agctgggttctggatgtcccttgaa

SEQ ID NO: 4092781 - DNA, 25 bp, Homo sapien
tgcaatgatccaggcaagtgatgac

SEQ ID NO: 4092782 - DNA, 25 bp, Homo sapien
aagtgatgacagtggcgggaccaga

SEQ ID NO: 4092783 - DNA, 25 bp, Homo sapien
ccttctcgtgctttgcgtctctcca

SEQ ID NO: 4092784 - DNA, 25 bp, Homo sapien
cccttctcgtgctttgcgtctctcc

SEQ ID NO: 4092785 - DNA, 25 bp, Homo sapien
tccccttctcgtgctttgcgtctct

SEQ ID NO: 4092786 - DNA, 25 bp, Homo sapien
cttctcgtgctttgcgtctctccat

SEQ ID NO: 4092787 - DNA, 25 bp, Homo sapien
tgcatggcttgcatccccttgtggc

SEQ ID NO: 4092788 - DNA, 25 bp, Homo sapien
ttcttgggtggcattggctgcatgg

SEQ ID NO: 4092789 - DNA, 25 bp, Homo sapien
gtggcattggctgcatggcttgcat

SEQ ID NO: 4092790 - DNA, 25 bp, Homo sapien
cttgggtggcattggctgcatggct

SEQ ID NO: 4092791 - DNA, 25 bp, Homo sapien
cttcttggccatcgtggtctctgtg

SEQ ID NO: 4092792 - DNA, 25 bp, Homo sapien
ccccgtgcaccctgccaggaggact

SEQ ID NO: 4092793 - DNA, 25 bp, Homo sapien
ttggccatcgtggtctctgtgtcct

SEQ ID NO: 4092794 - DNA, 25 bp, Homo sapien
ctgtggagccggcaccaaggtcagc

SEQ ID NO: 4092795 - DNA, 25 bp, Homo sapien
ggagcagcctcaccgtgtggacctt

SEQ ID NO: 4092796 - DNA, 25 bp, Homo sapien
accgtgtggaccttcgggcgcccat

SEQ ID NO: 4092797 - DNA, 25 bp, Homo sapien
cgtttgcctcccatgagtgtcggtg

SEQ ID NO: 4092798 - DNA, 25 bp, Homo sapien
tgtcggtgtcgaaacccggagcagc

SEQ ID NO: 4092799 - DNA, 25 bp, Homo sapien
ggatcgtcgccgcgcagcaggagct

SEQ ID NO: 4092800 - DNA, 25 bp, Homo sapien
tgcaggagctgacccggatcgtcgc

SEQ ID NO: 4092801 - DNA, 25 bp, Homo sapien
ctgcaggagctgacccggatcgtcg

SEQ ID NO: 4092802 - DNA, 25 bp, Homo sapien
gctgacccggatcgtcgccgcgcag

SEQ ID NO: 4092803 - DNA, 25 bp, Homo sapien
ctgccagccgagtgaaagcaatcca

SEQ ID NO: 4092804 - DNA, 25 bp, Homo sapien
ccgagtgaaagcaatccaccctgtc

SEQ ID NO: 4092805 - DNA, 25 bp, Homo sapien
cagccgagtgaaagcaatccaccct

SEQ ID NO: 4092806 - DNA, 25 bp, Homo sapien
gccagccgagtgaaagcaatccacc

SEQ ID NO: 4092807 - DNA, 25 bp, Homo sapien
tgcagctgaactggacggcctttaa

SEQ ID NO: 4092808 - DNA, 25 bp, Homo sapien
aaccacagcatccatgacacggtgc

SEQ ID NO: 4092809 - DNA, 25 bp, Homo sapien
cgtgggaatttagatgagagactgc

SEQ ID NO: 4092810 - DNA, 25 bp, Homo sapien
tcttttattgcacatcgtgggaatt

SEQ ID NO: 4092811 - DNA, 25 bp, Homo sapien
cattggaaatgccggttatcagttt

SEQ ID NO: 4092812 - DNA, 25 bp, Homo sapien
ttacttggcctcgaatttatcacat

SEQ ID NO: 4092813 - DNA, 25 bp, Homo sapien
cgaatttatcacattggaaatgccg

SEQ ID NO: 4092814 - DNA, 25 bp, Homo sapien
ggcctcgaatttatcacattggaaa

SEQ ID NO: 4092815 - DNA, 25 bp, Homo sapien
ggccctgtgagcgtctctgcttccg

SEQ ID NO: 4092816 - DNA, 25 bp, Homo sapien
gcacaggccctgtgagcgtctctgc

SEQ ID NO: 4092817 - DNA, 25 bp, Homo sapien
ctgtgagcgtctctgcttccgccat

SEQ ID NO: 4092818 - DNA, 25 bp, Homo sapien
agcacaggccctgtgagcgtctctg

SEQ ID NO: 4092819 - DNA, 25 bp, Homo sapien
taaagatatttacatagggctgagt

SEQ ID NO: 4092820 - DNA, 25 bp, Homo sapien
cccataaaggcccagctgagagtag

SEQ ID NO: 4092821 - DNA, 25 bp, Homo sapien
gatatttacatagggctgagtcctg

SEQ ID NO: 4092822 - DNA, 25 bp, Homo sapien
ccagctgagagtaggctaaagatat

SEQ ID NO: 4092823 - DNA, 25 bp, Homo sapien
tccagtggtgaggatagggatgatc

SEQ ID NO: 4092824 - DNA, 25 bp, Homo sapien
ccagtggtgaggatagggatgatca

SEQ ID NO: 4092825 - DNA, 25 bp, Homo sapien
tcaggatgggttccctggaagtggc

SEQ ID NO: 4092826 - DNA, 25 bp, Homo sapien
tggctgccaggtggataattttgtc

SEQ ID NO: 4092827 - DNA, 25 bp, Homo sapien
tggaggccgattcctgttggctgcc

SEQ ID NO: 4092828 - DNA, 25 bp, Homo sapien
agctggaggccgattcctgttggct

SEQ ID NO: 4092829 - DNA, 25 bp, Homo sapien
gataattttgtctccaagcccagag

SEQ ID NO: 4092830 - DNA, 25 bp, Homo sapien
ggaaccttcatgtttgagcctcagt

SEQ ID NO: 4092831 - DNA, 25 bp, Homo sapien
gatgctcaataaacgtgaacttttc

SEQ ID NO: 4092832 - DNA, 25 bp, Homo sapien
gcgtaattactgagttgaaccaccc

SEQ ID NO: 4092833 - DNA, 25 bp, Homo sapien
tatatgaccttcgtagcattgccac

SEQ ID NO: 4092834 - DNA, 25 bp, Homo sapien
gcaactcttattgttaaaaagcatc

SEQ ID NO: 4092835 - DNA, 25 bp, Homo sapien
tacttttataaagttggagacaatc

SEQ ID NO: 4092836 - DNA, 25 bp, Homo sapien
aaaaagcatcagtaagtctgggtgc

SEQ ID NO: 4092837 - DNA, 25 bp, Homo sapien
tcttttcataggctactacttttat

SEQ ID NO: 4092838 - DNA, 25 bp, Homo sapien
gttcccagcagtctgtagatccgtg

SEQ ID NO: 4092839 - DNA, 25 bp, Homo sapien
agcagtctgtagatccgtgtagatg

SEQ ID NO: 4092840 - DNA, 25 bp, Homo sapien
gccagcgccaaatgaagccaacttg

SEQ ID NO: 4092841 - DNA, 25 bp, Homo sapien
gggccagcgccaaatgaagccaact

SEQ ID NO: 4092842 - DNA, 25 bp, Homo sapien
caggggagaattggctgaagggagg

SEQ ID NO: 4092843 - DNA, 25 bp, Homo sapien
aacagagagggctgactcagtctct

SEQ ID NO: 4092844 - DNA, 25 bp, Homo sapien
aggggagaattggctgaagggaggg

SEQ ID NO: 4092845 - DNA, 25 bp, Homo sapien
agagagggctgactcagtctcttcc

SEQ ID NO: 4092846 - DNA, 25 bp, Homo sapien
cccacggctatgaaaagagtgatgg

SEQ ID NO: 4092847 - DNA, 25 bp, Homo sapien
tggcctgcagcccacggctatgaaa

SEQ ID NO: 4092848 - DNA, 25 bp, Homo sapien
cggctatgaaaagagtgatggttcc

SEQ ID NO: 4092849 - DNA, 25 bp, Homo sapien
tgcagcccacggctatgaaaagagt

SEQ ID NO: 4092850 - DNA, 25 bp, Homo sapien
aataggagcctttctactggtttat

SEQ ID NO: 4092851 - DNA, 25 bp, Homo sapien
gacaacctggatgtaaataggagcc

SEQ ID NO: 4092852 - DNA, 25 bp, Homo sapien
gaaaggaagaattgtgccttgcata

SEQ ID NO: 4092853 - DNA, 25 bp, Homo sapien
gccttgcatattacttgagcttaaa

SEQ ID NO: 4092854 - DNA, 25 bp, Homo sapien
ggatgacgggatcccgcacaagctc

SEQ ID NO: 4092855 - DNA, 25 bp, Homo sapien
tcagggagatccagagactcatgcc

SEQ ID NO: 4092856 - DNA, 25 bp, Homo sapien
catccatgcgtggacgctgtgtgga

SEQ ID NO: 4092857 - DNA, 25 bp, Homo sapien
cgctgtgtggagagtccaggatgac

SEQ ID NO: 4092858 - DNA, 25 bp, Homo sapien
cctgggccaatgatggagggcggcc

SEQ ID NO: 4092859 - DNA, 25 bp, Homo sapien
gagccaccgcctgccagtgtgagag

SEQ ID NO: 4092860 - DNA, 25 bp, Homo sapien
tgcccatccagaagggactccccag

SEQ ID NO: 4092861 - DNA, 25 bp, Homo sapien
gagaggcggccactttcatggcagc

SEQ ID NO: 4092862 - DNA, 25 bp, Homo sapien
agcacaaagacccagtgtcatttgc

SEQ ID NO: 4092863 - DNA, 25 bp, Homo sapien
gcacaaagacccagtgtcatttgct

SEQ ID NO: 4092864 - DNA, 25 bp, Homo sapien
tcagcacaaagacccagtgtcattt

SEQ ID NO: 4092865 - DNA, 25 bp, Homo sapien
acaaagacccagtgtcatttgctcc

SEQ ID NO: 4092866 - DNA, 25 bp, Homo sapien
catgagtgtccctgtatctgcgcca

SEQ ID NO: 4092867 - DNA, 25 bp, Homo sapien
cataagccgttgagacatctgatgg

SEQ ID NO: 4092868 - DNA, 25 bp, Homo sapien
tgggccactgtgaacagacttcagt

SEQ ID NO: 4092869 - DNA, 25 bp, Homo sapien
gatggacttggcttaggccctgctg

SEQ ID NO: 4092870 - DNA, 25 bp, Homo sapien
gaggtatcataaagggaactcctga

SEQ ID NO: 4092871 - DNA, 25 bp, Homo sapien
cattaggttatgacaggagccccac

SEQ ID NO: 4092872 - DNA, 25 bp, Homo sapien
ttttaagtctattcacagcagcggc

SEQ ID NO: 4092873 - DNA, 25 bp, Homo sapien
ttaatctgtgatccgaagcaggtgg

SEQ ID NO: 4092874 - DNA, 25 bp, Homo sapien
cagtttaaatctactcttgtgcgct

SEQ ID NO: 4092875 - DNA, 25 bp, Homo sapien
gctaatgtaagctggcagtccatct

SEQ ID NO: 4092876 - DNA, 25 bp, Homo sapien
cattgactttagctgtgctcatggc

SEQ ID NO: 4092877 - DNA, 25 bp, Homo sapien
tactcttgcaagcattgactttagc

SEQ ID NO: 4092878 - DNA, 25 bp, Homo sapien
aatattattccataaggagcactgt

SEQ ID NO: 4092879 - DNA, 25 bp, Homo sapien
cactgtaacagccataaagaaaatt

SEQ ID NO: 4092880 - DNA, 25 bp, Homo sapien
ccacaaactgttagttacctaatgg

SEQ ID NO: 4092881 - DNA, 25 bp, Homo sapien
tttcctttcaatcaatcctttaaga

SEQ ID NO: 4092882 - DNA, 25 bp, Homo sapien
cagcatcctgcaactggctcggtga

SEQ ID NO: 4092883 - DNA, 25 bp, Homo sapien
aaactcacagtgaaagggcaccacc

SEQ ID NO: 4092884 - DNA, 25 bp, Homo sapien
ttagacagggctcgagtcctcgtgg

SEQ ID NO: 4092885 - DNA, 25 bp, Homo sapien
catgggatggatcactgctctgacc

SEQ ID NO: 4092886 - DNA, 25 bp, Homo sapien
tctttgcctgggttggtttgatcaa

SEQ ID NO: 4092887 - DNA, 25 bp, Homo sapien
ctttgcctgggttggtttgatcaac

SEQ ID NO: 4092888 - DNA, 25 bp, Homo sapien
ggggctgattcaggtggatgttaaa

SEQ ID NO: 4092889 - DNA, 25 bp, Homo sapien
tgggggctgattcaggtggatgtta

SEQ ID NO: 4092890 - DNA, 25 bp, Homo sapien
ggtgggggctgattcaggtggatgt

SEQ ID NO: 4092891 - DNA, 25 bp, Homo sapien
gctgattcaggtggatgttaaagcc

SEQ ID NO: 4092892 - DNA, 25 bp, Homo sapien
ccctgtaccactcaatttgtgtgca

SEQ ID NO: 4092893 - DNA, 25 bp, Homo sapien
tcccctgtaccactcaatttgtgtg

SEQ ID NO: 4092894 - DNA, 25 bp, Homo sapien
ttgagagtgttttcccctgtaccac

SEQ ID NO: 4092895 - DNA, 25 bp, Homo sapien
ttcgttgagagtgttttcccctgta

SEQ ID NO: 4092896 - DNA, 25 bp, Homo sapien
aggccttcgtgggtgaagttgggca

SEQ ID NO: 4092897 - DNA, 25 bp, Homo sapien
cacaggccttcgtgggtgaagttgg

SEQ ID NO: 4092898 - DNA, 25 bp, Homo sapien
acaggccttcgtgggtgaagttggg

SEQ ID NO: 4092899 - DNA, 25 bp, Homo sapien
caggccttcgtgggtgaagttgggc

SEQ ID NO: 4092900 - DNA, 25 bp, Homo sapien
gcactggtccctatgccgtggagct

SEQ ID NO: 4092901 - DNA, 25 bp, Homo sapien
tctcaaacaggtagatgggagtcct

SEQ ID NO: 4092902 - DNA, 25 bp, Homo sapien
tcagtcacaggtgtaaggattctca

SEQ ID NO: 4092903 - DNA, 25 bp, Homo sapien
tagatgggagtcctttcagggccag

SEQ ID NO: 4092904 - DNA, 25 bp, Homo sapien
taagagctggcctatagacatatat

SEQ ID NO: 4092905 - DNA, 25 bp, Homo sapien
tgcatcagagaagtgctaagtacct

SEQ ID NO: 4092906 - DNA, 25 bp, Homo sapien
tatccacagtcctctaaacctggga

SEQ ID NO: 4092907 - DNA, 25 bp, Homo sapien
cctagtgtagtcgtctattgctgca

SEQ ID NO: 4092908 - DNA, 25 bp, Homo sapien
gcgttggcgccctaaatgacctata

SEQ ID NO: 4092909 - DNA, 25 bp, Homo sapien
tggattccgcggtgctaaactttct

SEQ ID NO: 4092910 - DNA, 25 bp, Homo sapien
agcacagcgcggaatctaaggcctt

SEQ ID NO: 4092911 - DNA, 25 bp, Homo sapien
ggtaacctctaatggcttccgcagg

SEQ ID NO: 4092912 - DNA, 25 bp, Homo sapien
cattctgaggaagagtaaacgcatc

SEQ ID NO: 4092913 - DNA, 25 bp, Homo sapien
tgcagccatcatcctctagtgatgc

SEQ ID NO: 4092914 - DNA, 25 bp, Homo sapien
gtggcaagtgtgaggaacacattct

SEQ ID NO: 4092915 - DNA, 25 bp, Homo sapien
aacaattgccaatcctggcagaggc

SEQ ID NO: 4092916 - DNA, 25 bp, Homo sapien
agagtatacagaggcctgggacaaa

SEQ ID NO: 4092917 - DNA, 25 bp, Homo sapien
tcaaatcatagggagtccgagctgt

SEQ ID NO: 4092918 - DNA, 25 bp, Homo sapien
acaagagtctgtctagctgtgtcag

SEQ ID NO: 4092919 - DNA, 25 bp, Homo sapien
tgcgggaccggcgttctattattac

SEQ ID NO: 4092920 - DNA, 25 bp, Homo sapien
ctccagcagattggtggtccttttt

SEQ ID NO: 4092921 - DNA, 25 bp, Homo sapien
tccagcagattggtggtcctttttg

SEQ ID NO: 4092922 - DNA, 25 bp, Homo sapien
tcttcagactggaacttgggtctcc

SEQ ID NO: 4092923 - DNA, 25 bp, Homo sapien
ggccacgggtacacagacatttggt

SEQ ID NO: 4092924 - DNA, 25 bp, Homo sapien
tcactaatgtaagtgggccgcatcc

SEQ ID NO: 4092925 - DNA, 25 bp, Homo sapien
tgtgggaagtcaagaaagcagtcct

SEQ ID NO: 4092926 - DNA, 25 bp, Homo sapien
ttctctgtcggtagcacgatcccca

SEQ ID NO: 4092927 - DNA, 25 bp, Homo sapien
ttggatttcgtagtttctctgtcgg

SEQ ID NO: 4092928 - DNA, 25 bp, Homo sapien
gctacggcctttgatcactgtgctt

SEQ ID NO: 4092929 - DNA, 25 bp, Homo sapien
tgtgaaactctgcatcccctcacag

SEQ ID NO: 4092930 - DNA, 25 bp, Homo sapien
cctcctcagggtagaggcccaatgc

SEQ ID NO: 4092931 - DNA, 25 bp, Homo sapien
ccaggcctagcccatatgattgtag

SEQ ID NO: 4092932 - DNA, 25 bp, Homo sapien
aggcccaatgccaggaggccttggc

SEQ ID NO: 4092933 - DNA, 25 bp, Homo sapien
tggtggggagtcaatgctgaacctc

SEQ ID NO: 4092934 - DNA, 25 bp, Homo sapien
tctgccaaggtgactccccctggcg

SEQ ID NO: 4092935 - DNA, 25 bp, Homo sapien
cgctgcagaacaccggcgctgggaa

SEQ ID NO: 4092936 - DNA, 25 bp, Homo sapien
aagtctgggggaccttcctcctctg

SEQ ID NO: 4092937 - DNA, 25 bp, Homo sapien
agggcgctgcagaacaccggcgctg

SEQ ID NO: 4092938 - DNA, 25 bp, Homo sapien
cttgacttgggccttggagatgcct

SEQ ID NO: 4092939 - DNA, 25 bp, Homo sapien
caggcacgcaaaggatattacagaa

SEQ ID NO: 4092940 - DNA, 25 bp, Homo sapien
catgcccctttcaattcaagtgagc

SEQ ID NO: 4092941 - DNA, 25 bp, Homo sapien
ttaaacaaccagaagatactgcagg

SEQ ID NO: 4092942 - DNA, 25 bp, Homo sapien
agtgagcacctctatttccattcca

SEQ ID NO: 4092943 - DNA, 25 bp, Homo sapien
tccgggacaagcactcccggcgaag

SEQ ID NO: 4092944 - DNA, 25 bp, Homo sapien
tctgcgagcagctccgggacaagca

SEQ ID NO: 4092945 - DNA, 25 bp, Homo sapien
gggacaagcactcccggcgaagaca

SEQ ID NO: 4092946 - DNA, 25 bp, Homo sapien
ggcccagtctgcgagcagctccggg

SEQ ID NO: 4092947 - DNA, 25 bp, Homo sapien
tctgggcccttgtttccgcgagtta

SEQ ID NO: 4092948 - DNA, 25 bp, Homo sapien
tcccaagctgggtagaaacggcgag

SEQ ID NO: 4092949 - DNA, 25 bp, Homo sapien
tggaatcccgcctggttcggaagct

SEQ ID NO: 4092950 - DNA, 25 bp, Homo sapien
gaccaccgtatgtcctgttcctgcg

SEQ ID NO: 4092951 - DNA, 25 bp, Homo sapien
gccctcccaaagctggccgcagctc

SEQ ID NO: 4092952 - DNA, 25 bp, Homo sapien
cgccctagcgcgcccgcccaccggg

SEQ ID NO: 4092953 - DNA, 25 bp, Homo sapien
cgtccccgccctcgccctagcgcgc

SEQ ID NO: 4092954 - DNA, 25 bp, Homo sapien
gccgtccccgccctcgccctagcgc

SEQ ID NO: 4092955 - DNA, 25 bp, Homo sapien
gccctcgccctagcgcgcccgccca

SEQ ID NO: 4092956 - DNA, 25 bp, Homo sapien
ccgcctggactgacccaccagccat

SEQ ID NO: 4092957 - DNA, 25 bp, Homo sapien
cgagcccgcctggactgacccacca

SEQ ID NO: 4092958 - DNA, 25 bp, Homo sapien
tcccgagcccgcctggactgaccca

SEQ ID NO: 4092959 - DNA, 25 bp, Homo sapien
cccgcctggactgacccaccagcca

SEQ ID NO: 4092960 - DNA, 25 bp, Homo sapien
taccgtgtggaaaaagacagacgca

SEQ ID NO: 4092961 - DNA, 25 bp, Homo sapien
accgtgtggaaaaagacagacgcac

SEQ ID NO: 4092962 - DNA, 25 bp, Homo sapien
ctaccgtgtggaaaaagacagacgc

SEQ ID NO: 4092963 - DNA, 25 bp, Homo sapien
cccattttccggcatcaaagggatg

SEQ ID NO: 4092964 - DNA, 25 bp, Homo sapien
tggcacatgctggtacagctgggtt

SEQ ID NO: 4092965 - DNA, 25 bp, Homo sapien
gaaggtgatgttgtagcgcggcgag

SEQ ID NO: 4092966 - DNA, 25 bp, Homo sapien
tacacgattggccagcgtgtctctg

SEQ ID NO: 4092967 - DNA, 25 bp, Homo sapien
ctgaaaccacagagggagcatcctg

SEQ ID NO: 4092968 - DNA, 25 bp, Homo sapien
gaccctcccacaggctgcagacttg

SEQ ID NO: 4092969 - DNA, 25 bp, Homo sapien
agagggagcatcctgcttccccact

SEQ ID NO: 4092970 - DNA, 25 bp, Homo sapien
tccccactgacctcaaggccagggc

SEQ ID NO: 4092971 - DNA, 25 bp, Homo sapien
ctcattaagatagcgcctcgtgtgc

SEQ ID NO: 4092972 - DNA, 25 bp, Homo sapien
gagctcattaagatagcgcctcgtg

SEQ ID NO: 4092973 - DNA, 25 bp, Homo sapien
cttgagctcattaagatagcgcctc

SEQ ID NO: 4092974 - DNA, 25 bp, Homo sapien
ttaagatagcgcctcgtgtgcacca

SEQ ID NO: 4092975 - DNA, 25 bp, Homo sapien
agccccccaggcccgacatcctgta

SEQ ID NO: 4092976 - DNA, 25 bp, Homo sapien
gccccccaggcccgacatcctgtac

SEQ ID NO: 4092977 - DNA, 25 bp, Homo sapien
tggatatctgagtacaaaacaatga

SEQ ID NO: 4092978 - DNA, 25 bp, Homo sapien
acaatgaagttggacttgcctcaca

SEQ ID NO: 4092979 - DNA, 25 bp, Homo sapien
aactggatatctgagtacaaaacaa

SEQ ID NO: 4092980 - DNA, 25 bp, Homo sapien
acaaaacaatgaagttggacttgcc

SEQ ID NO: 4092981 - DNA, 25 bp, Homo sapien
tatggttcctcctgtctgggtccga

SEQ ID NO: 4092982 - DNA, 25 bp, Homo sapien
gataacgggggggatttctgtgatg

SEQ ID NO: 4092983 - DNA, 25 bp, Homo sapien
tgatggtagcaacagcaaaggacca

SEQ ID NO: 4092984 - DNA, 25 bp, Homo sapien
tctgggtccgaaggggcctcagcac

SEQ ID NO: 4092985 - DNA, 25 bp, Homo sapien
atggcccagcctcgctccacagcca

SEQ ID NO: 4092986 - DNA, 25 bp, Homo sapien
agcctcgctccacagccagcttccc

SEQ ID NO: 4092987 - DNA, 25 bp, Homo sapien
ccacgttgatggcccagcctcgctc

SEQ ID NO: 4092988 - DNA, 25 bp, Homo sapien
acgttgatggcccagcctcgctcca

SEQ ID NO: 4092989 - DNA, 25 bp, Homo sapien
cagcccctgggatggcctgaattgc

SEQ ID NO: 4092990 - DNA, 25 bp, Homo sapien
caaacccagggtggatcaggatcca

SEQ ID NO: 4092991 - DNA, 25 bp, Homo sapien
gaggccctctgaaattgagcccaac

SEQ ID NO: 4092992 - DNA, 25 bp, Homo sapien
tgaacacctgactgagcaactgagc

SEQ ID NO: 4092993 - DNA, 25 bp, Homo sapien
gcaacagatagctcatcattccaga

SEQ ID NO: 4092994 - DNA, 25 bp, Homo sapien
aacagatagctcatcattccagaag

SEQ ID NO: 4092995 - DNA, 25 bp, Homo sapien
agatagctcatcattccagaagcag

SEQ ID NO: 4092996 - DNA, 25 bp, Homo sapien
agcaacagatagctcatcattccag

SEQ ID NO: 4092997 - DNA, 25 bp, Homo sapien
gatgtccgcataggcacagaagccc

SEQ ID NO: 4092998 - DNA, 25 bp, Homo sapien
ttgatggcgagcgtgatgtccgcat

SEQ ID NO: 4092999 - DNA, 25 bp, Homo sapien
cgtgatgtccgcataggcacagaag

SEQ ID NO: 4093000 - DNA, 25 bp, Homo sapien
cgagcgtgatgtccgcataggcaca

SEQ ID NO: 4093001 - DNA, 25 bp, Homo sapien
aagatcaatgatggtagccctggag

SEQ ID NO: 4093002 - DNA, 25 bp, Homo sapien
atgccctccacacgctcaaacagaa

SEQ ID NO: 4093003 - DNA, 25 bp, Homo sapien
tcaagatcaatgatggtagccctgg

SEQ ID NO: 4093004 - DNA, 25 bp, Homo sapien
gcatcaagatcaatgatggtagccc

SEQ ID NO: 4093005 - DNA, 25 bp, Homo sapien
cagaccctgcatttgtagcccgaga

SEQ ID NO: 4093006 - DNA, 25 bp, Homo sapien
caatgaggaggacccgctgtcctgg

SEQ ID NO: 4093007 - DNA, 25 bp, Homo sapien
cgagagcagtcccatcagagtgggc

SEQ ID NO: 4093008 - DNA, 25 bp, Homo sapien
tcctgccccgggaagattctggaac

SEQ ID NO: 4093009 - DNA, 25 bp, Homo sapien
cggttgtagacatccatgatgtaca

SEQ ID NO: 4093010 - DNA, 25 bp, Homo sapien
caaagcggtcccctgggtagatgtg

SEQ ID NO: 4093011 - DNA, 25 bp, Homo sapien
catgatgtacacacgcttgtcgtcc

SEQ ID NO: 4093012 - DNA, 25 bp, Homo sapien
tccatgaagtctcgctcatgcccat

SEQ ID NO: 4093013 - DNA, 25 bp, Homo sapien
caagatgagggtaggggcagcagct

SEQ ID NO: 4093014 - DNA, 25 bp, Homo sapien
aagatgagggtaggggcagcagctt

SEQ ID NO: 4093015 - DNA, 25 bp, Homo sapien
ccaagatgagggtaggggcagcagc

SEQ ID NO: 4093016 - DNA, 25 bp, Homo sapien
gatgagggtaggggcagcagcttac

SEQ ID NO: 4093017 - DNA, 25 bp, Homo sapien
ggcctagcagacaggagacactcag

SEQ ID NO: 4093018 - DNA, 25 bp, Homo sapien
cagtggcttctgcagggcctagcag

SEQ ID NO: 4093019 - DNA, 25 bp, Homo sapien
ggatgctatgaaccactgcagtggc

SEQ ID NO: 4093020 - DNA, 25 bp, Homo sapien
gggtcgagtgacttctccaggtctc

SEQ ID NO: 4093021 - DNA, 25 bp, Homo sapien
cctgttttttgccagacaaatgcat

SEQ ID NO: 4093022 - DNA, 25 bp, Homo sapien
ctgttttttgccagacaaatgcatg

SEQ ID NO: 4093023 - DNA, 25 bp, Homo sapien
tctttcctgttttttgccagacaaa

SEQ ID NO: 4093024 - DNA, 25 bp, Homo sapien
ttcctgttttttgccagacaaatgc

SEQ ID NO: 4093025 - DNA, 25 bp, Homo sapien
gactcatcgtgactggtgcaaaaat

SEQ ID NO: 4093026 - DNA, 25 bp, Homo sapien
accagactcatcgtgactggtgcaa

SEQ ID NO: 4093027 - DNA, 25 bp, Homo sapien
ttatccacaccagactcatcgtgac

SEQ ID NO: 4093028 - DNA, 25 bp, Homo sapien
catcgtgactggtgcaaaaatgtcc

SEQ ID NO: 4093029 - DNA, 25 bp, Homo sapien
ttggttccttgggccatactagctg

SEQ ID NO: 4093030 - DNA, 25 bp, Homo sapien
gttctgttcagaaattggttccttg

SEQ ID NO: 4093031 - DNA, 25 bp, Homo sapien
caggctcagcacatgtgaggttctg

SEQ ID NO: 4093032 - DNA, 25 bp, Homo sapien
tgccctgcccttaagcccaggctca

SEQ ID NO: 4093033 - DNA, 25 bp, Homo sapien
tggaaactggtctgtcagattcagc

SEQ ID NO: 4093034 - DNA, 25 bp, Homo sapien
aggcaagactggaaactggtctgtc

SEQ ID NO: 4093035 - DNA, 25 bp, Homo sapien
gactggaaactggtctgtcagattc

SEQ ID NO: 4093036 - DNA, 25 bp, Homo sapien
caagactggaaactggtctgtcaga

SEQ ID NO: 4093037 - DNA, 25 bp, Homo sapien
gatgtcggtgcctgcattgtatacc

SEQ ID NO: 4093038 - DNA, 25 bp, Homo sapien
ccctcgaggatgtcggtgcctgcat

SEQ ID NO: 4093039 - DNA, 25 bp, Homo sapien
ggtgcctgcattgtataccaccacg

SEQ ID NO: 4093040 - DNA, 25 bp, Homo sapien
tgcattgtataccaccacgtcgggc

SEQ ID NO: 4093041 - DNA, 25 bp, Homo sapien
gctgagtccatagagcagaccctcc

SEQ ID NO: 4093042 - DNA, 25 bp, Homo sapien
gctgctgagtccatagagcagaccc

SEQ ID NO: 4093043 - DNA, 25 bp, Homo sapien
ctgctgctgagtccatagagcagac

SEQ ID NO: 4093044 - DNA, 25 bp, Homo sapien
tgctgagtccatagagcagaccctc

SEQ ID NO: 4093045 - DNA, 25 bp, Homo sapien
aagcagcggtgtgtctgagttctgt

SEQ ID NO: 4093046 - DNA, 25 bp, Homo sapien
gccccaggccaaacagattaagtat

SEQ ID NO: 4093047 - DNA, 25 bp, Homo sapien
gggctgtgcgcttctggtacccgcc

SEQ ID NO: 4093048 - DNA, 25 bp, Homo sapien
tatggagtcagcaatgatgcgggct

SEQ ID NO: 4093049 - DNA, 25 bp, Homo sapien
gggaactccagatgagggaacccac

SEQ ID NO: 4093050 - DNA, 25 bp, Homo sapien
ccagttaggatgcaggcctagtcag

SEQ ID NO: 4093051 - DNA, 25 bp, Homo sapien
caggtccagaccttgctttattgag

SEQ ID NO: 4093052 - DNA, 25 bp, Homo sapien
tccctggacctatgggctggtgact

SEQ ID NO: 4093053 - DNA, 25 bp, Homo sapien
caacggcaagggtagggatctcaga

SEQ ID NO: 4093054 - DNA, 25 bp, Homo sapien
gatttccacctgtgagcctggcctg

SEQ ID NO: 4093055 - DNA, 25 bp, Homo sapien
tgtaatgaacacaagtcccgtaggg

SEQ ID NO: 4093056 - DNA, 25 bp, Homo sapien
gaggtccctgaatgtccccatgagt

SEQ ID NO: 4093057 - DNA, 25 bp, Homo sapien
ggctgcattccattctcaggagttc

SEQ ID NO: 4093058 - DNA, 25 bp, Homo sapien
caggctgcattccattctcaggagt

SEQ ID NO: 4093059 - DNA, 25 bp, Homo sapien
tgcattccattctcaggagttccca

SEQ ID NO: 4093060 - DNA, 25 bp, Homo sapien
gcattccattctcaggagttcccat

SEQ ID NO: 4093061 - DNA, 25 bp, Homo sapien
agtgccgtccagtttatcccagtac

SEQ ID NO: 4093062 - DNA, 25 bp, Homo sapien
tgccgtccagtttatcccagtaccg

SEQ ID NO: 4093063 - DNA, 25 bp, Homo sapien
cagtgccgtccagtttatcccagta

SEQ ID NO: 4093064 - DNA, 25 bp, Homo sapien
gtgccgtccagtttatcccagtacc

SEQ ID NO: 4093065 - DNA, 25 bp, Homo sapien
ctatgccgggcctgacatctgtgca

SEQ ID NO: 4093066 - DNA, 25 bp, Homo sapien
ggtccaccatttccgcggctgatgg

SEQ ID NO: 4093067 - DNA, 25 bp, Homo sapien
gcgggtccaccatttccgcggctga

SEQ ID NO: 4093068 - DNA, 25 bp, Homo sapien
ctcggctatgccgggcctgacatct

SEQ ID NO: 4093069 - DNA, 25 bp, Homo sapien
cgcccggccgtcggcgcgtcgagag

SEQ ID NO: 4093070 - DNA, 25 bp, Homo sapien
cgcggggcactgcgctcggcgtccg

SEQ ID NO: 4093071 - DNA, 25 bp, Homo sapien
gcggggcactgcgctcggcgtccgt

SEQ ID NO: 4093072 - DNA, 25 bp, Homo sapien
gatatgggcaactccttgtggcagc

SEQ ID NO: 4093073 - DNA, 25 bp, Homo sapien
gatcactgcaaagctgatatgggca

SEQ ID NO: 4093074 - DNA, 25 bp, Homo sapien
gggactggcccaagtgatcactgca

SEQ ID NO: 4093075 - DNA, 25 bp, Homo sapien
tcagctgccacccaattcatcaggg

SEQ ID NO: 4093076 - DNA, 25 bp, Homo sapien
tcttccaaggagaccacctctagcc

SEQ ID NO: 4093077 - DNA, 25 bp, Homo sapien
ttccaaggagaccacctctagccac

SEQ ID NO: 4093078 - DNA, 25 bp, Homo sapien
cctcttccaaggagaccacctctag

SEQ ID NO: 4093079 - DNA, 25 bp, Homo sapien
ccaaggagaccacctctagccacat

SEQ ID NO: 4093080 - DNA, 25 bp, Homo sapien
ggccacaagctcctcgctctgctgt

SEQ ID NO: 4093081 - DNA, 25 bp, Homo sapien
caagctcctcgctctgctgtcctga

SEQ ID NO: 4093082 - DNA, 25 bp, Homo sapien
ccacaagctcctcgctctgctgtcc

SEQ ID NO: 4093083 - DNA, 25 bp, Homo sapien
gctgtcctgatagggctgggcccca

SEQ ID NO: 4093084 - DNA, 25 bp, Homo sapien
tcagagacgtctgtaccaggtccat

SEQ ID NO: 4093085 - DNA, 25 bp, Homo sapien
tccatgaccctgtgcttctgacgcc

SEQ ID NO: 4093086 - DNA, 25 bp, Homo sapien
ccaggtccatatggcccctggtggt

SEQ ID NO: 4093087 - DNA, 25 bp, Homo sapien
ttctgacgcccagtgtgcgactcag

SEQ ID NO: 4093088 - DNA, 25 bp, Homo sapien
ctggagcagcctctttgcaaggcag

SEQ ID NO: 4093089 - DNA, 25 bp, Homo sapien
atgccactggccgaagtgtcacctg

SEQ ID NO: 4093090 - DNA, 25 bp, Homo sapien
cagcctctttgcaaggcagtaccca

SEQ ID NO: 4093091 - DNA, 25 bp, Homo sapien
actggccgaagtgtcacctggagca

SEQ ID NO: 4093092 - DNA, 25 bp, Homo sapien
caggacggtcccctctcctgtaaga

SEQ ID NO: 4093093 - DNA, 25 bp, Homo sapien
agcccaggacggtcccctctcctgt

SEQ ID NO: 4093094 - DNA, 25 bp, Homo sapien
aggccagcccaggacggtcccctct

SEQ ID NO: 4093095 - DNA, 25 bp, Homo sapien
ggtccaggccagcccaggacggtcc

SEQ ID NO: 4093096 - DNA, 25 bp, Homo sapien
ctgcaggctcccagagcagcaccat

SEQ ID NO: 4093097 - DNA, 25 bp, Homo sapien
gctgcggccacgctggggcccaggg

SEQ ID NO: 4093098 - DNA, 25 bp, Homo sapien
gccaggcccagagcaagccaggctc

SEQ ID NO: 4093099 - DNA, 25 bp, Homo sapien
ctgccgaggggcagctgcggccacg

SEQ ID NO: 4093100 - DNA, 25 bp, Homo sapien
cgaggggcagctgcggccacgctgg

SEQ ID NO: 4093101 - DNA, 25 bp, Homo sapien
tacagcctcgatgcagttgggcggc

SEQ ID NO: 4093102 - DNA, 25 bp, Homo sapien
ggcatctgagaagttcccgtggcaa

SEQ ID NO: 4093103 - DNA, 25 bp, Homo sapien
ccacaaaataggactgaccggcggg

SEQ ID NO: 4093104 - DNA, 25 bp, Homo sapien
tcatagtactggtagccctcgcagg

SEQ ID NO: 4093105 - DNA, 25 bp, Homo sapien
tggacagtggctgactcccacctcc

SEQ ID NO: 4093106 - DNA, 25 bp, Homo sapien
gctgctcagtgacagccatttcctc

SEQ ID NO: 4093107 - DNA, 25 bp, Homo sapien
tgctcagtgacagccatttcctctc

SEQ ID NO: 4093108 - DNA, 25 bp, Homo sapien
tgctgccagctgctcagtgacagcc

SEQ ID NO: 4093109 - DNA, 25 bp, Homo sapien
cagctgctcagtgacagccatttcc

SEQ ID NO: 4093110 - DNA, 25 bp, Homo sapien
ctgtagtgggcagcccatccagccc

SEQ ID NO: 4093111 - DNA, 25 bp, Homo sapien
tgtagtgggcagcccatccagcccc

SEQ ID NO: 4093112 - DNA, 25 bp, Homo sapien
tggataggaagactgggtccaggct

SEQ ID NO: 4093113 - DNA, 25 bp, Homo sapien
ctggataggaagactgggtccaggc

SEQ ID NO: 4093114 - DNA, 25 bp, Homo sapien
cttgggcatccaggatgaggttctc

SEQ ID NO: 4093115 - DNA, 25 bp, Homo sapien
ttgccccagcttctgccctctcctc

SEQ ID NO: 4093116 - DNA, 25 bp, Homo sapien
cagcttctgcccttgccccagcttc

SEQ ID NO: 4093117 - DNA, 25 bp, Homo sapien
tgaggttctcttcaggccttgcccc

SEQ ID NO: 4093118 - DNA, 25 bp, Homo sapien
ccttgcccaggctcggtgcatgcgt

SEQ ID NO: 4093119 - DNA, 25 bp, Homo sapien
ccaggcacggcctgagttgggacga

SEQ ID NO: 4093120 - DNA, 25 bp, Homo sapien
ttgggacgagagcagccttgcccag

SEQ ID NO: 4093121 - DNA, 25 bp, Homo sapien
ctccggcccagtgctgcgggacgtg

SEQ ID NO: 4093122 - DNA, 25 bp, Homo sapien
tggggatagaatggacagagttggg

SEQ ID NO: 4093123 - DNA, 25 bp, Homo sapien
ggaatggggcagaacttgcggcttc

SEQ ID NO: 4093124 - DNA, 25 bp, Homo sapien
atggggcagaacttgcggcttcctg

SEQ ID NO: 4093125 - DNA, 25 bp, Homo sapien
atggacagagttggggtctgtgtcc

SEQ ID NO: 4093126 - DNA, 25 bp, Homo sapien
ccagctcttgtgacagaatcacccc

SEQ ID NO: 4093127 - DNA, 25 bp, Homo sapien
ggtcttaggagcatcaccccaggtc

SEQ ID NO: 4093128 - DNA, 25 bp, Homo sapien
tcaaacctgcgtggggtcttaggag

SEQ ID NO: 4093129 - DNA, 25 bp, Homo sapien
tccccatggaagctagaccaggctt

SEQ ID NO: 4093130 - DNA, 25 bp, Homo sapien
gtagaggatgccgacattgcccgca

SEQ ID NO: 4093131 - DNA, 25 bp, Homo sapien
tgcaggccagaggtcctagaggccc

SEQ ID NO: 4093132 - DNA, 25 bp, Homo sapien
gaaactcgcagcacagatcctgaac

SEQ ID NO: 4093133 - DNA, 25 bp, Homo sapien
cagcctggcctagcctcgaggaggt

SEQ ID NO: 4093134 - DNA, 25 bp, Homo sapien
tcagggttcccaatgagaagccaca

SEQ ID NO: 4093135 - DNA, 25 bp, Homo sapien
aacgccccgtgcctccgcctggcag

SEQ ID NO: 4093136 - DNA, 25 bp, Homo sapien
tccagaaccaaacgccccgtgcctc

SEQ ID NO: 4093137 - DNA, 25 bp, Homo sapien
gttcccaatgagaagccacagggcc

SEQ ID NO: 4093138 - DNA, 25 bp, Homo sapien
aagcctcgggtgatccgtgctggcc

SEQ ID NO: 4093139 - DNA, 25 bp, Homo sapien
cttctgcaaagcctcgggtgatccg

SEQ ID NO: 4093140 - DNA, 25 bp, Homo sapien
cggggaggcgttgactcagaagtcc

SEQ ID NO: 4093141 - DNA, 25 bp, Homo sapien
gcaaagcctcgggtgatccgtgctg

SEQ ID NO: 4093142 - DNA, 25 bp, Homo sapien
gatgccttcctcagcaggcagagca

SEQ ID NO: 4093143 - DNA, 25 bp, Homo sapien
ccaactcagcctgagggatgccttc

SEQ ID NO: 4093144 - DNA, 25 bp, Homo sapien
cagccccctcagcaccggcttctgc

SEQ ID NO: 4093145 - DNA, 25 bp, Homo sapien
gccccctcagcaccggcttctgcat

SEQ ID NO: 4093146 - DNA, 25 bp, Homo sapien
gcccctgtttggacaggatatttgt

SEQ ID NO: 4093147 - DNA, 25 bp, Homo sapien
gccaggcccctgtttggacaggata

SEQ ID NO: 4093148 - DNA, 25 bp, Homo sapien
gccctgatgttcccgccagccttgg

SEQ ID NO: 4093149 - DNA, 25 bp, Homo sapien
cctgtttggacaggatatttgtggg

SEQ ID NO: 4093150 - DNA, 25 bp, Homo sapien
cgcagcaagtctcgatcaggtcctt

SEQ ID NO: 4093151 - DNA, 25 bp, Homo sapien
caggcactcgtcattgtcaatggcc

SEQ ID NO: 4093152 - DNA, 25 bp, Homo sapien
tgcagacgttgtcctcagtgccact

SEQ ID NO: 4093153 - DNA, 25 bp, Homo sapien
aatggcccactgctgtccggctgcg

SEQ ID NO: 4093154 - DNA, 25 bp, Homo sapien
ctccttggctcccaggacgccggcc

SEQ ID NO: 4093155 - DNA, 25 bp, Homo sapien
agacacagcagtgcctctgggctgt

SEQ ID NO: 4093156 - DNA, 25 bp, Homo sapien
agctcttctcctgcaagtaggagac

SEQ ID NO: 4093157 - DNA, 25 bp, Homo sapien
tcttctcctgcaagtaggagacaca

SEQ ID NO: 4093158 - DNA, 25 bp, Homo sapien
gagatgccgcagctgtcgttgtcct

SEQ ID NO: 4093159 - DNA, 25 bp, Homo sapien
gatgccgcagctgtcgttgtcctca

SEQ ID NO: 4093160 - DNA, 25 bp, Homo sapien
agggagatgccgcagctgtcgttgt

SEQ ID NO: 4093161 - DNA, 25 bp, Homo sapien
ggagatgccgcagctgtcgttgtcc

SEQ ID NO: 4093162 - DNA, 25 bp, Homo sapien
tgccttgaaggccacaggtcaggct

SEQ ID NO: 4093163 - DNA, 25 bp, Homo sapien
cctgccttgaaggccacaggtcagg

SEQ ID NO: 4093164 - DNA, 25 bp, Homo sapien
ccttgaaggccacaggtcaggcttg

SEQ ID NO: 4093165 - DNA, 25 bp, Homo sapien
cttgaaggccacaggtcaggcttgc

SEQ ID NO: 4093166 - DNA, 25 bp, Homo sapien
tcttcaccctcacagcaggagagca

SEQ ID NO: 4093167 - DNA, 25 bp, Homo sapien
tcaggtactatgagaggctcttcac

SEQ ID NO: 4093168 - DNA, 25 bp, Homo sapien
catgacatgattgcagggatagccc

SEQ ID NO: 4093169 - DNA, 25 bp, Homo sapien
ttaggattggactcacacgactggc

SEQ ID NO: 4093170 - DNA, 25 bp, Homo sapien
gactggacatggcagctggaacagt

SEQ ID NO: 4093171 - DNA, 25 bp, Homo sapien
ctaggggacagggactggacatggc

SEQ ID NO: 4093172 - DNA, 25 bp, Homo sapien
gggactggacatggcagctggaaca

SEQ ID NO: 4093173 - DNA, 25 bp, Homo sapien
gggacagggactggacatggcagct

SEQ ID NO: 4093174 - DNA, 25 bp, Homo sapien
tggtcatgggtccaggagacagccc

SEQ ID NO: 4093175 - DNA, 25 bp, Homo sapien
aatggtcatgggtccaggagacagc

SEQ ID NO: 4093176 - DNA, 25 bp, Homo sapien
ctaatggtcatgggtccaggagaca

SEQ ID NO: 4093177 - DNA, 25 bp, Homo sapien
gtcatgggtccaggagacagccctg

SEQ ID NO: 4093178 - DNA, 25 bp, Homo sapien
ttaattcccactccatgaagtgccc

SEQ ID NO: 4093179 - DNA, 25 bp, Homo sapien
gatgacggtccataggaacagcgaa

SEQ ID NO: 4093180 - DNA, 25 bp, Homo sapien
tggaacctacctggacatctggtcc

SEQ ID NO: 4093181 - DNA, 25 bp, Homo sapien
gaacagcgaaaaaactgggctggtg

SEQ ID NO: 4093182 - DNA, 25 bp, Homo sapien
tatgagctcttcctgtaggatctcc

SEQ ID NO: 4093183 - DNA, 25 bp, Homo sapien
cctgtaccacacaggatatgagctc

SEQ ID NO: 4093184 - DNA, 25 bp, Homo sapien
gcctcaccctgatgggagatccagg

SEQ ID NO: 4093185 - DNA, 25 bp, Homo sapien
atccaggtatctgttctcccacctg

SEQ ID NO: 4093186 - DNA, 25 bp, Homo sapien
ccatgatggctggcggtctggtccc

SEQ ID NO: 4093187 - DNA, 25 bp, Homo sapien
gggccatgatggctggcggtctggt

SEQ ID NO: 4093188 - DNA, 25 bp, Homo sapien
caggcagggccatgatggctggcgg

SEQ ID NO: 4093189 - DNA, 25 bp, Homo sapien
gcagggccatgatggctggcggtct

SEQ ID NO: 4093190 - DNA, 25 bp, Homo sapien
tcacgtatgaggaacgtgtttcata

SEQ ID NO: 4093191 - DNA, 25 bp, Homo sapien
atgaggaacgtgtttcatatggagg

SEQ ID NO: 4093192 - DNA, 25 bp, Homo sapien
tatgaggaacgtgtttcatatggag

SEQ ID NO: 4093193 - DNA, 25 bp, Homo sapien
cgtatgaggaacgtgtttcatatgg

SEQ ID NO: 4093194 - DNA, 25 bp, Homo sapien
gaaggcactcatcctggtcatcgcc

SEQ ID NO: 4093195 - DNA, 25 bp, Homo sapien
acccacagtattgatgcaaaggtgc

SEQ ID NO: 4093196 - DNA, 25 bp, Homo sapien
gcggccatcgtcctgcagtgagaag

SEQ ID NO: 4093197 - DNA, 25 bp, Homo sapien
ggcacagtggtaagaacccacagta

SEQ ID NO: 4093198 - DNA, 25 bp, Homo sapien
cagtggcagcgggatggtgttagag

SEQ ID NO: 4093199 - DNA, 25 bp, Homo sapien
tgcaggtattgggctgcggcagtgg

SEQ ID NO: 4093200 - DNA, 25 bp, Homo sapien
gaggccacctgggaaaattctgact

SEQ ID NO: 4093201 - DNA, 25 bp, Homo sapien
tgttagaggccacctgggaaaattc

SEQ ID NO: 4093202 - DNA, 25 bp, Homo sapien
catccgccatgatggcatagccggg

SEQ ID NO: 4093203 - DNA, 25 bp, Homo sapien
caggacacgccatccgccatgatgg

SEQ ID NO: 4093204 - DNA, 25 bp, Homo sapien
ggcatagccgggaaaacaggagcat

SEQ ID NO: 4093205 - DNA, 25 bp, Homo sapien
caacagtgctgcacacctgcttgca

SEQ ID NO: 4093206 - DNA, 25 bp, Homo sapien
tggcagccgcaggaggaaaaacaga

SEQ ID NO: 4093207 - DNA, 25 bp, Homo sapien
cagccgcaggaggaaaaacagaagg

SEQ ID NO: 4093208 - DNA, 25 bp, Homo sapien
agccgcaggaggaaaaacagaagga

SEQ ID NO: 4093209 - DNA, 25 bp, Homo sapien
ctagtggcagccgcaggaggaaaaa

SEQ ID NO: 4093210 - DNA, 25 bp, Homo sapien
acagtagaaggatcccagggtgttc

SEQ ID NO: 4093211 - DNA, 25 bp, Homo sapien
tatagccatcggcacagagcactgt

SEQ ID NO: 4093212 - DNA, 25 bp, Homo sapien
aactgtcgccggctacaatcgtgag

SEQ ID NO: 4093213 - DNA, 25 bp, Homo sapien
tgagcacccatcaggcactcgtctt

SEQ ID NO: 4093214 - DNA, 25 bp, Homo sapien
tgctcgccccggctgcacgtgtgca

SEQ ID NO: 4093215 - DNA, 25 bp, Homo sapien
gtgttcacacagtgctcgccccggc

SEQ ID NO: 4093216 - DNA, 25 bp, Homo sapien
agtgccttgtagcagtggaaggagc

SEQ ID NO: 4093217 - DNA, 25 bp, Homo sapien
aggtgagtgccttgtagcagtggaa

SEQ ID NO: 4093218 - DNA, 25 bp, Homo sapien
tcgccatccttgagggcatagcctg

SEQ ID NO: 4093219 - DNA, 25 bp, Homo sapien
ctcgccatccttgagggcatagcct

SEQ ID NO: 4093220 - DNA, 25 bp, Homo sapien
aggaagccatccatgcagcgctgcc

SEQ ID NO: 4093221 - DNA, 25 bp, Homo sapien
tagaaggagcccttggtgttctggc

SEQ ID NO: 4093222 - DNA, 25 bp, Homo sapien
gtgttctggcacaagaagcccggct

SEQ ID NO: 4093223 - DNA, 25 bp, Homo sapien
gctgcctggcctggcagtagaagga

SEQ ID NO: 4093224 - DNA, 25 bp, Homo sapien
ggcaggtgtaggtgacagggagccc

SEQ ID NO: 4093225 - DNA, 25 bp, Homo sapien
gcagaggcaggtgtaggtgacaggg

SEQ ID NO: 4093226 - DNA, 25 bp, Homo sapien
ctgcagaggcaggtgtaggtgacag

SEQ ID NO: 4093227 - DNA, 25 bp, Homo sapien
gaggcaggtgtaggtgacagggagc

SEQ ID NO: 4093228 - DNA, 25 bp, Homo sapien
atcatcgctggcgtggtagccgcgc

SEQ ID NO: 4093229 - DNA, 25 bp, Homo sapien
agcccaccgtgttgatgcagctgaa

SEQ ID NO: 4093230 - DNA, 25 bp, Homo sapien
gcagatcagcgggttcctctggcat

SEQ ID NO: 4093231 - DNA, 25 bp, Homo sapien
tctggcatgtgtaggagcccaccgt

SEQ ID NO: 4093232 - DNA, 25 bp, Homo sapien
ctggctggcagggcggaggcggctg

SEQ ID NO: 4093233 - DNA, 25 bp, Homo sapien
gctggctggcagggcggaggcggct

SEQ ID NO: 4093234 - DNA, 25 bp, Homo sapien
tggctggcagggcggaggcggctgg

SEQ ID NO: 4093235 - DNA, 25 bp, Homo sapien
ctcaccgcagcggtgcacacctgtc

SEQ ID NO: 4093236 - DNA, 25 bp, Homo sapien
gaaagccggctttgcagtcacagcg

SEQ ID NO: 4093237 - DNA, 25 bp, Homo sapien
ccggccaaaggcatcccgctgaaag

SEQ ID NO: 4093238 - DNA, 25 bp, Homo sapien
gaggttgtggcacacttggccctca

SEQ ID NO: 4093239 - DNA, 25 bp, Homo sapien
gctggcacaggcggcctggcgaggc

SEQ ID NO: 4093240 - DNA, 25 bp, Homo sapien
cgtccgctgctagcaggaacccgga

SEQ ID NO: 4093241 - DNA, 25 bp, Homo sapien
cggaggcgcaggaacagcggtagga

SEQ ID NO: 4093242 - DNA, 25 bp, Homo sapien
ctgctagcaggaacccggaggcgca

SEQ ID NO: 4093243 - DNA, 25 bp, Homo sapien
gcactggtaggagccatagatgttg

SEQ ID NO: 4093244 - DNA, 25 bp, Homo sapien
cctggcggcagtagcactggtagga

SEQ ID NO: 4093245 - DNA, 25 bp, Homo sapien
gcgccttgagcacactcgtcgatgt

SEQ ID NO: 4093246 - DNA, 25 bp, Homo sapien
tgctcagggcatgcacactggtagc

SEQ ID NO: 4093247 - DNA, 25 bp, Homo sapien
gcaggacctcccgttggccgtcatg

SEQ ID NO: 4093248 - DNA, 25 bp, Homo sapien
tccctggcacgttgagacagcggaa

SEQ ID NO: 4093249 - DNA, 25 bp, Homo sapien
caaaggactccttgtgcattgggac

SEQ ID NO: 4093250 - DNA, 25 bp, Homo sapien
cataagggctggaacctagggtcac

SEQ ID NO: 4093251 - DNA, 25 bp, Homo sapien
gcaggcctcccagtcagtgatttat

SEQ ID NO: 4093252 - DNA, 25 bp, Homo sapien
taagccagcttctgtgggccgagca

SEQ ID NO: 4093253 - DNA, 25 bp, Homo sapien
ggtgtttggtgtaggtcagaaaata

SEQ ID NO: 4093254 - DNA, 25 bp, Homo sapien
tgcagacaggtttgcatcctgaaac

SEQ ID NO: 4093255 - DNA, 25 bp, Homo sapien
ttggtgtcacatgtgaaatcacaat

SEQ ID NO: 4093256 - DNA, 25 bp, Homo sapien
gagagtctgtcctcaatgcagacag

SEQ ID NO: 4093257 - DNA, 25 bp, Homo sapien
gaggcggtcagtcgcaggtcttccc

SEQ ID NO: 4093258 - DNA, 25 bp, Homo sapien
gcgggaggcggtcagtcgcaggtct

SEQ ID NO: 4093259 - DNA, 25 bp, Homo sapien
agggcctcgcccatcggcgctgcca

SEQ ID NO: 4093260 - DNA, 25 bp, Homo sapien
ggtcagtcgcaggtcttccctaacg

SEQ ID NO: 4093261 - DNA, 25 bp, Homo sapien
tagttgggaggacactcgaagcgca

SEQ ID NO: 4093262 - DNA, 25 bp, Homo sapien
caggtctcagcctcggaacagttgt

SEQ ID NO: 4093263 - DNA, 25 bp, Homo sapien
cggaagctaccctggatgttgtggc

SEQ ID NO: 4093264 - DNA, 25 bp, Homo sapien
tcgaagcgcaggcagcggaagctac

SEQ ID NO: 4093265 - DNA, 25 bp, Homo sapien
gctggcgagttctggcactccagga

SEQ ID NO: 4093266 - DNA, 25 bp, Homo sapien
taggcattgagcctgcgcgtgccaa

SEQ ID NO: 4093267 - DNA, 25 bp, Homo sapien
gcaggtagaccacacccgtgtaggc

SEQ ID NO: 4093268 - DNA, 25 bp, Homo sapien
tgcggaagatatgcgcaggcaccag

SEQ ID NO: 4093269 - DNA, 25 bp, Homo sapien
tgggctgcgccacacccgcaggtgg

SEQ ID NO: 4093270 - DNA, 25 bp, Homo sapien
ccacgcagtgtgagccctgggctgc

SEQ ID NO: 4093271 - DNA, 25 bp, Homo sapien
taaaaaccacaatagtgacccagtc

SEQ ID NO: 4093272 - DNA, 25 bp, Homo sapien
ccctcccacgcagtgtgagccctgg

SEQ ID NO: 4093273 - DNA, 25 bp, Homo sapien
ggcacccgccacggccgtggcccac

SEQ ID NO: 4093274 - DNA, 25 bp, Homo sapien
gggcacccgccacggccgtggccca

SEQ ID NO: 4093275 - DNA, 25 bp, Homo sapien
cagggcacccgccacggccgtggcc

SEQ ID NO: 4093276 - DNA, 25 bp, Homo sapien
ccacagggcacccgccacggccgtg

SEQ ID NO: 4093277 - DNA, 25 bp, Homo sapien
taatcacagtggaacatgaaatgga

SEQ ID NO: 4093278 - DNA, 25 bp, Homo sapien
tataaccctttcatactagttgaac

SEQ ID NO: 4093279 - DNA, 25 bp, Homo sapien
gaccaagaggcgttttcctctgtta

SEQ ID NO: 4093280 - DNA, 25 bp, Homo sapien
acgggtcatccagaggagtccaaga

SEQ ID NO: 4093281 - DNA, 25 bp, Homo sapien
cggcaagaggctcccaaacacctgt

SEQ ID NO: 4093282 - DNA, 25 bp, Homo sapien
ggcttccggcaagaggctcccaaac

SEQ ID NO: 4093283 - DNA, 25 bp, Homo sapien
ccccaccgcaggcttccggcaagag

SEQ ID NO: 4093284 - DNA, 25 bp, Homo sapien
ggggatgggggccggcgaggagcag

SEQ ID NO: 4093285 - DNA, 25 bp, Homo sapien
tgtgcaccacaaaggtgccggatct

SEQ ID NO: 4093286 - DNA, 25 bp, Homo sapien
tcacctactggttcccgctggtggg

SEQ ID NO: 4093287 - DNA, 25 bp, Homo sapien
tgcctgtcctgttgaatggagcctg

SEQ ID NO: 4093288 - DNA, 25 bp, Homo sapien
caccacaaaggtgccggatctagtt

SEQ ID NO: 4093289 - DNA, 25 bp, Homo sapien
cctgttcacaggggagaccagtgag

SEQ ID NO: 4093290 - DNA, 25 bp, Homo sapien
ggtaggagcaggaacggctgctgcc

SEQ ID NO: 4093291 - DNA, 25 bp, Homo sapien
gtaggagcaggaacggctgctgcca

SEQ ID NO: 4093292 - DNA, 25 bp, Homo sapien
accagtgaggggaggcgaagtcact

SEQ ID NO: 4093293 - DNA, 25 bp, Homo sapien
agtttgccaaacttgccggcatgga

SEQ ID NO: 4093294 - DNA, 25 bp, Homo sapien
ccaagaccctccgtatggatgcgct

SEQ ID NO: 4093295 - DNA, 25 bp, Homo sapien
tggatgcgctgggtgccaagttcat

SEQ ID NO: 4093296 - DNA, 25 bp, Homo sapien
tgtagcccattgctcagacgtgagg

SEQ ID NO: 4093297 - DNA, 25 bp, Homo sapien
tcaggatgtagcaacgatggagaat

SEQ ID NO: 4093298 - DNA, 25 bp, Homo sapien
ggaagagctaggtggagccaacccc

SEQ ID NO: 4093299 - DNA, 25 bp, Homo sapien
gagaatgacacctgcggaagagcta

SEQ ID NO: 4093300 - DNA, 25 bp, Homo sapien
ggctaacgcctgcacacggtggttc

SEQ ID NO: 4093301 - DNA, 25 bp, Homo sapien
tacagtactaccttaagagcggcgt

SEQ ID NO: 4093302 - DNA, 25 bp, Homo sapien
aacttgacaaggtcgaatggcagcc

SEQ ID NO: 4093303 - DNA, 25 bp, Homo sapien
tagataaactgctatgactgagtgg

SEQ ID NO: 4093304 - DNA, 25 bp, Homo sapien
tgcctgaaagggtgacgccaaggcc

SEQ ID NO: 4093305 - DNA, 25 bp, Homo sapien
cgcacatgcgggagggtggagatca

SEQ ID NO: 4093306 - DNA, 25 bp, Homo sapien
gccctgaccgtgtgggactaacaca

SEQ ID NO: 4093307 - DNA, 25 bp, Homo sapien
gggacctgtgttccattccacacac

SEQ ID NO: 4093308 - DNA, 25 bp, Homo sapien
tggagatcatgaacatgggtgtgaa

SEQ ID NO: 4093309 - DNA, 25 bp, Homo sapien
ccaggcactccccacatgccctctg

SEQ ID NO: 4093310 - DNA, 25 bp, Homo sapien
gccccaggcactccccacatgccct

SEQ ID NO: 4093311 - DNA, 25 bp, Homo sapien
ggcactccccacatgccctctgcat

SEQ ID NO: 4093312 - DNA, 25 bp, Homo sapien
gggccccaggcactccccacatgcc

SEQ ID NO: 4093313 - DNA, 25 bp, Homo sapien
cgcaccacagtacccattttctaaa

SEQ ID NO: 4093314 - DNA, 25 bp, Homo sapien
aggtgttaggatggaggccggcggg

SEQ ID NO: 4093315 - DNA, 25 bp, Homo sapien
taaaaaatacatgcccaccgcacca

SEQ ID NO: 4093316 - DNA, 25 bp, Homo sapien
tcaccccctagctctccaaaactaa

SEQ ID NO: 4093317 - DNA, 25 bp, Homo sapien
cacaatcagggagccgagtggcatc

SEQ ID NO: 4093318 - DNA, 25 bp, Homo sapien
tacacaatcagggagccgagtggca

SEQ ID NO: 4093319 - DNA, 25 bp, Homo sapien
tcagggagccgagtggcatccgtaa

SEQ ID NO: 4093320 - DNA, 25 bp, Homo sapien
agccgagtggcatccgtaacaccag

SEQ ID NO: 4093321 - DNA, 25 bp, Homo sapien
cctcggaggactccgtagcaggcac

SEQ ID NO: 4093322 - DNA, 25 bp, Homo sapien
gcgccaacaggaaggaacacttaac

SEQ ID NO: 4093323 - DNA, 25 bp, Homo sapien
gcaggcaccagcaacagacaagatg

SEQ ID NO: 4093324 - DNA, 25 bp, Homo sapien
ctggacacgtgatcccagggaaagt

SEQ ID NO: 4093325 - DNA, 25 bp, Homo sapien
tgctgtgcgacgcggtcctcggacc

SEQ ID NO: 4093326 - DNA, 25 bp, Homo sapien
aaagctgctgtgcgacgcggtcctc

SEQ ID NO: 4093327 - DNA, 25 bp, Homo sapien
ctgtgcgacgcggtcctcggacctg

SEQ ID NO: 4093328 - DNA, 25 bp, Homo sapien
tccaggtcctgaaagctgctgtgcg

SEQ ID NO: 4093329 - DNA, 25 bp, Homo sapien
gggcccttgttgaggaggcgccctc

SEQ ID NO: 4093330 - DNA, 25 bp, Homo sapien
gcccttgttgaggaggcgccctctc

SEQ ID NO: 4093331 - DNA, 25 bp, Homo sapien
ccttgttgaggaggcgccctctcaa

SEQ ID NO: 4093332 - DNA, 25 bp, Homo sapien
cagcccacgtttggggcccttgttg

SEQ ID NO: 4093333 - DNA, 25 bp, Homo sapien
ctttcgaggatggcccgacagctgt

SEQ ID NO: 4093334 - DNA, 25 bp, Homo sapien
tcgaggatggcccgacagctgttgt

SEQ ID NO: 4093335 - DNA, 25 bp, Homo sapien
aggatggcccgacagctgttgtcat

SEQ ID NO: 4093336 - DNA, 25 bp, Homo sapien
gaggatggcccgacagctgttgtca

SEQ ID NO: 4093337 - DNA, 25 bp, Homo sapien
cccacttgctgctcagggcatggaa

SEQ ID NO: 4093338 - DNA, 25 bp, Homo sapien
ctcaggggacaaccaggggcaccga

SEQ ID NO: 4093339 - DNA, 25 bp, Homo sapien
acttgctgctcagggcatggaagcc

SEQ ID NO: 4093340 - DNA, 25 bp, Homo sapien
gatggctcaggggacaaccaggggc

SEQ ID NO: 4093341 - DNA, 25 bp, Homo sapien
ctgccccctctccaactactgttca

SEQ ID NO: 4093342 - DNA, 25 bp, Homo sapien
tgccccctctccaactactgttcac

SEQ ID NO: 4093343 - DNA, 25 bp, Homo sapien
gccctcgtcccagccgtgttctctg

SEQ ID NO: 4093344 - DNA, 25 bp, Homo sapien
gccttccggagccacgcagctctgg

SEQ ID NO: 4093345 - DNA, 25 bp, Homo sapien
tcgctggggttgacgcagccttccg

SEQ ID NO: 4093346 - DNA, 25 bp, Homo sapien
tctgctgcctccgtgtggtcgctgg

SEQ ID NO: 4093347 - DNA, 25 bp, Homo sapien
tgcctggactcagctacccaccctg

SEQ ID NO: 4093348 - DNA, 25 bp, Homo sapien
agcggacgggacagccacagggctt

SEQ ID NO: 4093349 - DNA, 25 bp, Homo sapien
gctgagacagcggacgggacagcca

SEQ ID NO: 4093350 - DNA, 25 bp, Homo sapien
gactcagctacccaccctgagccat

SEQ ID NO: 4093351 - DNA, 25 bp, Homo sapien
agagggccctcatggacggaagggc

SEQ ID NO: 4093352 - DNA, 25 bp, Homo sapien
agggccctcatggacggaagggcgc

SEQ ID NO: 4093353 - DNA, 25 bp, Homo sapien
gagagggccctcatggacggaaggg

SEQ ID NO: 4093354 - DNA, 25 bp, Homo sapien
agagagggccctcatggacggaagg

SEQ ID NO: 4093355 - DNA, 25 bp, Homo sapien
cggagtcaccgtccccgtccttcat

SEQ ID NO: 4093356 - DNA, 25 bp, Homo sapien
gtctggcaatcacgtcatcggcggg

SEQ ID NO: 4093357 - DNA, 25 bp, Homo sapien
tggcaatcacgtcatcggcggggac

SEQ ID NO: 4093358 - DNA, 25 bp, Homo sapien
caatcacgtcatcggcggggacgcc

SEQ ID NO: 4093359 - DNA, 25 bp, Homo sapien
agccaggagccagatatggagacat

SEQ ID NO: 4093360 - DNA, 25 bp, Homo sapien
gccaggagccagatatggagacatt

SEQ ID NO: 4093361 - DNA, 25 bp, Homo sapien
gagccagatatggagacatttctcc

SEQ ID NO: 4093362 - DNA, 25 bp, Homo sapien
caggagccagatatggagacatttc

SEQ ID NO: 4093363 - DNA, 25 bp, Homo sapien
ctccgatatggagctctgggttctg

SEQ ID NO: 4093364 - DNA, 25 bp, Homo sapien
gcagtggtgggaagacgccttcacc

SEQ ID NO: 4093365 - DNA, 25 bp, Homo sapien
gggaagacgccttcaccactgagct

SEQ ID NO: 4093366 - DNA, 25 bp, Homo sapien
ccactgagctcatttctgactgtgc

SEQ ID NO: 4093367 - DNA, 25 bp, Homo sapien
ccggtgcctttctgctgtagtctgg

SEQ ID NO: 4093368 - DNA, 25 bp, Homo sapien
catgaaggcccggtgcctttctgct

SEQ ID NO: 4093369 - DNA, 25 bp, Homo sapien
aaggcccggtgcctttctgctgtag

SEQ ID NO: 4093370 - DNA, 25 bp, Homo sapien
gcccggtgcctttctgctgtagtct

SEQ ID NO: 4093371 - DNA, 25 bp, Homo sapien
tcagcagcagtcagccatgacgcct

SEQ ID NO: 4093372 - DNA, 25 bp, Homo sapien
cgtggtgctcacaaaagtcgaagat

SEQ ID NO: 4093373 - DNA, 25 bp, Homo sapien
gggagaatgcaccataacatacata

SEQ ID NO: 4093374 - DNA, 25 bp, Homo sapien
gctctgcttagagaacattctggct

SEQ ID NO: 4093375 - DNA, 25 bp, Homo sapien
ataggacaaccacgtctcactcacg

SEQ ID NO: 4093376 - DNA, 25 bp, Homo sapien
gcctctccgggccttcacacactgt

SEQ ID NO: 4093377 - DNA, 25 bp, Homo sapien
tcaggagcccatgtcttgctggagc

SEQ ID NO: 4093378 - DNA, 25 bp, Homo sapien
ttccctggccatgaagcaagtgact

SEQ ID NO: 4093379 - DNA, 25 bp, Homo sapien
ggccttcacacactgtcactttcag

SEQ ID NO: 4093380 - DNA, 25 bp, Homo sapien
tgtgcatctccgtctttgacatgtg

SEQ ID NO: 4093381 - DNA, 25 bp, Homo sapien
gtggcctaggggctcagctccacaa

SEQ ID NO: 4093382 - DNA, 25 bp, Homo sapien
ttcagggatctaggttcctcccatt

SEQ ID NO: 4093383 - DNA, 25 bp, Homo sapien
cccattttgtgcatctccgtctttg

SEQ ID NO: 4093384 - DNA, 25 bp, Homo sapien
tctgcggaagacacacctctttcct

SEQ ID NO: 4093385 - DNA, 25 bp, Homo sapien
tttctgcggaagacacacctctttc

SEQ ID NO: 4093386 - DNA, 25 bp, Homo sapien
ttctgcggaagacacacctctttcc

SEQ ID NO: 4093387 - DNA, 25 bp, Homo sapien
ccaagagggagttcccattatcatc

SEQ ID NO: 4093388 - DNA, 25 bp, Homo sapien
caggctaaataccttgctcggaggc

SEQ ID NO: 4093389 - DNA, 25 bp, Homo sapien
ctaaataccttgctcggaggccaca

SEQ ID NO: 4093390 - DNA, 25 bp, Homo sapien
agcacatagaggcaggctaaatacc

SEQ ID NO: 4093391 - DNA, 25 bp, Homo sapien
ctccagaaaactccagcagacttgc

SEQ ID NO: 4093392 - DNA, 25 bp, Homo sapien
agaaaactccagcagacttgcagca

SEQ ID NO: 4093393 - DNA, 25 bp, Homo sapien
cttatacagaagagctccagctggc

SEQ ID NO: 4093394 - DNA, 25 bp, Homo sapien
catctggtgggtgcctccctgggac

SEQ ID NO: 4093395 - DNA, 25 bp, Homo sapien
tgggttgcacacatccttgaggcct

SEQ ID NO: 4093396 - DNA, 25 bp, Homo sapien
ttgcagatgcttgcacgacacgctg

SEQ ID NO: 4093397 - DNA, 25 bp, Homo sapien
tcagctccttccacgagttttggga

SEQ ID NO: 4093398 - DNA, 25 bp, Homo sapien
aggatgtgacaccaccggcagttcc

SEQ ID NO: 4093399 - DNA, 25 bp, Homo sapien
cagccacaagacaacagaatgccag

SEQ ID NO: 4093400 - DNA, 25 bp, Homo sapien
atcttcagagggctcatcaggtaaa

SEQ ID NO: 4093401 - DNA, 25 bp, Homo sapien
acagccacaagacaacagaatgcca

SEQ ID NO: 4093402 - DNA, 25 bp, Homo sapien
ctcatcaggtaaacacacagccaca

SEQ ID NO: 4093403 - DNA, 25 bp, Homo sapien
ccctcttcaccatcagggccctgct

SEQ ID NO: 4093404 - DNA, 25 bp, Homo sapien
ctgctcagttcctcatcctccagga

SEQ ID NO: 4093405 - DNA, 25 bp, Homo sapien
ctaagccctcttcaccatcagggcc

SEQ ID NO: 4093406 - DNA, 25 bp, Homo sapien
ctcttcaccatcagggccctgctca

SEQ ID NO: 4093407 - DNA, 25 bp, Homo sapien
agactgaccctaacccgggaagctg

SEQ ID NO: 4093408 - DNA, 25 bp, Homo sapien
gggagattgggattggacgccagag

SEQ ID NO: 4093409 - DNA, 25 bp, Homo sapien
cactgctcagactgaccctaacccg

SEQ ID NO: 4093410 - DNA, 25 bp, Homo sapien
gagattgggattggacgccagagca

SEQ ID NO: 4093411 - DNA, 25 bp, Homo sapien
caccatgcccgccatgaccacagag

SEQ ID NO: 4093412 - DNA, 25 bp, Homo sapien
tacccagggtcccttgttctcctca

SEQ ID NO: 4093413 - DNA, 25 bp, Homo sapien
cccattctgagtaccctgggagcag

SEQ ID NO: 4093414 - DNA, 25 bp, Homo sapien
gtggccccattctgagtaccctggg

SEQ ID NO: 4093415 - DNA, 25 bp, Homo sapien
gtaggacattccttcagccccacaa

SEQ ID NO: 4093416 - DNA, 25 bp, Homo sapien
cagtgctgtgtagaatactgtggac

SEQ ID NO: 4093417 - DNA, 25 bp, Homo sapien
caatgggttgagcattctgtagacc

SEQ ID NO: 4093418 - DNA, 25 bp, Homo sapien
agcacatgccacatcctgtaggaca

SEQ ID NO: 4093419 - DNA, 25 bp, Homo sapien
ctgagagcactgattggcatcaaca

SEQ ID NO: 4093420 - DNA, 25 bp, Homo sapien
tgattggcatcaacagtgggatagc

SEQ ID NO: 4093421 - DNA, 25 bp, Homo sapien
gcactgattggcatcaacagtggga

SEQ ID NO: 4093422 - DNA, 25 bp, Homo sapien
tggcatcaacagtgggatagcttct

SEQ ID NO: 4093423 - DNA, 25 bp, Homo sapien
gcccaaggtccgcttcagctcttct

SEQ ID NO: 4093424 - DNA, 25 bp, Homo sapien
ctagggcccaaggtccgcttcagct

SEQ ID NO: 4093425 - DNA, 25 bp, Homo sapien
gggcccaaggtccgcttcagctctt

SEQ ID NO: 4093426 - DNA, 25 bp, Homo sapien
agggcccaaggtccgcttcagctct

SEQ ID NO: 4093427 - DNA, 25 bp, Homo sapien
gcctgcagctccagttacacggcca

SEQ ID NO: 4093428 - DNA, 25 bp, Homo sapien
tggccaccgggggactcagttccag

SEQ ID NO: 4093429 - DNA, 25 bp, Homo sapien
gggactcagttccagtgcctgcagc

SEQ ID NO: 4093430 - DNA, 25 bp, Homo sapien
caggcaaggggggtgcgccagccct

SEQ ID NO: 4093431 - DNA, 25 bp, Homo sapien
gacagagctgttgttctgggtgttt

SEQ ID NO: 4093432 - DNA, 25 bp, Homo sapien
gtgtttctccaggtttggaagcatc

SEQ ID NO: 4093433 - DNA, 25 bp, Homo sapien
agagtcaatcctgggagcagaggcc

SEQ ID NO: 4093434 - DNA, 25 bp, Homo sapien
tcaactgcgatgagtccaagagtca

SEQ ID NO: 4093435 - DNA, 25 bp, Homo sapien
agtgtagcccccatacgggagccca

SEQ ID NO: 4093436 - DNA, 25 bp, Homo sapien
cattaggtcgtgcacgttctgtggg

SEQ ID NO: 4093437 - DNA, 25 bp, Homo sapien
caatctggtcattaggtcgtgcacg

SEQ ID NO: 4093438 - DNA, 25 bp, Homo sapien
cgtgcacgttctgtgggtttttgga

SEQ ID NO: 4093439 - DNA, 25 bp, Homo sapien
gcctccatctctgcaggagctgccc

SEQ ID NO: 4093440 - DNA, 25 bp, Homo sapien
agcctccatctctgcaggagctgcc

SEQ ID NO: 4093441 - DNA, 25 bp, Homo sapien
gggcggtgatggctgatttccccct

SEQ ID NO: 4093442 - DNA, 25 bp, Homo sapien
gcttccatgattagacacaccccat

SEQ ID NO: 4093443 - DNA, 25 bp, Homo sapien
cggtgatggctgatttccccctgaa

SEQ ID NO: 4093444 - DNA, 25 bp, Homo sapien
catgattagacacaccccatctgag

SEQ ID NO: 4093445 - DNA, 25 bp, Homo sapien
ctgaccaagtagcattggttgggtc

SEQ ID NO: 4093446 - DNA, 25 bp, Homo sapien
tgaccaagtagcattggttgggtca

SEQ ID NO: 4093447 - DNA, 25 bp, Homo sapien
agtgtagatcatcccgcacttcttt

SEQ ID NO: 4093448 - DNA, 25 bp, Homo sapien
tttcttcaagagcatgcagtgctcc

SEQ ID NO: 4093449 - DNA, 25 bp, Homo sapien
cccactctgggcaatttcttcaaga

SEQ ID NO: 4093450 - DNA, 25 bp, Homo sapien
tgtcccacatgagtcaaagtgtaga

SEQ ID NO: 4093451 - DNA, 25 bp, Homo sapien
catgttagccgggaaagaaatcaaa

SEQ ID NO: 4093452 - DNA, 25 bp, Homo sapien
ccactgagtggtagcttcgaaatga

SEQ ID NO: 4093453 - DNA, 25 bp, Homo sapien
ttaagctcaggcctttcaagcaggg

SEQ ID NO: 4093454 - DNA, 25 bp, Homo sapien
acttgaccgtcatcctgcagcagag

SEQ ID NO: 4093455 - DNA, 25 bp, Homo sapien
cccgtgtttcacttggttggtgcag

SEQ ID NO: 4093456 - DNA, 25 bp, Homo sapien
aggaagccagcggaacttggtgacc

SEQ ID NO: 4093457 - DNA, 25 bp, Homo sapien
gaagccagcggaacttggtgaccat

SEQ ID NO: 4093458 - DNA, 25 bp, Homo sapien
agaggatgatggacccgtgtttcac

SEQ ID NO: 4093459 - DNA, 25 bp, Homo sapien
ccttgtgccgctcagtctgctgaga

SEQ ID NO: 4093460 - DNA, 25 bp, Homo sapien
aggtgggcatggatcctgcccttgt

SEQ ID NO: 4093461 - DNA, 25 bp, Homo sapien
gcttgggcttgaggccggcattgag

SEQ ID NO: 4093462 - DNA, 25 bp, Homo sapien
agaggtttgggcatacacgtaggaa

SEQ ID NO: 4093463 - DNA, 25 bp, Homo sapien
catttgcccgactggaaaacctcta

SEQ ID NO: 4093464 - DNA, 25 bp, Homo sapien
caggaacagaatatctcagaggtgt

SEQ ID NO: 4093465 - DNA, 25 bp, Homo sapien
ctggacgccaacacaggtcgggaga

SEQ ID NO: 4093466 - DNA, 25 bp, Homo sapien
tcagctgggaactgcagacgcatag

SEQ ID NO: 4093467 - DNA, 25 bp, Homo sapien
gtccactgttgctcctgcacatgca

SEQ ID NO: 4093468 - DNA, 25 bp, Homo sapien
caggcctacatggtgctgacagaac

SEQ ID NO: 4093469 - DNA, 25 bp, Homo sapien
caggtccactgttgctcctgcacat

SEQ ID NO: 4093470 - DNA, 25 bp, Homo sapien
aggagggtgaggacccgaagccgca

SEQ ID NO: 4093471 - DNA, 25 bp, Homo sapien
ggtccaggtcgccattgagattttt

SEQ ID NO: 4093472 - DNA, 25 bp, Homo sapien
tccaggtcgccattgagattttttg

SEQ ID NO: 4093473 - DNA, 25 bp, Homo sapien
agcggtccaggtcgccattgagatt

SEQ ID NO: 4093474 - DNA, 25 bp, Homo sapien
aggagcggtccaggtcgccattgag

SEQ ID NO: 4093475 - DNA, 25 bp, Homo sapien
tcaaaagacgcacaccggggacaat

SEQ ID NO: 4093476 - DNA, 25 bp, Homo sapien
caccggggacaattgccgcctttgt

SEQ ID NO: 4093477 - DNA, 25 bp, Homo sapien
ctcgggagggggattgggactcctg

SEQ ID NO: 4093478 - DNA, 25 bp, Homo sapien
gcacaccggggacaattgccgcctt

SEQ ID NO: 4093479 - DNA, 25 bp, Homo sapien
tcagttacaccacagtgagatcaag

SEQ ID NO: 4093480 - DNA, 25 bp, Homo sapien
tgtggaggaacagggtcgtaatgga

SEQ ID NO: 4093481 - DNA, 25 bp, Homo sapien
taggattgcccgatgggagggttaa

SEQ ID NO: 4093482 - DNA, 25 bp, Homo sapien
tgggcaaatgggtactgggacggga

SEQ ID NO: 4093483 - DNA, 25 bp, Homo sapien
cgtaatggaagccatggtgtttgta

SEQ ID NO: 4093484 - DNA, 25 bp, Homo sapien
aggggtcttgcaaagtcttccatca

SEQ ID NO: 4093485 - DNA, 25 bp, Homo sapien
agctcggttcgaaacgacccaggag

SEQ ID NO: 4093486 - DNA, 25 bp, Homo sapien
ccgacagctctagggcagctcggtt

SEQ ID NO: 4093487 - DNA, 25 bp, Homo sapien
ggaggggtcttgcaaagtcttccat

SEQ ID NO: 4093488 - DNA, 25 bp, Homo sapien
gtaaaacggcctggcttgctctctg

SEQ ID NO: 4093489 - DNA, 25 bp, Homo sapien
tgagcttctgagtaaaacggcctgg

SEQ ID NO: 4093490 - DNA, 25 bp, Homo sapien
tagatgatggtaccgaaacccttgg

SEQ ID NO: 4093491 - DNA, 25 bp, Homo sapien
cccttggggcagtaagtttcataat

SEQ ID NO: 4093492 - DNA, 25 bp, Homo sapien
gttccctaaagcatcccggcaacaa

SEQ ID NO: 4093493 - DNA, 25 bp, Homo sapien
caagttccctaaagcatcccggcaa

SEQ ID NO: 4093494 - DNA, 25 bp, Homo sapien
tggccaagttccctaaagcatcccg

SEQ ID NO: 4093495 - DNA, 25 bp, Homo sapien
cttggccaagttccctaaagcatcc

SEQ ID NO: 4093496 - DNA, 25 bp, Homo sapien
ctatttgtcttcgttacatttgctt

SEQ ID NO: 4093497 - DNA, 25 bp, Homo sapien
aagtccttgattaatcttgagtaga

SEQ ID NO: 4093498 - DNA, 25 bp, Homo sapien
catctatttgtcttcgttacatttg

SEQ ID NO: 4093499 - DNA, 25 bp, Homo sapien
agtccttgattaatcttgagtagat

SEQ ID NO: 4093500 - DNA, 25 bp, Homo sapien
aggataactggctattcatatgtag

SEQ ID NO: 4093501 - DNA, 25 bp, Homo sapien
actggacccctacctattacataga

SEQ ID NO: 4093502 - DNA, 25 bp, Homo sapien
aaactaccaatgttattcttgacag

SEQ ID NO: 4093503 - DNA, 25 bp, Homo sapien
gagcatcgtactagtatgaaaacag

SEQ ID NO: 4093504 - DNA, 25 bp, Homo sapien
tatggggaaaataagcacatagtga

SEQ ID NO: 4093505 - DNA, 25 bp, Homo sapien
gggaaaataagcacatagtgaatgt

SEQ ID NO: 4093506 - DNA, 25 bp, Homo sapien
tggggaaaataagcacatagtgaat

SEQ ID NO: 4093507 - DNA, 25 bp, Homo sapien
cttatggggaaaataagcacatagt

SEQ ID NO: 4093508 - DNA, 25 bp, Homo sapien
caatatgatatggattagagccaca

SEQ ID NO: 4093509 - DNA, 25 bp, Homo sapien
acgatcaggtcagcgggcttggtcc

SEQ ID NO: 4093510 - DNA, 25 bp, Homo sapien
gagccacatgacaaacgatcaggtc

SEQ ID NO: 4093511 - DNA, 25 bp, Homo sapien
tctgtagctatgaactctgtgggta

SEQ ID NO: 4093512 - DNA, 25 bp, Homo sapien
tgtaaggctatttgaggccagattt

SEQ ID NO: 4093513 - DNA, 25 bp, Homo sapien
gaacactgccaaacaggagcttctg

SEQ ID NO: 4093514 - DNA, 25 bp, Homo sapien
tgatggccgggaggatactcagcag

SEQ ID NO: 4093515 - DNA, 25 bp, Homo sapien
accatgtatccactggaggggggcc

SEQ ID NO: 4093516 - DNA, 25 bp, Homo sapien
cagaagaatggtctgcgtggccatt

SEQ ID NO: 4093517 - DNA, 25 bp, Homo sapien
gacggactggatcactgttccacac

SEQ ID NO: 4093518 - DNA, 25 bp, Homo sapien
gcatctggactcgatgacggactgg

SEQ ID NO: 4093519 - DNA, 25 bp, Homo sapien
tgatggtggcatagccattgtccac

SEQ ID NO: 4093520 - DNA, 25 bp, Homo sapien
tatattcggtggaagaactggaagt

SEQ ID NO: 4093521 - DNA, 25 bp, Homo sapien
gaattgatagatgatgtagacatgg

SEQ ID NO: 4093522 - DNA, 25 bp, Homo sapien
gtagaattgatagatgatgtagaca

SEQ ID NO: 4093523 - DNA, 25 bp, Homo sapien
gtgcagctggaggacatagtatatt

SEQ ID NO: 4093524 - DNA, 25 bp, Homo sapien
ccgggagctccaacttatggcgcgc

SEQ ID NO: 4093525 - DNA, 25 bp, Homo sapien
cagcacgggaaggtcggggaatcct

SEQ ID NO: 4093526 - DNA, 25 bp, Homo sapien
gggagctccaacttatggcgcgcgt

SEQ ID NO: 4093527 - DNA, 25 bp, Homo sapien
gctccaacttatggcgcgcgtgcct

SEQ ID NO: 4093528 - DNA, 25 bp, Homo sapien
gggaccgccgtgagagtgggatatg

SEQ ID NO: 4093529 - DNA, 25 bp, Homo sapien
cgggtccctgaggcggggcgatttg

SEQ ID NO: 4093530 - DNA, 25 bp, Homo sapien
tgaggcggggcgatttggacggtgg

SEQ ID NO: 4093531 - DNA, 25 bp, Homo sapien
ggggaccgccgtgagagtgggatat

SEQ ID NO: 4093532 - DNA, 25 bp, Homo sapien
ttcacgaatgacacgccaaaggttt

SEQ ID NO: 4093533 - DNA, 25 bp, Homo sapien
gagtactatgactgaatagctgcca

SEQ ID NO: 4093534 - DNA, 25 bp, Homo sapien
ttagaataactggagggtagagccg

SEQ ID NO: 4093535 - DNA, 25 bp, Homo sapien
ggacccgaccaagtcgcttttgcga

SEQ ID NO: 4093536 - DNA, 25 bp, Homo sapien
tgcaggggacgctgcagatagttcc

SEQ ID NO: 4093537 - DNA, 25 bp, Homo sapien
gctgcagatagttccgtccgtccat

SEQ ID NO: 4093538 - DNA, 25 bp, Homo sapien
cacttgcaggggacgctgcagatag

SEQ ID NO: 4093539 - DNA, 25 bp, Homo sapien
gggacgctgcagatagttccgtccg

SEQ ID NO: 4093540 - DNA, 25 bp, Homo sapien
cactggcgtcagtggactggtagtc

SEQ ID NO: 4093541 - DNA, 25 bp, Homo sapien
tctttggcttgggagcgacaggtgg

SEQ ID NO: 4093542 - DNA, 25 bp, Homo sapien
tcagtggactggtagtctttggctt

SEQ ID NO: 4093543 - DNA, 25 bp, Homo sapien
acatggagtttggactgtgaagact

SEQ ID NO: 4093544 - DNA, 25 bp, Homo sapien
ttgggggcaatgggggggcttcaga

SEQ ID NO: 4093545 - DNA, 25 bp, Homo sapien
tgggggcaatgggggggcttcagac

SEQ ID NO: 4093546 - DNA, 25 bp, Homo sapien
cttgggggcaatgggggggcttcag

SEQ ID NO: 4093547 - DNA, 25 bp, Homo sapien
tcattcaggtacacactggctctcc

SEQ ID NO: 4093548 - DNA, 25 bp, Homo sapien
agctgtcattcaggtacacactggc

SEQ ID NO: 4093549 - DNA, 25 bp, Homo sapien
cacactggctctccactcgtttggg

SEQ ID NO: 4093550 - DNA, 25 bp, Homo sapien
ggtacacactggctctccactcgtt

SEQ ID NO: 4093551 - DNA, 25 bp, Homo sapien
cctcaggagtgaggtctgtgccttc

SEQ ID NO: 4093552 - DNA, 25 bp, Homo sapien
ggcagcaatagccgccgagtcctta

SEQ ID NO: 4093553 - DNA, 25 bp, Homo sapien
tccctgctcagcaatactgcagctg

SEQ ID NO: 4093554 - DNA, 25 bp, Homo sapien
ttggtcctcaggagtgaggtctgtg

SEQ ID NO: 4093555 - DNA, 25 bp, Homo sapien
tgtgtggctgcaccagcttctcttc

SEQ ID NO: 4093556 - DNA, 25 bp, Homo sapien
cttgtggtcctctccatggatgtga

SEQ ID NO: 4093557 - DNA, 25 bp, Homo sapien
gaggaggtcgctctggaagaccacc

SEQ ID NO: 4093558 - DNA, 25 bp, Homo sapien
catgtgccccgctgggtctgtcctg

SEQ ID NO: 4093559 - DNA, 25 bp, Homo sapien
ctgtggcctcttcacatccctcctc

SEQ ID NO: 4093560 - DNA, 25 bp, Homo sapien
cctcctcaagaacctcagggctgtt

SEQ ID NO: 4093561 - DNA, 25 bp, Homo sapien
cctcaagaacctcagggctgttcat

SEQ ID NO: 4093562 - DNA, 25 bp, Homo sapien
ctatgacacctgtggcctcttcaca

SEQ ID NO: 4093563 - DNA, 25 bp, Homo sapien
tgttctggaaaaggacgatctggca

SEQ ID NO: 4093564 - DNA, 25 bp, Homo sapien
gattctaagcttttcactgactcag

SEQ ID NO: 4093565 - DNA, 25 bp, Homo sapien
tccatcttgcaagggtccatgctgg

SEQ ID NO: 4093566 - DNA, 25 bp, Homo sapien
ggtcaggtagttcaccaaggtcaac

SEQ ID NO: 4093567 - DNA, 25 bp, Homo sapien
tcccatcacataggggttggccagc

SEQ ID NO: 4093568 - DNA, 25 bp, Homo sapien
tggccagcatgtcatccacaatgac

SEQ ID NO: 4093569 - DNA, 25 bp, Homo sapien
gggttggccagcatgtcatccacaa

SEQ ID NO: 4093570 - DNA, 25 bp, Homo sapien
gttggccagcatgtcatccacaatg

SEQ ID NO: 4093571 - DNA, 25 bp, Homo sapien
tggccacgcgtgtcatccacgacct

SEQ ID NO: 4093572 - DNA, 25 bp, Homo sapien
cagtgtgtcatccacgaactcctcc

SEQ ID NO: 4093573 - DNA, 25 bp, Homo sapien
tcccatcacatagaggctggtcagc

SEQ ID NO: 4093574 - DNA, 25 bp, Homo sapien
tcccatcacatagaggctggccacg

SEQ ID NO: 4093575 - DNA, 25 bp, Homo sapien
agggtcatccaatgcagcctgccct

SEQ ID NO: 4093576 - DNA, 25 bp, Homo sapien
tctcaaggggctgccagaccggcag

SEQ ID NO: 4093577 - DNA, 25 bp, Homo sapien
cttctcaaggggctgccagaccggc

SEQ ID NO: 4093578 - DNA, 25 bp, Homo sapien
ttcttctgagccataaccacccagg

SEQ ID NO: 4093579 - DNA, 25 bp, Homo sapien
ccaggcccttgtgtcgatgttcttc

SEQ ID NO: 4093580 - DNA, 25 bp, Homo sapien
ggccaggcccttgtgtcgatgttct

SEQ ID NO: 4093581 - DNA, 25 bp, Homo sapien
ggggccaggcccttgtgtcgatgtt

SEQ ID NO: 4093582 - DNA, 25 bp, Homo sapien
gggccaggcccttgtgtcgatgttc

SEQ ID NO: 4093583 - DNA, 25 bp, Homo sapien
cagtttctgggacggtttctggcca

SEQ ID NO: 4093584 - DNA, 25 bp, Homo sapien
gcagtttctgggacggtttctggcc

SEQ ID NO: 4093585 - DNA, 25 bp, Homo sapien
ggcagtttctgggacggtttctggc

SEQ ID NO: 4093586 - DNA, 25 bp, Homo sapien
tggctcccagtacacagagatggaa

SEQ ID NO: 4093587 - DNA, 25 bp, Homo sapien
gagaaactcccagacacgacagaga

SEQ ID NO: 4093588 - DNA, 25 bp, Homo sapien
cgacagagagatgttcctctttcct

SEQ ID NO: 4093589 - DNA, 25 bp, Homo sapien
tgtggtcatctaaccccgacccttc

SEQ ID NO: 4093590 - DNA, 25 bp, Homo sapien
tcgaaaggaggtgggatgtcgacca

SEQ ID NO: 4093591 - DNA, 25 bp, Homo sapien
tgtcgaccatggaagaaggcgtgga

SEQ ID NO: 4093592 - DNA, 25 bp, Homo sapien
ttgtgatgggcttcttggtgatgca

SEQ ID NO: 4093593 - DNA, 25 bp, Homo sapien
gatgcaggccaggtcgaaaggaggt

SEQ ID NO: 4093594 - DNA, 25 bp, Homo sapien
tgcctggcctctccatcttgttaaa

SEQ ID NO: 4093595 - DNA, 25 bp, Homo sapien
gcctggcctctccatcttgttaaac

SEQ ID NO: 4093596 - DNA, 25 bp, Homo sapien
cgtgcctggcctctccatcttgtta

SEQ ID NO: 4093597 - DNA, 25 bp, Homo sapien
atcgtgcctggcctctccatcttgt

SEQ ID NO: 4093598 - DNA, 25 bp, Homo sapien
tcatggttggaatgttctcatagtc

SEQ ID NO: 4093599 - DNA, 25 bp, Homo sapien
gttctcatagtctgaatggtcagcg

SEQ ID NO: 4093600 - DNA, 25 bp, Homo sapien
gggcagaatctggatattctcatag

SEQ ID NO: 4093601 - DNA, 25 bp, Homo sapien
tctcatagtctgagttcatggttgg

SEQ ID NO: 4093602 - DNA, 25 bp, Homo sapien
tgctctgatcttcaaacagcttcct

SEQ ID NO: 4093603 - DNA, 25 bp, Homo sapien
tcttcaaacagcttcctgaacacac

SEQ ID NO: 4093604 - DNA, 25 bp, Homo sapien
tagccatcattttagtttgctgtgg

SEQ ID NO: 4093605 - DNA, 25 bp, Homo sapien
catgtccacatagccatcattttag

SEQ ID NO: 4093606 - DNA, 25 bp, Homo sapien
ctttctgcgtcctggtctgtgctct

SEQ ID NO: 4093607 - DNA, 25 bp, Homo sapien
ttgttcttaaaggtgttgaagctgc

SEQ ID NO: 4093608 - DNA, 25 bp, Homo sapien
ctggtctgtgctctgctgattgttc

SEQ ID NO: 4093609 - DNA, 25 bp, Homo sapien
tgctctgctgattgttcttaaaggt

SEQ ID NO: 4093610 - DNA, 25 bp, Homo sapien
tagcagcaacagctgtgtaggactg

SEQ ID NO: 4093611 - DNA, 25 bp, Homo sapien
gcagcaacagctgtgtaggactggt

SEQ ID NO: 4093612 - DNA, 25 bp, Homo sapien
agcagcaacagctgtgtaggactgg

SEQ ID NO: 4093613 - DNA, 25 bp, Homo sapien
tcttgcagctcacacaagtccacat

SEQ ID NO: 4093614 - DNA, 25 bp, Homo sapien
tgcagctcacacaagtccacattct

SEQ ID NO: 4093615 - DNA, 25 bp, Homo sapien
tacccctcttgcagctcacacaagt

SEQ ID NO: 4093616 - DNA, 25 bp, Homo sapien
cattctccaaattaaactcggtctt

SEQ ID NO: 4093617 - DNA, 25 bp, Homo sapien
gagagttcattgttgcaaagcttgg

SEQ ID NO: 4093618 - DNA, 25 bp, Homo sapien
cggtctcttccagcaaggagagttc

SEQ ID NO: 4093619 - DNA, 25 bp, Homo sapien
caaggagagttcattgttgcaaagc

SEQ ID NO: 4093620 - DNA, 25 bp, Homo sapien
tgttagaggtgggcggtctcttcca

SEQ ID NO: 4093621 - DNA, 25 bp, Homo sapien
ccagagaccttatgcaagcaccatt

SEQ ID NO: 4093622 - DNA, 25 bp, Homo sapien
cagatgtgccaggacatgaatgcag

SEQ ID NO: 4093623 - DNA, 25 bp, Homo sapien
gggccagatgatttgctacaaaact

SEQ ID NO: 4093624 - DNA, 25 bp, Homo sapien
gaacaggtgcaaccccagattggct

SEQ ID NO: 4093625 - DNA, 25 bp, Homo sapien
ccttgaatcaaacaacagggtcaga

SEQ ID NO: 4093626 - DNA, 25 bp, Homo sapien
tggctatatccaaacacctgcagag

SEQ ID NO: 4093627 - DNA, 25 bp, Homo sapien
gctgccattctgatctgtagatatg

SEQ ID NO: 4093628 - DNA, 25 bp, Homo sapien
ttttctagaaggttggtctgggcac

SEQ ID NO: 4093629 - DNA, 25 bp, Homo sapien
ttacaataccccatgtccaacgatg

SEQ ID NO: 4093630 - DNA, 25 bp, Homo sapien
tccaaccgaacgcaaagtctcctgg

SEQ ID NO: 4093631 - DNA, 25 bp, Homo sapien
cgagcaaaatacagtaagcagtggg

SEQ ID NO: 4093632 - DNA, 25 bp, Homo sapien
gcgtgaaacccgtgtgcagactcga

SEQ ID NO: 4093633 - DNA, 25 bp, Homo sapien
gtcacctctgacttatctcacaggg

SEQ ID NO: 4093634 - DNA, 25 bp, Homo sapien
gaggtgagccctgacccacgggctt

SEQ ID NO: 4093635 - DNA, 25 bp, Homo sapien
tccagaggtgagccctgacccacgg

SEQ ID NO: 4093636 - DNA, 25 bp, Homo sapien
ctcagaagtggcctccagaggtgag

SEQ ID NO: 4093637 - DNA, 25 bp, Homo sapien
tcagaagtggcctccagaggtgagc

SEQ ID NO: 4093638 - DNA, 25 bp, Homo sapien
catactctatattccccttgaagaa

SEQ ID NO: 4093639 - DNA, 25 bp, Homo sapien
gcatactctatattccccttgaaga

SEQ ID NO: 4093640 - DNA, 25 bp, Homo sapien
tgcatactctatattccccttgaag

SEQ ID NO: 4093641 - DNA, 25 bp, Homo sapien
ctgcatactctatattccccttgaa

SEQ ID NO: 4093642 - DNA, 25 bp, Homo sapien
ttaaatgatgactattgcagttttc

SEQ ID NO: 4093643 - DNA, 25 bp, Homo sapien
tccggacacagttccataactttaa

SEQ ID NO: 4093644 - DNA, 25 bp, Homo sapien
taactttaaatgatgactattgcag

SEQ ID NO: 4093645 - DNA, 25 bp, Homo sapien
tgactattgcagttttcataaataa

SEQ ID NO: 4093646 - DNA, 25 bp, Homo sapien
acagctcataaaggtggcgtggacc

SEQ ID NO: 4093647 - DNA, 25 bp, Homo sapien
agacctttgcggtgttacagctcat

SEQ ID NO: 4093648 - DNA, 25 bp, Homo sapien
ctgcagacctttgcggtgttacagc

SEQ ID NO: 4093649 - DNA, 25 bp, Homo sapien
gacctttgcggtgttacagctcata

SEQ ID NO: 4093650 - DNA, 25 bp, Homo sapien
caattgctgttatcttcctgttgaa

SEQ ID NO: 4093651 - DNA, 25 bp, Homo sapien
tgtcagcctgcgtccagaattggtg

SEQ ID NO: 4093652 - DNA, 25 bp, Homo sapien
tgttttcaacccttcactgtcagcc

SEQ ID NO: 4093653 - DNA, 25 bp, Homo sapien
taatttgtgctatataagaatggcc

SEQ ID NO: 4093654 - DNA, 25 bp, Homo sapien
gctttccaggtcgtgcatgttgtga

SEQ ID NO: 4093655 - DNA, 25 bp, Homo sapien
caggtcgtgcatgttgtgatttcca

SEQ ID NO: 4093656 - DNA, 25 bp, Homo sapien
tttgctttccaggtcgtgcatgttg

SEQ ID NO: 4093657 - DNA, 25 bp, Homo sapien
agcatttgctttccaggtcgtgcat

SEQ ID NO: 4093658 - DNA, 25 bp, Homo sapien
tagttattaagctaattagggaggc

SEQ ID NO: 4093659 - DNA, 25 bp, Homo sapien
aattagggaggcaccagagaaaggt

SEQ ID NO: 4093660 - DNA, 25 bp, Homo sapien
gctaattagggaggcaccagagaaa

SEQ ID NO: 4093661 - DNA, 25 bp, Homo sapien
agttattaagctaattagggaggca

SEQ ID NO: 4093662 - DNA, 25 bp, Homo sapien
ctgctcaccagcagtggatccaaac

SEQ ID NO: 4093663 - DNA, 25 bp, Homo sapien
tccaaaccaagaagaaatccctgac

SEQ ID NO: 4093664 - DNA, 25 bp, Homo sapien
gatccaaaccaagaagaaatccctg

SEQ ID NO: 4093665 - DNA, 25 bp, Homo sapien
caaaccaagaagaaatccctgactt

SEQ ID NO: 4093666 - DNA, 25 bp, Homo sapien
tattctcatgggaggtctagggccg

SEQ ID NO: 4093667 - DNA, 25 bp, Homo sapien
tctgactcagacaaagcagtgtgcg

SEQ ID NO: 4093668 - DNA, 25 bp, Homo sapien
gaagtttccgacattacctagagct

SEQ ID NO: 4093669 - DNA, 25 bp, Homo sapien
tgagaccagcccttcagattacgtg

SEQ ID NO: 4093670 - DNA, 25 bp, Homo sapien
catgcttcatcagcctatcagccat

SEQ ID NO: 4093671 - DNA, 25 bp, Homo sapien
tgtcctgcccttccatattccttat

SEQ ID NO: 4093672 - DNA, 25 bp, Homo sapien
taactgcccctcttatagtttctct

SEQ ID NO: 4093673 - DNA, 25 bp, Homo sapien
cccaggtggtcgaagttacagtgag

SEQ ID NO: 4093674 - DNA, 25 bp, Homo sapien
acaccactgcactactatactccag
